United States Patent Application Publication US 2011/0177960 A1 - sequence listing, part 20

SEQ ID NO: 349189 - DNA, 25 bp, Artificial
  probe
  misc_feature (1)..(25): SEQ ID NO: 3198; WAN024AML; Start 3; Stop 27
aggttctaggtcttcagattgattt

SEQ ID NO: 349190 - DNA, 25 bp, Artificial
  probe
  misc_feature (1)..(25): SEQ ID NO: 3198; WAN024AML; Start 72; Stop 96
ttgacattctcttctaagggtgtat

SEQ ID NO: 349191 - DNA, 25 bp, Artificial
  probe
  misc_feature (1)..(25): SEQ ID NO: 3198; WAN024AML; Start 70; Stop 94
tcttgacattctcttctaagggtgt

SEQ ID NO: 349192 - DNA, 25 bp, Artificial
  probe
  misc_feature (1)..(25): SEQ ID NO: 3198; WAN024AML; Start 73; Stop 97
tgacattctcttctaagggtgtata

SEQ ID NO: 349193 - DNA, 25 bp, Artificial
  probe
  misc_feature (1)..(25): SEQ ID NO: 3198; WAN024AML; Start 67; Stop 91
ttgtcttgacattctcttctaaggg

SEQ ID NO: 349194 - DNA, 25 bp, Artificial
  probe
  misc_feature (1)..(25): SEQ ID NO: 3198; WAN024AML; Start 68; Stop 92
tgtcttgacattctcttctaagggt

SEQ ID NO: 349195 - DNA, 25 bp, Artificial
  probe
  misc_feature (1)..(25): SEQ ID NO: 3198; WAN024AML; Start 66; Stop 90
tttgtcttgacattctcttctaagg

SEQ ID NO: 349196 - DNA, 25 bp, Artificial
  probe
  misc_feature (1)..(25): SEQ ID NO: 3198; WAN024AML; Start 74; Stop 98
gacattctcttctaagggtgtataa

SEQ ID NO: 349197 - DNA, 25 bp, Artificial
  probe
  misc_feature (1)..(25): SEQ ID NO: 3198; WAN024AML; Start 75; Stop 99
acattctcttctaagggtgtataat

SEQ ID NO: 349198 - DNA, 25 bp, Artificial
  probe
  misc_feature (1)..(25): SEQ ID NO: 3198; WAN024AML; Start 4; Stop 28
ggttctaggtcttcagattgatttt

SEQ ID NO: 349199 - DNA, 25 bp, Artificial
  probe
  misc_feature (1)..(25): SEQ ID NO: 3198; WAN024AML; Start 76; Stop 100
cattctcttctaagggtgtataata

SEQ ID NO: 349200 - DNA, 25 bp, Artificial
  probe
  misc_feature (1)..(25): SEQ ID NO: 3198; WAN024AML; Start 78; Stop 102
ttctcttctaagggtgtataataga

SEQ ID NO: 349201 - DNA, 25 bp, Artificial
  probe
  misc_feature (1)..(25): SEQ ID NO: 3198; WAN024AML; Start 77; Stop 101
attctcttctaagggtgtataatag

SEQ ID NO: 349202 - DNA, 25 bp, Artificial
  probe
  misc_feature (1)..(25): SEQ ID NO: 3198; WAN024AML; Start 65; Stop 89
ttttgtcttgacattctcttctaag

SEQ ID NO: 349203 - DNA, 25 bp, Artificial
  probe
  misc_feature (1)..(25): SEQ ID NO: 3198; WAN024AML; Start 79; Stop 103
tctcttctaagggtgtataatagaa

SEQ ID NO: 349204 - DNA, 25 bp, Artificial
  probe
  misc_feature (1)..(25): SEQ ID NO: 3198; WAN024AML; Start 82; Stop 106
cttctaagggtgtataatagaatca

SEQ ID NO: 349205 - DNA, 25 bp, Artificial
  probe
  misc_feature (1)..(25): SEQ ID NO: 3198; WAN024AML; Start 81; Stop 105
tcttctaagggtgtataatagaatc

SEQ ID NO: 349206 - DNA, 25 bp, Artificial
  probe
  misc_feature (1)..(25): SEQ ID NO: 3198; WAN024AML; Start 80; Stop 104
ctcttctaagggtgtataatagaat

SEQ ID NO: 349207 - DNA, 25 bp, Artificial
  probe
  misc_feature (1)..(25): SEQ ID NO: 3199; WAN024ANC; Start 17; Stop 41
actttgctagaaattgatttggctt

SEQ ID NO: 349208 - DNA, 25 bp, Artificial
  probe
  misc_feature (1)..(25): SEQ ID NO: 3199; WAN024ANC; Start 16; Stop 40
aactttgctagaaattgatttggct

SEQ ID NO: 349209 - DNA, 25 bp, Artificial
  probe
  misc_feature (1)..(25): SEQ ID NO: 3199; WAN024ANC; Start 15; Stop 39
aaactttgctagaaattgatttggc

SEQ ID NO: 349210 - DNA, 25 bp, Artificial
  probe
  misc_feature (1)..(25): SEQ ID NO: 3199; WAN024ANC; Start 18; Stop 42
ctttgctagaaattgatttggcttt

SEQ ID NO: 349211 - DNA, 25 bp, Artificial
  probe
  misc_feature (1)..(25): SEQ ID NO: 3199; WAN024ANC; Start 27; Stop 51
aaattgatttggctttccgaattaa

SEQ ID NO: 349212 - DNA, 25 bp, Artificial
  probe
  misc_feature (1)..(25): SEQ ID NO: 3199; WAN024ANC; Start 25; Stop 49
agaaattgatttggctttccgaatt

SEQ ID NO: 349213 - DNA, 25 bp, Artificial
  probe
  misc_feature (1)..(25): SEQ ID NO: 3199; WAN024ANC; Start 23; Stop 47
ctagaaattgatttggctttccgaa

SEQ ID NO: 349214 - DNA, 25 bp, Artificial
  probe
  misc_feature (1)..(25): SEQ ID NO: 3199; WAN024ANC; Start 24; Stop 48
tagaaattgatttggctttccgaat

SEQ ID NO: 349215 - DNA, 25 bp, Artificial
  probe
  misc_feature (1)..(25): SEQ ID NO: 3199; WAN024ANC; Start 20; Stop 44
ttgctagaaattgatttggctttcc

SEQ ID NO: 349216 - DNA, 25 bp, Artificial
  probe
  misc_feature (1)..(25): SEQ ID NO: 3199; WAN024ANC; Start 19; Stop 43
tttgctagaaattgatttggctttc

SEQ ID NO: 349217 - DNA, 25 bp, Artificial
  probe
  misc_feature (1)..(25): SEQ ID NO: 3199; WAN024ANC; Start 26; Stop 50
gaaattgatttggctttccgaatta

SEQ ID NO: 349218 - DNA, 25 bp, Artificial
  probe
  misc_feature (1)..(25): SEQ ID NO: 3199; WAN024ANC; Start 28; Stop 52
aattgatttggctttccgaattaat

SEQ ID NO: 349219 - DNA, 25 bp, Artificial
  probe
  misc_feature (1)..(25): SEQ ID NO: 3199; WAN024ANC; Start 22; Stop 46
gctagaaattgatttggctttccga

SEQ ID NO: 349220 - DNA, 25 bp, Artificial
  probe
  misc_feature (1)..(25): SEQ ID NO: 3199; WAN024ANC; Start 21; Stop 45
tgctagaaattgatttggctttccg

SEQ ID NO: 349221 - DNA, 25 bp, Artificial
  probe
  misc_feature (1)..(25): SEQ ID NO: 3199; WAN024ANC; Start 36; Stop 60
tggctttccgaattaatttgttcaa

SEQ ID NO: 349222 - DNA, 25 bp, Artificial
  probe
  misc_feature (1)..(25): SEQ ID NO: 3199; WAN024ANC; Start 35; Stop 59
ttggctttccgaattaatttgttca

SEQ ID NO: 349223 - DNA, 25 bp, Artificial
  probe
  misc_feature (1)..(25): SEQ ID NO: 3199; WAN024ANC; Start 32; Stop 56
gatttggctttccgaattaatttgt

SEQ ID NO: 349224 - DNA, 25 bp, Artificial
  probe
  misc_feature (1)..(25): SEQ ID NO: 3199; WAN024ANC; Start 31; Stop 55
tgatttggctttccgaattaatttg

SEQ ID NO: 349225 - DNA, 25 bp, Artificial
  probe
  misc_feature (1)..(25): SEQ ID NO: 3199; WAN024ANC; Start 37; Stop 61
ggctttccgaattaatttgttcaaa

SEQ ID NO: 349226 - DNA, 25 bp, Artificial
  probe
  misc_feature (1)..(25): SEQ ID NO: 3199; WAN024ANC; Start 34; Stop 58
tttggctttccgaattaatttgttc

SEQ ID NO: 349227 - DNA, 25 bp, Artificial
  probe
  misc_feature (1)..(25): SEQ ID NO: 3199; WAN024ANC; Start 33; Stop 57
atttggctttccgaattaatttgtt

SEQ ID NO: 349228 - DNA, 25 bp, Artificial
  probe
  misc_feature (1)..(25): SEQ ID NO: 3199; WAN024ANC; Start 30; Stop 54
ttgatttggctttccgaattaattt

SEQ ID NO: 349229 - DNA, 25 bp, Artificial
  probe
  misc_feature (1)..(25): SEQ ID NO: 3199; WAN024ANC; Start 29; Stop 53
attgatttggctttccgaattaatt

SEQ ID NO: 349230 - DNA, 25 bp, Artificial
  probe
  misc_feature (1)..(25): SEQ ID NO: 3199; WAN024ANC; Start 14; Stop 38
aaaactttgctagaaattgatttgg

SEQ ID NO: 349231 - DNA, 25 bp, Artificial
  probe
  misc_feature (1)..(25): SEQ ID NO: 3199; WAN024ANC; Start 8; Stop 32
gttcctaaaactttgctagaaattg

SEQ ID NO: 349232 - DNA, 25 bp, Artificial
  probe
  misc_feature (1)..(25): SEQ ID NO: 3199; WAN024ANC; Start 9; Stop 33
ttcctaaaactttgctagaaattga

SEQ ID NO: 349233 - DNA, 25 bp, Artificial
  probe
  misc_feature (1)..(25): SEQ ID NO: 3199; WAN024ANC; Start 10; Stop 34
tcctaaaactttgctagaaattgat

SEQ ID NO: 349234 - DNA, 25 bp, Artificial
  probe
  misc_feature (1)..(25): SEQ ID NO: 3199; WAN024ANC; Start 4; Stop 28
tccagttcctaaaactttgctagaa

SEQ ID NO: 349235 - DNA, 25 bp, Artificial
  probe
  misc_feature (1)..(25): SEQ ID NO: 3199; WAN024ANC; Start 3; Stop 27
atccagttcctaaaactttgctaga

SEQ ID NO: 349236 - DNA, 25 bp, Artificial
  probe
  misc_feature (1)..(25): SEQ ID NO: 3199; WAN024ANC; Start 1; Stop 25
caatccagttcctaaaactttgcta

SEQ ID NO: 349237 - DNA, 25 bp, Artificial
  probe
  misc_feature (1)..(25): SEQ ID NO: 3199; WAN024ANC; Start 5; Stop 29
ccagttcctaaaactttgctagaaa

SEQ ID NO: 349238 - DNA, 25 bp, Artificial
  probe
  misc_feature (1)..(25): SEQ ID NO: 3199; WAN024ANC; Start 38; Stop 62
gctttccgaattaatttgttcaaat

SEQ ID NO: 349239 - DNA, 25 bp, Artificial
  probe
  misc_feature (1)..(25): SEQ ID NO: 3199; WAN024ANC; Start 2; Stop 26
aatccagttcctaaaactttgctag

SEQ ID NO: 349240 - DNA, 25 bp, Artificial
  probe
  misc_feature (1)..(25): SEQ ID NO: 3200; WAN024A6B; Start 136; Stop 160
tctcataacactagacttcttctct

SEQ ID NO: 349241 - DNA, 25 bp, Artificial
  probe
  misc_feature (1)..(25): SEQ ID NO: 3200; WAN024A6B; Start 135; Stop 159
atctcataacactagacttcttctc

SEQ ID NO: 349242 - DNA, 25 bp, Artificial
  probe
  misc_feature (1)..(25): SEQ ID NO: 3200; WAN024A6B; Start 114; Stop 138
cccagtgttaggagctttaatatct

SEQ ID NO: 349243 - DNA, 25 bp, Artificial
  probe
  misc_feature (1)..(25): SEQ ID NO: 3200; WAN024A6B; Start 113; Stop 137
gcccagtgttaggagctttaatatc

SEQ ID NO: 349244 - DNA, 25 bp, Artificial
  probe
  misc_feature (1)..(25): SEQ ID NO: 3200; WAN024A6B; Start 137; Stop 161
ctcataacactagacttcttctcta

SEQ ID NO: 349245 - DNA, 25 bp, Artificial
  probe
  misc_feature (1)..(25): SEQ ID NO: 3200; WAN024A6B; Start 134; Stop 158
tatctcataacactagacttcttct

SEQ ID NO: 349246 - DNA, 25 bp, Artificial
  probe
  misc_feature (1)..(25): SEQ ID NO: 3200; WAN024A6B; Start 115; Stop 139
ccagtgttaggagctttaatatctc

SEQ ID NO: 349247 - DNA, 25 bp, Artificial
  probe
  misc_feature (1)..(25): SEQ ID NO: 3200; WAN024A6B; Start 116; Stop 140
cagtgttaggagctttaatatctca

SEQ ID NO: 349248 - DNA, 25 bp, Artificial
  probe
  misc_feature (1)..(25): SEQ ID NO: 3200; WAN024A6B; Start 138; Stop 162
tcataacactagacttcttctctat

SEQ ID NO: 349249 - DNA, 25 bp, Artificial
  probe
  misc_feature (1)..(25): SEQ ID NO: 3200; WAN024A6B; Start 139; Stop 163
cataacactagacttcttctctatc

SEQ ID NO: 349250 - DNA, 25 bp, Artificial
  probe
  misc_feature (1)..(25): SEQ ID NO: 3200; WAN024A6B; Start 96; Stop 120
agaaattctaaacaaaagcccagtg

SEQ ID NO: 349251 - DNA, 25 bp, Artificial
  probe
  misc_feature (1)..(25): SEQ ID NO: 3200; WAN024A6B; Start 95; Stop 119
aagaaattctaaacaaaagcccagt

SEQ ID NO: 349252 - DNA, 25 bp, Artificial
  probe
  misc_feature (1)..(25): SEQ ID NO: 3200; WAN024A6B; Start 97; Stop 121
gaaattctaaacaaaagcccagtgt

SEQ ID NO: 349253 - DNA, 25 bp, Artificial
  probe
  misc_feature (1)..(25): SEQ ID NO: 3200; WAN024A6B; Start 133; Stop 157
atatctcataacactagacttcttc

SEQ ID NO: 349254 - DNA, 25 bp, Artificial
  probe
  misc_feature (1)..(25): SEQ ID NO: 3200; WAN024A6B; Start 123; Stop 147
aggagctttaatatctcataacact

SEQ ID NO: 349255 - DNA, 25 bp, Artificial
  probe
  misc_feature (1)..(25): SEQ ID NO: 3200; WAN024A6B; Start 117; Stop 141
agtgttaggagctttaatatctcat

SEQ ID NO: 349256 - DNA, 25 bp, Artificial
  probe
  misc_feature (1)..(25): SEQ ID NO: 3200; WAN024A6B; Start 94; Stop 118
aaagaaattctaaacaaaagcccag

SEQ ID NO: 349257 - DNA, 25 bp, Artificial
  probe
  misc_feature (1)..(25): SEQ ID NO: 3200; WAN024A6B; Start 112; Stop 136
agcccagtgttaggagctttaatat

SEQ ID NO: 349258 - DNA, 25 bp, Artificial
  probe
  misc_feature (1)..(25): SEQ ID NO: 3200; WAN024A6B; Start 93; Stop 117
aaaagaaattctaaacaaaagccca

SEQ ID NO: 349259 - DNA, 25 bp, Artificial
  probe
  misc_feature (1)..(25): SEQ ID NO: 3200; WAN024A6B; Start 92; Stop 116
gaaaagaaattctaaacaaaagccc

SEQ ID NO: 349260 - DNA, 25 bp, Artificial
  probe
  misc_feature (1)..(25): SEQ ID NO: 3200; WAN024A6B; Start 132; Stop 156
aatatctcataacactagacttctt

SEQ ID NO: 349261 - DNA, 25 bp, Artificial
  probe
  misc_feature (1)..(25): SEQ ID NO: 3200; WAN024A6B; Start 124; Stop 148
ggagctttaatatctcataacacta

SEQ ID NO: 349262 - DNA, 25 bp, Artificial
  probe
  misc_feature (1)..(25): SEQ ID NO: 3200; WAN024A6B; Start 122; Stop 146
taggagctttaatatctcataacac

SEQ ID NO: 349263 - DNA, 25 bp, Artificial
  probe
  misc_feature (1)..(25): SEQ ID NO: 3200; WAN024A6B; Start 118; Stop 142
gtgttaggagctttaatatctcata

SEQ ID NO: 349264 - DNA, 25 bp, Artificial
  probe
  misc_feature (1)..(25): SEQ ID NO: 3200; WAN024A6B; Start 127; Stop 151
gctttaatatctcataacactagac

SEQ ID NO: 349265 - DNA, 25 bp, Artificial
  probe
  misc_feature (1)..(25): SEQ ID NO: 3200; WAN024A6B; Start 98; Stop 122
aaattctaaacaaaagcccagtgtt

SEQ ID NO: 349266 - DNA, 25 bp, Artificial
  probe
  misc_feature (1)..(25): SEQ ID NO: 3200; WAN024A6B; Start 100; Stop 124
attctaaacaaaagcccagtgttag

SEQ ID NO: 349267 - DNA, 25 bp, Artificial
  probe
  misc_feature (1)..(25): SEQ ID NO: 3200; WAN024A6B; Start 99; Stop 123
aattctaaacaaaagcccagtgtta

SEQ ID NO: 349268 - DNA, 25 bp, Artificial
  probe
  misc_feature (1)..(25): SEQ ID NO: 3200; WAN024A6B; Start 22; Stop 46
tgatgtttaaatattggcattactt

SEQ ID NO: 349269 - DNA, 25 bp, Artificial
  probe
  misc_feature (1)..(25): SEQ ID NO: 3200; WAN024A6B; Start 101; Stop 125
ttctaaacaaaagcccagtgttagg

SEQ ID NO: 349270 - DNA, 25 bp, Artificial
  probe
  misc_feature (1)..(25): SEQ ID NO: 3200; WAN024A6B; Start 21; Stop 45
atgatgtttaaatattggcattact

SEQ ID NO: 349271 - DNA, 25 bp, Artificial
  probe
  misc_feature (1)..(25): SEQ ID NO: 3200; WAN024A6B; Start 17; Stop 41
actaatgatgtttaaatattggcat

SEQ ID NO: 349272 - DNA, 25 bp, Artificial
  probe
  misc_feature (1)..(25): SEQ ID NO: 3200; WAN024A6B; Start 103; Stop 127
ctaaacaaaagcccagtgttaggag

SEQ ID NO: 349273 - DNA, 25 bp, Artificial
  probe
  misc_feature (1)..(25): SEQ ID NO: 3201; WAN0249U4; Start 377; Stop 401
aacagaagtttagtgggtgagattt

SEQ ID NO: 349274 - DNA, 25 bp, Artificial
  probe
  misc_feature (1)..(25): SEQ ID NO: 3201; WAN0249U4; Start 376; Stop 400
taacagaagtttagtgggtgagatt

SEQ ID NO: 349275 - DNA, 25 bp, Artificial
  probe
  misc_feature (1)..(25): SEQ ID NO: 3201; WAN0249U4; Start 375; Stop 399
ttaacagaagtttagtgggtgagat

SEQ ID NO: 349276 - DNA, 25 bp, Artificial
  probe
  misc_feature (1)..(25): SEQ ID NO: 3201; WAN0249U4; Start 374; Stop 398
attaacagaagtttagtgggtgaga

SEQ ID NO: 349277 - DNA, 25 bp, Artificial
  probe
  misc_feature (1)..(25): SEQ ID NO: 3201; WAN0249U4; Start 372; Stop 396
gtattaacagaagtttagtgggtga

SEQ ID NO: 349278 - DNA, 25 bp, Artificial
  probe
  misc_feature (1)..(25): SEQ ID NO: 3201; WAN0249U4; Start 371; Stop 395
agtattaacagaagtttagtgggtg

SEQ ID NO: 349279 - DNA, 25 bp, Artificial
  probe
  misc_feature (1)..(25): SEQ ID NO: 3201; WAN0249U4; Start 373; Stop 397
tattaacagaagtttagtgggtgag

SEQ ID NO: 349280 - DNA, 25 bp, Artificial
  probe
  misc_feature (1)..(25): SEQ ID NO: 3201; WAN0249U4; Start 459; Stop 483
aaactcctataacatctttccgaaa

SEQ ID NO: 349281 - DNA, 25 bp, Artificial
  probe
  misc_feature (1)..(25): SEQ ID NO: 3201; WAN0249U4; Start 69; Stop 93
ggaggaaagcaatatttataccaga

SEQ ID NO: 349282 - DNA, 25 bp, Artificial
  probe
  misc_feature (1)..(25): SEQ ID NO: 3201; WAN0249U4; Start 223; Stop 247
aaacgaaacaagaacagggcaaatc

SEQ ID NO: 349283 - DNA, 25 bp, Artificial
  probe
  misc_feature (1)..(25): SEQ ID NO: 3201; WAN0249U4; Start 23; Stop 47
tttatccgtgatatgttagatttgc

SEQ ID NO: 349284 - DNA, 25 bp, Artificial
  probe
  misc_feature (1)..(25): SEQ ID NO: 3201; WAN0249U4; Start 346; Stop 370
tccttatatagctcttcagttatgt

SEQ ID NO: 349285 - DNA, 25 bp, Artificial
  probe
  misc_feature (1)..(25): SEQ ID NO: 3201; WAN0249U4; Start 370; Stop 394
tagtattaacagaagtttagtgggt

SEQ ID NO: 349286 - DNA, 25 bp, Artificial
  probe
  misc_feature (1)..(25): SEQ ID NO: 3201; WAN0249U4; Start 71; Stop 95
aggaaagcaatatttataccagact

SEQ ID NO: 349287 - DNA, 25 bp, Artificial
  probe
  misc_feature (1)..(25): SEQ ID NO: 3201; WAN0249U4; Start 356; Stop 380
gctcttcagttatgtagtattaaca

SEQ ID NO: 349288 - DNA, 25 bp, Artificial
  probe
  misc_feature (1)..(25): SEQ ID NO: 3201; WAN0249U4; Start 70; Stop 94
gaggaaagcaatatttataccagac

SEQ ID NO: 349289 - DNA, 25 bp, Artificial
  probe
  misc_feature (1)..(25): SEQ ID NO: 3201; WAN0249U4; Start 378; Stop 402
acagaagtttagtgggtgagatttt

SEQ ID NO: 349290 - DNA, 25 bp, Artificial
  probe
  misc_feature (1)..(25): SEQ ID NO: 3201; WAN0249U4; Start 369; Stop 393
gtagtattaacagaagtttagtggg

SEQ ID NO: 349291 - DNA, 25 bp, Artificial
  probe
  misc_feature (1)..(25): SEQ ID NO: 3201; WAN0249U4; Start 217; Stop 241
atagtaaaacgaaacaagaacaggg

SEQ ID NO: 349292 - DNA, 25 bp, Artificial
  probe
  misc_feature (1)..(25): SEQ ID NO: 3201; WAN0249U4; Start 419; Stop 443
ctgttttgtttgtaggtctaagtct

SEQ ID NO: 349293 - DNA, 25 bp, Artificial
  probe
  misc_feature (1)..(25): SEQ ID NO: 3201; WAN0249U4; Start 418; Stop 442
tctgttttgtttgtaggtctaagtc

SEQ ID NO: 349294 - DNA, 25 bp, Artificial
  probe
  misc_feature (1)..(25): SEQ ID NO: 3201; WAN0249U4; Start 68; Stop 92
tggaggaaagcaatatttataccag

SEQ ID NO: 349295 - DNA, 25 bp, Artificial
  probe
  misc_feature (1)..(25): SEQ ID NO: 3201; WAN0249U4; Start 344; Stop 368
gctccttatatagctcttcagttat

SEQ ID NO: 349296 - DNA, 25 bp, Artificial
  probe
  misc_feature (1)..(25): SEQ ID NO: 3201; WAN0249U4; Start 345; Stop 369
ctccttatatagctcttcagttatg

SEQ ID NO: 349297 - DNA, 25 bp, Artificial
  probe
  misc_feature (1)..(25): SEQ ID NO: 3201; WAN0249U4; Start 7; Stop 31
agaaatcacttgttaatttatccgt

SEQ ID NO: 349298 - DNA, 25 bp, Artificial
  probe
  misc_feature (1)..(25): SEQ ID NO: 3201; WAN0249U4; Start 6; Stop 30
cagaaatcacttgttaatttatccg

SEQ ID NO: 349299 - DNA, 25 bp, Artificial
  probe
  misc_feature (1)..(25): SEQ ID NO: 3201; WAN0249U4; Start 417; Stop 441
ttctgttttgtttgtaggtctaagt

SEQ ID NO: 349300 - DNA, 25 bp, Artificial
  probe
  misc_feature (1)..(25): SEQ ID NO: 3201; WAN0249U4; Start 420; Stop 444
tgttttgtttgtaggtctaagtctt

SEQ ID NO: 349301 - DNA, 25 bp, Artificial
  probe
  misc_feature (1)..(25): SEQ ID NO: 3201; WAN0249U4; Start 67; Stop 91
ttggaggaaagcaatatttatacca

SEQ ID NO: 349302 - DNA, 25 bp, Artificial
  probe
  misc_feature (1)..(25): SEQ ID NO: 3201; WAN0249U4; Start 66; Stop 90
tttggaggaaagcaatatttatacc

SEQ ID NO: 349303 - DNA, 25 bp, Artificial
  probe
  misc_feature (1)..(25): SEQ ID NO: 3201; WAN0249U4; Start 8; Stop 32
gaaatcacttgttaatttatccgtg

SEQ ID NO: 349304 - DNA, 25 bp, Artificial
  probe
  misc_feature (1)..(25): SEQ ID NO: 3201; WAN0249U4; Start 218; Stop 242
tagtaaaacgaaacaagaacagggc

SEQ ID NO: 349305 - DNA, 25 bp, Artificial
  probe
  misc_feature (1)..(25): SEQ ID NO: 3201; WAN0249U4; Start 458; Stop 482
aaaactcctataacatctttccgaa

SEQ ID NO: 349306 - DNA, 25 bp, Artificial
  probe
  misc_feature (1)..(25): SEQ ID NO: 3202; WAN024AOC; Start 6; Stop 30
cttattcctttatttcagctcttgc

SEQ ID NO: 349307 - DNA, 25 bp, Artificial
  probe
  misc_feature (1)..(25): SEQ ID NO: 3202; WAN024AOC; Start 7; Stop 31
ttattcctttatttcagctcttgca

SEQ ID NO: 349308 - DNA, 25 bp, Artificial
  probe
  misc_feature (1)..(25): SEQ ID NO: 3202; WAN024AOC; Start 32; Stop 56
atattcccaaacagccttgaggttg

SEQ ID NO: 349309 - DNA, 25 bp, Artificial
  probe
  misc_feature (1)..(25): SEQ ID NO: 3202; WAN024AOC; Start 31; Stop 55
aatattcccaaacagccttgaggtt

SEQ ID NO: 349310 - DNA, 25 bp, Artificial
  probe
  misc_feature (1)..(25): SEQ ID NO: 3202; WAN024AOC; Start 5; Stop 29
tcttattcctttatttcagctcttg

SEQ ID NO: 349311 - DNA, 25 bp, Artificial
  probe
  misc_feature (1)..(25): SEQ ID NO: 3202; WAN024AOC; Start 30; Stop 54
caatattcccaaacagccttgaggt

SEQ ID NO: 349312 - DNA, 25 bp, Artificial
  probe
  misc_feature (1)..(25): SEQ ID NO: 3202; WAN024AOC; Start 4; Stop 28
ttcttattcctttatttcagctctt

SEQ ID NO: 349313 - DNA, 25 bp, Artificial
  probe
  misc_feature (1)..(25): SEQ ID NO: 3202; WAN024AOC; Start 3; Stop 27
attcttattcctttatttcagctct

SEQ ID NO: 349314 - DNA, 25 bp, Artificial
  probe
  misc_feature (1)..(25): SEQ ID NO: 3202; WAN024AOC; Start 9; Stop 33
attcctttatttcagctcttgcaat

SEQ ID NO: 349315 - DNA, 25 bp, Artificial
  probe
  misc_feature (1)..(25): SEQ ID NO: 3202; WAN024AOC; Start 8; Stop 32
tattcctttatttcagctcttgcaa

SEQ ID NO: 349316 - DNA, 25 bp, Artificial
  probe
  misc_feature (1)..(25): SEQ ID NO: 3202; WAN024AOC; Start 15; Stop 39
ttatttcagctcttgcaatattccc

SEQ ID NO: 349317 - DNA, 25 bp, Artificial
  probe
  misc_feature (1)..(25): SEQ ID NO: 3202; WAN024AOC; Start 33; Stop 57
tattcccaaacagccttgaggttgt

SEQ ID NO: 349318 - DNA, 25 bp, Artificial
  probe
  misc_feature (1)..(25): SEQ ID NO: 3202; WAN024AOC; Start 16; Stop 40
tatttcagctcttgcaatattccca

SEQ ID NO: 349319 - DNA, 25 bp, Artificial
  probe
  misc_feature (1)..(25): SEQ ID NO: 3202; WAN024AOC; Start 28; Stop 52
tgcaatattcccaaacagccttgag

SEQ ID NO: 349320 - DNA, 25 bp, Artificial
  probe
  misc_feature (1)..(25): SEQ ID NO: 3202; WAN024AOC; Start 1; Stop 25
caattcttattcctttatttcagct

SEQ ID NO: 349321 - DNA, 25 bp, Artificial
  probe
  misc_feature (1)..(25): SEQ ID NO: 3202; WAN024AOC; Start 10; Stop 34
ttcctttatttcagctcttgcaata

SEQ ID NO: 349322 - DNA, 25 bp, Artificial
  probe
  misc_feature (1)..(25): SEQ ID NO: 3202; WAN024AOC; Start 11; Stop 35
tcctttatttcagctcttgcaatat

SEQ ID NO: 349323 - DNA, 25 bp, Artificial
  probe
  misc_feature (1)..(25): SEQ ID NO: 3202; WAN024AOC; Start 17; Stop 41
atttcagctcttgcaatattcccaa

SEQ ID NO: 349324 - DNA, 25 bp, Artificial
  probe
  misc_feature (1)..(25): SEQ ID NO: 3202; WAN024AOC; Start 18; Stop 42
tttcagctcttgcaatattcccaaa

SEQ ID NO: 349325 - DNA, 25 bp, Artificial
  probe
  misc_feature (1)..(25): SEQ ID NO: 3202; WAN024AOC; Start 29; Stop 53
gcaatattcccaaacagccttgagg

SEQ ID NO: 349326 - DNA, 25 bp, Artificial
  probe
  misc_feature (1)..(25): SEQ ID NO: 3202; WAN024AOC; Start 14; Stop 38
tttatttcagctcttgcaatattcc

SEQ ID NO: 349327 - DNA, 25 bp, Artificial
  probe
  misc_feature (1)..(25): SEQ ID NO: 3202; WAN024AOC; Start 12; Stop 36
cctttatttcagctcttgcaatatt

SEQ ID NO: 349328 - DNA, 25 bp, Artificial
  probe
  misc_feature (1)..(25): SEQ ID NO: 3202; WAN024AOC; Start 2; Stop 26
aattcttattcctttatttcagctc

SEQ ID NO: 349329 - DNA, 25 bp, Artificial
  probe
  misc_feature (1)..(25): SEQ ID NO: 3202; WAN024AOC; Start 19; Stop 43
ttcagctcttgcaatattcccaaac

SEQ ID NO: 349330 - DNA, 25 bp, Artificial
  probe
  misc_feature (1)..(25): SEQ ID NO: 3202; WAN024AOC; Start 21; Stop 45
cagctcttgcaatattcccaaacag

SEQ ID NO: 349331 - DNA, 25 bp, Artificial
  probe
  misc_feature (1)..(25): SEQ ID NO: 3202; WAN024AOC; Start 13; Stop 37
ctttatttcagctcttgcaatattc

SEQ ID NO: 349332 - DNA, 25 bp, Artificial
  probe
  misc_feature (1)..(25): SEQ ID NO: 3202; WAN024AOC; Start 20; Stop 44
tcagctcttgcaatattcccaaaca

SEQ ID NO: 349333 - DNA, 25 bp, Artificial
  probe
  misc_feature (1)..(25): SEQ ID NO: 3202; WAN024AOC; Start 26; Stop 50
cttgcaatattcccaaacagccttg

SEQ ID NO: 349334 - DNA, 25 bp, Artificial
  probe
  misc_feature (1)..(25): SEQ ID NO: 3202; WAN024AOC; Start 25; Stop 49
tcttgcaatattcccaaacagcctt

SEQ ID NO: 349335 - DNA, 25 bp, Artificial
  probe
  misc_feature (1)..(25): SEQ ID NO: 3202; WAN024AOC; Start 27; Stop 51
ttgcaatattcccaaacagccttga

SEQ ID NO: 349336 - DNA, 25 bp, Artificial
  probe
  misc_feature (1)..(25): SEQ ID NO: 3202; WAN024AOC; Start 24; Stop 48
ctcttgcaatattcccaaacagcct

SEQ ID NO: 349337 - DNA, 25 bp, Artificial
  probe
  misc_feature (1)..(25): SEQ ID NO: 3202; WAN024AOC; Start 35; Stop 59
ttcccaaacagccttgaggttgtta

SEQ ID NO: 349338 - DNA, 25 bp, Artificial
  probe
  misc_feature (1)..(25): SEQ ID NO: 3202; WAN024AOC; Start 34; Stop 58
attcccaaacagccttgaggttgtt

SEQ ID NO: 349339 - DNA, 25 bp, Artificial
  probe
  misc_feature (1)..(25): SEQ ID NO: 3203; WAN024EW3-M; Start 549; Stop 573
cttgaagataaggacttggttctct

SEQ ID NO: 349340 - DNA, 25 bp, Artificial
  probe
  misc_feature (1)..(25): SEQ ID NO: 3203; WAN024EW3-M; Start 516; Stop 540
ggtatccaagaagaattgacaacag

SEQ ID NO: 349341 - DNA, 25 bp, Artificial
  probe
  misc_feature (1)..(25): SEQ ID NO: 3203; WAN024EW3-M; Start 517; Stop 541
gtatccaagaagaattgacaacagc

SEQ ID NO: 349342 - DNA, 25 bp, Artificial
  probe
  misc_feature (1)..(25): SEQ ID NO: 3203; WAN024EW3-M; Start 548; Stop 572
tcttgaagataaggacttggttctc

SEQ ID NO: 349343 - DNA, 25 bp, Artificial
  probe
  misc_feature (1)..(25): SEQ ID NO: 3203; WAN024EW3-M; Start 518; Stop 542
tatccaagaagaattgacaacagcg

SEQ ID NO: 349344 - DNA, 25 bp, Artificial
  probe
  misc_feature (1)..(25): SEQ ID NO: 3203; WAN024EW3-M; Start 514; Stop 538
ctggtatccaagaagaattgacaac

SEQ ID NO: 349345 - DNA, 25 bp, Artificial
  probe
  misc_feature (1)..(25): SEQ ID NO: 3203; WAN024EW3-M; Start 513; Stop 537
actggtatccaagaagaattgacaa

SEQ ID NO: 349346 - DNA, 25 bp, Artificial
  probe
  misc_feature (1)..(25): SEQ ID NO: 3203; WAN024EW3-M; Start 510; Stop 534
ttgactggtatccaagaagaattga

SEQ ID NO: 349347 - DNA, 25 bp, Artificial
  probe
  misc_feature (1)..(25): SEQ ID NO: 3203; WAN024EW3-M; Start 515; Stop 539
tggtatccaagaagaattgacaaca

SEQ ID NO: 349348 - DNA, 25 bp, Artificial
  probe
  misc_feature (1)..(25): SEQ ID NO: 3203; WAN024EW3-M; Start 512; Stop 536
gactggtatccaagaagaattgaca

SEQ ID NO: 349349 - DNA, 25 bp, Artificial
  probe
  misc_feature (1)..(25): SEQ ID NO: 3203; WAN024EW3-M; Start 511; Stop 535
tgactggtatccaagaagaattgac

SEQ ID NO: 349350 - DNA, 25 bp, Artificial
  probe
  misc_feature (1)..(25): SEQ ID NO: 3203; WAN024EW3-M; Start 235; Stop 259
aatacgatgatgctatggctcttta

SEQ ID NO: 349351 - DNA, 25 bp, Artificial
  probe
  misc_feature (1)..(25): SEQ ID NO: 3203; WAN024EW3-M; Start 230; Stop 254
tatgaaatacgatgatgctatggct

SEQ ID NO: 349352 - DNA, 25 bp, Artificial
  probe
  misc_feature (1)..(25): SEQ ID NO: 3203; WAN024EW3-M; Start 236; Stop 260
atacgatgatgctatggctctttac

SEQ ID NO: 349353 - DNA, 25 bp, Artificial
  probe
  misc_feature (1)..(25): SEQ ID NO: 3203; WAN024EW3-M; Start 47; Stop 71
ctaccaaatcgttaaatgtttccgt

SEQ ID NO: 349354 - DNA, 25 bp, Artificial
  probe
  misc_feature (1)..(25): SEQ ID NO: 3203; WAN024EW3-M; Start 46; Stop 70
actaccaaatcgttaaatgtttccg

SEQ ID NO: 349355 - DNA, 25 bp, Artificial
  probe
  misc_feature (1)..(25): SEQ ID NO: 3203; WAN024EW3-M; Start 41; Stop 65
ccgttactaccaaatcgttaaatgt

SEQ ID NO: 349356 - DNA, 25 bp, Artificial
  probe
  misc_feature (1)..(25): SEQ ID NO: 3203; WAN024EW3-M; Start 40; Stop 64
accgttactaccaaatcgttaaatg

SEQ ID NO: 349357 - DNA, 25 bp, Artificial
  probe
  misc_feature (1)..(25): SEQ ID NO: 3203; WAN024EW3-M; Start 234; Stop 258
aaatacgatgatgctatggctcttt

SEQ ID NO: 349358 - DNA, 25 bp, Artificial
  probe
  misc_feature (1)..(25): SEQ ID NO: 3203; WAN024EW3-M; Start 48; Stop 72
taccaaatcgttaaatgtttccgtg

SEQ ID NO: 349359 - DNA, 25 bp, Artificial
  probe
  misc_feature (1)..(25): SEQ ID NO: 3203; WAN024EW3-M; Start 38; Stop 62
tgaccgttactaccaaatcgttaaa

SEQ ID NO: 349360 - DNA, 25 bp, Artificial
  probe
  misc_feature (1)..(25): SEQ ID NO: 3203; WAN024EW3-M; Start 39; Stop 63
gaccgttactaccaaatcgttaaat

SEQ ID NO: 349361 - DNA, 25 bp, Artificial
  probe
  misc_feature (1)..(25): SEQ ID NO: 3203; WAN024EW3-M; Start 233; Stop 257
gaaatacgatgatgctatggctctt

SEQ ID NO: 349362 - DNA, 25 bp, Artificial
  probe
  misc_feature (1)..(25): SEQ ID NO: 3203; WAN024EW3-M; Start 231; Stop 255
atgaaatacgatgatgctatggctc

SEQ ID NO: 349363 - DNA, 25 bp, Artificial
  probe
  misc_feature (1)..(25): SEQ ID NO: 3203; WAN024EW3-M; Start 554; Stop 578
agataaggacttggttctctttgtg

SEQ ID NO: 349364 - DNA, 25 bp, Artificial
  probe
  misc_feature (1)..(25): SEQ ID NO: 3203; WAN024EW3-M; Start 134; Stop 158
ccttactgagcaagaaatccaagat

SEQ ID NO: 349365 - DNA, 25 bp, Artificial
  probe
  misc_feature (1)..(25): SEQ ID NO: 3203; WAN024EW3-M; Start 132; Stop 156
ttccttactgagcaagaaatccaag

SEQ ID NO: 349366 - DNA, 25 bp, Artificial
  probe
  misc_feature (1)..(25): SEQ ID NO: 3203; WAN024EW3-M; Start 131; Stop 155
cttccttactgagcaagaaatccaa

SEQ ID NO: 349367 - DNA, 25 bp, Artificial
  probe
  misc_feature (1)..(25): SEQ ID NO: 3203; WAN024EW3-M; Start 37; Stop 61
ttgaccgttactaccaaatcgttaa

SEQ ID NO: 349368 - DNA, 25 bp, Artificial
  probe
  misc_feature (1)..(25): SEQ ID NO: 3203; WAN024EW3-M; Start 467; Stop 491
caaggtggttgatggagaattaaac

SEQ ID NO: 349369 - DNA, 25 bp, Artificial
  probe
  misc_feature (1)..(25): SEQ ID NO: 3203; WAN024EW3-M; Start 50; Stop 74
ccaaatcgttaaatgtttccgtgac

SEQ ID NO: 349370 - DNA, 25 bp, Artificial
  probe
  misc_feature (1)..(25): SEQ ID NO: 3203; WAN024EW3-M; Start 550; Stop 574
ttgaagataaggacttggttctctt

SEQ ID NO: 349371 - DNA, 25 bp, Artificial
  probe
  misc_feature (1)..(25): SEQ ID NO: 3203; WAN024EW3-M; Start 555; Stop 579
gataaggacttggttctctttgtgg

SEQ ID NO: 349372 - DNA, 25 bp, Artificial
  probe
  misc_feature (1)..(25): SEQ ID NO: 3204; WAN0249XG; Start 42; Stop 66
gatagaccgcgatactactaacaac

SEQ ID NO: 349373 - DNA, 25 bp, Artificial
  probe
  misc_feature (1)..(25): SEQ ID NO: 3204; WAN0249XG; Start 8; Stop 32
ccttcttaagttcaaatgggaatct

SEQ ID NO: 349374 - DNA, 25 bp, Artificial
  probe
  misc_feature (1)..(25): SEQ ID NO: 3204; WAN0249XG; Start 39; Stop 63
aaggatagaccgcgatactactaac

SEQ ID NO: 349375 - DNA, 25 bp, Artificial
  probe
  misc_feature (1)..(25): SEQ ID NO: 3204; WAN0249XG; Start 38; Stop 62
caaggatagaccgcgatactactaa

SEQ ID NO: 349376 - DNA, 25 bp, Artificial
  probe
  misc_feature (1)..(25): SEQ ID NO: 3204; WAN0249XG; Start 41; Stop 65
ggatagaccgcgatactactaacaa

SEQ ID NO: 349377 - DNA, 25 bp, Artificial
  probe
  misc_feature (1)..(25): SEQ ID NO: 3204; WAN0249XG; Start 43; Stop 67
atagaccgcgatactactaacaacc

SEQ ID NO: 349378 - DNA, 25 bp, Artificial
  probe
  misc_feature (1)..(25): SEQ ID NO: 3204; WAN0249XG; Start 5; Stop 29
actccttcttaagttcaaatgggaa

SEQ ID NO: 349379 - DNA, 25 bp, Artificial
  probe
  misc_feature (1)..(25): SEQ ID NO: 3204; WAN0249XG; Start 40; Stop 64
aggatagaccgcgatactactaaca

SEQ ID NO: 349380 - DNA, 25 bp, Artificial
  probe
  misc_feature (1)..(25): SEQ ID NO: 3204; WAN0249XG; Start 7; Stop 31
tccttcttaagttcaaatgggaatc

SEQ ID NO: 349381 - DNA, 25 bp, Artificial
  probe
  misc_feature (1)..(25): SEQ ID NO: 3204; WAN0249XG; Start 6; Stop 30
ctccttcttaagttcaaatgggaat

SEQ ID NO: 349382 - DNA, 25 bp, Artificial
  probe
  misc_feature (1)..(25): SEQ ID NO: 3204; WAN0249XG; Start 11; Stop 35
tcttaagttcaaatgggaatctttc

SEQ ID NO: 349383 - DNA, 25 bp, Artificial
  probe
  misc_feature (1)..(25): SEQ ID NO: 3204; WAN0249XG; Start 9; Stop 33
cttcttaagttcaaatgggaatctt

SEQ ID NO: 349384 - DNA, 25 bp, Artificial
  probe
  misc_feature (1)..(25): SEQ ID NO: 3204; WAN0249XG; Start 44; Stop 68
tagaccgcgatactactaacaacca

SEQ ID NO: 349385 - DNA, 25 bp, Artificial
  probe
  misc_feature (1)..(25): SEQ ID NO: 3204; WAN0249XG; Start 37; Stop 61
ccaaggatagaccgcgatactacta

SEQ ID NO: 349386 - DNA, 25 bp, Artificial
  probe
  misc_feature (1)..(25): SEQ ID NO: 3204; WAN0249XG; Start 10; Stop 34
ttcttaagttcaaatgggaatcttt

SEQ ID NO: 349387 - DNA, 25 bp, Artificial
  probe
  misc_feature (1)..(25): SEQ ID NO: 3204; WAN0249XG; Start 4; Stop 28
aactccttcttaagttcaaatggga

SEQ ID NO: 349388 - DNA, 25 bp, Artificial
  probe
  misc_feature (1)..(25): SEQ ID NO: 3204; WAN0249XG; Start 3; Stop 27
caactccttcttaagttcaaatggg

SEQ ID NO: 349389 - DNA, 25 bp, Artificial
  probe
  misc_feature (1)..(25): SEQ ID NO: 3204; WAN0249XG; Start 2; Stop 26
acaactccttcttaagttcaaatgg

SEQ ID NO: 349390 - DNA, 25 bp, Artificial
  probe
  misc_feature (1)..(25): SEQ ID NO: 3204; WAN0249XG; Start 1; Stop 25
cacaactccttcttaagttcaaatg

SEQ ID NO: 349391 - DNA, 25 bp, Artificial
  probe
  misc_feature (1)..(25): SEQ ID NO: 3204; WAN0249XG; Start 45; Stop 69
agaccgcgatactactaacaaccaa

SEQ ID NO: 349392 - DNA, 25 bp, Artificial
  probe
  misc_feature (1)..(25): SEQ ID NO: 3204; WAN0249XG; Start 46; Stop 70
gaccgcgatactactaacaaccaaa

SEQ ID NO: 349393 - DNA, 25 bp, Artificial
  probe
  misc_feature (1)..(25): SEQ ID NO: 3204; WAN0249XG; Start 12; Stop 36
cttaagttcaaatgggaatctttcc

SEQ ID NO: 349394 - DNA, 25 bp, Artificial
  probe
  misc_feature (1)..(25): SEQ ID NO: 3204; WAN0249XG; Start 47; Stop 71
accgcgatactactaacaaccaaaa

SEQ ID NO: 349395 - DNA, 25 bp, Artificial
  probe
  misc_feature (1)..(25): SEQ ID NO: 3204; WAN0249XG; Start 27; Stop 51
gaatctttccccaaggatagaccgc

SEQ ID NO: 349396 - DNA, 25 bp, Artificial
  probe
  misc_feature (1)..(25): SEQ ID NO: 3204; WAN0249XG; Start 36; Stop 60
cccaaggatagaccgcgatactact

SEQ ID NO: 349397 - DNA, 25 bp, Artificial
  probe
  misc_feature (1)..(25): SEQ ID NO: 3204; WAN0249XG; Start 26; Stop 50
ggaatctttccccaaggatagaccg

SEQ ID NO: 349398 - DNA, 25 bp, Artificial
  probe
  misc_feature (1)..(25): SEQ ID NO: 3205; WAN024AEN; Start 20; Stop 44
gctgagaagaatgctataatggtta

SEQ ID NO: 349399 - DNA, 25 bp, Artificial
  probe
  misc_feature (1)..(25): SEQ ID NO: 3205; WAN024AEN; Start 9; Stop 33
ttagtacactagctgagaagaatgc

SEQ ID NO: 349400 - DNA, 25 bp, Artificial
  probe
  misc_feature (1)..(25): SEQ ID NO: 3205; WAN024AEN; Start 6; Stop 30
tccttagtacactagctgagaagaa

SEQ ID NO: 349401 - DNA, 25 bp, Artificial
  probe
  misc_feature (1)..(25): SEQ ID NO: 3205; WAN024AEN; Start 7; Stop 31
ccttagtacactagctgagaagaat

SEQ ID NO: 349402 - DNA, 25 bp, Artificial
  probe
  misc_feature (1)..(25): SEQ ID NO: 3205; WAN024AEN; Start 24; Stop 48
agaagaatgctataatggttagagt

SEQ ID NO: 349403 - DNA, 25 bp, Artificial
  probe
  misc_feature (1)..(25): SEQ ID NO: 3205; WAN024AEN; Start 22; Stop 46
tgagaagaatgctataatggttaga

SEQ ID NO: 349404 - DNA, 25 bp, Artificial
  probe
  misc_feature (1)..(25): SEQ ID NO: 3205; WAN024AEN; Start 21; Stop 45
ctgagaagaatgctataatggttag

SEQ ID NO: 349405 - DNA, 25 bp, Artificial
  probe
  misc_feature (1)..(25): SEQ ID NO: 3205; WAN024AEN; Start 5; Stop 29
ctccttagtacactagctgagaaga

SEQ ID NO: 349406 - DNA, 25 bp, Artificial
  probe
  misc_feature (1)..(25): SEQ ID NO: 3205; WAN024AEN; Start 8; Stop 32
cttagtacactagctgagaagaatg

SEQ ID NO: 349407 - DNA, 25 bp, Artificial
  probe
  misc_feature (1)..(25): SEQ ID NO: 3205; WAN024AEN; Start 4; Stop 28
actccttagtacactagctgagaag

SEQ ID NO: 349408 - DNA, 25 bp, Artificial
  probe
  misc_feature (1)..(25): SEQ ID NO: 3205; WAN024AEN; Start 3; Stop 27
cactccttagtacactagctgagaa

SEQ ID NO: 349409 - DNA, 25 bp, Artificial
  probe
  misc_feature (1)..(25): SEQ ID NO: 3205; WAN024AEN; Start 23; Stop 47
gagaagaatgctataatggttagag

SEQ ID NO: 349410 - DNA, 25 bp, Artificial
  probe
  misc_feature (1)..(25): SEQ ID NO: 3205; WAN024AEN; Start 2; Stop 26
acactccttagtacactagctgaga

SEQ ID NO: 349411 - DNA, 25 bp, Artificial
  probe
  misc_feature (1)..(25): SEQ ID NO: 3205; WAN024AEN; Start 1; Stop 25
cacactccttagtacactagctgag

SEQ ID NO: 349412 - DNA, 25 bp, Artificial
  probe
  misc_feature (1)..(25): SEQ ID NO: 3205; WAN024AEN; Start 68; Stop 92
acagtaaataacatctacactcacg

SEQ ID NO: 349413 - DNA, 25 bp, Artificial
  probe
  misc_feature (1)..(25): SEQ ID NO: 3205; WAN024AEN; Start 19; Stop 43
agctgagaagaatgctataatggtt

SEQ ID NO: 349414 - DNA, 25 bp, Artificial
  probe
  misc_feature (1)..(25): SEQ ID NO: 3205; WAN024AEN; Start 10; Stop 34
tagtacactagctgagaagaatgct

SEQ ID NO: 349415 - DNA, 25 bp, Artificial
  probe
  misc_feature (1)..(25): SEQ ID NO: 3205; WAN024AEN; Start 75; Stop 99
ataacatctacactcacgtaagtaa

SEQ ID NO: 349416 - DNA, 25 bp, Artificial
  probe
  misc_feature (1)..(25): SEQ ID NO: 3205; WAN024AEN; Start 74; Stop 98
aataacatctacactcacgtaagta

SEQ ID NO: 349417 - DNA, 25 bp, Artificial
  probe
  misc_feature (1)..(25): SEQ ID NO: 3205; WAN024AEN; Start 69; Stop 93
cagtaaataacatctacactcacgt

SEQ ID NO: 349418 - DNA, 25 bp, Artificial
  probe
  misc_feature (1)..(25): SEQ ID NO: 3205; WAN024AEN; Start 67; Stop 91
aacagtaaataacatctacactcac

SEQ ID NO: 349419 - DNA, 25 bp, Artificial
  probe
  misc_feature (1)..(25): SEQ ID NO: 3205; WAN024AEN; Start 73; Stop 97
aaataacatctacactcacgtaagt

SEQ ID NO: 349420 - DNA, 25 bp, Artificial
  probe
  misc_feature (1)..(25): SEQ ID NO: 3205; WAN024AEN; Start 12; Stop 36
gtacactagctgagaagaatgctat

SEQ ID NO: 349421 - DNA, 25 bp, Artificial
  probe
  misc_feature (1)..(25): SEQ ID NO: 3205; WAN024AEN; Start 18; Stop 42
tagctgagaagaatgctataatggt

SEQ ID NO: 349422 - DNA, 25 bp, Artificial
  probe
  misc_feature (1)..(25): SEQ ID NO: 3205; WAN024AEN; Start 14; Stop 38
acactagctgagaagaatgctataa

SEQ ID NO: 349423 - DNA, 25 bp, Artificial
  probe
  misc_feature (1)..(25): SEQ ID NO: 3205; WAN024AEN; Start 11; Stop 35
agtacactagctgagaagaatgcta

SEQ ID NO: 349424 - DNA, 25 bp, Artificial
  probe
  misc_feature (1)..(25): SEQ ID NO: 3205; WAN024AEN; Start 17; Stop 41
ctagctgagaagaatgctataatgg

SEQ ID NO: 349425 - DNA, 25 bp, Artificial
  probe
  misc_feature (1)..(25): SEQ ID NO: 3205; WAN024AEN; Start 76; Stop 100
taacatctacactcacgtaagtaaa

SEQ ID NO: 349426 - DNA, 25 bp, Artificial
  probe
  misc_feature (1)..(25): SEQ ID NO: 3205; WAN024AEN; Start 13; Stop 37
tacactagctgagaagaatgctata

SEQ ID NO: 349427 - DNA, 25 bp, Artificial
  probe
  misc_feature (1)..(25): SEQ ID NO: 3205; WAN024AEN; Start 70; Stop 94
agtaaataacatctacactcacgta

SEQ ID NO: 349428 - DNA, 25 bp, Artificial
  probe
  misc_feature (1)..(25): SEQ ID NO: 3205; WAN024AEN; Start 66; Stop 90
aaacagtaaataacatctacactca

SEQ ID NO: 349429 - DNA, 25 bp, Artificial
  probe
  misc_feature (1)..(25): SEQ ID NO: 3205; WAN024AEN; Start 16; Stop 40
actagctgagaagaatgctataatg

SEQ ID NO: 349430 - DNA, 25 bp, Artificial
  probe
  misc_feature (1)..(25): SEQ ID NO: 3205; WAN024AEN; Start 15; Stop 39
cactagctgagaagaatgctataat

SEQ ID NO: 349431 - DNA, 25 bp, Artificial
  probe
  misc_feature (1)..(25): SEQ ID NO: 3206; WAN0249WA; Start 55; Stop 79
agaatttctgaatagacaaactcaa

SEQ ID NO: 349432 - DNA, 25 bp, Artificial
  probe
  misc_feature (1)..(25): SEQ ID NO: 3206; WAN0249WA; Start 54; Stop 78
aagaatttctgaatagacaaactca

SEQ ID NO: 349433 - DNA, 25 bp, Artificial
  probe
  misc_feature (1)..(25): SEQ ID NO: 3206; WAN0249WA; Start 56; Stop 80
gaatttctgaatagacaaactcaaa

SEQ ID NO: 349434 - DNA, 25 bp, Artificial
  probe
  misc_feature (1)..(25): SEQ ID NO: 3206; WAN0249WA; Start 80; Stop 104
aaaatggctgggaaatttaggaaaa

SEQ ID NO: 349435 - DNA, 25 bp, Artificial
  probe
  misc_feature (1)..(25): SEQ ID NO: 3206; WAN0249WA; Start 53; Stop 77
taagaatttctgaatagacaaactc

SEQ ID NO: 349436 - DNA, 25 bp, Artificial
  probe
  misc_feature (1)..(25): SEQ ID NO: 3206; WAN0249WA; Start 57; Stop 81
aatttctgaatagacaaactcaaaa

SEQ ID NO: 349437 - DNA, 25 bp, Artificial
  probe
  misc_feature (1)..(25): SEQ ID NO: 3206; WAN0249WA; Start 36; Stop 60
acaagcagcttataaaataagaatt

SEQ ID NO: 349438 - DNA, 25 bp, Artificial
  probe
  misc_feature (1)..(25): SEQ ID NO: 3206; WAN0249WA; Start 40; Stop 64
gcagcttataaaataagaatttctg

SEQ ID NO: 349439 - DNA, 25 bp, Artificial
  probe
  misc_feature (1)..(25): SEQ ID NO: 3206; WAN0249WA; Start 39; Stop 63
agcagcttataaaataagaatttct

SEQ ID NO: 349440 - DNA, 25 bp, Artificial
  probe
  misc_feature (1)..(25): SEQ ID NO: 3206; WAN0249WA; Start 34; Stop 58
ttacaagcagcttataaaataagaa

SEQ ID NO: 349441 - DNA, 25 bp, Artificial
  probe
  misc_feature (1)..(25): SEQ ID NO: 3206; WAN0249WA; Start 33; Stop 57
tttacaagcagcttataaaataaga

SEQ ID NO: 349442 - DNA, 25 bp, Artificial
  probe
  misc_feature (1)..(25): SEQ ID NO: 3207; WAN024AO6; Start 35; Stop 59
aatataccactaacagaaagcgttg

SEQ ID NO: 349443 - DNA, 25 bp, Artificial
  probe
  misc_feature (1)..(25): SEQ ID NO: 3207; WAN024AO6; Start 34; Stop 58
aaatataccactaacagaaagcgtt

SEQ ID NO: 349444 - DNA, 25 bp, Artificial
  probe
  misc_feature (1)..(25): SEQ ID NO: 3207; WAN024AO6; Start 42; Stop 66
cactaacagaaagcgttgtcaatat

SEQ ID NO: 349445 - DNA, 25 bp, Artificial
  probe
  misc_feature (1)..(25): SEQ ID NO: 3207; WAN024AO6; Start 36; Stop 60
atataccactaacagaaagcgttgt

SEQ ID NO: 349446 - DNA, 25 bp, Artificial
  probe
  misc_feature (1)..(25): SEQ ID NO: 3207; WAN024AO6; Start 33; Stop 57
taaatataccactaacagaaagcgt

SEQ ID NO: 349447 - DNA, 25 bp, Artificial
  probe
  misc_feature (1)..(25): SEQ ID NO: 3207; WAN024AO6; Start 37; Stop 61
tataccactaacagaaagcgttgtc

SEQ ID NO: 349448 - DNA, 25 bp, Artificial
  probe
  misc_feature (1)..(25): SEQ ID NO: 3207; WAN024AO6; Start 43; Stop 67
actaacagaaagcgttgtcaatata

SEQ ID NO: 349449 - DNA, 25 bp, Artificial
  probe
  misc_feature (1)..(25): SEQ ID NO: 3207; WAN024AO6; Start 41; Stop 65
ccactaacagaaagcgttgtcaata

SEQ ID NO: 349450 - DNA, 25 bp, Artificial
  probe
  misc_feature (1)..(25): SEQ ID NO: 3207; WAN024AO6; Start 32; Stop 56
ttaaatataccactaacagaaagcg

SEQ ID NO: 349451 - DNA, 25 bp, Artificial
  probe
  misc_feature (1)..(25): SEQ ID NO: 3207; WAN024AO6; Start 38; Stop 62
ataccactaacagaaagcgttgtca

SEQ ID NO: 349452 - DNA, 25 bp, Artificial
  probe
  misc_feature (1)..(25): SEQ ID NO: 3207; WAN024AO6; Start 39; Stop 63
taccactaacagaaagcgttgtcaa

SEQ ID NO: 349453 - DNA, 25 bp, Artificial
  probe
  misc_feature (1)..(25): SEQ ID NO: 3207; WAN024AO6; Start 44; Stop 68
ctaacagaaagcgttgtcaatatat

SEQ ID NO: 349454 - DNA, 25 bp, Artificial
  probe
  misc_feature (1)..(25): SEQ ID NO: 3207; WAN024AO6; Start 40; Stop 64
accactaacagaaagcgttgtcaat

SEQ ID NO: 349455 - DNA, 25 bp, Artificial
  probe
  misc_feature (1)..(25): SEQ ID NO: 3207; WAN024AO6; Start 46; Stop 70
aacagaaagcgttgtcaatatattt

SEQ ID NO: 349456 - DNA, 25 bp, Artificial
  probe
  misc_feature (1)..(25): SEQ ID NO: 3207; WAN024AO6; Start 31; Stop 55
attaaatataccactaacagaaagc

SEQ ID NO: 349457 - DNA, 25 bp, Artificial
  probe
  misc_feature (1)..(25): SEQ ID NO: 3207; WAN024AO6; Start 45; Stop 69
taacagaaagcgttgtcaatatatt

SEQ ID NO: 349458 - DNA, 25 bp, Artificial
  probe
  misc_feature (1)..(25): SEQ ID NO: 3207; WAN024AO6; Start 47; Stop 71
acagaaagcgttgtcaatatatttt

SEQ ID NO: 349459 - DNA, 25 bp, Artificial
  probe
  misc_feature (1)..(25): SEQ ID NO: 3208; WAN0249UV; Start 156; Stop 180
aatctaatggtttcaggtattcgga

SEQ ID NO: 349460 - DNA, 25 bp, Artificial
  probe
  misc_feature (1)..(25): SEQ ID NO: 3208; WAN0249UV; Start 195; Stop 219
agtgtctcaaagtttaggtatggaa

SEQ ID NO: 349461 - DNA, 25 bp, Artificial
  probe
  misc_feature (1)..(25): SEQ ID NO: 3208; WAN0249UV; Start 171; Stop 195
ggtattcggaaactttgagacacta

SEQ ID NO: 349462 - DNA, 25 bp, Artificial
  probe
  misc_feature (1)..(25): SEQ ID NO: 3208; WAN0249UV; Start 155; Stop 179
aaatctaatggtttcaggtattcgg

SEQ ID NO: 349463 - DNA, 25 bp, Artificial
  probe
  misc_feature (1)..(25): SEQ ID NO: 3208; WAN0249UV; Start 157; Stop 181
atctaatggtttcaggtattcggaa

SEQ ID NO: 349464 - DNA, 25 bp, Artificial
  probe
  misc_feature (1)..(25): SEQ ID NO: 3208; WAN0249UV; Start 194; Stop 218
tagtgtctcaaagtttaggtatgga

SEQ ID NO: 349465 - DNA, 25 bp, Artificial
  probe
  misc_feature (1)..(25): SEQ ID NO: 3208; WAN0249UV; Start 196; Stop 220
gtgtctcaaagtttaggtatggaat

SEQ ID NO: 349466 - DNA, 25 bp, Artificial
  probe
  misc_feature (1)..(25): SEQ ID NO: 3208; WAN0249UV; Start 172; Stop 196
gtattcggaaactttgagacactag

SEQ ID NO: 349467 - DNA, 25 bp, Artificial
  probe
  misc_feature (1)..(25): SEQ ID NO: 3208; WAN0249UV; Start 167; Stop 191
ttcaggtattcggaaactttgagac

SEQ ID NO: 349468 - DNA, 25 bp, Artificial
  probe
  misc_feature (1)..(25): SEQ ID NO: 3208; WAN0249UV; Start 193; Stop 217
ctagtgtctcaaagtttaggtatgg

SEQ ID NO: 349469 - DNA, 25 bp, Artificial
  probe
  misc_feature (1)..(25): SEQ ID NO: 3208; WAN0249UV; Start 169; Stop 193
caggtattcggaaactttgagacac

SEQ ID NO: 349470 - DNA, 25 bp, Artificial
  probe
  misc_feature (1)..(25): SEQ ID NO: 3208; WAN0249UV; Start 170; Stop 194
aggtattcggaaactttgagacact

SEQ ID NO: 349471 - DNA, 25 bp, Artificial
  probe
  misc_feature (1)..(25): SEQ ID NO: 3208; WAN0249UV; Start 197; Stop 221
tgtctcaaagtttaggtatggaatt

SEQ ID NO: 349472 - DNA, 25 bp, Artificial
  probe
  misc_feature (1)..(25): SEQ ID NO: 3208; WAN0249UV; Start 168; Stop 192
tcaggtattcggaaactttgagaca

SEQ ID NO: 349473 - DNA, 25 bp, Artificial
  probe
  misc_feature (1)..(25): SEQ ID NO: 3208; WAN0249UV; Start 137; Stop 161
ccgtgatagaaacacctgaaatcta

SEQ ID NO: 349474 - DNA, 25 bp, Artificial
  probe
  misc_feature (1)..(25): SEQ ID NO: 3208; WAN0249UV; Start 138; Stop 162
cgtgatagaaacacctgaaatctaa

SEQ ID NO: 349475 - DNA, 25 bp, Artificial
  probe
  misc_feature (1)..(25): SEQ ID NO: 3208; WAN0249UV; Start 42; Stop 66
gcgtagattaactatagcttgatac

SEQ ID NO: 349476 - DNA, 25 bp, Artificial
  probe
  misc_feature (1)..(25): SEQ ID NO: 3208; WAN0249UV; Start 198; Stop 222
gtctcaaagtttaggtatggaattt

SEQ ID NO: 349477 - DNA, 25 bp, Artificial
  probe
  misc_feature (1)..(25): SEQ ID NO: 3208; WAN0249UV; Start 104; Stop 128
gatagtgaggcgaggacttacctag

SEQ ID NO: 349478 - DNA, 25 bp, Artificial
  probe
  misc_feature (1)..(25): SEQ ID NO: 3208; WAN0249UV; Start 158; Stop 182
tctaatggtttcaggtattcggaaa

SEQ ID NO: 349479 - DNA, 25 bp, Artificial
  probe
  misc_feature (1)..(25): SEQ ID NO: 3208; WAN0249UV; Start 166; Stop 190
tttcaggtattcggaaactttgaga

SEQ ID NO: 349480 - DNA, 25 bp, Artificial
  probe
  misc_feature (1)..(25): SEQ ID NO: 3208; WAN0249UV; Start 143; Stop 167
tagaaacacctgaaatctaatggtt

SEQ ID NO: 349481 - DNA, 25 bp, Artificial
  probe
  misc_feature (1)..(25): SEQ ID NO: 3208; WAN0249UV; Start 235; Stop 259
ctaccgtccgtaatcacttaaggaa

SEQ ID NO: 349482 - DNA, 25 bp, Artificial
  probe
  misc_feature (1)..(25): SEQ ID NO: 3208; WAN0249UV; Start 142; Stop 166
atagaaacacctgaaatctaatggt

SEQ ID NO: 349483 - DNA, 25 bp, Artificial
  probe
  misc_feature (1)..(25): SEQ ID NO: 3208; WAN0249UV; Start 244; Stop 268
gtaatcacttaaggaaaggctcaaa

SEQ ID NO: 349484 - DNA, 25 bp, Artificial
  probe
  misc_feature (1)..(25): SEQ ID NO: 3208; WAN0249UV; Start 144; Stop 168
agaaacacctgaaatctaatggttt

SEQ ID NO: 349485 - DNA, 25 bp, Artificial
  probe
  misc_feature (1)..(25): SEQ ID NO: 3208; WAN0249UV; Start 243; Stop 267
cgtaatcacttaaggaaaggctcaa

SEQ ID NO: 349486 - DNA, 25 bp, Artificial
  probe
  misc_feature (1)..(25): SEQ ID NO: 3208; WAN0249UV; Start 231; Stop 255
gtcgctaccgtccgtaatcacttaa

SEQ ID NO: 349487 - DNA, 25 bp, Artificial
  probe
  misc_feature (1)..(25): SEQ ID NO: 3208; WAN0249UV; Start 141; Stop 165
gatagaaacacctgaaatctaatgg

SEQ ID NO: 349488 - DNA, 25 bp, Artificial
  probe
  misc_feature (1)..(25): SEQ ID NO: 3208; WAN0249UV; Start 154; Stop 178
gaaatctaatggtttcaggtattcg

SEQ ID NO: 349489 - DNA, 25 bp, Artificial
  probe
  misc_feature (1)..(25): SEQ ID NO: 3208; WAN0249UV; Start 136; Stop 160
gccgtgatagaaacacctgaaatct

SEQ ID NO: 349490 - DNA, 25 bp, Artificial
  probe
  misc_feature (1)..(25): SEQ ID NO: 3208; WAN0249UV; Start 173; Stop 197
tattcggaaactttgagacactagt

SEQ ID NO: 349491 - DNA, 25 bp, Artificial
  probe
  misc_feature (1)..(25): SEQ ID NO: 3208; WAN0249UV; Start 140; Stop 164
tgatagaaacacctgaaatctaatg

SEQ ID NO: 349492 - DNA, 25 bp, Artificial
  probe
  misc_feature (1)..(25): SEQ ID NO: 3209; WAN024AGX; Start 41; Stop 65
acttcacctatagtatatcacttct

SEQ ID NO: 349493 - DNA, 25 bp, Artificial
  probe
  misc_feature (1)..(25): SEQ ID NO: 3209; WAN024AGX; Start 2; Stop 26
acttctcccttctaatctattttgt

SEQ ID NO: 349494 - DNA, 25 bp, Artificial
  probe
  misc_feature (1)..(25): SEQ ID NO: 3209; WAN024AGX; Start 1; Stop 25
cacttctcccttctaatctattttg

SEQ ID NO: 349495 - DNA, 25 bp, Artificial
  probe
  misc_feature (1)..(25): SEQ ID NO: 3209; WAN024AGX; Start 45; Stop 69
cacctatagtatatcacttctacac

SEQ ID NO: 349496 - DNA, 25 bp, Artificial
  probe
  misc_feature (1)..(25): SEQ ID NO: 3209; WAN024AGX; Start 59; Stop 83
cacttctacactagtttgtaaagca

SEQ ID NO: 349497 - DNA, 25 bp, Artificial
  probe
  misc_feature (1)..(25): SEQ ID NO: 3209; WAN024AGX; Start 46; Stop 70
acctatagtatatcacttctacact

SEQ ID NO: 349498 - DNA, 25 bp, Artificial
  probe
  misc_feature (1)..(25): SEQ ID NO: 3209; WAN024AGX; Start 44; Stop 68
tcacctatagtatatcacttctaca

SEQ ID NO: 349499 - DNA, 25 bp, Artificial
  probe
  misc_feature (1)..(25): SEQ ID NO: 3209; WAN024AGX; Start 58; Stop 82
tcacttctacactagtttgtaaagc

SEQ ID NO: 349500 - DNA, 25 bp, Artificial
  probe
  misc_feature (1)..(25): SEQ ID NO: 3209; WAN024AGX; Start 60; Stop 84
acttctacactagtttgtaaagcat

SEQ ID NO: 349501 - DNA, 25 bp, Artificial
  probe
  misc_feature (1)..(25): SEQ ID NO: 3209; WAN024AGX; Start 3; Stop 27
cttctcccttctaatctattttgta

SEQ ID NO: 349502 - DNA, 25 bp, Artificial
  probe
  misc_feature (1)..(25): SEQ ID NO: 3209; WAN024AGX; Start 61; Stop 85
cttctacactagtttgtaaagcata

SEQ ID NO: 349503 - DNA, 25 bp, Artificial
  probe
  misc_feature (1)..(25): SEQ ID NO: 3209; WAN024AGX; Start 57; Stop 81
atcacttctacactagtttgtaaag

SEQ ID NO: 349504 - DNA, 25 bp, Artificial
  probe
  misc_feature (1)..(25): SEQ ID NO: 3209; WAN024AGX; Start 4; Stop 28
ttctcccttctaatctattttgtaa

SEQ ID NO: 349505 - DNA, 25 bp, Artificial
  probe
  misc_feature (1)..(25): SEQ ID NO: 3209; WAN024AGX; Start 53; Stop 77
gtatatcacttctacactagtttgt

SEQ ID NO: 349506 - DNA, 25 bp, Artificial
  probe
  misc_feature (1)..(25): SEQ ID NO: 3209; WAN024AGX; Start 66; Stop 90
acactagtttgtaaagcataatagt

SEQ ID NO: 349507 - DNA, 25 bp, Artificial
  probe
  misc_feature (1)..(25): SEQ ID NO: 3209; WAN024AGX; Start 52; Stop 76
agtatatcacttctacactagtttg

SEQ ID NO: 349508 - DNA, 25 bp, Artificial
  probe
  misc_feature (1)..(25): SEQ ID NO: 3209; WAN024AGX; Start 62; Stop 86
ttctacactagtttgtaaagcataa

SEQ ID NO: 349509 - DNA, 25 bp, Artificial
  probe
  misc_feature (1)..(25): SEQ ID NO: 3209; WAN024AGX; Start 5; Stop 29
tctcccttctaatctattttgtaat

SEQ ID NO: 349510 - DNA, 25 bp, Artificial
  probe
  misc_feature (1)..(25): SEQ ID NO: 3209; WAN024AGX; Start 63; Stop 87
tctacactagtttgtaaagcataat

SEQ ID NO: 349511 - DNA, 25 bp, Artificial
  probe
  misc_feature (1)..(25): SEQ ID NO: 3209; WAN024AGX; Start 8; Stop 32
cccttctaatctattttgtaatacc

SEQ ID NO: 349512 - DNA, 25 bp, Artificial
  probe
  misc_feature (1)..(25): SEQ ID NO: 3209; WAN024AGX; Start 67; Stop 91
cactagtttgtaaagcataatagtt

SEQ ID NO: 349513 - DNA, 25 bp, Artificial
  probe
  misc_feature (1)..(25): SEQ ID NO: 3209; WAN024AGX; Start 56; Stop 80
tatcacttctacactagtttgtaaa

SEQ ID NO: 349514 - DNA, 25 bp, Artificial
  probe
  misc_feature (1)..(25): SEQ ID NO: 3209; WAN024AGX; Start 55; Stop 79
atatcacttctacactagtttgtaa

SEQ ID NO: 349515 - DNA, 25 bp, Artificial
  probe
  misc_feature (1)..(25): SEQ ID NO: 3210; WAN024CHF-3; Start 1080; Stop 1104
ccaggaaccaactcagaatatgatt

SEQ ID NO: 349516 - DNA, 25 bp, Artificial
  probe
  misc_feature (1)..(25): SEQ ID NO: 3210; WAN024CHF-3; Start 1673; Stop 1697
ttctaagtacaatccgaatggttct

SEQ ID NO: 349517 - DNA, 25 bp, Artificial
  probe
  misc_feature (1)..(25): SEQ ID NO: 3210; WAN024CHF-3; Start 1674; Stop 1698
tctaagtacaatccgaatggttctg

SEQ ID NO: 349518 - DNA, 25 bp, Artificial
  probe
  misc_feature (1)..(25): SEQ ID NO: 3210; WAN024CHF-3; Start 1446; Stop 1470
ctcttctacaatgatgccaaccaac

SEQ ID NO: 349519 - DNA, 25 bp, Artificial
  probe
  misc_feature (1)..(25): SEQ ID NO: 3210; WAN024CHF-3; Start 1079; Stop 1103
tccaggaaccaactcagaatatgat

SEQ ID NO: 349520 - DNA, 25 bp, Artificial
  probe
  misc_feature (1)..(25): SEQ ID NO: 3210; WAN024CHF-3; Start 1676; Stop 1700
taagtacaatccgaatggttctgtc

SEQ ID NO: 349521 - DNA, 25 bp, Artificial
  probe
  misc_feature (1)..(25): SEQ ID NO: 3210; WAN024CHF-3; Start 1675; Stop 1699
ctaagtacaatccgaatggttctgt

SEQ ID NO: 349522 - DNA, 25 bp, Artificial
  probe
  misc_feature (1)..(25): SEQ ID NO: 3210; WAN024CHF-3; Start 1155; Stop 1179
gtgaccttgaatgaagaagctattg

SEQ ID NO: 349523 - DNA, 25 bp, Artificial
  probe
  misc_feature (1)..(25): SEQ ID NO: 3210; WAN024CHF-3; Start 1283; Stop 1307
tatcgtcaatatcctgcttaatgaa

SEQ ID NO: 349524 - DNA, 25 bp, Artificial
  probe
  misc_feature (1)..(25): SEQ ID NO: 3210; WAN024CHF-3; Start 1282; Stop 1306
ttatcgtcaatatcctgcttaatga

SEQ ID NO: 349525 - DNA, 25 bp, Artificial
  probe
  misc_feature (1)..(25): SEQ ID NO: 3210; WAN024CHF-3; Start 1156; Stop 1180
tgaccttgaatgaagaagctattgt

SEQ ID NO: 349526 - DNA, 25 bp, Artificial
  probe
  misc_feature (1)..(25): SEQ ID NO: 3210; WAN024CHF-3; Start 1448; Stop 1472
cttctacaatgatgccaaccaacac

SEQ ID NO: 349527 - DNA, 25 bp, Artificial
  probe
  misc_feature (1)..(25): SEQ ID NO: 3210; WAN024CHF-3; Start 1447; Stop 1471
tcttctacaatgatgccaaccaaca

SEQ ID NO: 349528 - DNA, 25 bp, Artificial
  probe
  misc_feature (1)..(25): SEQ ID NO: 3210; WAN024CHF-3; Start 1084; Stop 1108
gaaccaactcagaatatgattcagc

SEQ ID NO: 349529 - DNA, 25 bp, Artificial
  probe
  misc_feature (1)..(25): SEQ ID NO: 3210; WAN024CHF-3; Start 1082; Stop 1106
aggaaccaactcagaatatgattca

SEQ ID NO: 349530 - DNA, 25 bp, Artificial
  probe
  misc_feature (1)..(25): SEQ ID NO: 3210; WAN024CHF-3; Start 1083; Stop 1107
ggaaccaactcagaatatgattcag

SEQ ID NO: 349531 - DNA, 25 bp, Artificial
  probe
  misc_feature (1)..(25): SEQ ID NO: 3210; WAN024CHF-3; Start 1081; Stop 1105
caggaaccaactcagaatatgattc

SEQ ID NO: 349532 - DNA, 25 bp, Artificial
  probe
  misc_feature (1)..(25): SEQ ID NO: 3210; WAN024CHF-3; Start 1167; Stop 1191
gaagaagctattgtcaagtcagttg

SEQ ID NO: 349533 - DNA, 25 bp, Artificial
  probe
  misc_feature (1)..(25): SEQ ID NO: 3210; WAN024CHF-3; Start 1198; Stop 1222
tggttgacaatatcgacaagactaa

SEQ ID NO: 349534 - DNA, 25 bp, Artificial
  probe
  misc_feature (1)..(25): SEQ ID NO: 3210; WAN024CHF-3; Start 1197; Stop 1221
atggttgacaatatcgacaagacta

SEQ ID NO: 349535 - DNA, 25 bp, Artificial
  probe
  misc_feature (1)..(25): SEQ ID NO: 3210; WAN024CHF-3; Start 1196; Stop 1220
tatggttgacaatatcgacaagact

SEQ ID NO: 349536 - DNA, 25 bp, Artificial
  probe
  misc_feature (1)..(25): SEQ ID NO: 3210; WAN024CHF-3; Start 1194; Stop 1218
actatggttgacaatatcgacaaga

SEQ ID NO: 349537 - DNA, 25 bp, Artificial
  probe
  misc_feature (1)..(25): SEQ ID NO: 3210; WAN024CHF-3; Start 1165; Stop 1189
atgaagaagctattgtcaagtcagt

SEQ ID NO: 349538 - DNA, 25 bp, Artificial
  probe
  misc_feature (1)..(25): SEQ ID NO: 3210; WAN024CHF-3; Start 1195; Stop 1219
ctatggttgacaatatcgacaagac

SEQ ID NO: 349539 - DNA, 25 bp, Artificial
  probe
  misc_feature (1)..(25): SEQ ID NO: 3210; WAN024CHF-3; Start 1166; Stop 1190
tgaagaagctattgtcaagtcagtt

SEQ ID NO: 349540 - DNA, 25 bp, Artificial
  probe
  misc_feature (1)..(25): SEQ ID NO: 3210; WAN024CHF-3; Start 1158; Stop 1182
accttgaatgaagaagctattgtca

SEQ ID NO: 349541 - DNA, 25 bp, Artificial
  probe
  misc_feature (1)..(25): SEQ ID NO: 3210; WAN024CHF-3; Start 1078; Stop 1102
ttccaggaaccaactcagaatatga

SEQ ID NO: 349542 - DNA, 25 bp, Artificial
  probe
  misc_feature (1)..(25): SEQ ID NO: 3210; WAN024CHF-3; Start 1275; Stop 1299
gctaagtttatcgtcaatatcctgc

SEQ ID NO: 349543 - DNA, 25 bp, Artificial
  probe
  misc_feature (1)..(25): SEQ ID NO: 3210; WAN024CHF-3; Start 1163; Stop 1187
gaatgaagaagctattgtcaagtca

SEQ ID NO: 349544 - DNA, 25 bp, Artificial
  probe
  misc_feature (1)..(25): SEQ ID NO: 3210; WAN024CHF-3; Start 1162; Stop 1186
tgaatgaagaagctattgtcaagtc

SEQ ID NO: 349545 - DNA, 25 bp, Artificial
  probe
  misc_feature (1)..(25): SEQ ID NO: 3210; WAN024CHF-3; Start 1164; Stop 1188
aatgaagaagctattgtcaagtcag

SEQ ID NO: 349546 - DNA, 25 bp, Artificial
  probe
  misc_feature (1)..(25): SEQ ID NO: 3210; WAN024CHF-3; Start 738; Stop 762
gctcttgctacctttggaaactata

SEQ ID NO: 349547 - DNA, 25 bp, Artificial
  probe
  misc_feature (1)..(25): SEQ ID NO: 3210; WAN024CHF-3; Start 1707; Stop 1731
atcgaaggaattaccagcaagaatg

SEQ ID NO: 349548 - DNA, 25 bp, Artificial
  probe
  misc_feature (1)..(25): SEQ ID NO: 3211; WAN0249JR; Start 7; Stop 31
cctcctcttctacctgcttcgaaaa

SEQ ID NO: 349549 - DNA, 25 bp, Artificial
  probe
  misc_feature (1)..(25): SEQ ID NO: 3212; WAN024GKP; Start 389; Stop 413
ttgatacacaattcatctcctctga

SEQ ID NO: 349550 - DNA, 25 bp, Artificial
  probe
  misc_feature (1)..(25): SEQ ID NO: 3212; WAN024GKP; Start 319; Stop 343
ggtgttagaattatacgtggtggta

SEQ ID NO: 349551 - DNA, 25 bp, Artificial
  probe
  misc_feature (1)..(25): SEQ ID NO: 3212; WAN024GKP; Start 317; Stop 341
aaggtgttagaattatacgtggtgg

SEQ ID NO: 349552 - DNA, 25 bp, Artificial
  probe
  misc_feature (1)..(25): SEQ ID NO: 3212; WAN024GKP; Start 286; Stop 310
tacaagaagggcgatttaagcatta

SEQ ID NO: 349553 - DNA, 25 bp, Artificial
  probe
  misc_feature (1)..(25): SEQ ID NO: 3212; WAN024GKP; Start 320; Stop 344
gtgttagaattatacgtggtggtaa

SEQ ID NO: 349554 - DNA, 25 bp, Artificial
  probe
  misc_feature (1)..(25): SEQ ID NO: 3212; WAN024GKP; Start 318; Stop 342
aggtgttagaattatacgtggtggt

SEQ ID NO: 349555 - DNA, 25 bp, Artificial
  probe
  misc_feature (1)..(25): SEQ ID NO: 3212; WAN024GKP; Start 285; Stop 309
ttacaagaagggcgatttaagcatt

SEQ ID NO: 349556 - DNA, 25 bp, Artificial
  probe
  misc_feature (1)..(25): SEQ ID NO: 3212; WAN024GKP; Start 386; Stop 410
acattgatacacaattcatctcctc

SEQ ID NO: 349557 - DNA, 25 bp, Artificial
  probe
  misc_feature (1)..(25): SEQ ID NO: 3212; WAN024GKP; Start 388; Stop 412
attgatacacaattcatctcctctg

SEQ ID NO: 349558 - DNA, 25 bp, Artificial
  probe
  misc_feature (1)..(25): SEQ ID NO: 3212; WAN024GKP; Start 387; Stop 411
cattgatacacaattcatctcctct

SEQ ID NO: 349559 - DNA, 25 bp, Artificial
  probe
  misc_feature (1)..(25): SEQ ID NO: 3212; WAN024GKP; Start 287; Stop 311
acaagaagggcgatttaagcattaa

SEQ ID NO: 349560 - DNA, 25 bp, Artificial
  probe
  misc_feature (1)..(25): SEQ ID NO: 3212; WAN024GKP; Start 331; Stop 355
atacgtggtggtaatattaagcctt

SEQ ID NO: 349561 - DNA, 25 bp, Artificial
  probe
  misc_feature (1)..(25): SEQ ID NO: 3212; WAN024GKP; Start 330; Stop 354
tatacgtggtggtaatattaagcct

SEQ ID NO: 349562 - DNA, 25 bp, Artificial
  probe
  misc_feature (1)..(25): SEQ ID NO: 3212; WAN024GKP; Start 428; Stop 452
aacataatcagctaataacacctgt

SEQ ID NO: 349563 - DNA, 25 bp, Artificial
  probe
  misc_feature (1)..(25): SEQ ID NO: 3212; WAN024GKP; Start 706; Stop 730
gaggaacaggaacttattactcaaa

SEQ ID NO: 349564 - DNA, 25 bp, Artificial
  probe
  misc_feature (1)..(25): SEQ ID NO: 3212; WAN024GKP; Start 703; Stop 727
tttgaggaacaggaacttattactc

SEQ ID NO: 349565 - DNA, 25 bp, Artificial
  probe
  misc_feature (1)..(25): SEQ ID NO: 3212; WAN024GKP; Start 321; Stop 345
tgttagaattatacgtggtggtaat

SEQ ID NO: 349566 - DNA, 25 bp, Artificial
  probe
  misc_feature (1)..(25): SEQ ID NO: 3212; WAN024GKP; Start 329; Stop 353
ttatacgtggtggtaatattaagcc

SEQ ID NO: 349567 - DNA, 25 bp, Artificial
  probe
  misc_feature (1)..(25): SEQ ID NO: 3212; WAN024GKP; Start 385; Stop 409
tacattgatacacaattcatctcct

SEQ ID NO: 349568 - DNA, 25 bp, Artificial
  probe
  misc_feature (1)..(25): SEQ ID NO: 3212; WAN024GKP; Start 288; Stop 312
caagaagggcgatttaagcattaat

SEQ ID NO: 349569 - DNA, 25 bp, Artificial
  probe
  misc_feature (1)..(25): SEQ ID NO: 3212; WAN024GKP; Start 284; Stop 308
cttacaagaagggcgatttaagcat

SEQ ID NO: 349570 - DNA, 25 bp, Artificial
  probe
  misc_feature (1)..(25): SEQ ID NO: 3212; WAN024GKP; Start 384; Stop 408
ctacattgatacacaattcatctcc

SEQ ID NO: 349571 - DNA, 25 bp, Artificial
  probe
  misc_feature (1)..(25): SEQ ID NO: 3212; WAN024GKP; Start 290; Stop 314
agaagggcgatttaagcattaataa

SEQ ID NO: 349572 - DNA, 25 bp, Artificial
  probe
  misc_feature (1)..(25): SEQ ID NO: 3212; WAN024GKP; Start 289; Stop 313
aagaagggcgatttaagcattaata

SEQ ID NO: 349573 - DNA, 25 bp, Artificial
  probe
  misc_feature (1)..(25): SEQ ID NO: 3212; WAN024GKP; Start 216; Stop 240
tgggaatatacctatgaattgggtt

SEQ ID NO: 349574 - DNA, 25 bp, Artificial
  probe
  misc_feature (1)..(25): SEQ ID NO: 3212; WAN024GKP; Start 214; Stop 238
tatgggaatatacctatgaattggg

SEQ ID NO: 349575 - DNA, 25 bp, Artificial
  probe
  misc_feature (1)..(25): SEQ ID NO: 3212; WAN024GKP; Start 429; Stop 453
acataatcagctaataacacctgta

SEQ ID NO: 349576 - DNA, 25 bp, Artificial
  probe
  misc_feature (1)..(25): SEQ ID NO: 3212; WAN024GKP; Start 217; Stop 241
gggaatatacctatgaattgggttg

SEQ ID NO: 349577 - DNA, 25 bp, Artificial
  probe
  misc_feature (1)..(25): SEQ ID NO: 3212; WAN024GKP; Start 215; Stop 239
atgggaatatacctatgaattgggt

SEQ ID NO: 349578 - DNA, 25 bp, Artificial
  probe
  misc_feature (1)..(25): SEQ ID NO: 3212; WAN024GKP; Start 316; Stop 340
aaaggtgttagaattatacgtggtg

SEQ ID NO: 349579 - DNA, 25 bp, Artificial
  probe
  misc_feature (1)..(25): SEQ ID NO: 3212; WAN024GKP; Start 455; Stop 479
caacctctttagaacatattggaaa

SEQ ID NO: 349580 - DNA, 25 bp, Artificial
  probe
  misc_feature (1)..(25): SEQ ID NO: 3212; WAN024GKP; Start 291; Stop 315
gaagggcgatttaagcattaataat

SEQ ID NO: 349581 - DNA, 25 bp, Artificial
  probe
  misc_feature (1)..(25): SEQ ID NO: 3212; WAN024GKP; Start 218; Stop 242
ggaatatacctatgaattgggttgt

SEQ ID NO: 349582 - DNA, 25 bp, Artificial
  probe
  misc_feature (1)..(25): SEQ ID NO: 3213; WAN0249RK; Start 276; Stop 300
gcctttctttctgctataatcgtat

SEQ ID NO: 349583 - DNA, 25 bp, Artificial
  probe
  misc_feature (1)..(25): SEQ ID NO: 3213; WAN0249RK; Start 275; Stop 299
agcctttctttctgctataatcgta

SEQ ID NO: 349584 - DNA, 25 bp, Artificial
  probe
  misc_feature (1)..(25): SEQ ID NO: 3213; WAN0249RK; Start 273; Stop 297
aaagcctttctttctgctataatcg

SEQ ID NO: 349585 - DNA, 25 bp, Artificial
  probe
  misc_feature (1)..(25): SEQ ID NO: 3213; WAN0249RK; Start 274; Stop 298
aagcctttctttctgctataatcgt

SEQ ID NO: 349586 - DNA, 25 bp, Artificial
  probe
  misc_feature (1)..(25): SEQ ID NO: 3213; WAN0249RK; Start 277; Stop 301
cctttctttctgctataatcgtata

SEQ ID NO: 349587 - DNA, 25 bp, Artificial
  probe
  misc_feature (1)..(25): SEQ ID NO: 3213; WAN0249RK; Start 222; Stop 246
ataagaaaggctcgctttaggctag

SEQ ID NO: 349588 - DNA, 25 bp, Artificial
  probe
  misc_feature (1)..(25): SEQ ID NO: 3213; WAN0249RK; Start 221; Stop 245
gataagaaaggctcgctttaggcta

SEQ ID NO: 349589 - DNA, 25 bp, Artificial
  probe
  misc_feature (1)..(25): SEQ ID NO: 3213; WAN0249RK; Start 105; Stop 129
gtctagcttcttagtttgctcttta

SEQ ID NO: 349590 - DNA, 25 bp, Artificial
  probe
  misc_feature (1)..(25): SEQ ID NO: 3213; WAN0249RK; Start 236; Stop 260
ctttaggctagaaagcatcttattt

SEQ ID NO: 349591 - DNA, 25 bp, Artificial
  probe
  misc_feature (1)..(25): SEQ ID NO: 3213; WAN0249RK; Start 106; Stop 130
tctagcttcttagtttgctctttaa

SEQ ID NO: 349592 - DNA, 25 bp, Artificial
  probe
  misc_feature (1)..(25): SEQ ID NO: 3213; WAN0249RK; Start 223; Stop 247
taagaaaggctcgctttaggctaga

SEQ ID NO: 349593 - DNA, 25 bp, Artificial
  probe
  misc_feature (1)..(25): SEQ ID NO: 3213; WAN0249RK; Start 109; Stop 133
agcttcttagtttgctctttaattt

SEQ ID NO: 349594 - DNA, 25 bp, Artificial
  probe
  misc_feature (1)..(25): SEQ ID NO: 3213; WAN0249RK; Start 226; Stop 250
gaaaggctcgctttaggctagaaag

SEQ ID NO: 349595 - DNA, 25 bp, Artificial
  probe
  misc_feature (1)..(25): SEQ ID NO: 3213; WAN0249RK; Start 110; Stop 134
gcttcttagtttgctctttaatttt

SEQ ID NO: 349596 - DNA, 25 bp, Artificial
  probe
  misc_feature (1)..(25): SEQ ID NO: 3213; WAN0249RK; Start 107; Stop 131
ctagcttcttagtttgctctttaat

SEQ ID NO: 349597 - DNA, 25 bp, Artificial
  probe
  misc_feature (1)..(25): SEQ ID NO: 3213; WAN0249RK; Start 108; Stop 132
tagcttcttagtttgctctttaatt

SEQ ID NO: 349598 - DNA, 25 bp, Artificial
  probe
  misc_feature (1)..(25): SEQ ID NO: 3213; WAN0249RK; Start 225; Stop 249
agaaaggctcgctttaggctagaaa

SEQ ID NO: 349599 - DNA, 25 bp, Artificial
  probe
  misc_feature (1)..(25): SEQ ID NO: 3213; WAN0249RK; Start 224; Stop 248
aagaaaggctcgctttaggctagaa

SEQ ID NO: 349600 - DNA, 25 bp, Artificial
  probe
  misc_feature (1)..(25): SEQ ID NO: 3213; WAN0249RK; Start 272; Stop 296
aaaagcctttctttctgctataatc

SEQ ID NO: 349601 - DNA, 25 bp, Artificial
  probe
  misc_feature (1)..(25): SEQ ID NO: 3213; WAN0249RK; Start 238; Stop 262
ttaggctagaaagcatcttattttc

SEQ ID NO: 349602 - DNA, 25 bp, Artificial
  probe
  misc_feature (1)..(25): SEQ ID NO: 3213; WAN0249RK; Start 247; Stop 271
aaagcatcttattttcttcattgaa

SEQ ID NO: 349603 - DNA, 25 bp, Artificial
  probe
  misc_feature (1)..(25): SEQ ID NO: 3213; WAN0249RK; Start 237; Stop 261
tttaggctagaaagcatcttatttt

SEQ ID NO: 349604 - DNA, 25 bp, Artificial
  probe
  misc_feature (1)..(25): SEQ ID NO: 3213; WAN0249RK; Start 246; Stop 270
gaaagcatcttattttcttcattga

SEQ ID NO: 349605 - DNA, 25 bp, Artificial
  probe
  misc_feature (1)..(25): SEQ ID NO: 3213; WAN0249RK; Start 220; Stop 244
cgataagaaaggctcgctttaggct

SEQ ID NO: 349606 - DNA, 25 bp, Artificial
  probe
  misc_feature (1)..(25): SEQ ID NO: 3213; WAN0249RK; Start 248; Stop 272
aagcatcttattttcttcattgaaa

SEQ ID NO: 349607 - DNA, 25 bp, Artificial
  probe
  misc_feature (1)..(25): SEQ ID NO: 3213; WAN0249RK; Start 240; Stop 264
aggctagaaagcatcttattttctt

SEQ ID NO: 349608 - DNA, 25 bp, Artificial
  probe
  misc_feature (1)..(25): SEQ ID NO: 3213; WAN0249RK; Start 241; Stop 265
ggctagaaagcatcttattttcttc

SEQ ID NO: 349609 - DNA, 25 bp, Artificial
  probe
  misc_feature (1)..(25): SEQ ID NO: 3213; WAN0249RK; Start 239; Stop 263
taggctagaaagcatcttattttct

SEQ ID NO: 349610 - DNA, 25 bp, Artificial
  probe
  misc_feature (1)..(25): SEQ ID NO: 3213; WAN0249RK; Start 242; Stop 266
gctagaaagcatcttattttcttca

SEQ ID NO: 349611 - DNA, 25 bp, Artificial
  probe
  misc_feature (1)..(25): SEQ ID NO: 3213; WAN0249RK; Start 245; Stop 269
agaaagcatcttattttcttcattg

SEQ ID NO: 349612 - DNA, 25 bp, Artificial
  probe
  misc_feature (1)..(25): SEQ ID NO: 3213; WAN0249RK; Start 249; Stop 273
agcatcttattttcttcattgaaaa

SEQ ID NO: 349613 - DNA, 25 bp, Artificial
  probe
  misc_feature (1)..(25): SEQ ID NO: 3213; WAN0249RK; Start 243; Stop 267
ctagaaagcatcttattttcttcat

SEQ ID NO: 349614 - DNA, 25 bp, Artificial
  probe
  misc_feature (1)..(25): SEQ ID NO: 3213; WAN0249RK; Start 244; Stop 268
tagaaagcatcttattttcttcatt

SEQ ID NO: 349615 - DNA, 25 bp, Artificial
  probe
  misc_feature (1)..(25): SEQ ID NO: 3214; WAN024APN; Start 96; Stop 120
attaaataccaacaccgaatgaagt

SEQ ID NO: 349616 - DNA, 25 bp, Artificial
  probe
  misc_feature (1)..(25): SEQ ID NO: 3214; WAN024APN; Start 103; Stop 127
accaacaccgaatgaagtttaatag

SEQ ID NO: 349617 - DNA, 25 bp, Artificial
  probe
  misc_feature (1)..(25): SEQ ID NO: 3214; WAN024APN; Start 104; Stop 128
ccaacaccgaatgaagtttaataga

SEQ ID NO: 349618 - DNA, 25 bp, Artificial
  probe
  misc_feature (1)..(25): SEQ ID NO: 3214; WAN024APN; Start 99; Stop 123
aaataccaacaccgaatgaagttta

SEQ ID NO: 349619 - DNA, 25 bp, Artificial
  probe
  misc_feature (1)..(25): SEQ ID NO: 3214; WAN024APN; Start 98; Stop 122
taaataccaacaccgaatgaagttt

SEQ ID NO: 349620 - DNA, 25 bp, Artificial
  probe
  misc_feature (1)..(25): SEQ ID NO: 3214; WAN024APN; Start 100; Stop 124
aataccaacaccgaatgaagtttaa

SEQ ID NO: 349621 - DNA, 25 bp, Artificial
  probe
  misc_feature (1)..(25): SEQ ID NO: 3214; WAN024APN; Start 97; Stop 121
ttaaataccaacaccgaatgaagtt

SEQ ID NO: 349622 - DNA, 25 bp, Artificial
  probe
  misc_feature (1)..(25): SEQ ID NO: 3214; WAN024APN; Start 101; Stop 125
ataccaacaccgaatgaagtttaat

SEQ ID NO: 349623 - DNA, 25 bp, Artificial
  probe
  misc_feature (1)..(25): SEQ ID NO: 3214; WAN024APN; Start 89; Stop 113
agaatcaattaaataccaacaccga

SEQ ID NO: 349624 - DNA, 25 bp, Artificial
  probe
  misc_feature (1)..(25): SEQ ID NO: 3214; WAN024APN; Start 94; Stop 118
caattaaataccaacaccgaatgaa

SEQ ID NO: 349625 - DNA, 25 bp, Artificial
  probe
  misc_feature (1)..(25): SEQ ID NO: 3214; WAN024APN; Start 93; Stop 117
tcaattaaataccaacaccgaatga

SEQ ID NO: 349626 - DNA, 25 bp, Artificial
  probe
  misc_feature (1)..(25): SEQ ID NO: 3214; WAN024APN; Start 102; Stop 126
taccaacaccgaatgaagtttaata

SEQ ID NO: 349627 - DNA, 25 bp, Artificial
  probe
  misc_feature (1)..(25): SEQ ID NO: 3214; WAN024APN; Start 92; Stop 116
atcaattaaataccaacaccgaatg

SEQ ID NO: 349628 - DNA, 25 bp, Artificial
  probe
  misc_feature (1)..(25): SEQ ID NO: 3214; WAN024APN; Start 90; Stop 114
gaatcaattaaataccaacaccgaa

SEQ ID NO: 349629 - DNA, 25 bp, Artificial
  probe
  misc_feature (1)..(25): SEQ ID NO: 3214; WAN024APN; Start 95; Stop 119
aattaaataccaacaccgaatgaag

SEQ ID NO: 349630 - DNA, 25 bp, Artificial
  probe
  misc_feature (1)..(25): SEQ ID NO: 3214; WAN024APN; Start 105; Stop 129
caacaccgaatgaagtttaatagaa

SEQ ID NO: 349631 - DNA, 25 bp, Artificial
  probe
  misc_feature (1)..(25): SEQ ID NO: 3214; WAN024APN; Start 91; Stop 115
aatcaattaaataccaacaccgaat

SEQ ID NO: 349632 - DNA, 25 bp, Artificial
  probe
  misc_feature (1)..(25): SEQ ID NO: 3214; WAN024APN; Start 106; Stop 130
aacaccgaatgaagtttaatagaag

SEQ ID NO: 349633 - DNA, 25 bp, Artificial
  probe
  misc_feature (1)..(25): SEQ ID NO: 3214; WAN024APN; Start 88; Stop 112
tagaatcaattaaataccaacaccg

SEQ ID NO: 349634 - DNA, 25 bp, Artificial
  probe
  misc_feature (1)..(25): SEQ ID NO: 3214; WAN024APN; Start 51; Stop 75
taaacacattgacaaaagccaacat

SEQ ID NO: 349635 - DNA, 25 bp, Artificial
  probe
  misc_feature (1)..(25): SEQ ID NO: 3214; WAN024APN; Start 50; Stop 74
ataaacacattgacaaaagccaaca

SEQ ID NO: 349636 - DNA, 25 bp, Artificial
  probe
  misc_feature (1)..(25): SEQ ID NO: 3214; WAN024APN; Start 49; Stop 73
aataaacacattgacaaaagccaac

SEQ ID NO: 349637 - DNA, 25 bp, Artificial
  probe
  misc_feature (1)..(25): SEQ ID NO: 3214; WAN024APN; Start 47; Stop 71
ctaataaacacattgacaaaagcca

SEQ ID NO: 349638 - DNA, 25 bp, Artificial
  probe
  misc_feature (1)..(25): SEQ ID NO: 3214; WAN024APN; Start 46; Stop 70
actaataaacacattgacaaaagcc

SEQ ID NO: 349639 - DNA, 25 bp, Artificial
  probe
  misc_feature (1)..(25): SEQ ID NO: 3214; WAN024APN; Start 53; Stop 77
aacacattgacaaaagccaacattt

SEQ ID NO: 349640 - DNA, 25 bp, Artificial
  probe
  misc_feature (1)..(25): SEQ ID NO: 3214; WAN024APN; Start 52; Stop 76
aaacacattgacaaaagccaacatt

SEQ ID NO: 349641 - DNA, 25 bp, Artificial
  probe
  misc_feature (1)..(25): SEQ ID NO: 3214; WAN024APN; Start 48; Stop 72
taataaacacattgacaaaagccaa

SEQ ID NO: 349642 - DNA, 25 bp, Artificial
  probe
  misc_feature (1)..(25): SEQ ID NO: 3214; WAN024APN; Start 54; Stop 78
acacattgacaaaagccaacatttt

SEQ ID NO: 349643 - DNA, 25 bp, Artificial
  probe
  misc_feature (1)..(25): SEQ ID NO: 3214; WAN024APN; Start 87; Stop 111
ttagaatcaattaaataccaacacc

SEQ ID NO: 349644 - DNA, 25 bp, Artificial
  probe
  misc_feature (1)..(25): SEQ ID NO: 3214; WAN024APN; Start 45; Stop 69
tactaataaacacattgacaaaagc

SEQ ID NO: 349645 - DNA, 25 bp, Artificial
  probe
  misc_feature (1)..(25): SEQ ID NO: 3215; WAN024AMJ; Start 38; Stop 62
ctttgactaaactttgagcctaagg

SEQ ID NO: 349646 - DNA, 25 bp, Artificial
  probe
  misc_feature (1)..(25): SEQ ID NO: 3215; WAN024AMJ; Start 39; Stop 63
tttgactaaactttgagcctaaggt

SEQ ID NO: 349647 - DNA, 25 bp, Artificial
  probe
  misc_feature (1)..(25): SEQ ID NO: 3215; WAN024AMJ; Start 37; Stop 61
tctttgactaaactttgagcctaag

SEQ ID NO: 349648 - DNA, 25 bp, Artificial
  probe
  misc_feature (1)..(25): SEQ ID NO: 3215; WAN024AMJ; Start 34; Stop 58
atctctttgactaaactttgagcct

SEQ ID NO: 349649 - DNA, 25 bp, Artificial
  probe
  misc_feature (1)..(25): SEQ ID NO: 3215; WAN024AMJ; Start 35; Stop 59
tctctttgactaaactttgagccta

SEQ ID NO: 349650 - DNA, 25 bp, Artificial
  probe
  misc_feature (1)..(25): SEQ ID NO: 3215; WAN024AMJ; Start 33; Stop 57
aatctctttgactaaactttgagcc

SEQ ID NO: 349651 - DNA, 25 bp, Artificial
  probe
  misc_feature (1)..(25): SEQ ID NO: 3215; WAN024AMJ; Start 36; Stop 60
ctctttgactaaactttgagcctaa

SEQ ID NO: 349652 - DNA, 25 bp, Artificial
  probe
  misc_feature (1)..(25): SEQ ID NO: 3215; WAN024AMJ; Start 32; Stop 56
caatctctttgactaaactttgagc

SEQ ID NO: 349653 - DNA, 25 bp, Artificial
  probe
  misc_feature (1)..(25): SEQ ID NO: 3215; WAN024AMJ; Start 40; Stop 64
ttgactaaactttgagcctaaggtc

SEQ ID NO: 349654 - DNA, 25 bp, Artificial
  probe
  misc_feature (1)..(25): SEQ ID NO: 3215; WAN024AMJ; Start 42; Stop 66
gactaaactttgagcctaaggtctc

SEQ ID NO: 349655 - DNA, 25 bp, Artificial
  probe
  misc_feature (1)..(25): SEQ ID NO: 3215; WAN024AMJ; Start 41; Stop 65
tgactaaactttgagcctaaggtct

SEQ ID NO: 349656 - DNA, 25 bp, Artificial
  probe
  misc_feature (1)..(25): SEQ ID NO: 3215; WAN024AMJ; Start 31; Stop 55
tcaatctctttgactaaactttgag

SEQ ID NO: 349657 - DNA, 25 bp, Artificial
  probe
  misc_feature (1)..(25): SEQ ID NO: 3215; WAN024AMJ; Start 43; Stop 67
actaaactttgagcctaaggtctca

SEQ ID NO: 349658 - DNA, 25 bp, Artificial
  probe
  misc_feature (1)..(25): SEQ ID NO: 3215; WAN024AMJ; Start 52; Stop 76
tgagcctaaggtctcaaaatttgcg

SEQ ID NO: 349659 - DNA, 25 bp, Artificial
  probe
  misc_feature (1)..(25): SEQ ID NO: 3215; WAN024AMJ; Start 53; Stop 77
gagcctaaggtctcaaaatttgcgc

SEQ ID NO: 349660 - DNA, 25 bp, Artificial
  probe
  misc_feature (1)..(25): SEQ ID NO: 3216; WAN024A2V; Start 88; Stop 112
ttactcccattcttcttttccaaac

SEQ ID NO: 349661 - DNA, 25 bp, Artificial
  probe
  misc_feature (1)..(25): SEQ ID NO: 3216; WAN024A2V; Start 87; Stop 111
attactcccattcttcttttccaaa

SEQ ID NO: 349662 - DNA, 25 bp, Artificial
  probe
  misc_feature (1)..(25): SEQ ID NO: 3216; WAN024A2V; Start 86; Stop 110
aattactcccattcttcttttccaa

SEQ ID NO: 349663 - DNA, 25 bp, Artificial
  probe
  misc_feature (1)..(25): SEQ ID NO: 3216; WAN024A2V; Start 85; Stop 109
aaattactcccattcttcttttcca

SEQ ID NO: 349664 - DNA, 25 bp, Artificial
  probe
  misc_feature (1)..(25): SEQ ID NO: 3216; WAN024A2V; Start 166; Stop 190
actaaatccacctaattataggacg

SEQ ID NO: 349665 - DNA, 25 bp, Artificial
  probe
  misc_feature (1)..(25): SEQ ID NO: 3216; WAN024A2V; Start 217; Stop 241
tcccagtaccggagaaatattgttt

SEQ ID NO: 349666 - DNA, 25 bp, Artificial
  probe
  misc_feature (1)..(25): SEQ ID NO: 3216; WAN024A2V; Start 84; Stop 108
aaaattactcccattcttcttttcc

SEQ ID NO: 349667 - DNA, 25 bp, Artificial
  probe
  misc_feature (1)..(25): SEQ ID NO: 3216; WAN024A2V; Start 169; Stop 193
aaatccacctaattataggacgttt

SEQ ID NO: 349668 - DNA, 25 bp, Artificial
  probe
  misc_feature (1)..(25): SEQ ID NO: 3216; WAN024A2V; Start 16; Stop 40
gcaaattatttacagaaagaacaaa

SEQ ID NO: 349669 - DNA, 25 bp, Artificial
  probe
  misc_feature (1)..(25): SEQ ID NO: 3216; WAN024A2V; Start 15; Stop 39
tgcaaattatttacagaaagaacaa

SEQ ID NO: 349670 - DNA, 25 bp, Artificial
  probe
  misc_feature (1)..(25): SEQ ID NO: 3216; WAN024A2V; Start 216; Stop 240
gtcccagtaccggagaaatattgtt

SEQ ID NO: 349671 - DNA, 25 bp, Artificial
  probe
  misc_feature (1)..(25): SEQ ID NO: 3216; WAN024A2V; Start 167; Stop 191
ctaaatccacctaattataggacgt

SEQ ID NO: 349672 - DNA, 25 bp, Artificial
  probe
  misc_feature (1)..(25): SEQ ID NO: 3216; WAN024A2V; Start 123; Stop 147
tccaaaaccattcaaaatactagat

SEQ ID NO: 349673 - DNA, 25 bp, Artificial
  probe
  misc_feature (1)..(25): SEQ ID NO: 3216; WAN024A2V; Start 122; Stop 146
atccaaaaccattcaaaatactaga

SEQ ID NO: 349674 - DNA, 25 bp, Artificial
  probe
  misc_feature (1)..(25): SEQ ID NO: 3216; WAN024A2V; Start 218; Stop 242
cccagtaccggagaaatattgtttt

SEQ ID NO: 349675 - DNA, 25 bp, Artificial
  probe
  misc_feature (1)..(25): SEQ ID NO: 3216; WAN024A2V; Start 214; Stop 238
cagtcccagtaccggagaaatattg

SEQ ID NO: 349676 - DNA, 25 bp, Artificial
  probe
  misc_feature (1)..(25): SEQ ID NO: 3216; WAN024A2V; Start 219; Stop 243
ccagtaccggagaaatattgtttta

SEQ ID NO: 349677 - DNA, 25 bp, Artificial
  probe
  misc_feature (1)..(25): SEQ ID NO: 3216; WAN024A2V; Start 168; Stop 192
taaatccacctaattataggacgtt

SEQ ID NO: 349678 - DNA, 25 bp, Artificial
  probe
  misc_feature (1)..(25): SEQ ID NO: 3216; WAN024A2V; Start 215; Stop 239
agtcccagtaccggagaaatattgt

SEQ ID NO: 349679 - DNA, 25 bp, Artificial
  probe
  misc_feature (1)..(25): SEQ ID NO: 3216; WAN024A2V; Start 165; Stop 189
cactaaatccacctaattataggac

SEQ ID NO: 349680 - DNA, 25 bp, Artificial
  probe
  misc_feature (1)..(25): SEQ ID NO: 3216; WAN024A2V; Start 164; Stop 188
tcactaaatccacctaattatagga

SEQ ID NO: 349681 - DNA, 25 bp, Artificial
  probe
  misc_feature (1)..(25): SEQ ID NO: 3216; WAN024A2V; Start 124; Stop 148
ccaaaaccattcaaaatactagatt

SEQ ID NO: 349682 - DNA, 25 bp, Artificial
  probe
  misc_feature (1)..(25): SEQ ID NO: 3216; WAN024A2V; Start 172; Stop 196
tccacctaattataggacgttttca

SEQ ID NO: 349683 - DNA, 25 bp, Artificial
  probe
  misc_feature (1)..(25): SEQ ID NO: 3216; WAN024A2V; Start 173; Stop 197
ccacctaattataggacgttttcag

SEQ ID NO: 349684 - DNA, 25 bp, Artificial
  probe
  misc_feature (1)..(25): SEQ ID NO: 3216; WAN024A2V; Start 213; Stop 237
ccagtcccagtaccggagaaatatt

SEQ ID NO: 349685 - DNA, 25 bp, Artificial
  probe
  misc_feature (1)..(25): SEQ ID NO: 3216; WAN024A2V; Start 220; Stop 244
cagtaccggagaaatattgttttaa

SEQ ID NO: 349686 - DNA, 25 bp, Artificial
  probe
  misc_feature (1)..(25): SEQ ID NO: 3216; WAN024A2V; Start 174; Stop 198
cacctaattataggacgttttcaga

SEQ ID NO: 349687 - DNA, 25 bp, Artificial
  probe
  misc_feature (1)..(25): SEQ ID NO: 3216; WAN024A2V; Start 171; Stop 195
atccacctaattataggacgttttc

SEQ ID NO: 349688 - DNA, 25 bp, Artificial
  probe
  misc_feature (1)..(25): SEQ ID NO: 3216; WAN024A2V; Start 41; Stop 65
aaatgctctgaaacactgatttcaa

SEQ ID NO: 349689 - DNA, 25 bp, Artificial
  probe
  misc_feature (1)..(25): SEQ ID NO: 3216; WAN024A2V; Start 115; Stop 139
acaatatatccaaaaccattcaaaa

SEQ ID NO: 349690 - DNA, 25 bp, Artificial
  probe
  misc_feature (1)..(25): SEQ ID NO: 3216; WAN024A2V; Start 79; Stop 103
agtttaaaattactcccattcttct

SEQ ID NO: 349691 - DNA, 25 bp, Artificial
  probe
  misc_feature (1)..(25): SEQ ID NO: 3216; WAN024A2V; Start 170; Stop 194
aatccacctaattataggacgtttt

SEQ ID NO: 349692 - DNA, 25 bp, Artificial
  probe
  misc_feature (1)..(25): SEQ ID NO: 3216; WAN024A2V; Start 163; Stop 187
atcactaaatccacctaattatagg

SEQ ID NO: 349693 - DNA, 25 bp, Artificial
  probe
  misc_feature (1)..(25): SEQ ID NO: 3217; WAN0249IL; Start 1; Stop 25
cagtttaacctcctctaactagcaa

SEQ ID NO: 349694 - DNA, 25 bp, Artificial
  probe
  misc_feature (1)..(25): SEQ ID NO: 3217; WAN0249IL; Start 2; Stop 26
agtttaacctcctctaactagcaaa

SEQ ID NO: 349695 - DNA, 25 bp, Artificial
  probe
  misc_feature (1)..(25): SEQ ID NO: 3217; WAN0249IL; Start 3; Stop 27
gtttaacctcctctaactagcaaaa

SEQ ID NO: 349696 - DNA, 25 bp, Artificial
  probe
  misc_feature (1)..(25): SEQ ID NO: 3218; WAN0249UT; Start 89; Stop 113
ttcgttttcacattagagaggattg

SEQ ID NO: 349697 - DNA, 25 bp, Artificial
  probe
  misc_feature (1)..(25): SEQ ID NO: 3218; WAN0249UT; Start 88; Stop 112
gttcgttttcacattagagaggatt

SEQ ID NO: 349698 - DNA, 25 bp, Artificial
  probe
  misc_feature (1)..(25): SEQ ID NO: 3218; WAN0249UT; Start 90; Stop 114
tcgttttcacattagagaggattga

SEQ ID NO: 349699 - DNA, 25 bp, Artificial
  probe
  misc_feature (1)..(25): SEQ ID NO: 3218; WAN0249UT; Start 87; Stop 111
tgttcgttttcacattagagaggat

SEQ ID NO: 349700 - DNA, 25 bp, Artificial
  probe
  misc_feature (1)..(25): SEQ ID NO: 3218; WAN0249UT; Start 85; Stop 109
tttgttcgttttcacattagagagg

SEQ ID NO: 349701 - DNA, 25 bp, Artificial
  probe
  misc_feature (1)..(25): SEQ ID NO: 3218; WAN0249UT; Start 86; Stop 110
ttgttcgttttcacattagagagga

SEQ ID NO: 349702 - DNA, 25 bp, Artificial
  probe
  misc_feature (1)..(25): SEQ ID NO: 3218; WAN0249UT; Start 80; Stop 104
tgtcatttgttcgttttcacattag

SEQ ID NO: 349703 - DNA, 25 bp, Artificial
  probe
  misc_feature (1)..(25): SEQ ID NO: 3218; WAN0249UT; Start 81; Stop 105
gtcatttgttcgttttcacattaga

SEQ ID NO: 349704 - DNA, 25 bp, Artificial
  probe
  misc_feature (1)..(25): SEQ ID NO: 3218; WAN0249UT; Start 83; Stop 107
catttgttcgttttcacattagaga

SEQ ID NO: 349705 - DNA, 25 bp, Artificial
  probe
  misc_feature (1)..(25): SEQ ID NO: 3218; WAN0249UT; Start 82; Stop 106
tcatttgttcgttttcacattagag

SEQ ID NO: 349706 - DNA, 25 bp, Artificial
  probe
  misc_feature (1)..(25): SEQ ID NO: 3218; WAN0249UT; Start 84; Stop 108
atttgttcgttttcacattagagag

SEQ ID NO: 349707 - DNA, 25 bp, Artificial
  probe
  misc_feature (1)..(25): SEQ ID NO: 3218; WAN0249UT; Start 78; Stop 102
catgtcatttgttcgttttcacatt

SEQ ID NO: 349708 - DNA, 25 bp, Artificial
  probe
  misc_feature (1)..(25): SEQ ID NO: 3218; WAN0249UT; Start 79; Stop 103
atgtcatttgttcgttttcacatta

SEQ ID NO: 349709 - DNA, 25 bp, Artificial
  probe
  misc_feature (1)..(25): SEQ ID NO: 3218; WAN0249UT; Start 5; Stop 29
cttcgaaagtctaaatgtctctatt

SEQ ID NO: 349710 - DNA, 25 bp, Artificial
  probe
  misc_feature (1)..(25): SEQ ID NO: 3218; WAN0249UT; Start 7; Stop 31
tcgaaagtctaaatgtctctatttt

SEQ ID NO: 349711 - DNA, 25 bp, Artificial
  probe
  misc_feature (1)..(25): SEQ ID NO: 3218; WAN0249UT; Start 1; Stop 25
catacttcgaaagtctaaatgtctc

SEQ ID NO: 349712 - DNA, 25 bp, Artificial
  probe
  misc_feature (1)..(25): SEQ ID NO: 3218; WAN0249UT; Start 4; Stop 28
acttcgaaagtctaaatgtctctat

SEQ ID NO: 349713 - DNA, 25 bp, Artificial
  probe
  misc_feature (1)..(25): SEQ ID NO: 3218; WAN0249UT; Start 2; Stop 26
atacttcgaaagtctaaatgtctct

SEQ ID NO: 349714 - DNA, 25 bp, Artificial
  probe
  misc_feature (1)..(25): SEQ ID NO: 3218; WAN0249UT; Start 6; Stop 30
ttcgaaagtctaaatgtctctattt

SEQ ID NO: 349715 - DNA, 25 bp, Artificial
  probe
  misc_feature (1)..(25): SEQ ID NO: 3218; WAN0249UT; Start 3; Stop 27
tacttcgaaagtctaaatgtctcta

SEQ ID NO: 349716 - DNA, 25 bp, Artificial
  probe
  misc_feature (1)..(25): SEQ ID NO: 3218; WAN0249UT; Start 77; Stop 101
acatgtcatttgttcgttttcacat

SEQ ID NO: 349717 - DNA, 25 bp, Artificial
  probe
  misc_feature (1)..(25): SEQ ID NO: 3218; WAN0249UT; Start 75; Stop 99
aaacatgtcatttgttcgttttcac

SEQ ID NO: 349718 - DNA, 25 bp, Artificial
  probe
  misc_feature (1)..(25): SEQ ID NO: 3218; WAN0249UT; Start 74; Stop 98
caaacatgtcatttgttcgttttca

SEQ ID NO: 349719 - DNA, 25 bp, Artificial
  probe
  misc_feature (1)..(25): SEQ ID NO: 3218; WAN0249UT; Start 37; Stop 61
ttttcctctgtaaatcttactatct

SEQ ID NO: 349720 - DNA, 25 bp, Artificial
  probe
  misc_feature (1)..(25): SEQ ID NO: 3218; WAN0249UT; Start 76; Stop 100
aacatgtcatttgttcgttttcaca

SEQ ID NO: 349721 - DNA, 25 bp, Artificial
  probe
  misc_feature (1)..(25): SEQ ID NO: 3219; WAN0249LU; Start 33; Stop 57
ggctcaatctatttctaggaggatg

SEQ ID NO: 349722 - DNA, 25 bp, Artificial
  probe
  misc_feature (1)..(25): SEQ ID NO: 3219; WAN0249LU; Start 32; Stop 56
aggctcaatctatttctaggaggat

SEQ ID NO: 349723 - DNA, 25 bp, Artificial
  probe
  misc_feature (1)..(25): SEQ ID NO: 3219; WAN0249LU; Start 31; Stop 55
taggctcaatctatttctaggagga

SEQ ID NO: 349724 - DNA, 25 bp, Artificial
  probe
  misc_feature (1)..(25): SEQ ID NO: 3219; WAN0249LU; Start 34; Stop 58
gctcaatctatttctaggaggatga

SEQ ID NO: 349725 - DNA, 25 bp, Artificial
  probe
  misc_feature (1)..(25): SEQ ID NO: 3219; WAN0249LU; Start 30; Stop 54
ataggctcaatctatttctaggagg

SEQ ID NO: 349726 - DNA, 25 bp, Artificial
  probe
  misc_feature (1)..(25): SEQ ID NO: 3219; WAN0249LU; Start 36; Stop 60
tcaatctatttctaggaggatgaga

SEQ ID NO: 349727 - DNA, 25 bp, Artificial
  probe
  misc_feature (1)..(25): SEQ ID NO: 3219; WAN0249LU; Start 37; Stop 61
caatctatttctaggaggatgagat

SEQ ID NO: 349728 - DNA, 25 bp, Artificial
  probe
  misc_feature (1)..(25): SEQ ID NO: 3219; WAN0249LU; Start 29; Stop 53
aataggctcaatctatttctaggag

SEQ ID NO: 349729 - DNA, 25 bp, Artificial
  probe
  misc_feature (1)..(25): SEQ ID NO: 3219; WAN0249LU; Start 35; Stop 59
ctcaatctatttctaggaggatgag

SEQ ID NO: 349730 - DNA, 25 bp, Artificial
  probe
  misc_feature (1)..(25): SEQ ID NO: 3219; WAN0249LU; Start 18; Stop 42
ttttgtgataaaataggctcaatct

SEQ ID NO: 349731 - DNA, 25 bp, Artificial
  probe
  misc_feature (1)..(25): SEQ ID NO: 3219; WAN0249LU; Start 19; Stop 43
tttgtgataaaataggctcaatcta

SEQ ID NO: 349732 - DNA, 25 bp, Artificial
  probe
  misc_feature (1)..(25): SEQ ID NO: 3219; WAN0249LU; Start 20; Stop 44
ttgtgataaaataggctcaatctat

SEQ ID NO: 349733 - DNA, 25 bp, Artificial
  probe
  misc_feature (1)..(25): SEQ ID NO: 3219; WAN0249LU; Start 1; Stop 25
catagctttctcttatattttgtga

SEQ ID NO: 349734 - DNA, 25 bp, Artificial
  probe
  misc_feature (1)..(25): SEQ ID NO: 3219; WAN0249LU; Start 17; Stop 41
attttgtgataaaataggctcaatc

SEQ ID NO: 349735 - DNA, 25 bp, Artificial
  probe
  misc_feature (1)..(25): SEQ ID NO: 3219; WAN0249LU; Start 21; Stop 45
tgtgataaaataggctcaatctatt

SEQ ID NO: 349736 - DNA, 25 bp, Artificial
  probe
  misc_feature (1)..(25): SEQ ID NO: 3219; WAN0249LU; Start 16; Stop 40
tattttgtgataaaataggctcaat

SEQ ID NO: 349737 - DNA, 25 bp, Artificial
  probe
  misc_feature (1)..(25): SEQ ID NO: 3219; WAN0249LU; Start 15; Stop 39
atattttgtgataaaataggctcaa

SEQ ID NO: 349738 - DNA, 25 bp, Artificial
  probe
  misc_feature (1)..(25): SEQ ID NO: 3220; WAN024ADO; Start 14; Stop 38
cttaactggaatactcactatctct

SEQ ID NO: 349739 - DNA, 25 bp, Artificial
  probe
  misc_feature (1)..(25): SEQ ID NO: 3220; WAN024ADO; Start 13; Stop 37
tcttaactggaatactcactatctc

SEQ ID NO: 349740 - DNA, 25 bp, Artificial
  probe
  misc_feature (1)..(25): SEQ ID NO: 3220; WAN024ADO; Start 211; Stop 235
cttaacttcatactcccaaagaggt

SEQ ID NO: 349741 - DNA, 25 bp, Artificial
  probe
  misc_feature (1)..(25): SEQ ID NO: 3220; WAN024ADO; Start 15; Stop 39
ttaactggaatactcactatctctt

SEQ ID NO: 349742 - DNA, 25 bp, Artificial
  probe
  misc_feature (1)..(25): SEQ ID NO: 3220; WAN024ADO; Start 12; Stop 36
ttcttaactggaatactcactatct

SEQ ID NO: 349743 - DNA, 25 bp, Artificial
  probe
  misc_feature (1)..(25): SEQ ID NO: 3220; WAN024ADO; Start 212; Stop 236
ttaacttcatactcccaaagaggta

SEQ ID NO: 349744 - DNA, 25 bp, Artificial
  probe
  misc_feature (1)..(25): SEQ ID NO: 3220; WAN024ADO; Start 8; Stop 32
ttgattcttaactggaatactcact

SEQ ID NO: 349745 - DNA, 25 bp, Artificial
  probe
  misc_feature (1)..(25): SEQ ID NO: 3220; WAN024ADO; Start 219; Stop 243
catactcccaaagaggtattagtgt

SEQ ID NO: 349746 - DNA, 25 bp, Artificial
  probe
  misc_feature (1)..(25): SEQ ID NO: 3220; WAN024ADO; Start 220; Stop 244
atactcccaaagaggtattagtgtc

SEQ ID NO: 349747 - DNA, 25 bp, Artificial
  probe
  misc_feature (1)..(25): SEQ ID NO: 3220; WAN024ADO; Start 218; Stop 242
tcatactcccaaagaggtattagtg

SEQ ID NO: 349748 - DNA, 25 bp, Artificial
  probe
  misc_feature (1)..(25): SEQ ID NO: 3220; WAN024ADO; Start 214; Stop 238
aacttcatactcccaaagaggtatt

SEQ ID NO: 349749 - DNA, 25 bp, Artificial
  probe
  misc_feature (1)..(25): SEQ ID NO: 3220; WAN024ADO; Start 19; Stop 43
ctggaatactcactatctctttaca

SEQ ID NO: 349750 - DNA, 25 bp, Artificial
  probe
  misc_feature (1)..(25): SEQ ID NO: 3220; WAN024ADO; Start 18; Stop 42
actggaatactcactatctctttac

SEQ ID NO: 349751 - DNA, 25 bp, Artificial
  probe
  misc_feature (1)..(25): SEQ ID NO: 3220; WAN024ADO; Start 217; Stop 241
ttcatactcccaaagaggtattagt

SEQ ID NO: 349752 - DNA, 25 bp, Artificial
  probe
  misc_feature (1)..(25): SEQ ID NO: 3220; WAN024ADO; Start 215; Stop 239
acttcatactcccaaagaggtatta

SEQ ID NO: 349753 - DNA, 25 bp, Artificial
  probe
  misc_feature (1)..(25): SEQ ID NO: 3220; WAN024ADO; Start 213; Stop 237
taacttcatactcccaaagaggtat

SEQ ID NO: 349754 - DNA, 25 bp, Artificial
  probe
  misc_feature (1)..(25): SEQ ID NO: 3220; WAN024ADO; Start 207; Stop 231
gaatcttaacttcatactcccaaag

SEQ ID NO: 349755 - DNA, 25 bp, Artificial
  probe
  misc_feature (1)..(25): SEQ ID NO: 3220; WAN024ADO; Start 216; Stop 240
cttcatactcccaaagaggtattag

SEQ ID NO: 349756 - DNA, 25 bp, Artificial
  probe
  misc_feature (1)..(25): SEQ ID NO: 3220; WAN024ADO; Start 9; Stop 33
tgattcttaactggaatactcacta

SEQ ID NO: 349757 - DNA, 25 bp, Artificial
  probe
  misc_feature (1)..(25): SEQ ID NO: 3220; WAN024ADO; Start 7; Stop 31
attgattcttaactggaatactcac

SEQ ID NO: 349758 - DNA, 25 bp, Artificial
  probe
  misc_feature (1)..(25): SEQ ID NO: 3220; WAN024ADO; Start 210; Stop 234
tcttaacttcatactcccaaagagg

SEQ ID NO: 349759 - DNA, 25 bp, Artificial
  probe
  misc_feature (1)..(25): SEQ ID NO: 3220; WAN024ADO; Start 20; Stop 44
tggaatactcactatctctttacat

SEQ ID NO: 349760 - DNA, 25 bp, Artificial
  probe
  misc_feature (1)..(25): SEQ ID NO: 3220; WAN024ADO; Start 17; Stop 41
aactggaatactcactatctcttta

SEQ ID NO: 349761 - DNA, 25 bp, Artificial
  probe
  misc_feature (1)..(25): SEQ ID NO: 3220; WAN024ADO; Start 16; Stop 40
taactggaatactcactatctcttt

SEQ ID NO: 349762 - DNA, 25 bp, Artificial
  probe
  misc_feature (1)..(25): SEQ ID NO: 3220; WAN024ADO; Start 204; Stop 228
tgtgaatcttaacttcatactccca

SEQ ID NO: 349763 - DNA, 25 bp, Artificial
  probe
  misc_feature (1)..(25): SEQ ID NO: 3220; WAN024ADO; Start 21; Stop 45
ggaatactcactatctctttacatc

SEQ ID NO: 349764 - DNA, 25 bp, Artificial
  probe
  misc_feature (1)..(25): SEQ ID NO: 3220; WAN024ADO; Start 41; Stop 65
acatcaagaaaatgactaaacaggg

SEQ ID NO: 349765 - DNA, 25 bp, Artificial
  probe
  misc_feature (1)..(25): SEQ ID NO: 3220; WAN024ADO; Start 6; Stop 30
aattgattcttaactggaatactca

SEQ ID NO: 349766 - DNA, 25 bp, Artificial
  probe
  misc_feature (1)..(25): SEQ ID NO: 3220; WAN024ADO; Start 45; Stop 69
caagaaaatgactaaacagggaagt

SEQ ID NO: 349767 - DNA, 25 bp, Artificial
  probe
  misc_feature (1)..(25): SEQ ID NO: 3220; WAN024ADO; Start 50; Stop 74
aaatgactaaacagggaagtttgcc

SEQ ID NO: 349768 - DNA, 25 bp, Artificial
  probe
  misc_feature (1)..(25): SEQ ID NO: 3220; WAN024ADO; Start 44; Stop 68
tcaagaaaatgactaaacagggaag

SEQ ID NO: 349769 - DNA, 25 bp, Artificial
  probe
  misc_feature (1)..(25): SEQ ID NO: 3220; WAN024ADO; Start 42; Stop 66
catcaagaaaatgactaaacaggga

SEQ ID NO: 349770 - DNA, 25 bp, Artificial
  probe
  misc_feature (1)..(25): SEQ ID NO: 3220; WAN024ADO; Start 209; Stop 233
atcttaacttcatactcccaaagag

SEQ ID NO: 349771 - DNA, 25 bp, Artificial
  probe
  misc_feature (1)..(25): SEQ ID NO: 3221; WAN024A44; Start 14; Stop 38
gaggttaggaaagagtaatatagcc

SEQ ID NO: 349772 - DNA, 25 bp, Artificial
  probe
  misc_feature (1)..(25): SEQ ID NO: 3221; WAN024A44; Start 13; Stop 37
ggaggttaggaaagagtaatatagc

SEQ ID NO: 349773 - DNA, 25 bp, Artificial
  probe
  misc_feature (1)..(25): SEQ ID NO: 3221; WAN024A44; Start 79; Stop 103
aattcatgcgtcaactcataaagaa

SEQ ID NO: 349774 - DNA, 25 bp, Artificial
  probe
  misc_feature (1)..(25): SEQ ID NO: 3221; WAN024A44; Start 74; Stop 98
gtaagaattcatgcgtcaactcata

SEQ ID NO: 349775 - DNA, 25 bp, Artificial
  probe
  misc_feature (1)..(25): SEQ ID NO: 3221; WAN024A44; Start 75; Stop 99
taagaattcatgcgtcaactcataa

SEQ ID NO: 349776 - DNA, 25 bp, Artificial
  probe
  misc_feature (1)..(25): SEQ ID NO: 3221; WAN024A44; Start 73; Stop 97
ggtaagaattcatgcgtcaactcat

SEQ ID NO: 349777 - DNA, 25 bp, Artificial
  probe
  misc_feature (1)..(25): SEQ ID NO: 3221; WAN024A44; Start 15; Stop 39
aggttaggaaagagtaatatagcct

SEQ ID NO: 349778 - DNA, 25 bp, Artificial
  probe
  misc_feature (1)..(25): SEQ ID NO: 3221; WAN024A44; Start 71; Stop 95
ttggtaagaattcatgcgtcaactc

SEQ ID NO: 349779 - DNA, 25 bp, Artificial
  probe
  misc_feature (1)..(25): SEQ ID NO: 3221; WAN024A44; Start 10; Stop 34
aaaggaggttaggaaagagtaatat

SEQ ID NO: 349780 - DNA, 25 bp, Artificial
  probe
  misc_feature (1)..(25): SEQ ID NO: 3221; WAN024A44; Start 72; Stop 96
tggtaagaattcatgcgtcaactca

SEQ ID NO: 349781 - DNA, 25 bp, Artificial
  probe
  misc_feature (1)..(25): SEQ ID NO: 3221; WAN024A44; Start 78; Stop 102
gaattcatgcgtcaactcataaaga

SEQ ID NO: 349782 - DNA, 25 bp, Artificial
  probe
  misc_feature (1)..(25): SEQ ID NO: 3221; WAN024A44; Start 77; Stop 101
agaattcatgcgtcaactcataaag

SEQ ID NO: 349783 - DNA, 25 bp, Artificial
  probe
  misc_feature (1)..(25): SEQ ID NO: 3221; WAN024A44; Start 12; Stop 36
aggaggttaggaaagagtaatatag

SEQ ID NO: 349784 - DNA, 25 bp, Artificial
  probe
  misc_feature (1)..(25): SEQ ID NO: 3221; WAN024A44; Start 76; Stop 100
aagaattcatgcgtcaactcataaa

SEQ ID NO: 349785 - DNA, 25 bp, Artificial
  probe
  misc_feature (1)..(25): SEQ ID NO: 3221; WAN024A44; Start 69; Stop 93
atttggtaagaattcatgcgtcaac

SEQ ID NO: 349786 - DNA, 25 bp, Artificial
  probe
  misc_feature (1)..(25): SEQ ID NO: 3221; WAN024A44; Start 68; Stop 92
aatttggtaagaattcatgcgtcaa

SEQ ID NO: 349787 - DNA, 25 bp, Artificial
  probe
  misc_feature (1)..(25): SEQ ID NO: 3221; WAN024A44; Start 67; Stop 91
aaatttggtaagaattcatgcgtca

SEQ ID NO: 349788 - DNA, 25 bp, Artificial
  probe
  misc_feature (1)..(25): SEQ ID NO: 3221; WAN024A44; Start 65; Stop 89
agaaatttggtaagaattcatgcgt

SEQ ID NO: 349789 - DNA, 25 bp, Artificial
  probe
  misc_feature (1)..(25): SEQ ID NO: 3221; WAN024A44; Start 66; Stop 90
gaaatttggtaagaattcatgcgtc

SEQ ID NO: 349790 - DNA, 25 bp, Artificial
  probe
  misc_feature (1)..(25): SEQ ID NO: 3221; WAN024A44; Start 64; Stop 88
cagaaatttggtaagaattcatgcg

SEQ ID NO: 349791 - DNA, 25 bp, Artificial
  probe
  misc_feature (1)..(25): SEQ ID NO: 3221; WAN024A44; Start 62; Stop 86
cgcagaaatttggtaagaattcatg

SEQ ID NO: 349792 - DNA, 25 bp, Artificial
  probe
  misc_feature (1)..(25): SEQ ID NO: 3221; WAN024A44; Start 70; Stop 94
tttggtaagaattcatgcgtcaact

SEQ ID NO: 349793 - DNA, 25 bp, Artificial
  probe
  misc_feature (1)..(25): SEQ ID NO: 3221; WAN024A44; Start 11; Stop 35
aaggaggttaggaaagagtaatata

SEQ ID NO: 349794 - DNA, 25 bp, Artificial
  probe
  misc_feature (1)..(25): SEQ ID NO: 3221; WAN024A44; Start 9; Stop 33
aaaaggaggttaggaaagagtaata

SEQ ID NO: 349795 - DNA, 25 bp, Artificial
  probe
  misc_feature (1)..(25): SEQ ID NO: 3221; WAN024A44; Start 61; Stop 85
gcgcagaaatttggtaagaattcat

SEQ ID NO: 349796 - DNA, 25 bp, Artificial
  probe
  misc_feature (1)..(25): SEQ ID NO: 3221; WAN024A44; Start 63; Stop 87
gcagaaatttggtaagaattcatgc

SEQ ID NO: 349797 - DNA, 25 bp, Artificial
  probe
  misc_feature (1)..(25): SEQ ID NO: 3221; WAN024A44; Start 16; Stop 40
ggttaggaaagagtaatatagccta

SEQ ID NO: 349798 - DNA, 25 bp, Artificial
  probe
  misc_feature (1)..(25): SEQ ID NO: 3221; WAN024A44; Start 17; Stop 41
gttaggaaagagtaatatagcctat

SEQ ID NO: 349799 - DNA, 25 bp, Artificial
  probe
  misc_feature (1)..(25): SEQ ID NO: 3222; WAN024AS2; Start 107; Stop 131
ttcacaaatcaaagaaaacgcttgc

SEQ ID NO: 349800 - DNA, 25 bp, Artificial
  probe
  misc_feature (1)..(25): SEQ ID NO: 3222; WAN024AS2; Start 106; Stop 130
tttcacaaatcaaagaaaacgcttg

SEQ ID NO: 349801 - DNA, 25 bp, Artificial
  probe
  misc_feature (1)..(25): SEQ ID NO: 3222; WAN024AS2; Start 113; Stop 137
aatcaaagaaaacgcttgcatattg

SEQ ID NO: 349802 - DNA, 25 bp, Artificial
  probe
  misc_feature (1)..(25): SEQ ID NO: 3222; WAN024AS2; Start 111; Stop 135
caaatcaaagaaaacgcttgcatat

SEQ ID NO: 349803 - DNA, 25 bp, Artificial
  probe
  misc_feature (1)..(25): SEQ ID NO: 3222; WAN024AS2; Start 114; Stop 138
atcaaagaaaacgcttgcatattgt

SEQ ID NO: 349804 - DNA, 25 bp, Artificial
  probe
  misc_feature (1)..(25): SEQ ID NO: 3222; WAN024AS2; Start 115; Stop 139
tcaaagaaaacgcttgcatattgtt

SEQ ID NO: 349805 - DNA, 25 bp, Artificial
  probe
  misc_feature (1)..(25): SEQ ID NO: 3222; WAN024AS2; Start 110; Stop 134
acaaatcaaagaaaacgcttgcata

SEQ ID NO: 349806 - DNA, 25 bp, Artificial
  probe
  misc_feature (1)..(25): SEQ ID NO: 3222; WAN024AS2; Start 112; Stop 136
aaatcaaagaaaacgcttgcatatt

SEQ ID NO: 349807 - DNA, 25 bp, Artificial
  probe
  misc_feature (1)..(25): SEQ ID NO: 3222; WAN024AS2; Start 123; Stop 147
aacgcttgcatattgttttactaca

SEQ ID NO: 349808 - DNA, 25 bp, Artificial
  probe
  misc_feature (1)..(25): SEQ ID NO: 3222; WAN024AS2; Start 124; Stop 148
acgcttgcatattgttttactacat

SEQ ID NO: 349809 - DNA, 25 bp, Artificial
  probe
  misc_feature (1)..(25): SEQ ID NO: 3222; WAN024AS2; Start 125; Stop 149
cgcttgcatattgttttactacatg

SEQ ID NO: 349810 - DNA, 25 bp, Artificial
  probe
  misc_feature (1)..(25): SEQ ID NO: 3222; WAN024AS2; Start 109; Stop 133
cacaaatcaaagaaaacgcttgcat

SEQ ID NO: 349811 - DNA, 25 bp, Artificial
  probe
  misc_feature (1)..(25): SEQ ID NO: 3222; WAN024AS2; Start 41; Stop 65
tttatctccgtcatttatactgata

SEQ ID NO: 349812 - DNA, 25 bp, Artificial
  probe
  misc_feature (1)..(25): SEQ ID NO: 3222; WAN024AS2; Start 116; Stop 140
caaagaaaacgcttgcatattgttt

SEQ ID NO: 349813 - DNA, 25 bp, Artificial
  probe
  misc_feature (1)..(25): SEQ ID NO: 3222; WAN024AS2; Start 122; Stop 146
aaacgcttgcatattgttttactac

SEQ ID NO: 349814 - DNA, 25 bp, Artificial
  probe
  misc_feature (1)..(25): SEQ ID NO: 3222; WAN024AS2; Start 108; Stop 132
tcacaaatcaaagaaaacgcttgca

SEQ ID NO: 349815 - DNA, 25 bp, Artificial
  probe
  misc_feature (1)..(25): SEQ ID NO: 3222; WAN024AS2; Start 42; Stop 66
ttatctccgtcatttatactgatat

SEQ ID NO: 349816 - DNA, 25 bp, Artificial
  probe
  misc_feature (1)..(25): SEQ ID NO: 3222; WAN024AS2; Start 40; Stop 64
ttttatctccgtcatttatactgat

SEQ ID NO: 349817 - DNA, 25 bp, Artificial
  probe
  misc_feature (1)..(25): SEQ ID NO: 3222; WAN024AS2; Start 135; Stop 159
ttgttttactacatgctatactgat

SEQ ID NO: 349818 - DNA, 25 bp, Artificial
  probe
  misc_feature (1)..(25): SEQ ID NO: 3222; WAN024AS2; Start 134; Stop 158
attgttttactacatgctatactga

SEQ ID NO: 349819 - DNA, 25 bp, Artificial
  probe
  misc_feature (1)..(25): SEQ ID NO: 3222; WAN024AS2; Start 136; Stop 160
tgttttactacatgctatactgata

SEQ ID NO: 349820 - DNA, 25 bp, Artificial
  probe
  misc_feature (1)..(25): SEQ ID NO: 3222; WAN024AS2; Start 126; Stop 150
gcttgcatattgttttactacatgc

SEQ ID NO: 349821 - DNA, 25 bp, Artificial
  probe
  misc_feature (1)..(25): SEQ ID NO: 3222; WAN024AS2; Start 120; Stop 144
gaaaacgcttgcatattgttttact

SEQ ID NO: 349822 - DNA, 25 bp, Artificial
  probe
  misc_feature (1)..(25): SEQ ID NO: 3222; WAN024AS2; Start 119; Stop 143
agaaaacgcttgcatattgttttac

SEQ ID NO: 349823 - DNA, 25 bp, Artificial
  probe
  misc_feature (1)..(25): SEQ ID NO: 3222; WAN024AS2; Start 117; Stop 141
aaagaaaacgcttgcatattgtttt

SEQ ID NO: 349824 - DNA, 25 bp, Artificial
  probe
  misc_feature (1)..(25): SEQ ID NO: 3222; WAN024AS2; Start 118; Stop 142
aagaaaacgcttgcatattgtttta

SEQ ID NO: 349825 - DNA, 25 bp, Artificial
  probe
  misc_feature (1)..(25): SEQ ID NO: 3222; WAN024AS2; Start 127; Stop 151
cttgcatattgttttactacatgct

SEQ ID NO: 349826 - DNA, 25 bp, Artificial
  probe
  misc_feature (1)..(25): SEQ ID NO: 3222; WAN024AS2; Start 121; Stop 145
aaaacgcttgcatattgttttacta

SEQ ID NO: 349827 - DNA, 25 bp, Artificial
  probe
  misc_feature (1)..(25): SEQ ID NO: 3222; WAN024AS2; Start 128; Stop 152
ttgcatattgttttactacatgcta

SEQ ID NO: 349828 - DNA, 25 bp, Artificial
  probe
  misc_feature (1)..(25): SEQ ID NO: 3222; WAN024AS2; Start 129; Stop 153
tgcatattgttttactacatgctat

SEQ ID NO: 349829 - DNA, 25 bp, Artificial
  probe
  misc_feature (1)..(25): SEQ ID NO: 3222; WAN024AS2; Start 162; Stop 186
agaaatttattgattggagaatcat

SEQ ID NO: 349830 - DNA, 25 bp, Artificial
  probe
  misc_feature (1)..(25): SEQ ID NO: 3222; WAN024AS2; Start 130; Stop 154
gcatattgttttactacatgctata

SEQ ID NO: 349831 - DNA, 25 bp, Artificial
  probe
  misc_feature (1)..(25): SEQ ID NO: 3223; WAN024A2L; Start 152; Stop 176
ctgagcaaactgtaagagatgaaga

SEQ ID NO: 349832 - DNA, 25 bp, Artificial
  probe
  misc_feature (1)..(25): SEQ ID NO: 3223; WAN024A2L; Start 153; Stop 177
tgagcaaactgtaagagatgaagac

SEQ ID NO: 349833 - DNA, 25 bp, Artificial
  probe
  misc_feature (1)..(25): SEQ ID NO: 3223; WAN024A2L; Start 156; Stop 180
gcaaactgtaagagatgaagacaat

SEQ ID NO: 349834 - DNA, 25 bp, Artificial
  probe
  misc_feature (1)..(25): SEQ ID NO: 3223; WAN024A2L; Start 155; Stop 179
agcaaactgtaagagatgaagacaa

SEQ ID NO: 349835 - DNA, 25 bp, Artificial
  probe
  misc_feature (1)..(25): SEQ ID NO: 3223; WAN024A2L; Start 154; Stop 178
gagcaaactgtaagagatgaagaca

SEQ ID NO: 349836 - DNA, 25 bp, Artificial
  probe
  misc_feature (1)..(25): SEQ ID NO: 3223; WAN024A2L; Start 151; Stop 175
gctgagcaaactgtaagagatgaag

SEQ ID NO: 349837 - DNA, 25 bp, Artificial
  probe
  misc_feature (1)..(25): SEQ ID NO: 3223; WAN024A2L; Start 98; Stop 122
acagataaatcgaatggtaaaggga

SEQ ID NO: 349838 - DNA, 25 bp, Artificial
  probe
  misc_feature (1)..(25): SEQ ID NO: 3223; WAN024A2L; Start 97; Stop 121
aacagataaatcgaatggtaaaggg

SEQ ID NO: 349839 - DNA, 25 bp, Artificial
  probe
  misc_feature (1)..(25): SEQ ID NO: 3223; WAN024A2L; Start 99; Stop 123
cagataaatcgaatggtaaagggat

SEQ ID NO: 349840 - DNA, 25 bp, Artificial
  probe
  misc_feature (1)..(25): SEQ ID NO: 3223; WAN024A2L; Start 96; Stop 120
aaacagataaatcgaatggtaaagg

SEQ ID NO: 349841 - DNA, 25 bp, Artificial
  probe
  misc_feature (1)..(25): SEQ ID NO: 3223; WAN024A2L; Start 132; Stop 156
tgttcaaatcattgagaatgctgag

SEQ ID NO: 349842 - DNA, 25 bp, Artificial
  probe
  misc_feature (1)..(25): SEQ ID NO: 3223; WAN024A2L; Start 131; Stop 155
atgttcaaatcattgagaatgctga

SEQ ID NO: 349843 - DNA, 25 bp, Artificial
  probe
  misc_feature (1)..(25): SEQ ID NO: 3223; WAN024A2L; Start 157; Stop 181
caaactgtaagagatgaagacaata

SEQ ID NO: 349844 - DNA, 25 bp, Artificial
  probe
  misc_feature (1)..(25): SEQ ID NO: 3223; WAN024A2L; Start 94; Stop 118
acaaacagataaatcgaatggtaaa

SEQ ID NO: 349845 - DNA, 25 bp, Artificial
  probe
  misc_feature (1)..(25): SEQ ID NO: 3223; WAN024A2L; Start 130; Stop 154
aatgttcaaatcattgagaatgctg

SEQ ID NO: 349846 - DNA, 25 bp, Artificial
  probe
  misc_feature (1)..(25): SEQ ID NO: 3223; WAN024A2L; Start 133; Stop 157
gttcaaatcattgagaatgctgagc

SEQ ID NO: 349847 - DNA, 25 bp, Artificial
  probe
  misc_feature (1)..(25): SEQ ID NO: 3223; WAN024A2L; Start 91; Stop 115
aatacaaacagataaatcgaatggt

SEQ ID NO: 349848 - DNA, 25 bp, Artificial
  probe
  misc_feature (1)..(25): SEQ ID NO: 3223; WAN024A2L; Start 95; Stop 119
caaacagataaatcgaatggtaaag

SEQ ID NO: 349849 - DNA, 25 bp, Artificial
  probe
  misc_feature (1)..(25): SEQ ID NO: 3223; WAN024A2L; Start 90; Stop 114
caatacaaacagataaatcgaatgg

SEQ ID NO: 349850 - DNA, 25 bp, Artificial
  probe
  misc_feature (1)..(25): SEQ ID NO: 3223; WAN024A2L; Start 4; Stop 28
gacatgacaatggaattttcaaagc

SEQ ID NO: 349851 - DNA, 25 bp, Artificial
  probe
  misc_feature (1)..(25): SEQ ID NO: 3223; WAN024A2L; Start 137; Stop 161
aaatcattgagaatgctgagcaaac

SEQ ID NO: 349852 - DNA, 25 bp, Artificial
  probe
  misc_feature (1)..(25): SEQ ID NO: 3223; WAN024A2L; Start 136; Stop 160
caaatcattgagaatgctgagcaaa

SEQ ID NO: 349853 - DNA, 25 bp, Artificial
  probe
  misc_feature (1)..(25): SEQ ID NO: 3223; WAN024A2L; Start 3; Stop 27
tgacatgacaatggaattttcaaag

SEQ ID NO: 349854 - DNA, 25 bp, Artificial
  probe
  misc_feature (1)..(25): SEQ ID NO: 3223; WAN024A2L; Start 1; Stop 25
catgacatgacaatggaattttcaa

SEQ ID NO: 349855 - DNA, 25 bp, Artificial
  probe
  misc_feature (1)..(25): SEQ ID NO: 3223; WAN024A2L; Start 159; Stop 183
aactgtaagagatgaagacaataaa

SEQ ID NO: 349856 - DNA, 25 bp, Artificial
  probe
  misc_feature (1)..(25): SEQ ID NO: 3223; WAN024A2L; Start 158; Stop 182
aaactgtaagagatgaagacaataa

SEQ ID NO: 349857 - DNA, 25 bp, Artificial
  probe
  misc_feature (1)..(25): SEQ ID NO: 3223; WAN024A2L; Start 93; Stop 117
tacaaacagataaatcgaatggtaa

SEQ ID NO: 349858 - DNA, 25 bp, Artificial
  probe
  misc_feature (1)..(25): SEQ ID NO: 3223; WAN024A2L; Start 142; Stop 166
attgagaatgctgagcaaactgtaa

SEQ ID NO: 349859 - DNA, 25 bp, Artificial
  probe
  misc_feature (1)..(25): SEQ ID NO: 3223; WAN024A2L; Start 128; Stop 152
gtaatgttcaaatcattgagaatgc

SEQ ID NO: 349860 - DNA, 25 bp, Artificial
  probe
  misc_feature (1)..(25): SEQ ID NO: 3223; WAN024A2L; Start 147; Stop 171
gaatgctgagcaaactgtaagagat

SEQ ID NO: 349861 - DNA, 25 bp, Artificial
  probe
  misc_feature (1)..(25): SEQ ID NO: 3223; WAN024A2L; Start 5; Stop 29
acatgacaatggaattttcaaagct

SEQ ID NO: 349862 - DNA, 25 bp, Artificial
  probe
  misc_feature (1)..(25): SEQ ID NO: 3223; WAN024A2L; Start 129; Stop 153
taatgttcaaatcattgagaatgct

SEQ ID NO: 349863 - DNA, 25 bp, Artificial
  probe
  misc_feature (1)..(25): SEQ ID NO: 3223; WAN024A2L; Start 138; Stop 162
aatcattgagaatgctgagcaaact

SEQ ID NO: 349864 - DNA, 25 bp, Artificial
  probe
  misc_feature (1)..(25): SEQ ID NO: 3224; WAN0249LI; Start 15; Stop 39
tagtcctacaaccacttactgcttc

SEQ ID NO: 349865 - DNA, 25 bp, Artificial
  probe
  misc_feature (1)..(25): SEQ ID NO: 3224; WAN0249LI; Start 14; Stop 38
ctagtcctacaaccacttactgctt

SEQ ID NO: 349866 - DNA, 25 bp, Artificial
  probe
  misc_feature (1)..(25): SEQ ID NO: 3224; WAN0249LI; Start 5; Stop 29
taagttaagctagtcctacaaccac

SEQ ID NO: 349867 - DNA, 25 bp, Artificial
  probe
  misc_feature (1)..(25): SEQ ID NO: 3224; WAN0249LI; Start 4; Stop 28
gtaagttaagctagtcctacaacca

SEQ ID NO: 349868 - DNA, 25 bp, Artificial
  probe
  misc_feature (1)..(25): SEQ ID NO: 3224; WAN0249LI; Start 17; Stop 41
gtcctacaaccacttactgcttcaa

SEQ ID NO: 349869 - DNA, 25 bp, Artificial
  probe
  misc_feature (1)..(25): SEQ ID NO: 3224; WAN0249LI; Start 20; Stop 44
ctacaaccacttactgcttcaaatt

SEQ ID NO: 349870 - DNA, 25 bp, Artificial
  probe
  misc_feature (1)..(25): SEQ ID NO: 3224; WAN0249LI; Start 7; Stop 31
agttaagctagtcctacaaccactt

SEQ ID NO: 349871 - DNA, 25 bp, Artificial
  probe
  misc_feature (1)..(25): SEQ ID NO: 3224; WAN0249LI; Start 6; Stop 30
aagttaagctagtcctacaaccact

SEQ ID NO: 349872 - DNA, 25 bp, Artificial
  probe
  misc_feature (1)..(25): SEQ ID NO: 3224; WAN0249LI; Start 19; Stop 43
cctacaaccacttactgcttcaaat

SEQ ID NO: 349873 - DNA, 25 bp, Artificial
  probe
  misc_feature (1)..(25): SEQ ID NO: 3224; WAN0249LI; Start 9; Stop 33
ttaagctagtcctacaaccacttac

SEQ ID NO: 349874 - DNA, 25 bp, Artificial
  probe
  misc_feature (1)..(25): SEQ ID NO: 3224; WAN0249LI; Start 8; Stop 32
gttaagctagtcctacaaccactta

SEQ ID NO: 349875 - DNA, 25 bp, Artificial
  probe
  misc_feature (1)..(25): SEQ ID NO: 3224; WAN0249LI; Start 10; Stop 34
taagctagtcctacaaccacttact

SEQ ID NO: 349876 - DNA, 25 bp, Artificial
  probe
  misc_feature (1)..(25): SEQ ID NO: 3224; WAN0249LI; Start 58; Stop 82
tttgcccttgtattcctaacttagc

SEQ ID NO: 349877 - DNA, 25 bp, Artificial
  probe
  misc_feature (1)..(25): SEQ ID NO: 3224; WAN0249LI; Start 21; Stop 45
tacaaccacttactgcttcaaattg

SEQ ID NO: 349878 - DNA, 25 bp, Artificial
  probe
  misc_feature (1)..(25): SEQ ID NO: 3224; WAN0249LI; Start 11; Stop 35
aagctagtcctacaaccacttactg

SEQ ID NO: 349879 - DNA, 25 bp, Artificial
  probe
  misc_feature (1)..(25): SEQ ID NO: 3224; WAN0249LI; Start 18; Stop 42
tcctacaaccacttactgcttcaaa

SEQ ID NO: 349880 - DNA, 25 bp, Artificial
  probe
  misc_feature (1)..(25): SEQ ID NO: 3224; WAN0249LI; Start 29; Stop 53
cttactgcttcaaattgaccacttg

SEQ ID NO: 349881 - DNA, 25 bp, Artificial
  probe
  misc_feature (1)..(25): SEQ ID NO: 3224; WAN0249LI; Start 3; Stop 27
tgtaagttaagctagtcctacaacc

SEQ ID NO: 349882 - DNA, 25 bp, Artificial
  probe
  misc_feature (1)..(25): SEQ ID NO: 3224; WAN0249LI; Start 16; Stop 40
agtcctacaaccacttactgcttca

SEQ ID NO: 349883 - DNA, 25 bp, Artificial
  probe
  misc_feature (1)..(25): SEQ ID NO: 3224; WAN0249LI; Start 28; Stop 52
acttactgcttcaaattgaccactt

SEQ ID NO: 349884 - DNA, 25 bp, Artificial
  probe
  misc_feature (1)..(25): SEQ ID NO: 3224; WAN0249LI; Start 23; Stop 47
caaccacttactgcttcaaattgac

SEQ ID NO: 349885 - DNA, 25 bp, Artificial
  probe
  misc_feature (1)..(25): SEQ ID NO: 3224; WAN0249LI; Start 22; Stop 46
acaaccacttactgcttcaaattga

SEQ ID NO: 349886 - DNA, 25 bp, Artificial
  probe
  misc_feature (1)..(25): SEQ ID NO: 3224; WAN0249LI; Start 62; Stop 86
cccttgtattcctaacttagctttg

SEQ ID NO: 349887 - DNA, 25 bp, Artificial
  probe
  misc_feature (1)..(25): SEQ ID NO: 3224; WAN0249LI; Start 61; Stop 85
gcccttgtattcctaacttagcttt

SEQ ID NO: 349888 - DNA, 25 bp, Artificial
  probe
  misc_feature (1)..(25): SEQ ID NO: 3224; WAN0249LI; Start 27; Stop 51
cacttactgcttcaaattgaccact

SEQ ID NO: 349889 - DNA, 25 bp, Artificial
  probe
  misc_feature (1)..(25): SEQ ID NO: 3224; WAN0249LI; Start 24; Stop 48
aaccacttactgcttcaaattgacc

SEQ ID NO: 349890 - DNA, 25 bp, Artificial
  probe
  misc_feature (1)..(25): SEQ ID NO: 3224; WAN0249LI; Start 63; Stop 87
ccttgtattcctaacttagctttga

SEQ ID NO: 349891 - DNA, 25 bp, Artificial
  probe
  misc_feature (1)..(25): SEQ ID NO: 3224; WAN0249LI; Start 85; Stop 109
tgatatagtagagtcagaaaggaga

SEQ ID NO: 349892 - DNA, 25 bp, Artificial
  probe
  misc_feature (1)..(25): SEQ ID NO: 3224; WAN0249LI; Start 60; Stop 84
tgcccttgtattcctaacttagctt

SEQ ID NO: 349893 - DNA, 25 bp, Artificial
  probe
  misc_feature (1)..(25): SEQ ID NO: 3224; WAN0249LI; Start 59; Stop 83
ttgcccttgtattcctaacttagct

SEQ ID NO: 349894 - DNA, 25 bp, Artificial
  probe
  misc_feature (1)..(25): SEQ ID NO: 3224; WAN0249LI; Start 2; Stop 26
atgtaagttaagctagtcctacaac

SEQ ID NO: 349895 - DNA, 25 bp, Artificial
  probe
  misc_feature (1)..(25): SEQ ID NO: 3224; WAN0249LI; Start 1; Stop 25
catgtaagttaagctagtcctacaa

SEQ ID NO: 349896 - DNA, 25 bp, Artificial
  probe
  misc_feature (1)..(25): SEQ ID NO: 3224; WAN0249LI; Start 13; Stop 37
gctagtcctacaaccacttactgct

SEQ ID NO: 349897 - DNA, 25 bp, Artificial
  probe
  misc_feature (1)..(25): SEQ ID NO: 3225; WAN0249U8; Start 58; Stop 82
tgttactacaggataatggttggtc

SEQ ID NO: 349898 - DNA, 25 bp, Artificial
  probe
  misc_feature (1)..(25): SEQ ID NO: 3225; WAN0249U8; Start 57; Stop 81
ttgttactacaggataatggttggt

SEQ ID NO: 349899 - DNA, 25 bp, Artificial
  probe
  misc_feature (1)..(25): SEQ ID NO: 3225; WAN0249U8; Start 72; Stop 96
aatggttggtccgtagagacttata

SEQ ID NO: 349900 - DNA, 25 bp, Artificial
  probe
  misc_feature (1)..(25): SEQ ID NO: 3225; WAN0249U8; Start 71; Stop 95
taatggttggtccgtagagacttat

SEQ ID NO: 349901 - DNA, 25 bp, Artificial
  probe
  misc_feature (1)..(25): SEQ ID NO: 3225; WAN0249U8; Start 70; Stop 94
ataatggttggtccgtagagactta

SEQ ID NO: 349902 - DNA, 25 bp, Artificial
  probe
  misc_feature (1)..(25): SEQ ID NO: 3225; WAN0249U8; Start 73; Stop 97
atggttggtccgtagagacttatac

SEQ ID NO: 349903 - DNA, 25 bp, Artificial
  probe
  misc_feature (1)..(25): SEQ ID NO: 3225; WAN0249U8; Start 59; Stop 83
gttactacaggataatggttggtcc

SEQ ID NO: 349904 - DNA, 25 bp, Artificial
  probe
  misc_feature (1)..(25): SEQ ID NO: 3225; WAN0249U8; Start 75; Stop 99
ggttggtccgtagagacttatactc

SEQ ID NO: 349905 - DNA, 25 bp, Artificial
  probe
  misc_feature (1)..(25): SEQ ID NO: 3225; WAN0249U8; Start 69; Stop 93
gataatggttggtccgtagagactt

SEQ ID NO: 349906 - DNA, 25 bp, Artificial
  probe
  misc_feature (1)..(25): SEQ ID NO: 3225; WAN0249U8; Start 74; Stop 98
tggttggtccgtagagacttatact

SEQ ID NO: 349907 - DNA, 25 bp, Artificial
  probe
  misc_feature (1)..(25): SEQ ID NO: 3225; WAN0249U8; Start 60; Stop 84
ttactacaggataatggttggtccg

SEQ ID NO: 349908 - DNA, 25 bp, Artificial
  probe
  misc_feature (1)..(25): SEQ ID NO: 3225; WAN0249U8; Start 22; Stop 46
aaagaagttgagttcagtctgtctc

SEQ ID NO: 349909 - DNA, 25 bp, Artificial
  probe
  misc_feature (1)..(25): SEQ ID NO: 3225; WAN0249U8; Start 64; Stop 88
tacaggataatggttggtccgtaga

SEQ ID NO: 349910 - DNA, 25 bp, Artificial
  probe
  misc_feature (1)..(25): SEQ ID NO: 3225; WAN0249U8; Start 56; Stop 80
tttgttactacaggataatggttgg

SEQ ID NO: 349911 - DNA, 25 bp, Artificial
  probe
  misc_feature (1)..(25): SEQ ID NO: 3225; WAN0249U8; Start 62; Stop 86
actacaggataatggttggtccgta

SEQ ID NO: 349912 - DNA, 25 bp, Artificial
  probe
  misc_feature (1)..(25): SEQ ID NO: 3225; WAN0249U8; Start 61; Stop 85
tactacaggataatggttggtccgt

SEQ ID NO: 349913 - DNA, 25 bp, Artificial
  probe
  misc_feature (1)..(25): SEQ ID NO: 3225; WAN0249U8; Start 63; Stop 87
ctacaggataatggttggtccgtag

SEQ ID NO: 349914 - DNA, 25 bp, Artificial
  probe
  misc_feature (1)..(25): SEQ ID NO: 3225; WAN0249U8; Start 77; Stop 101
ttggtccgtagagacttatactctt

SEQ ID NO: 349915 - DNA, 25 bp, Artificial
  probe
  misc_feature (1)..(25): SEQ ID NO: 3225; WAN0249U8; Start 78; Stop 102
tggtccgtagagacttatactcttc

SEQ ID NO: 349916 - DNA, 25 bp, Artificial
  probe
  misc_feature (1)..(25): SEQ ID NO: 3225; WAN0249U8; Start 76; Stop 100
gttggtccgtagagacttatactct

SEQ ID NO: 349917 - DNA, 25 bp, Artificial
  probe
  misc_feature (1)..(25): SEQ ID NO: 3225; WAN0249U8; Start 68; Stop 92
ggataatggttggtccgtagagact

SEQ ID NO: 349918 - DNA, 25 bp, Artificial
  probe
  misc_feature (1)..(25): SEQ ID NO: 3225; WAN0249U8; Start 67; Stop 91
aggataatggttggtccgtagagac

SEQ ID NO: 349919 - DNA, 25 bp, Artificial
  probe
  misc_feature (1)..(25): SEQ ID NO: 3225; WAN0249U8; Start 66; Stop 90
caggataatggttggtccgtagaga

SEQ ID NO: 349920 - DNA, 25 bp, Artificial
  probe
  misc_feature (1)..(25): SEQ ID NO: 3225; WAN0249U8; Start 79; Stop 103
ggtccgtagagacttatactcttcg

SEQ ID NO: 349921 - DNA, 25 bp, Artificial
  probe
  misc_feature (1)..(25): SEQ ID NO: 3225; WAN0249U8; Start 65; Stop 89
acaggataatggttggtccgtagag

SEQ ID NO: 349922 - DNA, 25 bp, Artificial
  probe
  misc_feature (1)..(25): SEQ ID NO: 3225; WAN0249U8; Start 80; Stop 104
gtccgtagagacttatactcttcga

SEQ ID NO: 349923 - DNA, 25 bp, Artificial
  probe
  misc_feature (1)..(25): SEQ ID NO: 3225; WAN0249U8; Start 23; Stop 47
aagaagttgagttcagtctgtctca

SEQ ID NO: 349924 - DNA, 25 bp, Artificial
  probe
  misc_feature (1)..(25): SEQ ID NO: 3225; WAN0249U8; Start 21; Stop 45
aaaagaagttgagttcagtctgtct

SEQ ID NO: 349925 - DNA, 25 bp, Artificial
  probe
  misc_feature (1)..(25): SEQ ID NO: 3225; WAN0249U8; Start 186; Stop 210
ttcattgagtataaatcaagcgact

SEQ ID NO: 349926 - DNA, 25 bp, Artificial
  probe
  misc_feature (1)..(25): SEQ ID NO: 3225; WAN0249U8; Start 185; Stop 209
tttcattgagtataaatcaagcgac

SEQ ID NO: 349927 - DNA, 25 bp, Artificial
  probe
  misc_feature (1)..(25): SEQ ID NO: 3225; WAN0249U8; Start 55; Stop 79
ttttgttactacaggataatggttg

SEQ ID NO: 349928 - DNA, 25 bp, Artificial
  probe
  misc_feature (1)..(25): SEQ ID NO: 3225; WAN0249U8; Start 81; Stop 105
tccgtagagacttatactcttcgaa

SEQ ID NO: 349929 - DNA, 25 bp, Artificial
  probe
  misc_feature (1)..(25): SEQ ID NO: 3225; WAN0249U8; Start 229; Stop 253
aatagaattagaaaatcggaggaaa

SEQ ID NO: 349930 - DNA, 25 bp, Artificial
  probe
  misc_feature (1)..(25): SEQ ID NO: 3226; WAN024CWN-M; Start 1274; Stop 1298
ggtaagacagaagagcaagaactaa

SEQ ID NO: 349931 - DNA, 25 bp, Artificial
  probe
  misc_feature (1)..(25): SEQ ID NO: 3226; WAN024CWN-M; Start 1276; Stop 1300
taagacagaagagcaagaactaact

SEQ ID NO: 349932 - DNA, 25 bp, Artificial
  probe
  misc_feature (1)..(25): SEQ ID NO: 3226; WAN024CWN-M; Start 1275; Stop 1299
gtaagacagaagagcaagaactaac

SEQ ID NO: 349933 - DNA, 25 bp, Artificial
  probe
  misc_feature (1)..(25): SEQ ID NO: 3226; WAN024CWN-M; Start 1273; Stop 1297
aggtaagacagaagagcaagaacta

SEQ ID NO: 349934 - DNA, 25 bp, Artificial
  probe
  misc_feature (1)..(25): SEQ ID NO: 3226; WAN024CWN-M; Start 212; Stop 236
cacttgaactatgctgatattggta

SEQ ID NO: 349935 - DNA, 25 bp, Artificial
  probe
  misc_feature (1)..(25): SEQ ID NO: 3226; WAN024CWN-M; Start 211; Stop 235
tcacttgaactatgctgatattggt

SEQ ID NO: 349936 - DNA, 25 bp, Artificial
  probe
  misc_feature (1)..(25): SEQ ID NO: 3226; WAN024CWN-M; Start 210; Stop 234
gtcacttgaactatgctgatattgg

SEQ ID NO: 349937 - DNA, 25 bp, Artificial
  probe
  misc_feature (1)..(25): SEQ ID NO: 3226; WAN024CWN-M; Start 209; Stop 233
ggtcacttgaactatgctgatattg

SEQ ID NO: 349938 - DNA, 25 bp, Artificial
  probe
  misc_feature (1)..(25): SEQ ID NO: 3226; WAN024CWN-M; Start 208; Stop 232
tggtcacttgaactatgctgatatt

SEQ ID NO: 349939 - DNA, 25 bp, Artificial
  probe
  misc_feature (1)..(25): SEQ ID NO: 3226; WAN024CWN-M; Start 207; Stop 231
ctggtcacttgaactatgctgatat

SEQ ID NO: 349940 - DNA, 25 bp, Artificial
  probe
  misc_feature (1)..(25): SEQ ID NO: 3226; WAN024CWN-M; Start 1272; Stop 1296
aaggtaagacagaagagcaagaact

SEQ ID NO: 349941 - DNA, 25 bp, Artificial
  probe
  misc_feature (1)..(25): SEQ ID NO: 3226; WAN024CWN-M; Start 1271; Stop 1295
caaggtaagacagaagagcaagaac

SEQ ID NO: 349942 - DNA, 25 bp, Artificial
  probe
  misc_feature (1)..(25): SEQ ID NO: 3226; WAN024CWN-M; Start 406; Stop 430
ctggctagatcaaggtatcaacatt

SEQ ID NO: 349943 - DNA, 25 bp, Artificial
  probe
  misc_feature (1)..(25): SEQ ID NO: 3226; WAN024CWN-M; Start 206; Stop 230
tctggtcacttgaactatgctgata

SEQ ID NO: 349944 - DNA, 25 bp, Artificial
  probe
  misc_feature (1)..(25): SEQ ID NO: 3226; WAN024CWN-M; Start 403; Stop 427
gaactggctagatcaaggtatcaac

SEQ ID NO: 349945 - DNA, 25 bp, Artificial
  probe
  misc_feature (1)..(25): SEQ ID NO: 3226; WAN024CWN-M; Start 213; Stop 237
acttgaactatgctgatattggtaa

SEQ ID NO: 349946 - DNA, 25 bp, Artificial
  probe
  misc_feature (1)..(25): SEQ ID NO: 3226; WAN024CWN-M; Start 407; Stop 431
tggctagatcaaggtatcaacattg

SEQ ID NO: 349947 - DNA, 25 bp, Artificial
  probe
  misc_feature (1)..(25): SEQ ID NO: 3226; WAN024CWN-M; Start 405; Stop 429
actggctagatcaaggtatcaacat

SEQ ID NO: 349948 - DNA, 25 bp, Artificial
  probe
  misc_feature (1)..(25): SEQ ID NO: 3226; WAN024CWN-M; Start 1277; Stop 1301
aagacagaagagcaagaactaactg

SEQ ID NO: 349949 - DNA, 25 bp, Artificial
  probe
  misc_feature (1)..(25): SEQ ID NO: 3226; WAN024CWN-M; Start 404; Stop 428
aactggctagatcaaggtatcaaca

SEQ ID NO: 349950 - DNA, 25 bp, Artificial
  probe
  misc_feature (1)..(25): SEQ ID NO: 3226; WAN024CWN-M; Start 1262; Stop 1286
ctaactgaccaaggtaagacagaag

SEQ ID NO: 349951 - DNA, 25 bp, Artificial
  probe
  misc_feature (1)..(25): SEQ ID NO: 3226; WAN024CWN-M; Start 1263; Stop 1287
taactgaccaaggtaagacagaaga

SEQ ID NO: 349952 - DNA, 25 bp, Artificial
  probe
  misc_feature (1)..(25): SEQ ID NO: 3226; WAN024CWN-M; Start 1270; Stop 1294
ccaaggtaagacagaagagcaagaa

SEQ ID NO: 349953 - DNA, 25 bp, Artificial
  probe
  misc_feature (1)..(25): SEQ ID NO: 3226; WAN024CWN-M; Start 402; Stop 426
ggaactggctagatcaaggtatcaa

SEQ ID NO: 349954 - DNA, 25 bp, Artificial
  probe
  misc_feature (1)..(25): SEQ ID NO: 3226; WAN024CWN-M; Start 531; Stop 555
gtaatggtcaatcaggtgataacgg

SEQ ID NO: 349955 - DNA, 25 bp, Artificial
  probe
  misc_feature (1)..(25): SEQ ID NO: 3226; WAN024CWN-M; Start 530; Stop 554
ggtaatggtcaatcaggtgataacg

SEQ ID NO: 349956 - DNA, 25 bp, Artificial
  probe
  misc_feature (1)..(25): SEQ ID NO: 3226; WAN024CWN-M; Start 214; Stop 238
cttgaactatgctgatattggtaag

SEQ ID NO: 349957 - DNA, 25 bp, Artificial
  probe
  misc_feature (1)..(25): SEQ ID NO: 3226; WAN024CWN-M; Start 106; Stop 130
attccttatgaccttggatggtatc

SEQ ID NO: 349958 - DNA, 25 bp, Artificial
  probe
  misc_feature (1)..(25): SEQ ID NO: 3226; WAN024CWN-M; Start 105; Stop 129
cattccttatgaccttggatggtat

SEQ ID NO: 349959 - DNA, 25 bp, Artificial
  probe
  misc_feature (1)..(25): SEQ ID NO: 3226; WAN024CWN-M; Start 532; Stop 556
taatggtcaatcaggtgataacggt

SEQ ID NO: 349960 - DNA, 25 bp, Artificial
  probe
  misc_feature (1)..(25): SEQ ID NO: 3226; WAN024CWN-M; Start 400; Stop 424
ttggaactggctagatcaaggtatc

SEQ ID NO: 349961 - DNA, 25 bp, Artificial
  probe
  misc_feature (1)..(25): SEQ ID NO: 3226; WAN024CWN-M; Start 1256; Stop 1280
tacaagctaactgaccaaggtaaga

SEQ ID NO: 349962 - DNA, 25 bp, Artificial
  probe
  misc_feature (1)..(25): SEQ ID NO: 3226; WAN024CWN-M; Start 205; Stop 229
ctctggtcacttgaactatgctgat

SEQ ID NO: 349963 - DNA, 25 bp, Artificial
  probe
  misc_feature (1)..(25): SEQ ID NO: 3227; WAN024AQF; Start 96; Stop 120
tctgtactataaacctcattggaaa

SEQ ID NO: 349964 - DNA, 25 bp, Artificial
  probe
  misc_feature (1)..(25): SEQ ID NO: 3227; WAN024AQF; Start 94; Stop 118
tttctgtactataaacctcattgga

SEQ ID NO: 349965 - DNA, 25 bp, Artificial
  probe
  misc_feature (1)..(25): SEQ ID NO: 3227; WAN024AQF; Start 95; Stop 119
ttctgtactataaacctcattggaa

SEQ ID NO: 349966 - DNA, 25 bp, Artificial
  probe
  misc_feature (1)..(25): SEQ ID NO: 3227; WAN024AQF; Start 133; Stop 157
cttccgtaatcttgttaagaggttt

SEQ ID NO: 349967 - DNA, 25 bp, Artificial
  probe
  misc_feature (1)..(25): SEQ ID NO: 3227; WAN024AQF; Start 58; Stop 82
cttaacaaaagcctgagaagacatc

SEQ ID NO: 349968 - DNA, 25 bp, Artificial
  probe
  misc_feature (1)..(25): SEQ ID NO: 3227; WAN024AQF; Start 59; Stop 83
ttaacaaaagcctgagaagacatct

SEQ ID NO: 349969 - DNA, 25 bp, Artificial
  probe
  misc_feature (1)..(25): SEQ ID NO: 3227; WAN024AQF; Start 107; Stop 131
aacctcattggaaaagatagagact

SEQ ID NO: 349970 - DNA, 25 bp, Artificial
  probe
  misc_feature (1)..(25): SEQ ID NO: 3227; WAN024AQF; Start 60; Stop 84
taacaaaagcctgagaagacatctt

SEQ ID NO: 349971 - DNA, 25 bp, Artificial
  probe
  misc_feature (1)..(25): SEQ ID NO: 3227; WAN024AQF; Start 17; Stop 41
ttttctgggtgattttgtcatagca

SEQ ID NO: 349972 - DNA, 25 bp, Artificial
  probe
  misc_feature (1)..(25): SEQ ID NO: 3227; WAN024AQF; Start 106; Stop 130
aaacctcattggaaaagatagagac

SEQ ID NO: 349973 - DNA, 25 bp, Artificial
  probe
  misc_feature (1)..(25): SEQ ID NO: 3227; WAN024AQF; Start 23; Stop 47
gggtgattttgtcatagcactattg

SEQ ID NO: 349974 - DNA, 25 bp, Artificial
  probe
  misc_feature (1)..(25): SEQ ID NO: 3227; WAN024AQF; Start 24; Stop 48
ggtgattttgtcatagcactattgt

SEQ ID NO: 349975 - DNA, 25 bp, Artificial
  probe
  misc_feature (1)..(25): SEQ ID NO: 3227; WAN024AQF; Start 22; Stop 46
tgggtgattttgtcatagcactatt

SEQ ID NO: 349976 - DNA, 25 bp, Artificial
  probe
  misc_feature (1)..(25): SEQ ID NO: 3227; WAN024AQF; Start 21; Stop 45
ctgggtgattttgtcatagcactat

SEQ ID NO: 349977 - DNA, 25 bp, Artificial
  probe
  misc_feature (1)..(25): SEQ ID NO: 3227; WAN024AQF; Start 20; Stop 44
tctgggtgattttgtcatagcacta

SEQ ID NO: 349978 - DNA, 25 bp, Artificial
  probe
  misc_feature (1)..(25): SEQ ID NO: 3227; WAN024AQF; Start 18; Stop 42
tttctgggtgattttgtcatagcac

SEQ ID NO: 349979 - DNA, 25 bp, Artificial
  probe
  misc_feature (1)..(25): SEQ ID NO: 3227; WAN024AQF; Start 32; Stop 56
tgtcatagcactattgtatttatgt

SEQ ID NO: 349980 - DNA, 25 bp, Artificial
  probe
  misc_feature (1)..(25): SEQ ID NO: 3227; WAN024AQF; Start 105; Stop 129
taaacctcattggaaaagatagaga

SEQ ID NO: 349981 - DNA, 25 bp, Artificial
  probe
  misc_feature (1)..(25): SEQ ID NO: 3227; WAN024AQF; Start 33; Stop 57
gtcatagcactattgtatttatgtg

SEQ ID NO: 349982 - DNA, 25 bp, Artificial
  probe
  misc_feature (1)..(25): SEQ ID NO: 3227; WAN024AQF; Start 19; Stop 43
ttctgggtgattttgtcatagcact

SEQ ID NO: 349983 - DNA, 25 bp, Artificial
  probe
  misc_feature (1)..(25): SEQ ID NO: 3227; WAN024AQF; Start 25; Stop 49
gtgattttgtcatagcactattgta

SEQ ID NO: 349984 - DNA, 25 bp, Artificial
  probe
  misc_feature (1)..(25): SEQ ID NO: 3227; WAN024AQF; Start 134; Stop 158
ttccgtaatcttgttaagaggtttt

SEQ ID NO: 349985 - DNA, 25 bp, Artificial
  probe
  misc_feature (1)..(25): SEQ ID NO: 3227; WAN024AQF; Start 40; Stop 64
cactattgtatttatgtgcttaaca

SEQ ID NO: 349986 - DNA, 25 bp, Artificial
  probe
  misc_feature (1)..(25): SEQ ID NO: 3227; WAN024AQF; Start 98; Stop 122
tgtactataaacctcattggaaaag

SEQ ID NO: 349987 - DNA, 25 bp, Artificial
  probe
  misc_feature (1)..(25): SEQ ID NO: 3227; WAN024AQF; Start 97; Stop 121
ctgtactataaacctcattggaaaa

SEQ ID NO: 349988 - DNA, 25 bp, Artificial
  probe
  misc_feature (1)..(25): SEQ ID NO: 3227; WAN024AQF; Start 93; Stop 117
ttttctgtactataaacctcattgg

SEQ ID NO: 349989 - DNA, 25 bp, Artificial
  probe
  misc_feature (1)..(25): SEQ ID NO: 3227; WAN024AQF; Start 136; Stop 160
ccgtaatcttgttaagaggttttac

SEQ ID NO: 349990 - DNA, 25 bp, Artificial
  probe
  misc_feature (1)..(25): SEQ ID NO: 3227; WAN024AQF; Start 99; Stop 123
gtactataaacctcattggaaaaga

SEQ ID NO: 349991 - DNA, 25 bp, Artificial
  probe
  misc_feature (1)..(25): SEQ ID NO: 3227; WAN024AQF; Start 26; Stop 50
tgattttgtcatagcactattgtat

SEQ ID NO: 349992 - DNA, 25 bp, Artificial
  probe
  misc_feature (1)..(25): SEQ ID NO: 3227; WAN024AQF; Start 135; Stop 159
tccgtaatcttgttaagaggtttta

SEQ ID NO: 349993 - DNA, 25 bp, Artificial
  probe
  misc_feature (1)..(25): SEQ ID NO: 3227; WAN024AQF; Start 104; Stop 128
ataaacctcattggaaaagatagag

SEQ ID NO: 349994 - DNA, 25 bp, Artificial
  probe
  misc_feature (1)..(25): SEQ ID NO: 3227; WAN024AQF; Start 31; Stop 55
ttgtcatagcactattgtatttatg

SEQ ID NO: 349995 - DNA, 25 bp, Artificial
  probe
  misc_feature (1)..(25): SEQ ID NO: 3227; WAN024AQF; Start 137; Stop 161
cgtaatcttgttaagaggttttact

SEQ ID NO: 349996 - DNA, 25 bp, Artificial
  probe
  misc_feature (1)..(25): SEQ ID NO: 3228; WAN024AN8; Start 116; Stop 140
acttgacattaacacttgttagatt

SEQ ID NO: 349997 - DNA, 25 bp, Artificial
  probe
  misc_feature (1)..(25): SEQ ID NO: 3228; WAN024AN8; Start 115; Stop 139
aacttgacattaacacttgttagat

SEQ ID NO: 349998 - DNA, 25 bp, Artificial
  probe
  misc_feature (1)..(25): SEQ ID NO: 3228; WAN024AN8; Start 109; Stop 133
tttacaaacttgacattaacacttg

SEQ ID NO: 349999 - DNA, 25 bp, Artificial
  probe
  misc_feature (1)..(25): SEQ ID NO: 3228; WAN024AN8; Start 113; Stop 137
caaacttgacattaacacttgttag

SEQ ID NO: 350000 - DNA, 25 bp, Artificial
  probe
  misc_feature (1)..(25): SEQ ID NO: 3228; WAN024AN8; Start 114; Stop 138
aaacttgacattaacacttgttaga

SEQ ID NO: 350001 - DNA, 25 bp, Artificial
  probe
  misc_feature (1)..(25): SEQ ID NO: 3228; WAN024AN8; Start 34; Stop 58
caataactgtttgcacaaatctaaa

SEQ ID NO: 350002 - DNA, 25 bp, Artificial
  probe
  misc_feature (1)..(25): SEQ ID NO: 3228; WAN024AN8; Start 111; Stop 135
tacaaacttgacattaacacttgtt

SEQ ID NO: 350003 - DNA, 25 bp, Artificial
  probe
  misc_feature (1)..(25): SEQ ID NO: 3228; WAN024AN8; Start 110; Stop 134
ttacaaacttgacattaacacttgt

SEQ ID NO: 350004 - DNA, 25 bp, Artificial
  probe
  misc_feature (1)..(25): SEQ ID NO: 3228; WAN024AN8; Start 112; Stop 136
acaaacttgacattaacacttgtta

SEQ ID NO: 350005 - DNA, 25 bp, Artificial
  probe
  misc_feature (1)..(25): SEQ ID NO: 3228; WAN024AN8; Start 160; Stop 184
agaataggagatattccgcgattat

SEQ ID NO: 350006 - DNA, 25 bp, Artificial
  probe
  misc_feature (1)..(25): SEQ ID NO: 3228; WAN024AN8; Start 158; Stop 182
atagaataggagatattccgcgatt

SEQ ID NO: 350007 - DNA, 25 bp, Artificial
  probe
  misc_feature (1)..(25): SEQ ID NO: 3228; WAN024AN8; Start 157; Stop 181
aatagaataggagatattccgcgat

SEQ ID NO: 350008 - DNA, 25 bp, Artificial
  probe
  misc_feature (1)..(25): SEQ ID NO: 3228; WAN024AN8; Start 107; Stop 131
cttttacaaacttgacattaacact

SEQ ID NO: 350009 - DNA, 25 bp, Artificial
  probe
  misc_feature (1)..(25): SEQ ID NO: 3228; WAN024AN8; Start 106; Stop 130
tcttttacaaacttgacattaacac

SEQ ID NO: 350010 - DNA, 25 bp, Artificial
  probe
  misc_feature (1)..(25): SEQ ID NO: 3228; WAN024AN8; Start 159; Stop 183
tagaataggagatattccgcgatta

SEQ ID NO: 350011 - DNA, 25 bp, Artificial
  probe
  misc_feature (1)..(25): SEQ ID NO: 3228; WAN024AN8; Start 161; Stop 185
gaataggagatattccgcgattatt

SEQ ID NO: 350012 - DNA, 25 bp, Artificial
  probe
  misc_feature (1)..(25): SEQ ID NO: 3228; WAN024AN8; Start 117; Stop 141
cttgacattaacacttgttagattt

SEQ ID NO: 350013 - DNA, 25 bp, Artificial
  probe
  misc_feature (1)..(25): SEQ ID NO: 3228; WAN024AN8; Start 41; Stop 65
tgtttgcacaaatctaaaataaggt

SEQ ID NO: 350014 - DNA, 25 bp, Artificial
  probe
  misc_feature (1)..(25): SEQ ID NO: 3228; WAN024AN8; Start 108; Stop 132
ttttacaaacttgacattaacactt

SEQ ID NO: 350015 - DNA, 25 bp, Artificial
  probe
  misc_feature (1)..(25): SEQ ID NO: 3228; WAN024AN8; Start 162; Stop 186
aataggagatattccgcgattattt

SEQ ID NO: 350016 - DNA, 25 bp, Artificial
  probe
  misc_feature (1)..(25): SEQ ID NO: 3228; WAN024AN8; Start 42; Stop 66
gtttgcacaaatctaaaataaggtt

SEQ ID NO: 350017 - DNA, 25 bp, Artificial
  probe
  misc_feature (1)..(25): SEQ ID NO: 3228; WAN024AN8; Start 40; Stop 64
ctgtttgcacaaatctaaaataagg

SEQ ID NO: 350018 - DNA, 25 bp, Artificial
  probe
  misc_feature (1)..(25): SEQ ID NO: 3228; WAN024AN8; Start 105; Stop 129
ttcttttacaaacttgacattaaca

SEQ ID NO: 350019 - DNA, 25 bp, Artificial
  probe
  misc_feature (1)..(25): SEQ ID NO: 3228; WAN024AN8; Start 119; Stop 143
tgacattaacacttgttagatttac

SEQ ID NO: 350020 - DNA, 25 bp, Artificial
  probe
  misc_feature (1)..(25): SEQ ID NO: 3228; WAN024AN8; Start 156; Stop 180
aaatagaataggagatattccgcga

SEQ ID NO: 350021 - DNA, 25 bp, Artificial
  probe
  misc_feature (1)..(25): SEQ ID NO: 3228; WAN024AN8; Start 120; Stop 144
gacattaacacttgttagatttact

SEQ ID NO: 350022 - DNA, 25 bp, Artificial
  probe
  misc_feature (1)..(25): SEQ ID NO: 3228; WAN024AN8; Start 39; Stop 63
actgtttgcacaaatctaaaataag

SEQ ID NO: 350023 - DNA, 25 bp, Artificial
  probe
  misc_feature (1)..(25): SEQ ID NO: 3228; WAN024AN8; Start 127; Stop 151
acacttgttagatttacttttatcc

SEQ ID NO: 350024 - DNA, 25 bp, Artificial
  probe
  misc_feature (1)..(25): SEQ ID NO: 3228; WAN024AN8; Start 38; Stop 62
aactgtttgcacaaatctaaaataa

SEQ ID NO: 350025 - DNA, 25 bp, Artificial
  probe
  misc_feature (1)..(25): SEQ ID NO: 3228; WAN024AN8; Start 35; Stop 59
aataactgtttgcacaaatctaaaa

SEQ ID NO: 350026 - DNA, 25 bp, Artificial
  probe
  misc_feature (1)..(25): SEQ ID NO: 3228; WAN024AN8; Start 128; Stop 152
cacttgttagatttacttttatcct

SEQ ID NO: 350027 - DNA, 25 bp, Artificial
  probe
  misc_feature (1)..(25): SEQ ID NO: 3228; WAN024AN8; Start 36; Stop 60
ataactgtttgcacaaatctaaaat

SEQ ID NO: 350028 - DNA, 25 bp, Artificial
  probe
  misc_feature (1)..(25): SEQ ID NO: 3228; WAN024AN8; Start 104; Stop 128
tttcttttacaaacttgacattaac

SEQ ID NO: 350029 - DNA, 25 bp, Artificial
  probe
  misc_feature (1)..(25): SEQ ID NO: 3229; WAN0249NY; Start 193; Stop 217
ggcttttcctgttttatgtagatgt

SEQ ID NO: 350030 - DNA, 25 bp, Artificial
  probe
  misc_feature (1)..(25): SEQ ID NO: 3229; WAN0249NY; Start 194; Stop 218
gcttttcctgttttatgtagatgtt

SEQ ID NO: 350031 - DNA, 25 bp, Artificial
  probe
  misc_feature (1)..(25): SEQ ID NO: 3229; WAN0249NY; Start 189; Stop 213
ccaaggcttttcctgttttatgtag

SEQ ID NO: 350032 - DNA, 25 bp, Artificial
  probe
  misc_feature (1)..(25): SEQ ID NO: 3229; WAN0249NY; Start 190; Stop 214
caaggcttttcctgttttatgtaga

SEQ ID NO: 350033 - DNA, 25 bp, Artificial
  probe
  misc_feature (1)..(25): SEQ ID NO: 3229; WAN0249NY; Start 192; Stop 216
aggcttttcctgttttatgtagatg

SEQ ID NO: 350034 - DNA, 25 bp, Artificial
  probe
  misc_feature (1)..(25): SEQ ID NO: 3229; WAN0249NY; Start 188; Stop 212
accaaggcttttcctgttttatgta

SEQ ID NO: 350035 - DNA, 25 bp, Artificial
  probe
  misc_feature (1)..(25): SEQ ID NO: 3229; WAN0249NY; Start 191; Stop 215
aaggcttttcctgttttatgtagat

SEQ ID NO: 350036 - DNA, 25 bp, Artificial
  probe
  misc_feature (1)..(25): SEQ ID NO: 3229; WAN0249NY; Start 187; Stop 211
aaccaaggcttttcctgttttatgt

SEQ ID NO: 350037 - DNA, 25 bp, Artificial
  probe
  misc_feature (1)..(25): SEQ ID NO: 3229; WAN0249NY; Start 38; Stop 62
tgtacctcaaaagttagacagaaaa

SEQ ID NO: 350038 - DNA, 25 bp, Artificial
  probe
  misc_feature (1)..(25): SEQ ID NO: 3229; WAN0249NY; Start 83; Stop 107
tttgttaagaaaagaccttcaatca

SEQ ID NO: 350039 - DNA, 25 bp, Artificial
  probe
  misc_feature (1)..(25): SEQ ID NO: 3229; WAN0249NY; Start 85; Stop 109
tgttaagaaaagaccttcaatcatt

SEQ ID NO: 350040 - DNA, 25 bp, Artificial
  probe
  misc_feature (1)..(25): SEQ ID NO: 3229; WAN0249NY; Start 84; Stop 108
ttgttaagaaaagaccttcaatcat

SEQ ID NO: 350041 - DNA, 25 bp, Artificial
  probe
  misc_feature (1)..(25): SEQ ID NO: 3229; WAN0249NY; Start 185; Stop 209
gaaaccaaggcttttcctgttttat

SEQ ID NO: 350042 - DNA, 25 bp, Artificial
  probe
  misc_feature (1)..(25): SEQ ID NO: 3229; WAN0249NY; Start 186; Stop 210
aaaccaaggcttttcctgttttatg

SEQ ID NO: 350043 - DNA, 25 bp, Artificial
  probe
  misc_feature (1)..(25): SEQ ID NO: 3229; WAN0249NY; Start 184; Stop 208
tgaaaccaaggcttttcctgtttta

SEQ ID NO: 350044 - DNA, 25 bp, Artificial
  probe
  misc_feature (1)..(25): SEQ ID NO: 3229; WAN0249NY; Start 33; Stop 57
tgaactgtacctcaaaagttagaca

SEQ ID NO: 350045 - DNA, 25 bp, Artificial
  probe
  misc_feature (1)..(25): SEQ ID NO: 3229; WAN0249NY; Start 21; Stop 45
ctatttcgcgtttgaactgtacctc

SEQ ID NO: 350046 - DNA, 25 bp, Artificial
  probe
  misc_feature (1)..(25): SEQ ID NO: 3229; WAN0249NY; Start 32; Stop 56
ttgaactgtacctcaaaagttagac

SEQ ID NO: 350047 - DNA, 25 bp, Artificial
  probe
  misc_feature (1)..(25): SEQ ID NO: 3229; WAN0249NY; Start 183; Stop 207
atgaaaccaaggcttttcctgtttt

SEQ ID NO: 350048 - DNA, 25 bp, Artificial
  probe
  misc_feature (1)..(25): SEQ ID NO: 3229; WAN0249NY; Start 86; Stop 110
gttaagaaaagaccttcaatcattt

SEQ ID NO: 350049 - DNA, 25 bp, Artificial
  probe
  misc_feature (1)..(25): SEQ ID NO: 3229; WAN0249NY; Start 195; Stop 219
cttttcctgttttatgtagatgttt

SEQ ID NO: 350050 - DNA, 25 bp, Artificial
  probe
  misc_feature (1)..(25): SEQ ID NO: 3229; WAN0249NY; Start 22; Stop 46
tatttcgcgtttgaactgtacctca

SEQ ID NO: 350051 - DNA, 25 bp, Artificial
  probe
  misc_feature (1)..(25): SEQ ID NO: 3229; WAN0249NY; Start 89; Stop 113
aagaaaagaccttcaatcatttaag

SEQ ID NO: 350052 - DNA, 25 bp, Artificial
  probe
  misc_feature (1)..(25): SEQ ID NO: 3229; WAN0249NY; Start 82; Stop 106
ttttgttaagaaaagaccttcaatc

SEQ ID NO: 350053 - DNA, 25 bp, Artificial
  probe
  misc_feature (1)..(25): SEQ ID NO: 3229; WAN0249NY; Start 199; Stop 223
tcctgttttatgtagatgtttacac

SEQ ID NO: 350054 - DNA, 25 bp, Artificial
  probe
  misc_feature (1)..(25): SEQ ID NO: 3229; WAN0249NY; Start 182; Stop 206
catgaaaccaaggcttttcctgttt

SEQ ID NO: 350055 - DNA, 25 bp, Artificial
  probe
  misc_feature (1)..(25): SEQ ID NO: 3229; WAN0249NY; Start 197; Stop 221
tttcctgttttatgtagatgtttac

SEQ ID NO: 350056 - DNA, 25 bp, Artificial
  probe
  misc_feature (1)..(25): SEQ ID NO: 3229; WAN0249NY; Start 198; Stop 222
ttcctgttttatgtagatgtttaca

SEQ ID NO: 350057 - DNA, 25 bp, Artificial
  probe
  misc_feature (1)..(25): SEQ ID NO: 3229; WAN0249NY; Start 36; Stop 60
actgtacctcaaaagttagacagaa

SEQ ID NO: 350058 - DNA, 25 bp, Artificial
  probe
  misc_feature (1)..(25): SEQ ID NO: 3229; WAN0249NY; Start 35; Stop 59
aactgtacctcaaaagttagacaga

SEQ ID NO: 350059 - DNA, 25 bp, Artificial
  probe
  misc_feature (1)..(25): SEQ ID NO: 3229; WAN0249NY; Start 34; Stop 58
gaactgtacctcaaaagttagacag

SEQ ID NO: 350060 - DNA, 25 bp, Artificial
  probe
  misc_feature (1)..(25): SEQ ID NO: 3229; WAN0249NY; Start 20; Stop 44
gctatttcgcgtttgaactgtacct

SEQ ID NO: 350061 - DNA, 25 bp, Artificial
  probe
  misc_feature (1)..(25): SEQ ID NO: 3229; WAN0249NY; Start 37; Stop 61
ctgtacctcaaaagttagacagaaa

SEQ ID NO: 350062 - DNA, 25 bp, Artificial
  probe
  misc_feature (1)..(25): SEQ ID NO: 3230; WAN0249NH; Start 34; Stop 58
agaaataatagagagacttggacat

SEQ ID NO: 350063 - DNA, 25 bp, Artificial
  probe
  misc_feature (1)..(25): SEQ ID NO: 3230; WAN0249NH; Start 33; Stop 57
tagaaataatagagagacttggaca

SEQ ID NO: 350064 - DNA, 25 bp, Artificial
  probe
  misc_feature (1)..(25): SEQ ID NO: 3230; WAN0249NH; Start 35; Stop 59
gaaataatagagagacttggacata

SEQ ID NO: 350065 - DNA, 25 bp, Artificial
  probe
  misc_feature (1)..(25): SEQ ID NO: 3230; WAN0249NH; Start 32; Stop 56
ttagaaataatagagagacttggac

SEQ ID NO: 350066 - DNA, 25 bp, Artificial
  probe
  misc_feature (1)..(25): SEQ ID NO: 3230; WAN0249NH; Start 1; Stop 25
ccaaaagcctctctttatttcttcc

SEQ ID NO: 350067 - DNA, 25 bp, Artificial
  probe
  misc_feature (1)..(25): SEQ ID NO: 3230; WAN0249NH; Start 37; Stop 61
aataatagagagacttggacataaa

SEQ ID NO: 350068 - DNA, 25 bp, Artificial
  probe
  misc_feature (1)..(25): SEQ ID NO: 3230; WAN0249NH; Start 36; Stop 60
aaataatagagagacttggacataa

SEQ ID NO: 350069 - DNA, 25 bp, Artificial
  probe
  misc_feature (1)..(25): SEQ ID NO: 3230; WAN0249NH; Start 38; Stop 62
ataatagagagacttggacataaaa

SEQ ID NO: 350070 - DNA, 25 bp, Artificial
  probe
  misc_feature (1)..(25): SEQ ID NO: 3231; WAN024DLS-3; Start 403; Stop 427
aatacatcgcagcccatgataactt

SEQ ID NO: 350071 - DNA, 25 bp, Artificial
  probe
  misc_feature (1)..(25): SEQ ID NO: 3231; WAN024DLS-3; Start 852; Stop 876
cttcaagatatcaaagaccgtgtcc

SEQ ID NO: 350072 - DNA, 25 bp, Artificial
  probe
  misc_feature (1)..(25): SEQ ID NO: 3231; WAN024DLS-3; Start 404; Stop 428
atacatcgcagcccatgataacttg

SEQ ID NO: 350073 - DNA, 25 bp, Artificial
  probe
  misc_feature (1)..(25): SEQ ID NO: 3231; WAN024DLS-3; Start 402; Stop 426
caatacatcgcagcccatgataact

SEQ ID NO: 350074 - DNA, 25 bp, Artificial
  probe
  misc_feature (1)..(25): SEQ ID NO: 3231; WAN024DLS-3; Start 853; Stop 877
ttcaagatatcaaagaccgtgtcca

SEQ ID NO: 350075 - DNA, 25 bp, Artificial
  probe
  misc_feature (1)..(25): SEQ ID NO: 3231; WAN024DLS-3; Start 1266; Stop 1290
gctccagaagctagacctgattcta

SEQ ID NO: 350076 - DNA, 25 bp, Artificial
  probe
  misc_feature (1)..(25): SEQ ID NO: 3231; WAN024DLS-3; Start 1214; Stop 1238
ttccaagcctgaacatcaaaatgaa

SEQ ID NO: 350077 - DNA, 25 bp, Artificial
  probe
  misc_feature (1)..(25): SEQ ID NO: 3231; WAN024DLS-3; Start 851; Stop 875
tcttcaagatatcaaagaccgtgtc

SEQ ID NO: 350078 - DNA, 25 bp, Artificial
  probe
  misc_feature (1)..(25): SEQ ID NO: 3231; WAN024DLS-3; Start 836; Stop 860
cttccgacttaagagtcttcaagat

SEQ ID NO: 350079 - DNA, 25 bp, Artificial
  probe
  misc_feature (1)..(25): SEQ ID NO: 3231; WAN024DLS-3; Start 1215; Stop 1239
tccaagcctgaacatcaaaatgaag

SEQ ID NO: 350080 - DNA, 25 bp, Artificial
  probe
  misc_feature (1)..(25): SEQ ID NO: 3231; WAN024DLS-3; Start 1213; Stop 1237
cttccaagcctgaacatcaaaatga

SEQ ID NO: 350081 - DNA, 25 bp, Artificial
  probe
  misc_feature (1)..(25): SEQ ID NO: 3231; WAN024DLS-3; Start 837; Stop 861
ttccgacttaagagtcttcaagata

SEQ ID NO: 350082 - DNA, 25 bp, Artificial
  probe
  misc_feature (1)..(25): SEQ ID NO: 3231; WAN024DLS-3; Start 854; Stop 878
tcaagatatcaaagaccgtgtccac

SEQ ID NO: 350083 - DNA, 25 bp, Artificial
  probe
  misc_feature (1)..(25): SEQ ID NO: 3231; WAN024DLS-3; Start 838; Stop 862
tccgacttaagagtcttcaagatat

SEQ ID NO: 350084 - DNA, 25 bp, Artificial
  probe
  misc_feature (1)..(25): SEQ ID NO: 3231; WAN024DLS-3; Start 839; Stop 863
ccgacttaagagtcttcaagatatc

SEQ ID NO: 350085 - DNA, 25 bp, Artificial
  probe
  misc_feature (1)..(25): SEQ ID NO: 3231; WAN024DLS-3; Start 399; Stop 423
atccaatacatcgcagcccatgata

SEQ ID NO: 350086 - DNA, 25 bp, Artificial
  probe
  misc_feature (1)..(25): SEQ ID NO: 3231; WAN024DLS-3; Start 835; Stop 859
ccttccgacttaagagtcttcaaga

SEQ ID NO: 350087 - DNA, 25 bp, Artificial
  probe
  misc_feature (1)..(25): SEQ ID NO: 3231; WAN024DLS-3; Start 401; Stop 425
ccaatacatcgcagcccatgataac

SEQ ID NO: 350088 - DNA, 25 bp, Artificial
  probe
  misc_feature (1)..(25): SEQ ID NO: 3231; WAN024DLS-3; Start 405; Stop 429
tacatcgcagcccatgataacttga

SEQ ID NO: 350089 - DNA, 25 bp, Artificial
  probe
  misc_feature (1)..(25): SEQ ID NO: 3231; WAN024DLS-3; Start 400; Stop 424
tccaatacatcgcagcccatgataa

SEQ ID NO: 350090 - DNA, 25 bp, Artificial
  probe
  misc_feature (1)..(25): SEQ ID NO: 3231; WAN024DLS-3; Start 840; Stop 864
cgacttaagagtcttcaagatatca

SEQ ID NO: 350091 - DNA, 25 bp, Artificial
  probe
  misc_feature (1)..(25): SEQ ID NO: 3231; WAN024DLS-3; Start 1212; Stop 1236
ccttccaagcctgaacatcaaaatg

SEQ ID NO: 350092 - DNA, 25 bp, Artificial
  probe
  misc_feature (1)..(25): SEQ ID NO: 3231; WAN024DLS-3; Start 1216; Stop 1240
ccaagcctgaacatcaaaatgaagc

SEQ ID NO: 350093 - DNA, 25 bp, Artificial
  probe
  misc_feature (1)..(25): SEQ ID NO: 3231; WAN024DLS-3; Start 831; Stop 855
gatgccttccgacttaagagtcttc

SEQ ID NO: 350094 - DNA, 25 bp, Artificial
  probe
  misc_feature (1)..(25): SEQ ID NO: 3231; WAN024DLS-3; Start 834; Stop 858
gccttccgacttaagagtcttcaag

SEQ ID NO: 350095 - DNA, 25 bp, Artificial
  probe
  misc_feature (1)..(25): SEQ ID NO: 3231; WAN024DLS-3; Start 1211; Stop 1235
cccttccaagcctgaacatcaaaat

SEQ ID NO: 350096 - DNA, 25 bp, Artificial
  probe
  misc_feature (1)..(25): SEQ ID NO: 3231; WAN024DLS-3; Start 830; Stop 854
agatgccttccgacttaagagtctt

SEQ ID NO: 350097 - DNA, 25 bp, Artificial
  probe
  misc_feature (1)..(25): SEQ ID NO: 3231; WAN024DLS-3; Start 832; Stop 856
atgccttccgacttaagagtcttca

SEQ ID NO: 350098 - DNA, 25 bp, Artificial
  probe
  misc_feature (1)..(25): SEQ ID NO: 3231; WAN024DLS-3; Start 833; Stop 857
tgccttccgacttaagagtcttcaa

SEQ ID NO: 350099 - DNA, 25 bp, Artificial
  probe
  misc_feature (1)..(25): SEQ ID NO: 3231; WAN024DLS-3; Start 842; Stop 866
acttaagagtcttcaagatatcaaa

SEQ ID NO: 350100 - DNA, 25 bp, Artificial
  probe
  misc_feature (1)..(25): SEQ ID NO: 3231; WAN024DLS-3; Start 1217; Stop 1241
caagcctgaacatcaaaatgaagct

SEQ ID NO: 350101 - DNA, 25 bp, Artificial
  probe
  misc_feature (1)..(25): SEQ ID NO: 3231; WAN024DLS-3; Start 841; Stop 865
gacttaagagtcttcaagatatcaa

SEQ ID NO: 350102 - DNA, 25 bp, Artificial
  probe
  misc_feature (1)..(25): SEQ ID NO: 3231; WAN024DLS-3; Start 843; Stop 867
cttaagagtcttcaagatatcaaag

SEQ ID NO: 350103 - DNA, 25 bp, Artificial
  probe
  misc_feature (1)..(25): SEQ ID NO: 3232; WAN0249IR; Start 90; Stop 114
agaaagaacattttagaaaagagca

SEQ ID NO: 350104 - DNA, 25 bp, Artificial
  probe
  misc_feature (1)..(25): SEQ ID NO: 3232; WAN0249IR; Start 91; Stop 115
gaaagaacattttagaaaagagcat

SEQ ID NO: 350105 - DNA, 25 bp, Artificial
  probe
  misc_feature (1)..(25): SEQ ID NO: 3232; WAN0249IR; Start 92; Stop 116
aaagaacattttagaaaagagcatg

SEQ ID NO: 350106 - DNA, 25 bp, Artificial
  probe
  misc_feature (1)..(25): SEQ ID NO: 3232; WAN0249IR; Start 89; Stop 113
tagaaagaacattttagaaaagagc

SEQ ID NO: 350107 - DNA, 25 bp, Artificial
  probe
  misc_feature (1)..(25): SEQ ID NO: 3233; WAN024APD; Start 114; Stop 138
acctacttatccgttgctatgatta

SEQ ID NO: 350108 - DNA, 25 bp, Artificial
  probe
  misc_feature (1)..(25): SEQ ID NO: 3233; WAN024APD; Start 113; Stop 137
aacctacttatccgttgctatgatt

SEQ ID NO: 350109 - DNA, 25 bp, Artificial
  probe
  misc_feature (1)..(25): SEQ ID NO: 3233; WAN024APD; Start 112; Stop 136
taacctacttatccgttgctatgat

SEQ ID NO: 350110 - DNA, 25 bp, Artificial
  probe
  misc_feature (1)..(25): SEQ ID NO: 3233; WAN024APD; Start 111; Stop 135
ataacctacttatccgttgctatga

SEQ ID NO: 350111 - DNA, 25 bp, Artificial
  probe
  misc_feature (1)..(25): SEQ ID NO: 3233; WAN024APD; Start 28; Stop 52
tgtatgtaattgtcactaacggtag

SEQ ID NO: 350112 - DNA, 25 bp, Artificial
  probe
  misc_feature (1)..(25): SEQ ID NO: 3233; WAN024APD; Start 115; Stop 139
cctacttatccgttgctatgattat

SEQ ID NO: 350113 - DNA, 25 bp, Artificial
  probe
  misc_feature (1)..(25): SEQ ID NO: 3233; WAN024APD; Start 29; Stop 53
gtatgtaattgtcactaacggtaga

SEQ ID NO: 350114 - DNA, 25 bp, Artificial
  probe
  misc_feature (1)..(25): SEQ ID NO: 3233; WAN024APD; Start 31; Stop 55
atgtaattgtcactaacggtagaat

SEQ ID NO: 350115 - DNA, 25 bp, Artificial
  probe
  misc_feature (1)..(25): SEQ ID NO: 3233; WAN024APD; Start 26; Stop 50
tgtgtatgtaattgtcactaacggt

SEQ ID NO: 350116 - DNA, 25 bp, Artificial
  probe
  misc_feature (1)..(25): SEQ ID NO: 3233; WAN024APD; Start 25; Stop 49
ttgtgtatgtaattgtcactaacgg

SEQ ID NO: 350117 - DNA, 25 bp, Artificial
  probe
  misc_feature (1)..(25): SEQ ID NO: 3233; WAN024APD; Start 17; Stop 41
gcacttgattgtgtatgtaattgtc

SEQ ID NO: 350118 - DNA, 25 bp, Artificial
  probe
  misc_feature (1)..(25): SEQ ID NO: 3233; WAN024APD; Start 32; Stop 56
tgtaattgtcactaacggtagaatt

SEQ ID NO: 350119 - DNA, 25 bp, Artificial
  probe
  misc_feature (1)..(25): SEQ ID NO: 3233; WAN024APD; Start 30; Stop 54
tatgtaattgtcactaacggtagaa

SEQ ID NO: 350120 - DNA, 25 bp, Artificial
  probe
  misc_feature (1)..(25): SEQ ID NO: 3233; WAN024APD; Start 27; Stop 51
gtgtatgtaattgtcactaacggta

SEQ ID NO: 350121 - DNA, 25 bp, Artificial
  probe
  misc_feature (1)..(25): SEQ ID NO: 3233; WAN024APD; Start 118; Stop 142
acttatccgttgctatgattatact

SEQ ID NO: 350122 - DNA, 25 bp, Artificial
  probe
  misc_feature (1)..(25): SEQ ID NO: 3233; WAN024APD; Start 52; Stop 76
gaatttcacctatccctcctatctg

SEQ ID NO: 350123 - DNA, 25 bp, Artificial
  probe
  misc_feature (1)..(25): SEQ ID NO: 3233; WAN024APD; Start 36; Stop 60
attgtcactaacggtagaatttcac

SEQ ID NO: 350124 - DNA, 25 bp, Artificial
  probe
  misc_feature (1)..(25): SEQ ID NO: 3233; WAN024APD; Start 19; Stop 43
acttgattgtgtatgtaattgtcac

SEQ ID NO: 350125 - DNA, 25 bp, Artificial
  probe
  misc_feature (1)..(25): SEQ ID NO: 3233; WAN024APD; Start 18; Stop 42
cacttgattgtgtatgtaattgtca

SEQ ID NO: 350126 - DNA, 25 bp, Artificial
  probe
  misc_feature (1)..(25): SEQ ID NO: 3233; WAN024APD; Start 51; Stop 75
agaatttcacctatccctcctatct

SEQ ID NO: 350127 - DNA, 25 bp, Artificial
  probe
  misc_feature (1)..(25): SEQ ID NO: 3233; WAN024APD; Start 49; Stop 73
gtagaatttcacctatccctcctat

SEQ ID NO: 350128 - DNA, 25 bp, Artificial
  probe
  misc_feature (1)..(25): SEQ ID NO: 3233; WAN024APD; Start 24; Stop 48
attgtgtatgtaattgtcactaacg

SEQ ID NO: 350129 - DNA, 25 bp, Artificial
  probe
  misc_feature (1)..(25): SEQ ID NO: 3233; WAN024APD; Start 50; Stop 74
tagaatttcacctatccctcctatc

SEQ ID NO: 350130 - DNA, 25 bp, Artificial
  probe
  misc_feature (1)..(25): SEQ ID NO: 3233; WAN024APD; Start 20; Stop 44
cttgattgtgtatgtaattgtcact

SEQ ID NO: 350131 - DNA, 25 bp, Artificial
  probe
  misc_feature (1)..(25): SEQ ID NO: 3233; WAN024APD; Start 53; Stop 77
aatttcacctatccctcctatctgc

SEQ ID NO: 350132 - DNA, 25 bp, Artificial
  probe
  misc_feature (1)..(25): SEQ ID NO: 3233; WAN024APD; Start 16; Stop 40
tgcacttgattgtgtatgtaattgt

SEQ ID NO: 350133 - DNA, 25 bp, Artificial
  probe
  misc_feature (1)..(25): SEQ ID NO: 3233; WAN024APD; Start 35; Stop 59
aattgtcactaacggtagaatttca

SEQ ID NO: 350134 - DNA, 25 bp, Artificial
  probe
  misc_feature (1)..(25): SEQ ID NO: 3233; WAN024APD; Start 54; Stop 78
atttcacctatccctcctatctgct

SEQ ID NO: 350135 - DNA, 25 bp, Artificial
  probe
  misc_feature (1)..(25): SEQ ID NO: 3233; WAN024APD; Start 123; Stop 147
tccgttgctatgattatactaaagt

SEQ ID NO: 350136 - DNA, 25 bp, Artificial
  probe
  misc_feature (1)..(25): SEQ ID NO: 3233; WAN024APD; Start 42; Stop 66
actaacggtagaatttcacctatcc

SEQ ID NO: 350137 - DNA, 25 bp, Artificial
  probe
  misc_feature (1)..(25): SEQ ID NO: 3233; WAN024APD; Start 39; Stop 63
gtcactaacggtagaatttcaccta

SEQ ID NO: 350138 - DNA, 25 bp, Artificial
  probe
  misc_feature (1)..(25): SEQ ID NO: 3233; WAN024APD; Start 117; Stop 141
tacttatccgttgctatgattatac

SEQ ID NO: 350139 - DNA, 25 bp, Artificial
  probe
  misc_feature (1)..(25): SEQ ID NO: 3233; WAN024APD; Start 48; Stop 72
ggtagaatttcacctatccctccta

SEQ ID NO: 350140 - DNA, 25 bp, Artificial
  probe
  misc_feature (1)..(25): SEQ ID NO: 3234; WAN024AGN; Start 1; Stop 25
ccaagttactcaaagtacagatttg

SEQ ID NO: 350141 - DNA, 25 bp, Artificial
  probe
  misc_feature (1)..(25): SEQ ID NO: 3234; WAN024AGN; Start 7; Stop 31
tactcaaagtacagatttgaagctg

SEQ ID NO: 350142 - DNA, 25 bp, Artificial
  probe
  misc_feature (1)..(25): SEQ ID NO: 3234; WAN024AGN; Start 5; Stop 29
gttactcaaagtacagatttgaagc

SEQ ID NO: 350143 - DNA, 25 bp, Artificial
  probe
  misc_feature (1)..(25): SEQ ID NO: 3234; WAN024AGN; Start 6; Stop 30
ttactcaaagtacagatttgaagct

SEQ ID NO: 350144 - DNA, 25 bp, Artificial
  probe
  misc_feature (1)..(25): SEQ ID NO: 3234; WAN024AGN; Start 8; Stop 32
actcaaagtacagatttgaagctgc

SEQ ID NO: 350145 - DNA, 25 bp, Artificial
  probe
  misc_feature (1)..(25): SEQ ID NO: 3234; WAN024AGN; Start 9; Stop 33
ctcaaagtacagatttgaagctgca

SEQ ID NO: 350146 - DNA, 25 bp, Artificial
  probe
  misc_feature (1)..(25): SEQ ID NO: 3234; WAN024AGN; Start 2; Stop 26
caagttactcaaagtacagatttga

SEQ ID NO: 350147 - DNA, 25 bp, Artificial
  probe
  misc_feature (1)..(25): SEQ ID NO: 3234; WAN024AGN; Start 4; Stop 28
agttactcaaagtacagatttgaag

SEQ ID NO: 350148 - DNA, 25 bp, Artificial
  probe
  misc_feature (1)..(25): SEQ ID NO: 3234; WAN024AGN; Start 3; Stop 27
aagttactcaaagtacagatttgaa

SEQ ID NO: 350149 - DNA, 25 bp, Artificial
  probe
  misc_feature (1)..(25): SEQ ID NO: 3235; WAN024FA6; Start 12; Stop 36
gtaatggatatcacgtaagattccg

SEQ ID NO: 350150 - DNA, 25 bp, Artificial
  probe
  misc_feature (1)..(25): SEQ ID NO: 3235; WAN024FA6; Start 11; Stop 35
tgtaatggatatcacgtaagattcc

SEQ ID NO: 350151 - DNA, 25 bp, Artificial
  probe
  misc_feature (1)..(25): SEQ ID NO: 3235; WAN024FA6; Start 5; Stop 29
ccttagtgtaatggatatcacgtaa

SEQ ID NO: 350152 - DNA, 25 bp, Artificial
  probe
  misc_feature (1)..(25): SEQ ID NO: 3235; WAN024FA6; Start 13; Stop 37
taatggatatcacgtaagattccgg

SEQ ID NO: 350153 - DNA, 25 bp, Artificial
  probe
  misc_feature (1)..(25): SEQ ID NO: 3235; WAN024FA6; Start 9; Stop 33
agtgtaatggatatcacgtaagatt

SEQ ID NO: 350154 - DNA, 25 bp, Artificial
  probe
  misc_feature (1)..(25): SEQ ID NO: 3235; WAN024FA6; Start 10; Stop 34
gtgtaatggatatcacgtaagattc

SEQ ID NO: 350155 - DNA, 25 bp, Artificial
  probe
  misc_feature (1)..(25): SEQ ID NO: 3235; WAN024FA6; Start 15; Stop 39
atggatatcacgtaagattccggtt

SEQ ID NO: 350156 - DNA, 25 bp, Artificial
  probe
  misc_feature (1)..(25): SEQ ID NO: 3235; WAN024FA6; Start 14; Stop 38
aatggatatcacgtaagattccggt

SEQ ID NO: 350157 - DNA, 25 bp, Artificial
  probe
  misc_feature (1)..(25): SEQ ID NO: 3235; WAN024FA6; Start 18; Stop 42
gatatcacgtaagattccggttctt

SEQ ID NO: 350158 - DNA, 25 bp, Artificial
  probe
  misc_feature (1)..(25): SEQ ID NO: 3235; WAN024FA6; Start 4; Stop 28
cccttagtgtaatggatatcacgta

SEQ ID NO: 350159 - DNA, 25 bp, Artificial
  probe
  misc_feature (1)..(25): SEQ ID NO: 3235; WAN024FA6; Start 19; Stop 43
atatcacgtaagattccggttcttg

SEQ ID NO: 350160 - DNA, 25 bp, Artificial
  probe
  misc_feature (1)..(25): SEQ ID NO: 3235; WAN024FA6; Start 17; Stop 41
ggatatcacgtaagattccggttct

SEQ ID NO: 350161 - DNA, 25 bp, Artificial
  probe
  misc_feature (1)..(25): SEQ ID NO: 3235; WAN024FA6; Start 7; Stop 31
ttagtgtaatggatatcacgtaaga

SEQ ID NO: 350162 - DNA, 25 bp, Artificial
  probe
  misc_feature (1)..(25): SEQ ID NO: 3235; WAN024FA6; Start 2; Stop 26
cacccttagtgtaatggatatcacg

SEQ ID NO: 350163 - DNA, 25 bp, Artificial
  probe
  misc_feature (1)..(25): SEQ ID NO: 3235; WAN024FA6; Start 3; Stop 27
acccttagtgtaatggatatcacgt

SEQ ID NO: 350164 - DNA, 25 bp, Artificial
  probe
  misc_feature (1)..(25): SEQ ID NO: 3235; WAN024FA6; Start 6; Stop 30
cttagtgtaatggatatcacgtaag

SEQ ID NO: 350165 - DNA, 25 bp, Artificial
  probe
  misc_feature (1)..(25): SEQ ID NO: 3235; WAN024FA6; Start 16; Stop 40
tggatatcacgtaagattccggttc

SEQ ID NO: 350166 - DNA, 25 bp, Artificial
  probe
  misc_feature (1)..(25): SEQ ID NO: 3235; WAN024FA6; Start 1; Stop 25
ccacccttagtgtaatggatatcac

SEQ ID NO: 350167 - DNA, 25 bp, Artificial
  probe
  misc_feature (1)..(25): SEQ ID NO: 3235; WAN024FA6; Start 8; Stop 32
tagtgtaatggatatcacgtaagat

SEQ ID NO: 350168 - DNA, 25 bp, Artificial
  probe
  misc_feature (1)..(25): SEQ ID NO: 3235; WAN024FA6; Start 20; Stop 44
tatcacgtaagattccggttcttga

SEQ ID NO: 350169 - DNA, 25 bp, Artificial
  probe
  misc_feature (1)..(25): SEQ ID NO: 3235; WAN024FA6; Start 24; Stop 48
acgtaagattccggttcttgagatg

SEQ ID NO: 350170 - DNA, 25 bp, Artificial
  probe
  misc_feature (1)..(25): SEQ ID NO: 3235; WAN024FA6; Start 23; Stop 47
cacgtaagattccggttcttgagat

SEQ ID NO: 350171 - DNA, 25 bp, Artificial
  probe
  misc_feature (1)..(25): SEQ ID NO: 3235; WAN024FA6; Start 21; Stop 45
atcacgtaagattccggttcttgag

SEQ ID NO: 350172 - DNA, 25 bp, Artificial
  probe
  misc_feature (1)..(25): SEQ ID NO: 3235; WAN024FA6; Start 25; Stop 49
cgtaagattccggttcttgagatgg

SEQ ID NO: 350173 - DNA, 25 bp, Artificial
  probe
  misc_feature (1)..(25): SEQ ID NO: 3235; WAN024FA6; Start 22; Stop 46
tcacgtaagattccggttcttgaga

SEQ ID NO: 350174 - DNA, 25 bp, Artificial
  probe
  misc_feature (1)..(25): SEQ ID NO: 3235; WAN024FA6; Start 26; Stop 50
gtaagattccggttcttgagatggg

SEQ ID NO: 350175 - DNA, 25 bp, Artificial
  probe
  misc_feature (1)..(25): SEQ ID NO: 3235; WAN024FA6; Start 27; Stop 51
taagattccggttcttgagatgggg

SEQ ID NO: 350176 - DNA, 25 bp, Artificial
  probe
  misc_feature (1)..(25): SEQ ID NO: 3236; WAN024AQ5; Start 52; Stop 76
taaaatagaagggagaggatgaacc

SEQ ID NO: 350177 - DNA, 25 bp, Artificial
  probe
  misc_feature (1)..(25): SEQ ID NO: 3236; WAN024AQ5; Start 46; Stop 70
ttgtgataaaatagaagggagagga

SEQ ID NO: 350178 - DNA, 25 bp, Artificial
  probe
  misc_feature (1)..(25): SEQ ID NO: 3236; WAN024AQ5; Start 47; Stop 71
tgtgataaaatagaagggagaggat

SEQ ID NO: 350179 - DNA, 25 bp, Artificial
  probe
  misc_feature (1)..(25): SEQ ID NO: 3236; WAN024AQ5; Start 48; Stop 72
gtgataaaatagaagggagaggatg

SEQ ID NO: 350180 - DNA, 25 bp, Artificial
  probe
  misc_feature (1)..(25): SEQ ID NO: 3236; WAN024AQ5; Start 49; Stop 73
tgataaaatagaagggagaggatga

SEQ ID NO: 350181 - DNA, 25 bp, Artificial
  probe
  misc_feature (1)..(25): SEQ ID NO: 3236; WAN024AQ5; Start 45; Stop 69
attgtgataaaatagaagggagagg

SEQ ID NO: 350182 - DNA, 25 bp, Artificial
  probe
  misc_feature (1)..(25): SEQ ID NO: 3236; WAN024AQ5; Start 51; Stop 75
ataaaatagaagggagaggatgaac

SEQ ID NO: 350183 - DNA, 25 bp, Artificial
  probe
  misc_feature (1)..(25): SEQ ID NO: 3236; WAN024AQ5; Start 53; Stop 77
aaaatagaagggagaggatgaacct

SEQ ID NO: 350184 - DNA, 25 bp, Artificial
  probe
  misc_feature (1)..(25): SEQ ID NO: 3236; WAN024AQ5; Start 50; Stop 74
gataaaatagaagggagaggatgaa

SEQ ID NO: 350185 - DNA, 25 bp, Artificial
  probe
  misc_feature (1)..(25): SEQ ID NO: 3236; WAN024AQ5; Start 42; Stop 66
tgaattgtgataaaatagaagggag

SEQ ID NO: 350186 - DNA, 25 bp, Artificial
  probe
  misc_feature (1)..(25): SEQ ID NO: 3236; WAN024AQ5; Start 44; Stop 68
aattgtgataaaatagaagggagag

SEQ ID NO: 350187 - DNA, 25 bp, Artificial
  probe
  misc_feature (1)..(25): SEQ ID NO: 3236; WAN024AQ5; Start 43; Stop 67
gaattgtgataaaatagaagggaga

SEQ ID NO: 350188 - DNA, 25 bp, Artificial
  probe
  misc_feature (1)..(25): SEQ ID NO: 3236; WAN024AQ5; Start 41; Stop 65
ttgaattgtgataaaatagaaggga

SEQ ID NO: 350189 - DNA, 25 bp, Artificial
  probe
  misc_feature (1)..(25): SEQ ID NO: 3236; WAN024AQ5; Start 40; Stop 64
tttgaattgtgataaaatagaaggg

SEQ ID NO: 350190 - DNA, 25 bp, Artificial
  probe
  misc_feature (1)..(25): SEQ ID NO: 3237; WAN024A83; Start 12; Stop 36
aaactgtattcacgtattcaaatcg

SEQ ID NO: 350191 - DNA, 25 bp, Artificial
  probe
  misc_feature (1)..(25): SEQ ID NO: 3237; WAN024A83; Start 13; Stop 37
aactgtattcacgtattcaaatcgt

SEQ ID NO: 350192 - DNA, 25 bp, Artificial
  probe
  misc_feature (1)..(25): SEQ ID NO: 3237; WAN024A83; Start 14; Stop 38
actgtattcacgtattcaaatcgta

SEQ ID NO: 350193 - DNA, 25 bp, Artificial
  probe
  misc_feature (1)..(25): SEQ ID NO: 3237; WAN024A83; Start 15; Stop 39
ctgtattcacgtattcaaatcgtat

SEQ ID NO: 350194 - DNA, 25 bp, Artificial
  probe
  misc_feature (1)..(25): SEQ ID NO: 3237; WAN024A83; Start 11; Stop 35
taaactgtattcacgtattcaaatc

SEQ ID NO: 350195 - DNA, 25 bp, Artificial
  probe
  misc_feature (1)..(25): SEQ ID NO: 3237; WAN024A83; Start 24; Stop 48
cgtattcaaatcgtatatatagtcg

SEQ ID NO: 350196 - DNA, 25 bp, Artificial
  probe
  misc_feature (1)..(25): SEQ ID NO: 3237; WAN024A83; Start 16; Stop 40
tgtattcacgtattcaaatcgtata

SEQ ID NO: 350197 - DNA, 25 bp, Artificial
  probe
  misc_feature (1)..(25): SEQ ID NO: 3237; WAN024A83; Start 10; Stop 34
ataaactgtattcacgtattcaaat

SEQ ID NO: 350198 - DNA, 25 bp, Artificial
  probe
  misc_feature (1)..(25): SEQ ID NO: 3237; WAN024A83; Start 3; Stop 27
agtctttataaactgtattcacgta

SEQ ID NO: 350199 - DNA, 25 bp, Artificial
  probe
  misc_feature (1)..(25): SEQ ID NO: 3237; WAN024A83; Start 98; Stop 122
ttttgctataatagaggcagtaaaa

SEQ ID NO: 350200 - DNA, 25 bp, Artificial
  probe
  misc_feature (1)..(25): SEQ ID NO: 3237; WAN024A83; Start 1; Stop 25
ccagtctttataaactgtattcacg

SEQ ID NO: 350201 - DNA, 25 bp, Artificial
  probe
  misc_feature (1)..(25): SEQ ID NO: 3237; WAN024A83; Start 4; Stop 28
gtctttataaactgtattcacgtat

SEQ ID NO: 350202 - DNA, 25 bp, Artificial
  probe
  misc_feature (1)..(25): SEQ ID NO: 3237; WAN024A83; Start 17; Stop 41
gtattcacgtattcaaatcgtatat

SEQ ID NO: 350203 - DNA, 25 bp, Artificial
  probe
  misc_feature (1)..(25): SEQ ID NO: 3237; WAN024A83; Start 2; Stop 26
cagtctttataaactgtattcacgt

SEQ ID NO: 350204 - DNA, 25 bp, Artificial
  probe
  misc_feature (1)..(25): SEQ ID NO: 3238; WAN024AFI; Start 10; Stop 34
tccagacaaaatcaaagccttttag

SEQ ID NO: 350205 - DNA, 25 bp, Artificial
  probe
  misc_feature (1)..(25): SEQ ID NO: 3238; WAN024AFI; Start 9; Stop 33
ttccagacaaaatcaaagcctttta

SEQ ID NO: 350206 - DNA, 25 bp, Artificial
  probe
  misc_feature (1)..(25): SEQ ID NO: 3238; WAN024AFI; Start 8; Stop 32
cttccagacaaaatcaaagcctttt

SEQ ID NO: 350207 - DNA, 25 bp, Artificial
  probe
  misc_feature (1)..(25): SEQ ID NO: 3238; WAN024AFI; Start 11; Stop 35
ccagacaaaatcaaagccttttagg

SEQ ID NO: 350208 - DNA, 25 bp, Artificial
  probe
  misc_feature (1)..(25): SEQ ID NO: 3238; WAN024AFI; Start 2; Stop 26
cctcagcttccagacaaaatcaaag

SEQ ID NO: 350209 - DNA, 25 bp, Artificial
  probe
  misc_feature (1)..(25): SEQ ID NO: 3238; WAN024AFI; Start 1; Stop 25
ccctcagcttccagacaaaatcaaa

SEQ ID NO: 350210 - DNA, 25 bp, Artificial
  probe
  misc_feature (1)..(25): SEQ ID NO: 3238; WAN024AFI; Start 7; Stop 31
gcttccagacaaaatcaaagccttt

SEQ ID NO: 350211 - DNA, 25 bp, Artificial
  probe
  misc_feature (1)..(25): SEQ ID NO: 3238; WAN024AFI; Start 3; Stop 27
ctcagcttccagacaaaatcaaagc

SEQ ID NO: 350212 - DNA, 25 bp, Artificial
  probe
  misc_feature (1)..(25): SEQ ID NO: 3238; WAN024AFI; Start 6; Stop 30
agcttccagacaaaatcaaagcctt

SEQ ID NO: 350213 - DNA, 25 bp, Artificial
  probe
  misc_feature (1)..(25): SEQ ID NO: 3238; WAN024AFI; Start 5; Stop 29
cagcttccagacaaaatcaaagcct

SEQ ID NO: 350214 - DNA, 25 bp, Artificial
  probe
  misc_feature (1)..(25): SEQ ID NO: 3238; WAN024AFI; Start 4; Stop 28
tcagcttccagacaaaatcaaagcc

SEQ ID NO: 350215 - DNA, 25 bp, Artificial
  probe
  misc_feature (1)..(25): SEQ ID NO: 3239; WAN024AN6; Start 43; Stop 67
agctaaagggaacagaatggagaaa

SEQ ID NO: 350216 - DNA, 25 bp, Artificial
  probe
  misc_feature (1)..(25): SEQ ID NO: 3239; WAN024AN6; Start 42; Stop 66
gagctaaagggaacagaatggagaa

SEQ ID NO: 350217 - DNA, 25 bp, Artificial
  probe
  misc_feature (1)..(25): SEQ ID NO: 3239; WAN024AN6; Start 52; Stop 76
gaacagaatggagaaaatggaacaa

SEQ ID NO: 350218 - DNA, 25 bp, Artificial
  probe
  misc_feature (1)..(25): SEQ ID NO: 3239; WAN024AN6; Start 53; Stop 77
aacagaatggagaaaatggaacaaa

SEQ ID NO: 350219 - DNA, 25 bp, Artificial
  probe
  misc_feature (1)..(25): SEQ ID NO: 3239; WAN024AN6; Start 54; Stop 78
acagaatggagaaaatggaacaaat

SEQ ID NO: 350220 - DNA, 25 bp, Artificial
  probe
  misc_feature (1)..(25): SEQ ID NO: 3239; WAN024AN6; Start 46; Stop 70
taaagggaacagaatggagaaaatg

SEQ ID NO: 350221 - DNA, 25 bp, Artificial
  probe
  misc_feature (1)..(25): SEQ ID NO: 3239; WAN024AN6; Start 55; Stop 79
cagaatggagaaaatggaacaaatg

SEQ ID NO: 350222 - DNA, 25 bp, Artificial
  probe
  misc_feature (1)..(25): SEQ ID NO: 3239; WAN024AN6; Start 45; Stop 69
ctaaagggaacagaatggagaaaat

SEQ ID NO: 350223 - DNA, 25 bp, Artificial
  probe
  misc_feature (1)..(25): SEQ ID NO: 3239; WAN024AN6; Start 57; Stop 81
gaatggagaaaatggaacaaatgtg

SEQ ID NO: 350224 - DNA, 25 bp, Artificial
  probe
  misc_feature (1)..(25): SEQ ID NO: 3239; WAN024AN6; Start 56; Stop 80
agaatggagaaaatggaacaaatgt

SEQ ID NO: 350225 - DNA, 25 bp, Artificial
  probe
  misc_feature (1)..(25): SEQ ID NO: 3239; WAN024AN6; Start 44; Stop 68
gctaaagggaacagaatggagaaaa

SEQ ID NO: 350226 - DNA, 25 bp, Artificial
  probe
  misc_feature (1)..(25): SEQ ID NO: 3239; WAN024AN6; Start 39; Stop 63
taggagctaaagggaacagaatgga

SEQ ID NO: 350227 - DNA, 25 bp, Artificial
  probe
  misc_feature (1)..(25): SEQ ID NO: 3239; WAN024AN6; Start 51; Stop 75
ggaacagaatggagaaaatggaaca

SEQ ID NO: 350228 - DNA, 25 bp, Artificial
  probe
  misc_feature (1)..(25): SEQ ID NO: 3239; WAN024AN6; Start 47; Stop 71
aaagggaacagaatggagaaaatgg

SEQ ID NO: 350229 - DNA, 25 bp, Artificial
  probe
  misc_feature (1)..(25): SEQ ID NO: 3239; WAN024AN6; Start 38; Stop 62
ttaggagctaaagggaacagaatgg

SEQ ID NO: 350230 - DNA, 25 bp, Artificial
  probe
  misc_feature (1)..(25): SEQ ID NO: 3239; WAN024AN6; Start 58; Stop 82
aatggagaaaatggaacaaatgtgt

SEQ ID NO: 350231 - DNA, 25 bp, Artificial
  probe
  misc_feature (1)..(25): SEQ ID NO: 3239; WAN024AN6; Start 50; Stop 74
gggaacagaatggagaaaatggaac

SEQ ID NO: 350232 - DNA, 25 bp, Artificial
  probe
  misc_feature (1)..(25): SEQ ID NO: 3239; WAN024AN6; Start 49; Stop 73
agggaacagaatggagaaaatggaa

SEQ ID NO: 350233 - DNA, 25 bp, Artificial
  probe
  misc_feature (1)..(25): SEQ ID NO: 3239; WAN024AN6; Start 48; Stop 72
aagggaacagaatggagaaaatgga

SEQ ID NO: 350234 - DNA, 25 bp, Artificial
  probe
  misc_feature (1)..(25): SEQ ID NO: 3239; WAN024AN6; Start 90; Stop 114
tctgttagactgtatctagaaaggg

SEQ ID NO: 350235 - DNA, 25 bp, Artificial
  probe
  misc_feature (1)..(25): SEQ ID NO: 3239; WAN024AN6; Start 41; Stop 65
ggagctaaagggaacagaatggaga

SEQ ID NO: 350236 - DNA, 25 bp, Artificial
  probe
  misc_feature (1)..(25): SEQ ID NO: 3239; WAN024AN6; Start 40; Stop 64
aggagctaaagggaacagaatggag

SEQ ID NO: 350237 - DNA, 25 bp, Artificial
  probe
  misc_feature (1)..(25): SEQ ID NO: 3239; WAN024AN6; Start 37; Stop 61
tttaggagctaaagggaacagaatg

SEQ ID NO: 350238 - DNA, 25 bp, Artificial
  probe
  misc_feature (1)..(25): SEQ ID NO: 3239; WAN024AN6; Start 36; Stop 60
gtttaggagctaaagggaacagaat

SEQ ID NO: 350239 - DNA, 25 bp, Artificial
  probe
  misc_feature (1)..(25): SEQ ID NO: 3239; WAN024AN6; Start 35; Stop 59
agtttaggagctaaagggaacagaa

SEQ ID NO: 350240 - DNA, 25 bp, Artificial
  probe
  misc_feature (1)..(25): SEQ ID NO: 3239; WAN024AN6; Start 34; Stop 58
cagtttaggagctaaagggaacaga

SEQ ID NO: 350241 - DNA, 25 bp, Artificial
  probe
  misc_feature (1)..(25): SEQ ID NO: 3239; WAN024AN6; Start 96; Stop 120
agactgtatctagaaaggggaaaat

SEQ ID NO: 350242 - DNA, 25 bp, Artificial
  probe
  misc_feature (1)..(25): SEQ ID NO: 3239; WAN024AN6; Start 89; Stop 113
atctgttagactgtatctagaaagg

SEQ ID NO: 350243 - DNA, 25 bp, Artificial
  probe
  misc_feature (1)..(25): SEQ ID NO: 3239; WAN024AN6; Start 97; Stop 121
gactgtatctagaaaggggaaaatt

SEQ ID NO: 350244 - DNA, 25 bp, Artificial
  probe
  misc_feature (1)..(25): SEQ ID NO: 3239; WAN024AN6; Start 60; Stop 84
tggagaaaatggaacaaatgtgttt

SEQ ID NO: 350245 - DNA, 25 bp, Artificial
  probe
  misc_feature (1)..(25): SEQ ID NO: 3239; WAN024AN6; Start 59; Stop 83
atggagaaaatggaacaaatgtgtt

SEQ ID NO: 350246 - DNA, 25 bp, Artificial
  probe
  misc_feature (1)..(25): SEQ ID NO: 3239; WAN024AN6; Start 61; Stop 85
ggagaaaatggaacaaatgtgtttt

SEQ ID NO: 350247 - DNA, 25 bp, Artificial
  probe
  misc_feature (1)..(25): SEQ ID NO: 3239; WAN024AN6; Start 92; Stop 116
tgttagactgtatctagaaagggga

SEQ ID NO: 350248 - DNA, 25 bp, Artificial
  probe
  misc_feature (1)..(25): SEQ ID NO: 3240; WAN024APG; Start 74; Stop 98
ccgcttatttcagacttcattttac

SEQ ID NO: 350249 - DNA, 25 bp, Artificial
  probe
  misc_feature (1)..(25): SEQ ID NO: 3240; WAN024APG; Start 73; Stop 97
tccgcttatttcagacttcatttta

SEQ ID NO: 350250 - DNA, 25 bp, Artificial
  probe
  misc_feature (1)..(25): SEQ ID NO: 3240; WAN024APG; Start 75; Stop 99
cgcttatttcagacttcattttact

SEQ ID NO: 350251 - DNA, 25 bp, Artificial
  probe
  misc_feature (1)..(25): SEQ ID NO: 3240; WAN024APG; Start 72; Stop 96
gtccgcttatttcagacttcatttt

SEQ ID NO: 350252 - DNA, 25 bp, Artificial
  probe
  misc_feature (1)..(25): SEQ ID NO: 3240; WAN024APG; Start 71; Stop 95
agtccgcttatttcagacttcattt

SEQ ID NO: 350253 - DNA, 25 bp, Artificial
  probe
  misc_feature (1)..(25): SEQ ID NO: 3240; WAN024APG; Start 64; Stop 88
aaaacgaagtccgcttatttcagac

SEQ ID NO: 350254 - DNA, 25 bp, Artificial
  probe
  misc_feature (1)..(25): SEQ ID NO: 3240; WAN024APG; Start 76; Stop 100
gcttatttcagacttcattttactc

SEQ ID NO: 350255 - DNA, 25 bp, Artificial
  probe
  misc_feature (1)..(25): SEQ ID NO: 3240; WAN024APG; Start 80; Stop 104
atttcagacttcattttactcagat

SEQ ID NO: 350256 - DNA, 25 bp, Artificial
  probe
  misc_feature (1)..(25): SEQ ID NO: 3240; WAN024APG; Start 83; Stop 107
tcagacttcattttactcagatatg

SEQ ID NO: 350257 - DNA, 25 bp, Artificial
  probe
  misc_feature (1)..(25): SEQ ID NO: 3240; WAN024APG; Start 65; Stop 89
aaacgaagtccgcttatttcagact

SEQ ID NO: 350258 - DNA, 25 bp, Artificial
  probe
  misc_feature (1)..(25): SEQ ID NO: 3240; WAN024APG; Start 81; Stop 105
tttcagacttcattttactcagata

SEQ ID NO: 350259 - DNA, 25 bp, Artificial
  probe
  misc_feature (1)..(25): SEQ ID NO: 3240; WAN024APG; Start 79; Stop 103
tatttcagacttcattttactcaga

SEQ ID NO: 350260 - DNA, 25 bp, Artificial
  probe
  misc_feature (1)..(25): SEQ ID NO: 3240; WAN024APG; Start 82; Stop 106
ttcagacttcattttactcagatat

SEQ ID NO: 350261 - DNA, 25 bp, Artificial
  probe
  misc_feature (1)..(25): SEQ ID NO: 3240; WAN024APG; Start 21; Stop 45
ttagtttcagtataacataaaagcg

SEQ ID NO: 350262 - DNA, 25 bp, Artificial
  probe
  misc_feature (1)..(25): SEQ ID NO: 3240; WAN024APG; Start 78; Stop 102
ttatttcagacttcattttactcag

SEQ ID NO: 350263 - DNA, 25 bp, Artificial
  probe
  misc_feature (1)..(25): SEQ ID NO: 3240; WAN024APG; Start 77; Stop 101
cttatttcagacttcattttactca

SEQ ID NO: 350264 - DNA, 25 bp, Artificial
  probe
  misc_feature (1)..(25): SEQ ID NO: 3240; WAN024APG; Start 22; Stop 46
tagtttcagtataacataaaagcgc

SEQ ID NO: 350265 - DNA, 25 bp, Artificial
  probe
  misc_feature (1)..(25): SEQ ID NO: 3240; WAN024APG; Start 84; Stop 108
cagacttcattttactcagatatga

SEQ ID NO: 350266 - DNA, 25 bp, Artificial
  probe
  misc_feature (1)..(25): SEQ ID NO: 3240; WAN024APG; Start 85; Stop 109
agacttcattttactcagatatgaa

SEQ ID NO: 350267 - DNA, 25 bp, Artificial
  probe
  misc_feature (1)..(25): SEQ ID NO: 3241; WAN024AGL; Start 39; Stop 63
attatcggaggaaaggtattgtact

SEQ ID NO: 350268 - DNA, 25 bp, Artificial
  probe
  misc_feature (1)..(25): SEQ ID NO: 3241; WAN024AGL; Start 38; Stop 62
aattatcggaggaaaggtattgtac

SEQ ID NO: 350269 - DNA, 25 bp, Artificial
  probe
  misc_feature (1)..(25): SEQ ID NO: 3241; WAN024AGL; Start 37; Stop 61
taattatcggaggaaaggtattgta

SEQ ID NO: 350270 - DNA, 25 bp, Artificial
  probe
  misc_feature (1)..(25): SEQ ID NO: 3241; WAN024AGL; Start 36; Stop 60
ataattatcggaggaaaggtattgt

SEQ ID NO: 350271 - DNA, 25 bp, Artificial
  probe
  misc_feature (1)..(25): SEQ ID NO: 3241; WAN024AGL; Start 1; Stop 25
cctaattccccaacttccagtatac

SEQ ID NO: 350272 - DNA, 25 bp, Artificial
  probe
  misc_feature (1)..(25): SEQ ID NO: 3241; WAN024AGL; Start 35; Stop 59
aataattatcggaggaaaggtattg

SEQ ID NO: 350273 - DNA, 25 bp, Artificial
  probe
  misc_feature (1)..(25): SEQ ID NO: 3241; WAN024AGL; Start 34; Stop 58
aaataattatcggaggaaaggtatt

SEQ ID NO: 350274 - DNA, 25 bp, Artificial
  probe
  misc_feature (1)..(25): SEQ ID NO: 3241; WAN024AGL; Start 33; Stop 57
aaaataattatcggaggaaaggtat

SEQ ID NO: 350275 - DNA, 25 bp, Artificial
  probe
  misc_feature (1)..(25): SEQ ID NO: 3242; WAN0249TI; Start 708; Stop 732
ccatatagcattgtccataacgagt

SEQ ID NO: 350276 - DNA, 25 bp, Artificial
  probe
  misc_feature (1)..(25): SEQ ID NO: 3242; WAN0249TI; Start 253; Stop 277
agaacaagtagactggcttatgaag

SEQ ID NO: 350277 - DNA, 25 bp, Artificial
  probe
  misc_feature (1)..(25): SEQ ID NO: 3242; WAN0249TI; Start 925; Stop 949
gcatatcaaggcgagtcaatactat

SEQ ID NO: 350278 - DNA, 25 bp, Artificial
  probe
  misc_feature (1)..(25): SEQ ID NO: 3242; WAN0249TI; Start 709; Stop 733
catatagcattgtccataacgagta

SEQ ID NO: 350279 - DNA, 25 bp, Artificial
  probe
  misc_feature (1)..(25): SEQ ID NO: 3242; WAN0249TI; Start 479; Stop 503
ttctagtccatctccgattaacgat

SEQ ID NO: 350280 - DNA, 25 bp, Artificial
  probe
  misc_feature (1)..(25): SEQ ID NO: 3242; WAN0249TI; Start 478; Stop 502
attctagtccatctccgattaacga

SEQ ID NO: 350281 - DNA, 25 bp, Artificial
  probe
  misc_feature (1)..(25): SEQ ID NO: 3242; WAN0249TI; Start 477; Stop 501
cattctagtccatctccgattaacg

SEQ ID NO: 350282 - DNA, 25 bp, Artificial
  probe
  misc_feature (1)..(25): SEQ ID NO: 3242; WAN0249TI; Start 707; Stop 731
gccatatagcattgtccataacgag

SEQ ID NO: 350283 - DNA, 25 bp, Artificial
  probe
  misc_feature (1)..(25): SEQ ID NO: 3242; WAN0249TI; Start 476; Stop 500
gcattctagtccatctccgattaac

SEQ ID NO: 350284 - DNA, 25 bp, Artificial
  probe
  misc_feature (1)..(25): SEQ ID NO: 3242; WAN0249TI; Start 475; Stop 499
agcattctagtccatctccgattaa

SEQ ID NO: 350285 - DNA, 25 bp, Artificial
  probe
  misc_feature (1)..(25): SEQ ID NO: 3242; WAN0249TI; Start 474; Stop 498
aagcattctagtccatctccgatta

SEQ ID NO: 350286 - DNA, 25 bp, Artificial
  probe
  misc_feature (1)..(25): SEQ ID NO: 3242; WAN0249TI; Start 515; Stop 539
cctccttctccagtccttgtataac

SEQ ID NO: 350287 - DNA, 25 bp, Artificial
  probe
  misc_feature (1)..(25): SEQ ID NO: 3242; WAN0249TI; Start 521; Stop 545
tctccagtccttgtataacatcttg

SEQ ID NO: 350288 - DNA, 25 bp, Artificial
  probe
  misc_feature (1)..(25): SEQ ID NO: 3242; WAN0249TI; Start 518; Stop 542
ccttctccagtccttgtataacatc

SEQ ID NO: 350289 - DNA, 25 bp, Artificial
  probe
  misc_feature (1)..(25): SEQ ID NO: 3242; WAN0249TI; Start 519; Stop 543
cttctccagtccttgtataacatct

SEQ ID NO: 350290 - DNA, 25 bp, Artificial
  probe
  misc_feature (1)..(25): SEQ ID NO: 3242; WAN0249TI; Start 913; Stop 937
aatctctaattggcatatcaaggcg

SEQ ID NO: 350291 - DNA, 25 bp, Artificial
  probe
  misc_feature (1)..(25): SEQ ID NO: 3242; WAN0249TI; Start 517; Stop 541
tccttctccagtccttgtataacat

SEQ ID NO: 350292 - DNA, 25 bp, Artificial
  probe
  misc_feature (1)..(25): SEQ ID NO: 3242; WAN0249TI; Start 926; Stop 950
catatcaaggcgagtcaatactatt

SEQ ID NO: 350293 - DNA, 25 bp, Artificial
  probe
  misc_feature (1)..(25): SEQ ID NO: 3242; WAN0249TI; Start 520; Stop 544
ttctccagtccttgtataacatctt

SEQ ID NO: 350294 - DNA, 25 bp, Artificial
  probe
  misc_feature (1)..(25): SEQ ID NO: 3242; WAN0249TI; Start 514; Stop 538
acctccttctccagtccttgtataa

SEQ ID NO: 350295 - DNA, 25 bp, Artificial
  probe
  misc_feature (1)..(25): SEQ ID NO: 3242; WAN0249TI; Start 252; Stop 276
cagaacaagtagactggcttatgaa

SEQ ID NO: 350296 - DNA, 25 bp, Artificial
  probe
  misc_feature (1)..(25): SEQ ID NO: 3242; WAN0249TI; Start 516; Stop 540
ctccttctccagtccttgtataaca

SEQ ID NO: 350297 - DNA, 25 bp, Artificial
  probe
  misc_feature (1)..(25): SEQ ID NO: 3242; WAN0249TI; Start 1578; Stop 1602
tgaatacagcctcaagtatgaagaa

SEQ ID NO: 350298 - DNA, 25 bp, Artificial
  probe
  misc_feature (1)..(25): SEQ ID NO: 3242; WAN0249TI; Start 710; Stop 734
atatagcattgtccataacgagtaa

SEQ ID NO: 350299 - DNA, 25 bp, Artificial
  probe
  misc_feature (1)..(25): SEQ ID NO: 3242; WAN0249TI; Start 529; Stop 553
ccttgtataacatcttggagttgat

SEQ ID NO: 350300 - DNA, 25 bp, Artificial
  probe
  misc_feature (1)..(25): SEQ ID NO: 3242; WAN0249TI; Start 914; Stop 938
atctctaattggcatatcaaggcga

SEQ ID NO: 350301 - DNA, 25 bp, Artificial
  probe
  misc_feature (1)..(25): SEQ ID NO: 3242; WAN0249TI; Start 525; Stop 549
cagtccttgtataacatcttggagt

SEQ ID NO: 350302 - DNA, 25 bp, Artificial
  probe
  misc_feature (1)..(25): SEQ ID NO: 3242; WAN0249TI; Start 528; Stop 552
tccttgtataacatcttggagttga

SEQ ID NO: 350303 - DNA, 25 bp, Artificial
  probe
  misc_feature (1)..(25): SEQ ID NO: 3242; WAN0249TI; Start 527; Stop 551
gtccttgtataacatcttggagttg

SEQ ID NO: 350304 - DNA, 25 bp, Artificial
  probe
  misc_feature (1)..(25): SEQ ID NO: 3242; WAN0249TI; Start 526; Stop 550
agtccttgtataacatcttggagtt

SEQ ID NO: 350305 - DNA, 25 bp, Artificial
  probe
  misc_feature (1)..(25): SEQ ID NO: 3242; WAN0249TI; Start 524; Stop 548
ccagtccttgtataacatcttggag

SEQ ID NO: 350306 - DNA, 25 bp, Artificial
  probe
  misc_feature (1)..(25): SEQ ID NO: 3242; WAN0249TI; Start 522; Stop 546
ctccagtccttgtataacatcttgg

SEQ ID NO: 350307 - DNA, 25 bp, Artificial
  probe
  misc_feature (1)..(25): SEQ ID NO: 3242; WAN0249TI; Start 513; Stop 537
cacctccttctccagtccttgtata

SEQ ID NO: 350308 - DNA, 25 bp, Artificial
  probe
  misc_feature (1)..(25): SEQ ID NO: 3243; WAN024A6T; Start 1; Stop 25
cctctcttatattgtaagccctatt

SEQ ID NO: 350309 - DNA, 25 bp, Artificial
  probe
  misc_feature (1)..(25): SEQ ID NO: 3243; WAN024A6T; Start 2; Stop 26
ctctcttatattgtaagccctatta

SEQ ID NO: 350310 - DNA, 25 bp, Artificial
  probe
  misc_feature (1)..(25): SEQ ID NO: 3244; WAN024FEE-3; Start 138; Stop 162
agatggtagagtggtgtatgagtat

SEQ ID NO: 350311 - DNA, 25 bp, Artificial
  probe
  misc_feature (1)..(25): SEQ ID NO: 3244; WAN024FEE-3; Start 748; Stop 772
tccagcagttcaagtagtagttcta

SEQ ID NO: 350312 - DNA, 25 bp, Artificial
  probe
  misc_feature (1)..(25): SEQ ID NO: 3244; WAN024FEE-3; Start 139; Stop 163
gatggtagagtggtgtatgagtatc

SEQ ID NO: 350313 - DNA, 25 bp, Artificial
  probe
  misc_feature (1)..(25): SEQ ID NO: 3244; WAN024FEE-3; Start 137; Stop 161
cagatggtagagtggtgtatgagta

SEQ ID NO: 350314 - DNA, 25 bp, Artificial
  probe
  misc_feature (1)..(25): SEQ ID NO: 3244; WAN024FEE-3; Start 760; Stop 784
agtagtagttctagcgatagcagta

SEQ ID NO: 350315 - DNA, 25 bp, Artificial
  probe
  misc_feature (1)..(25): SEQ ID NO: 3244; WAN024FEE-3; Start 753; Stop 777
cagttcaagtagtagttctagcgat

SEQ ID NO: 350316 - DNA, 25 bp, Artificial
  probe
  misc_feature (1)..(25): SEQ ID NO: 3244; WAN024FEE-3; Start 756; Stop 780
ttcaagtagtagttctagcgatagc

SEQ ID NO: 350317 - DNA, 25 bp, Artificial
  probe
  misc_feature (1)..(25): SEQ ID NO: 3244; WAN024FEE-3; Start 758; Stop 782
caagtagtagttctagcgatagcag

SEQ ID NO: 350318 - DNA, 25 bp, Artificial
  probe
  misc_feature (1)..(25): SEQ ID NO: 3244; WAN024FEE-3; Start 749; Stop 773
ccagcagttcaagtagtagttctag

SEQ ID NO: 350319 - DNA, 25 bp, Artificial
  probe
  misc_feature (1)..(25): SEQ ID NO: 3244; WAN024FEE-3; Start 769; Stop 793
tctagcgatagcagtaactcaagta

SEQ ID NO: 350320 - DNA, 25 bp, Artificial
  probe
  misc_feature (1)..(25): SEQ ID NO: 3244; WAN024FEE-3; Start 759; Stop 783
aagtagtagttctagcgatagcagt

SEQ ID NO: 350321 - DNA, 25 bp, Artificial
  probe
  misc_feature (1)..(25): SEQ ID NO: 3244; WAN024FEE-3; Start 757; Stop 781
tcaagtagtagttctagcgatagca

SEQ ID NO: 350322 - DNA, 25 bp, Artificial
  probe
  misc_feature (1)..(25): SEQ ID NO: 3244; WAN024FEE-3; Start 761; Stop 785
gtagtagttctagcgatagcagtaa

SEQ ID NO: 350323 - DNA, 25 bp, Artificial
  probe
  misc_feature (1)..(25): SEQ ID NO: 3244; WAN024FEE-3; Start 144; Stop 168
tagagtggtgtatgagtatcaggat

SEQ ID NO: 350324 - DNA, 25 bp, Artificial
  probe
  misc_feature (1)..(25): SEQ ID NO: 3244; WAN024FEE-3; Start 140; Stop 164
atggtagagtggtgtatgagtatca

SEQ ID NO: 350325 - DNA, 25 bp, Artificial
  probe
  misc_feature (1)..(25): SEQ ID NO: 3244; WAN024FEE-3; Start 61; Stop 85
cataccaatggctatcagaccttag

SEQ ID NO: 350326 - DNA, 25 bp, Artificial
  probe
  misc_feature (1)..(25): SEQ ID NO: 3244; WAN024FEE-3; Start 750; Stop 774
cagcagttcaagtagtagttctagc

SEQ ID NO: 350327 - DNA, 25 bp, Artificial
  probe
  misc_feature (1)..(25): SEQ ID NO: 3244; WAN024FEE-3; Start 145; Stop 169
agagtggtgtatgagtatcaggata

SEQ ID NO: 350328 - DNA, 25 bp, Artificial
  probe
  misc_feature (1)..(25): SEQ ID NO: 3244; WAN024FEE-3; Start 698; Stop 722
atcagaatgcttggtctagtattgt

SEQ ID NO: 350329 - DNA, 25 bp, Artificial
  probe
  misc_feature (1)..(25): SEQ ID NO: 3244; WAN024FEE-3; Start 693; Stop 717
ggattatcagaatgcttggtctagt

SEQ ID NO: 350330 - DNA, 25 bp, Artificial
  probe
  misc_feature (1)..(25): SEQ ID NO: 3244; WAN024FEE-3; Start 143; Stop 167
gtagagtggtgtatgagtatcagga

SEQ ID NO: 350331 - DNA, 25 bp, Artificial
  probe
  misc_feature (1)..(25): SEQ ID NO: 3244; WAN024FEE-3; Start 747; Stop 771
ctccagcagttcaagtagtagttct

SEQ ID NO: 350332 - DNA, 25 bp, Artificial
  probe
  misc_feature (1)..(25): SEQ ID NO: 3244; WAN024FEE-3; Start 141; Stop 165
tggtagagtggtgtatgagtatcag

SEQ ID NO: 350333 - DNA, 25 bp, Artificial
  probe
  misc_feature (1)..(25): SEQ ID NO: 3244; WAN024FEE-3; Start 770; Stop 794
ctagcgatagcagtaactcaagtac

SEQ ID NO: 350334 - DNA, 25 bp, Artificial
  probe
  misc_feature (1)..(25): SEQ ID NO: 3244; WAN024FEE-3; Start 699; Stop 723
tcagaatgcttggtctagtattgtg

SEQ ID NO: 350335 - DNA, 25 bp, Artificial
  probe
  misc_feature (1)..(25): SEQ ID NO: 3244; WAN024FEE-3; Start 762; Stop 786
tagtagttctagcgatagcagtaac

SEQ ID NO: 350336 - DNA, 25 bp, Artificial
  probe
  misc_feature (1)..(25): SEQ ID NO: 3244; WAN024FEE-3; Start 768; Stop 792
ttctagcgatagcagtaactcaagt

SEQ ID NO: 350337 - DNA, 25 bp, Artificial
  probe
  misc_feature (1)..(25): SEQ ID NO: 3244; WAN024FEE-3; Start 146; Stop 170
gagtggtgtatgagtatcaggataa

SEQ ID NO: 350338 - DNA, 25 bp, Artificial
  probe
  misc_feature (1)..(25): SEQ ID NO: 3244; WAN024FEE-3; Start 754; Stop 778
agttcaagtagtagttctagcgata

SEQ ID NO: 350339 - DNA, 25 bp, Artificial
  probe
  misc_feature (1)..(25): SEQ ID NO: 3244; WAN024FEE-3; Start 767; Stop 791
gttctagcgatagcagtaactcaag

SEQ ID NO: 350340 - DNA, 25 bp, Artificial
  probe
  misc_feature (1)..(25): SEQ ID NO: 3244; WAN024FEE-3; Start 692; Stop 716
cggattatcagaatgcttggtctag

SEQ ID NO: 350341 - DNA, 25 bp, Artificial
  probe
  misc_feature (1)..(25): SEQ ID NO: 3244; WAN024FEE-3; Start 755; Stop 779
gttcaagtagtagttctagcgatag

SEQ ID NO: 350342 - DNA, 25 bp, Artificial
  probe
  misc_feature (1)..(25): SEQ ID NO: 3244; WAN024FEE-3; Start 142; Stop 166
ggtagagtggtgtatgagtatcagg

SEQ ID NO: 350343 - DNA, 25 bp, Artificial
  probe
  misc_feature (1)..(25): SEQ ID NO: 3245; WAN0249XQ; Start 41; Stop 65
acaagcatcccaaaagttgatatac

SEQ ID NO: 350344 - DNA, 25 bp, Artificial
  probe
  misc_feature (1)..(25): SEQ ID NO: 3245; WAN0249XQ; Start 40; Stop 64
gacaagcatcccaaaagttgatata

SEQ ID NO: 350345 - DNA, 25 bp, Artificial
  probe
  misc_feature (1)..(25): SEQ ID NO: 3245; WAN0249XQ; Start 39; Stop 63
tgacaagcatcccaaaagttgatat

SEQ ID NO: 350346 - DNA, 25 bp, Artificial
  probe
  misc_feature (1)..(25): SEQ ID NO: 3245; WAN0249XQ; Start 42; Stop 66
caagcatcccaaaagttgatatact

SEQ ID NO: 350347 - DNA, 25 bp, Artificial
  probe
  misc_feature (1)..(25): SEQ ID NO: 3245; WAN0249XQ; Start 38; Stop 62
ttgacaagcatcccaaaagttgata

SEQ ID NO: 350348 - DNA, 25 bp, Artificial
  probe
  misc_feature (1)..(25): SEQ ID NO: 3245; WAN0249XQ; Start 44; Stop 68
agcatcccaaaagttgatatactag

SEQ ID NO: 350349 - DNA, 25 bp, Artificial
  probe
  misc_feature (1)..(25): SEQ ID NO: 3245; WAN0249XQ; Start 43; Stop 67
aagcatcccaaaagttgatatacta

SEQ ID NO: 350350 - DNA, 25 bp, Artificial
  probe
  misc_feature (1)..(25): SEQ ID NO: 3245; WAN0249XQ; Start 31; Stop 55
aaaagtgttgacaagcatcccaaaa

SEQ ID NO: 350351 - DNA, 25 bp, Artificial
  probe
  misc_feature (1)..(25): SEQ ID NO: 3245; WAN0249XQ; Start 37; Stop 61
gttgacaagcatcccaaaagttgat

SEQ ID NO: 350352 - DNA, 25 bp, Artificial
  probe
  misc_feature (1)..(25): SEQ ID NO: 3245; WAN0249XQ; Start 32; Stop 56
aaagtgttgacaagcatcccaaaag

SEQ ID NO: 350353 - DNA, 25 bp, Artificial
  probe
  misc_feature (1)..(25): SEQ ID NO: 3245; WAN0249XQ; Start 35; Stop 59
gtgttgacaagcatcccaaaagttg

SEQ ID NO: 350354 - DNA, 25 bp, Artificial
  probe
  misc_feature (1)..(25): SEQ ID NO: 3245; WAN0249XQ; Start 36; Stop 60
tgttgacaagcatcccaaaagttga

SEQ ID NO: 350355 - DNA, 25 bp, Artificial
  probe
  misc_feature (1)..(25): SEQ ID NO: 3245; WAN0249XQ; Start 34; Stop 58
agtgttgacaagcatcccaaaagtt

SEQ ID NO: 350356 - DNA, 25 bp, Artificial
  probe
  misc_feature (1)..(25): SEQ ID NO: 3245; WAN0249XQ; Start 33; Stop 57
aagtgttgacaagcatcccaaaagt

SEQ ID NO: 350357 - DNA, 25 bp, Artificial
  probe
  misc_feature (1)..(25): SEQ ID NO: 3245; WAN0249XQ; Start 45; Stop 69
gcatcccaaaagttgatatactagt

SEQ ID NO: 350358 - DNA, 25 bp, Artificial
  probe
  misc_feature (1)..(25): SEQ ID NO: 3245; WAN0249XQ; Start 46; Stop 70
catcccaaaagttgatatactagta

SEQ ID NO: 350359 - DNA, 25 bp, Artificial
  probe
  misc_feature (1)..(25): SEQ ID NO: 3245; WAN0249XQ; Start 48; Stop 72
tcccaaaagttgatatactagtaaa

SEQ ID NO: 350360 - DNA, 25 bp, Artificial
  probe
  misc_feature (1)..(25): SEQ ID NO: 3245; WAN0249XQ; Start 49; Stop 73
cccaaaagttgatatactagtaaag

SEQ ID NO: 350361 - DNA, 25 bp, Artificial
  probe
  misc_feature (1)..(25): SEQ ID NO: 3245; WAN0249XQ; Start 47; Stop 71
atcccaaaagttgatatactagtaa

SEQ ID NO: 350362 - DNA, 25 bp, Artificial
  probe
  misc_feature (1)..(25): SEQ ID NO: 3246; WAN024AIT; Start 51; Stop 75
tacacccacaatcaaccatctttaa

SEQ ID NO: 350363 - DNA, 25 bp, Artificial
  probe
  misc_feature (1)..(25): SEQ ID NO: 3246; WAN024AIT; Start 50; Stop 74
ctacacccacaatcaaccatcttta

SEQ ID NO: 350364 - DNA, 25 bp, Artificial
  probe
  misc_feature (1)..(25): SEQ ID NO: 3246; WAN024AIT; Start 61; Stop 85
atcaaccatctttaaggcttactct

SEQ ID NO: 350365 - DNA, 25 bp, Artificial
  probe
  misc_feature (1)..(25): SEQ ID NO: 3246; WAN024AIT; Start 66; Stop 90
ccatctttaaggcttactctgacaa

SEQ ID NO: 350366 - DNA, 25 bp, Artificial
  probe
  misc_feature (1)..(25): SEQ ID NO: 3246; WAN024AIT; Start 64; Stop 88
aaccatctttaaggcttactctgac

SEQ ID NO: 350367 - DNA, 25 bp, Artificial
  probe
  misc_feature (1)..(25): SEQ ID NO: 3246; WAN024AIT; Start 63; Stop 87
caaccatctttaaggcttactctga

SEQ ID NO: 350368 - DNA, 25 bp, Artificial
  probe
  misc_feature (1)..(25): SEQ ID NO: 3246; WAN024AIT; Start 62; Stop 86
tcaaccatctttaaggcttactctg

SEQ ID NO: 350369 - DNA, 25 bp, Artificial
  probe
  misc_feature (1)..(25): SEQ ID NO: 3246; WAN024AIT; Start 58; Stop 82
acaatcaaccatctttaaggcttac

SEQ ID NO: 350370 - DNA, 25 bp, Artificial
  probe
  misc_feature (1)..(25): SEQ ID NO: 3246; WAN024AIT; Start 57; Stop 81
cacaatcaaccatctttaaggctta

SEQ ID NO: 350371 - DNA, 25 bp, Artificial
  probe
  misc_feature (1)..(25): SEQ ID NO: 3246; WAN024AIT; Start 59; Stop 83
caatcaaccatctttaaggcttact

SEQ ID NO: 350372 - DNA, 25 bp, Artificial
  probe
  misc_feature (1)..(25): SEQ ID NO: 3246; WAN024AIT; Start 60; Stop 84
aatcaaccatctttaaggcttactc

SEQ ID NO: 350373 - DNA, 25 bp, Artificial
  probe
  misc_feature (1)..(25): SEQ ID NO: 3246; WAN024AIT; Start 67; Stop 91
catctttaaggcttactctgacaag

SEQ ID NO: 350374 - DNA, 25 bp, Artificial
  probe
  misc_feature (1)..(25): SEQ ID NO: 3246; WAN024AIT; Start 52; Stop 76
acacccacaatcaaccatctttaag

SEQ ID NO: 350375 - DNA, 25 bp, Artificial
  probe
  misc_feature (1)..(25): SEQ ID NO: 3246; WAN024AIT; Start 68; Stop 92
atctttaaggcttactctgacaagt

SEQ ID NO: 350376 - DNA, 25 bp, Artificial
  probe
  misc_feature (1)..(25): SEQ ID NO: 3246; WAN024AIT; Start 65; Stop 89
accatctttaaggcttactctgaca

SEQ ID NO: 350377 - DNA, 25 bp, Artificial
  probe
  misc_feature (1)..(25): SEQ ID NO: 3246; WAN024AIT; Start 56; Stop 80
ccacaatcaaccatctttaaggctt

SEQ ID NO: 350378 - DNA, 25 bp, Artificial
  probe
  misc_feature (1)..(25): SEQ ID NO: 3246; WAN024AIT; Start 53; Stop 77
cacccacaatcaaccatctttaagg

SEQ ID NO: 350379 - DNA, 25 bp, Artificial
  probe
  misc_feature (1)..(25): SEQ ID NO: 3246; WAN024AIT; Start 69; Stop 93
tctttaaggcttactctgacaagta

SEQ ID NO: 350380 - DNA, 25 bp, Artificial
  probe
  misc_feature (1)..(25): SEQ ID NO: 3246; WAN024AIT; Start 55; Stop 79
cccacaatcaaccatctttaaggct

SEQ ID NO: 350381 - DNA, 25 bp, Artificial
  probe
  misc_feature (1)..(25): SEQ ID NO: 3246; WAN024AIT; Start 49; Stop 73
gctacacccacaatcaaccatcttt

SEQ ID NO: 350382 - DNA, 25 bp, Artificial
  probe
  misc_feature (1)..(25): SEQ ID NO: 3246; WAN024AIT; Start 54; Stop 78
acccacaatcaaccatctttaaggc

SEQ ID NO: 350383 - DNA, 25 bp, Artificial
  probe
  misc_feature (1)..(25): SEQ ID NO: 3246; WAN024AIT; Start 43; Stop 67
tttcatgctacacccacaatcaacc

SEQ ID NO: 350384 - DNA, 25 bp, Artificial
  probe
  misc_feature (1)..(25): SEQ ID NO: 3246; WAN024AIT; Start 47; Stop 71
atgctacacccacaatcaaccatct

SEQ ID NO: 350385 - DNA, 25 bp, Artificial
  probe
  misc_feature (1)..(25): SEQ ID NO: 3246; WAN024AIT; Start 42; Stop 66
ttttcatgctacacccacaatcaac

SEQ ID NO: 350386 - DNA, 25 bp, Artificial
  probe
  misc_feature (1)..(25): SEQ ID NO: 3246; WAN024AIT; Start 48; Stop 72
tgctacacccacaatcaaccatctt

SEQ ID NO: 350387 - DNA, 25 bp, Artificial
  probe
  misc_feature (1)..(25): SEQ ID NO: 3246; WAN024AIT; Start 46; Stop 70
catgctacacccacaatcaaccatc

SEQ ID NO: 350388 - DNA, 25 bp, Artificial
  probe
  misc_feature (1)..(25): SEQ ID NO: 3246; WAN024AIT; Start 45; Stop 69
tcatgctacacccacaatcaaccat

SEQ ID NO: 350389 - DNA, 25 bp, Artificial
  probe
  misc_feature (1)..(25): SEQ ID NO: 3246; WAN024AIT; Start 70; Stop 94
ctttaaggcttactctgacaagtaa

SEQ ID NO: 350390 - DNA, 25 bp, Artificial
  probe
  misc_feature (1)..(25): SEQ ID NO: 3246; WAN024AIT; Start 44; Stop 68
ttcatgctacacccacaatcaacca

SEQ ID NO: 350391 - DNA, 25 bp, Artificial
  probe
  misc_feature (1)..(25): SEQ ID NO: 3247; WAN024FJT; Start 825; Stop 849
agttgaagcaggtagaagaattgat

SEQ ID NO: 350392 - DNA, 25 bp, Artificial
  probe
  misc_feature (1)..(25): SEQ ID NO: 3247; WAN024FJT; Start 824; Stop 848
tagttgaagcaggtagaagaattga

SEQ ID NO: 350393 - DNA, 25 bp, Artificial
  probe
  misc_feature (1)..(25): SEQ ID NO: 3247; WAN024FJT; Start 826; Stop 850
gttgaagcaggtagaagaattgatt

SEQ ID NO: 350394 - DNA, 25 bp, Artificial
  probe
  misc_feature (1)..(25): SEQ ID NO: 3247; WAN024FJT; Start 823; Stop 847
ttagttgaagcaggtagaagaattg

SEQ ID NO: 350395 - DNA, 25 bp, Artificial
  probe
  misc_feature (1)..(25): SEQ ID NO: 3247; WAN024FJT; Start 926; Stop 950
gcttgattataggtaagaatgatgc

SEQ ID NO: 350396 - DNA, 25 bp, Artificial
  probe
  misc_feature (1)..(25): SEQ ID NO: 3247; WAN024FJT; Start 1084; Stop 1108
agaacagaacagtatcatcttaaca

SEQ ID NO: 350397 - DNA, 25 bp, Artificial
  probe
  misc_feature (1)..(25): SEQ ID NO: 3247; WAN024FJT; Start 925; Stop 949
ggcttgattataggtaagaatgatg

SEQ ID NO: 350398 - DNA, 25 bp, Artificial
  probe
  misc_feature (1)..(25): SEQ ID NO: 3247; WAN024FJT; Start 944; Stop 968
atgatgcaagctctactattaaggt

SEQ ID NO: 350399 - DNA, 25 bp, Artificial
  probe
  misc_feature (1)..(25): SEQ ID NO: 3247; WAN024FJT; Start 819; Stop 843
tgatttagttgaagcaggtagaaga

SEQ ID NO: 350400 - DNA, 25 bp, Artificial
  probe
  misc_feature (1)..(25): SEQ ID NO: 3247; WAN024FJT; Start 147; Stop 171
ggctaaagttgatggaggttatgta

SEQ ID NO: 350401 - DNA, 25 bp, Artificial
  probe
  misc_feature (1)..(25): SEQ ID NO: 3247; WAN024FJT; Start 1; Stop 25
ccttatgttcactttgcgtattctg

SEQ ID NO: 350402 - DNA, 25 bp, Artificial
  probe
  misc_feature (1)..(25): SEQ ID NO: 3247; WAN024FJT; Start 810; Stop 834
atctgagtctgatttagttgaagca

SEQ ID NO: 350403 - DNA, 25 bp, Artificial
  probe
  misc_feature (1)..(25): SEQ ID NO: 3247; WAN024FJT; Start 614; Stop 638
ccgctccagaagatattgaaagtaa

SEQ ID NO: 350404 - DNA, 25 bp, Artificial
  probe
  misc_feature (1)..(25): SEQ ID NO: 3247; WAN024FJT; Start 948; Stop 972
tgcaagctctactattaaggtatca

SEQ ID NO: 350405 - DNA, 25 bp, Artificial
  probe
  misc_feature (1)..(25): SEQ ID NO: 3247; WAN024FJT; Start 945; Stop 969
tgatgcaagctctactattaaggta

SEQ ID NO: 350406 - DNA, 25 bp, Artificial
  probe
  misc_feature (1)..(25): SEQ ID NO: 3247; WAN024FJT; Start 497; Stop 521
taggtgttgaatttatcgctttacg

SEQ ID NO: 350407 - DNA, 25 bp, Artificial
  probe
  misc_feature (1)..(25): SEQ ID NO: 3247; WAN024FJT; Start 491; Stop 515
atttggtaggtgttgaatttatcgc

SEQ ID NO: 350408 - DNA, 25 bp, Artificial
  probe
  misc_feature (1)..(25): SEQ ID NO: 3247; WAN024FJT; Start 487; Stop 511
gctgatttggtaggtgttgaattta

SEQ ID NO: 350409 - DNA, 25 bp, Artificial
  probe
  misc_feature (1)..(25): SEQ ID NO: 3247; WAN024FJT; Start 937; Stop 961
ggtaagaatgatgcaagctctacta

SEQ ID NO: 350410 - DNA, 25 bp, Artificial
  probe
  misc_feature (1)..(25): SEQ ID NO: 3247; WAN024FJT; Start 935; Stop 959
taggtaagaatgatgcaagctctac

SEQ ID NO: 350411 - DNA, 25 bp, Artificial
  probe
  misc_feature (1)..(25): SEQ ID NO: 3247; WAN024FJT; Start 828; Stop 852
tgaagcaggtagaagaattgatttg

SEQ ID NO: 350412 - DNA, 25 bp, Artificial
  probe
  misc_feature (1)..(25): SEQ ID NO: 3247; WAN024FJT; Start 836; Stop 860
gtagaagaattgatttgctgacgac

SEQ ID NO: 350413 - DNA, 25 bp, Artificial
  probe
  misc_feature (1)..(25): SEQ ID NO: 3247; WAN024FJT; Start 495; Stop 519
ggtaggtgttgaatttatcgcttta

SEQ ID NO: 350414 - DNA, 25 bp, Artificial
  probe
  misc_feature (1)..(25): SEQ ID NO: 3247; WAN024FJT; Start 615; Stop 639
cgctccagaagatattgaaagtaat

SEQ ID NO: 350415 - DNA, 25 bp, Artificial
  probe
  misc_feature (1)..(25): SEQ ID NO: 3247; WAN024FJT; Start 953; Stop 977
gctctactattaaggtatcaagtga

SEQ ID NO: 350416 - DNA, 25 bp, Artificial
  probe
  misc_feature (1)..(25): SEQ ID NO: 3247; WAN024FJT; Start 934; Stop 958
ataggtaagaatgatgcaagctcta

SEQ ID NO: 350417 - DNA, 25 bp, Artificial
  probe
  misc_feature (1)..(25): SEQ ID NO: 3247; WAN024FJT; Start 933; Stop 957
tataggtaagaatgatgcaagctct

SEQ ID NO: 350418 - DNA, 25 bp, Artificial
  probe
  misc_feature (1)..(25): SEQ ID NO: 3247; WAN024FJT; Start 837; Stop 861
tagaagaattgatttgctgacgaca

SEQ ID NO: 350419 - DNA, 25 bp, Artificial
  probe
  misc_feature (1)..(25): SEQ ID NO: 3247; WAN024FJT; Start 949; Stop 973
gcaagctctactattaaggtatcaa

SEQ ID NO: 350420 - DNA, 25 bp, Artificial
  probe
  misc_feature (1)..(25): SEQ ID NO: 3247; WAN024FJT; Start 943; Stop 967
aatgatgcaagctctactattaagg

SEQ ID NO: 350421 - DNA, 25 bp, Artificial
  probe
  misc_feature (1)..(25): SEQ ID NO: 3247; WAN024FJT; Start 932; Stop 956
ttataggtaagaatgatgcaagctc

SEQ ID NO: 350422 - DNA, 25 bp, Artificial
  probe
  misc_feature (1)..(25): SEQ ID NO: 3247; WAN024FJT; Start 820; Stop 844
gatttagttgaagcaggtagaagaa

SEQ ID NO: 350423 - DNA, 25 bp, Artificial
  probe
  misc_feature (1)..(25): SEQ ID NO: 3247; WAN024FJT; Start 148; Stop 172
gctaaagttgatggaggttatgtaa

SEQ ID NO: 350424 - DNA, 25 bp, Artificial
  probe
  misc_feature (1)..(25): SEQ ID NO: 3248; WAN024AJK; Start 13; Stop 37
attagtcgaatgataggatgaagct

SEQ ID NO: 350425 - DNA, 25 bp, Artificial
  probe
  misc_feature (1)..(25): SEQ ID NO: 3248; WAN024AJK; Start 14; Stop 38
ttagtcgaatgataggatgaagcta

SEQ ID NO: 350426 - DNA, 25 bp, Artificial
  probe
  misc_feature (1)..(25): SEQ ID NO: 3248; WAN024AJK; Start 12; Stop 36
aattagtcgaatgataggatgaagc

SEQ ID NO: 350427 - DNA, 25 bp, Artificial
  probe
  misc_feature (1)..(25): SEQ ID NO: 3248; WAN024AJK; Start 18; Stop 42
tcgaatgataggatgaagctattgt

SEQ ID NO: 350428 - DNA, 25 bp, Artificial
  probe
  misc_feature (1)..(25): SEQ ID NO: 3248; WAN024AJK; Start 17; Stop 41
gtcgaatgataggatgaagctattg

SEQ ID NO: 350429 - DNA, 25 bp, Artificial
  probe
  misc_feature (1)..(25): SEQ ID NO: 3248; WAN024AJK; Start 16; Stop 40
agtcgaatgataggatgaagctatt

SEQ ID NO: 350430 - DNA, 25 bp, Artificial
  probe
  misc_feature (1)..(25): SEQ ID NO: 3248; WAN024AJK; Start 19; Stop 43
cgaatgataggatgaagctattgtt

SEQ ID NO: 350431 - DNA, 25 bp, Artificial
  probe
  misc_feature (1)..(25): SEQ ID NO: 3248; WAN024AJK; Start 15; Stop 39
tagtcgaatgataggatgaagctat

SEQ ID NO: 350432 - DNA, 25 bp, Artificial
  probe
  misc_feature (1)..(25): SEQ ID NO: 3248; WAN024AJK; Start 9; Stop 33
ccaaattagtcgaatgataggatga

SEQ ID NO: 350433 - DNA, 25 bp, Artificial
  probe
  misc_feature (1)..(25): SEQ ID NO: 3248; WAN024AJK; Start 8; Stop 32
tccaaattagtcgaatgataggatg

SEQ ID NO: 350434 - DNA, 25 bp, Artificial
  probe
  misc_feature (1)..(25): SEQ ID NO: 3248; WAN024AJK; Start 1; Stop 25
ccttatttccaaattagtcgaatga

SEQ ID NO: 350435 - DNA, 25 bp, Artificial
  probe
  misc_feature (1)..(25): SEQ ID NO: 3248; WAN024AJK; Start 5; Stop 29
atttccaaattagtcgaatgatagg

SEQ ID NO: 350436 - DNA, 25 bp, Artificial
  probe
  misc_feature (1)..(25): SEQ ID NO: 3248; WAN024AJK; Start 6; Stop 30
tttccaaattagtcgaatgatagga

SEQ ID NO: 350437 - DNA, 25 bp, Artificial
  probe
  misc_feature (1)..(25): SEQ ID NO: 3248; WAN024AJK; Start 10; Stop 34
caaattagtcgaatgataggatgaa

SEQ ID NO: 350438 - DNA, 25 bp, Artificial
  probe
  misc_feature (1)..(25): SEQ ID NO: 3248; WAN024AJK; Start 7; Stop 31
ttccaaattagtcgaatgataggat

SEQ ID NO: 350439 - DNA, 25 bp, Artificial
  probe
  misc_feature (1)..(25): SEQ ID NO: 3248; WAN024AJK; Start 20; Stop 44
gaatgataggatgaagctattgttt

SEQ ID NO: 350440 - DNA, 25 bp, Artificial
  probe
  misc_feature (1)..(25): SEQ ID NO: 3248; WAN024AJK; Start 11; Stop 35
aaattagtcgaatgataggatgaag

SEQ ID NO: 350441 - DNA, 25 bp, Artificial
  probe
  misc_feature (1)..(25): SEQ ID NO: 3248; WAN024AJK; Start 2; Stop 26
cttatttccaaattagtcgaatgat

SEQ ID NO: 350442 - DNA, 25 bp, Artificial
  probe
  misc_feature (1)..(25): SEQ ID NO: 3248; WAN024AJK; Start 21; Stop 45
aatgataggatgaagctattgtttt

SEQ ID NO: 350443 - DNA, 25 bp, Artificial
  probe
  misc_feature (1)..(25): SEQ ID NO: 3248; WAN024AJK; Start 4; Stop 28
tatttccaaattagtcgaatgatag

SEQ ID NO: 350444 - DNA, 25 bp, Artificial
  probe
  misc_feature (1)..(25): SEQ ID NO: 3248; WAN024AJK; Start 23; Stop 47
tgataggatgaagctattgttttat

SEQ ID NO: 350445 - DNA, 25 bp, Artificial
  probe
  misc_feature (1)..(25): SEQ ID NO: 3248; WAN024AJK; Start 22; Stop 46
atgataggatgaagctattgtttta

SEQ ID NO: 350446 - DNA, 25 bp, Artificial
  probe
  misc_feature (1)..(25): SEQ ID NO: 3248; WAN024AJK; Start 27; Stop 51
aggatgaagctattgttttatagta

SEQ ID NO: 350447 - DNA, 25 bp, Artificial
  probe
  misc_feature (1)..(25): SEQ ID NO: 3248; WAN024AJK; Start 26; Stop 50
taggatgaagctattgttttatagt

SEQ ID NO: 350448 - DNA, 25 bp, Artificial
  probe
  misc_feature (1)..(25): SEQ ID NO: 3249; WAN0249FF; Start 88; Stop 112
aggcaaatttacaaactctcaatct

SEQ ID NO: 350449 - DNA, 25 bp, Artificial
  probe
  misc_feature (1)..(25): SEQ ID NO: 3249; WAN0249FF; Start 89; Stop 113
ggcaaatttacaaactctcaatctt

SEQ ID NO: 350450 - DNA, 25 bp, Artificial
  probe
  misc_feature (1)..(25): SEQ ID NO: 3249; WAN0249FF; Start 86; Stop 110
ggaggcaaatttacaaactctcaat

SEQ ID NO: 350451 - DNA, 25 bp, Artificial
  probe
  misc_feature (1)..(25): SEQ ID NO: 3249; WAN0249FF; Start 87; Stop 111
gaggcaaatttacaaactctcaatc

SEQ ID NO: 350452 - DNA, 25 bp, Artificial
  probe
  misc_feature (1)..(25): SEQ ID NO: 3249; WAN0249FF; Start 85; Stop 109
gggaggcaaatttacaaactctcaa

SEQ ID NO: 350453 - DNA, 25 bp, Artificial
  probe
  misc_feature (1)..(25): SEQ ID NO: 3249; WAN0249FF; Start 83; Stop 107
gagggaggcaaatttacaaactctc

SEQ ID NO: 350454 - DNA, 25 bp, Artificial
  probe
  misc_feature (1)..(25): SEQ ID NO: 3249; WAN0249FF; Start 5; Stop 29
gtcctcctcatatcaaaacactaaa

SEQ ID NO: 350455 - DNA, 25 bp, Artificial
  probe
  misc_feature (1)..(25): SEQ ID NO: 3249; WAN0249FF; Start 84; Stop 108
agggaggcaaatttacaaactctca

SEQ ID NO: 350456 - DNA, 25 bp, Artificial
  probe
  misc_feature (1)..(25): SEQ ID NO: 3249; WAN0249FF; Start 2; Stop 26
cttgtcctcctcatatcaaaacact

SEQ ID NO: 350457 - DNA, 25 bp, Artificial
  probe
  misc_feature (1)..(25): SEQ ID NO: 3249; WAN0249FF; Start 4; Stop 28
tgtcctcctcatatcaaaacactaa

SEQ ID NO: 350458 - DNA, 25 bp, Artificial
  probe
  misc_feature (1)..(25): SEQ ID NO: 3249; WAN0249FF; Start 3; Stop 27
ttgtcctcctcatatcaaaacacta

SEQ ID NO: 350459 - DNA, 25 bp, Artificial
  probe
  misc_feature (1)..(25): SEQ ID NO: 3249; WAN0249FF; Start 90; Stop 114
gcaaatttacaaactctcaatcttt

SEQ ID NO: 350460 - DNA, 25 bp, Artificial
  probe
  misc_feature (1)..(25): SEQ ID NO: 3249; WAN0249FF; Start 1; Stop 25
ccttgtcctcctcatatcaaaacac

SEQ ID NO: 350461 - DNA, 25 bp, Artificial
  probe
  misc_feature (1)..(25): SEQ ID NO: 3249; WAN0249FF; Start 6; Stop 30
tcctcctcatatcaaaacactaaat

SEQ ID NO: 350462 - DNA, 25 bp, Artificial
  probe
  misc_feature (1)..(25): SEQ ID NO: 3249; WAN0249FF; Start 82; Stop 106
ggagggaggcaaatttacaaactct

SEQ ID NO: 350463 - DNA, 25 bp, Artificial
  probe
  misc_feature (1)..(25): SEQ ID NO: 3249; WAN0249FF; Start 81; Stop 105
gggagggaggcaaatttacaaactc

SEQ ID NO: 350464 - DNA, 25 bp, Artificial
  probe
  misc_feature (1)..(25): SEQ ID NO: 3249; WAN0249FF; Start 7; Stop 31
cctcctcatatcaaaacactaaata

SEQ ID NO: 350465 - DNA, 25 bp, Artificial
  probe
  misc_feature (1)..(25): SEQ ID NO: 3249; WAN0249FF; Start 80; Stop 104
ggggagggaggcaaatttacaaact

SEQ ID NO: 350466 - DNA, 25 bp, Artificial
  probe
  misc_feature (1)..(25): SEQ ID NO: 3249; WAN0249FF; Start 57; Stop 81
cttcctgcacaaaagctaagaaggg

SEQ ID NO: 350467 - DNA, 25 bp, Artificial
  probe
  misc_feature (1)..(25): SEQ ID NO: 3249; WAN0249FF; Start 55; Stop 79
cccttcctgcacaaaagctaagaag

SEQ ID NO: 350468 - DNA, 25 bp, Artificial
  probe
  misc_feature (1)..(25): SEQ ID NO: 3250; WAN024AOY; Start 59; Stop 83
gcagaatgatgtatcagcggatatt

SEQ ID NO: 350469 - DNA, 25 bp, Artificial
  probe
  misc_feature (1)..(25): SEQ ID NO: 3250; WAN024AOY; Start 58; Stop 82
agcagaatgatgtatcagcggatat

SEQ ID NO: 350470 - DNA, 25 bp, Artificial
  probe
  misc_feature (1)..(25): SEQ ID NO: 3250; WAN024AOY; Start 57; Stop 81
aagcagaatgatgtatcagcggata

SEQ ID NO: 350471 - DNA, 25 bp, Artificial
  probe
  misc_feature (1)..(25): SEQ ID NO: 3250; WAN024AOY; Start 33; Stop 57
tatcatatttcagcccaagtgtaaa

SEQ ID NO: 350472 - DNA, 25 bp, Artificial
  probe
  misc_feature (1)..(25): SEQ ID NO: 3250; WAN024AOY; Start 32; Stop 56
ttatcatatttcagcccaagtgtaa

SEQ ID NO: 350473 - DNA, 25 bp, Artificial
  probe
  misc_feature (1)..(25): SEQ ID NO: 3250; WAN024AOY; Start 31; Stop 55
tttatcatatttcagcccaagtgta

SEQ ID NO: 350474 - DNA, 25 bp, Artificial
  probe
  misc_feature (1)..(25): SEQ ID NO: 3250; WAN024AOY; Start 93; Stop 117
tttcaaacgatgttatacccacaat

SEQ ID NO: 350475 - DNA, 25 bp, Artificial
  probe
  misc_feature (1)..(25): SEQ ID NO: 3250; WAN024AOY; Start 95; Stop 119
tcaaacgatgttatacccacaataa

SEQ ID NO: 350476 - DNA, 25 bp, Artificial
  probe
  misc_feature (1)..(25): SEQ ID NO: 3250; WAN024AOY; Start 94; Stop 118
ttcaaacgatgttatacccacaata

SEQ ID NO: 350477 - DNA, 25 bp, Artificial
  probe
  misc_feature (1)..(25): SEQ ID NO: 3250; WAN024AOY; Start 65; Stop 89
tgatgtatcagcggatatttactct

SEQ ID NO: 350478 - DNA, 25 bp, Artificial
  probe
  misc_feature (1)..(25): SEQ ID NO: 3250; WAN024AOY; Start 60; Stop 84
cagaatgatgtatcagcggatattt

SEQ ID NO: 350479 - DNA, 25 bp, Artificial
  probe
  misc_feature (1)..(25): SEQ ID NO: 3250; WAN024AOY; Start 64; Stop 88
atgatgtatcagcggatatttactc

SEQ ID NO: 350480 - DNA, 25 bp, Artificial
  probe
  misc_feature (1)..(25): SEQ ID NO: 3250; WAN024AOY; Start 96; Stop 120
caaacgatgttatacccacaataaa

SEQ ID NO: 350481 - DNA, 25 bp, Artificial
  probe
  misc_feature (1)..(25): SEQ ID NO: 3250; WAN024AOY; Start 66; Stop 90
gatgtatcagcggatatttactcta

SEQ ID NO: 350482 - DNA, 25 bp, Artificial
  probe
  misc_feature (1)..(25): SEQ ID NO: 3250; WAN024AOY; Start 63; Stop 87
aatgatgtatcagcggatatttact

SEQ ID NO: 350483 - DNA, 25 bp, Artificial
  probe
  misc_feature (1)..(25): SEQ ID NO: 3250; WAN024AOY; Start 62; Stop 86
gaatgatgtatcagcggatatttac

SEQ ID NO: 350484 - DNA, 25 bp, Artificial
  probe
  misc_feature (1)..(25): SEQ ID NO: 3250; WAN024AOY; Start 61; Stop 85
agaatgatgtatcagcggatattta

SEQ ID NO: 350485 - DNA, 25 bp, Artificial
  probe
  misc_feature (1)..(25): SEQ ID NO: 3250; WAN024AOY; Start 56; Stop 80
aaagcagaatgatgtatcagcggat

SEQ ID NO: 350486 - DNA, 25 bp, Artificial
  probe
  misc_feature (1)..(25): SEQ ID NO: 3250; WAN024AOY; Start 47; Stop 71
ccaagtgtaaaagcagaatgatgta

SEQ ID NO: 350487 - DNA, 25 bp, Artificial
  probe
  misc_feature (1)..(25): SEQ ID NO: 3250; WAN024AOY; Start 68; Stop 92
tgtatcagcggatatttactctatt

SEQ ID NO: 350488 - DNA, 25 bp, Artificial
  probe
  misc_feature (1)..(25): SEQ ID NO: 3250; WAN024AOY; Start 35; Stop 59
tcatatttcagcccaagtgtaaaag

SEQ ID NO: 350489 - DNA, 25 bp, Artificial
  probe
  misc_feature (1)..(25): SEQ ID NO: 3250; WAN024AOY; Start 36; Stop 60
catatttcagcccaagtgtaaaagc

SEQ ID NO: 350490 - DNA, 25 bp, Artificial
  probe
  misc_feature (1)..(25): SEQ ID NO: 3250; WAN024AOY; Start 34; Stop 58
atcatatttcagcccaagtgtaaaa

SEQ ID NO: 350491 - DNA, 25 bp, Artificial
  probe
  misc_feature (1)..(25): SEQ ID NO: 3250; WAN024AOY; Start 30; Stop 54
ttttatcatatttcagcccaagtgt

SEQ ID NO: 350492 - DNA, 25 bp, Artificial
  probe
  misc_feature (1)..(25): SEQ ID NO: 3250; WAN024AOY; Start 67; Stop 91
atgtatcagcggatatttactctat

SEQ ID NO: 350493 - DNA, 25 bp, Artificial
  probe
  misc_feature (1)..(25): SEQ ID NO: 3250; WAN024AOY; Start 37; Stop 61
atatttcagcccaagtgtaaaagca

SEQ ID NO: 350494 - DNA, 25 bp, Artificial
  probe
  misc_feature (1)..(25): SEQ ID NO: 3250; WAN024AOY; Start 46; Stop 70
cccaagtgtaaaagcagaatgatgt

SEQ ID NO: 350495 - DNA, 25 bp, Artificial
  probe
  misc_feature (1)..(25): SEQ ID NO: 3250; WAN024AOY; Start 38; Stop 62
tatttcagcccaagtgtaaaagcag

SEQ ID NO: 350496 - DNA, 25 bp, Artificial
  probe
  misc_feature (1)..(25): SEQ ID NO: 3250; WAN024AOY; Start 92; Stop 116
ttttcaaacgatgttatacccacaa

SEQ ID NO: 350497 - DNA, 25 bp, Artificial
  probe
  misc_feature (1)..(25): SEQ ID NO: 3250; WAN024AOY; Start 52; Stop 76
tgtaaaagcagaatgatgtatcagc

SEQ ID NO: 350498 - DNA, 25 bp, Artificial
  probe
  misc_feature (1)..(25): SEQ ID NO: 3250; WAN024AOY; Start 53; Stop 77
gtaaaagcagaatgatgtatcagcg

SEQ ID NO: 350499 - DNA, 25 bp, Artificial
  probe
  misc_feature (1)..(25): SEQ ID NO: 3250; WAN024AOY; Start 48; Stop 72
caagtgtaaaagcagaatgatgtat

SEQ ID NO: 350500 - DNA, 25 bp, Artificial
  probe
  misc_feature (1)..(25): SEQ ID NO: 3250; WAN024AOY; Start 29; Stop 53
attttatcatatttcagcccaagtg

SEQ ID NO: 350501 - DNA, 25 bp, Artificial
  probe
  misc_feature (1)..(25): SEQ ID NO: 3252; WAN024AK6; Start 62; Stop 86
attgtctcatcacctctattagcct

SEQ ID NO: 350502 - DNA, 25 bp, Artificial
  probe
  misc_feature (1)..(25): SEQ ID NO: 3252; WAN024AK6; Start 61; Stop 85
aattgtctcatcacctctattagcc

SEQ ID NO: 350503 - DNA, 25 bp, Artificial
  probe
  misc_feature (1)..(25): SEQ ID NO: 3252; WAN024AK6; Start 63; Stop 87
ttgtctcatcacctctattagcctt

SEQ ID NO: 350504 - DNA, 25 bp, Artificial
  probe
  misc_feature (1)..(25): SEQ ID NO: 3252; WAN024AK6; Start 65; Stop 89
gtctcatcacctctattagccttta

SEQ ID NO: 350505 - DNA, 25 bp, Artificial
  probe
  misc_feature (1)..(25): SEQ ID NO: 3252; WAN024AK6; Start 64; Stop 88
tgtctcatcacctctattagccttt

SEQ ID NO: 350506 - DNA, 25 bp, Artificial
  probe
  misc_feature (1)..(25): SEQ ID NO: 3252; WAN024AK6; Start 66; Stop 90
tctcatcacctctattagcctttaa

SEQ ID NO: 350507 - DNA, 25 bp, Artificial
  probe
  misc_feature (1)..(25): SEQ ID NO: 3252; WAN024AK6; Start 60; Stop 84
aaattgtctcatcacctctattagc

SEQ ID NO: 350508 - DNA, 25 bp, Artificial
  probe
  misc_feature (1)..(25): SEQ ID NO: 3252; WAN024AK6; Start 59; Stop 83
gaaattgtctcatcacctctattag

SEQ ID NO: 350509 - DNA, 25 bp, Artificial
  probe
  misc_feature (1)..(25): SEQ ID NO: 3252; WAN024AK6; Start 67; Stop 91
ctcatcacctctattagcctttaaa

SEQ ID NO: 350510 - DNA, 25 bp, Artificial
  probe
  misc_feature (1)..(25): SEQ ID NO: 3252; WAN024AK6; Start 31; Stop 55
taagcaaccaaacgctacttaattc

SEQ ID NO: 350511 - DNA, 25 bp, Artificial
  probe
  misc_feature (1)..(25): SEQ ID NO: 3252; WAN024AK6; Start 27; Stop 51
gaattaagcaaccaaacgctactta

SEQ ID NO: 350512 - DNA, 25 bp, Artificial
  probe
  misc_feature (1)..(25): SEQ ID NO: 3252; WAN024AK6; Start 68; Stop 92
tcatcacctctattagcctttaaat

SEQ ID NO: 350513 - DNA, 25 bp, Artificial
  probe
  misc_feature (1)..(25): SEQ ID NO: 3252; WAN024AK6; Start 23; Stop 47
aaaggaattaagcaaccaaacgcta

SEQ ID NO: 350514 - DNA, 25 bp, Artificial
  probe
  misc_feature (1)..(25): SEQ ID NO: 3252; WAN024AK6; Start 32; Stop 56
aagcaaccaaacgctacttaattcc

SEQ ID NO: 350515 - DNA, 25 bp, Artificial
  probe
  misc_feature (1)..(25): SEQ ID NO: 3252; WAN024AK6; Start 26; Stop 50
ggaattaagcaaccaaacgctactt

SEQ ID NO: 350516 - DNA, 25 bp, Artificial
  probe
  misc_feature (1)..(25): SEQ ID NO: 3252; WAN024AK6; Start 24; Stop 48
aaggaattaagcaaccaaacgctac

SEQ ID NO: 350517 - DNA, 25 bp, Artificial
  probe
  misc_feature (1)..(25): SEQ ID NO: 3252; WAN024AK6; Start 69; Stop 93
catcacctctattagcctttaaatt

SEQ ID NO: 350518 - DNA, 25 bp, Artificial
  probe
  misc_feature (1)..(25): SEQ ID NO: 3252; WAN024AK6; Start 30; Stop 54
ttaagcaaccaaacgctacttaatt

SEQ ID NO: 350519 - DNA, 25 bp, Artificial
  probe
  misc_feature (1)..(25): SEQ ID NO: 3252; WAN024AK6; Start 28; Stop 52
aattaagcaaccaaacgctacttaa

SEQ ID NO: 350520 - DNA, 25 bp, Artificial
  probe
  misc_feature (1)..(25): SEQ ID NO: 3252; WAN024AK6; Start 33; Stop 57
agcaaccaaacgctacttaattcct

SEQ ID NO: 350521 - DNA, 25 bp, Artificial
  probe
  misc_feature (1)..(25): SEQ ID NO: 3252; WAN024AK6; Start 25; Stop 49
aggaattaagcaaccaaacgctact

SEQ ID NO: 350522 - DNA, 25 bp, Artificial
  probe
  misc_feature (1)..(25): SEQ ID NO: 3252; WAN024AK6; Start 70; Stop 94
atcacctctattagcctttaaattt

SEQ ID NO: 350523 - DNA, 25 bp, Artificial
  probe
  misc_feature (1)..(25): SEQ ID NO: 3252; WAN024AK6; Start 22; Stop 46
aaaaggaattaagcaaccaaacgct

SEQ ID NO: 350524 - DNA, 25 bp, Artificial
  probe
  misc_feature (1)..(25): SEQ ID NO: 3252; WAN024AK6; Start 72; Stop 96
cacctctattagcctttaaattttg

SEQ ID NO: 350525 - DNA, 25 bp, Artificial
  probe
  misc_feature (1)..(25): SEQ ID NO: 3252; WAN024AK6; Start 73; Stop 97
acctctattagcctttaaattttga

SEQ ID NO: 350526 - DNA, 25 bp, Artificial
  probe
  misc_feature (1)..(25): SEQ ID NO: 3252; WAN024AK6; Start 71; Stop 95
tcacctctattagcctttaaatttt

SEQ ID NO: 350527 - DNA, 25 bp, Artificial
  probe
  misc_feature (1)..(25): SEQ ID NO: 3252; WAN024AK6; Start 82; Stop 106
agcctttaaattttgatagactcta

SEQ ID NO: 350528 - DNA, 25 bp, Artificial
  probe
  misc_feature (1)..(25): SEQ ID NO: 3252; WAN024AK6; Start 81; Stop 105
tagcctttaaattttgatagactct

SEQ ID NO: 350529 - DNA, 25 bp, Artificial
  probe
  misc_feature (1)..(25): SEQ ID NO: 3252; WAN024AK6; Start 80; Stop 104
ttagcctttaaattttgatagactc

SEQ ID NO: 350530 - DNA, 25 bp, Artificial
  probe
  misc_feature (1)..(25): SEQ ID NO: 3252; WAN024AK6; Start 74; Stop 98
cctctattagcctttaaattttgat

SEQ ID NO: 350531 - DNA, 25 bp, Artificial
  probe
  misc_feature (1)..(25): SEQ ID NO: 3252; WAN024AK6; Start 83; Stop 107
gcctttaaattttgatagactctat

SEQ ID NO: 350532 - DNA, 25 bp, Artificial
  probe
  misc_feature (1)..(25): SEQ ID NO: 3253; WAN024FNJ; Start 1751; Stop 1775
cgtagaagtaagcaaggaagaagat

SEQ ID NO: 350533 - DNA, 25 bp, Artificial
  probe
  misc_feature (1)..(25): SEQ ID NO: 3253; WAN024FNJ; Start 93; Stop 117
cttgaagaattaccagcctatgttg

SEQ ID NO: 350534 - DNA, 25 bp, Artificial
  probe
  misc_feature (1)..(25): SEQ ID NO: 3253; WAN024FNJ; Start 1749; Stop 1773
ctcgtagaagtaagcaaggaagaag

SEQ ID NO: 350535 - DNA, 25 bp, Artificial
  probe
  misc_feature (1)..(25): SEQ ID NO: 3253; WAN024FNJ; Start 94; Stop 118
ttgaagaattaccagcctatgttgt

SEQ ID NO: 350536 - DNA, 25 bp, Artificial
  probe
  misc_feature (1)..(25): SEQ ID NO: 3253; WAN024FNJ; Start 854; Stop 878
ataccttgaagttccagaagaagtc

SEQ ID NO: 350537 - DNA, 25 bp, Artificial
  probe
  misc_feature (1)..(25): SEQ ID NO: 3253; WAN024FNJ; Start 853; Stop 877
aataccttgaagttccagaagaagt

SEQ ID NO: 350538 - DNA, 25 bp, Artificial
  probe
  misc_feature (1)..(25): SEQ ID NO: 3253; WAN024FNJ; Start 1750; Stop 1774
tcgtagaagtaagcaaggaagaaga

SEQ ID NO: 350539 - DNA, 25 bp, Artificial
  probe
  misc_feature (1)..(25): SEQ ID NO: 3253; WAN024FNJ; Start 1752; Stop 1776
gtagaagtaagcaaggaagaagatt

SEQ ID NO: 350540 - DNA, 25 bp, Artificial
  probe
  misc_feature (1)..(25): SEQ ID NO: 3253; WAN024FNJ; Start 855; Stop 879
taccttgaagttccagaagaagtct

SEQ ID NO: 350541 - DNA, 25 bp, Artificial
  probe
  misc_feature (1)..(25): SEQ ID NO: 3253; WAN024FNJ; Start 1748; Stop 1772
tctcgtagaagtaagcaaggaagaa

SEQ ID NO: 350542 - DNA, 25 bp, Artificial
  probe
  misc_feature (1)..(25): SEQ ID NO: 3253; WAN024FNJ; Start 92; Stop 116
tcttgaagaattaccagcctatgtt

SEQ ID NO: 350543 - DNA, 25 bp, Artificial
  probe
  misc_feature (1)..(25): SEQ ID NO: 3253; WAN024FNJ; Start 91; Stop 115
gtcttgaagaattaccagcctatgt

SEQ ID NO: 350544 - DNA, 25 bp, Artificial
  probe
  misc_feature (1)..(25): SEQ ID NO: 3253; WAN024FNJ; Start 81; Stop 105
gtagaactcggtcttgaagaattac

SEQ ID NO: 350545 - DNA, 25 bp, Artificial
  probe
  misc_feature (1)..(25): SEQ ID NO: 3253; WAN024FNJ; Start 1747; Stop 1771
ctctcgtagaagtaagcaaggaaga

SEQ ID NO: 350546 - DNA, 25 bp, Artificial
  probe
  misc_feature (1)..(25): SEQ ID NO: 3253; WAN024FNJ; Start 73; Stop 97
acttattagtagaactcggtcttga

SEQ ID NO: 350547 - DNA, 25 bp, Artificial
  probe
  misc_feature (1)..(25): SEQ ID NO: 3253; WAN024FNJ; Start 80; Stop 104
agtagaactcggtcttgaagaatta

SEQ ID NO: 350548 - DNA, 25 bp, Artificial
  probe
  misc_feature (1)..(25): SEQ ID NO: 3253; WAN024FNJ; Start 79; Stop 103
tagtagaactcggtcttgaagaatt

SEQ ID NO: 350549 - DNA, 25 bp, Artificial
  probe
  misc_feature (1)..(25): SEQ ID NO: 3253; WAN024FNJ; Start 78; Stop 102
ttagtagaactcggtcttgaagaat

SEQ ID NO: 350550 - DNA, 25 bp, Artificial
  probe
  misc_feature (1)..(25): SEQ ID NO: 3253; WAN024FNJ; Start 77; Stop 101
attagtagaactcggtcttgaagaa

SEQ ID NO: 350551 - DNA, 25 bp, Artificial
  probe
  misc_feature (1)..(25): SEQ ID NO: 3253; WAN024FNJ; Start 1984; Stop 2008
atactatggtaatggctgaagatca

SEQ ID NO: 350552 - DNA, 25 bp, Artificial
  probe
  misc_feature (1)..(25): SEQ ID NO: 3253; WAN024FNJ; Start 1345; Stop 1369
ctattcgtgaacactacatgcctac

SEQ ID NO: 350553 - DNA, 25 bp, Artificial
  probe
  misc_feature (1)..(25): SEQ ID NO: 3253; WAN024FNJ; Start 857; Stop 881
ccttgaagttccagaagaagtcttg

SEQ ID NO: 350554 - DNA, 25 bp, Artificial
  probe
  misc_feature (1)..(25): SEQ ID NO: 3253; WAN024FNJ; Start 1640; Stop 1664
caaggctcgtgttgataagatgatg

SEQ ID NO: 350555 - DNA, 25 bp, Artificial
  probe
  misc_feature (1)..(25): SEQ ID NO: 3253; WAN024FNJ; Start 72; Stop 96
aacttattagtagaactcggtcttg

SEQ ID NO: 350556 - DNA, 25 bp, Artificial
  probe
  misc_feature (1)..(25): SEQ ID NO: 3253; WAN024FNJ; Start 1983; Stop 2007
aatactatggtaatggctgaagatc

SEQ ID NO: 350557 - DNA, 25 bp, Artificial
  probe
  misc_feature (1)..(25): SEQ ID NO: 3253; WAN024FNJ; Start 856; Stop 880
accttgaagttccagaagaagtctt

SEQ ID NO: 350558 - DNA, 25 bp, Artificial
  probe
  misc_feature (1)..(25): SEQ ID NO: 3253; WAN024FNJ; Start 1450; Stop 1474
tcttctcagtaggattgattccatc

SEQ ID NO: 350559 - DNA, 25 bp, Artificial
  probe
  misc_feature (1)..(25): SEQ ID NO: 3253; WAN024FNJ; Start 76; Stop 100
tattagtagaactcggtcttgaaga

SEQ ID NO: 350560 - DNA, 25 bp, Artificial
  probe
  misc_feature (1)..(25): SEQ ID NO: 3253; WAN024FNJ; Start 1449; Stop 1473
ttcttctcagtaggattgattccat

SEQ ID NO: 350561 - DNA, 25 bp, Artificial
  probe
  misc_feature (1)..(25): SEQ ID NO: 3253; WAN024FNJ; Start 1346; Stop 1370
tattcgtgaacactacatgcctaca

SEQ ID NO: 350562 - DNA, 25 bp, Artificial
  probe
  misc_feature (1)..(25): SEQ ID NO: 3253; WAN024FNJ; Start 75; Stop 99
ttattagtagaactcggtcttgaag

SEQ ID NO: 350563 - DNA, 25 bp, Artificial
  probe
  misc_feature (1)..(25): SEQ ID NO: 3253; WAN024FNJ; Start 74; Stop 98
cttattagtagaactcggtcttgaa

SEQ ID NO: 350564 - DNA, 25 bp, Artificial
  probe
  misc_feature (1)..(25): SEQ ID NO: 3253; WAN024FNJ; Start 1249; Stop 1273
tgttgacaggtatggttggtgaatt

SEQ ID NO: 350565 - DNA, 25 bp, Artificial
  probe
  misc_feature (1)..(25): SEQ ID NO: 3254; WAN0249PL; Start 297; Stop 321
ttagaagatatgctgtgctattcca

SEQ ID NO: 350566 - DNA, 25 bp, Artificial
  probe
  misc_feature (1)..(25): SEQ ID NO: 3254; WAN0249PL; Start 301; Stop 325
aagatatgctgtgctattccagatt

SEQ ID NO: 350567 - DNA, 25 bp, Artificial
  probe
  misc_feature (1)..(25): SEQ ID NO: 3254; WAN0249PL; Start 298; Stop 322
tagaagatatgctgtgctattccag

SEQ ID NO: 350568 - DNA, 25 bp, Artificial
  probe
  misc_feature (1)..(25): SEQ ID NO: 3254; WAN0249PL; Start 302; Stop 326
agatatgctgtgctattccagattc

SEQ ID NO: 350569 - DNA, 25 bp, Artificial
  probe
  misc_feature (1)..(25): SEQ ID NO: 3254; WAN0249PL; Start 300; Stop 324
gaagatatgctgtgctattccagat

SEQ ID NO: 350570 - DNA, 25 bp, Artificial
  probe
  misc_feature (1)..(25): SEQ ID NO: 3254; WAN0249PL; Start 304; Stop 328
atatgctgtgctattccagattcag

SEQ ID NO: 350571 - DNA, 25 bp, Artificial
  probe
  misc_feature (1)..(25): SEQ ID NO: 3254; WAN0249PL; Start 303; Stop 327
gatatgctgtgctattccagattca

SEQ ID NO: 350572 - DNA, 25 bp, Artificial
  probe
  misc_feature (1)..(25): SEQ ID NO: 3254; WAN0249PL; Start 299; Stop 323
agaagatatgctgtgctattccaga

SEQ ID NO: 350573 - DNA, 25 bp, Artificial
  probe
  misc_feature (1)..(25): SEQ ID NO: 3254; WAN0249PL; Start 305; Stop 329
tatgctgtgctattccagattcagt

SEQ ID NO: 350574 - DNA, 25 bp, Artificial
  probe
  misc_feature (1)..(25): SEQ ID NO: 3254; WAN0249PL; Start 100; Stop 124
gccgagaactttgacatcagatata

SEQ ID NO: 350575 - DNA, 25 bp, Artificial
  probe
  misc_feature (1)..(25): SEQ ID NO: 3254; WAN0249PL; Start 101; Stop 125
ccgagaactttgacatcagatatac

SEQ ID NO: 350576 - DNA, 25 bp, Artificial
  probe
  misc_feature (1)..(25): SEQ ID NO: 3254; WAN0249PL; Start 5; Stop 29
tcttatttccagcgtcagacttaaa

SEQ ID NO: 350577 - DNA, 25 bp, Artificial
  probe
  misc_feature (1)..(25): SEQ ID NO: 3254; WAN0249PL; Start 4; Stop 28
ttcttatttccagcgtcagacttaa

SEQ ID NO: 350578 - DNA, 25 bp, Artificial
  probe
  misc_feature (1)..(25): SEQ ID NO: 3254; WAN0249PL; Start 296; Stop 320
tttagaagatatgctgtgctattcc

SEQ ID NO: 350579 - DNA, 25 bp, Artificial
  probe
  misc_feature (1)..(25): SEQ ID NO: 3254; WAN0249PL; Start 306; Stop 330
atgctgtgctattccagattcagtt

SEQ ID NO: 350580 - DNA, 25 bp, Artificial
  probe
  misc_feature (1)..(25): SEQ ID NO: 3254; WAN0249PL; Start 102; Stop 126
cgagaactttgacatcagatatact

SEQ ID NO: 350581 - DNA, 25 bp, Artificial
  probe
  misc_feature (1)..(25): SEQ ID NO: 3254; WAN0249PL; Start 99; Stop 123
cgccgagaactttgacatcagatat

SEQ ID NO: 350582 - DNA, 25 bp, Artificial
  probe
  misc_feature (1)..(25): SEQ ID NO: 3254; WAN0249PL; Start 7; Stop 31
ttatttccagcgtcagacttaaaac

SEQ ID NO: 350583 - DNA, 25 bp, Artificial
  probe
  misc_feature (1)..(25): SEQ ID NO: 3254; WAN0249PL; Start 6; Stop 30
cttatttccagcgtcagacttaaaa

SEQ ID NO: 350584 - DNA, 25 bp, Artificial
  probe
  misc_feature (1)..(25): SEQ ID NO: 3254; WAN0249PL; Start 70; Stop 94
tagtcaggcttgggaatcgctattt

SEQ ID NO: 350585 - DNA, 25 bp, Artificial
  probe
  misc_feature (1)..(25): SEQ ID NO: 3254; WAN0249PL; Start 98; Stop 122
tcgccgagaactttgacatcagata

SEQ ID NO: 350586 - DNA, 25 bp, Artificial
  probe
  misc_feature (1)..(25): SEQ ID NO: 3254; WAN0249PL; Start 103; Stop 127
gagaactttgacatcagatatacta

SEQ ID NO: 350587 - DNA, 25 bp, Artificial
  probe
  misc_feature (1)..(25): SEQ ID NO: 3254; WAN0249PL; Start 89; Stop 113
ctatttgactcgccgagaactttga

SEQ ID NO: 350588 - DNA, 25 bp, Artificial
  probe
  misc_feature (1)..(25): SEQ ID NO: 3254; WAN0249PL; Start 295; Stop 319
ttttagaagatatgctgtgctattc

SEQ ID NO: 350589 - DNA, 25 bp, Artificial
  probe
  misc_feature (1)..(25): SEQ ID NO: 3254; WAN0249PL; Start 90; Stop 114
tatttgactcgccgagaactttgac

SEQ ID NO: 350590 - DNA, 25 bp, Artificial
  probe
  misc_feature (1)..(25): SEQ ID NO: 3254; WAN0249PL; Start 294; Stop 318
attttagaagatatgctgtgctatt

SEQ ID NO: 350591 - DNA, 25 bp, Artificial
  probe
  misc_feature (1)..(25): SEQ ID NO: 3254; WAN0249PL; Start 75; Stop 99
aggcttgggaatcgctatttgactc

SEQ ID NO: 350592 - DNA, 25 bp, Artificial
  probe
  misc_feature (1)..(25): SEQ ID NO: 3254; WAN0249PL; Start 104; Stop 128
agaactttgacatcagatatactat

SEQ ID NO: 350593 - DNA, 25 bp, Artificial
  probe
  misc_feature (1)..(25): SEQ ID NO: 3254; WAN0249PL; Start 8; Stop 32
tatttccagcgtcagacttaaaacg

SEQ ID NO: 350594 - DNA, 25 bp, Artificial
  probe
  misc_feature (1)..(25): SEQ ID NO: 3254; WAN0249PL; Start 293; Stop 317
tattttagaagatatgctgtgctat

SEQ ID NO: 350595 - DNA, 25 bp, Artificial
  probe
  misc_feature (1)..(25): SEQ ID NO: 3254; WAN0249PL; Start 292; Stop 316
atattttagaagatatgctgtgcta

SEQ ID NO: 350596 - DNA, 25 bp, Artificial
  probe
  misc_feature (1)..(25): SEQ ID NO: 3254; WAN0249PL; Start 291; Stop 315
tatattttagaagatatgctgtgct

SEQ ID NO: 350597 - DNA, 25 bp, Artificial
  probe
  misc_feature (1)..(25): SEQ ID NO: 3254; WAN0249PL; Start 88; Stop 112
gctatttgactcgccgagaactttg

SEQ ID NO: 350598 - DNA, 25 bp, Artificial
  probe
  misc_feature (1)..(25): SEQ ID NO: 3255; WAN0249R6; Start 3; Stop 27
attcttatttccagcgtcagacttg

SEQ ID NO: 350599 - DNA, 25 bp, Artificial
  probe
  misc_feature (1)..(25): SEQ ID NO: 3255; WAN0249R6; Start 4; Stop 28
ttcttatttccagcgtcagacttgg

SEQ ID NO: 350600 - DNA, 25 bp, Artificial
  probe
  misc_feature (1)..(25): SEQ ID NO: 3255; WAN0249R6; Start 21; Stop 45
agacttgggaatcgctattgggttc

SEQ ID NO: 350601 - DNA, 25 bp, Artificial
  probe
  misc_feature (1)..(25): SEQ ID NO: 3255; WAN0249R6; Start 64; Stop 88
ccgaggacttacacctcagatatac

SEQ ID NO: 350602 - DNA, 25 bp, Artificial
  probe
  misc_feature (1)..(25): SEQ ID NO: 3255; WAN0249R6; Start 63; Stop 87
accgaggacttacacctcagatata

SEQ ID NO: 350603 - DNA, 25 bp, Artificial
  probe
  misc_feature (1)..(25): SEQ ID NO: 3255; WAN0249R6; Start 20; Stop 44
cagacttgggaatcgctattgggtt

SEQ ID NO: 350604 - DNA, 25 bp, Artificial
  probe
  misc_feature (1)..(25): SEQ ID NO: 3255; WAN0249R6; Start 22; Stop 46
gacttgggaatcgctattgggttca

SEQ ID NO: 350605 - DNA, 25 bp, Artificial
  probe
  misc_feature (1)..(25): SEQ ID NO: 3255; WAN0249R6; Start 23; Stop 47
acttgggaatcgctattgggttcac

SEQ ID NO: 350606 - DNA, 25 bp, Artificial
  probe
  misc_feature (1)..(25): SEQ ID NO: 3255; WAN0249R6; Start 6; Stop 30
cttatttccagcgtcagacttggga

SEQ ID NO: 350607 - DNA, 25 bp, Artificial
  probe
  misc_feature (1)..(25): SEQ ID NO: 3255; WAN0249R6; Start 5; Stop 29
tcttatttccagcgtcagacttggg

SEQ ID NO: 350608 - DNA, 25 bp, Artificial
  probe
  misc_feature (1)..(25): SEQ ID NO: 3255; WAN0249R6; Start 62; Stop 86
caccgaggacttacacctcagatat

SEQ ID NO: 350609 - DNA, 25 bp, Artificial
  probe
  misc_feature (1)..(25): SEQ ID NO: 3255; WAN0249R6; Start 8; Stop 32
tatttccagcgtcagacttgggaat

SEQ ID NO: 350610 - DNA, 25 bp, Artificial
  probe
  misc_feature (1)..(25): SEQ ID NO: 3255; WAN0249R6; Start 7; Stop 31
ttatttccagcgtcagacttgggaa

SEQ ID NO: 350611 - DNA, 25 bp, Artificial
  probe
  misc_feature (1)..(25): SEQ ID NO: 3255; WAN0249R6; Start 61; Stop 85
ccaccgaggacttacacctcagata

SEQ ID NO: 350612 - DNA, 25 bp, Artificial
  probe
  misc_feature (1)..(25): SEQ ID NO: 3255; WAN0249R6; Start 9; Stop 33
atttccagcgtcagacttgggaatc

SEQ ID NO: 350613 - DNA, 25 bp, Artificial
  probe
  misc_feature (1)..(25): SEQ ID NO: 3256; WAN024F9R; Start 44; Stop 68
aaggtcgtaggttcaaatcctgctc

SEQ ID NO: 350614 - DNA, 25 bp, Artificial
  probe
  misc_feature (1)..(25): SEQ ID NO: 3256; WAN024F9R; Start 43; Stop 67
gaaggtcgtaggttcaaatcctgct

SEQ ID NO: 350615 - DNA, 25 bp, Artificial
  probe
  misc_feature (1)..(25): SEQ ID NO: 3256; WAN024F9R; Start 37; Stop 61
taacccgaaggtcgtaggttcaaat

SEQ ID NO: 350616 - DNA, 25 bp, Artificial
  probe
  misc_feature (1)..(25): SEQ ID NO: 3256; WAN024F9R; Start 36; Stop 60
ataacccgaaggtcgtaggttcaaa

SEQ ID NO: 350617 - DNA, 25 bp, Artificial
  probe
  misc_feature (1)..(25): SEQ ID NO: 3256; WAN024F9R; Start 35; Stop 59
cataacccgaaggtcgtaggttcaa

SEQ ID NO: 350618 - DNA, 25 bp, Artificial
  probe
  misc_feature (1)..(25): SEQ ID NO: 3256; WAN024F9R; Start 33; Stop 57
ctcataacccgaaggtcgtaggttc

SEQ ID NO: 350619 - DNA, 25 bp, Artificial
  probe
  misc_feature (1)..(25): SEQ ID NO: 3256; WAN024F9R; Start 38; Stop 62
aacccgaaggtcgtaggttcaaatc

SEQ ID NO: 350620 - DNA, 25 bp, Artificial
  probe
  misc_feature (1)..(25): SEQ ID NO: 3256; WAN024F9R; Start 34; Stop 58
tcataacccgaaggtcgtaggttca

SEQ ID NO: 350621 - DNA, 25 bp, Artificial
  probe
  misc_feature (1)..(25): SEQ ID NO: 3257; WAN024AG6; Start 75; Stop 99
aataaagaaaggtagagcgtgtgtt

SEQ ID NO: 350622 - DNA, 25 bp, Artificial
  probe
  misc_feature (1)..(25): SEQ ID NO: 3257; WAN024AG6; Start 74; Stop 98
aaataaagaaaggtagagcgtgtgt

SEQ ID NO: 350623 - DNA, 25 bp, Artificial
  probe
  misc_feature (1)..(25): SEQ ID NO: 3257; WAN024AG6; Start 76; Stop 100
ataaagaaaggtagagcgtgtgttt

SEQ ID NO: 350624 - DNA, 25 bp, Artificial
  probe
  misc_feature (1)..(25): SEQ ID NO: 3257; WAN024AG6; Start 39; Stop 63
tgatgggtttggtatctttctcaat

SEQ ID NO: 350625 - DNA, 25 bp, Artificial
  probe
  misc_feature (1)..(25): SEQ ID NO: 3257; WAN024AG6; Start 37; Stop 61
tttgatgggtttggtatctttctca

SEQ ID NO: 350626 - DNA, 25 bp, Artificial
  probe
  misc_feature (1)..(25): SEQ ID NO: 3257; WAN024AG6; Start 188; Stop 212
tttcttctcgctctttgtatcataa

SEQ ID NO: 350627 - DNA, 25 bp, Artificial
  probe
  misc_feature (1)..(25): SEQ ID NO: 3257; WAN024AG6; Start 189; Stop 213
ttcttctcgctctttgtatcataaa

SEQ ID NO: 350628 - DNA, 25 bp, Artificial
  probe
  misc_feature (1)..(25): SEQ ID NO: 3257; WAN024AG6; Start 190; Stop 214
tcttctcgctctttgtatcataaat

SEQ ID NO: 350629 - DNA, 25 bp, Artificial
  probe
  misc_feature (1)..(25): SEQ ID NO: 3257; WAN024AG6; Start 40; Stop 64
gatgggtttggtatctttctcaata

SEQ ID NO: 350630 - DNA, 25 bp, Artificial
  probe
  misc_feature (1)..(25): SEQ ID NO: 3257; WAN024AG6; Start 41; Stop 65
atgggtttggtatctttctcaatat

SEQ ID NO: 350631 - DNA, 25 bp, Artificial
  probe
  misc_feature (1)..(25): SEQ ID NO: 3257; WAN024AG6; Start 155; Stop 179
ggatttctcgtcaggttcctaattt

SEQ ID NO: 350632 - DNA, 25 bp, Artificial
  probe
  misc_feature (1)..(25): SEQ ID NO: 3257; WAN024AG6; Start 191; Stop 215
cttctcgctctttgtatcataaatt

SEQ ID NO: 350633 - DNA, 25 bp, Artificial
  probe
  misc_feature (1)..(25): SEQ ID NO: 3257; WAN024AG6; Start 42; Stop 66
tgggtttggtatctttctcaatata

SEQ ID NO: 350634 - DNA, 25 bp, Artificial
  probe
  misc_feature (1)..(25): SEQ ID NO: 3257; WAN024AG6; Start 186; Stop 210
gttttcttctcgctctttgtatcat

SEQ ID NO: 350635 - DNA, 25 bp, Artificial
  probe
  misc_feature (1)..(25): SEQ ID NO: 3257; WAN024AG6; Start 115; Stop 139
gcggaaaactcggaaaatagataat

SEQ ID NO: 350636 - DNA, 25 bp, Artificial
  probe
  misc_feature (1)..(25): SEQ ID NO: 3257; WAN024AG6; Start 73; Stop 97
aaaataaagaaaggtagagcgtgtg

SEQ ID NO: 350637 - DNA, 25 bp, Artificial
  probe
  misc_feature (1)..(25): SEQ ID NO: 3257; WAN024AG6; Start 114; Stop 138
agcggaaaactcggaaaatagataa

SEQ ID NO: 350638 - DNA, 25 bp, Artificial
  probe
  misc_feature (1)..(25): SEQ ID NO: 3257; WAN024AG6; Start 36; Stop 60
ttttgatgggtttggtatctttctc

SEQ ID NO: 350639 - DNA, 25 bp, Artificial
  probe
  misc_feature (1)..(25): SEQ ID NO: 3257; WAN024AG6; Start 168; Stop 192
ggttcctaattttcagtcgttttct

SEQ ID NO: 350640 - DNA, 25 bp, Artificial
  probe
  misc_feature (1)..(25): SEQ ID NO: 3257; WAN024AG6; Start 174; Stop 198
taattttcagtcgttttcttctcgc

SEQ ID NO: 350641 - DNA, 25 bp, Artificial
  probe
  misc_feature (1)..(25): SEQ ID NO: 3257; WAN024AG6; Start 77; Stop 101
taaagaaaggtagagcgtgtgtttt

SEQ ID NO: 350642 - DNA, 25 bp, Artificial
  probe
  misc_feature (1)..(25): SEQ ID NO: 3257; WAN024AG6; Start 166; Stop 190
caggttcctaattttcagtcgtttt

SEQ ID NO: 350643 - DNA, 25 bp, Artificial
  probe
  misc_feature (1)..(25): SEQ ID NO: 3257; WAN024AG6; Start 167; Stop 191
aggttcctaattttcagtcgttttc

SEQ ID NO: 350644 - DNA, 25 bp, Artificial
  probe
  misc_feature (1)..(25): SEQ ID NO: 3257; WAN024AG6; Start 158; Stop 182
tttctcgtcaggttcctaattttca

SEQ ID NO: 350645 - DNA, 25 bp, Artificial
  probe
  misc_feature (1)..(25): SEQ ID NO: 3257; WAN024AG6; Start 165; Stop 189
tcaggttcctaattttcagtcgttt

SEQ ID NO: 350646 - DNA, 25 bp, Artificial
  probe
  misc_feature (1)..(25): SEQ ID NO: 3257; WAN024AG6; Start 157; Stop 181
atttctcgtcaggttcctaattttc

SEQ ID NO: 350647 - DNA, 25 bp, Artificial
  probe
  misc_feature (1)..(25): SEQ ID NO: 3257; WAN024AG6; Start 156; Stop 180
gatttctcgtcaggttcctaatttt

SEQ ID NO: 350648 - DNA, 25 bp, Artificial
  probe
  misc_feature (1)..(25): SEQ ID NO: 3257; WAN024AG6; Start 159; Stop 183
ttctcgtcaggttcctaattttcag

SEQ ID NO: 350649 - DNA, 25 bp, Artificial
  probe
  misc_feature (1)..(25): SEQ ID NO: 3257; WAN024AG6; Start 38; Stop 62
ttgatgggtttggtatctttctcaa

SEQ ID NO: 350650 - DNA, 25 bp, Artificial
  probe
  misc_feature (1)..(25): SEQ ID NO: 3257; WAN024AG6; Start 184; Stop 208
tcgttttcttctcgctctttgtatc

SEQ ID NO: 350651 - DNA, 25 bp, Artificial
  probe
  misc_feature (1)..(25): SEQ ID NO: 3257; WAN024AG6; Start 173; Stop 197
ctaattttcagtcgttttcttctcg

SEQ ID NO: 350652 - DNA, 25 bp, Artificial
  probe
  misc_feature (1)..(25): SEQ ID NO: 3257; WAN024AG6; Start 72; Stop 96
taaaataaagaaaggtagagcgtgt

SEQ ID NO: 350653 - DNA, 25 bp, Artificial
  probe
  misc_feature (1)..(25): SEQ ID NO: 3257; WAN024AG6; Start 43; Stop 67
gggtttggtatctttctcaatataa

SEQ ID NO: 350654 - DNA, 25 bp, Artificial
  probe
  misc_feature (1)..(25): SEQ ID NO: 3258; WAN024A9D; Start 144; Stop 168
ttagttctcaggaattaatggcagt

SEQ ID NO: 350655 - DNA, 25 bp, Artificial
  probe
  misc_feature (1)..(25): SEQ ID NO: 3258; WAN024A9D; Start 145; Stop 169
tagttctcaggaattaatggcagtg

SEQ ID NO: 350656 - DNA, 25 bp, Artificial
  probe
  misc_feature (1)..(25): SEQ ID NO: 3258; WAN024A9D; Start 90; Stop 114
tatagacaggatatcatcgcttgga

SEQ ID NO: 350657 - DNA, 25 bp, Artificial
  probe
  misc_feature (1)..(25): SEQ ID NO: 3258; WAN024A9D; Start 89; Stop 113
gtatagacaggatatcatcgcttgg

SEQ ID NO: 350658 - DNA, 25 bp, Artificial
  probe
  misc_feature (1)..(25): SEQ ID NO: 3258; WAN024A9D; Start 91; Stop 115
atagacaggatatcatcgcttggaa

SEQ ID NO: 350659 - DNA, 25 bp, Artificial
  probe
  misc_feature (1)..(25): SEQ ID NO: 3258; WAN024A9D; Start 131; Stop 155
accaatcagtaatttagttctcagg

SEQ ID NO: 350660 - DNA, 25 bp, Artificial
  probe
  misc_feature (1)..(25): SEQ ID NO: 3258; WAN024A9D; Start 79; Stop 103
tataggtcgtgtatagacaggatat

SEQ ID NO: 350661 - DNA, 25 bp, Artificial
  probe
  misc_feature (1)..(25): SEQ ID NO: 3258; WAN024A9D; Start 88; Stop 112
tgtatagacaggatatcatcgcttg

SEQ ID NO: 350662 - DNA, 25 bp, Artificial
  probe
  misc_feature (1)..(25): SEQ ID NO: 3258; WAN024A9D; Start 87; Stop 111
gtgtatagacaggatatcatcgctt

SEQ ID NO: 350663 - DNA, 25 bp, Artificial
  probe
  misc_feature (1)..(25): SEQ ID NO: 3258; WAN024A9D; Start 132; Stop 156
ccaatcagtaatttagttctcagga

SEQ ID NO: 350664 - DNA, 25 bp, Artificial
  probe
  misc_feature (1)..(25): SEQ ID NO: 3258; WAN024A9D; Start 92; Stop 116
tagacaggatatcatcgcttggaag

SEQ ID NO: 350665 - DNA, 25 bp, Artificial
  probe
  misc_feature (1)..(25): SEQ ID NO: 3258; WAN024A9D; Start 83; Stop 107
ggtcgtgtatagacaggatatcatc

SEQ ID NO: 350666 - DNA, 25 bp, Artificial
  probe
  misc_feature (1)..(25): SEQ ID NO: 3258; WAN024A9D; Start 84; Stop 108
gtcgtgtatagacaggatatcatcg

SEQ ID NO: 350667 - DNA, 25 bp, Artificial
  probe
  misc_feature (1)..(25): SEQ ID NO: 3258; WAN024A9D; Start 82; Stop 106
aggtcgtgtatagacaggatatcat

SEQ ID NO: 350668 - DNA, 25 bp, Artificial
  probe
  misc_feature (1)..(25): SEQ ID NO: 3258; WAN024A9D; Start 81; Stop 105
taggtcgtgtatagacaggatatca

SEQ ID NO: 350669 - DNA, 25 bp, Artificial
  probe
  misc_feature (1)..(25): SEQ ID NO: 3258; WAN024A9D; Start 129; Stop 153
acaccaatcagtaatttagttctca

SEQ ID NO: 350670 - DNA, 25 bp, Artificial
  probe
  misc_feature (1)..(25): SEQ ID NO: 3258; WAN024A9D; Start 148; Stop 172
ttctcaggaattaatggcagtgctt

SEQ ID NO: 350671 - DNA, 25 bp, Artificial
  probe
  misc_feature (1)..(25): SEQ ID NO: 3258; WAN024A9D; Start 130; Stop 154
caccaatcagtaatttagttctcag

SEQ ID NO: 350672 - DNA, 25 bp, Artificial
  probe
  misc_feature (1)..(25): SEQ ID NO: 3258; WAN024A9D; Start 128; Stop 152
gacaccaatcagtaatttagttctc

SEQ ID NO: 350673 - DNA, 25 bp, Artificial
  probe
  misc_feature (1)..(25): SEQ ID NO: 3258; WAN024A9D; Start 127; Stop 151
tgacaccaatcagtaatttagttct

SEQ ID NO: 350674 - DNA, 25 bp, Artificial
  probe
  misc_feature (1)..(25): SEQ ID NO: 3258; WAN024A9D; Start 80; Stop 104
ataggtcgtgtatagacaggatatc

SEQ ID NO: 350675 - DNA, 25 bp, Artificial
  probe
  misc_feature (1)..(25): SEQ ID NO: 3258; WAN024A9D; Start 143; Stop 167
tttagttctcaggaattaatggcag

SEQ ID NO: 350676 - DNA, 25 bp, Artificial
  probe
  misc_feature (1)..(25): SEQ ID NO: 3258; WAN024A9D; Start 86; Stop 110
cgtgtatagacaggatatcatcgct

SEQ ID NO: 350677 - DNA, 25 bp, Artificial
  probe
  misc_feature (1)..(25): SEQ ID NO: 3258; WAN024A9D; Start 85; Stop 109
tcgtgtatagacaggatatcatcgc

SEQ ID NO: 350678 - DNA, 25 bp, Artificial
  probe
  misc_feature (1)..(25): SEQ ID NO: 3258; WAN024A9D; Start 142; Stop 166
atttagttctcaggaattaatggca

SEQ ID NO: 350679 - DNA, 25 bp, Artificial
  probe
  misc_feature (1)..(25): SEQ ID NO: 3258; WAN024A9D; Start 94; Stop 118
gacaggatatcatcgcttggaagtt

SEQ ID NO: 350680 - DNA, 25 bp, Artificial
  probe
  misc_feature (1)..(25): SEQ ID NO: 3258; WAN024A9D; Start 147; Stop 171
gttctcaggaattaatggcagtgct

SEQ ID NO: 350681 - DNA, 25 bp, Artificial
  probe
  misc_feature (1)..(25): SEQ ID NO: 3258; WAN024A9D; Start 146; Stop 170
agttctcaggaattaatggcagtgc

SEQ ID NO: 350682 - DNA, 25 bp, Artificial
  probe
  misc_feature (1)..(25): SEQ ID NO: 3258; WAN024A9D; Start 126; Stop 150
ttgacaccaatcagtaatttagttc

SEQ ID NO: 350683 - DNA, 25 bp, Artificial
  probe
  misc_feature (1)..(25): SEQ ID NO: 3258; WAN024A9D; Start 78; Stop 102
ctataggtcgtgtatagacaggata

SEQ ID NO: 350684 - DNA, 25 bp, Artificial
  probe
  misc_feature (1)..(25): SEQ ID NO: 3258; WAN024A9D; Start 125; Stop 149
tttgacaccaatcagtaatttagtt

SEQ ID NO: 350685 - DNA, 25 bp, Artificial
  probe
  misc_feature (1)..(25): SEQ ID NO: 3258; WAN024A9D; Start 133; Stop 157
caatcagtaatttagttctcaggaa

SEQ ID NO: 350686 - DNA, 25 bp, Artificial
  probe
  misc_feature (1)..(25): SEQ ID NO: 3258; WAN024A9D; Start 93; Stop 117
agacaggatatcatcgcttggaagt

SEQ ID NO: 350687 - DNA, 25 bp, Artificial
  probe
  misc_feature (1)..(25): SEQ ID NO: 3260; WAN024AMS; Start 16; Stop 40
ttatgtttgatagaaattccaccgc

SEQ ID NO: 350688 - DNA, 25 bp, Artificial
  probe
  misc_feature (1)..(25): SEQ ID NO: 3260; WAN024AMS; Start 17; Stop 41
tatgtttgatagaaattccaccgca

SEQ ID NO: 350689 - DNA, 25 bp, Artificial
  probe
  misc_feature (1)..(25): SEQ ID NO: 3260; WAN024AMS; Start 15; Stop 39
cttatgtttgatagaaattccaccg

SEQ ID NO: 350690 - DNA, 25 bp, Artificial
  probe
  misc_feature (1)..(25): SEQ ID NO: 3260; WAN024AMS; Start 18; Stop 42
atgtttgatagaaattccaccgcac

SEQ ID NO: 350691 - DNA, 25 bp, Artificial
  probe
  misc_feature (1)..(25): SEQ ID NO: 3260; WAN024AMS; Start 14; Stop 38
tcttatgtttgatagaaattccacc

SEQ ID NO: 350692 - DNA, 25 bp, Artificial
  probe
  misc_feature (1)..(25): SEQ ID NO: 3260; WAN024AMS; Start 23; Stop 47
tgatagaaattccaccgcacgtaaa

SEQ ID NO: 350693 - DNA, 25 bp, Artificial
  probe
  misc_feature (1)..(25): SEQ ID NO: 3260; WAN024AMS; Start 22; Stop 46
ttgatagaaattccaccgcacgtaa

SEQ ID NO: 350694 - DNA, 25 bp, Artificial
  probe
  misc_feature (1)..(25): SEQ ID NO: 3260; WAN024AMS; Start 21; Stop 45
tttgatagaaattccaccgcacgta

SEQ ID NO: 350695 - DNA, 25 bp, Artificial
  probe
  misc_feature (1)..(25): SEQ ID NO: 3260; WAN024AMS; Start 19; Stop 43
tgtttgatagaaattccaccgcacg

SEQ ID NO: 350696 - DNA, 25 bp, Artificial
  probe
  misc_feature (1)..(25): SEQ ID NO: 3260; WAN024AMS; Start 32; Stop 56
ttccaccgcacgtaaaactattata

SEQ ID NO: 350697 - DNA, 25 bp, Artificial
  probe
  misc_feature (1)..(25): SEQ ID NO: 3260; WAN024AMS; Start 31; Stop 55
attccaccgcacgtaaaactattat

SEQ ID NO: 350698 - DNA, 25 bp, Artificial
  probe
  misc_feature (1)..(25): SEQ ID NO: 3260; WAN024AMS; Start 30; Stop 54
aattccaccgcacgtaaaactatta

SEQ ID NO: 350699 - DNA, 25 bp, Artificial
  probe
  misc_feature (1)..(25): SEQ ID NO: 3260; WAN024AMS; Start 29; Stop 53
aaattccaccgcacgtaaaactatt

SEQ ID NO: 350700 - DNA, 25 bp, Artificial
  probe
  misc_feature (1)..(25): SEQ ID NO: 3260; WAN024AMS; Start 24; Stop 48
gatagaaattccaccgcacgtaaaa

SEQ ID NO: 350701 - DNA, 25 bp, Artificial
  probe
  misc_feature (1)..(25): SEQ ID NO: 3260; WAN024AMS; Start 28; Stop 52
gaaattccaccgcacgtaaaactat

SEQ ID NO: 350702 - DNA, 25 bp, Artificial
  probe
  misc_feature (1)..(25): SEQ ID NO: 3260; WAN024AMS; Start 25; Stop 49
atagaaattccaccgcacgtaaaac

SEQ ID NO: 350703 - DNA, 25 bp, Artificial
  probe
  misc_feature (1)..(25): SEQ ID NO: 3260; WAN024AMS; Start 13; Stop 37
atcttatgtttgatagaaattccac

SEQ ID NO: 350704 - DNA, 25 bp, Artificial
  probe
  misc_feature (1)..(25): SEQ ID NO: 3260; WAN024AMS; Start 20; Stop 44
gtttgatagaaattccaccgcacgt

SEQ ID NO: 350705 - DNA, 25 bp, Artificial
  probe
  misc_feature (1)..(25): SEQ ID NO: 3260; WAN024AMS; Start 27; Stop 51
agaaattccaccgcacgtaaaacta

SEQ ID NO: 350706 - DNA, 25 bp, Artificial
  probe
  misc_feature (1)..(25): SEQ ID NO: 3260; WAN024AMS; Start 26; Stop 50
tagaaattccaccgcacgtaaaact

SEQ ID NO: 350707 - DNA, 25 bp, Artificial
  probe
  misc_feature (1)..(25): SEQ ID NO: 3260; WAN024AMS; Start 1; Stop 25
cgtaaaactcctatcttatgtttga

SEQ ID NO: 350708 - DNA, 25 bp, Artificial
  probe
  misc_feature (1)..(25): SEQ ID NO: 3260; WAN024AMS; Start 7; Stop 31
actcctatcttatgtttgatagaaa

SEQ ID NO: 350709 - DNA, 25 bp, Artificial
  probe
  misc_feature (1)..(25): SEQ ID NO: 3260; WAN024AMS; Start 6; Stop 30
aactcctatcttatgtttgatagaa

SEQ ID NO: 350710 - DNA, 25 bp, Artificial
  probe
  misc_feature (1)..(25): SEQ ID NO: 3260; WAN024AMS; Start 5; Stop 29
aaactcctatcttatgtttgataga

SEQ ID NO: 350711 - DNA, 25 bp, Artificial
  probe
  misc_feature (1)..(25): SEQ ID NO: 3261; WAN0249CY; Start 126; Stop 150
gtttaacagtaacacacaaatacct

SEQ ID NO: 350712 - DNA, 25 bp, Artificial
  probe
  misc_feature (1)..(25): SEQ ID NO: 3261; WAN0249CY; Start 125; Stop 149
agtttaacagtaacacacaaatacc

SEQ ID NO: 350713 - DNA, 25 bp, Artificial
  probe
  misc_feature (1)..(25): SEQ ID NO: 3261; WAN0249CY; Start 115; Stop 139
caaatgtgtgagtttaacagtaaca

SEQ ID NO: 350714 - DNA, 25 bp, Artificial
  probe
  misc_feature (1)..(25): SEQ ID NO: 3261; WAN0249CY; Start 114; Stop 138
acaaatgtgtgagtttaacagtaac

SEQ ID NO: 350715 - DNA, 25 bp, Artificial
  probe
  misc_feature (1)..(25): SEQ ID NO: 3261; WAN0249CY; Start 122; Stop 146
gtgagtttaacagtaacacacaaat

SEQ ID NO: 350716 - DNA, 25 bp, Artificial
  probe
  misc_feature (1)..(25): SEQ ID NO: 3261; WAN0249CY; Start 123; Stop 147
tgagtttaacagtaacacacaaata

SEQ ID NO: 350717 - DNA, 25 bp, Artificial
  probe
  misc_feature (1)..(25): SEQ ID NO: 3261; WAN0249CY; Start 124; Stop 148
gagtttaacagtaacacacaaatac

SEQ ID NO: 350718 - DNA, 25 bp, Artificial
  probe
  misc_feature (1)..(25): SEQ ID NO: 3261; WAN0249CY; Start 112; Stop 136
gcacaaatgtgtgagtttaacagta

SEQ ID NO: 350719 - DNA, 25 bp, Artificial
  probe
  misc_feature (1)..(25): SEQ ID NO: 3261; WAN0249CY; Start 110; Stop 134
tagcacaaatgtgtgagtttaacag

SEQ ID NO: 350720 - DNA, 25 bp, Artificial
  probe
  misc_feature (1)..(25): SEQ ID NO: 3261; WAN0249CY; Start 109; Stop 133
ttagcacaaatgtgtgagtttaaca

SEQ ID NO: 350721 - DNA, 25 bp, Artificial
  probe
  misc_feature (1)..(25): SEQ ID NO: 3261; WAN0249CY; Start 121; Stop 145
tgtgagtttaacagtaacacacaaa

SEQ ID NO: 350722 - DNA, 25 bp, Artificial
  probe
  misc_feature (1)..(25): SEQ ID NO: 3261; WAN0249CY; Start 116; Stop 140
aaatgtgtgagtttaacagtaacac

SEQ ID NO: 350723 - DNA, 25 bp, Artificial
  probe
  misc_feature (1)..(25): SEQ ID NO: 3261; WAN0249CY; Start 108; Stop 132
tttagcacaaatgtgtgagtttaac

SEQ ID NO: 350724 - DNA, 25 bp, Artificial
  probe
  misc_feature (1)..(25): SEQ ID NO: 3261; WAN0249CY; Start 111; Stop 135
agcacaaatgtgtgagtttaacagt

SEQ ID NO: 350725 - DNA, 25 bp, Artificial
  probe
  misc_feature (1)..(25): SEQ ID NO: 3261; WAN0249CY; Start 113; Stop 137
cacaaatgtgtgagtttaacagtaa

SEQ ID NO: 350726 - DNA, 25 bp, Artificial
  probe
  misc_feature (1)..(25): SEQ ID NO: 3261; WAN0249CY; Start 107; Stop 131
ttttagcacaaatgtgtgagtttaa

SEQ ID NO: 350727 - DNA, 25 bp, Artificial
  probe
  misc_feature (1)..(25): SEQ ID NO: 3261; WAN0249CY; Start 63; Stop 87
agaaattttcaagcttttaactaga

SEQ ID NO: 350728 - DNA, 25 bp, Artificial
  probe
  misc_feature (1)..(25): SEQ ID NO: 3262; WAN024A8Y; Start 156; Stop 180
gacttacgattatcttgaatgcctt

SEQ ID NO: 350729 - DNA, 25 bp, Artificial
  probe
  misc_feature (1)..(25): SEQ ID NO: 3262; WAN024A8Y; Start 155; Stop 179
agacttacgattatcttgaatgcct

SEQ ID NO: 350730 - DNA, 25 bp, Artificial
  probe
  misc_feature (1)..(25): SEQ ID NO: 3262; WAN024A8Y; Start 159; Stop 183
ttacgattatcttgaatgccttagg

SEQ ID NO: 350731 - DNA, 25 bp, Artificial
  probe
  misc_feature (1)..(25): SEQ ID NO: 3262; WAN024A8Y; Start 157; Stop 181
acttacgattatcttgaatgcctta

SEQ ID NO: 350732 - DNA, 25 bp, Artificial
  probe
  misc_feature (1)..(25): SEQ ID NO: 3262; WAN024A8Y; Start 158; Stop 182
cttacgattatcttgaatgccttag

SEQ ID NO: 350733 - DNA, 25 bp, Artificial
  probe
  misc_feature (1)..(25): SEQ ID NO: 3262; WAN024A8Y; Start 33; Stop 57
gacttgtgcgataactatttgaaac

SEQ ID NO: 350734 - DNA, 25 bp, Artificial
  probe
  misc_feature (1)..(25): SEQ ID NO: 3262; WAN024A8Y; Start 165; Stop 189
ttatcttgaatgccttagggaaaca

SEQ ID NO: 350735 - DNA, 25 bp, Artificial
  probe
  misc_feature (1)..(25): SEQ ID NO: 3262; WAN024A8Y; Start 160; Stop 184
tacgattatcttgaatgccttaggg

SEQ ID NO: 350736 - DNA, 25 bp, Artificial
  probe
  misc_feature (1)..(25): SEQ ID NO: 3262; WAN024A8Y; Start 32; Stop 56
agacttgtgcgataactatttgaaa

SEQ ID NO: 350737 - DNA, 25 bp, Artificial
  probe
  misc_feature (1)..(25): SEQ ID NO: 3262; WAN024A8Y; Start 162; Stop 186
cgattatcttgaatgccttagggaa

SEQ ID NO: 350738 - DNA, 25 bp, Artificial
  probe
  misc_feature (1)..(25): SEQ ID NO: 3262; WAN024A8Y; Start 166; Stop 190
tatcttgaatgccttagggaaacat

SEQ ID NO: 350739 - DNA, 25 bp, Artificial
  probe
  misc_feature (1)..(25): SEQ ID NO: 3262; WAN024A8Y; Start 164; Stop 188
attatcttgaatgccttagggaaac

SEQ ID NO: 350740 - DNA, 25 bp, Artificial
  probe
  misc_feature (1)..(25): SEQ ID NO: 3262; WAN024A8Y; Start 163; Stop 187
gattatcttgaatgccttagggaaa

SEQ ID NO: 350741 - DNA, 25 bp, Artificial
  probe
  misc_feature (1)..(25): SEQ ID NO: 3262; WAN024A8Y; Start 154; Stop 178
aagacttacgattatcttgaatgcc

SEQ ID NO: 350742 - DNA, 25 bp, Artificial
  probe
  misc_feature (1)..(25): SEQ ID NO: 3262; WAN024A8Y; Start 31; Stop 55
tagacttgtgcgataactatttgaa

SEQ ID NO: 350743 - DNA, 25 bp, Artificial
  probe
  misc_feature (1)..(25): SEQ ID NO: 3262; WAN024A8Y; Start 161; Stop 185
acgattatcttgaatgccttaggga

SEQ ID NO: 350744 - DNA, 25 bp, Artificial
  probe
  misc_feature (1)..(25): SEQ ID NO: 3262; WAN024A8Y; Start 34; Stop 58
acttgtgcgataactatttgaaaca

SEQ ID NO: 350745 - DNA, 25 bp, Artificial
  probe
  misc_feature (1)..(25): SEQ ID NO: 3262; WAN024A8Y; Start 177; Stop 201
ccttagggaaacatgctatactact

SEQ ID NO: 350746 - DNA, 25 bp, Artificial
  probe
  misc_feature (1)..(25): SEQ ID NO: 3262; WAN024A8Y; Start 37; Stop 61
tgtgcgataactatttgaaacaaga

SEQ ID NO: 350747 - DNA, 25 bp, Artificial
  probe
  misc_feature (1)..(25): SEQ ID NO: 3262; WAN024A8Y; Start 176; Stop 200
gccttagggaaacatgctatactac

SEQ ID NO: 350748 - DNA, 25 bp, Artificial
  probe
  misc_feature (1)..(25): SEQ ID NO: 3262; WAN024A8Y; Start 175; Stop 199
tgccttagggaaacatgctatacta

SEQ ID NO: 350749 - DNA, 25 bp, Artificial
  probe
  misc_feature (1)..(25): SEQ ID NO: 3262; WAN024A8Y; Start 172; Stop 196
gaatgccttagggaaacatgctata

SEQ ID NO: 350750 - DNA, 25 bp, Artificial
  probe
  misc_feature (1)..(25): SEQ ID NO: 3262; WAN024A8Y; Start 38; Stop 62
gtgcgataactatttgaaacaagat

SEQ ID NO: 350751 - DNA, 25 bp, Artificial
  probe
  misc_feature (1)..(25): SEQ ID NO: 3262; WAN024A8Y; Start 173; Stop 197
aatgccttagggaaacatgctatac

SEQ ID NO: 350752 - DNA, 25 bp, Artificial
  probe
  misc_feature (1)..(25): SEQ ID NO: 3262; WAN024A8Y; Start 167; Stop 191
atcttgaatgccttagggaaacatg

SEQ ID NO: 350753 - DNA, 25 bp, Artificial
  probe
  misc_feature (1)..(25): SEQ ID NO: 3262; WAN024A8Y; Start 174; Stop 198
atgccttagggaaacatgctatact

SEQ ID NO: 350754 - DNA, 25 bp, Artificial
  probe
  misc_feature (1)..(25): SEQ ID NO: 3262; WAN024A8Y; Start 30; Stop 54
atagacttgtgcgataactatttga

SEQ ID NO: 350755 - DNA, 25 bp, Artificial
  probe
  misc_feature (1)..(25): SEQ ID NO: 3262; WAN024A8Y; Start 179; Stop 203
ttagggaaacatgctatactacttg

SEQ ID NO: 350756 - DNA, 25 bp, Artificial
  probe
  misc_feature (1)..(25): SEQ ID NO: 3262; WAN024A8Y; Start 180; Stop 204
tagggaaacatgctatactacttgt

SEQ ID NO: 350757 - DNA, 25 bp, Artificial
  probe
  misc_feature (1)..(25): SEQ ID NO: 3262; WAN024A8Y; Start 39; Stop 63
tgcgataactatttgaaacaagatt

SEQ ID NO: 350758 - DNA, 25 bp, Artificial
  probe
  misc_feature (1)..(25): SEQ ID NO: 3262; WAN024A8Y; Start 178; Stop 202
cttagggaaacatgctatactactt

SEQ ID NO: 350759 - DNA, 25 bp, Artificial
  probe
  misc_feature (1)..(25): SEQ ID NO: 3262; WAN024A8Y; Start 52; Stop 76
tgaaacaagattagctggttagaaa

SEQ ID NO: 350760 - DNA, 25 bp, Artificial
  probe
  misc_feature (1)..(25): SEQ ID NO: 3262; WAN024A8Y; Start 171; Stop 195
tgaatgccttagggaaacatgctat

SEQ ID NO: 350761 - DNA, 25 bp, Artificial
  probe
  misc_feature (1)..(25): SEQ ID NO: 3263; WAN024CWF-3; Start 990; Stop 1014
tcgtagtaatcgtattgcttatgct

SEQ ID NO: 350762 - DNA, 25 bp, Artificial
  probe
  misc_feature (1)..(25): SEQ ID NO: 3263; WAN024CWF-3; Start 989; Stop 1013
gtcgtagtaatcgtattgcttatgc

SEQ ID NO: 350763 - DNA, 25 bp, Artificial
  probe
  misc_feature (1)..(25): SEQ ID NO: 3263; WAN024CWF-3; Start 448; Stop 472
ggcttgatgattattgatgaggaac

SEQ ID NO: 350764 - DNA, 25 bp, Artificial
  probe
  misc_feature (1)..(25): SEQ ID NO: 3263; WAN024CWF-3; Start 454; Stop 478
atgattattgatgaggaacagcgat

SEQ ID NO: 350765 - DNA, 25 bp, Artificial
  probe
  misc_feature (1)..(25): SEQ ID NO: 3263; WAN024CWF-3; Start 988; Stop 1012
ggtcgtagtaatcgtattgcttatg

SEQ ID NO: 350766 - DNA, 25 bp, Artificial
  probe
  misc_feature (1)..(25): SEQ ID NO: 3263; WAN024CWF-3; Start 991; Stop 1015
cgtagtaatcgtattgcttatgctt

SEQ ID NO: 350767 - DNA, 25 bp, Artificial
  probe
  misc_feature (1)..(25): SEQ ID NO: 3263; WAN024CWF-3; Start 455; Stop 479
tgattattgatgaggaacagcgatt

SEQ ID NO: 350768 - DNA, 25 bp, Artificial
  probe
  misc_feature (1)..(25): SEQ ID NO: 3263; WAN024CWF-3; Start 451; Stop 475
ttgatgattattgatgaggaacagc

SEQ ID NO: 350769 - DNA, 25 bp, Artificial
  probe
  misc_feature (1)..(25): SEQ ID NO: 3263; WAN024CWF-3; Start 449; Stop 473
gcttgatgattattgatgaggaaca

SEQ ID NO: 350770 - DNA, 25 bp, Artificial
  probe
  misc_feature (1)..(25): SEQ ID NO: 3263; WAN024CWF-3; Start 987; Stop 1011
cggtcgtagtaatcgtattgcttat

SEQ ID NO: 350771 - DNA, 25 bp, Artificial
  probe
  misc_feature (1)..(25): SEQ ID NO: 3263; WAN024CWF-3; Start 966; Stop 990
atatcagttaagaggaagagtcggt

SEQ ID NO: 350772 - DNA, 25 bp, Artificial
  probe
  misc_feature (1)..(25): SEQ ID NO: 3263; WAN024CWF-3; Start 1241; Stop 1265
gtaatgctaacgctaacacaagaac

SEQ ID NO: 350773 - DNA, 25 bp, Artificial
  probe
  misc_feature (1)..(25): SEQ ID NO: 3263; WAN024CWF-3; Start 453; Stop 477
gatgattattgatgaggaacagcga

SEQ ID NO: 350774 - DNA, 25 bp, Artificial
  probe
  misc_feature (1)..(25): SEQ ID NO: 3263; WAN024CWF-3; Start 1199; Stop 1223
tgtattcgcagttattagaggaagc

SEQ ID NO: 350775 - DNA, 25 bp, Artificial
  probe
  misc_feature (1)..(25): SEQ ID NO: 3263; WAN024CWF-3; Start 981; Stop 1005
aagagtcggtcgtagtaatcgtatt

SEQ ID NO: 350776 - DNA, 25 bp, Artificial
  probe
  misc_feature (1)..(25): SEQ ID NO: 3263; WAN024CWF-3; Start 452; Stop 476
tgatgattattgatgaggaacagcg

SEQ ID NO: 350777 - DNA, 25 bp, Artificial
  probe
  misc_feature (1)..(25): SEQ ID NO: 3263; WAN024CWF-3; Start 967; Stop 991
tatcagttaagaggaagagtcggtc

SEQ ID NO: 350778 - DNA, 25 bp, Artificial
  probe
  misc_feature (1)..(25): SEQ ID NO: 3263; WAN024CWF-3; Start 965; Stop 989
tatatcagttaagaggaagagtcgg

SEQ ID NO: 350779 - DNA, 25 bp, Artificial
  probe
  misc_feature (1)..(25): SEQ ID NO: 3263; WAN024CWF-3; Start 1393; Stop 1417
gagttacaagaggagttgatagacc

SEQ ID NO: 350780 - DNA, 25 bp, Artificial
  probe
  misc_feature (1)..(25): SEQ ID NO: 3263; WAN024CWF-3; Start 1388; Stop 1412
atgaagagttacaagaggagttgat

SEQ ID NO: 350781 - DNA, 25 bp, Artificial
  probe
  misc_feature (1)..(25): SEQ ID NO: 3263; WAN024CWF-3; Start 1392; Stop 1416
agagttacaagaggagttgatagac

SEQ ID NO: 350782 - DNA, 25 bp, Artificial
  probe
  misc_feature (1)..(25): SEQ ID NO: 3263; WAN024CWF-3; Start 997; Stop 1021
aatcgtattgcttatgcttatctca

SEQ ID NO: 350783 - DNA, 25 bp, Artificial
  probe
  misc_feature (1)..(25): SEQ ID NO: 3263; WAN024CWF-3; Start 986; Stop 1010
tcggtcgtagtaatcgtattgctta

SEQ ID NO: 350784 - DNA, 25 bp, Artificial
  probe
  misc_feature (1)..(25): SEQ ID NO: 3263; WAN024CWF-3; Start 1198; Stop 1222
ttgtattcgcagttattagaggaag

SEQ ID NO: 350785 - DNA, 25 bp, Artificial
  probe
  misc_feature (1)..(25): SEQ ID NO: 3263; WAN024CWF-3; Start 1242; Stop 1266
taatgctaacgctaacacaagaacc

SEQ ID NO: 350786 - DNA, 25 bp, Artificial
  probe
  misc_feature (1)..(25): SEQ ID NO: 3263; WAN024CWF-3; Start 1240; Stop 1264
ggtaatgctaacgctaacacaagaa

SEQ ID NO: 350787 - DNA, 25 bp, Artificial
  probe
  misc_feature (1)..(25): SEQ ID NO: 3263; WAN024CWF-3; Start 980; Stop 1004
gaagagtcggtcgtagtaatcgtat

SEQ ID NO: 350788 - DNA, 25 bp, Artificial
  probe
  misc_feature (1)..(25): SEQ ID NO: 3263; WAN024CWF-3; Start 952; Stop 976
ggcttgtcaaccttatatcagttaa

SEQ ID NO: 350789 - DNA, 25 bp, Artificial
  probe
  misc_feature (1)..(25): SEQ ID NO: 3263; WAN024CWF-3; Start 1375; Stop 1399
aaccgtgtcaattatgaagagttac

SEQ ID NO: 350790 - DNA, 25 bp, Artificial
  probe
  misc_feature (1)..(25): SEQ ID NO: 3263; WAN024CWF-3; Start 1374; Stop 1398
caaccgtgtcaattatgaagagtta

SEQ ID NO: 350791 - DNA, 25 bp, Artificial
  probe
  misc_feature (1)..(25): SEQ ID NO: 3263; WAN024CWF-3; Start 1389; Stop 1413
tgaagagttacaagaggagttgata

SEQ ID NO: 350792 - DNA, 25 bp, Artificial
  probe
  misc_feature (1)..(25): SEQ ID NO: 3263; WAN024CWF-3; Start 1387; Stop 1411
tatgaagagttacaagaggagttga

SEQ ID NO: 350793 - DNA, 25 bp, Artificial
  probe
  misc_feature (1)..(25): SEQ ID NO: 3263; WAN024CWF-3; Start 1396; Stop 1420
ttacaagaggagttgatagaccgtt

SEQ ID NO: 350794 - DNA, 25 bp, Artificial
  probe
  misc_feature (1)..(25): SEQ ID NO: 3264; WAN024AQ3; Start 118; Stop 142
gtacgctataattacattaggagga

SEQ ID NO: 350795 - DNA, 25 bp, Artificial
  probe
  misc_feature (1)..(25): SEQ ID NO: 3264; WAN024AQ3; Start 117; Stop 141
agtacgctataattacattaggagg

SEQ ID NO: 350796 - DNA, 25 bp, Artificial
  probe
  misc_feature (1)..(25): SEQ ID NO: 3264; WAN024AQ3; Start 39; Stop 63
ctgtttatgtgataatggagggtat

SEQ ID NO: 350797 - DNA, 25 bp, Artificial
  probe
  misc_feature (1)..(25): SEQ ID NO: 3264; WAN024AQ3; Start 38; Stop 62
cctgtttatgtgataatggagggta

SEQ ID NO: 350798 - DNA, 25 bp, Artificial
  probe
  misc_feature (1)..(25): SEQ ID NO: 3264; WAN024AQ3; Start 55; Stop 79
ggagggtatttaaagaaggtggtag

SEQ ID NO: 350799 - DNA, 25 bp, Artificial
  probe
  misc_feature (1)..(25): SEQ ID NO: 3264; WAN024AQ3; Start 52; Stop 76
aatggagggtatttaaagaaggtgg

SEQ ID NO: 350800 - DNA, 25 bp, Artificial
  probe
  misc_feature (1)..(25): SEQ ID NO: 3264; WAN024AQ3; Start 56; Stop 80
gagggtatttaaagaaggtggtaga

SEQ ID NO: 350801 - DNA, 25 bp, Artificial
  probe
  misc_feature (1)..(25): SEQ ID NO: 3264; WAN024AQ3; Start 54; Stop 78
tggagggtatttaaagaaggtggta

SEQ ID NO: 350802 - DNA, 25 bp, Artificial
  probe
  misc_feature (1)..(25): SEQ ID NO: 3264; WAN024AQ3; Start 40; Stop 64
tgtttatgtgataatggagggtatt

SEQ ID NO: 350803 - DNA, 25 bp, Artificial
  probe
  misc_feature (1)..(25): SEQ ID NO: 3264; WAN024AQ3; Start 57; Stop 81
agggtatttaaagaaggtggtagat

SEQ ID NO: 350804 - DNA, 25 bp, Artificial
  probe
  misc_feature (1)..(25): SEQ ID NO: 3264; WAN024AQ3; Start 53; Stop 77
atggagggtatttaaagaaggtggt

SEQ ID NO: 350805 - DNA, 25 bp, Artificial
  probe
  misc_feature (1)..(25): SEQ ID NO: 3264; WAN024AQ3; Start 120; Stop 144
acgctataattacattaggaggata

SEQ ID NO: 350806 - DNA, 25 bp, Artificial
  probe
  misc_feature (1)..(25): SEQ ID NO: 3264; WAN024AQ3; Start 119; Stop 143
tacgctataattacattaggaggat

SEQ ID NO: 350807 - DNA, 25 bp, Artificial
  probe
  misc_feature (1)..(25): SEQ ID NO: 3264; WAN024AQ3; Start 121; Stop 145
cgctataattacattaggaggatac

SEQ ID NO: 350808 - DNA, 25 bp, Artificial
  probe
  misc_feature (1)..(25): SEQ ID NO: 3264; WAN024AQ3; Start 58; Stop 82
gggtatttaaagaaggtggtagatt

SEQ ID NO: 350809 - DNA, 25 bp, Artificial
  probe
  misc_feature (1)..(25): SEQ ID NO: 3264; WAN024AQ3; Start 51; Stop 75
taatggagggtatttaaagaaggtg

SEQ ID NO: 350810 - DNA, 25 bp, Artificial
  probe
  misc_feature (1)..(25): SEQ ID NO: 3264; WAN024AQ3; Start 69; Stop 93
gaaggtggtagatttcttgattcta

SEQ ID NO: 350811 - DNA, 25 bp, Artificial
  probe
  misc_feature (1)..(25): SEQ ID NO: 3264; WAN024AQ3; Start 68; Stop 92
agaaggtggtagatttcttgattct

SEQ ID NO: 350812 - DNA, 25 bp, Artificial
  probe
  misc_feature (1)..(25): SEQ ID NO: 3264; WAN024AQ3; Start 41; Stop 65
gtttatgtgataatggagggtattt

SEQ ID NO: 350813 - DNA, 25 bp, Artificial
  probe
  misc_feature (1)..(25): SEQ ID NO: 3264; WAN024AQ3; Start 70; Stop 94
aaggtggtagatttcttgattctat

SEQ ID NO: 350814 - DNA, 25 bp, Artificial
  probe
  misc_feature (1)..(25): SEQ ID NO: 3264; WAN024AQ3; Start 46; Stop 70
tgtgataatggagggtatttaaaga

SEQ ID NO: 350815 - DNA, 25 bp, Artificial
  probe
  misc_feature (1)..(25): SEQ ID NO: 3264; WAN024AQ3; Start 50; Stop 74
ataatggagggtatttaaagaaggt

SEQ ID NO: 350816 - DNA, 25 bp, Artificial
  probe
  misc_feature (1)..(25): SEQ ID NO: 3264; WAN024AQ3; Start 49; Stop 73
gataatggagggtatttaaagaagg

SEQ ID NO: 350817 - DNA, 25 bp, Artificial
  probe
  misc_feature (1)..(25): SEQ ID NO: 3264; WAN024AQ3; Start 71; Stop 95
aggtggtagatttcttgattctata

SEQ ID NO: 350818 - DNA, 25 bp, Artificial
  probe
  misc_feature (1)..(25): SEQ ID NO: 3264; WAN024AQ3; Start 59; Stop 83
ggtatttaaagaaggtggtagattt

SEQ ID NO: 350819 - DNA, 25 bp, Artificial
  probe
  misc_feature (1)..(25): SEQ ID NO: 3264; WAN024AQ3; Start 47; Stop 71
gtgataatggagggtatttaaagaa

SEQ ID NO: 350820 - DNA, 25 bp, Artificial
  probe
  misc_feature (1)..(25): SEQ ID NO: 3264; WAN024AQ3; Start 45; Stop 69
atgtgataatggagggtatttaaag

SEQ ID NO: 350821 - DNA, 25 bp, Artificial
  probe
  misc_feature (1)..(25): SEQ ID NO: 3264; WAN024AQ3; Start 122; Stop 146
gctataattacattaggaggataca

SEQ ID NO: 350822 - DNA, 25 bp, Artificial
  probe
  misc_feature (1)..(25): SEQ ID NO: 3264; WAN024AQ3; Start 116; Stop 140
tagtacgctataattacattaggag

SEQ ID NO: 350823 - DNA, 25 bp, Artificial
  probe
  misc_feature (1)..(25): SEQ ID NO: 3264; WAN024AQ3; Start 48; Stop 72
tgataatggagggtatttaaagaag

SEQ ID NO: 350824 - DNA, 25 bp, Artificial
  probe
  misc_feature (1)..(25): SEQ ID NO: 3264; WAN024AQ3; Start 42; Stop 66
tttatgtgataatggagggtattta

SEQ ID NO: 350825 - DNA, 25 bp, Artificial
  probe
  misc_feature (1)..(25): SEQ ID NO: 3264; WAN024AQ3; Start 43; Stop 67
ttatgtgataatggagggtatttaa

SEQ ID NO: 350826 - DNA, 25 bp, Artificial
  probe
  misc_feature (1)..(25): SEQ ID NO: 3264; WAN024AQ3; Start 72; Stop 96
ggtggtagatttcttgattctatag

SEQ ID NO: 350827 - DNA, 25 bp, Artificial
  probe
  misc_feature (1)..(25): SEQ ID NO: 3265; WAN024ADB; Start 46; Stop 70
caacttaatgtcacaaggcgagaag

SEQ ID NO: 350828 - DNA, 25 bp, Artificial
  probe
  misc_feature (1)..(25): SEQ ID NO: 3265; WAN024ADB; Start 47; Stop 71
aacttaatgtcacaaggcgagaagc

SEQ ID NO: 350829 - DNA, 25 bp, Artificial
  probe
  misc_feature (1)..(25): SEQ ID NO: 3265; WAN024ADB; Start 45; Stop 69
gcaacttaatgtcacaaggcgagaa

SEQ ID NO: 350830 - DNA, 25 bp, Artificial
  probe
  misc_feature (1)..(25): SEQ ID NO: 3265; WAN024ADB; Start 73; Stop 97
ctcacttctgcttttctcaactttt

SEQ ID NO: 350831 - DNA, 25 bp, Artificial
  probe
  misc_feature (1)..(25): SEQ ID NO: 3265; WAN024ADB; Start 72; Stop 96
tctcacttctgcttttctcaacttt

SEQ ID NO: 350832 - DNA, 25 bp, Artificial
  probe
  misc_feature (1)..(25): SEQ ID NO: 3265; WAN024ADB; Start 74; Stop 98
tcacttctgcttttctcaactttta

SEQ ID NO: 350833 - DNA, 25 bp, Artificial
  probe
  misc_feature (1)..(25): SEQ ID NO: 3265; WAN024ADB; Start 71; Stop 95
ctctcacttctgcttttctcaactt

SEQ ID NO: 350834 - DNA, 25 bp, Artificial
  probe
  misc_feature (1)..(25): SEQ ID NO: 3265; WAN024ADB; Start 75; Stop 99
cacttctgcttttctcaacttttat

SEQ ID NO: 350835 - DNA, 25 bp, Artificial
  probe
  misc_feature (1)..(25): SEQ ID NO: 3265; WAN024ADB; Start 49; Stop 73
cttaatgtcacaaggcgagaagctc

SEQ ID NO: 350836 - DNA, 25 bp, Artificial
  probe
  misc_feature (1)..(25): SEQ ID NO: 3265; WAN024ADB; Start 50; Stop 74
ttaatgtcacaaggcgagaagctct

SEQ ID NO: 350837 - DNA, 25 bp, Artificial
  probe
  misc_feature (1)..(25): SEQ ID NO: 3265; WAN024ADB; Start 48; Stop 72
acttaatgtcacaaggcgagaagct

SEQ ID NO: 350838 - DNA, 25 bp, Artificial
  probe
  misc_feature (1)..(25): SEQ ID NO: 3265; WAN024ADB; Start 70; Stop 94
gctctcacttctgcttttctcaact

SEQ ID NO: 350839 - DNA, 25 bp, Artificial
  probe
  misc_feature (1)..(25): SEQ ID NO: 3265; WAN024ADB; Start 51; Stop 75
taatgtcacaaggcgagaagctctc

SEQ ID NO: 350840 - DNA, 25 bp, Artificial
  probe
  misc_feature (1)..(25): SEQ ID NO: 3265; WAN024ADB; Start 15; Stop 39
ttcttcgaaacttttcatccgtagg

SEQ ID NO: 350841 - DNA, 25 bp, Artificial
  probe
  misc_feature (1)..(25): SEQ ID NO: 3265; WAN024ADB; Start 69; Stop 93
agctctcacttctgcttttctcaac

SEQ ID NO: 350842 - DNA, 25 bp, Artificial
  probe
  misc_feature (1)..(25): SEQ ID NO: 3265; WAN024ADB; Start 14; Stop 38
tttcttcgaaacttttcatccgtag

SEQ ID NO: 350843 - DNA, 25 bp, Artificial
  probe
  misc_feature (1)..(25): SEQ ID NO: 3265; WAN024ADB; Start 16; Stop 40
tcttcgaaacttttcatccgtaggg

SEQ ID NO: 350844 - DNA, 25 bp, Artificial
  probe
  misc_feature (1)..(25): SEQ ID NO: 3265; WAN024ADB; Start 68; Stop 92
aagctctcacttctgcttttctcaa

SEQ ID NO: 350845 - DNA, 25 bp, Artificial
  probe
  misc_feature (1)..(25): SEQ ID NO: 3265; WAN024ADB; Start 17; Stop 41
cttcgaaacttttcatccgtagggc

SEQ ID NO: 350846 - DNA, 25 bp, Artificial
  probe
  misc_feature (1)..(25): SEQ ID NO: 3265; WAN024ADB; Start 67; Stop 91
gaagctctcacttctgcttttctca

SEQ ID NO: 350847 - DNA, 25 bp, Artificial
  probe
  misc_feature (1)..(25): SEQ ID NO: 3267; WAN024AFL; Start 79; Stop 103
tgttcatatcattcacgtctttcaa

SEQ ID NO: 350848 - DNA, 25 bp, Artificial
  probe
  misc_feature (1)..(25): SEQ ID NO: 3267; WAN024AFL; Start 78; Stop 102
atgttcatatcattcacgtctttca

SEQ ID NO: 350849 - DNA, 25 bp, Artificial
  probe
  misc_feature (1)..(25): SEQ ID NO: 3267; WAN024AFL; Start 77; Stop 101
catgttcatatcattcacgtctttc

SEQ ID NO: 350850 - DNA, 25 bp, Artificial
  probe
  misc_feature (1)..(25): SEQ ID NO: 3267; WAN024AFL; Start 71; Stop 95
caaggacatgttcatatcattcacg

SEQ ID NO: 350851 - DNA, 25 bp, Artificial
  probe
  misc_feature (1)..(25): SEQ ID NO: 3267; WAN024AFL; Start 70; Stop 94
gcaaggacatgttcatatcattcac

SEQ ID NO: 350852 - DNA, 25 bp, Artificial
  probe
  misc_feature (1)..(25): SEQ ID NO: 3267; WAN024AFL; Start 72; Stop 96
aaggacatgttcatatcattcacgt

SEQ ID NO: 350853 - DNA, 25 bp, Artificial
  probe
  misc_feature (1)..(25): SEQ ID NO: 3267; WAN024AFL; Start 80; Stop 104
gttcatatcattcacgtctttcaat

SEQ ID NO: 350854 - DNA, 25 bp, Artificial
  probe
  misc_feature (1)..(25): SEQ ID NO: 3267; WAN024AFL; Start 75; Stop 99
gacatgttcatatcattcacgtctt

SEQ ID NO: 350855 - DNA, 25 bp, Artificial
  probe
  misc_feature (1)..(25): SEQ ID NO: 3267; WAN024AFL; Start 74; Stop 98
ggacatgttcatatcattcacgtct

SEQ ID NO: 350856 - DNA, 25 bp, Artificial
  probe
  misc_feature (1)..(25): SEQ ID NO: 3267; WAN024AFL; Start 73; Stop 97
aggacatgttcatatcattcacgtc

SEQ ID NO: 350857 - DNA, 25 bp, Artificial
  probe
  misc_feature (1)..(25): SEQ ID NO: 3267; WAN024AFL; Start 81; Stop 105
ttcatatcattcacgtctttcaatt

SEQ ID NO: 350858 - DNA, 25 bp, Artificial
  probe
  misc_feature (1)..(25): SEQ ID NO: 3267; WAN024AFL; Start 82; Stop 106
tcatatcattcacgtctttcaatta

SEQ ID NO: 350859 - DNA, 25 bp, Artificial
  probe
  misc_feature (1)..(25): SEQ ID NO: 3267; WAN024AFL; Start 76; Stop 100
acatgttcatatcattcacgtcttt

SEQ ID NO: 350860 - DNA, 25 bp, Artificial
  probe
  misc_feature (1)..(25): SEQ ID NO: 3267; WAN024AFL; Start 83; Stop 107
catatcattcacgtctttcaattat

SEQ ID NO: 350861 - DNA, 25 bp, Artificial
  probe
  misc_feature (1)..(25): SEQ ID NO: 3267; WAN024AFL; Start 86; Stop 110
atcattcacgtctttcaattataaa

SEQ ID NO: 350862 - DNA, 25 bp, Artificial
  probe
  misc_feature (1)..(25): SEQ ID NO: 3267; WAN024AFL; Start 87; Stop 111
tcattcacgtctttcaattataaaa

SEQ ID NO: 350863 - DNA, 25 bp, Artificial
  probe
  misc_feature (1)..(25): SEQ ID NO: 3267; WAN024AFL; Start 114; Stop 138
aaaataccctaagatattttgcttt

SEQ ID NO: 350864 - DNA, 25 bp, Artificial
  probe
  misc_feature (1)..(25): SEQ ID NO: 3268; WAN024AG8; Start 189; Stop 213
cgtcactctgttataagcatccaac

SEQ ID NO: 350865 - DNA, 25 bp, Artificial
  probe
  misc_feature (1)..(25): SEQ ID NO: 3268; WAN024AG8; Start 125; Stop 149
tcaccactatcaaacaaatgtccta

SEQ ID NO: 350866 - DNA, 25 bp, Artificial
  probe
  misc_feature (1)..(25): SEQ ID NO: 3268; WAN024AG8; Start 124; Stop 148
atcaccactatcaaacaaatgtcct

SEQ ID NO: 350867 - DNA, 25 bp, Artificial
  probe
  misc_feature (1)..(25): SEQ ID NO: 3268; WAN024AG8; Start 126; Stop 150
caccactatcaaacaaatgtcctaa

SEQ ID NO: 350868 - DNA, 25 bp, Artificial
  probe
  misc_feature (1)..(25): SEQ ID NO: 3268; WAN024AG8; Start 123; Stop 147
tatcaccactatcaaacaaatgtcc

SEQ ID NO: 350869 - DNA, 25 bp, Artificial
  probe
  misc_feature (1)..(25): SEQ ID NO: 3268; WAN024AG8; Start 127; Stop 151
accactatcaaacaaatgtcctaaa

SEQ ID NO: 350870 - DNA, 25 bp, Artificial
  probe
  misc_feature (1)..(25): SEQ ID NO: 3268; WAN024AG8; Start 91; Stop 115
actccacaaattatgtagcagattt

SEQ ID NO: 350871 - DNA, 25 bp, Artificial
  probe
  misc_feature (1)..(25): SEQ ID NO: 3268; WAN024AG8; Start 90; Stop 114
aactccacaaattatgtagcagatt

SEQ ID NO: 350872 - DNA, 25 bp, Artificial
  probe
  misc_feature (1)..(25): SEQ ID NO: 3268; WAN024AG8; Start 89; Stop 113
aaactccacaaattatgtagcagat

SEQ ID NO: 350873 - DNA, 25 bp, Artificial
  probe
  misc_feature (1)..(25): SEQ ID NO: 3268; WAN024AG8; Start 188; Stop 212
gcgtcactctgttataagcatccaa

SEQ ID NO: 350874 - DNA, 25 bp, Artificial
  probe
  misc_feature (1)..(25): SEQ ID NO: 3268; WAN024AG8; Start 185; Stop 209
atggcgtcactctgttataagcatc

SEQ ID NO: 350875 - DNA, 25 bp, Artificial
  probe
  misc_feature (1)..(25): SEQ ID NO: 3268; WAN024AG8; Start 184; Stop 208
gatggcgtcactctgttataagcat

SEQ ID NO: 350876 - DNA, 25 bp, Artificial
  probe
  misc_feature (1)..(25): SEQ ID NO: 3268; WAN024AG8; Start 128; Stop 152
ccactatcaaacaaatgtcctaaat

SEQ ID NO: 350877 - DNA, 25 bp, Artificial
  probe
  misc_feature (1)..(25): SEQ ID NO: 3268; WAN024AG8; Start 122; Stop 146
ttatcaccactatcaaacaaatgtc

SEQ ID NO: 350878 - DNA, 25 bp, Artificial
  probe
  misc_feature (1)..(25): SEQ ID NO: 3268; WAN024AG8; Start 164; Stop 188
tttatctctattagcccagtgatgg

SEQ ID NO: 350879 - DNA, 25 bp, Artificial
  probe
  misc_feature (1)..(25): SEQ ID NO: 3268; WAN024AG8; Start 192; Stop 216
cactctgttataagcatccaacaac

SEQ ID NO: 350880 - DNA, 25 bp, Artificial
  probe
  misc_feature (1)..(25): SEQ ID NO: 3268; WAN024AG8; Start 191; Stop 215
tcactctgttataagcatccaacaa

SEQ ID NO: 350881 - DNA, 25 bp, Artificial
  probe
  misc_feature (1)..(25): SEQ ID NO: 3268; WAN024AG8; Start 118; Stop 142
aactttatcaccactatcaaacaaa

SEQ ID NO: 350882 - DNA, 25 bp, Artificial
  probe
  misc_feature (1)..(25): SEQ ID NO: 3268; WAN024AG8; Start 117; Stop 141
aaactttatcaccactatcaaacaa

SEQ ID NO: 350883 - DNA, 25 bp, Artificial
  probe
  misc_feature (1)..(25): SEQ ID NO: 3268; WAN024AG8; Start 121; Stop 145
tttatcaccactatcaaacaaatgt

SEQ ID NO: 350884 - DNA, 25 bp, Artificial
  probe
  misc_feature (1)..(25): SEQ ID NO: 3268; WAN024AG8; Start 52; Stop 76
ctatttgcaggttaggttaaactcc

SEQ ID NO: 350885 - DNA, 25 bp, Artificial
  probe
  misc_feature (1)..(25): SEQ ID NO: 3268; WAN024AG8; Start 190; Stop 214
gtcactctgttataagcatccaaca

SEQ ID NO: 350886 - DNA, 25 bp, Artificial
  probe
  misc_feature (1)..(25): SEQ ID NO: 3268; WAN024AG8; Start 119; Stop 143
actttatcaccactatcaaacaaat

SEQ ID NO: 350887 - DNA, 25 bp, Artificial
  probe
  misc_feature (1)..(25): SEQ ID NO: 3268; WAN024AG8; Start 120; Stop 144
ctttatcaccactatcaaacaaatg

SEQ ID NO: 350888 - DNA, 25 bp, Artificial
  probe
  misc_feature (1)..(25): SEQ ID NO: 3268; WAN024AG8; Start 193; Stop 217
actctgttataagcatccaacaacg

SEQ ID NO: 350889 - DNA, 25 bp, Artificial
  probe
  misc_feature (1)..(25): SEQ ID NO: 3268; WAN024AG8; Start 92; Stop 116
ctccacaaattatgtagcagattta

SEQ ID NO: 350890 - DNA, 25 bp, Artificial
  probe
  misc_feature (1)..(25): SEQ ID NO: 3268; WAN024AG8; Start 130; Stop 154
actatcaaacaaatgtcctaaatca

SEQ ID NO: 350891 - DNA, 25 bp, Artificial
  probe
  misc_feature (1)..(25): SEQ ID NO: 3268; WAN024AG8; Start 53; Stop 77
tatttgcaggttaggttaaactcct

SEQ ID NO: 350892 - DNA, 25 bp, Artificial
  probe
  misc_feature (1)..(25): SEQ ID NO: 3268; WAN024AG8; Start 194; Stop 218
ctctgttataagcatccaacaacgg

SEQ ID NO: 350893 - DNA, 25 bp, Artificial
  probe
  misc_feature (1)..(25): SEQ ID NO: 3268; WAN024AG8; Start 200; Stop 224
tataagcatccaacaacggggtata

SEQ ID NO: 350894 - DNA, 25 bp, Artificial
  probe
  misc_feature (1)..(25): SEQ ID NO: 3268; WAN024AG8; Start 129; Stop 153
cactatcaaacaaatgtcctaaatc

SEQ ID NO: 350895 - DNA, 25 bp, Artificial
  probe
  misc_feature (1)..(25): SEQ ID NO: 3268; WAN024AG8; Start 183; Stop 207
tgatggcgtcactctgttataagca

SEQ ID NO: 350896 - DNA, 25 bp, Artificial
  probe
  misc_feature (1)..(25): SEQ ID NO: 3268; WAN024AG8; Start 93; Stop 117
tccacaaattatgtagcagatttaa

SEQ ID NO: 350897 - DNA, 25 bp, Artificial
  probe
  misc_feature (1)..(25): SEQ ID NO: 3269; WAN024AIG; Start 110; Stop 134
tagcattacctagattgagtcagag

SEQ ID NO: 350898 - DNA, 25 bp, Artificial
  probe
  misc_feature (1)..(25): SEQ ID NO: 3269; WAN024AIG; Start 111; Stop 135
agcattacctagattgagtcagagg

SEQ ID NO: 350899 - DNA, 25 bp, Artificial
  probe
  misc_feature (1)..(25): SEQ ID NO: 3269; WAN024AIG; Start 85; Stop 109
cattatcatttccacttccatcagc

SEQ ID NO: 350900 - DNA, 25 bp, Artificial
  probe
  misc_feature (1)..(25): SEQ ID NO: 3269; WAN024AIG; Start 84; Stop 108
ccattatcatttccacttccatcag

SEQ ID NO: 350901 - DNA, 25 bp, Artificial
  probe
  misc_feature (1)..(25): SEQ ID NO: 3269; WAN024AIG; Start 135; Stop 159
ggatctaacagtcgttaatctcagc

SEQ ID NO: 350902 - DNA, 25 bp, Artificial
  probe
  misc_feature (1)..(25): SEQ ID NO: 3269; WAN024AIG; Start 109; Stop 133
ctagcattacctagattgagtcaga

SEQ ID NO: 350903 - DNA, 25 bp, Artificial
  probe
  misc_feature (1)..(25): SEQ ID NO: 3269; WAN024AIG; Start 83; Stop 107
cccattatcatttccacttccatca

SEQ ID NO: 350904 - DNA, 25 bp, Artificial
  probe
  misc_feature (1)..(25): SEQ ID NO: 3269; WAN024AIG; Start 137; Stop 161
atctaacagtcgttaatctcagctt

SEQ ID NO: 350905 - DNA, 25 bp, Artificial
  probe
  misc_feature (1)..(25): SEQ ID NO: 3269; WAN024AIG; Start 136; Stop 160
gatctaacagtcgttaatctcagct

SEQ ID NO: 350906 - DNA, 25 bp, Artificial
  probe
  misc_feature (1)..(25): SEQ ID NO: 3269; WAN024AIG; Start 11; Stop 35
ccaaccaactgaagtttgtattctt

SEQ ID NO: 350907 - DNA, 25 bp, Artificial
  probe
  misc_feature (1)..(25): SEQ ID NO: 3269; WAN024AIG; Start 322; Stop 346
actgatgagtgtaattgacaaatgt

SEQ ID NO: 350908 - DNA, 25 bp, Artificial
  probe
  misc_feature (1)..(25): SEQ ID NO: 3269; WAN024AIG; Start 123; Stop 147
attgagtcagagggatctaacagtc

SEQ ID NO: 350909 - DNA, 25 bp, Artificial
  probe
  misc_feature (1)..(25): SEQ ID NO: 3269; WAN024AIG; Start 122; Stop 146
gattgagtcagagggatctaacagt

SEQ ID NO: 350910 - DNA, 25 bp, Artificial
  probe
  misc_feature (1)..(25): SEQ ID NO: 3269; WAN024AIG; Start 114; Stop 138
attacctagattgagtcagagggat

SEQ ID NO: 350911 - DNA, 25 bp, Artificial
  probe
  misc_feature (1)..(25): SEQ ID NO: 3269; WAN024AIG; Start 88; Stop 112
tatcatttccacttccatcagctag

SEQ ID NO: 350912 - DNA, 25 bp, Artificial
  probe
  misc_feature (1)..(25): SEQ ID NO: 3269; WAN024AIG; Start 10; Stop 34
cccaaccaactgaagtttgtattct

SEQ ID NO: 350913 - DNA, 25 bp, Artificial
  probe
  misc_feature (1)..(25): SEQ ID NO: 3269; WAN024AIG; Start 9; Stop 33
tcccaaccaactgaagtttgtattc

SEQ ID NO: 350914 - DNA, 25 bp, Artificial
  probe
  misc_feature (1)..(25): SEQ ID NO: 3269; WAN024AIG; Start 8; Stop 32
ctcccaaccaactgaagtttgtatt

SEQ ID NO: 350915 - DNA, 25 bp, Artificial
  probe
  misc_feature (1)..(25): SEQ ID NO: 3269; WAN024AIG; Start 87; Stop 111
ttatcatttccacttccatcagcta

SEQ ID NO: 350916 - DNA, 25 bp, Artificial
  probe
  misc_feature (1)..(25): SEQ ID NO: 3269; WAN024AIG; Start 86; Stop 110
attatcatttccacttccatcagct

SEQ ID NO: 350917 - DNA, 25 bp, Artificial
  probe
  misc_feature (1)..(25): SEQ ID NO: 3269; WAN024AIG; Start 113; Stop 137
cattacctagattgagtcagaggga

SEQ ID NO: 350918 - DNA, 25 bp, Artificial
  probe
  misc_feature (1)..(25): SEQ ID NO: 3269; WAN024AIG; Start 115; Stop 139
ttacctagattgagtcagagggatc

SEQ ID NO: 350919 - DNA, 25 bp, Artificial
  probe
  misc_feature (1)..(25): SEQ ID NO: 3269; WAN024AIG; Start 132; Stop 156
gagggatctaacagtcgttaatctc

SEQ ID NO: 350920 - DNA, 25 bp, Artificial
  probe
  misc_feature (1)..(25): SEQ ID NO: 3269; WAN024AIG; Start 134; Stop 158
gggatctaacagtcgttaatctcag

SEQ ID NO: 350921 - DNA, 25 bp, Artificial
  probe
  misc_feature (1)..(25): SEQ ID NO: 3269; WAN024AIG; Start 131; Stop 155
agagggatctaacagtcgttaatct

SEQ ID NO: 350922 - DNA, 25 bp, Artificial
  probe
  misc_feature (1)..(25): SEQ ID NO: 3269; WAN024AIG; Start 130; Stop 154
cagagggatctaacagtcgttaatc

SEQ ID NO: 350923 - DNA, 25 bp, Artificial
  probe
  misc_feature (1)..(25): SEQ ID NO: 3269; WAN024AIG; Start 133; Stop 157
agggatctaacagtcgttaatctca

SEQ ID NO: 350924 - DNA, 25 bp, Artificial
  probe
  misc_feature (1)..(25): SEQ ID NO: 3269; WAN024AIG; Start 129; Stop 153
tcagagggatctaacagtcgttaat

SEQ ID NO: 350925 - DNA, 25 bp, Artificial
  probe
  misc_feature (1)..(25): SEQ ID NO: 3269; WAN024AIG; Start 12; Stop 36
caaccaactgaagtttgtattctta

SEQ ID NO: 350926 - DNA, 25 bp, Artificial
  probe
  misc_feature (1)..(25): SEQ ID NO: 3269; WAN024AIG; Start 128; Stop 152
gtcagagggatctaacagtcgttaa

SEQ ID NO: 350927 - DNA, 25 bp, Artificial
  probe
  misc_feature (1)..(25): SEQ ID NO: 3269; WAN024AIG; Start 324; Stop 348
tgatgagtgtaattgacaaatgtag

SEQ ID NO: 350928 - DNA, 25 bp, Artificial
  probe
  misc_feature (1)..(25): SEQ ID NO: 3269; WAN024AIG; Start 323; Stop 347
ctgatgagtgtaattgacaaatgta

SEQ ID NO: 350929 - DNA, 25 bp, Artificial
  probe
  misc_feature (1)..(25): SEQ ID NO: 3269; WAN024AIG; Start 321; Stop 345
tactgatgagtgtaattgacaaatg

SEQ ID NO: 350930 - DNA, 25 bp, Artificial
  probe
  misc_feature (1)..(25): SEQ ID NO: 3270; WAN0249WB; Start 89; Stop 113
tgagtttgtctattcagaaattctt

SEQ ID NO: 350931 - DNA, 25 bp, Artificial
  probe
  misc_feature (1)..(25): SEQ ID NO: 3270; WAN0249WB; Start 88; Stop 112
ttgagtttgtctattcagaaattct

SEQ ID NO: 350932 - DNA, 25 bp, Artificial
  probe
  misc_feature (1)..(25): SEQ ID NO: 3270; WAN0249WB; Start 87; Stop 111
tttgagtttgtctattcagaaattc

SEQ ID NO: 350933 - DNA, 25 bp, Artificial
  probe
  misc_feature (1)..(25): SEQ ID NO: 3270; WAN0249WB; Start 63; Stop 87
ttttcctaaatttcccagccatttt

SEQ ID NO: 350934 - DNA, 25 bp, Artificial
  probe
  misc_feature (1)..(25): SEQ ID NO: 3270; WAN0249WB; Start 90; Stop 114
gagtttgtctattcagaaattctta

SEQ ID NO: 350935 - DNA, 25 bp, Artificial
  probe
  misc_feature (1)..(25): SEQ ID NO: 3270; WAN0249WB; Start 86; Stop 110
ttttgagtttgtctattcagaaatt

SEQ ID NO: 350936 - DNA, 25 bp, Artificial
  probe
  misc_feature (1)..(25): SEQ ID NO: 3270; WAN0249WB; Start 107; Stop 131
aattcttattttataagctgcttgt

SEQ ID NO: 350937 - DNA, 25 bp, Artificial
  probe
  misc_feature (1)..(25): SEQ ID NO: 3270; WAN0249WB; Start 103; Stop 127
cagaaattcttattttataagctgc

SEQ ID NO: 350938 - DNA, 25 bp, Artificial
  probe
  misc_feature (1)..(25): SEQ ID NO: 3270; WAN0249WB; Start 110; Stop 134
tcttattttataagctgcttgtaaa

SEQ ID NO: 350939 - DNA, 25 bp, Artificial
  probe
  misc_feature (1)..(25): SEQ ID NO: 3270; WAN0249WB; Start 109; Stop 133
ttcttattttataagctgcttgtaa

SEQ ID NO: 350940 - DNA, 25 bp, Artificial
  probe
  misc_feature (1)..(25): SEQ ID NO: 3270; WAN0249WB; Start 104; Stop 128
agaaattcttattttataagctgct

SEQ ID NO: 350941 - DNA, 25 bp, Artificial
  probe
  misc_feature (1)..(25): SEQ ID NO: 3271; WAN0249SE; Start 38; Stop 62
tttcatcacctgatatgatacgttt

SEQ ID NO: 350942 - DNA, 25 bp, Artificial
  probe
  misc_feature (1)..(25): SEQ ID NO: 3271; WAN0249SE; Start 136; Stop 160
tttgaaaagtatgagctagacattt

SEQ ID NO: 350943 - DNA, 25 bp, Artificial
  probe
  misc_feature (1)..(25): SEQ ID NO: 3271; WAN0249SE; Start 135; Stop 159
ttttgaaaagtatgagctagacatt

SEQ ID NO: 350944 - DNA, 25 bp, Artificial
  probe
  misc_feature (1)..(25): SEQ ID NO: 3271; WAN0249SE; Start 137; Stop 161
ttgaaaagtatgagctagacatttt

SEQ ID NO: 350945 - DNA, 25 bp, Artificial
  probe
  misc_feature (1)..(25): SEQ ID NO: 3271; WAN0249SE; Start 39; Stop 63
ttcatcacctgatatgatacgtttt

SEQ ID NO: 350946 - DNA, 25 bp, Artificial
  probe
  misc_feature (1)..(25): SEQ ID NO: 3271; WAN0249SE; Start 37; Stop 61
ttttcatcacctgatatgatacgtt

SEQ ID NO: 350947 - DNA, 25 bp, Artificial
  probe
  misc_feature (1)..(25): SEQ ID NO: 3271; WAN0249SE; Start 90; Stop 114
tcaacatgcctaggacaagaggaag

SEQ ID NO: 350948 - DNA, 25 bp, Artificial
  probe
  misc_feature (1)..(25): SEQ ID NO: 3271; WAN0249SE; Start 89; Stop 113
ctcaacatgcctaggacaagaggaa

SEQ ID NO: 350949 - DNA, 25 bp, Artificial
  probe
  misc_feature (1)..(25): SEQ ID NO: 3271; WAN0249SE; Start 159; Stop 183
tttatgataaaacaaatcctttgcc

SEQ ID NO: 350950 - DNA, 25 bp, Artificial
  probe
  misc_feature (1)..(25): SEQ ID NO: 3271; WAN0249SE; Start 86; Stop 110
aacctcaacatgcctaggacaagag

SEQ ID NO: 350951 - DNA, 25 bp, Artificial
  probe
  misc_feature (1)..(25): SEQ ID NO: 3271; WAN0249SE; Start 141; Stop 165
aaagtatgagctagacattttatga

SEQ ID NO: 350952 - DNA, 25 bp, Artificial
  probe
  misc_feature (1)..(25): SEQ ID NO: 3271; WAN0249SE; Start 105; Stop 129
caagaggaaggtgacctcgtttaaa

SEQ ID NO: 350953 - DNA, 25 bp, Artificial
  probe
  misc_feature (1)..(25): SEQ ID NO: 3271; WAN0249SE; Start 85; Stop 109
caacctcaacatgcctaggacaaga

SEQ ID NO: 350954 - DNA, 25 bp, Artificial
  probe
  misc_feature (1)..(25): SEQ ID NO: 3271; WAN0249SE; Start 142; Stop 166
aagtatgagctagacattttatgat

SEQ ID NO: 350955 - DNA, 25 bp, Artificial
  probe
  misc_feature (1)..(25): SEQ ID NO: 3271; WAN0249SE; Start 138; Stop 162
tgaaaagtatgagctagacatttta

SEQ ID NO: 350956 - DNA, 25 bp, Artificial
  probe
  misc_feature (1)..(25): SEQ ID NO: 3271; WAN0249SE; Start 91; Stop 115
caacatgcctaggacaagaggaagg

SEQ ID NO: 350957 - DNA, 25 bp, Artificial
  probe
  misc_feature (1)..(25): SEQ ID NO: 3271; WAN0249SE; Start 104; Stop 128
acaagaggaaggtgacctcgtttaa

SEQ ID NO: 350958 - DNA, 25 bp, Artificial
  probe
  misc_feature (1)..(25): SEQ ID NO: 3271; WAN0249SE; Start 140; Stop 164
aaaagtatgagctagacattttatg

SEQ ID NO: 350959 - DNA, 25 bp, Artificial
  probe
  misc_feature (1)..(25): SEQ ID NO: 3271; WAN0249SE; Start 143; Stop 167
agtatgagctagacattttatgata

SEQ ID NO: 350960 - DNA, 25 bp, Artificial
  probe
  misc_feature (1)..(25): SEQ ID NO: 3271; WAN0249SE; Start 103; Stop 127
gacaagaggaaggtgacctcgttta

SEQ ID NO: 350961 - DNA, 25 bp, Artificial
  probe
  misc_feature (1)..(25): SEQ ID NO: 3271; WAN0249SE; Start 139; Stop 163
gaaaagtatgagctagacattttat

SEQ ID NO: 350962 - DNA, 25 bp, Artificial
  probe
  misc_feature (1)..(25): SEQ ID NO: 3271; WAN0249SE; Start 148; Stop 172
gagctagacattttatgataaaaca

SEQ ID NO: 350963 - DNA, 25 bp, Artificial
  probe
  misc_feature (1)..(25): SEQ ID NO: 3271; WAN0249SE; Start 147; Stop 171
tgagctagacattttatgataaaac

SEQ ID NO: 350964 - DNA, 25 bp, Artificial
  probe
  misc_feature (1)..(25): SEQ ID NO: 3271; WAN0249SE; Start 158; Stop 182
ttttatgataaaacaaatcctttgc

SEQ ID NO: 350965 - DNA, 25 bp, Artificial
  probe
  misc_feature (1)..(25): SEQ ID NO: 3271; WAN0249SE; Start 149; Stop 173
agctagacattttatgataaaacaa

SEQ ID NO: 350966 - DNA, 25 bp, Artificial
  probe
  misc_feature (1)..(25): SEQ ID NO: 3271; WAN0249SE; Start 79; Stop 103
ttttcccaacctcaacatgcctagg

SEQ ID NO: 350967 - DNA, 25 bp, Artificial
  probe
  misc_feature (1)..(25): SEQ ID NO: 3272; WAN024A4C; Start 7; Stop 31
ttacctcttttctgatagtcatttt

SEQ ID NO: 350968 - DNA, 25 bp, Artificial
  probe
  misc_feature (1)..(25): SEQ ID NO: 3272; WAN024A4C; Start 6; Stop 30
tttacctcttttctgatagtcattt

SEQ ID NO: 350969 - DNA, 25 bp, Artificial
  probe
  misc_feature (1)..(25): SEQ ID NO: 3272; WAN024A4C; Start 5; Stop 29
atttacctcttttctgatagtcatt

SEQ ID NO: 350970 - DNA, 25 bp, Artificial
  probe
  misc_feature (1)..(25): SEQ ID NO: 3272; WAN024A4C; Start 4; Stop 28
aatttacctcttttctgatagtcat

SEQ ID NO: 350971 - DNA, 25 bp, Artificial
  probe
  misc_feature (1)..(25): SEQ ID NO: 3272; WAN024A4C; Start 3; Stop 27
aaatttacctcttttctgatagtca

SEQ ID NO: 350972 - DNA, 25 bp, Artificial
  probe
  misc_feature (1)..(25): SEQ ID NO: 3273; WAN024AOK; Start 83; Stop 107
ttcgataaaataggagacagttatt

SEQ ID NO: 350973 - DNA, 25 bp, Artificial
  probe
  misc_feature (1)..(25): SEQ ID NO: 3273; WAN024AOK; Start 82; Stop 106
tttcgataaaataggagacagttat

SEQ ID NO: 350974 - DNA, 25 bp, Artificial
  probe
  misc_feature (1)..(25): SEQ ID NO: 3273; WAN024AOK; Start 81; Stop 105
ttttcgataaaataggagacagtta

SEQ ID NO: 350975 - DNA, 25 bp, Artificial
  probe
  misc_feature (1)..(25): SEQ ID NO: 3273; WAN024AOK; Start 84; Stop 108
tcgataaaataggagacagttattt

SEQ ID NO: 350976 - DNA, 25 bp, Artificial
  probe
  misc_feature (1)..(25): SEQ ID NO: 3273; WAN024AOK; Start 85; Stop 109
cgataaaataggagacagttatttt

SEQ ID NO: 350977 - DNA, 25 bp, Artificial
  probe
  misc_feature (1)..(25): SEQ ID NO: 3274; WAN024AIY; Start 89; Stop 113
ccagactctctcactagtaaaggta

SEQ ID NO: 350978 - DNA, 25 bp, Artificial
  probe
  misc_feature (1)..(25): SEQ ID NO: 3274; WAN024AIY; Start 90; Stop 114
cagactctctcactagtaaaggtaa

SEQ ID NO: 350979 - DNA, 25 bp, Artificial
  probe
  misc_feature (1)..(25): SEQ ID NO: 3274; WAN024AIY; Start 91; Stop 115
agactctctcactagtaaaggtaaa

SEQ ID NO: 350980 - DNA, 25 bp, Artificial
  probe
  misc_feature (1)..(25): SEQ ID NO: 3274; WAN024AIY; Start 7; Stop 31
ttagacggtgaaagggtggagacta

SEQ ID NO: 350981 - DNA, 25 bp, Artificial
  probe
  misc_feature (1)..(25): SEQ ID NO: 3274; WAN024AIY; Start 1; Stop 25
ctaaggttagacggtgaaagggtgg

SEQ ID NO: 350982 - DNA, 25 bp, Artificial
  probe
  misc_feature (1)..(25): SEQ ID NO: 3274; WAN024AIY; Start 2; Stop 26
taaggttagacggtgaaagggtgga

SEQ ID NO: 350983 - DNA, 25 bp, Artificial
  probe
  misc_feature (1)..(25): SEQ ID NO: 3274; WAN024AIY; Start 88; Stop 112
gccagactctctcactagtaaaggt

SEQ ID NO: 350984 - DNA, 25 bp, Artificial
  probe
  misc_feature (1)..(25): SEQ ID NO: 3274; WAN024AIY; Start 8; Stop 32
tagacggtgaaagggtggagactac

SEQ ID NO: 350985 - DNA, 25 bp, Artificial
  probe
  misc_feature (1)..(25): SEQ ID NO: 3274; WAN024AIY; Start 95; Stop 119
tctctcactagtaaaggtaaaagga

SEQ ID NO: 350986 - DNA, 25 bp, Artificial
  probe
  misc_feature (1)..(25): SEQ ID NO: 3274; WAN024AIY; Start 94; Stop 118
ctctctcactagtaaaggtaaaagg

SEQ ID NO: 350987 - DNA, 25 bp, Artificial
  probe
  misc_feature (1)..(25): SEQ ID NO: 3274; WAN024AIY; Start 87; Stop 111
ggccagactctctcactagtaaagg

SEQ ID NO: 350988 - DNA, 25 bp, Artificial
  probe
  misc_feature (1)..(25): SEQ ID NO: 3274; WAN024AIY; Start 96; Stop 120
ctctcactagtaaaggtaaaaggag

SEQ ID NO: 350989 - DNA, 25 bp, Artificial
  probe
  misc_feature (1)..(25): SEQ ID NO: 3274; WAN024AIY; Start 100; Stop 124
cactagtaaaggtaaaaggagaaac

SEQ ID NO: 350990 - DNA, 25 bp, Artificial
  probe
  misc_feature (1)..(25): SEQ ID NO: 3274; WAN024AIY; Start 99; Stop 123
tcactagtaaaggtaaaaggagaaa

SEQ ID NO: 350991 - DNA, 25 bp, Artificial
  probe
  misc_feature (1)..(25): SEQ ID NO: 3274; WAN024AIY; Start 98; Stop 122
ctcactagtaaaggtaaaaggagaa

SEQ ID NO: 350992 - DNA, 25 bp, Artificial
  probe
  misc_feature (1)..(25): SEQ ID NO: 3274; WAN024AIY; Start 93; Stop 117
actctctcactagtaaaggtaaaag

SEQ ID NO: 350993 - DNA, 25 bp, Artificial
  probe
  misc_feature (1)..(25): SEQ ID NO: 3274; WAN024AIY; Start 92; Stop 116
gactctctcactagtaaaggtaaaa

SEQ ID NO: 350994 - DNA, 25 bp, Artificial
  probe
  misc_feature (1)..(25): SEQ ID NO: 3274; WAN024AIY; Start 101; Stop 125
actagtaaaggtaaaaggagaaacc

SEQ ID NO: 350995 - DNA, 25 bp, Artificial
  probe
  misc_feature (1)..(25): SEQ ID NO: 3274; WAN024AIY; Start 97; Stop 121
tctcactagtaaaggtaaaaggaga

SEQ ID NO: 350996 - DNA, 25 bp, Artificial
  probe
  misc_feature (1)..(25): SEQ ID NO: 3274; WAN024AIY; Start 102; Stop 126
ctagtaaaggtaaaaggagaaacct

SEQ ID NO: 350997 - DNA, 25 bp, Artificial
  probe
  misc_feature (1)..(25): SEQ ID NO: 3275; WAN024AAH; Start 323; Stop 347
tatatggcttcaagtcacgattctg

SEQ ID NO: 350998 - DNA, 25 bp, Artificial
  probe
  misc_feature (1)..(25): SEQ ID NO: 3275; WAN024AAH; Start 129; Stop 153
taattgttcacttcttcgctccatt

SEQ ID NO: 350999 - DNA, 25 bp, Artificial
  probe
  misc_feature (1)..(25): SEQ ID NO: 3275; WAN024AAH; Start 128; Stop 152
ttaattgttcacttcttcgctccat

SEQ ID NO: 351000 - DNA, 25 bp, Artificial
  probe
  misc_feature (1)..(25): SEQ ID NO: 3275; WAN024AAH; Start 322; Stop 346
atatatggcttcaagtcacgattct

SEQ ID NO: 351001 - DNA, 25 bp, Artificial
  probe
  misc_feature (1)..(25): SEQ ID NO: 3275; WAN024AAH; Start 319; Stop 343
gctatatatggcttcaagtcacgat

SEQ ID NO: 351002 - DNA, 25 bp, Artificial
  probe
  misc_feature (1)..(25): SEQ ID NO: 3275; WAN024AAH; Start 312; Stop 336
ctcatccgctatatatggcttcaag

SEQ ID NO: 351003 - DNA, 25 bp, Artificial
  probe
  misc_feature (1)..(25): SEQ ID NO: 3275; WAN024AAH; Start 321; Stop 345
tatatatggcttcaagtcacgattc

SEQ ID NO: 351004 - DNA, 25 bp, Artificial
  probe
  misc_feature (1)..(25): SEQ ID NO: 3275; WAN024AAH; Start 320; Stop 344
ctatatatggcttcaagtcacgatt

SEQ ID NO: 351005 - DNA, 25 bp, Artificial
  probe
  misc_feature (1)..(25): SEQ ID NO: 3275; WAN024AAH; Start 314; Stop 338
catccgctatatatggcttcaagtc

SEQ ID NO: 351006 - DNA, 25 bp, Artificial
  probe
  misc_feature (1)..(25): SEQ ID NO: 3275; WAN024AAH; Start 315; Stop 339
atccgctatatatggcttcaagtca

SEQ ID NO: 351007 - DNA, 25 bp, Artificial
  probe
  misc_feature (1)..(25): SEQ ID NO: 3275; WAN024AAH; Start 324; Stop 348
atatggcttcaagtcacgattctgt

SEQ ID NO: 351008 - DNA, 25 bp, Artificial
  probe
  misc_feature (1)..(25): SEQ ID NO: 3275; WAN024AAH; Start 313; Stop 337
tcatccgctatatatggcttcaagt

SEQ ID NO: 351009 - DNA, 25 bp, Artificial
  probe
  misc_feature (1)..(25): SEQ ID NO: 3275; WAN024AAH; Start 305; Stop 329
agagttcctcatccgctatatatgg

SEQ ID NO: 351010 - DNA, 25 bp, Artificial
  probe
  misc_feature (1)..(25): SEQ ID NO: 3275; WAN024AAH; Start 304; Stop 328
tagagttcctcatccgctatatatg

SEQ ID NO: 351011 - DNA, 25 bp, Artificial
  probe
  misc_feature (1)..(25): SEQ ID NO: 3275; WAN024AAH; Start 325; Stop 349
tatggcttcaagtcacgattctgtt

SEQ ID NO: 351012 - DNA, 25 bp, Artificial
  probe
  misc_feature (1)..(25): SEQ ID NO: 3275; WAN024AAH; Start 309; Stop 333
ttcctcatccgctatatatggcttc

SEQ ID NO: 351013 - DNA, 25 bp, Artificial
  probe
  misc_feature (1)..(25): SEQ ID NO: 3275; WAN024AAH; Start 81; Stop 105
tcataccaggaattagaattgacaa

SEQ ID NO: 351014 - DNA, 25 bp, Artificial
  probe
  misc_feature (1)..(25): SEQ ID NO: 3275; WAN024AAH; Start 80; Stop 104
ttcataccaggaattagaattgaca

SEQ ID NO: 351015 - DNA, 25 bp, Artificial
  probe
  misc_feature (1)..(25): SEQ ID NO: 3275; WAN024AAH; Start 311; Stop 335
cctcatccgctatatatggcttcaa

SEQ ID NO: 351016 - DNA, 25 bp, Artificial
  probe
  misc_feature (1)..(25): SEQ ID NO: 3275; WAN024AAH; Start 308; Stop 332
gttcctcatccgctatatatggctt

SEQ ID NO: 351017 - DNA, 25 bp, Artificial
  probe
  misc_feature (1)..(25): SEQ ID NO: 3275; WAN024AAH; Start 392; Stop 416
ctcacgatattcaggcttaggagtc

SEQ ID NO: 351018 - DNA, 25 bp, Artificial
  probe
  misc_feature (1)..(25): SEQ ID NO: 3275; WAN024AAH; Start 316; Stop 340
tccgctatatatggcttcaagtcac

SEQ ID NO: 351019 - DNA, 25 bp, Artificial
  probe
  misc_feature (1)..(25): SEQ ID NO: 3275; WAN024AAH; Start 303; Stop 327
ttagagttcctcatccgctatatat

SEQ ID NO: 351020 - DNA, 25 bp, Artificial
  probe
  misc_feature (1)..(25): SEQ ID NO: 3275; WAN024AAH; Start 126; Stop 150
atttaattgttcacttcttcgctcc

SEQ ID NO: 351021 - DNA, 25 bp, Artificial
  probe
  misc_feature (1)..(25): SEQ ID NO: 3275; WAN024AAH; Start 124; Stop 148
tcatttaattgttcacttcttcgct

SEQ ID NO: 351022 - DNA, 25 bp, Artificial
  probe
  misc_feature (1)..(25): SEQ ID NO: 3275; WAN024AAH; Start 357; Stop 381
ccttgatttcgctaattccttccta

SEQ ID NO: 351023 - DNA, 25 bp, Artificial
  probe
  misc_feature (1)..(25): SEQ ID NO: 3275; WAN024AAH; Start 360; Stop 384
tgatttcgctaattccttcctatcc

SEQ ID NO: 351024 - DNA, 25 bp, Artificial
  probe
  misc_feature (1)..(25): SEQ ID NO: 3275; WAN024AAH; Start 388; Stop 412
ctacctcacgatattcaggcttagg

SEQ ID NO: 351025 - DNA, 25 bp, Artificial
  probe
  misc_feature (1)..(25): SEQ ID NO: 3275; WAN024AAH; Start 387; Stop 411
cctacctcacgatattcaggcttag

SEQ ID NO: 351026 - DNA, 25 bp, Artificial
  probe
  misc_feature (1)..(25): SEQ ID NO: 3275; WAN024AAH; Start 125; Stop 149
catttaattgttcacttcttcgctc

SEQ ID NO: 351027 - DNA, 25 bp, Artificial
  probe
  misc_feature (1)..(25): SEQ ID NO: 3275; WAN024AAH; Start 347; Stop 371
gtttgtagaaccttgatttcgctaa

SEQ ID NO: 351028 - DNA, 25 bp, Artificial
  probe
  misc_feature (1)..(25): SEQ ID NO: 3275; WAN024AAH; Start 352; Stop 376
tagaaccttgatttcgctaattcct

SEQ ID NO: 351029 - DNA, 25 bp, Artificial
  probe
  misc_feature (1)..(25): SEQ ID NO: 3275; WAN024AAH; Start 351; Stop 375
gtagaaccttgatttcgctaattcc

SEQ ID NO: 351030 - DNA, 25 bp, Artificial
  probe
  misc_feature (1)..(25): SEQ ID NO: 3276; WAN0249IY; Start 108; Stop 132
ctttattataccaagtccaccctta

SEQ ID NO: 351031 - DNA, 25 bp, Artificial
  probe
  misc_feature (1)..(25): SEQ ID NO: 3276; WAN0249IY; Start 109; Stop 133
tttattataccaagtccacccttaa

SEQ ID NO: 351032 - DNA, 25 bp, Artificial
  probe
  misc_feature (1)..(25): SEQ ID NO: 3276; WAN0249IY; Start 118; Stop 142
ccaagtccacccttaagttagataa

SEQ ID NO: 351033 - DNA, 25 bp, Artificial
  probe
  misc_feature (1)..(25): SEQ ID NO: 3276; WAN0249IY; Start 117; Stop 141
accaagtccacccttaagttagata

SEQ ID NO: 351034 - DNA, 25 bp, Artificial
  probe
  misc_feature (1)..(25): SEQ ID NO: 3276; WAN0249IY; Start 116; Stop 140
taccaagtccacccttaagttagat

SEQ ID NO: 351035 - DNA, 25 bp, Artificial
  probe
  misc_feature (1)..(25): SEQ ID NO: 3276; WAN0249IY; Start 115; Stop 139
ataccaagtccacccttaagttaga

SEQ ID NO: 351036 - DNA, 25 bp, Artificial
  probe
  misc_feature (1)..(25): SEQ ID NO: 3276; WAN0249IY; Start 69; Stop 93
ataatgacttttcctcgtttccact

SEQ ID NO: 351037 - DNA, 25 bp, Artificial
  probe
  misc_feature (1)..(25): SEQ ID NO: 3276; WAN0249IY; Start 112; Stop 136
attataccaagtccacccttaagtt

SEQ ID NO: 351038 - DNA, 25 bp, Artificial
  probe
  misc_feature (1)..(25): SEQ ID NO: 3276; WAN0249IY; Start 60; Stop 84
tttcttggcataatgacttttcctc

SEQ ID NO: 351039 - DNA, 25 bp, Artificial
  probe
  misc_feature (1)..(25): SEQ ID NO: 3276; WAN0249IY; Start 71; Stop 95
aatgacttttcctcgtttccactta

SEQ ID NO: 351040 - DNA, 25 bp, Artificial
  probe
  misc_feature (1)..(25): SEQ ID NO: 3276; WAN0249IY; Start 70; Stop 94
taatgacttttcctcgtttccactt

SEQ ID NO: 351041 - DNA, 25 bp, Artificial
  probe
  misc_feature (1)..(25): SEQ ID NO: 3276; WAN0249IY; Start 68; Stop 92
cataatgacttttcctcgtttccac

SEQ ID NO: 351042 - DNA, 25 bp, Artificial
  probe
  misc_feature (1)..(25): SEQ ID NO: 3276; WAN0249IY; Start 114; Stop 138
tataccaagtccacccttaagttag

SEQ ID NO: 351043 - DNA, 25 bp, Artificial
  probe
  misc_feature (1)..(25): SEQ ID NO: 3276; WAN0249IY; Start 59; Stop 83
ttttcttggcataatgacttttcct

SEQ ID NO: 351044 - DNA, 25 bp, Artificial
  probe
  misc_feature (1)..(25): SEQ ID NO: 3276; WAN0249IY; Start 73; Stop 97
tgacttttcctcgtttccacttaat

SEQ ID NO: 351045 - DNA, 25 bp, Artificial
  probe
  misc_feature (1)..(25): SEQ ID NO: 3276; WAN0249IY; Start 72; Stop 96
atgacttttcctcgtttccacttaa

SEQ ID NO: 351046 - DNA, 25 bp, Artificial
  probe
  misc_feature (1)..(25): SEQ ID NO: 3276; WAN0249IY; Start 74; Stop 98
gacttttcctcgtttccacttaatt

SEQ ID NO: 351047 - DNA, 25 bp, Artificial
  probe
  misc_feature (1)..(25): SEQ ID NO: 3276; WAN0249IY; Start 78; Stop 102
tttcctcgtttccacttaattttgt

SEQ ID NO: 351048 - DNA, 25 bp, Artificial
  probe
  misc_feature (1)..(25): SEQ ID NO: 3276; WAN0249IY; Start 75; Stop 99
acttttcctcgtttccacttaattt

SEQ ID NO: 351049 - DNA, 25 bp, Artificial
  probe
  misc_feature (1)..(25): SEQ ID NO: 3276; WAN0249IY; Start 113; Stop 137
ttataccaagtccacccttaagtta

SEQ ID NO: 351050 - DNA, 25 bp, Artificial
  probe
  misc_feature (1)..(25): SEQ ID NO: 3276; WAN0249IY; Start 111; Stop 135
tattataccaagtccacccttaagt

SEQ ID NO: 351051 - DNA, 25 bp, Artificial
  probe
  misc_feature (1)..(25): SEQ ID NO: 3276; WAN0249IY; Start 107; Stop 131
actttattataccaagtccaccctt

SEQ ID NO: 351052 - DNA, 25 bp, Artificial
  probe
  misc_feature (1)..(25): SEQ ID NO: 3276; WAN0249IY; Start 64; Stop 88
ttggcataatgacttttcctcgttt

SEQ ID NO: 351053 - DNA, 25 bp, Artificial
  probe
  misc_feature (1)..(25): SEQ ID NO: 3276; WAN0249IY; Start 77; Stop 101
ttttcctcgtttccacttaattttg

SEQ ID NO: 351054 - DNA, 25 bp, Artificial
  probe
  misc_feature (1)..(25): SEQ ID NO: 3276; WAN0249IY; Start 61; Stop 85
ttcttggcataatgacttttcctcg

SEQ ID NO: 351055 - DNA, 25 bp, Artificial
  probe
  misc_feature (1)..(25): SEQ ID NO: 3276; WAN0249IY; Start 28; Stop 52
cagcagagagtttgaaggctttatc

SEQ ID NO: 351056 - DNA, 25 bp, Artificial
  probe
  misc_feature (1)..(25): SEQ ID NO: 3276; WAN0249IY; Start 26; Stop 50
tacagcagagagtttgaaggcttta

SEQ ID NO: 351057 - DNA, 25 bp, Artificial
  probe
  misc_feature (1)..(25): SEQ ID NO: 3276; WAN0249IY; Start 76; Stop 100
cttttcctcgtttccacttaatttt

SEQ ID NO: 351058 - DNA, 25 bp, Artificial
  probe
  misc_feature (1)..(25): SEQ ID NO: 3276; WAN0249IY; Start 67; Stop 91
gcataatgacttttcctcgtttcca

SEQ ID NO: 351059 - DNA, 25 bp, Artificial
  probe
  misc_feature (1)..(25): SEQ ID NO: 3276; WAN0249IY; Start 65; Stop 89
tggcataatgacttttcctcgtttc

SEQ ID NO: 351060 - DNA, 25 bp, Artificial
  probe
  misc_feature (1)..(25): SEQ ID NO: 3276; WAN0249IY; Start 63; Stop 87
cttggcataatgacttttcctcgtt

SEQ ID NO: 351061 - DNA, 25 bp, Artificial
  probe
  misc_feature (1)..(25): SEQ ID NO: 3276; WAN0249IY; Start 106; Stop 130
tactttattataccaagtccaccct

SEQ ID NO: 351062 - DNA, 25 bp, Artificial
  probe
  misc_feature (1)..(25): SEQ ID NO: 3276; WAN0249IY; Start 119; Stop 143
caagtccacccttaagttagataat

SEQ ID NO: 351063 - DNA, 25 bp, Artificial
  probe
  misc_feature (1)..(25): SEQ ID NO: 3277; WAN0249VH; Start 36; Stop 60
agtttcagacctcttatgatttcgt

SEQ ID NO: 351064 - DNA, 25 bp, Artificial
  probe
  misc_feature (1)..(25): SEQ ID NO: 3277; WAN0249VH; Start 56; Stop 80
ttcgtatcagcctgaatgtcatcaa

SEQ ID NO: 351065 - DNA, 25 bp, Artificial
  probe
  misc_feature (1)..(25): SEQ ID NO: 3277; WAN0249VH; Start 37; Stop 61
gtttcagacctcttatgatttcgta

SEQ ID NO: 351066 - DNA, 25 bp, Artificial
  probe
  misc_feature (1)..(25): SEQ ID NO: 3277; WAN0249VH; Start 35; Stop 59
tagtttcagacctcttatgatttcg

SEQ ID NO: 351067 - DNA, 25 bp, Artificial
  probe
  misc_feature (1)..(25): SEQ ID NO: 3277; WAN0249VH; Start 39; Stop 63
ttcagacctcttatgatttcgtatc

SEQ ID NO: 351068 - DNA, 25 bp, Artificial
  probe
  misc_feature (1)..(25): SEQ ID NO: 3277; WAN0249VH; Start 54; Stop 78
atttcgtatcagcctgaatgtcatc

SEQ ID NO: 351069 - DNA, 25 bp, Artificial
  probe
  misc_feature (1)..(25): SEQ ID NO: 3277; WAN0249VH; Start 53; Stop 77
gatttcgtatcagcctgaatgtcat

SEQ ID NO: 351070 - DNA, 25 bp, Artificial
  probe
  misc_feature (1)..(25): SEQ ID NO: 3277; WAN0249VH; Start 38; Stop 62
tttcagacctcttatgatttcgtat

SEQ ID NO: 351071 - DNA, 25 bp, Artificial
  probe
  misc_feature (1)..(25): SEQ ID NO: 3277; WAN0249VH; Start 33; Stop 57
agtagtttcagacctcttatgattt

SEQ ID NO: 351072 - DNA, 25 bp, Artificial
  probe
  misc_feature (1)..(25): SEQ ID NO: 3277; WAN0249VH; Start 32; Stop 56
aagtagtttcagacctcttatgatt

SEQ ID NO: 351073 - DNA, 25 bp, Artificial
  probe
  misc_feature (1)..(25): SEQ ID NO: 3277; WAN0249VH; Start 31; Stop 55
aaagtagtttcagacctcttatgat

SEQ ID NO: 351074 - DNA, 25 bp, Artificial
  probe
  misc_feature (1)..(25): SEQ ID NO: 3277; WAN0249VH; Start 34; Stop 58
gtagtttcagacctcttatgatttc

SEQ ID NO: 351075 - DNA, 25 bp, Artificial
  probe
  misc_feature (1)..(25): SEQ ID NO: 3277; WAN0249VH; Start 57; Stop 81
tcgtatcagcctgaatgtcatcaaa

SEQ ID NO: 351076 - DNA, 25 bp, Artificial
  probe
  misc_feature (1)..(25): SEQ ID NO: 3277; WAN0249VH; Start 55; Stop 79
tttcgtatcagcctgaatgtcatca

SEQ ID NO: 351077 - DNA, 25 bp, Artificial
  probe
  misc_feature (1)..(25): SEQ ID NO: 3277; WAN0249VH; Start 42; Stop 66
agacctcttatgatttcgtatcagc

SEQ ID NO: 351078 - DNA, 25 bp, Artificial
  probe
  misc_feature (1)..(25): SEQ ID NO: 3277; WAN0249VH; Start 95; Stop 119
cttgaaaacctgctatctccttcta

SEQ ID NO: 351079 - DNA, 25 bp, Artificial
  probe
  misc_feature (1)..(25): SEQ ID NO: 3277; WAN0249VH; Start 40; Stop 64
tcagacctcttatgatttcgtatca

SEQ ID NO: 351080 - DNA, 25 bp, Artificial
  probe
  misc_feature (1)..(25): SEQ ID NO: 3277; WAN0249VH; Start 97; Stop 121
tgaaaacctgctatctccttctatt

SEQ ID NO: 351081 - DNA, 25 bp, Artificial
  probe
  misc_feature (1)..(25): SEQ ID NO: 3277; WAN0249VH; Start 96; Stop 120
ttgaaaacctgctatctccttctat

SEQ ID NO: 351082 - DNA, 25 bp, Artificial
  probe
  misc_feature (1)..(25): SEQ ID NO: 3277; WAN0249VH; Start 45; Stop 69
cctcttatgatttcgtatcagcctg

SEQ ID NO: 351083 - DNA, 25 bp, Artificial
  probe
  misc_feature (1)..(25): SEQ ID NO: 3277; WAN0249VH; Start 43; Stop 67
gacctcttatgatttcgtatcagcc

SEQ ID NO: 351084 - DNA, 25 bp, Artificial
  probe
  misc_feature (1)..(25): SEQ ID NO: 3277; WAN0249VH; Start 41; Stop 65
cagacctcttatgatttcgtatcag

SEQ ID NO: 351085 - DNA, 25 bp, Artificial
  probe
  misc_feature (1)..(25): SEQ ID NO: 3277; WAN0249VH; Start 50; Stop 74
tatgatttcgtatcagcctgaatgt

SEQ ID NO: 351086 - DNA, 25 bp, Artificial
  probe
  misc_feature (1)..(25): SEQ ID NO: 3277; WAN0249VH; Start 47; Stop 71
tcttatgatttcgtatcagcctgaa

SEQ ID NO: 351087 - DNA, 25 bp, Artificial
  probe
  misc_feature (1)..(25): SEQ ID NO: 3277; WAN0249VH; Start 46; Stop 70
ctcttatgatttcgtatcagcctga

SEQ ID NO: 351088 - DNA, 25 bp, Artificial
  probe
  misc_feature (1)..(25): SEQ ID NO: 3277; WAN0249VH; Start 44; Stop 68
acctcttatgatttcgtatcagcct

SEQ ID NO: 351089 - DNA, 25 bp, Artificial
  probe
  misc_feature (1)..(25): SEQ ID NO: 3277; WAN0249VH; Start 30; Stop 54
gaaagtagtttcagacctcttatga

SEQ ID NO: 351090 - DNA, 25 bp, Artificial
  probe
  misc_feature (1)..(25): SEQ ID NO: 3277; WAN0249VH; Start 49; Stop 73
ttatgatttcgtatcagcctgaatg

SEQ ID NO: 351091 - DNA, 25 bp, Artificial
  probe
  misc_feature (1)..(25): SEQ ID NO: 3277; WAN0249VH; Start 48; Stop 72
cttatgatttcgtatcagcctgaat

SEQ ID NO: 351092 - DNA, 25 bp, Artificial
  probe
  misc_feature (1)..(25): SEQ ID NO: 3277; WAN0249VH; Start 98; Stop 122
gaaaacctgctatctccttctattt

SEQ ID NO: 351093 - DNA, 25 bp, Artificial
  probe
  misc_feature (1)..(25): SEQ ID NO: 3277; WAN0249VH; Start 51; Stop 75
atgatttcgtatcagcctgaatgtc

SEQ ID NO: 351094 - DNA, 25 bp, Artificial
  probe
  misc_feature (1)..(25): SEQ ID NO: 3277; WAN0249VH; Start 52; Stop 76
tgatttcgtatcagcctgaatgtca

SEQ ID NO: 351095 - DNA, 25 bp, Artificial
  probe
  misc_feature (1)..(25): SEQ ID NO: 3277; WAN0249VH; Start 58; Stop 82
cgtatcagcctgaatgtcatcaaaa

SEQ ID NO: 351096 - DNA, 25 bp, Artificial
  probe
  misc_feature (1)..(25): SEQ ID NO: 3278; WAN024A39; Start 65; Stop 89
cactccagtattatcttcagccgaa

SEQ ID NO: 351097 - DNA, 25 bp, Artificial
  probe
  misc_feature (1)..(25): SEQ ID NO: 3278; WAN024A39; Start 66; Stop 90
actccagtattatcttcagccgaaa

SEQ ID NO: 351098 - DNA, 25 bp, Artificial
  probe
  misc_feature (1)..(25): SEQ ID NO: 3278; WAN024A39; Start 62; Stop 86
ttgcactccagtattatcttcagcc

SEQ ID NO: 351099 - DNA, 25 bp, Artificial
  probe
  misc_feature (1)..(25): SEQ ID NO: 3278; WAN024A39; Start 61; Stop 85
tttgcactccagtattatcttcagc

SEQ ID NO: 351100 - DNA, 25 bp, Artificial
  probe
  misc_feature (1)..(25): SEQ ID NO: 3278; WAN024A39; Start 60; Stop 84
atttgcactccagtattatcttcag

SEQ ID NO: 351101 - DNA, 25 bp, Artificial
  probe
  misc_feature (1)..(25): SEQ ID NO: 3278; WAN024A39; Start 64; Stop 88
gcactccagtattatcttcagccga

SEQ ID NO: 351102 - DNA, 25 bp, Artificial
  probe
  misc_feature (1)..(25): SEQ ID NO: 3278; WAN024A39; Start 53; Stop 77
cccattaatttgcactccagtatta

SEQ ID NO: 351103 - DNA, 25 bp, Artificial
  probe
  misc_feature (1)..(25): SEQ ID NO: 3278; WAN024A39; Start 59; Stop 83
aatttgcactccagtattatcttca

SEQ ID NO: 351104 - DNA, 25 bp, Artificial
  probe
  misc_feature (1)..(25): SEQ ID NO: 3278; WAN024A39; Start 69; Stop 93
ccagtattatcttcagccgaaaatc

SEQ ID NO: 351105 - DNA, 25 bp, Artificial
  probe
  misc_feature (1)..(25): SEQ ID NO: 3278; WAN024A39; Start 68; Stop 92
tccagtattatcttcagccgaaaat

SEQ ID NO: 351106 - DNA, 25 bp, Artificial
  probe
  misc_feature (1)..(25): SEQ ID NO: 3278; WAN024A39; Start 67; Stop 91
ctccagtattatcttcagccgaaaa

SEQ ID NO: 351107 - DNA, 25 bp, Artificial
  probe
  misc_feature (1)..(25): SEQ ID NO: 3278; WAN024A39; Start 72; Stop 96
gtattatcttcagccgaaaatcagt

SEQ ID NO: 351108 - DNA, 25 bp, Artificial
  probe
  misc_feature (1)..(25): SEQ ID NO: 3278; WAN024A39; Start 70; Stop 94
cagtattatcttcagccgaaaatca

SEQ ID NO: 351109 - DNA, 25 bp, Artificial
  probe
  misc_feature (1)..(25): SEQ ID NO: 3278; WAN024A39; Start 71; Stop 95
agtattatcttcagccgaaaatcag

SEQ ID NO: 351110 - DNA, 25 bp, Artificial
  probe
  misc_feature (1)..(25): SEQ ID NO: 3278; WAN024A39; Start 75; Stop 99
ttatcttcagccgaaaatcagtatt

SEQ ID NO: 351111 - DNA, 25 bp, Artificial
  probe
  misc_feature (1)..(25): SEQ ID NO: 3278; WAN024A39; Start 74; Stop 98
attatcttcagccgaaaatcagtat

SEQ ID NO: 351112 - DNA, 25 bp, Artificial
  probe
  misc_feature (1)..(25): SEQ ID NO: 3278; WAN024A39; Start 103; Stop 127
ggttgtttgaaataaacttcctagt

SEQ ID NO: 351113 - DNA, 25 bp, Artificial
  probe
  misc_feature (1)..(25): SEQ ID NO: 3278; WAN024A39; Start 54; Stop 78
ccattaatttgcactccagtattat

SEQ ID NO: 351114 - DNA, 25 bp, Artificial
  probe
  misc_feature (1)..(25): SEQ ID NO: 3278; WAN024A39; Start 73; Stop 97
tattatcttcagccgaaaatcagta

SEQ ID NO: 351115 - DNA, 25 bp, Artificial
  probe
  misc_feature (1)..(25): SEQ ID NO: 3278; WAN024A39; Start 76; Stop 100
tatcttcagccgaaaatcagtattt

SEQ ID NO: 351116 - DNA, 25 bp, Artificial
  probe
  misc_feature (1)..(25): SEQ ID NO: 3278; WAN024A39; Start 102; Stop 126
aggttgtttgaaataaacttcctag

SEQ ID NO: 351117 - DNA, 25 bp, Artificial
  probe
  misc_feature (1)..(25): SEQ ID NO: 3278; WAN024A39; Start 11; Stop 35
aaaatccaaaaccaacacaagctat

SEQ ID NO: 351118 - DNA, 25 bp, Artificial
  probe
  misc_feature (1)..(25): SEQ ID NO: 3278; WAN024A39; Start 12; Stop 36
aaatccaaaaccaacacaagctatc

SEQ ID NO: 351119 - DNA, 25 bp, Artificial
  probe
  misc_feature (1)..(25): SEQ ID NO: 3278; WAN024A39; Start 58; Stop 82
taatttgcactccagtattatcttc

SEQ ID NO: 351120 - DNA, 25 bp, Artificial
  probe
  misc_feature (1)..(25): SEQ ID NO: 3278; WAN024A39; Start 47; Stop 71
tataaccccattaatttgcactcca

SEQ ID NO: 351121 - DNA, 25 bp, Artificial
  probe
  misc_feature (1)..(25): SEQ ID NO: 3278; WAN024A39; Start 13; Stop 37
aatccaaaaccaacacaagctatca

SEQ ID NO: 351122 - DNA, 25 bp, Artificial
  probe
  misc_feature (1)..(25): SEQ ID NO: 3278; WAN024A39; Start 46; Stop 70
ttataaccccattaatttgcactcc

SEQ ID NO: 351123 - DNA, 25 bp, Artificial
  probe
  misc_feature (1)..(25): SEQ ID NO: 3278; WAN024A39; Start 100; Stop 124
ttaggttgtttgaaataaacttcct

SEQ ID NO: 351124 - DNA, 25 bp, Artificial
  probe
  misc_feature (1)..(25): SEQ ID NO: 3278; WAN024A39; Start 63; Stop 87
tgcactccagtattatcttcagccg

SEQ ID NO: 351125 - DNA, 25 bp, Artificial
  probe
  misc_feature (1)..(25): SEQ ID NO: 3278; WAN024A39; Start 14; Stop 38
atccaaaaccaacacaagctatcag

SEQ ID NO: 351126 - DNA, 25 bp, Artificial
  probe
  misc_feature (1)..(25): SEQ ID NO: 3278; WAN024A39; Start 52; Stop 76
ccccattaatttgcactccagtatt

SEQ ID NO: 351127 - DNA, 25 bp, Artificial
  probe
  misc_feature (1)..(25): SEQ ID NO: 3278; WAN024A39; Start 48; Stop 72
ataaccccattaatttgcactccag

SEQ ID NO: 351128 - DNA, 25 bp, Artificial
  probe
  misc_feature (1)..(25): SEQ ID NO: 3278; WAN024A39; Start 57; Stop 81
ttaatttgcactccagtattatctt

SEQ ID NO: 351129 - DNA, 25 bp, Artificial
  probe
  misc_feature (1)..(25): SEQ ID NO: 3279; WAN0249L3; Start 28; Stop 52
aaatttgacaatgtaaaccgagtcg

SEQ ID NO: 351130 - DNA, 25 bp, Artificial
  probe
  misc_feature (1)..(25): SEQ ID NO: 3279; WAN0249L3; Start 26; Stop 50
ctaaatttgacaatgtaaaccgagt

SEQ ID NO: 351131 - DNA, 25 bp, Artificial
  probe
  misc_feature (1)..(25): SEQ ID NO: 3279; WAN0249L3; Start 65; Stop 89
tactgttttgaggttgaagatacga

SEQ ID NO: 351132 - DNA, 25 bp, Artificial
  probe
  misc_feature (1)..(25): SEQ ID NO: 3279; WAN0249L3; Start 67; Stop 91
ctgttttgaggttgaagatacgatt

SEQ ID NO: 351133 - DNA, 25 bp, Artificial
  probe
  misc_feature (1)..(25): SEQ ID NO: 3279; WAN0249L3; Start 66; Stop 90
actgttttgaggttgaagatacgat

SEQ ID NO: 351134 - DNA, 25 bp, Artificial
  probe
  misc_feature (1)..(25): SEQ ID NO: 3279; WAN0249L3; Start 68; Stop 92
tgttttgaggttgaagatacgattt

SEQ ID NO: 351135 - DNA, 25 bp, Artificial
  probe
  misc_feature (1)..(25): SEQ ID NO: 3279; WAN0249L3; Start 25; Stop 49
tctaaatttgacaatgtaaaccgag

SEQ ID NO: 351136 - DNA, 25 bp, Artificial
  probe
  misc_feature (1)..(25): SEQ ID NO: 3279; WAN0249L3; Start 128; Stop 152
gcatcaataaattgcttccttgttt

SEQ ID NO: 351137 - DNA, 25 bp, Artificial
  probe
  misc_feature (1)..(25): SEQ ID NO: 3279; WAN0249L3; Start 64; Stop 88
gtactgttttgaggttgaagatacg

SEQ ID NO: 351138 - DNA, 25 bp, Artificial
  probe
  misc_feature (1)..(25): SEQ ID NO: 3279; WAN0249L3; Start 69; Stop 93
gttttgaggttgaagatacgatttt

SEQ ID NO: 351139 - DNA, 25 bp, Artificial
  probe
  misc_feature (1)..(25): SEQ ID NO: 3279; WAN0249L3; Start 27; Stop 51
taaatttgacaatgtaaaccgagtc

SEQ ID NO: 351140 - DNA, 25 bp, Artificial
  probe
  misc_feature (1)..(25): SEQ ID NO: 3279; WAN0249L3; Start 140; Stop 164
tgcttccttgttttgtcataatttt

SEQ ID NO: 351141 - DNA, 25 bp, Artificial
  probe
  misc_feature (1)..(25): SEQ ID NO: 3279; WAN0249L3; Start 139; Stop 163
ttgcttccttgttttgtcataattt

SEQ ID NO: 351142 - DNA, 25 bp, Artificial
  probe
  misc_feature (1)..(25): SEQ ID NO: 3279; WAN0249L3; Start 136; Stop 160
aaattgcttccttgttttgtcataa

SEQ ID NO: 351143 - DNA, 25 bp, Artificial
  probe
  misc_feature (1)..(25): SEQ ID NO: 3279; WAN0249L3; Start 133; Stop 157
aataaattgcttccttgttttgtca

SEQ ID NO: 351144 - DNA, 25 bp, Artificial
  probe
  misc_feature (1)..(25): SEQ ID NO: 3279; WAN0249L3; Start 24; Stop 48
atctaaatttgacaatgtaaaccga

SEQ ID NO: 351145 - DNA, 25 bp, Artificial
  probe
  misc_feature (1)..(25): SEQ ID NO: 3279; WAN0249L3; Start 47; Stop 71
gagtcggatagctttaagtactgtt

SEQ ID NO: 351146 - DNA, 25 bp, Artificial
  probe
  misc_feature (1)..(25): SEQ ID NO: 3279; WAN0249L3; Start 48; Stop 72
agtcggatagctttaagtactgttt

SEQ ID NO: 351147 - DNA, 25 bp, Artificial
  probe
  misc_feature (1)..(25): SEQ ID NO: 3279; WAN0249L3; Start 138; Stop 162
attgcttccttgttttgtcataatt

SEQ ID NO: 351148 - DNA, 25 bp, Artificial
  probe
  misc_feature (1)..(25): SEQ ID NO: 3279; WAN0249L3; Start 137; Stop 161
aattgcttccttgttttgtcataat

SEQ ID NO: 351149 - DNA, 25 bp, Artificial
  probe
  misc_feature (1)..(25): SEQ ID NO: 3279; WAN0249L3; Start 134; Stop 158
ataaattgcttccttgttttgtcat

SEQ ID NO: 351150 - DNA, 25 bp, Artificial
  probe
  misc_feature (1)..(25): SEQ ID NO: 3279; WAN0249L3; Start 131; Stop 155
tcaataaattgcttccttgttttgt

SEQ ID NO: 351151 - DNA, 25 bp, Artificial
  probe
  misc_feature (1)..(25): SEQ ID NO: 3279; WAN0249L3; Start 135; Stop 159
taaattgcttccttgttttgtcata

SEQ ID NO: 351152 - DNA, 25 bp, Artificial
  probe
  misc_feature (1)..(25): SEQ ID NO: 3279; WAN0249L3; Start 132; Stop 156
caataaattgcttccttgttttgtc

SEQ ID NO: 351153 - DNA, 25 bp, Artificial
  probe
  misc_feature (1)..(25): SEQ ID NO: 3279; WAN0249L3; Start 23; Stop 47
aatctaaatttgacaatgtaaaccg

SEQ ID NO: 351154 - DNA, 25 bp, Artificial
  probe
  misc_feature (1)..(25): SEQ ID NO: 3279; WAN0249L3; Start 46; Stop 70
cgagtcggatagctttaagtactgt

SEQ ID NO: 351155 - DNA, 25 bp, Artificial
  probe
  misc_feature (1)..(25): SEQ ID NO: 3279; WAN0249L3; Start 130; Stop 154
atcaataaattgcttccttgttttg

SEQ ID NO: 351156 - DNA, 25 bp, Artificial
  probe
  misc_feature (1)..(25): SEQ ID NO: 3279; WAN0249L3; Start 129; Stop 153
catcaataaattgcttccttgtttt

SEQ ID NO: 351157 - DNA, 25 bp, Artificial
  probe
  misc_feature (1)..(25): SEQ ID NO: 3279; WAN0249L3; Start 202; Stop 226
tttatgagaggtgtatgaatatgat

SEQ ID NO: 351158 - DNA, 25 bp, Artificial
  probe
  misc_feature (1)..(25): SEQ ID NO: 3279; WAN0249L3; Start 57; Stop 81
gctttaagtactgttttgaggttga

SEQ ID NO: 351159 - DNA, 25 bp, Artificial
  probe
  misc_feature (1)..(25): SEQ ID NO: 3279; WAN0249L3; Start 56; Stop 80
agctttaagtactgttttgaggttg

SEQ ID NO: 351160 - DNA, 25 bp, Artificial
  probe
  misc_feature (1)..(25): SEQ ID NO: 3279; WAN0249L3; Start 51; Stop 75
cggatagctttaagtactgttttga

SEQ ID NO: 351161 - DNA, 25 bp, Artificial
  probe
  misc_feature (1)..(25): SEQ ID NO: 3279; WAN0249L3; Start 50; Stop 74
tcggatagctttaagtactgttttg

SEQ ID NO: 351162 - DNA, 25 bp, Artificial
  probe
  misc_feature (1)..(25): SEQ ID NO: 3280; WAN024AOU; Start 1; Stop 25
ctagaaccaataataacgatgcaat

SEQ ID NO: 351163 - DNA, 25 bp, Artificial
  probe
  misc_feature (1)..(25): SEQ ID NO: 3280; WAN024AOU; Start 2; Stop 26
tagaaccaataataacgatgcaatt

SEQ ID NO: 351164 - DNA, 25 bp, Artificial
  probe
  misc_feature (1)..(25): SEQ ID NO: 3280; WAN024AOU; Start 3; Stop 27
agaaccaataataacgatgcaattt

SEQ ID NO: 351165 - DNA, 25 bp, Artificial
  probe
  misc_feature (1)..(25): SEQ ID NO: 3280; WAN024AOU; Start 4; Stop 28
gaaccaataataacgatgcaatttt

SEQ ID NO: 351166 - DNA, 25 bp, Artificial
  probe
  misc_feature (1)..(25): SEQ ID NO: 3281; WAN024AL9; Start 91; Stop 115
gctataaaacaagctatacaaagga

SEQ ID NO: 351167 - DNA, 25 bp, Artificial
  probe
  misc_feature (1)..(25): SEQ ID NO: 3281; WAN024AL9; Start 90; Stop 114
agctataaaacaagctatacaaagg

SEQ ID NO: 351168 - DNA, 25 bp, Artificial
  probe
  misc_feature (1)..(25): SEQ ID NO: 3281; WAN024AL9; Start 89; Stop 113
aagctataaaacaagctatacaaag

SEQ ID NO: 351169 - DNA, 25 bp, Artificial
  probe
  misc_feature (1)..(25): SEQ ID NO: 3281; WAN024AL9; Start 88; Stop 112
aaagctataaaacaagctatacaaa

SEQ ID NO: 351170 - DNA, 25 bp, Artificial
  probe
  misc_feature (1)..(25): SEQ ID NO: 3281; WAN024AL9; Start 82; Stop 106
tgaaataaagctataaaacaagcta

SEQ ID NO: 351171 - DNA, 25 bp, Artificial
  probe
  misc_feature (1)..(25): SEQ ID NO: 3282; WAN024A6I; Start 28; Stop 52
ctagtcttgctaggtatgaggaaac

SEQ ID NO: 351172 - DNA, 25 bp, Artificial
  probe
  misc_feature (1)..(25): SEQ ID NO: 3282; WAN024A6I; Start 29; Stop 53
tagtcttgctaggtatgaggaaacc

SEQ ID NO: 351173 - DNA, 25 bp, Artificial
  probe
  misc_feature (1)..(25): SEQ ID NO: 3282; WAN024A6I; Start 46; Stop 70
aggaaacctcatttcataaacttaa

SEQ ID NO: 351174 - DNA, 25 bp, Artificial
  probe
  misc_feature (1)..(25): SEQ ID NO: 3282; WAN024A6I; Start 47; Stop 71
ggaaacctcatttcataaacttaat

SEQ ID NO: 351175 - DNA, 25 bp, Artificial
  probe
  misc_feature (1)..(25): SEQ ID NO: 3282; WAN024A6I; Start 124; Stop 148
gcaaggaaatccttacagtttgagt

SEQ ID NO: 351176 - DNA, 25 bp, Artificial
  probe
  misc_feature (1)..(25): SEQ ID NO: 3282; WAN024A6I; Start 123; Stop 147
tgcaaggaaatccttacagtttgag

SEQ ID NO: 351177 - DNA, 25 bp, Artificial
  probe
  misc_feature (1)..(25): SEQ ID NO: 3282; WAN024A6I; Start 122; Stop 146
ctgcaaggaaatccttacagtttga

SEQ ID NO: 351178 - DNA, 25 bp, Artificial
  probe
  misc_feature (1)..(25): SEQ ID NO: 3282; WAN024A6I; Start 121; Stop 145
actgcaaggaaatccttacagtttg

SEQ ID NO: 351179 - DNA, 25 bp, Artificial
  probe
  misc_feature (1)..(25): SEQ ID NO: 3282; WAN024A6I; Start 30; Stop 54
agtcttgctaggtatgaggaaacct

SEQ ID NO: 351180 - DNA, 25 bp, Artificial
  probe
  misc_feature (1)..(25): SEQ ID NO: 3282; WAN024A6I; Start 31; Stop 55
gtcttgctaggtatgaggaaacctc

SEQ ID NO: 351181 - DNA, 25 bp, Artificial
  probe
  misc_feature (1)..(25): SEQ ID NO: 3282; WAN024A6I; Start 45; Stop 69
gaggaaacctcatttcataaactta

SEQ ID NO: 351182 - DNA, 25 bp, Artificial
  probe
  misc_feature (1)..(25): SEQ ID NO: 3282; WAN024A6I; Start 118; Stop 142
aaaactgcaaggaaatccttacagt

SEQ ID NO: 351183 - DNA, 25 bp, Artificial
  probe
  misc_feature (1)..(25): SEQ ID NO: 3283; WAN024A3E; Start 39; Stop 63
agaaataaggaagtgaggtagcatc

SEQ ID NO: 351184 - DNA, 25 bp, Artificial
  probe
  misc_feature (1)..(25): SEQ ID NO: 3283; WAN024A3E; Start 38; Stop 62
tagaaataaggaagtgaggtagcat

SEQ ID NO: 351185 - DNA, 25 bp, Artificial
  probe
  misc_feature (1)..(25): SEQ ID NO: 3283; WAN024A3E; Start 37; Stop 61
atagaaataaggaagtgaggtagca

SEQ ID NO: 351186 - DNA, 25 bp, Artificial
  probe
  misc_feature (1)..(25): SEQ ID NO: 3284; WAN024AJ3; Start 62; Stop 86
tttgaagcacttatagaggagattt

SEQ ID NO: 351187 - DNA, 25 bp, Artificial
  probe
  misc_feature (1)..(25): SEQ ID NO: 3284; WAN024AJ3; Start 63; Stop 87
ttgaagcacttatagaggagattta

SEQ ID NO: 351188 - DNA, 25 bp, Artificial
  probe
  misc_feature (1)..(25): SEQ ID NO: 3284; WAN024AJ3; Start 64; Stop 88
tgaagcacttatagaggagatttaa

SEQ ID NO: 351189 - DNA, 25 bp, Artificial
  probe
  misc_feature (1)..(25): SEQ ID NO: 3284; WAN024AJ3; Start 143; Stop 167
gcaattagtatgagcactattgtta

SEQ ID NO: 351190 - DNA, 25 bp, Artificial
  probe
  misc_feature (1)..(25): SEQ ID NO: 3284; WAN024AJ3; Start 137; Stop 161
acttctgcaattagtatgagcacta

SEQ ID NO: 351191 - DNA, 25 bp, Artificial
  probe
  misc_feature (1)..(25): SEQ ID NO: 3284; WAN024AJ3; Start 136; Stop 160
aacttctgcaattagtatgagcact

SEQ ID NO: 351192 - DNA, 25 bp, Artificial
  probe
  misc_feature (1)..(25): SEQ ID NO: 3284; WAN024AJ3; Start 141; Stop 165
ctgcaattagtatgagcactattgt

SEQ ID NO: 351193 - DNA, 25 bp, Artificial
  probe
  misc_feature (1)..(25): SEQ ID NO: 3284; WAN024AJ3; Start 140; Stop 164
tctgcaattagtatgagcactattg

SEQ ID NO: 351194 - DNA, 25 bp, Artificial
  probe
  misc_feature (1)..(25): SEQ ID NO: 3284; WAN024AJ3; Start 142; Stop 166
tgcaattagtatgagcactattgtt

SEQ ID NO: 351195 - DNA, 25 bp, Artificial
  probe
  misc_feature (1)..(25): SEQ ID NO: 3284; WAN024AJ3; Start 138; Stop 162
cttctgcaattagtatgagcactat

SEQ ID NO: 351196 - DNA, 25 bp, Artificial
  probe
  misc_feature (1)..(25): SEQ ID NO: 3284; WAN024AJ3; Start 120; Stop 144
ttatcttatcacccaaaacttctgc

SEQ ID NO: 351197 - DNA, 25 bp, Artificial
  probe
  misc_feature (1)..(25): SEQ ID NO: 3284; WAN024AJ3; Start 139; Stop 163
ttctgcaattagtatgagcactatt

SEQ ID NO: 351198 - DNA, 25 bp, Artificial
  probe
  misc_feature (1)..(25): SEQ ID NO: 3284; WAN024AJ3; Start 32; Stop 56
ttggattacaagacaggttttgaag

SEQ ID NO: 351199 - DNA, 25 bp, Artificial
  probe
  misc_feature (1)..(25): SEQ ID NO: 3284; WAN024AJ3; Start 35; Stop 59
gattacaagacaggttttgaagcac

SEQ ID NO: 351200 - DNA, 25 bp, Artificial
  probe
  misc_feature (1)..(25): SEQ ID NO: 3284; WAN024AJ3; Start 36; Stop 60
attacaagacaggttttgaagcact

SEQ ID NO: 351201 - DNA, 25 bp, Artificial
  probe
  misc_feature (1)..(25): SEQ ID NO: 3284; WAN024AJ3; Start 38; Stop 62
tacaagacaggttttgaagcacttt

SEQ ID NO: 351202 - DNA, 25 bp, Artificial
  probe
  misc_feature (1)..(25): SEQ ID NO: 3284; WAN024AJ3; Start 37; Stop 61
ttacaagacaggttttgaagcactt

SEQ ID NO: 351203 - DNA, 25 bp, Artificial
  probe
  misc_feature (1)..(25): SEQ ID NO: 3284; WAN024AJ3; Start 108; Stop 132
gcaatttatcagttatcttatcacc

SEQ ID NO: 351204 - DNA, 25 bp, Artificial
  probe
  misc_feature (1)..(25): SEQ ID NO: 3284; WAN024AJ3; Start 61; Stop 85
ttttgaagcacttatagaggagatt

SEQ ID NO: 351205 - DNA, 25 bp, Artificial
  probe
  misc_feature (1)..(25): SEQ ID NO: 3284; WAN024AJ3; Start 34; Stop 58
ggattacaagacaggttttgaagca

SEQ ID NO: 351206 - DNA, 25 bp, Artificial
  probe
  misc_feature (1)..(25): SEQ ID NO: 3284; WAN024AJ3; Start 33; Stop 57
tggattacaagacaggttttgaagc

SEQ ID NO: 351207 - DNA, 25 bp, Artificial
  probe
  misc_feature (1)..(25): SEQ ID NO: 3284; WAN024AJ3; Start 39; Stop 63
acaagacaggttttgaagcactttt

SEQ ID NO: 351208 - DNA, 25 bp, Artificial
  probe
  misc_feature (1)..(25): SEQ ID NO: 3284; WAN024AJ3; Start 119; Stop 143
gttatcttatcacccaaaacttctg

SEQ ID NO: 351209 - DNA, 25 bp, Artificial
  probe
  misc_feature (1)..(25): SEQ ID NO: 3284; WAN024AJ3; Start 112; Stop 136
tttatcagttatcttatcacccaaa

SEQ ID NO: 351210 - DNA, 25 bp, Artificial
  probe
  misc_feature (1)..(25): SEQ ID NO: 3284; WAN024AJ3; Start 135; Stop 159
aaacttctgcaattagtatgagcac

SEQ ID NO: 351211 - DNA, 25 bp, Artificial
  probe
  misc_feature (1)..(25): SEQ ID NO: 3284; WAN024AJ3; Start 124; Stop 148
cttatcacccaaaacttctgcaatt

SEQ ID NO: 351212 - DNA, 25 bp, Artificial
  probe
  misc_feature (1)..(25): SEQ ID NO: 3284; WAN024AJ3; Start 121; Stop 145
tatcttatcacccaaaacttctgca

SEQ ID NO: 351213 - DNA, 25 bp, Artificial
  probe
  misc_feature (1)..(25): SEQ ID NO: 3284; WAN024AJ3; Start 111; Stop 135
atttatcagttatcttatcacccaa

SEQ ID NO: 351214 - DNA, 25 bp, Artificial
  probe
  misc_feature (1)..(25): SEQ ID NO: 3284; WAN024AJ3; Start 126; Stop 150
tatcacccaaaacttctgcaattag

SEQ ID NO: 351215 - DNA, 25 bp, Artificial
  probe
  misc_feature (1)..(25): SEQ ID NO: 3284; WAN024AJ3; Start 65; Stop 89
gaagcacttatagaggagatttaaa

SEQ ID NO: 351216 - DNA, 25 bp, Artificial
  probe
  misc_feature (1)..(25): SEQ ID NO: 3284; WAN024AJ3; Start 110; Stop 134
aatttatcagttatcttatcaccca

SEQ ID NO: 351217 - DNA, 25 bp, Artificial
  probe
  misc_feature (1)..(25): SEQ ID NO: 3284; WAN024AJ3; Start 125; Stop 149
ttatcacccaaaacttctgcaatta

SEQ ID NO: 351218 - DNA, 25 bp, Artificial
  probe
  misc_feature (1)..(25): SEQ ID NO: 3284; WAN024AJ3; Start 123; Stop 147
tcttatcacccaaaacttctgcaat

SEQ ID NO: 351219 - DNA, 25 bp, Artificial
  probe
  misc_feature (1)..(25): SEQ ID NO: 3285; WAN0249W9; Start 26; Stop 50
ttcctgcatattattataccatgct

SEQ ID NO: 351220 - DNA, 25 bp, Artificial
  probe
  misc_feature (1)..(25): SEQ ID NO: 3285; WAN0249W9; Start 27; Stop 51
tcctgcatattattataccatgcta

SEQ ID NO: 351221 - DNA, 25 bp, Artificial
  probe
  misc_feature (1)..(25): SEQ ID NO: 3285; WAN0249W9; Start 28; Stop 52
cctgcatattattataccatgctag

SEQ ID NO: 351222 - DNA, 25 bp, Artificial
  probe
  misc_feature (1)..(25): SEQ ID NO: 3285; WAN0249W9; Start 29; Stop 53
ctgcatattattataccatgctagt

SEQ ID NO: 351223 - DNA, 25 bp, Artificial
  probe
  misc_feature (1)..(25): SEQ ID NO: 3285; WAN0249W9; Start 9; Stop 33
cctcataattcaaaattttcctgca

SEQ ID NO: 351224 - DNA, 25 bp, Artificial
  probe
  misc_feature (1)..(25): SEQ ID NO: 3285; WAN0249W9; Start 25; Stop 49
tttcctgcatattattataccatgc

SEQ ID NO: 351225 - DNA, 25 bp, Artificial
  probe
  misc_feature (1)..(25): SEQ ID NO: 3285; WAN0249W9; Start 8; Stop 32
tcctcataattcaaaattttcctgc

SEQ ID NO: 351226 - DNA, 25 bp, Artificial
  probe
  misc_feature (1)..(25): SEQ ID NO: 3285; WAN0249W9; Start 31; Stop 55
gcatattattataccatgctagttg

SEQ ID NO: 351227 - DNA, 25 bp, Artificial
  probe
  misc_feature (1)..(25): SEQ ID NO: 3285; WAN0249W9; Start 30; Stop 54
tgcatattattataccatgctagtt

SEQ ID NO: 351228 - DNA, 25 bp, Artificial
  probe
  misc_feature (1)..(25): SEQ ID NO: 3285; WAN0249W9; Start 1; Stop 25
ctagtcttcctcataattcaaaatt

SEQ ID NO: 351229 - DNA, 25 bp, Artificial
  probe
  misc_feature (1)..(25): SEQ ID NO: 3285; WAN0249W9; Start 24; Stop 48
ttttcctgcatattattataccatg

SEQ ID NO: 351230 - DNA, 25 bp, Artificial
  probe
  misc_feature (1)..(25): SEQ ID NO: 3285; WAN0249W9; Start 10; Stop 34
ctcataattcaaaattttcctgcat

SEQ ID NO: 351231 - DNA, 25 bp, Artificial
  probe
  misc_feature (1)..(25): SEQ ID NO: 3285; WAN0249W9; Start 7; Stop 31
ttcctcataattcaaaattttcctg

SEQ ID NO: 351232 - DNA, 25 bp, Artificial
  probe
  misc_feature (1)..(25): SEQ ID NO: 3285; WAN0249W9; Start 6; Stop 30
cttcctcataattcaaaattttcct

SEQ ID NO: 351233 - DNA, 25 bp, Artificial
  probe
  misc_feature (1)..(25): SEQ ID NO: 3285; WAN0249W9; Start 5; Stop 29
tcttcctcataattcaaaattttcc

SEQ ID NO: 351234 - DNA, 25 bp, Artificial
  probe
  misc_feature (1)..(25): SEQ ID NO: 3285; WAN0249W9; Start 11; Stop 35
tcataattcaaaattttcctgcata

SEQ ID NO: 351235 - DNA, 25 bp, Artificial
  probe
  misc_feature (1)..(25): SEQ ID NO: 3285; WAN0249W9; Start 3; Stop 27
agtcttcctcataattcaaaatttt

SEQ ID NO: 351236 - DNA, 25 bp, Artificial
  probe
  misc_feature (1)..(25): SEQ ID NO: 3285; WAN0249W9; Start 4; Stop 28
gtcttcctcataattcaaaattttc

SEQ ID NO: 351237 - DNA, 25 bp, Artificial
  probe
  misc_feature (1)..(25): SEQ ID NO: 3285; WAN0249W9; Start 12; Stop 36
cataattcaaaattttcctgcatat

SEQ ID NO: 351238 - DNA, 25 bp, Artificial
  probe
  misc_feature (1)..(25): SEQ ID NO: 3286; WAN0249SP; Start 8; Stop 32
cgttgagacataactagaccgatat

SEQ ID NO: 351239 - DNA, 25 bp, Artificial
  probe
  misc_feature (1)..(25): SEQ ID NO: 3286; WAN0249SP; Start 4; Stop 28
taatcgttgagacataactagaccg

SEQ ID NO: 351240 - DNA, 25 bp, Artificial
  probe
  misc_feature (1)..(25): SEQ ID NO: 3286; WAN0249SP; Start 3; Stop 27
ataatcgttgagacataactagacc

SEQ ID NO: 351241 - DNA, 25 bp, Artificial
  probe
  misc_feature (1)..(25): SEQ ID NO: 3286; WAN0249SP; Start 14; Stop 38
gacataactagaccgatatagtcca

SEQ ID NO: 351242 - DNA, 25 bp, Artificial
  probe
  misc_feature (1)..(25): SEQ ID NO: 3286; WAN0249SP; Start 13; Stop 37
agacataactagaccgatatagtcc

SEQ ID NO: 351243 - DNA, 25 bp, Artificial
  probe
  misc_feature (1)..(25): SEQ ID NO: 3286; WAN0249SP; Start 15; Stop 39
acataactagaccgatatagtccaa

SEQ ID NO: 351244 - DNA, 25 bp, Artificial
  probe
  misc_feature (1)..(25): SEQ ID NO: 3286; WAN0249SP; Start 9; Stop 33
gttgagacataactagaccgatata

SEQ ID NO: 351245 - DNA, 25 bp, Artificial
  probe
  misc_feature (1)..(25): SEQ ID NO: 3286; WAN0249SP; Start 10; Stop 34
ttgagacataactagaccgatatag

SEQ ID NO: 351246 - DNA, 25 bp, Artificial
  probe
  misc_feature (1)..(25): SEQ ID NO: 3286; WAN0249SP; Start 7; Stop 31
tcgttgagacataactagaccgata

SEQ ID NO: 351247 - DNA, 25 bp, Artificial
  probe
  misc_feature (1)..(25): SEQ ID NO: 3286; WAN0249SP; Start 11; Stop 35
tgagacataactagaccgatatagt

SEQ ID NO: 351248 - DNA, 25 bp, Artificial
  probe
  misc_feature (1)..(25): SEQ ID NO: 3286; WAN0249SP; Start 5; Stop 29
aatcgttgagacataactagaccga

SEQ ID NO: 351249 - DNA, 25 bp, Artificial
  probe
  misc_feature (1)..(25): SEQ ID NO: 3286; WAN0249SP; Start 12; Stop 36
gagacataactagaccgatatagtc

SEQ ID NO: 351250 - DNA, 25 bp, Artificial
  probe
  misc_feature (1)..(25): SEQ ID NO: 3286; WAN0249SP; Start 21; Stop 45
ctagaccgatatagtccaaagtgat

SEQ ID NO: 351251 - DNA, 25 bp, Artificial
  probe
  misc_feature (1)..(25): SEQ ID NO: 3286; WAN0249SP; Start 23; Stop 47
agaccgatatagtccaaagtgatat

SEQ ID NO: 351252 - DNA, 25 bp, Artificial
  probe
  misc_feature (1)..(25): SEQ ID NO: 3286; WAN0249SP; Start 20; Stop 44
actagaccgatatagtccaaagtga

SEQ ID NO: 351253 - DNA, 25 bp, Artificial
  probe
  misc_feature (1)..(25): SEQ ID NO: 3286; WAN0249SP; Start 19; Stop 43
aactagaccgatatagtccaaagtg

SEQ ID NO: 351254 - DNA, 25 bp, Artificial
  probe
  misc_feature (1)..(25): SEQ ID NO: 3286; WAN0249SP; Start 22; Stop 46
tagaccgatatagtccaaagtgata

SEQ ID NO: 351255 - DNA, 25 bp, Artificial
  probe
  misc_feature (1)..(25): SEQ ID NO: 3286; WAN0249SP; Start 26; Stop 50
ccgatatagtccaaagtgatatagt

SEQ ID NO: 351256 - DNA, 25 bp, Artificial
  probe
  misc_feature (1)..(25): SEQ ID NO: 3286; WAN0249SP; Start 25; Stop 49
accgatatagtccaaagtgatatag

SEQ ID NO: 351257 - DNA, 25 bp, Artificial
  probe
  misc_feature (1)..(25): SEQ ID NO: 3286; WAN0249SP; Start 18; Stop 42
taactagaccgatatagtccaaagt

SEQ ID NO: 351258 - DNA, 25 bp, Artificial
  probe
  misc_feature (1)..(25): SEQ ID NO: 3286; WAN0249SP; Start 24; Stop 48
gaccgatatagtccaaagtgatata

SEQ ID NO: 351259 - DNA, 25 bp, Artificial
  probe
  misc_feature (1)..(25): SEQ ID NO: 3286; WAN0249SP; Start 2; Stop 26
tataatcgttgagacataactagac

SEQ ID NO: 351260 - DNA, 25 bp, Artificial
  probe
  misc_feature (1)..(25): SEQ ID NO: 3286; WAN0249SP; Start 16; Stop 40
cataactagaccgatatagtccaaa

SEQ ID NO: 351261 - DNA, 25 bp, Artificial
  probe
  misc_feature (1)..(25): SEQ ID NO: 3286; WAN0249SP; Start 1; Stop 25
ctataatcgttgagacataactaga

SEQ ID NO: 351262 - DNA, 25 bp, Artificial
  probe
  misc_feature (1)..(25): SEQ ID NO: 3286; WAN0249SP; Start 17; Stop 41
ataactagaccgatatagtccaaag

SEQ ID NO: 351263 - DNA, 25 bp, Artificial
  probe
  misc_feature (1)..(25): SEQ ID NO: 3286; WAN0249SP; Start 6; Stop 30
atcgttgagacataactagaccgat

SEQ ID NO: 351264 - DNA, 25 bp, Artificial
  probe
  misc_feature (1)..(25): SEQ ID NO: 3286; WAN0249SP; Start 27; Stop 51
cgatatagtccaaagtgatatagta

SEQ ID NO: 351265 - DNA, 25 bp, Artificial
  probe
  misc_feature (1)..(25): SEQ ID NO: 3286; WAN0249SP; Start 36; Stop 60
ccaaagtgatatagtaaaatgaacc

SEQ ID NO: 351266 - DNA, 25 bp, Artificial
  probe
  misc_feature (1)..(25): SEQ ID NO: 3286; WAN0249SP; Start 33; Stop 57
agtccaaagtgatatagtaaaatga

SEQ ID NO: 351267 - DNA, 25 bp, Artificial
  probe
  misc_feature (1)..(25): SEQ ID NO: 3286; WAN0249SP; Start 37; Stop 61
caaagtgatatagtaaaatgaacca

SEQ ID NO: 351268 - DNA, 25 bp, Artificial
  probe
  misc_feature (1)..(25): SEQ ID NO: 3286; WAN0249SP; Start 35; Stop 59
tccaaagtgatatagtaaaatgaac

SEQ ID NO: 351269 - DNA, 25 bp, Artificial
  probe
  misc_feature (1)..(25): SEQ ID NO: 3286; WAN0249SP; Start 34; Stop 58
gtccaaagtgatatagtaaaatgaa

SEQ ID NO: 351270 - DNA, 25 bp, Artificial
  probe
  misc_feature (1)..(25): SEQ ID NO: 3287; WAN024AQT; Start 53; Stop 77
tgaagaaatagtagtctccttgtcc

SEQ ID NO: 351271 - DNA, 25 bp, Artificial
  probe
  misc_feature (1)..(25): SEQ ID NO: 3287; WAN024AQT; Start 52; Stop 76
ttgaagaaatagtagtctccttgtc

SEQ ID NO: 351272 - DNA, 25 bp, Artificial
  probe
  misc_feature (1)..(25): SEQ ID NO: 3287; WAN024AQT; Start 51; Stop 75
tttgaagaaatagtagtctccttgt

SEQ ID NO: 351273 - DNA, 25 bp, Artificial
  probe
  misc_feature (1)..(25): SEQ ID NO: 3287; WAN024AQT; Start 50; Stop 74
ttttgaagaaatagtagtctccttg

SEQ ID NO: 351274 - DNA, 25 bp, Artificial
  probe
  misc_feature (1)..(25): SEQ ID NO: 3287; WAN024AQT; Start 11; Stop 35
gtcttttaaacataaagtgtcaagt

SEQ ID NO: 351275 - DNA, 25 bp, Artificial
  probe
  misc_feature (1)..(25): SEQ ID NO: 3287; WAN024AQT; Start 10; Stop 34
agtcttttaaacataaagtgtcaag

SEQ ID NO: 351276 - DNA, 25 bp, Artificial
  probe
  misc_feature (1)..(25): SEQ ID NO: 3288; WAN0249IX; Start 135; Stop 159
gaagtcacagtctactattctaacc

SEQ ID NO: 351277 - DNA, 25 bp, Artificial
  probe
  misc_feature (1)..(25): SEQ ID NO: 3288; WAN0249IX; Start 249; Stop 273
taagaagtagatcaggtgaacaatt

SEQ ID NO: 351278 - DNA, 25 bp, Artificial
  probe
  misc_feature (1)..(25): SEQ ID NO: 3288; WAN0249IX; Start 248; Stop 272
ataagaagtagatcaggtgaacaat

SEQ ID NO: 351279 - DNA, 25 bp, Artificial
  probe
  misc_feature (1)..(25): SEQ ID NO: 3288; WAN0249IX; Start 370; Stop 394
atttaagcatagatgggaccttctt

SEQ ID NO: 351280 - DNA, 25 bp, Artificial
  probe
  misc_feature (1)..(25): SEQ ID NO: 3288; WAN0249IX; Start 369; Stop 393
catttaagcatagatgggaccttct

SEQ ID NO: 351281 - DNA, 25 bp, Artificial
  probe
  misc_feature (1)..(25): SEQ ID NO: 3288; WAN0249IX; Start 246; Stop 270
ctataagaagtagatcaggtgaaca

SEQ ID NO: 351282 - DNA, 25 bp, Artificial
  probe
  misc_feature (1)..(25): SEQ ID NO: 3288; WAN0249IX; Start 371; Stop 395
tttaagcatagatgggaccttcttg

SEQ ID NO: 351283 - DNA, 25 bp, Artificial
  probe
  misc_feature (1)..(25): SEQ ID NO: 3288; WAN0249IX; Start 245; Stop 269
actataagaagtagatcaggtgaac

SEQ ID NO: 351284 - DNA, 25 bp, Artificial
  probe
  misc_feature (1)..(25): SEQ ID NO: 3288; WAN0249IX; Start 130; Stop 154
tgttagaagtcacagtctactattc

SEQ ID NO: 351285 - DNA, 25 bp, Artificial
  probe
  misc_feature (1)..(25): SEQ ID NO: 3288; WAN0249IX; Start 123; Stop 147
agcaatttgttagaagtcacagtct

SEQ ID NO: 351286 - DNA, 25 bp, Artificial
  probe
  misc_feature (1)..(25): SEQ ID NO: 3288; WAN0249IX; Start 122; Stop 146
tagcaatttgttagaagtcacagtc

SEQ ID NO: 351287 - DNA, 25 bp, Artificial
  probe
  misc_feature (1)..(25): SEQ ID NO: 3288; WAN0249IX; Start 279; Stop 303
acctactctataagctatacgaaga

SEQ ID NO: 351288 - DNA, 25 bp, Artificial
  probe
  misc_feature (1)..(25): SEQ ID NO: 3288; WAN0249IX; Start 247; Stop 271
tataagaagtagatcaggtgaacaa

SEQ ID NO: 351289 - DNA, 25 bp, Artificial
  probe
  misc_feature (1)..(25): SEQ ID NO: 3288; WAN0249IX; Start 251; Stop 275
agaagtagatcaggtgaacaatttc

SEQ ID NO: 351290 - DNA, 25 bp, Artificial
  probe
  misc_feature (1)..(25): SEQ ID NO: 3288; WAN0249IX; Start 121; Stop 145
ctagcaatttgttagaagtcacagt

SEQ ID NO: 351291 - DNA, 25 bp, Artificial
  probe
  misc_feature (1)..(25): SEQ ID NO: 3288; WAN0249IX; Start 250; Stop 274
aagaagtagatcaggtgaacaattt

SEQ ID NO: 351292 - DNA, 25 bp, Artificial
  probe
  misc_feature (1)..(25): SEQ ID NO: 3288; WAN0249IX; Start 129; Stop 153
ttgttagaagtcacagtctactatt

SEQ ID NO: 351293 - DNA, 25 bp, Artificial
  probe
  misc_feature (1)..(25): SEQ ID NO: 3288; WAN0249IX; Start 124; Stop 148
gcaatttgttagaagtcacagtcta

SEQ ID NO: 351294 - DNA, 25 bp, Artificial
  probe
  misc_feature (1)..(25): SEQ ID NO: 3288; WAN0249IX; Start 120; Stop 144
tctagcaatttgttagaagtcacag

SEQ ID NO: 351295 - DNA, 25 bp, Artificial
  probe
  misc_feature (1)..(25): SEQ ID NO: 3288; WAN0249IX; Start 275; Stop 299
cagtacctactctataagctatacg

SEQ ID NO: 351296 - DNA, 25 bp, Artificial
  probe
  misc_feature (1)..(25): SEQ ID NO: 3288; WAN0249IX; Start 244; Stop 268
aactataagaagtagatcaggtgaa

SEQ ID NO: 351297 - DNA, 25 bp, Artificial
  probe
  misc_feature (1)..(25): SEQ ID NO: 3288; WAN0249IX; Start 276; Stop 300
agtacctactctataagctatacga

SEQ ID NO: 351298 - DNA, 25 bp, Artificial
  probe
  misc_feature (1)..(25): SEQ ID NO: 3288; WAN0249IX; Start 360; Stop 384
aagagaaaccatttaagcatagatg

SEQ ID NO: 351299 - DNA, 25 bp, Artificial
  probe
  misc_feature (1)..(25): SEQ ID NO: 3288; WAN0249IX; Start 88; Stop 112
tgaacaaataaattgggagattgaa

SEQ ID NO: 351300 - DNA, 25 bp, Artificial
  probe
  misc_feature (1)..(25): SEQ ID NO: 3288; WAN0249IX; Start 134; Stop 158
agaagtcacagtctactattctaac

SEQ ID NO: 351301 - DNA, 25 bp, Artificial
  probe
  misc_feature (1)..(25): SEQ ID NO: 3288; WAN0249IX; Start 131; Stop 155
gttagaagtcacagtctactattct

SEQ ID NO: 351302 - DNA, 25 bp, Artificial
  probe
  misc_feature (1)..(25): SEQ ID NO: 3288; WAN0249IX; Start 277; Stop 301
gtacctactctataagctatacgaa

SEQ ID NO: 351303 - DNA, 25 bp, Artificial
  probe
  misc_feature (1)..(25): SEQ ID NO: 3288; WAN0249IX; Start 126; Stop 150
aatttgttagaagtcacagtctact

SEQ ID NO: 351304 - DNA, 25 bp, Artificial
  probe
  misc_feature (1)..(25): SEQ ID NO: 3288; WAN0249IX; Start 125; Stop 149
caatttgttagaagtcacagtctac

SEQ ID NO: 351305 - DNA, 25 bp, Artificial
  probe
  misc_feature (1)..(25): SEQ ID NO: 3288; WAN0249IX; Start 280; Stop 304
cctactctataagctatacgaagat

SEQ ID NO: 351306 - DNA, 25 bp, Artificial
  probe
  misc_feature (1)..(25): SEQ ID NO: 3288; WAN0249IX; Start 278; Stop 302
tacctactctataagctatacgaag

SEQ ID NO: 351307 - DNA, 25 bp, Artificial
  probe
  misc_feature (1)..(25): SEQ ID NO: 3288; WAN0249IX; Start 359; Stop 383
aaagagaaaccatttaagcatagat

SEQ ID NO: 351308 - DNA, 25 bp, Artificial
  probe
  misc_feature (1)..(25): SEQ ID NO: 3288; WAN0249IX; Start 102; Stop 126
gggagattgaaattcatttctagca

SEQ ID NO: 351309 - DNA, 25 bp, Artificial
  probe
  misc_feature (1)..(25): SEQ ID NO: 3289; WAN024ANY; Start 110; Stop 134
ttagcgactttctctgaaatatggt

SEQ ID NO: 351310 - DNA, 25 bp, Artificial
  probe
  misc_feature (1)..(25): SEQ ID NO: 3289; WAN024ANY; Start 109; Stop 133
attagcgactttctctgaaatatgg

SEQ ID NO: 351311 - DNA, 25 bp, Artificial
  probe
  misc_feature (1)..(25): SEQ ID NO: 3289; WAN024ANY; Start 106; Stop 130
gctattagcgactttctctgaaata

SEQ ID NO: 351312 - DNA, 25 bp, Artificial
  probe
  misc_feature (1)..(25): SEQ ID NO: 3289; WAN024ANY; Start 105; Stop 129
agctattagcgactttctctgaaat

SEQ ID NO: 351313 - DNA, 25 bp, Artificial
  probe
  misc_feature (1)..(25): SEQ ID NO: 3289; WAN024ANY; Start 108; Stop 132
tattagcgactttctctgaaatatg

SEQ ID NO: 351314 - DNA, 25 bp, Artificial
  probe
  misc_feature (1)..(25): SEQ ID NO: 3289; WAN024ANY; Start 85; Stop 109
ataccctaaccaattgaaatagcta

SEQ ID NO: 351315 - DNA, 25 bp, Artificial
  probe
  misc_feature (1)..(25): SEQ ID NO: 3289; WAN024ANY; Start 84; Stop 108
tataccctaaccaattgaaatagct

SEQ ID NO: 351316 - DNA, 25 bp, Artificial
  probe
  misc_feature (1)..(25): SEQ ID NO: 3289; WAN024ANY; Start 107; Stop 131
ctattagcgactttctctgaaatat

SEQ ID NO: 351317 - DNA, 25 bp, Artificial
  probe
  misc_feature (1)..(25): SEQ ID NO: 3289; WAN024ANY; Start 104; Stop 128
tagctattagcgactttctctgaaa

SEQ ID NO: 351318 - DNA, 25 bp, Artificial
  probe
  misc_feature (1)..(25): SEQ ID NO: 3289; WAN024ANY; Start 83; Stop 107
ctataccctaaccaattgaaatagc

SEQ ID NO: 351319 - DNA, 25 bp, Artificial
  probe
  misc_feature (1)..(25): SEQ ID NO: 3289; WAN024ANY; Start 80; Stop 104
aaactataccctaaccaattgaaat

SEQ ID NO: 351320 - DNA, 25 bp, Artificial
  probe
  misc_feature (1)..(25): SEQ ID NO: 3289; WAN024ANY; Start 82; Stop 106
actataccctaaccaattgaaatag

SEQ ID NO: 351321 - DNA, 25 bp, Artificial
  probe
  misc_feature (1)..(25): SEQ ID NO: 3289; WAN024ANY; Start 81; Stop 105
aactataccctaaccaattgaaata

SEQ ID NO: 351322 - DNA, 25 bp, Artificial
  probe
  misc_feature (1)..(25): SEQ ID NO: 3289; WAN024ANY; Start 75; Stop 99
aggtaaaactataccctaaccaatt

SEQ ID NO: 351323 - DNA, 25 bp, Artificial
  probe
  misc_feature (1)..(25): SEQ ID NO: 3289; WAN024ANY; Start 74; Stop 98
aaggtaaaactataccctaaccaat

SEQ ID NO: 351324 - DNA, 25 bp, Artificial
  probe
  misc_feature (1)..(25): SEQ ID NO: 3289; WAN024ANY; Start 73; Stop 97
taaggtaaaactataccctaaccaa

SEQ ID NO: 351325 - DNA, 25 bp, Artificial
  probe
  misc_feature (1)..(25): SEQ ID NO: 3289; WAN024ANY; Start 79; Stop 103
aaaactataccctaaccaattgaaa

SEQ ID NO: 351326 - DNA, 25 bp, Artificial
  probe
  misc_feature (1)..(25): SEQ ID NO: 3289; WAN024ANY; Start 77; Stop 101
gtaaaactataccctaaccaattga

SEQ ID NO: 351327 - DNA, 25 bp, Artificial
  probe
  misc_feature (1)..(25): SEQ ID NO: 3289; WAN024ANY; Start 72; Stop 96
ataaggtaaaactataccctaacca

SEQ ID NO: 351328 - DNA, 25 bp, Artificial
  probe
  misc_feature (1)..(25): SEQ ID NO: 3289; WAN024ANY; Start 78; Stop 102
taaaactataccctaaccaattgaa

SEQ ID NO: 351329 - DNA, 25 bp, Artificial
  probe
  misc_feature (1)..(25): SEQ ID NO: 3289; WAN024ANY; Start 76; Stop 100
ggtaaaactataccctaaccaattg

SEQ ID NO: 351330 - DNA, 25 bp, Artificial
  probe
  misc_feature (1)..(25): SEQ ID NO: 3289; WAN024ANY; Start 69; Stop 93
gctataaggtaaaactataccctaa

SEQ ID NO: 351331 - DNA, 25 bp, Artificial
  probe
  misc_feature (1)..(25): SEQ ID NO: 3289; WAN024ANY; Start 71; Stop 95
tataaggtaaaactataccctaacc

SEQ ID NO: 351332 - DNA, 25 bp, Artificial
  probe
  misc_feature (1)..(25): SEQ ID NO: 3290; WAN0249HF; Start 5; Stop 29
ctgtcctccgatatagcagaaagag

SEQ ID NO: 351333 - DNA, 25 bp, Artificial
  probe
  misc_feature (1)..(25): SEQ ID NO: 3290; WAN0249HF; Start 1; Stop 25
ctatctgtcctccgatatagcagaa

SEQ ID NO: 351334 - DNA, 25 bp, Artificial
  probe
  misc_feature (1)..(25): SEQ ID NO: 3290; WAN0249HF; Start 13; Stop 37
cgatatagcagaaagaggctggaaa

SEQ ID NO: 351335 - DNA, 25 bp, Artificial
  probe
  misc_feature (1)..(25): SEQ ID NO: 3290; WAN0249HF; Start 2; Stop 26
tatctgtcctccgatatagcagaaa

SEQ ID NO: 351336 - DNA, 25 bp, Artificial
  probe
  misc_feature (1)..(25): SEQ ID NO: 3290; WAN0249HF; Start 3; Stop 27
atctgtcctccgatatagcagaaag

SEQ ID NO: 351337 - DNA, 25 bp, Artificial
  probe
  misc_feature (1)..(25): SEQ ID NO: 3290; WAN0249HF; Start 14; Stop 38
gatatagcagaaagaggctggaaaa

SEQ ID NO: 351338 - DNA, 25 bp, Artificial
  probe
  misc_feature (1)..(25): SEQ ID NO: 3290; WAN0249HF; Start 4; Stop 28
tctgtcctccgatatagcagaaaga

SEQ ID NO: 351339 - DNA, 25 bp, Artificial
  probe
  misc_feature (1)..(25): SEQ ID NO: 3290; WAN0249HF; Start 12; Stop 36
ccgatatagcagaaagaggctggaa

SEQ ID NO: 351340 - DNA, 25 bp, Artificial
  probe
  misc_feature (1)..(25): SEQ ID NO: 3290; WAN0249HF; Start 10; Stop 34
ctccgatatagcagaaagaggctgg

SEQ ID NO: 351341 - DNA, 25 bp, Artificial
  probe
  misc_feature (1)..(25): SEQ ID NO: 3290; WAN0249HF; Start 11; Stop 35
tccgatatagcagaaagaggctgga

SEQ ID NO: 351342 - DNA, 25 bp, Artificial
  probe
  misc_feature (1)..(25): SEQ ID NO: 3290; WAN0249HF; Start 6; Stop 30
tgtcctccgatatagcagaaagagg

SEQ ID NO: 351343 - DNA, 25 bp, Artificial
  probe
  misc_feature (1)..(25): SEQ ID NO: 3290; WAN0249HF; Start 9; Stop 33
cctccgatatagcagaaagaggctg

SEQ ID NO: 351344 - DNA, 25 bp, Artificial
  probe
  misc_feature (1)..(25): SEQ ID NO: 3290; WAN0249HF; Start 7; Stop 31
gtcctccgatatagcagaaagaggc

SEQ ID NO: 351345 - DNA, 25 bp, Artificial
  probe
  misc_feature (1)..(25): SEQ ID NO: 3290; WAN0249HF; Start 8; Stop 32
tcctccgatatagcagaaagaggct

SEQ ID NO: 351346 - DNA, 25 bp, Artificial
  probe
  misc_feature (1)..(25): SEQ ID NO: 3291; WAN0249M8; Start 61; Stop 85
tgattaagagagaggtagttgacat

SEQ ID NO: 351347 - DNA, 25 bp, Artificial
  probe
  misc_feature (1)..(25): SEQ ID NO: 3291; WAN0249M8; Start 60; Stop 84
atgattaagagagaggtagttgaca

SEQ ID NO: 351348 - DNA, 25 bp, Artificial
  probe
  misc_feature (1)..(25): SEQ ID NO: 3291; WAN0249M8; Start 67; Stop 91
agagagaggtagttgacattctatc

SEQ ID NO: 351349 - DNA, 25 bp, Artificial
  probe
  misc_feature (1)..(25): SEQ ID NO: 3291; WAN0249M8; Start 68; Stop 92
gagagaggtagttgacattctatca

SEQ ID NO: 351350 - DNA, 25 bp, Artificial
  probe
  misc_feature (1)..(25): SEQ ID NO: 3291; WAN0249M8; Start 64; Stop 88
ttaagagagaggtagttgacattct

SEQ ID NO: 351351 - DNA, 25 bp, Artificial
  probe
  misc_feature (1)..(25): SEQ ID NO: 3291; WAN0249M8; Start 66; Stop 90
aagagagaggtagttgacattctat

SEQ ID NO: 351352 - DNA, 25 bp, Artificial
  probe
  misc_feature (1)..(25): SEQ ID NO: 3291; WAN0249M8; Start 63; Stop 87
attaagagagaggtagttgacattc

SEQ ID NO: 351353 - DNA, 25 bp, Artificial
  probe
  misc_feature (1)..(25): SEQ ID NO: 3291; WAN0249M8; Start 62; Stop 86
gattaagagagaggtagttgacatt

SEQ ID NO: 351354 - DNA, 25 bp, Artificial
  probe
  misc_feature (1)..(25): SEQ ID NO: 3291; WAN0249M8; Start 65; Stop 89
taagagagaggtagttgacattcta

SEQ ID NO: 351355 - DNA, 25 bp, Artificial
  probe
  misc_feature (1)..(25): SEQ ID NO: 3291; WAN0249M8; Start 8; Stop 32
ggttatggtttagggatgagacttt

SEQ ID NO: 351356 - DNA, 25 bp, Artificial
  probe
  misc_feature (1)..(25): SEQ ID NO: 3291; WAN0249M8; Start 3; Stop 27
atgttggttatggtttagggatgag

SEQ ID NO: 351357 - DNA, 25 bp, Artificial
  probe
  misc_feature (1)..(25): SEQ ID NO: 3291; WAN0249M8; Start 2; Stop 26
tatgttggttatggtttagggatga

SEQ ID NO: 351358 - DNA, 25 bp, Artificial
  probe
  misc_feature (1)..(25): SEQ ID NO: 3291; WAN0249M8; Start 1; Stop 25
ctatgttggttatggtttagggatg

SEQ ID NO: 351359 - DNA, 25 bp, Artificial
  probe
  misc_feature (1)..(25): SEQ ID NO: 3291; WAN0249M8; Start 59; Stop 83
tatgattaagagagaggtagttgac

SEQ ID NO: 351360 - DNA, 25 bp, Artificial
  probe
  misc_feature (1)..(25): SEQ ID NO: 3291; WAN0249M8; Start 7; Stop 31
tggttatggtttagggatgagactt

SEQ ID NO: 351361 - DNA, 25 bp, Artificial
  probe
  misc_feature (1)..(25): SEQ ID NO: 3291; WAN0249M8; Start 6; Stop 30
ttggttatggtttagggatgagact

SEQ ID NO: 351362 - DNA, 25 bp, Artificial
  probe
  misc_feature (1)..(25): SEQ ID NO: 3291; WAN0249M8; Start 5; Stop 29
gttggttatggtttagggatgagac

SEQ ID NO: 351363 - DNA, 25 bp, Artificial
  probe
  misc_feature (1)..(25): SEQ ID NO: 3291; WAN0249M8; Start 4; Stop 28
tgttggttatggtttagggatgaga

SEQ ID NO: 351364 - DNA, 25 bp, Artificial
  probe
  misc_feature (1)..(25): SEQ ID NO: 3291; WAN0249M8; Start 71; Stop 95
agaggtagttgacattctatcaagc

SEQ ID NO: 351365 - DNA, 25 bp, Artificial
  probe
  misc_feature (1)..(25): SEQ ID NO: 3291; WAN0249M8; Start 58; Stop 82
ttatgattaagagagaggtagttga

SEQ ID NO: 351366 - DNA, 25 bp, Artificial
  probe
  misc_feature (1)..(25): SEQ ID NO: 3291; WAN0249M8; Start 69; Stop 93
agagaggtagttgacattctatcaa

SEQ ID NO: 351367 - DNA, 25 bp, Artificial
  probe
  misc_feature (1)..(25): SEQ ID NO: 3291; WAN0249M8; Start 70; Stop 94
gagaggtagttgacattctatcaag

SEQ ID NO: 351368 - DNA, 25 bp, Artificial
  probe
  misc_feature (1)..(25): SEQ ID NO: 3291; WAN0249M8; Start 55; Stop 79
tgattatgattaagagagaggtagt

SEQ ID NO: 351369 - DNA, 25 bp, Artificial
  probe
  misc_feature (1)..(25): SEQ ID NO: 3291; WAN0249M8; Start 72; Stop 96
gaggtagttgacattctatcaagct

SEQ ID NO: 351370 - DNA, 25 bp, Artificial
  probe
  misc_feature (1)..(25): SEQ ID NO: 3291; WAN0249M8; Start 84; Stop 108
attctatcaagctgtcggtcagttc

SEQ ID NO: 351371 - DNA, 25 bp, Artificial
  probe
  misc_feature (1)..(25): SEQ ID NO: 3291; WAN0249M8; Start 73; Stop 97
aggtagttgacattctatcaagctg

SEQ ID NO: 351372 - DNA, 25 bp, Artificial
  probe
  misc_feature (1)..(25): SEQ ID NO: 3291; WAN0249M8; Start 74; Stop 98
ggtagttgacattctatcaagctgt

SEQ ID NO: 351373 - DNA, 25 bp, Artificial
  probe
  misc_feature (1)..(25): SEQ ID NO: 3291; WAN0249M8; Start 83; Stop 107
cattctatcaagctgtcggtcagtt

SEQ ID NO: 351374 - DNA, 25 bp, Artificial
  probe
  misc_feature (1)..(25): SEQ ID NO: 3291; WAN0249M8; Start 57; Stop 81
attatgattaagagagaggtagttg

SEQ ID NO: 351375 - DNA, 25 bp, Artificial
  probe
  misc_feature (1)..(25): SEQ ID NO: 3291; WAN0249M8; Start 9; Stop 33
gttatggtttagggatgagactttt

SEQ ID NO: 351376 - DNA, 25 bp, Artificial
  probe
  misc_feature (1)..(25): SEQ ID NO: 3291; WAN0249M8; Start 56; Stop 80
gattatgattaagagagaggtagtt

SEQ ID NO: 351377 - DNA, 25 bp, Artificial
  probe
  misc_feature (1)..(25): SEQ ID NO: 3291; WAN0249M8; Start 54; Stop 78
ttgattatgattaagagagaggtag

SEQ ID NO: 351378 - DNA, 25 bp, Artificial
  probe
  misc_feature (1)..(25): SEQ ID NO: 3291; WAN0249M8; Start 82; Stop 106
acattctatcaagctgtcggtcagt

SEQ ID NO: 351379 - DNA, 25 bp, Artificial
  probe
  misc_feature (1)..(25): SEQ ID NO: 3292; WAN0249WW; Start 32; Stop 56
gcacatgaaagtatgtattctaggt

SEQ ID NO: 351380 - DNA, 25 bp, Artificial
  probe
  misc_feature (1)..(25): SEQ ID NO: 3292; WAN0249WW; Start 19; Stop 43
aaagacttagaatgcacatgaaagt

SEQ ID NO: 351381 - DNA, 25 bp, Artificial
  probe
  misc_feature (1)..(25): SEQ ID NO: 3292; WAN0249WW; Start 23; Stop 47
acttagaatgcacatgaaagtatgt

SEQ ID NO: 351382 - DNA, 25 bp, Artificial
  probe
  misc_feature (1)..(25): SEQ ID NO: 3292; WAN0249WW; Start 35; Stop 59
catgaaagtatgtattctaggtctt

SEQ ID NO: 351383 - DNA, 25 bp, Artificial
  probe
  misc_feature (1)..(25): SEQ ID NO: 3292; WAN0249WW; Start 31; Stop 55
tgcacatgaaagtatgtattctagg

SEQ ID NO: 351384 - DNA, 25 bp, Artificial
  probe
  misc_feature (1)..(25): SEQ ID NO: 3292; WAN0249WW; Start 20; Stop 44
aagacttagaatgcacatgaaagta

SEQ ID NO: 351385 - DNA, 25 bp, Artificial
  probe
  misc_feature (1)..(25): SEQ ID NO: 3292; WAN0249WW; Start 22; Stop 46
gacttagaatgcacatgaaagtatg

SEQ ID NO: 351386 - DNA, 25 bp, Artificial
  probe
  misc_feature (1)..(25): SEQ ID NO: 3292; WAN0249WW; Start 21; Stop 45
agacttagaatgcacatgaaagtat

SEQ ID NO: 351387 - DNA, 25 bp, Artificial
  probe
  misc_feature (1)..(25): SEQ ID NO: 3292; WAN0249WW; Start 33; Stop 57
cacatgaaagtatgtattctaggtc

SEQ ID NO: 351388 - DNA, 25 bp, Artificial
  probe
  misc_feature (1)..(25): SEQ ID NO: 3292; WAN0249WW; Start 44; Stop 68
atgtattctaggtcttttgttttgt

SEQ ID NO: 351389 - DNA, 25 bp, Artificial
  probe
  misc_feature (1)..(25): SEQ ID NO: 3292; WAN0249WW; Start 18; Stop 42
aaaagacttagaatgcacatgaaag

SEQ ID NO: 351390 - DNA, 25 bp, Artificial
  probe
  misc_feature (1)..(25): SEQ ID NO: 3292; WAN0249WW; Start 34; Stop 58
acatgaaagtatgtattctaggtct

SEQ ID NO: 351391 - DNA, 25 bp, Artificial
  probe
  misc_feature (1)..(25): SEQ ID NO: 3292; WAN0249WW; Start 28; Stop 52
gaatgcacatgaaagtatgtattct

SEQ ID NO: 351392 - DNA, 25 bp, Artificial
  probe
  misc_feature (1)..(25): SEQ ID NO: 3292; WAN0249WW; Start 27; Stop 51
agaatgcacatgaaagtatgtattc

SEQ ID NO: 351393 - DNA, 25 bp, Artificial
  probe
  misc_feature (1)..(25): SEQ ID NO: 3292; WAN0249WW; Start 24; Stop 48
cttagaatgcacatgaaagtatgta

SEQ ID NO: 351394 - DNA, 25 bp, Artificial
  probe
  misc_feature (1)..(25): SEQ ID NO: 3292; WAN0249WW; Start 45; Stop 69
tgtattctaggtcttttgttttgta

SEQ ID NO: 351395 - DNA, 25 bp, Artificial
  probe
  misc_feature (1)..(25): SEQ ID NO: 3292; WAN0249WW; Start 30; Stop 54
atgcacatgaaagtatgtattctag

SEQ ID NO: 351396 - DNA, 25 bp, Artificial
  probe
  misc_feature (1)..(25): SEQ ID NO: 3292; WAN0249WW; Start 29; Stop 53
aatgcacatgaaagtatgtattcta

SEQ ID NO: 351397 - DNA, 25 bp, Artificial
  probe
  misc_feature (1)..(25): SEQ ID NO: 3292; WAN0249WW; Start 26; Stop 50
tagaatgcacatgaaagtatgtatt

SEQ ID NO: 351398 - DNA, 25 bp, Artificial
  probe
  misc_feature (1)..(25): SEQ ID NO: 3292; WAN0249WW; Start 25; Stop 49
ttagaatgcacatgaaagtatgtat

SEQ ID NO: 351399 - DNA, 25 bp, Artificial
  probe
  misc_feature (1)..(25): SEQ ID NO: 3292; WAN0249WW; Start 41; Stop 65
agtatgtattctaggtcttttgttt

SEQ ID NO: 351400 - DNA, 25 bp, Artificial
  probe
  misc_feature (1)..(25): SEQ ID NO: 3292; WAN0249WW; Start 40; Stop 64
aagtatgtattctaggtcttttgtt

SEQ ID NO: 351401 - DNA, 25 bp, Artificial
  probe
  misc_feature (1)..(25): SEQ ID NO: 3292; WAN0249WW; Start 36; Stop 60
atgaaagtatgtattctaggtcttt

SEQ ID NO: 351402 - DNA, 25 bp, Artificial
  probe
  misc_feature (1)..(25): SEQ ID NO: 3292; WAN0249WW; Start 46; Stop 70
gtattctaggtcttttgttttgtat

SEQ ID NO: 351403 - DNA, 25 bp, Artificial
  probe
  misc_feature (1)..(25): SEQ ID NO: 3292; WAN0249WW; Start 43; Stop 67
tatgtattctaggtcttttgttttg

SEQ ID NO: 351404 - DNA, 25 bp, Artificial
  probe
  misc_feature (1)..(25): SEQ ID NO: 3292; WAN0249WW; Start 42; Stop 66
gtatgtattctaggtcttttgtttt

SEQ ID NO: 351405 - DNA, 25 bp, Artificial
  probe
  misc_feature (1)..(25): SEQ ID NO: 3292; WAN0249WW; Start 39; Stop 63
aaagtatgtattctaggtcttttgt

SEQ ID NO: 351406 - DNA, 25 bp, Artificial
  probe
  misc_feature (1)..(25): SEQ ID NO: 3292; WAN0249WW; Start 37; Stop 61
tgaaagtatgtattctaggtctttt

SEQ ID NO: 351407 - DNA, 25 bp, Artificial
  probe
  misc_feature (1)..(25): SEQ ID NO: 3292; WAN0249WW; Start 38; Stop 62
gaaagtatgtattctaggtcttttg

SEQ ID NO: 351408 - DNA, 25 bp, Artificial
  probe
  misc_feature (1)..(25): SEQ ID NO: 3292; WAN0249WW; Start 48; Stop 72
attctaggtcttttgttttgtatac

SEQ ID NO: 351409 - DNA, 25 bp, Artificial
  probe
  misc_feature (1)..(25): SEQ ID NO: 3293; WAN0249RQ; Start 16; Stop 40
tcgtaaataataaagcgtttggttt

SEQ ID NO: 351410 - DNA, 25 bp, Artificial
  probe
  misc_feature (1)..(25): SEQ ID NO: 3293; WAN0249RQ; Start 17; Stop 41
cgtaaataataaagcgtttggtttc

SEQ ID NO: 351411 - DNA, 25 bp, Artificial
  probe
  misc_feature (1)..(25): SEQ ID NO: 3293; WAN0249RQ; Start 15; Stop 39
atcgtaaataataaagcgtttggtt

SEQ ID NO: 351412 - DNA, 25 bp, Artificial
  probe
  misc_feature (1)..(25): SEQ ID NO: 3293; WAN0249RQ; Start 14; Stop 38
tatcgtaaataataaagcgtttggt

SEQ ID NO: 351413 - DNA, 25 bp, Artificial
  probe
  misc_feature (1)..(25): SEQ ID NO: 3293; WAN0249RQ; Start 13; Stop 37
gtatcgtaaataataaagcgtttgg

SEQ ID NO: 351414 - DNA, 25 bp, Artificial
  probe
  misc_feature (1)..(25): SEQ ID NO: 3293; WAN0249RQ; Start 18; Stop 42
gtaaataataaagcgtttggtttct

SEQ ID NO: 351415 - DNA, 25 bp, Artificial
  probe
  misc_feature (1)..(25): SEQ ID NO: 3293; WAN0249RQ; Start 30; Stop 54
gcgtttggtttctagattattgtca

SEQ ID NO: 351416 - DNA, 25 bp, Artificial
  probe
  misc_feature (1)..(25): SEQ ID NO: 3293; WAN0249RQ; Start 29; Stop 53
agcgtttggtttctagattattgtc

SEQ ID NO: 351417 - DNA, 25 bp, Artificial
  probe
  misc_feature (1)..(25): SEQ ID NO: 3293; WAN0249RQ; Start 28; Stop 52
aagcgtttggtttctagattattgt

SEQ ID NO: 351418 - DNA, 25 bp, Artificial
  probe
  misc_feature (1)..(25): SEQ ID NO: 3293; WAN0249RQ; Start 20; Stop 44
aaataataaagcgtttggtttctag

SEQ ID NO: 351419 - DNA, 25 bp, Artificial
  probe
  misc_feature (1)..(25): SEQ ID NO: 3293; WAN0249RQ; Start 27; Stop 51
aaagcgtttggtttctagattattg

SEQ ID NO: 351420 - DNA, 25 bp, Artificial
  probe
  misc_feature (1)..(25): SEQ ID NO: 3293; WAN0249RQ; Start 12; Stop 36
agtatcgtaaataataaagcgtttg

SEQ ID NO: 351421 - DNA, 25 bp, Artificial
  probe
  misc_feature (1)..(25): SEQ ID NO: 3293; WAN0249RQ; Start 31; Stop 55
cgtttggtttctagattattgtcat

SEQ ID NO: 351422 - DNA, 25 bp, Artificial
  probe
  misc_feature (1)..(25): SEQ ID NO: 3293; WAN0249RQ; Start 93; Stop 117
ttttccgcataaaatgagggattat

SEQ ID NO: 351423 - DNA, 25 bp, Artificial
  probe
  misc_feature (1)..(25): SEQ ID NO: 3293; WAN0249RQ; Start 94; Stop 118
tttccgcataaaatgagggattata

SEQ ID NO: 351424 - DNA, 25 bp, Artificial
  probe
  misc_feature (1)..(25): SEQ ID NO: 3293; WAN0249RQ; Start 95; Stop 119
ttccgcataaaatgagggattatat

SEQ ID NO: 351425 - DNA, 25 bp, Artificial
  probe
  misc_feature (1)..(25): SEQ ID NO: 3293; WAN0249RQ; Start 26; Stop 50
taaagcgtttggtttctagattatt

SEQ ID NO: 351426 - DNA, 25 bp, Artificial
  probe
  misc_feature (1)..(25): SEQ ID NO: 3293; WAN0249RQ; Start 24; Stop 48
aataaagcgtttggtttctagatta

SEQ ID NO: 351427 - DNA, 25 bp, Artificial
  probe
  misc_feature (1)..(25): SEQ ID NO: 3293; WAN0249RQ; Start 23; Stop 47
taataaagcgtttggtttctagatt

SEQ ID NO: 351428 - DNA, 25 bp, Artificial
  probe
  misc_feature (1)..(25): SEQ ID NO: 3293; WAN0249RQ; Start 21; Stop 45
aataataaagcgtttggtttctaga

SEQ ID NO: 351429 - DNA, 25 bp, Artificial
  probe
  misc_feature (1)..(25): SEQ ID NO: 3293; WAN0249RQ; Start 22; Stop 46
ataataaagcgtttggtttctagat

SEQ ID NO: 351430 - DNA, 25 bp, Artificial
  probe
  misc_feature (1)..(25): SEQ ID NO: 3293; WAN0249RQ; Start 19; Stop 43
taaataataaagcgtttggtttcta

SEQ ID NO: 351431 - DNA, 25 bp, Artificial
  probe
  misc_feature (1)..(25): SEQ ID NO: 3293; WAN0249RQ; Start 25; Stop 49
ataaagcgtttggtttctagattat

SEQ ID NO: 351432 - DNA, 25 bp, Artificial
  probe
  misc_feature (1)..(25): SEQ ID NO: 3293; WAN0249RQ; Start 41; Stop 65
ctagattattgtcattcaaattgga

SEQ ID NO: 351433 - DNA, 25 bp, Artificial
  probe
  misc_feature (1)..(25): SEQ ID NO: 3293; WAN0249RQ; Start 34; Stop 58
ttggtttctagattattgtcattca

SEQ ID NO: 351434 - DNA, 25 bp, Artificial
  probe
  misc_feature (1)..(25): SEQ ID NO: 3293; WAN0249RQ; Start 96; Stop 120
tccgcataaaatgagggattatata

SEQ ID NO: 351435 - DNA, 25 bp, Artificial
  probe
  misc_feature (1)..(25): SEQ ID NO: 3293; WAN0249RQ; Start 35; Stop 59
tggtttctagattattgtcattcaa

SEQ ID NO: 351436 - DNA, 25 bp, Artificial
  probe
  misc_feature (1)..(25): SEQ ID NO: 3293; WAN0249RQ; Start 97; Stop 121
ccgcataaaatgagggattatatat

SEQ ID NO: 351437 - DNA, 25 bp, Artificial
  probe
  misc_feature (1)..(25): SEQ ID NO: 3293; WAN0249RQ; Start 92; Stop 116
attttccgcataaaatgagggatta

SEQ ID NO: 351438 - DNA, 25 bp, Artificial
  probe
  misc_feature (1)..(25): SEQ ID NO: 3293; WAN0249RQ; Start 91; Stop 115
tattttccgcataaaatgagggatt

SEQ ID NO: 351439 - DNA, 25 bp, Artificial
  probe
  misc_feature (1)..(25): SEQ ID NO: 3293; WAN0249RQ; Start 90; Stop 114
atattttccgcataaaatgagggat

SEQ ID NO: 351440 - DNA, 25 bp, Artificial
  probe
  misc_feature (1)..(25): SEQ ID NO: 3293; WAN0249RQ; Start 89; Stop 113
tatattttccgcataaaatgaggga

SEQ ID NO: 351441 - DNA, 25 bp, Artificial
  probe
  misc_feature (1)..(25): SEQ ID NO: 3293; WAN0249RQ; Start 32; Stop 56
gtttggtttctagattattgtcatt

SEQ ID NO: 351442 - DNA, 25 bp, Artificial
  probe
  misc_feature (1)..(25): SEQ ID NO: 3294; WAN0249YB; Start 94; Stop 118
gttctttgtaaccgctccattataa

SEQ ID NO: 351443 - DNA, 25 bp, Artificial
  probe
  misc_feature (1)..(25): SEQ ID NO: 3294; WAN0249YB; Start 95; Stop 119
ttctttgtaaccgctccattataaa

SEQ ID NO: 351444 - DNA, 25 bp, Artificial
  probe
  misc_feature (1)..(25): SEQ ID NO: 3294; WAN0249YB; Start 125; Stop 149
ttcactcttccggtatactattagg

SEQ ID NO: 351445 - DNA, 25 bp, Artificial
  probe
  misc_feature (1)..(25): SEQ ID NO: 3294; WAN0249YB; Start 126; Stop 150
tcactcttccggtatactattagga

SEQ ID NO: 351446 - DNA, 25 bp, Artificial
  probe
  misc_feature (1)..(25): SEQ ID NO: 3294; WAN0249YB; Start 121; Stop 145
tcctttcactcttccggtatactat

SEQ ID NO: 351447 - DNA, 25 bp, Artificial
  probe
  misc_feature (1)..(25): SEQ ID NO: 3294; WAN0249YB; Start 120; Stop 144
atcctttcactcttccggtatacta

SEQ ID NO: 351448 - DNA, 25 bp, Artificial
  probe
  misc_feature (1)..(25): SEQ ID NO: 3294; WAN0249YB; Start 122; Stop 146
cctttcactcttccggtatactatt

SEQ ID NO: 351449 - DNA, 25 bp, Artificial
  probe
  misc_feature (1)..(25): SEQ ID NO: 3294; WAN0249YB; Start 118; Stop 142
aaatcctttcactcttccggtatac

SEQ ID NO: 351450 - DNA, 25 bp, Artificial
  probe
  misc_feature (1)..(25): SEQ ID NO: 3294; WAN0249YB; Start 119; Stop 143
aatcctttcactcttccggtatact

SEQ ID NO: 351451 - DNA, 25 bp, Artificial
  probe
  misc_feature (1)..(25): SEQ ID NO: 3294; WAN0249YB; Start 100; Stop 124
tgtaaccgctccattataaaatcct

SEQ ID NO: 351452 - DNA, 25 bp, Artificial
  probe
  misc_feature (1)..(25): SEQ ID NO: 3294; WAN0249YB; Start 105; Stop 129
ccgctccattataaaatcctttcac

SEQ ID NO: 351453 - DNA, 25 bp, Artificial
  probe
  misc_feature (1)..(25): SEQ ID NO: 3294; WAN0249YB; Start 103; Stop 127
aaccgctccattataaaatcctttc

SEQ ID NO: 351454 - DNA, 25 bp, Artificial
  probe
  misc_feature (1)..(25): SEQ ID NO: 3294; WAN0249YB; Start 104; Stop 128
accgctccattataaaatcctttca

SEQ ID NO: 351455 - DNA, 25 bp, Artificial
  probe
  misc_feature (1)..(25): SEQ ID NO: 3294; WAN0249YB; Start 99; Stop 123
ttgtaaccgctccattataaaatcc

SEQ ID NO: 351456 - DNA, 25 bp, Artificial
  probe
  misc_feature (1)..(25): SEQ ID NO: 3294; WAN0249YB; Start 106; Stop 130
cgctccattataaaatcctttcact

SEQ ID NO: 351457 - DNA, 25 bp, Artificial
  probe
  misc_feature (1)..(25): SEQ ID NO: 3294; WAN0249YB; Start 101; Stop 125
gtaaccgctccattataaaatcctt

SEQ ID NO: 351458 - DNA, 25 bp, Artificial
  probe
  misc_feature (1)..(25): SEQ ID NO: 3294; WAN0249YB; Start 96; Stop 120
tctttgtaaccgctccattataaaa

SEQ ID NO: 351459 - DNA, 25 bp, Artificial
  probe
  misc_feature (1)..(25): SEQ ID NO: 3294; WAN0249YB; Start 102; Stop 126
taaccgctccattataaaatccttt

SEQ ID NO: 351460 - DNA, 25 bp, Artificial
  probe
  misc_feature (1)..(25): SEQ ID NO: 3294; WAN0249YB; Start 107; Stop 131
gctccattataaaatcctttcactc

SEQ ID NO: 351461 - DNA, 25 bp, Artificial
  probe
  misc_feature (1)..(25): SEQ ID NO: 3294; WAN0249YB; Start 98; Stop 122
tttgtaaccgctccattataaaatc

SEQ ID NO: 351462 - DNA, 25 bp, Artificial
  probe
  misc_feature (1)..(25): SEQ ID NO: 3294; WAN0249YB; Start 97; Stop 121
ctttgtaaccgctccattataaaat

SEQ ID NO: 351463 - DNA, 25 bp, Artificial
  probe
  misc_feature (1)..(25): SEQ ID NO: 3294; WAN0249YB; Start 124; Stop 148
tttcactcttccggtatactattag

SEQ ID NO: 351464 - DNA, 25 bp, Artificial
  probe
  misc_feature (1)..(25): SEQ ID NO: 3294; WAN0249YB; Start 123; Stop 147
ctttcactcttccggtatactatta

SEQ ID NO: 351465 - DNA, 25 bp, Artificial
  probe
  misc_feature (1)..(25): SEQ ID NO: 3294; WAN0249YB; Start 127; Stop 151
cactcttccggtatactattaggaa

SEQ ID NO: 351466 - DNA, 25 bp, Artificial
  probe
  misc_feature (1)..(25): SEQ ID NO: 3294; WAN0249YB; Start 84; Stop 108
tagaaagtaggttctttgtaaccgc

SEQ ID NO: 351467 - DNA, 25 bp, Artificial
  probe
  misc_feature (1)..(25): SEQ ID NO: 3294; WAN0249YB; Start 93; Stop 117
ggttctttgtaaccgctccattata

SEQ ID NO: 351468 - DNA, 25 bp, Artificial
  probe
  misc_feature (1)..(25): SEQ ID NO: 3294; WAN0249YB; Start 112; Stop 136
attataaaatcctttcactcttccg

SEQ ID NO: 351469 - DNA, 25 bp, Artificial
  probe
  misc_feature (1)..(25): SEQ ID NO: 3294; WAN0249YB; Start 117; Stop 141
aaaatcctttcactcttccggtata

SEQ ID NO: 351470 - DNA, 25 bp, Artificial
  probe
  misc_feature (1)..(25): SEQ ID NO: 3294; WAN0249YB; Start 116; Stop 140
taaaatcctttcactcttccggtat

SEQ ID NO: 351471 - DNA, 25 bp, Artificial
  probe
  misc_feature (1)..(25): SEQ ID NO: 3294; WAN0249YB; Start 115; Stop 139
ataaaatcctttcactcttccggta

SEQ ID NO: 351472 - DNA, 25 bp, Artificial
  probe
  misc_feature (1)..(25): SEQ ID NO: 3294; WAN0249YB; Start 114; Stop 138
tataaaatcctttcactcttccggt

SEQ ID NO: 351473 - DNA, 25 bp, Artificial
  probe
  misc_feature (1)..(25): SEQ ID NO: 3294; WAN0249YB; Start 83; Stop 107
atagaaagtaggttctttgtaaccg

SEQ ID NO: 351474 - DNA, 25 bp, Artificial
  probe
  misc_feature (1)..(25): SEQ ID NO: 3294; WAN0249YB; Start 91; Stop 115
taggttctttgtaaccgctccatta

SEQ ID NO: 351475 - DNA, 25 bp, Artificial
  probe
  misc_feature (1)..(25): SEQ ID NO: 3295; WAN024A4Z; Start 38; Stop 62
tcgtccataaactttcaaaagagaa

SEQ ID NO: 351476 - DNA, 25 bp, Artificial
  probe
  misc_feature (1)..(25): SEQ ID NO: 3295; WAN024A4Z; Start 37; Stop 61
ttcgtccataaactttcaaaagaga

SEQ ID NO: 351477 - DNA, 25 bp, Artificial
  probe
  misc_feature (1)..(25): SEQ ID NO: 3295; WAN024A4Z; Start 36; Stop 60
tttcgtccataaactttcaaaagag

SEQ ID NO: 351478 - DNA, 25 bp, Artificial
  probe
  misc_feature (1)..(25): SEQ ID NO: 3295; WAN024A4Z; Start 39; Stop 63
cgtccataaactttcaaaagagaat

SEQ ID NO: 351479 - DNA, 25 bp, Artificial
  probe
  misc_feature (1)..(25): SEQ ID NO: 3295; WAN024A4Z; Start 35; Stop 59
ttttcgtccataaactttcaaaaga

SEQ ID NO: 351480 - DNA, 25 bp, Artificial
  probe
  misc_feature (1)..(25): SEQ ID NO: 3295; WAN024A4Z; Start 40; Stop 64
gtccataaactttcaaaagagaatg

SEQ ID NO: 351481 - DNA, 25 bp, Artificial
  probe
  misc_feature (1)..(25): SEQ ID NO: 3295; WAN024A4Z; Start 42; Stop 66
ccataaactttcaaaagagaatggc

SEQ ID NO: 351482 - DNA, 25 bp, Artificial
  probe
  misc_feature (1)..(25): SEQ ID NO: 3295; WAN024A4Z; Start 41; Stop 65
tccataaactttcaaaagagaatgg

SEQ ID NO: 351483 - DNA, 25 bp, Artificial
  probe
  misc_feature (1)..(25): SEQ ID NO: 3296; WAN024AJX; Start 21; Stop 45
cgcatagtatcaaggctttatagaa

SEQ ID NO: 351484 - DNA, 25 bp, Artificial
  probe
  misc_feature (1)..(25): SEQ ID NO: 3296; WAN024AJX; Start 124; Stop 148
ttcctattttcccctatcattgtcc

SEQ ID NO: 351485 - DNA, 25 bp, Artificial
  probe
  misc_feature (1)..(25): SEQ ID NO: 3296; WAN024AJX; Start 127; Stop 151
ctattttcccctatcattgtccctg

SEQ ID NO: 351486 - DNA, 25 bp, Artificial
  probe
  misc_feature (1)..(25): SEQ ID NO: 3296; WAN024AJX; Start 22; Stop 46
gcatagtatcaaggctttatagaat

SEQ ID NO: 351487 - DNA, 25 bp, Artificial
  probe
  misc_feature (1)..(25): SEQ ID NO: 3296; WAN024AJX; Start 128; Stop 152
tattttcccctatcattgtccctgt

SEQ ID NO: 351488 - DNA, 25 bp, Artificial
  probe
  misc_feature (1)..(25): SEQ ID NO: 3296; WAN024AJX; Start 126; Stop 150
cctattttcccctatcattgtccct

SEQ ID NO: 351489 - DNA, 25 bp, Artificial
  probe
  misc_feature (1)..(25): SEQ ID NO: 3296; WAN024AJX; Start 125; Stop 149
tcctattttcccctatcattgtccc

SEQ ID NO: 351490 - DNA, 25 bp, Artificial
  probe
  misc_feature (1)..(25): SEQ ID NO: 3296; WAN024AJX; Start 123; Stop 147
attcctattttcccctatcattgtc

SEQ ID NO: 351491 - DNA, 25 bp, Artificial
  probe
  misc_feature (1)..(25): SEQ ID NO: 3296; WAN024AJX; Start 129; Stop 153
attttcccctatcattgtccctgtt

SEQ ID NO: 351492 - DNA, 25 bp, Artificial
  probe
  misc_feature (1)..(25): SEQ ID NO: 3296; WAN024AJX; Start 131; Stop 155
tttcccctatcattgtccctgtttt

SEQ ID NO: 351493 - DNA, 25 bp, Artificial
  probe
  misc_feature (1)..(25): SEQ ID NO: 3296; WAN024AJX; Start 130; Stop 154
ttttcccctatcattgtccctgttt

SEQ ID NO: 351494 - DNA, 25 bp, Artificial
  probe
  misc_feature (1)..(25): SEQ ID NO: 3296; WAN024AJX; Start 122; Stop 146
aattcctattttcccctatcattgt

SEQ ID NO: 351495 - DNA, 25 bp, Artificial
  probe
  misc_feature (1)..(25): SEQ ID NO: 3296; WAN024AJX; Start 94; Stop 118
tgtccaagatttctaaatcatctga

SEQ ID NO: 351496 - DNA, 25 bp, Artificial
  probe
  misc_feature (1)..(25): SEQ ID NO: 3296; WAN024AJX; Start 20; Stop 44
gcgcatagtatcaaggctttataga

SEQ ID NO: 351497 - DNA, 25 bp, Artificial
  probe
  misc_feature (1)..(25): SEQ ID NO: 3296; WAN024AJX; Start 93; Stop 117
ttgtccaagatttctaaatcatctg

SEQ ID NO: 351498 - DNA, 25 bp, Artificial
  probe
  misc_feature (1)..(25): SEQ ID NO: 3296; WAN024AJX; Start 39; Stop 63
tatagaatcttgatactatgcgctt

SEQ ID NO: 351499 - DNA, 25 bp, Artificial
  probe
  misc_feature (1)..(25): SEQ ID NO: 3296; WAN024AJX; Start 38; Stop 62
ttatagaatcttgatactatgcgct

SEQ ID NO: 351500 - DNA, 25 bp, Artificial
  probe
  misc_feature (1)..(25): SEQ ID NO: 3296; WAN024AJX; Start 114; Stop 138
tctgattaaattcctattttcccct

SEQ ID NO: 351501 - DNA, 25 bp, Artificial
  probe
  misc_feature (1)..(25): SEQ ID NO: 3296; WAN024AJX; Start 95; Stop 119
gtccaagatttctaaatcatctgat

SEQ ID NO: 351502 - DNA, 25 bp, Artificial
  probe
  misc_feature (1)..(25): SEQ ID NO: 3296; WAN024AJX; Start 92; Stop 116
tttgtccaagatttctaaatcatct

SEQ ID NO: 351503 - DNA, 25 bp, Artificial
  probe
  misc_feature (1)..(25): SEQ ID NO: 3296; WAN024AJX; Start 35; Stop 59
gctttatagaatcttgatactatgc

SEQ ID NO: 351504 - DNA, 25 bp, Artificial
  probe
  misc_feature (1)..(25): SEQ ID NO: 3296; WAN024AJX; Start 121; Stop 145
aaattcctattttcccctatcattg

SEQ ID NO: 351505 - DNA, 25 bp, Artificial
  probe
  misc_feature (1)..(25): SEQ ID NO: 3296; WAN024AJX; Start 40; Stop 64
atagaatcttgatactatgcgcttt

SEQ ID NO: 351506 - DNA, 25 bp, Artificial
  probe
  misc_feature (1)..(25): SEQ ID NO: 3296; WAN024AJX; Start 36; Stop 60
ctttatagaatcttgatactatgcg

SEQ ID NO: 351507 - DNA, 25 bp, Artificial
  probe
  misc_feature (1)..(25): SEQ ID NO: 3296; WAN024AJX; Start 113; Stop 137
atctgattaaattcctattttcccc

SEQ ID NO: 351508 - DNA, 25 bp, Artificial
  probe
  misc_feature (1)..(25): SEQ ID NO: 3296; WAN024AJX; Start 23; Stop 47
catagtatcaaggctttatagaatc

SEQ ID NO: 351509 - DNA, 25 bp, Artificial
  probe
  misc_feature (1)..(25): SEQ ID NO: 3296; WAN024AJX; Start 32; Stop 56
aaggctttatagaatcttgatacta

SEQ ID NO: 351510 - DNA, 25 bp, Artificial
  probe
  misc_feature (1)..(25): SEQ ID NO: 3296; WAN024AJX; Start 25; Stop 49
tagtatcaaggctttatagaatctt

SEQ ID NO: 351511 - DNA, 25 bp, Artificial
  probe
  misc_feature (1)..(25): SEQ ID NO: 3296; WAN024AJX; Start 19; Stop 43
agcgcatagtatcaaggctttatag

SEQ ID NO: 351512 - DNA, 25 bp, Artificial
  probe
  misc_feature (1)..(25): SEQ ID NO: 3296; WAN024AJX; Start 96; Stop 120
tccaagatttctaaatcatctgatt

SEQ ID NO: 351513 - DNA, 25 bp, Artificial
  probe
  misc_feature (1)..(25): SEQ ID NO: 3296; WAN024AJX; Start 115; Stop 139
ctgattaaattcctattttccccta

SEQ ID NO: 351514 - DNA, 25 bp, Artificial
  probe
  misc_feature (1)..(25): SEQ ID NO: 3296; WAN024AJX; Start 186; Stop 210
tcaataaaatgataggaggaacttt

SEQ ID NO: 351515 - DNA, 25 bp, Artificial
  probe
  misc_feature (1)..(25): SEQ ID NO: 3296; WAN024AJX; Start 34; Stop 58
ggctttatagaatcttgatactatg

SEQ ID NO: 351516 - DNA, 25 bp, Artificial
  probe
  misc_feature (1)..(25): SEQ ID NO: 3297; WAN024A77; Start 38; Stop 62
agaactataaggcatattcgtgaca

SEQ ID NO: 351517 - DNA, 25 bp, Artificial
  probe
  misc_feature (1)..(25): SEQ ID NO: 3297; WAN024A77; Start 37; Stop 61
gagaactataaggcatattcgtgac

SEQ ID NO: 351518 - DNA, 25 bp, Artificial
  probe
  misc_feature (1)..(25): SEQ ID NO: 3297; WAN024A77; Start 39; Stop 63
gaactataaggcatattcgtgacaa

SEQ ID NO: 351519 - DNA, 25 bp, Artificial
  probe
  misc_feature (1)..(25): SEQ ID NO: 3297; WAN024A77; Start 44; Stop 68
ataaggcatattcgtgacaaagttt

SEQ ID NO: 351520 - DNA, 25 bp, Artificial
  probe
  misc_feature (1)..(25): SEQ ID NO: 3297; WAN024A77; Start 42; Stop 66
ctataaggcatattcgtgacaaagt

SEQ ID NO: 351521 - DNA, 25 bp, Artificial
  probe
  misc_feature (1)..(25): SEQ ID NO: 3297; WAN024A77; Start 41; Stop 65
actataaggcatattcgtgacaaag

SEQ ID NO: 351522 - DNA, 25 bp, Artificial
  probe
  misc_feature (1)..(25): SEQ ID NO: 3297; WAN024A77; Start 32; Stop 56
acatcgagaactataaggcatattc

SEQ ID NO: 351523 - DNA, 25 bp, Artificial
  probe
  misc_feature (1)..(25): SEQ ID NO: 3297; WAN024A77; Start 74; Stop 98
aagtgatagaatgaagttgtctagg

SEQ ID NO: 351524 - DNA, 25 bp, Artificial
  probe
  misc_feature (1)..(25): SEQ ID NO: 3297; WAN024A77; Start 43; Stop 67
tataaggcatattcgtgacaaagtt

SEQ ID NO: 351525 - DNA, 25 bp, Artificial
  probe
  misc_feature (1)..(25): SEQ ID NO: 3297; WAN024A77; Start 40; Stop 64
aactataaggcatattcgtgacaaa

SEQ ID NO: 351526 - DNA, 25 bp, Artificial
  probe
  misc_feature (1)..(25): SEQ ID NO: 3297; WAN024A77; Start 1; Stop 25
ctatttcagcctctaaaccactaaa

SEQ ID NO: 351527 - DNA, 25 bp, Artificial
  probe
  misc_feature (1)..(25): SEQ ID NO: 3297; WAN024A77; Start 36; Stop 60
cgagaactataaggcatattcgtga

SEQ ID NO: 351528 - DNA, 25 bp, Artificial
  probe
  misc_feature (1)..(25): SEQ ID NO: 3297; WAN024A77; Start 31; Stop 55
tacatcgagaactataaggcatatt

SEQ ID NO: 351529 - DNA, 25 bp, Artificial
  probe
  misc_feature (1)..(25): SEQ ID NO: 3297; WAN024A77; Start 30; Stop 54
ttacatcgagaactataaggcatat

SEQ ID NO: 351530 - DNA, 25 bp, Artificial
  probe
  misc_feature (1)..(25): SEQ ID NO: 3297; WAN024A77; Start 76; Stop 100
gtgatagaatgaagttgtctaggga

SEQ ID NO: 351531 - DNA, 25 bp, Artificial
  probe
  misc_feature (1)..(25): SEQ ID NO: 3297; WAN024A77; Start 75; Stop 99
agtgatagaatgaagttgtctaggg

SEQ ID NO: 351532 - DNA, 25 bp, Artificial
  probe
  misc_feature (1)..(25): SEQ ID NO: 3297; WAN024A77; Start 35; Stop 59
tcgagaactataaggcatattcgtg

SEQ ID NO: 351533 - DNA, 25 bp, Artificial
  probe
  misc_feature (1)..(25): SEQ ID NO: 3297; WAN024A77; Start 34; Stop 58
atcgagaactataaggcatattcgt

SEQ ID NO: 351534 - DNA, 25 bp, Artificial
  probe
  misc_feature (1)..(25): SEQ ID NO: 3297; WAN024A77; Start 33; Stop 57
catcgagaactataaggcatattcg

SEQ ID NO: 351535 - DNA, 25 bp, Artificial
  probe
  misc_feature (1)..(25): SEQ ID NO: 3297; WAN024A77; Start 77; Stop 101
tgatagaatgaagttgtctagggaa

SEQ ID NO: 351536 - DNA, 25 bp, Artificial
  probe
  misc_feature (1)..(25): SEQ ID NO: 3297; WAN024A77; Start 27; Stop 51
cgtttacatcgagaactataaggca

SEQ ID NO: 351537 - DNA, 25 bp, Artificial
  probe
  misc_feature (1)..(25): SEQ ID NO: 3297; WAN024A77; Start 28; Stop 52
gtttacatcgagaactataaggcat

SEQ ID NO: 351538 - DNA, 25 bp, Artificial
  probe
  misc_feature (1)..(25): SEQ ID NO: 3297; WAN024A77; Start 26; Stop 50
acgtttacatcgagaactataaggc

SEQ ID NO: 351539 - DNA, 25 bp, Artificial
  probe
  misc_feature (1)..(25): SEQ ID NO: 3297; WAN024A77; Start 78; Stop 102
gatagaatgaagttgtctagggaaa

SEQ ID NO: 351540 - DNA, 25 bp, Artificial
  probe
  misc_feature (1)..(25): SEQ ID NO: 3297; WAN024A77; Start 3; Stop 27
atttcagcctctaaaccactaaaac

SEQ ID NO: 351541 - DNA, 25 bp, Artificial
  probe
  misc_feature (1)..(25): SEQ ID NO: 3297; WAN024A77; Start 45; Stop 69
taaggcatattcgtgacaaagtttt

SEQ ID NO: 351542 - DNA, 25 bp, Artificial
  probe
  misc_feature (1)..(25): SEQ ID NO: 3297; WAN024A77; Start 29; Stop 53
tttacatcgagaactataaggcata

SEQ ID NO: 351543 - DNA, 25 bp, Artificial
  probe
  misc_feature (1)..(25): SEQ ID NO: 3297; WAN024A77; Start 4; Stop 28
tttcagcctctaaaccactaaaacg

SEQ ID NO: 351544 - DNA, 25 bp, Artificial
  probe
  misc_feature (1)..(25): SEQ ID NO: 3297; WAN024A77; Start 2; Stop 26
tatttcagcctctaaaccactaaaa

SEQ ID NO: 351545 - DNA, 25 bp, Artificial
  probe
  misc_feature (1)..(25): SEQ ID NO: 3297; WAN024A77; Start 81; Stop 105
agaatgaagttgtctagggaaaatc

SEQ ID NO: 351546 - DNA, 25 bp, Artificial
  probe
  misc_feature (1)..(25): SEQ ID NO: 3297; WAN024A77; Start 82; Stop 106
gaatgaagttgtctagggaaaatcc

SEQ ID NO: 351547 - DNA, 25 bp, Artificial
  probe
  misc_feature (1)..(25): SEQ ID NO: 3297; WAN024A77; Start 73; Stop 97
aaagtgatagaatgaagttgtctag

SEQ ID NO: 351548 - DNA, 25 bp, Artificial
  probe
  misc_feature (1)..(25): SEQ ID NO: 3297; WAN024A77; Start 80; Stop 104
tagaatgaagttgtctagggaaaat

SEQ ID NO: 351549 - DNA, 25 bp, Artificial
  probe
  misc_feature (1)..(25): SEQ ID NO: 3298; WAN024A5V; Start 275; Stop 299
ttactgcccttcatttcttattagc

SEQ ID NO: 351550 - DNA, 25 bp, Artificial
  probe
  misc_feature (1)..(25): SEQ ID NO: 3298; WAN024A5V; Start 272; Stop 296
gacttactgcccttcatttcttatt

SEQ ID NO: 351551 - DNA, 25 bp, Artificial
  probe
  misc_feature (1)..(25): SEQ ID NO: 3298; WAN024A5V; Start 262; Stop 286
gtgattacttgacttactgcccttc

SEQ ID NO: 351552 - DNA, 25 bp, Artificial
  probe
  misc_feature (1)..(25): SEQ ID NO: 3298; WAN024A5V; Start 271; Stop 295
tgacttactgcccttcatttcttat

SEQ ID NO: 351553 - DNA, 25 bp, Artificial
  probe
  misc_feature (1)..(25): SEQ ID NO: 3298; WAN024A5V; Start 270; Stop 294
ttgacttactgcccttcatttctta

SEQ ID NO: 351554 - DNA, 25 bp, Artificial
  probe
  misc_feature (1)..(25): SEQ ID NO: 3298; WAN024A5V; Start 266; Stop 290
ttacttgacttactgcccttcattt

SEQ ID NO: 351555 - DNA, 25 bp, Artificial
  probe
  misc_feature (1)..(25): SEQ ID NO: 3298; WAN024A5V; Start 265; Stop 289
attacttgacttactgcccttcatt

SEQ ID NO: 351556 - DNA, 25 bp, Artificial
  probe
  misc_feature (1)..(25): SEQ ID NO: 3298; WAN024A5V; Start 264; Stop 288
gattacttgacttactgcccttcat

SEQ ID NO: 351557 - DNA, 25 bp, Artificial
  probe
  misc_feature (1)..(25): SEQ ID NO: 3298; WAN024A5V; Start 267; Stop 291
tacttgacttactgcccttcatttc

SEQ ID NO: 351558 - DNA, 25 bp, Artificial
  probe
  misc_feature (1)..(25): SEQ ID NO: 3298; WAN024A5V; Start 168; Stop 192
caattactaataaatggctgcgaaa

SEQ ID NO: 351559 - DNA, 25 bp, Artificial
  probe
  misc_feature (1)..(25): SEQ ID NO: 3298; WAN024A5V; Start 269; Stop 293
cttgacttactgcccttcatttctt

SEQ ID NO: 351560 - DNA, 25 bp, Artificial
  probe
  misc_feature (1)..(25): SEQ ID NO: 3298; WAN024A5V; Start 273; Stop 297
acttactgcccttcatttcttatta

SEQ ID NO: 351561 - DNA, 25 bp, Artificial
  probe
  misc_feature (1)..(25): SEQ ID NO: 3298; WAN024A5V; Start 37; Stop 61
tctctattataccacaatctagtcc

SEQ ID NO: 351562 - DNA, 25 bp, Artificial
  probe
  misc_feature (1)..(25): SEQ ID NO: 3298; WAN024A5V; Start 263; Stop 287
tgattacttgacttactgcccttca

SEQ ID NO: 351563 - DNA, 25 bp, Artificial
  probe
  misc_feature (1)..(25): SEQ ID NO: 3298; WAN024A5V; Start 261; Stop 285
agtgattacttgacttactgccctt

SEQ ID NO: 351564 - DNA, 25 bp, Artificial
  probe
  misc_feature (1)..(25): SEQ ID NO: 3298; WAN024A5V; Start 38; Stop 62
ctctattataccacaatctagtcct

SEQ ID NO: 351565 - DNA, 25 bp, Artificial
  probe
  misc_feature (1)..(25): SEQ ID NO: 3298; WAN024A5V; Start 276; Stop 300
tactgcccttcatttcttattagct

SEQ ID NO: 351566 - DNA, 25 bp, Artificial
  probe
  misc_feature (1)..(25): SEQ ID NO: 3298; WAN024A5V; Start 170; Stop 194
attactaataaatggctgcgaaatt

SEQ ID NO: 351567 - DNA, 25 bp, Artificial
  probe
  misc_feature (1)..(25): SEQ ID NO: 3298; WAN024A5V; Start 169; Stop 193
aattactaataaatggctgcgaaat

SEQ ID NO: 351568 - DNA, 25 bp, Artificial
  probe
  misc_feature (1)..(25): SEQ ID NO: 3298; WAN024A5V; Start 274; Stop 298
cttactgcccttcatttcttattag

SEQ ID NO: 351569 - DNA, 25 bp, Artificial
  probe
  misc_feature (1)..(25): SEQ ID NO: 3298; WAN024A5V; Start 146; Stop 170
gtaatgactaggaattctgtagcaa

SEQ ID NO: 351570 - DNA, 25 bp, Artificial
  probe
  misc_feature (1)..(25): SEQ ID NO: 3298; WAN024A5V; Start 268; Stop 292
acttgacttactgcccttcatttct

SEQ ID NO: 351571 - DNA, 25 bp, Artificial
  probe
  misc_feature (1)..(25): SEQ ID NO: 3298; WAN024A5V; Start 145; Stop 169
agtaatgactaggaattctgtagca

SEQ ID NO: 351572 - DNA, 25 bp, Artificial
  probe
  misc_feature (1)..(25): SEQ ID NO: 3298; WAN024A5V; Start 45; Stop 69
ataccacaatctagtcctatcataa

SEQ ID NO: 351573 - DNA, 25 bp, Artificial
  probe
  misc_feature (1)..(25): SEQ ID NO: 3298; WAN024A5V; Start 43; Stop 67
ttataccacaatctagtcctatcat

SEQ ID NO: 351574 - DNA, 25 bp, Artificial
  probe
  misc_feature (1)..(25): SEQ ID NO: 3298; WAN024A5V; Start 42; Stop 66
attataccacaatctagtcctatca

SEQ ID NO: 351575 - DNA, 25 bp, Artificial
  probe
  misc_feature (1)..(25): SEQ ID NO: 3298; WAN024A5V; Start 161; Stop 185
tctgtagcaattactaataaatggc

SEQ ID NO: 351576 - DNA, 25 bp, Artificial
  probe
  misc_feature (1)..(25): SEQ ID NO: 3298; WAN024A5V; Start 150; Stop 174
tgactaggaattctgtagcaattac

SEQ ID NO: 351577 - DNA, 25 bp, Artificial
  probe
  misc_feature (1)..(25): SEQ ID NO: 3298; WAN024A5V; Start 148; Stop 172
aatgactaggaattctgtagcaatt

SEQ ID NO: 351578 - DNA, 25 bp, Artificial
  probe
  misc_feature (1)..(25): SEQ ID NO: 3298; WAN024A5V; Start 147; Stop 171
taatgactaggaattctgtagcaat

SEQ ID NO: 351579 - DNA, 25 bp, Artificial
  probe
  misc_feature (1)..(25): SEQ ID NO: 3298; WAN024A5V; Start 92; Stop 116
ctagaataggagaattatgcagttc

SEQ ID NO: 351580 - DNA, 25 bp, Artificial
  probe
  misc_feature (1)..(25): SEQ ID NO: 3298; WAN024A5V; Start 151; Stop 175
gactaggaattctgtagcaattact

SEQ ID NO: 351581 - DNA, 25 bp, Artificial
  probe
  misc_feature (1)..(25): SEQ ID NO: 3298; WAN024A5V; Start 64; Stop 88
tcataaaagaaatactggtcctccc

SEQ ID NO: 351582 - DNA, 25 bp, Artificial
  probe
  misc_feature (1)..(25): SEQ ID NO: 3299; WAN024AMK; Start 107; Stop 131
atcaatctgaagacctagaaccttg

SEQ ID NO: 351583 - DNA, 25 bp, Artificial
  probe
  misc_feature (1)..(25): SEQ ID NO: 3299; WAN024AMK; Start 106; Stop 130
aatcaatctgaagacctagaacctt

SEQ ID NO: 351584 - DNA, 25 bp, Artificial
  probe
  misc_feature (1)..(25): SEQ ID NO: 3299; WAN024AMK; Start 39; Stop 63
cacccttagaagagaatgtcaagac

SEQ ID NO: 351585 - DNA, 25 bp, Artificial
  probe
  misc_feature (1)..(25): SEQ ID NO: 3299; WAN024AMK; Start 37; Stop 61
tacacccttagaagagaatgtcaag

SEQ ID NO: 351586 - DNA, 25 bp, Artificial
  probe
  misc_feature (1)..(25): SEQ ID NO: 3299; WAN024AMK; Start 105; Stop 129
aaatcaatctgaagacctagaacct

SEQ ID NO: 351587 - DNA, 25 bp, Artificial
  probe
  misc_feature (1)..(25): SEQ ID NO: 3299; WAN024AMK; Start 36; Stop 60
atacacccttagaagagaatgtcaa

SEQ ID NO: 351588 - DNA, 25 bp, Artificial
  probe
  misc_feature (1)..(25): SEQ ID NO: 3299; WAN024AMK; Start 38; Stop 62
acacccttagaagagaatgtcaaga

SEQ ID NO: 351589 - DNA, 25 bp, Artificial
  probe
  misc_feature (1)..(25): SEQ ID NO: 3299; WAN024AMK; Start 35; Stop 59
tatacacccttagaagagaatgtca

SEQ ID NO: 351590 - DNA, 25 bp, Artificial
  probe
  misc_feature (1)..(25): SEQ ID NO: 3299; WAN024AMK; Start 41; Stop 65
cccttagaagagaatgtcaagacaa

SEQ ID NO: 351591 - DNA, 25 bp, Artificial
  probe
  misc_feature (1)..(25): SEQ ID NO: 3299; WAN024AMK; Start 40; Stop 64
acccttagaagagaatgtcaagaca

SEQ ID NO: 351592 - DNA, 25 bp, Artificial
  probe
  misc_feature (1)..(25): SEQ ID NO: 3299; WAN024AMK; Start 42; Stop 66
ccttagaagagaatgtcaagacaaa

SEQ ID NO: 351593 - DNA, 25 bp, Artificial
  probe
  misc_feature (1)..(25): SEQ ID NO: 3299; WAN024AMK; Start 34; Stop 58
ttatacacccttagaagagaatgtc

SEQ ID NO: 351594 - DNA, 25 bp, Artificial
  probe
  misc_feature (1)..(25): SEQ ID NO: 3299; WAN024AMK; Start 33; Stop 57
attatacacccttagaagagaatgt

SEQ ID NO: 351595 - DNA, 25 bp, Artificial
  probe
  misc_feature (1)..(25): SEQ ID NO: 3299; WAN024AMK; Start 104; Stop 128
aaaatcaatctgaagacctagaacc

SEQ ID NO: 351596 - DNA, 25 bp, Artificial
  probe
  misc_feature (1)..(25): SEQ ID NO: 3299; WAN024AMK; Start 32; Stop 56
tattatacacccttagaagagaatg

SEQ ID NO: 351597 - DNA, 25 bp, Artificial
  probe
  misc_feature (1)..(25): SEQ ID NO: 3299; WAN024AMK; Start 30; Stop 54
tctattatacacccttagaagagaa

SEQ ID NO: 351598 - DNA, 25 bp, Artificial
  probe
  misc_feature (1)..(25): SEQ ID NO: 3299; WAN024AMK; Start 31; Stop 55
ctattatacacccttagaagagaat

SEQ ID NO: 351599 - DNA, 25 bp, Artificial
  probe
  misc_feature (1)..(25): SEQ ID NO: 3299; WAN024AMK; Start 43; Stop 67
cttagaagagaatgtcaagacaaaa

SEQ ID NO: 351600 - DNA, 25 bp, Artificial
  probe
  misc_feature (1)..(25): SEQ ID NO: 3299; WAN024AMK; Start 29; Stop 53
ttctattatacacccttagaagaga

SEQ ID NO: 351601 - DNA, 25 bp, Artificial
  probe
  misc_feature (1)..(25): SEQ ID NO: 3299; WAN024AMK; Start 26; Stop 50
tgattctattatacacccttagaag

SEQ ID NO: 351602 - DNA, 25 bp, Artificial
  probe
  misc_feature (1)..(25): SEQ ID NO: 3299; WAN024AMK; Start 28; Stop 52
attctattatacacccttagaagag

SEQ ID NO: 351603 - DNA, 25 bp, Artificial
  probe
  misc_feature (1)..(25): SEQ ID NO: 3299; WAN024AMK; Start 27; Stop 51
gattctattatacacccttagaaga

SEQ ID NO: 351604 - DNA, 25 bp, Artificial
  probe
  misc_feature (1)..(25): SEQ ID NO: 3300; WAN0249NN; Start 123; Stop 147
tacttccaaccacctattcacaatc

SEQ ID NO: 351605 - DNA, 25 bp, Artificial
  probe
  misc_feature (1)..(25): SEQ ID NO: 3300; WAN0249NN; Start 122; Stop 146
ctacttccaaccacctattcacaat

SEQ ID NO: 351606 - DNA, 25 bp, Artificial
  probe
  misc_feature (1)..(25): SEQ ID NO: 3300; WAN0249NN; Start 118; Stop 142
ttcactacttccaaccacctattca

SEQ ID NO: 351607 - DNA, 25 bp, Artificial
  probe
  misc_feature (1)..(25): SEQ ID NO: 3300; WAN0249NN; Start 121; Stop 145
actacttccaaccacctattcacaa

SEQ ID NO: 351608 - DNA, 25 bp, Artificial
  probe
  misc_feature (1)..(25): SEQ ID NO: 3300; WAN0249NN; Start 125; Stop 149
cttccaaccacctattcacaatcac

SEQ ID NO: 351609 - DNA, 25 bp, Artificial
  probe
  misc_feature (1)..(25): SEQ ID NO: 3300; WAN0249NN; Start 119; Stop 143
tcactacttccaaccacctattcac

SEQ ID NO: 351610 - DNA, 25 bp, Artificial
  probe
  misc_feature (1)..(25): SEQ ID NO: 3300; WAN0249NN; Start 124; Stop 148
acttccaaccacctattcacaatca

SEQ ID NO: 351611 - DNA, 25 bp, Artificial
  probe
  misc_feature (1)..(25): SEQ ID NO: 3300; WAN0249NN; Start 120; Stop 144
cactacttccaaccacctattcaca

SEQ ID NO: 351612 - DNA, 25 bp, Artificial
  probe
  misc_feature (1)..(25): SEQ ID NO: 3300; WAN0249NN; Start 277; Stop 301
cttccttagatcgaacatgaacatg

SEQ ID NO: 351613 - DNA, 25 bp, Artificial
  probe
  misc_feature (1)..(25): SEQ ID NO: 3300; WAN0249NN; Start 276; Stop 300
tcttccttagatcgaacatgaacat

SEQ ID NO: 351614 - DNA, 25 bp, Artificial
  probe
  misc_feature (1)..(25): SEQ ID NO: 3300; WAN0249NN; Start 275; Stop 299
gtcttccttagatcgaacatgaaca

SEQ ID NO: 351615 - DNA, 25 bp, Artificial
  probe
  misc_feature (1)..(25): SEQ ID NO: 3300; WAN0249NN; Start 340; Stop 364
tgaatggaggctaaacagaacttat

SEQ ID NO: 351616 - DNA, 25 bp, Artificial
  probe
  misc_feature (1)..(25): SEQ ID NO: 3300; WAN0249NN; Start 332; Stop 356
atagaaactgaatggaggctaaaca

SEQ ID NO: 351617 - DNA, 25 bp, Artificial
  probe
  misc_feature (1)..(25): SEQ ID NO: 3300; WAN0249NN; Start 117; Stop 141
tttcactacttccaaccacctattc

SEQ ID NO: 351618 - DNA, 25 bp, Artificial
  probe
  misc_feature (1)..(25): SEQ ID NO: 3300; WAN0249NN; Start 116; Stop 140
ctttcactacttccaaccacctatt

SEQ ID NO: 351619 - DNA, 25 bp, Artificial
  probe
  misc_feature (1)..(25): SEQ ID NO: 3300; WAN0249NN; Start 130; Stop 154
aaccacctattcacaatcaccacag

SEQ ID NO: 351620 - DNA, 25 bp, Artificial
  probe
  misc_feature (1)..(25): SEQ ID NO: 3300; WAN0249NN; Start 126; Stop 150
ttccaaccacctattcacaatcacc

SEQ ID NO: 351621 - DNA, 25 bp, Artificial
  probe
  misc_feature (1)..(25): SEQ ID NO: 3300; WAN0249NN; Start 341; Stop 365
gaatggaggctaaacagaacttatt

SEQ ID NO: 351622 - DNA, 25 bp, Artificial
  probe
  misc_feature (1)..(25): SEQ ID NO: 3300; WAN0249NN; Start 331; Stop 355
aatagaaactgaatggaggctaaac

SEQ ID NO: 351623 - DNA, 25 bp, Artificial
  probe
  misc_feature (1)..(25): SEQ ID NO: 3300; WAN0249NN; Start 330; Stop 354
caatagaaactgaatggaggctaaa

SEQ ID NO: 351624 - DNA, 25 bp, Artificial
  probe
  misc_feature (1)..(25): SEQ ID NO: 3300; WAN0249NN; Start 274; Stop 298
tgtcttccttagatcgaacatgaac

SEQ ID NO: 351625 - DNA, 25 bp, Artificial
  probe
  misc_feature (1)..(25): SEQ ID NO: 3300; WAN0249NN; Start 115; Stop 139
actttcactacttccaaccacctat

SEQ ID NO: 351626 - DNA, 25 bp, Artificial
  probe
  misc_feature (1)..(25): SEQ ID NO: 3300; WAN0249NN; Start 342; Stop 366
aatggaggctaaacagaacttattt

SEQ ID NO: 351627 - DNA, 25 bp, Artificial
  probe
  misc_feature (1)..(25): SEQ ID NO: 3300; WAN0249NN; Start 329; Stop 353
tcaatagaaactgaatggaggctaa

SEQ ID NO: 351628 - DNA, 25 bp, Artificial
  probe
  misc_feature (1)..(25): SEQ ID NO: 3300; WAN0249NN; Start 129; Stop 153
caaccacctattcacaatcaccaca

SEQ ID NO: 351629 - DNA, 25 bp, Artificial
  probe
  misc_feature (1)..(25): SEQ ID NO: 3300; WAN0249NN; Start 15; Stop 39
gactatccctttacatctctgcctt

SEQ ID NO: 351630 - DNA, 25 bp, Artificial
  probe
  misc_feature (1)..(25): SEQ ID NO: 3300; WAN0249NN; Start 328; Stop 352
ctcaatagaaactgaatggaggcta

SEQ ID NO: 351631 - DNA, 25 bp, Artificial
  probe
  misc_feature (1)..(25): SEQ ID NO: 3300; WAN0249NN; Start 325; Stop 349
caactcaatagaaactgaatggagg

SEQ ID NO: 351632 - DNA, 25 bp, Artificial
  probe
  misc_feature (1)..(25): SEQ ID NO: 3300; WAN0249NN; Start 16; Stop 40
actatccctttacatctctgccttg

SEQ ID NO: 351633 - DNA, 25 bp, Artificial
  probe
  misc_feature (1)..(25): SEQ ID NO: 3300; WAN0249NN; Start 22; Stop 46
cctttacatctctgccttgtttaac

SEQ ID NO: 351634 - DNA, 25 bp, Artificial
  probe
  misc_feature (1)..(25): SEQ ID NO: 3300; WAN0249NN; Start 326; Stop 350
aactcaatagaaactgaatggaggc

SEQ ID NO: 351635 - DNA, 25 bp, Artificial
  probe
  misc_feature (1)..(25): SEQ ID NO: 3300; WAN0249NN; Start 114; Stop 138
cactttcactacttccaaccaccta

SEQ ID NO: 351636 - DNA, 25 bp, Artificial
  probe
  misc_feature (1)..(25): SEQ ID NO: 3300; WAN0249NN; Start 339; Stop 363
ctgaatggaggctaaacagaactta

SEQ ID NO: 351637 - DNA, 25 bp, Artificial
  probe
  misc_feature (1)..(25): SEQ ID NO: 3301; WAN024APQ; Start 2; Stop 26
tcacgatattataccaaaattcgct

SEQ ID NO: 351638 - DNA, 25 bp, Artificial
  probe
  misc_feature (1)..(25): SEQ ID NO: 3301; WAN024APQ; Start 1; Stop 25
ctcacgatattataccaaaattcgc

SEQ ID NO: 351639 - DNA, 25 bp, Artificial
  probe
  misc_feature (1)..(25): SEQ ID NO: 3301; WAN024APQ; Start 52; Stop 76
actgcttttgtggtacaatagaaac

SEQ ID NO: 351640 - DNA, 25 bp, Artificial
  probe
  misc_feature (1)..(25): SEQ ID NO: 3301; WAN024APQ; Start 53; Stop 77
ctgcttttgtggtacaatagaaact

SEQ ID NO: 351641 - DNA, 25 bp, Artificial
  probe
  misc_feature (1)..(25): SEQ ID NO: 3301; WAN024APQ; Start 3; Stop 27
cacgatattataccaaaattcgcta

SEQ ID NO: 351642 - DNA, 25 bp, Artificial
  probe
  misc_feature (1)..(25): SEQ ID NO: 3301; WAN024APQ; Start 44; Stop 68
caaattttactgcttttgtggtaca

SEQ ID NO: 351643 - DNA, 25 bp, Artificial
  probe
  misc_feature (1)..(25): SEQ ID NO: 3301; WAN024APQ; Start 51; Stop 75
tactgcttttgtggtacaatagaaa

SEQ ID NO: 351644 - DNA, 25 bp, Artificial
  probe
  misc_feature (1)..(25): SEQ ID NO: 3301; WAN024APQ; Start 50; Stop 74
ttactgcttttgtggtacaatagaa

SEQ ID NO: 351645 - DNA, 25 bp, Artificial
  probe
  misc_feature (1)..(25): SEQ ID NO: 3301; WAN024APQ; Start 49; Stop 73
tttactgcttttgtggtacaataga

SEQ ID NO: 351646 - DNA, 25 bp, Artificial
  probe
  misc_feature (1)..(25): SEQ ID NO: 3301; WAN024APQ; Start 46; Stop 70
aattttactgcttttgtggtacaat

SEQ ID NO: 351647 - DNA, 25 bp, Artificial
  probe
  misc_feature (1)..(25): SEQ ID NO: 3301; WAN024APQ; Start 48; Stop 72
ttttactgcttttgtggtacaatag

SEQ ID NO: 351648 - DNA, 25 bp, Artificial
  probe
  misc_feature (1)..(25): SEQ ID NO: 3301; WAN024APQ; Start 4; Stop 28
acgatattataccaaaattcgctaa

SEQ ID NO: 351649 - DNA, 25 bp, Artificial
  probe
  misc_feature (1)..(25): SEQ ID NO: 3301; WAN024APQ; Start 47; Stop 71
attttactgcttttgtggtacaata

SEQ ID NO: 351650 - DNA, 25 bp, Artificial
  probe
  misc_feature (1)..(25): SEQ ID NO: 3301; WAN024APQ; Start 45; Stop 69
aaattttactgcttttgtggtacaa

SEQ ID NO: 351651 - DNA, 25 bp, Artificial
  probe
  misc_feature (1)..(25): SEQ ID NO: 3301; WAN024APQ; Start 5; Stop 29
cgatattataccaaaattcgctaat

SEQ ID NO: 351652 - DNA, 25 bp, Artificial
  probe
  misc_feature (1)..(25): SEQ ID NO: 3302; WAN0249YD; Start 7; Stop 31
acctctttcaatctaactctttcca

SEQ ID NO: 351653 - DNA, 25 bp, Artificial
  probe
  misc_feature (1)..(25): SEQ ID NO: 3302; WAN0249YD; Start 2; Stop 26
tcactacctctttcaatctaactct

SEQ ID NO: 351654 - DNA, 25 bp, Artificial
  probe
  misc_feature (1)..(25): SEQ ID NO: 3302; WAN0249YD; Start 8; Stop 32
cctctttcaatctaactctttccat

SEQ ID NO: 351655 - DNA, 25 bp, Artificial
  probe
  misc_feature (1)..(25): SEQ ID NO: 3302; WAN0249YD; Start 1; Stop 25
ctcactacctctttcaatctaactc

SEQ ID NO: 351656 - DNA, 25 bp, Artificial
  probe
  misc_feature (1)..(25): SEQ ID NO: 3302; WAN0249YD; Start 6; Stop 30
tacctctttcaatctaactctttcc

SEQ ID NO: 351657 - DNA, 25 bp, Artificial
  probe
  misc_feature (1)..(25): SEQ ID NO: 3302; WAN0249YD; Start 3; Stop 27
cactacctctttcaatctaactctt

SEQ ID NO: 351658 - DNA, 25 bp, Artificial
  probe
  misc_feature (1)..(25): SEQ ID NO: 3302; WAN0249YD; Start 4; Stop 28
actacctctttcaatctaactcttt

SEQ ID NO: 351659 - DNA, 25 bp, Artificial
  probe
  misc_feature (1)..(25): SEQ ID NO: 3302; WAN0249YD; Start 9; Stop 33
ctctttcaatctaactctttccatt

SEQ ID NO: 351660 - DNA, 25 bp, Artificial
  probe
  misc_feature (1)..(25): SEQ ID NO: 3302; WAN0249YD; Start 5; Stop 29
ctacctctttcaatctaactctttc

SEQ ID NO: 351661 - DNA, 25 bp, Artificial
  probe
  misc_feature (1)..(25): SEQ ID NO: 3302; WAN0249YD; Start 32; Stop 56
ttatatcataaagtaggcaaatccc

SEQ ID NO: 351662 - DNA, 25 bp, Artificial
  probe
  misc_feature (1)..(25): SEQ ID NO: 3302; WAN0249YD; Start 33; Stop 57
tatatcataaagtaggcaaatcccc

SEQ ID NO: 351663 - DNA, 25 bp, Artificial
  probe
  misc_feature (1)..(25): SEQ ID NO: 3302; WAN0249YD; Start 34; Stop 58
atatcataaagtaggcaaatcccct

SEQ ID NO: 351664 - DNA, 25 bp, Artificial
  probe
  misc_feature (1)..(25): SEQ ID NO: 3302; WAN0249YD; Start 10; Stop 34
tctttcaatctaactctttccatta

SEQ ID NO: 351665 - DNA, 25 bp, Artificial
  probe
  misc_feature (1)..(25): SEQ ID NO: 3302; WAN0249YD; Start 28; Stop 52
tccattatatcataaagtaggcaaa

SEQ ID NO: 351666 - DNA, 25 bp, Artificial
  probe
  misc_feature (1)..(25): SEQ ID NO: 3302; WAN0249YD; Start 27; Stop 51
ttccattatatcataaagtaggcaa

SEQ ID NO: 351667 - DNA, 25 bp, Artificial
  probe
  misc_feature (1)..(25): SEQ ID NO: 3302; WAN0249YD; Start 26; Stop 50
tttccattatatcataaagtaggca

SEQ ID NO: 351668 - DNA, 25 bp, Artificial
  probe
  misc_feature (1)..(25): SEQ ID NO: 3302; WAN0249YD; Start 44; Stop 68
gtaggcaaatcccctattttcaaaa

SEQ ID NO: 351669 - DNA, 25 bp, Artificial
  probe
  misc_feature (1)..(25): SEQ ID NO: 3302; WAN0249YD; Start 43; Stop 67
agtaggcaaatcccctattttcaaa

SEQ ID NO: 351670 - DNA, 25 bp, Artificial
  probe
  misc_feature (1)..(25): SEQ ID NO: 3302; WAN0249YD; Start 42; Stop 66
aagtaggcaaatcccctattttcaa

SEQ ID NO: 351671 - DNA, 25 bp, Artificial
  probe
  misc_feature (1)..(25): SEQ ID NO: 3302; WAN0249YD; Start 41; Stop 65
aaagtaggcaaatcccctattttca

SEQ ID NO: 351672 - DNA, 25 bp, Artificial
  probe
  misc_feature (1)..(25): SEQ ID NO: 3302; WAN0249YD; Start 37; Stop 61
tcataaagtaggcaaatcccctatt

SEQ ID NO: 351673 - DNA, 25 bp, Artificial
  probe
  misc_feature (1)..(25): SEQ ID NO: 3302; WAN0249YD; Start 11; Stop 35
ctttcaatctaactctttccattat

SEQ ID NO: 351674 - DNA, 25 bp, Artificial
  probe
  misc_feature (1)..(25): SEQ ID NO: 3302; WAN0249YD; Start 36; Stop 60
atcataaagtaggcaaatcccctat

SEQ ID NO: 351675 - DNA, 25 bp, Artificial
  probe
  misc_feature (1)..(25): SEQ ID NO: 3302; WAN0249YD; Start 40; Stop 64
taaagtaggcaaatcccctattttc

SEQ ID NO: 351676 - DNA, 25 bp, Artificial
  probe
  misc_feature (1)..(25): SEQ ID NO: 3302; WAN0249YD; Start 38; Stop 62
cataaagtaggcaaatcccctattt

SEQ ID NO: 351677 - DNA, 25 bp, Artificial
  probe
  misc_feature (1)..(25): SEQ ID NO: 3302; WAN0249YD; Start 35; Stop 59
tatcataaagtaggcaaatccccta

SEQ ID NO: 351678 - DNA, 25 bp, Artificial
  probe
  misc_feature (1)..(25): SEQ ID NO: 3302; WAN0249YD; Start 29; Stop 53
ccattatatcataaagtaggcaaat

SEQ ID NO: 351679 - DNA, 25 bp, Artificial
  probe
  misc_feature (1)..(25): SEQ ID NO: 3302; WAN0249YD; Start 39; Stop 63
ataaagtaggcaaatcccctatttt

SEQ ID NO: 351680 - DNA, 25 bp, Artificial
  probe
  misc_feature (1)..(25): SEQ ID NO: 3302; WAN0249YD; Start 25; Stop 49
ctttccattatatcataaagtaggc

SEQ ID NO: 351681 - DNA, 25 bp, Artificial
  probe
  misc_feature (1)..(25): SEQ ID NO: 3303; WAN024FAC; Start 1; Stop 25
ctcagagttaagtgacgatagccta

SEQ ID NO: 351682 - DNA, 25 bp, Artificial
  probe
  misc_feature (1)..(25): SEQ ID NO: 3303; WAN024FAC; Start 2; Stop 26
tcagagttaagtgacgatagcctag

SEQ ID NO: 351683 - DNA, 25 bp, Artificial
  probe
  misc_feature (1)..(25): SEQ ID NO: 3303; WAN024FAC; Start 49; Stop 73
gaacacagaagttaagccctagaac

SEQ ID NO: 351684 - DNA, 25 bp, Artificial
  probe
  misc_feature (1)..(25): SEQ ID NO: 3303; WAN024FAC; Start 106; Stop 130
atagggaagtcgcttagctttaatc

SEQ ID NO: 351685 - DNA, 25 bp, Artificial
  probe
  misc_feature (1)..(25): SEQ ID NO: 3303; WAN024FAC; Start 105; Stop 129
gatagggaagtcgcttagctttaat

SEQ ID NO: 351686 - DNA, 25 bp, Artificial
  probe
  misc_feature (1)..(25): SEQ ID NO: 3303; WAN024FAC; Start 104; Stop 128
agatagggaagtcgcttagctttaa

SEQ ID NO: 351687 - DNA, 25 bp, Artificial
  probe
  misc_feature (1)..(25): SEQ ID NO: 3303; WAN024FAC; Start 48; Stop 72
cgaacacagaagttaagccctagaa

SEQ ID NO: 351688 - DNA, 25 bp, Artificial
  probe
  misc_feature (1)..(25): SEQ ID NO: 3303; WAN024FAC; Start 103; Stop 127
gagatagggaagtcgcttagcttta

SEQ ID NO: 351689 - DNA, 25 bp, Artificial
  probe
  misc_feature (1)..(25): SEQ ID NO: 3303; WAN024FAC; Start 50; Stop 74
aacacagaagttaagccctagaacg

SEQ ID NO: 351690 - DNA, 25 bp, Artificial
  probe
  misc_feature (1)..(25): SEQ ID NO: 3303; WAN024FAC; Start 8; Stop 32
ttaagtgacgatagcctaggagata

SEQ ID NO: 351691 - DNA, 25 bp, Artificial
  probe
  misc_feature (1)..(25): SEQ ID NO: 3303; WAN024FAC; Start 9; Stop 33
taagtgacgatagcctaggagatac

SEQ ID NO: 351692 - DNA, 25 bp, Artificial
  probe
  misc_feature (1)..(25): SEQ ID NO: 3303; WAN024FAC; Start 7; Stop 31
gttaagtgacgatagcctaggagat

SEQ ID NO: 351693 - DNA, 25 bp, Artificial
  probe
  misc_feature (1)..(25): SEQ ID NO: 3303; WAN024FAC; Start 107; Stop 131
tagggaagtcgcttagctttaatcc

SEQ ID NO: 351694 - DNA, 25 bp, Artificial
  probe
  misc_feature (1)..(25): SEQ ID NO: 3303; WAN024FAC; Start 5; Stop 29
gagttaagtgacgatagcctaggag

SEQ ID NO: 351695 - DNA, 25 bp, Artificial
  probe
  misc_feature (1)..(25): SEQ ID NO: 3303; WAN024FAC; Start 6; Stop 30
agttaagtgacgatagcctaggaga

SEQ ID NO: 351696 - DNA, 25 bp, Artificial
  probe
  misc_feature (1)..(25): SEQ ID NO: 3303; WAN024FAC; Start 4; Stop 28
agagttaagtgacgatagcctagga

SEQ ID NO: 351697 - DNA, 25 bp, Artificial
  probe
  misc_feature (1)..(25): SEQ ID NO: 3303; WAN024FAC; Start 3; Stop 27
cagagttaagtgacgatagcctagg

SEQ ID NO: 351698 - DNA, 25 bp, Artificial
  probe
  misc_feature (1)..(25): SEQ ID NO: 3303; WAN024FAC; Start 10; Stop 34
aagtgacgatagcctaggagataca

SEQ ID NO: 351699 - DNA, 25 bp, Artificial
  probe
  misc_feature (1)..(25): SEQ ID NO: 3303; WAN024FAC; Start 17; Stop 41
gatagcctaggagatacacctgtac

SEQ ID NO: 351700 - DNA, 25 bp, Artificial
  probe
  misc_feature (1)..(25): SEQ ID NO: 3303; WAN024FAC; Start 102; Stop 126
tgagatagggaagtcgcttagcttt

SEQ ID NO: 351701 - DNA, 25 bp, Artificial
  probe
  misc_feature (1)..(25): SEQ ID NO: 3303; WAN024FAC; Start 47; Stop 71
ccgaacacagaagttaagccctaga

SEQ ID NO: 351702 - DNA, 25 bp, Artificial
  probe
  misc_feature (1)..(25): SEQ ID NO: 3303; WAN024FAC; Start 18; Stop 42
atagcctaggagatacacctgtacc

SEQ ID NO: 351703 - DNA, 25 bp, Artificial
  probe
  misc_feature (1)..(25): SEQ ID NO: 3303; WAN024FAC; Start 114; Stop 138
gtcgcttagctttaatccgccatag

SEQ ID NO: 351704 - DNA, 25 bp, Artificial
  probe
  misc_feature (1)..(25): SEQ ID NO: 3303; WAN024FAC; Start 98; Stop 122
cctgtgagatagggaagtcgcttag

SEQ ID NO: 351705 - DNA, 25 bp, Artificial
  probe
  misc_feature (1)..(25): SEQ ID NO: 3303; WAN024FAC; Start 16; Stop 40
cgatagcctaggagatacacctgta

SEQ ID NO: 351706 - DNA, 25 bp, Artificial
  probe
  misc_feature (1)..(25): SEQ ID NO: 3303; WAN024FAC; Start 23; Stop 47
ctaggagatacacctgtacccatgc

SEQ ID NO: 351707 - DNA, 25 bp, Artificial
  probe
  misc_feature (1)..(25): SEQ ID NO: 3303; WAN024FAC; Start 39; Stop 63
tacccatgccgaacacagaagttaa

SEQ ID NO: 351708 - DNA, 25 bp, Artificial
  probe
  misc_feature (1)..(25): SEQ ID NO: 3303; WAN024FAC; Start 101; Stop 125
gtgagatagggaagtcgcttagctt

SEQ ID NO: 351709 - DNA, 25 bp, Artificial
  probe
  misc_feature (1)..(25): SEQ ID NO: 3303; WAN024FAC; Start 99; Stop 123
ctgtgagatagggaagtcgcttagc

SEQ ID NO: 351710 - DNA, 25 bp, Artificial
  probe
  misc_feature (1)..(25): SEQ ID NO: 3303; WAN024FAC; Start 113; Stop 137
agtcgcttagctttaatccgccata

SEQ ID NO: 351711 - DNA, 25 bp, Artificial
  probe
  misc_feature (1)..(25): SEQ ID NO: 3303; WAN024FAC; Start 11; Stop 35
agtgacgatagcctaggagatacac

SEQ ID NO: 351712 - DNA, 25 bp, Artificial
  probe
  misc_feature (1)..(25): SEQ ID NO: 3303; WAN024FAC; Start 51; Stop 75
acacagaagttaagccctagaacgc

SEQ ID NO: 351713 - DNA, 25 bp, Artificial
  probe
  misc_feature (1)..(25): SEQ ID NO: 3303; WAN024FAC; Start 123; Stop 147
ctttaatccgccatagctcagttgg

SEQ ID NO: 351714 - DNA, 25 bp, Artificial
  probe
  misc_feature (1)..(25): SEQ ID NO: 3304; WAN024AP5; Start 59; Stop 83
cgaactagctaactgcctcactaac

SEQ ID NO: 351715 - DNA, 25 bp, Artificial
  probe
  misc_feature (1)..(25): SEQ ID NO: 3304; WAN024AP5; Start 32; Stop 56
aattgttggacgctagtcgctattt

SEQ ID NO: 351716 - DNA, 25 bp, Artificial
  probe
  misc_feature (1)..(25): SEQ ID NO: 3304; WAN024AP5; Start 31; Stop 55
aaattgttggacgctagtcgctatt

SEQ ID NO: 351717 - DNA, 25 bp, Artificial
  probe
  misc_feature (1)..(25): SEQ ID NO: 3304; WAN024AP5; Start 33; Stop 57
attgttggacgctagtcgctatttg

SEQ ID NO: 351718 - DNA, 25 bp, Artificial
  probe
  misc_feature (1)..(25): SEQ ID NO: 3304; WAN024AP5; Start 30; Stop 54
caaattgttggacgctagtcgctat

SEQ ID NO: 351719 - DNA, 25 bp, Artificial
  probe
  misc_feature (1)..(25): SEQ ID NO: 3304; WAN024AP5; Start 58; Stop 82
gcgaactagctaactgcctcactaa

SEQ ID NO: 351720 - DNA, 25 bp, Artificial
  probe
  misc_feature (1)..(25): SEQ ID NO: 3304; WAN024AP5; Start 3; Stop 27
cagtaccaacaattggaactaaagt

SEQ ID NO: 351721 - DNA, 25 bp, Artificial
  probe
  misc_feature (1)..(25): SEQ ID NO: 3304; WAN024AP5; Start 2; Stop 26
tcagtaccaacaattggaactaaag

SEQ ID NO: 351722 - DNA, 25 bp, Artificial
  probe
  misc_feature (1)..(25): SEQ ID NO: 3304; WAN024AP5; Start 1; Stop 25
ctcagtaccaacaattggaactaaa

SEQ ID NO: 351723 - DNA, 25 bp, Artificial
  probe
  misc_feature (1)..(25): SEQ ID NO: 3304; WAN024AP5; Start 4; Stop 28
agtaccaacaattggaactaaagtt

SEQ ID NO: 351724 - DNA, 25 bp, Artificial
  probe
  misc_feature (1)..(25): SEQ ID NO: 3304; WAN024AP5; Start 5; Stop 29
gtaccaacaattggaactaaagttc

SEQ ID NO: 351725 - DNA, 25 bp, Artificial
  probe
  misc_feature (1)..(25): SEQ ID NO: 3304; WAN024AP5; Start 51; Stop 75
ctatttggcgaactagctaactgcc

SEQ ID NO: 351726 - DNA, 25 bp, Artificial
  probe
  misc_feature (1)..(25): SEQ ID NO: 3304; WAN024AP5; Start 52; Stop 76
tatttggcgaactagctaactgcct

SEQ ID NO: 351727 - DNA, 25 bp, Artificial
  probe
  misc_feature (1)..(25): SEQ ID NO: 3304; WAN024AP5; Start 50; Stop 74
gctatttggcgaactagctaactgc

SEQ ID NO: 351728 - DNA, 25 bp, Artificial
  probe
  misc_feature (1)..(25): SEQ ID NO: 3304; WAN024AP5; Start 49; Stop 73
cgctatttggcgaactagctaactg

SEQ ID NO: 351729 - DNA, 25 bp, Artificial
  probe
  misc_feature (1)..(25): SEQ ID NO: 3305; WAN0249OL; Start 23; Stop 47
tgtcttgtcttttacgcttttattc

SEQ ID NO: 351730 - DNA, 25 bp, Artificial
  probe
  misc_feature (1)..(25): SEQ ID NO: 3305; WAN0249OL; Start 24; Stop 48
gtcttgtcttttacgcttttattct

SEQ ID NO: 351731 - DNA, 25 bp, Artificial
  probe
  misc_feature (1)..(25): SEQ ID NO: 3305; WAN0249OL; Start 19; Stop 43
ctcatgtcttgtcttttacgctttt

SEQ ID NO: 351732 - DNA, 25 bp, Artificial
  probe
  misc_feature (1)..(25): SEQ ID NO: 3305; WAN0249OL; Start 20; Stop 44
tcatgtcttgtcttttacgctttta

SEQ ID NO: 351733 - DNA, 25 bp, Artificial
  probe
  misc_feature (1)..(25): SEQ ID NO: 3305; WAN0249OL; Start 22; Stop 46
atgtcttgtcttttacgcttttatt

SEQ ID NO: 351734 - DNA, 25 bp, Artificial
  probe
  misc_feature (1)..(25): SEQ ID NO: 3305; WAN0249OL; Start 21; Stop 45
catgtcttgtcttttacgcttttat

SEQ ID NO: 351735 - DNA, 25 bp, Artificial
  probe
  misc_feature (1)..(25): SEQ ID NO: 3305; WAN0249OL; Start 18; Stop 42
gctcatgtcttgtcttttacgcttt

SEQ ID NO: 351736 - DNA, 25 bp, Artificial
  probe
  misc_feature (1)..(25): SEQ ID NO: 3305; WAN0249OL; Start 28; Stop 52
tgtcttttacgcttttattctaact

SEQ ID NO: 351737 - DNA, 25 bp, Artificial
  probe
  misc_feature (1)..(25): SEQ ID NO: 3305; WAN0249OL; Start 25; Stop 49
tcttgtcttttacgcttttattcta

SEQ ID NO: 351738 - DNA, 25 bp, Artificial
  probe
  misc_feature (1)..(25): SEQ ID NO: 3305; WAN0249OL; Start 27; Stop 51
ttgtcttttacgcttttattctaac

SEQ ID NO: 351739 - DNA, 25 bp, Artificial
  probe
  misc_feature (1)..(25): SEQ ID NO: 3305; WAN0249OL; Start 17; Stop 41
tgctcatgtcttgtcttttacgctt

SEQ ID NO: 351740 - DNA, 25 bp, Artificial
  probe
  misc_feature (1)..(25): SEQ ID NO: 3305; WAN0249OL; Start 29; Stop 53
gtcttttacgcttttattctaactt

SEQ ID NO: 351741 - DNA, 25 bp, Artificial
  probe
  misc_feature (1)..(25): SEQ ID NO: 3305; WAN0249OL; Start 26; Stop 50
cttgtcttttacgcttttattctaa

SEQ ID NO: 351742 - DNA, 25 bp, Artificial
  probe
  misc_feature (1)..(25): SEQ ID NO: 3305; WAN0249OL; Start 16; Stop 40
ctgctcatgtcttgtcttttacgct

SEQ ID NO: 351743 - DNA, 25 bp, Artificial
  probe
  misc_feature (1)..(25): SEQ ID NO: 3305; WAN0249OL; Start 36; Stop 60
acgcttttattctaacttattagga

SEQ ID NO: 351744 - DNA, 25 bp, Artificial
  probe
  misc_feature (1)..(25): SEQ ID NO: 3305; WAN0249OL; Start 37; Stop 61
cgcttttattctaacttattaggaa

SEQ ID NO: 351745 - DNA, 25 bp, Artificial
  probe
  misc_feature (1)..(25): SEQ ID NO: 3306; WAN024A7F; Start 2; Stop 26
tccacctactattcatttacttgct

SEQ ID NO: 351746 - DNA, 25 bp, Artificial
  probe
  misc_feature (1)..(25): SEQ ID NO: 3306; WAN024A7F; Start 3; Stop 27
ccacctactattcatttacttgctc

SEQ ID NO: 351747 - DNA, 25 bp, Artificial
  probe
  misc_feature (1)..(25): SEQ ID NO: 3306; WAN024A7F; Start 1; Stop 25
ctccacctactattcatttacttgc

SEQ ID NO: 351748 - DNA, 25 bp, Artificial
  probe
  misc_feature (1)..(25): SEQ ID NO: 3306; WAN024A7F; Start 4; Stop 28
cacctactattcatttacttgctct

SEQ ID NO: 351749 - DNA, 25 bp, Artificial
  probe
  misc_feature (1)..(25): SEQ ID NO: 3306; WAN024A7F; Start 14; Stop 38
tcatttacttgctctttcatgggta

SEQ ID NO: 351750 - DNA, 25 bp, Artificial
  probe
  misc_feature (1)..(25): SEQ ID NO: 3306; WAN024A7F; Start 12; Stop 36
attcatttacttgctctttcatggg

SEQ ID NO: 351751 - DNA, 25 bp, Artificial
  probe
  misc_feature (1)..(25): SEQ ID NO: 3306; WAN024A7F; Start 15; Stop 39
catttacttgctctttcatgggtat

SEQ ID NO: 351752 - DNA, 25 bp, Artificial
  probe
  misc_feature (1)..(25): SEQ ID NO: 3306; WAN024A7F; Start 13; Stop 37
ttcatttacttgctctttcatgggt

SEQ ID NO: 351753 - DNA, 25 bp, Artificial
  probe
  misc_feature (1)..(25): SEQ ID NO: 3306; WAN024A7F; Start 16; Stop 40
atttacttgctctttcatgggtatt

SEQ ID NO: 351754 - DNA, 25 bp, Artificial
  probe
  misc_feature (1)..(25): SEQ ID NO: 3306; WAN024A7F; Start 5; Stop 29
acctactattcatttacttgctctt

SEQ ID NO: 351755 - DNA, 25 bp, Artificial
  probe
  misc_feature (1)..(25): SEQ ID NO: 3306; WAN024A7F; Start 69; Stop 93
ccatttatgtaccattatgagggaa

SEQ ID NO: 351756 - DNA, 25 bp, Artificial
  probe
  misc_feature (1)..(25): SEQ ID NO: 3306; WAN024A7F; Start 67; Stop 91
ctccatttatgtaccattatgaggg

SEQ ID NO: 351757 - DNA, 25 bp, Artificial
  probe
  misc_feature (1)..(25): SEQ ID NO: 3306; WAN024A7F; Start 17; Stop 41
tttacttgctctttcatgggtatta

SEQ ID NO: 351758 - DNA, 25 bp, Artificial
  probe
  misc_feature (1)..(25): SEQ ID NO: 3306; WAN024A7F; Start 20; Stop 44
acttgctctttcatgggtattatta

SEQ ID NO: 351759 - DNA, 25 bp, Artificial
  probe
  misc_feature (1)..(25): SEQ ID NO: 3306; WAN024A7F; Start 19; Stop 43
tacttgctctttcatgggtattatt

SEQ ID NO: 351760 - DNA, 25 bp, Artificial
  probe
  misc_feature (1)..(25): SEQ ID NO: 3306; WAN024A7F; Start 18; Stop 42
ttacttgctctttcatgggtattat

SEQ ID NO: 351761 - DNA, 25 bp, Artificial
  probe
  misc_feature (1)..(25): SEQ ID NO: 3306; WAN024A7F; Start 68; Stop 92
tccatttatgtaccattatgaggga

SEQ ID NO: 351762 - DNA, 25 bp, Artificial
  probe
  misc_feature (1)..(25): SEQ ID NO: 3306; WAN024A7F; Start 66; Stop 90
tctccatttatgtaccattatgagg

SEQ ID NO: 351763 - DNA, 25 bp, Artificial
  probe
  misc_feature (1)..(25): SEQ ID NO: 3306; WAN024A7F; Start 6; Stop 30
cctactattcatttacttgctcttt

SEQ ID NO: 351764 - DNA, 25 bp, Artificial
  probe
  misc_feature (1)..(25): SEQ ID NO: 3306; WAN024A7F; Start 11; Stop 35
tattcatttacttgctctttcatgg

SEQ ID NO: 351765 - DNA, 25 bp, Artificial
  probe
  misc_feature (1)..(25): SEQ ID NO: 3306; WAN024A7F; Start 9; Stop 33
actattcatttacttgctctttcat

SEQ ID NO: 351766 - DNA, 25 bp, Artificial
  probe
  misc_feature (1)..(25): SEQ ID NO: 3306; WAN024A7F; Start 70; Stop 94
catttatgtaccattatgagggaaa

SEQ ID NO: 351767 - DNA, 25 bp, Artificial
  probe
  misc_feature (1)..(25): SEQ ID NO: 3306; WAN024A7F; Start 21; Stop 45
cttgctctttcatgggtattattat

SEQ ID NO: 351768 - DNA, 25 bp, Artificial
  probe
  misc_feature (1)..(25): SEQ ID NO: 3306; WAN024A7F; Start 8; Stop 32
tactattcatttacttgctctttca

SEQ ID NO: 351769 - DNA, 25 bp, Artificial
  probe
  misc_feature (1)..(25): SEQ ID NO: 3306; WAN024A7F; Start 10; Stop 34
ctattcatttacttgctctttcatg

SEQ ID NO: 351770 - DNA, 25 bp, Artificial
  probe
  misc_feature (1)..(25): SEQ ID NO: 3306; WAN024A7F; Start 7; Stop 31
ctactattcatttacttgctctttc

SEQ ID NO: 351771 - DNA, 25 bp, Artificial
  probe
  misc_feature (1)..(25): SEQ ID NO: 3306; WAN024A7F; Start 65; Stop 89
atctccatttatgtaccattatgag

SEQ ID NO: 351772 - DNA, 25 bp, Artificial
  probe
  misc_feature (1)..(25): SEQ ID NO: 3306; WAN024A7F; Start 23; Stop 47
tgctctttcatgggtattattatac

SEQ ID NO: 351773 - DNA, 25 bp, Artificial
  probe
  misc_feature (1)..(25): SEQ ID NO: 3306; WAN024A7F; Start 64; Stop 88
aatctccatttatgtaccattatga

SEQ ID NO: 351774 - DNA, 25 bp, Artificial
  probe
  misc_feature (1)..(25): SEQ ID NO: 3306; WAN024A7F; Start 22; Stop 46
ttgctctttcatgggtattattata

SEQ ID NO: 351775 - DNA, 25 bp, Artificial
  probe
  misc_feature (1)..(25): SEQ ID NO: 3306; WAN024A7F; Start 63; Stop 87
aaatctccatttatgtaccattatg

SEQ ID NO: 351776 - DNA, 25 bp, Artificial
  probe
  misc_feature (1)..(25): SEQ ID NO: 3306; WAN024A7F; Start 71; Stop 95
atttatgtaccattatgagggaaaa

SEQ ID NO: 351777 - DNA, 25 bp, Artificial
  probe
  misc_feature (1)..(25): SEQ ID NO: 3306; WAN024A7F; Start 24; Stop 48
gctctttcatgggtattattatacc

SEQ ID NO: 351778 - DNA, 25 bp, Artificial
  probe
  misc_feature (1)..(25): SEQ ID NO: 3307; WAN024AJV; Start 87; Stop 111
atagaagagtgacaacagaggtaac

SEQ ID NO: 351779 - DNA, 25 bp, Artificial
  probe
  misc_feature (1)..(25): SEQ ID NO: 3307; WAN024AJV; Start 85; Stop 109
tgatagaagagtgacaacagaggta

SEQ ID NO: 351780 - DNA, 25 bp, Artificial
  probe
  misc_feature (1)..(25): SEQ ID NO: 3307; WAN024AJV; Start 81; Stop 105
ggtatgatagaagagtgacaacaga

SEQ ID NO: 351781 - DNA, 25 bp, Artificial
  probe
  misc_feature (1)..(25): SEQ ID NO: 3307; WAN024AJV; Start 78; Stop 102
aacggtatgatagaagagtgacaac

SEQ ID NO: 351782 - DNA, 25 bp, Artificial
  probe
  misc_feature (1)..(25): SEQ ID NO: 3307; WAN024AJV; Start 86; Stop 110
gatagaagagtgacaacagaggtaa

SEQ ID NO: 351783 - DNA, 25 bp, Artificial
  probe
  misc_feature (1)..(25): SEQ ID NO: 3307; WAN024AJV; Start 83; Stop 107
tatgatagaagagtgacaacagagg

SEQ ID NO: 351784 - DNA, 25 bp, Artificial
  probe
  misc_feature (1)..(25): SEQ ID NO: 3307; WAN024AJV; Start 88; Stop 112
tagaagagtgacaacagaggtaaca

SEQ ID NO: 351785 - DNA, 25 bp, Artificial
  probe
  misc_feature (1)..(25): SEQ ID NO: 3307; WAN024AJV; Start 80; Stop 104
cggtatgatagaagagtgacaacag

SEQ ID NO: 351786 - DNA, 25 bp, Artificial
  probe
  misc_feature (1)..(25): SEQ ID NO: 3307; WAN024AJV; Start 84; Stop 108
atgatagaagagtgacaacagaggt

SEQ ID NO: 351787 - DNA, 25 bp, Artificial
  probe
  misc_feature (1)..(25): SEQ ID NO: 3307; WAN024AJV; Start 79; Stop 103
acggtatgatagaagagtgacaaca

SEQ ID NO: 351788 - DNA, 25 bp, Artificial
  probe
  misc_feature (1)..(25): SEQ ID NO: 3307; WAN024AJV; Start 82; Stop 106
gtatgatagaagagtgacaacagag

SEQ ID NO: 351789 - DNA, 25 bp, Artificial
  probe
  misc_feature (1)..(25): SEQ ID NO: 3307; WAN024AJV; Start 91; Stop 115
aagagtgacaacagaggtaacagag

SEQ ID NO: 351790 - DNA, 25 bp, Artificial
  probe
  misc_feature (1)..(25): SEQ ID NO: 3307; WAN024AJV; Start 90; Stop 114
gaagagtgacaacagaggtaacaga

SEQ ID NO: 351791 - DNA, 25 bp, Artificial
  probe
  misc_feature (1)..(25): SEQ ID NO: 3307; WAN024AJV; Start 89; Stop 113
agaagagtgacaacagaggtaacag

SEQ ID NO: 351792 - DNA, 25 bp, Artificial
  probe
  misc_feature (1)..(25): SEQ ID NO: 3307; WAN024AJV; Start 77; Stop 101
aaacggtatgatagaagagtgacaa

SEQ ID NO: 351793 - DNA, 25 bp, Artificial
  probe
  misc_feature (1)..(25): SEQ ID NO: 3307; WAN024AJV; Start 40; Stop 64
aactttctaggttgtctatcttgct

SEQ ID NO: 351794 - DNA, 25 bp, Artificial
  probe
  misc_feature (1)..(25): SEQ ID NO: 3307; WAN024AJV; Start 41; Stop 65
actttctaggttgtctatcttgcta

SEQ ID NO: 351795 - DNA, 25 bp, Artificial
  probe
  misc_feature (1)..(25): SEQ ID NO: 3307; WAN024AJV; Start 36; Stop 60
ggcaaactttctaggttgtctatct

SEQ ID NO: 351796 - DNA, 25 bp, Artificial
  probe
  misc_feature (1)..(25): SEQ ID NO: 3307; WAN024AJV; Start 29; Stop 53
gtaattgggcaaactttctaggttg

SEQ ID NO: 351797 - DNA, 25 bp, Artificial
  probe
  misc_feature (1)..(25): SEQ ID NO: 3307; WAN024AJV; Start 39; Stop 63
aaactttctaggttgtctatcttgc

SEQ ID NO: 351798 - DNA, 25 bp, Artificial
  probe
  misc_feature (1)..(25): SEQ ID NO: 3307; WAN024AJV; Start 30; Stop 54
taattgggcaaactttctaggttgt

SEQ ID NO: 351799 - DNA, 25 bp, Artificial
  probe
  misc_feature (1)..(25): SEQ ID NO: 3307; WAN024AJV; Start 37; Stop 61
gcaaactttctaggttgtctatctt

SEQ ID NO: 351800 - DNA, 25 bp, Artificial
  probe
  misc_feature (1)..(25): SEQ ID NO: 3307; WAN024AJV; Start 35; Stop 59
gggcaaactttctaggttgtctatc

SEQ ID NO: 351801 - DNA, 25 bp, Artificial
  probe
  misc_feature (1)..(25): SEQ ID NO: 3307; WAN024AJV; Start 42; Stop 66
ctttctaggttgtctatcttgctaa

SEQ ID NO: 351802 - DNA, 25 bp, Artificial
  probe
  misc_feature (1)..(25): SEQ ID NO: 3307; WAN024AJV; Start 28; Stop 52
cgtaattgggcaaactttctaggtt

SEQ ID NO: 351803 - DNA, 25 bp, Artificial
  probe
  misc_feature (1)..(25): SEQ ID NO: 3307; WAN024AJV; Start 34; Stop 58
tgggcaaactttctaggttgtctat

SEQ ID NO: 351804 - DNA, 25 bp, Artificial
  probe
  misc_feature (1)..(25): SEQ ID NO: 3307; WAN024AJV; Start 31; Stop 55
aattgggcaaactttctaggttgtc

SEQ ID NO: 351805 - DNA, 25 bp, Artificial
  probe
  misc_feature (1)..(25): SEQ ID NO: 3307; WAN024AJV; Start 43; Stop 67
tttctaggttgtctatcttgctaaa

SEQ ID NO: 351806 - DNA, 25 bp, Artificial
  probe
  misc_feature (1)..(25): SEQ ID NO: 3307; WAN024AJV; Start 33; Stop 57
ttgggcaaactttctaggttgtcta

SEQ ID NO: 351807 - DNA, 25 bp, Artificial
  probe
  misc_feature (1)..(25): SEQ ID NO: 3307; WAN024AJV; Start 38; Stop 62
caaactttctaggttgtctatcttg

SEQ ID NO: 351808 - DNA, 25 bp, Artificial
  probe
  misc_feature (1)..(25): SEQ ID NO: 3307; WAN024AJV; Start 32; Stop 56
attgggcaaactttctaggttgtct

SEQ ID NO: 351809 - DNA, 25 bp, Artificial
  probe
  misc_feature (1)..(25): SEQ ID NO: 3307; WAN024AJV; Start 76; Stop 100
aaaacggtatgatagaagagtgaca

SEQ ID NO: 351810 - DNA, 25 bp, Artificial
  probe
  misc_feature (1)..(25): SEQ ID NO: 3307; WAN024AJV; Start 11; Stop 35
attctgggagttttatgcgtaattg

SEQ ID NO: 351811 - DNA, 25 bp, Artificial
  probe
  misc_feature (1)..(25): SEQ ID NO: 3308; WAN0249WT; Start 81; Stop 105
aaagatattagacaagaggaaacga

SEQ ID NO: 351812 - DNA, 25 bp, Artificial
  probe
  misc_feature (1)..(25): SEQ ID NO: 3308; WAN0249WT; Start 80; Stop 104
taaagatattagacaagaggaaacg

SEQ ID NO: 351813 - DNA, 25 bp, Artificial
  probe
  misc_feature (1)..(25): SEQ ID NO: 3308; WAN0249WT; Start 36; Stop 60
aaaagtcacagctagagaaatctag

SEQ ID NO: 351814 - DNA, 25 bp, Artificial
  probe
  misc_feature (1)..(25): SEQ ID NO: 3308; WAN0249WT; Start 10; Stop 34
ttttctcttgcaataagtataacat

SEQ ID NO: 351815 - DNA, 25 bp, Artificial
  probe
  misc_feature (1)..(25): SEQ ID NO: 3310; WAN0249YU; Start 1; Stop 25
ctccttaaacgacgcattatgatat

SEQ ID NO: 351816 - DNA, 25 bp, Artificial
  probe
  misc_feature (1)..(25): SEQ ID NO: 3310; WAN0249YU; Start 2; Stop 26
tccttaaacgacgcattatgatatt

SEQ ID NO: 351817 - DNA, 25 bp, Artificial
  probe
  misc_feature (1)..(25): SEQ ID NO: 3310; WAN0249YU; Start 9; Stop 33
acgacgcattatgatatttgataga

SEQ ID NO: 351818 - DNA, 25 bp, Artificial
  probe
  misc_feature (1)..(25): SEQ ID NO: 3310; WAN0249YU; Start 3; Stop 27
ccttaaacgacgcattatgatattt

SEQ ID NO: 351819 - DNA, 25 bp, Artificial
  probe
  misc_feature (1)..(25): SEQ ID NO: 3310; WAN0249YU; Start 10; Stop 34
cgacgcattatgatatttgatagag

SEQ ID NO: 351820 - DNA, 25 bp, Artificial
  probe
  misc_feature (1)..(25): SEQ ID NO: 3310; WAN0249YU; Start 8; Stop 32
aacgacgcattatgatatttgatag

SEQ ID NO: 351821 - DNA, 25 bp, Artificial
  probe
  misc_feature (1)..(25): SEQ ID NO: 3310; WAN0249YU; Start 5; Stop 29
ttaaacgacgcattatgatatttga

SEQ ID NO: 351822 - DNA, 25 bp, Artificial
  probe
  misc_feature (1)..(25): SEQ ID NO: 3310; WAN0249YU; Start 7; Stop 31
aaacgacgcattatgatatttgata

SEQ ID NO: 351823 - DNA, 25 bp, Artificial
  probe
  misc_feature (1)..(25): SEQ ID NO: 3310; WAN0249YU; Start 6; Stop 30
taaacgacgcattatgatatttgat

SEQ ID NO: 351824 - DNA, 25 bp, Artificial
  probe
  misc_feature (1)..(25): SEQ ID NO: 3310; WAN0249YU; Start 4; Stop 28
cttaaacgacgcattatgatatttg

SEQ ID NO: 351825 - DNA, 25 bp, Artificial
  probe
  misc_feature (1)..(25): SEQ ID NO: 3310; WAN0249YU; Start 99; Stop 123
ttatcttgtctcgaccttctccaaa

SEQ ID NO: 351826 - DNA, 25 bp, Artificial
  probe
  misc_feature (1)..(25): SEQ ID NO: 3310; WAN0249YU; Start 98; Stop 122
tttatcttgtctcgaccttctccaa

SEQ ID NO: 351827 - DNA, 25 bp, Artificial
  probe
  misc_feature (1)..(25): SEQ ID NO: 3310; WAN0249YU; Start 110; Stop 134
cgaccttctccaaagaattgctata

SEQ ID NO: 351828 - DNA, 25 bp, Artificial
  probe
  misc_feature (1)..(25): SEQ ID NO: 3310; WAN0249YU; Start 100; Stop 124
tatcttgtctcgaccttctccaaag

SEQ ID NO: 351829 - DNA, 25 bp, Artificial
  probe
  misc_feature (1)..(25): SEQ ID NO: 3310; WAN0249YU; Start 11; Stop 35
gacgcattatgatatttgatagaga

SEQ ID NO: 351830 - DNA, 25 bp, Artificial
  probe
  misc_feature (1)..(25): SEQ ID NO: 3310; WAN0249YU; Start 111; Stop 135
gaccttctccaaagaattgctataa

SEQ ID NO: 351831 - DNA, 25 bp, Artificial
  probe
  misc_feature (1)..(25): SEQ ID NO: 3310; WAN0249YU; Start 112; Stop 136
accttctccaaagaattgctataat

SEQ ID NO: 351832 - DNA, 25 bp, Artificial
  probe
  misc_feature (1)..(25): SEQ ID NO: 3310; WAN0249YU; Start 12; Stop 36
acgcattatgatatttgatagagaa

SEQ ID NO: 351833 - DNA, 25 bp, Artificial
  probe
  misc_feature (1)..(25): SEQ ID NO: 3310; WAN0249YU; Start 96; Stop 120
attttatcttgtctcgaccttctcc

SEQ ID NO: 351834 - DNA, 25 bp, Artificial
  probe
  misc_feature (1)..(25): SEQ ID NO: 3310; WAN0249YU; Start 92; Stop 116
acctattttatcttgtctcgacctt

SEQ ID NO: 351835 - DNA, 25 bp, Artificial
  probe
  misc_feature (1)..(25): SEQ ID NO: 3310; WAN0249YU; Start 93; Stop 117
cctattttatcttgtctcgaccttc

SEQ ID NO: 351836 - DNA, 25 bp, Artificial
  probe
  misc_feature (1)..(25): SEQ ID NO: 3310; WAN0249YU; Start 109; Stop 133
tcgaccttctccaaagaattgctat

SEQ ID NO: 351837 - DNA, 25 bp, Artificial
  probe
  misc_feature (1)..(25): SEQ ID NO: 3310; WAN0249YU; Start 152; Stop 176
tctgcactacacttcaaattttagc

SEQ ID NO: 351838 - DNA, 25 bp, Artificial
  probe
  misc_feature (1)..(25): SEQ ID NO: 3310; WAN0249YU; Start 91; Stop 115
tacctattttatcttgtctcgacct

SEQ ID NO: 351839 - DNA, 25 bp, Artificial
  probe
  misc_feature (1)..(25): SEQ ID NO: 3310; WAN0249YU; Start 104; Stop 128
ttgtctcgaccttctccaaagaatt

SEQ ID NO: 351840 - DNA, 25 bp, Artificial
  probe
  misc_feature (1)..(25): SEQ ID NO: 3310; WAN0249YU; Start 97; Stop 121
ttttatcttgtctcgaccttctcca

SEQ ID NO: 351841 - DNA, 25 bp, Artificial
  probe
  misc_feature (1)..(25): SEQ ID NO: 3310; WAN0249YU; Start 95; Stop 119
tattttatcttgtctcgaccttctc

SEQ ID NO: 351842 - DNA, 25 bp, Artificial
  probe
  misc_feature (1)..(25): SEQ ID NO: 3310; WAN0249YU; Start 94; Stop 118
ctattttatcttgtctcgaccttct

SEQ ID NO: 351843 - DNA, 25 bp, Artificial
  probe
  misc_feature (1)..(25): SEQ ID NO: 3310; WAN0249YU; Start 13; Stop 37
cgcattatgatatttgatagagaaa

SEQ ID NO: 351844 - DNA, 25 bp, Artificial
  probe
  misc_feature (1)..(25): SEQ ID NO: 3310; WAN0249YU; Start 108; Stop 132
ctcgaccttctccaaagaattgcta

SEQ ID NO: 351845 - DNA, 25 bp, Artificial
  probe
  misc_feature (1)..(25): SEQ ID NO: 3310; WAN0249YU; Start 103; Stop 127
cttgtctcgaccttctccaaagaat

SEQ ID NO: 351846 - DNA, 25 bp, Artificial
  probe
  misc_feature (1)..(25): SEQ ID NO: 3310; WAN0249YU; Start 90; Stop 114
atacctattttatcttgtctcgacc

SEQ ID NO: 351847 - DNA, 25 bp, Artificial
  probe
  misc_feature (1)..(25): SEQ ID NO: 3310; WAN0249YU; Start 105; Stop 129
tgtctcgaccttctccaaagaattg

SEQ ID NO: 351848 - DNA, 25 bp, Artificial
  probe
  misc_feature (1)..(25): SEQ ID NO: 3311; WAN0249YX; Start 17; Stop 41
atataagatactgtcggttcctagc

SEQ ID NO: 351849 - DNA, 25 bp, Artificial
  probe
  misc_feature (1)..(25): SEQ ID NO: 3311; WAN0249YX; Start 18; Stop 42
tataagatactgtcggttcctagct

SEQ ID NO: 351850 - DNA, 25 bp, Artificial
  probe
  misc_feature (1)..(25): SEQ ID NO: 3311; WAN0249YX; Start 19; Stop 43
ataagatactgtcggttcctagctc

SEQ ID NO: 351851 - DNA, 25 bp, Artificial
  probe
  misc_feature (1)..(25): SEQ ID NO: 3311; WAN0249YX; Start 14; Stop 38
tctatataagatactgtcggttcct

SEQ ID NO: 351852 - DNA, 25 bp, Artificial
  probe
  misc_feature (1)..(25): SEQ ID NO: 3311; WAN0249YX; Start 13; Stop 37
ttctatataagatactgtcggttcc

SEQ ID NO: 351853 - DNA, 25 bp, Artificial
  probe
  misc_feature (1)..(25): SEQ ID NO: 3311; WAN0249YX; Start 20; Stop 44
taagatactgtcggttcctagctca

SEQ ID NO: 351854 - DNA, 25 bp, Artificial
  probe
  misc_feature (1)..(25): SEQ ID NO: 3311; WAN0249YX; Start 24; Stop 48
atactgtcggttcctagctcaacta

SEQ ID NO: 351855 - DNA, 25 bp, Artificial
  probe
  misc_feature (1)..(25): SEQ ID NO: 3311; WAN0249YX; Start 16; Stop 40
tatataagatactgtcggttcctag

SEQ ID NO: 351856 - DNA, 25 bp, Artificial
  probe
  misc_feature (1)..(25): SEQ ID NO: 3311; WAN0249YX; Start 15; Stop 39
ctatataagatactgtcggttccta

SEQ ID NO: 351857 - DNA, 25 bp, Artificial
  probe
  misc_feature (1)..(25): SEQ ID NO: 3311; WAN0249YX; Start 21; Stop 45
aagatactgtcggttcctagctcaa

SEQ ID NO: 351858 - DNA, 25 bp, Artificial
  probe
  misc_feature (1)..(25): SEQ ID NO: 3311; WAN0249YX; Start 38; Stop 62
tagctcaactaggtcctaagttcat

SEQ ID NO: 351859 - DNA, 25 bp, Artificial
  probe
  misc_feature (1)..(25): SEQ ID NO: 3311; WAN0249YX; Start 37; Stop 61
ctagctcaactaggtcctaagttca

SEQ ID NO: 351860 - DNA, 25 bp, Artificial
  probe
  misc_feature (1)..(25): SEQ ID NO: 3311; WAN0249YX; Start 39; Stop 63
agctcaactaggtcctaagttcatt

SEQ ID NO: 351861 - DNA, 25 bp, Artificial
  probe
  misc_feature (1)..(25): SEQ ID NO: 3311; WAN0249YX; Start 50; Stop 74
gtcctaagttcattttcatacgagc

SEQ ID NO: 351862 - DNA, 25 bp, Artificial
  probe
  misc_feature (1)..(25): SEQ ID NO: 3311; WAN0249YX; Start 49; Stop 73
ggtcctaagttcattttcatacgag

SEQ ID NO: 351863 - DNA, 25 bp, Artificial
  probe
  misc_feature (1)..(25): SEQ ID NO: 3311; WAN0249YX; Start 48; Stop 72
aggtcctaagttcattttcatacga

SEQ ID NO: 351864 - DNA, 25 bp, Artificial
  probe
  misc_feature (1)..(25): SEQ ID NO: 3311; WAN0249YX; Start 23; Stop 47
gatactgtcggttcctagctcaact

SEQ ID NO: 351865 - DNA, 25 bp, Artificial
  probe
  misc_feature (1)..(25): SEQ ID NO: 3311; WAN0249YX; Start 22; Stop 46
agatactgtcggttcctagctcaac

SEQ ID NO: 351866 - DNA, 25 bp, Artificial
  probe
  misc_feature (1)..(25): SEQ ID NO: 3311; WAN0249YX; Start 40; Stop 64
gctcaactaggtcctaagttcattt

SEQ ID NO: 351867 - DNA, 25 bp, Artificial
  probe
  misc_feature (1)..(25): SEQ ID NO: 3311; WAN0249YX; Start 25; Stop 49
tactgtcggttcctagctcaactag

SEQ ID NO: 351868 - DNA, 25 bp, Artificial
  probe
  misc_feature (1)..(25): SEQ ID NO: 3311; WAN0249YX; Start 12; Stop 36
attctatataagatactgtcggttc

SEQ ID NO: 351869 - DNA, 25 bp, Artificial
  probe
  misc_feature (1)..(25): SEQ ID NO: 3311; WAN0249YX; Start 9; Stop 33
cctattctatataagatactgtcgg

SEQ ID NO: 351870 - DNA, 25 bp, Artificial
  probe
  misc_feature (1)..(25): SEQ ID NO: 3311; WAN0249YX; Start 47; Stop 71
taggtcctaagttcattttcatacg

SEQ ID NO: 351871 - DNA, 25 bp, Artificial
  probe
  misc_feature (1)..(25): SEQ ID NO: 3311; WAN0249YX; Start 53; Stop 77
ctaagttcattttcatacgagctgg

SEQ ID NO: 351872 - DNA, 25 bp, Artificial
  probe
  misc_feature (1)..(25): SEQ ID NO: 3311; WAN0249YX; Start 52; Stop 76
cctaagttcattttcatacgagctg

SEQ ID NO: 351873 - DNA, 25 bp, Artificial
  probe
  misc_feature (1)..(25): SEQ ID NO: 3311; WAN0249YX; Start 51; Stop 75
tcctaagttcattttcatacgagct

SEQ ID NO: 351874 - DNA, 25 bp, Artificial
  probe
  misc_feature (1)..(25): SEQ ID NO: 3311; WAN0249YX; Start 54; Stop 78
taagttcattttcatacgagctgga

SEQ ID NO: 351875 - DNA, 25 bp, Artificial
  probe
  misc_feature (1)..(25): SEQ ID NO: 3311; WAN0249YX; Start 58; Stop 82
ttcattttcatacgagctggactag

SEQ ID NO: 351876 - DNA, 25 bp, Artificial
  probe
  misc_feature (1)..(25): SEQ ID NO: 3311; WAN0249YX; Start 57; Stop 81
gttcattttcatacgagctggacta

SEQ ID NO: 351877 - DNA, 25 bp, Artificial
  probe
  misc_feature (1)..(25): SEQ ID NO: 3311; WAN0249YX; Start 60; Stop 84
cattttcatacgagctggactagag

SEQ ID NO: 351878 - DNA, 25 bp, Artificial
  probe
  misc_feature (1)..(25): SEQ ID NO: 3311; WAN0249YX; Start 59; Stop 83
tcattttcatacgagctggactaga

SEQ ID NO: 351879 - DNA, 25 bp, Artificial
  probe
  misc_feature (1)..(25): SEQ ID NO: 3311; WAN0249YX; Start 55; Stop 79
aagttcattttcatacgagctggac

SEQ ID NO: 351880 - DNA, 25 bp, Artificial
  probe
  misc_feature (1)..(25): SEQ ID NO: 3311; WAN0249YX; Start 46; Stop 70
ctaggtcctaagttcattttcatac

SEQ ID NO: 351881 - DNA, 25 bp, Artificial
  probe
  misc_feature (1)..(25): SEQ ID NO: 3312; WAN0249Y3; Start 16; Stop 40
agatacaaagtccgtaagaacacaa

SEQ ID NO: 351882 - DNA, 25 bp, Artificial
  probe
  misc_feature (1)..(25): SEQ ID NO: 3312; WAN0249Y3; Start 15; Stop 39
aagatacaaagtccgtaagaacaca

SEQ ID NO: 351883 - DNA, 25 bp, Artificial
  probe
  misc_feature (1)..(25): SEQ ID NO: 3312; WAN0249Y3; Start 17; Stop 41
gatacaaagtccgtaagaacacaaa

SEQ ID NO: 351884 - DNA, 25 bp, Artificial
  probe
  misc_feature (1)..(25): SEQ ID NO: 3312; WAN0249Y3; Start 18; Stop 42
atacaaagtccgtaagaacacaaag

SEQ ID NO: 351885 - DNA, 25 bp, Artificial
  probe
  misc_feature (1)..(25): SEQ ID NO: 3312; WAN0249Y3; Start 19; Stop 43
tacaaagtccgtaagaacacaaagt

SEQ ID NO: 351886 - DNA, 25 bp, Artificial
  probe
  misc_feature (1)..(25): SEQ ID NO: 3312; WAN0249Y3; Start 14; Stop 38
taagatacaaagtccgtaagaacac

SEQ ID NO: 351887 - DNA, 25 bp, Artificial
  probe
  misc_feature (1)..(25): SEQ ID NO: 3312; WAN0249Y3; Start 13; Stop 37
ctaagatacaaagtccgtaagaaca

SEQ ID NO: 351888 - DNA, 25 bp, Artificial
  probe
  misc_feature (1)..(25): SEQ ID NO: 3312; WAN0249Y3; Start 8; Stop 32
cctgtctaagatacaaagtccgtaa

SEQ ID NO: 351889 - DNA, 25 bp, Artificial
  probe
  misc_feature (1)..(25): SEQ ID NO: 3312; WAN0249Y3; Start 7; Stop 31
tcctgtctaagatacaaagtccgta

SEQ ID NO: 351890 - DNA, 25 bp, Artificial
  probe
  misc_feature (1)..(25): SEQ ID NO: 3312; WAN0249Y3; Start 10; Stop 34
tgtctaagatacaaagtccgtaaga

SEQ ID NO: 351891 - DNA, 25 bp, Artificial
  probe
  misc_feature (1)..(25): SEQ ID NO: 3312; WAN0249Y3; Start 4; Stop 28
tactcctgtctaagatacaaagtcc

SEQ ID NO: 351892 - DNA, 25 bp, Artificial
  probe
  misc_feature (1)..(25): SEQ ID NO: 3312; WAN0249Y3; Start 12; Stop 36
tctaagatacaaagtccgtaagaac

SEQ ID NO: 351893 - DNA, 25 bp, Artificial
  probe
  misc_feature (1)..(25): SEQ ID NO: 3312; WAN0249Y3; Start 11; Stop 35
gtctaagatacaaagtccgtaagaa

SEQ ID NO: 351894 - DNA, 25 bp, Artificial
  probe
  misc_feature (1)..(25): SEQ ID NO: 3312; WAN0249Y3; Start 9; Stop 33
ctgtctaagatacaaagtccgtaag

SEQ ID NO: 351895 - DNA, 25 bp, Artificial
  probe
  misc_feature (1)..(25): SEQ ID NO: 3312; WAN0249Y3; Start 6; Stop 30
ctcctgtctaagatacaaagtccgt

SEQ ID NO: 351896 - DNA, 25 bp, Artificial
  probe
  misc_feature (1)..(25): SEQ ID NO: 3312; WAN0249Y3; Start 5; Stop 29
actcctgtctaagatacaaagtccg

SEQ ID NO: 351897 - DNA, 25 bp, Artificial
  probe
  misc_feature (1)..(25): SEQ ID NO: 3312; WAN0249Y3; Start 23; Stop 47
aagtccgtaagaacacaaagtgaaa

SEQ ID NO: 351898 - DNA, 25 bp, Artificial
  probe
  misc_feature (1)..(25): SEQ ID NO: 3312; WAN0249Y3; Start 22; Stop 46
aaagtccgtaagaacacaaagtgaa

SEQ ID NO: 351899 - DNA, 25 bp, Artificial
  probe
  misc_feature (1)..(25): SEQ ID NO: 3312; WAN0249Y3; Start 2; Stop 26
tctactcctgtctaagatacaaagt

SEQ ID NO: 351900 - DNA, 25 bp, Artificial
  probe
  misc_feature (1)..(25): SEQ ID NO: 3312; WAN0249Y3; Start 52; Stop 76
gaattccaatcaagaagtgtctact

SEQ ID NO: 351901 - DNA, 25 bp, Artificial
  probe
  misc_feature (1)..(25): SEQ ID NO: 3312; WAN0249Y3; Start 53; Stop 77
aattccaatcaagaagtgtctactt

SEQ ID NO: 351902 - DNA, 25 bp, Artificial
  probe
  misc_feature (1)..(25): SEQ ID NO: 3312; WAN0249Y3; Start 3; Stop 27
ctactcctgtctaagatacaaagtc

SEQ ID NO: 351903 - DNA, 25 bp, Artificial
  probe
  misc_feature (1)..(25): SEQ ID NO: 3312; WAN0249Y3; Start 21; Stop 45
caaagtccgtaagaacacaaagtga

SEQ ID NO: 351904 - DNA, 25 bp, Artificial
  probe
  misc_feature (1)..(25): SEQ ID NO: 3312; WAN0249Y3; Start 20; Stop 44
acaaagtccgtaagaacacaaagtg

SEQ ID NO: 351905 - DNA, 25 bp, Artificial
  probe
  misc_feature (1)..(25): SEQ ID NO: 3312; WAN0249Y3; Start 1; Stop 25
ctctactcctgtctaagatacaaag

SEQ ID NO: 351906 - DNA, 25 bp, Artificial
  probe
  misc_feature (1)..(25): SEQ ID NO: 3312; WAN0249Y3; Start 66; Stop 90
aagtgtctacttcttggaagaacta

SEQ ID NO: 351907 - DNA, 25 bp, Artificial
  probe
  misc_feature (1)..(25): SEQ ID NO: 3312; WAN0249Y3; Start 67; Stop 91
agtgtctacttcttggaagaactat

SEQ ID NO: 351908 - DNA, 25 bp, Artificial
  probe
  misc_feature (1)..(25): SEQ ID NO: 3312; WAN0249Y3; Start 68; Stop 92
gtgtctacttcttggaagaactatc

SEQ ID NO: 351909 - DNA, 25 bp, Artificial
  probe
  misc_feature (1)..(25): SEQ ID NO: 3312; WAN0249Y3; Start 69; Stop 93
tgtctacttcttggaagaactatct

SEQ ID NO: 351910 - DNA, 25 bp, Artificial
  probe
  misc_feature (1)..(25): SEQ ID NO: 3312; WAN0249Y3; Start 70; Stop 94
gtctacttcttggaagaactatctt

SEQ ID NO: 351911 - DNA, 25 bp, Artificial
  probe
  misc_feature (1)..(25): SEQ ID NO: 3312; WAN0249Y3; Start 25; Stop 49
gtccgtaagaacacaaagtgaaaat

SEQ ID NO: 351912 - DNA, 25 bp, Artificial
  probe
  misc_feature (1)..(25): SEQ ID NO: 3312; WAN0249Y3; Start 26; Stop 50
tccgtaagaacacaaagtgaaaata

SEQ ID NO: 351913 - DNA, 25 bp, Artificial
  probe
  misc_feature (1)..(25): SEQ ID NO: 3312; WAN0249Y3; Start 24; Stop 48
agtccgtaagaacacaaagtgaaaa

SEQ ID NO: 351914 - DNA, 25 bp, Artificial
  probe
  misc_feature (1)..(25): SEQ ID NO: 3313; WAN0249WR; Start 2; Stop 26
tctactctccaattcttcctaccat

SEQ ID NO: 351915 - DNA, 25 bp, Artificial
  probe
  misc_feature (1)..(25): SEQ ID NO: 3313; WAN0249WR; Start 3; Stop 27
ctactctccaattcttcctaccatt

SEQ ID NO: 351916 - DNA, 25 bp, Artificial
  probe
  misc_feature (1)..(25): SEQ ID NO: 3313; WAN0249WR; Start 1; Stop 25
ctctactctccaattcttcctacca

SEQ ID NO: 351917 - DNA, 25 bp, Artificial
  probe
  misc_feature (1)..(25): SEQ ID NO: 3313; WAN0249WR; Start 4; Stop 28
tactctccaattcttcctaccattt

SEQ ID NO: 351918 - DNA, 25 bp, Artificial
  probe
  misc_feature (1)..(25): SEQ ID NO: 3313; WAN0249WR; Start 5; Stop 29
actctccaattcttcctaccatttt

SEQ ID NO: 351919 - DNA, 25 bp, Artificial
  probe
  misc_feature (1)..(25): SEQ ID NO: 3313; WAN0249WR; Start 6; Stop 30
ctctccaattcttcctaccatttta

SEQ ID NO: 351920 - DNA, 25 bp, Artificial
  probe
  misc_feature (1)..(25): SEQ ID NO: 3313; WAN0249WR; Start 10; Stop 34
ccaattcttcctaccattttatcac

SEQ ID NO: 351921 - DNA, 25 bp, Artificial
  probe
  misc_feature (1)..(25): SEQ ID NO: 3313; WAN0249WR; Start 9; Stop 33
tccaattcttcctaccattttatca

SEQ ID NO: 351922 - DNA, 25 bp, Artificial
  probe
  misc_feature (1)..(25): SEQ ID NO: 3313; WAN0249WR; Start 52; Stop 76
aactagattggaacagaataagaaa

SEQ ID NO: 351923 - DNA, 25 bp, Artificial
  probe
  misc_feature (1)..(25): SEQ ID NO: 3313; WAN0249WR; Start 51; Stop 75
aaactagattggaacagaataagaa

SEQ ID NO: 351924 - DNA, 25 bp, Artificial
  probe
  misc_feature (1)..(25): SEQ ID NO: 3313; WAN0249WR; Start 7; Stop 31
tctccaattcttcctaccattttat

SEQ ID NO: 351925 - DNA, 25 bp, Artificial
  probe
  misc_feature (1)..(25): SEQ ID NO: 3313; WAN0249WR; Start 8; Stop 32
ctccaattcttcctaccattttatc

SEQ ID NO: 351926 - DNA, 25 bp, Artificial
  probe
  misc_feature (1)..(25): SEQ ID NO: 3313; WAN0249WR; Start 11; Stop 35
caattcttcctaccattttatcact

SEQ ID NO: 351927 - DNA, 25 bp, Artificial
  probe
  misc_feature (1)..(25): SEQ ID NO: 3313; WAN0249WR; Start 14; Stop 38
ttcttcctaccattttatcactttt

SEQ ID NO: 351928 - DNA, 25 bp, Artificial
  probe
  misc_feature (1)..(25): SEQ ID NO: 3313; WAN0249WR; Start 13; Stop 37
attcttcctaccattttatcacttt

SEQ ID NO: 351929 - DNA, 25 bp, Artificial
  probe
  misc_feature (1)..(25): SEQ ID NO: 3313; WAN0249WR; Start 12; Stop 36
aattcttcctaccattttatcactt

SEQ ID NO: 351930 - DNA, 25 bp, Artificial
  probe
  misc_feature (1)..(25): SEQ ID NO: 3313; WAN0249WR; Start 48; Stop 72
tgaaaactagattggaacagaataa

SEQ ID NO: 351931 - DNA, 25 bp, Artificial
  probe
  misc_feature (1)..(25): SEQ ID NO: 3313; WAN0249WR; Start 47; Stop 71
atgaaaactagattggaacagaata

SEQ ID NO: 351932 - DNA, 25 bp, Artificial
  probe
  misc_feature (1)..(25): SEQ ID NO: 3313; WAN0249WR; Start 46; Stop 70
tatgaaaactagattggaacagaat

SEQ ID NO: 351933 - DNA, 25 bp, Artificial
  probe
  misc_feature (1)..(25): SEQ ID NO: 3313; WAN0249WR; Start 45; Stop 69
atatgaaaactagattggaacagaa

SEQ ID NO: 351934 - DNA, 25 bp, Artificial
  probe
  misc_feature (1)..(25): SEQ ID NO: 3313; WAN0249WR; Start 44; Stop 68
aatatgaaaactagattggaacaga

SEQ ID NO: 351935 - DNA, 25 bp, Artificial
  probe
  misc_feature (1)..(25): SEQ ID NO: 3313; WAN0249WR; Start 42; Stop 66
agaatatgaaaactagattggaaca

SEQ ID NO: 351936 - DNA, 25 bp, Artificial
  probe
  misc_feature (1)..(25): SEQ ID NO: 3313; WAN0249WR; Start 53; Stop 77
actagattggaacagaataagaaaa

SEQ ID NO: 351937 - DNA, 25 bp, Artificial
  probe
  misc_feature (1)..(25): SEQ ID NO: 3313; WAN0249WR; Start 50; Stop 74
aaaactagattggaacagaataaga

SEQ ID NO: 351938 - DNA, 25 bp, Artificial
  probe
  misc_feature (1)..(25): SEQ ID NO: 3313; WAN0249WR; Start 43; Stop 67
gaatatgaaaactagattggaacag

SEQ ID NO: 351939 - DNA, 25 bp, Artificial
  probe
  misc_feature (1)..(25): SEQ ID NO: 3313; WAN0249WR; Start 49; Stop 73
gaaaactagattggaacagaataag

SEQ ID NO: 351940 - DNA, 25 bp, Artificial
  probe
  misc_feature (1)..(25): SEQ ID NO: 3313; WAN0249WR; Start 117; Stop 141
ccgtaatatactacgaagttagatt

SEQ ID NO: 351941 - DNA, 25 bp, Artificial
  probe
  misc_feature (1)..(25): SEQ ID NO: 3313; WAN0249WR; Start 41; Stop 65
aagaatatgaaaactagattggaac

SEQ ID NO: 351942 - DNA, 25 bp, Artificial
  probe
  misc_feature (1)..(25): SEQ ID NO: 3313; WAN0249WR; Start 91; Stop 115
ttgcttgataattctgaattattgg

SEQ ID NO: 351943 - DNA, 25 bp, Artificial
  probe
  misc_feature (1)..(25): SEQ ID NO: 3313; WAN0249WR; Start 84; Stop 108
ttcaaaattgcttgataattctgaa

SEQ ID NO: 351944 - DNA, 25 bp, Artificial
  probe
  misc_feature (1)..(25): SEQ ID NO: 3313; WAN0249WR; Start 85; Stop 109
tcaaaattgcttgataattctgaat

SEQ ID NO: 351945 - DNA, 25 bp, Artificial
  probe
  misc_feature (1)..(25): SEQ ID NO: 3313; WAN0249WR; Start 83; Stop 107
attcaaaattgcttgataattctga

SEQ ID NO: 351946 - DNA, 25 bp, Artificial
  probe
  misc_feature (1)..(25): SEQ ID NO: 3313; WAN0249WR; Start 86; Stop 110
caaaattgcttgataattctgaatt

SEQ ID NO: 351947 - DNA, 25 bp, Artificial
  probe
  misc_feature (1)..(25): SEQ ID NO: 3313; WAN0249WR; Start 82; Stop 106
aattcaaaattgcttgataattctg

SEQ ID NO: 351948 - DNA, 25 bp, Artificial
  probe
  misc_feature (1)..(25): SEQ ID NO: 3314; WAN0249R4; Start 266; Stop 290
cgaggataatagcttctgtgtctaa

SEQ ID NO: 351949 - DNA, 25 bp, Artificial
  probe
  misc_feature (1)..(25): SEQ ID NO: 3314; WAN0249R4; Start 373; Stop 397
ttcgcattaagcatattgttaccgc

SEQ ID NO: 351950 - DNA, 25 bp, Artificial
  probe
  misc_feature (1)..(25): SEQ ID NO: 3314; WAN0249R4; Start 372; Stop 396
tttcgcattaagcatattgttaccg

SEQ ID NO: 351951 - DNA, 25 bp, Artificial
  probe
  misc_feature (1)..(25): SEQ ID NO: 3314; WAN0249R4; Start 265; Stop 289
gcgaggataatagcttctgtgtcta

SEQ ID NO: 351952 - DNA, 25 bp, Artificial
  probe
  misc_feature (1)..(25): SEQ ID NO: 3314; WAN0249R4; Start 277; Stop 301
gcttctgtgtctaaataacccattt

SEQ ID NO: 351953 - DNA, 25 bp, Artificial
  probe
  misc_feature (1)..(25): SEQ ID NO: 3314; WAN0249R4; Start 279; Stop 303
ttctgtgtctaaataacccatttcg

SEQ ID NO: 351954 - DNA, 25 bp, Artificial
  probe
  misc_feature (1)..(25): SEQ ID NO: 3314; WAN0249R4; Start 261; Stop 285
aactgcgaggataatagcttctgtg

SEQ ID NO: 351955 - DNA, 25 bp, Artificial
  probe
  misc_feature (1)..(25): SEQ ID NO: 3314; WAN0249R4; Start 276; Stop 300
agcttctgtgtctaaataacccatt

SEQ ID NO: 351956 - DNA, 25 bp, Artificial
  probe
  misc_feature (1)..(25): SEQ ID NO: 3314; WAN0249R4; Start 275; Stop 299
tagcttctgtgtctaaataacccat

SEQ ID NO: 351957 - DNA, 25 bp, Artificial
  probe
  misc_feature (1)..(25): SEQ ID NO: 3314; WAN0249R4; Start 274; Stop 298
atagcttctgtgtctaaataaccca

SEQ ID NO: 351958 - DNA, 25 bp, Artificial
  probe
  misc_feature (1)..(25): SEQ ID NO: 3314; WAN0249R4; Start 313; Stop 337
ttcaacaacaacaagcctgtagttt

SEQ ID NO: 351959 - DNA, 25 bp, Artificial
  probe
  misc_feature (1)..(25): SEQ ID NO: 3314; WAN0249R4; Start 312; Stop 336
tttcaacaacaacaagcctgtagtt

SEQ ID NO: 351960 - DNA, 25 bp, Artificial
  probe
  misc_feature (1)..(25): SEQ ID NO: 3314; WAN0249R4; Start 263; Stop 287
ctgcgaggataatagcttctgtgtc

SEQ ID NO: 351961 - DNA, 25 bp, Artificial
  probe
  misc_feature (1)..(25): SEQ ID NO: 3314; WAN0249R4; Start 273; Stop 297
aatagcttctgtgtctaaataaccc

SEQ ID NO: 351962 - DNA, 25 bp, Artificial
  probe
  misc_feature (1)..(25): SEQ ID NO: 3314; WAN0249R4; Start 314; Stop 338
tcaacaacaacaagcctgtagtttc

SEQ ID NO: 351963 - DNA, 25 bp, Artificial
  probe
  misc_feature (1)..(25): SEQ ID NO: 3314; WAN0249R4; Start 278; Stop 302
cttctgtgtctaaataacccatttc

SEQ ID NO: 351964 - DNA, 25 bp, Artificial
  probe
  misc_feature (1)..(25): SEQ ID NO: 3314; WAN0249R4; Start 264; Stop 288
tgcgaggataatagcttctgtgtct

SEQ ID NO: 351965 - DNA, 25 bp, Artificial
  probe
  misc_feature (1)..(25): SEQ ID NO: 3314; WAN0249R4; Start 287; Stop 311
ctaaataacccatttcgagacctct

SEQ ID NO: 351966 - DNA, 25 bp, Artificial
  probe
  misc_feature (1)..(25): SEQ ID NO: 3314; WAN0249R4; Start 286; Stop 310
tctaaataacccatttcgagacctc

SEQ ID NO: 351967 - DNA, 25 bp, Artificial
  probe
  misc_feature (1)..(25): SEQ ID NO: 3314; WAN0249R4; Start 282; Stop 306
tgtgtctaaataacccatttcgaga

SEQ ID NO: 351968 - DNA, 25 bp, Artificial
  probe
  misc_feature (1)..(25): SEQ ID NO: 3314; WAN0249R4; Start 280; Stop 304
tctgtgtctaaataacccatttcga

SEQ ID NO: 351969 - DNA, 25 bp, Artificial
  probe
  misc_feature (1)..(25): SEQ ID NO: 3314; WAN0249R4; Start 288; Stop 312
taaataacccatttcgagacctctt

SEQ ID NO: 351970 - DNA, 25 bp, Artificial
  probe
  misc_feature (1)..(25): SEQ ID NO: 3314; WAN0249R4; Start 281; Stop 305
ctgtgtctaaataacccatttcgag

SEQ ID NO: 351971 - DNA, 25 bp, Artificial
  probe
  misc_feature (1)..(25): SEQ ID NO: 3314; WAN0249R4; Start 289; Stop 313
aaataacccatttcgagacctcttt

SEQ ID NO: 351972 - DNA, 25 bp, Artificial
  probe
  misc_feature (1)..(25): SEQ ID NO: 3314; WAN0249R4; Start 319; Stop 343
aacaacaagcctgtagtttcgataa

SEQ ID NO: 351973 - DNA, 25 bp, Artificial
  probe
  misc_feature (1)..(25): SEQ ID NO: 3314; WAN0249R4; Start 267; Stop 291
gaggataatagcttctgtgtctaaa

SEQ ID NO: 351974 - DNA, 25 bp, Artificial
  probe
  misc_feature (1)..(25): SEQ ID NO: 3314; WAN0249R4; Start 260; Stop 284
aaactgcgaggataatagcttctgt

SEQ ID NO: 351975 - DNA, 25 bp, Artificial
  probe
  misc_feature (1)..(25): SEQ ID NO: 3314; WAN0249R4; Start 262; Stop 286
actgcgaggataatagcttctgtgt

SEQ ID NO: 351976 - DNA, 25 bp, Artificial
  probe
  misc_feature (1)..(25): SEQ ID NO: 3314; WAN0249R4; Start 320; Stop 344
acaacaagcctgtagtttcgataac

SEQ ID NO: 351977 - DNA, 25 bp, Artificial
  probe
  misc_feature (1)..(25): SEQ ID NO: 3314; WAN0249R4; Start 318; Stop 342
caacaacaagcctgtagtttcgata

SEQ ID NO: 351978 - DNA, 25 bp, Artificial
  probe
  misc_feature (1)..(25): SEQ ID NO: 3314; WAN0249R4; Start 374; Stop 398
tcgcattaagcatattgttaccgct

SEQ ID NO: 351979 - DNA, 25 bp, Artificial
  probe
  misc_feature (1)..(25): SEQ ID NO: 3314; WAN0249R4; Start 371; Stop 395
ttttcgcattaagcatattgttacc

SEQ ID NO: 351980 - DNA, 25 bp, Artificial
  probe
  misc_feature (1)..(25): SEQ ID NO: 3314; WAN0249R4; Start 303; Stop 327
gagacctcttttcaacaacaacaag

SEQ ID NO: 351981 - DNA, 25 bp, Artificial
  probe
  misc_feature (1)..(25): SEQ ID NO: 3315; WAN024ALE; Start 96; Stop 120
agtaaagtcacaaagtcacattagc

SEQ ID NO: 351982 - DNA, 25 bp, Artificial
  probe
  misc_feature (1)..(25): SEQ ID NO: 3315; WAN024ALE; Start 93; Stop 117
tcaagtaaagtcacaaagtcacatt

SEQ ID NO: 351983 - DNA, 25 bp, Artificial
  probe
  misc_feature (1)..(25): SEQ ID NO: 3315; WAN024ALE; Start 91; Stop 115
aatcaagtaaagtcacaaagtcaca

SEQ ID NO: 351984 - DNA, 25 bp, Artificial
  probe
  misc_feature (1)..(25): SEQ ID NO: 3315; WAN024ALE; Start 92; Stop 116
atcaagtaaagtcacaaagtcacat

SEQ ID NO: 351985 - DNA, 25 bp, Artificial
  probe
  misc_feature (1)..(25): SEQ ID NO: 3315; WAN024ALE; Start 90; Stop 114
caatcaagtaaagtcacaaagtcac

SEQ ID NO: 351986 - DNA, 25 bp, Artificial
  probe
  misc_feature (1)..(25): SEQ ID NO: 3315; WAN024ALE; Start 89; Stop 113
tcaatcaagtaaagtcacaaagtca

SEQ ID NO: 351987 - DNA, 25 bp, Artificial
  probe
  misc_feature (1)..(25): SEQ ID NO: 3315; WAN024ALE; Start 94; Stop 118
caagtaaagtcacaaagtcacatta

SEQ ID NO: 351988 - DNA, 25 bp, Artificial
  probe
  misc_feature (1)..(25): SEQ ID NO: 3315; WAN024ALE; Start 88; Stop 112
atcaatcaagtaaagtcacaaagtc

SEQ ID NO: 351989 - DNA, 25 bp, Artificial
  probe
  misc_feature (1)..(25): SEQ ID NO: 3315; WAN024ALE; Start 97; Stop 121
gtaaagtcacaaagtcacattagct

SEQ ID NO: 351990 - DNA, 25 bp, Artificial
  probe
  misc_feature (1)..(25): SEQ ID NO: 3315; WAN024ALE; Start 95; Stop 119
aagtaaagtcacaaagtcacattag

SEQ ID NO: 351991 - DNA, 25 bp, Artificial
  probe
  misc_feature (1)..(25): SEQ ID NO: 3315; WAN024ALE; Start 98; Stop 122
taaagtcacaaagtcacattagctc

SEQ ID NO: 351992 - DNA, 25 bp, Artificial
  probe
  misc_feature (1)..(25): SEQ ID NO: 3315; WAN024ALE; Start 99; Stop 123
aaagtcacaaagtcacattagctcc

SEQ ID NO: 351993 - DNA, 25 bp, Artificial
  probe
  misc_feature (1)..(25): SEQ ID NO: 3315; WAN024ALE; Start 87; Stop 111
tatcaatcaagtaaagtcacaaagt

SEQ ID NO: 351994 - DNA, 25 bp, Artificial
  probe
  misc_feature (1)..(25): SEQ ID NO: 3315; WAN024ALE; Start 2; Stop 26
tctgtgccttttaatcatttcaatc

SEQ ID NO: 351995 - DNA, 25 bp, Artificial
  probe
  misc_feature (1)..(25): SEQ ID NO: 3315; WAN024ALE; Start 3; Stop 27
ctgtgccttttaatcatttcaatct

SEQ ID NO: 351996 - DNA, 25 bp, Artificial
  probe
  misc_feature (1)..(25): SEQ ID NO: 3315; WAN024ALE; Start 1; Stop 25
ctctgtgccttttaatcatttcaat

SEQ ID NO: 351997 - DNA, 25 bp, Artificial
  probe
  misc_feature (1)..(25): SEQ ID NO: 3315; WAN024ALE; Start 83; Stop 107
agaatatcaatcaagtaaagtcaca

SEQ ID NO: 351998 - DNA, 25 bp, Artificial
  probe
  misc_feature (1)..(25): SEQ ID NO: 3315; WAN024ALE; Start 4; Stop 28
tgtgccttttaatcatttcaatctt

SEQ ID NO: 351999 - DNA, 25 bp, Artificial
  probe
  misc_feature (1)..(25): SEQ ID NO: 3315; WAN024ALE; Start 100; Stop 124
aagtcacaaagtcacattagctccg

SEQ ID NO: 352000 - DNA, 25 bp, Artificial
  probe
  misc_feature (1)..(25): SEQ ID NO: 3315; WAN024ALE; Start 84; Stop 108
gaatatcaatcaagtaaagtcacaa

SEQ ID NO: 352001 - DNA, 25 bp, Artificial
  probe
  misc_feature (1)..(25): SEQ ID NO: 3315; WAN024ALE; Start 102; Stop 126
gtcacaaagtcacattagctccgag

SEQ ID NO: 352002 - DNA, 25 bp, Artificial
  probe
  misc_feature (1)..(25): SEQ ID NO: 3315; WAN024ALE; Start 86; Stop 110
atatcaatcaagtaaagtcacaaag

SEQ ID NO: 352003 - DNA, 25 bp, Artificial
  probe
  misc_feature (1)..(25): SEQ ID NO: 3315; WAN024ALE; Start 101; Stop 125
agtcacaaagtcacattagctccga

SEQ ID NO: 352004 - DNA, 25 bp, Artificial
  probe
  misc_feature (1)..(25): SEQ ID NO: 3315; WAN024ALE; Start 82; Stop 106
aagaatatcaatcaagtaaagtcac

SEQ ID NO: 352005 - DNA, 25 bp, Artificial
  probe
  misc_feature (1)..(25): SEQ ID NO: 3315; WAN024ALE; Start 42; Stop 66
tttacttgggttgtacttaatctat

SEQ ID NO: 352006 - DNA, 25 bp, Artificial
  probe
  misc_feature (1)..(25): SEQ ID NO: 3315; WAN024ALE; Start 85; Stop 109
aatatcaatcaagtaaagtcacaaa

SEQ ID NO: 352007 - DNA, 25 bp, Artificial
  probe
  misc_feature (1)..(25): SEQ ID NO: 3315; WAN024ALE; Start 5; Stop 29
gtgccttttaatcatttcaatctta

SEQ ID NO: 352008 - DNA, 25 bp, Artificial
  probe
  misc_feature (1)..(25): SEQ ID NO: 3315; WAN024ALE; Start 16; Stop 40
tcatttcaatcttaaattggacttt

SEQ ID NO: 352009 - DNA, 25 bp, Artificial
  probe
  misc_feature (1)..(25): SEQ ID NO: 3315; WAN024ALE; Start 15; Stop 39
atcatttcaatcttaaattggactt

SEQ ID NO: 352010 - DNA, 25 bp, Artificial
  probe
  misc_feature (1)..(25): SEQ ID NO: 3315; WAN024ALE; Start 14; Stop 38
aatcatttcaatcttaaattggact

SEQ ID NO: 352011 - DNA, 25 bp, Artificial
  probe
  misc_feature (1)..(25): SEQ ID NO: 3315; WAN024ALE; Start 41; Stop 65
ttttacttgggttgtacttaatcta

SEQ ID NO: 352012 - DNA, 25 bp, Artificial
  probe
  misc_feature (1)..(25): SEQ ID NO: 3315; WAN024ALE; Start 6; Stop 30
tgccttttaatcatttcaatcttaa

SEQ ID NO: 352013 - DNA, 25 bp, Artificial
  probe
  misc_feature (1)..(25): SEQ ID NO: 3315; WAN024ALE; Start 106; Stop 130
caaagtcacattagctccgagcaac

SEQ ID NO: 352014 - DNA, 25 bp, Artificial
  probe
  misc_feature (1)..(25): SEQ ID NO: 3316; WAN024AJU; Start 5; Stop 29
gttacctctgttgtcactcttctat

SEQ ID NO: 352015 - DNA, 25 bp, Artificial
  probe
  misc_feature (1)..(25): SEQ ID NO: 3316; WAN024AJU; Start 14; Stop 38
gttgtcactcttctatcataccgtt

SEQ ID NO: 352016 - DNA, 25 bp, Artificial
  probe
  misc_feature (1)..(25): SEQ ID NO: 3316; WAN024AJU; Start 11; Stop 35
tctgttgtcactcttctatcatacc

SEQ ID NO: 352017 - DNA, 25 bp, Artificial
  probe
  misc_feature (1)..(25): SEQ ID NO: 3316; WAN024AJU; Start 7; Stop 31
tacctctgttgtcactcttctatca

SEQ ID NO: 352018 - DNA, 25 bp, Artificial
  probe
  misc_feature (1)..(25): SEQ ID NO: 3316; WAN024AJU; Start 6; Stop 30
ttacctctgttgtcactcttctatc

SEQ ID NO: 352019 - DNA, 25 bp, Artificial
  probe
  misc_feature (1)..(25): SEQ ID NO: 3316; WAN024AJU; Start 9; Stop 33
cctctgttgtcactcttctatcata

SEQ ID NO: 352020 - DNA, 25 bp, Artificial
  probe
  misc_feature (1)..(25): SEQ ID NO: 3316; WAN024AJU; Start 12; Stop 36
ctgttgtcactcttctatcataccg

SEQ ID NO: 352021 - DNA, 25 bp, Artificial
  probe
  misc_feature (1)..(25): SEQ ID NO: 3316; WAN024AJU; Start 4; Stop 28
tgttacctctgttgtcactcttcta

SEQ ID NO: 352022 - DNA, 25 bp, Artificial
  probe
  misc_feature (1)..(25): SEQ ID NO: 3316; WAN024AJU; Start 8; Stop 32
acctctgttgtcactcttctatcat

SEQ ID NO: 352023 - DNA, 25 bp, Artificial
  probe
  misc_feature (1)..(25): SEQ ID NO: 3316; WAN024AJU; Start 13; Stop 37
tgttgtcactcttctatcataccgt

SEQ ID NO: 352024 - DNA, 25 bp, Artificial
  probe
  misc_feature (1)..(25): SEQ ID NO: 3316; WAN024AJU; Start 10; Stop 34
ctctgttgtcactcttctatcatac

SEQ ID NO: 352025 - DNA, 25 bp, Artificial
  probe
  misc_feature (1)..(25): SEQ ID NO: 3316; WAN024AJU; Start 3; Stop 27
ctgttacctctgttgtcactcttct

SEQ ID NO: 352026 - DNA, 25 bp, Artificial
  probe
  misc_feature (1)..(25): SEQ ID NO: 3316; WAN024AJU; Start 2; Stop 26
tctgttacctctgttgtcactcttc

SEQ ID NO: 352027 - DNA, 25 bp, Artificial
  probe
  misc_feature (1)..(25): SEQ ID NO: 3316; WAN024AJU; Start 1; Stop 25
ctctgttacctctgttgtcactctt

SEQ ID NO: 352028 - DNA, 25 bp, Artificial
  probe
  misc_feature (1)..(25): SEQ ID NO: 3316; WAN024AJU; Start 15; Stop 39
ttgtcactcttctatcataccgttt

SEQ ID NO: 352029 - DNA, 25 bp, Artificial
  probe
  misc_feature (1)..(25): SEQ ID NO: 3316; WAN024AJU; Start 52; Stop 76
agcaagatagacaacctagaaagtt

SEQ ID NO: 352030 - DNA, 25 bp, Artificial
  probe
  misc_feature (1)..(25): SEQ ID NO: 3316; WAN024AJU; Start 51; Stop 75
tagcaagatagacaacctagaaagt

SEQ ID NO: 352031 - DNA, 25 bp, Artificial
  probe
  misc_feature (1)..(25): SEQ ID NO: 3316; WAN024AJU; Start 56; Stop 80
agatagacaacctagaaagtttgcc

SEQ ID NO: 352032 - DNA, 25 bp, Artificial
  probe
  misc_feature (1)..(25): SEQ ID NO: 3316; WAN024AJU; Start 63; Stop 87
caacctagaaagtttgcccaattac

SEQ ID NO: 352033 - DNA, 25 bp, Artificial
  probe
  misc_feature (1)..(25): SEQ ID NO: 3316; WAN024AJU; Start 62; Stop 86
acaacctagaaagtttgcccaatta

SEQ ID NO: 352034 - DNA, 25 bp, Artificial
  probe
  misc_feature (1)..(25): SEQ ID NO: 3316; WAN024AJU; Start 53; Stop 77
gcaagatagacaacctagaaagttt

SEQ ID NO: 352035 - DNA, 25 bp, Artificial
  probe
  misc_feature (1)..(25): SEQ ID NO: 3316; WAN024AJU; Start 55; Stop 79
aagatagacaacctagaaagtttgc

SEQ ID NO: 352036 - DNA, 25 bp, Artificial
  probe
  misc_feature (1)..(25): SEQ ID NO: 3316; WAN024AJU; Start 57; Stop 81
gatagacaacctagaaagtttgccc

SEQ ID NO: 352037 - DNA, 25 bp, Artificial
  probe
  misc_feature (1)..(25): SEQ ID NO: 3316; WAN024AJU; Start 50; Stop 74
ttagcaagatagacaacctagaaag

SEQ ID NO: 352038 - DNA, 25 bp, Artificial
  probe
  misc_feature (1)..(25): SEQ ID NO: 3316; WAN024AJU; Start 64; Stop 88
aacctagaaagtttgcccaattacg

SEQ ID NO: 352039 - DNA, 25 bp, Artificial
  probe
  misc_feature (1)..(25): SEQ ID NO: 3316; WAN024AJU; Start 58; Stop 82
atagacaacctagaaagtttgccca

SEQ ID NO: 352040 - DNA, 25 bp, Artificial
  probe
  misc_feature (1)..(25): SEQ ID NO: 3316; WAN024AJU; Start 61; Stop 85
gacaacctagaaagtttgcccaatt

SEQ ID NO: 352041 - DNA, 25 bp, Artificial
  probe
  misc_feature (1)..(25): SEQ ID NO: 3316; WAN024AJU; Start 49; Stop 73
tttagcaagatagacaacctagaaa

SEQ ID NO: 352042 - DNA, 25 bp, Artificial
  probe
  misc_feature (1)..(25): SEQ ID NO: 3316; WAN024AJU; Start 59; Stop 83
tagacaacctagaaagtttgcccaa

SEQ ID NO: 352043 - DNA, 25 bp, Artificial
  probe
  misc_feature (1)..(25): SEQ ID NO: 3316; WAN024AJU; Start 54; Stop 78
caagatagacaacctagaaagtttg

SEQ ID NO: 352044 - DNA, 25 bp, Artificial
  probe
  misc_feature (1)..(25): SEQ ID NO: 3316; WAN024AJU; Start 60; Stop 84
agacaacctagaaagtttgcccaat

SEQ ID NO: 352045 - DNA, 25 bp, Artificial
  probe
  misc_feature (1)..(25): SEQ ID NO: 3316; WAN024AJU; Start 16; Stop 40
tgtcactcttctatcataccgtttt

SEQ ID NO: 352046 - DNA, 25 bp, Artificial
  probe
  misc_feature (1)..(25): SEQ ID NO: 3316; WAN024AJU; Start 83; Stop 107
attacgcataaaactcccagaattg

SEQ ID NO: 352047 - DNA, 25 bp, Artificial
  probe
  misc_feature (1)..(25): SEQ ID NO: 3317; WAN024ACT; Start 16; Stop 40
atgctctaaagtctcttccttaacc

SEQ ID NO: 352048 - DNA, 25 bp, Artificial
  probe
  misc_feature (1)..(25): SEQ ID NO: 3317; WAN024ACT; Start 19; Stop 43
ctctaaagtctcttccttaacccat

SEQ ID NO: 352049 - DNA, 25 bp, Artificial
  probe
  misc_feature (1)..(25): SEQ ID NO: 3317; WAN024ACT; Start 20; Stop 44
tctaaagtctcttccttaacccatt

SEQ ID NO: 352050 - DNA, 25 bp, Artificial
  probe
  misc_feature (1)..(25): SEQ ID NO: 3317; WAN024ACT; Start 15; Stop 39
aatgctctaaagtctcttccttaac

SEQ ID NO: 352051 - DNA, 25 bp, Artificial
  probe
  misc_feature (1)..(25): SEQ ID NO: 3317; WAN024ACT; Start 21; Stop 45
ctaaagtctcttccttaacccattt

SEQ ID NO: 352052 - DNA, 25 bp, Artificial
  probe
  misc_feature (1)..(25): SEQ ID NO: 3317; WAN024ACT; Start 18; Stop 42
gctctaaagtctcttccttaaccca

SEQ ID NO: 352053 - DNA, 25 bp, Artificial
  probe
  misc_feature (1)..(25): SEQ ID NO: 3317; WAN024ACT; Start 17; Stop 41
tgctctaaagtctcttccttaaccc

SEQ ID NO: 352054 - DNA, 25 bp, Artificial
  probe
  misc_feature (1)..(25): SEQ ID NO: 3317; WAN024ACT; Start 14; Stop 38
aaatgctctaaagtctcttccttaa

SEQ ID NO: 352055 - DNA, 25 bp, Artificial
  probe
  misc_feature (1)..(25): SEQ ID NO: 3317; WAN024ACT; Start 22; Stop 46
taaagtctcttccttaacccatttt

SEQ ID NO: 352056 - DNA, 25 bp, Artificial
  probe
  misc_feature (1)..(25): SEQ ID NO: 3317; WAN024ACT; Start 13; Stop 37
aaaatgctctaaagtctcttcctta

SEQ ID NO: 352057 - DNA, 25 bp, Artificial
  probe
  misc_feature (1)..(25): SEQ ID NO: 3318; WAN0249Q8; Start 190; Stop 214
tttcagatatgatttgacaagaaca

SEQ ID NO: 352058 - DNA, 25 bp, Artificial
  probe
  misc_feature (1)..(25): SEQ ID NO: 3318; WAN0249Q8; Start 44; Stop 68
cgttttctctatccagattgctttt

SEQ ID NO: 352059 - DNA, 25 bp, Artificial
  probe
  misc_feature (1)..(25): SEQ ID NO: 3318; WAN0249Q8; Start 192; Stop 216
tcagatatgatttgacaagaacatt

SEQ ID NO: 352060 - DNA, 25 bp, Artificial
  probe
  misc_feature (1)..(25): SEQ ID NO: 3318; WAN0249Q8; Start 191; Stop 215
ttcagatatgatttgacaagaacat

SEQ ID NO: 352061 - DNA, 25 bp, Artificial
  probe
  misc_feature (1)..(25): SEQ ID NO: 3318; WAN0249Q8; Start 193; Stop 217
cagatatgatttgacaagaacattc

SEQ ID NO: 352062 - DNA, 25 bp, Artificial
  probe
  misc_feature (1)..(25): SEQ ID NO: 3318; WAN0249Q8; Start 194; Stop 218
agatatgatttgacaagaacattct

SEQ ID NO: 352063 - DNA, 25 bp, Artificial
  probe
  misc_feature (1)..(25): SEQ ID NO: 3318; WAN0249Q8; Start 43; Stop 67
acgttttctctatccagattgcttt

SEQ ID NO: 352064 - DNA, 25 bp, Artificial
  probe
  misc_feature (1)..(25): SEQ ID NO: 3318; WAN0249Q8; Start 42; Stop 66
gacgttttctctatccagattgctt

SEQ ID NO: 352065 - DNA, 25 bp, Artificial
  probe
  misc_feature (1)..(25): SEQ ID NO: 3318; WAN0249Q8; Start 212; Stop 236
acattcttttattgtagaaccgtgt

SEQ ID NO: 352066 - DNA, 25 bp, Artificial
  probe
  misc_feature (1)..(25): SEQ ID NO: 3318; WAN0249Q8; Start 41; Stop 65
agacgttttctctatccagattgct

SEQ ID NO: 352067 - DNA, 25 bp, Artificial
  probe
  misc_feature (1)..(25): SEQ ID NO: 3318; WAN0249Q8; Start 40; Stop 64
tagacgttttctctatccagattgc

SEQ ID NO: 352068 - DNA, 25 bp, Artificial
  probe
  misc_feature (1)..(25): SEQ ID NO: 3318; WAN0249Q8; Start 213; Stop 237
cattcttttattgtagaaccgtgtt

SEQ ID NO: 352069 - DNA, 25 bp, Artificial
  probe
  misc_feature (1)..(25): SEQ ID NO: 3318; WAN0249Q8; Start 211; Stop 235
aacattcttttattgtagaaccgtg

SEQ ID NO: 352070 - DNA, 25 bp, Artificial
  probe
  misc_feature (1)..(25): SEQ ID NO: 3318; WAN0249Q8; Start 21; Stop 45
gcttcattataacatgatttagacg

SEQ ID NO: 352071 - DNA, 25 bp, Artificial
  probe
  misc_feature (1)..(25): SEQ ID NO: 3318; WAN0249Q8; Start 210; Stop 234
gaacattcttttattgtagaaccgt

SEQ ID NO: 352072 - DNA, 25 bp, Artificial
  probe
  misc_feature (1)..(25): SEQ ID NO: 3318; WAN0249Q8; Start 39; Stop 63
ttagacgttttctctatccagattg

SEQ ID NO: 352073 - DNA, 25 bp, Artificial
  probe
  misc_feature (1)..(25): SEQ ID NO: 3318; WAN0249Q8; Start 35; Stop 59
tgatttagacgttttctctatccag

SEQ ID NO: 352074 - DNA, 25 bp, Artificial
  probe
  misc_feature (1)..(25): SEQ ID NO: 3318; WAN0249Q8; Start 36; Stop 60
gatttagacgttttctctatccaga

SEQ ID NO: 352075 - DNA, 25 bp, Artificial
  probe
  misc_feature (1)..(25): SEQ ID NO: 3318; WAN0249Q8; Start 209; Stop 233
agaacattcttttattgtagaaccg

SEQ ID NO: 352076 - DNA, 25 bp, Artificial
  probe
  misc_feature (1)..(25): SEQ ID NO: 3318; WAN0249Q8; Start 87; Stop 111
tattgaaactagaatagtacacctc

SEQ ID NO: 352077 - DNA, 25 bp, Artificial
  probe
  misc_feature (1)..(25): SEQ ID NO: 3318; WAN0249Q8; Start 38; Stop 62
tttagacgttttctctatccagatt

SEQ ID NO: 352078 - DNA, 25 bp, Artificial
  probe
  misc_feature (1)..(25): SEQ ID NO: 3318; WAN0249Q8; Start 34; Stop 58
atgatttagacgttttctctatcca

SEQ ID NO: 352079 - DNA, 25 bp, Artificial
  probe
  misc_feature (1)..(25): SEQ ID NO: 3318; WAN0249Q8; Start 216; Stop 240
tcttttattgtagaaccgtgttata

SEQ ID NO: 352080 - DNA, 25 bp, Artificial
  probe
  misc_feature (1)..(25): SEQ ID NO: 3318; WAN0249Q8; Start 189; Stop 213
ttttcagatatgatttgacaagaac

SEQ ID NO: 352081 - DNA, 25 bp, Artificial
  probe
  misc_feature (1)..(25): SEQ ID NO: 3318; WAN0249Q8; Start 37; Stop 61
atttagacgttttctctatccagat

SEQ ID NO: 352082 - DNA, 25 bp, Artificial
  probe
  misc_feature (1)..(25): SEQ ID NO: 3318; WAN0249Q8; Start 33; Stop 57
catgatttagacgttttctctatcc

SEQ ID NO: 352083 - DNA, 25 bp, Artificial
  probe
  misc_feature (1)..(25): SEQ ID NO: 3318; WAN0249Q8; Start 195; Stop 219
gatatgatttgacaagaacattctt

SEQ ID NO: 352084 - DNA, 25 bp, Artificial
  probe
  misc_feature (1)..(25): SEQ ID NO: 3318; WAN0249Q8; Start 29; Stop 53
ataacatgatttagacgttttctct

SEQ ID NO: 352085 - DNA, 25 bp, Artificial
  probe
  misc_feature (1)..(25): SEQ ID NO: 3318; WAN0249Q8; Start 215; Stop 239
ttcttttattgtagaaccgtgttat

SEQ ID NO: 352086 - DNA, 25 bp, Artificial
  probe
  misc_feature (1)..(25): SEQ ID NO: 3318; WAN0249Q8; Start 214; Stop 238
attcttttattgtagaaccgtgtta

SEQ ID NO: 352087 - DNA, 25 bp, Artificial
  probe
  misc_feature (1)..(25): SEQ ID NO: 3318; WAN0249Q8; Start 32; Stop 56
acatgatttagacgttttctctatc

SEQ ID NO: 352088 - DNA, 25 bp, Artificial
  probe
  misc_feature (1)..(25): SEQ ID NO: 3318; WAN0249Q8; Start 86; Stop 110
atattgaaactagaatagtacacct

SEQ ID NO: 352089 - DNA, 25 bp, Artificial
  probe
  misc_feature (1)..(25): SEQ ID NO: 3318; WAN0249Q8; Start 20; Stop 44
tgcttcattataacatgatttagac

SEQ ID NO: 352090 - DNA, 25 bp, Artificial
  probe
  misc_feature (1)..(25): SEQ ID NO: 3319; WAN024ASJ; Start 124; Stop 148
gttacaacaagttaggaggtcttct

SEQ ID NO: 352091 - DNA, 25 bp, Artificial
  probe
  misc_feature (1)..(25): SEQ ID NO: 3319; WAN024ASJ; Start 125; Stop 149
ttacaacaagttaggaggtcttctt

SEQ ID NO: 352092 - DNA, 25 bp, Artificial
  probe
  misc_feature (1)..(25): SEQ ID NO: 3319; WAN024ASJ; Start 123; Stop 147
tgttacaacaagttaggaggtcttc

SEQ ID NO: 352093 - DNA, 25 bp, Artificial
  probe
  misc_feature (1)..(25): SEQ ID NO: 3319; WAN024ASJ; Start 138; Stop 162
ggaggtcttcttgtaaccgtctata

SEQ ID NO: 352094 - DNA, 25 bp, Artificial
  probe
  misc_feature (1)..(25): SEQ ID NO: 3319; WAN024ASJ; Start 167; Stop 191
acccgacctatcttaaacaaatctt

SEQ ID NO: 352095 - DNA, 25 bp, Artificial
  probe
  misc_feature (1)..(25): SEQ ID NO: 3319; WAN024ASJ; Start 166; Stop 190
tacccgacctatcttaaacaaatct

SEQ ID NO: 352096 - DNA, 25 bp, Artificial
  probe
  misc_feature (1)..(25): SEQ ID NO: 3319; WAN024ASJ; Start 136; Stop 160
taggaggtcttcttgtaaccgtcta

SEQ ID NO: 352097 - DNA, 25 bp, Artificial
  probe
  misc_feature (1)..(25): SEQ ID NO: 3319; WAN024ASJ; Start 168; Stop 192
cccgacctatcttaaacaaatctta

SEQ ID NO: 352098 - DNA, 25 bp, Artificial
  probe
  misc_feature (1)..(25): SEQ ID NO: 3319; WAN024ASJ; Start 165; Stop 189
atacccgacctatcttaaacaaatc

SEQ ID NO: 352099 - DNA, 25 bp, Artificial
  probe
  misc_feature (1)..(25): SEQ ID NO: 3319; WAN024ASJ; Start 132; Stop 156
aagttaggaggtcttcttgtaaccg

SEQ ID NO: 352100 - DNA, 25 bp, Artificial
  probe
  misc_feature (1)..(25): SEQ ID NO: 3319; WAN024ASJ; Start 139; Stop 163
gaggtcttcttgtaaccgtctatag

SEQ ID NO: 352101 - DNA, 25 bp, Artificial
  probe
  misc_feature (1)..(25): SEQ ID NO: 3319; WAN024ASJ; Start 137; Stop 161
aggaggtcttcttgtaaccgtctat

SEQ ID NO: 352102 - DNA, 25 bp, Artificial
  probe
  misc_feature (1)..(25): SEQ ID NO: 3319; WAN024ASJ; Start 140; Stop 164
aggtcttcttgtaaccgtctatagt

SEQ ID NO: 352103 - DNA, 25 bp, Artificial
  probe
  misc_feature (1)..(25): SEQ ID NO: 3319; WAN024ASJ; Start 142; Stop 166
gtcttcttgtaaccgtctatagtat

SEQ ID NO: 352104 - DNA, 25 bp, Artificial
  probe
  misc_feature (1)..(25): SEQ ID NO: 3319; WAN024ASJ; Start 141; Stop 165
ggtcttcttgtaaccgtctatagta

SEQ ID NO: 352105 - DNA, 25 bp, Artificial
  probe
  misc_feature (1)..(25): SEQ ID NO: 3319; WAN024ASJ; Start 135; Stop 159
ttaggaggtcttcttgtaaccgtct

SEQ ID NO: 352106 - DNA, 25 bp, Artificial
  probe
  misc_feature (1)..(25): SEQ ID NO: 3319; WAN024ASJ; Start 134; Stop 158
gttaggaggtcttcttgtaaccgtc

SEQ ID NO: 352107 - DNA, 25 bp, Artificial
  probe
  misc_feature (1)..(25): SEQ ID NO: 3319; WAN024ASJ; Start 133; Stop 157
agttaggaggtcttcttgtaaccgt

SEQ ID NO: 352108 - DNA, 25 bp, Artificial
  probe
  misc_feature (1)..(25): SEQ ID NO: 3319; WAN024ASJ; Start 164; Stop 188
tatacccgacctatcttaaacaaat

SEQ ID NO: 352109 - DNA, 25 bp, Artificial
  probe
  misc_feature (1)..(25): SEQ ID NO: 3319; WAN024ASJ; Start 148; Stop 172
ttgtaaccgtctatagtatacccga

SEQ ID NO: 352110 - DNA, 25 bp, Artificial
  probe
  misc_feature (1)..(25): SEQ ID NO: 3319; WAN024ASJ; Start 147; Stop 171
cttgtaaccgtctatagtatacccg

SEQ ID NO: 352111 - DNA, 25 bp, Artificial
  probe
  misc_feature (1)..(25): SEQ ID NO: 3319; WAN024ASJ; Start 145; Stop 169
ttcttgtaaccgtctatagtatacc

SEQ ID NO: 352112 - DNA, 25 bp, Artificial
  probe
  misc_feature (1)..(25): SEQ ID NO: 3319; WAN024ASJ; Start 126; Stop 150
tacaacaagttaggaggtcttcttg

SEQ ID NO: 352113 - DNA, 25 bp, Artificial
  probe
  misc_feature (1)..(25): SEQ ID NO: 3319; WAN024ASJ; Start 131; Stop 155
caagttaggaggtcttcttgtaacc

SEQ ID NO: 352114 - DNA, 25 bp, Artificial
  probe
  misc_feature (1)..(25): SEQ ID NO: 3319; WAN024ASJ; Start 162; Stop 186
agtatacccgacctatcttaaacaa

SEQ ID NO: 352115 - DNA, 25 bp, Artificial
  probe
  misc_feature (1)..(25): SEQ ID NO: 3319; WAN024ASJ; Start 146; Stop 170
tcttgtaaccgtctatagtataccc

SEQ ID NO: 352116 - DNA, 25 bp, Artificial
  probe
  misc_feature (1)..(25): SEQ ID NO: 3319; WAN024ASJ; Start 73; Stop 97
gcggtgactctatagggagattatt

SEQ ID NO: 352117 - DNA, 25 bp, Artificial
  probe
  misc_feature (1)..(25): SEQ ID NO: 3319; WAN024ASJ; Start 169; Stop 193
ccgacctatcttaaacaaatcttaa

SEQ ID NO: 352118 - DNA, 25 bp, Artificial
  probe
  misc_feature (1)..(25): SEQ ID NO: 3319; WAN024ASJ; Start 122; Stop 146
ttgttacaacaagttaggaggtctt

SEQ ID NO: 352119 - DNA, 25 bp, Artificial
  probe
  misc_feature (1)..(25): SEQ ID NO: 3319; WAN024ASJ; Start 74; Stop 98
cggtgactctatagggagattatta

SEQ ID NO: 352120 - DNA, 25 bp, Artificial
  probe
  misc_feature (1)..(25): SEQ ID NO: 3319; WAN024ASJ; Start 155; Stop 179
cgtctatagtatacccgacctatct

SEQ ID NO: 352121 - DNA, 25 bp, Artificial
  probe
  misc_feature (1)..(25): SEQ ID NO: 3319; WAN024ASJ; Start 163; Stop 187
gtatacccgacctatcttaaacaaa

SEQ ID NO: 352122 - DNA, 25 bp, Artificial
  probe
  misc_feature (1)..(25): SEQ ID NO: 3319; WAN024ASJ; Start 154; Stop 178
ccgtctatagtatacccgacctatc

SEQ ID NO: 352123 - DNA, 25 bp, Artificial
  probe
  misc_feature (1)..(25): SEQ ID NO: 3320; WAN0249YZ; Start 12; Stop 36
agtgcttacatctaattggatatct

SEQ ID NO: 352124 - DNA, 25 bp, Artificial
  probe
  misc_feature (1)..(25): SEQ ID NO: 3320; WAN0249YZ; Start 61; Stop 85
aatagtcttatctttacacagaggt

SEQ ID NO: 352125 - DNA, 25 bp, Artificial
  probe
  misc_feature (1)..(25): SEQ ID NO: 3320; WAN0249YZ; Start 13; Stop 37
gtgcttacatctaattggatatctt

SEQ ID NO: 352126 - DNA, 25 bp, Artificial
  probe
  misc_feature (1)..(25): SEQ ID NO: 3320; WAN0249YZ; Start 11; Stop 35
aagtgcttacatctaattggatatc

SEQ ID NO: 352127 - DNA, 25 bp, Artificial
  probe
  misc_feature (1)..(25): SEQ ID NO: 3320; WAN0249YZ; Start 8; Stop 32
ttaaagtgcttacatctaattggat

SEQ ID NO: 352128 - DNA, 25 bp, Artificial
  probe
  misc_feature (1)..(25): SEQ ID NO: 3320; WAN0249YZ; Start 10; Stop 34
aaagtgcttacatctaattggatat

SEQ ID NO: 352129 - DNA, 25 bp, Artificial
  probe
  misc_feature (1)..(25): SEQ ID NO: 3320; WAN0249YZ; Start 66; Stop 90
tcttatctttacacagaggtatagt

SEQ ID NO: 352130 - DNA, 25 bp, Artificial
  probe
  misc_feature (1)..(25): SEQ ID NO: 3320; WAN0249YZ; Start 64; Stop 88
agtcttatctttacacagaggtata

SEQ ID NO: 352131 - DNA, 25 bp, Artificial
  probe
  misc_feature (1)..(25): SEQ ID NO: 3320; WAN0249YZ; Start 63; Stop 87
tagtcttatctttacacagaggtat

SEQ ID NO: 352132 - DNA, 25 bp, Artificial
  probe
  misc_feature (1)..(25): SEQ ID NO: 3320; WAN0249YZ; Start 62; Stop 86
atagtcttatctttacacagaggta

SEQ ID NO: 352133 - DNA, 25 bp, Artificial
  probe
  misc_feature (1)..(25): SEQ ID NO: 3320; WAN0249YZ; Start 65; Stop 89
gtcttatctttacacagaggtatag

SEQ ID NO: 352134 - DNA, 25 bp, Artificial
  probe
  misc_feature (1)..(25): SEQ ID NO: 3320; WAN0249YZ; Start 7; Stop 31
tttaaagtgcttacatctaattgga

SEQ ID NO: 352135 - DNA, 25 bp, Artificial
  probe
  misc_feature (1)..(25): SEQ ID NO: 3320; WAN0249YZ; Start 9; Stop 33
taaagtgcttacatctaattggata

SEQ ID NO: 352136 - DNA, 25 bp, Artificial
  probe
  misc_feature (1)..(25): SEQ ID NO: 3320; WAN0249YZ; Start 60; Stop 84
taatagtcttatctttacacagagg

SEQ ID NO: 352137 - DNA, 25 bp, Artificial
  probe
  misc_feature (1)..(25): SEQ ID NO: 3320; WAN0249YZ; Start 14; Stop 38
tgcttacatctaattggatatcttt

SEQ ID NO: 352138 - DNA, 25 bp, Artificial
  probe
  misc_feature (1)..(25): SEQ ID NO: 3320; WAN0249YZ; Start 6; Stop 30
ttttaaagtgcttacatctaattgg

SEQ ID NO: 352139 - DNA, 25 bp, Artificial
  probe
  misc_feature (1)..(25): SEQ ID NO: 3321; WAN024CMS; Start 28; Stop 52
gttgttcttcttggtggtgagattc

SEQ ID NO: 352140 - DNA, 25 bp, Artificial
  probe
  misc_feature (1)..(25): SEQ ID NO: 3321; WAN024CMS; Start 23; Stop 47
ttaaggttgttcttcttggtggtga

SEQ ID NO: 352141 - DNA, 25 bp, Artificial
  probe
  misc_feature (1)..(25): SEQ ID NO: 3321; WAN024CMS; Start 24; Stop 48
taaggttgttcttcttggtggtgag

SEQ ID NO: 352142 - DNA, 25 bp, Artificial
  probe
  misc_feature (1)..(25): SEQ ID NO: 3321; WAN024CMS; Start 19; Stop 43
atctttaaggttgttcttcttggtg

SEQ ID NO: 352143 - DNA, 25 bp, Artificial
  probe
  misc_feature (1)..(25): SEQ ID NO: 3321; WAN024CMS; Start 20; Stop 44
tctttaaggttgttcttcttggtgg

SEQ ID NO: 352144 - DNA, 25 bp, Artificial
  probe
  misc_feature (1)..(25): SEQ ID NO: 3321; WAN024CMS; Start 90; Stop 114
tgctttgatggataggatgtacttt

SEQ ID NO: 352145 - DNA, 25 bp, Artificial
  probe
  misc_feature (1)..(25): SEQ ID NO: 3321; WAN024CMS; Start 89; Stop 113
atgctttgatggataggatgtactt

SEQ ID NO: 352146 - DNA, 25 bp, Artificial
  probe
  misc_feature (1)..(25): SEQ ID NO: 3321; WAN024CMS; Start 88; Stop 112
aatgctttgatggataggatgtact

SEQ ID NO: 352147 - DNA, 25 bp, Artificial
  probe
  misc_feature (1)..(25): SEQ ID NO: 3321; WAN024CMS; Start 21; Stop 45
ctttaaggttgttcttcttggtggt

SEQ ID NO: 352148 - DNA, 25 bp, Artificial
  probe
  misc_feature (1)..(25): SEQ ID NO: 3321; WAN024CMS; Start 95; Stop 119
tgatggataggatgtactttagcaa

SEQ ID NO: 352149 - DNA, 25 bp, Artificial
  probe
  misc_feature (1)..(25): SEQ ID NO: 3321; WAN024CMS; Start 94; Stop 118
ttgatggataggatgtactttagca

SEQ ID NO: 352150 - DNA, 25 bp, Artificial
  probe
  misc_feature (1)..(25): SEQ ID NO: 3321; WAN024CMS; Start 27; Stop 51
ggttgttcttcttggtggtgagatt

SEQ ID NO: 352151 - DNA, 25 bp, Artificial
  probe
  misc_feature (1)..(25): SEQ ID NO: 3321; WAN024CMS; Start 22; Stop 46
tttaaggttgttcttcttggtggtg

SEQ ID NO: 352152 - DNA, 25 bp, Artificial
  probe
  misc_feature (1)..(25): SEQ ID NO: 3321; WAN024CMS; Start 70; Stop 94
tttgtcggaaagattaccaatgctt

SEQ ID NO: 352153 - DNA, 25 bp, Artificial
  probe
  misc_feature (1)..(25): SEQ ID NO: 3321; WAN024CMS; Start 29; Stop 53
ttgttcttcttggtggtgagattcg

SEQ ID NO: 352154 - DNA, 25 bp, Artificial
  probe
  misc_feature (1)..(25): SEQ ID NO: 3321; WAN024CMS; Start 87; Stop 111
caatgctttgatggataggatgtac

SEQ ID NO: 352155 - DNA, 25 bp, Artificial
  probe
  misc_feature (1)..(25): SEQ ID NO: 3321; WAN024CMS; Start 98; Stop 122
tggataggatgtactttagcaagat

SEQ ID NO: 352156 - DNA, 25 bp, Artificial
  probe
  misc_feature (1)..(25): SEQ ID NO: 3321; WAN024CMS; Start 97; Stop 121
atggataggatgtactttagcaaga

SEQ ID NO: 352157 - DNA, 25 bp, Artificial
  probe
  misc_feature (1)..(25): SEQ ID NO: 3321; WAN024CMS; Start 99; Stop 123
ggataggatgtactttagcaagatg

SEQ ID NO: 352158 - DNA, 25 bp, Artificial
  probe
  misc_feature (1)..(25): SEQ ID NO: 3321; WAN024CMS; Start 96; Stop 120
gatggataggatgtactttagcaag

SEQ ID NO: 352159 - DNA, 25 bp, Artificial
  probe
  misc_feature (1)..(25): SEQ ID NO: 3321; WAN024CMS; Start 93; Stop 117
tttgatggataggatgtactttagc

SEQ ID NO: 352160 - DNA, 25 bp, Artificial
  probe
  misc_feature (1)..(25): SEQ ID NO: 3321; WAN024CMS; Start 91; Stop 115
gctttgatggataggatgtacttta

SEQ ID NO: 352161 - DNA, 25 bp, Artificial
  probe
  misc_feature (1)..(25): SEQ ID NO: 3321; WAN024CMS; Start 18; Stop 42
tatctttaaggttgttcttcttggt

SEQ ID NO: 352162 - DNA, 25 bp, Artificial
  probe
  misc_feature (1)..(25): SEQ ID NO: 3321; WAN024CMS; Start 100; Stop 124
gataggatgtactttagcaagatgt

SEQ ID NO: 352163 - DNA, 25 bp, Artificial
  probe
  misc_feature (1)..(25): SEQ ID NO: 3321; WAN024CMS; Start 83; Stop 107
ttaccaatgctttgatggataggat

SEQ ID NO: 352164 - DNA, 25 bp, Artificial
  probe
  misc_feature (1)..(25): SEQ ID NO: 3321; WAN024CMS; Start 82; Stop 106
attaccaatgctttgatggatagga

SEQ ID NO: 352165 - DNA, 25 bp, Artificial
  probe
  misc_feature (1)..(25): SEQ ID NO: 3321; WAN024CMS; Start 81; Stop 105
gattaccaatgctttgatggatagg

SEQ ID NO: 352166 - DNA, 25 bp, Artificial
  probe
  misc_feature (1)..(25): SEQ ID NO: 3321; WAN024CMS; Start 102; Stop 126
taggatgtactttagcaagatgttt

SEQ ID NO: 352167 - DNA, 25 bp, Artificial
  probe
  misc_feature (1)..(25): SEQ ID NO: 3321; WAN024CMS; Start 86; Stop 110
ccaatgctttgatggataggatgta

SEQ ID NO: 352168 - DNA, 25 bp, Artificial
  probe
  misc_feature (1)..(25): SEQ ID NO: 3321; WAN024CMS; Start 84; Stop 108
taccaatgctttgatggataggatg

SEQ ID NO: 352169 - DNA, 25 bp, Artificial
  probe
  misc_feature (1)..(25): SEQ ID NO: 3321; WAN024CMS; Start 32; Stop 56
ttcttcttggtggtgagattcgtga

SEQ ID NO: 352170 - DNA, 25 bp, Artificial
  probe
  misc_feature (1)..(25): SEQ ID NO: 3321; WAN024CMS; Start 31; Stop 55
gttcttcttggtggtgagattcgtg

SEQ ID NO: 352171 - DNA, 25 bp, Artificial
  probe
  misc_feature (1)..(25): SEQ ID NO: 3321; WAN024CMS; Start 26; Stop 50
aggttgttcttcttggtggtgagat

SEQ ID NO: 352172 - DNA, 25 bp, Artificial
  probe
  misc_feature (1)..(25): SEQ ID NO: 3322; WAN024D8T; Start 33; Stop 57
tttaatttcagggcaagaagctaaa

SEQ ID NO: 352173 - DNA, 25 bp, Artificial
  probe
  misc_feature (1)..(25): SEQ ID NO: 3322; WAN024D8T; Start 76; Stop 100
ttactcccaaaagtcatcaaatacg

SEQ ID NO: 352174 - DNA, 25 bp, Artificial
  probe
  misc_feature (1)..(25): SEQ ID NO: 3322; WAN024D8T; Start 77; Stop 101
tactcccaaaagtcatcaaatacgg

SEQ ID NO: 352175 - DNA, 25 bp, Artificial
  probe
  misc_feature (1)..(25): SEQ ID NO: 3322; WAN024D8T; Start 79; Stop 103
ctcccaaaagtcatcaaatacggtg

SEQ ID NO: 352176 - DNA, 25 bp, Artificial
  probe
  misc_feature (1)..(25): SEQ ID NO: 3322; WAN024D8T; Start 34; Stop 58
ttaatttcagggcaagaagctaaaa

SEQ ID NO: 352177 - DNA, 25 bp, Artificial
  probe
  misc_feature (1)..(25): SEQ ID NO: 3322; WAN024D8T; Start 32; Stop 56
ttttaatttcagggcaagaagctaa

SEQ ID NO: 352178 - DNA, 25 bp, Artificial
  probe
  misc_feature (1)..(25): SEQ ID NO: 3322; WAN024D8T; Start 80; Stop 104
tcccaaaagtcatcaaatacggtga

SEQ ID NO: 352179 - DNA, 25 bp, Artificial
  probe
  misc_feature (1)..(25): SEQ ID NO: 3322; WAN024D8T; Start 78; Stop 102
actcccaaaagtcatcaaatacggt

SEQ ID NO: 352180 - DNA, 25 bp, Artificial
  probe
  misc_feature (1)..(25): SEQ ID NO: 3322; WAN024D8T; Start 75; Stop 99
tttactcccaaaagtcatcaaatac

SEQ ID NO: 352181 - DNA, 25 bp, Artificial
  probe
  misc_feature (1)..(25): SEQ ID NO: 3322; WAN024D8T; Start 81; Stop 105
cccaaaagtcatcaaatacggtgat

SEQ ID NO: 352182 - DNA, 25 bp, Artificial
  probe
  misc_feature (1)..(25): SEQ ID NO: 3322; WAN024D8T; Start 74; Stop 98
ttttactcccaaaagtcatcaaata

SEQ ID NO: 352183 - DNA, 25 bp, Artificial
  probe
  misc_feature (1)..(25): SEQ ID NO: 3323; WAN024CAY; Start 1052; Stop 1076
tcatcggtatcgtcattatcaagtt

SEQ ID NO: 352184 - DNA, 25 bp, Artificial
  probe
  misc_feature (1)..(25): SEQ ID NO: 3323; WAN024CAY; Start 1051; Stop 1075
atcatcggtatcgtcattatcaagt

SEQ ID NO: 352185 - DNA, 25 bp, Artificial
  probe
  misc_feature (1)..(25): SEQ ID NO: 3323; WAN024CAY; Start 1048; Stop 1072
gctatcatcggtatcgtcattatca

SEQ ID NO: 352186 - DNA, 25 bp, Artificial
  probe
  misc_feature (1)..(25): SEQ ID NO: 3323; WAN024CAY; Start 1047; Stop 1071
tgctatcatcggtatcgtcattatc

SEQ ID NO: 352187 - DNA, 25 bp, Artificial
  probe
  misc_feature (1)..(25): SEQ ID NO: 3323; WAN024CAY; Start 1046; Stop 1070
ctgctatcatcggtatcgtcattat

SEQ ID NO: 352188 - DNA, 25 bp, Artificial
  probe
  misc_feature (1)..(25): SEQ ID NO: 3323; WAN024CAY; Start 170; Stop 194
ctctacttctcttggtcatcttagc

SEQ ID NO: 352189 - DNA, 25 bp, Artificial
  probe
  misc_feature (1)..(25): SEQ ID NO: 3323; WAN024CAY; Start 1054; Stop 1078
atcggtatcgtcattatcaagttct

SEQ ID NO: 352190 - DNA, 25 bp, Artificial
  probe
  misc_feature (1)..(25): SEQ ID NO: 3323; WAN024CAY; Start 1053; Stop 1077
catcggtatcgtcattatcaagttc

SEQ ID NO: 352191 - DNA, 25 bp, Artificial
  probe
  misc_feature (1)..(25): SEQ ID NO: 3323; WAN024CAY; Start 1055; Stop 1079
tcggtatcgtcattatcaagttctt

SEQ ID NO: 352192 - DNA, 25 bp, Artificial
  probe
  misc_feature (1)..(25): SEQ ID NO: 3323; WAN024CAY; Start 1059; Stop 1083
tatcgtcattatcaagttcttcgct

SEQ ID NO: 352193 - DNA, 25 bp, Artificial
  probe
  misc_feature (1)..(25): SEQ ID NO: 3323; WAN024CAY; Start 1058; Stop 1082
gtatcgtcattatcaagttcttcgc

SEQ ID NO: 352194 - DNA, 25 bp, Artificial
  probe
  misc_feature (1)..(25): SEQ ID NO: 3323; WAN024CAY; Start 1057; Stop 1081
ggtatcgtcattatcaagttcttcg

SEQ ID NO: 352195 - DNA, 25 bp, Artificial
  probe
  misc_feature (1)..(25): SEQ ID NO: 3323; WAN024CAY; Start 1056; Stop 1080
cggtatcgtcattatcaagttcttc

SEQ ID NO: 352196 - DNA, 25 bp, Artificial
  probe
  misc_feature (1)..(25): SEQ ID NO: 3323; WAN024CAY; Start 168; Stop 192
gtctctacttctcttggtcatctta

SEQ ID NO: 352197 - DNA, 25 bp, Artificial
  probe
  misc_feature (1)..(25): SEQ ID NO: 3323; WAN024CAY; Start 169; Stop 193
tctctacttctcttggtcatcttag

SEQ ID NO: 352198 - DNA, 25 bp, Artificial
  probe
  misc_feature (1)..(25): SEQ ID NO: 3323; WAN024CAY; Start 167; Stop 191
ggtctctacttctcttggtcatctt

SEQ ID NO: 352199 - DNA, 25 bp, Artificial
  probe
  misc_feature (1)..(25): SEQ ID NO: 3323; WAN024CAY; Start 1045; Stop 1069
actgctatcatcggtatcgtcatta

SEQ ID NO: 352200 - DNA, 25 bp, Artificial
  probe
  misc_feature (1)..(25): SEQ ID NO: 3323; WAN024CAY; Start 171; Stop 195
tctacttctcttggtcatcttagcc

SEQ ID NO: 352201 - DNA, 25 bp, Artificial
  probe
  misc_feature (1)..(25): SEQ ID NO: 3323; WAN024CAY; Start 165; Stop 189
ttggtctctacttctcttggtcatc

SEQ ID NO: 352202 - DNA, 25 bp, Artificial
  probe
  misc_feature (1)..(25): SEQ ID NO: 3323; WAN024CAY; Start 158; Stop 182
cttacggttggtctctacttctctt

SEQ ID NO: 352203 - DNA, 25 bp, Artificial
  probe
  misc_feature (1)..(25): SEQ ID NO: 3323; WAN024CAY; Start 156; Stop 180
ttcttacggttggtctctacttctc

SEQ ID NO: 352204 - DNA, 25 bp, Artificial
  probe
  misc_feature (1)..(25): SEQ ID NO: 3323; WAN024CAY; Start 1060; Stop 1084
atcgtcattatcaagttcttcgctg

SEQ ID NO: 352205 - DNA, 25 bp, Artificial
  probe
  misc_feature (1)..(25): SEQ ID NO: 3323; WAN024CAY; Start 164; Stop 188
gttggtctctacttctcttggtcat

SEQ ID NO: 352206 - DNA, 25 bp, Artificial
  probe
  misc_feature (1)..(25): SEQ ID NO: 3323; WAN024CAY; Start 159; Stop 183
ttacggttggtctctacttctcttg

SEQ ID NO: 352207 - DNA, 25 bp, Artificial
  probe
  misc_feature (1)..(25): SEQ ID NO: 3323; WAN024CAY; Start 155; Stop 179
gttcttacggttggtctctacttct

SEQ ID NO: 352208 - DNA, 25 bp, Artificial
  probe
  misc_feature (1)..(25): SEQ ID NO: 3323; WAN024CAY; Start 1050; Stop 1074
tatcatcggtatcgtcattatcaag

SEQ ID NO: 352209 - DNA, 25 bp, Artificial
  probe
  misc_feature (1)..(25): SEQ ID NO: 3323; WAN024CAY; Start 1049; Stop 1073
ctatcatcggtatcgtcattatcaa

SEQ ID NO: 352210 - DNA, 25 bp, Artificial
  probe
  misc_feature (1)..(25): SEQ ID NO: 3323; WAN024CAY; Start 1063; Stop 1087
gtcattatcaagttcttcgctggtc

SEQ ID NO: 352211 - DNA, 25 bp, Artificial
  probe
  misc_feature (1)..(25): SEQ ID NO: 3323; WAN024CAY; Start 166; Stop 190
tggtctctacttctcttggtcatct

SEQ ID NO: 352212 - DNA, 25 bp, Artificial
  probe
  misc_feature (1)..(25): SEQ ID NO: 3323; WAN024CAY; Start 1065; Stop 1089
cattatcaagttcttcgctggtcag

SEQ ID NO: 352213 - DNA, 25 bp, Artificial
  probe
  misc_feature (1)..(25): SEQ ID NO: 3323; WAN024CAY; Start 157; Stop 181
tcttacggttggtctctacttctct

SEQ ID NO: 352214 - DNA, 25 bp, Artificial
  probe
  misc_feature (1)..(25): SEQ ID NO: 3323; WAN024CAY; Start 1064; Stop 1088
tcattatcaagttcttcgctggtca

SEQ ID NO: 352215 - DNA, 25 bp, Artificial
  probe
  misc_feature (1)..(25): SEQ ID NO: 3323; WAN024CAY; Start 494; Stop 518
ggattatgtctgccttaaccattgc

SEQ ID NO: 352216 - DNA, 25 bp, Artificial
  probe
  misc_feature (1)..(25): SEQ ID NO: 3324; WAN024DJN; Start 120; Stop 144
catctccaattatgatattcgcttg

SEQ ID NO: 352217 - DNA, 25 bp, Artificial
  probe
  misc_feature (1)..(25): SEQ ID NO: 3324; WAN024DJN; Start 318; Stop 342
tgttatcaaggattcgctcaaggaa

SEQ ID NO: 352218 - DNA, 25 bp, Artificial
  probe
  misc_feature (1)..(25): SEQ ID NO: 3324; WAN024DJN; Start 317; Stop 341
ctgttatcaaggattcgctcaagga

SEQ ID NO: 352219 - DNA, 25 bp, Artificial
  probe
  misc_feature (1)..(25): SEQ ID NO: 3324; WAN024DJN; Start 338; Stop 362
aggaaatcgctgaaactactacttg

SEQ ID NO: 352220 - DNA, 25 bp, Artificial
  probe
  misc_feature (1)..(25): SEQ ID NO: 3324; WAN024DJN; Start 336; Stop 360
caaggaaatcgctgaaactactact

SEQ ID NO: 352221 - DNA, 25 bp, Artificial
  probe
  misc_feature (1)..(25): SEQ ID NO: 3324; WAN024DJN; Start 348; Stop 372
tgaaactactacttgggaagatgtc

SEQ ID NO: 352222 - DNA, 25 bp, Artificial
  probe
  misc_feature (1)..(25): SEQ ID NO: 3324; WAN024DJN; Start 347; Stop 371
ctgaaactactacttgggaagatgt

SEQ ID NO: 352223 - DNA, 25 bp, Artificial
  probe
  misc_feature (1)..(25): SEQ ID NO: 3324; WAN024DJN; Start 337; Stop 361
aaggaaatcgctgaaactactactt

SEQ ID NO: 352224 - DNA, 25 bp, Artificial
  probe
  misc_feature (1)..(25): SEQ ID NO: 3324; WAN024DJN; Start 320; Stop 344
ttatcaaggattcgctcaaggaaat

SEQ ID NO: 352225 - DNA, 25 bp, Artificial
  probe
  misc_feature (1)..(25): SEQ ID NO: 3324; WAN024DJN; Start 346; Stop 370
gctgaaactactacttgggaagatg

SEQ ID NO: 352226 - DNA, 25 bp, Artificial
  probe
  misc_feature (1)..(25): SEQ ID NO: 3324; WAN024DJN; Start 319; Stop 343
gttatcaaggattcgctcaaggaaa

SEQ ID NO: 352227 - DNA, 25 bp, Artificial
  probe
  misc_feature (1)..(25): SEQ ID NO: 3324; WAN024DJN; Start 334; Stop 358
ctcaaggaaatcgctgaaactacta

SEQ ID NO: 352228 - DNA, 25 bp, Artificial
  probe
  misc_feature (1)..(25): SEQ ID NO: 3324; WAN024DJN; Start 340; Stop 364
gaaatcgctgaaactactacttggg

SEQ ID NO: 352229 - DNA, 25 bp, Artificial
  probe
  misc_feature (1)..(25): SEQ ID NO: 3324; WAN024DJN; Start 339; Stop 363
ggaaatcgctgaaactactacttgg

SEQ ID NO: 352230 - DNA, 25 bp, Artificial
  probe
  misc_feature (1)..(25): SEQ ID NO: 3324; WAN024DJN; Start 335; Stop 359
tcaaggaaatcgctgaaactactac

SEQ ID NO: 352231 - DNA, 25 bp, Artificial
  probe
  misc_feature (1)..(25): SEQ ID NO: 3324; WAN024DJN; Start 451; Stop 475
ttggaacaagggatttcagatgatg

SEQ ID NO: 352232 - DNA, 25 bp, Artificial
  probe
  misc_feature (1)..(25): SEQ ID NO: 3324; WAN024DJN; Start 342; Stop 366
aatcgctgaaactactacttgggaa

SEQ ID NO: 352233 - DNA, 25 bp, Artificial
  probe
  misc_feature (1)..(25): SEQ ID NO: 3324; WAN024DJN; Start 341; Stop 365
aaatcgctgaaactactacttggga

SEQ ID NO: 352234 - DNA, 25 bp, Artificial
  probe
  misc_feature (1)..(25): SEQ ID NO: 3324; WAN024DJN; Start 151; Stop 175
ccaaacgaagactctatccctactg

SEQ ID NO: 352235 - DNA, 25 bp, Artificial
  probe
  misc_feature (1)..(25): SEQ ID NO: 3324; WAN024DJN; Start 345; Stop 369
cgctgaaactactacttgggaagat

SEQ ID NO: 352236 - DNA, 25 bp, Artificial
  probe
  misc_feature (1)..(25): SEQ ID NO: 3324; WAN024DJN; Start 343; Stop 367
atcgctgaaactactacttgggaag

SEQ ID NO: 352237 - DNA, 25 bp, Artificial
  probe
  misc_feature (1)..(25): SEQ ID NO: 3324; WAN024DJN; Start 349; Stop 373
gaaactactacttgggaagatgtcc

SEQ ID NO: 352238 - DNA, 25 bp, Artificial
  probe
  misc_feature (1)..(25): SEQ ID NO: 3324; WAN024DJN; Start 119; Stop 143
tcatctccaattatgatattcgctt

SEQ ID NO: 352239 - DNA, 25 bp, Artificial
  probe
  misc_feature (1)..(25): SEQ ID NO: 3324; WAN024DJN; Start 181; Stop 205
cttcacactatcgagcacctcttag

SEQ ID NO: 352240 - DNA, 25 bp, Artificial
  probe
  misc_feature (1)..(25): SEQ ID NO: 3324; WAN024DJN; Start 152; Stop 176
caaacgaagactctatccctactgc

SEQ ID NO: 352241 - DNA, 25 bp, Artificial
  probe
  misc_feature (1)..(25): SEQ ID NO: 3324; WAN024DJN; Start 321; Stop 345
tatcaaggattcgctcaaggaaatc

SEQ ID NO: 352242 - DNA, 25 bp, Artificial
  probe
  misc_feature (1)..(25): SEQ ID NO: 3324; WAN024DJN; Start 316; Stop 340
gctgttatcaaggattcgctcaagg

SEQ ID NO: 352243 - DNA, 25 bp, Artificial
  probe
  misc_feature (1)..(25): SEQ ID NO: 3324; WAN024DJN; Start 476; Stop 500
cctttgaacgtcatgtgatttaact

SEQ ID NO: 352244 - DNA, 25 bp, Artificial
  probe
  misc_feature (1)..(25): SEQ ID NO: 3324; WAN024DJN; Start 344; Stop 368
tcgctgaaactactacttgggaaga

SEQ ID NO: 352245 - DNA, 25 bp, Artificial
  probe
  misc_feature (1)..(25): SEQ ID NO: 3324; WAN024DJN; Start 475; Stop 499
gcctttgaacgtcatgtgatttaac

SEQ ID NO: 352246 - DNA, 25 bp, Artificial
  probe
  misc_feature (1)..(25): SEQ ID NO: 3324; WAN024DJN; Start 473; Stop 497
atgcctttgaacgtcatgtgattta

SEQ ID NO: 352247 - DNA, 25 bp, Artificial
  probe
  misc_feature (1)..(25): SEQ ID NO: 3324; WAN024DJN; Start 452; Stop 476
tggaacaagggatttcagatgatgc

SEQ ID NO: 352248 - DNA, 25 bp, Artificial
  probe
  misc_feature (1)..(25): SEQ ID NO: 3324; WAN024DJN; Start 474; Stop 498
tgcctttgaacgtcatgtgatttaa

SEQ ID NO: 352249 - DNA, 25 bp, Artificial
  probe
  misc_feature (1)..(25): SEQ ID NO: 3325; WAN024CLO; Start 33; Stop 57
tttcgctctctcttctgtttatact

SEQ ID NO: 352250 - DNA, 25 bp, Artificial
  probe
  misc_feature (1)..(25): SEQ ID NO: 3325; WAN024CLO; Start 34; Stop 58
ttcgctctctcttctgtttatacta

SEQ ID NO: 352251 - DNA, 25 bp, Artificial
  probe
  misc_feature (1)..(25): SEQ ID NO: 3325; WAN024CLO; Start 32; Stop 56
atttcgctctctcttctgtttatac

SEQ ID NO: 352252 - DNA, 25 bp, Artificial
  probe
  misc_feature (1)..(25): SEQ ID NO: 3325; WAN024CLO; Start 31; Stop 55
catttcgctctctcttctgtttata

SEQ ID NO: 352253 - DNA, 25 bp, Artificial
  probe
  misc_feature (1)..(25): SEQ ID NO: 3325; WAN024CLO; Start 30; Stop 54
gcatttcgctctctcttctgtttat

SEQ ID NO: 352254 - DNA, 25 bp, Artificial
  probe
  misc_feature (1)..(25): SEQ ID NO: 3325; WAN024CLO; Start 35; Stop 59
tcgctctctcttctgtttatactag

SEQ ID NO: 352255 - DNA, 25 bp, Artificial
  probe
  misc_feature (1)..(25): SEQ ID NO: 3325; WAN024CLO; Start 76; Stop 100
tttggaaagtggtttggtaatttac

SEQ ID NO: 352256 - DNA, 25 bp, Artificial
  probe
  misc_feature (1)..(25): SEQ ID NO: 3325; WAN024CLO; Start 77; Stop 101
ttggaaagtggtttggtaatttact

SEQ ID NO: 352257 - DNA, 25 bp, Artificial
  probe
  misc_feature (1)..(25): SEQ ID NO: 3325; WAN024CLO; Start 36; Stop 60
cgctctctcttctgtttatactagt

SEQ ID NO: 352258 - DNA, 25 bp, Artificial
  probe
  misc_feature (1)..(25): SEQ ID NO: 3325; WAN024CLO; Start 78; Stop 102
tggaaagtggtttggtaatttactt

SEQ ID NO: 352259 - DNA, 25 bp, Artificial
  probe
  misc_feature (1)..(25): SEQ ID NO: 3325; WAN024CLO; Start 29; Stop 53
agcatttcgctctctcttctgttta

SEQ ID NO: 352260 - DNA, 25 bp, Artificial
  probe
  misc_feature (1)..(25): SEQ ID NO: 3325; WAN024CLO; Start 75; Stop 99
ttttggaaagtggtttggtaattta

SEQ ID NO: 352261 - DNA, 25 bp, Artificial
  probe
  misc_feature (1)..(25): SEQ ID NO: 3325; WAN024CLO; Start 37; Stop 61
gctctctcttctgtttatactagtt

SEQ ID NO: 352262 - DNA, 25 bp, Artificial
  probe
  misc_feature (1)..(25): SEQ ID NO: 3325; WAN024CLO; Start 71; Stop 95
cttcttttggaaagtggtttggtaa

SEQ ID NO: 352263 - DNA, 25 bp, Artificial
  probe
  misc_feature (1)..(25): SEQ ID NO: 3325; WAN024CLO; Start 73; Stop 97
tcttttggaaagtggtttggtaatt

SEQ ID NO: 352264 - DNA, 25 bp, Artificial
  probe
  misc_feature (1)..(25): SEQ ID NO: 3325; WAN024CLO; Start 72; Stop 96
ttcttttggaaagtggtttggtaat

SEQ ID NO: 352265 - DNA, 25 bp, Artificial
  probe
  misc_feature (1)..(25): SEQ ID NO: 3325; WAN024CLO; Start 74; Stop 98
cttttggaaagtggtttggtaattt

SEQ ID NO: 352266 - DNA, 25 bp, Artificial
  probe
  misc_feature (1)..(25): SEQ ID NO: 3325; WAN024CLO; Start 70; Stop 94
ccttcttttggaaagtggtttggta

SEQ ID NO: 352267 - DNA, 25 bp, Artificial
  probe
  misc_feature (1)..(25): SEQ ID NO: 3325; WAN024CLO; Start 69; Stop 93
tccttcttttggaaagtggtttggt

SEQ ID NO: 352268 - DNA, 25 bp, Artificial
  probe
  misc_feature (1)..(25): SEQ ID NO: 3325; WAN024CLO; Start 62; Stop 86
ttttgcttccttcttttggaaagtg

SEQ ID NO: 352269 - DNA, 25 bp, Artificial
  probe
  misc_feature (1)..(25): SEQ ID NO: 3325; WAN024CLO; Start 67; Stop 91
cttccttcttttggaaagtggtttg

SEQ ID NO: 352270 - DNA, 25 bp, Artificial
  probe
  misc_feature (1)..(25): SEQ ID NO: 3325; WAN024CLO; Start 38; Stop 62
ctctctcttctgtttatactagttt

SEQ ID NO: 352271 - DNA, 25 bp, Artificial
  probe
  misc_feature (1)..(25): SEQ ID NO: 3325; WAN024CLO; Start 1; Stop 25
ctgaaagtagttttagaaacgaaaa

SEQ ID NO: 352272 - DNA, 25 bp, Artificial
  probe
  misc_feature (1)..(25): SEQ ID NO: 3325; WAN024CLO; Start 68; Stop 92
ttccttcttttggaaagtggtttgg

SEQ ID NO: 352273 - DNA, 25 bp, Artificial
  probe
  misc_feature (1)..(25): SEQ ID NO: 3325; WAN024CLO; Start 66; Stop 90
gcttccttcttttggaaagtggttt

SEQ ID NO: 352274 - DNA, 25 bp, Artificial
  probe
  misc_feature (1)..(25): SEQ ID NO: 3325; WAN024CLO; Start 63; Stop 87
tttgcttccttcttttggaaagtgg

SEQ ID NO: 352275 - DNA, 25 bp, Artificial
  probe
  misc_feature (1)..(25): SEQ ID NO: 3325; WAN024CLO; Start 65; Stop 89
tgcttccttcttttggaaagtggtt

SEQ ID NO: 352276 - DNA, 25 bp, Artificial
  probe
  misc_feature (1)..(25): SEQ ID NO: 3325; WAN024CLO; Start 64; Stop 88
ttgcttccttcttttggaaagtggt

SEQ ID NO: 352277 - DNA, 25 bp, Artificial
  probe
  misc_feature (1)..(25): SEQ ID NO: 3325; WAN024CLO; Start 39; Stop 63
tctctcttctgtttatactagtttt

SEQ ID NO: 352278 - DNA, 25 bp, Artificial
  probe
  misc_feature (1)..(25): SEQ ID NO: 3326; WAN024GMI; Start 6; Stop 30
attaaccacagggattacctttgaa

SEQ ID NO: 352279 - DNA, 25 bp, Artificial
  probe
  misc_feature (1)..(25): SEQ ID NO: 3326; WAN024GMI; Start 5; Stop 29
aattaaccacagggattacctttga

SEQ ID NO: 352280 - DNA, 25 bp, Artificial
  probe
  misc_feature (1)..(25): SEQ ID NO: 3326; WAN024GMI; Start 2; Stop 26
tgaaattaaccacagggattacctt

SEQ ID NO: 352281 - DNA, 25 bp, Artificial
  probe
  misc_feature (1)..(25): SEQ ID NO: 3326; WAN024GMI; Start 7; Stop 31
ttaaccacagggattacctttgaaa

SEQ ID NO: 352282 - DNA, 25 bp, Artificial
  probe
  misc_feature (1)..(25): SEQ ID NO: 3326; WAN024GMI; Start 1; Stop 25
ctgaaattaaccacagggattacct

SEQ ID NO: 352283 - DNA, 25 bp, Artificial
  probe
  misc_feature (1)..(25): SEQ ID NO: 3326; WAN024GMI; Start 4; Stop 28
aaattaaccacagggattacctttg

SEQ ID NO: 352284 - DNA, 25 bp, Artificial
  probe
  misc_feature (1)..(25): SEQ ID NO: 3326; WAN024GMI; Start 3; Stop 27
gaaattaaccacagggattaccttt

SEQ ID NO: 352285 - DNA, 25 bp, Artificial
  probe
  misc_feature (1)..(25): SEQ ID NO: 3326; WAN024GMI; Start 173; Stop 197
tcagtctatggtagctctctttaac

SEQ ID NO: 352286 - DNA, 25 bp, Artificial
  probe
  misc_feature (1)..(25): SEQ ID NO: 3326; WAN024GMI; Start 172; Stop 196
ttcagtctatggtagctctctttaa

SEQ ID NO: 352287 - DNA, 25 bp, Artificial
  probe
  misc_feature (1)..(25): SEQ ID NO: 3326; WAN024GMI; Start 171; Stop 195
tttcagtctatggtagctctcttta

SEQ ID NO: 352288 - DNA, 25 bp, Artificial
  probe
  misc_feature (1)..(25): SEQ ID NO: 3326; WAN024GMI; Start 174; Stop 198
cagtctatggtagctctctttaact

SEQ ID NO: 352289 - DNA, 25 bp, Artificial
  probe
  misc_feature (1)..(25): SEQ ID NO: 3326; WAN024GMI; Start 175; Stop 199
agtctatggtagctctctttaacta

SEQ ID NO: 352290 - DNA, 25 bp, Artificial
  probe
  misc_feature (1)..(25): SEQ ID NO: 3326; WAN024GMI; Start 176; Stop 200
gtctatggtagctctctttaactaa

SEQ ID NO: 352291 - DNA, 25 bp, Artificial
  probe
  misc_feature (1)..(25): SEQ ID NO: 3326; WAN024GMI; Start 8; Stop 32
taaccacagggattacctttgaaaa

SEQ ID NO: 352292 - DNA, 25 bp, Artificial
  probe
  misc_feature (1)..(25): SEQ ID NO: 3326; WAN024GMI; Start 170; Stop 194
ttttcagtctatggtagctctcttt

SEQ ID NO: 352293 - DNA, 25 bp, Artificial
  probe
  misc_feature (1)..(25): SEQ ID NO: 3326; WAN024GMI; Start 177; Stop 201
tctatggtagctctctttaactaat

SEQ ID NO: 352294 - DNA, 25 bp, Artificial
  probe
  misc_feature (1)..(25): SEQ ID NO: 3327; WAN024CN4; Start 58; Stop 82
catcaacctctttcttatcgttcat

SEQ ID NO: 352295 - DNA, 25 bp, Artificial
  probe
  misc_feature (1)..(25): SEQ ID NO: 3327; WAN024CN4; Start 57; Stop 81
ccatcaacctctttcttatcgttca

SEQ ID NO: 352296 - DNA, 25 bp, Artificial
  probe
  misc_feature (1)..(25): SEQ ID NO: 3327; WAN024CN4; Start 61; Stop 85
caacctctttcttatcgttcattct

SEQ ID NO: 352297 - DNA, 25 bp, Artificial
  probe
  misc_feature (1)..(25): SEQ ID NO: 3327; WAN024CN4; Start 60; Stop 84
tcaacctctttcttatcgttcattc

SEQ ID NO: 352298 - DNA, 25 bp, Artificial
  probe
  misc_feature (1)..(25): SEQ ID NO: 3327; WAN024CN4; Start 63; Stop 87
acctctttcttatcgttcattcttt

SEQ ID NO: 352299 - DNA, 25 bp, Artificial
  probe
  misc_feature (1)..(25): SEQ ID NO: 3327; WAN024CN4; Start 62; Stop 86
aacctctttcttatcgttcattctt

SEQ ID NO: 352300 - DNA, 25 bp, Artificial
  probe
  misc_feature (1)..(25): SEQ ID NO: 3327; WAN024CN4; Start 59; Stop 83
atcaacctctttcttatcgttcatt

SEQ ID NO: 352301 - DNA, 25 bp, Artificial
  probe
  misc_feature (1)..(25): SEQ ID NO: 3327; WAN024CN4; Start 56; Stop 80
gccatcaacctctttcttatcgttc

SEQ ID NO: 352302 - DNA, 25 bp, Artificial
  probe
  misc_feature (1)..(25): SEQ ID NO: 3327; WAN024CN4; Start 52; Stop 76
gttcgccatcaacctctttcttatc

SEQ ID NO: 352303 - DNA, 25 bp, Artificial
  probe
  misc_feature (1)..(25): SEQ ID NO: 3327; WAN024CN4; Start 95; Stop 119
gtaagatgaatgctttacctatggc

SEQ ID NO: 352304 - DNA, 25 bp, Artificial
  probe
  misc_feature (1)..(25): SEQ ID NO: 3327; WAN024CN4; Start 89; Stop 113
tgctaagtaagatgaatgctttacc

SEQ ID NO: 352305 - DNA, 25 bp, Artificial
  probe
  misc_feature (1)..(25): SEQ ID NO: 3327; WAN024CN4; Start 90; Stop 114
gctaagtaagatgaatgctttacct

SEQ ID NO: 352306 - DNA, 25 bp, Artificial
  probe
  misc_feature (1)..(25): SEQ ID NO: 3327; WAN024CN4; Start 51; Stop 75
tgttcgccatcaacctctttcttat

SEQ ID NO: 352307 - DNA, 25 bp, Artificial
  probe
  misc_feature (1)..(25): SEQ ID NO: 3327; WAN024CN4; Start 50; Stop 74
atgttcgccatcaacctctttctta

SEQ ID NO: 352308 - DNA, 25 bp, Artificial
  probe
  misc_feature (1)..(25): SEQ ID NO: 3327; WAN024CN4; Start 5; Stop 29
aattgaggcgacaagaatccaatct

SEQ ID NO: 352309 - DNA, 25 bp, Artificial
  probe
  misc_feature (1)..(25): SEQ ID NO: 3327; WAN024CN4; Start 94; Stop 118
agtaagatgaatgctttacctatgg

SEQ ID NO: 352310 - DNA, 25 bp, Artificial
  probe
  misc_feature (1)..(25): SEQ ID NO: 3327; WAN024CN4; Start 6; Stop 30
attgaggcgacaagaatccaatctt

SEQ ID NO: 352311 - DNA, 25 bp, Artificial
  probe
  misc_feature (1)..(25): SEQ ID NO: 3327; WAN024CN4; Start 53; Stop 77
ttcgccatcaacctctttcttatcg

SEQ ID NO: 352312 - DNA, 25 bp, Artificial
  probe
  misc_feature (1)..(25): SEQ ID NO: 3327; WAN024CN4; Start 87; Stop 111
tttgctaagtaagatgaatgcttta

SEQ ID NO: 352313 - DNA, 25 bp, Artificial
  probe
  misc_feature (1)..(25): SEQ ID NO: 3327; WAN024CN4; Start 10; Stop 34
aggcgacaagaatccaatctttata

SEQ ID NO: 352314 - DNA, 25 bp, Artificial
  probe
  misc_feature (1)..(25): SEQ ID NO: 3327; WAN024CN4; Start 88; Stop 112
ttgctaagtaagatgaatgctttac

SEQ ID NO: 352315 - DNA, 25 bp, Artificial
  probe
  misc_feature (1)..(25): SEQ ID NO: 3327; WAN024CN4; Start 49; Stop 73
aatgttcgccatcaacctctttctt

SEQ ID NO: 352316 - DNA, 25 bp, Artificial
  probe
  misc_feature (1)..(25): SEQ ID NO: 3327; WAN024CN4; Start 9; Stop 33
gaggcgacaagaatccaatctttat

SEQ ID NO: 352317 - DNA, 25 bp, Artificial
  probe
  misc_feature (1)..(25): SEQ ID NO: 3327; WAN024CN4; Start 11; Stop 35
ggcgacaagaatccaatctttataa

SEQ ID NO: 352318 - DNA, 25 bp, Artificial
  probe
  misc_feature (1)..(25): SEQ ID NO: 3327; WAN024CN4; Start 2; Stop 26
tgaaattgaggcgacaagaatccaa

SEQ ID NO: 352319 - DNA, 25 bp, Artificial
  probe
  misc_feature (1)..(25): SEQ ID NO: 3327; WAN024CN4; Start 55; Stop 79
cgccatcaacctctttcttatcgtt

SEQ ID NO: 352320 - DNA, 25 bp, Artificial
  probe
  misc_feature (1)..(25): SEQ ID NO: 3327; WAN024CN4; Start 4; Stop 28
aaattgaggcgacaagaatccaatc

SEQ ID NO: 352321 - DNA, 25 bp, Artificial
  probe
  misc_feature (1)..(25): SEQ ID NO: 3327; WAN024CN4; Start 3; Stop 27
gaaattgaggcgacaagaatccaat

SEQ ID NO: 352322 - DNA, 25 bp, Artificial
  probe
  misc_feature (1)..(25): SEQ ID NO: 3327; WAN024CN4; Start 96; Stop 120
taagatgaatgctttacctatggcc

SEQ ID NO: 352323 - DNA, 25 bp, Artificial
  probe
  misc_feature (1)..(25): SEQ ID NO: 3327; WAN024CN4; Start 105; Stop 129
tgctttacctatggccctaactaat

SEQ ID NO: 352324 - DNA, 25 bp, Artificial
  probe
  misc_feature (1)..(25): SEQ ID NO: 3327; WAN024CN4; Start 104; Stop 128
atgctttacctatggccctaactaa

SEQ ID NO: 352325 - DNA, 25 bp, Artificial
  probe
  misc_feature (1)..(25): SEQ ID NO: 3327; WAN024CN4; Start 103; Stop 127
aatgctttacctatggccctaacta

SEQ ID NO: 352326 - DNA, 25 bp, Artificial
  probe
  misc_feature (1)..(25): SEQ ID NO: 3327; WAN024CN4; Start 1; Stop 25
ctgaaattgaggcgacaagaatcca

SEQ ID NO: 352327 - DNA, 25 bp, Artificial
  probe
  misc_feature (1)..(25): SEQ ID NO: 3328; WAN024FMI; Start 60; Stop 84
gactattccaacttcaacccactat

SEQ ID NO: 352328 - DNA, 25 bp, Artificial
  probe
  misc_feature (1)..(25): SEQ ID NO: 3328; WAN024FMI; Start 42; Stop 66
gtttgagaaagaagggaggactatt

SEQ ID NO: 352329 - DNA, 25 bp, Artificial
  probe
  misc_feature (1)..(25): SEQ ID NO: 3328; WAN024FMI; Start 202; Stop 226
aacaagggtctattatttcaactgc

SEQ ID NO: 352330 - DNA, 25 bp, Artificial
  probe
  misc_feature (1)..(25): SEQ ID NO: 3328; WAN024FMI; Start 61; Stop 85
actattccaacttcaacccactata

SEQ ID NO: 352331 - DNA, 25 bp, Artificial
  probe
  misc_feature (1)..(25): SEQ ID NO: 3328; WAN024FMI; Start 77; Stop 101
cccactataaagcagacttacaaga

SEQ ID NO: 352332 - DNA, 25 bp, Artificial
  probe
  misc_feature (1)..(25): SEQ ID NO: 3328; WAN024FMI; Start 75; Stop 99
aacccactataaagcagacttacaa

SEQ ID NO: 352333 - DNA, 25 bp, Artificial
  probe
  misc_feature (1)..(25): SEQ ID NO: 3328; WAN024FMI; Start 43; Stop 67
tttgagaaagaagggaggactattc

SEQ ID NO: 352334 - DNA, 25 bp, Artificial
  probe
  misc_feature (1)..(25): SEQ ID NO: 3328; WAN024FMI; Start 76; Stop 100
acccactataaagcagacttacaag

SEQ ID NO: 352335 - DNA, 25 bp, Artificial
  probe
  misc_feature (1)..(25): SEQ ID NO: 3328; WAN024FMI; Start 73; Stop 97
tcaacccactataaagcagacttac

SEQ ID NO: 352336 - DNA, 25 bp, Artificial
  probe
  misc_feature (1)..(25): SEQ ID NO: 3328; WAN024FMI; Start 72; Stop 96
ttcaacccactataaagcagactta

SEQ ID NO: 352337 - DNA, 25 bp, Artificial
  probe
  misc_feature (1)..(25): SEQ ID NO: 3328; WAN024FMI; Start 110; Stop 134
ccatctccgataatattccgataat

SEQ ID NO: 352338 - DNA, 25 bp, Artificial
  probe
  misc_feature (1)..(25): SEQ ID NO: 3328; WAN024FMI; Start 85; Stop 109
aaagcagacttacaagatagggaac

SEQ ID NO: 352339 - DNA, 25 bp, Artificial
  probe
  misc_feature (1)..(25): SEQ ID NO: 3328; WAN024FMI; Start 74; Stop 98
caacccactataaagcagacttaca

SEQ ID NO: 352340 - DNA, 25 bp, Artificial
  probe
  misc_feature (1)..(25): SEQ ID NO: 3328; WAN024FMI; Start 41; Stop 65
tgtttgagaaagaagggaggactat

SEQ ID NO: 352341 - DNA, 25 bp, Artificial
  probe
  misc_feature (1)..(25): SEQ ID NO: 3328; WAN024FMI; Start 40; Stop 64
atgtttgagaaagaagggaggacta

SEQ ID NO: 352342 - DNA, 25 bp, Artificial
  probe
  misc_feature (1)..(25): SEQ ID NO: 3328; WAN024FMI; Start 71; Stop 95
cttcaacccactataaagcagactt

SEQ ID NO: 352343 - DNA, 25 bp, Artificial
  probe
  misc_feature (1)..(25): SEQ ID NO: 3328; WAN024FMI; Start 84; Stop 108
taaagcagacttacaagatagggaa

SEQ ID NO: 352344 - DNA, 25 bp, Artificial
  probe
  misc_feature (1)..(25): SEQ ID NO: 3328; WAN024FMI; Start 83; Stop 107
ataaagcagacttacaagataggga

SEQ ID NO: 352345 - DNA, 25 bp, Artificial
  probe
  misc_feature (1)..(25): SEQ ID NO: 3328; WAN024FMI; Start 69; Stop 93
aacttcaacccactataaagcagac

SEQ ID NO: 352346 - DNA, 25 bp, Artificial
  probe
  misc_feature (1)..(25): SEQ ID NO: 3328; WAN024FMI; Start 68; Stop 92
caacttcaacccactataaagcaga

SEQ ID NO: 352347 - DNA, 25 bp, Artificial
  probe
  misc_feature (1)..(25): SEQ ID NO: 3328; WAN024FMI; Start 64; Stop 88
attccaacttcaacccactataaag

SEQ ID NO: 352348 - DNA, 25 bp, Artificial
  probe
  misc_feature (1)..(25): SEQ ID NO: 3328; WAN024FMI; Start 65; Stop 89
ttccaacttcaacccactataaagc

SEQ ID NO: 352349 - DNA, 25 bp, Artificial
  probe
  misc_feature (1)..(25): SEQ ID NO: 3328; WAN024FMI; Start 62; Stop 86
ctattccaacttcaacccactataa

SEQ ID NO: 352350 - DNA, 25 bp, Artificial
  probe
  misc_feature (1)..(25): SEQ ID NO: 3328; WAN024FMI; Start 39; Stop 63
aatgtttgagaaagaagggaggact

SEQ ID NO: 352351 - DNA, 25 bp, Artificial
  probe
  misc_feature (1)..(25): SEQ ID NO: 3328; WAN024FMI; Start 78; Stop 102
ccactataaagcagacttacaagat

SEQ ID NO: 352352 - DNA, 25 bp, Artificial
  probe
  misc_feature (1)..(25): SEQ ID NO: 3328; WAN024FMI; Start 70; Stop 94
acttcaacccactataaagcagact

SEQ ID NO: 352353 - DNA, 25 bp, Artificial
  probe
  misc_feature (1)..(25): SEQ ID NO: 3328; WAN024FMI; Start 21; Stop 45
ggtaaatcaattcctcacaatgttt

SEQ ID NO: 352354 - DNA, 25 bp, Artificial
  probe
  misc_feature (1)..(25): SEQ ID NO: 3328; WAN024FMI; Start 35; Stop 59
tcacaatgtttgagaaagaagggag

SEQ ID NO: 352355 - DNA, 25 bp, Artificial
  probe
  misc_feature (1)..(25): SEQ ID NO: 3328; WAN024FMI; Start 67; Stop 91
ccaacttcaacccactataaagcag

SEQ ID NO: 352356 - DNA, 25 bp, Artificial
  probe
  misc_feature (1)..(25): SEQ ID NO: 3328; WAN024FMI; Start 90; Stop 114
agacttacaagatagggaacccatc

SEQ ID NO: 352357 - DNA, 25 bp, Artificial
  probe
  misc_feature (1)..(25): SEQ ID NO: 3328; WAN024FMI; Start 172; Stop 196
attcaaaccaatttctcacaatgtt

SEQ ID NO: 352358 - DNA, 25 bp, Artificial
  probe
  misc_feature (1)..(25): SEQ ID NO: 3328; WAN024FMI; Start 38; Stop 62
caatgtttgagaaagaagggaggac

SEQ ID NO: 352359 - DNA, 25 bp, Artificial
  probe
  misc_feature (1)..(25): SEQ ID NO: 3328; WAN024FMI; Start 89; Stop 113
cagacttacaagatagggaacccat

SEQ ID NO: 352360 - DNA, 25 bp, Artificial
  probe
  misc_feature (1)..(25): SEQ ID NO: 3329; WAN0249UG; Start 269; Stop 293
gatgaagacaggctggttatcaatt

SEQ ID NO: 352361 - DNA, 25 bp, Artificial
  probe
  misc_feature (1)..(25): SEQ ID NO: 3329; WAN0249UG; Start 267; Stop 291
tagatgaagacaggctggttatcaa

SEQ ID NO: 352362 - DNA, 25 bp, Artificial
  probe
  misc_feature (1)..(25): SEQ ID NO: 3329; WAN0249UG; Start 264; Stop 288
gactagatgaagacaggctggttat

SEQ ID NO: 352363 - DNA, 25 bp, Artificial
  probe
  misc_feature (1)..(25): SEQ ID NO: 3329; WAN0249UG; Start 265; Stop 289
actagatgaagacaggctggttatc

SEQ ID NO: 352364 - DNA, 25 bp, Artificial
  probe
  misc_feature (1)..(25): SEQ ID NO: 3329; WAN0249UG; Start 268; Stop 292
agatgaagacaggctggttatcaat

SEQ ID NO: 352365 - DNA, 25 bp, Artificial
  probe
  misc_feature (1)..(25): SEQ ID NO: 3329; WAN0249UG; Start 266; Stop 290
ctagatgaagacaggctggttatca

SEQ ID NO: 352366 - DNA, 25 bp, Artificial
  probe
  misc_feature (1)..(25): SEQ ID NO: 3329; WAN0249UG; Start 214; Stop 238
acagttagggagaataggtaaggat

SEQ ID NO: 352367 - DNA, 25 bp, Artificial
  probe
  misc_feature (1)..(25): SEQ ID NO: 3329; WAN0249UG; Start 210; Stop 234
tagcacagttagggagaataggtaa

SEQ ID NO: 352368 - DNA, 25 bp, Artificial
  probe
  misc_feature (1)..(25): SEQ ID NO: 3329; WAN0249UG; Start 209; Stop 233
atagcacagttagggagaataggta

SEQ ID NO: 352369 - DNA, 25 bp, Artificial
  probe
  misc_feature (1)..(25): SEQ ID NO: 3329; WAN0249UG; Start 208; Stop 232
tatagcacagttagggagaataggt

SEQ ID NO: 352370 - DNA, 25 bp, Artificial
  probe
  misc_feature (1)..(25): SEQ ID NO: 3329; WAN0249UG; Start 207; Stop 231
gtatagcacagttagggagaatagg

SEQ ID NO: 352371 - DNA, 25 bp, Artificial
  probe
  misc_feature (1)..(25): SEQ ID NO: 3329; WAN0249UG; Start 213; Stop 237
cacagttagggagaataggtaagga

SEQ ID NO: 352372 - DNA, 25 bp, Artificial
  probe
  misc_feature (1)..(25): SEQ ID NO: 3329; WAN0249UG; Start 274; Stop 298
agacaggctggttatcaatttatca

SEQ ID NO: 352373 - DNA, 25 bp, Artificial
  probe
  misc_feature (1)..(25): SEQ ID NO: 3329; WAN0249UG; Start 263; Stop 287
tgactagatgaagacaggctggtta

SEQ ID NO: 352374 - DNA, 25 bp, Artificial
  probe
  misc_feature (1)..(25): SEQ ID NO: 3329; WAN0249UG; Start 215; Stop 239
cagttagggagaataggtaaggatt

SEQ ID NO: 352375 - DNA, 25 bp, Artificial
  probe
  misc_feature (1)..(25): SEQ ID NO: 3329; WAN0249UG; Start 275; Stop 299
gacaggctggttatcaatttatcaa

SEQ ID NO: 352376 - DNA, 25 bp, Artificial
  probe
  misc_feature (1)..(25): SEQ ID NO: 3329; WAN0249UG; Start 206; Stop 230
agtatagcacagttagggagaatag

SEQ ID NO: 352377 - DNA, 25 bp, Artificial
  probe
  misc_feature (1)..(25): SEQ ID NO: 3329; WAN0249UG; Start 255; Stop 279
aaccagcatgactagatgaagacag

SEQ ID NO: 352378 - DNA, 25 bp, Artificial
  probe
  misc_feature (1)..(25): SEQ ID NO: 3329; WAN0249UG; Start 273; Stop 297
aagacaggctggttatcaatttatc

SEQ ID NO: 352379 - DNA, 25 bp, Artificial
  probe
  misc_feature (1)..(25): SEQ ID NO: 3329; WAN0249UG; Start 272; Stop 296
gaagacaggctggttatcaatttat

SEQ ID NO: 352380 - DNA, 25 bp, Artificial
  probe
  misc_feature (1)..(25): SEQ ID NO: 3329; WAN0249UG; Start 211; Stop 235
agcacagttagggagaataggtaag

SEQ ID NO: 352381 - DNA, 25 bp, Artificial
  probe
  misc_feature (1)..(25): SEQ ID NO: 3329; WAN0249UG; Start 203; Stop 227
ttaagtatagcacagttagggagaa

SEQ ID NO: 352382 - DNA, 25 bp, Artificial
  probe
  misc_feature (1)..(25): SEQ ID NO: 3329; WAN0249UG; Start 205; Stop 229
aagtatagcacagttagggagaata

SEQ ID NO: 352383 - DNA, 25 bp, Artificial
  probe
  misc_feature (1)..(25): SEQ ID NO: 3329; WAN0249UG; Start 204; Stop 228
taagtatagcacagttagggagaat

SEQ ID NO: 352384 - DNA, 25 bp, Artificial
  probe
  misc_feature (1)..(25): SEQ ID NO: 3329; WAN0249UG; Start 276; Stop 300
acaggctggttatcaatttatcaat

SEQ ID NO: 352385 - DNA, 25 bp, Artificial
  probe
  misc_feature (1)..(25): SEQ ID NO: 3329; WAN0249UG; Start 271; Stop 295
tgaagacaggctggttatcaattta

SEQ ID NO: 352386 - DNA, 25 bp, Artificial
  probe
  misc_feature (1)..(25): SEQ ID NO: 3329; WAN0249UG; Start 202; Stop 226
attaagtatagcacagttagggaga

SEQ ID NO: 352387 - DNA, 25 bp, Artificial
  probe
  misc_feature (1)..(25): SEQ ID NO: 3329; WAN0249UG; Start 216; Stop 240
agttagggagaataggtaaggattt

SEQ ID NO: 352388 - DNA, 25 bp, Artificial
  probe
  misc_feature (1)..(25): SEQ ID NO: 3329; WAN0249UG; Start 270; Stop 294
atgaagacaggctggttatcaattt

SEQ ID NO: 352389 - DNA, 25 bp, Artificial
  probe
  misc_feature (1)..(25): SEQ ID NO: 3329; WAN0249UG; Start 368; Stop 392
gatgtttagagtgctaccgtagttg

SEQ ID NO: 352390 - DNA, 25 bp, Artificial
  probe
  misc_feature (1)..(25): SEQ ID NO: 3329; WAN0249UG; Start 262; Stop 286
atgactagatgaagacaggctggtt

SEQ ID NO: 352391 - DNA, 25 bp, Artificial
  probe
  misc_feature (1)..(25): SEQ ID NO: 3329; WAN0249UG; Start 367; Stop 391
tgatgtttagagtgctaccgtagtt

SEQ ID NO: 352392 - DNA, 25 bp, Artificial
  probe
  misc_feature (1)..(25): SEQ ID NO: 3329; WAN0249UG; Start 212; Stop 236
gcacagttagggagaataggtaagg

SEQ ID NO: 352393 - DNA, 25 bp, Artificial
  probe
  misc_feature (1)..(25): SEQ ID NO: 3330; WAN024DFC; Start 969; Stop 993
gacagactatcagattaagacaggt

SEQ ID NO: 352394 - DNA, 25 bp, Artificial
  probe
  misc_feature (1)..(25): SEQ ID NO: 3330; WAN024DFC; Start 968; Stop 992
agacagactatcagattaagacagg

SEQ ID NO: 352395 - DNA, 25 bp, Artificial
  probe
  misc_feature (1)..(25): SEQ ID NO: 3330; WAN024DFC; Start 967; Stop 991
gagacagactatcagattaagacag

SEQ ID NO: 352396 - DNA, 25 bp, Artificial
  probe
  misc_feature (1)..(25): SEQ ID NO: 3330; WAN024DFC; Start 1028; Stop 1052
tcttacagattgctagtcaggtcaa

SEQ ID NO: 352397 - DNA, 25 bp, Artificial
  probe
  misc_feature (1)..(25): SEQ ID NO: 3330; WAN024DFC; Start 966; Stop 990
tgagacagactatcagattaagaca

SEQ ID NO: 352398 - DNA, 25 bp, Artificial
  probe
  misc_feature (1)..(25): SEQ ID NO: 3330; WAN024DFC; Start 970; Stop 994
acagactatcagattaagacaggtc

SEQ ID NO: 352399 - DNA, 25 bp, Artificial
  probe
  misc_feature (1)..(25): SEQ ID NO: 3330; WAN024DFC; Start 1027; Stop 1051
ctcttacagattgctagtcaggtca

SEQ ID NO: 352400 - DNA, 25 bp, Artificial
  probe
  misc_feature (1)..(25): SEQ ID NO: 3330; WAN024DFC; Start 1026; Stop 1050
actcttacagattgctagtcaggtc

SEQ ID NO: 352401 - DNA, 25 bp, Artificial
  probe
  misc_feature (1)..(25): SEQ ID NO: 3330; WAN024DFC; Start 1025; Stop 1049
cactcttacagattgctagtcaggt

SEQ ID NO: 352402 - DNA, 25 bp, Artificial
  probe
  misc_feature (1)..(25): SEQ ID NO: 3330; WAN024DFC; Start 851; Stop 875
gtagtttaggtagttatctgggacg

SEQ ID NO: 352403 - DNA, 25 bp, Artificial
  probe
  misc_feature (1)..(25): SEQ ID NO: 3330; WAN024DFC; Start 965; Stop 989
ttgagacagactatcagattaagac

SEQ ID NO: 352404 - DNA, 25 bp, Artificial
  probe
  misc_feature (1)..(25): SEQ ID NO: 3330; WAN024DFC; Start 874; Stop 898
cgtaacccaaatccttatcaaatca

SEQ ID NO: 352405 - DNA, 25 bp, Artificial
  probe
  misc_feature (1)..(25): SEQ ID NO: 3330; WAN024DFC; Start 266; Stop 290
ttatggatatcacgactgctaagaa

SEQ ID NO: 352406 - DNA, 25 bp, Artificial
  probe
  misc_feature (1)..(25): SEQ ID NO: 3330; WAN024DFC; Start 1029; Stop 1053
cttacagattgctagtcaggtcaat

SEQ ID NO: 352407 - DNA, 25 bp, Artificial
  probe
  misc_feature (1)..(25): SEQ ID NO: 3330; WAN024DFC; Start 850; Stop 874
agtagtttaggtagttatctgggac

SEQ ID NO: 352408 - DNA, 25 bp, Artificial
  probe
  misc_feature (1)..(25): SEQ ID NO: 3330; WAN024DFC; Start 847; Stop 871
gcaagtagtttaggtagttatctgg

SEQ ID NO: 352409 - DNA, 25 bp, Artificial
  probe
  misc_feature (1)..(25): SEQ ID NO: 3330; WAN024DFC; Start 126; Stop 150
gttgaaacagattgggtatgattct

SEQ ID NO: 352410 - DNA, 25 bp, Artificial
  probe
  misc_feature (1)..(25): SEQ ID NO: 3330; WAN024DFC; Start 902; Stop 926
ttgcattaagagattcgagaggact

SEQ ID NO: 352411 - DNA, 25 bp, Artificial
  probe
  misc_feature (1)..(25): SEQ ID NO: 3330; WAN024DFC; Start 878; Stop 902
acccaaatccttatcaaatcaagtt

SEQ ID NO: 352412 - DNA, 25 bp, Artificial
  probe
  misc_feature (1)..(25): SEQ ID NO: 3330; WAN024DFC; Start 877; Stop 901
aacccaaatccttatcaaatcaagt

SEQ ID NO: 352413 - DNA, 25 bp, Artificial
  probe
  misc_feature (1)..(25): SEQ ID NO: 3330; WAN024DFC; Start 23; Stop 47
tagccattgaagaaagtcagaagtt

SEQ ID NO: 352414 - DNA, 25 bp, Artificial
  probe
  misc_feature (1)..(25): SEQ ID NO: 3330; WAN024DFC; Start 903; Stop 927
tgcattaagagattcgagaggactt

SEQ ID NO: 352415 - DNA, 25 bp, Artificial
  probe
  misc_feature (1)..(25): SEQ ID NO: 3330; WAN024DFC; Start 142; Stop 166
tatgattctgctgacctcaactttg

SEQ ID NO: 352416 - DNA, 25 bp, Artificial
  probe
  misc_feature (1)..(25): SEQ ID NO: 3330; WAN024DFC; Start 141; Stop 165
gtatgattctgctgacctcaacttt

SEQ ID NO: 352417 - DNA, 25 bp, Artificial
  probe
  misc_feature (1)..(25): SEQ ID NO: 3330; WAN024DFC; Start 98; Stop 122
gtcagtttgaagtgatgaagagtca

SEQ ID NO: 352418 - DNA, 25 bp, Artificial
  probe
  misc_feature (1)..(25): SEQ ID NO: 3330; WAN024DFC; Start 848; Stop 872
caagtagtttaggtagttatctggg

SEQ ID NO: 352419 - DNA, 25 bp, Artificial
  probe
  misc_feature (1)..(25): SEQ ID NO: 3330; WAN024DFC; Start 849; Stop 873
aagtagtttaggtagttatctggga

SEQ ID NO: 352420 - DNA, 25 bp, Artificial
  probe
  misc_feature (1)..(25): SEQ ID NO: 3330; WAN024DFC; Start 183; Stop 207
agaagtagtttacaaggatgtggaa

SEQ ID NO: 352421 - DNA, 25 bp, Artificial
  probe
  misc_feature (1)..(25): SEQ ID NO: 3330; WAN024DFC; Start 182; Stop 206
aagaagtagtttacaaggatgtgga

SEQ ID NO: 352422 - DNA, 25 bp, Artificial
  probe
  misc_feature (1)..(25): SEQ ID NO: 3330; WAN024DFC; Start 58; Stop 82
aatttaccgagcctgagcctattta

SEQ ID NO: 352423 - DNA, 25 bp, Artificial
  probe
  misc_feature (1)..(25): SEQ ID NO: 3330; WAN024DFC; Start 22; Stop 46
ctagccattgaagaaagtcagaagt

SEQ ID NO: 352424 - DNA, 25 bp, Artificial
  probe
  misc_feature (1)..(25): SEQ ID NO: 3330; WAN024DFC; Start 952; Stop 976
atttcctatttgattgagacagact

SEQ ID NO: 352425 - DNA, 25 bp, Artificial
  probe
  misc_feature (1)..(25): SEQ ID NO: 3330; WAN024DFC; Start 964; Stop 988
attgagacagactatcagattaaga

SEQ ID NO: 352426 - DNA, 25 bp, Artificial
  probe
  misc_feature (1)..(25): SEQ ID NO: 3331; WAN024FDN; Start 281; Stop 305
ttggtcagctaagacaagaacaatt

SEQ ID NO: 352427 - DNA, 25 bp, Artificial
  probe
  misc_feature (1)..(25): SEQ ID NO: 3331; WAN024FDN; Start 228; Stop 252
gagcaagatttatcctagcgtaatt

SEQ ID NO: 352428 - DNA, 25 bp, Artificial
  probe
  misc_feature (1)..(25): SEQ ID NO: 3331; WAN024FDN; Start 229; Stop 253
agcaagatttatcctagcgtaattt

SEQ ID NO: 352429 - DNA, 25 bp, Artificial
  probe
  misc_feature (1)..(25): SEQ ID NO: 3331; WAN024FDN; Start 280; Stop 304
gttggtcagctaagacaagaacaat

SEQ ID NO: 352430 - DNA, 25 bp, Artificial
  probe
  misc_feature (1)..(25): SEQ ID NO: 3331; WAN024FDN; Start 264; Stop 288
gaaatcggtctttatggttggtcag

SEQ ID NO: 352431 - DNA, 25 bp, Artificial
  probe
  misc_feature (1)..(25): SEQ ID NO: 3331; WAN024FDN; Start 300; Stop 324
acaatttgacaatatcatcttcgga

SEQ ID NO: 352432 - DNA, 25 bp, Artificial
  probe
  misc_feature (1)..(25): SEQ ID NO: 3331; WAN024FDN; Start 276; Stop 300
tatggttggtcagctaagacaagaa

SEQ ID NO: 352433 - DNA, 25 bp, Artificial
  probe
  misc_feature (1)..(25): SEQ ID NO: 3331; WAN024FDN; Start 275; Stop 299
ttatggttggtcagctaagacaaga

SEQ ID NO: 352434 - DNA, 25 bp, Artificial
  probe
  misc_feature (1)..(25): SEQ ID NO: 3331; WAN024FDN; Start 288; Stop 312
gctaagacaagaacaatttgacaat

SEQ ID NO: 352435 - DNA, 25 bp, Artificial
  probe
  misc_feature (1)..(25): SEQ ID NO: 3331; WAN024FDN; Start 301; Stop 325
caatttgacaatatcatcttcggag

SEQ ID NO: 352436 - DNA, 25 bp, Artificial
  probe
  misc_feature (1)..(25): SEQ ID NO: 3331; WAN024FDN; Start 203; Stop 227
atttagatgaagactgtctgctttg

SEQ ID NO: 352437 - DNA, 25 bp, Artificial
  probe
  misc_feature (1)..(25): SEQ ID NO: 3331; WAN024FDN; Start 202; Stop 226
catttagatgaagactgtctgcttt

SEQ ID NO: 352438 - DNA, 25 bp, Artificial
  probe
  misc_feature (1)..(25): SEQ ID NO: 3331; WAN024FDN; Start 302; Stop 326
aatttgacaatatcatcttcggaga

SEQ ID NO: 352439 - DNA, 25 bp, Artificial
  probe
  misc_feature (1)..(25): SEQ ID NO: 3331; WAN024FDN; Start 299; Stop 323
aacaatttgacaatatcatcttcgg

SEQ ID NO: 352440 - DNA, 25 bp, Artificial
  probe
  misc_feature (1)..(25): SEQ ID NO: 3331; WAN024FDN; Start 204; Stop 228
tttagatgaagactgtctgctttgg

SEQ ID NO: 352441 - DNA, 25 bp, Artificial
  probe
  misc_feature (1)..(25): SEQ ID NO: 3331; WAN024FDN; Start 263; Stop 287
agaaatcggtctttatggttggtca

SEQ ID NO: 352442 - DNA, 25 bp, Artificial
  probe
  misc_feature (1)..(25): SEQ ID NO: 3331; WAN024FDN; Start 227; Stop 251
ggagcaagatttatcctagcgtaat

SEQ ID NO: 352443 - DNA, 25 bp, Artificial
  probe
  misc_feature (1)..(25): SEQ ID NO: 3331; WAN024FDN; Start 286; Stop 310
cagctaagacaagaacaatttgaca

SEQ ID NO: 352444 - DNA, 25 bp, Artificial
  probe
  misc_feature (1)..(25): SEQ ID NO: 3331; WAN024FDN; Start 205; Stop 229
ttagatgaagactgtctgctttgga

SEQ ID NO: 352445 - DNA, 25 bp, Artificial
  probe
  misc_feature (1)..(25): SEQ ID NO: 3331; WAN024FDN; Start 287; Stop 311
agctaagacaagaacaatttgacaa

SEQ ID NO: 352446 - DNA, 25 bp, Artificial
  probe
  misc_feature (1)..(25): SEQ ID NO: 3331; WAN024FDN; Start 285; Stop 309
tcagctaagacaagaacaatttgac

SEQ ID NO: 352447 - DNA, 25 bp, Artificial
  probe
  misc_feature (1)..(25): SEQ ID NO: 3331; WAN024FDN; Start 206; Stop 230
tagatgaagactgtctgctttggag

SEQ ID NO: 352448 - DNA, 25 bp, Artificial
  probe
  misc_feature (1)..(25): SEQ ID NO: 3331; WAN024FDN; Start 226; Stop 250
tggagcaagatttatcctagcgtaa

SEQ ID NO: 352449 - DNA, 25 bp, Artificial
  probe
  misc_feature (1)..(25): SEQ ID NO: 3331; WAN024FDN; Start 225; Stop 249
ttggagcaagatttatcctagcgta

SEQ ID NO: 352450 - DNA, 25 bp, Artificial
  probe
  misc_feature (1)..(25): SEQ ID NO: 3331; WAN024FDN; Start 284; Stop 308
gtcagctaagacaagaacaatttga

SEQ ID NO: 352451 - DNA, 25 bp, Artificial
  probe
  misc_feature (1)..(25): SEQ ID NO: 3331; WAN024FDN; Start 223; Stop 247
ctttggagcaagatttatcctagcg

SEQ ID NO: 352452 - DNA, 25 bp, Artificial
  probe
  misc_feature (1)..(25): SEQ ID NO: 3331; WAN024FDN; Start 283; Stop 307
ggtcagctaagacaagaacaatttg

SEQ ID NO: 352453 - DNA, 25 bp, Artificial
  probe
  misc_feature (1)..(25): SEQ ID NO: 3331; WAN024FDN; Start 282; Stop 306
tggtcagctaagacaagaacaattt

SEQ ID NO: 352454 - DNA, 25 bp, Artificial
  probe
  misc_feature (1)..(25): SEQ ID NO: 3331; WAN024FDN; Start 277; Stop 301
atggttggtcagctaagacaagaac

SEQ ID NO: 352455 - DNA, 25 bp, Artificial
  probe
  misc_feature (1)..(25): SEQ ID NO: 3331; WAN024FDN; Start 274; Stop 298
tttatggttggtcagctaagacaag

SEQ ID NO: 352456 - DNA, 25 bp, Artificial
  probe
  misc_feature (1)..(25): SEQ ID NO: 3331; WAN024FDN; Start 273; Stop 297
ctttatggttggtcagctaagacaa

SEQ ID NO: 352457 - DNA, 25 bp, Artificial
  probe
  misc_feature (1)..(25): SEQ ID NO: 3331; WAN024FDN; Start 298; Stop 322
gaacaatttgacaatatcatcttcg

SEQ ID NO: 352458 - DNA, 25 bp, Artificial
  probe
  misc_feature (1)..(25): SEQ ID NO: 3331; WAN024FDN; Start 292; Stop 316
agacaagaacaatttgacaatatca

SEQ ID NO: 352459 - DNA, 25 bp, Artificial
  probe
  misc_feature (1)..(25): SEQ ID NO: 3332; WAN024FDO; Start 80; Stop 104
tacgtgatgataaggcaagtattcc

SEQ ID NO: 352460 - DNA, 25 bp, Artificial
  probe
  misc_feature (1)..(25): SEQ ID NO: 3332; WAN024FDO; Start 66; Stop 90
gctcttgactatcttacgtgatgat

SEQ ID NO: 352461 - DNA, 25 bp, Artificial
  probe
  misc_feature (1)..(25): SEQ ID NO: 3332; WAN024FDO; Start 64; Stop 88
aagctcttgactatcttacgtgatg

SEQ ID NO: 352462 - DNA, 25 bp, Artificial
  probe
  misc_feature (1)..(25): SEQ ID NO: 3332; WAN024FDO; Start 79; Stop 103
ttacgtgatgataaggcaagtattc

SEQ ID NO: 352463 - DNA, 25 bp, Artificial
  probe
  misc_feature (1)..(25): SEQ ID NO: 3332; WAN024FDO; Start 65; Stop 89
agctcttgactatcttacgtgatga

SEQ ID NO: 352464 - DNA, 25 bp, Artificial
  probe
  misc_feature (1)..(25): SEQ ID NO: 3332; WAN024FDO; Start 72; Stop 96
gactatcttacgtgatgataaggca

SEQ ID NO: 352465 - DNA, 25 bp, Artificial
  probe
  misc_feature (1)..(25): SEQ ID NO: 3332; WAN024FDO; Start 71; Stop 95
tgactatcttacgtgatgataaggc

SEQ ID NO: 352466 - DNA, 25 bp, Artificial
  probe
  misc_feature (1)..(25): SEQ ID NO: 3332; WAN024FDO; Start 60; Stop 84
ggataagctcttgactatcttacgt

SEQ ID NO: 352467 - DNA, 25 bp, Artificial
  probe
  misc_feature (1)..(25): SEQ ID NO: 3332; WAN024FDO; Start 77; Stop 101
tcttacgtgatgataaggcaagtat

SEQ ID NO: 352468 - DNA, 25 bp, Artificial
  probe
  misc_feature (1)..(25): SEQ ID NO: 3332; WAN024FDO; Start 76; Stop 100
atcttacgtgatgataaggcaagta

SEQ ID NO: 352469 - DNA, 25 bp, Artificial
  probe
  misc_feature (1)..(25): SEQ ID NO: 3332; WAN024FDO; Start 75; Stop 99
tatcttacgtgatgataaggcaagt

SEQ ID NO: 352470 - DNA, 25 bp, Artificial
  probe
  misc_feature (1)..(25): SEQ ID NO: 3332; WAN024FDO; Start 73; Stop 97
actatcttacgtgatgataaggcaa

SEQ ID NO: 352471 - DNA, 25 bp, Artificial
  probe
  misc_feature (1)..(25): SEQ ID NO: 3332; WAN024FDO; Start 74; Stop 98
ctatcttacgtgatgataaggcaag

SEQ ID NO: 352472 - DNA, 25 bp, Artificial
  probe
  misc_feature (1)..(25): SEQ ID NO: 3332; WAN024FDO; Start 63; Stop 87
taagctcttgactatcttacgtgat

SEQ ID NO: 352473 - DNA, 25 bp, Artificial
  probe
  misc_feature (1)..(25): SEQ ID NO: 3332; WAN024FDO; Start 62; Stop 86
ataagctcttgactatcttacgtga

SEQ ID NO: 352474 - DNA, 25 bp, Artificial
  probe
  misc_feature (1)..(25): SEQ ID NO: 3332; WAN024FDO; Start 78; Stop 102
cttacgtgatgataaggcaagtatt

SEQ ID NO: 352475 - DNA, 25 bp, Artificial
  probe
  misc_feature (1)..(25): SEQ ID NO: 3332; WAN024FDO; Start 61; Stop 85
gataagctcttgactatcttacgtg

SEQ ID NO: 352476 - DNA, 25 bp, Artificial
  probe
  misc_feature (1)..(25): SEQ ID NO: 3332; WAN024FDO; Start 290; Stop 314
tgacacagaaccagtttgacagtat

SEQ ID NO: 352477 - DNA, 25 bp, Artificial
  probe
  misc_feature (1)..(25): SEQ ID NO: 3332; WAN024FDO; Start 289; Stop 313
ttgacacagaaccagtttgacagta

SEQ ID NO: 352478 - DNA, 25 bp, Artificial
  probe
  misc_feature (1)..(25): SEQ ID NO: 3332; WAN024FDO; Start 276; Stop 300
tctagttggtcagttgacacagaac

SEQ ID NO: 352479 - DNA, 25 bp, Artificial
  probe
  misc_feature (1)..(25): SEQ ID NO: 3332; WAN024FDO; Start 229; Stop 253
agtaaggtttacccaagtatgcttt

SEQ ID NO: 352480 - DNA, 25 bp, Artificial
  probe
  misc_feature (1)..(25): SEQ ID NO: 3332; WAN024FDO; Start 228; Stop 252
gagtaaggtttacccaagtatgctt

SEQ ID NO: 352481 - DNA, 25 bp, Artificial
  probe
  misc_feature (1)..(25): SEQ ID NO: 3332; WAN024FDO; Start 83; Stop 107
gtgatgataaggcaagtattccctg

SEQ ID NO: 352482 - DNA, 25 bp, Artificial
  probe
  misc_feature (1)..(25): SEQ ID NO: 3332; WAN024FDO; Start 70; Stop 94
ttgactatcttacgtgatgataagg

SEQ ID NO: 352483 - DNA, 25 bp, Artificial
  probe
  misc_feature (1)..(25): SEQ ID NO: 3332; WAN024FDO; Start 317; Stop 341
tatttggagatgaaggacagggcta

SEQ ID NO: 352484 - DNA, 25 bp, Artificial
  probe
  misc_feature (1)..(25): SEQ ID NO: 3332; WAN024FDO; Start 275; Stop 299
ttctagttggtcagttgacacagaa

SEQ ID NO: 352485 - DNA, 25 bp, Artificial
  probe
  misc_feature (1)..(25): SEQ ID NO: 3332; WAN024FDO; Start 67; Stop 91
ctcttgactatcttacgtgatgata

SEQ ID NO: 352486 - DNA, 25 bp, Artificial
  probe
  misc_feature (1)..(25): SEQ ID NO: 3332; WAN024FDO; Start 59; Stop 83
gggataagctcttgactatcttacg

SEQ ID NO: 352487 - DNA, 25 bp, Artificial
  probe
  misc_feature (1)..(25): SEQ ID NO: 3332; WAN024FDO; Start 84; Stop 108
tgatgataaggcaagtattccctgg

SEQ ID NO: 352488 - DNA, 25 bp, Artificial
  probe
  misc_feature (1)..(25): SEQ ID NO: 3332; WAN024FDO; Start 227; Stop 251
ggagtaaggtttacccaagtatgct

SEQ ID NO: 352489 - DNA, 25 bp, Artificial
  probe
  misc_feature (1)..(25): SEQ ID NO: 3332; WAN024FDO; Start 318; Stop 342
atttggagatgaaggacagggctat

SEQ ID NO: 352490 - DNA, 25 bp, Artificial
  probe
  misc_feature (1)..(25): SEQ ID NO: 3332; WAN024FDO; Start 82; Stop 106
cgtgatgataaggcaagtattccct

SEQ ID NO: 352491 - DNA, 25 bp, Artificial
  probe
  misc_feature (1)..(25): SEQ ID NO: 3332; WAN024FDO; Start 274; Stop 298
tttctagttggtcagttgacacaga

SEQ ID NO: 352492 - DNA, 25 bp, Artificial
  probe
  misc_feature (1)..(25): SEQ ID NO: 3333; WAN024F2U; Start 1722; Stop 1746
tgataaggaacagaagagaggctat

SEQ ID NO: 352493 - DNA, 25 bp, Artificial
  probe
  misc_feature (1)..(25): SEQ ID NO: 3333; WAN024F2U; Start 1924; Stop 1948
ggactgtatatgaacgaaggctatc

SEQ ID NO: 352494 - DNA, 25 bp, Artificial
  probe
  misc_feature (1)..(25): SEQ ID NO: 3333; WAN024F2U; Start 1721; Stop 1745
ttgataaggaacagaagagaggcta

SEQ ID NO: 352495 - DNA, 25 bp, Artificial
  probe
  misc_feature (1)..(25): SEQ ID NO: 3333; WAN024F2U; Start 1723; Stop 1747
gataaggaacagaagagaggctata

SEQ ID NO: 352496 - DNA, 25 bp, Artificial
  probe
  misc_feature (1)..(25): SEQ ID NO: 3333; WAN024F2U; Start 1925; Stop 1949
gactgtatatgaacgaaggctatca

SEQ ID NO: 352497 - DNA, 25 bp, Artificial
  probe
  misc_feature (1)..(25): SEQ ID NO: 3333; WAN024F2U; Start 1724; Stop 1748
ataaggaacagaagagaggctataa

SEQ ID NO: 352498 - DNA, 25 bp, Artificial
  probe
  misc_feature (1)..(25): SEQ ID NO: 3333; WAN024F2U; Start 1646; Stop 1670
ctggatatggaagtgaagagaacct

SEQ ID NO: 352499 - DNA, 25 bp, Artificial
  probe
  misc_feature (1)..(25): SEQ ID NO: 3333; WAN024F2U; Start 1643; Stop 1667
atgctggatatggaagtgaagagaa

SEQ ID NO: 352500 - DNA, 25 bp, Artificial
  probe
  misc_feature (1)..(25): SEQ ID NO: 3333; WAN024F2U; Start 1926; Stop 1950
actgtatatgaacgaaggctatcaa

SEQ ID NO: 352501 - DNA, 25 bp, Artificial
  probe
  misc_feature (1)..(25): SEQ ID NO: 3333; WAN024F2U; Start 1642; Stop 1666
gatgctggatatggaagtgaagaga

SEQ ID NO: 352502 - DNA, 25 bp, Artificial
  probe
  misc_feature (1)..(25): SEQ ID NO: 3333; WAN024F2U; Start 1641; Stop 1665
agatgctggatatggaagtgaagag

SEQ ID NO: 352503 - DNA, 25 bp, Artificial
  probe
  misc_feature (1)..(25): SEQ ID NO: 3333; WAN024F2U; Start 1084; Stop 1108
cgttgctatattcctaccgaacaag

SEQ ID NO: 352504 - DNA, 25 bp, Artificial
  probe
  misc_feature (1)..(25): SEQ ID NO: 3333; WAN024F2U; Start 1647; Stop 1671
tggatatggaagtgaagagaacctc

SEQ ID NO: 352505 - DNA, 25 bp, Artificial
  probe
  misc_feature (1)..(25): SEQ ID NO: 3333; WAN024F2U; Start 1644; Stop 1668
tgctggatatggaagtgaagagaac

SEQ ID NO: 352506 - DNA, 25 bp, Artificial
  probe
  misc_feature (1)..(25): SEQ ID NO: 3333; WAN024F2U; Start 1570; Stop 1594
aatccgacagataccaagactcttc

SEQ ID NO: 352507 - DNA, 25 bp, Artificial
  probe
  misc_feature (1)..(25): SEQ ID NO: 3333; WAN024F2U; Start 1167; Stop 1191
tgacatctacctcaatatcgctgac

SEQ ID NO: 352508 - DNA, 25 bp, Artificial
  probe
  misc_feature (1)..(25): SEQ ID NO: 3333; WAN024F2U; Start 1166; Stop 1190
gtgacatctacctcaatatcgctga

SEQ ID NO: 352509 - DNA, 25 bp, Artificial
  probe
  misc_feature (1)..(25): SEQ ID NO: 3333; WAN024F2U; Start 417; Stop 441
cctagacaatctaatcttaccgacg

SEQ ID NO: 352510 - DNA, 25 bp, Artificial
  probe
  misc_feature (1)..(25): SEQ ID NO: 3333; WAN024F2U; Start 1650; Stop 1674
atatggaagtgaagagaacctcctt

SEQ ID NO: 352511 - DNA, 25 bp, Artificial
  probe
  misc_feature (1)..(25): SEQ ID NO: 3333; WAN024F2U; Start 1085; Stop 1109
gttgctatattcctaccgaacaagg

SEQ ID NO: 352512 - DNA, 25 bp, Artificial
  probe
  misc_feature (1)..(25): SEQ ID NO: 3333; WAN024F2U; Start 1578; Stop 1602
agataccaagactcttctgccattc

SEQ ID NO: 352513 - DNA, 25 bp, Artificial
  probe
  misc_feature (1)..(25): SEQ ID NO: 3333; WAN024F2U; Start 1649; Stop 1673
gatatggaagtgaagagaacctcct

SEQ ID NO: 352514 - DNA, 25 bp, Artificial
  probe
  misc_feature (1)..(25): SEQ ID NO: 3333; WAN024F2U; Start 1730; Stop 1754
aacagaagagaggctataaacagtc

SEQ ID NO: 352515 - DNA, 25 bp, Artificial
  probe
  misc_feature (1)..(25): SEQ ID NO: 3333; WAN024F2U; Start 1729; Stop 1753
gaacagaagagaggctataaacagt

SEQ ID NO: 352516 - DNA, 25 bp, Artificial
  probe
  misc_feature (1)..(25): SEQ ID NO: 3333; WAN024F2U; Start 1726; Stop 1750
aaggaacagaagagaggctataaac

SEQ ID NO: 352517 - DNA, 25 bp, Artificial
  probe
  misc_feature (1)..(25): SEQ ID NO: 3333; WAN024F2U; Start 359; Stop 383
cccatagaaagacaaagaagagagt

SEQ ID NO: 352518 - DNA, 25 bp, Artificial
  probe
  misc_feature (1)..(25): SEQ ID NO: 3333; WAN024F2U; Start 358; Stop 382
tcccatagaaagacaaagaagagag

SEQ ID NO: 352519 - DNA, 25 bp, Artificial
  probe
  misc_feature (1)..(25): SEQ ID NO: 3333; WAN024F2U; Start 1732; Stop 1756
cagaagagaggctataaacagtcag

SEQ ID NO: 352520 - DNA, 25 bp, Artificial
  probe
  misc_feature (1)..(25): SEQ ID NO: 3333; WAN024F2U; Start 1728; Stop 1752
ggaacagaagagaggctataaacag

SEQ ID NO: 352521 - DNA, 25 bp, Artificial
  probe
  misc_feature (1)..(25): SEQ ID NO: 3333; WAN024F2U; Start 1645; Stop 1669
gctggatatggaagtgaagagaacc

SEQ ID NO: 352522 - DNA, 25 bp, Artificial
  probe
  misc_feature (1)..(25): SEQ ID NO: 3333; WAN024F2U; Start 418; Stop 442
ctagacaatctaatcttaccgacgg

SEQ ID NO: 352523 - DNA, 25 bp, Artificial
  probe
  misc_feature (1)..(25): SEQ ID NO: 3333; WAN024F2U; Start 1731; Stop 1755
acagaagagaggctataaacagtca

SEQ ID NO: 352524 - DNA, 25 bp, Artificial
  probe
  misc_feature (1)..(25): SEQ ID NO: 3333; WAN024F2U; Start 1727; Stop 1751
aggaacagaagagaggctataaaca

SEQ ID NO: 352525 - DNA, 25 bp, Artificial
  probe
  misc_feature (1)..(25): SEQ ID NO: 3334; WAN024FCN; Start 714; Stop 738
aatcaacaatacaggctggagaatc

SEQ ID NO: 352526 - DNA, 25 bp, Artificial
  probe
  misc_feature (1)..(25): SEQ ID NO: 3334; WAN024FCN; Start 713; Stop 737
aaatcaacaatacaggctggagaat

SEQ ID NO: 352527 - DNA, 25 bp, Artificial
  probe
  misc_feature (1)..(25): SEQ ID NO: 3334; WAN024FCN; Start 715; Stop 739
atcaacaatacaggctggagaatcg

SEQ ID NO: 352528 - DNA, 25 bp, Artificial
  probe
  misc_feature (1)..(25): SEQ ID NO: 3334; WAN024FCN; Start 465; Stop 489
atatgctgagtatttggctgaacta

SEQ ID NO: 352529 - DNA, 25 bp, Artificial
  probe
  misc_feature (1)..(25): SEQ ID NO: 3334; WAN024FCN; Start 464; Stop 488
aatatgctgagtatttggctgaact

SEQ ID NO: 352530 - DNA, 25 bp, Artificial
  probe
  misc_feature (1)..(25): SEQ ID NO: 3334; WAN024FCN; Start 466; Stop 490
tatgctgagtatttggctgaactag

SEQ ID NO: 352531 - DNA, 25 bp, Artificial
  probe
  misc_feature (1)..(25): SEQ ID NO: 3334; WAN024FCN; Start 470; Stop 494
ctgagtatttggctgaactagacaa

SEQ ID NO: 352532 - DNA, 25 bp, Artificial
  probe
  misc_feature (1)..(25): SEQ ID NO: 3334; WAN024FCN; Start 818; Stop 842
atacaccgattgtcttggaaattga

SEQ ID NO: 352533 - DNA, 25 bp, Artificial
  probe
  misc_feature (1)..(25): SEQ ID NO: 3334; WAN024FCN; Start 817; Stop 841
catacaccgattgtcttggaaattg

SEQ ID NO: 352534 - DNA, 25 bp, Artificial
  probe
  misc_feature (1)..(25): SEQ ID NO: 3334; WAN024FCN; Start 720; Stop 744
caatacaggctggagaatcgactac

SEQ ID NO: 352535 - DNA, 25 bp, Artificial
  probe
  misc_feature (1)..(25): SEQ ID NO: 3334; WAN024FCN; Start 467; Stop 491
atgctgagtatttggctgaactaga

SEQ ID NO: 352536 - DNA, 25 bp, Artificial
  probe
  misc_feature (1)..(25): SEQ ID NO: 3334; WAN024FCN; Start 741; Stop 765
ctactggctcacaagtaaccgtatc

SEQ ID NO: 352537 - DNA, 25 bp, Artificial
  probe
  misc_feature (1)..(25): SEQ ID NO: 3334; WAN024FCN; Start 721; Stop 745
aatacaggctggagaatcgactact

SEQ ID NO: 352538 - DNA, 25 bp, Artificial
  probe
  misc_feature (1)..(25): SEQ ID NO: 3334; WAN024FCN; Start 750; Stop 774
cacaagtaaccgtatcgctgacaag

SEQ ID NO: 352539 - DNA, 25 bp, Artificial
  probe
  misc_feature (1)..(25): SEQ ID NO: 3334; WAN024FCN; Start 719; Stop 743
acaatacaggctggagaatcgacta

SEQ ID NO: 352540 - DNA, 25 bp, Artificial
  probe
  misc_feature (1)..(25): SEQ ID NO: 3334; WAN024FCN; Start 769; Stop 793
gacaaggtcactaaatctgatatga

SEQ ID NO: 352541 - DNA, 25 bp, Artificial
  probe
  misc_feature (1)..(25): SEQ ID NO: 3334; WAN024FCN; Start 770; Stop 794
acaaggtcactaaatctgatatgat

SEQ ID NO: 352542 - DNA, 25 bp, Artificial
  probe
  misc_feature (1)..(25): SEQ ID NO: 3334; WAN024FCN; Start 740; Stop 764
actactggctcacaagtaaccgtat

SEQ ID NO: 352543 - DNA, 25 bp, Artificial
  probe
  misc_feature (1)..(25): SEQ ID NO: 3334; WAN024FCN; Start 734; Stop 758
gaatcgactactggctcacaagtaa

SEQ ID NO: 352544 - DNA, 25 bp, Artificial
  probe
  misc_feature (1)..(25): SEQ ID NO: 3334; WAN024FCN; Start 816; Stop 840
ccatacaccgattgtcttggaaatt

SEQ ID NO: 352545 - DNA, 25 bp, Artificial
  probe
  misc_feature (1)..(25): SEQ ID NO: 3334; WAN024FCN; Start 469; Stop 493
gctgagtatttggctgaactagaca

SEQ ID NO: 352546 - DNA, 25 bp, Artificial
  probe
  misc_feature (1)..(25): SEQ ID NO: 3334; WAN024FCN; Start 468; Stop 492
tgctgagtatttggctgaactagac

SEQ ID NO: 352547 - DNA, 25 bp, Artificial
  probe
  misc_feature (1)..(25): SEQ ID NO: 3334; WAN024FCN; Start 463; Stop 487
aaatatgctgagtatttggctgaac

SEQ ID NO: 352548 - DNA, 25 bp, Artificial
  probe
  misc_feature (1)..(25): SEQ ID NO: 3334; WAN024FCN; Start 86; Stop 110
ccaaattgtcccaagaagtcctaca

SEQ ID NO: 352549 - DNA, 25 bp, Artificial
  probe
  misc_feature (1)..(25): SEQ ID NO: 3334; WAN024FCN; Start 735; Stop 759
aatcgactactggctcacaagtaac

SEQ ID NO: 352550 - DNA, 25 bp, Artificial
  probe
  misc_feature (1)..(25): SEQ ID NO: 3334; WAN024FCN; Start 782; Stop 806
aatctgatatgattgactcaggtgc

SEQ ID NO: 352551 - DNA, 25 bp, Artificial
  probe
  misc_feature (1)..(25): SEQ ID NO: 3334; WAN024FCN; Start 698; Stop 722
gcagcaaaacttctaaaatcaacaa

SEQ ID NO: 352552 - DNA, 25 bp, Artificial
  probe
  misc_feature (1)..(25): SEQ ID NO: 3334; WAN024FCN; Start 389; Stop 413
tcgtaacccaagtttacactccaaa

SEQ ID NO: 352553 - DNA, 25 bp, Artificial
  probe
  misc_feature (1)..(25): SEQ ID NO: 3334; WAN024FCN; Start 388; Stop 412
ttcgtaacccaagtttacactccaa

SEQ ID NO: 352554 - DNA, 25 bp, Artificial
  probe
  misc_feature (1)..(25): SEQ ID NO: 3334; WAN024FCN; Start 387; Stop 411
tttcgtaacccaagtttacactcca

SEQ ID NO: 352555 - DNA, 25 bp, Artificial
  probe
  misc_feature (1)..(25): SEQ ID NO: 3334; WAN024FCN; Start 473; Stop 497
agtatttggctgaactagacaaaga

SEQ ID NO: 352556 - DNA, 25 bp, Artificial
  probe
  misc_feature (1)..(25): SEQ ID NO: 3334; WAN024FCN; Start 471; Stop 495
tgagtatttggctgaactagacaaa

SEQ ID NO: 352557 - DNA, 25 bp, Artificial
  probe
  misc_feature (1)..(25): SEQ ID NO: 3334; WAN024FCN; Start 717; Stop 741
caacaatacaggctggagaatcgac

SEQ ID NO: 352558 - DNA, 25 bp, Artificial
  probe
  misc_feature (1)..(25): SEQ ID NO: 3335; WAN024DPI; Start 573; Stop 597
tgtagagattgaagatgtagaagga

SEQ ID NO: 352559 - DNA, 25 bp, Artificial
  probe
  misc_feature (1)..(25): SEQ ID NO: 3335; WAN024DPI; Start 572; Stop 596
ttgtagagattgaagatgtagaagg

SEQ ID NO: 352560 - DNA, 25 bp, Artificial
  probe
  misc_feature (1)..(25): SEQ ID NO: 3335; WAN024DPI; Start 574; Stop 598
gtagagattgaagatgtagaaggat

SEQ ID NO: 352561 - DNA, 25 bp, Artificial
  probe
  misc_feature (1)..(25): SEQ ID NO: 3335; WAN024DPI; Start 605; Stop 629
aagaagaagttggagagattcaata

SEQ ID NO: 352562 - DNA, 25 bp, Artificial
  probe
  misc_feature (1)..(25): SEQ ID NO: 3335; WAN024DPI; Start 578; Stop 602
agattgaagatgtagaaggatatgt

SEQ ID NO: 352563 - DNA, 25 bp, Artificial
  probe
  misc_feature (1)..(25): SEQ ID NO: 3335; WAN024DPI; Start 556; Stop 580
cacttagacccaatgtttgtagaga

SEQ ID NO: 352564 - DNA, 25 bp, Artificial
  probe
  misc_feature (1)..(25): SEQ ID NO: 3335; WAN024DPI; Start 555; Stop 579
tcacttagacccaatgtttgtagag

SEQ ID NO: 352565 - DNA, 25 bp, Artificial
  probe
  misc_feature (1)..(25): SEQ ID NO: 3335; WAN024DPI; Start 339; Stop 363
tgatagagtgatcgaaggatattca

SEQ ID NO: 352566 - DNA, 25 bp, Artificial
  probe
  misc_feature (1)..(25): SEQ ID NO: 3335; WAN024DPI; Start 557; Stop 581
acttagacccaatgtttgtagagat

SEQ ID NO: 352567 - DNA, 25 bp, Artificial
  probe
  misc_feature (1)..(25): SEQ ID NO: 3335; WAN024DPI; Start 538; Stop 562
gtttggcatttcttgtgtcacttag

SEQ ID NO: 352568 - DNA, 25 bp, Artificial
  probe
  misc_feature (1)..(25): SEQ ID NO: 3335; WAN024DPI; Start 124; Stop 148
atagaagatgggaaagcctttgtag

SEQ ID NO: 352569 - DNA, 25 bp, Artificial
  probe
  misc_feature (1)..(25): SEQ ID NO: 3335; WAN024DPI; Start 123; Stop 147
catagaagatgggaaagcctttgta

SEQ ID NO: 352570 - DNA, 25 bp, Artificial
  probe
  misc_feature (1)..(25): SEQ ID NO: 3335; WAN024DPI; Start 539; Stop 563
tttggcatttcttgtgtcacttaga

SEQ ID NO: 352571 - DNA, 25 bp, Artificial
  probe
  misc_feature (1)..(25): SEQ ID NO: 3335; WAN024DPI; Start 577; Stop 601
gagattgaagatgtagaaggatatg

SEQ ID NO: 352572 - DNA, 25 bp, Artificial
  probe
  misc_feature (1)..(25): SEQ ID NO: 3335; WAN024DPI; Start 600; Stop 624
tgttaaagaagaagttggagagatt

SEQ ID NO: 352573 - DNA, 25 bp, Artificial
  probe
  misc_feature (1)..(25): SEQ ID NO: 3335; WAN024DPI; Start 558; Stop 582
cttagacccaatgtttgtagagatt

SEQ ID NO: 352574 - DNA, 25 bp, Artificial
  probe
  misc_feature (1)..(25): SEQ ID NO: 3335; WAN024DPI; Start 387; Stop 411
caaccatgaagttaaagcctatgtc

SEQ ID NO: 352575 - DNA, 25 bp, Artificial
  probe
  misc_feature (1)..(25): SEQ ID NO: 3335; WAN024DPI; Start 385; Stop 409
aacaaccatgaagttaaagcctatg

SEQ ID NO: 352576 - DNA, 25 bp, Artificial
  probe
  misc_feature (1)..(25): SEQ ID NO: 3335; WAN024DPI; Start 554; Stop 578
gtcacttagacccaatgtttgtaga

SEQ ID NO: 352577 - DNA, 25 bp, Artificial
  probe
  misc_feature (1)..(25): SEQ ID NO: 3335; WAN024DPI; Start 545; Stop 569
atttcttgtgtcacttagacccaat

SEQ ID NO: 352578 - DNA, 25 bp, Artificial
  probe
  misc_feature (1)..(25): SEQ ID NO: 3335; WAN024DPI; Start 537; Stop 561
agtttggcatttcttgtgtcactta

SEQ ID NO: 352579 - DNA, 25 bp, Artificial
  probe
  misc_feature (1)..(25): SEQ ID NO: 3335; WAN024DPI; Start 604; Stop 628
aaagaagaagttggagagattcaat

SEQ ID NO: 352580 - DNA, 25 bp, Artificial
  probe
  misc_feature (1)..(25): SEQ ID NO: 3335; WAN024DPI; Start 576; Stop 600
agagattgaagatgtagaaggatat

SEQ ID NO: 352581 - DNA, 25 bp, Artificial
  probe
  misc_feature (1)..(25): SEQ ID NO: 3335; WAN024DPI; Start 599; Stop 623
atgttaaagaagaagttggagagat

SEQ ID NO: 352582 - DNA, 25 bp, Artificial
  probe
  misc_feature (1)..(25): SEQ ID NO: 3335; WAN024DPI; Start 553; Stop 577
tgtcacttagacccaatgtttgtag

SEQ ID NO: 352583 - DNA, 25 bp, Artificial
  probe
  misc_feature (1)..(25): SEQ ID NO: 3335; WAN024DPI; Start 338; Stop 362
atgatagagtgatcgaaggatattc

SEQ ID NO: 352584 - DNA, 25 bp, Artificial
  probe
  misc_feature (1)..(25): SEQ ID NO: 3335; WAN024DPI; Start 340; Stop 364
gatagagtgatcgaaggatattcaa

SEQ ID NO: 352585 - DNA, 25 bp, Artificial
  probe
  misc_feature (1)..(25): SEQ ID NO: 3335; WAN024DPI; Start 552; Stop 576
gtgtcacttagacccaatgtttgta

SEQ ID NO: 352586 - DNA, 25 bp, Artificial
  probe
  misc_feature (1)..(25): SEQ ID NO: 3335; WAN024DPI; Start 579; Stop 603
gattgaagatgtagaaggatatgtt

SEQ ID NO: 352587 - DNA, 25 bp, Artificial
  probe
  misc_feature (1)..(25): SEQ ID NO: 3335; WAN024DPI; Start 109; Stop 133
gtagcatttgattccatagaagatg

SEQ ID NO: 352588 - DNA, 25 bp, Artificial
  probe
  misc_feature (1)..(25): SEQ ID NO: 3335; WAN024DPI; Start 61; Stop 85
tcgatggttatattggaattgtacc

SEQ ID NO: 352589 - DNA, 25 bp, Artificial
  probe
  misc_feature (1)..(25): SEQ ID NO: 3335; WAN024DPI; Start 108; Stop 132
agtagcatttgattccatagaagat

SEQ ID NO: 352590 - DNA, 25 bp, Artificial
  probe
  misc_feature (1)..(25): SEQ ID NO: 3335; WAN024DPI; Start 546; Stop 570
tttcttgtgtcacttagacccaatg

SEQ ID NO: 352591 - DNA, 25 bp, Artificial
  probe
  misc_feature (1)..(25): SEQ ID NO: 3336; WAN024D2J; Start 377; Stop 401
tacatggttcagattcagaagagtc

SEQ ID NO: 352592 - DNA, 25 bp, Artificial
  probe
  misc_feature (1)..(25): SEQ ID NO: 3336; WAN024D2J; Start 376; Stop 400
gtacatggttcagattcagaagagt

SEQ ID NO: 352593 - DNA, 25 bp, Artificial
  probe
  misc_feature (1)..(25): SEQ ID NO: 3336; WAN024D2J; Start 145; Stop 169
gaagagttgattgaccagcactatc

SEQ ID NO: 352594 - DNA, 25 bp, Artificial
  probe
  misc_feature (1)..(25): SEQ ID NO: 3336; WAN024D2J; Start 144; Stop 168
agaagagttgattgaccagcactat

SEQ ID NO: 352595 - DNA, 25 bp, Artificial
  probe
  misc_feature (1)..(25): SEQ ID NO: 3336; WAN024D2J; Start 379; Stop 403
catggttcagattcagaagagtcag

SEQ ID NO: 352596 - DNA, 25 bp, Artificial
  probe
  misc_feature (1)..(25): SEQ ID NO: 3336; WAN024D2J; Start 384; Stop 408
ttcagattcagaagagtcagctaag

SEQ ID NO: 352597 - DNA, 25 bp, Artificial
  probe
  misc_feature (1)..(25): SEQ ID NO: 3336; WAN024D2J; Start 383; Stop 407
gttcagattcagaagagtcagctaa

SEQ ID NO: 352598 - DNA, 25 bp, Artificial
  probe
  misc_feature (1)..(25): SEQ ID NO: 3336; WAN024D2J; Start 378; Stop 402
acatggttcagattcagaagagtca

SEQ ID NO: 352599 - DNA, 25 bp, Artificial
  probe
  misc_feature (1)..(25): SEQ ID NO: 3336; WAN024D2J; Start 380; Stop 404
atggttcagattcagaagagtcagc

SEQ ID NO: 352600 - DNA, 25 bp, Artificial
  probe
  misc_feature (1)..(25): SEQ ID NO: 3336; WAN024D2J; Start 143; Stop 167
cagaagagttgattgaccagcacta

SEQ ID NO: 352601 - DNA, 25 bp, Artificial
  probe
  misc_feature (1)..(25): SEQ ID NO: 3336; WAN024D2J; Start 14; Stop 38
cgggtatggaacaaacattctttat

SEQ ID NO: 352602 - DNA, 25 bp, Artificial
  probe
  misc_feature (1)..(25): SEQ ID NO: 3336; WAN024D2J; Start 13; Stop 37
acgggtatggaacaaacattcttta

SEQ ID NO: 352603 - DNA, 25 bp, Artificial
  probe
  misc_feature (1)..(25): SEQ ID NO: 3336; WAN024D2J; Start 382; Stop 406
ggttcagattcagaagagtcagcta

SEQ ID NO: 352604 - DNA, 25 bp, Artificial
  probe
  misc_feature (1)..(25): SEQ ID NO: 3336; WAN024D2J; Start 240; Stop 264
tgtcatttctggtcccaaagtaatc

SEQ ID NO: 352605 - DNA, 25 bp, Artificial
  probe
  misc_feature (1)..(25): SEQ ID NO: 3336; WAN024D2J; Start 385; Stop 409
tcagattcagaagagtcagctaagc

SEQ ID NO: 352606 - DNA, 25 bp, Artificial
  probe
  misc_feature (1)..(25): SEQ ID NO: 3336; WAN024D2J; Start 132; Stop 156
ttcacaggtttcagaagagttgatt

SEQ ID NO: 352607 - DNA, 25 bp, Artificial
  probe
  misc_feature (1)..(25): SEQ ID NO: 3336; WAN024D2J; Start 239; Stop 263
gtgtcatttctggtcccaaagtaat

SEQ ID NO: 352608 - DNA, 25 bp, Artificial
  probe
  misc_feature (1)..(25): SEQ ID NO: 3336; WAN024D2J; Start 135; Stop 159
acaggtttcagaagagttgattgac

SEQ ID NO: 352609 - DNA, 25 bp, Artificial
  probe
  misc_feature (1)..(25): SEQ ID NO: 3336; WAN024D2J; Start 134; Stop 158
cacaggtttcagaagagttgattga

SEQ ID NO: 352610 - DNA, 25 bp, Artificial
  probe
  misc_feature (1)..(25): SEQ ID NO: 3336; WAN024D2J; Start 133; Stop 157
tcacaggtttcagaagagttgattg

SEQ ID NO: 352611 - DNA, 25 bp, Artificial
  probe
  misc_feature (1)..(25): SEQ ID NO: 3336; WAN024D2J; Start 131; Stop 155
gttcacaggtttcagaagagttgat

SEQ ID NO: 352612 - DNA, 25 bp, Artificial
  probe
  misc_feature (1)..(25): SEQ ID NO: 3336; WAN024D2J; Start 12; Stop 36
gacgggtatggaacaaacattcttt

SEQ ID NO: 352613 - DNA, 25 bp, Artificial
  probe
  misc_feature (1)..(25): SEQ ID NO: 3336; WAN024D2J; Start 118; Stop 142
aaattggagtttcgttcacaggttt

SEQ ID NO: 352614 - DNA, 25 bp, Artificial
  probe
  misc_feature (1)..(25): SEQ ID NO: 3336; WAN024D2J; Start 153; Stop 177
gattgaccagcactatcaggacttg

SEQ ID NO: 352615 - DNA, 25 bp, Artificial
  probe
  misc_feature (1)..(25): SEQ ID NO: 3336; WAN024D2J; Start 15; Stop 39
gggtatggaacaaacattctttatc

SEQ ID NO: 352616 - DNA, 25 bp, Artificial
  probe
  misc_feature (1)..(25): SEQ ID NO: 3336; WAN024D2J; Start 141; Stop 165
ttcagaagagttgattgaccagcac

SEQ ID NO: 352617 - DNA, 25 bp, Artificial
  probe
  misc_feature (1)..(25): SEQ ID NO: 3336; WAN024D2J; Start 241; Stop 265
gtcatttctggtcccaaagtaatcg

SEQ ID NO: 352618 - DNA, 25 bp, Artificial
  probe
  misc_feature (1)..(25): SEQ ID NO: 3336; WAN024D2J; Start 119; Stop 143
aattggagtttcgttcacaggtttc

SEQ ID NO: 352619 - DNA, 25 bp, Artificial
  probe
  misc_feature (1)..(25): SEQ ID NO: 3336; WAN024D2J; Start 24; Stop 48
acaaacattctttatcatcaaacca

SEQ ID NO: 352620 - DNA, 25 bp, Artificial
  probe
  misc_feature (1)..(25): SEQ ID NO: 3336; WAN024D2J; Start 166; Stop 190
tatcaggacttggttggtcagagtt

SEQ ID NO: 352621 - DNA, 25 bp, Artificial
  probe
  misc_feature (1)..(25): SEQ ID NO: 3336; WAN024D2J; Start 126; Stop 150
gtttcgttcacaggtttcagaagag

SEQ ID NO: 352622 - DNA, 25 bp, Artificial
  probe
  misc_feature (1)..(25): SEQ ID NO: 3336; WAN024D2J; Start 124; Stop 148
gagtttcgttcacaggtttcagaag

SEQ ID NO: 352623 - DNA, 25 bp, Artificial
  probe
  misc_feature (1)..(25): SEQ ID NO: 3336; WAN024D2J; Start 16; Stop 40
ggtatggaacaaacattctttatca

SEQ ID NO: 352624 - DNA, 25 bp, Artificial
  probe
  misc_feature (1)..(25): SEQ ID NO: 3337; WAN024GN6; Start 1101; Stop 1125
ctataatcgcctacctgaagtcatt

SEQ ID NO: 352625 - DNA, 25 bp, Artificial
  probe
  misc_feature (1)..(25): SEQ ID NO: 3337; WAN024GN6; Start 1100; Stop 1124
tctataatcgcctacctgaagtcat

SEQ ID NO: 352626 - DNA, 25 bp, Artificial
  probe
  misc_feature (1)..(25): SEQ ID NO: 3337; WAN024GN6; Start 939; Stop 963
aatcacacttatccatcaagcctta

SEQ ID NO: 352627 - DNA, 25 bp, Artificial
  probe
  misc_feature (1)..(25): SEQ ID NO: 3337; WAN024GN6; Start 938; Stop 962
taatcacacttatccatcaagcctt

SEQ ID NO: 352628 - DNA, 25 bp, Artificial
  probe
  misc_feature (1)..(25): SEQ ID NO: 3337; WAN024GN6; Start 664; Stop 688
cactgttcttatatctacgacggaa

SEQ ID NO: 352629 - DNA, 25 bp, Artificial
  probe
  misc_feature (1)..(25): SEQ ID NO: 3337; WAN024GN6; Start 944; Stop 968
cacttatccatcaagccttactcta

SEQ ID NO: 352630 - DNA, 25 bp, Artificial
  probe
  misc_feature (1)..(25): SEQ ID NO: 3337; WAN024GN6; Start 940; Stop 964
atcacacttatccatcaagccttac

SEQ ID NO: 352631 - DNA, 25 bp, Artificial
  probe
  misc_feature (1)..(25): SEQ ID NO: 3337; WAN024GN6; Start 1105; Stop 1129
aatcgcctacctgaagtcattattg

SEQ ID NO: 352632 - DNA, 25 bp, Artificial
  probe
  misc_feature (1)..(25): SEQ ID NO: 3337; WAN024GN6; Start 937; Stop 961
ataatcacacttatccatcaagcct

SEQ ID NO: 352633 - DNA, 25 bp, Artificial
  probe
  misc_feature (1)..(25): SEQ ID NO: 3337; WAN024GN6; Start 1104; Stop 1128
taatcgcctacctgaagtcattatt

SEQ ID NO: 352634 - DNA, 25 bp, Artificial
  probe
  misc_feature (1)..(25): SEQ ID NO: 3337; WAN024GN6; Start 950; Stop 974
tccatcaagccttactctatcttag

SEQ ID NO: 352635 - DNA, 25 bp, Artificial
  probe
  misc_feature (1)..(25): SEQ ID NO: 3337; WAN024GN6; Start 1099; Stop 1123
ctctataatcgcctacctgaagtca

SEQ ID NO: 352636 - DNA, 25 bp, Artificial
  probe
  misc_feature (1)..(25): SEQ ID NO: 3337; WAN024GN6; Start 936; Stop 960
aataatcacacttatccatcaagcc

SEQ ID NO: 352637 - DNA, 25 bp, Artificial
  probe
  misc_feature (1)..(25): SEQ ID NO: 3337; WAN024GN6; Start 794; Stop 818
ttgctggagaatcttggttaatcaa

SEQ ID NO: 352638 - DNA, 25 bp, Artificial
  probe
  misc_feature (1)..(25): SEQ ID NO: 3337; WAN024GN6; Start 1110; Stop 1134
cctacctgaagtcattattgaacct

SEQ ID NO: 352639 - DNA, 25 bp, Artificial
  probe
  misc_feature (1)..(25): SEQ ID NO: 3337; WAN024GN6; Start 945; Stop 969
acttatccatcaagccttactctat

SEQ ID NO: 352640 - DNA, 25 bp, Artificial
  probe
  misc_feature (1)..(25): SEQ ID NO: 3337; WAN024GN6; Start 943; Stop 967
acacttatccatcaagccttactct

SEQ ID NO: 352641 - DNA, 25 bp, Artificial
  probe
  misc_feature (1)..(25): SEQ ID NO: 3337; WAN024GN6; Start 942; Stop 966
cacacttatccatcaagccttactc

SEQ ID NO: 352642 - DNA, 25 bp, Artificial
  probe
  misc_feature (1)..(25): SEQ ID NO: 3337; WAN024GN6; Start 947; Stop 971
ttatccatcaagccttactctatct

SEQ ID NO: 352643 - DNA, 25 bp, Artificial
  probe
  misc_feature (1)..(25): SEQ ID NO: 3337; WAN024GN6; Start 951; Stop 975
ccatcaagccttactctatcttagt

SEQ ID NO: 352644 - DNA, 25 bp, Artificial
  probe
  misc_feature (1)..(25): SEQ ID NO: 3337; WAN024GN6; Start 1102; Stop 1126
tataatcgcctacctgaagtcatta

SEQ ID NO: 352645 - DNA, 25 bp, Artificial
  probe
  misc_feature (1)..(25): SEQ ID NO: 3337; WAN024GN6; Start 941; Stop 965
tcacacttatccatcaagccttact

SEQ ID NO: 352646 - DNA, 25 bp, Artificial
  probe
  misc_feature (1)..(25): SEQ ID NO: 3337; WAN024GN6; Start 949; Stop 973
atccatcaagccttactctatctta

SEQ ID NO: 352647 - DNA, 25 bp, Artificial
  probe
  misc_feature (1)..(25): SEQ ID NO: 3337; WAN024GN6; Start 948; Stop 972
tatccatcaagccttactctatctt

SEQ ID NO: 352648 - DNA, 25 bp, Artificial
  probe
  misc_feature (1)..(25): SEQ ID NO: 3337; WAN024GN6; Start 913; Stop 937
gcttatcaattaggtgacactggaa

SEQ ID NO: 352649 - DNA, 25 bp, Artificial
  probe
  misc_feature (1)..(25): SEQ ID NO: 3337; WAN024GN6; Start 263; Stop 287
actacattggttgtgaactatctga

SEQ ID NO: 352650 - DNA, 25 bp, Artificial
  probe
  misc_feature (1)..(25): SEQ ID NO: 3337; WAN024GN6; Start 1114; Stop 1138
cctgaagtcattattgaaccttaca

SEQ ID NO: 352651 - DNA, 25 bp, Artificial
  probe
  misc_feature (1)..(25): SEQ ID NO: 3337; WAN024GN6; Start 1113; Stop 1137
acctgaagtcattattgaaccttac

SEQ ID NO: 352652 - DNA, 25 bp, Artificial
  probe
  misc_feature (1)..(25): SEQ ID NO: 3337; WAN024GN6; Start 946; Stop 970
cttatccatcaagccttactctatc

SEQ ID NO: 352653 - DNA, 25 bp, Artificial
  probe
  misc_feature (1)..(25): SEQ ID NO: 3337; WAN024GN6; Start 954; Stop 978
tcaagccttactctatcttagtcaa

SEQ ID NO: 352654 - DNA, 25 bp, Artificial
  probe
  misc_feature (1)..(25): SEQ ID NO: 3337; WAN024GN6; Start 663; Stop 687
gcactgttcttatatctacgacgga

SEQ ID NO: 352655 - DNA, 25 bp, Artificial
  probe
  misc_feature (1)..(25): SEQ ID NO: 3337; WAN024GN6; Start 1109; Stop 1133
gcctacctgaagtcattattgaacc

SEQ ID NO: 352656 - DNA, 25 bp, Artificial
  probe
  misc_feature (1)..(25): SEQ ID NO: 3337; WAN024GN6; Start 927; Stop 951
tgacactggaataatcacacttatc

SEQ ID NO: 352657 - DNA, 25 bp, Artificial
  probe
  misc_feature (1)..(25): SEQ ID NO: 3338; WAN024CMM; Start 98; Stop 122
atagcgataccgttacaactaagac

SEQ ID NO: 352658 - DNA, 25 bp, Artificial
  probe
  misc_feature (1)..(25): SEQ ID NO: 3338; WAN024CMM; Start 97; Stop 121
catagcgataccgttacaactaaga

SEQ ID NO: 352659 - DNA, 25 bp, Artificial
  probe
  misc_feature (1)..(25): SEQ ID NO: 3338; WAN024CMM; Start 96; Stop 120
tcatagcgataccgttacaactaag

SEQ ID NO: 352660 - DNA, 25 bp, Artificial
  probe
  misc_feature (1)..(25): SEQ ID NO: 3338; WAN024CMM; Start 95; Stop 119
ctcatagcgataccgttacaactaa

SEQ ID NO: 352661 - DNA, 25 bp, Artificial
  probe
  misc_feature (1)..(25): SEQ ID NO: 3338; WAN024CMM; Start 101; Stop 125
gcgataccgttacaactaagactta

SEQ ID NO: 352662 - DNA, 25 bp, Artificial
  probe
  misc_feature (1)..(25): SEQ ID NO: 3338; WAN024CMM; Start 99; Stop 123
tagcgataccgttacaactaagact

SEQ ID NO: 352663 - DNA, 25 bp, Artificial
  probe
  misc_feature (1)..(25): SEQ ID NO: 3338; WAN024CMM; Start 94; Stop 118
actcatagcgataccgttacaacta

SEQ ID NO: 352664 - DNA, 25 bp, Artificial
  probe
  misc_feature (1)..(25): SEQ ID NO: 3338; WAN024CMM; Start 83; Stop 107
ctgaagcattaactcatagcgatac

SEQ ID NO: 352665 - DNA, 25 bp, Artificial
  probe
  misc_feature (1)..(25): SEQ ID NO: 3338; WAN024CMM; Start 82; Stop 106
tctgaagcattaactcatagcgata

SEQ ID NO: 352666 - DNA, 25 bp, Artificial
  probe
  misc_feature (1)..(25): SEQ ID NO: 3338; WAN024CMM; Start 81; Stop 105
ttctgaagcattaactcatagcgat

SEQ ID NO: 352667 - DNA, 25 bp, Artificial
  probe
  misc_feature (1)..(25): SEQ ID NO: 3338; WAN024CMM; Start 84; Stop 108
tgaagcattaactcatagcgatacc

SEQ ID NO: 352668 - DNA, 25 bp, Artificial
  probe
  misc_feature (1)..(25): SEQ ID NO: 3338; WAN024CMM; Start 85; Stop 109
gaagcattaactcatagcgataccg

SEQ ID NO: 352669 - DNA, 25 bp, Artificial
  probe
  misc_feature (1)..(25): SEQ ID NO: 3338; WAN024CMM; Start 100; Stop 124
agcgataccgttacaactaagactt

SEQ ID NO: 352670 - DNA, 25 bp, Artificial
  probe
  misc_feature (1)..(25): SEQ ID NO: 3338; WAN024CMM; Start 102; Stop 126
cgataccgttacaactaagacttat

SEQ ID NO: 352671 - DNA, 25 bp, Artificial
  probe
  misc_feature (1)..(25): SEQ ID NO: 3338; WAN024CMM; Start 93; Stop 117
aactcatagcgataccgttacaact

SEQ ID NO: 352672 - DNA, 25 bp, Artificial
  probe
  misc_feature (1)..(25): SEQ ID NO: 3338; WAN024CMM; Start 86; Stop 110
aagcattaactcatagcgataccgt

SEQ ID NO: 352673 - DNA, 25 bp, Artificial
  probe
  misc_feature (1)..(25): SEQ ID NO: 3338; WAN024CMM; Start 91; Stop 115
ttaactcatagcgataccgttacaa

SEQ ID NO: 352674 - DNA, 25 bp, Artificial
  probe
  misc_feature (1)..(25): SEQ ID NO: 3338; WAN024CMM; Start 90; Stop 114
attaactcatagcgataccgttaca

SEQ ID NO: 352675 - DNA, 25 bp, Artificial
  probe
  misc_feature (1)..(25): SEQ ID NO: 3338; WAN024CMM; Start 92; Stop 116
taactcatagcgataccgttacaac

SEQ ID NO: 352676 - DNA, 25 bp, Artificial
  probe
  misc_feature (1)..(25): SEQ ID NO: 3338; WAN024CMM; Start 89; Stop 113
cattaactcatagcgataccgttac

SEQ ID NO: 352677 - DNA, 25 bp, Artificial
  probe
  misc_feature (1)..(25): SEQ ID NO: 3338; WAN024CMM; Start 87; Stop 111
agcattaactcatagcgataccgtt

SEQ ID NO: 352678 - DNA, 25 bp, Artificial
  probe
  misc_feature (1)..(25): SEQ ID NO: 3338; WAN024CMM; Start 88; Stop 112
gcattaactcatagcgataccgtta

SEQ ID NO: 352679 - DNA, 25 bp, Artificial
  probe
  misc_feature (1)..(25): SEQ ID NO: 3338; WAN024CMM; Start 150; Stop 174
attatctgctggacaagttgcctac

SEQ ID NO: 352680 - DNA, 25 bp, Artificial
  probe
  misc_feature (1)..(25): SEQ ID NO: 3338; WAN024CMM; Start 149; Stop 173
cattatctgctggacaagttgccta

SEQ ID NO: 352681 - DNA, 25 bp, Artificial
  probe
  misc_feature (1)..(25): SEQ ID NO: 3338; WAN024CMM; Start 11; Stop 35
ctacaccgcataaattacgacatac

SEQ ID NO: 352682 - DNA, 25 bp, Artificial
  probe
  misc_feature (1)..(25): SEQ ID NO: 3338; WAN024CMM; Start 12; Stop 36
tacaccgcataaattacgacataca

SEQ ID NO: 352683 - DNA, 25 bp, Artificial
  probe
  misc_feature (1)..(25): SEQ ID NO: 3338; WAN024CMM; Start 106; Stop 130
accgttacaactaagacttatgtta

SEQ ID NO: 352684 - DNA, 25 bp, Artificial
  probe
  misc_feature (1)..(25): SEQ ID NO: 3338; WAN024CMM; Start 105; Stop 129
taccgttacaactaagacttatgtt

SEQ ID NO: 352685 - DNA, 25 bp, Artificial
  probe
  misc_feature (1)..(25): SEQ ID NO: 3338; WAN024CMM; Start 20; Stop 44
ataaattacgacatacaggagcgac

SEQ ID NO: 352686 - DNA, 25 bp, Artificial
  probe
  misc_feature (1)..(25): SEQ ID NO: 3338; WAN024CMM; Start 19; Stop 43
cataaattacgacatacaggagcga

SEQ ID NO: 352687 - DNA, 25 bp, Artificial
  probe
  misc_feature (1)..(25): SEQ ID NO: 3338; WAN024CMM; Start 103; Stop 127
gataccgttacaactaagacttatg

SEQ ID NO: 352688 - DNA, 25 bp, Artificial
  probe
  misc_feature (1)..(25): SEQ ID NO: 3338; WAN024CMM; Start 73; Stop 97
gaagccatttctgaagcattaactc

SEQ ID NO: 352689 - DNA, 25 bp, Artificial
  probe
  misc_feature (1)..(25): SEQ ID NO: 3338; WAN024CMM; Start 136; Stop 160
tcaaacatagttccattatctgctg

SEQ ID NO: 352690 - DNA, 25 bp, Artificial
  probe
  misc_feature (1)..(25): SEQ ID NO: 3339; WAN024DO4; Start 25; Stop 49
ttacttctacgaaacaccaaatctg

SEQ ID NO: 352691 - DNA, 25 bp, Artificial
  probe
  misc_feature (1)..(25): SEQ ID NO: 3339; WAN024DO4; Start 24; Stop 48
tttacttctacgaaacaccaaatct

SEQ ID NO: 352692 - DNA, 25 bp, Artificial
  probe
  misc_feature (1)..(25): SEQ ID NO: 3339; WAN024DO4; Start 26; Stop 50
tacttctacgaaacaccaaatctgt

SEQ ID NO: 352693 - DNA, 25 bp, Artificial
  probe
  misc_feature (1)..(25): SEQ ID NO: 3339; WAN024DO4; Start 30; Stop 54
tctacgaaacaccaaatctgtcttt

SEQ ID NO: 352694 - DNA, 25 bp, Artificial
  probe
  misc_feature (1)..(25): SEQ ID NO: 3339; WAN024DO4; Start 29; Stop 53
ttctacgaaacaccaaatctgtctt

SEQ ID NO: 352695 - DNA, 25 bp, Artificial
  probe
  misc_feature (1)..(25): SEQ ID NO: 3339; WAN024DO4; Start 28; Stop 52
cttctacgaaacaccaaatctgtct

SEQ ID NO: 352696 - DNA, 25 bp, Artificial
  probe
  misc_feature (1)..(25): SEQ ID NO: 3339; WAN024DO4; Start 27; Stop 51
acttctacgaaacaccaaatctgtc

SEQ ID NO: 352697 - DNA, 25 bp, Artificial
  probe
  misc_feature (1)..(25): SEQ ID NO: 3339; WAN024DO4; Start 46; Stop 70
tctgtcttttccctcttttgtgata

SEQ ID NO: 352698 - DNA, 25 bp, Artificial
  probe
  misc_feature (1)..(25): SEQ ID NO: 3339; WAN024DO4; Start 43; Stop 67
aaatctgtcttttccctcttttgtg

SEQ ID NO: 352699 - DNA, 25 bp, Artificial
  probe
  misc_feature (1)..(25): SEQ ID NO: 3339; WAN024DO4; Start 44; Stop 68
aatctgtcttttccctcttttgtga

SEQ ID NO: 352700 - DNA, 25 bp, Artificial
  probe
  misc_feature (1)..(25): SEQ ID NO: 3339; WAN024DO4; Start 45; Stop 69
atctgtcttttccctcttttgtgat

SEQ ID NO: 352701 - DNA, 25 bp, Artificial
  probe
  misc_feature (1)..(25): SEQ ID NO: 3339; WAN024DO4; Start 40; Stop 64
accaaatctgtcttttccctctttt

SEQ ID NO: 352702 - DNA, 25 bp, Artificial
  probe
  misc_feature (1)..(25): SEQ ID NO: 3339; WAN024DO4; Start 47; Stop 71
ctgtcttttccctcttttgtgatat

SEQ ID NO: 352703 - DNA, 25 bp, Artificial
  probe
  misc_feature (1)..(25): SEQ ID NO: 3339; WAN024DO4; Start 39; Stop 63
caccaaatctgtcttttccctcttt

SEQ ID NO: 352704 - DNA, 25 bp, Artificial
  probe
  misc_feature (1)..(25): SEQ ID NO: 3339; WAN024DO4; Start 31; Stop 55
ctacgaaacaccaaatctgtctttt

SEQ ID NO: 352705 - DNA, 25 bp, Artificial
  probe
  misc_feature (1)..(25): SEQ ID NO: 3339; WAN024DO4; Start 23; Stop 47
ttttacttctacgaaacaccaaatc

SEQ ID NO: 352706 - DNA, 25 bp, Artificial
  probe
  misc_feature (1)..(25): SEQ ID NO: 3339; WAN024DO4; Start 48; Stop 72
tgtcttttccctcttttgtgatata

SEQ ID NO: 352707 - DNA, 25 bp, Artificial
  probe
  misc_feature (1)..(25): SEQ ID NO: 3339; WAN024DO4; Start 36; Stop 60
aaacaccaaatctgtcttttccctc

SEQ ID NO: 352708 - DNA, 25 bp, Artificial
  probe
  misc_feature (1)..(25): SEQ ID NO: 3339; WAN024DO4; Start 38; Stop 62
acaccaaatctgtcttttccctctt

SEQ ID NO: 352709 - DNA, 25 bp, Artificial
  probe
  misc_feature (1)..(25): SEQ ID NO: 3339; WAN024DO4; Start 37; Stop 61
aacaccaaatctgtcttttccctct

SEQ ID NO: 352710 - DNA, 25 bp, Artificial
  probe
  misc_feature (1)..(25): SEQ ID NO: 3339; WAN024DO4; Start 32; Stop 56
tacgaaacaccaaatctgtcttttc

SEQ ID NO: 352711 - DNA, 25 bp, Artificial
  probe
  misc_feature (1)..(25): SEQ ID NO: 3339; WAN024DO4; Start 49; Stop 73
gtcttttccctcttttgtgatataa

SEQ ID NO: 352712 - DNA, 25 bp, Artificial
  probe
  misc_feature (1)..(25): SEQ ID NO: 3339; WAN024DO4; Start 42; Stop 66
caaatctgtcttttccctcttttgt

SEQ ID NO: 352713 - DNA, 25 bp, Artificial
  probe
  misc_feature (1)..(25): SEQ ID NO: 3339; WAN024DO4; Start 35; Stop 59
gaaacaccaaatctgtcttttccct

SEQ ID NO: 352714 - DNA, 25 bp, Artificial
  probe
  misc_feature (1)..(25): SEQ ID NO: 3339; WAN024DO4; Start 41; Stop 65
ccaaatctgtcttttccctcttttg

SEQ ID NO: 352715 - DNA, 25 bp, Artificial
  probe
  misc_feature (1)..(25): SEQ ID NO: 3339; WAN024DO4; Start 33; Stop 57
acgaaacaccaaatctgtcttttcc

SEQ ID NO: 352716 - DNA, 25 bp, Artificial
  probe
  misc_feature (1)..(25): SEQ ID NO: 3339; WAN024DO4; Start 50; Stop 74
tcttttccctcttttgtgatataat

SEQ ID NO: 352717 - DNA, 25 bp, Artificial
  probe
  misc_feature (1)..(25): SEQ ID NO: 3339; WAN024DO4; Start 34; Stop 58
cgaaacaccaaatctgtcttttccc

SEQ ID NO: 352718 - DNA, 25 bp, Artificial
  probe
  misc_feature (1)..(25): SEQ ID NO: 3339; WAN024DO4; Start 56; Stop 80
ccctcttttgtgatataatagaaac

SEQ ID NO: 352719 - DNA, 25 bp, Artificial
  probe
  misc_feature (1)..(25): SEQ ID NO: 3339; WAN024DO4; Start 55; Stop 79
tccctcttttgtgatataatagaaa

SEQ ID NO: 352720 - DNA, 25 bp, Artificial
  probe
  misc_feature (1)..(25): SEQ ID NO: 3339; WAN024DO4; Start 54; Stop 78
ttccctcttttgtgatataatagaa

SEQ ID NO: 352721 - DNA, 25 bp, Artificial
  probe
  misc_feature (1)..(25): SEQ ID NO: 3339; WAN024DO4; Start 53; Stop 77
tttccctcttttgtgatataataga

SEQ ID NO: 352722 - DNA, 25 bp, Artificial
  probe
  misc_feature (1)..(25): SEQ ID NO: 3340; WAN024GEZ; Start 598; Stop 622
ctgattatctgcttggatgatgaac

SEQ ID NO: 352723 - DNA, 25 bp, Artificial
  probe
  misc_feature (1)..(25): SEQ ID NO: 3340; WAN024GEZ; Start 734; Stop 758
aaggaattggctataaggaactctt

SEQ ID NO: 352724 - DNA, 25 bp, Artificial
  probe
  misc_feature (1)..(25): SEQ ID NO: 3340; WAN024GEZ; Start 599; Stop 623
tgattatctgcttggatgatgaacg

SEQ ID NO: 352725 - DNA, 25 bp, Artificial
  probe
  misc_feature (1)..(25): SEQ ID NO: 3340; WAN024GEZ; Start 597; Stop 621
gctgattatctgcttggatgatgaa

SEQ ID NO: 352726 - DNA, 25 bp, Artificial
  probe
  misc_feature (1)..(25): SEQ ID NO: 3340; WAN024GEZ; Start 588; Stop 612
gtatgaaccgctgattatctgcttg

SEQ ID NO: 352727 - DNA, 25 bp, Artificial
  probe
  misc_feature (1)..(25): SEQ ID NO: 3340; WAN024GEZ; Start 587; Stop 611
tgtatgaaccgctgattatctgctt

SEQ ID NO: 352728 - DNA, 25 bp, Artificial
  probe
  misc_feature (1)..(25): SEQ ID NO: 3340; WAN024GEZ; Start 586; Stop 610
ttgtatgaaccgctgattatctgct

SEQ ID NO: 352729 - DNA, 25 bp, Artificial
  probe
  misc_feature (1)..(25): SEQ ID NO: 3340; WAN024GEZ; Start 250; Stop 274
gatgttagagagataaccgagtctt

SEQ ID NO: 352730 - DNA, 25 bp, Artificial
  probe
  misc_feature (1)..(25): SEQ ID NO: 3340; WAN024GEZ; Start 252; Stop 276
tgttagagagataaccgagtcttac

SEQ ID NO: 352731 - DNA, 25 bp, Artificial
  probe
  misc_feature (1)..(25): SEQ ID NO: 3340; WAN024GEZ; Start 253; Stop 277
gttagagagataaccgagtcttact

SEQ ID NO: 352732 - DNA, 25 bp, Artificial
  probe
  misc_feature (1)..(25): SEQ ID NO: 3340; WAN024GEZ; Start 371; Stop 395
atatccagagcttgctagaaggtta

SEQ ID NO: 352733 - DNA, 25 bp, Artificial
  probe
  misc_feature (1)..(25): SEQ ID NO: 3340; WAN024GEZ; Start 370; Stop 394
tatatccagagcttgctagaaggtt

SEQ ID NO: 352734 - DNA, 25 bp, Artificial
  probe
  misc_feature (1)..(25): SEQ ID NO: 3340; WAN024GEZ; Start 369; Stop 393
ttatatccagagcttgctagaaggt

SEQ ID NO: 352735 - DNA, 25 bp, Artificial
  probe
  misc_feature (1)..(25): SEQ ID NO: 3340; WAN024GEZ; Start 249; Stop 273
cgatgttagagagataaccgagtct

SEQ ID NO: 352736 - DNA, 25 bp, Artificial
  probe
  misc_feature (1)..(25): SEQ ID NO: 3340; WAN024GEZ; Start 295; Stop 319
tcagaagctaagatgactattgagg

SEQ ID NO: 352737 - DNA, 25 bp, Artificial
  probe
  misc_feature (1)..(25): SEQ ID NO: 3340; WAN024GEZ; Start 601; Stop 625
attatctgcttggatgatgaacgta

SEQ ID NO: 352738 - DNA, 25 bp, Artificial
  probe
  misc_feature (1)..(25): SEQ ID NO: 3340; WAN024GEZ; Start 602; Stop 626
ttatctgcttggatgatgaacgtag

SEQ ID NO: 352739 - DNA, 25 bp, Artificial
  probe
  misc_feature (1)..(25): SEQ ID NO: 3340; WAN024GEZ; Start 589; Stop 613
tatgaaccgctgattatctgcttgg

SEQ ID NO: 352740 - DNA, 25 bp, Artificial
  probe
  misc_feature (1)..(25): SEQ ID NO: 3340; WAN024GEZ; Start 729; Stop 753
tgctaaaggaattggctataaggaa

SEQ ID NO: 352741 - DNA, 25 bp, Artificial
  probe
  misc_feature (1)..(25): SEQ ID NO: 3340; WAN024GEZ; Start 730; Stop 754
gctaaaggaattggctataaggaac

SEQ ID NO: 352742 - DNA, 25 bp, Artificial
  probe
  misc_feature (1)..(25): SEQ ID NO: 3340; WAN024GEZ; Start 733; Stop 757
aaaggaattggctataaggaactct

SEQ ID NO: 352743 - DNA, 25 bp, Artificial
  probe
  misc_feature (1)..(25): SEQ ID NO: 3340; WAN024GEZ; Start 728; Stop 752
ctgctaaaggaattggctataagga

SEQ ID NO: 352744 - DNA, 25 bp, Artificial
  probe
  misc_feature (1)..(25): SEQ ID NO: 3340; WAN024GEZ; Start 251; Stop 275
atgttagagagataaccgagtctta

SEQ ID NO: 352745 - DNA, 25 bp, Artificial
  probe
  misc_feature (1)..(25): SEQ ID NO: 3340; WAN024GEZ; Start 372; Stop 396
tatccagagcttgctagaaggttac

SEQ ID NO: 352746 - DNA, 25 bp, Artificial
  probe
  misc_feature (1)..(25): SEQ ID NO: 3340; WAN024GEZ; Start 600; Stop 624
gattatctgcttggatgatgaacgt

SEQ ID NO: 352747 - DNA, 25 bp, Artificial
  probe
  misc_feature (1)..(25): SEQ ID NO: 3340; WAN024GEZ; Start 596; Stop 620
cgctgattatctgcttggatgatga

SEQ ID NO: 352748 - DNA, 25 bp, Artificial
  probe
  misc_feature (1)..(25): SEQ ID NO: 3340; WAN024GEZ; Start 735; Stop 759
aggaattggctataaggaactcttt

SEQ ID NO: 352749 - DNA, 25 bp, Artificial
  probe
  misc_feature (1)..(25): SEQ ID NO: 3340; WAN024GEZ; Start 736; Stop 760
ggaattggctataaggaactctttc

SEQ ID NO: 352750 - DNA, 25 bp, Artificial
  probe
  misc_feature (1)..(25): SEQ ID NO: 3340; WAN024GEZ; Start 603; Stop 627
tatctgcttggatgatgaacgtagt

SEQ ID NO: 352751 - DNA, 25 bp, Artificial
  probe
  misc_feature (1)..(25): SEQ ID NO: 3340; WAN024GEZ; Start 609; Stop 633
cttggatgatgaacgtagtcaactt

SEQ ID NO: 352752 - DNA, 25 bp, Artificial
  probe
  misc_feature (1)..(25): SEQ ID NO: 3340; WAN024GEZ; Start 622; Stop 646
cgtagtcaactttatgagcgtatca

SEQ ID NO: 352753 - DNA, 25 bp, Artificial
  probe
  misc_feature (1)..(25): SEQ ID NO: 3340; WAN024GEZ; Start 294; Stop 318
ttcagaagctaagatgactattgag

SEQ ID NO: 352754 - DNA, 25 bp, Artificial
  probe
  misc_feature (1)..(25): SEQ ID NO: 3340; WAN024GEZ; Start 624; Stop 648
tagtcaactttatgagcgtatcaac

SEQ ID NO: 352755 - DNA, 25 bp, Artificial
  probe
  misc_feature (1)..(25): SEQ ID NO: 3341; WAN024BF3; Start 4; Stop 28
acgaagtcagttacctatacctacg

SEQ ID NO: 352756 - DNA, 25 bp, Artificial
  probe
  misc_feature (1)..(25): SEQ ID NO: 3341; WAN024BF3; Start 5; Stop 29
cgaagtcagttacctatacctacgg

SEQ ID NO: 352757 - DNA, 25 bp, Artificial
  probe
  misc_feature (1)..(25): SEQ ID NO: 3341; WAN024BF3; Start 6; Stop 30
gaagtcagttacctatacctacggc

SEQ ID NO: 352758 - DNA, 25 bp, Artificial
  probe
  misc_feature (1)..(25): SEQ ID NO: 3341; WAN024BF3; Start 3; Stop 27
gacgaagtcagttacctatacctac

SEQ ID NO: 352759 - DNA, 25 bp, Artificial
  probe
  misc_feature (1)..(25): SEQ ID NO: 3341; WAN024BF3; Start 9; Stop 33
gtcagttacctatacctacggcaag

SEQ ID NO: 352760 - DNA, 25 bp, Artificial
  probe
  misc_feature (1)..(25): SEQ ID NO: 3341; WAN024BF3; Start 8; Stop 32
agtcagttacctatacctacggcaa

SEQ ID NO: 352761 - DNA, 25 bp, Artificial
  probe
  misc_feature (1)..(25): SEQ ID NO: 3341; WAN024BF3; Start 7; Stop 31
aagtcagttacctatacctacggca

SEQ ID NO: 352762 - DNA, 25 bp, Artificial
  probe
  misc_feature (1)..(25): SEQ ID NO: 3341; WAN024BF3; Start 10; Stop 34
tcagttacctatacctacggcaagg

SEQ ID NO: 352763 - DNA, 25 bp, Artificial
  probe
  misc_feature (1)..(25): SEQ ID NO: 3341; WAN024BF3; Start 99; Stop 123
ctatttggatagcagtcaggctttg

SEQ ID NO: 352764 - DNA, 25 bp, Artificial
  probe
  misc_feature (1)..(25): SEQ ID NO: 3341; WAN024BF3; Start 2; Stop 26
tgacgaagtcagttacctataccta

SEQ ID NO: 352765 - DNA, 25 bp, Artificial
  probe
  misc_feature (1)..(25): SEQ ID NO: 3341; WAN024BF3; Start 100; Stop 124
tatttggatagcagtcaggctttga

SEQ ID NO: 352766 - DNA, 25 bp, Artificial
  probe
  misc_feature (1)..(25): SEQ ID NO: 3341; WAN024BF3; Start 101; Stop 125
atttggatagcagtcaggctttgat

SEQ ID NO: 352767 - DNA, 25 bp, Artificial
  probe
  misc_feature (1)..(25): SEQ ID NO: 3341; WAN024BF3; Start 103; Stop 127
ttggatagcagtcaggctttgattt

SEQ ID NO: 352768 - DNA, 25 bp, Artificial
  probe
  misc_feature (1)..(25): SEQ ID NO: 3341; WAN024BF3; Start 102; Stop 126
tttggatagcagtcaggctttgatt

SEQ ID NO: 352769 - DNA, 25 bp, Artificial
  probe
  misc_feature (1)..(25): SEQ ID NO: 3341; WAN024BF3; Start 14; Stop 38
ttacctatacctacggcaaggtgaa

SEQ ID NO: 352770 - DNA, 25 bp, Artificial
  probe
  misc_feature (1)..(25): SEQ ID NO: 3341; WAN024BF3; Start 15; Stop 39
tacctatacctacggcaaggtgaag

SEQ ID NO: 352771 - DNA, 25 bp, Artificial
  probe
  misc_feature (1)..(25): SEQ ID NO: 3341; WAN024BF3; Start 104; Stop 128
tggatagcagtcaggctttgatttt

SEQ ID NO: 352772 - DNA, 25 bp, Artificial
  probe
  misc_feature (1)..(25): SEQ ID NO: 3341; WAN024BF3; Start 13; Stop 37
gttacctatacctacggcaaggtga

SEQ ID NO: 352773 - DNA, 25 bp, Artificial
  probe
  misc_feature (1)..(25): SEQ ID NO: 3341; WAN024BF3; Start 12; Stop 36
agttacctatacctacggcaaggtg

SEQ ID NO: 352774 - DNA, 25 bp, Artificial
  probe
  misc_feature (1)..(25): SEQ ID NO: 3341; WAN024BF3; Start 11; Stop 35
cagttacctatacctacggcaaggt

SEQ ID NO: 352775 - DNA, 25 bp, Artificial
  probe
  misc_feature (1)..(25): SEQ ID NO: 3341; WAN024BF3; Start 56; Stop 80
agattttcgaagagtataagacaga

SEQ ID NO: 352776 - DNA, 25 bp, Artificial
  probe
  misc_feature (1)..(25): SEQ ID NO: 3341; WAN024BF3; Start 54; Stop 78
agagattttcgaagagtataagaca

SEQ ID NO: 352777 - DNA, 25 bp, Artificial
  probe
  misc_feature (1)..(25): SEQ ID NO: 3341; WAN024BF3; Start 55; Stop 79
gagattttcgaagagtataagacag

SEQ ID NO: 352778 - DNA, 25 bp, Artificial
  probe
  misc_feature (1)..(25): SEQ ID NO: 3341; WAN024BF3; Start 18; Stop 42
ctatacctacggcaaggtgaagctg

SEQ ID NO: 352779 - DNA, 25 bp, Artificial
  probe
  misc_feature (1)..(25): SEQ ID NO: 3341; WAN024BF3; Start 57; Stop 81
gattttcgaagagtataagacagaa

SEQ ID NO: 352780 - DNA, 25 bp, Artificial
  probe
  misc_feature (1)..(25): SEQ ID NO: 3341; WAN024BF3; Start 53; Stop 77
aagagattttcgaagagtataagac

SEQ ID NO: 352781 - DNA, 25 bp, Artificial
  probe
  misc_feature (1)..(25): SEQ ID NO: 3341; WAN024BF3; Start 52; Stop 76
gaagagattttcgaagagtataaga

SEQ ID NO: 352782 - DNA, 25 bp, Artificial
  probe
  misc_feature (1)..(25): SEQ ID NO: 3341; WAN024BF3; Start 58; Stop 82
attttcgaagagtataagacagaaa

SEQ ID NO: 352783 - DNA, 25 bp, Artificial
  probe
  misc_feature (1)..(25): SEQ ID NO: 3341; WAN024BF3; Start 59; Stop 83
ttttcgaagagtataagacagaaaa

SEQ ID NO: 352784 - DNA, 25 bp, Artificial
  probe
  misc_feature (1)..(25): SEQ ID NO: 3342; WAN024FJD; Start 603; Stop 627
gcaagaatcatctgtaaccatcaag

SEQ ID NO: 352785 - DNA, 25 bp, Artificial
  probe
  misc_feature (1)..(25): SEQ ID NO: 3342; WAN024FJD; Start 928; Stop 952
gtcaacaacgctatcaactacattg

SEQ ID NO: 352786 - DNA, 25 bp, Artificial
  probe
  misc_feature (1)..(25): SEQ ID NO: 3342; WAN024FJD; Start 605; Stop 629
aagaatcatctgtaaccatcaagac

SEQ ID NO: 352787 - DNA, 25 bp, Artificial
  probe
  misc_feature (1)..(25): SEQ ID NO: 3342; WAN024FJD; Start 604; Stop 628
caagaatcatctgtaaccatcaaga

SEQ ID NO: 352788 - DNA, 25 bp, Artificial
  probe
  misc_feature (1)..(25): SEQ ID NO: 3342; WAN024FJD; Start 800; Stop 824
gtcacaagattatcgtcaacagcaa

SEQ ID NO: 352789 - DNA, 25 bp, Artificial
  probe
  misc_feature (1)..(25): SEQ ID NO: 3342; WAN024FJD; Start 607; Stop 631
gaatcatctgtaaccatcaagacac

SEQ ID NO: 352790 - DNA, 25 bp, Artificial
  probe
  misc_feature (1)..(25): SEQ ID NO: 3342; WAN024FJD; Start 606; Stop 630
agaatcatctgtaaccatcaagaca

SEQ ID NO: 352791 - DNA, 25 bp, Artificial
  probe
  misc_feature (1)..(25): SEQ ID NO: 3342; WAN024FJD; Start 612; Stop 636
atctgtaaccatcaagacaccattc

SEQ ID NO: 352792 - DNA, 25 bp, Artificial
  probe
  misc_feature (1)..(25): SEQ ID NO: 3342; WAN024FJD; Start 608; Stop 632
aatcatctgtaaccatcaagacacc

SEQ ID NO: 352793 - DNA, 25 bp, Artificial
  probe
  misc_feature (1)..(25): SEQ ID NO: 3342; WAN024FJD; Start 927; Stop 951
tgtcaacaacgctatcaactacatt

SEQ ID NO: 352794 - DNA, 25 bp, Artificial
  probe
  misc_feature (1)..(25): SEQ ID NO: 3342; WAN024FJD; Start 611; Stop 635
catctgtaaccatcaagacaccatt

SEQ ID NO: 352795 - DNA, 25 bp, Artificial
  probe
  misc_feature (1)..(25): SEQ ID NO: 3342; WAN024FJD; Start 926; Stop 950
ctgtcaacaacgctatcaactacat

SEQ ID NO: 352796 - DNA, 25 bp, Artificial
  probe
  misc_feature (1)..(25): SEQ ID NO: 3342; WAN024FJD; Start 795; Stop 819
caaccgtcacaagattatcgtcaac

SEQ ID NO: 352797 - DNA, 25 bp, Artificial
  probe
  misc_feature (1)..(25): SEQ ID NO: 3342; WAN024FJD; Start 217; Stop 241
gaagagttgactaaccgcttgattg

SEQ ID NO: 352798 - DNA, 25 bp, Artificial
  probe
  misc_feature (1)..(25): SEQ ID NO: 3342; WAN024FJD; Start 794; Stop 818
tcaaccgtcacaagattatcgtcaa

SEQ ID NO: 352799 - DNA, 25 bp, Artificial
  probe
  misc_feature (1)..(25): SEQ ID NO: 3342; WAN024FJD; Start 216; Stop 240
agaagagttgactaaccgcttgatt

SEQ ID NO: 352800 - DNA, 25 bp, Artificial
  probe
  misc_feature (1)..(25): SEQ ID NO: 3342; WAN024FJD; Start 610; Stop 634
tcatctgtaaccatcaagacaccat

SEQ ID NO: 352801 - DNA, 25 bp, Artificial
  probe
  misc_feature (1)..(25): SEQ ID NO: 3342; WAN024FJD; Start 609; Stop 633
atcatctgtaaccatcaagacacca

SEQ ID NO: 352802 - DNA, 25 bp, Artificial
  probe
  misc_feature (1)..(25): SEQ ID NO: 3342; WAN024FJD; Start 845; Stop 869
gtatctatgctatcggtgactgctg

SEQ ID NO: 352803 - DNA, 25 bp, Artificial
  probe
  misc_feature (1)..(25): SEQ ID NO: 3342; WAN024FJD; Start 220; Stop 244
gagttgactaaccgcttgattgaac

SEQ ID NO: 352804 - DNA, 25 bp, Artificial
  probe
  misc_feature (1)..(25): SEQ ID NO: 3342; WAN024FJD; Start 219; Stop 243
agagttgactaaccgcttgattgaa

SEQ ID NO: 352805 - DNA, 25 bp, Artificial
  probe
  misc_feature (1)..(25): SEQ ID NO: 3342; WAN024FJD; Start 218; Stop 242
aagagttgactaaccgcttgattga

SEQ ID NO: 352806 - DNA, 25 bp, Artificial
  probe
  misc_feature (1)..(25): SEQ ID NO: 3342; WAN024FJD; Start 796; Stop 820
aaccgtcacaagattatcgtcaaca

SEQ ID NO: 352807 - DNA, 25 bp, Artificial
  probe
  misc_feature (1)..(25): SEQ ID NO: 3342; WAN024FJD; Start 208; Stop 232
ctgactggagaagagttgactaacc

SEQ ID NO: 352808 - DNA, 25 bp, Artificial
  probe
  misc_feature (1)..(25): SEQ ID NO: 3342; WAN024FJD; Start 207; Stop 231
cctgactggagaagagttgactaac

SEQ ID NO: 352809 - DNA, 25 bp, Artificial
  probe
  misc_feature (1)..(25): SEQ ID NO: 3342; WAN024FJD; Start 745; Stop 769
tatggtttcaaatcttctgtcggta

SEQ ID NO: 352810 - DNA, 25 bp, Artificial
  probe
  misc_feature (1)..(25): SEQ ID NO: 3342; WAN024FJD; Start 222; Stop 246
gttgactaaccgcttgattgaacag

SEQ ID NO: 352811 - DNA, 25 bp, Artificial
  probe
  misc_feature (1)..(25): SEQ ID NO: 3342; WAN024FJD; Start 215; Stop 239
gagaagagttgactaaccgcttgat

SEQ ID NO: 352812 - DNA, 25 bp, Artificial
  probe
  misc_feature (1)..(25): SEQ ID NO: 3342; WAN024FJD; Start 746; Stop 770
atggtttcaaatcttctgtcggtaa

SEQ ID NO: 352813 - DNA, 25 bp, Artificial
  probe
  misc_feature (1)..(25): SEQ ID NO: 3342; WAN024FJD; Start 793; Stop 817
ctcaaccgtcacaagattatcgtca

SEQ ID NO: 352814 - DNA, 25 bp, Artificial
  probe
  misc_feature (1)..(25): SEQ ID NO: 3342; WAN024FJD; Start 206; Stop 230
acctgactggagaagagttgactaa

SEQ ID NO: 352815 - DNA, 25 bp, Artificial
  probe
  misc_feature (1)..(25): SEQ ID NO: 3342; WAN024FJD; Start 205; Stop 229
aacctgactggagaagagttgacta

SEQ ID NO: 352816 - DNA, 25 bp, Artificial
  probe
  misc_feature (1)..(25): SEQ ID NO: 3342; WAN024FJD; Start 842; Stop 866
caggtatctatgctatcggtgactg

SEQ ID NO: 352817 - DNA, 25 bp, Artificial
  probe
  misc_feature (1)..(25): SEQ ID NO: 3343; WAN024FUC; Start 13; Stop 37
tcgtcatcaaataaggagaagaaca

SEQ ID NO: 352818 - DNA, 25 bp, Artificial
  probe
  misc_feature (1)..(25): SEQ ID NO: 3343; WAN024FUC; Start 12; Stop 36
gtcgtcatcaaataaggagaagaac

SEQ ID NO: 352819 - DNA, 25 bp, Artificial
  probe
  misc_feature (1)..(25): SEQ ID NO: 3343; WAN024FUC; Start 11; Stop 35
agtcgtcatcaaataaggagaagaa

SEQ ID NO: 352820 - DNA, 25 bp, Artificial
  probe
  misc_feature (1)..(25): SEQ ID NO: 3343; WAN024FUC; Start 10; Stop 34
cagtcgtcatcaaataaggagaaga

SEQ ID NO: 352821 - DNA, 25 bp, Artificial
  probe
  misc_feature (1)..(25): SEQ ID NO: 3343; WAN024FUC; Start 8; Stop 32
tacagtcgtcatcaaataaggagaa

SEQ ID NO: 352822 - DNA, 25 bp, Artificial
  probe
  misc_feature (1)..(25): SEQ ID NO: 3343; WAN024FUC; Start 9; Stop 33
acagtcgtcatcaaataaggagaag

SEQ ID NO: 352823 - DNA, 25 bp, Artificial
  probe
  misc_feature (1)..(25): SEQ ID NO: 3343; WAN024FUC; Start 7; Stop 31
atacagtcgtcatcaaataaggaga

SEQ ID NO: 352824 - DNA, 25 bp, Artificial
  probe
  misc_feature (1)..(25): SEQ ID NO: 3343; WAN024FUC; Start 14; Stop 38
cgtcatcaaataaggagaagaacat

SEQ ID NO: 352825 - DNA, 25 bp, Artificial
  probe
  misc_feature (1)..(25): SEQ ID NO: 3343; WAN024FUC; Start 253; Stop 277
ggtaaacagattcaaggaaatagcc

SEQ ID NO: 352826 - DNA, 25 bp, Artificial
  probe
  misc_feature (1)..(25): SEQ ID NO: 3343; WAN024FUC; Start 252; Stop 276
tggtaaacagattcaaggaaatagc

SEQ ID NO: 352827 - DNA, 25 bp, Artificial
  probe
  misc_feature (1)..(25): SEQ ID NO: 3343; WAN024FUC; Start 248; Stop 272
gctttggtaaacagattcaaggaaa

SEQ ID NO: 352828 - DNA, 25 bp, Artificial
  probe
  misc_feature (1)..(25): SEQ ID NO: 3343; WAN024FUC; Start 237; Stop 261
taagatggaaggctttggtaaacag

SEQ ID NO: 352829 - DNA, 25 bp, Artificial
  probe
  misc_feature (1)..(25): SEQ ID NO: 3343; WAN024FUC; Start 236; Stop 260
ctaagatggaaggctttggtaaaca

SEQ ID NO: 352830 - DNA, 25 bp, Artificial
  probe
  misc_feature (1)..(25): SEQ ID NO: 3343; WAN024FUC; Start 244; Stop 268
gaaggctttggtaaacagattcaag

SEQ ID NO: 352831 - DNA, 25 bp, Artificial
  probe
  misc_feature (1)..(25): SEQ ID NO: 3343; WAN024FUC; Start 240; Stop 264
gatggaaggctttggtaaacagatt

SEQ ID NO: 352832 - DNA, 25 bp, Artificial
  probe
  misc_feature (1)..(25): SEQ ID NO: 3343; WAN024FUC; Start 241; Stop 265
atggaaggctttggtaaacagattc

SEQ ID NO: 352833 - DNA, 25 bp, Artificial
  probe
  misc_feature (1)..(25): SEQ ID NO: 3343; WAN024FUC; Start 6; Stop 30
tatacagtcgtcatcaaataaggag

SEQ ID NO: 352834 - DNA, 25 bp, Artificial
  probe
  misc_feature (1)..(25): SEQ ID NO: 3343; WAN024FUC; Start 5; Stop 29
ctatacagtcgtcatcaaataagga

SEQ ID NO: 352835 - DNA, 25 bp, Artificial
  probe
  misc_feature (1)..(25): SEQ ID NO: 3343; WAN024FUC; Start 247; Stop 271
ggctttggtaaacagattcaaggaa

SEQ ID NO: 352836 - DNA, 25 bp, Artificial
  probe
  misc_feature (1)..(25): SEQ ID NO: 3343; WAN024FUC; Start 245; Stop 269
aaggctttggtaaacagattcaagg

SEQ ID NO: 352837 - DNA, 25 bp, Artificial
  probe
  misc_feature (1)..(25): SEQ ID NO: 3343; WAN024FUC; Start 243; Stop 267
ggaaggctttggtaaacagattcaa

SEQ ID NO: 352838 - DNA, 25 bp, Artificial
  probe
  misc_feature (1)..(25): SEQ ID NO: 3343; WAN024FUC; Start 239; Stop 263
agatggaaggctttggtaaacagat

SEQ ID NO: 352839 - DNA, 25 bp, Artificial
  probe
  misc_feature (1)..(25): SEQ ID NO: 3343; WAN024FUC; Start 266; Stop 290
aaggaaatagcctcttgtcagaatt

SEQ ID NO: 352840 - DNA, 25 bp, Artificial
  probe
  misc_feature (1)..(25): SEQ ID NO: 3343; WAN024FUC; Start 257; Stop 281
aacagattcaaggaaatagcctctt

SEQ ID NO: 352841 - DNA, 25 bp, Artificial
  probe
  misc_feature (1)..(25): SEQ ID NO: 3343; WAN024FUC; Start 256; Stop 280
aaacagattcaaggaaatagcctct

SEQ ID NO: 352842 - DNA, 25 bp, Artificial
  probe
  misc_feature (1)..(25): SEQ ID NO: 3343; WAN024FUC; Start 235; Stop 259
gctaagatggaaggctttggtaaac

SEQ ID NO: 352843 - DNA, 25 bp, Artificial
  probe
  misc_feature (1)..(25): SEQ ID NO: 3343; WAN024FUC; Start 287; Stop 311
aattctttaccaagcaacaacaatt

SEQ ID NO: 352844 - DNA, 25 bp, Artificial
  probe
  misc_feature (1)..(25): SEQ ID NO: 3343; WAN024FUC; Start 4; Stop 28
actatacagtcgtcatcaaataagg

SEQ ID NO: 352845 - DNA, 25 bp, Artificial
  probe
  misc_feature (1)..(25): SEQ ID NO: 3343; WAN024FUC; Start 249; Stop 273
ctttggtaaacagattcaaggaaat

SEQ ID NO: 352846 - DNA, 25 bp, Artificial
  probe
  misc_feature (1)..(25): SEQ ID NO: 3343; WAN024FUC; Start 254; Stop 278
gtaaacagattcaaggaaatagcct

SEQ ID NO: 352847 - DNA, 25 bp, Artificial
  probe
  misc_feature (1)..(25): SEQ ID NO: 3343; WAN024FUC; Start 238; Stop 262
aagatggaaggctttggtaaacaga

SEQ ID NO: 352848 - DNA, 25 bp, Artificial
  probe
  misc_feature (1)..(25): SEQ ID NO: 3343; WAN024FUC; Start 255; Stop 279
taaacagattcaaggaaatagcctc

SEQ ID NO: 352849 - DNA, 25 bp, Artificial
  probe
  misc_feature (1)..(25): SEQ ID NO: 3343; WAN024FUC; Start 246; Stop 270
aggctttggtaaacagattcaagga

SEQ ID NO: 352850 - DNA, 25 bp, Artificial
  probe
  misc_feature (1)..(25): SEQ ID NO: 3344; WAN024DG6; Start 215; Stop 239
tatatgatagtcgcaagatggtagc

SEQ ID NO: 352851 - DNA, 25 bp, Artificial
  probe
  misc_feature (1)..(25): SEQ ID NO: 3344; WAN024DG6; Start 82; Stop 106
aagagaattggattggttagcgata

SEQ ID NO: 352852 - DNA, 25 bp, Artificial
  probe
  misc_feature (1)..(25): SEQ ID NO: 3344; WAN024DG6; Start 211; Stop 235
ggattatatgatagtcgcaagatgg

SEQ ID NO: 352853 - DNA, 25 bp, Artificial
  probe
  misc_feature (1)..(25): SEQ ID NO: 3344; WAN024DG6; Start 83; Stop 107
agagaattggattggttagcgatac

SEQ ID NO: 352854 - DNA, 25 bp, Artificial
  probe
  misc_feature (1)..(25): SEQ ID NO: 3344; WAN024DG6; Start 84; Stop 108
gagaattggattggttagcgataca

SEQ ID NO: 352855 - DNA, 25 bp, Artificial
  probe
  misc_feature (1)..(25): SEQ ID NO: 3344; WAN024DG6; Start 86; Stop 110
gaattggattggttagcgatacaag

SEQ ID NO: 352856 - DNA, 25 bp, Artificial
  probe
  misc_feature (1)..(25): SEQ ID NO: 3344; WAN024DG6; Start 85; Stop 109
agaattggattggttagcgatacaa

SEQ ID NO: 352857 - DNA, 25 bp, Artificial
  probe
  misc_feature (1)..(25): SEQ ID NO: 3344; WAN024DG6; Start 216; Stop 240
atatgatagtcgcaagatggtagca

SEQ ID NO: 352858 - DNA, 25 bp, Artificial
  probe
  misc_feature (1)..(25): SEQ ID NO: 3344; WAN024DG6; Start 212; Stop 236
gattatatgatagtcgcaagatggt

SEQ ID NO: 352859 - DNA, 25 bp, Artificial
  probe
  misc_feature (1)..(25): SEQ ID NO: 3344; WAN024DG6; Start 87; Stop 111
aattggattggttagcgatacaagt

SEQ ID NO: 352860 - DNA, 25 bp, Artificial
  probe
  misc_feature (1)..(25): SEQ ID NO: 3344; WAN024DG6; Start 92; Stop 116
gattggttagcgatacaagtggatt

SEQ ID NO: 352861 - DNA, 25 bp, Artificial
  probe
  misc_feature (1)..(25): SEQ ID NO: 3344; WAN024DG6; Start 210; Stop 234
aggattatatgatagtcgcaagatg

SEQ ID NO: 352862 - DNA, 25 bp, Artificial
  probe
  misc_feature (1)..(25): SEQ ID NO: 3344; WAN024DG6; Start 88; Stop 112
attggattggttagcgatacaagtg

SEQ ID NO: 352863 - DNA, 25 bp, Artificial
  probe
  misc_feature (1)..(25): SEQ ID NO: 3344; WAN024DG6; Start 579; Stop 603
tacatcactagaacaggtatctcag

SEQ ID NO: 352864 - DNA, 25 bp, Artificial
  probe
  misc_feature (1)..(25): SEQ ID NO: 3344; WAN024DG6; Start 217; Stop 241
tatgatagtcgcaagatggtagcag

SEQ ID NO: 352865 - DNA, 25 bp, Artificial
  probe
  misc_feature (1)..(25): SEQ ID NO: 3344; WAN024DG6; Start 214; Stop 238
ttatatgatagtcgcaagatggtag

SEQ ID NO: 352866 - DNA, 25 bp, Artificial
  probe
  misc_feature (1)..(25): SEQ ID NO: 3344; WAN024DG6; Start 578; Stop 602
ttacatcactagaacaggtatctca

SEQ ID NO: 352867 - DNA, 25 bp, Artificial
  probe
  misc_feature (1)..(25): SEQ ID NO: 3344; WAN024DG6; Start 625; Stop 649
tcaattcattcatgtgagcctactt

SEQ ID NO: 352868 - DNA, 25 bp, Artificial
  probe
  misc_feature (1)..(25): SEQ ID NO: 3344; WAN024DG6; Start 624; Stop 648
ttcaattcattcatgtgagcctact

SEQ ID NO: 352869 - DNA, 25 bp, Artificial
  probe
  misc_feature (1)..(25): SEQ ID NO: 3344; WAN024DG6; Start 208; Stop 232
gtaggattatatgatagtcgcaaga

SEQ ID NO: 352870 - DNA, 25 bp, Artificial
  probe
  misc_feature (1)..(25): SEQ ID NO: 3344; WAN024DG6; Start 206; Stop 230
gagtaggattatatgatagtcgcaa

SEQ ID NO: 352871 - DNA, 25 bp, Artificial
  probe
  misc_feature (1)..(25): SEQ ID NO: 3344; WAN024DG6; Start 207; Stop 231
agtaggattatatgatagtcgcaag

SEQ ID NO: 352872 - DNA, 25 bp, Artificial
  probe
  misc_feature (1)..(25): SEQ ID NO: 3344; WAN024DG6; Start 202; Stop 226
aagcgagtaggattatatgatagtc

SEQ ID NO: 352873 - DNA, 25 bp, Artificial
  probe
  misc_feature (1)..(25): SEQ ID NO: 3344; WAN024DG6; Start 213; Stop 237
attatatgatagtcgcaagatggta

SEQ ID NO: 352874 - DNA, 25 bp, Artificial
  probe
  misc_feature (1)..(25): SEQ ID NO: 3344; WAN024DG6; Start 91; Stop 115
ggattggttagcgatacaagtggat

SEQ ID NO: 352875 - DNA, 25 bp, Artificial
  probe
  misc_feature (1)..(25): SEQ ID NO: 3344; WAN024DG6; Start 468; Stop 492
taaagggaaattagttgagcaagga

SEQ ID NO: 352876 - DNA, 25 bp, Artificial
  probe
  misc_feature (1)..(25): SEQ ID NO: 3344; WAN024DG6; Start 80; Stop 104
taaagagaattggattggttagcga

SEQ ID NO: 352877 - DNA, 25 bp, Artificial
  probe
  misc_feature (1)..(25): SEQ ID NO: 3344; WAN024DG6; Start 661; Stop 685
tttatcacattaacaggaggaaagc

SEQ ID NO: 352878 - DNA, 25 bp, Artificial
  probe
  misc_feature (1)..(25): SEQ ID NO: 3344; WAN024DG6; Start 184; Stop 208
cgtgttgataatttgttaaagcgag

SEQ ID NO: 352879 - DNA, 25 bp, Artificial
  probe
  misc_feature (1)..(25): SEQ ID NO: 3344; WAN024DG6; Start 79; Stop 103
ttaaagagaattggattggttagcg

SEQ ID NO: 352880 - DNA, 25 bp, Artificial
  probe
  misc_feature (1)..(25): SEQ ID NO: 3344; WAN024DG6; Start 467; Stop 491
ataaagggaaattagttgagcaagg

SEQ ID NO: 352881 - DNA, 25 bp, Artificial
  probe
  misc_feature (1)..(25): SEQ ID NO: 3344; WAN024DG6; Start 81; Stop 105
aaagagaattggattggttagcgat

SEQ ID NO: 352882 - DNA, 25 bp, Artificial
  probe
  misc_feature (1)..(25): SEQ ID NO: 3344; WAN024DG6; Start 65; Stop 89
taacaagcggtgaattaaagagaat

SEQ ID NO: 352883 - DNA, 25 bp, Artificial
  probe
  misc_feature (1)..(25): SEQ ID NO: 3345; WAN024DDQ; Start 301; Stop 325
ttatccgattctgatgttgttcttg

SEQ ID NO: 352884 - DNA, 25 bp, Artificial
  probe
  misc_feature (1)..(25): SEQ ID NO: 3345; WAN024DDQ; Start 1278; Stop 1302
aagtcaatgtgttattccaggtcag

SEQ ID NO: 352885 - DNA, 25 bp, Artificial
  probe
  misc_feature (1)..(25): SEQ ID NO: 3345; WAN024DDQ; Start 302; Stop 326
tatccgattctgatgttgttcttgg

SEQ ID NO: 352886 - DNA, 25 bp, Artificial
  probe
  misc_feature (1)..(25): SEQ ID NO: 3345; WAN024DDQ; Start 197; Stop 221
ttgctgagttgtctgatatgattac

SEQ ID NO: 352887 - DNA, 25 bp, Artificial
  probe
  misc_feature (1)..(25): SEQ ID NO: 3345; WAN024DDQ; Start 1102; Stop 1126
agtattgaagaagcacgaactaagt

SEQ ID NO: 352888 - DNA, 25 bp, Artificial
  probe
  misc_feature (1)..(25): SEQ ID NO: 3345; WAN024DDQ; Start 307; Stop 331
gattctgatgttgttcttggtcatt

SEQ ID NO: 352889 - DNA, 25 bp, Artificial
  probe
  misc_feature (1)..(25): SEQ ID NO: 3345; WAN024DDQ; Start 300; Stop 324
attatccgattctgatgttgttctt

SEQ ID NO: 352890 - DNA, 25 bp, Artificial
  probe
  misc_feature (1)..(25): SEQ ID NO: 3345; WAN024DDQ; Start 299; Stop 323
aattatccgattctgatgttgttct

SEQ ID NO: 352891 - DNA, 25 bp, Artificial
  probe
  misc_feature (1)..(25): SEQ ID NO: 3345; WAN024DDQ; Start 138; Stop 162
ttccattagccaacagatgaatcta

SEQ ID NO: 352892 - DNA, 25 bp, Artificial
  probe
  misc_feature (1)..(25): SEQ ID NO: 3345; WAN024DDQ; Start 139; Stop 163
tccattagccaacagatgaatctat

SEQ ID NO: 352893 - DNA, 25 bp, Artificial
  probe
  misc_feature (1)..(25): SEQ ID NO: 3345; WAN024DDQ; Start 140; Stop 164
ccattagccaacagatgaatctatc

SEQ ID NO: 352894 - DNA, 25 bp, Artificial
  probe
  misc_feature (1)..(25): SEQ ID NO: 3345; WAN024DDQ; Start 137; Stop 161
cttccattagccaacagatgaatct

SEQ ID NO: 352895 - DNA, 25 bp, Artificial
  probe
  misc_feature (1)..(25): SEQ ID NO: 3345; WAN024DDQ; Start 198; Stop 222
tgctgagttgtctgatatgattaca

SEQ ID NO: 352896 - DNA, 25 bp, Artificial
  probe
  misc_feature (1)..(25): SEQ ID NO: 3345; WAN024DDQ; Start 199; Stop 223
gctgagttgtctgatatgattacag

SEQ ID NO: 352897 - DNA, 25 bp, Artificial
  probe
  misc_feature (1)..(25): SEQ ID NO: 3345; WAN024DDQ; Start 306; Stop 330
cgattctgatgttgttcttggtcat

SEQ ID NO: 352898 - DNA, 25 bp, Artificial
  probe
  misc_feature (1)..(25): SEQ ID NO: 3345; WAN024DDQ; Start 1103; Stop 1127
gtattgaagaagcacgaactaagtg

SEQ ID NO: 352899 - DNA, 25 bp, Artificial
  probe
  misc_feature (1)..(25): SEQ ID NO: 3345; WAN024DDQ; Start 201; Stop 225
tgagttgtctgatatgattacagga

SEQ ID NO: 352900 - DNA, 25 bp, Artificial
  probe
  misc_feature (1)..(25): SEQ ID NO: 3345; WAN024DDQ; Start 141; Stop 165
cattagccaacagatgaatctatca

SEQ ID NO: 352901 - DNA, 25 bp, Artificial
  probe
  misc_feature (1)..(25): SEQ ID NO: 3345; WAN024DDQ; Start 200; Stop 224
ctgagttgtctgatatgattacagg

SEQ ID NO: 352902 - DNA, 25 bp, Artificial
  probe
  misc_feature (1)..(25): SEQ ID NO: 3345; WAN024DDQ; Start 203; Stop 227
agttgtctgatatgattacaggaga

SEQ ID NO: 352903 - DNA, 25 bp, Artificial
  probe
  misc_feature (1)..(25): SEQ ID NO: 3345; WAN024DDQ; Start 202; Stop 226
gagttgtctgatatgattacaggag

SEQ ID NO: 352904 - DNA, 25 bp, Artificial
  probe
  misc_feature (1)..(25): SEQ ID NO: 3345; WAN024DDQ; Start 1279; Stop 1303
agtcaatgtgttattccaggtcagg

SEQ ID NO: 352905 - DNA, 25 bp, Artificial
  probe
  misc_feature (1)..(25): SEQ ID NO: 3345; WAN024DDQ; Start 1104; Stop 1128
tattgaagaagcacgaactaagtgg

SEQ ID NO: 352906 - DNA, 25 bp, Artificial
  probe
  misc_feature (1)..(25): SEQ ID NO: 3345; WAN024DDQ; Start 303; Stop 327
atccgattctgatgttgttcttggt

SEQ ID NO: 352907 - DNA, 25 bp, Artificial
  probe
  misc_feature (1)..(25): SEQ ID NO: 3345; WAN024DDQ; Start 1099; Stop 1123
tctagtattgaagaagcacgaacta

SEQ ID NO: 352908 - DNA, 25 bp, Artificial
  probe
  misc_feature (1)..(25): SEQ ID NO: 3345; WAN024DDQ; Start 1316; Stop 1340
aactggctattatgtctgatccatt

SEQ ID NO: 352909 - DNA, 25 bp, Artificial
  probe
  misc_feature (1)..(25): SEQ ID NO: 3345; WAN024DDQ; Start 1315; Stop 1339
gaactggctattatgtctgatccat

SEQ ID NO: 352910 - DNA, 25 bp, Artificial
  probe
  misc_feature (1)..(25): SEQ ID NO: 3345; WAN024DDQ; Start 1277; Stop 1301
aaagtcaatgtgttattccaggtca

SEQ ID NO: 352911 - DNA, 25 bp, Artificial
  probe
  misc_feature (1)..(25): SEQ ID NO: 3345; WAN024DDQ; Start 1101; Stop 1125
tagtattgaagaagcacgaactaag

SEQ ID NO: 352912 - DNA, 25 bp, Artificial
  probe
  misc_feature (1)..(25): SEQ ID NO: 3345; WAN024DDQ; Start 333; Stop 357
tgctgatttggttgatggagtattt

SEQ ID NO: 352913 - DNA, 25 bp, Artificial
  probe
  misc_feature (1)..(25): SEQ ID NO: 3345; WAN024DDQ; Start 332; Stop 356
ttgctgatttggttgatggagtatt

SEQ ID NO: 352914 - DNA, 25 bp, Artificial
  probe
  misc_feature (1)..(25): SEQ ID NO: 3345; WAN024DDQ; Start 331; Stop 355
tttgctgatttggttgatggagtat

SEQ ID NO: 352915 - DNA, 25 bp, Artificial
  probe
  misc_feature (1)..(25): SEQ ID NO: 3345; WAN024DDQ; Start 204; Stop 228
gttgtctgatatgattacaggagat

SEQ ID NO: 352916 - DNA, 25 bp, Artificial
  probe
  misc_feature (1)..(25): SEQ ID NO: 3347; WAN024BED; Start 58; Stop 82
agttttctagtttgccctttgattt

SEQ ID NO: 352917 - DNA, 25 bp, Artificial
  probe
  misc_feature (1)..(25): SEQ ID NO: 3347; WAN024BED; Start 70; Stop 94
tgccctttgattttcattgagtatc

SEQ ID NO: 352918 - DNA, 25 bp, Artificial
  probe
  misc_feature (1)..(25): SEQ ID NO: 3347; WAN024BED; Start 68; Stop 92
tttgccctttgattttcattgagta

SEQ ID NO: 352919 - DNA, 25 bp, Artificial
  probe
  misc_feature (1)..(25): SEQ ID NO: 3347; WAN024BED; Start 65; Stop 89
tagtttgccctttgattttcattga

SEQ ID NO: 352920 - DNA, 25 bp, Artificial
  probe
  misc_feature (1)..(25): SEQ ID NO: 3347; WAN024BED; Start 69; Stop 93
ttgccctttgattttcattgagtat

SEQ ID NO: 352921 - DNA, 25 bp, Artificial
  probe
  misc_feature (1)..(25): SEQ ID NO: 3347; WAN024BED; Start 66; Stop 90
agtttgccctttgattttcattgag

SEQ ID NO: 352922 - DNA, 25 bp, Artificial
  probe
  misc_feature (1)..(25): SEQ ID NO: 3347; WAN024BED; Start 59; Stop 83
gttttctagtttgccctttgatttt

SEQ ID NO: 352923 - DNA, 25 bp, Artificial
  probe
  misc_feature (1)..(25): SEQ ID NO: 3347; WAN024BED; Start 67; Stop 91
gtttgccctttgattttcattgagt

SEQ ID NO: 352924 - DNA, 25 bp, Artificial
  probe
  misc_feature (1)..(25): SEQ ID NO: 3347; WAN024BED; Start 57; Stop 81
tagttttctagtttgccctttgatt

SEQ ID NO: 352925 - DNA, 25 bp, Artificial
  probe
  misc_feature (1)..(25): SEQ ID NO: 3347; WAN024BED; Start 60; Stop 84
ttttctagtttgccctttgattttc

SEQ ID NO: 352926 - DNA, 25 bp, Artificial
  probe
  misc_feature (1)..(25): SEQ ID NO: 3347; WAN024BED; Start 61; Stop 85
tttctagtttgccctttgattttca

SEQ ID NO: 352927 - DNA, 25 bp, Artificial
  probe
  misc_feature (1)..(25): SEQ ID NO: 3347; WAN024BED; Start 64; Stop 88
ctagtttgccctttgattttcattg

SEQ ID NO: 352928 - DNA, 25 bp, Artificial
  probe
  misc_feature (1)..(25): SEQ ID NO: 3347; WAN024BED; Start 63; Stop 87
tctagtttgccctttgattttcatt

SEQ ID NO: 352929 - DNA, 25 bp, Artificial
  probe
  misc_feature (1)..(25): SEQ ID NO: 3347; WAN024BED; Start 62; Stop 86
ttctagtttgccctttgattttcat

SEQ ID NO: 352930 - DNA, 25 bp, Artificial
  probe
  misc_feature (1)..(25): SEQ ID NO: 3347; WAN024BED; Start 56; Stop 80
ctagttttctagtttgccctttgat

SEQ ID NO: 352931 - DNA, 25 bp, Artificial
  probe
  misc_feature (1)..(25): SEQ ID NO: 3347; WAN024BED; Start 55; Stop 79
gctagttttctagtttgccctttga

SEQ ID NO: 352932 - DNA, 25 bp, Artificial
  probe
  misc_feature (1)..(25): SEQ ID NO: 3347; WAN024BED; Start 71; Stop 95
gccctttgattttcattgagtatca

SEQ ID NO: 352933 - DNA, 25 bp, Artificial
  probe
  misc_feature (1)..(25): SEQ ID NO: 3347; WAN024BED; Start 47; Stop 71
aacctgcggctagttttctagtttg

SEQ ID NO: 352934 - DNA, 25 bp, Artificial
  probe
  misc_feature (1)..(25): SEQ ID NO: 3347; WAN024BED; Start 46; Stop 70
caacctgcggctagttttctagttt

SEQ ID NO: 352935 - DNA, 25 bp, Artificial
  probe
  misc_feature (1)..(25): SEQ ID NO: 3347; WAN024BED; Start 54; Stop 78
ggctagttttctagtttgccctttg

SEQ ID NO: 352936 - DNA, 25 bp, Artificial
  probe
  misc_feature (1)..(25): SEQ ID NO: 3347; WAN024BED; Start 53; Stop 77
cggctagttttctagtttgcccttt

SEQ ID NO: 352937 - DNA, 25 bp, Artificial
  probe
  misc_feature (1)..(25): SEQ ID NO: 3347; WAN024BED; Start 72; Stop 96
ccctttgattttcattgagtatcaa

SEQ ID NO: 352938 - DNA, 25 bp, Artificial
  probe
  misc_feature (1)..(25): SEQ ID NO: 3348; WAN024BF5; Start 43; Stop 67
gagcaacctgtgactagctttctaa

SEQ ID NO: 352939 - DNA, 25 bp, Artificial
  probe
  misc_feature (1)..(25): SEQ ID NO: 3348; WAN024BF5; Start 35; Stop 59
agtgttttgagcaacctgtgactag

SEQ ID NO: 352940 - DNA, 25 bp, Artificial
  probe
  misc_feature (1)..(25): SEQ ID NO: 3348; WAN024BF5; Start 42; Stop 66
tgagcaacctgtgactagctttcta

SEQ ID NO: 352941 - DNA, 25 bp, Artificial
  probe
  misc_feature (1)..(25): SEQ ID NO: 3348; WAN024BF5; Start 40; Stop 64
tttgagcaacctgtgactagctttc

SEQ ID NO: 352942 - DNA, 25 bp, Artificial
  probe
  misc_feature (1)..(25): SEQ ID NO: 3348; WAN024BF5; Start 34; Stop 58
cagtgttttgagcaacctgtgacta

SEQ ID NO: 352943 - DNA, 25 bp, Artificial
  probe
  misc_feature (1)..(25): SEQ ID NO: 3348; WAN024BF5; Start 41; Stop 65
ttgagcaacctgtgactagctttct

SEQ ID NO: 352944 - DNA, 25 bp, Artificial
  probe
  misc_feature (1)..(25): SEQ ID NO: 3348; WAN024BF5; Start 36; Stop 60
gtgttttgagcaacctgtgactagc

SEQ ID NO: 352945 - DNA, 25 bp, Artificial
  probe
  misc_feature (1)..(25): SEQ ID NO: 3348; WAN024BF5; Start 39; Stop 63
ttttgagcaacctgtgactagcttt

SEQ ID NO: 352946 - DNA, 25 bp, Artificial
  probe
  misc_feature (1)..(25): SEQ ID NO: 3348; WAN024BF5; Start 38; Stop 62
gttttgagcaacctgtgactagctt

SEQ ID NO: 352947 - DNA, 25 bp, Artificial
  probe
  misc_feature (1)..(25): SEQ ID NO: 3348; WAN024BF5; Start 37; Stop 61
tgttttgagcaacctgtgactagct

SEQ ID NO: 352948 - DNA, 25 bp, Artificial
  probe
  misc_feature (1)..(25): SEQ ID NO: 3348; WAN024BF5; Start 108; Stop 132
attttctcctgaaaagcatatagag

SEQ ID NO: 352949 - DNA, 25 bp, Artificial
  probe
  misc_feature (1)..(25): SEQ ID NO: 3348; WAN024BF5; Start 104; Stop 128
agaaattttctcctgaaaagcatat

SEQ ID NO: 352950 - DNA, 25 bp, Artificial
  probe
  misc_feature (1)..(25): SEQ ID NO: 3348; WAN024BF5; Start 107; Stop 131
aattttctcctgaaaagcatataga

SEQ ID NO: 352951 - DNA, 25 bp, Artificial
  probe
  misc_feature (1)..(25): SEQ ID NO: 3348; WAN024BF5; Start 31; Stop 55
aaacagtgttttgagcaacctgtga

SEQ ID NO: 352952 - DNA, 25 bp, Artificial
  probe
  misc_feature (1)..(25): SEQ ID NO: 3348; WAN024BF5; Start 32; Stop 56
aacagtgttttgagcaacctgtgac

SEQ ID NO: 352953 - DNA, 25 bp, Artificial
  probe
  misc_feature (1)..(25): SEQ ID NO: 3348; WAN024BF5; Start 106; Stop 130
aaattttctcctgaaaagcatatag

SEQ ID NO: 352954 - DNA, 25 bp, Artificial
  probe
  misc_feature (1)..(25): SEQ ID NO: 3348; WAN024BF5; Start 105; Stop 129
gaaattttctcctgaaaagcatata

SEQ ID NO: 352955 - DNA, 25 bp, Artificial
  probe
  misc_feature (1)..(25): SEQ ID NO: 3348; WAN024BF5; Start 30; Stop 54
aaaacagtgttttgagcaacctgtg

SEQ ID NO: 352956 - DNA, 25 bp, Artificial
  probe
  misc_feature (1)..(25): SEQ ID NO: 3348; WAN024BF5; Start 33; Stop 57
acagtgttttgagcaacctgtgact

SEQ ID NO: 352957 - DNA, 25 bp, Artificial
  probe
  misc_feature (1)..(25): SEQ ID NO: 3349; WAN024DMQ; Start 102; Stop 126
tcaattattgcgtttacaagaagaa

SEQ ID NO: 352958 - DNA, 25 bp, Artificial
  probe
  misc_feature (1)..(25): SEQ ID NO: 3349; WAN024DMQ; Start 101; Stop 125
atcaattattgcgtttacaagaaga

SEQ ID NO: 352959 - DNA, 25 bp, Artificial
  probe
  misc_feature (1)..(25): SEQ ID NO: 3349; WAN024DMQ; Start 119; Stop 143
aagaagaaaaggaaaggaagaatgc

SEQ ID NO: 352960 - DNA, 25 bp, Artificial
  probe
  misc_feature (1)..(25): SEQ ID NO: 3349; WAN024DMQ; Start 103; Stop 127
caattattgcgtttacaagaagaaa

SEQ ID NO: 352961 - DNA, 25 bp, Artificial
  probe
  misc_feature (1)..(25): SEQ ID NO: 3349; WAN024DMQ; Start 112; Stop 136
cgtttacaagaagaaaaggaaagga

SEQ ID NO: 352962 - DNA, 25 bp, Artificial
  probe
  misc_feature (1)..(25): SEQ ID NO: 3349; WAN024DMQ; Start 110; Stop 134
tgcgtttacaagaagaaaaggaaag

SEQ ID NO: 352963 - DNA, 25 bp, Artificial
  probe
  misc_feature (1)..(25): SEQ ID NO: 3349; WAN024DMQ; Start 100; Stop 124
aatcaattattgcgtttacaagaag

SEQ ID NO: 352964 - DNA, 25 bp, Artificial
  probe
  misc_feature (1)..(25): SEQ ID NO: 3349; WAN024DMQ; Start 111; Stop 135
gcgtttacaagaagaaaaggaaagg

SEQ ID NO: 352965 - DNA, 25 bp, Artificial
  probe
  misc_feature (1)..(25): SEQ ID NO: 3349; WAN024DMQ; Start 117; Stop 141
acaagaagaaaaggaaaggaagaat

SEQ ID NO: 352966 - DNA, 25 bp, Artificial
  probe
  misc_feature (1)..(25): SEQ ID NO: 3349; WAN024DMQ; Start 109; Stop 133
ttgcgtttacaagaagaaaaggaaa

SEQ ID NO: 352967 - DNA, 25 bp, Artificial
  probe
  misc_feature (1)..(25): SEQ ID NO: 3349; WAN024DMQ; Start 108; Stop 132
attgcgtttacaagaagaaaaggaa

SEQ ID NO: 352968 - DNA, 25 bp, Artificial
  probe
  misc_feature (1)..(25): SEQ ID NO: 3349; WAN024DMQ; Start 118; Stop 142
caagaagaaaaggaaaggaagaatg

SEQ ID NO: 352969 - DNA, 25 bp, Artificial
  probe
  misc_feature (1)..(25): SEQ ID NO: 3349; WAN024DMQ; Start 5; Stop 29
cttgcttcaaaggtgataaaatgga

SEQ ID NO: 352970 - DNA, 25 bp, Artificial
  probe
  misc_feature (1)..(25): SEQ ID NO: 3349; WAN024DMQ; Start 1; Stop 25
ctgacttgcttcaaaggtgataaaa

SEQ ID NO: 352971 - DNA, 25 bp, Artificial
  probe
  misc_feature (1)..(25): SEQ ID NO: 3349; WAN024DMQ; Start 107; Stop 131
tattgcgtttacaagaagaaaagga

SEQ ID NO: 352972 - DNA, 25 bp, Artificial
  probe
  misc_feature (1)..(25): SEQ ID NO: 3349; WAN024DMQ; Start 4; Stop 28
acttgcttcaaaggtgataaaatgg

SEQ ID NO: 352973 - DNA, 25 bp, Artificial
  probe
  misc_feature (1)..(25): SEQ ID NO: 3349; WAN024DMQ; Start 7; Stop 31
tgcttcaaaggtgataaaatggaaa

SEQ ID NO: 352974 - DNA, 25 bp, Artificial
  probe
  misc_feature (1)..(25): SEQ ID NO: 3349; WAN024DMQ; Start 6; Stop 30
ttgcttcaaaggtgataaaatggaa

SEQ ID NO: 352975 - DNA, 25 bp, Artificial
  probe
  misc_feature (1)..(25): SEQ ID NO: 3349; WAN024DMQ; Start 2; Stop 26
tgacttgcttcaaaggtgataaaat

SEQ ID NO: 352976 - DNA, 25 bp, Artificial
  probe
  misc_feature (1)..(25): SEQ ID NO: 3349; WAN024DMQ; Start 3; Stop 27
gacttgcttcaaaggtgataaaatg

SEQ ID NO: 352977 - DNA, 25 bp, Artificial
  probe
  misc_feature (1)..(25): SEQ ID NO: 3349; WAN024DMQ; Start 120; Stop 144
agaagaaaaggaaaggaagaatgcg

SEQ ID NO: 352978 - DNA, 25 bp, Artificial
  probe
  misc_feature (1)..(25): SEQ ID NO: 3349; WAN024DMQ; Start 116; Stop 140
tacaagaagaaaaggaaaggaagaa

SEQ ID NO: 352979 - DNA, 25 bp, Artificial
  probe
  misc_feature (1)..(25): SEQ ID NO: 3349; WAN024DMQ; Start 115; Stop 139
ttacaagaagaaaaggaaaggaaga

SEQ ID NO: 352980 - DNA, 25 bp, Artificial
  probe
  misc_feature (1)..(25): SEQ ID NO: 3349; WAN024DMQ; Start 106; Stop 130
ttattgcgtttacaagaagaaaagg

SEQ ID NO: 352981 - DNA, 25 bp, Artificial
  probe
  misc_feature (1)..(25): SEQ ID NO: 3349; WAN024DMQ; Start 99; Stop 123
aaatcaattattgcgtttacaagaa

SEQ ID NO: 352982 - DNA, 25 bp, Artificial
  probe
  misc_feature (1)..(25): SEQ ID NO: 3349; WAN024DMQ; Start 8; Stop 32
gcttcaaaggtgataaaatggaaaa

SEQ ID NO: 352983 - DNA, 25 bp, Artificial
  probe
  misc_feature (1)..(25): SEQ ID NO: 3349; WAN024DMQ; Start 75; Stop 99
aaagctggaagaattggctgataaa

SEQ ID NO: 352984 - DNA, 25 bp, Artificial
  probe
  misc_feature (1)..(25): SEQ ID NO: 3349; WAN024DMQ; Start 113; Stop 137
gtttacaagaagaaaaggaaaggaa

SEQ ID NO: 352985 - DNA, 25 bp, Artificial
  probe
  misc_feature (1)..(25): SEQ ID NO: 3349; WAN024DMQ; Start 114; Stop 138
tttacaagaagaaaaggaaaggaag

SEQ ID NO: 352986 - DNA, 25 bp, Artificial
  probe
  misc_feature (1)..(25): SEQ ID NO: 3349; WAN024DMQ; Start 129; Stop 153
ggaaaggaagaatgcgctaactaat

SEQ ID NO: 352987 - DNA, 25 bp, Artificial
  probe
  misc_feature (1)..(25): SEQ ID NO: 3349; WAN024DMQ; Start 57; Stop 81
tttgagtttgtcagatgaaaagctg

SEQ ID NO: 352988 - DNA, 25 bp, Artificial
  probe
  misc_feature (1)..(25): SEQ ID NO: 3349; WAN024DMQ; Start 66; Stop 90
gtcagatgaaaagctggaagaattg

SEQ ID NO: 352989 - DNA, 25 bp, Artificial
  probe
  misc_feature (1)..(25): SEQ ID NO: 3349; WAN024DMQ; Start 56; Stop 80
ttttgagtttgtcagatgaaaagct

SEQ ID NO: 352990 - DNA, 25 bp, Artificial
  probe
  misc_feature (1)..(25): SEQ ID NO: 3350; WAN024F7K; Start 40; Stop 64
ttcctatctattgacaagcatagtc

SEQ ID NO: 352991 - DNA, 25 bp, Artificial
  probe
  misc_feature (1)..(25): SEQ ID NO: 3350; WAN024F7K; Start 36; Stop 60
tgatttcctatctattgacaagcat

SEQ ID NO: 352992 - DNA, 25 bp, Artificial
  probe
  misc_feature (1)..(25): SEQ ID NO: 3350; WAN024F7K; Start 35; Stop 59
ttgatttcctatctattgacaagca

SEQ ID NO: 352993 - DNA, 25 bp, Artificial
  probe
  misc_feature (1)..(25): SEQ ID NO: 3350; WAN024F7K; Start 34; Stop 58
tttgatttcctatctattgacaagc

SEQ ID NO: 352994 - DNA, 25 bp, Artificial
  probe
  misc_feature (1)..(25): SEQ ID NO: 3350; WAN024F7K; Start 39; Stop 63
tttcctatctattgacaagcatagt

SEQ ID NO: 352995 - DNA, 25 bp, Artificial
  probe
  misc_feature (1)..(25): SEQ ID NO: 3350; WAN024F7K; Start 92; Stop 116
ctcttcaaaccacgttagctctatc

SEQ ID NO: 352996 - DNA, 25 bp, Artificial
  probe
  misc_feature (1)..(25): SEQ ID NO: 3350; WAN024F7K; Start 94; Stop 118
cttcaaaccacgttagctctatctg

SEQ ID NO: 352997 - DNA, 25 bp, Artificial
  probe
  misc_feature (1)..(25): SEQ ID NO: 3350; WAN024F7K; Start 93; Stop 117
tcttcaaaccacgttagctctatct

SEQ ID NO: 352998 - DNA, 25 bp, Artificial
  probe
  misc_feature (1)..(25): SEQ ID NO: 3350; WAN024F7K; Start 91; Stop 115
tctcttcaaaccacgttagctctat

SEQ ID NO: 352999 - DNA, 25 bp, Artificial
  probe
  misc_feature (1)..(25): SEQ ID NO: 3350; WAN024F7K; Start 90; Stop 114
atctcttcaaaccacgttagctcta

SEQ ID NO: 353000 - DNA, 25 bp, Artificial
  probe
  misc_feature (1)..(25): SEQ ID NO: 3350; WAN024F7K; Start 88; Stop 112
aaatctcttcaaaccacgttagctc

SEQ ID NO: 353001 - DNA, 25 bp, Artificial
  probe
  misc_feature (1)..(25): SEQ ID NO: 3350; WAN024F7K; Start 37; Stop 61
gatttcctatctattgacaagcata

SEQ ID NO: 353002 - DNA, 25 bp, Artificial
  probe
  misc_feature (1)..(25): SEQ ID NO: 3350; WAN024F7K; Start 89; Stop 113
aatctcttcaaaccacgttagctct

SEQ ID NO: 353003 - DNA, 25 bp, Artificial
  probe
  misc_feature (1)..(25): SEQ ID NO: 3350; WAN024F7K; Start 41; Stop 65
tcctatctattgacaagcatagtca

SEQ ID NO: 353004 - DNA, 25 bp, Artificial
  probe
  misc_feature (1)..(25): SEQ ID NO: 3350; WAN024F7K; Start 38; Stop 62
atttcctatctattgacaagcatag

SEQ ID NO: 353005 - DNA, 25 bp, Artificial
  probe
  misc_feature (1)..(25): SEQ ID NO: 3350; WAN024F7K; Start 86; Stop 110
gaaaatctcttcaaaccacgttagc

SEQ ID NO: 353006 - DNA, 25 bp, Artificial
  probe
  misc_feature (1)..(25): SEQ ID NO: 3350; WAN024F7K; Start 87; Stop 111
aaaatctcttcaaaccacgttagct

SEQ ID NO: 353007 - DNA, 25 bp, Artificial
  probe
  misc_feature (1)..(25): SEQ ID NO: 3350; WAN024F7K; Start 23; Stop 47
cataccttcattttgatttcctatc

SEQ ID NO: 353008 - DNA, 25 bp, Artificial
  probe
  misc_feature (1)..(25): SEQ ID NO: 3350; WAN024F7K; Start 26; Stop 50
accttcattttgatttcctatctat

SEQ ID NO: 353009 - DNA, 25 bp, Artificial
  probe
  misc_feature (1)..(25): SEQ ID NO: 3350; WAN024F7K; Start 24; Stop 48
ataccttcattttgatttcctatct

SEQ ID NO: 353010 - DNA, 25 bp, Artificial
  probe
  misc_feature (1)..(25): SEQ ID NO: 3350; WAN024F7K; Start 31; Stop 55
cattttgatttcctatctattgaca

SEQ ID NO: 353011 - DNA, 25 bp, Artificial
  probe
  misc_feature (1)..(25): SEQ ID NO: 3350; WAN024F7K; Start 170; Stop 194
ctttgattttcattgagtataaggt

SEQ ID NO: 353012 - DNA, 25 bp, Artificial
  probe
  misc_feature (1)..(25): SEQ ID NO: 3350; WAN024F7K; Start 33; Stop 57
ttttgatttcctatctattgacaag

SEQ ID NO: 353013 - DNA, 25 bp, Artificial
  probe
  misc_feature (1)..(25): SEQ ID NO: 3350; WAN024F7K; Start 25; Stop 49
taccttcattttgatttcctatcta

SEQ ID NO: 353014 - DNA, 25 bp, Artificial
  probe
  misc_feature (1)..(25): SEQ ID NO: 3350; WAN024F7K; Start 30; Stop 54
tcattttgatttcctatctattgac

SEQ ID NO: 353015 - DNA, 25 bp, Artificial
  probe
  misc_feature (1)..(25): SEQ ID NO: 3350; WAN024F7K; Start 27; Stop 51
ccttcattttgatttcctatctatt

SEQ ID NO: 353016 - DNA, 25 bp, Artificial
  probe
  misc_feature (1)..(25): SEQ ID NO: 3350; WAN024F7K; Start 67; Stop 91
actgtctttaatactcttcgaaaat

SEQ ID NO: 353017 - DNA, 25 bp, Artificial
  probe
  misc_feature (1)..(25): SEQ ID NO: 3350; WAN024F7K; Start 69; Stop 93
tgtctttaatactcttcgaaaatct

SEQ ID NO: 353018 - DNA, 25 bp, Artificial
  probe
  misc_feature (1)..(25): SEQ ID NO: 3350; WAN024F7K; Start 68; Stop 92
ctgtctttaatactcttcgaaaatc

SEQ ID NO: 353019 - DNA, 25 bp, Artificial
  probe
  misc_feature (1)..(25): SEQ ID NO: 3350; WAN024F7K; Start 70; Stop 94
gtctttaatactcttcgaaaatctc

SEQ ID NO: 353020 - DNA, 25 bp, Artificial
  probe
  misc_feature (1)..(25): SEQ ID NO: 3351; WAN024CMY; Start 54; Stop 78
agacttgctaagagatagagtaggt

SEQ ID NO: 353021 - DNA, 25 bp, Artificial
  probe
  misc_feature (1)..(25): SEQ ID NO: 3351; WAN024CMY; Start 53; Stop 77
cagacttgctaagagatagagtagg

SEQ ID NO: 353022 - DNA, 25 bp, Artificial
  probe
  misc_feature (1)..(25): SEQ ID NO: 3351; WAN024CMY; Start 52; Stop 76
acagacttgctaagagatagagtag

SEQ ID NO: 353023 - DNA, 25 bp, Artificial
  probe
  misc_feature (1)..(25): SEQ ID NO: 3351; WAN024CMY; Start 51; Stop 75
aacagacttgctaagagatagagta

SEQ ID NO: 353024 - DNA, 25 bp, Artificial
  probe
  misc_feature (1)..(25): SEQ ID NO: 3351; WAN024CMY; Start 55; Stop 79
gacttgctaagagatagagtaggta

SEQ ID NO: 353025 - DNA, 25 bp, Artificial
  probe
  misc_feature (1)..(25): SEQ ID NO: 3351; WAN024CMY; Start 56; Stop 80
acttgctaagagatagagtaggtaa

SEQ ID NO: 353026 - DNA, 25 bp, Artificial
  probe
  misc_feature (1)..(25): SEQ ID NO: 3351; WAN024CMY; Start 26; Stop 50
gagatgctttgaacttgcttaatga

SEQ ID NO: 353027 - DNA, 25 bp, Artificial
  probe
  misc_feature (1)..(25): SEQ ID NO: 3351; WAN024CMY; Start 39; Stop 63
cttgcttaatgaaacagacttgcta

SEQ ID NO: 353028 - DNA, 25 bp, Artificial
  probe
  misc_feature (1)..(25): SEQ ID NO: 3351; WAN024CMY; Start 31; Stop 55
gctttgaacttgcttaatgaaacag

SEQ ID NO: 353029 - DNA, 25 bp, Artificial
  probe
  misc_feature (1)..(25): SEQ ID NO: 3351; WAN024CMY; Start 27; Stop 51
agatgctttgaacttgcttaatgaa

SEQ ID NO: 353030 - DNA, 25 bp, Artificial
  probe
  misc_feature (1)..(25): SEQ ID NO: 3351; WAN024CMY; Start 30; Stop 54
tgctttgaacttgcttaatgaaaca

SEQ ID NO: 353031 - DNA, 25 bp, Artificial
  probe
  misc_feature (1)..(25): SEQ ID NO: 3351; WAN024CMY; Start 40; Stop 64
ttgcttaatgaaacagacttgctaa

SEQ ID NO: 353032 - DNA, 25 bp, Artificial
  probe
  misc_feature (1)..(25): SEQ ID NO: 3351; WAN024CMY; Start 35; Stop 59
tgaacttgcttaatgaaacagactt

SEQ ID NO: 353033 - DNA, 25 bp, Artificial
  probe
  misc_feature (1)..(25): SEQ ID NO: 3351; WAN024CMY; Start 34; Stop 58
ttgaacttgcttaatgaaacagact

SEQ ID NO: 353034 - DNA, 25 bp, Artificial
  probe
  misc_feature (1)..(25): SEQ ID NO: 3351; WAN024CMY; Start 29; Stop 53
atgctttgaacttgcttaatgaaac

SEQ ID NO: 353035 - DNA, 25 bp, Artificial
  probe
  misc_feature (1)..(25): SEQ ID NO: 3351; WAN024CMY; Start 37; Stop 61
aacttgcttaatgaaacagacttgc

SEQ ID NO: 353036 - DNA, 25 bp, Artificial
  probe
  misc_feature (1)..(25): SEQ ID NO: 3351; WAN024CMY; Start 36; Stop 60
gaacttgcttaatgaaacagacttg

SEQ ID NO: 353037 - DNA, 25 bp, Artificial
  probe
  misc_feature (1)..(25): SEQ ID NO: 3351; WAN024CMY; Start 22; Stop 46
ttacgagatgctttgaacttgctta

SEQ ID NO: 353038 - DNA, 25 bp, Artificial
  probe
  misc_feature (1)..(25): SEQ ID NO: 3351; WAN024CMY; Start 28; Stop 52
gatgctttgaacttgcttaatgaaa

SEQ ID NO: 353039 - DNA, 25 bp, Artificial
  probe
  misc_feature (1)..(25): SEQ ID NO: 3351; WAN024CMY; Start 23; Stop 47
tacgagatgctttgaacttgcttaa

SEQ ID NO: 353040 - DNA, 25 bp, Artificial
  probe
  misc_feature (1)..(25): SEQ ID NO: 3351; WAN024CMY; Start 48; Stop 72
tgaaacagacttgctaagagataga

SEQ ID NO: 353041 - DNA, 25 bp, Artificial
  probe
  misc_feature (1)..(25): SEQ ID NO: 3351; WAN024CMY; Start 33; Stop 57
tttgaacttgcttaatgaaacagac

SEQ ID NO: 353042 - DNA, 25 bp, Artificial
  probe
  misc_feature (1)..(25): SEQ ID NO: 3351; WAN024CMY; Start 25; Stop 49
cgagatgctttgaacttgcttaatg

SEQ ID NO: 353043 - DNA, 25 bp, Artificial
  probe
  misc_feature (1)..(25): SEQ ID NO: 3351; WAN024CMY; Start 71; Stop 95
gagtaggtaaatgtgaactgggtaa

SEQ ID NO: 353044 - DNA, 25 bp, Artificial
  probe
  misc_feature (1)..(25): SEQ ID NO: 3351; WAN024CMY; Start 49; Stop 73
gaaacagacttgctaagagatagag

SEQ ID NO: 353045 - DNA, 25 bp, Artificial
  probe
  misc_feature (1)..(25): SEQ ID NO: 3351; WAN024CMY; Start 38; Stop 62
acttgcttaatgaaacagacttgct

SEQ ID NO: 353046 - DNA, 25 bp, Artificial
  probe
  misc_feature (1)..(25): SEQ ID NO: 3351; WAN024CMY; Start 72; Stop 96
agtaggtaaatgtgaactgggtaaa

SEQ ID NO: 353047 - DNA, 25 bp, Artificial
  probe
  misc_feature (1)..(25): SEQ ID NO: 3351; WAN024CMY; Start 68; Stop 92
atagagtaggtaaatgtgaactggg

SEQ ID NO: 353048 - DNA, 25 bp, Artificial
  probe
  misc_feature (1)..(25): SEQ ID NO: 3351; WAN024CMY; Start 70; Stop 94
agagtaggtaaatgtgaactgggta

SEQ ID NO: 353049 - DNA, 25 bp, Artificial
  probe
  misc_feature (1)..(25): SEQ ID NO: 3351; WAN024CMY; Start 69; Stop 93
tagagtaggtaaatgtgaactgggt

SEQ ID NO: 353050 - DNA, 25 bp, Artificial
  probe
  misc_feature (1)..(25): SEQ ID NO: 3351; WAN024CMY; Start 32; Stop 56
ctttgaacttgcttaatgaaacaga

SEQ ID NO: 353051 - DNA, 25 bp, Artificial
  probe
  misc_feature (1)..(25): SEQ ID NO: 3351; WAN024CMY; Start 24; Stop 48
acgagatgctttgaacttgcttaat

SEQ ID NO: 353052 - DNA, 25 bp, Artificial
  probe
  misc_feature (1)..(25): SEQ ID NO: 3351; WAN024CMY; Start 50; Stop 74
aaacagacttgctaagagatagagt

SEQ ID NO: 353053 - DNA, 25 bp, Artificial
  probe
  misc_feature (1)..(25): SEQ ID NO: 3352; WAN024DHU; Start 242; Stop 266
acggcataggcttatctttcttatt

SEQ ID NO: 353054 - DNA, 25 bp, Artificial
  probe
  misc_feature (1)..(25): SEQ ID NO: 3352; WAN024DHU; Start 534; Stop 558
taactggataatgggtggctactat

SEQ ID NO: 353055 - DNA, 25 bp, Artificial
  probe
  misc_feature (1)..(25): SEQ ID NO: 3352; WAN024DHU; Start 241; Stop 265
tacggcataggcttatctttcttat

SEQ ID NO: 353056 - DNA, 25 bp, Artificial
  probe
  misc_feature (1)..(25): SEQ ID NO: 3352; WAN024DHU; Start 523; Stop 547
ctgactcagattaactggataatgg

SEQ ID NO: 353057 - DNA, 25 bp, Artificial
  probe
  misc_feature (1)..(25): SEQ ID NO: 3352; WAN024DHU; Start 522; Stop 546
cctgactcagattaactggataatg

SEQ ID NO: 353058 - DNA, 25 bp, Artificial
  probe
  misc_feature (1)..(25): SEQ ID NO: 3352; WAN024DHU; Start 533; Stop 557
ttaactggataatgggtggctacta

SEQ ID NO: 353059 - DNA, 25 bp, Artificial
  probe
  misc_feature (1)..(25): SEQ ID NO: 3352; WAN024DHU; Start 531; Stop 555
gattaactggataatgggtggctac

SEQ ID NO: 353060 - DNA, 25 bp, Artificial
  probe
  misc_feature (1)..(25): SEQ ID NO: 3352; WAN024DHU; Start 530; Stop 554
agattaactggataatgggtggcta

SEQ ID NO: 353061 - DNA, 25 bp, Artificial
  probe
  misc_feature (1)..(25): SEQ ID NO: 3352; WAN024DHU; Start 240; Stop 264
gtacggcataggcttatctttctta

SEQ ID NO: 353062 - DNA, 25 bp, Artificial
  probe
  misc_feature (1)..(25): SEQ ID NO: 3352; WAN024DHU; Start 532; Stop 556
attaactggataatgggtggctact

SEQ ID NO: 353063 - DNA, 25 bp, Artificial
  probe
  misc_feature (1)..(25): SEQ ID NO: 3352; WAN024DHU; Start 526; Stop 550
actcagattaactggataatgggtg

SEQ ID NO: 353064 - DNA, 25 bp, Artificial
  probe
  misc_feature (1)..(25): SEQ ID NO: 3352; WAN024DHU; Start 525; Stop 549
gactcagattaactggataatgggt

SEQ ID NO: 353065 - DNA, 25 bp, Artificial
  probe
  misc_feature (1)..(25): SEQ ID NO: 3352; WAN024DHU; Start 524; Stop 548
tgactcagattaactggataatggg

SEQ ID NO: 353066 - DNA, 25 bp, Artificial
  probe
  misc_feature (1)..(25): SEQ ID NO: 3352; WAN024DHU; Start 527; Stop 551
ctcagattaactggataatgggtgg

SEQ ID NO: 353067 - DNA, 25 bp, Artificial
  probe
  misc_feature (1)..(25): SEQ ID NO: 3352; WAN024DHU; Start 237; Stop 261
cttgtacggcataggcttatctttc

SEQ ID NO: 353068 - DNA, 25 bp, Artificial
  probe
  misc_feature (1)..(25): SEQ ID NO: 3352; WAN024DHU; Start 369; Stop 393
tttgggacaagggcaagtatatgat

SEQ ID NO: 353069 - DNA, 25 bp, Artificial
  probe
  misc_feature (1)..(25): SEQ ID NO: 3352; WAN024DHU; Start 239; Stop 263
tgtacggcataggcttatctttctt

SEQ ID NO: 353070 - DNA, 25 bp, Artificial
  probe
  misc_feature (1)..(25): SEQ ID NO: 3352; WAN024DHU; Start 238; Stop 262
ttgtacggcataggcttatctttct

SEQ ID NO: 353071 - DNA, 25 bp, Artificial
  probe
  misc_feature (1)..(25): SEQ ID NO: 3352; WAN024DHU; Start 752; Stop 776
atagtcggcatatagaggagcttta

SEQ ID NO: 353072 - DNA, 25 bp, Artificial
  probe
  misc_feature (1)..(25): SEQ ID NO: 3352; WAN024DHU; Start 20; Stop 44
acactgagctaggagaatttatgaa

SEQ ID NO: 353073 - DNA, 25 bp, Artificial
  probe
  misc_feature (1)..(25): SEQ ID NO: 3352; WAN024DHU; Start 751; Stop 775
tatagtcggcatatagaggagcttt

SEQ ID NO: 353074 - DNA, 25 bp, Artificial
  probe
  misc_feature (1)..(25): SEQ ID NO: 3352; WAN024DHU; Start 521; Stop 545
ccctgactcagattaactggataat

SEQ ID NO: 353075 - DNA, 25 bp, Artificial
  probe
  misc_feature (1)..(25): SEQ ID NO: 3352; WAN024DHU; Start 19; Stop 43
tacactgagctaggagaatttatga

SEQ ID NO: 353076 - DNA, 25 bp, Artificial
  probe
  misc_feature (1)..(25): SEQ ID NO: 3352; WAN024DHU; Start 6; Stop 30
gccatcaataaattacactgagcta

SEQ ID NO: 353077 - DNA, 25 bp, Artificial
  probe
  misc_feature (1)..(25): SEQ ID NO: 3352; WAN024DHU; Start 370; Stop 394
ttgggacaagggcaagtatatgatg

SEQ ID NO: 353078 - DNA, 25 bp, Artificial
  probe
  misc_feature (1)..(25): SEQ ID NO: 3352; WAN024DHU; Start 520; Stop 544
tccctgactcagattaactggataa

SEQ ID NO: 353079 - DNA, 25 bp, Artificial
  probe
  misc_feature (1)..(25): SEQ ID NO: 3352; WAN024DHU; Start 614; Stop 638
ctgttcgccatctcatcctagtctt

SEQ ID NO: 353080 - DNA, 25 bp, Artificial
  probe
  misc_feature (1)..(25): SEQ ID NO: 3352; WAN024DHU; Start 519; Stop 543
gtccctgactcagattaactggata

SEQ ID NO: 353081 - DNA, 25 bp, Artificial
  probe
  misc_feature (1)..(25): SEQ ID NO: 3352; WAN024DHU; Start 18; Stop 42
ttacactgagctaggagaatttatg

SEQ ID NO: 353082 - DNA, 25 bp, Artificial
  probe
  misc_feature (1)..(25): SEQ ID NO: 3352; WAN024DHU; Start 11; Stop 35
caataaattacactgagctaggaga

SEQ ID NO: 353083 - DNA, 25 bp, Artificial
  probe
  misc_feature (1)..(25): SEQ ID NO: 3352; WAN024DHU; Start 529; Stop 553
cagattaactggataatgggtggct

SEQ ID NO: 353084 - DNA, 25 bp, Artificial
  probe
  misc_feature (1)..(25): SEQ ID NO: 3352; WAN024DHU; Start 528; Stop 552
tcagattaactggataatgggtggc

SEQ ID NO: 353085 - DNA, 25 bp, Artificial
  probe
  misc_feature (1)..(25): SEQ ID NO: 3352; WAN024DHU; Start 10; Stop 34
tcaataaattacactgagctaggag

SEQ ID NO: 353086 - DNA, 25 bp, Artificial
  probe
  misc_feature (1)..(25): SEQ ID NO: 3353; WAN024FXZ; Start 1109; Stop 1133
gtggtatgtcaatccttctctatgg

SEQ ID NO: 353087 - DNA, 25 bp, Artificial
  probe
  misc_feature (1)..(25): SEQ ID NO: 3353; WAN024FXZ; Start 1108; Stop 1132
ggtggtatgtcaatccttctctatg

SEQ ID NO: 353088 - DNA, 25 bp, Artificial
  probe
  misc_feature (1)..(25): SEQ ID NO: 3353; WAN024FXZ; Start 1107; Stop 1131
tggtggtatgtcaatccttctctat

SEQ ID NO: 353089 - DNA, 25 bp, Artificial
  probe
  misc_feature (1)..(25): SEQ ID NO: 3353; WAN024FXZ; Start 822; Stop 846
ttctgaacatatcggagaccatact

SEQ ID NO: 353090 - DNA, 25 bp, Artificial
  probe
  misc_feature (1)..(25): SEQ ID NO: 3353; WAN024FXZ; Start 1106; Stop 1130
ttggtggtatgtcaatccttctcta

SEQ ID NO: 353091 - DNA, 25 bp, Artificial
  probe
  misc_feature (1)..(25): SEQ ID NO: 3353; WAN024FXZ; Start 1305; Stop 1329
catcttgaacttgatcttgccatac

SEQ ID NO: 353092 - DNA, 25 bp, Artificial
  probe
  misc_feature (1)..(25): SEQ ID NO: 3353; WAN024FXZ; Start 1103; Stop 1127
tacttggtggtatgtcaatccttct

SEQ ID NO: 353093 - DNA, 25 bp, Artificial
  probe
  misc_feature (1)..(25): SEQ ID NO: 3353; WAN024FXZ; Start 823; Stop 847
tctgaacatatcggagaccatactg

SEQ ID NO: 353094 - DNA, 25 bp, Artificial
  probe
  misc_feature (1)..(25): SEQ ID NO: 3353; WAN024FXZ; Start 794; Stop 818
ctatcttgccaatcgctatcgtaac

SEQ ID NO: 353095 - DNA, 25 bp, Artificial
  probe
  misc_feature (1)..(25): SEQ ID NO: 3353; WAN024FXZ; Start 1304; Stop 1328
tcatcttgaacttgatcttgccata

SEQ ID NO: 353096 - DNA, 25 bp, Artificial
  probe
  misc_feature (1)..(25): SEQ ID NO: 3353; WAN024FXZ; Start 986; Stop 1010
ttatcggtatgactcgtatcgcttc

SEQ ID NO: 353097 - DNA, 25 bp, Artificial
  probe
  misc_feature (1)..(25): SEQ ID NO: 3353; WAN024FXZ; Start 1306; Stop 1330
atcttgaacttgatcttgccatacg

SEQ ID NO: 353098 - DNA, 25 bp, Artificial
  probe
  misc_feature (1)..(25): SEQ ID NO: 3353; WAN024FXZ; Start 1308; Stop 1332
cttgaacttgatcttgccatacgaa

SEQ ID NO: 353099 - DNA, 25 bp, Artificial
  probe
  misc_feature (1)..(25): SEQ ID NO: 3353; WAN024FXZ; Start 1102; Stop 1126
gtacttggtggtatgtcaatccttc

SEQ ID NO: 353100 - DNA, 25 bp, Artificial
  probe
  misc_feature (1)..(25): SEQ ID NO: 3353; WAN024FXZ; Start 795; Stop 819
tatcttgccaatcgctatcgtaaca

SEQ ID NO: 353101 - DNA, 25 bp, Artificial
  probe
  misc_feature (1)..(25): SEQ ID NO: 3353; WAN024FXZ; Start 1105; Stop 1129
cttggtggtatgtcaatccttctct

SEQ ID NO: 353102 - DNA, 25 bp, Artificial
  probe
  misc_feature (1)..(25): SEQ ID NO: 3353; WAN024FXZ; Start 985; Stop 1009
gttatcggtatgactcgtatcgctt

SEQ ID NO: 353103 - DNA, 25 bp, Artificial
  probe
  misc_feature (1)..(25): SEQ ID NO: 3353; WAN024FXZ; Start 824; Stop 848
ctgaacatatcggagaccatactgt

SEQ ID NO: 353104 - DNA, 25 bp, Artificial
  probe
  misc_feature (1)..(25): SEQ ID NO: 3353; WAN024FXZ; Start 1101; Stop 1125
tgtacttggtggtatgtcaatcctt

SEQ ID NO: 353105 - DNA, 25 bp, Artificial
  probe
  misc_feature (1)..(25): SEQ ID NO: 3353; WAN024FXZ; Start 1104; Stop 1128
acttggtggtatgtcaatccttctc

SEQ ID NO: 353106 - DNA, 25 bp, Artificial
  probe
  misc_feature (1)..(25): SEQ ID NO: 3353; WAN024FXZ; Start 798; Stop 822
cttgccaatcgctatcgtaacaatt

SEQ ID NO: 353107 - DNA, 25 bp, Artificial
  probe
  misc_feature (1)..(25): SEQ ID NO: 3353; WAN024FXZ; Start 1307; Stop 1331
tcttgaacttgatcttgccatacga

SEQ ID NO: 353108 - DNA, 25 bp, Artificial
  probe
  misc_feature (1)..(25): SEQ ID NO: 3353; WAN024FXZ; Start 1100; Stop 1124
ctgtacttggtggtatgtcaatcct

SEQ ID NO: 353109 - DNA, 25 bp, Artificial
  probe
  misc_feature (1)..(25): SEQ ID NO: 3353; WAN024FXZ; Start 1080; Stop 1104
gatttcaactattccaaacgctgta

SEQ ID NO: 353110 - DNA, 25 bp, Artificial
  probe
  misc_feature (1)..(25): SEQ ID NO: 3353; WAN024FXZ; Start 987; Stop 1011
tatcggtatgactcgtatcgcttct

SEQ ID NO: 353111 - DNA, 25 bp, Artificial
  probe
  misc_feature (1)..(25): SEQ ID NO: 3353; WAN024FXZ; Start 618; Stop 642
cattccattcctctttgccattatc

SEQ ID NO: 353112 - DNA, 25 bp, Artificial
  probe
  misc_feature (1)..(25): SEQ ID NO: 3353; WAN024FXZ; Start 606; Stop 630
cttcctacgaatcattccattcctc

SEQ ID NO: 353113 - DNA, 25 bp, Artificial
  probe
  misc_feature (1)..(25): SEQ ID NO: 3353; WAN024FXZ; Start 617; Stop 641
tcattccattcctctttgccattat

SEQ ID NO: 353114 - DNA, 25 bp, Artificial
  probe
  misc_feature (1)..(25): SEQ ID NO: 3353; WAN024FXZ; Start 616; Stop 640
atcattccattcctctttgccatta

SEQ ID NO: 353115 - DNA, 25 bp, Artificial
  probe
  misc_feature (1)..(25): SEQ ID NO: 3353; WAN024FXZ; Start 283; Stop 307
ggttcttcatttgcctttatcacag

SEQ ID NO: 353116 - DNA, 25 bp, Artificial
  probe
  misc_feature (1)..(25): SEQ ID NO: 3353; WAN024FXZ; Start 999; Stop 1023
tcgtatcgcttctgtctcagttatc

SEQ ID NO: 353117 - DNA, 25 bp, Artificial
  probe
  misc_feature (1)..(25): SEQ ID NO: 3353; WAN024FXZ; Start 998; Stop 1022
ctcgtatcgcttctgtctcagttat

SEQ ID NO: 353118 - DNA, 25 bp, Artificial
  probe
  misc_feature (1)..(25): SEQ ID NO: 3353; WAN024FXZ; Start 807; Stop 831
cgctatcgtaacaatttctgaacat

SEQ ID NO: 353119 - DNA, 25 bp, Artificial
  probe
  misc_feature (1)..(25): SEQ ID NO: 3354; WAN024GKB; Start 356; Stop 380
aaggttgtcaagagatggtaagatt

SEQ ID NO: 353120 - DNA, 25 bp, Artificial
  probe
  misc_feature (1)..(25): SEQ ID NO: 3354; WAN024GKB; Start 355; Stop 379
caaggttgtcaagagatggtaagat

SEQ ID NO: 353121 - DNA, 25 bp, Artificial
  probe
  misc_feature (1)..(25): SEQ ID NO: 3354; WAN024GKB; Start 560; Stop 584
aacttcctcttcttgaacttcttct

SEQ ID NO: 353122 - DNA, 25 bp, Artificial
  probe
  misc_feature (1)..(25): SEQ ID NO: 3354; WAN024GKB; Start 559; Stop 583
caacttcctcttcttgaacttcttc

SEQ ID NO: 353123 - DNA, 25 bp, Artificial
  probe
  misc_feature (1)..(25): SEQ ID NO: 3354; WAN024GKB; Start 558; Stop 582
acaacttcctcttcttgaacttctt

SEQ ID NO: 353124 - DNA, 25 bp, Artificial
  probe
  misc_feature (1)..(25): SEQ ID NO: 3354; WAN024GKB; Start 564; Stop 588
tcctcttcttgaacttcttctactt

SEQ ID NO: 353125 - DNA, 25 bp, Artificial
  probe
  misc_feature (1)..(25): SEQ ID NO: 3354; WAN024GKB; Start 563; Stop 587
ttcctcttcttgaacttcttctact

SEQ ID NO: 353126 - DNA, 25 bp, Artificial
  probe
  misc_feature (1)..(25): SEQ ID NO: 3354; WAN024GKB; Start 561; Stop 585
acttcctcttcttgaacttcttcta

SEQ ID NO: 353127 - DNA, 25 bp, Artificial
  probe
  misc_feature (1)..(25): SEQ ID NO: 3354; WAN024GKB; Start 360; Stop 384
ttgtcaagagatggtaagattgctt

SEQ ID NO: 353128 - DNA, 25 bp, Artificial
  probe
  misc_feature (1)..(25): SEQ ID NO: 3354; WAN024GKB; Start 357; Stop 381
aggttgtcaagagatggtaagattg

SEQ ID NO: 353129 - DNA, 25 bp, Artificial
  probe
  misc_feature (1)..(25): SEQ ID NO: 3354; WAN024GKB; Start 354; Stop 378
tcaaggttgtcaagagatggtaaga

SEQ ID NO: 353130 - DNA, 25 bp, Artificial
  probe
  misc_feature (1)..(25): SEQ ID NO: 3354; WAN024GKB; Start 565; Stop 589
cctcttcttgaacttcttctacttc

SEQ ID NO: 353131 - DNA, 25 bp, Artificial
  probe
  misc_feature (1)..(25): SEQ ID NO: 3354; WAN024GKB; Start 562; Stop 586
cttcctcttcttgaacttcttctac

SEQ ID NO: 353132 - DNA, 25 bp, Artificial
  probe
  misc_feature (1)..(25): SEQ ID NO: 3354; WAN024GKB; Start 557; Stop 581
cacaacttcctcttcttgaacttct

SEQ ID NO: 353133 - DNA, 25 bp, Artificial
  probe
  misc_feature (1)..(25): SEQ ID NO: 3354; WAN024GKB; Start 359; Stop 383
gttgtcaagagatggtaagattgct

SEQ ID NO: 353134 - DNA, 25 bp, Artificial
  probe
  misc_feature (1)..(25): SEQ ID NO: 3354; WAN024GKB; Start 353; Stop 377
ctcaaggttgtcaagagatggtaag

SEQ ID NO: 353135 - DNA, 25 bp, Artificial
  probe
  misc_feature (1)..(25): SEQ ID NO: 3354; WAN024GKB; Start 566; Stop 590
ctcttcttgaacttcttctacttct

SEQ ID NO: 353136 - DNA, 25 bp, Artificial
  probe
  misc_feature (1)..(25): SEQ ID NO: 3354; WAN024GKB; Start 358; Stop 382
ggttgtcaagagatggtaagattgc

SEQ ID NO: 353137 - DNA, 25 bp, Artificial
  probe
  misc_feature (1)..(25): SEQ ID NO: 3354; WAN024GKB; Start 567; Stop 591
tcttcttgaacttcttctacttctt

SEQ ID NO: 353138 - DNA, 25 bp, Artificial
  probe
  misc_feature (1)..(25): SEQ ID NO: 3354; WAN024GKB; Start 90; Stop 114
tagttatacaccactaccattgctg

SEQ ID NO: 353139 - DNA, 25 bp, Artificial
  probe
  misc_feature (1)..(25): SEQ ID NO: 3354; WAN024GKB; Start 89; Stop 113
ttagttatacaccactaccattgct

SEQ ID NO: 353140 - DNA, 25 bp, Artificial
  probe
  misc_feature (1)..(25): SEQ ID NO: 3354; WAN024GKB; Start 88; Stop 112
cttagttatacaccactaccattgc

SEQ ID NO: 353141 - DNA, 25 bp, Artificial
  probe
  misc_feature (1)..(25): SEQ ID NO: 3354; WAN024GKB; Start 568; Stop 592
cttcttgaacttcttctacttcttc

SEQ ID NO: 353142 - DNA, 25 bp, Artificial
  probe
  misc_feature (1)..(25): SEQ ID NO: 3354; WAN024GKB; Start 614; Stop 638
gttcgcctcctttaatgatttcaat

SEQ ID NO: 353143 - DNA, 25 bp, Artificial
  probe
  misc_feature (1)..(25): SEQ ID NO: 3354; WAN024GKB; Start 246; Stop 270
gcgatttcttcaattccttcttctt

SEQ ID NO: 353144 - DNA, 25 bp, Artificial
  probe
  misc_feature (1)..(25): SEQ ID NO: 3354; WAN024GKB; Start 244; Stop 268
ctgcgatttcttcaattccttcttc

SEQ ID NO: 353145 - DNA, 25 bp, Artificial
  probe
  misc_feature (1)..(25): SEQ ID NO: 3354; WAN024GKB; Start 213; Stop 237
atatggtagttatggtcaaattcgc

SEQ ID NO: 353146 - DNA, 25 bp, Artificial
  probe
  misc_feature (1)..(25): SEQ ID NO: 3354; WAN024GKB; Start 612; Stop 636
atgttcgcctcctttaatgatttca

SEQ ID NO: 353147 - DNA, 25 bp, Artificial
  probe
  misc_feature (1)..(25): SEQ ID NO: 3354; WAN024GKB; Start 214; Stop 238
tatggtagttatggtcaaattcgcc

SEQ ID NO: 353148 - DNA, 25 bp, Artificial
  probe
  misc_feature (1)..(25): SEQ ID NO: 3354; WAN024GKB; Start 617; Stop 641
cgcctcctttaatgatttcaatctt

SEQ ID NO: 353149 - DNA, 25 bp, Artificial
  probe
  misc_feature (1)..(25): SEQ ID NO: 3354; WAN024GKB; Start 615; Stop 639
ttcgcctcctttaatgatttcaatc

SEQ ID NO: 353150 - DNA, 25 bp, Artificial
  probe
  misc_feature (1)..(25): SEQ ID NO: 3354; WAN024GKB; Start 245; Stop 269
tgcgatttcttcaattccttcttct

SEQ ID NO: 353151 - DNA, 25 bp, Artificial
  probe
  misc_feature (1)..(25): SEQ ID NO: 3354; WAN024GKB; Start 616; Stop 640
tcgcctcctttaatgatttcaatct

SEQ ID NO: 353152 - DNA, 25 bp, Artificial
  probe
  misc_feature (1)..(25): SEQ ID NO: 3355; WAN024DMX; Start 28; Stop 52
cgctatattatcactcaacttgaac

SEQ ID NO: 353153 - DNA, 25 bp, Artificial
  probe
  misc_feature (1)..(25): SEQ ID NO: 3355; WAN024DMX; Start 27; Stop 51
tcgctatattatcactcaacttgaa

SEQ ID NO: 353154 - DNA, 25 bp, Artificial
  probe
  misc_feature (1)..(25): SEQ ID NO: 3355; WAN024DMX; Start 26; Stop 50
ttcgctatattatcactcaacttga

SEQ ID NO: 353155 - DNA, 25 bp, Artificial
  probe
  misc_feature (1)..(25): SEQ ID NO: 3355; WAN024DMX; Start 43; Stop 67
caacttgaacaaataccagaaccac

SEQ ID NO: 353156 - DNA, 25 bp, Artificial
  probe
  misc_feature (1)..(25): SEQ ID NO: 3355; WAN024DMX; Start 25; Stop 49
attcgctatattatcactcaacttg

SEQ ID NO: 353157 - DNA, 25 bp, Artificial
  probe
  misc_feature (1)..(25): SEQ ID NO: 3355; WAN024DMX; Start 23; Stop 47
caattcgctatattatcactcaact

SEQ ID NO: 353158 - DNA, 25 bp, Artificial
  probe
  misc_feature (1)..(25): SEQ ID NO: 3355; WAN024DMX; Start 22; Stop 46
tcaattcgctatattatcactcaac

SEQ ID NO: 353159 - DNA, 25 bp, Artificial
  probe
  misc_feature (1)..(25): SEQ ID NO: 3355; WAN024DMX; Start 44; Stop 68
aacttgaacaaataccagaaccaca

SEQ ID NO: 353160 - DNA, 25 bp, Artificial
  probe
  misc_feature (1)..(25): SEQ ID NO: 3355; WAN024DMX; Start 46; Stop 70
cttgaacaaataccagaaccacaaa

SEQ ID NO: 353161 - DNA, 25 bp, Artificial
  probe
  misc_feature (1)..(25): SEQ ID NO: 3355; WAN024DMX; Start 45; Stop 69
acttgaacaaataccagaaccacaa

SEQ ID NO: 353162 - DNA, 25 bp, Artificial
  probe
  misc_feature (1)..(25): SEQ ID NO: 3355; WAN024DMX; Start 41; Stop 65
ctcaacttgaacaaataccagaacc

SEQ ID NO: 353163 - DNA, 25 bp, Artificial
  probe
  misc_feature (1)..(25): SEQ ID NO: 3355; WAN024DMX; Start 40; Stop 64
actcaacttgaacaaataccagaac

SEQ ID NO: 353164 - DNA, 25 bp, Artificial
  probe
  misc_feature (1)..(25): SEQ ID NO: 3355; WAN024DMX; Start 39; Stop 63
cactcaacttgaacaaataccagaa

SEQ ID NO: 353165 - DNA, 25 bp, Artificial
  probe
  misc_feature (1)..(25): SEQ ID NO: 3355; WAN024DMX; Start 38; Stop 62
tcactcaacttgaacaaataccaga

SEQ ID NO: 353166 - DNA, 25 bp, Artificial
  probe
  misc_feature (1)..(25): SEQ ID NO: 3355; WAN024DMX; Start 37; Stop 61
atcactcaacttgaacaaataccag

SEQ ID NO: 353167 - DNA, 25 bp, Artificial
  probe
  misc_feature (1)..(25): SEQ ID NO: 3355; WAN024DMX; Start 42; Stop 66
tcaacttgaacaaataccagaacca

SEQ ID NO: 353168 - DNA, 25 bp, Artificial
  probe
  misc_feature (1)..(25): SEQ ID NO: 3355; WAN024DMX; Start 24; Stop 48
aattcgctatattatcactcaactt

SEQ ID NO: 353169 - DNA, 25 bp, Artificial
  probe
  misc_feature (1)..(25): SEQ ID NO: 3355; WAN024DMX; Start 21; Stop 45
ttcaattcgctatattatcactcaa

SEQ ID NO: 353170 - DNA, 25 bp, Artificial
  probe
  misc_feature (1)..(25): SEQ ID NO: 3355; WAN024DMX; Start 29; Stop 53
gctatattatcactcaacttgaaca

SEQ ID NO: 353171 - DNA, 25 bp, Artificial
  probe
  misc_feature (1)..(25): SEQ ID NO: 3355; WAN024DMX; Start 20; Stop 44
attcaattcgctatattatcactca

SEQ ID NO: 353172 - DNA, 25 bp, Artificial
  probe
  misc_feature (1)..(25): SEQ ID NO: 3355; WAN024DMX; Start 36; Stop 60
tatcactcaacttgaacaaatacca

SEQ ID NO: 353173 - DNA, 25 bp, Artificial
  probe
  misc_feature (1)..(25): SEQ ID NO: 3355; WAN024DMX; Start 35; Stop 59
ttatcactcaacttgaacaaatacc

SEQ ID NO: 353174 - DNA, 25 bp, Artificial
  probe
  misc_feature (1)..(25): SEQ ID NO: 3355; WAN024DMX; Start 47; Stop 71
ttgaacaaataccagaaccacaaaa

SEQ ID NO: 353175 - DNA, 25 bp, Artificial
  probe
  misc_feature (1)..(25): SEQ ID NO: 3355; WAN024DMX; Start 19; Stop 43
aattcaattcgctatattatcactc

SEQ ID NO: 353176 - DNA, 25 bp, Artificial
  probe
  misc_feature (1)..(25): SEQ ID NO: 3355; WAN024DMX; Start 34; Stop 58
attatcactcaacttgaacaaatac

SEQ ID NO: 353177 - DNA, 25 bp, Artificial
  probe
  misc_feature (1)..(25): SEQ ID NO: 3355; WAN024DMX; Start 18; Stop 42
aaattcaattcgctatattatcact

SEQ ID NO: 353178 - DNA, 25 bp, Artificial
  probe
  misc_feature (1)..(25): SEQ ID NO: 3355; WAN024DMX; Start 9; Stop 33
aaactctcgaaattcaattcgctat

SEQ ID NO: 353179 - DNA, 25 bp, Artificial
  probe
  misc_feature (1)..(25): SEQ ID NO: 3355; WAN024DMX; Start 32; Stop 56
atattatcactcaacttgaacaaat

SEQ ID NO: 353180 - DNA, 25 bp, Artificial
  probe
  misc_feature (1)..(25): SEQ ID NO: 3355; WAN024DMX; Start 10; Stop 34
aactctcgaaattcaattcgctata

SEQ ID NO: 353181 - DNA, 25 bp, Artificial
  probe
  misc_feature (1)..(25): SEQ ID NO: 3355; WAN024DMX; Start 11; Stop 35
actctcgaaattcaattcgctatat

SEQ ID NO: 353182 - DNA, 25 bp, Artificial
  probe
  misc_feature (1)..(25): SEQ ID NO: 3355; WAN024DMX; Start 12; Stop 36
ctctcgaaattcaattcgctatatt

SEQ ID NO: 353183 - DNA, 25 bp, Artificial
  probe
  misc_feature (1)..(25): SEQ ID NO: 3355; WAN024DMX; Start 8; Stop 32
aaaactctcgaaattcaattcgcta

SEQ ID NO: 353184 - DNA, 25 bp, Artificial
  probe
  misc_feature (1)..(25): SEQ ID NO: 3355; WAN024DMX; Start 13; Stop 37
tctcgaaattcaattcgctatatta

SEQ ID NO: 353185 - DNA, 25 bp, Artificial
  probe
  misc_feature (1)..(25): SEQ ID NO: 3356; WAN024DFS; Start 9; Stop 33
attcacattctacaatcaagtcagc

SEQ ID NO: 353186 - DNA, 25 bp, Artificial
  probe
  misc_feature (1)..(25): SEQ ID NO: 3356; WAN024DFS; Start 15; Stop 39
attctacaatcaagtcagccaacaa

SEQ ID NO: 353187 - DNA, 25 bp, Artificial
  probe
  misc_feature (1)..(25): SEQ ID NO: 3356; WAN024DFS; Start 10; Stop 34
ttcacattctacaatcaagtcagcc

SEQ ID NO: 353188 - DNA, 25 bp, Artificial
  probe
  misc_feature (1)..(25): SEQ ID NO: 3356; WAN024DFS; Start 14; Stop 38
cattctacaatcaagtcagccaaca

SEQ ID NO: 353189 - DNA, 25 bp, Artificial
  probe
  misc_feature (1)..(25): SEQ ID NO: 3356; WAN024DFS; Start 13; Stop 37
acattctacaatcaagtcagccaac

SEQ ID NO: 353190 - DNA, 25 bp, Artificial
  probe
  misc_feature (1)..(25): SEQ ID NO: 3356; WAN024DFS; Start 12; Stop 36
cacattctacaatcaagtcagccaa

SEQ ID NO: 353191 - DNA, 25 bp, Artificial
  probe
  misc_feature (1)..(25): SEQ ID NO: 3356; WAN024DFS; Start 11; Stop 35
tcacattctacaatcaagtcagcca

SEQ ID NO: 353192 - DNA, 25 bp, Artificial
  probe
  misc_feature (1)..(25): SEQ ID NO: 3356; WAN024DFS; Start 8; Stop 32
aattcacattctacaatcaagtcag

SEQ ID NO: 353193 - DNA, 25 bp, Artificial
  probe
  misc_feature (1)..(25): SEQ ID NO: 3356; WAN024DFS; Start 19; Stop 43
tacaatcaagtcagccaacaaattc

SEQ ID NO: 353194 - DNA, 25 bp, Artificial
  probe
  misc_feature (1)..(25): SEQ ID NO: 3356; WAN024DFS; Start 18; Stop 42
ctacaatcaagtcagccaacaaatt

SEQ ID NO: 353195 - DNA, 25 bp, Artificial
  probe
  misc_feature (1)..(25): SEQ ID NO: 3356; WAN024DFS; Start 17; Stop 41
tctacaatcaagtcagccaacaaat

SEQ ID NO: 353196 - DNA, 25 bp, Artificial
  probe
  misc_feature (1)..(25): SEQ ID NO: 3356; WAN024DFS; Start 25; Stop 49
caagtcagccaacaaattcctaatc

SEQ ID NO: 353197 - DNA, 25 bp, Artificial
  probe
  misc_feature (1)..(25): SEQ ID NO: 3356; WAN024DFS; Start 16; Stop 40
ttctacaatcaagtcagccaacaaa

SEQ ID NO: 353198 - DNA, 25 bp, Artificial
  probe
  misc_feature (1)..(25): SEQ ID NO: 3356; WAN024DFS; Start 29; Stop 53
tcagccaacaaattcctaatcctac

SEQ ID NO: 353199 - DNA, 25 bp, Artificial
  probe
  misc_feature (1)..(25): SEQ ID NO: 3356; WAN024DFS; Start 28; Stop 52
gtcagccaacaaattcctaatccta

SEQ ID NO: 353200 - DNA, 25 bp, Artificial
  probe
  misc_feature (1)..(25): SEQ ID NO: 3356; WAN024DFS; Start 24; Stop 48
tcaagtcagccaacaaattcctaat

SEQ ID NO: 353201 - DNA, 25 bp, Artificial
  probe
  misc_feature (1)..(25): SEQ ID NO: 3356; WAN024DFS; Start 23; Stop 47
atcaagtcagccaacaaattcctaa

SEQ ID NO: 353202 - DNA, 25 bp, Artificial
  probe
  misc_feature (1)..(25): SEQ ID NO: 3356; WAN024DFS; Start 22; Stop 46
aatcaagtcagccaacaaattccta

SEQ ID NO: 353203 - DNA, 25 bp, Artificial
  probe
  misc_feature (1)..(25): SEQ ID NO: 3356; WAN024DFS; Start 26; Stop 50
aagtcagccaacaaattcctaatcc

SEQ ID NO: 353204 - DNA, 25 bp, Artificial
  probe
  misc_feature (1)..(25): SEQ ID NO: 3356; WAN024DFS; Start 30; Stop 54
cagccaacaaattcctaatcctacg

SEQ ID NO: 353205 - DNA, 25 bp, Artificial
  probe
  misc_feature (1)..(25): SEQ ID NO: 3356; WAN024DFS; Start 27; Stop 51
agtcagccaacaaattcctaatcct

SEQ ID NO: 353206 - DNA, 25 bp, Artificial
  probe
  misc_feature (1)..(25): SEQ ID NO: 3356; WAN024DFS; Start 21; Stop 45
caatcaagtcagccaacaaattcct

SEQ ID NO: 353207 - DNA, 25 bp, Artificial
  probe
  misc_feature (1)..(25): SEQ ID NO: 3356; WAN024DFS; Start 20; Stop 44
acaatcaagtcagccaacaaattcc

SEQ ID NO: 353208 - DNA, 25 bp, Artificial
  probe
  misc_feature (1)..(25): SEQ ID NO: 3356; WAN024DFS; Start 31; Stop 55
agccaacaaattcctaatcctacgg

SEQ ID NO: 353209 - DNA, 25 bp, Artificial
  probe
  misc_feature (1)..(25): SEQ ID NO: 3356; WAN024DFS; Start 7; Stop 31
aaattcacattctacaatcaagtca

SEQ ID NO: 353210 - DNA, 25 bp, Artificial
  probe
  misc_feature (1)..(25): SEQ ID NO: 3356; WAN024DFS; Start 33; Stop 57
ccaacaaattcctaatcctacggga

SEQ ID NO: 353211 - DNA, 25 bp, Artificial
  probe
  misc_feature (1)..(25): SEQ ID NO: 3356; WAN024DFS; Start 60; Stop 84
aaaccttgtctttgatatcttggac

SEQ ID NO: 353212 - DNA, 25 bp, Artificial
  probe
  misc_feature (1)..(25): SEQ ID NO: 3356; WAN024DFS; Start 32; Stop 56
gccaacaaattcctaatcctacggg

SEQ ID NO: 353213 - DNA, 25 bp, Artificial
  probe
  misc_feature (1)..(25): SEQ ID NO: 3356; WAN024DFS; Start 2; Stop 26
tgagtaaattcacattctacaatca

SEQ ID NO: 353214 - DNA, 25 bp, Artificial
  probe
  misc_feature (1)..(25): SEQ ID NO: 3356; WAN024DFS; Start 43; Stop 67
cctaatcctacgggaacaaaccttg

SEQ ID NO: 353215 - DNA, 25 bp, Artificial
  probe
  misc_feature (1)..(25): SEQ ID NO: 3356; WAN024DFS; Start 42; Stop 66
tcctaatcctacgggaacaaacctt

SEQ ID NO: 353216 - DNA, 25 bp, Artificial
  probe
  misc_feature (1)..(25): SEQ ID NO: 3356; WAN024DFS; Start 53; Stop 77
cgggaacaaaccttgtctttgatat

SEQ ID NO: 353217 - DNA, 25 bp, Artificial
  probe
  misc_feature (1)..(25): SEQ ID NO: 3356; WAN024DFS; Start 5; Stop 29
gtaaattcacattctacaatcaagt

SEQ ID NO: 353218 - DNA, 25 bp, Artificial
  probe
  misc_feature (1)..(25): SEQ ID NO: 3357; WAN024B7Z; Start 193; Stop 217
ttcaattaccttattccaacgccaa

SEQ ID NO: 353219 - DNA, 25 bp, Artificial
  probe
  misc_feature (1)..(25): SEQ ID NO: 3357; WAN024B7Z; Start 192; Stop 216
cttcaattaccttattccaacgcca

SEQ ID NO: 353220 - DNA, 25 bp, Artificial
  probe
  misc_feature (1)..(25): SEQ ID NO: 3357; WAN024B7Z; Start 191; Stop 215
ccttcaattaccttattccaacgcc

SEQ ID NO: 353221 - DNA, 25 bp, Artificial
  probe
  misc_feature (1)..(25): SEQ ID NO: 3357; WAN024B7Z; Start 96; Stop 120
acaccactataatctctatcagctc

SEQ ID NO: 353222 - DNA, 25 bp, Artificial
  probe
  misc_feature (1)..(25): SEQ ID NO: 3357; WAN024B7Z; Start 97; Stop 121
caccactataatctctatcagctct

SEQ ID NO: 353223 - DNA, 25 bp, Artificial
  probe
  misc_feature (1)..(25): SEQ ID NO: 3357; WAN024B7Z; Start 95; Stop 119
aacaccactataatctctatcagct

SEQ ID NO: 353224 - DNA, 25 bp, Artificial
  probe
  misc_feature (1)..(25): SEQ ID NO: 3357; WAN024B7Z; Start 100; Stop 124
cactataatctctatcagctcttgc

SEQ ID NO: 353225 - DNA, 25 bp, Artificial
  probe
  misc_feature (1)..(25): SEQ ID NO: 3357; WAN024B7Z; Start 222; Stop 246
gaagccaccaataatctcatcaaac

SEQ ID NO: 353226 - DNA, 25 bp, Artificial
  probe
  misc_feature (1)..(25): SEQ ID NO: 3357; WAN024B7Z; Start 225; Stop 249
gccaccaataatctcatcaaactta

SEQ ID NO: 353227 - DNA, 25 bp, Artificial
  probe
  misc_feature (1)..(25): SEQ ID NO: 3357; WAN024B7Z; Start 224; Stop 248
agccaccaataatctcatcaaactt

SEQ ID NO: 353228 - DNA, 25 bp, Artificial
  probe
  misc_feature (1)..(25): SEQ ID NO: 3357; WAN024B7Z; Start 223; Stop 247
aagccaccaataatctcatcaaact

SEQ ID NO: 353229 - DNA, 25 bp, Artificial
  probe
  misc_feature (1)..(25): SEQ ID NO: 3357; WAN024B7Z; Start 98; Stop 122
accactataatctctatcagctctt

SEQ ID NO: 353230 - DNA, 25 bp, Artificial
  probe
  misc_feature (1)..(25): SEQ ID NO: 3357; WAN024B7Z; Start 221; Stop 245
ggaagccaccaataatctcatcaaa

SEQ ID NO: 353231 - DNA, 25 bp, Artificial
  probe
  misc_feature (1)..(25): SEQ ID NO: 3357; WAN024B7Z; Start 99; Stop 123
ccactataatctctatcagctcttg

SEQ ID NO: 353232 - DNA, 25 bp, Artificial
  probe
  misc_feature (1)..(25): SEQ ID NO: 3357; WAN024B7Z; Start 237; Stop 261
ctcatcaaacttatcaagcacaatg

SEQ ID NO: 353233 - DNA, 25 bp, Artificial
  probe
  misc_feature (1)..(25): SEQ ID NO: 3357; WAN024B7Z; Start 236; Stop 260
tctcatcaaacttatcaagcacaat

SEQ ID NO: 353234 - DNA, 25 bp, Artificial
  probe
  misc_feature (1)..(25): SEQ ID NO: 3357; WAN024B7Z; Start 235; Stop 259
atctcatcaaacttatcaagcacaa

SEQ ID NO: 353235 - DNA, 25 bp, Artificial
  probe
  misc_feature (1)..(25): SEQ ID NO: 3357; WAN024B7Z; Start 234; Stop 258
aatctcatcaaacttatcaagcaca

SEQ ID NO: 353236 - DNA, 25 bp, Artificial
  probe
  misc_feature (1)..(25): SEQ ID NO: 3357; WAN024B7Z; Start 196; Stop 220
aattaccttattccaacgccaaact

SEQ ID NO: 353237 - DNA, 25 bp, Artificial
  probe
  misc_feature (1)..(25): SEQ ID NO: 3357; WAN024B7Z; Start 195; Stop 219
caattaccttattccaacgccaaac

SEQ ID NO: 353238 - DNA, 25 bp, Artificial
  probe
  misc_feature (1)..(25): SEQ ID NO: 3357; WAN024B7Z; Start 194; Stop 218
tcaattaccttattccaacgccaaa

SEQ ID NO: 353239 - DNA, 25 bp, Artificial
  probe
  misc_feature (1)..(25): SEQ ID NO: 3357; WAN024B7Z; Start 184; Stop 208
tcaacgcccttcaattaccttattc

SEQ ID NO: 353240 - DNA, 25 bp, Artificial
  probe
  misc_feature (1)..(25): SEQ ID NO: 3357; WAN024B7Z; Start 197; Stop 221
attaccttattccaacgccaaactg

SEQ ID NO: 353241 - DNA, 25 bp, Artificial
  probe
  misc_feature (1)..(25): SEQ ID NO: 3357; WAN024B7Z; Start 183; Stop 207
gtcaacgcccttcaattaccttatt

SEQ ID NO: 353242 - DNA, 25 bp, Artificial
  probe
  misc_feature (1)..(25): SEQ ID NO: 3357; WAN024B7Z; Start 94; Stop 118
aaacaccactataatctctatcagc

SEQ ID NO: 353243 - DNA, 25 bp, Artificial
  probe
  misc_feature (1)..(25): SEQ ID NO: 3357; WAN024B7Z; Start 220; Stop 244
tggaagccaccaataatctcatcaa

SEQ ID NO: 353244 - DNA, 25 bp, Artificial
  probe
  misc_feature (1)..(25): SEQ ID NO: 3357; WAN024B7Z; Start 217; Stop 241
aactggaagccaccaataatctcat

SEQ ID NO: 353245 - DNA, 25 bp, Artificial
  probe
  misc_feature (1)..(25): SEQ ID NO: 3357; WAN024B7Z; Start 190; Stop 214
cccttcaattaccttattccaacgc

SEQ ID NO: 353246 - DNA, 25 bp, Artificial
  probe
  misc_feature (1)..(25): SEQ ID NO: 3357; WAN024B7Z; Start 189; Stop 213
gcccttcaattaccttattccaacg

SEQ ID NO: 353247 - DNA, 25 bp, Artificial
  probe
  misc_feature (1)..(25): SEQ ID NO: 3357; WAN024B7Z; Start 188; Stop 212
cgcccttcaattaccttattccaac

SEQ ID NO: 353248 - DNA, 25 bp, Artificial
  probe
  misc_feature (1)..(25): SEQ ID NO: 3357; WAN024B7Z; Start 185; Stop 209
caacgcccttcaattaccttattcc

SEQ ID NO: 353249 - DNA, 25 bp, Artificial
  probe
  misc_feature (1)..(25): SEQ ID NO: 3357; WAN024B7Z; Start 219; Stop 243
ctggaagccaccaataatctcatca

SEQ ID NO: 353250 - DNA, 25 bp, Artificial
  probe
  misc_feature (1)..(25): SEQ ID NO: 3357; WAN024B7Z; Start 218; Stop 242
actggaagccaccaataatctcatc

SEQ ID NO: 353251 - DNA, 25 bp, Artificial
  probe
  misc_feature (1)..(25): SEQ ID NO: 3358; WAN024DDN; Start 52; Stop 76
gcgaccattaccattaactctatct

SEQ ID NO: 353252 - DNA, 25 bp, Artificial
  probe
  misc_feature (1)..(25): SEQ ID NO: 3358; WAN024DDN; Start 51; Stop 75
tgcgaccattaccattaactctatc

SEQ ID NO: 353253 - DNA, 25 bp, Artificial
  probe
  misc_feature (1)..(25): SEQ ID NO: 3358; WAN024DDN; Start 649; Stop 673
aagcaaggattagtgacagataagc

SEQ ID NO: 353254 - DNA, 25 bp, Artificial
  probe
  misc_feature (1)..(25): SEQ ID NO: 3358; WAN024DDN; Start 50; Stop 74
atgcgaccattaccattaactctat

SEQ ID NO: 353255 - DNA, 25 bp, Artificial
  probe
  misc_feature (1)..(25): SEQ ID NO: 3358; WAN024DDN; Start 46; Stop 70
tatgatgcgaccattaccattaact

SEQ ID NO: 353256 - DNA, 25 bp, Artificial
  probe
  misc_feature (1)..(25): SEQ ID NO: 3358; WAN024DDN; Start 49; Stop 73
gatgcgaccattaccattaactcta

SEQ ID NO: 353257 - DNA, 25 bp, Artificial
  probe
  misc_feature (1)..(25): SEQ ID NO: 3358; WAN024DDN; Start 45; Stop 69
atatgatgcgaccattaccattaac

SEQ ID NO: 353258 - DNA, 25 bp, Artificial
  probe
  misc_feature (1)..(25): SEQ ID NO: 3358; WAN024DDN; Start 47; Stop 71
atgatgcgaccattaccattaactc

SEQ ID NO: 353259 - DNA, 25 bp, Artificial
  probe
  misc_feature (1)..(25): SEQ ID NO: 3358; WAN024DDN; Start 411; Stop 435
tcgtgagtataaggctggtacatat

SEQ ID NO: 353260 - DNA, 25 bp, Artificial
  probe
  misc_feature (1)..(25): SEQ ID NO: 3358; WAN024DDN; Start 53; Stop 77
cgaccattaccattaactctatctt

SEQ ID NO: 353261 - DNA, 25 bp, Artificial
  probe
  misc_feature (1)..(25): SEQ ID NO: 3358; WAN024DDN; Start 410; Stop 434
ctcgtgagtataaggctggtacata

SEQ ID NO: 353262 - DNA, 25 bp, Artificial
  probe
  misc_feature (1)..(25): SEQ ID NO: 3358; WAN024DDN; Start 48; Stop 72
tgatgcgaccattaccattaactct

SEQ ID NO: 353263 - DNA, 25 bp, Artificial
  probe
  misc_feature (1)..(25): SEQ ID NO: 3358; WAN024DDN; Start 524; Stop 548
gacgaaggatagcttatgaactctt

SEQ ID NO: 353264 - DNA, 25 bp, Artificial
  probe
  misc_feature (1)..(25): SEQ ID NO: 3358; WAN024DDN; Start 687; Stop 711
gatattctctggcaagtatccatct

SEQ ID NO: 353265 - DNA, 25 bp, Artificial
  probe
  misc_feature (1)..(25): SEQ ID NO: 3358; WAN024DDN; Start 686; Stop 710
agatattctctggcaagtatccatc

SEQ ID NO: 353266 - DNA, 25 bp, Artificial
  probe
  misc_feature (1)..(25): SEQ ID NO: 3358; WAN024DDN; Start 688; Stop 712
atattctctggcaagtatccatctt

SEQ ID NO: 353267 - DNA, 25 bp, Artificial
  probe
  misc_feature (1)..(25): SEQ ID NO: 3358; WAN024DDN; Start 685; Stop 709
aagatattctctggcaagtatccat

SEQ ID NO: 353268 - DNA, 25 bp, Artificial
  probe
  misc_feature (1)..(25): SEQ ID NO: 3358; WAN024DDN; Start 525; Stop 549
acgaaggatagcttatgaactctta

SEQ ID NO: 353269 - DNA, 25 bp, Artificial
  probe
  misc_feature (1)..(25): SEQ ID NO: 3358; WAN024DDN; Start 305; Stop 329
atggaaatgaggtttacgctactaa

SEQ ID NO: 353270 - DNA, 25 bp, Artificial
  probe
  misc_feature (1)..(25): SEQ ID NO: 3358; WAN024DDN; Start 304; Stop 328
gatggaaatgaggtttacgctacta

SEQ ID NO: 353271 - DNA, 25 bp, Artificial
  probe
  misc_feature (1)..(25): SEQ ID NO: 3358; WAN024DDN; Start 55; Stop 79
accattaccattaactctatcttga

SEQ ID NO: 353272 - DNA, 25 bp, Artificial
  probe
  misc_feature (1)..(25): SEQ ID NO: 3358; WAN024DDN; Start 526; Stop 550
cgaaggatagcttatgaactcttag

SEQ ID NO: 353273 - DNA, 25 bp, Artificial
  probe
  misc_feature (1)..(25): SEQ ID NO: 3358; WAN024DDN; Start 589; Stop 613
tccaaccaatatgaaggaattgcta

SEQ ID NO: 353274 - DNA, 25 bp, Artificial
  probe
  misc_feature (1)..(25): SEQ ID NO: 3358; WAN024DDN; Start 590; Stop 614
ccaaccaatatgaaggaattgctaa

SEQ ID NO: 353275 - DNA, 25 bp, Artificial
  probe
  misc_feature (1)..(25): SEQ ID NO: 3358; WAN024DDN; Start 648; Stop 672
aaagcaaggattagtgacagataag

SEQ ID NO: 353276 - DNA, 25 bp, Artificial
  probe
  misc_feature (1)..(25): SEQ ID NO: 3358; WAN024DDN; Start 182; Stop 206
tgtttgacctcatctatatgttgga

SEQ ID NO: 353277 - DNA, 25 bp, Artificial
  probe
  misc_feature (1)..(25): SEQ ID NO: 3358; WAN024DDN; Start 54; Stop 78
gaccattaccattaactctatcttg

SEQ ID NO: 353278 - DNA, 25 bp, Artificial
  probe
  misc_feature (1)..(25): SEQ ID NO: 3358; WAN024DDN; Start 523; Stop 547
ggacgaaggatagcttatgaactct

SEQ ID NO: 353279 - DNA, 25 bp, Artificial
  probe
  misc_feature (1)..(25): SEQ ID NO: 3358; WAN024DDN; Start 306; Stop 330
tggaaatgaggtttacgctactaac

SEQ ID NO: 353280 - DNA, 25 bp, Artificial
  probe
  misc_feature (1)..(25): SEQ ID NO: 3358; WAN024DDN; Start 185; Stop 209
ttgacctcatctatatgttggaata

SEQ ID NO: 353281 - DNA, 25 bp, Artificial
  probe
  misc_feature (1)..(25): SEQ ID NO: 3358; WAN024DDN; Start 282; Stop 306
tcaatatctaacagatcctgctgat

SEQ ID NO: 353282 - DNA, 25 bp, Artificial
  probe
  misc_feature (1)..(25): SEQ ID NO: 3358; WAN024DDN; Start 281; Stop 305
atcaatatctaacagatcctgctga

SEQ ID NO: 353283 - DNA, 25 bp, Artificial
  probe
  misc_feature (1)..(25): SEQ ID NO: 3358; WAN024DDN; Start 413; Stop 437
gtgagtataaggctggtacatatga

SEQ ID NO: 353284 - DNA, 25 bp, Artificial
  probe
  misc_feature (1)..(25): SEQ ID NO: 3359; WAN024F84; Start 994; Stop 1018
cgctctcaatctacatcaacaagaa

SEQ ID NO: 353285 - DNA, 25 bp, Artificial
  probe
  misc_feature (1)..(25): SEQ ID NO: 3359; WAN024F84; Start 992; Stop 1016
gtcgctctcaatctacatcaacaag

SEQ ID NO: 353286 - DNA, 25 bp, Artificial
  probe
  misc_feature (1)..(25): SEQ ID NO: 3359; WAN024F84; Start 828; Stop 852
ttggtagactaggctatgatctgta

SEQ ID NO: 353287 - DNA, 25 bp, Artificial
  probe
  misc_feature (1)..(25): SEQ ID NO: 3359; WAN024F84; Start 829; Stop 853
tggtagactaggctatgatctgtat

SEQ ID NO: 353288 - DNA, 25 bp, Artificial
  probe
  misc_feature (1)..(25): SEQ ID NO: 3359; WAN024F84; Start 831; Stop 855
gtagactaggctatgatctgtatcg

SEQ ID NO: 353289 - DNA, 25 bp, Artificial
  probe
  misc_feature (1)..(25): SEQ ID NO: 3359; WAN024F84; Start 991; Stop 1015
agtcgctctcaatctacatcaacaa

SEQ ID NO: 353290 - DNA, 25 bp, Artificial
  probe
  misc_feature (1)..(25): SEQ ID NO: 3359; WAN024F84; Start 990; Stop 1014
aagtcgctctcaatctacatcaaca

SEQ ID NO: 353291 - DNA, 25 bp, Artificial
  probe
  misc_feature (1)..(25): SEQ ID NO: 3359; WAN024F84; Start 830; Stop 854
ggtagactaggctatgatctgtatc

SEQ ID NO: 353292 - DNA, 25 bp, Artificial
  probe
  misc_feature (1)..(25): SEQ ID NO: 3359; WAN024F84; Start 993; Stop 1017
tcgctctcaatctacatcaacaaga

SEQ ID NO: 353293 - DNA, 25 bp, Artificial
  probe
  misc_feature (1)..(25): SEQ ID NO: 3359; WAN024F84; Start 833; Stop 857
agactaggctatgatctgtatcgaa

SEQ ID NO: 353294 - DNA, 25 bp, Artificial
  probe
  misc_feature (1)..(25): SEQ ID NO: 3359; WAN024F84; Start 832; Stop 856
tagactaggctatgatctgtatcga

SEQ ID NO: 353295 - DNA, 25 bp, Artificial
  probe
  misc_feature (1)..(25): SEQ ID NO: 3359; WAN024F84; Start 776; Stop 800
tttactggtgctgatttacttgaag

SEQ ID NO: 353296 - DNA, 25 bp, Artificial
  probe
  misc_feature (1)..(25): SEQ ID NO: 3359; WAN024F84; Start 459; Stop 483
gctatacagatttgattgaacccat

SEQ ID NO: 353297 - DNA, 25 bp, Artificial
  probe
  misc_feature (1)..(25): SEQ ID NO: 3359; WAN024F84; Start 989; Stop 1013
aaagtcgctctcaatctacatcaac

SEQ ID NO: 353298 - DNA, 25 bp, Artificial
  probe
  misc_feature (1)..(25): SEQ ID NO: 3359; WAN024F84; Start 458; Stop 482
cgctatacagatttgattgaaccca

SEQ ID NO: 353299 - DNA, 25 bp, Artificial
  probe
  misc_feature (1)..(25): SEQ ID NO: 3359; WAN024F84; Start 995; Stop 1019
gctctcaatctacatcaacaagaaa

SEQ ID NO: 353300 - DNA, 25 bp, Artificial
  probe
  misc_feature (1)..(25): SEQ ID NO: 3359; WAN024F84; Start 888; Stop 912
aatccaatcgcatccgtaaatcaat

SEQ ID NO: 353301 - DNA, 25 bp, Artificial
  probe
  misc_feature (1)..(25): SEQ ID NO: 3359; WAN024F84; Start 494; Stop 518
gaagcctatttggatgtgacagaaa

SEQ ID NO: 353302 - DNA, 25 bp, Artificial
  probe
  misc_feature (1)..(25): SEQ ID NO: 3359; WAN024F84; Start 887; Stop 911
aaatccaatcgcatccgtaaatcaa

SEQ ID NO: 353303 - DNA, 25 bp, Artificial
  probe
  misc_feature (1)..(25): SEQ ID NO: 3359; WAN024F84; Start 1098; Stop 1122
aaacacaagatgctagtcagataag

SEQ ID NO: 353304 - DNA, 25 bp, Artificial
  probe
  misc_feature (1)..(25): SEQ ID NO: 3359; WAN024F84; Start 1099; Stop 1123
aacacaagatgctagtcagataagc

SEQ ID NO: 353305 - DNA, 25 bp, Artificial
  probe
  misc_feature (1)..(25): SEQ ID NO: 3359; WAN024F84; Start 889; Stop 913
atccaatcgcatccgtaaatcaatc

SEQ ID NO: 353306 - DNA, 25 bp, Artificial
  probe
  misc_feature (1)..(25): SEQ ID NO: 3359; WAN024F84; Start 827; Stop 851
tttggtagactaggctatgatctgt

SEQ ID NO: 353307 - DNA, 25 bp, Artificial
  probe
  misc_feature (1)..(25): SEQ ID NO: 3359; WAN024F84; Start 885; Stop 909
tcaaatccaatcgcatccgtaaatc

SEQ ID NO: 353308 - DNA, 25 bp, Artificial
  probe
  misc_feature (1)..(25): SEQ ID NO: 3359; WAN024F84; Start 1110; Stop 1134
ctagtcagataagccaaatagccct

SEQ ID NO: 353309 - DNA, 25 bp, Artificial
  probe
  misc_feature (1)..(25): SEQ ID NO: 3359; WAN024F84; Start 517; Stop 541
aaataaactcggtatcaagtcagcg

SEQ ID NO: 353310 - DNA, 25 bp, Artificial
  probe
  misc_feature (1)..(25): SEQ ID NO: 3359; WAN024F84; Start 462; Stop 486
atacagatttgattgaacccatgag

SEQ ID NO: 353311 - DNA, 25 bp, Artificial
  probe
  misc_feature (1)..(25): SEQ ID NO: 3359; WAN024F84; Start 786; Stop 810
ctgatttacttgaagttcctgaggt

SEQ ID NO: 353312 - DNA, 25 bp, Artificial
  probe
  misc_feature (1)..(25): SEQ ID NO: 3359; WAN024F84; Start 778; Stop 802
tactggtgctgatttacttgaagtt

SEQ ID NO: 353313 - DNA, 25 bp, Artificial
  probe
  misc_feature (1)..(25): SEQ ID NO: 3359; WAN024F84; Start 777; Stop 801
ttactggtgctgatttacttgaagt

SEQ ID NO: 353314 - DNA, 25 bp, Artificial
  probe
  misc_feature (1)..(25): SEQ ID NO: 3359; WAN024F84; Start 664; Stop 688
tttgacagtgattctacctgaacag

SEQ ID NO: 353315 - DNA, 25 bp, Artificial
  probe
  misc_feature (1)..(25): SEQ ID NO: 3359; WAN024F84; Start 886; Stop 910
caaatccaatcgcatccgtaaatca

SEQ ID NO: 353316 - DNA, 25 bp, Artificial
  probe
  misc_feature (1)..(25): SEQ ID NO: 3359; WAN024F84; Start 884; Stop 908
gtcaaatccaatcgcatccgtaaat

SEQ ID NO: 353317 - DNA, 25 bp, Artificial
  probe
  misc_feature (1)..(25): SEQ ID NO: 3360; WAN024CQO; Start 877; Stop 901
caagcagcagaacttattcaacaag

SEQ ID NO: 353318 - DNA, 25 bp, Artificial
  probe
  misc_feature (1)..(25): SEQ ID NO: 3360; WAN024CQO; Start 547; Stop 571
gcaggtggagaagattacattgtat

SEQ ID NO: 353319 - DNA, 25 bp, Artificial
  probe
  misc_feature (1)..(25): SEQ ID NO: 3360; WAN024CQO; Start 627; Stop 651
tattggtggtacttatggcgttatg

SEQ ID NO: 353320 - DNA, 25 bp, Artificial
  probe
  misc_feature (1)..(25): SEQ ID NO: 3360; WAN024CQO; Start 626; Stop 650
gtattggtggtacttatggcgttat

SEQ ID NO: 353321 - DNA, 25 bp, Artificial
  probe
  misc_feature (1)..(25): SEQ ID NO: 3360; WAN024CQO; Start 876; Stop 900
acaagcagcagaacttattcaacaa

SEQ ID NO: 353322 - DNA, 25 bp, Artificial
  probe
  misc_feature (1)..(25): SEQ ID NO: 3360; WAN024CQO; Start 875; Stop 899
aacaagcagcagaacttattcaaca

SEQ ID NO: 353323 - DNA, 25 bp, Artificial
  probe
  misc_feature (1)..(25): SEQ ID NO: 3360; WAN024CQO; Start 548; Stop 572
caggtggagaagattacattgtatt

SEQ ID NO: 353324 - DNA, 25 bp, Artificial
  probe
  misc_feature (1)..(25): SEQ ID NO: 3360; WAN024CQO; Start 550; Stop 574
ggtggagaagattacattgtattca

SEQ ID NO: 353325 - DNA, 25 bp, Artificial
  probe
  misc_feature (1)..(25): SEQ ID NO: 3360; WAN024CQO; Start 549; Stop 573
aggtggagaagattacattgtattc

SEQ ID NO: 353326 - DNA, 25 bp, Artificial
  probe
  misc_feature (1)..(25): SEQ ID NO: 3360; WAN024CQO; Start 194; Stop 218
ttattgaagctgttatggaagttgc

SEQ ID NO: 353327 - DNA, 25 bp, Artificial
  probe
  misc_feature (1)..(25): SEQ ID NO: 3360; WAN024CQO; Start 883; Stop 907
gcagaacttattcaacaagcacgaa

SEQ ID NO: 353328 - DNA, 25 bp, Artificial
  probe
  misc_feature (1)..(25): SEQ ID NO: 3360; WAN024CQO; Start 878; Stop 902
aagcagcagaacttattcaacaagc

SEQ ID NO: 353329 - DNA, 25 bp, Artificial
  probe
  misc_feature (1)..(25): SEQ ID NO: 3360; WAN024CQO; Start 619; Stop 643
gaagctggtattggtggtacttatg

SEQ ID NO: 353330 - DNA, 25 bp, Artificial
  probe
  misc_feature (1)..(25): SEQ ID NO: 3360; WAN024CQO; Start 618; Stop 642
agaagctggtattggtggtacttat

SEQ ID NO: 353331 - DNA, 25 bp, Artificial
  probe
  misc_feature (1)..(25): SEQ ID NO: 3360; WAN024CQO; Start 625; Stop 649
ggtattggtggtacttatggcgtta

SEQ ID NO: 353332 - DNA, 25 bp, Artificial
  probe
  misc_feature (1)..(25): SEQ ID NO: 3360; WAN024CQO; Start 134; Stop 158
tctatgtaaatggttcttcaggtga

SEQ ID NO: 353333 - DNA, 25 bp, Artificial
  probe
  misc_feature (1)..(25): SEQ ID NO: 3360; WAN024CQO; Start 203; Stop 227
ctgttatggaagttgctaaaggtaa

SEQ ID NO: 353334 - DNA, 25 bp, Artificial
  probe
  misc_feature (1)..(25): SEQ ID NO: 3360; WAN024CQO; Start 202; Stop 226
gctgttatggaagttgctaaaggta

SEQ ID NO: 353335 - DNA, 25 bp, Artificial
  probe
  misc_feature (1)..(25): SEQ ID NO: 3360; WAN024CQO; Start 587; Stop 611
aacaatatcttggtggtcgcttgat

SEQ ID NO: 353336 - DNA, 25 bp, Artificial
  probe
  misc_feature (1)..(25): SEQ ID NO: 3360; WAN024CQO; Start 584; Stop 608
atgaacaatatcttggtggtcgctt

SEQ ID NO: 353337 - DNA, 25 bp, Artificial
  probe
  misc_feature (1)..(25): SEQ ID NO: 3360; WAN024CQO; Start 572; Stop 596
tcaatggtccagatgaacaatatct

SEQ ID NO: 353338 - DNA, 25 bp, Artificial
  probe
  misc_feature (1)..(25): SEQ ID NO: 3360; WAN024CQO; Start 884; Stop 908
cagaacttattcaacaagcacgaaa

SEQ ID NO: 353339 - DNA, 25 bp, Artificial
  probe
  misc_feature (1)..(25): SEQ ID NO: 3360; WAN024CQO; Start 808; Stop 832
aaacttgatttaggttctgttcgtc

SEQ ID NO: 353340 - DNA, 25 bp, Artificial
  probe
  misc_feature (1)..(25): SEQ ID NO: 3360; WAN024CQO; Start 575; Stop 599
atggtccagatgaacaatatcttgg

SEQ ID NO: 353341 - DNA, 25 bp, Artificial
  probe
  misc_feature (1)..(25): SEQ ID NO: 3360; WAN024CQO; Start 874; Stop 898
aaacaagcagcagaacttattcaac

SEQ ID NO: 353342 - DNA, 25 bp, Artificial
  probe
  misc_feature (1)..(25): SEQ ID NO: 3360; WAN024CQO; Start 645; Stop 669
cgttatgccagatttgttcttgaaa

SEQ ID NO: 353343 - DNA, 25 bp, Artificial
  probe
  misc_feature (1)..(25): SEQ ID NO: 3360; WAN024CQO; Start 574; Stop 598
aatggtccagatgaacaatatcttg

SEQ ID NO: 353344 - DNA, 25 bp, Artificial
  probe
  misc_feature (1)..(25): SEQ ID NO: 3360; WAN024CQO; Start 573; Stop 597
caatggtccagatgaacaatatctt

SEQ ID NO: 353345 - DNA, 25 bp, Artificial
  probe
  misc_feature (1)..(25): SEQ ID NO: 3360; WAN024CQO; Start 204; Stop 228
tgttatggaagttgctaaaggtaaa

SEQ ID NO: 353346 - DNA, 25 bp, Artificial
  probe
  misc_feature (1)..(25): SEQ ID NO: 3360; WAN024CQO; Start 133; Stop 157
atctatgtaaatggttcttcaggtg

SEQ ID NO: 353347 - DNA, 25 bp, Artificial
  probe
  misc_feature (1)..(25): SEQ ID NO: 3360; WAN024CQO; Start 193; Stop 217
attattgaagctgttatggaagttg

SEQ ID NO: 353348 - DNA, 25 bp, Artificial
  probe
  misc_feature (1)..(25): SEQ ID NO: 3360; WAN024CQO; Start 809; Stop 833
aacttgatttaggttctgttcgtca

SEQ ID NO: 353349 - DNA, 25 bp, Artificial
  probe
  misc_feature (1)..(25): SEQ ID NO: 3360; WAN024CQO; Start 881; Stop 905
cagcagaacttattcaacaagcacg

SEQ ID NO: 353350 - DNA, 25 bp, Artificial
  probe
  misc_feature (1)..(25): SEQ ID NO: 3361; WAN024CCR; Start 467; Stop 491
tcgttcatcaagatattccaggtat

SEQ ID NO: 353351 - DNA, 25 bp, Artificial
  probe
  misc_feature (1)..(25): SEQ ID NO: 3361; WAN024CCR; Start 464; Stop 488
tcatcgttcatcaagatattccagg

SEQ ID NO: 353352 - DNA, 25 bp, Artificial
  probe
  misc_feature (1)..(25): SEQ ID NO: 3361; WAN024CCR; Start 466; Stop 490
atcgttcatcaagatattccaggta

SEQ ID NO: 353353 - DNA, 25 bp, Artificial
  probe
  misc_feature (1)..(25): SEQ ID NO: 3361; WAN024CCR; Start 465; Stop 489
catcgttcatcaagatattccaggt

SEQ ID NO: 353354 - DNA, 25 bp, Artificial
  probe
  misc_feature (1)..(25): SEQ ID NO: 3361; WAN024CCR; Start 462; Stop 486
catcatcgttcatcaagatattcca

SEQ ID NO: 353355 - DNA, 25 bp, Artificial
  probe
  misc_feature (1)..(25): SEQ ID NO: 3361; WAN024CCR; Start 468; Stop 492
cgttcatcaagatattccaggtatg

SEQ ID NO: 353356 - DNA, 25 bp, Artificial
  probe
  misc_feature (1)..(25): SEQ ID NO: 3361; WAN024CCR; Start 463; Stop 487
atcatcgttcatcaagatattccag

SEQ ID NO: 353357 - DNA, 25 bp, Artificial
  probe
  misc_feature (1)..(25): SEQ ID NO: 3361; WAN024CCR; Start 461; Stop 485
tcatcatcgttcatcaagatattcc

SEQ ID NO: 353358 - DNA, 25 bp, Artificial
  probe
  misc_feature (1)..(25): SEQ ID NO: 3361; WAN024CCR; Start 456; Stop 480
gactatcatcatcgttcatcaagat

SEQ ID NO: 353359 - DNA, 25 bp, Artificial
  probe
  misc_feature (1)..(25): SEQ ID NO: 3361; WAN024CCR; Start 435; Stop 459
ctctctcaatatgaatacaccgact

SEQ ID NO: 353360 - DNA, 25 bp, Artificial
  probe
  misc_feature (1)..(25): SEQ ID NO: 3361; WAN024CCR; Start 434; Stop 458
tctctctcaatatgaatacaccgac

SEQ ID NO: 353361 - DNA, 25 bp, Artificial
  probe
  misc_feature (1)..(25): SEQ ID NO: 3361; WAN024CCR; Start 433; Stop 457
gtctctctcaatatgaatacaccga

SEQ ID NO: 353362 - DNA, 25 bp, Artificial
  probe
  misc_feature (1)..(25): SEQ ID NO: 3361; WAN024CCR; Start 474; Stop 498
tcaagatattccaggtatgattgcc

SEQ ID NO: 353363 - DNA, 25 bp, Artificial
  probe
  misc_feature (1)..(25): SEQ ID NO: 3361; WAN024CCR; Start 401; Stop 425
atattcaggtaaccgaactcaatgg

SEQ ID NO: 353364 - DNA, 25 bp, Artificial
  probe
  misc_feature (1)..(25): SEQ ID NO: 3361; WAN024CCR; Start 428; Stop 452
ttgccgtctctctcaatatgaatac

SEQ ID NO: 353365 - DNA, 25 bp, Artificial
  probe
  misc_feature (1)..(25): SEQ ID NO: 3361; WAN024CCR; Start 431; Stop 455
ccgtctctctcaatatgaatacacc

SEQ ID NO: 353366 - DNA, 25 bp, Artificial
  probe
  misc_feature (1)..(25): SEQ ID NO: 3361; WAN024CCR; Start 278; Stop 302
gtatcaagattgtctggaccattca

SEQ ID NO: 353367 - DNA, 25 bp, Artificial
  probe
  misc_feature (1)..(25): SEQ ID NO: 3361; WAN024CCR; Start 432; Stop 456
cgtctctctcaatatgaatacaccg

SEQ ID NO: 353368 - DNA, 25 bp, Artificial
  probe
  misc_feature (1)..(25): SEQ ID NO: 3361; WAN024CCR; Start 430; Stop 454
gccgtctctctcaatatgaatacac

SEQ ID NO: 353369 - DNA, 25 bp, Artificial
  probe
  misc_feature (1)..(25): SEQ ID NO: 3361; WAN024CCR; Start 436; Stop 460
tctctcaatatgaatacaccgacta

SEQ ID NO: 353370 - DNA, 25 bp, Artificial
  probe
  misc_feature (1)..(25): SEQ ID NO: 3361; WAN024CCR; Start 429; Stop 453
tgccgtctctctcaatatgaataca

SEQ ID NO: 353371 - DNA, 25 bp, Artificial
  probe
  misc_feature (1)..(25): SEQ ID NO: 3361; WAN024CCR; Start 279; Stop 303
tatcaagattgtctggaccattcag

SEQ ID NO: 353372 - DNA, 25 bp, Artificial
  probe
  misc_feature (1)..(25): SEQ ID NO: 3361; WAN024CCR; Start 439; Stop 463
ctcaatatgaatacaccgactatca

SEQ ID NO: 353373 - DNA, 25 bp, Artificial
  probe
  misc_feature (1)..(25): SEQ ID NO: 3361; WAN024CCR; Start 400; Stop 424
aatattcaggtaaccgaactcaatg

SEQ ID NO: 353374 - DNA, 25 bp, Artificial
  probe
  misc_feature (1)..(25): SEQ ID NO: 3361; WAN024CCR; Start 577; Stop 601
gccattatgattatcgaagttgaca

SEQ ID NO: 353375 - DNA, 25 bp, Artificial
  probe
  misc_feature (1)..(25): SEQ ID NO: 3361; WAN024CCR; Start 576; Stop 600
agccattatgattatcgaagttgac

SEQ ID NO: 353376 - DNA, 25 bp, Artificial
  probe
  misc_feature (1)..(25): SEQ ID NO: 3361; WAN024CCR; Start 438; Stop 462
tctcaatatgaatacaccgactatc

SEQ ID NO: 353377 - DNA, 25 bp, Artificial
  probe
  misc_feature (1)..(25): SEQ ID NO: 3361; WAN024CCR; Start 437; Stop 461
ctctcaatatgaatacaccgactat

SEQ ID NO: 353378 - DNA, 25 bp, Artificial
  probe
  misc_feature (1)..(25): SEQ ID NO: 3361; WAN024CCR; Start 575; Stop 599
aagccattatgattatcgaagttga

SEQ ID NO: 353379 - DNA, 25 bp, Artificial
  probe
  misc_feature (1)..(25): SEQ ID NO: 3361; WAN024CCR; Start 460; Stop 484
atcatcatcgttcatcaagatattc

SEQ ID NO: 353380 - DNA, 25 bp, Artificial
  probe
  misc_feature (1)..(25): SEQ ID NO: 3361; WAN024CCR; Start 277; Stop 301
ggtatcaagattgtctggaccattc

SEQ ID NO: 353381 - DNA, 25 bp, Artificial
  probe
  misc_feature (1)..(25): SEQ ID NO: 3361; WAN024CCR; Start 154; Stop 178
tttaactcatttgccaagacctatc

SEQ ID NO: 353382 - DNA, 25 bp, Artificial
  probe
  misc_feature (1)..(25): SEQ ID NO: 3361; WAN024CCR; Start 514; Stop 538
ctttcccgctatggtatcaatatcg

SEQ ID NO: 353383 - DNA, 25 bp, Artificial
  probe
  misc_feature (1)..(25): SEQ ID NO: 3362; WAN024EWM; Start 140; Stop 164
gtaagtccactctgatgaatacgat

SEQ ID NO: 353384 - DNA, 25 bp, Artificial
  probe
  misc_feature (1)..(25): SEQ ID NO: 3362; WAN024EWM; Start 142; Stop 166
aagtccactctgatgaatacgattg

SEQ ID NO: 353385 - DNA, 25 bp, Artificial
  probe
  misc_feature (1)..(25): SEQ ID NO: 3362; WAN024EWM; Start 141; Stop 165
taagtccactctgatgaatacgatt

SEQ ID NO: 353386 - DNA, 25 bp, Artificial
  probe
  misc_feature (1)..(25): SEQ ID NO: 3362; WAN024EWM; Start 484; Stop 508
aacaatccttctattatcctagcgg

SEQ ID NO: 353387 - DNA, 25 bp, Artificial
  probe
  misc_feature (1)..(25): SEQ ID NO: 3362; WAN024EWM; Start 388; Stop 412
ttagacaaggttgaattgacagaac

SEQ ID NO: 353388 - DNA, 25 bp, Artificial
  probe
  misc_feature (1)..(25): SEQ ID NO: 3362; WAN024EWM; Start 139; Stop 163
ggtaagtccactctgatgaatacga

SEQ ID NO: 353389 - DNA, 25 bp, Artificial
  probe
  misc_feature (1)..(25): SEQ ID NO: 3362; WAN024EWM; Start 389; Stop 413
tagacaaggttgaattgacagaacg

SEQ ID NO: 353390 - DNA, 25 bp, Artificial
  probe
  misc_feature (1)..(25): SEQ ID NO: 3362; WAN024EWM; Start 154; Stop 178
atgaatacgattggcatgttggata

SEQ ID NO: 353391 - DNA, 25 bp, Artificial
  probe
  misc_feature (1)..(25): SEQ ID NO: 3362; WAN024EWM; Start 155; Stop 179
tgaatacgattggcatgttggatac

SEQ ID NO: 353392 - DNA, 25 bp, Artificial
  probe
  misc_feature (1)..(25): SEQ ID NO: 3362; WAN024EWM; Start 149; Stop 173
ctctgatgaatacgattggcatgtt

SEQ ID NO: 353393 - DNA, 25 bp, Artificial
  probe
  misc_feature (1)..(25): SEQ ID NO: 3362; WAN024EWM; Start 485; Stop 509
acaatccttctattatcctagcgga

SEQ ID NO: 353394 - DNA, 25 bp, Artificial
  probe
  misc_feature (1)..(25): SEQ ID NO: 3362; WAN024EWM; Start 153; Stop 177
gatgaatacgattggcatgttggat

SEQ ID NO: 353395 - DNA, 25 bp, Artificial
  probe
  misc_feature (1)..(25): SEQ ID NO: 3362; WAN024EWM; Start 150; Stop 174
tctgatgaatacgattggcatgttg

SEQ ID NO: 353396 - DNA, 25 bp, Artificial
  probe
  misc_feature (1)..(25): SEQ ID NO: 3362; WAN024EWM; Start 137; Stop 161
ctggtaagtccactctgatgaatac

SEQ ID NO: 353397 - DNA, 25 bp, Artificial
  probe
  misc_feature (1)..(25): SEQ ID NO: 3362; WAN024EWM; Start 136; Stop 160
tctggtaagtccactctgatgaata

SEQ ID NO: 353398 - DNA, 25 bp, Artificial
  probe
  misc_feature (1)..(25): SEQ ID NO: 3362; WAN024EWM; Start 185; Stop 209
ccagtggagaatattatcttgaagg

SEQ ID NO: 353399 - DNA, 25 bp, Artificial
  probe
  misc_feature (1)..(25): SEQ ID NO: 3362; WAN024EWM; Start 156; Stop 180
gaatacgattggcatgttggataca

SEQ ID NO: 353400 - DNA, 25 bp, Artificial
  probe
  misc_feature (1)..(25): SEQ ID NO: 3362; WAN024EWM; Start 412; Stop 436
cgtagtcaccatttaccttcagaat

SEQ ID NO: 353401 - DNA, 25 bp, Artificial
  probe
  misc_feature (1)..(25): SEQ ID NO: 3362; WAN024EWM; Start 147; Stop 171
cactctgatgaatacgattggcatg

SEQ ID NO: 353402 - DNA, 25 bp, Artificial
  probe
  misc_feature (1)..(25): SEQ ID NO: 3362; WAN024EWM; Start 91; Stop 115
gaagtgaatgagggtgaatttgtag

SEQ ID NO: 353403 - DNA, 25 bp, Artificial
  probe
  misc_feature (1)..(25): SEQ ID NO: 3362; WAN024EWM; Start 90; Stop 114
agaagtgaatgagggtgaatttgta

SEQ ID NO: 353404 - DNA, 25 bp, Artificial
  probe
  misc_feature (1)..(25): SEQ ID NO: 3362; WAN024EWM; Start 89; Stop 113
tagaagtgaatgagggtgaatttgt

SEQ ID NO: 353405 - DNA, 25 bp, Artificial
  probe
  misc_feature (1)..(25): SEQ ID NO: 3362; WAN024EWM; Start 319; Stop 343
aatgtagaattgcccttgatttacg

SEQ ID NO: 353406 - DNA, 25 bp, Artificial
  probe
  misc_feature (1)..(25): SEQ ID NO: 3362; WAN024EWM; Start 182; Stop 206
caaccagtggagaatattatcttga

SEQ ID NO: 353407 - DNA, 25 bp, Artificial
  probe
  misc_feature (1)..(25): SEQ ID NO: 3362; WAN024EWM; Start 157; Stop 181
aatacgattggcatgttggatacac

SEQ ID NO: 353408 - DNA, 25 bp, Artificial
  probe
  misc_feature (1)..(25): SEQ ID NO: 3362; WAN024EWM; Start 186; Stop 210
cagtggagaatattatcttgaaggt

SEQ ID NO: 353409 - DNA, 25 bp, Artificial
  probe
  misc_feature (1)..(25): SEQ ID NO: 3362; WAN024EWM; Start 184; Stop 208
accagtggagaatattatcttgaag

SEQ ID NO: 353410 - DNA, 25 bp, Artificial
  probe
  misc_feature (1)..(25): SEQ ID NO: 3362; WAN024EWM; Start 148; Stop 172
actctgatgaatacgattggcatgt

SEQ ID NO: 353411 - DNA, 25 bp, Artificial
  probe
  misc_feature (1)..(25): SEQ ID NO: 3362; WAN024EWM; Start 88; Stop 112
ctagaagtgaatgagggtgaatttg

SEQ ID NO: 353412 - DNA, 25 bp, Artificial
  probe
  misc_feature (1)..(25): SEQ ID NO: 3362; WAN024EWM; Start 474; Stop 498
tgccttggtaaacaatccttctatt

SEQ ID NO: 353413 - DNA, 25 bp, Artificial
  probe
  misc_feature (1)..(25): SEQ ID NO: 3362; WAN024EWM; Start 413; Stop 437
gtagtcaccatttaccttcagaatt

SEQ ID NO: 353414 - DNA, 25 bp, Artificial
  probe
  misc_feature (1)..(25): SEQ ID NO: 3362; WAN024EWM; Start 174; Stop 198
ggatacaccaaccagtggagaatat

SEQ ID NO: 353415 - DNA, 25 bp, Artificial
  probe
  misc_feature (1)..(25): SEQ ID NO: 3362; WAN024EWM; Start 135; Stop 159
gtctggtaagtccactctgatgaat

SEQ ID NO: 353416 - DNA, 25 bp, Artificial
  probe
  misc_feature (1)..(25): SEQ ID NO: 3363; WAN024FZJ; Start 24; Stop 48
aacgatgatgcggattactgataat

SEQ ID NO: 353417 - DNA, 25 bp, Artificial
  probe
  misc_feature (1)..(25): SEQ ID NO: 3363; WAN024FZJ; Start 609; Stop 633
ggtccgtcacactattgaatacatt

SEQ ID NO: 353418 - DNA, 25 bp, Artificial
  probe
  misc_feature (1)..(25): SEQ ID NO: 3363; WAN024FZJ; Start 610; Stop 634
gtccgtcacactattgaatacatta

SEQ ID NO: 353419 - DNA, 25 bp, Artificial
  probe
  misc_feature (1)..(25): SEQ ID NO: 3363; WAN024FZJ; Start 606; Stop 630
gttggtccgtcacactattgaatac

SEQ ID NO: 353420 - DNA, 25 bp, Artificial
  probe
  misc_feature (1)..(25): SEQ ID NO: 3363; WAN024FZJ; Start 605; Stop 629
agttggtccgtcacactattgaata

SEQ ID NO: 353421 - DNA, 25 bp, Artificial
  probe
  misc_feature (1)..(25): SEQ ID NO: 3363; WAN024FZJ; Start 608; Stop 632
tggtccgtcacactattgaatacat

SEQ ID NO: 353422 - DNA, 25 bp, Artificial
  probe
  misc_feature (1)..(25): SEQ ID NO: 3363; WAN024FZJ; Start 611; Stop 635
tccgtcacactattgaatacattaa

SEQ ID NO: 353423 - DNA, 25 bp, Artificial
  probe
  misc_feature (1)..(25): SEQ ID NO: 3363; WAN024FZJ; Start 607; Stop 631
ttggtccgtcacactattgaataca

SEQ ID NO: 353424 - DNA, 25 bp, Artificial
  probe
  misc_feature (1)..(25): SEQ ID NO: 3363; WAN024FZJ; Start 612; Stop 636
ccgtcacactattgaatacattaag

SEQ ID NO: 353425 - DNA, 25 bp, Artificial
  probe
  misc_feature (1)..(25): SEQ ID NO: 3363; WAN024FZJ; Start 877; Stop 901
tatggtattctctttgatgttgcct

SEQ ID NO: 353426 - DNA, 25 bp, Artificial
  probe
  misc_feature (1)..(25): SEQ ID NO: 3363; WAN024FZJ; Start 876; Stop 900
ctatggtattctctttgatgttgcc

SEQ ID NO: 353427 - DNA, 25 bp, Artificial
  probe
  misc_feature (1)..(25): SEQ ID NO: 3363; WAN024FZJ; Start 23; Stop 47
aaacgatgatgcggattactgataa

SEQ ID NO: 353428 - DNA, 25 bp, Artificial
  probe
  misc_feature (1)..(25): SEQ ID NO: 3363; WAN024FZJ; Start 875; Stop 899
tctatggtattctctttgatgttgc

SEQ ID NO: 353429 - DNA, 25 bp, Artificial
  probe
  misc_feature (1)..(25): SEQ ID NO: 3363; WAN024FZJ; Start 815; Stop 839
aactttgtctgatgatcctaaacca

SEQ ID NO: 353430 - DNA, 25 bp, Artificial
  probe
  misc_feature (1)..(25): SEQ ID NO: 3363; WAN024FZJ; Start 814; Stop 838
gaactttgtctgatgatcctaaacc

SEQ ID NO: 353431 - DNA, 25 bp, Artificial
  probe
  misc_feature (1)..(25): SEQ ID NO: 3363; WAN024FZJ; Start 847; Stop 871
cacggtttagggtatcaagatcaaa

SEQ ID NO: 353432 - DNA, 25 bp, Artificial
  probe
  misc_feature (1)..(25): SEQ ID NO: 3363; WAN024FZJ; Start 613; Stop 637
cgtcacactattgaatacattaaga

SEQ ID NO: 353433 - DNA, 25 bp, Artificial
  probe
  misc_feature (1)..(25): SEQ ID NO: 3363; WAN024FZJ; Start 820; Stop 844
tgtctgatgatcctaaaccaagaaa

SEQ ID NO: 353434 - DNA, 25 bp, Artificial
  probe
  misc_feature (1)..(25): SEQ ID NO: 3363; WAN024FZJ; Start 819; Stop 843
ttgtctgatgatcctaaaccaagaa

SEQ ID NO: 353435 - DNA, 25 bp, Artificial
  probe
  misc_feature (1)..(25): SEQ ID NO: 3363; WAN024FZJ; Start 818; Stop 842
tttgtctgatgatcctaaaccaaga

SEQ ID NO: 353436 - DNA, 25 bp, Artificial
  probe
  misc_feature (1)..(25): SEQ ID NO: 3363; WAN024FZJ; Start 816; Stop 840
actttgtctgatgatcctaaaccaa

SEQ ID NO: 353437 - DNA, 25 bp, Artificial
  probe
  misc_feature (1)..(25): SEQ ID NO: 3363; WAN024FZJ; Start 817; Stop 841
ctttgtctgatgatcctaaaccaag

SEQ ID NO: 353438 - DNA, 25 bp, Artificial
  probe
  misc_feature (1)..(25): SEQ ID NO: 3363; WAN024FZJ; Start 843; Stop 867
aaagcacggtttagggtatcaagat

SEQ ID NO: 353439 - DNA, 25 bp, Artificial
  probe
  misc_feature (1)..(25): SEQ ID NO: 3363; WAN024FZJ; Start 813; Stop 837
agaactttgtctgatgatcctaaac

SEQ ID NO: 353440 - DNA, 25 bp, Artificial
  probe
  misc_feature (1)..(25): SEQ ID NO: 3363; WAN024FZJ; Start 1023; Stop 1047
ttatgacagagaacgaaagattgtt

SEQ ID NO: 353441 - DNA, 25 bp, Artificial
  probe
  misc_feature (1)..(25): SEQ ID NO: 3363; WAN024FZJ; Start 1022; Stop 1046
tttatgacagagaacgaaagattgt

SEQ ID NO: 353442 - DNA, 25 bp, Artificial
  probe
  misc_feature (1)..(25): SEQ ID NO: 3363; WAN024FZJ; Start 811; Stop 835
caagaactttgtctgatgatcctaa

SEQ ID NO: 353443 - DNA, 25 bp, Artificial
  probe
  misc_feature (1)..(25): SEQ ID NO: 3363; WAN024FZJ; Start 812; Stop 836
aagaactttgtctgatgatcctaaa

SEQ ID NO: 353444 - DNA, 25 bp, Artificial
  probe
  misc_feature (1)..(25): SEQ ID NO: 3363; WAN024FZJ; Start 30; Stop 54
gatgcggattactgataatcaacac

SEQ ID NO: 353445 - DNA, 25 bp, Artificial
  probe
  misc_feature (1)..(25): SEQ ID NO: 3363; WAN024FZJ; Start 762; Stop 786
tcaatctaaacctatacgtcatgca

SEQ ID NO: 353446 - DNA, 25 bp, Artificial
  probe
  misc_feature (1)..(25): SEQ ID NO: 3363; WAN024FZJ; Start 33; Stop 57
gcggattactgataatcaacacaag

SEQ ID NO: 353447 - DNA, 25 bp, Artificial
  probe
  misc_feature (1)..(25): SEQ ID NO: 3363; WAN024FZJ; Start 29; Stop 53
tgatgcggattactgataatcaaca

SEQ ID NO: 353448 - DNA, 25 bp, Artificial
  probe
  misc_feature (1)..(25): SEQ ID NO: 3363; WAN024FZJ; Start 31; Stop 55
atgcggattactgataatcaacaca

SEQ ID NO: 353449 - DNA, 25 bp, Artificial
  probe
  misc_feature (1)..(25): SEQ ID NO: 3364; WAN024CPV; Start 233; Stop 257
aggataacatctctacagacggtat

SEQ ID NO: 353450 - DNA, 25 bp, Artificial
  probe
  misc_feature (1)..(25): SEQ ID NO: 3364; WAN024CPV; Start 232; Stop 256
aaggataacatctctacagacggta

SEQ ID NO: 353451 - DNA, 25 bp, Artificial
  probe
  misc_feature (1)..(25): SEQ ID NO: 3364; WAN024CPV; Start 231; Stop 255
taaggataacatctctacagacggt

SEQ ID NO: 353452 - DNA, 25 bp, Artificial
  probe
  misc_feature (1)..(25): SEQ ID NO: 3364; WAN024CPV; Start 234; Stop 258
ggataacatctctacagacggtatt

SEQ ID NO: 353453 - DNA, 25 bp, Artificial
  probe
  misc_feature (1)..(25): SEQ ID NO: 3364; WAN024CPV; Start 230; Stop 254
ttaaggataacatctctacagacgg

SEQ ID NO: 353454 - DNA, 25 bp, Artificial
  probe
  misc_feature (1)..(25): SEQ ID NO: 3364; WAN024CPV; Start 241; Stop 265
atctctacagacggtattctcacaa

SEQ ID NO: 353455 - DNA, 25 bp, Artificial
  probe
  misc_feature (1)..(25): SEQ ID NO: 3364; WAN024CPV; Start 238; Stop 262
aacatctctacagacggtattctca

SEQ ID NO: 353456 - DNA, 25 bp, Artificial
  probe
  misc_feature (1)..(25): SEQ ID NO: 3364; WAN024CPV; Start 237; Stop 261
taacatctctacagacggtattctc

SEQ ID NO: 353457 - DNA, 25 bp, Artificial
  probe
  misc_feature (1)..(25): SEQ ID NO: 3364; WAN024CPV; Start 240; Stop 264
catctctacagacggtattctcaca

SEQ ID NO: 353458 - DNA, 25 bp, Artificial
  probe
  misc_feature (1)..(25): SEQ ID NO: 3364; WAN024CPV; Start 239; Stop 263
acatctctacagacggtattctcac

SEQ ID NO: 353459 - DNA, 25 bp, Artificial
  probe
  misc_feature (1)..(25): SEQ ID NO: 3364; WAN024CPV; Start 236; Stop 260
ataacatctctacagacggtattct

SEQ ID NO: 353460 - DNA, 25 bp, Artificial
  probe
  misc_feature (1)..(25): SEQ ID NO: 3364; WAN024CPV; Start 243; Stop 267
ctctacagacggtattctcacaact

SEQ ID NO: 353461 - DNA, 25 bp, Artificial
  probe
  misc_feature (1)..(25): SEQ ID NO: 3364; WAN024CPV; Start 242; Stop 266
tctctacagacggtattctcacaac

SEQ ID NO: 353462 - DNA, 25 bp, Artificial
  probe
  misc_feature (1)..(25): SEQ ID NO: 3364; WAN024CPV; Start 235; Stop 259
gataacatctctacagacggtattc

SEQ ID NO: 353463 - DNA, 25 bp, Artificial
  probe
  misc_feature (1)..(25): SEQ ID NO: 3364; WAN024CPV; Start 216; Stop 240
aattccacttgctgttaaggataac

SEQ ID NO: 353464 - DNA, 25 bp, Artificial
  probe
  misc_feature (1)..(25): SEQ ID NO: 3364; WAN024CPV; Start 244; Stop 268
tctacagacggtattctcacaactg

SEQ ID NO: 353465 - DNA, 25 bp, Artificial
  probe
  misc_feature (1)..(25): SEQ ID NO: 3364; WAN024CPV; Start 229; Stop 253
gttaaggataacatctctacagacg

SEQ ID NO: 353466 - DNA, 25 bp, Artificial
  probe
  misc_feature (1)..(25): SEQ ID NO: 3364; WAN024CPV; Start 501; Stop 525
cttgtcacttggttctgatactggt

SEQ ID NO: 353467 - DNA, 25 bp, Artificial
  probe
  misc_feature (1)..(25): SEQ ID NO: 3364; WAN024CPV; Start 1013; Stop 1037
ttgatgaaatctatgtaaacagccg

SEQ ID NO: 353468 - DNA, 25 bp, Artificial
  probe
  misc_feature (1)..(25): SEQ ID NO: 3364; WAN024CPV; Start 695; Stop 719
aagatgctaaagactctacttctgc

SEQ ID NO: 353469 - DNA, 25 bp, Artificial
  probe
  misc_feature (1)..(25): SEQ ID NO: 3364; WAN024CPV; Start 284; Stop 308
tctacaactatgagccaatctttga

SEQ ID NO: 353470 - DNA, 25 bp, Artificial
  probe
  misc_feature (1)..(25): SEQ ID NO: 3364; WAN024CPV; Start 697; Stop 721
gatgctaaagactctacttctgctc

SEQ ID NO: 353471 - DNA, 25 bp, Artificial
  probe
  misc_feature (1)..(25): SEQ ID NO: 3364; WAN024CPV; Start 696; Stop 720
agatgctaaagactctacttctgct

SEQ ID NO: 353472 - DNA, 25 bp, Artificial
  probe
  misc_feature (1)..(25): SEQ ID NO: 3364; WAN024CPV; Start 1084; Stop 1108
actttcagtctttcatcaggttact

SEQ ID NO: 353473 - DNA, 25 bp, Artificial
  probe
  misc_feature (1)..(25): SEQ ID NO: 3364; WAN024CPV; Start 286; Stop 310
tacaactatgagccaatctttgatg

SEQ ID NO: 353474 - DNA, 25 bp, Artificial
  probe
  misc_feature (1)..(25): SEQ ID NO: 3364; WAN024CPV; Start 701; Stop 725
ctaaagactctacttctgctcctgt

SEQ ID NO: 353475 - DNA, 25 bp, Artificial
  probe
  misc_feature (1)..(25): SEQ ID NO: 3364; WAN024CPV; Start 285; Stop 309
ctacaactatgagccaatctttgat

SEQ ID NO: 353476 - DNA, 25 bp, Artificial
  probe
  misc_feature (1)..(25): SEQ ID NO: 3364; WAN024CPV; Start 884; Stop 908
aagtcagccttcctcactctaaata

SEQ ID NO: 353477 - DNA, 25 bp, Artificial
  probe
  misc_feature (1)..(25): SEQ ID NO: 3364; WAN024CPV; Start 283; Stop 307
ctctacaactatgagccaatctttg

SEQ ID NO: 353478 - DNA, 25 bp, Artificial
  probe
  misc_feature (1)..(25): SEQ ID NO: 3364; WAN024CPV; Start 1012; Stop 1036
cttgatgaaatctatgtaaacagcc

SEQ ID NO: 353479 - DNA, 25 bp, Artificial
  probe
  misc_feature (1)..(25): SEQ ID NO: 3364; WAN024CPV; Start 502; Stop 526
ttgtcacttggttctgatactggtg

SEQ ID NO: 353480 - DNA, 25 bp, Artificial
  probe
  misc_feature (1)..(25): SEQ ID NO: 3364; WAN024CPV; Start 1083; Stop 1107
tactttcagtctttcatcaggttac

SEQ ID NO: 353481 - DNA, 25 bp, Artificial
  probe
  misc_feature (1)..(25): SEQ ID NO: 3364; WAN024CPV; Start 885; Stop 909
agtcagccttcctcactctaaatac

SEQ ID NO: 353482 - DNA, 25 bp, Artificial
  probe
  misc_feature (1)..(25): SEQ ID NO: 3365; WAN024D7Y; Start 5; Stop 29
tgcacgtaacagtaggtgaattaat

SEQ ID NO: 353483 - DNA, 25 bp, Artificial
  probe
  misc_feature (1)..(25): SEQ ID NO: 3365; WAN024D7Y; Start 4; Stop 28
atgcacgtaacagtaggtgaattaa

SEQ ID NO: 353484 - DNA, 25 bp, Artificial
  probe
  misc_feature (1)..(25): SEQ ID NO: 3365; WAN024D7Y; Start 3; Stop 27
gatgcacgtaacagtaggtgaatta

SEQ ID NO: 353485 - DNA, 25 bp, Artificial
  probe
  misc_feature (1)..(25): SEQ ID NO: 3365; WAN024D7Y; Start 222; Stop 246
ccgtaaagaagctaagacaatcatt

SEQ ID NO: 353486 - DNA, 25 bp, Artificial
  probe
  misc_feature (1)..(25): SEQ ID NO: 3365; WAN024D7Y; Start 221; Stop 245
gccgtaaagaagctaagacaatcat

SEQ ID NO: 353487 - DNA, 25 bp, Artificial
  probe
  misc_feature (1)..(25): SEQ ID NO: 3365; WAN024D7Y; Start 468; Stop 492
tcagtatatcgatcagctaggagaa

SEQ ID NO: 353488 - DNA, 25 bp, Artificial
  probe
  misc_feature (1)..(25): SEQ ID NO: 3365; WAN024D7Y; Start 469; Stop 493
cagtatatcgatcagctaggagaag

SEQ ID NO: 353489 - DNA, 25 bp, Artificial
  probe
  misc_feature (1)..(25): SEQ ID NO: 3365; WAN024D7Y; Start 9; Stop 33
cgtaacagtaggtgaattaattggt

SEQ ID NO: 353490 - DNA, 25 bp, Artificial
  probe
  misc_feature (1)..(25): SEQ ID NO: 3365; WAN024D7Y; Start 8; Stop 32
acgtaacagtaggtgaattaattgg

SEQ ID NO: 353491 - DNA, 25 bp, Artificial
  probe
  misc_feature (1)..(25): SEQ ID NO: 3365; WAN024D7Y; Start 467; Stop 491
atcagtatatcgatcagctaggaga

SEQ ID NO: 353492 - DNA, 25 bp, Artificial
  probe
  misc_feature (1)..(25): SEQ ID NO: 3365; WAN024D7Y; Start 223; Stop 247
cgtaaagaagctaagacaatcattg

SEQ ID NO: 353493 - DNA, 25 bp, Artificial
  probe
  misc_feature (1)..(25): SEQ ID NO: 3365; WAN024D7Y; Start 2; Stop 26
tgatgcacgtaacagtaggtgaatt

SEQ ID NO: 353494 - DNA, 25 bp, Artificial
  probe
  misc_feature (1)..(25): SEQ ID NO: 3365; WAN024D7Y; Start 265; Stop 289
gctgagcaaagtaaggctaatatct

SEQ ID NO: 353495 - DNA, 25 bp, Artificial
  probe
  misc_feature (1)..(25): SEQ ID NO: 3365; WAN024D7Y; Start 48; Stop 72
cactggctcttttattcttttgcta

SEQ ID NO: 353496 - DNA, 25 bp, Artificial
  probe
  misc_feature (1)..(25): SEQ ID NO: 3365; WAN024D7Y; Start 46; Stop 70
atcactggctcttttattcttttgc

SEQ ID NO: 353497 - DNA, 25 bp, Artificial
  probe
  misc_feature (1)..(25): SEQ ID NO: 3365; WAN024D7Y; Start 87; Stop 111
atttgcatggtctaatattacaggc

SEQ ID NO: 353498 - DNA, 25 bp, Artificial
  probe
  misc_feature (1)..(25): SEQ ID NO: 3365; WAN024D7Y; Start 1; Stop 25
ctgatgcacgtaacagtaggtgaat

SEQ ID NO: 353499 - DNA, 25 bp, Artificial
  probe
  misc_feature (1)..(25): SEQ ID NO: 3365; WAN024D7Y; Start 266; Stop 290
ctgagcaaagtaaggctaatatctt

SEQ ID NO: 353500 - DNA, 25 bp, Artificial
  probe
  misc_feature (1)..(25): SEQ ID NO: 3365; WAN024D7Y; Start 91; Stop 115
gcatggtctaatattacaggcattt

SEQ ID NO: 353501 - DNA, 25 bp, Artificial
  probe
  misc_feature (1)..(25): SEQ ID NO: 3365; WAN024D7Y; Start 47; Stop 71
tcactggctcttttattcttttgct

SEQ ID NO: 353502 - DNA, 25 bp, Artificial
  probe
  misc_feature (1)..(25): SEQ ID NO: 3365; WAN024D7Y; Start 6; Stop 30
gcacgtaacagtaggtgaattaatt

SEQ ID NO: 353503 - DNA, 25 bp, Artificial
  probe
  misc_feature (1)..(25): SEQ ID NO: 3365; WAN024D7Y; Start 51; Stop 75
tggctcttttattcttttgctagtc

SEQ ID NO: 353504 - DNA, 25 bp, Artificial
  probe
  misc_feature (1)..(25): SEQ ID NO: 3365; WAN024D7Y; Start 50; Stop 74
ctggctcttttattcttttgctagt

SEQ ID NO: 353505 - DNA, 25 bp, Artificial
  probe
  misc_feature (1)..(25): SEQ ID NO: 3365; WAN024D7Y; Start 49; Stop 73
actggctcttttattcttttgctag

SEQ ID NO: 353506 - DNA, 25 bp, Artificial
  probe
  misc_feature (1)..(25): SEQ ID NO: 3365; WAN024D7Y; Start 52; Stop 76
ggctcttttattcttttgctagtct

SEQ ID NO: 353507 - DNA, 25 bp, Artificial
  probe
  misc_feature (1)..(25): SEQ ID NO: 3365; WAN024D7Y; Start 90; Stop 114
tgcatggtctaatattacaggcatt

SEQ ID NO: 353508 - DNA, 25 bp, Artificial
  probe
  misc_feature (1)..(25): SEQ ID NO: 3365; WAN024D7Y; Start 89; Stop 113
ttgcatggtctaatattacaggcat

SEQ ID NO: 353509 - DNA, 25 bp, Artificial
  probe
  misc_feature (1)..(25): SEQ ID NO: 3365; WAN024D7Y; Start 45; Stop 69
aatcactggctcttttattcttttg

SEQ ID NO: 353510 - DNA, 25 bp, Artificial
  probe
  misc_feature (1)..(25): SEQ ID NO: 3365; WAN024D7Y; Start 226; Stop 250
aaagaagctaagacaatcattgaaa

SEQ ID NO: 353511 - DNA, 25 bp, Artificial
  probe
  misc_feature (1)..(25): SEQ ID NO: 3365; WAN024D7Y; Start 224; Stop 248
gtaaagaagctaagacaatcattga

SEQ ID NO: 353512 - DNA, 25 bp, Artificial
  probe
  misc_feature (1)..(25): SEQ ID NO: 3365; WAN024D7Y; Start 264; Stop 288
agctgagcaaagtaaggctaatatc

SEQ ID NO: 353513 - DNA, 25 bp, Artificial
  probe
  misc_feature (1)..(25): SEQ ID NO: 3365; WAN024D7Y; Start 7; Stop 31
cacgtaacagtaggtgaattaattg

SEQ ID NO: 353514 - DNA, 25 bp, Artificial
  probe
  misc_feature (1)..(25): SEQ ID NO: 3365; WAN024D7Y; Start 267; Stop 291
tgagcaaagtaaggctaatatctta

SEQ ID NO: 353515 - DNA, 25 bp, Artificial
  probe
  misc_feature (1)..(25): SEQ ID NO: 3366; WAN024B5X; Start 458; Stop 482
gttatggaacggactatgcttgtaa

SEQ ID NO: 353516 - DNA, 25 bp, Artificial
  probe
  misc_feature (1)..(25): SEQ ID NO: 3366; WAN024B5X; Start 451; Stop 475
ttaacaggttatggaacggactatg

SEQ ID NO: 353517 - DNA, 25 bp, Artificial
  probe
  misc_feature (1)..(25): SEQ ID NO: 3366; WAN024B5X; Start 457; Stop 481
ggttatggaacggactatgcttgta

SEQ ID NO: 353518 - DNA, 25 bp, Artificial
  probe
  misc_feature (1)..(25): SEQ ID NO: 3366; WAN024B5X; Start 459; Stop 483
ttatggaacggactatgcttgtaaa

SEQ ID NO: 353519 - DNA, 25 bp, Artificial
  probe
  misc_feature (1)..(25): SEQ ID NO: 3366; WAN024B5X; Start 452; Stop 476
taacaggttatggaacggactatgc

SEQ ID NO: 353520 - DNA, 25 bp, Artificial
  probe
  misc_feature (1)..(25): SEQ ID NO: 3366; WAN024B5X; Start 372; Stop 396
gtatttagtaacgaatgaccaacgc

SEQ ID NO: 353521 - DNA, 25 bp, Artificial
  probe
  misc_feature (1)..(25): SEQ ID NO: 3366; WAN024B5X; Start 371; Stop 395
agtatttagtaacgaatgaccaacg

SEQ ID NO: 353522 - DNA, 25 bp, Artificial
  probe
  misc_feature (1)..(25): SEQ ID NO: 3366; WAN024B5X; Start 737; Stop 761
atggctatcatcctctttatgcttt

SEQ ID NO: 353523 - DNA, 25 bp, Artificial
  probe
  misc_feature (1)..(25): SEQ ID NO: 3366; WAN024B5X; Start 738; Stop 762
tggctatcatcctctttatgctttc

SEQ ID NO: 353524 - DNA, 25 bp, Artificial
  probe
  misc_feature (1)..(25): SEQ ID NO: 3366; WAN024B5X; Start 460; Stop 484
tatggaacggactatgcttgtaaag

SEQ ID NO: 353525 - DNA, 25 bp, Artificial
  probe
  misc_feature (1)..(25): SEQ ID NO: 3366; WAN024B5X; Start 422; Stop 446
atatccttgtccagttcctctttca

SEQ ID NO: 353526 - DNA, 25 bp, Artificial
  probe
  misc_feature (1)..(25): SEQ ID NO: 3366; WAN024B5X; Start 465; Stop 489
aacggactatgcttgtaaagaattg

SEQ ID NO: 353527 - DNA, 25 bp, Artificial
  probe
  misc_feature (1)..(25): SEQ ID NO: 3366; WAN024B5X; Start 415; Stop 439
gattcagatatccttgtccagttcc

SEQ ID NO: 353528 - DNA, 25 bp, Artificial
  probe
  misc_feature (1)..(25): SEQ ID NO: 3366; WAN024B5X; Start 464; Stop 488
gaacggactatgcttgtaaagaatt

SEQ ID NO: 353529 - DNA, 25 bp, Artificial
  probe
  misc_feature (1)..(25): SEQ ID NO: 3366; WAN024B5X; Start 416; Stop 440
attcagatatccttgtccagttcct

SEQ ID NO: 353530 - DNA, 25 bp, Artificial
  probe
  misc_feature (1)..(25): SEQ ID NO: 3366; WAN024B5X; Start 466; Stop 490
acggactatgcttgtaaagaattgt

SEQ ID NO: 353531 - DNA, 25 bp, Artificial
  probe
  misc_feature (1)..(25): SEQ ID NO: 3366; WAN024B5X; Start 373; Stop 397
tatttagtaacgaatgaccaacgcc

SEQ ID NO: 353532 - DNA, 25 bp, Artificial
  probe
  misc_feature (1)..(25): SEQ ID NO: 3366; WAN024B5X; Start 463; Stop 487
ggaacggactatgcttgtaaagaat

SEQ ID NO: 353533 - DNA, 25 bp, Artificial
  probe
  misc_feature (1)..(25): SEQ ID NO: 3366; WAN024B5X; Start 1529; Stop 1553
ttccttatgaaccacctagaagaaa

SEQ ID NO: 353534 - DNA, 25 bp, Artificial
  probe
  misc_feature (1)..(25): SEQ ID NO: 3366; WAN024B5X; Start 417; Stop 441
ttcagatatccttgtccagttcctc

SEQ ID NO: 353535 - DNA, 25 bp, Artificial
  probe
  misc_feature (1)..(25): SEQ ID NO: 3366; WAN024B5X; Start 423; Stop 447
tatccttgtccagttcctctttcaa

SEQ ID NO: 353536 - DNA, 25 bp, Artificial
  probe
  misc_feature (1)..(25): SEQ ID NO: 3366; WAN024B5X; Start 739; Stop 763
ggctatcatcctctttatgctttcg

SEQ ID NO: 353537 - DNA, 25 bp, Artificial
  probe
  misc_feature (1)..(25): SEQ ID NO: 3366; WAN024B5X; Start 419; Stop 443
cagatatccttgtccagttcctctt

SEQ ID NO: 353538 - DNA, 25 bp, Artificial
  probe
  misc_feature (1)..(25): SEQ ID NO: 3366; WAN024B5X; Start 467; Stop 491
cggactatgcttgtaaagaattgtc

SEQ ID NO: 353539 - DNA, 25 bp, Artificial
  probe
  misc_feature (1)..(25): SEQ ID NO: 3366; WAN024B5X; Start 736; Stop 760
catggctatcatcctctttatgctt

SEQ ID NO: 353540 - DNA, 25 bp, Artificial
  probe
  misc_feature (1)..(25): SEQ ID NO: 3366; WAN024B5X; Start 468; Stop 492
ggactatgcttgtaaagaattgtca

SEQ ID NO: 353541 - DNA, 25 bp, Artificial
  probe
  misc_feature (1)..(25): SEQ ID NO: 3366; WAN024B5X; Start 461; Stop 485
atggaacggactatgcttgtaaaga

SEQ ID NO: 353542 - DNA, 25 bp, Artificial
  probe
  misc_feature (1)..(25): SEQ ID NO: 3366; WAN024B5X; Start 929; Stop 953
aaacagggcaatactacctcataaa

SEQ ID NO: 353543 - DNA, 25 bp, Artificial
  probe
  misc_feature (1)..(25): SEQ ID NO: 3366; WAN024B5X; Start 455; Stop 479
caggttatggaacggactatgcttg

SEQ ID NO: 353544 - DNA, 25 bp, Artificial
  probe
  misc_feature (1)..(25): SEQ ID NO: 3366; WAN024B5X; Start 450; Stop 474
gttaacaggttatggaacggactat

SEQ ID NO: 353545 - DNA, 25 bp, Artificial
  probe
  misc_feature (1)..(25): SEQ ID NO: 3366; WAN024B5X; Start 734; Stop 758
ctcatggctatcatcctctttatgc

SEQ ID NO: 353546 - DNA, 25 bp, Artificial
  probe
  misc_feature (1)..(25): SEQ ID NO: 3366; WAN024B5X; Start 733; Stop 757
gctcatggctatcatcctctttatg

SEQ ID NO: 353547 - DNA, 25 bp, Artificial
  probe
  misc_feature (1)..(25): SEQ ID NO: 3366; WAN024B5X; Start 462; Stop 486
tggaacggactatgcttgtaaagaa

SEQ ID NO: 353548 - DNA, 25 bp, Artificial
  probe
  misc_feature (1)..(25): SEQ ID NO: 3367; WAN024DBP; Start 390; Stop 414
ggtaactcataatcatccagaaggt

SEQ ID NO: 353549 - DNA, 25 bp, Artificial
  probe
  misc_feature (1)..(25): SEQ ID NO: 3367; WAN024DBP; Start 395; Stop 419
ctcataatcatccagaaggtgtcaa

SEQ ID NO: 353550 - DNA, 25 bp, Artificial
  probe
  misc_feature (1)..(25): SEQ ID NO: 3367; WAN024DBP; Start 393; Stop 417
aactcataatcatccagaaggtgtc

SEQ ID NO: 353551 - DNA, 25 bp, Artificial
  probe
  misc_feature (1)..(25): SEQ ID NO: 3367; WAN024DBP; Start 389; Stop 413
aggtaactcataatcatccagaagg

SEQ ID NO: 353552 - DNA, 25 bp, Artificial
  probe
  misc_feature (1)..(25): SEQ ID NO: 3367; WAN024DBP; Start 392; Stop 416
taactcataatcatccagaaggtgt

SEQ ID NO: 353553 - DNA, 25 bp, Artificial
  probe
  misc_feature (1)..(25): SEQ ID NO: 3367; WAN024DBP; Start 391; Stop 415
gtaactcataatcatccagaaggtg

SEQ ID NO: 353554 - DNA, 25 bp, Artificial
  probe
  misc_feature (1)..(25): SEQ ID NO: 3367; WAN024DBP; Start 18; Stop 42
tattggagatattgtcggttctgtt

SEQ ID NO: 353555 - DNA, 25 bp, Artificial
  probe
  misc_feature (1)..(25): SEQ ID NO: 3367; WAN024DBP; Start 17; Stop 41
ttattggagatattgtcggttctgt

SEQ ID NO: 353556 - DNA, 25 bp, Artificial
  probe
  misc_feature (1)..(25): SEQ ID NO: 3367; WAN024DBP; Start 394; Stop 418
actcataatcatccagaaggtgtca

SEQ ID NO: 353557 - DNA, 25 bp, Artificial
  probe
  misc_feature (1)..(25): SEQ ID NO: 3367; WAN024DBP; Start 135; Stop 159
agaagcaattatgaatggtggacaa

SEQ ID NO: 353558 - DNA, 25 bp, Artificial
  probe
  misc_feature (1)..(25): SEQ ID NO: 3367; WAN024DBP; Start 196; Stop 220
agaatgtatccgaatgctgattacg

SEQ ID NO: 353559 - DNA, 25 bp, Artificial
  probe
  misc_feature (1)..(25): SEQ ID NO: 3367; WAN024DBP; Start 16; Stop 40
attattggagatattgtcggttctg

SEQ ID NO: 353560 - DNA, 25 bp, Artificial
  probe
  misc_feature (1)..(25): SEQ ID NO: 3367; WAN024DBP; Start 386; Stop 410
cagaggtaactcataatcatccaga

SEQ ID NO: 353561 - DNA, 25 bp, Artificial
  probe
  misc_feature (1)..(25): SEQ ID NO: 3367; WAN024DBP; Start 134; Stop 158
cagaagcaattatgaatggtggaca

SEQ ID NO: 353562 - DNA, 25 bp, Artificial
  probe
  misc_feature (1)..(25): SEQ ID NO: 3367; WAN024DBP; Start 385; Stop 409
gcagaggtaactcataatcatccag

SEQ ID NO: 353563 - DNA, 25 bp, Artificial
  probe
  misc_feature (1)..(25): SEQ ID NO: 3367; WAN024DBP; Start 195; Stop 219
cagaatgtatccgaatgctgattac

SEQ ID NO: 353564 - DNA, 25 bp, Artificial
  probe
  misc_feature (1)..(25): SEQ ID NO: 3367; WAN024DBP; Start 387; Stop 411
agaggtaactcataatcatccagaa

SEQ ID NO: 353565 - DNA, 25 bp, Artificial
  probe
  misc_feature (1)..(25): SEQ ID NO: 3367; WAN024DBP; Start 388; Stop 412
gaggtaactcataatcatccagaag

SEQ ID NO: 353566 - DNA, 25 bp, Artificial
  probe
  misc_feature (1)..(25): SEQ ID NO: 3367; WAN024DBP; Start 15; Stop 39
aattattggagatattgtcggttct

SEQ ID NO: 353567 - DNA, 25 bp, Artificial
  probe
  misc_feature (1)..(25): SEQ ID NO: 3367; WAN024DBP; Start 249; Stop 273
cgataaccgtgagccttataatagc

SEQ ID NO: 353568 - DNA, 25 bp, Artificial
  probe
  misc_feature (1)..(25): SEQ ID NO: 3367; WAN024DBP; Start 248; Stop 272
gcgataaccgtgagccttataatag

SEQ ID NO: 353569 - DNA, 25 bp, Artificial
  probe
  misc_feature (1)..(25): SEQ ID NO: 3367; WAN024DBP; Start 247; Stop 271
agcgataaccgtgagccttataata

SEQ ID NO: 353570 - DNA, 25 bp, Artificial
  probe
  misc_feature (1)..(25): SEQ ID NO: 3367; WAN024DBP; Start 396; Stop 420
tcataatcatccagaaggtgtcaaa

SEQ ID NO: 353571 - DNA, 25 bp, Artificial
  probe
  misc_feature (1)..(25): SEQ ID NO: 3367; WAN024DBP; Start 397; Stop 421
cataatcatccagaaggtgtcaaag

SEQ ID NO: 353572 - DNA, 25 bp, Artificial
  probe
  misc_feature (1)..(25): SEQ ID NO: 3367; WAN024DBP; Start 133; Stop 157
gcagaagcaattatgaatggtggac

SEQ ID NO: 353573 - DNA, 25 bp, Artificial
  probe
  misc_feature (1)..(25): SEQ ID NO: 3367; WAN024DBP; Start 398; Stop 422
ataatcatccagaaggtgtcaaagg

SEQ ID NO: 353574 - DNA, 25 bp, Artificial
  probe
  misc_feature (1)..(25): SEQ ID NO: 3367; WAN024DBP; Start 581; Stop 605
tagatgaaatccgtcctaactatcg

SEQ ID NO: 353575 - DNA, 25 bp, Artificial
  probe
  misc_feature (1)..(25): SEQ ID NO: 3367; WAN024DBP; Start 136; Stop 160
gaagcaattatgaatggtggacaaa

SEQ ID NO: 353576 - DNA, 25 bp, Artificial
  probe
  misc_feature (1)..(25): SEQ ID NO: 3367; WAN024DBP; Start 788; Stop 812
cctattcttacttggatgaaccctt

SEQ ID NO: 353577 - DNA, 25 bp, Artificial
  probe
  misc_feature (1)..(25): SEQ ID NO: 3367; WAN024DBP; Start 11; Stop 35
gagcaattattggagatattgtcgg

SEQ ID NO: 353578 - DNA, 25 bp, Artificial
  probe
  misc_feature (1)..(25): SEQ ID NO: 3367; WAN024DBP; Start 10; Stop 34
ggagcaattattggagatattgtcg

SEQ ID NO: 353579 - DNA, 25 bp, Artificial
  probe
  misc_feature (1)..(25): SEQ ID NO: 3367; WAN024DBP; Start 716; Stop 740
atactctcgcagcaatcacttgtag

SEQ ID NO: 353580 - DNA, 25 bp, Artificial
  probe
  misc_feature (1)..(25): SEQ ID NO: 3367; WAN024DBP; Start 715; Stop 739
gatactctcgcagcaatcacttgta

SEQ ID NO: 353581 - DNA, 25 bp, Artificial
  probe
  misc_feature (1)..(25): SEQ ID NO: 3368; WAN024DUH; Start 308; Stop 332
cggagtattatgctaagattgttgc

SEQ ID NO: 353582 - DNA, 25 bp, Artificial
  probe
  misc_feature (1)..(25): SEQ ID NO: 3368; WAN024DUH; Start 307; Stop 331
gcggagtattatgctaagattgttg

SEQ ID NO: 353583 - DNA, 25 bp, Artificial
  probe
  misc_feature (1)..(25): SEQ ID NO: 3368; WAN024DUH; Start 305; Stop 329
atgcggagtattatgctaagattgt

SEQ ID NO: 353584 - DNA, 25 bp, Artificial
  probe
  misc_feature (1)..(25): SEQ ID NO: 3368; WAN024DUH; Start 607; Stop 631
gaggaggagttgattatcttagcag

SEQ ID NO: 353585 - DNA, 25 bp, Artificial
  probe
  misc_feature (1)..(25): SEQ ID NO: 3368; WAN024DUH; Start 605; Stop 629
atgaggaggagttgattatcttagc

SEQ ID NO: 353586 - DNA, 25 bp, Artificial
  probe
  misc_feature (1)..(25): SEQ ID NO: 3368; WAN024DUH; Start 549; Stop 573
tattacaggtattgcgacaggttat

SEQ ID NO: 353587 - DNA, 25 bp, Artificial
  probe
  misc_feature (1)..(25): SEQ ID NO: 3368; WAN024DUH; Start 306; Stop 330
tgcggagtattatgctaagattgtt

SEQ ID NO: 353588 - DNA, 25 bp, Artificial
  probe
  misc_feature (1)..(25): SEQ ID NO: 3368; WAN024DUH; Start 548; Stop 572
atattacaggtattgcgacaggtta

SEQ ID NO: 353589 - DNA, 25 bp, Artificial
  probe
  misc_feature (1)..(25): SEQ ID NO: 3368; WAN024DUH; Start 887; Stop 911
gtattcggattacagagattcgttc

SEQ ID NO: 353590 - DNA, 25 bp, Artificial
  probe
  misc_feature (1)..(25): SEQ ID NO: 3368; WAN024DUH; Start 886; Stop 910
ggtattcggattacagagattcgtt

SEQ ID NO: 353591 - DNA, 25 bp, Artificial
  probe
  misc_feature (1)..(25): SEQ ID NO: 3368; WAN024DUH; Start 304; Stop 328
aatgcggagtattatgctaagattg

SEQ ID NO: 353592 - DNA, 25 bp, Artificial
  probe
  misc_feature (1)..(25): SEQ ID NO: 3368; WAN024DUH; Start 883; Stop 907
ccaggtattcggattacagagattc

SEQ ID NO: 353593 - DNA, 25 bp, Artificial
  probe
  misc_feature (1)..(25): SEQ ID NO: 3368; WAN024DUH; Start 550; Stop 574
attacaggtattgcgacaggttatc

SEQ ID NO: 353594 - DNA, 25 bp, Artificial
  probe
  misc_feature (1)..(25): SEQ ID NO: 3368; WAN024DUH; Start 606; Stop 630
tgaggaggagttgattatcttagca

SEQ ID NO: 353595 - DNA, 25 bp, Artificial
  probe
  misc_feature (1)..(25): SEQ ID NO: 3368; WAN024DUH; Start 547; Stop 571
gatattacaggtattgcgacaggtt

SEQ ID NO: 353596 - DNA, 25 bp, Artificial
  probe
  misc_feature (1)..(25): SEQ ID NO: 3368; WAN024DUH; Start 884; Stop 908
caggtattcggattacagagattcg

SEQ ID NO: 353597 - DNA, 25 bp, Artificial
  probe
  misc_feature (1)..(25): SEQ ID NO: 3368; WAN024DUH; Start 885; Stop 909
aggtattcggattacagagattcgt

SEQ ID NO: 353598 - DNA, 25 bp, Artificial
  probe
  misc_feature (1)..(25): SEQ ID NO: 3368; WAN024DUH; Start 888; Stop 912
tattcggattacagagattcgttct

SEQ ID NO: 353599 - DNA, 25 bp, Artificial
  probe
  misc_feature (1)..(25): SEQ ID NO: 3368; WAN024DUH; Start 301; Stop 325
gctaatgcggagtattatgctaaga

SEQ ID NO: 353600 - DNA, 25 bp, Artificial
  probe
  misc_feature (1)..(25): SEQ ID NO: 3368; WAN024DUH; Start 1127; Stop 1151
tcttgtctgatattcgtgaatctgg

SEQ ID NO: 353601 - DNA, 25 bp, Artificial
  probe
  misc_feature (1)..(25): SEQ ID NO: 3368; WAN024DUH; Start 1126; Stop 1150
gtcttgtctgatattcgtgaatctg

SEQ ID NO: 353602 - DNA, 25 bp, Artificial
  probe
  misc_feature (1)..(25): SEQ ID NO: 3368; WAN024DUH; Start 1125; Stop 1149
ggtcttgtctgatattcgtgaatct

SEQ ID NO: 353603 - DNA, 25 bp, Artificial
  probe
  misc_feature (1)..(25): SEQ ID NO: 3368; WAN024DUH; Start 300; Stop 324
tgctaatgcggagtattatgctaag

SEQ ID NO: 353604 - DNA, 25 bp, Artificial
  probe
  misc_feature (1)..(25): SEQ ID NO: 3368; WAN024DUH; Start 299; Stop 323
ctgctaatgcggagtattatgctaa

SEQ ID NO: 353605 - DNA, 25 bp, Artificial
  probe
  misc_feature (1)..(25): SEQ ID NO: 3368; WAN024DUH; Start 6; Stop 30
ggcagaagtagaagagttacgagta

SEQ ID NO: 353606 - DNA, 25 bp, Artificial
  probe
  misc_feature (1)..(25): SEQ ID NO: 3368; WAN024DUH; Start 294; Stop 318
aacttctgctaatgcggagtattat

SEQ ID NO: 353607 - DNA, 25 bp, Artificial
  probe
  misc_feature (1)..(25): SEQ ID NO: 3368; WAN024DUH; Start 295; Stop 319
acttctgctaatgcggagtattatg

SEQ ID NO: 353608 - DNA, 25 bp, Artificial
  probe
  misc_feature (1)..(25): SEQ ID NO: 3368; WAN024DUH; Start 7; Stop 31
gcagaagtagaagagttacgagtac

SEQ ID NO: 353609 - DNA, 25 bp, Artificial
  probe
  misc_feature (1)..(25): SEQ ID NO: 3368; WAN024DUH; Start 1041; Stop 1065
aatactagccaaggaattgaaggtt

SEQ ID NO: 353610 - DNA, 25 bp, Artificial
  probe
  misc_feature (1)..(25): SEQ ID NO: 3368; WAN024DUH; Start 8; Stop 32
cagaagtagaagagttacgagtaca

SEQ ID NO: 353611 - DNA, 25 bp, Artificial
  probe
  misc_feature (1)..(25): SEQ ID NO: 3368; WAN024DUH; Start 1042; Stop 1066
atactagccaaggaattgaaggttc

SEQ ID NO: 353612 - DNA, 25 bp, Artificial
  probe
  misc_feature (1)..(25): SEQ ID NO: 3368; WAN024DUH; Start 293; Stop 317
caacttctgctaatgcggagtatta

SEQ ID NO: 353613 - DNA, 25 bp, Artificial
  probe
  misc_feature (1)..(25): SEQ ID NO: 3368; WAN024DUH; Start 298; Stop 322
tctgctaatgcggagtattatgcta

SEQ ID NO: 353614 - DNA, 25 bp, Artificial
  probe
  misc_feature (1)..(25): SEQ ID NO: 3369; WAN024F2F; Start 547; Stop 571
ctattgttatggagctgttgatgcc

SEQ ID NO: 353615 - DNA, 25 bp, Artificial
  probe
  misc_feature (1)..(25): SEQ ID NO: 3369; WAN024F2F; Start 191; Stop 215
cagaggcaggagaatttgttacaat

SEQ ID NO: 353616 - DNA, 25 bp, Artificial
  probe
  misc_feature (1)..(25): SEQ ID NO: 3369; WAN024F2F; Start 192; Stop 216
agaggcaggagaatttgttacaatt

SEQ ID NO: 353617 - DNA, 25 bp, Artificial
  probe
  misc_feature (1)..(25): SEQ ID NO: 3369; WAN024F2F; Start 468; Stop 492
gaatcagtaaactgggatcttgttg

SEQ ID NO: 353618 - DNA, 25 bp, Artificial
  probe
  misc_feature (1)..(25): SEQ ID NO: 3369; WAN024F2F; Start 467; Stop 491
agaatcagtaaactgggatcttgtt

SEQ ID NO: 353619 - DNA, 25 bp, Artificial
  probe
  misc_feature (1)..(25): SEQ ID NO: 3369; WAN024F2F; Start 464; Stop 488
ggtagaatcagtaaactgggatctt

SEQ ID NO: 353620 - DNA, 25 bp, Artificial
  probe
  misc_feature (1)..(25): SEQ ID NO: 3369; WAN024F2F; Start 469; Stop 493
aatcagtaaactgggatcttgttgg

SEQ ID NO: 353621 - DNA, 25 bp, Artificial
  probe
  misc_feature (1)..(25): SEQ ID NO: 3369; WAN024F2F; Start 466; Stop 490
tagaatcagtaaactgggatcttgt

SEQ ID NO: 353622 - DNA, 25 bp, Artificial
  probe
  misc_feature (1)..(25): SEQ ID NO: 3369; WAN024F2F; Start 465; Stop 489
gtagaatcagtaaactgggatcttg

SEQ ID NO: 353623 - DNA, 25 bp, Artificial
  probe
  misc_feature (1)..(25): SEQ ID NO: 3369; WAN024F2F; Start 461; Stop 485
ttcggtagaatcagtaaactgggat

SEQ ID NO: 353624 - DNA, 25 bp, Artificial
  probe
  misc_feature (1)..(25): SEQ ID NO: 3369; WAN024F2F; Start 460; Stop 484
tttcggtagaatcagtaaactggga

SEQ ID NO: 353625 - DNA, 25 bp, Artificial
  probe
  misc_feature (1)..(25): SEQ ID NO: 3369; WAN024F2F; Start 463; Stop 487
cggtagaatcagtaaactgggatct

SEQ ID NO: 353626 - DNA, 25 bp, Artificial
  probe
  misc_feature (1)..(25): SEQ ID NO: 3369; WAN024F2F; Start 462; Stop 486
tcggtagaatcagtaaactgggatc

SEQ ID NO: 353627 - DNA, 25 bp, Artificial
  probe
  misc_feature (1)..(25): SEQ ID NO: 3369; WAN024F2F; Start 456; Stop 480
ctggtttcggtagaatcagtaaact

SEQ ID NO: 353628 - DNA, 25 bp, Artificial
  probe
  misc_feature (1)..(25): SEQ ID NO: 3369; WAN024F2F; Start 519; Stop 543
tccatagtcactatatacgagaatt

SEQ ID NO: 353629 - DNA, 25 bp, Artificial
  probe
  misc_feature (1)..(25): SEQ ID NO: 3369; WAN024F2F; Start 457; Stop 481
tggtttcggtagaatcagtaaactg

SEQ ID NO: 353630 - DNA, 25 bp, Artificial
  probe
  misc_feature (1)..(25): SEQ ID NO: 3369; WAN024F2F; Start 455; Stop 479
gctggtttcggtagaatcagtaaac

SEQ ID NO: 353631 - DNA, 25 bp, Artificial
  probe
  misc_feature (1)..(25): SEQ ID NO: 3369; WAN024F2F; Start 92; Stop 116
gactcgactctctccttcaagaaac

SEQ ID NO: 353632 - DNA, 25 bp, Artificial
  probe
  misc_feature (1)..(25): SEQ ID NO: 3369; WAN024F2F; Start 459; Stop 483
gtttcggtagaatcagtaaactggg

SEQ ID NO: 353633 - DNA, 25 bp, Artificial
  probe
  misc_feature (1)..(25): SEQ ID NO: 3369; WAN024F2F; Start 458; Stop 482
ggtttcggtagaatcagtaaactgg

SEQ ID NO: 353634 - DNA, 25 bp, Artificial
  probe
  misc_feature (1)..(25): SEQ ID NO: 3369; WAN024F2F; Start 94; Stop 118
ctcgactctctccttcaagaaacac

SEQ ID NO: 353635 - DNA, 25 bp, Artificial
  probe
  misc_feature (1)..(25): SEQ ID NO: 3369; WAN024F2F; Start 420; Stop 444
gttttcgtaaggttcgcttgatgta

SEQ ID NO: 353636 - DNA, 25 bp, Artificial
  probe
  misc_feature (1)..(25): SEQ ID NO: 3369; WAN024F2F; Start 199; Stop 223
ggagaatttgttacaattgatgcct

SEQ ID NO: 353637 - DNA, 25 bp, Artificial
  probe
  misc_feature (1)..(25): SEQ ID NO: 3369; WAN024F2F; Start 198; Stop 222
aggagaatttgttacaattgatgcc

SEQ ID NO: 353638 - DNA, 25 bp, Artificial
  probe
  misc_feature (1)..(25): SEQ ID NO: 3369; WAN024F2F; Start 195; Stop 219
ggcaggagaatttgttacaattgat

SEQ ID NO: 353639 - DNA, 25 bp, Artificial
  probe
  misc_feature (1)..(25): SEQ ID NO: 3369; WAN024F2F; Start 193; Stop 217
gaggcaggagaatttgttacaattg

SEQ ID NO: 353640 - DNA, 25 bp, Artificial
  probe
  misc_feature (1)..(25): SEQ ID NO: 3369; WAN024F2F; Start 197; Stop 221
caggagaatttgttacaattgatgc

SEQ ID NO: 353641 - DNA, 25 bp, Artificial
  probe
  misc_feature (1)..(25): SEQ ID NO: 3369; WAN024F2F; Start 196; Stop 220
gcaggagaatttgttacaattgatg

SEQ ID NO: 353642 - DNA, 25 bp, Artificial
  probe
  misc_feature (1)..(25): SEQ ID NO: 3369; WAN024F2F; Start 93; Stop 117
actcgactctctccttcaagaaaca

SEQ ID NO: 353643 - DNA, 25 bp, Artificial
  probe
  misc_feature (1)..(25): SEQ ID NO: 3369; WAN024F2F; Start 194; Stop 218
aggcaggagaatttgttacaattga

SEQ ID NO: 353644 - DNA, 25 bp, Artificial
  probe
  misc_feature (1)..(25): SEQ ID NO: 3369; WAN024F2F; Start 421; Stop 445
ttttcgtaaggttcgcttgatgtac

SEQ ID NO: 353645 - DNA, 25 bp, Artificial
  probe
  misc_feature (1)..(25): SEQ ID NO: 3369; WAN024F2F; Start 424; Stop 448
tcgtaaggttcgcttgatgtaccaa

SEQ ID NO: 353646 - DNA, 25 bp, Artificial
  probe
  misc_feature (1)..(25): SEQ ID NO: 3369; WAN024F2F; Start 423; Stop 447
ttcgtaaggttcgcttgatgtacca

SEQ ID NO: 353647 - DNA, 25 bp, Artificial
  probe
  misc_feature (1)..(25): SEQ ID NO: 3370; WAN024D5A; Start 7; Stop 31
tcctatcaagactatatcaactgct

SEQ ID NO: 353648 - DNA, 25 bp, Artificial
  probe
  misc_feature (1)..(25): SEQ ID NO: 3370; WAN024D5A; Start 9; Stop 33
ctatcaagactatatcaactgctcc

SEQ ID NO: 353649 - DNA, 25 bp, Artificial
  probe
  misc_feature (1)..(25): SEQ ID NO: 3370; WAN024D5A; Start 8; Stop 32
cctatcaagactatatcaactgctc

SEQ ID NO: 353650 - DNA, 25 bp, Artificial
  probe
  misc_feature (1)..(25): SEQ ID NO: 3370; WAN024D5A; Start 6; Stop 30
gtcctatcaagactatatcaactgc

SEQ ID NO: 353651 - DNA, 25 bp, Artificial
  probe
  misc_feature (1)..(25): SEQ ID NO: 3370; WAN024D5A; Start 10; Stop 34
tatcaagactatatcaactgctccc

SEQ ID NO: 353652 - DNA, 25 bp, Artificial
  probe
  misc_feature (1)..(25): SEQ ID NO: 3370; WAN024D5A; Start 5; Stop 29
tgtcctatcaagactatatcaactg

SEQ ID NO: 353653 - DNA, 25 bp, Artificial
  probe
  misc_feature (1)..(25): SEQ ID NO: 3370; WAN024D5A; Start 11; Stop 35
atcaagactatatcaactgctcccg

SEQ ID NO: 353654 - DNA, 25 bp, Artificial
  probe
  misc_feature (1)..(25): SEQ ID NO: 3370; WAN024D5A; Start 391; Stop 415
gtcatctacgtcgcagactatatcg

SEQ ID NO: 353655 - DNA, 25 bp, Artificial
  probe
  misc_feature (1)..(25): SEQ ID NO: 3370; WAN024D5A; Start 262; Stop 286
aataatgtctggcatggtatggtcg

SEQ ID NO: 353656 - DNA, 25 bp, Artificial
  probe
  misc_feature (1)..(25): SEQ ID NO: 3370; WAN024D5A; Start 552; Stop 576
ccttgaaacctataacgcctttgtg

SEQ ID NO: 353657 - DNA, 25 bp, Artificial
  probe
  misc_feature (1)..(25): SEQ ID NO: 3370; WAN024D5A; Start 190; Stop 214
aagttgtcagatcaggaatttctag

SEQ ID NO: 353658 - DNA, 25 bp, Artificial
  probe
  misc_feature (1)..(25): SEQ ID NO: 3370; WAN024D5A; Start 153; Stop 177
agcaagtctagcaggtcttcttcat

SEQ ID NO: 353659 - DNA, 25 bp, Artificial
  probe
  misc_feature (1)..(25): SEQ ID NO: 3370; WAN024D5A; Start 549; Stop 573
aacccttgaaacctataacgccttt

SEQ ID NO: 353660 - DNA, 25 bp, Artificial
  probe
  misc_feature (1)..(25): SEQ ID NO: 3370; WAN024D5A; Start 548; Stop 572
aaacccttgaaacctataacgcctt

SEQ ID NO: 353661 - DNA, 25 bp, Artificial
  probe
  misc_feature (1)..(25): SEQ ID NO: 3370; WAN024D5A; Start 189; Stop 213
aaagttgtcagatcaggaatttcta

SEQ ID NO: 353662 - DNA, 25 bp, Artificial
  probe
  misc_feature (1)..(25): SEQ ID NO: 3370; WAN024D5A; Start 152; Stop 176
aagcaagtctagcaggtcttcttca

SEQ ID NO: 353663 - DNA, 25 bp, Artificial
  probe
  misc_feature (1)..(25): SEQ ID NO: 3370; WAN024D5A; Start 504; Stop 528
taccgtggagtatctagctcatcag

SEQ ID NO: 353664 - DNA, 25 bp, Artificial
  probe
  misc_feature (1)..(25): SEQ ID NO: 3370; WAN024D5A; Start 301; Stop 325
caggaagatttggatttgcatgatt

SEQ ID NO: 353665 - DNA, 25 bp, Artificial
  probe
  misc_feature (1)..(25): SEQ ID NO: 3370; WAN024D5A; Start 298; Stop 322
attcaggaagatttggatttgcatg

SEQ ID NO: 353666 - DNA, 25 bp, Artificial
  probe
  misc_feature (1)..(25): SEQ ID NO: 3370; WAN024D5A; Start 297; Stop 321
aattcaggaagatttggatttgcat

SEQ ID NO: 353667 - DNA, 25 bp, Artificial
  probe
  misc_feature (1)..(25): SEQ ID NO: 3370; WAN024D5A; Start 273; Stop 297
gcatggtatggtcggaatttacaaa

SEQ ID NO: 353668 - DNA, 25 bp, Artificial
  probe
  misc_feature (1)..(25): SEQ ID NO: 3370; WAN024D5A; Start 154; Stop 178
gcaagtctagcaggtcttcttcatg

SEQ ID NO: 353669 - DNA, 25 bp, Artificial
  probe
  misc_feature (1)..(25): SEQ ID NO: 3370; WAN024D5A; Start 390; Stop 414
ggtcatctacgtcgcagactatatc

SEQ ID NO: 353670 - DNA, 25 bp, Artificial
  probe
  misc_feature (1)..(25): SEQ ID NO: 3370; WAN024D5A; Start 302; Stop 326
aggaagatttggatttgcatgattc

SEQ ID NO: 353671 - DNA, 25 bp, Artificial
  probe
  misc_feature (1)..(25): SEQ ID NO: 3370; WAN024D5A; Start 393; Stop 417
catctacgtcgcagactatatcgag

SEQ ID NO: 353672 - DNA, 25 bp, Artificial
  probe
  misc_feature (1)..(25): SEQ ID NO: 3370; WAN024D5A; Start 553; Stop 577
cttgaaacctataacgcctttgtgc

SEQ ID NO: 353673 - DNA, 25 bp, Artificial
  probe
  misc_feature (1)..(25): SEQ ID NO: 3370; WAN024D5A; Start 503; Stop 527
gtaccgtggagtatctagctcatca

SEQ ID NO: 353674 - DNA, 25 bp, Artificial
  probe
  misc_feature (1)..(25): SEQ ID NO: 3370; WAN024D5A; Start 4; Stop 28
atgtcctatcaagactatatcaact

SEQ ID NO: 353675 - DNA, 25 bp, Artificial
  probe
  misc_feature (1)..(25): SEQ ID NO: 3370; WAN024D5A; Start 13; Stop 37
caagactatatcaactgctcccgtg

SEQ ID NO: 353676 - DNA, 25 bp, Artificial
  probe
  misc_feature (1)..(25): SEQ ID NO: 3370; WAN024D5A; Start 12; Stop 36
tcaagactatatcaactgctcccgt

SEQ ID NO: 353677 - DNA, 25 bp, Artificial
  probe
  misc_feature (1)..(25): SEQ ID NO: 3370; WAN024D5A; Start 389; Stop 413
aggtcatctacgtcgcagactatat

SEQ ID NO: 353678 - DNA, 25 bp, Artificial
  probe
  misc_feature (1)..(25): SEQ ID NO: 3370; WAN024D5A; Start 3; Stop 27
gatgtcctatcaagactatatcaac

SEQ ID NO: 353679 - DNA, 25 bp, Artificial
  probe
  misc_feature (1)..(25): SEQ ID NO: 3370; WAN024D5A; Start 73; Stop 97
gagaaacgtctaacccattgtctag

SEQ ID NO: 353680 - DNA, 25 bp, Artificial
  probe
  misc_feature (1)..(25): SEQ ID NO: 3371; WAN024G5B; Start 215; Stop 239
tcttcaactcaattcatctatcgct

SEQ ID NO: 353681 - DNA, 25 bp, Artificial
  probe
  misc_feature (1)..(25): SEQ ID NO: 3371; WAN024G5B; Start 214; Stop 238
gtcttcaactcaattcatctatcgc

SEQ ID NO: 353682 - DNA, 25 bp, Artificial
  probe
  misc_feature (1)..(25): SEQ ID NO: 3371; WAN024G5B; Start 213; Stop 237
cgtcttcaactcaattcatctatcg

SEQ ID NO: 353683 - DNA, 25 bp, Artificial
  probe
  misc_feature (1)..(25): SEQ ID NO: 3371; WAN024G5B; Start 216; Stop 240
cttcaactcaattcatctatcgcta

SEQ ID NO: 353684 - DNA, 25 bp, Artificial
  probe
  misc_feature (1)..(25): SEQ ID NO: 3371; WAN024G5B; Start 217; Stop 241
ttcaactcaattcatctatcgctaa

SEQ ID NO: 353685 - DNA, 25 bp, Artificial
  probe
  misc_feature (1)..(25): SEQ ID NO: 3371; WAN024G5B; Start 42; Stop 66
tggaaccttaatcctagaagaagtg

SEQ ID NO: 353686 - DNA, 25 bp, Artificial
  probe
  misc_feature (1)..(25): SEQ ID NO: 3371; WAN024G5B; Start 43; Stop 67
ggaaccttaatcctagaagaagtga

SEQ ID NO: 353687 - DNA, 25 bp, Artificial
  probe
  misc_feature (1)..(25): SEQ ID NO: 3371; WAN024G5B; Start 44; Stop 68
gaaccttaatcctagaagaagtgat

SEQ ID NO: 353688 - DNA, 25 bp, Artificial
  probe
  misc_feature (1)..(25): SEQ ID NO: 3371; WAN024G5B; Start 41; Stop 65
atggaaccttaatcctagaagaagt

SEQ ID NO: 353689 - DNA, 25 bp, Artificial
  probe
  misc_feature (1)..(25): SEQ ID NO: 3371; WAN024G5B; Start 39; Stop 63
agatggaaccttaatcctagaagaa

SEQ ID NO: 353690 - DNA, 25 bp, Artificial
  probe
  misc_feature (1)..(25): SEQ ID NO: 3371; WAN024G5B; Start 212; Stop 236
acgtcttcaactcaattcatctatc

SEQ ID NO: 353691 - DNA, 25 bp, Artificial
  probe
  misc_feature (1)..(25): SEQ ID NO: 3371; WAN024G5B; Start 40; Stop 64
gatggaaccttaatcctagaagaag

SEQ ID NO: 353692 - DNA, 25 bp, Artificial
  probe
  misc_feature (1)..(25): SEQ ID NO: 3371; WAN024G5B; Start 36; Stop 60
tgtagatggaaccttaatcctagaa

SEQ ID NO: 353693 - DNA, 25 bp, Artificial
  probe
  misc_feature (1)..(25): SEQ ID NO: 3371; WAN024G5B; Start 226; Stop 250
attcatctatcgctaaatgtcccag

SEQ ID NO: 353694 - DNA, 25 bp, Artificial
  probe
  misc_feature (1)..(25): SEQ ID NO: 3371; WAN024G5B; Start 225; Stop 249
aattcatctatcgctaaatgtccca

SEQ ID NO: 353695 - DNA, 25 bp, Artificial
  probe
  misc_feature (1)..(25): SEQ ID NO: 3371; WAN024G5B; Start 224; Stop 248
caattcatctatcgctaaatgtccc

SEQ ID NO: 353696 - DNA, 25 bp, Artificial
  probe
  misc_feature (1)..(25): SEQ ID NO: 3371; WAN024G5B; Start 35; Stop 59
atgtagatggaaccttaatcctaga

SEQ ID NO: 353697 - DNA, 25 bp, Artificial
  probe
  misc_feature (1)..(25): SEQ ID NO: 3371; WAN024G5B; Start 211; Stop 235
aacgtcttcaactcaattcatctat

SEQ ID NO: 353698 - DNA, 25 bp, Artificial
  probe
  misc_feature (1)..(25): SEQ ID NO: 3371; WAN024G5B; Start 209; Stop 233
ataacgtcttcaactcaattcatct

SEQ ID NO: 353699 - DNA, 25 bp, Artificial
  probe
  misc_feature (1)..(25): SEQ ID NO: 3371; WAN024G5B; Start 223; Stop 247
tcaattcatctatcgctaaatgtcc

SEQ ID NO: 353700 - DNA, 25 bp, Artificial
  probe
  misc_feature (1)..(25): SEQ ID NO: 3371; WAN024G5B; Start 140; Stop 164
agttggtctttgaaagcagtttaag

SEQ ID NO: 353701 - DNA, 25 bp, Artificial
  probe
  misc_feature (1)..(25): SEQ ID NO: 3371; WAN024G5B; Start 37; Stop 61
gtagatggaaccttaatcctagaag

SEQ ID NO: 353702 - DNA, 25 bp, Artificial
  probe
  misc_feature (1)..(25): SEQ ID NO: 3371; WAN024G5B; Start 34; Stop 58
gatgtagatggaaccttaatcctag

SEQ ID NO: 353703 - DNA, 25 bp, Artificial
  probe
  misc_feature (1)..(25): SEQ ID NO: 3371; WAN024G5B; Start 208; Stop 232
gataacgtcttcaactcaattcatc

SEQ ID NO: 353704 - DNA, 25 bp, Artificial
  probe
  misc_feature (1)..(25): SEQ ID NO: 3371; WAN024G5B; Start 139; Stop 163
gagttggtctttgaaagcagtttaa

SEQ ID NO: 353705 - DNA, 25 bp, Artificial
  probe
  misc_feature (1)..(25): SEQ ID NO: 3371; WAN024G5B; Start 30; Stop 54
tttggatgtagatggaaccttaatc

SEQ ID NO: 353706 - DNA, 25 bp, Artificial
  probe
  misc_feature (1)..(25): SEQ ID NO: 3371; WAN024G5B; Start 38; Stop 62
tagatggaaccttaatcctagaaga

SEQ ID NO: 353707 - DNA, 25 bp, Artificial
  probe
  misc_feature (1)..(25): SEQ ID NO: 3371; WAN024G5B; Start 230; Stop 254
atctatcgctaaatgtcccagagtt

SEQ ID NO: 353708 - DNA, 25 bp, Artificial
  probe
  misc_feature (1)..(25): SEQ ID NO: 3371; WAN024G5B; Start 227; Stop 251
ttcatctatcgctaaatgtcccaga

SEQ ID NO: 353709 - DNA, 25 bp, Artificial
  probe
  misc_feature (1)..(25): SEQ ID NO: 3371; WAN024G5B; Start 207; Stop 231
tgataacgtcttcaactcaattcat

SEQ ID NO: 353710 - DNA, 25 bp, Artificial
  probe
  misc_feature (1)..(25): SEQ ID NO: 3371; WAN024G5B; Start 46; Stop 70
accttaatcctagaagaagtgattg

SEQ ID NO: 353711 - DNA, 25 bp, Artificial
  probe
  misc_feature (1)..(25): SEQ ID NO: 3371; WAN024G5B; Start 218; Stop 242
tcaactcaattcatctatcgctaaa

SEQ ID NO: 353712 - DNA, 25 bp, Artificial
  probe
  misc_feature (1)..(25): SEQ ID NO: 3371; WAN024G5B; Start 233; Stop 257
tatcgctaaatgtcccagagttcat

SEQ ID NO: 353713 - DNA, 25 bp, Artificial
  probe
  misc_feature (1)..(25): SEQ ID NO: 3372; WAN024D2D; Start 268; Stop 292
gaagaggagtacgataagaaggaag

SEQ ID NO: 353714 - DNA, 25 bp, Artificial
  probe
  misc_feature (1)..(25): SEQ ID NO: 3372; WAN024D2D; Start 267; Stop 291
agaagaggagtacgataagaaggaa

SEQ ID NO: 353715 - DNA, 25 bp, Artificial
  probe
  misc_feature (1)..(25): SEQ ID NO: 3372; WAN024D2D; Start 266; Stop 290
aagaagaggagtacgataagaagga

SEQ ID NO: 353716 - DNA, 25 bp, Artificial
  probe
  misc_feature (1)..(25): SEQ ID NO: 3372; WAN024D2D; Start 409; Stop 433
gcagagttaatacttgaggaacata

SEQ ID NO: 353717 - DNA, 25 bp, Artificial
  probe
  misc_feature (1)..(25): SEQ ID NO: 3372; WAN024D2D; Start 269; Stop 293
aagaggagtacgataagaaggaagc

SEQ ID NO: 353718 - DNA, 25 bp, Artificial
  probe
  misc_feature (1)..(25): SEQ ID NO: 3372; WAN024D2D; Start 338; Stop 362
aagaagaacaattagcatgtgaagt

SEQ ID NO: 353719 - DNA, 25 bp, Artificial
  probe
  misc_feature (1)..(25): SEQ ID NO: 3372; WAN024D2D; Start 289; Stop 313
gaagcgtgtttggaagagatttata

SEQ ID NO: 353720 - DNA, 25 bp, Artificial
  probe
  misc_feature (1)..(25): SEQ ID NO: 3372; WAN024D2D; Start 339; Stop 363
agaagaacaattagcatgtgaagta

SEQ ID NO: 353721 - DNA, 25 bp, Artificial
  probe
  misc_feature (1)..(25): SEQ ID NO: 3372; WAN024D2D; Start 619; Stop 643
actcttatttcaggaatgtgttgtc

SEQ ID NO: 353722 - DNA, 25 bp, Artificial
  probe
  misc_feature (1)..(25): SEQ ID NO: 3372; WAN024D2D; Start 620; Stop 644
ctcttatttcaggaatgtgttgtct

SEQ ID NO: 353723 - DNA, 25 bp, Artificial
  probe
  misc_feature (1)..(25): SEQ ID NO: 3372; WAN024D2D; Start 170; Stop 194
gagttccagtttatagccttatgcc

SEQ ID NO: 353724 - DNA, 25 bp, Artificial
  probe
  misc_feature (1)..(25): SEQ ID NO: 3372; WAN024D2D; Start 408; Stop 432
tgcagagttaatacttgaggaacat

SEQ ID NO: 353725 - DNA, 25 bp, Artificial
  probe
  misc_feature (1)..(25): SEQ ID NO: 3372; WAN024D2D; Start 407; Stop 431
atgcagagttaatacttgaggaaca

SEQ ID NO: 353726 - DNA, 25 bp, Artificial
  probe
  misc_feature (1)..(25): SEQ ID NO: 3372; WAN024D2D; Start 622; Stop 646
cttatttcaggaatgtgttgtcttg

SEQ ID NO: 353727 - DNA, 25 bp, Artificial
  probe
  misc_feature (1)..(25): SEQ ID NO: 3372; WAN024D2D; Start 621; Stop 645
tcttatttcaggaatgtgttgtctt

SEQ ID NO: 353728 - DNA, 25 bp, Artificial
  probe
  misc_feature (1)..(25): SEQ ID NO: 3372; WAN024D2D; Start 288; Stop 312
ggaagcgtgtttggaagagatttat

SEQ ID NO: 353729 - DNA, 25 bp, Artificial
  probe
  misc_feature (1)..(25): SEQ ID NO: 3372; WAN024D2D; Start 265; Stop 289
aaagaagaggagtacgataagaagg

SEQ ID NO: 353730 - DNA, 25 bp, Artificial
  probe
  misc_feature (1)..(25): SEQ ID NO: 3372; WAN024D2D; Start 261; Stop 285
tggtaaagaagaggagtacgataag

SEQ ID NO: 353731 - DNA, 25 bp, Artificial
  probe
  misc_feature (1)..(25): SEQ ID NO: 3372; WAN024D2D; Start 471; Stop 495
tgatatgttgttgattcgtttgttt

SEQ ID NO: 353732 - DNA, 25 bp, Artificial
  probe
  misc_feature (1)..(25): SEQ ID NO: 3372; WAN024D2D; Start 258; Stop 282
ctatggtaaagaagaggagtacgat

SEQ ID NO: 353733 - DNA, 25 bp, Artificial
  probe
  misc_feature (1)..(25): SEQ ID NO: 3372; WAN024D2D; Start 623; Stop 647
ttatttcaggaatgtgttgtcttga

SEQ ID NO: 353734 - DNA, 25 bp, Artificial
  probe
  misc_feature (1)..(25): SEQ ID NO: 3372; WAN024D2D; Start 262; Stop 286
ggtaaagaagaggagtacgataaga

SEQ ID NO: 353735 - DNA, 25 bp, Artificial
  probe
  misc_feature (1)..(25): SEQ ID NO: 3372; WAN024D2D; Start 257; Stop 281
tctatggtaaagaagaggagtacga

SEQ ID NO: 353736 - DNA, 25 bp, Artificial
  probe
  misc_feature (1)..(25): SEQ ID NO: 3372; WAN024D2D; Start 340; Stop 364
gaagaacaattagcatgtgaagtat

SEQ ID NO: 353737 - DNA, 25 bp, Artificial
  probe
  misc_feature (1)..(25): SEQ ID NO: 3372; WAN024D2D; Start 470; Stop 494
atgatatgttgttgattcgtttgtt

SEQ ID NO: 353738 - DNA, 25 bp, Artificial
  probe
  misc_feature (1)..(25): SEQ ID NO: 3372; WAN024D2D; Start 469; Stop 493
aatgatatgttgttgattcgtttgt

SEQ ID NO: 353739 - DNA, 25 bp, Artificial
  probe
  misc_feature (1)..(25): SEQ ID NO: 3372; WAN024D2D; Start 618; Stop 642
tactcttatttcaggaatgtgttgt

SEQ ID NO: 353740 - DNA, 25 bp, Artificial
  probe
  misc_feature (1)..(25): SEQ ID NO: 3372; WAN024D2D; Start 260; Stop 284
atggtaaagaagaggagtacgataa

SEQ ID NO: 353741 - DNA, 25 bp, Artificial
  probe
  misc_feature (1)..(25): SEQ ID NO: 3372; WAN024D2D; Start 406; Stop 430
tatgcagagttaatacttgaggaac

SEQ ID NO: 353742 - DNA, 25 bp, Artificial
  probe
  misc_feature (1)..(25): SEQ ID NO: 3372; WAN024D2D; Start 399; Stop 423
gcctgaatatgcagagttaatactt

SEQ ID NO: 353743 - DNA, 25 bp, Artificial
  probe
  misc_feature (1)..(25): SEQ ID NO: 3372; WAN024D2D; Start 256; Stop 280
atctatggtaaagaagaggagtacg

SEQ ID NO: 353744 - DNA, 25 bp, Artificial
  probe
  misc_feature (1)..(25): SEQ ID NO: 3372; WAN024D2D; Start 280; Stop 304
gataagaaggaagcgtgtttggaag

SEQ ID NO: 353745 - DNA, 25 bp, Artificial
  probe
  misc_feature (1)..(25): SEQ ID NO: 3372; WAN024D2D; Start 290; Stop 314
aagcgtgtttggaagagatttataa

SEQ ID NO: 353746 - DNA, 25 bp, Artificial
  probe
  misc_feature (1)..(25): SEQ ID NO: 3373; WAN024CZL; Start 562; Stop 586
atcgtagaaggcttattgaagtctt

SEQ ID NO: 353747 - DNA, 25 bp, Artificial
  probe
  misc_feature (1)..(25): SEQ ID NO: 3373; WAN024CZL; Start 561; Stop 585
aatcgtagaaggcttattgaagtct

SEQ ID NO: 353748 - DNA, 25 bp, Artificial
  probe
  misc_feature (1)..(25): SEQ ID NO: 3373; WAN024CZL; Start 563; Stop 587
tcgtagaaggcttattgaagtctta

SEQ ID NO: 353749 - DNA, 25 bp, Artificial
  probe
  misc_feature (1)..(25): SEQ ID NO: 3373; WAN024CZL; Start 481; Stop 505
gagaaggtgagaagtcaagaagttc

SEQ ID NO: 353750 - DNA, 25 bp, Artificial
  probe
  misc_feature (1)..(25): SEQ ID NO: 3373; WAN024CZL; Start 564; Stop 588
cgtagaaggcttattgaagtcttat

SEQ ID NO: 353751 - DNA, 25 bp, Artificial
  probe
  misc_feature (1)..(25): SEQ ID NO: 3373; WAN024CZL; Start 519; Stop 543
gaaggtagatgttcctatgacagaa

SEQ ID NO: 353752 - DNA, 25 bp, Artificial
  probe
  misc_feature (1)..(25): SEQ ID NO: 3373; WAN024CZL; Start 518; Stop 542
tgaaggtagatgttcctatgacaga

SEQ ID NO: 353753 - DNA, 25 bp, Artificial
  probe
  misc_feature (1)..(25): SEQ ID NO: 3373; WAN024CZL; Start 517; Stop 541
gtgaaggtagatgttcctatgacag

SEQ ID NO: 353754 - DNA, 25 bp, Artificial
  probe
  misc_feature (1)..(25): SEQ ID NO: 3373; WAN024CZL; Start 516; Stop 540
agtgaaggtagatgttcctatgaca

SEQ ID NO: 353755 - DNA, 25 bp, Artificial
  probe
  misc_feature (1)..(25): SEQ ID NO: 3373; WAN024CZL; Start 515; Stop 539
tagtgaaggtagatgttcctatgac

SEQ ID NO: 353756 - DNA, 25 bp, Artificial
  probe
  misc_feature (1)..(25): SEQ ID NO: 3373; WAN024CZL; Start 514; Stop 538
ttagtgaaggtagatgttcctatga

SEQ ID NO: 353757 - DNA, 25 bp, Artificial
  probe
  misc_feature (1)..(25): SEQ ID NO: 3373; WAN024CZL; Start 482; Stop 506
agaaggtgagaagtcaagaagttcg

SEQ ID NO: 353758 - DNA, 25 bp, Artificial
  probe
  misc_feature (1)..(25): SEQ ID NO: 3373; WAN024CZL; Start 480; Stop 504
cgagaaggtgagaagtcaagaagtt

SEQ ID NO: 353759 - DNA, 25 bp, Artificial
  probe
  misc_feature (1)..(25): SEQ ID NO: 3373; WAN024CZL; Start 552; Stop 576
tgaagaagaaatcgtagaaggctta

SEQ ID NO: 353760 - DNA, 25 bp, Artificial
  probe
  misc_feature (1)..(25): SEQ ID NO: 3373; WAN024CZL; Start 546; Stop 570
ttcgtctgaagaagaaatcgtagaa

SEQ ID NO: 353761 - DNA, 25 bp, Artificial
  probe
  misc_feature (1)..(25): SEQ ID NO: 3373; WAN024CZL; Start 545; Stop 569
attcgtctgaagaagaaatcgtaga

SEQ ID NO: 353762 - DNA, 25 bp, Artificial
  probe
  misc_feature (1)..(25): SEQ ID NO: 3373; WAN024CZL; Start 547; Stop 571
tcgtctgaagaagaaatcgtagaag

SEQ ID NO: 353763 - DNA, 25 bp, Artificial
  probe
  misc_feature (1)..(25): SEQ ID NO: 3373; WAN024CZL; Start 560; Stop 584
aaatcgtagaaggcttattgaagtc

SEQ ID NO: 353764 - DNA, 25 bp, Artificial
  probe
  misc_feature (1)..(25): SEQ ID NO: 3373; WAN024CZL; Start 559; Stop 583
gaaatcgtagaaggcttattgaagt

SEQ ID NO: 353765 - DNA, 25 bp, Artificial
  probe
  misc_feature (1)..(25): SEQ ID NO: 3373; WAN024CZL; Start 551; Stop 575
ctgaagaagaaatcgtagaaggctt

SEQ ID NO: 353766 - DNA, 25 bp, Artificial
  probe
  misc_feature (1)..(25): SEQ ID NO: 3373; WAN024CZL; Start 556; Stop 580
gaagaaatcgtagaaggcttattga

SEQ ID NO: 353767 - DNA, 25 bp, Artificial
  probe
  misc_feature (1)..(25): SEQ ID NO: 3373; WAN024CZL; Start 558; Stop 582
agaaatcgtagaaggcttattgaag

SEQ ID NO: 353768 - DNA, 25 bp, Artificial
  probe
  misc_feature (1)..(25): SEQ ID NO: 3373; WAN024CZL; Start 555; Stop 579
agaagaaatcgtagaaggcttattg

SEQ ID NO: 353769 - DNA, 25 bp, Artificial
  probe
  misc_feature (1)..(25): SEQ ID NO: 3373; WAN024CZL; Start 544; Stop 568
aattcgtctgaagaagaaatcgtag

SEQ ID NO: 353770 - DNA, 25 bp, Artificial
  probe
  misc_feature (1)..(25): SEQ ID NO: 3373; WAN024CZL; Start 553; Stop 577
gaagaagaaatcgtagaaggcttat

SEQ ID NO: 353771 - DNA, 25 bp, Artificial
  probe
  misc_feature (1)..(25): SEQ ID NO: 3373; WAN024CZL; Start 548; Stop 572
cgtctgaagaagaaatcgtagaagg

SEQ ID NO: 353772 - DNA, 25 bp, Artificial
  probe
  misc_feature (1)..(25): SEQ ID NO: 3373; WAN024CZL; Start 557; Stop 581
aagaaatcgtagaaggcttattgaa

SEQ ID NO: 353773 - DNA, 25 bp, Artificial
  probe
  misc_feature (1)..(25): SEQ ID NO: 3373; WAN024CZL; Start 543; Stop 567
aaattcgtctgaagaagaaatcgta

SEQ ID NO: 353774 - DNA, 25 bp, Artificial
  probe
  misc_feature (1)..(25): SEQ ID NO: 3373; WAN024CZL; Start 550; Stop 574
tctgaagaagaaatcgtagaaggct

SEQ ID NO: 353775 - DNA, 25 bp, Artificial
  probe
  misc_feature (1)..(25): SEQ ID NO: 3373; WAN024CZL; Start 549; Stop 573
gtctgaagaagaaatcgtagaaggc

SEQ ID NO: 353776 - DNA, 25 bp, Artificial
  probe
  misc_feature (1)..(25): SEQ ID NO: 3373; WAN024CZL; Start 420; Stop 444
ctactctaatggtcaaagtcaacgg

SEQ ID NO: 353777 - DNA, 25 bp, Artificial
  probe
  misc_feature (1)..(25): SEQ ID NO: 3373; WAN024CZL; Start 419; Stop 443
cctactctaatggtcaaagtcaacg

SEQ ID NO: 353778 - DNA, 25 bp, Artificial
  probe
  misc_feature (1)..(25): SEQ ID NO: 3373; WAN024CZL; Start 554; Stop 578
aagaagaaatcgtagaaggcttatt

SEQ ID NO: 353779 - DNA, 25 bp, Artificial
  probe
  misc_feature (1)..(25): SEQ ID NO: 3374; WAN024DPS; Start 32; Stop 56
tctggactgtgatatttatagttct

SEQ ID NO: 353780 - DNA, 25 bp, Artificial
  probe
  misc_feature (1)..(25): SEQ ID NO: 3374; WAN024DPS; Start 31; Stop 55
atctggactgtgatatttatagttc

SEQ ID NO: 353781 - DNA, 25 bp, Artificial
  probe
  misc_feature (1)..(25): SEQ ID NO: 3374; WAN024DPS; Start 33; Stop 57
ctggactgtgatatttatagttcta

SEQ ID NO: 353782 - DNA, 25 bp, Artificial
  probe
  misc_feature (1)..(25): SEQ ID NO: 3374; WAN024DPS; Start 34; Stop 58
tggactgtgatatttatagttctaa

SEQ ID NO: 353783 - DNA, 25 bp, Artificial
  probe
  misc_feature (1)..(25): SEQ ID NO: 3375; WAN0249LN; Start 66; Stop 90
tctattgtatcacttggtcagaaat

SEQ ID NO: 353784 - DNA, 25 bp, Artificial
  probe
  misc_feature (1)..(25): SEQ ID NO: 3375; WAN0249LN; Start 1; Stop 25
ctgatttcctccataatgagataga

SEQ ID NO: 353785 - DNA, 25 bp, Artificial
  probe
  misc_feature (1)..(25): SEQ ID NO: 3375; WAN0249LN; Start 2; Stop 26
tgatttcctccataatgagatagat

SEQ ID NO: 353786 - DNA, 25 bp, Artificial
  probe
  misc_feature (1)..(25): SEQ ID NO: 3375; WAN0249LN; Start 67; Stop 91
ctattgtatcacttggtcagaaata

SEQ ID NO: 353787 - DNA, 25 bp, Artificial
  probe
  misc_feature (1)..(25): SEQ ID NO: 3375; WAN0249LN; Start 65; Stop 89
ttctattgtatcacttggtcagaaa

SEQ ID NO: 353788 - DNA, 25 bp, Artificial
  probe
  misc_feature (1)..(25): SEQ ID NO: 3375; WAN0249LN; Start 23; Stop 47
agatattattagcactctttgaact

SEQ ID NO: 353789 - DNA, 25 bp, Artificial
  probe
  misc_feature (1)..(25): SEQ ID NO: 3375; WAN0249LN; Start 3; Stop 27
gatttcctccataatgagatagata

SEQ ID NO: 353790 - DNA, 25 bp, Artificial
  probe
  misc_feature (1)..(25): SEQ ID NO: 3375; WAN0249LN; Start 101; Stop 125
aaagtctgactttctcaagataaaa

SEQ ID NO: 353791 - DNA, 25 bp, Artificial
  probe
  misc_feature (1)..(25): SEQ ID NO: 3375; WAN0249LN; Start 100; Stop 124
aaaagtctgactttctcaagataaa

SEQ ID NO: 353792 - DNA, 25 bp, Artificial
  probe
  misc_feature (1)..(25): SEQ ID NO: 3376; WAN024DOH; Start 27; Stop 51
tcttcgttctccctactttcttatg

SEQ ID NO: 353793 - DNA, 25 bp, Artificial
  probe
  misc_feature (1)..(25): SEQ ID NO: 3376; WAN024DOH; Start 17; Stop 41
cttctttgtatcttcgttctcccta

SEQ ID NO: 353794 - DNA, 25 bp, Artificial
  probe
  misc_feature (1)..(25): SEQ ID NO: 3376; WAN024DOH; Start 24; Stop 48
gtatcttcgttctccctactttctt

SEQ ID NO: 353795 - DNA, 25 bp, Artificial
  probe
  misc_feature (1)..(25): SEQ ID NO: 3376; WAN024DOH; Start 22; Stop 46
ttgtatcttcgttctccctactttc

SEQ ID NO: 353796 - DNA, 25 bp, Artificial
  probe
  misc_feature (1)..(25): SEQ ID NO: 3376; WAN024DOH; Start 20; Stop 44
ctttgtatcttcgttctccctactt

SEQ ID NO: 353797 - DNA, 25 bp, Artificial
  probe
  misc_feature (1)..(25): SEQ ID NO: 3376; WAN024DOH; Start 18; Stop 42
ttctttgtatcttcgttctccctac

SEQ ID NO: 353798 - DNA, 25 bp, Artificial
  probe
  misc_feature (1)..(25): SEQ ID NO: 3376; WAN024DOH; Start 21; Stop 45
tttgtatcttcgttctccctacttt

SEQ ID NO: 353799 - DNA, 25 bp, Artificial
  probe
  misc_feature (1)..(25): SEQ ID NO: 3376; WAN024DOH; Start 14; Stop 38
tgtcttctttgtatcttcgttctcc

SEQ ID NO: 353800 - DNA, 25 bp, Artificial
  probe
  misc_feature (1)..(25): SEQ ID NO: 3376; WAN024DOH; Start 23; Stop 47
tgtatcttcgttctccctactttct

SEQ ID NO: 353801 - DNA, 25 bp, Artificial
  probe
  misc_feature (1)..(25): SEQ ID NO: 3376; WAN024DOH; Start 19; Stop 43
tctttgtatcttcgttctccctact

SEQ ID NO: 353802 - DNA, 25 bp, Artificial
  probe
  misc_feature (1)..(25): SEQ ID NO: 3376; WAN024DOH; Start 13; Stop 37
ttgtcttctttgtatcttcgttctc

SEQ ID NO: 353803 - DNA, 25 bp, Artificial
  probe
  misc_feature (1)..(25): SEQ ID NO: 3376; WAN024DOH; Start 26; Stop 50
atcttcgttctccctactttcttat

SEQ ID NO: 353804 - DNA, 25 bp, Artificial
  probe
  misc_feature (1)..(25): SEQ ID NO: 3376; WAN024DOH; Start 28; Stop 52
cttcgttctccctactttcttatgc

SEQ ID NO: 353805 - DNA, 25 bp, Artificial
  probe
  misc_feature (1)..(25): SEQ ID NO: 3376; WAN024DOH; Start 16; Stop 40
tcttctttgtatcttcgttctccct

SEQ ID NO: 353806 - DNA, 25 bp, Artificial
  probe
  misc_feature (1)..(25): SEQ ID NO: 3376; WAN024DOH; Start 15; Stop 39
gtcttctttgtatcttcgttctccc

SEQ ID NO: 353807 - DNA, 25 bp, Artificial
  probe
  misc_feature (1)..(25): SEQ ID NO: 3376; WAN024DOH; Start 12; Stop 36
tttgtcttctttgtatcttcgttct

SEQ ID NO: 353808 - DNA, 25 bp, Artificial
  probe
  misc_feature (1)..(25): SEQ ID NO: 3376; WAN024DOH; Start 25; Stop 49
tatcttcgttctccctactttctta

SEQ ID NO: 353809 - DNA, 25 bp, Artificial
  probe
  misc_feature (1)..(25): SEQ ID NO: 3376; WAN024DOH; Start 31; Stop 55
cgttctccctactttcttatgcaag

SEQ ID NO: 353810 - DNA, 25 bp, Artificial
  probe
  misc_feature (1)..(25): SEQ ID NO: 3376; WAN024DOH; Start 30; Stop 54
tcgttctccctactttcttatgcaa

SEQ ID NO: 353811 - DNA, 25 bp, Artificial
  probe
  misc_feature (1)..(25): SEQ ID NO: 3376; WAN024DOH; Start 29; Stop 53
ttcgttctccctactttcttatgca

SEQ ID NO: 353812 - DNA, 25 bp, Artificial
  probe
  misc_feature (1)..(25): SEQ ID NO: 3376; WAN024DOH; Start 32; Stop 56
gttctccctactttcttatgcaagc

SEQ ID NO: 353813 - DNA, 25 bp, Artificial
  probe
  misc_feature (1)..(25): SEQ ID NO: 3376; WAN024DOH; Start 36; Stop 60
tccctactttcttatgcaagccttt

SEQ ID NO: 353814 - DNA, 25 bp, Artificial
  probe
  misc_feature (1)..(25): SEQ ID NO: 3376; WAN024DOH; Start 74; Stop 98
tcacagataagtatttctttcacaa

SEQ ID NO: 353815 - DNA, 25 bp, Artificial
  probe
  misc_feature (1)..(25): SEQ ID NO: 3376; WAN024DOH; Start 35; Stop 59
ctccctactttcttatgcaagcctt

SEQ ID NO: 353816 - DNA, 25 bp, Artificial
  probe
  misc_feature (1)..(25): SEQ ID NO: 3376; WAN024DOH; Start 33; Stop 57
ttctccctactttcttatgcaagcc

SEQ ID NO: 353817 - DNA, 25 bp, Artificial
  probe
  misc_feature (1)..(25): SEQ ID NO: 3376; WAN024DOH; Start 11; Stop 35
ttttgtcttctttgtatcttcgttc

SEQ ID NO: 353818 - DNA, 25 bp, Artificial
  probe
  misc_feature (1)..(25): SEQ ID NO: 3376; WAN024DOH; Start 73; Stop 97
atcacagataagtatttctttcaca

SEQ ID NO: 353819 - DNA, 25 bp, Artificial
  probe
  misc_feature (1)..(25): SEQ ID NO: 3376; WAN024DOH; Start 9; Stop 33
gattttgtcttctttgtatcttcgt

SEQ ID NO: 353820 - DNA, 25 bp, Artificial
  probe
  misc_feature (1)..(25): SEQ ID NO: 3376; WAN024DOH; Start 10; Stop 34
attttgtcttctttgtatcttcgtt

SEQ ID NO: 353821 - DNA, 25 bp, Artificial
  probe
  misc_feature (1)..(25): SEQ ID NO: 3376; WAN024DOH; Start 34; Stop 58
tctccctactttcttatgcaagcct

SEQ ID NO: 353822 - DNA, 25 bp, Artificial
  probe
  misc_feature (1)..(25): SEQ ID NO: 3376; WAN024DOH; Start 41; Stop 65
actttcttatgcaagccttttcttt

SEQ ID NO: 353823 - DNA, 25 bp, Artificial
  probe
  misc_feature (1)..(25): SEQ ID NO: 3376; WAN024DOH; Start 1; Stop 25
ctgatttcgattttgtcttctttgt

SEQ ID NO: 353824 - DNA, 25 bp, Artificial
  probe
  misc_feature (1)..(25): SEQ ID NO: 3376; WAN024DOH; Start 39; Stop 63
ctactttcttatgcaagccttttct

SEQ ID NO: 353825 - DNA, 25 bp, Artificial
  probe
  misc_feature (1)..(25): SEQ ID NO: 3377; WAN024FVF; Start 78; Stop 102
ctatccgtatagaggagccttcttt

SEQ ID NO: 353826 - DNA, 25 bp, Artificial
  probe
  misc_feature (1)..(25): SEQ ID NO: 3377; WAN024FVF; Start 75; Stop 99
aatctatccgtatagaggagccttc

SEQ ID NO: 353827 - DNA, 25 bp, Artificial
  probe
  misc_feature (1)..(25): SEQ ID NO: 3377; WAN024FVF; Start 76; Stop 100
atctatccgtatagaggagccttct

SEQ ID NO: 353828 - DNA, 25 bp, Artificial
  probe
  misc_feature (1)..(25): SEQ ID NO: 3377; WAN024FVF; Start 77; Stop 101
tctatccgtatagaggagccttctt

SEQ ID NO: 353829 - DNA, 25 bp, Artificial
  probe
  misc_feature (1)..(25): SEQ ID NO: 3377; WAN024FVF; Start 74; Stop 98
aaatctatccgtatagaggagcctt

SEQ ID NO: 353830 - DNA, 25 bp, Artificial
  probe
  misc_feature (1)..(25): SEQ ID NO: 3377; WAN024FVF; Start 46; Stop 70
ggagtctcctatagaaagaccctag

SEQ ID NO: 353831 - DNA, 25 bp, Artificial
  probe
  misc_feature (1)..(25): SEQ ID NO: 3377; WAN024FVF; Start 45; Stop 69
tggagtctcctatagaaagacccta

SEQ ID NO: 353832 - DNA, 25 bp, Artificial
  probe
  misc_feature (1)..(25): SEQ ID NO: 3377; WAN024FVF; Start 43; Stop 67
tttggagtctcctatagaaagaccc

SEQ ID NO: 353833 - DNA, 25 bp, Artificial
  probe
  misc_feature (1)..(25): SEQ ID NO: 3377; WAN024FVF; Start 44; Stop 68
ttggagtctcctatagaaagaccct

SEQ ID NO: 353834 - DNA, 25 bp, Artificial
  probe
  misc_feature (1)..(25): SEQ ID NO: 3377; WAN024FVF; Start 31; Stop 55
cagaaattttcttttggagtctcct

SEQ ID NO: 353835 - DNA, 25 bp, Artificial
  probe
  misc_feature (1)..(25): SEQ ID NO: 3377; WAN024FVF; Start 29; Stop 53
tgcagaaattttcttttggagtctc

SEQ ID NO: 353836 - DNA, 25 bp, Artificial
  probe
  misc_feature (1)..(25): SEQ ID NO: 3377; WAN024FVF; Start 30; Stop 54
gcagaaattttcttttggagtctcc

SEQ ID NO: 353837 - DNA, 25 bp, Artificial
  probe
  misc_feature (1)..(25): SEQ ID NO: 3377; WAN024FVF; Start 72; Stop 96
gaaaatctatccgtatagaggagcc

SEQ ID NO: 353838 - DNA, 25 bp, Artificial
  probe
  misc_feature (1)..(25): SEQ ID NO: 3377; WAN024FVF; Start 71; Stop 95
ggaaaatctatccgtatagaggagc

SEQ ID NO: 353839 - DNA, 25 bp, Artificial
  probe
  misc_feature (1)..(25): SEQ ID NO: 3377; WAN024FVF; Start 69; Stop 93
agggaaaatctatccgtatagagga

SEQ ID NO: 353840 - DNA, 25 bp, Artificial
  probe
  misc_feature (1)..(25): SEQ ID NO: 3377; WAN024FVF; Start 73; Stop 97
aaaatctatccgtatagaggagcct

SEQ ID NO: 353841 - DNA, 25 bp, Artificial
  probe
  misc_feature (1)..(25): SEQ ID NO: 3377; WAN024FVF; Start 70; Stop 94
gggaaaatctatccgtatagaggag

SEQ ID NO: 353842 - DNA, 25 bp, Artificial
  probe
  misc_feature (1)..(25): SEQ ID NO: 3377; WAN024FVF; Start 68; Stop 92
tagggaaaatctatccgtatagagg

SEQ ID NO: 353843 - DNA, 25 bp, Artificial
  probe
  misc_feature (1)..(25): SEQ ID NO: 3377; WAN024FVF; Start 32; Stop 56
agaaattttcttttggagtctccta

SEQ ID NO: 353844 - DNA, 25 bp, Artificial
  probe
  misc_feature (1)..(25): SEQ ID NO: 3377; WAN024FVF; Start 33; Stop 57
gaaattttcttttggagtctcctat

SEQ ID NO: 353845 - DNA, 25 bp, Artificial
  probe
  misc_feature (1)..(25): SEQ ID NO: 3377; WAN024FVF; Start 36; Stop 60
attttcttttggagtctcctataga

SEQ ID NO: 353846 - DNA, 25 bp, Artificial
  probe
  misc_feature (1)..(25): SEQ ID NO: 3377; WAN024FVF; Start 39; Stop 63
ttcttttggagtctcctatagaaag

SEQ ID NO: 353847 - DNA, 25 bp, Artificial
  probe
  misc_feature (1)..(25): SEQ ID NO: 3377; WAN024FVF; Start 42; Stop 66
ttttggagtctcctatagaaagacc

SEQ ID NO: 353848 - DNA, 25 bp, Artificial
  probe
  misc_feature (1)..(25): SEQ ID NO: 3377; WAN024FVF; Start 37; Stop 61
ttttcttttggagtctcctatagaa

SEQ ID NO: 353849 - DNA, 25 bp, Artificial
  probe
  misc_feature (1)..(25): SEQ ID NO: 3377; WAN024FVF; Start 47; Stop 71
gagtctcctatagaaagaccctagg

SEQ ID NO: 353850 - DNA, 25 bp, Artificial
  probe
  misc_feature (1)..(25): SEQ ID NO: 3377; WAN024FVF; Start 67; Stop 91
ctagggaaaatctatccgtatagag

SEQ ID NO: 353851 - DNA, 25 bp, Artificial
  probe
  misc_feature (1)..(25): SEQ ID NO: 3377; WAN024FVF; Start 35; Stop 59
aattttcttttggagtctcctatag

SEQ ID NO: 353852 - DNA, 25 bp, Artificial
  probe
  misc_feature (1)..(25): SEQ ID NO: 3377; WAN024FVF; Start 41; Stop 65
cttttggagtctcctatagaaagac

SEQ ID NO: 353853 - DNA, 25 bp, Artificial
  probe
  misc_feature (1)..(25): SEQ ID NO: 3377; WAN024FVF; Start 34; Stop 58
aaattttcttttggagtctcctata

SEQ ID NO: 353854 - DNA, 25 bp, Artificial
  probe
  misc_feature (1)..(25): SEQ ID NO: 3377; WAN024FVF; Start 40; Stop 64
tcttttggagtctcctatagaaaga

SEQ ID NO: 353855 - DNA, 25 bp, Artificial
  probe
  misc_feature (1)..(25): SEQ ID NO: 3377; WAN024FVF; Start 66; Stop 90
cctagggaaaatctatccgtataga

SEQ ID NO: 353856 - DNA, 25 bp, Artificial
  probe
  misc_feature (1)..(25): SEQ ID NO: 3377; WAN024FVF; Start 38; Stop 62
tttcttttggagtctcctatagaaa

SEQ ID NO: 353857 - DNA, 25 bp, Artificial
  probe
  misc_feature (1)..(25): SEQ ID NO: 3378; WAN024ERU; Start 27; Stop 51
aagaatagacttgttcggtaactgt

SEQ ID NO: 353858 - DNA, 25 bp, Artificial
  probe
  misc_feature (1)..(25): SEQ ID NO: 3378; WAN024ERU; Start 28; Stop 52
agaatagacttgttcggtaactgta

SEQ ID NO: 353859 - DNA, 25 bp, Artificial
  probe
  misc_feature (1)..(25): SEQ ID NO: 3378; WAN024ERU; Start 29; Stop 53
gaatagacttgttcggtaactgtaa

SEQ ID NO: 353860 - DNA, 25 bp, Artificial
  probe
  misc_feature (1)..(25): SEQ ID NO: 3378; WAN024ERU; Start 154; Stop 178
caactcatgctagaacacctgaatt

SEQ ID NO: 353861 - DNA, 25 bp, Artificial
  probe
  misc_feature (1)..(25): SEQ ID NO: 3378; WAN024ERU; Start 153; Stop 177
tcaactcatgctagaacacctgaat

SEQ ID NO: 353862 - DNA, 25 bp, Artificial
  probe
  misc_feature (1)..(25): SEQ ID NO: 3378; WAN024ERU; Start 258; Stop 282
ttacttgcgatattatcccactcag

SEQ ID NO: 353863 - DNA, 25 bp, Artificial
  probe
  misc_feature (1)..(25): SEQ ID NO: 3378; WAN024ERU; Start 257; Stop 281
gttacttgcgatattatcccactca

SEQ ID NO: 353864 - DNA, 25 bp, Artificial
  probe
  misc_feature (1)..(25): SEQ ID NO: 3378; WAN024ERU; Start 175; Stop 199
aattcagcctatcagattcagcacc

SEQ ID NO: 353865 - DNA, 25 bp, Artificial
  probe
  misc_feature (1)..(25): SEQ ID NO: 3378; WAN024ERU; Start 26; Stop 50
aaagaatagacttgttcggtaactg

SEQ ID NO: 353866 - DNA, 25 bp, Artificial
  probe
  misc_feature (1)..(25): SEQ ID NO: 3378; WAN024ERU; Start 372; Stop 396
ctttgatttggaccatttagaagcc

SEQ ID NO: 353867 - DNA, 25 bp, Artificial
  probe
  misc_feature (1)..(25): SEQ ID NO: 3378; WAN024ERU; Start 256; Stop 280
cgttacttgcgatattatcccactc

SEQ ID NO: 353868 - DNA, 25 bp, Artificial
  probe
  misc_feature (1)..(25): SEQ ID NO: 3378; WAN024ERU; Start 145; Stop 169
gaaacctttcaactcatgctagaac

SEQ ID NO: 353869 - DNA, 25 bp, Artificial
  probe
  misc_feature (1)..(25): SEQ ID NO: 3378; WAN024ERU; Start 373; Stop 397
tttgatttggaccatttagaagccc

SEQ ID NO: 353870 - DNA, 25 bp, Artificial
  probe
  misc_feature (1)..(25): SEQ ID NO: 3378; WAN024ERU; Start 30; Stop 54
aatagacttgttcggtaactgtaaa

SEQ ID NO: 353871 - DNA, 25 bp, Artificial
  probe
  misc_feature (1)..(25): SEQ ID NO: 3378; WAN024ERU; Start 146; Stop 170
aaacctttcaactcatgctagaaca

SEQ ID NO: 353872 - DNA, 25 bp, Artificial
  probe
  misc_feature (1)..(25): SEQ ID NO: 3378; WAN024ERU; Start 317; Stop 341
ctacggtaaatgccatcatcacttg

SEQ ID NO: 353873 - DNA, 25 bp, Artificial
  probe
  misc_feature (1)..(25): SEQ ID NO: 3378; WAN024ERU; Start 144; Stop 168
ggaaacctttcaactcatgctagaa

SEQ ID NO: 353874 - DNA, 25 bp, Artificial
  probe
  misc_feature (1)..(25): SEQ ID NO: 3378; WAN024ERU; Start 259; Stop 283
tacttgcgatattatcccactcagc

SEQ ID NO: 353875 - DNA, 25 bp, Artificial
  probe
  misc_feature (1)..(25): SEQ ID NO: 3378; WAN024ERU; Start 253; Stop 277
ctccgttacttgcgatattatccca

SEQ ID NO: 353876 - DNA, 25 bp, Artificial
  probe
  misc_feature (1)..(25): SEQ ID NO: 3378; WAN024ERU; Start 368; Stop 392
gtagctttgatttggaccatttaga

SEQ ID NO: 353877 - DNA, 25 bp, Artificial
  probe
  misc_feature (1)..(25): SEQ ID NO: 3378; WAN024ERU; Start 147; Stop 171
aacctttcaactcatgctagaacac

SEQ ID NO: 353878 - DNA, 25 bp, Artificial
  probe
  misc_feature (1)..(25): SEQ ID NO: 3378; WAN024ERU; Start 370; Stop 394
agctttgatttggaccatttagaag

SEQ ID NO: 353879 - DNA, 25 bp, Artificial
  probe
  misc_feature (1)..(25): SEQ ID NO: 3378; WAN024ERU; Start 155; Stop 179
aactcatgctagaacacctgaattc

SEQ ID NO: 353880 - DNA, 25 bp, Artificial
  probe
  misc_feature (1)..(25): SEQ ID NO: 3378; WAN024ERU; Start 255; Stop 279
ccgttacttgcgatattatcccact

SEQ ID NO: 353881 - DNA, 25 bp, Artificial
  probe
  misc_feature (1)..(25): SEQ ID NO: 3378; WAN024ERU; Start 254; Stop 278
tccgttacttgcgatattatcccac

SEQ ID NO: 353882 - DNA, 25 bp, Artificial
  probe
  misc_feature (1)..(25): SEQ ID NO: 3378; WAN024ERU; Start 150; Stop 174
ctttcaactcatgctagaacacctg

SEQ ID NO: 353883 - DNA, 25 bp, Artificial
  probe
  misc_feature (1)..(25): SEQ ID NO: 3378; WAN024ERU; Start 369; Stop 393
tagctttgatttggaccatttagaa

SEQ ID NO: 353884 - DNA, 25 bp, Artificial
  probe
  misc_feature (1)..(25): SEQ ID NO: 3378; WAN024ERU; Start 76; Stop 100
gaaacagtatacgacaaagcacaaa

SEQ ID NO: 353885 - DNA, 25 bp, Artificial
  probe
  misc_feature (1)..(25): SEQ ID NO: 3378; WAN024ERU; Start 72; Stop 96
tatggaaacagtatacgacaaagca

SEQ ID NO: 353886 - DNA, 25 bp, Artificial
  probe
  misc_feature (1)..(25): SEQ ID NO: 3378; WAN024ERU; Start 252; Stop 276
cctccgttacttgcgatattatccc

SEQ ID NO: 353887 - DNA, 25 bp, Artificial
  probe
  misc_feature (1)..(25): SEQ ID NO: 3378; WAN024ERU; Start 251; Stop 275
ccctccgttacttgcgatattatcc

SEQ ID NO: 353888 - DNA, 25 bp, Artificial
  probe
  misc_feature (1)..(25): SEQ ID NO: 3378; WAN024ERU; Start 71; Stop 95
ttatggaaacagtatacgacaaagc

SEQ ID NO: 353889 - DNA, 25 bp, Artificial
  probe
  misc_feature (1)..(25): SEQ ID NO: 3378; WAN024ERU; Start 151; Stop 175
tttcaactcatgctagaacacctga

SEQ ID NO: 353890 - DNA, 25 bp, Artificial
  probe
  misc_feature (1)..(25): SEQ ID NO: 3379; WAN024GLQ; Start 254; Stop 278
ttagcaccagtataggcatagacat

SEQ ID NO: 353891 - DNA, 25 bp, Artificial
  probe
  misc_feature (1)..(25): SEQ ID NO: 3379; WAN024GLQ; Start 255; Stop 279
tagcaccagtataggcatagacatc

SEQ ID NO: 353892 - DNA, 25 bp, Artificial
  probe
  misc_feature (1)..(25): SEQ ID NO: 3379; WAN024GLQ; Start 288; Stop 312
ggaaggtataagaatgctctgtgtt

SEQ ID NO: 353893 - DNA, 25 bp, Artificial
  probe
  misc_feature (1)..(25): SEQ ID NO: 3379; WAN024GLQ; Start 286; Stop 310
gtggaaggtataagaatgctctgtg

SEQ ID NO: 353894 - DNA, 25 bp, Artificial
  probe
  misc_feature (1)..(25): SEQ ID NO: 3379; WAN024GLQ; Start 287; Stop 311
tggaaggtataagaatgctctgtgt

SEQ ID NO: 353895 - DNA, 25 bp, Artificial
  probe
  misc_feature (1)..(25): SEQ ID NO: 3379; WAN024GLQ; Start 153; Stop 177
gatgatcttctatgatggtcgctac

SEQ ID NO: 353896 - DNA, 25 bp, Artificial
  probe
  misc_feature (1)..(25): SEQ ID NO: 3379; WAN024GLQ; Start 393; Stop 417
tatctggcgtgacaatgtattgatt

SEQ ID NO: 353897 - DNA, 25 bp, Artificial
  probe
  misc_feature (1)..(25): SEQ ID NO: 3379; WAN024GLQ; Start 392; Stop 416
ttatctggcgtgacaatgtattgat

SEQ ID NO: 353898 - DNA, 25 bp, Artificial
  probe
  misc_feature (1)..(25): SEQ ID NO: 3379; WAN024GLQ; Start 391; Stop 415
attatctggcgtgacaatgtattga

SEQ ID NO: 353899 - DNA, 25 bp, Artificial
  probe
  misc_feature (1)..(25): SEQ ID NO: 3379; WAN024GLQ; Start 152; Stop 176
agatgatcttctatgatggtcgcta

SEQ ID NO: 353900 - DNA, 25 bp, Artificial
  probe
  misc_feature (1)..(25): SEQ ID NO: 3379; WAN024GLQ; Start 144; Stop 168
ccttcaccagatgatcttctatgat

SEQ ID NO: 353901 - DNA, 25 bp, Artificial
  probe
  misc_feature (1)..(25): SEQ ID NO: 3379; WAN024GLQ; Start 261; Stop 285
cagtataggcatagacatcacgacc

SEQ ID NO: 353902 - DNA, 25 bp, Artificial
  probe
  misc_feature (1)..(25): SEQ ID NO: 3379; WAN024GLQ; Start 260; Stop 284
ccagtataggcatagacatcacgac

SEQ ID NO: 353903 - DNA, 25 bp, Artificial
  probe
  misc_feature (1)..(25): SEQ ID NO: 3379; WAN024GLQ; Start 145; Stop 169
cttcaccagatgatcttctatgatg

SEQ ID NO: 353904 - DNA, 25 bp, Artificial
  probe
  misc_feature (1)..(25): SEQ ID NO: 3379; WAN024GLQ; Start 259; Stop 283
accagtataggcatagacatcacga

SEQ ID NO: 353905 - DNA, 25 bp, Artificial
  probe
  misc_feature (1)..(25): SEQ ID NO: 3379; WAN024GLQ; Start 258; Stop 282
caccagtataggcatagacatcacg

SEQ ID NO: 353906 - DNA, 25 bp, Artificial
  probe
  misc_feature (1)..(25): SEQ ID NO: 3379; WAN024GLQ; Start 285; Stop 309
cgtggaaggtataagaatgctctgt

SEQ ID NO: 353907 - DNA, 25 bp, Artificial
  probe
  misc_feature (1)..(25): SEQ ID NO: 3379; WAN024GLQ; Start 154; Stop 178
atgatcttctatgatggtcgctacg

SEQ ID NO: 353908 - DNA, 25 bp, Artificial
  probe
  misc_feature (1)..(25): SEQ ID NO: 3379; WAN024GLQ; Start 151; Stop 175
cagatgatcttctatgatggtcgct

SEQ ID NO: 353909 - DNA, 25 bp, Artificial
  probe
  misc_feature (1)..(25): SEQ ID NO: 3379; WAN024GLQ; Start 257; Stop 281
gcaccagtataggcatagacatcac

SEQ ID NO: 353910 - DNA, 25 bp, Artificial
  probe
  misc_feature (1)..(25): SEQ ID NO: 3379; WAN024GLQ; Start 256; Stop 280
agcaccagtataggcatagacatca

SEQ ID NO: 353911 - DNA, 25 bp, Artificial
  probe
  misc_feature (1)..(25): SEQ ID NO: 3379; WAN024GLQ; Start 146; Stop 170
ttcaccagatgatcttctatgatgg

SEQ ID NO: 353912 - DNA, 25 bp, Artificial
  probe
  misc_feature (1)..(25): SEQ ID NO: 3379; WAN024GLQ; Start 23; Stop 47
tcagcatgatagatggtcacttcaa

SEQ ID NO: 353913 - DNA, 25 bp, Artificial
  probe
  misc_feature (1)..(25): SEQ ID NO: 3379; WAN024GLQ; Start 252; Stop 276
gtttagcaccagtataggcatagac

SEQ ID NO: 353914 - DNA, 25 bp, Artificial
  probe
  misc_feature (1)..(25): SEQ ID NO: 3379; WAN024GLQ; Start 251; Stop 275
agtttagcaccagtataggcataga

SEQ ID NO: 353915 - DNA, 25 bp, Artificial
  probe
  misc_feature (1)..(25): SEQ ID NO: 3379; WAN024GLQ; Start 250; Stop 274
cagtttagcaccagtataggcatag

SEQ ID NO: 353916 - DNA, 25 bp, Artificial
  probe
  misc_feature (1)..(25): SEQ ID NO: 3379; WAN024GLQ; Start 253; Stop 277
tttagcaccagtataggcatagaca

SEQ ID NO: 353917 - DNA, 25 bp, Artificial
  probe
  misc_feature (1)..(25): SEQ ID NO: 3379; WAN024GLQ; Start 390; Stop 414
cattatctggcgtgacaatgtattg

SEQ ID NO: 353918 - DNA, 25 bp, Artificial
  probe
  misc_feature (1)..(25): SEQ ID NO: 3379; WAN024GLQ; Start 541; Stop 565
aatattataaggcgtgatatcgtgc

SEQ ID NO: 353919 - DNA, 25 bp, Artificial
  probe
  misc_feature (1)..(25): SEQ ID NO: 3379; WAN024GLQ; Start 115; Stop 139
gaaacgcacatccagaatatcaatg

SEQ ID NO: 353920 - DNA, 25 bp, Artificial
  probe
  misc_feature (1)..(25): SEQ ID NO: 3379; WAN024GLQ; Start 289; Stop 313
gaaggtataagaatgctctgtgttt

SEQ ID NO: 353921 - DNA, 25 bp, Artificial
  probe
  misc_feature (1)..(25): SEQ ID NO: 3379; WAN024GLQ; Start 334; Stop 358
agaaatctcacgaatggctacaatg

SEQ ID NO: 353922 - DNA, 25 bp, Artificial
  probe
  misc_feature (1)..(25): SEQ ID NO: 3379; WAN024GLQ; Start 333; Stop 357
cagaaatctcacgaatggctacaat

SEQ ID NO: 353923 - DNA, 25 bp, Artificial
  probe
  misc_feature (1)..(25): SEQ ID NO: 3380; WAN024DNU; Start 10; Stop 34
ctagcgacaaacagaataaataagt

SEQ ID NO: 353924 - DNA, 25 bp, Artificial
  probe
  misc_feature (1)..(25): SEQ ID NO: 3380; WAN024DNU; Start 12; Stop 36
agcgacaaacagaataaataagtta

SEQ ID NO: 353925 - DNA, 25 bp, Artificial
  probe
  misc_feature (1)..(25): SEQ ID NO: 3380; WAN024DNU; Start 11; Stop 35
tagcgacaaacagaataaataagtt

SEQ ID NO: 353926 - DNA, 25 bp, Artificial
  probe
  misc_feature (1)..(25): SEQ ID NO: 3380; WAN024DNU; Start 9; Stop 33
tctagcgacaaacagaataaataag

SEQ ID NO: 353927 - DNA, 25 bp, Artificial
  probe
  misc_feature (1)..(25): SEQ ID NO: 3380; WAN024DNU; Start 13; Stop 37
gcgacaaacagaataaataagttag

SEQ ID NO: 353928 - DNA, 25 bp, Artificial
  probe
  misc_feature (1)..(25): SEQ ID NO: 3380; WAN024DNU; Start 116; Stop 140
gtatgaatctatttggggacttgaa

SEQ ID NO: 353929 - DNA, 25 bp, Artificial
  probe
  misc_feature (1)..(25): SEQ ID NO: 3380; WAN024DNU; Start 119; Stop 143
tgaatctatttggggacttgaattt

SEQ ID NO: 353930 - DNA, 25 bp, Artificial
  probe
  misc_feature (1)..(25): SEQ ID NO: 3380; WAN024DNU; Start 115; Stop 139
agtatgaatctatttggggacttga

SEQ ID NO: 353931 - DNA, 25 bp, Artificial
  probe
  misc_feature (1)..(25): SEQ ID NO: 3380; WAN024DNU; Start 118; Stop 142
atgaatctatttggggacttgaatt

SEQ ID NO: 353932 - DNA, 25 bp, Artificial
  probe
  misc_feature (1)..(25): SEQ ID NO: 3380; WAN024DNU; Start 117; Stop 141
tatgaatctatttggggacttgaat

SEQ ID NO: 353933 - DNA, 25 bp, Artificial
  probe
  misc_feature (1)..(25): SEQ ID NO: 3380; WAN024DNU; Start 114; Stop 138
tagtatgaatctatttggggacttg

SEQ ID NO: 353934 - DNA, 25 bp, Artificial
  probe
  misc_feature (1)..(25): SEQ ID NO: 3380; WAN024DNU; Start 14; Stop 38
cgacaaacagaataaataagttagt

SEQ ID NO: 353935 - DNA, 25 bp, Artificial
  probe
  misc_feature (1)..(25): SEQ ID NO: 3380; WAN024DNU; Start 113; Stop 137
ctagtatgaatctatttggggactt

SEQ ID NO: 353936 - DNA, 25 bp, Artificial
  probe
  misc_feature (1)..(25): SEQ ID NO: 3380; WAN024DNU; Start 8; Stop 32
ttctagcgacaaacagaataaataa

SEQ ID NO: 353937 - DNA, 25 bp, Artificial
  probe
  misc_feature (1)..(25): SEQ ID NO: 3380; WAN024DNU; Start 7; Stop 31
tttctagcgacaaacagaataaata

SEQ ID NO: 353938 - DNA, 25 bp, Artificial
  probe
  misc_feature (1)..(25): SEQ ID NO: 3380; WAN024DNU; Start 120; Stop 144
gaatctatttggggacttgaattta

SEQ ID NO: 353939 - DNA, 25 bp, Artificial
  probe
  misc_feature (1)..(25): SEQ ID NO: 3380; WAN024DNU; Start 6; Stop 30
ttttctagcgacaaacagaataaat

SEQ ID NO: 353940 - DNA, 25 bp, Artificial
  probe
  misc_feature (1)..(25): SEQ ID NO: 3380; WAN024DNU; Start 112; Stop 136
actagtatgaatctatttggggact

SEQ ID NO: 353941 - DNA, 25 bp, Artificial
  probe
  misc_feature (1)..(25): SEQ ID NO: 3380; WAN024DNU; Start 111; Stop 135
tactagtatgaatctatttggggac

SEQ ID NO: 353942 - DNA, 25 bp, Artificial
  probe
  misc_feature (1)..(25): SEQ ID NO: 3381; WAN024D6C; Start 44; Stop 68
gaactcgtatcacatacactggtac

SEQ ID NO: 353943 - DNA, 25 bp, Artificial
  probe
  misc_feature (1)..(25): SEQ ID NO: 3381; WAN024D6C; Start 43; Stop 67
ggaactcgtatcacatacactggta

SEQ ID NO: 353944 - DNA, 25 bp, Artificial
  probe
  misc_feature (1)..(25): SEQ ID NO: 3381; WAN024D6C; Start 22; Stop 46
aagatacgaaagataaacggtggaa

SEQ ID NO: 353945 - DNA, 25 bp, Artificial
  probe
  misc_feature (1)..(25): SEQ ID NO: 3381; WAN024D6C; Start 19; Stop 43
ttgaagatacgaaagataaacggtg

SEQ ID NO: 353946 - DNA, 25 bp, Artificial
  probe
  misc_feature (1)..(25): SEQ ID NO: 3381; WAN024D6C; Start 21; Stop 45
gaagatacgaaagataaacggtgga

SEQ ID NO: 353947 - DNA, 25 bp, Artificial
  probe
  misc_feature (1)..(25): SEQ ID NO: 3381; WAN024D6C; Start 25; Stop 49
atacgaaagataaacggtggaactc

SEQ ID NO: 353948 - DNA, 25 bp, Artificial
  probe
  misc_feature (1)..(25): SEQ ID NO: 3381; WAN024D6C; Start 24; Stop 48
gatacgaaagataaacggtggaact

SEQ ID NO: 353949 - DNA, 25 bp, Artificial
  probe
  misc_feature (1)..(25): SEQ ID NO: 3381; WAN024D6C; Start 23; Stop 47
agatacgaaagataaacggtggaac

SEQ ID NO: 353950 - DNA, 25 bp, Artificial
  probe
  misc_feature (1)..(25): SEQ ID NO: 3381; WAN024D6C; Start 20; Stop 44
tgaagatacgaaagataaacggtgg

SEQ ID NO: 353951 - DNA, 25 bp, Artificial
  probe
  misc_feature (1)..(25): SEQ ID NO: 3381; WAN024D6C; Start 18; Stop 42
attgaagatacgaaagataaacggt

SEQ ID NO: 353952 - DNA, 25 bp, Artificial
  probe
  misc_feature (1)..(25): SEQ ID NO: 3381; WAN024D6C; Start 17; Stop 41
cattgaagatacgaaagataaacgg

SEQ ID NO: 353953 - DNA, 25 bp, Artificial
  probe
  misc_feature (1)..(25): SEQ ID NO: 3381; WAN024D6C; Start 16; Stop 40
ccattgaagatacgaaagataaacg

SEQ ID NO: 353954 - DNA, 25 bp, Artificial
  probe
  misc_feature (1)..(25): SEQ ID NO: 3381; WAN024D6C; Start 41; Stop 65
gtggaactcgtatcacatacactgg

SEQ ID NO: 353955 - DNA, 25 bp, Artificial
  probe
  misc_feature (1)..(25): SEQ ID NO: 3381; WAN024D6C; Start 40; Stop 64
ggtggaactcgtatcacatacactg

SEQ ID NO: 353956 - DNA, 25 bp, Artificial
  probe
  misc_feature (1)..(25): SEQ ID NO: 3381; WAN024D6C; Start 42; Stop 66
tggaactcgtatcacatacactggt

SEQ ID NO: 353957 - DNA, 25 bp, Artificial
  probe
  misc_feature (1)..(25): SEQ ID NO: 3381; WAN024D6C; Start 15; Stop 39
tccattgaagatacgaaagataaac

SEQ ID NO: 353958 - DNA, 25 bp, Artificial
  probe
  misc_feature (1)..(25): SEQ ID NO: 3381; WAN024D6C; Start 9; Stop 33
cccaattccattgaagatacgaaag

SEQ ID NO: 353959 - DNA, 25 bp, Artificial
  probe
  misc_feature (1)..(25): SEQ ID NO: 3381; WAN024D6C; Start 10; Stop 34
ccaattccattgaagatacgaaaga

SEQ ID NO: 353960 - DNA, 25 bp, Artificial
  probe
  misc_feature (1)..(25): SEQ ID NO: 3381; WAN024D6C; Start 14; Stop 38
ttccattgaagatacgaaagataaa

SEQ ID NO: 353961 - DNA, 25 bp, Artificial
  probe
  misc_feature (1)..(25): SEQ ID NO: 3381; WAN024D6C; Start 30; Stop 54
aaagataaacggtggaactcgtatc

SEQ ID NO: 353962 - DNA, 25 bp, Artificial
  probe
  misc_feature (1)..(25): SEQ ID NO: 3381; WAN024D6C; Start 29; Stop 53
gaaagataaacggtggaactcgtat

SEQ ID NO: 353963 - DNA, 25 bp, Artificial
  probe
  misc_feature (1)..(25): SEQ ID NO: 3381; WAN024D6C; Start 13; Stop 37
attccattgaagatacgaaagataa

SEQ ID NO: 353964 - DNA, 25 bp, Artificial
  probe
  misc_feature (1)..(25): SEQ ID NO: 3381; WAN024D6C; Start 39; Stop 63
cggtggaactcgtatcacatacact

SEQ ID NO: 353965 - DNA, 25 bp, Artificial
  probe
  misc_feature (1)..(25): SEQ ID NO: 3381; WAN024D6C; Start 11; Stop 35
caattccattgaagatacgaaagat

SEQ ID NO: 353966 - DNA, 25 bp, Artificial
  probe
  misc_feature (1)..(25): SEQ ID NO: 3381; WAN024D6C; Start 12; Stop 36
aattccattgaagatacgaaagata

SEQ ID NO: 353967 - DNA, 25 bp, Artificial
  probe
  misc_feature (1)..(25): SEQ ID NO: 3381; WAN024D6C; Start 35; Stop 59
taaacggtggaactcgtatcacata

SEQ ID NO: 353968 - DNA, 25 bp, Artificial
  probe
  misc_feature (1)..(25): SEQ ID NO: 3381; WAN024D6C; Start 31; Stop 55
aagataaacggtggaactcgtatca

SEQ ID NO: 353969 - DNA, 25 bp, Artificial
  probe
  misc_feature (1)..(25): SEQ ID NO: 3381; WAN024D6C; Start 34; Stop 58
ataaacggtggaactcgtatcacat

SEQ ID NO: 353970 - DNA, 25 bp, Artificial
  probe
  misc_feature (1)..(25): SEQ ID NO: 3381; WAN024D6C; Start 51; Stop 75
tatcacatacactggtaccttgact

SEQ ID NO: 353971 - DNA, 25 bp, Artificial
  probe
  misc_feature (1)..(25): SEQ ID NO: 3381; WAN024D6C; Start 32; Stop 56
agataaacggtggaactcgtatcac

SEQ ID NO: 353972 - DNA, 25 bp, Artificial
  probe
  misc_feature (1)..(25): SEQ ID NO: 3381; WAN024D6C; Start 37; Stop 61
aacggtggaactcgtatcacataca

SEQ ID NO: 353973 - DNA, 25 bp, Artificial
  probe
  misc_feature (1)..(25): SEQ ID NO: 3381; WAN024D6C; Start 26; Stop 50
tacgaaagataaacggtggaactcg

SEQ ID NO: 353974 - DNA, 25 bp, Artificial
  probe
  misc_feature (1)..(25): SEQ ID NO: 3381; WAN024D6C; Start 56; Stop 80
catacactggtaccttgactggatt

SEQ ID NO: 353975 - DNA, 25 bp, Artificial
  probe
  misc_feature (1)..(25): SEQ ID NO: 3383; WAN024EVA; Start 52; Stop 76
catagattcaccagtagacttgacc

SEQ ID NO: 353976 - DNA, 25 bp, Artificial
  probe
  misc_feature (1)..(25): SEQ ID NO: 3383; WAN024EVA; Start 51; Stop 75
tcatagattcaccagtagacttgac

SEQ ID NO: 353977 - DNA, 25 bp, Artificial
  probe
  misc_feature (1)..(25): SEQ ID NO: 3383; WAN024EVA; Start 50; Stop 74
atcatagattcaccagtagacttga

SEQ ID NO: 353978 - DNA, 25 bp, Artificial
  probe
  misc_feature (1)..(25): SEQ ID NO: 3383; WAN024EVA; Start 53; Stop 77
atagattcaccagtagacttgaccg

SEQ ID NO: 353979 - DNA, 25 bp, Artificial
  probe
  misc_feature (1)..(25): SEQ ID NO: 3383; WAN024EVA; Start 47; Stop 71
acaatcatagattcaccagtagact

SEQ ID NO: 353980 - DNA, 25 bp, Artificial
  probe
  misc_feature (1)..(25): SEQ ID NO: 3383; WAN024EVA; Start 67; Stop 91
agacttgaccgcagatttaactata

SEQ ID NO: 353981 - DNA, 25 bp, Artificial
  probe
  misc_feature (1)..(25): SEQ ID NO: 3383; WAN024EVA; Start 66; Stop 90
tagacttgaccgcagatttaactat

SEQ ID NO: 353982 - DNA, 25 bp, Artificial
  probe
  misc_feature (1)..(25): SEQ ID NO: 3383; WAN024EVA; Start 65; Stop 89
gtagacttgaccgcagatttaacta

SEQ ID NO: 353983 - DNA, 25 bp, Artificial
  probe
  misc_feature (1)..(25): SEQ ID NO: 3383; WAN024EVA; Start 49; Stop 73
aatcatagattcaccagtagacttg

SEQ ID NO: 353984 - DNA, 25 bp, Artificial
  probe
  misc_feature (1)..(25): SEQ ID NO: 3383; WAN024EVA; Start 48; Stop 72
caatcatagattcaccagtagactt

SEQ ID NO: 353985 - DNA, 25 bp, Artificial
  probe
  misc_feature (1)..(25): SEQ ID NO: 3383; WAN024EVA; Start 63; Stop 87
cagtagacttgaccgcagatttaac

SEQ ID NO: 353986 - DNA, 25 bp, Artificial
  probe
  misc_feature (1)..(25): SEQ ID NO: 3383; WAN024EVA; Start 46; Stop 70
tacaatcatagattcaccagtagac

SEQ ID NO: 353987 - DNA, 25 bp, Artificial
  probe
  misc_feature (1)..(25): SEQ ID NO: 3383; WAN024EVA; Start 64; Stop 88
agtagacttgaccgcagatttaact

SEQ ID NO: 353988 - DNA, 25 bp, Artificial
  probe
  misc_feature (1)..(25): SEQ ID NO: 3383; WAN024EVA; Start 62; Stop 86
ccagtagacttgaccgcagatttaa

SEQ ID NO: 353989 - DNA, 25 bp, Artificial
  probe
  misc_feature (1)..(25): SEQ ID NO: 3383; WAN024EVA; Start 68; Stop 92
gacttgaccgcagatttaactatag

SEQ ID NO: 353990 - DNA, 25 bp, Artificial
  probe
  misc_feature (1)..(25): SEQ ID NO: 3383; WAN024EVA; Start 45; Stop 69
ttacaatcatagattcaccagtaga

SEQ ID NO: 353991 - DNA, 25 bp, Artificial
  probe
  misc_feature (1)..(25): SEQ ID NO: 3383; WAN024EVA; Start 54; Stop 78
tagattcaccagtagacttgaccgc

SEQ ID NO: 353992 - DNA, 25 bp, Artificial
  probe
  misc_feature (1)..(25): SEQ ID NO: 3383; WAN024EVA; Start 9; Stop 33
caagactgacgtggttgatgagatt

SEQ ID NO: 353993 - DNA, 25 bp, Artificial
  probe
  misc_feature (1)..(25): SEQ ID NO: 3383; WAN024EVA; Start 20; Stop 44
tggttgatgagattttggaagagta

SEQ ID NO: 353994 - DNA, 25 bp, Artificial
  probe
  misc_feature (1)..(25): SEQ ID NO: 3383; WAN024EVA; Start 42; Stop 66
gtattacaatcatagattcaccagt

SEQ ID NO: 353995 - DNA, 25 bp, Artificial
  probe
  misc_feature (1)..(25): SEQ ID NO: 3383; WAN024EVA; Start 61; Stop 85
accagtagacttgaccgcagattta

SEQ ID NO: 353996 - DNA, 25 bp, Artificial
  probe
  misc_feature (1)..(25): SEQ ID NO: 3383; WAN024EVA; Start 21; Stop 45
ggttgatgagattttggaagagtat

SEQ ID NO: 353997 - DNA, 25 bp, Artificial
  probe
  misc_feature (1)..(25): SEQ ID NO: 3383; WAN024EVA; Start 19; Stop 43
gtggttgatgagattttggaagagt

SEQ ID NO: 353998 - DNA, 25 bp, Artificial
  probe
  misc_feature (1)..(25): SEQ ID NO: 3383; WAN024EVA; Start 10; Stop 34
aagactgacgtggttgatgagattt

SEQ ID NO: 353999 - DNA, 25 bp, Artificial
  probe
  misc_feature (1)..(25): SEQ ID NO: 3383; WAN024EVA; Start 44; Stop 68
attacaatcatagattcaccagtag

SEQ ID NO: 354000 - DNA, 25 bp, Artificial
  probe
  misc_feature (1)..(25): SEQ ID NO: 3383; WAN024EVA; Start 41; Stop 65
agtattacaatcatagattcaccag

SEQ ID NO: 354001 - DNA, 25 bp, Artificial
  probe
  misc_feature (1)..(25): SEQ ID NO: 3383; WAN024EVA; Start 40; Stop 64
gagtattacaatcatagattcacca

SEQ ID NO: 354002 - DNA, 25 bp, Artificial
  probe
  misc_feature (1)..(25): SEQ ID NO: 3383; WAN024EVA; Start 39; Stop 63
agagtattacaatcatagattcacc

SEQ ID NO: 354003 - DNA, 25 bp, Artificial
  probe
  misc_feature (1)..(25): SEQ ID NO: 3383; WAN024EVA; Start 18; Stop 42
cgtggttgatgagattttggaagag

SEQ ID NO: 354004 - DNA, 25 bp, Artificial
  probe
  misc_feature (1)..(25): SEQ ID NO: 3383; WAN024EVA; Start 34; Stop 58
ttggaagagtattacaatcatagat

SEQ ID NO: 354005 - DNA, 25 bp, Artificial
  probe
  misc_feature (1)..(25): SEQ ID NO: 3383; WAN024EVA; Start 22; Stop 46
gttgatgagattttggaagagtatt

SEQ ID NO: 354006 - DNA, 25 bp, Artificial
  probe
  misc_feature (1)..(25): SEQ ID NO: 3383; WAN024EVA; Start 35; Stop 59
tggaagagtattacaatcatagatt

SEQ ID NO: 354007 - DNA, 25 bp, Artificial
  probe
  misc_feature (1)..(25): SEQ ID NO: 3383; WAN024EVA; Start 33; Stop 57
tttggaagagtattacaatcataga

SEQ ID NO: 354008 - DNA, 25 bp, Artificial
  probe
  misc_feature (1)..(25): SEQ ID NO: 3384; WAN024DTN; Start 51; Stop 75
agaagaaacaatagaaagatttgct

SEQ ID NO: 354009 - DNA, 25 bp, Artificial
  probe
  misc_feature (1)..(25): SEQ ID NO: 3384; WAN024DTN; Start 50; Stop 74
aagaagaaacaatagaaagatttgc

SEQ ID NO: 354010 - DNA, 25 bp, Artificial
  probe
  misc_feature (1)..(25): SEQ ID NO: 3384; WAN024DTN; Start 52; Stop 76
gaagaaacaatagaaagatttgcta

SEQ ID NO: 354011 - DNA, 25 bp, Artificial
  probe
  misc_feature (1)..(25): SEQ ID NO: 3384; WAN024DTN; Start 63; Stop 87
agaaagatttgctatttccaactat

SEQ ID NO: 354012 - DNA, 25 bp, Artificial
  probe
  misc_feature (1)..(25): SEQ ID NO: 3384; WAN024DTN; Start 61; Stop 85
atagaaagatttgctatttccaact

SEQ ID NO: 354013 - DNA, 25 bp, Artificial
  probe
  misc_feature (1)..(25): SEQ ID NO: 3384; WAN024DTN; Start 62; Stop 86
tagaaagatttgctatttccaacta

SEQ ID NO: 354014 - DNA, 25 bp, Artificial
  probe
  misc_feature (1)..(25): SEQ ID NO: 3384; WAN024DTN; Start 49; Stop 73
caagaagaaacaatagaaagatttg

SEQ ID NO: 354015 - DNA, 25 bp, Artificial
  probe
  misc_feature (1)..(25): SEQ ID NO: 3384; WAN024DTN; Start 48; Stop 72
tcaagaagaaacaatagaaagattt

SEQ ID NO: 354016 - DNA, 25 bp, Artificial
  probe
  misc_feature (1)..(25): SEQ ID NO: 3384; WAN024DTN; Start 58; Stop 82
acaatagaaagatttgctatttcca

SEQ ID NO: 354017 - DNA, 25 bp, Artificial
  probe
  misc_feature (1)..(25): SEQ ID NO: 3384; WAN024DTN; Start 53; Stop 77
aagaaacaatagaaagatttgctat

SEQ ID NO: 354018 - DNA, 25 bp, Artificial
  probe
  misc_feature (1)..(25): SEQ ID NO: 3384; WAN024DTN; Start 60; Stop 84
aatagaaagatttgctatttccaac

SEQ ID NO: 354019 - DNA, 25 bp, Artificial
  probe
  misc_feature (1)..(25): SEQ ID NO: 3384; WAN024DTN; Start 59; Stop 83
caatagaaagatttgctatttccaa

SEQ ID NO: 354020 - DNA, 25 bp, Artificial
  probe
  misc_feature (1)..(25): SEQ ID NO: 3384; WAN024DTN; Start 57; Stop 81
aacaatagaaagatttgctatttcc

SEQ ID NO: 354021 - DNA, 25 bp, Artificial
  probe
  misc_feature (1)..(25): SEQ ID NO: 3384; WAN024DTN; Start 54; Stop 78
agaaacaatagaaagatttgctatt

SEQ ID NO: 354022 - DNA, 25 bp, Artificial
  probe
  misc_feature (1)..(25): SEQ ID NO: 3385; WAN024CPD; Start 265; Stop 289
atcaagataacagaccaaggctatg

SEQ ID NO: 354023 - DNA, 25 bp, Artificial
  probe
  misc_feature (1)..(25): SEQ ID NO: 3385; WAN024CPD; Start 264; Stop 288
catcaagataacagaccaaggctat

SEQ ID NO: 354024 - DNA, 25 bp, Artificial
  probe
  misc_feature (1)..(25): SEQ ID NO: 3385; WAN024CPD; Start 796; Stop 820
aatagcgataacacttcaagaacaa

SEQ ID NO: 354025 - DNA, 25 bp, Artificial
  probe
  misc_feature (1)..(25): SEQ ID NO: 3385; WAN024CPD; Start 263; Stop 287
tcatcaagataacagaccaaggcta

SEQ ID NO: 354026 - DNA, 25 bp, Artificial
  probe
  misc_feature (1)..(25): SEQ ID NO: 3385; WAN024CPD; Start 1071; Stop 1095
aatgtctgaattggaagaacgaatc

SEQ ID NO: 354027 - DNA, 25 bp, Artificial
  probe
  misc_feature (1)..(25): SEQ ID NO: 3385; WAN024CPD; Start 397; Stop 421
gaggatattgttaatgaggtcaagg

SEQ ID NO: 354028 - DNA, 25 bp, Artificial
  probe
  misc_feature (1)..(25): SEQ ID NO: 3385; WAN024CPD; Start 2415; Stop 2439
taacaatagtatcatggcagaagca

SEQ ID NO: 354029 - DNA, 25 bp, Artificial
  probe
  misc_feature (1)..(25): SEQ ID NO: 3385; WAN024CPD; Start 2418; Stop 2442
caatagtatcatggcagaagcagaa

SEQ ID NO: 354030 - DNA, 25 bp, Artificial
  probe
  misc_feature (1)..(25): SEQ ID NO: 3385; WAN024CPD; Start 258; Stop 282
aatcgtcatcaagataacagaccaa

SEQ ID NO: 354031 - DNA, 25 bp, Artificial
  probe
  misc_feature (1)..(25): SEQ ID NO: 3385; WAN024CPD; Start 2414; Stop 2438
ataacaatagtatcatggcagaagc

SEQ ID NO: 354032 - DNA, 25 bp, Artificial
  probe
  misc_feature (1)..(25): SEQ ID NO: 3385; WAN024CPD; Start 1963; Stop 1987
atggttgagcatacagttgaggtta

SEQ ID NO: 354033 - DNA, 25 bp, Artificial
  probe
  misc_feature (1)..(25): SEQ ID NO: 3385; WAN024CPD; Start 259; Stop 283
atcgtcatcaagataacagaccaag

SEQ ID NO: 354034 - DNA, 25 bp, Artificial
  probe
  misc_feature (1)..(25): SEQ ID NO: 3385; WAN024CPD; Start 1964; Stop 1988
tggttgagcatacagttgaggttaa

SEQ ID NO: 354035 - DNA, 25 bp, Artificial
  probe
  misc_feature (1)..(25): SEQ ID NO: 3385; WAN024CPD; Start 393; Stop 417
agatgaggatattgttaatgaggtc

SEQ ID NO: 354036 - DNA, 25 bp, Artificial
  probe
  misc_feature (1)..(25): SEQ ID NO: 3385; WAN024CPD; Start 2416; Stop 2440
aacaatagtatcatggcagaagcag

SEQ ID NO: 354037 - DNA, 25 bp, Artificial
  probe
  misc_feature (1)..(25): SEQ ID NO: 3385; WAN024CPD; Start 1960; Stop 1984
tatatggttgagcatacagttgagg

SEQ ID NO: 354038 - DNA, 25 bp, Artificial
  probe
  misc_feature (1)..(25): SEQ ID NO: 3385; WAN024CPD; Start 396; Stop 420
tgaggatattgttaatgaggtcaag

SEQ ID NO: 354039 - DNA, 25 bp, Artificial
  probe
  misc_feature (1)..(25): SEQ ID NO: 3385; WAN024CPD; Start 422; Stop 446
gtggatatgttatcaaggtagatgg

SEQ ID NO: 354040 - DNA, 25 bp, Artificial
  probe
  misc_feature (1)..(25): SEQ ID NO: 3385; WAN024CPD; Start 421; Stop 445
ggtggatatgttatcaaggtagatg

SEQ ID NO: 354041 - DNA, 25 bp, Artificial
  probe
  misc_feature (1)..(25): SEQ ID NO: 3385; WAN024CPD; Start 266; Stop 290
tcaagataacagaccaaggctatgt

SEQ ID NO: 354042 - DNA, 25 bp, Artificial
  probe
  misc_feature (1)..(25): SEQ ID NO: 3385; WAN024CPD; Start 394; Stop 418
gatgaggatattgttaatgaggtca

SEQ ID NO: 354043 - DNA, 25 bp, Artificial
  probe
  misc_feature (1)..(25): SEQ ID NO: 3385; WAN024CPD; Start 267; Stop 291
caagataacagaccaaggctatgtc

SEQ ID NO: 354044 - DNA, 25 bp, Artificial
  probe
  misc_feature (1)..(25): SEQ ID NO: 3385; WAN024CPD; Start 423; Stop 447
tggatatgttatcaaggtagatgga

SEQ ID NO: 354045 - DNA, 25 bp, Artificial
  probe
  misc_feature (1)..(25): SEQ ID NO: 3385; WAN024CPD; Start 1072; Stop 1096
atgtctgaattggaagaacgaatcg

SEQ ID NO: 354046 - DNA, 25 bp, Artificial
  probe
  misc_feature (1)..(25): SEQ ID NO: 3385; WAN024CPD; Start 268; Stop 292
aagataacagaccaaggctatgtca

SEQ ID NO: 354047 - DNA, 25 bp, Artificial
  probe
  misc_feature (1)..(25): SEQ ID NO: 3385; WAN024CPD; Start 2417; Stop 2441
acaatagtatcatggcagaagcaga

SEQ ID NO: 354048 - DNA, 25 bp, Artificial
  probe
  misc_feature (1)..(25): SEQ ID NO: 3385; WAN024CPD; Start 1531; Stop 1555
cgcttgaatgatgaatcgactaata

SEQ ID NO: 354049 - DNA, 25 bp, Artificial
  probe
  misc_feature (1)..(25): SEQ ID NO: 3385; WAN024CPD; Start 392; Stop 416
aagatgaggatattgttaatgaggt

SEQ ID NO: 354050 - DNA, 25 bp, Artificial
  probe
  misc_feature (1)..(25): SEQ ID NO: 3385; WAN024CPD; Start 2411; Stop 2435
tggataacaatagtatcatggcaga

SEQ ID NO: 354051 - DNA, 25 bp, Artificial
  probe
  misc_feature (1)..(25): SEQ ID NO: 3385; WAN024CPD; Start 300; Stop 324
tggcgaccactatcattattacaat

SEQ ID NO: 354052 - DNA, 25 bp, Artificial
  probe
  misc_feature (1)..(25): SEQ ID NO: 3385; WAN024CPD; Start 299; Stop 323
atggcgaccactatcattattacaa

SEQ ID NO: 354053 - DNA, 25 bp, Artificial
  probe
  misc_feature (1)..(25): SEQ ID NO: 3385; WAN024CPD; Start 1721; Stop 1745
atataatcagtgatgaaggagatgc

SEQ ID NO: 354054 - DNA, 25 bp, Artificial
  probe
  misc_feature (1)..(25): SEQ ID NO: 3385; WAN024CPD; Start 1525; Stop 1549
ttagaacgcttgaatgatgaatcga

SEQ ID NO: 354055 - DNA, 25 bp, Artificial
  probe
  misc_feature (1)..(25): SEQ ID NO: 3386; WAN024CPC; Start 2346; Stop 2370
gaagaagaatcaccagaagaatcac

SEQ ID NO: 354056 - DNA, 25 bp, Artificial
  probe
  misc_feature (1)..(25): SEQ ID NO: 3386; WAN024CPC; Start 2345; Stop 2369
agaagaagaatcaccagaagaatca

SEQ ID NO: 354057 - DNA, 25 bp, Artificial
  probe
  misc_feature (1)..(25): SEQ ID NO: 3386; WAN024CPC; Start 2343; Stop 2367
ccagaagaagaatcaccagaagaat

SEQ ID NO: 354058 - DNA, 25 bp, Artificial
  probe
  misc_feature (1)..(25): SEQ ID NO: 3386; WAN024CPC; Start 2344; Stop 2368
cagaagaagaatcaccagaagaatc

SEQ ID NO: 354059 - DNA, 25 bp, Artificial
  probe
  misc_feature (1)..(25): SEQ ID NO: 3386; WAN024CPC; Start 2347; Stop 2371
aagaagaatcaccagaagaatcacc

SEQ ID NO: 354060 - DNA, 25 bp, Artificial
  probe
  misc_feature (1)..(25): SEQ ID NO: 3386; WAN024CPC; Start 2340; Stop 2364
gaaccagaagaagaatcaccagaag

SEQ ID NO: 354061 - DNA, 25 bp, Artificial
  probe
  misc_feature (1)..(25): SEQ ID NO: 3386; WAN024CPC; Start 2332; Stop 2356
caacagaggaaccagaagaagaatc

SEQ ID NO: 354062 - DNA, 25 bp, Artificial
  probe
  misc_feature (1)..(25): SEQ ID NO: 3386; WAN024CPC; Start 2458; Stop 2482
atccaattatcaagtccaatgccaa

SEQ ID NO: 354063 - DNA, 25 bp, Artificial
  probe
  misc_feature (1)..(25): SEQ ID NO: 3386; WAN024CPC; Start 2349; Stop 2373
gaagaatcaccagaagaatcaccag

SEQ ID NO: 354064 - DNA, 25 bp, Artificial
  probe
  misc_feature (1)..(25): SEQ ID NO: 3386; WAN024CPC; Start 2350; Stop 2374
aagaatcaccagaagaatcaccaga

SEQ ID NO: 354065 - DNA, 25 bp, Artificial
  probe
  misc_feature (1)..(25): SEQ ID NO: 3386; WAN024CPC; Start 2348; Stop 2372
agaagaatcaccagaagaatcacca

SEQ ID NO: 354066 - DNA, 25 bp, Artificial
  probe
  misc_feature (1)..(25): SEQ ID NO: 3386; WAN024CPC; Start 2342; Stop 2366
accagaagaagaatcaccagaagaa

SEQ ID NO: 354067 - DNA, 25 bp, Artificial
  probe
  misc_feature (1)..(25): SEQ ID NO: 3386; WAN024CPC; Start 2341; Stop 2365
aaccagaagaagaatcaccagaaga

SEQ ID NO: 354068 - DNA, 25 bp, Artificial
  probe
  misc_feature (1)..(25): SEQ ID NO: 3386; WAN024CPC; Start 2333; Stop 2357
aacagaggaaccagaagaagaatca

SEQ ID NO: 354069 - DNA, 25 bp, Artificial
  probe
  misc_feature (1)..(25): SEQ ID NO: 3386; WAN024CPC; Start 2351; Stop 2375
agaatcaccagaagaatcaccagag

SEQ ID NO: 354070 - DNA, 25 bp, Artificial
  probe
  misc_feature (1)..(25): SEQ ID NO: 3386; WAN024CPC; Start 2334; Stop 2358
acagaggaaccagaagaagaatcac

SEQ ID NO: 354071 - DNA, 25 bp, Artificial
  probe
  misc_feature (1)..(25): SEQ ID NO: 3386; WAN024CPC; Start 2339; Stop 2363
ggaaccagaagaagaatcaccagaa

SEQ ID NO: 354072 - DNA, 25 bp, Artificial
  probe
  misc_feature (1)..(25): SEQ ID NO: 3386; WAN024CPC; Start 2331; Stop 2355
ccaacagaggaaccagaagaagaat

SEQ ID NO: 354073 - DNA, 25 bp, Artificial
  probe
  misc_feature (1)..(25): SEQ ID NO: 3386; WAN024CPC; Start 873; Stop 897
aacaacagcaacactaacagtcaag

SEQ ID NO: 354074 - DNA, 25 bp, Artificial
  probe
  misc_feature (1)..(25): SEQ ID NO: 3386; WAN024CPC; Start 2356; Stop 2380
caccagaagaatcaccagaggaatc

SEQ ID NO: 354075 - DNA, 25 bp, Artificial
  probe
  misc_feature (1)..(25): SEQ ID NO: 3386; WAN024CPC; Start 2352; Stop 2376
gaatcaccagaagaatcaccagagg

SEQ ID NO: 354076 - DNA, 25 bp, Artificial
  probe
  misc_feature (1)..(25): SEQ ID NO: 3386; WAN024CPC; Start 2337; Stop 2361
gaggaaccagaagaagaatcaccag

SEQ ID NO: 354077 - DNA, 25 bp, Artificial
  probe
  misc_feature (1)..(25): SEQ ID NO: 3386; WAN024CPC; Start 2335; Stop 2359
cagaggaaccagaagaagaatcacc

SEQ ID NO: 354078 - DNA, 25 bp, Artificial
  probe
  misc_feature (1)..(25): SEQ ID NO: 3386; WAN024CPC; Start 2463; Stop 2487
attatcaagtccaatgccaaagaga

SEQ ID NO: 354079 - DNA, 25 bp, Artificial
  probe
  misc_feature (1)..(25): SEQ ID NO: 3386; WAN024CPC; Start 2462; Stop 2486
aattatcaagtccaatgccaaagag

SEQ ID NO: 354080 - DNA, 25 bp, Artificial
  probe
  misc_feature (1)..(25): SEQ ID NO: 3386; WAN024CPC; Start 2461; Stop 2485
caattatcaagtccaatgccaaaga

SEQ ID NO: 354081 - DNA, 25 bp, Artificial
  probe
  misc_feature (1)..(25): SEQ ID NO: 3386; WAN024CPC; Start 2460; Stop 2484
ccaattatcaagtccaatgccaaag

SEQ ID NO: 354082 - DNA, 25 bp, Artificial
  probe
  misc_feature (1)..(25): SEQ ID NO: 3386; WAN024CPC; Start 2355; Stop 2379
tcaccagaagaatcaccagaggaat

SEQ ID NO: 354083 - DNA, 25 bp, Artificial
  probe
  misc_feature (1)..(25): SEQ ID NO: 3386; WAN024CPC; Start 2354; Stop 2378
atcaccagaagaatcaccagaggaa

SEQ ID NO: 354084 - DNA, 25 bp, Artificial
  probe
  misc_feature (1)..(25): SEQ ID NO: 3386; WAN024CPC; Start 2353; Stop 2377
aatcaccagaagaatcaccagagga

SEQ ID NO: 354085 - DNA, 25 bp, Artificial
  probe
  misc_feature (1)..(25): SEQ ID NO: 3386; WAN024CPC; Start 2338; Stop 2362
aggaaccagaagaagaatcaccaga

SEQ ID NO: 354086 - DNA, 25 bp, Artificial
  probe
  misc_feature (1)..(25): SEQ ID NO: 3386; WAN024CPC; Start 2336; Stop 2360
agaggaaccagaagaagaatcacca

SEQ ID NO: 354087 - DNA, 25 bp, Artificial
  probe
  misc_feature (1)..(25): SEQ ID NO: 3386; WAN024CPC; Start 2459; Stop 2483
tccaattatcaagtccaatgccaaa

SEQ ID NO: 354088 - DNA, 25 bp, Artificial
  probe
  misc_feature (1)..(25): SEQ ID NO: 3387; WAN024ANO; Start 54; Stop 78
tcacaacaggtttgaagtaaatcag

SEQ ID NO: 354089 - DNA, 25 bp, Artificial
  probe
  misc_feature (1)..(25): SEQ ID NO: 3387; WAN024ANO; Start 53; Stop 77
ctcacaacaggtttgaagtaaatca

SEQ ID NO: 354090 - DNA, 25 bp, Artificial
  probe
  misc_feature (1)..(25): SEQ ID NO: 3387; WAN024ANO; Start 55; Stop 79
cacaacaggtttgaagtaaatcagc

SEQ ID NO: 354091 - DNA, 25 bp, Artificial
  probe
  misc_feature (1)..(25): SEQ ID NO: 3387; WAN024ANO; Start 59; Stop 83
acaggtttgaagtaaatcagcgaaa

SEQ ID NO: 354092 - DNA, 25 bp, Artificial
  probe
  misc_feature (1)..(25): SEQ ID NO: 3387; WAN024ANO; Start 58; Stop 82
aacaggtttgaagtaaatcagcgaa

SEQ ID NO: 354093 - DNA, 25 bp, Artificial
  probe
  misc_feature (1)..(25): SEQ ID NO: 3387; WAN024ANO; Start 52; Stop 76
cctcacaacaggtttgaagtaaatc

SEQ ID NO: 354094 - DNA, 25 bp, Artificial
  probe
  misc_feature (1)..(25): SEQ ID NO: 3387; WAN024ANO; Start 57; Stop 81
caacaggtttgaagtaaatcagcga

SEQ ID NO: 354095 - DNA, 25 bp, Artificial
  probe
  misc_feature (1)..(25): SEQ ID NO: 3387; WAN024ANO; Start 56; Stop 80
acaacaggtttgaagtaaatcagcg

SEQ ID NO: 354096 - DNA, 25 bp, Artificial
  probe
  misc_feature (1)..(25): SEQ ID NO: 3387; WAN024ANO; Start 64; Stop 88
tttgaagtaaatcagcgaaactact

SEQ ID NO: 354097 - DNA, 25 bp, Artificial
  probe
  misc_feature (1)..(25): SEQ ID NO: 3387; WAN024ANO; Start 101; Stop 125
cactttcagaatcattgtcaataga

SEQ ID NO: 354098 - DNA, 25 bp, Artificial
  probe
  misc_feature (1)..(25): SEQ ID NO: 3387; WAN024ANO; Start 33; Stop 57
ttaaggcatcgttaacttacctcac

SEQ ID NO: 354099 - DNA, 25 bp, Artificial
  probe
  misc_feature (1)..(25): SEQ ID NO: 3387; WAN024ANO; Start 38; Stop 62
gcatcgttaacttacctcacaacag

SEQ ID NO: 354100 - DNA, 25 bp, Artificial
  probe
  misc_feature (1)..(25): SEQ ID NO: 3387; WAN024ANO; Start 62; Stop 86
ggtttgaagtaaatcagcgaaacta

SEQ ID NO: 354101 - DNA, 25 bp, Artificial
  probe
  misc_feature (1)..(25): SEQ ID NO: 3387; WAN024ANO; Start 100; Stop 124
acactttcagaatcattgtcaatag

SEQ ID NO: 354102 - DNA, 25 bp, Artificial
  probe
  misc_feature (1)..(25): SEQ ID NO: 3387; WAN024ANO; Start 39; Stop 63
catcgttaacttacctcacaacagg

SEQ ID NO: 354103 - DNA, 25 bp, Artificial
  probe
  misc_feature (1)..(25): SEQ ID NO: 3387; WAN024ANO; Start 72; Stop 96
aaatcagcgaaactactttcttagt

SEQ ID NO: 354104 - DNA, 25 bp, Artificial
  probe
  misc_feature (1)..(25): SEQ ID NO: 3387; WAN024ANO; Start 69; Stop 93
agtaaatcagcgaaactactttctt

SEQ ID NO: 354105 - DNA, 25 bp, Artificial
  probe
  misc_feature (1)..(25): SEQ ID NO: 3387; WAN024ANO; Start 34; Stop 58
taaggcatcgttaacttacctcaca

SEQ ID NO: 354106 - DNA, 25 bp, Artificial
  probe
  misc_feature (1)..(25): SEQ ID NO: 3387; WAN024ANO; Start 63; Stop 87
gtttgaagtaaatcagcgaaactac

SEQ ID NO: 354107 - DNA, 25 bp, Artificial
  probe
  misc_feature (1)..(25): SEQ ID NO: 3387; WAN024ANO; Start 60; Stop 84
caggtttgaagtaaatcagcgaaac

SEQ ID NO: 354108 - DNA, 25 bp, Artificial
  probe
  misc_feature (1)..(25): SEQ ID NO: 3387; WAN024ANO; Start 61; Stop 85
aggtttgaagtaaatcagcgaaact

SEQ ID NO: 354109 - DNA, 25 bp, Artificial
  probe
  misc_feature (1)..(25): SEQ ID NO: 3387; WAN024ANO; Start 99; Stop 123
aacactttcagaatcattgtcaata

SEQ ID NO: 354110 - DNA, 25 bp, Artificial
  probe
  misc_feature (1)..(25): SEQ ID NO: 3387; WAN024ANO; Start 98; Stop 122
taacactttcagaatcattgtcaat

SEQ ID NO: 354111 - DNA, 25 bp, Artificial
  probe
  misc_feature (1)..(25): SEQ ID NO: 3387; WAN024ANO; Start 102; Stop 126
actttcagaatcattgtcaatagaa

SEQ ID NO: 354112 - DNA, 25 bp, Artificial
  probe
  misc_feature (1)..(25): SEQ ID NO: 3387; WAN024ANO; Start 35; Stop 59
aaggcatcgttaacttacctcacaa

SEQ ID NO: 354113 - DNA, 25 bp, Artificial
  probe
  misc_feature (1)..(25): SEQ ID NO: 3387; WAN024ANO; Start 37; Stop 61
ggcatcgttaacttacctcacaaca

SEQ ID NO: 354114 - DNA, 25 bp, Artificial
  probe
  misc_feature (1)..(25): SEQ ID NO: 3387; WAN024ANO; Start 70; Stop 94
gtaaatcagcgaaactactttctta

SEQ ID NO: 354115 - DNA, 25 bp, Artificial
  probe
  misc_feature (1)..(25): SEQ ID NO: 3387; WAN024ANO; Start 71; Stop 95
taaatcagcgaaactactttcttag

SEQ ID NO: 354116 - DNA, 25 bp, Artificial
  probe
  misc_feature (1)..(25): SEQ ID NO: 3387; WAN024ANO; Start 36; Stop 60
aggcatcgttaacttacctcacaac

SEQ ID NO: 354117 - DNA, 25 bp, Artificial
  probe
  misc_feature (1)..(25): SEQ ID NO: 3387; WAN024ANO; Start 32; Stop 56
gttaaggcatcgttaacttacctca

SEQ ID NO: 354118 - DNA, 25 bp, Artificial
  probe
  misc_feature (1)..(25): SEQ ID NO: 3387; WAN024ANO; Start 31; Stop 55
ggttaaggcatcgttaacttacctc

SEQ ID NO: 354119 - DNA, 25 bp, Artificial
  probe
  misc_feature (1)..(25): SEQ ID NO: 3387; WAN024ANO; Start 66; Stop 90
tgaagtaaatcagcgaaactacttt

SEQ ID NO: 354120 - DNA, 25 bp, Artificial
  probe
  misc_feature (1)..(25): SEQ ID NO: 3387; WAN024ANO; Start 65; Stop 89
ttgaagtaaatcagcgaaactactt

SEQ ID NO: 354121 - DNA, 25 bp, Artificial
  probe
  misc_feature (1)..(25): SEQ ID NO: 3388; WAN024DYI; Start 70; Stop 94
aatcaccagaaggacagtatttcaa

SEQ ID NO: 354122 - DNA, 25 bp, Artificial
  probe
  misc_feature (1)..(25): SEQ ID NO: 3388; WAN024DYI; Start 71; Stop 95
atcaccagaaggacagtatttcaac

SEQ ID NO: 354123 - DNA, 25 bp, Artificial
  probe
  misc_feature (1)..(25): SEQ ID NO: 3388; WAN024DYI; Start 73; Stop 97
caccagaaggacagtatttcaacta

SEQ ID NO: 354124 - DNA, 25 bp, Artificial
  probe
  misc_feature (1)..(25): SEQ ID NO: 3388; WAN024DYI; Start 74; Stop 98
accagaaggacagtatttcaactag

SEQ ID NO: 354125 - DNA, 25 bp, Artificial
  probe
  misc_feature (1)..(25): SEQ ID NO: 3388; WAN024DYI; Start 69; Stop 93
aaatcaccagaaggacagtatttca

SEQ ID NO: 354126 - DNA, 25 bp, Artificial
  probe
  misc_feature (1)..(25): SEQ ID NO: 3388; WAN024DYI; Start 75; Stop 99
ccagaaggacagtatttcaactagc

SEQ ID NO: 354127 - DNA, 25 bp, Artificial
  probe
  misc_feature (1)..(25): SEQ ID NO: 3388; WAN024DYI; Start 72; Stop 96
tcaccagaaggacagtatttcaact

SEQ ID NO: 354128 - DNA, 25 bp, Artificial
  probe
  misc_feature (1)..(25): SEQ ID NO: 3388; WAN024DYI; Start 45; Stop 69
gtctcgaacatcagaaattaagcaa

SEQ ID NO: 354129 - DNA, 25 bp, Artificial
  probe
  misc_feature (1)..(25): SEQ ID NO: 3388; WAN024DYI; Start 76; Stop 100
cagaaggacagtatttcaactagct

SEQ ID NO: 354130 - DNA, 25 bp, Artificial
  probe
  misc_feature (1)..(25): SEQ ID NO: 3388; WAN024DYI; Start 46; Stop 70
tctcgaacatcagaaattaagcaaa

SEQ ID NO: 354131 - DNA, 25 bp, Artificial
  probe
  misc_feature (1)..(25): SEQ ID NO: 3388; WAN024DYI; Start 77; Stop 101
agaaggacagtatttcaactagctt

SEQ ID NO: 354132 - DNA, 25 bp, Artificial
  probe
  misc_feature (1)..(25): SEQ ID NO: 3388; WAN024DYI; Start 78; Stop 102
gaaggacagtatttcaactagcttt

SEQ ID NO: 354133 - DNA, 25 bp, Artificial
  probe
  misc_feature (1)..(25): SEQ ID NO: 3388; WAN024DYI; Start 44; Stop 68
tgtctcgaacatcagaaattaagca

SEQ ID NO: 354134 - DNA, 25 bp, Artificial
  probe
  misc_feature (1)..(25): SEQ ID NO: 3388; WAN024DYI; Start 60; Stop 84
aattaagcaaaatcaccagaaggac

SEQ ID NO: 354135 - DNA, 25 bp, Artificial
  probe
  misc_feature (1)..(25): SEQ ID NO: 3388; WAN024DYI; Start 59; Stop 83
aaattaagcaaaatcaccagaagga

SEQ ID NO: 354136 - DNA, 25 bp, Artificial
  probe
  misc_feature (1)..(25): SEQ ID NO: 3388; WAN024DYI; Start 61; Stop 85
attaagcaaaatcaccagaaggaca

SEQ ID NO: 354137 - DNA, 25 bp, Artificial
  probe
  misc_feature (1)..(25): SEQ ID NO: 3388; WAN024DYI; Start 58; Stop 82
gaaattaagcaaaatcaccagaagg

SEQ ID NO: 354138 - DNA, 25 bp, Artificial
  probe
  misc_feature (1)..(25): SEQ ID NO: 3388; WAN024DYI; Start 55; Stop 79
tcagaaattaagcaaaatcaccaga

SEQ ID NO: 354139 - DNA, 25 bp, Artificial
  probe
  misc_feature (1)..(25): SEQ ID NO: 3388; WAN024DYI; Start 66; Stop 90
gcaaaatcaccagaaggacagtatt

SEQ ID NO: 354140 - DNA, 25 bp, Artificial
  probe
  misc_feature (1)..(25): SEQ ID NO: 3388; WAN024DYI; Start 62; Stop 86
ttaagcaaaatcaccagaaggacag

SEQ ID NO: 354141 - DNA, 25 bp, Artificial
  probe
  misc_feature (1)..(25): SEQ ID NO: 3388; WAN024DYI; Start 53; Stop 77
catcagaaattaagcaaaatcacca

SEQ ID NO: 354142 - DNA, 25 bp, Artificial
  probe
  misc_feature (1)..(25): SEQ ID NO: 3388; WAN024DYI; Start 52; Stop 76
acatcagaaattaagcaaaatcacc

SEQ ID NO: 354143 - DNA, 25 bp, Artificial
  probe
  misc_feature (1)..(25): SEQ ID NO: 3388; WAN024DYI; Start 56; Stop 80
cagaaattaagcaaaatcaccagaa

SEQ ID NO: 354144 - DNA, 25 bp, Artificial
  probe
  misc_feature (1)..(25): SEQ ID NO: 3388; WAN024DYI; Start 57; Stop 81
agaaattaagcaaaatcaccagaag

SEQ ID NO: 354145 - DNA, 25 bp, Artificial
  probe
  misc_feature (1)..(25): SEQ ID NO: 3388; WAN024DYI; Start 54; Stop 78
atcagaaattaagcaaaatcaccag

SEQ ID NO: 354146 - DNA, 25 bp, Artificial
  probe
  misc_feature (1)..(25): SEQ ID NO: 3388; WAN024DYI; Start 67; Stop 91
caaaatcaccagaaggacagtattt

SEQ ID NO: 354147 - DNA, 25 bp, Artificial
  probe
  misc_feature (1)..(25): SEQ ID NO: 3388; WAN024DYI; Start 68; Stop 92
aaaatcaccagaaggacagtatttc

SEQ ID NO: 354148 - DNA, 25 bp, Artificial
  probe
  misc_feature (1)..(25): SEQ ID NO: 3388; WAN024DYI; Start 65; Stop 89
agcaaaatcaccagaaggacagtat

SEQ ID NO: 354149 - DNA, 25 bp, Artificial
  probe
  misc_feature (1)..(25): SEQ ID NO: 3388; WAN024DYI; Start 49; Stop 73
cgaacatcagaaattaagcaaaatc

SEQ ID NO: 354150 - DNA, 25 bp, Artificial
  probe
  misc_feature (1)..(25): SEQ ID NO: 3388; WAN024DYI; Start 64; Stop 88
aagcaaaatcaccagaaggacagta

SEQ ID NO: 354151 - DNA, 25 bp, Artificial
  probe
  misc_feature (1)..(25): SEQ ID NO: 3388; WAN024DYI; Start 63; Stop 87
taagcaaaatcaccagaaggacagt

SEQ ID NO: 354152 - DNA, 25 bp, Artificial
  probe
  misc_feature (1)..(25): SEQ ID NO: 3388; WAN024DYI; Start 43; Stop 67
atgtctcgaacatcagaaattaagc

SEQ ID NO: 354153 - DNA, 25 bp, Artificial
  probe
  misc_feature (1)..(25): SEQ ID NO: 3388; WAN024DYI; Start 47; Stop 71
ctcgaacatcagaaattaagcaaaa

SEQ ID NO: 354154 - DNA, 25 bp, Artificial
  probe
  misc_feature (1)..(25): SEQ ID NO: 3389; WAN024D92; Start 658; Stop 682
accatcatcattgtaacgcataata

SEQ ID NO: 354155 - DNA, 25 bp, Artificial
  probe
  misc_feature (1)..(25): SEQ ID NO: 3389; WAN024D92; Start 657; Stop 681
taccatcatcattgtaacgcataat

SEQ ID NO: 354156 - DNA, 25 bp, Artificial
  probe
  misc_feature (1)..(25): SEQ ID NO: 3389; WAN024D92; Start 263; Stop 287
ttctctatcgtggaattgatgtcaa

SEQ ID NO: 354157 - DNA, 25 bp, Artificial
  probe
  misc_feature (1)..(25): SEQ ID NO: 3389; WAN024D92; Start 11; Stop 35
gagaagccatgtcaacatataactg

SEQ ID NO: 354158 - DNA, 25 bp, Artificial
  probe
  misc_feature (1)..(25): SEQ ID NO: 3389; WAN024D92; Start 8; Stop 32
aaggagaagccatgtcaacatataa

SEQ ID NO: 354159 - DNA, 25 bp, Artificial
  probe
  misc_feature (1)..(25): SEQ ID NO: 3389; WAN024D92; Start 264; Stop 288
tctctatcgtggaattgatgtcaac

SEQ ID NO: 354160 - DNA, 25 bp, Artificial
  probe
  misc_feature (1)..(25): SEQ ID NO: 3389; WAN024D92; Start 10; Stop 34
ggagaagccatgtcaacatataact

SEQ ID NO: 354161 - DNA, 25 bp, Artificial
  probe
  misc_feature (1)..(25): SEQ ID NO: 3389; WAN024D92; Start 9; Stop 33
aggagaagccatgtcaacatataac

SEQ ID NO: 354162 - DNA, 25 bp, Artificial
  probe
  misc_feature (1)..(25): SEQ ID NO: 3389; WAN024D92; Start 659; Stop 683
ccatcatcattgtaacgcataatat

SEQ ID NO: 354163 - DNA, 25 bp, Artificial
  probe
  misc_feature (1)..(25): SEQ ID NO: 3389; WAN024D92; Start 265; Stop 289
ctctatcgtggaattgatgtcaacc

SEQ ID NO: 354164 - DNA, 25 bp, Artificial
  probe
  misc_feature (1)..(25): SEQ ID NO: 3389; WAN024D92; Start 262; Stop 286
attctctatcgtggaattgatgtca

SEQ ID NO: 354165 - DNA, 25 bp, Artificial
  probe
  misc_feature (1)..(25): SEQ ID NO: 3389; WAN024D92; Start 260; Stop 284
agattctctatcgtggaattgatgt

SEQ ID NO: 354166 - DNA, 25 bp, Artificial
  probe
  misc_feature (1)..(25): SEQ ID NO: 3389; WAN024D92; Start 656; Stop 680
ttaccatcatcattgtaacgcataa

SEQ ID NO: 354167 - DNA, 25 bp, Artificial
  probe
  misc_feature (1)..(25): SEQ ID NO: 3389; WAN024D92; Start 261; Stop 285
gattctctatcgtggaattgatgtc

SEQ ID NO: 354168 - DNA, 25 bp, Artificial
  probe
  misc_feature (1)..(25): SEQ ID NO: 3389; WAN024D92; Start 259; Stop 283
cagattctctatcgtggaattgatg

SEQ ID NO: 354169 - DNA, 25 bp, Artificial
  probe
  misc_feature (1)..(25): SEQ ID NO: 3389; WAN024D92; Start 258; Stop 282
gcagattctctatcgtggaattgat

SEQ ID NO: 354170 - DNA, 25 bp, Artificial
  probe
  misc_feature (1)..(25): SEQ ID NO: 3389; WAN024D92; Start 726; Stop 750
cttgggtgatttgattgagtatgac

SEQ ID NO: 354171 - DNA, 25 bp, Artificial
  probe
  misc_feature (1)..(25): SEQ ID NO: 3389; WAN024D92; Start 727; Stop 751
ttgggtgatttgattgagtatgaca

SEQ ID NO: 354172 - DNA, 25 bp, Artificial
  probe
  misc_feature (1)..(25): SEQ ID NO: 3389; WAN024D92; Start 797; Stop 821
actatgtatctggtcactttggtta

SEQ ID NO: 354173 - DNA, 25 bp, Artificial
  probe
  misc_feature (1)..(25): SEQ ID NO: 3389; WAN024D92; Start 425; Stop 449
tagatgaaatcgtagaaacctccct

SEQ ID NO: 354174 - DNA, 25 bp, Artificial
  probe
  misc_feature (1)..(25): SEQ ID NO: 3389; WAN024D92; Start 235; Stop 259
attgatattgctaaagtaactgggc

SEQ ID NO: 354175 - DNA, 25 bp, Artificial
  probe
  misc_feature (1)..(25): SEQ ID NO: 3389; WAN024D92; Start 38; Stop 62
atgagaagcatatccttacctttcc

SEQ ID NO: 354176 - DNA, 25 bp, Artificial
  probe
  misc_feature (1)..(25): SEQ ID NO: 3389; WAN024D92; Start 43; Stop 67
aagcatatccttacctttcctgaag

SEQ ID NO: 354177 - DNA, 25 bp, Artificial
  probe
  misc_feature (1)..(25): SEQ ID NO: 3389; WAN024D92; Start 42; Stop 66
gaagcatatccttacctttcctgaa

SEQ ID NO: 354178 - DNA, 25 bp, Artificial
  probe
  misc_feature (1)..(25): SEQ ID NO: 3389; WAN024D92; Start 24; Stop 48
aacatataactgggatgagaagcat

SEQ ID NO: 354179 - DNA, 25 bp, Artificial
  probe
  misc_feature (1)..(25): SEQ ID NO: 3389; WAN024D92; Start 23; Stop 47
caacatataactgggatgagaagca

SEQ ID NO: 354180 - DNA, 25 bp, Artificial
  probe
  misc_feature (1)..(25): SEQ ID NO: 3389; WAN024D92; Start 40; Stop 64
gagaagcatatccttacctttcctg

SEQ ID NO: 354181 - DNA, 25 bp, Artificial
  probe
  misc_feature (1)..(25): SEQ ID NO: 3389; WAN024D92; Start 741; Stop 765
tgagtatgacaagactgcaactatt

SEQ ID NO: 354182 - DNA, 25 bp, Artificial
  probe
  misc_feature (1)..(25): SEQ ID NO: 3389; WAN024D92; Start 740; Stop 764
ttgagtatgacaagactgcaactat

SEQ ID NO: 354183 - DNA, 25 bp, Artificial
  probe
  misc_feature (1)..(25): SEQ ID NO: 3389; WAN024D92; Start 739; Stop 763
attgagtatgacaagactgcaacta

SEQ ID NO: 354184 - DNA, 25 bp, Artificial
  probe
  misc_feature (1)..(25): SEQ ID NO: 3389; WAN024D92; Start 41; Stop 65
agaagcatatccttacctttcctga

SEQ ID NO: 354185 - DNA, 25 bp, Artificial
  probe
  misc_feature (1)..(25): SEQ ID NO: 3389; WAN024D92; Start 39; Stop 63
tgagaagcatatccttacctttcct

SEQ ID NO: 354186 - DNA, 25 bp, Artificial
  probe
  misc_feature (1)..(25): SEQ ID NO: 3389; WAN024D92; Start 25; Stop 49
acatataactgggatgagaagcata

SEQ ID NO: 354187 - DNA, 25 bp, Artificial
  probe
  misc_feature (1)..(25): SEQ ID NO: 3390; WAN024DPW; Start 79; Stop 103
ataggtatgtctgatctgatagcca

SEQ ID NO: 354188 - DNA, 25 bp, Artificial
  probe
  misc_feature (1)..(25): SEQ ID NO: 3390; WAN024DPW; Start 69; Stop 93
aagcggaagaataggtatgtctgat

SEQ ID NO: 354189 - DNA, 25 bp, Artificial
  probe
  misc_feature (1)..(25): SEQ ID NO: 3390; WAN024DPW; Start 66; Stop 90
aagaagcggaagaataggtatgtct

SEQ ID NO: 354190 - DNA, 25 bp, Artificial
  probe
  misc_feature (1)..(25): SEQ ID NO: 3390; WAN024DPW; Start 78; Stop 102
aataggtatgtctgatctgatagcc

SEQ ID NO: 354191 - DNA, 25 bp, Artificial
  probe
  misc_feature (1)..(25): SEQ ID NO: 3390; WAN024DPW; Start 72; Stop 96
cggaagaataggtatgtctgatctg

SEQ ID NO: 354192 - DNA, 25 bp, Artificial
  probe
  misc_feature (1)..(25): SEQ ID NO: 3390; WAN024DPW; Start 73; Stop 97
ggaagaataggtatgtctgatctga

SEQ ID NO: 354193 - DNA, 25 bp, Artificial
  probe
  misc_feature (1)..(25): SEQ ID NO: 3390; WAN024DPW; Start 68; Stop 92
gaagcggaagaataggtatgtctga

SEQ ID NO: 354194 - DNA, 25 bp, Artificial
  probe
  misc_feature (1)..(25): SEQ ID NO: 3390; WAN024DPW; Start 67; Stop 91
agaagcggaagaataggtatgtctg

SEQ ID NO: 354195 - DNA, 25 bp, Artificial
  probe
  misc_feature (1)..(25): SEQ ID NO: 3390; WAN024DPW; Start 42; Stop 66
gcttcttcctgctcttataactgaa

SEQ ID NO: 354196 - DNA, 25 bp, Artificial
  probe
  misc_feature (1)..(25): SEQ ID NO: 3390; WAN024DPW; Start 77; Stop 101
gaataggtatgtctgatctgatagc

SEQ ID NO: 354197 - DNA, 25 bp, Artificial
  probe
  misc_feature (1)..(25): SEQ ID NO: 3390; WAN024DPW; Start 80; Stop 104
taggtatgtctgatctgatagccag

SEQ ID NO: 354198 - DNA, 25 bp, Artificial
  probe
  misc_feature (1)..(25): SEQ ID NO: 3390; WAN024DPW; Start 71; Stop 95
gcggaagaataggtatgtctgatct

SEQ ID NO: 354199 - DNA, 25 bp, Artificial
  probe
  misc_feature (1)..(25): SEQ ID NO: 3390; WAN024DPW; Start 70; Stop 94
agcggaagaataggtatgtctgatc

SEQ ID NO: 354200 - DNA, 25 bp, Artificial
  probe
  misc_feature (1)..(25): SEQ ID NO: 3390; WAN024DPW; Start 25; Stop 49
acagaggaatactatgagcttcttc

SEQ ID NO: 354201 - DNA, 25 bp, Artificial
  probe
  misc_feature (1)..(25): SEQ ID NO: 3390; WAN024DPW; Start 24; Stop 48
aacagaggaatactatgagcttctt

SEQ ID NO: 354202 - DNA, 25 bp, Artificial
  probe
  misc_feature (1)..(25): SEQ ID NO: 3390; WAN024DPW; Start 84; Stop 108
tatgtctgatctgatagccagcatt

SEQ ID NO: 354203 - DNA, 25 bp, Artificial
  probe
  misc_feature (1)..(25): SEQ ID NO: 3390; WAN024DPW; Start 62; Stop 86
ctgaaagaagcggaagaataggtat

SEQ ID NO: 354204 - DNA, 25 bp, Artificial
  probe
  misc_feature (1)..(25): SEQ ID NO: 3390; WAN024DPW; Start 65; Stop 89
aaagaagcggaagaataggtatgtc

SEQ ID NO: 354205 - DNA, 25 bp, Artificial
  probe
  misc_feature (1)..(25): SEQ ID NO: 3390; WAN024DPW; Start 64; Stop 88
gaaagaagcggaagaataggtatgt

SEQ ID NO: 354206 - DNA, 25 bp, Artificial
  probe
  misc_feature (1)..(25): SEQ ID NO: 3390; WAN024DPW; Start 63; Stop 87
tgaaagaagcggaagaataggtatg

SEQ ID NO: 354207 - DNA, 25 bp, Artificial
  probe
  misc_feature (1)..(25): SEQ ID NO: 3390; WAN024DPW; Start 59; Stop 83
taactgaaagaagcggaagaatagg

SEQ ID NO: 354208 - DNA, 25 bp, Artificial
  probe
  misc_feature (1)..(25): SEQ ID NO: 3390; WAN024DPW; Start 19; Stop 43
gaagaaacagaggaatactatgagc

SEQ ID NO: 354209 - DNA, 25 bp, Artificial
  probe
  misc_feature (1)..(25): SEQ ID NO: 3390; WAN024DPW; Start 58; Stop 82
ataactgaaagaagcggaagaatag

SEQ ID NO: 354210 - DNA, 25 bp, Artificial
  probe
  misc_feature (1)..(25): SEQ ID NO: 3390; WAN024DPW; Start 74; Stop 98
gaagaataggtatgtctgatctgat

SEQ ID NO: 354211 - DNA, 25 bp, Artificial
  probe
  misc_feature (1)..(25): SEQ ID NO: 3390; WAN024DPW; Start 83; Stop 107
gtatgtctgatctgatagccagcat

SEQ ID NO: 354212 - DNA, 25 bp, Artificial
  probe
  misc_feature (1)..(25): SEQ ID NO: 3390; WAN024DPW; Start 61; Stop 85
actgaaagaagcggaagaataggta

SEQ ID NO: 354213 - DNA, 25 bp, Artificial
  probe
  misc_feature (1)..(25): SEQ ID NO: 3390; WAN024DPW; Start 60; Stop 84
aactgaaagaagcggaagaataggt

SEQ ID NO: 354214 - DNA, 25 bp, Artificial
  probe
  misc_feature (1)..(25): SEQ ID NO: 3390; WAN024DPW; Start 57; Stop 81
tataactgaaagaagcggaagaata

SEQ ID NO: 354215 - DNA, 25 bp, Artificial
  probe
  misc_feature (1)..(25): SEQ ID NO: 3390; WAN024DPW; Start 85; Stop 109
atgtctgatctgatagccagcattg

SEQ ID NO: 354216 - DNA, 25 bp, Artificial
  probe
  misc_feature (1)..(25): SEQ ID NO: 3390; WAN024DPW; Start 55; Stop 79
cttataactgaaagaagcggaagaa

SEQ ID NO: 354217 - DNA, 25 bp, Artificial
  probe
  misc_feature (1)..(25): SEQ ID NO: 3390; WAN024DPW; Start 18; Stop 42
agaagaaacagaggaatactatgag

SEQ ID NO: 354218 - DNA, 25 bp, Artificial
  probe
  misc_feature (1)..(25): SEQ ID NO: 3390; WAN024DPW; Start 56; Stop 80
ttataactgaaagaagcggaagaat

SEQ ID NO: 354219 - DNA, 25 bp, Artificial
  probe
  misc_feature (1)..(25): SEQ ID NO: 3390; WAN024DPW; Start 89; Stop 113
ctgatctgatagccagcattgtgaa

SEQ ID NO: 354220 - DNA, 25 bp, Artificial
  probe
  misc_feature (1)..(25): SEQ ID NO: 3391; WAN024CM4; Start 92; Stop 116
ctattgaacacctcacaagactctt

SEQ ID NO: 354221 - DNA, 25 bp, Artificial
  probe
  misc_feature (1)..(25): SEQ ID NO: 3391; WAN024CM4; Start 91; Stop 115
gctattgaacacctcacaagactct

SEQ ID NO: 354222 - DNA, 25 bp, Artificial
  probe
  misc_feature (1)..(25): SEQ ID NO: 3391; WAN024CM4; Start 85; Stop 109
ttgactgctattgaacacctcacaa

SEQ ID NO: 354223 - DNA, 25 bp, Artificial
  probe
  misc_feature (1)..(25): SEQ ID NO: 3391; WAN024CM4; Start 90; Stop 114
tgctattgaacacctcacaagactc

SEQ ID NO: 354224 - DNA, 25 bp, Artificial
  probe
  misc_feature (1)..(25): SEQ ID NO: 3391; WAN024CM4; Start 89; Stop 113
ctgctattgaacacctcacaagact

SEQ ID NO: 354225 - DNA, 25 bp, Artificial
  probe
  misc_feature (1)..(25): SEQ ID NO: 3391; WAN024CM4; Start 87; Stop 111
gactgctattgaacacctcacaaga

SEQ ID NO: 354226 - DNA, 25 bp, Artificial
  probe
  misc_feature (1)..(25): SEQ ID NO: 3391; WAN024CM4; Start 88; Stop 112
actgctattgaacacctcacaagac

SEQ ID NO: 354227 - DNA, 25 bp, Artificial
  probe
  misc_feature (1)..(25): SEQ ID NO: 3391; WAN024CM4; Start 86; Stop 110
tgactgctattgaacacctcacaag

SEQ ID NO: 354228 - DNA, 25 bp, Artificial
  probe
  misc_feature (1)..(25): SEQ ID NO: 3391; WAN024CM4; Start 73; Stop 97
gctaaatccatgttgactgctattg

SEQ ID NO: 354229 - DNA, 25 bp, Artificial
  probe
  misc_feature (1)..(25): SEQ ID NO: 3391; WAN024CM4; Start 93; Stop 117
tattgaacacctcacaagactcttt

SEQ ID NO: 354230 - DNA, 25 bp, Artificial
  probe
  misc_feature (1)..(25): SEQ ID NO: 3391; WAN024CM4; Start 74; Stop 98
ctaaatccatgttgactgctattga

SEQ ID NO: 354231 - DNA, 25 bp, Artificial
  probe
  misc_feature (1)..(25): SEQ ID NO: 3391; WAN024CM4; Start 76; Stop 100
aaatccatgttgactgctattgaac

SEQ ID NO: 354232 - DNA, 25 bp, Artificial
  probe
  misc_feature (1)..(25): SEQ ID NO: 3391; WAN024CM4; Start 84; Stop 108
gttgactgctattgaacacctcaca

SEQ ID NO: 354233 - DNA, 25 bp, Artificial
  probe
  misc_feature (1)..(25): SEQ ID NO: 3391; WAN024CM4; Start 75; Stop 99
taaatccatgttgactgctattgaa

SEQ ID NO: 354234 - DNA, 25 bp, Artificial
  probe
  misc_feature (1)..(25): SEQ ID NO: 3391; WAN024CM4; Start 94; Stop 118
attgaacacctcacaagactctttc

SEQ ID NO: 354235 - DNA, 25 bp, Artificial
  probe
  misc_feature (1)..(25): SEQ ID NO: 3391; WAN024CM4; Start 98; Stop 122
aacacctcacaagactctttccaaa

SEQ ID NO: 354236 - DNA, 25 bp, Artificial
  probe
  misc_feature (1)..(25): SEQ ID NO: 3391; WAN024CM4; Start 77; Stop 101
aatccatgttgactgctattgaaca

SEQ ID NO: 354237 - DNA, 25 bp, Artificial
  probe
  misc_feature (1)..(25): SEQ ID NO: 3391; WAN024CM4; Start 78; Stop 102
atccatgttgactgctattgaacac

SEQ ID NO: 354238 - DNA, 25 bp, Artificial
  probe
  misc_feature (1)..(25): SEQ ID NO: 3391; WAN024CM4; Start 97; Stop 121
gaacacctcacaagactctttccaa

SEQ ID NO: 354239 - DNA, 25 bp, Artificial
  probe
  misc_feature (1)..(25): SEQ ID NO: 3391; WAN024CM4; Start 95; Stop 119
ttgaacacctcacaagactctttcc

SEQ ID NO: 354240 - DNA, 25 bp, Artificial
  probe
  misc_feature (1)..(25): SEQ ID NO: 3391; WAN024CM4; Start 81; Stop 105
catgttgactgctattgaacacctc

SEQ ID NO: 354241 - DNA, 25 bp, Artificial
  probe
  misc_feature (1)..(25): SEQ ID NO: 3391; WAN024CM4; Start 82; Stop 106
atgttgactgctattgaacacctca

SEQ ID NO: 354242 - DNA, 25 bp, Artificial
  probe
  misc_feature (1)..(25): SEQ ID NO: 3391; WAN024CM4; Start 40; Stop 64
attatttctactagcacttgtcaag

SEQ ID NO: 354243 - DNA, 25 bp, Artificial
  probe
  misc_feature (1)..(25): SEQ ID NO: 3391; WAN024CM4; Start 72; Stop 96
agctaaatccatgttgactgctatt

SEQ ID NO: 354244 - DNA, 25 bp, Artificial
  probe
  misc_feature (1)..(25): SEQ ID NO: 3391; WAN024CM4; Start 71; Stop 95
cagctaaatccatgttgactgctat

SEQ ID NO: 354245 - DNA, 25 bp, Artificial
  probe
  misc_feature (1)..(25): SEQ ID NO: 3391; WAN024CM4; Start 38; Stop 62
ctattatttctactagcacttgtca

SEQ ID NO: 354246 - DNA, 25 bp, Artificial
  probe
  misc_feature (1)..(25): SEQ ID NO: 3391; WAN024CM4; Start 96; Stop 120
tgaacacctcacaagactctttcca

SEQ ID NO: 354247 - DNA, 25 bp, Artificial
  probe
  misc_feature (1)..(25): SEQ ID NO: 3391; WAN024CM4; Start 37; Stop 61
tctattatttctactagcacttgtc

SEQ ID NO: 354248 - DNA, 25 bp, Artificial
  probe
  misc_feature (1)..(25): SEQ ID NO: 3391; WAN024CM4; Start 83; Stop 107
tgttgactgctattgaacacctcac

SEQ ID NO: 354249 - DNA, 25 bp, Artificial
  probe
  misc_feature (1)..(25): SEQ ID NO: 3391; WAN024CM4; Start 80; Stop 104
ccatgttgactgctattgaacacct

SEQ ID NO: 354250 - DNA, 25 bp, Artificial
  probe
  misc_feature (1)..(25): SEQ ID NO: 3391; WAN024CM4; Start 79; Stop 103
tccatgttgactgctattgaacacc

SEQ ID NO: 354251 - DNA, 25 bp, Artificial
  probe
  misc_feature (1)..(25): SEQ ID NO: 3391; WAN024CM4; Start 70; Stop 94
acagctaaatccatgttgactgcta

SEQ ID NO: 354252 - DNA, 25 bp, Artificial
  probe
  misc_feature (1)..(25): SEQ ID NO: 3391; WAN024CM4; Start 39; Stop 63
tattatttctactagcacttgtcaa

SEQ ID NO: 354253 - DNA, 25 bp, Artificial
  probe
  misc_feature (1)..(25): SEQ ID NO: 3392; WAN024BD9; Start 7; Stop 31
cttttatggtggttgatactcttcg

SEQ ID NO: 354254 - DNA, 25 bp, Artificial
  probe
  misc_feature (1)..(25): SEQ ID NO: 3392; WAN024BD9; Start 4; Stop 28
cctcttttatggtggttgatactct

SEQ ID NO: 354255 - DNA, 25 bp, Artificial
  probe
  misc_feature (1)..(25): SEQ ID NO: 3392; WAN024BD9; Start 118; Stop 142
attgagtatgaaatgagaagacaaa

SEQ ID NO: 354256 - DNA, 25 bp, Artificial
  probe
  misc_feature (1)..(25): SEQ ID NO: 3392; WAN024BD9; Start 3; Stop 27
gcctcttttatggtggttgatactc

SEQ ID NO: 354257 - DNA, 25 bp, Artificial
  probe
  misc_feature (1)..(25): SEQ ID NO: 3392; WAN024BD9; Start 6; Stop 30
tcttttatggtggttgatactcttc

SEQ ID NO: 354258 - DNA, 25 bp, Artificial
  probe
  misc_feature (1)..(25): SEQ ID NO: 3392; WAN024BD9; Start 5; Stop 29
ctcttttatggtggttgatactctt

SEQ ID NO: 354259 - DNA, 25 bp, Artificial
  probe
  misc_feature (1)..(25): SEQ ID NO: 3392; WAN024BD9; Start 1; Stop 25
ctgcctcttttatggtggttgatac

SEQ ID NO: 354260 - DNA, 25 bp, Artificial
  probe
  misc_feature (1)..(25): SEQ ID NO: 3392; WAN024BD9; Start 2; Stop 26
tgcctcttttatggtggttgatact

SEQ ID NO: 354261 - DNA, 25 bp, Artificial
  probe
  misc_feature (1)..(25): SEQ ID NO: 3392; WAN024BD9; Start 34; Stop 58
aatcaaattcaaactgcgtcagctt

SEQ ID NO: 354262 - DNA, 25 bp, Artificial
  probe
  misc_feature (1)..(25): SEQ ID NO: 3392; WAN024BD9; Start 33; Stop 57
aaatcaaattcaaactgcgtcagct

SEQ ID NO: 354263 - DNA, 25 bp, Artificial
  probe
  misc_feature (1)..(25): SEQ ID NO: 3392; WAN024BD9; Start 30; Stop 54
cgaaaatcaaattcaaactgcgtca

SEQ ID NO: 354264 - DNA, 25 bp, Artificial
  probe
  misc_feature (1)..(25): SEQ ID NO: 3392; WAN024BD9; Start 31; Stop 55
gaaaatcaaattcaaactgcgtcag

SEQ ID NO: 354265 - DNA, 25 bp, Artificial
  probe
  misc_feature (1)..(25): SEQ ID NO: 3392; WAN024BD9; Start 117; Stop 141
cattgagtatgaaatgagaagacaa

SEQ ID NO: 354266 - DNA, 25 bp, Artificial
  probe
  misc_feature (1)..(25): SEQ ID NO: 3392; WAN024BD9; Start 35; Stop 59
atcaaattcaaactgcgtcagcttc

SEQ ID NO: 354267 - DNA, 25 bp, Artificial
  probe
  misc_feature (1)..(25): SEQ ID NO: 3392; WAN024BD9; Start 8; Stop 32
ttttatggtggttgatactcttcga

SEQ ID NO: 354268 - DNA, 25 bp, Artificial
  probe
  misc_feature (1)..(25): SEQ ID NO: 3392; WAN024BD9; Start 32; Stop 56
aaaatcaaattcaaactgcgtcagc

SEQ ID NO: 354269 - DNA, 25 bp, Artificial
  probe
  misc_feature (1)..(25): SEQ ID NO: 3392; WAN024BD9; Start 10; Stop 34
ttatggtggttgatactcttcgaaa

SEQ ID NO: 354270 - DNA, 25 bp, Artificial
  probe
  misc_feature (1)..(25): SEQ ID NO: 3392; WAN024BD9; Start 9; Stop 33
tttatggtggttgatactcttcgaa

SEQ ID NO: 354271 - DNA, 25 bp, Artificial
  probe
  misc_feature (1)..(25): SEQ ID NO: 3392; WAN024BD9; Start 29; Stop 53
tcgaaaatcaaattcaaactgcgtc

SEQ ID NO: 354272 - DNA, 25 bp, Artificial
  probe
  misc_feature (1)..(25): SEQ ID NO: 3392; WAN024BD9; Start 119; Stop 143
ttgagtatgaaatgagaagacaaaa

SEQ ID NO: 354273 - DNA, 25 bp, Artificial
  probe
  misc_feature (1)..(25): SEQ ID NO: 3392; WAN024BD9; Start 37; Stop 61
caaattcaaactgcgtcagcttcac

SEQ ID NO: 354274 - DNA, 25 bp, Artificial
  probe
  misc_feature (1)..(25): SEQ ID NO: 3392; WAN024BD9; Start 36; Stop 60
tcaaattcaaactgcgtcagcttca

SEQ ID NO: 354275 - DNA, 25 bp, Artificial
  probe
  misc_feature (1)..(25): SEQ ID NO: 3392; WAN024BD9; Start 11; Stop 35
tatggtggttgatactcttcgaaaa

SEQ ID NO: 354276 - DNA, 25 bp, Artificial
  probe
  misc_feature (1)..(25): SEQ ID NO: 3392; WAN024BD9; Start 12; Stop 36
atggtggttgatactcttcgaaaat

SEQ ID NO: 354277 - DNA, 25 bp, Artificial
  probe
  misc_feature (1)..(25): SEQ ID NO: 3392; WAN024BD9; Start 27; Stop 51
cttcgaaaatcaaattcaaactgcg

SEQ ID NO: 354278 - DNA, 25 bp, Artificial
  probe
  misc_feature (1)..(25): SEQ ID NO: 3392; WAN024BD9; Start 26; Stop 50
tcttcgaaaatcaaattcaaactgc

SEQ ID NO: 354279 - DNA, 25 bp, Artificial
  probe
  misc_feature (1)..(25): SEQ ID NO: 3392; WAN024BD9; Start 13; Stop 37
tggtggttgatactcttcgaaaatc

SEQ ID NO: 354280 - DNA, 25 bp, Artificial
  probe
  misc_feature (1)..(25): SEQ ID NO: 3392; WAN024BD9; Start 38; Stop 62
aaattcaaactgcgtcagcttcacc

SEQ ID NO: 354281 - DNA, 25 bp, Artificial
  probe
  misc_feature (1)..(25): SEQ ID NO: 3392; WAN024BD9; Start 28; Stop 52
ttcgaaaatcaaattcaaactgcgt

SEQ ID NO: 354282 - DNA, 25 bp, Artificial
  probe
  misc_feature (1)..(25): SEQ ID NO: 3392; WAN024BD9; Start 57; Stop 81
ttcaccttgccgtactcaagtacag

SEQ ID NO: 354283 - DNA, 25 bp, Artificial
  probe
  misc_feature (1)..(25): SEQ ID NO: 3392; WAN024BD9; Start 56; Stop 80
cttcaccttgccgtactcaagtaca

SEQ ID NO: 354284 - DNA, 25 bp, Artificial
  probe
  misc_feature (1)..(25): SEQ ID NO: 3392; WAN024BD9; Start 116; Stop 140
tcattgagtatgaaatgagaagaca

SEQ ID NO: 354285 - DNA, 25 bp, Artificial
  probe
  misc_feature (1)..(25): SEQ ID NO: 3392; WAN024BD9; Start 24; Stop 48
actcttcgaaaatcaaattcaaact

SEQ ID NO: 354286 - DNA, 25 bp, Artificial
  probe
  misc_feature (1)..(25): SEQ ID NO: 3393; WAN024BGM; Start 350; Stop 374
ctgaggacacggtaatgattgatag

SEQ ID NO: 354287 - DNA, 25 bp, Artificial
  probe
  misc_feature (1)..(25): SEQ ID NO: 3393; WAN024BGM; Start 349; Stop 373
tctgaggacacggtaatgattgata

SEQ ID NO: 354288 - DNA, 25 bp, Artificial
  probe
  misc_feature (1)..(25): SEQ ID NO: 3393; WAN024BGM; Start 202; Stop 226
actcttcaatatgtgcgagaatacc

SEQ ID NO: 354289 - DNA, 25 bp, Artificial
  probe
  misc_feature (1)..(25): SEQ ID NO: 3393; WAN024BGM; Start 201; Stop 225
cactcttcaatatgtgcgagaatac

SEQ ID NO: 354290 - DNA, 25 bp, Artificial
  probe
  misc_feature (1)..(25): SEQ ID NO: 3393; WAN024BGM; Start 203; Stop 227
ctcttcaatatgtgcgagaataccg

SEQ ID NO: 354291 - DNA, 25 bp, Artificial
  probe
  misc_feature (1)..(25): SEQ ID NO: 3393; WAN024BGM; Start 351; Stop 375
tgaggacacggtaatgattgatagc

SEQ ID NO: 354292 - DNA, 25 bp, Artificial
  probe
  misc_feature (1)..(25): SEQ ID NO: 3393; WAN024BGM; Start 372; Stop 396
tagccattcccatcaatatcgtatc

SEQ ID NO: 354293 - DNA, 25 bp, Artificial
  probe
  misc_feature (1)..(25): SEQ ID NO: 3393; WAN024BGM; Start 371; Stop 395
atagccattcccatcaatatcgtat

SEQ ID NO: 354294 - DNA, 25 bp, Artificial
  probe
  misc_feature (1)..(25): SEQ ID NO: 3393; WAN024BGM; Start 354; Stop 378
ggacacggtaatgattgatagccat

SEQ ID NO: 354295 - DNA, 25 bp, Artificial
  probe
  misc_feature (1)..(25): SEQ ID NO: 3393; WAN024BGM; Start 374; Stop 398
gccattcccatcaatatcgtatctt

SEQ ID NO: 354296 - DNA, 25 bp, Artificial
  probe
  misc_feature (1)..(25): SEQ ID NO: 3393; WAN024BGM; Start 352; Stop 376
gaggacacggtaatgattgatagcc

SEQ ID NO: 354297 - DNA, 25 bp, Artificial
  probe
  misc_feature (1)..(25): SEQ ID NO: 3393; WAN024BGM; Start 375; Stop 399
ccattcccatcaatatcgtatcttt

SEQ ID NO: 354298 - DNA, 25 bp, Artificial
  probe
  misc_feature (1)..(25): SEQ ID NO: 3393; WAN024BGM; Start 373; Stop 397
agccattcccatcaatatcgtatct

SEQ ID NO: 354299 - DNA, 25 bp, Artificial
  probe
  misc_feature (1)..(25): SEQ ID NO: 3393; WAN024BGM; Start 356; Stop 380
acacggtaatgattgatagccattc

SEQ ID NO: 354300 - DNA, 25 bp, Artificial
  probe
  misc_feature (1)..(25): SEQ ID NO: 3393; WAN024BGM; Start 355; Stop 379
gacacggtaatgattgatagccatt

SEQ ID NO: 354301 - DNA, 25 bp, Artificial
  probe
  misc_feature (1)..(25): SEQ ID NO: 3393; WAN024BGM; Start 370; Stop 394
gatagccattcccatcaatatcgta

SEQ ID NO: 354302 - DNA, 25 bp, Artificial
  probe
  misc_feature (1)..(25): SEQ ID NO: 3393; WAN024BGM; Start 357; Stop 381
cacggtaatgattgatagccattcc

SEQ ID NO: 354303 - DNA, 25 bp, Artificial
  probe
  misc_feature (1)..(25): SEQ ID NO: 3393; WAN024BGM; Start 353; Stop 377
aggacacggtaatgattgatagcca

SEQ ID NO: 354304 - DNA, 25 bp, Artificial
  probe
  misc_feature (1)..(25): SEQ ID NO: 3393; WAN024BGM; Start 376; Stop 400
cattcccatcaatatcgtatctttg

SEQ ID NO: 354305 - DNA, 25 bp, Artificial
  probe
  misc_feature (1)..(25): SEQ ID NO: 3393; WAN024BGM; Start 378; Stop 402
ttcccatcaatatcgtatctttgga

SEQ ID NO: 354306 - DNA, 25 bp, Artificial
  probe
  misc_feature (1)..(25): SEQ ID NO: 3393; WAN024BGM; Start 37; Stop 61
tatgaagcaagtaaacaactaactg

SEQ ID NO: 354307 - DNA, 25 bp, Artificial
  probe
  misc_feature (1)..(25): SEQ ID NO: 3393; WAN024BGM; Start 377; Stop 401
attcccatcaatatcgtatctttgg

SEQ ID NO: 354308 - DNA, 25 bp, Artificial
  probe
  misc_feature (1)..(25): SEQ ID NO: 3393; WAN024BGM; Start 361; Stop 385
gtaatgattgatagccattcccatc

SEQ ID NO: 354309 - DNA, 25 bp, Artificial
  probe
  misc_feature (1)..(25): SEQ ID NO: 3393; WAN024BGM; Start 360; Stop 384
ggtaatgattgatagccattcccat

SEQ ID NO: 354310 - DNA, 25 bp, Artificial
  probe
  misc_feature (1)..(25): SEQ ID NO: 3393; WAN024BGM; Start 25; Stop 49
agttctatgaattatgaagcaagta

SEQ ID NO: 354311 - DNA, 25 bp, Artificial
  probe
  misc_feature (1)..(25): SEQ ID NO: 3393; WAN024BGM; Start 24; Stop 48
tagttctatgaattatgaagcaagt

SEQ ID NO: 354312 - DNA, 25 bp, Artificial
  probe
  misc_feature (1)..(25): SEQ ID NO: 3393; WAN024BGM; Start 362; Stop 386
taatgattgatagccattcccatca

SEQ ID NO: 354313 - DNA, 25 bp, Artificial
  probe
  misc_feature (1)..(25): SEQ ID NO: 3393; WAN024BGM; Start 31; Stop 55
atgaattatgaagcaagtaaacaac

SEQ ID NO: 354314 - DNA, 25 bp, Artificial
  probe
  misc_feature (1)..(25): SEQ ID NO: 3393; WAN024BGM; Start 36; Stop 60
ttatgaagcaagtaaacaactaact

SEQ ID NO: 354315 - DNA, 25 bp, Artificial
  probe
  misc_feature (1)..(25): SEQ ID NO: 3393; WAN024BGM; Start 26; Stop 50
gttctatgaattatgaagcaagtaa

SEQ ID NO: 354316 - DNA, 25 bp, Artificial
  probe
  misc_feature (1)..(25): SEQ ID NO: 3393; WAN024BGM; Start 369; Stop 393
tgatagccattcccatcaatatcgt

SEQ ID NO: 354317 - DNA, 25 bp, Artificial
  probe
  misc_feature (1)..(25): SEQ ID NO: 3393; WAN024BGM; Start 359; Stop 383
cggtaatgattgatagccattccca

SEQ ID NO: 354318 - DNA, 25 bp, Artificial
  probe
  misc_feature (1)..(25): SEQ ID NO: 3393; WAN024BGM; Start 358; Stop 382
acggtaatgattgatagccattccc

SEQ ID NO: 354319 - DNA, 25 bp, Artificial
  probe
  misc_feature (1)..(25): SEQ ID NO: 3394; WAN024EZS; Start 137; Stop 161
caatggctggtggagaatatgtatc

SEQ ID NO: 354320 - DNA, 25 bp, Artificial
  probe
  misc_feature (1)..(25): SEQ ID NO: 3394; WAN024EZS; Start 136; Stop 160
tcaatggctggtggagaatatgtat

SEQ ID NO: 354321 - DNA, 25 bp, Artificial
  probe
  misc_feature (1)..(25): SEQ ID NO: 3394; WAN024EZS; Start 566; Stop 590
ctatgattcggaaccttgctattgg

SEQ ID NO: 354322 - DNA, 25 bp, Artificial
  probe
  misc_feature (1)..(25): SEQ ID NO: 3394; WAN024EZS; Start 135; Stop 159
ttcaatggctggtggagaatatgta

SEQ ID NO: 354323 - DNA, 25 bp, Artificial
  probe
  misc_feature (1)..(25): SEQ ID NO: 3394; WAN024EZS; Start 565; Stop 589
gctatgattcggaaccttgctattg

SEQ ID NO: 354324 - DNA, 25 bp, Artificial
  probe
  misc_feature (1)..(25): SEQ ID NO: 3394; WAN024EZS; Start 150; Stop 174
agaatatgtatccgtttcaactcca

SEQ ID NO: 354325 - DNA, 25 bp, Artificial
  probe
  misc_feature (1)..(25): SEQ ID NO: 3394; WAN024EZS; Start 151; Stop 175
gaatatgtatccgtttcaactccaa

SEQ ID NO: 354326 - DNA, 25 bp, Artificial
  probe
  misc_feature (1)..(25): SEQ ID NO: 3394; WAN024EZS; Start 152; Stop 176
aatatgtatccgtttcaactccaaa

SEQ ID NO: 354327 - DNA, 25 bp, Artificial
  probe
  misc_feature (1)..(25): SEQ ID NO: 3394; WAN024EZS; Start 138; Stop 162
aatggctggtggagaatatgtatcc

SEQ ID NO: 354328 - DNA, 25 bp, Artificial
  probe
  misc_feature (1)..(25): SEQ ID NO: 3394; WAN024EZS; Start 358; Stop 382
gggattgagtatgaagaatttacca

SEQ ID NO: 354329 - DNA, 25 bp, Artificial
  probe
  misc_feature (1)..(25): SEQ ID NO: 3394; WAN024EZS; Start 357; Stop 381
tgggattgagtatgaagaatttacc

SEQ ID NO: 354330 - DNA, 25 bp, Artificial
  probe
  misc_feature (1)..(25): SEQ ID NO: 3394; WAN024EZS; Start 567; Stop 591
tatgattcggaaccttgctattggt

SEQ ID NO: 354331 - DNA, 25 bp, Artificial
  probe
  misc_feature (1)..(25): SEQ ID NO: 3394; WAN024EZS; Start 149; Stop 173
gagaatatgtatccgtttcaactcc

SEQ ID NO: 354332 - DNA, 25 bp, Artificial
  probe
  misc_feature (1)..(25): SEQ ID NO: 3394; WAN024EZS; Start 420; Stop 444
tttccttagaagtttgcctccaatg

SEQ ID NO: 354333 - DNA, 25 bp, Artificial
  probe
  misc_feature (1)..(25): SEQ ID NO: 3394; WAN024EZS; Start 147; Stop 171
tggagaatatgtatccgtttcaact

SEQ ID NO: 354334 - DNA, 25 bp, Artificial
  probe
  misc_feature (1)..(25): SEQ ID NO: 3394; WAN024EZS; Start 146; Stop 170
gtggagaatatgtatccgtttcaac

SEQ ID NO: 354335 - DNA, 25 bp, Artificial
  probe
  misc_feature (1)..(25): SEQ ID NO: 3394; WAN024EZS; Start 363; Stop 387
tgagtatgaagaatttaccaatcct

SEQ ID NO: 354336 - DNA, 25 bp, Artificial
  probe
  misc_feature (1)..(25): SEQ ID NO: 3394; WAN024EZS; Start 145; Stop 169
ggtggagaatatgtatccgtttcaa

SEQ ID NO: 354337 - DNA, 25 bp, Artificial
  probe
  misc_feature (1)..(25): SEQ ID NO: 3394; WAN024EZS; Start 148; Stop 172
ggagaatatgtatccgtttcaactc

SEQ ID NO: 354338 - DNA, 25 bp, Artificial
  probe
  misc_feature (1)..(25): SEQ ID NO: 3394; WAN024EZS; Start 218; Stop 242
tagaccaagatagggaactagccaa

SEQ ID NO: 354339 - DNA, 25 bp, Artificial
  probe
  misc_feature (1)..(25): SEQ ID NO: 3394; WAN024EZS; Start 134; Stop 158
tttcaatggctggtggagaatatgt

SEQ ID NO: 354340 - DNA, 25 bp, Artificial
  probe
  misc_feature (1)..(25): SEQ ID NO: 3394; WAN024EZS; Start 143; Stop 167
ctggtggagaatatgtatccgtttc

SEQ ID NO: 354341 - DNA, 25 bp, Artificial
  probe
  misc_feature (1)..(25): SEQ ID NO: 3394; WAN024EZS; Start 35; Stop 59
ttatttccattgctggtgtggttat

SEQ ID NO: 354342 - DNA, 25 bp, Artificial
  probe
  misc_feature (1)..(25): SEQ ID NO: 3394; WAN024EZS; Start 34; Stop 58
attatttccattgctggtgtggtta

SEQ ID NO: 354343 - DNA, 25 bp, Artificial
  probe
  misc_feature (1)..(25): SEQ ID NO: 3394; WAN024EZS; Start 144; Stop 168
tggtggagaatatgtatccgtttca

SEQ ID NO: 354344 - DNA, 25 bp, Artificial
  probe
  misc_feature (1)..(25): SEQ ID NO: 3394; WAN024EZS; Start 36; Stop 60
tatttccattgctggtgtggttatc

SEQ ID NO: 354345 - DNA, 25 bp, Artificial
  probe
  misc_feature (1)..(25): SEQ ID NO: 3394; WAN024EZS; Start 568; Stop 592
atgattcggaaccttgctattggtc

SEQ ID NO: 354346 - DNA, 25 bp, Artificial
  probe
  misc_feature (1)..(25): SEQ ID NO: 3394; WAN024EZS; Start 33; Stop 57
aattatttccattgctggtgtggtt

SEQ ID NO: 354347 - DNA, 25 bp, Artificial
  probe
  misc_feature (1)..(25): SEQ ID NO: 3394; WAN024EZS; Start 219; Stop 243
agaccaagatagggaactagccaaa

SEQ ID NO: 354348 - DNA, 25 bp, Artificial
  probe
  misc_feature (1)..(25): SEQ ID NO: 3394; WAN024EZS; Start 356; Stop 380
atgggattgagtatgaagaatttac

SEQ ID NO: 354349 - DNA, 25 bp, Artificial
  probe
  misc_feature (1)..(25): SEQ ID NO: 3394; WAN024EZS; Start 564; Stop 588
agctatgattcggaaccttgctatt

SEQ ID NO: 354350 - DNA, 25 bp, Artificial
  probe
  misc_feature (1)..(25): SEQ ID NO: 3394; WAN024EZS; Start 365; Stop 389
agtatgaagaatttaccaatccttg

SEQ ID NO: 354351 - DNA, 25 bp, Artificial
  probe
  misc_feature (1)..(25): SEQ ID NO: 3394; WAN024EZS; Start 362; Stop 386
ttgagtatgaagaatttaccaatcc

SEQ ID NO: 354352 - DNA, 25 bp, Artificial
  probe
  misc_feature (1)..(25): SEQ ID NO: 3395; WAN024D59; Start 97; Stop 121
atagcgaagtctggacatatagttg

SEQ ID NO: 354353 - DNA, 25 bp, Artificial
  probe
  misc_feature (1)..(25): SEQ ID NO: 3395; WAN024D59; Start 96; Stop 120
aatagcgaagtctggacatatagtt

SEQ ID NO: 354354 - DNA, 25 bp, Artificial
  probe
  misc_feature (1)..(25): SEQ ID NO: 3395; WAN024D59; Start 98; Stop 122
tagcgaagtctggacatatagttgc

SEQ ID NO: 354355 - DNA, 25 bp, Artificial
  probe
  misc_feature (1)..(25): SEQ ID NO: 3395; WAN024D59; Start 329; Stop 353
ctgtcatcagactaagcgtatcatg

SEQ ID NO: 354356 - DNA, 25 bp, Artificial
  probe
  misc_feature (1)..(25): SEQ ID NO: 3395; WAN024D59; Start 95; Stop 119
aaatagcgaagtctggacatatagt

SEQ ID NO: 354357 - DNA, 25 bp, Artificial
  probe
  misc_feature (1)..(25): SEQ ID NO: 3395; WAN024D59; Start 279; Stop 303
gagattctttaccagattcggaagg

SEQ ID NO: 354358 - DNA, 25 bp, Artificial
  probe
  misc_feature (1)..(25): SEQ ID NO: 3395; WAN024D59; Start 278; Stop 302
ggagattctttaccagattcggaag

SEQ ID NO: 354359 - DNA, 25 bp, Artificial
  probe
  misc_feature (1)..(25): SEQ ID NO: 3395; WAN024D59; Start 599; Stop 623
gattagtgtgtcccttgatgatact

SEQ ID NO: 354360 - DNA, 25 bp, Artificial
  probe
  misc_feature (1)..(25): SEQ ID NO: 3395; WAN024D59; Start 601; Stop 625
ttagtgtgtcccttgatgatacttt

SEQ ID NO: 354361 - DNA, 25 bp, Artificial
  probe
  misc_feature (1)..(25): SEQ ID NO: 3395; WAN024D59; Start 603; Stop 627
agtgtgtcccttgatgatactttat

SEQ ID NO: 354362 - DNA, 25 bp, Artificial
  probe
  misc_feature (1)..(25): SEQ ID NO: 3395; WAN024D59; Start 600; Stop 624
attagtgtgtcccttgatgatactt

SEQ ID NO: 354363 - DNA, 25 bp, Artificial
  probe
  misc_feature (1)..(25): SEQ ID NO: 3395; WAN024D59; Start 602; Stop 626
tagtgtgtcccttgatgatacttta

SEQ ID NO: 354364 - DNA, 25 bp, Artificial
  probe
  misc_feature (1)..(25): SEQ ID NO: 3395; WAN024D59; Start 604; Stop 628
gtgtgtcccttgatgatactttatc

SEQ ID NO: 354365 - DNA, 25 bp, Artificial
  probe
  misc_feature (1)..(25): SEQ ID NO: 3395; WAN024D59; Start 266; Stop 290
tgaggcttgtctggagattctttac

SEQ ID NO: 354366 - DNA, 25 bp, Artificial
  probe
  misc_feature (1)..(25): SEQ ID NO: 3395; WAN024D59; Start 265; Stop 289
gtgaggcttgtctggagattcttta

SEQ ID NO: 354367 - DNA, 25 bp, Artificial
  probe
  misc_feature (1)..(25): SEQ ID NO: 3395; WAN024D59; Start 282; Stop 306
attctttaccagattcggaaggctt

SEQ ID NO: 354368 - DNA, 25 bp, Artificial
  probe
  misc_feature (1)..(25): SEQ ID NO: 3395; WAN024D59; Start 598; Stop 622
ggattagtgtgtcccttgatgatac

SEQ ID NO: 354369 - DNA, 25 bp, Artificial
  probe
  misc_feature (1)..(25): SEQ ID NO: 3395; WAN024D59; Start 597; Stop 621
tggattagtgtgtcccttgatgata

SEQ ID NO: 354370 - DNA, 25 bp, Artificial
  probe
  misc_feature (1)..(25): SEQ ID NO: 3395; WAN024D59; Start 281; Stop 305
gattctttaccagattcggaaggct

SEQ ID NO: 354371 - DNA, 25 bp, Artificial
  probe
  misc_feature (1)..(25): SEQ ID NO: 3395; WAN024D59; Start 280; Stop 304
agattctttaccagattcggaaggc

SEQ ID NO: 354372 - DNA, 25 bp, Artificial
  probe
  misc_feature (1)..(25): SEQ ID NO: 3395; WAN024D59; Start 593; Stop 617
ctactggattagtgtgtcccttgat

SEQ ID NO: 354373 - DNA, 25 bp, Artificial
  probe
  misc_feature (1)..(25): SEQ ID NO: 3395; WAN024D59; Start 267; Stop 291
gaggcttgtctggagattctttacc

SEQ ID NO: 354374 - DNA, 25 bp, Artificial
  probe
  misc_feature (1)..(25): SEQ ID NO: 3395; WAN024D59; Start 286; Stop 310
tttaccagattcggaaggcttgttt

SEQ ID NO: 354375 - DNA, 25 bp, Artificial
  probe
  misc_feature (1)..(25): SEQ ID NO: 3395; WAN024D59; Start 566; Stop 590
ttatccagccttccatatgagcaag

SEQ ID NO: 354376 - DNA, 25 bp, Artificial
  probe
  misc_feature (1)..(25): SEQ ID NO: 3395; WAN024D59; Start 627; Stop 651
tcagatgaagaagtactggaattga

SEQ ID NO: 354377 - DNA, 25 bp, Artificial
  probe
  misc_feature (1)..(25): SEQ ID NO: 3395; WAN024D59; Start 336; Stop 360
cagactaagcgtatcatgactcaag

SEQ ID NO: 354378 - DNA, 25 bp, Artificial
  probe
  misc_feature (1)..(25): SEQ ID NO: 3395; WAN024D59; Start 277; Stop 301
tggagattctttaccagattcggaa

SEQ ID NO: 354379 - DNA, 25 bp, Artificial
  probe
  misc_feature (1)..(25): SEQ ID NO: 3395; WAN024D59; Start 594; Stop 618
tactggattagtgtgtcccttgatg

SEQ ID NO: 354380 - DNA, 25 bp, Artificial
  probe
  misc_feature (1)..(25): SEQ ID NO: 3395; WAN024D59; Start 443; Stop 467
aaagtggtatgccgtcttgatgaaa

SEQ ID NO: 354381 - DNA, 25 bp, Artificial
  probe
  misc_feature (1)..(25): SEQ ID NO: 3395; WAN024D59; Start 341; Stop 365
taagcgtatcatgactcaagttcag

SEQ ID NO: 354382 - DNA, 25 bp, Artificial
  probe
  misc_feature (1)..(25): SEQ ID NO: 3395; WAN024D59; Start 340; Stop 364
ctaagcgtatcatgactcaagttca

SEQ ID NO: 354383 - DNA, 25 bp, Artificial
  probe
  misc_feature (1)..(25): SEQ ID NO: 3395; WAN024D59; Start 339; Stop 363
actaagcgtatcatgactcaagttc

SEQ ID NO: 354384 - DNA, 25 bp, Artificial
  probe
  misc_feature (1)..(25): SEQ ID NO: 3395; WAN024D59; Start 338; Stop 362
gactaagcgtatcatgactcaagtt

SEQ ID NO: 354385 - DNA, 25 bp, Artificial
  probe
  misc_feature (1)..(25): SEQ ID NO: 3396; WAN024CHH; Start 49; Stop 73
aaatgtgctcaagtaatacgaaagg

SEQ ID NO: 354386 - DNA, 25 bp, Artificial
  probe
  misc_feature (1)..(25): SEQ ID NO: 3396; WAN024CHH; Start 582; Stop 606
tgagattgggcttaaattgattgac

SEQ ID NO: 354387 - DNA, 25 bp, Artificial
  probe
  misc_feature (1)..(25): SEQ ID NO: 3396; WAN024CHH; Start 583; Stop 607
gagattgggcttaaattgattgact

SEQ ID NO: 354388 - DNA, 25 bp, Artificial
  probe
  misc_feature (1)..(25): SEQ ID NO: 3396; WAN024CHH; Start 581; Stop 605
ctgagattgggcttaaattgattga

SEQ ID NO: 354389 - DNA, 25 bp, Artificial
  probe
  misc_feature (1)..(25): SEQ ID NO: 3396; WAN024CHH; Start 151; Stop 175
attatttcaacttacaaggaccagg

SEQ ID NO: 354390 - DNA, 25 bp, Artificial
  probe
  misc_feature (1)..(25): SEQ ID NO: 3396; WAN024CHH; Start 584; Stop 608
agattgggcttaaattgattgactt

SEQ ID NO: 354391 - DNA, 25 bp, Artificial
  probe
  misc_feature (1)..(25): SEQ ID NO: 3396; WAN024CHH; Start 303; Stop 327
ttcagacacggaacaactcaataaa

SEQ ID NO: 354392 - DNA, 25 bp, Artificial
  probe
  misc_feature (1)..(25): SEQ ID NO: 3396; WAN024CHH; Start 302; Stop 326
tttcagacacggaacaactcaataa

SEQ ID NO: 354393 - DNA, 25 bp, Artificial
  probe
  misc_feature (1)..(25): SEQ ID NO: 3396; WAN024CHH; Start 211; Stop 235
gcaggtaagggagtcttgaataatc

SEQ ID NO: 354394 - DNA, 25 bp, Artificial
  probe
  misc_feature (1)..(25): SEQ ID NO: 3396; WAN024CHH; Start 152; Stop 176
ttatttcaacttacaaggaccaggc

SEQ ID NO: 354395 - DNA, 25 bp, Artificial
  probe
  misc_feature (1)..(25): SEQ ID NO: 3396; WAN024CHH; Start 212; Stop 236
caggtaagggagtcttgaataatca

SEQ ID NO: 354396 - DNA, 25 bp, Artificial
  probe
  misc_feature (1)..(25): SEQ ID NO: 3396; WAN024CHH; Start 214; Stop 238
ggtaagggagtcttgaataatcaga

SEQ ID NO: 354397 - DNA, 25 bp, Artificial
  probe
  misc_feature (1)..(25): SEQ ID NO: 3396; WAN024CHH; Start 213; Stop 237
aggtaagggagtcttgaataatcag

SEQ ID NO: 354398 - DNA, 25 bp, Artificial
  probe
  misc_feature (1)..(25): SEQ ID NO: 3396; WAN024CHH; Start 301; Stop 325
ctttcagacacggaacaactcaata

SEQ ID NO: 354399 - DNA, 25 bp, Artificial
  probe
  misc_feature (1)..(25): SEQ ID NO: 3396; WAN024CHH; Start 585; Stop 609
gattgggcttaaattgattgacttt

SEQ ID NO: 354400 - DNA, 25 bp, Artificial
  probe
  misc_feature (1)..(25): SEQ ID NO: 3396; WAN024CHH; Start 625; Stop 649
tttgacaaggatggcaagattatct

SEQ ID NO: 354401 - DNA, 25 bp, Artificial
  probe
  misc_feature (1)..(25): SEQ ID NO: 3396; WAN024CHH; Start 50; Stop 74
aatgtgctcaagtaatacgaaaggc

SEQ ID NO: 354402 - DNA, 25 bp, Artificial
  probe
  misc_feature (1)..(25): SEQ ID NO: 3396; WAN024CHH; Start 478; Stop 502
aatgatgagcatgtgaaattcctac

SEQ ID NO: 354403 - DNA, 25 bp, Artificial
  probe
  misc_feature (1)..(25): SEQ ID NO: 3396; WAN024CHH; Start 477; Stop 501
caatgatgagcatgtgaaattccta

SEQ ID NO: 354404 - DNA, 25 bp, Artificial
  probe
  misc_feature (1)..(25): SEQ ID NO: 3396; WAN024CHH; Start 475; Stop 499
atcaatgatgagcatgtgaaattcc

SEQ ID NO: 354405 - DNA, 25 bp, Artificial
  probe
  misc_feature (1)..(25): SEQ ID NO: 3396; WAN024CHH; Start 626; Stop 650
ttgacaaggatggcaagattatctt

SEQ ID NO: 354406 - DNA, 25 bp, Artificial
  probe
  misc_feature (1)..(25): SEQ ID NO: 3396; WAN024CHH; Start 484; Stop 508
gagcatgtgaaattcctacagattg

SEQ ID NO: 354407 - DNA, 25 bp, Artificial
  probe
  misc_feature (1)..(25): SEQ ID NO: 3396; WAN024CHH; Start 476; Stop 500
tcaatgatgagcatgtgaaattcct

SEQ ID NO: 354408 - DNA, 25 bp, Artificial
  probe
  misc_feature (1)..(25): SEQ ID NO: 3396; WAN024CHH; Start 482; Stop 506
atgagcatgtgaaattcctacagat

SEQ ID NO: 354409 - DNA, 25 bp, Artificial
  probe
  misc_feature (1)..(25): SEQ ID NO: 3396; WAN024CHH; Start 483; Stop 507
tgagcatgtgaaattcctacagatt

SEQ ID NO: 354410 - DNA, 25 bp, Artificial
  probe
  misc_feature (1)..(25): SEQ ID NO: 3396; WAN024CHH; Start 479; Stop 503
atgatgagcatgtgaaattcctaca

SEQ ID NO: 354411 - DNA, 25 bp, Artificial
  probe
  misc_feature (1)..(25): SEQ ID NO: 3396; WAN024CHH; Start 215; Stop 239
gtaagggagtcttgaataatcagat

SEQ ID NO: 354412 - DNA, 25 bp, Artificial
  probe
  misc_feature (1)..(25): SEQ ID NO: 3396; WAN024CHH; Start 481; Stop 505
gatgagcatgtgaaattcctacaga

SEQ ID NO: 354413 - DNA, 25 bp, Artificial
  probe
  misc_feature (1)..(25): SEQ ID NO: 3396; WAN024CHH; Start 284; Stop 308
ctcactttgtggagaaactttcaga

SEQ ID NO: 354414 - DNA, 25 bp, Artificial
  probe
  misc_feature (1)..(25): SEQ ID NO: 3396; WAN024CHH; Start 480; Stop 504
tgatgagcatgtgaaattcctacag

SEQ ID NO: 354415 - DNA, 25 bp, Artificial
  probe
  misc_feature (1)..(25): SEQ ID NO: 3396; WAN024CHH; Start 285; Stop 309
tcactttgtggagaaactttcagac

SEQ ID NO: 354416 - DNA, 25 bp, Artificial
  probe
  misc_feature (1)..(25): SEQ ID NO: 3396; WAN024CHH; Start 283; Stop 307
actcactttgtggagaaactttcag

SEQ ID NO: 354417 - DNA, 25 bp, Artificial
  probe
  misc_feature (1)..(25): SEQ ID NO: 3396; WAN024CHH; Start 282; Stop 306
gactcactttgtggagaaactttca

SEQ ID NO: 354418 - DNA, 25 bp, Artificial
  probe
  misc_feature (1)..(25): SEQ ID NO: 3397; WAN024CRI; Start 51; Stop 75
taaacgaatagatgggagacttacc

SEQ ID NO: 354419 - DNA, 25 bp, Artificial
  probe
  misc_feature (1)..(25): SEQ ID NO: 3397; WAN024CRI; Start 47; Stop 71
tgaataaacgaatagatgggagact

SEQ ID NO: 354420 - DNA, 25 bp, Artificial
  probe
  misc_feature (1)..(25): SEQ ID NO: 3397; WAN024CRI; Start 46; Stop 70
gtgaataaacgaatagatgggagac

SEQ ID NO: 354421 - DNA, 25 bp, Artificial
  probe
  misc_feature (1)..(25): SEQ ID NO: 3397; WAN024CRI; Start 275; Stop 299
gcattccctactactctgtcaattt

SEQ ID NO: 354422 - DNA, 25 bp, Artificial
  probe
  misc_feature (1)..(25): SEQ ID NO: 3397; WAN024CRI; Start 973; Stop 997
ccagaagagtttacgctagaatgta

SEQ ID NO: 354423 - DNA, 25 bp, Artificial
  probe
  misc_feature (1)..(25): SEQ ID NO: 3397; WAN024CRI; Start 48; Stop 72
gaataaacgaatagatgggagactt

SEQ ID NO: 354424 - DNA, 25 bp, Artificial
  probe
  misc_feature (1)..(25): SEQ ID NO: 3397; WAN024CRI; Start 983; Stop 1007
ttacgctagaatgtacggctaaatt

SEQ ID NO: 354425 - DNA, 25 bp, Artificial
  probe
  misc_feature (1)..(25): SEQ ID NO: 3397; WAN024CRI; Start 975; Stop 999
agaagagtttacgctagaatgtacg

SEQ ID NO: 354426 - DNA, 25 bp, Artificial
  probe
  misc_feature (1)..(25): SEQ ID NO: 3397; WAN024CRI; Start 547; Stop 571
caactttcgcaagaacaacttcaaa

SEQ ID NO: 354427 - DNA, 25 bp, Artificial
  probe
  misc_feature (1)..(25): SEQ ID NO: 3397; WAN024CRI; Start 974; Stop 998
cagaagagtttacgctagaatgtac

SEQ ID NO: 354428 - DNA, 25 bp, Artificial
  probe
  misc_feature (1)..(25): SEQ ID NO: 3397; WAN024CRI; Start 982; Stop 1006
tttacgctagaatgtacggctaaat

SEQ ID NO: 354429 - DNA, 25 bp, Artificial
  probe
  misc_feature (1)..(25): SEQ ID NO: 3397; WAN024CRI; Start 50; Stop 74
ataaacgaatagatgggagacttac

SEQ ID NO: 354430 - DNA, 25 bp, Artificial
  probe
  misc_feature (1)..(25): SEQ ID NO: 3397; WAN024CRI; Start 976; Stop 1000
gaagagtttacgctagaatgtacgg

SEQ ID NO: 354431 - DNA, 25 bp, Artificial
  probe
  misc_feature (1)..(25): SEQ ID NO: 3397; WAN024CRI; Start 274; Stop 298
ggcattccctactactctgtcaatt

SEQ ID NO: 354432 - DNA, 25 bp, Artificial
  probe
  misc_feature (1)..(25): SEQ ID NO: 3397; WAN024CRI; Start 981; Stop 1005
gtttacgctagaatgtacggctaaa

SEQ ID NO: 354433 - DNA, 25 bp, Artificial
  probe
  misc_feature (1)..(25): SEQ ID NO: 3397; WAN024CRI; Start 967; Stop 991
gaaatgccagaagagtttacgctag

SEQ ID NO: 354434 - DNA, 25 bp, Artificial
  probe
  misc_feature (1)..(25): SEQ ID NO: 3397; WAN024CRI; Start 270; Stop 294
gattggcattccctactactctgtc

SEQ ID NO: 354435 - DNA, 25 bp, Artificial
  probe
  misc_feature (1)..(25): SEQ ID NO: 3397; WAN024CRI; Start 970; Stop 994
atgccagaagagtttacgctagaat

SEQ ID NO: 354436 - DNA, 25 bp, Artificial
  probe
  misc_feature (1)..(25): SEQ ID NO: 3397; WAN024CRI; Start 664; Stop 688
acagggatttgctttatcggagaaa

SEQ ID NO: 354437 - DNA, 25 bp, Artificial
  probe
  misc_feature (1)..(25): SEQ ID NO: 3397; WAN024CRI; Start 980; Stop 1004
agtttacgctagaatgtacggctaa

SEQ ID NO: 354438 - DNA, 25 bp, Artificial
  probe
  misc_feature (1)..(25): SEQ ID NO: 3397; WAN024CRI; Start 530; Stop 554
agacctatttcctcagccaactttc

SEQ ID NO: 354439 - DNA, 25 bp, Artificial
  probe
  misc_feature (1)..(25): SEQ ID NO: 3397; WAN024CRI; Start 966; Stop 990
tgaaatgccagaagagtttacgcta

SEQ ID NO: 354440 - DNA, 25 bp, Artificial
  probe
  misc_feature (1)..(25): SEQ ID NO: 3397; WAN024CRI; Start 969; Stop 993
aatgccagaagagtttacgctagaa

SEQ ID NO: 354441 - DNA, 25 bp, Artificial
  probe
  misc_feature (1)..(25): SEQ ID NO: 3397; WAN024CRI; Start 968; Stop 992
aaatgccagaagagtttacgctaga

SEQ ID NO: 354442 - DNA, 25 bp, Artificial
  probe
  misc_feature (1)..(25): SEQ ID NO: 3397; WAN024CRI; Start 957; Stop 981
ctttactcgtgaaatgccagaagag

SEQ ID NO: 354443 - DNA, 25 bp, Artificial
  probe
  misc_feature (1)..(25): SEQ ID NO: 3397; WAN024CRI; Start 956; Stop 980
actttactcgtgaaatgccagaaga

SEQ ID NO: 354444 - DNA, 25 bp, Artificial
  probe
  misc_feature (1)..(25): SEQ ID NO: 3397; WAN024CRI; Start 231; Stop 255
gaccgaagattacaaggatgtggtt

SEQ ID NO: 354445 - DNA, 25 bp, Artificial
  probe
  misc_feature (1)..(25): SEQ ID NO: 3397; WAN024CRI; Start 64; Stop 88
gggagacttaccatgagtgataact

SEQ ID NO: 354446 - DNA, 25 bp, Artificial
  probe
  misc_feature (1)..(25): SEQ ID NO: 3397; WAN024CRI; Start 962; Stop 986
ctcgtgaaatgccagaagagtttac

SEQ ID NO: 354447 - DNA, 25 bp, Artificial
  probe
  misc_feature (1)..(25): SEQ ID NO: 3397; WAN024CRI; Start 529; Stop 553
cagacctatttcctcagccaacttt

SEQ ID NO: 354448 - DNA, 25 bp, Artificial
  probe
  misc_feature (1)..(25): SEQ ID NO: 3397; WAN024CRI; Start 49; Stop 73
aataaacgaatagatgggagactta

SEQ ID NO: 354449 - DNA, 25 bp, Artificial
  probe
  misc_feature (1)..(25): SEQ ID NO: 3397; WAN024CRI; Start 979; Stop 1003
gagtttacgctagaatgtacggcta

SEQ ID NO: 354450 - DNA, 25 bp, Artificial
  probe
  misc_feature (1)..(25): SEQ ID NO: 3397; WAN024CRI; Start 648; Stop 672
taagaagaaagactcgacagggatt

SEQ ID NO: 354451 - DNA, 25 bp, Artificial
  probe
  misc_feature (1)..(25): SEQ ID NO: 3398; WAN024FLH; Start 283; Stop 307
ccagatggaagcacagtagttaatc

SEQ ID NO: 354452 - DNA, 25 bp, Artificial
  probe
  misc_feature (1)..(25): SEQ ID NO: 3398; WAN024FLH; Start 82; Stop 106
ggaacagttgtaagtagtaatgcta

SEQ ID NO: 354453 - DNA, 25 bp, Artificial
  probe
  misc_feature (1)..(25): SEQ ID NO: 3398; WAN024FLH; Start 242; Stop 266
attctaagattggagcaggtacgat

SEQ ID NO: 354454 - DNA, 25 bp, Artificial
  probe
  misc_feature (1)..(25): SEQ ID NO: 3398; WAN024FLH; Start 241; Stop 265
aattctaagattggagcaggtacga

SEQ ID NO: 354455 - DNA, 25 bp, Artificial
  probe
  misc_feature (1)..(25): SEQ ID NO: 3398; WAN024FLH; Start 243; Stop 267
ttctaagattggagcaggtacgatg

SEQ ID NO: 354456 - DNA, 25 bp, Artificial
  probe
  misc_feature (1)..(25): SEQ ID NO: 3398; WAN024FLH; Start 85; Stop 109
acagttgtaagtagtaatgctatca

SEQ ID NO: 354457 - DNA, 25 bp, Artificial
  probe
  misc_feature (1)..(25): SEQ ID NO: 3398; WAN024FLH; Start 286; Stop 310
gatggaagcacagtagttaatcctg

SEQ ID NO: 354458 - DNA, 25 bp, Artificial
  probe
  misc_feature (1)..(25): SEQ ID NO: 3398; WAN024FLH; Start 285; Stop 309
agatggaagcacagtagttaatcct

SEQ ID NO: 354459 - DNA, 25 bp, Artificial
  probe
  misc_feature (1)..(25): SEQ ID NO: 3398; WAN024FLH; Start 284; Stop 308
cagatggaagcacagtagttaatcc

SEQ ID NO: 354460 - DNA, 25 bp, Artificial
  probe
  misc_feature (1)..(25): SEQ ID NO: 3398; WAN024FLH; Start 77; Stop 101
ggatgggaacagttgtaagtagtaa

SEQ ID NO: 354461 - DNA, 25 bp, Artificial
  probe
  misc_feature (1)..(25): SEQ ID NO: 3398; WAN024FLH; Start 81; Stop 105
gggaacagttgtaagtagtaatgct

SEQ ID NO: 354462 - DNA, 25 bp, Artificial
  probe
  misc_feature (1)..(25): SEQ ID NO: 3398; WAN024FLH; Start 80; Stop 104
tgggaacagttgtaagtagtaatgc

SEQ ID NO: 354463 - DNA, 25 bp, Artificial
  probe
  misc_feature (1)..(25): SEQ ID NO: 3398; WAN024FLH; Start 79; Stop 103
atgggaacagttgtaagtagtaatg

SEQ ID NO: 354464 - DNA, 25 bp, Artificial
  probe
  misc_feature (1)..(25): SEQ ID NO: 3398; WAN024FLH; Start 76; Stop 100
gggatgggaacagttgtaagtagta

SEQ ID NO: 354465 - DNA, 25 bp, Artificial
  probe
  misc_feature (1)..(25): SEQ ID NO: 3398; WAN024FLH; Start 240; Stop 264
aaattctaagattggagcaggtacg

SEQ ID NO: 354466 - DNA, 25 bp, Artificial
  probe
  misc_feature (1)..(25): SEQ ID NO: 3398; WAN024FLH; Start 238; Stop 262
gcaaattctaagattggagcaggta

SEQ ID NO: 354467 - DNA, 25 bp, Artificial
  probe
  misc_feature (1)..(25): SEQ ID NO: 3398; WAN024FLH; Start 78; Stop 102
gatgggaacagttgtaagtagtaat

SEQ ID NO: 354468 - DNA, 25 bp, Artificial
  probe
  misc_feature (1)..(25): SEQ ID NO: 3398; WAN024FLH; Start 84; Stop 108
aacagttgtaagtagtaatgctatc

SEQ ID NO: 354469 - DNA, 25 bp, Artificial
  probe
  misc_feature (1)..(25): SEQ ID NO: 3398; WAN024FLH; Start 83; Stop 107
gaacagttgtaagtagtaatgctat

SEQ ID NO: 354470 - DNA, 25 bp, Artificial
  probe
  misc_feature (1)..(25): SEQ ID NO: 3398; WAN024FLH; Start 239; Stop 263
caaattctaagattggagcaggtac

SEQ ID NO: 354471 - DNA, 25 bp, Artificial
  probe
  misc_feature (1)..(25): SEQ ID NO: 3398; WAN024FLH; Start 86; Stop 110
cagttgtaagtagtaatgctatcat

SEQ ID NO: 354472 - DNA, 25 bp, Artificial
  probe
  misc_feature (1)..(25): SEQ ID NO: 3398; WAN024FLH; Start 282; Stop 306
cccagatggaagcacagtagttaat

SEQ ID NO: 354473 - DNA, 25 bp, Artificial
  probe
  misc_feature (1)..(25): SEQ ID NO: 3398; WAN024FLH; Start 120; Stop 144
tgtgactatacaacatcatgtaaca

SEQ ID NO: 354474 - DNA, 25 bp, Artificial
  probe
  misc_feature (1)..(25): SEQ ID NO: 3398; WAN024FLH; Start 246; Stop 270
taagattggagcaggtacgatggtt

SEQ ID NO: 354475 - DNA, 25 bp, Artificial
  probe
  misc_feature (1)..(25): SEQ ID NO: 3398; WAN024FLH; Start 129; Stop 153
acaacatcatgtaacattaggaatt

SEQ ID NO: 354476 - DNA, 25 bp, Artificial
  probe
  misc_feature (1)..(25): SEQ ID NO: 3398; WAN024FLH; Start 244; Stop 268
tctaagattggagcaggtacgatgg

SEQ ID NO: 354477 - DNA, 25 bp, Artificial
  probe
  misc_feature (1)..(25): SEQ ID NO: 3398; WAN024FLH; Start 74; Stop 98
gtgggatgggaacagttgtaagtag

SEQ ID NO: 354478 - DNA, 25 bp, Artificial
  probe
  misc_feature (1)..(25): SEQ ID NO: 3398; WAN024FLH; Start 232; Stop 256
attggtgcaaattctaagattggag

SEQ ID NO: 354479 - DNA, 25 bp, Artificial
  probe
  misc_feature (1)..(25): SEQ ID NO: 3398; WAN024FLH; Start 245; Stop 269
ctaagattggagcaggtacgatggt

SEQ ID NO: 354480 - DNA, 25 bp, Artificial
  probe
  misc_feature (1)..(25): SEQ ID NO: 3398; WAN024FLH; Start 75; Stop 99
tgggatgggaacagttgtaagtagt

SEQ ID NO: 354481 - DNA, 25 bp, Artificial
  probe
  misc_feature (1)..(25): SEQ ID NO: 3398; WAN024FLH; Start 231; Stop 255
aattggtgcaaattctaagattgga

SEQ ID NO: 354482 - DNA, 25 bp, Artificial
  probe
  misc_feature (1)..(25): SEQ ID NO: 3398; WAN024FLH; Start 175; Stop 199
atcatcggggagaactgttttatag

SEQ ID NO: 354483 - DNA, 25 bp, Artificial
  probe
  misc_feature (1)..(25): SEQ ID NO: 3398; WAN024FLH; Start 173; Stop 197
ttatcatcggggagaactgttttat

SEQ ID NO: 354484 - DNA, 25 bp, Artificial
  probe
  misc_feature (1)..(25): SEQ ID NO: 3399; WAN024CDH; Start 206; Stop 230
aattcaatcaaggcagaggatgttg

SEQ ID NO: 354485 - DNA, 25 bp, Artificial
  probe
  misc_feature (1)..(25): SEQ ID NO: 3399; WAN024CDH; Start 113; Stop 137
agtgtggattctttgatattagcga

SEQ ID NO: 354486 - DNA, 25 bp, Artificial
  probe
  misc_feature (1)..(25): SEQ ID NO: 3399; WAN024CDH; Start 112; Stop 136
gagtgtggattctttgatattagcg

SEQ ID NO: 354487 - DNA, 25 bp, Artificial
  probe
  misc_feature (1)..(25): SEQ ID NO: 3399; WAN024CDH; Start 114; Stop 138
gtgtggattctttgatattagcgat

SEQ ID NO: 354488 - DNA, 25 bp, Artificial
  probe
  misc_feature (1)..(25): SEQ ID NO: 3399; WAN024CDH; Start 159; Stop 183
tctcataaccataagaatcaccctg

SEQ ID NO: 354489 - DNA, 25 bp, Artificial
  probe
  misc_feature (1)..(25): SEQ ID NO: 3399; WAN024CDH; Start 12; Stop 36
caccgtttgtcaaggagtagtattt

SEQ ID NO: 354490 - DNA, 25 bp, Artificial
  probe
  misc_feature (1)..(25): SEQ ID NO: 3399; WAN024CDH; Start 162; Stop 186
cataaccataagaatcaccctgctc

SEQ ID NO: 354491 - DNA, 25 bp, Artificial
  probe
  misc_feature (1)..(25): SEQ ID NO: 3399; WAN024CDH; Start 160; Stop 184
ctcataaccataagaatcaccctgc

SEQ ID NO: 354492 - DNA, 25 bp, Artificial
  probe
  misc_feature (1)..(25): SEQ ID NO: 3399; WAN024CDH; Start 106; Stop 130
gggatagagtgtggattctttgata

SEQ ID NO: 354493 - DNA, 25 bp, Artificial
  probe
  misc_feature (1)..(25): SEQ ID NO: 3399; WAN024CDH; Start 98; Stop 122
ttgagaatgggatagagtgtggatt

SEQ ID NO: 354494 - DNA, 25 bp, Artificial
  probe
  misc_feature (1)..(25): SEQ ID NO: 3399; WAN024CDH; Start 97; Stop 121
tttgagaatgggatagagtgtggat

SEQ ID NO: 354495 - DNA, 25 bp, Artificial
  probe
  misc_feature (1)..(25): SEQ ID NO: 3399; WAN024CDH; Start 103; Stop 127
aatgggatagagtgtggattctttg

SEQ ID NO: 354496 - DNA, 25 bp, Artificial
  probe
  misc_feature (1)..(25): SEQ ID NO: 3399; WAN024CDH; Start 141; Stop 165
gcttaatggtttggctaatctcata

SEQ ID NO: 354497 - DNA, 25 bp, Artificial
  probe
  misc_feature (1)..(25): SEQ ID NO: 3399; WAN024CDH; Start 153; Stop 177
ggctaatctcataaccataagaatc

SEQ ID NO: 354498 - DNA, 25 bp, Artificial
  probe
  misc_feature (1)..(25): SEQ ID NO: 3399; WAN024CDH; Start 202; Stop 226
gagaaattcaatcaaggcagaggat

SEQ ID NO: 354499 - DNA, 25 bp, Artificial
  probe
  misc_feature (1)..(25): SEQ ID NO: 3399; WAN024CDH; Start 161; Stop 185
tcataaccataagaatcaccctgct

SEQ ID NO: 354500 - DNA, 25 bp, Artificial
  probe
  misc_feature (1)..(25): SEQ ID NO: 3399; WAN024CDH; Start 158; Stop 182
atctcataaccataagaatcaccct

SEQ ID NO: 354501 - DNA, 25 bp, Artificial
  probe
  misc_feature (1)..(25): SEQ ID NO: 3399; WAN024CDH; Start 205; Stop 229
aaattcaatcaaggcagaggatgtt

SEQ ID NO: 354502 - DNA, 25 bp, Artificial
  probe
  misc_feature (1)..(25): SEQ ID NO: 3399; WAN024CDH; Start 196; Stop 220
caagatgagaaattcaatcaaggca

SEQ ID NO: 354503 - DNA, 25 bp, Artificial
  probe
  misc_feature (1)..(25): SEQ ID NO: 3399; WAN024CDH; Start 199; Stop 223
gatgagaaattcaatcaaggcagag

SEQ ID NO: 354504 - DNA, 25 bp, Artificial
  probe
  misc_feature (1)..(25): SEQ ID NO: 3399; WAN024CDH; Start 197; Stop 221
aagatgagaaattcaatcaaggcag

SEQ ID NO: 354505 - DNA, 25 bp, Artificial
  probe
  misc_feature (1)..(25): SEQ ID NO: 3399; WAN024CDH; Start 203; Stop 227
agaaattcaatcaaggcagaggatg

SEQ ID NO: 354506 - DNA, 25 bp, Artificial
  probe
  misc_feature (1)..(25): SEQ ID NO: 3399; WAN024CDH; Start 198; Stop 222
agatgagaaattcaatcaaggcaga

SEQ ID NO: 354507 - DNA, 25 bp, Artificial
  probe
  misc_feature (1)..(25): SEQ ID NO: 3399; WAN024CDH; Start 105; Stop 129
tgggatagagtgtggattctttgat

SEQ ID NO: 354508 - DNA, 25 bp, Artificial
  probe
  misc_feature (1)..(25): SEQ ID NO: 3399; WAN024CDH; Start 104; Stop 128
atgggatagagtgtggattctttga

SEQ ID NO: 354509 - DNA, 25 bp, Artificial
  probe
  misc_feature (1)..(25): SEQ ID NO: 3399; WAN024CDH; Start 13; Stop 37
accgtttgtcaaggagtagtatttg

SEQ ID NO: 354510 - DNA, 25 bp, Artificial
  probe
  misc_feature (1)..(25): SEQ ID NO: 3399; WAN024CDH; Start 195; Stop 219
ccaagatgagaaattcaatcaaggc

SEQ ID NO: 354511 - DNA, 25 bp, Artificial
  probe
  misc_feature (1)..(25): SEQ ID NO: 3399; WAN024CDH; Start 194; Stop 218
gccaagatgagaaattcaatcaagg

SEQ ID NO: 354512 - DNA, 25 bp, Artificial
  probe
  misc_feature (1)..(25): SEQ ID NO: 3399; WAN024CDH; Start 111; Stop 135
agagtgtggattctttgatattagc

SEQ ID NO: 354513 - DNA, 25 bp, Artificial
  probe
  misc_feature (1)..(25): SEQ ID NO: 3399; WAN024CDH; Start 204; Stop 228
gaaattcaatcaaggcagaggatgt

SEQ ID NO: 354514 - DNA, 25 bp, Artificial
  probe
  misc_feature (1)..(25): SEQ ID NO: 3399; WAN024CDH; Start 7; Stop 31
tataccaccgtttgtcaaggagtag

SEQ ID NO: 354515 - DNA, 25 bp, Artificial
  probe
  misc_feature (1)..(25): SEQ ID NO: 3399; WAN024CDH; Start 6; Stop 30
ctataccaccgtttgtcaaggagta

SEQ ID NO: 354516 - DNA, 25 bp, Artificial
  probe
  misc_feature (1)..(25): SEQ ID NO: 3399; WAN024CDH; Start 157; Stop 181
aatctcataaccataagaatcaccc

SEQ ID NO: 354517 - DNA, 25 bp, Artificial
  probe
  misc_feature (1)..(25): SEQ ID NO: 3400; WAN024DK5; Start 58; Stop 82
aaagaagtgattgaaagtaatggcg

SEQ ID NO: 354518 - DNA, 25 bp, Artificial
  probe
  misc_feature (1)..(25): SEQ ID NO: 3400; WAN024DK5; Start 61; Stop 85
gaagtgattgaaagtaatggcgaaa

SEQ ID NO: 354519 - DNA, 25 bp, Artificial
  probe
  misc_feature (1)..(25): SEQ ID NO: 3400; WAN024DK5; Start 62; Stop 86
aagtgattgaaagtaatggcgaaac

SEQ ID NO: 354520 - DNA, 25 bp, Artificial
  probe
  misc_feature (1)..(25): SEQ ID NO: 3400; WAN024DK5; Start 60; Stop 84
agaagtgattgaaagtaatggcgaa

SEQ ID NO: 354521 - DNA, 25 bp, Artificial
  probe
  misc_feature (1)..(25): SEQ ID NO: 3400; WAN024DK5; Start 59; Stop 83
aagaagtgattgaaagtaatggcga

SEQ ID NO: 354522 - DNA, 25 bp, Artificial
  probe
  misc_feature (1)..(25): SEQ ID NO: 3400; WAN024DK5; Start 57; Stop 81
taaagaagtgattgaaagtaatggc

SEQ ID NO: 354523 - DNA, 25 bp, Artificial
  probe
  misc_feature (1)..(25): SEQ ID NO: 3400; WAN024DK5; Start 63; Stop 87
agtgattgaaagtaatggcgaaacg

SEQ ID NO: 354524 - DNA, 25 bp, Artificial
  probe
  misc_feature (1)..(25): SEQ ID NO: 3400; WAN024DK5; Start 51; Stop 75
ttggtataaagaagtgattgaaagt

SEQ ID NO: 354525 - DNA, 25 bp, Artificial
  probe
  misc_feature (1)..(25): SEQ ID NO: 3400; WAN024DK5; Start 64; Stop 88
gtgattgaaagtaatggcgaaacgt

SEQ ID NO: 354526 - DNA, 25 bp, Artificial
  probe
  misc_feature (1)..(25): SEQ ID NO: 3400; WAN024DK5; Start 52; Stop 76
tggtataaagaagtgattgaaagta

SEQ ID NO: 354527 - DNA, 25 bp, Artificial
  probe
  misc_feature (1)..(25): SEQ ID NO: 3400; WAN024DK5; Start 56; Stop 80
ataaagaagtgattgaaagtaatgg

SEQ ID NO: 354528 - DNA, 25 bp, Artificial
  probe
  misc_feature (1)..(25): SEQ ID NO: 3400; WAN024DK5; Start 50; Stop 74
attggtataaagaagtgattgaaag

SEQ ID NO: 354529 - DNA, 25 bp, Artificial
  probe
  misc_feature (1)..(25): SEQ ID NO: 3400; WAN024DK5; Start 67; Stop 91
attgaaagtaatggcgaaacgttag

SEQ ID NO: 354530 - DNA, 25 bp, Artificial
  probe
  misc_feature (1)..(25): SEQ ID NO: 3400; WAN024DK5; Start 70; Stop 94
gaaagtaatggcgaaacgttagata

SEQ ID NO: 354531 - DNA, 25 bp, Artificial
  probe
  misc_feature (1)..(25): SEQ ID NO: 3400; WAN024DK5; Start 66; Stop 90
gattgaaagtaatggcgaaacgtta

SEQ ID NO: 354532 - DNA, 25 bp, Artificial
  probe
  misc_feature (1)..(25): SEQ ID NO: 3400; WAN024DK5; Start 71; Stop 95
aaagtaatggcgaaacgttagataa

SEQ ID NO: 354533 - DNA, 25 bp, Artificial
  probe
  misc_feature (1)..(25): SEQ ID NO: 3400; WAN024DK5; Start 73; Stop 97
agtaatggcgaaacgttagataatt

SEQ ID NO: 354534 - DNA, 25 bp, Artificial
  probe
  misc_feature (1)..(25): SEQ ID NO: 3400; WAN024DK5; Start 72; Stop 96
aagtaatggcgaaacgttagataat

SEQ ID NO: 354535 - DNA, 25 bp, Artificial
  probe
  misc_feature (1)..(25): SEQ ID NO: 3400; WAN024DK5; Start 69; Stop 93
tgaaagtaatggcgaaacgttagat

SEQ ID NO: 354536 - DNA, 25 bp, Artificial
  probe
  misc_feature (1)..(25): SEQ ID NO: 3400; WAN024DK5; Start 68; Stop 92
ttgaaagtaatggcgaaacgttaga

SEQ ID NO: 354537 - DNA, 25 bp, Artificial
  probe
  misc_feature (1)..(25): SEQ ID NO: 3400; WAN024DK5; Start 53; Stop 77
ggtataaagaagtgattgaaagtaa

SEQ ID NO: 354538 - DNA, 25 bp, Artificial
  probe
  misc_feature (1)..(25): SEQ ID NO: 3400; WAN024DK5; Start 65; Stop 89
tgattgaaagtaatggcgaaacgtt

SEQ ID NO: 354539 - DNA, 25 bp, Artificial
  probe
  misc_feature (1)..(25): SEQ ID NO: 3400; WAN024DK5; Start 74; Stop 98
gtaatggcgaaacgttagataatta

SEQ ID NO: 354540 - DNA, 25 bp, Artificial
  probe
  misc_feature (1)..(25): SEQ ID NO: 3400; WAN024DK5; Start 75; Stop 99
taatggcgaaacgttagataattag

SEQ ID NO: 354541 - DNA, 25 bp, Artificial
  probe
  misc_feature (1)..(25): SEQ ID NO: 3401; WAN024DO2; Start 87; Stop 111
ggattctggtattagcatcaagcat

SEQ ID NO: 354542 - DNA, 25 bp, Artificial
  probe
  misc_feature (1)..(25): SEQ ID NO: 3401; WAN024DO2; Start 92; Stop 116
ctggtattagcatcaagcatattct

SEQ ID NO: 354543 - DNA, 25 bp, Artificial
  probe
  misc_feature (1)..(25): SEQ ID NO: 3401; WAN024DO2; Start 91; Stop 115
tctggtattagcatcaagcatattc

SEQ ID NO: 354544 - DNA, 25 bp, Artificial
  probe
  misc_feature (1)..(25): SEQ ID NO: 3401; WAN024DO2; Start 88; Stop 112
gattctggtattagcatcaagcata

SEQ ID NO: 354545 - DNA, 25 bp, Artificial
  probe
  misc_feature (1)..(25): SEQ ID NO: 3401; WAN024DO2; Start 85; Stop 109
atggattctggtattagcatcaagc

SEQ ID NO: 354546 - DNA, 25 bp, Artificial
  probe
  misc_feature (1)..(25): SEQ ID NO: 3401; WAN024DO2; Start 90; Stop 114
ttctggtattagcatcaagcatatt

SEQ ID NO: 354547 - DNA, 25 bp, Artificial
  probe
  misc_feature (1)..(25): SEQ ID NO: 3401; WAN024DO2; Start 89; Stop 113
attctggtattagcatcaagcatat

SEQ ID NO: 354548 - DNA, 25 bp, Artificial
  probe
  misc_feature (1)..(25): SEQ ID NO: 3401; WAN024DO2; Start 84; Stop 108
catggattctggtattagcatcaag

SEQ ID NO: 354549 - DNA, 25 bp, Artificial
  probe
  misc_feature (1)..(25): SEQ ID NO: 3401; WAN024DO2; Start 86; Stop 110
tggattctggtattagcatcaagca

SEQ ID NO: 354550 - DNA, 25 bp, Artificial
  probe
  misc_feature (1)..(25): SEQ ID NO: 3401; WAN024DO2; Start 93; Stop 117
tggtattagcatcaagcatattcta

SEQ ID NO: 354551 - DNA, 25 bp, Artificial
  probe
  misc_feature (1)..(25): SEQ ID NO: 3401; WAN024DO2; Start 83; Stop 107
gcatggattctggtattagcatcaa

SEQ ID NO: 354552 - DNA, 25 bp, Artificial
  probe
  misc_feature (1)..(25): SEQ ID NO: 3401; WAN024DO2; Start 94; Stop 118
ggtattagcatcaagcatattctac

SEQ ID NO: 354553 - DNA, 25 bp, Artificial
  probe
  misc_feature (1)..(25): SEQ ID NO: 3401; WAN024DO2; Start 53; Stop 77
tgctaatctatgaaacagttgctct

SEQ ID NO: 354554 - DNA, 25 bp, Artificial
  probe
  misc_feature (1)..(25): SEQ ID NO: 3401; WAN024DO2; Start 52; Stop 76
ttgctaatctatgaaacagttgctc

SEQ ID NO: 354555 - DNA, 25 bp, Artificial
  probe
  misc_feature (1)..(25): SEQ ID NO: 3401; WAN024DO2; Start 51; Stop 75
cttgctaatctatgaaacagttgct

SEQ ID NO: 354556 - DNA, 25 bp, Artificial
  probe
  misc_feature (1)..(25): SEQ ID NO: 3401; WAN024DO2; Start 95; Stop 119
gtattagcatcaagcatattctaca

SEQ ID NO: 354557 - DNA, 25 bp, Artificial
  probe
  misc_feature (1)..(25): SEQ ID NO: 3401; WAN024DO2; Start 50; Stop 74
acttgctaatctatgaaacagttgc

SEQ ID NO: 354558 - DNA, 25 bp, Artificial
  probe
  misc_feature (1)..(25): SEQ ID NO: 3401; WAN024DO2; Start 82; Stop 106
ggcatggattctggtattagcatca

SEQ ID NO: 354559 - DNA, 25 bp, Artificial
  probe
  misc_feature (1)..(25): SEQ ID NO: 3401; WAN024DO2; Start 56; Stop 80
taatctatgaaacagttgctctggt

SEQ ID NO: 354560 - DNA, 25 bp, Artificial
  probe
  misc_feature (1)..(25): SEQ ID NO: 3401; WAN024DO2; Start 54; Stop 78
gctaatctatgaaacagttgctctg

SEQ ID NO: 354561 - DNA, 25 bp, Artificial
  probe
  misc_feature (1)..(25): SEQ ID NO: 3401; WAN024DO2; Start 55; Stop 79
ctaatctatgaaacagttgctctgg

SEQ ID NO: 354562 - DNA, 25 bp, Artificial
  probe
  misc_feature (1)..(25): SEQ ID NO: 3401; WAN024DO2; Start 96; Stop 120
tattagcatcaagcatattctacaa

SEQ ID NO: 354563 - DNA, 25 bp, Artificial
  probe
  misc_feature (1)..(25): SEQ ID NO: 3401; WAN024DO2; Start 97; Stop 121
attagcatcaagcatattctacaaa

SEQ ID NO: 354564 - DNA, 25 bp, Artificial
  probe
  misc_feature (1)..(25): SEQ ID NO: 3401; WAN024DO2; Start 49; Stop 73
tacttgctaatctatgaaacagttg

SEQ ID NO: 354565 - DNA, 25 bp, Artificial
  probe
  misc_feature (1)..(25): SEQ ID NO: 3401; WAN024DO2; Start 20; Stop 44
tcataacctttggtgagtttatact

SEQ ID NO: 354566 - DNA, 25 bp, Artificial
  probe
  misc_feature (1)..(25): SEQ ID NO: 3401; WAN024DO2; Start 16; Stop 40
actatcataacctttggtgagttta

SEQ ID NO: 354567 - DNA, 25 bp, Artificial
  probe
  misc_feature (1)..(25): SEQ ID NO: 3401; WAN024DO2; Start 15; Stop 39
tactatcataacctttggtgagttt

SEQ ID NO: 354568 - DNA, 25 bp, Artificial
  probe
  misc_feature (1)..(25): SEQ ID NO: 3401; WAN024DO2; Start 14; Stop 38
ttactatcataacctttggtgagtt

SEQ ID NO: 354569 - DNA, 25 bp, Artificial
  probe
  misc_feature (1)..(25): SEQ ID NO: 3401; WAN024DO2; Start 13; Stop 37
tttactatcataacctttggtgagt

SEQ ID NO: 354570 - DNA, 25 bp, Artificial
  probe
  misc_feature (1)..(25): SEQ ID NO: 3401; WAN024DO2; Start 11; Stop 35
actttactatcataacctttggtga

SEQ ID NO: 354571 - DNA, 25 bp, Artificial
  probe
  misc_feature (1)..(25): SEQ ID NO: 3401; WAN024DO2; Start 48; Stop 72
ttacttgctaatctatgaaacagtt

SEQ ID NO: 354572 - DNA, 25 bp, Artificial
  probe
  misc_feature (1)..(25): SEQ ID NO: 3401; WAN024DO2; Start 47; Stop 71
tttacttgctaatctatgaaacagt

SEQ ID NO: 354573 - DNA, 25 bp, Artificial
  probe
  misc_feature (1)..(25): SEQ ID NO: 3401; WAN024DO2; Start 12; Stop 36
ctttactatcataacctttggtgag

SEQ ID NO: 354574 - DNA, 25 bp, Artificial
  probe
  misc_feature (1)..(25): SEQ ID NO: 3402; WAN024FHB; Start 2; Stop 26
tgctgatgatgttgaagatggataa

SEQ ID NO: 354575 - DNA, 25 bp, Artificial
  probe
  misc_feature (1)..(25): SEQ ID NO: 3402; WAN024FHB; Start 1; Stop 25
ctgctgatgatgttgaagatggata

SEQ ID NO: 354576 - DNA, 25 bp, Artificial
  probe
  misc_feature (1)..(25): SEQ ID NO: 3402; WAN024FHB; Start 10; Stop 34
atgttgaagatggataaagggagtc

SEQ ID NO: 354577 - DNA, 25 bp, Artificial
  probe
  misc_feature (1)..(25): SEQ ID NO: 3402; WAN024FHB; Start 9; Stop 33
gatgttgaagatggataaagggagt

SEQ ID NO: 354578 - DNA, 25 bp, Artificial
  probe
  misc_feature (1)..(25): SEQ ID NO: 3402; WAN024FHB; Start 8; Stop 32
tgatgttgaagatggataaagggag

SEQ ID NO: 354579 - DNA, 25 bp, Artificial
  probe
  misc_feature (1)..(25): SEQ ID NO: 3402; WAN024FHB; Start 7; Stop 31
atgatgttgaagatggataaaggga

SEQ ID NO: 354580 - DNA, 25 bp, Artificial
  probe
  misc_feature (1)..(25): SEQ ID NO: 3402; WAN024FHB; Start 6; Stop 30
gatgatgttgaagatggataaaggg

SEQ ID NO: 354581 - DNA, 25 bp, Artificial
  probe
  misc_feature (1)..(25): SEQ ID NO: 3402; WAN024FHB; Start 3; Stop 27
gctgatgatgttgaagatggataaa

SEQ ID NO: 354582 - DNA, 25 bp, Artificial
  probe
  misc_feature (1)..(25): SEQ ID NO: 3402; WAN024FHB; Start 15; Stop 39
gaagatggataaagggagtcaaatc

SEQ ID NO: 354583 - DNA, 25 bp, Artificial
  probe
  misc_feature (1)..(25): SEQ ID NO: 3402; WAN024FHB; Start 5; Stop 29
tgatgatgttgaagatggataaagg

SEQ ID NO: 354584 - DNA, 25 bp, Artificial
  probe
  misc_feature (1)..(25): SEQ ID NO: 3402; WAN024FHB; Start 18; Stop 42
gatggataaagggagtcaaatcttc

SEQ ID NO: 354585 - DNA, 25 bp, Artificial
  probe
  misc_feature (1)..(25): SEQ ID NO: 3402; WAN024FHB; Start 14; Stop 38
tgaagatggataaagggagtcaaat

SEQ ID NO: 354586 - DNA, 25 bp, Artificial
  probe
  misc_feature (1)..(25): SEQ ID NO: 3402; WAN024FHB; Start 32; Stop 56
gtcaaatcttccttctctatcatca

SEQ ID NO: 354587 - DNA, 25 bp, Artificial
  probe
  misc_feature (1)..(25): SEQ ID NO: 3402; WAN024FHB; Start 11; Stop 35
tgttgaagatggataaagggagtca

SEQ ID NO: 354588 - DNA, 25 bp, Artificial
  probe
  misc_feature (1)..(25): SEQ ID NO: 3402; WAN024FHB; Start 31; Stop 55
agtcaaatcttccttctctatcatc

SEQ ID NO: 354589 - DNA, 25 bp, Artificial
  probe
  misc_feature (1)..(25): SEQ ID NO: 3402; WAN024FHB; Start 4; Stop 28
ctgatgatgttgaagatggataaag

SEQ ID NO: 354590 - DNA, 25 bp, Artificial
  probe
  misc_feature (1)..(25): SEQ ID NO: 3402; WAN024FHB; Start 28; Stop 52
gggagtcaaatcttccttctctatc

SEQ ID NO: 354591 - DNA, 25 bp, Artificial
  probe
  misc_feature (1)..(25): SEQ ID NO: 3402; WAN024FHB; Start 19; Stop 43
atggataaagggagtcaaatcttcc

SEQ ID NO: 354592 - DNA, 25 bp, Artificial
  probe
  misc_feature (1)..(25): SEQ ID NO: 3402; WAN024FHB; Start 27; Stop 51
agggagtcaaatcttccttctctat

SEQ ID NO: 354593 - DNA, 25 bp, Artificial
  probe
  misc_feature (1)..(25): SEQ ID NO: 3402; WAN024FHB; Start 29; Stop 53
ggagtcaaatcttccttctctatca

SEQ ID NO: 354594 - DNA, 25 bp, Artificial
  probe
  misc_feature (1)..(25): SEQ ID NO: 3402; WAN024FHB; Start 20; Stop 44
tggataaagggagtcaaatcttcct

SEQ ID NO: 354595 - DNA, 25 bp, Artificial
  probe
  misc_feature (1)..(25): SEQ ID NO: 3402; WAN024FHB; Start 30; Stop 54
gagtcaaatcttccttctctatcat

SEQ ID NO: 354596 - DNA, 25 bp, Artificial
  probe
  misc_feature (1)..(25): SEQ ID NO: 3402; WAN024FHB; Start 33; Stop 57
tcaaatcttccttctctatcatcat

SEQ ID NO: 354597 - DNA, 25 bp, Artificial
  probe
  misc_feature (1)..(25): SEQ ID NO: 3402; WAN024FHB; Start 17; Stop 41
agatggataaagggagtcaaatctt

SEQ ID NO: 354598 - DNA, 25 bp, Artificial
  probe
  misc_feature (1)..(25): SEQ ID NO: 3402; WAN024FHB; Start 16; Stop 40
aagatggataaagggagtcaaatct

SEQ ID NO: 354599 - DNA, 25 bp, Artificial
  probe
  misc_feature (1)..(25): SEQ ID NO: 3402; WAN024FHB; Start 78; Stop 102
cagctttgcctttgaaatccttgta

SEQ ID NO: 354600 - DNA, 25 bp, Artificial
  probe
  misc_feature (1)..(25): SEQ ID NO: 3402; WAN024FHB; Start 57; Stop 81
taagagtaatgttttgaagaccagc

SEQ ID NO: 354601 - DNA, 25 bp, Artificial
  probe
  misc_feature (1)..(25): SEQ ID NO: 3402; WAN024FHB; Start 36; Stop 60
aatcttccttctctatcatcataag

SEQ ID NO: 354602 - DNA, 25 bp, Artificial
  probe
  misc_feature (1)..(25): SEQ ID NO: 3402; WAN024FHB; Start 13; Stop 37
ttgaagatggataaagggagtcaaa

SEQ ID NO: 354603 - DNA, 25 bp, Artificial
  probe
  misc_feature (1)..(25): SEQ ID NO: 3402; WAN024FHB; Start 12; Stop 36
gttgaagatggataaagggagtcaa

SEQ ID NO: 354604 - DNA, 25 bp, Artificial
  probe
  misc_feature (1)..(25): SEQ ID NO: 3402; WAN024FHB; Start 39; Stop 63
cttccttctctatcatcataagagt

SEQ ID NO: 354605 - DNA, 25 bp, Artificial
  probe
  misc_feature (1)..(25): SEQ ID NO: 3402; WAN024FHB; Start 72; Stop 96
gaagaccagctttgcctttgaaatc

SEQ ID NO: 354606 - DNA, 25 bp, Artificial
  probe
  misc_feature (1)..(25): SEQ ID NO: 3402; WAN024FHB; Start 37; Stop 61
atcttccttctctatcatcataaga

SEQ ID NO: 354607 - DNA, 25 bp, Artificial
  probe
  misc_feature (1)..(25): SEQ ID NO: 3403; WAN024CSV; Start 177; Stop 201
gcatcttgaggttgaggatagtatt

SEQ ID NO: 354608 - DNA, 25 bp, Artificial
  probe
  misc_feature (1)..(25): SEQ ID NO: 3403; WAN024CSV; Start 28; Stop 52
ttccgcattattagacagcttaatc

SEQ ID NO: 354609 - DNA, 25 bp, Artificial
  probe
  misc_feature (1)..(25): SEQ ID NO: 3403; WAN024CSV; Start 36; Stop 60
tattagacagcttaatcgtattgcg

SEQ ID NO: 354610 - DNA, 25 bp, Artificial
  probe
  misc_feature (1)..(25): SEQ ID NO: 3403; WAN024CSV; Start 31; Stop 55
cgcattattagacagcttaatcgta

SEQ ID NO: 354611 - DNA, 25 bp, Artificial
  probe
  misc_feature (1)..(25): SEQ ID NO: 3403; WAN024CSV; Start 446; Stop 470
tcatagtcattgccataaacctgta

SEQ ID NO: 354612 - DNA, 25 bp, Artificial
  probe
  misc_feature (1)..(25): SEQ ID NO: 3403; WAN024CSV; Start 444; Stop 468
cttcatagtcattgccataaacctg

SEQ ID NO: 354613 - DNA, 25 bp, Artificial
  probe
  misc_feature (1)..(25): SEQ ID NO: 3403; WAN024CSV; Start 386; Stop 410
tcataggtatccacaagaaagacac

SEQ ID NO: 354614 - DNA, 25 bp, Artificial
  probe
  misc_feature (1)..(25): SEQ ID NO: 3403; WAN024CSV; Start 387; Stop 411
cataggtatccacaagaaagacaca

SEQ ID NO: 354615 - DNA, 25 bp, Artificial
  probe
  misc_feature (1)..(25): SEQ ID NO: 3403; WAN024CSV; Start 389; Stop 413
taggtatccacaagaaagacacaat

SEQ ID NO: 354616 - DNA, 25 bp, Artificial
  probe
  misc_feature (1)..(25): SEQ ID NO: 3403; WAN024CSV; Start 388; Stop 412
ataggtatccacaagaaagacacaa

SEQ ID NO: 354617 - DNA, 25 bp, Artificial
  probe
  misc_feature (1)..(25): SEQ ID NO: 3403; WAN024CSV; Start 445; Stop 469
ttcatagtcattgccataaacctgt

SEQ ID NO: 354618 - DNA, 25 bp, Artificial
  probe
  misc_feature (1)..(25): SEQ ID NO: 3403; WAN024CSV; Start 29; Stop 53
tccgcattattagacagcttaatcg

SEQ ID NO: 354619 - DNA, 25 bp, Artificial
  probe
  misc_feature (1)..(25): SEQ ID NO: 3403; WAN024CSV; Start 30; Stop 54
ccgcattattagacagcttaatcgt

SEQ ID NO: 354620 - DNA, 25 bp, Artificial
  probe
  misc_feature (1)..(25): SEQ ID NO: 3403; WAN024CSV; Start 391; Stop 415
ggtatccacaagaaagacacaattt

SEQ ID NO: 354621 - DNA, 25 bp, Artificial
  probe
  misc_feature (1)..(25): SEQ ID NO: 3403; WAN024CSV; Start 390; Stop 414
aggtatccacaagaaagacacaatt

SEQ ID NO: 354622 - DNA, 25 bp, Artificial
  probe
  misc_feature (1)..(25): SEQ ID NO: 3403; WAN024CSV; Start 176; Stop 200
tgcatcttgaggttgaggatagtat

SEQ ID NO: 354623 - DNA, 25 bp, Artificial
  probe
  misc_feature (1)..(25): SEQ ID NO: 3403; WAN024CSV; Start 203; Stop 227
tcgtccaaatcattagaagcataaa

SEQ ID NO: 354624 - DNA, 25 bp, Artificial
  probe
  misc_feature (1)..(25): SEQ ID NO: 3403; WAN024CSV; Start 175; Stop 199
ttgcatcttgaggttgaggatagta

SEQ ID NO: 354625 - DNA, 25 bp, Artificial
  probe
  misc_feature (1)..(25): SEQ ID NO: 3403; WAN024CSV; Start 217; Stop 241
agaagcataaatcttagcctctgta

SEQ ID NO: 354626 - DNA, 25 bp, Artificial
  probe
  misc_feature (1)..(25): SEQ ID NO: 3403; WAN024CSV; Start 216; Stop 240
tagaagcataaatcttagcctctgt

SEQ ID NO: 354627 - DNA, 25 bp, Artificial
  probe
  misc_feature (1)..(25): SEQ ID NO: 3403; WAN024CSV; Start 443; Stop 467
gcttcatagtcattgccataaacct

SEQ ID NO: 354628 - DNA, 25 bp, Artificial
  probe
  misc_feature (1)..(25): SEQ ID NO: 3403; WAN024CSV; Start 202; Stop 226
ttcgtccaaatcattagaagcataa

SEQ ID NO: 354629 - DNA, 25 bp, Artificial
  probe
  misc_feature (1)..(25): SEQ ID NO: 3403; WAN024CSV; Start 201; Stop 225
tttcgtccaaatcattagaagcata

SEQ ID NO: 354630 - DNA, 25 bp, Artificial
  probe
  misc_feature (1)..(25): SEQ ID NO: 3403; WAN024CSV; Start 447; Stop 471
catagtcattgccataaacctgtac

SEQ ID NO: 354631 - DNA, 25 bp, Artificial
  probe
  misc_feature (1)..(25): SEQ ID NO: 3403; WAN024CSV; Start 218; Stop 242
gaagcataaatcttagcctctgtaa

SEQ ID NO: 354632 - DNA, 25 bp, Artificial
  probe
  misc_feature (1)..(25): SEQ ID NO: 3403; WAN024CSV; Start 448; Stop 472
atagtcattgccataaacctgtacc

SEQ ID NO: 354633 - DNA, 25 bp, Artificial
  probe
  misc_feature (1)..(25): SEQ ID NO: 3403; WAN024CSV; Start 304; Stop 328
aatccgcacacccataaagttaatc

SEQ ID NO: 354634 - DNA, 25 bp, Artificial
  probe
  misc_feature (1)..(25): SEQ ID NO: 3403; WAN024CSV; Start 220; Stop 244
agcataaatcttagcctctgtaaat

SEQ ID NO: 354635 - DNA, 25 bp, Artificial
  probe
  misc_feature (1)..(25): SEQ ID NO: 3403; WAN024CSV; Start 215; Stop 239
ttagaagcataaatcttagcctctg

SEQ ID NO: 354636 - DNA, 25 bp, Artificial
  probe
  misc_feature (1)..(25): SEQ ID NO: 3403; WAN024CSV; Start 303; Stop 327
caatccgcacacccataaagttaat

SEQ ID NO: 354637 - DNA, 25 bp, Artificial
  probe
  misc_feature (1)..(25): SEQ ID NO: 3403; WAN024CSV; Start 178; Stop 202
catcttgaggttgaggatagtattt

SEQ ID NO: 354638 - DNA, 25 bp, Artificial
  probe
  misc_feature (1)..(25): SEQ ID NO: 3403; WAN024CSV; Start 204; Stop 228
cgtccaaatcattagaagcataaat

SEQ ID NO: 354639 - DNA, 25 bp, Artificial
  probe
  misc_feature (1)..(25): SEQ ID NO: 3403; WAN024CSV; Start 219; Stop 243
aagcataaatcttagcctctgtaaa

SEQ ID NO: 354640 - DNA, 25 bp, Artificial
  probe
  misc_feature (1)..(25): SEQ ID NO: 3404; WAN024FCP; Start 55; Stop 79
tttcaaacttcacttcatttcatcg

SEQ ID NO: 354641 - DNA, 25 bp, Artificial
  probe
  misc_feature (1)..(25): SEQ ID NO: 3404; WAN024FCP; Start 224; Stop 248
aagtcgaattgtataagacagacgc

SEQ ID NO: 354642 - DNA, 25 bp, Artificial
  probe
  misc_feature (1)..(25): SEQ ID NO: 3404; WAN024FCP; Start 156; Stop 180
tatcaaggtgggagatcgctattat

SEQ ID NO: 354643 - DNA, 25 bp, Artificial
  probe
  misc_feature (1)..(25): SEQ ID NO: 3404; WAN024FCP; Start 155; Stop 179
ttatcaaggtgggagatcgctatta

SEQ ID NO: 354644 - DNA, 25 bp, Artificial
  probe
  misc_feature (1)..(25): SEQ ID NO: 3404; WAN024FCP; Start 124; Stop 148
gttaatacttccacaaacacagatg

SEQ ID NO: 354645 - DNA, 25 bp, Artificial
  probe
  misc_feature (1)..(25): SEQ ID NO: 3404; WAN024FCP; Start 226; Stop 250
gtcgaattgtataagacagacgcaa

SEQ ID NO: 354646 - DNA, 25 bp, Artificial
  probe
  misc_feature (1)..(25): SEQ ID NO: 3404; WAN024FCP; Start 249; Stop 273
aattgaactggtggatgtgaacaaa

SEQ ID NO: 354647 - DNA, 25 bp, Artificial
  probe
  misc_feature (1)..(25): SEQ ID NO: 3404; WAN024FCP; Start 203; Stop 227
cagacaagtacctgttagagaaagt

SEQ ID NO: 354648 - DNA, 25 bp, Artificial
  probe
  misc_feature (1)..(25): SEQ ID NO: 3404; WAN024FCP; Start 200; Stop 224
agccagacaagtacctgttagagaa

SEQ ID NO: 354649 - DNA, 25 bp, Artificial
  probe
  misc_feature (1)..(25): SEQ ID NO: 3404; WAN024FCP; Start 204; Stop 228
agacaagtacctgttagagaaagtc

SEQ ID NO: 354650 - DNA, 25 bp, Artificial
  probe
  misc_feature (1)..(25): SEQ ID NO: 3404; WAN024FCP; Start 157; Stop 181
atcaaggtgggagatcgctattatc

SEQ ID NO: 354651 - DNA, 25 bp, Artificial
  probe
  misc_feature (1)..(25): SEQ ID NO: 3404; WAN024FCP; Start 227; Stop 251
tcgaattgtataagacagacgcaat

SEQ ID NO: 354652 - DNA, 25 bp, Artificial
  probe
  misc_feature (1)..(25): SEQ ID NO: 3404; WAN024FCP; Start 225; Stop 249
agtcgaattgtataagacagacgca

SEQ ID NO: 354653 - DNA, 25 bp, Artificial
  probe
  misc_feature (1)..(25): SEQ ID NO: 3404; WAN024FCP; Start 202; Stop 226
ccagacaagtacctgttagagaaag

SEQ ID NO: 354654 - DNA, 25 bp, Artificial
  probe
  misc_feature (1)..(25): SEQ ID NO: 3404; WAN024FCP; Start 212; Stop 236
acctgttagagaaagtcgaattgta

SEQ ID NO: 354655 - DNA, 25 bp, Artificial
  probe
  misc_feature (1)..(25): SEQ ID NO: 3404; WAN024FCP; Start 211; Stop 235
tacctgttagagaaagtcgaattgt

SEQ ID NO: 354656 - DNA, 25 bp, Artificial
  probe
  misc_feature (1)..(25): SEQ ID NO: 3404; WAN024FCP; Start 207; Stop 231
caagtacctgttagagaaagtcgaa

SEQ ID NO: 354657 - DNA, 25 bp, Artificial
  probe
  misc_feature (1)..(25): SEQ ID NO: 3404; WAN024FCP; Start 57; Stop 81
tcaaacttcacttcatttcatcgag

SEQ ID NO: 354658 - DNA, 25 bp, Artificial
  probe
  misc_feature (1)..(25): SEQ ID NO: 3404; WAN024FCP; Start 210; Stop 234
gtacctgttagagaaagtcgaattg

SEQ ID NO: 354659 - DNA, 25 bp, Artificial
  probe
  misc_feature (1)..(25): SEQ ID NO: 3404; WAN024FCP; Start 56; Stop 80
ttcaaacttcacttcatttcatcga

SEQ ID NO: 354660 - DNA, 25 bp, Artificial
  probe
  misc_feature (1)..(25): SEQ ID NO: 3404; WAN024FCP; Start 209; Stop 233
agtacctgttagagaaagtcgaatt

SEQ ID NO: 354661 - DNA, 25 bp, Artificial
  probe
  misc_feature (1)..(25): SEQ ID NO: 3404; WAN024FCP; Start 208; Stop 232
aagtacctgttagagaaagtcgaat

SEQ ID NO: 354662 - DNA, 25 bp, Artificial
  probe
  misc_feature (1)..(25): SEQ ID NO: 3404; WAN024FCP; Start 205; Stop 229
gacaagtacctgttagagaaagtcg

SEQ ID NO: 354663 - DNA, 25 bp, Artificial
  probe
  misc_feature (1)..(25): SEQ ID NO: 3404; WAN024FCP; Start 154; Stop 178
cttatcaaggtgggagatcgctatt

SEQ ID NO: 354664 - DNA, 25 bp, Artificial
  probe
  misc_feature (1)..(25): SEQ ID NO: 3404; WAN024FCP; Start 58; Stop 82
caaacttcacttcatttcatcgagg

SEQ ID NO: 354665 - DNA, 25 bp, Artificial
  probe
  misc_feature (1)..(25): SEQ ID NO: 3404; WAN024FCP; Start 65; Stop 89
cacttcatttcatcgaggttgtttc

SEQ ID NO: 354666 - DNA, 25 bp, Artificial
  probe
  misc_feature (1)..(25): SEQ ID NO: 3404; WAN024FCP; Start 59; Stop 83
aaacttcacttcatttcatcgaggt

SEQ ID NO: 354667 - DNA, 25 bp, Artificial
  probe
  misc_feature (1)..(25): SEQ ID NO: 3404; WAN024FCP; Start 125; Stop 149
ttaatacttccacaaacacagatgg

SEQ ID NO: 354668 - DNA, 25 bp, Artificial
  probe
  misc_feature (1)..(25): SEQ ID NO: 3404; WAN024FCP; Start 64; Stop 88
tcacttcatttcatcgaggttgttt

SEQ ID NO: 354669 - DNA, 25 bp, Artificial
  probe
  misc_feature (1)..(25): SEQ ID NO: 3404; WAN024FCP; Start 63; Stop 87
ttcacttcatttcatcgaggttgtt

SEQ ID NO: 354670 - DNA, 25 bp, Artificial
  probe
  misc_feature (1)..(25): SEQ ID NO: 3404; WAN024FCP; Start 213; Stop 237
cctgttagagaaagtcgaattgtat

SEQ ID NO: 354671 - DNA, 25 bp, Artificial
  probe
  misc_feature (1)..(25): SEQ ID NO: 3404; WAN024FCP; Start 167; Stop 191
gagatcgctattatcgtgccctaaa

SEQ ID NO: 354672 - DNA, 25 bp, Artificial
  probe
  misc_feature (1)..(25): SEQ ID NO: 3404; WAN024FCP; Start 60; Stop 84
aacttcacttcatttcatcgaggtt

SEQ ID NO: 354673 - DNA, 25 bp, Artificial
  probe
  misc_feature (1)..(25): SEQ ID NO: 3405; WAN024CKR; Start 182; Stop 206
atattcctgatagcgaccttcttgg

SEQ ID NO: 354674 - DNA, 25 bp, Artificial
  probe
  misc_feature (1)..(25): SEQ ID NO: 3405; WAN024CKR; Start 181; Stop 205
aatattcctgatagcgaccttcttg

SEQ ID NO: 354675 - DNA, 25 bp, Artificial
  probe
  misc_feature (1)..(25): SEQ ID NO: 3405; WAN024CKR; Start 132; Stop 156
aattatatcggacatcatcagttct

SEQ ID NO: 354676 - DNA, 25 bp, Artificial
  probe
  misc_feature (1)..(25): SEQ ID NO: 3405; WAN024CKR; Start 94; Stop 118
tggagtattacaacagatacaagtg

SEQ ID NO: 354677 - DNA, 25 bp, Artificial
  probe
  misc_feature (1)..(25): SEQ ID NO: 3405; WAN024CKR; Start 93; Stop 117
gtggagtattacaacagatacaagt

SEQ ID NO: 354678 - DNA, 25 bp, Artificial
  probe
  misc_feature (1)..(25): SEQ ID NO: 3405; WAN024CKR; Start 92; Stop 116
tgtggagtattacaacagatacaag

SEQ ID NO: 354679 - DNA, 25 bp, Artificial
  probe
  misc_feature (1)..(25): SEQ ID NO: 3405; WAN024CKR; Start 102; Stop 126
tacaacagatacaagtgagaaaggt

SEQ ID NO: 354680 - DNA, 25 bp, Artificial
  probe
  misc_feature (1)..(25): SEQ ID NO: 3405; WAN024CKR; Start 69; Stop 93
aaatgacggtgagattgaaactttg

SEQ ID NO: 354681 - DNA, 25 bp, Artificial
  probe
  misc_feature (1)..(25): SEQ ID NO: 3405; WAN024CKR; Start 137; Stop 161
tatcggacatcatcagttctattaa

SEQ ID NO: 354682 - DNA, 25 bp, Artificial
  probe
  misc_feature (1)..(25): SEQ ID NO: 3405; WAN024CKR; Start 55; Stop 79
attactgttctttcaaatgacggtg

SEQ ID NO: 354683 - DNA, 25 bp, Artificial
  probe
  misc_feature (1)..(25): SEQ ID NO: 3405; WAN024CKR; Start 54; Stop 78
gattactgttctttcaaatgacggt

SEQ ID NO: 354684 - DNA, 25 bp, Artificial
  probe
  misc_feature (1)..(25): SEQ ID NO: 3405; WAN024CKR; Start 221; Stop 245
gttgctcatcatactttccttgtaa

SEQ ID NO: 354685 - DNA, 25 bp, Artificial
  probe
  misc_feature (1)..(25): SEQ ID NO: 3405; WAN024CKR; Start 95; Stop 119
ggagtattacaacagatacaagtga

SEQ ID NO: 354686 - DNA, 25 bp, Artificial
  probe
  misc_feature (1)..(25): SEQ ID NO: 3405; WAN024CKR; Start 104; Stop 128
caacagatacaagtgagaaaggttc

SEQ ID NO: 354687 - DNA, 25 bp, Artificial
  probe
  misc_feature (1)..(25): SEQ ID NO: 3405; WAN024CKR; Start 136; Stop 160
atatcggacatcatcagttctatta

SEQ ID NO: 354688 - DNA, 25 bp, Artificial
  probe
  misc_feature (1)..(25): SEQ ID NO: 3405; WAN024CKR; Start 135; Stop 159
tatatcggacatcatcagttctatt

SEQ ID NO: 354689 - DNA, 25 bp, Artificial
  probe
  misc_feature (1)..(25): SEQ ID NO: 3405; WAN024CKR; Start 134; Stop 158
ttatatcggacatcatcagttctat

SEQ ID NO: 354690 - DNA, 25 bp, Artificial
  probe
  misc_feature (1)..(25): SEQ ID NO: 3405; WAN024CKR; Start 133; Stop 157
attatatcggacatcatcagttcta

SEQ ID NO: 354691 - DNA, 25 bp, Artificial
  probe
  misc_feature (1)..(25): SEQ ID NO: 3405; WAN024CKR; Start 103; Stop 127
acaacagatacaagtgagaaaggtt

SEQ ID NO: 354692 - DNA, 25 bp, Artificial
  probe
  misc_feature (1)..(25): SEQ ID NO: 3405; WAN024CKR; Start 53; Stop 77
agattactgttctttcaaatgacgg

SEQ ID NO: 354693 - DNA, 25 bp, Artificial
  probe
  misc_feature (1)..(25): SEQ ID NO: 3405; WAN024CKR; Start 101; Stop 125
ttacaacagatacaagtgagaaagg

SEQ ID NO: 354694 - DNA, 25 bp, Artificial
  probe
  misc_feature (1)..(25): SEQ ID NO: 3405; WAN024CKR; Start 222; Stop 246
ttgctcatcatactttccttgtaaa

SEQ ID NO: 354695 - DNA, 25 bp, Artificial
  probe
  misc_feature (1)..(25): SEQ ID NO: 3405; WAN024CKR; Start 70; Stop 94
aatgacggtgagattgaaactttgt

SEQ ID NO: 354696 - DNA, 25 bp, Artificial
  probe
  misc_feature (1)..(25): SEQ ID NO: 3405; WAN024CKR; Start 68; Stop 92
caaatgacggtgagattgaaacttt

SEQ ID NO: 354697 - DNA, 25 bp, Artificial
  probe
  misc_feature (1)..(25): SEQ ID NO: 3405; WAN024CKR; Start 220; Stop 244
agttgctcatcatactttccttgta

SEQ ID NO: 354698 - DNA, 25 bp, Artificial
  probe
  misc_feature (1)..(25): SEQ ID NO: 3405; WAN024CKR; Start 223; Stop 247
tgctcatcatactttccttgtaaat

SEQ ID NO: 354699 - DNA, 25 bp, Artificial
  probe
  misc_feature (1)..(25): SEQ ID NO: 3405; WAN024CKR; Start 124; Stop 148
ggttctcaaattatatcggacatca

SEQ ID NO: 354700 - DNA, 25 bp, Artificial
  probe
  misc_feature (1)..(25): SEQ ID NO: 3405; WAN024CKR; Start 77; Stop 101
gtgagattgaaactttgtggagtat

SEQ ID NO: 354701 - DNA, 25 bp, Artificial
  probe
  misc_feature (1)..(25): SEQ ID NO: 3405; WAN024CKR; Start 123; Stop 147
aggttctcaaattatatcggacatc

SEQ ID NO: 354702 - DNA, 25 bp, Artificial
  probe
  misc_feature (1)..(25): SEQ ID NO: 3405; WAN024CKR; Start 76; Stop 100
ggtgagattgaaactttgtggagta

SEQ ID NO: 354703 - DNA, 25 bp, Artificial
  probe
  misc_feature (1)..(25): SEQ ID NO: 3405; WAN024CKR; Start 61; Stop 85
gttctttcaaatgacggtgagattg

SEQ ID NO: 354704 - DNA, 25 bp, Artificial
  probe
  misc_feature (1)..(25): SEQ ID NO: 3405; WAN024CKR; Start 56; Stop 80
ttactgttctttcaaatgacggtga

SEQ ID NO: 354705 - DNA, 25 bp, Artificial
  probe
  misc_feature (1)..(25): SEQ ID NO: 3405; WAN024CKR; Start 121; Stop 145
aaaggttctcaaattatatcggaca

SEQ ID NO: 354706 - DNA, 25 bp, Artificial
  probe
  misc_feature (1)..(25): SEQ ID NO: 3406; WAN024EYT; Start 1273; Stop 1297
ggcatacaaggagttagttctatca

SEQ ID NO: 354707 - DNA, 25 bp, Artificial
  probe
  misc_feature (1)..(25): SEQ ID NO: 3406; WAN024EYT; Start 1097; Stop 1121
agatggtcaactatggtaaggaatg

SEQ ID NO: 354708 - DNA, 25 bp, Artificial
  probe
  misc_feature (1)..(25): SEQ ID NO: 3406; WAN024EYT; Start 1272; Stop 1296
aggcatacaaggagttagttctatc

SEQ ID NO: 354709 - DNA, 25 bp, Artificial
  probe
  misc_feature (1)..(25): SEQ ID NO: 3406; WAN024EYT; Start 1268; Stop 1292
aagtaggcatacaaggagttagttc

SEQ ID NO: 354710 - DNA, 25 bp, Artificial
  probe
  misc_feature (1)..(25): SEQ ID NO: 3406; WAN024EYT; Start 1087; Stop 1111
gtagcctctaagatggtcaactatg

SEQ ID NO: 354711 - DNA, 25 bp, Artificial
  probe
  misc_feature (1)..(25): SEQ ID NO: 3406; WAN024EYT; Start 1096; Stop 1120
aagatggtcaactatggtaaggaat

SEQ ID NO: 354712 - DNA, 25 bp, Artificial
  probe
  misc_feature (1)..(25): SEQ ID NO: 3406; WAN024EYT; Start 1107; Stop 1131
ctatggtaaggaatggcaaggtatc

SEQ ID NO: 354713 - DNA, 25 bp, Artificial
  probe
  misc_feature (1)..(25): SEQ ID NO: 3406; WAN024EYT; Start 1094; Stop 1118
ctaagatggtcaactatggtaagga

SEQ ID NO: 354714 - DNA, 25 bp, Artificial
  probe
  misc_feature (1)..(25): SEQ ID NO: 3406; WAN024EYT; Start 1086; Stop 1110
tgtagcctctaagatggtcaactat

SEQ ID NO: 354715 - DNA, 25 bp, Artificial
  probe
  misc_feature (1)..(25): SEQ ID NO: 3406; WAN024EYT; Start 1270; Stop 1294
gtaggcatacaaggagttagttcta

SEQ ID NO: 354716 - DNA, 25 bp, Artificial
  probe
  misc_feature (1)..(25): SEQ ID NO: 3406; WAN024EYT; Start 1269; Stop 1293
agtaggcatacaaggagttagttct

SEQ ID NO: 354717 - DNA, 25 bp, Artificial
  probe
  misc_feature (1)..(25): SEQ ID NO: 3406; WAN024EYT; Start 1093; Stop 1117
tctaagatggtcaactatggtaagg

SEQ ID NO: 354718 - DNA, 25 bp, Artificial
  probe
  misc_feature (1)..(25): SEQ ID NO: 3406; WAN024EYT; Start 1091; Stop 1115
cctctaagatggtcaactatggtaa

SEQ ID NO: 354719 - DNA, 25 bp, Artificial
  probe
  misc_feature (1)..(25): SEQ ID NO: 3406; WAN024EYT; Start 1098; Stop 1122
gatggtcaactatggtaaggaatgg

SEQ ID NO: 354720 - DNA, 25 bp, Artificial
  probe
  misc_feature (1)..(25): SEQ ID NO: 3406; WAN024EYT; Start 1095; Stop 1119
taagatggtcaactatggtaaggaa

SEQ ID NO: 354721 - DNA, 25 bp, Artificial
  probe
  misc_feature (1)..(25): SEQ ID NO: 3406; WAN024EYT; Start 1108; Stop 1132
tatggtaaggaatggcaaggtatca

SEQ ID NO: 354722 - DNA, 25 bp, Artificial
  probe
  misc_feature (1)..(25): SEQ ID NO: 3406; WAN024EYT; Start 1106; Stop 1130
actatggtaaggaatggcaaggtat

SEQ ID NO: 354723 - DNA, 25 bp, Artificial
  probe
  misc_feature (1)..(25): SEQ ID NO: 3406; WAN024EYT; Start 1088; Stop 1112
tagcctctaagatggtcaactatgg

SEQ ID NO: 354724 - DNA, 25 bp, Artificial
  probe
  misc_feature (1)..(25): SEQ ID NO: 3406; WAN024EYT; Start 1112; Stop 1136
gtaaggaatggcaaggtatcaactt

SEQ ID NO: 354725 - DNA, 25 bp, Artificial
  probe
  misc_feature (1)..(25): SEQ ID NO: 3406; WAN024EYT; Start 1105; Stop 1129
aactatggtaaggaatggcaaggta

SEQ ID NO: 354726 - DNA, 25 bp, Artificial
  probe
  misc_feature (1)..(25): SEQ ID NO: 3406; WAN024EYT; Start 1090; Stop 1114
gcctctaagatggtcaactatggta

SEQ ID NO: 354727 - DNA, 25 bp, Artificial
  probe
  misc_feature (1)..(25): SEQ ID NO: 3406; WAN024EYT; Start 1085; Stop 1109
ttgtagcctctaagatggtcaacta

SEQ ID NO: 354728 - DNA, 25 bp, Artificial
  probe
  misc_feature (1)..(25): SEQ ID NO: 3406; WAN024EYT; Start 1271; Stop 1295
taggcatacaaggagttagttctat

SEQ ID NO: 354729 - DNA, 25 bp, Artificial
  probe
  misc_feature (1)..(25): SEQ ID NO: 3406; WAN024EYT; Start 1076; Stop 1100
ttggtgaagttgtagcctctaagat

SEQ ID NO: 354730 - DNA, 25 bp, Artificial
  probe
  misc_feature (1)..(25): SEQ ID NO: 3406; WAN024EYT; Start 1320; Stop 1344
aggttctgataatgtagtgattgac

SEQ ID NO: 354731 - DNA, 25 bp, Artificial
  probe
  misc_feature (1)..(25): SEQ ID NO: 3406; WAN024EYT; Start 1274; Stop 1298
gcatacaaggagttagttctatcaa

SEQ ID NO: 354732 - DNA, 25 bp, Artificial
  probe
  misc_feature (1)..(25): SEQ ID NO: 3406; WAN024EYT; Start 1102; Stop 1126
gtcaactatggtaaggaatggcaag

SEQ ID NO: 354733 - DNA, 25 bp, Artificial
  probe
  misc_feature (1)..(25): SEQ ID NO: 3406; WAN024EYT; Start 1340; Stop 1364
ttgacattcagcaattaacatcaga

SEQ ID NO: 354734 - DNA, 25 bp, Artificial
  probe
  misc_feature (1)..(25): SEQ ID NO: 3406; WAN024EYT; Start 1341; Stop 1365
tgacattcagcaattaacatcagat

SEQ ID NO: 354735 - DNA, 25 bp, Artificial
  probe
  misc_feature (1)..(25): SEQ ID NO: 3406; WAN024EYT; Start 1239; Stop 1263
cttggataagactgtggaagtaaca

SEQ ID NO: 354736 - DNA, 25 bp, Artificial
  probe
  misc_feature (1)..(25): SEQ ID NO: 3406; WAN024EYT; Start 1092; Stop 1116
ctctaagatggtcaactatggtaag

SEQ ID NO: 354737 - DNA, 25 bp, Artificial
  probe
  misc_feature (1)..(25): SEQ ID NO: 3406; WAN024EYT; Start 1081; Stop 1105
gaagttgtagcctctaagatggtca

SEQ ID NO: 354738 - DNA, 25 bp, Artificial
  probe
  misc_feature (1)..(25): SEQ ID NO: 3406; WAN024EYT; Start 1080; Stop 1104
tgaagttgtagcctctaagatggtc

SEQ ID NO: 354739 - DNA, 25 bp, Artificial
  probe
  misc_feature (1)..(25): SEQ ID NO: 3407; WAN024FS3; Start 832; Stop 856
ggttatgtcaatggagtacgctata

SEQ ID NO: 354740 - DNA, 25 bp, Artificial
  probe
  misc_feature (1)..(25): SEQ ID NO: 3407; WAN024FS3; Start 248; Stop 272
aggtgttactgaatggcttgactaa

SEQ ID NO: 354741 - DNA, 25 bp, Artificial
  probe
  misc_feature (1)..(25): SEQ ID NO: 3407; WAN024FS3; Start 827; Stop 851
catctggttatgtcaatggagtacg

SEQ ID NO: 354742 - DNA, 25 bp, Artificial
  probe
  misc_feature (1)..(25): SEQ ID NO: 3407; WAN024FS3; Start 247; Stop 271
gaggtgttactgaatggcttgacta

SEQ ID NO: 354743 - DNA, 25 bp, Artificial
  probe
  misc_feature (1)..(25): SEQ ID NO: 3407; WAN024FS3; Start 831; Stop 855
tggttatgtcaatggagtacgctat

SEQ ID NO: 354744 - DNA, 25 bp, Artificial
  probe
  misc_feature (1)..(25): SEQ ID NO: 3407; WAN024FS3; Start 905; Stop 929
atgcttgtattacagaagatcacct

SEQ ID NO: 354745 - DNA, 25 bp, Artificial
  probe
  misc_feature (1)..(25): SEQ ID NO: 3407; WAN024FS3; Start 902; Stop 926
gcaatgcttgtattacagaagatca

SEQ ID NO: 354746 - DNA, 25 bp, Artificial
  probe
  misc_feature (1)..(25): SEQ ID NO: 3407; WAN024FS3; Start 901; Stop 925
ggcaatgcttgtattacagaagatc

SEQ ID NO: 354747 - DNA, 25 bp, Artificial
  probe
  misc_feature (1)..(25): SEQ ID NO: 3407; WAN024FS3; Start 833; Stop 857
gttatgtcaatggagtacgctataa

SEQ ID NO: 354748 - DNA, 25 bp, Artificial
  probe
  misc_feature (1)..(25): SEQ ID NO: 3407; WAN024FS3; Start 826; Stop 850
gcatctggttatgtcaatggagtac

SEQ ID NO: 354749 - DNA, 25 bp, Artificial
  probe
  misc_feature (1)..(25): SEQ ID NO: 3407; WAN024FS3; Start 900; Stop 924
aggcaatgcttgtattacagaagat

SEQ ID NO: 354750 - DNA, 25 bp, Artificial
  probe
  misc_feature (1)..(25): SEQ ID NO: 3407; WAN024FS3; Start 898; Stop 922
gaaggcaatgcttgtattacagaag

SEQ ID NO: 354751 - DNA, 25 bp, Artificial
  probe
  misc_feature (1)..(25): SEQ ID NO: 3407; WAN024FS3; Start 899; Stop 923
aaggcaatgcttgtattacagaaga

SEQ ID NO: 354752 - DNA, 25 bp, Artificial
  probe
  misc_feature (1)..(25): SEQ ID NO: 3407; WAN024FS3; Start 911; Stop 935
gtattacagaagatcacctgagtca

SEQ ID NO: 354753 - DNA, 25 bp, Artificial
  probe
  misc_feature (1)..(25): SEQ ID NO: 3407; WAN024FS3; Start 910; Stop 934
tgtattacagaagatcacctgagtc

SEQ ID NO: 354754 - DNA, 25 bp, Artificial
  probe
  misc_feature (1)..(25): SEQ ID NO: 3407; WAN024FS3; Start 907; Stop 931
gcttgtattacagaagatcacctga

SEQ ID NO: 354755 - DNA, 25 bp, Artificial
  probe
  misc_feature (1)..(25): SEQ ID NO: 3407; WAN024FS3; Start 904; Stop 928
aatgcttgtattacagaagatcacc

SEQ ID NO: 354756 - DNA, 25 bp, Artificial
  probe
  misc_feature (1)..(25): SEQ ID NO: 3407; WAN024FS3; Start 825; Stop 849
ggcatctggttatgtcaatggagta

SEQ ID NO: 354757 - DNA, 25 bp, Artificial
  probe
  misc_feature (1)..(25): SEQ ID NO: 3407; WAN024FS3; Start 906; Stop 930
tgcttgtattacagaagatcacctg

SEQ ID NO: 354758 - DNA, 25 bp, Artificial
  probe
  misc_feature (1)..(25): SEQ ID NO: 3407; WAN024FS3; Start 893; Stop 917
ttgaggaaggcaatgcttgtattac

SEQ ID NO: 354759 - DNA, 25 bp, Artificial
  probe
  misc_feature (1)..(25): SEQ ID NO: 3407; WAN024FS3; Start 892; Stop 916
gttgaggaaggcaatgcttgtatta

SEQ ID NO: 354760 - DNA, 25 bp, Artificial
  probe
  misc_feature (1)..(25): SEQ ID NO: 3407; WAN024FS3; Start 909; Stop 933
ttgtattacagaagatcacctgagt

SEQ ID NO: 354761 - DNA, 25 bp, Artificial
  probe
  misc_feature (1)..(25): SEQ ID NO: 3407; WAN024FS3; Start 830; Stop 854
ctggttatgtcaatggagtacgcta

SEQ ID NO: 354762 - DNA, 25 bp, Artificial
  probe
  misc_feature (1)..(25): SEQ ID NO: 3407; WAN024FS3; Start 912; Stop 936
tattacagaagatcacctgagtcaa

SEQ ID NO: 354763 - DNA, 25 bp, Artificial
  probe
  misc_feature (1)..(25): SEQ ID NO: 3407; WAN024FS3; Start 908; Stop 932
cttgtattacagaagatcacctgag

SEQ ID NO: 354764 - DNA, 25 bp, Artificial
  probe
  misc_feature (1)..(25): SEQ ID NO: 3407; WAN024FS3; Start 897; Stop 921
ggaaggcaatgcttgtattacagaa

SEQ ID NO: 354765 - DNA, 25 bp, Artificial
  probe
  misc_feature (1)..(25): SEQ ID NO: 3407; WAN024FS3; Start 787; Stop 811
tactgggacaatgctgaatactatg

SEQ ID NO: 354766 - DNA, 25 bp, Artificial
  probe
  misc_feature (1)..(25): SEQ ID NO: 3407; WAN024FS3; Start 903; Stop 927
caatgcttgtattacagaagatcac

SEQ ID NO: 354767 - DNA, 25 bp, Artificial
  probe
  misc_feature (1)..(25): SEQ ID NO: 3407; WAN024FS3; Start 1027; Stop 1051
tttgctggactttatggagaaattg

SEQ ID NO: 354768 - DNA, 25 bp, Artificial
  probe
  misc_feature (1)..(25): SEQ ID NO: 3407; WAN024FS3; Start 390; Stop 414
ccagacctttgatgataagatgttg

SEQ ID NO: 354769 - DNA, 25 bp, Artificial
  probe
  misc_feature (1)..(25): SEQ ID NO: 3407; WAN024FS3; Start 389; Stop 413
tccagacctttgatgataagatgtt

SEQ ID NO: 354770 - DNA, 25 bp, Artificial
  probe
  misc_feature (1)..(25): SEQ ID NO: 3407; WAN024FS3; Start 895; Stop 919
gaggaaggcaatgcttgtattacag

SEQ ID NO: 354771 - DNA, 25 bp, Artificial
  probe
  misc_feature (1)..(25): SEQ ID NO: 3407; WAN024FS3; Start 428; Stop 452
gcagtcatttggagaaggatattta

SEQ ID NO: 354772 - DNA, 25 bp, Artificial
  probe
  misc_feature (1)..(25): SEQ ID NO: 3408; WAN024DTH; Start 51; Stop 75
ctatatcgcagagcctatcctcaag

SEQ ID NO: 354773 - DNA, 25 bp, Artificial
  probe
  misc_feature (1)..(25): SEQ ID NO: 3408; WAN024DTH; Start 132; Stop 156
taacccagaaggagtagaatatgga

SEQ ID NO: 354774 - DNA, 25 bp, Artificial
  probe
  misc_feature (1)..(25): SEQ ID NO: 3408; WAN024DTH; Start 135; Stop 159
cccagaaggagtagaatatggaaac

SEQ ID NO: 354775 - DNA, 25 bp, Artificial
  probe
  misc_feature (1)..(25): SEQ ID NO: 3408; WAN024DTH; Start 134; Stop 158
acccagaaggagtagaatatggaaa

SEQ ID NO: 354776 - DNA, 25 bp, Artificial
  probe
  misc_feature (1)..(25): SEQ ID NO: 3408; WAN024DTH; Start 133; Stop 157
aacccagaaggagtagaatatggaa

SEQ ID NO: 354777 - DNA, 25 bp, Artificial
  probe
  misc_feature (1)..(25): SEQ ID NO: 3408; WAN024DTH; Start 52; Stop 76
tatatcgcagagcctatcctcaagc

SEQ ID NO: 354778 - DNA, 25 bp, Artificial
  probe
  misc_feature (1)..(25): SEQ ID NO: 3408; WAN024DTH; Start 50; Stop 74
gctatatcgcagagcctatcctcaa

SEQ ID NO: 354779 - DNA, 25 bp, Artificial
  probe
  misc_feature (1)..(25): SEQ ID NO: 3408; WAN024DTH; Start 101; Stop 125
ttgacggcgcttattcactatacaa

SEQ ID NO: 354780 - DNA, 25 bp, Artificial
  probe
  misc_feature (1)..(25): SEQ ID NO: 3408; WAN024DTH; Start 100; Stop 124
cttgacggcgcttattcactataca

SEQ ID NO: 354781 - DNA, 25 bp, Artificial
  probe
  misc_feature (1)..(25): SEQ ID NO: 3408; WAN024DTH; Start 48; Stop 72
cagctatatcgcagagcctatcctc

SEQ ID NO: 354782 - DNA, 25 bp, Artificial
  probe
  misc_feature (1)..(25): SEQ ID NO: 3408; WAN024DTH; Start 49; Stop 73
agctatatcgcagagcctatcctca

SEQ ID NO: 354783 - DNA, 25 bp, Artificial
  probe
  misc_feature (1)..(25): SEQ ID NO: 3408; WAN024DTH; Start 99; Stop 123
ccttgacggcgcttattcactatac

SEQ ID NO: 354784 - DNA, 25 bp, Artificial
  probe
  misc_feature (1)..(25): SEQ ID NO: 3408; WAN024DTH; Start 102; Stop 126
tgacggcgcttattcactatacaaa

SEQ ID NO: 354785 - DNA, 25 bp, Artificial
  probe
  misc_feature (1)..(25): SEQ ID NO: 3408; WAN024DTH; Start 98; Stop 122
accttgacggcgcttattcactata

SEQ ID NO: 354786 - DNA, 25 bp, Artificial
  probe
  misc_feature (1)..(25): SEQ ID NO: 3408; WAN024DTH; Start 106; Stop 130
ggcgcttattcactatacaaaatgg

SEQ ID NO: 354787 - DNA, 25 bp, Artificial
  probe
  misc_feature (1)..(25): SEQ ID NO: 3408; WAN024DTH; Start 105; Stop 129
cggcgcttattcactatacaaaatg

SEQ ID NO: 354788 - DNA, 25 bp, Artificial
  probe
  misc_feature (1)..(25): SEQ ID NO: 3408; WAN024DTH; Start 104; Stop 128
acggcgcttattcactatacaaaat

SEQ ID NO: 354789 - DNA, 25 bp, Artificial
  probe
  misc_feature (1)..(25): SEQ ID NO: 3408; WAN024DTH; Start 103; Stop 127
gacggcgcttattcactatacaaaa

SEQ ID NO: 354790 - DNA, 25 bp, Artificial
  probe
  misc_feature (1)..(25): SEQ ID NO: 3408; WAN024DTH; Start 97; Stop 121
aaccttgacggcgcttattcactat

SEQ ID NO: 354791 - DNA, 25 bp, Artificial
  probe
  misc_feature (1)..(25): SEQ ID NO: 3408; WAN024DTH; Start 96; Stop 120
aaaccttgacggcgcttattcacta

SEQ ID NO: 354792 - DNA, 25 bp, Artificial
  probe
  misc_feature (1)..(25): SEQ ID NO: 3409; WAN024CTF; Start 735; Stop 759
cgtgttcagattacagatatgacca

SEQ ID NO: 354793 - DNA, 25 bp, Artificial
  probe
  misc_feature (1)..(25): SEQ ID NO: 3409; WAN024CTF; Start 550; Stop 574
gaattgataccatcgcaacggatat

SEQ ID NO: 354794 - DNA, 25 bp, Artificial
  probe
  misc_feature (1)..(25): SEQ ID NO: 3409; WAN024CTF; Start 736; Stop 760
gtgttcagattacagatatgaccat

SEQ ID NO: 354795 - DNA, 25 bp, Artificial
  probe
  misc_feature (1)..(25): SEQ ID NO: 3409; WAN024CTF; Start 737; Stop 761
tgttcagattacagatatgaccatt

SEQ ID NO: 354796 - DNA, 25 bp, Artificial
  probe
  misc_feature (1)..(25): SEQ ID NO: 3409; WAN024CTF; Start 742; Stop 766
agattacagatatgaccattatggc

SEQ ID NO: 354797 - DNA, 25 bp, Artificial
  probe
  misc_feature (1)..(25): SEQ ID NO: 3409; WAN024CTF; Start 551; Stop 575
aattgataccatcgcaacggatatc

SEQ ID NO: 354798 - DNA, 25 bp, Artificial
  probe
  misc_feature (1)..(25): SEQ ID NO: 3409; WAN024CTF; Start 738; Stop 762
gttcagattacagatatgaccatta

SEQ ID NO: 354799 - DNA, 25 bp, Artificial
  probe
  misc_feature (1)..(25): SEQ ID NO: 3409; WAN024CTF; Start 133; Stop 157
ttctaacaggacgacggatagacag

SEQ ID NO: 354800 - DNA, 25 bp, Artificial
  probe
  misc_feature (1)..(25): SEQ ID NO: 3409; WAN024CTF; Start 740; Stop 764
tcagattacagatatgaccattatg

SEQ ID NO: 354801 - DNA, 25 bp, Artificial
  probe
  misc_feature (1)..(25): SEQ ID NO: 3409; WAN024CTF; Start 132; Stop 156
gttctaacaggacgacggatagaca

SEQ ID NO: 354802 - DNA, 25 bp, Artificial
  probe
  misc_feature (1)..(25): SEQ ID NO: 3409; WAN024CTF; Start 743; Stop 767
gattacagatatgaccattatggcc

SEQ ID NO: 354803 - DNA, 25 bp, Artificial
  probe
  misc_feature (1)..(25): SEQ ID NO: 3409; WAN024CTF; Start 741; Stop 765
cagattacagatatgaccattatgg

SEQ ID NO: 354804 - DNA, 25 bp, Artificial
  probe
  misc_feature (1)..(25): SEQ ID NO: 3409; WAN024CTF; Start 549; Stop 573
cgaattgataccatcgcaacggata

SEQ ID NO: 354805 - DNA, 25 bp, Artificial
  probe
  misc_feature (1)..(25): SEQ ID NO: 3409; WAN024CTF; Start 134; Stop 158
tctaacaggacgacggatagacaga

SEQ ID NO: 354806 - DNA, 25 bp, Artificial
  probe
  misc_feature (1)..(25): SEQ ID NO: 3409; WAN024CTF; Start 555; Stop 579
gataccatcgcaacggatatcaagg

SEQ ID NO: 354807 - DNA, 25 bp, Artificial
  probe
  misc_feature (1)..(25): SEQ ID NO: 3409; WAN024CTF; Start 739; Stop 763
ttcagattacagatatgaccattat

SEQ ID NO: 354808 - DNA, 25 bp, Artificial
  probe
  misc_feature (1)..(25): SEQ ID NO: 3409; WAN024CTF; Start 120; Stop 144
ggtgaggatgtcgttctaacaggac

SEQ ID NO: 354809 - DNA, 25 bp, Artificial
  probe
  misc_feature (1)..(25): SEQ ID NO: 3409; WAN024CTF; Start 655; Stop 679
cgtccgtttaccaaggaatagaagc

SEQ ID NO: 354810 - DNA, 25 bp, Artificial
  probe
  misc_feature (1)..(25): SEQ ID NO: 3409; WAN024CTF; Start 654; Stop 678
gcgtccgtttaccaaggaatagaag

SEQ ID NO: 354811 - DNA, 25 bp, Artificial
  probe
  misc_feature (1)..(25): SEQ ID NO: 3409; WAN024CTF; Start 556; Stop 580
ataccatcgcaacggatatcaaggt

SEQ ID NO: 354812 - DNA, 25 bp, Artificial
  probe
  misc_feature (1)..(25): SEQ ID NO: 3409; WAN024CTF; Start 552; Stop 576
attgataccatcgcaacggatatca

SEQ ID NO: 354813 - DNA, 25 bp, Artificial
  probe
  misc_feature (1)..(25): SEQ ID NO: 3409; WAN024CTF; Start 653; Stop 677
tgcgtccgtttaccaaggaatagaa

SEQ ID NO: 354814 - DNA, 25 bp, Artificial
  probe
  misc_feature (1)..(25): SEQ ID NO: 3409; WAN024CTF; Start 117; Stop 141
cagggtgaggatgtcgttctaacag

SEQ ID NO: 354815 - DNA, 25 bp, Artificial
  probe
  misc_feature (1)..(25): SEQ ID NO: 3409; WAN024CTF; Start 131; Stop 155
cgttctaacaggacgacggatagac

SEQ ID NO: 354816 - DNA, 25 bp, Artificial
  probe
  misc_feature (1)..(25): SEQ ID NO: 3409; WAN024CTF; Start 554; Stop 578
tgataccatcgcaacggatatcaag

SEQ ID NO: 354817 - DNA, 25 bp, Artificial
  probe
  misc_feature (1)..(25): SEQ ID NO: 3409; WAN024CTF; Start 652; Stop 676
ctgcgtccgtttaccaaggaataga

SEQ ID NO: 354818 - DNA, 25 bp, Artificial
  probe
  misc_feature (1)..(25): SEQ ID NO: 3409; WAN024CTF; Start 767; Stop 791
caatcaacaggcgacaggtttcatg

SEQ ID NO: 354819 - DNA, 25 bp, Artificial
  probe
  misc_feature (1)..(25): SEQ ID NO: 3409; WAN024CTF; Start 121; Stop 145
gtgaggatgtcgttctaacaggacg

SEQ ID NO: 354820 - DNA, 25 bp, Artificial
  probe
  misc_feature (1)..(25): SEQ ID NO: 3409; WAN024CTF; Start 557; Stop 581
taccatcgcaacggatatcaaggtg

SEQ ID NO: 354821 - DNA, 25 bp, Artificial
  probe
  misc_feature (1)..(25): SEQ ID NO: 3409; WAN024CTF; Start 451; Stop 475
ttatcaatatggggtcaaccgcagg

SEQ ID NO: 354822 - DNA, 25 bp, Artificial
  probe
  misc_feature (1)..(25): SEQ ID NO: 3410; WAN024D2I; Start 834; Stop 858
gaactggagaagtaactgtaactca

SEQ ID NO: 354823 - DNA, 25 bp, Artificial
  probe
  misc_feature (1)..(25): SEQ ID NO: 3410; WAN024D2I; Start 830; Stop 854
taccgaactggagaagtaactgtaa

SEQ ID NO: 354824 - DNA, 25 bp, Artificial
  probe
  misc_feature (1)..(25): SEQ ID NO: 3410; WAN024D2I; Start 833; Stop 857
cgaactggagaagtaactgtaactc

SEQ ID NO: 354825 - DNA, 25 bp, Artificial
  probe
  misc_feature (1)..(25): SEQ ID NO: 3410; WAN024D2I; Start 835; Stop 859
aactggagaagtaactgtaactcag

SEQ ID NO: 354826 - DNA, 25 bp, Artificial
  probe
  misc_feature (1)..(25): SEQ ID NO: 3410; WAN024D2I; Start 762; Stop 786
agtcttcggatggagaattggaatt

SEQ ID NO: 354827 - DNA, 25 bp, Artificial
  probe
  misc_feature (1)..(25): SEQ ID NO: 3410; WAN024D2I; Start 761; Stop 785
aagtcttcggatggagaattggaat

SEQ ID NO: 354828 - DNA, 25 bp, Artificial
  probe
  misc_feature (1)..(25): SEQ ID NO: 3410; WAN024D2I; Start 62; Stop 86
ctaatcggactgctagtgttattgc

SEQ ID NO: 354829 - DNA, 25 bp, Artificial
  probe
  misc_feature (1)..(25): SEQ ID NO: 3410; WAN024D2I; Start 832; Stop 856
ccgaactggagaagtaactgtaact

SEQ ID NO: 354830 - DNA, 25 bp, Artificial
  probe
  misc_feature (1)..(25): SEQ ID NO: 3410; WAN024D2I; Start 63; Stop 87
taatcggactgctagtgttattgct

SEQ ID NO: 354831 - DNA, 25 bp, Artificial
  probe
  misc_feature (1)..(25): SEQ ID NO: 3410; WAN024D2I; Start 829; Stop 853
ttaccgaactggagaagtaactgta

SEQ ID NO: 354832 - DNA, 25 bp, Artificial
  probe
  misc_feature (1)..(25): SEQ ID NO: 3410; WAN024D2I; Start 827; Stop 851
gattaccgaactggagaagtaactg

SEQ ID NO: 354833 - DNA, 25 bp, Artificial
  probe
  misc_feature (1)..(25): SEQ ID NO: 3410; WAN024D2I; Start 831; Stop 855
accgaactggagaagtaactgtaac

SEQ ID NO: 354834 - DNA, 25 bp, Artificial
  probe
  misc_feature (1)..(25): SEQ ID NO: 3410; WAN024D2I; Start 61; Stop 85
actaatcggactgctagtgttattg

SEQ ID NO: 354835 - DNA, 25 bp, Artificial
  probe
  misc_feature (1)..(25): SEQ ID NO: 3410; WAN024D2I; Start 828; Stop 852
attaccgaactggagaagtaactgt

SEQ ID NO: 354836 - DNA, 25 bp, Artificial
  probe
  misc_feature (1)..(25): SEQ ID NO: 3410; WAN024D2I; Start 709; Stop 733
ttactacgcttcaaacgaggattta

SEQ ID NO: 354837 - DNA, 25 bp, Artificial
  probe
  misc_feature (1)..(25): SEQ ID NO: 3410; WAN024D2I; Start 410; Stop 434
aagaatcgtaaagaaactgggaatg

SEQ ID NO: 354838 - DNA, 25 bp, Artificial
  probe
  misc_feature (1)..(25): SEQ ID NO: 3410; WAN024D2I; Start 409; Stop 433
caagaatcgtaaagaaactgggaat

SEQ ID NO: 354839 - DNA, 25 bp, Artificial
  probe
  misc_feature (1)..(25): SEQ ID NO: 3410; WAN024D2I; Start 407; Stop 431
tacaagaatcgtaaagaaactggga

SEQ ID NO: 354840 - DNA, 25 bp, Artificial
  probe
  misc_feature (1)..(25): SEQ ID NO: 3410; WAN024D2I; Start 408; Stop 432
acaagaatcgtaaagaaactgggaa

SEQ ID NO: 354841 - DNA, 25 bp, Artificial
  probe
  misc_feature (1)..(25): SEQ ID NO: 3410; WAN024D2I; Start 710; Stop 734
tactacgcttcaaacgaggatttag

SEQ ID NO: 354842 - DNA, 25 bp, Artificial
  probe
  misc_feature (1)..(25): SEQ ID NO: 3410; WAN024D2I; Start 708; Stop 732
tttactacgcttcaaacgaggattt

SEQ ID NO: 354843 - DNA, 25 bp, Artificial
  probe
  misc_feature (1)..(25): SEQ ID NO: 3410; WAN024D2I; Start 411; Stop 435
agaatcgtaaagaaactgggaatgg

SEQ ID NO: 354844 - DNA, 25 bp, Artificial
  probe
  misc_feature (1)..(25): SEQ ID NO: 3410; WAN024D2I; Start 458; Stop 482
ggttggcatcaggtcaagaatctaa

SEQ ID NO: 354845 - DNA, 25 bp, Artificial
  probe
  misc_feature (1)..(25): SEQ ID NO: 3410; WAN024D2I; Start 826; Stop 850
ggattaccgaactggagaagtaact

SEQ ID NO: 354846 - DNA, 25 bp, Artificial
  probe
  misc_feature (1)..(25): SEQ ID NO: 3410; WAN024D2I; Start 824; Stop 848
ctggattaccgaactggagaagtaa

SEQ ID NO: 354847 - DNA, 25 bp, Artificial
  probe
  misc_feature (1)..(25): SEQ ID NO: 3410; WAN024D2I; Start 431; Stop 455
aatggttcaacttcttggactcctc

SEQ ID NO: 354848 - DNA, 25 bp, Artificial
  probe
  misc_feature (1)..(25): SEQ ID NO: 3410; WAN024D2I; Start 430; Stop 454
gaatggttcaacttcttggactcct

SEQ ID NO: 354849 - DNA, 25 bp, Artificial
  probe
  misc_feature (1)..(25): SEQ ID NO: 3410; WAN024D2I; Start 418; Stop 442
taaagaaactgggaatggttcaact

SEQ ID NO: 354850 - DNA, 25 bp, Artificial
  probe
  misc_feature (1)..(25): SEQ ID NO: 3410; WAN024D2I; Start 417; Stop 441
gtaaagaaactgggaatggttcaac

SEQ ID NO: 354851 - DNA, 25 bp, Artificial
  probe
  misc_feature (1)..(25): SEQ ID NO: 3410; WAN024D2I; Start 787; Stop 811
caatgttctagttcccaatgttcaa

SEQ ID NO: 354852 - DNA, 25 bp, Artificial
  probe
  misc_feature (1)..(25): SEQ ID NO: 3410; WAN024D2I; Start 786; Stop 810
tcaatgttctagttcccaatgttca

SEQ ID NO: 354853 - DNA, 25 bp, Artificial
  probe
  misc_feature (1)..(25): SEQ ID NO: 3410; WAN024D2I; Start 412; Stop 436
gaatcgtaaagaaactgggaatggt

SEQ ID NO: 354854 - DNA, 25 bp, Artificial
  probe
  misc_feature (1)..(25): SEQ ID NO: 3410; WAN024D2I; Start 823; Stop 847
actggattaccgaactggagaagta

SEQ ID NO: 354855 - DNA, 25 bp, Artificial
  probe
  misc_feature (1)..(25): SEQ ID NO: 3411; WAN024B7S; Start 15; Stop 39
atatacttcgttattgggcggttac

SEQ ID NO: 354856 - DNA, 25 bp, Artificial
  probe
  misc_feature (1)..(25): SEQ ID NO: 3411; WAN024B7S; Start 14; Stop 38
aatatacttcgttattgggcggtta

SEQ ID NO: 354857 - DNA, 25 bp, Artificial
  probe
  misc_feature (1)..(25): SEQ ID NO: 3411; WAN024B7S; Start 16; Stop 40
tatacttcgttattgggcggttact

SEQ ID NO: 354858 - DNA, 25 bp, Artificial
  probe
  misc_feature (1)..(25): SEQ ID NO: 3411; WAN024B7S; Start 17; Stop 41
atacttcgttattgggcggttactt

SEQ ID NO: 354859 - DNA, 25 bp, Artificial
  probe
  misc_feature (1)..(25): SEQ ID NO: 3411; WAN024B7S; Start 18; Stop 42
tacttcgttattgggcggttacttt

SEQ ID NO: 354860 - DNA, 25 bp, Artificial
  probe
  misc_feature (1)..(25): SEQ ID NO: 3411; WAN024B7S; Start 19; Stop 43
acttcgttattgggcggttactttc

SEQ ID NO: 354861 - DNA, 25 bp, Artificial
  probe
  misc_feature (1)..(25): SEQ ID NO: 3411; WAN024B7S; Start 102; Stop 126
gacgaaatttgtcctttctcaagct

SEQ ID NO: 354862 - DNA, 25 bp, Artificial
  probe
  misc_feature (1)..(25): SEQ ID NO: 3411; WAN024B7S; Start 10; Stop 34
tttcaatatacttcgttattgggcg

SEQ ID NO: 354863 - DNA, 25 bp, Artificial
  probe
  misc_feature (1)..(25): SEQ ID NO: 3411; WAN024B7S; Start 20; Stop 44
cttcgttattgggcggttactttcg

SEQ ID NO: 354864 - DNA, 25 bp, Artificial
  probe
  misc_feature (1)..(25): SEQ ID NO: 3411; WAN024B7S; Start 11; Stop 35
ttcaatatacttcgttattgggcgg

SEQ ID NO: 354865 - DNA, 25 bp, Artificial
  probe
  misc_feature (1)..(25): SEQ ID NO: 3411; WAN024B7S; Start 13; Stop 37
caatatacttcgttattgggcggtt

SEQ ID NO: 354866 - DNA, 25 bp, Artificial
  probe
  misc_feature (1)..(25): SEQ ID NO: 3411; WAN024B7S; Start 12; Stop 36
tcaatatacttcgttattgggcggt

SEQ ID NO: 354867 - DNA, 25 bp, Artificial
  probe
  misc_feature (1)..(25): SEQ ID NO: 3411; WAN024B7S; Start 9; Stop 33
ttttcaatatacttcgttattgggc

SEQ ID NO: 354868 - DNA, 25 bp, Artificial
  probe
  misc_feature (1)..(25): SEQ ID NO: 3411; WAN024B7S; Start 21; Stop 45
ttcgttattgggcggttactttcga

SEQ ID NO: 354869 - DNA, 25 bp, Artificial
  probe
  misc_feature (1)..(25): SEQ ID NO: 3411; WAN024B7S; Start 101; Stop 125
ggacgaaatttgtcctttctcaagc

SEQ ID NO: 354870 - DNA, 25 bp, Artificial
  probe
  misc_feature (1)..(25): SEQ ID NO: 3411; WAN024B7S; Start 22; Stop 46
tcgttattgggcggttactttcgaa

SEQ ID NO: 354871 - DNA, 25 bp, Artificial
  probe
  misc_feature (1)..(25): SEQ ID NO: 3412; WAN024DL6; Start 113; Stop 137
tgaacaagctactaagagacctaac

SEQ ID NO: 354872 - DNA, 25 bp, Artificial
  probe
  misc_feature (1)..(25): SEQ ID NO: 3412; WAN024DL6; Start 112; Stop 136
gtgaacaagctactaagagacctaa

SEQ ID NO: 354873 - DNA, 25 bp, Artificial
  probe
  misc_feature (1)..(25): SEQ ID NO: 3412; WAN024DL6; Start 114; Stop 138
gaacaagctactaagagacctaact

SEQ ID NO: 354874 - DNA, 25 bp, Artificial
  probe
  misc_feature (1)..(25): SEQ ID NO: 3412; WAN024DL6; Start 111; Stop 135
tgtgaacaagctactaagagaccta

SEQ ID NO: 354875 - DNA, 25 bp, Artificial
  probe
  misc_feature (1)..(25): SEQ ID NO: 3412; WAN024DL6; Start 37; Stop 61
cagtattggtattctgttgagcagg

SEQ ID NO: 354876 - DNA, 25 bp, Artificial
  probe
  misc_feature (1)..(25): SEQ ID NO: 3412; WAN024DL6; Start 36; Stop 60
gcagtattggtattctgttgagcag

SEQ ID NO: 354877 - DNA, 25 bp, Artificial
  probe
  misc_feature (1)..(25): SEQ ID NO: 3412; WAN024DL6; Start 116; Stop 140
acaagctactaagagacctaactaa

SEQ ID NO: 354878 - DNA, 25 bp, Artificial
  probe
  misc_feature (1)..(25): SEQ ID NO: 3412; WAN024DL6; Start 115; Stop 139
aacaagctactaagagacctaacta

SEQ ID NO: 354879 - DNA, 25 bp, Artificial
  probe
  misc_feature (1)..(25): SEQ ID NO: 3412; WAN024DL6; Start 110; Stop 134
ttgtgaacaagctactaagagacct

SEQ ID NO: 354880 - DNA, 25 bp, Artificial
  probe
  misc_feature (1)..(25): SEQ ID NO: 3412; WAN024DL6; Start 117; Stop 141
caagctactaagagacctaactaat

SEQ ID NO: 354881 - DNA, 25 bp, Artificial
  probe
  misc_feature (1)..(25): SEQ ID NO: 3412; WAN024DL6; Start 34; Stop 58
ttgcagtattggtattctgttgagc

SEQ ID NO: 354882 - DNA, 25 bp, Artificial
  probe
  misc_feature (1)..(25): SEQ ID NO: 3412; WAN024DL6; Start 108; Stop 132
ctttgtgaacaagctactaagagac

SEQ ID NO: 354883 - DNA, 25 bp, Artificial
  probe
  misc_feature (1)..(25): SEQ ID NO: 3412; WAN024DL6; Start 109; Stop 133
tttgtgaacaagctactaagagacc

SEQ ID NO: 354884 - DNA, 25 bp, Artificial
  probe
  misc_feature (1)..(25): SEQ ID NO: 3412; WAN024DL6; Start 33; Stop 57
tttgcagtattggtattctgttgag

SEQ ID NO: 354885 - DNA, 25 bp, Artificial
  probe
  misc_feature (1)..(25): SEQ ID NO: 3412; WAN024DL6; Start 30; Stop 54
gcatttgcagtattggtattctgtt

SEQ ID NO: 354886 - DNA, 25 bp, Artificial
  probe
  misc_feature (1)..(25): SEQ ID NO: 3412; WAN024DL6; Start 32; Stop 56
atttgcagtattggtattctgttga

SEQ ID NO: 354887 - DNA, 25 bp, Artificial
  probe
  misc_feature (1)..(25): SEQ ID NO: 3412; WAN024DL6; Start 31; Stop 55
catttgcagtattggtattctgttg

SEQ ID NO: 354888 - DNA, 25 bp, Artificial
  probe
  misc_feature (1)..(25): SEQ ID NO: 3412; WAN024DL6; Start 107; Stop 131
tctttgtgaacaagctactaagaga

SEQ ID NO: 354889 - DNA, 25 bp, Artificial
  probe
  misc_feature (1)..(25): SEQ ID NO: 3412; WAN024DL6; Start 105; Stop 129
gctctttgtgaacaagctactaaga

SEQ ID NO: 354890 - DNA, 25 bp, Artificial
  probe
  misc_feature (1)..(25): SEQ ID NO: 3412; WAN024DL6; Start 35; Stop 59
tgcagtattggtattctgttgagca

SEQ ID NO: 354891 - DNA, 25 bp, Artificial
  probe
  misc_feature (1)..(25): SEQ ID NO: 3412; WAN024DL6; Start 29; Stop 53
tgcatttgcagtattggtattctgt

SEQ ID NO: 354892 - DNA, 25 bp, Artificial
  probe
  misc_feature (1)..(25): SEQ ID NO: 3412; WAN024DL6; Start 11; Stop 35
ttgattttggttacctcctgcattt

SEQ ID NO: 354893 - DNA, 25 bp, Artificial
  probe
  misc_feature (1)..(25): SEQ ID NO: 3412; WAN024DL6; Start 10; Stop 34
cttgattttggttacctcctgcatt

SEQ ID NO: 354894 - DNA, 25 bp, Artificial
  probe
  misc_feature (1)..(25): SEQ ID NO: 3412; WAN024DL6; Start 12; Stop 36
tgattttggttacctcctgcatttg

SEQ ID NO: 354895 - DNA, 25 bp, Artificial
  probe
  misc_feature (1)..(25): SEQ ID NO: 3412; WAN024DL6; Start 13; Stop 37
gattttggttacctcctgcatttgc

SEQ ID NO: 354896 - DNA, 25 bp, Artificial
  probe
  misc_feature (1)..(25): SEQ ID NO: 3412; WAN024DL6; Start 104; Stop 128
agctctttgtgaacaagctactaag

SEQ ID NO: 354897 - DNA, 25 bp, Artificial
  probe
  misc_feature (1)..(25): SEQ ID NO: 3412; WAN024DL6; Start 9; Stop 33
gcttgattttggttacctcctgcat

SEQ ID NO: 354898 - DNA, 25 bp, Artificial
  probe
  misc_feature (1)..(25): SEQ ID NO: 3412; WAN024DL6; Start 92; Stop 116
ttgaacctgttgagctctttgtgaa

SEQ ID NO: 354899 - DNA, 25 bp, Artificial
  probe
  misc_feature (1)..(25): SEQ ID NO: 3412; WAN024DL6; Start 91; Stop 115
gttgaacctgttgagctctttgtga

SEQ ID NO: 354900 - DNA, 25 bp, Artificial
  probe
  misc_feature (1)..(25): SEQ ID NO: 3412; WAN024DL6; Start 89; Stop 113
ctgttgaacctgttgagctctttgt

SEQ ID NO: 354901 - DNA, 25 bp, Artificial
  probe
  misc_feature (1)..(25): SEQ ID NO: 3412; WAN024DL6; Start 93; Stop 117
tgaacctgttgagctctttgtgaac

SEQ ID NO: 354902 - DNA, 25 bp, Artificial
  probe
  misc_feature (1)..(25): SEQ ID NO: 3412; WAN024DL6; Start 90; Stop 114
tgttgaacctgttgagctctttgtg

SEQ ID NO: 354903 - DNA, 25 bp, Artificial
  probe
  misc_feature (1)..(25): SEQ ID NO: 3412; WAN024DL6; Start 14; Stop 38
attttggttacctcctgcatttgca

SEQ ID NO: 354904 - DNA, 25 bp, Artificial
  probe
  misc_feature (1)..(25): SEQ ID NO: 3414; WAN024C9E; Start 180; Stop 204
agtagagatgtgtgaggagtatgat

SEQ ID NO: 354905 - DNA, 25 bp, Artificial
  probe
  misc_feature (1)..(25): SEQ ID NO: 3414; WAN024C9E; Start 179; Stop 203
cagtagagatgtgtgaggagtatga

SEQ ID NO: 354906 - DNA, 25 bp, Artificial
  probe
  misc_feature (1)..(25): SEQ ID NO: 3414; WAN024C9E; Start 181; Stop 205
gtagagatgtgtgaggagtatgata

SEQ ID NO: 354907 - DNA, 25 bp, Artificial
  probe
  misc_feature (1)..(25): SEQ ID NO: 3414; WAN024C9E; Start 177; Stop 201
ttcagtagagatgtgtgaggagtat

SEQ ID NO: 354908 - DNA, 25 bp, Artificial
  probe
  misc_feature (1)..(25): SEQ ID NO: 3414; WAN024C9E; Start 178; Stop 202
tcagtagagatgtgtgaggagtatg

SEQ ID NO: 354909 - DNA, 25 bp, Artificial
  probe
  misc_feature (1)..(25): SEQ ID NO: 3414; WAN024C9E; Start 176; Stop 200
gttcagtagagatgtgtgaggagta

SEQ ID NO: 354910 - DNA, 25 bp, Artificial
  probe
  misc_feature (1)..(25): SEQ ID NO: 3414; WAN024C9E; Start 57; Stop 81
cttgaccatcagtcctcataagaat

SEQ ID NO: 354911 - DNA, 25 bp, Artificial
  probe
  misc_feature (1)..(25): SEQ ID NO: 3414; WAN024C9E; Start 58; Stop 82
ttgaccatcagtcctcataagaatt

SEQ ID NO: 354912 - DNA, 25 bp, Artificial
  probe
  misc_feature (1)..(25): SEQ ID NO: 3414; WAN024C9E; Start 182; Stop 206
tagagatgtgtgaggagtatgatat

SEQ ID NO: 354913 - DNA, 25 bp, Artificial
  probe
  misc_feature (1)..(25): SEQ ID NO: 3414; WAN024C9E; Start 56; Stop 80
ccttgaccatcagtcctcataagaa

SEQ ID NO: 354914 - DNA, 25 bp, Artificial
  probe
  misc_feature (1)..(25): SEQ ID NO: 3414; WAN024C9E; Start 85; Stop 109
caaactatcaatagcatcggaatcg

SEQ ID NO: 354915 - DNA, 25 bp, Artificial
  probe
  misc_feature (1)..(25): SEQ ID NO: 3414; WAN024C9E; Start 82; Stop 106
tctcaaactatcaatagcatcggaa

SEQ ID NO: 354916 - DNA, 25 bp, Artificial
  probe
  misc_feature (1)..(25): SEQ ID NO: 3414; WAN024C9E; Start 81; Stop 105
ttctcaaactatcaatagcatcgga

SEQ ID NO: 354917 - DNA, 25 bp, Artificial
  probe
  misc_feature (1)..(25): SEQ ID NO: 3414; WAN024C9E; Start 205; Stop 229
atctatcgtcaatgttattgtggct

SEQ ID NO: 354918 - DNA, 25 bp, Artificial
  probe
  misc_feature (1)..(25): SEQ ID NO: 3414; WAN024C9E; Start 84; Stop 108
tcaaactatcaatagcatcggaatc

SEQ ID NO: 354919 - DNA, 25 bp, Artificial
  probe
  misc_feature (1)..(25): SEQ ID NO: 3414; WAN024C9E; Start 83; Stop 107
ctcaaactatcaatagcatcggaat

SEQ ID NO: 354920 - DNA, 25 bp, Artificial
  probe
  misc_feature (1)..(25): SEQ ID NO: 3414; WAN024C9E; Start 80; Stop 104
attctcaaactatcaatagcatcgg

SEQ ID NO: 354921 - DNA, 25 bp, Artificial
  probe
  misc_feature (1)..(25): SEQ ID NO: 3414; WAN024C9E; Start 189; Stop 213
gtgtgaggagtatgatatctatcgt

SEQ ID NO: 354922 - DNA, 25 bp, Artificial
  probe
  misc_feature (1)..(25): SEQ ID NO: 3414; WAN024C9E; Start 188; Stop 212
tgtgtgaggagtatgatatctatcg

SEQ ID NO: 354923 - DNA, 25 bp, Artificial
  probe
  misc_feature (1)..(25): SEQ ID NO: 3414; WAN024C9E; Start 204; Stop 228
tatctatcgtcaatgttattgtggc

SEQ ID NO: 354924 - DNA, 25 bp, Artificial
  probe
  misc_feature (1)..(25): SEQ ID NO: 3414; WAN024C9E; Start 183; Stop 207
agagatgtgtgaggagtatgatatc

SEQ ID NO: 354925 - DNA, 25 bp, Artificial
  probe
  misc_feature (1)..(25): SEQ ID NO: 3414; WAN024C9E; Start 190; Stop 214
tgtgaggagtatgatatctatcgtc

SEQ ID NO: 354926 - DNA, 25 bp, Artificial
  probe
  misc_feature (1)..(25): SEQ ID NO: 3414; WAN024C9E; Start 206; Stop 230
tctatcgtcaatgttattgtggctg

SEQ ID NO: 354927 - DNA, 25 bp, Artificial
  probe
  misc_feature (1)..(25): SEQ ID NO: 3414; WAN024C9E; Start 24; Stop 48
tatggacttgggctttgactacttt

SEQ ID NO: 354928 - DNA, 25 bp, Artificial
  probe
  misc_feature (1)..(25): SEQ ID NO: 3414; WAN024C9E; Start 191; Stop 215
gtgaggagtatgatatctatcgtca

SEQ ID NO: 354929 - DNA, 25 bp, Artificial
  probe
  misc_feature (1)..(25): SEQ ID NO: 3414; WAN024C9E; Start 23; Stop 47
ctatggacttgggctttgactactt

SEQ ID NO: 354930 - DNA, 25 bp, Artificial
  probe
  misc_feature (1)..(25): SEQ ID NO: 3414; WAN024C9E; Start 192; Stop 216
tgaggagtatgatatctatcgtcaa

SEQ ID NO: 354931 - DNA, 25 bp, Artificial
  probe
  misc_feature (1)..(25): SEQ ID NO: 3414; WAN024C9E; Start 79; Stop 103
aattctcaaactatcaatagcatcg

SEQ ID NO: 354932 - DNA, 25 bp, Artificial
  probe
  misc_feature (1)..(25): SEQ ID NO: 3414; WAN024C9E; Start 175; Stop 199
cgttcagtagagatgtgtgaggagt

SEQ ID NO: 354933 - DNA, 25 bp, Artificial
  probe
  misc_feature (1)..(25): SEQ ID NO: 3414; WAN024C9E; Start 36; Stop 60
ctttgactactttggttcagccttg

SEQ ID NO: 354934 - DNA, 25 bp, Artificial
  probe
  misc_feature (1)..(25): SEQ ID NO: 3414; WAN024C9E; Start 59; Stop 83
tgaccatcagtcctcataagaattc

SEQ ID NO: 354935 - DNA, 25 bp, Artificial
  probe
  misc_feature (1)..(25): SEQ ID NO: 3414; WAN024C9E; Start 207; Stop 231
ctatcgtcaatgttattgtggctgc

SEQ ID NO: 354936 - DNA, 25 bp, Artificial
  probe
  misc_feature (1)..(25): SEQ ID NO: 3414; WAN024C9E; Start 195; Stop 219
ggagtatgatatctatcgtcaatgt

SEQ ID NO: 354937 - DNA, 25 bp, Artificial
  probe
  misc_feature (1)..(25): SEQ ID NO: 3416; WAN024CMX; Start 40; Stop 64
cgtcccaaagtgcttaatatcaagg

SEQ ID NO: 354938 - DNA, 25 bp, Artificial
  probe
  misc_feature (1)..(25): SEQ ID NO: 3416; WAN024CMX; Start 41; Stop 65
gtcccaaagtgcttaatatcaaggc

SEQ ID NO: 354939 - DNA, 25 bp, Artificial
  probe
  misc_feature (1)..(25): SEQ ID NO: 3416; WAN024CMX; Start 38; Stop 62
aacgtcccaaagtgcttaatatcaa

SEQ ID NO: 354940 - DNA, 25 bp, Artificial
  probe
  misc_feature (1)..(25): SEQ ID NO: 3416; WAN024CMX; Start 36; Stop 60
agaacgtcccaaagtgcttaatatc

SEQ ID NO: 354941 - DNA, 25 bp, Artificial
  probe
  misc_feature (1)..(25): SEQ ID NO: 3416; WAN024CMX; Start 35; Stop 59
gagaacgtcccaaagtgcttaatat

SEQ ID NO: 354942 - DNA, 25 bp, Artificial
  probe
  misc_feature (1)..(25): SEQ ID NO: 3416; WAN024CMX; Start 37; Stop 61
gaacgtcccaaagtgcttaatatca

SEQ ID NO: 354943 - DNA, 25 bp, Artificial
  probe
  misc_feature (1)..(25): SEQ ID NO: 3416; WAN024CMX; Start 39; Stop 63
acgtcccaaagtgcttaatatcaag

SEQ ID NO: 354944 - DNA, 25 bp, Artificial
  probe
  misc_feature (1)..(25): SEQ ID NO: 3416; WAN024CMX; Start 34; Stop 58
ggagaacgtcccaaagtgcttaata

SEQ ID NO: 354945 - DNA, 25 bp, Artificial
  probe
  misc_feature (1)..(25): SEQ ID NO: 3416; WAN024CMX; Start 42; Stop 66
tcccaaagtgcttaatatcaaggcc

SEQ ID NO: 354946 - DNA, 25 bp, Artificial
  probe
  misc_feature (1)..(25): SEQ ID NO: 3417; WAN024D38; Start 113; Stop 137
tatcggctataacatcaagtagtgc

SEQ ID NO: 354947 - DNA, 25 bp, Artificial
  probe
  misc_feature (1)..(25): SEQ ID NO: 3417; WAN024D38; Start 118; Stop 142
gctataacatcaagtagtgcggtaa

SEQ ID NO: 354948 - DNA, 25 bp, Artificial
  probe
  misc_feature (1)..(25): SEQ ID NO: 3417; WAN024D38; Start 171; Stop 195
attagagcctgtgaagtcaactatt

SEQ ID NO: 354949 - DNA, 25 bp, Artificial
  probe
  misc_feature (1)..(25): SEQ ID NO: 3417; WAN024D38; Start 165; Stop 189
gatagaattagagcctgtgaagtca

SEQ ID NO: 354950 - DNA, 25 bp, Artificial
  probe
  misc_feature (1)..(25): SEQ ID NO: 3417; WAN024D38; Start 164; Stop 188
tgatagaattagagcctgtgaagtc

SEQ ID NO: 354951 - DNA, 25 bp, Artificial
  probe
  misc_feature (1)..(25): SEQ ID NO: 3417; WAN024D38; Start 163; Stop 187
gtgatagaattagagcctgtgaagt

SEQ ID NO: 354952 - DNA, 25 bp, Artificial
  probe
  misc_feature (1)..(25): SEQ ID NO: 3417; WAN024D38; Start 162; Stop 186
tgtgatagaattagagcctgtgaag

SEQ ID NO: 354953 - DNA, 25 bp, Artificial
  probe
  misc_feature (1)..(25): SEQ ID NO: 3417; WAN024D38; Start 170; Stop 194
aattagagcctgtgaagtcaactat

SEQ ID NO: 354954 - DNA, 25 bp, Artificial
  probe
  misc_feature (1)..(25): SEQ ID NO: 3417; WAN024D38; Start 169; Stop 193
gaattagagcctgtgaagtcaacta

SEQ ID NO: 354955 - DNA, 25 bp, Artificial
  probe
  misc_feature (1)..(25): SEQ ID NO: 3417; WAN024D38; Start 167; Stop 191
tagaattagagcctgtgaagtcaac

SEQ ID NO: 354956 - DNA, 25 bp, Artificial
  probe
  misc_feature (1)..(25): SEQ ID NO: 3417; WAN024D38; Start 161; Stop 185
ttgtgatagaattagagcctgtgaa

SEQ ID NO: 354957 - DNA, 25 bp, Artificial
  probe
  misc_feature (1)..(25): SEQ ID NO: 3417; WAN024D38; Start 166; Stop 190
atagaattagagcctgtgaagtcaa

SEQ ID NO: 354958 - DNA, 25 bp, Artificial
  probe
  misc_feature (1)..(25): SEQ ID NO: 3417; WAN024D38; Start 172; Stop 196
ttagagcctgtgaagtcaactattc

SEQ ID NO: 354959 - DNA, 25 bp, Artificial
  probe
  misc_feature (1)..(25): SEQ ID NO: 3417; WAN024D38; Start 173; Stop 197
tagagcctgtgaagtcaactattct

SEQ ID NO: 354960 - DNA, 25 bp, Artificial
  probe
  misc_feature (1)..(25): SEQ ID NO: 3417; WAN024D38; Start 168; Stop 192
agaattagagcctgtgaagtcaact

SEQ ID NO: 354961 - DNA, 25 bp, Artificial
  probe
  misc_feature (1)..(25): SEQ ID NO: 3417; WAN024D38; Start 174; Stop 198
agagcctgtgaagtcaactattctt

SEQ ID NO: 354962 - DNA, 25 bp, Artificial
  probe
  misc_feature (1)..(25): SEQ ID NO: 3417; WAN024D38; Start 112; Stop 136
ttatcggctataacatcaagtagtg

SEQ ID NO: 354963 - DNA, 25 bp, Artificial
  probe
  misc_feature (1)..(25): SEQ ID NO: 3417; WAN024D38; Start 117; Stop 141
ggctataacatcaagtagtgcggta

SEQ ID NO: 354964 - DNA, 25 bp, Artificial
  probe
  misc_feature (1)..(25): SEQ ID NO: 3417; WAN024D38; Start 114; Stop 138
atcggctataacatcaagtagtgcg

SEQ ID NO: 354965 - DNA, 25 bp, Artificial
  probe
  misc_feature (1)..(25): SEQ ID NO: 3417; WAN024D38; Start 160; Stop 184
tttgtgatagaattagagcctgtga

SEQ ID NO: 354966 - DNA, 25 bp, Artificial
  probe
  misc_feature (1)..(25): SEQ ID NO: 3417; WAN024D38; Start 159; Stop 183
ctttgtgatagaattagagcctgtg

SEQ ID NO: 354967 - DNA, 25 bp, Artificial
  probe
  misc_feature (1)..(25): SEQ ID NO: 3417; WAN024D38; Start 119; Stop 143
ctataacatcaagtagtgcggtaaa

SEQ ID NO: 354968 - DNA, 25 bp, Artificial
  probe
  misc_feature (1)..(25): SEQ ID NO: 3417; WAN024D38; Start 62; Stop 86
atttgaatgaccttacccgtttgac

SEQ ID NO: 354969 - DNA, 25 bp, Artificial
  probe
  misc_feature (1)..(25): SEQ ID NO: 3417; WAN024D38; Start 61; Stop 85
catttgaatgaccttacccgtttga

SEQ ID NO: 354970 - DNA, 25 bp, Artificial
  probe
  misc_feature (1)..(25): SEQ ID NO: 3417; WAN024D38; Start 63; Stop 87
tttgaatgaccttacccgtttgaca

SEQ ID NO: 354971 - DNA, 25 bp, Artificial
  probe
  misc_feature (1)..(25): SEQ ID NO: 3417; WAN024D38; Start 175; Stop 199
gagcctgtgaagtcaactattcttc

SEQ ID NO: 354972 - DNA, 25 bp, Artificial
  probe
  misc_feature (1)..(25): SEQ ID NO: 3417; WAN024D38; Start 153; Stop 177
gcaccgctttgtgatagaattagag

SEQ ID NO: 354973 - DNA, 25 bp, Artificial
  probe
  misc_feature (1)..(25): SEQ ID NO: 3417; WAN024D38; Start 64; Stop 88
ttgaatgaccttacccgtttgacag

SEQ ID NO: 354974 - DNA, 25 bp, Artificial
  probe
  misc_feature (1)..(25): SEQ ID NO: 3417; WAN024D38; Start 158; Stop 182
gctttgtgatagaattagagcctgt

SEQ ID NO: 354975 - DNA, 25 bp, Artificial
  probe
  misc_feature (1)..(25): SEQ ID NO: 3417; WAN024D38; Start 121; Stop 145
ataacatcaagtagtgcggtaaaag

SEQ ID NO: 354976 - DNA, 25 bp, Artificial
  probe
  misc_feature (1)..(25): SEQ ID NO: 3417; WAN024D38; Start 115; Stop 139
tcggctataacatcaagtagtgcgg

SEQ ID NO: 354977 - DNA, 25 bp, Artificial
  probe
  misc_feature (1)..(25): SEQ ID NO: 3417; WAN024D38; Start 99; Stop 123
aggagatgaaaagttatcggctata

SEQ ID NO: 354978 - DNA, 25 bp, Artificial
  probe
  misc_feature (1)..(25): SEQ ID NO: 3417; WAN024D38; Start 98; Stop 122
taggagatgaaaagttatcggctat

SEQ ID NO: 354979 - DNA, 25 bp, Artificial
  probe
  misc_feature (1)..(25): SEQ ID NO: 3418; WAN024CFA; Start 116; Stop 140
ctcgtgtctactataaggtcaatcc

SEQ ID NO: 354980 - DNA, 25 bp, Artificial
  probe
  misc_feature (1)..(25): SEQ ID NO: 3418; WAN024CFA; Start 617; Stop 641
cgaccattaccaacatacctaagaa

SEQ ID NO: 354981 - DNA, 25 bp, Artificial
  probe
  misc_feature (1)..(25): SEQ ID NO: 3418; WAN024CFA; Start 609; Stop 633
taagaatccgaccattaccaacata

SEQ ID NO: 354982 - DNA, 25 bp, Artificial
  probe
  misc_feature (1)..(25): SEQ ID NO: 3418; WAN024CFA; Start 608; Stop 632
ttaagaatccgaccattaccaacat

SEQ ID NO: 354983 - DNA, 25 bp, Artificial
  probe
  misc_feature (1)..(25): SEQ ID NO: 3418; WAN024CFA; Start 610; Stop 634
aagaatccgaccattaccaacatac

SEQ ID NO: 354984 - DNA, 25 bp, Artificial
  probe
  misc_feature (1)..(25): SEQ ID NO: 3418; WAN024CFA; Start 842; Stop 866
acaatcgtaaggataatcaagtcac

SEQ ID NO: 354985 - DNA, 25 bp, Artificial
  probe
  misc_feature (1)..(25): SEQ ID NO: 3418; WAN024CFA; Start 841; Stop 865
cacaatcgtaaggataatcaagtca

SEQ ID NO: 354986 - DNA, 25 bp, Artificial
  probe
  misc_feature (1)..(25): SEQ ID NO: 3418; WAN024CFA; Start 614; Stop 638
atccgaccattaccaacatacctaa

SEQ ID NO: 354987 - DNA, 25 bp, Artificial
  probe
  misc_feature (1)..(25): SEQ ID NO: 3418; WAN024CFA; Start 613; Stop 637
aatccgaccattaccaacataccta

SEQ ID NO: 354988 - DNA, 25 bp, Artificial
  probe
  misc_feature (1)..(25): SEQ ID NO: 3418; WAN024CFA; Start 840; Stop 864
tcacaatcgtaaggataatcaagtc

SEQ ID NO: 354989 - DNA, 25 bp, Artificial
  probe
  misc_feature (1)..(25): SEQ ID NO: 3418; WAN024CFA; Start 567; Stop 591
agtgagtgtctatgtagatggttct

SEQ ID NO: 354990 - DNA, 25 bp, Artificial
  probe
  misc_feature (1)..(25): SEQ ID NO: 3418; WAN024CFA; Start 568; Stop 592
gtgagtgtctatgtagatggttctg

SEQ ID NO: 354991 - DNA, 25 bp, Artificial
  probe
  misc_feature (1)..(25): SEQ ID NO: 3418; WAN024CFA; Start 607; Stop 631
gttaagaatccgaccattaccaaca

SEQ ID NO: 354992 - DNA, 25 bp, Artificial
  probe
  misc_feature (1)..(25): SEQ ID NO: 3418; WAN024CFA; Start 596; Stop 620
atatggtactggttaagaatccgac

SEQ ID NO: 354993 - DNA, 25 bp, Artificial
  probe
  misc_feature (1)..(25): SEQ ID NO: 3418; WAN024CFA; Start 571; Stop 595
agtgtctatgtagatggttctggaa

SEQ ID NO: 354994 - DNA, 25 bp, Artificial
  probe
  misc_feature (1)..(25): SEQ ID NO: 3418; WAN024CFA; Start 595; Stop 619
aatatggtactggttaagaatccga

SEQ ID NO: 354995 - DNA, 25 bp, Artificial
  probe
  misc_feature (1)..(25): SEQ ID NO: 3418; WAN024CFA; Start 566; Stop 590
tagtgagtgtctatgtagatggttc

SEQ ID NO: 354996 - DNA, 25 bp, Artificial
  probe
  misc_feature (1)..(25): SEQ ID NO: 3418; WAN024CFA; Start 839; Stop 863
ttcacaatcgtaaggataatcaagt

SEQ ID NO: 354997 - DNA, 25 bp, Artificial
  probe
  misc_feature (1)..(25): SEQ ID NO: 3418; WAN024CFA; Start 616; Stop 640
ccgaccattaccaacatacctaaga

SEQ ID NO: 354998 - DNA, 25 bp, Artificial
  probe
  misc_feature (1)..(25): SEQ ID NO: 3418; WAN024CFA; Start 615; Stop 639
tccgaccattaccaacatacctaag

SEQ ID NO: 354999 - DNA, 25 bp, Artificial
  probe
  misc_feature (1)..(25): SEQ ID NO: 3418; WAN024CFA; Start 570; Stop 594
gagtgtctatgtagatggttctgga

SEQ ID NO: 355000 - DNA, 25 bp, Artificial
  probe
  misc_feature (1)..(25): SEQ ID NO: 3418; WAN024CFA; Start 849; Stop 873
taaggataatcaagtcacggtatcg

SEQ ID NO: 355001 - DNA, 25 bp, Artificial
  probe
  misc_feature (1)..(25): SEQ ID NO: 3418; WAN024CFA; Start 569; Stop 593
tgagtgtctatgtagatggttctgg

SEQ ID NO: 355002 - DNA, 25 bp, Artificial
  probe
  misc_feature (1)..(25): SEQ ID NO: 3418; WAN024CFA; Start 848; Stop 872
gtaaggataatcaagtcacggtatc

SEQ ID NO: 355003 - DNA, 25 bp, Artificial
  probe
  misc_feature (1)..(25): SEQ ID NO: 3418; WAN024CFA; Start 118; Stop 142
cgtgtctactataaggtcaatcctc

SEQ ID NO: 355004 - DNA, 25 bp, Artificial
  probe
  misc_feature (1)..(25): SEQ ID NO: 3418; WAN024CFA; Start 115; Stop 139
cctcgtgtctactataaggtcaatc

SEQ ID NO: 355005 - DNA, 25 bp, Artificial
  probe
  misc_feature (1)..(25): SEQ ID NO: 3418; WAN024CFA; Start 117; Stop 141
tcgtgtctactataaggtcaatcct

SEQ ID NO: 355006 - DNA, 25 bp, Artificial
  probe
  misc_feature (1)..(25): SEQ ID NO: 3418; WAN024CFA; Start 544; Stop 568
aagaccgtccactctgcttatatag

SEQ ID NO: 355007 - DNA, 25 bp, Artificial
  probe
  misc_feature (1)..(25): SEQ ID NO: 3418; WAN024CFA; Start 867; Stop 891
ggtatcgctgacagtggagtatatc

SEQ ID NO: 355008 - DNA, 25 bp, Artificial
  probe
  misc_feature (1)..(25): SEQ ID NO: 3418; WAN024CFA; Start 612; Stop 636
gaatccgaccattaccaacatacct

SEQ ID NO: 355009 - DNA, 25 bp, Artificial
  probe
  misc_feature (1)..(25): SEQ ID NO: 3418; WAN024CFA; Start 611; Stop 635
agaatccgaccattaccaacatacc

SEQ ID NO: 355010 - DNA, 25 bp, Artificial
  probe
  misc_feature (1)..(25): SEQ ID NO: 3418; WAN024CFA; Start 425; Stop 449
atattcctgtatcgtcttctgtaag

SEQ ID NO: 355011 - DNA, 25 bp, Artificial
  probe
  misc_feature (1)..(25): SEQ ID NO: 3418; WAN024CFA; Start 119; Stop 143
gtgtctactataaggtcaatcctca

SEQ ID NO: 355012 - DNA, 25 bp, Artificial
  probe
  misc_feature (1)..(25): SEQ ID NO: 3419; WAN024CGJ; Start 613; Stop 637
tctatgttaccgattatcaatgcca

SEQ ID NO: 355013 - DNA, 25 bp, Artificial
  probe
  misc_feature (1)..(25): SEQ ID NO: 3419; WAN024CGJ; Start 612; Stop 636
ctctatgttaccgattatcaatgcc

SEQ ID NO: 355014 - DNA, 25 bp, Artificial
  probe
  misc_feature (1)..(25): SEQ ID NO: 3419; WAN024CGJ; Start 153; Stop 177
cgataatgccaacgctatgaatatg

SEQ ID NO: 355015 - DNA, 25 bp, Artificial
  probe
  misc_feature (1)..(25): SEQ ID NO: 3419; WAN024CGJ; Start 152; Stop 176
acgataatgccaacgctatgaatat

SEQ ID NO: 355016 - DNA, 25 bp, Artificial
  probe
  misc_feature (1)..(25): SEQ ID NO: 3419; WAN024CGJ; Start 151; Stop 175
aacgataatgccaacgctatgaata

SEQ ID NO: 355017 - DNA, 25 bp, Artificial
  probe
  misc_feature (1)..(25): SEQ ID NO: 3419; WAN024CGJ; Start 150; Stop 174
taacgataatgccaacgctatgaat

SEQ ID NO: 355018 - DNA, 25 bp, Artificial
  probe
  misc_feature (1)..(25): SEQ ID NO: 3419; WAN024CGJ; Start 611; Stop 635
actctatgttaccgattatcaatgc

SEQ ID NO: 355019 - DNA, 25 bp, Artificial
  probe
  misc_feature (1)..(25): SEQ ID NO: 3419; WAN024CGJ; Start 614; Stop 638
ctatgttaccgattatcaatgccat

SEQ ID NO: 355020 - DNA, 25 bp, Artificial
  probe
  misc_feature (1)..(25): SEQ ID NO: 3419; WAN024CGJ; Start 619; Stop 643
ttaccgattatcaatgccattatgc

SEQ ID NO: 355021 - DNA, 25 bp, Artificial
  probe
  misc_feature (1)..(25): SEQ ID NO: 3419; WAN024CGJ; Start 149; Stop 173
ttaacgataatgccaacgctatgaa

SEQ ID NO: 355022 - DNA, 25 bp, Artificial
  probe
  misc_feature (1)..(25): SEQ ID NO: 3419; WAN024CGJ; Start 624; Stop 648
gattatcaatgccattatgcctgtc

SEQ ID NO: 355023 - DNA, 25 bp, Artificial
  probe
  misc_feature (1)..(25): SEQ ID NO: 3419; WAN024CGJ; Start 593; Stop 617
cagcattgaaccttggtaactctat

SEQ ID NO: 355024 - DNA, 25 bp, Artificial
  probe
  misc_feature (1)..(25): SEQ ID NO: 3419; WAN024CGJ; Start 625; Stop 649
attatcaatgccattatgcctgtct

SEQ ID NO: 355025 - DNA, 25 bp, Artificial
  probe
  misc_feature (1)..(25): SEQ ID NO: 3419; WAN024CGJ; Start 74; Stop 98
ctcttgaagtatcagcgtctatgaa

SEQ ID NO: 355026 - DNA, 25 bp, Artificial
  probe
  misc_feature (1)..(25): SEQ ID NO: 3419; WAN024CGJ; Start 626; Stop 650
ttatcaatgccattatgcctgtctt

SEQ ID NO: 355027 - DNA, 25 bp, Artificial
  probe
  misc_feature (1)..(25): SEQ ID NO: 3419; WAN024CGJ; Start 75; Stop 99
tcttgaagtatcagcgtctatgaac

SEQ ID NO: 355028 - DNA, 25 bp, Artificial
  probe
  misc_feature (1)..(25): SEQ ID NO: 3419; WAN024CGJ; Start 848; Stop 872
gacttgctgataatcttggagactc

SEQ ID NO: 355029 - DNA, 25 bp, Artificial
  probe
  misc_feature (1)..(25): SEQ ID NO: 3419; WAN024CGJ; Start 594; Stop 618
agcattgaaccttggtaactctatg

SEQ ID NO: 355030 - DNA, 25 bp, Artificial
  probe
  misc_feature (1)..(25): SEQ ID NO: 3419; WAN024CGJ; Start 595; Stop 619
gcattgaaccttggtaactctatgt

SEQ ID NO: 355031 - DNA, 25 bp, Artificial
  probe
  misc_feature (1)..(25): SEQ ID NO: 3419; WAN024CGJ; Start 596; Stop 620
cattgaaccttggtaactctatgtt

SEQ ID NO: 355032 - DNA, 25 bp, Artificial
  probe
  misc_feature (1)..(25): SEQ ID NO: 3419; WAN024CGJ; Start 620; Stop 644
taccgattatcaatgccattatgcc

SEQ ID NO: 355033 - DNA, 25 bp, Artificial
  probe
  misc_feature (1)..(25): SEQ ID NO: 3419; WAN024CGJ; Start 617; Stop 641
tgttaccgattatcaatgccattat

SEQ ID NO: 355034 - DNA, 25 bp, Artificial
  probe
  misc_feature (1)..(25): SEQ ID NO: 3419; WAN024CGJ; Start 76; Stop 100
cttgaagtatcagcgtctatgaacc

SEQ ID NO: 355035 - DNA, 25 bp, Artificial
  probe
  misc_feature (1)..(25): SEQ ID NO: 3419; WAN024CGJ; Start 618; Stop 642
gttaccgattatcaatgccattatg

SEQ ID NO: 355036 - DNA, 25 bp, Artificial
  probe
  misc_feature (1)..(25): SEQ ID NO: 3419; WAN024CGJ; Start 616; Stop 640
atgttaccgattatcaatgccatta

SEQ ID NO: 355037 - DNA, 25 bp, Artificial
  probe
  misc_feature (1)..(25): SEQ ID NO: 3419; WAN024CGJ; Start 615; Stop 639
tatgttaccgattatcaatgccatt

SEQ ID NO: 355038 - DNA, 25 bp, Artificial
  probe
  misc_feature (1)..(25): SEQ ID NO: 3419; WAN024CGJ; Start 845; Stop 869
gaggacttgctgataatcttggaga

SEQ ID NO: 355039 - DNA, 25 bp, Artificial
  probe
  misc_feature (1)..(25): SEQ ID NO: 3419; WAN024CGJ; Start 849; Stop 873
acttgctgataatcttggagactca

SEQ ID NO: 355040 - DNA, 25 bp, Artificial
  probe
  misc_feature (1)..(25): SEQ ID NO: 3419; WAN024CGJ; Start 623; Stop 647
cgattatcaatgccattatgcctgt

SEQ ID NO: 355041 - DNA, 25 bp, Artificial
  probe
  misc_feature (1)..(25): SEQ ID NO: 3419; WAN024CGJ; Start 627; Stop 651
tatcaatgccattatgcctgtcttg

SEQ ID NO: 355042 - DNA, 25 bp, Artificial
  probe
  misc_feature (1)..(25): SEQ ID NO: 3419; WAN024CGJ; Start 78; Stop 102
tgaagtatcagcgtctatgaaccaa

SEQ ID NO: 355043 - DNA, 25 bp, Artificial
  probe
  misc_feature (1)..(25): SEQ ID NO: 3419; WAN024CGJ; Start 77; Stop 101
ttgaagtatcagcgtctatgaacca

SEQ ID NO: 355044 - DNA, 25 bp, Artificial
  probe
  misc_feature (1)..(25): SEQ ID NO: 3419; WAN024CGJ; Start 847; Stop 871
ggacttgctgataatcttggagact

SEQ ID NO: 355045 - DNA, 25 bp, Artificial
  probe
  misc_feature (1)..(25): SEQ ID NO: 3420; WAN024DK6; Start 48; Stop 72
tgagtacacttatggtattgatgcc

SEQ ID NO: 355046 - DNA, 25 bp, Artificial
  probe
  misc_feature (1)..(25): SEQ ID NO: 3420; WAN024DK6; Start 47; Stop 71
ttgagtacacttatggtattgatgc

SEQ ID NO: 355047 - DNA, 25 bp, Artificial
  probe
  misc_feature (1)..(25): SEQ ID NO: 3420; WAN024DK6; Start 49; Stop 73
gagtacacttatggtattgatgccc

SEQ ID NO: 355048 - DNA, 25 bp, Artificial
  probe
  misc_feature (1)..(25): SEQ ID NO: 3420; WAN024DK6; Start 104; Stop 128
ggtatgctcttgtcgaaacttcttt

SEQ ID NO: 355049 - DNA, 25 bp, Artificial
  probe
  misc_feature (1)..(25): SEQ ID NO: 3420; WAN024DK6; Start 44; Stop 68
actttgagtacacttatggtattga

SEQ ID NO: 355050 - DNA, 25 bp, Artificial
  probe
  misc_feature (1)..(25): SEQ ID NO: 3420; WAN024DK6; Start 56; Stop 80
cttatggtattgatgcccctaaaca

SEQ ID NO: 355051 - DNA, 25 bp, Artificial
  probe
  misc_feature (1)..(25): SEQ ID NO: 3420; WAN024DK6; Start 55; Stop 79
acttatggtattgatgcccctaaac

SEQ ID NO: 355052 - DNA, 25 bp, Artificial
  probe
  misc_feature (1)..(25): SEQ ID NO: 3420; WAN024DK6; Start 54; Stop 78
cacttatggtattgatgcccctaaa

SEQ ID NO: 355053 - DNA, 25 bp, Artificial
  probe
  misc_feature (1)..(25): SEQ ID NO: 3420; WAN024DK6; Start 124; Stop 148
tcttttgactcacttgaccatctaa

SEQ ID NO: 355054 - DNA, 25 bp, Artificial
  probe
  misc_feature (1)..(25): SEQ ID NO: 3420; WAN024DK6; Start 123; Stop 147
ttcttttgactcacttgaccatcta

SEQ ID NO: 355055 - DNA, 25 bp, Artificial
  probe
  misc_feature (1)..(25): SEQ ID NO: 3420; WAN024DK6; Start 118; Stop 142
gaaacttcttttgactcacttgacc

SEQ ID NO: 355056 - DNA, 25 bp, Artificial
  probe
  misc_feature (1)..(25): SEQ ID NO: 3420; WAN024DK6; Start 52; Stop 76
tacacttatggtattgatgccccta

SEQ ID NO: 355057 - DNA, 25 bp, Artificial
  probe
  misc_feature (1)..(25): SEQ ID NO: 3420; WAN024DK6; Start 57; Stop 81
ttatggtattgatgcccctaaacat

SEQ ID NO: 355058 - DNA, 25 bp, Artificial
  probe
  misc_feature (1)..(25): SEQ ID NO: 3420; WAN024DK6; Start 125; Stop 149
cttttgactcacttgaccatctaaa

SEQ ID NO: 355059 - DNA, 25 bp, Artificial
  probe
  misc_feature (1)..(25): SEQ ID NO: 3420; WAN024DK6; Start 120; Stop 144
aacttcttttgactcacttgaccat

SEQ ID NO: 355060 - DNA, 25 bp, Artificial
  probe
  misc_feature (1)..(25): SEQ ID NO: 3420; WAN024DK6; Start 117; Stop 141
cgaaacttcttttgactcacttgac

SEQ ID NO: 355061 - DNA, 25 bp, Artificial
  probe
  misc_feature (1)..(25): SEQ ID NO: 3420; WAN024DK6; Start 122; Stop 146
cttcttttgactcacttgaccatct

SEQ ID NO: 355062 - DNA, 25 bp, Artificial
  probe
  misc_feature (1)..(25): SEQ ID NO: 3420; WAN024DK6; Start 46; Stop 70
tttgagtacacttatggtattgatg

SEQ ID NO: 355063 - DNA, 25 bp, Artificial
  probe
  misc_feature (1)..(25): SEQ ID NO: 3420; WAN024DK6; Start 119; Stop 143
aaacttcttttgactcacttgacca

SEQ ID NO: 355064 - DNA, 25 bp, Artificial
  probe
  misc_feature (1)..(25): SEQ ID NO: 3420; WAN024DK6; Start 121; Stop 145
acttcttttgactcacttgaccatc

SEQ ID NO: 355065 - DNA, 25 bp, Artificial
  probe
  misc_feature (1)..(25): SEQ ID NO: 3420; WAN024DK6; Start 53; Stop 77
acacttatggtattgatgcccctaa

SEQ ID NO: 355066 - DNA, 25 bp, Artificial
  probe
  misc_feature (1)..(25): SEQ ID NO: 3420; WAN024DK6; Start 126; Stop 150
ttttgactcacttgaccatctaaat

SEQ ID NO: 355067 - DNA, 25 bp, Artificial
  probe
  misc_feature (1)..(25): SEQ ID NO: 3420; WAN024DK6; Start 100; Stop 124
aaagggtatgctcttgtcgaaactt

SEQ ID NO: 355068 - DNA, 25 bp, Artificial
  probe
  misc_feature (1)..(25): SEQ ID NO: 3420; WAN024DK6; Start 45; Stop 69
ctttgagtacacttatggtattgat

SEQ ID NO: 355069 - DNA, 25 bp, Artificial
  probe
  misc_feature (1)..(25): SEQ ID NO: 3420; WAN024DK6; Start 103; Stop 127
gggtatgctcttgtcgaaacttctt

SEQ ID NO: 355070 - DNA, 25 bp, Artificial
  probe
  misc_feature (1)..(25): SEQ ID NO: 3420; WAN024DK6; Start 101; Stop 125
aagggtatgctcttgtcgaaacttc

SEQ ID NO: 355071 - DNA, 25 bp, Artificial
  probe
  misc_feature (1)..(25): SEQ ID NO: 3420; WAN024DK6; Start 106; Stop 130
tatgctcttgtcgaaacttcttttg

SEQ ID NO: 355072 - DNA, 25 bp, Artificial
  probe
  misc_feature (1)..(25): SEQ ID NO: 3420; WAN024DK6; Start 105; Stop 129
gtatgctcttgtcgaaacttctttt

SEQ ID NO: 355073 - DNA, 25 bp, Artificial
  probe
  misc_feature (1)..(25): SEQ ID NO: 3420; WAN024DK6; Start 116; Stop 140
tcgaaacttcttttgactcacttga

SEQ ID NO: 355074 - DNA, 25 bp, Artificial
  probe
  misc_feature (1)..(25): SEQ ID NO: 3420; WAN024DK6; Start 51; Stop 75
gtacacttatggtattgatgcccct

SEQ ID NO: 355075 - DNA, 25 bp, Artificial
  probe
  misc_feature (1)..(25): SEQ ID NO: 3420; WAN024DK6; Start 50; Stop 74
agtacacttatggtattgatgcccc

SEQ ID NO: 355076 - DNA, 25 bp, Artificial
  probe
  misc_feature (1)..(25): SEQ ID NO: 3420; WAN024DK6; Start 107; Stop 131
atgctcttgtcgaaacttcttttga

SEQ ID NO: 355077 - DNA, 25 bp, Artificial
  probe
  misc_feature (1)..(25): SEQ ID NO: 3420; WAN024DK6; Start 102; Stop 126
agggtatgctcttgtcgaaacttct

SEQ ID NO: 355078 - DNA, 25 bp, Artificial
  probe
  misc_feature (1)..(25): SEQ ID NO: 3421; WAN024DQ9; Start 44; Stop 68
atcatattgaccttaccaagactgt

SEQ ID NO: 355079 - DNA, 25 bp, Artificial
  probe
  misc_feature (1)..(25): SEQ ID NO: 3421; WAN024DQ9; Start 45; Stop 69
tcatattgaccttaccaagactgtc

SEQ ID NO: 355080 - DNA, 25 bp, Artificial
  probe
  misc_feature (1)..(25): SEQ ID NO: 3421; WAN024DQ9; Start 43; Stop 67
aatcatattgaccttaccaagactg

SEQ ID NO: 355081 - DNA, 25 bp, Artificial
  probe
  misc_feature (1)..(25): SEQ ID NO: 3421; WAN024DQ9; Start 46; Stop 70
catattgaccttaccaagactgtct

SEQ ID NO: 355082 - DNA, 25 bp, Artificial
  probe
  misc_feature (1)..(25): SEQ ID NO: 3421; WAN024DQ9; Start 8; Stop 32
atatcatttactacaccgtcgcaat

SEQ ID NO: 355083 - DNA, 25 bp, Artificial
  probe
  misc_feature (1)..(25): SEQ ID NO: 3421; WAN024DQ9; Start 9; Stop 33
tatcatttactacaccgtcgcaatc

SEQ ID NO: 355084 - DNA, 25 bp, Artificial
  probe
  misc_feature (1)..(25): SEQ ID NO: 3421; WAN024DQ9; Start 42; Stop 66
taatcatattgaccttaccaagact

SEQ ID NO: 355085 - DNA, 25 bp, Artificial
  probe
  misc_feature (1)..(25): SEQ ID NO: 3421; WAN024DQ9; Start 41; Stop 65
ttaatcatattgaccttaccaagac

SEQ ID NO: 355086 - DNA, 25 bp, Artificial
  probe
  misc_feature (1)..(25): SEQ ID NO: 3421; WAN024DQ9; Start 25; Stop 49
gtcgcaatcgtagctattaatcata

SEQ ID NO: 355087 - DNA, 25 bp, Artificial
  probe
  misc_feature (1)..(25): SEQ ID NO: 3421; WAN024DQ9; Start 24; Stop 48
cgtcgcaatcgtagctattaatcat

SEQ ID NO: 355088 - DNA, 25 bp, Artificial
  probe
  misc_feature (1)..(25): SEQ ID NO: 3421; WAN024DQ9; Start 26; Stop 50
tcgcaatcgtagctattaatcatat

SEQ ID NO: 355089 - DNA, 25 bp, Artificial
  probe
  misc_feature (1)..(25): SEQ ID NO: 3421; WAN024DQ9; Start 47; Stop 71
atattgaccttaccaagactgtctt

SEQ ID NO: 355090 - DNA, 25 bp, Artificial
  probe
  misc_feature (1)..(25): SEQ ID NO: 3421; WAN024DQ9; Start 7; Stop 31
gatatcatttactacaccgtcgcaa

SEQ ID NO: 355091 - DNA, 25 bp, Artificial
  probe
  misc_feature (1)..(25): SEQ ID NO: 3421; WAN024DQ9; Start 12; Stop 36
catttactacaccgtcgcaatcgta

SEQ ID NO: 355092 - DNA, 25 bp, Artificial
  probe
  misc_feature (1)..(25): SEQ ID NO: 3421; WAN024DQ9; Start 27; Stop 51
cgcaatcgtagctattaatcatatt

SEQ ID NO: 355093 - DNA, 25 bp, Artificial
  probe
  misc_feature (1)..(25): SEQ ID NO: 3421; WAN024DQ9; Start 37; Stop 61
gctattaatcatattgaccttacca

SEQ ID NO: 355094 - DNA, 25 bp, Artificial
  probe
  misc_feature (1)..(25): SEQ ID NO: 3421; WAN024DQ9; Start 10; Stop 34
atcatttactacaccgtcgcaatcg

SEQ ID NO: 355095 - DNA, 25 bp, Artificial
  probe
  misc_feature (1)..(25): SEQ ID NO: 3421; WAN024DQ9; Start 36; Stop 60
agctattaatcatattgaccttacc

SEQ ID NO: 355096 - DNA, 25 bp, Artificial
  probe
  misc_feature (1)..(25): SEQ ID NO: 3421; WAN024DQ9; Start 32; Stop 56
tcgtagctattaatcatattgacct

SEQ ID NO: 355097 - DNA, 25 bp, Artificial
  probe
  misc_feature (1)..(25): SEQ ID NO: 3421; WAN024DQ9; Start 23; Stop 47
ccgtcgcaatcgtagctattaatca

SEQ ID NO: 355098 - DNA, 25 bp, Artificial
  probe
  misc_feature (1)..(25): SEQ ID NO: 3421; WAN024DQ9; Start 22; Stop 46
accgtcgcaatcgtagctattaatc

SEQ ID NO: 355099 - DNA, 25 bp, Artificial
  probe
  misc_feature (1)..(25): SEQ ID NO: 3421; WAN024DQ9; Start 21; Stop 45
caccgtcgcaatcgtagctattaat

SEQ ID NO: 355100 - DNA, 25 bp, Artificial
  probe
  misc_feature (1)..(25): SEQ ID NO: 3421; WAN024DQ9; Start 55; Stop 79
cttaccaagactgtctttgagaaag

SEQ ID NO: 355101 - DNA, 25 bp, Artificial
  probe
  misc_feature (1)..(25): SEQ ID NO: 3421; WAN024DQ9; Start 48; Stop 72
tattgaccttaccaagactgtcttt

SEQ ID NO: 355102 - DNA, 25 bp, Artificial
  probe
  misc_feature (1)..(25): SEQ ID NO: 3421; WAN024DQ9; Start 54; Stop 78
ccttaccaagactgtctttgagaaa

SEQ ID NO: 355103 - DNA, 25 bp, Artificial
  probe
  misc_feature (1)..(25): SEQ ID NO: 3421; WAN024DQ9; Start 49; Stop 73
attgaccttaccaagactgtctttg

SEQ ID NO: 355104 - DNA, 25 bp, Artificial
  probe
  misc_feature (1)..(25): SEQ ID NO: 3421; WAN024DQ9; Start 40; Stop 64
attaatcatattgaccttaccaaga

SEQ ID NO: 355105 - DNA, 25 bp, Artificial
  probe
  misc_feature (1)..(25): SEQ ID NO: 3421; WAN024DQ9; Start 53; Stop 77
accttaccaagactgtctttgagaa

SEQ ID NO: 355106 - DNA, 25 bp, Artificial
  probe
  misc_feature (1)..(25): SEQ ID NO: 3421; WAN024DQ9; Start 33; Stop 57
cgtagctattaatcatattgacctt

SEQ ID NO: 355107 - DNA, 25 bp, Artificial
  probe
  misc_feature (1)..(25): SEQ ID NO: 3421; WAN024DQ9; Start 19; Stop 43
tacaccgtcgcaatcgtagctatta

SEQ ID NO: 355108 - DNA, 25 bp, Artificial
  probe
  misc_feature (1)..(25): SEQ ID NO: 3421; WAN024DQ9; Start 50; Stop 74
ttgaccttaccaagactgtctttga

SEQ ID NO: 355109 - DNA, 25 bp, Artificial
  probe
  misc_feature (1)..(25): SEQ ID NO: 3421; WAN024DQ9; Start 13; Stop 37
atttactacaccgtcgcaatcgtag

SEQ ID NO: 355110 - DNA, 25 bp, Artificial
  probe
  misc_feature (1)..(25): SEQ ID NO: 3421; WAN024DQ9; Start 52; Stop 76
gaccttaccaagactgtctttgaga

SEQ ID NO: 355111 - DNA, 25 bp, Artificial
  probe
  misc_feature (1)..(25): SEQ ID NO: 3422; WAN024DNG; Start 14; Stop 38
gtaagatgcttcgcaatacctacac

SEQ ID NO: 355112 - DNA, 25 bp, Artificial
  probe
  misc_feature (1)..(25): SEQ ID NO: 3422; WAN024DNG; Start 15; Stop 39
taagatgcttcgcaatacctacaca

SEQ ID NO: 355113 - DNA, 25 bp, Artificial
  probe
  misc_feature (1)..(25): SEQ ID NO: 3422; WAN024DNG; Start 8; Stop 32
catcaggtaagatgcttcgcaatac

SEQ ID NO: 355114 - DNA, 25 bp, Artificial
  probe
  misc_feature (1)..(25): SEQ ID NO: 3422; WAN024DNG; Start 7; Stop 31
tcatcaggtaagatgcttcgcaata

SEQ ID NO: 355115 - DNA, 25 bp, Artificial
  probe
  misc_feature (1)..(25): SEQ ID NO: 3422; WAN024DNG; Start 6; Stop 30
ttcatcaggtaagatgcttcgcaat

SEQ ID NO: 355116 - DNA, 25 bp, Artificial
  probe
  misc_feature (1)..(25): SEQ ID NO: 3422; WAN024DNG; Start 13; Stop 37
ggtaagatgcttcgcaatacctaca

SEQ ID NO: 355117 - DNA, 25 bp, Artificial
  probe
  misc_feature (1)..(25): SEQ ID NO: 3422; WAN024DNG; Start 21; Stop 45
gcttcgcaatacctacacacctgat

SEQ ID NO: 355118 - DNA, 25 bp, Artificial
  probe
  misc_feature (1)..(25): SEQ ID NO: 3422; WAN024DNG; Start 9; Stop 33
atcaggtaagatgcttcgcaatacc

SEQ ID NO: 355119 - DNA, 25 bp, Artificial
  probe
  misc_feature (1)..(25): SEQ ID NO: 3422; WAN024DNG; Start 16; Stop 40
aagatgcttcgcaatacctacacac

SEQ ID NO: 355120 - DNA, 25 bp, Artificial
  probe
  misc_feature (1)..(25): SEQ ID NO: 3422; WAN024DNG; Start 5; Stop 29
cttcatcaggtaagatgcttcgcaa

SEQ ID NO: 355121 - DNA, 25 bp, Artificial
  probe
  misc_feature (1)..(25): SEQ ID NO: 3422; WAN024DNG; Start 1; Stop 25
ctggcttcatcaggtaagatgcttc

SEQ ID NO: 355122 - DNA, 25 bp, Artificial
  probe
  misc_feature (1)..(25): SEQ ID NO: 3422; WAN024DNG; Start 47; Stop 71
gttactacgttggcaacttaggtgc

SEQ ID NO: 355123 - DNA, 25 bp, Artificial
  probe
  misc_feature (1)..(25): SEQ ID NO: 3422; WAN024DNG; Start 18; Stop 42
gatgcttcgcaatacctacacacct

SEQ ID NO: 355124 - DNA, 25 bp, Artificial
  probe
  misc_feature (1)..(25): SEQ ID NO: 3422; WAN024DNG; Start 17; Stop 41
agatgcttcgcaatacctacacacc

SEQ ID NO: 355125 - DNA, 25 bp, Artificial
  probe
  misc_feature (1)..(25): SEQ ID NO: 3422; WAN024DNG; Start 2; Stop 26
tggcttcatcaggtaagatgcttcg

SEQ ID NO: 355126 - DNA, 25 bp, Artificial
  probe
  misc_feature (1)..(25): SEQ ID NO: 3423; WAN024FUQ; Start 842; Stop 866
gtattattgatgtcattcgtgccat

SEQ ID NO: 355127 - DNA, 25 bp, Artificial
  probe
  misc_feature (1)..(25): SEQ ID NO: 3423; WAN024FUQ; Start 1024; Stop 1048
caaggtgtaacagttatcaaggatg

SEQ ID NO: 355128 - DNA, 25 bp, Artificial
  probe
  misc_feature (1)..(25): SEQ ID NO: 3423; WAN024FUQ; Start 1023; Stop 1047
ccaaggtgtaacagttatcaaggat

SEQ ID NO: 355129 - DNA, 25 bp, Artificial
  probe
  misc_feature (1)..(25): SEQ ID NO: 3423; WAN024FUQ; Start 1025; Stop 1049
aaggtgtaacagttatcaaggatgc

SEQ ID NO: 355130 - DNA, 25 bp, Artificial
  probe
  misc_feature (1)..(25): SEQ ID NO: 3423; WAN024FUQ; Start 841; Stop 865
ggtattattgatgtcattcgtgcca

SEQ ID NO: 355131 - DNA, 25 bp, Artificial
  probe
  misc_feature (1)..(25): SEQ ID NO: 3423; WAN024FUQ; Start 517; Stop 541
agacctattcattatgagttgccaa

SEQ ID NO: 355132 - DNA, 25 bp, Artificial
  probe
  misc_feature (1)..(25): SEQ ID NO: 3423; WAN024FUQ; Start 516; Stop 540
aagacctattcattatgagttgcca

SEQ ID NO: 355133 - DNA, 25 bp, Artificial
  probe
  misc_feature (1)..(25): SEQ ID NO: 3423; WAN024FUQ; Start 843; Stop 867
tattattgatgtcattcgtgccatg

SEQ ID NO: 355134 - DNA, 25 bp, Artificial
  probe
  misc_feature (1)..(25): SEQ ID NO: 3423; WAN024FUQ; Start 1026; Stop 1050
aggtgtaacagttatcaaggatgct

SEQ ID NO: 355135 - DNA, 25 bp, Artificial
  probe
  misc_feature (1)..(25): SEQ ID NO: 3423; WAN024FUQ; Start 1118; Stop 1142
cagatattactcctacggcagatgg

SEQ ID NO: 355136 - DNA, 25 bp, Artificial
  probe
  misc_feature (1)..(25): SEQ ID NO: 3423; WAN024FUQ; Start 518; Stop 542
gacctattcattatgagttgccaat

SEQ ID NO: 355137 - DNA, 25 bp, Artificial
  probe
  misc_feature (1)..(25): SEQ ID NO: 3423; WAN024FUQ; Start 1029; Stop 1053
tgtaacagttatcaaggatgctgag

SEQ ID NO: 355138 - DNA, 25 bp, Artificial
  probe
  misc_feature (1)..(25): SEQ ID NO: 3423; WAN024FUQ; Start 1028; Stop 1052
gtgtaacagttatcaaggatgctga

SEQ ID NO: 355139 - DNA, 25 bp, Artificial
  probe
  misc_feature (1)..(25): SEQ ID NO: 3423; WAN024FUQ; Start 519; Stop 543
acctattcattatgagttgccaatt

SEQ ID NO: 355140 - DNA, 25 bp, Artificial
  probe
  misc_feature (1)..(25): SEQ ID NO: 3423; WAN024FUQ; Start 113; Stop 137
ctatcagccaccgttccattatctt

SEQ ID NO: 355141 - DNA, 25 bp, Artificial
  probe
  misc_feature (1)..(25): SEQ ID NO: 3423; WAN024FUQ; Start 1031; Stop 1055
taacagttatcaaggatgctgagga

SEQ ID NO: 355142 - DNA, 25 bp, Artificial
  probe
  misc_feature (1)..(25): SEQ ID NO: 3423; WAN024FUQ; Start 1030; Stop 1054
gtaacagttatcaaggatgctgagg

SEQ ID NO: 355143 - DNA, 25 bp, Artificial
  probe
  misc_feature (1)..(25): SEQ ID NO: 3423; WAN024FUQ; Start 515; Stop 539
taagacctattcattatgagttgcc

SEQ ID NO: 355144 - DNA, 25 bp, Artificial
  probe
  misc_feature (1)..(25): SEQ ID NO: 3423; WAN024FUQ; Start 1117; Stop 1141
gcagatattactcctacggcagatg

SEQ ID NO: 355145 - DNA, 25 bp, Artificial
  probe
  misc_feature (1)..(25): SEQ ID NO: 3423; WAN024FUQ; Start 1116; Stop 1140
agcagatattactcctacggcagat

SEQ ID NO: 355146 - DNA, 25 bp, Artificial
  probe
  misc_feature (1)..(25): SEQ ID NO: 3423; WAN024FUQ; Start 1027; Stop 1051
ggtgtaacagttatcaaggatgctg

SEQ ID NO: 355147 - DNA, 25 bp, Artificial
  probe
  misc_feature (1)..(25): SEQ ID NO: 3423; WAN024FUQ; Start 372; Stop 396
cgaagtagagatgtttggagatgat

SEQ ID NO: 355148 - DNA, 25 bp, Artificial
  probe
  misc_feature (1)..(25): SEQ ID NO: 3423; WAN024FUQ; Start 1099; Stop 1123
gccttaaatagtatgggagcagata

SEQ ID NO: 355149 - DNA, 25 bp, Artificial
  probe
  misc_feature (1)..(25): SEQ ID NO: 3423; WAN024FUQ; Start 163; Stop 187
aaggtttatgatattctgcgaggtg

SEQ ID NO: 355150 - DNA, 25 bp, Artificial
  probe
  misc_feature (1)..(25): SEQ ID NO: 3423; WAN024FUQ; Start 162; Stop 186
caaggtttatgatattctgcgaggt

SEQ ID NO: 355151 - DNA, 25 bp, Artificial
  probe
  misc_feature (1)..(25): SEQ ID NO: 3423; WAN024FUQ; Start 129; Stop 153
cattatctttggaagtttggctgag

SEQ ID NO: 355152 - DNA, 25 bp, Artificial
  probe
  misc_feature (1)..(25): SEQ ID NO: 3423; WAN024FUQ; Start 228; Stop 252
tgttgaaattgaggataaagatggg

SEQ ID NO: 355153 - DNA, 25 bp, Artificial
  probe
  misc_feature (1)..(25): SEQ ID NO: 3423; WAN024FUQ; Start 111; Stop 135
gtctatcagccaccgttccattatc

SEQ ID NO: 355154 - DNA, 25 bp, Artificial
  probe
  misc_feature (1)..(25): SEQ ID NO: 3423; WAN024FUQ; Start 308; Stop 332
ttaatatgggaaattctggcacctc

SEQ ID NO: 355155 - DNA, 25 bp, Artificial
  probe
  misc_feature (1)..(25): SEQ ID NO: 3423; WAN024FUQ; Start 307; Stop 331
cttaatatgggaaattctggcacct

SEQ ID NO: 355156 - DNA, 25 bp, Artificial
  probe
  misc_feature (1)..(25): SEQ ID NO: 3423; WAN024FUQ; Start 1276; Stop 1300
gccatcaataccagctatcctagtt

SEQ ID NO: 355157 - DNA, 25 bp, Artificial
  probe
  misc_feature (1)..(25): SEQ ID NO: 3423; WAN024FUQ; Start 165; Stop 189
ggtttatgatattctgcgaggtgaa

SEQ ID NO: 355158 - DNA, 25 bp, Artificial
  probe
  misc_feature (1)..(25): SEQ ID NO: 3423; WAN024FUQ; Start 1296; Stop 1320
tagtttctttgatgatttggagagc

SEQ ID NO: 355159 - DNA, 25 bp, Artificial
  probe
  misc_feature (1)..(25): SEQ ID NO: 3424; WAN024CUT; Start 441; Stop 465
cattattgattccatccagaccatc

SEQ ID NO: 355160 - DNA, 25 bp, Artificial
  probe
  misc_feature (1)..(25): SEQ ID NO: 3424; WAN024CUT; Start 440; Stop 464
tcattattgattccatccagaccat

SEQ ID NO: 355161 - DNA, 25 bp, Artificial
  probe
  misc_feature (1)..(25): SEQ ID NO: 3424; WAN024CUT; Start 438; Stop 462
tctcattattgattccatccagacc

SEQ ID NO: 355162 - DNA, 25 bp, Artificial
  probe
  misc_feature (1)..(25): SEQ ID NO: 3424; WAN024CUT; Start 242; Stop 266
aatcaactcttctcctacaagtctc

SEQ ID NO: 355163 - DNA, 25 bp, Artificial
  probe
  misc_feature (1)..(25): SEQ ID NO: 3424; WAN024CUT; Start 439; Stop 463
ctcattattgattccatccagacca

SEQ ID NO: 355164 - DNA, 25 bp, Artificial
  probe
  misc_feature (1)..(25): SEQ ID NO: 3424; WAN024CUT; Start 243; Stop 267
atcaactcttctcctacaagtctca

SEQ ID NO: 355165 - DNA, 25 bp, Artificial
  probe
  misc_feature (1)..(25): SEQ ID NO: 3424; WAN024CUT; Start 245; Stop 269
caactcttctcctacaagtctcaac

SEQ ID NO: 355166 - DNA, 25 bp, Artificial
  probe
  misc_feature (1)..(25): SEQ ID NO: 3424; WAN024CUT; Start 244; Stop 268
tcaactcttctcctacaagtctcaa

SEQ ID NO: 355167 - DNA, 25 bp, Artificial
  probe
  misc_feature (1)..(25): SEQ ID NO: 3424; WAN024CUT; Start 437; Stop 461
ttctcattattgattccatccagac

SEQ ID NO: 355168 - DNA, 25 bp, Artificial
  probe
  misc_feature (1)..(25): SEQ ID NO: 3424; WAN024CUT; Start 246; Stop 270
aactcttctcctacaagtctcaacc

SEQ ID NO: 355169 - DNA, 25 bp, Artificial
  probe
  misc_feature (1)..(25): SEQ ID NO: 3424; WAN024CUT; Start 552; Stop 576
taacattgccatctttatcgtaggt

SEQ ID NO: 355170 - DNA, 25 bp, Artificial
  probe
  misc_feature (1)..(25): SEQ ID NO: 3424; WAN024CUT; Start 1072; Stop 1096
tacaaagacaagccaactaatcctc

SEQ ID NO: 355171 - DNA, 25 bp, Artificial
  probe
  misc_feature (1)..(25): SEQ ID NO: 3424; WAN024CUT; Start 1071; Stop 1095
ctacaaagacaagccaactaatcct

SEQ ID NO: 355172 - DNA, 25 bp, Artificial
  probe
  misc_feature (1)..(25): SEQ ID NO: 3424; WAN024CUT; Start 555; Stop 579
cattgccatctttatcgtaggtcat

SEQ ID NO: 355173 - DNA, 25 bp, Artificial
  probe
  misc_feature (1)..(25): SEQ ID NO: 3424; WAN024CUT; Start 553; Stop 577
aacattgccatctttatcgtaggtc

SEQ ID NO: 355174 - DNA, 25 bp, Artificial
  probe
  misc_feature (1)..(25): SEQ ID NO: 3424; WAN024CUT; Start 1176; Stop 1200
tgctaaactgggctttactaagatt

SEQ ID NO: 355175 - DNA, 25 bp, Artificial
  probe
  misc_feature (1)..(25): SEQ ID NO: 3424; WAN024CUT; Start 1175; Stop 1199
ctgctaaactgggctttactaagat

SEQ ID NO: 355176 - DNA, 25 bp, Artificial
  probe
  misc_feature (1)..(25): SEQ ID NO: 3424; WAN024CUT; Start 1177; Stop 1201
gctaaactgggctttactaagattt

SEQ ID NO: 355177 - DNA, 25 bp, Artificial
  probe
  misc_feature (1)..(25): SEQ ID NO: 3424; WAN024CUT; Start 551; Stop 575
ataacattgccatctttatcgtagg

SEQ ID NO: 355178 - DNA, 25 bp, Artificial
  probe
  misc_feature (1)..(25): SEQ ID NO: 3424; WAN024CUT; Start 429; Stop 453
gccagactttctcattattgattcc

SEQ ID NO: 355179 - DNA, 25 bp, Artificial
  probe
  misc_feature (1)..(25): SEQ ID NO: 3424; WAN024CUT; Start 998; Stop 1022
tcaaatctgctggtggtgttaaatt

SEQ ID NO: 355180 - DNA, 25 bp, Artificial
  probe
  misc_feature (1)..(25): SEQ ID NO: 3424; WAN024CUT; Start 129; Stop 153
ttccatcaatgtcaatcgaaccaag

SEQ ID NO: 355181 - DNA, 25 bp, Artificial
  probe
  misc_feature (1)..(25): SEQ ID NO: 3424; WAN024CUT; Start 128; Stop 152
cttccatcaatgtcaatcgaaccaa

SEQ ID NO: 355182 - DNA, 25 bp, Artificial
  probe
  misc_feature (1)..(25): SEQ ID NO: 3424; WAN024CUT; Start 427; Stop 451
cagccagactttctcattattgatt

SEQ ID NO: 355183 - DNA, 25 bp, Artificial
  probe
  misc_feature (1)..(25): SEQ ID NO: 3424; WAN024CUT; Start 241; Stop 265
aaatcaactcttctcctacaagtct

SEQ ID NO: 355184 - DNA, 25 bp, Artificial
  probe
  misc_feature (1)..(25): SEQ ID NO: 3424; WAN024CUT; Start 994; Stop 1018
tatctcaaatctgctggtggtgtta

SEQ ID NO: 355185 - DNA, 25 bp, Artificial
  probe
  misc_feature (1)..(25): SEQ ID NO: 3424; WAN024CUT; Start 428; Stop 452
agccagactttctcattattgattc

SEQ ID NO: 355186 - DNA, 25 bp, Artificial
  probe
  misc_feature (1)..(25): SEQ ID NO: 3424; WAN024CUT; Start 240; Stop 264
gaaatcaactcttctcctacaagtc

SEQ ID NO: 355187 - DNA, 25 bp, Artificial
  probe
  misc_feature (1)..(25): SEQ ID NO: 3424; WAN024CUT; Start 997; Stop 1021
ctcaaatctgctggtggtgttaaat

SEQ ID NO: 355188 - DNA, 25 bp, Artificial
  probe
  misc_feature (1)..(25): SEQ ID NO: 3424; WAN024CUT; Start 1074; Stop 1098
caaagacaagccaactaatcctcag

SEQ ID NO: 355189 - DNA, 25 bp, Artificial
  probe
  misc_feature (1)..(25): SEQ ID NO: 3424; WAN024CUT; Start 623; Stop 647
atatggtggatacggtgctttactt

SEQ ID NO: 355190 - DNA, 25 bp, Artificial
  probe
  misc_feature (1)..(25): SEQ ID NO: 3424; WAN024CUT; Start 443; Stop 467
ttattgattccatccagaccatcat

SEQ ID NO: 355191 - DNA, 25 bp, Artificial
  probe
  misc_feature (1)..(25): SEQ ID NO: 3424; WAN024CUT; Start 442; Stop 466
attattgattccatccagaccatca

SEQ ID NO: 355192 - DNA, 25 bp, Artificial
  probe
  misc_feature (1)..(25): SEQ ID NO: 3425; WAN024DTA; Start 88; Stop 112
cttggtcactatggagaatcgtatt

SEQ ID NO: 355193 - DNA, 25 bp, Artificial
  probe
  misc_feature (1)..(25): SEQ ID NO: 3425; WAN024DTA; Start 104; Stop 128
aatcgtattctcgtagtgcttctct

SEQ ID NO: 355194 - DNA, 25 bp, Artificial
  probe
  misc_feature (1)..(25): SEQ ID NO: 3425; WAN024DTA; Start 87; Stop 111
ccttggtcactatggagaatcgtat

SEQ ID NO: 355195 - DNA, 25 bp, Artificial
  probe
  misc_feature (1)..(25): SEQ ID NO: 3425; WAN024DTA; Start 46; Stop 70
tctctaggaaccgatgataagaatc

SEQ ID NO: 355196 - DNA, 25 bp, Artificial
  probe
  misc_feature (1)..(25): SEQ ID NO: 3425; WAN024DTA; Start 89; Stop 113
ttggtcactatggagaatcgtattc

SEQ ID NO: 355197 - DNA, 25 bp, Artificial
  probe
  misc_feature (1)..(25): SEQ ID NO: 3425; WAN024DTA; Start 103; Stop 127
gaatcgtattctcgtagtgcttctc

SEQ ID NO: 355198 - DNA, 25 bp, Artificial
  probe
  misc_feature (1)..(25): SEQ ID NO: 3425; WAN024DTA; Start 14; Stop 38
cttacgtgacatggatgcttgaatt

SEQ ID NO: 355199 - DNA, 25 bp, Artificial
  probe
  misc_feature (1)..(25): SEQ ID NO: 3425; WAN024DTA; Start 86; Stop 110
gccttggtcactatggagaatcgta

SEQ ID NO: 355200 - DNA, 25 bp, Artificial
  probe
  misc_feature (1)..(25): SEQ ID NO: 3425; WAN024DTA; Start 15; Stop 39
ttacgtgacatggatgcttgaattc

SEQ ID NO: 355201 - DNA, 25 bp, Artificial
  probe
  misc_feature (1)..(25): SEQ ID NO: 3425; WAN024DTA; Start 13; Stop 37
ccttacgtgacatggatgcttgaat

SEQ ID NO: 355202 - DNA, 25 bp, Artificial
  probe
  misc_feature (1)..(25): SEQ ID NO: 3425; WAN024DTA; Start 84; Stop 108
cagccttggtcactatggagaatcg

SEQ ID NO: 355203 - DNA, 25 bp, Artificial
  probe
  misc_feature (1)..(25): SEQ ID NO: 3425; WAN024DTA; Start 47; Stop 71
ctctaggaaccgatgataagaatcg

SEQ ID NO: 355204 - DNA, 25 bp, Artificial
  probe
  misc_feature (1)..(25): SEQ ID NO: 3425; WAN024DTA; Start 90; Stop 114
tggtcactatggagaatcgtattct

SEQ ID NO: 355205 - DNA, 25 bp, Artificial
  probe
  misc_feature (1)..(25): SEQ ID NO: 3425; WAN024DTA; Start 49; Stop 73
ctaggaaccgatgataagaatcgtg

SEQ ID NO: 355206 - DNA, 25 bp, Artificial
  probe
  misc_feature (1)..(25): SEQ ID NO: 3425; WAN024DTA; Start 48; Stop 72
tctaggaaccgatgataagaatcgt

SEQ ID NO: 355207 - DNA, 25 bp, Artificial
  probe
  misc_feature (1)..(25): SEQ ID NO: 3425; WAN024DTA; Start 102; Stop 126
agaatcgtattctcgtagtgcttct

SEQ ID NO: 355208 - DNA, 25 bp, Artificial
  probe
  misc_feature (1)..(25): SEQ ID NO: 3425; WAN024DTA; Start 50; Stop 74
taggaaccgatgataagaatcgtgt

SEQ ID NO: 355209 - DNA, 25 bp, Artificial
  probe
  misc_feature (1)..(25): SEQ ID NO: 3425; WAN024DTA; Start 83; Stop 107
ccagccttggtcactatggagaatc

SEQ ID NO: 355210 - DNA, 25 bp, Artificial
  probe
  misc_feature (1)..(25): SEQ ID NO: 3425; WAN024DTA; Start 16; Stop 40
tacgtgacatggatgcttgaattcc

SEQ ID NO: 355211 - DNA, 25 bp, Artificial
  probe
  misc_feature (1)..(25): SEQ ID NO: 3425; WAN024DTA; Start 20; Stop 44
tgacatggatgcttgaattccctta

SEQ ID NO: 355212 - DNA, 25 bp, Artificial
  probe
  misc_feature (1)..(25): SEQ ID NO: 3425; WAN024DTA; Start 52; Stop 76
ggaaccgatgataagaatcgtgttg

SEQ ID NO: 355213 - DNA, 25 bp, Artificial
  probe
  misc_feature (1)..(25): SEQ ID NO: 3425; WAN024DTA; Start 51; Stop 75
aggaaccgatgataagaatcgtgtt

SEQ ID NO: 355214 - DNA, 25 bp, Artificial
  probe
  misc_feature (1)..(25): SEQ ID NO: 3425; WAN024DTA; Start 6; Stop 30
ctgtttcccttacgtgacatggatg

SEQ ID NO: 355215 - DNA, 25 bp, Artificial
  probe
  misc_feature (1)..(25): SEQ ID NO: 3425; WAN024DTA; Start 19; Stop 43
gtgacatggatgcttgaattccctt

SEQ ID NO: 355216 - DNA, 25 bp, Artificial
  probe
  misc_feature (1)..(25): SEQ ID NO: 3425; WAN024DTA; Start 9; Stop 33
tttcccttacgtgacatggatgctt

SEQ ID NO: 355217 - DNA, 25 bp, Artificial
  probe
  misc_feature (1)..(25): SEQ ID NO: 3425; WAN024DTA; Start 12; Stop 36
cccttacgtgacatggatgcttgaa

SEQ ID NO: 355218 - DNA, 25 bp, Artificial
  probe
  misc_feature (1)..(25): SEQ ID NO: 3425; WAN024DTA; Start 10; Stop 34
ttcccttacgtgacatggatgcttg

SEQ ID NO: 355219 - DNA, 25 bp, Artificial
  probe
  misc_feature (1)..(25): SEQ ID NO: 3425; WAN024DTA; Start 8; Stop 32
gtttcccttacgtgacatggatgct

SEQ ID NO: 355220 - DNA, 25 bp, Artificial
  probe
  misc_feature (1)..(25): SEQ ID NO: 3425; WAN024DTA; Start 5; Stop 29
gctgtttcccttacgtgacatggat

SEQ ID NO: 355221 - DNA, 25 bp, Artificial
  probe
  misc_feature (1)..(25): SEQ ID NO: 3426; WAN024GAQ; Start 573; Stop 597
cgagattgactcaggtcttgatatt

SEQ ID NO: 355222 - DNA, 25 bp, Artificial
  probe
  misc_feature (1)..(25): SEQ ID NO: 3426; WAN024GAQ; Start 584; Stop 608
caggtcttgatattgacgctcttaa

SEQ ID NO: 355223 - DNA, 25 bp, Artificial
  probe
  misc_feature (1)..(25): SEQ ID NO: 3426; WAN024GAQ; Start 577; Stop 601
attgactcaggtcttgatattgacg

SEQ ID NO: 355224 - DNA, 25 bp, Artificial
  probe
  misc_feature (1)..(25): SEQ ID NO: 3426; WAN024GAQ; Start 576; Stop 600
gattgactcaggtcttgatattgac

SEQ ID NO: 355225 - DNA, 25 bp, Artificial
  probe
  misc_feature (1)..(25): SEQ ID NO: 3426; WAN024GAQ; Start 575; Stop 599
agattgactcaggtcttgatattga

SEQ ID NO: 355226 - DNA, 25 bp, Artificial
  probe
  misc_feature (1)..(25): SEQ ID NO: 3426; WAN024GAQ; Start 574; Stop 598
gagattgactcaggtcttgatattg

SEQ ID NO: 355227 - DNA, 25 bp, Artificial
  probe
  misc_feature (1)..(25): SEQ ID NO: 3426; WAN024GAQ; Start 572; Stop 596
acgagattgactcaggtcttgatat

SEQ ID NO: 355228 - DNA, 25 bp, Artificial
  probe
  misc_feature (1)..(25): SEQ ID NO: 3426; WAN024GAQ; Start 806; Stop 830
ttggctacgactacaaggaagaatt

SEQ ID NO: 355229 - DNA, 25 bp, Artificial
  probe
  misc_feature (1)..(25): SEQ ID NO: 3426; WAN024GAQ; Start 583; Stop 607
tcaggtcttgatattgacgctctta

SEQ ID NO: 355230 - DNA, 25 bp, Artificial
  probe
  misc_feature (1)..(25): SEQ ID NO: 3426; WAN024GAQ; Start 571; Stop 595
gacgagattgactcaggtcttgata

SEQ ID NO: 355231 - DNA, 25 bp, Artificial
  probe
  misc_feature (1)..(25): SEQ ID NO: 3426; WAN024GAQ; Start 797; Stop 821
ctgaagaacttggctacgactacaa

SEQ ID NO: 355232 - DNA, 25 bp, Artificial
  probe
  misc_feature (1)..(25): SEQ ID NO: 3426; WAN024GAQ; Start 592; Stop 616
gatattgacgctcttaaagttgtgt

SEQ ID NO: 355233 - DNA, 25 bp, Artificial
  probe
  misc_feature (1)..(25): SEQ ID NO: 3426; WAN024GAQ; Start 591; Stop 615
tgatattgacgctcttaaagttgtg

SEQ ID NO: 355234 - DNA, 25 bp, Artificial
  probe
  misc_feature (1)..(25): SEQ ID NO: 3426; WAN024GAQ; Start 807; Stop 831
tggctacgactacaaggaagaattg

SEQ ID NO: 355235 - DNA, 25 bp, Artificial
  probe
  misc_feature (1)..(25): SEQ ID NO: 3426; WAN024GAQ; Start 601; Stop 625
gctcttaaagttgtgtctaaaggtg

SEQ ID NO: 355236 - DNA, 25 bp, Artificial
  probe
  misc_feature (1)..(25): SEQ ID NO: 3426; WAN024GAQ; Start 590; Stop 614
ttgatattgacgctcttaaagttgt

SEQ ID NO: 355237 - DNA, 25 bp, Artificial
  probe
  misc_feature (1)..(25): SEQ ID NO: 3426; WAN024GAQ; Start 343; Stop 367
ggaattaccaatgctgagtttcttc

SEQ ID NO: 355238 - DNA, 25 bp, Artificial
  probe
  misc_feature (1)..(25): SEQ ID NO: 3426; WAN024GAQ; Start 604; Stop 628
cttaaagttgtgtctaaaggtgtca

SEQ ID NO: 355239 - DNA, 25 bp, Artificial
  probe
  misc_feature (1)..(25): SEQ ID NO: 3426; WAN024GAQ; Start 607; Stop 631
aaagttgtgtctaaaggtgtcaatg

SEQ ID NO: 355240 - DNA, 25 bp, Artificial
  probe
  misc_feature (1)..(25): SEQ ID NO: 3426; WAN024GAQ; Start 344; Stop 368
gaattaccaatgctgagtttcttcg

SEQ ID NO: 355241 - DNA, 25 bp, Artificial
  probe
  misc_feature (1)..(25): SEQ ID NO: 3426; WAN024GAQ; Start 582; Stop 606
ctcaggtcttgatattgacgctctt

SEQ ID NO: 355242 - DNA, 25 bp, Artificial
  probe
  misc_feature (1)..(25): SEQ ID NO: 3426; WAN024GAQ; Start 345; Stop 369
aattaccaatgctgagtttcttcgt

SEQ ID NO: 355243 - DNA, 25 bp, Artificial
  probe
  misc_feature (1)..(25): SEQ ID NO: 3426; WAN024GAQ; Start 603; Stop 627
tcttaaagttgtgtctaaaggtgtc

SEQ ID NO: 355244 - DNA, 25 bp, Artificial
  probe
  misc_feature (1)..(25): SEQ ID NO: 3426; WAN024GAQ; Start 602; Stop 626
ctcttaaagttgtgtctaaaggtgt

SEQ ID NO: 355245 - DNA, 25 bp, Artificial
  probe
  misc_feature (1)..(25): SEQ ID NO: 3426; WAN024GAQ; Start 398; Stop 422
atgagaagatttcagttcgtgagtt

SEQ ID NO: 355246 - DNA, 25 bp, Artificial
  probe
  misc_feature (1)..(25): SEQ ID NO: 3426; WAN024GAQ; Start 399; Stop 423
tgagaagatttcagttcgtgagttt

SEQ ID NO: 355247 - DNA, 25 bp, Artificial
  probe
  misc_feature (1)..(25): SEQ ID NO: 3426; WAN024GAQ; Start 600; Stop 624
cgctcttaaagttgtgtctaaaggt

SEQ ID NO: 355248 - DNA, 25 bp, Artificial
  probe
  misc_feature (1)..(25): SEQ ID NO: 3426; WAN024GAQ; Start 599; Stop 623
acgctcttaaagttgtgtctaaagg

SEQ ID NO: 355249 - DNA, 25 bp, Artificial
  probe
  misc_feature (1)..(25): SEQ ID NO: 3426; WAN024GAQ; Start 589; Stop 613
cttgatattgacgctcttaaagttg

SEQ ID NO: 355250 - DNA, 25 bp, Artificial
  probe
  misc_feature (1)..(25): SEQ ID NO: 3426; WAN024GAQ; Start 588; Stop 612
tcttgatattgacgctcttaaagtt

SEQ ID NO: 355251 - DNA, 25 bp, Artificial
  probe
  misc_feature (1)..(25): SEQ ID NO: 3426; WAN024GAQ; Start 400; Stop 424
gagaagatttcagttcgtgagttta

SEQ ID NO: 355252 - DNA, 25 bp, Artificial
  probe
  misc_feature (1)..(25): SEQ ID NO: 3426; WAN024GAQ; Start 397; Stop 421
gatgagaagatttcagttcgtgagt

SEQ ID NO: 355253 - DNA, 25 bp, Artificial
  probe
  misc_feature (1)..(25): SEQ ID NO: 3426; WAN024GAQ; Start 396; Stop 420
tgatgagaagatttcagttcgtgag

SEQ ID NO: 355254 - DNA, 25 bp, Artificial
  probe
  misc_feature (1)..(25): SEQ ID NO: 3427; WAN024CQF; Start 211; Stop 235
aagattgattcggatgatgaaccta

SEQ ID NO: 355255 - DNA, 25 bp, Artificial
  probe
  misc_feature (1)..(25): SEQ ID NO: 3427; WAN024CQF; Start 208; Stop 232
gagaagattgattcggatgatgaac

SEQ ID NO: 355256 - DNA, 25 bp, Artificial
  probe
  misc_feature (1)..(25): SEQ ID NO: 3427; WAN024CQF; Start 207; Stop 231
tgagaagattgattcggatgatgaa

SEQ ID NO: 355257 - DNA, 25 bp, Artificial
  probe
  misc_feature (1)..(25): SEQ ID NO: 3427; WAN024CQF; Start 206; Stop 230
atgagaagattgattcggatgatga

SEQ ID NO: 355258 - DNA, 25 bp, Artificial
  probe
  misc_feature (1)..(25): SEQ ID NO: 3427; WAN024CQF; Start 205; Stop 229
gatgagaagattgattcggatgatg

SEQ ID NO: 355259 - DNA, 25 bp, Artificial
  probe
  misc_feature (1)..(25): SEQ ID NO: 3427; WAN024CQF; Start 212; Stop 236
agattgattcggatgatgaacctac

SEQ ID NO: 355260 - DNA, 25 bp, Artificial
  probe
  misc_feature (1)..(25): SEQ ID NO: 3427; WAN024CQF; Start 204; Stop 228
ggatgagaagattgattcggatgat

SEQ ID NO: 355261 - DNA, 25 bp, Artificial
  probe
  misc_feature (1)..(25): SEQ ID NO: 3427; WAN024CQF; Start 210; Stop 234
gaagattgattcggatgatgaacct

SEQ ID NO: 355262 - DNA, 25 bp, Artificial
  probe
  misc_feature (1)..(25): SEQ ID NO: 3427; WAN024CQF; Start 209; Stop 233
agaagattgattcggatgatgaacc

SEQ ID NO: 355263 - DNA, 25 bp, Artificial
  probe
  misc_feature (1)..(25): SEQ ID NO: 3427; WAN024CQF; Start 201; Stop 225
tacggatgagaagattgattcggat

SEQ ID NO: 355264 - DNA, 25 bp, Artificial
  probe
  misc_feature (1)..(25): SEQ ID NO: 3427; WAN024CQF; Start 200; Stop 224
atacggatgagaagattgattcgga

SEQ ID NO: 355265 - DNA, 25 bp, Artificial
  probe
  misc_feature (1)..(25): SEQ ID NO: 3427; WAN024CQF; Start 199; Stop 223
catacggatgagaagattgattcgg

SEQ ID NO: 355266 - DNA, 25 bp, Artificial
  probe
  misc_feature (1)..(25): SEQ ID NO: 3427; WAN024CQF; Start 198; Stop 222
ccatacggatgagaagattgattcg

SEQ ID NO: 355267 - DNA, 25 bp, Artificial
  probe
  misc_feature (1)..(25): SEQ ID NO: 3427; WAN024CQF; Start 213; Stop 237
gattgattcggatgatgaacctacg

SEQ ID NO: 355268 - DNA, 25 bp, Artificial
  probe
  misc_feature (1)..(25): SEQ ID NO: 3427; WAN024CQF; Start 197; Stop 221
tccatacggatgagaagattgattc

SEQ ID NO: 355269 - DNA, 25 bp, Artificial
  probe
  misc_feature (1)..(25): SEQ ID NO: 3427; WAN024CQF; Start 203; Stop 227
cggatgagaagattgattcggatga

SEQ ID NO: 355270 - DNA, 25 bp, Artificial
  probe
  misc_feature (1)..(25): SEQ ID NO: 3427; WAN024CQF; Start 202; Stop 226
acggatgagaagattgattcggatg

SEQ ID NO: 355271 - DNA, 25 bp, Artificial
  probe
  misc_feature (1)..(25): SEQ ID NO: 3427; WAN024CQF; Start 222; Stop 246
ggatgatgaacctacgagagctatt

SEQ ID NO: 355272 - DNA, 25 bp, Artificial
  probe
  misc_feature (1)..(25): SEQ ID NO: 3427; WAN024CQF; Start 360; Stop 384
catcgtgggtcgtatcaagaatatc

SEQ ID NO: 355273 - DNA, 25 bp, Artificial
  probe
  misc_feature (1)..(25): SEQ ID NO: 3427; WAN024CQF; Start 359; Stop 383
tcatcgtgggtcgtatcaagaatat

SEQ ID NO: 355274 - DNA, 25 bp, Artificial
  probe
  misc_feature (1)..(25): SEQ ID NO: 3427; WAN024CQF; Start 358; Stop 382
ttcatcgtgggtcgtatcaagaata

SEQ ID NO: 355275 - DNA, 25 bp, Artificial
  probe
  misc_feature (1)..(25): SEQ ID NO: 3427; WAN024CQF; Start 590; Stop 614
cgcttcgtaaggaaacttatgaatt

SEQ ID NO: 355276 - DNA, 25 bp, Artificial
  probe
  misc_feature (1)..(25): SEQ ID NO: 3427; WAN024CQF; Start 932; Stop 956
ccaaggctgtttatagtacgattcg

SEQ ID NO: 355277 - DNA, 25 bp, Artificial
  probe
  misc_feature (1)..(25): SEQ ID NO: 3427; WAN024CQF; Start 371; Stop 395
gtatcaagaatatcgaccgtcctgg

SEQ ID NO: 355278 - DNA, 25 bp, Artificial
  probe
  misc_feature (1)..(25): SEQ ID NO: 3427; WAN024CQF; Start 361; Stop 385
atcgtgggtcgtatcaagaatatcg

SEQ ID NO: 355279 - DNA, 25 bp, Artificial
  probe
  misc_feature (1)..(25): SEQ ID NO: 3427; WAN024CQF; Start 766; Stop 790
ctcaagacagctattacaggtggtg

SEQ ID NO: 355280 - DNA, 25 bp, Artificial
  probe
  misc_feature (1)..(25): SEQ ID NO: 3427; WAN024CQF; Start 214; Stop 238
attgattcggatgatgaacctacga

SEQ ID NO: 355281 - DNA, 25 bp, Artificial
  probe
  misc_feature (1)..(25): SEQ ID NO: 3427; WAN024CQF; Start 589; Stop 613
ccgcttcgtaaggaaacttatgaat

SEQ ID NO: 355282 - DNA, 25 bp, Artificial
  probe
  misc_feature (1)..(25): SEQ ID NO: 3427; WAN024CQF; Start 370; Stop 394
cgtatcaagaatatcgaccgtcctg

SEQ ID NO: 355283 - DNA, 25 bp, Artificial
  probe
  misc_feature (1)..(25): SEQ ID NO: 3427; WAN024CQF; Start 931; Stop 955
gccaaggctgtttatagtacgattc

SEQ ID NO: 355284 - DNA, 25 bp, Artificial
  probe
  misc_feature (1)..(25): SEQ ID NO: 3427; WAN024CQF; Start 353; Stop 377
gattcttcatcgtgggtcgtatcaa

SEQ ID NO: 355285 - DNA, 25 bp, Artificial
  probe
  misc_feature (1)..(25): SEQ ID NO: 3427; WAN024CQF; Start 215; Stop 239
ttgattcggatgatgaacctacgag

SEQ ID NO: 355286 - DNA, 25 bp, Artificial
  probe
  misc_feature (1)..(25): SEQ ID NO: 3427; WAN024CQF; Start 357; Stop 381
cttcatcgtgggtcgtatcaagaat

SEQ ID NO: 355287 - DNA, 25 bp, Artificial
  probe
  misc_feature (1)..(25): SEQ ID NO: 3428; WAN024CY8; Start 421; Stop 445
ttaacctatgaacaagtggcgactc

SEQ ID NO: 355288 - DNA, 25 bp, Artificial
  probe
  misc_feature (1)..(25): SEQ ID NO: 3428; WAN024CY8; Start 61; Stop 85
aaggagtcagatatgagacagctag

SEQ ID NO: 355289 - DNA, 25 bp, Artificial
  probe
  misc_feature (1)..(25): SEQ ID NO: 3428; WAN024CY8; Start 485; Stop 509
tgactgctttagtaggagaaatcaa

SEQ ID NO: 355290 - DNA, 25 bp, Artificial
  probe
  misc_feature (1)..(25): SEQ ID NO: 3428; WAN024CY8; Start 484; Stop 508
ttgactgctttagtaggagaaatca

SEQ ID NO: 355291 - DNA, 25 bp, Artificial
  probe
  misc_feature (1)..(25): SEQ ID NO: 3428; WAN024CY8; Start 441; Stop 465
gactcagtttactccaaatgaacaa

SEQ ID NO: 355292 - DNA, 25 bp, Artificial
  probe
  misc_feature (1)..(25): SEQ ID NO: 3428; WAN024CY8; Start 442; Stop 466
actcagtttactccaaatgaacaaa

SEQ ID NO: 355293 - DNA, 25 bp, Artificial
  probe
  misc_feature (1)..(25): SEQ ID NO: 3428; WAN024CY8; Start 287; Stop 311
ttaagtctttggtcaaggaagggat

SEQ ID NO: 355294 - DNA, 25 bp, Artificial
  probe
  misc_feature (1)..(25): SEQ ID NO: 3428; WAN024CY8; Start 286; Stop 310
attaagtctttggtcaaggaaggga

SEQ ID NO: 355295 - DNA, 25 bp, Artificial
  probe
  misc_feature (1)..(25): SEQ ID NO: 3428; WAN024CY8; Start 285; Stop 309
cattaagtctttggtcaaggaaggg

SEQ ID NO: 355296 - DNA, 25 bp, Artificial
  probe
  misc_feature (1)..(25): SEQ ID NO: 3428; WAN024CY8; Start 486; Stop 510
gactgctttagtaggagaaatcaaa

SEQ ID NO: 355297 - DNA, 25 bp, Artificial
  probe
  misc_feature (1)..(25): SEQ ID NO: 3428; WAN024CY8; Start 483; Stop 507
tttgactgctttagtaggagaaatc

SEQ ID NO: 355298 - DNA, 25 bp, Artificial
  probe
  misc_feature (1)..(25): SEQ ID NO: 3428; WAN024CY8; Start 440; Stop 464
cgactcagtttactccaaatgaaca

SEQ ID NO: 355299 - DNA, 25 bp, Artificial
  probe
  misc_feature (1)..(25): SEQ ID NO: 3428; WAN024CY8; Start 55; Stop 79
aaaggaaaggagtcagatatgagac

SEQ ID NO: 355300 - DNA, 25 bp, Artificial
  probe
  misc_feature (1)..(25): SEQ ID NO: 3428; WAN024CY8; Start 56; Stop 80
aaggaaaggagtcagatatgagaca

SEQ ID NO: 355301 - DNA, 25 bp, Artificial
  probe
  misc_feature (1)..(25): SEQ ID NO: 3428; WAN024CY8; Start 57; Stop 81
aggaaaggagtcagatatgagacag

SEQ ID NO: 355302 - DNA, 25 bp, Artificial
  probe
  misc_feature (1)..(25): SEQ ID NO: 3428; WAN024CY8; Start 487; Stop 511
actgctttagtaggagaaatcaaat

SEQ ID NO: 355303 - DNA, 25 bp, Artificial
  probe
  misc_feature (1)..(25): SEQ ID NO: 3428; WAN024CY8; Start 288; Stop 312
taagtctttggtcaaggaagggatg

SEQ ID NO: 355304 - DNA, 25 bp, Artificial
  probe
  misc_feature (1)..(25): SEQ ID NO: 3428; WAN024CY8; Start 427; Stop 451
tatgaacaagtggcgactcagttta

SEQ ID NO: 355305 - DNA, 25 bp, Artificial
  probe
  misc_feature (1)..(25): SEQ ID NO: 3428; WAN024CY8; Start 202; Stop 226
cttatgctcttgtcagaggaatctt

SEQ ID NO: 355306 - DNA, 25 bp, Artificial
  probe
  misc_feature (1)..(25): SEQ ID NO: 3428; WAN024CY8; Start 134; Stop 158
atcagcatgaaatcctaataggtca

SEQ ID NO: 355307 - DNA, 25 bp, Artificial
  probe
  misc_feature (1)..(25): SEQ ID NO: 3428; WAN024CY8; Start 196; Stop 220
catatccttatgctcttgtcagagg

SEQ ID NO: 355308 - DNA, 25 bp, Artificial
  probe
  misc_feature (1)..(25): SEQ ID NO: 3428; WAN024CY8; Start 439; Stop 463
gcgactcagtttactccaaatgaac

SEQ ID NO: 355309 - DNA, 25 bp, Artificial
  probe
  misc_feature (1)..(25): SEQ ID NO: 3428; WAN024CY8; Start 420; Stop 444
tttaacctatgaacaagtggcgact

SEQ ID NO: 355310 - DNA, 25 bp, Artificial
  probe
  misc_feature (1)..(25): SEQ ID NO: 3428; WAN024CY8; Start 422; Stop 446
taacctatgaacaagtggcgactca

SEQ ID NO: 355311 - DNA, 25 bp, Artificial
  probe
  misc_feature (1)..(25): SEQ ID NO: 3428; WAN024CY8; Start 284; Stop 308
ccattaagtctttggtcaaggaagg

SEQ ID NO: 355312 - DNA, 25 bp, Artificial
  probe
  misc_feature (1)..(25): SEQ ID NO: 3428; WAN024CY8; Start 133; Stop 157
aatcagcatgaaatcctaataggtc

SEQ ID NO: 355313 - DNA, 25 bp, Artificial
  probe
  misc_feature (1)..(25): SEQ ID NO: 3428; WAN024CY8; Start 60; Stop 84
aaaggagtcagatatgagacagcta

SEQ ID NO: 355314 - DNA, 25 bp, Artificial
  probe
  misc_feature (1)..(25): SEQ ID NO: 3428; WAN024CY8; Start 58; Stop 82
ggaaaggagtcagatatgagacagc

SEQ ID NO: 355315 - DNA, 25 bp, Artificial
  probe
  misc_feature (1)..(25): SEQ ID NO: 3428; WAN024CY8; Start 132; Stop 156
aaatcagcatgaaatcctaataggt

SEQ ID NO: 355316 - DNA, 25 bp, Artificial
  probe
  misc_feature (1)..(25): SEQ ID NO: 3428; WAN024CY8; Start 283; Stop 307
gccattaagtctttggtcaaggaag

SEQ ID NO: 355317 - DNA, 25 bp, Artificial
  probe
  misc_feature (1)..(25): SEQ ID NO: 3428; WAN024CY8; Start 201; Stop 225
ccttatgctcttgtcagaggaatct

SEQ ID NO: 355318 - DNA, 25 bp, Artificial
  probe
  misc_feature (1)..(25): SEQ ID NO: 3428; WAN024CY8; Start 46; Stop 70
agaagtctaaaaggaaaggagtcag

SEQ ID NO: 355319 - DNA, 25 bp, Artificial
  probe
  misc_feature (1)..(25): SEQ ID NO: 3428; WAN024CY8; Start 45; Stop 69
gagaagtctaaaaggaaaggagtca

SEQ ID NO: 355320 - DNA, 25 bp, Artificial
  probe
  misc_feature (1)..(25): SEQ ID NO: 3429; WAN024EW6; Start 153; Stop 177
agtggatattgaagcgattagtgaa

SEQ ID NO: 355321 - DNA, 25 bp, Artificial
  probe
  misc_feature (1)..(25): SEQ ID NO: 3429; WAN024EW6; Start 152; Stop 176
aagtggatattgaagcgattagtga

SEQ ID NO: 355322 - DNA, 25 bp, Artificial
  probe
  misc_feature (1)..(25): SEQ ID NO: 3429; WAN024EW6; Start 151; Stop 175
caagtggatattgaagcgattagtg

SEQ ID NO: 355323 - DNA, 25 bp, Artificial
  probe
  misc_feature (1)..(25): SEQ ID NO: 3429; WAN024EW6; Start 309; Stop 333
aatagaggaagaaggtcaaggtatt

SEQ ID NO: 355324 - DNA, 25 bp, Artificial
  probe
  misc_feature (1)..(25): SEQ ID NO: 3429; WAN024EW6; Start 150; Stop 174
ccaagtggatattgaagcgattagt

SEQ ID NO: 355325 - DNA, 25 bp, Artificial
  probe
  misc_feature (1)..(25): SEQ ID NO: 3429; WAN024EW6; Start 372; Stop 396
acatgccagcactatcttagaagaa

SEQ ID NO: 355326 - DNA, 25 bp, Artificial
  probe
  misc_feature (1)..(25): SEQ ID NO: 3429; WAN024EW6; Start 65; Stop 89
tagatattccaagaatgaaggctca

SEQ ID NO: 355327 - DNA, 25 bp, Artificial
  probe
  misc_feature (1)..(25): SEQ ID NO: 3429; WAN024EW6; Start 117; Stop 141
aggctttcttggtctatttggtaaa

SEQ ID NO: 355328 - DNA, 25 bp, Artificial
  probe
  misc_feature (1)..(25): SEQ ID NO: 3429; WAN024EW6; Start 158; Stop 182
atattgaagcgattagtgaaacgac

SEQ ID NO: 355329 - DNA, 25 bp, Artificial
  probe
  misc_feature (1)..(25): SEQ ID NO: 3429; WAN024EW6; Start 157; Stop 181
gatattgaagcgattagtgaaacga

SEQ ID NO: 355330 - DNA, 25 bp, Artificial
  probe
  misc_feature (1)..(25): SEQ ID NO: 3429; WAN024EW6; Start 156; Stop 180
ggatattgaagcgattagtgaaacg

SEQ ID NO: 355331 - DNA, 25 bp, Artificial
  probe
  misc_feature (1)..(25): SEQ ID NO: 3429; WAN024EW6; Start 155; Stop 179
tggatattgaagcgattagtgaaac

SEQ ID NO: 355332 - DNA, 25 bp, Artificial
  probe
  misc_feature (1)..(25): SEQ ID NO: 3429; WAN024EW6; Start 154; Stop 178
gtggatattgaagcgattagtgaaa

SEQ ID NO: 355333 - DNA, 25 bp, Artificial
  probe
  misc_feature (1)..(25): SEQ ID NO: 3429; WAN024EW6; Start 371; Stop 395
gacatgccagcactatcttagaaga

SEQ ID NO: 355334 - DNA, 25 bp, Artificial
  probe
  misc_feature (1)..(25): SEQ ID NO: 3429; WAN024EW6; Start 370; Stop 394
agacatgccagcactatcttagaag

SEQ ID NO: 355335 - DNA, 25 bp, Artificial
  probe
  misc_feature (1)..(25): SEQ ID NO: 3429; WAN024EW6; Start 116; Stop 140
aaggctttcttggtctatttggtaa

SEQ ID NO: 355336 - DNA, 25 bp, Artificial
  probe
  misc_feature (1)..(25): SEQ ID NO: 3429; WAN024EW6; Start 311; Stop 335
tagaggaagaaggtcaaggtatttc

SEQ ID NO: 355337 - DNA, 25 bp, Artificial
  probe
  misc_feature (1)..(25): SEQ ID NO: 3429; WAN024EW6; Start 310; Stop 334
atagaggaagaaggtcaaggtattt

SEQ ID NO: 355338 - DNA, 25 bp, Artificial
  probe
  misc_feature (1)..(25): SEQ ID NO: 3429; WAN024EW6; Start 308; Stop 332
aaatagaggaagaaggtcaaggtat

SEQ ID NO: 355339 - DNA, 25 bp, Artificial
  probe
  misc_feature (1)..(25): SEQ ID NO: 3429; WAN024EW6; Start 64; Stop 88
ttagatattccaagaatgaaggctc

SEQ ID NO: 355340 - DNA, 25 bp, Artificial
  probe
  misc_feature (1)..(25): SEQ ID NO: 3429; WAN024EW6; Start 81; Stop 105
gaaggctcatatcaaagtcatttct

SEQ ID NO: 355341 - DNA, 25 bp, Artificial
  probe
  misc_feature (1)..(25): SEQ ID NO: 3429; WAN024EW6; Start 85; Stop 109
gctcatatcaaagtcatttctaggg

SEQ ID NO: 355342 - DNA, 25 bp, Artificial
  probe
  misc_feature (1)..(25): SEQ ID NO: 3429; WAN024EW6; Start 84; Stop 108
ggctcatatcaaagtcatttctagg

SEQ ID NO: 355343 - DNA, 25 bp, Artificial
  probe
  misc_feature (1)..(25): SEQ ID NO: 3429; WAN024EW6; Start 320; Stop 344
aaggtcaaggtatttctgatgaagt

SEQ ID NO: 355344 - DNA, 25 bp, Artificial
  probe
  misc_feature (1)..(25): SEQ ID NO: 3429; WAN024EW6; Start 391; Stop 415
gaagaaactggtcacattgagattt

SEQ ID NO: 355345 - DNA, 25 bp, Artificial
  probe
  misc_feature (1)..(25): SEQ ID NO: 3429; WAN024EW6; Start 390; Stop 414
agaagaaactggtcacattgagatt

SEQ ID NO: 355346 - DNA, 25 bp, Artificial
  probe
  misc_feature (1)..(25): SEQ ID NO: 3429; WAN024EW6; Start 388; Stop 412
ttagaagaaactggtcacattgaga

SEQ ID NO: 355347 - DNA, 25 bp, Artificial
  probe
  misc_feature (1)..(25): SEQ ID NO: 3429; WAN024EW6; Start 336; Stop 360
tgatgaagtcaaggctgaaatctta

SEQ ID NO: 355348 - DNA, 25 bp, Artificial
  probe
  misc_feature (1)..(25): SEQ ID NO: 3429; WAN024EW6; Start 330; Stop 354
tatttctgatgaagtcaaggctgaa

SEQ ID NO: 355349 - DNA, 25 bp, Artificial
  probe
  misc_feature (1)..(25): SEQ ID NO: 3429; WAN024EW6; Start 321; Stop 345
aggtcaaggtatttctgatgaagtc

SEQ ID NO: 355350 - DNA, 25 bp, Artificial
  probe
  misc_feature (1)..(25): SEQ ID NO: 3429; WAN024EW6; Start 389; Stop 413
tagaagaaactggtcacattgagat

SEQ ID NO: 355351 - DNA, 25 bp, Artificial
  probe
  misc_feature (1)..(25): SEQ ID NO: 3429; WAN024EW6; Start 387; Stop 411
cttagaagaaactggtcacattgag

SEQ ID NO: 355352 - DNA, 25 bp, Artificial
  probe
  misc_feature (1)..(25): SEQ ID NO: 3429; WAN024EW6; Start 325; Stop 349
caaggtatttctgatgaagtcaagg

SEQ ID NO: 355353 - DNA, 25 bp, Artificial
  probe
  misc_feature (1)..(25): SEQ ID NO: 3430; WAN024DV7; Start 288; Stop 312
atacaatcgttcctaccgtccttat

SEQ ID NO: 355354 - DNA, 25 bp, Artificial
  probe
  misc_feature (1)..(25): SEQ ID NO: 3430; WAN024DV7; Start 287; Stop 311
aatacaatcgttcctaccgtcctta

SEQ ID NO: 355355 - DNA, 25 bp, Artificial
  probe
  misc_feature (1)..(25): SEQ ID NO: 3430; WAN024DV7; Start 895; Stop 919
tatctcaagtcgccagagtataatg

SEQ ID NO: 355356 - DNA, 25 bp, Artificial
  probe
  misc_feature (1)..(25): SEQ ID NO: 3430; WAN024DV7; Start 289; Stop 313
tacaatcgttcctaccgtccttatc

SEQ ID NO: 355357 - DNA, 25 bp, Artificial
  probe
  misc_feature (1)..(25): SEQ ID NO: 3430; WAN024DV7; Start 894; Stop 918
ctatctcaagtcgccagagtataat

SEQ ID NO: 355358 - DNA, 25 bp, Artificial
  probe
  misc_feature (1)..(25): SEQ ID NO: 3430; WAN024DV7; Start 1005; Stop 1029
ctatgctggtctacgagaggatatg

SEQ ID NO: 355359 - DNA, 25 bp, Artificial
  probe
  misc_feature (1)..(25): SEQ ID NO: 3430; WAN024DV7; Start 896; Stop 920
atctcaagtcgccagagtataatga

SEQ ID NO: 355360 - DNA, 25 bp, Artificial
  probe
  misc_feature (1)..(25): SEQ ID NO: 3430; WAN024DV7; Start 893; Stop 917
cctatctcaagtcgccagagtataa

SEQ ID NO: 355361 - DNA, 25 bp, Artificial
  probe
  misc_feature (1)..(25): SEQ ID NO: 3430; WAN024DV7; Start 291; Stop 315
caatcgttcctaccgtccttatctt

SEQ ID NO: 355362 - DNA, 25 bp, Artificial
  probe
  misc_feature (1)..(25): SEQ ID NO: 3430; WAN024DV7; Start 1004; Stop 1028
actatgctggtctacgagaggatat

SEQ ID NO: 355363 - DNA, 25 bp, Artificial
  probe
  misc_feature (1)..(25): SEQ ID NO: 3430; WAN024DV7; Start 393; Stop 417
agttgtgtatgttatctcacctcag

SEQ ID NO: 355364 - DNA, 25 bp, Artificial
  probe
  misc_feature (1)..(25): SEQ ID NO: 3430; WAN024DV7; Start 395; Stop 419
ttgtgtatgttatctcacctcagtg

SEQ ID NO: 355365 - DNA, 25 bp, Artificial
  probe
  misc_feature (1)..(25): SEQ ID NO: 3430; WAN024DV7; Start 394; Stop 418
gttgtgtatgttatctcacctcagt

SEQ ID NO: 355366 - DNA, 25 bp, Artificial
  probe
  misc_feature (1)..(25): SEQ ID NO: 3430; WAN024DV7; Start 392; Stop 416
aagttgtgtatgttatctcacctca

SEQ ID NO: 355367 - DNA, 25 bp, Artificial
  probe
  misc_feature (1)..(25): SEQ ID NO: 3430; WAN024DV7; Start 391; Stop 415
caagttgtgtatgttatctcacctc

SEQ ID NO: 355368 - DNA, 25 bp, Artificial
  probe
  misc_feature (1)..(25): SEQ ID NO: 3430; WAN024DV7; Start 1014; Stop 1038
tctacgagaggatatgtaccaacaa

SEQ ID NO: 355369 - DNA, 25 bp, Artificial
  probe
  misc_feature (1)..(25): SEQ ID NO: 3430; WAN024DV7; Start 1007; Stop 1031
atgctggtctacgagaggatatgta

SEQ ID NO: 355370 - DNA, 25 bp, Artificial
  probe
  misc_feature (1)..(25): SEQ ID NO: 3430; WAN024DV7; Start 1006; Stop 1030
tatgctggtctacgagaggatatgt

SEQ ID NO: 355371 - DNA, 25 bp, Artificial
  probe
  misc_feature (1)..(25): SEQ ID NO: 3430; WAN024DV7; Start 833; Stop 857
tctataatgagcagatcaagaagga

SEQ ID NO: 355372 - DNA, 25 bp, Artificial
  probe
  misc_feature (1)..(25): SEQ ID NO: 3430; WAN024DV7; Start 1013; Stop 1037
gtctacgagaggatatgtaccaaca

SEQ ID NO: 355373 - DNA, 25 bp, Artificial
  probe
  misc_feature (1)..(25): SEQ ID NO: 3430; WAN024DV7; Start 390; Stop 414
acaagttgtgtatgttatctcacct

SEQ ID NO: 355374 - DNA, 25 bp, Artificial
  probe
  misc_feature (1)..(25): SEQ ID NO: 3430; WAN024DV7; Start 892; Stop 916
acctatctcaagtcgccagagtata

SEQ ID NO: 355375 - DNA, 25 bp, Artificial
  probe
  misc_feature (1)..(25): SEQ ID NO: 3430; WAN024DV7; Start 891; Stop 915
tacctatctcaagtcgccagagtat

SEQ ID NO: 355376 - DNA, 25 bp, Artificial
  probe
  misc_feature (1)..(25): SEQ ID NO: 3430; WAN024DV7; Start 399; Stop 423
gtatgttatctcacctcagtggttc

SEQ ID NO: 355377 - DNA, 25 bp, Artificial
  probe
  misc_feature (1)..(25): SEQ ID NO: 3430; WAN024DV7; Start 1044; Stop 1068
gcagaagattcgctaccagttagaa

SEQ ID NO: 355378 - DNA, 25 bp, Artificial
  probe
  misc_feature (1)..(25): SEQ ID NO: 3430; WAN024DV7; Start 404; Stop 428
ttatctcacctcagtggttcagtaa

SEQ ID NO: 355379 - DNA, 25 bp, Artificial
  probe
  misc_feature (1)..(25): SEQ ID NO: 3430; WAN024DV7; Start 400; Stop 424
tatgttatctcacctcagtggttca

SEQ ID NO: 355380 - DNA, 25 bp, Artificial
  probe
  misc_feature (1)..(25): SEQ ID NO: 3430; WAN024DV7; Start 897; Stop 921
tctcaagtcgccagagtataatgac

SEQ ID NO: 355381 - DNA, 25 bp, Artificial
  probe
  misc_feature (1)..(25): SEQ ID NO: 3430; WAN024DV7; Start 398; Stop 422
tgtatgttatctcacctcagtggtt

SEQ ID NO: 355382 - DNA, 25 bp, Artificial
  probe
  misc_feature (1)..(25): SEQ ID NO: 3430; WAN024DV7; Start 890; Stop 914
ttacctatctcaagtcgccagagta

SEQ ID NO: 355383 - DNA, 25 bp, Artificial
  probe
  misc_feature (1)..(25): SEQ ID NO: 3430; WAN024DV7; Start 396; Stop 420
tgtgtatgttatctcacctcagtgg

SEQ ID NO: 355384 - DNA, 25 bp, Artificial
  probe
  misc_feature (1)..(25): SEQ ID NO: 3430; WAN024DV7; Start 834; Stop 858
ctataatgagcagatcaagaaggat

SEQ ID NO: 355385 - DNA, 25 bp, Artificial
  probe
  misc_feature (1)..(25): SEQ ID NO: 3430; WAN024DV7; Start 20; Stop 44
aaatgcttaaacgcttatggatgat

SEQ ID NO: 355386 - DNA, 25 bp, Artificial
  probe
  misc_feature (1)..(25): SEQ ID NO: 3431; WAN024FBA; Start 17; Stop 41
gtttgtggtataatgaaagggactc

SEQ ID NO: 355387 - DNA, 25 bp, Artificial
  probe
  misc_feature (1)..(25): SEQ ID NO: 3431; WAN024FBA; Start 243; Stop 267
acaacaagtttaccaccaaatcatc

SEQ ID NO: 355388 - DNA, 25 bp, Artificial
  probe
  misc_feature (1)..(25): SEQ ID NO: 3431; WAN024FBA; Start 244; Stop 268
caacaagtttaccaccaaatcatcc

SEQ ID NO: 355389 - DNA, 25 bp, Artificial
  probe
  misc_feature (1)..(25): SEQ ID NO: 3431; WAN024FBA; Start 242; Stop 266
tacaacaagtttaccaccaaatcat

SEQ ID NO: 355390 - DNA, 25 bp, Artificial
  probe
  misc_feature (1)..(25): SEQ ID NO: 3431; WAN024FBA; Start 13; Stop 37
gctagtttgtggtataatgaaaggg

SEQ ID NO: 355391 - DNA, 25 bp, Artificial
  probe
  misc_feature (1)..(25): SEQ ID NO: 3431; WAN024FBA; Start 12; Stop 36
ggctagtttgtggtataatgaaagg

SEQ ID NO: 355392 - DNA, 25 bp, Artificial
  probe
  misc_feature (1)..(25): SEQ ID NO: 3431; WAN024FBA; Start 123; Stop 147
aggaatgtacttggttcgtaagcaa

SEQ ID NO: 355393 - DNA, 25 bp, Artificial
  probe
  misc_feature (1)..(25): SEQ ID NO: 3431; WAN024FBA; Start 10; Stop 34
gtggctagtttgtggtataatgaaa

SEQ ID NO: 355394 - DNA, 25 bp, Artificial
  probe
  misc_feature (1)..(25): SEQ ID NO: 3431; WAN024FBA; Start 9; Stop 33
ggtggctagtttgtggtataatgaa

SEQ ID NO: 355395 - DNA, 25 bp, Artificial
  probe
  misc_feature (1)..(25): SEQ ID NO: 3431; WAN024FBA; Start 20; Stop 44
tgtggtataatgaaagggactcaaa

SEQ ID NO: 355396 - DNA, 25 bp, Artificial
  probe
  misc_feature (1)..(25): SEQ ID NO: 3431; WAN024FBA; Start 19; Stop 43
ttgtggtataatgaaagggactcaa

SEQ ID NO: 355397 - DNA, 25 bp, Artificial
  probe
  misc_feature (1)..(25): SEQ ID NO: 3431; WAN024FBA; Start 18; Stop 42
tttgtggtataatgaaagggactca

SEQ ID NO: 355398 - DNA, 25 bp, Artificial
  probe
  misc_feature (1)..(25): SEQ ID NO: 3431; WAN024FBA; Start 16; Stop 40
agtttgtggtataatgaaagggact

SEQ ID NO: 355399 - DNA, 25 bp, Artificial
  probe
  misc_feature (1)..(25): SEQ ID NO: 3431; WAN024FBA; Start 15; Stop 39
tagtttgtggtataatgaaagggac

SEQ ID NO: 355400 - DNA, 25 bp, Artificial
  probe
  misc_feature (1)..(25): SEQ ID NO: 3431; WAN024FBA; Start 11; Stop 35
tggctagtttgtggtataatgaaag

SEQ ID NO: 355401 - DNA, 25 bp, Artificial
  probe
  misc_feature (1)..(25): SEQ ID NO: 3431; WAN024FBA; Start 241; Stop 265
gtacaacaagtttaccaccaaatca

SEQ ID NO: 355402 - DNA, 25 bp, Artificial
  probe
  misc_feature (1)..(25): SEQ ID NO: 3431; WAN024FBA; Start 122; Stop 146
gaggaatgtacttggttcgtaagca

SEQ ID NO: 355403 - DNA, 25 bp, Artificial
  probe
  misc_feature (1)..(25): SEQ ID NO: 3431; WAN024FBA; Start 126; Stop 150
aatgtacttggttcgtaagcaaatc

SEQ ID NO: 355404 - DNA, 25 bp, Artificial
  probe
  misc_feature (1)..(25): SEQ ID NO: 3431; WAN024FBA; Start 125; Stop 149
gaatgtacttggttcgtaagcaaat

SEQ ID NO: 355405 - DNA, 25 bp, Artificial
  probe
  misc_feature (1)..(25): SEQ ID NO: 3431; WAN024FBA; Start 245; Stop 269
aacaagtttaccaccaaatcatccg

SEQ ID NO: 355406 - DNA, 25 bp, Artificial
  probe
  misc_feature (1)..(25): SEQ ID NO: 3431; WAN024FBA; Start 14; Stop 38
ctagtttgtggtataatgaaaggga

SEQ ID NO: 355407 - DNA, 25 bp, Artificial
  probe
  misc_feature (1)..(25): SEQ ID NO: 3431; WAN024FBA; Start 231; Stop 255
cgaagctaaggtacaacaagtttac

SEQ ID NO: 355408 - DNA, 25 bp, Artificial
  probe
  misc_feature (1)..(25): SEQ ID NO: 3431; WAN024FBA; Start 8; Stop 32
gggtggctagtttgtggtataatga

SEQ ID NO: 355409 - DNA, 25 bp, Artificial
  probe
  misc_feature (1)..(25): SEQ ID NO: 3431; WAN024FBA; Start 7; Stop 31
agggtggctagtttgtggtataatg

SEQ ID NO: 355410 - DNA, 25 bp, Artificial
  probe
  misc_feature (1)..(25): SEQ ID NO: 3431; WAN024FBA; Start 6; Stop 30
cagggtggctagtttgtggtataat

SEQ ID NO: 355411 - DNA, 25 bp, Artificial
  probe
  misc_feature (1)..(25): SEQ ID NO: 3431; WAN024FBA; Start 121; Stop 145
ggaggaatgtacttggttcgtaagc

SEQ ID NO: 355412 - DNA, 25 bp, Artificial
  probe
  misc_feature (1)..(25): SEQ ID NO: 3431; WAN024FBA; Start 124; Stop 148
ggaatgtacttggttcgtaagcaaa

SEQ ID NO: 355413 - DNA, 25 bp, Artificial
  probe
  misc_feature (1)..(25): SEQ ID NO: 3431; WAN024FBA; Start 127; Stop 151
atgtacttggttcgtaagcaaatcg

SEQ ID NO: 355414 - DNA, 25 bp, Artificial
  probe
  misc_feature (1)..(25): SEQ ID NO: 3431; WAN024FBA; Start 230; Stop 254
gcgaagctaaggtacaacaagttta

SEQ ID NO: 355415 - DNA, 25 bp, Artificial
  probe
  misc_feature (1)..(25): SEQ ID NO: 3431; WAN024FBA; Start 5; Stop 29
tcagggtggctagtttgtggtataa

SEQ ID NO: 355416 - DNA, 25 bp, Artificial
  probe
  misc_feature (1)..(25): SEQ ID NO: 3431; WAN024FBA; Start 21; Stop 45
gtggtataatgaaagggactcaaaa

SEQ ID NO: 355417 - DNA, 25 bp, Artificial
  probe
  misc_feature (1)..(25): SEQ ID NO: 3431; WAN024FBA; Start 228; Stop 252
aagcgaagctaaggtacaacaagtt

SEQ ID NO: 355418 - DNA, 25 bp, Artificial
  probe
  misc_feature (1)..(25): SEQ ID NO: 3431; WAN024FBA; Start 4; Stop 28
gtcagggtggctagtttgtggtata

SEQ ID NO: 355419 - DNA, 25 bp, Artificial
  probe
  misc_feature (1)..(25): SEQ ID NO: 3432; WAN024FBW; Start 31; Stop 55
aatatctatgctggaatggacgagg

SEQ ID NO: 355420 - DNA, 25 bp, Artificial
  probe
  misc_feature (1)..(25): SEQ ID NO: 3432; WAN024FBW; Start 32; Stop 56
atatctatgctggaatggacgagga

SEQ ID NO: 355421 - DNA, 25 bp, Artificial
  probe
  misc_feature (1)..(25): SEQ ID NO: 3432; WAN024FBW; Start 36; Stop 60
ctatgctggaatggacgaggaatac

SEQ ID NO: 355422 - DNA, 25 bp, Artificial
  probe
  misc_feature (1)..(25): SEQ ID NO: 3432; WAN024FBW; Start 35; Stop 59
tctatgctggaatggacgaggaata

SEQ ID NO: 355423 - DNA, 25 bp, Artificial
  probe
  misc_feature (1)..(25): SEQ ID NO: 3432; WAN024FBW; Start 33; Stop 57
tatctatgctggaatggacgaggaa

SEQ ID NO: 355424 - DNA, 25 bp, Artificial
  probe
  misc_feature (1)..(25): SEQ ID NO: 3432; WAN024FBW; Start 235; Stop 259
caactaatcctctttaccacctctc

SEQ ID NO: 355425 - DNA, 25 bp, Artificial
  probe
  misc_feature (1)..(25): SEQ ID NO: 3432; WAN024FBW; Start 239; Stop 263
taatcctctttaccacctctccaat

SEQ ID NO: 355426 - DNA, 25 bp, Artificial
  probe
  misc_feature (1)..(25): SEQ ID NO: 3432; WAN024FBW; Start 30; Stop 54
aaatatctatgctggaatggacgag

SEQ ID NO: 355427 - DNA, 25 bp, Artificial
  probe
  misc_feature (1)..(25): SEQ ID NO: 3432; WAN024FBW; Start 182; Stop 206
taaatccaagttcaatccgaccatt

SEQ ID NO: 355428 - DNA, 25 bp, Artificial
  probe
  misc_feature (1)..(25): SEQ ID NO: 3432; WAN024FBW; Start 181; Stop 205
ttaaatccaagttcaatccgaccat

SEQ ID NO: 355429 - DNA, 25 bp, Artificial
  probe
  misc_feature (1)..(25): SEQ ID NO: 3432; WAN024FBW; Start 238; Stop 262
ctaatcctctttaccacctctccaa

SEQ ID NO: 355430 - DNA, 25 bp, Artificial
  probe
  misc_feature (1)..(25): SEQ ID NO: 3432; WAN024FBW; Start 236; Stop 260
aactaatcctctttaccacctctcc

SEQ ID NO: 355431 - DNA, 25 bp, Artificial
  probe
  misc_feature (1)..(25): SEQ ID NO: 3432; WAN024FBW; Start 224; Stop 248
gttcaacctgccaactaatcctctt

SEQ ID NO: 355432 - DNA, 25 bp, Artificial
  probe
  misc_feature (1)..(25): SEQ ID NO: 3432; WAN024FBW; Start 234; Stop 258
ccaactaatcctctttaccacctct

SEQ ID NO: 355433 - DNA, 25 bp, Artificial
  probe
  misc_feature (1)..(25): SEQ ID NO: 3432; WAN024FBW; Start 227; Stop 251
caacctgccaactaatcctctttac

SEQ ID NO: 355434 - DNA, 25 bp, Artificial
  probe
  misc_feature (1)..(25): SEQ ID NO: 3432; WAN024FBW; Start 226; Stop 250
tcaacctgccaactaatcctcttta

SEQ ID NO: 355435 - DNA, 25 bp, Artificial
  probe
  misc_feature (1)..(25): SEQ ID NO: 3432; WAN024FBW; Start 240; Stop 264
aatcctctttaccacctctccaatc

SEQ ID NO: 355436 - DNA, 25 bp, Artificial
  probe
  misc_feature (1)..(25): SEQ ID NO: 3432; WAN024FBW; Start 34; Stop 58
atctatgctggaatggacgaggaat

SEQ ID NO: 355437 - DNA, 25 bp, Artificial
  probe
  misc_feature (1)..(25): SEQ ID NO: 3432; WAN024FBW; Start 237; Stop 261
actaatcctctttaccacctctcca

SEQ ID NO: 355438 - DNA, 25 bp, Artificial
  probe
  misc_feature (1)..(25): SEQ ID NO: 3432; WAN024FBW; Start 341; Stop 365
aagaagaattcatccagcatacctc

SEQ ID NO: 355439 - DNA, 25 bp, Artificial
  probe
  misc_feature (1)..(25): SEQ ID NO: 3432; WAN024FBW; Start 299; Stop 323
cattaacagaaaggaagcctatgac

SEQ ID NO: 355440 - DNA, 25 bp, Artificial
  probe
  misc_feature (1)..(25): SEQ ID NO: 3432; WAN024FBW; Start 340; Stop 364
caagaagaattcatccagcatacct

SEQ ID NO: 355441 - DNA, 25 bp, Artificial
  probe
  misc_feature (1)..(25): SEQ ID NO: 3432; WAN024FBW; Start 296; Stop 320
aagcattaacagaaaggaagcctat

SEQ ID NO: 355442 - DNA, 25 bp, Artificial
  probe
  misc_feature (1)..(25): SEQ ID NO: 3432; WAN024FBW; Start 300; Stop 324
attaacagaaaggaagcctatgacc

SEQ ID NO: 355443 - DNA, 25 bp, Artificial
  probe
  misc_feature (1)..(25): SEQ ID NO: 3432; WAN024FBW; Start 225; Stop 249
ttcaacctgccaactaatcctcttt

SEQ ID NO: 355444 - DNA, 25 bp, Artificial
  probe
  misc_feature (1)..(25): SEQ ID NO: 3432; WAN024FBW; Start 293; Stop 317
cagaagcattaacagaaaggaagcc

SEQ ID NO: 355445 - DNA, 25 bp, Artificial
  probe
  misc_feature (1)..(25): SEQ ID NO: 3432; WAN024FBW; Start 241; Stop 265
atcctctttaccacctctccaatct

SEQ ID NO: 355446 - DNA, 25 bp, Artificial
  probe
  misc_feature (1)..(25): SEQ ID NO: 3432; WAN024FBW; Start 228; Stop 252
aacctgccaactaatcctctttacc

SEQ ID NO: 355447 - DNA, 25 bp, Artificial
  probe
  misc_feature (1)..(25): SEQ ID NO: 3432; WAN024FBW; Start 343; Stop 367
gaagaattcatccagcatacctcag

SEQ ID NO: 355448 - DNA, 25 bp, Artificial
  probe
  misc_feature (1)..(25): SEQ ID NO: 3432; WAN024FBW; Start 295; Stop 319
gaagcattaacagaaaggaagccta

SEQ ID NO: 355449 - DNA, 25 bp, Artificial
  probe
  misc_feature (1)..(25): SEQ ID NO: 3432; WAN024FBW; Start 298; Stop 322
gcattaacagaaaggaagcctatga

SEQ ID NO: 355450 - DNA, 25 bp, Artificial
  probe
  misc_feature (1)..(25): SEQ ID NO: 3432; WAN024FBW; Start 297; Stop 321
agcattaacagaaaggaagcctatg

SEQ ID NO: 355451 - DNA, 25 bp, Artificial
  probe
  misc_feature (1)..(25): SEQ ID NO: 3432; WAN024FBW; Start 175; Stop 199
acagctttaaatccaagttcaatcc

SEQ ID NO: 355452 - DNA, 25 bp, Artificial
  probe
  misc_feature (1)..(25): SEQ ID NO: 3433; WAN024DQ6; Start 422; Stop 446
gccattagtcttgaaggttaagtct

SEQ ID NO: 355453 - DNA, 25 bp, Artificial
  probe
  misc_feature (1)..(25): SEQ ID NO: 3433; WAN024DQ6; Start 418; Stop 442
catcgccattagtcttgaaggttaa

SEQ ID NO: 355454 - DNA, 25 bp, Artificial
  probe
  misc_feature (1)..(25): SEQ ID NO: 3433; WAN024DQ6; Start 423; Stop 447
ccattagtcttgaaggttaagtctg

SEQ ID NO: 355455 - DNA, 25 bp, Artificial
  probe
  misc_feature (1)..(25): SEQ ID NO: 3433; WAN024DQ6; Start 419; Stop 443
atcgccattagtcttgaaggttaag

SEQ ID NO: 355456 - DNA, 25 bp, Artificial
  probe
  misc_feature (1)..(25): SEQ ID NO: 3433; WAN024DQ6; Start 176; Stop 200
gactagagaagttatggaagagacg

SEQ ID NO: 355457 - DNA, 25 bp, Artificial
  probe
  misc_feature (1)..(25): SEQ ID NO: 3433; WAN024DQ6; Start 173; Stop 197
gctgactagagaagttatggaagag

SEQ ID NO: 355458 - DNA, 25 bp, Artificial
  probe
  misc_feature (1)..(25): SEQ ID NO: 3433; WAN024DQ6; Start 424; Stop 448
cattagtcttgaaggttaagtctga

SEQ ID NO: 355459 - DNA, 25 bp, Artificial
  probe
  misc_feature (1)..(25): SEQ ID NO: 3433; WAN024DQ6; Start 421; Stop 445
cgccattagtcttgaaggttaagtc

SEQ ID NO: 355460 - DNA, 25 bp, Artificial
  probe
  misc_feature (1)..(25): SEQ ID NO: 3433; WAN024DQ6; Start 467; Stop 491
actggacaagacttcttacatgaat

SEQ ID NO: 355461 - DNA, 25 bp, Artificial
  probe
  misc_feature (1)..(25): SEQ ID NO: 3433; WAN024DQ6; Start 466; Stop 490
aactggacaagacttcttacatgaa

SEQ ID NO: 355462 - DNA, 25 bp, Artificial
  probe
  misc_feature (1)..(25): SEQ ID NO: 3433; WAN024DQ6; Start 175; Stop 199
tgactagagaagttatggaagagac

SEQ ID NO: 355463 - DNA, 25 bp, Artificial
  probe
  misc_feature (1)..(25): SEQ ID NO: 3433; WAN024DQ6; Start 465; Stop 489
gaactggacaagacttcttacatga

SEQ ID NO: 355464 - DNA, 25 bp, Artificial
  probe
  misc_feature (1)..(25): SEQ ID NO: 3433; WAN024DQ6; Start 384; Stop 408
tggatggatattcaagagattacag

SEQ ID NO: 355465 - DNA, 25 bp, Artificial
  probe
  misc_feature (1)..(25): SEQ ID NO: 3433; WAN024DQ6; Start 177; Stop 201
actagagaagttatggaagagacgg

SEQ ID NO: 355466 - DNA, 25 bp, Artificial
  probe
  misc_feature (1)..(25): SEQ ID NO: 3433; WAN024DQ6; Start 420; Stop 444
tcgccattagtcttgaaggttaagt

SEQ ID NO: 355467 - DNA, 25 bp, Artificial
  probe
  misc_feature (1)..(25): SEQ ID NO: 3433; WAN024DQ6; Start 470; Stop 494
ggacaagacttcttacatgaattgg

SEQ ID NO: 355468 - DNA, 25 bp, Artificial
  probe
  misc_feature (1)..(25): SEQ ID NO: 3433; WAN024DQ6; Start 174; Stop 198
ctgactagagaagttatggaagaga

SEQ ID NO: 355469 - DNA, 25 bp, Artificial
  probe
  misc_feature (1)..(25): SEQ ID NO: 3433; WAN024DQ6; Start 468; Stop 492
ctggacaagacttcttacatgaatt

SEQ ID NO: 355470 - DNA, 25 bp, Artificial
  probe
  misc_feature (1)..(25): SEQ ID NO: 3433; WAN024DQ6; Start 359; Stop 383
tgcgaatgattcacttggatatatt

SEQ ID NO: 355471 - DNA, 25 bp, Artificial
  probe
  misc_feature (1)..(25): SEQ ID NO: 3433; WAN024DQ6; Start 469; Stop 493
tggacaagacttcttacatgaattg

SEQ ID NO: 355472 - DNA, 25 bp, Artificial
  probe
  misc_feature (1)..(25): SEQ ID NO: 3433; WAN024DQ6; Start 385; Stop 409
ggatggatattcaagagattacaga

SEQ ID NO: 355473 - DNA, 25 bp, Artificial
  probe
  misc_feature (1)..(25): SEQ ID NO: 3433; WAN024DQ6; Start 471; Stop 495
gacaagacttcttacatgaattgga

SEQ ID NO: 355474 - DNA, 25 bp, Artificial
  probe
  misc_feature (1)..(25): SEQ ID NO: 3433; WAN024DQ6; Start 172; Stop 196
cgctgactagagaagttatggaaga

SEQ ID NO: 355475 - DNA, 25 bp, Artificial
  probe
  misc_feature (1)..(25): SEQ ID NO: 3433; WAN024DQ6; Start 357; Stop 381
ggtgcgaatgattcacttggatata

SEQ ID NO: 355476 - DNA, 25 bp, Artificial
  probe
  misc_feature (1)..(25): SEQ ID NO: 3433; WAN024DQ6; Start 472; Stop 496
acaagacttcttacatgaattggaa

SEQ ID NO: 355477 - DNA, 25 bp, Artificial
  probe
  misc_feature (1)..(25): SEQ ID NO: 3433; WAN024DQ6; Start 215; Stop 239
aagctactctaatcctcgaatctac

SEQ ID NO: 355478 - DNA, 25 bp, Artificial
  probe
  misc_feature (1)..(25): SEQ ID NO: 3433; WAN024DQ6; Start 426; Stop 450
ttagtcttgaaggttaagtctgaat

SEQ ID NO: 355479 - DNA, 25 bp, Artificial
  probe
  misc_feature (1)..(25): SEQ ID NO: 3433; WAN024DQ6; Start 425; Stop 449
attagtcttgaaggttaagtctgaa

SEQ ID NO: 355480 - DNA, 25 bp, Artificial
  probe
  misc_feature (1)..(25): SEQ ID NO: 3433; WAN024DQ6; Start 171; Stop 195
acgctgactagagaagttatggaag

SEQ ID NO: 355481 - DNA, 25 bp, Artificial
  probe
  misc_feature (1)..(25): SEQ ID NO: 3433; WAN024DQ6; Start 428; Stop 452
agtcttgaaggttaagtctgaatta

SEQ ID NO: 355482 - DNA, 25 bp, Artificial
  probe
  misc_feature (1)..(25): SEQ ID NO: 3433; WAN024DQ6; Start 427; Stop 451
tagtcttgaaggttaagtctgaatt

SEQ ID NO: 355483 - DNA, 25 bp, Artificial
  probe
  misc_feature (1)..(25): SEQ ID NO: 3433; WAN024DQ6; Start 358; Stop 382
gtgcgaatgattcacttggatatat

SEQ ID NO: 355484 - DNA, 25 bp, Artificial
  probe
  misc_feature (1)..(25): SEQ ID NO: 3433; WAN024DQ6; Start 214; Stop 238
gaagctactctaatcctcgaatcta

SEQ ID NO: 355485 - DNA, 25 bp, Artificial
  probe
  misc_feature (1)..(25): SEQ ID NO: 3434; WAN024GBB; Start 994; Stop 1018
agcattgtaacagcgtctattatct

SEQ ID NO: 355486 - DNA, 25 bp, Artificial
  probe
  misc_feature (1)..(25): SEQ ID NO: 3434; WAN024GBB; Start 993; Stop 1017
cagcattgtaacagcgtctattatc

SEQ ID NO: 355487 - DNA, 25 bp, Artificial
  probe
  misc_feature (1)..(25): SEQ ID NO: 3434; WAN024GBB; Start 995; Stop 1019
gcattgtaacagcgtctattatctt

SEQ ID NO: 355488 - DNA, 25 bp, Artificial
  probe
  misc_feature (1)..(25): SEQ ID NO: 3434; WAN024GBB; Start 992; Stop 1016
tcagcattgtaacagcgtctattat

SEQ ID NO: 355489 - DNA, 25 bp, Artificial
  probe
  misc_feature (1)..(25): SEQ ID NO: 3434; WAN024GBB; Start 829; Stop 853
gtctatgttcaaggttcgtcattag

SEQ ID NO: 355490 - DNA, 25 bp, Artificial
  probe
  misc_feature (1)..(25): SEQ ID NO: 3434; WAN024GBB; Start 830; Stop 854
tctatgttcaaggttcgtcattagc

SEQ ID NO: 355491 - DNA, 25 bp, Artificial
  probe
  misc_feature (1)..(25): SEQ ID NO: 3434; WAN024GBB; Start 828; Stop 852
cgtctatgttcaaggttcgtcatta

SEQ ID NO: 355492 - DNA, 25 bp, Artificial
  probe
  misc_feature (1)..(25): SEQ ID NO: 3434; WAN024GBB; Start 991; Stop 1015
gtcagcattgtaacagcgtctatta

SEQ ID NO: 355493 - DNA, 25 bp, Artificial
  probe
  misc_feature (1)..(25): SEQ ID NO: 3434; WAN024GBB; Start 108; Stop 132
gtggatcttcggttatgatgctatt

SEQ ID NO: 355494 - DNA, 25 bp, Artificial
  probe
  misc_feature (1)..(25): SEQ ID NO: 3434; WAN024GBB; Start 590; Stop 614
tgactggtaactcacggatgaatat

SEQ ID NO: 355495 - DNA, 25 bp, Artificial
  probe
  misc_feature (1)..(25): SEQ ID NO: 3434; WAN024GBB; Start 704; Stop 728
ttaatccacatgcttcagaatatgc

SEQ ID NO: 355496 - DNA, 25 bp, Artificial
  probe
  misc_feature (1)..(25): SEQ ID NO: 3434; WAN024GBB; Start 705; Stop 729
taatccacatgcttcagaatatgct

SEQ ID NO: 355497 - DNA, 25 bp, Artificial
  probe
  misc_feature (1)..(25): SEQ ID NO: 3434; WAN024GBB; Start 998; Stop 1022
ttgtaacagcgtctattatcttctt

SEQ ID NO: 355498 - DNA, 25 bp, Artificial
  probe
  misc_feature (1)..(25): SEQ ID NO: 3434; WAN024GBB; Start 589; Stop 613
ttgactggtaactcacggatgaata

SEQ ID NO: 355499 - DNA, 25 bp, Artificial
  probe
  misc_feature (1)..(25): SEQ ID NO: 3434; WAN024GBB; Start 996; Stop 1020
cattgtaacagcgtctattatcttc

SEQ ID NO: 355500 - DNA, 25 bp, Artificial
  probe
  misc_feature (1)..(25): SEQ ID NO: 3434; WAN024GBB; Start 997; Stop 1021
attgtaacagcgtctattatcttct

SEQ ID NO: 355501 - DNA, 25 bp, Artificial
  probe
  misc_feature (1)..(25): SEQ ID NO: 3434; WAN024GBB; Start 349; Stop 373
atgattctagcaaccatcgtgattg

SEQ ID NO: 355502 - DNA, 25 bp, Artificial
  probe
  misc_feature (1)..(25): SEQ ID NO: 3434; WAN024GBB; Start 107; Stop 131
tgtggatcttcggttatgatgctat

SEQ ID NO: 355503 - DNA, 25 bp, Artificial
  probe
  misc_feature (1)..(25): SEQ ID NO: 3434; WAN024GBB; Start 106; Stop 130
atgtggatcttcggttatgatgcta

SEQ ID NO: 355504 - DNA, 25 bp, Artificial
  probe
  misc_feature (1)..(25): SEQ ID NO: 3434; WAN024GBB; Start 100; Stop 124
attgtcatgtggatcttcggttatg

SEQ ID NO: 355505 - DNA, 25 bp, Artificial
  probe
  misc_feature (1)..(25): SEQ ID NO: 3434; WAN024GBB; Start 99; Stop 123
cattgtcatgtggatcttcggttat

SEQ ID NO: 355506 - DNA, 25 bp, Artificial
  probe
  misc_feature (1)..(25): SEQ ID NO: 3434; WAN024GBB; Start 701; Stop 725
gtcttaatccacatgcttcagaata

SEQ ID NO: 355507 - DNA, 25 bp, Artificial
  probe
  misc_feature (1)..(25): SEQ ID NO: 3434; WAN024GBB; Start 700; Stop 724
ggtcttaatccacatgcttcagaat

SEQ ID NO: 355508 - DNA, 25 bp, Artificial
  probe
  misc_feature (1)..(25): SEQ ID NO: 3434; WAN024GBB; Start 1022; Stop 1046
ttgtcagtgttcattaccttatcga

SEQ ID NO: 355509 - DNA, 25 bp, Artificial
  probe
  misc_feature (1)..(25): SEQ ID NO: 3434; WAN024GBB; Start 595; Stop 619
ggtaactcacggatgaatattggta

SEQ ID NO: 355510 - DNA, 25 bp, Artificial
  probe
  misc_feature (1)..(25): SEQ ID NO: 3434; WAN024GBB; Start 591; Stop 615
gactggtaactcacggatgaatatt

SEQ ID NO: 355511 - DNA, 25 bp, Artificial
  probe
  misc_feature (1)..(25): SEQ ID NO: 3434; WAN024GBB; Start 592; Stop 616
actggtaactcacggatgaatattg

SEQ ID NO: 355512 - DNA, 25 bp, Artificial
  probe
  misc_feature (1)..(25): SEQ ID NO: 3434; WAN024GBB; Start 1023; Stop 1047
tgtcagtgttcattaccttatcgaa

SEQ ID NO: 355513 - DNA, 25 bp, Artificial
  probe
  misc_feature (1)..(25): SEQ ID NO: 3434; WAN024GBB; Start 711; Stop 735
acatgcttcagaatatgctggtatt

SEQ ID NO: 355514 - DNA, 25 bp, Artificial
  probe
  misc_feature (1)..(25): SEQ ID NO: 3434; WAN024GBB; Start 831; Stop 855
ctatgttcaaggttcgtcattagct

SEQ ID NO: 355515 - DNA, 25 bp, Artificial
  probe
  misc_feature (1)..(25): SEQ ID NO: 3434; WAN024GBB; Start 703; Stop 727
cttaatccacatgcttcagaatatg

SEQ ID NO: 355516 - DNA, 25 bp, Artificial
  probe
  misc_feature (1)..(25): SEQ ID NO: 3434; WAN024GBB; Start 1016; Stop 1040
tcttctttgtcagtgttcattacct

SEQ ID NO: 355517 - DNA, 25 bp, Artificial
  probe
  misc_feature (1)..(25): SEQ ID NO: 3434; WAN024GBB; Start 1006; Stop 1030
gcgtctattatcttctttgtcagtg

SEQ ID NO: 355518 - DNA, 25 bp, Artificial
  probe
  misc_feature (1)..(25): SEQ ID NO: 3435; WAN024DN9; Start 2; Stop 26
tggttcgttataatgatacctattc

SEQ ID NO: 355519 - DNA, 25 bp, Artificial
  probe
  misc_feature (1)..(25): SEQ ID NO: 3435; WAN024DN9; Start 1; Stop 25
ctggttcgttataatgatacctatt

SEQ ID NO: 355520 - DNA, 25 bp, Artificial
  probe
  misc_feature (1)..(25): SEQ ID NO: 3435; WAN024DN9; Start 7; Stop 31
cgttataatgatacctattctacca

SEQ ID NO: 355521 - DNA, 25 bp, Artificial
  probe
  misc_feature (1)..(25): SEQ ID NO: 3435; WAN024DN9; Start 3; Stop 27
ggttcgttataatgatacctattct

SEQ ID NO: 355522 - DNA, 25 bp, Artificial
  probe
  misc_feature (1)..(25): SEQ ID NO: 3435; WAN024DN9; Start 6; Stop 30
tcgttataatgatacctattctacc

SEQ ID NO: 355523 - DNA, 25 bp, Artificial
  probe
  misc_feature (1)..(25): SEQ ID NO: 3436; WAN024CKZ; Start 60; Stop 84
tgaactcgctgaattacttgtagat

SEQ ID NO: 355524 - DNA, 25 bp, Artificial
  probe
  misc_feature (1)..(25): SEQ ID NO: 3436; WAN024CKZ; Start 59; Stop 83
ttgaactcgctgaattacttgtaga

SEQ ID NO: 355525 - DNA, 25 bp, Artificial
  probe
  misc_feature (1)..(25): SEQ ID NO: 3436; WAN024CKZ; Start 58; Stop 82
gttgaactcgctgaattacttgtag

SEQ ID NO: 355526 - DNA, 25 bp, Artificial
  probe
  misc_feature (1)..(25): SEQ ID NO: 3436; WAN024CKZ; Start 61; Stop 85
gaactcgctgaattacttgtagata

SEQ ID NO: 355527 - DNA, 25 bp, Artificial
  probe
  misc_feature (1)..(25): SEQ ID NO: 3436; WAN024CKZ; Start 55; Stop 79
ctagttgaactcgctgaattacttg

SEQ ID NO: 355528 - DNA, 25 bp, Artificial
  probe
  misc_feature (1)..(25): SEQ ID NO: 3436; WAN024CKZ; Start 57; Stop 81
agttgaactcgctgaattacttgta

SEQ ID NO: 355529 - DNA, 25 bp, Artificial
  probe
  misc_feature (1)..(25): SEQ ID NO: 3436; WAN024CKZ; Start 56; Stop 80
tagttgaactcgctgaattacttgt

SEQ ID NO: 355530 - DNA, 25 bp, Artificial
  probe
  misc_feature (1)..(25): SEQ ID NO: 3436; WAN024CKZ; Start 62; Stop 86
aactcgctgaattacttgtagatat

SEQ ID NO: 355531 - DNA, 25 bp, Artificial
  probe
  misc_feature (1)..(25): SEQ ID NO: 3436; WAN024CKZ; Start 86; Stop 110
tcgtacctagaactactgtatcatt

SEQ ID NO: 355532 - DNA, 25 bp, Artificial
  probe
  misc_feature (1)..(25): SEQ ID NO: 3436; WAN024CKZ; Start 85; Stop 109
atcgtacctagaactactgtatcat

SEQ ID NO: 355533 - DNA, 25 bp, Artificial
  probe
  misc_feature (1)..(25): SEQ ID NO: 3436; WAN024CKZ; Start 84; Stop 108
tatcgtacctagaactactgtatca

SEQ ID NO: 355534 - DNA, 25 bp, Artificial
  probe
  misc_feature (1)..(25): SEQ ID NO: 3436; WAN024CKZ; Start 65; Stop 89
tcgctgaattacttgtagatatcgt

SEQ ID NO: 355535 - DNA, 25 bp, Artificial
  probe
  misc_feature (1)..(25): SEQ ID NO: 3436; WAN024CKZ; Start 64; Stop 88
ctcgctgaattacttgtagatatcg

SEQ ID NO: 355536 - DNA, 25 bp, Artificial
  probe
  misc_feature (1)..(25): SEQ ID NO: 3436; WAN024CKZ; Start 94; Stop 118
agaactactgtatcatttgttgcca

SEQ ID NO: 355537 - DNA, 25 bp, Artificial
  probe
  misc_feature (1)..(25): SEQ ID NO: 3436; WAN024CKZ; Start 95; Stop 119
gaactactgtatcatttgttgccaa

SEQ ID NO: 355538 - DNA, 25 bp, Artificial
  probe
  misc_feature (1)..(25): SEQ ID NO: 3436; WAN024CKZ; Start 93; Stop 117
tagaactactgtatcatttgttgcc

SEQ ID NO: 355539 - DNA, 25 bp, Artificial
  probe
  misc_feature (1)..(25): SEQ ID NO: 3436; WAN024CKZ; Start 66; Stop 90
cgctgaattacttgtagatatcgta

SEQ ID NO: 355540 - DNA, 25 bp, Artificial
  probe
  misc_feature (1)..(25): SEQ ID NO: 3436; WAN024CKZ; Start 63; Stop 87
actcgctgaattacttgtagatatc

SEQ ID NO: 355541 - DNA, 25 bp, Artificial
  probe
  misc_feature (1)..(25): SEQ ID NO: 3436; WAN024CKZ; Start 75; Stop 99
acttgtagatatcgtacctagaact

SEQ ID NO: 355542 - DNA, 25 bp, Artificial
  probe
  misc_feature (1)..(25): SEQ ID NO: 3436; WAN024CKZ; Start 83; Stop 107
atatcgtacctagaactactgtatc

SEQ ID NO: 355543 - DNA, 25 bp, Artificial
  probe
  misc_feature (1)..(25): SEQ ID NO: 3436; WAN024CKZ; Start 54; Stop 78
actagttgaactcgctgaattactt

SEQ ID NO: 355544 - DNA, 25 bp, Artificial
  probe
  misc_feature (1)..(25): SEQ ID NO: 3436; WAN024CKZ; Start 92; Stop 116
ctagaactactgtatcatttgttgc

SEQ ID NO: 355545 - DNA, 25 bp, Artificial
  probe
  misc_feature (1)..(25): SEQ ID NO: 3436; WAN024CKZ; Start 81; Stop 105
agatatcgtacctagaactactgta

SEQ ID NO: 355546 - DNA, 25 bp, Artificial
  probe
  misc_feature (1)..(25): SEQ ID NO: 3436; WAN024CKZ; Start 80; Stop 104
tagatatcgtacctagaactactgt

SEQ ID NO: 355547 - DNA, 25 bp, Artificial
  probe
  misc_feature (1)..(25): SEQ ID NO: 3436; WAN024CKZ; Start 87; Stop 111
cgtacctagaactactgtatcattt

SEQ ID NO: 355548 - DNA, 25 bp, Artificial
  probe
  misc_feature (1)..(25): SEQ ID NO: 3436; WAN024CKZ; Start 67; Stop 91
gctgaattacttgtagatatcgtac

SEQ ID NO: 355549 - DNA, 25 bp, Artificial
  probe
  misc_feature (1)..(25): SEQ ID NO: 3436; WAN024CKZ; Start 90; Stop 114
acctagaactactgtatcatttgtt

SEQ ID NO: 355550 - DNA, 25 bp, Artificial
  probe
  misc_feature (1)..(25): SEQ ID NO: 3436; WAN024CKZ; Start 91; Stop 115
cctagaactactgtatcatttgttg

SEQ ID NO: 355551 - DNA, 25 bp, Artificial
  probe
  misc_feature (1)..(25): SEQ ID NO: 3436; WAN024CKZ; Start 69; Stop 93
tgaattacttgtagatatcgtacct

SEQ ID NO: 355552 - DNA, 25 bp, Artificial
  probe
  misc_feature (1)..(25): SEQ ID NO: 3436; WAN024CKZ; Start 74; Stop 98
tacttgtagatatcgtacctagaac

SEQ ID NO: 355553 - DNA, 25 bp, Artificial
  probe
  misc_feature (1)..(25): SEQ ID NO: 3436; WAN024CKZ; Start 97; Stop 121
actactgtatcatttgttgccaaag

SEQ ID NO: 355554 - DNA, 25 bp, Artificial
  probe
  misc_feature (1)..(25): SEQ ID NO: 3436; WAN024CKZ; Start 96; Stop 120
aactactgtatcatttgttgccaaa

SEQ ID NO: 355555 - DNA, 25 bp, Artificial
  probe
  misc_feature (1)..(25): SEQ ID NO: 3436; WAN024CKZ; Start 68; Stop 92
ctgaattacttgtagatatcgtacc

SEQ ID NO: 355556 - DNA, 25 bp, Artificial
  probe
  misc_feature (1)..(25): SEQ ID NO: 3437; WAN024CLX; Start 49; Stop 73
gctgatggaaagaaaggtacaaata

SEQ ID NO: 355557 - DNA, 25 bp, Artificial
  probe
  misc_feature (1)..(25): SEQ ID NO: 3437; WAN024CLX; Start 48; Stop 72
tgctgatggaaagaaaggtacaaat

SEQ ID NO: 355558 - DNA, 25 bp, Artificial
  probe
  misc_feature (1)..(25): SEQ ID NO: 3437; WAN024CLX; Start 47; Stop 71
ctgctgatggaaagaaaggtacaaa

SEQ ID NO: 355559 - DNA, 25 bp, Artificial
  probe
  misc_feature (1)..(25): SEQ ID NO: 3437; WAN024CLX; Start 51; Stop 75
tgatggaaagaaaggtacaaataca

SEQ ID NO: 355560 - DNA, 25 bp, Artificial
  probe
  misc_feature (1)..(25): SEQ ID NO: 3437; WAN024CLX; Start 50; Stop 74
ctgatggaaagaaaggtacaaatac

SEQ ID NO: 355561 - DNA, 25 bp, Artificial
  probe
  misc_feature (1)..(25): SEQ ID NO: 3437; WAN024CLX; Start 15; Stop 39
gtataaatacctaacaaaaccacgc

SEQ ID NO: 355562 - DNA, 25 bp, Artificial
  probe
  misc_feature (1)..(25): SEQ ID NO: 3437; WAN024CLX; Start 46; Stop 70
cctgctgatggaaagaaaggtacaa

SEQ ID NO: 355563 - DNA, 25 bp, Artificial
  probe
  misc_feature (1)..(25): SEQ ID NO: 3437; WAN024CLX; Start 2; Stop 26
tggttgatctcatgtataaatacct

SEQ ID NO: 355564 - DNA, 25 bp, Artificial
  probe
  misc_feature (1)..(25): SEQ ID NO: 3437; WAN024CLX; Start 1; Stop 25
ctggttgatctcatgtataaatacc

SEQ ID NO: 355565 - DNA, 25 bp, Artificial
  probe
  misc_feature (1)..(25): SEQ ID NO: 3437; WAN024CLX; Start 14; Stop 38
tgtataaatacctaacaaaaccacg

SEQ ID NO: 355566 - DNA, 25 bp, Artificial
  probe
  misc_feature (1)..(25): SEQ ID NO: 3437; WAN024CLX; Start 43; Stop 67
ttgcctgctgatggaaagaaaggta

SEQ ID NO: 355567 - DNA, 25 bp, Artificial
  probe
  misc_feature (1)..(25): SEQ ID NO: 3437; WAN024CLX; Start 3; Stop 27
ggttgatctcatgtataaataccta

SEQ ID NO: 355568 - DNA, 25 bp, Artificial
  probe
  misc_feature (1)..(25): SEQ ID NO: 3437; WAN024CLX; Start 16; Stop 40
tataaatacctaacaaaaccacgcg

SEQ ID NO: 355569 - DNA, 25 bp, Artificial
  probe
  misc_feature (1)..(25): SEQ ID NO: 3437; WAN024CLX; Start 45; Stop 69
gcctgctgatggaaagaaaggtaca

SEQ ID NO: 355570 - DNA, 25 bp, Artificial
  probe
  misc_feature (1)..(25): SEQ ID NO: 3437; WAN024CLX; Start 44; Stop 68
tgcctgctgatggaaagaaaggtac

SEQ ID NO: 355571 - DNA, 25 bp, Artificial
  probe
  misc_feature (1)..(25): SEQ ID NO: 3437; WAN024CLX; Start 6; Stop 30
tgatctcatgtataaatacctaaca

SEQ ID NO: 355572 - DNA, 25 bp, Artificial
  probe
  misc_feature (1)..(25): SEQ ID NO: 3437; WAN024CLX; Start 17; Stop 41
ataaatacctaacaaaaccacgcgc

SEQ ID NO: 355573 - DNA, 25 bp, Artificial
  probe
  misc_feature (1)..(25): SEQ ID NO: 3437; WAN024CLX; Start 13; Stop 37
atgtataaatacctaacaaaaccac

SEQ ID NO: 355574 - DNA, 25 bp, Artificial
  probe
  misc_feature (1)..(25): SEQ ID NO: 3437; WAN024CLX; Start 12; Stop 36
catgtataaatacctaacaaaacca

SEQ ID NO: 355575 - DNA, 25 bp, Artificial
  probe
  misc_feature (1)..(25): SEQ ID NO: 3437; WAN024CLX; Start 11; Stop 35
tcatgtataaatacctaacaaaacc

SEQ ID NO: 355576 - DNA, 25 bp, Artificial
  probe
  misc_feature (1)..(25): SEQ ID NO: 3437; WAN024CLX; Start 18; Stop 42
taaatacctaacaaaaccacgcgcc

SEQ ID NO: 355577 - DNA, 25 bp, Artificial
  probe
  misc_feature (1)..(25): SEQ ID NO: 3438; WAN024CWL; Start 213; Stop 237
tagttcttcttctgtcttaggtcca

SEQ ID NO: 355578 - DNA, 25 bp, Artificial
  probe
  misc_feature (1)..(25): SEQ ID NO: 3438; WAN024CWL; Start 410; Stop 434
caatcataacagaagcaacacctaa

SEQ ID NO: 355579 - DNA, 25 bp, Artificial
  probe
  misc_feature (1)..(25): SEQ ID NO: 3438; WAN024CWL; Start 226; Stop 250
gtcttaggtccatctgtaacttctg

SEQ ID NO: 355580 - DNA, 25 bp, Artificial
  probe
  misc_feature (1)..(25): SEQ ID NO: 3438; WAN024CWL; Start 224; Stop 248
ctgtcttaggtccatctgtaacttc

SEQ ID NO: 355581 - DNA, 25 bp, Artificial
  probe
  misc_feature (1)..(25): SEQ ID NO: 3438; WAN024CWL; Start 221; Stop 245
cttctgtcttaggtccatctgtaac

SEQ ID NO: 355582 - DNA, 25 bp, Artificial
  probe
  misc_feature (1)..(25): SEQ ID NO: 3438; WAN024CWL; Start 220; Stop 244
tcttctgtcttaggtccatctgtaa

SEQ ID NO: 355583 - DNA, 25 bp, Artificial
  probe
  misc_feature (1)..(25): SEQ ID NO: 3438; WAN024CWL; Start 219; Stop 243
ttcttctgtcttaggtccatctgta

SEQ ID NO: 355584 - DNA, 25 bp, Artificial
  probe
  misc_feature (1)..(25): SEQ ID NO: 3438; WAN024CWL; Start 225; Stop 249
tgtcttaggtccatctgtaacttct

SEQ ID NO: 355585 - DNA, 25 bp, Artificial
  probe
  misc_feature (1)..(25): SEQ ID NO: 3438; WAN024CWL; Start 223; Stop 247
tctgtcttaggtccatctgtaactt

SEQ ID NO: 355586 - DNA, 25 bp, Artificial
  probe
  misc_feature (1)..(25): SEQ ID NO: 3438; WAN024CWL; Start 222; Stop 246
ttctgtcttaggtccatctgtaact

SEQ ID NO: 355587 - DNA, 25 bp, Artificial
  probe
  misc_feature (1)..(25): SEQ ID NO: 3438; WAN024CWL; Start 216; Stop 240
ttcttcttctgtcttaggtccatct

SEQ ID NO: 355588 - DNA, 25 bp, Artificial
  probe
  misc_feature (1)..(25): SEQ ID NO: 3438; WAN024CWL; Start 215; Stop 239
gttcttcttctgtcttaggtccatc

SEQ ID NO: 355589 - DNA, 25 bp, Artificial
  probe
  misc_feature (1)..(25): SEQ ID NO: 3438; WAN024CWL; Start 212; Stop 236
atagttcttcttctgtcttaggtcc

SEQ ID NO: 355590 - DNA, 25 bp, Artificial
  probe
  misc_feature (1)..(25): SEQ ID NO: 3438; WAN024CWL; Start 214; Stop 238
agttcttcttctgtcttaggtccat

SEQ ID NO: 355591 - DNA, 25 bp, Artificial
  probe
  misc_feature (1)..(25): SEQ ID NO: 3438; WAN024CWL; Start 205; Stop 229
agtgctaatagttcttcttctgtct

SEQ ID NO: 355592 - DNA, 25 bp, Artificial
  probe
  misc_feature (1)..(25): SEQ ID NO: 3438; WAN024CWL; Start 409; Stop 433
ccaatcataacagaagcaacaccta

SEQ ID NO: 355593 - DNA, 25 bp, Artificial
  probe
  misc_feature (1)..(25): SEQ ID NO: 3438; WAN024CWL; Start 414; Stop 438
cataacagaagcaacacctaatgaa

SEQ ID NO: 355594 - DNA, 25 bp, Artificial
  probe
  misc_feature (1)..(25): SEQ ID NO: 3438; WAN024CWL; Start 412; Stop 436
atcataacagaagcaacacctaatg

SEQ ID NO: 355595 - DNA, 25 bp, Artificial
  probe
  misc_feature (1)..(25): SEQ ID NO: 3438; WAN024CWL; Start 217; Stop 241
tcttcttctgtcttaggtccatctg

SEQ ID NO: 355596 - DNA, 25 bp, Artificial
  probe
  misc_feature (1)..(25): SEQ ID NO: 3438; WAN024CWL; Start 411; Stop 435
aatcataacagaagcaacacctaat

SEQ ID NO: 355597 - DNA, 25 bp, Artificial
  probe
  misc_feature (1)..(25): SEQ ID NO: 3438; WAN024CWL; Start 206; Stop 230
gtgctaatagttcttcttctgtctt

SEQ ID NO: 355598 - DNA, 25 bp, Artificial
  probe
  misc_feature (1)..(25): SEQ ID NO: 3438; WAN024CWL; Start 218; Stop 242
cttcttctgtcttaggtccatctgt

SEQ ID NO: 355599 - DNA, 25 bp, Artificial
  probe
  misc_feature (1)..(25): SEQ ID NO: 3438; WAN024CWL; Start 203; Stop 227
caagtgctaatagttcttcttctgt

SEQ ID NO: 355600 - DNA, 25 bp, Artificial
  probe
  misc_feature (1)..(25): SEQ ID NO: 3438; WAN024CWL; Start 204; Stop 228
aagtgctaatagttcttcttctgtc

SEQ ID NO: 355601 - DNA, 25 bp, Artificial
  probe
  misc_feature (1)..(25): SEQ ID NO: 3438; WAN024CWL; Start 202; Stop 226
tcaagtgctaatagttcttcttctg

SEQ ID NO: 355602 - DNA, 25 bp, Artificial
  probe
  misc_feature (1)..(25): SEQ ID NO: 3438; WAN024CWL; Start 236; Stop 260
catctgtaacttctggagaaccttg

SEQ ID NO: 355603 - DNA, 25 bp, Artificial
  probe
  misc_feature (1)..(25): SEQ ID NO: 3438; WAN024CWL; Start 407; Stop 431
ctccaatcataacagaagcaacacc

SEQ ID NO: 355604 - DNA, 25 bp, Artificial
  probe
  misc_feature (1)..(25): SEQ ID NO: 3438; WAN024CWL; Start 211; Stop 235
aatagttcttcttctgtcttaggtc

SEQ ID NO: 355605 - DNA, 25 bp, Artificial
  probe
  misc_feature (1)..(25): SEQ ID NO: 3438; WAN024CWL; Start 26; Stop 50
agcagttgaggatagttggttgtag

SEQ ID NO: 355606 - DNA, 25 bp, Artificial
  probe
  misc_feature (1)..(25): SEQ ID NO: 3438; WAN024CWL; Start 25; Stop 49
gagcagttgaggatagttggttgta

SEQ ID NO: 355607 - DNA, 25 bp, Artificial
  probe
  misc_feature (1)..(25): SEQ ID NO: 3438; WAN024CWL; Start 201; Stop 225
ttcaagtgctaatagttcttcttct

SEQ ID NO: 355608 - DNA, 25 bp, Artificial
  probe
  misc_feature (1)..(25): SEQ ID NO: 3438; WAN024CWL; Start 408; Stop 432
tccaatcataacagaagcaacacct

SEQ ID NO: 355609 - DNA, 25 bp, Artificial
  probe
  misc_feature (1)..(25): SEQ ID NO: 3438; WAN024CWL; Start 242; Stop 266
taacttctggagaaccttggtcttc

SEQ ID NO: 355610 - DNA, 25 bp, Artificial
  probe
  misc_feature (1)..(25): SEQ ID NO: 3439; WAN024DOT; Start 10; Stop 34
aaggaaggatacaaccaagaagaat

SEQ ID NO: 355611 - DNA, 25 bp, Artificial
  probe
  misc_feature (1)..(25): SEQ ID NO: 3439; WAN024DOT; Start 9; Stop 33
caaggaaggatacaaccaagaagaa

SEQ ID NO: 355612 - DNA, 25 bp, Artificial
  probe
  misc_feature (1)..(25): SEQ ID NO: 3439; WAN024DOT; Start 11; Stop 35
aggaaggatacaaccaagaagaata

SEQ ID NO: 355613 - DNA, 25 bp, Artificial
  probe
  misc_feature (1)..(25): SEQ ID NO: 3439; WAN024DOT; Start 12; Stop 36
ggaaggatacaaccaagaagaatat

SEQ ID NO: 355614 - DNA, 25 bp, Artificial
  probe
  misc_feature (1)..(25): SEQ ID NO: 3439; WAN024DOT; Start 8; Stop 32
ccaaggaaggatacaaccaagaaga

SEQ ID NO: 355615 - DNA, 25 bp, Artificial
  probe
  misc_feature (1)..(25): SEQ ID NO: 3439; WAN024DOT; Start 14; Stop 38
aaggatacaaccaagaagaatatct

SEQ ID NO: 355616 - DNA, 25 bp, Artificial
  probe
  misc_feature (1)..(25): SEQ ID NO: 3439; WAN024DOT; Start 7; Stop 31
tccaaggaaggatacaaccaagaag

SEQ ID NO: 355617 - DNA, 25 bp, Artificial
  probe
  misc_feature (1)..(25): SEQ ID NO: 3439; WAN024DOT; Start 13; Stop 37
gaaggatacaaccaagaagaatatc

SEQ ID NO: 355618 - DNA, 25 bp, Artificial
  probe
  misc_feature (1)..(25): SEQ ID NO: 3439; WAN024DOT; Start 6; Stop 30
ttccaaggaaggatacaaccaagaa

SEQ ID NO: 355619 - DNA, 25 bp, Artificial
  probe
  misc_feature (1)..(25): SEQ ID NO: 3439; WAN024DOT; Start 15; Stop 39
aggatacaaccaagaagaatatctt

SEQ ID NO: 355620 - DNA, 25 bp, Artificial
  probe
  misc_feature (1)..(25): SEQ ID NO: 3439; WAN024DOT; Start 54; Stop 78
tagtagaatgcttcaatttctgggt

SEQ ID NO: 355621 - DNA, 25 bp, Artificial
  probe
  misc_feature (1)..(25): SEQ ID NO: 3439; WAN024DOT; Start 53; Stop 77
ttagtagaatgcttcaatttctggg

SEQ ID NO: 355622 - DNA, 25 bp, Artificial
  probe
  misc_feature (1)..(25): SEQ ID NO: 3439; WAN024DOT; Start 4; Stop 28
gtttccaaggaaggatacaaccaag

SEQ ID NO: 355623 - DNA, 25 bp, Artificial
  probe
  misc_feature (1)..(25): SEQ ID NO: 3439; WAN024DOT; Start 5; Stop 29
tttccaaggaaggatacaaccaaga

SEQ ID NO: 355624 - DNA, 25 bp, Artificial
  probe
  misc_feature (1)..(25): SEQ ID NO: 3439; WAN024DOT; Start 52; Stop 76
tttagtagaatgcttcaatttctgg

SEQ ID NO: 355625 - DNA, 25 bp, Artificial
  probe
  misc_feature (1)..(25): SEQ ID NO: 3439; WAN024DOT; Start 3; Stop 27
ggtttccaaggaaggatacaaccaa

SEQ ID NO: 355626 - DNA, 25 bp, Artificial
  probe
  misc_feature (1)..(25): SEQ ID NO: 3439; WAN024DOT; Start 29; Stop 53
aagaatatcttcatcccaatgtttt

SEQ ID NO: 355627 - DNA, 25 bp, Artificial
  probe
  misc_feature (1)..(25): SEQ ID NO: 3439; WAN024DOT; Start 1; Stop 25
ctggtttccaaggaaggatacaacc

SEQ ID NO: 355628 - DNA, 25 bp, Artificial
  probe
  misc_feature (1)..(25): SEQ ID NO: 3439; WAN024DOT; Start 51; Stop 75
ttttagtagaatgcttcaatttctg

SEQ ID NO: 355629 - DNA, 25 bp, Artificial
  probe
  misc_feature (1)..(25): SEQ ID NO: 3440; WAN024CL8; Start 61; Stop 85
ctgggaacgcactttcttcatattt

SEQ ID NO: 355630 - DNA, 25 bp, Artificial
  probe
  misc_feature (1)..(25): SEQ ID NO: 3440; WAN024CL8; Start 105; Stop 129
cgataaagactattgggatgaattt

SEQ ID NO: 355631 - DNA, 25 bp, Artificial
  probe
  misc_feature (1)..(25): SEQ ID NO: 3440; WAN024CL8; Start 104; Stop 128
tcgataaagactattgggatgaatt

SEQ ID NO: 355632 - DNA, 25 bp, Artificial
  probe
  misc_feature (1)..(25): SEQ ID NO: 3440; WAN024CL8; Start 60; Stop 84
cctgggaacgcactttcttcatatt

SEQ ID NO: 355633 - DNA, 25 bp, Artificial
  probe
  misc_feature (1)..(25): SEQ ID NO: 3440; WAN024CL8; Start 62; Stop 86
tgggaacgcactttcttcatatttt

SEQ ID NO: 355634 - DNA, 25 bp, Artificial
  probe
  misc_feature (1)..(25): SEQ ID NO: 3440; WAN024CL8; Start 59; Stop 83
tcctgggaacgcactttcttcatat

SEQ ID NO: 355635 - DNA, 25 bp, Artificial
  probe
  misc_feature (1)..(25): SEQ ID NO: 3440; WAN024CL8; Start 98; Stop 122
aatccatcgataaagactattggga

SEQ ID NO: 355636 - DNA, 25 bp, Artificial
  probe
  misc_feature (1)..(25): SEQ ID NO: 3440; WAN024CL8; Start 103; Stop 127
atcgataaagactattgggatgaat

SEQ ID NO: 355637 - DNA, 25 bp, Artificial
  probe
  misc_feature (1)..(25): SEQ ID NO: 3440; WAN024CL8; Start 97; Stop 121
gaatccatcgataaagactattggg

SEQ ID NO: 355638 - DNA, 25 bp, Artificial
  probe
  misc_feature (1)..(25): SEQ ID NO: 3440; WAN024CL8; Start 24; Stop 48
atctcaaattgagtatgacgaagtg

SEQ ID NO: 355639 - DNA, 25 bp, Artificial
  probe
  misc_feature (1)..(25): SEQ ID NO: 3440; WAN024CL8; Start 58; Stop 82
gtcctgggaacgcactttcttcata

SEQ ID NO: 355640 - DNA, 25 bp, Artificial
  probe
  misc_feature (1)..(25): SEQ ID NO: 3440; WAN024CL8; Start 96; Stop 120
tgaatccatcgataaagactattgg

SEQ ID NO: 355641 - DNA, 25 bp, Artificial
  probe
  misc_feature (1)..(25): SEQ ID NO: 3440; WAN024CL8; Start 25; Stop 49
tctcaaattgagtatgacgaagtgc

SEQ ID NO: 355642 - DNA, 25 bp, Artificial
  probe
  misc_feature (1)..(25): SEQ ID NO: 3440; WAN024CL8; Start 95; Stop 119
ttgaatccatcgataaagactattg

SEQ ID NO: 355643 - DNA, 25 bp, Artificial
  probe
  misc_feature (1)..(25): SEQ ID NO: 3440; WAN024CL8; Start 94; Stop 118
cttgaatccatcgataaagactatt

SEQ ID NO: 355644 - DNA, 25 bp, Artificial
  probe
  misc_feature (1)..(25): SEQ ID NO: 3440; WAN024CL8; Start 101; Stop 125
ccatcgataaagactattgggatga

SEQ ID NO: 355645 - DNA, 25 bp, Artificial
  probe
  misc_feature (1)..(25): SEQ ID NO: 3440; WAN024CL8; Start 100; Stop 124
tccatcgataaagactattgggatg

SEQ ID NO: 355646 - DNA, 25 bp, Artificial
  probe
  misc_feature (1)..(25): SEQ ID NO: 3440; WAN024CL8; Start 91; Stop 115
attcttgaatccatcgataaagact

SEQ ID NO: 355647 - DNA, 25 bp, Artificial
  probe
  misc_feature (1)..(25): SEQ ID NO: 3440; WAN024CL8; Start 26; Stop 50
ctcaaattgagtatgacgaagtgcg

SEQ ID NO: 355648 - DNA, 25 bp, Artificial
  probe
  misc_feature (1)..(25): SEQ ID NO: 3440; WAN024CL8; Start 102; Stop 126
catcgataaagactattgggatgaa

SEQ ID NO: 355649 - DNA, 25 bp, Artificial
  probe
  misc_feature (1)..(25): SEQ ID NO: 3440; WAN024CL8; Start 92; Stop 116
ttcttgaatccatcgataaagacta

SEQ ID NO: 355650 - DNA, 25 bp, Artificial
  probe
  misc_feature (1)..(25): SEQ ID NO: 3440; WAN024CL8; Start 99; Stop 123
atccatcgataaagactattgggat

SEQ ID NO: 355651 - DNA, 25 bp, Artificial
  probe
  misc_feature (1)..(25): SEQ ID NO: 3440; WAN024CL8; Start 93; Stop 117
tcttgaatccatcgataaagactat

SEQ ID NO: 355652 - DNA, 25 bp, Artificial
  probe
  misc_feature (1)..(25): SEQ ID NO: 3440; WAN024CL8; Start 106; Stop 130
gataaagactattgggatgaatttt

SEQ ID NO: 355653 - DNA, 25 bp, Artificial
  probe
  misc_feature (1)..(25): SEQ ID NO: 3440; WAN024CL8; Start 87; Stop 111
tcatattcttgaatccatcgataaa

SEQ ID NO: 355654 - DNA, 25 bp, Artificial
  probe
  misc_feature (1)..(25): SEQ ID NO: 3440; WAN024CL8; Start 88; Stop 112
catattcttgaatccatcgataaag

SEQ ID NO: 355655 - DNA, 25 bp, Artificial
  probe
  misc_feature (1)..(25): SEQ ID NO: 3440; WAN024CL8; Start 86; Stop 110
ttcatattcttgaatccatcgataa

SEQ ID NO: 355656 - DNA, 25 bp, Artificial
  probe
  misc_feature (1)..(25): SEQ ID NO: 3440; WAN024CL8; Start 90; Stop 114
tattcttgaatccatcgataaagac

SEQ ID NO: 355657 - DNA, 25 bp, Artificial
  probe
  misc_feature (1)..(25): SEQ ID NO: 3440; WAN024CL8; Start 28; Stop 52
caaattgagtatgacgaagtgcgct

SEQ ID NO: 355658 - DNA, 25 bp, Artificial
  probe
  misc_feature (1)..(25): SEQ ID NO: 3440; WAN024CL8; Start 29; Stop 53
aaattgagtatgacgaagtgcgctc

SEQ ID NO: 355659 - DNA, 25 bp, Artificial
  probe
  misc_feature (1)..(25): SEQ ID NO: 3440; WAN024CL8; Start 27; Stop 51
tcaaattgagtatgacgaagtgcgc

SEQ ID NO: 355660 - DNA, 25 bp, Artificial
  probe
  misc_feature (1)..(25): SEQ ID NO: 3440; WAN024CL8; Start 85; Stop 109
tttcatattcttgaatccatcgata

SEQ ID NO: 355661 - DNA, 25 bp, Artificial
  probe
  misc_feature (1)..(25): SEQ ID NO: 3440; WAN024CL8; Start 89; Stop 113
atattcttgaatccatcgataaaga

SEQ ID NO: 355662 - DNA, 25 bp, Artificial
  probe
  misc_feature (1)..(25): SEQ ID NO: 3440; WAN024CL8; Start 84; Stop 108
ttttcatattcttgaatccatcgat

SEQ ID NO: 355663 - DNA, 25 bp, Artificial
  probe
  misc_feature (1)..(25): SEQ ID NO: 3441; WAN024DN7; Start 87; Stop 111
gcaaaattatgctatcaaatcaagc

SEQ ID NO: 355664 - DNA, 25 bp, Artificial
  probe
  misc_feature (1)..(25): SEQ ID NO: 3441; WAN024DN7; Start 88; Stop 112
caaaattatgctatcaaatcaagct

SEQ ID NO: 355665 - DNA, 25 bp, Artificial
  probe
  misc_feature (1)..(25): SEQ ID NO: 3441; WAN024DN7; Start 86; Stop 110
tgcaaaattatgctatcaaatcaag

SEQ ID NO: 355666 - DNA, 25 bp, Artificial
  probe
  misc_feature (1)..(25): SEQ ID NO: 3441; WAN024DN7; Start 85; Stop 109
atgcaaaattatgctatcaaatcaa

SEQ ID NO: 355667 - DNA, 25 bp, Artificial
  probe
  misc_feature (1)..(25): SEQ ID NO: 3441; WAN024DN7; Start 84; Stop 108
aatgcaaaattatgctatcaaatca

SEQ ID NO: 355668 - DNA, 25 bp, Artificial
  probe
  misc_feature (1)..(25): SEQ ID NO: 3441; WAN024DN7; Start 92; Stop 116
attatgctatcaaatcaagcttaaa

SEQ ID NO: 355669 - DNA, 25 bp, Artificial
  probe
  misc_feature (1)..(25): SEQ ID NO: 3441; WAN024DN7; Start 91; Stop 115
aattatgctatcaaatcaagcttaa

SEQ ID NO: 355670 - DNA, 25 bp, Artificial
  probe
  misc_feature (1)..(25): SEQ ID NO: 3441; WAN024DN7; Start 90; Stop 114
aaattatgctatcaaatcaagctta

SEQ ID NO: 355671 - DNA, 25 bp, Artificial
  probe
  misc_feature (1)..(25): SEQ ID NO: 3441; WAN024DN7; Start 83; Stop 107
aaatgcaaaattatgctatcaaatc

SEQ ID NO: 355672 - DNA, 25 bp, Artificial
  probe
  misc_feature (1)..(25): SEQ ID NO: 3441; WAN024DN7; Start 89; Stop 113
aaaattatgctatcaaatcaagctt

SEQ ID NO: 355673 - DNA, 25 bp, Artificial
  probe
  misc_feature (1)..(25): SEQ ID NO: 3441; WAN024DN7; Start 82; Stop 106
aaaatgcaaaattatgctatcaaat

SEQ ID NO: 355674 - DNA, 25 bp, Artificial
  probe
  misc_feature (1)..(25): SEQ ID NO: 3441; WAN024DN7; Start 93; Stop 117
ttatgctatcaaatcaagcttaaaa

SEQ ID NO: 355675 - DNA, 25 bp, Artificial
  probe
  misc_feature (1)..(25): SEQ ID NO: 3442; WAN024AUJ; Start 402; Stop 426
gactcttctagttaatccagatggc

SEQ ID NO: 355676 - DNA, 25 bp, Artificial
  probe
  misc_feature (1)..(25): SEQ ID NO: 3442; WAN024AUJ; Start 280; Stop 304
attaacagagctattgagattgcca

SEQ ID NO: 355677 - DNA, 25 bp, Artificial
  probe
  misc_feature (1)..(25): SEQ ID NO: 3442; WAN024AUJ; Start 279; Stop 303
aattaacagagctattgagattgcc

SEQ ID NO: 355678 - DNA, 25 bp, Artificial
  probe
  misc_feature (1)..(25): SEQ ID NO: 3442; WAN024AUJ; Start 281; Stop 305
ttaacagagctattgagattgccaa

SEQ ID NO: 355679 - DNA, 25 bp, Artificial
  probe
  misc_feature (1)..(25): SEQ ID NO: 3442; WAN024AUJ; Start 681; Stop 705
cgagtattatctagttgtaggacgt

SEQ ID NO: 355680 - DNA, 25 bp, Artificial
  probe
  misc_feature (1)..(25): SEQ ID NO: 3442; WAN024AUJ; Start 1064; Stop 1088
atgagattattgaaacgagtgaaca

SEQ ID NO: 355681 - DNA, 25 bp, Artificial
  probe
  misc_feature (1)..(25): SEQ ID NO: 3442; WAN024AUJ; Start 102; Stop 126
gaaattaacagccttccaacaagat

SEQ ID NO: 355682 - DNA, 25 bp, Artificial
  probe
  misc_feature (1)..(25): SEQ ID NO: 3442; WAN024AUJ; Start 100; Stop 124
gagaaattaacagccttccaacaag

SEQ ID NO: 355683 - DNA, 25 bp, Artificial
  probe
  misc_feature (1)..(25): SEQ ID NO: 3442; WAN024AUJ; Start 101; Stop 125
agaaattaacagccttccaacaaga

SEQ ID NO: 355684 - DNA, 25 bp, Artificial
  probe
  misc_feature (1)..(25): SEQ ID NO: 3442; WAN024AUJ; Start 480; Stop 504
ttctgaaggtcttatggtcaaacat

SEQ ID NO: 355685 - DNA, 25 bp, Artificial
  probe
  misc_feature (1)..(25): SEQ ID NO: 3442; WAN024AUJ; Start 479; Stop 503
tttctgaaggtcttatggtcaaaca

SEQ ID NO: 355686 - DNA, 25 bp, Artificial
  probe
  misc_feature (1)..(25): SEQ ID NO: 3442; WAN024AUJ; Start 1010; Stop 1034
ttaaccgagaagttgctgaagatgg

SEQ ID NO: 355687 - DNA, 25 bp, Artificial
  probe
  misc_feature (1)..(25): SEQ ID NO: 3442; WAN024AUJ; Start 99; Stop 123
tgagaaattaacagccttccaacaa

SEQ ID NO: 355688 - DNA, 25 bp, Artificial
  probe
  misc_feature (1)..(25): SEQ ID NO: 3442; WAN024AUJ; Start 1065; Stop 1089
tgagattattgaaacgagtgaacaa

SEQ ID NO: 355689 - DNA, 25 bp, Artificial
  probe
  misc_feature (1)..(25): SEQ ID NO: 3442; WAN024AUJ; Start 614; Stop 638
gctccgtattaaagagtagtgatga

SEQ ID NO: 355690 - DNA, 25 bp, Artificial
  probe
  misc_feature (1)..(25): SEQ ID NO: 3442; WAN024AUJ; Start 478; Stop 502
atttctgaaggtcttatggtcaaac

SEQ ID NO: 355691 - DNA, 25 bp, Artificial
  probe
  misc_feature (1)..(25): SEQ ID NO: 3442; WAN024AUJ; Start 1008; Stop 1032
ctttaaccgagaagttgctgaagat

SEQ ID NO: 355692 - DNA, 25 bp, Artificial
  probe
  misc_feature (1)..(25): SEQ ID NO: 3442; WAN024AUJ; Start 98; Stop 122
ttgagaaattaacagccttccaaca

SEQ ID NO: 355693 - DNA, 25 bp, Artificial
  probe
  misc_feature (1)..(25): SEQ ID NO: 3442; WAN024AUJ; Start 1009; Stop 1033
tttaaccgagaagttgctgaagatg

SEQ ID NO: 355694 - DNA, 25 bp, Artificial
  probe
  misc_feature (1)..(25): SEQ ID NO: 3442; WAN024AUJ; Start 613; Stop 637
cgctccgtattaaagagtagtgatg

SEQ ID NO: 355695 - DNA, 25 bp, Artificial
  probe
  misc_feature (1)..(25): SEQ ID NO: 3442; WAN024AUJ; Start 477; Stop 501
aatttctgaaggtcttatggtcaaa

SEQ ID NO: 355696 - DNA, 25 bp, Artificial
  probe
  misc_feature (1)..(25): SEQ ID NO: 3442; WAN024AUJ; Start 1066; Stop 1090
gagattattgaaacgagtgaacaaa

SEQ ID NO: 355697 - DNA, 25 bp, Artificial
  probe
  misc_feature (1)..(25): SEQ ID NO: 3442; WAN024AUJ; Start 1063; Stop 1087
catgagattattgaaacgagtgaac

SEQ ID NO: 355698 - DNA, 25 bp, Artificial
  probe
  misc_feature (1)..(25): SEQ ID NO: 3442; WAN024AUJ; Start 481; Stop 505
tctgaaggtcttatggtcaaacatg

SEQ ID NO: 355699 - DNA, 25 bp, Artificial
  probe
  misc_feature (1)..(25): SEQ ID NO: 3442; WAN024AUJ; Start 682; Stop 706
gagtattatctagttgtaggacgtt

SEQ ID NO: 355700 - DNA, 25 bp, Artificial
  probe
  misc_feature (1)..(25): SEQ ID NO: 3442; WAN024AUJ; Start 869; Stop 893
cagtctatgagcaagagcttcttaa

SEQ ID NO: 355701 - DNA, 25 bp, Artificial
  probe
  misc_feature (1)..(25): SEQ ID NO: 3442; WAN024AUJ; Start 616; Stop 640
tccgtattaaagagtagtgatgaaa

SEQ ID NO: 355702 - DNA, 25 bp, Artificial
  probe
  misc_feature (1)..(25): SEQ ID NO: 3442; WAN024AUJ; Start 615; Stop 639
ctccgtattaaagagtagtgatgaa

SEQ ID NO: 355703 - DNA, 25 bp, Artificial
  probe
  misc_feature (1)..(25): SEQ ID NO: 3442; WAN024AUJ; Start 278; Stop 302
caattaacagagctattgagattgc

SEQ ID NO: 355704 - DNA, 25 bp, Artificial
  probe
  misc_feature (1)..(25): SEQ ID NO: 3442; WAN024AUJ; Start 277; Stop 301
gcaattaacagagctattgagattg

SEQ ID NO: 355705 - DNA, 25 bp, Artificial
  probe
  misc_feature (1)..(25): SEQ ID NO: 3442; WAN024AUJ; Start 1034; Stop 1058
gtgccatttactggaagaaagataa

SEQ ID NO: 355706 - DNA, 25 bp, Artificial
  probe
  misc_feature (1)..(25): SEQ ID NO: 3442; WAN024AUJ; Start 1033; Stop 1057
ggtgccatttactggaagaaagata

SEQ ID NO: 355707 - DNA, 25 bp, Artificial
  probe
  misc_feature (1)..(25): SEQ ID NO: 3442; WAN024AUJ; Start 282; Stop 306
taacagagctattgagattgccaaa

SEQ ID NO: 355708 - DNA, 25 bp, Artificial
  probe
  misc_feature (1)..(25): SEQ ID NO: 3443; WAN024F99; Start 43; Stop 67
agtcttatcttgattggtgaaggag

SEQ ID NO: 355709 - DNA, 25 bp, Artificial
  probe
  misc_feature (1)..(25): SEQ ID NO: 3443; WAN024F99; Start 42; Stop 66
cagtcttatcttgattggtgaagga

SEQ ID NO: 355710 - DNA, 25 bp, Artificial
  probe
  misc_feature (1)..(25): SEQ ID NO: 3443; WAN024F99; Start 44; Stop 68
gtcttatcttgattggtgaaggaga

SEQ ID NO: 355711 - DNA, 25 bp, Artificial
  probe
  misc_feature (1)..(25): SEQ ID NO: 3443; WAN024F99; Start 158; Stop 182
atgccaatagaactcatcttgaagt

SEQ ID NO: 355712 - DNA, 25 bp, Artificial
  probe
  misc_feature (1)..(25): SEQ ID NO: 3443; WAN024F99; Start 159; Stop 183
tgccaatagaactcatcttgaagta

SEQ ID NO: 355713 - DNA, 25 bp, Artificial
  probe
  misc_feature (1)..(25): SEQ ID NO: 3443; WAN024F99; Start 41; Stop 65
tcagtcttatcttgattggtgaagg

SEQ ID NO: 355714 - DNA, 25 bp, Artificial
  probe
  misc_feature (1)..(25): SEQ ID NO: 3443; WAN024F99; Start 38; Stop 62
cagtcagtcttatcttgattggtga

SEQ ID NO: 355715 - DNA, 25 bp, Artificial
  probe
  misc_feature (1)..(25): SEQ ID NO: 3443; WAN024F99; Start 37; Stop 61
tcagtcagtcttatcttgattggtg

SEQ ID NO: 355716 - DNA, 25 bp, Artificial
  probe
  misc_feature (1)..(25): SEQ ID NO: 3443; WAN024F99; Start 120; Stop 144
atcttcactgtataggatggttgag

SEQ ID NO: 355717 - DNA, 25 bp, Artificial
  probe
  misc_feature (1)..(25): SEQ ID NO: 3443; WAN024F99; Start 39; Stop 63
agtcagtcttatcttgattggtgaa

SEQ ID NO: 355718 - DNA, 25 bp, Artificial
  probe
  misc_feature (1)..(25): SEQ ID NO: 3443; WAN024F99; Start 36; Stop 60
ttcagtcagtcttatcttgattggt

SEQ ID NO: 355719 - DNA, 25 bp, Artificial
  probe
  misc_feature (1)..(25): SEQ ID NO: 3443; WAN024F99; Start 157; Stop 181
aatgccaatagaactcatcttgaag

SEQ ID NO: 355720 - DNA, 25 bp, Artificial
  probe
  misc_feature (1)..(25): SEQ ID NO: 3443; WAN024F99; Start 40; Stop 64
gtcagtcttatcttgattggtgaag

SEQ ID NO: 355721 - DNA, 25 bp, Artificial
  probe
  misc_feature (1)..(25): SEQ ID NO: 3443; WAN024F99; Start 35; Stop 59
gttcagtcagtcttatcttgattgg

SEQ ID NO: 355722 - DNA, 25 bp, Artificial
  probe
  misc_feature (1)..(25): SEQ ID NO: 3443; WAN024F99; Start 160; Stop 184
gccaatagaactcatcttgaagtag

SEQ ID NO: 355723 - DNA, 25 bp, Artificial
  probe
  misc_feature (1)..(25): SEQ ID NO: 3443; WAN024F99; Start 123; Stop 147
ttcactgtataggatggttgaggaa

SEQ ID NO: 355724 - DNA, 25 bp, Artificial
  probe
  misc_feature (1)..(25): SEQ ID NO: 3443; WAN024F99; Start 32; Stop 56
agagttcagtcagtcttatcttgat

SEQ ID NO: 355725 - DNA, 25 bp, Artificial
  probe
  misc_feature (1)..(25): SEQ ID NO: 3443; WAN024F99; Start 14; Stop 38
attatgatgaggtgaagaagagttc

SEQ ID NO: 355726 - DNA, 25 bp, Artificial
  probe
  misc_feature (1)..(25): SEQ ID NO: 3443; WAN024F99; Start 310; Stop 334
gcttcaagattaggctatgatacaa

SEQ ID NO: 355727 - DNA, 25 bp, Artificial
  probe
  misc_feature (1)..(25): SEQ ID NO: 3443; WAN024F99; Start 122; Stop 146
cttcactgtataggatggttgagga

SEQ ID NO: 355728 - DNA, 25 bp, Artificial
  probe
  misc_feature (1)..(25): SEQ ID NO: 3443; WAN024F99; Start 121; Stop 145
tcttcactgtataggatggttgagg

SEQ ID NO: 355729 - DNA, 25 bp, Artificial
  probe
  misc_feature (1)..(25): SEQ ID NO: 3443; WAN024F99; Start 34; Stop 58
agttcagtcagtcttatcttgattg

SEQ ID NO: 355730 - DNA, 25 bp, Artificial
  probe
  misc_feature (1)..(25): SEQ ID NO: 3443; WAN024F99; Start 242; Stop 266
gattgaggaatgatggataccttga

SEQ ID NO: 355731 - DNA, 25 bp, Artificial
  probe
  misc_feature (1)..(25): SEQ ID NO: 3443; WAN024F99; Start 241; Stop 265
agattgaggaatgatggataccttg

SEQ ID NO: 355732 - DNA, 25 bp, Artificial
  probe
  misc_feature (1)..(25): SEQ ID NO: 3443; WAN024F99; Start 244; Stop 268
ttgaggaatgatggataccttgatg

SEQ ID NO: 355733 - DNA, 25 bp, Artificial
  probe
  misc_feature (1)..(25): SEQ ID NO: 3443; WAN024F99; Start 33; Stop 57
gagttcagtcagtcttatcttgatt

SEQ ID NO: 355734 - DNA, 25 bp, Artificial
  probe
  misc_feature (1)..(25): SEQ ID NO: 3443; WAN024F99; Start 243; Stop 267
attgaggaatgatggataccttgat

SEQ ID NO: 355735 - DNA, 25 bp, Artificial
  probe
  misc_feature (1)..(25): SEQ ID NO: 3443; WAN024F99; Start 300; Stop 324
tatagagacagcttcaagattaggc

SEQ ID NO: 355736 - DNA, 25 bp, Artificial
  probe
  misc_feature (1)..(25): SEQ ID NO: 3443; WAN024F99; Start 240; Stop 264
tagattgaggaatgatggatacctt

SEQ ID NO: 355737 - DNA, 25 bp, Artificial
  probe
  misc_feature (1)..(25): SEQ ID NO: 3443; WAN024F99; Start 161; Stop 185
ccaatagaactcatcttgaagtaga

SEQ ID NO: 355738 - DNA, 25 bp, Artificial
  probe
  misc_feature (1)..(25): SEQ ID NO: 3443; WAN024F99; Start 239; Stop 263
atagattgaggaatgatggatacct

SEQ ID NO: 355739 - DNA, 25 bp, Artificial
  probe
  misc_feature (1)..(25): SEQ ID NO: 3443; WAN024F99; Start 238; Stop 262
tatagattgaggaatgatggatacc

SEQ ID NO: 355740 - DNA, 25 bp, Artificial
  probe
  misc_feature (1)..(25): SEQ ID NO: 3443; WAN024F99; Start 125; Stop 149
cactgtataggatggttgaggaaat

SEQ ID NO: 355741 - DNA, 25 bp, Artificial
  probe
  misc_feature (1)..(25): SEQ ID NO: 3444; WAN024DQW; Start 46; Stop 70
ccctgtgctagtgaatggatttatc

SEQ ID NO: 355742 - DNA, 25 bp, Artificial
  probe
  misc_feature (1)..(25): SEQ ID NO: 3444; WAN024DQW; Start 49; Stop 73
tgtgctagtgaatggatttatcagt

SEQ ID NO: 355743 - DNA, 25 bp, Artificial
  probe
  misc_feature (1)..(25): SEQ ID NO: 3444; WAN024DQW; Start 47; Stop 71
cctgtgctagtgaatggatttatca

SEQ ID NO: 355744 - DNA, 25 bp, Artificial
  probe
  misc_feature (1)..(25): SEQ ID NO: 3444; WAN024DQW; Start 8; Stop 32
tacctgctaccgttgaaatcaatag

SEQ ID NO: 355745 - DNA, 25 bp, Artificial
  probe
  misc_feature (1)..(25): SEQ ID NO: 3444; WAN024DQW; Start 7; Stop 31
gtacctgctaccgttgaaatcaata

SEQ ID NO: 355746 - DNA, 25 bp, Artificial
  probe
  misc_feature (1)..(25): SEQ ID NO: 3444; WAN024DQW; Start 3; Stop 27
gtatgtacctgctaccgttgaaatc

SEQ ID NO: 355747 - DNA, 25 bp, Artificial
  probe
  misc_feature (1)..(25): SEQ ID NO: 3444; WAN024DQW; Start 48; Stop 72
ctgtgctagtgaatggatttatcag

SEQ ID NO: 355748 - DNA, 25 bp, Artificial
  probe
  misc_feature (1)..(25): SEQ ID NO: 3444; WAN024DQW; Start 50; Stop 74
gtgctagtgaatggatttatcagta

SEQ ID NO: 355749 - DNA, 25 bp, Artificial
  probe
  misc_feature (1)..(25): SEQ ID NO: 3444; WAN024DQW; Start 4; Stop 28
tatgtacctgctaccgttgaaatca

SEQ ID NO: 355750 - DNA, 25 bp, Artificial
  probe
  misc_feature (1)..(25): SEQ ID NO: 3444; WAN024DQW; Start 2; Stop 26
tgtatgtacctgctaccgttgaaat

SEQ ID NO: 355751 - DNA, 25 bp, Artificial
  probe
  misc_feature (1)..(25): SEQ ID NO: 3444; WAN024DQW; Start 51; Stop 75
tgctagtgaatggatttatcagtat

SEQ ID NO: 355752 - DNA, 25 bp, Artificial
  probe
  misc_feature (1)..(25): SEQ ID NO: 3444; WAN024DQW; Start 1; Stop 25
ctgtatgtacctgctaccgttgaaa

SEQ ID NO: 355753 - DNA, 25 bp, Artificial
  probe
  misc_feature (1)..(25): SEQ ID NO: 3444; WAN024DQW; Start 45; Stop 69
gccctgtgctagtgaatggatttat

SEQ ID NO: 355754 - DNA, 25 bp, Artificial
  probe
  misc_feature (1)..(25): SEQ ID NO: 3444; WAN024DQW; Start 6; Stop 30
tgtacctgctaccgttgaaatcaat

SEQ ID NO: 355755 - DNA, 25 bp, Artificial
  probe
  misc_feature (1)..(25): SEQ ID NO: 3444; WAN024DQW; Start 5; Stop 29
atgtacctgctaccgttgaaatcaa

SEQ ID NO: 355756 - DNA, 25 bp, Artificial
  probe
  misc_feature (1)..(25): SEQ ID NO: 3444; WAN024DQW; Start 44; Stop 68
tgccctgtgctagtgaatggattta

SEQ ID NO: 355757 - DNA, 25 bp, Artificial
  probe
  misc_feature (1)..(25): SEQ ID NO: 3444; WAN024DQW; Start 52; Stop 76
gctagtgaatggatttatcagtata

SEQ ID NO: 355758 - DNA, 25 bp, Artificial
  probe
  misc_feature (1)..(25): SEQ ID NO: 3444; WAN024DQW; Start 43; Stop 67
ttgccctgtgctagtgaatggattt

SEQ ID NO: 355759 - DNA, 25 bp, Artificial
  probe
  misc_feature (1)..(25): SEQ ID NO: 3444; WAN024DQW; Start 42; Stop 66
cttgccctgtgctagtgaatggatt

SEQ ID NO: 355760 - DNA, 25 bp, Artificial
  probe
  misc_feature (1)..(25): SEQ ID NO: 3445; WAN024CM3; Start 18; Stop 42
ttcaagttttcacacctttctcaaa

SEQ ID NO: 355761 - DNA, 25 bp, Artificial
  probe
  misc_feature (1)..(25): SEQ ID NO: 3445; WAN024CM3; Start 17; Stop 41
tttcaagttttcacacctttctcaa

SEQ ID NO: 355762 - DNA, 25 bp, Artificial
  probe
  misc_feature (1)..(25): SEQ ID NO: 3445; WAN024CM3; Start 16; Stop 40
ttttcaagttttcacacctttctca

SEQ ID NO: 355763 - DNA, 25 bp, Artificial
  probe
  misc_feature (1)..(25): SEQ ID NO: 3445; WAN024CM3; Start 14; Stop 38
cattttcaagttttcacacctttct

SEQ ID NO: 355764 - DNA, 25 bp, Artificial
  probe
  misc_feature (1)..(25): SEQ ID NO: 3445; WAN024CM3; Start 13; Stop 37
tcattttcaagttttcacacctttc

SEQ ID NO: 355765 - DNA, 25 bp, Artificial
  probe
  misc_feature (1)..(25): SEQ ID NO: 3445; WAN024CM3; Start 15; Stop 39
attttcaagttttcacacctttctc

SEQ ID NO: 355766 - DNA, 25 bp, Artificial
  probe
  misc_feature (1)..(25): SEQ ID NO: 3445; WAN024CM3; Start 10; Stop 34
aaatcattttcaagttttcacacct

SEQ ID NO: 355767 - DNA, 25 bp, Artificial
  probe
  misc_feature (1)..(25): SEQ ID NO: 3445; WAN024CM3; Start 12; Stop 36
atcattttcaagttttcacaccttt

SEQ ID NO: 355768 - DNA, 25 bp, Artificial
  probe
  misc_feature (1)..(25): SEQ ID NO: 3445; WAN024CM3; Start 11; Stop 35
aatcattttcaagttttcacacctt

SEQ ID NO: 355769 - DNA, 25 bp, Artificial
  probe
  misc_feature (1)..(25): SEQ ID NO: 3445; WAN024CM3; Start 19; Stop 43
tcaagttttcacacctttctcaaaa

SEQ ID NO: 355770 - DNA, 25 bp, Artificial
  probe
  misc_feature (1)..(25): SEQ ID NO: 3445; WAN024CM3; Start 9; Stop 33
aaaatcattttcaagttttcacacc

SEQ ID NO: 355771 - DNA, 25 bp, Artificial
  probe
  misc_feature (1)..(25): SEQ ID NO: 3445; WAN024CM3; Start 1; Stop 25
ctgtcaagaaaatcattttcaagtt

SEQ ID NO: 355772 - DNA, 25 bp, Artificial
  probe
  misc_feature (1)..(25): SEQ ID NO: 3445; WAN024CM3; Start 8; Stop 32
gaaaatcattttcaagttttcacac

SEQ ID NO: 355773 - DNA, 25 bp, Artificial
  probe
  misc_feature (1)..(25): SEQ ID NO: 3445; WAN024CM3; Start 7; Stop 31
agaaaatcattttcaagttttcaca

SEQ ID NO: 355774 - DNA, 25 bp, Artificial
  probe
  misc_feature (1)..(25): SEQ ID NO: 3445; WAN024CM3; Start 2; Stop 26
tgtcaagaaaatcattttcaagttt

SEQ ID NO: 355775 - DNA, 25 bp, Artificial
  probe
  misc_feature (1)..(25): SEQ ID NO: 3445; WAN024CM3; Start 6; Stop 30
aagaaaatcattttcaagttttcac

SEQ ID NO: 355776 - DNA, 25 bp, Artificial
  probe
  misc_feature (1)..(25): SEQ ID NO: 3445; WAN024CM3; Start 5; Stop 29
caagaaaatcattttcaagttttca

SEQ ID NO: 355777 - DNA, 25 bp, Artificial
  probe
  misc_feature (1)..(25): SEQ ID NO: 3445; WAN024CM3; Start 3; Stop 27
gtcaagaaaatcattttcaagtttt

SEQ ID NO: 355778 - DNA, 25 bp, Artificial
  probe
  misc_feature (1)..(25): SEQ ID NO: 3445; WAN024CM3; Start 4; Stop 28
tcaagaaaatcattttcaagttttc

SEQ ID NO: 355779 - DNA, 25 bp, Artificial
  probe
  misc_feature (1)..(25): SEQ ID NO: 3446; WAN024FJ8; Start 13; Stop 37
ccaagtgaagttgtttctttgtcat

SEQ ID NO: 355780 - DNA, 25 bp, Artificial
  probe
  misc_feature (1)..(25): SEQ ID NO: 3446; WAN024FJ8; Start 16; Stop 40
agtgaagttgtttctttgtcatctt

SEQ ID NO: 355781 - DNA, 25 bp, Artificial
  probe
  misc_feature (1)..(25): SEQ ID NO: 3446; WAN024FJ8; Start 15; Stop 39
aagtgaagttgtttctttgtcatct

SEQ ID NO: 355782 - DNA, 25 bp, Artificial
  probe
  misc_feature (1)..(25): SEQ ID NO: 3446; WAN024FJ8; Start 14; Stop 38
caagtgaagttgtttctttgtcatc

SEQ ID NO: 355783 - DNA, 25 bp, Artificial
  probe
  misc_feature (1)..(25): SEQ ID NO: 3446; WAN024FJ8; Start 17; Stop 41
gtgaagttgtttctttgtcatcttt

SEQ ID NO: 355784 - DNA, 25 bp, Artificial
  probe
  misc_feature (1)..(25): SEQ ID NO: 3446; WAN024FJ8; Start 12; Stop 36
accaagtgaagttgtttctttgtca

SEQ ID NO: 355785 - DNA, 25 bp, Artificial
  probe
  misc_feature (1)..(25): SEQ ID NO: 3446; WAN024FJ8; Start 11; Stop 35
caccaagtgaagttgtttctttgtc

SEQ ID NO: 355786 - DNA, 25 bp, Artificial
  probe
  misc_feature (1)..(25): SEQ ID NO: 3446; WAN024FJ8; Start 18; Stop 42
tgaagttgtttctttgtcatctttt

SEQ ID NO: 355787 - DNA, 25 bp, Artificial
  probe
  misc_feature (1)..(25): SEQ ID NO: 3446; WAN024FJ8; Start 3; Stop 27
gtcacaatcaccaagtgaagttgtt

SEQ ID NO: 355788 - DNA, 25 bp, Artificial
  probe
  misc_feature (1)..(25): SEQ ID NO: 3446; WAN024FJ8; Start 1; Stop 25
ctgtcacaatcaccaagtgaagttg

SEQ ID NO: 355789 - DNA, 25 bp, Artificial
  probe
  misc_feature (1)..(25): SEQ ID NO: 3446; WAN024FJ8; Start 8; Stop 32
aatcaccaagtgaagttgtttcttt

SEQ ID NO: 355790 - DNA, 25 bp, Artificial
  probe
  misc_feature (1)..(25): SEQ ID NO: 3446; WAN024FJ8; Start 9; Stop 33
atcaccaagtgaagttgtttctttg

SEQ ID NO: 355791 - DNA, 25 bp, Artificial
  probe
  misc_feature (1)..(25): SEQ ID NO: 3446; WAN024FJ8; Start 7; Stop 31
caatcaccaagtgaagttgtttctt

SEQ ID NO: 355792 - DNA, 25 bp, Artificial
  probe
  misc_feature (1)..(25): SEQ ID NO: 3446; WAN024FJ8; Start 50; Stop 74
atatcaaaagaagtttggcaacacc

SEQ ID NO: 355793 - DNA, 25 bp, Artificial
  probe
  misc_feature (1)..(25): SEQ ID NO: 3446; WAN024FJ8; Start 2; Stop 26
tgtcacaatcaccaagtgaagttgt

SEQ ID NO: 355794 - DNA, 25 bp, Artificial
  probe
  misc_feature (1)..(25): SEQ ID NO: 3446; WAN024FJ8; Start 6; Stop 30
acaatcaccaagtgaagttgtttct

SEQ ID NO: 355795 - DNA, 25 bp, Artificial
  probe
  misc_feature (1)..(25): SEQ ID NO: 3446; WAN024FJ8; Start 5; Stop 29
cacaatcaccaagtgaagttgtttc

SEQ ID NO: 355796 - DNA, 25 bp, Artificial
  probe
  misc_feature (1)..(25): SEQ ID NO: 3446; WAN024FJ8; Start 10; Stop 34
tcaccaagtgaagttgtttctttgt

SEQ ID NO: 355797 - DNA, 25 bp, Artificial
  probe
  misc_feature (1)..(25): SEQ ID NO: 3446; WAN024FJ8; Start 4; Stop 28
tcacaatcaccaagtgaagttgttt

SEQ ID NO: 355798 - DNA, 25 bp, Artificial
  probe
  misc_feature (1)..(25): SEQ ID NO: 3446; WAN024FJ8; Start 45; Stop 69
tccttatatcaaaagaagtttggca

SEQ ID NO: 355799 - DNA, 25 bp, Artificial
  probe
  misc_feature (1)..(25): SEQ ID NO: 3446; WAN024FJ8; Start 51; Stop 75
tatcaaaagaagtttggcaacacca

SEQ ID NO: 355800 - DNA, 25 bp, Artificial
  probe
  misc_feature (1)..(25): SEQ ID NO: 3446; WAN024FJ8; Start 49; Stop 73
tatatcaaaagaagtttggcaacac

SEQ ID NO: 355801 - DNA, 25 bp, Artificial
  probe
  misc_feature (1)..(25): SEQ ID NO: 3446; WAN024FJ8; Start 44; Stop 68
ctccttatatcaaaagaagtttggc

SEQ ID NO: 355802 - DNA, 25 bp, Artificial
  probe
  misc_feature (1)..(25): SEQ ID NO: 3446; WAN024FJ8; Start 46; Stop 70
ccttatatcaaaagaagtttggcaa

SEQ ID NO: 355803 - DNA, 25 bp, Artificial
  probe
  misc_feature (1)..(25): SEQ ID NO: 3446; WAN024FJ8; Start 48; Stop 72
ttatatcaaaagaagtttggcaaca

SEQ ID NO: 355804 - DNA, 25 bp, Artificial
  probe
  misc_feature (1)..(25): SEQ ID NO: 3446; WAN024FJ8; Start 47; Stop 71
cttatatcaaaagaagtttggcaac

SEQ ID NO: 355805 - DNA, 25 bp, Artificial
  probe
  misc_feature (1)..(25): SEQ ID NO: 3446; WAN024FJ8; Start 43; Stop 67
tctccttatatcaaaagaagtttgg

SEQ ID NO: 355806 - DNA, 25 bp, Artificial
  probe
  misc_feature (1)..(25): SEQ ID NO: 3446; WAN024FJ8; Start 52; Stop 76
atcaaaagaagtttggcaacaccaa

SEQ ID NO: 355807 - DNA, 25 bp, Artificial
  probe
  misc_feature (1)..(25): SEQ ID NO: 3446; WAN024FJ8; Start 42; Stop 66
ttctccttatatcaaaagaagtttg

SEQ ID NO: 355808 - DNA, 25 bp, Artificial
  probe
  misc_feature (1)..(25): SEQ ID NO: 3447; WAN024DNO; Start 50; Stop 74
aattcaaccgcttgtccgatatgtt

SEQ ID NO: 355809 - DNA, 25 bp, Artificial
  probe
  misc_feature (1)..(25): SEQ ID NO: 3447; WAN024DNO; Start 23; Stop 47
tcctttatctactaatggacggaac

SEQ ID NO: 355810 - DNA, 25 bp, Artificial
  probe
  misc_feature (1)..(25): SEQ ID NO: 3447; WAN024DNO; Start 1; Stop 25
ctgtcatttcaagaaggagtaatcc

SEQ ID NO: 355811 - DNA, 25 bp, Artificial
  probe
  misc_feature (1)..(25): SEQ ID NO: 3447; WAN024DNO; Start 22; Stop 46
atcctttatctactaatggacggaa

SEQ ID NO: 355812 - DNA, 25 bp, Artificial
  probe
  misc_feature (1)..(25): SEQ ID NO: 3447; WAN024DNO; Start 21; Stop 45
aatcctttatctactaatggacgga

SEQ ID NO: 355813 - DNA, 25 bp, Artificial
  probe
  misc_feature (1)..(25): SEQ ID NO: 3447; WAN024DNO; Start 20; Stop 44
taatcctttatctactaatggacgg

SEQ ID NO: 355814 - DNA, 25 bp, Artificial
  probe
  misc_feature (1)..(25): SEQ ID NO: 3447; WAN024DNO; Start 51; Stop 75
attcaaccgcttgtccgatatgttt

SEQ ID NO: 355815 - DNA, 25 bp, Artificial
  probe
  misc_feature (1)..(25): SEQ ID NO: 3447; WAN024DNO; Start 58; Stop 82
cgcttgtccgatatgttttctaagg

SEQ ID NO: 355816 - DNA, 25 bp, Artificial
  probe
  misc_feature (1)..(25): SEQ ID NO: 3447; WAN024DNO; Start 57; Stop 81
ccgcttgtccgatatgttttctaag

SEQ ID NO: 355817 - DNA, 25 bp, Artificial
  probe
  misc_feature (1)..(25): SEQ ID NO: 3447; WAN024DNO; Start 19; Stop 43
gtaatcctttatctactaatggacg

SEQ ID NO: 355818 - DNA, 25 bp, Artificial
  probe
  misc_feature (1)..(25): SEQ ID NO: 3447; WAN024DNO; Start 56; Stop 80
accgcttgtccgatatgttttctaa

SEQ ID NO: 355819 - DNA, 25 bp, Artificial
  probe
  misc_feature (1)..(25): SEQ ID NO: 3447; WAN024DNO; Start 59; Stop 83
gcttgtccgatatgttttctaagga

SEQ ID NO: 355820 - DNA, 25 bp, Artificial
  probe
  misc_feature (1)..(25): SEQ ID NO: 3447; WAN024DNO; Start 49; Stop 73
gaattcaaccgcttgtccgatatgt

SEQ ID NO: 355821 - DNA, 25 bp, Artificial
  probe
  misc_feature (1)..(25): SEQ ID NO: 3447; WAN024DNO; Start 60; Stop 84
cttgtccgatatgttttctaaggat

SEQ ID NO: 355822 - DNA, 25 bp, Artificial
  probe
  misc_feature (1)..(25): SEQ ID NO: 3447; WAN024DNO; Start 55; Stop 79
aaccgcttgtccgatatgttttcta

SEQ ID NO: 355823 - DNA, 25 bp, Artificial
  probe
  misc_feature (1)..(25): SEQ ID NO: 3447; WAN024DNO; Start 61; Stop 85
ttgtccgatatgttttctaaggatt

SEQ ID NO: 355824 - DNA, 25 bp, Artificial
  probe
  misc_feature (1)..(25): SEQ ID NO: 3447; WAN024DNO; Start 2; Stop 26
tgtcatttcaagaaggagtaatcct

SEQ ID NO: 355825 - DNA, 25 bp, Artificial
  probe
  misc_feature (1)..(25): SEQ ID NO: 3447; WAN024DNO; Start 62; Stop 86
tgtccgatatgttttctaaggatta

SEQ ID NO: 355826 - DNA, 25 bp, Artificial
  probe
  misc_feature (1)..(25): SEQ ID NO: 3447; WAN024DNO; Start 16; Stop 40
ggagtaatcctttatctactaatgg

SEQ ID NO: 355827 - DNA, 25 bp, Artificial
  probe
  misc_feature (1)..(25): SEQ ID NO: 3447; WAN024DNO; Start 52; Stop 76
ttcaaccgcttgtccgatatgtttt

SEQ ID NO: 355828 - DNA, 25 bp, Artificial
  probe
  misc_feature (1)..(25): SEQ ID NO: 3447; WAN024DNO; Start 54; Stop 78
caaccgcttgtccgatatgttttct

SEQ ID NO: 355829 - DNA, 25 bp, Artificial
  probe
  misc_feature (1)..(25): SEQ ID NO: 3447; WAN024DNO; Start 53; Stop 77
tcaaccgcttgtccgatatgttttc

SEQ ID NO: 355830 - DNA, 25 bp, Artificial
  probe
  misc_feature (1)..(25): SEQ ID NO: 3447; WAN024DNO; Start 18; Stop 42
agtaatcctttatctactaatggac

SEQ ID NO: 355831 - DNA, 25 bp, Artificial
  probe
  misc_feature (1)..(25): SEQ ID NO: 3447; WAN024DNO; Start 63; Stop 87
gtccgatatgttttctaaggattat

SEQ ID NO: 355832 - DNA, 25 bp, Artificial
  probe
  misc_feature (1)..(25): SEQ ID NO: 3447; WAN024DNO; Start 17; Stop 41
gagtaatcctttatctactaatgga

SEQ ID NO: 355833 - DNA, 25 bp, Artificial
  probe
  misc_feature (1)..(25): SEQ ID NO: 3447; WAN024DNO; Start 64; Stop 88
tccgatatgttttctaaggattata

SEQ ID NO: 355834 - DNA, 25 bp, Artificial
  probe
  misc_feature (1)..(25): SEQ ID NO: 3447; WAN024DNO; Start 15; Stop 39
aggagtaatcctttatctactaatg

SEQ ID NO: 355835 - DNA, 25 bp, Artificial
  probe
  misc_feature (1)..(25): SEQ ID NO: 3448; WAN0249DJ; Start 47; Stop 71
ggaaaattcccagctttgctattat

SEQ ID NO: 355836 - DNA, 25 bp, Artificial
  probe
  misc_feature (1)..(25): SEQ ID NO: 3448; WAN0249DJ; Start 48; Stop 72
gaaaattcccagctttgctattata

SEQ ID NO: 355837 - DNA, 25 bp, Artificial
  probe
  misc_feature (1)..(25): SEQ ID NO: 3448; WAN0249DJ; Start 49; Stop 73
aaaattcccagctttgctattatat

SEQ ID NO: 355838 - DNA, 25 bp, Artificial
  probe
  misc_feature (1)..(25): SEQ ID NO: 3449; WAN024GA2; Start 423; Stop 447
ttgtggtaatgatgtctgtcttatc

SEQ ID NO: 355839 - DNA, 25 bp, Artificial
  probe
  misc_feature (1)..(25): SEQ ID NO: 3449; WAN024GA2; Start 244; Stop 268
gttcttaacaatggttccatctcaa

SEQ ID NO: 355840 - DNA, 25 bp, Artificial
  probe
  misc_feature (1)..(25): SEQ ID NO: 3449; WAN024GA2; Start 111; Stop 135
caagattcatacacaggctgagttg

SEQ ID NO: 355841 - DNA, 25 bp, Artificial
  probe
  misc_feature (1)..(25): SEQ ID NO: 3449; WAN024GA2; Start 322; Stop 346
ccagttcaacaccaagtcctactaa

SEQ ID NO: 355842 - DNA, 25 bp, Artificial
  probe
  misc_feature (1)..(25): SEQ ID NO: 3449; WAN024GA2; Start 110; Stop 134
acaagattcatacacaggctgagtt

SEQ ID NO: 355843 - DNA, 25 bp, Artificial
  probe
  misc_feature (1)..(25): SEQ ID NO: 3449; WAN024GA2; Start 109; Stop 133
aacaagattcatacacaggctgagt

SEQ ID NO: 355844 - DNA, 25 bp, Artificial
  probe
  misc_feature (1)..(25): SEQ ID NO: 3449; WAN024GA2; Start 420; Stop 444
cctttgtggtaatgatgtctgtctt

SEQ ID NO: 355845 - DNA, 25 bp, Artificial
  probe
  misc_feature (1)..(25): SEQ ID NO: 3449; WAN024GA2; Start 421; Stop 445
ctttgtggtaatgatgtctgtctta

SEQ ID NO: 355846 - DNA, 25 bp, Artificial
  probe
  misc_feature (1)..(25): SEQ ID NO: 3449; WAN024GA2; Start 55; Stop 79
attatgaataaatcagaacaccgcc

SEQ ID NO: 355847 - DNA, 25 bp, Artificial
  probe
  misc_feature (1)..(25): SEQ ID NO: 3449; WAN024GA2; Start 323; Stop 347
cagttcaacaccaagtcctactaaa

SEQ ID NO: 355848 - DNA, 25 bp, Artificial
  probe
  misc_feature (1)..(25): SEQ ID NO: 3449; WAN024GA2; Start 435; Stop 459
tgtctgtcttatcatctgtgaagat

SEQ ID NO: 355849 - DNA, 25 bp, Artificial
  probe
  misc_feature (1)..(25): SEQ ID NO: 3449; WAN024GA2; Start 434; Stop 458
atgtctgtcttatcatctgtgaaga

SEQ ID NO: 355850 - DNA, 25 bp, Artificial
  probe
  misc_feature (1)..(25): SEQ ID NO: 3449; WAN024GA2; Start 56; Stop 80
ttatgaataaatcagaacaccgcca

SEQ ID NO: 355851 - DNA, 25 bp, Artificial
  probe
  misc_feature (1)..(25): SEQ ID NO: 3449; WAN024GA2; Start 363; Stop 387
ggctcaatcctttggttctatcatt

SEQ ID NO: 355852 - DNA, 25 bp, Artificial
  probe
  misc_feature (1)..(25): SEQ ID NO: 3449; WAN024GA2; Start 422; Stop 446
tttgtggtaatgatgtctgtcttat

SEQ ID NO: 355853 - DNA, 25 bp, Artificial
  probe
  misc_feature (1)..(25): SEQ ID NO: 3449; WAN024GA2; Start 424; Stop 448
tgtggtaatgatgtctgtcttatca

SEQ ID NO: 355854 - DNA, 25 bp, Artificial
  probe
  misc_feature (1)..(25): SEQ ID NO: 3449; WAN024GA2; Start 57; Stop 81
tatgaataaatcagaacaccgccac

SEQ ID NO: 355855 - DNA, 25 bp, Artificial
  probe
  misc_feature (1)..(25): SEQ ID NO: 3449; WAN024GA2; Start 108; Stop 132
aaacaagattcatacacaggctgag

SEQ ID NO: 355856 - DNA, 25 bp, Artificial
  probe
  misc_feature (1)..(25): SEQ ID NO: 3449; WAN024GA2; Start 362; Stop 386
tggctcaatcctttggttctatcat

SEQ ID NO: 355857 - DNA, 25 bp, Artificial
  probe
  misc_feature (1)..(25): SEQ ID NO: 3449; WAN024GA2; Start 112; Stop 136
aagattcatacacaggctgagttgc

SEQ ID NO: 355858 - DNA, 25 bp, Artificial
  probe
  misc_feature (1)..(25): SEQ ID NO: 3449; WAN024GA2; Start 419; Stop 443
ccctttgtggtaatgatgtctgtct

SEQ ID NO: 355859 - DNA, 25 bp, Artificial
  probe
  misc_feature (1)..(25): SEQ ID NO: 3449; WAN024GA2; Start 432; Stop 456
tgatgtctgtcttatcatctgtgaa

SEQ ID NO: 355860 - DNA, 25 bp, Artificial
  probe
  misc_feature (1)..(25): SEQ ID NO: 3449; WAN024GA2; Start 245; Stop 269
ttcttaacaatggttccatctcaaa

SEQ ID NO: 355861 - DNA, 25 bp, Artificial
  probe
  misc_feature (1)..(25): SEQ ID NO: 3449; WAN024GA2; Start 18; Stop 42
tccatgcttaccttaccttgctaaa

SEQ ID NO: 355862 - DNA, 25 bp, Artificial
  probe
  misc_feature (1)..(25): SEQ ID NO: 3449; WAN024GA2; Start 433; Stop 457
gatgtctgtcttatcatctgtgaag

SEQ ID NO: 355863 - DNA, 25 bp, Artificial
  probe
  misc_feature (1)..(25): SEQ ID NO: 3449; WAN024GA2; Start 375; Stop 399
tggttctatcattgatactttgagc

SEQ ID NO: 355864 - DNA, 25 bp, Artificial
  probe
  misc_feature (1)..(25): SEQ ID NO: 3449; WAN024GA2; Start 361; Stop 385
ctggctcaatcctttggttctatca

SEQ ID NO: 355865 - DNA, 25 bp, Artificial
  probe
  misc_feature (1)..(25): SEQ ID NO: 3449; WAN024GA2; Start 360; Stop 384
actggctcaatcctttggttctatc

SEQ ID NO: 355866 - DNA, 25 bp, Artificial
  probe
  misc_feature (1)..(25): SEQ ID NO: 3449; WAN024GA2; Start 359; Stop 383
gactggctcaatcctttggttctat

SEQ ID NO: 355867 - DNA, 25 bp, Artificial
  probe
  misc_feature (1)..(25): SEQ ID NO: 3449; WAN024GA2; Start 54; Stop 78
tattatgaataaatcagaacaccgc

SEQ ID NO: 355868 - DNA, 25 bp, Artificial
  probe
  misc_feature (1)..(25): SEQ ID NO: 3449; WAN024GA2; Start 66; Stop 90
atcagaacaccgccaccaacttata

SEQ ID NO: 355869 - DNA, 25 bp, Artificial
  probe
  misc_feature (1)..(25): SEQ ID NO: 3449; WAN024GA2; Start 382; Stop 406
atcattgatactttgagcttccctg

SEQ ID NO: 355870 - DNA, 25 bp, Artificial
  probe
  misc_feature (1)..(25): SEQ ID NO: 3449; WAN024GA2; Start 384; Stop 408
cattgatactttgagcttccctgac

SEQ ID NO: 355871 - DNA, 25 bp, Artificial
  probe
  misc_feature (1)..(25): SEQ ID NO: 3450; WAN024BDT; Start 22; Stop 46
gttcattcaacacctgatactatgc

SEQ ID NO: 355872 - DNA, 25 bp, Artificial
  probe
  misc_feature (1)..(25): SEQ ID NO: 3450; WAN024BDT; Start 23; Stop 47
ttcattcaacacctgatactatgcg

SEQ ID NO: 355873 - DNA, 25 bp, Artificial
  probe
  misc_feature (1)..(25): SEQ ID NO: 3450; WAN024BDT; Start 25; Stop 49
cattcaacacctgatactatgcgtt

SEQ ID NO: 355874 - DNA, 25 bp, Artificial
  probe
  misc_feature (1)..(25): SEQ ID NO: 3450; WAN024BDT; Start 21; Stop 45
agttcattcaacacctgatactatg

SEQ ID NO: 355875 - DNA, 25 bp, Artificial
  probe
  misc_feature (1)..(25): SEQ ID NO: 3450; WAN024BDT; Start 19; Stop 43
gcagttcattcaacacctgatacta

SEQ ID NO: 355876 - DNA, 25 bp, Artificial
  probe
  misc_feature (1)..(25): SEQ ID NO: 3450; WAN024BDT; Start 20; Stop 44
cagttcattcaacacctgatactat

SEQ ID NO: 355877 - DNA, 25 bp, Artificial
  probe
  misc_feature (1)..(25): SEQ ID NO: 3450; WAN024BDT; Start 24; Stop 48
tcattcaacacctgatactatgcgt

SEQ ID NO: 355878 - DNA, 25 bp, Artificial
  probe
  misc_feature (1)..(25): SEQ ID NO: 3450; WAN024BDT; Start 26; Stop 50
attcaacacctgatactatgcgttt

SEQ ID NO: 355879 - DNA, 25 bp, Artificial
  probe
  misc_feature (1)..(25): SEQ ID NO: 3450; WAN024BDT; Start 18; Stop 42
ggcagttcattcaacacctgatact

SEQ ID NO: 355880 - DNA, 25 bp, Artificial
  probe
  misc_feature (1)..(25): SEQ ID NO: 3450; WAN024BDT; Start 17; Stop 41
gggcagttcattcaacacctgatac

SEQ ID NO: 355881 - DNA, 25 bp, Artificial
  probe
  misc_feature (1)..(25): SEQ ID NO: 3450; WAN024BDT; Start 16; Stop 40
ggggcagttcattcaacacctgata

SEQ ID NO: 355882 - DNA, 25 bp, Artificial
  probe
  misc_feature (1)..(25): SEQ ID NO: 3451; WAN024DES; Start 20; Stop 44
ttatctttgcttaccctctcttgtt

SEQ ID NO: 355883 - DNA, 25 bp, Artificial
  probe
  misc_feature (1)..(25): SEQ ID NO: 3451; WAN024DES; Start 19; Stop 43
tttatctttgcttaccctctcttgt

SEQ ID NO: 355884 - DNA, 25 bp, Artificial
  probe
  misc_feature (1)..(25): SEQ ID NO: 3451; WAN024DES; Start 18; Stop 42
gtttatctttgcttaccctctcttg

SEQ ID NO: 355885 - DNA, 25 bp, Artificial
  probe
  misc_feature (1)..(25): SEQ ID NO: 3451; WAN024DES; Start 17; Stop 41
agtttatctttgcttaccctctctt

SEQ ID NO: 355886 - DNA, 25 bp, Artificial
  probe
  misc_feature (1)..(25): SEQ ID NO: 3451; WAN024DES; Start 21; Stop 45
tatctttgcttaccctctcttgttg

SEQ ID NO: 355887 - DNA, 25 bp, Artificial
  probe
  misc_feature (1)..(25): SEQ ID NO: 3451; WAN024DES; Start 16; Stop 40
aagtttatctttgcttaccctctct

SEQ ID NO: 355888 - DNA, 25 bp, Artificial
  probe
  misc_feature (1)..(25): SEQ ID NO: 3451; WAN024DES; Start 14; Stop 38
acaagtttatctttgcttaccctct

SEQ ID NO: 355889 - DNA, 25 bp, Artificial
  probe
  misc_feature (1)..(25): SEQ ID NO: 3451; WAN024DES; Start 15; Stop 39
caagtttatctttgcttaccctctc

SEQ ID NO: 355890 - DNA, 25 bp, Artificial
  probe
  misc_feature (1)..(25): SEQ ID NO: 3451; WAN024DES; Start 13; Stop 37
aacaagtttatctttgcttaccctc

SEQ ID NO: 355891 - DNA, 25 bp, Artificial
  probe
  misc_feature (1)..(25): SEQ ID NO: 3451; WAN024DES; Start 22; Stop 46
atctttgcttaccctctcttgttga

SEQ ID NO: 355892 - DNA, 25 bp, Artificial
  probe
  misc_feature (1)..(25): SEQ ID NO: 3451; WAN024DES; Start 12; Stop 36
aaacaagtttatctttgcttaccct

SEQ ID NO: 355893 - DNA, 25 bp, Artificial
  probe
  misc_feature (1)..(25): SEQ ID NO: 3451; WAN024DES; Start 28; Stop 52
gcttaccctctcttgttgacaaata

SEQ ID NO: 355894 - DNA, 25 bp, Artificial
  probe
  misc_feature (1)..(25): SEQ ID NO: 3451; WAN024DES; Start 32; Stop 56
accctctcttgttgacaaataattt

SEQ ID NO: 355895 - DNA, 25 bp, Artificial
  probe
  misc_feature (1)..(25): SEQ ID NO: 3451; WAN024DES; Start 29; Stop 53
cttaccctctcttgttgacaaataa

SEQ ID NO: 355896 - DNA, 25 bp, Artificial
  probe
  misc_feature (1)..(25): SEQ ID NO: 3451; WAN024DES; Start 23; Stop 47
tctttgcttaccctctcttgttgac

SEQ ID NO: 355897 - DNA, 25 bp, Artificial
  probe
  misc_feature (1)..(25): SEQ ID NO: 3451; WAN024DES; Start 31; Stop 55
taccctctcttgttgacaaataatt

SEQ ID NO: 355898 - DNA, 25 bp, Artificial
  probe
  misc_feature (1)..(25): SEQ ID NO: 3451; WAN024DES; Start 30; Stop 54
ttaccctctcttgttgacaaataat

SEQ ID NO: 355899 - DNA, 25 bp, Artificial
  probe
  misc_feature (1)..(25): SEQ ID NO: 3451; WAN024DES; Start 24; Stop 48
ctttgcttaccctctcttgttgaca

SEQ ID NO: 355900 - DNA, 25 bp, Artificial
  probe
  misc_feature (1)..(25): SEQ ID NO: 3451; WAN024DES; Start 27; Stop 51
tgcttaccctctcttgttgacaaat

SEQ ID NO: 355901 - DNA, 25 bp, Artificial
  probe
  misc_feature (1)..(25): SEQ ID NO: 3451; WAN024DES; Start 11; Stop 35
taaacaagtttatctttgcttaccc

SEQ ID NO: 355902 - DNA, 25 bp, Artificial
  probe
  misc_feature (1)..(25): SEQ ID NO: 3451; WAN024DES; Start 26; Stop 50
ttgcttaccctctcttgttgacaaa

SEQ ID NO: 355903 - DNA, 25 bp, Artificial
  probe
  misc_feature (1)..(25): SEQ ID NO: 3451; WAN024DES; Start 25; Stop 49
tttgcttaccctctcttgttgacaa

SEQ ID NO: 355904 - DNA, 25 bp, Artificial
  probe
  misc_feature (1)..(25): SEQ ID NO: 3451; WAN024DES; Start 61; Stop 85
tattttgggaagatacctgctgatt

SEQ ID NO: 355905 - DNA, 25 bp, Artificial
  probe
  misc_feature (1)..(25): SEQ ID NO: 3451; WAN024DES; Start 60; Stop 84
ttattttgggaagatacctgctgat

SEQ ID NO: 355906 - DNA, 25 bp, Artificial
  probe
  misc_feature (1)..(25): SEQ ID NO: 3451; WAN024DES; Start 59; Stop 83
attattttgggaagatacctgctga

SEQ ID NO: 355907 - DNA, 25 bp, Artificial
  probe
  misc_feature (1)..(25): SEQ ID NO: 3451; WAN024DES; Start 58; Stop 82
cattattttgggaagatacctgctg

SEQ ID NO: 355908 - DNA, 25 bp, Artificial
  probe
  misc_feature (1)..(25): SEQ ID NO: 3451; WAN024DES; Start 57; Stop 81
tcattattttgggaagatacctgct

SEQ ID NO: 355909 - DNA, 25 bp, Artificial
  probe
  misc_feature (1)..(25): SEQ ID NO: 3451; WAN024DES; Start 62; Stop 86
attttgggaagatacctgctgattt

SEQ ID NO: 355910 - DNA, 25 bp, Artificial
  probe
  misc_feature (1)..(25): SEQ ID NO: 3451; WAN024DES; Start 56; Stop 80
ttcattattttgggaagatacctgc

SEQ ID NO: 355911 - DNA, 25 bp, Artificial
  probe
  misc_feature (1)..(25): SEQ ID NO: 3451; WAN024DES; Start 63; Stop 87
ttttgggaagatacctgctgatttc

SEQ ID NO: 355912 - DNA, 25 bp, Artificial
  probe
  misc_feature (1)..(25): SEQ ID NO: 3451; WAN024DES; Start 55; Stop 79
tttcattattttgggaagatacctg

SEQ ID NO: 355913 - DNA, 25 bp, Artificial
  probe
  misc_feature (1)..(25): SEQ ID NO: 3451; WAN024DES; Start 10; Stop 34
ttaaacaagtttatctttgcttacc

SEQ ID NO: 355914 - DNA, 25 bp, Artificial
  probe
  misc_feature (1)..(25): SEQ ID NO: 3451; WAN024DES; Start 33; Stop 57
ccctctcttgttgacaaataatttt

SEQ ID NO: 355915 - DNA, 25 bp, Artificial
  probe
  misc_feature (1)..(25): SEQ ID NO: 3452; WAN024DQP; Start 126; Stop 150
ttatggtagaatggaagcagtagaa

SEQ ID NO: 355916 - DNA, 25 bp, Artificial
  probe
  misc_feature (1)..(25): SEQ ID NO: 3452; WAN024DQP; Start 128; Stop 152
atggtagaatggaagcagtagaatt

SEQ ID NO: 355917 - DNA, 25 bp, Artificial
  probe
  misc_feature (1)..(25): SEQ ID NO: 3452; WAN024DQP; Start 127; Stop 151
tatggtagaatggaagcagtagaat

SEQ ID NO: 355918 - DNA, 25 bp, Artificial
  probe
  misc_feature (1)..(25): SEQ ID NO: 3452; WAN024DQP; Start 125; Stop 149
attatggtagaatggaagcagtaga

SEQ ID NO: 355919 - DNA, 25 bp, Artificial
  probe
  misc_feature (1)..(25): SEQ ID NO: 3452; WAN024DQP; Start 129; Stop 153
tggtagaatggaagcagtagaatta

SEQ ID NO: 355920 - DNA, 25 bp, Artificial
  probe
  misc_feature (1)..(25): SEQ ID NO: 3452; WAN024DQP; Start 130; Stop 154
ggtagaatggaagcagtagaattag

SEQ ID NO: 355921 - DNA, 25 bp, Artificial
  probe
  misc_feature (1)..(25): SEQ ID NO: 3452; WAN024DQP; Start 124; Stop 148
aattatggtagaatggaagcagtag

SEQ ID NO: 355922 - DNA, 25 bp, Artificial
  probe
  misc_feature (1)..(25): SEQ ID NO: 3452; WAN024DQP; Start 131; Stop 155
gtagaatggaagcagtagaattaga

SEQ ID NO: 355923 - DNA, 25 bp, Artificial
  probe
  misc_feature (1)..(25): SEQ ID NO: 3452; WAN024DQP; Start 132; Stop 156
tagaatggaagcagtagaattagaa

SEQ ID NO: 355924 - DNA, 25 bp, Artificial
  probe
  misc_feature (1)..(25): SEQ ID NO: 3452; WAN024DQP; Start 122; Stop 146
caaattatggtagaatggaagcagt

SEQ ID NO: 355925 - DNA, 25 bp, Artificial
  probe
  misc_feature (1)..(25): SEQ ID NO: 3452; WAN024DQP; Start 121; Stop 145
tcaaattatggtagaatggaagcag

SEQ ID NO: 355926 - DNA, 25 bp, Artificial
  probe
  misc_feature (1)..(25): SEQ ID NO: 3452; WAN024DQP; Start 120; Stop 144
ttcaaattatggtagaatggaagca

SEQ ID NO: 355927 - DNA, 25 bp, Artificial
  probe
  misc_feature (1)..(25): SEQ ID NO: 3452; WAN024DQP; Start 115; Stop 139
gctctttcaaattatggtagaatgg

SEQ ID NO: 355928 - DNA, 25 bp, Artificial
  probe
  misc_feature (1)..(25): SEQ ID NO: 3452; WAN024DQP; Start 123; Stop 147
aaattatggtagaatggaagcagta

SEQ ID NO: 355929 - DNA, 25 bp, Artificial
  probe
  misc_feature (1)..(25): SEQ ID NO: 3452; WAN024DQP; Start 133; Stop 157
agaatggaagcagtagaattagaaa

SEQ ID NO: 355930 - DNA, 25 bp, Artificial
  probe
  misc_feature (1)..(25): SEQ ID NO: 3452; WAN024DQP; Start 119; Stop 143
tttcaaattatggtagaatggaagc

SEQ ID NO: 355931 - DNA, 25 bp, Artificial
  probe
  misc_feature (1)..(25): SEQ ID NO: 3452; WAN024DQP; Start 111; Stop 135
gcaagctctttcaaattatggtaga

SEQ ID NO: 355932 - DNA, 25 bp, Artificial
  probe
  misc_feature (1)..(25): SEQ ID NO: 3452; WAN024DQP; Start 1; Stop 25
ctgtctccattcaaatgtaaagtac

SEQ ID NO: 355933 - DNA, 25 bp, Artificial
  probe
  misc_feature (1)..(25): SEQ ID NO: 3452; WAN024DQP; Start 110; Stop 134
tgcaagctctttcaaattatggtag

SEQ ID NO: 355934 - DNA, 25 bp, Artificial
  probe
  misc_feature (1)..(25): SEQ ID NO: 3452; WAN024DQP; Start 109; Stop 133
ctgcaagctctttcaaattatggta

SEQ ID NO: 355935 - DNA, 25 bp, Artificial
  probe
  misc_feature (1)..(25): SEQ ID NO: 3452; WAN024DQP; Start 105; Stop 129
atccctgcaagctctttcaaattat

SEQ ID NO: 355936 - DNA, 25 bp, Artificial
  probe
  misc_feature (1)..(25): SEQ ID NO: 3452; WAN024DQP; Start 104; Stop 128
aatccctgcaagctctttcaaatta

SEQ ID NO: 355937 - DNA, 25 bp, Artificial
  probe
  misc_feature (1)..(25): SEQ ID NO: 3452; WAN024DQP; Start 106; Stop 130
tccctgcaagctctttcaaattatg

SEQ ID NO: 355938 - DNA, 25 bp, Artificial
  probe
  misc_feature (1)..(25): SEQ ID NO: 3452; WAN024DQP; Start 103; Stop 127
aaatccctgcaagctctttcaaatt

SEQ ID NO: 355939 - DNA, 25 bp, Artificial
  probe
  misc_feature (1)..(25): SEQ ID NO: 3452; WAN024DQP; Start 108; Stop 132
cctgcaagctctttcaaattatggt

SEQ ID NO: 355940 - DNA, 25 bp, Artificial
  probe
  misc_feature (1)..(25): SEQ ID NO: 3452; WAN024DQP; Start 137; Stop 161
tggaagcagtagaattagaaaagga

SEQ ID NO: 355941 - DNA, 25 bp, Artificial
  probe
  misc_feature (1)..(25): SEQ ID NO: 3452; WAN024DQP; Start 116; Stop 140
ctctttcaaattatggtagaatgga

SEQ ID NO: 355942 - DNA, 25 bp, Artificial
  probe
  misc_feature (1)..(25): SEQ ID NO: 3452; WAN024DQP; Start 38; Stop 62
cagaaactttcctgataaaccaata

SEQ ID NO: 355943 - DNA, 25 bp, Artificial
  probe
  misc_feature (1)..(25): SEQ ID NO: 3452; WAN024DQP; Start 112; Stop 136
caagctctttcaaattatggtagaa

SEQ ID NO: 355944 - DNA, 25 bp, Artificial
  probe
  misc_feature (1)..(25): SEQ ID NO: 3452; WAN024DQP; Start 138; Stop 162
ggaagcagtagaattagaaaaggaa

SEQ ID NO: 355945 - DNA, 25 bp, Artificial
  probe
  misc_feature (1)..(25): SEQ ID NO: 3452; WAN024DQP; Start 136; Stop 160
atggaagcagtagaattagaaaagg

SEQ ID NO: 355946 - DNA, 25 bp, Artificial
  probe
  misc_feature (1)..(25): SEQ ID NO: 3452; WAN024DQP; Start 114; Stop 138
agctctttcaaattatggtagaatg

SEQ ID NO: 355947 - DNA, 25 bp, Artificial
  probe
  misc_feature (1)..(25): SEQ ID NO: 3452; WAN024DQP; Start 107; Stop 131
ccctgcaagctctttcaaattatgg

SEQ ID NO: 355948 - DNA, 25 bp, Artificial
  probe
  misc_feature (1)..(25): SEQ ID NO: 3453; WAN024AI7; Start 96; Stop 120
tcctgattgctgattgagttgttaa

SEQ ID NO: 355949 - DNA, 25 bp, Artificial
  probe
  misc_feature (1)..(25): SEQ ID NO: 3453; WAN024AI7; Start 95; Stop 119
gtcctgattgctgattgagttgtta

SEQ ID NO: 355950 - DNA, 25 bp, Artificial
  probe
  misc_feature (1)..(25): SEQ ID NO: 3453; WAN024AI7; Start 94; Stop 118
agtcctgattgctgattgagttgtt

SEQ ID NO: 355951 - DNA, 25 bp, Artificial
  probe
  misc_feature (1)..(25): SEQ ID NO: 3453; WAN024AI7; Start 93; Stop 117
aagtcctgattgctgattgagttgt

SEQ ID NO: 355952 - DNA, 25 bp, Artificial
  probe
  misc_feature (1)..(25): SEQ ID NO: 3453; WAN024AI7; Start 133; Stop 157
cagcccactatccatcatttatttc

SEQ ID NO: 355953 - DNA, 25 bp, Artificial
  probe
  misc_feature (1)..(25): SEQ ID NO: 3453; WAN024AI7; Start 132; Stop 156
tcagcccactatccatcatttattt

SEQ ID NO: 355954 - DNA, 25 bp, Artificial
  probe
  misc_feature (1)..(25): SEQ ID NO: 3453; WAN024AI7; Start 83; Stop 107
tattgaaagaaagtcctgattgctg

SEQ ID NO: 355955 - DNA, 25 bp, Artificial
  probe
  misc_feature (1)..(25): SEQ ID NO: 3453; WAN024AI7; Start 80; Stop 104
tgctattgaaagaaagtcctgattg

SEQ ID NO: 355956 - DNA, 25 bp, Artificial
  probe
  misc_feature (1)..(25): SEQ ID NO: 3453; WAN024AI7; Start 135; Stop 159
gcccactatccatcatttatttcct

SEQ ID NO: 355957 - DNA, 25 bp, Artificial
  probe
  misc_feature (1)..(25): SEQ ID NO: 3453; WAN024AI7; Start 134; Stop 158
agcccactatccatcatttatttcc

SEQ ID NO: 355958 - DNA, 25 bp, Artificial
  probe
  misc_feature (1)..(25): SEQ ID NO: 3453; WAN024AI7; Start 131; Stop 155
gtcagcccactatccatcatttatt

SEQ ID NO: 355959 - DNA, 25 bp, Artificial
  probe
  misc_feature (1)..(25): SEQ ID NO: 3453; WAN024AI7; Start 97; Stop 121
cctgattgctgattgagttgttaaa

SEQ ID NO: 355960 - DNA, 25 bp, Artificial
  probe
  misc_feature (1)..(25): SEQ ID NO: 3453; WAN024AI7; Start 87; Stop 111
gaaagaaagtcctgattgctgattg

SEQ ID NO: 355961 - DNA, 25 bp, Artificial
  probe
  misc_feature (1)..(25): SEQ ID NO: 3453; WAN024AI7; Start 82; Stop 106
ctattgaaagaaagtcctgattgct

SEQ ID NO: 355962 - DNA, 25 bp, Artificial
  probe
  misc_feature (1)..(25): SEQ ID NO: 3453; WAN024AI7; Start 81; Stop 105
gctattgaaagaaagtcctgattgc

SEQ ID NO: 355963 - DNA, 25 bp, Artificial
  probe
  misc_feature (1)..(25): SEQ ID NO: 3453; WAN024AI7; Start 79; Stop 103
ctgctattgaaagaaagtcctgatt

SEQ ID NO: 355964 - DNA, 25 bp, Artificial
  probe
  misc_feature (1)..(25): SEQ ID NO: 3453; WAN024AI7; Start 88; Stop 112
aaagaaagtcctgattgctgattga

SEQ ID NO: 355965 - DNA, 25 bp, Artificial
  probe
  misc_feature (1)..(25): SEQ ID NO: 3453; WAN024AI7; Start 86; Stop 110
tgaaagaaagtcctgattgctgatt

SEQ ID NO: 355966 - DNA, 25 bp, Artificial
  probe
  misc_feature (1)..(25): SEQ ID NO: 3453; WAN024AI7; Start 85; Stop 109
ttgaaagaaagtcctgattgctgat

SEQ ID NO: 355967 - DNA, 25 bp, Artificial
  probe
  misc_feature (1)..(25): SEQ ID NO: 3453; WAN024AI7; Start 84; Stop 108
attgaaagaaagtcctgattgctga

SEQ ID NO: 355968 - DNA, 25 bp, Artificial
  probe
  misc_feature (1)..(25): SEQ ID NO: 3453; WAN024AI7; Start 78; Stop 102
tctgctattgaaagaaagtcctgat

SEQ ID NO: 355969 - DNA, 25 bp, Artificial
  probe
  misc_feature (1)..(25): SEQ ID NO: 3453; WAN024AI7; Start 77; Stop 101
atctgctattgaaagaaagtcctga

SEQ ID NO: 355970 - DNA, 25 bp, Artificial
  probe
  misc_feature (1)..(25): SEQ ID NO: 3453; WAN024AI7; Start 89; Stop 113
aagaaagtcctgattgctgattgag

SEQ ID NO: 355971 - DNA, 25 bp, Artificial
  probe
  misc_feature (1)..(25): SEQ ID NO: 3453; WAN024AI7; Start 76; Stop 100
aatctgctattgaaagaaagtcctg

SEQ ID NO: 355972 - DNA, 25 bp, Artificial
  probe
  misc_feature (1)..(25): SEQ ID NO: 3453; WAN024AI7; Start 136; Stop 160
cccactatccatcatttatttcctt

SEQ ID NO: 355973 - DNA, 25 bp, Artificial
  probe
  misc_feature (1)..(25): SEQ ID NO: 3453; WAN024AI7; Start 98; Stop 122
ctgattgctgattgagttgttaaac

SEQ ID NO: 355974 - DNA, 25 bp, Artificial
  probe
  misc_feature (1)..(25): SEQ ID NO: 3453; WAN024AI7; Start 91; Stop 115
gaaagtcctgattgctgattgagtt

SEQ ID NO: 355975 - DNA, 25 bp, Artificial
  probe
  misc_feature (1)..(25): SEQ ID NO: 3453; WAN024AI7; Start 92; Stop 116
aaagtcctgattgctgattgagttg

SEQ ID NO: 355976 - DNA, 25 bp, Artificial
  probe
  misc_feature (1)..(25): SEQ ID NO: 3453; WAN024AI7; Start 130; Stop 154
agtcagcccactatccatcatttat

SEQ ID NO: 355977 - DNA, 25 bp, Artificial
  probe
  misc_feature (1)..(25): SEQ ID NO: 3453; WAN024AI7; Start 90; Stop 114
agaaagtcctgattgctgattgagt

SEQ ID NO: 355978 - DNA, 25 bp, Artificial
  probe
  misc_feature (1)..(25): SEQ ID NO: 3453; WAN024AI7; Start 75; Stop 99
taatctgctattgaaagaaagtcct

SEQ ID NO: 355979 - DNA, 25 bp, Artificial
  probe
  misc_feature (1)..(25): SEQ ID NO: 3453; WAN024AI7; Start 123; Stop 147
taatcttagtcagcccactatccat

SEQ ID NO: 355980 - DNA, 25 bp, Artificial
  probe
  misc_feature (1)..(25): SEQ ID NO: 3453; WAN024AI7; Start 129; Stop 153
tagtcagcccactatccatcattta

SEQ ID NO: 355981 - DNA, 25 bp, Artificial
  probe
  misc_feature (1)..(25): SEQ ID NO: 3454; WAN024FDS; Start 14; Stop 38
ataaacttctcttagacacaagcgt

SEQ ID NO: 355982 - DNA, 25 bp, Artificial
  probe
  misc_feature (1)..(25): SEQ ID NO: 3454; WAN024FDS; Start 13; Stop 37
gataaacttctcttagacacaagcg

SEQ ID NO: 355983 - DNA, 25 bp, Artificial
  probe
  misc_feature (1)..(25): SEQ ID NO: 3454; WAN024FDS; Start 34; Stop 58
agcgtcttcagagaatttcctattt

SEQ ID NO: 355984 - DNA, 25 bp, Artificial
  probe
  misc_feature (1)..(25): SEQ ID NO: 3454; WAN024FDS; Start 33; Stop 57
aagcgtcttcagagaatttcctatt

SEQ ID NO: 355985 - DNA, 25 bp, Artificial
  probe
  misc_feature (1)..(25): SEQ ID NO: 3454; WAN024FDS; Start 32; Stop 56
caagcgtcttcagagaatttcctat

SEQ ID NO: 355986 - DNA, 25 bp, Artificial
  probe
  misc_feature (1)..(25): SEQ ID NO: 3454; WAN024FDS; Start 12; Stop 36
agataaacttctcttagacacaagc

SEQ ID NO: 355987 - DNA, 25 bp, Artificial
  probe
  misc_feature (1)..(25): SEQ ID NO: 3454; WAN024FDS; Start 409; Stop 433
gcagacaactggaagaaatactatg

SEQ ID NO: 355988 - DNA, 25 bp, Artificial
  probe
  misc_feature (1)..(25): SEQ ID NO: 3454; WAN024FDS; Start 408; Stop 432
ggcagacaactggaagaaatactat

SEQ ID NO: 355989 - DNA, 25 bp, Artificial
  probe
  misc_feature (1)..(25): SEQ ID NO: 3454; WAN024FDS; Start 15; Stop 39
taaacttctcttagacacaagcgtc

SEQ ID NO: 355990 - DNA, 25 bp, Artificial
  probe
  misc_feature (1)..(25): SEQ ID NO: 3454; WAN024FDS; Start 89; Stop 113
taatggaaacatggcaagagttaaa

SEQ ID NO: 355991 - DNA, 25 bp, Artificial
  probe
  misc_feature (1)..(25): SEQ ID NO: 3454; WAN024FDS; Start 85; Stop 109
ttaataatggaaacatggcaagagt

SEQ ID NO: 355992 - DNA, 25 bp, Artificial
  probe
  misc_feature (1)..(25): SEQ ID NO: 3454; WAN024FDS; Start 31; Stop 55
acaagcgtcttcagagaatttccta

SEQ ID NO: 355993 - DNA, 25 bp, Artificial
  probe
  misc_feature (1)..(25): SEQ ID NO: 3454; WAN024FDS; Start 88; Stop 112
ataatggaaacatggcaagagttaa

SEQ ID NO: 355994 - DNA, 25 bp, Artificial
  probe
  misc_feature (1)..(25): SEQ ID NO: 3454; WAN024FDS; Start 87; Stop 111
aataatggaaacatggcaagagtta

SEQ ID NO: 355995 - DNA, 25 bp, Artificial
  probe
  misc_feature (1)..(25): SEQ ID NO: 3454; WAN024FDS; Start 86; Stop 110
taataatggaaacatggcaagagtt

SEQ ID NO: 355996 - DNA, 25 bp, Artificial
  probe
  misc_feature (1)..(25): SEQ ID NO: 3454; WAN024FDS; Start 410; Stop 434
cagacaactggaagaaatactatga

SEQ ID NO: 355997 - DNA, 25 bp, Artificial
  probe
  misc_feature (1)..(25): SEQ ID NO: 3454; WAN024FDS; Start 407; Stop 431
gggcagacaactggaagaaatacta

SEQ ID NO: 355998 - DNA, 25 bp, Artificial
  probe
  misc_feature (1)..(25): SEQ ID NO: 3454; WAN024FDS; Start 250; Stop 274
gagcagcaagaagaaatcgtagtga

SEQ ID NO: 355999 - DNA, 25 bp, Artificial
  probe
  misc_feature (1)..(25): SEQ ID NO: 3454; WAN024FDS; Start 84; Stop 108
attaataatggaaacatggcaagag

SEQ ID NO: 356000 - DNA, 25 bp, Artificial
  probe
  misc_feature (1)..(25): SEQ ID NO: 3454; WAN024FDS; Start 28; Stop 52
gacacaagcgtcttcagagaatttc

SEQ ID NO: 356001 - DNA, 25 bp, Artificial
  probe
  misc_feature (1)..(25): SEQ ID NO: 3454; WAN024FDS; Start 251; Stop 275
agcagcaagaagaaatcgtagtgac

SEQ ID NO: 356002 - DNA, 25 bp, Artificial
  probe
  misc_feature (1)..(25): SEQ ID NO: 3454; WAN024FDS; Start 53; Stop 77
ctattttggttttgtgttttacggg

SEQ ID NO: 356003 - DNA, 25 bp, Artificial
  probe
  misc_feature (1)..(25): SEQ ID NO: 3454; WAN024FDS; Start 52; Stop 76
cctattttggttttgtgttttacgg

SEQ ID NO: 356004 - DNA, 25 bp, Artificial
  probe
  misc_feature (1)..(25): SEQ ID NO: 3454; WAN024FDS; Start 74; Stop 98
cgggcttggtattaataatggaaac

SEQ ID NO: 356005 - DNA, 25 bp, Artificial
  probe
  misc_feature (1)..(25): SEQ ID NO: 3454; WAN024FDS; Start 72; Stop 96
tacgggcttggtattaataatggaa

SEQ ID NO: 356006 - DNA, 25 bp, Artificial
  probe
  misc_feature (1)..(25): SEQ ID NO: 3454; WAN024FDS; Start 71; Stop 95
ttacgggcttggtattaataatgga

SEQ ID NO: 356007 - DNA, 25 bp, Artificial
  probe
  misc_feature (1)..(25): SEQ ID NO: 3454; WAN024FDS; Start 73; Stop 97
acgggcttggtattaataatggaaa

SEQ ID NO: 356008 - DNA, 25 bp, Artificial
  probe
  misc_feature (1)..(25): SEQ ID NO: 3454; WAN024FDS; Start 75; Stop 99
gggcttggtattaataatggaaaca

SEQ ID NO: 356009 - DNA, 25 bp, Artificial
  probe
  misc_feature (1)..(25): SEQ ID NO: 3454; WAN024FDS; Start 70; Stop 94
tttacgggcttggtattaataatgg

SEQ ID NO: 356010 - DNA, 25 bp, Artificial
  probe
  misc_feature (1)..(25): SEQ ID NO: 3454; WAN024FDS; Start 30; Stop 54
cacaagcgtcttcagagaatttcct

SEQ ID NO: 356011 - DNA, 25 bp, Artificial
  probe
  misc_feature (1)..(25): SEQ ID NO: 3454; WAN024FDS; Start 63; Stop 87
tttgtgttttacgggcttggtatta

SEQ ID NO: 356012 - DNA, 25 bp, Artificial
  probe
  misc_feature (1)..(25): SEQ ID NO: 3454; WAN024FDS; Start 54; Stop 78
tattttggttttgtgttttacgggc

SEQ ID NO: 356013 - DNA, 25 bp, Artificial
  probe
  misc_feature (1)..(25): SEQ ID NO: 3454; WAN024FDS; Start 51; Stop 75
tcctattttggttttgtgttttacg

SEQ ID NO: 356014 - DNA, 25 bp, Artificial
  probe
  misc_feature (1)..(25): SEQ ID NO: 3455; WAN024DYQ; Start 3; Stop 27
gtgcgaaagattggttaggaagaaa

SEQ ID NO: 356015 - DNA, 25 bp, Artificial
  probe
  misc_feature (1)..(25): SEQ ID NO: 3455; WAN024DYQ; Start 2; Stop 26
tgtgcgaaagattggttaggaagaa

SEQ ID NO: 356016 - DNA, 25 bp, Artificial
  probe
  misc_feature (1)..(25): SEQ ID NO: 3455; WAN024DYQ; Start 1; Stop 25
ctgtgcgaaagattggttaggaaga

SEQ ID NO: 356017 - DNA, 25 bp, Artificial
  probe
  misc_feature (1)..(25): SEQ ID NO: 3455; WAN024DYQ; Start 4; Stop 28
tgcgaaagattggttaggaagaaaa

SEQ ID NO: 356018 - DNA, 25 bp, Artificial
  probe
  misc_feature (1)..(25): SEQ ID NO: 3456; WAN024CTK; Start 10; Stop 34
acagcctttaaacaagtcatatcaa

SEQ ID NO: 356019 - DNA, 25 bp, Artificial
  probe
  misc_feature (1)..(25): SEQ ID NO: 3456; WAN024CTK; Start 9; Stop 33
aacagcctttaaacaagtcatatca

SEQ ID NO: 356020 - DNA, 25 bp, Artificial
  probe
  misc_feature (1)..(25): SEQ ID NO: 3456; WAN024CTK; Start 12; Stop 36
agcctttaaacaagtcatatcaagt

SEQ ID NO: 356021 - DNA, 25 bp, Artificial
  probe
  misc_feature (1)..(25): SEQ ID NO: 3456; WAN024CTK; Start 11; Stop 35
cagcctttaaacaagtcatatcaag

SEQ ID NO: 356022 - DNA, 25 bp, Artificial
  probe
  misc_feature (1)..(25): SEQ ID NO: 3456; WAN024CTK; Start 8; Stop 32
aaacagcctttaaacaagtcatatc

SEQ ID NO: 356023 - DNA, 25 bp, Artificial
  probe
  misc_feature (1)..(25): SEQ ID NO: 3456; WAN024CTK; Start 13; Stop 37
gcctttaaacaagtcatatcaagtt

SEQ ID NO: 356024 - DNA, 25 bp, Artificial
  probe
  misc_feature (1)..(25): SEQ ID NO: 3456; WAN024CTK; Start 5; Stop 29
ggaaaacagcctttaaacaagtcat

SEQ ID NO: 356025 - DNA, 25 bp, Artificial
  probe
  misc_feature (1)..(25): SEQ ID NO: 3456; WAN024CTK; Start 3; Stop 27
gtggaaaacagcctttaaacaagtc

SEQ ID NO: 356026 - DNA, 25 bp, Artificial
  probe
  misc_feature (1)..(25): SEQ ID NO: 3456; WAN024CTK; Start 4; Stop 28
tggaaaacagcctttaaacaagtca

SEQ ID NO: 356027 - DNA, 25 bp, Artificial
  probe
  misc_feature (1)..(25): SEQ ID NO: 3456; WAN024CTK; Start 6; Stop 30
gaaaacagcctttaaacaagtcata

SEQ ID NO: 356028 - DNA, 25 bp, Artificial
  probe
  misc_feature (1)..(25): SEQ ID NO: 3456; WAN024CTK; Start 2; Stop 26
tgtggaaaacagcctttaaacaagt

SEQ ID NO: 356029 - DNA, 25 bp, Artificial
  probe
  misc_feature (1)..(25): SEQ ID NO: 3456; WAN024CTK; Start 7; Stop 31
aaaacagcctttaaacaagtcatat

SEQ ID NO: 356030 - DNA, 25 bp, Artificial
  probe
  misc_feature (1)..(25): SEQ ID NO: 3456; WAN024CTK; Start 14; Stop 38
cctttaaacaagtcatatcaagttt

SEQ ID NO: 356031 - DNA, 25 bp, Artificial
  probe
  misc_feature (1)..(25): SEQ ID NO: 3456; WAN024CTK; Start 1; Stop 25
ctgtggaaaacagcctttaaacaag

SEQ ID NO: 356032 - DNA, 25 bp, Artificial
  probe
  misc_feature (1)..(25): SEQ ID NO: 3457; WAN024C4M; Start 655; Stop 679
gcttacatgatgacagagatgatga

SEQ ID NO: 356033 - DNA, 25 bp, Artificial
  probe
  misc_feature (1)..(25): SEQ ID NO: 3457; WAN024C4M; Start 654; Stop 678
tgcttacatgatgacagagatgatg

SEQ ID NO: 356034 - DNA, 25 bp, Artificial
  probe
  misc_feature (1)..(25): SEQ ID NO: 3457; WAN024C4M; Start 656; Stop 680
cttacatgatgacagagatgatgaa

SEQ ID NO: 356035 - DNA, 25 bp, Artificial
  probe
  misc_feature (1)..(25): SEQ ID NO: 3457; WAN024C4M; Start 653; Stop 677
ctgcttacatgatgacagagatgat

SEQ ID NO: 356036 - DNA, 25 bp, Artificial
  probe
  misc_feature (1)..(25): SEQ ID NO: 3457; WAN024C4M; Start 434; Stop 458
tcgactatcctgtaatgcactattc

SEQ ID NO: 356037 - DNA, 25 bp, Artificial
  probe
  misc_feature (1)..(25): SEQ ID NO: 3457; WAN024C4M; Start 431; Stop 455
gaatcgactatcctgtaatgcacta

SEQ ID NO: 356038 - DNA, 25 bp, Artificial
  probe
  misc_feature (1)..(25): SEQ ID NO: 3457; WAN024C4M; Start 435; Stop 459
cgactatcctgtaatgcactattca

SEQ ID NO: 356039 - DNA, 25 bp, Artificial
  probe
  misc_feature (1)..(25): SEQ ID NO: 3457; WAN024C4M; Start 809; Stop 833
ctccagatgaaatgtttgtagggta

SEQ ID NO: 356040 - DNA, 25 bp, Artificial
  probe
  misc_feature (1)..(25): SEQ ID NO: 3457; WAN024C4M; Start 810; Stop 834
tccagatgaaatgtttgtagggtat

SEQ ID NO: 356041 - DNA, 25 bp, Artificial
  probe
  misc_feature (1)..(25): SEQ ID NO: 3457; WAN024C4M; Start 433; Stop 457
atcgactatcctgtaatgcactatt

SEQ ID NO: 356042 - DNA, 25 bp, Artificial
  probe
  misc_feature (1)..(25): SEQ ID NO: 3457; WAN024C4M; Start 432; Stop 456
aatcgactatcctgtaatgcactat

SEQ ID NO: 356043 - DNA, 25 bp, Artificial
  probe
  misc_feature (1)..(25): SEQ ID NO: 3457; WAN024C4M; Start 651; Stop 675
gactgcttacatgatgacagagatg

SEQ ID NO: 356044 - DNA, 25 bp, Artificial
  probe
  misc_feature (1)..(25): SEQ ID NO: 3457; WAN024C4M; Start 580; Stop 604
aataaggttgtctttagcgatggta

SEQ ID NO: 356045 - DNA, 25 bp, Artificial
  probe
  misc_feature (1)..(25): SEQ ID NO: 3457; WAN024C4M; Start 581; Stop 605
ataaggttgtctttagcgatggtag

SEQ ID NO: 356046 - DNA, 25 bp, Artificial
  probe
  misc_feature (1)..(25): SEQ ID NO: 3457; WAN024C4M; Start 652; Stop 676
actgcttacatgatgacagagatga

SEQ ID NO: 356047 - DNA, 25 bp, Artificial
  probe
  misc_feature (1)..(25): SEQ ID NO: 3457; WAN024C4M; Start 577; Stop 601
atcaataaggttgtctttagcgatg

SEQ ID NO: 356048 - DNA, 25 bp, Artificial
  probe
  misc_feature (1)..(25): SEQ ID NO: 3457; WAN024C4M; Start 576; Stop 600
catcaataaggttgtctttagcgat

SEQ ID NO: 356049 - DNA, 25 bp, Artificial
  probe
  misc_feature (1)..(25): SEQ ID NO: 3457; WAN024C4M; Start 436; Stop 460
gactatcctgtaatgcactattcaa

SEQ ID NO: 356050 - DNA, 25 bp, Artificial
  probe
  misc_feature (1)..(25): SEQ ID NO: 3457; WAN024C4M; Start 811; Stop 835
ccagatgaaatgtttgtagggtata

SEQ ID NO: 356051 - DNA, 25 bp, Artificial
  probe
  misc_feature (1)..(25): SEQ ID NO: 3457; WAN024C4M; Start 867; Stop 891
ctacacaaatcgtctcacaccaatt

SEQ ID NO: 356052 - DNA, 25 bp, Artificial
  probe
  misc_feature (1)..(25): SEQ ID NO: 3457; WAN024C4M; Start 578; Stop 602
tcaataaggttgtctttagcgatgg

SEQ ID NO: 356053 - DNA, 25 bp, Artificial
  probe
  misc_feature (1)..(25): SEQ ID NO: 3457; WAN024C4M; Start 183; Stop 207
aacaatgaaacccatcaccgattat

SEQ ID NO: 356054 - DNA, 25 bp, Artificial
  probe
  misc_feature (1)..(25): SEQ ID NO: 3457; WAN024C4M; Start 579; Stop 603
caataaggttgtctttagcgatggt

SEQ ID NO: 356055 - DNA, 25 bp, Artificial
  probe
  misc_feature (1)..(25): SEQ ID NO: 3457; WAN024C4M; Start 575; Stop 599
acatcaataaggttgtctttagcga

SEQ ID NO: 356056 - DNA, 25 bp, Artificial
  probe
  misc_feature (1)..(25): SEQ ID NO: 3457; WAN024C4M; Start 574; Stop 598
tacatcaataaggttgtctttagcg

SEQ ID NO: 356057 - DNA, 25 bp, Artificial
  probe
  misc_feature (1)..(25): SEQ ID NO: 3457; WAN024C4M; Start 373; Stop 397
gttgagacactaaacaaggttggtt

SEQ ID NO: 356058 - DNA, 25 bp, Artificial
  probe
  misc_feature (1)..(25): SEQ ID NO: 3457; WAN024C4M; Start 650; Stop 674
cgactgcttacatgatgacagagat

SEQ ID NO: 356059 - DNA, 25 bp, Artificial
  probe
  misc_feature (1)..(25): SEQ ID NO: 3457; WAN024C4M; Start 184; Stop 208
acaatgaaacccatcaccgattatg

SEQ ID NO: 356060 - DNA, 25 bp, Artificial
  probe
  misc_feature (1)..(25): SEQ ID NO: 3457; WAN024C4M; Start 744; Stop 768
aacaggtacttctaactatactgac

SEQ ID NO: 356061 - DNA, 25 bp, Artificial
  probe
  misc_feature (1)..(25): SEQ ID NO: 3457; WAN024C4M; Start 182; Stop 206
caacaatgaaacccatcaccgatta

SEQ ID NO: 356062 - DNA, 25 bp, Artificial
  probe
  misc_feature (1)..(25): SEQ ID NO: 3457; WAN024C4M; Start 78; Stop 102
tgtttcaaatggtaaagtcatcgcc

SEQ ID NO: 356063 - DNA, 25 bp, Artificial
  probe
  misc_feature (1)..(25): SEQ ID NO: 3457; WAN024C4M; Start 841; Stop 865
aaatattcaatggctgtatggacgg

SEQ ID NO: 356064 - DNA, 25 bp, Artificial
  probe
  misc_feature (1)..(25): SEQ ID NO: 3457; WAN024C4M; Start 385; Stop 409
aacaaggttggtttagatagagcta

SEQ ID NO: 356065 - DNA, 25 bp, Artificial
  probe
  misc_feature (1)..(25): SEQ ID NO: 3458; WAN024GOK; Start 146; Stop 170
actccaagtacattattcaagaccg

SEQ ID NO: 356066 - DNA, 25 bp, Artificial
  probe
  misc_feature (1)..(25): SEQ ID NO: 3458; WAN024GOK; Start 142; Stop 166
cgctactccaagtacattattcaag

SEQ ID NO: 356067 - DNA, 25 bp, Artificial
  probe
  misc_feature (1)..(25): SEQ ID NO: 3458; WAN024GOK; Start 830; Stop 854
aaggtggtaaggaacaaatcgttat

SEQ ID NO: 356068 - DNA, 25 bp, Artificial
  probe
  misc_feature (1)..(25): SEQ ID NO: 3458; WAN024GOK; Start 829; Stop 853
aaaggtggtaaggaacaaatcgtta

SEQ ID NO: 356069 - DNA, 25 bp, Artificial
  probe
  misc_feature (1)..(25): SEQ ID NO: 3458; WAN024GOK; Start 24; Stop 48
ttgtgagtttgcttacttcaagaat

SEQ ID NO: 356070 - DNA, 25 bp, Artificial
  probe
  misc_feature (1)..(25): SEQ ID NO: 3458; WAN024GOK; Start 143; Stop 167
gctactccaagtacattattcaaga

SEQ ID NO: 356071 - DNA, 25 bp, Artificial
  probe
  misc_feature (1)..(25): SEQ ID NO: 3458; WAN024GOK; Start 25; Stop 49
tgtgagtttgcttacttcaagaatt

SEQ ID NO: 356072 - DNA, 25 bp, Artificial
  probe
  misc_feature (1)..(25): SEQ ID NO: 3458; WAN024GOK; Start 18; Stop 42
attctcttgtgagtttgcttacttc

SEQ ID NO: 356073 - DNA, 25 bp, Artificial
  probe
  misc_feature (1)..(25): SEQ ID NO: 3458; WAN024GOK; Start 20; Stop 44
tctcttgtgagtttgcttacttcaa

SEQ ID NO: 356074 - DNA, 25 bp, Artificial
  probe
  misc_feature (1)..(25): SEQ ID NO: 3458; WAN024GOK; Start 19; Stop 43
ttctcttgtgagtttgcttacttca

SEQ ID NO: 356075 - DNA, 25 bp, Artificial
  probe
  misc_feature (1)..(25): SEQ ID NO: 3458; WAN024GOK; Start 2494; Stop 2518
gacacgatttcagatgaagaagttt

SEQ ID NO: 356076 - DNA, 25 bp, Artificial
  probe
  misc_feature (1)..(25): SEQ ID NO: 3458; WAN024GOK; Start 145; Stop 169
tactccaagtacattattcaagacc

SEQ ID NO: 356077 - DNA, 25 bp, Artificial
  probe
  misc_feature (1)..(25): SEQ ID NO: 3458; WAN024GOK; Start 17; Stop 41
aattctcttgtgagtttgcttactt

SEQ ID NO: 356078 - DNA, 25 bp, Artificial
  probe
  misc_feature (1)..(25): SEQ ID NO: 3458; WAN024GOK; Start 16; Stop 40
aaattctcttgtgagtttgcttact

SEQ ID NO: 356079 - DNA, 25 bp, Artificial
  probe
  misc_feature (1)..(25): SEQ ID NO: 3458; WAN024GOK; Start 12; Stop 36
agataaattctcttgtgagtttgct

SEQ ID NO: 356080 - DNA, 25 bp, Artificial
  probe
  misc_feature (1)..(25): SEQ ID NO: 3458; WAN024GOK; Start 26; Stop 50
gtgagtttgcttacttcaagaattt

SEQ ID NO: 356081 - DNA, 25 bp, Artificial
  probe
  misc_feature (1)..(25): SEQ ID NO: 3458; WAN024GOK; Start 2493; Stop 2517
tgacacgatttcagatgaagaagtt

SEQ ID NO: 356082 - DNA, 25 bp, Artificial
  probe
  misc_feature (1)..(25): SEQ ID NO: 3458; WAN024GOK; Start 147; Stop 171
ctccaagtacattattcaagaccgg

SEQ ID NO: 356083 - DNA, 25 bp, Artificial
  probe
  misc_feature (1)..(25): SEQ ID NO: 3458; WAN024GOK; Start 13; Stop 37
gataaattctcttgtgagtttgctt

SEQ ID NO: 356084 - DNA, 25 bp, Artificial
  probe
  misc_feature (1)..(25): SEQ ID NO: 3458; WAN024GOK; Start 15; Stop 39
taaattctcttgtgagtttgcttac

SEQ ID NO: 356085 - DNA, 25 bp, Artificial
  probe
  misc_feature (1)..(25): SEQ ID NO: 3458; WAN024GOK; Start 144; Stop 168
ctactccaagtacattattcaagac

SEQ ID NO: 356086 - DNA, 25 bp, Artificial
  probe
  misc_feature (1)..(25): SEQ ID NO: 3458; WAN024GOK; Start 57; Stop 81
ttcacttggtattttatgggctttg

SEQ ID NO: 356087 - DNA, 25 bp, Artificial
  probe
  misc_feature (1)..(25): SEQ ID NO: 3458; WAN024GOK; Start 59; Stop 83
cacttggtattttatgggctttgta

SEQ ID NO: 356088 - DNA, 25 bp, Artificial
  probe
  misc_feature (1)..(25): SEQ ID NO: 3458; WAN024GOK; Start 56; Stop 80
tttcacttggtattttatgggcttt

SEQ ID NO: 356089 - DNA, 25 bp, Artificial
  probe
  misc_feature (1)..(25): SEQ ID NO: 3458; WAN024GOK; Start 55; Stop 79
ttttcacttggtattttatgggctt

SEQ ID NO: 356090 - DNA, 25 bp, Artificial
  probe
  misc_feature (1)..(25): SEQ ID NO: 3458; WAN024GOK; Start 58; Stop 82
tcacttggtattttatgggctttgt

SEQ ID NO: 356091 - DNA, 25 bp, Artificial
  probe
  misc_feature (1)..(25): SEQ ID NO: 3458; WAN024GOK; Start 54; Stop 78
attttcacttggtattttatgggct

SEQ ID NO: 356092 - DNA, 25 bp, Artificial
  probe
  misc_feature (1)..(25): SEQ ID NO: 3458; WAN024GOK; Start 14; Stop 38
ataaattctcttgtgagtttgctta

SEQ ID NO: 356093 - DNA, 25 bp, Artificial
  probe
  misc_feature (1)..(25): SEQ ID NO: 3458; WAN024GOK; Start 60; Stop 84
acttggtattttatgggctttgtat

SEQ ID NO: 356094 - DNA, 25 bp, Artificial
  probe
  misc_feature (1)..(25): SEQ ID NO: 3458; WAN024GOK; Start 63; Stop 87
tggtattttatgggctttgtatctt

SEQ ID NO: 356095 - DNA, 25 bp, Artificial
  probe
  misc_feature (1)..(25): SEQ ID NO: 3458; WAN024GOK; Start 62; Stop 86
ttggtattttatgggctttgtatct

SEQ ID NO: 356096 - DNA, 25 bp, Artificial
  probe
  misc_feature (1)..(25): SEQ ID NO: 3458; WAN024GOK; Start 11; Stop 35
aagataaattctcttgtgagtttgc

SEQ ID NO: 356097 - DNA, 25 bp, Artificial
  probe
  misc_feature (1)..(25): SEQ ID NO: 3458; WAN024GOK; Start 61; Stop 85
cttggtattttatgggctttgtatc

SEQ ID NO: 356098 - DNA, 25 bp, Artificial
  probe
  misc_feature (1)..(25): SEQ ID NO: 3459; WAN024G28; Start 957; Stop 981
ctatgacctagatgttgattggctt

SEQ ID NO: 356099 - DNA, 25 bp, Artificial
  probe
  misc_feature (1)..(25): SEQ ID NO: 3459; WAN024G28; Start 954; Stop 978
ggactatgacctagatgttgattgg

SEQ ID NO: 356100 - DNA, 25 bp, Artificial
  probe
  misc_feature (1)..(25): SEQ ID NO: 3459; WAN024G28; Start 958; Stop 982
tatgacctagatgttgattggcttg

SEQ ID NO: 356101 - DNA, 25 bp, Artificial
  probe
  misc_feature (1)..(25): SEQ ID NO: 3459; WAN024G28; Start 955; Stop 979
gactatgacctagatgttgattggc

SEQ ID NO: 356102 - DNA, 25 bp, Artificial
  probe
  misc_feature (1)..(25): SEQ ID NO: 3459; WAN024G28; Start 963; Stop 987
cctagatgttgattggcttgatgtt

SEQ ID NO: 356103 - DNA, 25 bp, Artificial
  probe
  misc_feature (1)..(25): SEQ ID NO: 3459; WAN024G28; Start 956; Stop 980
actatgacctagatgttgattggct

SEQ ID NO: 356104 - DNA, 25 bp, Artificial
  probe
  misc_feature (1)..(25): SEQ ID NO: 3459; WAN024G28; Start 1169; Stop 1193
ccaacttagacagtagccaagacta

SEQ ID NO: 356105 - DNA, 25 bp, Artificial
  probe
  misc_feature (1)..(25): SEQ ID NO: 3459; WAN024G28; Start 961; Stop 985
gacctagatgttgattggcttgatg

SEQ ID NO: 356106 - DNA, 25 bp, Artificial
  probe
  misc_feature (1)..(25): SEQ ID NO: 3459; WAN024G28; Start 960; Stop 984
tgacctagatgttgattggcttgat

SEQ ID NO: 356107 - DNA, 25 bp, Artificial
  probe
  misc_feature (1)..(25): SEQ ID NO: 3459; WAN024G28; Start 959; Stop 983
atgacctagatgttgattggcttga

SEQ ID NO: 356108 - DNA, 25 bp, Artificial
  probe
  misc_feature (1)..(25): SEQ ID NO: 3459; WAN024G28; Start 953; Stop 977
aggactatgacctagatgttgattg

SEQ ID NO: 356109 - DNA, 25 bp, Artificial
  probe
  misc_feature (1)..(25): SEQ ID NO: 3459; WAN024G28; Start 952; Stop 976
caggactatgacctagatgttgatt

SEQ ID NO: 356110 - DNA, 25 bp, Artificial
  probe
  misc_feature (1)..(25): SEQ ID NO: 3459; WAN024G28; Start 962; Stop 986
acctagatgttgattggcttgatgt

SEQ ID NO: 356111 - DNA, 25 bp, Artificial
  probe
  misc_feature (1)..(25): SEQ ID NO: 3459; WAN024G28; Start 965; Stop 989
tagatgttgattggcttgatgtttg

SEQ ID NO: 356112 - DNA, 25 bp, Artificial
  probe
  misc_feature (1)..(25): SEQ ID NO: 3459; WAN024G28; Start 968; Stop 992
atgttgattggcttgatgtttgttt

SEQ ID NO: 356113 - DNA, 25 bp, Artificial
  probe
  misc_feature (1)..(25): SEQ ID NO: 3459; WAN024G28; Start 951; Stop 975
gcaggactatgacctagatgttgat

SEQ ID NO: 356114 - DNA, 25 bp, Artificial
  probe
  misc_feature (1)..(25): SEQ ID NO: 3459; WAN024G28; Start 620; Stop 644
ggtctgatattgagtctcctgtaaa

SEQ ID NO: 356115 - DNA, 25 bp, Artificial
  probe
  misc_feature (1)..(25): SEQ ID NO: 3459; WAN024G28; Start 625; Stop 649
gatattgagtctcctgtaaatccca

SEQ ID NO: 356116 - DNA, 25 bp, Artificial
  probe
  misc_feature (1)..(25): SEQ ID NO: 3459; WAN024G28; Start 624; Stop 648
tgatattgagtctcctgtaaatccc

SEQ ID NO: 356117 - DNA, 25 bp, Artificial
  probe
  misc_feature (1)..(25): SEQ ID NO: 3459; WAN024G28; Start 967; Stop 991
gatgttgattggcttgatgtttgtt

SEQ ID NO: 356118 - DNA, 25 bp, Artificial
  probe
  misc_feature (1)..(25): SEQ ID NO: 3459; WAN024G28; Start 964; Stop 988
ctagatgttgattggcttgatgttt

SEQ ID NO: 356119 - DNA, 25 bp, Artificial
  probe
  misc_feature (1)..(25): SEQ ID NO: 3459; WAN024G28; Start 619; Stop 643
gggtctgatattgagtctcctgtaa

SEQ ID NO: 356120 - DNA, 25 bp, Artificial
  probe
  misc_feature (1)..(25): SEQ ID NO: 3459; WAN024G28; Start 85; Stop 109
aaacttctcgcttggtatgatgaaa

SEQ ID NO: 356121 - DNA, 25 bp, Artificial
  probe
  misc_feature (1)..(25): SEQ ID NO: 3459; WAN024G28; Start 149; Stop 173
atcacatctgggtatctgaaatcat

SEQ ID NO: 356122 - DNA, 25 bp, Artificial
  probe
  misc_feature (1)..(25): SEQ ID NO: 3459; WAN024G28; Start 966; Stop 990
agatgttgattggcttgatgtttgt

SEQ ID NO: 356123 - DNA, 25 bp, Artificial
  probe
  misc_feature (1)..(25): SEQ ID NO: 3459; WAN024G28; Start 84; Stop 108
gaaacttctcgcttggtatgatgaa

SEQ ID NO: 356124 - DNA, 25 bp, Artificial
  probe
  misc_feature (1)..(25): SEQ ID NO: 3459; WAN024G28; Start 614; Stop 638
acttagggtctgatattgagtctcc

SEQ ID NO: 356125 - DNA, 25 bp, Artificial
  probe
  misc_feature (1)..(25): SEQ ID NO: 3459; WAN024G28; Start 623; Stop 647
ctgatattgagtctcctgtaaatcc

SEQ ID NO: 356126 - DNA, 25 bp, Artificial
  probe
  misc_feature (1)..(25): SEQ ID NO: 3459; WAN024G28; Start 196; Stop 220
acagttatcccttactacgaaagat

SEQ ID NO: 356127 - DNA, 25 bp, Artificial
  probe
  misc_feature (1)..(25): SEQ ID NO: 3459; WAN024G28; Start 949; Stop 973
cagcaggactatgacctagatgttg

SEQ ID NO: 356128 - DNA, 25 bp, Artificial
  probe
  misc_feature (1)..(25): SEQ ID NO: 3459; WAN024G28; Start 706; Stop 730
gaccgttatccaattaaatctccta

SEQ ID NO: 356129 - DNA, 25 bp, Artificial
  probe
  misc_feature (1)..(25): SEQ ID NO: 3459; WAN024G28; Start 950; Stop 974
agcaggactatgacctagatgttga

SEQ ID NO: 356130 - DNA, 25 bp, Artificial
  probe
  misc_feature (1)..(25): SEQ ID NO: 3459; WAN024G28; Start 609; Stop 633
gatggacttagggtctgatattgag

SEQ ID NO: 356131 - DNA, 25 bp, Artificial
  probe
  misc_feature (1)..(25): SEQ ID NO: 3460; WAN024DJU; Start 316; Stop 340
aagattaaggtcaacggtaaggaag

SEQ ID NO: 356132 - DNA, 25 bp, Artificial
  probe
  misc_feature (1)..(25): SEQ ID NO: 3460; WAN024DJU; Start 315; Stop 339
caagattaaggtcaacggtaaggaa

SEQ ID NO: 356133 - DNA, 25 bp, Artificial
  probe
  misc_feature (1)..(25): SEQ ID NO: 3460; WAN024DJU; Start 168; Stop 192
tcaagaactctatgaacgctatcaa

SEQ ID NO: 356134 - DNA, 25 bp, Artificial
  probe
  misc_feature (1)..(25): SEQ ID NO: 3460; WAN024DJU; Start 170; Stop 194
aagaactctatgaacgctatcaaga

SEQ ID NO: 356135 - DNA, 25 bp, Artificial
  probe
  misc_feature (1)..(25): SEQ ID NO: 3460; WAN024DJU; Start 169; Stop 193
caagaactctatgaacgctatcaag

SEQ ID NO: 356136 - DNA, 25 bp, Artificial
  probe
  misc_feature (1)..(25): SEQ ID NO: 3460; WAN024DJU; Start 171; Stop 195
agaactctatgaacgctatcaagat

SEQ ID NO: 356137 - DNA, 25 bp, Artificial
  probe
  misc_feature (1)..(25): SEQ ID NO: 3460; WAN024DJU; Start 174; Stop 198
actctatgaacgctatcaagatcag

SEQ ID NO: 356138 - DNA, 25 bp, Artificial
  probe
  misc_feature (1)..(25): SEQ ID NO: 3460; WAN024DJU; Start 173; Stop 197
aactctatgaacgctatcaagatca

SEQ ID NO: 356139 - DNA, 25 bp, Artificial
  probe
  misc_feature (1)..(25): SEQ ID NO: 3460; WAN024DJU; Start 175; Stop 199
ctctatgaacgctatcaagatcagg

SEQ ID NO: 356140 - DNA, 25 bp, Artificial
  probe
  misc_feature (1)..(25): SEQ ID NO: 3460; WAN024DJU; Start 172; Stop 196
gaactctatgaacgctatcaagatc

SEQ ID NO: 356141 - DNA, 25 bp, Artificial
  probe
  misc_feature (1)..(25): SEQ ID NO: 3460; WAN024DJU; Start 314; Stop 338
ccaagattaaggtcaacggtaagga

SEQ ID NO: 356142 - DNA, 25 bp, Artificial
  probe
  misc_feature (1)..(25): SEQ ID NO: 3460; WAN024DJU; Start 317; Stop 341
agattaaggtcaacggtaaggaagc

SEQ ID NO: 356143 - DNA, 25 bp, Artificial
  probe
  misc_feature (1)..(25): SEQ ID NO: 3460; WAN024DJU; Start 319; Stop 343
attaaggtcaacggtaaggaagcag

SEQ ID NO: 356144 - DNA, 25 bp, Artificial
  probe
  misc_feature (1)..(25): SEQ ID NO: 3460; WAN024DJU; Start 318; Stop 342
gattaaggtcaacggtaaggaagca

SEQ ID NO: 356145 - DNA, 25 bp, Artificial
  probe
  misc_feature (1)..(25): SEQ ID NO: 3460; WAN024DJU; Start 311; Stop 335
ttgccaagattaaggtcaacggtaa

SEQ ID NO: 356146 - DNA, 25 bp, Artificial
  probe
  misc_feature (1)..(25): SEQ ID NO: 3460; WAN024DJU; Start 488; Stop 512
aggcgatacaaactctactataact

SEQ ID NO: 356147 - DNA, 25 bp, Artificial
  probe
  misc_feature (1)..(25): SEQ ID NO: 3460; WAN024DJU; Start 400; Stop 424
gaatggaatttcgctaagtttctca

SEQ ID NO: 356148 - DNA, 25 bp, Artificial
  probe
  misc_feature (1)..(25): SEQ ID NO: 3460; WAN024DJU; Start 312; Stop 336
tgccaagattaaggtcaacggtaag

SEQ ID NO: 356149 - DNA, 25 bp, Artificial
  probe
  misc_feature (1)..(25): SEQ ID NO: 3460; WAN024DJU; Start 157; Stop 181
taccagggacttcaagaactctatg

SEQ ID NO: 356150 - DNA, 25 bp, Artificial
  probe
  misc_feature (1)..(25): SEQ ID NO: 3460; WAN024DJU; Start 401; Stop 425
aatggaatttcgctaagtttctcat

SEQ ID NO: 356151 - DNA, 25 bp, Artificial
  probe
  misc_feature (1)..(25): SEQ ID NO: 3460; WAN024DJU; Start 475; Stop 499
aaacaaattgaagaggcgatacaaa

SEQ ID NO: 356152 - DNA, 25 bp, Artificial
  probe
  misc_feature (1)..(25): SEQ ID NO: 3460; WAN024DJU; Start 476; Stop 500
aacaaattgaagaggcgatacaaac

SEQ ID NO: 356153 - DNA, 25 bp, Artificial
  probe
  misc_feature (1)..(25): SEQ ID NO: 3460; WAN024DJU; Start 478; Stop 502
caaattgaagaggcgatacaaactc

SEQ ID NO: 356154 - DNA, 25 bp, Artificial
  probe
  misc_feature (1)..(25): SEQ ID NO: 3460; WAN024DJU; Start 477; Stop 501
acaaattgaagaggcgatacaaact

SEQ ID NO: 356155 - DNA, 25 bp, Artificial
  probe
  misc_feature (1)..(25): SEQ ID NO: 3460; WAN024DJU; Start 116; Stop 140
tgattgtcaacactgctactggatg

SEQ ID NO: 356156 - DNA, 25 bp, Artificial
  probe
  misc_feature (1)..(25): SEQ ID NO: 3460; WAN024DJU; Start 96; Stop 120
ctatcgtggcaaagttctcttgatt

SEQ ID NO: 356157 - DNA, 25 bp, Artificial
  probe
  misc_feature (1)..(25): SEQ ID NO: 3460; WAN024DJU; Start 156; Stop 180
gtaccagggacttcaagaactctat

SEQ ID NO: 356158 - DNA, 25 bp, Artificial
  probe
  misc_feature (1)..(25): SEQ ID NO: 3460; WAN024DJU; Start 97; Stop 121
tatcgtggcaaagttctcttgattg

SEQ ID NO: 356159 - DNA, 25 bp, Artificial
  probe
  misc_feature (1)..(25): SEQ ID NO: 3460; WAN024DJU; Start 487; Stop 511
gaggcgatacaaactctactataac

SEQ ID NO: 356160 - DNA, 25 bp, Artificial
  probe
  misc_feature (1)..(25): SEQ ID NO: 3460; WAN024DJU; Start 117; Stop 141
gattgtcaacactgctactggatgt

SEQ ID NO: 356161 - DNA, 25 bp, Artificial
  probe
  misc_feature (1)..(25): SEQ ID NO: 3460; WAN024DJU; Start 167; Stop 191
ttcaagaactctatgaacgctatca

SEQ ID NO: 356162 - DNA, 25 bp, Artificial
  probe
  misc_feature (1)..(25): SEQ ID NO: 3460; WAN024DJU; Start 165; Stop 189
acttcaagaactctatgaacgctat

SEQ ID NO: 356163 - DNA, 25 bp, Artificial
  probe
  misc_feature (1)..(25): SEQ ID NO: 3460; WAN024DJU; Start 164; Stop 188
gacttcaagaactctatgaacgcta

SEQ ID NO: 356164 - DNA, 25 bp, Artificial
  probe
  misc_feature (1)..(25): SEQ ID NO: 3461; WAN024DNP; Start 2; Stop 26
tgttccgtccattagtagataaagg

SEQ ID NO: 356165 - DNA, 25 bp, Artificial
  probe
  misc_feature (1)..(25): SEQ ID NO: 3461; WAN024DNP; Start 32; Stop 56
tccttcttgaaatgacagatgaact

SEQ ID NO: 356166 - DNA, 25 bp, Artificial
  probe
  misc_feature (1)..(25): SEQ ID NO: 3461; WAN024DNP; Start 31; Stop 55
ctccttcttgaaatgacagatgaac

SEQ ID NO: 356167 - DNA, 25 bp, Artificial
  probe
  misc_feature (1)..(25): SEQ ID NO: 3461; WAN024DNP; Start 30; Stop 54
actccttcttgaaatgacagatgaa

SEQ ID NO: 356168 - DNA, 25 bp, Artificial
  probe
  misc_feature (1)..(25): SEQ ID NO: 3461; WAN024DNP; Start 1; Stop 25
ctgttccgtccattagtagataaag

SEQ ID NO: 356169 - DNA, 25 bp, Artificial
  probe
  misc_feature (1)..(25): SEQ ID NO: 3461; WAN024DNP; Start 33; Stop 57
ccttcttgaaatgacagatgaactt

SEQ ID NO: 356170 - DNA, 25 bp, Artificial
  probe
  misc_feature (1)..(25): SEQ ID NO: 3461; WAN024DNP; Start 29; Stop 53
tactccttcttgaaatgacagatga

SEQ ID NO: 356171 - DNA, 25 bp, Artificial
  probe
  misc_feature (1)..(25): SEQ ID NO: 3461; WAN024DNP; Start 28; Stop 52
ttactccttcttgaaatgacagatg

SEQ ID NO: 356172 - DNA, 25 bp, Artificial
  probe
  misc_feature (1)..(25): SEQ ID NO: 3461; WAN024DNP; Start 34; Stop 58
cttcttgaaatgacagatgaacttg

SEQ ID NO: 356173 - DNA, 25 bp, Artificial
  probe
  misc_feature (1)..(25): SEQ ID NO: 3461; WAN024DNP; Start 26; Stop 50
gattactccttcttgaaatgacaga

SEQ ID NO: 356174 - DNA, 25 bp, Artificial
  probe
  misc_feature (1)..(25): SEQ ID NO: 3461; WAN024DNP; Start 36; Stop 60
tcttgaaatgacagatgaacttgtt

SEQ ID NO: 356175 - DNA, 25 bp, Artificial
  probe
  misc_feature (1)..(25): SEQ ID NO: 3461; WAN024DNP; Start 35; Stop 59
ttcttgaaatgacagatgaacttgt

SEQ ID NO: 356176 - DNA, 25 bp, Artificial
  probe
  misc_feature (1)..(25): SEQ ID NO: 3461; WAN024DNP; Start 37; Stop 61
cttgaaatgacagatgaacttgttt

SEQ ID NO: 356177 - DNA, 25 bp, Artificial
  probe
  misc_feature (1)..(25): SEQ ID NO: 3461; WAN024DNP; Start 27; Stop 51
attactccttcttgaaatgacagat

SEQ ID NO: 356178 - DNA, 25 bp, Artificial
  probe
  misc_feature (1)..(25): SEQ ID NO: 3461; WAN024DNP; Start 3; Stop 27
gttccgtccattagtagataaagga

SEQ ID NO: 356179 - DNA, 25 bp, Artificial
  probe
  misc_feature (1)..(25): SEQ ID NO: 3461; WAN024DNP; Start 25; Stop 49
ggattactccttcttgaaatgacag

SEQ ID NO: 356180 - DNA, 25 bp, Artificial
  probe
  misc_feature (1)..(25): SEQ ID NO: 3461; WAN024DNP; Start 5; Stop 29
tccgtccattagtagataaaggatt

SEQ ID NO: 356181 - DNA, 25 bp, Artificial
  probe
  misc_feature (1)..(25): SEQ ID NO: 3461; WAN024DNP; Start 4; Stop 28
ttccgtccattagtagataaaggat

SEQ ID NO: 356182 - DNA, 25 bp, Artificial
  probe
  misc_feature (1)..(25): SEQ ID NO: 3461; WAN024DNP; Start 39; Stop 63
tgaaatgacagatgaacttgtttct

SEQ ID NO: 356183 - DNA, 25 bp, Artificial
  probe
  misc_feature (1)..(25): SEQ ID NO: 3461; WAN024DNP; Start 38; Stop 62
ttgaaatgacagatgaacttgtttc

SEQ ID NO: 356184 - DNA, 25 bp, Artificial
  probe
  misc_feature (1)..(25): SEQ ID NO: 3461; WAN024DNP; Start 40; Stop 64
gaaatgacagatgaacttgtttctt

SEQ ID NO: 356185 - DNA, 25 bp, Artificial
  probe
  misc_feature (1)..(25): SEQ ID NO: 3461; WAN024DNP; Start 41; Stop 65
aaatgacagatgaacttgtttctta

SEQ ID NO: 356186 - DNA, 25 bp, Artificial
  probe
  misc_feature (1)..(25): SEQ ID NO: 3461; WAN024DNP; Start 6; Stop 30
ccgtccattagtagataaaggatta

SEQ ID NO: 356187 - DNA, 25 bp, Artificial
  probe
  misc_feature (1)..(25): SEQ ID NO: 3461; WAN024DNP; Start 42; Stop 66
aatgacagatgaacttgtttcttat

SEQ ID NO: 356188 - DNA, 25 bp, Artificial
  probe
  misc_feature (1)..(25): SEQ ID NO: 3461; WAN024DNP; Start 7; Stop 31
cgtccattagtagataaaggattac

SEQ ID NO: 356189 - DNA, 25 bp, Artificial
  probe
  misc_feature (1)..(25): SEQ ID NO: 3461; WAN024DNP; Start 43; Stop 67
atgacagatgaacttgtttcttata

SEQ ID NO: 356190 - DNA, 25 bp, Artificial
  probe
  misc_feature (1)..(25): SEQ ID NO: 3461; WAN024DNP; Start 44; Stop 68
tgacagatgaacttgtttcttataa

SEQ ID NO: 356191 - DNA, 25 bp, Artificial
  probe
  misc_feature (1)..(25): SEQ ID NO: 3461; WAN024DNP; Start 24; Stop 48
aggattactccttcttgaaatgaca

SEQ ID NO: 356192 - DNA, 25 bp, Artificial
  probe
  misc_feature (1)..(25): SEQ ID NO: 3461; WAN024DNP; Start 10; Stop 34
ccattagtagataaaggattactcc

SEQ ID NO: 356193 - DNA, 25 bp, Artificial
  probe
  misc_feature (1)..(25): SEQ ID NO: 3461; WAN024DNP; Start 45; Stop 69
gacagatgaacttgtttcttataaa

SEQ ID NO: 356194 - DNA, 25 bp, Artificial
  probe
  misc_feature (1)..(25): SEQ ID NO: 3461; WAN024DNP; Start 8; Stop 32
gtccattagtagataaaggattact

SEQ ID NO: 356195 - DNA, 25 bp, Artificial
  probe
  misc_feature (1)..(25): SEQ ID NO: 3461; WAN024DNP; Start 9; Stop 33
tccattagtagataaaggattactc

SEQ ID NO: 356196 - DNA, 25 bp, Artificial
  probe
  misc_feature (1)..(25): SEQ ID NO: 3461; WAN024DNP; Start 46; Stop 70
acagatgaacttgtttcttataaaa

SEQ ID NO: 356197 - DNA, 25 bp, Artificial
  probe
  misc_feature (1)..(25): SEQ ID NO: 3461; WAN024DNP; Start 11; Stop 35
cattagtagataaaggattactcct

SEQ ID NO: 356198 - DNA, 25 bp, Artificial
  probe
  misc_feature (1)..(25): SEQ ID NO: 3462; WAN024ACM; Start 41; Stop 65
ctcagctccgactcaagatcctaga

SEQ ID NO: 356199 - DNA, 25 bp, Artificial
  probe
  misc_feature (1)..(25): SEQ ID NO: 3463; WAN024AZT; Start 77; Stop 101
tcttatccttatatttccagcgagc

SEQ ID NO: 356200 - DNA, 25 bp, Artificial
  probe
  misc_feature (1)..(25): SEQ ID NO: 3463; WAN024AZT; Start 79; Stop 103
ttatccttatatttccagcgagcag

SEQ ID NO: 356201 - DNA, 25 bp, Artificial
  probe
  misc_feature (1)..(25): SEQ ID NO: 3463; WAN024AZT; Start 78; Stop 102
cttatccttatatttccagcgagca

SEQ ID NO: 356202 - DNA, 25 bp, Artificial
  probe
  misc_feature (1)..(25): SEQ ID NO: 3463; WAN024AZT; Start 111; Stop 135
tgtgagtcctgtaatccctattgat

SEQ ID NO: 356203 - DNA, 25 bp, Artificial
  probe
  misc_feature (1)..(25): SEQ ID NO: 3463; WAN024AZT; Start 112; Stop 136
gtgagtcctgtaatccctattgata

SEQ ID NO: 356204 - DNA, 25 bp, Artificial
  probe
  misc_feature (1)..(25): SEQ ID NO: 3463; WAN024AZT; Start 110; Stop 134
gtgtgagtcctgtaatccctattga

SEQ ID NO: 356205 - DNA, 25 bp, Artificial
  probe
  misc_feature (1)..(25): SEQ ID NO: 3463; WAN024AZT; Start 113; Stop 137
tgagtcctgtaatccctattgataa

SEQ ID NO: 356206 - DNA, 25 bp, Artificial
  probe
  misc_feature (1)..(25): SEQ ID NO: 3463; WAN024AZT; Start 115; Stop 139
agtcctgtaatccctattgataaga

SEQ ID NO: 356207 - DNA, 25 bp, Artificial
  probe
  misc_feature (1)..(25): SEQ ID NO: 3463; WAN024AZT; Start 76; Stop 100
atcttatccttatatttccagcgag

SEQ ID NO: 356208 - DNA, 25 bp, Artificial
  probe
  misc_feature (1)..(25): SEQ ID NO: 3463; WAN024AZT; Start 114; Stop 138
gagtcctgtaatccctattgataag

SEQ ID NO: 356209 - DNA, 25 bp, Artificial
  probe
  misc_feature (1)..(25): SEQ ID NO: 3463; WAN024AZT; Start 109; Stop 133
ggtgtgagtcctgtaatccctattg

SEQ ID NO: 356210 - DNA, 25 bp, Artificial
  probe
  misc_feature (1)..(25): SEQ ID NO: 3463; WAN024AZT; Start 107; Stop 131
atggtgtgagtcctgtaatccctat

SEQ ID NO: 356211 - DNA, 25 bp, Artificial
  probe
  misc_feature (1)..(25): SEQ ID NO: 3463; WAN024AZT; Start 108; Stop 132
tggtgtgagtcctgtaatccctatt

SEQ ID NO: 356212 - DNA, 25 bp, Artificial
  probe
  misc_feature (1)..(25): SEQ ID NO: 3463; WAN024AZT; Start 116; Stop 140
gtcctgtaatccctattgataagat

SEQ ID NO: 356213 - DNA, 25 bp, Artificial
  probe
  misc_feature (1)..(25): SEQ ID NO: 3463; WAN024AZT; Start 80; Stop 104
tatccttatatttccagcgagcagg

SEQ ID NO: 356214 - DNA, 25 bp, Artificial
  probe
  misc_feature (1)..(25): SEQ ID NO: 3463; WAN024AZT; Start 106; Stop 130
gatggtgtgagtcctgtaatcccta

SEQ ID NO: 356215 - DNA, 25 bp, Artificial
  probe
  misc_feature (1)..(25): SEQ ID NO: 3463; WAN024AZT; Start 75; Stop 99
tatcttatccttatatttccagcga

SEQ ID NO: 356216 - DNA, 25 bp, Artificial
  probe
  misc_feature (1)..(25): SEQ ID NO: 3463; WAN024AZT; Start 84; Stop 108
cttatatttccagcgagcaggagat

SEQ ID NO: 356217 - DNA, 25 bp, Artificial
  probe
  misc_feature (1)..(25): SEQ ID NO: 3463; WAN024AZT; Start 85; Stop 109
ttatatttccagcgagcaggagatg

SEQ ID NO: 356218 - DNA, 25 bp, Artificial
  probe
  misc_feature (1)..(25): SEQ ID NO: 3463; WAN024AZT; Start 103; Stop 127
ggagatggtgtgagtcctgtaatcc

SEQ ID NO: 356219 - DNA, 25 bp, Artificial
  probe
  misc_feature (1)..(25): SEQ ID NO: 3463; WAN024AZT; Start 126; Stop 150
ccctattgataagattatcctctca

SEQ ID NO: 356220 - DNA, 25 bp, Artificial
  probe
  misc_feature (1)..(25): SEQ ID NO: 3463; WAN024AZT; Start 74; Stop 98
atatcttatccttatatttccagcg

SEQ ID NO: 356221 - DNA, 25 bp, Artificial
  probe
  misc_feature (1)..(25): SEQ ID NO: 3463; WAN024AZT; Start 125; Stop 149
tccctattgataagattatcctctc

SEQ ID NO: 356222 - DNA, 25 bp, Artificial
  probe
  misc_feature (1)..(25): SEQ ID NO: 3463; WAN024AZT; Start 104; Stop 128
gagatggtgtgagtcctgtaatccc

SEQ ID NO: 356223 - DNA, 25 bp, Artificial
  probe
  misc_feature (1)..(25): SEQ ID NO: 3463; WAN024AZT; Start 117; Stop 141
tcctgtaatccctattgataagatt

SEQ ID NO: 356224 - DNA, 25 bp, Artificial
  probe
  misc_feature (1)..(25): SEQ ID NO: 3463; WAN024AZT; Start 105; Stop 129
agatggtgtgagtcctgtaatccct

SEQ ID NO: 356225 - DNA, 25 bp, Artificial
  probe
  misc_feature (1)..(25): SEQ ID NO: 3463; WAN024AZT; Start 83; Stop 107
ccttatatttccagcgagcaggaga

SEQ ID NO: 356226 - DNA, 25 bp, Artificial
  probe
  misc_feature (1)..(25): SEQ ID NO: 3463; WAN024AZT; Start 124; Stop 148
atccctattgataagattatcctct

SEQ ID NO: 356227 - DNA, 25 bp, Artificial
  probe
  misc_feature (1)..(25): SEQ ID NO: 3463; WAN024AZT; Start 86; Stop 110
tatatttccagcgagcaggagatgg

SEQ ID NO: 356228 - DNA, 25 bp, Artificial
  probe
  misc_feature (1)..(25): SEQ ID NO: 3463; WAN024AZT; Start 1; Stop 25
ctgttgattcaataccgggatttga

SEQ ID NO: 356229 - DNA, 25 bp, Artificial
  probe
  misc_feature (1)..(25): SEQ ID NO: 3463; WAN024AZT; Start 102; Stop 126
aggagatggtgtgagtcctgtaatc

SEQ ID NO: 356230 - DNA, 25 bp, Artificial
  probe
  misc_feature (1)..(25): SEQ ID NO: 3463; WAN024AZT; Start 127; Stop 151
cctattgataagattatcctctcaa

SEQ ID NO: 356231 - DNA, 25 bp, Artificial
  probe
  misc_feature (1)..(25): SEQ ID NO: 3463; WAN024AZT; Start 123; Stop 147
aatccctattgataagattatcctc

SEQ ID NO: 356232 - DNA, 25 bp, Artificial
  probe
  misc_feature (1)..(25): SEQ ID NO: 3464; WAN024DR7; Start 146; Stop 170
cttgtttcctattgctttctcagtt

SEQ ID NO: 356233 - DNA, 25 bp, Artificial
  probe
  misc_feature (1)..(25): SEQ ID NO: 3464; WAN024DR7; Start 144; Stop 168
tacttgtttcctattgctttctcag

SEQ ID NO: 356234 - DNA, 25 bp, Artificial
  probe
  misc_feature (1)..(25): SEQ ID NO: 3464; WAN024DR7; Start 30; Stop 54
atttctcttgaatgctgaatccttt

SEQ ID NO: 356235 - DNA, 25 bp, Artificial
  probe
  misc_feature (1)..(25): SEQ ID NO: 3464; WAN024DR7; Start 28; Stop 52
gtatttctcttgaatgctgaatcct

SEQ ID NO: 356236 - DNA, 25 bp, Artificial
  probe
  misc_feature (1)..(25): SEQ ID NO: 3464; WAN024DR7; Start 27; Stop 51
agtatttctcttgaatgctgaatcc

SEQ ID NO: 356237 - DNA, 25 bp, Artificial
  probe
  misc_feature (1)..(25): SEQ ID NO: 3464; WAN024DR7; Start 147; Stop 171
ttgtttcctattgctttctcagtta

SEQ ID NO: 356238 - DNA, 25 bp, Artificial
  probe
  misc_feature (1)..(25): SEQ ID NO: 3464; WAN024DR7; Start 143; Stop 167
ttacttgtttcctattgctttctca

SEQ ID NO: 356239 - DNA, 25 bp, Artificial
  probe
  misc_feature (1)..(25): SEQ ID NO: 3464; WAN024DR7; Start 148; Stop 172
tgtttcctattgctttctcagttat

SEQ ID NO: 356240 - DNA, 25 bp, Artificial
  probe
  misc_feature (1)..(25): SEQ ID NO: 3464; WAN024DR7; Start 145; Stop 169
acttgtttcctattgctttctcagt

SEQ ID NO: 356241 - DNA, 25 bp, Artificial
  probe
  misc_feature (1)..(25): SEQ ID NO: 3464; WAN024DR7; Start 29; Stop 53
tatttctcttgaatgctgaatcctt

SEQ ID NO: 356242 - DNA, 25 bp, Artificial
  probe
  misc_feature (1)..(25): SEQ ID NO: 3464; WAN024DR7; Start 142; Stop 166
tttacttgtttcctattgctttctc

SEQ ID NO: 356243 - DNA, 25 bp, Artificial
  probe
  misc_feature (1)..(25): SEQ ID NO: 3464; WAN024DR7; Start 149; Stop 173
gtttcctattgctttctcagttatt

SEQ ID NO: 356244 - DNA, 25 bp, Artificial
  probe
  misc_feature (1)..(25): SEQ ID NO: 3464; WAN024DR7; Start 21; Stop 45
ggatttagtatttctcttgaatgct

SEQ ID NO: 356245 - DNA, 25 bp, Artificial
  probe
  misc_feature (1)..(25): SEQ ID NO: 3464; WAN024DR7; Start 20; Stop 44
aggatttagtatttctcttgaatgc

SEQ ID NO: 356246 - DNA, 25 bp, Artificial
  probe
  misc_feature (1)..(25): SEQ ID NO: 3464; WAN024DR7; Start 26; Stop 50
tagtatttctcttgaatgctgaatc

SEQ ID NO: 356247 - DNA, 25 bp, Artificial
  probe
  misc_feature (1)..(25): SEQ ID NO: 3464; WAN024DR7; Start 24; Stop 48
tttagtatttctcttgaatgctgaa

SEQ ID NO: 356248 - DNA, 25 bp, Artificial
  probe
  misc_feature (1)..(25): SEQ ID NO: 3464; WAN024DR7; Start 31; Stop 55
tttctcttgaatgctgaatcctttt

SEQ ID NO: 356249 - DNA, 25 bp, Artificial
  probe
  misc_feature (1)..(25): SEQ ID NO: 3464; WAN024DR7; Start 25; Stop 49
ttagtatttctcttgaatgctgaat

SEQ ID NO: 356250 - DNA, 25 bp, Artificial
  probe
  misc_feature (1)..(25): SEQ ID NO: 3464; WAN024DR7; Start 23; Stop 47
atttagtatttctcttgaatgctga

SEQ ID NO: 356251 - DNA, 25 bp, Artificial
  probe
  misc_feature (1)..(25): SEQ ID NO: 3464; WAN024DR7; Start 68; Stop 92
agaaagattctaaatgtactgaccc

SEQ ID NO: 356252 - DNA, 25 bp, Artificial
  probe
  misc_feature (1)..(25): SEQ ID NO: 3464; WAN024DR7; Start 22; Stop 46
gatttagtatttctcttgaatgctg

SEQ ID NO: 356253 - DNA, 25 bp, Artificial
  probe
  misc_feature (1)..(25): SEQ ID NO: 3464; WAN024DR7; Start 150; Stop 174
tttcctattgctttctcagttatta

SEQ ID NO: 356254 - DNA, 25 bp, Artificial
  probe
  misc_feature (1)..(25): SEQ ID NO: 3464; WAN024DR7; Start 69; Stop 93
gaaagattctaaatgtactgacccc

SEQ ID NO: 356255 - DNA, 25 bp, Artificial
  probe
  misc_feature (1)..(25): SEQ ID NO: 3464; WAN024DR7; Start 152; Stop 176
tcctattgctttctcagttattatt

SEQ ID NO: 356256 - DNA, 25 bp, Artificial
  probe
  misc_feature (1)..(25): SEQ ID NO: 3464; WAN024DR7; Start 151; Stop 175
ttcctattgctttctcagttattat

SEQ ID NO: 356257 - DNA, 25 bp, Artificial
  probe
  misc_feature (1)..(25): SEQ ID NO: 3464; WAN024DR7; Start 141; Stop 165
ttttacttgtttcctattgctttct

SEQ ID NO: 356258 - DNA, 25 bp, Artificial
  probe
  misc_feature (1)..(25): SEQ ID NO: 3464; WAN024DR7; Start 156; Stop 180
attgctttctcagttattatttgtt

SEQ ID NO: 356259 - DNA, 25 bp, Artificial
  probe
  misc_feature (1)..(25): SEQ ID NO: 3464; WAN024DR7; Start 67; Stop 91
aagaaagattctaaatgtactgacc

SEQ ID NO: 356260 - DNA, 25 bp, Artificial
  probe
  misc_feature (1)..(25): SEQ ID NO: 3464; WAN024DR7; Start 153; Stop 177
cctattgctttctcagttattattt

SEQ ID NO: 356261 - DNA, 25 bp, Artificial
  probe
  misc_feature (1)..(25): SEQ ID NO: 3464; WAN024DR7; Start 140; Stop 164
attttacttgtttcctattgctttc

SEQ ID NO: 356262 - DNA, 25 bp, Artificial
  probe
  misc_feature (1)..(25): SEQ ID NO: 3464; WAN024DR7; Start 157; Stop 181
ttgctttctcagttattatttgtta

SEQ ID NO: 356263 - DNA, 25 bp, Artificial
  probe
  misc_feature (1)..(25): SEQ ID NO: 3464; WAN024DR7; Start 19; Stop 43
aaggatttagtatttctcttgaatg

SEQ ID NO: 356264 - DNA, 25 bp, Artificial
  probe
  misc_feature (1)..(25): SEQ ID NO: 3464; WAN024DR7; Start 158; Stop 182
tgctttctcagttattatttgttat

SEQ ID NO: 356265 - DNA, 25 bp, Artificial
  probe
  misc_feature (1)..(25): SEQ ID NO: 3465; WAN024G5A; Start 475; Stop 499
tatgatagggatggaaatgtcttgc

SEQ ID NO: 356266 - DNA, 25 bp, Artificial
  probe
  misc_feature (1)..(25): SEQ ID NO: 3465; WAN024G5A; Start 726; Stop 750
attagaaattaaaggagcaggagca

SEQ ID NO: 356267 - DNA, 25 bp, Artificial
  probe
  misc_feature (1)..(25): SEQ ID NO: 3465; WAN024G5A; Start 725; Stop 749
cattagaaattaaaggagcaggagc

SEQ ID NO: 356268 - DNA, 25 bp, Artificial
  probe
  misc_feature (1)..(25): SEQ ID NO: 3465; WAN024G5A; Start 727; Stop 751
ttagaaattaaaggagcaggagcag

SEQ ID NO: 356269 - DNA, 25 bp, Artificial
  probe
  misc_feature (1)..(25): SEQ ID NO: 3465; WAN024G5A; Start 721; Stop 745
gcaacattagaaattaaaggagcag

SEQ ID NO: 356270 - DNA, 25 bp, Artificial
  probe
  misc_feature (1)..(25): SEQ ID NO: 3465; WAN024G5A; Start 724; Stop 748
acattagaaattaaaggagcaggag

SEQ ID NO: 356271 - DNA, 25 bp, Artificial
  probe
  misc_feature (1)..(25): SEQ ID NO: 3465; WAN024G5A; Start 450; Stop 474
tgctgctggtttaggttatcaattt

SEQ ID NO: 356272 - DNA, 25 bp, Artificial
  probe
  misc_feature (1)..(25): SEQ ID NO: 3465; WAN024G5A; Start 474; Stop 498
ttatgatagggatggaaatgtcttg

SEQ ID NO: 356273 - DNA, 25 bp, Artificial
  probe
  misc_feature (1)..(25): SEQ ID NO: 3465; WAN024G5A; Start 723; Stop 747
aacattagaaattaaaggagcagga

SEQ ID NO: 356274 - DNA, 25 bp, Artificial
  probe
  misc_feature (1)..(25): SEQ ID NO: 3465; WAN024G5A; Start 722; Stop 746
caacattagaaattaaaggagcagg

SEQ ID NO: 356275 - DNA, 25 bp, Artificial
  probe
  misc_feature (1)..(25): SEQ ID NO: 3465; WAN024G5A; Start 449; Stop 473
ttgctgctggtttaggttatcaatt

SEQ ID NO: 356276 - DNA, 25 bp, Artificial
  probe
  misc_feature (1)..(25): SEQ ID NO: 3465; WAN024G5A; Start 447; Stop 471
gattgctgctggtttaggttatcaa

SEQ ID NO: 356277 - DNA, 25 bp, Artificial
  probe
  misc_feature (1)..(25): SEQ ID NO: 3465; WAN024G5A; Start 473; Stop 497
tttatgatagggatggaaatgtctt

SEQ ID NO: 356278 - DNA, 25 bp, Artificial
  probe
  misc_feature (1)..(25): SEQ ID NO: 3465; WAN024G5A; Start 728; Stop 752
tagaaattaaaggagcaggagcagg

SEQ ID NO: 356279 - DNA, 25 bp, Artificial
  probe
  misc_feature (1)..(25): SEQ ID NO: 3465; WAN024G5A; Start 476; Stop 500
atgatagggatggaaatgtcttgcc

SEQ ID NO: 356280 - DNA, 25 bp, Artificial
  probe
  misc_feature (1)..(25): SEQ ID NO: 3465; WAN024G5A; Start 507; Stop 531
cggtcaatccttattaaacttagct

SEQ ID NO: 356281 - DNA, 25 bp, Artificial
  probe
  misc_feature (1)..(25): SEQ ID NO: 3465; WAN024G5A; Start 719; Stop 743
ctgcaacattagaaattaaaggagc

SEQ ID NO: 356282 - DNA, 25 bp, Artificial
  probe
  misc_feature (1)..(25): SEQ ID NO: 3465; WAN024G5A; Start 586; Stop 610
ttagcagatgtcgtgagtcccttat

SEQ ID NO: 356283 - DNA, 25 bp, Artificial
  probe
  misc_feature (1)..(25): SEQ ID NO: 3465; WAN024G5A; Start 446; Stop 470
ggattgctgctggtttaggttatca

SEQ ID NO: 356284 - DNA, 25 bp, Artificial
  probe
  misc_feature (1)..(25): SEQ ID NO: 3465; WAN024G5A; Start 448; Stop 472
attgctgctggtttaggttatcaat

SEQ ID NO: 356285 - DNA, 25 bp, Artificial
  probe
  misc_feature (1)..(25): SEQ ID NO: 3465; WAN024G5A; Start 585; Stop 609
tttagcagatgtcgtgagtccctta

SEQ ID NO: 356286 - DNA, 25 bp, Artificial
  probe
  misc_feature (1)..(25): SEQ ID NO: 3465; WAN024G5A; Start 713; Stop 737
tctcacctgcaacattagaaattaa

SEQ ID NO: 356287 - DNA, 25 bp, Artificial
  probe
  misc_feature (1)..(25): SEQ ID NO: 3465; WAN024G5A; Start 715; Stop 739
tcacctgcaacattagaaattaaag

SEQ ID NO: 356288 - DNA, 25 bp, Artificial
  probe
  misc_feature (1)..(25): SEQ ID NO: 3465; WAN024G5A; Start 714; Stop 738
ctcacctgcaacattagaaattaaa

SEQ ID NO: 356289 - DNA, 25 bp, Artificial
  probe
  misc_feature (1)..(25): SEQ ID NO: 3465; WAN024G5A; Start 499; Stop 523
cctgcttccggtcaatccttattaa

SEQ ID NO: 356290 - DNA, 25 bp, Artificial
  probe
  misc_feature (1)..(25): SEQ ID NO: 3465; WAN024G5A; Start 581; Stop 605
atattttagcagatgtcgtgagtcc

SEQ ID NO: 356291 - DNA, 25 bp, Artificial
  probe
  misc_feature (1)..(25): SEQ ID NO: 3465; WAN024G5A; Start 451; Stop 475
gctgctggtttaggttatcaatttt

SEQ ID NO: 356292 - DNA, 25 bp, Artificial
  probe
  misc_feature (1)..(25): SEQ ID NO: 3465; WAN024G5A; Start 580; Stop 604
catattttagcagatgtcgtgagtc

SEQ ID NO: 356293 - DNA, 25 bp, Artificial
  probe
  misc_feature (1)..(25): SEQ ID NO: 3465; WAN024G5A; Start 506; Stop 530
ccggtcaatccttattaaacttagc

SEQ ID NO: 356294 - DNA, 25 bp, Artificial
  probe
  misc_feature (1)..(25): SEQ ID NO: 3465; WAN024G5A; Start 717; Stop 741
acctgcaacattagaaattaaagga

SEQ ID NO: 356295 - DNA, 25 bp, Artificial
  probe
  misc_feature (1)..(25): SEQ ID NO: 3465; WAN024G5A; Start 716; Stop 740
cacctgcaacattagaaattaaagg

SEQ ID NO: 356296 - DNA, 25 bp, Artificial
  probe
  misc_feature (1)..(25): SEQ ID NO: 3465; WAN024G5A; Start 557; Stop 581
aaattcctgaaggtgttcaaattca

SEQ ID NO: 356297 - DNA, 25 bp, Artificial
  probe
  misc_feature (1)..(25): SEQ ID NO: 3465; WAN024G5A; Start 649; Stop 673
aaaggtctacatccgactatgtttg

SEQ ID NO: 356298 - DNA, 25 bp, Artificial
  probe
  misc_feature (1)..(25): SEQ ID NO: 3466; WAN024G58; Start 557; Stop 581
ttgttggagaaggaagacttgatag

SEQ ID NO: 356299 - DNA, 25 bp, Artificial
  probe
  misc_feature (1)..(25): SEQ ID NO: 3466; WAN024G58; Start 556; Stop 580
gttgttggagaaggaagacttgata

SEQ ID NO: 356300 - DNA, 25 bp, Artificial
  probe
  misc_feature (1)..(25): SEQ ID NO: 3466; WAN024G58; Start 558; Stop 582
tgttggagaaggaagacttgatagt

SEQ ID NO: 356301 - DNA, 25 bp, Artificial
  probe
  misc_feature (1)..(25): SEQ ID NO: 3466; WAN024G58; Start 555; Stop 579
tgttgttggagaaggaagacttgat

SEQ ID NO: 356302 - DNA, 25 bp, Artificial
  probe
  misc_feature (1)..(25): SEQ ID NO: 3466; WAN024G58; Start 366; Stop 390
gattctccatctcatttctaaaggg

SEQ ID NO: 356303 - DNA, 25 bp, Artificial
  probe
  misc_feature (1)..(25): SEQ ID NO: 3466; WAN024G58; Start 360; Stop 384
agagttgattctccatctcatttct

SEQ ID NO: 356304 - DNA, 25 bp, Artificial
  probe
  misc_feature (1)..(25): SEQ ID NO: 3466; WAN024G58; Start 365; Stop 389
tgattctccatctcatttctaaagg

SEQ ID NO: 356305 - DNA, 25 bp, Artificial
  probe
  misc_feature (1)..(25): SEQ ID NO: 3466; WAN024G58; Start 361; Stop 385
gagttgattctccatctcatttcta

SEQ ID NO: 356306 - DNA, 25 bp, Artificial
  probe
  misc_feature (1)..(25): SEQ ID NO: 3466; WAN024G58; Start 369; Stop 393
tctccatctcatttctaaagggatt

SEQ ID NO: 356307 - DNA, 25 bp, Artificial
  probe
  misc_feature (1)..(25): SEQ ID NO: 3466; WAN024G58; Start 368; Stop 392
ttctccatctcatttctaaagggat

SEQ ID NO: 356308 - DNA, 25 bp, Artificial
  probe
  misc_feature (1)..(25): SEQ ID NO: 3466; WAN024G58; Start 367; Stop 391
attctccatctcatttctaaaggga

SEQ ID NO: 356309 - DNA, 25 bp, Artificial
  probe
  misc_feature (1)..(25): SEQ ID NO: 3466; WAN024G58; Start 362; Stop 386
agttgattctccatctcatttctaa

SEQ ID NO: 356310 - DNA, 25 bp, Artificial
  probe
  misc_feature (1)..(25): SEQ ID NO: 3466; WAN024G58; Start 348; Stop 372
ttgtggtattggagagttgattctc

SEQ ID NO: 356311 - DNA, 25 bp, Artificial
  probe
  misc_feature (1)..(25): SEQ ID NO: 3466; WAN024G58; Start 363; Stop 387
gttgattctccatctcatttctaaa

SEQ ID NO: 356312 - DNA, 25 bp, Artificial
  probe
  misc_feature (1)..(25): SEQ ID NO: 3466; WAN024G58; Start 370; Stop 394
ctccatctcatttctaaagggatta

SEQ ID NO: 356313 - DNA, 25 bp, Artificial
  probe
  misc_feature (1)..(25): SEQ ID NO: 3466; WAN024G58; Start 372; Stop 396
ccatctcatttctaaagggattaaa

SEQ ID NO: 356314 - DNA, 25 bp, Artificial
  probe
  misc_feature (1)..(25): SEQ ID NO: 3466; WAN024G58; Start 559; Stop 583
gttggagaaggaagacttgatagtc

SEQ ID NO: 356315 - DNA, 25 bp, Artificial
  probe
  misc_feature (1)..(25): SEQ ID NO: 3466; WAN024G58; Start 561; Stop 585
tggagaaggaagacttgatagtcaa

SEQ ID NO: 356316 - DNA, 25 bp, Artificial
  probe
  misc_feature (1)..(25): SEQ ID NO: 3466; WAN024G58; Start 560; Stop 584
ttggagaaggaagacttgatagtca

SEQ ID NO: 356317 - DNA, 25 bp, Artificial
  probe
  misc_feature (1)..(25): SEQ ID NO: 3466; WAN024G58; Start 364; Stop 388
ttgattctccatctcatttctaaag

SEQ ID NO: 356318 - DNA, 25 bp, Artificial
  probe
  misc_feature (1)..(25): SEQ ID NO: 3466; WAN024G58; Start 371; Stop 395
tccatctcatttctaaagggattaa

SEQ ID NO: 356319 - DNA, 25 bp, Artificial
  probe
  misc_feature (1)..(25): SEQ ID NO: 3466; WAN024G58; Start 359; Stop 383
gagagttgattctccatctcatttc

SEQ ID NO: 356320 - DNA, 25 bp, Artificial
  probe
  misc_feature (1)..(25): SEQ ID NO: 3466; WAN024G58; Start 373; Stop 397
catctcatttctaaagggattaaag

SEQ ID NO: 356321 - DNA, 25 bp, Artificial
  probe
  misc_feature (1)..(25): SEQ ID NO: 3466; WAN024G58; Start 562; Stop 586
ggagaaggaagacttgatagtcaaa

SEQ ID NO: 356322 - DNA, 25 bp, Artificial
  probe
  misc_feature (1)..(25): SEQ ID NO: 3466; WAN024G58; Start 564; Stop 588
agaaggaagacttgatagtcaaagc

SEQ ID NO: 356323 - DNA, 25 bp, Artificial
  probe
  misc_feature (1)..(25): SEQ ID NO: 3466; WAN024G58; Start 563; Stop 587
gagaaggaagacttgatagtcaaag

SEQ ID NO: 356324 - DNA, 25 bp, Artificial
  probe
  misc_feature (1)..(25): SEQ ID NO: 3466; WAN024G58; Start 375; Stop 399
tctcatttctaaagggattaaagat

SEQ ID NO: 356325 - DNA, 25 bp, Artificial
  probe
  misc_feature (1)..(25): SEQ ID NO: 3466; WAN024G58; Start 374; Stop 398
atctcatttctaaagggattaaaga

SEQ ID NO: 356326 - DNA, 25 bp, Artificial
  probe
  misc_feature (1)..(25): SEQ ID NO: 3466; WAN024G58; Start 565; Stop 589
gaaggaagacttgatagtcaaagct

SEQ ID NO: 356327 - DNA, 25 bp, Artificial
  probe
  misc_feature (1)..(25): SEQ ID NO: 3466; WAN024G58; Start 566; Stop 590
aaggaagacttgatagtcaaagctt

SEQ ID NO: 356328 - DNA, 25 bp, Artificial
  probe
  misc_feature (1)..(25): SEQ ID NO: 3466; WAN024G58; Start 755; Stop 779
aaaatgccagtctctatctggagcg

SEQ ID NO: 356329 - DNA, 25 bp, Artificial
  probe
  misc_feature (1)..(25): SEQ ID NO: 3467; WAN0249RD; Start 5; Stop 29
ttccatagcatgacttctgtactag

SEQ ID NO: 356330 - DNA, 25 bp, Artificial
  probe
  misc_feature (1)..(25): SEQ ID NO: 3467; WAN0249RD; Start 7; Stop 31
ccatagcatgacttctgtactagac

SEQ ID NO: 356331 - DNA, 25 bp, Artificial
  probe
  misc_feature (1)..(25): SEQ ID NO: 3467; WAN0249RD; Start 6; Stop 30
tccatagcatgacttctgtactaga

SEQ ID NO: 356332 - DNA, 25 bp, Artificial
  probe
  misc_feature (1)..(25): SEQ ID NO: 3467; WAN0249RD; Start 8; Stop 32
catagcatgacttctgtactagact

SEQ ID NO: 356333 - DNA, 25 bp, Artificial
  probe
  misc_feature (1)..(25): SEQ ID NO: 3467; WAN0249RD; Start 9; Stop 33
atagcatgacttctgtactagactt

SEQ ID NO: 356334 - DNA, 25 bp, Artificial
  probe
  misc_feature (1)..(25): SEQ ID NO: 3467; WAN0249RD; Start 40; Stop 64
ccgaataaatagatagaaccacaga

SEQ ID NO: 356335 - DNA, 25 bp, Artificial
  probe
  misc_feature (1)..(25): SEQ ID NO: 3467; WAN0249RD; Start 39; Stop 63
tccgaataaatagatagaaccacag

SEQ ID NO: 356336 - DNA, 25 bp, Artificial
  probe
  misc_feature (1)..(25): SEQ ID NO: 3467; WAN0249RD; Start 12; Stop 36
gcatgacttctgtactagactttct

SEQ ID NO: 356337 - DNA, 25 bp, Artificial
  probe
  misc_feature (1)..(25): SEQ ID NO: 3467; WAN0249RD; Start 11; Stop 35
agcatgacttctgtactagactttc

SEQ ID NO: 356338 - DNA, 25 bp, Artificial
  probe
  misc_feature (1)..(25): SEQ ID NO: 3467; WAN0249RD; Start 3; Stop 27
gtttccatagcatgacttctgtact

SEQ ID NO: 356339 - DNA, 25 bp, Artificial
  probe
  misc_feature (1)..(25): SEQ ID NO: 3467; WAN0249RD; Start 1; Stop 25
ctgtttccatagcatgacttctgta

SEQ ID NO: 356340 - DNA, 25 bp, Artificial
  probe
  misc_feature (1)..(25): SEQ ID NO: 3467; WAN0249RD; Start 54; Stop 78
agaaccacagaatctagtaaaccta

SEQ ID NO: 356341 - DNA, 25 bp, Artificial
  probe
  misc_feature (1)..(25): SEQ ID NO: 3467; WAN0249RD; Start 4; Stop 28
tttccatagcatgacttctgtacta

SEQ ID NO: 356342 - DNA, 25 bp, Artificial
  probe
  misc_feature (1)..(25): SEQ ID NO: 3467; WAN0249RD; Start 2; Stop 26
tgtttccatagcatgacttctgtac

SEQ ID NO: 356343 - DNA, 25 bp, Artificial
  probe
  misc_feature (1)..(25): SEQ ID NO: 3467; WAN0249RD; Start 10; Stop 34
tagcatgacttctgtactagacttt

SEQ ID NO: 356344 - DNA, 25 bp, Artificial
  probe
  misc_feature (1)..(25): SEQ ID NO: 3467; WAN0249RD; Start 38; Stop 62
ttccgaataaatagatagaaccaca

SEQ ID NO: 356345 - DNA, 25 bp, Artificial
  probe
  misc_feature (1)..(25): SEQ ID NO: 3467; WAN0249RD; Start 13; Stop 37
catgacttctgtactagactttctt

SEQ ID NO: 356346 - DNA, 25 bp, Artificial
  probe
  misc_feature (1)..(25): SEQ ID NO: 3467; WAN0249RD; Start 53; Stop 77
tagaaccacagaatctagtaaacct

SEQ ID NO: 356347 - DNA, 25 bp, Artificial
  probe
  misc_feature (1)..(25): SEQ ID NO: 3467; WAN0249RD; Start 14; Stop 38
atgacttctgtactagactttcttt

SEQ ID NO: 356348 - DNA, 25 bp, Artificial
  probe
  misc_feature (1)..(25): SEQ ID NO: 3467; WAN0249RD; Start 55; Stop 79
gaaccacagaatctagtaaacctag

SEQ ID NO: 356349 - DNA, 25 bp, Artificial
  probe
  misc_feature (1)..(25): SEQ ID NO: 3467; WAN0249RD; Start 52; Stop 76
atagaaccacagaatctagtaaacc

SEQ ID NO: 356350 - DNA, 25 bp, Artificial
  probe
  misc_feature (1)..(25): SEQ ID NO: 3467; WAN0249RD; Start 37; Stop 61
tttccgaataaatagatagaaccac

SEQ ID NO: 356351 - DNA, 25 bp, Artificial
  probe
  misc_feature (1)..(25): SEQ ID NO: 3467; WAN0249RD; Start 41; Stop 65
cgaataaatagatagaaccacagaa

SEQ ID NO: 356352 - DNA, 25 bp, Artificial
  probe
  misc_feature (1)..(25): SEQ ID NO: 3467; WAN0249RD; Start 101; Stop 125
ttagcaataaaagaaatctggagga

SEQ ID NO: 356353 - DNA, 25 bp, Artificial
  probe
  misc_feature (1)..(25): SEQ ID NO: 3467; WAN0249RD; Start 20; Stop 44
tctgtactagactttcttttccgaa

SEQ ID NO: 356354 - DNA, 25 bp, Artificial
  probe
  misc_feature (1)..(25): SEQ ID NO: 3467; WAN0249RD; Start 19; Stop 43
ttctgtactagactttcttttccga

SEQ ID NO: 356355 - DNA, 25 bp, Artificial
  probe
  misc_feature (1)..(25): SEQ ID NO: 3467; WAN0249RD; Start 18; Stop 42
cttctgtactagactttcttttccg

SEQ ID NO: 356356 - DNA, 25 bp, Artificial
  probe
  misc_feature (1)..(25): SEQ ID NO: 3467; WAN0249RD; Start 102; Stop 126
tagcaataaaagaaatctggaggat

SEQ ID NO: 356357 - DNA, 25 bp, Artificial
  probe
  misc_feature (1)..(25): SEQ ID NO: 3467; WAN0249RD; Start 21; Stop 45
ctgtactagactttcttttccgaat

SEQ ID NO: 356358 - DNA, 25 bp, Artificial
  probe
  misc_feature (1)..(25): SEQ ID NO: 3467; WAN0249RD; Start 51; Stop 75
gatagaaccacagaatctagtaaac

SEQ ID NO: 356359 - DNA, 25 bp, Artificial
  probe
  misc_feature (1)..(25): SEQ ID NO: 3467; WAN0249RD; Start 17; Stop 41
acttctgtactagactttcttttcc

SEQ ID NO: 356360 - DNA, 25 bp, Artificial
  probe
  misc_feature (1)..(25): SEQ ID NO: 3467; WAN0249RD; Start 100; Stop 124
attagcaataaaagaaatctggagg

SEQ ID NO: 356361 - DNA, 25 bp, Artificial
  probe
  misc_feature (1)..(25): SEQ ID NO: 3467; WAN0249RD; Start 103; Stop 127
agcaataaaagaaatctggaggatt

SEQ ID NO: 356362 - DNA, 25 bp, Artificial
  probe
  misc_feature (1)..(25): SEQ ID NO: 3468; WAN024CHG; Start 80; Stop 104
gagaactaggtgaactaacagatgt

SEQ ID NO: 356363 - DNA, 25 bp, Artificial
  probe
  misc_feature (1)..(25): SEQ ID NO: 3468; WAN024CHG; Start 79; Stop 103
agagaactaggtgaactaacagatg

SEQ ID NO: 356364 - DNA, 25 bp, Artificial
  probe
  misc_feature (1)..(25): SEQ ID NO: 3468; WAN024CHG; Start 77; Stop 101
gtagagaactaggtgaactaacaga

SEQ ID NO: 356365 - DNA, 25 bp, Artificial
  probe
  misc_feature (1)..(25): SEQ ID NO: 3468; WAN024CHG; Start 74; Stop 98
tctgtagagaactaggtgaactaac

SEQ ID NO: 356366 - DNA, 25 bp, Artificial
  probe
  misc_feature (1)..(25): SEQ ID NO: 3468; WAN024CHG; Start 81; Stop 105
agaactaggtgaactaacagatgtt

SEQ ID NO: 356367 - DNA, 25 bp, Artificial
  probe
  misc_feature (1)..(25): SEQ ID NO: 3468; WAN024CHG; Start 78; Stop 102
tagagaactaggtgaactaacagat

SEQ ID NO: 356368 - DNA, 25 bp, Artificial
  probe
  misc_feature (1)..(25): SEQ ID NO: 3468; WAN024CHG; Start 76; Stop 100
tgtagagaactaggtgaactaacag

SEQ ID NO: 356369 - DNA, 25 bp, Artificial
  probe
  misc_feature (1)..(25): SEQ ID NO: 3468; WAN024CHG; Start 75; Stop 99
ctgtagagaactaggtgaactaaca

SEQ ID NO: 356370 - DNA, 25 bp, Artificial
  probe
  misc_feature (1)..(25): SEQ ID NO: 3468; WAN024CHG; Start 72; Stop 96
actctgtagagaactaggtgaacta

SEQ ID NO: 356371 - DNA, 25 bp, Artificial
  probe
  misc_feature (1)..(25): SEQ ID NO: 3468; WAN024CHG; Start 73; Stop 97
ctctgtagagaactaggtgaactaa

SEQ ID NO: 356372 - DNA, 25 bp, Artificial
  probe
  misc_feature (1)..(25): SEQ ID NO: 3468; WAN024CHG; Start 71; Stop 95
cactctgtagagaactaggtgaact

SEQ ID NO: 356373 - DNA, 25 bp, Artificial
  probe
  misc_feature (1)..(25): SEQ ID NO: 3468; WAN024CHG; Start 100; Stop 124
gatgtttacgaaattgtctgggaaa

SEQ ID NO: 356374 - DNA, 25 bp, Artificial
  probe
  misc_feature (1)..(25): SEQ ID NO: 3468; WAN024CHG; Start 99; Stop 123
agatgtttacgaaattgtctgggaa

SEQ ID NO: 356375 - DNA, 25 bp, Artificial
  probe
  misc_feature (1)..(25): SEQ ID NO: 3468; WAN024CHG; Start 87; Stop 111
aggtgaactaacagatgtttacgaa

SEQ ID NO: 356376 - DNA, 25 bp, Artificial
  probe
  misc_feature (1)..(25): SEQ ID NO: 3468; WAN024CHG; Start 88; Stop 112
ggtgaactaacagatgtttacgaaa

SEQ ID NO: 356377 - DNA, 25 bp, Artificial
  probe
  misc_feature (1)..(25): SEQ ID NO: 3468; WAN024CHG; Start 86; Stop 110
taggtgaactaacagatgtttacga

SEQ ID NO: 356378 - DNA, 25 bp, Artificial
  probe
  misc_feature (1)..(25): SEQ ID NO: 3468; WAN024CHG; Start 85; Stop 109
ctaggtgaactaacagatgtttacg

SEQ ID NO: 356379 - DNA, 25 bp, Artificial
  probe
  misc_feature (1)..(25): SEQ ID NO: 3468; WAN024CHG; Start 82; Stop 106
gaactaggtgaactaacagatgttt

SEQ ID NO: 356380 - DNA, 25 bp, Artificial
  probe
  misc_feature (1)..(25): SEQ ID NO: 3468; WAN024CHG; Start 84; Stop 108
actaggtgaactaacagatgtttac

SEQ ID NO: 356381 - DNA, 25 bp, Artificial
  probe
  misc_feature (1)..(25): SEQ ID NO: 3468; WAN024CHG; Start 89; Stop 113
gtgaactaacagatgtttacgaaat

SEQ ID NO: 356382 - DNA, 25 bp, Artificial
  probe
  misc_feature (1)..(25): SEQ ID NO: 3468; WAN024CHG; Start 83; Stop 107
aactaggtgaactaacagatgttta

SEQ ID NO: 356383 - DNA, 25 bp, Artificial
  probe
  misc_feature (1)..(25): SEQ ID NO: 3468; WAN024CHG; Start 93; Stop 117
actaacagatgtttacgaaattgtc

SEQ ID NO: 356384 - DNA, 25 bp, Artificial
  probe
  misc_feature (1)..(25): SEQ ID NO: 3468; WAN024CHG; Start 94; Stop 118
ctaacagatgtttacgaaattgtct

SEQ ID NO: 356385 - DNA, 25 bp, Artificial
  probe
  misc_feature (1)..(25): SEQ ID NO: 3468; WAN024CHG; Start 90; Stop 114
tgaactaacagatgtttacgaaatt

SEQ ID NO: 356386 - DNA, 25 bp, Artificial
  probe
  misc_feature (1)..(25): SEQ ID NO: 3468; WAN024CHG; Start 105; Stop 129
ttacgaaattgtctgggaaaagttg

SEQ ID NO: 356387 - DNA, 25 bp, Artificial
  probe
  misc_feature (1)..(25): SEQ ID NO: 3468; WAN024CHG; Start 103; Stop 127
gtttacgaaattgtctgggaaaagt

SEQ ID NO: 356388 - DNA, 25 bp, Artificial
  probe
  misc_feature (1)..(25): SEQ ID NO: 3468; WAN024CHG; Start 102; Stop 126
tgtttacgaaattgtctgggaaaag

SEQ ID NO: 356389 - DNA, 25 bp, Artificial
  probe
  misc_feature (1)..(25): SEQ ID NO: 3468; WAN024CHG; Start 104; Stop 128
tttacgaaattgtctgggaaaagtt

SEQ ID NO: 356390 - DNA, 25 bp, Artificial
  probe
  misc_feature (1)..(25): SEQ ID NO: 3468; WAN024CHG; Start 101; Stop 125
atgtttacgaaattgtctgggaaaa

SEQ ID NO: 356391 - DNA, 25 bp, Artificial
  probe
  misc_feature (1)..(25): SEQ ID NO: 3468; WAN024CHG; Start 92; Stop 116
aactaacagatgtttacgaaattgt

SEQ ID NO: 356392 - DNA, 25 bp, Artificial
  probe
  misc_feature (1)..(25): SEQ ID NO: 3468; WAN024CHG; Start 14; Stop 38
aaaaccttcgtctctcaactaaaag

SEQ ID NO: 356393 - DNA, 25 bp, Artificial
  probe
  misc_feature (1)..(25): SEQ ID NO: 3468; WAN024CHG; Start 13; Stop 37
gaaaaccttcgtctctcaactaaaa

SEQ ID NO: 356394 - DNA, 25 bp, Artificial
  probe
  misc_feature (1)..(25): SEQ ID NO: 3468; WAN024CHG; Start 91; Stop 115
gaactaacagatgtttacgaaattg

SEQ ID NO: 356395 - DNA, 25 bp, Artificial
  probe
  misc_feature (1)..(25): SEQ ID NO: 3469; WAN024G2N; Start 208; Stop 232
cttcctcgttatggtatcacaacaa

SEQ ID NO: 356396 - DNA, 25 bp, Artificial
  probe
  misc_feature (1)..(25): SEQ ID NO: 3469; WAN024G2N; Start 209; Stop 233
ttcctcgttatggtatcacaacaac

SEQ ID NO: 356397 - DNA, 25 bp, Artificial
  probe
  misc_feature (1)..(25): SEQ ID NO: 3469; WAN024G2N; Start 1050; Stop 1074
aatccacttgtctatcggtcttgaa

SEQ ID NO: 356398 - DNA, 25 bp, Artificial
  probe
  misc_feature (1)..(25): SEQ ID NO: 3469; WAN024G2N; Start 480; Stop 504
gcatggtacaactattggaggaata

SEQ ID NO: 356399 - DNA, 25 bp, Artificial
  probe
  misc_feature (1)..(25): SEQ ID NO: 3469; WAN024G2N; Start 494; Stop 518
ttggaggaataattgtcgatagtgg

SEQ ID NO: 356400 - DNA, 25 bp, Artificial
  probe
  misc_feature (1)..(25): SEQ ID NO: 3469; WAN024G2N; Start 207; Stop 231
ccttcctcgttatggtatcacaaca

SEQ ID NO: 356401 - DNA, 25 bp, Artificial
  probe
  misc_feature (1)..(25): SEQ ID NO: 3469; WAN024G2N; Start 496; Stop 520
ggaggaataattgtcgatagtggtc

SEQ ID NO: 356402 - DNA, 25 bp, Artificial
  probe
  misc_feature (1)..(25): SEQ ID NO: 3469; WAN024G2N; Start 765; Stop 789
tcttgtcaaccatcctaaggtagaa

SEQ ID NO: 356403 - DNA, 25 bp, Artificial
  probe
  misc_feature (1)..(25): SEQ ID NO: 3469; WAN024G2N; Start 764; Stop 788
ttcttgtcaaccatcctaaggtaga

SEQ ID NO: 356404 - DNA, 25 bp, Artificial
  probe
  misc_feature (1)..(25): SEQ ID NO: 3469; WAN024G2N; Start 481; Stop 505
catggtacaactattggaggaataa

SEQ ID NO: 356405 - DNA, 25 bp, Artificial
  probe
  misc_feature (1)..(25): SEQ ID NO: 3469; WAN024G2N; Start 901; Stop 925
gaagcacgcaaggtcattgataatt

SEQ ID NO: 356406 - DNA, 25 bp, Artificial
  probe
  misc_feature (1)..(25): SEQ ID NO: 3469; WAN024G2N; Start 495; Stop 519
tggaggaataattgtcgatagtggt

SEQ ID NO: 356407 - DNA, 25 bp, Artificial
  probe
  misc_feature (1)..(25): SEQ ID NO: 3469; WAN024G2N; Start 493; Stop 517
attggaggaataattgtcgatagtg

SEQ ID NO: 356408 - DNA, 25 bp, Artificial
  probe
  misc_feature (1)..(25): SEQ ID NO: 3469; WAN024G2N; Start 13; Stop 37
aggaaaccagggaacatttatactc

SEQ ID NO: 356409 - DNA, 25 bp, Artificial
  probe
  misc_feature (1)..(25): SEQ ID NO: 3469; WAN024G2N; Start 12; Stop 36
gaggaaaccagggaacatttatact

SEQ ID NO: 356410 - DNA, 25 bp, Artificial
  probe
  misc_feature (1)..(25): SEQ ID NO: 3469; WAN024G2N; Start 10; Stop 34
ttgaggaaaccagggaacatttata

SEQ ID NO: 356411 - DNA, 25 bp, Artificial
  probe
  misc_feature (1)..(25): SEQ ID NO: 3469; WAN024G2N; Start 212; Stop 236
ctcgttatggtatcacaacaacctt

SEQ ID NO: 356412 - DNA, 25 bp, Artificial
  probe
  misc_feature (1)..(25): SEQ ID NO: 3469; WAN024G2N; Start 16; Stop 40
aaaccagggaacatttatactcgta

SEQ ID NO: 356413 - DNA, 25 bp, Artificial
  probe
  misc_feature (1)..(25): SEQ ID NO: 3469; WAN024G2N; Start 11; Stop 35
tgaggaaaccagggaacatttatac

SEQ ID NO: 356414 - DNA, 25 bp, Artificial
  probe
  misc_feature (1)..(25): SEQ ID NO: 3469; WAN024G2N; Start 15; Stop 39
gaaaccagggaacatttatactcgt

SEQ ID NO: 356415 - DNA, 25 bp, Artificial
  probe
  misc_feature (1)..(25): SEQ ID NO: 3469; WAN024G2N; Start 246; Stop 270
tgataatttggaggaagtagaagca

SEQ ID NO: 356416 - DNA, 25 bp, Artificial
  probe
  misc_feature (1)..(25): SEQ ID NO: 3469; WAN024G2N; Start 1083; Stop 1107
agatttgattgaagacttacgcttg

SEQ ID NO: 356417 - DNA, 25 bp, Artificial
  probe
  misc_feature (1)..(25): SEQ ID NO: 3469; WAN024G2N; Start 9; Stop 33
cttgaggaaaccagggaacatttat

SEQ ID NO: 356418 - DNA, 25 bp, Artificial
  probe
  misc_feature (1)..(25): SEQ ID NO: 3469; WAN024G2N; Start 1081; Stop 1105
gaagatttgattgaagacttacgct

SEQ ID NO: 356419 - DNA, 25 bp, Artificial
  probe
  misc_feature (1)..(25): SEQ ID NO: 3469; WAN024G2N; Start 1080; Stop 1104
agaagatttgattgaagacttacgc

SEQ ID NO: 356420 - DNA, 25 bp, Artificial
  probe
  misc_feature (1)..(25): SEQ ID NO: 3469; WAN024G2N; Start 488; Stop 512
caactattggaggaataattgtcga

SEQ ID NO: 356421 - DNA, 25 bp, Artificial
  probe
  misc_feature (1)..(25): SEQ ID NO: 3469; WAN024G2N; Start 17; Stop 41
aaccagggaacatttatactcgtat

SEQ ID NO: 356422 - DNA, 25 bp, Artificial
  probe
  misc_feature (1)..(25): SEQ ID NO: 3469; WAN024G2N; Start 1084; Stop 1108
gatttgattgaagacttacgcttgg

SEQ ID NO: 356423 - DNA, 25 bp, Artificial
  probe
  misc_feature (1)..(25): SEQ ID NO: 3469; WAN024G2N; Start 1082; Stop 1106
aagatttgattgaagacttacgctt

SEQ ID NO: 356424 - DNA, 25 bp, Artificial
  probe
  misc_feature (1)..(25): SEQ ID NO: 3469; WAN024G2N; Start 248; Stop 272
ataatttggaggaagtagaagcagc

SEQ ID NO: 356425 - DNA, 25 bp, Artificial
  probe
  misc_feature (1)..(25): SEQ ID NO: 3469; WAN024G2N; Start 247; Stop 271
gataatttggaggaagtagaagcag

SEQ ID NO: 356426 - DNA, 25 bp, Artificial
  probe
  misc_feature (1)..(25): SEQ ID NO: 3469; WAN024G2N; Start 483; Stop 507
tggtacaactattggaggaataatt

SEQ ID NO: 356427 - DNA, 25 bp, Artificial
  probe
  misc_feature (1)..(25): SEQ ID NO: 3469; WAN024G2N; Start 14; Stop 38
ggaaaccagggaacatttatactcg

SEQ ID NO: 356428 - DNA, 25 bp, Artificial
  probe
  misc_feature (1)..(25): SEQ ID NO: 3470; WAN024CTG; Start 41; Stop 65
gggaatttcaggaggtcaagatttc

SEQ ID NO: 356429 - DNA, 25 bp, Artificial
  probe
  misc_feature (1)..(25): SEQ ID NO: 3470; WAN024CTG; Start 43; Stop 67
gaatttcaggaggtcaagatttccc

SEQ ID NO: 356430 - DNA, 25 bp, Artificial
  probe
  misc_feature (1)..(25): SEQ ID NO: 3470; WAN024CTG; Start 45; Stop 69
atttcaggaggtcaagatttccctt

SEQ ID NO: 356431 - DNA, 25 bp, Artificial
  probe
  misc_feature (1)..(25): SEQ ID NO: 3470; WAN024CTG; Start 44; Stop 68
aatttcaggaggtcaagatttccct

SEQ ID NO: 356432 - DNA, 25 bp, Artificial
  probe
  misc_feature (1)..(25): SEQ ID NO: 3470; WAN024CTG; Start 40; Stop 64
cgggaatttcaggaggtcaagattt

SEQ ID NO: 356433 - DNA, 25 bp, Artificial
  probe
  misc_feature (1)..(25): SEQ ID NO: 3470; WAN024CTG; Start 39; Stop 63
tcgggaatttcaggaggtcaagatt

SEQ ID NO: 356434 - DNA, 25 bp, Artificial
  probe
  misc_feature (1)..(25): SEQ ID NO: 3470; WAN024CTG; Start 38; Stop 62
ttcgggaatttcaggaggtcaagat

SEQ ID NO: 356435 - DNA, 25 bp, Artificial
  probe
  misc_feature (1)..(25): SEQ ID NO: 3470; WAN024CTG; Start 50; Stop 74
aggaggtcaagatttcccttgtaaa

SEQ ID NO: 356436 - DNA, 25 bp, Artificial
  probe
  misc_feature (1)..(25): SEQ ID NO: 3470; WAN024CTG; Start 37; Stop 61
cttcgggaatttcaggaggtcaaga

SEQ ID NO: 356437 - DNA, 25 bp, Artificial
  probe
  misc_feature (1)..(25): SEQ ID NO: 3470; WAN024CTG; Start 49; Stop 73
caggaggtcaagatttcccttgtaa

SEQ ID NO: 356438 - DNA, 25 bp, Artificial
  probe
  misc_feature (1)..(25): SEQ ID NO: 3470; WAN024CTG; Start 42; Stop 66
ggaatttcaggaggtcaagatttcc

SEQ ID NO: 356439 - DNA, 25 bp, Artificial
  probe
  misc_feature (1)..(25): SEQ ID NO: 3470; WAN024CTG; Start 46; Stop 70
tttcaggaggtcaagatttcccttg

SEQ ID NO: 356440 - DNA, 25 bp, Artificial
  probe
  misc_feature (1)..(25): SEQ ID NO: 3470; WAN024CTG; Start 48; Stop 72
tcaggaggtcaagatttcccttgta

SEQ ID NO: 356441 - DNA, 25 bp, Artificial
  probe
  misc_feature (1)..(25): SEQ ID NO: 3470; WAN024CTG; Start 51; Stop 75
ggaggtcaagatttcccttgtaaaa

SEQ ID NO: 356442 - DNA, 25 bp, Artificial
  probe
  misc_feature (1)..(25): SEQ ID NO: 3470; WAN024CTG; Start 47; Stop 71
ttcaggaggtcaagatttcccttgt

SEQ ID NO: 356443 - DNA, 25 bp, Artificial
  probe
  misc_feature (1)..(25): SEQ ID NO: 3470; WAN024CTG; Start 36; Stop 60
ccttcgggaatttcaggaggtcaag

SEQ ID NO: 356444 - DNA, 25 bp, Artificial
  probe
  misc_feature (1)..(25): SEQ ID NO: 3470; WAN024CTG; Start 33; Stop 57
ctaccttcgggaatttcaggaggtc

SEQ ID NO: 356445 - DNA, 25 bp, Artificial
  probe
  misc_feature (1)..(25): SEQ ID NO: 3470; WAN024CTG; Start 34; Stop 58
taccttcgggaatttcaggaggtca

SEQ ID NO: 356446 - DNA, 25 bp, Artificial
  probe
  misc_feature (1)..(25): SEQ ID NO: 3471; WAN024GAM; Start 96; Stop 120
aaagaatgcaaaggaactaactaat

SEQ ID NO: 356447 - DNA, 25 bp, Artificial
  probe
  misc_feature (1)..(25): SEQ ID NO: 3471; WAN024GAM; Start 23; Stop 47
caaaagaatgcaaaggaataccaaa

SEQ ID NO: 356448 - DNA, 25 bp, Artificial
  probe
  misc_feature (1)..(25): SEQ ID NO: 3471; WAN024GAM; Start 94; Stop 118
caaaagaatgcaaaggaactaacta

SEQ ID NO: 356449 - DNA, 25 bp, Artificial
  probe
  misc_feature (1)..(25): SEQ ID NO: 3471; WAN024GAM; Start 79; Stop 103
ttttaccaaggaatgcaaaagaatg

SEQ ID NO: 356450 - DNA, 25 bp, Artificial
  probe
  misc_feature (1)..(25): SEQ ID NO: 3471; WAN024GAM; Start 78; Stop 102
gttttaccaaggaatgcaaaagaat

SEQ ID NO: 356451 - DNA, 25 bp, Artificial
  probe
  misc_feature (1)..(25): SEQ ID NO: 3471; WAN024GAM; Start 77; Stop 101
cgttttaccaaggaatgcaaaagaa

SEQ ID NO: 356452 - DNA, 25 bp, Artificial
  probe
  misc_feature (1)..(25): SEQ ID NO: 3471; WAN024GAM; Start 76; Stop 100
acgttttaccaaggaatgcaaaaga

SEQ ID NO: 356453 - DNA, 25 bp, Artificial
  probe
  misc_feature (1)..(25): SEQ ID NO: 3471; WAN024GAM; Start 95; Stop 119
aaaagaatgcaaaggaactaactaa

SEQ ID NO: 356454 - DNA, 25 bp, Artificial
  probe
  misc_feature (1)..(25): SEQ ID NO: 3471; WAN024GAM; Start 20; Stop 44
tagcaaaagaatgcaaaggaatacc

SEQ ID NO: 356455 - DNA, 25 bp, Artificial
  probe
  misc_feature (1)..(25): SEQ ID NO: 3471; WAN024GAM; Start 93; Stop 117
gcaaaagaatgcaaaggaactaact

SEQ ID NO: 356456 - DNA, 25 bp, Artificial
  probe
  misc_feature (1)..(25): SEQ ID NO: 3471; WAN024GAM; Start 80; Stop 104
tttaccaaggaatgcaaaagaatgc

SEQ ID NO: 356457 - DNA, 25 bp, Artificial
  probe
  misc_feature (1)..(25): SEQ ID NO: 3471; WAN024GAM; Start 22; Stop 46
gcaaaagaatgcaaaggaataccaa

SEQ ID NO: 356458 - DNA, 25 bp, Artificial
  probe
  misc_feature (1)..(25): SEQ ID NO: 3471; WAN024GAM; Start 19; Stop 43
ttagcaaaagaatgcaaaggaatac

SEQ ID NO: 356459 - DNA, 25 bp, Artificial
  probe
  misc_feature (1)..(25): SEQ ID NO: 3471; WAN024GAM; Start 17; Stop 41
ttttagcaaaagaatgcaaaggaat

SEQ ID NO: 356460 - DNA, 25 bp, Artificial
  probe
  misc_feature (1)..(25): SEQ ID NO: 3471; WAN024GAM; Start 21; Stop 45
agcaaaagaatgcaaaggaatacca

SEQ ID NO: 356461 - DNA, 25 bp, Artificial
  probe
  misc_feature (1)..(25): SEQ ID NO: 3471; WAN024GAM; Start 18; Stop 42
tttagcaaaagaatgcaaaggaata

SEQ ID NO: 356462 - DNA, 25 bp, Artificial
  probe
  misc_feature (1)..(25): SEQ ID NO: 3471; WAN024GAM; Start 66; Stop 90
tgatttaacaacgttttaccaagga

SEQ ID NO: 356463 - DNA, 25 bp, Artificial
  probe
  misc_feature (1)..(25): SEQ ID NO: 3471; WAN024GAM; Start 70; Stop 94
ttaacaacgttttaccaaggaatgc

SEQ ID NO: 356464 - DNA, 25 bp, Artificial
  probe
  misc_feature (1)..(25): SEQ ID NO: 3471; WAN024GAM; Start 69; Stop 93
tttaacaacgttttaccaaggaatg

SEQ ID NO: 356465 - DNA, 25 bp, Artificial
  probe
  misc_feature (1)..(25): SEQ ID NO: 3471; WAN024GAM; Start 65; Stop 89
ttgatttaacaacgttttaccaagg

SEQ ID NO: 356466 - DNA, 25 bp, Artificial
  probe
  misc_feature (1)..(25): SEQ ID NO: 3471; WAN024GAM; Start 67; Stop 91
gatttaacaacgttttaccaaggaa

SEQ ID NO: 356467 - DNA, 25 bp, Artificial
  probe
  misc_feature (1)..(25): SEQ ID NO: 3471; WAN024GAM; Start 71; Stop 95
taacaacgttttaccaaggaatgca

SEQ ID NO: 356468 - DNA, 25 bp, Artificial
  probe
  misc_feature (1)..(25): SEQ ID NO: 3471; WAN024GAM; Start 73; Stop 97
acaacgttttaccaaggaatgcaaa

SEQ ID NO: 356469 - DNA, 25 bp, Artificial
  probe
  misc_feature (1)..(25): SEQ ID NO: 3471; WAN024GAM; Start 68; Stop 92
atttaacaacgttttaccaaggaat

SEQ ID NO: 356470 - DNA, 25 bp, Artificial
  probe
  misc_feature (1)..(25): SEQ ID NO: 3471; WAN024GAM; Start 75; Stop 99
aacgttttaccaaggaatgcaaaag

SEQ ID NO: 356471 - DNA, 25 bp, Artificial
  probe
  misc_feature (1)..(25): SEQ ID NO: 3471; WAN024GAM; Start 74; Stop 98
caacgttttaccaaggaatgcaaaa

SEQ ID NO: 356472 - DNA, 25 bp, Artificial
  probe
  misc_feature (1)..(25): SEQ ID NO: 3471; WAN024GAM; Start 72; Stop 96
aacaacgttttaccaaggaatgcaa

SEQ ID NO: 356473 - DNA, 25 bp, Artificial
  probe
  misc_feature (1)..(25): SEQ ID NO: 3471; WAN024GAM; Start 64; Stop 88
gttgatttaacaacgttttaccaag

SEQ ID NO: 356474 - DNA, 25 bp, Artificial
  probe
  misc_feature (1)..(25): SEQ ID NO: 3472; WAN024DOE; Start 152; Stop 176
tctataagagaaaggagttggtagc

SEQ ID NO: 356475 - DNA, 25 bp, Artificial
  probe
  misc_feature (1)..(25): SEQ ID NO: 3472; WAN024DOE; Start 106; Stop 130
tgtaagggcttcaatttagatgatt

SEQ ID NO: 356476 - DNA, 25 bp, Artificial
  probe
  misc_feature (1)..(25): SEQ ID NO: 3472; WAN024DOE; Start 104; Stop 128
aatgtaagggcttcaatttagatga

SEQ ID NO: 356477 - DNA, 25 bp, Artificial
  probe
  misc_feature (1)..(25): SEQ ID NO: 3472; WAN024DOE; Start 105; Stop 129
atgtaagggcttcaatttagatgat

SEQ ID NO: 356478 - DNA, 25 bp, Artificial
  probe
  misc_feature (1)..(25): SEQ ID NO: 3472; WAN024DOE; Start 153; Stop 177
ctataagagaaaggagttggtagct

SEQ ID NO: 356479 - DNA, 25 bp, Artificial
  probe
  misc_feature (1)..(25): SEQ ID NO: 3472; WAN024DOE; Start 103; Stop 127
aaatgtaagggcttcaatttagatg

SEQ ID NO: 356480 - DNA, 25 bp, Artificial
  probe
  misc_feature (1)..(25): SEQ ID NO: 3472; WAN024DOE; Start 102; Stop 126
gaaatgtaagggcttcaatttagat

SEQ ID NO: 356481 - DNA, 25 bp, Artificial
  probe
  misc_feature (1)..(25): SEQ ID NO: 3472; WAN024DOE; Start 107; Stop 131
gtaagggcttcaatttagatgatta

SEQ ID NO: 356482 - DNA, 25 bp, Artificial
  probe
  misc_feature (1)..(25): SEQ ID NO: 3472; WAN024DOE; Start 8; Stop 32
caagcctgatgaattttatgagcat

SEQ ID NO: 356483 - DNA, 25 bp, Artificial
  probe
  misc_feature (1)..(25): SEQ ID NO: 3472; WAN024DOE; Start 111; Stop 135
gggcttcaatttagatgattatttg

SEQ ID NO: 356484 - DNA, 25 bp, Artificial
  probe
  misc_feature (1)..(25): SEQ ID NO: 3472; WAN024DOE; Start 110; Stop 134
agggcttcaatttagatgattattt

SEQ ID NO: 356485 - DNA, 25 bp, Artificial
  probe
  misc_feature (1)..(25): SEQ ID NO: 3472; WAN024DOE; Start 109; Stop 133
aagggcttcaatttagatgattatt

SEQ ID NO: 356486 - DNA, 25 bp, Artificial
  probe
  misc_feature (1)..(25): SEQ ID NO: 3472; WAN024DOE; Start 9; Stop 33
aagcctgatgaattttatgagcata

SEQ ID NO: 356487 - DNA, 25 bp, Artificial
  probe
  misc_feature (1)..(25): SEQ ID NO: 3472; WAN024DOE; Start 7; Stop 31
tcaagcctgatgaattttatgagca

SEQ ID NO: 356488 - DNA, 25 bp, Artificial
  probe
  misc_feature (1)..(25): SEQ ID NO: 3472; WAN024DOE; Start 101; Stop 125
tgaaatgtaagggcttcaatttaga

SEQ ID NO: 356489 - DNA, 25 bp, Artificial
  probe
  misc_feature (1)..(25): SEQ ID NO: 3472; WAN024DOE; Start 10; Stop 34
agcctgatgaattttatgagcatat

SEQ ID NO: 356490 - DNA, 25 bp, Artificial
  probe
  misc_feature (1)..(25): SEQ ID NO: 3472; WAN024DOE; Start 93; Stop 117
catgaaaatgaaatgtaagggcttc

SEQ ID NO: 356491 - DNA, 25 bp, Artificial
  probe
  misc_feature (1)..(25): SEQ ID NO: 3472; WAN024DOE; Start 98; Stop 122
aaatgaaatgtaagggcttcaattt

SEQ ID NO: 356492 - DNA, 25 bp, Artificial
  probe
  misc_feature (1)..(25): SEQ ID NO: 3472; WAN024DOE; Start 11; Stop 35
gcctgatgaattttatgagcatatt

SEQ ID NO: 356493 - DNA, 25 bp, Artificial
  probe
  misc_feature (1)..(25): SEQ ID NO: 3472; WAN024DOE; Start 151; Stop 175
ttctataagagaaaggagttggtag

SEQ ID NO: 356494 - DNA, 25 bp, Artificial
  probe
  misc_feature (1)..(25): SEQ ID NO: 3472; WAN024DOE; Start 100; Stop 124
atgaaatgtaagggcttcaatttag

SEQ ID NO: 356495 - DNA, 25 bp, Artificial
  probe
  misc_feature (1)..(25): SEQ ID NO: 3472; WAN024DOE; Start 108; Stop 132
taagggcttcaatttagatgattat

SEQ ID NO: 356496 - DNA, 25 bp, Artificial
  probe
  misc_feature (1)..(25): SEQ ID NO: 3472; WAN024DOE; Start 99; Stop 123
aatgaaatgtaagggcttcaattta

SEQ ID NO: 356497 - DNA, 25 bp, Artificial
  probe
  misc_feature (1)..(25): SEQ ID NO: 3472; WAN024DOE; Start 6; Stop 30
ttcaagcctgatgaattttatgagc

SEQ ID NO: 356498 - DNA, 25 bp, Artificial
  probe
  misc_feature (1)..(25): SEQ ID NO: 3472; WAN024DOE; Start 95; Stop 119
tgaaaatgaaatgtaagggcttcaa

SEQ ID NO: 356499 - DNA, 25 bp, Artificial
  probe
  misc_feature (1)..(25): SEQ ID NO: 3472; WAN024DOE; Start 94; Stop 118
atgaaaatgaaatgtaagggcttca

SEQ ID NO: 356500 - DNA, 25 bp, Artificial
  probe
  misc_feature (1)..(25): SEQ ID NO: 3472; WAN024DOE; Start 92; Stop 116
acatgaaaatgaaatgtaagggctt

SEQ ID NO: 356501 - DNA, 25 bp, Artificial
  probe
  misc_feature (1)..(25): SEQ ID NO: 3472; WAN024DOE; Start 91; Stop 115
aacatgaaaatgaaatgtaagggct

SEQ ID NO: 356502 - DNA, 25 bp, Artificial
  probe
  misc_feature (1)..(25): SEQ ID NO: 3472; WAN024DOE; Start 96; Stop 120
gaaaatgaaatgtaagggcttcaat

SEQ ID NO: 356503 - DNA, 25 bp, Artificial
  probe
  misc_feature (1)..(25): SEQ ID NO: 3472; WAN024DOE; Start 1; Stop 25
ctgttttcaagcctgatgaatttta

SEQ ID NO: 356504 - DNA, 25 bp, Artificial
  probe
  misc_feature (1)..(25): SEQ ID NO: 3472; WAN024DOE; Start 97; Stop 121
aaaatgaaatgtaagggcttcaatt

SEQ ID NO: 356505 - DNA, 25 bp, Artificial
  probe
  misc_feature (1)..(25): SEQ ID NO: 3472; WAN024DOE; Start 5; Stop 29
tttcaagcctgatgaattttatgag

SEQ ID NO: 356506 - DNA, 25 bp, Artificial
  probe
  misc_feature (1)..(25): SEQ ID NO: 3472; WAN024DOE; Start 90; Stop 114
taacatgaaaatgaaatgtaagggc

SEQ ID NO: 356507 - DNA, 25 bp, Artificial
  probe
  misc_feature (1)..(25): SEQ ID NO: 3473; WAN024CY5; Start 382; Stop 406
tatatgattggtaggataggtgctt

SEQ ID NO: 356508 - DNA, 25 bp, Artificial
  probe
  misc_feature (1)..(25): SEQ ID NO: 3473; WAN024CY5; Start 381; Stop 405
ttatatgattggtaggataggtgct

SEQ ID NO: 356509 - DNA, 25 bp, Artificial
  probe
  misc_feature (1)..(25): SEQ ID NO: 3473; WAN024CY5; Start 380; Stop 404
gttatatgattggtaggataggtgc

SEQ ID NO: 356510 - DNA, 25 bp, Artificial
  probe
  misc_feature (1)..(25): SEQ ID NO: 3473; WAN024CY5; Start 460; Stop 484
gcttatcagtcttacttggattcac

SEQ ID NO: 356511 - DNA, 25 bp, Artificial
  probe
  misc_feature (1)..(25): SEQ ID NO: 3473; WAN024CY5; Start 461; Stop 485
cttatcagtcttacttggattcaca

SEQ ID NO: 356512 - DNA, 25 bp, Artificial
  probe
  misc_feature (1)..(25): SEQ ID NO: 3473; WAN024CY5; Start 462; Stop 486
ttatcagtcttacttggattcacaa

SEQ ID NO: 356513 - DNA, 25 bp, Artificial
  probe
  misc_feature (1)..(25): SEQ ID NO: 3473; WAN024CY5; Start 304; Stop 328
tggaattacgtcaacacaatacatg

SEQ ID NO: 356514 - DNA, 25 bp, Artificial
  probe
  misc_feature (1)..(25): SEQ ID NO: 3473; WAN024CY5; Start 459; Stop 483
agcttatcagtcttacttggattca

SEQ ID NO: 356515 - DNA, 25 bp, Artificial
  probe
  misc_feature (1)..(25): SEQ ID NO: 3473; WAN024CY5; Start 305; Stop 329
ggaattacgtcaacacaatacatgg

SEQ ID NO: 356516 - DNA, 25 bp, Artificial
  probe
  misc_feature (1)..(25): SEQ ID NO: 3473; WAN024CY5; Start 388; Stop 412
attggtaggataggtgctttattgg

SEQ ID NO: 356517 - DNA, 25 bp, Artificial
  probe
  misc_feature (1)..(25): SEQ ID NO: 3473; WAN024CY5; Start 379; Stop 403
agttatatgattggtaggataggtg

SEQ ID NO: 356518 - DNA, 25 bp, Artificial
  probe
  misc_feature (1)..(25): SEQ ID NO: 3473; WAN024CY5; Start 378; Stop 402
cagttatatgattggtaggataggt

SEQ ID NO: 356519 - DNA, 25 bp, Artificial
  probe
  misc_feature (1)..(25): SEQ ID NO: 3473; WAN024CY5; Start 482; Stop 506
cacaaagcccatatccatactacat

SEQ ID NO: 356520 - DNA, 25 bp, Artificial
  probe
  misc_feature (1)..(25): SEQ ID NO: 3473; WAN024CY5; Start 480; Stop 504
ttcacaaagcccatatccatactac

SEQ ID NO: 356521 - DNA, 25 bp, Artificial
  probe
  misc_feature (1)..(25): SEQ ID NO: 3473; WAN024CY5; Start 386; Stop 410
tgattggtaggataggtgctttatt

SEQ ID NO: 356522 - DNA, 25 bp, Artificial
  probe
  misc_feature (1)..(25): SEQ ID NO: 3473; WAN024CY5; Start 479; Stop 503
attcacaaagcccatatccatacta

SEQ ID NO: 356523 - DNA, 25 bp, Artificial
  probe
  misc_feature (1)..(25): SEQ ID NO: 3473; WAN024CY5; Start 387; Stop 411
gattggtaggataggtgctttattg

SEQ ID NO: 356524 - DNA, 25 bp, Artificial
  probe
  misc_feature (1)..(25): SEQ ID NO: 3473; WAN024CY5; Start 385; Stop 409
atgattggtaggataggtgctttat

SEQ ID NO: 356525 - DNA, 25 bp, Artificial
  probe
  misc_feature (1)..(25): SEQ ID NO: 3473; WAN024CY5; Start 383; Stop 407
atatgattggtaggataggtgcttt

SEQ ID NO: 356526 - DNA, 25 bp, Artificial
  probe
  misc_feature (1)..(25): SEQ ID NO: 3473; WAN024CY5; Start 478; Stop 502
gattcacaaagcccatatccatact

SEQ ID NO: 356527 - DNA, 25 bp, Artificial
  probe
  misc_feature (1)..(25): SEQ ID NO: 3473; WAN024CY5; Start 119; Stop 143
ggttcggagatacgcaagtaaatat

SEQ ID NO: 356528 - DNA, 25 bp, Artificial
  probe
  misc_feature (1)..(25): SEQ ID NO: 3473; WAN024CY5; Start 487; Stop 511
agcccatatccatactacataacaa

SEQ ID NO: 356529 - DNA, 25 bp, Artificial
  probe
  misc_feature (1)..(25): SEQ ID NO: 3473; WAN024CY5; Start 486; Stop 510
aagcccatatccatactacataaca

SEQ ID NO: 356530 - DNA, 25 bp, Artificial
  probe
  misc_feature (1)..(25): SEQ ID NO: 3473; WAN024CY5; Start 483; Stop 507
acaaagcccatatccatactacata

SEQ ID NO: 356531 - DNA, 25 bp, Artificial
  probe
  misc_feature (1)..(25): SEQ ID NO: 3473; WAN024CY5; Start 488; Stop 512
gcccatatccatactacataacaag

SEQ ID NO: 356532 - DNA, 25 bp, Artificial
  probe
  misc_feature (1)..(25): SEQ ID NO: 3473; WAN024CY5; Start 384; Stop 408
tatgattggtaggataggtgcttta

SEQ ID NO: 356533 - DNA, 25 bp, Artificial
  probe
  misc_feature (1)..(25): SEQ ID NO: 3473; WAN024CY5; Start 481; Stop 505
tcacaaagcccatatccatactaca

SEQ ID NO: 356534 - DNA, 25 bp, Artificial
  probe
  misc_feature (1)..(25): SEQ ID NO: 3473; WAN024CY5; Start 303; Stop 327
ttggaattacgtcaacacaatacat

SEQ ID NO: 356535 - DNA, 25 bp, Artificial
  probe
  misc_feature (1)..(25): SEQ ID NO: 3473; WAN024CY5; Start 144; Stop 168
tttaagcgatgaagttcttgaggtt

SEQ ID NO: 356536 - DNA, 25 bp, Artificial
  probe
  misc_feature (1)..(25): SEQ ID NO: 3473; WAN024CY5; Start 464; Stop 488
atcagtcttacttggattcacaaag

SEQ ID NO: 356537 - DNA, 25 bp, Artificial
  probe
  misc_feature (1)..(25): SEQ ID NO: 3473; WAN024CY5; Start 485; Stop 509
aaagcccatatccatactacataac

SEQ ID NO: 356538 - DNA, 25 bp, Artificial
  probe
  misc_feature (1)..(25): SEQ ID NO: 3473; WAN024CY5; Start 484; Stop 508
caaagcccatatccatactacataa

SEQ ID NO: 356539 - DNA, 25 bp, Artificial
  probe
  misc_feature (1)..(25): SEQ ID NO: 3473; WAN024CY5; Start 317; Stop 341
acacaatacatgggaataaacaagc

SEQ ID NO: 356540 - DNA, 25 bp, Artificial
  probe
  misc_feature (1)..(25): SEQ ID NO: 3474; WAN024AQI; Start 46; Stop 70
ttttaaaattttgtgcaagcgtttg

SEQ ID NO: 356541 - DNA, 25 bp, Artificial
  probe
  misc_feature (1)..(25): SEQ ID NO: 3474; WAN024AQI; Start 47; Stop 71
tttaaaattttgtgcaagcgtttgc

SEQ ID NO: 356542 - DNA, 25 bp, Artificial
  probe
  misc_feature (1)..(25): SEQ ID NO: 3476; WAN0249VB; Start 8; Stop 32
ccctgatactatgcgtgtttgtaat

SEQ ID NO: 356543 - DNA, 25 bp, Artificial
  probe
  misc_feature (1)..(25): SEQ ID NO: 3476; WAN0249VB; Start 9; Stop 33
cctgatactatgcgtgtttgtaatt

SEQ ID NO: 356544 - DNA, 25 bp, Artificial
  probe
  misc_feature (1)..(25): SEQ ID NO: 3476; WAN0249VB; Start 10; Stop 34
ctgatactatgcgtgtttgtaattt

SEQ ID NO: 356545 - DNA, 25 bp, Artificial
  probe
  misc_feature (1)..(25): SEQ ID NO: 3476; WAN0249VB; Start 3; Stop 27
taatcccctgatactatgcgtgttt

SEQ ID NO: 356546 - DNA, 25 bp, Artificial
  probe
  misc_feature (1)..(25): SEQ ID NO: 3476; WAN0249VB; Start 2; Stop 26
ttaatcccctgatactatgcgtgtt

SEQ ID NO: 356547 - DNA, 25 bp, Artificial
  probe
  misc_feature (1)..(25): SEQ ID NO: 3476; WAN0249VB; Start 1; Stop 25
cttaatcccctgatactatgcgtgt

SEQ ID NO: 356548 - DNA, 25 bp, Artificial
  probe
  misc_feature (1)..(25): SEQ ID NO: 3476; WAN0249VB; Start 11; Stop 35
tgatactatgcgtgtttgtaatttt

SEQ ID NO: 356549 - DNA, 25 bp, Artificial
  probe
  misc_feature (1)..(25): SEQ ID NO: 3476; WAN0249VB; Start 7; Stop 31
cccctgatactatgcgtgtttgtaa

SEQ ID NO: 356550 - DNA, 25 bp, Artificial
  probe
  misc_feature (1)..(25): SEQ ID NO: 3476; WAN0249VB; Start 33; Stop 57
ttttaagattttgtgcttagagtcg

SEQ ID NO: 356551 - DNA, 25 bp, Artificial
  probe
  misc_feature (1)..(25): SEQ ID NO: 3476; WAN0249VB; Start 4; Stop 28
aatcccctgatactatgcgtgtttg

SEQ ID NO: 356552 - DNA, 25 bp, Artificial
  probe
  misc_feature (1)..(25): SEQ ID NO: 3476; WAN0249VB; Start 34; Stop 58
tttaagattttgtgcttagagtcga

SEQ ID NO: 356553 - DNA, 25 bp, Artificial
  probe
  misc_feature (1)..(25): SEQ ID NO: 3476; WAN0249VB; Start 6; Stop 30
tcccctgatactatgcgtgtttgta

SEQ ID NO: 356554 - DNA, 25 bp, Artificial
  probe
  misc_feature (1)..(25): SEQ ID NO: 3476; WAN0249VB; Start 5; Stop 29
atcccctgatactatgcgtgtttgt

SEQ ID NO: 356555 - DNA, 25 bp, Artificial
  probe
  misc_feature (1)..(25): SEQ ID NO: 3477; WAN0249KJ; Start 168; Stop 192
ggcttgaggtatatgctactgttat

SEQ ID NO: 356556 - DNA, 25 bp, Artificial
  probe
  misc_feature (1)..(25): SEQ ID NO: 3477; WAN0249KJ; Start 30; Stop 54
aggtgtccactcattaagcaatata

SEQ ID NO: 356557 - DNA, 25 bp, Artificial
  probe
  misc_feature (1)..(25): SEQ ID NO: 3477; WAN0249KJ; Start 31; Stop 55
ggtgtccactcattaagcaatataa

SEQ ID NO: 356558 - DNA, 25 bp, Artificial
  probe
  misc_feature (1)..(25): SEQ ID NO: 3477; WAN0249KJ; Start 29; Stop 53
gaggtgtccactcattaagcaatat

SEQ ID NO: 356559 - DNA, 25 bp, Artificial
  probe
  misc_feature (1)..(25): SEQ ID NO: 3477; WAN0249KJ; Start 167; Stop 191
cggcttgaggtatatgctactgtta

SEQ ID NO: 356560 - DNA, 25 bp, Artificial
  probe
  misc_feature (1)..(25): SEQ ID NO: 3477; WAN0249KJ; Start 169; Stop 193
gcttgaggtatatgctactgttata

SEQ ID NO: 356561 - DNA, 25 bp, Artificial
  probe
  misc_feature (1)..(25): SEQ ID NO: 3477; WAN0249KJ; Start 28; Stop 52
agaggtgtccactcattaagcaata

SEQ ID NO: 356562 - DNA, 25 bp, Artificial
  probe
  misc_feature (1)..(25): SEQ ID NO: 3477; WAN0249KJ; Start 27; Stop 51
tagaggtgtccactcattaagcaat

SEQ ID NO: 356563 - DNA, 25 bp, Artificial
  probe
  misc_feature (1)..(25): SEQ ID NO: 3477; WAN0249KJ; Start 26; Stop 50
atagaggtgtccactcattaagcaa

SEQ ID NO: 356564 - DNA, 25 bp, Artificial
  probe
  misc_feature (1)..(25): SEQ ID NO: 3477; WAN0249KJ; Start 25; Stop 49
aatagaggtgtccactcattaagca

SEQ ID NO: 356565 - DNA, 25 bp, Artificial
  probe
  misc_feature (1)..(25): SEQ ID NO: 3477; WAN0249KJ; Start 156; Stop 180
taattgctaaacggcttgaggtata

SEQ ID NO: 356566 - DNA, 25 bp, Artificial
  probe
  misc_feature (1)..(25): SEQ ID NO: 3477; WAN0249KJ; Start 151; Stop 175
tattctaattgctaaacggcttgag

SEQ ID NO: 356567 - DNA, 25 bp, Artificial
  probe
  misc_feature (1)..(25): SEQ ID NO: 3477; WAN0249KJ; Start 150; Stop 174
ctattctaattgctaaacggcttga

SEQ ID NO: 356568 - DNA, 25 bp, Artificial
  probe
  misc_feature (1)..(25): SEQ ID NO: 3477; WAN0249KJ; Start 149; Stop 173
tctattctaattgctaaacggcttg

SEQ ID NO: 356569 - DNA, 25 bp, Artificial
  probe
  misc_feature (1)..(25): SEQ ID NO: 3477; WAN0249KJ; Start 157; Stop 181
aattgctaaacggcttgaggtatat

SEQ ID NO: 356570 - DNA, 25 bp, Artificial
  probe
  misc_feature (1)..(25): SEQ ID NO: 3477; WAN0249KJ; Start 162; Stop 186
ctaaacggcttgaggtatatgctac

SEQ ID NO: 356571 - DNA, 25 bp, Artificial
  probe
  misc_feature (1)..(25): SEQ ID NO: 3477; WAN0249KJ; Start 158; Stop 182
attgctaaacggcttgaggtatatg

SEQ ID NO: 356572 - DNA, 25 bp, Artificial
  probe
  misc_feature (1)..(25): SEQ ID NO: 3477; WAN0249KJ; Start 147; Stop 171
gttctattctaattgctaaacggct

SEQ ID NO: 356573 - DNA, 25 bp, Artificial
  probe
  misc_feature (1)..(25): SEQ ID NO: 3477; WAN0249KJ; Start 146; Stop 170
agttctattctaattgctaaacggc

SEQ ID NO: 356574 - DNA, 25 bp, Artificial
  probe
  misc_feature (1)..(25): SEQ ID NO: 3477; WAN0249KJ; Start 155; Stop 179
ctaattgctaaacggcttgaggtat

SEQ ID NO: 356575 - DNA, 25 bp, Artificial
  probe
  misc_feature (1)..(25): SEQ ID NO: 3477; WAN0249KJ; Start 148; Stop 172
ttctattctaattgctaaacggctt

SEQ ID NO: 356576 - DNA, 25 bp, Artificial
  probe
  misc_feature (1)..(25): SEQ ID NO: 3477; WAN0249KJ; Start 163; Stop 187
taaacggcttgaggtatatgctact

SEQ ID NO: 356577 - DNA, 25 bp, Artificial
  probe
  misc_feature (1)..(25): SEQ ID NO: 3477; WAN0249KJ; Start 152; Stop 176
attctaattgctaaacggcttgagg

SEQ ID NO: 356578 - DNA, 25 bp, Artificial
  probe
  misc_feature (1)..(25): SEQ ID NO: 3477; WAN0249KJ; Start 24; Stop 48
aaatagaggtgtccactcattaagc

SEQ ID NO: 356579 - DNA, 25 bp, Artificial
  probe
  misc_feature (1)..(25): SEQ ID NO: 3477; WAN0249KJ; Start 154; Stop 178
tctaattgctaaacggcttgaggta

SEQ ID NO: 356580 - DNA, 25 bp, Artificial
  probe
  misc_feature (1)..(25): SEQ ID NO: 3477; WAN0249KJ; Start 166; Stop 190
acggcttgaggtatatgctactgtt

SEQ ID NO: 356581 - DNA, 25 bp, Artificial
  probe
  misc_feature (1)..(25): SEQ ID NO: 3477; WAN0249KJ; Start 165; Stop 189
aacggcttgaggtatatgctactgt

SEQ ID NO: 356582 - DNA, 25 bp, Artificial
  probe
  misc_feature (1)..(25): SEQ ID NO: 3477; WAN0249KJ; Start 172; Stop 196
tgaggtatatgctactgttatagaa

SEQ ID NO: 356583 - DNA, 25 bp, Artificial
  probe
  misc_feature (1)..(25): SEQ ID NO: 3477; WAN0249KJ; Start 171; Stop 195
ttgaggtatatgctactgttataga

SEQ ID NO: 356584 - DNA, 25 bp, Artificial
  probe
  misc_feature (1)..(25): SEQ ID NO: 3477; WAN0249KJ; Start 161; Stop 185
gctaaacggcttgaggtatatgcta

SEQ ID NO: 356585 - DNA, 25 bp, Artificial
  probe
  misc_feature (1)..(25): SEQ ID NO: 3477; WAN0249KJ; Start 170; Stop 194
cttgaggtatatgctactgttatag

SEQ ID NO: 356586 - DNA, 25 bp, Artificial
  probe
  misc_feature (1)..(25): SEQ ID NO: 3477; WAN0249KJ; Start 164; Stop 188
aaacggcttgaggtatatgctactg

SEQ ID NO: 356587 - DNA, 25 bp, Artificial
  probe
  misc_feature (1)..(25): SEQ ID NO: 3477; WAN0249KJ; Start 32; Stop 56
gtgtccactcattaagcaatataaa

SEQ ID NO: 356588 - DNA, 25 bp, Artificial
  probe
  misc_feature (1)..(25): SEQ ID NO: 3478; WAN024AAF; Start 169; Stop 193
ttgacagctaacgataagataactt

SEQ ID NO: 356589 - DNA, 25 bp, Artificial
  probe
  misc_feature (1)..(25): SEQ ID NO: 3478; WAN024AAF; Start 172; Stop 196
acagctaacgataagataacttagt

SEQ ID NO: 356590 - DNA, 25 bp, Artificial
  probe
  misc_feature (1)..(25): SEQ ID NO: 3478; WAN024AAF; Start 170; Stop 194
tgacagctaacgataagataactta

SEQ ID NO: 356591 - DNA, 25 bp, Artificial
  probe
  misc_feature (1)..(25): SEQ ID NO: 3478; WAN024AAF; Start 168; Stop 192
tttgacagctaacgataagataact

SEQ ID NO: 356592 - DNA, 25 bp, Artificial
  probe
  misc_feature (1)..(25): SEQ ID NO: 3478; WAN024AAF; Start 171; Stop 195
gacagctaacgataagataacttag

SEQ ID NO: 356593 - DNA, 25 bp, Artificial
  probe
  misc_feature (1)..(25): SEQ ID NO: 3478; WAN024AAF; Start 134; Stop 158
aaatcatatcgccagcctatcaaaa

SEQ ID NO: 356594 - DNA, 25 bp, Artificial
  probe
  misc_feature (1)..(25): SEQ ID NO: 3478; WAN024AAF; Start 133; Stop 157
aaaatcatatcgccagcctatcaaa

SEQ ID NO: 356595 - DNA, 25 bp, Artificial
  probe
  misc_feature (1)..(25): SEQ ID NO: 3478; WAN024AAF; Start 9; Stop 33
tctttcaacattatacttgtctgac

SEQ ID NO: 356596 - DNA, 25 bp, Artificial
  probe
  misc_feature (1)..(25): SEQ ID NO: 3478; WAN024AAF; Start 4; Stop 28
accattctttcaacattatacttgt

SEQ ID NO: 356597 - DNA, 25 bp, Artificial
  probe
  misc_feature (1)..(25): SEQ ID NO: 3478; WAN024AAF; Start 135; Stop 159
aatcatatcgccagcctatcaaaac

SEQ ID NO: 356598 - DNA, 25 bp, Artificial
  probe
  misc_feature (1)..(25): SEQ ID NO: 3478; WAN024AAF; Start 10; Stop 34
ctttcaacattatacttgtctgaca

SEQ ID NO: 356599 - DNA, 25 bp, Artificial
  probe
  misc_feature (1)..(25): SEQ ID NO: 3478; WAN024AAF; Start 5; Stop 29
ccattctttcaacattatacttgtc

SEQ ID NO: 356600 - DNA, 25 bp, Artificial
  probe
  misc_feature (1)..(25): SEQ ID NO: 3478; WAN024AAF; Start 8; Stop 32
ttctttcaacattatacttgtctga

SEQ ID NO: 356601 - DNA, 25 bp, Artificial
  probe
  misc_feature (1)..(25): SEQ ID NO: 3478; WAN024AAF; Start 139; Stop 163
atatcgccagcctatcaaaacctac

SEQ ID NO: 356602 - DNA, 25 bp, Artificial
  probe
  misc_feature (1)..(25): SEQ ID NO: 3478; WAN024AAF; Start 138; Stop 162
catatcgccagcctatcaaaaccta

SEQ ID NO: 356603 - DNA, 25 bp, Artificial
  probe
  misc_feature (1)..(25): SEQ ID NO: 3478; WAN024AAF; Start 161; Stop 185
taccagttttgacagctaacgataa

SEQ ID NO: 356604 - DNA, 25 bp, Artificial
  probe
  misc_feature (1)..(25): SEQ ID NO: 3478; WAN024AAF; Start 164; Stop 188
cagttttgacagctaacgataagat

SEQ ID NO: 356605 - DNA, 25 bp, Artificial
  probe
  misc_feature (1)..(25): SEQ ID NO: 3478; WAN024AAF; Start 160; Stop 184
ctaccagttttgacagctaacgata

SEQ ID NO: 356606 - DNA, 25 bp, Artificial
  probe
  misc_feature (1)..(25): SEQ ID NO: 3478; WAN024AAF; Start 163; Stop 187
ccagttttgacagctaacgataaga

SEQ ID NO: 356607 - DNA, 25 bp, Artificial
  probe
  misc_feature (1)..(25): SEQ ID NO: 3478; WAN024AAF; Start 162; Stop 186
accagttttgacagctaacgataag

SEQ ID NO: 356608 - DNA, 25 bp, Artificial
  probe
  misc_feature (1)..(25): SEQ ID NO: 3478; WAN024AAF; Start 136; Stop 160
atcatatcgccagcctatcaaaacc

SEQ ID NO: 356609 - DNA, 25 bp, Artificial
  probe
  misc_feature (1)..(25): SEQ ID NO: 3478; WAN024AAF; Start 13; Stop 37
tcaacattatacttgtctgacaatg

SEQ ID NO: 356610 - DNA, 25 bp, Artificial
  probe
  misc_feature (1)..(25): SEQ ID NO: 3478; WAN024AAF; Start 165; Stop 189
agttttgacagctaacgataagata

SEQ ID NO: 356611 - DNA, 25 bp, Artificial
  probe
  misc_feature (1)..(25): SEQ ID NO: 3478; WAN024AAF; Start 7; Stop 31
attctttcaacattatacttgtctg

SEQ ID NO: 356612 - DNA, 25 bp, Artificial
  probe
  misc_feature (1)..(25): SEQ ID NO: 3478; WAN024AAF; Start 6; Stop 30
cattctttcaacattatacttgtct

SEQ ID NO: 356613 - DNA, 25 bp, Artificial
  probe
  misc_feature (1)..(25): SEQ ID NO: 3478; WAN024AAF; Start 3; Stop 27
taccattctttcaacattatacttg

SEQ ID NO: 356614 - DNA, 25 bp, Artificial
  probe
  misc_feature (1)..(25): SEQ ID NO: 3478; WAN024AAF; Start 167; Stop 191
ttttgacagctaacgataagataac

SEQ ID NO: 356615 - DNA, 25 bp, Artificial
  probe
  misc_feature (1)..(25): SEQ ID NO: 3478; WAN024AAF; Start 1; Stop 25
cttaccattctttcaacattatact

SEQ ID NO: 356616 - DNA, 25 bp, Artificial
  probe
  misc_feature (1)..(25): SEQ ID NO: 3478; WAN024AAF; Start 166; Stop 190
gttttgacagctaacgataagataa

SEQ ID NO: 356617 - DNA, 25 bp, Artificial
  probe
  misc_feature (1)..(25): SEQ ID NO: 3478; WAN024AAF; Start 12; Stop 36
ttcaacattatacttgtctgacaat

SEQ ID NO: 356618 - DNA, 25 bp, Artificial
  probe
  misc_feature (1)..(25): SEQ ID NO: 3478; WAN024AAF; Start 137; Stop 161
tcatatcgccagcctatcaaaacct

SEQ ID NO: 356619 - DNA, 25 bp, Artificial
  probe
  misc_feature (1)..(25): SEQ ID NO: 3478; WAN024AAF; Start 159; Stop 183
cctaccagttttgacagctaacgat

SEQ ID NO: 356620 - DNA, 25 bp, Artificial
  probe
  misc_feature (1)..(25): SEQ ID NO: 3478; WAN024AAF; Start 156; Stop 180
aaacctaccagttttgacagctaac

SEQ ID NO: 356621 - DNA, 25 bp, Artificial
  probe
  misc_feature (1)..(25): SEQ ID NO: 3479; WAN024ANV; Start 1; Stop 25
cttactctcttcattcgcttcttag

SEQ ID NO: 356622 - DNA, 25 bp, Artificial
  probe
  misc_feature (1)..(25): SEQ ID NO: 3479; WAN024ANV; Start 3; Stop 27
tactctcttcattcgcttcttagac

SEQ ID NO: 356623 - DNA, 25 bp, Artificial
  probe
  misc_feature (1)..(25): SEQ ID NO: 3479; WAN024ANV; Start 7; Stop 31
ctcttcattcgcttcttagacttct

SEQ ID NO: 356624 - DNA, 25 bp, Artificial
  probe
  misc_feature (1)..(25): SEQ ID NO: 3479; WAN024ANV; Start 6; Stop 30
tctcttcattcgcttcttagacttc

SEQ ID NO: 356625 - DNA, 25 bp, Artificial
  probe
  misc_feature (1)..(25): SEQ ID NO: 3479; WAN024ANV; Start 5; Stop 29
ctctcttcattcgcttcttagactt

SEQ ID NO: 356626 - DNA, 25 bp, Artificial
  probe
  misc_feature (1)..(25): SEQ ID NO: 3479; WAN024ANV; Start 2; Stop 26
ttactctcttcattcgcttcttaga

SEQ ID NO: 356627 - DNA, 25 bp, Artificial
  probe
  misc_feature (1)..(25): SEQ ID NO: 3479; WAN024ANV; Start 8; Stop 32
tcttcattcgcttcttagacttcta

SEQ ID NO: 356628 - DNA, 25 bp, Artificial
  probe
  misc_feature (1)..(25): SEQ ID NO: 3479; WAN024ANV; Start 4; Stop 28
actctcttcattcgcttcttagact

SEQ ID NO: 356629 - DNA, 25 bp, Artificial
  probe
  misc_feature (1)..(25): SEQ ID NO: 3479; WAN024ANV; Start 9; Stop 33
cttcattcgcttcttagacttctat

SEQ ID NO: 356630 - DNA, 25 bp, Artificial
  probe
  misc_feature (1)..(25): SEQ ID NO: 3479; WAN024ANV; Start 10; Stop 34
ttcattcgcttcttagacttctatt

SEQ ID NO: 356631 - DNA, 25 bp, Artificial
  probe
  misc_feature (1)..(25): SEQ ID NO: 3479; WAN024ANV; Start 11; Stop 35
tcattcgcttcttagacttctattt

SEQ ID NO: 356632 - DNA, 25 bp, Artificial
  probe
  misc_feature (1)..(25): SEQ ID NO: 3479; WAN024ANV; Start 35; Stop 59
ttatcataaatcaagcccttcttgc

SEQ ID NO: 356633 - DNA, 25 bp, Artificial
  probe
  misc_feature (1)..(25): SEQ ID NO: 3479; WAN024ANV; Start 12; Stop 36
cattcgcttcttagacttctatttt

SEQ ID NO: 356634 - DNA, 25 bp, Artificial
  probe
  misc_feature (1)..(25): SEQ ID NO: 3479; WAN024ANV; Start 36; Stop 60
tatcataaatcaagcccttcttgca

SEQ ID NO: 356635 - DNA, 25 bp, Artificial
  probe
  misc_feature (1)..(25): SEQ ID NO: 3479; WAN024ANV; Start 16; Stop 40
cgcttcttagacttctattttatca

SEQ ID NO: 356636 - DNA, 25 bp, Artificial
  probe
  misc_feature (1)..(25): SEQ ID NO: 3479; WAN024ANV; Start 34; Stop 58
tttatcataaatcaagcccttcttg

SEQ ID NO: 356637 - DNA, 25 bp, Artificial
  probe
  misc_feature (1)..(25): SEQ ID NO: 3479; WAN024ANV; Start 37; Stop 61
atcataaatcaagcccttcttgcag

SEQ ID NO: 356638 - DNA, 25 bp, Artificial
  probe
  misc_feature (1)..(25): SEQ ID NO: 3479; WAN024ANV; Start 15; Stop 39
tcgcttcttagacttctattttatc

SEQ ID NO: 356639 - DNA, 25 bp, Artificial
  probe
  misc_feature (1)..(25): SEQ ID NO: 3479; WAN024ANV; Start 33; Stop 57
ttttatcataaatcaagcccttctt

SEQ ID NO: 356640 - DNA, 25 bp, Artificial
  probe
  misc_feature (1)..(25): SEQ ID NO: 3479; WAN024ANV; Start 32; Stop 56
attttatcataaatcaagcccttct

SEQ ID NO: 356641 - DNA, 25 bp, Artificial
  probe
  misc_feature (1)..(25): SEQ ID NO: 3479; WAN024ANV; Start 40; Stop 64
ataaatcaagcccttcttgcagtct

SEQ ID NO: 356642 - DNA, 25 bp, Artificial
  probe
  misc_feature (1)..(25): SEQ ID NO: 3479; WAN024ANV; Start 39; Stop 63
cataaatcaagcccttcttgcagtc

SEQ ID NO: 356643 - DNA, 25 bp, Artificial
  probe
  misc_feature (1)..(25): SEQ ID NO: 3479; WAN024ANV; Start 14; Stop 38
ttcgcttcttagacttctattttat

SEQ ID NO: 356644 - DNA, 25 bp, Artificial
  probe
  misc_feature (1)..(25): SEQ ID NO: 3479; WAN024ANV; Start 13; Stop 37
attcgcttcttagacttctatttta

SEQ ID NO: 356645 - DNA, 25 bp, Artificial
  probe
  misc_feature (1)..(25): SEQ ID NO: 3479; WAN024ANV; Start 38; Stop 62
tcataaatcaagcccttcttgcagt

SEQ ID NO: 356646 - DNA, 25 bp, Artificial
  probe
  misc_feature (1)..(25): SEQ ID NO: 3479; WAN024ANV; Start 41; Stop 65
taaatcaagcccttcttgcagtctc

SEQ ID NO: 356647 - DNA, 25 bp, Artificial
  probe
  misc_feature (1)..(25): SEQ ID NO: 3479; WAN024ANV; Start 29; Stop 53
tctattttatcataaatcaagccct

SEQ ID NO: 356648 - DNA, 25 bp, Artificial
  probe
  misc_feature (1)..(25): SEQ ID NO: 3479; WAN024ANV; Start 31; Stop 55
tattttatcataaatcaagcccttc

SEQ ID NO: 356649 - DNA, 25 bp, Artificial
  probe
  misc_feature (1)..(25): SEQ ID NO: 3479; WAN024ANV; Start 30; Stop 54
ctattttatcataaatcaagccctt

SEQ ID NO: 356650 - DNA, 25 bp, Artificial
  probe
  misc_feature (1)..(25): SEQ ID NO: 3479; WAN024ANV; Start 28; Stop 52
ttctattttatcataaatcaagccc

SEQ ID NO: 356651 - DNA, 25 bp, Artificial
  probe
  misc_feature (1)..(25): SEQ ID NO: 3479; WAN024ANV; Start 42; Stop 66
aaatcaagcccttcttgcagtctct

SEQ ID NO: 356652 - DNA, 25 bp, Artificial
  probe
  misc_feature (1)..(25): SEQ ID NO: 3480; WAN024AIU; Start 21; Stop 45
ttaaagatggttgattgtgggtgta

SEQ ID NO: 356653 - DNA, 25 bp, Artificial
  probe
  misc_feature (1)..(25): SEQ ID NO: 3480; WAN024AIU; Start 22; Stop 46
taaagatggttgattgtgggtgtag

SEQ ID NO: 356654 - DNA, 25 bp, Artificial
  probe
  misc_feature (1)..(25): SEQ ID NO: 3480; WAN024AIU; Start 11; Stop 35
agagtaagccttaaagatggttgat

SEQ ID NO: 356655 - DNA, 25 bp, Artificial
  probe
  misc_feature (1)..(25): SEQ ID NO: 3480; WAN024AIU; Start 15; Stop 39
taagccttaaagatggttgattgtg

SEQ ID NO: 356656 - DNA, 25 bp, Artificial
  probe
  misc_feature (1)..(25): SEQ ID NO: 3480; WAN024AIU; Start 14; Stop 38
gtaagccttaaagatggttgattgt

SEQ ID NO: 356657 - DNA, 25 bp, Artificial
  probe
  misc_feature (1)..(25): SEQ ID NO: 3480; WAN024AIU; Start 10; Stop 34
cagagtaagccttaaagatggttga

SEQ ID NO: 356658 - DNA, 25 bp, Artificial
  probe
  misc_feature (1)..(25): SEQ ID NO: 3480; WAN024AIU; Start 9; Stop 33
tcagagtaagccttaaagatggttg

SEQ ID NO: 356659 - DNA, 25 bp, Artificial
  probe
  misc_feature (1)..(25): SEQ ID NO: 3480; WAN024AIU; Start 8; Stop 32
gtcagagtaagccttaaagatggtt

SEQ ID NO: 356660 - DNA, 25 bp, Artificial
  probe
  misc_feature (1)..(25): SEQ ID NO: 3480; WAN024AIU; Start 6; Stop 30
ttgtcagagtaagccttaaagatgg

SEQ ID NO: 356661 - DNA, 25 bp, Artificial
  probe
  misc_feature (1)..(25): SEQ ID NO: 3480; WAN024AIU; Start 13; Stop 37
agtaagccttaaagatggttgattg

SEQ ID NO: 356662 - DNA, 25 bp, Artificial
  probe
  misc_feature (1)..(25): SEQ ID NO: 3480; WAN024AIU; Start 12; Stop 36
gagtaagccttaaagatggttgatt

SEQ ID NO: 356663 - DNA, 25 bp, Artificial
  probe
  misc_feature (1)..(25): SEQ ID NO: 3480; WAN024AIU; Start 5; Stop 29
cttgtcagagtaagccttaaagatg

SEQ ID NO: 356664 - DNA, 25 bp, Artificial
  probe
  misc_feature (1)..(25): SEQ ID NO: 3480; WAN024AIU; Start 20; Stop 44
cttaaagatggttgattgtgggtgt

SEQ ID NO: 356665 - DNA, 25 bp, Artificial
  probe
  misc_feature (1)..(25): SEQ ID NO: 3480; WAN024AIU; Start 7; Stop 31
tgtcagagtaagccttaaagatggt

SEQ ID NO: 356666 - DNA, 25 bp, Artificial
  probe
  misc_feature (1)..(25): SEQ ID NO: 3480; WAN024AIU; Start 4; Stop 28
acttgtcagagtaagccttaaagat

SEQ ID NO: 356667 - DNA, 25 bp, Artificial
  probe
  misc_feature (1)..(25): SEQ ID NO: 3480; WAN024AIU; Start 16; Stop 40
aagccttaaagatggttgattgtgg

SEQ ID NO: 356668 - DNA, 25 bp, Artificial
  probe
  misc_feature (1)..(25): SEQ ID NO: 3480; WAN024AIU; Start 19; Stop 43
ccttaaagatggttgattgtgggtg

SEQ ID NO: 356669 - DNA, 25 bp, Artificial
  probe
  misc_feature (1)..(25): SEQ ID NO: 3480; WAN024AIU; Start 3; Stop 27
tacttgtcagagtaagccttaaaga

SEQ ID NO: 356670 - DNA, 25 bp, Artificial
  probe
  misc_feature (1)..(25): SEQ ID NO: 3480; WAN024AIU; Start 17; Stop 41
agccttaaagatggttgattgtggg

SEQ ID NO: 356671 - DNA, 25 bp, Artificial
  probe
  misc_feature (1)..(25): SEQ ID NO: 3480; WAN024AIU; Start 23; Stop 47
aaagatggttgattgtgggtgtagc

SEQ ID NO: 356672 - DNA, 25 bp, Artificial
  probe
  misc_feature (1)..(25): SEQ ID NO: 3480; WAN024AIU; Start 18; Stop 42
gccttaaagatggttgattgtgggt

SEQ ID NO: 356673 - DNA, 25 bp, Artificial
  probe
  misc_feature (1)..(25): SEQ ID NO: 3480; WAN024AIU; Start 29; Stop 53
ggttgattgtgggtgtagcatgaaa

SEQ ID NO: 356674 - DNA, 25 bp, Artificial
  probe
  misc_feature (1)..(25): SEQ ID NO: 3480; WAN024AIU; Start 25; Stop 49
agatggttgattgtgggtgtagcat

SEQ ID NO: 356675 - DNA, 25 bp, Artificial
  probe
  misc_feature (1)..(25): SEQ ID NO: 3480; WAN024AIU; Start 30; Stop 54
gttgattgtgggtgtagcatgaaaa

SEQ ID NO: 356676 - DNA, 25 bp, Artificial
  probe
  misc_feature (1)..(25): SEQ ID NO: 3480; WAN024AIU; Start 24; Stop 48
aagatggttgattgtgggtgtagca

SEQ ID NO: 356677 - DNA, 25 bp, Artificial
  probe
  misc_feature (1)..(25): SEQ ID NO: 3480; WAN024AIU; Start 26; Stop 50
gatggttgattgtgggtgtagcatg

SEQ ID NO: 356678 - DNA, 25 bp, Artificial
  probe
  misc_feature (1)..(25): SEQ ID NO: 3480; WAN024AIU; Start 27; Stop 51
atggttgattgtgggtgtagcatga

SEQ ID NO: 356679 - DNA, 25 bp, Artificial
  probe
  misc_feature (1)..(25): SEQ ID NO: 3480; WAN024AIU; Start 2; Stop 26
ttacttgtcagagtaagccttaaag

SEQ ID NO: 356680 - DNA, 25 bp, Artificial
  probe
  misc_feature (1)..(25): SEQ ID NO: 3480; WAN024AIU; Start 28; Stop 52
tggttgattgtgggtgtagcatgaa

SEQ ID NO: 356681 - DNA, 25 bp, Artificial
  probe
  misc_feature (1)..(25): SEQ ID NO: 3481; WAN0249YG; Start 1; Stop 25
cttagcgtgatttcttgtttctgag

SEQ ID NO: 356682 - DNA, 25 bp, Artificial
  probe
  misc_feature (1)..(25): SEQ ID NO: 3481; WAN0249YG; Start 85; Stop 109
cggaataaactaaaggagacaatca

SEQ ID NO: 356683 - DNA, 25 bp, Artificial
  probe
  misc_feature (1)..(25): SEQ ID NO: 3481; WAN0249YG; Start 84; Stop 108
tcggaataaactaaaggagacaatc

SEQ ID NO: 356684 - DNA, 25 bp, Artificial
  probe
  misc_feature (1)..(25): SEQ ID NO: 3481; WAN0249YG; Start 72; Stop 96
cggtaacacatatcggaataaacta

SEQ ID NO: 356685 - DNA, 25 bp, Artificial
  probe
  misc_feature (1)..(25): SEQ ID NO: 3481; WAN0249YG; Start 31; Stop 55
tgtttgactttccttagtattcggt

SEQ ID NO: 356686 - DNA, 25 bp, Artificial
  probe
  misc_feature (1)..(25): SEQ ID NO: 3481; WAN0249YG; Start 30; Stop 54
ttgtttgactttccttagtattcgg

SEQ ID NO: 356687 - DNA, 25 bp, Artificial
  probe
  misc_feature (1)..(25): SEQ ID NO: 3481; WAN0249YG; Start 83; Stop 107
atcggaataaactaaaggagacaat

SEQ ID NO: 356688 - DNA, 25 bp, Artificial
  probe
  misc_feature (1)..(25): SEQ ID NO: 3481; WAN0249YG; Start 32; Stop 56
gtttgactttccttagtattcggta

SEQ ID NO: 356689 - DNA, 25 bp, Artificial
  probe
  misc_feature (1)..(25): SEQ ID NO: 3481; WAN0249YG; Start 77; Stop 101
acacatatcggaataaactaaagga

SEQ ID NO: 356690 - DNA, 25 bp, Artificial
  probe
  misc_feature (1)..(25): SEQ ID NO: 3481; WAN0249YG; Start 82; Stop 106
tatcggaataaactaaaggagacaa

SEQ ID NO: 356691 - DNA, 25 bp, Artificial
  probe
  misc_feature (1)..(25): SEQ ID NO: 3481; WAN0249YG; Start 78; Stop 102
cacatatcggaataaactaaaggag

SEQ ID NO: 356692 - DNA, 25 bp, Artificial
  probe
  misc_feature (1)..(25): SEQ ID NO: 3481; WAN0249YG; Start 81; Stop 105
atatcggaataaactaaaggagaca

SEQ ID NO: 356693 - DNA, 25 bp, Artificial
  probe
  misc_feature (1)..(25): SEQ ID NO: 3481; WAN0249YG; Start 79; Stop 103
acatatcggaataaactaaaggaga

SEQ ID NO: 356694 - DNA, 25 bp, Artificial
  probe
  misc_feature (1)..(25): SEQ ID NO: 3481; WAN0249YG; Start 33; Stop 57
tttgactttccttagtattcggtat

SEQ ID NO: 356695 - DNA, 25 bp, Artificial
  probe
  misc_feature (1)..(25): SEQ ID NO: 3481; WAN0249YG; Start 76; Stop 100
aacacatatcggaataaactaaagg

SEQ ID NO: 356696 - DNA, 25 bp, Artificial
  probe
  misc_feature (1)..(25): SEQ ID NO: 3481; WAN0249YG; Start 29; Stop 53
attgtttgactttccttagtattcg

SEQ ID NO: 356697 - DNA, 25 bp, Artificial
  probe
  misc_feature (1)..(25): SEQ ID NO: 3481; WAN0249YG; Start 80; Stop 104
catatcggaataaactaaaggagac

SEQ ID NO: 356698 - DNA, 25 bp, Artificial
  probe
  misc_feature (1)..(25): SEQ ID NO: 3481; WAN0249YG; Start 86; Stop 110
ggaataaactaaaggagacaatcat

SEQ ID NO: 356699 - DNA, 25 bp, Artificial
  probe
  misc_feature (1)..(25): SEQ ID NO: 3481; WAN0249YG; Start 73; Stop 97
ggtaacacatatcggaataaactaa

SEQ ID NO: 356700 - DNA, 25 bp, Artificial
  probe
  misc_feature (1)..(25): SEQ ID NO: 3481; WAN0249YG; Start 35; Stop 59
tgactttccttagtattcggtataa

SEQ ID NO: 356701 - DNA, 25 bp, Artificial
  probe
  misc_feature (1)..(25): SEQ ID NO: 3481; WAN0249YG; Start 34; Stop 58
ttgactttccttagtattcggtata

SEQ ID NO: 356702 - DNA, 25 bp, Artificial
  probe
  misc_feature (1)..(25): SEQ ID NO: 3481; WAN0249YG; Start 27; Stop 51
acattgtttgactttccttagtatt

SEQ ID NO: 356703 - DNA, 25 bp, Artificial
  probe
  misc_feature (1)..(25): SEQ ID NO: 3481; WAN0249YG; Start 28; Stop 52
cattgtttgactttccttagtattc

SEQ ID NO: 356704 - DNA, 25 bp, Artificial
  probe
  misc_feature (1)..(25): SEQ ID NO: 3481; WAN0249YG; Start 37; Stop 61
actttccttagtattcggtataaac

SEQ ID NO: 356705 - DNA, 25 bp, Artificial
  probe
  misc_feature (1)..(25): SEQ ID NO: 3481; WAN0249YG; Start 38; Stop 62
ctttccttagtattcggtataaact

SEQ ID NO: 356706 - DNA, 25 bp, Artificial
  probe
  misc_feature (1)..(25): SEQ ID NO: 3481; WAN0249YG; Start 36; Stop 60
gactttccttagtattcggtataaa

SEQ ID NO: 356707 - DNA, 25 bp, Artificial
  probe
  misc_feature (1)..(25): SEQ ID NO: 3481; WAN0249YG; Start 74; Stop 98
gtaacacatatcggaataaactaaa

SEQ ID NO: 356708 - DNA, 25 bp, Artificial
  probe
  misc_feature (1)..(25): SEQ ID NO: 3481; WAN0249YG; Start 75; Stop 99
taacacatatcggaataaactaaag

SEQ ID NO: 356709 - DNA, 25 bp, Artificial
  probe
  misc_feature (1)..(25): SEQ ID NO: 3481; WAN0249YG; Start 71; Stop 95
ccggtaacacatatcggaataaact

SEQ ID NO: 356710 - DNA, 25 bp, Artificial
  probe
  misc_feature (1)..(25): SEQ ID NO: 3481; WAN0249YG; Start 39; Stop 63
tttccttagtattcggtataaacta

SEQ ID NO: 356711 - DNA, 25 bp, Artificial
  probe
  misc_feature (1)..(25): SEQ ID NO: 3482; WAN0249UF; Start 131; Stop 155
aattgataaccagcctgtcttcatc

SEQ ID NO: 356712 - DNA, 25 bp, Artificial
  probe
  misc_feature (1)..(25): SEQ ID NO: 3482; WAN0249UF; Start 133; Stop 157
ttgataaccagcctgtcttcatcta

SEQ ID NO: 356713 - DNA, 25 bp, Artificial
  probe
  misc_feature (1)..(25): SEQ ID NO: 3482; WAN0249UF; Start 136; Stop 160
ataaccagcctgtcttcatctagtc

SEQ ID NO: 356714 - DNA, 25 bp, Artificial
  probe
  misc_feature (1)..(25): SEQ ID NO: 3482; WAN0249UF; Start 135; Stop 159
gataaccagcctgtcttcatctagt

SEQ ID NO: 356715 - DNA, 25 bp, Artificial
  probe
  misc_feature (1)..(25): SEQ ID NO: 3482; WAN0249UF; Start 132; Stop 156
attgataaccagcctgtcttcatct

SEQ ID NO: 356716 - DNA, 25 bp, Artificial
  probe
  misc_feature (1)..(25): SEQ ID NO: 3482; WAN0249UF; Start 134; Stop 158
tgataaccagcctgtcttcatctag

SEQ ID NO: 356717 - DNA, 25 bp, Artificial
  probe
  misc_feature (1)..(25): SEQ ID NO: 3482; WAN0249UF; Start 193; Stop 217
cctattctccctaactgtgctatac

SEQ ID NO: 356718 - DNA, 25 bp, Artificial
  probe
  misc_feature (1)..(25): SEQ ID NO: 3482; WAN0249UF; Start 192; Stop 216
acctattctccctaactgtgctata

SEQ ID NO: 356719 - DNA, 25 bp, Artificial
  probe
  misc_feature (1)..(25): SEQ ID NO: 3482; WAN0249UF; Start 191; Stop 215
tacctattctccctaactgtgctat

SEQ ID NO: 356720 - DNA, 25 bp, Artificial
  probe
  misc_feature (1)..(25): SEQ ID NO: 3482; WAN0249UF; Start 190; Stop 214
ttacctattctccctaactgtgcta

SEQ ID NO: 356721 - DNA, 25 bp, Artificial
  probe
  misc_feature (1)..(25): SEQ ID NO: 3482; WAN0249UF; Start 186; Stop 210
atccttacctattctccctaactgt

SEQ ID NO: 356722 - DNA, 25 bp, Artificial
  probe
  misc_feature (1)..(25): SEQ ID NO: 3482; WAN0249UF; Start 187; Stop 211
tccttacctattctccctaactgtg

SEQ ID NO: 356723 - DNA, 25 bp, Artificial
  probe
  misc_feature (1)..(25): SEQ ID NO: 3482; WAN0249UF; Start 126; Stop 150
tgataaattgataaccagcctgtct

SEQ ID NO: 356724 - DNA, 25 bp, Artificial
  probe
  misc_feature (1)..(25): SEQ ID NO: 3482; WAN0249UF; Start 185; Stop 209
aatccttacctattctccctaactg

SEQ ID NO: 356725 - DNA, 25 bp, Artificial
  probe
  misc_feature (1)..(25): SEQ ID NO: 3482; WAN0249UF; Start 137; Stop 161
taaccagcctgtcttcatctagtca

SEQ ID NO: 356726 - DNA, 25 bp, Artificial
  probe
  misc_feature (1)..(25): SEQ ID NO: 3482; WAN0249UF; Start 194; Stop 218
ctattctccctaactgtgctatact

SEQ ID NO: 356727 - DNA, 25 bp, Artificial
  probe
  misc_feature (1)..(25): SEQ ID NO: 3482; WAN0249UF; Start 125; Stop 149
ttgataaattgataaccagcctgtc

SEQ ID NO: 356728 - DNA, 25 bp, Artificial
  probe
  misc_feature (1)..(25): SEQ ID NO: 3482; WAN0249UF; Start 145; Stop 169
ctgtcttcatctagtcatgctggtt

SEQ ID NO: 356729 - DNA, 25 bp, Artificial
  probe
  misc_feature (1)..(25): SEQ ID NO: 3482; WAN0249UF; Start 189; Stop 213
cttacctattctccctaactgtgct

SEQ ID NO: 356730 - DNA, 25 bp, Artificial
  probe
  misc_feature (1)..(25): SEQ ID NO: 3482; WAN0249UF; Start 128; Stop 152
ataaattgataaccagcctgtcttc

SEQ ID NO: 356731 - DNA, 25 bp, Artificial
  probe
  misc_feature (1)..(25): SEQ ID NO: 3482; WAN0249UF; Start 127; Stop 151
gataaattgataaccagcctgtctt

SEQ ID NO: 356732 - DNA, 25 bp, Artificial
  probe
  misc_feature (1)..(25): SEQ ID NO: 3482; WAN0249UF; Start 197; Stop 221
ttctccctaactgtgctatacttaa

SEQ ID NO: 356733 - DNA, 25 bp, Artificial
  probe
  misc_feature (1)..(25): SEQ ID NO: 3482; WAN0249UF; Start 196; Stop 220
attctccctaactgtgctatactta

SEQ ID NO: 356734 - DNA, 25 bp, Artificial
  probe
  misc_feature (1)..(25): SEQ ID NO: 3482; WAN0249UF; Start 195; Stop 219
tattctccctaactgtgctatactt

SEQ ID NO: 356735 - DNA, 25 bp, Artificial
  probe
  misc_feature (1)..(25): SEQ ID NO: 3482; WAN0249UF; Start 124; Stop 148
attgataaattgataaccagcctgt

SEQ ID NO: 356736 - DNA, 25 bp, Artificial
  probe
  misc_feature (1)..(25): SEQ ID NO: 3482; WAN0249UF; Start 198; Stop 222
tctccctaactgtgctatacttaat

SEQ ID NO: 356737 - DNA, 25 bp, Artificial
  probe
  misc_feature (1)..(25): SEQ ID NO: 3482; WAN0249UF; Start 129; Stop 153
taaattgataaccagcctgtcttca

SEQ ID NO: 356738 - DNA, 25 bp, Artificial
  probe
  misc_feature (1)..(25): SEQ ID NO: 3482; WAN0249UF; Start 184; Stop 208
aaatccttacctattctccctaact

SEQ ID NO: 356739 - DNA, 25 bp, Artificial
  probe
  misc_feature (1)..(25): SEQ ID NO: 3482; WAN0249UF; Start 130; Stop 154
aaattgataaccagcctgtcttcat

SEQ ID NO: 356740 - DNA, 25 bp, Artificial
  probe
  misc_feature (1)..(25): SEQ ID NO: 3482; WAN0249UF; Start 32; Stop 56
caactacggtagcactctaaacatc

SEQ ID NO: 356741 - DNA, 25 bp, Artificial
  probe
  misc_feature (1)..(25): SEQ ID NO: 3482; WAN0249UF; Start 138; Stop 162
aaccagcctgtcttcatctagtcat

SEQ ID NO: 356742 - DNA, 25 bp, Artificial
  probe
  misc_feature (1)..(25): SEQ ID NO: 3482; WAN0249UF; Start 33; Stop 57
aactacggtagcactctaaacatca

SEQ ID NO: 356743 - DNA, 25 bp, Artificial
  probe
  misc_feature (1)..(25): SEQ ID NO: 3482; WAN0249UF; Start 188; Stop 212
ccttacctattctccctaactgtgc

SEQ ID NO: 356744 - DNA, 25 bp, Artificial
  probe
  misc_feature (1)..(25): SEQ ID NO: 3483; WAN0249GH; Start 168; Stop 192
ccgctttctttaaataacgtactgt

SEQ ID NO: 356745 - DNA, 25 bp, Artificial
  probe
  misc_feature (1)..(25): SEQ ID NO: 3483; WAN0249GH; Start 167; Stop 191
tccgctttctttaaataacgtactg

SEQ ID NO: 356746 - DNA, 25 bp, Artificial
  probe
  misc_feature (1)..(25): SEQ ID NO: 3483; WAN0249GH; Start 166; Stop 190
atccgctttctttaaataacgtact

SEQ ID NO: 356747 - DNA, 25 bp, Artificial
  probe
  misc_feature (1)..(25): SEQ ID NO: 3483; WAN0249GH; Start 165; Stop 189
aatccgctttctttaaataacgtac

SEQ ID NO: 356748 - DNA, 25 bp, Artificial
  probe
  misc_feature (1)..(25): SEQ ID NO: 3483; WAN0249GH; Start 169; Stop 193
cgctttctttaaataacgtactgta

SEQ ID NO: 356749 - DNA, 25 bp, Artificial
  probe
  misc_feature (1)..(25): SEQ ID NO: 3483; WAN0249GH; Start 163; Stop 187
ttaatccgctttctttaaataacgt

SEQ ID NO: 356750 - DNA, 25 bp, Artificial
  probe
  misc_feature (1)..(25): SEQ ID NO: 3483; WAN0249GH; Start 164; Stop 188
taatccgctttctttaaataacgta

SEQ ID NO: 356751 - DNA, 25 bp, Artificial
  probe
  misc_feature (1)..(25): SEQ ID NO: 3483; WAN0249GH; Start 170; Stop 194
gctttctttaaataacgtactgtaa

SEQ ID NO: 356752 - DNA, 25 bp, Artificial
  probe
  misc_feature (1)..(25): SEQ ID NO: 3483; WAN0249GH; Start 162; Stop 186
tttaatccgctttctttaaataacg

SEQ ID NO: 356753 - DNA, 25 bp, Artificial
  probe
  misc_feature (1)..(25): SEQ ID NO: 3483; WAN0249GH; Start 200; Stop 224
acagaaattctttcaaataagtgta

SEQ ID NO: 356754 - DNA, 25 bp, Artificial
  probe
  misc_feature (1)..(25): SEQ ID NO: 3483; WAN0249GH; Start 199; Stop 223
tacagaaattctttcaaataagtgt

SEQ ID NO: 356755 - DNA, 25 bp, Artificial
  probe
  misc_feature (1)..(25): SEQ ID NO: 3483; WAN0249GH; Start 161; Stop 185
ttttaatccgctttctttaaataac

SEQ ID NO: 356756 - DNA, 25 bp, Artificial
  probe
  misc_feature (1)..(25): SEQ ID NO: 3484; WAN024GFQ; Start 223; Stop 247
aattgatgagtcaggacgaatatgt

SEQ ID NO: 356757 - DNA, 25 bp, Artificial
  probe
  misc_feature (1)..(25): SEQ ID NO: 3484; WAN024GFQ; Start 224; Stop 248
attgatgagtcaggacgaatatgtc

SEQ ID NO: 356758 - DNA, 25 bp, Artificial
  probe
  misc_feature (1)..(25): SEQ ID NO: 3484; WAN024GFQ; Start 225; Stop 249
ttgatgagtcaggacgaatatgtca

SEQ ID NO: 356759 - DNA, 25 bp, Artificial
  probe
  misc_feature (1)..(25): SEQ ID NO: 3484; WAN024GFQ; Start 226; Stop 250
tgatgagtcaggacgaatatgtcag

SEQ ID NO: 356760 - DNA, 25 bp, Artificial
  probe
  misc_feature (1)..(25): SEQ ID NO: 3484; WAN024GFQ; Start 138; Stop 162
aacgatattcaagggattaaactgc

SEQ ID NO: 356761 - DNA, 25 bp, Artificial
  probe
  misc_feature (1)..(25): SEQ ID NO: 3484; WAN024GFQ; Start 276; Stop 300
attcccaaacatatcgtcatccatc

SEQ ID NO: 356762 - DNA, 25 bp, Artificial
  probe
  misc_feature (1)..(25): SEQ ID NO: 3484; WAN024GFQ; Start 167; Stop 191
gctccatcttatgacaaatactcgt

SEQ ID NO: 356763 - DNA, 25 bp, Artificial
  probe
  misc_feature (1)..(25): SEQ ID NO: 3484; WAN024GFQ; Start 166; Stop 190
tgctccatcttatgacaaatactcg

SEQ ID NO: 356764 - DNA, 25 bp, Artificial
  probe
  misc_feature (1)..(25): SEQ ID NO: 3484; WAN024GFQ; Start 1; Stop 25
cttatgaattgtaggtggaaacggt

SEQ ID NO: 356765 - DNA, 25 bp, Artificial
  probe
  misc_feature (1)..(25): SEQ ID NO: 3484; WAN024GFQ; Start 2; Stop 26
ttatgaattgtaggtggaaacggtc

SEQ ID NO: 356766 - DNA, 25 bp, Artificial
  probe
  misc_feature (1)..(25): SEQ ID NO: 3484; WAN024GFQ; Start 227; Stop 251
gatgagtcaggacgaatatgtcagg

SEQ ID NO: 356767 - DNA, 25 bp, Artificial
  probe
  misc_feature (1)..(25): SEQ ID NO: 3484; WAN024GFQ; Start 165; Stop 189
ttgctccatcttatgacaaatactc

SEQ ID NO: 356768 - DNA, 25 bp, Artificial
  probe
  misc_feature (1)..(25): SEQ ID NO: 3484; WAN024GFQ; Start 341; Stop 365
tatgtggagcctcaataaatgggaa

SEQ ID NO: 356769 - DNA, 25 bp, Artificial
  probe
  misc_feature (1)..(25): SEQ ID NO: 3484; WAN024GFQ; Start 168; Stop 192
ctccatcttatgacaaatactcgta

SEQ ID NO: 356770 - DNA, 25 bp, Artificial
  probe
  misc_feature (1)..(25): SEQ ID NO: 3484; WAN024GFQ; Start 171; Stop 195
catcttatgacaaatactcgtatgc

SEQ ID NO: 356771 - DNA, 25 bp, Artificial
  probe
  misc_feature (1)..(25): SEQ ID NO: 3484; WAN024GFQ; Start 3; Stop 27
tatgaattgtaggtggaaacggtca

SEQ ID NO: 356772 - DNA, 25 bp, Artificial
  probe
  misc_feature (1)..(25): SEQ ID NO: 3484; WAN024GFQ; Start 222; Stop 246
caattgatgagtcaggacgaatatg

SEQ ID NO: 356773 - DNA, 25 bp, Artificial
  probe
  misc_feature (1)..(25): SEQ ID NO: 3484; WAN024GFQ; Start 221; Stop 245
acaattgatgagtcaggacgaatat

SEQ ID NO: 356774 - DNA, 25 bp, Artificial
  probe
  misc_feature (1)..(25): SEQ ID NO: 3484; WAN024GFQ; Start 219; Stop 243
ttacaattgatgagtcaggacgaat

SEQ ID NO: 356775 - DNA, 25 bp, Artificial
  probe
  misc_feature (1)..(25): SEQ ID NO: 3484; WAN024GFQ; Start 220; Stop 244
tacaattgatgagtcaggacgaata

SEQ ID NO: 356776 - DNA, 25 bp, Artificial
  probe
  misc_feature (1)..(25): SEQ ID NO: 3484; WAN024GFQ; Start 140; Stop 164
cgatattcaagggattaaactgcat

SEQ ID NO: 356777 - DNA, 25 bp, Artificial
  probe
  misc_feature (1)..(25): SEQ ID NO: 3484; WAN024GFQ; Start 139; Stop 163
acgatattcaagggattaaactgca

SEQ ID NO: 356778 - DNA, 25 bp, Artificial
  probe
  misc_feature (1)..(25): SEQ ID NO: 3484; WAN024GFQ; Start 170; Stop 194
ccatcttatgacaaatactcgtatg

SEQ ID NO: 356779 - DNA, 25 bp, Artificial
  probe
  misc_feature (1)..(25): SEQ ID NO: 3484; WAN024GFQ; Start 152; Stop 176
gattaaactgcatttgctccatctt

SEQ ID NO: 356780 - DNA, 25 bp, Artificial
  probe
  misc_feature (1)..(25): SEQ ID NO: 3484; WAN024GFQ; Start 154; Stop 178
ttaaactgcatttgctccatcttat

SEQ ID NO: 356781 - DNA, 25 bp, Artificial
  probe
  misc_feature (1)..(25): SEQ ID NO: 3484; WAN024GFQ; Start 153; Stop 177
attaaactgcatttgctccatctta

SEQ ID NO: 356782 - DNA, 25 bp, Artificial
  probe
  misc_feature (1)..(25): SEQ ID NO: 3484; WAN024GFQ; Start 155; Stop 179
taaactgcatttgctccatcttatg

SEQ ID NO: 356783 - DNA, 25 bp, Artificial
  probe
  misc_feature (1)..(25): SEQ ID NO: 3484; WAN024GFQ; Start 342; Stop 366
atgtggagcctcaataaatgggaag

SEQ ID NO: 356784 - DNA, 25 bp, Artificial
  probe
  misc_feature (1)..(25): SEQ ID NO: 3484; WAN024GFQ; Start 169; Stop 193
tccatcttatgacaaatactcgtat

SEQ ID NO: 356785 - DNA, 25 bp, Artificial
  probe
  misc_feature (1)..(25): SEQ ID NO: 3484; WAN024GFQ; Start 277; Stop 301
ttcccaaacatatcgtcatccatcg

SEQ ID NO: 356786 - DNA, 25 bp, Artificial
  probe
  misc_feature (1)..(25): SEQ ID NO: 3484; WAN024GFQ; Start 4; Stop 28
atgaattgtaggtggaaacggtcaa

SEQ ID NO: 356787 - DNA, 25 bp, Artificial
  probe
  misc_feature (1)..(25): SEQ ID NO: 3484; WAN024GFQ; Start 137; Stop 161
taacgatattcaagggattaaactg

SEQ ID NO: 356788 - DNA, 25 bp, Artificial
  probe
  misc_feature (1)..(25): SEQ ID NO: 3484; WAN024GFQ; Start 144; Stop 168
attcaagggattaaactgcatttgc

SEQ ID NO: 356789 - DNA, 25 bp, Artificial
  probe
  misc_feature (1)..(25): SEQ ID NO: 3485; WAN024D9U; Start 2; Stop 26
ttatgactgatgtacgtggtactag

SEQ ID NO: 356790 - DNA, 25 bp, Artificial
  probe
  misc_feature (1)..(25): SEQ ID NO: 3485; WAN024D9U; Start 1; Stop 25
cttatgactgatgtacgtggtacta

SEQ ID NO: 356791 - DNA, 25 bp, Artificial
  probe
  misc_feature (1)..(25): SEQ ID NO: 3485; WAN024D9U; Start 3; Stop 27
tatgactgatgtacgtggtactagc

SEQ ID NO: 356792 - DNA, 25 bp, Artificial
  probe
  misc_feature (1)..(25): SEQ ID NO: 3485; WAN024D9U; Start 77; Stop 101
tttgggaagaaggtaaaatggtcta

SEQ ID NO: 356793 - DNA, 25 bp, Artificial
  probe
  misc_feature (1)..(25): SEQ ID NO: 3485; WAN024D9U; Start 78; Stop 102
ttgggaagaaggtaaaatggtctac

SEQ ID NO: 356794 - DNA, 25 bp, Artificial
  probe
  misc_feature (1)..(25): SEQ ID NO: 3485; WAN024D9U; Start 34; Stop 58
gttatcaagtttggaaaagcaggtg

SEQ ID NO: 356795 - DNA, 25 bp, Artificial
  probe
  misc_feature (1)..(25): SEQ ID NO: 3485; WAN024D9U; Start 32; Stop 56
ttgttatcaagtttggaaaagcagg

SEQ ID NO: 356796 - DNA, 25 bp, Artificial
  probe
  misc_feature (1)..(25): SEQ ID NO: 3485; WAN024D9U; Start 76; Stop 100
ctttgggaagaaggtaaaatggtct

SEQ ID NO: 356797 - DNA, 25 bp, Artificial
  probe
  misc_feature (1)..(25): SEQ ID NO: 3485; WAN024D9U; Start 33; Stop 57
tgttatcaagtttggaaaagcaggt

SEQ ID NO: 356798 - DNA, 25 bp, Artificial
  probe
  misc_feature (1)..(25): SEQ ID NO: 3485; WAN024D9U; Start 26; Stop 50
gctgttttgttatcaagtttggaaa

SEQ ID NO: 356799 - DNA, 25 bp, Artificial
  probe
  misc_feature (1)..(25): SEQ ID NO: 3485; WAN024D9U; Start 31; Stop 55
tttgttatcaagtttggaaaagcag

SEQ ID NO: 356800 - DNA, 25 bp, Artificial
  probe
  misc_feature (1)..(25): SEQ ID NO: 3485; WAN024D9U; Start 36; Stop 60
tatcaagtttggaaaagcaggtgaa

SEQ ID NO: 356801 - DNA, 25 bp, Artificial
  probe
  misc_feature (1)..(25): SEQ ID NO: 3485; WAN024D9U; Start 35; Stop 59
ttatcaagtttggaaaagcaggtga

SEQ ID NO: 356802 - DNA, 25 bp, Artificial
  probe
  misc_feature (1)..(25): SEQ ID NO: 3485; WAN024D9U; Start 133; Stop 157
aaactcgctatgagcaaggtgtaat

SEQ ID NO: 356803 - DNA, 25 bp, Artificial
  probe
  misc_feature (1)..(25): SEQ ID NO: 3485; WAN024D9U; Start 40; Stop 64
aagtttggaaaagcaggtgaacaat

SEQ ID NO: 356804 - DNA, 25 bp, Artificial
  probe
  misc_feature (1)..(25): SEQ ID NO: 3485; WAN024D9U; Start 79; Stop 103
tgggaagaaggtaaaatggtctacg

SEQ ID NO: 356805 - DNA, 25 bp, Artificial
  probe
  misc_feature (1)..(25): SEQ ID NO: 3485; WAN024D9U; Start 41; Stop 65
agtttggaaaagcaggtgaacaatt

SEQ ID NO: 356806 - DNA, 25 bp, Artificial
  probe
  misc_feature (1)..(25): SEQ ID NO: 3485; WAN024D9U; Start 75; Stop 99
gctttgggaagaaggtaaaatggtc

SEQ ID NO: 356807 - DNA, 25 bp, Artificial
  probe
  misc_feature (1)..(25): SEQ ID NO: 3485; WAN024D9U; Start 4; Stop 28
atgactgatgtacgtggtactagct

SEQ ID NO: 356808 - DNA, 25 bp, Artificial
  probe
  misc_feature (1)..(25): SEQ ID NO: 3485; WAN024D9U; Start 30; Stop 54
ttttgttatcaagtttggaaaagca

SEQ ID NO: 356809 - DNA, 25 bp, Artificial
  probe
  misc_feature (1)..(25): SEQ ID NO: 3485; WAN024D9U; Start 16; Stop 40
cgtggtactagctgttttgttatca

SEQ ID NO: 356810 - DNA, 25 bp, Artificial
  probe
  misc_feature (1)..(25): SEQ ID NO: 3485; WAN024D9U; Start 25; Stop 49
agctgttttgttatcaagtttggaa

SEQ ID NO: 356811 - DNA, 25 bp, Artificial
  probe
  misc_feature (1)..(25): SEQ ID NO: 3485; WAN024D9U; Start 29; Stop 53
gttttgttatcaagtttggaaaagc

SEQ ID NO: 356812 - DNA, 25 bp, Artificial
  probe
  misc_feature (1)..(25): SEQ ID NO: 3485; WAN024D9U; Start 17; Stop 41
gtggtactagctgttttgttatcaa

SEQ ID NO: 356813 - DNA, 25 bp, Artificial
  probe
  misc_feature (1)..(25): SEQ ID NO: 3485; WAN024D9U; Start 14; Stop 38
tacgtggtactagctgttttgttat

SEQ ID NO: 356814 - DNA, 25 bp, Artificial
  probe
  misc_feature (1)..(25): SEQ ID NO: 3485; WAN024D9U; Start 37; Stop 61
atcaagtttggaaaagcaggtgaac

SEQ ID NO: 356815 - DNA, 25 bp, Artificial
  probe
  misc_feature (1)..(25): SEQ ID NO: 3485; WAN024D9U; Start 24; Stop 48
tagctgttttgttatcaagtttgga

SEQ ID NO: 356816 - DNA, 25 bp, Artificial
  probe
  misc_feature (1)..(25): SEQ ID NO: 3485; WAN024D9U; Start 18; Stop 42
tggtactagctgttttgttatcaag

SEQ ID NO: 356817 - DNA, 25 bp, Artificial
  probe
  misc_feature (1)..(25): SEQ ID NO: 3485; WAN024D9U; Start 23; Stop 47
ctagctgttttgttatcaagtttgg

SEQ ID NO: 356818 - DNA, 25 bp, Artificial
  probe
  misc_feature (1)..(25): SEQ ID NO: 3485; WAN024D9U; Start 19; Stop 43
ggtactagctgttttgttatcaagt

SEQ ID NO: 356819 - DNA, 25 bp, Artificial
  probe
  misc_feature (1)..(25): SEQ ID NO: 3485; WAN024D9U; Start 132; Stop 156
gaaactcgctatgagcaaggtgtaa

SEQ ID NO: 356820 - DNA, 25 bp, Artificial
  probe
  misc_feature (1)..(25): SEQ ID NO: 3485; WAN024D9U; Start 15; Stop 39
acgtggtactagctgttttgttatc

SEQ ID NO: 356821 - DNA, 25 bp, Artificial
  probe
  misc_feature (1)..(25): SEQ ID NO: 3485; WAN024D9U; Start 7; Stop 31
actgatgtacgtggtactagctgtt

SEQ ID NO: 356822 - DNA, 25 bp, Artificial
  probe
  misc_feature (1)..(25): SEQ ID NO: 3486; WAN0249I5; Start 119; Stop 143
ttgtgttattctattatggtgctgt

SEQ ID NO: 356823 - DNA, 25 bp, Artificial
  probe
  misc_feature (1)..(25): SEQ ID NO: 3486; WAN0249I5; Start 120; Stop 144
tgtgttattctattatggtgctgta

SEQ ID NO: 356824 - DNA, 25 bp, Artificial
  probe
  misc_feature (1)..(25): SEQ ID NO: 3486; WAN0249I5; Start 114; Stop 138
gggctttgtgttattctattatggt

SEQ ID NO: 356825 - DNA, 25 bp, Artificial
  probe
  misc_feature (1)..(25): SEQ ID NO: 3486; WAN0249I5; Start 121; Stop 145
gtgttattctattatggtgctgtaa

SEQ ID NO: 356826 - DNA, 25 bp, Artificial
  probe
  misc_feature (1)..(25): SEQ ID NO: 3486; WAN0249I5; Start 116; Stop 140
gctttgtgttattctattatggtgc

SEQ ID NO: 356827 - DNA, 25 bp, Artificial
  probe
  misc_feature (1)..(25): SEQ ID NO: 3486; WAN0249I5; Start 115; Stop 139
ggctttgtgttattctattatggtg

SEQ ID NO: 356828 - DNA, 25 bp, Artificial
  probe
  misc_feature (1)..(25): SEQ ID NO: 3486; WAN0249I5; Start 118; Stop 142
tttgtgttattctattatggtgctg

SEQ ID NO: 356829 - DNA, 25 bp, Artificial
  probe
  misc_feature (1)..(25): SEQ ID NO: 3486; WAN0249I5; Start 117; Stop 141
ctttgtgttattctattatggtgct

SEQ ID NO: 356830 - DNA, 25 bp, Artificial
  probe
  misc_feature (1)..(25): SEQ ID NO: 3486; WAN0249I5; Start 113; Stop 137
ggggctttgtgttattctattatgg

SEQ ID NO: 356831 - DNA, 25 bp, Artificial
  probe
  misc_feature (1)..(25): SEQ ID NO: 3486; WAN0249I5; Start 110; Stop 134
gcaggggctttgtgttattctatta

SEQ ID NO: 356832 - DNA, 25 bp, Artificial
  probe
  misc_feature (1)..(25): SEQ ID NO: 3486; WAN0249I5; Start 112; Stop 136
aggggctttgtgttattctattatg

SEQ ID NO: 356833 - DNA, 25 bp, Artificial
  probe
  misc_feature (1)..(25): SEQ ID NO: 3486; WAN0249I5; Start 111; Stop 135
caggggctttgtgttattctattat

SEQ ID NO: 356834 - DNA, 25 bp, Artificial
  probe
  misc_feature (1)..(25): SEQ ID NO: 3486; WAN0249I5; Start 122; Stop 146
tgttattctattatggtgctgtaaa

SEQ ID NO: 356835 - DNA, 25 bp, Artificial
  probe
  misc_feature (1)..(25): SEQ ID NO: 3486; WAN0249I5; Start 52; Stop 76
gtaggaaaacagtttcatcccaaaa

SEQ ID NO: 356836 - DNA, 25 bp, Artificial
  probe
  misc_feature (1)..(25): SEQ ID NO: 3486; WAN0249I5; Start 48; Stop 72
aaaagtaggaaaacagtttcatccc

SEQ ID NO: 356837 - DNA, 25 bp, Artificial
  probe
  misc_feature (1)..(25): SEQ ID NO: 3486; WAN0249I5; Start 51; Stop 75
agtaggaaaacagtttcatcccaaa

SEQ ID NO: 356838 - DNA, 25 bp, Artificial
  probe
  misc_feature (1)..(25): SEQ ID NO: 3486; WAN0249I5; Start 50; Stop 74
aagtaggaaaacagtttcatcccaa

SEQ ID NO: 356839 - DNA, 25 bp, Artificial
  probe
  misc_feature (1)..(25): SEQ ID NO: 3486; WAN0249I5; Start 49; Stop 73
aaagtaggaaaacagtttcatccca

SEQ ID NO: 356840 - DNA, 25 bp, Artificial
  probe
  misc_feature (1)..(25): SEQ ID NO: 3486; WAN0249I5; Start 123; Stop 147
gttattctattatggtgctgtaaat

SEQ ID NO: 356841 - DNA, 25 bp, Artificial
  probe
  misc_feature (1)..(25): SEQ ID NO: 3486; WAN0249I5; Start 109; Stop 133
cgcaggggctttgtgttattctatt

SEQ ID NO: 356842 - DNA, 25 bp, Artificial
  probe
  misc_feature (1)..(25): SEQ ID NO: 3486; WAN0249I5; Start 126; Stop 150
attctattatggtgctgtaaattac

SEQ ID NO: 356843 - DNA, 25 bp, Artificial
  probe
  misc_feature (1)..(25): SEQ ID NO: 3486; WAN0249I5; Start 240; Stop 264
tcttaaatagacgaaaaggagaaaa

SEQ ID NO: 356844 - DNA, 25 bp, Artificial
  probe
  misc_feature (1)..(25): SEQ ID NO: 3486; WAN0249I5; Start 127; Stop 151
ttctattatggtgctgtaaattaca

SEQ ID NO: 356845 - DNA, 25 bp, Artificial
  probe
  misc_feature (1)..(25): SEQ ID NO: 3486; WAN0249I5; Start 239; Stop 263
atcttaaatagacgaaaaggagaaa

SEQ ID NO: 356846 - DNA, 25 bp, Artificial
  probe
  misc_feature (1)..(25): SEQ ID NO: 3486; WAN0249I5; Start 108; Stop 132
tcgcaggggctttgtgttattctat

SEQ ID NO: 356847 - DNA, 25 bp, Artificial
  probe
  misc_feature (1)..(25): SEQ ID NO: 3486; WAN0249I5; Start 107; Stop 131
atcgcaggggctttgtgttattcta

SEQ ID NO: 356848 - DNA, 25 bp, Artificial
  probe
  misc_feature (1)..(25): SEQ ID NO: 3486; WAN0249I5; Start 10; Stop 34
agaagaaatatagaagaaaatccct

SEQ ID NO: 356849 - DNA, 25 bp, Artificial
  probe
  misc_feature (1)..(25): SEQ ID NO: 3486; WAN0249I5; Start 238; Stop 262
tatcttaaatagacgaaaaggagaa

SEQ ID NO: 356850 - DNA, 25 bp, Artificial
  probe
  misc_feature (1)..(25): SEQ ID NO: 3486; WAN0249I5; Start 237; Stop 261
ttatcttaaatagacgaaaaggaga

SEQ ID NO: 356851 - DNA, 25 bp, Artificial
  probe
  misc_feature (1)..(25): SEQ ID NO: 3486; WAN0249I5; Start 231; Stop 255
agcctattatcttaaatagacgaaa

SEQ ID NO: 356852 - DNA, 25 bp, Artificial
  probe
  misc_feature (1)..(25): SEQ ID NO: 3486; WAN0249I5; Start 106; Stop 130
aatcgcaggggctttgtgttattct

SEQ ID NO: 356853 - DNA, 25 bp, Artificial
  probe
  misc_feature (1)..(25): SEQ ID NO: 3486; WAN0249I5; Start 105; Stop 129
caatcgcaggggctttgtgttattc

SEQ ID NO: 356854 - DNA, 25 bp, Artificial
  probe
  misc_feature (1)..(25): SEQ ID NO: 3486; WAN0249I5; Start 229; Stop 253
ctagcctattatcttaaatagacga

SEQ ID NO: 356855 - DNA, 25 bp, Artificial
  probe
  misc_feature (1)..(25): SEQ ID NO: 3487; WAN024AMU; Start 53; Stop 77
gggttgaaataggtttattgttgat

SEQ ID NO: 356856 - DNA, 25 bp, Artificial
  probe
  misc_feature (1)..(25): SEQ ID NO: 3487; WAN024AMU; Start 64; Stop 88
ggtttattgttgatgagattgtaga

SEQ ID NO: 356857 - DNA, 25 bp, Artificial
  probe
  misc_feature (1)..(25): SEQ ID NO: 3487; WAN024AMU; Start 63; Stop 87
aggtttattgttgatgagattgtag

SEQ ID NO: 356858 - DNA, 25 bp, Artificial
  probe
  misc_feature (1)..(25): SEQ ID NO: 3487; WAN024AMU; Start 54; Stop 78
ggttgaaataggtttattgttgatg

SEQ ID NO: 356859 - DNA, 25 bp, Artificial
  probe
  misc_feature (1)..(25): SEQ ID NO: 3487; WAN024AMU; Start 71; Stop 95
tgttgatgagattgtagataattca

SEQ ID NO: 356860 - DNA, 25 bp, Artificial
  probe
  misc_feature (1)..(25): SEQ ID NO: 3487; WAN024AMU; Start 61; Stop 85
ataggtttattgttgatgagattgt

SEQ ID NO: 356861 - DNA, 25 bp, Artificial
  probe
  misc_feature (1)..(25): SEQ ID NO: 3487; WAN024AMU; Start 51; Stop 75
tggggttgaaataggtttattgttg

SEQ ID NO: 356862 - DNA, 25 bp, Artificial
  probe
  misc_feature (1)..(25): SEQ ID NO: 3487; WAN024AMU; Start 52; Stop 76
ggggttgaaataggtttattgttga

SEQ ID NO: 356863 - DNA, 25 bp, Artificial
  probe
  misc_feature (1)..(25): SEQ ID NO: 3487; WAN024AMU; Start 50; Stop 74
atggggttgaaataggtttattgtt

SEQ ID NO: 356864 - DNA, 25 bp, Artificial
  probe
  misc_feature (1)..(25): SEQ ID NO: 3487; WAN024AMU; Start 49; Stop 73
aatggggttgaaataggtttattgt

SEQ ID NO: 356865 - DNA, 25 bp, Artificial
  probe
  misc_feature (1)..(25): SEQ ID NO: 3487; WAN024AMU; Start 57; Stop 81
tgaaataggtttattgttgatgaga

SEQ ID NO: 356866 - DNA, 25 bp, Artificial
  probe
  misc_feature (1)..(25): SEQ ID NO: 3487; WAN024AMU; Start 70; Stop 94
ttgttgatgagattgtagataattc

SEQ ID NO: 356867 - DNA, 25 bp, Artificial
  probe
  misc_feature (1)..(25): SEQ ID NO: 3487; WAN024AMU; Start 62; Stop 86
taggtttattgttgatgagattgta

SEQ ID NO: 356868 - DNA, 25 bp, Artificial
  probe
  misc_feature (1)..(25): SEQ ID NO: 3487; WAN024AMU; Start 55; Stop 79
gttgaaataggtttattgttgatga

SEQ ID NO: 356869 - DNA, 25 bp, Artificial
  probe
  misc_feature (1)..(25): SEQ ID NO: 3487; WAN024AMU; Start 45; Stop 69
agataatggggttgaaataggttta

SEQ ID NO: 356870 - DNA, 25 bp, Artificial
  probe
  misc_feature (1)..(25): SEQ ID NO: 3487; WAN024AMU; Start 44; Stop 68
tagataatggggttgaaataggttt

SEQ ID NO: 356871 - DNA, 25 bp, Artificial
  probe
  misc_feature (1)..(25): SEQ ID NO: 3487; WAN024AMU; Start 43; Stop 67
atagataatggggttgaaataggtt

SEQ ID NO: 356872 - DNA, 25 bp, Artificial
  probe
  misc_feature (1)..(25): SEQ ID NO: 3487; WAN024AMU; Start 56; Stop 80
ttgaaataggtttattgttgatgag

SEQ ID NO: 356873 - DNA, 25 bp, Artificial
  probe
  misc_feature (1)..(25): SEQ ID NO: 3487; WAN024AMU; Start 34; Stop 58
aatacgcctatagataatggggttg

SEQ ID NO: 356874 - DNA, 25 bp, Artificial
  probe
  misc_feature (1)..(25): SEQ ID NO: 3487; WAN024AMU; Start 38; Stop 62
cgcctatagataatggggttgaaat

SEQ ID NO: 356875 - DNA, 25 bp, Artificial
  probe
  misc_feature (1)..(25): SEQ ID NO: 3487; WAN024AMU; Start 33; Stop 57
aaatacgcctatagataatggggtt

SEQ ID NO: 356876 - DNA, 25 bp, Artificial
  probe
  misc_feature (1)..(25): SEQ ID NO: 3487; WAN024AMU; Start 32; Stop 56
aaaatacgcctatagataatggggt

SEQ ID NO: 356877 - DNA, 25 bp, Artificial
  probe
  misc_feature (1)..(25): SEQ ID NO: 3487; WAN024AMU; Start 35; Stop 59
atacgcctatagataatggggttga

SEQ ID NO: 356878 - DNA, 25 bp, Artificial
  probe
  misc_feature (1)..(25): SEQ ID NO: 3487; WAN024AMU; Start 36; Stop 60
tacgcctatagataatggggttgaa

SEQ ID NO: 356879 - DNA, 25 bp, Artificial
  probe
  misc_feature (1)..(25): SEQ ID NO: 3487; WAN024AMU; Start 48; Stop 72
taatggggttgaaataggtttattg

SEQ ID NO: 356880 - DNA, 25 bp, Artificial
  probe
  misc_feature (1)..(25): SEQ ID NO: 3487; WAN024AMU; Start 60; Stop 84
aataggtttattgttgatgagattg

SEQ ID NO: 356881 - DNA, 25 bp, Artificial
  probe
  misc_feature (1)..(25): SEQ ID NO: 3487; WAN024AMU; Start 65; Stop 89
gtttattgttgatgagattgtagat

SEQ ID NO: 356882 - DNA, 25 bp, Artificial
  probe
  misc_feature (1)..(25): SEQ ID NO: 3487; WAN024AMU; Start 37; Stop 61
acgcctatagataatggggttgaaa

SEQ ID NO: 356883 - DNA, 25 bp, Artificial
  probe
  misc_feature (1)..(25): SEQ ID NO: 3487; WAN024AMU; Start 42; Stop 66
tatagataatggggttgaaataggt

SEQ ID NO: 356884 - DNA, 25 bp, Artificial
  probe
  misc_feature (1)..(25): SEQ ID NO: 3487; WAN024AMU; Start 58; Stop 82
gaaataggtttattgttgatgagat

SEQ ID NO: 356885 - DNA, 25 bp, Artificial
  probe
  misc_feature (1)..(25): SEQ ID NO: 3487; WAN024AMU; Start 46; Stop 70
gataatggggttgaaataggtttat

SEQ ID NO: 356886 - DNA, 25 bp, Artificial
  probe
  misc_feature (1)..(25): SEQ ID NO: 3487; WAN024AMU; Start 39; Stop 63
gcctatagataatggggttgaaata

SEQ ID NO: 356887 - DNA, 25 bp, Artificial
  probe
  misc_feature (1)..(25): SEQ ID NO: 3487; WAN024AMU; Start 47; Stop 71
ataatggggttgaaataggtttatt

SEQ ID NO: 356888 - DNA, 25 bp, Artificial
  probe
  misc_feature (1)..(25): SEQ ID NO: 3488; WAN024CNB-3; Start 418; Stop 442
gtgatagtgtggatggagttattct

SEQ ID NO: 356889 - DNA, 25 bp, Artificial
  probe
  misc_feature (1)..(25): SEQ ID NO: 3488; WAN024CNB-3; Start 9; Stop 33
ttggatactattgtcgcattaggaa

SEQ ID NO: 356890 - DNA, 25 bp, Artificial
  probe
  misc_feature (1)..(25): SEQ ID NO: 3488; WAN024CNB-3; Start 599; Stop 623
agatgagacaggaagaacttattgg

SEQ ID NO: 356891 - DNA, 25 bp, Artificial
  probe
  misc_feature (1)..(25): SEQ ID NO: 3488; WAN024CNB-3; Start 8; Stop 32
gttggatactattgtcgcattagga

SEQ ID NO: 356892 - DNA, 25 bp, Artificial
  probe
  misc_feature (1)..(25): SEQ ID NO: 3488; WAN024CNB-3; Start 419; Stop 443
tgatagtgtggatggagttattctt

SEQ ID NO: 356893 - DNA, 25 bp, Artificial
  probe
  misc_feature (1)..(25): SEQ ID NO: 3488; WAN024CNB-3; Start 417; Stop 441
cgtgatagtgtggatggagttattc

SEQ ID NO: 356894 - DNA, 25 bp, Artificial
  probe
  misc_feature (1)..(25): SEQ ID NO: 3488; WAN024CNB-3; Start 1178; Stop 1202
ccgtccattaacagatgaagaagta

SEQ ID NO: 356895 - DNA, 25 bp, Artificial
  probe
  misc_feature (1)..(25): SEQ ID NO: 3488; WAN024CNB-3; Start 1180; Stop 1204
gtccattaacagatgaagaagtagc

SEQ ID NO: 356896 - DNA, 25 bp, Artificial
  probe
  misc_feature (1)..(25): SEQ ID NO: 3488; WAN024CNB-3; Start 414; Stop 438
tatcgtgatagtgtggatggagtta

SEQ ID NO: 356897 - DNA, 25 bp, Artificial
  probe
  misc_feature (1)..(25): SEQ ID NO: 3488; WAN024CNB-3; Start 1179; Stop 1203
cgtccattaacagatgaagaagtag

SEQ ID NO: 356898 - DNA, 25 bp, Artificial
  probe
  misc_feature (1)..(25): SEQ ID NO: 3488; WAN024CNB-3; Start 415; Stop 439
atcgtgatagtgtggatggagttat

SEQ ID NO: 356899 - DNA, 25 bp, Artificial
  probe
  misc_feature (1)..(25): SEQ ID NO: 3488; WAN024CNB-3; Start 416; Stop 440
tcgtgatagtgtggatggagttatt

SEQ ID NO: 356900 - DNA, 25 bp, Artificial
  probe
  misc_feature (1)..(25): SEQ ID NO: 3488; WAN024CNB-3; Start 34; Stop 58
atagtggactagataacctgagagc

SEQ ID NO: 356901 - DNA, 25 bp, Artificial
  probe
  misc_feature (1)..(25): SEQ ID NO: 3488; WAN024CNB-3; Start 413; Stop 437
atatcgtgatagtgtggatggagtt

SEQ ID NO: 356902 - DNA, 25 bp, Artificial
  probe
  misc_feature (1)..(25): SEQ ID NO: 3488; WAN024CNB-3; Start 1666; Stop 1690
aagaagtaactataacaacggctgc

SEQ ID NO: 356903 - DNA, 25 bp, Artificial
  probe
  misc_feature (1)..(25): SEQ ID NO: 3488; WAN024CNB-3; Start 7; Stop 31
cgttggatactattgtcgcattagg

SEQ ID NO: 356904 - DNA, 25 bp, Artificial
  probe
  misc_feature (1)..(25): SEQ ID NO: 3488; WAN024CNB-3; Start 1176; Stop 1200
gtccgtccattaacagatgaagaag

SEQ ID NO: 356905 - DNA, 25 bp, Artificial
  probe
  misc_feature (1)..(25): SEQ ID NO: 3488; WAN024CNB-3; Start 598; Stop 622
aagatgagacaggaagaacttattg

SEQ ID NO: 356906 - DNA, 25 bp, Artificial
  probe
  misc_feature (1)..(25): SEQ ID NO: 3488; WAN024CNB-3; Start 33; Stop 57
aatagtggactagataacctgagag

SEQ ID NO: 356907 - DNA, 25 bp, Artificial
  probe
  misc_feature (1)..(25): SEQ ID NO: 3488; WAN024CNB-3; Start 288; Stop 312
tacgatagaatatcagcaccaagtt

SEQ ID NO: 356908 - DNA, 25 bp, Artificial
  probe
  misc_feature (1)..(25): SEQ ID NO: 3488; WAN024CNB-3; Start 287; Stop 311
ttacgatagaatatcagcaccaagt

SEQ ID NO: 356909 - DNA, 25 bp, Artificial
  probe
  misc_feature (1)..(25): SEQ ID NO: 3488; WAN024CNB-3; Start 1177; Stop 1201
tccgtccattaacagatgaagaagt

SEQ ID NO: 356910 - DNA, 25 bp, Artificial
  probe
  misc_feature (1)..(25): SEQ ID NO: 3488; WAN024CNB-3; Start 1175; Stop 1199
agtccgtccattaacagatgaagaa

SEQ ID NO: 356911 - DNA, 25 bp, Artificial
  probe
  misc_feature (1)..(25): SEQ ID NO: 3488; WAN024CNB-3; Start 1174; Stop 1198
aagtccgtccattaacagatgaaga

SEQ ID NO: 356912 - DNA, 25 bp, Artificial
  probe
  misc_feature (1)..(25): SEQ ID NO: 3488; WAN024CNB-3; Start 289; Stop 313
acgatagaatatcagcaccaagttg

SEQ ID NO: 356913 - DNA, 25 bp, Artificial
  probe
  misc_feature (1)..(25): SEQ ID NO: 3488; WAN024CNB-3; Start 524; Stop 548
gtacaatcttcttgacagtgcttca

SEQ ID NO: 356914 - DNA, 25 bp, Artificial
  probe
  misc_feature (1)..(25): SEQ ID NO: 3488; WAN024CNB-3; Start 1181; Stop 1205
tccattaacagatgaagaagtagct

SEQ ID NO: 356915 - DNA, 25 bp, Artificial
  probe
  misc_feature (1)..(25): SEQ ID NO: 3488; WAN024CNB-3; Start 1376; Stop 1400
aatagcttatgaattacttgcggaa

SEQ ID NO: 356916 - DNA, 25 bp, Artificial
  probe
  misc_feature (1)..(25): SEQ ID NO: 3488; WAN024CNB-3; Start 523; Stop 547
ggtacaatcttcttgacagtgcttc

SEQ ID NO: 356917 - DNA, 25 bp, Artificial
  probe
  misc_feature (1)..(25): SEQ ID NO: 3488; WAN024CNB-3; Start 693; Stop 717
tataatagtagtgcaggagcgtatg

SEQ ID NO: 356918 - DNA, 25 bp, Artificial
  probe
  misc_feature (1)..(25): SEQ ID NO: 3488; WAN024CNB-3; Start 692; Stop 716
gtataatagtagtgcaggagcgtat

SEQ ID NO: 356919 - DNA, 25 bp, Artificial
  probe
  misc_feature (1)..(25): SEQ ID NO: 3488; WAN024CNB-3; Start 691; Stop 715
agtataatagtagtgcaggagcgta

SEQ ID NO: 356920 - DNA, 25 bp, Artificial
  probe
  misc_feature (1)..(25): SEQ ID NO: 3488; WAN024CNB-3; Start 1814; Stop 1838
tcgcactacagatgactttagaaat

SEQ ID NO: 356921 - DNA, 25 bp, Artificial
  probe
  misc_feature (1)..(25): SEQ ID NO: 3489; WAN024COV; Start 129; Stop 153
ttcgccaaataataaacgcaataca

SEQ ID NO: 356922 - DNA, 25 bp, Artificial
  probe
  misc_feature (1)..(25): SEQ ID NO: 3489; WAN024COV; Start 128; Stop 152
cttcgccaaataataaacgcaatac

SEQ ID NO: 356923 - DNA, 25 bp, Artificial
  probe
  misc_feature (1)..(25): SEQ ID NO: 3489; WAN024COV; Start 131; Stop 155
cgccaaataataaacgcaatacact

SEQ ID NO: 356924 - DNA, 25 bp, Artificial
  probe
  misc_feature (1)..(25): SEQ ID NO: 3489; WAN024COV; Start 130; Stop 154
tcgccaaataataaacgcaatacac

SEQ ID NO: 356925 - DNA, 25 bp, Artificial
  probe
  misc_feature (1)..(25): SEQ ID NO: 3489; WAN024COV; Start 119; Stop 143
atatcaccgcttcgccaaataataa

SEQ ID NO: 356926 - DNA, 25 bp, Artificial
  probe
  misc_feature (1)..(25): SEQ ID NO: 3489; WAN024COV; Start 127; Stop 151
gcttcgccaaataataaacgcaata

SEQ ID NO: 356927 - DNA, 25 bp, Artificial
  probe
  misc_feature (1)..(25): SEQ ID NO: 3489; WAN024COV; Start 120; Stop 144
tatcaccgcttcgccaaataataaa

SEQ ID NO: 356928 - DNA, 25 bp, Artificial
  probe
  misc_feature (1)..(25): SEQ ID NO: 3489; WAN024COV; Start 132; Stop 156
gccaaataataaacgcaatacacta

SEQ ID NO: 356929 - DNA, 25 bp, Artificial
  probe
  misc_feature (1)..(25): SEQ ID NO: 3489; WAN024COV; Start 121; Stop 145
atcaccgcttcgccaaataataaac

SEQ ID NO: 356930 - DNA, 25 bp, Artificial
  probe
  misc_feature (1)..(25): SEQ ID NO: 3489; WAN024COV; Start 236; Stop 260
cggaagatatcgaagatacactgca

SEQ ID NO: 356931 - DNA, 25 bp, Artificial
  probe
  misc_feature (1)..(25): SEQ ID NO: 3489; WAN024COV; Start 118; Stop 142
gatatcaccgcttcgccaaataata

SEQ ID NO: 356932 - DNA, 25 bp, Artificial
  probe
  misc_feature (1)..(25): SEQ ID NO: 3489; WAN024COV; Start 199; Stop 223
cttcttcttgaacttttggacactc

SEQ ID NO: 356933 - DNA, 25 bp, Artificial
  probe
  misc_feature (1)..(25): SEQ ID NO: 3489; WAN024COV; Start 198; Stop 222
tcttcttcttgaacttttggacact

SEQ ID NO: 356934 - DNA, 25 bp, Artificial
  probe
  misc_feature (1)..(25): SEQ ID NO: 3489; WAN024COV; Start 126; Stop 150
cgcttcgccaaataataaacgcaat

SEQ ID NO: 356935 - DNA, 25 bp, Artificial
  probe
  misc_feature (1)..(25): SEQ ID NO: 3489; WAN024COV; Start 201; Stop 225
tcttcttgaacttttggacactcat

SEQ ID NO: 356936 - DNA, 25 bp, Artificial
  probe
  misc_feature (1)..(25): SEQ ID NO: 3489; WAN024COV; Start 200; Stop 224
ttcttcttgaacttttggacactca

SEQ ID NO: 356937 - DNA, 25 bp, Artificial
  probe
  misc_feature (1)..(25): SEQ ID NO: 3489; WAN024COV; Start 133; Stop 157
ccaaataataaacgcaatacactaa

SEQ ID NO: 356938 - DNA, 25 bp, Artificial
  probe
  misc_feature (1)..(25): SEQ ID NO: 3489; WAN024COV; Start 139; Stop 163
aataaacgcaatacactaattggtt

SEQ ID NO: 356939 - DNA, 25 bp, Artificial
  probe
  misc_feature (1)..(25): SEQ ID NO: 3489; WAN024COV; Start 140; Stop 164
ataaacgcaatacactaattggttt

SEQ ID NO: 356940 - DNA, 25 bp, Artificial
  probe
  misc_feature (1)..(25): SEQ ID NO: 3489; WAN024COV; Start 235; Stop 259
ccggaagatatcgaagatacactgc

SEQ ID NO: 356941 - DNA, 25 bp, Artificial
  probe
  misc_feature (1)..(25): SEQ ID NO: 3489; WAN024COV; Start 202; Stop 226
cttcttgaacttttggacactcatg

SEQ ID NO: 356942 - DNA, 25 bp, Artificial
  probe
  misc_feature (1)..(25): SEQ ID NO: 3489; WAN024COV; Start 138; Stop 162
taataaacgcaatacactaattggt

SEQ ID NO: 356943 - DNA, 25 bp, Artificial
  probe
  misc_feature (1)..(25): SEQ ID NO: 3489; WAN024COV; Start 203; Stop 227
ttcttgaacttttggacactcatgt

SEQ ID NO: 356944 - DNA, 25 bp, Artificial
  probe
  misc_feature (1)..(25): SEQ ID NO: 3489; WAN024COV; Start 208; Stop 232
gaacttttggacactcatgtgaaac

SEQ ID NO: 356945 - DNA, 25 bp, Artificial
  probe
  misc_feature (1)..(25): SEQ ID NO: 3489; WAN024COV; Start 259; Stop 283
cagatgacacttttgggagttgtac

SEQ ID NO: 356946 - DNA, 25 bp, Artificial
  probe
  misc_feature (1)..(25): SEQ ID NO: 3489; WAN024COV; Start 122; Stop 146
tcaccgcttcgccaaataataaacg

SEQ ID NO: 356947 - DNA, 25 bp, Artificial
  probe
  misc_feature (1)..(25): SEQ ID NO: 3489; WAN024COV; Start 207; Stop 231
tgaacttttggacactcatgtgaaa

SEQ ID NO: 356948 - DNA, 25 bp, Artificial
  probe
  misc_feature (1)..(25): SEQ ID NO: 3489; WAN024COV; Start 206; Stop 230
ttgaacttttggacactcatgtgaa

SEQ ID NO: 356949 - DNA, 25 bp, Artificial
  probe
  misc_feature (1)..(25): SEQ ID NO: 3489; WAN024COV; Start 205; Stop 229
cttgaacttttggacactcatgtga

SEQ ID NO: 356950 - DNA, 25 bp, Artificial
  probe
  misc_feature (1)..(25): SEQ ID NO: 3489; WAN024COV; Start 204; Stop 228
tcttgaacttttggacactcatgtg

SEQ ID NO: 356951 - DNA, 25 bp, Artificial
  probe
  misc_feature (1)..(25): SEQ ID NO: 3489; WAN024COV; Start 64; Stop 88
aaaattatcagtattactcgtgctg

SEQ ID NO: 356952 - DNA, 25 bp, Artificial
  probe
  misc_feature (1)..(25): SEQ ID NO: 3489; WAN024COV; Start 65; Stop 89
aaattatcagtattactcgtgctga

SEQ ID NO: 356953 - DNA, 25 bp, Artificial
  probe
  misc_feature (1)..(25): SEQ ID NO: 3489; WAN024COV; Start 260; Stop 284
agatgacacttttgggagttgtacc

SEQ ID NO: 356954 - DNA, 25 bp, Artificial
  probe
  misc_feature (1)..(25): SEQ ID NO: 3490; WAN024BDP; Start 103; Stop 127
tcgtcagtcttatctactacctcaa

SEQ ID NO: 356955 - DNA, 25 bp, Artificial
  probe
  misc_feature (1)..(25): SEQ ID NO: 3490; WAN024BDP; Start 102; Stop 126
ttcgtcagtcttatctactacctca

SEQ ID NO: 356956 - DNA, 25 bp, Artificial
  probe
  misc_feature (1)..(25): SEQ ID NO: 3490; WAN024BDP; Start 100; Stop 124
acttcgtcagtcttatctactacct

SEQ ID NO: 356957 - DNA, 25 bp, Artificial
  probe
  misc_feature (1)..(25): SEQ ID NO: 3490; WAN024BDP; Start 101; Stop 125
cttcgtcagtcttatctactacctc

SEQ ID NO: 356958 - DNA, 25 bp, Artificial
  probe
  misc_feature (1)..(25): SEQ ID NO: 3490; WAN024BDP; Start 104; Stop 128
cgtcagtcttatctactacctcaaa

SEQ ID NO: 356959 - DNA, 25 bp, Artificial
  probe
  misc_feature (1)..(25): SEQ ID NO: 3490; WAN024BDP; Start 150; Stop 174
ggctagtttcctagtttgctatttg

SEQ ID NO: 356960 - DNA, 25 bp, Artificial
  probe
  misc_feature (1)..(25): SEQ ID NO: 3490; WAN024BDP; Start 149; Stop 173
tggctagtttcctagtttgctattt

SEQ ID NO: 356961 - DNA, 25 bp, Artificial
  probe
  misc_feature (1)..(25): SEQ ID NO: 3490; WAN024BDP; Start 148; Stop 172
gtggctagtttcctagtttgctatt

SEQ ID NO: 356962 - DNA, 25 bp, Artificial
  probe
  misc_feature (1)..(25): SEQ ID NO: 3490; WAN024BDP; Start 35; Stop 59
cttgccgtatatttgagctgacttc

SEQ ID NO: 356963 - DNA, 25 bp, Artificial
  probe
  misc_feature (1)..(25): SEQ ID NO: 3490; WAN024BDP; Start 99; Stop 123
gacttcgtcagtcttatctactacc

SEQ ID NO: 356964 - DNA, 25 bp, Artificial
  probe
  misc_feature (1)..(25): SEQ ID NO: 3490; WAN024BDP; Start 147; Stop 171
tgtggctagtttcctagtttgctat

SEQ ID NO: 356965 - DNA, 25 bp, Artificial
  probe
  misc_feature (1)..(25): SEQ ID NO: 3490; WAN024BDP; Start 177; Stop 201
tttcattgagtacaaagagcttggc

SEQ ID NO: 356966 - DNA, 25 bp, Artificial
  probe
  misc_feature (1)..(25): SEQ ID NO: 3490; WAN024BDP; Start 146; Stop 170
ctgtggctagtttcctagtttgcta

SEQ ID NO: 356967 - DNA, 25 bp, Artificial
  probe
  misc_feature (1)..(25): SEQ ID NO: 3490; WAN024BDP; Start 108; Stop 132
agtcttatctactacctcaaaacgg

SEQ ID NO: 356968 - DNA, 25 bp, Artificial
  probe
  misc_feature (1)..(25): SEQ ID NO: 3490; WAN024BDP; Start 98; Stop 122
tgacttcgtcagtcttatctactac

SEQ ID NO: 356969 - DNA, 25 bp, Artificial
  probe
  misc_feature (1)..(25): SEQ ID NO: 3490; WAN024BDP; Start 143; Stop 167
aacctgtggctagtttcctagtttg

SEQ ID NO: 356970 - DNA, 25 bp, Artificial
  probe
  misc_feature (1)..(25): SEQ ID NO: 3490; WAN024BDP; Start 142; Stop 166
caacctgtggctagtttcctagttt

SEQ ID NO: 356971 - DNA, 25 bp, Artificial
  probe
  misc_feature (1)..(25): SEQ ID NO: 3490; WAN024BDP; Start 107; Stop 131
cagtcttatctactacctcaaaacg

SEQ ID NO: 356972 - DNA, 25 bp, Artificial
  probe
  misc_feature (1)..(25): SEQ ID NO: 3490; WAN024BDP; Start 180; Stop 204
cattgagtacaaagagcttggcaac

SEQ ID NO: 356973 - DNA, 25 bp, Artificial
  probe
  misc_feature (1)..(25): SEQ ID NO: 3490; WAN024BDP; Start 34; Stop 58
ccttgccgtatatttgagctgactt

SEQ ID NO: 356974 - DNA, 25 bp, Artificial
  probe
  misc_feature (1)..(25): SEQ ID NO: 3490; WAN024BDP; Start 179; Stop 203
tcattgagtacaaagagcttggcaa

SEQ ID NO: 356975 - DNA, 25 bp, Artificial
  probe
  misc_feature (1)..(25): SEQ ID NO: 3490; WAN024BDP; Start 178; Stop 202
ttcattgagtacaaagagcttggca

SEQ ID NO: 356976 - DNA, 25 bp, Artificial
  probe
  misc_feature (1)..(25): SEQ ID NO: 3490; WAN024BDP; Start 181; Stop 205
attgagtacaaagagcttggcaaca

SEQ ID NO: 356977 - DNA, 25 bp, Artificial
  probe
  misc_feature (1)..(25): SEQ ID NO: 3490; WAN024BDP; Start 36; Stop 60
ttgccgtatatttgagctgacttcg

SEQ ID NO: 356978 - DNA, 25 bp, Artificial
  probe
  misc_feature (1)..(25): SEQ ID NO: 3490; WAN024BDP; Start 111; Stop 135
cttatctactacctcaaaacggtgt

SEQ ID NO: 356979 - DNA, 25 bp, Artificial
  probe
  misc_feature (1)..(25): SEQ ID NO: 3490; WAN024BDP; Start 112; Stop 136
ttatctactacctcaaaacggtgtt

SEQ ID NO: 356980 - DNA, 25 bp, Artificial
  probe
  misc_feature (1)..(25): SEQ ID NO: 3490; WAN024BDP; Start 110; Stop 134
tcttatctactacctcaaaacggtg

SEQ ID NO: 356981 - DNA, 25 bp, Artificial
  probe
  misc_feature (1)..(25): SEQ ID NO: 3490; WAN024BDP; Start 109; Stop 133
gtcttatctactacctcaaaacggt

SEQ ID NO: 356982 - DNA, 25 bp, Artificial
  probe
  misc_feature (1)..(25): SEQ ID NO: 3490; WAN024BDP; Start 176; Stop 200
ttttcattgagtacaaagagcttgg

SEQ ID NO: 356983 - DNA, 25 bp, Artificial
  probe
  misc_feature (1)..(25): SEQ ID NO: 3490; WAN024BDP; Start 172; Stop 196
ttgattttcattgagtacaaagagc

SEQ ID NO: 356984 - DNA, 25 bp, Artificial
  probe
  misc_feature (1)..(25): SEQ ID NO: 3490; WAN024BDP; Start 106; Stop 130
tcagtcttatctactacctcaaaac

SEQ ID NO: 356985 - DNA, 25 bp, Artificial
  probe
  misc_feature (1)..(25): SEQ ID NO: 3490; WAN024BDP; Start 105; Stop 129
gtcagtcttatctactacctcaaaa

SEQ ID NO: 356986 - DNA, 25 bp, Artificial
  probe
  misc_feature (1)..(25): SEQ ID NO: 3490; WAN024BDP; Start 173; Stop 197
tgattttcattgagtacaaagagct

SEQ ID NO: 356987 - DNA, 25 bp, Artificial
  probe
  misc_feature (1)..(25): SEQ ID NO: 3491; WAN024A6K; Start 46; Stop 70
aataggaatagcacatggagagagg

SEQ ID NO: 356988 - DNA, 25 bp, Artificial
  probe
  misc_feature (1)..(25): SEQ ID NO: 3491; WAN024A6K; Start 52; Stop 76
aatagcacatggagagaggattctt

SEQ ID NO: 356989 - DNA, 25 bp, Artificial
  probe
  misc_feature (1)..(25): SEQ ID NO: 3491; WAN024A6K; Start 48; Stop 72
taggaatagcacatggagagaggat

SEQ ID NO: 356990 - DNA, 25 bp, Artificial
  probe
  misc_feature (1)..(25): SEQ ID NO: 3491; WAN024A6K; Start 47; Stop 71
ataggaatagcacatggagagagga

SEQ ID NO: 356991 - DNA, 25 bp, Artificial
  probe
  misc_feature (1)..(25): SEQ ID NO: 3491; WAN024A6K; Start 49; Stop 73
aggaatagcacatggagagaggatt

SEQ ID NO: 356992 - DNA, 25 bp, Artificial
  probe
  misc_feature (1)..(25): SEQ ID NO: 3491; WAN024A6K; Start 45; Stop 69
aaataggaatagcacatggagagag

SEQ ID NO: 356993 - DNA, 25 bp, Artificial
  probe
  misc_feature (1)..(25): SEQ ID NO: 3491; WAN024A6K; Start 51; Stop 75
gaatagcacatggagagaggattct

SEQ ID NO: 356994 - DNA, 25 bp, Artificial
  probe
  misc_feature (1)..(25): SEQ ID NO: 3491; WAN024A6K; Start 50; Stop 74
ggaatagcacatggagagaggattc

SEQ ID NO: 356995 - DNA, 25 bp, Artificial
  probe
  misc_feature (1)..(25): SEQ ID NO: 3491; WAN024A6K; Start 44; Stop 68
aaaataggaatagcacatggagaga

SEQ ID NO: 356996 - DNA, 25 bp, Artificial
  probe
  misc_feature (1)..(25): SEQ ID NO: 3491; WAN024A6K; Start 43; Stop 67
taaaataggaatagcacatggagag

SEQ ID NO: 356997 - DNA, 25 bp, Artificial
  probe
  misc_feature (1)..(25): SEQ ID NO: 3491; WAN024A6K; Start 42; Stop 66
ctaaaataggaatagcacatggaga

SEQ ID NO: 356998 - DNA, 25 bp, Artificial
  probe
  misc_feature (1)..(25): SEQ ID NO: 3491; WAN024A6K; Start 41; Stop 65
gctaaaataggaatagcacatggag

SEQ ID NO: 356999 - DNA, 25 bp, Artificial
  probe
  misc_feature (1)..(25): SEQ ID NO: 3491; WAN024A6K; Start 9; Stop 33
cgtccttttcttcgtgaaaatacta

SEQ ID NO: 357000 - DNA, 25 bp, Artificial
  probe
  misc_feature (1)..(25): SEQ ID NO: 3491; WAN024A6K; Start 8; Stop 32
ccgtccttttcttcgtgaaaatact

SEQ ID NO: 357001 - DNA, 25 bp, Artificial
  probe
  misc_feature (1)..(25): SEQ ID NO: 3491; WAN024A6K; Start 7; Stop 31
tccgtccttttcttcgtgaaaatac

SEQ ID NO: 357002 - DNA, 25 bp, Artificial
  probe
  misc_feature (1)..(25): SEQ ID NO: 3491; WAN024A6K; Start 6; Stop 30
gtccgtccttttcttcgtgaaaata

SEQ ID NO: 357003 - DNA, 25 bp, Artificial
  probe
  misc_feature (1)..(25): SEQ ID NO: 3491; WAN024A6K; Start 10; Stop 34
gtccttttcttcgtgaaaatactat

SEQ ID NO: 357004 - DNA, 25 bp, Artificial
  probe
  misc_feature (1)..(25): SEQ ID NO: 3491; WAN024A6K; Start 19; Stop 43
ttcgtgaaaatactataagtatgct

SEQ ID NO: 357005 - DNA, 25 bp, Artificial
  probe
  misc_feature (1)..(25): SEQ ID NO: 3491; WAN024A6K; Start 18; Stop 42
cttcgtgaaaatactataagtatgc

SEQ ID NO: 357006 - DNA, 25 bp, Artificial
  probe
  misc_feature (1)..(25): SEQ ID NO: 3491; WAN024A6K; Start 5; Stop 29
ggtccgtccttttcttcgtgaaaat

SEQ ID NO: 357007 - DNA, 25 bp, Artificial
  probe
  misc_feature (1)..(25): SEQ ID NO: 3491; WAN024A6K; Start 20; Stop 44
tcgtgaaaatactataagtatgcta

SEQ ID NO: 357008 - DNA, 25 bp, Artificial
  probe
  misc_feature (1)..(25): SEQ ID NO: 3491; WAN024A6K; Start 11; Stop 35
tccttttcttcgtgaaaatactata

SEQ ID NO: 357009 - DNA, 25 bp, Artificial
  probe
  misc_feature (1)..(25): SEQ ID NO: 3491; WAN024A6K; Start 12; Stop 36
ccttttcttcgtgaaaatactataa

SEQ ID NO: 357010 - DNA, 25 bp, Artificial
  probe
  misc_feature (1)..(25): SEQ ID NO: 3492; WAN024APM; Start 11; Stop 35
acttcattcggtgttggtatttaat

SEQ ID NO: 357011 - DNA, 25 bp, Artificial
  probe
  misc_feature (1)..(25): SEQ ID NO: 3492; WAN024APM; Start 4; Stop 28
ctattaaacttcattcggtgttggt

SEQ ID NO: 357012 - DNA, 25 bp, Artificial
  probe
  misc_feature (1)..(25): SEQ ID NO: 3492; WAN024APM; Start 3; Stop 27
tctattaaacttcattcggtgttgg

SEQ ID NO: 357013 - DNA, 25 bp, Artificial
  probe
  misc_feature (1)..(25): SEQ ID NO: 3492; WAN024APM; Start 9; Stop 33
aaacttcattcggtgttggtattta

SEQ ID NO: 357014 - DNA, 25 bp, Artificial
  probe
  misc_feature (1)..(25): SEQ ID NO: 3492; WAN024APM; Start 8; Stop 32
taaacttcattcggtgttggtattt

SEQ ID NO: 357015 - DNA, 25 bp, Artificial
  probe
  misc_feature (1)..(25): SEQ ID NO: 3492; WAN024APM; Start 10; Stop 34
aacttcattcggtgttggtatttaa

SEQ ID NO: 357016 - DNA, 25 bp, Artificial
  probe
  misc_feature (1)..(25): SEQ ID NO: 3492; WAN024APM; Start 7; Stop 31
ttaaacttcattcggtgttggtatt

SEQ ID NO: 357017 - DNA, 25 bp, Artificial
  probe
  misc_feature (1)..(25): SEQ ID NO: 3492; WAN024APM; Start 18; Stop 42
tcggtgttggtatttaattgattct

SEQ ID NO: 357018 - DNA, 25 bp, Artificial
  probe
  misc_feature (1)..(25): SEQ ID NO: 3492; WAN024APM; Start 6; Stop 30
attaaacttcattcggtgttggtat

SEQ ID NO: 357019 - DNA, 25 bp, Artificial
  probe
  misc_feature (1)..(25): SEQ ID NO: 3492; WAN024APM; Start 13; Stop 37
ttcattcggtgttggtatttaattg

SEQ ID NO: 357020 - DNA, 25 bp, Artificial
  probe
  misc_feature (1)..(25): SEQ ID NO: 3492; WAN024APM; Start 14; Stop 38
tcattcggtgttggtatttaattga

SEQ ID NO: 357021 - DNA, 25 bp, Artificial
  probe
  misc_feature (1)..(25): SEQ ID NO: 3492; WAN024APM; Start 5; Stop 29
tattaaacttcattcggtgttggta

SEQ ID NO: 357022 - DNA, 25 bp, Artificial
  probe
  misc_feature (1)..(25): SEQ ID NO: 3492; WAN024APM; Start 17; Stop 41
ttcggtgttggtatttaattgattc

SEQ ID NO: 357023 - DNA, 25 bp, Artificial
  probe
  misc_feature (1)..(25): SEQ ID NO: 3492; WAN024APM; Start 15; Stop 39
cattcggtgttggtatttaattgat

SEQ ID NO: 357024 - DNA, 25 bp, Artificial
  probe
  misc_feature (1)..(25): SEQ ID NO: 3492; WAN024APM; Start 12; Stop 36
cttcattcggtgttggtatttaatt

SEQ ID NO: 357025 - DNA, 25 bp, Artificial
  probe
  misc_feature (1)..(25): SEQ ID NO: 3492; WAN024APM; Start 2; Stop 26
ttctattaaacttcattcggtgttg

SEQ ID NO: 357026 - DNA, 25 bp, Artificial
  probe
  misc_feature (1)..(25): SEQ ID NO: 3492; WAN024APM; Start 16; Stop 40
attcggtgttggtatttaattgatt

SEQ ID NO: 357027 - DNA, 25 bp, Artificial
  probe
  misc_feature (1)..(25): SEQ ID NO: 3492; WAN024APM; Start 1; Stop 25
cttctattaaacttcattcggtgtt

SEQ ID NO: 357028 - DNA, 25 bp, Artificial
  probe
  misc_feature (1)..(25): SEQ ID NO: 3492; WAN024APM; Start 19; Stop 43
cggtgttggtatttaattgattcta

SEQ ID NO: 357029 - DNA, 25 bp, Artificial
  probe
  misc_feature (1)..(25): SEQ ID NO: 3492; WAN024APM; Start 57; Stop 81
tgttggcttttgtcaatgtgtttat

SEQ ID NO: 357030 - DNA, 25 bp, Artificial
  probe
  misc_feature (1)..(25): SEQ ID NO: 3492; WAN024APM; Start 56; Stop 80
atgttggcttttgtcaatgtgttta

SEQ ID NO: 357031 - DNA, 25 bp, Artificial
  probe
  misc_feature (1)..(25): SEQ ID NO: 3492; WAN024APM; Start 58; Stop 82
gttggcttttgtcaatgtgtttatt

SEQ ID NO: 357032 - DNA, 25 bp, Artificial
  probe
  misc_feature (1)..(25): SEQ ID NO: 3492; WAN024APM; Start 60; Stop 84
tggcttttgtcaatgtgtttattag

SEQ ID NO: 357033 - DNA, 25 bp, Artificial
  probe
  misc_feature (1)..(25): SEQ ID NO: 3492; WAN024APM; Start 61; Stop 85
ggcttttgtcaatgtgtttattagt

SEQ ID NO: 357034 - DNA, 25 bp, Artificial
  probe
  misc_feature (1)..(25): SEQ ID NO: 3492; WAN024APM; Start 55; Stop 79
aatgttggcttttgtcaatgtgttt

SEQ ID NO: 357035 - DNA, 25 bp, Artificial
  probe
  misc_feature (1)..(25): SEQ ID NO: 3492; WAN024APM; Start 54; Stop 78
aaatgttggcttttgtcaatgtgtt

SEQ ID NO: 357036 - DNA, 25 bp, Artificial
  probe
  misc_feature (1)..(25): SEQ ID NO: 3492; WAN024APM; Start 59; Stop 83
ttggcttttgtcaatgtgtttatta

SEQ ID NO: 357037 - DNA, 25 bp, Artificial
  probe
  misc_feature (1)..(25): SEQ ID NO: 3492; WAN024APM; Start 53; Stop 77
aaaatgttggcttttgtcaatgtgt

SEQ ID NO: 357038 - DNA, 25 bp, Artificial
  probe
  misc_feature (1)..(25): SEQ ID NO: 3492; WAN024APM; Start 20; Stop 44
ggtgttggtatttaattgattctaa

SEQ ID NO: 357039 - DNA, 25 bp, Artificial
  probe
  misc_feature (1)..(25): SEQ ID NO: 3492; WAN024APM; Start 62; Stop 86
gcttttgtcaatgtgtttattagta

SEQ ID NO: 357040 - DNA, 25 bp, Artificial
  probe
  misc_feature (1)..(25): SEQ ID NO: 3493; WAN0249UN; Start 8; Stop 32
cctcctccttgtcagtacattcttg

SEQ ID NO: 357041 - DNA, 25 bp, Artificial
  probe
  misc_feature (1)..(25): SEQ ID NO: 3493; WAN0249UN; Start 7; Stop 31
acctcctccttgtcagtacattctt

SEQ ID NO: 357042 - DNA, 25 bp, Artificial
  probe
  misc_feature (1)..(25): SEQ ID NO: 3493; WAN0249UN; Start 9; Stop 33
ctcctccttgtcagtacattcttgc

SEQ ID NO: 357043 - DNA, 25 bp, Artificial
  probe
  misc_feature (1)..(25): SEQ ID NO: 3493; WAN0249UN; Start 1; Stop 25
cttctcacctcctccttgtcagtac

SEQ ID NO: 357044 - DNA, 25 bp, Artificial
  probe
  misc_feature (1)..(25): SEQ ID NO: 3493; WAN0249UN; Start 6; Stop 30
cacctcctccttgtcagtacattct

SEQ ID NO: 357045 - DNA, 25 bp, Artificial
  probe
  misc_feature (1)..(25): SEQ ID NO: 3493; WAN0249UN; Start 5; Stop 29
tcacctcctccttgtcagtacattc

SEQ ID NO: 357046 - DNA, 25 bp, Artificial
  probe
  misc_feature (1)..(25): SEQ ID NO: 3493; WAN0249UN; Start 4; Stop 28
ctcacctcctccttgtcagtacatt

SEQ ID NO: 357047 - DNA, 25 bp, Artificial
  probe
  misc_feature (1)..(25): SEQ ID NO: 3493; WAN0249UN; Start 3; Stop 27
tctcacctcctccttgtcagtacat

SEQ ID NO: 357048 - DNA, 25 bp, Artificial
  probe
  misc_feature (1)..(25): SEQ ID NO: 3493; WAN0249UN; Start 10; Stop 34
tcctccttgtcagtacattcttgca

SEQ ID NO: 357049 - DNA, 25 bp, Artificial
  probe
  misc_feature (1)..(25): SEQ ID NO: 3493; WAN0249UN; Start 14; Stop 38
ccttgtcagtacattcttgcaatag

SEQ ID NO: 357050 - DNA, 25 bp, Artificial
  probe
  misc_feature (1)..(25): SEQ ID NO: 3493; WAN0249UN; Start 2; Stop 26
ttctcacctcctccttgtcagtaca

SEQ ID NO: 357051 - DNA, 25 bp, Artificial
  probe
  misc_feature (1)..(25): SEQ ID NO: 3493; WAN0249UN; Start 13; Stop 37
tccttgtcagtacattcttgcaata

SEQ ID NO: 357052 - DNA, 25 bp, Artificial
  probe
  misc_feature (1)..(25): SEQ ID NO: 3493; WAN0249UN; Start 15; Stop 39
cttgtcagtacattcttgcaataga

SEQ ID NO: 357053 - DNA, 25 bp, Artificial
  probe
  misc_feature (1)..(25): SEQ ID NO: 3493; WAN0249UN; Start 12; Stop 36
ctccttgtcagtacattcttgcaat

SEQ ID NO: 357054 - DNA, 25 bp, Artificial
  probe
  misc_feature (1)..(25): SEQ ID NO: 3493; WAN0249UN; Start 16; Stop 40
ttgtcagtacattcttgcaatagaa

SEQ ID NO: 357055 - DNA, 25 bp, Artificial
  probe
  misc_feature (1)..(25): SEQ ID NO: 3493; WAN0249UN; Start 11; Stop 35
cctccttgtcagtacattcttgcaa

SEQ ID NO: 357056 - DNA, 25 bp, Artificial
  probe
  misc_feature (1)..(25): SEQ ID NO: 3493; WAN0249UN; Start 17; Stop 41
tgtcagtacattcttgcaatagaaa

SEQ ID NO: 357057 - DNA, 25 bp, Artificial
  probe
  misc_feature (1)..(25): SEQ ID NO: 3493; WAN0249UN; Start 18; Stop 42
gtcagtacattcttgcaatagaaaa

SEQ ID NO: 357058 - DNA, 25 bp, Artificial
  probe
  misc_feature (1)..(25): SEQ ID NO: 3494; WAN0249KV; Start 5; Stop 29
tctctcccttcctaccaatcattat

SEQ ID NO: 357059 - DNA, 25 bp, Artificial
  probe
  misc_feature (1)..(25): SEQ ID NO: 3494; WAN0249KV; Start 4; Stop 28
ctctctcccttcctaccaatcatta

SEQ ID NO: 357060 - DNA, 25 bp, Artificial
  probe
  misc_feature (1)..(25): SEQ ID NO: 3494; WAN0249KV; Start 8; Stop 32
ctcccttcctaccaatcattatact

SEQ ID NO: 357061 - DNA, 25 bp, Artificial
  probe
  misc_feature (1)..(25): SEQ ID NO: 3494; WAN0249KV; Start 7; Stop 31
tctcccttcctaccaatcattatac

SEQ ID NO: 357062 - DNA, 25 bp, Artificial
  probe
  misc_feature (1)..(25): SEQ ID NO: 3494; WAN0249KV; Start 6; Stop 30
ctctcccttcctaccaatcattata

SEQ ID NO: 357063 - DNA, 25 bp, Artificial
  probe
  misc_feature (1)..(25): SEQ ID NO: 3494; WAN0249KV; Start 81; Stop 105
acgctaaacaaacactagagactaa

SEQ ID NO: 357064 - DNA, 25 bp, Artificial
  probe
  misc_feature (1)..(25): SEQ ID NO: 3494; WAN0249KV; Start 77; Stop 101
taagacgctaaacaaacactagaga

SEQ ID NO: 357065 - DNA, 25 bp, Artificial
  probe
  misc_feature (1)..(25): SEQ ID NO: 3494; WAN0249KV; Start 80; Stop 104
gacgctaaacaaacactagagacta

SEQ ID NO: 357066 - DNA, 25 bp, Artificial
  probe
  misc_feature (1)..(25): SEQ ID NO: 3494; WAN0249KV; Start 76; Stop 100
ttaagacgctaaacaaacactagag

SEQ ID NO: 357067 - DNA, 25 bp, Artificial
  probe
  misc_feature (1)..(25): SEQ ID NO: 3494; WAN0249KV; Start 78; Stop 102
aagacgctaaacaaacactagagac

SEQ ID NO: 357068 - DNA, 25 bp, Artificial
  probe
  misc_feature (1)..(25): SEQ ID NO: 3494; WAN0249KV; Start 72; Stop 96
ctctttaagacgctaaacaaacact

SEQ ID NO: 357069 - DNA, 25 bp, Artificial
  probe
  misc_feature (1)..(25): SEQ ID NO: 3494; WAN0249KV; Start 71; Stop 95
tctctttaagacgctaaacaaacac

SEQ ID NO: 357070 - DNA, 25 bp, Artificial
  probe
  misc_feature (1)..(25): SEQ ID NO: 3494; WAN0249KV; Start 9; Stop 33
tcccttcctaccaatcattatacta

SEQ ID NO: 357071 - DNA, 25 bp, Artificial
  probe
  misc_feature (1)..(25): SEQ ID NO: 3494; WAN0249KV; Start 79; Stop 103
agacgctaaacaaacactagagact

SEQ ID NO: 357072 - DNA, 25 bp, Artificial
  probe
  misc_feature (1)..(25): SEQ ID NO: 3494; WAN0249KV; Start 75; Stop 99
tttaagacgctaaacaaacactaga

SEQ ID NO: 357073 - DNA, 25 bp, Artificial
  probe
  misc_feature (1)..(25): SEQ ID NO: 3494; WAN0249KV; Start 3; Stop 27
tctctctcccttcctaccaatcatt

SEQ ID NO: 357074 - DNA, 25 bp, Artificial
  probe
  misc_feature (1)..(25): SEQ ID NO: 3494; WAN0249KV; Start 2; Stop 26
ttctctctcccttcctaccaatcat

SEQ ID NO: 357075 - DNA, 25 bp, Artificial
  probe
  misc_feature (1)..(25): SEQ ID NO: 3494; WAN0249KV; Start 73; Stop 97
tctttaagacgctaaacaaacacta

SEQ ID NO: 357076 - DNA, 25 bp, Artificial
  probe
  misc_feature (1)..(25): SEQ ID NO: 3494; WAN0249KV; Start 74; Stop 98
ctttaagacgctaaacaaacactag

SEQ ID NO: 357077 - DNA, 25 bp, Artificial
  probe
  misc_feature (1)..(25): SEQ ID NO: 3494; WAN0249KV; Start 10; Stop 34
cccttcctaccaatcattatactag

SEQ ID NO: 357078 - DNA, 25 bp, Artificial
  probe
  misc_feature (1)..(25): SEQ ID NO: 3494; WAN0249KV; Start 48; Stop 72
actgtttctaatcttctcaaatgtc

SEQ ID NO: 357079 - DNA, 25 bp, Artificial
  probe
  misc_feature (1)..(25): SEQ ID NO: 3494; WAN0249KV; Start 1; Stop 25
cttctctctcccttcctaccaatca

SEQ ID NO: 357080 - DNA, 25 bp, Artificial
  probe
  misc_feature (1)..(25): SEQ ID NO: 3494; WAN0249KV; Start 50; Stop 74
tgtttctaatcttctcaaatgtctc

SEQ ID NO: 357081 - DNA, 25 bp, Artificial
  probe
  misc_feature (1)..(25): SEQ ID NO: 3494; WAN0249KV; Start 49; Stop 73
ctgtttctaatcttctcaaatgtct

SEQ ID NO: 357082 - DNA, 25 bp, Artificial
  probe
  misc_feature (1)..(25): SEQ ID NO: 3494; WAN0249KV; Start 47; Stop 71
aactgtttctaatcttctcaaatgt

SEQ ID NO: 357083 - DNA, 25 bp, Artificial
  probe
  misc_feature (1)..(25): SEQ ID NO: 3494; WAN0249KV; Start 11; Stop 35
ccttcctaccaatcattatactagg

SEQ ID NO: 357084 - DNA, 25 bp, Artificial
  probe
  misc_feature (1)..(25): SEQ ID NO: 3494; WAN0249KV; Start 51; Stop 75
gtttctaatcttctcaaatgtctct

SEQ ID NO: 357085 - DNA, 25 bp, Artificial
  probe
  misc_feature (1)..(25): SEQ ID NO: 3494; WAN0249KV; Start 30; Stop 54
actaggagaaaagagagaactgttt

SEQ ID NO: 357086 - DNA, 25 bp, Artificial
  probe
  misc_feature (1)..(25): SEQ ID NO: 3494; WAN0249KV; Start 46; Stop 70
gaactgtttctaatcttctcaaatg

SEQ ID NO: 357087 - DNA, 25 bp, Artificial
  probe
  misc_feature (1)..(25): SEQ ID NO: 3494; WAN0249KV; Start 15; Stop 39
cctaccaatcattatactaggagaa

SEQ ID NO: 357088 - DNA, 25 bp, Artificial
  probe
  misc_feature (1)..(25): SEQ ID NO: 3494; WAN0249KV; Start 53; Stop 77
ttctaatcttctcaaatgtctcttt

SEQ ID NO: 357089 - DNA, 25 bp, Artificial
  probe
  misc_feature (1)..(25): SEQ ID NO: 3494; WAN0249KV; Start 52; Stop 76
tttctaatcttctcaaatgtctctt

SEQ ID NO: 357090 - DNA, 25 bp, Artificial
  probe
  misc_feature (1)..(25): SEQ ID NO: 3494; WAN0249KV; Start 29; Stop 53
tactaggagaaaagagagaactgtt

SEQ ID NO: 357091 - DNA, 25 bp, Artificial
  probe
  misc_feature (1)..(25): SEQ ID NO: 3495; WAN024A9J; Start 162; Stop 186
ctcaatacctcaatagacttcctgc

SEQ ID NO: 357092 - DNA, 25 bp, Artificial
  probe
  misc_feature (1)..(25): SEQ ID NO: 3495; WAN024A9J; Start 161; Stop 185
gctcaatacctcaatagacttcctg

SEQ ID NO: 357093 - DNA, 25 bp, Artificial
  probe
  misc_feature (1)..(25): SEQ ID NO: 3495; WAN024A9J; Start 159; Stop 183
tagctcaatacctcaatagacttcc

SEQ ID NO: 357094 - DNA, 25 bp, Artificial
  probe
  misc_feature (1)..(25): SEQ ID NO: 3495; WAN024A9J; Start 160; Stop 184
agctcaatacctcaatagacttcct

SEQ ID NO: 357095 - DNA, 25 bp, Artificial
  probe
  misc_feature (1)..(25): SEQ ID NO: 3495; WAN024A9J; Start 157; Stop 181
actagctcaatacctcaatagactt

SEQ ID NO: 357096 - DNA, 25 bp, Artificial
  probe
  misc_feature (1)..(25): SEQ ID NO: 3495; WAN024A9J; Start 156; Stop 180
aactagctcaatacctcaatagact

SEQ ID NO: 357097 - DNA, 25 bp, Artificial
  probe
  misc_feature (1)..(25): SEQ ID NO: 3495; WAN024A9J; Start 164; Stop 188
caatacctcaatagacttcctgcaa

SEQ ID NO: 357098 - DNA, 25 bp, Artificial
  probe
  misc_feature (1)..(25): SEQ ID NO: 3495; WAN024A9J; Start 158; Stop 182
ctagctcaatacctcaatagacttc

SEQ ID NO: 357099 - DNA, 25 bp, Artificial
  probe
  misc_feature (1)..(25): SEQ ID NO: 3495; WAN024A9J; Start 163; Stop 187
tcaatacctcaatagacttcctgca

SEQ ID NO: 357100 - DNA, 25 bp, Artificial
  probe
  misc_feature (1)..(25): SEQ ID NO: 3495; WAN024A9J; Start 94; Stop 118
gaaactagaatactacactgtgggt

SEQ ID NO: 357101 - DNA, 25 bp, Artificial
  probe
  misc_feature (1)..(25): SEQ ID NO: 3495; WAN024A9J; Start 93; Stop 117
tgaaactagaatactacactgtggg

SEQ ID NO: 357102 - DNA, 25 bp, Artificial
  probe
  misc_feature (1)..(25): SEQ ID NO: 3495; WAN024A9J; Start 97; Stop 121
actagaatactacactgtgggtttc

SEQ ID NO: 357103 - DNA, 25 bp, Artificial
  probe
  misc_feature (1)..(25): SEQ ID NO: 3495; WAN024A9J; Start 96; Stop 120
aactagaatactacactgtgggttt

SEQ ID NO: 357104 - DNA, 25 bp, Artificial
  probe
  misc_feature (1)..(25): SEQ ID NO: 3495; WAN024A9J; Start 95; Stop 119
aaactagaatactacactgtgggtt

SEQ ID NO: 357105 - DNA, 25 bp, Artificial
  probe
  misc_feature (1)..(25): SEQ ID NO: 3495; WAN024A9J; Start 101; Stop 125
gaatactacactgtgggtttctaaa

SEQ ID NO: 357106 - DNA, 25 bp, Artificial
  probe
  misc_feature (1)..(25): SEQ ID NO: 3495; WAN024A9J; Start 92; Stop 116
ttgaaactagaatactacactgtgg

SEQ ID NO: 357107 - DNA, 25 bp, Artificial
  probe
  misc_feature (1)..(25): SEQ ID NO: 3495; WAN024A9J; Start 1; Stop 25
cttctcttccttactcttgaagtca

SEQ ID NO: 357108 - DNA, 25 bp, Artificial
  probe
  misc_feature (1)..(25): SEQ ID NO: 3495; WAN024A9J; Start 2; Stop 26
ttctcttccttactcttgaagtcaa

SEQ ID NO: 357109 - DNA, 25 bp, Artificial
  probe
  misc_feature (1)..(25): SEQ ID NO: 3495; WAN024A9J; Start 3; Stop 27
tctcttccttactcttgaagtcaat

SEQ ID NO: 357110 - DNA, 25 bp, Artificial
  probe
  misc_feature (1)..(25): SEQ ID NO: 3495; WAN024A9J; Start 165; Stop 189
aatacctcaatagacttcctgcaaa

SEQ ID NO: 357111 - DNA, 25 bp, Artificial
  probe
  misc_feature (1)..(25): SEQ ID NO: 3495; WAN024A9J; Start 155; Stop 179
aaactagctcaatacctcaatagac

SEQ ID NO: 357112 - DNA, 25 bp, Artificial
  probe
  misc_feature (1)..(25): SEQ ID NO: 3495; WAN024A9J; Start 88; Stop 112
tggattgaaactagaatactacact

SEQ ID NO: 357113 - DNA, 25 bp, Artificial
  probe
  misc_feature (1)..(25): SEQ ID NO: 3495; WAN024A9J; Start 98; Stop 122
ctagaatactacactgtgggtttct

SEQ ID NO: 357114 - DNA, 25 bp, Artificial
  probe
  misc_feature (1)..(25): SEQ ID NO: 3495; WAN024A9J; Start 89; Stop 113
ggattgaaactagaatactacactg

SEQ ID NO: 357115 - DNA, 25 bp, Artificial
  probe
  misc_feature (1)..(25): SEQ ID NO: 3495; WAN024A9J; Start 100; Stop 124
agaatactacactgtgggtttctaa

SEQ ID NO: 357116 - DNA, 25 bp, Artificial
  probe
  misc_feature (1)..(25): SEQ ID NO: 3495; WAN024A9J; Start 4; Stop 28
ctcttccttactcttgaagtcaata

SEQ ID NO: 357117 - DNA, 25 bp, Artificial
  probe
  misc_feature (1)..(25): SEQ ID NO: 3495; WAN024A9J; Start 150; Stop 174
ttcataaactagctcaatacctcaa

SEQ ID NO: 357118 - DNA, 25 bp, Artificial
  probe
  misc_feature (1)..(25): SEQ ID NO: 3495; WAN024A9J; Start 69; Stop 93
ggggagtagcaaaatatagtggatt

SEQ ID NO: 357119 - DNA, 25 bp, Artificial
  probe
  misc_feature (1)..(25): SEQ ID NO: 3495; WAN024A9J; Start 149; Stop 173
tttcataaactagctcaatacctca

SEQ ID NO: 357120 - DNA, 25 bp, Artificial
  probe
  misc_feature (1)..(25): SEQ ID NO: 3495; WAN024A9J; Start 86; Stop 110
agtggattgaaactagaatactaca

SEQ ID NO: 357121 - DNA, 25 bp, Artificial
  probe
  misc_feature (1)..(25): SEQ ID NO: 3495; WAN024A9J; Start 65; Stop 89
ttacggggagtagcaaaatatagtg

SEQ ID NO: 357122 - DNA, 25 bp, Artificial
  probe
  misc_feature (1)..(25): SEQ ID NO: 3495; WAN024A9J; Start 64; Stop 88
tttacggggagtagcaaaatatagt

SEQ ID NO: 357123 - DNA, 25 bp, Artificial
  probe
  misc_feature (1)..(25): SEQ ID NO: 3495; WAN024A9J; Start 47; Stop 71
tcagggaaaatagaaactttacggg

SEQ ID NO: 357124 - DNA, 25 bp, Artificial
  probe
  misc_feature (1)..(25): SEQ ID NO: 3496; WAN024CWN-3; Start 1609; Stop 1633
taagacgccagattataagcaagaa

SEQ ID NO: 357125 - DNA, 25 bp, Artificial
  probe
  misc_feature (1)..(25): SEQ ID NO: 3496; WAN024CWN-3; Start 1608; Stop 1632
gtaagacgccagattataagcaaga

SEQ ID NO: 357126 - DNA, 25 bp, Artificial
  probe
  misc_feature (1)..(25): SEQ ID NO: 3496; WAN024CWN-3; Start 1458; Stop 1482
aatatgcgacggataaccatctctt

SEQ ID NO: 357127 - DNA, 25 bp, Artificial
  probe
  misc_feature (1)..(25): SEQ ID NO: 3496; WAN024CWN-3; Start 627; Stop 651
caagtaatactcgtggtgattctgg

SEQ ID NO: 357128 - DNA, 25 bp, Artificial
  probe
  misc_feature (1)..(25): SEQ ID NO: 3496; WAN024CWN-3; Start 628; Stop 652
aagtaatactcgtggtgattctggt

SEQ ID NO: 357129 - DNA, 25 bp, Artificial
  probe
  misc_feature (1)..(25): SEQ ID NO: 3496; WAN024CWN-3; Start 626; Stop 650
gcaagtaatactcgtggtgattctg

SEQ ID NO: 357130 - DNA, 25 bp, Artificial
  probe
  misc_feature (1)..(25): SEQ ID NO: 3496; WAN024CWN-3; Start 1607; Stop 1631
ggtaagacgccagattataagcaag

SEQ ID NO: 357131 - DNA, 25 bp, Artificial
  probe
  misc_feature (1)..(25): SEQ ID NO: 3496; WAN024CWN-3; Start 1604; Stop 1628
caaggtaagacgccagattataagc

SEQ ID NO: 357132 - DNA, 25 bp, Artificial
  probe
  misc_feature (1)..(25): SEQ ID NO: 3496; WAN024CWN-3; Start 1606; Stop 1630
aggtaagacgccagattataagcaa

SEQ ID NO: 357133 - DNA, 25 bp, Artificial
  probe
  misc_feature (1)..(25): SEQ ID NO: 3496; WAN024CWN-3; Start 1605; Stop 1629
aaggtaagacgccagattataagca

SEQ ID NO: 357134 - DNA, 25 bp, Artificial
  probe
  misc_feature (1)..(25): SEQ ID NO: 3496; WAN024CWN-3; Start 629; Stop 653
agtaatactcgtggtgattctggtg

SEQ ID NO: 357135 - DNA, 25 bp, Artificial
  probe
  misc_feature (1)..(25): SEQ ID NO: 3496; WAN024CWN-3; Start 1459; Stop 1483
atatgcgacggataaccatctcttg

SEQ ID NO: 357136 - DNA, 25 bp, Artificial
  probe
  misc_feature (1)..(25): SEQ ID NO: 3496; WAN024CWN-3; Start 743; Stop 767
aatgctctgaagaactacttgccaa

SEQ ID NO: 357137 - DNA, 25 bp, Artificial
  probe
  misc_feature (1)..(25): SEQ ID NO: 3496; WAN024CWN-3; Start 1407; Stop 1431
taacagacaaagacaatcaagagga

SEQ ID NO: 357138 - DNA, 25 bp, Artificial
  probe
  misc_feature (1)..(25): SEQ ID NO: 3496; WAN024CWN-3; Start 603; Stop 627
taggtatctactcaactggaaatgc

SEQ ID NO: 357139 - DNA, 25 bp, Artificial
  probe
  misc_feature (1)..(25): SEQ ID NO: 3496; WAN024CWN-3; Start 1725; Stop 1749
ccctatctgctctctttgtagtaaa

SEQ ID NO: 357140 - DNA, 25 bp, Artificial
  probe
  misc_feature (1)..(25): SEQ ID NO: 3496; WAN024CWN-3; Start 1411; Stop 1435
agacaaagacaatcaagaggaagta

SEQ ID NO: 357141 - DNA, 25 bp, Artificial
  probe
  misc_feature (1)..(25): SEQ ID NO: 3496; WAN024CWN-3; Start 1408; Stop 1432
aacagacaaagacaatcaagaggaa

SEQ ID NO: 357142 - DNA, 25 bp, Artificial
  probe
  misc_feature (1)..(25): SEQ ID NO: 3496; WAN024CWN-3; Start 1412; Stop 1436
gacaaagacaatcaagaggaagtag

SEQ ID NO: 357143 - DNA, 25 bp, Artificial
  probe
  misc_feature (1)..(25): SEQ ID NO: 3496; WAN024CWN-3; Start 630; Stop 654
gtaatactcgtggtgattctggtgg

SEQ ID NO: 357144 - DNA, 25 bp, Artificial
  probe
  misc_feature (1)..(25): SEQ ID NO: 3496; WAN024CWN-3; Start 1397; Stop 1421
gctcagaaattaacagacaaagaca

SEQ ID NO: 357145 - DNA, 25 bp, Artificial
  probe
  misc_feature (1)..(25): SEQ ID NO: 3496; WAN024CWN-3; Start 1410; Stop 1434
cagacaaagacaatcaagaggaagt

SEQ ID NO: 357146 - DNA, 25 bp, Artificial
  probe
  misc_feature (1)..(25): SEQ ID NO: 3496; WAN024CWN-3; Start 1409; Stop 1433
acagacaaagacaatcaagaggaag

SEQ ID NO: 357147 - DNA, 25 bp, Artificial
  probe
  misc_feature (1)..(25): SEQ ID NO: 3496; WAN024CWN-3; Start 1394; Stop 1418
aaggctcagaaattaacagacaaag

SEQ ID NO: 357148 - DNA, 25 bp, Artificial
  probe
  misc_feature (1)..(25): SEQ ID NO: 3496; WAN024CWN-3; Start 1396; Stop 1420
ggctcagaaattaacagacaaagac

SEQ ID NO: 357149 - DNA, 25 bp, Artificial
  probe
  misc_feature (1)..(25): SEQ ID NO: 3496; WAN024CWN-3; Start 1395; Stop 1419
aggctcagaaattaacagacaaaga

SEQ ID NO: 357150 - DNA, 25 bp, Artificial
  probe
  misc_feature (1)..(25): SEQ ID NO: 3496; WAN024CWN-3; Start 1406; Stop 1430
ttaacagacaaagacaatcaagagg

SEQ ID NO: 357151 - DNA, 25 bp, Artificial
  probe
  misc_feature (1)..(25): SEQ ID NO: 3496; WAN024CWN-3; Start 1413; Stop 1437
acaaagacaatcaagaggaagtagc

SEQ ID NO: 357152 - DNA, 25 bp, Artificial
  probe
  misc_feature (1)..(25): SEQ ID NO: 3496; WAN024CWN-3; Start 631; Stop 655
taatactcgtggtgattctggtgga

SEQ ID NO: 357153 - DNA, 25 bp, Artificial
  probe
  misc_feature (1)..(25): SEQ ID NO: 3496; WAN024CWN-3; Start 397; Stop 421
gacctaccgtgtaacctttgaatac

SEQ ID NO: 357154 - DNA, 25 bp, Artificial
  probe
  misc_feature (1)..(25): SEQ ID NO: 3496; WAN024CWN-3; Start 396; Stop 420
agacctaccgtgtaacctttgaata

SEQ ID NO: 357155 - DNA, 25 bp, Artificial
  probe
  misc_feature (1)..(25): SEQ ID NO: 3496; WAN024CWN-3; Start 623; Stop 647
aatgcaagtaatactcgtggtgatt

SEQ ID NO: 357156 - DNA, 25 bp, Artificial
  probe
  misc_feature (1)..(25): SEQ ID NO: 3496; WAN024CWN-3; Start 67; Stop 91
agcaacttactttgatgaaattcgt

SEQ ID NO: 357157 - DNA, 25 bp, Artificial
  probe
  misc_feature (1)..(25): SEQ ID NO: 3497; WAN024ANP; Start 78; Stop 102
tgatttacttcaaacctgttgtgag

SEQ ID NO: 357158 - DNA, 25 bp, Artificial
  probe
  misc_feature (1)..(25): SEQ ID NO: 3497; WAN024ANP; Start 77; Stop 101
ctgatttacttcaaacctgttgtga

SEQ ID NO: 357159 - DNA, 25 bp, Artificial
  probe
  misc_feature (1)..(25): SEQ ID NO: 3497; WAN024ANP; Start 76; Stop 100
gctgatttacttcaaacctgttgtg

SEQ ID NO: 357160 - DNA, 25 bp, Artificial
  probe
  misc_feature (1)..(25): SEQ ID NO: 3497; WAN024ANP; Start 73; Stop 97
ttcgctgatttacttcaaacctgtt

SEQ ID NO: 357161 - DNA, 25 bp, Artificial
  probe
  misc_feature (1)..(25): SEQ ID NO: 3497; WAN024ANP; Start 72; Stop 96
tttcgctgatttacttcaaacctgt

SEQ ID NO: 357162 - DNA, 25 bp, Artificial
  probe
  misc_feature (1)..(25): SEQ ID NO: 3497; WAN024ANP; Start 79; Stop 103
gatttacttcaaacctgttgtgagg

SEQ ID NO: 357163 - DNA, 25 bp, Artificial
  probe
  misc_feature (1)..(25): SEQ ID NO: 3497; WAN024ANP; Start 74; Stop 98
tcgctgatttacttcaaacctgttg

SEQ ID NO: 357164 - DNA, 25 bp, Artificial
  probe
  misc_feature (1)..(25): SEQ ID NO: 3497; WAN024ANP; Start 75; Stop 99
cgctgatttacttcaaacctgttgt

SEQ ID NO: 357165 - DNA, 25 bp, Artificial
  probe
  misc_feature (1)..(25): SEQ ID NO: 3497; WAN024ANP; Start 67; Stop 91
agtagtttcgctgatttacttcaaa

SEQ ID NO: 357166 - DNA, 25 bp, Artificial
  probe
  misc_feature (1)..(25): SEQ ID NO: 3497; WAN024ANP; Start 98; Stop 122
gtgaggtaagttaacgatgccttaa

SEQ ID NO: 357167 - DNA, 25 bp, Artificial
  probe
  misc_feature (1)..(25): SEQ ID NO: 3497; WAN024ANP; Start 30; Stop 54
tctattgacaatgattctgaaagtg

SEQ ID NO: 357168 - DNA, 25 bp, Artificial
  probe
  misc_feature (1)..(25): SEQ ID NO: 3497; WAN024ANP; Start 93; Stop 117
ctgttgtgaggtaagttaacgatgc

SEQ ID NO: 357169 - DNA, 25 bp, Artificial
  probe
  misc_feature (1)..(25): SEQ ID NO: 3497; WAN024ANP; Start 69; Stop 93
tagtttcgctgatttacttcaaacc

SEQ ID NO: 357170 - DNA, 25 bp, Artificial
  probe
  misc_feature (1)..(25): SEQ ID NO: 3497; WAN024ANP; Start 31; Stop 55
ctattgacaatgattctgaaagtgt

SEQ ID NO: 357171 - DNA, 25 bp, Artificial
  probe
  misc_feature (1)..(25): SEQ ID NO: 3497; WAN024ANP; Start 92; Stop 116
cctgttgtgaggtaagttaacgatg

SEQ ID NO: 357172 - DNA, 25 bp, Artificial
  probe
  misc_feature (1)..(25): SEQ ID NO: 3497; WAN024ANP; Start 62; Stop 86
aagaaagtagtttcgctgatttact

SEQ ID NO: 357173 - DNA, 25 bp, Artificial
  probe
  misc_feature (1)..(25): SEQ ID NO: 3497; WAN024ANP; Start 59; Stop 83
actaagaaagtagtttcgctgattt

SEQ ID NO: 357174 - DNA, 25 bp, Artificial
  probe
  misc_feature (1)..(25): SEQ ID NO: 3497; WAN024ANP; Start 97; Stop 121
tgtgaggtaagttaacgatgcctta

SEQ ID NO: 357175 - DNA, 25 bp, Artificial
  probe
  misc_feature (1)..(25): SEQ ID NO: 3497; WAN024ANP; Start 68; Stop 92
gtagtttcgctgatttacttcaaac

SEQ ID NO: 357176 - DNA, 25 bp, Artificial
  probe
  misc_feature (1)..(25): SEQ ID NO: 3497; WAN024ANP; Start 71; Stop 95
gtttcgctgatttacttcaaacctg

SEQ ID NO: 357177 - DNA, 25 bp, Artificial
  probe
  misc_feature (1)..(25): SEQ ID NO: 3497; WAN024ANP; Start 70; Stop 94
agtttcgctgatttacttcaaacct

SEQ ID NO: 357178 - DNA, 25 bp, Artificial
  probe
  misc_feature (1)..(25): SEQ ID NO: 3497; WAN024ANP; Start 33; Stop 57
attgacaatgattctgaaagtgtta

SEQ ID NO: 357179 - DNA, 25 bp, Artificial
  probe
  misc_feature (1)..(25): SEQ ID NO: 3497; WAN024ANP; Start 32; Stop 56
tattgacaatgattctgaaagtgtt

SEQ ID NO: 357180 - DNA, 25 bp, Artificial
  probe
  misc_feature (1)..(25): SEQ ID NO: 3497; WAN024ANP; Start 29; Stop 53
ttctattgacaatgattctgaaagt

SEQ ID NO: 357181 - DNA, 25 bp, Artificial
  probe
  misc_feature (1)..(25): SEQ ID NO: 3497; WAN024ANP; Start 96; Stop 120
ttgtgaggtaagttaacgatgcctt

SEQ ID NO: 357182 - DNA, 25 bp, Artificial
  probe
  misc_feature (1)..(25): SEQ ID NO: 3497; WAN024ANP; Start 94; Stop 118
tgttgtgaggtaagttaacgatgcc

SEQ ID NO: 357183 - DNA, 25 bp, Artificial
  probe
  misc_feature (1)..(25): SEQ ID NO: 3497; WAN024ANP; Start 61; Stop 85
taagaaagtagtttcgctgatttac

SEQ ID NO: 357184 - DNA, 25 bp, Artificial
  probe
  misc_feature (1)..(25): SEQ ID NO: 3497; WAN024ANP; Start 60; Stop 84
ctaagaaagtagtttcgctgattta

SEQ ID NO: 357185 - DNA, 25 bp, Artificial
  probe
  misc_feature (1)..(25): SEQ ID NO: 3497; WAN024ANP; Start 95; Stop 119
gttgtgaggtaagttaacgatgcct

SEQ ID NO: 357186 - DNA, 25 bp, Artificial
  probe
  misc_feature (1)..(25): SEQ ID NO: 3497; WAN024ANP; Start 99; Stop 123
tgaggtaagttaacgatgccttaac

SEQ ID NO: 357187 - DNA, 25 bp, Artificial
  probe
  misc_feature (1)..(25): SEQ ID NO: 3497; WAN024ANP; Start 100; Stop 124
gaggtaagttaacgatgccttaacc

SEQ ID NO: 357188 - DNA, 25 bp, Artificial
  probe
  misc_feature (1)..(25): SEQ ID NO: 3497; WAN024ANP; Start 66; Stop 90
aagtagtttcgctgatttacttcaa

SEQ ID NO: 357189 - DNA, 25 bp, Artificial
  probe
  misc_feature (1)..(25): SEQ ID NO: 3497; WAN024ANP; Start 65; Stop 89
aaagtagtttcgctgatttacttca

SEQ ID NO: 357190 - DNA, 25 bp, Artificial
  probe
  misc_feature (1)..(25): SEQ ID NO: 3499; WAN024FGO; Start 251; Stop 275
cagacctaccaacccaatatgtttg

SEQ ID NO: 357191 - DNA, 25 bp, Artificial
  probe
  misc_feature (1)..(25): SEQ ID NO: 3499; WAN024FGO; Start 252; Stop 276
agacctaccaacccaatatgtttgt

SEQ ID NO: 357192 - DNA, 25 bp, Artificial
  probe
  misc_feature (1)..(25): SEQ ID NO: 3499; WAN024FGO; Start 253; Stop 277
gacctaccaacccaatatgtttgtc

SEQ ID NO: 357193 - DNA, 25 bp, Artificial
  probe
  misc_feature (1)..(25): SEQ ID NO: 3499; WAN024FGO; Start 138; Stop 162
ccatcaattcttggtatactcaggc

SEQ ID NO: 357194 - DNA, 25 bp, Artificial
  probe
  misc_feature (1)..(25): SEQ ID NO: 3499; WAN024FGO; Start 139; Stop 163
catcaattcttggtatactcaggcc

SEQ ID NO: 357195 - DNA, 25 bp, Artificial
  probe
  misc_feature (1)..(25): SEQ ID NO: 3499; WAN024FGO; Start 250; Stop 274
gcagacctaccaacccaatatgttt

SEQ ID NO: 357196 - DNA, 25 bp, Artificial
  probe
  misc_feature (1)..(25): SEQ ID NO: 3499; WAN024FGO; Start 254; Stop 278
acctaccaacccaatatgtttgtcg

SEQ ID NO: 357197 - DNA, 25 bp, Artificial
  probe
  misc_feature (1)..(25): SEQ ID NO: 3499; WAN024FGO; Start 7; Stop 31
aacggtaaccaatgtctttgttcca

SEQ ID NO: 357198 - DNA, 25 bp, Artificial
  probe
  misc_feature (1)..(25): SEQ ID NO: 3499; WAN024FGO; Start 131; Stop 155
tcagctcccatcaattcttggtata

SEQ ID NO: 357199 - DNA, 25 bp, Artificial
  probe
  misc_feature (1)..(25): SEQ ID NO: 3499; WAN024FGO; Start 136; Stop 160
tcccatcaattcttggtatactcag

SEQ ID NO: 357200 - DNA, 25 bp, Artificial
  probe
  misc_feature (1)..(25): SEQ ID NO: 3499; WAN024FGO; Start 135; Stop 159
ctcccatcaattcttggtatactca

SEQ ID NO: 357201 - DNA, 25 bp, Artificial
  probe
  misc_feature (1)..(25): SEQ ID NO: 3499; WAN024FGO; Start 8; Stop 32
acggtaaccaatgtctttgttccag

SEQ ID NO: 357202 - DNA, 25 bp, Artificial
  probe
  misc_feature (1)..(25): SEQ ID NO: 3499; WAN024FGO; Start 137; Stop 161
cccatcaattcttggtatactcagg

SEQ ID NO: 357203 - DNA, 25 bp, Artificial
  probe
  misc_feature (1)..(25): SEQ ID NO: 3499; WAN024FGO; Start 255; Stop 279
cctaccaacccaatatgtttgtcgg

SEQ ID NO: 357204 - DNA, 25 bp, Artificial
  probe
  misc_feature (1)..(25): SEQ ID NO: 3499; WAN024FGO; Start 134; Stop 158
gctcccatcaattcttggtatactc

SEQ ID NO: 357205 - DNA, 25 bp, Artificial
  probe
  misc_feature (1)..(25): SEQ ID NO: 3499; WAN024FGO; Start 130; Stop 154
ttcagctcccatcaattcttggtat

SEQ ID NO: 357206 - DNA, 25 bp, Artificial
  probe
  misc_feature (1)..(25): SEQ ID NO: 3499; WAN024FGO; Start 71; Stop 95
gaaaatggagtcttgtcaggaaacc

SEQ ID NO: 357207 - DNA, 25 bp, Artificial
  probe
  misc_feature (1)..(25): SEQ ID NO: 3499; WAN024FGO; Start 70; Stop 94
ggaaaatggagtcttgtcaggaaac

SEQ ID NO: 357208 - DNA, 25 bp, Artificial
  probe
  misc_feature (1)..(25): SEQ ID NO: 3499; WAN024FGO; Start 17; Stop 41
aatgtctttgttccaggttcggttg

SEQ ID NO: 357209 - DNA, 25 bp, Artificial
  probe
  misc_feature (1)..(25): SEQ ID NO: 3499; WAN024FGO; Start 73; Stop 97
aaatggagtcttgtcaggaaaccag

SEQ ID NO: 357210 - DNA, 25 bp, Artificial
  probe
  misc_feature (1)..(25): SEQ ID NO: 3499; WAN024FGO; Start 133; Stop 157
agctcccatcaattcttggtatact

SEQ ID NO: 357211 - DNA, 25 bp, Artificial
  probe
  misc_feature (1)..(25): SEQ ID NO: 3499; WAN024FGO; Start 132; Stop 156
cagctcccatcaattcttggtatac

SEQ ID NO: 357212 - DNA, 25 bp, Artificial
  probe
  misc_feature (1)..(25): SEQ ID NO: 3499; WAN024FGO; Start 4; Stop 28
gggaacggtaaccaatgtctttgtt

SEQ ID NO: 357213 - DNA, 25 bp, Artificial
  probe
  misc_feature (1)..(25): SEQ ID NO: 3499; WAN024FGO; Start 10; Stop 34
ggtaaccaatgtctttgttccaggt

SEQ ID NO: 357214 - DNA, 25 bp, Artificial
  probe
  misc_feature (1)..(25): SEQ ID NO: 3499; WAN024FGO; Start 125; Stop 149
caaggttcagctcccatcaattctt

SEQ ID NO: 357215 - DNA, 25 bp, Artificial
  probe
  misc_feature (1)..(25): SEQ ID NO: 3499; WAN024FGO; Start 16; Stop 40
caatgtctttgttccaggttcggtt

SEQ ID NO: 357216 - DNA, 25 bp, Artificial
  probe
  misc_feature (1)..(25): SEQ ID NO: 3499; WAN024FGO; Start 126; Stop 150
aaggttcagctcccatcaattcttg

SEQ ID NO: 357217 - DNA, 25 bp, Artificial
  probe
  misc_feature (1)..(25): SEQ ID NO: 3499; WAN024FGO; Start 200; Stop 224
gagtattcttcgaatgcctacatgg

SEQ ID NO: 357218 - DNA, 25 bp, Artificial
  probe
  misc_feature (1)..(25): SEQ ID NO: 3499; WAN024FGO; Start 199; Stop 223
ggagtattcttcgaatgcctacatg

SEQ ID NO: 357219 - DNA, 25 bp, Artificial
  probe
  misc_feature (1)..(25): SEQ ID NO: 3499; WAN024FGO; Start 196; Stop 220
cttggagtattcttcgaatgcctac

SEQ ID NO: 357220 - DNA, 25 bp, Artificial
  probe
  misc_feature (1)..(25): SEQ ID NO: 3499; WAN024FGO; Start 256; Stop 280
ctaccaacccaatatgtttgtcggc

SEQ ID NO: 357221 - DNA, 25 bp, Artificial
  probe
  misc_feature (1)..(25): SEQ ID NO: 3499; WAN024FGO; Start 129; Stop 153
gttcagctcccatcaattcttggta

SEQ ID NO: 357222 - DNA, 25 bp, Artificial
  probe
  misc_feature (1)..(25): SEQ ID NO: 3499; WAN024FGO; Start 290; Stop 314
ctagagtctgctatggggaaattcg

SEQ ID NO: 357223 - DNA, 25 bp, Artificial
  probe
  misc_feature (1)..(25): SEQ ID NO: 3500; WAN0249IC; Start 12; Stop 36
aaagagaagagttggagaaatccag

SEQ ID NO: 357224 - DNA, 25 bp, Artificial
  probe
  misc_feature (1)..(25): SEQ ID NO: 3500; WAN0249IC; Start 13; Stop 37
aagagaagagttggagaaatccagc

SEQ ID NO: 357225 - DNA, 25 bp, Artificial
  probe
  misc_feature (1)..(25): SEQ ID NO: 3500; WAN0249IC; Start 32; Stop 56
tccagctcttttaaaatatctccaa

SEQ ID NO: 357226 - DNA, 25 bp, Artificial
  probe
  misc_feature (1)..(25): SEQ ID NO: 3500; WAN0249IC; Start 31; Stop 55
atccagctcttttaaaatatctcca

SEQ ID NO: 357227 - DNA, 25 bp, Artificial
  probe
  misc_feature (1)..(25): SEQ ID NO: 3500; WAN0249IC; Start 15; Stop 39
gagaagagttggagaaatccagctc

SEQ ID NO: 357228 - DNA, 25 bp, Artificial
  probe
  misc_feature (1)..(25): SEQ ID NO: 3500; WAN0249IC; Start 33; Stop 57
ccagctcttttaaaatatctccaaa

SEQ ID NO: 357229 - DNA, 25 bp, Artificial
  probe
  misc_feature (1)..(25): SEQ ID NO: 3500; WAN0249IC; Start 16; Stop 40
agaagagttggagaaatccagctct

SEQ ID NO: 357230 - DNA, 25 bp, Artificial
  probe
  misc_feature (1)..(25): SEQ ID NO: 3500; WAN0249IC; Start 14; Stop 38
agagaagagttggagaaatccagct

SEQ ID NO: 357231 - DNA, 25 bp, Artificial
  probe
  misc_feature (1)..(25): SEQ ID NO: 3500; WAN0249IC; Start 11; Stop 35
aaaagagaagagttggagaaatcca

SEQ ID NO: 357232 - DNA, 25 bp, Artificial
  probe
  misc_feature (1)..(25): SEQ ID NO: 3500; WAN0249IC; Start 22; Stop 46
gttggagaaatccagctcttttaaa

SEQ ID NO: 357233 - DNA, 25 bp, Artificial
  probe
  misc_feature (1)..(25): SEQ ID NO: 3500; WAN0249IC; Start 21; Stop 45
agttggagaaatccagctcttttaa

SEQ ID NO: 357234 - DNA, 25 bp, Artificial
  probe
  misc_feature (1)..(25): SEQ ID NO: 3500; WAN0249IC; Start 20; Stop 44
gagttggagaaatccagctctttta

SEQ ID NO: 357235 - DNA, 25 bp, Artificial
  probe
  misc_feature (1)..(25): SEQ ID NO: 3500; WAN0249IC; Start 30; Stop 54
aatccagctcttttaaaatatctcc

SEQ ID NO: 357236 - DNA, 25 bp, Artificial
  probe
  misc_feature (1)..(25): SEQ ID NO: 3500; WAN0249IC; Start 19; Stop 43
agagttggagaaatccagctctttt

SEQ ID NO: 357237 - DNA, 25 bp, Artificial
  probe
  misc_feature (1)..(25): SEQ ID NO: 3500; WAN0249IC; Start 25; Stop 49
ggagaaatccagctcttttaaaata

SEQ ID NO: 357238 - DNA, 25 bp, Artificial
  probe
  misc_feature (1)..(25): SEQ ID NO: 3500; WAN0249IC; Start 34; Stop 58
cagctcttttaaaatatctccaaaa

SEQ ID NO: 357239 - DNA, 25 bp, Artificial
  probe
  misc_feature (1)..(25): SEQ ID NO: 3500; WAN0249IC; Start 29; Stop 53
aaatccagctcttttaaaatatctc

SEQ ID NO: 357240 - DNA, 25 bp, Artificial
  probe
  misc_feature (1)..(25): SEQ ID NO: 3500; WAN0249IC; Start 28; Stop 52
gaaatccagctcttttaaaatatct

SEQ ID NO: 357241 - DNA, 25 bp, Artificial
  probe
  misc_feature (1)..(25): SEQ ID NO: 3500; WAN0249IC; Start 27; Stop 51
agaaatccagctcttttaaaatatc

SEQ ID NO: 357242 - DNA, 25 bp, Artificial
  probe
  misc_feature (1)..(25): SEQ ID NO: 3500; WAN0249IC; Start 23; Stop 47
ttggagaaatccagctcttttaaaa

SEQ ID NO: 357243 - DNA, 25 bp, Artificial
  probe
  misc_feature (1)..(25): SEQ ID NO: 3500; WAN0249IC; Start 24; Stop 48
tggagaaatccagctcttttaaaat

SEQ ID NO: 357244 - DNA, 25 bp, Artificial
  probe
  misc_feature (1)..(25): SEQ ID NO: 3500; WAN0249IC; Start 26; Stop 50
gagaaatccagctcttttaaaatat

SEQ ID NO: 357245 - DNA, 25 bp, Artificial
  probe
  misc_feature (1)..(25): SEQ ID NO: 3501; WAN024A3A; Start 1; Stop 25
cttgttactcttttctcaatccagc

SEQ ID NO: 357246 - DNA, 25 bp, Artificial
  probe
  misc_feature (1)..(25): SEQ ID NO: 3501; WAN024A3A; Start 3; Stop 27
tgttactcttttctcaatccagcta

SEQ ID NO: 357247 - DNA, 25 bp, Artificial
  probe
  misc_feature (1)..(25): SEQ ID NO: 3501; WAN024A3A; Start 4; Stop 28
gttactcttttctcaatccagctaa

SEQ ID NO: 357248 - DNA, 25 bp, Artificial
  probe
  misc_feature (1)..(25): SEQ ID NO: 3501; WAN024A3A; Start 2; Stop 26
ttgttactcttttctcaatccagct

SEQ ID NO: 357249 - DNA, 25 bp, Artificial
  probe
  misc_feature (1)..(25): SEQ ID NO: 3501; WAN024A3A; Start 12; Stop 36
tttctcaatccagctaaaatgtgat

SEQ ID NO: 357250 - DNA, 25 bp, Artificial
  probe
  misc_feature (1)..(25): SEQ ID NO: 3501; WAN024A3A; Start 5; Stop 29
ttactcttttctcaatccagctaaa

SEQ ID NO: 357251 - DNA, 25 bp, Artificial
  probe
  misc_feature (1)..(25): SEQ ID NO: 3501; WAN024A3A; Start 13; Stop 37
ttctcaatccagctaaaatgtgata

SEQ ID NO: 357252 - DNA, 25 bp, Artificial
  probe
  misc_feature (1)..(25): SEQ ID NO: 3501; WAN024A3A; Start 11; Stop 35
ttttctcaatccagctaaaatgtga

SEQ ID NO: 357253 - DNA, 25 bp, Artificial
  probe
  misc_feature (1)..(25): SEQ ID NO: 3501; WAN024A3A; Start 10; Stop 34
cttttctcaatccagctaaaatgtg

SEQ ID NO: 357254 - DNA, 25 bp, Artificial
  probe
  misc_feature (1)..(25): SEQ ID NO: 3501; WAN024A3A; Start 9; Stop 33
tcttttctcaatccagctaaaatgt

SEQ ID NO: 357255 - DNA, 25 bp, Artificial
  probe
  misc_feature (1)..(25): SEQ ID NO: 3501; WAN024A3A; Start 14; Stop 38
tctcaatccagctaaaatgtgatat

SEQ ID NO: 357256 - DNA, 25 bp, Artificial
  probe
  misc_feature (1)..(25): SEQ ID NO: 3501; WAN024A3A; Start 7; Stop 31
actcttttctcaatccagctaaaat

SEQ ID NO: 357257 - DNA, 25 bp, Artificial
  probe
  misc_feature (1)..(25): SEQ ID NO: 3501; WAN024A3A; Start 8; Stop 32
ctcttttctcaatccagctaaaatg

SEQ ID NO: 357258 - DNA, 25 bp, Artificial
  probe
  misc_feature (1)..(25): SEQ ID NO: 3501; WAN024A3A; Start 6; Stop 30
tactcttttctcaatccagctaaaa

SEQ ID NO: 357259 - DNA, 25 bp, Artificial
  probe
  misc_feature (1)..(25): SEQ ID NO: 3501; WAN024A3A; Start 15; Stop 39
ctcaatccagctaaaatgtgatata

SEQ ID NO: 357260 - DNA, 25 bp, Artificial
  probe
  misc_feature (1)..(25): SEQ ID NO: 3501; WAN024A3A; Start 16; Stop 40
tcaatccagctaaaatgtgatataa

SEQ ID NO: 357261 - DNA, 25 bp, Artificial
  probe
  misc_feature (1)..(25): SEQ ID NO: 3501; WAN024A3A; Start 20; Stop 44
tccagctaaaatgtgatataatagt

SEQ ID NO: 357262 - DNA, 25 bp, Artificial
  probe
  misc_feature (1)..(25): SEQ ID NO: 3501; WAN024A3A; Start 17; Stop 41
caatccagctaaaatgtgatataat

SEQ ID NO: 357263 - DNA, 25 bp, Artificial
  probe
  misc_feature (1)..(25): SEQ ID NO: 3502; WAN024APO; Start 13; Stop 37
gtctttgaatgtctaggtgtggtag

SEQ ID NO: 357264 - DNA, 25 bp, Artificial
  probe
  misc_feature (1)..(25): SEQ ID NO: 3502; WAN024APO; Start 12; Stop 36
tgtctttgaatgtctaggtgtggta

SEQ ID NO: 357265 - DNA, 25 bp, Artificial
  probe
  misc_feature (1)..(25): SEQ ID NO: 3502; WAN024APO; Start 10; Stop 34
cttgtctttgaatgtctaggtgtgg

SEQ ID NO: 357266 - DNA, 25 bp, Artificial
  probe
  misc_feature (1)..(25): SEQ ID NO: 3502; WAN024APO; Start 11; Stop 35
ttgtctttgaatgtctaggtgtggt

SEQ ID NO: 357267 - DNA, 25 bp, Artificial
  probe
  misc_feature (1)..(25): SEQ ID NO: 3502; WAN024APO; Start 6; Stop 30
tttccttgtctttgaatgtctaggt

SEQ ID NO: 357268 - DNA, 25 bp, Artificial
  probe
  misc_feature (1)..(25): SEQ ID NO: 3502; WAN024APO; Start 7; Stop 31
ttccttgtctttgaatgtctaggtg

SEQ ID NO: 357269 - DNA, 25 bp, Artificial
  probe
  misc_feature (1)..(25): SEQ ID NO: 3502; WAN024APO; Start 14; Stop 38
tctttgaatgtctaggtgtggtagc

SEQ ID NO: 357270 - DNA, 25 bp, Artificial
  probe
  misc_feature (1)..(25): SEQ ID NO: 3502; WAN024APO; Start 5; Stop 29
atttccttgtctttgaatgtctagg

SEQ ID NO: 357271 - DNA, 25 bp, Artificial
  probe
  misc_feature (1)..(25): SEQ ID NO: 3502; WAN024APO; Start 9; Stop 33
ccttgtctttgaatgtctaggtgtg

SEQ ID NO: 357272 - DNA, 25 bp, Artificial
  probe
  misc_feature (1)..(25): SEQ ID NO: 3502; WAN024APO; Start 8; Stop 32
tccttgtctttgaatgtctaggtgt

SEQ ID NO: 357273 - DNA, 25 bp, Artificial
  probe
  misc_feature (1)..(25): SEQ ID NO: 3502; WAN024APO; Start 2; Stop 26
tttatttccttgtctttgaatgtct

SEQ ID NO: 357274 - DNA, 25 bp, Artificial
  probe
  misc_feature (1)..(25): SEQ ID NO: 3502; WAN024APO; Start 17; Stop 41
ttgaatgtctaggtgtggtagcttt

SEQ ID NO: 357275 - DNA, 25 bp, Artificial
  probe
  misc_feature (1)..(25): SEQ ID NO: 3502; WAN024APO; Start 16; Stop 40
tttgaatgtctaggtgtggtagctt

SEQ ID NO: 357276 - DNA, 25 bp, Artificial
  probe
  misc_feature (1)..(25): SEQ ID NO: 3502; WAN024APO; Start 1; Stop 25
ctttatttccttgtctttgaatgtc

SEQ ID NO: 357277 - DNA, 25 bp, Artificial
  probe
  misc_feature (1)..(25): SEQ ID NO: 3502; WAN024APO; Start 15; Stop 39
ctttgaatgtctaggtgtggtagct

SEQ ID NO: 357278 - DNA, 25 bp, Artificial
  probe
  misc_feature (1)..(25): SEQ ID NO: 3502; WAN024APO; Start 4; Stop 28
tatttccttgtctttgaatgtctag

SEQ ID NO: 357279 - DNA, 25 bp, Artificial
  probe
  misc_feature (1)..(25): SEQ ID NO: 3502; WAN024APO; Start 41; Stop 65
tttacattctgatagattcgagtca

SEQ ID NO: 357280 - DNA, 25 bp, Artificial
  probe
  misc_feature (1)..(25): SEQ ID NO: 3502; WAN024APO; Start 3; Stop 27
ttatttccttgtctttgaatgtcta

SEQ ID NO: 357281 - DNA, 25 bp, Artificial
  probe
  misc_feature (1)..(25): SEQ ID NO: 3502; WAN024APO; Start 18; Stop 42
tgaatgtctaggtgtggtagctttt

SEQ ID NO: 357282 - DNA, 25 bp, Artificial
  probe
  misc_feature (1)..(25): SEQ ID NO: 3502; WAN024APO; Start 40; Stop 64
ttttacattctgatagattcgagtc

SEQ ID NO: 357283 - DNA, 25 bp, Artificial
  probe
  misc_feature (1)..(25): SEQ ID NO: 3503; WAN0249J3; Start 1; Stop 25
ctttcaacaaacctattatacaact

SEQ ID NO: 357284 - DNA, 25 bp, Artificial
  probe
  misc_feature (1)..(25): SEQ ID NO: 3503; WAN0249J3; Start 26; Stop 50
atttgagttgaattgcaagtatggc

SEQ ID NO: 357285 - DNA, 25 bp, Artificial
  probe
  misc_feature (1)..(25): SEQ ID NO: 3503; WAN0249J3; Start 25; Stop 49
tatttgagttgaattgcaagtatgg

SEQ ID NO: 357286 - DNA, 25 bp, Artificial
  probe
  misc_feature (1)..(25): SEQ ID NO: 3503; WAN0249J3; Start 27; Stop 51
tttgagttgaattgcaagtatggcc

SEQ ID NO: 357287 - DNA, 25 bp, Artificial
  probe
  misc_feature (1)..(25): SEQ ID NO: 3503; WAN0249J3; Start 23; Stop 47
actatttgagttgaattgcaagtat

SEQ ID NO: 357288 - DNA, 25 bp, Artificial
  probe
  misc_feature (1)..(25): SEQ ID NO: 3503; WAN0249J3; Start 24; Stop 48
ctatttgagttgaattgcaagtatg

SEQ ID NO: 357289 - DNA, 25 bp, Artificial
  probe
  misc_feature (1)..(25): SEQ ID NO: 3503; WAN0249J3; Start 22; Stop 46
aactatttgagttgaattgcaagta

SEQ ID NO: 357290 - DNA, 25 bp, Artificial
  probe
  misc_feature (1)..(25): SEQ ID NO: 3504; WAN024A3H; Start 282; Stop 306
agaaggaactagaacatctgtcttg

SEQ ID NO: 357291 - DNA, 25 bp, Artificial
  probe
  misc_feature (1)..(25): SEQ ID NO: 3504; WAN024A3H; Start 283; Stop 307
gaaggaactagaacatctgtcttgt

SEQ ID NO: 357292 - DNA, 25 bp, Artificial
  probe
  misc_feature (1)..(25): SEQ ID NO: 3504; WAN024A3H; Start 284; Stop 308
aaggaactagaacatctgtcttgta

SEQ ID NO: 357293 - DNA, 25 bp, Artificial
  probe
  misc_feature (1)..(25): SEQ ID NO: 3504; WAN024A3H; Start 286; Stop 310
ggaactagaacatctgtcttgtact

SEQ ID NO: 357294 - DNA, 25 bp, Artificial
  probe
  misc_feature (1)..(25): SEQ ID NO: 3504; WAN024A3H; Start 285; Stop 309
aggaactagaacatctgtcttgtac

SEQ ID NO: 357295 - DNA, 25 bp, Artificial
  probe
  misc_feature (1)..(25): SEQ ID NO: 3504; WAN024A3H; Start 298; Stop 322
tctgtcttgtactaatcaatatgct

SEQ ID NO: 357296 - DNA, 25 bp, Artificial
  probe
  misc_feature (1)..(25): SEQ ID NO: 3504; WAN024A3H; Start 3; Stop 27
ttcatcattccttatacaactatgc

SEQ ID NO: 357297 - DNA, 25 bp, Artificial
  probe
  misc_feature (1)..(25): SEQ ID NO: 3504; WAN024A3H; Start 281; Stop 305
aagaaggaactagaacatctgtctt

SEQ ID NO: 357298 - DNA, 25 bp, Artificial
  probe
  misc_feature (1)..(25): SEQ ID NO: 3504; WAN024A3H; Start 292; Stop 316
agaacatctgtcttgtactaatcaa

SEQ ID NO: 357299 - DNA, 25 bp, Artificial
  probe
  misc_feature (1)..(25): SEQ ID NO: 3504; WAN024A3H; Start 280; Stop 304
aaagaaggaactagaacatctgtct

SEQ ID NO: 357300 - DNA, 25 bp, Artificial
  probe
  misc_feature (1)..(25): SEQ ID NO: 3504; WAN024A3H; Start 287; Stop 311
gaactagaacatctgtcttgtacta

SEQ ID NO: 357301 - DNA, 25 bp, Artificial
  probe
  misc_feature (1)..(25): SEQ ID NO: 3504; WAN024A3H; Start 157; Stop 181
aacaacagctaggattacactataa

SEQ ID NO: 357302 - DNA, 25 bp, Artificial
  probe
  misc_feature (1)..(25): SEQ ID NO: 3504; WAN024A3H; Start 155; Stop 179
ttaacaacagctaggattacactat

SEQ ID NO: 357303 - DNA, 25 bp, Artificial
  probe
  misc_feature (1)..(25): SEQ ID NO: 3504; WAN024A3H; Start 273; Stop 297
ccagattaaagaaggaactagaaca

SEQ ID NO: 357304 - DNA, 25 bp, Artificial
  probe
  misc_feature (1)..(25): SEQ ID NO: 3504; WAN024A3H; Start 272; Stop 296
accagattaaagaaggaactagaac

SEQ ID NO: 357305 - DNA, 25 bp, Artificial
  probe
  misc_feature (1)..(25): SEQ ID NO: 3504; WAN024A3H; Start 267; Stop 291
actaaaccagattaaagaaggaact

SEQ ID NO: 357306 - DNA, 25 bp, Artificial
  probe
  misc_feature (1)..(25): SEQ ID NO: 3504; WAN024A3H; Start 4; Stop 28
tcatcattccttatacaactatgca

SEQ ID NO: 357307 - DNA, 25 bp, Artificial
  probe
  misc_feature (1)..(25): SEQ ID NO: 3504; WAN024A3H; Start 288; Stop 312
aactagaacatctgtcttgtactaa

SEQ ID NO: 357308 - DNA, 25 bp, Artificial
  probe
  misc_feature (1)..(25): SEQ ID NO: 3504; WAN024A3H; Start 5; Stop 29
catcattccttatacaactatgcag

SEQ ID NO: 357309 - DNA, 25 bp, Artificial
  probe
  misc_feature (1)..(25): SEQ ID NO: 3504; WAN024A3H; Start 297; Stop 321
atctgtcttgtactaatcaatatgc

SEQ ID NO: 357310 - DNA, 25 bp, Artificial
  probe
  misc_feature (1)..(25): SEQ ID NO: 3504; WAN024A3H; Start 215; Stop 239
tagtcgattagctccctcttagtta

SEQ ID NO: 357311 - DNA, 25 bp, Artificial
  probe
  misc_feature (1)..(25): SEQ ID NO: 3504; WAN024A3H; Start 6; Stop 30
atcattccttatacaactatgcagt

SEQ ID NO: 357312 - DNA, 25 bp, Artificial
  probe
  misc_feature (1)..(25): SEQ ID NO: 3504; WAN024A3H; Start 291; Stop 315
tagaacatctgtcttgtactaatca

SEQ ID NO: 357313 - DNA, 25 bp, Artificial
  probe
  misc_feature (1)..(25): SEQ ID NO: 3504; WAN024A3H; Start 289; Stop 313
actagaacatctgtcttgtactaat

SEQ ID NO: 357314 - DNA, 25 bp, Artificial
  probe
  misc_feature (1)..(25): SEQ ID NO: 3504; WAN024A3H; Start 279; Stop 303
taaagaaggaactagaacatctgtc

SEQ ID NO: 357315 - DNA, 25 bp, Artificial
  probe
  misc_feature (1)..(25): SEQ ID NO: 3504; WAN024A3H; Start 219; Stop 243
cgattagctccctcttagttacaag

SEQ ID NO: 357316 - DNA, 25 bp, Artificial
  probe
  misc_feature (1)..(25): SEQ ID NO: 3504; WAN024A3H; Start 212; Stop 236
atctagtcgattagctccctcttag

SEQ ID NO: 357317 - DNA, 25 bp, Artificial
  probe
  misc_feature (1)..(25): SEQ ID NO: 3504; WAN024A3H; Start 218; Stop 242
tcgattagctccctcttagttacaa

SEQ ID NO: 357318 - DNA, 25 bp, Artificial
  probe
  misc_feature (1)..(25): SEQ ID NO: 3504; WAN024A3H; Start 293; Stop 317
gaacatctgtcttgtactaatcaat

SEQ ID NO: 357319 - DNA, 25 bp, Artificial
  probe
  misc_feature (1)..(25): SEQ ID NO: 3504; WAN024A3H; Start 214; Stop 238
ctagtcgattagctccctcttagtt

SEQ ID NO: 357320 - DNA, 25 bp, Artificial
  probe
  misc_feature (1)..(25): SEQ ID NO: 3504; WAN024A3H; Start 271; Stop 295
aaccagattaaagaaggaactagaa

SEQ ID NO: 357321 - DNA, 25 bp, Artificial
  probe
  misc_feature (1)..(25): SEQ ID NO: 3504; WAN024A3H; Start 270; Stop 294
aaaccagattaaagaaggaactaga

SEQ ID NO: 357322 - DNA, 25 bp, Artificial
  probe
  misc_feature (1)..(25): SEQ ID NO: 3504; WAN024A3H; Start 216; Stop 240
agtcgattagctccctcttagttac

SEQ ID NO: 357323 - DNA, 25 bp, Artificial
  probe
  misc_feature (1)..(25): SEQ ID NO: 3505; WAN024AO4; Start 6; Stop 30
ttcctcctcaatcttgatccatctt

SEQ ID NO: 357324 - DNA, 25 bp, Artificial
  probe
  misc_feature (1)..(25): SEQ ID NO: 3505; WAN024AO4; Start 3; Stop 27
ttcttcctcctcaatcttgatccat

SEQ ID NO: 357325 - DNA, 25 bp, Artificial
  probe
  misc_feature (1)..(25): SEQ ID NO: 3505; WAN024AO4; Start 5; Stop 29
cttcctcctcaatcttgatccatct

SEQ ID NO: 357326 - DNA, 25 bp, Artificial
  probe
  misc_feature (1)..(25): SEQ ID NO: 3505; WAN024AO4; Start 4; Stop 28
tcttcctcctcaatcttgatccatc

SEQ ID NO: 357327 - DNA, 25 bp, Artificial
  probe
  misc_feature (1)..(25): SEQ ID NO: 3505; WAN024AO4; Start 120; Stop 144
aggatcaatcttctctgaatacctt

SEQ ID NO: 357328 - DNA, 25 bp, Artificial
  probe
  misc_feature (1)..(25): SEQ ID NO: 3505; WAN024AO4; Start 119; Stop 143
taggatcaatcttctctgaatacct

SEQ ID NO: 357329 - DNA, 25 bp, Artificial
  probe
  misc_feature (1)..(25): SEQ ID NO: 3505; WAN024AO4; Start 125; Stop 149
caatcttctctgaataccttagttc

SEQ ID NO: 357330 - DNA, 25 bp, Artificial
  probe
  misc_feature (1)..(25): SEQ ID NO: 3505; WAN024AO4; Start 124; Stop 148
tcaatcttctctgaataccttagtt

SEQ ID NO: 357331 - DNA, 25 bp, Artificial
  probe
  misc_feature (1)..(25): SEQ ID NO: 3505; WAN024AO4; Start 121; Stop 145
ggatcaatcttctctgaatacctta

SEQ ID NO: 357332 - DNA, 25 bp, Artificial
  probe
  misc_feature (1)..(25): SEQ ID NO: 3505; WAN024AO4; Start 118; Stop 142
ttaggatcaatcttctctgaatacc

SEQ ID NO: 357333 - DNA, 25 bp, Artificial
  probe
  misc_feature (1)..(25): SEQ ID NO: 3505; WAN024AO4; Start 123; Stop 147
atcaatcttctctgaataccttagt

SEQ ID NO: 357334 - DNA, 25 bp, Artificial
  probe
  misc_feature (1)..(25): SEQ ID NO: 3505; WAN024AO4; Start 1; Stop 25
ctttcttcctcctcaatcttgatcc

SEQ ID NO: 357335 - DNA, 25 bp, Artificial
  probe
  misc_feature (1)..(25): SEQ ID NO: 3505; WAN024AO4; Start 7; Stop 31
tcctcctcaatcttgatccatcttt

SEQ ID NO: 357336 - DNA, 25 bp, Artificial
  probe
  misc_feature (1)..(25): SEQ ID NO: 3505; WAN024AO4; Start 2; Stop 26
tttcttcctcctcaatcttgatcca

SEQ ID NO: 357337 - DNA, 25 bp, Artificial
  probe
  misc_feature (1)..(25): SEQ ID NO: 3505; WAN024AO4; Start 60; Stop 84
acgatataaatagaaagttgaccct

SEQ ID NO: 357338 - DNA, 25 bp, Artificial
  probe
  misc_feature (1)..(25): SEQ ID NO: 3505; WAN024AO4; Start 122; Stop 146
gatcaatcttctctgaataccttag

SEQ ID NO: 357339 - DNA, 25 bp, Artificial
  probe
  misc_feature (1)..(25): SEQ ID NO: 3505; WAN024AO4; Start 56; Stop 80
cgctacgatataaatagaaagttga

SEQ ID NO: 357340 - DNA, 25 bp, Artificial
  probe
  misc_feature (1)..(25): SEQ ID NO: 3505; WAN024AO4; Start 128; Stop 152
tcttctctgaataccttagttcatt

SEQ ID NO: 357341 - DNA, 25 bp, Artificial
  probe
  misc_feature (1)..(25): SEQ ID NO: 3505; WAN024AO4; Start 126; Stop 150
aatcttctctgaataccttagttca

SEQ ID NO: 357342 - DNA, 25 bp, Artificial
  probe
  misc_feature (1)..(25): SEQ ID NO: 3505; WAN024AO4; Start 127; Stop 151
atcttctctgaataccttagttcat

SEQ ID NO: 357343 - DNA, 25 bp, Artificial
  probe
  misc_feature (1)..(25): SEQ ID NO: 3505; WAN024AO4; Start 59; Stop 83
tacgatataaatagaaagttgaccc

SEQ ID NO: 357344 - DNA, 25 bp, Artificial
  probe
  misc_feature (1)..(25): SEQ ID NO: 3505; WAN024AO4; Start 8; Stop 32
cctcctcaatcttgatccatctttt

SEQ ID NO: 357345 - DNA, 25 bp, Artificial
  probe
  misc_feature (1)..(25): SEQ ID NO: 3505; WAN024AO4; Start 50; Stop 74
tgacttcgctacgatataaatagaa

SEQ ID NO: 357346 - DNA, 25 bp, Artificial
  probe
  misc_feature (1)..(25): SEQ ID NO: 3505; WAN024AO4; Start 61; Stop 85
cgatataaatagaaagttgacccta

SEQ ID NO: 357347 - DNA, 25 bp, Artificial
  probe
  misc_feature (1)..(25): SEQ ID NO: 3505; WAN024AO4; Start 11; Stop 35
cctcaatcttgatccatcttttaca

SEQ ID NO: 357348 - DNA, 25 bp, Artificial
  probe
  misc_feature (1)..(25): SEQ ID NO: 3505; WAN024AO4; Start 49; Stop 73
atgacttcgctacgatataaataga

SEQ ID NO: 357349 - DNA, 25 bp, Artificial
  probe
  misc_feature (1)..(25): SEQ ID NO: 3505; WAN024AO4; Start 10; Stop 34
tcctcaatcttgatccatcttttac

SEQ ID NO: 357350 - DNA, 25 bp, Artificial
  probe
  misc_feature (1)..(25): SEQ ID NO: 3505; WAN024AO4; Start 57; Stop 81
gctacgatataaatagaaagttgac

SEQ ID NO: 357351 - DNA, 25 bp, Artificial
  probe
  misc_feature (1)..(25): SEQ ID NO: 3505; WAN024AO4; Start 13; Stop 37
tcaatcttgatccatcttttacaca

SEQ ID NO: 357352 - DNA, 25 bp, Artificial
  probe
  misc_feature (1)..(25): SEQ ID NO: 3505; WAN024AO4; Start 9; Stop 33
ctcctcaatcttgatccatctttta

SEQ ID NO: 357353 - DNA, 25 bp, Artificial
  probe
  misc_feature (1)..(25): SEQ ID NO: 3505; WAN024AO4; Start 55; Stop 79
tcgctacgatataaatagaaagttg

SEQ ID NO: 357354 - DNA, 25 bp, Artificial
  probe
  misc_feature (1)..(25): SEQ ID NO: 3505; WAN024AO4; Start 14; Stop 38
caatcttgatccatcttttacacat

SEQ ID NO: 357355 - DNA, 25 bp, Artificial
  probe
  misc_feature (1)..(25): SEQ ID NO: 3505; WAN024AO4; Start 12; Stop 36
ctcaatcttgatccatcttttacac

SEQ ID NO: 357356 - DNA, 25 bp, Artificial
  probe
  misc_feature (1)..(25): SEQ ID NO: 3506; WAN024AC7; Start 4; Stop 28
tgactccaaaataaactgataattc

SEQ ID NO: 357357 - DNA, 25 bp, Artificial
  probe
  misc_feature (1)..(25): SEQ ID NO: 3506; WAN024AC7; Start 5; Stop 29
gactccaaaataaactgataattct

SEQ ID NO: 357358 - DNA, 25 bp, Artificial
  probe
  misc_feature (1)..(25): SEQ ID NO: 3506; WAN024AC7; Start 3; Stop 27
ttgactccaaaataaactgataatt

SEQ ID NO: 357359 - DNA, 25 bp, Artificial
  probe
  misc_feature (1)..(25): SEQ ID NO: 3506; WAN024AC7; Start 1; Stop 25
ctttgactccaaaataaactgataa

SEQ ID NO: 357360 - DNA, 25 bp, Artificial
  probe
  misc_feature (1)..(25): SEQ ID NO: 3506; WAN024AC7; Start 2; Stop 26
tttgactccaaaataaactgataat

SEQ ID NO: 357361 - DNA, 25 bp, Artificial
  probe
  misc_feature (1)..(25): SEQ ID NO: 3507; WAN0249XW; Start 256; Stop 280
tatttcggagtgggttattgtcatt

SEQ ID NO: 357362 - DNA, 25 bp, Artificial
  probe
  misc_feature (1)..(25): SEQ ID NO: 3507; WAN0249XW; Start 255; Stop 279
ttatttcggagtgggttattgtcat

SEQ ID NO: 357363 - DNA, 25 bp, Artificial
  probe
  misc_feature (1)..(25): SEQ ID NO: 3507; WAN0249XW; Start 20; Stop 44
atcttcatttgtaaaccacttctgc

SEQ ID NO: 357364 - DNA, 25 bp, Artificial
  probe
  misc_feature (1)..(25): SEQ ID NO: 3507; WAN0249XW; Start 254; Stop 278
cttatttcggagtgggttattgtca

SEQ ID NO: 357365 - DNA, 25 bp, Artificial
  probe
  misc_feature (1)..(25): SEQ ID NO: 3507; WAN0249XW; Start 239; Stop 263
caactgatactcctacttatttcgg

SEQ ID NO: 357366 - DNA, 25 bp, Artificial
  probe
  misc_feature (1)..(25): SEQ ID NO: 3507; WAN0249XW; Start 238; Stop 262
ccaactgatactcctacttatttcg

SEQ ID NO: 357367 - DNA, 25 bp, Artificial
  probe
  misc_feature (1)..(25): SEQ ID NO: 3507; WAN0249XW; Start 257; Stop 281
atttcggagtgggttattgtcattc

SEQ ID NO: 357368 - DNA, 25 bp, Artificial
  probe
  misc_feature (1)..(25): SEQ ID NO: 3507; WAN0249XW; Start 53; Stop 77
atttgcttcaagtgctttacaagta

SEQ ID NO: 357369 - DNA, 25 bp, Artificial
  probe
  misc_feature (1)..(25): SEQ ID NO: 3507; WAN0249XW; Start 235; Stop 259
aatccaactgatactcctacttatt

SEQ ID NO: 357370 - DNA, 25 bp, Artificial
  probe
  misc_feature (1)..(25): SEQ ID NO: 3507; WAN0249XW; Start 250; Stop 274
cctacttatttcggagtgggttatt

SEQ ID NO: 357371 - DNA, 25 bp, Artificial
  probe
  misc_feature (1)..(25): SEQ ID NO: 3507; WAN0249XW; Start 252; Stop 276
tacttatttcggagtgggttattgt

SEQ ID NO: 357372 - DNA, 25 bp, Artificial
  probe
  misc_feature (1)..(25): SEQ ID NO: 3507; WAN0249XW; Start 52; Stop 76
gatttgcttcaagtgctttacaagt

SEQ ID NO: 357373 - DNA, 25 bp, Artificial
  probe
  misc_feature (1)..(25): SEQ ID NO: 3507; WAN0249XW; Start 49; Stop 73
taggatttgcttcaagtgctttaca

SEQ ID NO: 357374 - DNA, 25 bp, Artificial
  probe
  misc_feature (1)..(25): SEQ ID NO: 3507; WAN0249XW; Start 251; Stop 275
ctacttatttcggagtgggttattg

SEQ ID NO: 357375 - DNA, 25 bp, Artificial
  probe
  misc_feature (1)..(25): SEQ ID NO: 3507; WAN0249XW; Start 253; Stop 277
acttatttcggagtgggttattgtc

SEQ ID NO: 357376 - DNA, 25 bp, Artificial
  probe
  misc_feature (1)..(25): SEQ ID NO: 3507; WAN0249XW; Start 48; Stop 72
ctaggatttgcttcaagtgctttac

SEQ ID NO: 357377 - DNA, 25 bp, Artificial
  probe
  misc_feature (1)..(25): SEQ ID NO: 3507; WAN0249XW; Start 51; Stop 75
ggatttgcttcaagtgctttacaag

SEQ ID NO: 357378 - DNA, 25 bp, Artificial
  probe
  misc_feature (1)..(25): SEQ ID NO: 3507; WAN0249XW; Start 65; Stop 89
tgctttacaagtacagtataacacg

SEQ ID NO: 357379 - DNA, 25 bp, Artificial
  probe
  misc_feature (1)..(25): SEQ ID NO: 3507; WAN0249XW; Start 22; Stop 46
cttcatttgtaaaccacttctgcga

SEQ ID NO: 357380 - DNA, 25 bp, Artificial
  probe
  misc_feature (1)..(25): SEQ ID NO: 3507; WAN0249XW; Start 21; Stop 45
tcttcatttgtaaaccacttctgcg

SEQ ID NO: 357381 - DNA, 25 bp, Artificial
  probe
  misc_feature (1)..(25): SEQ ID NO: 3507; WAN0249XW; Start 54; Stop 78
tttgcttcaagtgctttacaagtac

SEQ ID NO: 357382 - DNA, 25 bp, Artificial
  probe
  misc_feature (1)..(25): SEQ ID NO: 3507; WAN0249XW; Start 66; Stop 90
gctttacaagtacagtataacacga

SEQ ID NO: 357383 - DNA, 25 bp, Artificial
  probe
  misc_feature (1)..(25): SEQ ID NO: 3507; WAN0249XW; Start 58; Stop 82
cttcaagtgctttacaagtacagta

SEQ ID NO: 357384 - DNA, 25 bp, Artificial
  probe
  misc_feature (1)..(25): SEQ ID NO: 3507; WAN0249XW; Start 50; Stop 74
aggatttgcttcaagtgctttacaa

SEQ ID NO: 357385 - DNA, 25 bp, Artificial
  probe
  misc_feature (1)..(25): SEQ ID NO: 3507; WAN0249XW; Start 23; Stop 47
ttcatttgtaaaccacttctgcgac

SEQ ID NO: 357386 - DNA, 25 bp, Artificial
  probe
  misc_feature (1)..(25): SEQ ID NO: 3507; WAN0249XW; Start 55; Stop 79
ttgcttcaagtgctttacaagtaca

SEQ ID NO: 357387 - DNA, 25 bp, Artificial
  probe
  misc_feature (1)..(25): SEQ ID NO: 3507; WAN0249XW; Start 237; Stop 261
tccaactgatactcctacttatttc

SEQ ID NO: 357388 - DNA, 25 bp, Artificial
  probe
  misc_feature (1)..(25): SEQ ID NO: 3507; WAN0249XW; Start 59; Stop 83
ttcaagtgctttacaagtacagtat

SEQ ID NO: 357389 - DNA, 25 bp, Artificial
  probe
  misc_feature (1)..(25): SEQ ID NO: 3507; WAN0249XW; Start 26; Stop 50
atttgtaaaccacttctgcgaccta

SEQ ID NO: 357390 - DNA, 25 bp, Artificial
  probe
  misc_feature (1)..(25): SEQ ID NO: 3507; WAN0249XW; Start 57; Stop 81
gcttcaagtgctttacaagtacagt

SEQ ID NO: 357391 - DNA, 25 bp, Artificial
  probe
  misc_feature (1)..(25): SEQ ID NO: 3507; WAN0249XW; Start 56; Stop 80
tgcttcaagtgctttacaagtacag

SEQ ID NO: 357392 - DNA, 25 bp, Artificial
  probe
  misc_feature (1)..(25): SEQ ID NO: 3507; WAN0249XW; Start 249; Stop 273
tcctacttatttcggagtgggttat

SEQ ID NO: 357393 - DNA, 25 bp, Artificial
  probe
  misc_feature (1)..(25): SEQ ID NO: 3507; WAN0249XW; Start 63; Stop 87
agtgctttacaagtacagtataaca

SEQ ID NO: 357394 - DNA, 25 bp, Artificial
  probe
  misc_feature (1)..(25): SEQ ID NO: 3508; WAN024AM2; Start 9; Stop 33
attcttactatcagtatagcacgtt

SEQ ID NO: 357395 - DNA, 25 bp, Artificial
  probe
  misc_feature (1)..(25): SEQ ID NO: 3508; WAN024AM2; Start 36; Stop 60
ccaacttatgtaaagcaaaagcact

SEQ ID NO: 357396 - DNA, 25 bp, Artificial
  probe
  misc_feature (1)..(25): SEQ ID NO: 3508; WAN024AM2; Start 39; Stop 63
acttatgtaaagcaaaagcacttgt

SEQ ID NO: 357397 - DNA, 25 bp, Artificial
  probe
  misc_feature (1)..(25): SEQ ID NO: 3508; WAN024AM2; Start 37; Stop 61
caacttatgtaaagcaaaagcactt

SEQ ID NO: 357398 - DNA, 25 bp, Artificial
  probe
  misc_feature (1)..(25): SEQ ID NO: 3508; WAN024AM2; Start 38; Stop 62
aacttatgtaaagcaaaagcacttg

SEQ ID NO: 357399 - DNA, 25 bp, Artificial
  probe
  misc_feature (1)..(25): SEQ ID NO: 3508; WAN024AM2; Start 40; Stop 64
cttatgtaaagcaaaagcacttgta

SEQ ID NO: 357400 - DNA, 25 bp, Artificial
  probe
  misc_feature (1)..(25): SEQ ID NO: 3508; WAN024AM2; Start 35; Stop 59
gccaacttatgtaaagcaaaagcac

SEQ ID NO: 357401 - DNA, 25 bp, Artificial
  probe
  misc_feature (1)..(25): SEQ ID NO: 3508; WAN024AM2; Start 11; Stop 35
tcttactatcagtatagcacgtttg

SEQ ID NO: 357402 - DNA, 25 bp, Artificial
  probe
  misc_feature (1)..(25): SEQ ID NO: 3508; WAN024AM2; Start 8; Stop 32
tattcttactatcagtatagcacgt

SEQ ID NO: 357403 - DNA, 25 bp, Artificial
  probe
  misc_feature (1)..(25): SEQ ID NO: 3508; WAN024AM2; Start 41; Stop 65
ttatgtaaagcaaaagcacttgtac

SEQ ID NO: 357404 - DNA, 25 bp, Artificial
  probe
  misc_feature (1)..(25): SEQ ID NO: 3508; WAN024AM2; Start 7; Stop 31
atattcttactatcagtatagcacg

SEQ ID NO: 357405 - DNA, 25 bp, Artificial
  probe
  misc_feature (1)..(25): SEQ ID NO: 3508; WAN024AM2; Start 12; Stop 36
cttactatcagtatagcacgtttgc

SEQ ID NO: 357406 - DNA, 25 bp, Artificial
  probe
  misc_feature (1)..(25): SEQ ID NO: 3508; WAN024AM2; Start 23; Stop 47
tatagcacgtttgccaacttatgta

SEQ ID NO: 357407 - DNA, 25 bp, Artificial
  probe
  misc_feature (1)..(25): SEQ ID NO: 3508; WAN024AM2; Start 13; Stop 37
ttactatcagtatagcacgtttgcc

SEQ ID NO: 357408 - DNA, 25 bp, Artificial
  probe
  misc_feature (1)..(25): SEQ ID NO: 3508; WAN024AM2; Start 10; Stop 34
ttcttactatcagtatagcacgttt

SEQ ID NO: 357409 - DNA, 25 bp, Artificial
  probe
  misc_feature (1)..(25): SEQ ID NO: 3508; WAN024AM2; Start 24; Stop 48
atagcacgtttgccaacttatgtaa

SEQ ID NO: 357410 - DNA, 25 bp, Artificial
  probe
  misc_feature (1)..(25): SEQ ID NO: 3508; WAN024AM2; Start 25; Stop 49
tagcacgtttgccaacttatgtaaa

SEQ ID NO: 357411 - DNA, 25 bp, Artificial
  probe
  misc_feature (1)..(25): SEQ ID NO: 3508; WAN024AM2; Start 14; Stop 38
tactatcagtatagcacgtttgcca

SEQ ID NO: 357412 - DNA, 25 bp, Artificial
  probe
  misc_feature (1)..(25): SEQ ID NO: 3508; WAN024AM2; Start 21; Stop 45
agtatagcacgtttgccaacttatg

SEQ ID NO: 357413 - DNA, 25 bp, Artificial
  probe
  misc_feature (1)..(25): SEQ ID NO: 3508; WAN024AM2; Start 20; Stop 44
cagtatagcacgtttgccaacttat

SEQ ID NO: 357414 - DNA, 25 bp, Artificial
  probe
  misc_feature (1)..(25): SEQ ID NO: 3508; WAN024AM2; Start 22; Stop 46
gtatagcacgtttgccaacttatgt

SEQ ID NO: 357415 - DNA, 25 bp, Artificial
  probe
  misc_feature (1)..(25): SEQ ID NO: 3508; WAN024AM2; Start 16; Stop 40
ctatcagtatagcacgtttgccaac

SEQ ID NO: 357416 - DNA, 25 bp, Artificial
  probe
  misc_feature (1)..(25): SEQ ID NO: 3508; WAN024AM2; Start 17; Stop 41
tatcagtatagcacgtttgccaact

SEQ ID NO: 357417 - DNA, 25 bp, Artificial
  probe
  misc_feature (1)..(25): SEQ ID NO: 3508; WAN024AM2; Start 15; Stop 39
actatcagtatagcacgtttgccaa

SEQ ID NO: 357418 - DNA, 25 bp, Artificial
  probe
  misc_feature (1)..(25): SEQ ID NO: 3508; WAN024AM2; Start 26; Stop 50
agcacgtttgccaacttatgtaaag

SEQ ID NO: 357419 - DNA, 25 bp, Artificial
  probe
  misc_feature (1)..(25): SEQ ID NO: 3508; WAN024AM2; Start 19; Stop 43
tcagtatagcacgtttgccaactta

SEQ ID NO: 357420 - DNA, 25 bp, Artificial
  probe
  misc_feature (1)..(25): SEQ ID NO: 3508; WAN024AM2; Start 28; Stop 52
cacgtttgccaacttatgtaaagca

SEQ ID NO: 357421 - DNA, 25 bp, Artificial
  probe
  misc_feature (1)..(25): SEQ ID NO: 3508; WAN024AM2; Start 54; Stop 78
aagcacttgtacagcctaattttag

SEQ ID NO: 357422 - DNA, 25 bp, Artificial
  probe
  misc_feature (1)..(25): SEQ ID NO: 3508; WAN024AM2; Start 18; Stop 42
atcagtatagcacgtttgccaactt

SEQ ID NO: 357423 - DNA, 25 bp, Artificial
  probe
  misc_feature (1)..(25): SEQ ID NO: 3508; WAN024AM2; Start 53; Stop 77
aaagcacttgtacagcctaatttta

SEQ ID NO: 357424 - DNA, 25 bp, Artificial
  probe
  misc_feature (1)..(25): SEQ ID NO: 3508; WAN024AM2; Start 51; Stop 75
caaaagcacttgtacagcctaattt

SEQ ID NO: 357425 - DNA, 25 bp, Artificial
  probe
  misc_feature (1)..(25): SEQ ID NO: 3508; WAN024AM2; Start 34; Stop 58
tgccaacttatgtaaagcaaaagca

SEQ ID NO: 357426 - DNA, 25 bp, Artificial
  probe
  misc_feature (1)..(25): SEQ ID NO: 3508; WAN024AM2; Start 52; Stop 76
aaaagcacttgtacagcctaatttt

SEQ ID NO: 357427 - DNA, 25 bp, Artificial
  probe
  misc_feature (1)..(25): SEQ ID NO: 3509; WAN024A3T; Start 103; Stop 127
acgtgttataatggataggattaga

SEQ ID NO: 357428 - DNA, 25 bp, Artificial
  probe
  misc_feature (1)..(25): SEQ ID NO: 3509; WAN024A3T; Start 93; Stop 117
caaacttgaaacgtgttataatgga

SEQ ID NO: 357429 - DNA, 25 bp, Artificial
  probe
  misc_feature (1)..(25): SEQ ID NO: 3509; WAN024A3T; Start 91; Stop 115
tccaaacttgaaacgtgttataatg

SEQ ID NO: 357430 - DNA, 25 bp, Artificial
  probe
  misc_feature (1)..(25): SEQ ID NO: 3509; WAN024A3T; Start 90; Stop 114
gtccaaacttgaaacgtgttataat

SEQ ID NO: 357431 - DNA, 25 bp, Artificial
  probe
  misc_feature (1)..(25): SEQ ID NO: 3509; WAN024A3T; Start 98; Stop 122
ttgaaacgtgttataatggatagga

SEQ ID NO: 357432 - DNA, 25 bp, Artificial
  probe
  misc_feature (1)..(25): SEQ ID NO: 3509; WAN024A3T; Start 97; Stop 121
cttgaaacgtgttataatggatagg

SEQ ID NO: 357433 - DNA, 25 bp, Artificial
  probe
  misc_feature (1)..(25): SEQ ID NO: 3509; WAN024A3T; Start 104; Stop 128
cgtgttataatggataggattagaa

SEQ ID NO: 357434 - DNA, 25 bp, Artificial
  probe
  misc_feature (1)..(25): SEQ ID NO: 3509; WAN024A3T; Start 99; Stop 123
tgaaacgtgttataatggataggat

SEQ ID NO: 357435 - DNA, 25 bp, Artificial
  probe
  misc_feature (1)..(25): SEQ ID NO: 3509; WAN024A3T; Start 92; Stop 116
ccaaacttgaaacgtgttataatgg

SEQ ID NO: 357436 - DNA, 25 bp, Artificial
  probe
  misc_feature (1)..(25): SEQ ID NO: 3509; WAN024A3T; Start 114; Stop 138
tggataggattagaacttagaaaga

SEQ ID NO: 357437 - DNA, 25 bp, Artificial
  probe
  misc_feature (1)..(25): SEQ ID NO: 3509; WAN024A3T; Start 102; Stop 126
aacgtgttataatggataggattag

SEQ ID NO: 357438 - DNA, 25 bp, Artificial
  probe
  misc_feature (1)..(25): SEQ ID NO: 3509; WAN024A3T; Start 94; Stop 118
aaacttgaaacgtgttataatggat

SEQ ID NO: 357439 - DNA, 25 bp, Artificial
  probe
  misc_feature (1)..(25): SEQ ID NO: 3509; WAN024A3T; Start 96; Stop 120
acttgaaacgtgttataatggatag

SEQ ID NO: 357440 - DNA, 25 bp, Artificial
  probe
  misc_feature (1)..(25): SEQ ID NO: 3509; WAN024A3T; Start 100; Stop 124
gaaacgtgttataatggataggatt

SEQ ID NO: 357441 - DNA, 25 bp, Artificial
  probe
  misc_feature (1)..(25): SEQ ID NO: 3509; WAN024A3T; Start 89; Stop 113
cgtccaaacttgaaacgtgttataa

SEQ ID NO: 357442 - DNA, 25 bp, Artificial
  probe
  misc_feature (1)..(25): SEQ ID NO: 3509; WAN024A3T; Start 120; Stop 144
ggattagaacttagaaagaatgaac

SEQ ID NO: 357443 - DNA, 25 bp, Artificial
  probe
  misc_feature (1)..(25): SEQ ID NO: 3509; WAN024A3T; Start 95; Stop 119
aacttgaaacgtgttataatggata

SEQ ID NO: 357444 - DNA, 25 bp, Artificial
  probe
  misc_feature (1)..(25): SEQ ID NO: 3509; WAN024A3T; Start 119; Stop 143
aggattagaacttagaaagaatgaa

SEQ ID NO: 357445 - DNA, 25 bp, Artificial
  probe
  misc_feature (1)..(25): SEQ ID NO: 3509; WAN024A3T; Start 115; Stop 139
ggataggattagaacttagaaagaa

SEQ ID NO: 357446 - DNA, 25 bp, Artificial
  probe
  misc_feature (1)..(25): SEQ ID NO: 3509; WAN024A3T; Start 113; Stop 137
atggataggattagaacttagaaag

SEQ ID NO: 357447 - DNA, 25 bp, Artificial
  probe
  misc_feature (1)..(25): SEQ ID NO: 3509; WAN024A3T; Start 52; Stop 76
ttgtcaagtgaaaacgatttaattt

SEQ ID NO: 357448 - DNA, 25 bp, Artificial
  probe
  misc_feature (1)..(25): SEQ ID NO: 3509; WAN024A3T; Start 51; Stop 75
tttgtcaagtgaaaacgatttaatt

SEQ ID NO: 357449 - DNA, 25 bp, Artificial
  probe
  misc_feature (1)..(25): SEQ ID NO: 3509; WAN024A3T; Start 88; Stop 112
gcgtccaaacttgaaacgtgttata

SEQ ID NO: 357450 - DNA, 25 bp, Artificial
  probe
  misc_feature (1)..(25): SEQ ID NO: 3509; WAN024A3T; Start 112; Stop 136
aatggataggattagaacttagaaa

SEQ ID NO: 357451 - DNA, 25 bp, Artificial
  probe
  misc_feature (1)..(25): SEQ ID NO: 3509; WAN024A3T; Start 121; Stop 145
gattagaacttagaaagaatgaaca

SEQ ID NO: 357452 - DNA, 25 bp, Artificial
  probe
  misc_feature (1)..(25): SEQ ID NO: 3509; WAN024A3T; Start 101; Stop 125
aaacgtgttataatggataggatta

SEQ ID NO: 357453 - DNA, 25 bp, Artificial
  probe
  misc_feature (1)..(25): SEQ ID NO: 3509; WAN024A3T; Start 50; Stop 74
ttttgtcaagtgaaaacgatttaat

SEQ ID NO: 357454 - DNA, 25 bp, Artificial
  probe
  misc_feature (1)..(25): SEQ ID NO: 3509; WAN024A3T; Start 53; Stop 77
tgtcaagtgaaaacgatttaatttc

SEQ ID NO: 357455 - DNA, 25 bp, Artificial
  probe
  misc_feature (1)..(25): SEQ ID NO: 3509; WAN024A3T; Start 54; Stop 78
gtcaagtgaaaacgatttaatttct

SEQ ID NO: 357456 - DNA, 25 bp, Artificial
  probe
  misc_feature (1)..(25): SEQ ID NO: 3509; WAN024A3T; Start 87; Stop 111
agcgtccaaacttgaaacgtgttat

SEQ ID NO: 357457 - DNA, 25 bp, Artificial
  probe
  misc_feature (1)..(25): SEQ ID NO: 3509; WAN024A3T; Start 86; Stop 110
gagcgtccaaacttgaaacgtgtta

SEQ ID NO: 357458 - DNA, 25 bp, Artificial
  probe
  misc_feature (1)..(25): SEQ ID NO: 3509; WAN024A3T; Start 83; Stop 107
aaagagcgtccaaacttgaaacgtg

SEQ ID NO: 357459 - DNA, 25 bp, Artificial
  probe
  misc_feature (1)..(25): SEQ ID NO: 3509; WAN024A3T; Start 55; Stop 79
tcaagtgaaaacgatttaatttcta

SEQ ID NO: 357460 - DNA, 25 bp, Artificial
  probe
  misc_feature (1)..(25): SEQ ID NO: 3510; WAN024AQX; Start 5; Stop 29
tctcctttcttgtttaggtttaccg

SEQ ID NO: 357461 - DNA, 25 bp, Artificial
  probe
  misc_feature (1)..(25): SEQ ID NO: 3510; WAN024AQX; Start 4; Stop 28
ttctcctttcttgtttaggtttacc

SEQ ID NO: 357462 - DNA, 25 bp, Artificial
  probe
  misc_feature (1)..(25): SEQ ID NO: 3510; WAN024AQX; Start 3; Stop 27
tttctcctttcttgtttaggtttac

SEQ ID NO: 357463 - DNA, 25 bp, Artificial
  probe
  misc_feature (1)..(25): SEQ ID NO: 3510; WAN024AQX; Start 28; Stop 52
cggtttactttatattccccattgt

SEQ ID NO: 357464 - DNA, 25 bp, Artificial
  probe
  misc_feature (1)..(25): SEQ ID NO: 3510; WAN024AQX; Start 34; Stop 58
actttatattccccattgtaatcct

SEQ ID NO: 357465 - DNA, 25 bp, Artificial
  probe
  misc_feature (1)..(25): SEQ ID NO: 3510; WAN024AQX; Start 6; Stop 30
ctcctttcttgtttaggtttaccgg

SEQ ID NO: 357466 - DNA, 25 bp, Artificial
  probe
  misc_feature (1)..(25): SEQ ID NO: 3510; WAN024AQX; Start 1; Stop 25
cttttctcctttcttgtttaggttt

SEQ ID NO: 357467 - DNA, 25 bp, Artificial
  probe
  misc_feature (1)..(25): SEQ ID NO: 3510; WAN024AQX; Start 41; Stop 65
attccccattgtaatcctttatttt

SEQ ID NO: 357468 - DNA, 25 bp, Artificial
  probe
  misc_feature (1)..(25): SEQ ID NO: 3510; WAN024AQX; Start 35; Stop 59
ctttatattccccattgtaatcctt

SEQ ID NO: 357469 - DNA, 25 bp, Artificial
  probe
  misc_feature (1)..(25): SEQ ID NO: 3510; WAN024AQX; Start 209; Stop 233
ccggtttactagaatataatttggt

SEQ ID NO: 357470 - DNA, 25 bp, Artificial
  probe
  misc_feature (1)..(25): SEQ ID NO: 3510; WAN024AQX; Start 27; Stop 51
ccggtttactttatattccccattg

SEQ ID NO: 357471 - DNA, 25 bp, Artificial
  probe
  misc_feature (1)..(25): SEQ ID NO: 3510; WAN024AQX; Start 229; Stop 253
ttggttatagagaagtcttaacaaa

SEQ ID NO: 357472 - DNA, 25 bp, Artificial
  probe
  misc_feature (1)..(25): SEQ ID NO: 3510; WAN024AQX; Start 228; Stop 252
tttggttatagagaagtcttaacaa

SEQ ID NO: 357473 - DNA, 25 bp, Artificial
  probe
  misc_feature (1)..(25): SEQ ID NO: 3510; WAN024AQX; Start 29; Stop 53
ggtttactttatattccccattgta

SEQ ID NO: 357474 - DNA, 25 bp, Artificial
  probe
  misc_feature (1)..(25): SEQ ID NO: 3510; WAN024AQX; Start 210; Stop 234
cggtttactagaatataatttggtt

SEQ ID NO: 357475 - DNA, 25 bp, Artificial
  probe
  misc_feature (1)..(25): SEQ ID NO: 3510; WAN024AQX; Start 230; Stop 254
tggttatagagaagtcttaacaaat

SEQ ID NO: 357476 - DNA, 25 bp, Artificial
  probe
  misc_feature (1)..(25): SEQ ID NO: 3510; WAN024AQX; Start 227; Stop 251
atttggttatagagaagtcttaaca

SEQ ID NO: 357477 - DNA, 25 bp, Artificial
  probe
  misc_feature (1)..(25): SEQ ID NO: 3510; WAN024AQX; Start 40; Stop 64
tattccccattgtaatcctttattt

SEQ ID NO: 357478 - DNA, 25 bp, Artificial
  probe
  misc_feature (1)..(25): SEQ ID NO: 3510; WAN024AQX; Start 36; Stop 60
tttatattccccattgtaatccttt

SEQ ID NO: 357479 - DNA, 25 bp, Artificial
  probe
  misc_feature (1)..(25): SEQ ID NO: 3510; WAN024AQX; Start 33; Stop 57
tactttatattccccattgtaatcc

SEQ ID NO: 357480 - DNA, 25 bp, Artificial
  probe
  misc_feature (1)..(25): SEQ ID NO: 3510; WAN024AQX; Start 2; Stop 26
ttttctcctttcttgtttaggttta

SEQ ID NO: 357481 - DNA, 25 bp, Artificial
  probe
  misc_feature (1)..(25): SEQ ID NO: 3510; WAN024AQX; Start 39; Stop 63
atattccccattgtaatcctttatt

SEQ ID NO: 357482 - DNA, 25 bp, Artificial
  probe
  misc_feature (1)..(25): SEQ ID NO: 3510; WAN024AQX; Start 37; Stop 61
ttatattccccattgtaatccttta

SEQ ID NO: 357483 - DNA, 25 bp, Artificial
  probe
  misc_feature (1)..(25): SEQ ID NO: 3510; WAN024AQX; Start 38; Stop 62
tatattccccattgtaatcctttat

SEQ ID NO: 357484 - DNA, 25 bp, Artificial
  probe
  misc_feature (1)..(25): SEQ ID NO: 3510; WAN024AQX; Start 30; Stop 54
gtttactttatattccccattgtaa

SEQ ID NO: 357485 - DNA, 25 bp, Artificial
  probe
  misc_feature (1)..(25): SEQ ID NO: 3511; WAN0249KW; Start 58; Stop 82
aatacgaatagataggtaggaggaa

SEQ ID NO: 357486 - DNA, 25 bp, Artificial
  probe
  misc_feature (1)..(25): SEQ ID NO: 3511; WAN0249KW; Start 60; Stop 84
tacgaatagataggtaggaggaaac

SEQ ID NO: 357487 - DNA, 25 bp, Artificial
  probe
  misc_feature (1)..(25): SEQ ID NO: 3511; WAN0249KW; Start 59; Stop 83
atacgaatagataggtaggaggaaa

SEQ ID NO: 357488 - DNA, 25 bp, Artificial
  probe
  misc_feature (1)..(25): SEQ ID NO: 3511; WAN0249KW; Start 57; Stop 81
aaatacgaatagataggtaggagga

SEQ ID NO: 357489 - DNA, 25 bp, Artificial
  probe
  misc_feature (1)..(25): SEQ ID NO: 3511; WAN0249KW; Start 56; Stop 80
aaaatacgaatagataggtaggagg

SEQ ID NO: 357490 - DNA, 25 bp, Artificial
  probe
  misc_feature (1)..(25): SEQ ID NO: 3511; WAN0249KW; Start 19; Stop 43
aaatcaatcgtaggaaaattcctgc

SEQ ID NO: 357491 - DNA, 25 bp, Artificial
  probe
  misc_feature (1)..(25): SEQ ID NO: 3511; WAN0249KW; Start 20; Stop 44
aatcaatcgtaggaaaattcctgcg

SEQ ID NO: 357492 - DNA, 25 bp, Artificial
  probe
  misc_feature (1)..(25): SEQ ID NO: 3511; WAN0249KW; Start 18; Stop 42
aaaatcaatcgtaggaaaattcctg

SEQ ID NO: 357493 - DNA, 25 bp, Artificial
  probe
  misc_feature (1)..(25): SEQ ID NO: 3511; WAN0249KW; Start 25; Stop 49
atcgtaggaaaattcctgcgatttt

SEQ ID NO: 357494 - DNA, 25 bp, Artificial
  probe
  misc_feature (1)..(25): SEQ ID NO: 3511; WAN0249KW; Start 21; Stop 45
atcaatcgtaggaaaattcctgcga

SEQ ID NO: 357495 - DNA, 25 bp, Artificial
  probe
  misc_feature (1)..(25): SEQ ID NO: 3511; WAN0249KW; Start 22; Stop 46
tcaatcgtaggaaaattcctgcgat

SEQ ID NO: 357496 - DNA, 25 bp, Artificial
  probe
  misc_feature (1)..(25): SEQ ID NO: 3512; WAN024ACJ; Start 25; Stop 49
aggtctgacatttcataaatcatgt

SEQ ID NO: 357497 - DNA, 25 bp, Artificial
  probe
  misc_feature (1)..(25): SEQ ID NO: 3512; WAN024ACJ; Start 24; Stop 48
taggtctgacatttcataaatcatg

SEQ ID NO: 357498 - DNA, 25 bp, Artificial
  probe
  misc_feature (1)..(25): SEQ ID NO: 3512; WAN024ACJ; Start 5; Stop 29
tgtgaacgaaaatgtcttttaggtc

SEQ ID NO: 357499 - DNA, 25 bp, Artificial
  probe
  misc_feature (1)..(25): SEQ ID NO: 3512; WAN024ACJ; Start 9; Stop 33
aacgaaaatgtcttttaggtctgac

SEQ ID NO: 357500 - DNA, 25 bp, Artificial
  probe
  misc_feature (1)..(25): SEQ ID NO: 3512; WAN024ACJ; Start 7; Stop 31
tgaacgaaaatgtcttttaggtctg

SEQ ID NO: 357501 - DNA, 25 bp, Artificial
  probe
  misc_feature (1)..(25): SEQ ID NO: 3512; WAN024ACJ; Start 6; Stop 30
gtgaacgaaaatgtcttttaggtct

SEQ ID NO: 357502 - DNA, 25 bp, Artificial
  probe
  misc_feature (1)..(25): SEQ ID NO: 3512; WAN024ACJ; Start 8; Stop 32
gaacgaaaatgtcttttaggtctga

SEQ ID NO: 357503 - DNA, 25 bp, Artificial
  probe
  misc_feature (1)..(25): SEQ ID NO: 3512; WAN024ACJ; Start 4; Stop 28
ttgtgaacgaaaatgtcttttaggt

SEQ ID NO: 357504 - DNA, 25 bp, Artificial
  probe
  misc_feature (1)..(25): SEQ ID NO: 3512; WAN024ACJ; Start 22; Stop 46
tttaggtctgacatttcataaatca

SEQ ID NO: 357505 - DNA, 25 bp, Artificial
  probe
  misc_feature (1)..(25): SEQ ID NO: 3512; WAN024ACJ; Start 3; Stop 27
tttgtgaacgaaaatgtcttttagg

SEQ ID NO: 357506 - DNA, 25 bp, Artificial
  probe
  misc_feature (1)..(25): SEQ ID NO: 3512; WAN024ACJ; Start 26; Stop 50
ggtctgacatttcataaatcatgtt

SEQ ID NO: 357507 - DNA, 25 bp, Artificial
  probe
  misc_feature (1)..(25): SEQ ID NO: 3512; WAN024ACJ; Start 23; Stop 47
ttaggtctgacatttcataaatcat

SEQ ID NO: 357508 - DNA, 25 bp, Artificial
  probe
  misc_feature (1)..(25): SEQ ID NO: 3512; WAN024ACJ; Start 2; Stop 26
ttttgtgaacgaaaatgtcttttag

SEQ ID NO: 357509 - DNA, 25 bp, Artificial
  probe
  misc_feature (1)..(25): SEQ ID NO: 3512; WAN024ACJ; Start 1; Stop 25
cttttgtgaacgaaaatgtctttta

SEQ ID NO: 357510 - DNA, 25 bp, Artificial
  probe
  misc_feature (1)..(25): SEQ ID NO: 3512; WAN024ACJ; Start 18; Stop 42
gtcttttaggtctgacatttcataa

SEQ ID NO: 357511 - DNA, 25 bp, Artificial
  probe
  misc_feature (1)..(25): SEQ ID NO: 3512; WAN024ACJ; Start 19; Stop 43
tcttttaggtctgacatttcataaa

SEQ ID NO: 357512 - DNA, 25 bp, Artificial
  probe
  misc_feature (1)..(25): SEQ ID NO: 3512; WAN024ACJ; Start 10; Stop 34
acgaaaatgtcttttaggtctgaca

SEQ ID NO: 357513 - DNA, 25 bp, Artificial
  probe
  misc_feature (1)..(25): SEQ ID NO: 3512; WAN024ACJ; Start 21; Stop 45
ttttaggtctgacatttcataaatc

SEQ ID NO: 357514 - DNA, 25 bp, Artificial
  probe
  misc_feature (1)..(25): SEQ ID NO: 3512; WAN024ACJ; Start 20; Stop 44
cttttaggtctgacatttcataaat

SEQ ID NO: 357515 - DNA, 25 bp, Artificial
  probe
  misc_feature (1)..(25): SEQ ID NO: 3512; WAN024ACJ; Start 17; Stop 41
tgtcttttaggtctgacatttcata

SEQ ID NO: 357516 - DNA, 25 bp, Artificial
  probe
  misc_feature (1)..(25): SEQ ID NO: 3513; WAN024A2J; Start 40; Stop 64
ctatcacaaataagggcgaattacc

SEQ ID NO: 357517 - DNA, 25 bp, Artificial
  probe
  misc_feature (1)..(25): SEQ ID NO: 3513; WAN024A2J; Start 41; Stop 65
tatcacaaataagggcgaattacca

SEQ ID NO: 357518 - DNA, 25 bp, Artificial
  probe
  misc_feature (1)..(25): SEQ ID NO: 3513; WAN024A2J; Start 48; Stop 72
aataagggcgaattaccaactaaac

SEQ ID NO: 357519 - DNA, 25 bp, Artificial
  probe
  misc_feature (1)..(25): SEQ ID NO: 3513; WAN024A2J; Start 46; Stop 70
caaataagggcgaattaccaactaa

SEQ ID NO: 357520 - DNA, 25 bp, Artificial
  probe
  misc_feature (1)..(25): SEQ ID NO: 3513; WAN024A2J; Start 49; Stop 73
ataagggcgaattaccaactaaaca

SEQ ID NO: 357521 - DNA, 25 bp, Artificial
  probe
  misc_feature (1)..(25): SEQ ID NO: 3513; WAN024A2J; Start 45; Stop 69
acaaataagggcgaattaccaacta

SEQ ID NO: 357522 - DNA, 25 bp, Artificial
  probe
  misc_feature (1)..(25): SEQ ID NO: 3513; WAN024A2J; Start 57; Stop 81
gaattaccaactaaacaaggcgaag

SEQ ID NO: 357523 - DNA, 25 bp, Artificial
  probe
  misc_feature (1)..(25): SEQ ID NO: 3513; WAN024A2J; Start 50; Stop 74
taagggcgaattaccaactaaacaa

SEQ ID NO: 357524 - DNA, 25 bp, Artificial
  probe
  misc_feature (1)..(25): SEQ ID NO: 3513; WAN024A2J; Start 47; Stop 71
aaataagggcgaattaccaactaaa

SEQ ID NO: 357525 - DNA, 25 bp, Artificial
  probe
  misc_feature (1)..(25): SEQ ID NO: 3513; WAN024A2J; Start 42; Stop 66
atcacaaataagggcgaattaccaa

SEQ ID NO: 357526 - DNA, 25 bp, Artificial
  probe
  misc_feature (1)..(25): SEQ ID NO: 3513; WAN024A2J; Start 39; Stop 63
tctatcacaaataagggcgaattac

SEQ ID NO: 357527 - DNA, 25 bp, Artificial
  probe
  misc_feature (1)..(25): SEQ ID NO: 3513; WAN024A2J; Start 51; Stop 75
aagggcgaattaccaactaaacaag

SEQ ID NO: 357528 - DNA, 25 bp, Artificial
  probe
  misc_feature (1)..(25): SEQ ID NO: 3513; WAN024A2J; Start 58; Stop 82
aattaccaactaaacaaggcgaagt

SEQ ID NO: 357529 - DNA, 25 bp, Artificial
  probe
  misc_feature (1)..(25): SEQ ID NO: 3513; WAN024A2J; Start 44; Stop 68
cacaaataagggcgaattaccaact

SEQ ID NO: 357530 - DNA, 25 bp, Artificial
  probe
  misc_feature (1)..(25): SEQ ID NO: 3513; WAN024A2J; Start 43; Stop 67
tcacaaataagggcgaattaccaac

SEQ ID NO: 357531 - DNA, 25 bp, Artificial
  probe
  misc_feature (1)..(25): SEQ ID NO: 3513; WAN024A2J; Start 38; Stop 62
ttctatcacaaataagggcgaatta

SEQ ID NO: 357532 - DNA, 25 bp, Artificial
  probe
  misc_feature (1)..(25): SEQ ID NO: 3513; WAN024A2J; Start 35; Stop 59
atattctatcacaaataagggcgaa

SEQ ID NO: 357533 - DNA, 25 bp, Artificial
  probe
  misc_feature (1)..(25): SEQ ID NO: 3513; WAN024A2J; Start 56; Stop 80
cgaattaccaactaaacaaggcgaa

SEQ ID NO: 357534 - DNA, 25 bp, Artificial
  probe
  misc_feature (1)..(25): SEQ ID NO: 3513; WAN024A2J; Start 37; Stop 61
attctatcacaaataagggcgaatt

SEQ ID NO: 357535 - DNA, 25 bp, Artificial
  probe
  misc_feature (1)..(25): SEQ ID NO: 3513; WAN024A2J; Start 33; Stop 57
caatattctatcacaaataagggcg

SEQ ID NO: 357536 - DNA, 25 bp, Artificial
  probe
  misc_feature (1)..(25): SEQ ID NO: 3513; WAN024A2J; Start 34; Stop 58
aatattctatcacaaataagggcga

SEQ ID NO: 357537 - DNA, 25 bp, Artificial
  probe
  misc_feature (1)..(25): SEQ ID NO: 3513; WAN024A2J; Start 36; Stop 60
tattctatcacaaataagggcgaat

SEQ ID NO: 357538 - DNA, 25 bp, Artificial
  probe
  misc_feature (1)..(25): SEQ ID NO: 3513; WAN024A2J; Start 52; Stop 76
agggcgaattaccaactaaacaagg

SEQ ID NO: 357539 - DNA, 25 bp, Artificial
  probe
  misc_feature (1)..(25): SEQ ID NO: 3513; WAN024A2J; Start 59; Stop 83
attaccaactaaacaaggcgaagtt

SEQ ID NO: 357540 - DNA, 25 bp, Artificial
  probe
  misc_feature (1)..(25): SEQ ID NO: 3513; WAN024A2J; Start 60; Stop 84
ttaccaactaaacaaggcgaagttt

SEQ ID NO: 357541 - DNA, 25 bp, Artificial
  probe
  misc_feature (1)..(25): SEQ ID NO: 3513; WAN024A2J; Start 32; Stop 56
tcaatattctatcacaaataagggc

SEQ ID NO: 357542 - DNA, 25 bp, Artificial
  probe
  misc_feature (1)..(25): SEQ ID NO: 3513; WAN024A2J; Start 66; Stop 90
actaaacaaggcgaagtttgacttt

SEQ ID NO: 357543 - DNA, 25 bp, Artificial
  probe
  misc_feature (1)..(25): SEQ ID NO: 3513; WAN024A2J; Start 65; Stop 89
aactaaacaaggcgaagtttgactt

SEQ ID NO: 357544 - DNA, 25 bp, Artificial
  probe
  misc_feature (1)..(25): SEQ ID NO: 3513; WAN024A2J; Start 61; Stop 85
taccaactaaacaaggcgaagtttg

SEQ ID NO: 357545 - DNA, 25 bp, Artificial
  probe
  misc_feature (1)..(25): SEQ ID NO: 3513; WAN024A2J; Start 55; Stop 79
gcgaattaccaactaaacaaggcga

SEQ ID NO: 357546 - DNA, 25 bp, Artificial
  probe
  misc_feature (1)..(25): SEQ ID NO: 3513; WAN024A2J; Start 64; Stop 88
caactaaacaaggcgaagtttgact

SEQ ID NO: 357547 - DNA, 25 bp, Artificial
  probe
  misc_feature (1)..(25): SEQ ID NO: 3513; WAN024A2J; Start 53; Stop 77
gggcgaattaccaactaaacaaggc

SEQ ID NO: 357548 - DNA, 25 bp, Artificial
  probe
  misc_feature (1)..(25): SEQ ID NO: 3513; WAN024A2J; Start 63; Stop 87
ccaactaaacaaggcgaagtttgac

SEQ ID NO: 357549 - DNA, 25 bp, Artificial
  probe
  misc_feature (1)..(25): SEQ ID NO: 3514; WAN0249I4; Start 124; Stop 148
acagcaccataatagaataacacaa

SEQ ID NO: 357550 - DNA, 25 bp, Artificial
  probe
  misc_feature (1)..(25): SEQ ID NO: 3514; WAN0249I4; Start 123; Stop 147
tacagcaccataatagaataacaca

SEQ ID NO: 357551 - DNA, 25 bp, Artificial
  probe
  misc_feature (1)..(25): SEQ ID NO: 3514; WAN0249I4; Start 129; Stop 153
accataatagaataacacaaagccc

SEQ ID NO: 357552 - DNA, 25 bp, Artificial
  probe
  misc_feature (1)..(25): SEQ ID NO: 3514; WAN0249I4; Start 122; Stop 146
ttacagcaccataatagaataacac

SEQ ID NO: 357553 - DNA, 25 bp, Artificial
  probe
  misc_feature (1)..(25): SEQ ID NO: 3514; WAN0249I4; Start 127; Stop 151
gcaccataatagaataacacaaagc

SEQ ID NO: 357554 - DNA, 25 bp, Artificial
  probe
  misc_feature (1)..(25): SEQ ID NO: 3514; WAN0249I4; Start 128; Stop 152
caccataatagaataacacaaagcc

SEQ ID NO: 357555 - DNA, 25 bp, Artificial
  probe
  misc_feature (1)..(25): SEQ ID NO: 3514; WAN0249I4; Start 125; Stop 149
cagcaccataatagaataacacaaa

SEQ ID NO: 357556 - DNA, 25 bp, Artificial
  probe
  misc_feature (1)..(25): SEQ ID NO: 3514; WAN0249I4; Start 126; Stop 150
agcaccataatagaataacacaaag

SEQ ID NO: 357557 - DNA, 25 bp, Artificial
  probe
  misc_feature (1)..(25): SEQ ID NO: 3514; WAN0249I4; Start 130; Stop 154
ccataatagaataacacaaagcccc

SEQ ID NO: 357558 - DNA, 25 bp, Artificial
  probe
  misc_feature (1)..(25): SEQ ID NO: 3514; WAN0249I4; Start 133; Stop 157
taatagaataacacaaagcccctgc

SEQ ID NO: 357559 - DNA, 25 bp, Artificial
  probe
  misc_feature (1)..(25): SEQ ID NO: 3514; WAN0249I4; Start 132; Stop 156
ataatagaataacacaaagcccctg

SEQ ID NO: 357560 - DNA, 25 bp, Artificial
  probe
  misc_feature (1)..(25): SEQ ID NO: 3514; WAN0249I4; Start 131; Stop 155
cataatagaataacacaaagcccct

SEQ ID NO: 357561 - DNA, 25 bp, Artificial
  probe
  misc_feature (1)..(25): SEQ ID NO: 3514; WAN0249I4; Start 121; Stop 145
tttacagcaccataatagaataaca

SEQ ID NO: 357562 - DNA, 25 bp, Artificial
  probe
  misc_feature (1)..(25): SEQ ID NO: 3514; WAN0249I4; Start 191; Stop 215
ttttgggatgaaactgttttcctac

SEQ ID NO: 357563 - DNA, 25 bp, Artificial
  probe
  misc_feature (1)..(25): SEQ ID NO: 3514; WAN0249I4; Start 195; Stop 219
gggatgaaactgttttcctactttt

SEQ ID NO: 357564 - DNA, 25 bp, Artificial
  probe
  misc_feature (1)..(25): SEQ ID NO: 3514; WAN0249I4; Start 194; Stop 218
tgggatgaaactgttttcctacttt

SEQ ID NO: 357565 - DNA, 25 bp, Artificial
  probe
  misc_feature (1)..(25): SEQ ID NO: 3514; WAN0249I4; Start 193; Stop 217
ttgggatgaaactgttttcctactt

SEQ ID NO: 357566 - DNA, 25 bp, Artificial
  probe
  misc_feature (1)..(25): SEQ ID NO: 3514; WAN0249I4; Start 192; Stop 216
tttgggatgaaactgttttcctact

SEQ ID NO: 357567 - DNA, 25 bp, Artificial
  probe
  misc_feature (1)..(25): SEQ ID NO: 3514; WAN0249I4; Start 120; Stop 144
atttacagcaccataatagaataac

SEQ ID NO: 357568 - DNA, 25 bp, Artificial
  probe
  misc_feature (1)..(25): SEQ ID NO: 3514; WAN0249I4; Start 134; Stop 158
aatagaataacacaaagcccctgcg

SEQ ID NO: 357569 - DNA, 25 bp, Artificial
  probe
  misc_feature (1)..(25): SEQ ID NO: 3514; WAN0249I4; Start 117; Stop 141
gtaatttacagcaccataatagaat

SEQ ID NO: 357570 - DNA, 25 bp, Artificial
  probe
  misc_feature (1)..(25): SEQ ID NO: 3514; WAN0249I4; Start 3; Stop 27
ttttctccttttcgtctatttaaga

SEQ ID NO: 357571 - DNA, 25 bp, Artificial
  probe
  misc_feature (1)..(25): SEQ ID NO: 3514; WAN0249I4; Start 116; Stop 140
tgtaatttacagcaccataatagaa

SEQ ID NO: 357572 - DNA, 25 bp, Artificial
  probe
  misc_feature (1)..(25): SEQ ID NO: 3514; WAN0249I4; Start 4; Stop 28
tttctccttttcgtctatttaagat

SEQ ID NO: 357573 - DNA, 25 bp, Artificial
  probe
  misc_feature (1)..(25): SEQ ID NO: 3514; WAN0249I4; Start 136; Stop 160
tagaataacacaaagcccctgcgat

SEQ ID NO: 357574 - DNA, 25 bp, Artificial
  probe
  misc_feature (1)..(25): SEQ ID NO: 3514; WAN0249I4; Start 135; Stop 159
atagaataacacaaagcccctgcga

SEQ ID NO: 357575 - DNA, 25 bp, Artificial
  probe
  misc_feature (1)..(25): SEQ ID NO: 3514; WAN0249I4; Start 233; Stop 257
agggattttcttctatatttcttct

SEQ ID NO: 357576 - DNA, 25 bp, Artificial
  probe
  misc_feature (1)..(25): SEQ ID NO: 3514; WAN0249I4; Start 6; Stop 30
tctccttttcgtctatttaagataa

SEQ ID NO: 357577 - DNA, 25 bp, Artificial
  probe
  misc_feature (1)..(25): SEQ ID NO: 3514; WAN0249I4; Start 5; Stop 29
ttctccttttcgtctatttaagata

SEQ ID NO: 357578 - DNA, 25 bp, Artificial
  probe
  misc_feature (1)..(25): SEQ ID NO: 3514; WAN0249I4; Start 12; Stop 36
tttcgtctatttaagataataggct

SEQ ID NO: 357579 - DNA, 25 bp, Artificial
  probe
  misc_feature (1)..(25): SEQ ID NO: 3514; WAN0249I4; Start 137; Stop 161
agaataacacaaagcccctgcgatt

SEQ ID NO: 357580 - DNA, 25 bp, Artificial
  probe
  misc_feature (1)..(25): SEQ ID NO: 3514; WAN0249I4; Start 138; Stop 162
gaataacacaaagcccctgcgattg

SEQ ID NO: 357581 - DNA, 25 bp, Artificial
  probe
  misc_feature (1)..(25): SEQ ID NO: 3514; WAN0249I4; Start 14; Stop 38
tcgtctatttaagataataggctag

SEQ ID NO: 357582 - DNA, 25 bp, Artificial
  probe
  misc_feature (1)..(25): SEQ ID NO: 3516; WAN024A29; Start 22; Stop 46
agtttctcccatcatagcataattt

SEQ ID NO: 357583 - DNA, 25 bp, Artificial
  probe
  misc_feature (1)..(25): SEQ ID NO: 3516; WAN024A29; Start 20; Stop 44
ctagtttctcccatcatagcataat

SEQ ID NO: 357584 - DNA, 25 bp, Artificial
  probe
  misc_feature (1)..(25): SEQ ID NO: 3516; WAN024A29; Start 26; Stop 50
tctcccatcatagcataatttaagt

SEQ ID NO: 357585 - DNA, 25 bp, Artificial
  probe
  misc_feature (1)..(25): SEQ ID NO: 3516; WAN024A29; Start 21; Stop 45
tagtttctcccatcatagcataatt

SEQ ID NO: 357586 - DNA, 25 bp, Artificial
  probe
  misc_feature (1)..(25): SEQ ID NO: 3516; WAN024A29; Start 23; Stop 47
gtttctcccatcatagcataattta

SEQ ID NO: 357587 - DNA, 25 bp, Artificial
  probe
  misc_feature (1)..(25): SEQ ID NO: 3516; WAN024A29; Start 25; Stop 49
ttctcccatcatagcataatttaag

SEQ ID NO: 357588 - DNA, 25 bp, Artificial
  probe
  misc_feature (1)..(25): SEQ ID NO: 3516; WAN024A29; Start 18; Stop 42
gactagtttctcccatcatagcata

SEQ ID NO: 357589 - DNA, 25 bp, Artificial
  probe
  misc_feature (1)..(25): SEQ ID NO: 3516; WAN024A29; Start 19; Stop 43
actagtttctcccatcatagcataa

SEQ ID NO: 357590 - DNA, 25 bp, Artificial
  probe
  misc_feature (1)..(25): SEQ ID NO: 3516; WAN024A29; Start 24; Stop 48
tttctcccatcatagcataatttaa

SEQ ID NO: 357591 - DNA, 25 bp, Artificial
  probe
  misc_feature (1)..(25): SEQ ID NO: 3516; WAN024A29; Start 10; Stop 34
tcatttctgactagtttctcccatc

SEQ ID NO: 357592 - DNA, 25 bp, Artificial
  probe
  misc_feature (1)..(25): SEQ ID NO: 3516; WAN024A29; Start 9; Stop 33
ctcatttctgactagtttctcccat

SEQ ID NO: 357593 - DNA, 25 bp, Artificial
  probe
  misc_feature (1)..(25): SEQ ID NO: 3516; WAN024A29; Start 6; Stop 30
ttcctcatttctgactagtttctcc

SEQ ID NO: 357594 - DNA, 25 bp, Artificial
  probe
  misc_feature (1)..(25): SEQ ID NO: 3516; WAN024A29; Start 11; Stop 35
catttctgactagtttctcccatca

SEQ ID NO: 357595 - DNA, 25 bp, Artificial
  probe
  misc_feature (1)..(25): SEQ ID NO: 3516; WAN024A29; Start 12; Stop 36
atttctgactagtttctcccatcat

SEQ ID NO: 357596 - DNA, 25 bp, Artificial
  probe
  misc_feature (1)..(25): SEQ ID NO: 3516; WAN024A29; Start 27; Stop 51
ctcccatcatagcataatttaagta

SEQ ID NO: 357597 - DNA, 25 bp, Artificial
  probe
  misc_feature (1)..(25): SEQ ID NO: 3516; WAN024A29; Start 14; Stop 38
ttctgactagtttctcccatcatag

SEQ ID NO: 357598 - DNA, 25 bp, Artificial
  probe
  misc_feature (1)..(25): SEQ ID NO: 3516; WAN024A29; Start 60; Stop 84
agcagttaaaacttgactttgtgtt

SEQ ID NO: 357599 - DNA, 25 bp, Artificial
  probe
  misc_feature (1)..(25): SEQ ID NO: 3516; WAN024A29; Start 59; Stop 83
aagcagttaaaacttgactttgtgt

SEQ ID NO: 357600 - DNA, 25 bp, Artificial
  probe
  misc_feature (1)..(25): SEQ ID NO: 3516; WAN024A29; Start 17; Stop 41
tgactagtttctcccatcatagcat

SEQ ID NO: 357601 - DNA, 25 bp, Artificial
  probe
  misc_feature (1)..(25): SEQ ID NO: 3516; WAN024A29; Start 13; Stop 37
tttctgactagtttctcccatcata

SEQ ID NO: 357602 - DNA, 25 bp, Artificial
  probe
  misc_feature (1)..(25): SEQ ID NO: 3516; WAN024A29; Start 15; Stop 39
tctgactagtttctcccatcatagc

SEQ ID NO: 357603 - DNA, 25 bp, Artificial
  probe
  misc_feature (1)..(25): SEQ ID NO: 3516; WAN024A29; Start 7; Stop 31
tcctcatttctgactagtttctccc

SEQ ID NO: 357604 - DNA, 25 bp, Artificial
  probe
  misc_feature (1)..(25): SEQ ID NO: 3516; WAN024A29; Start 5; Stop 29
tttcctcatttctgactagtttctc

SEQ ID NO: 357605 - DNA, 25 bp, Artificial
  probe
  misc_feature (1)..(25): SEQ ID NO: 3516; WAN024A29; Start 16; Stop 40
ctgactagtttctcccatcatagca

SEQ ID NO: 357606 - DNA, 25 bp, Artificial
  probe
  misc_feature (1)..(25): SEQ ID NO: 3516; WAN024A29; Start 8; Stop 32
cctcatttctgactagtttctccca

SEQ ID NO: 357607 - DNA, 25 bp, Artificial
  probe
  misc_feature (1)..(25): SEQ ID NO: 3516; WAN024A29; Start 28; Stop 52
tcccatcatagcataatttaagtat

SEQ ID NO: 357608 - DNA, 25 bp, Artificial
  probe
  misc_feature (1)..(25): SEQ ID NO: 3516; WAN024A29; Start 61; Stop 85
gcagttaaaacttgactttgtgttt

SEQ ID NO: 357609 - DNA, 25 bp, Artificial
  probe
  misc_feature (1)..(25): SEQ ID NO: 3516; WAN024A29; Start 42; Stop 66
aatttaagtatttctacaagcagtt

SEQ ID NO: 357610 - DNA, 25 bp, Artificial
  probe
  misc_feature (1)..(25): SEQ ID NO: 3516; WAN024A29; Start 29; Stop 53
cccatcatagcataatttaagtatt

SEQ ID NO: 357611 - DNA, 25 bp, Artificial
  probe
  misc_feature (1)..(25): SEQ ID NO: 3516; WAN024A29; Start 38; Stop 62
gcataatttaagtatttctacaagc

SEQ ID NO: 357612 - DNA, 25 bp, Artificial
  probe
  misc_feature (1)..(25): SEQ ID NO: 3516; WAN024A29; Start 48; Stop 72
agtatttctacaagcagttaaaact

SEQ ID NO: 357613 - DNA, 25 bp, Artificial
  probe
  misc_feature (1)..(25): SEQ ID NO: 3516; WAN024A29; Start 47; Stop 71
aagtatttctacaagcagttaaaac

SEQ ID NO: 357614 - DNA, 25 bp, Artificial
  probe
  misc_feature (1)..(25): SEQ ID NO: 3516; WAN024A29; Start 58; Stop 82
caagcagttaaaacttgactttgtg

SEQ ID NO: 357615 - DNA, 25 bp, Artificial
  probe
  misc_feature (1)..(25): SEQ ID NO: 3517; WAN024ARI; Start 5; Stop 29
tttcctcctgactttgatactctta

SEQ ID NO: 357616 - DNA, 25 bp, Artificial
  probe
  misc_feature (1)..(25): SEQ ID NO: 3517; WAN024ARI; Start 7; Stop 31
tcctcctgactttgatactcttatt

SEQ ID NO: 357617 - DNA, 25 bp, Artificial
  probe
  misc_feature (1)..(25): SEQ ID NO: 3517; WAN024ARI; Start 6; Stop 30
ttcctcctgactttgatactcttat

SEQ ID NO: 357618 - DNA, 25 bp, Artificial
  probe
  misc_feature (1)..(25): SEQ ID NO: 3517; WAN024ARI; Start 8; Stop 32
cctcctgactttgatactcttatta

SEQ ID NO: 357619 - DNA, 25 bp, Artificial
  probe
  misc_feature (1)..(25): SEQ ID NO: 3517; WAN024ARI; Start 4; Stop 28
ttttcctcctgactttgatactctt

SEQ ID NO: 357620 - DNA, 25 bp, Artificial
  probe
  misc_feature (1)..(25): SEQ ID NO: 3517; WAN024ARI; Start 117; Stop 141
tcttcttgtattctcgtaatgatat

SEQ ID NO: 357621 - DNA, 25 bp, Artificial
  probe
  misc_feature (1)..(25): SEQ ID NO: 3517; WAN024ARI; Start 114; Stop 138
atatcttcttgtattctcgtaatga

SEQ ID NO: 357622 - DNA, 25 bp, Artificial
  probe
  misc_feature (1)..(25): SEQ ID NO: 3517; WAN024ARI; Start 116; Stop 140
atcttcttgtattctcgtaatgata

SEQ ID NO: 357623 - DNA, 25 bp, Artificial
  probe
  misc_feature (1)..(25): SEQ ID NO: 3517; WAN024ARI; Start 115; Stop 139
tatcttcttgtattctcgtaatgat

SEQ ID NO: 357624 - DNA, 25 bp, Artificial
  probe
  misc_feature (1)..(25): SEQ ID NO: 3517; WAN024ARI; Start 109; Stop 133
gaacaatatcttcttgtattctcgt

SEQ ID NO: 357625 - DNA, 25 bp, Artificial
  probe
  misc_feature (1)..(25): SEQ ID NO: 3517; WAN024ARI; Start 108; Stop 132
agaacaatatcttcttgtattctcg

SEQ ID NO: 357626 - DNA, 25 bp, Artificial
  probe
  misc_feature (1)..(25): SEQ ID NO: 3517; WAN024ARI; Start 9; Stop 33
ctcctgactttgatactcttattat

SEQ ID NO: 357627 - DNA, 25 bp, Artificial
  probe
  misc_feature (1)..(25): SEQ ID NO: 3517; WAN024ARI; Start 120; Stop 144
tcttgtattctcgtaatgatatctt

SEQ ID NO: 357628 - DNA, 25 bp, Artificial
  probe
  misc_feature (1)..(25): SEQ ID NO: 3517; WAN024ARI; Start 119; Stop 143
ttcttgtattctcgtaatgatatct

SEQ ID NO: 357629 - DNA, 25 bp, Artificial
  probe
  misc_feature (1)..(25): SEQ ID NO: 3517; WAN024ARI; Start 118; Stop 142
cttcttgtattctcgtaatgatatc

SEQ ID NO: 357630 - DNA, 25 bp, Artificial
  probe
  misc_feature (1)..(25): SEQ ID NO: 3517; WAN024ARI; Start 147; Stop 171
cgattttcaatactttcaaactaca

SEQ ID NO: 357631 - DNA, 25 bp, Artificial
  probe
  misc_feature (1)..(25): SEQ ID NO: 3517; WAN024ARI; Start 146; Stop 170
acgattttcaatactttcaaactac

SEQ ID NO: 357632 - DNA, 25 bp, Artificial
  probe
  misc_feature (1)..(25): SEQ ID NO: 3517; WAN024ARI; Start 111; Stop 135
acaatatcttcttgtattctcgtaa

SEQ ID NO: 357633 - DNA, 25 bp, Artificial
  probe
  misc_feature (1)..(25): SEQ ID NO: 3517; WAN024ARI; Start 110; Stop 134
aacaatatcttcttgtattctcgta

SEQ ID NO: 357634 - DNA, 25 bp, Artificial
  probe
  misc_feature (1)..(25): SEQ ID NO: 3517; WAN024ARI; Start 144; Stop 168
ttacgattttcaatactttcaaact

SEQ ID NO: 357635 - DNA, 25 bp, Artificial
  probe
  misc_feature (1)..(25): SEQ ID NO: 3517; WAN024ARI; Start 101; Stop 125
tggaaatagaacaatatcttcttgt

SEQ ID NO: 357636 - DNA, 25 bp, Artificial
  probe
  misc_feature (1)..(25): SEQ ID NO: 3517; WAN024ARI; Start 141; Stop 165
tctttacgattttcaatactttcaa

SEQ ID NO: 357637 - DNA, 25 bp, Artificial
  probe
  misc_feature (1)..(25): SEQ ID NO: 3517; WAN024ARI; Start 100; Stop 124
atggaaatagaacaatatcttcttg

SEQ ID NO: 357638 - DNA, 25 bp, Artificial
  probe
  misc_feature (1)..(25): SEQ ID NO: 3517; WAN024ARI; Start 140; Stop 164
atctttacgattttcaatactttca

SEQ ID NO: 357639 - DNA, 25 bp, Artificial
  probe
  misc_feature (1)..(25): SEQ ID NO: 3517; WAN024ARI; Start 143; Stop 167
tttacgattttcaatactttcaaac

SEQ ID NO: 357640 - DNA, 25 bp, Artificial
  probe
  misc_feature (1)..(25): SEQ ID NO: 3517; WAN024ARI; Start 145; Stop 169
tacgattttcaatactttcaaacta

SEQ ID NO: 357641 - DNA, 25 bp, Artificial
  probe
  misc_feature (1)..(25): SEQ ID NO: 3517; WAN024ARI; Start 142; Stop 166
ctttacgattttcaatactttcaaa

SEQ ID NO: 357642 - DNA, 25 bp, Artificial
  probe
  misc_feature (1)..(25): SEQ ID NO: 3517; WAN024ARI; Start 70; Stop 94
ccttattgttaaggaaagaagtaat

SEQ ID NO: 357643 - DNA, 25 bp, Artificial
  probe
  misc_feature (1)..(25): SEQ ID NO: 3518; WAN024FYQ-3; Start 1422; Stop 1446
gctatcattaacacagtaggaacaa

SEQ ID NO: 357644 - DNA, 25 bp, Artificial
  probe
  misc_feature (1)..(25): SEQ ID NO: 3518; WAN024FYQ-3; Start 1188; Stop 1212
gcttcttatctacacttgccaactt

SEQ ID NO: 357645 - DNA, 25 bp, Artificial
  probe
  misc_feature (1)..(25): SEQ ID NO: 3518; WAN024FYQ-3; Start 1118; Stop 1142
aatgaagtcaacaggtgaagttatg

SEQ ID NO: 357646 - DNA, 25 bp, Artificial
  probe
  misc_feature (1)..(25): SEQ ID NO: 3518; WAN024FYQ-3; Start 1119; Stop 1143
atgaagtcaacaggtgaagttatgg

SEQ ID NO: 357647 - DNA, 25 bp, Artificial
  probe
  misc_feature (1)..(25): SEQ ID NO: 3518; WAN024FYQ-3; Start 930; Stop 954
gttccattcctatctaaggtaacca

SEQ ID NO: 357648 - DNA, 25 bp, Artificial
  probe
  misc_feature (1)..(25): SEQ ID NO: 3518; WAN024FYQ-3; Start 1421; Stop 1445
agctatcattaacacagtaggaaca

SEQ ID NO: 357649 - DNA, 25 bp, Artificial
  probe
  misc_feature (1)..(25): SEQ ID NO: 3518; WAN024FYQ-3; Start 1418; Stop 1442
tcaagctatcattaacacagtagga

SEQ ID NO: 357650 - DNA, 25 bp, Artificial
  probe
  misc_feature (1)..(25): SEQ ID NO: 3518; WAN024FYQ-3; Start 931; Stop 955
ttccattcctatctaaggtaaccaa

SEQ ID NO: 357651 - DNA, 25 bp, Artificial
  probe
  misc_feature (1)..(25): SEQ ID NO: 3518; WAN024FYQ-3; Start 1051; Stop 1075
ttcatatcaaggcacctgtcttctc

SEQ ID NO: 357652 - DNA, 25 bp, Artificial
  probe
  misc_feature (1)..(25): SEQ ID NO: 3518; WAN024FYQ-3; Start 932; Stop 956
tccattcctatctaaggtaaccaat

SEQ ID NO: 357653 - DNA, 25 bp, Artificial
  probe
  misc_feature (1)..(25): SEQ ID NO: 3518; WAN024FYQ-3; Start 128; Stop 152
aaccgttcactctgttaaggctatc

SEQ ID NO: 357654 - DNA, 25 bp, Artificial
  probe
  misc_feature (1)..(25): SEQ ID NO: 3518; WAN024FYQ-3; Start 1420; Stop 1444
aagctatcattaacacagtaggaac

SEQ ID NO: 357655 - DNA, 25 bp, Artificial
  probe
  misc_feature (1)..(25): SEQ ID NO: 3518; WAN024FYQ-3; Start 1419; Stop 1443
caagctatcattaacacagtaggaa

SEQ ID NO: 357656 - DNA, 25 bp, Artificial
  probe
  misc_feature (1)..(25): SEQ ID NO: 3518; WAN024FYQ-3; Start 1417; Stop 1441
ttcaagctatcattaacacagtagg

SEQ ID NO: 357657 - DNA, 25 bp, Artificial
  probe
  misc_feature (1)..(25): SEQ ID NO: 3518; WAN024FYQ-3; Start 1050; Stop 1074
gttcatatcaaggcacctgtcttct

SEQ ID NO: 357658 - DNA, 25 bp, Artificial
  probe
  misc_feature (1)..(25): SEQ ID NO: 3518; WAN024FYQ-3; Start 1189; Stop 1213
cttcttatctacacttgccaacttt

SEQ ID NO: 357659 - DNA, 25 bp, Artificial
  probe
  misc_feature (1)..(25): SEQ ID NO: 3518; WAN024FYQ-3; Start 1064; Stop 1088
acctgtcttctcctttaccaaacta

SEQ ID NO: 357660 - DNA, 25 bp, Artificial
  probe
  misc_feature (1)..(25): SEQ ID NO: 3518; WAN024FYQ-3; Start 231; Stop 255
ctttactttgagccattgacattcg

SEQ ID NO: 357661 - DNA, 25 bp, Artificial
  probe
  misc_feature (1)..(25): SEQ ID NO: 3518; WAN024FYQ-3; Start 127; Stop 151
caaccgttcactctgttaaggctat

SEQ ID NO: 357662 - DNA, 25 bp, Artificial
  probe
  misc_feature (1)..(25): SEQ ID NO: 3518; WAN024FYQ-3; Start 1187; Stop 1211
agcttcttatctacacttgccaact

SEQ ID NO: 357663 - DNA, 25 bp, Artificial
  probe
  misc_feature (1)..(25): SEQ ID NO: 3518; WAN024FYQ-3; Start 1049; Stop 1073
tgttcatatcaaggcacctgtcttc

SEQ ID NO: 357664 - DNA, 25 bp, Artificial
  probe
  misc_feature (1)..(25): SEQ ID NO: 3518; WAN024FYQ-3; Start 1065; Stop 1089
cctgtcttctcctttaccaaactag

SEQ ID NO: 357665 - DNA, 25 bp, Artificial
  probe
  misc_feature (1)..(25): SEQ ID NO: 3518; WAN024FYQ-3; Start 590; Stop 614
ttcttacatgcgaactgctgttaag

SEQ ID NO: 357666 - DNA, 25 bp, Artificial
  probe
  misc_feature (1)..(25): SEQ ID NO: 3518; WAN024FYQ-3; Start 4; Stop 28
aaacgccatatttctattcaaccta

SEQ ID NO: 357667 - DNA, 25 bp, Artificial
  probe
  misc_feature (1)..(25): SEQ ID NO: 3518; WAN024FYQ-3; Start 1116; Stop 1140
gaaatgaagtcaacaggtgaagtta

SEQ ID NO: 357668 - DNA, 25 bp, Artificial
  probe
  misc_feature (1)..(25): SEQ ID NO: 3518; WAN024FYQ-3; Start 1137; Stop 1161
gttatgggttctgatgctactttgg

SEQ ID NO: 357669 - DNA, 25 bp, Artificial
  probe
  misc_feature (1)..(25): SEQ ID NO: 3518; WAN024FYQ-3; Start 5; Stop 29
aacgccatatttctattcaacctat

SEQ ID NO: 357670 - DNA, 25 bp, Artificial
  probe
  misc_feature (1)..(25): SEQ ID NO: 3518; WAN024FYQ-3; Start 1066; Stop 1090
ctgtcttctcctttaccaaactagc

SEQ ID NO: 357671 - DNA, 25 bp, Artificial
  probe
  misc_feature (1)..(25): SEQ ID NO: 3518; WAN024FYQ-3; Start 1138; Stop 1162
ttatgggttctgatgctactttgga

SEQ ID NO: 357672 - DNA, 25 bp, Artificial
  probe
  misc_feature (1)..(25): SEQ ID NO: 3518; WAN024FYQ-3; Start 1136; Stop 1160
agttatgggttctgatgctactttg

SEQ ID NO: 357673 - DNA, 25 bp, Artificial
  probe
  misc_feature (1)..(25): SEQ ID NO: 3518; WAN024FYQ-3; Start 1132; Stop 1156
gtgaagttatgggttctgatgctac

SEQ ID NO: 357674 - DNA, 25 bp, Artificial
  probe
  misc_feature (1)..(25): SEQ ID NO: 3518; WAN024FYQ-3; Start 132; Stop 156
gttcactctgttaaggctatccagg

SEQ ID NO: 357675 - DNA, 25 bp, Artificial
  probe
  misc_feature (1)..(25): SEQ ID NO: 3518; WAN024FYQ-3; Start 1532; Stop 1556
taatgccatgcttaaggtacttgaa

SEQ ID NO: 357676 - DNA, 25 bp, Artificial
  probe
  misc_feature (1)..(25): SEQ ID NO: 3519; WAN024FJK; Start 642; Stop 666
ggctaaggcttctcaactattcata

SEQ ID NO: 357677 - DNA, 25 bp, Artificial
  probe
  misc_feature (1)..(25): SEQ ID NO: 3519; WAN024FJK; Start 638; Stop 662
taatggctaaggcttctcaactatt

SEQ ID NO: 357678 - DNA, 25 bp, Artificial
  probe
  misc_feature (1)..(25): SEQ ID NO: 3519; WAN024FJK; Start 637; Stop 661
ttaatggctaaggcttctcaactat

SEQ ID NO: 357679 - DNA, 25 bp, Artificial
  probe
  misc_feature (1)..(25): SEQ ID NO: 3519; WAN024FJK; Start 639; Stop 663
aatggctaaggcttctcaactattc

SEQ ID NO: 357680 - DNA, 25 bp, Artificial
  probe
  misc_feature (1)..(25): SEQ ID NO: 3519; WAN024FJK; Start 643; Stop 667
gctaaggcttctcaactattcataa

SEQ ID NO: 357681 - DNA, 25 bp, Artificial
  probe
  misc_feature (1)..(25): SEQ ID NO: 3519; WAN024FJK; Start 641; Stop 665
tggctaaggcttctcaactattcat

SEQ ID NO: 357682 - DNA, 25 bp, Artificial
  probe
  misc_feature (1)..(25): SEQ ID NO: 3519; WAN024FJK; Start 640; Stop 664
atggctaaggcttctcaactattca

SEQ ID NO: 357683 - DNA, 25 bp, Artificial
  probe
  misc_feature (1)..(25): SEQ ID NO: 3519; WAN024FJK; Start 636; Stop 660
tttaatggctaaggcttctcaacta

SEQ ID NO: 357684 - DNA, 25 bp, Artificial
  probe
  misc_feature (1)..(25): SEQ ID NO: 3519; WAN024FJK; Start 633; Stop 657
tagtttaatggctaaggcttctcaa

SEQ ID NO: 357685 - DNA, 25 bp, Artificial
  probe
  misc_feature (1)..(25): SEQ ID NO: 3519; WAN024FJK; Start 620; Stop 644
atttagagggtggtagtttaatggc

SEQ ID NO: 357686 - DNA, 25 bp, Artificial
  probe
  misc_feature (1)..(25): SEQ ID NO: 3519; WAN024FJK; Start 462; Stop 486
aatagcgtttagtttatctggttcc

SEQ ID NO: 357687 - DNA, 25 bp, Artificial
  probe
  misc_feature (1)..(25): SEQ ID NO: 3519; WAN024FJK; Start 632; Stop 656
gtagtttaatggctaaggcttctca

SEQ ID NO: 357688 - DNA, 25 bp, Artificial
  probe
  misc_feature (1)..(25): SEQ ID NO: 3519; WAN024FJK; Start 623; Stop 647
tagagggtggtagtttaatggctaa

SEQ ID NO: 357689 - DNA, 25 bp, Artificial
  probe
  misc_feature (1)..(25): SEQ ID NO: 3519; WAN024FJK; Start 622; Stop 646
ttagagggtggtagtttaatggcta

SEQ ID NO: 357690 - DNA, 25 bp, Artificial
  probe
  misc_feature (1)..(25): SEQ ID NO: 3519; WAN024FJK; Start 646; Stop 670
aaggcttctcaactattcataattg

SEQ ID NO: 357691 - DNA, 25 bp, Artificial
  probe
  misc_feature (1)..(25): SEQ ID NO: 3519; WAN024FJK; Start 463; Stop 487
atagcgtttagtttatctggttcca

SEQ ID NO: 357692 - DNA, 25 bp, Artificial
  probe
  misc_feature (1)..(25): SEQ ID NO: 3519; WAN024FJK; Start 467; Stop 491
cgtttagtttatctggttccacaaa

SEQ ID NO: 357693 - DNA, 25 bp, Artificial
  probe
  misc_feature (1)..(25): SEQ ID NO: 3519; WAN024FJK; Start 318; Stop 342
tttaatgattggtgtgggttctagt

SEQ ID NO: 357694 - DNA, 25 bp, Artificial
  probe
  misc_feature (1)..(25): SEQ ID NO: 3519; WAN024FJK; Start 350; Stop 374
cggctagagaatttgagagtagttt

SEQ ID NO: 357695 - DNA, 25 bp, Artificial
  probe
  misc_feature (1)..(25): SEQ ID NO: 3519; WAN024FJK; Start 631; Stop 655
ggtagtttaatggctaaggcttctc

SEQ ID NO: 357696 - DNA, 25 bp, Artificial
  probe
  misc_feature (1)..(25): SEQ ID NO: 3519; WAN024FJK; Start 380; Stop 404
gaattggaataataagtaagacggt

SEQ ID NO: 357697 - DNA, 25 bp, Artificial
  probe
  misc_feature (1)..(25): SEQ ID NO: 3519; WAN024FJK; Start 464; Stop 488
tagcgtttagtttatctggttccac

SEQ ID NO: 357698 - DNA, 25 bp, Artificial
  probe
  misc_feature (1)..(25): SEQ ID NO: 3519; WAN024FJK; Start 621; Stop 645
tttagagggtggtagtttaatggct

SEQ ID NO: 357699 - DNA, 25 bp, Artificial
  probe
  misc_feature (1)..(25): SEQ ID NO: 3519; WAN024FJK; Start 319; Stop 343
ttaatgattggtgtgggttctagtg

SEQ ID NO: 357700 - DNA, 25 bp, Artificial
  probe
  misc_feature (1)..(25): SEQ ID NO: 3519; WAN024FJK; Start 351; Stop 375
ggctagagaatttgagagtagtttg

SEQ ID NO: 357701 - DNA, 25 bp, Artificial
  probe
  misc_feature (1)..(25): SEQ ID NO: 3519; WAN024FJK; Start 669; Stop 693
tgatgtaatatgcactagactctct

SEQ ID NO: 357702 - DNA, 25 bp, Artificial
  probe
  misc_feature (1)..(25): SEQ ID NO: 3519; WAN024FJK; Start 629; Stop 653
gtggtagtttaatggctaaggcttc

SEQ ID NO: 357703 - DNA, 25 bp, Artificial
  probe
  misc_feature (1)..(25): SEQ ID NO: 3519; WAN024FJK; Start 635; Stop 659
gtttaatggctaaggcttctcaact

SEQ ID NO: 357704 - DNA, 25 bp, Artificial
  probe
  misc_feature (1)..(25): SEQ ID NO: 3519; WAN024FJK; Start 634; Stop 658
agtttaatggctaaggcttctcaac

SEQ ID NO: 357705 - DNA, 25 bp, Artificial
  probe
  misc_feature (1)..(25): SEQ ID NO: 3519; WAN024FJK; Start 496; Stop 520
gttgaggaaactttattaaacgcaa

SEQ ID NO: 357706 - DNA, 25 bp, Artificial
  probe
  misc_feature (1)..(25): SEQ ID NO: 3519; WAN024FJK; Start 630; Stop 654
tggtagtttaatggctaaggcttct

SEQ ID NO: 357707 - DNA, 25 bp, Artificial
  probe
  misc_feature (1)..(25): SEQ ID NO: 3519; WAN024FJK; Start 624; Stop 648
agagggtggtagtttaatggctaag

SEQ ID NO: 357708 - DNA, 25 bp, Artificial
  probe
  misc_feature (1)..(25): SEQ ID NO: 3519; WAN024FJK; Start 352; Stop 376
gctagagaatttgagagtagtttgt

SEQ ID NO: 357709 - DNA, 25 bp, Artificial
  probe
  misc_feature (1)..(25): SEQ ID NO: 3520; WAN0249TW; Start 446; Stop 470
ttcaagtgtccgtattatatagcgt

SEQ ID NO: 357710 - DNA, 25 bp, Artificial
  probe
  misc_feature (1)..(25): SEQ ID NO: 3520; WAN0249TW; Start 451; Stop 475
gtgtccgtattatatagcgtattcg

SEQ ID NO: 357711 - DNA, 25 bp, Artificial
  probe
  misc_feature (1)..(25): SEQ ID NO: 3520; WAN0249TW; Start 447; Stop 471
tcaagtgtccgtattatatagcgta

SEQ ID NO: 357712 - DNA, 25 bp, Artificial
  probe
  misc_feature (1)..(25): SEQ ID NO: 3520; WAN0249TW; Start 448; Stop 472
caagtgtccgtattatatagcgtat

SEQ ID NO: 357713 - DNA, 25 bp, Artificial
  probe
  misc_feature (1)..(25): SEQ ID NO: 3520; WAN0249TW; Start 450; Stop 474
agtgtccgtattatatagcgtattc

SEQ ID NO: 357714 - DNA, 25 bp, Artificial
  probe
  misc_feature (1)..(25): SEQ ID NO: 3520; WAN0249TW; Start 357; Stop 381
ggtgatgctattctctaataagact

SEQ ID NO: 357715 - DNA, 25 bp, Artificial
  probe
  misc_feature (1)..(25): SEQ ID NO: 3520; WAN0249TW; Start 452; Stop 476
tgtccgtattatatagcgtattcga

SEQ ID NO: 357716 - DNA, 25 bp, Artificial
  probe
  misc_feature (1)..(25): SEQ ID NO: 3520; WAN0249TW; Start 343; Stop 367
tatttgagaaagtgggtgatgctat

SEQ ID NO: 357717 - DNA, 25 bp, Artificial
  probe
  misc_feature (1)..(25): SEQ ID NO: 3520; WAN0249TW; Start 351; Stop 375
aaagtgggtgatgctattctctaat

SEQ ID NO: 357718 - DNA, 25 bp, Artificial
  probe
  misc_feature (1)..(25): SEQ ID NO: 3520; WAN0249TW; Start 342; Stop 366
ttatttgagaaagtgggtgatgcta

SEQ ID NO: 357719 - DNA, 25 bp, Artificial
  probe
  misc_feature (1)..(25): SEQ ID NO: 3520; WAN0249TW; Start 106; Stop 130
ccgtatgtttccaatagatttcagc

SEQ ID NO: 357720 - DNA, 25 bp, Artificial
  probe
  misc_feature (1)..(25): SEQ ID NO: 3520; WAN0249TW; Start 449; Stop 473
aagtgtccgtattatatagcgtatt

SEQ ID NO: 357721 - DNA, 25 bp, Artificial
  probe
  misc_feature (1)..(25): SEQ ID NO: 3520; WAN0249TW; Start 344; Stop 368
atttgagaaagtgggtgatgctatt

SEQ ID NO: 357722 - DNA, 25 bp, Artificial
  probe
  misc_feature (1)..(25): SEQ ID NO: 3520; WAN0249TW; Start 105; Stop 129
accgtatgtttccaatagatttcag

SEQ ID NO: 357723 - DNA, 25 bp, Artificial
  probe
  misc_feature (1)..(25): SEQ ID NO: 3520; WAN0249TW; Start 350; Stop 374
gaaagtgggtgatgctattctctaa

SEQ ID NO: 357724 - DNA, 25 bp, Artificial
  probe
  misc_feature (1)..(25): SEQ ID NO: 3520; WAN0249TW; Start 503; Stop 527
ggtagaatcattgataacagactgt

SEQ ID NO: 357725 - DNA, 25 bp, Artificial
  probe
  misc_feature (1)..(25): SEQ ID NO: 3520; WAN0249TW; Start 353; Stop 377
agtgggtgatgctattctctaataa

SEQ ID NO: 357726 - DNA, 25 bp, Artificial
  probe
  misc_feature (1)..(25): SEQ ID NO: 3520; WAN0249TW; Start 352; Stop 376
aagtgggtgatgctattctctaata

SEQ ID NO: 357727 - DNA, 25 bp, Artificial
  probe
  misc_feature (1)..(25): SEQ ID NO: 3520; WAN0249TW; Start 339; Stop 363
atcttatttgagaaagtgggtgatg

SEQ ID NO: 357728 - DNA, 25 bp, Artificial
  probe
  misc_feature (1)..(25): SEQ ID NO: 3520; WAN0249TW; Start 345; Stop 369
tttgagaaagtgggtgatgctattc

SEQ ID NO: 357729 - DNA, 25 bp, Artificial
  probe
  misc_feature (1)..(25): SEQ ID NO: 3520; WAN0249TW; Start 341; Stop 365
cttatttgagaaagtgggtgatgct

SEQ ID NO: 357730 - DNA, 25 bp, Artificial
  probe
  misc_feature (1)..(25): SEQ ID NO: 3520; WAN0249TW; Start 355; Stop 379
tgggtgatgctattctctaataaga

SEQ ID NO: 357731 - DNA, 25 bp, Artificial
  probe
  misc_feature (1)..(25): SEQ ID NO: 3520; WAN0249TW; Start 354; Stop 378
gtgggtgatgctattctctaataag

SEQ ID NO: 357732 - DNA, 25 bp, Artificial
  probe
  misc_feature (1)..(25): SEQ ID NO: 3520; WAN0249TW; Start 340; Stop 364
tcttatttgagaaagtgggtgatgc

SEQ ID NO: 357733 - DNA, 25 bp, Artificial
  probe
  misc_feature (1)..(25): SEQ ID NO: 3520; WAN0249TW; Start 100; Stop 124
tgtttaccgtatgtttccaatagat

SEQ ID NO: 357734 - DNA, 25 bp, Artificial
  probe
  misc_feature (1)..(25): SEQ ID NO: 3520; WAN0249TW; Start 501; Stop 525
tgggtagaatcattgataacagact

SEQ ID NO: 357735 - DNA, 25 bp, Artificial
  probe
  misc_feature (1)..(25): SEQ ID NO: 3520; WAN0249TW; Start 356; Stop 380
gggtgatgctattctctaataagac

SEQ ID NO: 357736 - DNA, 25 bp, Artificial
  probe
  misc_feature (1)..(25): SEQ ID NO: 3520; WAN0249TW; Start 445; Stop 469
tttcaagtgtccgtattatatagcg

SEQ ID NO: 357737 - DNA, 25 bp, Artificial
  probe
  misc_feature (1)..(25): SEQ ID NO: 3520; WAN0249TW; Start 502; Stop 526
gggtagaatcattgataacagactg

SEQ ID NO: 357738 - DNA, 25 bp, Artificial
  probe
  misc_feature (1)..(25): SEQ ID NO: 3520; WAN0249TW; Start 338; Stop 362
aatcttatttgagaaagtgggtgat

SEQ ID NO: 357739 - DNA, 25 bp, Artificial
  probe
  misc_feature (1)..(25): SEQ ID NO: 3520; WAN0249TW; Start 481; Stop 505
cactatatcttgttaggatttgggt

SEQ ID NO: 357740 - DNA, 25 bp, Artificial
  probe
  misc_feature (1)..(25): SEQ ID NO: 3520; WAN0249TW; Start 99; Stop 123
ttgtttaccgtatgtttccaataga

SEQ ID NO: 357741 - DNA, 25 bp, Artificial
  probe
  misc_feature (1)..(25): SEQ ID NO: 3520; WAN0249TW; Start 104; Stop 128
taccgtatgtttccaatagatttca

SEQ ID NO: 357742 - DNA, 25 bp, Artificial
  probe
  misc_feature (1)..(25): SEQ ID NO: 3521; WAN0249TX; Start 46; Stop 70
aatcaaagagcacactagcaaacta

SEQ ID NO: 357743 - DNA, 25 bp, Artificial
  probe
  misc_feature (1)..(25): SEQ ID NO: 3521; WAN0249TX; Start 45; Stop 69
aaatcaaagagcacactagcaaact

SEQ ID NO: 357744 - DNA, 25 bp, Artificial
  probe
  misc_feature (1)..(25): SEQ ID NO: 3521; WAN0249TX; Start 47; Stop 71
atcaaagagcacactagcaaactag

SEQ ID NO: 357745 - DNA, 25 bp, Artificial
  probe
  misc_feature (1)..(25): SEQ ID NO: 3521; WAN0249TX; Start 15; Stop 39
atgggctaccttttgtgttatactc

SEQ ID NO: 357746 - DNA, 25 bp, Artificial
  probe
  misc_feature (1)..(25): SEQ ID NO: 3521; WAN0249TX; Start 14; Stop 38
gatgggctaccttttgtgttatact

SEQ ID NO: 357747 - DNA, 25 bp, Artificial
  probe
  misc_feature (1)..(25): SEQ ID NO: 3521; WAN0249TX; Start 12; Stop 36
ctgatgggctaccttttgtgttata

SEQ ID NO: 357748 - DNA, 25 bp, Artificial
  probe
  misc_feature (1)..(25): SEQ ID NO: 3521; WAN0249TX; Start 13; Stop 37
tgatgggctaccttttgtgttatac

SEQ ID NO: 357749 - DNA, 25 bp, Artificial
  probe
  misc_feature (1)..(25): SEQ ID NO: 3521; WAN0249TX; Start 43; Stop 67
gaaaatcaaagagcacactagcaaa

SEQ ID NO: 357750 - DNA, 25 bp, Artificial
  probe
  misc_feature (1)..(25): SEQ ID NO: 3521; WAN0249TX; Start 44; Stop 68
aaaatcaaagagcacactagcaaac

SEQ ID NO: 357751 - DNA, 25 bp, Artificial
  probe
  misc_feature (1)..(25): SEQ ID NO: 3521; WAN0249TX; Start 17; Stop 41
gggctaccttttgtgttatactcaa

SEQ ID NO: 357752 - DNA, 25 bp, Artificial
  probe
  misc_feature (1)..(25): SEQ ID NO: 3521; WAN0249TX; Start 18; Stop 42
ggctaccttttgtgttatactcaat

SEQ ID NO: 357753 - DNA, 25 bp, Artificial
  probe
  misc_feature (1)..(25): SEQ ID NO: 3521; WAN0249TX; Start 16; Stop 40
tgggctaccttttgtgttatactca

SEQ ID NO: 357754 - DNA, 25 bp, Artificial
  probe
  misc_feature (1)..(25): SEQ ID NO: 3521; WAN0249TX; Start 38; Stop 62
tcaatgaaaatcaaagagcacacta

SEQ ID NO: 357755 - DNA, 25 bp, Artificial
  probe
  misc_feature (1)..(25): SEQ ID NO: 3521; WAN0249TX; Start 37; Stop 61
ctcaatgaaaatcaaagagcacact

SEQ ID NO: 357756 - DNA, 25 bp, Artificial
  probe
  misc_feature (1)..(25): SEQ ID NO: 3521; WAN0249TX; Start 36; Stop 60
actcaatgaaaatcaaagagcacac

SEQ ID NO: 357757 - DNA, 25 bp, Artificial
  probe
  misc_feature (1)..(25): SEQ ID NO: 3521; WAN0249TX; Start 40; Stop 64
aatgaaaatcaaagagcacactagc

SEQ ID NO: 357758 - DNA, 25 bp, Artificial
  probe
  misc_feature (1)..(25): SEQ ID NO: 3521; WAN0249TX; Start 35; Stop 59
tactcaatgaaaatcaaagagcaca

SEQ ID NO: 357759 - DNA, 25 bp, Artificial
  probe
  misc_feature (1)..(25): SEQ ID NO: 3521; WAN0249TX; Start 39; Stop 63
caatgaaaatcaaagagcacactag

SEQ ID NO: 357760 - DNA, 25 bp, Artificial
  probe
  misc_feature (1)..(25): SEQ ID NO: 3521; WAN0249TX; Start 19; Stop 43
gctaccttttgtgttatactcaatg

SEQ ID NO: 357761 - DNA, 25 bp, Artificial
  probe
  misc_feature (1)..(25): SEQ ID NO: 3521; WAN0249TX; Start 41; Stop 65
atgaaaatcaaagagcacactagca

SEQ ID NO: 357762 - DNA, 25 bp, Artificial
  probe
  misc_feature (1)..(25): SEQ ID NO: 3521; WAN0249TX; Start 42; Stop 66
tgaaaatcaaagagcacactagcaa

SEQ ID NO: 357763 - DNA, 25 bp, Artificial
  probe
  misc_feature (1)..(25): SEQ ID NO: 3521; WAN0249TX; Start 34; Stop 58
atactcaatgaaaatcaaagagcac

SEQ ID NO: 357764 - DNA, 25 bp, Artificial
  probe
  misc_feature (1)..(25): SEQ ID NO: 3521; WAN0249TX; Start 22; Stop 46
accttttgtgttatactcaatgaaa

SEQ ID NO: 357765 - DNA, 25 bp, Artificial
  probe
  misc_feature (1)..(25): SEQ ID NO: 3521; WAN0249TX; Start 11; Stop 35
gctgatgggctaccttttgtgttat

SEQ ID NO: 357766 - DNA, 25 bp, Artificial
  probe
  misc_feature (1)..(25): SEQ ID NO: 3521; WAN0249TX; Start 20; Stop 44
ctaccttttgtgttatactcaatga

SEQ ID NO: 357767 - DNA, 25 bp, Artificial
  probe
  misc_feature (1)..(25): SEQ ID NO: 3521; WAN0249TX; Start 21; Stop 45
taccttttgtgttatactcaatgaa

SEQ ID NO: 357768 - DNA, 25 bp, Artificial
  probe
  misc_feature (1)..(25): SEQ ID NO: 3521; WAN0249TX; Start 23; Stop 47
ccttttgtgttatactcaatgaaaa

SEQ ID NO: 357769 - DNA, 25 bp, Artificial
  probe
  misc_feature (1)..(25): SEQ ID NO: 3521; WAN0249TX; Start 28; Stop 52
tgtgttatactcaatgaaaatcaaa

SEQ ID NO: 357770 - DNA, 25 bp, Artificial
  probe
  misc_feature (1)..(25): SEQ ID NO: 3521; WAN0249TX; Start 27; Stop 51
ttgtgttatactcaatgaaaatcaa

SEQ ID NO: 357771 - DNA, 25 bp, Artificial
  probe
  misc_feature (1)..(25): SEQ ID NO: 3521; WAN0249TX; Start 26; Stop 50
tttgtgttatactcaatgaaaatca

SEQ ID NO: 357772 - DNA, 25 bp, Artificial
  probe
  misc_feature (1)..(25): SEQ ID NO: 3521; WAN0249TX; Start 29; Stop 53
gtgttatactcaatgaaaatcaaag

SEQ ID NO: 357773 - DNA, 25 bp, Artificial
  probe
  misc_feature (1)..(25): SEQ ID NO: 3521; WAN0249TX; Start 30; Stop 54
tgttatactcaatgaaaatcaaaga

SEQ ID NO: 357774 - DNA, 25 bp, Artificial
  probe
  misc_feature (1)..(25): SEQ ID NO: 3521; WAN0249TX; Start 10; Stop 34
agctgatgggctaccttttgtgtta

SEQ ID NO: 357775 - DNA, 25 bp, Artificial
  probe
  misc_feature (1)..(25): SEQ ID NO: 3521; WAN0249TX; Start 9; Stop 33
tagctgatgggctaccttttgtgtt

SEQ ID NO: 357776 - DNA, 25 bp, Artificial
  probe
  misc_feature (1)..(25): SEQ ID NO: 3522; WAN0249S7; Start 214; Stop 238
caataaatgatgatggcgactgttt

SEQ ID NO: 357777 - DNA, 25 bp, Artificial
  probe
  misc_feature (1)..(25): SEQ ID NO: 3522; WAN0249S7; Start 210; Stop 234
atctcaataaatgatgatggcgact

SEQ ID NO: 357778 - DNA, 25 bp, Artificial
  probe
  misc_feature (1)..(25): SEQ ID NO: 3522; WAN0249S7; Start 209; Stop 233
tatctcaataaatgatgatggcgac

SEQ ID NO: 357779 - DNA, 25 bp, Artificial
  probe
  misc_feature (1)..(25): SEQ ID NO: 3522; WAN0249S7; Start 116; Stop 140
actagaatagtacactacatctgct

SEQ ID NO: 357780 - DNA, 25 bp, Artificial
  probe
  misc_feature (1)..(25): SEQ ID NO: 3522; WAN0249S7; Start 213; Stop 237
tcaataaatgatgatggcgactgtt

SEQ ID NO: 357781 - DNA, 25 bp, Artificial
  probe
  misc_feature (1)..(25): SEQ ID NO: 3522; WAN0249S7; Start 211; Stop 235
tctcaataaatgatgatggcgactg

SEQ ID NO: 357782 - DNA, 25 bp, Artificial
  probe
  misc_feature (1)..(25): SEQ ID NO: 3522; WAN0249S7; Start 115; Stop 139
gactagaatagtacactacatctgc

SEQ ID NO: 357783 - DNA, 25 bp, Artificial
  probe
  misc_feature (1)..(25): SEQ ID NO: 3522; WAN0249S7; Start 212; Stop 236
ctcaataaatgatgatggcgactgt

SEQ ID NO: 357784 - DNA, 25 bp, Artificial
  probe
  misc_feature (1)..(25): SEQ ID NO: 3522; WAN0249S7; Start 208; Stop 232
ttatctcaataaatgatgatggcga

SEQ ID NO: 357785 - DNA, 25 bp, Artificial
  probe
  misc_feature (1)..(25): SEQ ID NO: 3522; WAN0249S7; Start 117; Stop 141
ctagaatagtacactacatctgcta

SEQ ID NO: 357786 - DNA, 25 bp, Artificial
  probe
  misc_feature (1)..(25): SEQ ID NO: 3522; WAN0249S7; Start 207; Stop 231
attatctcaataaatgatgatggcg

SEQ ID NO: 357787 - DNA, 25 bp, Artificial
  probe
  misc_feature (1)..(25): SEQ ID NO: 3522; WAN0249S7; Start 118; Stop 142
tagaatagtacactacatctgctaa

SEQ ID NO: 357788 - DNA, 25 bp, Artificial
  probe
  misc_feature (1)..(25): SEQ ID NO: 3522; WAN0249S7; Start 215; Stop 239
aataaatgatgatggcgactgtttt

SEQ ID NO: 357789 - DNA, 25 bp, Artificial
  probe
  misc_feature (1)..(25): SEQ ID NO: 3522; WAN0249S7; Start 114; Stop 138
agactagaatagtacactacatctg

SEQ ID NO: 357790 - DNA, 25 bp, Artificial
  probe
  misc_feature (1)..(25): SEQ ID NO: 3522; WAN0249S7; Start 112; Stop 136
tgagactagaatagtacactacatc

SEQ ID NO: 357791 - DNA, 25 bp, Artificial
  probe
  misc_feature (1)..(25): SEQ ID NO: 3522; WAN0249S7; Start 216; Stop 240
ataaatgatgatggcgactgttttg

SEQ ID NO: 357792 - DNA, 25 bp, Artificial
  probe
  misc_feature (1)..(25): SEQ ID NO: 3522; WAN0249S7; Start 119; Stop 143
agaatagtacactacatctgctaaa

SEQ ID NO: 357793 - DNA, 25 bp, Artificial
  probe
  misc_feature (1)..(25): SEQ ID NO: 3522; WAN0249S7; Start 113; Stop 137
gagactagaatagtacactacatct

SEQ ID NO: 357794 - DNA, 25 bp, Artificial
  probe
  misc_feature (1)..(25): SEQ ID NO: 3522; WAN0249S7; Start 217; Stop 241
taaatgatgatggcgactgttttgt

SEQ ID NO: 357795 - DNA, 25 bp, Artificial
  probe
  misc_feature (1)..(25): SEQ ID NO: 3522; WAN0249S7; Start 4; Stop 28
aacaagttacttcaaatcgaaatct

SEQ ID NO: 357796 - DNA, 25 bp, Artificial
  probe
  misc_feature (1)..(25): SEQ ID NO: 3522; WAN0249S7; Start 111; Stop 135
ttgagactagaatagtacactacat

SEQ ID NO: 357797 - DNA, 25 bp, Artificial
  probe
  misc_feature (1)..(25): SEQ ID NO: 3522; WAN0249S7; Start 110; Stop 134
attgagactagaatagtacactaca

SEQ ID NO: 357798 - DNA, 25 bp, Artificial
  probe
  misc_feature (1)..(25): SEQ ID NO: 3522; WAN0249S7; Start 219; Stop 243
aatgatgatggcgactgttttgttt

SEQ ID NO: 357799 - DNA, 25 bp, Artificial
  probe
  misc_feature (1)..(25): SEQ ID NO: 3522; WAN0249S7; Start 218; Stop 242
aaatgatgatggcgactgttttgtt

SEQ ID NO: 357800 - DNA, 25 bp, Artificial
  probe
  misc_feature (1)..(25): SEQ ID NO: 3522; WAN0249S7; Start 15; Stop 39
tcaaatcgaaatctacaagtttact

SEQ ID NO: 357801 - DNA, 25 bp, Artificial
  probe
  misc_feature (1)..(25): SEQ ID NO: 3522; WAN0249S7; Start 3; Stop 27
aaacaagttacttcaaatcgaaatc

SEQ ID NO: 357802 - DNA, 25 bp, Artificial
  probe
  misc_feature (1)..(25): SEQ ID NO: 3522; WAN0249S7; Start 8; Stop 32
agttacttcaaatcgaaatctacaa

SEQ ID NO: 357803 - DNA, 25 bp, Artificial
  probe
  misc_feature (1)..(25): SEQ ID NO: 3522; WAN0249S7; Start 7; Stop 31
aagttacttcaaatcgaaatctaca

SEQ ID NO: 357804 - DNA, 25 bp, Artificial
  probe
  misc_feature (1)..(25): SEQ ID NO: 3522; WAN0249S7; Start 5; Stop 29
acaagttacttcaaatcgaaatcta

SEQ ID NO: 357805 - DNA, 25 bp, Artificial
  probe
  misc_feature (1)..(25): SEQ ID NO: 3522; WAN0249S7; Start 9; Stop 33
gttacttcaaatcgaaatctacaag

SEQ ID NO: 357806 - DNA, 25 bp, Artificial
  probe
  misc_feature (1)..(25): SEQ ID NO: 3522; WAN0249S7; Start 6; Stop 30
caagttacttcaaatcgaaatctac

SEQ ID NO: 357807 - DNA, 25 bp, Artificial
  probe
  misc_feature (1)..(25): SEQ ID NO: 3522; WAN0249S7; Start 220; Stop 244
atgatgatggcgactgttttgtttg

SEQ ID NO: 357808 - DNA, 25 bp, Artificial
  probe
  misc_feature (1)..(25): SEQ ID NO: 3522; WAN0249S7; Start 234; Stop 258
tgttttgtttgtgcttgtcgatttt

SEQ ID NO: 357809 - DNA, 25 bp, Artificial
  probe
  misc_feature (1)..(25): SEQ ID NO: 3523; WAN024ABJ; Start 6; Stop 30
cacctctctatttcaaagaaggagt

SEQ ID NO: 357810 - DNA, 25 bp, Artificial
  probe
  misc_feature (1)..(25): SEQ ID NO: 3523; WAN024ABJ; Start 5; Stop 29
acacctctctatttcaaagaaggag

SEQ ID NO: 357811 - DNA, 25 bp, Artificial
  probe
  misc_feature (1)..(25): SEQ ID NO: 3523; WAN024ABJ; Start 4; Stop 28
aacacctctctatttcaaagaagga

SEQ ID NO: 357812 - DNA, 25 bp, Artificial
  probe
  misc_feature (1)..(25): SEQ ID NO: 3523; WAN024ABJ; Start 30; Stop 54
ttcatctgaactcctaaacgatatg

SEQ ID NO: 357813 - DNA, 25 bp, Artificial
  probe
  misc_feature (1)..(25): SEQ ID NO: 3523; WAN024ABJ; Start 7; Stop 31
acctctctatttcaaagaaggagtt

SEQ ID NO: 357814 - DNA, 25 bp, Artificial
  probe
  misc_feature (1)..(25): SEQ ID NO: 3523; WAN024ABJ; Start 9; Stop 33
ctctctatttcaaagaaggagttca

SEQ ID NO: 357815 - DNA, 25 bp, Artificial
  probe
  misc_feature (1)..(25): SEQ ID NO: 3523; WAN024ABJ; Start 8; Stop 32
cctctctatttcaaagaaggagttc

SEQ ID NO: 357816 - DNA, 25 bp, Artificial
  probe
  misc_feature (1)..(25): SEQ ID NO: 3523; WAN024ABJ; Start 3; Stop 27
aaacacctctctatttcaaagaagg

SEQ ID NO: 357817 - DNA, 25 bp, Artificial
  probe
  misc_feature (1)..(25): SEQ ID NO: 3523; WAN024ABJ; Start 13; Stop 37
ctatttcaaagaaggagttcatctg

SEQ ID NO: 357818 - DNA, 25 bp, Artificial
  probe
  misc_feature (1)..(25): SEQ ID NO: 3523; WAN024ABJ; Start 14; Stop 38
tatttcaaagaaggagttcatctga

SEQ ID NO: 357819 - DNA, 25 bp, Artificial
  probe
  misc_feature (1)..(25): SEQ ID NO: 3523; WAN024ABJ; Start 12; Stop 36
tctatttcaaagaaggagttcatct

SEQ ID NO: 357820 - DNA, 25 bp, Artificial
  probe
  misc_feature (1)..(25): SEQ ID NO: 3523; WAN024ABJ; Start 10; Stop 34
tctctatttcaaagaaggagttcat

SEQ ID NO: 357821 - DNA, 25 bp, Artificial
  probe
  misc_feature (1)..(25): SEQ ID NO: 3523; WAN024ABJ; Start 11; Stop 35
ctctatttcaaagaaggagttcatc

SEQ ID NO: 357822 - DNA, 25 bp, Artificial
  probe
  misc_feature (1)..(25): SEQ ID NO: 3523; WAN024ABJ; Start 31; Stop 55
tcatctgaactcctaaacgatatga

SEQ ID NO: 357823 - DNA, 25 bp, Artificial
  probe
  misc_feature (1)..(25): SEQ ID NO: 3523; WAN024ABJ; Start 15; Stop 39
atttcaaagaaggagttcatctgaa

SEQ ID NO: 357824 - DNA, 25 bp, Artificial
  probe
  misc_feature (1)..(25): SEQ ID NO: 3523; WAN024ABJ; Start 2; Stop 26
aaaacacctctctatttcaaagaag

SEQ ID NO: 357825 - DNA, 25 bp, Artificial
  probe
  misc_feature (1)..(25): SEQ ID NO: 3523; WAN024ABJ; Start 16; Stop 40
tttcaaagaaggagttcatctgaac

SEQ ID NO: 357826 - DNA, 25 bp, Artificial
  probe
  misc_feature (1)..(25): SEQ ID NO: 3523; WAN024ABJ; Start 29; Stop 53
gttcatctgaactcctaaacgatat

SEQ ID NO: 357827 - DNA, 25 bp, Artificial
  probe
  misc_feature (1)..(25): SEQ ID NO: 3523; WAN024ABJ; Start 1; Stop 25
gaaaacacctctctatttcaaagaa

SEQ ID NO: 357828 - DNA, 25 bp, Artificial
  probe
  misc_feature (1)..(25): SEQ ID NO: 3524; WAN024A8H; Start 30; Stop 54
aaacagacaaaagaaagcgattact

SEQ ID NO: 357829 - DNA, 25 bp, Artificial
  probe
  misc_feature (1)..(25): SEQ ID NO: 3524; WAN024A8H; Start 29; Stop 53
aaaacagacaaaagaaagcgattac

SEQ ID NO: 357830 - DNA, 25 bp, Artificial
  probe
  misc_feature (1)..(25): SEQ ID NO: 3524; WAN024A8H; Start 31; Stop 55
aacagacaaaagaaagcgattactt

SEQ ID NO: 357831 - DNA, 25 bp, Artificial
  probe
  misc_feature (1)..(25): SEQ ID NO: 3524; WAN024A8H; Start 25; Stop 49
gaataaaacagacaaaagaaagcga

SEQ ID NO: 357832 - DNA, 25 bp, Artificial
  probe
  misc_feature (1)..(25): SEQ ID NO: 3524; WAN024A8H; Start 24; Stop 48
agaataaaacagacaaaagaaagcg

SEQ ID NO: 357833 - DNA, 25 bp, Artificial
  probe
  misc_feature (1)..(25): SEQ ID NO: 3524; WAN024A8H; Start 108; Stop 132
ggggttttaaggtattatagaggtg

SEQ ID NO: 357834 - DNA, 25 bp, Artificial
  probe
  misc_feature (1)..(25): SEQ ID NO: 3524; WAN024A8H; Start 107; Stop 131
aggggttttaaggtattatagaggt

SEQ ID NO: 357835 - DNA, 25 bp, Artificial
  probe
  misc_feature (1)..(25): SEQ ID NO: 3524; WAN024A8H; Start 27; Stop 51
ataaaacagacaaaagaaagcgatt

SEQ ID NO: 357836 - DNA, 25 bp, Artificial
  probe
  misc_feature (1)..(25): SEQ ID NO: 3524; WAN024A8H; Start 26; Stop 50
aataaaacagacaaaagaaagcgat

SEQ ID NO: 357837 - DNA, 25 bp, Artificial
  probe
  misc_feature (1)..(25): SEQ ID NO: 3524; WAN024A8H; Start 104; Stop 128
aggaggggttttaaggtattataga

SEQ ID NO: 357838 - DNA, 25 bp, Artificial
  probe
  misc_feature (1)..(25): SEQ ID NO: 3524; WAN024A8H; Start 106; Stop 130
gaggggttttaaggtattatagagg

SEQ ID NO: 357839 - DNA, 25 bp, Artificial
  probe
  misc_feature (1)..(25): SEQ ID NO: 3524; WAN024A8H; Start 105; Stop 129
ggaggggttttaaggtattatagag

SEQ ID NO: 357840 - DNA, 25 bp, Artificial
  probe
  misc_feature (1)..(25): SEQ ID NO: 3524; WAN024A8H; Start 28; Stop 52
taaaacagacaaaagaaagcgatta

SEQ ID NO: 357841 - DNA, 25 bp, Artificial
  probe
  misc_feature (1)..(25): SEQ ID NO: 3524; WAN024A8H; Start 109; Stop 133
gggttttaaggtattatagaggtgt

SEQ ID NO: 357842 - DNA, 25 bp, Artificial
  probe
  misc_feature (1)..(25): SEQ ID NO: 3524; WAN024A8H; Start 103; Stop 127
aaggaggggttttaaggtattatag

SEQ ID NO: 357843 - DNA, 25 bp, Artificial
  probe
  misc_feature (1)..(25): SEQ ID NO: 3524; WAN024A8H; Start 60; Stop 84
aagttaaggaaaagttgcacaaaga

SEQ ID NO: 357844 - DNA, 25 bp, Artificial
  probe
  misc_feature (1)..(25): SEQ ID NO: 3524; WAN024A8H; Start 61; Stop 85
agttaaggaaaagttgcacaaagat

SEQ ID NO: 357845 - DNA, 25 bp, Artificial
  probe
  misc_feature (1)..(25): SEQ ID NO: 3524; WAN024A8H; Start 59; Stop 83
aaagttaaggaaaagttgcacaaag

SEQ ID NO: 357846 - DNA, 25 bp, Artificial
  probe
  misc_feature (1)..(25): SEQ ID NO: 3524; WAN024A8H; Start 32; Stop 56
acagacaaaagaaagcgattacttt

SEQ ID NO: 357847 - DNA, 25 bp, Artificial
  probe
  misc_feature (1)..(25): SEQ ID NO: 3524; WAN024A8H; Start 65; Stop 89
aaggaaaagttgcacaaagataacg

SEQ ID NO: 357848 - DNA, 25 bp, Artificial
  probe
  misc_feature (1)..(25): SEQ ID NO: 3524; WAN024A8H; Start 102; Stop 126
aaaggaggggttttaaggtattata

SEQ ID NO: 357849 - DNA, 25 bp, Artificial
  probe
  misc_feature (1)..(25): SEQ ID NO: 3524; WAN024A8H; Start 101; Stop 125
aaaaggaggggttttaaggtattat

SEQ ID NO: 357850 - DNA, 25 bp, Artificial
  probe
  misc_feature (1)..(25): SEQ ID NO: 3524; WAN024A8H; Start 62; Stop 86
gttaaggaaaagttgcacaaagata

SEQ ID NO: 357851 - DNA, 25 bp, Artificial
  probe
  misc_feature (1)..(25): SEQ ID NO: 3524; WAN024A8H; Start 66; Stop 90
aggaaaagttgcacaaagataacgt

SEQ ID NO: 357852 - DNA, 25 bp, Artificial
  probe
  misc_feature (1)..(25): SEQ ID NO: 3524; WAN024A8H; Start 64; Stop 88
taaggaaaagttgcacaaagataac

SEQ ID NO: 357853 - DNA, 25 bp, Artificial
  probe
  misc_feature (1)..(25): SEQ ID NO: 3524; WAN024A8H; Start 58; Stop 82
taaagttaaggaaaagttgcacaaa

SEQ ID NO: 357854 - DNA, 25 bp, Artificial
  probe
  misc_feature (1)..(25): SEQ ID NO: 3524; WAN024A8H; Start 33; Stop 57
cagacaaaagaaagcgattacttta

SEQ ID NO: 357855 - DNA, 25 bp, Artificial
  probe
  misc_feature (1)..(25): SEQ ID NO: 3524; WAN024A8H; Start 57; Stop 81
ataaagttaaggaaaagttgcacaa

SEQ ID NO: 357856 - DNA, 25 bp, Artificial
  probe
  misc_feature (1)..(25): SEQ ID NO: 3524; WAN024A8H; Start 63; Stop 87
ttaaggaaaagttgcacaaagataa

SEQ ID NO: 357857 - DNA, 25 bp, Artificial
  probe
  misc_feature (1)..(25): SEQ ID NO: 3524; WAN024A8H; Start 23; Stop 47
tagaataaaacagacaaaagaaagc

SEQ ID NO: 357858 - DNA, 25 bp, Artificial
  probe
  misc_feature (1)..(25): SEQ ID NO: 3524; WAN024A8H; Start 56; Stop 80
tataaagttaaggaaaagttgcaca

SEQ ID NO: 357859 - DNA, 25 bp, Artificial
  probe
  misc_feature (1)..(25): SEQ ID NO: 3524; WAN024A8H; Start 34; Stop 58
agacaaaagaaagcgattactttat

SEQ ID NO: 357860 - DNA, 25 bp, Artificial
  probe
  misc_feature (1)..(25): SEQ ID NO: 3524; WAN024A8H; Start 110; Stop 134
ggttttaaggtattatagaggtgta

SEQ ID NO: 357861 - DNA, 25 bp, Artificial
  probe
  misc_feature (1)..(25): SEQ ID NO: 3525; WAN0249MK; Start 130; Stop 154
aacctagaaataagacaactgaagc

SEQ ID NO: 357862 - DNA, 25 bp, Artificial
  probe
  misc_feature (1)..(25): SEQ ID NO: 3525; WAN0249MK; Start 131; Stop 155
acctagaaataagacaactgaagct

SEQ ID NO: 357863 - DNA, 25 bp, Artificial
  probe
  misc_feature (1)..(25): SEQ ID NO: 3525; WAN0249MK; Start 123; Stop 147
actcagtaacctagaaataagacaa

SEQ ID NO: 357864 - DNA, 25 bp, Artificial
  probe
  misc_feature (1)..(25): SEQ ID NO: 3525; WAN0249MK; Start 122; Stop 146
aactcagtaacctagaaataagaca

SEQ ID NO: 357865 - DNA, 25 bp, Artificial
  probe
  misc_feature (1)..(25): SEQ ID NO: 3525; WAN0249MK; Start 124; Stop 148
ctcagtaacctagaaataagacaac

SEQ ID NO: 357866 - DNA, 25 bp, Artificial
  probe
  misc_feature (1)..(25): SEQ ID NO: 3525; WAN0249MK; Start 7; Stop 31
atgtttgaaagtgctgttttgagat

SEQ ID NO: 357867 - DNA, 25 bp, Artificial
  probe
  misc_feature (1)..(25): SEQ ID NO: 3525; WAN0249MK; Start 8; Stop 32
tgtttgaaagtgctgttttgagatt

SEQ ID NO: 357868 - DNA, 25 bp, Artificial
  probe
  misc_feature (1)..(25): SEQ ID NO: 3525; WAN0249MK; Start 4; Stop 28
aagatgtttgaaagtgctgttttga

SEQ ID NO: 357869 - DNA, 25 bp, Artificial
  probe
  misc_feature (1)..(25): SEQ ID NO: 3525; WAN0249MK; Start 3; Stop 27
aaagatgtttgaaagtgctgttttg

SEQ ID NO: 357870 - DNA, 25 bp, Artificial
  probe
  misc_feature (1)..(25): SEQ ID NO: 3525; WAN0249MK; Start 9; Stop 33
gtttgaaagtgctgttttgagattt

SEQ ID NO: 357871 - DNA, 25 bp, Artificial
  probe
  misc_feature (1)..(25): SEQ ID NO: 3525; WAN0249MK; Start 1; Stop 25
gaaaagatgtttgaaagtgctgttt

SEQ ID NO: 357872 - DNA, 25 bp, Artificial
  probe
  misc_feature (1)..(25): SEQ ID NO: 3525; WAN0249MK; Start 6; Stop 30
gatgtttgaaagtgctgttttgaga

SEQ ID NO: 357873 - DNA, 25 bp, Artificial
  probe
  misc_feature (1)..(25): SEQ ID NO: 3525; WAN0249MK; Start 5; Stop 29
agatgtttgaaagtgctgttttgag

SEQ ID NO: 357874 - DNA, 25 bp, Artificial
  probe
  misc_feature (1)..(25): SEQ ID NO: 3525; WAN0249MK; Start 127; Stop 151
agtaacctagaaataagacaactga

SEQ ID NO: 357875 - DNA, 25 bp, Artificial
  probe
  misc_feature (1)..(25): SEQ ID NO: 3525; WAN0249MK; Start 125; Stop 149
tcagtaacctagaaataagacaact

SEQ ID NO: 357876 - DNA, 25 bp, Artificial
  probe
  misc_feature (1)..(25): SEQ ID NO: 3525; WAN0249MK; Start 128; Stop 152
gtaacctagaaataagacaactgaa

SEQ ID NO: 357877 - DNA, 25 bp, Artificial
  probe
  misc_feature (1)..(25): SEQ ID NO: 3525; WAN0249MK; Start 129; Stop 153
taacctagaaataagacaactgaag

SEQ ID NO: 357878 - DNA, 25 bp, Artificial
  probe
  misc_feature (1)..(25): SEQ ID NO: 3525; WAN0249MK; Start 121; Stop 145
aaactcagtaacctagaaataagac

SEQ ID NO: 357879 - DNA, 25 bp, Artificial
  probe
  misc_feature (1)..(25): SEQ ID NO: 3525; WAN0249MK; Start 2; Stop 26
aaaagatgtttgaaagtgctgtttt

SEQ ID NO: 357880 - DNA, 25 bp, Artificial
  probe
  misc_feature (1)..(25): SEQ ID NO: 3525; WAN0249MK; Start 14; Stop 38
aaagtgctgttttgagatttcgatt

SEQ ID NO: 357881 - DNA, 25 bp, Artificial
  probe
  misc_feature (1)..(25): SEQ ID NO: 3525; WAN0249MK; Start 16; Stop 40
agtgctgttttgagatttcgattaa

SEQ ID NO: 357882 - DNA, 25 bp, Artificial
  probe
  misc_feature (1)..(25): SEQ ID NO: 3525; WAN0249MK; Start 15; Stop 39
aagtgctgttttgagatttcgatta

SEQ ID NO: 357883 - DNA, 25 bp, Artificial
  probe
  misc_feature (1)..(25): SEQ ID NO: 3525; WAN0249MK; Start 17; Stop 41
gtgctgttttgagatttcgattaaa

SEQ ID NO: 357884 - DNA, 25 bp, Artificial
  probe
  misc_feature (1)..(25): SEQ ID NO: 3525; WAN0249MK; Start 132; Stop 156
cctagaaataagacaactgaagctt

SEQ ID NO: 357885 - DNA, 25 bp, Artificial
  probe
  misc_feature (1)..(25): SEQ ID NO: 3525; WAN0249MK; Start 10; Stop 34
tttgaaagtgctgttttgagatttc

SEQ ID NO: 357886 - DNA, 25 bp, Artificial
  probe
  misc_feature (1)..(25): SEQ ID NO: 3525; WAN0249MK; Start 11; Stop 35
ttgaaagtgctgttttgagatttcg

SEQ ID NO: 357887 - DNA, 25 bp, Artificial
  probe
  misc_feature (1)..(25): SEQ ID NO: 3525; WAN0249MK; Start 138; Stop 162
aataagacaactgaagctttactct

SEQ ID NO: 357888 - DNA, 25 bp, Artificial
  probe
  misc_feature (1)..(25): SEQ ID NO: 3525; WAN0249MK; Start 18; Stop 42
tgctgttttgagatttcgattaaaa

SEQ ID NO: 357889 - DNA, 25 bp, Artificial
  probe
  misc_feature (1)..(25): SEQ ID NO: 3525; WAN0249MK; Start 137; Stop 161
aaataagacaactgaagctttactc

SEQ ID NO: 357890 - DNA, 25 bp, Artificial
  probe
  misc_feature (1)..(25): SEQ ID NO: 3525; WAN0249MK; Start 136; Stop 160
gaaataagacaactgaagctttact

SEQ ID NO: 357891 - DNA, 25 bp, Artificial
  probe
  misc_feature (1)..(25): SEQ ID NO: 3525; WAN0249MK; Start 135; Stop 159
agaaataagacaactgaagctttac

SEQ ID NO: 357892 - DNA, 25 bp, Artificial
  probe
  misc_feature (1)..(25): SEQ ID NO: 3525; WAN0249MK; Start 13; Stop 37
gaaagtgctgttttgagatttcgat

SEQ ID NO: 357893 - DNA, 25 bp, Artificial
  probe
  misc_feature (1)..(25): SEQ ID NO: 3525; WAN0249MK; Start 141; Stop 165
aagacaactgaagctttactctata

SEQ ID NO: 357894 - DNA, 25 bp, Artificial
  probe
  misc_feature (1)..(25): SEQ ID NO: 3526; WAN024ACY; Start 3; Stop 27
aaataatgggcaggactaggtcttt

SEQ ID NO: 357895 - DNA, 25 bp, Artificial
  probe
  misc_feature (1)..(25): SEQ ID NO: 3526; WAN024ACY; Start 4; Stop 28
aataatgggcaggactaggtctttg

SEQ ID NO: 357896 - DNA, 25 bp, Artificial
  probe
  misc_feature (1)..(25): SEQ ID NO: 3526; WAN024ACY; Start 46; Stop 70
aggatgtttgagaaggttttacagt

SEQ ID NO: 357897 - DNA, 25 bp, Artificial
  probe
  misc_feature (1)..(25): SEQ ID NO: 3526; WAN024ACY; Start 45; Stop 69
aaggatgtttgagaaggttttacag

SEQ ID NO: 357898 - DNA, 25 bp, Artificial
  probe
  misc_feature (1)..(25): SEQ ID NO: 3526; WAN024ACY; Start 47; Stop 71
ggatgtttgagaaggttttacagta

SEQ ID NO: 357899 - DNA, 25 bp, Artificial
  probe
  misc_feature (1)..(25): SEQ ID NO: 3526; WAN024ACY; Start 44; Stop 68
aaaggatgtttgagaaggttttaca

SEQ ID NO: 357900 - DNA, 25 bp, Artificial
  probe
  misc_feature (1)..(25): SEQ ID NO: 3526; WAN024ACY; Start 2; Stop 26
aaaataatgggcaggactaggtctt

SEQ ID NO: 357901 - DNA, 25 bp, Artificial
  probe
  misc_feature (1)..(25): SEQ ID NO: 3526; WAN024ACY; Start 43; Stop 67
taaaggatgtttgagaaggttttac

SEQ ID NO: 357902 - DNA, 25 bp, Artificial
  probe
  misc_feature (1)..(25): SEQ ID NO: 3526; WAN024ACY; Start 1; Stop 25
gaaaataatgggcaggactaggtct

SEQ ID NO: 357903 - DNA, 25 bp, Artificial
  probe
  misc_feature (1)..(25): SEQ ID NO: 3526; WAN024ACY; Start 48; Stop 72
gatgtttgagaaggttttacagtaa

SEQ ID NO: 357904 - DNA, 25 bp, Artificial
  probe
  misc_feature (1)..(25): SEQ ID NO: 3526; WAN024ACY; Start 42; Stop 66
ttaaaggatgtttgagaaggtttta

SEQ ID NO: 357905 - DNA, 25 bp, Artificial
  probe
  misc_feature (1)..(25): SEQ ID NO: 3526; WAN024ACY; Start 41; Stop 65
tttaaaggatgtttgagaaggtttt

SEQ ID NO: 357906 - DNA, 25 bp, Artificial
  probe
  misc_feature (1)..(25): SEQ ID NO: 3526; WAN024ACY; Start 40; Stop 64
ttttaaaggatgtttgagaaggttt

SEQ ID NO: 357907 - DNA, 25 bp, Artificial
  probe
  misc_feature (1)..(25): SEQ ID NO: 3526; WAN024ACY; Start 49; Stop 73
atgtttgagaaggttttacagtaaa

SEQ ID NO: 357908 - DNA, 25 bp, Artificial
  probe
  misc_feature (1)..(25): SEQ ID NO: 3526; WAN024ACY; Start 5; Stop 29
ataatgggcaggactaggtctttgc

SEQ ID NO: 357909 - DNA, 25 bp, Artificial
  probe
  misc_feature (1)..(25): SEQ ID NO: 3526; WAN024ACY; Start 50; Stop 74
tgtttgagaaggttttacagtaaaa

SEQ ID NO: 357910 - DNA, 25 bp, Artificial
  probe
  misc_feature (1)..(25): SEQ ID NO: 3526; WAN024ACY; Start 54; Stop 78
tgagaaggttttacagtaaaagaaa

SEQ ID NO: 357911 - DNA, 25 bp, Artificial
  probe
  misc_feature (1)..(25): SEQ ID NO: 3526; WAN024ACY; Start 53; Stop 77
ttgagaaggttttacagtaaaagaa

SEQ ID NO: 357912 - DNA, 25 bp, Artificial
  probe
  misc_feature (1)..(25): SEQ ID NO: 3526; WAN024ACY; Start 52; Stop 76
tttgagaaggttttacagtaaaaga

SEQ ID NO: 357913 - DNA, 25 bp, Artificial
  probe
  misc_feature (1)..(25): SEQ ID NO: 3526; WAN024ACY; Start 51; Stop 75
gtttgagaaggttttacagtaaaag

SEQ ID NO: 357914 - DNA, 25 bp, Artificial
  probe
  misc_feature (1)..(25): SEQ ID NO: 3526; WAN024ACY; Start 12; Stop 36
gcaggactaggtctttgcctctttt

SEQ ID NO: 357915 - DNA, 25 bp, Artificial
  probe
  misc_feature (1)..(25): SEQ ID NO: 3526; WAN024ACY; Start 55; Stop 79
gagaaggttttacagtaaaagaaaa

SEQ ID NO: 357916 - DNA, 25 bp, Artificial
  probe
  misc_feature (1)..(25): SEQ ID NO: 3526; WAN024ACY; Start 56; Stop 80
agaaggttttacagtaaaagaaaat

SEQ ID NO: 357917 - DNA, 25 bp, Artificial
  probe
  misc_feature (1)..(25): SEQ ID NO: 3527; WAN024ASL; Start 160; Stop 184
taataatctccttcaaaagtcgcct

SEQ ID NO: 357918 - DNA, 25 bp, Artificial
  probe
  misc_feature (1)..(25): SEQ ID NO: 3527; WAN024ASL; Start 159; Stop 183
ataataatctccttcaaaagtcgcc

SEQ ID NO: 357919 - DNA, 25 bp, Artificial
  probe
  misc_feature (1)..(25): SEQ ID NO: 3527; WAN024ASL; Start 161; Stop 185
aataatctccttcaaaagtcgcctg

SEQ ID NO: 357920 - DNA, 25 bp, Artificial
  probe
  misc_feature (1)..(25): SEQ ID NO: 3527; WAN024ASL; Start 158; Stop 182
cataataatctccttcaaaagtcgc

SEQ ID NO: 357921 - DNA, 25 bp, Artificial
  probe
  misc_feature (1)..(25): SEQ ID NO: 3527; WAN024ASL; Start 163; Stop 187
taatctccttcaaaagtcgcctgta

SEQ ID NO: 357922 - DNA, 25 bp, Artificial
  probe
  misc_feature (1)..(25): SEQ ID NO: 3527; WAN024ASL; Start 86; Stop 110
acagataacactgaattagtttgaa

SEQ ID NO: 357923 - DNA, 25 bp, Artificial
  probe
  misc_feature (1)..(25): SEQ ID NO: 3527; WAN024ASL; Start 85; Stop 109
aacagataacactgaattagtttga

SEQ ID NO: 357924 - DNA, 25 bp, Artificial
  probe
  misc_feature (1)..(25): SEQ ID NO: 3527; WAN024ASL; Start 82; Stop 106
tgaaacagataacactgaattagtt

SEQ ID NO: 357925 - DNA, 25 bp, Artificial
  probe
  misc_feature (1)..(25): SEQ ID NO: 3527; WAN024ASL; Start 81; Stop 105
ttgaaacagataacactgaattagt

SEQ ID NO: 357926 - DNA, 25 bp, Artificial
  probe
  misc_feature (1)..(25): SEQ ID NO: 3527; WAN024ASL; Start 162; Stop 186
ataatctccttcaaaagtcgcctgt

SEQ ID NO: 357927 - DNA, 25 bp, Artificial
  probe
  misc_feature (1)..(25): SEQ ID NO: 3527; WAN024ASL; Start 93; Stop 117
acactgaattagtttgaatttgatt

SEQ ID NO: 357928 - DNA, 25 bp, Artificial
  probe
  misc_feature (1)..(25): SEQ ID NO: 3527; WAN024ASL; Start 92; Stop 116
aacactgaattagtttgaatttgat

SEQ ID NO: 357929 - DNA, 25 bp, Artificial
  probe
  misc_feature (1)..(25): SEQ ID NO: 3527; WAN024ASL; Start 157; Stop 181
tcataataatctccttcaaaagtcg

SEQ ID NO: 357930 - DNA, 25 bp, Artificial
  probe
  misc_feature (1)..(25): SEQ ID NO: 3527; WAN024ASL; Start 80; Stop 104
tttgaaacagataacactgaattag

SEQ ID NO: 357931 - DNA, 25 bp, Artificial
  probe
  misc_feature (1)..(25): SEQ ID NO: 3527; WAN024ASL; Start 87; Stop 111
cagataacactgaattagtttgaat

SEQ ID NO: 357932 - DNA, 25 bp, Artificial
  probe
  misc_feature (1)..(25): SEQ ID NO: 3527; WAN024ASL; Start 91; Stop 115
taacactgaattagtttgaatttga

SEQ ID NO: 357933 - DNA, 25 bp, Artificial
  probe
  misc_feature (1)..(25): SEQ ID NO: 3527; WAN024ASL; Start 84; Stop 108
aaacagataacactgaattagtttg

SEQ ID NO: 357934 - DNA, 25 bp, Artificial
  probe
  misc_feature (1)..(25): SEQ ID NO: 3527; WAN024ASL; Start 79; Stop 103
atttgaaacagataacactgaatta

SEQ ID NO: 357935 - DNA, 25 bp, Artificial
  probe
  misc_feature (1)..(25): SEQ ID NO: 3527; WAN024ASL; Start 78; Stop 102
tatttgaaacagataacactgaatt

SEQ ID NO: 357936 - DNA, 25 bp, Artificial
  probe
  misc_feature (1)..(25): SEQ ID NO: 3527; WAN024ASL; Start 77; Stop 101
ttatttgaaacagataacactgaat

SEQ ID NO: 357937 - DNA, 25 bp, Artificial
  probe
  misc_feature (1)..(25): SEQ ID NO: 3527; WAN024ASL; Start 76; Stop 100
attatttgaaacagataacactgaa

SEQ ID NO: 357938 - DNA, 25 bp, Artificial
  probe
  misc_feature (1)..(25): SEQ ID NO: 3527; WAN024ASL; Start 94; Stop 118
cactgaattagtttgaatttgattt

SEQ ID NO: 357939 - DNA, 25 bp, Artificial
  probe
  misc_feature (1)..(25): SEQ ID NO: 3527; WAN024ASL; Start 83; Stop 107
gaaacagataacactgaattagttt

SEQ ID NO: 357940 - DNA, 25 bp, Artificial
  probe
  misc_feature (1)..(25): SEQ ID NO: 3527; WAN024ASL; Start 66; Stop 90
acctcctaatattatttgaaacaga

SEQ ID NO: 357941 - DNA, 25 bp, Artificial
  probe
  misc_feature (1)..(25): SEQ ID NO: 3527; WAN024ASL; Start 64; Stop 88
agacctcctaatattatttgaaaca

SEQ ID NO: 357942 - DNA, 25 bp, Artificial
  probe
  misc_feature (1)..(25): SEQ ID NO: 3527; WAN024ASL; Start 65; Stop 89
gacctcctaatattatttgaaacag

SEQ ID NO: 357943 - DNA, 25 bp, Artificial
  probe
  misc_feature (1)..(25): SEQ ID NO: 3527; WAN024ASL; Start 156; Stop 180
ttcataataatctccttcaaaagtc

SEQ ID NO: 357944 - DNA, 25 bp, Artificial
  probe
  misc_feature (1)..(25): SEQ ID NO: 3528; WAN024A78; Start 96; Stop 120
tataactcaaggtgctacaatatcc

SEQ ID NO: 357945 - DNA, 25 bp, Artificial
  probe
  misc_feature (1)..(25): SEQ ID NO: 3528; WAN024A78; Start 97; Stop 121
ataactcaaggtgctacaatatcct

SEQ ID NO: 357946 - DNA, 25 bp, Artificial
  probe
  misc_feature (1)..(25): SEQ ID NO: 3528; WAN024A78; Start 93; Stop 117
aactataactcaaggtgctacaata

SEQ ID NO: 357947 - DNA, 25 bp, Artificial
  probe
  misc_feature (1)..(25): SEQ ID NO: 3528; WAN024A78; Start 94; Stop 118
actataactcaaggtgctacaatat

SEQ ID NO: 357948 - DNA, 25 bp, Artificial
  probe
  misc_feature (1)..(25): SEQ ID NO: 3528; WAN024A78; Start 95; Stop 119
ctataactcaaggtgctacaatatc

SEQ ID NO: 357949 - DNA, 25 bp, Artificial
  probe
  misc_feature (1)..(25): SEQ ID NO: 3528; WAN024A78; Start 90; Stop 114
gtaaactataactcaaggtgctaca

SEQ ID NO: 357950 - DNA, 25 bp, Artificial
  probe
  misc_feature (1)..(25): SEQ ID NO: 3528; WAN024A78; Start 89; Stop 113
tgtaaactataactcaaggtgctac

SEQ ID NO: 357951 - DNA, 25 bp, Artificial
  probe
  misc_feature (1)..(25): SEQ ID NO: 3528; WAN024A78; Start 92; Stop 116
aaactataactcaaggtgctacaat

SEQ ID NO: 357952 - DNA, 25 bp, Artificial
  probe
  misc_feature (1)..(25): SEQ ID NO: 3528; WAN024A78; Start 87; Stop 111
tttgtaaactataactcaaggtgct

SEQ ID NO: 357953 - DNA, 25 bp, Artificial
  probe
  misc_feature (1)..(25): SEQ ID NO: 3528; WAN024A78; Start 91; Stop 115
taaactataactcaaggtgctacaa

SEQ ID NO: 357954 - DNA, 25 bp, Artificial
  probe
  misc_feature (1)..(25): SEQ ID NO: 3528; WAN024A78; Start 88; Stop 112
ttgtaaactataactcaaggtgcta

SEQ ID NO: 357955 - DNA, 25 bp, Artificial
  probe
  misc_feature (1)..(25): SEQ ID NO: 3528; WAN024A78; Start 86; Stop 110
atttgtaaactataactcaaggtgc

SEQ ID NO: 357956 - DNA, 25 bp, Artificial
  probe
  misc_feature (1)..(25): SEQ ID NO: 3528; WAN024A78; Start 100; Stop 124
actcaaggtgctacaatatccttaa

SEQ ID NO: 357957 - DNA, 25 bp, Artificial
  probe
  misc_feature (1)..(25): SEQ ID NO: 3528; WAN024A78; Start 99; Stop 123
aactcaaggtgctacaatatcctta

SEQ ID NO: 357958 - DNA, 25 bp, Artificial
  probe
  misc_feature (1)..(25): SEQ ID NO: 3528; WAN024A78; Start 98; Stop 122
taactcaaggtgctacaatatcctt

SEQ ID NO: 357959 - DNA, 25 bp, Artificial
  probe
  misc_feature (1)..(25): SEQ ID NO: 3528; WAN024A78; Start 101; Stop 125
ctcaaggtgctacaatatccttaat

SEQ ID NO: 357960 - DNA, 25 bp, Artificial
  probe
  misc_feature (1)..(25): SEQ ID NO: 3528; WAN024A78; Start 102; Stop 126
tcaaggtgctacaatatccttaata

SEQ ID NO: 357961 - DNA, 25 bp, Artificial
  probe
  misc_feature (1)..(25): SEQ ID NO: 3528; WAN024A78; Start 103; Stop 127
caaggtgctacaatatccttaataa

SEQ ID NO: 357962 - DNA, 25 bp, Artificial
  probe
  misc_feature (1)..(25): SEQ ID NO: 3528; WAN024A78; Start 105; Stop 129
aggtgctacaatatccttaataaaa

SEQ ID NO: 357963 - DNA, 25 bp, Artificial
  probe
  misc_feature (1)..(25): SEQ ID NO: 3528; WAN024A78; Start 106; Stop 130
ggtgctacaatatccttaataaaat

SEQ ID NO: 357964 - DNA, 25 bp, Artificial
  probe
  misc_feature (1)..(25): SEQ ID NO: 3528; WAN024A78; Start 104; Stop 128
aaggtgctacaatatccttaataaa

SEQ ID NO: 357965 - DNA, 25 bp, Artificial
  probe
  misc_feature (1)..(25): SEQ ID NO: 3528; WAN024A78; Start 123; Stop 147
aataaaataatatggaggtcacctt

SEQ ID NO: 357966 - DNA, 25 bp, Artificial
  probe
  misc_feature (1)..(25): SEQ ID NO: 3528; WAN024A78; Start 122; Stop 146
taataaaataatatggaggtcacct

SEQ ID NO: 357967 - DNA, 25 bp, Artificial
  probe
  misc_feature (1)..(25): SEQ ID NO: 3528; WAN024A78; Start 31; Stop 55
tcattttcaaaataaggtaatagct

SEQ ID NO: 357968 - DNA, 25 bp, Artificial
  probe
  misc_feature (1)..(25): SEQ ID NO: 3529; WAN0249S4; Start 23; Stop 47
accaatctcagcctcttcttctatc

SEQ ID NO: 357969 - DNA, 25 bp, Artificial
  probe
  misc_feature (1)..(25): SEQ ID NO: 3529; WAN0249S4; Start 22; Stop 46
caccaatctcagcctcttcttctat

SEQ ID NO: 357970 - DNA, 25 bp, Artificial
  probe
  misc_feature (1)..(25): SEQ ID NO: 3529; WAN0249S4; Start 26; Stop 50
aatctcagcctcttcttctatcgtg

SEQ ID NO: 357971 - DNA, 25 bp, Artificial
  probe
  misc_feature (1)..(25): SEQ ID NO: 3529; WAN0249S4; Start 25; Stop 49
caatctcagcctcttcttctatcgt

SEQ ID NO: 357972 - DNA, 25 bp, Artificial
  probe
  misc_feature (1)..(25): SEQ ID NO: 3529; WAN0249S4; Start 24; Stop 48
ccaatctcagcctcttcttctatcg

SEQ ID NO: 357973 - DNA, 25 bp, Artificial
  probe
  misc_feature (1)..(25): SEQ ID NO: 3529; WAN0249S4; Start 19; Stop 43
aatcaccaatctcagcctcttcttc

SEQ ID NO: 357974 - DNA, 25 bp, Artificial
  probe
  misc_feature (1)..(25): SEQ ID NO: 3529; WAN0249S4; Start 18; Stop 42
gaatcaccaatctcagcctcttctt

SEQ ID NO: 357975 - DNA, 25 bp, Artificial
  probe
  misc_feature (1)..(25): SEQ ID NO: 3529; WAN0249S4; Start 21; Stop 45
tcaccaatctcagcctcttcttcta

SEQ ID NO: 357976 - DNA, 25 bp, Artificial
  probe
  misc_feature (1)..(25): SEQ ID NO: 3529; WAN0249S4; Start 201; Stop 225
cccaactctcacctattcatacaaa

SEQ ID NO: 357977 - DNA, 25 bp, Artificial
  probe
  misc_feature (1)..(25): SEQ ID NO: 3529; WAN0249S4; Start 198; Stop 222
aatcccaactctcacctattcatac

SEQ ID NO: 357978 - DNA, 25 bp, Artificial
  probe
  misc_feature (1)..(25): SEQ ID NO: 3529; WAN0249S4; Start 197; Stop 221
caatcccaactctcacctattcata

SEQ ID NO: 357979 - DNA, 25 bp, Artificial
  probe
  misc_feature (1)..(25): SEQ ID NO: 3529; WAN0249S4; Start 46; Stop 70
tcgtgagaagtgattgtttattgac

SEQ ID NO: 357980 - DNA, 25 bp, Artificial
  probe
  misc_feature (1)..(25): SEQ ID NO: 3529; WAN0249S4; Start 199; Stop 223
atcccaactctcacctattcataca

SEQ ID NO: 357981 - DNA, 25 bp, Artificial
  probe
  misc_feature (1)..(25): SEQ ID NO: 3529; WAN0249S4; Start 194; Stop 218
aaacaatcccaactctcacctattc

SEQ ID NO: 357982 - DNA, 25 bp, Artificial
  probe
  misc_feature (1)..(25): SEQ ID NO: 3529; WAN0249S4; Start 202; Stop 226
ccaactctcacctattcatacaaag

SEQ ID NO: 357983 - DNA, 25 bp, Artificial
  probe
  misc_feature (1)..(25): SEQ ID NO: 3529; WAN0249S4; Start 200; Stop 224
tcccaactctcacctattcatacaa

SEQ ID NO: 357984 - DNA, 25 bp, Artificial
  probe
  misc_feature (1)..(25): SEQ ID NO: 3529; WAN0249S4; Start 27; Stop 51
atctcagcctcttcttctatcgtga

SEQ ID NO: 357985 - DNA, 25 bp, Artificial
  probe
  misc_feature (1)..(25): SEQ ID NO: 3529; WAN0249S4; Start 45; Stop 69
atcgtgagaagtgattgtttattga

SEQ ID NO: 357986 - DNA, 25 bp, Artificial
  probe
  misc_feature (1)..(25): SEQ ID NO: 3529; WAN0249S4; Start 196; Stop 220
acaatcccaactctcacctattcat

SEQ ID NO: 357987 - DNA, 25 bp, Artificial
  probe
  misc_feature (1)..(25): SEQ ID NO: 3529; WAN0249S4; Start 20; Stop 44
atcaccaatctcagcctcttcttct

SEQ ID NO: 357988 - DNA, 25 bp, Artificial
  probe
  misc_feature (1)..(25): SEQ ID NO: 3529; WAN0249S4; Start 195; Stop 219
aacaatcccaactctcacctattca

SEQ ID NO: 357989 - DNA, 25 bp, Artificial
  probe
  misc_feature (1)..(25): SEQ ID NO: 3529; WAN0249S4; Start 47; Stop 71
cgtgagaagtgattgtttattgaca

SEQ ID NO: 357990 - DNA, 25 bp, Artificial
  probe
  misc_feature (1)..(25): SEQ ID NO: 3529; WAN0249S4; Start 203; Stop 227
caactctcacctattcatacaaagg

SEQ ID NO: 357991 - DNA, 25 bp, Artificial
  probe
  misc_feature (1)..(25): SEQ ID NO: 3529; WAN0249S4; Start 42; Stop 66
tctatcgtgagaagtgattgtttat

SEQ ID NO: 357992 - DNA, 25 bp, Artificial
  probe
  misc_feature (1)..(25): SEQ ID NO: 3529; WAN0249S4; Start 205; Stop 229
actctcacctattcatacaaaggaa

SEQ ID NO: 357993 - DNA, 25 bp, Artificial
  probe
  misc_feature (1)..(25): SEQ ID NO: 3529; WAN0249S4; Start 204; Stop 228
aactctcacctattcatacaaagga

SEQ ID NO: 357994 - DNA, 25 bp, Artificial
  probe
  misc_feature (1)..(25): SEQ ID NO: 3529; WAN0249S4; Start 44; Stop 68
tatcgtgagaagtgattgtttattg

SEQ ID NO: 357995 - DNA, 25 bp, Artificial
  probe
  misc_feature (1)..(25): SEQ ID NO: 3529; WAN0249S4; Start 43; Stop 67
ctatcgtgagaagtgattgtttatt

SEQ ID NO: 357996 - DNA, 25 bp, Artificial
  probe
  misc_feature (1)..(25): SEQ ID NO: 3529; WAN0249S4; Start 151; Stop 175
aagctgacgtggtttgaagatattt

SEQ ID NO: 357997 - DNA, 25 bp, Artificial
  probe
  misc_feature (1)..(25): SEQ ID NO: 3529; WAN0249S4; Start 30; Stop 54
tcagcctcttcttctatcgtgagaa

SEQ ID NO: 357998 - DNA, 25 bp, Artificial
  probe
  misc_feature (1)..(25): SEQ ID NO: 3529; WAN0249S4; Start 150; Stop 174
gaagctgacgtggtttgaagatatt

SEQ ID NO: 357999 - DNA, 25 bp, Artificial
  probe
  misc_feature (1)..(25): SEQ ID NO: 3529; WAN0249S4; Start 206; Stop 230
ctctcacctattcatacaaaggaat

SEQ ID NO: 358000 - DNA, 25 bp, Artificial
  probe
  misc_feature (1)..(25): SEQ ID NO: 3529; WAN0249S4; Start 193; Stop 217
aaaacaatcccaactctcacctatt

SEQ ID NO: 358001 - DNA, 25 bp, Artificial
  probe
  misc_feature (1)..(25): SEQ ID NO: 3530; WAN024ADU; Start 2; Stop 26
aaacggtaatatttaaagggtatga

SEQ ID NO: 358002 - DNA, 25 bp, Artificial
  probe
  misc_feature (1)..(25): SEQ ID NO: 3530; WAN024ADU; Start 1; Stop 25
gaaacggtaatatttaaagggtatg

SEQ ID NO: 358003 - DNA, 25 bp, Artificial
  probe
  misc_feature (1)..(25): SEQ ID NO: 3530; WAN024ADU; Start 3; Stop 27
aacggtaatatttaaagggtatgat

SEQ ID NO: 358004 - DNA, 25 bp, Artificial
  probe
  misc_feature (1)..(25): SEQ ID NO: 3530; WAN024ADU; Start 24; Stop 48
tgatagaactatagaaagaaggaga

SEQ ID NO: 358005 - DNA, 25 bp, Artificial
  probe
  misc_feature (1)..(25): SEQ ID NO: 3530; WAN024ADU; Start 18; Stop 42
agggtatgatagaactatagaaaga

SEQ ID NO: 358006 - DNA, 25 bp, Artificial
  probe
  misc_feature (1)..(25): SEQ ID NO: 3530; WAN024ADU; Start 4; Stop 28
acggtaatatttaaagggtatgata

SEQ ID NO: 358007 - DNA, 25 bp, Artificial
  probe
  misc_feature (1)..(25): SEQ ID NO: 3530; WAN024ADU; Start 28; Stop 52
agaactatagaaagaaggagaattt

SEQ ID NO: 358008 - DNA, 25 bp, Artificial
  probe
  misc_feature (1)..(25): SEQ ID NO: 3530; WAN024ADU; Start 23; Stop 47
atgatagaactatagaaagaaggag

SEQ ID NO: 358009 - DNA, 25 bp, Artificial
  probe
  misc_feature (1)..(25): SEQ ID NO: 3530; WAN024ADU; Start 5; Stop 29
cggtaatatttaaagggtatgatag

SEQ ID NO: 358010 - DNA, 25 bp, Artificial
  probe
  misc_feature (1)..(25): SEQ ID NO: 3530; WAN024ADU; Start 25; Stop 49
gatagaactatagaaagaaggagaa

SEQ ID NO: 358011 - DNA, 25 bp, Artificial
  probe
  misc_feature (1)..(25): SEQ ID NO: 3530; WAN024ADU; Start 19; Stop 43
gggtatgatagaactatagaaagaa

SEQ ID NO: 358012 - DNA, 25 bp, Artificial
  probe
  misc_feature (1)..(25): SEQ ID NO: 3530; WAN024ADU; Start 17; Stop 41
aagggtatgatagaactatagaaag

SEQ ID NO: 358013 - DNA, 25 bp, Artificial
  probe
  misc_feature (1)..(25): SEQ ID NO: 3530; WAN024ADU; Start 31; Stop 55
actatagaaagaaggagaattttcg

SEQ ID NO: 358014 - DNA, 25 bp, Artificial
  probe
  misc_feature (1)..(25): SEQ ID NO: 3530; WAN024ADU; Start 32; Stop 56
ctatagaaagaaggagaattttcga

SEQ ID NO: 358015 - DNA, 25 bp, Artificial
  probe
  misc_feature (1)..(25): SEQ ID NO: 3530; WAN024ADU; Start 34; Stop 58
atagaaagaaggagaattttcgaat

SEQ ID NO: 358016 - DNA, 25 bp, Artificial
  probe
  misc_feature (1)..(25): SEQ ID NO: 3530; WAN024ADU; Start 33; Stop 57
tatagaaagaaggagaattttcgaa

SEQ ID NO: 358017 - DNA, 25 bp, Artificial
  probe
  misc_feature (1)..(25): SEQ ID NO: 3531; WAN0249HQ; Start 1; Stop 25
gaaagaagttgtcctatgtgggcag

SEQ ID NO: 358018 - DNA, 25 bp, Artificial
  probe
  misc_feature (1)..(25): SEQ ID NO: 3531; WAN0249HQ; Start 75; Stop 99
ttagacgaaagtcattttgagtgat

SEQ ID NO: 358019 - DNA, 25 bp, Artificial
  probe
  misc_feature (1)..(25): SEQ ID NO: 3531; WAN0249HQ; Start 74; Stop 98
attagacgaaagtcattttgagtga

SEQ ID NO: 358020 - DNA, 25 bp, Artificial
  probe
  misc_feature (1)..(25): SEQ ID NO: 3531; WAN0249HQ; Start 73; Stop 97
tattagacgaaagtcattttgagtg

SEQ ID NO: 358021 - DNA, 25 bp, Artificial
  probe
  misc_feature (1)..(25): SEQ ID NO: 3531; WAN0249HQ; Start 70; Stop 94
acatattagacgaaagtcattttga

SEQ ID NO: 358022 - DNA, 25 bp, Artificial
  probe
  misc_feature (1)..(25): SEQ ID NO: 3531; WAN0249HQ; Start 72; Stop 96
atattagacgaaagtcattttgagt

SEQ ID NO: 358023 - DNA, 25 bp, Artificial
  probe
  misc_feature (1)..(25): SEQ ID NO: 3531; WAN0249HQ; Start 71; Stop 95
catattagacgaaagtcattttgag

SEQ ID NO: 358024 - DNA, 25 bp, Artificial
  probe
  misc_feature (1)..(25): SEQ ID NO: 3531; WAN0249HQ; Start 69; Stop 93
aacatattagacgaaagtcattttg

SEQ ID NO: 358025 - DNA, 25 bp, Artificial
  probe
  misc_feature (1)..(25): SEQ ID NO: 3531; WAN0249HQ; Start 68; Stop 92
aaacatattagacgaaagtcatttt

SEQ ID NO: 358026 - DNA, 25 bp, Artificial
  probe
  misc_feature (1)..(25): SEQ ID NO: 3531; WAN0249HQ; Start 67; Stop 91
aaaacatattagacgaaagtcattt

SEQ ID NO: 358027 - DNA, 25 bp, Artificial
  probe
  misc_feature (1)..(25): SEQ ID NO: 3531; WAN0249HQ; Start 6; Stop 30
aagttgtcctatgtgggcagctttt

SEQ ID NO: 358028 - DNA, 25 bp, Artificial
  probe
  misc_feature (1)..(25): SEQ ID NO: 3532; WAN0249JQ; Start 41; Stop 65
ttttcgaagcaggtagaagaggagg

SEQ ID NO: 358029 - DNA, 25 bp, Artificial
  probe
  misc_feature (1)..(25): SEQ ID NO: 3533; WAN024DGG; Start 228; Stop 252
gattgatgtcttgattaacaacgct

SEQ ID NO: 358030 - DNA, 25 bp, Artificial
  probe
  misc_feature (1)..(25): SEQ ID NO: 3533; WAN024DGG; Start 227; Stop 251
agattgatgtcttgattaacaacgc

SEQ ID NO: 358031 - DNA, 25 bp, Artificial
  probe
  misc_feature (1)..(25): SEQ ID NO: 3533; WAN024DGG; Start 229; Stop 253
attgatgtcttgattaacaacgctg

SEQ ID NO: 358032 - DNA, 25 bp, Artificial
  probe
  misc_feature (1)..(25): SEQ ID NO: 3533; WAN024DGG; Start 162; Stop 186
aattgatattaccgacgattcagcc

SEQ ID NO: 358033 - DNA, 25 bp, Artificial
  probe
  misc_feature (1)..(25): SEQ ID NO: 3533; WAN024DGG; Start 233; Stop 257
atgtcttgattaacaacgctggtta

SEQ ID NO: 358034 - DNA, 25 bp, Artificial
  probe
  misc_feature (1)..(25): SEQ ID NO: 3533; WAN024DGG; Start 10; Stop 34
agtatgcctactattctcattaccg

SEQ ID NO: 358035 - DNA, 25 bp, Artificial
  probe
  misc_feature (1)..(25): SEQ ID NO: 3533; WAN024DGG; Start 232; Stop 256
gatgtcttgattaacaacgctggtt

SEQ ID NO: 358036 - DNA, 25 bp, Artificial
  probe
  misc_feature (1)..(25): SEQ ID NO: 3533; WAN024DGG; Start 230; Stop 254
ttgatgtcttgattaacaacgctgg

SEQ ID NO: 358037 - DNA, 25 bp, Artificial
  probe
  misc_feature (1)..(25): SEQ ID NO: 3533; WAN024DGG; Start 385; Stop 409
catatcatcaacatcgtcagcatgg

SEQ ID NO: 358038 - DNA, 25 bp, Artificial
  probe
  misc_feature (1)..(25): SEQ ID NO: 3533; WAN024DGG; Start 118; Stop 142
ttagcccaactctacggaaattatt

SEQ ID NO: 358039 - DNA, 25 bp, Artificial
  probe
  misc_feature (1)..(25): SEQ ID NO: 3533; WAN024DGG; Start 117; Stop 141
attagcccaactctacggaaattat

SEQ ID NO: 358040 - DNA, 25 bp, Artificial
  probe
  misc_feature (1)..(25): SEQ ID NO: 3533; WAN024DGG; Start 234; Stop 258
tgtcttgattaacaacgctggttac

SEQ ID NO: 358041 - DNA, 25 bp, Artificial
  probe
  misc_feature (1)..(25): SEQ ID NO: 3533; WAN024DGG; Start 89; Stop 113
tcatcttgcttggtagaaataagga

SEQ ID NO: 358042 - DNA, 25 bp, Artificial
  probe
  misc_feature (1)..(25): SEQ ID NO: 3533; WAN024DGG; Start 88; Stop 112
ctcatcttgcttggtagaaataagg

SEQ ID NO: 358043 - DNA, 25 bp, Artificial
  probe
  misc_feature (1)..(25): SEQ ID NO: 3533; WAN024DGG; Start 119; Stop 143
tagcccaactctacggaaattattc

SEQ ID NO: 358044 - DNA, 25 bp, Artificial
  probe
  misc_feature (1)..(25): SEQ ID NO: 3533; WAN024DGG; Start 90; Stop 114
catcttgcttggtagaaataaggaa

SEQ ID NO: 358045 - DNA, 25 bp, Artificial
  probe
  misc_feature (1)..(25): SEQ ID NO: 3533; WAN024DGG; Start 155; Stop 179
tgattgaaattgatattaccgacga

SEQ ID NO: 358046 - DNA, 25 bp, Artificial
  probe
  misc_feature (1)..(25): SEQ ID NO: 3533; WAN024DGG; Start 161; Stop 185
aaattgatattaccgacgattcagc

SEQ ID NO: 358047 - DNA, 25 bp, Artificial
  probe
  misc_feature (1)..(25): SEQ ID NO: 3533; WAN024DGG; Start 85; Stop 109
caactcatcttgcttggtagaaata

SEQ ID NO: 358048 - DNA, 25 bp, Artificial
  probe
  misc_feature (1)..(25): SEQ ID NO: 3533; WAN024DGG; Start 87; Stop 111
actcatcttgcttggtagaaataag

SEQ ID NO: 358049 - DNA, 25 bp, Artificial
  probe
  misc_feature (1)..(25): SEQ ID NO: 3533; WAN024DGG; Start 200; Stop 224
taactgatctttatctccgctatgg

SEQ ID NO: 358050 - DNA, 25 bp, Artificial
  probe
  misc_feature (1)..(25): SEQ ID NO: 3533; WAN024DGG; Start 198; Stop 222
ggtaactgatctttatctccgctat

SEQ ID NO: 358051 - DNA, 25 bp, Artificial
  probe
  misc_feature (1)..(25): SEQ ID NO: 3533; WAN024DGG; Start 4; Stop 28
aggataagtatgcctactattctca

SEQ ID NO: 358052 - DNA, 25 bp, Artificial
  probe
  misc_feature (1)..(25): SEQ ID NO: 3533; WAN024DGG; Start 422; Stop 446
ctactggcaagtctagtctttactc

SEQ ID NO: 358053 - DNA, 25 bp, Artificial
  probe
  misc_feature (1)..(25): SEQ ID NO: 3533; WAN024DGG; Start 197; Stop 221
tggtaactgatctttatctccgcta

SEQ ID NO: 358054 - DNA, 25 bp, Artificial
  probe
  misc_feature (1)..(25): SEQ ID NO: 3533; WAN024DGG; Start 116; Stop 140
aattagcccaactctacggaaatta

SEQ ID NO: 358055 - DNA, 25 bp, Artificial
  probe
  misc_feature (1)..(25): SEQ ID NO: 3533; WAN024DGG; Start 423; Stop 447
tactggcaagtctagtctttactca

SEQ ID NO: 358056 - DNA, 25 bp, Artificial
  probe
  misc_feature (1)..(25): SEQ ID NO: 3533; WAN024DGG; Start 91; Stop 115
atcttgcttggtagaaataaggaaa

SEQ ID NO: 358057 - DNA, 25 bp, Artificial
  probe
  misc_feature (1)..(25): SEQ ID NO: 3533; WAN024DGG; Start 86; Stop 110
aactcatcttgcttggtagaaataa

SEQ ID NO: 358058 - DNA, 25 bp, Artificial
  probe
  misc_feature (1)..(25): SEQ ID NO: 3533; WAN024DGG; Start 199; Stop 223
gtaactgatctttatctccgctatg

SEQ ID NO: 358059 - DNA, 25 bp, Artificial
  probe
  misc_feature (1)..(25): SEQ ID NO: 3533; WAN024DGG; Start 115; Stop 139
aaattagcccaactctacggaaatt

SEQ ID NO: 358060 - DNA, 25 bp, Artificial
  probe
  misc_feature (1)..(25): SEQ ID NO: 3533; WAN024DGG; Start 331; Stop 355
ctgatgaatctgtctcgtcaccttg

SEQ ID NO: 358061 - DNA, 25 bp, Artificial
  probe
  misc_feature (1)..(25): SEQ ID NO: 3533; WAN024DGG; Start 231; Stop 255
tgatgtcttgattaacaacgctggt

SEQ ID NO: 358062 - DNA, 25 bp, Artificial
  probe
  misc_feature (1)..(25): SEQ ID NO: 3534; WAN0249KY; Start 2; Stop 26
aaataaaggagtttctggttctgga

SEQ ID NO: 358063 - DNA, 25 bp, Artificial
  probe
  misc_feature (1)..(25): SEQ ID NO: 3534; WAN0249KY; Start 4; Stop 28
ataaaggagtttctggttctggatt

SEQ ID NO: 358064 - DNA, 25 bp, Artificial
  probe
  misc_feature (1)..(25): SEQ ID NO: 3534; WAN0249KY; Start 3; Stop 27
aataaaggagtttctggttctggat

SEQ ID NO: 358065 - DNA, 25 bp, Artificial
  probe
  misc_feature (1)..(25): SEQ ID NO: 3534; WAN0249KY; Start 5; Stop 29
taaaggagtttctggttctggattg

SEQ ID NO: 358066 - DNA, 25 bp, Artificial
  probe
  misc_feature (1)..(25): SEQ ID NO: 3534; WAN0249KY; Start 9; Stop 33
ggagtttctggttctggattgtaaa

SEQ ID NO: 358067 - DNA, 25 bp, Artificial
  probe
  misc_feature (1)..(25): SEQ ID NO: 3534; WAN0249KY; Start 8; Stop 32
aggagtttctggttctggattgtaa

SEQ ID NO: 358068 - DNA, 25 bp, Artificial
  probe
  misc_feature (1)..(25): SEQ ID NO: 3534; WAN0249KY; Start 7; Stop 31
aaggagtttctggttctggattgta

SEQ ID NO: 358069 - DNA, 25 bp, Artificial
  probe
  misc_feature (1)..(25): SEQ ID NO: 3534; WAN0249KY; Start 6; Stop 30
aaaggagtttctggttctggattgt

SEQ ID NO: 358070 - DNA, 25 bp, Artificial
  probe
  misc_feature (1)..(25): SEQ ID NO: 3534; WAN0249KY; Start 1; Stop 25
gaaataaaggagtttctggttctgg

SEQ ID NO: 358071 - DNA, 25 bp, Artificial
  probe
  misc_feature (1)..(25): SEQ ID NO: 3534; WAN0249KY; Start 10; Stop 34
gagtttctggttctggattgtaaaa

SEQ ID NO: 358072 - DNA, 25 bp, Artificial
  probe
  misc_feature (1)..(25): SEQ ID NO: 3534; WAN0249KY; Start 37; Stop 61
tgagttgttttaattgataaggagt

SEQ ID NO: 358073 - DNA, 25 bp, Artificial
  probe
  misc_feature (1)..(25): SEQ ID NO: 3534; WAN0249KY; Start 36; Stop 60
atgagttgttttaattgataaggag

SEQ ID NO: 358074 - DNA, 25 bp, Artificial
  probe
  misc_feature (1)..(25): SEQ ID NO: 3534; WAN0249KY; Start 35; Stop 59
aatgagttgttttaattgataagga

SEQ ID NO: 358075 - DNA, 25 bp, Artificial
  probe
  misc_feature (1)..(25): SEQ ID NO: 3534; WAN0249KY; Start 40; Stop 64
gttgttttaattgataaggagtaga

SEQ ID NO: 358076 - DNA, 25 bp, Artificial
  probe
  misc_feature (1)..(25): SEQ ID NO: 3534; WAN0249KY; Start 39; Stop 63
agttgttttaattgataaggagtag

SEQ ID NO: 358077 - DNA, 25 bp, Artificial
  probe
  misc_feature (1)..(25): SEQ ID NO: 3534; WAN0249KY; Start 38; Stop 62
gagttgttttaattgataaggagta

SEQ ID NO: 358078 - DNA, 25 bp, Artificial
  probe
  misc_feature (1)..(25): SEQ ID NO: 3535; WAN0249NG; Start 20; Stop 44
atgtccaagtctctctattatttct

SEQ ID NO: 358079 - DNA, 25 bp, Artificial
  probe
  misc_feature (1)..(25): SEQ ID NO: 3535; WAN0249NG; Start 21; Stop 45
tgtccaagtctctctattatttcta

SEQ ID NO: 358080 - DNA, 25 bp, Artificial
  probe
  misc_feature (1)..(25): SEQ ID NO: 3535; WAN0249NG; Start 19; Stop 43
tatgtccaagtctctctattatttc

SEQ ID NO: 358081 - DNA, 25 bp, Artificial
  probe
  misc_feature (1)..(25): SEQ ID NO: 3535; WAN0249NG; Start 22; Stop 46
gtccaagtctctctattatttctaa

SEQ ID NO: 358082 - DNA, 25 bp, Artificial
  probe
  misc_feature (1)..(25): SEQ ID NO: 3535; WAN0249NG; Start 53; Stop 77
ggaagaaataaagagaggcttttgg

SEQ ID NO: 358083 - DNA, 25 bp, Artificial
  probe
  misc_feature (1)..(25): SEQ ID NO: 3535; WAN0249NG; Start 18; Stop 42
ttatgtccaagtctctctattattt

SEQ ID NO: 358084 - DNA, 25 bp, Artificial
  probe
  misc_feature (1)..(25): SEQ ID NO: 3535; WAN0249NG; Start 17; Stop 41
tttatgtccaagtctctctattatt

SEQ ID NO: 358085 - DNA, 25 bp, Artificial
  probe
  misc_feature (1)..(25): SEQ ID NO: 3535; WAN0249NG; Start 16; Stop 40
ttttatgtccaagtctctctattat

SEQ ID NO: 358086 - DNA, 25 bp, Artificial
  probe
  misc_feature (1)..(25): SEQ ID NO: 3536; WAN024AFH; Start 54; Stop 78
ctaaaaggctttgattttgtctgga

SEQ ID NO: 358087 - DNA, 25 bp, Artificial
  probe
  misc_feature (1)..(25): SEQ ID NO: 3536; WAN024AFH; Start 55; Stop 79
taaaaggctttgattttgtctggaa

SEQ ID NO: 358088 - DNA, 25 bp, Artificial
  probe
  misc_feature (1)..(25): SEQ ID NO: 3536; WAN024AFH; Start 56; Stop 80
aaaaggctttgattttgtctggaag

SEQ ID NO: 358089 - DNA, 25 bp, Artificial
  probe
  misc_feature (1)..(25): SEQ ID NO: 3536; WAN024AFH; Start 53; Stop 77
cctaaaaggctttgattttgtctgg

SEQ ID NO: 358090 - DNA, 25 bp, Artificial
  probe
  misc_feature (1)..(25): SEQ ID NO: 3536; WAN024AFH; Start 62; Stop 86
ctttgattttgtctggaagctgagg

SEQ ID NO: 358091 - DNA, 25 bp, Artificial
  probe
  misc_feature (1)..(25): SEQ ID NO: 3536; WAN024AFH; Start 63; Stop 87
tttgattttgtctggaagctgaggg

SEQ ID NO: 358092 - DNA, 25 bp, Artificial
  probe
  misc_feature (1)..(25): SEQ ID NO: 3536; WAN024AFH; Start 57; Stop 81
aaaggctttgattttgtctggaagc

SEQ ID NO: 358093 - DNA, 25 bp, Artificial
  probe
  misc_feature (1)..(25): SEQ ID NO: 3536; WAN024AFH; Start 61; Stop 85
gctttgattttgtctggaagctgag

SEQ ID NO: 358094 - DNA, 25 bp, Artificial
  probe
  misc_feature (1)..(25): SEQ ID NO: 3536; WAN024AFH; Start 58; Stop 82
aaggctttgattttgtctggaagct

SEQ ID NO: 358095 - DNA, 25 bp, Artificial
  probe
  misc_feature (1)..(25): SEQ ID NO: 3536; WAN024AFH; Start 60; Stop 84
ggctttgattttgtctggaagctga

SEQ ID NO: 358096 - DNA, 25 bp, Artificial
  probe
  misc_feature (1)..(25): SEQ ID NO: 3536; WAN024AFH; Start 59; Stop 83
aggctttgattttgtctggaagctg

SEQ ID NO: 358097 - DNA, 25 bp, Artificial
  probe
  misc_feature (1)..(25): SEQ ID NO: 3537; WAN024GKS; Start 336; Stop 360
gcaaccgcaagtagtcatagattaa

SEQ ID NO: 358098 - DNA, 25 bp, Artificial
  probe
  misc_feature (1)..(25): SEQ ID NO: 3537; WAN024GKS; Start 72; Stop 96
tctgccaataatgagtagaacaagc

SEQ ID NO: 358099 - DNA, 25 bp, Artificial
  probe
  misc_feature (1)..(25): SEQ ID NO: 3537; WAN024GKS; Start 71; Stop 95
atctgccaataatgagtagaacaag

SEQ ID NO: 358100 - DNA, 25 bp, Artificial
  probe
  misc_feature (1)..(25): SEQ ID NO: 3537; WAN024GKS; Start 70; Stop 94
aatctgccaataatgagtagaacaa

SEQ ID NO: 358101 - DNA, 25 bp, Artificial
  probe
  misc_feature (1)..(25): SEQ ID NO: 3537; WAN024GKS; Start 73; Stop 97
ctgccaataatgagtagaacaagcc

SEQ ID NO: 358102 - DNA, 25 bp, Artificial
  probe
  misc_feature (1)..(25): SEQ ID NO: 3537; WAN024GKS; Start 335; Stop 359
ggcaaccgcaagtagtcatagatta

SEQ ID NO: 358103 - DNA, 25 bp, Artificial
  probe
  misc_feature (1)..(25): SEQ ID NO: 3537; WAN024GKS; Start 77; Stop 101
caataatgagtagaacaagcccgat

SEQ ID NO: 358104 - DNA, 25 bp, Artificial
  probe
  misc_feature (1)..(25): SEQ ID NO: 3537; WAN024GKS; Start 78; Stop 102
aataatgagtagaacaagcccgatc

SEQ ID NO: 358105 - DNA, 25 bp, Artificial
  probe
  misc_feature (1)..(25): SEQ ID NO: 3537; WAN024GKS; Start 333; Stop 357
taggcaaccgcaagtagtcatagat

SEQ ID NO: 358106 - DNA, 25 bp, Artificial
  probe
  misc_feature (1)..(25): SEQ ID NO: 3537; WAN024GKS; Start 69; Stop 93
aaatctgccaataatgagtagaaca

SEQ ID NO: 358107 - DNA, 25 bp, Artificial
  probe
  misc_feature (1)..(25): SEQ ID NO: 3537; WAN024GKS; Start 110; Stop 134
cggaaatcaacgcatgtattcatta

SEQ ID NO: 358108 - DNA, 25 bp, Artificial
  probe
  misc_feature (1)..(25): SEQ ID NO: 3537; WAN024GKS; Start 332; Stop 356
ttaggcaaccgcaagtagtcataga

SEQ ID NO: 358109 - DNA, 25 bp, Artificial
  probe
  misc_feature (1)..(25): SEQ ID NO: 3537; WAN024GKS; Start 104; Stop 128
taaagacggaaatcaacgcatgtat

SEQ ID NO: 358110 - DNA, 25 bp, Artificial
  probe
  misc_feature (1)..(25): SEQ ID NO: 3537; WAN024GKS; Start 111; Stop 135
ggaaatcaacgcatgtattcattac

SEQ ID NO: 358111 - DNA, 25 bp, Artificial
  probe
  misc_feature (1)..(25): SEQ ID NO: 3537; WAN024GKS; Start 331; Stop 355
gttaggcaaccgcaagtagtcatag

SEQ ID NO: 358112 - DNA, 25 bp, Artificial
  probe
  misc_feature (1)..(25): SEQ ID NO: 3537; WAN024GKS; Start 105; Stop 129
aaagacggaaatcaacgcatgtatt

SEQ ID NO: 358113 - DNA, 25 bp, Artificial
  probe
  misc_feature (1)..(25): SEQ ID NO: 3537; WAN024GKS; Start 76; Stop 100
ccaataatgagtagaacaagcccga

SEQ ID NO: 358114 - DNA, 25 bp, Artificial
  probe
  misc_feature (1)..(25): SEQ ID NO: 3537; WAN024GKS; Start 103; Stop 127
gtaaagacggaaatcaacgcatgta

SEQ ID NO: 358115 - DNA, 25 bp, Artificial
  probe
  misc_feature (1)..(25): SEQ ID NO: 3537; WAN024GKS; Start 109; Stop 133
acggaaatcaacgcatgtattcatt

SEQ ID NO: 358116 - DNA, 25 bp, Artificial
  probe
  misc_feature (1)..(25): SEQ ID NO: 3537; WAN024GKS; Start 334; Stop 358
aggcaaccgcaagtagtcatagatt

SEQ ID NO: 358117 - DNA, 25 bp, Artificial
  probe
  misc_feature (1)..(25): SEQ ID NO: 3537; WAN024GKS; Start 108; Stop 132
gacggaaatcaacgcatgtattcat

SEQ ID NO: 358118 - DNA, 25 bp, Artificial
  probe
  misc_feature (1)..(25): SEQ ID NO: 3537; WAN024GKS; Start 106; Stop 130
aagacggaaatcaacgcatgtattc

SEQ ID NO: 358119 - DNA, 25 bp, Artificial
  probe
  misc_feature (1)..(25): SEQ ID NO: 3537; WAN024GKS; Start 74; Stop 98
tgccaataatgagtagaacaagccc

SEQ ID NO: 358120 - DNA, 25 bp, Artificial
  probe
  misc_feature (1)..(25): SEQ ID NO: 3537; WAN024GKS; Start 24; Stop 48
ggctatgatcagagatagaccaatc

SEQ ID NO: 358121 - DNA, 25 bp, Artificial
  probe
  misc_feature (1)..(25): SEQ ID NO: 3537; WAN024GKS; Start 16; Stop 40
ttcctatcggctatgatcagagata

SEQ ID NO: 358122 - DNA, 25 bp, Artificial
  probe
  misc_feature (1)..(25): SEQ ID NO: 3537; WAN024GKS; Start 20; Stop 44
tatcggctatgatcagagatagacc

SEQ ID NO: 358123 - DNA, 25 bp, Artificial
  probe
  misc_feature (1)..(25): SEQ ID NO: 3537; WAN024GKS; Start 112; Stop 136
gaaatcaacgcatgtattcattaca

SEQ ID NO: 358124 - DNA, 25 bp, Artificial
  probe
  misc_feature (1)..(25): SEQ ID NO: 3537; WAN024GKS; Start 23; Stop 47
cggctatgatcagagatagaccaat

SEQ ID NO: 358125 - DNA, 25 bp, Artificial
  probe
  misc_feature (1)..(25): SEQ ID NO: 3537; WAN024GKS; Start 107; Stop 131
agacggaaatcaacgcatgtattca

SEQ ID NO: 358126 - DNA, 25 bp, Artificial
  probe
  misc_feature (1)..(25): SEQ ID NO: 3537; WAN024GKS; Start 75; Stop 99
gccaataatgagtagaacaagcccg

SEQ ID NO: 358127 - DNA, 25 bp, Artificial
  probe
  misc_feature (1)..(25): SEQ ID NO: 3537; WAN024GKS; Start 25; Stop 49
gctatgatcagagatagaccaatct

SEQ ID NO: 358128 - DNA, 25 bp, Artificial
  probe
  misc_feature (1)..(25): SEQ ID NO: 3537; WAN024GKS; Start 21; Stop 45
atcggctatgatcagagatagacca

SEQ ID NO: 358129 - DNA, 25 bp, Artificial
  probe
  misc_feature (1)..(25): SEQ ID NO: 3537; WAN024GKS; Start 22; Stop 46
tcggctatgatcagagatagaccaa

SEQ ID NO: 358130 - DNA, 25 bp, Artificial
  probe
  misc_feature (1)..(25): SEQ ID NO: 3538; WAN0249J9; Start 47; Stop 71
ttacgaatagaaagaaagaggaggg

SEQ ID NO: 358131 - DNA, 25 bp, Artificial
  probe
  misc_feature (1)..(25): SEQ ID NO: 3538; WAN0249J9; Start 46; Stop 70
tttacgaatagaaagaaagaggagg

SEQ ID NO: 358132 - DNA, 25 bp, Artificial
  probe
  misc_feature (1)..(25): SEQ ID NO: 3538; WAN0249J9; Start 51; Stop 75
gaatagaaagaaagaggaggggaat

SEQ ID NO: 358133 - DNA, 25 bp, Artificial
  probe
  misc_feature (1)..(25): SEQ ID NO: 3538; WAN0249J9; Start 52; Stop 76
aatagaaagaaagaggaggggaatt

SEQ ID NO: 358134 - DNA, 25 bp, Artificial
  probe
  misc_feature (1)..(25): SEQ ID NO: 3538; WAN0249J9; Start 48; Stop 72
tacgaatagaaagaaagaggagggg

SEQ ID NO: 358135 - DNA, 25 bp, Artificial
  probe
  misc_feature (1)..(25): SEQ ID NO: 3538; WAN0249J9; Start 11; Stop 35
acttaggatacaaaccagacctatt

SEQ ID NO: 358136 - DNA, 25 bp, Artificial
  probe
  misc_feature (1)..(25): SEQ ID NO: 3538; WAN0249J9; Start 50; Stop 74
cgaatagaaagaaagaggaggggaa

SEQ ID NO: 358137 - DNA, 25 bp, Artificial
  probe
  misc_feature (1)..(25): SEQ ID NO: 3538; WAN0249J9; Start 12; Stop 36
cttaggatacaaaccagacctattt

SEQ ID NO: 358138 - DNA, 25 bp, Artificial
  probe
  misc_feature (1)..(25): SEQ ID NO: 3538; WAN0249J9; Start 49; Stop 73
acgaatagaaagaaagaggagggga

SEQ ID NO: 358139 - DNA, 25 bp, Artificial
  probe
  misc_feature (1)..(25): SEQ ID NO: 3538; WAN0249J9; Start 45; Stop 69
ttttacgaatagaaagaaagaggag

SEQ ID NO: 358140 - DNA, 25 bp, Artificial
  probe
  misc_feature (1)..(25): SEQ ID NO: 3538; WAN0249J9; Start 53; Stop 77
atagaaagaaagaggaggggaattc

SEQ ID NO: 358141 - DNA, 25 bp, Artificial
  probe
  misc_feature (1)..(25): SEQ ID NO: 3538; WAN0249J9; Start 54; Stop 78
tagaaagaaagaggaggggaattca

SEQ ID NO: 358142 - DNA, 25 bp, Artificial
  probe
  misc_feature (1)..(25): SEQ ID NO: 3538; WAN0249J9; Start 13; Stop 37
ttaggatacaaaccagacctatttt

SEQ ID NO: 358143 - DNA, 25 bp, Artificial
  probe
  misc_feature (1)..(25): SEQ ID NO: 3538; WAN0249J9; Start 44; Stop 68
cttttacgaatagaaagaaagagga

SEQ ID NO: 358144 - DNA, 25 bp, Artificial
  probe
  misc_feature (1)..(25): SEQ ID NO: 3538; WAN0249J9; Start 43; Stop 67
tcttttacgaatagaaagaaagagg

SEQ ID NO: 358145 - DNA, 25 bp, Artificial
  probe
  misc_feature (1)..(25): SEQ ID NO: 3538; WAN0249J9; Start 41; Stop 65
tgtcttttacgaatagaaagaaaga

SEQ ID NO: 358146 - DNA, 25 bp, Artificial
  probe
  misc_feature (1)..(25): SEQ ID NO: 3538; WAN0249J9; Start 38; Stop 62
tcttgtcttttacgaatagaaagaa

SEQ ID NO: 358147 - DNA, 25 bp, Artificial
  probe
  misc_feature (1)..(25): SEQ ID NO: 3538; WAN0249J9; Start 37; Stop 61
ttcttgtcttttacgaatagaaaga

SEQ ID NO: 358148 - DNA, 25 bp, Artificial
  probe
  misc_feature (1)..(25): SEQ ID NO: 3538; WAN0249J9; Start 42; Stop 66
gtcttttacgaatagaaagaaagag

SEQ ID NO: 358149 - DNA, 25 bp, Artificial
  probe
  misc_feature (1)..(25): SEQ ID NO: 3538; WAN0249J9; Start 40; Stop 64
ttgtcttttacgaatagaaagaaag

SEQ ID NO: 358150 - DNA, 25 bp, Artificial
  probe
  misc_feature (1)..(25): SEQ ID NO: 3538; WAN0249J9; Start 39; Stop 63
cttgtcttttacgaatagaaagaaa

SEQ ID NO: 358151 - DNA, 25 bp, Artificial
  probe
  misc_feature (1)..(25): SEQ ID NO: 3538; WAN0249J9; Start 36; Stop 60
tttcttgtcttttacgaatagaaag

SEQ ID NO: 358152 - DNA, 25 bp, Artificial
  probe
  misc_feature (1)..(25): SEQ ID NO: 3538; WAN0249J9; Start 35; Stop 59
ttttcttgtcttttacgaatagaaa

SEQ ID NO: 358153 - DNA, 25 bp, Artificial
  probe
  misc_feature (1)..(25): SEQ ID NO: 3539; WAN024ESE; Start 106; Stop 130
tctggaattaaacaaatggacaatg

SEQ ID NO: 358154 - DNA, 25 bp, Artificial
  probe
  misc_feature (1)..(25): SEQ ID NO: 3539; WAN024ESE; Start 103; Stop 127
gaatctggaattaaacaaatggaca

SEQ ID NO: 358155 - DNA, 25 bp, Artificial
  probe
  misc_feature (1)..(25): SEQ ID NO: 3539; WAN024ESE; Start 102; Stop 126
agaatctggaattaaacaaatggac

SEQ ID NO: 358156 - DNA, 25 bp, Artificial
  probe
  misc_feature (1)..(25): SEQ ID NO: 3539; WAN024ESE; Start 107; Stop 131
ctggaattaaacaaatggacaatgt

SEQ ID NO: 358157 - DNA, 25 bp, Artificial
  probe
  misc_feature (1)..(25): SEQ ID NO: 3539; WAN024ESE; Start 104; Stop 128
aatctggaattaaacaaatggacaa

SEQ ID NO: 358158 - DNA, 25 bp, Artificial
  probe
  misc_feature (1)..(25): SEQ ID NO: 3539; WAN024ESE; Start 105; Stop 129
atctggaattaaacaaatggacaat

SEQ ID NO: 358159 - DNA, 25 bp, Artificial
  probe
  misc_feature (1)..(25): SEQ ID NO: 3539; WAN024ESE; Start 101; Stop 125
aagaatctggaattaaacaaatgga

SEQ ID NO: 358160 - DNA, 25 bp, Artificial
  probe
  misc_feature (1)..(25): SEQ ID NO: 3539; WAN024ESE; Start 109; Stop 133
ggaattaaacaaatggacaatgtca

SEQ ID NO: 358161 - DNA, 25 bp, Artificial
  probe
  misc_feature (1)..(25): SEQ ID NO: 3539; WAN024ESE; Start 108; Stop 132
tggaattaaacaaatggacaatgtc

SEQ ID NO: 358162 - DNA, 25 bp, Artificial
  probe
  misc_feature (1)..(25): SEQ ID NO: 3539; WAN024ESE; Start 84; Stop 108
atacctgacagaatctaaagaatct

SEQ ID NO: 358163 - DNA, 25 bp, Artificial
  probe
  misc_feature (1)..(25): SEQ ID NO: 3539; WAN024ESE; Start 100; Stop 124
aaagaatctggaattaaacaaatgg

SEQ ID NO: 358164 - DNA, 25 bp, Artificial
  probe
  misc_feature (1)..(25): SEQ ID NO: 3539; WAN024ESE; Start 184; Stop 208
aaacgattaaatgagctgatagatt

SEQ ID NO: 358165 - DNA, 25 bp, Artificial
  probe
  misc_feature (1)..(25): SEQ ID NO: 3539; WAN024ESE; Start 110; Stop 134
gaattaaacaaatggacaatgtcat

SEQ ID NO: 358166 - DNA, 25 bp, Artificial
  probe
  misc_feature (1)..(25): SEQ ID NO: 3539; WAN024ESE; Start 87; Stop 111
cctgacagaatctaaagaatctgga

SEQ ID NO: 358167 - DNA, 25 bp, Artificial
  probe
  misc_feature (1)..(25): SEQ ID NO: 3539; WAN024ESE; Start 86; Stop 110
acctgacagaatctaaagaatctgg

SEQ ID NO: 358168 - DNA, 25 bp, Artificial
  probe
  misc_feature (1)..(25): SEQ ID NO: 3539; WAN024ESE; Start 83; Stop 107
tatacctgacagaatctaaagaatc

SEQ ID NO: 358169 - DNA, 25 bp, Artificial
  probe
  misc_feature (1)..(25): SEQ ID NO: 3539; WAN024ESE; Start 185; Stop 209
aacgattaaatgagctgatagatta

SEQ ID NO: 358170 - DNA, 25 bp, Artificial
  probe
  misc_feature (1)..(25): SEQ ID NO: 3539; WAN024ESE; Start 88; Stop 112
ctgacagaatctaaagaatctggaa

SEQ ID NO: 358171 - DNA, 25 bp, Artificial
  probe
  misc_feature (1)..(25): SEQ ID NO: 3539; WAN024ESE; Start 186; Stop 210
acgattaaatgagctgatagattaa

SEQ ID NO: 358172 - DNA, 25 bp, Artificial
  probe
  misc_feature (1)..(25): SEQ ID NO: 3539; WAN024ESE; Start 85; Stop 109
tacctgacagaatctaaagaatctg

SEQ ID NO: 358173 - DNA, 25 bp, Artificial
  probe
  misc_feature (1)..(25): SEQ ID NO: 3539; WAN024ESE; Start 89; Stop 113
tgacagaatctaaagaatctggaat

SEQ ID NO: 358174 - DNA, 25 bp, Artificial
  probe
  misc_feature (1)..(25): SEQ ID NO: 3539; WAN024ESE; Start 81; Stop 105
aatatacctgacagaatctaaagaa

SEQ ID NO: 358175 - DNA, 25 bp, Artificial
  probe
  misc_feature (1)..(25): SEQ ID NO: 3539; WAN024ESE; Start 80; Stop 104
aaatatacctgacagaatctaaaga

SEQ ID NO: 358176 - DNA, 25 bp, Artificial
  probe
  misc_feature (1)..(25): SEQ ID NO: 3539; WAN024ESE; Start 113; Stop 137
ttaaacaaatggacaatgtcataaa

SEQ ID NO: 358177 - DNA, 25 bp, Artificial
  probe
  misc_feature (1)..(25): SEQ ID NO: 3539; WAN024ESE; Start 82; Stop 106
atatacctgacagaatctaaagaat

SEQ ID NO: 358178 - DNA, 25 bp, Artificial
  probe
  misc_feature (1)..(25): SEQ ID NO: 3539; WAN024ESE; Start 112; Stop 136
attaaacaaatggacaatgtcataa

SEQ ID NO: 358179 - DNA, 25 bp, Artificial
  probe
  misc_feature (1)..(25): SEQ ID NO: 3539; WAN024ESE; Start 111; Stop 135
aattaaacaaatggacaatgtcata

SEQ ID NO: 358180 - DNA, 25 bp, Artificial
  probe
  misc_feature (1)..(25): SEQ ID NO: 3539; WAN024ESE; Start 183; Stop 207
aaaacgattaaatgagctgatagat

SEQ ID NO: 358181 - DNA, 25 bp, Artificial
  probe
  misc_feature (1)..(25): SEQ ID NO: 3539; WAN024ESE; Start 90; Stop 114
gacagaatctaaagaatctggaatt

SEQ ID NO: 358182 - DNA, 25 bp, Artificial
  probe
  misc_feature (1)..(25): SEQ ID NO: 3539; WAN024ESE; Start 115; Stop 139
aaacaaatggacaatgtcataaaat

SEQ ID NO: 358183 - DNA, 25 bp, Artificial
  probe
  misc_feature (1)..(25): SEQ ID NO: 3539; WAN024ESE; Start 114; Stop 138
taaacaaatggacaatgtcataaaa

SEQ ID NO: 358184 - DNA, 25 bp, Artificial
  probe
  misc_feature (1)..(25): SEQ ID NO: 3539; WAN024ESE; Start 91; Stop 115
acagaatctaaagaatctggaatta

SEQ ID NO: 358185 - DNA, 25 bp, Artificial
  probe
  misc_feature (1)..(25): SEQ ID NO: 3539; WAN024ESE; Start 116; Stop 140
aacaaatggacaatgtcataaaata

SEQ ID NO: 358186 - DNA, 25 bp, Artificial
  probe
  misc_feature (1)..(25): SEQ ID NO: 3539; WAN024ESE; Start 117; Stop 141
acaaatggacaatgtcataaaatat

SEQ ID NO: 358187 - DNA, 25 bp, Artificial
  probe
  misc_feature (1)..(25): SEQ ID NO: 3540; WAN024GGB; Start 609; Stop 633
gattgaattgccagtaacaactcat

SEQ ID NO: 358188 - DNA, 25 bp, Artificial
  probe
  misc_feature (1)..(25): SEQ ID NO: 3540; WAN024GGB; Start 610; Stop 634
attgaattgccagtaacaactcatt

SEQ ID NO: 358189 - DNA, 25 bp, Artificial
  probe
  misc_feature (1)..(25): SEQ ID NO: 3540; WAN024GGB; Start 413; Stop 437
atatggaagtgcgtttggatgtaaa

SEQ ID NO: 358190 - DNA, 25 bp, Artificial
  probe
  misc_feature (1)..(25): SEQ ID NO: 3540; WAN024GGB; Start 412; Stop 436
aatatggaagtgcgtttggatgtaa

SEQ ID NO: 358191 - DNA, 25 bp, Artificial
  probe
  misc_feature (1)..(25): SEQ ID NO: 3540; WAN024GGB; Start 611; Stop 635
ttgaattgccagtaacaactcattt

SEQ ID NO: 358192 - DNA, 25 bp, Artificial
  probe
  misc_feature (1)..(25): SEQ ID NO: 3540; WAN024GGB; Start 22; Stop 46
tatatcaaagaactgacagccatcg

SEQ ID NO: 358193 - DNA, 25 bp, Artificial
  probe
  misc_feature (1)..(25): SEQ ID NO: 3540; WAN024GGB; Start 411; Stop 435
caatatggaagtgcgtttggatgta

SEQ ID NO: 358194 - DNA, 25 bp, Artificial
  probe
  misc_feature (1)..(25): SEQ ID NO: 3540; WAN024GGB; Start 21; Stop 45
atatatcaaagaactgacagccatc

SEQ ID NO: 358195 - DNA, 25 bp, Artificial
  probe
  misc_feature (1)..(25): SEQ ID NO: 3540; WAN024GGB; Start 837; Stop 861
gcaagatattccatttaagctcgac

SEQ ID NO: 358196 - DNA, 25 bp, Artificial
  probe
  misc_feature (1)..(25): SEQ ID NO: 3540; WAN024GGB; Start 838; Stop 862
caagatattccatttaagctcgaca

SEQ ID NO: 358197 - DNA, 25 bp, Artificial
  probe
  misc_feature (1)..(25): SEQ ID NO: 3540; WAN024GGB; Start 839; Stop 863
aagatattccatttaagctcgacat

SEQ ID NO: 358198 - DNA, 25 bp, Artificial
  probe
  misc_feature (1)..(25): SEQ ID NO: 3540; WAN024GGB; Start 409; Stop 433
gacaatatggaagtgcgtttggatg

SEQ ID NO: 358199 - DNA, 25 bp, Artificial
  probe
  misc_feature (1)..(25): SEQ ID NO: 3540; WAN024GGB; Start 419; Stop 443
aagtgcgtttggatgtaaaagtaag

SEQ ID NO: 358200 - DNA, 25 bp, Artificial
  probe
  misc_feature (1)..(25): SEQ ID NO: 3540; WAN024GGB; Start 418; Stop 442
gaagtgcgtttggatgtaaaagtaa

SEQ ID NO: 358201 - DNA, 25 bp, Artificial
  probe
  misc_feature (1)..(25): SEQ ID NO: 3540; WAN024GGB; Start 231; Stop 255
caaaccagatggtcgtcttaaattg

SEQ ID NO: 358202 - DNA, 25 bp, Artificial
  probe
  misc_feature (1)..(25): SEQ ID NO: 3540; WAN024GGB; Start 230; Stop 254
tcaaaccagatggtcgtcttaaatt

SEQ ID NO: 358203 - DNA, 25 bp, Artificial
  probe
  misc_feature (1)..(25): SEQ ID NO: 3540; WAN024GGB; Start 414; Stop 438
tatggaagtgcgtttggatgtaaaa

SEQ ID NO: 358204 - DNA, 25 bp, Artificial
  probe
  misc_feature (1)..(25): SEQ ID NO: 3540; WAN024GGB; Start 356; Stop 380
accaaacttcttgccatgtctacaa

SEQ ID NO: 358205 - DNA, 25 bp, Artificial
  probe
  misc_feature (1)..(25): SEQ ID NO: 3540; WAN024GGB; Start 229; Stop 253
gtcaaaccagatggtcgtcttaaat

SEQ ID NO: 358206 - DNA, 25 bp, Artificial
  probe
  misc_feature (1)..(25): SEQ ID NO: 3540; WAN024GGB; Start 216; Stop 240
tattgttcgtgctgtcaaaccagat

SEQ ID NO: 358207 - DNA, 25 bp, Artificial
  probe
  misc_feature (1)..(25): SEQ ID NO: 3540; WAN024GGB; Start 424; Stop 448
cgtttggatgtaaaagtaagcaatg

SEQ ID NO: 358208 - DNA, 25 bp, Artificial
  probe
  misc_feature (1)..(25): SEQ ID NO: 3540; WAN024GGB; Start 232; Stop 256
aaaccagatggtcgtcttaaattgg

SEQ ID NO: 358209 - DNA, 25 bp, Artificial
  probe
  misc_feature (1)..(25): SEQ ID NO: 3540; WAN024GGB; Start 613; Stop 637
gaattgccagtaacaactcattttg

SEQ ID NO: 358210 - DNA, 25 bp, Artificial
  probe
  misc_feature (1)..(25): SEQ ID NO: 3540; WAN024GGB; Start 612; Stop 636
tgaattgccagtaacaactcatttt

SEQ ID NO: 358211 - DNA, 25 bp, Artificial
  probe
  misc_feature (1)..(25): SEQ ID NO: 3540; WAN024GGB; Start 423; Stop 447
gcgtttggatgtaaaagtaagcaat

SEQ ID NO: 358212 - DNA, 25 bp, Artificial
  probe
  misc_feature (1)..(25): SEQ ID NO: 3540; WAN024GGB; Start 360; Stop 384
aacttcttgccatgtctacaaggat

SEQ ID NO: 358213 - DNA, 25 bp, Artificial
  probe
  misc_feature (1)..(25): SEQ ID NO: 3540; WAN024GGB; Start 410; Stop 434
acaatatggaagtgcgtttggatgt

SEQ ID NO: 358214 - DNA, 25 bp, Artificial
  probe
  misc_feature (1)..(25): SEQ ID NO: 3540; WAN024GGB; Start 156; Stop 180
caaaggtcaaaatgatgagcaacat

SEQ ID NO: 358215 - DNA, 25 bp, Artificial
  probe
  misc_feature (1)..(25): SEQ ID NO: 3540; WAN024GGB; Start 417; Stop 441
ggaagtgcgtttggatgtaaaagta

SEQ ID NO: 358216 - DNA, 25 bp, Artificial
  probe
  misc_feature (1)..(25): SEQ ID NO: 3540; WAN024GGB; Start 23; Stop 47
atatcaaagaactgacagccatcgc

SEQ ID NO: 358217 - DNA, 25 bp, Artificial
  probe
  misc_feature (1)..(25): SEQ ID NO: 3540; WAN024GGB; Start 836; Stop 860
agcaagatattccatttaagctcga

SEQ ID NO: 358218 - DNA, 25 bp, Artificial
  probe
  misc_feature (1)..(25): SEQ ID NO: 3540; WAN024GGB; Start 276; Stop 300
ttggaacatgattgaaggtgaaaac

SEQ ID NO: 358219 - DNA, 25 bp, Artificial
  probe
  misc_feature (1)..(25): SEQ ID NO: 3540; WAN024GGB; Start 618; Stop 642
gccagtaacaactcattttgctttt

SEQ ID NO: 358220 - DNA, 25 bp, Artificial
  probe
  misc_feature (1)..(25): SEQ ID NO: 3541; WAN024AJL; Start 3; Stop 27
aatgataagaaccaatatgtaggct

SEQ ID NO: 358221 - DNA, 25 bp, Artificial
  probe
  misc_feature (1)..(25): SEQ ID NO: 3541; WAN024AJL; Start 5; Stop 29
tgataagaaccaatatgtaggctag

SEQ ID NO: 358222 - DNA, 25 bp, Artificial
  probe
  misc_feature (1)..(25): SEQ ID NO: 3541; WAN024AJL; Start 4; Stop 28
atgataagaaccaatatgtaggcta

SEQ ID NO: 358223 - DNA, 25 bp, Artificial
  probe
  misc_feature (1)..(25): SEQ ID NO: 3541; WAN024AJL; Start 2; Stop 26
aaatgataagaaccaatatgtaggc

SEQ ID NO: 358224 - DNA, 25 bp, Artificial
  probe
  misc_feature (1)..(25): SEQ ID NO: 3541; WAN024AJL; Start 1; Stop 25
gaaatgataagaaccaatatgtagg

SEQ ID NO: 358225 - DNA, 25 bp, Artificial
  probe
  misc_feature (1)..(25): SEQ ID NO: 3541; WAN024AJL; Start 26; Stop 50
ctagcaacaacctgcacattggttc

SEQ ID NO: 358226 - DNA, 25 bp, Artificial
  probe
  misc_feature (1)..(25): SEQ ID NO: 3543; WAN024AC5; Start 117; Stop 141
tgtcaacaactcaatagactttcac

SEQ ID NO: 358227 - DNA, 25 bp, Artificial
  probe
  misc_feature (1)..(25): SEQ ID NO: 3543; WAN024AC5; Start 116; Stop 140
gtgtcaacaactcaatagactttca

SEQ ID NO: 358228 - DNA, 25 bp, Artificial
  probe
  misc_feature (1)..(25): SEQ ID NO: 3543; WAN024AC5; Start 118; Stop 142
gtcaacaactcaatagactttcact

SEQ ID NO: 358229 - DNA, 25 bp, Artificial
  probe
  misc_feature (1)..(25): SEQ ID NO: 3543; WAN024AC5; Start 115; Stop 139
agtgtcaacaactcaatagactttc

SEQ ID NO: 358230 - DNA, 25 bp, Artificial
  probe
  misc_feature (1)..(25): SEQ ID NO: 3543; WAN024AC5; Start 114; Stop 138
gagtgtcaacaactcaatagacttt

SEQ ID NO: 358231 - DNA, 25 bp, Artificial
  probe
  misc_feature (1)..(25): SEQ ID NO: 3543; WAN024AC5; Start 1; Stop 25
gaacaactccttaaccatttaatta

SEQ ID NO: 358232 - DNA, 25 bp, Artificial
  probe
  misc_feature (1)..(25): SEQ ID NO: 3543; WAN024AC5; Start 41; Stop 65
actcctgaaaatttaatctgtcaag

SEQ ID NO: 358233 - DNA, 25 bp, Artificial
  probe
  misc_feature (1)..(25): SEQ ID NO: 3543; WAN024AC5; Start 42; Stop 66
ctcctgaaaatttaatctgtcaaga

SEQ ID NO: 358234 - DNA, 25 bp, Artificial
  probe
  misc_feature (1)..(25): SEQ ID NO: 3543; WAN024AC5; Start 38; Stop 62
tctactcctgaaaatttaatctgtc

SEQ ID NO: 358235 - DNA, 25 bp, Artificial
  probe
  misc_feature (1)..(25): SEQ ID NO: 3543; WAN024AC5; Start 39; Stop 63
ctactcctgaaaatttaatctgtca

SEQ ID NO: 358236 - DNA, 25 bp, Artificial
  probe
  misc_feature (1)..(25): SEQ ID NO: 3543; WAN024AC5; Start 40; Stop 64
tactcctgaaaatttaatctgtcaa

SEQ ID NO: 358237 - DNA, 25 bp, Artificial
  probe
  misc_feature (1)..(25): SEQ ID NO: 3543; WAN024AC5; Start 3; Stop 27
acaactccttaaccatttaattaac

SEQ ID NO: 358238 - DNA, 25 bp, Artificial
  probe
  misc_feature (1)..(25): SEQ ID NO: 3543; WAN024AC5; Start 37; Stop 61
ttctactcctgaaaatttaatctgt

SEQ ID NO: 358239 - DNA, 25 bp, Artificial
  probe
  misc_feature (1)..(25): SEQ ID NO: 3543; WAN024AC5; Start 43; Stop 67
tcctgaaaatttaatctgtcaagat

SEQ ID NO: 358240 - DNA, 25 bp, Artificial
  probe
  misc_feature (1)..(25): SEQ ID NO: 3543; WAN024AC5; Start 4; Stop 28
caactccttaaccatttaattaact

SEQ ID NO: 358241 - DNA, 25 bp, Artificial
  probe
  misc_feature (1)..(25): SEQ ID NO: 3543; WAN024AC5; Start 2; Stop 26
aacaactccttaaccatttaattaa

SEQ ID NO: 358242 - DNA, 25 bp, Artificial
  probe
  misc_feature (1)..(25): SEQ ID NO: 3543; WAN024AC5; Start 36; Stop 60
attctactcctgaaaatttaatctg

SEQ ID NO: 358243 - DNA, 25 bp, Artificial
  probe
  misc_feature (1)..(25): SEQ ID NO: 3543; WAN024AC5; Start 44; Stop 68
cctgaaaatttaatctgtcaagata

SEQ ID NO: 358244 - DNA, 25 bp, Artificial
  probe
  misc_feature (1)..(25): SEQ ID NO: 3544; WAN0249TU; Start 88; Stop 112
atcctgcattacacaagatccaatc

SEQ ID NO: 358245 - DNA, 25 bp, Artificial
  probe
  misc_feature (1)..(25): SEQ ID NO: 3544; WAN0249TU; Start 91; Stop 115
ctgcattacacaagatccaatcctt

SEQ ID NO: 358246 - DNA, 25 bp, Artificial
  probe
  misc_feature (1)..(25): SEQ ID NO: 3544; WAN0249TU; Start 90; Stop 114
cctgcattacacaagatccaatcct

SEQ ID NO: 358247 - DNA, 25 bp, Artificial
  probe
  misc_feature (1)..(25): SEQ ID NO: 3544; WAN0249TU; Start 89; Stop 113
tcctgcattacacaagatccaatcc

SEQ ID NO: 358248 - DNA, 25 bp, Artificial
  probe
  misc_feature (1)..(25): SEQ ID NO: 3544; WAN0249TU; Start 516; Stop 540
agtgaattgaaataagatgtgaaca

SEQ ID NO: 358249 - DNA, 25 bp, Artificial
  probe
  misc_feature (1)..(25): SEQ ID NO: 3544; WAN0249TU; Start 92; Stop 116
tgcattacacaagatccaatccttt

SEQ ID NO: 358250 - DNA, 25 bp, Artificial
  probe
  misc_feature (1)..(25): SEQ ID NO: 3544; WAN0249TU; Start 12; Stop 36
ttcccatctgtctttattaatgacg

SEQ ID NO: 358251 - DNA, 25 bp, Artificial
  probe
  misc_feature (1)..(25): SEQ ID NO: 3544; WAN0249TU; Start 794; Stop 818
aaaggcatcctatcaggtgttcaaa

SEQ ID NO: 358252 - DNA, 25 bp, Artificial
  probe
  misc_feature (1)..(25): SEQ ID NO: 3544; WAN0249TU; Start 87; Stop 111
gatcctgcattacacaagatccaat

SEQ ID NO: 358253 - DNA, 25 bp, Artificial
  probe
  misc_feature (1)..(25): SEQ ID NO: 3544; WAN0249TU; Start 452; Stop 476
gttttctcgtttgctctttgatttt

SEQ ID NO: 358254 - DNA, 25 bp, Artificial
  probe
  misc_feature (1)..(25): SEQ ID NO: 3544; WAN0249TU; Start 459; Stop 483
cgtttgctctttgattttaattggg

SEQ ID NO: 358255 - DNA, 25 bp, Artificial
  probe
  misc_feature (1)..(25): SEQ ID NO: 3544; WAN0249TU; Start 668; Stop 692
aggacagtcaaatcgaattctaaca

SEQ ID NO: 358256 - DNA, 25 bp, Artificial
  probe
  misc_feature (1)..(25): SEQ ID NO: 3544; WAN0249TU; Start 667; Stop 691
caggacagtcaaatcgaattctaac

SEQ ID NO: 358257 - DNA, 25 bp, Artificial
  probe
  misc_feature (1)..(25): SEQ ID NO: 3544; WAN0249TU; Start 666; Stop 690
tcaggacagtcaaatcgaattctaa

SEQ ID NO: 358258 - DNA, 25 bp, Artificial
  probe
  misc_feature (1)..(25): SEQ ID NO: 3544; WAN0249TU; Start 665; Stop 689
atcaggacagtcaaatcgaattcta

SEQ ID NO: 358259 - DNA, 25 bp, Artificial
  probe
  misc_feature (1)..(25): SEQ ID NO: 3544; WAN0249TU; Start 521; Stop 545
attgaaataagatgtgaacaactct

SEQ ID NO: 358260 - DNA, 25 bp, Artificial
  probe
  misc_feature (1)..(25): SEQ ID NO: 3544; WAN0249TU; Start 669; Stop 693
ggacagtcaaatcgaattctaacaa

SEQ ID NO: 358261 - DNA, 25 bp, Artificial
  probe
  misc_feature (1)..(25): SEQ ID NO: 3544; WAN0249TU; Start 458; Stop 482
tcgtttgctctttgattttaattgg

SEQ ID NO: 358262 - DNA, 25 bp, Artificial
  probe
  misc_feature (1)..(25): SEQ ID NO: 3544; WAN0249TU; Start 451; Stop 475
cgttttctcgtttgctctttgattt

SEQ ID NO: 358263 - DNA, 25 bp, Artificial
  probe
  misc_feature (1)..(25): SEQ ID NO: 3544; WAN0249TU; Start 176; Stop 200
aaattgctggaaatagatgttaagc

SEQ ID NO: 358264 - DNA, 25 bp, Artificial
  probe
  misc_feature (1)..(25): SEQ ID NO: 3544; WAN0249TU; Start 64; Stop 88
ggacaaaatgattgaaaggattgga

SEQ ID NO: 358265 - DNA, 25 bp, Artificial
  probe
  misc_feature (1)..(25): SEQ ID NO: 3544; WAN0249TU; Start 664; Stop 688
gatcaggacagtcaaatcgaattct

SEQ ID NO: 358266 - DNA, 25 bp, Artificial
  probe
  misc_feature (1)..(25): SEQ ID NO: 3544; WAN0249TU; Start 63; Stop 87
tggacaaaatgattgaaaggattgg

SEQ ID NO: 358267 - DNA, 25 bp, Artificial
  probe
  misc_feature (1)..(25): SEQ ID NO: 3544; WAN0249TU; Start 59; Stop 83
aagttggacaaaatgattgaaagga

SEQ ID NO: 358268 - DNA, 25 bp, Artificial
  probe
  misc_feature (1)..(25): SEQ ID NO: 3544; WAN0249TU; Start 60; Stop 84
agttggacaaaatgattgaaaggat

SEQ ID NO: 358269 - DNA, 25 bp, Artificial
  probe
  misc_feature (1)..(25): SEQ ID NO: 3544; WAN0249TU; Start 518; Stop 542
tgaattgaaataagatgtgaacaac

SEQ ID NO: 358270 - DNA, 25 bp, Artificial
  probe
  misc_feature (1)..(25): SEQ ID NO: 3544; WAN0249TU; Start 517; Stop 541
gtgaattgaaataagatgtgaacaa

SEQ ID NO: 358271 - DNA, 25 bp, Artificial
  probe
  misc_feature (1)..(25): SEQ ID NO: 3544; WAN0249TU; Start 58; Stop 82
aaagttggacaaaatgattgaaagg

SEQ ID NO: 358272 - DNA, 25 bp, Artificial
  probe
  misc_feature (1)..(25): SEQ ID NO: 3544; WAN0249TU; Start 453; Stop 477
ttttctcgtttgctctttgatttta

SEQ ID NO: 358273 - DNA, 25 bp, Artificial
  probe
  misc_feature (1)..(25): SEQ ID NO: 3544; WAN0249TU; Start 178; Stop 202
attgctggaaatagatgttaagctc

SEQ ID NO: 358274 - DNA, 25 bp, Artificial
  probe
  misc_feature (1)..(25): SEQ ID NO: 3544; WAN0249TU; Start 93; Stop 117
gcattacacaagatccaatcctttt

SEQ ID NO: 358275 - DNA, 25 bp, Artificial
  probe
  misc_feature (1)..(25): SEQ ID NO: 3544; WAN0249TU; Start 62; Stop 86
ttggacaaaatgattgaaaggattg

SEQ ID NO: 358276 - DNA, 25 bp, Artificial
  probe
  misc_feature (1)..(25): SEQ ID NO: 3544; WAN0249TU; Start 61; Stop 85
gttggacaaaatgattgaaaggatt

SEQ ID NO: 358277 - DNA, 25 bp, Artificial
  probe
  misc_feature (1)..(25): SEQ ID NO: 3545; WAN0249Y9; Start 75; Stop 99
taatagtttattgtgagcgaacctc

SEQ ID NO: 358278 - DNA, 25 bp, Artificial
  probe
  misc_feature (1)..(25): SEQ ID NO: 3545; WAN0249Y9; Start 74; Stop 98
ataatagtttattgtgagcgaacct

SEQ ID NO: 358279 - DNA, 25 bp, Artificial
  probe
  misc_feature (1)..(25): SEQ ID NO: 3545; WAN0249Y9; Start 73; Stop 97
tataatagtttattgtgagcgaacc

SEQ ID NO: 358280 - DNA, 25 bp, Artificial
  probe
  misc_feature (1)..(25): SEQ ID NO: 3545; WAN0249Y9; Start 125; Stop 149
tcattagaccaaaaggaggaacata

SEQ ID NO: 358281 - DNA, 25 bp, Artificial
  probe
  misc_feature (1)..(25): SEQ ID NO: 3545; WAN0249Y9; Start 128; Stop 152
ttagaccaaaaggaggaacatatca

SEQ ID NO: 358282 - DNA, 25 bp, Artificial
  probe
  misc_feature (1)..(25): SEQ ID NO: 3545; WAN0249Y9; Start 126; Stop 150
cattagaccaaaaggaggaacatat

SEQ ID NO: 358283 - DNA, 25 bp, Artificial
  probe
  misc_feature (1)..(25): SEQ ID NO: 3545; WAN0249Y9; Start 127; Stop 151
attagaccaaaaggaggaacatatc

SEQ ID NO: 358284 - DNA, 25 bp, Artificial
  probe
  misc_feature (1)..(25): SEQ ID NO: 3545; WAN0249Y9; Start 72; Stop 96
gtataatagtttattgtgagcgaac

SEQ ID NO: 358285 - DNA, 25 bp, Artificial
  probe
  misc_feature (1)..(25): SEQ ID NO: 3545; WAN0249Y9; Start 124; Stop 148
gtcattagaccaaaaggaggaacat

SEQ ID NO: 358286 - DNA, 25 bp, Artificial
  probe
  misc_feature (1)..(25): SEQ ID NO: 3545; WAN0249Y9; Start 71; Stop 95
agtataatagtttattgtgagcgaa

SEQ ID NO: 358287 - DNA, 25 bp, Artificial
  probe
  misc_feature (1)..(25): SEQ ID NO: 3545; WAN0249Y9; Start 76; Stop 100
aatagtttattgtgagcgaacctca

SEQ ID NO: 358288 - DNA, 25 bp, Artificial
  probe
  misc_feature (1)..(25): SEQ ID NO: 3545; WAN0249Y9; Start 70; Stop 94
tagtataatagtttattgtgagcga

SEQ ID NO: 358289 - DNA, 25 bp, Artificial
  probe
  misc_feature (1)..(25): SEQ ID NO: 3545; WAN0249Y9; Start 69; Stop 93
ctagtataatagtttattgtgagcg

SEQ ID NO: 358290 - DNA, 25 bp, Artificial
  probe
  misc_feature (1)..(25): SEQ ID NO: 3545; WAN0249Y9; Start 108; Stop 132
cttgcaaagtcttggggtcattaga

SEQ ID NO: 358291 - DNA, 25 bp, Artificial
  probe
  misc_feature (1)..(25): SEQ ID NO: 3545; WAN0249Y9; Start 114; Stop 138
aagtcttggggtcattagaccaaaa

SEQ ID NO: 358292 - DNA, 25 bp, Artificial
  probe
  misc_feature (1)..(25): SEQ ID NO: 3545; WAN0249Y9; Start 113; Stop 137
aaagtcttggggtcattagaccaaa

SEQ ID NO: 358293 - DNA, 25 bp, Artificial
  probe
  misc_feature (1)..(25): SEQ ID NO: 3545; WAN0249Y9; Start 107; Stop 131
ccttgcaaagtcttggggtcattag

SEQ ID NO: 358294 - DNA, 25 bp, Artificial
  probe
  misc_feature (1)..(25): SEQ ID NO: 3545; WAN0249Y9; Start 123; Stop 147
ggtcattagaccaaaaggaggaaca

SEQ ID NO: 358295 - DNA, 25 bp, Artificial
  probe
  misc_feature (1)..(25): SEQ ID NO: 3545; WAN0249Y9; Start 115; Stop 139
agtcttggggtcattagaccaaaag

SEQ ID NO: 358296 - DNA, 25 bp, Artificial
  probe
  misc_feature (1)..(25): SEQ ID NO: 3545; WAN0249Y9; Start 112; Stop 136
caaagtcttggggtcattagaccaa

SEQ ID NO: 358297 - DNA, 25 bp, Artificial
  probe
  misc_feature (1)..(25): SEQ ID NO: 3545; WAN0249Y9; Start 122; Stop 146
gggtcattagaccaaaaggaggaac

SEQ ID NO: 358298 - DNA, 25 bp, Artificial
  probe
  misc_feature (1)..(25): SEQ ID NO: 3545; WAN0249Y9; Start 118; Stop 142
cttggggtcattagaccaaaaggag

SEQ ID NO: 358299 - DNA, 25 bp, Artificial
  probe
  misc_feature (1)..(25): SEQ ID NO: 3545; WAN0249Y9; Start 116; Stop 140
gtcttggggtcattagaccaaaagg

SEQ ID NO: 358300 - DNA, 25 bp, Artificial
  probe
  misc_feature (1)..(25): SEQ ID NO: 3545; WAN0249Y9; Start 117; Stop 141
tcttggggtcattagaccaaaagga

SEQ ID NO: 358301 - DNA, 25 bp, Artificial
  probe
  misc_feature (1)..(25): SEQ ID NO: 3545; WAN0249Y9; Start 97; Stop 121
ctcacttaccccttgcaaagtcttg

SEQ ID NO: 358302 - DNA, 25 bp, Artificial
  probe
  misc_feature (1)..(25): SEQ ID NO: 3545; WAN0249Y9; Start 109; Stop 133
ttgcaaagtcttggggtcattagac

SEQ ID NO: 358303 - DNA, 25 bp, Artificial
  probe
  misc_feature (1)..(25): SEQ ID NO: 3545; WAN0249Y9; Start 121; Stop 145
ggggtcattagaccaaaaggaggaa

SEQ ID NO: 358304 - DNA, 25 bp, Artificial
  probe
  misc_feature (1)..(25): SEQ ID NO: 3545; WAN0249Y9; Start 119; Stop 143
ttggggtcattagaccaaaaggagg

SEQ ID NO: 358305 - DNA, 25 bp, Artificial
  probe
  misc_feature (1)..(25): SEQ ID NO: 3545; WAN0249Y9; Start 96; Stop 120
cctcacttaccccttgcaaagtctt

SEQ ID NO: 358306 - DNA, 25 bp, Artificial
  probe
  misc_feature (1)..(25): SEQ ID NO: 3545; WAN0249Y9; Start 111; Stop 135
gcaaagtcttggggtcattagacca

SEQ ID NO: 358307 - DNA, 25 bp, Artificial
  probe
  misc_feature (1)..(25): SEQ ID NO: 3545; WAN0249Y9; Start 110; Stop 134
tgcaaagtcttggggtcattagacc

SEQ ID NO: 358308 - DNA, 25 bp, Artificial
  probe
  misc_feature (1)..(25): SEQ ID NO: 3545; WAN0249Y9; Start 98; Stop 122
tcacttaccccttgcaaagtcttgg

SEQ ID NO: 358309 - DNA, 25 bp, Artificial
  probe
  misc_feature (1)..(25): SEQ ID NO: 3545; WAN0249Y9; Start 94; Stop 118
aacctcacttaccccttgcaaagtc

SEQ ID NO: 358310 - DNA, 25 bp, Artificial
  probe
  misc_feature (1)..(25): SEQ ID NO: 3546; WAN024ASR; Start 8; Stop 32
tagttagagggttagcactttatcc

SEQ ID NO: 358311 - DNA, 25 bp, Artificial
  probe
  misc_feature (1)..(25): SEQ ID NO: 3546; WAN024ASR; Start 5; Stop 29
ccttagttagagggttagcacttta

SEQ ID NO: 358312 - DNA, 25 bp, Artificial
  probe
  misc_feature (1)..(25): SEQ ID NO: 3546; WAN024ASR; Start 7; Stop 31
ttagttagagggttagcactttatc

SEQ ID NO: 358313 - DNA, 25 bp, Artificial
  probe
  misc_feature (1)..(25): SEQ ID NO: 3546; WAN024ASR; Start 6; Stop 30
cttagttagagggttagcactttat

SEQ ID NO: 358314 - DNA, 25 bp, Artificial
  probe
  misc_feature (1)..(25): SEQ ID NO: 3546; WAN024ASR; Start 54; Stop 78
ggattgaaatgaaaacggagaatga

SEQ ID NO: 358315 - DNA, 25 bp, Artificial
  probe
  misc_feature (1)..(25): SEQ ID NO: 3546; WAN024ASR; Start 51; Stop 75
tagggattgaaatgaaaacggagaa

SEQ ID NO: 358316 - DNA, 25 bp, Artificial
  probe
  misc_feature (1)..(25): SEQ ID NO: 3546; WAN024ASR; Start 50; Stop 74
ttagggattgaaatgaaaacggaga

SEQ ID NO: 358317 - DNA, 25 bp, Artificial
  probe
  misc_feature (1)..(25): SEQ ID NO: 3546; WAN024ASR; Start 49; Stop 73
attagggattgaaatgaaaacggag

SEQ ID NO: 358318 - DNA, 25 bp, Artificial
  probe
  misc_feature (1)..(25): SEQ ID NO: 3546; WAN024ASR; Start 58; Stop 82
tgaaatgaaaacggagaatgagaaa

SEQ ID NO: 358319 - DNA, 25 bp, Artificial
  probe
  misc_feature (1)..(25): SEQ ID NO: 3546; WAN024ASR; Start 57; Stop 81
ttgaaatgaaaacggagaatgagaa

SEQ ID NO: 358320 - DNA, 25 bp, Artificial
  probe
  misc_feature (1)..(25): SEQ ID NO: 3546; WAN024ASR; Start 56; Stop 80
attgaaatgaaaacggagaatgaga

SEQ ID NO: 358321 - DNA, 25 bp, Artificial
  probe
  misc_feature (1)..(25): SEQ ID NO: 3546; WAN024ASR; Start 53; Stop 77
gggattgaaatgaaaacggagaatg

SEQ ID NO: 358322 - DNA, 25 bp, Artificial
  probe
  misc_feature (1)..(25): SEQ ID NO: 3546; WAN024ASR; Start 52; Stop 76
agggattgaaatgaaaacggagaat

SEQ ID NO: 358323 - DNA, 25 bp, Artificial
  probe
  misc_feature (1)..(25): SEQ ID NO: 3546; WAN024ASR; Start 55; Stop 79
gattgaaatgaaaacggagaatgag

SEQ ID NO: 358324 - DNA, 25 bp, Artificial
  probe
  misc_feature (1)..(25): SEQ ID NO: 3546; WAN024ASR; Start 48; Stop 72
tattagggattgaaatgaaaacgga

SEQ ID NO: 358325 - DNA, 25 bp, Artificial
  probe
  misc_feature (1)..(25): SEQ ID NO: 3546; WAN024ASR; Start 59; Stop 83
gaaatgaaaacggagaatgagaaat

SEQ ID NO: 358326 - DNA, 25 bp, Artificial
  probe
  misc_feature (1)..(25): SEQ ID NO: 3546; WAN024ASR; Start 9; Stop 33
agttagagggttagcactttatccc

SEQ ID NO: 358327 - DNA, 25 bp, Artificial
  probe
  misc_feature (1)..(25): SEQ ID NO: 3546; WAN024ASR; Start 47; Stop 71
atattagggattgaaatgaaaacgg

SEQ ID NO: 358328 - DNA, 25 bp, Artificial
  probe
  misc_feature (1)..(25): SEQ ID NO: 3546; WAN024ASR; Start 46; Stop 70
aatattagggattgaaatgaaaacg

SEQ ID NO: 358329 - DNA, 25 bp, Artificial
  probe
  misc_feature (1)..(25): SEQ ID NO: 3547; WAN0249R7; Start 10; Stop 34
aataagcaaatccgagaaagaaact

SEQ ID NO: 358330 - DNA, 25 bp, Artificial
  probe
  misc_feature (1)..(25): SEQ ID NO: 3547; WAN0249R7; Start 12; Stop 36
taagcaaatccgagaaagaaacttc

SEQ ID NO: 358331 - DNA, 25 bp, Artificial
  probe
  misc_feature (1)..(25): SEQ ID NO: 3547; WAN0249R7; Start 11; Stop 35
ataagcaaatccgagaaagaaactt

SEQ ID NO: 358332 - DNA, 25 bp, Artificial
  probe
  misc_feature (1)..(25): SEQ ID NO: 3547; WAN0249R7; Start 6; Stop 30
tcataataagcaaatccgagaaaga

SEQ ID NO: 358333 - DNA, 25 bp, Artificial
  probe
  misc_feature (1)..(25): SEQ ID NO: 3547; WAN0249R7; Start 3; Stop 27
acctcataataagcaaatccgagaa

SEQ ID NO: 358334 - DNA, 25 bp, Artificial
  probe
  misc_feature (1)..(25): SEQ ID NO: 3547; WAN0249R7; Start 2; Stop 26
aacctcataataagcaaatccgaga

SEQ ID NO: 358335 - DNA, 25 bp, Artificial
  probe
  misc_feature (1)..(25): SEQ ID NO: 3547; WAN0249R7; Start 1; Stop 25
gaacctcataataagcaaatccgag

SEQ ID NO: 358336 - DNA, 25 bp, Artificial
  probe
  misc_feature (1)..(25): SEQ ID NO: 3547; WAN0249R7; Start 4; Stop 28
cctcataataagcaaatccgagaaa

SEQ ID NO: 358337 - DNA, 25 bp, Artificial
  probe
  misc_feature (1)..(25): SEQ ID NO: 3547; WAN0249R7; Start 9; Stop 33
taataagcaaatccgagaaagaaac

SEQ ID NO: 358338 - DNA, 25 bp, Artificial
  probe
  misc_feature (1)..(25): SEQ ID NO: 3547; WAN0249R7; Start 7; Stop 31
cataataagcaaatccgagaaagaa

SEQ ID NO: 358339 - DNA, 25 bp, Artificial
  probe
  misc_feature (1)..(25): SEQ ID NO: 3547; WAN0249R7; Start 5; Stop 29
ctcataataagcaaatccgagaaag

SEQ ID NO: 358340 - DNA, 25 bp, Artificial
  probe
  misc_feature (1)..(25): SEQ ID NO: 3547; WAN0249R7; Start 47; Stop 71
tttatcctgctgcaccttactatag

SEQ ID NO: 358341 - DNA, 25 bp, Artificial
  probe
  misc_feature (1)..(25): SEQ ID NO: 3547; WAN0249R7; Start 46; Stop 70
ctttatcctgctgcaccttactata

SEQ ID NO: 358342 - DNA, 25 bp, Artificial
  probe
  misc_feature (1)..(25): SEQ ID NO: 3547; WAN0249R7; Start 8; Stop 32
ataataagcaaatccgagaaagaaa

SEQ ID NO: 358343 - DNA, 25 bp, Artificial
  probe
  misc_feature (1)..(25): SEQ ID NO: 3547; WAN0249R7; Start 45; Stop 69
tctttatcctgctgcaccttactat

SEQ ID NO: 358344 - DNA, 25 bp, Artificial
  probe
  misc_feature (1)..(25): SEQ ID NO: 3547; WAN0249R7; Start 139; Stop 163
gcaaaggtgtactattctagtttca

SEQ ID NO: 358345 - DNA, 25 bp, Artificial
  probe
  misc_feature (1)..(25): SEQ ID NO: 3547; WAN0249R7; Start 44; Stop 68
ttctttatcctgctgcaccttacta

SEQ ID NO: 358346 - DNA, 25 bp, Artificial
  probe
  misc_feature (1)..(25): SEQ ID NO: 3547; WAN0249R7; Start 138; Stop 162
agcaaaggtgtactattctagtttc

SEQ ID NO: 358347 - DNA, 25 bp, Artificial
  probe
  misc_feature (1)..(25): SEQ ID NO: 3547; WAN0249R7; Start 136; Stop 160
gaagcaaaggtgtactattctagtt

SEQ ID NO: 358348 - DNA, 25 bp, Artificial
  probe
  misc_feature (1)..(25): SEQ ID NO: 3547; WAN0249R7; Start 135; Stop 159
agaagcaaaggtgtactattctagt

SEQ ID NO: 358349 - DNA, 25 bp, Artificial
  probe
  misc_feature (1)..(25): SEQ ID NO: 3547; WAN0249R7; Start 13; Stop 37
aagcaaatccgagaaagaaacttct

SEQ ID NO: 358350 - DNA, 25 bp, Artificial
  probe
  misc_feature (1)..(25): SEQ ID NO: 3547; WAN0249R7; Start 160; Stop 184
ttcaatctgctatatcataacagtt

SEQ ID NO: 358351 - DNA, 25 bp, Artificial
  probe
  misc_feature (1)..(25): SEQ ID NO: 3547; WAN0249R7; Start 137; Stop 161
aagcaaaggtgtactattctagttt

SEQ ID NO: 358352 - DNA, 25 bp, Artificial
  probe
  misc_feature (1)..(25): SEQ ID NO: 3547; WAN0249R7; Start 43; Stop 67
tttctttatcctgctgcaccttact

SEQ ID NO: 358353 - DNA, 25 bp, Artificial
  probe
  misc_feature (1)..(25): SEQ ID NO: 3547; WAN0249R7; Start 145; Stop 169
gtgtactattctagtttcaatctgc

SEQ ID NO: 358354 - DNA, 25 bp, Artificial
  probe
  misc_feature (1)..(25): SEQ ID NO: 3547; WAN0249R7; Start 146; Stop 170
tgtactattctagtttcaatctgct

SEQ ID NO: 358355 - DNA, 25 bp, Artificial
  probe
  misc_feature (1)..(25): SEQ ID NO: 3547; WAN0249R7; Start 127; Stop 151
aatgttttagaagcaaaggtgtact

SEQ ID NO: 358356 - DNA, 25 bp, Artificial
  probe
  misc_feature (1)..(25): SEQ ID NO: 3547; WAN0249R7; Start 126; Stop 150
caatgttttagaagcaaaggtgtac

SEQ ID NO: 358357 - DNA, 25 bp, Artificial
  probe
  misc_feature (1)..(25): SEQ ID NO: 3547; WAN0249R7; Start 70; Stop 94
agtgaaatgaaataagaacaggata

SEQ ID NO: 358358 - DNA, 25 bp, Artificial
  probe
  misc_feature (1)..(25): SEQ ID NO: 3547; WAN0249R7; Start 69; Stop 93
tagtgaaatgaaataagaacaggat

SEQ ID NO: 358359 - DNA, 25 bp, Artificial
  probe
  misc_feature (1)..(25): SEQ ID NO: 3547; WAN0249R7; Start 68; Stop 92
atagtgaaatgaaataagaacagga

SEQ ID NO: 358360 - DNA, 25 bp, Artificial
  probe
  misc_feature (1)..(25): SEQ ID NO: 3547; WAN0249R7; Start 132; Stop 156
tttagaagcaaaggtgtactattct

SEQ ID NO: 358361 - DNA, 25 bp, Artificial
  probe
  misc_feature (1)..(25): SEQ ID NO: 3547; WAN0249R7; Start 125; Stop 149
acaatgttttagaagcaaaggtgta

SEQ ID NO: 358362 - DNA, 25 bp, Artificial
  probe
  misc_feature (1)..(25): SEQ ID NO: 3548; WAN0249E4; Start 18; Stop 42
aacaaaggcgtaatatttattaggc

SEQ ID NO: 358363 - DNA, 25 bp, Artificial
  probe
  misc_feature (1)..(25): SEQ ID NO: 3548; WAN0249E4; Start 4; Stop 28
cgacatataaatgtaacaaaggcgt

SEQ ID NO: 358364 - DNA, 25 bp, Artificial
  probe
  misc_feature (1)..(25): SEQ ID NO: 3548; WAN0249E4; Start 3; Stop 27
acgacatataaatgtaacaaaggcg

SEQ ID NO: 358365 - DNA, 25 bp, Artificial
  probe
  misc_feature (1)..(25): SEQ ID NO: 3548; WAN0249E4; Start 2; Stop 26
aacgacatataaatgtaacaaaggc

SEQ ID NO: 358366 - DNA, 25 bp, Artificial
  probe
  misc_feature (1)..(25): SEQ ID NO: 3548; WAN0249E4; Start 7; Stop 31
catataaatgtaacaaaggcgtaat

SEQ ID NO: 358367 - DNA, 25 bp, Artificial
  probe
  misc_feature (1)..(25): SEQ ID NO: 3548; WAN0249E4; Start 5; Stop 29
gacatataaatgtaacaaaggcgta

SEQ ID NO: 358368 - DNA, 25 bp, Artificial
  probe
  misc_feature (1)..(25): SEQ ID NO: 3548; WAN0249E4; Start 6; Stop 30
acatataaatgtaacaaaggcgtaa

SEQ ID NO: 358369 - DNA, 25 bp, Artificial
  probe
  misc_feature (1)..(25): SEQ ID NO: 3548; WAN0249E4; Start 1; Stop 25
gaacgacatataaatgtaacaaagg

SEQ ID NO: 358370 - DNA, 25 bp, Artificial
  probe
  misc_feature (1)..(25): SEQ ID NO: 3548; WAN0249E4; Start 14; Stop 38
atgtaacaaaggcgtaatatttatt

SEQ ID NO: 358371 - DNA, 25 bp, Artificial
  probe
  misc_feature (1)..(25): SEQ ID NO: 3548; WAN0249E4; Start 13; Stop 37
aatgtaacaaaggcgtaatatttat

SEQ ID NO: 358372 - DNA, 25 bp, Artificial
  probe
  misc_feature (1)..(25): SEQ ID NO: 3548; WAN0249E4; Start 10; Stop 34
ataaatgtaacaaaggcgtaatatt

SEQ ID NO: 358373 - DNA, 25 bp, Artificial
  probe
  misc_feature (1)..(25): SEQ ID NO: 3548; WAN0249E4; Start 12; Stop 36
aaatgtaacaaaggcgtaatattta

SEQ ID NO: 358374 - DNA, 25 bp, Artificial
  probe
  misc_feature (1)..(25): SEQ ID NO: 3548; WAN0249E4; Start 11; Stop 35
taaatgtaacaaaggcgtaatattt

SEQ ID NO: 358375 - DNA, 25 bp, Artificial
  probe
  misc_feature (1)..(25): SEQ ID NO: 3548; WAN0249E4; Start 17; Stop 41
taacaaaggcgtaatatttattagg

SEQ ID NO: 358376 - DNA, 25 bp, Artificial
  probe
  misc_feature (1)..(25): SEQ ID NO: 3548; WAN0249E4; Start 19; Stop 43
acaaaggcgtaatatttattaggcc

SEQ ID NO: 358377 - DNA, 25 bp, Artificial
  probe
  misc_feature (1)..(25): SEQ ID NO: 3548; WAN0249E4; Start 65; Stop 89
gtctttaaaagaaggagtatctacg

SEQ ID NO: 358378 - DNA, 25 bp, Artificial
  probe
  misc_feature (1)..(25): SEQ ID NO: 3548; WAN0249E4; Start 66; Stop 90
tctttaaaagaaggagtatctacgt

SEQ ID NO: 358379 - DNA, 25 bp, Artificial
  probe
  misc_feature (1)..(25): SEQ ID NO: 3548; WAN0249E4; Start 64; Stop 88
tgtctttaaaagaaggagtatctac

SEQ ID NO: 358380 - DNA, 25 bp, Artificial
  probe
  misc_feature (1)..(25): SEQ ID NO: 3548; WAN0249E4; Start 62; Stop 86
attgtctttaaaagaaggagtatct

SEQ ID NO: 358381 - DNA, 25 bp, Artificial
  probe
  misc_feature (1)..(25): SEQ ID NO: 3548; WAN0249E4; Start 67; Stop 91
ctttaaaagaaggagtatctacgta

SEQ ID NO: 358382 - DNA, 25 bp, Artificial
  probe
  misc_feature (1)..(25): SEQ ID NO: 3548; WAN0249E4; Start 59; Stop 83
agtattgtctttaaaagaaggagta

SEQ ID NO: 358383 - DNA, 25 bp, Artificial
  probe
  misc_feature (1)..(25): SEQ ID NO: 3548; WAN0249E4; Start 58; Stop 82
tagtattgtctttaaaagaaggagt

SEQ ID NO: 358384 - DNA, 25 bp, Artificial
  probe
  misc_feature (1)..(25): SEQ ID NO: 3548; WAN0249E4; Start 63; Stop 87
ttgtctttaaaagaaggagtatcta

SEQ ID NO: 358385 - DNA, 25 bp, Artificial
  probe
  misc_feature (1)..(25): SEQ ID NO: 3548; WAN0249E4; Start 68; Stop 92
tttaaaagaaggagtatctacgtaa

SEQ ID NO: 358386 - DNA, 25 bp, Artificial
  probe
  misc_feature (1)..(25): SEQ ID NO: 3548; WAN0249E4; Start 57; Stop 81
ctagtattgtctttaaaagaaggag

SEQ ID NO: 358387 - DNA, 25 bp, Artificial
  probe
  misc_feature (1)..(25): SEQ ID NO: 3548; WAN0249E4; Start 69; Stop 93
ttaaaagaaggagtatctacgtaat

SEQ ID NO: 358388 - DNA, 25 bp, Artificial
  probe
  misc_feature (1)..(25): SEQ ID NO: 3548; WAN0249E4; Start 56; Stop 80
actagtattgtctttaaaagaagga

SEQ ID NO: 358389 - DNA, 25 bp, Artificial
  probe
  misc_feature (1)..(25): SEQ ID NO: 3549; WAN024A5T; Start 112; Stop 136
atcgctttctattcgtcctttgtat

SEQ ID NO: 358390 - DNA, 25 bp, Artificial
  probe
  misc_feature (1)..(25): SEQ ID NO: 3549; WAN024A5T; Start 111; Stop 135
aatcgctttctattcgtcctttgta

SEQ ID NO: 358391 - DNA, 25 bp, Artificial
  probe
  misc_feature (1)..(25): SEQ ID NO: 3549; WAN024A5T; Start 132; Stop 156
tgtatcttatttaatgtcgccctga

SEQ ID NO: 358392 - DNA, 25 bp, Artificial
  probe
  misc_feature (1)..(25): SEQ ID NO: 3549; WAN024A5T; Start 286; Stop 310
ccgcttgacacccttaatatcttat

SEQ ID NO: 358393 - DNA, 25 bp, Artificial
  probe
  misc_feature (1)..(25): SEQ ID NO: 3549; WAN024A5T; Start 115; Stop 139
gctttctattcgtcctttgtatctt

SEQ ID NO: 358394 - DNA, 25 bp, Artificial
  probe
  misc_feature (1)..(25): SEQ ID NO: 3549; WAN024A5T; Start 133; Stop 157
gtatcttatttaatgtcgccctgag

SEQ ID NO: 358395 - DNA, 25 bp, Artificial
  probe
  misc_feature (1)..(25): SEQ ID NO: 3549; WAN024A5T; Start 16; Stop 40
cgtcggagaatttatgtaactgaac

SEQ ID NO: 358396 - DNA, 25 bp, Artificial
  probe
  misc_feature (1)..(25): SEQ ID NO: 3549; WAN024A5T; Start 15; Stop 39
tcgtcggagaatttatgtaactgaa

SEQ ID NO: 358397 - DNA, 25 bp, Artificial
  probe
  misc_feature (1)..(25): SEQ ID NO: 3549; WAN024A5T; Start 107; Stop 131
attcaatcgctttctattcgtcctt

SEQ ID NO: 358398 - DNA, 25 bp, Artificial
  probe
  misc_feature (1)..(25): SEQ ID NO: 3549; WAN024A5T; Start 105; Stop 129
aaattcaatcgctttctattcgtcc

SEQ ID NO: 358399 - DNA, 25 bp, Artificial
  probe
  misc_feature (1)..(25): SEQ ID NO: 3549; WAN024A5T; Start 131; Stop 155
ttgtatcttatttaatgtcgccctg

SEQ ID NO: 358400 - DNA, 25 bp, Artificial
  probe
  misc_feature (1)..(25): SEQ ID NO: 3549; WAN024A5T; Start 114; Stop 138
cgctttctattcgtcctttgtatct

SEQ ID NO: 358401 - DNA, 25 bp, Artificial
  probe
  misc_feature (1)..(25): SEQ ID NO: 3549; WAN024A5T; Start 113; Stop 137
tcgctttctattcgtcctttgtatc

SEQ ID NO: 358402 - DNA, 25 bp, Artificial
  probe
  misc_feature (1)..(25): SEQ ID NO: 3549; WAN024A5T; Start 108; Stop 132
ttcaatcgctttctattcgtccttt

SEQ ID NO: 358403 - DNA, 25 bp, Artificial
  probe
  misc_feature (1)..(25): SEQ ID NO: 3549; WAN024A5T; Start 106; Stop 130
aattcaatcgctttctattcgtcct

SEQ ID NO: 358404 - DNA, 25 bp, Artificial
  probe
  misc_feature (1)..(25): SEQ ID NO: 3549; WAN024A5T; Start 135; Stop 159
atcttatttaatgtcgccctgagag

SEQ ID NO: 358405 - DNA, 25 bp, Artificial
  probe
  misc_feature (1)..(25): SEQ ID NO: 3549; WAN024A5T; Start 134; Stop 158
tatcttatttaatgtcgccctgaga

SEQ ID NO: 358406 - DNA, 25 bp, Artificial
  probe
  misc_feature (1)..(25): SEQ ID NO: 3549; WAN024A5T; Start 285; Stop 309
tccgcttgacacccttaatatctta

SEQ ID NO: 358407 - DNA, 25 bp, Artificial
  probe
  misc_feature (1)..(25): SEQ ID NO: 3549; WAN024A5T; Start 130; Stop 154
tttgtatcttatttaatgtcgccct

SEQ ID NO: 358408 - DNA, 25 bp, Artificial
  probe
  misc_feature (1)..(25): SEQ ID NO: 3549; WAN024A5T; Start 129; Stop 153
ctttgtatcttatttaatgtcgccc

SEQ ID NO: 358409 - DNA, 25 bp, Artificial
  probe
  misc_feature (1)..(25): SEQ ID NO: 3549; WAN024A5T; Start 128; Stop 152
cctttgtatcttatttaatgtcgcc

SEQ ID NO: 358410 - DNA, 25 bp, Artificial
  probe
  misc_feature (1)..(25): SEQ ID NO: 3549; WAN024A5T; Start 53; Stop 77
ctcagaatgtagagaaaccaacttg

SEQ ID NO: 358411 - DNA, 25 bp, Artificial
  probe
  misc_feature (1)..(25): SEQ ID NO: 3549; WAN024A5T; Start 287; Stop 311
cgcttgacacccttaatatcttata

SEQ ID NO: 358412 - DNA, 25 bp, Artificial
  probe
  misc_feature (1)..(25): SEQ ID NO: 3549; WAN024A5T; Start 14; Stop 38
ctcgtcggagaatttatgtaactga

SEQ ID NO: 358413 - DNA, 25 bp, Artificial
  probe
  misc_feature (1)..(25): SEQ ID NO: 3549; WAN024A5T; Start 20; Stop 44
ggagaatttatgtaactgaacacgg

SEQ ID NO: 358414 - DNA, 25 bp, Artificial
  probe
  misc_feature (1)..(25): SEQ ID NO: 3549; WAN024A5T; Start 19; Stop 43
cggagaatttatgtaactgaacacg

SEQ ID NO: 358415 - DNA, 25 bp, Artificial
  probe
  misc_feature (1)..(25): SEQ ID NO: 3549; WAN024A5T; Start 52; Stop 76
gctcagaatgtagagaaaccaactt

SEQ ID NO: 358416 - DNA, 25 bp, Artificial
  probe
  misc_feature (1)..(25): SEQ ID NO: 3549; WAN024A5T; Start 23; Stop 47
gaatttatgtaactgaacacggacg

SEQ ID NO: 358417 - DNA, 25 bp, Artificial
  probe
  misc_feature (1)..(25): SEQ ID NO: 3549; WAN024A5T; Start 22; Stop 46
agaatttatgtaactgaacacggac

SEQ ID NO: 358418 - DNA, 25 bp, Artificial
  probe
  misc_feature (1)..(25): SEQ ID NO: 3549; WAN024A5T; Start 21; Stop 45
gagaatttatgtaactgaacacgga

SEQ ID NO: 358419 - DNA, 25 bp, Artificial
  probe
  misc_feature (1)..(25): SEQ ID NO: 3549; WAN024A5T; Start 18; Stop 42
tcggagaatttatgtaactgaacac

SEQ ID NO: 358420 - DNA, 25 bp, Artificial
  probe
  misc_feature (1)..(25): SEQ ID NO: 3549; WAN024A5T; Start 17; Stop 41
gtcggagaatttatgtaactgaaca

SEQ ID NO: 358421 - DNA, 25 bp, Artificial
  probe
  misc_feature (1)..(25): SEQ ID NO: 3549; WAN024A5T; Start 109; Stop 133
tcaatcgctttctattcgtcctttg

SEQ ID NO: 358422 - DNA, 25 bp, Artificial
  probe
  misc_feature (1)..(25): SEQ ID NO: 3550; WAN024AD8; Start 18; Stop 42
atatgtaaagagtcgaggaaatccc

SEQ ID NO: 358423 - DNA, 25 bp, Artificial
  probe
  misc_feature (1)..(25): SEQ ID NO: 3550; WAN024AD8; Start 17; Stop 41
aatatgtaaagagtcgaggaaatcc

SEQ ID NO: 358424 - DNA, 25 bp, Artificial
  probe
  misc_feature (1)..(25): SEQ ID NO: 3550; WAN024AD8; Start 19; Stop 43
tatgtaaagagtcgaggaaatccct

SEQ ID NO: 358425 - DNA, 25 bp, Artificial
  probe
  misc_feature (1)..(25): SEQ ID NO: 3550; WAN024AD8; Start 12; Stop 36
caaataatatgtaaagagtcgagga

SEQ ID NO: 358426 - DNA, 25 bp, Artificial
  probe
  misc_feature (1)..(25): SEQ ID NO: 3550; WAN024AD8; Start 11; Stop 35
acaaataatatgtaaagagtcgagg

SEQ ID NO: 358427 - DNA, 25 bp, Artificial
  probe
  misc_feature (1)..(25): SEQ ID NO: 3550; WAN024AD8; Start 16; Stop 40
taatatgtaaagagtcgaggaaatc

SEQ ID NO: 358428 - DNA, 25 bp, Artificial
  probe
  misc_feature (1)..(25): SEQ ID NO: 3550; WAN024AD8; Start 8; Stop 32
cgaacaaataatatgtaaagagtcg

SEQ ID NO: 358429 - DNA, 25 bp, Artificial
  probe
  misc_feature (1)..(25): SEQ ID NO: 3550; WAN024AD8; Start 7; Stop 31
acgaacaaataatatgtaaagagtc

SEQ ID NO: 358430 - DNA, 25 bp, Artificial
  probe
  misc_feature (1)..(25): SEQ ID NO: 3550; WAN024AD8; Start 14; Stop 38
aataatatgtaaagagtcgaggaaa

SEQ ID NO: 358431 - DNA, 25 bp, Artificial
  probe
  misc_feature (1)..(25): SEQ ID NO: 3550; WAN024AD8; Start 13; Stop 37
aaataatatgtaaagagtcgaggaa

SEQ ID NO: 358432 - DNA, 25 bp, Artificial
  probe
  misc_feature (1)..(25): SEQ ID NO: 3550; WAN024AD8; Start 15; Stop 39
ataatatgtaaagagtcgaggaaat

SEQ ID NO: 358433 - DNA, 25 bp, Artificial
  probe
  misc_feature (1)..(25): SEQ ID NO: 3550; WAN024AD8; Start 6; Stop 30
aacgaacaaataatatgtaaagagt

SEQ ID NO: 358434 - DNA, 25 bp, Artificial
  probe
  misc_feature (1)..(25): SEQ ID NO: 3550; WAN024AD8; Start 10; Stop 34
aacaaataatatgtaaagagtcgag

SEQ ID NO: 358435 - DNA, 25 bp, Artificial
  probe
  misc_feature (1)..(25): SEQ ID NO: 3550; WAN024AD8; Start 9; Stop 33
gaacaaataatatgtaaagagtcga

SEQ ID NO: 358436 - DNA, 25 bp, Artificial
  probe
  misc_feature (1)..(25): SEQ ID NO: 3550; WAN024AD8; Start 20; Stop 44
atgtaaagagtcgaggaaatccctc

SEQ ID NO: 358437 - DNA, 25 bp, Artificial
  probe
  misc_feature (1)..(25): SEQ ID NO: 3551; WAN0249KC; Start 38; Stop 62
taactaaatctttggaggcaatacg

SEQ ID NO: 358438 - DNA, 25 bp, Artificial
  probe
  misc_feature (1)..(25): SEQ ID NO: 3551; WAN0249KC; Start 41; Stop 65
ctaaatctttggaggcaatacgttt

SEQ ID NO: 358439 - DNA, 25 bp, Artificial
  probe
  misc_feature (1)..(25): SEQ ID NO: 3551; WAN0249KC; Start 37; Stop 61
ttaactaaatctttggaggcaatac

SEQ ID NO: 358440 - DNA, 25 bp, Artificial
  probe
  misc_feature (1)..(25): SEQ ID NO: 3551; WAN0249KC; Start 40; Stop 64
actaaatctttggaggcaatacgtt

SEQ ID NO: 358441 - DNA, 25 bp, Artificial
  probe
  misc_feature (1)..(25): SEQ ID NO: 3551; WAN0249KC; Start 39; Stop 63
aactaaatctttggaggcaatacgt

SEQ ID NO: 358442 - DNA, 25 bp, Artificial
  probe
  misc_feature (1)..(25): SEQ ID NO: 3551; WAN0249KC; Start 91; Stop 115
tttgagccttcaacacagattacta

SEQ ID NO: 358443 - DNA, 25 bp, Artificial
  probe
  misc_feature (1)..(25): SEQ ID NO: 3551; WAN0249KC; Start 35; Stop 59
atttaactaaatctttggaggcaat

SEQ ID NO: 358444 - DNA, 25 bp, Artificial
  probe
  misc_feature (1)..(25): SEQ ID NO: 3551; WAN0249KC; Start 36; Stop 60
tttaactaaatctttggaggcaata

SEQ ID NO: 358445 - DNA, 25 bp, Artificial
  probe
  misc_feature (1)..(25): SEQ ID NO: 3551; WAN0249KC; Start 34; Stop 58
tatttaactaaatctttggaggcaa

SEQ ID NO: 358446 - DNA, 25 bp, Artificial
  probe
  misc_feature (1)..(25): SEQ ID NO: 3551; WAN0249KC; Start 33; Stop 57
ttatttaactaaatctttggaggca

SEQ ID NO: 358447 - DNA, 25 bp, Artificial
  probe
  misc_feature (1)..(25): SEQ ID NO: 3551; WAN0249KC; Start 78; Stop 102
ttttaccataggttttgagccttca

SEQ ID NO: 358448 - DNA, 25 bp, Artificial
  probe
  misc_feature (1)..(25): SEQ ID NO: 3551; WAN0249KC; Start 42; Stop 66
taaatctttggaggcaatacgtttt

SEQ ID NO: 358449 - DNA, 25 bp, Artificial
  probe
  misc_feature (1)..(25): SEQ ID NO: 3551; WAN0249KC; Start 43; Stop 67
aaatctttggaggcaatacgttttc

SEQ ID NO: 358450 - DNA, 25 bp, Artificial
  probe
  misc_feature (1)..(25): SEQ ID NO: 3551; WAN0249KC; Start 53; Stop 77
aggcaatacgttttcaaagctactt

SEQ ID NO: 358451 - DNA, 25 bp, Artificial
  probe
  misc_feature (1)..(25): SEQ ID NO: 3551; WAN0249KC; Start 52; Stop 76
gaggcaatacgttttcaaagctact

SEQ ID NO: 358452 - DNA, 25 bp, Artificial
  probe
  misc_feature (1)..(25): SEQ ID NO: 3551; WAN0249KC; Start 45; Stop 69
atctttggaggcaatacgttttcaa

SEQ ID NO: 358453 - DNA, 25 bp, Artificial
  probe
  misc_feature (1)..(25): SEQ ID NO: 3551; WAN0249KC; Start 44; Stop 68
aatctttggaggcaatacgttttca

SEQ ID NO: 358454 - DNA, 25 bp, Artificial
  probe
  misc_feature (1)..(25): SEQ ID NO: 3551; WAN0249KC; Start 79; Stop 103
tttaccataggttttgagccttcaa

SEQ ID NO: 358455 - DNA, 25 bp, Artificial
  probe
  misc_feature (1)..(25): SEQ ID NO: 3551; WAN0249KC; Start 90; Stop 114
ttttgagccttcaacacagattact

SEQ ID NO: 358456 - DNA, 25 bp, Artificial
  probe
  misc_feature (1)..(25): SEQ ID NO: 3551; WAN0249KC; Start 89; Stop 113
gttttgagccttcaacacagattac

SEQ ID NO: 358457 - DNA, 25 bp, Artificial
  probe
  misc_feature (1)..(25): SEQ ID NO: 3551; WAN0249KC; Start 32; Stop 56
attatttaactaaatctttggaggc

SEQ ID NO: 358458 - DNA, 25 bp, Artificial
  probe
  misc_feature (1)..(25): SEQ ID NO: 3551; WAN0249KC; Start 80; Stop 104
ttaccataggttttgagccttcaac

SEQ ID NO: 358459 - DNA, 25 bp, Artificial
  probe
  misc_feature (1)..(25): SEQ ID NO: 3551; WAN0249KC; Start 51; Stop 75
ggaggcaatacgttttcaaagctac

SEQ ID NO: 358460 - DNA, 25 bp, Artificial
  probe
  misc_feature (1)..(25): SEQ ID NO: 3551; WAN0249KC; Start 55; Stop 79
gcaatacgttttcaaagctactttt

SEQ ID NO: 358461 - DNA, 25 bp, Artificial
  probe
  misc_feature (1)..(25): SEQ ID NO: 3551; WAN0249KC; Start 54; Stop 78
ggcaatacgttttcaaagctacttt

SEQ ID NO: 358462 - DNA, 25 bp, Artificial
  probe
  misc_feature (1)..(25): SEQ ID NO: 3551; WAN0249KC; Start 88; Stop 112
ggttttgagccttcaacacagatta

SEQ ID NO: 358463 - DNA, 25 bp, Artificial
  probe
  misc_feature (1)..(25): SEQ ID NO: 3551; WAN0249KC; Start 50; Stop 74
tggaggcaatacgttttcaaagcta

SEQ ID NO: 358464 - DNA, 25 bp, Artificial
  probe
  misc_feature (1)..(25): SEQ ID NO: 3551; WAN0249KC; Start 81; Stop 105
taccataggttttgagccttcaaca

SEQ ID NO: 358465 - DNA, 25 bp, Artificial
  probe
  misc_feature (1)..(25): SEQ ID NO: 3551; WAN0249KC; Start 86; Stop 110
taggttttgagccttcaacacagat

SEQ ID NO: 358466 - DNA, 25 bp, Artificial
  probe
  misc_feature (1)..(25): SEQ ID NO: 3551; WAN0249KC; Start 85; Stop 109
ataggttttgagccttcaacacaga

SEQ ID NO: 358467 - DNA, 25 bp, Artificial
  probe
  misc_feature (1)..(25): SEQ ID NO: 3551; WAN0249KC; Start 84; Stop 108
cataggttttgagccttcaacacag

SEQ ID NO: 358468 - DNA, 25 bp, Artificial
  probe
  misc_feature (1)..(25): SEQ ID NO: 3551; WAN0249KC; Start 46; Stop 70
tctttggaggcaatacgttttcaaa

SEQ ID NO: 358469 - DNA, 25 bp, Artificial
  probe
  misc_feature (1)..(25): SEQ ID NO: 3551; WAN0249KC; Start 87; Stop 111
aggttttgagccttcaacacagatt

SEQ ID NO: 358470 - DNA, 25 bp, Artificial
  probe
  misc_feature (1)..(25): SEQ ID NO: 3552; WAN0249JX; Start 38; Stop 62
caagtcaaaagcccgatgtttccat

SEQ ID NO: 358471 - DNA, 25 bp, Artificial
  probe
  misc_feature (1)..(25): SEQ ID NO: 3552; WAN0249JX; Start 50; Stop 74
ccgatgtttccatcaggcttctttt

SEQ ID NO: 358472 - DNA, 25 bp, Artificial
  probe
  misc_feature (1)..(25): SEQ ID NO: 3552; WAN0249JX; Start 39; Stop 63
aagtcaaaagcccgatgtttccatc

SEQ ID NO: 358473 - DNA, 25 bp, Artificial
  probe
  misc_feature (1)..(25): SEQ ID NO: 3552; WAN0249JX; Start 41; Stop 65
gtcaaaagcccgatgtttccatcag

SEQ ID NO: 358474 - DNA, 25 bp, Artificial
  probe
  misc_feature (1)..(25): SEQ ID NO: 3552; WAN0249JX; Start 40; Stop 64
agtcaaaagcccgatgtttccatca

SEQ ID NO: 358475 - DNA, 25 bp, Artificial
  probe
  misc_feature (1)..(25): SEQ ID NO: 3552; WAN0249JX; Start 35; Stop 59
ttgcaagtcaaaagcccgatgtttc

SEQ ID NO: 358476 - DNA, 25 bp, Artificial
  probe
  misc_feature (1)..(25): SEQ ID NO: 3552; WAN0249JX; Start 34; Stop 58
tttgcaagtcaaaagcccgatgttt

SEQ ID NO: 358477 - DNA, 25 bp, Artificial
  probe
  misc_feature (1)..(25): SEQ ID NO: 3552; WAN0249JX; Start 33; Stop 57
ttttgcaagtcaaaagcccgatgtt

SEQ ID NO: 358478 - DNA, 25 bp, Artificial
  probe
  misc_feature (1)..(25): SEQ ID NO: 3553; WAN024AMH; Start 182; Stop 206
acacgggtttcagaatttcttacta

SEQ ID NO: 358479 - DNA, 25 bp, Artificial
  probe
  misc_feature (1)..(25): SEQ ID NO: 3553; WAN024AMH; Start 146; Stop 170
catcaatagaaaggaacaaagagtg

SEQ ID NO: 358480 - DNA, 25 bp, Artificial
  probe
  misc_feature (1)..(25): SEQ ID NO: 3553; WAN024AMH; Start 180; Stop 204
gaacacgggtttcagaatttcttac

SEQ ID NO: 358481 - DNA, 25 bp, Artificial
  probe
  misc_feature (1)..(25): SEQ ID NO: 3553; WAN024AMH; Start 183; Stop 207
cacgggtttcagaatttcttactaa

SEQ ID NO: 358482 - DNA, 25 bp, Artificial
  probe
  misc_feature (1)..(25): SEQ ID NO: 3553; WAN024AMH; Start 181; Stop 205
aacacgggtttcagaatttcttact

SEQ ID NO: 358483 - DNA, 25 bp, Artificial
  probe
  misc_feature (1)..(25): SEQ ID NO: 3553; WAN024AMH; Start 145; Stop 169
tcatcaatagaaaggaacaaagagt

SEQ ID NO: 358484 - DNA, 25 bp, Artificial
  probe
  misc_feature (1)..(25): SEQ ID NO: 3553; WAN024AMH; Start 111; Stop 135
aaagggacggaatctcatttgtttg

SEQ ID NO: 358485 - DNA, 25 bp, Artificial
  probe
  misc_feature (1)..(25): SEQ ID NO: 3553; WAN024AMH; Start 116; Stop 140
gacggaatctcatttgtttgggttt

SEQ ID NO: 358486 - DNA, 25 bp, Artificial
  probe
  misc_feature (1)..(25): SEQ ID NO: 3553; WAN024AMH; Start 184; Stop 208
acgggtttcagaatttcttactaaa

SEQ ID NO: 358487 - DNA, 25 bp, Artificial
  probe
  misc_feature (1)..(25): SEQ ID NO: 3553; WAN024AMH; Start 143; Stop 167
tctcatcaatagaaaggaacaaaga

SEQ ID NO: 358488 - DNA, 25 bp, Artificial
  probe
  misc_feature (1)..(25): SEQ ID NO: 3553; WAN024AMH; Start 142; Stop 166
gtctcatcaatagaaaggaacaaag

SEQ ID NO: 358489 - DNA, 25 bp, Artificial
  probe
  misc_feature (1)..(25): SEQ ID NO: 3553; WAN024AMH; Start 147; Stop 171
atcaatagaaaggaacaaagagtgt

SEQ ID NO: 358490 - DNA, 25 bp, Artificial
  probe
  misc_feature (1)..(25): SEQ ID NO: 3553; WAN024AMH; Start 141; Stop 165
tgtctcatcaatagaaaggaacaaa

SEQ ID NO: 358491 - DNA, 25 bp, Artificial
  probe
  misc_feature (1)..(25): SEQ ID NO: 3553; WAN024AMH; Start 139; Stop 163
tttgtctcatcaatagaaaggaaca

SEQ ID NO: 358492 - DNA, 25 bp, Artificial
  probe
  misc_feature (1)..(25): SEQ ID NO: 3553; WAN024AMH; Start 144; Stop 168
ctcatcaatagaaaggaacaaagag

SEQ ID NO: 358493 - DNA, 25 bp, Artificial
  probe
  misc_feature (1)..(25): SEQ ID NO: 3553; WAN024AMH; Start 185; Stop 209
cgggtttcagaatttcttactaaat

SEQ ID NO: 358494 - DNA, 25 bp, Artificial
  probe
  misc_feature (1)..(25): SEQ ID NO: 3553; WAN024AMH; Start 122; Stop 146
atctcatttgtttgggttttgtctc

SEQ ID NO: 358495 - DNA, 25 bp, Artificial
  probe
  misc_feature (1)..(25): SEQ ID NO: 3553; WAN024AMH; Start 121; Stop 145
aatctcatttgtttgggttttgtct

SEQ ID NO: 358496 - DNA, 25 bp, Artificial
  probe
  misc_feature (1)..(25): SEQ ID NO: 3553; WAN024AMH; Start 125; Stop 149
tcatttgtttgggttttgtctcatc

SEQ ID NO: 358497 - DNA, 25 bp, Artificial
  probe
  misc_feature (1)..(25): SEQ ID NO: 3553; WAN024AMH; Start 124; Stop 148
ctcatttgtttgggttttgtctcat

SEQ ID NO: 358498 - DNA, 25 bp, Artificial
  probe
  misc_feature (1)..(25): SEQ ID NO: 3553; WAN024AMH; Start 120; Stop 144
gaatctcatttgtttgggttttgtc

SEQ ID NO: 358499 - DNA, 25 bp, Artificial
  probe
  misc_feature (1)..(25): SEQ ID NO: 3553; WAN024AMH; Start 119; Stop 143
ggaatctcatttgtttgggttttgt

SEQ ID NO: 358500 - DNA, 25 bp, Artificial
  probe
  misc_feature (1)..(25): SEQ ID NO: 3553; WAN024AMH; Start 126; Stop 150
catttgtttgggttttgtctcatca

SEQ ID NO: 358501 - DNA, 25 bp, Artificial
  probe
  misc_feature (1)..(25): SEQ ID NO: 3553; WAN024AMH; Start 112; Stop 136
aagggacggaatctcatttgtttgg

SEQ ID NO: 358502 - DNA, 25 bp, Artificial
  probe
  misc_feature (1)..(25): SEQ ID NO: 3553; WAN024AMH; Start 123; Stop 147
tctcatttgtttgggttttgtctca

SEQ ID NO: 358503 - DNA, 25 bp, Artificial
  probe
  misc_feature (1)..(25): SEQ ID NO: 3553; WAN024AMH; Start 135; Stop 159
gggttttgtctcatcaatagaaagg

SEQ ID NO: 358504 - DNA, 25 bp, Artificial
  probe
  misc_feature (1)..(25): SEQ ID NO: 3553; WAN024AMH; Start 128; Stop 152
tttgtttgggttttgtctcatcaat

SEQ ID NO: 358505 - DNA, 25 bp, Artificial
  probe
  misc_feature (1)..(25): SEQ ID NO: 3553; WAN024AMH; Start 127; Stop 151
atttgtttgggttttgtctcatcaa

SEQ ID NO: 358506 - DNA, 25 bp, Artificial
  probe
  misc_feature (1)..(25): SEQ ID NO: 3553; WAN024AMH; Start 110; Stop 134
aaaagggacggaatctcatttgttt

SEQ ID NO: 358507 - DNA, 25 bp, Artificial
  probe
  misc_feature (1)..(25): SEQ ID NO: 3553; WAN024AMH; Start 130; Stop 154
tgtttgggttttgtctcatcaatag

SEQ ID NO: 358508 - DNA, 25 bp, Artificial
  probe
  misc_feature (1)..(25): SEQ ID NO: 3553; WAN024AMH; Start 131; Stop 155
gtttgggttttgtctcatcaataga

SEQ ID NO: 358509 - DNA, 25 bp, Artificial
  probe
  misc_feature (1)..(25): SEQ ID NO: 3553; WAN024AMH; Start 129; Stop 153
ttgtttgggttttgtctcatcaata

SEQ ID NO: 358510 - DNA, 25 bp, Artificial
  probe
  misc_feature (1)..(25): SEQ ID NO: 3553; WAN024AMH; Start 134; Stop 158
tgggttttgtctcatcaatagaaag

SEQ ID NO: 358511 - DNA, 25 bp, Artificial
  probe
  misc_feature (1)..(25): SEQ ID NO: 3554; WAN024ALJ; Start 18; Stop 42
tgaaatgataggaaaggaaaagaac

SEQ ID NO: 358512 - DNA, 25 bp, Artificial
  probe
  misc_feature (1)..(25): SEQ ID NO: 3554; WAN024ALJ; Start 11; Stop 35
cttctattgaaatgataggaaagga

SEQ ID NO: 358513 - DNA, 25 bp, Artificial
  probe
  misc_feature (1)..(25): SEQ ID NO: 3554; WAN024ALJ; Start 10; Stop 34
tcttctattgaaatgataggaaagg

SEQ ID NO: 358514 - DNA, 25 bp, Artificial
  probe
  misc_feature (1)..(25): SEQ ID NO: 3554; WAN024ALJ; Start 6; Stop 30
ggattcttctattgaaatgatagga

SEQ ID NO: 358515 - DNA, 25 bp, Artificial
  probe
  misc_feature (1)..(25): SEQ ID NO: 3554; WAN024ALJ; Start 5; Stop 29
aggattcttctattgaaatgatagg

SEQ ID NO: 358516 - DNA, 25 bp, Artificial
  probe
  misc_feature (1)..(25): SEQ ID NO: 3554; WAN024ALJ; Start 13; Stop 37
tctattgaaatgataggaaaggaaa

SEQ ID NO: 358517 - DNA, 25 bp, Artificial
  probe
  misc_feature (1)..(25): SEQ ID NO: 3554; WAN024ALJ; Start 12; Stop 36
ttctattgaaatgataggaaaggaa

SEQ ID NO: 358518 - DNA, 25 bp, Artificial
  probe
  misc_feature (1)..(25): SEQ ID NO: 3554; WAN024ALJ; Start 17; Stop 41
ttgaaatgataggaaaggaaaagaa

SEQ ID NO: 358519 - DNA, 25 bp, Artificial
  probe
  misc_feature (1)..(25): SEQ ID NO: 3554; WAN024ALJ; Start 16; Stop 40
attgaaatgataggaaaggaaaaga

SEQ ID NO: 358520 - DNA, 25 bp, Artificial
  probe
  misc_feature (1)..(25): SEQ ID NO: 3554; WAN024ALJ; Start 3; Stop 27
agaggattcttctattgaaatgata

SEQ ID NO: 358521 - DNA, 25 bp, Artificial
  probe
  misc_feature (1)..(25): SEQ ID NO: 3554; WAN024ALJ; Start 2; Stop 26
aagaggattcttctattgaaatgat

SEQ ID NO: 358522 - DNA, 25 bp, Artificial
  probe
  misc_feature (1)..(25): SEQ ID NO: 3554; WAN024ALJ; Start 4; Stop 28
gaggattcttctattgaaatgatag

SEQ ID NO: 358523 - DNA, 25 bp, Artificial
  probe
  misc_feature (1)..(25): SEQ ID NO: 3554; WAN024ALJ; Start 15; Stop 39
tattgaaatgataggaaaggaaaag

SEQ ID NO: 358524 - DNA, 25 bp, Artificial
  probe
  misc_feature (1)..(25): SEQ ID NO: 3554; WAN024ALJ; Start 14; Stop 38
ctattgaaatgataggaaaggaaaa

SEQ ID NO: 358525 - DNA, 25 bp, Artificial
  probe
  misc_feature (1)..(25): SEQ ID NO: 3555; WAN0249W8; Start 41; Stop 65
agcatggtataataatatgcaggaa

SEQ ID NO: 358526 - DNA, 25 bp, Artificial
  probe
  misc_feature (1)..(25): SEQ ID NO: 3555; WAN0249W8; Start 40; Stop 64
tagcatggtataataatatgcagga

SEQ ID NO: 358527 - DNA, 25 bp, Artificial
  probe
  misc_feature (1)..(25): SEQ ID NO: 3555; WAN0249W8; Start 39; Stop 63
ctagcatggtataataatatgcagg

SEQ ID NO: 358528 - DNA, 25 bp, Artificial
  probe
  misc_feature (1)..(25): SEQ ID NO: 3555; WAN0249W8; Start 38; Stop 62
actagcatggtataataatatgcag

SEQ ID NO: 358529 - DNA, 25 bp, Artificial
  probe
  misc_feature (1)..(25): SEQ ID NO: 3555; WAN0249W8; Start 58; Stop 82
tgcaggaaaattttgaattatgagg

SEQ ID NO: 358530 - DNA, 25 bp, Artificial
  probe
  misc_feature (1)..(25): SEQ ID NO: 3555; WAN0249W8; Start 42; Stop 66
gcatggtataataatatgcaggaaa

SEQ ID NO: 358531 - DNA, 25 bp, Artificial
  probe
  misc_feature (1)..(25): SEQ ID NO: 3555; WAN0249W8; Start 59; Stop 83
gcaggaaaattttgaattatgagga

SEQ ID NO: 358532 - DNA, 25 bp, Artificial
  probe
  misc_feature (1)..(25): SEQ ID NO: 3555; WAN0249W8; Start 36; Stop 60
caactagcatggtataataatatgc

SEQ ID NO: 358533 - DNA, 25 bp, Artificial
  probe
  misc_feature (1)..(25): SEQ ID NO: 3555; WAN0249W8; Start 37; Stop 61
aactagcatggtataataatatgca

SEQ ID NO: 358534 - DNA, 25 bp, Artificial
  probe
  misc_feature (1)..(25): SEQ ID NO: 3555; WAN0249W8; Start 66; Stop 90
aattttgaattatgaggaagactag

SEQ ID NO: 358535 - DNA, 25 bp, Artificial
  probe
  misc_feature (1)..(25): SEQ ID NO: 3555; WAN0249W8; Start 43; Stop 67
catggtataataatatgcaggaaaa

SEQ ID NO: 358536 - DNA, 25 bp, Artificial
  probe
  misc_feature (1)..(25): SEQ ID NO: 3555; WAN0249W8; Start 57; Stop 81
atgcaggaaaattttgaattatgag

SEQ ID NO: 358537 - DNA, 25 bp, Artificial
  probe
  misc_feature (1)..(25): SEQ ID NO: 3555; WAN0249W8; Start 60; Stop 84
caggaaaattttgaattatgaggaa

SEQ ID NO: 358538 - DNA, 25 bp, Artificial
  probe
  misc_feature (1)..(25): SEQ ID NO: 3555; WAN0249W8; Start 62; Stop 86
ggaaaattttgaattatgaggaaga

SEQ ID NO: 358539 - DNA, 25 bp, Artificial
  probe
  misc_feature (1)..(25): SEQ ID NO: 3555; WAN0249W8; Start 61; Stop 85
aggaaaattttgaattatgaggaag

SEQ ID NO: 358540 - DNA, 25 bp, Artificial
  probe
  misc_feature (1)..(25): SEQ ID NO: 3555; WAN0249W8; Start 56; Stop 80
tatgcaggaaaattttgaattatga

SEQ ID NO: 358541 - DNA, 25 bp, Artificial
  probe
  misc_feature (1)..(25): SEQ ID NO: 3555; WAN0249W8; Start 64; Stop 88
aaaattttgaattatgaggaagact

SEQ ID NO: 358542 - DNA, 25 bp, Artificial
  probe
  misc_feature (1)..(25): SEQ ID NO: 3555; WAN0249W8; Start 63; Stop 87
gaaaattttgaattatgaggaagac

SEQ ID NO: 358543 - DNA, 25 bp, Artificial
  probe
  misc_feature (1)..(25): SEQ ID NO: 3555; WAN0249W8; Start 55; Stop 79
atatgcaggaaaattttgaattatg

SEQ ID NO: 358544 - DNA, 25 bp, Artificial
  probe
  misc_feature (1)..(25): SEQ ID NO: 3556; WAN0249WK; Start 6; Stop 30
tgttataaggcagtaatttgaaact

SEQ ID NO: 358545 - DNA, 25 bp, Artificial
  probe
  misc_feature (1)..(25): SEQ ID NO: 3556; WAN0249WK; Start 3; Stop 27
agatgttataaggcagtaatttgaa

SEQ ID NO: 358546 - DNA, 25 bp, Artificial
  probe
  misc_feature (1)..(25): SEQ ID NO: 3556; WAN0249WK; Start 2; Stop 26
aagatgttataaggcagtaatttga

SEQ ID NO: 358547 - DNA, 25 bp, Artificial
  probe
  misc_feature (1)..(25): SEQ ID NO: 3556; WAN0249WK; Start 1; Stop 25
gaagatgttataaggcagtaatttg

SEQ ID NO: 358548 - DNA, 25 bp, Artificial
  probe
  misc_feature (1)..(25): SEQ ID NO: 3556; WAN0249WK; Start 5; Stop 29
atgttataaggcagtaatttgaaac

SEQ ID NO: 358549 - DNA, 25 bp, Artificial
  probe
  misc_feature (1)..(25): SEQ ID NO: 3556; WAN0249WK; Start 4; Stop 28
gatgttataaggcagtaatttgaaa

SEQ ID NO: 358550 - DNA, 25 bp, Artificial
  probe
  misc_feature (1)..(25): SEQ ID NO: 3557; WAN0249N4; Start 17; Stop 41
attacagatttctttcaccgccttt

SEQ ID NO: 358551 - DNA, 25 bp, Artificial
  probe
  misc_feature (1)..(25): SEQ ID NO: 3557; WAN0249N4; Start 16; Stop 40
aattacagatttctttcaccgcctt

SEQ ID NO: 358552 - DNA, 25 bp, Artificial
  probe
  misc_feature (1)..(25): SEQ ID NO: 3557; WAN0249N4; Start 13; Stop 37
tcaaattacagatttctttcaccgc

SEQ ID NO: 358553 - DNA, 25 bp, Artificial
  probe
  misc_feature (1)..(25): SEQ ID NO: 3557; WAN0249N4; Start 15; Stop 39
aaattacagatttctttcaccgcct

SEQ ID NO: 358554 - DNA, 25 bp, Artificial
  probe
  misc_feature (1)..(25): SEQ ID NO: 3557; WAN0249N4; Start 14; Stop 38
caaattacagatttctttcaccgcc

SEQ ID NO: 358555 - DNA, 25 bp, Artificial
  probe
  misc_feature (1)..(25): SEQ ID NO: 3557; WAN0249N4; Start 12; Stop 36
ttcaaattacagatttctttcaccg

SEQ ID NO: 358556 - DNA, 25 bp, Artificial
  probe
  misc_feature (1)..(25): SEQ ID NO: 3557; WAN0249N4; Start 11; Stop 35
cttcaaattacagatttctttcacc

SEQ ID NO: 358557 - DNA, 25 bp, Artificial
  probe
  misc_feature (1)..(25): SEQ ID NO: 3557; WAN0249N4; Start 10; Stop 34
ccttcaaattacagatttctttcac

SEQ ID NO: 358558 - DNA, 25 bp, Artificial
  probe
  misc_feature (1)..(25): SEQ ID NO: 3557; WAN0249N4; Start 9; Stop 33
tccttcaaattacagatttctttca

SEQ ID NO: 358559 - DNA, 25 bp, Artificial
  probe
  misc_feature (1)..(25): SEQ ID NO: 3557; WAN0249N4; Start 18; Stop 42
ttacagatttctttcaccgcctttt

SEQ ID NO: 358560 - DNA, 25 bp, Artificial
  probe
  misc_feature (1)..(25): SEQ ID NO: 3557; WAN0249N4; Start 19; Stop 43
tacagatttctttcaccgccttttc

SEQ ID NO: 358561 - DNA, 25 bp, Artificial
  probe
  misc_feature (1)..(25): SEQ ID NO: 3557; WAN0249N4; Start 24; Stop 48
atttctttcaccgccttttccattt

SEQ ID NO: 358562 - DNA, 25 bp, Artificial
  probe
  misc_feature (1)..(25): SEQ ID NO: 3557; WAN0249N4; Start 25; Stop 49
tttctttcaccgccttttccatttt

SEQ ID NO: 358563 - DNA, 25 bp, Artificial
  probe
  misc_feature (1)..(25): SEQ ID NO: 3557; WAN0249N4; Start 23; Stop 47
gatttctttcaccgccttttccatt

SEQ ID NO: 358564 - DNA, 25 bp, Artificial
  probe
  misc_feature (1)..(25): SEQ ID NO: 3557; WAN0249N4; Start 35; Stop 59
cgccttttccattttgtggtataat

SEQ ID NO: 358565 - DNA, 25 bp, Artificial
  probe
  misc_feature (1)..(25): SEQ ID NO: 3557; WAN0249N4; Start 26; Stop 50
ttctttcaccgccttttccattttg

SEQ ID NO: 358566 - DNA, 25 bp, Artificial
  probe
  misc_feature (1)..(25): SEQ ID NO: 3557; WAN0249N4; Start 36; Stop 60
gccttttccattttgtggtataatg

SEQ ID NO: 358567 - DNA, 25 bp, Artificial
  probe
  misc_feature (1)..(25): SEQ ID NO: 3557; WAN0249N4; Start 22; Stop 46
agatttctttcaccgccttttccat

SEQ ID NO: 358568 - DNA, 25 bp, Artificial
  probe
  misc_feature (1)..(25): SEQ ID NO: 3557; WAN0249N4; Start 8; Stop 32
atccttcaaattacagatttctttc

SEQ ID NO: 358569 - DNA, 25 bp, Artificial
  probe
  misc_feature (1)..(25): SEQ ID NO: 3557; WAN0249N4; Start 34; Stop 58
ccgccttttccattttgtggtataa

SEQ ID NO: 358570 - DNA, 25 bp, Artificial
  probe
  misc_feature (1)..(25): SEQ ID NO: 3557; WAN0249N4; Start 37; Stop 61
ccttttccattttgtggtataatga

SEQ ID NO: 358571 - DNA, 25 bp, Artificial
  probe
  misc_feature (1)..(25): SEQ ID NO: 3557; WAN0249N4; Start 27; Stop 51
tctttcaccgccttttccattttgt

SEQ ID NO: 358572 - DNA, 25 bp, Artificial
  probe
  misc_feature (1)..(25): SEQ ID NO: 3557; WAN0249N4; Start 33; Stop 57
accgccttttccattttgtggtata

SEQ ID NO: 358573 - DNA, 25 bp, Artificial
  probe
  misc_feature (1)..(25): SEQ ID NO: 3557; WAN0249N4; Start 21; Stop 45
cagatttctttcaccgccttttcca

SEQ ID NO: 358574 - DNA, 25 bp, Artificial
  probe
  misc_feature (1)..(25): SEQ ID NO: 3557; WAN0249N4; Start 20; Stop 44
acagatttctttcaccgccttttcc

SEQ ID NO: 358575 - DNA, 25 bp, Artificial
  probe
  misc_feature (1)..(25): SEQ ID NO: 3557; WAN0249N4; Start 7; Stop 31
aatccttcaaattacagatttcttt

SEQ ID NO: 358576 - DNA, 25 bp, Artificial
  probe
  misc_feature (1)..(25): SEQ ID NO: 3557; WAN0249N4; Start 28; Stop 52
ctttcaccgccttttccattttgtg

SEQ ID NO: 358577 - DNA, 25 bp, Artificial
  probe
  misc_feature (1)..(25): SEQ ID NO: 3557; WAN0249N4; Start 38; Stop 62
cttttccattttgtggtataatgaa

SEQ ID NO: 358578 - DNA, 25 bp, Artificial
  probe
  misc_feature (1)..(25): SEQ ID NO: 3557; WAN0249N4; Start 3; Stop 27
aggaaatccttcaaattacagattt

SEQ ID NO: 358579 - DNA, 25 bp, Artificial
  probe
  misc_feature (1)..(25): SEQ ID NO: 3557; WAN0249N4; Start 2; Stop 26
aaggaaatccttcaaattacagatt

SEQ ID NO: 358580 - DNA, 25 bp, Artificial
  probe
  misc_feature (1)..(25): SEQ ID NO: 3557; WAN0249N4; Start 32; Stop 56
caccgccttttccattttgtggtat

SEQ ID NO: 358581 - DNA, 25 bp, Artificial
  probe
  misc_feature (1)..(25): SEQ ID NO: 3557; WAN0249N4; Start 40; Stop 64
tttccattttgtggtataatgaaaa

SEQ ID NO: 358582 - DNA, 25 bp, Artificial
  probe
  misc_feature (1)..(25): SEQ ID NO: 3557; WAN0249N4; Start 39; Stop 63
ttttccattttgtggtataatgaaa

SEQ ID NO: 358583 - DNA, 25 bp, Artificial
  probe
  misc_feature (1)..(25): SEQ ID NO: 3558; WAN024ADE; Start 142; Stop 166
ataatctattggtcttcttcagtcc

SEQ ID NO: 358584 - DNA, 25 bp, Artificial
  probe
  misc_feature (1)..(25): SEQ ID NO: 3558; WAN024ADE; Start 144; Stop 168
aatctattggtcttcttcagtccag

SEQ ID NO: 358585 - DNA, 25 bp, Artificial
  probe
  misc_feature (1)..(25): SEQ ID NO: 3558; WAN024ADE; Start 148; Stop 172
tattggtcttcttcagtccagtgta

SEQ ID NO: 358586 - DNA, 25 bp, Artificial
  probe
  misc_feature (1)..(25): SEQ ID NO: 3558; WAN024ADE; Start 145; Stop 169
atctattggtcttcttcagtccagt

SEQ ID NO: 358587 - DNA, 25 bp, Artificial
  probe
  misc_feature (1)..(25): SEQ ID NO: 3558; WAN024ADE; Start 143; Stop 167
taatctattggtcttcttcagtcca

SEQ ID NO: 358588 - DNA, 25 bp, Artificial
  probe
  misc_feature (1)..(25): SEQ ID NO: 3558; WAN024ADE; Start 149; Stop 173
attggtcttcttcagtccagtgtat

SEQ ID NO: 358589 - DNA, 25 bp, Artificial
  probe
  misc_feature (1)..(25): SEQ ID NO: 3558; WAN024ADE; Start 152; Stop 176
ggtcttcttcagtccagtgtatctg

SEQ ID NO: 358590 - DNA, 25 bp, Artificial
  probe
  misc_feature (1)..(25): SEQ ID NO: 3558; WAN024ADE; Start 146; Stop 170
tctattggtcttcttcagtccagtg

SEQ ID NO: 358591 - DNA, 25 bp, Artificial
  probe
  misc_feature (1)..(25): SEQ ID NO: 3558; WAN024ADE; Start 150; Stop 174
ttggtcttcttcagtccagtgtatc

SEQ ID NO: 358592 - DNA, 25 bp, Artificial
  probe
  misc_feature (1)..(25): SEQ ID NO: 3558; WAN024ADE; Start 147; Stop 171
ctattggtcttcttcagtccagtgt

SEQ ID NO: 358593 - DNA, 25 bp, Artificial
  probe
  misc_feature (1)..(25): SEQ ID NO: 3558; WAN024ADE; Start 154; Stop 178
tcttcttcagtccagtgtatctgct

SEQ ID NO: 358594 - DNA, 25 bp, Artificial
  probe
  misc_feature (1)..(25): SEQ ID NO: 3558; WAN024ADE; Start 153; Stop 177
gtcttcttcagtccagtgtatctgc

SEQ ID NO: 358595 - DNA, 25 bp, Artificial
  probe
  misc_feature (1)..(25): SEQ ID NO: 3558; WAN024ADE; Start 151; Stop 175
tggtcttcttcagtccagtgtatct

SEQ ID NO: 358596 - DNA, 25 bp, Artificial
  probe
  misc_feature (1)..(25): SEQ ID NO: 3558; WAN024ADE; Start 141; Stop 165
tataatctattggtcttcttcagtc

SEQ ID NO: 358597 - DNA, 25 bp, Artificial
  probe
  misc_feature (1)..(25): SEQ ID NO: 3558; WAN024ADE; Start 3; Stop 27
aggataaatgttgtagattagtgaa

SEQ ID NO: 358598 - DNA, 25 bp, Artificial
  probe
  misc_feature (1)..(25): SEQ ID NO: 3558; WAN024ADE; Start 2; Stop 26
aaggataaatgttgtagattagtga

SEQ ID NO: 358599 - DNA, 25 bp, Artificial
  probe
  misc_feature (1)..(25): SEQ ID NO: 3558; WAN024ADE; Start 140; Stop 164
ttataatctattggtcttcttcagt

SEQ ID NO: 358600 - DNA, 25 bp, Artificial
  probe
  misc_feature (1)..(25): SEQ ID NO: 3558; WAN024ADE; Start 1; Stop 25
gaaggataaatgttgtagattagtg

SEQ ID NO: 358601 - DNA, 25 bp, Artificial
  probe
  misc_feature (1)..(25): SEQ ID NO: 3558; WAN024ADE; Start 4; Stop 28
ggataaatgttgtagattagtgaaa

SEQ ID NO: 358602 - DNA, 25 bp, Artificial
  probe
  misc_feature (1)..(25): SEQ ID NO: 3558; WAN024ADE; Start 112; Stop 136
atcagcaaaagttgttttattagtt

SEQ ID NO: 358603 - DNA, 25 bp, Artificial
  probe
  misc_feature (1)..(25): SEQ ID NO: 3558; WAN024ADE; Start 111; Stop 135
aatcagcaaaagttgttttattagt

SEQ ID NO: 358604 - DNA, 25 bp, Artificial
  probe
  misc_feature (1)..(25): SEQ ID NO: 3558; WAN024ADE; Start 113; Stop 137
tcagcaaaagttgttttattagtta

SEQ ID NO: 358605 - DNA, 25 bp, Artificial
  probe
  misc_feature (1)..(25): SEQ ID NO: 3558; WAN024ADE; Start 115; Stop 139
agcaaaagttgttttattagttagt

SEQ ID NO: 358606 - DNA, 25 bp, Artificial
  probe
  misc_feature (1)..(25): SEQ ID NO: 3558; WAN024ADE; Start 114; Stop 138
cagcaaaagttgttttattagttag

SEQ ID NO: 358607 - DNA, 25 bp, Artificial
  probe
  misc_feature (1)..(25): SEQ ID NO: 3558; WAN024ADE; Start 110; Stop 134
aaatcagcaaaagttgttttattag

SEQ ID NO: 358608 - DNA, 25 bp, Artificial
  probe
  misc_feature (1)..(25): SEQ ID NO: 3558; WAN024ADE; Start 116; Stop 140
gcaaaagttgttttattagttagtt

SEQ ID NO: 358609 - DNA, 25 bp, Artificial
  probe
  misc_feature (1)..(25): SEQ ID NO: 3559; WAN024AHV; Start 108; Stop 132
atggacatttcagtaattcgtcaga

SEQ ID NO: 358610 - DNA, 25 bp, Artificial
  probe
  misc_feature (1)..(25): SEQ ID NO: 3559; WAN024AHV; Start 109; Stop 133
tggacatttcagtaattcgtcagaa

SEQ ID NO: 358611 - DNA, 25 bp, Artificial
  probe
  misc_feature (1)..(25): SEQ ID NO: 3559; WAN024AHV; Start 97; Stop 121
aaggagtatttatggacatttcagt

SEQ ID NO: 358612 - DNA, 25 bp, Artificial
  probe
  misc_feature (1)..(25): SEQ ID NO: 3559; WAN024AHV; Start 107; Stop 131
tatggacatttcagtaattcgtcag

SEQ ID NO: 358613 - DNA, 25 bp, Artificial
  probe
  misc_feature (1)..(25): SEQ ID NO: 3559; WAN024AHV; Start 106; Stop 130
ttatggacatttcagtaattcgtca

SEQ ID NO: 358614 - DNA, 25 bp, Artificial
  probe
  misc_feature (1)..(25): SEQ ID NO: 3559; WAN024AHV; Start 98; Stop 122
aggagtatttatggacatttcagta

SEQ ID NO: 358615 - DNA, 25 bp, Artificial
  probe
  misc_feature (1)..(25): SEQ ID NO: 3559; WAN024AHV; Start 96; Stop 120
aaaggagtatttatggacatttcag

SEQ ID NO: 358616 - DNA, 25 bp, Artificial
  probe
  misc_feature (1)..(25): SEQ ID NO: 3559; WAN024AHV; Start 110; Stop 134
ggacatttcagtaattcgtcagaaa

SEQ ID NO: 358617 - DNA, 25 bp, Artificial
  probe
  misc_feature (1)..(25): SEQ ID NO: 3559; WAN024AHV; Start 104; Stop 128
atttatggacatttcagtaattcgt

SEQ ID NO: 358618 - DNA, 25 bp, Artificial
  probe
  misc_feature (1)..(25): SEQ ID NO: 3559; WAN024AHV; Start 105; Stop 129
tttatggacatttcagtaattcgtc

SEQ ID NO: 358619 - DNA, 25 bp, Artificial
  probe
  misc_feature (1)..(25): SEQ ID NO: 3559; WAN024AHV; Start 31; Stop 55
gaaaaggggattagagcaaaagatg

SEQ ID NO: 358620 - DNA, 25 bp, Artificial
  probe
  misc_feature (1)..(25): SEQ ID NO: 3559; WAN024AHV; Start 30; Stop 54
tgaaaaggggattagagcaaaagat

SEQ ID NO: 358621 - DNA, 25 bp, Artificial
  probe
  misc_feature (1)..(25): SEQ ID NO: 3559; WAN024AHV; Start 29; Stop 53
atgaaaaggggattagagcaaaaga

SEQ ID NO: 358622 - DNA, 25 bp, Artificial
  probe
  misc_feature (1)..(25): SEQ ID NO: 3559; WAN024AHV; Start 38; Stop 62
ggattagagcaaaagatggaaagaa

SEQ ID NO: 358623 - DNA, 25 bp, Artificial
  probe
  misc_feature (1)..(25): SEQ ID NO: 3559; WAN024AHV; Start 43; Stop 67
agagcaaaagatggaaagaaatgat

SEQ ID NO: 358624 - DNA, 25 bp, Artificial
  probe
  misc_feature (1)..(25): SEQ ID NO: 3559; WAN024AHV; Start 37; Stop 61
gggattagagcaaaagatggaaaga

SEQ ID NO: 358625 - DNA, 25 bp, Artificial
  probe
  misc_feature (1)..(25): SEQ ID NO: 3559; WAN024AHV; Start 99; Stop 123
ggagtatttatggacatttcagtaa

SEQ ID NO: 358626 - DNA, 25 bp, Artificial
  probe
  misc_feature (1)..(25): SEQ ID NO: 3559; WAN024AHV; Start 32; Stop 56
aaaaggggattagagcaaaagatgg

SEQ ID NO: 358627 - DNA, 25 bp, Artificial
  probe
  misc_feature (1)..(25): SEQ ID NO: 3559; WAN024AHV; Start 42; Stop 66
tagagcaaaagatggaaagaaatga

SEQ ID NO: 358628 - DNA, 25 bp, Artificial
  probe
  misc_feature (1)..(25): SEQ ID NO: 3559; WAN024AHV; Start 36; Stop 60
ggggattagagcaaaagatggaaag

SEQ ID NO: 358629 - DNA, 25 bp, Artificial
  probe
  misc_feature (1)..(25): SEQ ID NO: 3559; WAN024AHV; Start 41; Stop 65
ttagagcaaaagatggaaagaaatg

SEQ ID NO: 358630 - DNA, 25 bp, Artificial
  probe
  misc_feature (1)..(25): SEQ ID NO: 3559; WAN024AHV; Start 35; Stop 59
aggggattagagcaaaagatggaaa

SEQ ID NO: 358631 - DNA, 25 bp, Artificial
  probe
  misc_feature (1)..(25): SEQ ID NO: 3559; WAN024AHV; Start 34; Stop 58
aaggggattagagcaaaagatggaa

SEQ ID NO: 358632 - DNA, 25 bp, Artificial
  probe
  misc_feature (1)..(25): SEQ ID NO: 3559; WAN024AHV; Start 33; Stop 57
aaaggggattagagcaaaagatgga

SEQ ID NO: 358633 - DNA, 25 bp, Artificial
  probe
  misc_feature (1)..(25): SEQ ID NO: 3559; WAN024AHV; Start 28; Stop 52
catgaaaaggggattagagcaaaag

SEQ ID NO: 358634 - DNA, 25 bp, Artificial
  probe
  misc_feature (1)..(25): SEQ ID NO: 3559; WAN024AHV; Start 44; Stop 68
gagcaaaagatggaaagaaatgata

SEQ ID NO: 358635 - DNA, 25 bp, Artificial
  probe
  misc_feature (1)..(25): SEQ ID NO: 3559; WAN024AHV; Start 39; Stop 63
gattagagcaaaagatggaaagaaa

SEQ ID NO: 358636 - DNA, 25 bp, Artificial
  probe
  misc_feature (1)..(25): SEQ ID NO: 3559; WAN024AHV; Start 45; Stop 69
agcaaaagatggaaagaaatgataa

SEQ ID NO: 358637 - DNA, 25 bp, Artificial
  probe
  misc_feature (1)..(25): SEQ ID NO: 3559; WAN024AHV; Start 40; Stop 64
attagagcaaaagatggaaagaaat

SEQ ID NO: 358638 - DNA, 25 bp, Artificial
  probe
  misc_feature (1)..(25): SEQ ID NO: 3559; WAN024AHV; Start 103; Stop 127
tatttatggacatttcagtaattcg

SEQ ID NO: 358639 - DNA, 25 bp, Artificial
  probe
  misc_feature (1)..(25): SEQ ID NO: 3559; WAN024AHV; Start 46; Stop 70
gcaaaagatggaaagaaatgataaa

SEQ ID NO: 358640 - DNA, 25 bp, Artificial
  probe
  misc_feature (1)..(25): SEQ ID NO: 3559; WAN024AHV; Start 95; Stop 119
aaaaggagtatttatggacatttca

SEQ ID NO: 358641 - DNA, 25 bp, Artificial
  probe
  misc_feature (1)..(25): SEQ ID NO: 3559; WAN024AHV; Start 111; Stop 135
gacatttcagtaattcgtcagaaaa

SEQ ID NO: 358642 - DNA, 25 bp, Artificial
  probe
  misc_feature (1)..(25): SEQ ID NO: 3560; WAN0249Q4; Start 31; Stop 55
gttcaatttcactagaaaatgagga

SEQ ID NO: 358643 - DNA, 25 bp, Artificial
  probe
  misc_feature (1)..(25): SEQ ID NO: 3560; WAN0249Q4; Start 30; Stop 54
agttcaatttcactagaaaatgagg

SEQ ID NO: 358644 - DNA, 25 bp, Artificial
  probe
  misc_feature (1)..(25): SEQ ID NO: 3560; WAN0249Q4; Start 33; Stop 57
tcaatttcactagaaaatgaggaaa

SEQ ID NO: 358645 - DNA, 25 bp, Artificial
  probe
  misc_feature (1)..(25): SEQ ID NO: 3560; WAN0249Q4; Start 32; Stop 56
ttcaatttcactagaaaatgaggaa

SEQ ID NO: 358646 - DNA, 25 bp, Artificial
  probe
  misc_feature (1)..(25): SEQ ID NO: 3560; WAN0249Q4; Start 104; Stop 128
ccccaaacagttagacaattaattt

SEQ ID NO: 358647 - DNA, 25 bp, Artificial
  probe
  misc_feature (1)..(25): SEQ ID NO: 3560; WAN0249Q4; Start 37; Stop 61
tttcactagaaaatgaggaaaatct

SEQ ID NO: 358648 - DNA, 25 bp, Artificial
  probe
  misc_feature (1)..(25): SEQ ID NO: 3560; WAN0249Q4; Start 34; Stop 58
caatttcactagaaaatgaggaaaa

SEQ ID NO: 358649 - DNA, 25 bp, Artificial
  probe
  misc_feature (1)..(25): SEQ ID NO: 3560; WAN0249Q4; Start 105; Stop 129
cccaaacagttagacaattaattta

SEQ ID NO: 358650 - DNA, 25 bp, Artificial
  probe
  misc_feature (1)..(25): SEQ ID NO: 3560; WAN0249Q4; Start 29; Stop 53
aagttcaatttcactagaaaatgag

SEQ ID NO: 358651 - DNA, 25 bp, Artificial
  probe
  misc_feature (1)..(25): SEQ ID NO: 3560; WAN0249Q4; Start 36; Stop 60
atttcactagaaaatgaggaaaatc

SEQ ID NO: 358652 - DNA, 25 bp, Artificial
  probe
  misc_feature (1)..(25): SEQ ID NO: 3560; WAN0249Q4; Start 28; Stop 52
aaagttcaatttcactagaaaatga

SEQ ID NO: 358653 - DNA, 25 bp, Artificial
  probe
  misc_feature (1)..(25): SEQ ID NO: 3560; WAN0249Q4; Start 35; Stop 59
aatttcactagaaaatgaggaaaat

SEQ ID NO: 358654 - DNA, 25 bp, Artificial
  probe
  misc_feature (1)..(25): SEQ ID NO: 3560; WAN0249Q4; Start 27; Stop 51
aaaagttcaatttcactagaaaatg

SEQ ID NO: 358655 - DNA, 25 bp, Artificial
  probe
  misc_feature (1)..(25): SEQ ID NO: 3561; WAN024AEI; Start 44; Stop 68
gtttattctttgtagtttcatctgt

SEQ ID NO: 358656 - DNA, 25 bp, Artificial
  probe
  misc_feature (1)..(25): SEQ ID NO: 3561; WAN024AEI; Start 50; Stop 74
tctttgtagtttcatctgtattagt

SEQ ID NO: 358657 - DNA, 25 bp, Artificial
  probe
  misc_feature (1)..(25): SEQ ID NO: 3561; WAN024AEI; Start 43; Stop 67
agtttattctttgtagtttcatctg

SEQ ID NO: 358658 - DNA, 25 bp, Artificial
  probe
  misc_feature (1)..(25): SEQ ID NO: 3561; WAN024AEI; Start 88; Stop 112
tagagaaaataggaggactaatcga

SEQ ID NO: 358659 - DNA, 25 bp, Artificial
  probe
  misc_feature (1)..(25): SEQ ID NO: 3561; WAN024AEI; Start 23; Stop 47
tcagtgagaagatttcttaaagttt

SEQ ID NO: 358660 - DNA, 25 bp, Artificial
  probe
  misc_feature (1)..(25): SEQ ID NO: 3561; WAN024AEI; Start 87; Stop 111
ttagagaaaataggaggactaatcg

SEQ ID NO: 358661 - DNA, 25 bp, Artificial
  probe
  misc_feature (1)..(25): SEQ ID NO: 3561; WAN024AEI; Start 9; Stop 33
atgctaaaatcttatcagtgagaag

SEQ ID NO: 358662 - DNA, 25 bp, Artificial
  probe
  misc_feature (1)..(25): SEQ ID NO: 3561; WAN024AEI; Start 82; Stop 106
ttaacttagagaaaataggaggact

SEQ ID NO: 358663 - DNA, 25 bp, Artificial
  probe
  misc_feature (1)..(25): SEQ ID NO: 3561; WAN024AEI; Start 22; Stop 46
atcagtgagaagatttcttaaagtt

SEQ ID NO: 358664 - DNA, 25 bp, Artificial
  probe
  misc_feature (1)..(25): SEQ ID NO: 3561; WAN024AEI; Start 8; Stop 32
aatgctaaaatcttatcagtgagaa

SEQ ID NO: 358665 - DNA, 25 bp, Artificial
  probe
  misc_feature (1)..(25): SEQ ID NO: 3561; WAN024AEI; Start 10; Stop 34
tgctaaaatcttatcagtgagaaga

SEQ ID NO: 358666 - DNA, 25 bp, Artificial
  probe
  misc_feature (1)..(25): SEQ ID NO: 3561; WAN024AEI; Start 84; Stop 108
aacttagagaaaataggaggactaa

SEQ ID NO: 358667 - DNA, 25 bp, Artificial
  probe
  misc_feature (1)..(25): SEQ ID NO: 3561; WAN024AEI; Start 81; Stop 105
tttaacttagagaaaataggaggac

SEQ ID NO: 358668 - DNA, 25 bp, Artificial
  probe
  misc_feature (1)..(25): SEQ ID NO: 3561; WAN024AEI; Start 83; Stop 107
taacttagagaaaataggaggacta

SEQ ID NO: 358669 - DNA, 25 bp, Artificial
  probe
  misc_feature (1)..(25): SEQ ID NO: 3561; WAN024AEI; Start 4; Stop 28
gtctaatgctaaaatcttatcagtg

SEQ ID NO: 358670 - DNA, 25 bp, Artificial
  probe
  misc_feature (1)..(25): SEQ ID NO: 3561; WAN024AEI; Start 85; Stop 109
acttagagaaaataggaggactaat

SEQ ID NO: 358671 - DNA, 25 bp, Artificial
  probe
  misc_feature (1)..(25): SEQ ID NO: 3561; WAN024AEI; Start 21; Stop 45
tatcagtgagaagatttcttaaagt

SEQ ID NO: 358672 - DNA, 25 bp, Artificial
  probe
  misc_feature (1)..(25): SEQ ID NO: 3561; WAN024AEI; Start 3; Stop 27
agtctaatgctaaaatcttatcagt

SEQ ID NO: 358673 - DNA, 25 bp, Artificial
  probe
  misc_feature (1)..(25): SEQ ID NO: 3561; WAN024AEI; Start 5; Stop 29
tctaatgctaaaatcttatcagtga

SEQ ID NO: 358674 - DNA, 25 bp, Artificial
  probe
  misc_feature (1)..(25): SEQ ID NO: 3561; WAN024AEI; Start 53; Stop 77
ttgtagtttcatctgtattagtaca

SEQ ID NO: 358675 - DNA, 25 bp, Artificial
  probe
  misc_feature (1)..(25): SEQ ID NO: 3561; WAN024AEI; Start 6; Stop 30
ctaatgctaaaatcttatcagtgag

SEQ ID NO: 358676 - DNA, 25 bp, Artificial
  probe
  misc_feature (1)..(25): SEQ ID NO: 3561; WAN024AEI; Start 7; Stop 31
taatgctaaaatcttatcagtgaga

SEQ ID NO: 358677 - DNA, 25 bp, Artificial
  probe
  misc_feature (1)..(25): SEQ ID NO: 3561; WAN024AEI; Start 86; Stop 110
cttagagaaaataggaggactaatc

SEQ ID NO: 358678 - DNA, 25 bp, Artificial
  probe
  misc_feature (1)..(25): SEQ ID NO: 3561; WAN024AEI; Start 18; Stop 42
tcttatcagtgagaagatttcttaa

SEQ ID NO: 358679 - DNA, 25 bp, Artificial
  probe
  misc_feature (1)..(25): SEQ ID NO: 3561; WAN024AEI; Start 54; Stop 78
tgtagtttcatctgtattagtacat

SEQ ID NO: 358680 - DNA, 25 bp, Artificial
  probe
  misc_feature (1)..(25): SEQ ID NO: 3561; WAN024AEI; Start 24; Stop 48
cagtgagaagatttcttaaagttta

SEQ ID NO: 358681 - DNA, 25 bp, Artificial
  probe
  misc_feature (1)..(25): SEQ ID NO: 3561; WAN024AEI; Start 2; Stop 26
aagtctaatgctaaaatcttatcag

SEQ ID NO: 358682 - DNA, 25 bp, Artificial
  probe
  misc_feature (1)..(25): SEQ ID NO: 3561; WAN024AEI; Start 1; Stop 25
gaagtctaatgctaaaatcttatca

SEQ ID NO: 358683 - DNA, 25 bp, Artificial
  probe
  misc_feature (1)..(25): SEQ ID NO: 3561; WAN024AEI; Start 80; Stop 104
atttaacttagagaaaataggagga

SEQ ID NO: 358684 - DNA, 25 bp, Artificial
  probe
  misc_feature (1)..(25): SEQ ID NO: 3561; WAN024AEI; Start 11; Stop 35
gctaaaatcttatcagtgagaagat

SEQ ID NO: 358685 - DNA, 25 bp, Artificial
  probe
  misc_feature (1)..(25): SEQ ID NO: 3561; WAN024AEI; Start 17; Stop 41
atcttatcagtgagaagatttctta

SEQ ID NO: 358686 - DNA, 25 bp, Artificial
  probe
  misc_feature (1)..(25): SEQ ID NO: 3562; WAN024EW3-3; Start 51; Stop 75
gcttggcttgattgataatgataag

SEQ ID NO: 358687 - DNA, 25 bp, Artificial
  probe
  misc_feature (1)..(25): SEQ ID NO: 3562; WAN024EW3-3; Start 54; Stop 78
tggcttgattgataatgataagttc

SEQ ID NO: 358688 - DNA, 25 bp, Artificial
  probe
  misc_feature (1)..(25): SEQ ID NO: 3562; WAN024EW3-3; Start 541; Stop 565
ctcagcttacaagtagaagaagatg

SEQ ID NO: 358689 - DNA, 25 bp, Artificial
  probe
  misc_feature (1)..(25): SEQ ID NO: 3562; WAN024EW3-3; Start 52; Stop 76
cttggcttgattgataatgataagt

SEQ ID NO: 358690 - DNA, 25 bp, Artificial
  probe
  misc_feature (1)..(25): SEQ ID NO: 3562; WAN024EW3-3; Start 537; Stop 561
ggaactcagcttacaagtagaagaa

SEQ ID NO: 358691 - DNA, 25 bp, Artificial
  probe
  misc_feature (1)..(25): SEQ ID NO: 3562; WAN024EW3-3; Start 539; Stop 563
aactcagcttacaagtagaagaaga

SEQ ID NO: 358692 - DNA, 25 bp, Artificial
  probe
  misc_feature (1)..(25): SEQ ID NO: 3562; WAN024EW3-3; Start 532; Stop 556
ctagaggaactcagcttacaagtag

SEQ ID NO: 358693 - DNA, 25 bp, Artificial
  probe
  misc_feature (1)..(25): SEQ ID NO: 3562; WAN024EW3-3; Start 533; Stop 557
tagaggaactcagcttacaagtaga

SEQ ID NO: 358694 - DNA, 25 bp, Artificial
  probe
  misc_feature (1)..(25): SEQ ID NO: 3562; WAN024EW3-3; Start 531; Stop 555
actagaggaactcagcttacaagta

SEQ ID NO: 358695 - DNA, 25 bp, Artificial
  probe
  misc_feature (1)..(25): SEQ ID NO: 3562; WAN024EW3-3; Start 542; Stop 566
tcagcttacaagtagaagaagatga

SEQ ID NO: 358696 - DNA, 25 bp, Artificial
  probe
  misc_feature (1)..(25): SEQ ID NO: 3562; WAN024EW3-3; Start 540; Stop 564
actcagcttacaagtagaagaagat

SEQ ID NO: 358697 - DNA, 25 bp, Artificial
  probe
  misc_feature (1)..(25): SEQ ID NO: 3562; WAN024EW3-3; Start 538; Stop 562
gaactcagcttacaagtagaagaag

SEQ ID NO: 358698 - DNA, 25 bp, Artificial
  probe
  misc_feature (1)..(25): SEQ ID NO: 3562; WAN024EW3-3; Start 536; Stop 560
aggaactcagcttacaagtagaaga

SEQ ID NO: 358699 - DNA, 25 bp, Artificial
  probe
  misc_feature (1)..(25): SEQ ID NO: 3562; WAN024EW3-3; Start 535; Stop 559
gaggaactcagcttacaagtagaag

SEQ ID NO: 358700 - DNA, 25 bp, Artificial
  probe
  misc_feature (1)..(25): SEQ ID NO: 3562; WAN024EW3-3; Start 55; Stop 79
ggcttgattgataatgataagttca

SEQ ID NO: 358701 - DNA, 25 bp, Artificial
  probe
  misc_feature (1)..(25): SEQ ID NO: 3562; WAN024EW3-3; Start 543; Stop 567
cagcttacaagtagaagaagatgaa

SEQ ID NO: 358702 - DNA, 25 bp, Artificial
  probe
  misc_feature (1)..(25): SEQ ID NO: 3562; WAN024EW3-3; Start 534; Stop 558
agaggaactcagcttacaagtagaa

SEQ ID NO: 358703 - DNA, 25 bp, Artificial
  probe
  misc_feature (1)..(25): SEQ ID NO: 3562; WAN024EW3-3; Start 529; Stop 553
caactagaggaactcagcttacaag

SEQ ID NO: 358704 - DNA, 25 bp, Artificial
  probe
  misc_feature (1)..(25): SEQ ID NO: 3562; WAN024EW3-3; Start 530; Stop 554
aactagaggaactcagcttacaagt

SEQ ID NO: 358705 - DNA, 25 bp, Artificial
  probe
  misc_feature (1)..(25): SEQ ID NO: 3562; WAN024EW3-3; Start 106; Stop 130
atgtttgaatggtctgaagaagaag

SEQ ID NO: 358706 - DNA, 25 bp, Artificial
  probe
  misc_feature (1)..(25): SEQ ID NO: 3562; WAN024EW3-3; Start 105; Stop 129
gatgtttgaatggtctgaagaagaa

SEQ ID NO: 358707 - DNA, 25 bp, Artificial
  probe
  misc_feature (1)..(25): SEQ ID NO: 3562; WAN024EW3-3; Start 528; Stop 552
acaactagaggaactcagcttacaa

SEQ ID NO: 358708 - DNA, 25 bp, Artificial
  probe
  misc_feature (1)..(25): SEQ ID NO: 3562; WAN024EW3-3; Start 527; Stop 551
aacaactagaggaactcagcttaca

SEQ ID NO: 358709 - DNA, 25 bp, Artificial
  probe
  misc_feature (1)..(25): SEQ ID NO: 3562; WAN024EW3-3; Start 53; Stop 77
ttggcttgattgataatgataagtt

SEQ ID NO: 358710 - DNA, 25 bp, Artificial
  probe
  misc_feature (1)..(25): SEQ ID NO: 3562; WAN024EW3-3; Start 454; Stop 478
gaagtcattgcctttcctaagaaca

SEQ ID NO: 358711 - DNA, 25 bp, Artificial
  probe
  misc_feature (1)..(25): SEQ ID NO: 3562; WAN024EW3-3; Start 459; Stop 483
cattgcctttcctaagaacaacaag

SEQ ID NO: 358712 - DNA, 25 bp, Artificial
  probe
  misc_feature (1)..(25): SEQ ID NO: 3562; WAN024EW3-3; Start 455; Stop 479
aagtcattgcctttcctaagaacaa

SEQ ID NO: 358713 - DNA, 25 bp, Artificial
  probe
  misc_feature (1)..(25): SEQ ID NO: 3562; WAN024EW3-3; Start 107; Stop 131
tgtttgaatggtctgaagaagaagg

SEQ ID NO: 358714 - DNA, 25 bp, Artificial
  probe
  misc_feature (1)..(25): SEQ ID NO: 3562; WAN024EW3-3; Start 453; Stop 477
tgaagtcattgcctttcctaagaac

SEQ ID NO: 358715 - DNA, 25 bp, Artificial
  probe
  misc_feature (1)..(25): SEQ ID NO: 3562; WAN024EW3-3; Start 452; Stop 476
gtgaagtcattgcctttcctaagaa

SEQ ID NO: 358716 - DNA, 25 bp, Artificial
  probe
  misc_feature (1)..(25): SEQ ID NO: 3562; WAN024EW3-3; Start 444; Stop 468
aaatatccgtgaagtcattgccttt

SEQ ID NO: 358717 - DNA, 25 bp, Artificial
  probe
  misc_feature (1)..(25): SEQ ID NO: 3562; WAN024EW3-3; Start 458; Stop 482
tcattgcctttcctaagaacaacaa

SEQ ID NO: 358718 - DNA, 25 bp, Artificial
  probe
  misc_feature (1)..(25): SEQ ID NO: 3562; WAN024EW3-3; Start 104; Stop 128
cgatgtttgaatggtctgaagaaga

SEQ ID NO: 358719 - DNA, 25 bp, Artificial
  probe
  misc_feature (1)..(25): SEQ ID NO: 3563; WAN024AJ5; Start 1; Stop 25
gaatattaatcgttgtggtctttcc

SEQ ID NO: 358720 - DNA, 25 bp, Artificial
  probe
  misc_feature (1)..(25): SEQ ID NO: 3563; WAN024AJ5; Start 6; Stop 30
ttaatcgttgtggtctttccagaac

SEQ ID NO: 358721 - DNA, 25 bp, Artificial
  probe
  misc_feature (1)..(25): SEQ ID NO: 3563; WAN024AJ5; Start 4; Stop 28
tattaatcgttgtggtctttccaga

SEQ ID NO: 358722 - DNA, 25 bp, Artificial
  probe
  misc_feature (1)..(25): SEQ ID NO: 3563; WAN024AJ5; Start 5; Stop 29
attaatcgttgtggtctttccagaa

SEQ ID NO: 358723 - DNA, 25 bp, Artificial
  probe
  misc_feature (1)..(25): SEQ ID NO: 3563; WAN024AJ5; Start 3; Stop 27
atattaatcgttgtggtctttccag

SEQ ID NO: 358724 - DNA, 25 bp, Artificial
  probe
  misc_feature (1)..(25): SEQ ID NO: 3563; WAN024AJ5; Start 2; Stop 26
aatattaatcgttgtggtctttcca

SEQ ID NO: 358725 - DNA, 25 bp, Artificial
  probe
  misc_feature (1)..(25): SEQ ID NO: 3563; WAN024AJ5; Start 7; Stop 31
taatcgttgtggtctttccagaacc

SEQ ID NO: 358726 - DNA, 25 bp, Artificial
  probe
  misc_feature (1)..(25): SEQ ID NO: 3563; WAN024AJ5; Start 12; Stop 36
gttgtggtctttccagaaccagatg

SEQ ID NO: 358727 - DNA, 25 bp, Artificial
  probe
  misc_feature (1)..(25): SEQ ID NO: 3563; WAN024AJ5; Start 8; Stop 32
aatcgttgtggtctttccagaacca

SEQ ID NO: 358728 - DNA, 25 bp, Artificial
  probe
  misc_feature (1)..(25): SEQ ID NO: 3563; WAN024AJ5; Start 13; Stop 37
ttgtggtctttccagaaccagatgg

SEQ ID NO: 358729 - DNA, 25 bp, Artificial
  probe
  misc_feature (1)..(25): SEQ ID NO: 3563; WAN024AJ5; Start 11; Stop 35
cgttgtggtctttccagaaccagat

SEQ ID NO: 358730 - DNA, 25 bp, Artificial
  probe
  misc_feature (1)..(25): SEQ ID NO: 3563; WAN024AJ5; Start 9; Stop 33
atcgttgtggtctttccagaaccag

SEQ ID NO: 358731 - DNA, 25 bp, Artificial
  probe
  misc_feature (1)..(25): SEQ ID NO: 3564; WAN024AHE; Start 13; Stop 37
aagaaatacagtaccgaatgtggat

SEQ ID NO: 358732 - DNA, 25 bp, Artificial
  probe
  misc_feature (1)..(25): SEQ ID NO: 3564; WAN024AHE; Start 12; Stop 36
aaagaaatacagtaccgaatgtgga

SEQ ID NO: 358733 - DNA, 25 bp, Artificial
  probe
  misc_feature (1)..(25): SEQ ID NO: 3564; WAN024AHE; Start 15; Stop 39
gaaatacagtaccgaatgtggatac

SEQ ID NO: 358734 - DNA, 25 bp, Artificial
  probe
  misc_feature (1)..(25): SEQ ID NO: 3564; WAN024AHE; Start 14; Stop 38
agaaatacagtaccgaatgtggata

SEQ ID NO: 358735 - DNA, 25 bp, Artificial
  probe
  misc_feature (1)..(25): SEQ ID NO: 3564; WAN024AHE; Start 22; Stop 46
agtaccgaatgtggatactgtattt

SEQ ID NO: 358736 - DNA, 25 bp, Artificial
  probe
  misc_feature (1)..(25): SEQ ID NO: 3564; WAN024AHE; Start 16; Stop 40
aaatacagtaccgaatgtggatact

SEQ ID NO: 358737 - DNA, 25 bp, Artificial
  probe
  misc_feature (1)..(25): SEQ ID NO: 3564; WAN024AHE; Start 23; Stop 47
gtaccgaatgtggatactgtatttt

SEQ ID NO: 358738 - DNA, 25 bp, Artificial
  probe
  misc_feature (1)..(25): SEQ ID NO: 3564; WAN024AHE; Start 4; Stop 28
tgagagtaaaagaaatacagtaccg

SEQ ID NO: 358739 - DNA, 25 bp, Artificial
  probe
  misc_feature (1)..(25): SEQ ID NO: 3564; WAN024AHE; Start 11; Stop 35
aaaagaaatacagtaccgaatgtgg

SEQ ID NO: 358740 - DNA, 25 bp, Artificial
  probe
  misc_feature (1)..(25): SEQ ID NO: 3564; WAN024AHE; Start 5; Stop 29
gagagtaaaagaaatacagtaccga

SEQ ID NO: 358741 - DNA, 25 bp, Artificial
  probe
  misc_feature (1)..(25): SEQ ID NO: 3564; WAN024AHE; Start 6; Stop 30
agagtaaaagaaatacagtaccgaa

SEQ ID NO: 358742 - DNA, 25 bp, Artificial
  probe
  misc_feature (1)..(25): SEQ ID NO: 3564; WAN024AHE; Start 8; Stop 32
agtaaaagaaatacagtaccgaatg

SEQ ID NO: 358743 - DNA, 25 bp, Artificial
  probe
  misc_feature (1)..(25): SEQ ID NO: 3564; WAN024AHE; Start 10; Stop 34
taaaagaaatacagtaccgaatgtg

SEQ ID NO: 358744 - DNA, 25 bp, Artificial
  probe
  misc_feature (1)..(25): SEQ ID NO: 3564; WAN024AHE; Start 9; Stop 33
gtaaaagaaatacagtaccgaatgt

SEQ ID NO: 358745 - DNA, 25 bp, Artificial
  probe
  misc_feature (1)..(25): SEQ ID NO: 3564; WAN024AHE; Start 7; Stop 31
gagtaaaagaaatacagtaccgaat

SEQ ID NO: 358746 - DNA, 25 bp, Artificial
  probe
  misc_feature (1)..(25): SEQ ID NO: 3564; WAN024AHE; Start 3; Stop 27
atgagagtaaaagaaatacagtacc

SEQ ID NO: 358747 - DNA, 25 bp, Artificial
  probe
  misc_feature (1)..(25): SEQ ID NO: 3566; WAN0249Z2; Start 20; Stop 44
actgtagtttatctcttttgatagc

SEQ ID NO: 358748 - DNA, 25 bp, Artificial
  probe
  misc_feature (1)..(25): SEQ ID NO: 3566; WAN0249Z2; Start 26; Stop 50
gtttatctcttttgatagctacggt

SEQ ID NO: 358749 - DNA, 25 bp, Artificial
  probe
  misc_feature (1)..(25): SEQ ID NO: 3566; WAN0249Z2; Start 25; Stop 49
agtttatctcttttgatagctacgg

SEQ ID NO: 358750 - DNA, 25 bp, Artificial
  probe
  misc_feature (1)..(25): SEQ ID NO: 3566; WAN0249Z2; Start 29; Stop 53
tatctcttttgatagctacggtttt

SEQ ID NO: 358751 - DNA, 25 bp, Artificial
  probe
  misc_feature (1)..(25): SEQ ID NO: 3566; WAN0249Z2; Start 28; Stop 52
ttatctcttttgatagctacggttt

SEQ ID NO: 358752 - DNA, 25 bp, Artificial
  probe
  misc_feature (1)..(25): SEQ ID NO: 3566; WAN0249Z2; Start 27; Stop 51
tttatctcttttgatagctacggtt

SEQ ID NO: 358753 - DNA, 25 bp, Artificial
  probe
  misc_feature (1)..(25): SEQ ID NO: 3566; WAN0249Z2; Start 17; Stop 41
agaactgtagtttatctcttttgat

SEQ ID NO: 358754 - DNA, 25 bp, Artificial
  probe
  misc_feature (1)..(25): SEQ ID NO: 3566; WAN0249Z2; Start 21; Stop 45
ctgtagtttatctcttttgatagct

SEQ ID NO: 358755 - DNA, 25 bp, Artificial
  probe
  misc_feature (1)..(25): SEQ ID NO: 3566; WAN0249Z2; Start 16; Stop 40
tagaactgtagtttatctcttttga

SEQ ID NO: 358756 - DNA, 25 bp, Artificial
  probe
  misc_feature (1)..(25): SEQ ID NO: 3566; WAN0249Z2; Start 24; Stop 48
tagtttatctcttttgatagctacg

SEQ ID NO: 358757 - DNA, 25 bp, Artificial
  probe
  misc_feature (1)..(25): SEQ ID NO: 3566; WAN0249Z2; Start 22; Stop 46
tgtagtttatctcttttgatagcta

SEQ ID NO: 358758 - DNA, 25 bp, Artificial
  probe
  misc_feature (1)..(25): SEQ ID NO: 3566; WAN0249Z2; Start 23; Stop 47
gtagtttatctcttttgatagctac

SEQ ID NO: 358759 - DNA, 25 bp, Artificial
  probe
  misc_feature (1)..(25): SEQ ID NO: 3567; WAN0249IN; Start 16; Stop 40
ctgttcactcttggactgtatgatt

SEQ ID NO: 358760 - DNA, 25 bp, Artificial
  probe
  misc_feature (1)..(25): SEQ ID NO: 3567; WAN0249IN; Start 15; Stop 39
actgttcactcttggactgtatgat

SEQ ID NO: 358761 - DNA, 25 bp, Artificial
  probe
  misc_feature (1)..(25): SEQ ID NO: 3567; WAN0249IN; Start 14; Stop 38
gactgttcactcttggactgtatga

SEQ ID NO: 358762 - DNA, 25 bp, Artificial
  probe
  misc_feature (1)..(25): SEQ ID NO: 3567; WAN0249IN; Start 13; Stop 37
ggactgttcactcttggactgtatg

SEQ ID NO: 358763 - DNA, 25 bp, Artificial
  probe
  misc_feature (1)..(25): SEQ ID NO: 3567; WAN0249IN; Start 17; Stop 41
tgttcactcttggactgtatgattt

SEQ ID NO: 358764 - DNA, 25 bp, Artificial
  probe
  misc_feature (1)..(25): SEQ ID NO: 3567; WAN0249IN; Start 21; Stop 45
cactcttggactgtatgatttatga

SEQ ID NO: 358765 - DNA, 25 bp, Artificial
  probe
  misc_feature (1)..(25): SEQ ID NO: 3567; WAN0249IN; Start 18; Stop 42
gttcactcttggactgtatgattta

SEQ ID NO: 358766 - DNA, 25 bp, Artificial
  probe
  misc_feature (1)..(25): SEQ ID NO: 3567; WAN0249IN; Start 24; Stop 48
tcttggactgtatgatttatgatgt

SEQ ID NO: 358767 - DNA, 25 bp, Artificial
  probe
  misc_feature (1)..(25): SEQ ID NO: 3567; WAN0249IN; Start 20; Stop 44
tcactcttggactgtatgatttatg

SEQ ID NO: 358768 - DNA, 25 bp, Artificial
  probe
  misc_feature (1)..(25): SEQ ID NO: 3567; WAN0249IN; Start 22; Stop 46
actcttggactgtatgatttatgat

SEQ ID NO: 358769 - DNA, 25 bp, Artificial
  probe
  misc_feature (1)..(25): SEQ ID NO: 3567; WAN0249IN; Start 23; Stop 47
ctcttggactgtatgatttatgatg

SEQ ID NO: 358770 - DNA, 25 bp, Artificial
  probe
  misc_feature (1)..(25): SEQ ID NO: 3567; WAN0249IN; Start 19; Stop 43
ttcactcttggactgtatgatttat

SEQ ID NO: 358771 - DNA, 25 bp, Artificial
  probe
  misc_feature (1)..(25): SEQ ID NO: 3567; WAN0249IN; Start 25; Stop 49
cttggactgtatgatttatgatgtt

SEQ ID NO: 358772 - DNA, 25 bp, Artificial
  probe
  misc_feature (1)..(25): SEQ ID NO: 3567; WAN0249IN; Start 12; Stop 36
cggactgttcactcttggactgtat

SEQ ID NO: 358773 - DNA, 25 bp, Artificial
  probe
  misc_feature (1)..(25): SEQ ID NO: 3567; WAN0249IN; Start 26; Stop 50
ttggactgtatgatttatgatgttt

SEQ ID NO: 358774 - DNA, 25 bp, Artificial
  probe
  misc_feature (1)..(25): SEQ ID NO: 3567; WAN0249IN; Start 27; Stop 51
tggactgtatgatttatgatgtttt

SEQ ID NO: 358775 - DNA, 25 bp, Artificial
  probe
  misc_feature (1)..(25): SEQ ID NO: 3567; WAN0249IN; Start 1; Stop 25
gaattacacagcggactgttcactc

SEQ ID NO: 358776 - DNA, 25 bp, Artificial
  probe
  misc_feature (1)..(25): SEQ ID NO: 3567; WAN0249IN; Start 3; Stop 27
attacacagcggactgttcactctt

SEQ ID NO: 358777 - DNA, 25 bp, Artificial
  probe
  misc_feature (1)..(25): SEQ ID NO: 3567; WAN0249IN; Start 2; Stop 26
aattacacagcggactgttcactct

SEQ ID NO: 358778 - DNA, 25 bp, Artificial
  probe
  misc_feature (1)..(25): SEQ ID NO: 3567; WAN0249IN; Start 28; Stop 52
ggactgtatgatttatgatgtttta

SEQ ID NO: 358779 - DNA, 25 bp, Artificial
  probe
  misc_feature (1)..(25): SEQ ID NO: 3567; WAN0249IN; Start 4; Stop 28
ttacacagcggactgttcactcttg

SEQ ID NO: 358780 - DNA, 25 bp, Artificial
  probe
  misc_feature (1)..(25): SEQ ID NO: 3568; WAN024A5P; Start 72; Stop 96
cacacagtatagacttcacccttct

SEQ ID NO: 358781 - DNA, 25 bp, Artificial
  probe
  misc_feature (1)..(25): SEQ ID NO: 3568; WAN024A5P; Start 82; Stop 106
agacttcacccttctactttatcgc

SEQ ID NO: 358782 - DNA, 25 bp, Artificial
  probe
  misc_feature (1)..(25): SEQ ID NO: 3568; WAN024A5P; Start 74; Stop 98
cacagtatagacttcacccttctac

SEQ ID NO: 358783 - DNA, 25 bp, Artificial
  probe
  misc_feature (1)..(25): SEQ ID NO: 3568; WAN024A5P; Start 73; Stop 97
acacagtatagacttcacccttcta

SEQ ID NO: 358784 - DNA, 25 bp, Artificial
  probe
  misc_feature (1)..(25): SEQ ID NO: 3568; WAN024A5P; Start 123; Stop 147
acgggacaggtttaaaggaatattt

SEQ ID NO: 358785 - DNA, 25 bp, Artificial
  probe
  misc_feature (1)..(25): SEQ ID NO: 3568; WAN024A5P; Start 81; Stop 105
tagacttcacccttctactttatcg

SEQ ID NO: 358786 - DNA, 25 bp, Artificial
  probe
  misc_feature (1)..(25): SEQ ID NO: 3568; WAN024A5P; Start 75; Stop 99
acagtatagacttcacccttctact

SEQ ID NO: 358787 - DNA, 25 bp, Artificial
  probe
  misc_feature (1)..(25): SEQ ID NO: 3568; WAN024A5P; Start 122; Stop 146
cacgggacaggtttaaaggaatatt

SEQ ID NO: 358788 - DNA, 25 bp, Artificial
  probe
  misc_feature (1)..(25): SEQ ID NO: 3568; WAN024A5P; Start 76; Stop 100
cagtatagacttcacccttctactt

SEQ ID NO: 358789 - DNA, 25 bp, Artificial
  probe
  misc_feature (1)..(25): SEQ ID NO: 3568; WAN024A5P; Start 124; Stop 148
cgggacaggtttaaaggaatattta

SEQ ID NO: 358790 - DNA, 25 bp, Artificial
  probe
  misc_feature (1)..(25): SEQ ID NO: 3568; WAN024A5P; Start 121; Stop 145
tcacgggacaggtttaaaggaatat

SEQ ID NO: 358791 - DNA, 25 bp, Artificial
  probe
  misc_feature (1)..(25): SEQ ID NO: 3568; WAN024A5P; Start 77; Stop 101
agtatagacttcacccttctacttt

SEQ ID NO: 358792 - DNA, 25 bp, Artificial
  probe
  misc_feature (1)..(25): SEQ ID NO: 3568; WAN024A5P; Start 71; Stop 95
gcacacagtatagacttcacccttc

SEQ ID NO: 358793 - DNA, 25 bp, Artificial
  probe
  misc_feature (1)..(25): SEQ ID NO: 3568; WAN024A5P; Start 120; Stop 144
ctcacgggacaggtttaaaggaata

SEQ ID NO: 358794 - DNA, 25 bp, Artificial
  probe
  misc_feature (1)..(25): SEQ ID NO: 3568; WAN024A5P; Start 34; Stop 58
aaggagacttgaaatttatagccaa

SEQ ID NO: 358795 - DNA, 25 bp, Artificial
  probe
  misc_feature (1)..(25): SEQ ID NO: 3568; WAN024A5P; Start 152; Stop 176
atcatttactatagcacaaagcatg

SEQ ID NO: 358796 - DNA, 25 bp, Artificial
  probe
  misc_feature (1)..(25): SEQ ID NO: 3568; WAN024A5P; Start 80; Stop 104
atagacttcacccttctactttatc

SEQ ID NO: 358797 - DNA, 25 bp, Artificial
  probe
  misc_feature (1)..(25): SEQ ID NO: 3568; WAN024A5P; Start 125; Stop 149
gggacaggtttaaaggaatatttag

SEQ ID NO: 358798 - DNA, 25 bp, Artificial
  probe
  misc_feature (1)..(25): SEQ ID NO: 3568; WAN024A5P; Start 78; Stop 102
gtatagacttcacccttctacttta

SEQ ID NO: 358799 - DNA, 25 bp, Artificial
  probe
  misc_feature (1)..(25): SEQ ID NO: 3568; WAN024A5P; Start 46; Stop 70
aatttatagccaagcgagccctact

SEQ ID NO: 358800 - DNA, 25 bp, Artificial
  probe
  misc_feature (1)..(25): SEQ ID NO: 3568; WAN024A5P; Start 44; Stop 68
gaaatttatagccaagcgagcccta

SEQ ID NO: 358801 - DNA, 25 bp, Artificial
  probe
  misc_feature (1)..(25): SEQ ID NO: 3568; WAN024A5P; Start 45; Stop 69
aaatttatagccaagcgagccctac

SEQ ID NO: 358802 - DNA, 25 bp, Artificial
  probe
  misc_feature (1)..(25): SEQ ID NO: 3568; WAN024A5P; Start 126; Stop 150
ggacaggtttaaaggaatatttagt

SEQ ID NO: 358803 - DNA, 25 bp, Artificial
  probe
  misc_feature (1)..(25): SEQ ID NO: 3568; WAN024A5P; Start 150; Stop 174
ttatcatttactatagcacaaagca

SEQ ID NO: 358804 - DNA, 25 bp, Artificial
  probe
  misc_feature (1)..(25): SEQ ID NO: 3568; WAN024A5P; Start 149; Stop 173
gttatcatttactatagcacaaagc

SEQ ID NO: 358805 - DNA, 25 bp, Artificial
  probe
  misc_feature (1)..(25): SEQ ID NO: 3568; WAN024A5P; Start 47; Stop 71
atttatagccaagcgagccctactg

SEQ ID NO: 358806 - DNA, 25 bp, Artificial
  probe
  misc_feature (1)..(25): SEQ ID NO: 3568; WAN024A5P; Start 151; Stop 175
tatcatttactatagcacaaagcat

SEQ ID NO: 358807 - DNA, 25 bp, Artificial
  probe
  misc_feature (1)..(25): SEQ ID NO: 3568; WAN024A5P; Start 79; Stop 103
tatagacttcacccttctactttat

SEQ ID NO: 358808 - DNA, 25 bp, Artificial
  probe
  misc_feature (1)..(25): SEQ ID NO: 3568; WAN024A5P; Start 36; Stop 60
ggagacttgaaatttatagccaagc

SEQ ID NO: 358809 - DNA, 25 bp, Artificial
  probe
  misc_feature (1)..(25): SEQ ID NO: 3568; WAN024A5P; Start 70; Stop 94
tgcacacagtatagacttcaccctt

SEQ ID NO: 358810 - DNA, 25 bp, Artificial
  probe
  misc_feature (1)..(25): SEQ ID NO: 3568; WAN024A5P; Start 39; Stop 63
gacttgaaatttatagccaagcgag

SEQ ID NO: 358811 - DNA, 25 bp, Artificial
  probe
  misc_feature (1)..(25): SEQ ID NO: 3568; WAN024A5P; Start 37; Stop 61
gagacttgaaatttatagccaagcg

SEQ ID NO: 358812 - DNA, 25 bp, Artificial
  probe
  misc_feature (1)..(25): SEQ ID NO: 3568; WAN024A5P; Start 38; Stop 62
agacttgaaatttatagccaagcga

SEQ ID NO: 358813 - DNA, 25 bp, Artificial
  probe
  misc_feature (1)..(25): SEQ ID NO: 3569; WAN024A5E; Start 163; Stop 187
gctgtctgagtggattaggtgtatt

SEQ ID NO: 358814 - DNA, 25 bp, Artificial
  probe
  misc_feature (1)..(25): SEQ ID NO: 3569; WAN024A5E; Start 164; Stop 188
ctgtctgagtggattaggtgtattt

SEQ ID NO: 358815 - DNA, 25 bp, Artificial
  probe
  misc_feature (1)..(25): SEQ ID NO: 3569; WAN024A5E; Start 165; Stop 189
tgtctgagtggattaggtgtattta

SEQ ID NO: 358816 - DNA, 25 bp, Artificial
  probe
  misc_feature (1)..(25): SEQ ID NO: 3569; WAN024A5E; Start 168; Stop 192
ctgagtggattaggtgtatttagac

SEQ ID NO: 358817 - DNA, 25 bp, Artificial
  probe
  misc_feature (1)..(25): SEQ ID NO: 3569; WAN024A5E; Start 166; Stop 190
gtctgagtggattaggtgtatttag

SEQ ID NO: 358818 - DNA, 25 bp, Artificial
  probe
  misc_feature (1)..(25): SEQ ID NO: 3569; WAN024A5E; Start 167; Stop 191
tctgagtggattaggtgtatttaga

SEQ ID NO: 358819 - DNA, 25 bp, Artificial
  probe
  misc_feature (1)..(25): SEQ ID NO: 3569; WAN024A5E; Start 169; Stop 193
tgagtggattaggtgtatttagact

SEQ ID NO: 358820 - DNA, 25 bp, Artificial
  probe
  misc_feature (1)..(25): SEQ ID NO: 3569; WAN024A5E; Start 162; Stop 186
agctgtctgagtggattaggtgtat

SEQ ID NO: 358821 - DNA, 25 bp, Artificial
  probe
  misc_feature (1)..(25): SEQ ID NO: 3569; WAN024A5E; Start 170; Stop 194
gagtggattaggtgtatttagactc

SEQ ID NO: 358822 - DNA, 25 bp, Artificial
  probe
  misc_feature (1)..(25): SEQ ID NO: 3569; WAN024A5E; Start 62; Stop 86
acgtacagtatcaaggttttagaat

SEQ ID NO: 358823 - DNA, 25 bp, Artificial
  probe
  misc_feature (1)..(25): SEQ ID NO: 3569; WAN024A5E; Start 61; Stop 85
aacgtacagtatcaaggttttagaa

SEQ ID NO: 358824 - DNA, 25 bp, Artificial
  probe
  misc_feature (1)..(25): SEQ ID NO: 3569; WAN024A5E; Start 63; Stop 87
cgtacagtatcaaggttttagaata

SEQ ID NO: 358825 - DNA, 25 bp, Artificial
  probe
  misc_feature (1)..(25): SEQ ID NO: 3569; WAN024A5E; Start 60; Stop 84
aaacgtacagtatcaaggttttaga

SEQ ID NO: 358826 - DNA, 25 bp, Artificial
  probe
  misc_feature (1)..(25): SEQ ID NO: 3569; WAN024A5E; Start 8; Stop 32
gattgatgcaaatctcatttgatga

SEQ ID NO: 358827 - DNA, 25 bp, Artificial
  probe
  misc_feature (1)..(25): SEQ ID NO: 3569; WAN024A5E; Start 7; Stop 31
agattgatgcaaatctcatttgatg

SEQ ID NO: 358828 - DNA, 25 bp, Artificial
  probe
  misc_feature (1)..(25): SEQ ID NO: 3569; WAN024A5E; Start 56; Stop 80
gataaaacgtacagtatcaaggttt

SEQ ID NO: 358829 - DNA, 25 bp, Artificial
  probe
  misc_feature (1)..(25): SEQ ID NO: 3569; WAN024A5E; Start 66; Stop 90
acagtatcaaggttttagaatatct

SEQ ID NO: 358830 - DNA, 25 bp, Artificial
  probe
  misc_feature (1)..(25): SEQ ID NO: 3569; WAN024A5E; Start 68; Stop 92
agtatcaaggttttagaatatctga

SEQ ID NO: 358831 - DNA, 25 bp, Artificial
  probe
  misc_feature (1)..(25): SEQ ID NO: 3569; WAN024A5E; Start 127; Stop 151
agacacttttattatggtatacgaa

SEQ ID NO: 358832 - DNA, 25 bp, Artificial
  probe
  misc_feature (1)..(25): SEQ ID NO: 3569; WAN024A5E; Start 67; Stop 91
cagtatcaaggttttagaatatctg

SEQ ID NO: 358833 - DNA, 25 bp, Artificial
  probe
  misc_feature (1)..(25): SEQ ID NO: 3569; WAN024A5E; Start 55; Stop 79
tgataaaacgtacagtatcaaggtt

SEQ ID NO: 358834 - DNA, 25 bp, Artificial
  probe
  misc_feature (1)..(25): SEQ ID NO: 3569; WAN024A5E; Start 126; Stop 150
aagacacttttattatggtatacga

SEQ ID NO: 358835 - DNA, 25 bp, Artificial
  probe
  misc_feature (1)..(25): SEQ ID NO: 3569; WAN024A5E; Start 54; Stop 78
atgataaaacgtacagtatcaaggt

SEQ ID NO: 358836 - DNA, 25 bp, Artificial
  probe
  misc_feature (1)..(25): SEQ ID NO: 3569; WAN024A5E; Start 120; Stop 144
tttgttaagacacttttattatggt

SEQ ID NO: 358837 - DNA, 25 bp, Artificial
  probe
  misc_feature (1)..(25): SEQ ID NO: 3569; WAN024A5E; Start 128; Stop 152
gacacttttattatggtatacgaaa

SEQ ID NO: 358838 - DNA, 25 bp, Artificial
  probe
  misc_feature (1)..(25): SEQ ID NO: 3569; WAN024A5E; Start 46; Stop 70
aaatttctatgataaaacgtacagt

SEQ ID NO: 358839 - DNA, 25 bp, Artificial
  probe
  misc_feature (1)..(25): SEQ ID NO: 3569; WAN024A5E; Start 53; Stop 77
tatgataaaacgtacagtatcaagg

SEQ ID NO: 358840 - DNA, 25 bp, Artificial
  probe
  misc_feature (1)..(25): SEQ ID NO: 3569; WAN024A5E; Start 59; Stop 83
aaaacgtacagtatcaaggttttag

SEQ ID NO: 358841 - DNA, 25 bp, Artificial
  probe
  misc_feature (1)..(25): SEQ ID NO: 3569; WAN024A5E; Start 57; Stop 81
ataaaacgtacagtatcaaggtttt

SEQ ID NO: 358842 - DNA, 25 bp, Artificial
  probe
  misc_feature (1)..(25): SEQ ID NO: 3569; WAN024A5E; Start 51; Stop 75
tctatgataaaacgtacagtatcaa

SEQ ID NO: 358843 - DNA, 25 bp, Artificial
  probe
  misc_feature (1)..(25): SEQ ID NO: 3569; WAN024A5E; Start 50; Stop 74
ttctatgataaaacgtacagtatca

SEQ ID NO: 358844 - DNA, 25 bp, Artificial
  probe
  misc_feature (1)..(25): SEQ ID NO: 3569; WAN024A5E; Start 52; Stop 76
ctatgataaaacgtacagtatcaag

SEQ ID NO: 358845 - DNA, 25 bp, Artificial
  probe
  misc_feature (1)..(25): SEQ ID NO: 3570; WAN024F3B; Start 177; Stop 201
ctatgattatggttggaagcagttg

SEQ ID NO: 358846 - DNA, 25 bp, Artificial
  probe
  misc_feature (1)..(25): SEQ ID NO: 3570; WAN024F3B; Start 176; Stop 200
cctatgattatggttggaagcagtt

SEQ ID NO: 358847 - DNA, 25 bp, Artificial
  probe
  misc_feature (1)..(25): SEQ ID NO: 3570; WAN024F3B; Start 178; Stop 202
tatgattatggttggaagcagttgc

SEQ ID NO: 358848 - DNA, 25 bp, Artificial
  probe
  misc_feature (1)..(25): SEQ ID NO: 3570; WAN024F3B; Start 731; Stop 755
cactgttaatccaagaggagttagg

SEQ ID NO: 358849 - DNA, 25 bp, Artificial
  probe
  misc_feature (1)..(25): SEQ ID NO: 3570; WAN024F3B; Start 743; Stop 767
aagaggagttaggcaagcaagaatt

SEQ ID NO: 358850 - DNA, 25 bp, Artificial
  probe
  misc_feature (1)..(25): SEQ ID NO: 3570; WAN024F3B; Start 735; Stop 759
gttaatccaagaggagttaggcaag

SEQ ID NO: 358851 - DNA, 25 bp, Artificial
  probe
  misc_feature (1)..(25): SEQ ID NO: 3570; WAN024F3B; Start 730; Stop 754
gcactgttaatccaagaggagttag

SEQ ID NO: 358852 - DNA, 25 bp, Artificial
  probe
  misc_feature (1)..(25): SEQ ID NO: 3570; WAN024F3B; Start 326; Stop 350
atttggatgaaggagattggaaaga

SEQ ID NO: 358853 - DNA, 25 bp, Artificial
  probe
  misc_feature (1)..(25): SEQ ID NO: 3570; WAN024F3B; Start 325; Stop 349
gatttggatgaaggagattggaaag

SEQ ID NO: 358854 - DNA, 25 bp, Artificial
  probe
  misc_feature (1)..(25): SEQ ID NO: 3570; WAN024F3B; Start 327; Stop 351
tttggatgaaggagattggaaagaa

SEQ ID NO: 358855 - DNA, 25 bp, Artificial
  probe
  misc_feature (1)..(25): SEQ ID NO: 3570; WAN024F3B; Start 320; Stop 344
tactggatttggatgaaggagattg

SEQ ID NO: 358856 - DNA, 25 bp, Artificial
  probe
  misc_feature (1)..(25): SEQ ID NO: 3570; WAN024F3B; Start 175; Stop 199
tcctatgattatggttggaagcagt

SEQ ID NO: 358857 - DNA, 25 bp, Artificial
  probe
  misc_feature (1)..(25): SEQ ID NO: 3570; WAN024F3B; Start 328; Stop 352
ttggatgaaggagattggaaagaag

SEQ ID NO: 358858 - DNA, 25 bp, Artificial
  probe
  misc_feature (1)..(25): SEQ ID NO: 3570; WAN024F3B; Start 734; Stop 758
tgttaatccaagaggagttaggcaa

SEQ ID NO: 358859 - DNA, 25 bp, Artificial
  probe
  misc_feature (1)..(25): SEQ ID NO: 3570; WAN024F3B; Start 324; Stop 348
ggatttggatgaaggagattggaaa

SEQ ID NO: 358860 - DNA, 25 bp, Artificial
  probe
  misc_feature (1)..(25): SEQ ID NO: 3570; WAN024F3B; Start 742; Stop 766
caagaggagttaggcaagcaagaat

SEQ ID NO: 358861 - DNA, 25 bp, Artificial
  probe
  misc_feature (1)..(25): SEQ ID NO: 3570; WAN024F3B; Start 733; Stop 757
ctgttaatccaagaggagttaggca

SEQ ID NO: 358862 - DNA, 25 bp, Artificial
  probe
  misc_feature (1)..(25): SEQ ID NO: 3570; WAN024F3B; Start 732; Stop 756
actgttaatccaagaggagttaggc

SEQ ID NO: 358863 - DNA, 25 bp, Artificial
  probe
  misc_feature (1)..(25): SEQ ID NO: 3570; WAN024F3B; Start 286; Stop 310
cctatgcacttagatgatagctgtt

SEQ ID NO: 358864 - DNA, 25 bp, Artificial
  probe
  misc_feature (1)..(25): SEQ ID NO: 3570; WAN024F3B; Start 284; Stop 308
ttcctatgcacttagatgatagctg

SEQ ID NO: 358865 - DNA, 25 bp, Artificial
  probe
  misc_feature (1)..(25): SEQ ID NO: 3570; WAN024F3B; Start 319; Stop 343
gtactggatttggatgaaggagatt

SEQ ID NO: 358866 - DNA, 25 bp, Artificial
  probe
  misc_feature (1)..(25): SEQ ID NO: 3570; WAN024F3B; Start 729; Stop 753
ggcactgttaatccaagaggagtta

SEQ ID NO: 358867 - DNA, 25 bp, Artificial
  probe
  misc_feature (1)..(25): SEQ ID NO: 3570; WAN024F3B; Start 685; Stop 709
tggaggtatctacaagaaattcaga

SEQ ID NO: 358868 - DNA, 25 bp, Artificial
  probe
  misc_feature (1)..(25): SEQ ID NO: 3570; WAN024F3B; Start 744; Stop 768
agaggagttaggcaagcaagaattg

SEQ ID NO: 358869 - DNA, 25 bp, Artificial
  probe
  misc_feature (1)..(25): SEQ ID NO: 3570; WAN024F3B; Start 289; Stop 313
atgcacttagatgatagctgttatt

SEQ ID NO: 358870 - DNA, 25 bp, Artificial
  probe
  misc_feature (1)..(25): SEQ ID NO: 3570; WAN024F3B; Start 285; Stop 309
tcctatgcacttagatgatagctgt

SEQ ID NO: 358871 - DNA, 25 bp, Artificial
  probe
  misc_feature (1)..(25): SEQ ID NO: 3570; WAN024F3B; Start 323; Stop 347
tggatttggatgaaggagattggaa

SEQ ID NO: 358872 - DNA, 25 bp, Artificial
  probe
  misc_feature (1)..(25): SEQ ID NO: 3570; WAN024F3B; Start 736; Stop 760
ttaatccaagaggagttaggcaagc

SEQ ID NO: 358873 - DNA, 25 bp, Artificial
  probe
  misc_feature (1)..(25): SEQ ID NO: 3570; WAN024F3B; Start 40; Stop 64
gagatgttccaacttcaaagtagtc

SEQ ID NO: 358874 - DNA, 25 bp, Artificial
  probe
  misc_feature (1)..(25): SEQ ID NO: 3570; WAN024F3B; Start 322; Stop 346
ctggatttggatgaaggagattgga

SEQ ID NO: 358875 - DNA, 25 bp, Artificial
  probe
  misc_feature (1)..(25): SEQ ID NO: 3570; WAN024F3B; Start 41; Stop 65
agatgttccaacttcaaagtagtcg

SEQ ID NO: 358876 - DNA, 25 bp, Artificial
  probe
  misc_feature (1)..(25): SEQ ID NO: 3570; WAN024F3B; Start 684; Stop 708
atggaggtatctacaagaaattcag

SEQ ID NO: 358877 - DNA, 25 bp, Artificial
  probe
  misc_feature (1)..(25): SEQ ID NO: 3570; WAN024F3B; Start 318; Stop 342
ggtactggatttggatgaaggagat

SEQ ID NO: 358878 - DNA, 25 bp, Artificial
  probe
  misc_feature (1)..(25): SEQ ID NO: 3571; WAN024AFG; Start 2; Stop 26
acaagtttcttttgtcttatgaatt

SEQ ID NO: 358879 - DNA, 25 bp, Artificial
  probe
  misc_feature (1)..(25): SEQ ID NO: 3572; WAN0249DP; Start 152; Stop 176
agtctaatttgtttacaaggaggaa

SEQ ID NO: 358880 - DNA, 25 bp, Artificial
  probe
  misc_feature (1)..(25): SEQ ID NO: 3572; WAN0249DP; Start 153; Stop 177
gtctaatttgtttacaaggaggaaa

SEQ ID NO: 358881 - DNA, 25 bp, Artificial
  probe
  misc_feature (1)..(25): SEQ ID NO: 3572; WAN0249DP; Start 151; Stop 175
tagtctaatttgtttacaaggagga

SEQ ID NO: 358882 - DNA, 25 bp, Artificial
  probe
  misc_feature (1)..(25): SEQ ID NO: 3572; WAN0249DP; Start 30; Stop 54
ttgctttccattctttaaacttagt

SEQ ID NO: 358883 - DNA, 25 bp, Artificial
  probe
  misc_feature (1)..(25): SEQ ID NO: 3572; WAN0249DP; Start 31; Stop 55
tgctttccattctttaaacttagtt

SEQ ID NO: 358884 - DNA, 25 bp, Artificial
  probe
  misc_feature (1)..(25): SEQ ID NO: 3572; WAN0249DP; Start 150; Stop 174
atagtctaatttgtttacaaggagg

SEQ ID NO: 358885 - DNA, 25 bp, Artificial
  probe
  misc_feature (1)..(25): SEQ ID NO: 3572; WAN0249DP; Start 154; Stop 178
tctaatttgtttacaaggaggaaat

SEQ ID NO: 358886 - DNA, 25 bp, Artificial
  probe
  misc_feature (1)..(25): SEQ ID NO: 3572; WAN0249DP; Start 27; Stop 51
aaattgctttccattctttaaactt

SEQ ID NO: 358887 - DNA, 25 bp, Artificial
  probe
  misc_feature (1)..(25): SEQ ID NO: 3572; WAN0249DP; Start 29; Stop 53
attgctttccattctttaaacttag

SEQ ID NO: 358888 - DNA, 25 bp, Artificial
  probe
  misc_feature (1)..(25): SEQ ID NO: 3572; WAN0249DP; Start 28; Stop 52
aattgctttccattctttaaactta

SEQ ID NO: 358889 - DNA, 25 bp, Artificial
  probe
  misc_feature (1)..(25): SEQ ID NO: 3572; WAN0249DP; Start 36; Stop 60
tccattctttaaacttagtttctcc

SEQ ID NO: 358890 - DNA, 25 bp, Artificial
  probe
  misc_feature (1)..(25): SEQ ID NO: 3572; WAN0249DP; Start 37; Stop 61
ccattctttaaacttagtttctcct

SEQ ID NO: 358891 - DNA, 25 bp, Artificial
  probe
  misc_feature (1)..(25): SEQ ID NO: 3572; WAN0249DP; Start 26; Stop 50
taaattgctttccattctttaaact

SEQ ID NO: 358892 - DNA, 25 bp, Artificial
  probe
  misc_feature (1)..(25): SEQ ID NO: 3572; WAN0249DP; Start 32; Stop 56
gctttccattctttaaacttagttt

SEQ ID NO: 358893 - DNA, 25 bp, Artificial
  probe
  misc_feature (1)..(25): SEQ ID NO: 3572; WAN0249DP; Start 38; Stop 62
cattctttaaacttagtttctcctt

SEQ ID NO: 358894 - DNA, 25 bp, Artificial
  probe
  misc_feature (1)..(25): SEQ ID NO: 3572; WAN0249DP; Start 35; Stop 59
ttccattctttaaacttagtttctc

SEQ ID NO: 358895 - DNA, 25 bp, Artificial
  probe
  misc_feature (1)..(25): SEQ ID NO: 3572; WAN0249DP; Start 25; Stop 49
ttaaattgctttccattctttaaac

SEQ ID NO: 358896 - DNA, 25 bp, Artificial
  probe
  misc_feature (1)..(25): SEQ ID NO: 3572; WAN0249DP; Start 34; Stop 58
tttccattctttaaacttagtttct

SEQ ID NO: 358897 - DNA, 25 bp, Artificial
  probe
  misc_feature (1)..(25): SEQ ID NO: 3572; WAN0249DP; Start 40; Stop 64
ttctttaaacttagtttctcctttt

SEQ ID NO: 358898 - DNA, 25 bp, Artificial
  probe
  misc_feature (1)..(25): SEQ ID NO: 3573; WAN024AP3; Start 49; Stop 73
tgataacatagtacggtatgtggtg

SEQ ID NO: 358899 - DNA, 25 bp, Artificial
  probe
  misc_feature (1)..(25): SEQ ID NO: 3573; WAN024AP3; Start 48; Stop 72
gtgataacatagtacggtatgtggt

SEQ ID NO: 358900 - DNA, 25 bp, Artificial
  probe
  misc_feature (1)..(25): SEQ ID NO: 3573; WAN024AP3; Start 47; Stop 71
tgtgataacatagtacggtatgtgg

SEQ ID NO: 358901 - DNA, 25 bp, Artificial
  probe
  misc_feature (1)..(25): SEQ ID NO: 3573; WAN024AP3; Start 52; Stop 76
taacatagtacggtatgtggtgcta

SEQ ID NO: 358902 - DNA, 25 bp, Artificial
  probe
  misc_feature (1)..(25): SEQ ID NO: 3573; WAN024AP3; Start 50; Stop 74
gataacatagtacggtatgtggtgc

SEQ ID NO: 358903 - DNA, 25 bp, Artificial
  probe
  misc_feature (1)..(25): SEQ ID NO: 3573; WAN024AP3; Start 51; Stop 75
ataacatagtacggtatgtggtgct

SEQ ID NO: 358904 - DNA, 25 bp, Artificial
  probe
  misc_feature (1)..(25): SEQ ID NO: 3573; WAN024AP3; Start 53; Stop 77
aacatagtacggtatgtggtgctag

SEQ ID NO: 358905 - DNA, 25 bp, Artificial
  probe
  misc_feature (1)..(25): SEQ ID NO: 3573; WAN024AP3; Start 74; Stop 98
ctagcacatccgctatattagatct

SEQ ID NO: 358906 - DNA, 25 bp, Artificial
  probe
  misc_feature (1)..(25): SEQ ID NO: 3573; WAN024AP3; Start 12; Stop 36
aaaatcttccaattcccttgcaaaa

SEQ ID NO: 358907 - DNA, 25 bp, Artificial
  probe
  misc_feature (1)..(25): SEQ ID NO: 3573; WAN024AP3; Start 75; Stop 99
tagcacatccgctatattagatcta

SEQ ID NO: 358908 - DNA, 25 bp, Artificial
  probe
  misc_feature (1)..(25): SEQ ID NO: 3574; WAN024ADN; Start 208; Stop 232
gagatagtgagtattccagttaaga

SEQ ID NO: 358909 - DNA, 25 bp, Artificial
  probe
  misc_feature (1)..(25): SEQ ID NO: 3574; WAN024ADN; Start 207; Stop 231
agagatagtgagtattccagttaag

SEQ ID NO: 358910 - DNA, 25 bp, Artificial
  probe
  misc_feature (1)..(25): SEQ ID NO: 3574; WAN024ADN; Start 10; Stop 34
acctctttgggagtatgaagttaag

SEQ ID NO: 358911 - DNA, 25 bp, Artificial
  probe
  misc_feature (1)..(25): SEQ ID NO: 3574; WAN024ADN; Start 206; Stop 230
aagagatagtgagtattccagttaa

SEQ ID NO: 358912 - DNA, 25 bp, Artificial
  probe
  misc_feature (1)..(25): SEQ ID NO: 3574; WAN024ADN; Start 209; Stop 233
agatagtgagtattccagttaagaa

SEQ ID NO: 358913 - DNA, 25 bp, Artificial
  probe
  misc_feature (1)..(25): SEQ ID NO: 3574; WAN024ADN; Start 9; Stop 33
tacctctttgggagtatgaagttaa

SEQ ID NO: 358914 - DNA, 25 bp, Artificial
  probe
  misc_feature (1)..(25): SEQ ID NO: 3574; WAN024ADN; Start 213; Stop 237
agtgagtattccagttaagaatcaa

SEQ ID NO: 358915 - DNA, 25 bp, Artificial
  probe
  misc_feature (1)..(25): SEQ ID NO: 3574; WAN024ADN; Start 2; Stop 26
acactaatacctctttgggagtatg

SEQ ID NO: 358916 - DNA, 25 bp, Artificial
  probe
  misc_feature (1)..(25): SEQ ID NO: 3574; WAN024ADN; Start 7; Stop 31
aatacctctttgggagtatgaagtt

SEQ ID NO: 358917 - DNA, 25 bp, Artificial
  probe
  misc_feature (1)..(25): SEQ ID NO: 3574; WAN024ADN; Start 3; Stop 27
cactaatacctctttgggagtatga

SEQ ID NO: 358918 - DNA, 25 bp, Artificial
  probe
  misc_feature (1)..(25): SEQ ID NO: 3574; WAN024ADN; Start 1; Stop 25
gacactaatacctctttgggagtat

SEQ ID NO: 358919 - DNA, 25 bp, Artificial
  probe
  misc_feature (1)..(25): SEQ ID NO: 3574; WAN024ADN; Start 203; Stop 227
gtaaagagatagtgagtattccagt

SEQ ID NO: 358920 - DNA, 25 bp, Artificial
  probe
  misc_feature (1)..(25): SEQ ID NO: 3574; WAN024ADN; Start 202; Stop 226
tgtaaagagatagtgagtattccag

SEQ ID NO: 358921 - DNA, 25 bp, Artificial
  probe
  misc_feature (1)..(25): SEQ ID NO: 3574; WAN024ADN; Start 8; Stop 32
atacctctttgggagtatgaagtta

SEQ ID NO: 358922 - DNA, 25 bp, Artificial
  probe
  misc_feature (1)..(25): SEQ ID NO: 3574; WAN024ADN; Start 6; Stop 30
taatacctctttgggagtatgaagt

SEQ ID NO: 358923 - DNA, 25 bp, Artificial
  probe
  misc_feature (1)..(25): SEQ ID NO: 3574; WAN024ADN; Start 4; Stop 28
actaatacctctttgggagtatgaa

SEQ ID NO: 358924 - DNA, 25 bp, Artificial
  probe
  misc_feature (1)..(25): SEQ ID NO: 3574; WAN024ADN; Start 14; Stop 38
ctttgggagtatgaagttaagattc

SEQ ID NO: 358925 - DNA, 25 bp, Artificial
  probe
  misc_feature (1)..(25): SEQ ID NO: 3574; WAN024ADN; Start 5; Stop 29
ctaatacctctttgggagtatgaag

SEQ ID NO: 358926 - DNA, 25 bp, Artificial
  probe
  misc_feature (1)..(25): SEQ ID NO: 3574; WAN024ADN; Start 214; Stop 238
gtgagtattccagttaagaatcaat

SEQ ID NO: 358927 - DNA, 25 bp, Artificial
  probe
  misc_feature (1)..(25): SEQ ID NO: 3574; WAN024ADN; Start 212; Stop 236
tagtgagtattccagttaagaatca

SEQ ID NO: 358928 - DNA, 25 bp, Artificial
  probe
  misc_feature (1)..(25): SEQ ID NO: 3574; WAN024ADN; Start 11; Stop 35
cctctttgggagtatgaagttaaga

SEQ ID NO: 358929 - DNA, 25 bp, Artificial
  probe
  misc_feature (1)..(25): SEQ ID NO: 3574; WAN024ADN; Start 205; Stop 229
aaagagatagtgagtattccagtta

SEQ ID NO: 358930 - DNA, 25 bp, Artificial
  probe
  misc_feature (1)..(25): SEQ ID NO: 3574; WAN024ADN; Start 204; Stop 228
taaagagatagtgagtattccagtt

SEQ ID NO: 358931 - DNA, 25 bp, Artificial
  probe
  misc_feature (1)..(25): SEQ ID NO: 3574; WAN024ADN; Start 201; Stop 225
atgtaaagagatagtgagtattcca

SEQ ID NO: 358932 - DNA, 25 bp, Artificial
  probe
  misc_feature (1)..(25): SEQ ID NO: 3574; WAN024ADN; Start 200; Stop 224
gatgtaaagagatagtgagtattcc

SEQ ID NO: 358933 - DNA, 25 bp, Artificial
  probe
  misc_feature (1)..(25): SEQ ID NO: 3574; WAN024ADN; Start 17; Stop 41
tgggagtatgaagttaagattcaca

SEQ ID NO: 358934 - DNA, 25 bp, Artificial
  probe
  misc_feature (1)..(25): SEQ ID NO: 3574; WAN024ADN; Start 215; Stop 239
tgagtattccagttaagaatcaatt

SEQ ID NO: 358935 - DNA, 25 bp, Artificial
  probe
  misc_feature (1)..(25): SEQ ID NO: 3574; WAN024ADN; Start 180; Stop 204
ccctgtttagtcattttcttgatgt

SEQ ID NO: 358936 - DNA, 25 bp, Artificial
  probe
  misc_feature (1)..(25): SEQ ID NO: 3574; WAN024ADN; Start 176; Stop 200
acttccctgtttagtcattttcttg

SEQ ID NO: 358937 - DNA, 25 bp, Artificial
  probe
  misc_feature (1)..(25): SEQ ID NO: 3574; WAN024ADN; Start 171; Stop 195
ggcaaacttccctgtttagtcattt

SEQ ID NO: 358938 - DNA, 25 bp, Artificial
  probe
  misc_feature (1)..(25): SEQ ID NO: 3574; WAN024ADN; Start 179; Stop 203
tccctgtttagtcattttcttgatg

SEQ ID NO: 358939 - DNA, 25 bp, Artificial
  probe
  misc_feature (1)..(25): SEQ ID NO: 3574; WAN024ADN; Start 177; Stop 201
cttccctgtttagtcattttcttga

SEQ ID NO: 358940 - DNA, 25 bp, Artificial
  probe
  misc_feature (1)..(25): SEQ ID NO: 3574; WAN024ADN; Start 12; Stop 36
ctctttgggagtatgaagttaagat

SEQ ID NO: 358941 - DNA, 25 bp, Artificial
  probe
  misc_feature (1)..(25): SEQ ID NO: 3576; WAN0249NB; Start 15; Stop 39
tggtttcctagtttgctctatgatt

SEQ ID NO: 358942 - DNA, 25 bp, Artificial
  probe
  misc_feature (1)..(25): SEQ ID NO: 3576; WAN0249NB; Start 64; Stop 88
ttgccaagtttctttattcgtctaa

SEQ ID NO: 358943 - DNA, 25 bp, Artificial
  probe
  misc_feature (1)..(25): SEQ ID NO: 3576; WAN0249NB; Start 63; Stop 87
tttgccaagtttctttattcgtcta

SEQ ID NO: 358944 - DNA, 25 bp, Artificial
  probe
  misc_feature (1)..(25): SEQ ID NO: 3576; WAN0249NB; Start 14; Stop 38
ctggtttcctagtttgctctatgat

SEQ ID NO: 358945 - DNA, 25 bp, Artificial
  probe
  misc_feature (1)..(25): SEQ ID NO: 3576; WAN0249NB; Start 65; Stop 89
tgccaagtttctttattcgtctaaa

SEQ ID NO: 358946 - DNA, 25 bp, Artificial
  probe
  misc_feature (1)..(25): SEQ ID NO: 3576; WAN0249NB; Start 16; Stop 40
ggtttcctagtttgctctatgattt

SEQ ID NO: 358947 - DNA, 25 bp, Artificial
  probe
  misc_feature (1)..(25): SEQ ID NO: 3576; WAN0249NB; Start 12; Stop 36
gactggtttcctagtttgctctatg

SEQ ID NO: 358948 - DNA, 25 bp, Artificial
  probe
  misc_feature (1)..(25): SEQ ID NO: 3576; WAN0249NB; Start 13; Stop 37
actggtttcctagtttgctctatga

SEQ ID NO: 358949 - DNA, 25 bp, Artificial
  probe
  misc_feature (1)..(25): SEQ ID NO: 3576; WAN0249NB; Start 11; Stop 35
cgactggtttcctagtttgctctat

SEQ ID NO: 358950 - DNA, 25 bp, Artificial
  probe
  misc_feature (1)..(25): SEQ ID NO: 3576; WAN0249NB; Start 62; Stop 86
ttttgccaagtttctttattcgtct

SEQ ID NO: 358951 - DNA, 25 bp, Artificial
  probe
  misc_feature (1)..(25): SEQ ID NO: 3576; WAN0249NB; Start 58; Stop 82
gcgattttgccaagtttctttattc

SEQ ID NO: 358952 - DNA, 25 bp, Artificial
  probe
  misc_feature (1)..(25): SEQ ID NO: 3576; WAN0249NB; Start 57; Stop 81
tgcgattttgccaagtttctttatt

SEQ ID NO: 358953 - DNA, 25 bp, Artificial
  probe
  misc_feature (1)..(25): SEQ ID NO: 3576; WAN0249NB; Start 61; Stop 85
attttgccaagtttctttattcgtc

SEQ ID NO: 358954 - DNA, 25 bp, Artificial
  probe
  misc_feature (1)..(25): SEQ ID NO: 3576; WAN0249NB; Start 60; Stop 84
gattttgccaagtttctttattcgt

SEQ ID NO: 358955 - DNA, 25 bp, Artificial
  probe
  misc_feature (1)..(25): SEQ ID NO: 3576; WAN0249NB; Start 56; Stop 80
ttgcgattttgccaagtttctttat

SEQ ID NO: 358956 - DNA, 25 bp, Artificial
  probe
  misc_feature (1)..(25): SEQ ID NO: 3576; WAN0249NB; Start 55; Stop 79
attgcgattttgccaagtttcttta

SEQ ID NO: 358957 - DNA, 25 bp, Artificial
  probe
  misc_feature (1)..(25): SEQ ID NO: 3576; WAN0249NB; Start 51; Stop 75
ttaaattgcgattttgccaagtttc

SEQ ID NO: 358958 - DNA, 25 bp, Artificial
  probe
  misc_feature (1)..(25): SEQ ID NO: 3576; WAN0249NB; Start 50; Stop 74
attaaattgcgattttgccaagttt

SEQ ID NO: 358959 - DNA, 25 bp, Artificial
  probe
  misc_feature (1)..(25): SEQ ID NO: 3576; WAN0249NB; Start 54; Stop 78
aattgcgattttgccaagtttcttt

SEQ ID NO: 358960 - DNA, 25 bp, Artificial
  probe
  misc_feature (1)..(25): SEQ ID NO: 3576; WAN0249NB; Start 52; Stop 76
taaattgcgattttgccaagtttct

SEQ ID NO: 358961 - DNA, 25 bp, Artificial
  probe
  misc_feature (1)..(25): SEQ ID NO: 3576; WAN0249NB; Start 21; Stop 45
cctagtttgctctatgattttcaca

SEQ ID NO: 358962 - DNA, 25 bp, Artificial
  probe
  misc_feature (1)..(25): SEQ ID NO: 3576; WAN0249NB; Start 66; Stop 90
gccaagtttctttattcgtctaaaa

SEQ ID NO: 358963 - DNA, 25 bp, Artificial
  probe
  misc_feature (1)..(25): SEQ ID NO: 3576; WAN0249NB; Start 20; Stop 44
tcctagtttgctctatgattttcac

SEQ ID NO: 358964 - DNA, 25 bp, Artificial
  probe
  misc_feature (1)..(25): SEQ ID NO: 3576; WAN0249NB; Start 53; Stop 77
aaattgcgattttgccaagtttctt

SEQ ID NO: 358965 - DNA, 25 bp, Artificial
  probe
  misc_feature (1)..(25): SEQ ID NO: 3576; WAN0249NB; Start 23; Stop 47
tagtttgctctatgattttcacaga

SEQ ID NO: 358966 - DNA, 25 bp, Artificial
  probe
  misc_feature (1)..(25): SEQ ID NO: 3576; WAN0249NB; Start 19; Stop 43
ttcctagtttgctctatgattttca

SEQ ID NO: 358967 - DNA, 25 bp, Artificial
  probe
  misc_feature (1)..(25): SEQ ID NO: 3576; WAN0249NB; Start 22; Stop 46
ctagtttgctctatgattttcacag

SEQ ID NO: 358968 - DNA, 25 bp, Artificial
  probe
  misc_feature (1)..(25): SEQ ID NO: 3576; WAN0249NB; Start 17; Stop 41
gtttcctagtttgctctatgatttt

SEQ ID NO: 358969 - DNA, 25 bp, Artificial
  probe
  misc_feature (1)..(25): SEQ ID NO: 3576; WAN0249NB; Start 18; Stop 42
tttcctagtttgctctatgattttc

SEQ ID NO: 358970 - DNA, 25 bp, Artificial
  probe
  misc_feature (1)..(25): SEQ ID NO: 3576; WAN0249NB; Start 59; Stop 83
cgattttgccaagtttctttattcg

SEQ ID NO: 358971 - DNA, 25 bp, Artificial
  probe
  misc_feature (1)..(25): SEQ ID NO: 3576; WAN0249NB; Start 10; Stop 34
gcgactggtttcctagtttgctcta

SEQ ID NO: 358972 - DNA, 25 bp, Artificial
  probe
  misc_feature (1)..(25): SEQ ID NO: 3576; WAN0249NB; Start 78; Stop 102
tattcgtctaaaagtagagtctgtt

SEQ ID NO: 358973 - DNA, 25 bp, Artificial
  probe
  misc_feature (1)..(25): SEQ ID NO: 3576; WAN0249NB; Start 77; Stop 101
ttattcgtctaaaagtagagtctgt

SEQ ID NO: 358974 - DNA, 25 bp, Artificial
  probe
  misc_feature (1)..(25): SEQ ID NO: 3577; WAN0249OM; Start 26; Stop 50
tatagagaaataaaggggactagcc

SEQ ID NO: 358975 - DNA, 25 bp, Artificial
  probe
  misc_feature (1)..(25): SEQ ID NO: 3577; WAN0249OM; Start 27; Stop 51
atagagaaataaaggggactagcct

SEQ ID NO: 358976 - DNA, 25 bp, Artificial
  probe
  misc_feature (1)..(25): SEQ ID NO: 3577; WAN0249OM; Start 25; Stop 49
ttatagagaaataaaggggactagc

SEQ ID NO: 358977 - DNA, 25 bp, Artificial
  probe
  misc_feature (1)..(25): SEQ ID NO: 3577; WAN0249OM; Start 1; Stop 25
gaccgaaactccaaataactgtttt

SEQ ID NO: 358978 - DNA, 25 bp, Artificial
  probe
  misc_feature (1)..(25): SEQ ID NO: 3577; WAN0249OM; Start 24; Stop 48
tttatagagaaataaaggggactag

SEQ ID NO: 358979 - DNA, 25 bp, Artificial
  probe
  misc_feature (1)..(25): SEQ ID NO: 3578; WAN0249VM; Start 5; Stop 29
tccttgtgaagattgaggagatact

SEQ ID NO: 358980 - DNA, 25 bp, Artificial
  probe
  misc_feature (1)..(25): SEQ ID NO: 3579; WAN024DPN; Start 905; Stop 929
tcttaggattagtagtggattggtc

SEQ ID NO: 358981 - DNA, 25 bp, Artificial
  probe
  misc_feature (1)..(25): SEQ ID NO: 3579; WAN024DPN; Start 904; Stop 928
ttcttaggattagtagtggattggt

SEQ ID NO: 358982 - DNA, 25 bp, Artificial
  probe
  misc_feature (1)..(25): SEQ ID NO: 3579; WAN024DPN; Start 903; Stop 927
gttcttaggattagtagtggattgg

SEQ ID NO: 358983 - DNA, 25 bp, Artificial
  probe
  misc_feature (1)..(25): SEQ ID NO: 3579; WAN024DPN; Start 902; Stop 926
tgttcttaggattagtagtggattg

SEQ ID NO: 358984 - DNA, 25 bp, Artificial
  probe
  misc_feature (1)..(25): SEQ ID NO: 3579; WAN024DPN; Start 906; Stop 930
cttaggattagtagtggattggtcc

SEQ ID NO: 358985 - DNA, 25 bp, Artificial
  probe
  misc_feature (1)..(25): SEQ ID NO: 3579; WAN024DPN; Start 190; Stop 214
tttactcattatcaggtgtcttcgg

SEQ ID NO: 358986 - DNA, 25 bp, Artificial
  probe
  misc_feature (1)..(25): SEQ ID NO: 3579; WAN024DPN; Start 766; Stop 790
atttgcctcattatcgctttctttg

SEQ ID NO: 358987 - DNA, 25 bp, Artificial
  probe
  misc_feature (1)..(25): SEQ ID NO: 3579; WAN024DPN; Start 189; Stop 213
ctttactcattatcaggtgtcttcg

SEQ ID NO: 358988 - DNA, 25 bp, Artificial
  probe
  misc_feature (1)..(25): SEQ ID NO: 3579; WAN024DPN; Start 765; Stop 789
gatttgcctcattatcgctttcttt

SEQ ID NO: 358989 - DNA, 25 bp, Artificial
  probe
  misc_feature (1)..(25): SEQ ID NO: 3579; WAN024DPN; Start 901; Stop 925
ttgttcttaggattagtagtggatt

SEQ ID NO: 358990 - DNA, 25 bp, Artificial
  probe
  misc_feature (1)..(25): SEQ ID NO: 3579; WAN024DPN; Start 425; Stop 449
agtttattagccctgtctttatcct

SEQ ID NO: 358991 - DNA, 25 bp, Artificial
  probe
  misc_feature (1)..(25): SEQ ID NO: 3579; WAN024DPN; Start 426; Stop 450
gtttattagccctgtctttatcctc

SEQ ID NO: 358992 - DNA, 25 bp, Artificial
  probe
  misc_feature (1)..(25): SEQ ID NO: 3579; WAN024DPN; Start 429; Stop 453
tattagccctgtctttatcctcttt

SEQ ID NO: 358993 - DNA, 25 bp, Artificial
  probe
  misc_feature (1)..(25): SEQ ID NO: 3579; WAN024DPN; Start 428; Stop 452
ttattagccctgtctttatcctctt

SEQ ID NO: 358994 - DNA, 25 bp, Artificial
  probe
  misc_feature (1)..(25): SEQ ID NO: 3579; WAN024DPN; Start 427; Stop 451
tttattagccctgtctttatcctct

SEQ ID NO: 358995 - DNA, 25 bp, Artificial
  probe
  misc_feature (1)..(25): SEQ ID NO: 3579; WAN024DPN; Start 381; Stop 405
tctctgtgtagaatactcaaatgct

SEQ ID NO: 358996 - DNA, 25 bp, Artificial
  probe
  misc_feature (1)..(25): SEQ ID NO: 3579; WAN024DPN; Start 77; Stop 101
cgtgttacaataagggtatgaatca

SEQ ID NO: 358997 - DNA, 25 bp, Artificial
  probe
  misc_feature (1)..(25): SEQ ID NO: 3579; WAN024DPN; Start 23; Stop 47
acgataattctctaaatgaagtggc

SEQ ID NO: 358998 - DNA, 25 bp, Artificial
  probe
  misc_feature (1)..(25): SEQ ID NO: 3579; WAN024DPN; Start 759; Stop 783
tatcttgatttgcctcattatcgct

SEQ ID NO: 358999 - DNA, 25 bp, Artificial
  probe
  misc_feature (1)..(25): SEQ ID NO: 3579; WAN024DPN; Start 758; Stop 782
gtatcttgatttgcctcattatcgc

SEQ ID NO: 359000 - DNA, 25 bp, Artificial
  probe
  misc_feature (1)..(25): SEQ ID NO: 3579; WAN024DPN; Start 76; Stop 100
tcgtgttacaataagggtatgaatc

SEQ ID NO: 359001 - DNA, 25 bp, Artificial
  probe
  misc_feature (1)..(25): SEQ ID NO: 3579; WAN024DPN; Start 754; Stop 778
tggagtatcttgatttgcctcatta

SEQ ID NO: 359002 - DNA, 25 bp, Artificial
  probe
  misc_feature (1)..(25): SEQ ID NO: 3579; WAN024DPN; Start 219; Stop 243
gattacctctatgcgtttgacactg

SEQ ID NO: 359003 - DNA, 25 bp, Artificial
  probe
  misc_feature (1)..(25): SEQ ID NO: 3579; WAN024DPN; Start 185; Stop 209
acttctttactcattatcaggtgtc

SEQ ID NO: 359004 - DNA, 25 bp, Artificial
  probe
  misc_feature (1)..(25): SEQ ID NO: 3579; WAN024DPN; Start 753; Stop 777
ttggagtatcttgatttgcctcatt

SEQ ID NO: 359005 - DNA, 25 bp, Artificial
  probe
  misc_feature (1)..(25): SEQ ID NO: 3579; WAN024DPN; Start 752; Stop 776
tttggagtatcttgatttgcctcat

SEQ ID NO: 359006 - DNA, 25 bp, Artificial
  probe
  misc_feature (1)..(25): SEQ ID NO: 3579; WAN024DPN; Start 751; Stop 775
atttggagtatcttgatttgcctca

SEQ ID NO: 359007 - DNA, 25 bp, Artificial
  probe
  misc_feature (1)..(25): SEQ ID NO: 3579; WAN024DPN; Start 380; Stop 404
atctctgtgtagaatactcaaatgc

SEQ ID NO: 359008 - DNA, 25 bp, Artificial
  probe
  misc_feature (1)..(25): SEQ ID NO: 3579; WAN024DPN; Start 757; Stop 781
agtatcttgatttgcctcattatcg

SEQ ID NO: 359009 - DNA, 25 bp, Artificial
  probe
  misc_feature (1)..(25): SEQ ID NO: 3579; WAN024DPN; Start 749; Stop 773
atatttggagtatcttgatttgcct

SEQ ID NO: 359010 - DNA, 25 bp, Artificial
  probe
  misc_feature (1)..(25): SEQ ID NO: 3579; WAN024DPN; Start 871; Stop 895
gaacctctctcttctgctctcttga

SEQ ID NO: 359011 - DNA, 25 bp, Artificial
  probe
  misc_feature (1)..(25): SEQ ID NO: 3579; WAN024DPN; Start 191; Stop 215
ttactcattatcaggtgtcttcggg

SEQ ID NO: 359012 - DNA, 25 bp, Artificial
  probe
  misc_feature (1)..(25): SEQ ID NO: 3579; WAN024DPN; Start 732; Stop 756
gctttcctttactcttgatatttgg

SEQ ID NO: 359013 - DNA, 25 bp, Artificial
  probe
  misc_feature (1)..(25): SEQ ID NO: 3580; WAN0249ZX; Start 99; Stop 123
tttcttagacattgtttactccttt

SEQ ID NO: 359014 - DNA, 25 bp, Artificial
  probe
  misc_feature (1)..(25): SEQ ID NO: 3580; WAN0249ZX; Start 98; Stop 122
atttcttagacattgtttactcctt

SEQ ID NO: 359015 - DNA, 25 bp, Artificial
  probe
  misc_feature (1)..(25): SEQ ID NO: 3580; WAN0249ZX; Start 97; Stop 121
aatttcttagacattgtttactcct

SEQ ID NO: 359016 - DNA, 25 bp, Artificial
  probe
  misc_feature (1)..(25): SEQ ID NO: 3580; WAN0249ZX; Start 101; Stop 125
tcttagacattgtttactcctttag

SEQ ID NO: 359017 - DNA, 25 bp, Artificial
  probe
  misc_feature (1)..(25): SEQ ID NO: 3580; WAN0249ZX; Start 102; Stop 126
cttagacattgtttactcctttagt

SEQ ID NO: 359018 - DNA, 25 bp, Artificial
  probe
  misc_feature (1)..(25): SEQ ID NO: 3580; WAN0249ZX; Start 104; Stop 128
tagacattgtttactcctttagttt

SEQ ID NO: 359019 - DNA, 25 bp, Artificial
  probe
  misc_feature (1)..(25): SEQ ID NO: 3580; WAN0249ZX; Start 103; Stop 127
ttagacattgtttactcctttagtt

SEQ ID NO: 359020 - DNA, 25 bp, Artificial
  probe
  misc_feature (1)..(25): SEQ ID NO: 3580; WAN0249ZX; Start 100; Stop 124
ttcttagacattgtttactccttta

SEQ ID NO: 359021 - DNA, 25 bp, Artificial
  probe
  misc_feature (1)..(25): SEQ ID NO: 3580; WAN0249ZX; Start 4; Stop 28
gagttagtactgcgtctagctcagg

SEQ ID NO: 359022 - DNA, 25 bp, Artificial
  probe
  misc_feature (1)..(25): SEQ ID NO: 3580; WAN0249ZX; Start 96; Stop 120
taatttcttagacattgtttactcc

SEQ ID NO: 359023 - DNA, 25 bp, Artificial
  probe
  misc_feature (1)..(25): SEQ ID NO: 3580; WAN0249ZX; Start 3; Stop 27
cgagttagtactgcgtctagctcag

SEQ ID NO: 359024 - DNA, 25 bp, Artificial
  probe
  misc_feature (1)..(25): SEQ ID NO: 3580; WAN0249ZX; Start 84; Stop 108
gcagtgaaatgttaatttcttagac

SEQ ID NO: 359025 - DNA, 25 bp, Artificial
  probe
  misc_feature (1)..(25): SEQ ID NO: 3580; WAN0249ZX; Start 2; Stop 26
acgagttagtactgcgtctagctca

SEQ ID NO: 359026 - DNA, 25 bp, Artificial
  probe
  misc_feature (1)..(25): SEQ ID NO: 3580; WAN0249ZX; Start 85; Stop 109
cagtgaaatgttaatttcttagaca

SEQ ID NO: 359027 - DNA, 25 bp, Artificial
  probe
  misc_feature (1)..(25): SEQ ID NO: 3582; WAN024A6E; Start 22; Stop 46
acttgttattagagcaaatttctgt

SEQ ID NO: 359028 - DNA, 25 bp, Artificial
  probe
  misc_feature (1)..(25): SEQ ID NO: 3582; WAN024A6E; Start 23; Stop 47
cttgttattagagcaaatttctgtt

SEQ ID NO: 359029 - DNA, 25 bp, Artificial
  probe
  misc_feature (1)..(25): SEQ ID NO: 3582; WAN024A6E; Start 21; Stop 45
aacttgttattagagcaaatttctg

SEQ ID NO: 359030 - DNA, 25 bp, Artificial
  probe
  misc_feature (1)..(25): SEQ ID NO: 3582; WAN024A6E; Start 20; Stop 44
aaacttgttattagagcaaatttct

SEQ ID NO: 359031 - DNA, 25 bp, Artificial
  probe
  misc_feature (1)..(25): SEQ ID NO: 3582; WAN024A6E; Start 24; Stop 48
ttgttattagagcaaatttctgtta

SEQ ID NO: 359032 - DNA, 25 bp, Artificial
  probe
  misc_feature (1)..(25): SEQ ID NO: 3582; WAN024A6E; Start 25; Stop 49
tgttattagagcaaatttctgttat

SEQ ID NO: 359033 - DNA, 25 bp, Artificial
  probe
  misc_feature (1)..(25): SEQ ID NO: 3582; WAN024A6E; Start 19; Stop 43
aaaacttgttattagagcaaatttc

SEQ ID NO: 359034 - DNA, 25 bp, Artificial
  probe
  misc_feature (1)..(25): SEQ ID NO: 3583; WAN0249JJ; Start 76; Stop 100
tctaccgaatacctgcgttatacta

SEQ ID NO: 359035 - DNA, 25 bp, Artificial
  probe
  misc_feature (1)..(25): SEQ ID NO: 3583; WAN0249JJ; Start 77; Stop 101
ctaccgaatacctgcgttatactag

SEQ ID NO: 359036 - DNA, 25 bp, Artificial
  probe
  misc_feature (1)..(25): SEQ ID NO: 3583; WAN0249JJ; Start 74; Stop 98
cttctaccgaatacctgcgttatac

SEQ ID NO: 359037 - DNA, 25 bp, Artificial
  probe
  misc_feature (1)..(25): SEQ ID NO: 3583; WAN0249JJ; Start 75; Stop 99
ttctaccgaatacctgcgttatact

SEQ ID NO: 359038 - DNA, 25 bp, Artificial
  probe
  misc_feature (1)..(25): SEQ ID NO: 3583; WAN0249JJ; Start 65; Stop 89
aatacttgccttctaccgaatacct

SEQ ID NO: 359039 - DNA, 25 bp, Artificial
  probe
  misc_feature (1)..(25): SEQ ID NO: 3583; WAN0249JJ; Start 73; Stop 97
ccttctaccgaatacctgcgttata

SEQ ID NO: 359040 - DNA, 25 bp, Artificial
  probe
  misc_feature (1)..(25): SEQ ID NO: 3583; WAN0249JJ; Start 66; Stop 90
atacttgccttctaccgaatacctg

SEQ ID NO: 359041 - DNA, 25 bp, Artificial
  probe
  misc_feature (1)..(25): SEQ ID NO: 3583; WAN0249JJ; Start 118; Stop 142
ttagcattcaaactatcaaggaggg

SEQ ID NO: 359042 - DNA, 25 bp, Artificial
  probe
  misc_feature (1)..(25): SEQ ID NO: 3583; WAN0249JJ; Start 117; Stop 141
tttagcattcaaactatcaaggagg

SEQ ID NO: 359043 - DNA, 25 bp, Artificial
  probe
  misc_feature (1)..(25): SEQ ID NO: 3583; WAN0249JJ; Start 64; Stop 88
aaatacttgccttctaccgaatacc

SEQ ID NO: 359044 - DNA, 25 bp, Artificial
  probe
  misc_feature (1)..(25): SEQ ID NO: 3583; WAN0249JJ; Start 63; Stop 87
taaatacttgccttctaccgaatac

SEQ ID NO: 359045 - DNA, 25 bp, Artificial
  probe
  misc_feature (1)..(25): SEQ ID NO: 3583; WAN0249JJ; Start 78; Stop 102
taccgaatacctgcgttatactagt

SEQ ID NO: 359046 - DNA, 25 bp, Artificial
  probe
  misc_feature (1)..(25): SEQ ID NO: 3583; WAN0249JJ; Start 62; Stop 86
ataaatacttgccttctaccgaata

SEQ ID NO: 359047 - DNA, 25 bp, Artificial
  probe
  misc_feature (1)..(25): SEQ ID NO: 3583; WAN0249JJ; Start 67; Stop 91
tacttgccttctaccgaatacctgc

SEQ ID NO: 359048 - DNA, 25 bp, Artificial
  probe
  misc_feature (1)..(25): SEQ ID NO: 3583; WAN0249JJ; Start 72; Stop 96
gccttctaccgaatacctgcgttat

SEQ ID NO: 359049 - DNA, 25 bp, Artificial
  probe
  misc_feature (1)..(25): SEQ ID NO: 3583; WAN0249JJ; Start 4; Stop 28
tatgcaagtagaaagggctggattt

SEQ ID NO: 359050 - DNA, 25 bp, Artificial
  probe
  misc_feature (1)..(25): SEQ ID NO: 3583; WAN0249JJ; Start 3; Stop 27
ctatgcaagtagaaagggctggatt

SEQ ID NO: 359051 - DNA, 25 bp, Artificial
  probe
  misc_feature (1)..(25): SEQ ID NO: 3583; WAN0249JJ; Start 122; Stop 146
cattcaaactatcaaggaggggata

SEQ ID NO: 359052 - DNA, 25 bp, Artificial
  probe
  misc_feature (1)..(25): SEQ ID NO: 3583; WAN0249JJ; Start 119; Stop 143
tagcattcaaactatcaaggagggg

SEQ ID NO: 359053 - DNA, 25 bp, Artificial
  probe
  misc_feature (1)..(25): SEQ ID NO: 3583; WAN0249JJ; Start 79; Stop 103
accgaatacctgcgttatactagta

SEQ ID NO: 359054 - DNA, 25 bp, Artificial
  probe
  misc_feature (1)..(25): SEQ ID NO: 3583; WAN0249JJ; Start 116; Stop 140
ttttagcattcaaactatcaaggag

SEQ ID NO: 359055 - DNA, 25 bp, Artificial
  probe
  misc_feature (1)..(25): SEQ ID NO: 3583; WAN0249JJ; Start 121; Stop 145
gcattcaaactatcaaggaggggat

SEQ ID NO: 359056 - DNA, 25 bp, Artificial
  probe
  misc_feature (1)..(25): SEQ ID NO: 3583; WAN0249JJ; Start 2; Stop 26
actatgcaagtagaaagggctggat

SEQ ID NO: 359057 - DNA, 25 bp, Artificial
  probe
  misc_feature (1)..(25): SEQ ID NO: 3583; WAN0249JJ; Start 120; Stop 144
agcattcaaactatcaaggagggga

SEQ ID NO: 359058 - DNA, 25 bp, Artificial
  probe
  misc_feature (1)..(25): SEQ ID NO: 3583; WAN0249JJ; Start 1; Stop 25
gactatgcaagtagaaagggctgga

SEQ ID NO: 359059 - DNA, 25 bp, Artificial
  probe
  misc_feature (1)..(25): SEQ ID NO: 3583; WAN0249JJ; Start 5; Stop 29
atgcaagtagaaagggctggatttt

SEQ ID NO: 359060 - DNA, 25 bp, Artificial
  probe
  misc_feature (1)..(25): SEQ ID NO: 3584; WAN024F9S; Start 32; Stop 56
cttttaatcaatgggtcactggttc

SEQ ID NO: 359061 - DNA, 25 bp, Artificial
  probe
  misc_feature (1)..(25): SEQ ID NO: 3584; WAN024F9S; Start 31; Stop 55
acttttaatcaatgggtcactggtt

SEQ ID NO: 359062 - DNA, 25 bp, Artificial
  probe
  misc_feature (1)..(25): SEQ ID NO: 3584; WAN024F9S; Start 34; Stop 58
tttaatcaatgggtcactggttcga

SEQ ID NO: 359063 - DNA, 25 bp, Artificial
  probe
  misc_feature (1)..(25): SEQ ID NO: 3584; WAN024F9S; Start 35; Stop 59
ttaatcaatgggtcactggttcgag

SEQ ID NO: 359064 - DNA, 25 bp, Artificial
  probe
  misc_feature (1)..(25): SEQ ID NO: 3584; WAN024F9S; Start 33; Stop 57
ttttaatcaatgggtcactggttcg

SEQ ID NO: 359065 - DNA, 25 bp, Artificial
  probe
  misc_feature (1)..(25): SEQ ID NO: 3584; WAN024F9S; Start 30; Stop 54
gacttttaatcaatgggtcactggt

SEQ ID NO: 359066 - DNA, 25 bp, Artificial
  probe
  misc_feature (1)..(25): SEQ ID NO: 3584; WAN024F9S; Start 11; Stop 35
ctcagttggtagagcaattgacttt

SEQ ID NO: 359067 - DNA, 25 bp, Artificial
  probe
  misc_feature (1)..(25): SEQ ID NO: 3584; WAN024F9S; Start 13; Stop 37
cagttggtagagcaattgactttta

SEQ ID NO: 359068 - DNA, 25 bp, Artificial
  probe
  misc_feature (1)..(25): SEQ ID NO: 3584; WAN024F9S; Start 12; Stop 36
tcagttggtagagcaattgactttt

SEQ ID NO: 359069 - DNA, 25 bp, Artificial
  probe
  misc_feature (1)..(25): SEQ ID NO: 3584; WAN024F9S; Start 14; Stop 38
agttggtagagcaattgacttttaa

SEQ ID NO: 359070 - DNA, 25 bp, Artificial
  probe
  misc_feature (1)..(25): SEQ ID NO: 3584; WAN024F9S; Start 17; Stop 41
tggtagagcaattgacttttaatca

SEQ ID NO: 359071 - DNA, 25 bp, Artificial
  probe
  misc_feature (1)..(25): SEQ ID NO: 3584; WAN024F9S; Start 36; Stop 60
taatcaatgggtcactggttcgagc

SEQ ID NO: 359072 - DNA, 25 bp, Artificial
  probe
  misc_feature (1)..(25): SEQ ID NO: 3584; WAN024F9S; Start 15; Stop 39
gttggtagagcaattgacttttaat

SEQ ID NO: 359073 - DNA, 25 bp, Artificial
  probe
  misc_feature (1)..(25): SEQ ID NO: 3584; WAN024F9S; Start 16; Stop 40
ttggtagagcaattgacttttaatc

SEQ ID NO: 359074 - DNA, 25 bp, Artificial
  probe
  misc_feature (1)..(25): SEQ ID NO: 3584; WAN024F9S; Start 28; Stop 52
ttgacttttaatcaatgggtcactg

SEQ ID NO: 359075 - DNA, 25 bp, Artificial
  probe
  misc_feature (1)..(25): SEQ ID NO: 3584; WAN024F9S; Start 29; Stop 53
tgacttttaatcaatgggtcactgg

SEQ ID NO: 359076 - DNA, 25 bp, Artificial
  probe
  misc_feature (1)..(25): SEQ ID NO: 3584; WAN024F9S; Start 18; Stop 42
ggtagagcaattgacttttaatcaa

SEQ ID NO: 359077 - DNA, 25 bp, Artificial
  probe
  misc_feature (1)..(25): SEQ ID NO: 3584; WAN024F9S; Start 27; Stop 51
attgacttttaatcaatgggtcact

SEQ ID NO: 359078 - DNA, 25 bp, Artificial
  probe
  misc_feature (1)..(25): SEQ ID NO: 3584; WAN024F9S; Start 26; Stop 50
aattgacttttaatcaatgggtcac

SEQ ID NO: 359079 - DNA, 25 bp, Artificial
  probe
  misc_feature (1)..(25): SEQ ID NO: 3584; WAN024F9S; Start 23; Stop 47
agcaattgacttttaatcaatgggt

SEQ ID NO: 359080 - DNA, 25 bp, Artificial
  probe
  misc_feature (1)..(25): SEQ ID NO: 3584; WAN024F9S; Start 24; Stop 48
gcaattgacttttaatcaatgggtc

SEQ ID NO: 359081 - DNA, 25 bp, Artificial
  probe
  misc_feature (1)..(25): SEQ ID NO: 3584; WAN024F9S; Start 22; Stop 46
gagcaattgacttttaatcaatggg

SEQ ID NO: 359082 - DNA, 25 bp, Artificial
  probe
  misc_feature (1)..(25): SEQ ID NO: 3584; WAN024F9S; Start 25; Stop 49
caattgacttttaatcaatgggtca

SEQ ID NO: 359083 - DNA, 25 bp, Artificial
  probe
  misc_feature (1)..(25): SEQ ID NO: 3584; WAN024F9S; Start 21; Stop 45
agagcaattgacttttaatcaatgg

SEQ ID NO: 359084 - DNA, 25 bp, Artificial
  probe
  misc_feature (1)..(25): SEQ ID NO: 3584; WAN024F9S; Start 20; Stop 44
tagagcaattgacttttaatcaatg

SEQ ID NO: 359085 - DNA, 25 bp, Artificial
  probe
  misc_feature (1)..(25): SEQ ID NO: 3584; WAN024F9S; Start 19; Stop 43
gtagagcaattgacttttaatcaat

SEQ ID NO: 359086 - DNA, 25 bp, Artificial
  probe
  misc_feature (1)..(25): SEQ ID NO: 3585; WAN0249DH; Start 155; Stop 179
tcagtaattcaaacatatggaggca

SEQ ID NO: 359087 - DNA, 25 bp, Artificial
  probe
  misc_feature (1)..(25): SEQ ID NO: 3585; WAN0249DH; Start 156; Stop 180
cagtaattcaaacatatggaggcaa

SEQ ID NO: 359088 - DNA, 25 bp, Artificial
  probe
  misc_feature (1)..(25): SEQ ID NO: 3585; WAN0249DH; Start 154; Stop 178
ttcagtaattcaaacatatggaggc

SEQ ID NO: 359089 - DNA, 25 bp, Artificial
  probe
  misc_feature (1)..(25): SEQ ID NO: 3585; WAN0249DH; Start 157; Stop 181
agtaattcaaacatatggaggcaaa

SEQ ID NO: 359090 - DNA, 25 bp, Artificial
  probe
  misc_feature (1)..(25): SEQ ID NO: 3585; WAN0249DH; Start 135; Stop 159
aagctagtcagtttatactttcagt

SEQ ID NO: 359091 - DNA, 25 bp, Artificial
  probe
  misc_feature (1)..(25): SEQ ID NO: 3585; WAN0249DH; Start 158; Stop 182
gtaattcaaacatatggaggcaaat

SEQ ID NO: 359092 - DNA, 25 bp, Artificial
  probe
  misc_feature (1)..(25): SEQ ID NO: 3585; WAN0249DH; Start 76; Stop 100
cacaatttcaaaagagttatccaca

SEQ ID NO: 359093 - DNA, 25 bp, Artificial
  probe
  misc_feature (1)..(25): SEQ ID NO: 3585; WAN0249DH; Start 78; Stop 102
caatttcaaaagagttatccacagt

SEQ ID NO: 359094 - DNA, 25 bp, Artificial
  probe
  misc_feature (1)..(25): SEQ ID NO: 3585; WAN0249DH; Start 77; Stop 101
acaatttcaaaagagttatccacag

SEQ ID NO: 359095 - DNA, 25 bp, Artificial
  probe
  misc_feature (1)..(25): SEQ ID NO: 3585; WAN0249DH; Start 75; Stop 99
tcacaatttcaaaagagttatccac

SEQ ID NO: 359096 - DNA, 25 bp, Artificial
  probe
  misc_feature (1)..(25): SEQ ID NO: 3585; WAN0249DH; Start 153; Stop 177
tttcagtaattcaaacatatggagg

SEQ ID NO: 359097 - DNA, 25 bp, Artificial
  probe
  misc_feature (1)..(25): SEQ ID NO: 3585; WAN0249DH; Start 80; Stop 104
atttcaaaagagttatccacagttt

SEQ ID NO: 359098 - DNA, 25 bp, Artificial
  probe
  misc_feature (1)..(25): SEQ ID NO: 3585; WAN0249DH; Start 79; Stop 103
aatttcaaaagagttatccacagtt

SEQ ID NO: 359099 - DNA, 25 bp, Artificial
  probe
  misc_feature (1)..(25): SEQ ID NO: 3585; WAN0249DH; Start 74; Stop 98
atcacaatttcaaaagagttatcca

SEQ ID NO: 359100 - DNA, 25 bp, Artificial
  probe
  misc_feature (1)..(25): SEQ ID NO: 3585; WAN0249DH; Start 137; Stop 161
gctagtcagtttatactttcagtaa

SEQ ID NO: 359101 - DNA, 25 bp, Artificial
  probe
  misc_feature (1)..(25): SEQ ID NO: 3585; WAN0249DH; Start 136; Stop 160
agctagtcagtttatactttcagta

SEQ ID NO: 359102 - DNA, 25 bp, Artificial
  probe
  misc_feature (1)..(25): SEQ ID NO: 3585; WAN0249DH; Start 134; Stop 158
taagctagtcagtttatactttcag

SEQ ID NO: 359103 - DNA, 25 bp, Artificial
  probe
  misc_feature (1)..(25): SEQ ID NO: 3585; WAN0249DH; Start 151; Stop 175
actttcagtaattcaaacatatgga

SEQ ID NO: 359104 - DNA, 25 bp, Artificial
  probe
  misc_feature (1)..(25): SEQ ID NO: 3585; WAN0249DH; Start 82; Stop 106
ttcaaaagagttatccacagtttgt

SEQ ID NO: 359105 - DNA, 25 bp, Artificial
  probe
  misc_feature (1)..(25): SEQ ID NO: 3585; WAN0249DH; Start 152; Stop 176
ctttcagtaattcaaacatatggag

SEQ ID NO: 359106 - DNA, 25 bp, Artificial
  probe
  misc_feature (1)..(25): SEQ ID NO: 3585; WAN0249DH; Start 73; Stop 97
aatcacaatttcaaaagagttatcc

SEQ ID NO: 359107 - DNA, 25 bp, Artificial
  probe
  misc_feature (1)..(25): SEQ ID NO: 3585; WAN0249DH; Start 81; Stop 105
tttcaaaagagttatccacagtttg

SEQ ID NO: 359108 - DNA, 25 bp, Artificial
  probe
  misc_feature (1)..(25): SEQ ID NO: 3585; WAN0249DH; Start 133; Stop 157
ttaagctagtcagtttatactttca

SEQ ID NO: 359109 - DNA, 25 bp, Artificial
  probe
  misc_feature (1)..(25): SEQ ID NO: 3585; WAN0249DH; Start 87; Stop 111
aagagttatccacagtttgtgtaaa

SEQ ID NO: 359110 - DNA, 25 bp, Artificial
  probe
  misc_feature (1)..(25): SEQ ID NO: 3585; WAN0249DH; Start 86; Stop 110
aaagagttatccacagtttgtgtaa

SEQ ID NO: 359111 - DNA, 25 bp, Artificial
  probe
  misc_feature (1)..(25): SEQ ID NO: 3585; WAN0249DH; Start 141; Stop 165
gtcagtttatactttcagtaattca

SEQ ID NO: 359112 - DNA, 25 bp, Artificial
  probe
  misc_feature (1)..(25): SEQ ID NO: 3585; WAN0249DH; Start 69; Stop 93
agaaaatcacaatttcaaaagagtt

SEQ ID NO: 359113 - DNA, 25 bp, Artificial
  probe
  misc_feature (1)..(25): SEQ ID NO: 3585; WAN0249DH; Start 68; Stop 92
aagaaaatcacaatttcaaaagagt

SEQ ID NO: 359114 - DNA, 25 bp, Artificial
  probe
  misc_feature (1)..(25): SEQ ID NO: 3585; WAN0249DH; Start 103; Stop 127
ttgtgtaaaacttttgtgtttaagt

SEQ ID NO: 359115 - DNA, 25 bp, Artificial
  probe
  misc_feature (1)..(25): SEQ ID NO: 3585; WAN0249DH; Start 84; Stop 108
caaaagagttatccacagtttgtgt

SEQ ID NO: 359116 - DNA, 25 bp, Artificial
  probe
  misc_feature (1)..(25): SEQ ID NO: 3585; WAN0249DH; Start 83; Stop 107
tcaaaagagttatccacagtttgtg

SEQ ID NO: 359117 - DNA, 25 bp, Artificial
  probe
  misc_feature (1)..(25): SEQ ID NO: 3585; WAN0249DH; Start 150; Stop 174
tactttcagtaattcaaacatatgg

SEQ ID NO: 359118 - DNA, 25 bp, Artificial
  probe
  misc_feature (1)..(25): SEQ ID NO: 3585; WAN0249DH; Start 101; Stop 125
gtttgtgtaaaacttttgtgtttaa

SEQ ID NO: 359119 - DNA, 25 bp, Artificial
  probe
  misc_feature (1)..(25): SEQ ID NO: 3586; WAN024GLC-3; Start 2; Stop 26
actgaaggtggagaaggtattgaag

SEQ ID NO: 359120 - DNA, 25 bp, Artificial
  probe
  misc_feature (1)..(25): SEQ ID NO: 3586; WAN024GLC-3; Start 1; Stop 25
gactgaaggtggagaaggtattgaa

SEQ ID NO: 359121 - DNA, 25 bp, Artificial
  probe
  misc_feature (1)..(25): SEQ ID NO: 3586; WAN024GLC-3; Start 3; Stop 27
ctgaaggtggagaaggtattgaagg

SEQ ID NO: 359122 - DNA, 25 bp, Artificial
  probe
  misc_feature (1)..(25): SEQ ID NO: 3586; WAN024GLC-3; Start 4; Stop 28
tgaaggtggagaaggtattgaaggt

SEQ ID NO: 359123 - DNA, 25 bp, Artificial
  probe
  misc_feature (1)..(25): SEQ ID NO: 3586; WAN024GLC-3; Start 1407; Stop 1431
atggtcaagagaaatttacggaaga

SEQ ID NO: 359124 - DNA, 25 bp, Artificial
  probe
  misc_feature (1)..(25): SEQ ID NO: 3586; WAN024GLC-3; Start 1408; Stop 1432
tggtcaagagaaatttacggaagaa

SEQ ID NO: 359125 - DNA, 25 bp, Artificial
  probe
  misc_feature (1)..(25): SEQ ID NO: 3586; WAN024GLC-3; Start 1406; Stop 1430
aatggtcaagagaaatttacggaag

SEQ ID NO: 359126 - DNA, 25 bp, Artificial
  probe
  misc_feature (1)..(25): SEQ ID NO: 3586; WAN024GLC-3; Start 1405; Stop 1429
gaatggtcaagagaaatttacggaa

SEQ ID NO: 359127 - DNA, 25 bp, Artificial
  probe
  misc_feature (1)..(25): SEQ ID NO: 3586; WAN024GLC-3; Start 1409; Stop 1433
ggtcaagagaaatttacggaagaaa

SEQ ID NO: 359128 - DNA, 25 bp, Artificial
  probe
  misc_feature (1)..(25): SEQ ID NO: 3586; WAN024GLC-3; Start 1403; Stop 1427
ctgaatggtcaagagaaatttacgg

SEQ ID NO: 359129 - DNA, 25 bp, Artificial
  probe
  misc_feature (1)..(25): SEQ ID NO: 3586; WAN024GLC-3; Start 1404; Stop 1428
tgaatggtcaagagaaatttacgga

SEQ ID NO: 359130 - DNA, 25 bp, Artificial
  probe
  misc_feature (1)..(25): SEQ ID NO: 3586; WAN024GLC-3; Start 1402; Stop 1426
tctgaatggtcaagagaaatttacg

SEQ ID NO: 359131 - DNA, 25 bp, Artificial
  probe
  misc_feature (1)..(25): SEQ ID NO: 3586; WAN024GLC-3; Start 2128; Stop 2152
tgaaaatactgagatgctagttggg

SEQ ID NO: 359132 - DNA, 25 bp, Artificial
  probe
  misc_feature (1)..(25): SEQ ID NO: 3586; WAN024GLC-3; Start 2127; Stop 2151
atgaaaatactgagatgctagttgg

SEQ ID NO: 359133 - DNA, 25 bp, Artificial
  probe
  misc_feature (1)..(25): SEQ ID NO: 3586; WAN024GLC-3; Start 2129; Stop 2153
gaaaatactgagatgctagttgggg

SEQ ID NO: 359134 - DNA, 25 bp, Artificial
  probe
  misc_feature (1)..(25): SEQ ID NO: 3586; WAN024GLC-3; Start 1433; Stop 1457
aagacagagcttgatcgcttaacag

SEQ ID NO: 359135 - DNA, 25 bp, Artificial
  probe
  misc_feature (1)..(25): SEQ ID NO: 3586; WAN024GLC-3; Start 2131; Stop 2155
aaatactgagatgctagttggggaa

SEQ ID NO: 359136 - DNA, 25 bp, Artificial
  probe
  misc_feature (1)..(25): SEQ ID NO: 3586; WAN024GLC-3; Start 2130; Stop 2154
aaaatactgagatgctagttgggga

SEQ ID NO: 359137 - DNA, 25 bp, Artificial
  probe
  misc_feature (1)..(25): SEQ ID NO: 3586; WAN024GLC-3; Start 2115; Stop 2139
atcgtcaagagcatgaaaatactga

SEQ ID NO: 359138 - DNA, 25 bp, Artificial
  probe
  misc_feature (1)..(25): SEQ ID NO: 3586; WAN024GLC-3; Start 2114; Stop 2138
catcgtcaagagcatgaaaatactg

SEQ ID NO: 359139 - DNA, 25 bp, Artificial
  probe
  misc_feature (1)..(25): SEQ ID NO: 3586; WAN024GLC-3; Start 2119; Stop 2143
tcaagagcatgaaaatactgagatg

SEQ ID NO: 359140 - DNA, 25 bp, Artificial
  probe
  misc_feature (1)..(25): SEQ ID NO: 3586; WAN024GLC-3; Start 2118; Stop 2142
gtcaagagcatgaaaatactgagat

SEQ ID NO: 359141 - DNA, 25 bp, Artificial
  probe
  misc_feature (1)..(25): SEQ ID NO: 3586; WAN024GLC-3; Start 1419; Stop 1443
aatttacggaagaaaagacagagct

SEQ ID NO: 359142 - DNA, 25 bp, Artificial
  probe
  misc_feature (1)..(25): SEQ ID NO: 3586; WAN024GLC-3; Start 2117; Stop 2141
cgtcaagagcatgaaaatactgaga

SEQ ID NO: 359143 - DNA, 25 bp, Artificial
  probe
  misc_feature (1)..(25): SEQ ID NO: 3586; WAN024GLC-3; Start 2116; Stop 2140
tcgtcaagagcatgaaaatactgag

SEQ ID NO: 359144 - DNA, 25 bp, Artificial
  probe
  misc_feature (1)..(25): SEQ ID NO: 3586; WAN024GLC-3; Start 1420; Stop 1444
atttacggaagaaaagacagagctt

SEQ ID NO: 359145 - DNA, 25 bp, Artificial
  probe
  misc_feature (1)..(25): SEQ ID NO: 3586; WAN024GLC-3; Start 1418; Stop 1442
aaatttacggaagaaaagacagagc

SEQ ID NO: 359146 - DNA, 25 bp, Artificial
  probe
  misc_feature (1)..(25): SEQ ID NO: 3586; WAN024GLC-3; Start 2132; Stop 2156
aatactgagatgctagttggggaac

SEQ ID NO: 359147 - DNA, 25 bp, Artificial
  probe
  misc_feature (1)..(25): SEQ ID NO: 3586; WAN024GLC-3; Start 2126; Stop 2150
catgaaaatactgagatgctagttg

SEQ ID NO: 359148 - DNA, 25 bp, Artificial
  probe
  misc_feature (1)..(25): SEQ ID NO: 3586; WAN024GLC-3; Start 1421; Stop 1445
tttacggaagaaaagacagagcttg

SEQ ID NO: 359149 - DNA, 25 bp, Artificial
  probe
  misc_feature (1)..(25): SEQ ID NO: 3586; WAN024GLC-3; Start 1416; Stop 1440
agaaatttacggaagaaaagacaga

SEQ ID NO: 359150 - DNA, 25 bp, Artificial
  probe
  misc_feature (1)..(25): SEQ ID NO: 3586; WAN024GLC-3; Start 1414; Stop 1438
agagaaatttacggaagaaaagaca

SEQ ID NO: 359151 - DNA, 25 bp, Artificial
  probe
  misc_feature (1)..(25): SEQ ID NO: 3586; WAN024GLC-3; Start 1417; Stop 1441
gaaatttacggaagaaaagacagag

SEQ ID NO: 359152 - DNA, 25 bp, Artificial
  probe
  misc_feature (1)..(25): SEQ ID NO: 3587; WAN024ABT; Start 68; Stop 92
catagggacattctcaatcttctgt

SEQ ID NO: 359153 - DNA, 25 bp, Artificial
  probe
  misc_feature (1)..(25): SEQ ID NO: 3587; WAN024ABT; Start 103; Stop 127
tctcttctttctatgatacaatgga

SEQ ID NO: 359154 - DNA, 25 bp, Artificial
  probe
  misc_feature (1)..(25): SEQ ID NO: 3587; WAN024ABT; Start 102; Stop 126
ttctcttctttctatgatacaatgg

SEQ ID NO: 359155 - DNA, 25 bp, Artificial
  probe
  misc_feature (1)..(25): SEQ ID NO: 3587; WAN024ABT; Start 104; Stop 128
ctcttctttctatgatacaatggaa

SEQ ID NO: 359156 - DNA, 25 bp, Artificial
  probe
  misc_feature (1)..(25): SEQ ID NO: 3587; WAN024ABT; Start 75; Stop 99
acattctcaatcttctgtcttttgt

SEQ ID NO: 359157 - DNA, 25 bp, Artificial
  probe
  misc_feature (1)..(25): SEQ ID NO: 3587; WAN024ABT; Start 76; Stop 100
cattctcaatcttctgtcttttgtt

SEQ ID NO: 359158 - DNA, 25 bp, Artificial
  probe
  misc_feature (1)..(25): SEQ ID NO: 3587; WAN024ABT; Start 78; Stop 102
ttctcaatcttctgtcttttgtttt

SEQ ID NO: 359159 - DNA, 25 bp, Artificial
  probe
  misc_feature (1)..(25): SEQ ID NO: 3587; WAN024ABT; Start 77; Stop 101
attctcaatcttctgtcttttgttt

SEQ ID NO: 359160 - DNA, 25 bp, Artificial
  probe
  misc_feature (1)..(25): SEQ ID NO: 3587; WAN024ABT; Start 69; Stop 93
atagggacattctcaatcttctgtc

SEQ ID NO: 359161 - DNA, 25 bp, Artificial
  probe
  misc_feature (1)..(25): SEQ ID NO: 3587; WAN024ABT; Start 72; Stop 96
gggacattctcaatcttctgtcttt

SEQ ID NO: 359162 - DNA, 25 bp, Artificial
  probe
  misc_feature (1)..(25): SEQ ID NO: 3587; WAN024ABT; Start 70; Stop 94
tagggacattctcaatcttctgtct

SEQ ID NO: 359163 - DNA, 25 bp, Artificial
  probe
  misc_feature (1)..(25): SEQ ID NO: 3587; WAN024ABT; Start 71; Stop 95
agggacattctcaatcttctgtctt

SEQ ID NO: 359164 - DNA, 25 bp, Artificial
  probe
  misc_feature (1)..(25): SEQ ID NO: 3587; WAN024ABT; Start 40; Stop 64
cattaattcatcgataagtaaacgc

SEQ ID NO: 359165 - DNA, 25 bp, Artificial
  probe
  misc_feature (1)..(25): SEQ ID NO: 3587; WAN024ABT; Start 41; Stop 65
attaattcatcgataagtaaacgct

SEQ ID NO: 359166 - DNA, 25 bp, Artificial
  probe
  misc_feature (1)..(25): SEQ ID NO: 3587; WAN024ABT; Start 105; Stop 129
tcttctttctatgatacaatggaaa

SEQ ID NO: 359167 - DNA, 25 bp, Artificial
  probe
  misc_feature (1)..(25): SEQ ID NO: 3587; WAN024ABT; Start 42; Stop 66
ttaattcatcgataagtaaacgcta

SEQ ID NO: 359168 - DNA, 25 bp, Artificial
  probe
  misc_feature (1)..(25): SEQ ID NO: 3587; WAN024ABT; Start 73; Stop 97
ggacattctcaatcttctgtctttt

SEQ ID NO: 359169 - DNA, 25 bp, Artificial
  probe
  misc_feature (1)..(25): SEQ ID NO: 3587; WAN024ABT; Start 74; Stop 98
gacattctcaatcttctgtcttttg

SEQ ID NO: 359170 - DNA, 25 bp, Artificial
  probe
  misc_feature (1)..(25): SEQ ID NO: 3587; WAN024ABT; Start 39; Stop 63
tcattaattcatcgataagtaaacg

SEQ ID NO: 359171 - DNA, 25 bp, Artificial
  probe
  misc_feature (1)..(25): SEQ ID NO: 3587; WAN024ABT; Start 106; Stop 130
cttctttctatgatacaatggaaaa

SEQ ID NO: 359172 - DNA, 25 bp, Artificial
  probe
  misc_feature (1)..(25): SEQ ID NO: 3588; WAN024A4M; Start 21; Stop 45
gataaattcaattcgacaaacgctt

SEQ ID NO: 359173 - DNA, 25 bp, Artificial
  probe
  misc_feature (1)..(25): SEQ ID NO: 3588; WAN024A4M; Start 22; Stop 46
ataaattcaattcgacaaacgcttt

SEQ ID NO: 359174 - DNA, 25 bp, Artificial
  probe
  misc_feature (1)..(25): SEQ ID NO: 3588; WAN024A4M; Start 20; Stop 44
tgataaattcaattcgacaaacgct

SEQ ID NO: 359175 - DNA, 25 bp, Artificial
  probe
  misc_feature (1)..(25): SEQ ID NO: 3588; WAN024A4M; Start 6; Stop 30
gttggtcgcttgcttgataaattca

SEQ ID NO: 359176 - DNA, 25 bp, Artificial
  probe
  misc_feature (1)..(25): SEQ ID NO: 3588; WAN024A4M; Start 5; Stop 29
ggttggtcgcttgcttgataaattc

SEQ ID NO: 359177 - DNA, 25 bp, Artificial
  probe
  misc_feature (1)..(25): SEQ ID NO: 3588; WAN024A4M; Start 10; Stop 34
gtcgcttgcttgataaattcaattc

SEQ ID NO: 359178 - DNA, 25 bp, Artificial
  probe
  misc_feature (1)..(25): SEQ ID NO: 3588; WAN024A4M; Start 9; Stop 33
ggtcgcttgcttgataaattcaatt

SEQ ID NO: 359179 - DNA, 25 bp, Artificial
  probe
  misc_feature (1)..(25): SEQ ID NO: 3588; WAN024A4M; Start 11; Stop 35
tcgcttgcttgataaattcaattcg

SEQ ID NO: 359180 - DNA, 25 bp, Artificial
  probe
  misc_feature (1)..(25): SEQ ID NO: 3588; WAN024A4M; Start 4; Stop 28
tggttggtcgcttgcttgataaatt

SEQ ID NO: 359181 - DNA, 25 bp, Artificial
  probe
  misc_feature (1)..(25): SEQ ID NO: 3588; WAN024A4M; Start 8; Stop 32
tggtcgcttgcttgataaattcaat

SEQ ID NO: 359182 - DNA, 25 bp, Artificial
  probe
  misc_feature (1)..(25): SEQ ID NO: 3588; WAN024A4M; Start 3; Stop 27
ctggttggtcgcttgcttgataaat

SEQ ID NO: 359183 - DNA, 25 bp, Artificial
  probe
  misc_feature (1)..(25): SEQ ID NO: 3588; WAN024A4M; Start 13; Stop 37
gcttgcttgataaattcaattcgac

SEQ ID NO: 359184 - DNA, 25 bp, Artificial
  probe
  misc_feature (1)..(25): SEQ ID NO: 3588; WAN024A4M; Start 19; Stop 43
ttgataaattcaattcgacaaacgc

SEQ ID NO: 359185 - DNA, 25 bp, Artificial
  probe
  misc_feature (1)..(25): SEQ ID NO: 3588; WAN024A4M; Start 7; Stop 31
ttggtcgcttgcttgataaattcaa

SEQ ID NO: 359186 - DNA, 25 bp, Artificial
  probe
  misc_feature (1)..(25): SEQ ID NO: 3588; WAN024A4M; Start 12; Stop 36
cgcttgcttgataaattcaattcga

SEQ ID NO: 359187 - DNA, 25 bp, Artificial
  probe
  misc_feature (1)..(25): SEQ ID NO: 3588; WAN024A4M; Start 28; Stop 52
tcaattcgacaaacgcttttatagt

SEQ ID NO: 359188 - DNA, 25 bp, Artificial
  probe
  misc_feature (1)..(25): SEQ ID NO: 3588; WAN024A4M; Start 14; Stop 38
cttgcttgataaattcaattcgaca

SEQ ID NO: 359189 - DNA, 25 bp, Artificial
  probe
  misc_feature (1)..(25): SEQ ID NO: 3588; WAN024A4M; Start 24; Stop 48
aaattcaattcgacaaacgctttta

SEQ ID NO: 359190 - DNA, 25 bp, Artificial
  probe
  misc_feature (1)..(25): SEQ ID NO: 3588; WAN024A4M; Start 23; Stop 47
taaattcaattcgacaaacgctttt

SEQ ID NO: 359191 - DNA, 25 bp, Artificial
  probe
  misc_feature (1)..(25): SEQ ID NO: 3588; WAN024A4M; Start 40; Stop 64
acgcttttatagtttgttagaatgt

SEQ ID NO: 359192 - DNA, 25 bp, Artificial
  probe
  misc_feature (1)..(25): SEQ ID NO: 3588; WAN024A4M; Start 25; Stop 49
aattcaattcgacaaacgcttttat

SEQ ID NO: 359193 - DNA, 25 bp, Artificial
  probe
  misc_feature (1)..(25): SEQ ID NO: 3588; WAN024A4M; Start 27; Stop 51
ttcaattcgacaaacgcttttatag

SEQ ID NO: 359194 - DNA, 25 bp, Artificial
  probe
  misc_feature (1)..(25): SEQ ID NO: 3588; WAN024A4M; Start 29; Stop 53
caattcgacaaacgcttttatagtt

SEQ ID NO: 359195 - DNA, 25 bp, Artificial
  probe
  misc_feature (1)..(25): SEQ ID NO: 3588; WAN024A4M; Start 16; Stop 40
tgcttgataaattcaattcgacaaa

SEQ ID NO: 359196 - DNA, 25 bp, Artificial
  probe
  misc_feature (1)..(25): SEQ ID NO: 3588; WAN024A4M; Start 15; Stop 39
ttgcttgataaattcaattcgacaa

SEQ ID NO: 359197 - DNA, 25 bp, Artificial
  probe
  misc_feature (1)..(25): SEQ ID NO: 3588; WAN024A4M; Start 17; Stop 41
gcttgataaattcaattcgacaaac

SEQ ID NO: 359198 - DNA, 25 bp, Artificial
  probe
  misc_feature (1)..(25): SEQ ID NO: 3588; WAN024A4M; Start 18; Stop 42
cttgataaattcaattcgacaaacg

SEQ ID NO: 359199 - DNA, 25 bp, Artificial
  probe
  misc_feature (1)..(25): SEQ ID NO: 3588; WAN024A4M; Start 26; Stop 50
attcaattcgacaaacgcttttata

SEQ ID NO: 359200 - DNA, 25 bp, Artificial
  probe
  misc_feature (1)..(25): SEQ ID NO: 3588; WAN024A4M; Start 39; Stop 63
aacgcttttatagtttgttagaatg

SEQ ID NO: 359201 - DNA, 25 bp, Artificial
  probe
  misc_feature (1)..(25): SEQ ID NO: 3588; WAN024A4M; Start 30; Stop 54
aattcgacaaacgcttttatagttt

SEQ ID NO: 359202 - DNA, 25 bp, Artificial
  probe
  misc_feature (1)..(25): SEQ ID NO: 3588; WAN024A4M; Start 41; Stop 65
cgcttttatagtttgttagaatgta

SEQ ID NO: 359203 - DNA, 25 bp, Artificial
  probe
  misc_feature (1)..(25): SEQ ID NO: 3588; WAN024A4M; Start 38; Stop 62
aaacgcttttatagtttgttagaat

SEQ ID NO: 359204 - DNA, 25 bp, Artificial
  probe
  misc_feature (1)..(25): SEQ ID NO: 3589; WAN0249HO; Start 59; Stop 83
atgctcaagtctaagatacaaaggg

SEQ ID NO: 359205 - DNA, 25 bp, Artificial
  probe
  misc_feature (1)..(25): SEQ ID NO: 3589; WAN0249HO; Start 159; Stop 183
agtttagcccgtgttcaattagatt

SEQ ID NO: 359206 - DNA, 25 bp, Artificial
  probe
  misc_feature (1)..(25): SEQ ID NO: 3589; WAN0249HO; Start 158; Stop 182
gagtttagcccgtgttcaattagat

SEQ ID NO: 359207 - DNA, 25 bp, Artificial
  probe
  misc_feature (1)..(25): SEQ ID NO: 3589; WAN0249HO; Start 69; Stop 93
ctaagatacaaagggcgtcaaactc

SEQ ID NO: 359208 - DNA, 25 bp, Artificial
  probe
  misc_feature (1)..(25): SEQ ID NO: 3589; WAN0249HO; Start 125; Stop 149
agcagacactaggaagtttatcttt

SEQ ID NO: 359209 - DNA, 25 bp, Artificial
  probe
  misc_feature (1)..(25): SEQ ID NO: 3589; WAN0249HO; Start 68; Stop 92
tctaagatacaaagggcgtcaaact

SEQ ID NO: 359210 - DNA, 25 bp, Artificial
  probe
  misc_feature (1)..(25): SEQ ID NO: 3589; WAN0249HO; Start 67; Stop 91
gtctaagatacaaagggcgtcaaac

SEQ ID NO: 359211 - DNA, 25 bp, Artificial
  probe
  misc_feature (1)..(25): SEQ ID NO: 3589; WAN0249HO; Start 66; Stop 90
agtctaagatacaaagggcgtcaaa

SEQ ID NO: 359212 - DNA, 25 bp, Artificial
  probe
  misc_feature (1)..(25): SEQ ID NO: 3589; WAN0249HO; Start 65; Stop 89
aagtctaagatacaaagggcgtcaa

SEQ ID NO: 359213 - DNA, 25 bp, Artificial
  probe
  misc_feature (1)..(25): SEQ ID NO: 3589; WAN0249HO; Start 58; Stop 82
tatgctcaagtctaagatacaaagg

SEQ ID NO: 359214 - DNA, 25 bp, Artificial
  probe
  misc_feature (1)..(25): SEQ ID NO: 3589; WAN0249HO; Start 124; Stop 148
tagcagacactaggaagtttatctt

SEQ ID NO: 359215 - DNA, 25 bp, Artificial
  probe
  misc_feature (1)..(25): SEQ ID NO: 3589; WAN0249HO; Start 70; Stop 94
taagatacaaagggcgtcaaactca

SEQ ID NO: 359216 - DNA, 25 bp, Artificial
  probe
  misc_feature (1)..(25): SEQ ID NO: 3589; WAN0249HO; Start 63; Stop 87
tcaagtctaagatacaaagggcgtc

SEQ ID NO: 359217 - DNA, 25 bp, Artificial
  probe
  misc_feature (1)..(25): SEQ ID NO: 3589; WAN0249HO; Start 62; Stop 86
ctcaagtctaagatacaaagggcgt

SEQ ID NO: 359218 - DNA, 25 bp, Artificial
  probe
  misc_feature (1)..(25): SEQ ID NO: 3589; WAN0249HO; Start 175; Stop 199
aattagattgaaacaccagcctctg

SEQ ID NO: 359219 - DNA, 25 bp, Artificial
  probe
  misc_feature (1)..(25): SEQ ID NO: 3589; WAN0249HO; Start 64; Stop 88
caagtctaagatacaaagggcgtca

SEQ ID NO: 359220 - DNA, 25 bp, Artificial
  probe
  misc_feature (1)..(25): SEQ ID NO: 3589; WAN0249HO; Start 60; Stop 84
tgctcaagtctaagatacaaagggc

SEQ ID NO: 359221 - DNA, 25 bp, Artificial
  probe
  misc_feature (1)..(25): SEQ ID NO: 3589; WAN0249HO; Start 122; Stop 146
tctagcagacactaggaagtttatc

SEQ ID NO: 359222 - DNA, 25 bp, Artificial
  probe
  misc_feature (1)..(25): SEQ ID NO: 3589; WAN0249HO; Start 123; Stop 147
ctagcagacactaggaagtttatct

SEQ ID NO: 359223 - DNA, 25 bp, Artificial
  probe
  misc_feature (1)..(25): SEQ ID NO: 3589; WAN0249HO; Start 71; Stop 95
aagatacaaagggcgtcaaactcaa

SEQ ID NO: 359224 - DNA, 25 bp, Artificial
  probe
  misc_feature (1)..(25): SEQ ID NO: 3589; WAN0249HO; Start 160; Stop 184
gtttagcccgtgttcaattagattg

SEQ ID NO: 359225 - DNA, 25 bp, Artificial
  probe
  misc_feature (1)..(25): SEQ ID NO: 3589; WAN0249HO; Start 157; Stop 181
cgagtttagcccgtgttcaattaga

SEQ ID NO: 359226 - DNA, 25 bp, Artificial
  probe
  misc_feature (1)..(25): SEQ ID NO: 3589; WAN0249HO; Start 174; Stop 198
caattagattgaaacaccagcctct

SEQ ID NO: 359227 - DNA, 25 bp, Artificial
  probe
  misc_feature (1)..(25): SEQ ID NO: 3589; WAN0249HO; Start 57; Stop 81
ttatgctcaagtctaagatacaaag

SEQ ID NO: 359228 - DNA, 25 bp, Artificial
  probe
  misc_feature (1)..(25): SEQ ID NO: 3589; WAN0249HO; Start 61; Stop 85
gctcaagtctaagatacaaagggcg

SEQ ID NO: 359229 - DNA, 25 bp, Artificial
  probe
  misc_feature (1)..(25): SEQ ID NO: 3589; WAN0249HO; Start 72; Stop 96
agatacaaagggcgtcaaactcaac

SEQ ID NO: 359230 - DNA, 25 bp, Artificial
  probe
  misc_feature (1)..(25): SEQ ID NO: 3589; WAN0249HO; Start 56; Stop 80
tttatgctcaagtctaagatacaaa

SEQ ID NO: 359231 - DNA, 25 bp, Artificial
  probe
  misc_feature (1)..(25): SEQ ID NO: 3589; WAN0249HO; Start 176; Stop 200
attagattgaaacaccagcctctgc

SEQ ID NO: 359232 - DNA, 25 bp, Artificial
  probe
  misc_feature (1)..(25): SEQ ID NO: 3589; WAN0249HO; Start 126; Stop 150
gcagacactaggaagtttatctttt

SEQ ID NO: 359233 - DNA, 25 bp, Artificial
  probe
  misc_feature (1)..(25): SEQ ID NO: 3589; WAN0249HO; Start 156; Stop 180
ccgagtttagcccgtgttcaattag

SEQ ID NO: 359234 - DNA, 25 bp, Artificial
  probe
  misc_feature (1)..(25): SEQ ID NO: 3589; WAN0249HO; Start 121; Stop 145
gtctagcagacactaggaagtttat

SEQ ID NO: 359235 - DNA, 25 bp, Artificial
  probe
  misc_feature (1)..(25): SEQ ID NO: 3589; WAN0249HO; Start 155; Stop 179
accgagtttagcccgtgttcaatta

SEQ ID NO: 359236 - DNA, 25 bp, Artificial
  probe
  misc_feature (1)..(25): SEQ ID NO: 3589; WAN0249HO; Start 89; Stop 113
aactcaacgtgaaaataggaaactg

SEQ ID NO: 359237 - DNA, 25 bp, Artificial
  probe
  misc_feature (1)..(25): SEQ ID NO: 3590; WAN0249VG; Start 93; Stop 117
acgaaatcataagaggtctgaaact

SEQ ID NO: 359238 - DNA, 25 bp, Artificial
  probe
  misc_feature (1)..(25): SEQ ID NO: 3590; WAN0249VG; Start 73; Stop 97
ttgatgacattcaggctgatacgaa

SEQ ID NO: 359239 - DNA, 25 bp, Artificial
  probe
  misc_feature (1)..(25): SEQ ID NO: 3590; WAN0249VG; Start 92; Stop 116
tacgaaatcataagaggtctgaaac

SEQ ID NO: 359240 - DNA, 25 bp, Artificial
  probe
  misc_feature (1)..(25): SEQ ID NO: 3590; WAN0249VG; Start 94; Stop 118
cgaaatcataagaggtctgaaacta

SEQ ID NO: 359241 - DNA, 25 bp, Artificial
  probe
  misc_feature (1)..(25): SEQ ID NO: 3590; WAN0249VG; Start 90; Stop 114
gatacgaaatcataagaggtctgaa

SEQ ID NO: 359242 - DNA, 25 bp, Artificial
  probe
  misc_feature (1)..(25): SEQ ID NO: 3590; WAN0249VG; Start 76; Stop 100
atgacattcaggctgatacgaaatc

SEQ ID NO: 359243 - DNA, 25 bp, Artificial
  probe
  misc_feature (1)..(25): SEQ ID NO: 3590; WAN0249VG; Start 75; Stop 99
gatgacattcaggctgatacgaaat

SEQ ID NO: 359244 - DNA, 25 bp, Artificial
  probe
  misc_feature (1)..(25): SEQ ID NO: 3590; WAN0249VG; Start 91; Stop 115
atacgaaatcataagaggtctgaaa

SEQ ID NO: 359245 - DNA, 25 bp, Artificial
  probe
  misc_feature (1)..(25): SEQ ID NO: 3590; WAN0249VG; Start 98; Stop 122
atcataagaggtctgaaactacttt

SEQ ID NO: 359246 - DNA, 25 bp, Artificial
  probe
  misc_feature (1)..(25): SEQ ID NO: 3590; WAN0249VG; Start 97; Stop 121
aatcataagaggtctgaaactactt

SEQ ID NO: 359247 - DNA, 25 bp, Artificial
  probe
  misc_feature (1)..(25): SEQ ID NO: 3590; WAN0249VG; Start 96; Stop 120
aaatcataagaggtctgaaactact

SEQ ID NO: 359248 - DNA, 25 bp, Artificial
  probe
  misc_feature (1)..(25): SEQ ID NO: 3590; WAN0249VG; Start 95; Stop 119
gaaatcataagaggtctgaaactac

SEQ ID NO: 359249 - DNA, 25 bp, Artificial
  probe
  misc_feature (1)..(25): SEQ ID NO: 3590; WAN0249VG; Start 74; Stop 98
tgatgacattcaggctgatacgaaa

SEQ ID NO: 359250 - DNA, 25 bp, Artificial
  probe
  misc_feature (1)..(25): SEQ ID NO: 3590; WAN0249VG; Start 72; Stop 96
tttgatgacattcaggctgatacga

SEQ ID NO: 359251 - DNA, 25 bp, Artificial
  probe
  misc_feature (1)..(25): SEQ ID NO: 3590; WAN0249VG; Start 87; Stop 111
gctgatacgaaatcataagaggtct

SEQ ID NO: 359252 - DNA, 25 bp, Artificial
  probe
  misc_feature (1)..(25): SEQ ID NO: 3590; WAN0249VG; Start 34; Stop 58
tagaaggagatagcaggttttcaag

SEQ ID NO: 359253 - DNA, 25 bp, Artificial
  probe
  misc_feature (1)..(25): SEQ ID NO: 3590; WAN0249VG; Start 89; Stop 113
tgatacgaaatcataagaggtctga

SEQ ID NO: 359254 - DNA, 25 bp, Artificial
  probe
  misc_feature (1)..(25): SEQ ID NO: 3590; WAN0249VG; Start 33; Stop 57
atagaaggagatagcaggttttcaa

SEQ ID NO: 359255 - DNA, 25 bp, Artificial
  probe
  misc_feature (1)..(25): SEQ ID NO: 3590; WAN0249VG; Start 32; Stop 56
aatagaaggagatagcaggttttca

SEQ ID NO: 359256 - DNA, 25 bp, Artificial
  probe
  misc_feature (1)..(25): SEQ ID NO: 3590; WAN0249VG; Start 88; Stop 112
ctgatacgaaatcataagaggtctg

SEQ ID NO: 359257 - DNA, 25 bp, Artificial
  probe
  misc_feature (1)..(25): SEQ ID NO: 3590; WAN0249VG; Start 86; Stop 110
ggctgatacgaaatcataagaggtc

SEQ ID NO: 359258 - DNA, 25 bp, Artificial
  probe
  misc_feature (1)..(25): SEQ ID NO: 3590; WAN0249VG; Start 84; Stop 108
caggctgatacgaaatcataagagg

SEQ ID NO: 359259 - DNA, 25 bp, Artificial
  probe
  misc_feature (1)..(25): SEQ ID NO: 3590; WAN0249VG; Start 83; Stop 107
tcaggctgatacgaaatcataagag

SEQ ID NO: 359260 - DNA, 25 bp, Artificial
  probe
  misc_feature (1)..(25): SEQ ID NO: 3590; WAN0249VG; Start 82; Stop 106
ttcaggctgatacgaaatcataaga

SEQ ID NO: 359261 - DNA, 25 bp, Artificial
  probe
  misc_feature (1)..(25): SEQ ID NO: 3590; WAN0249VG; Start 79; Stop 103
acattcaggctgatacgaaatcata

SEQ ID NO: 359262 - DNA, 25 bp, Artificial
  probe
  misc_feature (1)..(25): SEQ ID NO: 3590; WAN0249VG; Start 99; Stop 123
tcataagaggtctgaaactactttc

SEQ ID NO: 359263 - DNA, 25 bp, Artificial
  probe
  misc_feature (1)..(25): SEQ ID NO: 3590; WAN0249VG; Start 85; Stop 109
aggctgatacgaaatcataagaggt

SEQ ID NO: 359264 - DNA, 25 bp, Artificial
  probe
  misc_feature (1)..(25): SEQ ID NO: 3590; WAN0249VG; Start 80; Stop 104
cattcaggctgatacgaaatcataa

SEQ ID NO: 359265 - DNA, 25 bp, Artificial
  probe
  misc_feature (1)..(25): SEQ ID NO: 3590; WAN0249VG; Start 81; Stop 105
attcaggctgatacgaaatcataag

SEQ ID NO: 359266 - DNA, 25 bp, Artificial
  probe
  misc_feature (1)..(25): SEQ ID NO: 3590; WAN0249VG; Start 31; Stop 55
aaatagaaggagatagcaggttttc

SEQ ID NO: 359267 - DNA, 25 bp, Artificial
  probe
  misc_feature (1)..(25): SEQ ID NO: 3590; WAN0249VG; Start 78; Stop 102
gacattcaggctgatacgaaatcat

SEQ ID NO: 359268 - DNA, 25 bp, Artificial
  probe
  misc_feature (1)..(25): SEQ ID NO: 3590; WAN0249VG; Start 77; Stop 101
tgacattcaggctgatacgaaatca

SEQ ID NO: 359269 - DNA, 25 bp, Artificial
  probe
  misc_feature (1)..(25): SEQ ID NO: 3590; WAN0249VG; Start 71; Stop 95
ttttgatgacattcaggctgatacg

SEQ ID NO: 359270 - DNA, 25 bp, Artificial
  probe
  misc_feature (1)..(25): SEQ ID NO: 3591; WAN0249PK; Start 52; Stop 76
tgttcttgtcaaatcatatctgaaa

SEQ ID NO: 359271 - DNA, 25 bp, Artificial
  probe
  misc_feature (1)..(25): SEQ ID NO: 3591; WAN0249PK; Start 198; Stop 222
aaaagcaatctggatagagaaaacg

SEQ ID NO: 359272 - DNA, 25 bp, Artificial
  probe
  misc_feature (1)..(25): SEQ ID NO: 3591; WAN0249PK; Start 51; Stop 75
atgttcttgtcaaatcatatctgaa

SEQ ID NO: 359273 - DNA, 25 bp, Artificial
  probe
  misc_feature (1)..(25): SEQ ID NO: 3591; WAN0249PK; Start 50; Stop 74
aatgttcttgtcaaatcatatctga

SEQ ID NO: 359274 - DNA, 25 bp, Artificial
  probe
  misc_feature (1)..(25): SEQ ID NO: 3591; WAN0249PK; Start 49; Stop 73
gaatgttcttgtcaaatcatatctg

SEQ ID NO: 359275 - DNA, 25 bp, Artificial
  probe
  misc_feature (1)..(25): SEQ ID NO: 3591; WAN0249PK; Start 48; Stop 72
agaatgttcttgtcaaatcatatct

SEQ ID NO: 359276 - DNA, 25 bp, Artificial
  probe
  misc_feature (1)..(25): SEQ ID NO: 3591; WAN0249PK; Start 199; Stop 223
aaagcaatctggatagagaaaacgt

SEQ ID NO: 359277 - DNA, 25 bp, Artificial
  probe
  misc_feature (1)..(25): SEQ ID NO: 3591; WAN0249PK; Start 200; Stop 224
aagcaatctggatagagaaaacgtc

SEQ ID NO: 359278 - DNA, 25 bp, Artificial
  probe
  misc_feature (1)..(25): SEQ ID NO: 3591; WAN0249PK; Start 30; Stop 54
acacggttctacaataaaagaatgt

SEQ ID NO: 359279 - DNA, 25 bp, Artificial
  probe
  misc_feature (1)..(25): SEQ ID NO: 3591; WAN0249PK; Start 201; Stop 225
agcaatctggatagagaaaacgtct

SEQ ID NO: 359280 - DNA, 25 bp, Artificial
  probe
  misc_feature (1)..(25): SEQ ID NO: 3591; WAN0249PK; Start 202; Stop 226
gcaatctggatagagaaaacgtcta

SEQ ID NO: 359281 - DNA, 25 bp, Artificial
  probe
  misc_feature (1)..(25): SEQ ID NO: 3591; WAN0249PK; Start 221; Stop 245
cgtctaaatcatgttataatgaagc

SEQ ID NO: 359282 - DNA, 25 bp, Artificial
  probe
  misc_feature (1)..(25): SEQ ID NO: 3591; WAN0249PK; Start 31; Stop 55
cacggttctacaataaaagaatgtt

SEQ ID NO: 359283 - DNA, 25 bp, Artificial
  probe
  misc_feature (1)..(25): SEQ ID NO: 3591; WAN0249PK; Start 29; Stop 53
aacacggttctacaataaaagaatg

SEQ ID NO: 359284 - DNA, 25 bp, Artificial
  probe
  misc_feature (1)..(25): SEQ ID NO: 3591; WAN0249PK; Start 32; Stop 56
acggttctacaataaaagaatgttc

SEQ ID NO: 359285 - DNA, 25 bp, Artificial
  probe
  misc_feature (1)..(25): SEQ ID NO: 3591; WAN0249PK; Start 207; Stop 231
ctggatagagaaaacgtctaaatca

SEQ ID NO: 359286 - DNA, 25 bp, Artificial
  probe
  misc_feature (1)..(25): SEQ ID NO: 3591; WAN0249PK; Start 203; Stop 227
caatctggatagagaaaacgtctaa

SEQ ID NO: 359287 - DNA, 25 bp, Artificial
  probe
  misc_feature (1)..(25): SEQ ID NO: 3591; WAN0249PK; Start 206; Stop 230
tctggatagagaaaacgtctaaatc

SEQ ID NO: 359288 - DNA, 25 bp, Artificial
  probe
  misc_feature (1)..(25): SEQ ID NO: 3591; WAN0249PK; Start 33; Stop 57
cggttctacaataaaagaatgttct

SEQ ID NO: 359289 - DNA, 25 bp, Artificial
  probe
  misc_feature (1)..(25): SEQ ID NO: 3591; WAN0249PK; Start 155; Stop 179
gaggtgtactattctagtttcaata

SEQ ID NO: 359290 - DNA, 25 bp, Artificial
  probe
  misc_feature (1)..(25): SEQ ID NO: 3591; WAN0249PK; Start 208; Stop 232
tggatagagaaaacgtctaaatcat

SEQ ID NO: 359291 - DNA, 25 bp, Artificial
  probe
  misc_feature (1)..(25): SEQ ID NO: 3591; WAN0249PK; Start 204; Stop 228
aatctggatagagaaaacgtctaaa

SEQ ID NO: 359292 - DNA, 25 bp, Artificial
  probe
  misc_feature (1)..(25): SEQ ID NO: 3591; WAN0249PK; Start 26; Stop 50
tataacacggttctacaataaaaga

SEQ ID NO: 359293 - DNA, 25 bp, Artificial
  probe
  misc_feature (1)..(25): SEQ ID NO: 3591; WAN0249PK; Start 53; Stop 77
gttcttgtcaaatcatatctgaaaa

SEQ ID NO: 359294 - DNA, 25 bp, Artificial
  probe
  misc_feature (1)..(25): SEQ ID NO: 3591; WAN0249PK; Start 209; Stop 233
ggatagagaaaacgtctaaatcatg

SEQ ID NO: 359295 - DNA, 25 bp, Artificial
  probe
  misc_feature (1)..(25): SEQ ID NO: 3591; WAN0249PK; Start 205; Stop 229
atctggatagagaaaacgtctaaat

SEQ ID NO: 359296 - DNA, 25 bp, Artificial
  probe
  misc_feature (1)..(25): SEQ ID NO: 3591; WAN0249PK; Start 47; Stop 71
aagaatgttcttgtcaaatcatatc

SEQ ID NO: 359297 - DNA, 25 bp, Artificial
  probe
  misc_feature (1)..(25): SEQ ID NO: 3591; WAN0249PK; Start 213; Stop 237
agagaaaacgtctaaatcatgttat

SEQ ID NO: 359298 - DNA, 25 bp, Artificial
  probe
  misc_feature (1)..(25): SEQ ID NO: 3591; WAN0249PK; Start 28; Stop 52
taacacggttctacaataaaagaat

SEQ ID NO: 359299 - DNA, 25 bp, Artificial
  probe
  misc_feature (1)..(25): SEQ ID NO: 3591; WAN0249PK; Start 27; Stop 51
ataacacggttctacaataaaagaa

SEQ ID NO: 359300 - DNA, 25 bp, Artificial
  probe
  misc_feature (1)..(25): SEQ ID NO: 3591; WAN0249PK; Start 210; Stop 234
gatagagaaaacgtctaaatcatgt

SEQ ID NO: 359301 - DNA, 25 bp, Artificial
  probe
  misc_feature (1)..(25): SEQ ID NO: 3591; WAN0249PK; Start 156; Stop 180
aggtgtactattctagtttcaatat

SEQ ID NO: 359302 - DNA, 25 bp, Artificial
  probe
  misc_feature (1)..(25): SEQ ID NO: 3591; WAN0249PK; Start 222; Stop 246
gtctaaatcatgttataatgaagca

SEQ ID NO: 359303 - DNA, 25 bp, Artificial
  probe
  misc_feature (1)..(25): SEQ ID NO: 3592; WAN0249LG; Start 55; Stop 79
aagtttatctcttgcctagcgattt

SEQ ID NO: 359304 - DNA, 25 bp, Artificial
  probe
  misc_feature (1)..(25): SEQ ID NO: 3592; WAN0249LG; Start 54; Stop 78
aaagtttatctcttgcctagcgatt

SEQ ID NO: 359305 - DNA, 25 bp, Artificial
  probe
  misc_feature (1)..(25): SEQ ID NO: 3592; WAN0249LG; Start 50; Stop 74
tctgaaagtttatctcttgcctagc

SEQ ID NO: 359306 - DNA, 25 bp, Artificial
  probe
  misc_feature (1)..(25): SEQ ID NO: 3592; WAN0249LG; Start 56; Stop 80
agtttatctcttgcctagcgatttc

SEQ ID NO: 359307 - DNA, 25 bp, Artificial
  probe
  misc_feature (1)..(25): SEQ ID NO: 3592; WAN0249LG; Start 53; Stop 77
gaaagtttatctcttgcctagcgat

SEQ ID NO: 359308 - DNA, 25 bp, Artificial
  probe
  misc_feature (1)..(25): SEQ ID NO: 3592; WAN0249LG; Start 31; Stop 55
gatgatctctctgcggatatctgaa

SEQ ID NO: 359309 - DNA, 25 bp, Artificial
  probe
  misc_feature (1)..(25): SEQ ID NO: 3592; WAN0249LG; Start 49; Stop 73
atctgaaagtttatctcttgcctag

SEQ ID NO: 359310 - DNA, 25 bp, Artificial
  probe
  misc_feature (1)..(25): SEQ ID NO: 3592; WAN0249LG; Start 57; Stop 81
gtttatctcttgcctagcgatttcc

SEQ ID NO: 359311 - DNA, 25 bp, Artificial
  probe
  misc_feature (1)..(25): SEQ ID NO: 3592; WAN0249LG; Start 51; Stop 75
ctgaaagtttatctcttgcctagcg

SEQ ID NO: 359312 - DNA, 25 bp, Artificial
  probe
  misc_feature (1)..(25): SEQ ID NO: 3592; WAN0249LG; Start 47; Stop 71
atatctgaaagtttatctcttgcct

SEQ ID NO: 359313 - DNA, 25 bp, Artificial
  probe
  misc_feature (1)..(25): SEQ ID NO: 3592; WAN0249LG; Start 58; Stop 82
tttatctcttgcctagcgatttcca

SEQ ID NO: 359314 - DNA, 25 bp, Artificial
  probe
  misc_feature (1)..(25): SEQ ID NO: 3592; WAN0249LG; Start 52; Stop 76
tgaaagtttatctcttgcctagcga

SEQ ID NO: 359315 - DNA, 25 bp, Artificial
  probe
  misc_feature (1)..(25): SEQ ID NO: 3592; WAN0249LG; Start 37; Stop 61
ctctctgcggatatctgaaagttta

SEQ ID NO: 359316 - DNA, 25 bp, Artificial
  probe
  misc_feature (1)..(25): SEQ ID NO: 3592; WAN0249LG; Start 38; Stop 62
tctctgcggatatctgaaagtttat

SEQ ID NO: 359317 - DNA, 25 bp, Artificial
  probe
  misc_feature (1)..(25): SEQ ID NO: 3592; WAN0249LG; Start 48; Stop 72
tatctgaaagtttatctcttgccta

SEQ ID NO: 359318 - DNA, 25 bp, Artificial
  probe
  misc_feature (1)..(25): SEQ ID NO: 3592; WAN0249LG; Start 32; Stop 56
atgatctctctgcggatatctgaaa

SEQ ID NO: 359319 - DNA, 25 bp, Artificial
  probe
  misc_feature (1)..(25): SEQ ID NO: 3592; WAN0249LG; Start 35; Stop 59
atctctctgcggatatctgaaagtt

SEQ ID NO: 359320 - DNA, 25 bp, Artificial
  probe
  misc_feature (1)..(25): SEQ ID NO: 3592; WAN0249LG; Start 36; Stop 60
tctctctgcggatatctgaaagttt

SEQ ID NO: 359321 - DNA, 25 bp, Artificial
  probe
  misc_feature (1)..(25): SEQ ID NO: 3592; WAN0249LG; Start 42; Stop 66
tgcggatatctgaaagtttatctct

SEQ ID NO: 359322 - DNA, 25 bp, Artificial
  probe
  misc_feature (1)..(25): SEQ ID NO: 3592; WAN0249LG; Start 40; Stop 64
tctgcggatatctgaaagtttatct

SEQ ID NO: 359323 - DNA, 25 bp, Artificial
  probe
  misc_feature (1)..(25): SEQ ID NO: 3592; WAN0249LG; Start 41; Stop 65
ctgcggatatctgaaagtttatctc

SEQ ID NO: 359324 - DNA, 25 bp, Artificial
  probe
  misc_feature (1)..(25): SEQ ID NO: 3592; WAN0249LG; Start 39; Stop 63
ctctgcggatatctgaaagtttatc

SEQ ID NO: 359325 - DNA, 25 bp, Artificial
  probe
  misc_feature (1)..(25): SEQ ID NO: 3592; WAN0249LG; Start 34; Stop 58
gatctctctgcggatatctgaaagt

SEQ ID NO: 359326 - DNA, 25 bp, Artificial
  probe
  misc_feature (1)..(25): SEQ ID NO: 3592; WAN0249LG; Start 33; Stop 57
tgatctctctgcggatatctgaaag

SEQ ID NO: 359327 - DNA, 25 bp, Artificial
  probe
  misc_feature (1)..(25): SEQ ID NO: 3592; WAN0249LG; Start 30; Stop 54
cgatgatctctctgcggatatctga

SEQ ID NO: 359328 - DNA, 25 bp, Artificial
  probe
  misc_feature (1)..(25): SEQ ID NO: 3592; WAN0249LG; Start 43; Stop 67
gcggatatctgaaagtttatctctt

SEQ ID NO: 359329 - DNA, 25 bp, Artificial
  probe
  misc_feature (1)..(25): SEQ ID NO: 3592; WAN0249LG; Start 46; Stop 70
gatatctgaaagtttatctcttgcc

SEQ ID NO: 359330 - DNA, 25 bp, Artificial
  probe
  misc_feature (1)..(25): SEQ ID NO: 3592; WAN0249LG; Start 45; Stop 69
ggatatctgaaagtttatctcttgc

SEQ ID NO: 359331 - DNA, 25 bp, Artificial
  probe
  misc_feature (1)..(25): SEQ ID NO: 3592; WAN0249LG; Start 44; Stop 68
cggatatctgaaagtttatctcttg

SEQ ID NO: 359332 - DNA, 25 bp, Artificial
  probe
  misc_feature (1)..(25): SEQ ID NO: 3592; WAN0249LG; Start 29; Stop 53
gcgatgatctctctgcggatatctg

SEQ ID NO: 359333 - DNA, 25 bp, Artificial
  probe
  misc_feature (1)..(25): SEQ ID NO: 3593; WAN0249TH; Start 99; Stop 123
ttgtttatttgcttatttgcttgcc

SEQ ID NO: 359334 - DNA, 25 bp, Artificial
  probe
  misc_feature (1)..(25): SEQ ID NO: 3593; WAN0249TH; Start 100; Stop 124
tgtttatttgcttatttgcttgcct

SEQ ID NO: 359335 - DNA, 25 bp, Artificial
  probe
  misc_feature (1)..(25): SEQ ID NO: 3593; WAN0249TH; Start 101; Stop 125
gtttatttgcttatttgcttgccta

SEQ ID NO: 359336 - DNA, 25 bp, Artificial
  probe
  misc_feature (1)..(25): SEQ ID NO: 3593; WAN0249TH; Start 227; Stop 251
tgagtattaaccttacagaaagcgg

SEQ ID NO: 359337 - DNA, 25 bp, Artificial
  probe
  misc_feature (1)..(25): SEQ ID NO: 3593; WAN0249TH; Start 226; Stop 250
ttgagtattaaccttacagaaagcg

SEQ ID NO: 359338 - DNA, 25 bp, Artificial
  probe
  misc_feature (1)..(25): SEQ ID NO: 3593; WAN0249TH; Start 103; Stop 127
ttatttgcttatttgcttgcctagt

SEQ ID NO: 359339 - DNA, 25 bp, Artificial
  probe
  misc_feature (1)..(25): SEQ ID NO: 3593; WAN0249TH; Start 98; Stop 122
tttgtttatttgcttatttgcttgc

SEQ ID NO: 359340 - DNA, 25 bp, Artificial
  probe
  misc_feature (1)..(25): SEQ ID NO: 3593; WAN0249TH; Start 102; Stop 126
tttatttgcttatttgcttgcctag

SEQ ID NO: 359341 - DNA, 25 bp, Artificial
  probe
  misc_feature (1)..(25): SEQ ID NO: 3593; WAN0249TH; Start 231; Stop 255
tattaaccttacagaaagcggcaac

SEQ ID NO: 359342 - DNA, 25 bp, Artificial
  probe
  misc_feature (1)..(25): SEQ ID NO: 3593; WAN0249TH; Start 230; Stop 254
gtattaaccttacagaaagcggcaa

SEQ ID NO: 359343 - DNA, 25 bp, Artificial
  probe
  misc_feature (1)..(25): SEQ ID NO: 3593; WAN0249TH; Start 228; Stop 252
gagtattaaccttacagaaagcggc

SEQ ID NO: 359344 - DNA, 25 bp, Artificial
  probe
  misc_feature (1)..(25): SEQ ID NO: 3593; WAN0249TH; Start 10; Stop 34
gtaagaagacgaatcagtcaagctg

SEQ ID NO: 359345 - DNA, 25 bp, Artificial
  probe
  misc_feature (1)..(25): SEQ ID NO: 3593; WAN0249TH; Start 229; Stop 253
agtattaaccttacagaaagcggca

SEQ ID NO: 359346 - DNA, 25 bp, Artificial
  probe
  misc_feature (1)..(25): SEQ ID NO: 3593; WAN0249TH; Start 11; Stop 35
taagaagacgaatcagtcaagctgg

SEQ ID NO: 359347 - DNA, 25 bp, Artificial
  probe
  misc_feature (1)..(25): SEQ ID NO: 3593; WAN0249TH; Start 225; Stop 249
attgagtattaaccttacagaaagc

SEQ ID NO: 359348 - DNA, 25 bp, Artificial
  probe
  misc_feature (1)..(25): SEQ ID NO: 3593; WAN0249TH; Start 7; Stop 31
aacgtaagaagacgaatcagtcaag

SEQ ID NO: 359349 - DNA, 25 bp, Artificial
  probe
  misc_feature (1)..(25): SEQ ID NO: 3593; WAN0249TH; Start 236; Stop 260
accttacagaaagcggcaacaaata

SEQ ID NO: 359350 - DNA, 25 bp, Artificial
  probe
  misc_feature (1)..(25): SEQ ID NO: 3593; WAN0249TH; Start 232; Stop 256
attaaccttacagaaagcggcaaca

SEQ ID NO: 359351 - DNA, 25 bp, Artificial
  probe
  misc_feature (1)..(25): SEQ ID NO: 3593; WAN0249TH; Start 234; Stop 258
taaccttacagaaagcggcaacaaa

SEQ ID NO: 359352 - DNA, 25 bp, Artificial
  probe
  misc_feature (1)..(25): SEQ ID NO: 3593; WAN0249TH; Start 233; Stop 257
ttaaccttacagaaagcggcaacaa

SEQ ID NO: 359353 - DNA, 25 bp, Artificial
  probe
  misc_feature (1)..(25): SEQ ID NO: 3593; WAN0249TH; Start 97; Stop 121
atttgtttatttgcttatttgcttg

SEQ ID NO: 359354 - DNA, 25 bp, Artificial
  probe
  misc_feature (1)..(25): SEQ ID NO: 3593; WAN0249TH; Start 14; Stop 38
gaagacgaatcagtcaagctggttc

SEQ ID NO: 359355 - DNA, 25 bp, Artificial
  probe
  misc_feature (1)..(25): SEQ ID NO: 3593; WAN0249TH; Start 235; Stop 259
aaccttacagaaagcggcaacaaat

SEQ ID NO: 359356 - DNA, 25 bp, Artificial
  probe
  misc_feature (1)..(25): SEQ ID NO: 3593; WAN0249TH; Start 9; Stop 33
cgtaagaagacgaatcagtcaagct

SEQ ID NO: 359357 - DNA, 25 bp, Artificial
  probe
  misc_feature (1)..(25): SEQ ID NO: 3593; WAN0249TH; Start 5; Stop 29
taaacgtaagaagacgaatcagtca

SEQ ID NO: 359358 - DNA, 25 bp, Artificial
  probe
  misc_feature (1)..(25): SEQ ID NO: 3593; WAN0249TH; Start 6; Stop 30
aaacgtaagaagacgaatcagtcaa

SEQ ID NO: 359359 - DNA, 25 bp, Artificial
  probe
  misc_feature (1)..(25): SEQ ID NO: 3593; WAN0249TH; Start 13; Stop 37
agaagacgaatcagtcaagctggtt

SEQ ID NO: 359360 - DNA, 25 bp, Artificial
  probe
  misc_feature (1)..(25): SEQ ID NO: 3593; WAN0249TH; Start 12; Stop 36
aagaagacgaatcagtcaagctggt

SEQ ID NO: 359361 - DNA, 25 bp, Artificial
  probe
  misc_feature (1)..(25): SEQ ID NO: 3593; WAN0249TH; Start 4; Stop 28
ataaacgtaagaagacgaatcagtc

SEQ ID NO: 359362 - DNA, 25 bp, Artificial
  probe
  misc_feature (1)..(25): SEQ ID NO: 3593; WAN0249TH; Start 3; Stop 27
gataaacgtaagaagacgaatcagt

SEQ ID NO: 359363 - DNA, 25 bp, Artificial
  probe
  misc_feature (1)..(25): SEQ ID NO: 3593; WAN0249TH; Start 2; Stop 26
agataaacgtaagaagacgaatcag

SEQ ID NO: 359364 - DNA, 25 bp, Artificial
  probe
  misc_feature (1)..(25): SEQ ID NO: 3593; WAN0249TH; Start 1; Stop 25
gagataaacgtaagaagacgaatca

SEQ ID NO: 359365 - DNA, 25 bp, Artificial
  probe
  misc_feature (1)..(25): SEQ ID NO: 3593; WAN0249TH; Start 8; Stop 32
acgtaagaagacgaatcagtcaagc

SEQ ID NO: 359366 - DNA, 25 bp, Artificial
  probe
  misc_feature (1)..(25): SEQ ID NO: 3593; WAN0249TH; Start 19; Stop 43
cgaatcagtcaagctggttcgtttt

SEQ ID NO: 359367 - DNA, 25 bp, Artificial
  probe
  misc_feature (1)..(25): SEQ ID NO: 3594; WAN0249JU; Start 5; Stop 29
tagaactaaaggttggaacgattgt

SEQ ID NO: 359368 - DNA, 25 bp, Artificial
  probe
  misc_feature (1)..(25): SEQ ID NO: 3594; WAN0249JU; Start 1; Stop 25
gagatagaactaaaggttggaacga

SEQ ID NO: 359369 - DNA, 25 bp, Artificial
  probe
  misc_feature (1)..(25): SEQ ID NO: 3594; WAN0249JU; Start 2; Stop 26
agatagaactaaaggttggaacgat

SEQ ID NO: 359370 - DNA, 25 bp, Artificial
  probe
  misc_feature (1)..(25): SEQ ID NO: 3594; WAN0249JU; Start 4; Stop 28
atagaactaaaggttggaacgattg

SEQ ID NO: 359371 - DNA, 25 bp, Artificial
  probe
  misc_feature (1)..(25): SEQ ID NO: 3594; WAN0249JU; Start 3; Stop 27
gatagaactaaaggttggaacgatt

SEQ ID NO: 359372 - DNA, 25 bp, Artificial
  probe
  misc_feature (1)..(25): SEQ ID NO: 3594; WAN0249JU; Start 6; Stop 30
agaactaaaggttggaacgattgtc

SEQ ID NO: 359373 - DNA, 25 bp, Artificial
  probe
  misc_feature (1)..(25): SEQ ID NO: 3594; WAN0249JU; Start 7; Stop 31
gaactaaaggttggaacgattgtcc

SEQ ID NO: 359374 - DNA, 25 bp, Artificial
  probe
  misc_feature (1)..(25): SEQ ID NO: 3594; WAN0249JU; Start 8; Stop 32
aactaaaggttggaacgattgtccc

SEQ ID NO: 359375 - DNA, 25 bp, Artificial
  probe
  misc_feature (1)..(25): SEQ ID NO: 3594; WAN0249JU; Start 10; Stop 34
ctaaaggttggaacgattgtcccag

SEQ ID NO: 359376 - DNA, 25 bp, Artificial
  probe
  misc_feature (1)..(25): SEQ ID NO: 3594; WAN0249JU; Start 20; Stop 44
gaacgattgtcccagcctttctttg

SEQ ID NO: 359377 - DNA, 25 bp, Artificial
  probe
  misc_feature (1)..(25): SEQ ID NO: 3594; WAN0249JU; Start 42; Stop 66
ttgcaaacagaatagaaggaagctt

SEQ ID NO: 359378 - DNA, 25 bp, Artificial
  probe
  misc_feature (1)..(25): SEQ ID NO: 3594; WAN0249JU; Start 9; Stop 33
actaaaggttggaacgattgtccca

SEQ ID NO: 359379 - DNA, 25 bp, Artificial
  probe
  misc_feature (1)..(25): SEQ ID NO: 3595; WAN024AM3; Start 54; Stop 78
aacgtgctatactgatagtaagaat

SEQ ID NO: 359380 - DNA, 25 bp, Artificial
  probe
  misc_feature (1)..(25): SEQ ID NO: 3595; WAN024AM3; Start 27; Stop 51
agtgcttttgctttacataagttgg

SEQ ID NO: 359381 - DNA, 25 bp, Artificial
  probe
  misc_feature (1)..(25): SEQ ID NO: 3595; WAN024AM3; Start 24; Stop 48
acaagtgcttttgctttacataagt

SEQ ID NO: 359382 - DNA, 25 bp, Artificial
  probe
  misc_feature (1)..(25): SEQ ID NO: 3595; WAN024AM3; Start 26; Stop 50
aagtgcttttgctttacataagttg

SEQ ID NO: 359383 - DNA, 25 bp, Artificial
  probe
  misc_feature (1)..(25): SEQ ID NO: 3595; WAN024AM3; Start 25; Stop 49
caagtgcttttgctttacataagtt

SEQ ID NO: 359384 - DNA, 25 bp, Artificial
  probe
  misc_feature (1)..(25): SEQ ID NO: 3595; WAN024AM3; Start 23; Stop 47
tacaagtgcttttgctttacataag

SEQ ID NO: 359385 - DNA, 25 bp, Artificial
  probe
  misc_feature (1)..(25): SEQ ID NO: 3595; WAN024AM3; Start 28; Stop 52
gtgcttttgctttacataagttggc

SEQ ID NO: 359386 - DNA, 25 bp, Artificial
  probe
  misc_feature (1)..(25): SEQ ID NO: 3595; WAN024AM3; Start 52; Stop 76
caaacgtgctatactgatagtaaga

SEQ ID NO: 359387 - DNA, 25 bp, Artificial
  probe
  misc_feature (1)..(25): SEQ ID NO: 3595; WAN024AM3; Start 55; Stop 79
acgtgctatactgatagtaagaata

SEQ ID NO: 359388 - DNA, 25 bp, Artificial
  probe
  misc_feature (1)..(25): SEQ ID NO: 3595; WAN024AM3; Start 22; Stop 46
gtacaagtgcttttgctttacataa

SEQ ID NO: 359389 - DNA, 25 bp, Artificial
  probe
  misc_feature (1)..(25): SEQ ID NO: 3595; WAN024AM3; Start 56; Stop 80
cgtgctatactgatagtaagaatat

SEQ ID NO: 359390 - DNA, 25 bp, Artificial
  probe
  misc_feature (1)..(25): SEQ ID NO: 3595; WAN024AM3; Start 51; Stop 75
gcaaacgtgctatactgatagtaag

SEQ ID NO: 359391 - DNA, 25 bp, Artificial
  probe
  misc_feature (1)..(25): SEQ ID NO: 3595; WAN024AM3; Start 40; Stop 64
tacataagttggcaaacgtgctata

SEQ ID NO: 359392 - DNA, 25 bp, Artificial
  probe
  misc_feature (1)..(25): SEQ ID NO: 3595; WAN024AM3; Start 50; Stop 74
ggcaaacgtgctatactgatagtaa

SEQ ID NO: 359393 - DNA, 25 bp, Artificial
  probe
  misc_feature (1)..(25): SEQ ID NO: 3595; WAN024AM3; Start 53; Stop 77
aaacgtgctatactgatagtaagaa

SEQ ID NO: 359394 - DNA, 25 bp, Artificial
  probe
  misc_feature (1)..(25): SEQ ID NO: 3595; WAN024AM3; Start 39; Stop 63
ttacataagttggcaaacgtgctat

SEQ ID NO: 359395 - DNA, 25 bp, Artificial
  probe
  misc_feature (1)..(25): SEQ ID NO: 3595; WAN024AM3; Start 38; Stop 62
tttacataagttggcaaacgtgcta

SEQ ID NO: 359396 - DNA, 25 bp, Artificial
  probe
  misc_feature (1)..(25): SEQ ID NO: 3595; WAN024AM3; Start 49; Stop 73
tggcaaacgtgctatactgatagta

SEQ ID NO: 359397 - DNA, 25 bp, Artificial
  probe
  misc_feature (1)..(25): SEQ ID NO: 3595; WAN024AM3; Start 43; Stop 67
ataagttggcaaacgtgctatactg

SEQ ID NO: 359398 - DNA, 25 bp, Artificial
  probe
  misc_feature (1)..(25): SEQ ID NO: 3595; WAN024AM3; Start 42; Stop 66
cataagttggcaaacgtgctatact

SEQ ID NO: 359399 - DNA, 25 bp, Artificial
  probe
  misc_feature (1)..(25): SEQ ID NO: 3595; WAN024AM3; Start 41; Stop 65
acataagttggcaaacgtgctatac

SEQ ID NO: 359400 - DNA, 25 bp, Artificial
  probe
  misc_feature (1)..(25): SEQ ID NO: 3595; WAN024AM3; Start 47; Stop 71
gttggcaaacgtgctatactgatag

SEQ ID NO: 359401 - DNA, 25 bp, Artificial
  probe
  misc_feature (1)..(25): SEQ ID NO: 3595; WAN024AM3; Start 48; Stop 72
ttggcaaacgtgctatactgatagt

SEQ ID NO: 359402 - DNA, 25 bp, Artificial
  probe
  misc_feature (1)..(25): SEQ ID NO: 3595; WAN024AM3; Start 46; Stop 70
agttggcaaacgtgctatactgata

SEQ ID NO: 359403 - DNA, 25 bp, Artificial
  probe
  misc_feature (1)..(25): SEQ ID NO: 3595; WAN024AM3; Start 44; Stop 68
taagttggcaaacgtgctatactga

SEQ ID NO: 359404 - DNA, 25 bp, Artificial
  probe
  misc_feature (1)..(25): SEQ ID NO: 3595; WAN024AM3; Start 37; Stop 61
ctttacataagttggcaaacgtgct

SEQ ID NO: 359405 - DNA, 25 bp, Artificial
  probe
  misc_feature (1)..(25): SEQ ID NO: 3595; WAN024AM3; Start 35; Stop 59
tgctttacataagttggcaaacgtg

SEQ ID NO: 359406 - DNA, 25 bp, Artificial
  probe
  misc_feature (1)..(25): SEQ ID NO: 3595; WAN024AM3; Start 9; Stop 33
ctaaaattaggctgtacaagtgctt

SEQ ID NO: 359407 - DNA, 25 bp, Artificial
  probe
  misc_feature (1)..(25): SEQ ID NO: 3595; WAN024AM3; Start 45; Stop 69
aagttggcaaacgtgctatactgat

SEQ ID NO: 359408 - DNA, 25 bp, Artificial
  probe
  misc_feature (1)..(25): SEQ ID NO: 3595; WAN024AM3; Start 10; Stop 34
taaaattaggctgtacaagtgcttt

SEQ ID NO: 359409 - DNA, 25 bp, Artificial
  probe
  misc_feature (1)..(25): SEQ ID NO: 3595; WAN024AM3; Start 29; Stop 53
tgcttttgctttacataagttggca

SEQ ID NO: 359410 - DNA, 25 bp, Artificial
  probe
  misc_feature (1)..(25): SEQ ID NO: 3595; WAN024AM3; Start 12; Stop 36
aaattaggctgtacaagtgcttttg

SEQ ID NO: 359411 - DNA, 25 bp, Artificial
  probe
  misc_feature (1)..(25): SEQ ID NO: 3595; WAN024AM3; Start 11; Stop 35
aaaattaggctgtacaagtgctttt

SEQ ID NO: 359412 - DNA, 25 bp, Artificial
  probe
  misc_feature (1)..(25): SEQ ID NO: 3596; WAN024CAD; Start 511; Stop 535
tggattactgaagaagaagcaagaa

SEQ ID NO: 359413 - DNA, 25 bp, Artificial
  probe
  misc_feature (1)..(25): SEQ ID NO: 3596; WAN024CAD; Start 510; Stop 534
atggattactgaagaagaagcaaga

SEQ ID NO: 359414 - DNA, 25 bp, Artificial
  probe
  misc_feature (1)..(25): SEQ ID NO: 3596; WAN024CAD; Start 509; Stop 533
aatggattactgaagaagaagcaag

SEQ ID NO: 359415 - DNA, 25 bp, Artificial
  probe
  misc_feature (1)..(25): SEQ ID NO: 3596; WAN024CAD; Start 299; Stop 323
gaagcctagactgtaatcctattgt

SEQ ID NO: 359416 - DNA, 25 bp, Artificial
  probe
  misc_feature (1)..(25): SEQ ID NO: 3596; WAN024CAD; Start 280; Stop 304
attacaagagtagtcattggaagcc

SEQ ID NO: 359417 - DNA, 25 bp, Artificial
  probe
  misc_feature (1)..(25): SEQ ID NO: 3596; WAN024CAD; Start 282; Stop 306
tacaagagtagtcattggaagccta

SEQ ID NO: 359418 - DNA, 25 bp, Artificial
  probe
  misc_feature (1)..(25): SEQ ID NO: 3596; WAN024CAD; Start 275; Stop 299
gtggtattacaagagtagtcattgg

SEQ ID NO: 359419 - DNA, 25 bp, Artificial
  probe
  misc_feature (1)..(25): SEQ ID NO: 3596; WAN024CAD; Start 276; Stop 300
tggtattacaagagtagtcattgga

SEQ ID NO: 359420 - DNA, 25 bp, Artificial
  probe
  misc_feature (1)..(25): SEQ ID NO: 3596; WAN024CAD; Start 281; Stop 305
ttacaagagtagtcattggaagcct

SEQ ID NO: 359421 - DNA, 25 bp, Artificial
  probe
  misc_feature (1)..(25): SEQ ID NO: 3596; WAN024CAD; Start 270; Stop 294
cgatagtggtattacaagagtagtc

SEQ ID NO: 359422 - DNA, 25 bp, Artificial
  probe
  misc_feature (1)..(25): SEQ ID NO: 3596; WAN024CAD; Start 300; Stop 324
aagcctagactgtaatcctattgta

SEQ ID NO: 359423 - DNA, 25 bp, Artificial
  probe
  misc_feature (1)..(25): SEQ ID NO: 3596; WAN024CAD; Start 279; Stop 303
tattacaagagtagtcattggaagc

SEQ ID NO: 359424 - DNA, 25 bp, Artificial
  probe
  misc_feature (1)..(25): SEQ ID NO: 3596; WAN024CAD; Start 580; Stop 604
ggagtcaatactgttattcaagacg

SEQ ID NO: 359425 - DNA, 25 bp, Artificial
  probe
  misc_feature (1)..(25): SEQ ID NO: 3596; WAN024CAD; Start 301; Stop 325
agcctagactgtaatcctattgtat

SEQ ID NO: 359426 - DNA, 25 bp, Artificial
  probe
  misc_feature (1)..(25): SEQ ID NO: 3596; WAN024CAD; Start 585; Stop 609
caatactgttattcaagacgatcct

SEQ ID NO: 359427 - DNA, 25 bp, Artificial
  probe
  misc_feature (1)..(25): SEQ ID NO: 3596; WAN024CAD; Start 584; Stop 608
tcaatactgttattcaagacgatcc

SEQ ID NO: 359428 - DNA, 25 bp, Artificial
  probe
  misc_feature (1)..(25): SEQ ID NO: 3596; WAN024CAD; Start 302; Stop 326
gcctagactgtaatcctattgtatc

SEQ ID NO: 359429 - DNA, 25 bp, Artificial
  probe
  misc_feature (1)..(25): SEQ ID NO: 3596; WAN024CAD; Start 284; Stop 308
caagagtagtcattggaagcctaga

SEQ ID NO: 359430 - DNA, 25 bp, Artificial
  probe
  misc_feature (1)..(25): SEQ ID NO: 3596; WAN024CAD; Start 277; Stop 301
ggtattacaagagtagtcattggaa

SEQ ID NO: 359431 - DNA, 25 bp, Artificial
  probe
  misc_feature (1)..(25): SEQ ID NO: 3596; WAN024CAD; Start 274; Stop 298
agtggtattacaagagtagtcattg

SEQ ID NO: 359432 - DNA, 25 bp, Artificial
  probe
  misc_feature (1)..(25): SEQ ID NO: 3596; WAN024CAD; Start 581; Stop 605
gagtcaatactgttattcaagacga

SEQ ID NO: 359433 - DNA, 25 bp, Artificial
  probe
  misc_feature (1)..(25): SEQ ID NO: 3596; WAN024CAD; Start 292; Stop 316
gtcattggaagcctagactgtaatc

SEQ ID NO: 359434 - DNA, 25 bp, Artificial
  probe
  misc_feature (1)..(25): SEQ ID NO: 3596; WAN024CAD; Start 720; Stop 744
aacttacattgccacttcctctgaa

SEQ ID NO: 359435 - DNA, 25 bp, Artificial
  probe
  misc_feature (1)..(25): SEQ ID NO: 3596; WAN024CAD; Start 283; Stop 307
acaagagtagtcattggaagcctag

SEQ ID NO: 359436 - DNA, 25 bp, Artificial
  probe
  misc_feature (1)..(25): SEQ ID NO: 3596; WAN024CAD; Start 298; Stop 322
ggaagcctagactgtaatcctattg

SEQ ID NO: 359437 - DNA, 25 bp, Artificial
  probe
  misc_feature (1)..(25): SEQ ID NO: 3596; WAN024CAD; Start 297; Stop 321
tggaagcctagactgtaatcctatt

SEQ ID NO: 359438 - DNA, 25 bp, Artificial
  probe
  misc_feature (1)..(25): SEQ ID NO: 3596; WAN024CAD; Start 296; Stop 320
ttggaagcctagactgtaatcctat

SEQ ID NO: 359439 - DNA, 25 bp, Artificial
  probe
  misc_feature (1)..(25): SEQ ID NO: 3596; WAN024CAD; Start 295; Stop 319
attggaagcctagactgtaatccta

SEQ ID NO: 359440 - DNA, 25 bp, Artificial
  probe
  misc_feature (1)..(25): SEQ ID NO: 3596; WAN024CAD; Start 285; Stop 309
aagagtagtcattggaagcctagac

SEQ ID NO: 359441 - DNA, 25 bp, Artificial
  probe
  misc_feature (1)..(25): SEQ ID NO: 3596; WAN024CAD; Start 586; Stop 610
aatactgttattcaagacgatcctt

SEQ ID NO: 359442 - DNA, 25 bp, Artificial
  probe
  misc_feature (1)..(25): SEQ ID NO: 3596; WAN024CAD; Start 663; Stop 687
tacacatttacgaactcctcttacc

SEQ ID NO: 359443 - DNA, 25 bp, Artificial
  probe
  misc_feature (1)..(25): SEQ ID NO: 3596; WAN024CAD; Start 582; Stop 606
agtcaatactgttattcaagacgat

SEQ ID NO: 359444 - DNA, 25 bp, Artificial
  probe
  misc_feature (1)..(25): SEQ ID NO: 3596; WAN024CAD; Start 514; Stop 538
attactgaagaagaagcaagaaagc

SEQ ID NO: 359445 - DNA, 25 bp, Artificial
  probe
  misc_feature (1)..(25): SEQ ID NO: 3597; WAN024CEL-3; Start 1270; Stop 1294
attatgacttctaaggagccgattc

SEQ ID NO: 359446 - DNA, 25 bp, Artificial
  probe
  misc_feature (1)..(25): SEQ ID NO: 3597; WAN024CEL-3; Start 1269; Stop 1293
gattatgacttctaaggagccgatt

SEQ ID NO: 359447 - DNA, 25 bp, Artificial
  probe
  misc_feature (1)..(25): SEQ ID NO: 3597; WAN024CEL-3; Start 1264; Stop 1288
aagcagattatgacttctaaggagc

SEQ ID NO: 359448 - DNA, 25 bp, Artificial
  probe
  misc_feature (1)..(25): SEQ ID NO: 3597; WAN024CEL-3; Start 1268; Stop 1292
agattatgacttctaaggagccgat

SEQ ID NO: 359449 - DNA, 25 bp, Artificial
  probe
  misc_feature (1)..(25): SEQ ID NO: 3597; WAN024CEL-3; Start 1442; Stop 1466
aggatcactatcgtcatacaatctc

SEQ ID NO: 359450 - DNA, 25 bp, Artificial
  probe
  misc_feature (1)..(25): SEQ ID NO: 3597; WAN024CEL-3; Start 1440; Stop 1464
caaggatcactatcgtcatacaatc

SEQ ID NO: 359451 - DNA, 25 bp, Artificial
  probe
  misc_feature (1)..(25): SEQ ID NO: 3597; WAN024CEL-3; Start 1439; Stop 1463
gcaaggatcactatcgtcatacaat

SEQ ID NO: 359452 - DNA, 25 bp, Artificial
  probe
  misc_feature (1)..(25): SEQ ID NO: 3597; WAN024CEL-3; Start 1441; Stop 1465
aaggatcactatcgtcatacaatct

SEQ ID NO: 359453 - DNA, 25 bp, Artificial
  probe
  misc_feature (1)..(25): SEQ ID NO: 3597; WAN024CEL-3; Start 1267; Stop 1291
cagattatgacttctaaggagccga

SEQ ID NO: 359454 - DNA, 25 bp, Artificial
  probe
  misc_feature (1)..(25): SEQ ID NO: 3597; WAN024CEL-3; Start 1265; Stop 1289
agcagattatgacttctaaggagcc

SEQ ID NO: 359455 - DNA, 25 bp, Artificial
  probe
  misc_feature (1)..(25): SEQ ID NO: 3597; WAN024CEL-3; Start 785; Stop 809
tgcttcaggtagtggataatgttga

SEQ ID NO: 359456 - DNA, 25 bp, Artificial
  probe
  misc_feature (1)..(25): SEQ ID NO: 3597; WAN024CEL-3; Start 1438; Stop 1462
agcaaggatcactatcgtcatacaa

SEQ ID NO: 359457 - DNA, 25 bp, Artificial
  probe
  misc_feature (1)..(25): SEQ ID NO: 3597; WAN024CEL-3; Start 1349; Stop 1373
tagcaacaggtaatccttatctcaa

SEQ ID NO: 359458 - DNA, 25 bp, Artificial
  probe
  misc_feature (1)..(25): SEQ ID NO: 3597; WAN024CEL-3; Start 1346; Stop 1370
cactagcaacaggtaatccttatct

SEQ ID NO: 359459 - DNA, 25 bp, Artificial
  probe
  misc_feature (1)..(25): SEQ ID NO: 3597; WAN024CEL-3; Start 1348; Stop 1372
ctagcaacaggtaatccttatctca

SEQ ID NO: 359460 - DNA, 25 bp, Artificial
  probe
  misc_feature (1)..(25): SEQ ID NO: 3597; WAN024CEL-3; Start 1347; Stop 1371
actagcaacaggtaatccttatctc

SEQ ID NO: 359461 - DNA, 25 bp, Artificial
  probe
  misc_feature (1)..(25): SEQ ID NO: 3597; WAN024CEL-3; Start 784; Stop 808
ctgcttcaggtagtggataatgttg

SEQ ID NO: 359462 - DNA, 25 bp, Artificial
  probe
  misc_feature (1)..(25): SEQ ID NO: 3597; WAN024CEL-3; Start 259; Stop 283
cgacagattcaggaagaacatgatt

SEQ ID NO: 359463 - DNA, 25 bp, Artificial
  probe
  misc_feature (1)..(25): SEQ ID NO: 3597; WAN024CEL-3; Start 1263; Stop 1287
taagcagattatgacttctaaggag

SEQ ID NO: 359464 - DNA, 25 bp, Artificial
  probe
  misc_feature (1)..(25): SEQ ID NO: 3597; WAN024CEL-3; Start 1271; Stop 1295
ttatgacttctaaggagccgattcg

SEQ ID NO: 359465 - DNA, 25 bp, Artificial
  probe
  misc_feature (1)..(25): SEQ ID NO: 3597; WAN024CEL-3; Start 1345; Stop 1369
gcactagcaacaggtaatccttatc

SEQ ID NO: 359466 - DNA, 25 bp, Artificial
  probe
  misc_feature (1)..(25): SEQ ID NO: 3597; WAN024CEL-3; Start 783; Stop 807
actgcttcaggtagtggataatgtt

SEQ ID NO: 359467 - DNA, 25 bp, Artificial
  probe
  misc_feature (1)..(25): SEQ ID NO: 3597; WAN024CEL-3; Start 782; Stop 806
aactgcttcaggtagtggataatgt

SEQ ID NO: 359468 - DNA, 25 bp, Artificial
  probe
  misc_feature (1)..(25): SEQ ID NO: 3597; WAN024CEL-3; Start 1437; Stop 1461
cagcaaggatcactatcgtcataca

SEQ ID NO: 359469 - DNA, 25 bp, Artificial
  probe
  misc_feature (1)..(25): SEQ ID NO: 3597; WAN024CEL-3; Start 1340; Stop 1364
ttaaggcactagcaacaggtaatcc

SEQ ID NO: 359470 - DNA, 25 bp, Artificial
  probe
  misc_feature (1)..(25): SEQ ID NO: 3597; WAN024CEL-3; Start 730; Stop 754
gctattgatatgcgtttattggact

SEQ ID NO: 359471 - DNA, 25 bp, Artificial
  probe
  misc_feature (1)..(25): SEQ ID NO: 3597; WAN024CEL-3; Start 1975; Stop 1999
ccattgattgaaacagaaacggatt

SEQ ID NO: 359472 - DNA, 25 bp, Artificial
  probe
  misc_feature (1)..(25): SEQ ID NO: 3597; WAN024CEL-3; Start 1499; Stop 1523
aacgattaagcaagtatgaaggcga

SEQ ID NO: 359473 - DNA, 25 bp, Artificial
  probe
  misc_feature (1)..(25): SEQ ID NO: 3597; WAN024CEL-3; Start 1496; Stop 1520
agaaacgattaagcaagtatgaagg

SEQ ID NO: 359474 - DNA, 25 bp, Artificial
  probe
  misc_feature (1)..(25): SEQ ID NO: 3597; WAN024CEL-3; Start 808; Stop 832
gaaagaatttatcgtgagggaatgg

SEQ ID NO: 359475 - DNA, 25 bp, Artificial
  probe
  misc_feature (1)..(25): SEQ ID NO: 3597; WAN024CEL-3; Start 1976; Stop 2000
cattgattgaaacagaaacggattt

SEQ ID NO: 359476 - DNA, 25 bp, Artificial
  probe
  misc_feature (1)..(25): SEQ ID NO: 3597; WAN024CEL-3; Start 805; Stop 829
gttgaaagaatttatcgtgagggaa

SEQ ID NO: 359477 - DNA, 25 bp, Artificial
  probe
  misc_feature (1)..(25): SEQ ID NO: 3597; WAN024CEL-3; Start 804; Stop 828
tgttgaaagaatttatcgtgaggga

SEQ ID NO: 359478 - DNA, 25 bp, Artificial
  probe
  misc_feature (1)..(25): SEQ ID NO: 3598; WAN0249Z6; Start 15; Stop 39
ttcattgataagtctagtatgccat

SEQ ID NO: 359479 - DNA, 25 bp, Artificial
  probe
  misc_feature (1)..(25): SEQ ID NO: 3598; WAN0249Z6; Start 5; Stop 29
ttacctcgctttcattgataagtct

SEQ ID NO: 359480 - DNA, 25 bp, Artificial
  probe
  misc_feature (1)..(25): SEQ ID NO: 3598; WAN0249Z6; Start 6; Stop 30
tacctcgctttcattgataagtcta

SEQ ID NO: 359481 - DNA, 25 bp, Artificial
  probe
  misc_feature (1)..(25): SEQ ID NO: 3598; WAN0249Z6; Start 4; Stop 28
attacctcgctttcattgataagtc

SEQ ID NO: 359482 - DNA, 25 bp, Artificial
  probe
  misc_feature (1)..(25): SEQ ID NO: 3598; WAN0249Z6; Start 3; Stop 27
gattacctcgctttcattgataagt

SEQ ID NO: 359483 - DNA, 25 bp, Artificial
  probe
  misc_feature (1)..(25): SEQ ID NO: 3598; WAN0249Z6; Start 2; Stop 26
agattacctcgctttcattgataag

SEQ ID NO: 359484 - DNA, 25 bp, Artificial
  probe
  misc_feature (1)..(25): SEQ ID NO: 3598; WAN0249Z6; Start 8; Stop 32
cctcgctttcattgataagtctagt

SEQ ID NO: 359485 - DNA, 25 bp, Artificial
  probe
  misc_feature (1)..(25): SEQ ID NO: 3598; WAN0249Z6; Start 7; Stop 31
acctcgctttcattgataagtctag

SEQ ID NO: 359486 - DNA, 25 bp, Artificial
  probe
  misc_feature (1)..(25): SEQ ID NO: 3598; WAN0249Z6; Start 1; Stop 25
gagattacctcgctttcattgataa

SEQ ID NO: 359487 - DNA, 25 bp, Artificial
  probe
  misc_feature (1)..(25): SEQ ID NO: 3598; WAN0249Z6; Start 16; Stop 40
tcattgataagtctagtatgccata

SEQ ID NO: 359488 - DNA, 25 bp, Artificial
  probe
  misc_feature (1)..(25): SEQ ID NO: 3598; WAN0249Z6; Start 9; Stop 33
ctcgctttcattgataagtctagta

SEQ ID NO: 359489 - DNA, 25 bp, Artificial
  probe
  misc_feature (1)..(25): SEQ ID NO: 3598; WAN0249Z6; Start 12; Stop 36
gctttcattgataagtctagtatgc

SEQ ID NO: 359490 - DNA, 25 bp, Artificial
  probe
  misc_feature (1)..(25): SEQ ID NO: 3598; WAN0249Z6; Start 24; Stop 48
aagtctagtatgccataaagtttct

SEQ ID NO: 359491 - DNA, 25 bp, Artificial
  probe
  misc_feature (1)..(25): SEQ ID NO: 3598; WAN0249Z6; Start 14; Stop 38
tttcattgataagtctagtatgcca

SEQ ID NO: 359492 - DNA, 25 bp, Artificial
  probe
  misc_feature (1)..(25): SEQ ID NO: 3598; WAN0249Z6; Start 11; Stop 35
cgctttcattgataagtctagtatg

SEQ ID NO: 359493 - DNA, 25 bp, Artificial
  probe
  misc_feature (1)..(25): SEQ ID NO: 3598; WAN0249Z6; Start 10; Stop 34
tcgctttcattgataagtctagtat

SEQ ID NO: 359494 - DNA, 25 bp, Artificial
  probe
  misc_feature (1)..(25): SEQ ID NO: 3598; WAN0249Z6; Start 17; Stop 41
cattgataagtctagtatgccataa

SEQ ID NO: 359495 - DNA, 25 bp, Artificial
  probe
  misc_feature (1)..(25): SEQ ID NO: 3598; WAN0249Z6; Start 13; Stop 37
ctttcattgataagtctagtatgcc

SEQ ID NO: 359496 - DNA, 25 bp, Artificial
  probe
  misc_feature (1)..(25): SEQ ID NO: 3598; WAN0249Z6; Start 25; Stop 49
agtctagtatgccataaagtttcta

SEQ ID NO: 359497 - DNA, 25 bp, Artificial
  probe
  misc_feature (1)..(25): SEQ ID NO: 3598; WAN0249Z6; Start 20; Stop 44
tgataagtctagtatgccataaagt

SEQ ID NO: 359498 - DNA, 25 bp, Artificial
  probe
  misc_feature (1)..(25): SEQ ID NO: 3598; WAN0249Z6; Start 86; Stop 110
ggttggtctcatcttttataggtct

SEQ ID NO: 359499 - DNA, 25 bp, Artificial
  probe
  misc_feature (1)..(25): SEQ ID NO: 3598; WAN0249Z6; Start 85; Stop 109
tggttggtctcatcttttataggtc

SEQ ID NO: 359500 - DNA, 25 bp, Artificial
  probe
  misc_feature (1)..(25): SEQ ID NO: 3598; WAN0249Z6; Start 84; Stop 108
ttggttggtctcatcttttataggt

SEQ ID NO: 359501 - DNA, 25 bp, Artificial
  probe
  misc_feature (1)..(25): SEQ ID NO: 3598; WAN0249Z6; Start 81; Stop 105
aggttggttggtctcatcttttata

SEQ ID NO: 359502 - DNA, 25 bp, Artificial
  probe
  misc_feature (1)..(25): SEQ ID NO: 3598; WAN0249Z6; Start 83; Stop 107
gttggttggtctcatcttttatagg

SEQ ID NO: 359503 - DNA, 25 bp, Artificial
  probe
  misc_feature (1)..(25): SEQ ID NO: 3598; WAN0249Z6; Start 82; Stop 106
ggttggttggtctcatcttttatag

SEQ ID NO: 359504 - DNA, 25 bp, Artificial
  probe
  misc_feature (1)..(25): SEQ ID NO: 3598; WAN0249Z6; Start 80; Stop 104
gaggttggttggtctcatcttttat

SEQ ID NO: 359505 - DNA, 25 bp, Artificial
  probe
  misc_feature (1)..(25): SEQ ID NO: 3598; WAN0249Z6; Start 26; Stop 50
gtctagtatgccataaagtttctaa

SEQ ID NO: 359506 - DNA, 25 bp, Artificial
  probe
  misc_feature (1)..(25): SEQ ID NO: 3598; WAN0249Z6; Start 23; Stop 47
taagtctagtatgccataaagtttc

SEQ ID NO: 359507 - DNA, 25 bp, Artificial
  probe
  misc_feature (1)..(25): SEQ ID NO: 3598; WAN0249Z6; Start 34; Stop 58
tgccataaagtttctaaaattgctt

SEQ ID NO: 359508 - DNA, 25 bp, Artificial
  probe
  misc_feature (1)..(25): SEQ ID NO: 3598; WAN0249Z6; Start 33; Stop 57
atgccataaagtttctaaaattgct

SEQ ID NO: 359509 - DNA, 25 bp, Artificial
  probe
  misc_feature (1)..(25): SEQ ID NO: 3598; WAN0249Z6; Start 21; Stop 45
gataagtctagtatgccataaagtt

SEQ ID NO: 359510 - DNA, 25 bp, Artificial
  probe
  misc_feature (1)..(25): SEQ ID NO: 3598; WAN0249Z6; Start 19; Stop 43
ttgataagtctagtatgccataaag

SEQ ID NO: 359511 - DNA, 25 bp, Artificial
  probe
  misc_feature (1)..(25): SEQ ID NO: 3599; WAN024A24; Start 35; Stop 59
taaaattccattgaaacagttgtct

SEQ ID NO: 359512 - DNA, 25 bp, Artificial
  probe
  misc_feature (1)..(25): SEQ ID NO: 3599; WAN024A24; Start 34; Stop 58
ttaaaattccattgaaacagttgtc

SEQ ID NO: 359513 - DNA, 25 bp, Artificial
  probe
  misc_feature (1)..(25): SEQ ID NO: 3599; WAN024A24; Start 33; Stop 57
tttaaaattccattgaaacagttgt

SEQ ID NO: 359514 - DNA, 25 bp, Artificial
  probe
  misc_feature (1)..(25): SEQ ID NO: 3599; WAN024A24; Start 32; Stop 56
ttttaaaattccattgaaacagttg

SEQ ID NO: 359515 - DNA, 25 bp, Artificial
  probe
  misc_feature (1)..(25): SEQ ID NO: 3600; WAN024ASM; Start 53; Stop 77
agaagacctcctaacttgttgtaac

SEQ ID NO: 359516 - DNA, 25 bp, Artificial
  probe
  misc_feature (1)..(25): SEQ ID NO: 3600; WAN024ASM; Start 52; Stop 76
aagaagacctcctaacttgttgtaa

SEQ ID NO: 359517 - DNA, 25 bp, Artificial
  probe
  misc_feature (1)..(25): SEQ ID NO: 3600; WAN024ASM; Start 54; Stop 78
gaagacctcctaacttgttgtaaca

SEQ ID NO: 359518 - DNA, 25 bp, Artificial
  probe
  misc_feature (1)..(25): SEQ ID NO: 3600; WAN024ASM; Start 39; Stop 63
tatagacggttacaagaagacctcc

SEQ ID NO: 359519 - DNA, 25 bp, Artificial
  probe
  misc_feature (1)..(25): SEQ ID NO: 3600; WAN024ASM; Start 10; Stop 34
aagatttgtttaagataggtcgggt

SEQ ID NO: 359520 - DNA, 25 bp, Artificial
  probe
  misc_feature (1)..(25): SEQ ID NO: 3600; WAN024ASM; Start 11; Stop 35
agatttgtttaagataggtcgggta

SEQ ID NO: 359521 - DNA, 25 bp, Artificial
  probe
  misc_feature (1)..(25): SEQ ID NO: 3600; WAN024ASM; Start 41; Stop 65
tagacggttacaagaagacctccta

SEQ ID NO: 359522 - DNA, 25 bp, Artificial
  probe
  misc_feature (1)..(25): SEQ ID NO: 3600; WAN024ASM; Start 12; Stop 36
gatttgtttaagataggtcgggtat

SEQ ID NO: 359523 - DNA, 25 bp, Artificial
  probe
  misc_feature (1)..(25): SEQ ID NO: 3600; WAN024ASM; Start 9; Stop 33
taagatttgtttaagataggtcggg

SEQ ID NO: 359524 - DNA, 25 bp, Artificial
  probe
  misc_feature (1)..(25): SEQ ID NO: 3600; WAN024ASM; Start 45; Stop 69
cggttacaagaagacctcctaactt

SEQ ID NO: 359525 - DNA, 25 bp, Artificial
  probe
  misc_feature (1)..(25): SEQ ID NO: 3600; WAN024ASM; Start 40; Stop 64
atagacggttacaagaagacctcct

SEQ ID NO: 359526 - DNA, 25 bp, Artificial
  probe
  misc_feature (1)..(25): SEQ ID NO: 3600; WAN024ASM; Start 38; Stop 62
ctatagacggttacaagaagacctc

SEQ ID NO: 359527 - DNA, 25 bp, Artificial
  probe
  misc_feature (1)..(25): SEQ ID NO: 3600; WAN024ASM; Start 37; Stop 61
actatagacggttacaagaagacct

SEQ ID NO: 359528 - DNA, 25 bp, Artificial
  probe
  misc_feature (1)..(25): SEQ ID NO: 3600; WAN024ASM; Start 36; Stop 60
tactatagacggttacaagaagacc

SEQ ID NO: 359529 - DNA, 25 bp, Artificial
  probe
  misc_feature (1)..(25): SEQ ID NO: 3600; WAN024ASM; Start 35; Stop 59
atactatagacggttacaagaagac

SEQ ID NO: 359530 - DNA, 25 bp, Artificial
  probe
  misc_feature (1)..(25): SEQ ID NO: 3600; WAN024ASM; Start 43; Stop 67
gacggttacaagaagacctcctaac

SEQ ID NO: 359531 - DNA, 25 bp, Artificial
  probe
  misc_feature (1)..(25): SEQ ID NO: 3600; WAN024ASM; Start 42; Stop 66
agacggttacaagaagacctcctaa

SEQ ID NO: 359532 - DNA, 25 bp, Artificial
  probe
  misc_feature (1)..(25): SEQ ID NO: 3600; WAN024ASM; Start 44; Stop 68
acggttacaagaagacctcctaact

SEQ ID NO: 359533 - DNA, 25 bp, Artificial
  probe
  misc_feature (1)..(25): SEQ ID NO: 3600; WAN024ASM; Start 13; Stop 37
atttgtttaagataggtcgggtata

SEQ ID NO: 359534 - DNA, 25 bp, Artificial
  probe
  misc_feature (1)..(25): SEQ ID NO: 3600; WAN024ASM; Start 32; Stop 56
ggtatactatagacggttacaagaa

SEQ ID NO: 359535 - DNA, 25 bp, Artificial
  probe
  misc_feature (1)..(25): SEQ ID NO: 3600; WAN024ASM; Start 30; Stop 54
cgggtatactatagacggttacaag

SEQ ID NO: 359536 - DNA, 25 bp, Artificial
  probe
  misc_feature (1)..(25): SEQ ID NO: 3600; WAN024ASM; Start 29; Stop 53
tcgggtatactatagacggttacaa

SEQ ID NO: 359537 - DNA, 25 bp, Artificial
  probe
  misc_feature (1)..(25): SEQ ID NO: 3600; WAN024ASM; Start 51; Stop 75
caagaagacctcctaacttgttgta

SEQ ID NO: 359538 - DNA, 25 bp, Artificial
  probe
  misc_feature (1)..(25): SEQ ID NO: 3600; WAN024ASM; Start 46; Stop 70
ggttacaagaagacctcctaacttg

SEQ ID NO: 359539 - DNA, 25 bp, Artificial
  probe
  misc_feature (1)..(25): SEQ ID NO: 3600; WAN024ASM; Start 15; Stop 39
ttgtttaagataggtcgggtatact

SEQ ID NO: 359540 - DNA, 25 bp, Artificial
  probe
  misc_feature (1)..(25): SEQ ID NO: 3600; WAN024ASM; Start 31; Stop 55
gggtatactatagacggttacaaga

SEQ ID NO: 359541 - DNA, 25 bp, Artificial
  probe
  misc_feature (1)..(25): SEQ ID NO: 3600; WAN024ASM; Start 104; Stop 128
aataatctccctatagagtcaccgc

SEQ ID NO: 359542 - DNA, 25 bp, Artificial
  probe
  misc_feature (1)..(25): SEQ ID NO: 3600; WAN024ASM; Start 8; Stop 32
ttaagatttgtttaagataggtcgg

SEQ ID NO: 359543 - DNA, 25 bp, Artificial
  probe
  misc_feature (1)..(25): SEQ ID NO: 3600; WAN024ASM; Start 103; Stop 127
taataatctccctatagagtcaccg

SEQ ID NO: 359544 - DNA, 25 bp, Artificial
  probe
  misc_feature (1)..(25): SEQ ID NO: 3600; WAN024ASM; Start 55; Stop 79
aagacctcctaacttgttgtaacaa

SEQ ID NO: 359545 - DNA, 25 bp, Artificial
  probe
  misc_feature (1)..(25): SEQ ID NO: 3600; WAN024ASM; Start 22; Stop 46
agataggtcgggtatactatagacg

SEQ ID NO: 359546 - DNA, 25 bp, Artificial
  probe
  misc_feature (1)..(25): SEQ ID NO: 3600; WAN024ASM; Start 14; Stop 38
tttgtttaagataggtcgggtatac

SEQ ID NO: 359547 - DNA, 25 bp, Artificial
  probe
  misc_feature (1)..(25): SEQ ID NO: 3600; WAN024ASM; Start 23; Stop 47
gataggtcgggtatactatagacgg

SEQ ID NO: 359548 - DNA, 25 bp, Artificial
  probe
  misc_feature (1)..(25): SEQ ID NO: 3601; WAN024ANN; Start 86; Stop 110
atcatttcctagttaaagtcaccgc

SEQ ID NO: 359549 - DNA, 25 bp, Artificial
  probe
  misc_feature (1)..(25): SEQ ID NO: 3601; WAN024ANN; Start 85; Stop 109
gatcatttcctagttaaagtcaccg

SEQ ID NO: 359550 - DNA, 25 bp, Artificial
  probe
  misc_feature (1)..(25): SEQ ID NO: 3601; WAN024ANN; Start 32; Stop 56
gtaggcataacttctggttaggcaa

SEQ ID NO: 359551 - DNA, 25 bp, Artificial
  probe
  misc_feature (1)..(25): SEQ ID NO: 3601; WAN024ANN; Start 84; Stop 108
agatcatttcctagttaaagtcacc

SEQ ID NO: 359552 - DNA, 25 bp, Artificial
  probe
  misc_feature (1)..(25): SEQ ID NO: 3601; WAN024ANN; Start 27; Stop 51
aagctgtaggcataacttctggtta

SEQ ID NO: 359553 - DNA, 25 bp, Artificial
  probe
  misc_feature (1)..(25): SEQ ID NO: 3601; WAN024ANN; Start 30; Stop 54
ctgtaggcataacttctggttaggc

SEQ ID NO: 359554 - DNA, 25 bp, Artificial
  probe
  misc_feature (1)..(25): SEQ ID NO: 3601; WAN024ANN; Start 29; Stop 53
gctgtaggcataacttctggttagg

SEQ ID NO: 359555 - DNA, 25 bp, Artificial
  probe
  misc_feature (1)..(25): SEQ ID NO: 3601; WAN024ANN; Start 28; Stop 52
agctgtaggcataacttctggttag

SEQ ID NO: 359556 - DNA, 25 bp, Artificial
  probe
  misc_feature (1)..(25): SEQ ID NO: 3601; WAN024ANN; Start 26; Stop 50
caagctgtaggcataacttctggtt

SEQ ID NO: 359557 - DNA, 25 bp, Artificial
  probe
  misc_feature (1)..(25): SEQ ID NO: 3601; WAN024ANN; Start 87; Stop 111
tcatttcctagttaaagtcaccgcc

SEQ ID NO: 359558 - DNA, 25 bp, Artificial
  probe
  misc_feature (1)..(25): SEQ ID NO: 3601; WAN024ANN; Start 33; Stop 57
taggcataacttctggttaggcaaa

SEQ ID NO: 359559 - DNA, 25 bp, Artificial
  probe
  misc_feature (1)..(25): SEQ ID NO: 3601; WAN024ANN; Start 31; Stop 55
tgtaggcataacttctggttaggca

SEQ ID NO: 359560 - DNA, 25 bp, Artificial
  probe
  misc_feature (1)..(25): SEQ ID NO: 3601; WAN024ANN; Start 24; Stop 48
gacaagctgtaggcataacttctgg

SEQ ID NO: 359561 - DNA, 25 bp, Artificial
  probe
  misc_feature (1)..(25): SEQ ID NO: 3601; WAN024ANN; Start 83; Stop 107
aagatcatttcctagttaaagtcac

SEQ ID NO: 359562 - DNA, 25 bp, Artificial
  probe
  misc_feature (1)..(25): SEQ ID NO: 3601; WAN024ANN; Start 171; Stop 195
cgcaagcattttgttcattttcatt

SEQ ID NO: 359563 - DNA, 25 bp, Artificial
  probe
  misc_feature (1)..(25): SEQ ID NO: 3601; WAN024ANN; Start 172; Stop 196
gcaagcattttgttcattttcattt

SEQ ID NO: 359564 - DNA, 25 bp, Artificial
  probe
  misc_feature (1)..(25): SEQ ID NO: 3601; WAN024ANN; Start 23; Stop 47
cgacaagctgtaggcataacttctg

SEQ ID NO: 359565 - DNA, 25 bp, Artificial
  probe
  misc_feature (1)..(25): SEQ ID NO: 3601; WAN024ANN; Start 128; Stop 152
ctgccctgaagactcttttatcata

SEQ ID NO: 359566 - DNA, 25 bp, Artificial
  probe
  misc_feature (1)..(25): SEQ ID NO: 3601; WAN024ANN; Start 129; Stop 153
tgccctgaagactcttttatcataa

SEQ ID NO: 359567 - DNA, 25 bp, Artificial
  probe
  misc_feature (1)..(25): SEQ ID NO: 3601; WAN024ANN; Start 34; Stop 58
aggcataacttctggttaggcaaag

SEQ ID NO: 359568 - DNA, 25 bp, Artificial
  probe
  misc_feature (1)..(25): SEQ ID NO: 3601; WAN024ANN; Start 130; Stop 154
gccctgaagactcttttatcataac

SEQ ID NO: 359569 - DNA, 25 bp, Artificial
  probe
  misc_feature (1)..(25): SEQ ID NO: 3601; WAN024ANN; Start 6; Stop 30
ttttcttttagactaggcgacaagc

SEQ ID NO: 359570 - DNA, 25 bp, Artificial
  probe
  misc_feature (1)..(25): SEQ ID NO: 3601; WAN024ANN; Start 25; Stop 49
acaagctgtaggcataacttctggt

SEQ ID NO: 359571 - DNA, 25 bp, Artificial
  probe
  misc_feature (1)..(25): SEQ ID NO: 3601; WAN024ANN; Start 88; Stop 112
catttcctagttaaagtcaccgccg

SEQ ID NO: 359572 - DNA, 25 bp, Artificial
  probe
  misc_feature (1)..(25): SEQ ID NO: 3601; WAN024ANN; Start 131; Stop 155
ccctgaagactcttttatcataaca

SEQ ID NO: 359573 - DNA, 25 bp, Artificial
  probe
  misc_feature (1)..(25): SEQ ID NO: 3601; WAN024ANN; Start 175; Stop 199
agcattttgttcattttcattttca

SEQ ID NO: 359574 - DNA, 25 bp, Artificial
  probe
  misc_feature (1)..(25): SEQ ID NO: 3601; WAN024ANN; Start 82; Stop 106
aaagatcatttcctagttaaagtca

SEQ ID NO: 359575 - DNA, 25 bp, Artificial
  probe
  misc_feature (1)..(25): SEQ ID NO: 3601; WAN024ANN; Start 58; Stop 82
gcttgtcaacaaagtataaaaggaa

SEQ ID NO: 359576 - DNA, 25 bp, Artificial
  probe
  misc_feature (1)..(25): SEQ ID NO: 3601; WAN024ANN; Start 57; Stop 81
agcttgtcaacaaagtataaaagga

SEQ ID NO: 359577 - DNA, 25 bp, Artificial
  probe
  misc_feature (1)..(25): SEQ ID NO: 3601; WAN024ANN; Start 52; Stop 76
ggcaaagcttgtcaacaaagtataa

SEQ ID NO: 359578 - DNA, 25 bp, Artificial
  probe
  misc_feature (1)..(25): SEQ ID NO: 3601; WAN024ANN; Start 127; Stop 151
cctgccctgaagactcttttatcat

SEQ ID NO: 359579 - DNA, 25 bp, Artificial
  probe
  misc_feature (1)..(25): SEQ ID NO: 3601; WAN024ANN; Start 53; Stop 77
gcaaagcttgtcaacaaagtataaa

SEQ ID NO: 359580 - DNA, 25 bp, Artificial
  probe
  misc_feature (1)..(25): SEQ ID NO: 3601; WAN024ANN; Start 51; Stop 75
aggcaaagcttgtcaacaaagtata

SEQ ID NO: 359581 - DNA, 25 bp, Artificial
  probe
  misc_feature (1)..(25): SEQ ID NO: 3602; WAN024G2J-3; Start 635; Stop 659
aattacagcaacacttgagaatgaa

SEQ ID NO: 359582 - DNA, 25 bp, Artificial
  probe
  misc_feature (1)..(25): SEQ ID NO: 3602; WAN024G2J-3; Start 561; Stop 585
tcttcagtgattgtagaggaattga

SEQ ID NO: 359583 - DNA, 25 bp, Artificial
  probe
  misc_feature (1)..(25): SEQ ID NO: 3602; WAN024G2J-3; Start 560; Stop 584
ttcttcagtgattgtagaggaattg

SEQ ID NO: 359584 - DNA, 25 bp, Artificial
  probe
  misc_feature (1)..(25): SEQ ID NO: 3602; WAN024G2J-3; Start 477; Stop 501
cttggtgaatctgttgctgagttag

SEQ ID NO: 359585 - DNA, 25 bp, Artificial
  probe
  misc_feature (1)..(25): SEQ ID NO: 3602; WAN024G2J-3; Start 1467; Stop 1491
gctccgtctgagattatctataaca

SEQ ID NO: 359586 - DNA, 25 bp, Artificial
  probe
  misc_feature (1)..(25): SEQ ID NO: 3602; WAN024G2J-3; Start 1466; Stop 1490
tgctccgtctgagattatctataac

SEQ ID NO: 359587 - DNA, 25 bp, Artificial
  probe
  misc_feature (1)..(25): SEQ ID NO: 3602; WAN024G2J-3; Start 1362; Stop 1386
gcagaacttgtgaagcggttatata

SEQ ID NO: 359588 - DNA, 25 bp, Artificial
  probe
  misc_feature (1)..(25): SEQ ID NO: 3602; WAN024G2J-3; Start 483; Stop 507
gaatctgttgctgagttagtcacaa

SEQ ID NO: 359589 - DNA, 25 bp, Artificial
  probe
  misc_feature (1)..(25): SEQ ID NO: 3602; WAN024G2J-3; Start 1465; Stop 1489
ttgctccgtctgagattatctataa

SEQ ID NO: 359590 - DNA, 25 bp, Artificial
  probe
  misc_feature (1)..(25): SEQ ID NO: 3602; WAN024G2J-3; Start 478; Stop 502
ttggtgaatctgttgctgagttagt

SEQ ID NO: 359591 - DNA, 25 bp, Artificial
  probe
  misc_feature (1)..(25): SEQ ID NO: 3602; WAN024G2J-3; Start 470; Stop 494
ttatggacttggtgaatctgttgct

SEQ ID NO: 359592 - DNA, 25 bp, Artificial
  probe
  misc_feature (1)..(25): SEQ ID NO: 3602; WAN024G2J-3; Start 1207; Stop 1231
ttgactatattccaccgcagaagac

SEQ ID NO: 359593 - DNA, 25 bp, Artificial
  probe
  misc_feature (1)..(25): SEQ ID NO: 3602; WAN024G2J-3; Start 479; Stop 503
tggtgaatctgttgctgagttagtc

SEQ ID NO: 359594 - DNA, 25 bp, Artificial
  probe
  misc_feature (1)..(25): SEQ ID NO: 3602; WAN024G2J-3; Start 476; Stop 500
acttggtgaatctgttgctgagtta

SEQ ID NO: 359595 - DNA, 25 bp, Artificial
  probe
  misc_feature (1)..(25): SEQ ID NO: 3602; WAN024G2J-3; Start 1065; Stop 1089
cagtttagatatttgcgagatggtg

SEQ ID NO: 359596 - DNA, 25 bp, Artificial
  probe
  misc_feature (1)..(25): SEQ ID NO: 3602; WAN024G2J-3; Start 1064; Stop 1088
tcagtttagatatttgcgagatggt

SEQ ID NO: 359597 - DNA, 25 bp, Artificial
  probe
  misc_feature (1)..(25): SEQ ID NO: 3602; WAN024G2J-3; Start 482; Stop 506
tgaatctgttgctgagttagtcaca

SEQ ID NO: 359598 - DNA, 25 bp, Artificial
  probe
  misc_feature (1)..(25): SEQ ID NO: 3602; WAN024G2J-3; Start 468; Stop 492
gtttatggacttggtgaatctgttg

SEQ ID NO: 359599 - DNA, 25 bp, Artificial
  probe
  misc_feature (1)..(25): SEQ ID NO: 3602; WAN024G2J-3; Start 380; Stop 404
ttcagatgttacagtcgatgatgag

SEQ ID NO: 359600 - DNA, 25 bp, Artificial
  probe
  misc_feature (1)..(25): SEQ ID NO: 3602; WAN024G2J-3; Start 1353; Stop 1377
ctctatattgcagaacttgtgaagc

SEQ ID NO: 359601 - DNA, 25 bp, Artificial
  probe
  misc_feature (1)..(25): SEQ ID NO: 3602; WAN024G2J-3; Start 610; Stop 634
gggaaactgagcaaattaagaaaca

SEQ ID NO: 359602 - DNA, 25 bp, Artificial
  probe
  misc_feature (1)..(25): SEQ ID NO: 3602; WAN024G2J-3; Start 609; Stop 633
agggaaactgagcaaattaagaaac

SEQ ID NO: 359603 - DNA, 25 bp, Artificial
  probe
  misc_feature (1)..(25): SEQ ID NO: 3602; WAN024G2J-3; Start 607; Stop 631
caagggaaactgagcaaattaagaa

SEQ ID NO: 359604 - DNA, 25 bp, Artificial
  probe
  misc_feature (1)..(25): SEQ ID NO: 3602; WAN024G2J-3; Start 605; Stop 629
aacaagggaaactgagcaaattaag

SEQ ID NO: 359605 - DNA, 25 bp, Artificial
  probe
  misc_feature (1)..(25): SEQ ID NO: 3602; WAN024G2J-3; Start 604; Stop 628
aaacaagggaaactgagcaaattaa

SEQ ID NO: 359606 - DNA, 25 bp, Artificial
  probe
  misc_feature (1)..(25): SEQ ID NO: 3602; WAN024G2J-3; Start 568; Stop 592
tgattgtagaggaattgaaagcaga

SEQ ID NO: 359607 - DNA, 25 bp, Artificial
  probe
  misc_feature (1)..(25): SEQ ID NO: 3602; WAN024G2J-3; Start 567; Stop 591
gtgattgtagaggaattgaaagcag

SEQ ID NO: 359608 - DNA, 25 bp, Artificial
  probe
  misc_feature (1)..(25): SEQ ID NO: 3602; WAN024G2J-3; Start 565; Stop 589
cagtgattgtagaggaattgaaagc

SEQ ID NO: 359609 - DNA, 25 bp, Artificial
  probe
  misc_feature (1)..(25): SEQ ID NO: 3602; WAN024G2J-3; Start 566; Stop 590
agtgattgtagaggaattgaaagca

SEQ ID NO: 359610 - DNA, 25 bp, Artificial
  probe
  misc_feature (1)..(25): SEQ ID NO: 3602; WAN024G2J-3; Start 1066; Stop 1090
agtttagatatttgcgagatggtgg

SEQ ID NO: 359611 - DNA, 25 bp, Artificial
  probe
  misc_feature (1)..(25): SEQ ID NO: 3602; WAN024G2J-3; Start 1352; Stop 1376
cctctatattgcagaacttgtgaag

SEQ ID NO: 359612 - DNA, 25 bp, Artificial
  probe
  misc_feature (1)..(25): SEQ ID NO: 3602; WAN024G2J-3; Start 1063; Stop 1087
atcagtttagatatttgcgagatgg

SEQ ID NO: 359613 - DNA, 25 bp, Artificial
  probe
  misc_feature (1)..(25): SEQ ID NO: 3602; WAN024G2J-3; Start 608; Stop 632
aagggaaactgagcaaattaagaaa

SEQ ID NO: 359614 - DNA, 25 bp, Artificial
  probe
  misc_feature (1)..(25): SEQ ID NO: 3603; WAN024A96; Start 62; Stop 86
ctaacttttgaggtcacgacattac

SEQ ID NO: 359615 - DNA, 25 bp, Artificial
  probe
  misc_feature (1)..(25): SEQ ID NO: 3603; WAN024A96; Start 61; Stop 85
tctaacttttgaggtcacgacatta

SEQ ID NO: 359616 - DNA, 25 bp, Artificial
  probe
  misc_feature (1)..(25): SEQ ID NO: 3603; WAN024A96; Start 31; Stop 55
tgtctgtaacccaaaagatagatga

SEQ ID NO: 359617 - DNA, 25 bp, Artificial
  probe
  misc_feature (1)..(25): SEQ ID NO: 3603; WAN024A96; Start 56; Stop 80
tttagtctaacttttgaggtcacga

SEQ ID NO: 359618 - DNA, 25 bp, Artificial
  probe
  misc_feature (1)..(25): SEQ ID NO: 3603; WAN024A96; Start 30; Stop 54
ttgtctgtaacccaaaagatagatg

SEQ ID NO: 359619 - DNA, 25 bp, Artificial
  probe
  misc_feature (1)..(25): SEQ ID NO: 3603; WAN024A96; Start 29; Stop 53
gttgtctgtaacccaaaagatagat

SEQ ID NO: 359620 - DNA, 25 bp, Artificial
  probe
  misc_feature (1)..(25): SEQ ID NO: 3603; WAN024A96; Start 55; Stop 79
atttagtctaacttttgaggtcacg

SEQ ID NO: 359621 - DNA, 25 bp, Artificial
  probe
  misc_feature (1)..(25): SEQ ID NO: 3603; WAN024A96; Start 32; Stop 56
gtctgtaacccaaaagatagatgat

SEQ ID NO: 359622 - DNA, 25 bp, Artificial
  probe
  misc_feature (1)..(25): SEQ ID NO: 3603; WAN024A96; Start 57; Stop 81
ttagtctaacttttgaggtcacgac

SEQ ID NO: 359623 - DNA, 25 bp, Artificial
  probe
  misc_feature (1)..(25): SEQ ID NO: 3603; WAN024A96; Start 60; Stop 84
gtctaacttttgaggtcacgacatt

SEQ ID NO: 359624 - DNA, 25 bp, Artificial
  probe
  misc_feature (1)..(25): SEQ ID NO: 3603; WAN024A96; Start 58; Stop 82
tagtctaacttttgaggtcacgaca

SEQ ID NO: 359625 - DNA, 25 bp, Artificial
  probe
  misc_feature (1)..(25): SEQ ID NO: 3603; WAN024A96; Start 33; Stop 57
tctgtaacccaaaagatagatgatt

SEQ ID NO: 359626 - DNA, 25 bp, Artificial
  probe
  misc_feature (1)..(25): SEQ ID NO: 3603; WAN024A96; Start 53; Stop 77
tgatttagtctaacttttgaggtca

SEQ ID NO: 359627 - DNA, 25 bp, Artificial
  probe
  misc_feature (1)..(25): SEQ ID NO: 3603; WAN024A96; Start 63; Stop 87
taacttttgaggtcacgacattacc

SEQ ID NO: 359628 - DNA, 25 bp, Artificial
  probe
  misc_feature (1)..(25): SEQ ID NO: 3603; WAN024A96; Start 59; Stop 83
agtctaacttttgaggtcacgacat

SEQ ID NO: 359629 - DNA, 25 bp, Artificial
  probe
  misc_feature (1)..(25): SEQ ID NO: 3603; WAN024A96; Start 54; Stop 78
gatttagtctaacttttgaggtcac

SEQ ID NO: 359630 - DNA, 25 bp, Artificial
  probe
  misc_feature (1)..(25): SEQ ID NO: 3603; WAN024A96; Start 39; Stop 63
acccaaaagatagatgatttagtct

SEQ ID NO: 359631 - DNA, 25 bp, Artificial
  probe
  misc_feature (1)..(25): SEQ ID NO: 3603; WAN024A96; Start 34; Stop 58
ctgtaacccaaaagatagatgattt

SEQ ID NO: 359632 - DNA, 25 bp, Artificial
  probe
  misc_feature (1)..(25): SEQ ID NO: 3603; WAN024A96; Start 38; Stop 62
aacccaaaagatagatgatttagtc

SEQ ID NO: 359633 - DNA, 25 bp, Artificial
  probe
  misc_feature (1)..(25): SEQ ID NO: 3603; WAN024A96; Start 52; Stop 76
atgatttagtctaacttttgaggtc

SEQ ID NO: 359634 - DNA, 25 bp, Artificial
  probe
  misc_feature (1)..(25): SEQ ID NO: 3603; WAN024A96; Start 51; Stop 75
gatgatttagtctaacttttgaggt

SEQ ID NO: 359635 - DNA, 25 bp, Artificial
  probe
  misc_feature (1)..(25): SEQ ID NO: 3603; WAN024A96; Start 50; Stop 74
agatgatttagtctaacttttgagg

SEQ ID NO: 359636 - DNA, 25 bp, Artificial
  probe
  misc_feature (1)..(25): SEQ ID NO: 3603; WAN024A96; Start 35; Stop 59
tgtaacccaaaagatagatgattta

SEQ ID NO: 359637 - DNA, 25 bp, Artificial
  probe
  misc_feature (1)..(25): SEQ ID NO: 3603; WAN024A96; Start 37; Stop 61
taacccaaaagatagatgatttagt

SEQ ID NO: 359638 - DNA, 25 bp, Artificial
  probe
  misc_feature (1)..(25): SEQ ID NO: 3603; WAN024A96; Start 36; Stop 60
gtaacccaaaagatagatgatttag

SEQ ID NO: 359639 - DNA, 25 bp, Artificial
  probe
  misc_feature (1)..(25): SEQ ID NO: 3603; WAN024A96; Start 28; Stop 52
ggttgtctgtaacccaaaagataga

SEQ ID NO: 359640 - DNA, 25 bp, Artificial
  probe
  misc_feature (1)..(25): SEQ ID NO: 3603; WAN024A96; Start 27; Stop 51
aggttgtctgtaacccaaaagatag

SEQ ID NO: 359641 - DNA, 25 bp, Artificial
  probe
  misc_feature (1)..(25): SEQ ID NO: 3603; WAN024A96; Start 26; Stop 50
gaggttgtctgtaacccaaaagata

SEQ ID NO: 359642 - DNA, 25 bp, Artificial
  probe
  misc_feature (1)..(25): SEQ ID NO: 3603; WAN024A96; Start 22; Stop 46
aaaagaggttgtctgtaacccaaaa

SEQ ID NO: 359643 - DNA, 25 bp, Artificial
  probe
  misc_feature (1)..(25): SEQ ID NO: 3603; WAN024A96; Start 40; Stop 64
cccaaaagatagatgatttagtcta

SEQ ID NO: 359644 - DNA, 25 bp, Artificial
  probe
  misc_feature (1)..(25): SEQ ID NO: 3603; WAN024A96; Start 23; Stop 47
aaagaggttgtctgtaacccaaaag

SEQ ID NO: 359645 - DNA, 25 bp, Artificial
  probe
  misc_feature (1)..(25): SEQ ID NO: 3603; WAN024A96; Start 25; Stop 49
agaggttgtctgtaacccaaaagat

SEQ ID NO: 359646 - DNA, 25 bp, Artificial
  probe
  misc_feature (1)..(25): SEQ ID NO: 3603; WAN024A96; Start 24; Stop 48
aagaggttgtctgtaacccaaaaga

SEQ ID NO: 359647 - DNA, 25 bp, Artificial
  probe
  misc_feature (1)..(25): SEQ ID NO: 3603; WAN024A96; Start 64; Stop 88
aacttttgaggtcacgacattacct

SEQ ID NO: 359648 - DNA, 25 bp, Artificial
  probe
  misc_feature (1)..(25): SEQ ID NO: 3604; WAN0249GY; Start 26; Stop 50
ctgcttacattttatcatatactgt

SEQ ID NO: 359649 - DNA, 25 bp, Artificial
  probe
  misc_feature (1)..(25): SEQ ID NO: 3605; WAN024ANE; Start 12; Stop 36
cctcagatatactgcaatatcatcg

SEQ ID NO: 359650 - DNA, 25 bp, Artificial
  probe
  misc_feature (1)..(25): SEQ ID NO: 3605; WAN024ANE; Start 13; Stop 37
ctcagatatactgcaatatcatcgt

SEQ ID NO: 359651 - DNA, 25 bp, Artificial
  probe
  misc_feature (1)..(25): SEQ ID NO: 3605; WAN024ANE; Start 8; Stop 32
cctacctcagatatactgcaatatc

SEQ ID NO: 359652 - DNA, 25 bp, Artificial
  probe
  misc_feature (1)..(25): SEQ ID NO: 3605; WAN024ANE; Start 11; Stop 35
acctcagatatactgcaatatcatc

SEQ ID NO: 359653 - DNA, 25 bp, Artificial
  probe
  misc_feature (1)..(25): SEQ ID NO: 3605; WAN024ANE; Start 17; Stop 41
gatatactgcaatatcatcgtatgc

SEQ ID NO: 359654 - DNA, 25 bp, Artificial
  probe
  misc_feature (1)..(25): SEQ ID NO: 3605; WAN024ANE; Start 9; Stop 33
ctacctcagatatactgcaatatca

SEQ ID NO: 359655 - DNA, 25 bp, Artificial
  probe
  misc_feature (1)..(25): SEQ ID NO: 3605; WAN024ANE; Start 14; Stop 38
tcagatatactgcaatatcatcgta

SEQ ID NO: 359656 - DNA, 25 bp, Artificial
  probe
  misc_feature (1)..(25): SEQ ID NO: 3605; WAN024ANE; Start 10; Stop 34
tacctcagatatactgcaatatcat

SEQ ID NO: 359657 - DNA, 25 bp, Artificial
  probe
  misc_feature (1)..(25): SEQ ID NO: 3605; WAN024ANE; Start 16; Stop 40
agatatactgcaatatcatcgtatg

SEQ ID NO: 359658 - DNA, 25 bp, Artificial
  probe
  misc_feature (1)..(25): SEQ ID NO: 3605; WAN024ANE; Start 15; Stop 39
cagatatactgcaatatcatcgtat

SEQ ID NO: 359659 - DNA, 25 bp, Artificial
  probe
  misc_feature (1)..(25): SEQ ID NO: 3606; WAN0249WU; Start 44; Stop 68
aatgtagctattaaaggagtaagaa

SEQ ID NO: 359660 - DNA, 25 bp, Artificial
  probe
  misc_feature (1)..(25): SEQ ID NO: 3606; WAN0249WU; Start 43; Stop 67
aaatgtagctattaaaggagtaaga

SEQ ID NO: 359661 - DNA, 25 bp, Artificial
  probe
  misc_feature (1)..(25): SEQ ID NO: 3607; WAN024ALC; Start 7; Stop 31
cctcctgtatgatatgttgtagtgg

SEQ ID NO: 359662 - DNA, 25 bp, Artificial
  probe
  misc_feature (1)..(25): SEQ ID NO: 3607; WAN024ALC; Start 6; Stop 30
acctcctgtatgatatgttgtagtg

SEQ ID NO: 359663 - DNA, 25 bp, Artificial
  probe
  misc_feature (1)..(25): SEQ ID NO: 3607; WAN024ALC; Start 8; Stop 32
ctcctgtatgatatgttgtagtggc

SEQ ID NO: 359664 - DNA, 25 bp, Artificial
  probe
  misc_feature (1)..(25): SEQ ID NO: 3607; WAN024ALC; Start 14; Stop 38
tatgatatgttgtagtggcggagaa

SEQ ID NO: 359665 - DNA, 25 bp, Artificial
  probe
  misc_feature (1)..(25): SEQ ID NO: 3607; WAN024ALC; Start 5; Stop 29
tacctcctgtatgatatgttgtagt

SEQ ID NO: 359666 - DNA, 25 bp, Artificial
  probe
  misc_feature (1)..(25): SEQ ID NO: 3607; WAN024ALC; Start 13; Stop 37
gtatgatatgttgtagtggcggaga

SEQ ID NO: 359667 - DNA, 25 bp, Artificial
  probe
  misc_feature (1)..(25): SEQ ID NO: 3607; WAN024ALC; Start 12; Stop 36
tgtatgatatgttgtagtggcggag

SEQ ID NO: 359668 - DNA, 25 bp, Artificial
  probe
  misc_feature (1)..(25): SEQ ID NO: 3607; WAN024ALC; Start 11; Stop 35
ctgtatgatatgttgtagtggcgga

SEQ ID NO: 359669 - DNA, 25 bp, Artificial
  probe
  misc_feature (1)..(25): SEQ ID NO: 3607; WAN024ALC; Start 9; Stop 33
tcctgtatgatatgttgtagtggcg

SEQ ID NO: 359670 - DNA, 25 bp, Artificial
  probe
  misc_feature (1)..(25): SEQ ID NO: 3607; WAN024ALC; Start 4; Stop 28
gtacctcctgtatgatatgttgtag

SEQ ID NO: 359671 - DNA, 25 bp, Artificial
  probe
  misc_feature (1)..(25): SEQ ID NO: 3607; WAN024ALC; Start 10; Stop 34
cctgtatgatatgttgtagtggcgg

SEQ ID NO: 359672 - DNA, 25 bp, Artificial
  probe
  misc_feature (1)..(25): SEQ ID NO: 3607; WAN024ALC; Start 15; Stop 39
atgatatgttgtagtggcggagaaa

SEQ ID NO: 359673 - DNA, 25 bp, Artificial
  probe
  misc_feature (1)..(25): SEQ ID NO: 3607; WAN024ALC; Start 16; Stop 40
tgatatgttgtagtggcggagaaac

SEQ ID NO: 359674 - DNA, 25 bp, Artificial
  probe
  misc_feature (1)..(25): SEQ ID NO: 3607; WAN024ALC; Start 32; Stop 56
cggagaaaccacttctatcttatca

SEQ ID NO: 359675 - DNA, 25 bp, Artificial
  probe
  misc_feature (1)..(25): SEQ ID NO: 3607; WAN024ALC; Start 31; Stop 55
gcggagaaaccacttctatcttatc

SEQ ID NO: 359676 - DNA, 25 bp, Artificial
  probe
  misc_feature (1)..(25): SEQ ID NO: 3607; WAN024ALC; Start 17; Stop 41
gatatgttgtagtggcggagaaacc

SEQ ID NO: 359677 - DNA, 25 bp, Artificial
  probe
  misc_feature (1)..(25): SEQ ID NO: 3607; WAN024ALC; Start 33; Stop 57
ggagaaaccacttctatcttatcat

SEQ ID NO: 359678 - DNA, 25 bp, Artificial
  probe
  misc_feature (1)..(25): SEQ ID NO: 3607; WAN024ALC; Start 30; Stop 54
ggcggagaaaccacttctatcttat

SEQ ID NO: 359679 - DNA, 25 bp, Artificial
  probe
  misc_feature (1)..(25): SEQ ID NO: 3607; WAN024ALC; Start 87; Stop 111
aaagctctatggaaccactagcata

SEQ ID NO: 359680 - DNA, 25 bp, Artificial
  probe
  misc_feature (1)..(25): SEQ ID NO: 3607; WAN024ALC; Start 3; Stop 27
ggtacctcctgtatgatatgttgta

SEQ ID NO: 359681 - DNA, 25 bp, Artificial
  probe
  misc_feature (1)..(25): SEQ ID NO: 3607; WAN024ALC; Start 29; Stop 53
tggcggagaaaccacttctatctta

SEQ ID NO: 359682 - DNA, 25 bp, Artificial
  probe
  misc_feature (1)..(25): SEQ ID NO: 3607; WAN024ALC; Start 88; Stop 112
aagctctatggaaccactagcatag

SEQ ID NO: 359683 - DNA, 25 bp, Artificial
  probe
  misc_feature (1)..(25): SEQ ID NO: 3607; WAN024ALC; Start 18; Stop 42
atatgttgtagtggcggagaaacca

SEQ ID NO: 359684 - DNA, 25 bp, Artificial
  probe
  misc_feature (1)..(25): SEQ ID NO: 3607; WAN024ALC; Start 34; Stop 58
gagaaaccacttctatcttatcatt

SEQ ID NO: 359685 - DNA, 25 bp, Artificial
  probe
  misc_feature (1)..(25): SEQ ID NO: 3607; WAN024ALC; Start 113; Stop 137
ctagtggttttcgggagacaacaaa

SEQ ID NO: 359686 - DNA, 25 bp, Artificial
  probe
  misc_feature (1)..(25): SEQ ID NO: 3607; WAN024ALC; Start 114; Stop 138
tagtggttttcgggagacaacaaaa

SEQ ID NO: 359687 - DNA, 25 bp, Artificial
  probe
  misc_feature (1)..(25): SEQ ID NO: 3607; WAN024ALC; Start 72; Stop 96
tttgttaccacgctaaaagctctat

SEQ ID NO: 359688 - DNA, 25 bp, Artificial
  probe
  misc_feature (1)..(25): SEQ ID NO: 3607; WAN024ALC; Start 71; Stop 95
ttttgttaccacgctaaaagctcta

SEQ ID NO: 359689 - DNA, 25 bp, Artificial
  probe
  misc_feature (1)..(25): SEQ ID NO: 3607; WAN024ALC; Start 84; Stop 108
ctaaaagctctatggaaccactagc

SEQ ID NO: 359690 - DNA, 25 bp, Artificial
  probe
  misc_feature (1)..(25): SEQ ID NO: 3607; WAN024ALC; Start 83; Stop 107
gctaaaagctctatggaaccactag

SEQ ID NO: 359691 - DNA, 25 bp, Artificial
  probe
  misc_feature (1)..(25): SEQ ID NO: 3607; WAN024ALC; Start 91; Stop 115
ctctatggaaccactagcatagcta

SEQ ID NO: 359692 - DNA, 25 bp, Artificial
  probe
  misc_feature (1)..(25): SEQ ID NO: 3607; WAN024ALC; Start 49; Stop 73
tcttatcattttaggaggttctttt

SEQ ID NO: 359693 - DNA, 25 bp, Artificial
  probe
  misc_feature (1)..(25): SEQ ID NO: 3607; WAN024ALC; Start 39; Stop 63
accacttctatcttatcattttagg

SEQ ID NO: 359694 - DNA, 25 bp, Artificial
  probe
  misc_feature (1)..(25): SEQ ID NO: 3608; WAN0249HM; Start 119; Stop 143
tacgagatggtaagctgagttatag

SEQ ID NO: 359695 - DNA, 25 bp, Artificial
  probe
  misc_feature (1)..(25): SEQ ID NO: 3608; WAN0249HM; Start 118; Stop 142
ttacgagatggtaagctgagttata

SEQ ID NO: 359696 - DNA, 25 bp, Artificial
  probe
  misc_feature (1)..(25): SEQ ID NO: 3608; WAN0249HM; Start 107; Stop 131
ttggtttcaacttacgagatggtaa

SEQ ID NO: 359697 - DNA, 25 bp, Artificial
  probe
  misc_feature (1)..(25): SEQ ID NO: 3608; WAN0249HM; Start 120; Stop 144
acgagatggtaagctgagttatagc

SEQ ID NO: 359698 - DNA, 25 bp, Artificial
  probe
  misc_feature (1)..(25): SEQ ID NO: 3608; WAN0249HM; Start 91; Stop 115
tgttttcatgctattgttggtttca

SEQ ID NO: 359699 - DNA, 25 bp, Artificial
  probe
  misc_feature (1)..(25): SEQ ID NO: 3608; WAN0249HM; Start 81; Stop 105
ccgttctcaatgttttcatgctatt

SEQ ID NO: 359700 - DNA, 25 bp, Artificial
  probe
  misc_feature (1)..(25): SEQ ID NO: 3608; WAN0249HM; Start 90; Stop 114
atgttttcatgctattgttggtttc

SEQ ID NO: 359701 - DNA, 25 bp, Artificial
  probe
  misc_feature (1)..(25): SEQ ID NO: 3608; WAN0249HM; Start 92; Stop 116
gttttcatgctattgttggtttcaa

SEQ ID NO: 359702 - DNA, 25 bp, Artificial
  probe
  misc_feature (1)..(25): SEQ ID NO: 3608; WAN0249HM; Start 89; Stop 113
aatgttttcatgctattgttggttt

SEQ ID NO: 359703 - DNA, 25 bp, Artificial
  probe
  misc_feature (1)..(25): SEQ ID NO: 3608; WAN0249HM; Start 75; Stop 99
acctacccgttctcaatgttttcat

SEQ ID NO: 359704 - DNA, 25 bp, Artificial
  probe
  misc_feature (1)..(25): SEQ ID NO: 3608; WAN0249HM; Start 103; Stop 127
attgttggtttcaacttacgagatg

SEQ ID NO: 359705 - DNA, 25 bp, Artificial
  probe
  misc_feature (1)..(25): SEQ ID NO: 3608; WAN0249HM; Start 95; Stop 119
ttcatgctattgttggtttcaactt

SEQ ID NO: 359706 - DNA, 25 bp, Artificial
  probe
  misc_feature (1)..(25): SEQ ID NO: 3608; WAN0249HM; Start 94; Stop 118
tttcatgctattgttggtttcaact

SEQ ID NO: 359707 - DNA, 25 bp, Artificial
  probe
  misc_feature (1)..(25): SEQ ID NO: 3608; WAN0249HM; Start 98; Stop 122
atgctattgttggtttcaacttacg

SEQ ID NO: 359708 - DNA, 25 bp, Artificial
  probe
  misc_feature (1)..(25): SEQ ID NO: 3608; WAN0249HM; Start 80; Stop 104
cccgttctcaatgttttcatgctat

SEQ ID NO: 359709 - DNA, 25 bp, Artificial
  probe
  misc_feature (1)..(25): SEQ ID NO: 3608; WAN0249HM; Start 101; Stop 125
ctattgttggtttcaacttacgaga

SEQ ID NO: 359710 - DNA, 25 bp, Artificial
  probe
  misc_feature (1)..(25): SEQ ID NO: 3608; WAN0249HM; Start 100; Stop 124
gctattgttggtttcaacttacgag

SEQ ID NO: 359711 - DNA, 25 bp, Artificial
  probe
  misc_feature (1)..(25): SEQ ID NO: 3608; WAN0249HM; Start 97; Stop 121
catgctattgttggtttcaacttac

SEQ ID NO: 359712 - DNA, 25 bp, Artificial
  probe
  misc_feature (1)..(25): SEQ ID NO: 3608; WAN0249HM; Start 96; Stop 120
tcatgctattgttggtttcaactta

SEQ ID NO: 359713 - DNA, 25 bp, Artificial
  probe
  misc_feature (1)..(25): SEQ ID NO: 3608; WAN0249HM; Start 74; Stop 98
gacctacccgttctcaatgttttca

SEQ ID NO: 359714 - DNA, 25 bp, Artificial
  probe
  misc_feature (1)..(25): SEQ ID NO: 3608; WAN0249HM; Start 106; Stop 130
gttggtttcaacttacgagatggta

SEQ ID NO: 359715 - DNA, 25 bp, Artificial
  probe
  misc_feature (1)..(25): SEQ ID NO: 3608; WAN0249HM; Start 76; Stop 100
cctacccgttctcaatgttttcatg

SEQ ID NO: 359716 - DNA, 25 bp, Artificial
  probe
  misc_feature (1)..(25): SEQ ID NO: 3608; WAN0249HM; Start 117; Stop 141
cttacgagatggtaagctgagttat

SEQ ID NO: 359717 - DNA, 25 bp, Artificial
  probe
  misc_feature (1)..(25): SEQ ID NO: 3608; WAN0249HM; Start 99; Stop 123
tgctattgttggtttcaacttacga

SEQ ID NO: 359718 - DNA, 25 bp, Artificial
  probe
  misc_feature (1)..(25): SEQ ID NO: 3608; WAN0249HM; Start 102; Stop 126
tattgttggtttcaacttacgagat

SEQ ID NO: 359719 - DNA, 25 bp, Artificial
  probe
  misc_feature (1)..(25): SEQ ID NO: 3608; WAN0249HM; Start 71; Stop 95
caggacctacccgttctcaatgttt

SEQ ID NO: 359720 - DNA, 25 bp, Artificial
  probe
  misc_feature (1)..(25): SEQ ID NO: 3608; WAN0249HM; Start 116; Stop 140
acttacgagatggtaagctgagtta

SEQ ID NO: 359721 - DNA, 25 bp, Artificial
  probe
  misc_feature (1)..(25): SEQ ID NO: 3608; WAN0249HM; Start 104; Stop 128
ttgttggtttcaacttacgagatgg

SEQ ID NO: 359722 - DNA, 25 bp, Artificial
  probe
  misc_feature (1)..(25): SEQ ID NO: 3608; WAN0249HM; Start 87; Stop 111
tcaatgttttcatgctattgttggt

SEQ ID NO: 359723 - DNA, 25 bp, Artificial
  probe
  misc_feature (1)..(25): SEQ ID NO: 3608; WAN0249HM; Start 82; Stop 106
cgttctcaatgttttcatgctattg

SEQ ID NO: 359724 - DNA, 25 bp, Artificial
  probe
  misc_feature (1)..(25): SEQ ID NO: 3608; WAN0249HM; Start 86; Stop 110
ctcaatgttttcatgctattgttgg

SEQ ID NO: 359725 - DNA, 25 bp, Artificial
  probe
  misc_feature (1)..(25): SEQ ID NO: 3608; WAN0249HM; Start 77; Stop 101
ctacccgttctcaatgttttcatgc

SEQ ID NO: 359726 - DNA, 25 bp, Artificial
  probe
  misc_feature (1)..(25): SEQ ID NO: 3608; WAN0249HM; Start 88; Stop 112
caatgttttcatgctattgttggtt

SEQ ID NO: 359727 - DNA, 25 bp, Artificial
  probe
  misc_feature (1)..(25): SEQ ID NO: 3609; WAN024A5G; Start 81; Stop 105
aaacctttgcttaggatagtatagc

SEQ ID NO: 359728 - DNA, 25 bp, Artificial
  probe
  misc_feature (1)..(25): SEQ ID NO: 3609; WAN024A5G; Start 80; Stop 104
aaaacctttgcttaggatagtatag

SEQ ID NO: 359729 - DNA, 25 bp, Artificial
  probe
  misc_feature (1)..(25): SEQ ID NO: 3609; WAN024A5G; Start 58; Stop 82
gtcacctcacgggatgacattaaaa

SEQ ID NO: 359730 - DNA, 25 bp, Artificial
  probe
  misc_feature (1)..(25): SEQ ID NO: 3609; WAN024A5G; Start 57; Stop 81
cgtcacctcacgggatgacattaaa

SEQ ID NO: 359731 - DNA, 25 bp, Artificial
  probe
  misc_feature (1)..(25): SEQ ID NO: 3610; WAN024AGA; Start 27; Stop 51
aacgaaaggatgggtaaactgtatt

SEQ ID NO: 359732 - DNA, 25 bp, Artificial
  probe
  misc_feature (1)..(25): SEQ ID NO: 3610; WAN024AGA; Start 26; Stop 50
aaacgaaaggatgggtaaactgtat

SEQ ID NO: 359733 - DNA, 25 bp, Artificial
  probe
  misc_feature (1)..(25): SEQ ID NO: 3610; WAN024AGA; Start 28; Stop 52
acgaaaggatgggtaaactgtattc

SEQ ID NO: 359734 - DNA, 25 bp, Artificial
  probe
  misc_feature (1)..(25): SEQ ID NO: 3610; WAN024AGA; Start 39; Stop 63
ggtaaactgtattcgctgaactgaa

SEQ ID NO: 359735 - DNA, 25 bp, Artificial
  probe
  misc_feature (1)..(25): SEQ ID NO: 3610; WAN024AGA; Start 30; Stop 54
gaaaggatgggtaaactgtattcgc

SEQ ID NO: 359736 - DNA, 25 bp, Artificial
  probe
  misc_feature (1)..(25): SEQ ID NO: 3610; WAN024AGA; Start 31; Stop 55
aaaggatgggtaaactgtattcgct

SEQ ID NO: 359737 - DNA, 25 bp, Artificial
  probe
  misc_feature (1)..(25): SEQ ID NO: 3610; WAN024AGA; Start 35; Stop 59
gatgggtaaactgtattcgctgaac

SEQ ID NO: 359738 - DNA, 25 bp, Artificial
  probe
  misc_feature (1)..(25): SEQ ID NO: 3610; WAN024AGA; Start 36; Stop 60
atgggtaaactgtattcgctgaact

SEQ ID NO: 359739 - DNA, 25 bp, Artificial
  probe
  misc_feature (1)..(25): SEQ ID NO: 3610; WAN024AGA; Start 40; Stop 64
gtaaactgtattcgctgaactgaat

SEQ ID NO: 359740 - DNA, 25 bp, Artificial
  probe
  misc_feature (1)..(25): SEQ ID NO: 3610; WAN024AGA; Start 32; Stop 56
aaggatgggtaaactgtattcgctg

SEQ ID NO: 359741 - DNA, 25 bp, Artificial
  probe
  misc_feature (1)..(25): SEQ ID NO: 3610; WAN024AGA; Start 38; Stop 62
gggtaaactgtattcgctgaactga

SEQ ID NO: 359742 - DNA, 25 bp, Artificial
  probe
  misc_feature (1)..(25): SEQ ID NO: 3610; WAN024AGA; Start 34; Stop 58
ggatgggtaaactgtattcgctgaa

SEQ ID NO: 359743 - DNA, 25 bp, Artificial
  probe
  misc_feature (1)..(25): SEQ ID NO: 3610; WAN024AGA; Start 37; Stop 61
tgggtaaactgtattcgctgaactg

SEQ ID NO: 359744 - DNA, 25 bp, Artificial
  probe
  misc_feature (1)..(25): SEQ ID NO: 3610; WAN024AGA; Start 25; Stop 49
aaaacgaaaggatgggtaaactgta

SEQ ID NO: 359745 - DNA, 25 bp, Artificial
  probe
  misc_feature (1)..(25): SEQ ID NO: 3610; WAN024AGA; Start 33; Stop 57
aggatgggtaaactgtattcgctga

SEQ ID NO: 359746 - DNA, 25 bp, Artificial
  probe
  misc_feature (1)..(25): SEQ ID NO: 3610; WAN024AGA; Start 69; Stop 93
gcgactctcctctaaatcaaaatta

SEQ ID NO: 359747 - DNA, 25 bp, Artificial
  probe
  misc_feature (1)..(25): SEQ ID NO: 3610; WAN024AGA; Start 68; Stop 92
ggcgactctcctctaaatcaaaatt

SEQ ID NO: 359748 - DNA, 25 bp, Artificial
  probe
  misc_feature (1)..(25): SEQ ID NO: 3610; WAN024AGA; Start 62; Stop 86
aatacgggcgactctcctctaaatc

SEQ ID NO: 359749 - DNA, 25 bp, Artificial
  probe
  misc_feature (1)..(25): SEQ ID NO: 3610; WAN024AGA; Start 61; Stop 85
gaatacgggcgactctcctctaaat

SEQ ID NO: 359750 - DNA, 25 bp, Artificial
  probe
  misc_feature (1)..(25): SEQ ID NO: 3610; WAN024AGA; Start 67; Stop 91
gggcgactctcctctaaatcaaaat

SEQ ID NO: 359751 - DNA, 25 bp, Artificial
  probe
  misc_feature (1)..(25): SEQ ID NO: 3610; WAN024AGA; Start 41; Stop 65
taaactgtattcgctgaactgaata

SEQ ID NO: 359752 - DNA, 25 bp, Artificial
  probe
  misc_feature (1)..(25): SEQ ID NO: 3610; WAN024AGA; Start 63; Stop 87
atacgggcgactctcctctaaatca

SEQ ID NO: 359753 - DNA, 25 bp, Artificial
  probe
  misc_feature (1)..(25): SEQ ID NO: 3610; WAN024AGA; Start 64; Stop 88
tacgggcgactctcctctaaatcaa

SEQ ID NO: 359754 - DNA, 25 bp, Artificial
  probe
  misc_feature (1)..(25): SEQ ID NO: 3610; WAN024AGA; Start 60; Stop 84
tgaatacgggcgactctcctctaaa

SEQ ID NO: 359755 - DNA, 25 bp, Artificial
  probe
  misc_feature (1)..(25): SEQ ID NO: 3610; WAN024AGA; Start 29; Stop 53
cgaaaggatgggtaaactgtattcg

SEQ ID NO: 359756 - DNA, 25 bp, Artificial
  probe
  misc_feature (1)..(25): SEQ ID NO: 3610; WAN024AGA; Start 66; Stop 90
cgggcgactctcctctaaatcaaaa

SEQ ID NO: 359757 - DNA, 25 bp, Artificial
  probe
  misc_feature (1)..(25): SEQ ID NO: 3611; WAN024A5F; Start 8; Stop 32
aatacacctaatccactcagacagc

SEQ ID NO: 359758 - DNA, 25 bp, Artificial
  probe
  misc_feature (1)..(25): SEQ ID NO: 3611; WAN024A5F; Start 7; Stop 31
aaatacacctaatccactcagacag

SEQ ID NO: 359759 - DNA, 25 bp, Artificial
  probe
  misc_feature (1)..(25): SEQ ID NO: 3611; WAN024A5F; Start 6; Stop 30
taaatacacctaatccactcagaca

SEQ ID NO: 359760 - DNA, 25 bp, Artificial
  probe
  misc_feature (1)..(25): SEQ ID NO: 3611; WAN024A5F; Start 5; Stop 29
ctaaatacacctaatccactcagac

SEQ ID NO: 359761 - DNA, 25 bp, Artificial
  probe
  misc_feature (1)..(25): SEQ ID NO: 3611; WAN024A5F; Start 3; Stop 27
gtctaaatacacctaatccactcag

SEQ ID NO: 359762 - DNA, 25 bp, Artificial
  probe
  misc_feature (1)..(25): SEQ ID NO: 3611; WAN024A5F; Start 4; Stop 28
tctaaatacacctaatccactcaga

SEQ ID NO: 359763 - DNA, 25 bp, Artificial
  probe
  misc_feature (1)..(25): SEQ ID NO: 3611; WAN024A5F; Start 2; Stop 26
agtctaaatacacctaatccactca

SEQ ID NO: 359764 - DNA, 25 bp, Artificial
  probe
  misc_feature (1)..(25): SEQ ID NO: 3611; WAN024A5F; Start 9; Stop 33
atacacctaatccactcagacagct

SEQ ID NO: 359765 - DNA, 25 bp, Artificial
  probe
  misc_feature (1)..(25): SEQ ID NO: 3611; WAN024A5F; Start 1; Stop 25
gagtctaaatacacctaatccactc

SEQ ID NO: 359766 - DNA, 25 bp, Artificial
  probe
  misc_feature (1)..(25): SEQ ID NO: 3611; WAN024A5F; Start 109; Stop 133
attctaaaaccttgatactgtacgt

SEQ ID NO: 359767 - DNA, 25 bp, Artificial
  probe
  misc_feature (1)..(25): SEQ ID NO: 3611; WAN024A5F; Start 110; Stop 134
ttctaaaaccttgatactgtacgtt

SEQ ID NO: 359768 - DNA, 25 bp, Artificial
  probe
  misc_feature (1)..(25): SEQ ID NO: 3611; WAN024A5F; Start 108; Stop 132
tattctaaaaccttgatactgtacg

SEQ ID NO: 359769 - DNA, 25 bp, Artificial
  probe
  misc_feature (1)..(25): SEQ ID NO: 3611; WAN024A5F; Start 111; Stop 135
tctaaaaccttgatactgtacgttt

SEQ ID NO: 359770 - DNA, 25 bp, Artificial
  probe
  misc_feature (1)..(25): SEQ ID NO: 3611; WAN024A5F; Start 164; Stop 188
catcaaatgagatttgcatcaatct

SEQ ID NO: 359771 - DNA, 25 bp, Artificial
  probe
  misc_feature (1)..(25): SEQ ID NO: 3611; WAN024A5F; Start 163; Stop 187
tcatcaaatgagatttgcatcaatc

SEQ ID NO: 359772 - DNA, 25 bp, Artificial
  probe
  misc_feature (1)..(25): SEQ ID NO: 3611; WAN024A5F; Start 115; Stop 139
aaaccttgatactgtacgttttatc

SEQ ID NO: 359773 - DNA, 25 bp, Artificial
  probe
  misc_feature (1)..(25): SEQ ID NO: 3611; WAN024A5F; Start 105; Stop 129
agatattctaaaaccttgatactgt

SEQ ID NO: 359774 - DNA, 25 bp, Artificial
  probe
  misc_feature (1)..(25): SEQ ID NO: 3611; WAN024A5F; Start 103; Stop 127
tcagatattctaaaaccttgatact

SEQ ID NO: 359775 - DNA, 25 bp, Artificial
  probe
  misc_feature (1)..(25): SEQ ID NO: 3611; WAN024A5F; Start 44; Stop 68
ttcgtataccataataaaagtgtct

SEQ ID NO: 359776 - DNA, 25 bp, Artificial
  probe
  misc_feature (1)..(25): SEQ ID NO: 3611; WAN024A5F; Start 104; Stop 128
cagatattctaaaaccttgatactg

SEQ ID NO: 359777 - DNA, 25 bp, Artificial
  probe
  misc_feature (1)..(25): SEQ ID NO: 3611; WAN024A5F; Start 116; Stop 140
aaccttgatactgtacgttttatca

SEQ ID NO: 359778 - DNA, 25 bp, Artificial
  probe
  misc_feature (1)..(25): SEQ ID NO: 3611; WAN024A5F; Start 45; Stop 69
tcgtataccataataaaagtgtctt

SEQ ID NO: 359779 - DNA, 25 bp, Artificial
  probe
  misc_feature (1)..(25): SEQ ID NO: 3611; WAN024A5F; Start 117; Stop 141
accttgatactgtacgttttatcat

SEQ ID NO: 359780 - DNA, 25 bp, Artificial
  probe
  misc_feature (1)..(25): SEQ ID NO: 3611; WAN024A5F; Start 51; Stop 75
accataataaaagtgtcttaacaaa

SEQ ID NO: 359781 - DNA, 25 bp, Artificial
  probe
  misc_feature (1)..(25): SEQ ID NO: 3611; WAN024A5F; Start 43; Stop 67
tttcgtataccataataaaagtgtc

SEQ ID NO: 359782 - DNA, 25 bp, Artificial
  probe
  misc_feature (1)..(25): SEQ ID NO: 3611; WAN024A5F; Start 125; Stop 149
actgtacgttttatcatagaaattt

SEQ ID NO: 359783 - DNA, 25 bp, Artificial
  probe
  misc_feature (1)..(25): SEQ ID NO: 3611; WAN024A5F; Start 118; Stop 142
ccttgatactgtacgttttatcata

SEQ ID NO: 359784 - DNA, 25 bp, Artificial
  probe
  misc_feature (1)..(25): SEQ ID NO: 3611; WAN024A5F; Start 112; Stop 136
ctaaaaccttgatactgtacgtttt

SEQ ID NO: 359785 - DNA, 25 bp, Artificial
  probe
  misc_feature (1)..(25): SEQ ID NO: 3611; WAN024A5F; Start 114; Stop 138
aaaaccttgatactgtacgttttat

SEQ ID NO: 359786 - DNA, 25 bp, Artificial
  probe
  misc_feature (1)..(25): SEQ ID NO: 3611; WAN024A5F; Start 121; Stop 145
tgatactgtacgttttatcatagaa

SEQ ID NO: 359787 - DNA, 25 bp, Artificial
  probe
  misc_feature (1)..(25): SEQ ID NO: 3611; WAN024A5F; Start 120; Stop 144
ttgatactgtacgttttatcataga

SEQ ID NO: 359788 - DNA, 25 bp, Artificial
  probe
  misc_feature (1)..(25): SEQ ID NO: 3611; WAN024A5F; Start 119; Stop 143
cttgatactgtacgttttatcatag

SEQ ID NO: 359789 - DNA, 25 bp, Artificial
  probe
  misc_feature (1)..(25): SEQ ID NO: 3612; WAN0249KA; Start 128; Stop 152
ctattagtttgtctcgctccgttag

SEQ ID NO: 359790 - DNA, 25 bp, Artificial
  probe
  misc_feature (1)..(25): SEQ ID NO: 3612; WAN0249KA; Start 129; Stop 153
tattagtttgtctcgctccgttagg

SEQ ID NO: 359791 - DNA, 25 bp, Artificial
  probe
  misc_feature (1)..(25): SEQ ID NO: 3612; WAN0249KA; Start 121; Stop 145
taagtgactattagtttgtctcgct

SEQ ID NO: 359792 - DNA, 25 bp, Artificial
  probe
  misc_feature (1)..(25): SEQ ID NO: 3612; WAN0249KA; Start 122; Stop 146
aagtgactattagtttgtctcgctc

SEQ ID NO: 359793 - DNA, 25 bp, Artificial
  probe
  misc_feature (1)..(25): SEQ ID NO: 3612; WAN0249KA; Start 127; Stop 151
actattagtttgtctcgctccgtta

SEQ ID NO: 359794 - DNA, 25 bp, Artificial
  probe
  misc_feature (1)..(25): SEQ ID NO: 3612; WAN0249KA; Start 120; Stop 144
ttaagtgactattagtttgtctcgc

SEQ ID NO: 359795 - DNA, 25 bp, Artificial
  probe
  misc_feature (1)..(25): SEQ ID NO: 3612; WAN0249KA; Start 54; Stop 78
tcaattagtttaagacatgacgcat

SEQ ID NO: 359796 - DNA, 25 bp, Artificial
  probe
  misc_feature (1)..(25): SEQ ID NO: 3612; WAN0249KA; Start 123; Stop 147
agtgactattagtttgtctcgctcc

SEQ ID NO: 359797 - DNA, 25 bp, Artificial
  probe
  misc_feature (1)..(25): SEQ ID NO: 3612; WAN0249KA; Start 126; Stop 150
gactattagtttgtctcgctccgtt

SEQ ID NO: 359798 - DNA, 25 bp, Artificial
  probe
  misc_feature (1)..(25): SEQ ID NO: 3612; WAN0249KA; Start 130; Stop 154
attagtttgtctcgctccgttaggt

SEQ ID NO: 359799 - DNA, 25 bp, Artificial
  probe
  misc_feature (1)..(25): SEQ ID NO: 3612; WAN0249KA; Start 124; Stop 148
gtgactattagtttgtctcgctccg

SEQ ID NO: 359800 - DNA, 25 bp, Artificial
  probe
  misc_feature (1)..(25): SEQ ID NO: 3612; WAN0249KA; Start 119; Stop 143
attaagtgactattagtttgtctcg

SEQ ID NO: 359801 - DNA, 25 bp, Artificial
  probe
  misc_feature (1)..(25): SEQ ID NO: 3612; WAN0249KA; Start 125; Stop 149
tgactattagtttgtctcgctccgt

SEQ ID NO: 359802 - DNA, 25 bp, Artificial
  probe
  misc_feature (1)..(25): SEQ ID NO: 3612; WAN0249KA; Start 56; Stop 80
aattagtttaagacatgacgcatga

SEQ ID NO: 359803 - DNA, 25 bp, Artificial
  probe
  misc_feature (1)..(25): SEQ ID NO: 3612; WAN0249KA; Start 55; Stop 79
caattagtttaagacatgacgcatg

SEQ ID NO: 359804 - DNA, 25 bp, Artificial
  probe
  misc_feature (1)..(25): SEQ ID NO: 3612; WAN0249KA; Start 57; Stop 81
attagtttaagacatgacgcatgat

SEQ ID NO: 359805 - DNA, 25 bp, Artificial
  probe
  misc_feature (1)..(25): SEQ ID NO: 3612; WAN0249KA; Start 31; Stop 55
gctcatttgaatagaaagtatagtc

SEQ ID NO: 359806 - DNA, 25 bp, Artificial
  probe
  misc_feature (1)..(25): SEQ ID NO: 3612; WAN0249KA; Start 58; Stop 82
ttagtttaagacatgacgcatgata

SEQ ID NO: 359807 - DNA, 25 bp, Artificial
  probe
  misc_feature (1)..(25): SEQ ID NO: 3612; WAN0249KA; Start 59; Stop 83
tagtttaagacatgacgcatgatat

SEQ ID NO: 359808 - DNA, 25 bp, Artificial
  probe
  misc_feature (1)..(25): SEQ ID NO: 3612; WAN0249KA; Start 131; Stop 155
ttagtttgtctcgctccgttaggtg

SEQ ID NO: 359809 - DNA, 25 bp, Artificial
  probe
  misc_feature (1)..(25): SEQ ID NO: 3612; WAN0249KA; Start 53; Stop 77
gtcaattagtttaagacatgacgca

SEQ ID NO: 359810 - DNA, 25 bp, Artificial
  probe
  misc_feature (1)..(25): SEQ ID NO: 3612; WAN0249KA; Start 52; Stop 76
agtcaattagtttaagacatgacgc

SEQ ID NO: 359811 - DNA, 25 bp, Artificial
  probe
  misc_feature (1)..(25): SEQ ID NO: 3612; WAN0249KA; Start 60; Stop 84
agtttaagacatgacgcatgatatc

SEQ ID NO: 359812 - DNA, 25 bp, Artificial
  probe
  misc_feature (1)..(25): SEQ ID NO: 3612; WAN0249KA; Start 117; Stop 141
tgattaagtgactattagtttgtct

SEQ ID NO: 359813 - DNA, 25 bp, Artificial
  probe
  misc_feature (1)..(25): SEQ ID NO: 3612; WAN0249KA; Start 30; Stop 54
agctcatttgaatagaaagtatagt

SEQ ID NO: 359814 - DNA, 25 bp, Artificial
  probe
  misc_feature (1)..(25): SEQ ID NO: 3612; WAN0249KA; Start 22; Stop 46
tggttaaaagctcatttgaatagaa

SEQ ID NO: 359815 - DNA, 25 bp, Artificial
  probe
  misc_feature (1)..(25): SEQ ID NO: 3612; WAN0249KA; Start 21; Stop 45
ttggttaaaagctcatttgaataga

SEQ ID NO: 359816 - DNA, 25 bp, Artificial
  probe
  misc_feature (1)..(25): SEQ ID NO: 3612; WAN0249KA; Start 118; Stop 142
gattaagtgactattagtttgtctc

SEQ ID NO: 359817 - DNA, 25 bp, Artificial
  probe
  misc_feature (1)..(25): SEQ ID NO: 3612; WAN0249KA; Start 12; Stop 36
ctcaatcaattggttaaaagctcat

SEQ ID NO: 359818 - DNA, 25 bp, Artificial
  probe
  misc_feature (1)..(25): SEQ ID NO: 3612; WAN0249KA; Start 116; Stop 140
ttgattaagtgactattagtttgtc

SEQ ID NO: 359819 - DNA, 25 bp, Artificial
  probe
  misc_feature (1)..(25): SEQ ID NO: 3612; WAN0249KA; Start 20; Stop 44
attggttaaaagctcatttgaatag

SEQ ID NO: 359820 - DNA, 25 bp, Artificial
  probe
  misc_feature (1)..(25): SEQ ID NO: 3612; WAN0249KA; Start 13; Stop 37
tcaatcaattggttaaaagctcatt

SEQ ID NO: 359821 - DNA, 25 bp, Artificial
  probe
  misc_feature (1)..(25): SEQ ID NO: 3612; WAN0249KA; Start 23; Stop 47
ggttaaaagctcatttgaatagaaa

SEQ ID NO: 359822 - DNA, 25 bp, Artificial
  probe
  misc_feature (1)..(25): SEQ ID NO: 3613; WAN024ANJ; Start 34; Stop 58
tatcatattgtttgggcacctcttt

SEQ ID NO: 359823 - DNA, 25 bp, Artificial
  probe
  misc_feature (1)..(25): SEQ ID NO: 3613; WAN024ANJ; Start 28; Stop 52
tttaggtatcatattgtttgggcac

SEQ ID NO: 359824 - DNA, 25 bp, Artificial
  probe
  misc_feature (1)..(25): SEQ ID NO: 3613; WAN024ANJ; Start 33; Stop 57
gtatcatattgtttgggcacctctt

SEQ ID NO: 359825 - DNA, 25 bp, Artificial
  probe
  misc_feature (1)..(25): SEQ ID NO: 3613; WAN024ANJ; Start 29; Stop 53
ttaggtatcatattgtttgggcacc

SEQ ID NO: 359826 - DNA, 25 bp, Artificial
  probe
  misc_feature (1)..(25): SEQ ID NO: 3613; WAN024ANJ; Start 37; Stop 61
catattgtttgggcacctcttttag

SEQ ID NO: 359827 - DNA, 25 bp, Artificial
  probe
  misc_feature (1)..(25): SEQ ID NO: 3613; WAN024ANJ; Start 36; Stop 60
tcatattgtttgggcacctctttta

SEQ ID NO: 359828 - DNA, 25 bp, Artificial
  probe
  misc_feature (1)..(25): SEQ ID NO: 3613; WAN024ANJ; Start 38; Stop 62
atattgtttgggcacctcttttaga

SEQ ID NO: 359829 - DNA, 25 bp, Artificial
  probe
  misc_feature (1)..(25): SEQ ID NO: 3613; WAN024ANJ; Start 35; Stop 59
atcatattgtttgggcacctctttt

SEQ ID NO: 359830 - DNA, 25 bp, Artificial
  probe
  misc_feature (1)..(25): SEQ ID NO: 3613; WAN024ANJ; Start 27; Stop 51
ttttaggtatcatattgtttgggca

SEQ ID NO: 359831 - DNA, 25 bp, Artificial
  probe
  misc_feature (1)..(25): SEQ ID NO: 3613; WAN024ANJ; Start 32; Stop 56
ggtatcatattgtttgggcacctct

SEQ ID NO: 359832 - DNA, 25 bp, Artificial
  probe
  misc_feature (1)..(25): SEQ ID NO: 3613; WAN024ANJ; Start 1; Stop 25
gagttagctattgacaattatccta

SEQ ID NO: 359833 - DNA, 25 bp, Artificial
  probe
  misc_feature (1)..(25): SEQ ID NO: 3613; WAN024ANJ; Start 2; Stop 26
agttagctattgacaattatcctat

SEQ ID NO: 359834 - DNA, 25 bp, Artificial
  probe
  misc_feature (1)..(25): SEQ ID NO: 3613; WAN024ANJ; Start 39; Stop 63
tattgtttgggcacctcttttagag

SEQ ID NO: 359835 - DNA, 25 bp, Artificial
  probe
  misc_feature (1)..(25): SEQ ID NO: 3613; WAN024ANJ; Start 30; Stop 54
taggtatcatattgtttgggcacct

SEQ ID NO: 359836 - DNA, 25 bp, Artificial
  probe
  misc_feature (1)..(25): SEQ ID NO: 3613; WAN024ANJ; Start 31; Stop 55
aggtatcatattgtttgggcacctc

SEQ ID NO: 359837 - DNA, 25 bp, Artificial
  probe
  misc_feature (1)..(25): SEQ ID NO: 3614; WAN024AKN; Start 44; Stop 68
tggtccaatcgcttttagtatatct

SEQ ID NO: 359838 - DNA, 25 bp, Artificial
  probe
  misc_feature (1)..(25): SEQ ID NO: 3614; WAN024AKN; Start 43; Stop 67
ctggtccaatcgcttttagtatatc

SEQ ID NO: 359839 - DNA, 25 bp, Artificial
  probe
  misc_feature (1)..(25): SEQ ID NO: 3614; WAN024AKN; Start 42; Stop 66
gctggtccaatcgcttttagtatat

SEQ ID NO: 359840 - DNA, 25 bp, Artificial
  probe
  misc_feature (1)..(25): SEQ ID NO: 3614; WAN024AKN; Start 1; Stop 25
gagtttcctaaaatagccaatgcaa

SEQ ID NO: 359841 - DNA, 25 bp, Artificial
  probe
  misc_feature (1)..(25): SEQ ID NO: 3614; WAN024AKN; Start 4; Stop 28
tttcctaaaatagccaatgcaaact

SEQ ID NO: 359842 - DNA, 25 bp, Artificial
  probe
  misc_feature (1)..(25): SEQ ID NO: 3614; WAN024AKN; Start 2; Stop 26
agtttcctaaaatagccaatgcaaa

SEQ ID NO: 359843 - DNA, 25 bp, Artificial
  probe
  misc_feature (1)..(25): SEQ ID NO: 3614; WAN024AKN; Start 6; Stop 30
tcctaaaatagccaatgcaaactaa

SEQ ID NO: 359844 - DNA, 25 bp, Artificial
  probe
  misc_feature (1)..(25): SEQ ID NO: 3614; WAN024AKN; Start 5; Stop 29
ttcctaaaatagccaatgcaaacta

SEQ ID NO: 359845 - DNA, 25 bp, Artificial
  probe
  misc_feature (1)..(25): SEQ ID NO: 3614; WAN024AKN; Start 7; Stop 31
cctaaaatagccaatgcaaactaaa

SEQ ID NO: 359846 - DNA, 25 bp, Artificial
  probe
  misc_feature (1)..(25): SEQ ID NO: 3614; WAN024AKN; Start 3; Stop 27
gtttcctaaaatagccaatgcaaac

SEQ ID NO: 359847 - DNA, 25 bp, Artificial
  probe
  misc_feature (1)..(25): SEQ ID NO: 3614; WAN024AKN; Start 8; Stop 32
ctaaaatagccaatgcaaactaaaa

SEQ ID NO: 359848 - DNA, 25 bp, Artificial
  probe
  misc_feature (1)..(25): SEQ ID NO: 3616; WAN0249RZ; Start 65; Stop 89
aacgataatagcgattgaatatgga

SEQ ID NO: 359849 - DNA, 25 bp, Artificial
  probe
  misc_feature (1)..(25): SEQ ID NO: 3616; WAN0249RZ; Start 66; Stop 90
acgataatagcgattgaatatggat

SEQ ID NO: 359850 - DNA, 25 bp, Artificial
  probe
  misc_feature (1)..(25): SEQ ID NO: 3616; WAN0249RZ; Start 74; Stop 98
agcgattgaatatggataattgaat

SEQ ID NO: 359851 - DNA, 25 bp, Artificial
  probe
  misc_feature (1)..(25): SEQ ID NO: 3616; WAN0249RZ; Start 101; Stop 125
ggaatagcccactgtgatttctaaa

SEQ ID NO: 359852 - DNA, 25 bp, Artificial
  probe
  misc_feature (1)..(25): SEQ ID NO: 3616; WAN0249RZ; Start 86; Stop 110
tggataattgaatatggaatagccc

SEQ ID NO: 359853 - DNA, 25 bp, Artificial
  probe
  misc_feature (1)..(25): SEQ ID NO: 3616; WAN0249RZ; Start 85; Stop 109
atggataattgaatatggaatagcc

SEQ ID NO: 359854 - DNA, 25 bp, Artificial
  probe
  misc_feature (1)..(25): SEQ ID NO: 3616; WAN0249RZ; Start 67; Stop 91
cgataatagcgattgaatatggata

SEQ ID NO: 359855 - DNA, 25 bp, Artificial
  probe
  misc_feature (1)..(25): SEQ ID NO: 3616; WAN0249RZ; Start 73; Stop 97
tagcgattgaatatggataattgaa

SEQ ID NO: 359856 - DNA, 25 bp, Artificial
  probe
  misc_feature (1)..(25): SEQ ID NO: 3616; WAN0249RZ; Start 64; Stop 88
aaacgataatagcgattgaatatgg

SEQ ID NO: 359857 - DNA, 25 bp, Artificial
  probe
  misc_feature (1)..(25): SEQ ID NO: 3616; WAN0249RZ; Start 72; Stop 96
atagcgattgaatatggataattga

SEQ ID NO: 359858 - DNA, 25 bp, Artificial
  probe
  misc_feature (1)..(25): SEQ ID NO: 3616; WAN0249RZ; Start 96; Stop 120
aatatggaatagcccactgtgattt

SEQ ID NO: 359859 - DNA, 25 bp, Artificial
  probe
  misc_feature (1)..(25): SEQ ID NO: 3616; WAN0249RZ; Start 91; Stop 115
aattgaatatggaatagcccactgt

SEQ ID NO: 359860 - DNA, 25 bp, Artificial
  probe
  misc_feature (1)..(25): SEQ ID NO: 3616; WAN0249RZ; Start 97; Stop 121
atatggaatagcccactgtgatttc

SEQ ID NO: 359861 - DNA, 25 bp, Artificial
  probe
  misc_feature (1)..(25): SEQ ID NO: 3616; WAN0249RZ; Start 95; Stop 119
gaatatggaatagcccactgtgatt

SEQ ID NO: 359862 - DNA, 25 bp, Artificial
  probe
  misc_feature (1)..(25): SEQ ID NO: 3616; WAN0249RZ; Start 92; Stop 116
attgaatatggaatagcccactgtg

SEQ ID NO: 359863 - DNA, 25 bp, Artificial
  probe
  misc_feature (1)..(25): SEQ ID NO: 3616; WAN0249RZ; Start 90; Stop 114
taattgaatatggaatagcccactg

SEQ ID NO: 359864 - DNA, 25 bp, Artificial
  probe
  misc_feature (1)..(25): SEQ ID NO: 3616; WAN0249RZ; Start 99; Stop 123
atggaatagcccactgtgatttcta

SEQ ID NO: 359865 - DNA, 25 bp, Artificial
  probe
  misc_feature (1)..(25): SEQ ID NO: 3616; WAN0249RZ; Start 98; Stop 122
tatggaatagcccactgtgatttct

SEQ ID NO: 359866 - DNA, 25 bp, Artificial
  probe
  misc_feature (1)..(25): SEQ ID NO: 3616; WAN0249RZ; Start 94; Stop 118
tgaatatggaatagcccactgtgat

SEQ ID NO: 359867 - DNA, 25 bp, Artificial
  probe
  misc_feature (1)..(25): SEQ ID NO: 3616; WAN0249RZ; Start 87; Stop 111
ggataattgaatatggaatagccca

SEQ ID NO: 359868 - DNA, 25 bp, Artificial
  probe
  misc_feature (1)..(25): SEQ ID NO: 3616; WAN0249RZ; Start 100; Stop 124
tggaatagcccactgtgatttctaa

SEQ ID NO: 359869 - DNA, 25 bp, Artificial
  probe
  misc_feature (1)..(25): SEQ ID NO: 3616; WAN0249RZ; Start 93; Stop 117
ttgaatatggaatagcccactgtga

SEQ ID NO: 359870 - DNA, 25 bp, Artificial
  probe
  misc_feature (1)..(25): SEQ ID NO: 3616; WAN0249RZ; Start 75; Stop 99
gcgattgaatatggataattgaata

SEQ ID NO: 359871 - DNA, 25 bp, Artificial
  probe
  misc_feature (1)..(25): SEQ ID NO: 3616; WAN0249RZ; Start 71; Stop 95
aatagcgattgaatatggataattg

SEQ ID NO: 359872 - DNA, 25 bp, Artificial
  probe
  misc_feature (1)..(25): SEQ ID NO: 3616; WAN0249RZ; Start 89; Stop 113
ataattgaatatggaatagcccact

SEQ ID NO: 359873 - DNA, 25 bp, Artificial
  probe
  misc_feature (1)..(25): SEQ ID NO: 3616; WAN0249RZ; Start 60; Stop 84
aggaaaacgataatagcgattgaat

SEQ ID NO: 359874 - DNA, 25 bp, Artificial
  probe
  misc_feature (1)..(25): SEQ ID NO: 3616; WAN0249RZ; Start 103; Stop 127
aatagcccactgtgatttctaaaac

SEQ ID NO: 359875 - DNA, 25 bp, Artificial
  probe
  misc_feature (1)..(25): SEQ ID NO: 3616; WAN0249RZ; Start 88; Stop 112
gataattgaatatggaatagcccac

SEQ ID NO: 359876 - DNA, 25 bp, Artificial
  probe
  misc_feature (1)..(25): SEQ ID NO: 3616; WAN0249RZ; Start 162; Stop 186
atgttctgtaatgaaatactgatgt

SEQ ID NO: 359877 - DNA, 25 bp, Artificial
  probe
  misc_feature (1)..(25): SEQ ID NO: 3616; WAN0249RZ; Start 102; Stop 126
gaatagcccactgtgatttctaaaa

SEQ ID NO: 359878 - DNA, 25 bp, Artificial
  probe
  misc_feature (1)..(25): SEQ ID NO: 3616; WAN0249RZ; Start 59; Stop 83
taggaaaacgataatagcgattgaa

SEQ ID NO: 359879 - DNA, 25 bp, Artificial
  probe
  misc_feature (1)..(25): SEQ ID NO: 3616; WAN0249RZ; Start 58; Stop 82
ctaggaaaacgataatagcgattga

SEQ ID NO: 359880 - DNA, 25 bp, Artificial
  probe
  misc_feature (1)..(25): SEQ ID NO: 3616; WAN0249RZ; Start 57; Stop 81
tctaggaaaacgataatagcgattg

SEQ ID NO: 359881 - DNA, 25 bp, Artificial
  probe
  misc_feature (1)..(25): SEQ ID NO: 3617; WAN024ALU; Start 27; Stop 51
ctgctctgacaaggatttaacataa

SEQ ID NO: 359882 - DNA, 25 bp, Artificial
  probe
  misc_feature (1)..(25): SEQ ID NO: 3617; WAN024ALU; Start 28; Stop 52
tgctctgacaaggatttaacataaa

SEQ ID NO: 359883 - DNA, 25 bp, Artificial
  probe
  misc_feature (1)..(25): SEQ ID NO: 3617; WAN024ALU; Start 29; Stop 53
gctctgacaaggatttaacataaac

SEQ ID NO: 359884 - DNA, 25 bp, Artificial
  probe
  misc_feature (1)..(25): SEQ ID NO: 3617; WAN024ALU; Start 26; Stop 50
cctgctctgacaaggatttaacata

SEQ ID NO: 359885 - DNA, 25 bp, Artificial
  probe
  misc_feature (1)..(25): SEQ ID NO: 3617; WAN024ALU; Start 30; Stop 54
ctctgacaaggatttaacataaaca

SEQ ID NO: 359886 - DNA, 25 bp, Artificial
  probe
  misc_feature (1)..(25): SEQ ID NO: 3617; WAN024ALU; Start 25; Stop 49
ccctgctctgacaaggatttaacat

SEQ ID NO: 359887 - DNA, 25 bp, Artificial
  probe
  misc_feature (1)..(25): SEQ ID NO: 3617; WAN024ALU; Start 31; Stop 55
tctgacaaggatttaacataaacat

SEQ ID NO: 359888 - DNA, 25 bp, Artificial
  probe
  misc_feature (1)..(25): SEQ ID NO: 3617; WAN024ALU; Start 33; Stop 57
tgacaaggatttaacataaacattc

SEQ ID NO: 359889 - DNA, 25 bp, Artificial
  probe
  misc_feature (1)..(25): SEQ ID NO: 3617; WAN024ALU; Start 32; Stop 56
ctgacaaggatttaacataaacatt

SEQ ID NO: 359890 - DNA, 25 bp, Artificial
  probe
  misc_feature (1)..(25): SEQ ID NO: 3617; WAN024ALU; Start 24; Stop 48
tccctgctctgacaaggatttaaca

SEQ ID NO: 359891 - DNA, 25 bp, Artificial
  probe
  misc_feature (1)..(25): SEQ ID NO: 3617; WAN024ALU; Start 34; Stop 58
gacaaggatttaacataaacattct

SEQ ID NO: 359892 - DNA, 25 bp, Artificial
  probe
  misc_feature (1)..(25): SEQ ID NO: 3617; WAN024ALU; Start 23; Stop 47
atccctgctctgacaaggatttaac

SEQ ID NO: 359893 - DNA, 25 bp, Artificial
  probe
  misc_feature (1)..(25): SEQ ID NO: 3618; WAN024DD9; Start 3869; Stop 3893
taatgactaatcgcaatccaggtaa

SEQ ID NO: 359894 - DNA, 25 bp, Artificial
  probe
  misc_feature (1)..(25): SEQ ID NO: 3618; WAN024DD9; Start 3870; Stop 3894
aatgactaatcgcaatccaggtaat

SEQ ID NO: 359895 - DNA, 25 bp, Artificial
  probe
  misc_feature (1)..(25): SEQ ID NO: 3618; WAN024DD9; Start 3868; Stop 3892
ttaatgactaatcgcaatccaggta

SEQ ID NO: 359896 - DNA, 25 bp, Artificial
  probe
  misc_feature (1)..(25): SEQ ID NO: 3618; WAN024DD9; Start 3150; Stop 3174
acgactactaagagatgctgttatt

SEQ ID NO: 359897 - DNA, 25 bp, Artificial
  probe
  misc_feature (1)..(25): SEQ ID NO: 3618; WAN024DD9; Start 222; Stop 246
acattacagtgatagaagttggcaa

SEQ ID NO: 359898 - DNA, 25 bp, Artificial
  probe
  misc_feature (1)..(25): SEQ ID NO: 3618; WAN024DD9; Start 4108; Stop 4132
gatggtgagtctgttctaagtgatg

SEQ ID NO: 359899 - DNA, 25 bp, Artificial
  probe
  misc_feature (1)..(25): SEQ ID NO: 3618; WAN024DD9; Start 4111; Stop 4135
ggtgagtctgttctaagtgatgaat

SEQ ID NO: 359900 - DNA, 25 bp, Artificial
  probe
  misc_feature (1)..(25): SEQ ID NO: 3618; WAN024DD9; Start 3871; Stop 3895
atgactaatcgcaatccaggtaatg

SEQ ID NO: 359901 - DNA, 25 bp, Artificial
  probe
  misc_feature (1)..(25): SEQ ID NO: 3618; WAN024DD9; Start 3151; Stop 3175
cgactactaagagatgctgttattc

SEQ ID NO: 359902 - DNA, 25 bp, Artificial
  probe
  misc_feature (1)..(25): SEQ ID NO: 3618; WAN024DD9; Start 1695; Stop 1719
ctatgctaagattatccgtggagag

SEQ ID NO: 359903 - DNA, 25 bp, Artificial
  probe
  misc_feature (1)..(25): SEQ ID NO: 3618; WAN024DD9; Start 3148; Stop 3172
caacgactactaagagatgctgtta

SEQ ID NO: 359904 - DNA, 25 bp, Artificial
  probe
  misc_feature (1)..(25): SEQ ID NO: 3618; WAN024DD9; Start 220; Stop 244
gaacattacagtgatagaagttggc

SEQ ID NO: 359905 - DNA, 25 bp, Artificial
  probe
  misc_feature (1)..(25): SEQ ID NO: 3618; WAN024DD9; Start 221; Stop 245
aacattacagtgatagaagttggca

SEQ ID NO: 359906 - DNA, 25 bp, Artificial
  probe
  misc_feature (1)..(25): SEQ ID NO: 3618; WAN024DD9; Start 4109; Stop 4133
atggtgagtctgttctaagtgatga

SEQ ID NO: 359907 - DNA, 25 bp, Artificial
  probe
  misc_feature (1)..(25): SEQ ID NO: 3618; WAN024DD9; Start 1743; Stop 1767
tgatgattctgattatgctagtgct

SEQ ID NO: 359908 - DNA, 25 bp, Artificial
  probe
  misc_feature (1)..(25): SEQ ID NO: 3618; WAN024DD9; Start 3149; Stop 3173
aacgactactaagagatgctgttat

SEQ ID NO: 359909 - DNA, 25 bp, Artificial
  probe
  misc_feature (1)..(25): SEQ ID NO: 3618; WAN024DD9; Start 3153; Stop 3177
actactaagagatgctgttattcct

SEQ ID NO: 359910 - DNA, 25 bp, Artificial
  probe
  misc_feature (1)..(25): SEQ ID NO: 3618; WAN024DD9; Start 1634; Stop 1658
tagaagttggagcaatagcaagtaa

SEQ ID NO: 359911 - DNA, 25 bp, Artificial
  probe
  misc_feature (1)..(25): SEQ ID NO: 3618; WAN024DD9; Start 1744; Stop 1768
gatgattctgattatgctagtgctc

SEQ ID NO: 359912 - DNA, 25 bp, Artificial
  probe
  misc_feature (1)..(25): SEQ ID NO: 3618; WAN024DD9; Start 3152; Stop 3176
gactactaagagatgctgttattcc

SEQ ID NO: 359913 - DNA, 25 bp, Artificial
  probe
  misc_feature (1)..(25): SEQ ID NO: 3618; WAN024DD9; Start 4107; Stop 4131
agatggtgagtctgttctaagtgat

SEQ ID NO: 359914 - DNA, 25 bp, Artificial
  probe
  misc_feature (1)..(25): SEQ ID NO: 3618; WAN024DD9; Start 1742; Stop 1766
ttgatgattctgattatgctagtgc

SEQ ID NO: 359915 - DNA, 25 bp, Artificial
  probe
  misc_feature (1)..(25): SEQ ID NO: 3618; WAN024DD9; Start 1633; Stop 1657
gtagaagttggagcaatagcaagta

SEQ ID NO: 359916 - DNA, 25 bp, Artificial
  probe
  misc_feature (1)..(25): SEQ ID NO: 3618; WAN024DD9; Start 1740; Stop 1764
cgttgatgattctgattatgctagt

SEQ ID NO: 359917 - DNA, 25 bp, Artificial
  probe
  misc_feature (1)..(25): SEQ ID NO: 3618; WAN024DD9; Start 4110; Stop 4134
tggtgagtctgttctaagtgatgaa

SEQ ID NO: 359918 - DNA, 25 bp, Artificial
  probe
  misc_feature (1)..(25): SEQ ID NO: 3618; WAN024DD9; Start 1696; Stop 1720
tatgctaagattatccgtggagagg

SEQ ID NO: 359919 - DNA, 25 bp, Artificial
  probe
  misc_feature (1)..(25): SEQ ID NO: 3618; WAN024DD9; Start 1666; Stop 1690
cctgtaggtacggtaagtaattctg

SEQ ID NO: 359920 - DNA, 25 bp, Artificial
  probe
  misc_feature (1)..(25): SEQ ID NO: 3618; WAN024DD9; Start 1635; Stop 1659
agaagttggagcaatagcaagtaag

SEQ ID NO: 359921 - DNA, 25 bp, Artificial
  probe
  misc_feature (1)..(25): SEQ ID NO: 3618; WAN024DD9; Start 1669; Stop 1693
gtaggtacggtaagtaattctgtca

SEQ ID NO: 359922 - DNA, 25 bp, Artificial
  probe
  misc_feature (1)..(25): SEQ ID NO: 3618; WAN024DD9; Start 1668; Stop 1692
tgtaggtacggtaagtaattctgtc

SEQ ID NO: 359923 - DNA, 25 bp, Artificial
  probe
  misc_feature (1)..(25): SEQ ID NO: 3618; WAN024DD9; Start 1667; Stop 1691
ctgtaggtacggtaagtaattctgt

SEQ ID NO: 359924 - DNA, 25 bp, Artificial
  probe
  misc_feature (1)..(25): SEQ ID NO: 3618; WAN024DD9; Start 1636; Stop 1660
gaagttggagcaatagcaagtaaga

SEQ ID NO: 359925 - DNA, 25 bp, Artificial
  probe
  misc_feature (1)..(25): SEQ ID NO: 3618; WAN024DD9; Start 1670; Stop 1694
taggtacggtaagtaattctgtcag

SEQ ID NO: 359926 - DNA, 25 bp, Artificial
  probe
  misc_feature (1)..(25): SEQ ID NO: 3619; WAN0249QY; Start 285; Stop 309
ctcggatttgcttattatgaggttc

SEQ ID NO: 359927 - DNA, 25 bp, Artificial
  probe
  misc_feature (1)..(25): SEQ ID NO: 3619; WAN0249QY; Start 284; Stop 308
tctcggatttgcttattatgaggtt

SEQ ID NO: 359928 - DNA, 25 bp, Artificial
  probe
  misc_feature (1)..(25): SEQ ID NO: 3619; WAN0249QY; Start 240; Stop 264
tatagtaaggtgcagcaggataaag

SEQ ID NO: 359929 - DNA, 25 bp, Artificial
  probe
  misc_feature (1)..(25): SEQ ID NO: 3619; WAN0249QY; Start 239; Stop 263
ctatagtaaggtgcagcaggataaa

SEQ ID NO: 359930 - DNA, 25 bp, Artificial
  probe
  misc_feature (1)..(25): SEQ ID NO: 3619; WAN0249QY; Start 241; Stop 265
atagtaaggtgcagcaggataaaga

SEQ ID NO: 359931 - DNA, 25 bp, Artificial
  probe
  misc_feature (1)..(25): SEQ ID NO: 3619; WAN0249QY; Start 147; Stop 171
tgaaactagaatagtacacctttgc

SEQ ID NO: 359932 - DNA, 25 bp, Artificial
  probe
  misc_feature (1)..(25): SEQ ID NO: 3619; WAN0249QY; Start 242; Stop 266
tagtaaggtgcagcaggataaagaa

SEQ ID NO: 359933 - DNA, 25 bp, Artificial
  probe
  misc_feature (1)..(25): SEQ ID NO: 3619; WAN0249QY; Start 150; Stop 174
aactagaatagtacacctttgcttc

SEQ ID NO: 359934 - DNA, 25 bp, Artificial
  probe
  misc_feature (1)..(25): SEQ ID NO: 3619; WAN0249QY; Start 148; Stop 172
gaaactagaatagtacacctttgct

SEQ ID NO: 359935 - DNA, 25 bp, Artificial
  probe
  misc_feature (1)..(25): SEQ ID NO: 3619; WAN0249QY; Start 151; Stop 175
actagaatagtacacctttgcttct

SEQ ID NO: 359936 - DNA, 25 bp, Artificial
  probe
  misc_feature (1)..(25): SEQ ID NO: 3619; WAN0249QY; Start 149; Stop 173
aaactagaatagtacacctttgctt

SEQ ID NO: 359937 - DNA, 25 bp, Artificial
  probe
  misc_feature (1)..(25): SEQ ID NO: 3619; WAN0249QY; Start 126; Stop 150
aactgttatgatatagcagattgaa

SEQ ID NO: 359938 - DNA, 25 bp, Artificial
  probe
  misc_feature (1)..(25): SEQ ID NO: 3619; WAN0249QY; Start 243; Stop 267
agtaaggtgcagcaggataaagaaa

SEQ ID NO: 359939 - DNA, 25 bp, Artificial
  probe
  misc_feature (1)..(25): SEQ ID NO: 3619; WAN0249QY; Start 141; Stop 165
gcagattgaaactagaatagtacac

SEQ ID NO: 359940 - DNA, 25 bp, Artificial
  probe
  misc_feature (1)..(25): SEQ ID NO: 3619; WAN0249QY; Start 140; Stop 164
agcagattgaaactagaatagtaca

SEQ ID NO: 359941 - DNA, 25 bp, Artificial
  probe
  misc_feature (1)..(25): SEQ ID NO: 3619; WAN0249QY; Start 160; Stop 184
gtacacctttgcttctaaaacattg

SEQ ID NO: 359942 - DNA, 25 bp, Artificial
  probe
  misc_feature (1)..(25): SEQ ID NO: 3619; WAN0249QY; Start 159; Stop 183
agtacacctttgcttctaaaacatt

SEQ ID NO: 359943 - DNA, 25 bp, Artificial
  probe
  misc_feature (1)..(25): SEQ ID NO: 3619; WAN0249QY; Start 218; Stop 242
tcctgttcttatttcatttcactat

SEQ ID NO: 359944 - DNA, 25 bp, Artificial
  probe
  misc_feature (1)..(25): SEQ ID NO: 3619; WAN0249QY; Start 217; Stop 241
atcctgttcttatttcatttcacta

SEQ ID NO: 359945 - DNA, 25 bp, Artificial
  probe
  misc_feature (1)..(25): SEQ ID NO: 3619; WAN0249QY; Start 216; Stop 240
tatcctgttcttatttcatttcact

SEQ ID NO: 359946 - DNA, 25 bp, Artificial
  probe
  misc_feature (1)..(25): SEQ ID NO: 3619; WAN0249QY; Start 161; Stop 185
tacacctttgcttctaaaacattgt

SEQ ID NO: 359947 - DNA, 25 bp, Artificial
  probe
  misc_feature (1)..(25): SEQ ID NO: 3619; WAN0249QY; Start 154; Stop 178
agaatagtacacctttgcttctaaa

SEQ ID NO: 359948 - DNA, 25 bp, Artificial
  probe
  misc_feature (1)..(25): SEQ ID NO: 3619; WAN0249QY; Start 158; Stop 182
tagtacacctttgcttctaaaacat

SEQ ID NO: 359949 - DNA, 25 bp, Artificial
  probe
  misc_feature (1)..(25): SEQ ID NO: 3619; WAN0249QY; Start 157; Stop 181
atagtacacctttgcttctaaaaca

SEQ ID NO: 359950 - DNA, 25 bp, Artificial
  probe
  misc_feature (1)..(25): SEQ ID NO: 3619; WAN0249QY; Start 129; Stop 153
tgttatgatatagcagattgaaact

SEQ ID NO: 359951 - DNA, 25 bp, Artificial
  probe
  misc_feature (1)..(25): SEQ ID NO: 3619; WAN0249QY; Start 162; Stop 186
acacctttgcttctaaaacattgtt

SEQ ID NO: 359952 - DNA, 25 bp, Artificial
  probe
  misc_feature (1)..(25): SEQ ID NO: 3619; WAN0249QY; Start 142; Stop 166
cagattgaaactagaatagtacacc

SEQ ID NO: 359953 - DNA, 25 bp, Artificial
  probe
  misc_feature (1)..(25): SEQ ID NO: 3619; WAN0249QY; Start 203; Stop 227
gtcctgatcgatttatcctgttctt

SEQ ID NO: 359954 - DNA, 25 bp, Artificial
  probe
  misc_feature (1)..(25): SEQ ID NO: 3619; WAN0249QY; Start 196; Stop 220
tttgactgtcctgatcgatttatcc

SEQ ID NO: 359955 - DNA, 25 bp, Artificial
  probe
  misc_feature (1)..(25): SEQ ID NO: 3619; WAN0249QY; Start 163; Stop 187
cacctttgcttctaaaacattgtta

SEQ ID NO: 359956 - DNA, 25 bp, Artificial
  probe
  misc_feature (1)..(25): SEQ ID NO: 3619; WAN0249QY; Start 204; Stop 228
tcctgatcgatttatcctgttctta

SEQ ID NO: 359957 - DNA, 25 bp, Artificial
  probe
  misc_feature (1)..(25): SEQ ID NO: 3619; WAN0249QY; Start 238; Stop 262
actatagtaaggtgcagcaggataa

SEQ ID NO: 359958 - DNA, 25 bp, Artificial
  probe
  misc_feature (1)..(25): SEQ ID NO: 3619; WAN0249QY; Start 201; Stop 225
ctgtcctgatcgatttatcctgttc

SEQ ID NO: 359959 - DNA, 25 bp, Artificial
  probe
  misc_feature (1)..(25): SEQ ID NO: 3620; WAN0249RB; Start 25; Stop 49
ttaggagaagacaaggttaatagtc

SEQ ID NO: 359960 - DNA, 25 bp, Artificial
  probe
  misc_feature (1)..(25): SEQ ID NO: 3620; WAN0249RB; Start 24; Stop 48
tttaggagaagacaaggttaatagt

SEQ ID NO: 359961 - DNA, 25 bp, Artificial
  probe
  misc_feature (1)..(25): SEQ ID NO: 3620; WAN0249RB; Start 17; Stop 41
agtcaattttaggagaagacaaggt

SEQ ID NO: 359962 - DNA, 25 bp, Artificial
  probe
  misc_feature (1)..(25): SEQ ID NO: 3620; WAN0249RB; Start 18; Stop 42
gtcaattttaggagaagacaaggtt

SEQ ID NO: 359963 - DNA, 25 bp, Artificial
  probe
  misc_feature (1)..(25): SEQ ID NO: 3620; WAN0249RB; Start 16; Stop 40
aagtcaattttaggagaagacaagg

SEQ ID NO: 359964 - DNA, 25 bp, Artificial
  probe
  misc_feature (1)..(25): SEQ ID NO: 3620; WAN0249RB; Start 19; Stop 43
tcaattttaggagaagacaaggtta

SEQ ID NO: 359965 - DNA, 25 bp, Artificial
  probe
  misc_feature (1)..(25): SEQ ID NO: 3620; WAN0249RB; Start 10; Stop 34
acaagaaagtcaattttaggagaag

SEQ ID NO: 359966 - DNA, 25 bp, Artificial
  probe
  misc_feature (1)..(25): SEQ ID NO: 3620; WAN0249RB; Start 13; Stop 37
agaaagtcaattttaggagaagaca

SEQ ID NO: 359967 - DNA, 25 bp, Artificial
  probe
  misc_feature (1)..(25): SEQ ID NO: 3620; WAN0249RB; Start 20; Stop 44
caattttaggagaagacaaggttaa

SEQ ID NO: 359968 - DNA, 25 bp, Artificial
  probe
  misc_feature (1)..(25): SEQ ID NO: 3620; WAN0249RB; Start 11; Stop 35
caagaaagtcaattttaggagaaga

SEQ ID NO: 359969 - DNA, 25 bp, Artificial
  probe
  misc_feature (1)..(25): SEQ ID NO: 3620; WAN0249RB; Start 57; Stop 81
atattgaatctataacagtacacct

SEQ ID NO: 359970 - DNA, 25 bp, Artificial
  probe
  misc_feature (1)..(25): SEQ ID NO: 3620; WAN0249RB; Start 9; Stop 33
aacaagaaagtcaattttaggagaa

SEQ ID NO: 359971 - DNA, 25 bp, Artificial
  probe
  misc_feature (1)..(25): SEQ ID NO: 3620; WAN0249RB; Start 8; Stop 32
aaacaagaaagtcaattttaggaga

SEQ ID NO: 359972 - DNA, 25 bp, Artificial
  probe
  misc_feature (1)..(25): SEQ ID NO: 3620; WAN0249RB; Start 15; Stop 39
aaagtcaattttaggagaagacaag

SEQ ID NO: 359973 - DNA, 25 bp, Artificial
  probe
  misc_feature (1)..(25): SEQ ID NO: 3620; WAN0249RB; Start 14; Stop 38
gaaagtcaattttaggagaagacaa

SEQ ID NO: 359974 - DNA, 25 bp, Artificial
  probe
  misc_feature (1)..(25): SEQ ID NO: 3620; WAN0249RB; Start 12; Stop 36
aagaaagtcaattttaggagaagac

SEQ ID NO: 359975 - DNA, 25 bp, Artificial
  probe
  misc_feature (1)..(25): SEQ ID NO: 3620; WAN0249RB; Start 21; Stop 45
aattttaggagaagacaaggttaat

SEQ ID NO: 359976 - DNA, 25 bp, Artificial
  probe
  misc_feature (1)..(25): SEQ ID NO: 3620; WAN0249RB; Start 23; Stop 47
ttttaggagaagacaaggttaatag

SEQ ID NO: 359977 - DNA, 25 bp, Artificial
  probe
  misc_feature (1)..(25): SEQ ID NO: 3620; WAN0249RB; Start 6; Stop 30
gaaaacaagaaagtcaattttagga

SEQ ID NO: 359978 - DNA, 25 bp, Artificial
  probe
  misc_feature (1)..(25): SEQ ID NO: 3620; WAN0249RB; Start 7; Stop 31
aaaacaagaaagtcaattttaggag

SEQ ID NO: 359979 - DNA, 25 bp, Artificial
  probe
  misc_feature (1)..(25): SEQ ID NO: 3620; WAN0249RB; Start 5; Stop 29
agaaaacaagaaagtcaattttagg

SEQ ID NO: 359980 - DNA, 25 bp, Artificial
  probe
  misc_feature (1)..(25): SEQ ID NO: 3620; WAN0249RB; Start 22; Stop 46
attttaggagaagacaaggttaata

SEQ ID NO: 359981 - DNA, 25 bp, Artificial
  probe
  misc_feature (1)..(25): SEQ ID NO: 3620; WAN0249RB; Start 4; Stop 28
aagaaaacaagaaagtcaattttag

SEQ ID NO: 359982 - DNA, 25 bp, Artificial
  probe
  misc_feature (1)..(25): SEQ ID NO: 3621; WAN024AJO; Start 22; Stop 46
taacctagagttagtaatgttcctc

SEQ ID NO: 359983 - DNA, 25 bp, Artificial
  probe
  misc_feature (1)..(25): SEQ ID NO: 3621; WAN024AJO; Start 24; Stop 48
acctagagttagtaatgttcctctt

SEQ ID NO: 359984 - DNA, 25 bp, Artificial
  probe
  misc_feature (1)..(25): SEQ ID NO: 3621; WAN024AJO; Start 23; Stop 47
aacctagagttagtaatgttcctct

SEQ ID NO: 359985 - DNA, 25 bp, Artificial
  probe
  misc_feature (1)..(25): SEQ ID NO: 3621; WAN024AJO; Start 2; Stop 26
ataatgagagaggaaaatgctaacc

SEQ ID NO: 359986 - DNA, 25 bp, Artificial
  probe
  misc_feature (1)..(25): SEQ ID NO: 3621; WAN024AJO; Start 4; Stop 28
aatgagagaggaaaatgctaaccta

SEQ ID NO: 359987 - DNA, 25 bp, Artificial
  probe
  misc_feature (1)..(25): SEQ ID NO: 3621; WAN024AJO; Start 3; Stop 27
taatgagagaggaaaatgctaacct

SEQ ID NO: 359988 - DNA, 25 bp, Artificial
  probe
  misc_feature (1)..(25): SEQ ID NO: 3621; WAN024AJO; Start 9; Stop 33
gagaggaaaatgctaacctagagtt

SEQ ID NO: 359989 - DNA, 25 bp, Artificial
  probe
  misc_feature (1)..(25): SEQ ID NO: 3621; WAN024AJO; Start 7; Stop 31
gagagaggaaaatgctaacctagag

SEQ ID NO: 359990 - DNA, 25 bp, Artificial
  probe
  misc_feature (1)..(25): SEQ ID NO: 3621; WAN024AJO; Start 5; Stop 29
atgagagaggaaaatgctaacctag

SEQ ID NO: 359991 - DNA, 25 bp, Artificial
  probe
  misc_feature (1)..(25): SEQ ID NO: 3621; WAN024AJO; Start 1; Stop 25
gataatgagagaggaaaatgctaac

SEQ ID NO: 359992 - DNA, 25 bp, Artificial
  probe
  misc_feature (1)..(25): SEQ ID NO: 3621; WAN024AJO; Start 8; Stop 32
agagaggaaaatgctaacctagagt

SEQ ID NO: 359993 - DNA, 25 bp, Artificial
  probe
  misc_feature (1)..(25): SEQ ID NO: 3621; WAN024AJO; Start 6; Stop 30
tgagagaggaaaatgctaacctaga

SEQ ID NO: 359994 - DNA, 25 bp, Artificial
  probe
  misc_feature (1)..(25): SEQ ID NO: 3621; WAN024AJO; Start 10; Stop 34
agaggaaaatgctaacctagagtta

SEQ ID NO: 359995 - DNA, 25 bp, Artificial
  probe
  misc_feature (1)..(25): SEQ ID NO: 3621; WAN024AJO; Start 25; Stop 49
cctagagttagtaatgttcctcttt

SEQ ID NO: 359996 - DNA, 25 bp, Artificial
  probe
  misc_feature (1)..(25): SEQ ID NO: 3621; WAN024AJO; Start 20; Stop 44
gctaacctagagttagtaatgttcc

SEQ ID NO: 359997 - DNA, 25 bp, Artificial
  probe
  misc_feature (1)..(25): SEQ ID NO: 3621; WAN024AJO; Start 19; Stop 43
tgctaacctagagttagtaatgttc

SEQ ID NO: 359998 - DNA, 25 bp, Artificial
  probe
  misc_feature (1)..(25): SEQ ID NO: 3621; WAN024AJO; Start 18; Stop 42
atgctaacctagagttagtaatgtt

SEQ ID NO: 359999 - DNA, 25 bp, Artificial
  probe
  misc_feature (1)..(25): SEQ ID NO: 3621; WAN024AJO; Start 17; Stop 41
aatgctaacctagagttagtaatgt

SEQ ID NO: 360000 - DNA, 25 bp, Artificial
  probe
  misc_feature (1)..(25): SEQ ID NO: 3621; WAN024AJO; Start 21; Stop 45
ctaacctagagttagtaatgttcct

SEQ ID NO: 360001 - DNA, 25 bp, Artificial
  probe
  misc_feature (1)..(25): SEQ ID NO: 3621; WAN024AJO; Start 12; Stop 36
aggaaaatgctaacctagagttagt

SEQ ID NO: 360002 - DNA, 25 bp, Artificial
  probe
  misc_feature (1)..(25): SEQ ID NO: 3621; WAN024AJO; Start 11; Stop 35
gaggaaaatgctaacctagagttag

SEQ ID NO: 360003 - DNA, 25 bp, Artificial
  probe
  misc_feature (1)..(25): SEQ ID NO: 3621; WAN024AJO; Start 16; Stop 40
aaatgctaacctagagttagtaatg

SEQ ID NO: 360004 - DNA, 25 bp, Artificial
  probe
  misc_feature (1)..(25): SEQ ID NO: 3621; WAN024AJO; Start 26; Stop 50
ctagagttagtaatgttcctctttt

SEQ ID NO: 360005 - DNA, 25 bp, Artificial
  probe
  misc_feature (1)..(25): SEQ ID NO: 3621; WAN024AJO; Start 13; Stop 37
ggaaaatgctaacctagagttagta

SEQ ID NO: 360006 - DNA, 25 bp, Artificial
  probe
  misc_feature (1)..(25): SEQ ID NO: 3621; WAN024AJO; Start 28; Stop 52
agagttagtaatgttcctcttttat

SEQ ID NO: 360007 - DNA, 25 bp, Artificial
  probe
  misc_feature (1)..(25): SEQ ID NO: 3621; WAN024AJO; Start 14; Stop 38
gaaaatgctaacctagagttagtaa

SEQ ID NO: 360008 - DNA, 25 bp, Artificial
  probe
  misc_feature (1)..(25): SEQ ID NO: 3621; WAN024AJO; Start 15; Stop 39
aaaatgctaacctagagttagtaat

SEQ ID NO: 360009 - DNA, 25 bp, Artificial
  probe
  misc_feature (1)..(25): SEQ ID NO: 3622; WAN0249SJ; Start 98; Stop 122
aatgtgttgaatccagaatagtcca

SEQ ID NO: 360010 - DNA, 25 bp, Artificial
  probe
  misc_feature (1)..(25): SEQ ID NO: 3622; WAN0249SJ; Start 97; Stop 121
taatgtgttgaatccagaatagtcc

SEQ ID NO: 360011 - DNA, 25 bp, Artificial
  probe
  misc_feature (1)..(25): SEQ ID NO: 3622; WAN0249SJ; Start 103; Stop 127
gttgaatccagaatagtccactgta

SEQ ID NO: 360012 - DNA, 25 bp, Artificial
  probe
  misc_feature (1)..(25): SEQ ID NO: 3622; WAN0249SJ; Start 106; Stop 130
gaatccagaatagtccactgtagtt

SEQ ID NO: 360013 - DNA, 25 bp, Artificial
  probe
  misc_feature (1)..(25): SEQ ID NO: 3622; WAN0249SJ; Start 104; Stop 128
ttgaatccagaatagtccactgtag

SEQ ID NO: 360014 - DNA, 25 bp, Artificial
  probe
  misc_feature (1)..(25): SEQ ID NO: 3622; WAN0249SJ; Start 105; Stop 129
tgaatccagaatagtccactgtagt

SEQ ID NO: 360015 - DNA, 25 bp, Artificial
  probe
  misc_feature (1)..(25): SEQ ID NO: 3622; WAN0249SJ; Start 99; Stop 123
atgtgttgaatccagaatagtccac

SEQ ID NO: 360016 - DNA, 25 bp, Artificial
  probe
  misc_feature (1)..(25): SEQ ID NO: 3622; WAN0249SJ; Start 102; Stop 126
tgttgaatccagaatagtccactgt

SEQ ID NO: 360017 - DNA, 25 bp, Artificial
  probe
  misc_feature (1)..(25): SEQ ID NO: 3622; WAN0249SJ; Start 101; Stop 125
gtgttgaatccagaatagtccactg

SEQ ID NO: 360018 - DNA, 25 bp, Artificial
  probe
  misc_feature (1)..(25): SEQ ID NO: 3622; WAN0249SJ; Start 100; Stop 124
tgtgttgaatccagaatagtccact

SEQ ID NO: 360019 - DNA, 25 bp, Artificial
  probe
  misc_feature (1)..(25): SEQ ID NO: 3622; WAN0249SJ; Start 55; Stop 79
aatgtcgtagccttcttgtgaatgt

SEQ ID NO: 360020 - DNA, 25 bp, Artificial
  probe
  misc_feature (1)..(25): SEQ ID NO: 3622; WAN0249SJ; Start 5; Stop 29
atgtaaccaactttagtagggcaaa

SEQ ID NO: 360021 - DNA, 25 bp, Artificial
  probe
  misc_feature (1)..(25): SEQ ID NO: 3622; WAN0249SJ; Start 4; Stop 28
aatgtaaccaactttagtagggcaa

SEQ ID NO: 360022 - DNA, 25 bp, Artificial
  probe
  misc_feature (1)..(25): SEQ ID NO: 3622; WAN0249SJ; Start 13; Stop 37
aactttagtagggcaaacgatacat

SEQ ID NO: 360023 - DNA, 25 bp, Artificial
  probe
  misc_feature (1)..(25): SEQ ID NO: 3622; WAN0249SJ; Start 3; Stop 27
taatgtaaccaactttagtagggca

SEQ ID NO: 360024 - DNA, 25 bp, Artificial
  probe
  misc_feature (1)..(25): SEQ ID NO: 3622; WAN0249SJ; Start 14; Stop 38
actttagtagggcaaacgatacatc

SEQ ID NO: 360025 - DNA, 25 bp, Artificial
  probe
  misc_feature (1)..(25): SEQ ID NO: 3622; WAN0249SJ; Start 148; Stop 172
aatggatgttaagcaccaattcatt

SEQ ID NO: 360026 - DNA, 25 bp, Artificial
  probe
  misc_feature (1)..(25): SEQ ID NO: 3622; WAN0249SJ; Start 6; Stop 30
tgtaaccaactttagtagggcaaac

SEQ ID NO: 360027 - DNA, 25 bp, Artificial
  probe
  misc_feature (1)..(25): SEQ ID NO: 3622; WAN0249SJ; Start 12; Stop 36
caactttagtagggcaaacgataca

SEQ ID NO: 360028 - DNA, 25 bp, Artificial
  probe
  misc_feature (1)..(25): SEQ ID NO: 3622; WAN0249SJ; Start 96; Stop 120
ataatgtgttgaatccagaatagtc

SEQ ID NO: 360029 - DNA, 25 bp, Artificial
  probe
  misc_feature (1)..(25): SEQ ID NO: 3622; WAN0249SJ; Start 15; Stop 39
ctttagtagggcaaacgatacatcc

SEQ ID NO: 360030 - DNA, 25 bp, Artificial
  probe
  misc_feature (1)..(25): SEQ ID NO: 3622; WAN0249SJ; Start 159; Stop 183
agcaccaattcatttgtttacatct

SEQ ID NO: 360031 - DNA, 25 bp, Artificial
  probe
  misc_feature (1)..(25): SEQ ID NO: 3622; WAN0249SJ; Start 151; Stop 175
ggatgttaagcaccaattcatttgt

SEQ ID NO: 360032 - DNA, 25 bp, Artificial
  probe
  misc_feature (1)..(25): SEQ ID NO: 3622; WAN0249SJ; Start 2; Stop 26
ataatgtaaccaactttagtagggc

SEQ ID NO: 360033 - DNA, 25 bp, Artificial
  probe
  misc_feature (1)..(25): SEQ ID NO: 3622; WAN0249SJ; Start 160; Stop 184
gcaccaattcatttgtttacatctt

SEQ ID NO: 360034 - DNA, 25 bp, Artificial
  probe
  misc_feature (1)..(25): SEQ ID NO: 3622; WAN0249SJ; Start 158; Stop 182
aagcaccaattcatttgtttacatc

SEQ ID NO: 360035 - DNA, 25 bp, Artificial
  probe
  misc_feature (1)..(25): SEQ ID NO: 3622; WAN0249SJ; Start 152; Stop 176
gatgttaagcaccaattcatttgtt

SEQ ID NO: 360036 - DNA, 25 bp, Artificial
  probe
  misc_feature (1)..(25): SEQ ID NO: 3622; WAN0249SJ; Start 11; Stop 35
ccaactttagtagggcaaacgatac

SEQ ID NO: 360037 - DNA, 25 bp, Artificial
  probe
  misc_feature (1)..(25): SEQ ID NO: 3622; WAN0249SJ; Start 56; Stop 80
atgtcgtagccttcttgtgaatgtg

SEQ ID NO: 360038 - DNA, 25 bp, Artificial
  probe
  misc_feature (1)..(25): SEQ ID NO: 3622; WAN0249SJ; Start 153; Stop 177
atgttaagcaccaattcatttgttt

SEQ ID NO: 360039 - DNA, 25 bp, Artificial
  probe
  misc_feature (1)..(25): SEQ ID NO: 3622; WAN0249SJ; Start 54; Stop 78
aaatgtcgtagccttcttgtgaatg

SEQ ID NO: 360040 - DNA, 25 bp, Artificial
  probe
  misc_feature (1)..(25): SEQ ID NO: 3622; WAN0249SJ; Start 10; Stop 34
accaactttagtagggcaaacgata

SEQ ID NO: 360041 - DNA, 25 bp, Artificial
  probe
  misc_feature (1)..(25): SEQ ID NO: 3622; WAN0249SJ; Start 108; Stop 132
atccagaatagtccactgtagtttc

SEQ ID NO: 360042 - DNA, 25 bp, Artificial
  probe
  misc_feature (1)..(25): SEQ ID NO: 3623; WAN0249IM; Start 22; Stop 46
aatcatacagtccaagagtgaacag

SEQ ID NO: 360043 - DNA, 25 bp, Artificial
  probe
  misc_feature (1)..(25): SEQ ID NO: 3623; WAN0249IM; Start 23; Stop 47
atcatacagtccaagagtgaacagt

SEQ ID NO: 360044 - DNA, 25 bp, Artificial
  probe
  misc_feature (1)..(25): SEQ ID NO: 3623; WAN0249IM; Start 24; Stop 48
tcatacagtccaagagtgaacagtc

SEQ ID NO: 360045 - DNA, 25 bp, Artificial
  probe
  misc_feature (1)..(25): SEQ ID NO: 3623; WAN0249IM; Start 25; Stop 49
catacagtccaagagtgaacagtcc

SEQ ID NO: 360046 - DNA, 25 bp, Artificial
  probe
  misc_feature (1)..(25): SEQ ID NO: 3623; WAN0249IM; Start 21; Stop 45
aaatcatacagtccaagagtgaaca

SEQ ID NO: 360047 - DNA, 25 bp, Artificial
  probe
  misc_feature (1)..(25): SEQ ID NO: 3623; WAN0249IM; Start 17; Stop 41
tcataaatcatacagtccaagagtg

SEQ ID NO: 360048 - DNA, 25 bp, Artificial
  probe
  misc_feature (1)..(25): SEQ ID NO: 3623; WAN0249IM; Start 20; Stop 44
taaatcatacagtccaagagtgaac

SEQ ID NO: 360049 - DNA, 25 bp, Artificial
  probe
  misc_feature (1)..(25): SEQ ID NO: 3623; WAN0249IM; Start 18; Stop 42
cataaatcatacagtccaagagtga

SEQ ID NO: 360050 - DNA, 25 bp, Artificial
  probe
  misc_feature (1)..(25): SEQ ID NO: 3623; WAN0249IM; Start 14; Stop 38
acatcataaatcatacagtccaaga

SEQ ID NO: 360051 - DNA, 25 bp, Artificial
  probe
  misc_feature (1)..(25): SEQ ID NO: 3623; WAN0249IM; Start 16; Stop 40
atcataaatcatacagtccaagagt

SEQ ID NO: 360052 - DNA, 25 bp, Artificial
  probe
  misc_feature (1)..(25): SEQ ID NO: 3623; WAN0249IM; Start 15; Stop 39
catcataaatcatacagtccaagag

SEQ ID NO: 360053 - DNA, 25 bp, Artificial
  probe
  misc_feature (1)..(25): SEQ ID NO: 3623; WAN0249IM; Start 19; Stop 43
ataaatcatacagtccaagagtgaa

SEQ ID NO: 360054 - DNA, 25 bp, Artificial
  probe
  misc_feature (1)..(25): SEQ ID NO: 3623; WAN0249IM; Start 13; Stop 37
aacatcataaatcatacagtccaag

SEQ ID NO: 360055 - DNA, 25 bp, Artificial
  probe
  misc_feature (1)..(25): SEQ ID NO: 3623; WAN0249IM; Start 26; Stop 50
atacagtccaagagtgaacagtccg

SEQ ID NO: 360056 - DNA, 25 bp, Artificial
  probe
  misc_feature (1)..(25): SEQ ID NO: 3623; WAN0249IM; Start 12; Stop 36
aaacatcataaatcatacagtccaa

SEQ ID NO: 360057 - DNA, 25 bp, Artificial
  probe
  misc_feature (1)..(25): SEQ ID NO: 3623; WAN0249IM; Start 11; Stop 35
aaaacatcataaatcatacagtcca

SEQ ID NO: 360058 - DNA, 25 bp, Artificial
  probe
  misc_feature (1)..(25): SEQ ID NO: 3623; WAN0249IM; Start 37; Stop 61
gagtgaacagtccgctgtgtaattc

SEQ ID NO: 360059 - DNA, 25 bp, Artificial
  probe
  misc_feature (1)..(25): SEQ ID NO: 3623; WAN0249IM; Start 36; Stop 60
agagtgaacagtccgctgtgtaatt

SEQ ID NO: 360060 - DNA, 25 bp, Artificial
  probe
  misc_feature (1)..(25): SEQ ID NO: 3623; WAN0249IM; Start 35; Stop 59
aagagtgaacagtccgctgtgtaat

SEQ ID NO: 360061 - DNA, 25 bp, Artificial
  probe
  misc_feature (1)..(25): SEQ ID NO: 3623; WAN0249IM; Start 10; Stop 34
taaaacatcataaatcatacagtcc

SEQ ID NO: 360062 - DNA, 25 bp, Artificial
  probe
  misc_feature (1)..(25): SEQ ID NO: 3623; WAN0249IM; Start 34; Stop 58
caagagtgaacagtccgctgtgtaa

SEQ ID NO: 360063 - DNA, 25 bp, Artificial
  probe
  misc_feature (1)..(25): SEQ ID NO: 3624; WAN0249OP; Start 27; Stop 51
cactagccctttacctttctatcaa

SEQ ID NO: 360064 - DNA, 25 bp, Artificial
  probe
  misc_feature (1)..(25): SEQ ID NO: 3624; WAN0249OP; Start 62; Stop 86
ataagcaaagaaacccagttgacta

SEQ ID NO: 360065 - DNA, 25 bp, Artificial
  probe
  misc_feature (1)..(25): SEQ ID NO: 3624; WAN0249OP; Start 60; Stop 84
aaataagcaaagaaacccagttgac

SEQ ID NO: 360066 - DNA, 25 bp, Artificial
  probe
  misc_feature (1)..(25): SEQ ID NO: 3624; WAN0249OP; Start 28; Stop 52
actagccctttacctttctatcaat

SEQ ID NO: 360067 - DNA, 25 bp, Artificial
  probe
  misc_feature (1)..(25): SEQ ID NO: 3624; WAN0249OP; Start 61; Stop 85
aataagcaaagaaacccagttgact

SEQ ID NO: 360068 - DNA, 25 bp, Artificial
  probe
  misc_feature (1)..(25): SEQ ID NO: 3624; WAN0249OP; Start 63; Stop 87
taagcaaagaaacccagttgactac

SEQ ID NO: 360069 - DNA, 25 bp, Artificial
  probe
  misc_feature (1)..(25): SEQ ID NO: 3624; WAN0249OP; Start 26; Stop 50
ccactagccctttacctttctatca

SEQ ID NO: 360070 - DNA, 25 bp, Artificial
  probe
  misc_feature (1)..(25): SEQ ID NO: 3624; WAN0249OP; Start 25; Stop 49
accactagccctttacctttctatc

SEQ ID NO: 360071 - DNA, 25 bp, Artificial
  probe
  misc_feature (1)..(25): SEQ ID NO: 3624; WAN0249OP; Start 29; Stop 53
ctagccctttacctttctatcaatt

SEQ ID NO: 360072 - DNA, 25 bp, Artificial
  probe
  misc_feature (1)..(25): SEQ ID NO: 3624; WAN0249OP; Start 24; Stop 48
caccactagccctttacctttctat

SEQ ID NO: 360073 - DNA, 25 bp, Artificial
  probe
  misc_feature (1)..(25): SEQ ID NO: 3624; WAN0249OP; Start 30; Stop 54
tagccctttacctttctatcaattt

SEQ ID NO: 360074 - DNA, 25 bp, Artificial
  probe
  misc_feature (1)..(25): SEQ ID NO: 3624; WAN0249OP; Start 20; Stop 44
taaacaccactagccctttaccttt

SEQ ID NO: 360075 - DNA, 25 bp, Artificial
  probe
  misc_feature (1)..(25): SEQ ID NO: 3624; WAN0249OP; Start 65; Stop 89
agcaaagaaacccagttgactacaa

SEQ ID NO: 360076 - DNA, 25 bp, Artificial
  probe
  misc_feature (1)..(25): SEQ ID NO: 3624; WAN0249OP; Start 64; Stop 88
aagcaaagaaacccagttgactaca

SEQ ID NO: 360077 - DNA, 25 bp, Artificial
  probe
  misc_feature (1)..(25): SEQ ID NO: 3624; WAN0249OP; Start 23; Stop 47
acaccactagccctttacctttcta

SEQ ID NO: 360078 - DNA, 25 bp, Artificial
  probe
  misc_feature (1)..(25): SEQ ID NO: 3624; WAN0249OP; Start 21; Stop 45
aaacaccactagccctttacctttc

SEQ ID NO: 360079 - DNA, 25 bp, Artificial
  probe
  misc_feature (1)..(25): SEQ ID NO: 3624; WAN0249OP; Start 59; Stop 83
aaaataagcaaagaaacccagttga

SEQ ID NO: 360080 - DNA, 25 bp, Artificial
  probe
  misc_feature (1)..(25): SEQ ID NO: 3624; WAN0249OP; Start 31; Stop 55
agccctttacctttctatcaatttt

SEQ ID NO: 360081 - DNA, 25 bp, Artificial
  probe
  misc_feature (1)..(25): SEQ ID NO: 3624; WAN0249OP; Start 56; Stop 80
tctaaaataagcaaagaaacccagt

SEQ ID NO: 360082 - DNA, 25 bp, Artificial
  probe
  misc_feature (1)..(25): SEQ ID NO: 3624; WAN0249OP; Start 22; Stop 46
aacaccactagccctttacctttct

SEQ ID NO: 360083 - DNA, 25 bp, Artificial
  probe
  misc_feature (1)..(25): SEQ ID NO: 3624; WAN0249OP; Start 58; Stop 82
taaaataagcaaagaaacccagttg

SEQ ID NO: 360084 - DNA, 25 bp, Artificial
  probe
  misc_feature (1)..(25): SEQ ID NO: 3624; WAN0249OP; Start 57; Stop 81
ctaaaataagcaaagaaacccagtt

SEQ ID NO: 360085 - DNA, 25 bp, Artificial
  probe
  misc_feature (1)..(25): SEQ ID NO: 3624; WAN0249OP; Start 55; Stop 79
ttctaaaataagcaaagaaacccag

SEQ ID NO: 360086 - DNA, 25 bp, Artificial
  probe
  misc_feature (1)..(25): SEQ ID NO: 3624; WAN0249OP; Start 2; Stop 26
atactaagagctccatggtaaacac

SEQ ID NO: 360087 - DNA, 25 bp, Artificial
  probe
  misc_feature (1)..(25): SEQ ID NO: 3624; WAN0249OP; Start 1; Stop 25
gatactaagagctccatggtaaaca

SEQ ID NO: 360088 - DNA, 25 bp, Artificial
  probe
  misc_feature (1)..(25): SEQ ID NO: 3624; WAN0249OP; Start 66; Stop 90
gcaaagaaacccagttgactacaac

SEQ ID NO: 360089 - DNA, 25 bp, Artificial
  probe
  misc_feature (1)..(25): SEQ ID NO: 3624; WAN0249OP; Start 19; Stop 43
gtaaacaccactagccctttacctt

SEQ ID NO: 360090 - DNA, 25 bp, Artificial
  probe
  misc_feature (1)..(25): SEQ ID NO: 3624; WAN0249OP; Start 16; Stop 40
atggtaaacaccactagccctttac

SEQ ID NO: 360091 - DNA, 25 bp, Artificial
  probe
  misc_feature (1)..(25): SEQ ID NO: 3624; WAN0249OP; Start 15; Stop 39
catggtaaacaccactagcccttta

SEQ ID NO: 360092 - DNA, 25 bp, Artificial
  probe
  misc_feature (1)..(25): SEQ ID NO: 3624; WAN0249OP; Start 3; Stop 27
tactaagagctccatggtaaacacc

SEQ ID NO: 360093 - DNA, 25 bp, Artificial
  probe
  misc_feature (1)..(25): SEQ ID NO: 3624; WAN0249OP; Start 54; Stop 78
tttctaaaataagcaaagaaaccca

SEQ ID NO: 360094 - DNA, 25 bp, Artificial
  probe
  misc_feature (1)..(25): SEQ ID NO: 3624; WAN0249OP; Start 53; Stop 77
ttttctaaaataagcaaagaaaccc

SEQ ID NO: 360095 - DNA, 25 bp, Artificial
  probe
  misc_feature (1)..(25): SEQ ID NO: 3624; WAN0249OP; Start 5; Stop 29
ctaagagctccatggtaaacaccac

SEQ ID NO: 360096 - DNA, 25 bp, Artificial
  probe
  misc_feature (1)..(25): SEQ ID NO: 3625; WAN024A6Q; Start 39; Stop 63
aatcagatacaaagacaggtgaaac

SEQ ID NO: 360097 - DNA, 25 bp, Artificial
  probe
  misc_feature (1)..(25): SEQ ID NO: 3625; WAN024A6Q; Start 38; Stop 62
aaatcagatacaaagacaggtgaaa

SEQ ID NO: 360098 - DNA, 25 bp, Artificial
  probe
  misc_feature (1)..(25): SEQ ID NO: 3625; WAN024A6Q; Start 57; Stop 81
gtgaaaccttctgtgttatactaga

SEQ ID NO: 360099 - DNA, 25 bp, Artificial
  probe
  misc_feature (1)..(25): SEQ ID NO: 3625; WAN024A6Q; Start 37; Stop 61
taaatcagatacaaagacaggtgaa

SEQ ID NO: 360100 - DNA, 25 bp, Artificial
  probe
  misc_feature (1)..(25): SEQ ID NO: 3625; WAN024A6Q; Start 40; Stop 64
atcagatacaaagacaggtgaaacc

SEQ ID NO: 360101 - DNA, 25 bp, Artificial
  probe
  misc_feature (1)..(25): SEQ ID NO: 3625; WAN024A6Q; Start 58; Stop 82
tgaaaccttctgtgttatactagag

SEQ ID NO: 360102 - DNA, 25 bp, Artificial
  probe
  misc_feature (1)..(25): SEQ ID NO: 3625; WAN024A6Q; Start 36; Stop 60
ataaatcagatacaaagacaggtga

SEQ ID NO: 360103 - DNA, 25 bp, Artificial
  probe
  misc_feature (1)..(25): SEQ ID NO: 3625; WAN024A6Q; Start 56; Stop 80
ggtgaaaccttctgtgttatactag

SEQ ID NO: 360104 - DNA, 25 bp, Artificial
  probe
  misc_feature (1)..(25): SEQ ID NO: 3625; WAN024A6Q; Start 59; Stop 83
gaaaccttctgtgttatactagaga

SEQ ID NO: 360105 - DNA, 25 bp, Artificial
  probe
  misc_feature (1)..(25): SEQ ID NO: 3625; WAN024A6Q; Start 60; Stop 84
aaaccttctgtgttatactagagat

SEQ ID NO: 360106 - DNA, 25 bp, Artificial
  probe
  misc_feature (1)..(25): SEQ ID NO: 3625; WAN024A6Q; Start 35; Stop 59
tataaatcagatacaaagacaggtg

SEQ ID NO: 360107 - DNA, 25 bp, Artificial
  probe
  misc_feature (1)..(25): SEQ ID NO: 3625; WAN024A6Q; Start 34; Stop 58
ttataaatcagatacaaagacaggt

SEQ ID NO: 360108 - DNA, 25 bp, Artificial
  probe
  misc_feature (1)..(25): SEQ ID NO: 3625; WAN024A6Q; Start 54; Stop 78
caggtgaaaccttctgtgttatact

SEQ ID NO: 360109 - DNA, 25 bp, Artificial
  probe
  misc_feature (1)..(25): SEQ ID NO: 3625; WAN024A6Q; Start 52; Stop 76
gacaggtgaaaccttctgtgttata

SEQ ID NO: 360110 - DNA, 25 bp, Artificial
  probe
  misc_feature (1)..(25): SEQ ID NO: 3625; WAN024A6Q; Start 53; Stop 77
acaggtgaaaccttctgtgttatac

SEQ ID NO: 360111 - DNA, 25 bp, Artificial
  probe
  misc_feature (1)..(25): SEQ ID NO: 3625; WAN024A6Q; Start 44; Stop 68
gatacaaagacaggtgaaaccttct

SEQ ID NO: 360112 - DNA, 25 bp, Artificial
  probe
  misc_feature (1)..(25): SEQ ID NO: 3625; WAN024A6Q; Start 43; Stop 67
agatacaaagacaggtgaaaccttc

SEQ ID NO: 360113 - DNA, 25 bp, Artificial
  probe
  misc_feature (1)..(25): SEQ ID NO: 3625; WAN024A6Q; Start 55; Stop 79
aggtgaaaccttctgtgttatacta

SEQ ID NO: 360114 - DNA, 25 bp, Artificial
  probe
  misc_feature (1)..(25): SEQ ID NO: 3625; WAN024A6Q; Start 45; Stop 69
atacaaagacaggtgaaaccttctg

SEQ ID NO: 360115 - DNA, 25 bp, Artificial
  probe
  misc_feature (1)..(25): SEQ ID NO: 3625; WAN024A6Q; Start 42; Stop 66
cagatacaaagacaggtgaaacctt

SEQ ID NO: 360116 - DNA, 25 bp, Artificial
  probe
  misc_feature (1)..(25): SEQ ID NO: 3625; WAN024A6Q; Start 41; Stop 65
tcagatacaaagacaggtgaaacct

SEQ ID NO: 360117 - DNA, 25 bp, Artificial
  probe
  misc_feature (1)..(25): SEQ ID NO: 3625; WAN024A6Q; Start 51; Stop 75
agacaggtgaaaccttctgtgttat

SEQ ID NO: 360118 - DNA, 25 bp, Artificial
  probe
  misc_feature (1)..(25): SEQ ID NO: 3625; WAN024A6Q; Start 50; Stop 74
aagacaggtgaaaccttctgtgtta

SEQ ID NO: 360119 - DNA, 25 bp, Artificial
  probe
  misc_feature (1)..(25): SEQ ID NO: 3625; WAN024A6Q; Start 46; Stop 70
tacaaagacaggtgaaaccttctgt

SEQ ID NO: 360120 - DNA, 25 bp, Artificial
  probe
  misc_feature (1)..(25): SEQ ID NO: 3625; WAN024A6Q; Start 49; Stop 73
aaagacaggtgaaaccttctgtgtt

SEQ ID NO: 360121 - DNA, 25 bp, Artificial
  probe
  misc_feature (1)..(25): SEQ ID NO: 3625; WAN024A6Q; Start 48; Stop 72
caaagacaggtgaaaccttctgtgt

SEQ ID NO: 360122 - DNA, 25 bp, Artificial
  probe
  misc_feature (1)..(25): SEQ ID NO: 3625; WAN024A6Q; Start 47; Stop 71
acaaagacaggtgaaaccttctgtg

SEQ ID NO: 360123 - DNA, 25 bp, Artificial
  probe
  misc_feature (1)..(25): SEQ ID NO: 3626; WAN024A6A; Start 4; Stop 28
agagaagaagtctagtgttatgaga

SEQ ID NO: 360124 - DNA, 25 bp, Artificial
  probe
  misc_feature (1)..(25): SEQ ID NO: 3626; WAN024A6A; Start 5; Stop 29
gagaagaagtctagtgttatgagat

SEQ ID NO: 360125 - DNA, 25 bp, Artificial
  probe
  misc_feature (1)..(25): SEQ ID NO: 3626; WAN024A6A; Start 26; Stop 50
agatattaaagctcctaacactggg

SEQ ID NO: 360126 - DNA, 25 bp, Artificial
  probe
  misc_feature (1)..(25): SEQ ID NO: 3626; WAN024A6A; Start 27; Stop 51
gatattaaagctcctaacactgggc

SEQ ID NO: 360127 - DNA, 25 bp, Artificial
  probe
  misc_feature (1)..(25): SEQ ID NO: 3626; WAN024A6A; Start 3; Stop 27
tagagaagaagtctagtgttatgag

SEQ ID NO: 360128 - DNA, 25 bp, Artificial
  probe
  misc_feature (1)..(25): SEQ ID NO: 3626; WAN024A6A; Start 6; Stop 30
agaagaagtctagtgttatgagata

SEQ ID NO: 360129 - DNA, 25 bp, Artificial
  probe
  misc_feature (1)..(25): SEQ ID NO: 3626; WAN024A6A; Start 25; Stop 49
gagatattaaagctcctaacactgg

SEQ ID NO: 360130 - DNA, 25 bp, Artificial
  probe
  misc_feature (1)..(25): SEQ ID NO: 3626; WAN024A6A; Start 24; Stop 48
tgagatattaaagctcctaacactg

SEQ ID NO: 360131 - DNA, 25 bp, Artificial
  probe
  misc_feature (1)..(25): SEQ ID NO: 3626; WAN024A6A; Start 2; Stop 26
atagagaagaagtctagtgttatga

SEQ ID NO: 360132 - DNA, 25 bp, Artificial
  probe
  misc_feature (1)..(25): SEQ ID NO: 3626; WAN024A6A; Start 1; Stop 25
gatagagaagaagtctagtgttatg

SEQ ID NO: 360133 - DNA, 25 bp, Artificial
  probe
  misc_feature (1)..(25): SEQ ID NO: 3626; WAN024A6A; Start 44; Stop 68
cactgggcttttgtttagaatttct

SEQ ID NO: 360134 - DNA, 25 bp, Artificial
  probe
  misc_feature (1)..(25): SEQ ID NO: 3626; WAN024A6A; Start 45; Stop 69
actgggcttttgtttagaatttctt

SEQ ID NO: 360135 - DNA, 25 bp, Artificial
  probe
  misc_feature (1)..(25): SEQ ID NO: 3626; WAN024A6A; Start 43; Stop 67
acactgggcttttgtttagaatttc

SEQ ID NO: 360136 - DNA, 25 bp, Artificial
  probe
  misc_feature (1)..(25): SEQ ID NO: 3626; WAN024A6A; Start 7; Stop 31
gaagaagtctagtgttatgagatat

SEQ ID NO: 360137 - DNA, 25 bp, Artificial
  probe
  misc_feature (1)..(25): SEQ ID NO: 3626; WAN024A6A; Start 23; Stop 47
atgagatattaaagctcctaacact

SEQ ID NO: 360138 - DNA, 25 bp, Artificial
  probe
  misc_feature (1)..(25): SEQ ID NO: 3626; WAN024A6A; Start 17; Stop 41
agtgttatgagatattaaagctcct

SEQ ID NO: 360139 - DNA, 25 bp, Artificial
  probe
  misc_feature (1)..(25): SEQ ID NO: 3626; WAN024A6A; Start 46; Stop 70
ctgggcttttgtttagaatttcttt

SEQ ID NO: 360140 - DNA, 25 bp, Artificial
  probe
  misc_feature (1)..(25): SEQ ID NO: 3626; WAN024A6A; Start 28; Stop 52
atattaaagctcctaacactgggct

SEQ ID NO: 360141 - DNA, 25 bp, Artificial
  probe
  misc_feature (1)..(25): SEQ ID NO: 3626; WAN024A6A; Start 47; Stop 71
tgggcttttgtttagaatttctttt

SEQ ID NO: 360142 - DNA, 25 bp, Artificial
  probe
  misc_feature (1)..(25): SEQ ID NO: 3626; WAN024A6A; Start 48; Stop 72
gggcttttgtttagaatttcttttc

SEQ ID NO: 360143 - DNA, 25 bp, Artificial
  probe
  misc_feature (1)..(25): SEQ ID NO: 3626; WAN024A6A; Start 8; Stop 32
aagaagtctagtgttatgagatatt

SEQ ID NO: 360144 - DNA, 25 bp, Artificial
  probe
  misc_feature (1)..(25): SEQ ID NO: 3626; WAN024A6A; Start 22; Stop 46
tatgagatattaaagctcctaacac

SEQ ID NO: 360145 - DNA, 25 bp, Artificial
  probe
  misc_feature (1)..(25): SEQ ID NO: 3626; WAN024A6A; Start 18; Stop 42
gtgttatgagatattaaagctccta

SEQ ID NO: 360146 - DNA, 25 bp, Artificial
  probe
  misc_feature (1)..(25): SEQ ID NO: 3626; WAN024A6A; Start 16; Stop 40
tagtgttatgagatattaaagctcc

SEQ ID NO: 360147 - DNA, 25 bp, Artificial
  probe
  misc_feature (1)..(25): SEQ ID NO: 3626; WAN024A6A; Start 13; Stop 37
gtctagtgttatgagatattaaagc

SEQ ID NO: 360148 - DNA, 25 bp, Artificial
  probe
  misc_feature (1)..(25): SEQ ID NO: 3626; WAN024A6A; Start 42; Stop 66
aacactgggcttttgtttagaattt

SEQ ID NO: 360149 - DNA, 25 bp, Artificial
  probe
  misc_feature (1)..(25): SEQ ID NO: 3626; WAN024A6A; Start 40; Stop 64
ctaacactgggcttttgtttagaat

SEQ ID NO: 360150 - DNA, 25 bp, Artificial
  probe
  misc_feature (1)..(25): SEQ ID NO: 3626; WAN024A6A; Start 118; Stop 142
aagtaatgccaatatttaaacatca

SEQ ID NO: 360151 - DNA, 25 bp, Artificial
  probe
  misc_feature (1)..(25): SEQ ID NO: 3626; WAN024A6A; Start 41; Stop 65
taacactgggcttttgtttagaatt

SEQ ID NO: 360152 - DNA, 25 bp, Artificial
  probe
  misc_feature (1)..(25): SEQ ID NO: 3626; WAN024A6A; Start 39; Stop 63
cctaacactgggcttttgtttagaa

SEQ ID NO: 360153 - DNA, 25 bp, Artificial
  probe
  misc_feature (1)..(25): SEQ ID NO: 3626; WAN024A6A; Start 123; Stop 147
atgccaatatttaaacatcattagt

SEQ ID NO: 360154 - DNA, 25 bp, Artificial
  probe
  misc_feature (1)..(25): SEQ ID NO: 3626; WAN024A6A; Start 119; Stop 143
agtaatgccaatatttaaacatcat

SEQ ID NO: 360155 - DNA, 25 bp, Artificial
  probe
  misc_feature (1)..(25): SEQ ID NO: 3626; WAN024A6A; Start 37; Stop 61
ctcctaacactgggcttttgtttag

SEQ ID NO: 360156 - DNA, 25 bp, Artificial
  probe
  misc_feature (1)..(25): SEQ ID NO: 3628; WAN024C9L; Start 75; Stop 99
ctctgttattctggtattacttgga

SEQ ID NO: 360157 - DNA, 25 bp, Artificial
  probe
  misc_feature (1)..(25): SEQ ID NO: 3628; WAN024C9L; Start 74; Stop 98
tctctgttattctggtattacttgg

SEQ ID NO: 360158 - DNA, 25 bp, Artificial
  probe
  misc_feature (1)..(25): SEQ ID NO: 3628; WAN024C9L; Start 583; Stop 607
ttactgatgcttgtcggtattggaa

SEQ ID NO: 360159 - DNA, 25 bp, Artificial
  probe
  misc_feature (1)..(25): SEQ ID NO: 3628; WAN024C9L; Start 118; Stop 142
ttggacaatccgccttatagtatta

SEQ ID NO: 360160 - DNA, 25 bp, Artificial
  probe
  misc_feature (1)..(25): SEQ ID NO: 3628; WAN024C9L; Start 119; Stop 143
tggacaatccgccttatagtattat

SEQ ID NO: 360161 - DNA, 25 bp, Artificial
  probe
  misc_feature (1)..(25): SEQ ID NO: 3628; WAN024C9L; Start 342; Stop 366
acttagaataattggacttacaggt

SEQ ID NO: 360162 - DNA, 25 bp, Artificial
  probe
  misc_feature (1)..(25): SEQ ID NO: 3628; WAN024C9L; Start 99; Stop 123
atttgctgagatgattgatttggac

SEQ ID NO: 360163 - DNA, 25 bp, Artificial
  probe
  misc_feature (1)..(25): SEQ ID NO: 3628; WAN024C9L; Start 98; Stop 122
gatttgctgagatgattgatttgga

SEQ ID NO: 360164 - DNA, 25 bp, Artificial
  probe
  misc_feature (1)..(25): SEQ ID NO: 3628; WAN024C9L; Start 96; Stop 120
tggatttgctgagatgattgatttg

SEQ ID NO: 360165 - DNA, 25 bp, Artificial
  probe
  misc_feature (1)..(25): SEQ ID NO: 3628; WAN024C9L; Start 94; Stop 118
cttggatttgctgagatgattgatt

SEQ ID NO: 360166 - DNA, 25 bp, Artificial
  probe
  misc_feature (1)..(25): SEQ ID NO: 3628; WAN024C9L; Start 92; Stop 116
tacttggatttgctgagatgattga

SEQ ID NO: 360167 - DNA, 25 bp, Artificial
  probe
  misc_feature (1)..(25): SEQ ID NO: 3628; WAN024C9L; Start 86; Stop 110
tggtattacttggatttgctgagat

SEQ ID NO: 360168 - DNA, 25 bp, Artificial
  probe
  misc_feature (1)..(25): SEQ ID NO: 3628; WAN024C9L; Start 76; Stop 100
tctgttattctggtattacttggat

SEQ ID NO: 360169 - DNA, 25 bp, Artificial
  probe
  misc_feature (1)..(25): SEQ ID NO: 3628; WAN024C9L; Start 87; Stop 111
ggtattacttggatttgctgagatg

SEQ ID NO: 360170 - DNA, 25 bp, Artificial
  probe
  misc_feature (1)..(25): SEQ ID NO: 3628; WAN024C9L; Start 83; Stop 107
ttctggtattacttggatttgctga

SEQ ID NO: 360171 - DNA, 25 bp, Artificial
  probe
  misc_feature (1)..(25): SEQ ID NO: 3628; WAN024C9L; Start 584; Stop 608
tactgatgcttgtcggtattggaac

SEQ ID NO: 360172 - DNA, 25 bp, Artificial
  probe
  misc_feature (1)..(25): SEQ ID NO: 3628; WAN024C9L; Start 91; Stop 115
ttacttggatttgctgagatgattg

SEQ ID NO: 360173 - DNA, 25 bp, Artificial
  probe
  misc_feature (1)..(25): SEQ ID NO: 3628; WAN024C9L; Start 95; Stop 119
ttggatttgctgagatgattgattt

SEQ ID NO: 360174 - DNA, 25 bp, Artificial
  probe
  misc_feature (1)..(25): SEQ ID NO: 3628; WAN024C9L; Start 85; Stop 109
ctggtattacttggatttgctgaga

SEQ ID NO: 360175 - DNA, 25 bp, Artificial
  probe
  misc_feature (1)..(25): SEQ ID NO: 3628; WAN024C9L; Start 84; Stop 108
tctggtattacttggatttgctgag

SEQ ID NO: 360176 - DNA, 25 bp, Artificial
  probe
  misc_feature (1)..(25): SEQ ID NO: 3628; WAN024C9L; Start 97; Stop 121
ggatttgctgagatgattgatttgg

SEQ ID NO: 360177 - DNA, 25 bp, Artificial
  probe
  misc_feature (1)..(25): SEQ ID NO: 3628; WAN024C9L; Start 82; Stop 106
attctggtattacttggatttgctg

SEQ ID NO: 360178 - DNA, 25 bp, Artificial
  probe
  misc_feature (1)..(25): SEQ ID NO: 3628; WAN024C9L; Start 93; Stop 117
acttggatttgctgagatgattgat

SEQ ID NO: 360179 - DNA, 25 bp, Artificial
  probe
  misc_feature (1)..(25): SEQ ID NO: 3628; WAN024C9L; Start 120; Stop 144
ggacaatccgccttatagtattatt

SEQ ID NO: 360180 - DNA, 25 bp, Artificial
  probe
  misc_feature (1)..(25): SEQ ID NO: 3628; WAN024C9L; Start 482; Stop 506
aatccttctcagatagtctttggtg

SEQ ID NO: 360181 - DNA, 25 bp, Artificial
  probe
  misc_feature (1)..(25): SEQ ID NO: 3628; WAN024C9L; Start 88; Stop 112
gtattacttggatttgctgagatga

SEQ ID NO: 360182 - DNA, 25 bp, Artificial
  probe
  misc_feature (1)..(25): SEQ ID NO: 3628; WAN024C9L; Start 100; Stop 124
tttgctgagatgattgatttggaca

SEQ ID NO: 360183 - DNA, 25 bp, Artificial
  probe
  misc_feature (1)..(25): SEQ ID NO: 3628; WAN024C9L; Start 90; Stop 114
attacttggatttgctgagatgatt

SEQ ID NO: 360184 - DNA, 25 bp, Artificial
  probe
  misc_feature (1)..(25): SEQ ID NO: 3628; WAN024C9L; Start 481; Stop 505
aaatccttctcagatagtctttggt

SEQ ID NO: 360185 - DNA, 25 bp, Artificial
  probe
  misc_feature (1)..(25): SEQ ID NO: 3628; WAN024C9L; Start 236; Stop 260
ttgatttattggctattctcccttt

SEQ ID NO: 360186 - DNA, 25 bp, Artificial
  probe
  misc_feature (1)..(25): SEQ ID NO: 3628; WAN024C9L; Start 235; Stop 259
tttgatttattggctattctccctt

SEQ ID NO: 360187 - DNA, 25 bp, Artificial
  probe
  misc_feature (1)..(25): SEQ ID NO: 3628; WAN024C9L; Start 65; Stop 89
ttgctttaatctctgttattctggt

SEQ ID NO: 360188 - DNA, 25 bp, Artificial
  probe
  misc_feature (1)..(25): SEQ ID NO: 3628; WAN024C9L; Start 435; Stop 459
ctttattgttctagtagggagttcg

SEQ ID NO: 360189 - DNA, 25 bp, Artificial
  probe
  misc_feature (1)..(25): SEQ ID NO: 3629; WAN024ADZ; Start 10; Stop 34
cctccattattcttcagattagttg

SEQ ID NO: 360190 - DNA, 25 bp, Artificial
  probe
  misc_feature (1)..(25): SEQ ID NO: 3629; WAN024ADZ; Start 9; Stop 33
tcctccattattcttcagattagtt

SEQ ID NO: 360191 - DNA, 25 bp, Artificial
  probe
  misc_feature (1)..(25): SEQ ID NO: 3629; WAN024ADZ; Start 8; Stop 32
ttcctccattattcttcagattagt

SEQ ID NO: 360192 - DNA, 25 bp, Artificial
  probe
  misc_feature (1)..(25): SEQ ID NO: 3629; WAN024ADZ; Start 105; Stop 129
gcaacattgacaaacatagtatagc

SEQ ID NO: 360193 - DNA, 25 bp, Artificial
  probe
  misc_feature (1)..(25): SEQ ID NO: 3629; WAN024ADZ; Start 136; Stop 160
ttgcgaaatatcctcttcaaatcat

SEQ ID NO: 360194 - DNA, 25 bp, Artificial
  probe
  misc_feature (1)..(25): SEQ ID NO: 3629; WAN024ADZ; Start 137; Stop 161
tgcgaaatatcctcttcaaatcatg

SEQ ID NO: 360195 - DNA, 25 bp, Artificial
  probe
  misc_feature (1)..(25): SEQ ID NO: 3629; WAN024ADZ; Start 130; Stop 154
atatctttgcgaaatatcctcttca

SEQ ID NO: 360196 - DNA, 25 bp, Artificial
  probe
  misc_feature (1)..(25): SEQ ID NO: 3629; WAN024ADZ; Start 131; Stop 155
tatctttgcgaaatatcctcttcaa

SEQ ID NO: 360197 - DNA, 25 bp, Artificial
  probe
  misc_feature (1)..(25): SEQ ID NO: 3629; WAN024ADZ; Start 129; Stop 153
catatctttgcgaaatatcctcttc

SEQ ID NO: 360198 - DNA, 25 bp, Artificial
  probe
  misc_feature (1)..(25): SEQ ID NO: 3629; WAN024ADZ; Start 207; Stop 231
gctttctatcaatttcttctccaaa

SEQ ID NO: 360199 - DNA, 25 bp, Artificial
  probe
  misc_feature (1)..(25): SEQ ID NO: 3629; WAN024ADZ; Start 106; Stop 130
caacattgacaaacatagtatagca

SEQ ID NO: 360200 - DNA, 25 bp, Artificial
  probe
  misc_feature (1)..(25): SEQ ID NO: 3629; WAN024ADZ; Start 13; Stop 37
ccattattcttcagattagttgagt

SEQ ID NO: 360201 - DNA, 25 bp, Artificial
  probe
  misc_feature (1)..(25): SEQ ID NO: 3629; WAN024ADZ; Start 12; Stop 36
tccattattcttcagattagttgag

SEQ ID NO: 360202 - DNA, 25 bp, Artificial
  probe
  misc_feature (1)..(25): SEQ ID NO: 3629; WAN024ADZ; Start 11; Stop 35
ctccattattcttcagattagttga

SEQ ID NO: 360203 - DNA, 25 bp, Artificial
  probe
  misc_feature (1)..(25): SEQ ID NO: 3629; WAN024ADZ; Start 206; Stop 230
agctttctatcaatttcttctccaa

SEQ ID NO: 360204 - DNA, 25 bp, Artificial
  probe
  misc_feature (1)..(25): SEQ ID NO: 3629; WAN024ADZ; Start 107; Stop 131
aacattgacaaacatagtatagcat

SEQ ID NO: 360205 - DNA, 25 bp, Artificial
  probe
  misc_feature (1)..(25): SEQ ID NO: 3629; WAN024ADZ; Start 135; Stop 159
tttgcgaaatatcctcttcaaatca

SEQ ID NO: 360206 - DNA, 25 bp, Artificial
  probe
  misc_feature (1)..(25): SEQ ID NO: 3629; WAN024ADZ; Start 133; Stop 157
tctttgcgaaatatcctcttcaaat

SEQ ID NO: 360207 - DNA, 25 bp, Artificial
  probe
  misc_feature (1)..(25): SEQ ID NO: 3629; WAN024ADZ; Start 132; Stop 156
atctttgcgaaatatcctcttcaaa

SEQ ID NO: 360208 - DNA, 25 bp, Artificial
  probe
  misc_feature (1)..(25): SEQ ID NO: 3629; WAN024ADZ; Start 246; Stop 270
tagcaaaagataaagaaggaagacc

SEQ ID NO: 360209 - DNA, 25 bp, Artificial
  probe
  misc_feature (1)..(25): SEQ ID NO: 3629; WAN024ADZ; Start 134; Stop 158
ctttgcgaaatatcctcttcaaatc

SEQ ID NO: 360210 - DNA, 25 bp, Artificial
  probe
  misc_feature (1)..(25): SEQ ID NO: 3629; WAN024ADZ; Start 127; Stop 151
agcatatctttgcgaaatatcctct

SEQ ID NO: 360211 - DNA, 25 bp, Artificial
  probe
  misc_feature (1)..(25): SEQ ID NO: 3629; WAN024ADZ; Start 128; Stop 152
gcatatctttgcgaaatatcctctt

SEQ ID NO: 360212 - DNA, 25 bp, Artificial
  probe
  misc_feature (1)..(25): SEQ ID NO: 3629; WAN024ADZ; Start 104; Stop 128
tgcaacattgacaaacatagtatag

SEQ ID NO: 360213 - DNA, 25 bp, Artificial
  probe
  misc_feature (1)..(25): SEQ ID NO: 3629; WAN024ADZ; Start 126; Stop 150
tagcatatctttgcgaaatatcctc

SEQ ID NO: 360214 - DNA, 25 bp, Artificial
  probe
  misc_feature (1)..(25): SEQ ID NO: 3629; WAN024ADZ; Start 7; Stop 31
tttcctccattattcttcagattag

SEQ ID NO: 360215 - DNA, 25 bp, Artificial
  probe
  misc_feature (1)..(25): SEQ ID NO: 3629; WAN024ADZ; Start 125; Stop 149
atagcatatctttgcgaaatatcct

SEQ ID NO: 360216 - DNA, 25 bp, Artificial
  probe
  misc_feature (1)..(25): SEQ ID NO: 3629; WAN024ADZ; Start 108; Stop 132
acattgacaaacatagtatagcata

SEQ ID NO: 360217 - DNA, 25 bp, Artificial
  probe
  misc_feature (1)..(25): SEQ ID NO: 3629; WAN024ADZ; Start 247; Stop 271
agcaaaagataaagaaggaagacct

SEQ ID NO: 360218 - DNA, 25 bp, Artificial
  probe
  misc_feature (1)..(25): SEQ ID NO: 3629; WAN024ADZ; Start 118; Stop 142
acatagtatagcatatctttgcgaa

SEQ ID NO: 360219 - DNA, 25 bp, Artificial
  probe
  misc_feature (1)..(25): SEQ ID NO: 3629; WAN024ADZ; Start 117; Stop 141
aacatagtatagcatatctttgcga

SEQ ID NO: 360220 - DNA, 25 bp, Artificial
  probe
  misc_feature (1)..(25): SEQ ID NO: 3629; WAN024ADZ; Start 138; Stop 162
gcgaaatatcctcttcaaatcatga

SEQ ID NO: 360221 - DNA, 25 bp, Artificial
  probe
  misc_feature (1)..(25): SEQ ID NO: 3629; WAN024ADZ; Start 6; Stop 30
atttcctccattattcttcagatta

SEQ ID NO: 360222 - DNA, 25 bp, Artificial
  probe
  misc_feature (1)..(25): SEQ ID NO: 3630; WAN024A88; Start 39; Stop 63
ccttccagtctaatctatcttcgtt

SEQ ID NO: 360223 - DNA, 25 bp, Artificial
  probe
  misc_feature (1)..(25): SEQ ID NO: 3630; WAN024A88; Start 37; Stop 61
aaccttccagtctaatctatcttcg

SEQ ID NO: 360224 - DNA, 25 bp, Artificial
  probe
  misc_feature (1)..(25): SEQ ID NO: 3630; WAN024A88; Start 38; Stop 62
accttccagtctaatctatcttcgt

SEQ ID NO: 360225 - DNA, 25 bp, Artificial
  probe
  misc_feature (1)..(25): SEQ ID NO: 3630; WAN024A88; Start 36; Stop 60
taaccttccagtctaatctatcttc

SEQ ID NO: 360226 - DNA, 25 bp, Artificial
  probe
  misc_feature (1)..(25): SEQ ID NO: 3630; WAN024A88; Start 35; Stop 59
ataaccttccagtctaatctatctt

SEQ ID NO: 360227 - DNA, 25 bp, Artificial
  probe
  misc_feature (1)..(25): SEQ ID NO: 3630; WAN024A88; Start 34; Stop 58
aataaccttccagtctaatctatct

SEQ ID NO: 360228 - DNA, 25 bp, Artificial
  probe
  misc_feature (1)..(25): SEQ ID NO: 3630; WAN024A88; Start 19; Stop 43
atgatagaaactggaaataaccttc

SEQ ID NO: 360229 - DNA, 25 bp, Artificial
  probe
  misc_feature (1)..(25): SEQ ID NO: 3630; WAN024A88; Start 33; Stop 57
aaataaccttccagtctaatctatc

SEQ ID NO: 360230 - DNA, 25 bp, Artificial
  probe
  misc_feature (1)..(25): SEQ ID NO: 3630; WAN024A88; Start 32; Stop 56
gaaataaccttccagtctaatctat

SEQ ID NO: 360231 - DNA, 25 bp, Artificial
  probe
  misc_feature (1)..(25): SEQ ID NO: 3630; WAN024A88; Start 18; Stop 42
tatgatagaaactggaaataacctt

SEQ ID NO: 360232 - DNA, 25 bp, Artificial
  probe
  misc_feature (1)..(25): SEQ ID NO: 3630; WAN024A88; Start 17; Stop 41
atatgatagaaactggaaataacct

SEQ ID NO: 360233 - DNA, 25 bp, Artificial
  probe
  misc_feature (1)..(25): SEQ ID NO: 3630; WAN024A88; Start 20; Stop 44
tgatagaaactggaaataaccttcc

SEQ ID NO: 360234 - DNA, 25 bp, Artificial
  probe
  misc_feature (1)..(25): SEQ ID NO: 3630; WAN024A88; Start 31; Stop 55
ggaaataaccttccagtctaatcta

SEQ ID NO: 360235 - DNA, 25 bp, Artificial
  probe
  misc_feature (1)..(25): SEQ ID NO: 3631; WAN024AI2; Start 12; Stop 36
agtcttatcttcagtcatttgacca

SEQ ID NO: 360236 - DNA, 25 bp, Artificial
  probe
  misc_feature (1)..(25): SEQ ID NO: 3631; WAN024AI2; Start 15; Stop 39
cttatcttcagtcatttgaccaaca

SEQ ID NO: 360237 - DNA, 25 bp, Artificial
  probe
  misc_feature (1)..(25): SEQ ID NO: 3631; WAN024AI2; Start 14; Stop 38
tcttatcttcagtcatttgaccaac

SEQ ID NO: 360238 - DNA, 25 bp, Artificial
  probe
  misc_feature (1)..(25): SEQ ID NO: 3631; WAN024AI2; Start 13; Stop 37
gtcttatcttcagtcatttgaccaa

SEQ ID NO: 360239 - DNA, 25 bp, Artificial
  probe
  misc_feature (1)..(25): SEQ ID NO: 3631; WAN024AI2; Start 16; Stop 40
ttatcttcagtcatttgaccaacaa

SEQ ID NO: 360240 - DNA, 25 bp, Artificial
  probe
  misc_feature (1)..(25): SEQ ID NO: 3631; WAN024AI2; Start 11; Stop 35
tagtcttatcttcagtcatttgacc

SEQ ID NO: 360241 - DNA, 25 bp, Artificial
  probe
  misc_feature (1)..(25): SEQ ID NO: 3631; WAN024AI2; Start 17; Stop 41
tatcttcagtcatttgaccaacaaa

SEQ ID NO: 360242 - DNA, 25 bp, Artificial
  probe
  misc_feature (1)..(25): SEQ ID NO: 3631; WAN024AI2; Start 33; Stop 57
accaacaaaattaaaactcaaaagg

SEQ ID NO: 360243 - DNA, 25 bp, Artificial
  probe
  misc_feature (1)..(25): SEQ ID NO: 3631; WAN024AI2; Start 34; Stop 58
ccaacaaaattaaaactcaaaagga

SEQ ID NO: 360244 - DNA, 25 bp, Artificial
  probe
  misc_feature (1)..(25): SEQ ID NO: 3631; WAN024AI2; Start 10; Stop 34
atagtcttatcttcagtcatttgac

SEQ ID NO: 360245 - DNA, 25 bp, Artificial
  probe
  misc_feature (1)..(25): SEQ ID NO: 3631; WAN024AI2; Start 9; Stop 33
aatagtcttatcttcagtcatttga

SEQ ID NO: 360246 - DNA, 25 bp, Artificial
  probe
  misc_feature (1)..(25): SEQ ID NO: 3631; WAN024AI2; Start 31; Stop 55
tgaccaacaaaattaaaactcaaaa

SEQ ID NO: 360247 - DNA, 25 bp, Artificial
  probe
  misc_feature (1)..(25): SEQ ID NO: 3631; WAN024AI2; Start 19; Stop 43
tcttcagtcatttgaccaacaaaat

SEQ ID NO: 360248 - DNA, 25 bp, Artificial
  probe
  misc_feature (1)..(25): SEQ ID NO: 3631; WAN024AI2; Start 18; Stop 42
atcttcagtcatttgaccaacaaaa

SEQ ID NO: 360249 - DNA, 25 bp, Artificial
  probe
  misc_feature (1)..(25): SEQ ID NO: 3631; WAN024AI2; Start 32; Stop 56
gaccaacaaaattaaaactcaaaag

SEQ ID NO: 360250 - DNA, 25 bp, Artificial
  probe
  misc_feature (1)..(25): SEQ ID NO: 3631; WAN024AI2; Start 20; Stop 44
cttcagtcatttgaccaacaaaatt

SEQ ID NO: 360251 - DNA, 25 bp, Artificial
  probe
  misc_feature (1)..(25): SEQ ID NO: 3631; WAN024AI2; Start 35; Stop 59
caacaaaattaaaactcaaaaggag

SEQ ID NO: 360252 - DNA, 25 bp, Artificial
  probe
  misc_feature (1)..(25): SEQ ID NO: 3631; WAN024AI2; Start 22; Stop 46
tcagtcatttgaccaacaaaattaa

SEQ ID NO: 360253 - DNA, 25 bp, Artificial
  probe
  misc_feature (1)..(25): SEQ ID NO: 3631; WAN024AI2; Start 21; Stop 45
ttcagtcatttgaccaacaaaatta

SEQ ID NO: 360254 - DNA, 25 bp, Artificial
  probe
  misc_feature (1)..(25): SEQ ID NO: 3631; WAN024AI2; Start 37; Stop 61
acaaaattaaaactcaaaaggagaa

SEQ ID NO: 360255 - DNA, 25 bp, Artificial
  probe
  misc_feature (1)..(25): SEQ ID NO: 3631; WAN024AI2; Start 36; Stop 60
aacaaaattaaaactcaaaaggaga

SEQ ID NO: 360256 - DNA, 25 bp, Artificial
  probe
  misc_feature (1)..(25): SEQ ID NO: 3631; WAN024AI2; Start 23; Stop 47
cagtcatttgaccaacaaaattaaa

SEQ ID NO: 360257 - DNA, 25 bp, Artificial
  probe
  misc_feature (1)..(25): SEQ ID NO: 3631; WAN024AI2; Start 41; Stop 65
aattaaaactcaaaaggagaaatga

SEQ ID NO: 360258 - DNA, 25 bp, Artificial
  probe
  misc_feature (1)..(25): SEQ ID NO: 3631; WAN024AI2; Start 30; Stop 54
ttgaccaacaaaattaaaactcaaa

SEQ ID NO: 360259 - DNA, 25 bp, Artificial
  probe
  misc_feature (1)..(25): SEQ ID NO: 3631; WAN024AI2; Start 29; Stop 53
tttgaccaacaaaattaaaactcaa

SEQ ID NO: 360260 - DNA, 25 bp, Artificial
  probe
  misc_feature (1)..(25): SEQ ID NO: 3631; WAN024AI2; Start 28; Stop 52
atttgaccaacaaaattaaaactca

SEQ ID NO: 360261 - DNA, 25 bp, Artificial
  probe
  misc_feature (1)..(25): SEQ ID NO: 3631; WAN024AI2; Start 26; Stop 50
tcatttgaccaacaaaattaaaact

SEQ ID NO: 360262 - DNA, 25 bp, Artificial
  probe
  misc_feature (1)..(25): SEQ ID NO: 3631; WAN024AI2; Start 27; Stop 51
catttgaccaacaaaattaaaactc

SEQ ID NO: 360263 - DNA, 25 bp, Artificial
  probe
  misc_feature (1)..(25): SEQ ID NO: 3631; WAN024AI2; Start 25; Stop 49
gtcatttgaccaacaaaattaaaac

SEQ ID NO: 360264 - DNA, 25 bp, Artificial
  probe
  misc_feature (1)..(25): SEQ ID NO: 3631; WAN024AI2; Start 24; Stop 48
agtcatttgaccaacaaaattaaaa

SEQ ID NO: 360265 - DNA, 25 bp, Artificial
  probe
  misc_feature (1)..(25): SEQ ID NO: 3631; WAN024AI2; Start 38; Stop 62
caaaattaaaactcaaaaggagaaa

SEQ ID NO: 360266 - DNA, 25 bp, Artificial
  probe
  misc_feature (1)..(25): SEQ ID NO: 3631; WAN024AI2; Start 40; Stop 64
aaattaaaactcaaaaggagaaatg

SEQ ID NO: 360267 - DNA, 25 bp, Artificial
  probe
  misc_feature (1)..(25): SEQ ID NO: 3632; WAN0249V4; Start 66; Stop 90
gtatccatttacaatcccaccaaac

SEQ ID NO: 360268 - DNA, 25 bp, Artificial
  probe
  misc_feature (1)..(25): SEQ ID NO: 3632; WAN0249V4; Start 65; Stop 89
agtatccatttacaatcccaccaaa

SEQ ID NO: 360269 - DNA, 25 bp, Artificial
  probe
  misc_feature (1)..(25): SEQ ID NO: 3632; WAN0249V4; Start 64; Stop 88
tagtatccatttacaatcccaccaa

SEQ ID NO: 360270 - DNA, 25 bp, Artificial
  probe
  misc_feature (1)..(25): SEQ ID NO: 3632; WAN0249V4; Start 67; Stop 91
tatccatttacaatcccaccaaacc

SEQ ID NO: 360271 - DNA, 25 bp, Artificial
  probe
  misc_feature (1)..(25): SEQ ID NO: 3632; WAN0249V4; Start 63; Stop 87
ctagtatccatttacaatcccacca

SEQ ID NO: 360272 - DNA, 25 bp, Artificial
  probe
  misc_feature (1)..(25): SEQ ID NO: 3632; WAN0249V4; Start 62; Stop 86
tctagtatccatttacaatcccacc

SEQ ID NO: 360273 - DNA, 25 bp, Artificial
  probe
  misc_feature (1)..(25): SEQ ID NO: 3632; WAN0249V4; Start 61; Stop 85
ttctagtatccatttacaatcccac

SEQ ID NO: 360274 - DNA, 25 bp, Artificial
  probe
  misc_feature (1)..(25): SEQ ID NO: 3632; WAN0249V4; Start 60; Stop 84
cttctagtatccatttacaatccca

SEQ ID NO: 360275 - DNA, 25 bp, Artificial
  probe
  misc_feature (1)..(25): SEQ ID NO: 3632; WAN0249V4; Start 69; Stop 93
tccatttacaatcccaccaaaccat

SEQ ID NO: 360276 - DNA, 25 bp, Artificial
  probe
  misc_feature (1)..(25): SEQ ID NO: 3632; WAN0249V4; Start 68; Stop 92
atccatttacaatcccaccaaacca

SEQ ID NO: 360277 - DNA, 25 bp, Artificial
  probe
  misc_feature (1)..(25): SEQ ID NO: 3632; WAN0249V4; Start 59; Stop 83
acttctagtatccatttacaatccc

SEQ ID NO: 360278 - DNA, 25 bp, Artificial
  probe
  misc_feature (1)..(25): SEQ ID NO: 3632; WAN0249V4; Start 27; Stop 51
accattatatcatatttcaagcgtt

SEQ ID NO: 360279 - DNA, 25 bp, Artificial
  probe
  misc_feature (1)..(25): SEQ ID NO: 3632; WAN0249V4; Start 26; Stop 50
aaccattatatcatatttcaagcgt

SEQ ID NO: 360280 - DNA, 25 bp, Artificial
  probe
  misc_feature (1)..(25): SEQ ID NO: 3632; WAN0249V4; Start 70; Stop 94
ccatttacaatcccaccaaaccatg

SEQ ID NO: 360281 - DNA, 25 bp, Artificial
  probe
  misc_feature (1)..(25): SEQ ID NO: 3632; WAN0249V4; Start 28; Stop 52
ccattatatcatatttcaagcgttt

SEQ ID NO: 360282 - DNA, 25 bp, Artificial
  probe
  misc_feature (1)..(25): SEQ ID NO: 3632; WAN0249V4; Start 25; Stop 49
aaaccattatatcatatttcaagcg

SEQ ID NO: 360283 - DNA, 25 bp, Artificial
  probe
  misc_feature (1)..(25): SEQ ID NO: 3632; WAN0249V4; Start 58; Stop 82
aacttctagtatccatttacaatcc

SEQ ID NO: 360284 - DNA, 25 bp, Artificial
  probe
  misc_feature (1)..(25): SEQ ID NO: 3632; WAN0249V4; Start 34; Stop 58
tatcatatttcaagcgttttcaaaa

SEQ ID NO: 360285 - DNA, 25 bp, Artificial
  probe
  misc_feature (1)..(25): SEQ ID NO: 3632; WAN0249V4; Start 33; Stop 57
atatcatatttcaagcgttttcaaa

SEQ ID NO: 360286 - DNA, 25 bp, Artificial
  probe
  misc_feature (1)..(25): SEQ ID NO: 3632; WAN0249V4; Start 32; Stop 56
tatatcatatttcaagcgttttcaa

SEQ ID NO: 360287 - DNA, 25 bp, Artificial
  probe
  misc_feature (1)..(25): SEQ ID NO: 3632; WAN0249V4; Start 31; Stop 55
ttatatcatatttcaagcgttttca

SEQ ID NO: 360288 - DNA, 25 bp, Artificial
  probe
  misc_feature (1)..(25): SEQ ID NO: 3633; WAN024ARY; Start 50; Stop 74
tttctttgcgatgacaaacctcttt

SEQ ID NO: 360289 - DNA, 25 bp, Artificial
  probe
  misc_feature (1)..(25): SEQ ID NO: 3633; WAN024ARY; Start 11; Stop 35
ggaattatacccacaattttgacat

SEQ ID NO: 360290 - DNA, 25 bp, Artificial
  probe
  misc_feature (1)..(25): SEQ ID NO: 3633; WAN024ARY; Start 14; Stop 38
attatacccacaattttgacataca

SEQ ID NO: 360291 - DNA, 25 bp, Artificial
  probe
  misc_feature (1)..(25): SEQ ID NO: 3633; WAN024ARY; Start 15; Stop 39
ttatacccacaattttgacatacaa

SEQ ID NO: 360292 - DNA, 25 bp, Artificial
  probe
  misc_feature (1)..(25): SEQ ID NO: 3633; WAN024ARY; Start 19; Stop 43
acccacaattttgacatacaaatgt

SEQ ID NO: 360293 - DNA, 25 bp, Artificial
  probe
  misc_feature (1)..(25): SEQ ID NO: 3633; WAN024ARY; Start 9; Stop 33
ggggaattatacccacaattttgac

SEQ ID NO: 360294 - DNA, 25 bp, Artificial
  probe
  misc_feature (1)..(25): SEQ ID NO: 3633; WAN024ARY; Start 8; Stop 32
aggggaattatacccacaattttga

SEQ ID NO: 360295 - DNA, 25 bp, Artificial
  probe
  misc_feature (1)..(25): SEQ ID NO: 3633; WAN024ARY; Start 10; Stop 34
gggaattatacccacaattttgaca

SEQ ID NO: 360296 - DNA, 25 bp, Artificial
  probe
  misc_feature (1)..(25): SEQ ID NO: 3633; WAN024ARY; Start 18; Stop 42
tacccacaattttgacatacaaatg

SEQ ID NO: 360297 - DNA, 25 bp, Artificial
  probe
  misc_feature (1)..(25): SEQ ID NO: 3633; WAN024ARY; Start 7; Stop 31
taggggaattatacccacaattttg

SEQ ID NO: 360298 - DNA, 25 bp, Artificial
  probe
  misc_feature (1)..(25): SEQ ID NO: 3633; WAN024ARY; Start 49; Stop 73
ttttctttgcgatgacaaacctctt

SEQ ID NO: 360299 - DNA, 25 bp, Artificial
  probe
  misc_feature (1)..(25): SEQ ID NO: 3633; WAN024ARY; Start 6; Stop 30
ttaggggaattatacccacaatttt

SEQ ID NO: 360300 - DNA, 25 bp, Artificial
  probe
  misc_feature (1)..(25): SEQ ID NO: 3633; WAN024ARY; Start 5; Stop 29
tttaggggaattatacccacaattt

SEQ ID NO: 360301 - DNA, 25 bp, Artificial
  probe
  misc_feature (1)..(25): SEQ ID NO: 3633; WAN024ARY; Start 4; Stop 28
atttaggggaattatacccacaatt

SEQ ID NO: 360302 - DNA, 25 bp, Artificial
  probe
  misc_feature (1)..(25): SEQ ID NO: 3633; WAN024ARY; Start 17; Stop 41
atacccacaattttgacatacaaat

SEQ ID NO: 360303 - DNA, 25 bp, Artificial
  probe
  misc_feature (1)..(25): SEQ ID NO: 3633; WAN024ARY; Start 1; Stop 25
gatatttaggggaattatacccaca

SEQ ID NO: 360304 - DNA, 25 bp, Artificial
  probe
  misc_feature (1)..(25): SEQ ID NO: 3633; WAN024ARY; Start 13; Stop 37
aattatacccacaattttgacatac

SEQ ID NO: 360305 - DNA, 25 bp, Artificial
  probe
  misc_feature (1)..(25): SEQ ID NO: 3633; WAN024ARY; Start 16; Stop 40
tatacccacaattttgacatacaaa

SEQ ID NO: 360306 - DNA, 25 bp, Artificial
  probe
  misc_feature (1)..(25): SEQ ID NO: 3633; WAN024ARY; Start 3; Stop 27
tatttaggggaattatacccacaat

SEQ ID NO: 360307 - DNA, 25 bp, Artificial
  probe
  misc_feature (1)..(25): SEQ ID NO: 3633; WAN024ARY; Start 2; Stop 26
atatttaggggaattatacccacaa

SEQ ID NO: 360308 - DNA, 25 bp, Artificial
  probe
  misc_feature (1)..(25): SEQ ID NO: 3633; WAN024ARY; Start 12; Stop 36
gaattatacccacaattttgacata

SEQ ID NO: 360309 - DNA, 25 bp, Artificial
  probe
  misc_feature (1)..(25): SEQ ID NO: 3635; WAN024AKP; Start 9; Stop 33
agtcagtatttagatttcttttagc

SEQ ID NO: 360310 - DNA, 25 bp, Artificial
  probe
  misc_feature (1)..(25): SEQ ID NO: 3635; WAN024AKP; Start 10; Stop 34
gtcagtatttagatttcttttagct

SEQ ID NO: 360311 - DNA, 25 bp, Artificial
  probe
  misc_feature (1)..(25): SEQ ID NO: 3636; WAN0249JP; Start 8; Stop 32
acctcctcatagattttgtattcgt

SEQ ID NO: 360312 - DNA, 25 bp, Artificial
  probe
  misc_feature (1)..(25): SEQ ID NO: 3636; WAN0249JP; Start 15; Stop 39
catagattttgtattcgtttagccg

SEQ ID NO: 360313 - DNA, 25 bp, Artificial
  probe
  misc_feature (1)..(25): SEQ ID NO: 3636; WAN0249JP; Start 9; Stop 33
cctcctcatagattttgtattcgtt

SEQ ID NO: 360314 - DNA, 25 bp, Artificial
  probe
  misc_feature (1)..(25): SEQ ID NO: 3636; WAN0249JP; Start 7; Stop 31
tacctcctcatagattttgtattcg

SEQ ID NO: 360315 - DNA, 25 bp, Artificial
  probe
  misc_feature (1)..(25): SEQ ID NO: 3636; WAN0249JP; Start 83; Stop 107
tgattctttcacttttgtcaatagc

SEQ ID NO: 360316 - DNA, 25 bp, Artificial
  probe
  misc_feature (1)..(25): SEQ ID NO: 3636; WAN0249JP; Start 14; Stop 38
tcatagattttgtattcgtttagcc

SEQ ID NO: 360317 - DNA, 25 bp, Artificial
  probe
  misc_feature (1)..(25): SEQ ID NO: 3636; WAN0249JP; Start 37; Stop 61
ccggctataaagtgatcagttacta

SEQ ID NO: 360318 - DNA, 25 bp, Artificial
  probe
  misc_feature (1)..(25): SEQ ID NO: 3636; WAN0249JP; Start 10; Stop 34
ctcctcatagattttgtattcgttt

SEQ ID NO: 360319 - DNA, 25 bp, Artificial
  probe
  misc_feature (1)..(25): SEQ ID NO: 3636; WAN0249JP; Start 80; Stop 104
atctgattctttcacttttgtcaat

SEQ ID NO: 360320 - DNA, 25 bp, Artificial
  probe
  misc_feature (1)..(25): SEQ ID NO: 3636; WAN0249JP; Start 38; Stop 62
cggctataaagtgatcagttactaa

SEQ ID NO: 360321 - DNA, 25 bp, Artificial
  probe
  misc_feature (1)..(25): SEQ ID NO: 3636; WAN0249JP; Start 78; Stop 102
ctatctgattctttcacttttgtca

SEQ ID NO: 360322 - DNA, 25 bp, Artificial
  probe
  misc_feature (1)..(25): SEQ ID NO: 3636; WAN0249JP; Start 77; Stop 101
tctatctgattctttcacttttgtc

SEQ ID NO: 360323 - DNA, 25 bp, Artificial
  probe
  misc_feature (1)..(25): SEQ ID NO: 3636; WAN0249JP; Start 3; Stop 27
tgaatacctcctcatagattttgta

SEQ ID NO: 360324 - DNA, 25 bp, Artificial
  probe
  misc_feature (1)..(25): SEQ ID NO: 3636; WAN0249JP; Start 72; Stop 96
actattctatctgattctttcactt

SEQ ID NO: 360325 - DNA, 25 bp, Artificial
  probe
  misc_feature (1)..(25): SEQ ID NO: 3636; WAN0249JP; Start 81; Stop 105
tctgattctttcacttttgtcaata

SEQ ID NO: 360326 - DNA, 25 bp, Artificial
  probe
  misc_feature (1)..(25): SEQ ID NO: 3636; WAN0249JP; Start 79; Stop 103
tatctgattctttcacttttgtcaa

SEQ ID NO: 360327 - DNA, 25 bp, Artificial
  probe
  misc_feature (1)..(25): SEQ ID NO: 3636; WAN0249JP; Start 13; Stop 37
ctcatagattttgtattcgtttagc

SEQ ID NO: 360328 - DNA, 25 bp, Artificial
  probe
  misc_feature (1)..(25): SEQ ID NO: 3636; WAN0249JP; Start 16; Stop 40
atagattttgtattcgtttagccgg

SEQ ID NO: 360329 - DNA, 25 bp, Artificial
  probe
  misc_feature (1)..(25): SEQ ID NO: 3636; WAN0249JP; Start 82; Stop 106
ctgattctttcacttttgtcaatag

SEQ ID NO: 360330 - DNA, 25 bp, Artificial
  probe
  misc_feature (1)..(25): SEQ ID NO: 3636; WAN0249JP; Start 76; Stop 100
ttctatctgattctttcacttttgt

SEQ ID NO: 360331 - DNA, 25 bp, Artificial
  probe
  misc_feature (1)..(25): SEQ ID NO: 3636; WAN0249JP; Start 11; Stop 35
tcctcatagattttgtattcgttta

SEQ ID NO: 360332 - DNA, 25 bp, Artificial
  probe
  misc_feature (1)..(25): SEQ ID NO: 3636; WAN0249JP; Start 12; Stop 36
cctcatagattttgtattcgtttag

SEQ ID NO: 360333 - DNA, 25 bp, Artificial
  probe
  misc_feature (1)..(25): SEQ ID NO: 3636; WAN0249JP; Start 2; Stop 26
atgaatacctcctcatagattttgt

SEQ ID NO: 360334 - DNA, 25 bp, Artificial
  probe
  misc_feature (1)..(25): SEQ ID NO: 3636; WAN0249JP; Start 39; Stop 63
ggctataaagtgatcagttactaaa

SEQ ID NO: 360335 - DNA, 25 bp, Artificial
  probe
  misc_feature (1)..(25): SEQ ID NO: 3636; WAN0249JP; Start 1; Stop 25
gatgaatacctcctcatagattttg

SEQ ID NO: 360336 - DNA, 25 bp, Artificial
  probe
  misc_feature (1)..(25): SEQ ID NO: 3636; WAN0249JP; Start 75; Stop 99
attctatctgattctttcacttttg

SEQ ID NO: 360337 - DNA, 25 bp, Artificial
  probe
  misc_feature (1)..(25): SEQ ID NO: 3636; WAN0249JP; Start 6; Stop 30
atacctcctcatagattttgtattc

SEQ ID NO: 360338 - DNA, 25 bp, Artificial
  probe
  misc_feature (1)..(25): SEQ ID NO: 3636; WAN0249JP; Start 4; Stop 28
gaatacctcctcatagattttgtat

SEQ ID NO: 360339 - DNA, 25 bp, Artificial
  probe
  misc_feature (1)..(25): SEQ ID NO: 3636; WAN0249JP; Start 47; Stop 71
agtgatcagttactaaacatacttt

SEQ ID NO: 360340 - DNA, 25 bp, Artificial
  probe
  misc_feature (1)..(25): SEQ ID NO: 3636; WAN0249JP; Start 45; Stop 69
aaagtgatcagttactaaacatact

SEQ ID NO: 360341 - DNA, 25 bp, Artificial
  probe
  misc_feature (1)..(25): SEQ ID NO: 3636; WAN0249JP; Start 40; Stop 64
gctataaagtgatcagttactaaac

SEQ ID NO: 360342 - DNA, 25 bp, Artificial
  probe
  misc_feature (1)..(25): SEQ ID NO: 3636; WAN0249JP; Start 46; Stop 70
aagtgatcagttactaaacatactt

SEQ ID NO: 360343 - DNA, 25 bp, Artificial
  probe
  misc_feature (1)..(25): SEQ ID NO: 3636; WAN0249JP; Start 5; Stop 29
aatacctcctcatagattttgtatt

SEQ ID NO: 360344 - DNA, 25 bp, Artificial
  probe
  misc_feature (1)..(25): SEQ ID NO: 3637; WAN024FWZ; Start 21; Stop 45
cgtggtctatatcgtggatgattta

SEQ ID NO: 360345 - DNA, 25 bp, Artificial
  probe
  misc_feature (1)..(25): SEQ ID NO: 3637; WAN024FWZ; Start 22; Stop 46
gtggtctatatcgtggatgatttag

SEQ ID NO: 360346 - DNA, 25 bp, Artificial
  probe
  misc_feature (1)..(25): SEQ ID NO: 3637; WAN024FWZ; Start 44; Stop 68
tagataatctgacgagtgacctttc

SEQ ID NO: 360347 - DNA, 25 bp, Artificial
  probe
  misc_feature (1)..(25): SEQ ID NO: 3637; WAN024FWZ; Start 43; Stop 67
ttagataatctgacgagtgaccttt

SEQ ID NO: 360348 - DNA, 25 bp, Artificial
  probe
  misc_feature (1)..(25): SEQ ID NO: 3637; WAN024FWZ; Start 42; Stop 66
tttagataatctgacgagtgacctt

SEQ ID NO: 360349 - DNA, 25 bp, Artificial
  probe
  misc_feature (1)..(25): SEQ ID NO: 3637; WAN024FWZ; Start 41; Stop 65
atttagataatctgacgagtgacct

SEQ ID NO: 360350 - DNA, 25 bp, Artificial
  probe
  misc_feature (1)..(25): SEQ ID NO: 3637; WAN024FWZ; Start 45; Stop 69
agataatctgacgagtgacctttct

SEQ ID NO: 360351 - DNA, 25 bp, Artificial
  probe
  misc_feature (1)..(25): SEQ ID NO: 3637; WAN024FWZ; Start 177; Stop 201
ttgtcctaaagaacacattcaagaa

SEQ ID NO: 360352 - DNA, 25 bp, Artificial
  probe
  misc_feature (1)..(25): SEQ ID NO: 3637; WAN024FWZ; Start 176; Stop 200
tttgtcctaaagaacacattcaaga

SEQ ID NO: 360353 - DNA, 25 bp, Artificial
  probe
  misc_feature (1)..(25): SEQ ID NO: 3637; WAN024FWZ; Start 61; Stop 85
gacctttcttggctagatcagtttg

SEQ ID NO: 360354 - DNA, 25 bp, Artificial
  probe
  misc_feature (1)..(25): SEQ ID NO: 3637; WAN024FWZ; Start 178; Stop 202
tgtcctaaagaacacattcaagaat

SEQ ID NO: 360355 - DNA, 25 bp, Artificial
  probe
  misc_feature (1)..(25): SEQ ID NO: 3637; WAN024FWZ; Start 130; Stop 154
ctctacctcatgctctttgaagatg

SEQ ID NO: 360356 - DNA, 25 bp, Artificial
  probe
  misc_feature (1)..(25): SEQ ID NO: 3637; WAN024FWZ; Start 129; Stop 153
tctctacctcatgctctttgaagat

SEQ ID NO: 360357 - DNA, 25 bp, Artificial
  probe
  misc_feature (1)..(25): SEQ ID NO: 3637; WAN024FWZ; Start 250; Stop 274
ttgtttgagtcctattctcccagtc

SEQ ID NO: 360358 - DNA, 25 bp, Artificial
  probe
  misc_feature (1)..(25): SEQ ID NO: 3637; WAN024FWZ; Start 249; Stop 273
cttgtttgagtcctattctcccagt

SEQ ID NO: 360359 - DNA, 25 bp, Artificial
  probe
  misc_feature (1)..(25): SEQ ID NO: 3637; WAN024FWZ; Start 240; Stop 264
taagaagggcttgtttgagtcctat

SEQ ID NO: 360360 - DNA, 25 bp, Artificial
  probe
  misc_feature (1)..(25): SEQ ID NO: 3637; WAN024FWZ; Start 239; Stop 263
ataagaagggcttgtttgagtccta

SEQ ID NO: 360361 - DNA, 25 bp, Artificial
  probe
  misc_feature (1)..(25): SEQ ID NO: 3637; WAN024FWZ; Start 237; Stop 261
agataagaagggcttgtttgagtcc

SEQ ID NO: 360362 - DNA, 25 bp, Artificial
  probe
  misc_feature (1)..(25): SEQ ID NO: 3637; WAN024FWZ; Start 477; Stop 501
cgtcggcaagaattataagcatctt

SEQ ID NO: 360363 - DNA, 25 bp, Artificial
  probe
  misc_feature (1)..(25): SEQ ID NO: 3637; WAN024FWZ; Start 142; Stop 166
ctctttgaagatggcaatcgtatcg

SEQ ID NO: 360364 - DNA, 25 bp, Artificial
  probe
  misc_feature (1)..(25): SEQ ID NO: 3637; WAN024FWZ; Start 23; Stop 47
tggtctatatcgtggatgatttaga

SEQ ID NO: 360365 - DNA, 25 bp, Artificial
  probe
  misc_feature (1)..(25): SEQ ID NO: 3637; WAN024FWZ; Start 60; Stop 84
tgacctttcttggctagatcagttt

SEQ ID NO: 360366 - DNA, 25 bp, Artificial
  probe
  misc_feature (1)..(25): SEQ ID NO: 3637; WAN024FWZ; Start 476; Stop 500
acgtcggcaagaattataagcatct

SEQ ID NO: 360367 - DNA, 25 bp, Artificial
  probe
  misc_feature (1)..(25): SEQ ID NO: 3637; WAN024FWZ; Start 128; Stop 152
gtctctacctcatgctctttgaaga

SEQ ID NO: 360368 - DNA, 25 bp, Artificial
  probe
  misc_feature (1)..(25): SEQ ID NO: 3637; WAN024FWZ; Start 40; Stop 64
gatttagataatctgacgagtgacc

SEQ ID NO: 360369 - DNA, 25 bp, Artificial
  probe
  misc_feature (1)..(25): SEQ ID NO: 3637; WAN024FWZ; Start 141; Stop 165
gctctttgaagatggcaatcgtatc

SEQ ID NO: 360370 - DNA, 25 bp, Artificial
  probe
  misc_feature (1)..(25): SEQ ID NO: 3637; WAN024FWZ; Start 1; Stop 25
gatgaatttcaagactatgacgtgg

SEQ ID NO: 360371 - DNA, 25 bp, Artificial
  probe
  misc_feature (1)..(25): SEQ ID NO: 3637; WAN024FWZ; Start 241; Stop 265
aagaagggcttgtttgagtcctatt

SEQ ID NO: 360372 - DNA, 25 bp, Artificial
  probe
  misc_feature (1)..(25): SEQ ID NO: 3637; WAN024FWZ; Start 131; Stop 155
tctacctcatgctctttgaagatgg

SEQ ID NO: 360373 - DNA, 25 bp, Artificial
  probe
  misc_feature (1)..(25): SEQ ID NO: 3637; WAN024FWZ; Start 2; Stop 26
atgaatttcaagactatgacgtggt

SEQ ID NO: 360374 - DNA, 25 bp, Artificial
  probe
  misc_feature (1)..(25): SEQ ID NO: 3637; WAN024FWZ; Start 580; Stop 604
tctttattgactacgatgcaacttt

SEQ ID NO: 360375 - DNA, 25 bp, Artificial
  probe
  misc_feature (1)..(25): SEQ ID NO: 3637; WAN024FWZ; Start 39; Stop 63
tgatttagataatctgacgagtgac

SEQ ID NO: 360376 - DNA, 25 bp, Artificial
  probe
  misc_feature (1)..(25): SEQ ID NO: 3637; WAN024FWZ; Start 34; Stop 58
gtggatgatttagataatctgacga

SEQ ID NO: 360377 - DNA, 25 bp, Artificial
  probe
  misc_feature (1)..(25): SEQ ID NO: 3638; WAN024ATP; Start 766; Stop 790
gctgctgctattgataataacactt

SEQ ID NO: 360378 - DNA, 25 bp, Artificial
  probe
  misc_feature (1)..(25): SEQ ID NO: 3638; WAN024ATP; Start 202; Stop 226
ggaattacctatgccaatatgatgt

SEQ ID NO: 360379 - DNA, 25 bp, Artificial
  probe
  misc_feature (1)..(25): SEQ ID NO: 3638; WAN024ATP; Start 204; Stop 228
aattacctatgccaatatgatgtct

SEQ ID NO: 360380 - DNA, 25 bp, Artificial
  probe
  misc_feature (1)..(25): SEQ ID NO: 3638; WAN024ATP; Start 203; Stop 227
gaattacctatgccaatatgatgtc

SEQ ID NO: 360381 - DNA, 25 bp, Artificial
  probe
  misc_feature (1)..(25): SEQ ID NO: 3638; WAN024ATP; Start 856; Stop 880
gatgttaatgatggtttgacgactg

SEQ ID NO: 360382 - DNA, 25 bp, Artificial
  probe
  misc_feature (1)..(25): SEQ ID NO: 3638; WAN024ATP; Start 776; Stop 800
ttgataataacactttcccaggagg

SEQ ID NO: 360383 - DNA, 25 bp, Artificial
  probe
  misc_feature (1)..(25): SEQ ID NO: 3638; WAN024ATP; Start 498; Stop 522
ggtagatggcaaggatgtttatacg

SEQ ID NO: 360384 - DNA, 25 bp, Artificial
  probe
  misc_feature (1)..(25): SEQ ID NO: 3638; WAN024ATP; Start 497; Stop 521
cggtagatggcaaggatgtttatac

SEQ ID NO: 360385 - DNA, 25 bp, Artificial
  probe
  misc_feature (1)..(25): SEQ ID NO: 3638; WAN024ATP; Start 855; Stop 879
ggatgttaatgatggtttgacgact

SEQ ID NO: 360386 - DNA, 25 bp, Artificial
  probe
  misc_feature (1)..(25): SEQ ID NO: 3638; WAN024ATP; Start 716; Stop 740
tctatcaaagtaactatgagccagg

SEQ ID NO: 360387 - DNA, 25 bp, Artificial
  probe
  misc_feature (1)..(25): SEQ ID NO: 3638; WAN024ATP; Start 717; Stop 741
ctatcaaagtaactatgagccaggg

SEQ ID NO: 360388 - DNA, 25 bp, Artificial
  probe
  misc_feature (1)..(25): SEQ ID NO: 3638; WAN024ATP; Start 496; Stop 520
acggtagatggcaaggatgtttata

SEQ ID NO: 360389 - DNA, 25 bp, Artificial
  probe
  misc_feature (1)..(25): SEQ ID NO: 3638; WAN024ATP; Start 857; Stop 881
atgttaatgatggtttgacgactgg

SEQ ID NO: 360390 - DNA, 25 bp, Artificial
  probe
  misc_feature (1)..(25): SEQ ID NO: 3638; WAN024ATP; Start 714; Stop 738
cctctatcaaagtaactatgagcca

SEQ ID NO: 360391 - DNA, 25 bp, Artificial
  probe
  misc_feature (1)..(25): SEQ ID NO: 3638; WAN024ATP; Start 1406; Stop 1430
aatggtggttatctagtcgggttaa

SEQ ID NO: 360392 - DNA, 25 bp, Artificial
  probe
  misc_feature (1)..(25): SEQ ID NO: 3638; WAN024ATP; Start 1405; Stop 1429
aaatggtggttatctagtcgggtta

SEQ ID NO: 360393 - DNA, 25 bp, Artificial
  probe
  misc_feature (1)..(25): SEQ ID NO: 3638; WAN024ATP; Start 718; Stop 742
tatcaaagtaactatgagccagggt

SEQ ID NO: 360394 - DNA, 25 bp, Artificial
  probe
  misc_feature (1)..(25): SEQ ID NO: 3638; WAN024ATP; Start 775; Stop 799
attgataataacactttcccaggag

SEQ ID NO: 360395 - DNA, 25 bp, Artificial
  probe
  misc_feature (1)..(25): SEQ ID NO: 3638; WAN024ATP; Start 852; Stop 876
ttgggatgttaatgatggtttgacg

SEQ ID NO: 360396 - DNA, 25 bp, Artificial
  probe
  misc_feature (1)..(25): SEQ ID NO: 3638; WAN024ATP; Start 769; Stop 793
gctgctattgataataacactttcc

SEQ ID NO: 360397 - DNA, 25 bp, Artificial
  probe
  misc_feature (1)..(25): SEQ ID NO: 3638; WAN024ATP; Start 771; Stop 795
tgctattgataataacactttccca

SEQ ID NO: 360398 - DNA, 25 bp, Artificial
  probe
  misc_feature (1)..(25): SEQ ID NO: 3638; WAN024ATP; Start 715; Stop 739
ctctatcaaagtaactatgagccag

SEQ ID NO: 360399 - DNA, 25 bp, Artificial
  probe
  misc_feature (1)..(25): SEQ ID NO: 3638; WAN024ATP; Start 854; Stop 878
gggatgttaatgatggtttgacgac

SEQ ID NO: 360400 - DNA, 25 bp, Artificial
  probe
  misc_feature (1)..(25): SEQ ID NO: 3638; WAN024ATP; Start 778; Stop 802
gataataacactttcccaggaggag

SEQ ID NO: 360401 - DNA, 25 bp, Artificial
  probe
  misc_feature (1)..(25): SEQ ID NO: 3638; WAN024ATP; Start 772; Stop 796
gctattgataataacactttcccag

SEQ ID NO: 360402 - DNA, 25 bp, Artificial
  probe
  misc_feature (1)..(25): SEQ ID NO: 3638; WAN024ATP; Start 770; Stop 794
ctgctattgataataacactttccc

SEQ ID NO: 360403 - DNA, 25 bp, Artificial
  probe
  misc_feature (1)..(25): SEQ ID NO: 3638; WAN024ATP; Start 768; Stop 792
tgctgctattgataataacactttc

SEQ ID NO: 360404 - DNA, 25 bp, Artificial
  probe
  misc_feature (1)..(25): SEQ ID NO: 3638; WAN024ATP; Start 779; Stop 803
ataataacactttcccaggaggaga

SEQ ID NO: 360405 - DNA, 25 bp, Artificial
  probe
  misc_feature (1)..(25): SEQ ID NO: 3638; WAN024ATP; Start 719; Stop 743
atcaaagtaactatgagccagggtc

SEQ ID NO: 360406 - DNA, 25 bp, Artificial
  probe
  misc_feature (1)..(25): SEQ ID NO: 3638; WAN024ATP; Start 780; Stop 804
taataacactttcccaggaggagaa

SEQ ID NO: 360407 - DNA, 25 bp, Artificial
  probe
  misc_feature (1)..(25): SEQ ID NO: 3638; WAN024ATP; Start 767; Stop 791
ctgctgctattgataataacacttt

SEQ ID NO: 360408 - DNA, 25 bp, Artificial
  probe
  misc_feature (1)..(25): SEQ ID NO: 3638; WAN024ATP; Start 495; Stop 519
aacggtagatggcaaggatgtttat

SEQ ID NO: 360409 - DNA, 25 bp, Artificial
  probe
  misc_feature (1)..(25): SEQ ID NO: 3638; WAN024ATP; Start 853; Stop 877
tgggatgttaatgatggtttgacga

SEQ ID NO: 360410 - DNA, 25 bp, Artificial
  probe
  misc_feature (1)..(25): SEQ ID NO: 3639; WAN024A5O; Start 115; Stop 139
agaagggtgaagtctatactgtgtg

SEQ ID NO: 360411 - DNA, 25 bp, Artificial
  probe
  misc_feature (1)..(25): SEQ ID NO: 3639; WAN024A5O; Start 105; Stop 129
gcgataaagtagaagggtgaagtct

SEQ ID NO: 360412 - DNA, 25 bp, Artificial
  probe
  misc_feature (1)..(25): SEQ ID NO: 3639; WAN024A5O; Start 114; Stop 138
tagaagggtgaagtctatactgtgt

SEQ ID NO: 360413 - DNA, 25 bp, Artificial
  probe
  misc_feature (1)..(25): SEQ ID NO: 3639; WAN024A5O; Start 113; Stop 137
gtagaagggtgaagtctatactgtg

SEQ ID NO: 360414 - DNA, 25 bp, Artificial
  probe
  misc_feature (1)..(25): SEQ ID NO: 3639; WAN024A5O; Start 64; Stop 88
aaatattcctttaaacctgtcccgt

SEQ ID NO: 360415 - DNA, 25 bp, Artificial
  probe
  misc_feature (1)..(25): SEQ ID NO: 3639; WAN024A5O; Start 106; Stop 130
cgataaagtagaagggtgaagtcta

SEQ ID NO: 360416 - DNA, 25 bp, Artificial
  probe
  misc_feature (1)..(25): SEQ ID NO: 3639; WAN024A5O; Start 112; Stop 136
agtagaagggtgaagtctatactgt

SEQ ID NO: 360417 - DNA, 25 bp, Artificial
  probe
  misc_feature (1)..(25): SEQ ID NO: 3639; WAN024A5O; Start 65; Stop 89
aatattcctttaaacctgtcccgtg

SEQ ID NO: 360418 - DNA, 25 bp, Artificial
  probe
  misc_feature (1)..(25): SEQ ID NO: 3639; WAN024A5O; Start 111; Stop 135
aagtagaagggtgaagtctatactg

SEQ ID NO: 360419 - DNA, 25 bp, Artificial
  probe
  misc_feature (1)..(25): SEQ ID NO: 3639; WAN024A5O; Start 63; Stop 87
taaatattcctttaaacctgtcccg

SEQ ID NO: 360420 - DNA, 25 bp, Artificial
  probe
  misc_feature (1)..(25): SEQ ID NO: 3639; WAN024A5O; Start 66; Stop 90
atattcctttaaacctgtcccgtga

SEQ ID NO: 360421 - DNA, 25 bp, Artificial
  probe
  misc_feature (1)..(25): SEQ ID NO: 3639; WAN024A5O; Start 110; Stop 134
aaagtagaagggtgaagtctatact

SEQ ID NO: 360422 - DNA, 25 bp, Artificial
  probe
  misc_feature (1)..(25): SEQ ID NO: 3639; WAN024A5O; Start 116; Stop 140
gaagggtgaagtctatactgtgtgc

SEQ ID NO: 360423 - DNA, 25 bp, Artificial
  probe
  misc_feature (1)..(25): SEQ ID NO: 3639; WAN024A5O; Start 67; Stop 91
tattcctttaaacctgtcccgtgag

SEQ ID NO: 360424 - DNA, 25 bp, Artificial
  probe
  misc_feature (1)..(25): SEQ ID NO: 3639; WAN024A5O; Start 153; Stop 177
ttggctataaatttcaagtctcctt

SEQ ID NO: 360425 - DNA, 25 bp, Artificial
  probe
  misc_feature (1)..(25): SEQ ID NO: 3639; WAN024A5O; Start 35; Stop 59
catgctttgtgctatagtaaatgat

SEQ ID NO: 360426 - DNA, 25 bp, Artificial
  probe
  misc_feature (1)..(25): SEQ ID NO: 3639; WAN024A5O; Start 107; Stop 131
gataaagtagaagggtgaagtctat

SEQ ID NO: 360427 - DNA, 25 bp, Artificial
  probe
  misc_feature (1)..(25): SEQ ID NO: 3639; WAN024A5O; Start 62; Stop 86
ctaaatattcctttaaacctgtccc

SEQ ID NO: 360428 - DNA, 25 bp, Artificial
  probe
  misc_feature (1)..(25): SEQ ID NO: 3639; WAN024A5O; Start 109; Stop 133
taaagtagaagggtgaagtctatac

SEQ ID NO: 360429 - DNA, 25 bp, Artificial
  probe
  misc_feature (1)..(25): SEQ ID NO: 3639; WAN024A5O; Start 141; Stop 165
agtagggctcgcttggctataaatt

SEQ ID NO: 360430 - DNA, 25 bp, Artificial
  probe
  misc_feature (1)..(25): SEQ ID NO: 3639; WAN024A5O; Start 143; Stop 167
tagggctcgcttggctataaatttc

SEQ ID NO: 360431 - DNA, 25 bp, Artificial
  probe
  misc_feature (1)..(25): SEQ ID NO: 3639; WAN024A5O; Start 142; Stop 166
gtagggctcgcttggctataaattt

SEQ ID NO: 360432 - DNA, 25 bp, Artificial
  probe
  misc_feature (1)..(25): SEQ ID NO: 3639; WAN024A5O; Start 61; Stop 85
actaaatattcctttaaacctgtcc

SEQ ID NO: 360433 - DNA, 25 bp, Artificial
  probe
  misc_feature (1)..(25): SEQ ID NO: 3639; WAN024A5O; Start 37; Stop 61
tgctttgtgctatagtaaatgataa

SEQ ID NO: 360434 - DNA, 25 bp, Artificial
  probe
  misc_feature (1)..(25): SEQ ID NO: 3639; WAN024A5O; Start 140; Stop 164
cagtagggctcgcttggctataaat

SEQ ID NO: 360435 - DNA, 25 bp, Artificial
  probe
  misc_feature (1)..(25): SEQ ID NO: 3639; WAN024A5O; Start 38; Stop 62
gctttgtgctatagtaaatgataac

SEQ ID NO: 360436 - DNA, 25 bp, Artificial
  probe
  misc_feature (1)..(25): SEQ ID NO: 3639; WAN024A5O; Start 36; Stop 60
atgctttgtgctatagtaaatgata

SEQ ID NO: 360437 - DNA, 25 bp, Artificial
  probe
  misc_feature (1)..(25): SEQ ID NO: 3639; WAN024A5O; Start 108; Stop 132
ataaagtagaagggtgaagtctata

SEQ ID NO: 360438 - DNA, 25 bp, Artificial
  probe
  misc_feature (1)..(25): SEQ ID NO: 3639; WAN024A5O; Start 151; Stop 175
gcttggctataaatttcaagtctcc

SEQ ID NO: 360439 - DNA, 25 bp, Artificial
  probe
  misc_feature (1)..(25): SEQ ID NO: 3639; WAN024A5O; Start 150; Stop 174
cgcttggctataaatttcaagtctc

SEQ ID NO: 360440 - DNA, 25 bp, Artificial
  probe
  misc_feature (1)..(25): SEQ ID NO: 3639; WAN024A5O; Start 148; Stop 172
ctcgcttggctataaatttcaagtc

SEQ ID NO: 360441 - DNA, 25 bp, Artificial
  probe
  misc_feature (1)..(25): SEQ ID NO: 3639; WAN024A5O; Start 117; Stop 141
aagggtgaagtctatactgtgtgca

SEQ ID NO: 360442 - DNA, 25 bp, Artificial
  probe
  misc_feature (1)..(25): SEQ ID NO: 3639; WAN024A5O; Start 149; Stop 173
tcgcttggctataaatttcaagtct

SEQ ID NO: 360443 - DNA, 25 bp, Artificial
  probe
  misc_feature (1)..(25): SEQ ID NO: 3640; WAN024A3F; Start 1; Stop 25
gatgctacctcacttccttatttct

SEQ ID NO: 360444 - DNA, 25 bp, Artificial
  probe
  misc_feature (1)..(25): SEQ ID NO: 3640; WAN024A3F; Start 3; Stop 27
tgctacctcacttccttatttctat

SEQ ID NO: 360445 - DNA, 25 bp, Artificial
  probe
  misc_feature (1)..(25): SEQ ID NO: 3640; WAN024A3F; Start 2; Stop 26
atgctacctcacttccttatttcta

SEQ ID NO: 360446 - DNA, 25 bp, Artificial
  probe
  misc_feature (1)..(25): SEQ ID NO: 3641; WAN024FGN; Start 893; Stop 917
ggattgacctaccagatgaatctac

SEQ ID NO: 360447 - DNA, 25 bp, Artificial
  probe
  misc_feature (1)..(25): SEQ ID NO: 3641; WAN024FGN; Start 894; Stop 918
gattgacctaccagatgaatctact

SEQ ID NO: 360448 - DNA, 25 bp, Artificial
  probe
  misc_feature (1)..(25): SEQ ID NO: 3641; WAN024FGN; Start 1069; Stop 1093
tatggcaataatgataagggaggac

SEQ ID NO: 360449 - DNA, 25 bp, Artificial
  probe
  misc_feature (1)..(25): SEQ ID NO: 3641; WAN024FGN; Start 1070; Stop 1094
atggcaataatgataagggaggact

SEQ ID NO: 360450 - DNA, 25 bp, Artificial
  probe
  misc_feature (1)..(25): SEQ ID NO: 3641; WAN024FGN; Start 1068; Stop 1092
ttatggcaataatgataagggagga

SEQ ID NO: 360451 - DNA, 25 bp, Artificial
  probe
  misc_feature (1)..(25): SEQ ID NO: 3641; WAN024FGN; Start 1074; Stop 1098
caataatgataagggaggactgggt

SEQ ID NO: 360452 - DNA, 25 bp, Artificial
  probe
  misc_feature (1)..(25): SEQ ID NO: 3641; WAN024FGN; Start 1000; Stop 1024
ttggctcagtatgtagcaactattg

SEQ ID NO: 360453 - DNA, 25 bp, Artificial
  probe
  misc_feature (1)..(25): SEQ ID NO: 3641; WAN024FGN; Start 283; Stop 307
aagtacggtaatatggaaagtgtcg

SEQ ID NO: 360454 - DNA, 25 bp, Artificial
  probe
  misc_feature (1)..(25): SEQ ID NO: 3641; WAN024FGN; Start 1067; Stop 1091
tttatggcaataatgataagggagg

SEQ ID NO: 360455 - DNA, 25 bp, Artificial
  probe
  misc_feature (1)..(25): SEQ ID NO: 3641; WAN024FGN; Start 1071; Stop 1095
tggcaataatgataagggaggactg

SEQ ID NO: 360456 - DNA, 25 bp, Artificial
  probe
  misc_feature (1)..(25): SEQ ID NO: 3641; WAN024FGN; Start 286; Stop 310
tacggtaatatggaaagtgtcgaaa

SEQ ID NO: 360457 - DNA, 25 bp, Artificial
  probe
  misc_feature (1)..(25): SEQ ID NO: 3641; WAN024FGN; Start 285; Stop 309
gtacggtaatatggaaagtgtcgaa

SEQ ID NO: 360458 - DNA, 25 bp, Artificial
  probe
  misc_feature (1)..(25): SEQ ID NO: 3641; WAN024FGN; Start 1073; Stop 1097
gcaataatgataagggaggactggg

SEQ ID NO: 360459 - DNA, 25 bp, Artificial
  probe
  misc_feature (1)..(25): SEQ ID NO: 3641; WAN024FGN; Start 1072; Stop 1096
ggcaataatgataagggaggactgg

SEQ ID NO: 360460 - DNA, 25 bp, Artificial
  probe
  misc_feature (1)..(25): SEQ ID NO: 3641; WAN024FGN; Start 284; Stop 308
agtacggtaatatggaaagtgtcga

SEQ ID NO: 360461 - DNA, 25 bp, Artificial
  probe
  misc_feature (1)..(25): SEQ ID NO: 3641; WAN024FGN; Start 892; Stop 916
gggattgacctaccagatgaatcta

SEQ ID NO: 360462 - DNA, 25 bp, Artificial
  probe
  misc_feature (1)..(25): SEQ ID NO: 3641; WAN024FGN; Start 1066; Stop 1090
atttatggcaataatgataagggag

SEQ ID NO: 360463 - DNA, 25 bp, Artificial
  probe
  misc_feature (1)..(25): SEQ ID NO: 3641; WAN024FGN; Start 338; Stop 362
atattaaactgaccattgatttggc

SEQ ID NO: 360464 - DNA, 25 bp, Artificial
  probe
  misc_feature (1)..(25): SEQ ID NO: 3641; WAN024FGN; Start 194; Stop 218
taaatgaccgtgttgggacctctta

SEQ ID NO: 360465 - DNA, 25 bp, Artificial
  probe
  misc_feature (1)..(25): SEQ ID NO: 3641; WAN024FGN; Start 1365; Stop 1389
ggtctttcctcataataccaatcta

SEQ ID NO: 360466 - DNA, 25 bp, Artificial
  probe
  misc_feature (1)..(25): SEQ ID NO: 3641; WAN024FGN; Start 1368; Stop 1392
ctttcctcataataccaatctaaca

SEQ ID NO: 360467 - DNA, 25 bp, Artificial
  probe
  misc_feature (1)..(25): SEQ ID NO: 3641; WAN024FGN; Start 891; Stop 915
tgggattgacctaccagatgaatct

SEQ ID NO: 360468 - DNA, 25 bp, Artificial
  probe
  misc_feature (1)..(25): SEQ ID NO: 3641; WAN024FGN; Start 1367; Stop 1391
tctttcctcataataccaatctaac

SEQ ID NO: 360469 - DNA, 25 bp, Artificial
  probe
  misc_feature (1)..(25): SEQ ID NO: 3641; WAN024FGN; Start 1366; Stop 1390
gtctttcctcataataccaatctaa

SEQ ID NO: 360470 - DNA, 25 bp, Artificial
  probe
  misc_feature (1)..(25): SEQ ID NO: 3641; WAN024FGN; Start 221; Stop 245
tagaaaagcaatacgaggaaacctt

SEQ ID NO: 360471 - DNA, 25 bp, Artificial
  probe
  misc_feature (1)..(25): SEQ ID NO: 3641; WAN024FGN; Start 1370; Stop 1394
ttcctcataataccaatctaacaaa

SEQ ID NO: 360472 - DNA, 25 bp, Artificial
  probe
  misc_feature (1)..(25): SEQ ID NO: 3641; WAN024FGN; Start 1369; Stop 1393
tttcctcataataccaatctaacaa

SEQ ID NO: 360473 - DNA, 25 bp, Artificial
  probe
  misc_feature (1)..(25): SEQ ID NO: 3641; WAN024FGN; Start 220; Stop 244
ctagaaaagcaatacgaggaaacct

SEQ ID NO: 360474 - DNA, 25 bp, Artificial
  probe
  misc_feature (1)..(25): SEQ ID NO: 3641; WAN024FGN; Start 288; Stop 312
cggtaatatggaaagtgtcgaaaat

SEQ ID NO: 360475 - DNA, 25 bp, Artificial
  probe
  misc_feature (1)..(25): SEQ ID NO: 3641; WAN024FGN; Start 287; Stop 311
acggtaatatggaaagtgtcgaaaa

SEQ ID NO: 360476 - DNA, 25 bp, Artificial
  probe
  misc_feature (1)..(25): SEQ ID NO: 3641; WAN024FGN; Start 339; Stop 363
tattaaactgaccattgatttggcc

SEQ ID NO: 360477 - DNA, 25 bp, Artificial
  probe
  misc_feature (1)..(25): SEQ ID NO: 3641; WAN024FGN; Start 1372; Stop 1396
cctcataataccaatctaacaaatg

SEQ ID NO: 360478 - DNA, 25 bp, Artificial
  probe
  misc_feature (1)..(25): SEQ ID NO: 3641; WAN024FGN; Start 1371; Stop 1395
tcctcataataccaatctaacaaat

SEQ ID NO: 360479 - DNA, 25 bp, Artificial
  probe
  misc_feature (1)..(25): SEQ ID NO: 3642; WAN0249JA; Start 27; Stop 51
gttataatggataagatggaggcgt

SEQ ID NO: 360480 - DNA, 25 bp, Artificial
  probe
  misc_feature (1)..(25): SEQ ID NO: 3642; WAN0249JA; Start 26; Stop 50
tgttataatggataagatggaggcg

SEQ ID NO: 360481 - DNA, 25 bp, Artificial
  probe
  misc_feature (1)..(25): SEQ ID NO: 3642; WAN0249JA; Start 28; Stop 52
ttataatggataagatggaggcgtt

SEQ ID NO: 360482 - DNA, 25 bp, Artificial
  probe
  misc_feature (1)..(25): SEQ ID NO: 3642; WAN0249JA; Start 25; Stop 49
ttgttataatggataagatggaggc

SEQ ID NO: 360483 - DNA, 25 bp, Artificial
  probe
  misc_feature (1)..(25): SEQ ID NO: 3642; WAN0249JA; Start 14; Stop 38
gcctagctttcttgttataatggat

SEQ ID NO: 360484 - DNA, 25 bp, Artificial
  probe
  misc_feature (1)..(25): SEQ ID NO: 3642; WAN0249JA; Start 24; Stop 48
cttgttataatggataagatggagg

SEQ ID NO: 360485 - DNA, 25 bp, Artificial
  probe
  misc_feature (1)..(25): SEQ ID NO: 3642; WAN0249JA; Start 13; Stop 37
agcctagctttcttgttataatgga

SEQ ID NO: 360486 - DNA, 25 bp, Artificial
  probe
  misc_feature (1)..(25): SEQ ID NO: 3642; WAN0249JA; Start 15; Stop 39
cctagctttcttgttataatggata

SEQ ID NO: 360487 - DNA, 25 bp, Artificial
  probe
  misc_feature (1)..(25): SEQ ID NO: 3642; WAN0249JA; Start 23; Stop 47
tcttgttataatggataagatggag

SEQ ID NO: 360488 - DNA, 25 bp, Artificial
  probe
  misc_feature (1)..(25): SEQ ID NO: 3642; WAN0249JA; Start 22; Stop 46
ttcttgttataatggataagatgga

SEQ ID NO: 360489 - DNA, 25 bp, Artificial
  probe
  misc_feature (1)..(25): SEQ ID NO: 3642; WAN0249JA; Start 12; Stop 36
aagcctagctttcttgttataatgg

SEQ ID NO: 360490 - DNA, 25 bp, Artificial
  probe
  misc_feature (1)..(25): SEQ ID NO: 3642; WAN0249JA; Start 18; Stop 42
agctttcttgttataatggataaga

SEQ ID NO: 360491 - DNA, 25 bp, Artificial
  probe
  misc_feature (1)..(25): SEQ ID NO: 3642; WAN0249JA; Start 19; Stop 43
gctttcttgttataatggataagat

SEQ ID NO: 360492 - DNA, 25 bp, Artificial
  probe
  misc_feature (1)..(25): SEQ ID NO: 3643; WAN0249U9; Start 136; Stop 160
tttgactttcctgatagagatgttc

SEQ ID NO: 360493 - DNA, 25 bp, Artificial
  probe
  misc_feature (1)..(25): SEQ ID NO: 3643; WAN0249U9; Start 138; Stop 162
tgactttcctgatagagatgttcac

SEQ ID NO: 360494 - DNA, 25 bp, Artificial
  probe
  misc_feature (1)..(25): SEQ ID NO: 3643; WAN0249U9; Start 139; Stop 163
gactttcctgatagagatgttcaca

SEQ ID NO: 360495 - DNA, 25 bp, Artificial
  probe
  misc_feature (1)..(25): SEQ ID NO: 3643; WAN0249U9; Start 137; Stop 161
ttgactttcctgatagagatgttca

SEQ ID NO: 360496 - DNA, 25 bp, Artificial
  probe
  misc_feature (1)..(25): SEQ ID NO: 3643; WAN0249U9; Start 354; Stop 378
agtattagtaagcagactcaaacct

SEQ ID NO: 360497 - DNA, 25 bp, Artificial
  probe
  misc_feature (1)..(25): SEQ ID NO: 3643; WAN0249U9; Start 360; Stop 384
agtaagcagactcaaaccttagaaa

SEQ ID NO: 360498 - DNA, 25 bp, Artificial
  probe
  misc_feature (1)..(25): SEQ ID NO: 3643; WAN0249U9; Start 355; Stop 379
gtattagtaagcagactcaaacctt

SEQ ID NO: 360499 - DNA, 25 bp, Artificial
  probe
  misc_feature (1)..(25): SEQ ID NO: 3643; WAN0249U9; Start 135; Stop 159
atttgactttcctgatagagatgtt

SEQ ID NO: 360500 - DNA, 25 bp, Artificial
  probe
  misc_feature (1)..(25): SEQ ID NO: 3643; WAN0249U9; Start 140; Stop 164
actttcctgatagagatgttcacat

SEQ ID NO: 360501 - DNA, 25 bp, Artificial
  probe
  misc_feature (1)..(25): SEQ ID NO: 3643; WAN0249U9; Start 359; Stop 383
tagtaagcagactcaaaccttagaa

SEQ ID NO: 360502 - DNA, 25 bp, Artificial
  probe
  misc_feature (1)..(25): SEQ ID NO: 3643; WAN0249U9; Start 358; Stop 382
ttagtaagcagactcaaaccttaga

SEQ ID NO: 360503 - DNA, 25 bp, Artificial
  probe
  misc_feature (1)..(25): SEQ ID NO: 3643; WAN0249U9; Start 134; Stop 158
aatttgactttcctgatagagatgt

SEQ ID NO: 360504 - DNA, 25 bp, Artificial
  probe
  misc_feature (1)..(25): SEQ ID NO: 3643; WAN0249U9; Start 199; Stop 223
ctttataagatttgcccatcagaca

SEQ ID NO: 360505 - DNA, 25 bp, Artificial
  probe
  misc_feature (1)..(25): SEQ ID NO: 3643; WAN0249U9; Start 353; Stop 377
tagtattagtaagcagactcaaacc

SEQ ID NO: 360506 - DNA, 25 bp, Artificial
  probe
  misc_feature (1)..(25): SEQ ID NO: 3643; WAN0249U9; Start 357; Stop 381
attagtaagcagactcaaaccttag

SEQ ID NO: 360507 - DNA, 25 bp, Artificial
  probe
  misc_feature (1)..(25): SEQ ID NO: 3643; WAN0249U9; Start 200; Stop 224
tttataagatttgcccatcagacaa

SEQ ID NO: 360508 - DNA, 25 bp, Artificial
  probe
  misc_feature (1)..(25): SEQ ID NO: 3643; WAN0249U9; Start 356; Stop 380
tattagtaagcagactcaaacctta

SEQ ID NO: 360509 - DNA, 25 bp, Artificial
  probe
  misc_feature (1)..(25): SEQ ID NO: 3643; WAN0249U9; Start 363; Stop 387
aagcagactcaaaccttagaaaatc

SEQ ID NO: 360510 - DNA, 25 bp, Artificial
  probe
  misc_feature (1)..(25): SEQ ID NO: 3643; WAN0249U9; Start 364; Stop 388
agcagactcaaaccttagaaaatct

SEQ ID NO: 360511 - DNA, 25 bp, Artificial
  probe
  misc_feature (1)..(25): SEQ ID NO: 3643; WAN0249U9; Start 365; Stop 389
gcagactcaaaccttagaaaatctt

SEQ ID NO: 360512 - DNA, 25 bp, Artificial
  probe
  misc_feature (1)..(25): SEQ ID NO: 3643; WAN0249U9; Start 352; Stop 376
ctagtattagtaagcagactcaaac

SEQ ID NO: 360513 - DNA, 25 bp, Artificial
  probe
  misc_feature (1)..(25): SEQ ID NO: 3643; WAN0249U9; Start 133; Stop 157
taatttgactttcctgatagagatg

SEQ ID NO: 360514 - DNA, 25 bp, Artificial
  probe
  misc_feature (1)..(25): SEQ ID NO: 3643; WAN0249U9; Start 212; Stop 236
gcccatcagacaaaatagaacgatt

SEQ ID NO: 360515 - DNA, 25 bp, Artificial
  probe
  misc_feature (1)..(25): SEQ ID NO: 3643; WAN0249U9; Start 351; Stop 375
tctagtattagtaagcagactcaaa

SEQ ID NO: 360516 - DNA, 25 bp, Artificial
  probe
  misc_feature (1)..(25): SEQ ID NO: 3643; WAN0249U9; Start 213; Stop 237
cccatcagacaaaatagaacgattt

SEQ ID NO: 360517 - DNA, 25 bp, Artificial
  probe
  misc_feature (1)..(25): SEQ ID NO: 3643; WAN0249U9; Start 201; Stop 225
ttataagatttgcccatcagacaaa

SEQ ID NO: 360518 - DNA, 25 bp, Artificial
  probe
  misc_feature (1)..(25): SEQ ID NO: 3643; WAN0249U9; Start 11; Stop 35
ctccgttgtgttatttaagtttatt

SEQ ID NO: 360519 - DNA, 25 bp, Artificial
  probe
  misc_feature (1)..(25): SEQ ID NO: 3643; WAN0249U9; Start 361; Stop 385
gtaagcagactcaaaccttagaaaa

SEQ ID NO: 360520 - DNA, 25 bp, Artificial
  probe
  misc_feature (1)..(25): SEQ ID NO: 3643; WAN0249U9; Start 350; Stop 374
gtctagtattagtaagcagactcaa

SEQ ID NO: 360521 - DNA, 25 bp, Artificial
  probe
  misc_feature (1)..(25): SEQ ID NO: 3643; WAN0249U9; Start 211; Stop 235
tgcccatcagacaaaatagaacgat

SEQ ID NO: 360522 - DNA, 25 bp, Artificial
  probe
  misc_feature (1)..(25): SEQ ID NO: 3643; WAN0249U9; Start 362; Stop 386
taagcagactcaaaccttagaaaat

SEQ ID NO: 360523 - DNA, 25 bp, Artificial
  probe
  misc_feature (1)..(25): SEQ ID NO: 3643; WAN0249U9; Start 12; Stop 36
tccgttgtgttatttaagtttattt

SEQ ID NO: 360524 - DNA, 25 bp, Artificial
  probe
  misc_feature (1)..(25): SEQ ID NO: 3643; WAN0249U9; Start 132; Stop 156
ttaatttgactttcctgatagagat

SEQ ID NO: 360525 - DNA, 25 bp, Artificial
  probe
  misc_feature (1)..(25): SEQ ID NO: 3644; WAN024EYR; Start 239; Stop 263
tgaatgattatattacaggagcgga

SEQ ID NO: 360526 - DNA, 25 bp, Artificial
  probe
  misc_feature (1)..(25): SEQ ID NO: 3644; WAN024EYR; Start 243; Stop 267
tgattatattacaggagcggattct

SEQ ID NO: 360527 - DNA, 25 bp, Artificial
  probe
  misc_feature (1)..(25): SEQ ID NO: 3644; WAN024EYR; Start 238; Stop 262
ttgaatgattatattacaggagcgg

SEQ ID NO: 360528 - DNA, 25 bp, Artificial
  probe
  misc_feature (1)..(25): SEQ ID NO: 3644; WAN024EYR; Start 242; Stop 266
atgattatattacaggagcggattc

SEQ ID NO: 360529 - DNA, 25 bp, Artificial
  probe
  misc_feature (1)..(25): SEQ ID NO: 3644; WAN024EYR; Start 240; Stop 264
gaatgattatattacaggagcggat

SEQ ID NO: 360530 - DNA, 25 bp, Artificial
  probe
  misc_feature (1)..(25): SEQ ID NO: 3644; WAN024EYR; Start 246; Stop 270
ttatattacaggagcggattctgac

SEQ ID NO: 360531 - DNA, 25 bp, Artificial
  probe
  misc_feature (1)..(25): SEQ ID NO: 3644; WAN024EYR; Start 247; Stop 271
tatattacaggagcggattctgact

SEQ ID NO: 360532 - DNA, 25 bp, Artificial
  probe
  misc_feature (1)..(25): SEQ ID NO: 3644; WAN024EYR; Start 241; Stop 265
aatgattatattacaggagcggatt

SEQ ID NO: 360533 - DNA, 25 bp, Artificial
  probe
  misc_feature (1)..(25): SEQ ID NO: 3644; WAN024EYR; Start 245; Stop 269
attatattacaggagcggattctga

SEQ ID NO: 360534 - DNA, 25 bp, Artificial
  probe
  misc_feature (1)..(25): SEQ ID NO: 3644; WAN024EYR; Start 244; Stop 268
gattatattacaggagcggattctg

SEQ ID NO: 360535 - DNA, 25 bp, Artificial
  probe
  misc_feature (1)..(25): SEQ ID NO: 3644; WAN024EYR; Start 248; Stop 272
atattacaggagcggattctgactt

SEQ ID NO: 360536 - DNA, 25 bp, Artificial
  probe
  misc_feature (1)..(25): SEQ ID NO: 3644; WAN024EYR; Start 71; Stop 95
gcgacggtctgacttatacttacaa

SEQ ID NO: 360537 - DNA, 25 bp, Artificial
  probe
  misc_feature (1)..(25): SEQ ID NO: 3644; WAN024EYR; Start 69; Stop 93
gagcgacggtctgacttatacttac

SEQ ID NO: 360538 - DNA, 25 bp, Artificial
  probe
  misc_feature (1)..(25): SEQ ID NO: 3644; WAN024EYR; Start 72; Stop 96
cgacggtctgacttatacttacaaa

SEQ ID NO: 360539 - DNA, 25 bp, Artificial
  probe
  misc_feature (1)..(25): SEQ ID NO: 3644; WAN024EYR; Start 70; Stop 94
agcgacggtctgacttatacttaca

SEQ ID NO: 360540 - DNA, 25 bp, Artificial
  probe
  misc_feature (1)..(25): SEQ ID NO: 3644; WAN024EYR; Start 73; Stop 97
gacggtctgacttatacttacaaat

SEQ ID NO: 360541 - DNA, 25 bp, Artificial
  probe
  misc_feature (1)..(25): SEQ ID NO: 3644; WAN024EYR; Start 15; Stop 39
aaatgacaatcacggaaacctagtt

SEQ ID NO: 360542 - DNA, 25 bp, Artificial
  probe
  misc_feature (1)..(25): SEQ ID NO: 3644; WAN024EYR; Start 193; Stop 217
aataaatcacaggctattgacttga

SEQ ID NO: 360543 - DNA, 25 bp, Artificial
  probe
  misc_feature (1)..(25): SEQ ID NO: 3644; WAN024EYR; Start 74; Stop 98
acggtctgacttatacttacaaatt

SEQ ID NO: 360544 - DNA, 25 bp, Artificial
  probe
  misc_feature (1)..(25): SEQ ID NO: 3644; WAN024EYR; Start 198; Stop 222
atcacaggctattgacttgattcaa

SEQ ID NO: 360545 - DNA, 25 bp, Artificial
  probe
  misc_feature (1)..(25): SEQ ID NO: 3644; WAN024EYR; Start 16; Stop 40
aatgacaatcacggaaacctagttc

SEQ ID NO: 360546 - DNA, 25 bp, Artificial
  probe
  misc_feature (1)..(25): SEQ ID NO: 3644; WAN024EYR; Start 183; Stop 207
cgtagtggataataaatcacaggct

SEQ ID NO: 360547 - DNA, 25 bp, Artificial
  probe
  misc_feature (1)..(25): SEQ ID NO: 3644; WAN024EYR; Start 75; Stop 99
cggtctgacttatacttacaaattg

SEQ ID NO: 360548 - DNA, 25 bp, Artificial
  probe
  misc_feature (1)..(25): SEQ ID NO: 3644; WAN024EYR; Start 249; Stop 273
tattacaggagcggattctgacttt

SEQ ID NO: 360549 - DNA, 25 bp, Artificial
  probe
  misc_feature (1)..(25): SEQ ID NO: 3644; WAN024EYR; Start 68; Stop 92
cgagcgacggtctgacttatactta

SEQ ID NO: 360550 - DNA, 25 bp, Artificial
  probe
  misc_feature (1)..(25): SEQ ID NO: 3644; WAN024EYR; Start 188; Stop 212
tggataataaatcacaggctattga

SEQ ID NO: 360551 - DNA, 25 bp, Artificial
  probe
  misc_feature (1)..(25): SEQ ID NO: 3644; WAN024EYR; Start 237; Stop 261
tttgaatgattatattacaggagcg

SEQ ID NO: 360552 - DNA, 25 bp, Artificial
  probe
  misc_feature (1)..(25): SEQ ID NO: 3644; WAN024EYR; Start 189; Stop 213
ggataataaatcacaggctattgac

SEQ ID NO: 360553 - DNA, 25 bp, Artificial
  probe
  misc_feature (1)..(25): SEQ ID NO: 3644; WAN024EYR; Start 168; Stop 192
gacaggtatcaagtacgtagtggat

SEQ ID NO: 360554 - DNA, 25 bp, Artificial
  probe
  misc_feature (1)..(25): SEQ ID NO: 3644; WAN024EYR; Start 187; Stop 211
gtggataataaatcacaggctattg

SEQ ID NO: 360555 - DNA, 25 bp, Artificial
  probe
  misc_feature (1)..(25): SEQ ID NO: 3644; WAN024EYR; Start 184; Stop 208
gtagtggataataaatcacaggcta

SEQ ID NO: 360556 - DNA, 25 bp, Artificial
  probe
  misc_feature (1)..(25): SEQ ID NO: 3644; WAN024EYR; Start 169; Stop 193
acaggtatcaagtacgtagtggata

SEQ ID NO: 360557 - DNA, 25 bp, Artificial
  probe
  misc_feature (1)..(25): SEQ ID NO: 3644; WAN024EYR; Start 186; Stop 210
agtggataataaatcacaggctatt

SEQ ID NO: 360558 - DNA, 25 bp, Artificial
  probe
  misc_feature (1)..(25): SEQ ID NO: 3645; WAN024C3V; Start 318; Stop 342
gttagtggtagacagatgattatcg

SEQ ID NO: 360559 - DNA, 25 bp, Artificial
  probe
  misc_feature (1)..(25): SEQ ID NO: 3645; WAN024C3V; Start 327; Stop 351
agacagatgattatcgaaggaagtg

SEQ ID NO: 360560 - DNA, 25 bp, Artificial
  probe
  misc_feature (1)..(25): SEQ ID NO: 3645; WAN024C3V; Start 324; Stop 348
ggtagacagatgattatcgaaggaa

SEQ ID NO: 360561 - DNA, 25 bp, Artificial
  probe
  misc_feature (1)..(25): SEQ ID NO: 3645; WAN024C3V; Start 321; Stop 345
agtggtagacagatgattatcgaag

SEQ ID NO: 360562 - DNA, 25 bp, Artificial
  probe
  misc_feature (1)..(25): SEQ ID NO: 3645; WAN024C3V; Start 323; Stop 347
tggtagacagatgattatcgaagga

SEQ ID NO: 360563 - DNA, 25 bp, Artificial
  probe
  misc_feature (1)..(25): SEQ ID NO: 3645; WAN024C3V; Start 322; Stop 346
gtggtagacagatgattatcgaagg

SEQ ID NO: 360564 - DNA, 25 bp, Artificial
  probe
  misc_feature (1)..(25): SEQ ID NO: 3645; WAN024C3V; Start 330; Stop 354
cagatgattatcgaaggaagtggtc

SEQ ID NO: 360565 - DNA, 25 bp, Artificial
  probe
  misc_feature (1)..(25): SEQ ID NO: 3645; WAN024C3V; Start 328; Stop 352
gacagatgattatcgaaggaagtgg

SEQ ID NO: 360566 - DNA, 25 bp, Artificial
  probe
  misc_feature (1)..(25): SEQ ID NO: 3645; WAN024C3V; Start 326; Stop 350
tagacagatgattatcgaaggaagt

SEQ ID NO: 360567 - DNA, 25 bp, Artificial
  probe
  misc_feature (1)..(25): SEQ ID NO: 3645; WAN024C3V; Start 325; Stop 349
gtagacagatgattatcgaaggaag

SEQ ID NO: 360568 - DNA, 25 bp, Artificial
  probe
  misc_feature (1)..(25): SEQ ID NO: 3645; WAN024C3V; Start 320; Stop 344
tagtggtagacagatgattatcgaa

SEQ ID NO: 360569 - DNA, 25 bp, Artificial
  probe
  misc_feature (1)..(25): SEQ ID NO: 3645; WAN024C3V; Start 319; Stop 343
ttagtggtagacagatgattatcga

SEQ ID NO: 360570 - DNA, 25 bp, Artificial
  probe
  misc_feature (1)..(25): SEQ ID NO: 3645; WAN024C3V; Start 329; Stop 353
acagatgattatcgaaggaagtggt

SEQ ID NO: 360571 - DNA, 25 bp, Artificial
  probe
  misc_feature (1)..(25): SEQ ID NO: 3645; WAN024C3V; Start 317; Stop 341
tgttagtggtagacagatgattatc

SEQ ID NO: 360572 - DNA, 25 bp, Artificial
  probe
  misc_feature (1)..(25): SEQ ID NO: 3645; WAN024C3V; Start 137; Stop 161
ttgaaatggctaagtccttggatag

SEQ ID NO: 360573 - DNA, 25 bp, Artificial
  probe
  misc_feature (1)..(25): SEQ ID NO: 3645; WAN024C3V; Start 284; Stop 308
gaacgtagtattctgactgctatca

SEQ ID NO: 360574 - DNA, 25 bp, Artificial
  probe
  misc_feature (1)..(25): SEQ ID NO: 3645; WAN024C3V; Start 136; Stop 160
gttgaaatggctaagtccttggata

SEQ ID NO: 360575 - DNA, 25 bp, Artificial
  probe
  misc_feature (1)..(25): SEQ ID NO: 3645; WAN024C3V; Start 283; Stop 307
cgaacgtagtattctgactgctatc

SEQ ID NO: 360576 - DNA, 25 bp, Artificial
  probe
  misc_feature (1)..(25): SEQ ID NO: 3645; WAN024C3V; Start 282; Stop 306
acgaacgtagtattctgactgctat

SEQ ID NO: 360577 - DNA, 25 bp, Artificial
  probe
  misc_feature (1)..(25): SEQ ID NO: 3645; WAN024C3V; Start 281; Stop 305
aacgaacgtagtattctgactgcta

SEQ ID NO: 360578 - DNA, 25 bp, Artificial
  probe
  misc_feature (1)..(25): SEQ ID NO: 3645; WAN024C3V; Start 135; Stop 159
agttgaaatggctaagtccttggat

SEQ ID NO: 360579 - DNA, 25 bp, Artificial
  probe
  misc_feature (1)..(25): SEQ ID NO: 3645; WAN024C3V; Start 331; Stop 355
agatgattatcgaaggaagtggtcc

SEQ ID NO: 360580 - DNA, 25 bp, Artificial
  probe
  misc_feature (1)..(25): SEQ ID NO: 3645; WAN024C3V; Start 119; Stop 143
gagaaatcgttacggcagttgaaat

SEQ ID NO: 360581 - DNA, 25 bp, Artificial
  probe
  misc_feature (1)..(25): SEQ ID NO: 3645; WAN024C3V; Start 120; Stop 144
agaaatcgttacggcagttgaaatg

SEQ ID NO: 360582 - DNA, 25 bp, Artificial
  probe
  misc_feature (1)..(25): SEQ ID NO: 3645; WAN024C3V; Start 138; Stop 162
tgaaatggctaagtccttggatagg

SEQ ID NO: 360583 - DNA, 25 bp, Artificial
  probe
  misc_feature (1)..(25): SEQ ID NO: 3645; WAN024C3V; Start 134; Stop 158
cagttgaaatggctaagtccttgga

SEQ ID NO: 360584 - DNA, 25 bp, Artificial
  probe
  misc_feature (1)..(25): SEQ ID NO: 3645; WAN024C3V; Start 278; Stop 302
ggaaacgaacgtagtattctgactg

SEQ ID NO: 360585 - DNA, 25 bp, Artificial
  probe
  misc_feature (1)..(25): SEQ ID NO: 3645; WAN024C3V; Start 128; Stop 152
ttacggcagttgaaatggctaagtc

SEQ ID NO: 360586 - DNA, 25 bp, Artificial
  probe
  misc_feature (1)..(25): SEQ ID NO: 3645; WAN024C3V; Start 291; Stop 315
gtattctgactgctatcagctagag

SEQ ID NO: 360587 - DNA, 25 bp, Artificial
  probe
  misc_feature (1)..(25): SEQ ID NO: 3645; WAN024C3V; Start 121; Stop 145
gaaatcgttacggcagttgaaatgg

SEQ ID NO: 360588 - DNA, 25 bp, Artificial
  probe
  misc_feature (1)..(25): SEQ ID NO: 3645; WAN024C3V; Start 290; Stop 314
agtattctgactgctatcagctaga

SEQ ID NO: 360589 - DNA, 25 bp, Artificial
  probe
  misc_feature (1)..(25): SEQ ID NO: 3645; WAN024C3V; Start 349; Stop 373
gtggtcctagtcacttctggaacaa

SEQ ID NO: 360590 - DNA, 25 bp, Artificial
  probe
  misc_feature (1)..(25): SEQ ID NO: 3645; WAN024C3V; Start 288; Stop 312
gtagtattctgactgctatcagcta

SEQ ID NO: 360591 - DNA, 25 bp, Artificial
  probe
  misc_feature (1)..(25): SEQ ID NO: 3646; WAN0249OC; Start 8; Stop 32
cgtggtatcgtggtaatagtcaata

SEQ ID NO: 360592 - DNA, 25 bp, Artificial
  probe
  misc_feature (1)..(25): SEQ ID NO: 3646; WAN0249OC; Start 2; Stop 26
attaagcgtggtatcgtggtaatag

SEQ ID NO: 360593 - DNA, 25 bp, Artificial
  probe
  misc_feature (1)..(25): SEQ ID NO: 3646; WAN0249OC; Start 1; Stop 25
gattaagcgtggtatcgtggtaata

SEQ ID NO: 360594 - DNA, 25 bp, Artificial
  probe
  misc_feature (1)..(25): SEQ ID NO: 3646; WAN0249OC; Start 3; Stop 27
ttaagcgtggtatcgtggtaatagt

SEQ ID NO: 360595 - DNA, 25 bp, Artificial
  probe
  misc_feature (1)..(25): SEQ ID NO: 3646; WAN0249OC; Start 9; Stop 33
gtggtatcgtggtaatagtcaataa

SEQ ID NO: 360596 - DNA, 25 bp, Artificial
  probe
  misc_feature (1)..(25): SEQ ID NO: 3646; WAN0249OC; Start 4; Stop 28
taagcgtggtatcgtggtaatagtc

SEQ ID NO: 360597 - DNA, 25 bp, Artificial
  probe
  misc_feature (1)..(25): SEQ ID NO: 3646; WAN0249OC; Start 49; Stop 73
tgtgctagttactcgcctattgatt

SEQ ID NO: 360598 - DNA, 25 bp, Artificial
  probe
  misc_feature (1)..(25): SEQ ID NO: 3646; WAN0249OC; Start 48; Stop 72
ttgtgctagttactcgcctattgat

SEQ ID NO: 360599 - DNA, 25 bp, Artificial
  probe
  misc_feature (1)..(25): SEQ ID NO: 3646; WAN0249OC; Start 47; Stop 71
cttgtgctagttactcgcctattga

SEQ ID NO: 360600 - DNA, 25 bp, Artificial
  probe
  misc_feature (1)..(25): SEQ ID NO: 3646; WAN0249OC; Start 7; Stop 31
gcgtggtatcgtggtaatagtcaat

SEQ ID NO: 360601 - DNA, 25 bp, Artificial
  probe
  misc_feature (1)..(25): SEQ ID NO: 3646; WAN0249OC; Start 262; Stop 286
attaaagagtcgcatagaaagagga

SEQ ID NO: 360602 - DNA, 25 bp, Artificial
  probe
  misc_feature (1)..(25): SEQ ID NO: 3646; WAN0249OC; Start 261; Stop 285
gattaaagagtcgcatagaaagagg

SEQ ID NO: 360603 - DNA, 25 bp, Artificial
  probe
  misc_feature (1)..(25): SEQ ID NO: 3646; WAN0249OC; Start 46; Stop 70
acttgtgctagttactcgcctattg

SEQ ID NO: 360604 - DNA, 25 bp, Artificial
  probe
  misc_feature (1)..(25): SEQ ID NO: 3646; WAN0249OC; Start 45; Stop 69
cacttgtgctagttactcgcctatt

SEQ ID NO: 360605 - DNA, 25 bp, Artificial
  probe
  misc_feature (1)..(25): SEQ ID NO: 3646; WAN0249OC; Start 50; Stop 74
gtgctagttactcgcctattgattt

SEQ ID NO: 360606 - DNA, 25 bp, Artificial
  probe
  misc_feature (1)..(25): SEQ ID NO: 3646; WAN0249OC; Start 263; Stop 287
ttaaagagtcgcatagaaagaggac

SEQ ID NO: 360607 - DNA, 25 bp, Artificial
  probe
  misc_feature (1)..(25): SEQ ID NO: 3646; WAN0249OC; Start 6; Stop 30
agcgtggtatcgtggtaatagtcaa

SEQ ID NO: 360608 - DNA, 25 bp, Artificial
  probe
  misc_feature (1)..(25): SEQ ID NO: 3646; WAN0249OC; Start 5; Stop 29
aagcgtggtatcgtggtaatagtca

SEQ ID NO: 360609 - DNA, 25 bp, Artificial
  probe
  misc_feature (1)..(25): SEQ ID NO: 3646; WAN0249OC; Start 10; Stop 34
tggtatcgtggtaatagtcaataaa

SEQ ID NO: 360610 - DNA, 25 bp, Artificial
  probe
  misc_feature (1)..(25): SEQ ID NO: 3646; WAN0249OC; Start 264; Stop 288
taaagagtcgcatagaaagaggaca

SEQ ID NO: 360611 - DNA, 25 bp, Artificial
  probe
  misc_feature (1)..(25): SEQ ID NO: 3646; WAN0249OC; Start 266; Stop 290
aagagtcgcatagaaagaggacaaa

SEQ ID NO: 360612 - DNA, 25 bp, Artificial
  probe
  misc_feature (1)..(25): SEQ ID NO: 3646; WAN0249OC; Start 265; Stop 289
aaagagtcgcatagaaagaggacaa

SEQ ID NO: 360613 - DNA, 25 bp, Artificial
  probe
  misc_feature (1)..(25): SEQ ID NO: 3646; WAN0249OC; Start 260; Stop 284
cgattaaagagtcgcatagaaagag

SEQ ID NO: 360614 - DNA, 25 bp, Artificial
  probe
  misc_feature (1)..(25): SEQ ID NO: 3646; WAN0249OC; Start 163; Stop 187
aagggtttaaatgaggtaatatggt

SEQ ID NO: 360615 - DNA, 25 bp, Artificial
  probe
  misc_feature (1)..(25): SEQ ID NO: 3646; WAN0249OC; Start 162; Stop 186
caagggtttaaatgaggtaatatgg

SEQ ID NO: 360616 - DNA, 25 bp, Artificial
  probe
  misc_feature (1)..(25): SEQ ID NO: 3646; WAN0249OC; Start 161; Stop 185
ccaagggtttaaatgaggtaatatg

SEQ ID NO: 360617 - DNA, 25 bp, Artificial
  probe
  misc_feature (1)..(25): SEQ ID NO: 3646; WAN0249OC; Start 119; Stop 143
atgagaaatgaagaaatcagacttt

SEQ ID NO: 360618 - DNA, 25 bp, Artificial
  probe
  misc_feature (1)..(25): SEQ ID NO: 3646; WAN0249OC; Start 210; Stop 234
ttgtggtaagatggtagtatctatt

SEQ ID NO: 360619 - DNA, 25 bp, Artificial
  probe
  misc_feature (1)..(25): SEQ ID NO: 3646; WAN0249OC; Start 44; Stop 68
ccacttgtgctagttactcgcctat

SEQ ID NO: 360620 - DNA, 25 bp, Artificial
  probe
  misc_feature (1)..(25): SEQ ID NO: 3646; WAN0249OC; Start 51; Stop 75
tgctagttactcgcctattgatttt

SEQ ID NO: 360621 - DNA, 25 bp, Artificial
  probe
  misc_feature (1)..(25): SEQ ID NO: 3646; WAN0249OC; Start 229; Stop 253
tctattttagcatatttccgagcaa

SEQ ID NO: 360622 - DNA, 25 bp, Artificial
  probe
  misc_feature (1)..(25): SEQ ID NO: 3646; WAN0249OC; Start 228; Stop 252
atctattttagcatatttccgagca

SEQ ID NO: 360623 - DNA, 25 bp, Artificial
  probe
  misc_feature (1)..(25): SEQ ID NO: 3646; WAN0249OC; Start 52; Stop 76
gctagttactcgcctattgatttta

SEQ ID NO: 360624 - DNA, 25 bp, Artificial
  probe
  misc_feature (1)..(25): SEQ ID NO: 3647; WAN0249PN; Start 46; Stop 70
tacggtaatgtctacacctttattt

SEQ ID NO: 360625 - DNA, 25 bp, Artificial
  probe
  misc_feature (1)..(25): SEQ ID NO: 3647; WAN0249PN; Start 45; Stop 69
ttacggtaatgtctacacctttatt

SEQ ID NO: 360626 - DNA, 25 bp, Artificial
  probe
  misc_feature (1)..(25): SEQ ID NO: 3647; WAN0249PN; Start 44; Stop 68
tttacggtaatgtctacacctttat

SEQ ID NO: 360627 - DNA, 25 bp, Artificial
  probe
  misc_feature (1)..(25): SEQ ID NO: 3647; WAN0249PN; Start 86; Stop 110
ttaagtatcttagtagacttcccgc

SEQ ID NO: 360628 - DNA, 25 bp, Artificial
  probe
  misc_feature (1)..(25): SEQ ID NO: 3647; WAN0249PN; Start 85; Stop 109
tttaagtatcttagtagacttcccg

SEQ ID NO: 360629 - DNA, 25 bp, Artificial
  probe
  misc_feature (1)..(25): SEQ ID NO: 3647; WAN0249PN; Start 43; Stop 67
ttttacggtaatgtctacaccttta

SEQ ID NO: 360630 - DNA, 25 bp, Artificial
  probe
  misc_feature (1)..(25): SEQ ID NO: 3647; WAN0249PN; Start 80; Stop 104
gcatctttaagtatcttagtagact

SEQ ID NO: 360631 - DNA, 25 bp, Artificial
  probe
  misc_feature (1)..(25): SEQ ID NO: 3647; WAN0249PN; Start 89; Stop 113
agtatcttagtagacttcccgcgaa

SEQ ID NO: 360632 - DNA, 25 bp, Artificial
  probe
  misc_feature (1)..(25): SEQ ID NO: 3647; WAN0249PN; Start 79; Stop 103
tgcatctttaagtatcttagtagac

SEQ ID NO: 360633 - DNA, 25 bp, Artificial
  probe
  misc_feature (1)..(25): SEQ ID NO: 3647; WAN0249PN; Start 84; Stop 108
ctttaagtatcttagtagacttccc

SEQ ID NO: 360634 - DNA, 25 bp, Artificial
  probe
  misc_feature (1)..(25): SEQ ID NO: 3647; WAN0249PN; Start 78; Stop 102
ctgcatctttaagtatcttagtaga

SEQ ID NO: 360635 - DNA, 25 bp, Artificial
  probe
  misc_feature (1)..(25): SEQ ID NO: 3647; WAN0249PN; Start 77; Stop 101
tctgcatctttaagtatcttagtag

SEQ ID NO: 360636 - DNA, 25 bp, Artificial
  probe
  misc_feature (1)..(25): SEQ ID NO: 3647; WAN0249PN; Start 87; Stop 111
taagtatcttagtagacttcccgcg

SEQ ID NO: 360637 - DNA, 25 bp, Artificial
  probe
  misc_feature (1)..(25): SEQ ID NO: 3647; WAN0249PN; Start 88; Stop 112
aagtatcttagtagacttcccgcga

SEQ ID NO: 360638 - DNA, 25 bp, Artificial
  probe
  misc_feature (1)..(25): SEQ ID NO: 3647; WAN0249PN; Start 76; Stop 100
atctgcatctttaagtatcttagta

SEQ ID NO: 360639 - DNA, 25 bp, Artificial
  probe
  misc_feature (1)..(25): SEQ ID NO: 3647; WAN0249PN; Start 75; Stop 99
tatctgcatctttaagtatcttagt

SEQ ID NO: 360640 - DNA, 25 bp, Artificial
  probe
  misc_feature (1)..(25): SEQ ID NO: 3647; WAN0249PN; Start 73; Stop 97
actatctgcatctttaagtatctta

SEQ ID NO: 360641 - DNA, 25 bp, Artificial
  probe
  misc_feature (1)..(25): SEQ ID NO: 3647; WAN0249PN; Start 83; Stop 107
tctttaagtatcttagtagacttcc

SEQ ID NO: 360642 - DNA, 25 bp, Artificial
  probe
  misc_feature (1)..(25): SEQ ID NO: 3647; WAN0249PN; Start 72; Stop 96
tactatctgcatctttaagtatctt

SEQ ID NO: 360643 - DNA, 25 bp, Artificial
  probe
  misc_feature (1)..(25): SEQ ID NO: 3648; WAN0249RH; Start 105; Stop 129
ctagtacagaagtcatgctatggaa

SEQ ID NO: 360644 - DNA, 25 bp, Artificial
  probe
  misc_feature (1)..(25): SEQ ID NO: 3648; WAN0249RH; Start 104; Stop 128
tctagtacagaagtcatgctatgga

SEQ ID NO: 360645 - DNA, 25 bp, Artificial
  probe
  misc_feature (1)..(25): SEQ ID NO: 3648; WAN0249RH; Start 103; Stop 127
gtctagtacagaagtcatgctatgg

SEQ ID NO: 360646 - DNA, 25 bp, Artificial
  probe
  misc_feature (1)..(25): SEQ ID NO: 3648; WAN0249RH; Start 102; Stop 126
agtctagtacagaagtcatgctatg

SEQ ID NO: 360647 - DNA, 25 bp, Artificial
  probe
  misc_feature (1)..(25): SEQ ID NO: 3648; WAN0249RH; Start 101; Stop 125
aagtctagtacagaagtcatgctat

SEQ ID NO: 360648 - DNA, 25 bp, Artificial
  probe
  misc_feature (1)..(25): SEQ ID NO: 3648; WAN0249RH; Start 71; Stop 95
ctgtggttctatctatttattcgga

SEQ ID NO: 360649 - DNA, 25 bp, Artificial
  probe
  misc_feature (1)..(25): SEQ ID NO: 3648; WAN0249RH; Start 70; Stop 94
tctgtggttctatctatttattcgg

SEQ ID NO: 360650 - DNA, 25 bp, Artificial
  probe
  misc_feature (1)..(25): SEQ ID NO: 3648; WAN0249RH; Start 109; Stop 133
tacagaagtcatgctatggaaacag

SEQ ID NO: 360651 - DNA, 25 bp, Artificial
  probe
  misc_feature (1)..(25): SEQ ID NO: 3648; WAN0249RH; Start 107; Stop 131
agtacagaagtcatgctatggaaac

SEQ ID NO: 360652 - DNA, 25 bp, Artificial
  probe
  misc_feature (1)..(25): SEQ ID NO: 3648; WAN0249RH; Start 99; Stop 123
gaaagtctagtacagaagtcatgct

SEQ ID NO: 360653 - DNA, 25 bp, Artificial
  probe
  misc_feature (1)..(25): SEQ ID NO: 3648; WAN0249RH; Start 98; Stop 122
agaaagtctagtacagaagtcatgc

SEQ ID NO: 360654 - DNA, 25 bp, Artificial
  probe
  misc_feature (1)..(25): SEQ ID NO: 3648; WAN0249RH; Start 56; Stop 80
taggtttactagattctgtggttct

SEQ ID NO: 360655 - DNA, 25 bp, Artificial
  probe
  misc_feature (1)..(25): SEQ ID NO: 3648; WAN0249RH; Start 108; Stop 132
gtacagaagtcatgctatggaaaca

SEQ ID NO: 360656 - DNA, 25 bp, Artificial
  probe
  misc_feature (1)..(25): SEQ ID NO: 3648; WAN0249RH; Start 106; Stop 130
tagtacagaagtcatgctatggaaa

SEQ ID NO: 360657 - DNA, 25 bp, Artificial
  probe
  misc_feature (1)..(25): SEQ ID NO: 3648; WAN0249RH; Start 100; Stop 124
aaagtctagtacagaagtcatgcta

SEQ ID NO: 360658 - DNA, 25 bp, Artificial
  probe
  misc_feature (1)..(25): SEQ ID NO: 3648; WAN0249RH; Start 72; Stop 96
tgtggttctatctatttattcggaa

SEQ ID NO: 360659 - DNA, 25 bp, Artificial
  probe
  misc_feature (1)..(25): SEQ ID NO: 3648; WAN0249RH; Start 97; Stop 121
aagaaagtctagtacagaagtcatg

SEQ ID NO: 360660 - DNA, 25 bp, Artificial
  probe
  misc_feature (1)..(25): SEQ ID NO: 3648; WAN0249RH; Start 57; Stop 81
aggtttactagattctgtggttcta

SEQ ID NO: 360661 - DNA, 25 bp, Artificial
  probe
  misc_feature (1)..(25): SEQ ID NO: 3648; WAN0249RH; Start 96; Stop 120
aaagaaagtctagtacagaagtcat

SEQ ID NO: 360662 - DNA, 25 bp, Artificial
  probe
  misc_feature (1)..(25): SEQ ID NO: 3648; WAN0249RH; Start 55; Stop 79
ctaggtttactagattctgtggttc

SEQ ID NO: 360663 - DNA, 25 bp, Artificial
  probe
  misc_feature (1)..(25): SEQ ID NO: 3648; WAN0249RH; Start 58; Stop 82
ggtttactagattctgtggttctat

SEQ ID NO: 360664 - DNA, 25 bp, Artificial
  probe
  misc_feature (1)..(25): SEQ ID NO: 3648; WAN0249RH; Start 73; Stop 97
gtggttctatctatttattcggaaa

SEQ ID NO: 360665 - DNA, 25 bp, Artificial
  probe
  misc_feature (1)..(25): SEQ ID NO: 3648; WAN0249RH; Start 69; Stop 93
ttctgtggttctatctatttattcg

SEQ ID NO: 360666 - DNA, 25 bp, Artificial
  probe
  misc_feature (1)..(25): SEQ ID NO: 3648; WAN0249RH; Start 9; Stop 33
tcctccagatttcttttattgctaa

SEQ ID NO: 360667 - DNA, 25 bp, Artificial
  probe
  misc_feature (1)..(25): SEQ ID NO: 3648; WAN0249RH; Start 91; Stop 115
tcggaaaagaaagtctagtacagaa

SEQ ID NO: 360668 - DNA, 25 bp, Artificial
  probe
  misc_feature (1)..(25): SEQ ID NO: 3648; WAN0249RH; Start 90; Stop 114
ttcggaaaagaaagtctagtacaga

SEQ ID NO: 360669 - DNA, 25 bp, Artificial
  probe
  misc_feature (1)..(25): SEQ ID NO: 3648; WAN0249RH; Start 92; Stop 116
cggaaaagaaagtctagtacagaag

SEQ ID NO: 360670 - DNA, 25 bp, Artificial
  probe
  misc_feature (1)..(25): SEQ ID NO: 3648; WAN0249RH; Start 8; Stop 32
atcctccagatttcttttattgcta

SEQ ID NO: 360671 - DNA, 25 bp, Artificial
  probe
  misc_feature (1)..(25): SEQ ID NO: 3648; WAN0249RH; Start 89; Stop 113
attcggaaaagaaagtctagtacag

SEQ ID NO: 360672 - DNA, 25 bp, Artificial
  probe
  misc_feature (1)..(25): SEQ ID NO: 3648; WAN0249RH; Start 59; Stop 83
gtttactagattctgtggttctatc

SEQ ID NO: 360673 - DNA, 25 bp, Artificial
  probe
  misc_feature (1)..(25): SEQ ID NO: 3648; WAN0249RH; Start 93; Stop 117
ggaaaagaaagtctagtacagaagt

SEQ ID NO: 360674 - DNA, 25 bp, Artificial
  probe
  misc_feature (1)..(25): SEQ ID NO: 3648; WAN0249RH; Start 10; Stop 34
cctccagatttcttttattgctaat

SEQ ID NO: 360675 - DNA, 25 bp, Artificial
  probe
  misc_feature (1)..(25): SEQ ID NO: 3648; WAN0249RH; Start 7; Stop 31
aatcctccagatttcttttattgct

SEQ ID NO: 360676 - DNA, 25 bp, Artificial
  probe
  misc_feature (1)..(25): SEQ ID NO: 3649; WAN0249DE; Start 4; Stop 28
tctacactaacacatcttttctctt

SEQ ID NO: 360677 - DNA, 25 bp, Artificial
  probe
  misc_feature (1)..(25): SEQ ID NO: 3649; WAN0249DE; Start 3; Stop 27
ttctacactaacacatcttttctct

SEQ ID NO: 360678 - DNA, 25 bp, Artificial
  probe
  misc_feature (1)..(25): SEQ ID NO: 3649; WAN0249DE; Start 7; Stop 31
acactaacacatcttttctcttatg

SEQ ID NO: 360679 - DNA, 25 bp, Artificial
  probe
  misc_feature (1)..(25): SEQ ID NO: 3649; WAN0249DE; Start 2; Stop 26
attctacactaacacatcttttctc

SEQ ID NO: 360680 - DNA, 25 bp, Artificial
  probe
  misc_feature (1)..(25): SEQ ID NO: 3649; WAN0249DE; Start 1; Stop 25
gattctacactaacacatcttttct

SEQ ID NO: 360681 - DNA, 25 bp, Artificial
  probe
  misc_feature (1)..(25): SEQ ID NO: 3649; WAN0249DE; Start 5; Stop 29
ctacactaacacatcttttctctta

SEQ ID NO: 360682 - DNA, 25 bp, Artificial
  probe
  misc_feature (1)..(25): SEQ ID NO: 3649; WAN0249DE; Start 13; Stop 37
acacatcttttctcttatgtaaagc

SEQ ID NO: 360683 - DNA, 25 bp, Artificial
  probe
  misc_feature (1)..(25): SEQ ID NO: 3649; WAN0249DE; Start 6; Stop 30
tacactaacacatcttttctcttat

SEQ ID NO: 360684 - DNA, 25 bp, Artificial
  probe
  misc_feature (1)..(25): SEQ ID NO: 3649; WAN0249DE; Start 8; Stop 32
cactaacacatcttttctcttatgt

SEQ ID NO: 360685 - DNA, 25 bp, Artificial
  probe
  misc_feature (1)..(25): SEQ ID NO: 3649; WAN0249DE; Start 14; Stop 38
cacatcttttctcttatgtaaagct

SEQ ID NO: 360686 - DNA, 25 bp, Artificial
  probe
  misc_feature (1)..(25): SEQ ID NO: 3649; WAN0249DE; Start 9; Stop 33
actaacacatcttttctcttatgta

SEQ ID NO: 360687 - DNA, 25 bp, Artificial
  probe
  misc_feature (1)..(25): SEQ ID NO: 3649; WAN0249DE; Start 12; Stop 36
aacacatcttttctcttatgtaaag

SEQ ID NO: 360688 - DNA, 25 bp, Artificial
  probe
  misc_feature (1)..(25): SEQ ID NO: 3649; WAN0249DE; Start 15; Stop 39
acatcttttctcttatgtaaagctt

SEQ ID NO: 360689 - DNA, 25 bp, Artificial
  probe
  misc_feature (1)..(25): SEQ ID NO: 3650; WAN0249W2; Start 124; Stop 148
accttactcagaatggatgatttca

SEQ ID NO: 360690 - DNA, 25 bp, Artificial
  probe
  misc_feature (1)..(25): SEQ ID NO: 3650; WAN0249W2; Start 123; Stop 147
caccttactcagaatggatgatttc

SEQ ID NO: 360691 - DNA, 25 bp, Artificial
  probe
  misc_feature (1)..(25): SEQ ID NO: 3650; WAN0249W2; Start 125; Stop 149
ccttactcagaatggatgatttcaa

SEQ ID NO: 360692 - DNA, 25 bp, Artificial
  probe
  misc_feature (1)..(25): SEQ ID NO: 3650; WAN0249W2; Start 129; Stop 153
actcagaatggatgatttcaagaaa

SEQ ID NO: 360693 - DNA, 25 bp, Artificial
  probe
  misc_feature (1)..(25): SEQ ID NO: 3650; WAN0249W2; Start 128; Stop 152
tactcagaatggatgatttcaagaa

SEQ ID NO: 360694 - DNA, 25 bp, Artificial
  probe
  misc_feature (1)..(25): SEQ ID NO: 3650; WAN0249W2; Start 127; Stop 151
ttactcagaatggatgatttcaaga

SEQ ID NO: 360695 - DNA, 25 bp, Artificial
  probe
  misc_feature (1)..(25): SEQ ID NO: 3650; WAN0249W2; Start 126; Stop 150
cttactcagaatggatgatttcaag

SEQ ID NO: 360696 - DNA, 25 bp, Artificial
  probe
  misc_feature (1)..(25): SEQ ID NO: 3650; WAN0249W2; Start 122; Stop 146
ccaccttactcagaatggatgattt

SEQ ID NO: 360697 - DNA, 25 bp, Artificial
  probe
  misc_feature (1)..(25): SEQ ID NO: 3650; WAN0249W2; Start 35; Stop 59
atctcacaatttgtttgatttcaca

SEQ ID NO: 360698 - DNA, 25 bp, Artificial
  probe
  misc_feature (1)..(25): SEQ ID NO: 3650; WAN0249W2; Start 114; Stop 138
gaaaccacccaccttactcagaatg

SEQ ID NO: 360699 - DNA, 25 bp, Artificial
  probe
  misc_feature (1)..(25): SEQ ID NO: 3650; WAN0249W2; Start 121; Stop 145
cccaccttactcagaatggatgatt

SEQ ID NO: 360700 - DNA, 25 bp, Artificial
  probe
  misc_feature (1)..(25): SEQ ID NO: 3650; WAN0249W2; Start 113; Stop 137
agaaaccacccaccttactcagaat

SEQ ID NO: 360701 - DNA, 25 bp, Artificial
  probe
  misc_feature (1)..(25): SEQ ID NO: 3650; WAN0249W2; Start 107; Stop 131
aaactgagaaaccacccaccttact

SEQ ID NO: 360702 - DNA, 25 bp, Artificial
  probe
  misc_feature (1)..(25): SEQ ID NO: 3650; WAN0249W2; Start 120; Stop 144
acccaccttactcagaatggatgat

SEQ ID NO: 360703 - DNA, 25 bp, Artificial
  probe
  misc_feature (1)..(25): SEQ ID NO: 3650; WAN0249W2; Start 112; Stop 136
gagaaaccacccaccttactcagaa

SEQ ID NO: 360704 - DNA, 25 bp, Artificial
  probe
  misc_feature (1)..(25): SEQ ID NO: 3650; WAN0249W2; Start 34; Stop 58
tatctcacaatttgtttgatttcac

SEQ ID NO: 360705 - DNA, 25 bp, Artificial
  probe
  misc_feature (1)..(25): SEQ ID NO: 3650; WAN0249W2; Start 33; Stop 57
gtatctcacaatttgtttgatttca

SEQ ID NO: 360706 - DNA, 25 bp, Artificial
  probe
  misc_feature (1)..(25): SEQ ID NO: 3650; WAN0249W2; Start 36; Stop 60
tctcacaatttgtttgatttcacaa

SEQ ID NO: 360707 - DNA, 25 bp, Artificial
  probe
  misc_feature (1)..(25): SEQ ID NO: 3650; WAN0249W2; Start 32; Stop 56
agtatctcacaatttgtttgatttc

SEQ ID NO: 360708 - DNA, 25 bp, Artificial
  probe
  misc_feature (1)..(25): SEQ ID NO: 3650; WAN0249W2; Start 108; Stop 132
aactgagaaaccacccaccttactc

SEQ ID NO: 360709 - DNA, 25 bp, Artificial
  probe
  misc_feature (1)..(25): SEQ ID NO: 3650; WAN0249W2; Start 106; Stop 130
aaaactgagaaaccacccaccttac

SEQ ID NO: 360710 - DNA, 25 bp, Artificial
  probe
  misc_feature (1)..(25): SEQ ID NO: 3650; WAN0249W2; Start 119; Stop 143
cacccaccttactcagaatggatga

SEQ ID NO: 360711 - DNA, 25 bp, Artificial
  probe
  misc_feature (1)..(25): SEQ ID NO: 3650; WAN0249W2; Start 30; Stop 54
ctagtatctcacaatttgtttgatt

SEQ ID NO: 360712 - DNA, 25 bp, Artificial
  probe
  misc_feature (1)..(25): SEQ ID NO: 3650; WAN0249W2; Start 24; Stop 48
accgtactagtatctcacaatttgt

SEQ ID NO: 360713 - DNA, 25 bp, Artificial
  probe
  misc_feature (1)..(25): SEQ ID NO: 3650; WAN0249W2; Start 115; Stop 139
aaaccacccaccttactcagaatgg

SEQ ID NO: 360714 - DNA, 25 bp, Artificial
  probe
  misc_feature (1)..(25): SEQ ID NO: 3650; WAN0249W2; Start 23; Stop 47
taccgtactagtatctcacaatttg

SEQ ID NO: 360715 - DNA, 25 bp, Artificial
  probe
  misc_feature (1)..(25): SEQ ID NO: 3650; WAN0249W2; Start 25; Stop 49
ccgtactagtatctcacaatttgtt

SEQ ID NO: 360716 - DNA, 25 bp, Artificial
  probe
  misc_feature (1)..(25): SEQ ID NO: 3650; WAN0249W2; Start 118; Stop 142
ccacccaccttactcagaatggatg

SEQ ID NO: 360717 - DNA, 25 bp, Artificial
  probe
  misc_feature (1)..(25): SEQ ID NO: 3650; WAN0249W2; Start 21; Stop 45
aataccgtactagtatctcacaatt

SEQ ID NO: 360718 - DNA, 25 bp, Artificial
  probe
  misc_feature (1)..(25): SEQ ID NO: 3650; WAN0249W2; Start 29; Stop 53
actagtatctcacaatttgtttgat

SEQ ID NO: 360719 - DNA, 25 bp, Artificial
  probe
  misc_feature (1)..(25): SEQ ID NO: 3650; WAN0249W2; Start 31; Stop 55
tagtatctcacaatttgtttgattt

SEQ ID NO: 360720 - DNA, 25 bp, Artificial
  probe
  misc_feature (1)..(25): SEQ ID NO: 3650; WAN0249W2; Start 117; Stop 141
accacccaccttactcagaatggat

SEQ ID NO: 360721 - DNA, 25 bp, Artificial
  probe
  misc_feature (1)..(25): SEQ ID NO: 3650; WAN0249W2; Start 20; Stop 44
taataccgtactagtatctcacaat

SEQ ID NO: 360722 - DNA, 25 bp, Artificial
  probe
  misc_feature (1)..(25): SEQ ID NO: 3651; WAN0249ZP; Start 18; Stop 42
acttaaataattgttcttctgggaa

SEQ ID NO: 360723 - DNA, 25 bp, Artificial
  probe
  misc_feature (1)..(25): SEQ ID NO: 3651; WAN0249ZP; Start 17; Stop 41
aacttaaataattgttcttctggga

SEQ ID NO: 360724 - DNA, 25 bp, Artificial
  probe
  misc_feature (1)..(25): SEQ ID NO: 3651; WAN0249ZP; Start 26; Stop 50
aattgttcttctgggaactaaatcg

SEQ ID NO: 360725 - DNA, 25 bp, Artificial
  probe
  misc_feature (1)..(25): SEQ ID NO: 3651; WAN0249ZP; Start 27; Stop 51
attgttcttctgggaactaaatcga

SEQ ID NO: 360726 - DNA, 25 bp, Artificial
  probe
  misc_feature (1)..(25): SEQ ID NO: 3651; WAN0249ZP; Start 28; Stop 52
ttgttcttctgggaactaaatcgaa

SEQ ID NO: 360727 - DNA, 25 bp, Artificial
  probe
  misc_feature (1)..(25): SEQ ID NO: 3651; WAN0249ZP; Start 16; Stop 40
taacttaaataattgttcttctggg

SEQ ID NO: 360728 - DNA, 25 bp, Artificial
  probe
  misc_feature (1)..(25): SEQ ID NO: 3651; WAN0249ZP; Start 25; Stop 49
taattgttcttctgggaactaaatc

SEQ ID NO: 360729 - DNA, 25 bp, Artificial
  probe
  misc_feature (1)..(25): SEQ ID NO: 3651; WAN0249ZP; Start 23; Stop 47
aataattgttcttctgggaactaaa

SEQ ID NO: 360730 - DNA, 25 bp, Artificial
  probe
  misc_feature (1)..(25): SEQ ID NO: 3651; WAN0249ZP; Start 22; Stop 46
aaataattgttcttctgggaactaa

SEQ ID NO: 360731 - DNA, 25 bp, Artificial
  probe
  misc_feature (1)..(25): SEQ ID NO: 3651; WAN0249ZP; Start 20; Stop 44
ttaaataattgttcttctgggaact

SEQ ID NO: 360732 - DNA, 25 bp, Artificial
  probe
  misc_feature (1)..(25): SEQ ID NO: 3651; WAN0249ZP; Start 24; Stop 48
ataattgttcttctgggaactaaat

SEQ ID NO: 360733 - DNA, 25 bp, Artificial
  probe
  misc_feature (1)..(25): SEQ ID NO: 3651; WAN0249ZP; Start 19; Stop 43
cttaaataattgttcttctgggaac

SEQ ID NO: 360734 - DNA, 25 bp, Artificial
  probe
  misc_feature (1)..(25): SEQ ID NO: 3651; WAN0249ZP; Start 21; Stop 45
taaataattgttcttctgggaacta

SEQ ID NO: 360735 - DNA, 25 bp, Artificial
  probe
  misc_feature (1)..(25): SEQ ID NO: 3652; WAN024A3M; Start 19; Stop 43
cagtattcattataacacgcttggt

SEQ ID NO: 360736 - DNA, 25 bp, Artificial
  probe
  misc_feature (1)..(25): SEQ ID NO: 3652; WAN024A3M; Start 18; Stop 42
gcagtattcattataacacgcttgg

SEQ ID NO: 360737 - DNA, 25 bp, Artificial
  probe
  misc_feature (1)..(25): SEQ ID NO: 3652; WAN024A3M; Start 8; Stop 32
ggtcgcttgagcagtattcattata

SEQ ID NO: 360738 - DNA, 25 bp, Artificial
  probe
  misc_feature (1)..(25): SEQ ID NO: 3652; WAN024A3M; Start 14; Stop 38
ttgagcagtattcattataacacgc

SEQ ID NO: 360739 - DNA, 25 bp, Artificial
  probe
  misc_feature (1)..(25): SEQ ID NO: 3652; WAN024A3M; Start 11; Stop 35
cgcttgagcagtattcattataaca

SEQ ID NO: 360740 - DNA, 25 bp, Artificial
  probe
  misc_feature (1)..(25): SEQ ID NO: 3652; WAN024A3M; Start 29; Stop 53
tataacacgcttggttagagaagac

SEQ ID NO: 360741 - DNA, 25 bp, Artificial
  probe
  misc_feature (1)..(25): SEQ ID NO: 3652; WAN024A3M; Start 10; Stop 34
tcgcttgagcagtattcattataac

SEQ ID NO: 360742 - DNA, 25 bp, Artificial
  probe
  misc_feature (1)..(25): SEQ ID NO: 3652; WAN024A3M; Start 9; Stop 33
gtcgcttgagcagtattcattataa

SEQ ID NO: 360743 - DNA, 25 bp, Artificial
  probe
  misc_feature (1)..(25): SEQ ID NO: 3652; WAN024A3M; Start 20; Stop 44
agtattcattataacacgcttggtt

SEQ ID NO: 360744 - DNA, 25 bp, Artificial
  probe
  misc_feature (1)..(25): SEQ ID NO: 3652; WAN024A3M; Start 39; Stop 63
ttggttagagaagacaaggaagagc

SEQ ID NO: 360745 - DNA, 25 bp, Artificial
  probe
  misc_feature (1)..(25): SEQ ID NO: 3652; WAN024A3M; Start 42; Stop 66
gttagagaagacaaggaagagctta

SEQ ID NO: 360746 - DNA, 25 bp, Artificial
  probe
  misc_feature (1)..(25): SEQ ID NO: 3652; WAN024A3M; Start 43; Stop 67
ttagagaagacaaggaagagcttaa

SEQ ID NO: 360747 - DNA, 25 bp, Artificial
  probe
  misc_feature (1)..(25): SEQ ID NO: 3652; WAN024A3M; Start 7; Stop 31
aggtcgcttgagcagtattcattat

SEQ ID NO: 360748 - DNA, 25 bp, Artificial
  probe
  misc_feature (1)..(25): SEQ ID NO: 3652; WAN024A3M; Start 98; Stop 122
acagattatgtgaatgatgtgagta

SEQ ID NO: 360749 - DNA, 25 bp, Artificial
  probe
  misc_feature (1)..(25): SEQ ID NO: 3652; WAN024A3M; Start 97; Stop 121
tacagattatgtgaatgatgtgagt

SEQ ID NO: 360750 - DNA, 25 bp, Artificial
  probe
  misc_feature (1)..(25): SEQ ID NO: 3652; WAN024A3M; Start 12; Stop 36
gcttgagcagtattcattataacac

SEQ ID NO: 360751 - DNA, 25 bp, Artificial
  probe
  misc_feature (1)..(25): SEQ ID NO: 3652; WAN024A3M; Start 28; Stop 52
ttataacacgcttggttagagaaga

SEQ ID NO: 360752 - DNA, 25 bp, Artificial
  probe
  misc_feature (1)..(25): SEQ ID NO: 3652; WAN024A3M; Start 25; Stop 49
tcattataacacgcttggttagaga

SEQ ID NO: 360753 - DNA, 25 bp, Artificial
  probe
  misc_feature (1)..(25): SEQ ID NO: 3652; WAN024A3M; Start 13; Stop 37
cttgagcagtattcattataacacg

SEQ ID NO: 360754 - DNA, 25 bp, Artificial
  probe
  misc_feature (1)..(25): SEQ ID NO: 3652; WAN024A3M; Start 6; Stop 30
aaggtcgcttgagcagtattcatta

SEQ ID NO: 360755 - DNA, 25 bp, Artificial
  probe
  misc_feature (1)..(25): SEQ ID NO: 3652; WAN024A3M; Start 26; Stop 50
cattataacacgcttggttagagaa

SEQ ID NO: 360756 - DNA, 25 bp, Artificial
  probe
  misc_feature (1)..(25): SEQ ID NO: 3652; WAN024A3M; Start 24; Stop 48
ttcattataacacgcttggttagag

SEQ ID NO: 360757 - DNA, 25 bp, Artificial
  probe
  misc_feature (1)..(25): SEQ ID NO: 3652; WAN024A3M; Start 27; Stop 51
attataacacgcttggttagagaag

SEQ ID NO: 360758 - DNA, 25 bp, Artificial
  probe
  misc_feature (1)..(25): SEQ ID NO: 3652; WAN024A3M; Start 106; Stop 130
tgtgaatgatgtgagtataccttct

SEQ ID NO: 360759 - DNA, 25 bp, Artificial
  probe
  misc_feature (1)..(25): SEQ ID NO: 3652; WAN024A3M; Start 30; Stop 54
ataacacgcttggttagagaagaca

SEQ ID NO: 360760 - DNA, 25 bp, Artificial
  probe
  misc_feature (1)..(25): SEQ ID NO: 3652; WAN024A3M; Start 41; Stop 65
ggttagagaagacaaggaagagctt

SEQ ID NO: 360761 - DNA, 25 bp, Artificial
  probe
  misc_feature (1)..(25): SEQ ID NO: 3652; WAN024A3M; Start 99; Stop 123
cagattatgtgaatgatgtgagtat

SEQ ID NO: 360762 - DNA, 25 bp, Artificial
  probe
  misc_feature (1)..(25): SEQ ID NO: 3652; WAN024A3M; Start 31; Stop 55
taacacgcttggttagagaagacaa

SEQ ID NO: 360763 - DNA, 25 bp, Artificial
  probe
  misc_feature (1)..(25): SEQ ID NO: 3652; WAN024A3M; Start 23; Stop 47
attcattataacacgcttggttaga

SEQ ID NO: 360764 - DNA, 25 bp, Artificial
  probe
  misc_feature (1)..(25): SEQ ID NO: 3652; WAN024A3M; Start 107; Stop 131
gtgaatgatgtgagtataccttctt

SEQ ID NO: 360765 - DNA, 25 bp, Artificial
  probe
  misc_feature (1)..(25): SEQ ID NO: 3652; WAN024A3M; Start 105; Stop 129
atgtgaatgatgtgagtataccttc

SEQ ID NO: 360766 - DNA, 25 bp, Artificial
  probe
  misc_feature (1)..(25): SEQ ID NO: 3652; WAN024A3M; Start 17; Stop 41
agcagtattcattataacacgcttg

SEQ ID NO: 360767 - DNA, 25 bp, Artificial
  probe
  misc_feature (1)..(25): SEQ ID NO: 3652; WAN024A3M; Start 16; Stop 40
gagcagtattcattataacacgctt

SEQ ID NO: 360768 - DNA, 25 bp, Artificial
  probe
  misc_feature (1)..(25): SEQ ID NO: 3653; WAN0249GT; Start 32; Stop 56
cgaatttcaatcgaaactcgctttt

SEQ ID NO: 360769 - DNA, 25 bp, Artificial
  probe
  misc_feature (1)..(25): SEQ ID NO: 3653; WAN0249GT; Start 27; Stop 51
aaaagcgaatttcaatcgaaactcg

SEQ ID NO: 360770 - DNA, 25 bp, Artificial
  probe
  misc_feature (1)..(25): SEQ ID NO: 3654; WAN0249S8; Start 277; Stop 301
ggtccttgtttacagactaatttct

SEQ ID NO: 360771 - DNA, 25 bp, Artificial
  probe
  misc_feature (1)..(25): SEQ ID NO: 3654; WAN0249S8; Start 276; Stop 300
aggtccttgtttacagactaatttc

SEQ ID NO: 360772 - DNA, 25 bp, Artificial
  probe
  misc_feature (1)..(25): SEQ ID NO: 3654; WAN0249S8; Start 113; Stop 137
ttgactttcctaatagagttgttca

SEQ ID NO: 360773 - DNA, 25 bp, Artificial
  probe
  misc_feature (1)..(25): SEQ ID NO: 3654; WAN0249S8; Start 114; Stop 138
tgactttcctaatagagttgttcat

SEQ ID NO: 360774 - DNA, 25 bp, Artificial
  probe
  misc_feature (1)..(25): SEQ ID NO: 3654; WAN0249S8; Start 280; Stop 304
ccttgtttacagactaatttcttga

SEQ ID NO: 360775 - DNA, 25 bp, Artificial
  probe
  misc_feature (1)..(25): SEQ ID NO: 3654; WAN0249S8; Start 279; Stop 303
tccttgtttacagactaatttcttg

SEQ ID NO: 360776 - DNA, 25 bp, Artificial
  probe
  misc_feature (1)..(25): SEQ ID NO: 3654; WAN0249S8; Start 184; Stop 208
aatagtgtgttgaggttgcagatgg

SEQ ID NO: 360777 - DNA, 25 bp, Artificial
  probe
  misc_feature (1)..(25): SEQ ID NO: 3654; WAN0249S8; Start 275; Stop 299
taggtccttgtttacagactaattt

SEQ ID NO: 360778 - DNA, 25 bp, Artificial
  probe
  misc_feature (1)..(25): SEQ ID NO: 3654; WAN0249S8; Start 274; Stop 298
ttaggtccttgtttacagactaatt

SEQ ID NO: 360779 - DNA, 25 bp, Artificial
  probe
  misc_feature (1)..(25): SEQ ID NO: 3654; WAN0249S8; Start 273; Stop 297
tttaggtccttgtttacagactaat

SEQ ID NO: 360780 - DNA, 25 bp, Artificial
  probe
  misc_feature (1)..(25): SEQ ID NO: 3654; WAN0249S8; Start 183; Stop 207
aaatagtgtgttgaggttgcagatg

SEQ ID NO: 360781 - DNA, 25 bp, Artificial
  probe
  misc_feature (1)..(25): SEQ ID NO: 3654; WAN0249S8; Start 112; Stop 136
tttgactttcctaatagagttgttc

SEQ ID NO: 360782 - DNA, 25 bp, Artificial
  probe
  misc_feature (1)..(25): SEQ ID NO: 3654; WAN0249S8; Start 278; Stop 302
gtccttgtttacagactaatttctt

SEQ ID NO: 360783 - DNA, 25 bp, Artificial
  probe
  misc_feature (1)..(25): SEQ ID NO: 3654; WAN0249S8; Start 185; Stop 209
atagtgtgttgaggttgcagatgga

SEQ ID NO: 360784 - DNA, 25 bp, Artificial
  probe
  misc_feature (1)..(25): SEQ ID NO: 3654; WAN0249S8; Start 111; Stop 135
atttgactttcctaatagagttgtt

SEQ ID NO: 360785 - DNA, 25 bp, Artificial
  probe
  misc_feature (1)..(25): SEQ ID NO: 3654; WAN0249S8; Start 270; Stop 294
tgttttaggtccttgtttacagact

SEQ ID NO: 360786 - DNA, 25 bp, Artificial
  probe
  misc_feature (1)..(25): SEQ ID NO: 3654; WAN0249S8; Start 110; Stop 134
aatttgactttcctaatagagttgt

SEQ ID NO: 360787 - DNA, 25 bp, Artificial
  probe
  misc_feature (1)..(25): SEQ ID NO: 3654; WAN0249S8; Start 269; Stop 293
ttgttttaggtccttgtttacagac

SEQ ID NO: 360788 - DNA, 25 bp, Artificial
  probe
  misc_feature (1)..(25): SEQ ID NO: 3654; WAN0249S8; Start 268; Stop 292
tttgttttaggtccttgtttacaga

SEQ ID NO: 360789 - DNA, 25 bp, Artificial
  probe
  misc_feature (1)..(25): SEQ ID NO: 3654; WAN0249S8; Start 186; Stop 210
tagtgtgttgaggttgcagatggaa

SEQ ID NO: 360790 - DNA, 25 bp, Artificial
  probe
  misc_feature (1)..(25): SEQ ID NO: 3654; WAN0249S8; Start 75; Stop 99
agtacgctgtagctgctaaaatatt

SEQ ID NO: 360791 - DNA, 25 bp, Artificial
  probe
  misc_feature (1)..(25): SEQ ID NO: 3654; WAN0249S8; Start 74; Stop 98
tagtacgctgtagctgctaaaatat

SEQ ID NO: 360792 - DNA, 25 bp, Artificial
  probe
  misc_feature (1)..(25): SEQ ID NO: 3654; WAN0249S8; Start 73; Stop 97
atagtacgctgtagctgctaaaata

SEQ ID NO: 360793 - DNA, 25 bp, Artificial
  probe
  misc_feature (1)..(25): SEQ ID NO: 3654; WAN0249S8; Start 72; Stop 96
aatagtacgctgtagctgctaaaat

SEQ ID NO: 360794 - DNA, 25 bp, Artificial
  probe
  misc_feature (1)..(25): SEQ ID NO: 3654; WAN0249S8; Start 115; Stop 139
gactttcctaatagagttgttcata

SEQ ID NO: 360795 - DNA, 25 bp, Artificial
  probe
  misc_feature (1)..(25): SEQ ID NO: 3654; WAN0249S8; Start 271; Stop 295
gttttaggtccttgtttacagacta

SEQ ID NO: 360796 - DNA, 25 bp, Artificial
  probe
  misc_feature (1)..(25): SEQ ID NO: 3654; WAN0249S8; Start 267; Stop 291
atttgttttaggtccttgtttacag

SEQ ID NO: 360797 - DNA, 25 bp, Artificial
  probe
  misc_feature (1)..(25): SEQ ID NO: 3654; WAN0249S8; Start 182; Stop 206
aaaatagtgtgttgaggttgcagat

SEQ ID NO: 360798 - DNA, 25 bp, Artificial
  probe
  misc_feature (1)..(25): SEQ ID NO: 3654; WAN0249S8; Start 272; Stop 296
ttttaggtccttgtttacagactaa

SEQ ID NO: 360799 - DNA, 25 bp, Artificial
  probe
  misc_feature (1)..(25): SEQ ID NO: 3654; WAN0249S8; Start 281; Stop 305
cttgtttacagactaatttcttgat

SEQ ID NO: 360800 - DNA, 25 bp, Artificial
  probe
  misc_feature (1)..(25): SEQ ID NO: 3654; WAN0249S8; Start 116; Stop 140
actttcctaatagagttgttcatat

SEQ ID NO: 360801 - DNA, 25 bp, Artificial
  probe
  misc_feature (1)..(25): SEQ ID NO: 3654; WAN0249S8; Start 181; Stop 205
caaaatagtgtgttgaggttgcaga

SEQ ID NO: 360802 - DNA, 25 bp, Artificial
  probe
  misc_feature (1)..(25): SEQ ID NO: 3654; WAN0249S8; Start 266; Stop 290
tatttgttttaggtccttgtttaca

SEQ ID NO: 360803 - DNA, 25 bp, Artificial
  probe
  misc_feature (1)..(25): SEQ ID NO: 3656; WAN0249DZ; Start 93; Stop 117
atttctcgctgtctctctcactatt

SEQ ID NO: 360804 - DNA, 25 bp, Artificial
  probe
  misc_feature (1)..(25): SEQ ID NO: 3656; WAN0249DZ; Start 94; Stop 118
tttctcgctgtctctctcactattt

SEQ ID NO: 360805 - DNA, 25 bp, Artificial
  probe
  misc_feature (1)..(25): SEQ ID NO: 3656; WAN0249DZ; Start 92; Stop 116
catttctcgctgtctctctcactat

SEQ ID NO: 360806 - DNA, 25 bp, Artificial
  probe
  misc_feature (1)..(25): SEQ ID NO: 3656; WAN0249DZ; Start 88; Stop 112
cttacatttctcgctgtctctctca

SEQ ID NO: 360807 - DNA, 25 bp, Artificial
  probe
  misc_feature (1)..(25): SEQ ID NO: 3656; WAN0249DZ; Start 89; Stop 113
ttacatttctcgctgtctctctcac

SEQ ID NO: 360808 - DNA, 25 bp, Artificial
  probe
  misc_feature (1)..(25): SEQ ID NO: 3656; WAN0249DZ; Start 6; Stop 30
acctccttatatacagacttctatt

SEQ ID NO: 360809 - DNA, 25 bp, Artificial
  probe
  misc_feature (1)..(25): SEQ ID NO: 3656; WAN0249DZ; Start 91; Stop 115
acatttctcgctgtctctctcacta

SEQ ID NO: 360810 - DNA, 25 bp, Artificial
  probe
  misc_feature (1)..(25): SEQ ID NO: 3656; WAN0249DZ; Start 90; Stop 114
tacatttctcgctgtctctctcact

SEQ ID NO: 360811 - DNA, 25 bp, Artificial
  probe
  misc_feature (1)..(25): SEQ ID NO: 3656; WAN0249DZ; Start 82; Stop 106
aaatcgcttacatttctcgctgtct

SEQ ID NO: 360812 - DNA, 25 bp, Artificial
  probe
  misc_feature (1)..(25): SEQ ID NO: 3656; WAN0249DZ; Start 95; Stop 119
ttctcgctgtctctctcactatttt

SEQ ID NO: 360813 - DNA, 25 bp, Artificial
  probe
  misc_feature (1)..(25): SEQ ID NO: 3656; WAN0249DZ; Start 87; Stop 111
gcttacatttctcgctgtctctctc

SEQ ID NO: 360814 - DNA, 25 bp, Artificial
  probe
  misc_feature (1)..(25): SEQ ID NO: 3656; WAN0249DZ; Start 83; Stop 107
aatcgcttacatttctcgctgtctc

SEQ ID NO: 360815 - DNA, 25 bp, Artificial
  probe
  misc_feature (1)..(25): SEQ ID NO: 3656; WAN0249DZ; Start 4; Stop 28
ttacctccttatatacagacttcta

SEQ ID NO: 360816 - DNA, 25 bp, Artificial
  probe
  misc_feature (1)..(25): SEQ ID NO: 3656; WAN0249DZ; Start 3; Stop 27
tttacctccttatatacagacttct

SEQ ID NO: 360817 - DNA, 25 bp, Artificial
  probe
  misc_feature (1)..(25): SEQ ID NO: 3656; WAN0249DZ; Start 57; Stop 81
gttccctgtaacacttttgaaataa

SEQ ID NO: 360818 - DNA, 25 bp, Artificial
  probe
  misc_feature (1)..(25): SEQ ID NO: 3656; WAN0249DZ; Start 5; Stop 29
tacctccttatatacagacttctat

SEQ ID NO: 360819 - DNA, 25 bp, Artificial
  probe
  misc_feature (1)..(25): SEQ ID NO: 3656; WAN0249DZ; Start 16; Stop 40
atacagacttctattatatcacgaa

SEQ ID NO: 360820 - DNA, 25 bp, Artificial
  probe
  misc_feature (1)..(25): SEQ ID NO: 3656; WAN0249DZ; Start 132; Stop 156
gtataataccaaagattgaggtgaa

SEQ ID NO: 360821 - DNA, 25 bp, Artificial
  probe
  misc_feature (1)..(25): SEQ ID NO: 3656; WAN0249DZ; Start 43; Stop 67
cctgaaattttcttgttccctgtaa

SEQ ID NO: 360822 - DNA, 25 bp, Artificial
  probe
  misc_feature (1)..(25): SEQ ID NO: 3656; WAN0249DZ; Start 42; Stop 66
acctgaaattttcttgttccctgta

SEQ ID NO: 360823 - DNA, 25 bp, Artificial
  probe
  misc_feature (1)..(25): SEQ ID NO: 3656; WAN0249DZ; Start 40; Stop 64
aaacctgaaattttcttgttccctg

SEQ ID NO: 360824 - DNA, 25 bp, Artificial
  probe
  misc_feature (1)..(25): SEQ ID NO: 3656; WAN0249DZ; Start 58; Stop 82
ttccctgtaacacttttgaaataaa

SEQ ID NO: 360825 - DNA, 25 bp, Artificial
  probe
  misc_feature (1)..(25): SEQ ID NO: 3656; WAN0249DZ; Start 134; Stop 158
ataataccaaagattgaggtgaatt

SEQ ID NO: 360826 - DNA, 25 bp, Artificial
  probe
  misc_feature (1)..(25): SEQ ID NO: 3656; WAN0249DZ; Start 81; Stop 105
aaaatcgcttacatttctcgctgtc

SEQ ID NO: 360827 - DNA, 25 bp, Artificial
  probe
  misc_feature (1)..(25): SEQ ID NO: 3656; WAN0249DZ; Start 84; Stop 108
atcgcttacatttctcgctgtctct

SEQ ID NO: 360828 - DNA, 25 bp, Artificial
  probe
  misc_feature (1)..(25): SEQ ID NO: 3656; WAN0249DZ; Start 44; Stop 68
ctgaaattttcttgttccctgtaac

SEQ ID NO: 360829 - DNA, 25 bp, Artificial
  probe
  misc_feature (1)..(25): SEQ ID NO: 3656; WAN0249DZ; Start 41; Stop 65
aacctgaaattttcttgttccctgt

SEQ ID NO: 360830 - DNA, 25 bp, Artificial
  probe
  misc_feature (1)..(25): SEQ ID NO: 3656; WAN0249DZ; Start 131; Stop 155
ggtataataccaaagattgaggtga

SEQ ID NO: 360831 - DNA, 25 bp, Artificial
  probe
  misc_feature (1)..(25): SEQ ID NO: 3656; WAN0249DZ; Start 39; Stop 63
aaaacctgaaattttcttgttccct

SEQ ID NO: 360832 - DNA, 25 bp, Artificial
  probe
  misc_feature (1)..(25): SEQ ID NO: 3656; WAN0249DZ; Start 22; Stop 46
acttctattatatcacgaaaacctg

SEQ ID NO: 360833 - DNA, 25 bp, Artificial
  probe
  misc_feature (1)..(25): SEQ ID NO: 3656; WAN0249DZ; Start 59; Stop 83
tccctgtaacacttttgaaataaaa

SEQ ID NO: 360834 - DNA, 25 bp, Artificial
  probe
  misc_feature (1)..(25): SEQ ID NO: 3656; WAN0249DZ; Start 2; Stop 26
atttacctccttatatacagacttc

SEQ ID NO: 360835 - DNA, 25 bp, Artificial
  probe
  misc_feature (1)..(25): SEQ ID NO: 3656; WAN0249DZ; Start 1; Stop 25
gatttacctccttatatacagactt

SEQ ID NO: 360836 - DNA, 25 bp, Artificial
  probe
  misc_feature (1)..(25): SEQ ID NO: 3658; WAN024AOL; Start 29; Stop 53
ataactgtctcctattttatcgaaa

SEQ ID NO: 360837 - DNA, 25 bp, Artificial
  probe
  misc_feature (1)..(25): SEQ ID NO: 3658; WAN024AOL; Start 28; Stop 52
aataactgtctcctattttatcgaa

SEQ ID NO: 360838 - DNA, 25 bp, Artificial
  probe
  misc_feature (1)..(25): SEQ ID NO: 3658; WAN024AOL; Start 30; Stop 54
taactgtctcctattttatcgaaaa

SEQ ID NO: 360839 - DNA, 25 bp, Artificial
  probe
  misc_feature (1)..(25): SEQ ID NO: 3658; WAN024AOL; Start 27; Stop 51
aaataactgtctcctattttatcga

SEQ ID NO: 360840 - DNA, 25 bp, Artificial
  probe
  misc_feature (1)..(25): SEQ ID NO: 3658; WAN024AOL; Start 26; Stop 50
aaaataactgtctcctattttatcg

SEQ ID NO: 360841 - DNA, 25 bp, Artificial
  probe
  misc_feature (1)..(25): SEQ ID NO: 3659; WAN024A33; Start 77; Stop 101
ctagacggattgttttgacaattct

SEQ ID NO: 360842 - DNA, 25 bp, Artificial
  probe
  misc_feature (1)..(25): SEQ ID NO: 3659; WAN024A33; Start 79; Stop 103
agacggattgttttgacaattctaa

SEQ ID NO: 360843 - DNA, 25 bp, Artificial
  probe
  misc_feature (1)..(25): SEQ ID NO: 3659; WAN024A33; Start 78; Stop 102
tagacggattgttttgacaattcta

SEQ ID NO: 360844 - DNA, 25 bp, Artificial
  probe
  misc_feature (1)..(25): SEQ ID NO: 3659; WAN024A33; Start 8; Stop 32
cctatttgcaatataaaagtttgac

SEQ ID NO: 360845 - DNA, 25 bp, Artificial
  probe
  misc_feature (1)..(25): SEQ ID NO: 3659; WAN024A33; Start 7; Stop 31
tcctatttgcaatataaaagtttga

SEQ ID NO: 360846 - DNA, 25 bp, Artificial
  probe
  misc_feature (1)..(25): SEQ ID NO: 3659; WAN024A33; Start 6; Stop 30
ctcctatttgcaatataaaagtttg

SEQ ID NO: 360847 - DNA, 25 bp, Artificial
  probe
  misc_feature (1)..(25): SEQ ID NO: 3659; WAN024A33; Start 5; Stop 29
tctcctatttgcaatataaaagttt

SEQ ID NO: 360848 - DNA, 25 bp, Artificial
  probe
  misc_feature (1)..(25): SEQ ID NO: 3659; WAN024A33; Start 4; Stop 28
ttctcctatttgcaatataaaagtt

SEQ ID NO: 360849 - DNA, 25 bp, Artificial
  probe
  misc_feature (1)..(25): SEQ ID NO: 3659; WAN024A33; Start 3; Stop 27
tttctcctatttgcaatataaaagt

SEQ ID NO: 360850 - DNA, 25 bp, Artificial
  probe
  misc_feature (1)..(25): SEQ ID NO: 3659; WAN024A33; Start 12; Stop 36
tttgcaatataaaagtttgacattt

SEQ ID NO: 360851 - DNA, 25 bp, Artificial
  probe
  misc_feature (1)..(25): SEQ ID NO: 3659; WAN024A33; Start 13; Stop 37
ttgcaatataaaagtttgacatttt

SEQ ID NO: 360852 - DNA, 25 bp, Artificial
  probe
  misc_feature (1)..(25): SEQ ID NO: 3660; WAN0249UL; Start 8; Stop 32
gacggtaggaatcattgaacataac

SEQ ID NO: 360853 - DNA, 25 bp, Artificial
  probe
  misc_feature (1)..(25): SEQ ID NO: 3660; WAN0249UL; Start 7; Stop 31
agacggtaggaatcattgaacataa

SEQ ID NO: 360854 - DNA, 25 bp, Artificial
  probe
  misc_feature (1)..(25): SEQ ID NO: 3660; WAN0249UL; Start 6; Stop 30
gagacggtaggaatcattgaacata

SEQ ID NO: 360855 - DNA, 25 bp, Artificial
  probe
  misc_feature (1)..(25): SEQ ID NO: 3660; WAN0249UL; Start 33; Stop 57
ctagccaacatcaatcacaatcatt

SEQ ID NO: 360856 - DNA, 25 bp, Artificial
  probe
  misc_feature (1)..(25): SEQ ID NO: 3660; WAN0249UL; Start 24; Stop 48
gaacataacctagccaacatcaatc

SEQ ID NO: 360857 - DNA, 25 bp, Artificial
  probe
  misc_feature (1)..(25): SEQ ID NO: 3660; WAN0249UL; Start 29; Stop 53
taacctagccaacatcaatcacaat

SEQ ID NO: 360858 - DNA, 25 bp, Artificial
  probe
  misc_feature (1)..(25): SEQ ID NO: 3660; WAN0249UL; Start 28; Stop 52
ataacctagccaacatcaatcacaa

SEQ ID NO: 360859 - DNA, 25 bp, Artificial
  probe
  misc_feature (1)..(25): SEQ ID NO: 3660; WAN0249UL; Start 25; Stop 49
aacataacctagccaacatcaatca

SEQ ID NO: 360860 - DNA, 25 bp, Artificial
  probe
  misc_feature (1)..(25): SEQ ID NO: 3660; WAN0249UL; Start 15; Stop 39
ggaatcattgaacataacctagcca

SEQ ID NO: 360861 - DNA, 25 bp, Artificial
  probe
  misc_feature (1)..(25): SEQ ID NO: 3660; WAN0249UL; Start 27; Stop 51
cataacctagccaacatcaatcaca

SEQ ID NO: 360862 - DNA, 25 bp, Artificial
  probe
  misc_feature (1)..(25): SEQ ID NO: 3660; WAN0249UL; Start 26; Stop 50
acataacctagccaacatcaatcac

SEQ ID NO: 360863 - DNA, 25 bp, Artificial
  probe
  misc_feature (1)..(25): SEQ ID NO: 3660; WAN0249UL; Start 20; Stop 44
cattgaacataacctagccaacatc

SEQ ID NO: 360864 - DNA, 25 bp, Artificial
  probe
  misc_feature (1)..(25): SEQ ID NO: 3660; WAN0249UL; Start 17; Stop 41
aatcattgaacataacctagccaac

SEQ ID NO: 360865 - DNA, 25 bp, Artificial
  probe
  misc_feature (1)..(25): SEQ ID NO: 3660; WAN0249UL; Start 19; Stop 43
tcattgaacataacctagccaacat

SEQ ID NO: 360866 - DNA, 25 bp, Artificial
  probe
  misc_feature (1)..(25): SEQ ID NO: 3660; WAN0249UL; Start 18; Stop 42
atcattgaacataacctagccaaca

SEQ ID NO: 360867 - DNA, 25 bp, Artificial
  probe
  misc_feature (1)..(25): SEQ ID NO: 3660; WAN0249UL; Start 16; Stop 40
gaatcattgaacataacctagccaa

SEQ ID NO: 360868 - DNA, 25 bp, Artificial
  probe
  misc_feature (1)..(25): SEQ ID NO: 3660; WAN0249UL; Start 32; Stop 56
cctagccaacatcaatcacaatcat

SEQ ID NO: 360869 - DNA, 25 bp, Artificial
  probe
  misc_feature (1)..(25): SEQ ID NO: 3660; WAN0249UL; Start 23; Stop 47
tgaacataacctagccaacatcaat

SEQ ID NO: 360870 - DNA, 25 bp, Artificial
  probe
  misc_feature (1)..(25): SEQ ID NO: 3660; WAN0249UL; Start 21; Stop 45
attgaacataacctagccaacatca

SEQ ID NO: 360871 - DNA, 25 bp, Artificial
  probe
  misc_feature (1)..(25): SEQ ID NO: 3660; WAN0249UL; Start 149; Stop 173
tcctgatagagttgttcacatctta

SEQ ID NO: 360872 - DNA, 25 bp, Artificial
  probe
  misc_feature (1)..(25): SEQ ID NO: 3660; WAN0249UL; Start 30; Stop 54
aacctagccaacatcaatcacaatc

SEQ ID NO: 360873 - DNA, 25 bp, Artificial
  probe
  misc_feature (1)..(25): SEQ ID NO: 3660; WAN0249UL; Start 5; Stop 29
tgagacggtaggaatcattgaacat

SEQ ID NO: 360874 - DNA, 25 bp, Artificial
  probe
  misc_feature (1)..(25): SEQ ID NO: 3660; WAN0249UL; Start 4; Stop 28
ttgagacggtaggaatcattgaaca

SEQ ID NO: 360875 - DNA, 25 bp, Artificial
  probe
  misc_feature (1)..(25): SEQ ID NO: 3660; WAN0249UL; Start 14; Stop 38
aggaatcattgaacataacctagcc

SEQ ID NO: 360876 - DNA, 25 bp, Artificial
  probe
  misc_feature (1)..(25): SEQ ID NO: 3660; WAN0249UL; Start 150; Stop 174
cctgatagagttgttcacatcttat

SEQ ID NO: 360877 - DNA, 25 bp, Artificial
  probe
  misc_feature (1)..(25): SEQ ID NO: 3660; WAN0249UL; Start 10; Stop 34
cggtaggaatcattgaacataacct

SEQ ID NO: 360878 - DNA, 25 bp, Artificial
  probe
  misc_feature (1)..(25): SEQ ID NO: 3660; WAN0249UL; Start 31; Stop 55
acctagccaacatcaatcacaatca

SEQ ID NO: 360879 - DNA, 25 bp, Artificial
  probe
  misc_feature (1)..(25): SEQ ID NO: 3660; WAN0249UL; Start 9; Stop 33
acggtaggaatcattgaacataacc

SEQ ID NO: 360880 - DNA, 25 bp, Artificial
  probe
  misc_feature (1)..(25): SEQ ID NO: 3660; WAN0249UL; Start 34; Stop 58
tagccaacatcaatcacaatcattt

SEQ ID NO: 360881 - DNA, 25 bp, Artificial
  probe
  misc_feature (1)..(25): SEQ ID NO: 3660; WAN0249UL; Start 207; Stop 231
tataagatttgcccatcagacgaaa

SEQ ID NO: 360882 - DNA, 25 bp, Artificial
  probe
  misc_feature (1)..(25): SEQ ID NO: 3660; WAN0249UL; Start 214; Stop 238
tttgcccatcagacgaaatataatg

SEQ ID NO: 360883 - DNA, 25 bp, Artificial
  probe
  misc_feature (1)..(25): SEQ ID NO: 3660; WAN0249UL; Start 305; Stop 329
tcaatttgtcctgttcttgtttcat

SEQ ID NO: 360884 - DNA, 25 bp, Artificial
  probe
  misc_feature (1)..(25): SEQ ID NO: 3660; WAN0249UL; Start 304; Stop 328
atcaatttgtcctgttcttgtttca

SEQ ID NO: 360885 - DNA, 25 bp, Artificial
  probe
  misc_feature (1)..(25): SEQ ID NO: 3661; WAN0249EA; Start 108; Stop 132
taaacctccactccctcagtattta

SEQ ID NO: 360886 - DNA, 25 bp, Artificial
  probe
  misc_feature (1)..(25): SEQ ID NO: 3661; WAN0249EA; Start 107; Stop 131
ttaaacctccactccctcagtattt

SEQ ID NO: 360887 - DNA, 25 bp, Artificial
  probe
  misc_feature (1)..(25): SEQ ID NO: 3661; WAN0249EA; Start 80; Stop 104
agatccaactcttacaaatgtcaga

SEQ ID NO: 360888 - DNA, 25 bp, Artificial
  probe
  misc_feature (1)..(25): SEQ ID NO: 3661; WAN0249EA; Start 78; Stop 102
ggagatccaactcttacaaatgtca

SEQ ID NO: 360889 - DNA, 25 bp, Artificial
  probe
  misc_feature (1)..(25): SEQ ID NO: 3661; WAN0249EA; Start 109; Stop 133
aaacctccactccctcagtatttac

SEQ ID NO: 360890 - DNA, 25 bp, Artificial
  probe
  misc_feature (1)..(25): SEQ ID NO: 3661; WAN0249EA; Start 79; Stop 103
gagatccaactcttacaaatgtcag

SEQ ID NO: 360891 - DNA, 25 bp, Artificial
  probe
  misc_feature (1)..(25): SEQ ID NO: 3661; WAN0249EA; Start 77; Stop 101
gggagatccaactcttacaaatgtc

SEQ ID NO: 360892 - DNA, 25 bp, Artificial
  probe
  misc_feature (1)..(25): SEQ ID NO: 3661; WAN0249EA; Start 110; Stop 134
aacctccactccctcagtatttact

SEQ ID NO: 360893 - DNA, 25 bp, Artificial
  probe
  misc_feature (1)..(25): SEQ ID NO: 3661; WAN0249EA; Start 106; Stop 130
tttaaacctccactccctcagtatt

SEQ ID NO: 360894 - DNA, 25 bp, Artificial
  probe
  misc_feature (1)..(25): SEQ ID NO: 3661; WAN0249EA; Start 61; Stop 85
aaacaaaatagaagaggggagatcc

SEQ ID NO: 360895 - DNA, 25 bp, Artificial
  probe
  misc_feature (1)..(25): SEQ ID NO: 3661; WAN0249EA; Start 65; Stop 89
aaaatagaagaggggagatccaact

SEQ ID NO: 360896 - DNA, 25 bp, Artificial
  probe
  misc_feature (1)..(25): SEQ ID NO: 3661; WAN0249EA; Start 64; Stop 88
caaaatagaagaggggagatccaac

SEQ ID NO: 360897 - DNA, 25 bp, Artificial
  probe
  misc_feature (1)..(25): SEQ ID NO: 3661; WAN0249EA; Start 63; Stop 87
acaaaatagaagaggggagatccaa

SEQ ID NO: 360898 - DNA, 25 bp, Artificial
  probe
  misc_feature (1)..(25): SEQ ID NO: 3661; WAN0249EA; Start 62; Stop 86
aacaaaatagaagaggggagatcca

SEQ ID NO: 360899 - DNA, 25 bp, Artificial
  probe
  misc_feature (1)..(25): SEQ ID NO: 3661; WAN0249EA; Start 60; Stop 84
aaaacaaaatagaagaggggagatc

SEQ ID NO: 360900 - DNA, 25 bp, Artificial
  probe
  misc_feature (1)..(25): SEQ ID NO: 3661; WAN0249EA; Start 81; Stop 105
gatccaactcttacaaatgtcagag

SEQ ID NO: 360901 - DNA, 25 bp, Artificial
  probe
  misc_feature (1)..(25): SEQ ID NO: 3661; WAN0249EA; Start 66; Stop 90
aaatagaagaggggagatccaactc

SEQ ID NO: 360902 - DNA, 25 bp, Artificial
  probe
  misc_feature (1)..(25): SEQ ID NO: 3661; WAN0249EA; Start 74; Stop 98
gaggggagatccaactcttacaaat

SEQ ID NO: 360903 - DNA, 25 bp, Artificial
  probe
  misc_feature (1)..(25): SEQ ID NO: 3661; WAN0249EA; Start 75; Stop 99
aggggagatccaactcttacaaatg

SEQ ID NO: 360904 - DNA, 25 bp, Artificial
  probe
  misc_feature (1)..(25): SEQ ID NO: 3661; WAN0249EA; Start 76; Stop 100
ggggagatccaactcttacaaatgt

SEQ ID NO: 360905 - DNA, 25 bp, Artificial
  probe
  misc_feature (1)..(25): SEQ ID NO: 3661; WAN0249EA; Start 67; Stop 91
aatagaagaggggagatccaactct

SEQ ID NO: 360906 - DNA, 25 bp, Artificial
  probe
  misc_feature (1)..(25): SEQ ID NO: 3661; WAN0249EA; Start 73; Stop 97
agaggggagatccaactcttacaaa

SEQ ID NO: 360907 - DNA, 25 bp, Artificial
  probe
  misc_feature (1)..(25): SEQ ID NO: 3661; WAN0249EA; Start 111; Stop 135
acctccactccctcagtatttactg

SEQ ID NO: 360908 - DNA, 25 bp, Artificial
  probe
  misc_feature (1)..(25): SEQ ID NO: 3662; WAN024AHI; Start 42; Stop 66
actatactgggatactgttctgaaa

SEQ ID NO: 360909 - DNA, 25 bp, Artificial
  probe
  misc_feature (1)..(25): SEQ ID NO: 3662; WAN024AHI; Start 41; Stop 65
aactatactgggatactgttctgaa

SEQ ID NO: 360910 - DNA, 25 bp, Artificial
  probe
  misc_feature (1)..(25): SEQ ID NO: 3662; WAN024AHI; Start 40; Stop 64
taactatactgggatactgttctga

SEQ ID NO: 360911 - DNA, 25 bp, Artificial
  probe
  misc_feature (1)..(25): SEQ ID NO: 3662; WAN024AHI; Start 39; Stop 63
ttaactatactgggatactgttctg

SEQ ID NO: 360912 - DNA, 25 bp, Artificial
  probe
  misc_feature (1)..(25): SEQ ID NO: 3662; WAN024AHI; Start 67; Stop 91
atccattttgcgaaagtagagattt

SEQ ID NO: 360913 - DNA, 25 bp, Artificial
  probe
  misc_feature (1)..(25): SEQ ID NO: 3662; WAN024AHI; Start 38; Stop 62
tttaactatactgggatactgttct

SEQ ID NO: 360914 - DNA, 25 bp, Artificial
  probe
  misc_feature (1)..(25): SEQ ID NO: 3662; WAN024AHI; Start 68; Stop 92
tccattttgcgaaagtagagattta

SEQ ID NO: 360915 - DNA, 25 bp, Artificial
  probe
  misc_feature (1)..(25): SEQ ID NO: 3662; WAN024AHI; Start 65; Stop 89
aaatccattttgcgaaagtagagat

SEQ ID NO: 360916 - DNA, 25 bp, Artificial
  probe
  misc_feature (1)..(25): SEQ ID NO: 3662; WAN024AHI; Start 69; Stop 93
ccattttgcgaaagtagagatttac

SEQ ID NO: 360917 - DNA, 25 bp, Artificial
  probe
  misc_feature (1)..(25): SEQ ID NO: 3662; WAN024AHI; Start 45; Stop 69
atactgggatactgttctgaaaatc

SEQ ID NO: 360918 - DNA, 25 bp, Artificial
  probe
  misc_feature (1)..(25): SEQ ID NO: 3662; WAN024AHI; Start 43; Stop 67
ctatactgggatactgttctgaaaa

SEQ ID NO: 360919 - DNA, 25 bp, Artificial
  probe
  misc_feature (1)..(25): SEQ ID NO: 3662; WAN024AHI; Start 62; Stop 86
tgaaaatccattttgcgaaagtaga

SEQ ID NO: 360920 - DNA, 25 bp, Artificial
  probe
  misc_feature (1)..(25): SEQ ID NO: 3662; WAN024AHI; Start 60; Stop 84
tctgaaaatccattttgcgaaagta

SEQ ID NO: 360921 - DNA, 25 bp, Artificial
  probe
  misc_feature (1)..(25): SEQ ID NO: 3662; WAN024AHI; Start 58; Stop 82
gttctgaaaatccattttgcgaaag

SEQ ID NO: 360922 - DNA, 25 bp, Artificial
  probe
  misc_feature (1)..(25): SEQ ID NO: 3662; WAN024AHI; Start 59; Stop 83
ttctgaaaatccattttgcgaaagt

SEQ ID NO: 360923 - DNA, 25 bp, Artificial
  probe
  misc_feature (1)..(25): SEQ ID NO: 3662; WAN024AHI; Start 66; Stop 90
aatccattttgcgaaagtagagatt

SEQ ID NO: 360924 - DNA, 25 bp, Artificial
  probe
  misc_feature (1)..(25): SEQ ID NO: 3662; WAN024AHI; Start 64; Stop 88
aaaatccattttgcgaaagtagaga

SEQ ID NO: 360925 - DNA, 25 bp, Artificial
  probe
  misc_feature (1)..(25): SEQ ID NO: 3662; WAN024AHI; Start 61; Stop 85
ctgaaaatccattttgcgaaagtag

SEQ ID NO: 360926 - DNA, 25 bp, Artificial
  probe
  misc_feature (1)..(25): SEQ ID NO: 3662; WAN024AHI; Start 54; Stop 78
tactgttctgaaaatccattttgcg

SEQ ID NO: 360927 - DNA, 25 bp, Artificial
  probe
  misc_feature (1)..(25): SEQ ID NO: 3662; WAN024AHI; Start 63; Stop 87
gaaaatccattttgcgaaagtagag

SEQ ID NO: 360928 - DNA, 25 bp, Artificial
  probe
  misc_feature (1)..(25): SEQ ID NO: 3662; WAN024AHI; Start 57; Stop 81
tgttctgaaaatccattttgcgaaa

SEQ ID NO: 360929 - DNA, 25 bp, Artificial
  probe
  misc_feature (1)..(25): SEQ ID NO: 3662; WAN024AHI; Start 56; Stop 80
ctgttctgaaaatccattttgcgaa

SEQ ID NO: 360930 - DNA, 25 bp, Artificial
  probe
  misc_feature (1)..(25): SEQ ID NO: 3662; WAN024AHI; Start 44; Stop 68
tatactgggatactgttctgaaaat

SEQ ID NO: 360931 - DNA, 25 bp, Artificial
  probe
  misc_feature (1)..(25): SEQ ID NO: 3662; WAN024AHI; Start 53; Stop 77
atactgttctgaaaatccattttgc

SEQ ID NO: 360932 - DNA, 25 bp, Artificial
  probe
  misc_feature (1)..(25): SEQ ID NO: 3662; WAN024AHI; Start 55; Stop 79
actgttctgaaaatccattttgcga

SEQ ID NO: 360933 - DNA, 25 bp, Artificial
  probe
  misc_feature (1)..(25): SEQ ID NO: 3662; WAN024AHI; Start 52; Stop 76
gatactgttctgaaaatccattttg

SEQ ID NO: 360934 - DNA, 25 bp, Artificial
  probe
  misc_feature (1)..(25): SEQ ID NO: 3662; WAN024AHI; Start 37; Stop 61
ttttaactatactgggatactgttc

SEQ ID NO: 360935 - DNA, 25 bp, Artificial
  probe
  misc_feature (1)..(25): SEQ ID NO: 3662; WAN024AHI; Start 49; Stop 73
tgggatactgttctgaaaatccatt

SEQ ID NO: 360936 - DNA, 25 bp, Artificial
  probe
  misc_feature (1)..(25): SEQ ID NO: 3662; WAN024AHI; Start 46; Stop 70
tactgggatactgttctgaaaatcc

SEQ ID NO: 360937 - DNA, 25 bp, Artificial
  probe
  misc_feature (1)..(25): SEQ ID NO: 3662; WAN024AHI; Start 48; Stop 72
ctgggatactgttctgaaaatccat

SEQ ID NO: 360938 - DNA, 25 bp, Artificial
  probe
  misc_feature (1)..(25): SEQ ID NO: 3662; WAN024AHI; Start 50; Stop 74
gggatactgttctgaaaatccattt

SEQ ID NO: 360939 - DNA, 25 bp, Artificial
  probe
  misc_feature (1)..(25): SEQ ID NO: 3662; WAN024AHI; Start 47; Stop 71
actgggatactgttctgaaaatcca

SEQ ID NO: 360940 - DNA, 25 bp, Artificial
  probe
  misc_feature (1)..(25): SEQ ID NO: 3662; WAN024AHI; Start 51; Stop 75
ggatactgttctgaaaatccatttt

SEQ ID NO: 360941 - DNA, 25 bp, Artificial
  probe
  misc_feature (1)..(25): SEQ ID NO: 3663; WAN024AN3; Start 67; Stop 91
cgcttcctctcaactattactcata

SEQ ID NO: 360942 - DNA, 25 bp, Artificial
  probe
  misc_feature (1)..(25): SEQ ID NO: 3663; WAN024AN3; Start 66; Stop 90
acgcttcctctcaactattactcat

SEQ ID NO: 360943 - DNA, 25 bp, Artificial
  probe
  misc_feature (1)..(25): SEQ ID NO: 3663; WAN024AN3; Start 65; Stop 89
aacgcttcctctcaactattactca

SEQ ID NO: 360944 - DNA, 25 bp, Artificial
  probe
  misc_feature (1)..(25): SEQ ID NO: 3663; WAN024AN3; Start 68; Stop 92
gcttcctctcaactattactcataa

SEQ ID NO: 360945 - DNA, 25 bp, Artificial
  probe
  misc_feature (1)..(25): SEQ ID NO: 3663; WAN024AN3; Start 64; Stop 88
aaacgcttcctctcaactattactc

SEQ ID NO: 360946 - DNA, 25 bp, Artificial
  probe
  misc_feature (1)..(25): SEQ ID NO: 3663; WAN024AN3; Start 63; Stop 87
aaaacgcttcctctcaactattact

SEQ ID NO: 360947 - DNA, 25 bp, Artificial
  probe
  misc_feature (1)..(25): SEQ ID NO: 3663; WAN024AN3; Start 69; Stop 93
cttcctctcaactattactcataaa

SEQ ID NO: 360948 - DNA, 25 bp, Artificial
  probe
  misc_feature (1)..(25): SEQ ID NO: 3663; WAN024AN3; Start 36; Stop 60
agttcctcttttcttttgcttaaaa

SEQ ID NO: 360949 - DNA, 25 bp, Artificial
  probe
  misc_feature (1)..(25): SEQ ID NO: 3663; WAN024AN3; Start 96; Stop 120
tcaccgatttatgataaaatggaaa

SEQ ID NO: 360950 - DNA, 25 bp, Artificial
  probe
  misc_feature (1)..(25): SEQ ID NO: 3663; WAN024AN3; Start 37; Stop 61
gttcctcttttcttttgcttaaaat

SEQ ID NO: 360951 - DNA, 25 bp, Artificial
  probe
  misc_feature (1)..(25): SEQ ID NO: 3663; WAN024AN3; Start 97; Stop 121
caccgatttatgataaaatggaaat

SEQ ID NO: 360952 - DNA, 25 bp, Artificial
  probe
  misc_feature (1)..(25): SEQ ID NO: 3663; WAN024AN3; Start 95; Stop 119
atcaccgatttatgataaaatggaa

SEQ ID NO: 360953 - DNA, 25 bp, Artificial
  probe
  misc_feature (1)..(25): SEQ ID NO: 3663; WAN024AN3; Start 94; Stop 118
aatcaccgatttatgataaaatgga

SEQ ID NO: 360954 - DNA, 25 bp, Artificial
  probe
  misc_feature (1)..(25): SEQ ID NO: 3663; WAN024AN3; Start 111; Stop 135
aaaatggaaatagaaagttgagatt

SEQ ID NO: 360955 - DNA, 25 bp, Artificial
  probe
  misc_feature (1)..(25): SEQ ID NO: 3663; WAN024AN3; Start 70; Stop 94
ttcctctcaactattactcataaaa

SEQ ID NO: 360956 - DNA, 25 bp, Artificial
  probe
  misc_feature (1)..(25): SEQ ID NO: 3663; WAN024AN3; Start 39; Stop 63
tcctcttttcttttgcttaaaataa

SEQ ID NO: 360957 - DNA, 25 bp, Artificial
  probe
  misc_feature (1)..(25): SEQ ID NO: 3663; WAN024AN3; Start 38; Stop 62
ttcctcttttcttttgcttaaaata

SEQ ID NO: 360958 - DNA, 25 bp, Artificial
  probe
  misc_feature (1)..(25): SEQ ID NO: 3663; WAN024AN3; Start 40; Stop 64
cctcttttcttttgcttaaaataaa

SEQ ID NO: 360959 - DNA, 25 bp, Artificial
  probe
  misc_feature (1)..(25): SEQ ID NO: 3663; WAN024AN3; Start 93; Stop 117
aaatcaccgatttatgataaaatgg

SEQ ID NO: 360960 - DNA, 25 bp, Artificial
  probe
  misc_feature (1)..(25): SEQ ID NO: 3664; WAN024AKS; Start 44; Stop 68
actttctctctgtttatttcaacga

SEQ ID NO: 360961 - DNA, 25 bp, Artificial
  probe
  misc_feature (1)..(25): SEQ ID NO: 3664; WAN024AKS; Start 43; Stop 67
gactttctctctgtttatttcaacg

SEQ ID NO: 360962 - DNA, 25 bp, Artificial
  probe
  misc_feature (1)..(25): SEQ ID NO: 3664; WAN024AKS; Start 42; Stop 66
cgactttctctctgtttatttcaac

SEQ ID NO: 360963 - DNA, 25 bp, Artificial
  probe
  misc_feature (1)..(25): SEQ ID NO: 3664; WAN024AKS; Start 40; Stop 64
ctcgactttctctctgtttatttca

SEQ ID NO: 360964 - DNA, 25 bp, Artificial
  probe
  misc_feature (1)..(25): SEQ ID NO: 3664; WAN024AKS; Start 39; Stop 63
actcgactttctctctgtttatttc

SEQ ID NO: 360965 - DNA, 25 bp, Artificial
  probe
  misc_feature (1)..(25): SEQ ID NO: 3664; WAN024AKS; Start 41; Stop 65
tcgactttctctctgtttatttcaa

SEQ ID NO: 360966 - DNA, 25 bp, Artificial
  probe
  misc_feature (1)..(25): SEQ ID NO: 3664; WAN024AKS; Start 38; Stop 62
aactcgactttctctctgtttattt

SEQ ID NO: 360967 - DNA, 25 bp, Artificial
  probe
  misc_feature (1)..(25): SEQ ID NO: 3664; WAN024AKS; Start 35; Stop 59
cgaaactcgactttctctctgttta

SEQ ID NO: 360968 - DNA, 25 bp, Artificial
  probe
  misc_feature (1)..(25): SEQ ID NO: 3664; WAN024AKS; Start 36; Stop 60
gaaactcgactttctctctgtttat

SEQ ID NO: 360969 - DNA, 25 bp, Artificial
  probe
  misc_feature (1)..(25): SEQ ID NO: 3664; WAN024AKS; Start 37; Stop 61
aaactcgactttctctctgtttatt

SEQ ID NO: 360970 - DNA, 25 bp, Artificial
  probe
  misc_feature (1)..(25): SEQ ID NO: 3664; WAN024AKS; Start 34; Stop 58
ccgaaactcgactttctctctgttt

SEQ ID NO: 360971 - DNA, 25 bp, Artificial
  probe
  misc_feature (1)..(25): SEQ ID NO: 3664; WAN024AKS; Start 30; Stop 54
aaagccgaaactcgactttctctct

SEQ ID NO: 360972 - DNA, 25 bp, Artificial
  probe
  misc_feature (1)..(25): SEQ ID NO: 3664; WAN024AKS; Start 31; Stop 55
aagccgaaactcgactttctctctg

SEQ ID NO: 360973 - DNA, 25 bp, Artificial
  probe
  misc_feature (1)..(25): SEQ ID NO: 3664; WAN024AKS; Start 29; Stop 53
aaaagccgaaactcgactttctctc

SEQ ID NO: 360974 - DNA, 25 bp, Artificial
  probe
  misc_feature (1)..(25): SEQ ID NO: 3664; WAN024AKS; Start 33; Stop 57
gccgaaactcgactttctctctgtt

SEQ ID NO: 360975 - DNA, 25 bp, Artificial
  probe
  misc_feature (1)..(25): SEQ ID NO: 3665; WAN024ACO; Start 353; Stop 377
caatggactacgatacttgttgaca

SEQ ID NO: 360976 - DNA, 25 bp, Artificial
  probe
  misc_feature (1)..(25): SEQ ID NO: 3665; WAN024ACO; Start 354; Stop 378
aatggactacgatacttgttgacaa

SEQ ID NO: 360977 - DNA, 25 bp, Artificial
  probe
  misc_feature (1)..(25): SEQ ID NO: 3665; WAN024ACO; Start 352; Stop 376
ccaatggactacgatacttgttgac

SEQ ID NO: 360978 - DNA, 25 bp, Artificial
  probe
  misc_feature (1)..(25): SEQ ID NO: 3665; WAN024ACO; Start 214; Stop 238
ggctgattcttgagtaatagttaga

SEQ ID NO: 360979 - DNA, 25 bp, Artificial
  probe
  misc_feature (1)..(25): SEQ ID NO: 3665; WAN024ACO; Start 396; Stop 420
tacggaatagctctcgataatagga

SEQ ID NO: 360980 - DNA, 25 bp, Artificial
  probe
  misc_feature (1)..(25): SEQ ID NO: 3665; WAN024ACO; Start 395; Stop 419
ctacggaatagctctcgataatagg

SEQ ID NO: 360981 - DNA, 25 bp, Artificial
  probe
  misc_feature (1)..(25): SEQ ID NO: 3665; WAN024ACO; Start 268; Stop 292
agacctgatacagaagagaactatt

SEQ ID NO: 360982 - DNA, 25 bp, Artificial
  probe
  misc_feature (1)..(25): SEQ ID NO: 3665; WAN024ACO; Start 267; Stop 291
aagacctgatacagaagagaactat

SEQ ID NO: 360983 - DNA, 25 bp, Artificial
  probe
  misc_feature (1)..(25): SEQ ID NO: 3665; WAN024ACO; Start 269; Stop 293
gacctgatacagaagagaactattc

SEQ ID NO: 360984 - DNA, 25 bp, Artificial
  probe
  misc_feature (1)..(25): SEQ ID NO: 3665; WAN024ACO; Start 394; Stop 418
tctacggaatagctctcgataatag

SEQ ID NO: 360985 - DNA, 25 bp, Artificial
  probe
  misc_feature (1)..(25): SEQ ID NO: 3665; WAN024ACO; Start 239; Stop 263
gtgtgattaatactactctggttgt

SEQ ID NO: 360986 - DNA, 25 bp, Artificial
  probe
  misc_feature (1)..(25): SEQ ID NO: 3665; WAN024ACO; Start 295; Stop 319
tctagttaagagtaagttcgttgtt

SEQ ID NO: 360987 - DNA, 25 bp, Artificial
  probe
  misc_feature (1)..(25): SEQ ID NO: 3665; WAN024ACO; Start 294; Stop 318
ttctagttaagagtaagttcgttgt

SEQ ID NO: 360988 - DNA, 25 bp, Artificial
  probe
  misc_feature (1)..(25): SEQ ID NO: 3665; WAN024ACO; Start 211; Stop 235
ttgggctgattcttgagtaatagtt

SEQ ID NO: 360989 - DNA, 25 bp, Artificial
  probe
  misc_feature (1)..(25): SEQ ID NO: 3665; WAN024ACO; Start 205; Stop 229
tgtttattgggctgattcttgagta

SEQ ID NO: 360990 - DNA, 25 bp, Artificial
  probe
  misc_feature (1)..(25): SEQ ID NO: 3665; WAN024ACO; Start 203; Stop 227
attgtttattgggctgattcttgag

SEQ ID NO: 360991 - DNA, 25 bp, Artificial
  probe
  misc_feature (1)..(25): SEQ ID NO: 3665; WAN024ACO; Start 210; Stop 234
attgggctgattcttgagtaatagt

SEQ ID NO: 360992 - DNA, 25 bp, Artificial
  probe
  misc_feature (1)..(25): SEQ ID NO: 3665; WAN024ACO; Start 206; Stop 230
gtttattgggctgattcttgagtaa

SEQ ID NO: 360993 - DNA, 25 bp, Artificial
  probe
  misc_feature (1)..(25): SEQ ID NO: 3665; WAN024ACO; Start 212; Stop 236
tgggctgattcttgagtaatagtta

SEQ ID NO: 360994 - DNA, 25 bp, Artificial
  probe
  misc_feature (1)..(25): SEQ ID NO: 3665; WAN024ACO; Start 204; Stop 228
ttgtttattgggctgattcttgagt

SEQ ID NO: 360995 - DNA, 25 bp, Artificial
  probe
  misc_feature (1)..(25): SEQ ID NO: 3665; WAN024ACO; Start 393; Stop 417
ttctacggaatagctctcgataata

SEQ ID NO: 360996 - DNA, 25 bp, Artificial
  probe
  misc_feature (1)..(25): SEQ ID NO: 3665; WAN024ACO; Start 328; Stop 352
aaatgaaatagaaggaaggtgagtc

SEQ ID NO: 360997 - DNA, 25 bp, Artificial
  probe
  misc_feature (1)..(25): SEQ ID NO: 3665; WAN024ACO; Start 327; Stop 351
gaaatgaaatagaaggaaggtgagt

SEQ ID NO: 360998 - DNA, 25 bp, Artificial
  probe
  misc_feature (1)..(25): SEQ ID NO: 3665; WAN024ACO; Start 326; Stop 350
tgaaatgaaatagaaggaaggtgag

SEQ ID NO: 360999 - DNA, 25 bp, Artificial
  probe
  misc_feature (1)..(25): SEQ ID NO: 3665; WAN024ACO; Start 213; Stop 237
gggctgattcttgagtaatagttag

SEQ ID NO: 361000 - DNA, 25 bp, Artificial
  probe
  misc_feature (1)..(25): SEQ ID NO: 3665; WAN024ACO; Start 202; Stop 226
tattgtttattgggctgattcttga

SEQ ID NO: 361001 - DNA, 25 bp, Artificial
  probe
  misc_feature (1)..(25): SEQ ID NO: 3665; WAN024ACO; Start 397; Stop 421
acggaatagctctcgataataggag

SEQ ID NO: 361002 - DNA, 25 bp, Artificial
  probe
  misc_feature (1)..(25): SEQ ID NO: 3665; WAN024ACO; Start 293; Stop 317
cttctagttaagagtaagttcgttg

SEQ ID NO: 361003 - DNA, 25 bp, Artificial
  probe
  misc_feature (1)..(25): SEQ ID NO: 3665; WAN024ACO; Start 334; Stop 358
aatagaaggaaggtgagtccaatgg

SEQ ID NO: 361004 - DNA, 25 bp, Artificial
  probe
  misc_feature (1)..(25): SEQ ID NO: 3665; WAN024ACO; Start 240; Stop 264
tgtgattaatactactctggttgtt

SEQ ID NO: 361005 - DNA, 25 bp, Artificial
  probe
  misc_feature (1)..(25): SEQ ID NO: 3665; WAN024ACO; Start 207; Stop 231
tttattgggctgattcttgagtaat

SEQ ID NO: 361006 - DNA, 25 bp, Artificial
  probe
  misc_feature (1)..(25): SEQ ID NO: 3665; WAN024ACO; Start 238; Stop 262
agtgtgattaatactactctggttg

SEQ ID NO: 361007 - DNA, 25 bp, Artificial
  probe
  misc_feature (1)..(25): SEQ ID NO: 3665; WAN024ACO; Start 247; Stop 271
aatactactctggttgttcaaagac

SEQ ID NO: 361008 - DNA, 25 bp, Artificial
  probe
  misc_feature (1)..(25): SEQ ID NO: 3666; WAN024ALZ; Start 105; Stop 129
taaatcagttccatcactttcacca

SEQ ID NO: 361009 - DNA, 25 bp, Artificial
  probe
  misc_feature (1)..(25): SEQ ID NO: 3666; WAN024ALZ; Start 104; Stop 128
ataaatcagttccatcactttcacc

SEQ ID NO: 361010 - DNA, 25 bp, Artificial
  probe
  misc_feature (1)..(25): SEQ ID NO: 3666; WAN024ALZ; Start 106; Stop 130
aaatcagttccatcactttcaccac

SEQ ID NO: 361011 - DNA, 25 bp, Artificial
  probe
  misc_feature (1)..(25): SEQ ID NO: 3666; WAN024ALZ; Start 103; Stop 127
gataaatcagttccatcactttcac

SEQ ID NO: 361012 - DNA, 25 bp, Artificial
  probe
  misc_feature (1)..(25): SEQ ID NO: 3666; WAN024ALZ; Start 102; Stop 126
tgataaatcagttccatcactttca

SEQ ID NO: 361013 - DNA, 25 bp, Artificial
  probe
  misc_feature (1)..(25): SEQ ID NO: 3666; WAN024ALZ; Start 133; Stop 157
cgaaagaagcagatgacttcaaatt

SEQ ID NO: 361014 - DNA, 25 bp, Artificial
  probe
  misc_feature (1)..(25): SEQ ID NO: 3666; WAN024ALZ; Start 135; Stop 159
aaagaagcagatgacttcaaattga

SEQ ID NO: 361015 - DNA, 25 bp, Artificial
  probe
  misc_feature (1)..(25): SEQ ID NO: 3666; WAN024ALZ; Start 134; Stop 158
gaaagaagcagatgacttcaaattg

SEQ ID NO: 361016 - DNA, 25 bp, Artificial
  probe
  misc_feature (1)..(25): SEQ ID NO: 3666; WAN024ALZ; Start 107; Stop 131
aatcagttccatcactttcaccacg

SEQ ID NO: 361017 - DNA, 25 bp, Artificial
  probe
  misc_feature (1)..(25): SEQ ID NO: 3666; WAN024ALZ; Start 146; Stop 170
tgacttcaaattgaacttcgtttca

SEQ ID NO: 361018 - DNA, 25 bp, Artificial
  probe
  misc_feature (1)..(25): SEQ ID NO: 3666; WAN024ALZ; Start 142; Stop 166
cagatgacttcaaattgaacttcgt

SEQ ID NO: 361019 - DNA, 25 bp, Artificial
  probe
  misc_feature (1)..(25): SEQ ID NO: 3666; WAN024ALZ; Start 140; Stop 164
agcagatgacttcaaattgaacttc

SEQ ID NO: 361020 - DNA, 25 bp, Artificial
  probe
  misc_feature (1)..(25): SEQ ID NO: 3666; WAN024ALZ; Start 139; Stop 163
aagcagatgacttcaaattgaactt

SEQ ID NO: 361021 - DNA, 25 bp, Artificial
  probe
  misc_feature (1)..(25): SEQ ID NO: 3666; WAN024ALZ; Start 143; Stop 167
agatgacttcaaattgaacttcgtt

SEQ ID NO: 361022 - DNA, 25 bp, Artificial
  probe
  misc_feature (1)..(25): SEQ ID NO: 3666; WAN024ALZ; Start 138; Stop 162
gaagcagatgacttcaaattgaact

SEQ ID NO: 361023 - DNA, 25 bp, Artificial
  probe
  misc_feature (1)..(25): SEQ ID NO: 3666; WAN024ALZ; Start 137; Stop 161
agaagcagatgacttcaaattgaac

SEQ ID NO: 361024 - DNA, 25 bp, Artificial
  probe
  misc_feature (1)..(25): SEQ ID NO: 3666; WAN024ALZ; Start 145; Stop 169
atgacttcaaattgaacttcgtttc

SEQ ID NO: 361025 - DNA, 25 bp, Artificial
  probe
  misc_feature (1)..(25): SEQ ID NO: 3666; WAN024ALZ; Start 144; Stop 168
gatgacttcaaattgaacttcgttt

SEQ ID NO: 361026 - DNA, 25 bp, Artificial
  probe
  misc_feature (1)..(25): SEQ ID NO: 3666; WAN024ALZ; Start 141; Stop 165
gcagatgacttcaaattgaacttcg

SEQ ID NO: 361027 - DNA, 25 bp, Artificial
  probe
  misc_feature (1)..(25): SEQ ID NO: 3666; WAN024ALZ; Start 136; Stop 160
aagaagcagatgacttcaaattgaa

SEQ ID NO: 361028 - DNA, 25 bp, Artificial
  probe
  misc_feature (1)..(25): SEQ ID NO: 3666; WAN024ALZ; Start 132; Stop 156
gcgaaagaagcagatgacttcaaat

SEQ ID NO: 361029 - DNA, 25 bp, Artificial
  probe
  misc_feature (1)..(25): SEQ ID NO: 3666; WAN024ALZ; Start 157; Stop 181
tgaacttcgtttcaatttaaactga

SEQ ID NO: 361030 - DNA, 25 bp, Artificial
  probe
  misc_feature (1)..(25): SEQ ID NO: 3666; WAN024ALZ; Start 158; Stop 182
gaacttcgtttcaatttaaactgaa

SEQ ID NO: 361031 - DNA, 25 bp, Artificial
  probe
  misc_feature (1)..(25): SEQ ID NO: 3666; WAN024ALZ; Start 6; Stop 30
tttgctcctttcttaggtggtgagg

SEQ ID NO: 361032 - DNA, 25 bp, Artificial
  probe
  misc_feature (1)..(25): SEQ ID NO: 3666; WAN024ALZ; Start 5; Stop 29
ttttgctcctttcttaggtggtgag

SEQ ID NO: 361033 - DNA, 25 bp, Artificial
  probe
  misc_feature (1)..(25): SEQ ID NO: 3666; WAN024ALZ; Start 188; Stop 212
agaagtttaaaatagctaggtctgc

SEQ ID NO: 361034 - DNA, 25 bp, Artificial
  probe
  misc_feature (1)..(25): SEQ ID NO: 3666; WAN024ALZ; Start 108; Stop 132
atcagttccatcactttcaccacgg

SEQ ID NO: 361035 - DNA, 25 bp, Artificial
  probe
  misc_feature (1)..(25): SEQ ID NO: 3666; WAN024ALZ; Start 101; Stop 125
ctgataaatcagttccatcactttc

SEQ ID NO: 361036 - DNA, 25 bp, Artificial
  probe
  misc_feature (1)..(25): SEQ ID NO: 3666; WAN024ALZ; Start 88; Stop 112
ccctgtgatgggactgataaatcag

SEQ ID NO: 361037 - DNA, 25 bp, Artificial
  probe
  misc_feature (1)..(25): SEQ ID NO: 3666; WAN024ALZ; Start 131; Stop 155
ggcgaaagaagcagatgacttcaaa

SEQ ID NO: 361038 - DNA, 25 bp, Artificial
  probe
  misc_feature (1)..(25): SEQ ID NO: 3666; WAN024ALZ; Start 191; Stop 215
agtttaaaatagctaggtctgctgg

SEQ ID NO: 361039 - DNA, 25 bp, Artificial
  probe
  misc_feature (1)..(25): SEQ ID NO: 3666; WAN024ALZ; Start 147; Stop 171
gacttcaaattgaacttcgtttcaa

SEQ ID NO: 361040 - DNA, 25 bp, Artificial
  probe
  misc_feature (1)..(25): SEQ ID NO: 3666; WAN024ALZ; Start 190; Stop 214
aagtttaaaatagctaggtctgctg

SEQ ID NO: 361041 - DNA, 25 bp, Artificial
  probe
  misc_feature (1)..(25): SEQ ID NO: 3667; WAN024AK9; Start 35; Stop 59
gagattagatagtgaggtgatgaca

SEQ ID NO: 361042 - DNA, 25 bp, Artificial
  probe
  misc_feature (1)..(25): SEQ ID NO: 3667; WAN024AK9; Start 34; Stop 58
tgagattagatagtgaggtgatgac

SEQ ID NO: 361043 - DNA, 25 bp, Artificial
  probe
  misc_feature (1)..(25): SEQ ID NO: 3667; WAN024AK9; Start 33; Stop 57
ctgagattagatagtgaggtgatga

SEQ ID NO: 361044 - DNA, 25 bp, Artificial
  probe
  misc_feature (1)..(25): SEQ ID NO: 3667; WAN024AK9; Start 36; Stop 60
agattagatagtgaggtgatgacat

SEQ ID NO: 361045 - DNA, 25 bp, Artificial
  probe
  misc_feature (1)..(25): SEQ ID NO: 3667; WAN024AK9; Start 32; Stop 56
actgagattagatagtgaggtgatg

SEQ ID NO: 361046 - DNA, 25 bp, Artificial
  probe
  misc_feature (1)..(25): SEQ ID NO: 3667; WAN024AK9; Start 40; Stop 64
tagatagtgaggtgatgacatagtt

SEQ ID NO: 361047 - DNA, 25 bp, Artificial
  probe
  misc_feature (1)..(25): SEQ ID NO: 3667; WAN024AK9; Start 39; Stop 63
ttagatagtgaggtgatgacatagt

SEQ ID NO: 361048 - DNA, 25 bp, Artificial
  probe
  misc_feature (1)..(25): SEQ ID NO: 3667; WAN024AK9; Start 29; Stop 53
tgtactgagattagatagtgaggtg

SEQ ID NO: 361049 - DNA, 25 bp, Artificial
  probe
  misc_feature (1)..(25): SEQ ID NO: 3667; WAN024AK9; Start 30; Stop 54
gtactgagattagatagtgaggtga

SEQ ID NO: 361050 - DNA, 25 bp, Artificial
  probe
  misc_feature (1)..(25): SEQ ID NO: 3667; WAN024AK9; Start 31; Stop 55
tactgagattagatagtgaggtgat

SEQ ID NO: 361051 - DNA, 25 bp, Artificial
  probe
  misc_feature (1)..(25): SEQ ID NO: 3667; WAN024AK9; Start 38; Stop 62
attagatagtgaggtgatgacatag

SEQ ID NO: 361052 - DNA, 25 bp, Artificial
  probe
  misc_feature (1)..(25): SEQ ID NO: 3667; WAN024AK9; Start 37; Stop 61
gattagatagtgaggtgatgacata

SEQ ID NO: 361053 - DNA, 25 bp, Artificial
  probe
  misc_feature (1)..(25): SEQ ID NO: 3667; WAN024AK9; Start 28; Stop 52
atgtactgagattagatagtgaggt

SEQ ID NO: 361054 - DNA, 25 bp, Artificial
  probe
  misc_feature (1)..(25): SEQ ID NO: 3667; WAN024AK9; Start 41; Stop 65
agatagtgaggtgatgacatagttt

SEQ ID NO: 361055 - DNA, 25 bp, Artificial
  probe
  misc_feature (1)..(25): SEQ ID NO: 3667; WAN024AK9; Start 27; Stop 51
tatgtactgagattagatagtgagg

SEQ ID NO: 361056 - DNA, 25 bp, Artificial
  probe
  misc_feature (1)..(25): SEQ ID NO: 3667; WAN024AK9; Start 43; Stop 67
atagtgaggtgatgacatagttttg

SEQ ID NO: 361057 - DNA, 25 bp, Artificial
  probe
  misc_feature (1)..(25): SEQ ID NO: 3667; WAN024AK9; Start 42; Stop 66
gatagtgaggtgatgacatagtttt

SEQ ID NO: 361058 - DNA, 25 bp, Artificial
  probe
  misc_feature (1)..(25): SEQ ID NO: 3667; WAN024AK9; Start 44; Stop 68
tagtgaggtgatgacatagttttgt

SEQ ID NO: 361059 - DNA, 25 bp, Artificial
  probe
  misc_feature (1)..(25): SEQ ID NO: 3667; WAN024AK9; Start 48; Stop 72
gaggtgatgacatagttttgtgaaa

SEQ ID NO: 361060 - DNA, 25 bp, Artificial
  probe
  misc_feature (1)..(25): SEQ ID NO: 3667; WAN024AK9; Start 47; Stop 71
tgaggtgatgacatagttttgtgaa

SEQ ID NO: 361061 - DNA, 25 bp, Artificial
  probe
  misc_feature (1)..(25): SEQ ID NO: 3667; WAN024AK9; Start 46; Stop 70
gtgaggtgatgacatagttttgtga

SEQ ID NO: 361062 - DNA, 25 bp, Artificial
  probe
  misc_feature (1)..(25): SEQ ID NO: 3667; WAN024AK9; Start 45; Stop 69
agtgaggtgatgacatagttttgtg

SEQ ID NO: 361063 - DNA, 25 bp, Artificial
  probe
  misc_feature (1)..(25): SEQ ID NO: 3667; WAN024AK9; Start 49; Stop 73
aggtgatgacatagttttgtgaaaa

SEQ ID NO: 361064 - DNA, 25 bp, Artificial
  probe
  misc_feature (1)..(25): SEQ ID NO: 3667; WAN024AK9; Start 19; Stop 43
aaatggtttatgtactgagattaga

SEQ ID NO: 361065 - DNA, 25 bp, Artificial
  probe
  misc_feature (1)..(25): SEQ ID NO: 3667; WAN024AK9; Start 26; Stop 50
ttatgtactgagattagatagtgag

SEQ ID NO: 361066 - DNA, 25 bp, Artificial
  probe
  misc_feature (1)..(25): SEQ ID NO: 3667; WAN024AK9; Start 20; Stop 44
aatggtttatgtactgagattagat

SEQ ID NO: 361067 - DNA, 25 bp, Artificial
  probe
  misc_feature (1)..(25): SEQ ID NO: 3667; WAN024AK9; Start 22; Stop 46
tggtttatgtactgagattagatag

SEQ ID NO: 361068 - DNA, 25 bp, Artificial
  probe
  misc_feature (1)..(25): SEQ ID NO: 3667; WAN024AK9; Start 23; Stop 47
ggtttatgtactgagattagatagt

SEQ ID NO: 361069 - DNA, 25 bp, Artificial
  probe
  misc_feature (1)..(25): SEQ ID NO: 3667; WAN024AK9; Start 18; Stop 42
aaaatggtttatgtactgagattag

SEQ ID NO: 361070 - DNA, 25 bp, Artificial
  probe
  misc_feature (1)..(25): SEQ ID NO: 3668; WAN0249HY; Start 35; Stop 59
gagtttcttttcatcaggaggagag

SEQ ID NO: 361071 - DNA, 25 bp, Artificial
  probe
  misc_feature (1)..(25): SEQ ID NO: 3668; WAN0249HY; Start 36; Stop 60
agtttcttttcatcaggaggagaga

SEQ ID NO: 361072 - DNA, 25 bp, Artificial
  probe
  misc_feature (1)..(25): SEQ ID NO: 3668; WAN0249HY; Start 34; Stop 58
tgagtttcttttcatcaggaggaga

SEQ ID NO: 361073 - DNA, 25 bp, Artificial
  probe
  misc_feature (1)..(25): SEQ ID NO: 3668; WAN0249HY; Start 26; Stop 50
aaaccaactgagtttcttttcatca

SEQ ID NO: 361074 - DNA, 25 bp, Artificial
  probe
  misc_feature (1)..(25): SEQ ID NO: 3668; WAN0249HY; Start 30; Stop 54
caactgagtttcttttcatcaggag

SEQ ID NO: 361075 - DNA, 25 bp, Artificial
  probe
  misc_feature (1)..(25): SEQ ID NO: 3668; WAN0249HY; Start 27; Stop 51
aaccaactgagtttcttttcatcag

SEQ ID NO: 361076 - DNA, 25 bp, Artificial
  probe
  misc_feature (1)..(25): SEQ ID NO: 3668; WAN0249HY; Start 31; Stop 55
aactgagtttcttttcatcaggagg

SEQ ID NO: 361077 - DNA, 25 bp, Artificial
  probe
  misc_feature (1)..(25): SEQ ID NO: 3668; WAN0249HY; Start 33; Stop 57
ctgagtttcttttcatcaggaggag

SEQ ID NO: 361078 - DNA, 25 bp, Artificial
  probe
  misc_feature (1)..(25): SEQ ID NO: 3668; WAN0249HY; Start 29; Stop 53
ccaactgagtttcttttcatcagga

SEQ ID NO: 361079 - DNA, 25 bp, Artificial
  probe
  misc_feature (1)..(25): SEQ ID NO: 3668; WAN0249HY; Start 28; Stop 52
accaactgagtttcttttcatcagg

SEQ ID NO: 361080 - DNA, 25 bp, Artificial
  probe
  misc_feature (1)..(25): SEQ ID NO: 3668; WAN0249HY; Start 32; Stop 56
actgagtttcttttcatcaggagga

SEQ ID NO: 361081 - DNA, 25 bp, Artificial
  probe
  misc_feature (1)..(25): SEQ ID NO: 3669; WAN0249ZS; Start 88; Stop 112
gatgaataaaatagaaggagaagca

SEQ ID NO: 361082 - DNA, 25 bp, Artificial
  probe
  misc_feature (1)..(25): SEQ ID NO: 3669; WAN0249ZS; Start 87; Stop 111
tgatgaataaaatagaaggagaagc

SEQ ID NO: 361083 - DNA, 25 bp, Artificial
  probe
  misc_feature (1)..(25): SEQ ID NO: 3669; WAN0249ZS; Start 89; Stop 113
atgaataaaatagaaggagaagcat

SEQ ID NO: 361084 - DNA, 25 bp, Artificial
  probe
  misc_feature (1)..(25): SEQ ID NO: 3669; WAN0249ZS; Start 9; Stop 33
aaataggtctgttagatatttgaca

SEQ ID NO: 361085 - DNA, 25 bp, Artificial
  probe
  misc_feature (1)..(25): SEQ ID NO: 3669; WAN0249ZS; Start 10; Stop 34
aataggtctgttagatatttgacag

SEQ ID NO: 361086 - DNA, 25 bp, Artificial
  probe
  misc_feature (1)..(25): SEQ ID NO: 3670; WAN024G3B; Start 469; Stop 493
tatggtgttctaagtccgtctaaag

SEQ ID NO: 361087 - DNA, 25 bp, Artificial
  probe
  misc_feature (1)..(25): SEQ ID NO: 3670; WAN024G3B; Start 432; Stop 456
tgaaactgagaaacttgacgaaatc

SEQ ID NO: 361088 - DNA, 25 bp, Artificial
  probe
  misc_feature (1)..(25): SEQ ID NO: 3670; WAN024G3B; Start 396; Stop 420
tataatagcctacgatgatgggact

SEQ ID NO: 361089 - DNA, 25 bp, Artificial
  probe
  misc_feature (1)..(25): SEQ ID NO: 3670; WAN024G3B; Start 574; Stop 598
atagaaatcaaagcgaccaagtatg

SEQ ID NO: 361090 - DNA, 25 bp, Artificial
  probe
  misc_feature (1)..(25): SEQ ID NO: 3670; WAN024G3B; Start 468; Stop 492
ttatggtgttctaagtccgtctaaa

SEQ ID NO: 361091 - DNA, 25 bp, Artificial
  probe
  misc_feature (1)..(25): SEQ ID NO: 3670; WAN024G3B; Start 467; Stop 491
tttatggtgttctaagtccgtctaa

SEQ ID NO: 361092 - DNA, 25 bp, Artificial
  probe
  misc_feature (1)..(25): SEQ ID NO: 3670; WAN024G3B; Start 431; Stop 455
atgaaactgagaaacttgacgaaat

SEQ ID NO: 361093 - DNA, 25 bp, Artificial
  probe
  misc_feature (1)..(25): SEQ ID NO: 3670; WAN024G3B; Start 466; Stop 490
atttatggtgttctaagtccgtcta

SEQ ID NO: 361094 - DNA, 25 bp, Artificial
  probe
  misc_feature (1)..(25): SEQ ID NO: 3670; WAN024G3B; Start 395; Stop 419
atataatagcctacgatgatgggac

SEQ ID NO: 361095 - DNA, 25 bp, Artificial
  probe
  misc_feature (1)..(25): SEQ ID NO: 3670; WAN024G3B; Start 465; Stop 489
aatttatggtgttctaagtccgtct

SEQ ID NO: 361096 - DNA, 25 bp, Artificial
  probe
  misc_feature (1)..(25): SEQ ID NO: 3670; WAN024G3B; Start 430; Stop 454
tatgaaactgagaaacttgacgaaa

SEQ ID NO: 361097 - DNA, 25 bp, Artificial
  probe
  misc_feature (1)..(25): SEQ ID NO: 3670; WAN024G3B; Start 115; Stop 139
cttggcgaaattcctgaatctaaat

SEQ ID NO: 361098 - DNA, 25 bp, Artificial
  probe
  misc_feature (1)..(25): SEQ ID NO: 3670; WAN024G3B; Start 429; Stop 453
atatgaaactgagaaacttgacgaa

SEQ ID NO: 361099 - DNA, 25 bp, Artificial
  probe
  misc_feature (1)..(25): SEQ ID NO: 3670; WAN024G3B; Start 428; Stop 452
aatatgaaactgagaaacttgacga

SEQ ID NO: 361100 - DNA, 25 bp, Artificial
  probe
  misc_feature (1)..(25): SEQ ID NO: 3670; WAN024G3B; Start 394; Stop 418
aatataatagcctacgatgatggga

SEQ ID NO: 361101 - DNA, 25 bp, Artificial
  probe
  misc_feature (1)..(25): SEQ ID NO: 3670; WAN024G3B; Start 322; Stop 346
aagcaagaagacgactttgtaaatg

SEQ ID NO: 361102 - DNA, 25 bp, Artificial
  probe
  misc_feature (1)..(25): SEQ ID NO: 3670; WAN024G3B; Start 473; Stop 497
gtgttctaagtccgtctaaagatgg

SEQ ID NO: 361103 - DNA, 25 bp, Artificial
  probe
  misc_feature (1)..(25): SEQ ID NO: 3670; WAN024G3B; Start 472; Stop 496
ggtgttctaagtccgtctaaagatg

SEQ ID NO: 361104 - DNA, 25 bp, Artificial
  probe
  misc_feature (1)..(25): SEQ ID NO: 3670; WAN024G3B; Start 427; Stop 451
gaatatgaaactgagaaacttgacg

SEQ ID NO: 361105 - DNA, 25 bp, Artificial
  probe
  misc_feature (1)..(25): SEQ ID NO: 3670; WAN024G3B; Start 325; Stop 349
caagaagacgactttgtaaatggtg

SEQ ID NO: 361106 - DNA, 25 bp, Artificial
  probe
  misc_feature (1)..(25): SEQ ID NO: 3670; WAN024G3B; Start 433; Stop 457
gaaactgagaaacttgacgaaatca

SEQ ID NO: 361107 - DNA, 25 bp, Artificial
  probe
  misc_feature (1)..(25): SEQ ID NO: 3670; WAN024G3B; Start 397; Stop 421
ataatagcctacgatgatgggactg

SEQ ID NO: 361108 - DNA, 25 bp, Artificial
  probe
  misc_feature (1)..(25): SEQ ID NO: 3670; WAN024G3B; Start 575; Stop 599
tagaaatcaaagcgaccaagtatga

SEQ ID NO: 361109 - DNA, 25 bp, Artificial
  probe
  misc_feature (1)..(25): SEQ ID NO: 3670; WAN024G3B; Start 471; Stop 495
tggtgttctaagtccgtctaaagat

SEQ ID NO: 361110 - DNA, 25 bp, Artificial
  probe
  misc_feature (1)..(25): SEQ ID NO: 3670; WAN024G3B; Start 470; Stop 494
atggtgttctaagtccgtctaaaga

SEQ ID NO: 361111 - DNA, 25 bp, Artificial
  probe
  misc_feature (1)..(25): SEQ ID NO: 3670; WAN024G3B; Start 321; Stop 345
taagcaagaagacgactttgtaaat

SEQ ID NO: 361112 - DNA, 25 bp, Artificial
  probe
  misc_feature (1)..(25): SEQ ID NO: 3670; WAN024G3B; Start 320; Stop 344
ataagcaagaagacgactttgtaaa

SEQ ID NO: 361113 - DNA, 25 bp, Artificial
  probe
  misc_feature (1)..(25): SEQ ID NO: 3670; WAN024G3B; Start 613; Stop 637
acgatgacatttgatctatacgcta

SEQ ID NO: 361114 - DNA, 25 bp, Artificial
  probe
  misc_feature (1)..(25): SEQ ID NO: 3670; WAN024G3B; Start 611; Stop 635
aaacgatgacatttgatctatacgc

SEQ ID NO: 361115 - DNA, 25 bp, Artificial
  probe
  misc_feature (1)..(25): SEQ ID NO: 3670; WAN024G3B; Start 612; Stop 636
aacgatgacatttgatctatacgct

SEQ ID NO: 361116 - DNA, 25 bp, Artificial
  probe
  misc_feature (1)..(25): SEQ ID NO: 3670; WAN024G3B; Start 313; Stop 337
aagaaatataagcaagaagacgact

SEQ ID NO: 361117 - DNA, 25 bp, Artificial
  probe
  misc_feature (1)..(25): SEQ ID NO: 3670; WAN024G3B; Start 328; Stop 352
gaagacgactttgtaaatggtggaa

SEQ ID NO: 361118 - DNA, 25 bp, Artificial
  probe
  misc_feature (1)..(25): SEQ ID NO: 3670; WAN024G3B; Start 326; Stop 350
aagaagacgactttgtaaatggtgg

SEQ ID NO: 361119 - DNA, 25 bp, Artificial
  probe
  misc_feature (1)..(25): SEQ ID NO: 3671; WAN0249KO; Start 157; Stop 181
tgaaattaagcaaataggaaggttt

SEQ ID NO: 361120 - DNA, 25 bp, Artificial
  probe
  misc_feature (1)..(25): SEQ ID NO: 3671; WAN0249KO; Start 156; Stop 180
atgaaattaagcaaataggaaggtt

SEQ ID NO: 361121 - DNA, 25 bp, Artificial
  probe
  misc_feature (1)..(25): SEQ ID NO: 3671; WAN0249KO; Start 155; Stop 179
aatgaaattaagcaaataggaaggt

SEQ ID NO: 361122 - DNA, 25 bp, Artificial
  probe
  misc_feature (1)..(25): SEQ ID NO: 3671; WAN0249KO; Start 165; Stop 189
agcaaataggaaggtttattatctt

SEQ ID NO: 361123 - DNA, 25 bp, Artificial
  probe
  misc_feature (1)..(25): SEQ ID NO: 3671; WAN0249KO; Start 164; Stop 188
aagcaaataggaaggtttattatct

SEQ ID NO: 361124 - DNA, 25 bp, Artificial
  probe
  misc_feature (1)..(25): SEQ ID NO: 3671; WAN0249KO; Start 158; Stop 182
gaaattaagcaaataggaaggttta

SEQ ID NO: 361125 - DNA, 25 bp, Artificial
  probe
  misc_feature (1)..(25): SEQ ID NO: 3671; WAN0249KO; Start 119; Stop 143
ttcctttaacttgctattttgaact

SEQ ID NO: 361126 - DNA, 25 bp, Artificial
  probe
  misc_feature (1)..(25): SEQ ID NO: 3671; WAN0249KO; Start 166; Stop 190
gcaaataggaaggtttattatcttt

SEQ ID NO: 361127 - DNA, 25 bp, Artificial
  probe
  misc_feature (1)..(25): SEQ ID NO: 3671; WAN0249KO; Start 154; Stop 178
taatgaaattaagcaaataggaagg

SEQ ID NO: 361128 - DNA, 25 bp, Artificial
  probe
  misc_feature (1)..(25): SEQ ID NO: 3671; WAN0249KO; Start 120; Stop 144
tcctttaacttgctattttgaacta

SEQ ID NO: 361129 - DNA, 25 bp, Artificial
  probe
  misc_feature (1)..(25): SEQ ID NO: 3671; WAN0249KO; Start 118; Stop 142
attcctttaacttgctattttgaac

SEQ ID NO: 361130 - DNA, 25 bp, Artificial
  probe
  misc_feature (1)..(25): SEQ ID NO: 3671; WAN0249KO; Start 159; Stop 183
aaattaagcaaataggaaggtttat

SEQ ID NO: 361131 - DNA, 25 bp, Artificial
  probe
  misc_feature (1)..(25): SEQ ID NO: 3671; WAN0249KO; Start 160; Stop 184
aattaagcaaataggaaggtttatt

SEQ ID NO: 361132 - DNA, 25 bp, Artificial
  probe
  misc_feature (1)..(25): SEQ ID NO: 3671; WAN0249KO; Start 121; Stop 145
cctttaacttgctattttgaactaa

SEQ ID NO: 361133 - DNA, 25 bp, Artificial
  probe
  misc_feature (1)..(25): SEQ ID NO: 3671; WAN0249KO; Start 116; Stop 140
ttattcctttaacttgctattttga

SEQ ID NO: 361134 - DNA, 25 bp, Artificial
  probe
  misc_feature (1)..(25): SEQ ID NO: 3671; WAN0249KO; Start 117; Stop 141
tattcctttaacttgctattttgaa

SEQ ID NO: 361135 - DNA, 25 bp, Artificial
  probe
  misc_feature (1)..(25): SEQ ID NO: 3672; WAN024F9N; Start 12; Stop 36
tcaactggatagagtacctgactac

SEQ ID NO: 361136 - DNA, 25 bp, Artificial
  probe
  misc_feature (1)..(25): SEQ ID NO: 3672; WAN024F9N; Start 18; Stop 42
ggatagagtacctgactacgaatca

SEQ ID NO: 361137 - DNA, 25 bp, Artificial
  probe
  misc_feature (1)..(25): SEQ ID NO: 3672; WAN024F9N; Start 17; Stop 41
tggatagagtacctgactacgaatc

SEQ ID NO: 361138 - DNA, 25 bp, Artificial
  probe
  misc_feature (1)..(25): SEQ ID NO: 3672; WAN024F9N; Start 16; Stop 40
ctggatagagtacctgactacgaat

SEQ ID NO: 361139 - DNA, 25 bp, Artificial
  probe
  misc_feature (1)..(25): SEQ ID NO: 3672; WAN024F9N; Start 11; Stop 35
ctcaactggatagagtacctgacta

SEQ ID NO: 361140 - DNA, 25 bp, Artificial
  probe
  misc_feature (1)..(25): SEQ ID NO: 3672; WAN024F9N; Start 15; Stop 39
actggatagagtacctgactacgaa

SEQ ID NO: 361141 - DNA, 25 bp, Artificial
  probe
  misc_feature (1)..(25): SEQ ID NO: 3672; WAN024F9N; Start 14; Stop 38
aactggatagagtacctgactacga

SEQ ID NO: 361142 - DNA, 25 bp, Artificial
  probe
  misc_feature (1)..(25): SEQ ID NO: 3672; WAN024F9N; Start 13; Stop 37
caactggatagagtacctgactacg

SEQ ID NO: 361143 - DNA, 25 bp, Artificial
  probe
  misc_feature (1)..(25): SEQ ID NO: 3672; WAN024F9N; Start 6; Stop 30
cttagctcaactggatagagtacct

SEQ ID NO: 361144 - DNA, 25 bp, Artificial
  probe
  misc_feature (1)..(25): SEQ ID NO: 3672; WAN024F9N; Start 7; Stop 31
ttagctcaactggatagagtacctg

SEQ ID NO: 361145 - DNA, 25 bp, Artificial
  probe
  misc_feature (1)..(25): SEQ ID NO: 3672; WAN024F9N; Start 8; Stop 32
tagctcaactggatagagtacctga

SEQ ID NO: 361146 - DNA, 25 bp, Artificial
  probe
  misc_feature (1)..(25): SEQ ID NO: 3672; WAN024F9N; Start 5; Stop 29
ccttagctcaactggatagagtacc

SEQ ID NO: 361147 - DNA, 25 bp, Artificial
  probe
  misc_feature (1)..(25): SEQ ID NO: 3672; WAN024F9N; Start 10; Stop 34
gctcaactggatagagtacctgact

SEQ ID NO: 361148 - DNA, 25 bp, Artificial
  probe
  misc_feature (1)..(25): SEQ ID NO: 3672; WAN024F9N; Start 9; Stop 33
agctcaactggatagagtacctgac

SEQ ID NO: 361149 - DNA, 25 bp, Artificial
  probe
  misc_feature (1)..(25): SEQ ID NO: 3672; WAN024F9N; Start 19; Stop 43
gatagagtacctgactacgaatcag

SEQ ID NO: 361150 - DNA, 25 bp, Artificial
  probe
  misc_feature (1)..(25): SEQ ID NO: 3672; WAN024F9N; Start 4; Stop 28
cccttagctcaactggatagagtac

SEQ ID NO: 361151 - DNA, 25 bp, Artificial
  probe
  misc_feature (1)..(25): SEQ ID NO: 3672; WAN024F9N; Start 3; Stop 27
acccttagctcaactggatagagta

SEQ ID NO: 361152 - DNA, 25 bp, Artificial
  probe
  misc_feature (1)..(25): SEQ ID NO: 3672; WAN024F9N; Start 33; Stop 57
ctacgaatcaggcggttagaggttc

SEQ ID NO: 361153 - DNA, 25 bp, Artificial
  probe
  misc_feature (1)..(25): SEQ ID NO: 3672; WAN024F9N; Start 2; Stop 26
cacccttagctcaactggatagagt

SEQ ID NO: 361154 - DNA, 25 bp, Artificial
  probe
  misc_feature (1)..(25): SEQ ID NO: 3672; WAN024F9N; Start 1; Stop 25
gcacccttagctcaactggatagag

SEQ ID NO: 361155 - DNA, 25 bp, Artificial
  probe
  misc_feature (1)..(25): SEQ ID NO: 3672; WAN024F9N; Start 29; Stop 53
ctgactacgaatcaggcggttagag

SEQ ID NO: 361156 - DNA, 25 bp, Artificial
  probe
  misc_feature (1)..(25): SEQ ID NO: 3673; WAN024AP7; Start 9; Stop 33
ttagtagaaggagtagggagaaacc

SEQ ID NO: 361157 - DNA, 25 bp, Artificial
  probe
  misc_feature (1)..(25): SEQ ID NO: 3673; WAN024AP7; Start 8; Stop 32
attagtagaaggagtagggagaaac

SEQ ID NO: 361158 - DNA, 25 bp, Artificial
  probe
  misc_feature (1)..(25): SEQ ID NO: 3673; WAN024AP7; Start 1; Stop 25
gcagaatattagtagaaggagtagg

SEQ ID NO: 361159 - DNA, 25 bp, Artificial
  probe
  misc_feature (1)..(25): SEQ ID NO: 3673; WAN024AP7; Start 33; Stop 57
ccactccctcttgtttaggtaatag

SEQ ID NO: 361160 - DNA, 25 bp, Artificial
  probe
  misc_feature (1)..(25): SEQ ID NO: 3673; WAN024AP7; Start 34; Stop 58
cactccctcttgtttaggtaatagt

SEQ ID NO: 361161 - DNA, 25 bp, Artificial
  probe
  misc_feature (1)..(25): SEQ ID NO: 3673; WAN024AP7; Start 60; Stop 84
tgactgtcaaattatggtgaaatcg

SEQ ID NO: 361162 - DNA, 25 bp, Artificial
  probe
  misc_feature (1)..(25): SEQ ID NO: 3673; WAN024AP7; Start 35; Stop 59
actccctcttgtttaggtaatagtt

SEQ ID NO: 361163 - DNA, 25 bp, Artificial
  probe
  misc_feature (1)..(25): SEQ ID NO: 3673; WAN024AP7; Start 32; Stop 56
cccactccctcttgtttaggtaata

SEQ ID NO: 361164 - DNA, 25 bp, Artificial
  probe
  misc_feature (1)..(25): SEQ ID NO: 3673; WAN024AP7; Start 7; Stop 31
tattagtagaaggagtagggagaaa

SEQ ID NO: 361165 - DNA, 25 bp, Artificial
  probe
  misc_feature (1)..(25): SEQ ID NO: 3673; WAN024AP7; Start 6; Stop 30
atattagtagaaggagtagggagaa

SEQ ID NO: 361166 - DNA, 25 bp, Artificial
  probe
  misc_feature (1)..(25): SEQ ID NO: 3673; WAN024AP7; Start 61; Stop 85
gactgtcaaattatggtgaaatcga

SEQ ID NO: 361167 - DNA, 25 bp, Artificial
  probe
  misc_feature (1)..(25): SEQ ID NO: 3673; WAN024AP7; Start 38; Stop 62
ccctcttgtttaggtaatagtttga

SEQ ID NO: 361168 - DNA, 25 bp, Artificial
  probe
  misc_feature (1)..(25): SEQ ID NO: 3673; WAN024AP7; Start 37; Stop 61
tccctcttgtttaggtaatagtttg

SEQ ID NO: 361169 - DNA, 25 bp, Artificial
  probe
  misc_feature (1)..(25): SEQ ID NO: 3673; WAN024AP7; Start 64; Stop 88
tgtcaaattatggtgaaatcgaact

SEQ ID NO: 361170 - DNA, 25 bp, Artificial
  probe
  misc_feature (1)..(25): SEQ ID NO: 3673; WAN024AP7; Start 62; Stop 86
actgtcaaattatggtgaaatcgaa

SEQ ID NO: 361171 - DNA, 25 bp, Artificial
  probe
  misc_feature (1)..(25): SEQ ID NO: 3673; WAN024AP7; Start 63; Stop 87
ctgtcaaattatggtgaaatcgaac

SEQ ID NO: 361172 - DNA, 25 bp, Artificial
  probe
  misc_feature (1)..(25): SEQ ID NO: 3673; WAN024AP7; Start 36; Stop 60
ctccctcttgtttaggtaatagttt

SEQ ID NO: 361173 - DNA, 25 bp, Artificial
  probe
  misc_feature (1)..(25): SEQ ID NO: 3673; WAN024AP7; Start 71; Stop 95
ttatggtgaaatcgaactattacgt

SEQ ID NO: 361174 - DNA, 25 bp, Artificial
  probe
  misc_feature (1)..(25): SEQ ID NO: 3673; WAN024AP7; Start 44; Stop 68
tgtttaggtaatagtttgactgtca

SEQ ID NO: 361175 - DNA, 25 bp, Artificial
  probe
  misc_feature (1)..(25): SEQ ID NO: 3673; WAN024AP7; Start 42; Stop 66
cttgtttaggtaatagtttgactgt

SEQ ID NO: 361176 - DNA, 25 bp, Artificial
  probe
  misc_feature (1)..(25): SEQ ID NO: 3673; WAN024AP7; Start 43; Stop 67
ttgtttaggtaatagtttgactgtc

SEQ ID NO: 361177 - DNA, 25 bp, Artificial
  probe
  misc_feature (1)..(25): SEQ ID NO: 3673; WAN024AP7; Start 39; Stop 63
cctcttgtttaggtaatagtttgac

SEQ ID NO: 361178 - DNA, 25 bp, Artificial
  probe
  misc_feature (1)..(25): SEQ ID NO: 3673; WAN024AP7; Start 41; Stop 65
tcttgtttaggtaatagtttgactg

SEQ ID NO: 361179 - DNA, 25 bp, Artificial
  probe
  misc_feature (1)..(25): SEQ ID NO: 3673; WAN024AP7; Start 5; Stop 29
aatattagtagaaggagtagggaga

SEQ ID NO: 361180 - DNA, 25 bp, Artificial
  probe
  misc_feature (1)..(25): SEQ ID NO: 3673; WAN024AP7; Start 3; Stop 27
agaatattagtagaaggagtaggga

SEQ ID NO: 361181 - DNA, 25 bp, Artificial
  probe
  misc_feature (1)..(25): SEQ ID NO: 3673; WAN024AP7; Start 2; Stop 26
cagaatattagtagaaggagtaggg

SEQ ID NO: 361182 - DNA, 25 bp, Artificial
  probe
  misc_feature (1)..(25): SEQ ID NO: 3673; WAN024AP7; Start 70; Stop 94
attatggtgaaatcgaactattacg

SEQ ID NO: 361183 - DNA, 25 bp, Artificial
  probe
  misc_feature (1)..(25): SEQ ID NO: 3673; WAN024AP7; Start 65; Stop 89
gtcaaattatggtgaaatcgaacta

SEQ ID NO: 361184 - DNA, 25 bp, Artificial
  probe
  misc_feature (1)..(25): SEQ ID NO: 3673; WAN024AP7; Start 4; Stop 28
gaatattagtagaaggagtagggag

SEQ ID NO: 361185 - DNA, 25 bp, Artificial
  probe
  misc_feature (1)..(25): SEQ ID NO: 3673; WAN024AP7; Start 40; Stop 64
ctcttgtttaggtaatagtttgact

SEQ ID NO: 361186 - DNA, 25 bp, Artificial
  probe
  misc_feature (1)..(25): SEQ ID NO: 3673; WAN024AP7; Start 31; Stop 55
acccactccctcttgtttaggtaat

SEQ ID NO: 361187 - DNA, 25 bp, Artificial
  probe
  misc_feature (1)..(25): SEQ ID NO: 3673; WAN024AP7; Start 30; Stop 54
aacccactccctcttgtttaggtaa

SEQ ID NO: 361188 - DNA, 25 bp, Artificial
  probe
  misc_feature (1)..(25): SEQ ID NO: 3673; WAN024AP7; Start 10; Stop 34
tagtagaaggagtagggagaaaccc

SEQ ID NO: 361189 - DNA, 25 bp, Artificial
  probe
  misc_feature (1)..(25): SEQ ID NO: 3674; WAN0249VF; Start 86; Stop 110
ggtagataaactagattggcaggag

SEQ ID NO: 361190 - DNA, 25 bp, Artificial
  probe
  misc_feature (1)..(25): SEQ ID NO: 3674; WAN0249VF; Start 1; Stop 25
gcaggaagtatggtgtaaatagcat

SEQ ID NO: 361191 - DNA, 25 bp, Artificial
  probe
  misc_feature (1)..(25): SEQ ID NO: 3674; WAN0249VF; Start 81; Stop 105
gtcctggtagataaactagattggc

SEQ ID NO: 361192 - DNA, 25 bp, Artificial
  probe
  misc_feature (1)..(25): SEQ ID NO: 3674; WAN0249VF; Start 85; Stop 109
tggtagataaactagattggcagga

SEQ ID NO: 361193 - DNA, 25 bp, Artificial
  probe
  misc_feature (1)..(25): SEQ ID NO: 3674; WAN0249VF; Start 82; Stop 106
tcctggtagataaactagattggca

SEQ ID NO: 361194 - DNA, 25 bp, Artificial
  probe
  misc_feature (1)..(25): SEQ ID NO: 3674; WAN0249VF; Start 80; Stop 104
tgtcctggtagataaactagattgg

SEQ ID NO: 361195 - DNA, 25 bp, Artificial
  probe
  misc_feature (1)..(25): SEQ ID NO: 3674; WAN0249VF; Start 78; Stop 102
ggtgtcctggtagataaactagatt

SEQ ID NO: 361196 - DNA, 25 bp, Artificial
  probe
  misc_feature (1)..(25): SEQ ID NO: 3674; WAN0249VF; Start 140; Stop 164
ggcaccaatttgagatagtttgttt

SEQ ID NO: 361197 - DNA, 25 bp, Artificial
  probe
  misc_feature (1)..(25): SEQ ID NO: 3674; WAN0249VF; Start 94; Stop 118
aactagattggcaggagtctgattg

SEQ ID NO: 361198 - DNA, 25 bp, Artificial
  probe
  misc_feature (1)..(25): SEQ ID NO: 3674; WAN0249VF; Start 77; Stop 101
cggtgtcctggtagataaactagat

SEQ ID NO: 361199 - DNA, 25 bp, Artificial
  probe
  misc_feature (1)..(25): SEQ ID NO: 3674; WAN0249VF; Start 87; Stop 111
gtagataaactagattggcaggagt

SEQ ID NO: 361200 - DNA, 25 bp, Artificial
  probe
  misc_feature (1)..(25): SEQ ID NO: 3674; WAN0249VF; Start 88; Stop 112
tagataaactagattggcaggagtc

SEQ ID NO: 361201 - DNA, 25 bp, Artificial
  probe
  misc_feature (1)..(25): SEQ ID NO: 3674; WAN0249VF; Start 79; Stop 103
gtgtcctggtagataaactagattg

SEQ ID NO: 361202 - DNA, 25 bp, Artificial
  probe
  misc_feature (1)..(25): SEQ ID NO: 3674; WAN0249VF; Start 89; Stop 113
agataaactagattggcaggagtct

SEQ ID NO: 361203 - DNA, 25 bp, Artificial
  probe
  misc_feature (1)..(25): SEQ ID NO: 3674; WAN0249VF; Start 139; Stop 163
tggcaccaatttgagatagtttgtt

SEQ ID NO: 361204 - DNA, 25 bp, Artificial
  probe
  misc_feature (1)..(25): SEQ ID NO: 3674; WAN0249VF; Start 141; Stop 165
gcaccaatttgagatagtttgttta

SEQ ID NO: 361205 - DNA, 25 bp, Artificial
  probe
  misc_feature (1)..(25): SEQ ID NO: 3674; WAN0249VF; Start 84; Stop 108
ctggtagataaactagattggcagg

SEQ ID NO: 361206 - DNA, 25 bp, Artificial
  probe
  misc_feature (1)..(25): SEQ ID NO: 3674; WAN0249VF; Start 83; Stop 107
cctggtagataaactagattggcag

SEQ ID NO: 361207 - DNA, 25 bp, Artificial
  probe
  misc_feature (1)..(25): SEQ ID NO: 3674; WAN0249VF; Start 90; Stop 114
gataaactagattggcaggagtctg

SEQ ID NO: 361208 - DNA, 25 bp, Artificial
  probe
  misc_feature (1)..(25): SEQ ID NO: 3674; WAN0249VF; Start 92; Stop 116
taaactagattggcaggagtctgat

SEQ ID NO: 361209 - DNA, 25 bp, Artificial
  probe
  misc_feature (1)..(25): SEQ ID NO: 3674; WAN0249VF; Start 91; Stop 115
ataaactagattggcaggagtctga

SEQ ID NO: 361210 - DNA, 25 bp, Artificial
  probe
  misc_feature (1)..(25): SEQ ID NO: 3674; WAN0249VF; Start 138; Stop 162
ttggcaccaatttgagatagtttgt

SEQ ID NO: 361211 - DNA, 25 bp, Artificial
  probe
  misc_feature (1)..(25): SEQ ID NO: 3674; WAN0249VF; Start 33; Stop 57
tgtccatcatttgcttataaagaga

SEQ ID NO: 361212 - DNA, 25 bp, Artificial
  probe
  misc_feature (1)..(25): SEQ ID NO: 3674; WAN0249VF; Start 93; Stop 117
aaactagattggcaggagtctgatt

SEQ ID NO: 361213 - DNA, 25 bp, Artificial
  probe
  misc_feature (1)..(25): SEQ ID NO: 3674; WAN0249VF; Start 2; Stop 26
caggaagtatggtgtaaatagcata

SEQ ID NO: 361214 - DNA, 25 bp, Artificial
  probe
  misc_feature (1)..(25): SEQ ID NO: 3674; WAN0249VF; Start 97; Stop 121
tagattggcaggagtctgattggag

SEQ ID NO: 361215 - DNA, 25 bp, Artificial
  probe
  misc_feature (1)..(25): SEQ ID NO: 3674; WAN0249VF; Start 96; Stop 120
ctagattggcaggagtctgattgga

SEQ ID NO: 361216 - DNA, 25 bp, Artificial
  probe
  misc_feature (1)..(25): SEQ ID NO: 3674; WAN0249VF; Start 106; Stop 130
aggagtctgattggagaaaggagag

SEQ ID NO: 361217 - DNA, 25 bp, Artificial
  probe
  misc_feature (1)..(25): SEQ ID NO: 3674; WAN0249VF; Start 31; Stop 55
gatgtccatcatttgcttataaaga

SEQ ID NO: 361218 - DNA, 25 bp, Artificial
  probe
  misc_feature (1)..(25): SEQ ID NO: 3674; WAN0249VF; Start 32; Stop 56
atgtccatcatttgcttataaagag

SEQ ID NO: 361219 - DNA, 25 bp, Artificial
  probe
  misc_feature (1)..(25): SEQ ID NO: 3674; WAN0249VF; Start 95; Stop 119
actagattggcaggagtctgattgg

SEQ ID NO: 361220 - DNA, 25 bp, Artificial
  probe
  misc_feature (1)..(25): SEQ ID NO: 3674; WAN0249VF; Start 143; Stop 167
accaatttgagatagtttgtttagt

SEQ ID NO: 361221 - DNA, 25 bp, Artificial
  probe
  misc_feature (1)..(25): SEQ ID NO: 3674; WAN0249VF; Start 76; Stop 100
gcggtgtcctggtagataaactaga

SEQ ID NO: 361222 - DNA, 25 bp, Artificial
  probe
  misc_feature (1)..(25): SEQ ID NO: 3675; WAN0249S5; Start 47; Stop 71
atctactgctaatcaatgaagaagc

SEQ ID NO: 361223 - DNA, 25 bp, Artificial
  probe
  misc_feature (1)..(25): SEQ ID NO: 3675; WAN0249S5; Start 46; Stop 70
aatctactgctaatcaatgaagaag

SEQ ID NO: 361224 - DNA, 25 bp, Artificial
  probe
  misc_feature (1)..(25): SEQ ID NO: 3675; WAN0249S5; Start 59; Stop 83
tcaatgaagaagcaaagatcaaact

SEQ ID NO: 361225 - DNA, 25 bp, Artificial
  probe
  misc_feature (1)..(25): SEQ ID NO: 3675; WAN0249S5; Start 65; Stop 89
aagaagcaaagatcaaactaggcag

SEQ ID NO: 361226 - DNA, 25 bp, Artificial
  probe
  misc_feature (1)..(25): SEQ ID NO: 3675; WAN0249S5; Start 64; Stop 88
gaagaagcaaagatcaaactaggca

SEQ ID NO: 361227 - DNA, 25 bp, Artificial
  probe
  misc_feature (1)..(25): SEQ ID NO: 3675; WAN0249S5; Start 62; Stop 86
atgaagaagcaaagatcaaactagg

SEQ ID NO: 361228 - DNA, 25 bp, Artificial
  probe
  misc_feature (1)..(25): SEQ ID NO: 3675; WAN0249S5; Start 58; Stop 82
atcaatgaagaagcaaagatcaaac

SEQ ID NO: 361229 - DNA, 25 bp, Artificial
  probe
  misc_feature (1)..(25): SEQ ID NO: 3675; WAN0249S5; Start 63; Stop 87
tgaagaagcaaagatcaaactaggc

SEQ ID NO: 361230 - DNA, 25 bp, Artificial
  probe
  misc_feature (1)..(25): SEQ ID NO: 3675; WAN0249S5; Start 60; Stop 84
caatgaagaagcaaagatcaaacta

SEQ ID NO: 361231 - DNA, 25 bp, Artificial
  probe
  misc_feature (1)..(25): SEQ ID NO: 3675; WAN0249S5; Start 57; Stop 81
aatcaatgaagaagcaaagatcaaa

SEQ ID NO: 361232 - DNA, 25 bp, Artificial
  probe
  misc_feature (1)..(25): SEQ ID NO: 3675; WAN0249S5; Start 61; Stop 85
aatgaagaagcaaagatcaaactag

SEQ ID NO: 361233 - DNA, 25 bp, Artificial
  probe
  misc_feature (1)..(25): SEQ ID NO: 3675; WAN0249S5; Start 55; Stop 79
ctaatcaatgaagaagcaaagatca

SEQ ID NO: 361234 - DNA, 25 bp, Artificial
  probe
  misc_feature (1)..(25): SEQ ID NO: 3675; WAN0249S5; Start 43; Stop 67
tgaaatctactgctaatcaatgaag

SEQ ID NO: 361235 - DNA, 25 bp, Artificial
  probe
  misc_feature (1)..(25): SEQ ID NO: 3675; WAN0249S5; Start 44; Stop 68
gaaatctactgctaatcaatgaaga

SEQ ID NO: 361236 - DNA, 25 bp, Artificial
  probe
  misc_feature (1)..(25): SEQ ID NO: 3675; WAN0249S5; Start 54; Stop 78
gctaatcaatgaagaagcaaagatc

SEQ ID NO: 361237 - DNA, 25 bp, Artificial
  probe
  misc_feature (1)..(25): SEQ ID NO: 3675; WAN0249S5; Start 56; Stop 80
taatcaatgaagaagcaaagatcaa

SEQ ID NO: 361238 - DNA, 25 bp, Artificial
  probe
  misc_feature (1)..(25): SEQ ID NO: 3675; WAN0249S5; Start 45; Stop 69
aaatctactgctaatcaatgaagaa

SEQ ID NO: 361239 - DNA, 25 bp, Artificial
  probe
  misc_feature (1)..(25): SEQ ID NO: 3675; WAN0249S5; Start 66; Stop 90
agaagcaaagatcaaactaggcagc

SEQ ID NO: 361240 - DNA, 25 bp, Artificial
  probe
  misc_feature (1)..(25): SEQ ID NO: 3675; WAN0249S5; Start 68; Stop 92
aagcaaagatcaaactaggcagcta

SEQ ID NO: 361241 - DNA, 25 bp, Artificial
  probe
  misc_feature (1)..(25): SEQ ID NO: 3675; WAN0249S5; Start 69; Stop 93
agcaaagatcaaactaggcagctag

SEQ ID NO: 361242 - DNA, 25 bp, Artificial
  probe
  misc_feature (1)..(25): SEQ ID NO: 3675; WAN0249S5; Start 42; Stop 66
ttgaaatctactgctaatcaatgaa

SEQ ID NO: 361243 - DNA, 25 bp, Artificial
  probe
  misc_feature (1)..(25): SEQ ID NO: 3675; WAN0249S5; Start 41; Stop 65
tttgaaatctactgctaatcaatga

SEQ ID NO: 361244 - DNA, 25 bp, Artificial
  probe
  misc_feature (1)..(25): SEQ ID NO: 3675; WAN0249S5; Start 37; Stop 61
tcattttgaaatctactgctaatca

SEQ ID NO: 361245 - DNA, 25 bp, Artificial
  probe
  misc_feature (1)..(25): SEQ ID NO: 3675; WAN0249S5; Start 67; Stop 91
gaagcaaagatcaaactaggcagct

SEQ ID NO: 361246 - DNA, 25 bp, Artificial
  probe
  misc_feature (1)..(25): SEQ ID NO: 3675; WAN0249S5; Start 36; Stop 60
atcattttgaaatctactgctaatc

SEQ ID NO: 361247 - DNA, 25 bp, Artificial
  probe
  misc_feature (1)..(25): SEQ ID NO: 3675; WAN0249S5; Start 32; Stop 56
ttttatcattttgaaatctactgct

SEQ ID NO: 361248 - DNA, 25 bp, Artificial
  probe
  misc_feature (1)..(25): SEQ ID NO: 3675; WAN0249S5; Start 40; Stop 64
ttttgaaatctactgctaatcaatg

SEQ ID NO: 361249 - DNA, 25 bp, Artificial
  probe
  misc_feature (1)..(25): SEQ ID NO: 3675; WAN0249S5; Start 38; Stop 62
cattttgaaatctactgctaatcaa

SEQ ID NO: 361250 - DNA, 25 bp, Artificial
  probe
  misc_feature (1)..(25): SEQ ID NO: 3675; WAN0249S5; Start 70; Stop 94
gcaaagatcaaactaggcagctagt

SEQ ID NO: 361251 - DNA, 25 bp, Artificial
  probe
  misc_feature (1)..(25): SEQ ID NO: 3675; WAN0249S5; Start 39; Stop 63
attttgaaatctactgctaatcaat

SEQ ID NO: 361252 - DNA, 25 bp, Artificial
  probe
  misc_feature (1)..(25): SEQ ID NO: 3676; WAN0249GB; Start 276; Stop 300
agtgagtaccagatataccaagaca

SEQ ID NO: 361253 - DNA, 25 bp, Artificial
  probe
  misc_feature (1)..(25): SEQ ID NO: 3676; WAN0249GB; Start 279; Stop 303
gagtaccagatataccaagacatcg

SEQ ID NO: 361254 - DNA, 25 bp, Artificial
  probe
  misc_feature (1)..(25): SEQ ID NO: 3676; WAN0249GB; Start 277; Stop 301
gtgagtaccagatataccaagacat

SEQ ID NO: 361255 - DNA, 25 bp, Artificial
  probe
  misc_feature (1)..(25): SEQ ID NO: 3676; WAN0249GB; Start 280; Stop 304
agtaccagatataccaagacatcgt

SEQ ID NO: 361256 - DNA, 25 bp, Artificial
  probe
  misc_feature (1)..(25): SEQ ID NO: 3676; WAN0249GB; Start 275; Stop 299
aagtgagtaccagatataccaagac

SEQ ID NO: 361257 - DNA, 25 bp, Artificial
  probe
  misc_feature (1)..(25): SEQ ID NO: 3676; WAN0249GB; Start 278; Stop 302
tgagtaccagatataccaagacatc

SEQ ID NO: 361258 - DNA, 25 bp, Artificial
  probe
  misc_feature (1)..(25): SEQ ID NO: 3676; WAN0249GB; Start 289; Stop 313
tataccaagacatcgtcaccatcta

SEQ ID NO: 361259 - DNA, 25 bp, Artificial
  probe
  misc_feature (1)..(25): SEQ ID NO: 3676; WAN0249GB; Start 282; Stop 306
taccagatataccaagacatcgtca

SEQ ID NO: 361260 - DNA, 25 bp, Artificial
  probe
  misc_feature (1)..(25): SEQ ID NO: 3676; WAN0249GB; Start 287; Stop 311
gatataccaagacatcgtcaccatc

SEQ ID NO: 361261 - DNA, 25 bp, Artificial
  probe
  misc_feature (1)..(25): SEQ ID NO: 3676; WAN0249GB; Start 272; Stop 296
tgtaagtgagtaccagatataccaa

SEQ ID NO: 361262 - DNA, 25 bp, Artificial
  probe
  misc_feature (1)..(25): SEQ ID NO: 3676; WAN0249GB; Start 288; Stop 312
atataccaagacatcgtcaccatct

SEQ ID NO: 361263 - DNA, 25 bp, Artificial
  probe
  misc_feature (1)..(25): SEQ ID NO: 3676; WAN0249GB; Start 286; Stop 310
agatataccaagacatcgtcaccat

SEQ ID NO: 361264 - DNA, 25 bp, Artificial
  probe
  misc_feature (1)..(25): SEQ ID NO: 3676; WAN0249GB; Start 290; Stop 314
ataccaagacatcgtcaccatctaa

SEQ ID NO: 361265 - DNA, 25 bp, Artificial
  probe
  misc_feature (1)..(25): SEQ ID NO: 3676; WAN0249GB; Start 271; Stop 295
atgtaagtgagtaccagatatacca

SEQ ID NO: 361266 - DNA, 25 bp, Artificial
  probe
  misc_feature (1)..(25): SEQ ID NO: 3676; WAN0249GB; Start 281; Stop 305
gtaccagatataccaagacatcgtc

SEQ ID NO: 361267 - DNA, 25 bp, Artificial
  probe
  misc_feature (1)..(25): SEQ ID NO: 3676; WAN0249GB; Start 273; Stop 297
gtaagtgagtaccagatataccaag

SEQ ID NO: 361268 - DNA, 25 bp, Artificial
  probe
  misc_feature (1)..(25): SEQ ID NO: 3676; WAN0249GB; Start 296; Stop 320
agacatcgtcaccatctaaggtata

SEQ ID NO: 361269 - DNA, 25 bp, Artificial
  probe
  misc_feature (1)..(25): SEQ ID NO: 3676; WAN0249GB; Start 297; Stop 321
gacatcgtcaccatctaaggtatat

SEQ ID NO: 361270 - DNA, 25 bp, Artificial
  probe
  misc_feature (1)..(25): SEQ ID NO: 3676; WAN0249GB; Start 274; Stop 298
taagtgagtaccagatataccaaga

SEQ ID NO: 361271 - DNA, 25 bp, Artificial
  probe
  misc_feature (1)..(25): SEQ ID NO: 3676; WAN0249GB; Start 301; Stop 325
tcgtcaccatctaaggtatattcaa

SEQ ID NO: 361272 - DNA, 25 bp, Artificial
  probe
  misc_feature (1)..(25): SEQ ID NO: 3676; WAN0249GB; Start 298; Stop 322
acatcgtcaccatctaaggtatatt

SEQ ID NO: 361273 - DNA, 25 bp, Artificial
  probe
  misc_feature (1)..(25): SEQ ID NO: 3676; WAN0249GB; Start 295; Stop 319
aagacatcgtcaccatctaaggtat

SEQ ID NO: 361274 - DNA, 25 bp, Artificial
  probe
  misc_feature (1)..(25): SEQ ID NO: 3676; WAN0249GB; Start 291; Stop 315
taccaagacatcgtcaccatctaag

SEQ ID NO: 361275 - DNA, 25 bp, Artificial
  probe
  misc_feature (1)..(25): SEQ ID NO: 3676; WAN0249GB; Start 285; Stop 309
cagatataccaagacatcgtcacca

SEQ ID NO: 361276 - DNA, 25 bp, Artificial
  probe
  misc_feature (1)..(25): SEQ ID NO: 3676; WAN0249GB; Start 283; Stop 307
accagatataccaagacatcgtcac

SEQ ID NO: 361277 - DNA, 25 bp, Artificial
  probe
  misc_feature (1)..(25): SEQ ID NO: 3676; WAN0249GB; Start 300; Stop 324
atcgtcaccatctaaggtatattca

SEQ ID NO: 361278 - DNA, 25 bp, Artificial
  probe
  misc_feature (1)..(25): SEQ ID NO: 3676; WAN0249GB; Start 299; Stop 323
catcgtcaccatctaaggtatattc

SEQ ID NO: 361279 - DNA, 25 bp, Artificial
  probe
  misc_feature (1)..(25): SEQ ID NO: 3676; WAN0249GB; Start 294; Stop 318
caagacatcgtcaccatctaaggta

SEQ ID NO: 361280 - DNA, 25 bp, Artificial
  probe
  misc_feature (1)..(25): SEQ ID NO: 3676; WAN0249GB; Start 284; Stop 308
ccagatataccaagacatcgtcacc

SEQ ID NO: 361281 - DNA, 25 bp, Artificial
  probe
  misc_feature (1)..(25): SEQ ID NO: 3676; WAN0249GB; Start 1; Stop 25
gcattcaatacgaatcaatacagaa

SEQ ID NO: 361282 - DNA, 25 bp, Artificial
  probe
  misc_feature (1)..(25): SEQ ID NO: 3676; WAN0249GB; Start 195; Stop 219
tttcaaataacgcctctacactatt

SEQ ID NO: 361283 - DNA, 25 bp, Artificial
  probe
  misc_feature (1)..(25): SEQ ID NO: 3676; WAN0249GB; Start 4; Stop 28
ttcaatacgaatcaatacagaagaa

SEQ ID NO: 361284 - DNA, 25 bp, Artificial
  probe
  misc_feature (1)..(25): SEQ ID NO: 3676; WAN0249GB; Start 337; Stop 361
tgaccaactagatttctgaatatcc

SEQ ID NO: 361285 - DNA, 25 bp, Artificial
  probe
  misc_feature (1)..(25): SEQ ID NO: 3677; WAN024CAK-M; Start 607; Stop 631
cagctagaccatccagagttagatc

SEQ ID NO: 361286 - DNA, 25 bp, Artificial
  probe
  misc_feature (1)..(25): SEQ ID NO: 3677; WAN024CAK-M; Start 456; Stop 480
gtcaagacctagtcaaactgaagta

SEQ ID NO: 361287 - DNA, 25 bp, Artificial
  probe
  misc_feature (1)..(25): SEQ ID NO: 3677; WAN024CAK-M; Start 457; Stop 481
tcaagacctagtcaaactgaagtag

SEQ ID NO: 361288 - DNA, 25 bp, Artificial
  probe
  misc_feature (1)..(25): SEQ ID NO: 3677; WAN024CAK-M; Start 610; Stop 634
ctagaccatccagagttagatcttg

SEQ ID NO: 361289 - DNA, 25 bp, Artificial
  probe
  misc_feature (1)..(25): SEQ ID NO: 3677; WAN024CAK-M; Start 606; Stop 630
ccagctagaccatccagagttagat

SEQ ID NO: 361290 - DNA, 25 bp, Artificial
  probe
  misc_feature (1)..(25): SEQ ID NO: 3677; WAN024CAK-M; Start 458; Stop 482
caagacctagtcaaactgaagtagc

SEQ ID NO: 361291 - DNA, 25 bp, Artificial
  probe
  misc_feature (1)..(25): SEQ ID NO: 3677; WAN024CAK-M; Start 609; Stop 633
gctagaccatccagagttagatctt

SEQ ID NO: 361292 - DNA, 25 bp, Artificial
  probe
  misc_feature (1)..(25): SEQ ID NO: 3677; WAN024CAK-M; Start 614; Stop 638
accatccagagttagatcttgctag

SEQ ID NO: 361293 - DNA, 25 bp, Artificial
  probe
  misc_feature (1)..(25): SEQ ID NO: 3677; WAN024CAK-M; Start 463; Stop 487
cctagtcaaactgaagtagctgatt

SEQ ID NO: 361294 - DNA, 25 bp, Artificial
  probe
  misc_feature (1)..(25): SEQ ID NO: 3677; WAN024CAK-M; Start 613; Stop 637
gaccatccagagttagatcttgcta

SEQ ID NO: 361295 - DNA, 25 bp, Artificial
  probe
  misc_feature (1)..(25): SEQ ID NO: 3677; WAN024CAK-M; Start 611; Stop 635
tagaccatccagagttagatcttgc

SEQ ID NO: 361296 - DNA, 25 bp, Artificial
  probe
  misc_feature (1)..(25): SEQ ID NO: 3677; WAN024CAK-M; Start 467; Stop 491
gtcaaactgaagtagctgattatca

SEQ ID NO: 361297 - DNA, 25 bp, Artificial
  probe
  misc_feature (1)..(25): SEQ ID NO: 3677; WAN024CAK-M; Start 462; Stop 486
acctagtcaaactgaagtagctgat

SEQ ID NO: 361298 - DNA, 25 bp, Artificial
  probe
  misc_feature (1)..(25): SEQ ID NO: 3677; WAN024CAK-M; Start 608; Stop 632
agctagaccatccagagttagatct

SEQ ID NO: 361299 - DNA, 25 bp, Artificial
  probe
  misc_feature (1)..(25): SEQ ID NO: 3677; WAN024CAK-M; Start 466; Stop 490
agtcaaactgaagtagctgattatc

SEQ ID NO: 361300 - DNA, 25 bp, Artificial
  probe
  misc_feature (1)..(25): SEQ ID NO: 3677; WAN024CAK-M; Start 459; Stop 483
aagacctagtcaaactgaagtagct

SEQ ID NO: 361301 - DNA, 25 bp, Artificial
  probe
  misc_feature (1)..(25): SEQ ID NO: 3677; WAN024CAK-M; Start 455; Stop 479
cgtcaagacctagtcaaactgaagt

SEQ ID NO: 361302 - DNA, 25 bp, Artificial
  probe
  misc_feature (1)..(25): SEQ ID NO: 3677; WAN024CAK-M; Start 604; Stop 628
gaccagctagaccatccagagttag

SEQ ID NO: 361303 - DNA, 25 bp, Artificial
  probe
  misc_feature (1)..(25): SEQ ID NO: 3677; WAN024CAK-M; Start 464; Stop 488
ctagtcaaactgaagtagctgatta

SEQ ID NO: 361304 - DNA, 25 bp, Artificial
  probe
  misc_feature (1)..(25): SEQ ID NO: 3677; WAN024CAK-M; Start 497; Stop 521
aattgactgatgaagggcaggattt

SEQ ID NO: 361305 - DNA, 25 bp, Artificial
  probe
  misc_feature (1)..(25): SEQ ID NO: 3677; WAN024CAK-M; Start 596; Stop 620
ctaactacgaccagctagaccatcc

SEQ ID NO: 361306 - DNA, 25 bp, Artificial
  probe
  misc_feature (1)..(25): SEQ ID NO: 3677; WAN024CAK-M; Start 461; Stop 485
gacctagtcaaactgaagtagctga

SEQ ID NO: 361307 - DNA, 25 bp, Artificial
  probe
  misc_feature (1)..(25): SEQ ID NO: 3677; WAN024CAK-M; Start 460; Stop 484
agacctagtcaaactgaagtagctg

SEQ ID NO: 361308 - DNA, 25 bp, Artificial
  probe
  misc_feature (1)..(25): SEQ ID NO: 3677; WAN024CAK-M; Start 491; Stop 515
aggtagaattgactgatgaagggca

SEQ ID NO: 361309 - DNA, 25 bp, Artificial
  probe
  misc_feature (1)..(25): SEQ ID NO: 3677; WAN024CAK-M; Start 605; Stop 629
accagctagaccatccagagttaga

SEQ ID NO: 361310 - DNA, 25 bp, Artificial
  probe
  misc_feature (1)..(25): SEQ ID NO: 3677; WAN024CAK-M; Start 496; Stop 520
gaattgactgatgaagggcaggatt

SEQ ID NO: 361311 - DNA, 25 bp, Artificial
  probe
  misc_feature (1)..(25): SEQ ID NO: 3677; WAN024CAK-M; Start 612; Stop 636
agaccatccagagttagatcttgct

SEQ ID NO: 361312 - DNA, 25 bp, Artificial
  probe
  misc_feature (1)..(25): SEQ ID NO: 3677; WAN024CAK-M; Start 493; Stop 517
gtagaattgactgatgaagggcagg

SEQ ID NO: 361313 - DNA, 25 bp, Artificial
  probe
  misc_feature (1)..(25): SEQ ID NO: 3677; WAN024CAK-M; Start 492; Stop 516
ggtagaattgactgatgaagggcag

SEQ ID NO: 361314 - DNA, 25 bp, Artificial
  probe
  misc_feature (1)..(25): SEQ ID NO: 3677; WAN024CAK-M; Start 490; Stop 514
caggtagaattgactgatgaagggc

SEQ ID NO: 361315 - DNA, 25 bp, Artificial
  probe
  misc_feature (1)..(25): SEQ ID NO: 3677; WAN024CAK-M; Start 465; Stop 489
tagtcaaactgaagtagctgattat

SEQ ID NO: 361316 - DNA, 25 bp, Artificial
  probe
  misc_feature (1)..(25): SEQ ID NO: 3677; WAN024CAK-M; Start 454; Stop 478
ccgtcaagacctagtcaaactgaag

SEQ ID NO: 361317 - DNA, 25 bp, Artificial
  probe
  misc_feature (1)..(25): SEQ ID NO: 3677; WAN024CAK-M; Start 494; Stop 518
tagaattgactgatgaagggcagga

SEQ ID NO: 361318 - DNA, 25 bp, Artificial
  probe
  misc_feature (1)..(25): SEQ ID NO: 3678; WAN024FKJ-M; Start 37; Stop 61
aaggatgtggatgttctctatatcg

SEQ ID NO: 361319 - DNA, 25 bp, Artificial
  probe
  misc_feature (1)..(25): SEQ ID NO: 3678; WAN024FKJ-M; Start 207; Stop 231
tctccattcagcaaccaagtatcta

SEQ ID NO: 361320 - DNA, 25 bp, Artificial
  probe
  misc_feature (1)..(25): SEQ ID NO: 3678; WAN024FKJ-M; Start 4; Stop 28
aatacagaagaagagttgattgccg

SEQ ID NO: 361321 - DNA, 25 bp, Artificial
  probe
  misc_feature (1)..(25): SEQ ID NO: 3678; WAN024FKJ-M; Start 208; Stop 232
ctccattcagcaaccaagtatctag

SEQ ID NO: 361322 - DNA, 25 bp, Artificial
  probe
  misc_feature (1)..(25): SEQ ID NO: 3678; WAN024FKJ-M; Start 10; Stop 34
gaagaagagttgattgccgagttag

SEQ ID NO: 361323 - DNA, 25 bp, Artificial
  probe
  misc_feature (1)..(25): SEQ ID NO: 3678; WAN024FKJ-M; Start 206; Stop 230
ttctccattcagcaaccaagtatct

SEQ ID NO: 361324 - DNA, 25 bp, Artificial
  probe
  misc_feature (1)..(25): SEQ ID NO: 3678; WAN024FKJ-M; Start 12; Stop 36
agaagagttgattgccgagttagaa

SEQ ID NO: 361325 - DNA, 25 bp, Artificial
  probe
  misc_feature (1)..(25): SEQ ID NO: 3678; WAN024FKJ-M; Start 11; Stop 35
aagaagagttgattgccgagttaga

SEQ ID NO: 361326 - DNA, 25 bp, Artificial
  probe
  misc_feature (1)..(25): SEQ ID NO: 3678; WAN024FKJ-M; Start 9; Stop 33
agaagaagagttgattgccgagtta

SEQ ID NO: 361327 - DNA, 25 bp, Artificial
  probe
  misc_feature (1)..(25): SEQ ID NO: 3678; WAN024FKJ-M; Start 5; Stop 29
atacagaagaagagttgattgccga

SEQ ID NO: 361328 - DNA, 25 bp, Artificial
  probe
  misc_feature (1)..(25): SEQ ID NO: 3678; WAN024FKJ-M; Start 211; Stop 235
cattcagcaaccaagtatctagcag

SEQ ID NO: 361329 - DNA, 25 bp, Artificial
  probe
  misc_feature (1)..(25): SEQ ID NO: 3678; WAN024FKJ-M; Start 205; Stop 229
gttctccattcagcaaccaagtatc

SEQ ID NO: 361330 - DNA, 25 bp, Artificial
  probe
  misc_feature (1)..(25): SEQ ID NO: 3678; WAN024FKJ-M; Start 38; Stop 62
aggatgtggatgttctctatatcga

SEQ ID NO: 361331 - DNA, 25 bp, Artificial
  probe
  misc_feature (1)..(25): SEQ ID NO: 3678; WAN024FKJ-M; Start 6; Stop 30
tacagaagaagagttgattgccgag

SEQ ID NO: 361332 - DNA, 25 bp, Artificial
  probe
  misc_feature (1)..(25): SEQ ID NO: 3678; WAN024FKJ-M; Start 39; Stop 63
ggatgtggatgttctctatatcgaa

SEQ ID NO: 361333 - DNA, 25 bp, Artificial
  probe
  misc_feature (1)..(25): SEQ ID NO: 3678; WAN024FKJ-M; Start 200; Stop 224
atatcgttctccattcagcaaccaa

SEQ ID NO: 361334 - DNA, 25 bp, Artificial
  probe
  misc_feature (1)..(25): SEQ ID NO: 3678; WAN024FKJ-M; Start 212; Stop 236
attcagcaaccaagtatctagcagg

SEQ ID NO: 361335 - DNA, 25 bp, Artificial
  probe
  misc_feature (1)..(25): SEQ ID NO: 3678; WAN024FKJ-M; Start 209; Stop 233
tccattcagcaaccaagtatctagc

SEQ ID NO: 361336 - DNA, 25 bp, Artificial
  probe
  misc_feature (1)..(25): SEQ ID NO: 3678; WAN024FKJ-M; Start 3; Stop 27
caatacagaagaagagttgattgcc

SEQ ID NO: 361337 - DNA, 25 bp, Artificial
  probe
  misc_feature (1)..(25): SEQ ID NO: 3678; WAN024FKJ-M; Start 2; Stop 26
ccaatacagaagaagagttgattgc

SEQ ID NO: 361338 - DNA, 25 bp, Artificial
  probe
  misc_feature (1)..(25): SEQ ID NO: 3678; WAN024FKJ-M; Start 1; Stop 25
gccaatacagaagaagagttgattg

SEQ ID NO: 361339 - DNA, 25 bp, Artificial
  probe
  misc_feature (1)..(25): SEQ ID NO: 3678; WAN024FKJ-M; Start 139; Stop 163
gtggtggtggacaataccttctata

SEQ ID NO: 361340 - DNA, 25 bp, Artificial
  probe
  misc_feature (1)..(25): SEQ ID NO: 3678; WAN024FKJ-M; Start 210; Stop 234
ccattcagcaaccaagtatctagca

SEQ ID NO: 361341 - DNA, 25 bp, Artificial
  probe
  misc_feature (1)..(25): SEQ ID NO: 3678; WAN024FKJ-M; Start 183; Stop 207
gattgaagatggagcagatatcgtt

SEQ ID NO: 361342 - DNA, 25 bp, Artificial
  probe
  misc_feature (1)..(25): SEQ ID NO: 3678; WAN024FKJ-M; Start 13; Stop 37
gaagagttgattgccgagttagaaa

SEQ ID NO: 361343 - DNA, 25 bp, Artificial
  probe
  misc_feature (1)..(25): SEQ ID NO: 3678; WAN024FKJ-M; Start 184; Stop 208
attgaagatggagcagatatcgttc

SEQ ID NO: 361344 - DNA, 25 bp, Artificial
  probe
  misc_feature (1)..(25): SEQ ID NO: 3678; WAN024FKJ-M; Start 8; Stop 32
cagaagaagagttgattgccgagtt

SEQ ID NO: 361345 - DNA, 25 bp, Artificial
  probe
  misc_feature (1)..(25): SEQ ID NO: 3678; WAN024FKJ-M; Start 179; Stop 203
gtccgattgaagatggagcagatat

SEQ ID NO: 361346 - DNA, 25 bp, Artificial
  probe
  misc_feature (1)..(25): SEQ ID NO: 3678; WAN024FKJ-M; Start 201; Stop 225
tatcgttctccattcagcaaccaag

SEQ ID NO: 361347 - DNA, 25 bp, Artificial
  probe
  misc_feature (1)..(25): SEQ ID NO: 3678; WAN024FKJ-M; Start 204; Stop 228
cgttctccattcagcaaccaagtat

SEQ ID NO: 361348 - DNA, 25 bp, Artificial
  probe
  misc_feature (1)..(25): SEQ ID NO: 3678; WAN024FKJ-M; Start 185; Stop 209
ttgaagatggagcagatatcgttct

SEQ ID NO: 361349 - DNA, 25 bp, Artificial
  probe
  misc_feature (1)..(25): SEQ ID NO: 3678; WAN024FKJ-M; Start 167; Stop 191
ctatctaccaacgtccgattgaaga

SEQ ID NO: 361350 - DNA, 25 bp, Artificial
  probe
  misc_feature (1)..(25): SEQ ID NO: 3678; WAN024FKJ-M; Start 36; Stop 60
aaaggatgtggatgttctctatatc

SEQ ID NO: 361351 - DNA, 25 bp, Artificial
  probe
  misc_feature (1)..(25): SEQ ID NO: 3679; WAN024AHB; Start 24; Stop 48
tttgaaatccacttccttttagggt

SEQ ID NO: 361352 - DNA, 25 bp, Artificial
  probe
  misc_feature (1)..(25): SEQ ID NO: 3679; WAN024AHB; Start 23; Stop 47
atttgaaatccacttccttttaggg

SEQ ID NO: 361353 - DNA, 25 bp, Artificial
  probe
  misc_feature (1)..(25): SEQ ID NO: 3679; WAN024AHB; Start 17; Stop 41
actaatatttgaaatccacttcctt

SEQ ID NO: 361354 - DNA, 25 bp, Artificial
  probe
  misc_feature (1)..(25): SEQ ID NO: 3679; WAN024AHB; Start 22; Stop 46
tatttgaaatccacttccttttagg

SEQ ID NO: 361355 - DNA, 25 bp, Artificial
  probe
  misc_feature (1)..(25): SEQ ID NO: 3679; WAN024AHB; Start 16; Stop 40
tactaatatttgaaatccacttcct

SEQ ID NO: 361356 - DNA, 25 bp, Artificial
  probe
  misc_feature (1)..(25): SEQ ID NO: 3679; WAN024AHB; Start 18; Stop 42
ctaatatttgaaatccacttccttt

SEQ ID NO: 361357 - DNA, 25 bp, Artificial
  probe
  misc_feature (1)..(25): SEQ ID NO: 3679; WAN024AHB; Start 15; Stop 39
ctactaatatttgaaatccacttcc

SEQ ID NO: 361358 - DNA, 25 bp, Artificial
  probe
  misc_feature (1)..(25): SEQ ID NO: 3679; WAN024AHB; Start 1; Stop 25
gccagttctgtaaactactaatatt

SEQ ID NO: 361359 - DNA, 25 bp, Artificial
  probe
  misc_feature (1)..(25): SEQ ID NO: 3679; WAN024AHB; Start 21; Stop 45
atatttgaaatccacttccttttag

SEQ ID NO: 361360 - DNA, 25 bp, Artificial
  probe
  misc_feature (1)..(25): SEQ ID NO: 3679; WAN024AHB; Start 20; Stop 44
aatatttgaaatccacttcctttta

SEQ ID NO: 361361 - DNA, 25 bp, Artificial
  probe
  misc_feature (1)..(25): SEQ ID NO: 3679; WAN024AHB; Start 19; Stop 43
taatatttgaaatccacttcctttt

SEQ ID NO: 361362 - DNA, 25 bp, Artificial
  probe
  misc_feature (1)..(25): SEQ ID NO: 3680; WAN024A4Y; Start 6; Stop 30
tctcttttgaaagtttatggacgaa

SEQ ID NO: 361363 - DNA, 25 bp, Artificial
  probe
  misc_feature (1)..(25): SEQ ID NO: 3680; WAN024A4Y; Start 5; Stop 29
ttctcttttgaaagtttatggacga

SEQ ID NO: 361364 - DNA, 25 bp, Artificial
  probe
  misc_feature (1)..(25): SEQ ID NO: 3680; WAN024A4Y; Start 7; Stop 31
ctcttttgaaagtttatggacgaaa

SEQ ID NO: 361365 - DNA, 25 bp, Artificial
  probe
  misc_feature (1)..(25): SEQ ID NO: 3680; WAN024A4Y; Start 4; Stop 28
attctcttttgaaagtttatggacg

SEQ ID NO: 361366 - DNA, 25 bp, Artificial
  probe
  misc_feature (1)..(25): SEQ ID NO: 3680; WAN024A4Y; Start 8; Stop 32
tcttttgaaagtttatggacgaaaa

SEQ ID NO: 361367 - DNA, 25 bp, Artificial
  probe
  misc_feature (1)..(25): SEQ ID NO: 3680; WAN024A4Y; Start 3; Stop 27
cattctcttttgaaagtttatggac

SEQ ID NO: 361368 - DNA, 25 bp, Artificial
  probe
  misc_feature (1)..(25): SEQ ID NO: 3680; WAN024A4Y; Start 1; Stop 25
gccattctcttttgaaagtttatgg

SEQ ID NO: 361369 - DNA, 25 bp, Artificial
  probe
  misc_feature (1)..(25): SEQ ID NO: 3680; WAN024A4Y; Start 2; Stop 26
ccattctcttttgaaagtttatgga

SEQ ID NO: 361370 - DNA, 25 bp, Artificial
  probe
  misc_feature (1)..(25): SEQ ID NO: 3681; WAN0249V8; Start 74; Stop 98
tatgctacagttgtggtaacgatta

SEQ ID NO: 361371 - DNA, 25 bp, Artificial
  probe
  misc_feature (1)..(25): SEQ ID NO: 3681; WAN0249V8; Start 70; Stop 94
tagatatgctacagttgtggtaacg

SEQ ID NO: 361372 - DNA, 25 bp, Artificial
  probe
  misc_feature (1)..(25): SEQ ID NO: 3681; WAN0249V8; Start 73; Stop 97
atatgctacagttgtggtaacgatt

SEQ ID NO: 361373 - DNA, 25 bp, Artificial
  probe
  misc_feature (1)..(25): SEQ ID NO: 3681; WAN0249V8; Start 72; Stop 96
gatatgctacagttgtggtaacgat

SEQ ID NO: 361374 - DNA, 25 bp, Artificial
  probe
  misc_feature (1)..(25): SEQ ID NO: 3681; WAN0249V8; Start 71; Stop 95
agatatgctacagttgtggtaacga

SEQ ID NO: 361375 - DNA, 25 bp, Artificial
  probe
  misc_feature (1)..(25): SEQ ID NO: 3681; WAN0249V8; Start 67; Stop 91
acatagatatgctacagttgtggta

SEQ ID NO: 361376 - DNA, 25 bp, Artificial
  probe
  misc_feature (1)..(25): SEQ ID NO: 3681; WAN0249V8; Start 66; Stop 90
tacatagatatgctacagttgtggt

SEQ ID NO: 361377 - DNA, 25 bp, Artificial
  probe
  misc_feature (1)..(25): SEQ ID NO: 3681; WAN0249V8; Start 69; Stop 93
atagatatgctacagttgtggtaac

SEQ ID NO: 361378 - DNA, 25 bp, Artificial
  probe
  misc_feature (1)..(25): SEQ ID NO: 3681; WAN0249V8; Start 68; Stop 92
catagatatgctacagttgtggtaa

SEQ ID NO: 361379 - DNA, 25 bp, Artificial
  probe
  misc_feature (1)..(25): SEQ ID NO: 3681; WAN0249V8; Start 65; Stop 89
ttacatagatatgctacagttgtgg

SEQ ID NO: 361380 - DNA, 25 bp, Artificial
  probe
  misc_feature (1)..(25): SEQ ID NO: 3681; WAN0249V8; Start 75; Stop 99
atgctacagttgtggtaacgattac

SEQ ID NO: 361381 - DNA, 25 bp, Artificial
  probe
  misc_feature (1)..(25): SEQ ID NO: 3681; WAN0249V8; Start 76; Stop 100
tgctacagttgtggtaacgattaca

SEQ ID NO: 361382 - DNA, 25 bp, Artificial
  probe
  misc_feature (1)..(25): SEQ ID NO: 3681; WAN0249V8; Start 64; Stop 88
attacatagatatgctacagttgtg

SEQ ID NO: 361383 - DNA, 25 bp, Artificial
  probe
  misc_feature (1)..(25): SEQ ID NO: 3681; WAN0249V8; Start 62; Stop 86
tgattacatagatatgctacagttg

SEQ ID NO: 361384 - DNA, 25 bp, Artificial
  probe
  misc_feature (1)..(25): SEQ ID NO: 3681; WAN0249V8; Start 77; Stop 101
gctacagttgtggtaacgattacaa

SEQ ID NO: 361385 - DNA, 25 bp, Artificial
  probe
  misc_feature (1)..(25): SEQ ID NO: 3681; WAN0249V8; Start 63; Stop 87
gattacatagatatgctacagttgt

SEQ ID NO: 361386 - DNA, 25 bp, Artificial
  probe
  misc_feature (1)..(25): SEQ ID NO: 3681; WAN0249V8; Start 1; Stop 25
gcccatcatcctaaaagtaaagaat

SEQ ID NO: 361387 - DNA, 25 bp, Artificial
  probe
  misc_feature (1)..(25): SEQ ID NO: 3681; WAN0249V8; Start 61; Stop 85
ttgattacatagatatgctacagtt

SEQ ID NO: 361388 - DNA, 25 bp, Artificial
  probe
  misc_feature (1)..(25): SEQ ID NO: 3681; WAN0249V8; Start 47; Stop 71
ccttctttcttgcattgattacata

SEQ ID NO: 361389 - DNA, 25 bp, Artificial
  probe
  misc_feature (1)..(25): SEQ ID NO: 3681; WAN0249V8; Start 60; Stop 84
attgattacatagatatgctacagt

SEQ ID NO: 361390 - DNA, 25 bp, Artificial
  probe
  misc_feature (1)..(25): SEQ ID NO: 3681; WAN0249V8; Start 91; Stop 115
aacgattacaaaataaaaggagcat

SEQ ID NO: 361391 - DNA, 25 bp, Artificial
  probe
  misc_feature (1)..(25): SEQ ID NO: 3681; WAN0249V8; Start 78; Stop 102
ctacagttgtggtaacgattacaaa

SEQ ID NO: 361392 - DNA, 25 bp, Artificial
  probe
  misc_feature (1)..(25): SEQ ID NO: 3681; WAN0249V8; Start 59; Stop 83
cattgattacatagatatgctacag

SEQ ID NO: 361393 - DNA, 25 bp, Artificial
  probe
  misc_feature (1)..(25): SEQ ID NO: 3681; WAN0249V8; Start 92; Stop 116
acgattacaaaataaaaggagcatg

SEQ ID NO: 361394 - DNA, 25 bp, Artificial
  probe
  misc_feature (1)..(25): SEQ ID NO: 3681; WAN0249V8; Start 2; Stop 26
cccatcatcctaaaagtaaagaatc

SEQ ID NO: 361395 - DNA, 25 bp, Artificial
  probe
  misc_feature (1)..(25): SEQ ID NO: 3681; WAN0249V8; Start 90; Stop 114
taacgattacaaaataaaaggagca

SEQ ID NO: 361396 - DNA, 25 bp, Artificial
  probe
  misc_feature (1)..(25): SEQ ID NO: 3681; WAN0249V8; Start 49; Stop 73
ttctttcttgcattgattacataga

SEQ ID NO: 361397 - DNA, 25 bp, Artificial
  probe
  misc_feature (1)..(25): SEQ ID NO: 3681; WAN0249V8; Start 48; Stop 72
cttctttcttgcattgattacatag

SEQ ID NO: 361398 - DNA, 25 bp, Artificial
  probe
  misc_feature (1)..(25): SEQ ID NO: 3681; WAN0249V8; Start 50; Stop 74
tctttcttgcattgattacatagat

SEQ ID NO: 361399 - DNA, 25 bp, Artificial
  probe
  misc_feature (1)..(25): SEQ ID NO: 3681; WAN0249V8; Start 3; Stop 27
ccatcatcctaaaagtaaagaatct

SEQ ID NO: 361400 - DNA, 25 bp, Artificial
  probe
  misc_feature (1)..(25): SEQ ID NO: 3681; WAN0249V8; Start 53; Stop 77
ttcttgcattgattacatagatatg

SEQ ID NO: 361401 - DNA, 25 bp, Artificial
  probe
  misc_feature (1)..(25): SEQ ID NO: 3681; WAN0249V8; Start 89; Stop 113
gtaacgattacaaaataaaaggagc

SEQ ID NO: 361402 - DNA, 25 bp, Artificial
  probe
  misc_feature (1)..(25): SEQ ID NO: 3681; WAN0249V8; Start 87; Stop 111
tggtaacgattacaaaataaaagga

SEQ ID NO: 361403 - DNA, 25 bp, Artificial
  probe
  misc_feature (1)..(25): SEQ ID NO: 3682; WAN024A3N; Start 304; Stop 328
accaagcgtgttataatgaatactg

SEQ ID NO: 361404 - DNA, 25 bp, Artificial
  probe
  misc_feature (1)..(25): SEQ ID NO: 3682; WAN024A3N; Start 305; Stop 329
ccaagcgtgttataatgaatactgc

SEQ ID NO: 361405 - DNA, 25 bp, Artificial
  probe
  misc_feature (1)..(25): SEQ ID NO: 3682; WAN024A3N; Start 315; Stop 339
tataatgaatactgctcaagcgacc

SEQ ID NO: 361406 - DNA, 25 bp, Artificial
  probe
  misc_feature (1)..(25): SEQ ID NO: 3682; WAN024A3N; Start 309; Stop 333
gcgtgttataatgaatactgctcaa

SEQ ID NO: 361407 - DNA, 25 bp, Artificial
  probe
  misc_feature (1)..(25): SEQ ID NO: 3682; WAN024A3N; Start 312; Stop 336
tgttataatgaatactgctcaagcg

SEQ ID NO: 361408 - DNA, 25 bp, Artificial
  probe
  misc_feature (1)..(25): SEQ ID NO: 3682; WAN024A3N; Start 294; Stop 318
gtcttctctaaccaagcgtgttata

SEQ ID NO: 361409 - DNA, 25 bp, Artificial
  probe
  misc_feature (1)..(25): SEQ ID NO: 3682; WAN024A3N; Start 314; Stop 338
ttataatgaatactgctcaagcgac

SEQ ID NO: 361410 - DNA, 25 bp, Artificial
  probe
  misc_feature (1)..(25): SEQ ID NO: 3682; WAN024A3N; Start 313; Stop 337
gttataatgaatactgctcaagcga

SEQ ID NO: 361411 - DNA, 25 bp, Artificial
  probe
  misc_feature (1)..(25): SEQ ID NO: 3682; WAN024A3N; Start 303; Stop 327
aaccaagcgtgttataatgaatact

SEQ ID NO: 361412 - DNA, 25 bp, Artificial
  probe
  misc_feature (1)..(25): SEQ ID NO: 3682; WAN024A3N; Start 284; Stop 308
gctcttccttgtcttctctaaccaa

SEQ ID NO: 361413 - DNA, 25 bp, Artificial
  probe
  misc_feature (1)..(25): SEQ ID NO: 3682; WAN024A3N; Start 281; Stop 305
taagctcttccttgtcttctctaac

SEQ ID NO: 361414 - DNA, 25 bp, Artificial
  probe
  misc_feature (1)..(25): SEQ ID NO: 3682; WAN024A3N; Start 280; Stop 304
ttaagctcttccttgtcttctctaa

SEQ ID NO: 361415 - DNA, 25 bp, Artificial
  probe
  misc_feature (1)..(25): SEQ ID NO: 3682; WAN024A3N; Start 316; Stop 340
ataatgaatactgctcaagcgacct

SEQ ID NO: 361416 - DNA, 25 bp, Artificial
  probe
  misc_feature (1)..(25): SEQ ID NO: 3682; WAN024A3N; Start 226; Stop 250
actcacatcattcacataatctgta

SEQ ID NO: 361417 - DNA, 25 bp, Artificial
  probe
  misc_feature (1)..(25): SEQ ID NO: 3682; WAN024A3N; Start 225; Stop 249
tactcacatcattcacataatctgt

SEQ ID NO: 361418 - DNA, 25 bp, Artificial
  probe
  misc_feature (1)..(25): SEQ ID NO: 3682; WAN024A3N; Start 311; Stop 335
gtgttataatgaatactgctcaagc

SEQ ID NO: 361419 - DNA, 25 bp, Artificial
  probe
  misc_feature (1)..(25): SEQ ID NO: 3682; WAN024A3N; Start 298; Stop 322
tctctaaccaagcgtgttataatga

SEQ ID NO: 361420 - DNA, 25 bp, Artificial
  probe
  misc_feature (1)..(25): SEQ ID NO: 3682; WAN024A3N; Start 295; Stop 319
tcttctctaaccaagcgtgttataa

SEQ ID NO: 361421 - DNA, 25 bp, Artificial
  probe
  misc_feature (1)..(25): SEQ ID NO: 3682; WAN024A3N; Start 310; Stop 334
cgtgttataatgaatactgctcaag

SEQ ID NO: 361422 - DNA, 25 bp, Artificial
  probe
  misc_feature (1)..(25): SEQ ID NO: 3682; WAN024A3N; Start 317; Stop 341
taatgaatactgctcaagcgacctt

SEQ ID NO: 361423 - DNA, 25 bp, Artificial
  probe
  misc_feature (1)..(25): SEQ ID NO: 3682; WAN024A3N; Start 299; Stop 323
ctctaaccaagcgtgttataatgaa

SEQ ID NO: 361424 - DNA, 25 bp, Artificial
  probe
  misc_feature (1)..(25): SEQ ID NO: 3682; WAN024A3N; Start 297; Stop 321
ttctctaaccaagcgtgttataatg

SEQ ID NO: 361425 - DNA, 25 bp, Artificial
  probe
  misc_feature (1)..(25): SEQ ID NO: 3682; WAN024A3N; Start 296; Stop 320
cttctctaaccaagcgtgttataat

SEQ ID NO: 361426 - DNA, 25 bp, Artificial
  probe
  misc_feature (1)..(25): SEQ ID NO: 3682; WAN024A3N; Start 293; Stop 317
tgtcttctctaaccaagcgtgttat

SEQ ID NO: 361427 - DNA, 25 bp, Artificial
  probe
  misc_feature (1)..(25): SEQ ID NO: 3682; WAN024A3N; Start 217; Stop 241
agaaggtatactcacatcattcaca

SEQ ID NO: 361428 - DNA, 25 bp, Artificial
  probe
  misc_feature (1)..(25): SEQ ID NO: 3682; WAN024A3N; Start 282; Stop 306
aagctcttccttgtcttctctaacc

SEQ ID NO: 361429 - DNA, 25 bp, Artificial
  probe
  misc_feature (1)..(25): SEQ ID NO: 3682; WAN024A3N; Start 292; Stop 316
ttgtcttctctaaccaagcgtgtta

SEQ ID NO: 361430 - DNA, 25 bp, Artificial
  probe
  misc_feature (1)..(25): SEQ ID NO: 3682; WAN024A3N; Start 224; Stop 248
atactcacatcattcacataatctg

SEQ ID NO: 361431 - DNA, 25 bp, Artificial
  probe
  misc_feature (1)..(25): SEQ ID NO: 3682; WAN024A3N; Start 300; Stop 324
tctaaccaagcgtgttataatgaat

SEQ ID NO: 361432 - DNA, 25 bp, Artificial
  probe
  misc_feature (1)..(25): SEQ ID NO: 3682; WAN024A3N; Start 218; Stop 242
gaaggtatactcacatcattcacat

SEQ ID NO: 361433 - DNA, 25 bp, Artificial
  probe
  misc_feature (1)..(25): SEQ ID NO: 3682; WAN024A3N; Start 216; Stop 240
aagaaggtatactcacatcattcac

SEQ ID NO: 361434 - DNA, 25 bp, Artificial
  probe
  misc_feature (1)..(25): SEQ ID NO: 3682; WAN024A3N; Start 306; Stop 330
caagcgtgttataatgaatactgct

SEQ ID NO: 361435 - DNA, 25 bp, Artificial
  probe
  misc_feature (1)..(25): SEQ ID NO: 3682; WAN024A3N; Start 308; Stop 332
agcgtgttataatgaatactgctca

SEQ ID NO: 361436 - DNA, 25 bp, Artificial
  probe
  misc_feature (1)..(25): SEQ ID NO: 3684; WAN024F9K; Start 14; Stop 38
agttggtagagcatctgatttgtaa

SEQ ID NO: 361437 - DNA, 25 bp, Artificial
  probe
  misc_feature (1)..(25): SEQ ID NO: 3684; WAN024F9K; Start 15; Stop 39
gttggtagagcatctgatttgtaat

SEQ ID NO: 361438 - DNA, 25 bp, Artificial
  probe
  misc_feature (1)..(25): SEQ ID NO: 3684; WAN024F9K; Start 13; Stop 37
cagttggtagagcatctgatttgta

SEQ ID NO: 361439 - DNA, 25 bp, Artificial
  probe
  misc_feature (1)..(25): SEQ ID NO: 3684; WAN024F9K; Start 16; Stop 40
ttggtagagcatctgatttgtaatc

SEQ ID NO: 361440 - DNA, 25 bp, Artificial
  probe
  misc_feature (1)..(25): SEQ ID NO: 3684; WAN024F9K; Start 11; Stop 35
ctcagttggtagagcatctgatttg

SEQ ID NO: 361441 - DNA, 25 bp, Artificial
  probe
  misc_feature (1)..(25): SEQ ID NO: 3684; WAN024F9K; Start 12; Stop 36
tcagttggtagagcatctgatttgt

SEQ ID NO: 361442 - DNA, 25 bp, Artificial
  probe
  misc_feature (1)..(25): SEQ ID NO: 3684; WAN024F9K; Start 17; Stop 41
tggtagagcatctgatttgtaatca

SEQ ID NO: 361443 - DNA, 25 bp, Artificial
  probe
  misc_feature (1)..(25): SEQ ID NO: 3684; WAN024F9K; Start 31; Stop 55
atttgtaatcagagggtcgcgtgtt

SEQ ID NO: 361444 - DNA, 25 bp, Artificial
  probe
  misc_feature (1)..(25): SEQ ID NO: 3685; WAN024F9M; Start 31; Stop 55
gacttaaaatcctgcgattggtaac

SEQ ID NO: 361445 - DNA, 25 bp, Artificial
  probe
  misc_feature (1)..(25): SEQ ID NO: 3685; WAN024F9M; Start 34; Stop 58
ttaaaatcctgcgattggtaacgat

SEQ ID NO: 361446 - DNA, 25 bp, Artificial
  probe
  misc_feature (1)..(25): SEQ ID NO: 3685; WAN024F9M; Start 30; Stop 54
ggacttaaaatcctgcgattggtaa

SEQ ID NO: 361447 - DNA, 25 bp, Artificial
  probe
  misc_feature (1)..(25): SEQ ID NO: 3685; WAN024F9M; Start 33; Stop 57
cttaaaatcctgcgattggtaacga

SEQ ID NO: 361448 - DNA, 25 bp, Artificial
  probe
  misc_feature (1)..(25): SEQ ID NO: 3685; WAN024F9M; Start 35; Stop 59
taaaatcctgcgattggtaacgatc

SEQ ID NO: 361449 - DNA, 25 bp, Artificial
  probe
  misc_feature (1)..(25): SEQ ID NO: 3685; WAN024F9M; Start 32; Stop 56
acttaaaatcctgcgattggtaacg

SEQ ID NO: 361450 - DNA, 25 bp, Artificial
  probe
  misc_feature (1)..(25): SEQ ID NO: 3685; WAN024F9M; Start 29; Stop 53
aggacttaaaatcctgcgattggta

SEQ ID NO: 361451 - DNA, 25 bp, Artificial
  probe
  misc_feature (1)..(25): SEQ ID NO: 3686; WAN024FA3; Start 32; Stop 56
ctcttaatccgtgggtcacaggttc

SEQ ID NO: 361452 - DNA, 25 bp, Artificial
  probe
  misc_feature (1)..(25): SEQ ID NO: 3687; WAN024FGM; Start 1391; Stop 1415
acctctatcaacaacatcatccaat

SEQ ID NO: 361453 - DNA, 25 bp, Artificial
  probe
  misc_feature (1)..(25): SEQ ID NO: 3687; WAN024FGM; Start 1390; Stop 1414
aacctctatcaacaacatcatccaa

SEQ ID NO: 361454 - DNA, 25 bp, Artificial
  probe
  misc_feature (1)..(25): SEQ ID NO: 3687; WAN024FGM; Start 1388; Stop 1412
tcaacctctatcaacaacatcatcc

SEQ ID NO: 361455 - DNA, 25 bp, Artificial
  probe
  misc_feature (1)..(25): SEQ ID NO: 3687; WAN024FGM; Start 1389; Stop 1413
caacctctatcaacaacatcatcca

SEQ ID NO: 361456 - DNA, 25 bp, Artificial
  probe
  misc_feature (1)..(25): SEQ ID NO: 3687; WAN024FGM; Start 1392; Stop 1416
cctctatcaacaacatcatccaatg

SEQ ID NO: 361457 - DNA, 25 bp, Artificial
  probe
  misc_feature (1)..(25): SEQ ID NO: 3687; WAN024FGM; Start 1387; Stop 1411
atcaacctctatcaacaacatcatc

SEQ ID NO: 361458 - DNA, 25 bp, Artificial
  probe
  misc_feature (1)..(25): SEQ ID NO: 3687; WAN024FGM; Start 1385; Stop 1409
ttatcaacctctatcaacaacatca

SEQ ID NO: 361459 - DNA, 25 bp, Artificial
  probe
  misc_feature (1)..(25): SEQ ID NO: 3687; WAN024FGM; Start 1386; Stop 1410
tatcaacctctatcaacaacatcat

SEQ ID NO: 361460 - DNA, 25 bp, Artificial
  probe
  misc_feature (1)..(25): SEQ ID NO: 3687; WAN024FGM; Start 1379; Stop 1403
gcgatattatcaacctctatcaaca

SEQ ID NO: 361461 - DNA, 25 bp, Artificial
  probe
  misc_feature (1)..(25): SEQ ID NO: 3687; WAN024FGM; Start 1028; Stop 1052
tttatggaaacaatgaacaaggtgg

SEQ ID NO: 361462 - DNA, 25 bp, Artificial
  probe
  misc_feature (1)..(25): SEQ ID NO: 3687; WAN024FGM; Start 1287; Stop 1311
ctatgcaccatcagataatcctcaa

SEQ ID NO: 361463 - DNA, 25 bp, Artificial
  probe
  misc_feature (1)..(25): SEQ ID NO: 3687; WAN024FGM; Start 1236; Stop 1260
cgaaagttatgttagaggtggtcaa

SEQ ID NO: 361464 - DNA, 25 bp, Artificial
  probe
  misc_feature (1)..(25): SEQ ID NO: 3687; WAN024FGM; Start 1332; Stop 1356
ccctcataacaccaaccttacaaat

SEQ ID NO: 361465 - DNA, 25 bp, Artificial
  probe
  misc_feature (1)..(25): SEQ ID NO: 3687; WAN024FGM; Start 1333; Stop 1357
cctcataacaccaaccttacaaatg

SEQ ID NO: 361466 - DNA, 25 bp, Artificial
  probe
  misc_feature (1)..(25): SEQ ID NO: 3687; WAN024FGM; Start 1237; Stop 1261
gaaagttatgttagaggtggtcaaa

SEQ ID NO: 361467 - DNA, 25 bp, Artificial
  probe
  misc_feature (1)..(25): SEQ ID NO: 3687; WAN024FGM; Start 1029; Stop 1053
ttatggaaacaatgaacaaggtggt

SEQ ID NO: 361468 - DNA, 25 bp, Artificial
  probe
  misc_feature (1)..(25): SEQ ID NO: 3687; WAN024FGM; Start 1025; Stop 1049
ggatttatggaaacaatgaacaagg

SEQ ID NO: 361469 - DNA, 25 bp, Artificial
  probe
  misc_feature (1)..(25): SEQ ID NO: 3687; WAN024FGM; Start 1024; Stop 1048
gggatttatggaaacaatgaacaag

SEQ ID NO: 361470 - DNA, 25 bp, Artificial
  probe
  misc_feature (1)..(25): SEQ ID NO: 3687; WAN024FGM; Start 1142; Stop 1166
tttatcaggtttcagatggtggaag

SEQ ID NO: 361471 - DNA, 25 bp, Artificial
  probe
  misc_feature (1)..(25): SEQ ID NO: 3687; WAN024FGM; Start 1043; Stop 1067
aacaaggtggtttagggaacttaat

SEQ ID NO: 361472 - DNA, 25 bp, Artificial
  probe
  misc_feature (1)..(25): SEQ ID NO: 3687; WAN024FGM; Start 1069; Stop 1093
caatctgttgaaaccaaggaaatga

SEQ ID NO: 361473 - DNA, 25 bp, Artificial
  probe
  misc_feature (1)..(25): SEQ ID NO: 3687; WAN024FGM; Start 1044; Stop 1068
acaaggtggtttagggaacttaatc

SEQ ID NO: 361474 - DNA, 25 bp, Artificial
  probe
  misc_feature (1)..(25): SEQ ID NO: 3687; WAN024FGM; Start 1384; Stop 1408
attatcaacctctatcaacaacatc

SEQ ID NO: 361475 - DNA, 25 bp, Artificial
  probe
  misc_feature (1)..(25): SEQ ID NO: 3687; WAN024FGM; Start 1063; Stop 1087
ttaatccaatctgttgaaaccaagg

SEQ ID NO: 361476 - DNA, 25 bp, Artificial
  probe
  misc_feature (1)..(25): SEQ ID NO: 3687; WAN024FGM; Start 1070; Stop 1094
aatctgttgaaaccaaggaaatgaa

SEQ ID NO: 361477 - DNA, 25 bp, Artificial
  probe
  misc_feature (1)..(25): SEQ ID NO: 3687; WAN024FGM; Start 1042; Stop 1066
gaacaaggtggtttagggaacttaa

SEQ ID NO: 361478 - DNA, 25 bp, Artificial
  probe
  misc_feature (1)..(25): SEQ ID NO: 3687; WAN024FGM; Start 1071; Stop 1095
atctgttgaaaccaaggaaatgaat

SEQ ID NO: 361479 - DNA, 25 bp, Artificial
  probe
  misc_feature (1)..(25): SEQ ID NO: 3687; WAN024FGM; Start 1030; Stop 1054
tatggaaacaatgaacaaggtggtt

SEQ ID NO: 361480 - DNA, 25 bp, Artificial
  probe
  misc_feature (1)..(25): SEQ ID NO: 3687; WAN024FGM; Start 329; Stop 353
aagatagcgtagacaatctgcttaa

SEQ ID NO: 361481 - DNA, 25 bp, Artificial
  probe
  misc_feature (1)..(25): SEQ ID NO: 3687; WAN024FGM; Start 1027; Stop 1051
atttatggaaacaatgaacaaggtg

SEQ ID NO: 361482 - DNA, 25 bp, Artificial
  probe
  misc_feature (1)..(25): SEQ ID NO: 3687; WAN024FGM; Start 21; Stop 45
tatcagtatttcaacttcgtgggat

SEQ ID NO: 361483 - DNA, 25 bp, Artificial
  probe
  misc_feature (1)..(25): SEQ ID NO: 3687; WAN024FGM; Start 328; Stop 352
caagatagcgtagacaatctgctta

SEQ ID NO: 361484 - DNA, 25 bp, Artificial
  probe
  misc_feature (1)..(25): SEQ ID NO: 3687; WAN024FGM; Start 75; Stop 99
tatagtaggaagtgtatccagtgaa

SEQ ID NO: 361485 - DNA, 25 bp, Artificial
  probe
  misc_feature (1)..(25): SEQ ID NO: 3688; WAN024F9L; Start 3; Stop 27
gaacgtagttcagtggtagaacacc

SEQ ID NO: 361486 - DNA, 25 bp, Artificial
  probe
  misc_feature (1)..(25): SEQ ID NO: 3688; WAN024F9L; Start 2; Stop 26
cgaacgtagttcagtggtagaacac

SEQ ID NO: 361487 - DNA, 25 bp, Artificial
  probe
  misc_feature (1)..(25): SEQ ID NO: 3688; WAN024F9L; Start 4; Stop 28
aacgtagttcagtggtagaacacca

SEQ ID NO: 361488 - DNA, 25 bp, Artificial
  probe
  misc_feature (1)..(25): SEQ ID NO: 3688; WAN024F9L; Start 1; Stop 25
gcgaacgtagttcagtggtagaaca

SEQ ID NO: 361489 - DNA, 25 bp, Artificial
  probe
  misc_feature (1)..(25): SEQ ID NO: 3689; WAN024AMW; Start 67; Stop 91
cccacaggcaatctttcttctatat

SEQ ID NO: 361490 - DNA, 25 bp, Artificial
  probe
  misc_feature (1)..(25): SEQ ID NO: 3689; WAN024AMW; Start 28; Stop 52
ataggtatttgatggcttagactgc

SEQ ID NO: 361491 - DNA, 25 bp, Artificial
  probe
  misc_feature (1)..(25): SEQ ID NO: 3689; WAN024AMW; Start 21; Stop 45
aagggttataggtatttgatggctt

SEQ ID NO: 361492 - DNA, 25 bp, Artificial
  probe
  misc_feature (1)..(25): SEQ ID NO: 3689; WAN024AMW; Start 22; Stop 46
agggttataggtatttgatggctta

SEQ ID NO: 361493 - DNA, 25 bp, Artificial
  probe
  misc_feature (1)..(25): SEQ ID NO: 3689; WAN024AMW; Start 20; Stop 44
taagggttataggtatttgatggct

SEQ ID NO: 361494 - DNA, 25 bp, Artificial
  probe
  misc_feature (1)..(25): SEQ ID NO: 3689; WAN024AMW; Start 68; Stop 92
ccacaggcaatctttcttctatatt

SEQ ID NO: 361495 - DNA, 25 bp, Artificial
  probe
  misc_feature (1)..(25): SEQ ID NO: 3689; WAN024AMW; Start 23; Stop 47
gggttataggtatttgatggcttag

SEQ ID NO: 361496 - DNA, 25 bp, Artificial
  probe
  misc_feature (1)..(25): SEQ ID NO: 3689; WAN024AMW; Start 29; Stop 53
taggtatttgatggcttagactgct

SEQ ID NO: 361497 - DNA, 25 bp, Artificial
  probe
  misc_feature (1)..(25): SEQ ID NO: 3689; WAN024AMW; Start 66; Stop 90
acccacaggcaatctttcttctata

SEQ ID NO: 361498 - DNA, 25 bp, Artificial
  probe
  misc_feature (1)..(25): SEQ ID NO: 3689; WAN024AMW; Start 65; Stop 89
tacccacaggcaatctttcttctat

SEQ ID NO: 361499 - DNA, 25 bp, Artificial
  probe
  misc_feature (1)..(25): SEQ ID NO: 3689; WAN024AMW; Start 64; Stop 88
ttacccacaggcaatctttcttcta

SEQ ID NO: 361500 - DNA, 25 bp, Artificial
  probe
  misc_feature (1)..(25): SEQ ID NO: 3689; WAN024AMW; Start 43; Stop 67
cttagactgctgtgtgactgtttac

SEQ ID NO: 361501 - DNA, 25 bp, Artificial
  probe
  misc_feature (1)..(25): SEQ ID NO: 3689; WAN024AMW; Start 19; Stop 43
ttaagggttataggtatttgatggc

SEQ ID NO: 361502 - DNA, 25 bp, Artificial
  probe
  misc_feature (1)..(25): SEQ ID NO: 3689; WAN024AMW; Start 32; Stop 56
gtatttgatggcttagactgctgtg

SEQ ID NO: 361503 - DNA, 25 bp, Artificial
  probe
  misc_feature (1)..(25): SEQ ID NO: 3689; WAN024AMW; Start 24; Stop 48
ggttataggtatttgatggcttaga

SEQ ID NO: 361504 - DNA, 25 bp, Artificial
  probe
  misc_feature (1)..(25): SEQ ID NO: 3689; WAN024AMW; Start 33; Stop 57
tatttgatggcttagactgctgtgt

SEQ ID NO: 361505 - DNA, 25 bp, Artificial
  probe
  misc_feature (1)..(25): SEQ ID NO: 3689; WAN024AMW; Start 63; Stop 87
tttacccacaggcaatctttcttct

SEQ ID NO: 361506 - DNA, 25 bp, Artificial
  probe
  misc_feature (1)..(25): SEQ ID NO: 3689; WAN024AMW; Start 62; Stop 86
gtttacccacaggcaatctttcttc

SEQ ID NO: 361507 - DNA, 25 bp, Artificial
  probe
  misc_feature (1)..(25): SEQ ID NO: 3689; WAN024AMW; Start 27; Stop 51
tataggtatttgatggcttagactg

SEQ ID NO: 361508 - DNA, 25 bp, Artificial
  probe
  misc_feature (1)..(25): SEQ ID NO: 3689; WAN024AMW; Start 30; Stop 54
aggtatttgatggcttagactgctg

SEQ ID NO: 361509 - DNA, 25 bp, Artificial
  probe
  misc_feature (1)..(25): SEQ ID NO: 3689; WAN024AMW; Start 44; Stop 68
ttagactgctgtgtgactgtttacc

SEQ ID NO: 361510 - DNA, 25 bp, Artificial
  probe
  misc_feature (1)..(25): SEQ ID NO: 3689; WAN024AMW; Start 31; Stop 55
ggtatttgatggcttagactgctgt

SEQ ID NO: 361511 - DNA, 25 bp, Artificial
  probe
  misc_feature (1)..(25): SEQ ID NO: 3689; WAN024AMW; Start 25; Stop 49
gttataggtatttgatggcttagac

SEQ ID NO: 361512 - DNA, 25 bp, Artificial
  probe
  misc_feature (1)..(25): SEQ ID NO: 3689; WAN024AMW; Start 42; Stop 66
gcttagactgctgtgtgactgttta

SEQ ID NO: 361513 - DNA, 25 bp, Artificial
  probe
  misc_feature (1)..(25): SEQ ID NO: 3689; WAN024AMW; Start 26; Stop 50
ttataggtatttgatggcttagact

SEQ ID NO: 361514 - DNA, 25 bp, Artificial
  probe
  misc_feature (1)..(25): SEQ ID NO: 3689; WAN024AMW; Start 69; Stop 93
cacaggcaatctttcttctatatta

SEQ ID NO: 361515 - DNA, 25 bp, Artificial
  probe
  misc_feature (1)..(25): SEQ ID NO: 3689; WAN024AMW; Start 61; Stop 85
tgtttacccacaggcaatctttctt

SEQ ID NO: 361516 - DNA, 25 bp, Artificial
  probe
  misc_feature (1)..(25): SEQ ID NO: 3689; WAN024AMW; Start 34; Stop 58
atttgatggcttagactgctgtgtg

SEQ ID NO: 361517 - DNA, 25 bp, Artificial
  probe
  misc_feature (1)..(25): SEQ ID NO: 3689; WAN024AMW; Start 71; Stop 95
caggcaatctttcttctatattagt

SEQ ID NO: 361518 - DNA, 25 bp, Artificial
  probe
  misc_feature (1)..(25): SEQ ID NO: 3689; WAN024AMW; Start 70; Stop 94
acaggcaatctttcttctatattag

SEQ ID NO: 361519 - DNA, 25 bp, Artificial
  probe
  misc_feature (1)..(25): SEQ ID NO: 3689; WAN024AMW; Start 18; Stop 42
tttaagggttataggtatttgatgg

SEQ ID NO: 361520 - DNA, 25 bp, Artificial
  probe
  misc_feature (1)..(25): SEQ ID NO: 3689; WAN024AMW; Start 5; Stop 29
ccgaaatcgctattttaagggttat

SEQ ID NO: 361521 - DNA, 25 bp, Artificial
  probe
  misc_feature (1)..(25): SEQ ID NO: 3689; WAN024AMW; Start 36; Stop 60
ttgatggcttagactgctgtgtgac

SEQ ID NO: 361522 - DNA, 25 bp, Artificial
  probe
  misc_feature (1)..(25): SEQ ID NO: 3690; WAN024B8A; Start 1548; Stop 1572
tatcctcttcaatgccattcgtatc

SEQ ID NO: 361523 - DNA, 25 bp, Artificial
  probe
  misc_feature (1)..(25): SEQ ID NO: 3690; WAN024B8A; Start 1686; Stop 1710
cctcacaccagatgaagaataacta

SEQ ID NO: 361524 - DNA, 25 bp, Artificial
  probe
  misc_feature (1)..(25): SEQ ID NO: 3690; WAN024B8A; Start 97; Stop 121
aacacttacggaattgaataccaag

SEQ ID NO: 361525 - DNA, 25 bp, Artificial
  probe
  misc_feature (1)..(25): SEQ ID NO: 3690; WAN024B8A; Start 1684; Stop 1708
atcctcacaccagatgaagaataac

SEQ ID NO: 361526 - DNA, 25 bp, Artificial
  probe
  misc_feature (1)..(25): SEQ ID NO: 3690; WAN024B8A; Start 1547; Stop 1571
gtatcctcttcaatgccattcgtat

SEQ ID NO: 361527 - DNA, 25 bp, Artificial
  probe
  misc_feature (1)..(25): SEQ ID NO: 3690; WAN024B8A; Start 1004; Stop 1028
ataccgttatcttctcttctagtcc

SEQ ID NO: 361528 - DNA, 25 bp, Artificial
  probe
  misc_feature (1)..(25): SEQ ID NO: 3690; WAN024B8A; Start 188; Stop 212
tcattcctgactactcttacatcgt

SEQ ID NO: 361529 - DNA, 25 bp, Artificial
  probe
  misc_feature (1)..(25): SEQ ID NO: 3690; WAN024B8A; Start 1685; Stop 1709
tcctcacaccagatgaagaataact

SEQ ID NO: 361530 - DNA, 25 bp, Artificial
  probe
  misc_feature (1)..(25): SEQ ID NO: 3690; WAN024B8A; Start 1683; Stop 1707
gatcctcacaccagatgaagaataa

SEQ ID NO: 361531 - DNA, 25 bp, Artificial
  probe
  misc_feature (1)..(25): SEQ ID NO: 3690; WAN024B8A; Start 1687; Stop 1711
ctcacaccagatgaagaataactaa

SEQ ID NO: 361532 - DNA, 25 bp, Artificial
  probe
  misc_feature (1)..(25): SEQ ID NO: 3690; WAN024B8A; Start 1682; Stop 1706
tgatcctcacaccagatgaagaata

SEQ ID NO: 361533 - DNA, 25 bp, Artificial
  probe
  misc_feature (1)..(25): SEQ ID NO: 3690; WAN024B8A; Start 443; Stop 467
ttagaacgactcactctattccaga

SEQ ID NO: 361534 - DNA, 25 bp, Artificial
  probe
  misc_feature (1)..(25): SEQ ID NO: 3690; WAN024B8A; Start 1681; Stop 1705
atgatcctcacaccagatgaagaat

SEQ ID NO: 361535 - DNA, 25 bp, Artificial
  probe
  misc_feature (1)..(25): SEQ ID NO: 3690; WAN024B8A; Start 1688; Stop 1712
tcacaccagatgaagaataactaat

SEQ ID NO: 361536 - DNA, 25 bp, Artificial
  probe
  misc_feature (1)..(25): SEQ ID NO: 3690; WAN024B8A; Start 382; Stop 406
aaactttacgaaatcaaccacaaca

SEQ ID NO: 361537 - DNA, 25 bp, Artificial
  probe
  misc_feature (1)..(25): SEQ ID NO: 3690; WAN024B8A; Start 381; Stop 405
caaactttacgaaatcaaccacaac

SEQ ID NO: 361538 - DNA, 25 bp, Artificial
  probe
  misc_feature (1)..(25): SEQ ID NO: 3690; WAN024B8A; Start 163; Stop 187
gatgacttgcttggtatcgactatg

SEQ ID NO: 361539 - DNA, 25 bp, Artificial
  probe
  misc_feature (1)..(25): SEQ ID NO: 3690; WAN024B8A; Start 383; Stop 407
aactttacgaaatcaaccacaacac

SEQ ID NO: 361540 - DNA, 25 bp, Artificial
  probe
  misc_feature (1)..(25): SEQ ID NO: 3690; WAN024B8A; Start 380; Stop 404
ccaaactttacgaaatcaaccacaa

SEQ ID NO: 361541 - DNA, 25 bp, Artificial
  probe
  misc_feature (1)..(25): SEQ ID NO: 3690; WAN024B8A; Start 162; Stop 186
agatgacttgcttggtatcgactat

SEQ ID NO: 361542 - DNA, 25 bp, Artificial
  probe
  misc_feature (1)..(25): SEQ ID NO: 3690; WAN024B8A; Start 1680; Stop 1704
gatgatcctcacaccagatgaagaa

SEQ ID NO: 361543 - DNA, 25 bp, Artificial
  probe
  misc_feature (1)..(25): SEQ ID NO: 3690; WAN024B8A; Start 1106; Stop 1130
aagtgaacaatatccatacatctgg

SEQ ID NO: 361544 - DNA, 25 bp, Artificial
  probe
  misc_feature (1)..(25): SEQ ID NO: 3690; WAN024B8A; Start 1003; Stop 1027
gataccgttatcttctcttctagtc

SEQ ID NO: 361545 - DNA, 25 bp, Artificial
  probe
  misc_feature (1)..(25): SEQ ID NO: 3690; WAN024B8A; Start 1546; Stop 1570
cgtatcctcttcaatgccattcgta

SEQ ID NO: 361546 - DNA, 25 bp, Artificial
  probe
  misc_feature (1)..(25): SEQ ID NO: 3690; WAN024B8A; Start 1357; Stop 1381
gatggaaatcgtatcggtgaaattg

SEQ ID NO: 361547 - DNA, 25 bp, Artificial
  probe
  misc_feature (1)..(25): SEQ ID NO: 3690; WAN024B8A; Start 1101; Stop 1125
cggtaaagtgaacaatatccataca

SEQ ID NO: 361548 - DNA, 25 bp, Artificial
  probe
  misc_feature (1)..(25): SEQ ID NO: 3690; WAN024B8A; Start 1100; Stop 1124
acggtaaagtgaacaatatccatac

SEQ ID NO: 361549 - DNA, 25 bp, Artificial
  probe
  misc_feature (1)..(25): SEQ ID NO: 3690; WAN024B8A; Start 161; Stop 185
aagatgacttgcttggtatcgacta

SEQ ID NO: 361550 - DNA, 25 bp, Artificial
  probe
  misc_feature (1)..(25): SEQ ID NO: 3690; WAN024B8A; Start 1008; Stop 1032
cgttatcttctcttctagtcccatc

SEQ ID NO: 361551 - DNA, 25 bp, Artificial
  probe
  misc_feature (1)..(25): SEQ ID NO: 3690; WAN024B8A; Start 150; Stop 174
taaattcccagaagatgacttgctt

SEQ ID NO: 361552 - DNA, 25 bp, Artificial
  probe
  misc_feature (1)..(25): SEQ ID NO: 3690; WAN024B8A; Start 149; Stop 173
ttaaattcccagaagatgacttgct

SEQ ID NO: 361553 - DNA, 25 bp, Artificial
  probe
  misc_feature (1)..(25): SEQ ID NO: 3690; WAN024B8A; Start 148; Stop 172
attaaattcccagaagatgacttgc

SEQ ID NO: 361554 - DNA, 25 bp, Artificial
  probe
  misc_feature (1)..(25): SEQ ID NO: 3690; WAN024B8A; Start 1009; Stop 1033
gttatcttctcttctagtcccatcc

SEQ ID NO: 361555 - DNA, 25 bp, Artificial
  probe
  misc_feature (1)..(25): SEQ ID NO: 3691; WAN024ACS; Start 39; Stop 63
taagtaaagaaaagctagaaaacgt

SEQ ID NO: 361556 - DNA, 25 bp, Artificial
  probe
  misc_feature (1)..(25): SEQ ID NO: 3691; WAN024ACS; Start 38; Stop 62
ttaagtaaagaaaagctagaaaacg

SEQ ID NO: 361557 - DNA, 25 bp, Artificial
  probe
  misc_feature (1)..(25): SEQ ID NO: 3691; WAN024ACS; Start 40; Stop 64
aagtaaagaaaagctagaaaacgtt

SEQ ID NO: 361558 - DNA, 25 bp, Artificial
  probe
  misc_feature (1)..(25): SEQ ID NO: 3692; WAN024FA4; Start 51; Stop 75
ctttaggtcgtgagggttcaagtcc

SEQ ID NO: 361559 - DNA, 25 bp, Artificial
  probe
  misc_feature (1)..(25): SEQ ID NO: 3693; WAN024F9Y; Start 11; Stop 35
tttagtggtaaaactacagccttcc

SEQ ID NO: 361560 - DNA, 25 bp, Artificial
  probe
  misc_feature (1)..(25): SEQ ID NO: 3693; WAN024F9Y; Start 13; Stop 37
tagtggtaaaactacagccttccaa

SEQ ID NO: 361561 - DNA, 25 bp, Artificial
  probe
  misc_feature (1)..(25): SEQ ID NO: 3693; WAN024F9Y; Start 12; Stop 36
ttagtggtaaaactacagccttcca

SEQ ID NO: 361562 - DNA, 25 bp, Artificial
  probe
  misc_feature (1)..(25): SEQ ID NO: 3693; WAN024F9Y; Start 10; Stop 34
gtttagtggtaaaactacagccttc

SEQ ID NO: 361563 - DNA, 25 bp, Artificial
  probe
  misc_feature (1)..(25): SEQ ID NO: 3693; WAN024F9Y; Start 14; Stop 38
agtggtaaaactacagccttccaag

SEQ ID NO: 361564 - DNA, 25 bp, Artificial
  probe
  misc_feature (1)..(25): SEQ ID NO: 3693; WAN024F9Y; Start 15; Stop 39
gtggtaaaactacagccttccaagc

SEQ ID NO: 361565 - DNA, 25 bp, Artificial
  probe
  misc_feature (1)..(25): SEQ ID NO: 3693; WAN024F9Y; Start 16; Stop 40
tggtaaaactacagccttccaagct

SEQ ID NO: 361566 - DNA, 25 bp, Artificial
  probe
  misc_feature (1)..(25): SEQ ID NO: 3693; WAN024F9Y; Start 9; Stop 33
agtttagtggtaaaactacagcctt

SEQ ID NO: 361567 - DNA, 25 bp, Artificial
  probe
  misc_feature (1)..(25): SEQ ID NO: 3693; WAN024F9Y; Start 1; Stop 25
gcgggtgtagtttagtggtaaaact

SEQ ID NO: 361568 - DNA, 25 bp, Artificial
  probe
  misc_feature (1)..(25): SEQ ID NO: 3694; WAN024DZG; Start 12; Stop 36
gaagtggttaacacaccagattgtg

SEQ ID NO: 361569 - DNA, 25 bp, Artificial
  probe
  misc_feature (1)..(25): SEQ ID NO: 3694; WAN024DZG; Start 10; Stop 34
gtgaagtggttaacacaccagattg

SEQ ID NO: 361570 - DNA, 25 bp, Artificial
  probe
  misc_feature (1)..(25): SEQ ID NO: 3694; WAN024DZG; Start 11; Stop 35
tgaagtggttaacacaccagattgt

SEQ ID NO: 361571 - DNA, 25 bp, Artificial
  probe
  misc_feature (1)..(25): SEQ ID NO: 3694; WAN024DZG; Start 13; Stop 37
aagtggttaacacaccagattgtgg

SEQ ID NO: 361572 - DNA, 25 bp, Artificial
  probe
  misc_feature (1)..(25): SEQ ID NO: 3694; WAN024DZG; Start 18; Stop 42
gttaacacaccagattgtggctctg

SEQ ID NO: 361573 - DNA, 25 bp, Artificial
  probe
  misc_feature (1)..(25): SEQ ID NO: 3694; WAN024DZG; Start 17; Stop 41
ggttaacacaccagattgtggctct

SEQ ID NO: 361574 - DNA, 25 bp, Artificial
  probe
  misc_feature (1)..(25): SEQ ID NO: 3695; WAN024F9J; Start 13; Stop 37
gaattggcagacgcaccagatttag

SEQ ID NO: 361575 - DNA, 25 bp, Artificial
  probe
  misc_feature (1)..(25): SEQ ID NO: 3695; WAN024F9J; Start 30; Stop 54
agatttaggatctggcgcttaacgg

SEQ ID NO: 361576 - DNA, 25 bp, Artificial
  probe
  misc_feature (1)..(25): SEQ ID NO: 3696; WAN0249J7; Start 20; Stop 44
catcataggaagacaagaatttagc

SEQ ID NO: 361577 - DNA, 25 bp, Artificial
  probe
  misc_feature (1)..(25): SEQ ID NO: 3696; WAN0249J7; Start 21; Stop 45
atcataggaagacaagaatttagct

SEQ ID NO: 361578 - DNA, 25 bp, Artificial
  probe
  misc_feature (1)..(25): SEQ ID NO: 3696; WAN0249J7; Start 19; Stop 43
tcatcataggaagacaagaatttag

SEQ ID NO: 361579 - DNA, 25 bp, Artificial
  probe
  misc_feature (1)..(25): SEQ ID NO: 3696; WAN0249J7; Start 18; Stop 42
ttcatcataggaagacaagaattta

SEQ ID NO: 361580 - DNA, 25 bp, Artificial
  probe
  misc_feature (1)..(25): SEQ ID NO: 3696; WAN0249J7; Start 22; Stop 46
tcataggaagacaagaatttagcta

SEQ ID NO: 361581 - DNA, 25 bp, Artificial
  probe
  misc_feature (1)..(25): SEQ ID NO: 3696; WAN0249J7; Start 28; Stop 52
gaagacaagaatttagctatttcct

SEQ ID NO: 361582 - DNA, 25 bp, Artificial
  probe
  misc_feature (1)..(25): SEQ ID NO: 3696; WAN0249J7; Start 26; Stop 50
aggaagacaagaatttagctatttc

SEQ ID NO: 361583 - DNA, 25 bp, Artificial
  probe
  misc_feature (1)..(25): SEQ ID NO: 3696; WAN0249J7; Start 17; Stop 41
cttcatcataggaagacaagaattt

SEQ ID NO: 361584 - DNA, 25 bp, Artificial
  probe
  misc_feature (1)..(25): SEQ ID NO: 3696; WAN0249J7; Start 1; Stop 25
gcgtttattttatcatcttcatcat

SEQ ID NO: 361585 - DNA, 25 bp, Artificial
  probe
  misc_feature (1)..(25): SEQ ID NO: 3696; WAN0249J7; Start 33; Stop 57
caagaatttagctatttcctatcca

SEQ ID NO: 361586 - DNA, 25 bp, Artificial
  probe
  misc_feature (1)..(25): SEQ ID NO: 3696; WAN0249J7; Start 32; Stop 56
acaagaatttagctatttcctatcc

SEQ ID NO: 361587 - DNA, 25 bp, Artificial
  probe
  misc_feature (1)..(25): SEQ ID NO: 3696; WAN0249J7; Start 23; Stop 47
cataggaagacaagaatttagctat

SEQ ID NO: 361588 - DNA, 25 bp, Artificial
  probe
  misc_feature (1)..(25): SEQ ID NO: 3696; WAN0249J7; Start 25; Stop 49
taggaagacaagaatttagctattt

SEQ ID NO: 361589 - DNA, 25 bp, Artificial
  probe
  misc_feature (1)..(25): SEQ ID NO: 3696; WAN0249J7; Start 35; Stop 59
agaatttagctatttcctatccaaa

SEQ ID NO: 361590 - DNA, 25 bp, Artificial
  probe
  misc_feature (1)..(25): SEQ ID NO: 3696; WAN0249J7; Start 34; Stop 58
aagaatttagctatttcctatccaa

SEQ ID NO: 361591 - DNA, 25 bp, Artificial
  probe
  misc_feature (1)..(25): SEQ ID NO: 3696; WAN0249J7; Start 29; Stop 53
aagacaagaatttagctatttccta

SEQ ID NO: 361592 - DNA, 25 bp, Artificial
  probe
  misc_feature (1)..(25): SEQ ID NO: 3696; WAN0249J7; Start 30; Stop 54
agacaagaatttagctatttcctat

SEQ ID NO: 361593 - DNA, 25 bp, Artificial
  probe
  misc_feature (1)..(25): SEQ ID NO: 3696; WAN0249J7; Start 27; Stop 51
ggaagacaagaatttagctatttcc

SEQ ID NO: 361594 - DNA, 25 bp, Artificial
  probe
  misc_feature (1)..(25): SEQ ID NO: 3696; WAN0249J7; Start 31; Stop 55
gacaagaatttagctatttcctatc

SEQ ID NO: 361595 - DNA, 25 bp, Artificial
  probe
  misc_feature (1)..(25): SEQ ID NO: 3696; WAN0249J7; Start 24; Stop 48
ataggaagacaagaatttagctatt

SEQ ID NO: 361596 - DNA, 25 bp, Artificial
  probe
  misc_feature (1)..(25): SEQ ID NO: 3696; WAN0249J7; Start 36; Stop 60
gaatttagctatttcctatccaaat

SEQ ID NO: 361597 - DNA, 25 bp, Artificial
  probe
  misc_feature (1)..(25): SEQ ID NO: 3696; WAN0249J7; Start 45; Stop 69
tatttcctatccaaatagggctttt

SEQ ID NO: 361598 - DNA, 25 bp, Artificial
  probe
  misc_feature (1)..(25): SEQ ID NO: 3697; WAN024B35; Start 205; Stop 229
tatgatgtcaagagtacacttcctg

SEQ ID NO: 361599 - DNA, 25 bp, Artificial
  probe
  misc_feature (1)..(25): SEQ ID NO: 3697; WAN024B35; Start 203; Stop 227
actatgatgtcaagagtacacttcc

SEQ ID NO: 361600 - DNA, 25 bp, Artificial
  probe
  misc_feature (1)..(25): SEQ ID NO: 3697; WAN024B35; Start 204; Stop 228
ctatgatgtcaagagtacacttcct

SEQ ID NO: 361601 - DNA, 25 bp, Artificial
  probe
  misc_feature (1)..(25): SEQ ID NO: 3697; WAN024B35; Start 200; Stop 224
gcaactatgatgtcaagagtacact

SEQ ID NO: 361602 - DNA, 25 bp, Artificial
  probe
  misc_feature (1)..(25): SEQ ID NO: 3697; WAN024B35; Start 201; Stop 225
caactatgatgtcaagagtacactt

SEQ ID NO: 361603 - DNA, 25 bp, Artificial
  probe
  misc_feature (1)..(25): SEQ ID NO: 3697; WAN024B35; Start 199; Stop 223
ggcaactatgatgtcaagagtacac

SEQ ID NO: 361604 - DNA, 25 bp, Artificial
  probe
  misc_feature (1)..(25): SEQ ID NO: 3697; WAN024B35; Start 202; Stop 226
aactatgatgtcaagagtacacttc

SEQ ID NO: 361605 - DNA, 25 bp, Artificial
  probe
  misc_feature (1)..(25): SEQ ID NO: 3697; WAN024B35; Start 206; Stop 230
atgatgtcaagagtacacttcctgg

SEQ ID NO: 361606 - DNA, 25 bp, Artificial
  probe
  misc_feature (1)..(25): SEQ ID NO: 3697; WAN024B35; Start 208; Stop 232
gatgtcaagagtacacttcctggag

SEQ ID NO: 361607 - DNA, 25 bp, Artificial
  probe
  misc_feature (1)..(25): SEQ ID NO: 3697; WAN024B35; Start 226; Stop 250
cctggagaagtagtcaaggatgttg

SEQ ID NO: 361608 - DNA, 25 bp, Artificial
  probe
  misc_feature (1)..(25): SEQ ID NO: 3697; WAN024B35; Start 227; Stop 251
ctggagaagtagtcaaggatgttgc

SEQ ID NO: 361609 - DNA, 25 bp, Artificial
  probe
  misc_feature (1)..(25): SEQ ID NO: 3697; WAN024B35; Start 209; Stop 233
atgtcaagagtacacttcctggaga

SEQ ID NO: 361610 - DNA, 25 bp, Artificial
  probe
  misc_feature (1)..(25): SEQ ID NO: 3697; WAN024B35; Start 196; Stop 220
ttgggcaactatgatgtcaagagta

SEQ ID NO: 361611 - DNA, 25 bp, Artificial
  probe
  misc_feature (1)..(25): SEQ ID NO: 3697; WAN024B35; Start 210; Stop 234
tgtcaagagtacacttcctggagaa

SEQ ID NO: 361612 - DNA, 25 bp, Artificial
  probe
  misc_feature (1)..(25): SEQ ID NO: 3697; WAN024B35; Start 207; Stop 231
tgatgtcaagagtacacttcctgga

SEQ ID NO: 361613 - DNA, 25 bp, Artificial
  probe
  misc_feature (1)..(25): SEQ ID NO: 3697; WAN024B35; Start 198; Stop 222
gggcaactatgatgtcaagagtaca

SEQ ID NO: 361614 - DNA, 25 bp, Artificial
  probe
  misc_feature (1)..(25): SEQ ID NO: 3697; WAN024B35; Start 298; Stop 322
gacattcctgccaagatcagtgatg

SEQ ID NO: 361615 - DNA, 25 bp, Artificial
  probe
  misc_feature (1)..(25): SEQ ID NO: 3697; WAN024B35; Start 211; Stop 235
gtcaagagtacacttcctggagaag

SEQ ID NO: 361616 - DNA, 25 bp, Artificial
  probe
  misc_feature (1)..(25): SEQ ID NO: 3697; WAN024B35; Start 228; Stop 252
tggagaagtagtcaaggatgttgcc

SEQ ID NO: 361617 - DNA, 25 bp, Artificial
  probe
  misc_feature (1)..(25): SEQ ID NO: 3697; WAN024B35; Start 301; Stop 325
attcctgccaagatcagtgatgatg

SEQ ID NO: 361618 - DNA, 25 bp, Artificial
  probe
  misc_feature (1)..(25): SEQ ID NO: 3697; WAN024B35; Start 300; Stop 324
cattcctgccaagatcagtgatgat

SEQ ID NO: 361619 - DNA, 25 bp, Artificial
  probe
  misc_feature (1)..(25): SEQ ID NO: 3697; WAN024B35; Start 310; Stop 334
aagatcagtgatgatgtggtagctg

SEQ ID NO: 361620 - DNA, 25 bp, Artificial
  probe
  misc_feature (1)..(25): SEQ ID NO: 3697; WAN024B35; Start 309; Stop 333
caagatcagtgatgatgtggtagct

SEQ ID NO: 361621 - DNA, 25 bp, Artificial
  probe
  misc_feature (1)..(25): SEQ ID NO: 3697; WAN024B35; Start 299; Stop 323
acattcctgccaagatcagtgatga

SEQ ID NO: 361622 - DNA, 25 bp, Artificial
  probe
  misc_feature (1)..(25): SEQ ID NO: 3697; WAN024B35; Start 308; Stop 332
ccaagatcagtgatgatgtggtagc

SEQ ID NO: 361623 - DNA, 25 bp, Artificial
  probe
  misc_feature (1)..(25): SEQ ID NO: 3697; WAN024B35; Start 307; Stop 331
gccaagatcagtgatgatgtggtag

SEQ ID NO: 361624 - DNA, 25 bp, Artificial
  probe
  misc_feature (1)..(25): SEQ ID NO: 3697; WAN024B35; Start 312; Stop 336
gatcagtgatgatgtggtagctgtc

SEQ ID NO: 361625 - DNA, 25 bp, Artificial
  probe
  misc_feature (1)..(25): SEQ ID NO: 3697; WAN024B35; Start 165; Stop 189
ggtaaatgcccgtgaaattgaggtt

SEQ ID NO: 361626 - DNA, 25 bp, Artificial
  probe
  misc_feature (1)..(25): SEQ ID NO: 3697; WAN024B35; Start 280; Stop 304
gacaacaagattaccatggacattc

SEQ ID NO: 361627 - DNA, 25 bp, Artificial
  probe
  misc_feature (1)..(25): SEQ ID NO: 3697; WAN024B35; Start 306; Stop 330
tgccaagatcagtgatgatgtggta

SEQ ID NO: 361628 - DNA, 25 bp, Artificial
  probe
  misc_feature (1)..(25): SEQ ID NO: 3697; WAN024B35; Start 413; Stop 437
ataagggagagattttcctaaacga

SEQ ID NO: 361629 - DNA, 25 bp, Artificial
  probe
  misc_feature (1)..(25): SEQ ID NO: 3697; WAN024B35; Start 279; Stop 303
tgacaacaagattaccatggacatt

SEQ ID NO: 361630 - DNA, 25 bp, Artificial
  probe
  misc_feature (1)..(25): SEQ ID NO: 3697; WAN024B35; Start 412; Stop 436
gataagggagagattttcctaaacg

SEQ ID NO: 361631 - DNA, 25 bp, Artificial
  probe
  misc_feature (1)..(25): SEQ ID NO: 3698; WAN024B38; Start 415; Stop 439
aagggagagattttcctcaacgagc

SEQ ID NO: 361632 - DNA, 25 bp, Artificial
  probe
  misc_feature (1)..(25): SEQ ID NO: 3698; WAN024B38; Start 417; Stop 441
gggagagattttcctcaacgagctc

SEQ ID NO: 361633 - DNA, 25 bp, Artificial
  probe
  misc_feature (1)..(25): SEQ ID NO: 3699; WAN024B39; Start 183; Stop 207
cgaggttggactcttgggaaattac

SEQ ID NO: 361634 - DNA, 25 bp, Artificial
  probe
  misc_feature (1)..(25): SEQ ID NO: 3699; WAN024B39; Start 182; Stop 206
tcgaggttggactcttgggaaatta

SEQ ID NO: 361635 - DNA, 25 bp, Artificial
  probe
  misc_feature (1)..(25): SEQ ID NO: 3699; WAN024B39; Start 181; Stop 205
atcgaggttggactcttgggaaatt

SEQ ID NO: 361636 - DNA, 25 bp, Artificial
  probe
  misc_feature (1)..(25): SEQ ID NO: 3699; WAN024B39; Start 180; Stop 204
aatcgaggttggactcttgggaaat

SEQ ID NO: 361637 - DNA, 25 bp, Artificial
  probe
  misc_feature (1)..(25): SEQ ID NO: 3699; WAN024B39; Start 179; Stop 203
aaatcgaggttggactcttgggaaa

SEQ ID NO: 361638 - DNA, 25 bp, Artificial
  probe
  misc_feature (1)..(25): SEQ ID NO: 3699; WAN024B39; Start 178; Stop 202
gaaatcgaggttggactcttgggaa

SEQ ID NO: 361639 - DNA, 25 bp, Artificial
  probe
  misc_feature (1)..(25): SEQ ID NO: 3699; WAN024B39; Start 302; Stop 326
ttcctgccaaaatcagtgatgatgt

SEQ ID NO: 361640 - DNA, 25 bp, Artificial
  probe
  misc_feature (1)..(25): SEQ ID NO: 3699; WAN024B39; Start 303; Stop 327
tcctgccaaaatcagtgatgatgtg

SEQ ID NO: 361641 - DNA, 25 bp, Artificial
  probe
  misc_feature (1)..(25): SEQ ID NO: 3699; WAN024B39; Start 305; Stop 329
ctgccaaaatcagtgatgatgtggt

SEQ ID NO: 361642 - DNA, 25 bp, Artificial
  probe
  misc_feature (1)..(25): SEQ ID NO: 3699; WAN024B39; Start 304; Stop 328
cctgccaaaatcagtgatgatgtgg

SEQ ID NO: 361643 - DNA, 25 bp, Artificial
  probe
  misc_feature (1)..(25): SEQ ID NO: 3699; WAN024B39; Start 334; Stop 358
gtcatgcgtcaaaatgcagaaacag

SEQ ID NO: 361644 - DNA, 25 bp, Artificial
  probe
  misc_feature (1)..(25): SEQ ID NO: 3699; WAN024B39; Start 333; Stop 357
tgtcatgcgtcaaaatgcagaaaca

SEQ ID NO: 361645 - DNA, 25 bp, Artificial
  probe
  misc_feature (1)..(25): SEQ ID NO: 3700; WAN024B37; Start 224; Stop 248
taccaggagaagtagtcaaggatgt

SEQ ID NO: 361646 - DNA, 25 bp, Artificial
  probe
  misc_feature (1)..(25): SEQ ID NO: 3700; WAN024B37; Start 383; Stop 407
gtctctctcgttgtgatttcttcta

SEQ ID NO: 361647 - DNA, 25 bp, Artificial
  probe
  misc_feature (1)..(25): SEQ ID NO: 3700; WAN024B37; Start 225; Stop 249
accaggagaagtagtcaaggatgtt

SEQ ID NO: 361648 - DNA, 25 bp, Artificial
  probe
  misc_feature (1)..(25): SEQ ID NO: 3700; WAN024B37; Start 66; Stop 90
gtcaagtgtcggtatttctaagtct

SEQ ID NO: 361649 - DNA, 25 bp, Artificial
  probe
  misc_feature (1)..(25): SEQ ID NO: 3700; WAN024B37; Start 384; Stop 408
tctctctcgttgtgatttcttctat

SEQ ID NO: 361650 - DNA, 25 bp, Artificial
  probe
  misc_feature (1)..(25): SEQ ID NO: 3700; WAN024B37; Start 202; Stop 226
aactacgatgtcaagagtacgctac

SEQ ID NO: 361651 - DNA, 25 bp, Artificial
  probe
  misc_feature (1)..(25): SEQ ID NO: 3700; WAN024B37; Start 201; Stop 225
caactacgatgtcaagagtacgcta

SEQ ID NO: 361652 - DNA, 25 bp, Artificial
  probe
  misc_feature (1)..(25): SEQ ID NO: 3700; WAN024B37; Start 65; Stop 89
ggtcaagtgtcggtatttctaagtc

SEQ ID NO: 361653 - DNA, 25 bp, Artificial
  probe
  misc_feature (1)..(25): SEQ ID NO: 3700; WAN024B37; Start 396; Stop 420
tgatttcttctatacagacaaggga

SEQ ID NO: 361654 - DNA, 25 bp, Artificial
  probe
  misc_feature (1)..(25): SEQ ID NO: 3700; WAN024B37; Start 395; Stop 419
gtgatttcttctatacagacaaggg

SEQ ID NO: 361655 - DNA, 25 bp, Artificial
  probe
  misc_feature (1)..(25): SEQ ID NO: 3700; WAN024B37; Start 404; Stop 428
tctatacagacaagggagaaatctt

SEQ ID NO: 361656 - DNA, 25 bp, Artificial
  probe
  misc_feature (1)..(25): SEQ ID NO: 3700; WAN024B37; Start 398; Stop 422
atttcttctatacagacaagggaga

SEQ ID NO: 361657 - DNA, 25 bp, Artificial
  probe
  misc_feature (1)..(25): SEQ ID NO: 3700; WAN024B37; Start 386; Stop 410
tctctcgttgtgatttcttctatac

SEQ ID NO: 361658 - DNA, 25 bp, Artificial
  probe
  misc_feature (1)..(25): SEQ ID NO: 3700; WAN024B37; Start 173; Stop 197
ctcgtgaaattgaagttggtctact

SEQ ID NO: 361659 - DNA, 25 bp, Artificial
  probe
  misc_feature (1)..(25): SEQ ID NO: 3700; WAN024B37; Start 405; Stop 429
ctatacagacaagggagaaatcttc

SEQ ID NO: 361660 - DNA, 25 bp, Artificial
  probe
  misc_feature (1)..(25): SEQ ID NO: 3700; WAN024B37; Start 397; Stop 421
gatttcttctatacagacaagggag

SEQ ID NO: 361661 - DNA, 25 bp, Artificial
  probe
  misc_feature (1)..(25): SEQ ID NO: 3700; WAN024B37; Start 166; Stop 190
gtgaatgctcgtgaaattgaagttg

SEQ ID NO: 361662 - DNA, 25 bp, Artificial
  probe
  misc_feature (1)..(25): SEQ ID NO: 3700; WAN024B37; Start 385; Stop 409
ctctctcgttgtgatttcttctata

SEQ ID NO: 361663 - DNA, 25 bp, Artificial
  probe
  misc_feature (1)..(25): SEQ ID NO: 3700; WAN024B37; Start 312; Stop 336
aatcagtgatgatgtggtagttgtc

SEQ ID NO: 361664 - DNA, 25 bp, Artificial
  probe
  misc_feature (1)..(25): SEQ ID NO: 3700; WAN024B37; Start 174; Stop 198
tcgtgaaattgaagttggtctactg

SEQ ID NO: 361665 - DNA, 25 bp, Artificial
  probe
  misc_feature (1)..(25): SEQ ID NO: 3700; WAN024B37; Start 391; Stop 415
cgttgtgatttcttctatacagaca

SEQ ID NO: 361666 - DNA, 25 bp, Artificial
  probe
  misc_feature (1)..(25): SEQ ID NO: 3700; WAN024B37; Start 223; Stop 247
ctaccaggagaagtagtcaaggatg

SEQ ID NO: 361667 - DNA, 25 bp, Artificial
  probe
  misc_feature (1)..(25): SEQ ID NO: 3700; WAN024B37; Start 64; Stop 88
gggtcaagtgtcggtatttctaagt

SEQ ID NO: 361668 - DNA, 25 bp, Artificial
  probe
  misc_feature (1)..(25): SEQ ID NO: 3700; WAN024B37; Start 390; Stop 414
tcgttgtgatttcttctatacagac

SEQ ID NO: 361669 - DNA, 25 bp, Artificial
  probe
  misc_feature (1)..(25): SEQ ID NO: 3700; WAN024B37; Start 382; Stop 406
ggtctctctcgttgtgatttcttct

SEQ ID NO: 361670 - DNA, 25 bp, Artificial
  probe
  misc_feature (1)..(25): SEQ ID NO: 3700; WAN024B37; Start 389; Stop 413
ctcgttgtgatttcttctatacaga

SEQ ID NO: 361671 - DNA, 25 bp, Artificial
  probe
  misc_feature (1)..(25): SEQ ID NO: 3700; WAN024B37; Start 388; Stop 412
tctcgttgtgatttcttctatacag

SEQ ID NO: 361672 - DNA, 25 bp, Artificial
  probe
  misc_feature (1)..(25): SEQ ID NO: 3700; WAN024B37; Start 387; Stop 411
ctctcgttgtgatttcttctataca

SEQ ID NO: 361673 - DNA, 25 bp, Artificial
  probe
  misc_feature (1)..(25): SEQ ID NO: 3700; WAN024B37; Start 176; Stop 200
gtgaaattgaagttggtctactggg

SEQ ID NO: 361674 - DNA, 25 bp, Artificial
  probe
  misc_feature (1)..(25): SEQ ID NO: 3700; WAN024B37; Start 410; Stop 434
cagacaagggagaaatcttcctaaa

SEQ ID NO: 361675 - DNA, 25 bp, Artificial
  probe
  misc_feature (1)..(25): SEQ ID NO: 3700; WAN024B37; Start 408; Stop 432
tacagacaagggagaaatcttccta

SEQ ID NO: 361676 - DNA, 25 bp, Artificial
  probe
  misc_feature (1)..(25): SEQ ID NO: 3700; WAN024B37; Start 413; Stop 437
acaagggagaaatcttcctaaatga

SEQ ID NO: 361677 - DNA, 25 bp, Artificial
  probe
  misc_feature (1)..(25): SEQ ID NO: 3700; WAN024B37; Start 406; Stop 430
tatacagacaagggagaaatcttcc

SEQ ID NO: 361678 - DNA, 25 bp, Artificial
  probe
  misc_feature (1)..(25): SEQ ID NO: 3701; WAN024B36; Start 201; Stop 225
taactacgatgtcaagagcacgcta

SEQ ID NO: 361679 - DNA, 25 bp, Artificial
  probe
  misc_feature (1)..(25): SEQ ID NO: 3701; WAN024B36; Start 121; Stop 145
gaacttgcctttcaatatgacagcc

SEQ ID NO: 361680 - DNA, 25 bp, Artificial
  probe
  misc_feature (1)..(25): SEQ ID NO: 3701; WAN024B36; Start 120; Stop 144
ggaacttgcctttcaatatgacagc

SEQ ID NO: 361681 - DNA, 25 bp, Artificial
  probe
  misc_feature (1)..(25): SEQ ID NO: 3701; WAN024B36; Start 161; Stop 185
aaggagtaaatgcccgtgaaattga

SEQ ID NO: 361682 - DNA, 25 bp, Artificial
  probe
  misc_feature (1)..(25): SEQ ID NO: 3701; WAN024B36; Start 165; Stop 189
agtaaatgcccgtgaaattgaggtt

SEQ ID NO: 361683 - DNA, 25 bp, Artificial
  probe
  misc_feature (1)..(25): SEQ ID NO: 3701; WAN024B36; Start 160; Stop 184
caaggagtaaatgcccgtgaaattg

SEQ ID NO: 361684 - DNA, 25 bp, Artificial
  probe
  misc_feature (1)..(25): SEQ ID NO: 3701; WAN024B36; Start 162; Stop 186
aggagtaaatgcccgtgaaattgag

SEQ ID NO: 361685 - DNA, 25 bp, Artificial
  probe
  misc_feature (1)..(25): SEQ ID NO: 3701; WAN024B36; Start 164; Stop 188
gagtaaatgcccgtgaaattgaggt

SEQ ID NO: 361686 - DNA, 25 bp, Artificial
  probe
  misc_feature (1)..(25): SEQ ID NO: 3701; WAN024B36; Start 196; Stop 220
ttgggtaactacgatgtcaagagca

SEQ ID NO: 361687 - DNA, 25 bp, Artificial
  probe
  misc_feature (1)..(25): SEQ ID NO: 3701; WAN024B36; Start 202; Stop 226
aactacgatgtcaagagcacgctac

SEQ ID NO: 361688 - DNA, 25 bp, Artificial
  probe
  misc_feature (1)..(25): SEQ ID NO: 3701; WAN024B36; Start 200; Stop 224
gtaactacgatgtcaagagcacgct

SEQ ID NO: 361689 - DNA, 25 bp, Artificial
  probe
  misc_feature (1)..(25): SEQ ID NO: 3701; WAN024B36; Start 223; Stop 247
ctacctggagaagttgtcaaggacg

SEQ ID NO: 361690 - DNA, 25 bp, Artificial
  probe
  misc_feature (1)..(25): SEQ ID NO: 3701; WAN024B36; Start 163; Stop 187
ggagtaaatgcccgtgaaattgagg

SEQ ID NO: 361691 - DNA, 25 bp, Artificial
  probe
  misc_feature (1)..(25): SEQ ID NO: 3701; WAN024B36; Start 197; Stop 221
tgggtaactacgatgtcaagagcac

SEQ ID NO: 361692 - DNA, 25 bp, Artificial
  probe
  misc_feature (1)..(25): SEQ ID NO: 3701; WAN024B36; Start 222; Stop 246
gctacctggagaagttgtcaaggac

SEQ ID NO: 361693 - DNA, 25 bp, Artificial
  probe
  misc_feature (1)..(25): SEQ ID NO: 3701; WAN024B36; Start 191; Stop 215
gcctcttgggtaactacgatgtcaa

SEQ ID NO: 361694 - DNA, 25 bp, Artificial
  probe
  misc_feature (1)..(25): SEQ ID NO: 3701; WAN024B36; Start 192; Stop 216
cctcttgggtaactacgatgtcaag

SEQ ID NO: 361695 - DNA, 25 bp, Artificial
  probe
  misc_feature (1)..(25): SEQ ID NO: 3701; WAN024B36; Start 195; Stop 219
cttgggtaactacgatgtcaagagc

SEQ ID NO: 361696 - DNA, 25 bp, Artificial
  probe
  misc_feature (1)..(25): SEQ ID NO: 3701; WAN024B36; Start 224; Stop 248
tacctggagaagttgtcaaggacgt

SEQ ID NO: 361697 - DNA, 25 bp, Artificial
  probe
  misc_feature (1)..(25): SEQ ID NO: 3701; WAN024B36; Start 159; Stop 183
gcaaggagtaaatgcccgtgaaatt

SEQ ID NO: 361698 - DNA, 25 bp, Artificial
  probe
  misc_feature (1)..(25): SEQ ID NO: 3701; WAN024B36; Start 244; Stop 268
gacgttgccttttatgactacgatg

SEQ ID NO: 361699 - DNA, 25 bp, Artificial
  probe
  misc_feature (1)..(25): SEQ ID NO: 3701; WAN024B36; Start 243; Stop 267
ggacgttgccttttatgactacgat

SEQ ID NO: 361700 - DNA, 25 bp, Artificial
  probe
  misc_feature (1)..(25): SEQ ID NO: 3701; WAN024B36; Start 240; Stop 264
caaggacgttgccttttatgactac

SEQ ID NO: 361701 - DNA, 25 bp, Artificial
  probe
  misc_feature (1)..(25): SEQ ID NO: 3701; WAN024B36; Start 239; Stop 263
tcaaggacgttgccttttatgacta

SEQ ID NO: 361702 - DNA, 25 bp, Artificial
  probe
  misc_feature (1)..(25): SEQ ID NO: 3701; WAN024B36; Start 246; Stop 270
cgttgccttttatgactacgatgcc

SEQ ID NO: 361703 - DNA, 25 bp, Artificial
  probe
  misc_feature (1)..(25): SEQ ID NO: 3701; WAN024B36; Start 235; Stop 259
gttgtcaaggacgttgccttttatg

SEQ ID NO: 361704 - DNA, 25 bp, Artificial
  probe
  misc_feature (1)..(25): SEQ ID NO: 3701; WAN024B36; Start 245; Stop 269
acgttgccttttatgactacgatgc

SEQ ID NO: 361705 - DNA, 25 bp, Artificial
  probe
  misc_feature (1)..(25): SEQ ID NO: 3701; WAN024B36; Start 236; Stop 260
ttgtcaaggacgttgccttttatga

SEQ ID NO: 361706 - DNA, 25 bp, Artificial
  probe
  misc_feature (1)..(25): SEQ ID NO: 3701; WAN024B36; Start 234; Stop 258
agttgtcaaggacgttgccttttat

SEQ ID NO: 361707 - DNA, 25 bp, Artificial
  probe
  misc_feature (1)..(25): SEQ ID NO: 3701; WAN024B36; Start 242; Stop 266
aggacgttgccttttatgactacga

SEQ ID NO: 361708 - DNA, 25 bp, Artificial
  probe
  misc_feature (1)..(25): SEQ ID NO: 3701; WAN024B36; Start 241; Stop 265
aaggacgttgccttttatgactacg

SEQ ID NO: 361709 - DNA, 25 bp, Artificial
  probe
  misc_feature (1)..(25): SEQ ID NO: 3701; WAN024B36; Start 233; Stop 257
aagttgtcaaggacgttgcctttta

SEQ ID NO: 361710 - DNA, 25 bp, Artificial
  probe
  misc_feature (1)..(25): SEQ ID NO: 3701; WAN024B36; Start 238; Stop 262
gtcaaggacgttgccttttatgact

SEQ ID NO: 361711 - DNA, 25 bp, Artificial
  probe
  misc_feature (1)..(25): SEQ ID NO: 3702; WAN024AEG; Start 27; Stop 51
aagatgaaaatctacaagtcactaa

SEQ ID NO: 361712 - DNA, 25 bp, Artificial
  probe
  misc_feature (1)..(25): SEQ ID NO: 3702; WAN024AEG; Start 29; Stop 53
gatgaaaatctacaagtcactaatt

SEQ ID NO: 361713 - DNA, 25 bp, Artificial
  probe
  misc_feature (1)..(25): SEQ ID NO: 3702; WAN024AEG; Start 28; Stop 52
agatgaaaatctacaagtcactaat

SEQ ID NO: 361714 - DNA, 25 bp, Artificial
  probe
  misc_feature (1)..(25): SEQ ID NO: 3702; WAN024AEG; Start 25; Stop 49
ataagatgaaaatctacaagtcact

SEQ ID NO: 361715 - DNA, 25 bp, Artificial
  probe
  misc_feature (1)..(25): SEQ ID NO: 3702; WAN024AEG; Start 21; Stop 45
tggtataagatgaaaatctacaagt

SEQ ID NO: 361716 - DNA, 25 bp, Artificial
  probe
  misc_feature (1)..(25): SEQ ID NO: 3702; WAN024AEG; Start 26; Stop 50
taagatgaaaatctacaagtcacta

SEQ ID NO: 361717 - DNA, 25 bp, Artificial
  probe
  misc_feature (1)..(25): SEQ ID NO: 3702; WAN024AEG; Start 22; Stop 46
ggtataagatgaaaatctacaagtc

SEQ ID NO: 361718 - DNA, 25 bp, Artificial
  probe
  misc_feature (1)..(25): SEQ ID NO: 3702; WAN024AEG; Start 33; Stop 57
aaaatctacaagtcactaattttca

SEQ ID NO: 361719 - DNA, 25 bp, Artificial
  probe
  misc_feature (1)..(25): SEQ ID NO: 3702; WAN024AEG; Start 31; Stop 55
tgaaaatctacaagtcactaatttt

SEQ ID NO: 361720 - DNA, 25 bp, Artificial
  probe
  misc_feature (1)..(25): SEQ ID NO: 3703; WAN0249RX; Start 4; Stop 28
agaaagattaccgcagataactcaa

SEQ ID NO: 361721 - DNA, 25 bp, Artificial
  probe
  misc_feature (1)..(25): SEQ ID NO: 3703; WAN0249RX; Start 6; Stop 30
aaagattaccgcagataactcaaac

SEQ ID NO: 361722 - DNA, 25 bp, Artificial
  probe
  misc_feature (1)..(25): SEQ ID NO: 3703; WAN0249RX; Start 7; Stop 31
aagattaccgcagataactcaaaca

SEQ ID NO: 361723 - DNA, 25 bp, Artificial
  probe
  misc_feature (1)..(25): SEQ ID NO: 3703; WAN0249RX; Start 5; Stop 29
gaaagattaccgcagataactcaaa

SEQ ID NO: 361724 - DNA, 25 bp, Artificial
  probe
  misc_feature (1)..(25): SEQ ID NO: 3703; WAN0249RX; Start 3; Stop 27
tagaaagattaccgcagataactca

SEQ ID NO: 361725 - DNA, 25 bp, Artificial
  probe
  misc_feature (1)..(25): SEQ ID NO: 3703; WAN0249RX; Start 135; Stop 159
gatgctaacctgatttgaagagatt

SEQ ID NO: 361726 - DNA, 25 bp, Artificial
  probe
  misc_feature (1)..(25): SEQ ID NO: 3703; WAN0249RX; Start 134; Stop 158
cgatgctaacctgatttgaagagat

SEQ ID NO: 361727 - DNA, 25 bp, Artificial
  probe
  misc_feature (1)..(25): SEQ ID NO: 3703; WAN0249RX; Start 8; Stop 32
agattaccgcagataactcaaacag

SEQ ID NO: 361728 - DNA, 25 bp, Artificial
  probe
  misc_feature (1)..(25): SEQ ID NO: 3703; WAN0249RX; Start 136; Stop 160
atgctaacctgatttgaagagattt

SEQ ID NO: 361729 - DNA, 25 bp, Artificial
  probe
  misc_feature (1)..(25): SEQ ID NO: 3703; WAN0249RX; Start 1; Stop 25
gctagaaagattaccgcagataact

SEQ ID NO: 361730 - DNA, 25 bp, Artificial
  probe
  misc_feature (1)..(25): SEQ ID NO: 3703; WAN0249RX; Start 104; Stop 128
cgaagtcagtaacatatgcctaaga

SEQ ID NO: 361731 - DNA, 25 bp, Artificial
  probe
  misc_feature (1)..(25): SEQ ID NO: 3703; WAN0249RX; Start 103; Stop 127
acgaagtcagtaacatatgcctaag

SEQ ID NO: 361732 - DNA, 25 bp, Artificial
  probe
  misc_feature (1)..(25): SEQ ID NO: 3703; WAN0249RX; Start 2; Stop 26
ctagaaagattaccgcagataactc

SEQ ID NO: 361733 - DNA, 25 bp, Artificial
  probe
  misc_feature (1)..(25): SEQ ID NO: 3703; WAN0249RX; Start 9; Stop 33
gattaccgcagataactcaaacagt

SEQ ID NO: 361734 - DNA, 25 bp, Artificial
  probe
  misc_feature (1)..(25): SEQ ID NO: 3703; WAN0249RX; Start 10; Stop 34
attaccgcagataactcaaacagtg

SEQ ID NO: 361735 - DNA, 25 bp, Artificial
  probe
  misc_feature (1)..(25): SEQ ID NO: 3703; WAN0249RX; Start 102; Stop 126
gacgaagtcagtaacatatgcctaa

SEQ ID NO: 361736 - DNA, 25 bp, Artificial
  probe
  misc_feature (1)..(25): SEQ ID NO: 3703; WAN0249RX; Start 107; Stop 131
agtcagtaacatatgcctaagacaa

SEQ ID NO: 361737 - DNA, 25 bp, Artificial
  probe
  misc_feature (1)..(25): SEQ ID NO: 3703; WAN0249RX; Start 106; Stop 130
aagtcagtaacatatgcctaagaca

SEQ ID NO: 361738 - DNA, 25 bp, Artificial
  probe
  misc_feature (1)..(25): SEQ ID NO: 3703; WAN0249RX; Start 105; Stop 129
gaagtcagtaacatatgcctaagac

SEQ ID NO: 361739 - DNA, 25 bp, Artificial
  probe
  misc_feature (1)..(25): SEQ ID NO: 3703; WAN0249RX; Start 11; Stop 35
ttaccgcagataactcaaacagtgt

SEQ ID NO: 361740 - DNA, 25 bp, Artificial
  probe
  misc_feature (1)..(25): SEQ ID NO: 3703; WAN0249RX; Start 133; Stop 157
gcgatgctaacctgatttgaagaga

SEQ ID NO: 361741 - DNA, 25 bp, Artificial
  probe
  misc_feature (1)..(25): SEQ ID NO: 3703; WAN0249RX; Start 110; Stop 134
cagtaacatatgcctaagacaaagc

SEQ ID NO: 361742 - DNA, 25 bp, Artificial
  probe
  misc_feature (1)..(25): SEQ ID NO: 3703; WAN0249RX; Start 113; Stop 137
taacatatgcctaagacaaagcgat

SEQ ID NO: 361743 - DNA, 25 bp, Artificial
  probe
  misc_feature (1)..(25): SEQ ID NO: 3703; WAN0249RX; Start 12; Stop 36
taccgcagataactcaaacagtgtt

SEQ ID NO: 361744 - DNA, 25 bp, Artificial
  probe
  misc_feature (1)..(25): SEQ ID NO: 3703; WAN0249RX; Start 112; Stop 136
gtaacatatgcctaagacaaagcga

SEQ ID NO: 361745 - DNA, 25 bp, Artificial
  probe
  misc_feature (1)..(25): SEQ ID NO: 3703; WAN0249RX; Start 111; Stop 135
agtaacatatgcctaagacaaagcg

SEQ ID NO: 361746 - DNA, 25 bp, Artificial
  probe
  misc_feature (1)..(25): SEQ ID NO: 3703; WAN0249RX; Start 109; Stop 133
tcagtaacatatgcctaagacaaag

SEQ ID NO: 361747 - DNA, 25 bp, Artificial
  probe
  misc_feature (1)..(25): SEQ ID NO: 3703; WAN0249RX; Start 137; Stop 161
tgctaacctgatttgaagagatttt

SEQ ID NO: 361748 - DNA, 25 bp, Artificial
  probe
  misc_feature (1)..(25): SEQ ID NO: 3703; WAN0249RX; Start 114; Stop 138
aacatatgcctaagacaaagcgatg

SEQ ID NO: 361749 - DNA, 25 bp, Artificial
  probe
  misc_feature (1)..(25): SEQ ID NO: 3703; WAN0249RX; Start 138; Stop 162
gctaacctgatttgaagagattttc

SEQ ID NO: 361750 - DNA, 25 bp, Artificial
  probe
  misc_feature (1)..(25): SEQ ID NO: 3703; WAN0249RX; Start 130; Stop 154
aaagcgatgctaacctgatttgaag

SEQ ID NO: 361751 - DNA, 25 bp, Artificial
  probe
  misc_feature (1)..(25): SEQ ID NO: 3703; WAN0249RX; Start 108; Stop 132
gtcagtaacatatgcctaagacaaa

SEQ ID NO: 361752 - DNA, 25 bp, Artificial
  probe
  misc_feature (1)..(25): SEQ ID NO: 3703; WAN0249RX; Start 139; Stop 163
ctaacctgatttgaagagattttcg

SEQ ID NO: 361753 - DNA, 25 bp, Artificial
  probe
  misc_feature (1)..(25): SEQ ID NO: 3704; WAN024D2Z-3; Start 467; Stop 491
ggaaactccaagaagaggaaataga

SEQ ID NO: 361754 - DNA, 25 bp, Artificial
  probe
  misc_feature (1)..(25): SEQ ID NO: 3704; WAN024D2Z-3; Start 470; Stop 494
aactccaagaagaggaaatagatcg

SEQ ID NO: 361755 - DNA, 25 bp, Artificial
  probe
  misc_feature (1)..(25): SEQ ID NO: 3704; WAN024D2Z-3; Start 472; Stop 496
ctccaagaagaggaaatagatcgtc

SEQ ID NO: 361756 - DNA, 25 bp, Artificial
  probe
  misc_feature (1)..(25): SEQ ID NO: 3704; WAN024D2Z-3; Start 473; Stop 497
tccaagaagaggaaatagatcgtct

SEQ ID NO: 361757 - DNA, 25 bp, Artificial
  probe
  misc_feature (1)..(25): SEQ ID NO: 3704; WAN024D2Z-3; Start 471; Stop 495
actccaagaagaggaaatagatcgt

SEQ ID NO: 361758 - DNA, 25 bp, Artificial
  probe
  misc_feature (1)..(25): SEQ ID NO: 3704; WAN024D2Z-3; Start 468; Stop 492
gaaactccaagaagaggaaatagat

SEQ ID NO: 361759 - DNA, 25 bp, Artificial
  probe
  misc_feature (1)..(25): SEQ ID NO: 3704; WAN024D2Z-3; Start 469; Stop 493
aaactccaagaagaggaaatagatc

SEQ ID NO: 361760 - DNA, 25 bp, Artificial
  probe
  misc_feature (1)..(25): SEQ ID NO: 3704; WAN024D2Z-3; Start 474; Stop 498
ccaagaagaggaaatagatcgtctt

SEQ ID NO: 361761 - DNA, 25 bp, Artificial
  probe
  misc_feature (1)..(25): SEQ ID NO: 3704; WAN024D2Z-3; Start 475; Stop 499
caagaagaggaaatagatcgtcttt

SEQ ID NO: 361762 - DNA, 25 bp, Artificial
  probe
  misc_feature (1)..(25): SEQ ID NO: 3704; WAN024D2Z-3; Start 476; Stop 500
aagaagaggaaatagatcgtctttc

SEQ ID NO: 361763 - DNA, 25 bp, Artificial
  probe
  misc_feature (1)..(25): SEQ ID NO: 3704; WAN024D2Z-3; Start 244; Stop 268
atcaagccagaactggagcaattac

SEQ ID NO: 361764 - DNA, 25 bp, Artificial
  probe
  misc_feature (1)..(25): SEQ ID NO: 3704; WAN024D2Z-3; Start 422; Stop 446
cttatcagcaaactagtcagcaagt

SEQ ID NO: 361765 - DNA, 25 bp, Artificial
  probe
  misc_feature (1)..(25): SEQ ID NO: 3704; WAN024D2Z-3; Start 246; Stop 270
caagccagaactggagcaattacaa

SEQ ID NO: 361766 - DNA, 25 bp, Artificial
  probe
  misc_feature (1)..(25): SEQ ID NO: 3704; WAN024D2Z-3; Start 1298; Stop 1322
aggaacgctttaaatcaacctttga

SEQ ID NO: 361767 - DNA, 25 bp, Artificial
  probe
  misc_feature (1)..(25): SEQ ID NO: 3704; WAN024D2Z-3; Start 56; Stop 80
atactagactggaagccattttcaa

SEQ ID NO: 361768 - DNA, 25 bp, Artificial
  probe
  misc_feature (1)..(25): SEQ ID NO: 3704; WAN024D2Z-3; Start 55; Stop 79
gatactagactggaagccattttca

SEQ ID NO: 361769 - DNA, 25 bp, Artificial
  probe
  misc_feature (1)..(25): SEQ ID NO: 3704; WAN024D2Z-3; Start 57; Stop 81
tactagactggaagccattttcaag

SEQ ID NO: 361770 - DNA, 25 bp, Artificial
  probe
  misc_feature (1)..(25): SEQ ID NO: 3704; WAN024D2Z-3; Start 1684; Stop 1708
atctatggagtgaccatgcaagaat

SEQ ID NO: 361771 - DNA, 25 bp, Artificial
  probe
  misc_feature (1)..(25): SEQ ID NO: 3704; WAN024D2Z-3; Start 59; Stop 83
ctagactggaagccattttcaagaa

SEQ ID NO: 361772 - DNA, 25 bp, Artificial
  probe
  misc_feature (1)..(25): SEQ ID NO: 3704; WAN024D2Z-3; Start 60; Stop 84
tagactggaagccattttcaagaac

SEQ ID NO: 361773 - DNA, 25 bp, Artificial
  probe
  misc_feature (1)..(25): SEQ ID NO: 3704; WAN024D2Z-3; Start 247; Stop 271
aagccagaactggagcaattacaaa

SEQ ID NO: 361774 - DNA, 25 bp, Artificial
  probe
  misc_feature (1)..(25): SEQ ID NO: 3704; WAN024D2Z-3; Start 1685; Stop 1709
tctatggagtgaccatgcaagaatc

SEQ ID NO: 361775 - DNA, 25 bp, Artificial
  probe
  misc_feature (1)..(25): SEQ ID NO: 3704; WAN024D2Z-3; Start 62; Stop 86
gactggaagccattttcaagaactt

SEQ ID NO: 361776 - DNA, 25 bp, Artificial
  probe
  misc_feature (1)..(25): SEQ ID NO: 3704; WAN024D2Z-3; Start 58; Stop 82
actagactggaagccattttcaaga

SEQ ID NO: 361777 - DNA, 25 bp, Artificial
  probe
  misc_feature (1)..(25): SEQ ID NO: 3704; WAN024D2Z-3; Start 1297; Stop 1321
aaggaacgctttaaatcaacctttg

SEQ ID NO: 361778 - DNA, 25 bp, Artificial
  probe
  misc_feature (1)..(25): SEQ ID NO: 3704; WAN024D2Z-3; Start 245; Stop 269
tcaagccagaactggagcaattaca

SEQ ID NO: 361779 - DNA, 25 bp, Artificial
  probe
  misc_feature (1)..(25): SEQ ID NO: 3704; WAN024D2Z-3; Start 67; Stop 91
gaagccattttcaagaacttgctag

SEQ ID NO: 361780 - DNA, 25 bp, Artificial
  probe
  misc_feature (1)..(25): SEQ ID NO: 3704; WAN024D2Z-3; Start 423; Stop 447
ttatcagcaaactagtcagcaagtt

SEQ ID NO: 361781 - DNA, 25 bp, Artificial
  probe
  misc_feature (1)..(25): SEQ ID NO: 3704; WAN024D2Z-3; Start 506; Stop 530
gagattggcaagcggataaggaaaa

SEQ ID NO: 361782 - DNA, 25 bp, Artificial
  probe
  misc_feature (1)..(25): SEQ ID NO: 3704; WAN024D2Z-3; Start 63; Stop 87
actggaagccattttcaagaacttg

SEQ ID NO: 361783 - DNA, 25 bp, Artificial
  probe
  misc_feature (1)..(25): SEQ ID NO: 3704; WAN024D2Z-3; Start 61; Stop 85
agactggaagccattttcaagaact

SEQ ID NO: 361784 - DNA, 25 bp, Artificial
  probe
  misc_feature (1)..(25): SEQ ID NO: 3704; WAN024D2Z-3; Start 424; Stop 448
tatcagcaaactagtcagcaagttg

SEQ ID NO: 361785 - DNA, 25 bp, Artificial
  probe
  misc_feature (1)..(25): SEQ ID NO: 3704; WAN024D2Z-3; Start 466; Stop 490
tggaaactccaagaagaggaaatag

SEQ ID NO: 361786 - DNA, 25 bp, Artificial
  probe
  misc_feature (1)..(25): SEQ ID NO: 3705; WAN0249HP; Start 176; Stop 200
ctataactcagcttaccatctcgta

SEQ ID NO: 361787 - DNA, 25 bp, Artificial
  probe
  misc_feature (1)..(25): SEQ ID NO: 3705; WAN0249HP; Start 177; Stop 201
tataactcagcttaccatctcgtaa

SEQ ID NO: 361788 - DNA, 25 bp, Artificial
  probe
  misc_feature (1)..(25): SEQ ID NO: 3705; WAN0249HP; Start 188; Stop 212
ttaccatctcgtaagttgaaaccaa

SEQ ID NO: 361789 - DNA, 25 bp, Artificial
  probe
  misc_feature (1)..(25): SEQ ID NO: 3705; WAN0249HP; Start 175; Stop 199
gctataactcagcttaccatctcgt

SEQ ID NO: 361790 - DNA, 25 bp, Artificial
  probe
  misc_feature (1)..(25): SEQ ID NO: 3705; WAN0249HP; Start 204; Stop 228
tgaaaccaacaatagcatgaaaaca

SEQ ID NO: 361791 - DNA, 25 bp, Artificial
  probe
  misc_feature (1)..(25): SEQ ID NO: 3705; WAN0249HP; Start 214; Stop 238
aatagcatgaaaacattgagaacgg

SEQ ID NO: 361792 - DNA, 25 bp, Artificial
  probe
  misc_feature (1)..(25): SEQ ID NO: 3705; WAN0249HP; Start 205; Stop 229
gaaaccaacaatagcatgaaaacat

SEQ ID NO: 361793 - DNA, 25 bp, Artificial
  probe
  misc_feature (1)..(25): SEQ ID NO: 3705; WAN0249HP; Start 203; Stop 227
ttgaaaccaacaatagcatgaaaac

SEQ ID NO: 361794 - DNA, 25 bp, Artificial
  probe
  misc_feature (1)..(25): SEQ ID NO: 3705; WAN0249HP; Start 206; Stop 230
aaaccaacaatagcatgaaaacatt

SEQ ID NO: 361795 - DNA, 25 bp, Artificial
  probe
  misc_feature (1)..(25): SEQ ID NO: 3705; WAN0249HP; Start 220; Stop 244
atgaaaacattgagaacgggtaggt

SEQ ID NO: 361796 - DNA, 25 bp, Artificial
  probe
  misc_feature (1)..(25): SEQ ID NO: 3705; WAN0249HP; Start 201; Stop 225
agttgaaaccaacaatagcatgaaa

SEQ ID NO: 361797 - DNA, 25 bp, Artificial
  probe
  misc_feature (1)..(25): SEQ ID NO: 3705; WAN0249HP; Start 200; Stop 224
aagttgaaaccaacaatagcatgaa

SEQ ID NO: 361798 - DNA, 25 bp, Artificial
  probe
  misc_feature (1)..(25): SEQ ID NO: 3705; WAN0249HP; Start 192; Stop 216
catctcgtaagttgaaaccaacaat

SEQ ID NO: 361799 - DNA, 25 bp, Artificial
  probe
  misc_feature (1)..(25): SEQ ID NO: 3705; WAN0249HP; Start 197; Stop 221
cgtaagttgaaaccaacaatagcat

SEQ ID NO: 361800 - DNA, 25 bp, Artificial
  probe
  misc_feature (1)..(25): SEQ ID NO: 3705; WAN0249HP; Start 215; Stop 239
atagcatgaaaacattgagaacggg

SEQ ID NO: 361801 - DNA, 25 bp, Artificial
  probe
  misc_feature (1)..(25): SEQ ID NO: 3705; WAN0249HP; Start 195; Stop 219
ctcgtaagttgaaaccaacaatagc

SEQ ID NO: 361802 - DNA, 25 bp, Artificial
  probe
  misc_feature (1)..(25): SEQ ID NO: 3705; WAN0249HP; Start 194; Stop 218
tctcgtaagttgaaaccaacaatag

SEQ ID NO: 361803 - DNA, 25 bp, Artificial
  probe
  misc_feature (1)..(25): SEQ ID NO: 3705; WAN0249HP; Start 199; Stop 223
taagttgaaaccaacaatagcatga

SEQ ID NO: 361804 - DNA, 25 bp, Artificial
  probe
  misc_feature (1)..(25): SEQ ID NO: 3705; WAN0249HP; Start 198; Stop 222
gtaagttgaaaccaacaatagcatg

SEQ ID NO: 361805 - DNA, 25 bp, Artificial
  probe
  misc_feature (1)..(25): SEQ ID NO: 3705; WAN0249HP; Start 221; Stop 245
tgaaaacattgagaacgggtaggtc

SEQ ID NO: 361806 - DNA, 25 bp, Artificial
  probe
  misc_feature (1)..(25): SEQ ID NO: 3705; WAN0249HP; Start 219; Stop 243
catgaaaacattgagaacgggtagg

SEQ ID NO: 361807 - DNA, 25 bp, Artificial
  probe
  misc_feature (1)..(25): SEQ ID NO: 3705; WAN0249HP; Start 189; Stop 213
taccatctcgtaagttgaaaccaac

SEQ ID NO: 361808 - DNA, 25 bp, Artificial
  probe
  misc_feature (1)..(25): SEQ ID NO: 3705; WAN0249HP; Start 196; Stop 220
tcgtaagttgaaaccaacaatagca

SEQ ID NO: 361809 - DNA, 25 bp, Artificial
  probe
  misc_feature (1)..(25): SEQ ID NO: 3705; WAN0249HP; Start 178; Stop 202
ataactcagcttaccatctcgtaag

SEQ ID NO: 361810 - DNA, 25 bp, Artificial
  probe
  misc_feature (1)..(25): SEQ ID NO: 3705; WAN0249HP; Start 193; Stop 217
atctcgtaagttgaaaccaacaata

SEQ ID NO: 361811 - DNA, 25 bp, Artificial
  probe
  misc_feature (1)..(25): SEQ ID NO: 3705; WAN0249HP; Start 224; Stop 248
aaacattgagaacgggtaggtcctg

SEQ ID NO: 361812 - DNA, 25 bp, Artificial
  probe
  misc_feature (1)..(25): SEQ ID NO: 3705; WAN0249HP; Start 179; Stop 203
taactcagcttaccatctcgtaagt

SEQ ID NO: 361813 - DNA, 25 bp, Artificial
  probe
  misc_feature (1)..(25): SEQ ID NO: 3705; WAN0249HP; Start 191; Stop 215
ccatctcgtaagttgaaaccaacaa

SEQ ID NO: 361814 - DNA, 25 bp, Artificial
  probe
  misc_feature (1)..(25): SEQ ID NO: 3705; WAN0249HP; Start 208; Stop 232
accaacaatagcatgaaaacattga

SEQ ID NO: 361815 - DNA, 25 bp, Artificial
  probe
  misc_feature (1)..(25): SEQ ID NO: 3705; WAN0249HP; Start 213; Stop 237
caatagcatgaaaacattgagaacg

SEQ ID NO: 361816 - DNA, 25 bp, Artificial
  probe
  misc_feature (1)..(25): SEQ ID NO: 3705; WAN0249HP; Start 209; Stop 233
ccaacaatagcatgaaaacattgag

SEQ ID NO: 361817 - DNA, 25 bp, Artificial
  probe
  misc_feature (1)..(25): SEQ ID NO: 3705; WAN0249HP; Start 218; Stop 242
gcatgaaaacattgagaacgggtag

SEQ ID NO: 361818 - DNA, 25 bp, Artificial
  probe
  misc_feature (1)..(25): SEQ ID NO: 3705; WAN0249HP; Start 207; Stop 231
aaccaacaatagcatgaaaacattg

SEQ ID NO: 361819 - DNA, 25 bp, Artificial
  probe
  misc_feature (1)..(25): SEQ ID NO: 3706; WAN024FA5; Start 36; Stop 60
taaggagtagttgcaggttcgattc

SEQ ID NO: 361820 - DNA, 25 bp, Artificial
  probe
  misc_feature (1)..(25): SEQ ID NO: 3706; WAN024FA5; Start 35; Stop 59
ctaaggagtagttgcaggttcgatt

SEQ ID NO: 361821 - DNA, 25 bp, Artificial
  probe
  misc_feature (1)..(25): SEQ ID NO: 3706; WAN024FA5; Start 11; Stop 35
ttcaatggatataacaactccctcc

SEQ ID NO: 361822 - DNA, 25 bp, Artificial
  probe
  misc_feature (1)..(25): SEQ ID NO: 3706; WAN024FA5; Start 13; Stop 37
caatggatataacaactccctccta

SEQ ID NO: 361823 - DNA, 25 bp, Artificial
  probe
  misc_feature (1)..(25): SEQ ID NO: 3706; WAN024FA5; Start 12; Stop 36
tcaatggatataacaactccctcct

SEQ ID NO: 361824 - DNA, 25 bp, Artificial
  probe
  misc_feature (1)..(25): SEQ ID NO: 3706; WAN024FA5; Start 16; Stop 40
tggatataacaactccctcctaagg

SEQ ID NO: 361825 - DNA, 25 bp, Artificial
  probe
  misc_feature (1)..(25): SEQ ID NO: 3706; WAN024FA5; Start 10; Stop 34
gttcaatggatataacaactccctc

SEQ ID NO: 361826 - DNA, 25 bp, Artificial
  probe
  misc_feature (1)..(25): SEQ ID NO: 3706; WAN024FA5; Start 15; Stop 39
atggatataacaactccctcctaag

SEQ ID NO: 361827 - DNA, 25 bp, Artificial
  probe
  misc_feature (1)..(25): SEQ ID NO: 3706; WAN024FA5; Start 1; Stop 25
gctcccttagttcaatggatataac

SEQ ID NO: 361828 - DNA, 25 bp, Artificial
  probe
  misc_feature (1)..(25): SEQ ID NO: 3706; WAN024FA5; Start 4; Stop 28
cccttagttcaatggatataacaac

SEQ ID NO: 361829 - DNA, 25 bp, Artificial
  probe
  misc_feature (1)..(25): SEQ ID NO: 3706; WAN024FA5; Start 14; Stop 38
aatggatataacaactccctcctaa

SEQ ID NO: 361830 - DNA, 25 bp, Artificial
  probe
  misc_feature (1)..(25): SEQ ID NO: 3706; WAN024FA5; Start 17; Stop 41
ggatataacaactccctcctaagga

SEQ ID NO: 361831 - DNA, 25 bp, Artificial
  probe
  misc_feature (1)..(25): SEQ ID NO: 3706; WAN024FA5; Start 2; Stop 26
ctcccttagttcaatggatataaca

SEQ ID NO: 361832 - DNA, 25 bp, Artificial
  probe
  misc_feature (1)..(25): SEQ ID NO: 3706; WAN024FA5; Start 3; Stop 27
tcccttagttcaatggatataacaa

SEQ ID NO: 361833 - DNA, 25 bp, Artificial
  probe
  misc_feature (1)..(25): SEQ ID NO: 3706; WAN024FA5; Start 9; Stop 33
agttcaatggatataacaactccct

SEQ ID NO: 361834 - DNA, 25 bp, Artificial
  probe
  misc_feature (1)..(25): SEQ ID NO: 3706; WAN024FA5; Start 8; Stop 32
tagttcaatggatataacaactccc

SEQ ID NO: 361835 - DNA, 25 bp, Artificial
  probe
  misc_feature (1)..(25): SEQ ID NO: 3706; WAN024FA5; Start 7; Stop 31
ttagttcaatggatataacaactcc

SEQ ID NO: 361836 - DNA, 25 bp, Artificial
  probe
  misc_feature (1)..(25): SEQ ID NO: 3706; WAN024FA5; Start 5; Stop 29
ccttagttcaatggatataacaact

SEQ ID NO: 361837 - DNA, 25 bp, Artificial
  probe
  misc_feature (1)..(25): SEQ ID NO: 3706; WAN024FA5; Start 34; Stop 58
cctaaggagtagttgcaggttcgat

SEQ ID NO: 361838 - DNA, 25 bp, Artificial
  probe
  misc_feature (1)..(25): SEQ ID NO: 3706; WAN024FA5; Start 6; Stop 30
cttagttcaatggatataacaactc

SEQ ID NO: 361839 - DNA, 25 bp, Artificial
  probe
  misc_feature (1)..(25): SEQ ID NO: 3706; WAN024FA5; Start 37; Stop 61
aaggagtagttgcaggttcgattcc

SEQ ID NO: 361840 - DNA, 25 bp, Artificial
  probe
  misc_feature (1)..(25): SEQ ID NO: 3706; WAN024FA5; Start 33; Stop 57
tcctaaggagtagttgcaggttcga

SEQ ID NO: 361841 - DNA, 25 bp, Artificial
  probe
  misc_feature (1)..(25): SEQ ID NO: 3706; WAN024FA5; Start 18; Stop 42
gatataacaactccctcctaaggag

SEQ ID NO: 361842 - DNA, 25 bp, Artificial
  probe
  misc_feature (1)..(25): SEQ ID NO: 3706; WAN024FA5; Start 31; Stop 55
cctcctaaggagtagttgcaggttc

SEQ ID NO: 361843 - DNA, 25 bp, Artificial
  probe
  misc_feature (1)..(25): SEQ ID NO: 3706; WAN024FA5; Start 32; Stop 56
ctcctaaggagtagttgcaggttcg

SEQ ID NO: 361844 - DNA, 25 bp, Artificial
  probe
  misc_feature (1)..(25): SEQ ID NO: 3707; WAN024DGQ; Start 57; Stop 81
agattatgatcgaacaaatgacttt

SEQ ID NO: 361845 - DNA, 25 bp, Artificial
  probe
  misc_feature (1)..(25): SEQ ID NO: 3707; WAN024DGQ; Start 55; Stop 79
aaagattatgatcgaacaaatgact

SEQ ID NO: 361846 - DNA, 25 bp, Artificial
  probe
  misc_feature (1)..(25): SEQ ID NO: 3707; WAN024DGQ; Start 56; Stop 80
aagattatgatcgaacaaatgactt

SEQ ID NO: 361847 - DNA, 25 bp, Artificial
  probe
  misc_feature (1)..(25): SEQ ID NO: 3707; WAN024DGQ; Start 77; Stop 101
acttttatcgaggtcttggctttaa

SEQ ID NO: 361848 - DNA, 25 bp, Artificial
  probe
  misc_feature (1)..(25): SEQ ID NO: 3707; WAN024DGQ; Start 78; Stop 102
cttttatcgaggtcttggctttaaa

SEQ ID NO: 361849 - DNA, 25 bp, Artificial
  probe
  misc_feature (1)..(25): SEQ ID NO: 3707; WAN024DGQ; Start 71; Stop 95
caaatgacttttatcgaggtcttgg

SEQ ID NO: 361850 - DNA, 25 bp, Artificial
  probe
  misc_feature (1)..(25): SEQ ID NO: 3707; WAN024DGQ; Start 70; Stop 94
acaaatgacttttatcgaggtcttg

SEQ ID NO: 361851 - DNA, 25 bp, Artificial
  probe
  misc_feature (1)..(25): SEQ ID NO: 3707; WAN024DGQ; Start 68; Stop 92
gaacaaatgacttttatcgaggtct

SEQ ID NO: 361852 - DNA, 25 bp, Artificial
  probe
  misc_feature (1)..(25): SEQ ID NO: 3707; WAN024DGQ; Start 76; Stop 100
gacttttatcgaggtcttggcttta

SEQ ID NO: 361853 - DNA, 25 bp, Artificial
  probe
  misc_feature (1)..(25): SEQ ID NO: 3707; WAN024DGQ; Start 124; Stop 148
ctatggaatccgcaaaatccttgtc

SEQ ID NO: 361854 - DNA, 25 bp, Artificial
  probe
  misc_feature (1)..(25): SEQ ID NO: 3707; WAN024DGQ; Start 69; Stop 93
aacaaatgacttttatcgaggtctt

SEQ ID NO: 361855 - DNA, 25 bp, Artificial
  probe
  misc_feature (1)..(25): SEQ ID NO: 3707; WAN024DGQ; Start 129; Stop 153
gaatccgcaaaatccttgtcagatt

SEQ ID NO: 361856 - DNA, 25 bp, Artificial
  probe
  misc_feature (1)..(25): SEQ ID NO: 3707; WAN024DGQ; Start 72; Stop 96
aaatgacttttatcgaggtcttggc

SEQ ID NO: 361857 - DNA, 25 bp, Artificial
  probe
  misc_feature (1)..(25): SEQ ID NO: 3707; WAN024DGQ; Start 125; Stop 149
tatggaatccgcaaaatccttgtca

SEQ ID NO: 361858 - DNA, 25 bp, Artificial
  probe
  misc_feature (1)..(25): SEQ ID NO: 3707; WAN024DGQ; Start 54; Stop 78
taaagattatgatcgaacaaatgac

SEQ ID NO: 361859 - DNA, 25 bp, Artificial
  probe
  misc_feature (1)..(25): SEQ ID NO: 3707; WAN024DGQ; Start 74; Stop 98
atgacttttatcgaggtcttggctt

SEQ ID NO: 361860 - DNA, 25 bp, Artificial
  probe
  misc_feature (1)..(25): SEQ ID NO: 3707; WAN024DGQ; Start 73; Stop 97
aatgacttttatcgaggtcttggct

SEQ ID NO: 361861 - DNA, 25 bp, Artificial
  probe
  misc_feature (1)..(25): SEQ ID NO: 3707; WAN024DGQ; Start 67; Stop 91
cgaacaaatgacttttatcgaggtc

SEQ ID NO: 361862 - DNA, 25 bp, Artificial
  probe
  misc_feature (1)..(25): SEQ ID NO: 3707; WAN024DGQ; Start 75; Stop 99
tgacttttatcgaggtcttggcttt

SEQ ID NO: 361863 - DNA, 25 bp, Artificial
  probe
  misc_feature (1)..(25): SEQ ID NO: 3707; WAN024DGQ; Start 79; Stop 103
ttttatcgaggtcttggctttaaaa

SEQ ID NO: 361864 - DNA, 25 bp, Artificial
  probe
  misc_feature (1)..(25): SEQ ID NO: 3707; WAN024DGQ; Start 62; Stop 86
atgatcgaacaaatgacttttatcg

SEQ ID NO: 361865 - DNA, 25 bp, Artificial
  probe
  misc_feature (1)..(25): SEQ ID NO: 3707; WAN024DGQ; Start 128; Stop 152
ggaatccgcaaaatccttgtcagat

SEQ ID NO: 361866 - DNA, 25 bp, Artificial
  probe
  misc_feature (1)..(25): SEQ ID NO: 3707; WAN024DGQ; Start 58; Stop 82
gattatgatcgaacaaatgactttt

SEQ ID NO: 361867 - DNA, 25 bp, Artificial
  probe
  misc_feature (1)..(25): SEQ ID NO: 3707; WAN024DGQ; Start 126; Stop 150
atggaatccgcaaaatccttgtcag

SEQ ID NO: 361868 - DNA, 25 bp, Artificial
  probe
  misc_feature (1)..(25): SEQ ID NO: 3707; WAN024DGQ; Start 61; Stop 85
tatgatcgaacaaatgacttttatc

SEQ ID NO: 361869 - DNA, 25 bp, Artificial
  probe
  misc_feature (1)..(25): SEQ ID NO: 3707; WAN024DGQ; Start 139; Stop 163
aatccttgtcagattttgattaaaa

SEQ ID NO: 361870 - DNA, 25 bp, Artificial
  probe
  misc_feature (1)..(25): SEQ ID NO: 3707; WAN024DGQ; Start 130; Stop 154
aatccgcaaaatccttgtcagattt

SEQ ID NO: 361871 - DNA, 25 bp, Artificial
  probe
  misc_feature (1)..(25): SEQ ID NO: 3707; WAN024DGQ; Start 127; Stop 151
tggaatccgcaaaatccttgtcaga

SEQ ID NO: 361872 - DNA, 25 bp, Artificial
  probe
  misc_feature (1)..(25): SEQ ID NO: 3707; WAN024DGQ; Start 60; Stop 84
ttatgatcgaacaaatgacttttat

SEQ ID NO: 361873 - DNA, 25 bp, Artificial
  probe
  misc_feature (1)..(25): SEQ ID NO: 3707; WAN024DGQ; Start 59; Stop 83
attatgatcgaacaaatgactttta

SEQ ID NO: 361874 - DNA, 25 bp, Artificial
  probe
  misc_feature (1)..(25): SEQ ID NO: 3707; WAN024DGQ; Start 65; Stop 89
atcgaacaaatgacttttatcgagg

SEQ ID NO: 361875 - DNA, 25 bp, Artificial
  probe
  misc_feature (1)..(25): SEQ ID NO: 3707; WAN024DGQ; Start 66; Stop 90
tcgaacaaatgacttttatcgaggt

SEQ ID NO: 361876 - DNA, 25 bp, Artificial
  probe
  misc_feature (1)..(25): SEQ ID NO: 3707; WAN024DGQ; Start 63; Stop 87
tgatcgaacaaatgacttttatcga

SEQ ID NO: 361877 - DNA, 25 bp, Artificial
  probe
  misc_feature (1)..(25): SEQ ID NO: 3708; WAN0249YW; Start 45; Stop 69
gctaggaaccgacagtatcttatat

SEQ ID NO: 361878 - DNA, 25 bp, Artificial
  probe
  misc_feature (1)..(25): SEQ ID NO: 3708; WAN0249YW; Start 44; Stop 68
agctaggaaccgacagtatcttata

SEQ ID NO: 361879 - DNA, 25 bp, Artificial
  probe
  misc_feature (1)..(25): SEQ ID NO: 3708; WAN0249YW; Start 43; Stop 67
gagctaggaaccgacagtatcttat

SEQ ID NO: 361880 - DNA, 25 bp, Artificial
  probe
  misc_feature (1)..(25): SEQ ID NO: 3708; WAN0249YW; Start 48; Stop 72
aggaaccgacagtatcttatataga

SEQ ID NO: 361881 - DNA, 25 bp, Artificial
  probe
  misc_feature (1)..(25): SEQ ID NO: 3708; WAN0249YW; Start 49; Stop 73
ggaaccgacagtatcttatatagaa

SEQ ID NO: 361882 - DNA, 25 bp, Artificial
  probe
  misc_feature (1)..(25): SEQ ID NO: 3708; WAN0249YW; Start 42; Stop 66
tgagctaggaaccgacagtatctta

SEQ ID NO: 361883 - DNA, 25 bp, Artificial
  probe
  misc_feature (1)..(25): SEQ ID NO: 3708; WAN0249YW; Start 38; Stop 62
tagttgagctaggaaccgacagtat

SEQ ID NO: 361884 - DNA, 25 bp, Artificial
  probe
  misc_feature (1)..(25): SEQ ID NO: 3708; WAN0249YW; Start 47; Stop 71
taggaaccgacagtatcttatatag

SEQ ID NO: 361885 - DNA, 25 bp, Artificial
  probe
  misc_feature (1)..(25): SEQ ID NO: 3708; WAN0249YW; Start 46; Stop 70
ctaggaaccgacagtatcttatata

SEQ ID NO: 361886 - DNA, 25 bp, Artificial
  probe
  misc_feature (1)..(25): SEQ ID NO: 3708; WAN0249YW; Start 41; Stop 65
ttgagctaggaaccgacagtatctt

SEQ ID NO: 361887 - DNA, 25 bp, Artificial
  probe
  misc_feature (1)..(25): SEQ ID NO: 3708; WAN0249YW; Start 24; Stop 48
atgaacttaggacctagttgagcta

SEQ ID NO: 361888 - DNA, 25 bp, Artificial
  probe
  misc_feature (1)..(25): SEQ ID NO: 3708; WAN0249YW; Start 25; Stop 49
tgaacttaggacctagttgagctag

SEQ ID NO: 361889 - DNA, 25 bp, Artificial
  probe
  misc_feature (1)..(25): SEQ ID NO: 3708; WAN0249YW; Start 23; Stop 47
aatgaacttaggacctagttgagct

SEQ ID NO: 361890 - DNA, 25 bp, Artificial
  probe
  misc_feature (1)..(25): SEQ ID NO: 3708; WAN0249YW; Start 12; Stop 36
gctcgtatgaaaatgaacttaggac

SEQ ID NO: 361891 - DNA, 25 bp, Artificial
  probe
  misc_feature (1)..(25): SEQ ID NO: 3708; WAN0249YW; Start 13; Stop 37
ctcgtatgaaaatgaacttaggacc

SEQ ID NO: 361892 - DNA, 25 bp, Artificial
  probe
  misc_feature (1)..(25): SEQ ID NO: 3708; WAN0249YW; Start 40; Stop 64
gttgagctaggaaccgacagtatct

SEQ ID NO: 361893 - DNA, 25 bp, Artificial
  probe
  misc_feature (1)..(25): SEQ ID NO: 3708; WAN0249YW; Start 39; Stop 63
agttgagctaggaaccgacagtatc

SEQ ID NO: 361894 - DNA, 25 bp, Artificial
  probe
  misc_feature (1)..(25): SEQ ID NO: 3708; WAN0249YW; Start 14; Stop 38
tcgtatgaaaatgaacttaggacct

SEQ ID NO: 361895 - DNA, 25 bp, Artificial
  probe
  misc_feature (1)..(25): SEQ ID NO: 3708; WAN0249YW; Start 22; Stop 46
aaatgaacttaggacctagttgagc

SEQ ID NO: 361896 - DNA, 25 bp, Artificial
  probe
  misc_feature (1)..(25): SEQ ID NO: 3708; WAN0249YW; Start 37; Stop 61
ctagttgagctaggaaccgacagta

SEQ ID NO: 361897 - DNA, 25 bp, Artificial
  probe
  misc_feature (1)..(25): SEQ ID NO: 3708; WAN0249YW; Start 50; Stop 74
gaaccgacagtatcttatatagaat

SEQ ID NO: 361898 - DNA, 25 bp, Artificial
  probe
  misc_feature (1)..(25): SEQ ID NO: 3708; WAN0249YW; Start 53; Stop 77
ccgacagtatcttatatagaatagg

SEQ ID NO: 361899 - DNA, 25 bp, Artificial
  probe
  misc_feature (1)..(25): SEQ ID NO: 3708; WAN0249YW; Start 15; Stop 39
cgtatgaaaatgaacttaggaccta

SEQ ID NO: 361900 - DNA, 25 bp, Artificial
  probe
  misc_feature (1)..(25): SEQ ID NO: 3708; WAN0249YW; Start 11; Stop 35
agctcgtatgaaaatgaacttagga

SEQ ID NO: 361901 - DNA, 25 bp, Artificial
  probe
  misc_feature (1)..(25): SEQ ID NO: 3708; WAN0249YW; Start 10; Stop 34
cagctcgtatgaaaatgaacttagg

SEQ ID NO: 361902 - DNA, 25 bp, Artificial
  probe
  misc_feature (1)..(25): SEQ ID NO: 3708; WAN0249YW; Start 9; Stop 33
ccagctcgtatgaaaatgaacttag

SEQ ID NO: 361903 - DNA, 25 bp, Artificial
  probe
  misc_feature (1)..(25): SEQ ID NO: 3708; WAN0249YW; Start 8; Stop 32
tccagctcgtatgaaaatgaactta

SEQ ID NO: 361904 - DNA, 25 bp, Artificial
  probe
  misc_feature (1)..(25): SEQ ID NO: 3708; WAN0249YW; Start 4; Stop 28
ctagtccagctcgtatgaaaatgaa

SEQ ID NO: 361905 - DNA, 25 bp, Artificial
  probe
  misc_feature (1)..(25): SEQ ID NO: 3708; WAN0249YW; Start 5; Stop 29
tagtccagctcgtatgaaaatgaac

SEQ ID NO: 361906 - DNA, 25 bp, Artificial
  probe
  misc_feature (1)..(25): SEQ ID NO: 3708; WAN0249YW; Start 2; Stop 26
ctctagtccagctcgtatgaaaatg

SEQ ID NO: 361907 - DNA, 25 bp, Artificial
  probe
  misc_feature (1)..(25): SEQ ID NO: 3708; WAN0249YW; Start 3; Stop 27
tctagtccagctcgtatgaaaatga

SEQ ID NO: 361908 - DNA, 25 bp, Artificial
  probe
  misc_feature (1)..(25): SEQ ID NO: 3708; WAN0249YW; Start 7; Stop 31
gtccagctcgtatgaaaatgaactt

SEQ ID NO: 361909 - DNA, 25 bp, Artificial
  probe
  misc_feature (1)..(25): SEQ ID NO: 3708; WAN0249YW; Start 16; Stop 40
gtatgaaaatgaacttaggacctag

SEQ ID NO: 361910 - DNA, 25 bp, Artificial
  probe
  misc_feature (1)..(25): SEQ ID NO: 3710; WAN024A8O; Start 4; Stop 28
gtccccaaccaaattgttcagtttt

SEQ ID NO: 361911 - DNA, 25 bp, Artificial
  probe
  misc_feature (1)..(25): SEQ ID NO: 3710; WAN024A8O; Start 3; Stop 27
tgtccccaaccaaattgttcagttt

SEQ ID NO: 361912 - DNA, 25 bp, Artificial
  probe
  misc_feature (1)..(25): SEQ ID NO: 3710; WAN024A8O; Start 2; Stop 26
ctgtccccaaccaaattgttcagtt

SEQ ID NO: 361913 - DNA, 25 bp, Artificial
  probe
  misc_feature (1)..(25): SEQ ID NO: 3711; WAN024BGK; Start 74; Stop 98
cgatctcctcatggtaactattcaa

SEQ ID NO: 361914 - DNA, 25 bp, Artificial
  probe
  misc_feature (1)..(25): SEQ ID NO: 3711; WAN024BGK; Start 72; Stop 96
gacgatctcctcatggtaactattc

SEQ ID NO: 361915 - DNA, 25 bp, Artificial
  probe
  misc_feature (1)..(25): SEQ ID NO: 3711; WAN024BGK; Start 73; Stop 97
acgatctcctcatggtaactattca

SEQ ID NO: 361916 - DNA, 25 bp, Artificial
  probe
  misc_feature (1)..(25): SEQ ID NO: 3711; WAN024BGK; Start 61; Stop 85
aattaagcctagacgatctcctcat

SEQ ID NO: 361917 - DNA, 25 bp, Artificial
  probe
  misc_feature (1)..(25): SEQ ID NO: 3711; WAN024BGK; Start 70; Stop 94
tagacgatctcctcatggtaactat

SEQ ID NO: 361918 - DNA, 25 bp, Artificial
  probe
  misc_feature (1)..(25): SEQ ID NO: 3711; WAN024BGK; Start 69; Stop 93
ctagacgatctcctcatggtaacta

SEQ ID NO: 361919 - DNA, 25 bp, Artificial
  probe
  misc_feature (1)..(25): SEQ ID NO: 3711; WAN024BGK; Start 71; Stop 95
agacgatctcctcatggtaactatt

SEQ ID NO: 361920 - DNA, 25 bp, Artificial
  probe
  misc_feature (1)..(25): SEQ ID NO: 3711; WAN024BGK; Start 62; Stop 86
attaagcctagacgatctcctcatg

SEQ ID NO: 361921 - DNA, 25 bp, Artificial
  probe
  misc_feature (1)..(25): SEQ ID NO: 3711; WAN024BGK; Start 75; Stop 99
gatctcctcatggtaactattcaat

SEQ ID NO: 361922 - DNA, 25 bp, Artificial
  probe
  misc_feature (1)..(25): SEQ ID NO: 3711; WAN024BGK; Start 78; Stop 102
ctcctcatggtaactattcaataca

SEQ ID NO: 361923 - DNA, 25 bp, Artificial
  probe
  misc_feature (1)..(25): SEQ ID NO: 3711; WAN024BGK; Start 77; Stop 101
tctcctcatggtaactattcaatac

SEQ ID NO: 361924 - DNA, 25 bp, Artificial
  probe
  misc_feature (1)..(25): SEQ ID NO: 3711; WAN024BGK; Start 68; Stop 92
cctagacgatctcctcatggtaact

SEQ ID NO: 361925 - DNA, 25 bp, Artificial
  probe
  misc_feature (1)..(25): SEQ ID NO: 3711; WAN024BGK; Start 55; Stop 79
aaaccaaattaagcctagacgatct

SEQ ID NO: 361926 - DNA, 25 bp, Artificial
  probe
  misc_feature (1)..(25): SEQ ID NO: 3711; WAN024BGK; Start 56; Stop 80
aaccaaattaagcctagacgatctc

SEQ ID NO: 361927 - DNA, 25 bp, Artificial
  probe
  misc_feature (1)..(25): SEQ ID NO: 3711; WAN024BGK; Start 79; Stop 103
tcctcatggtaactattcaatacat

SEQ ID NO: 361928 - DNA, 25 bp, Artificial
  probe
  misc_feature (1)..(25): SEQ ID NO: 3711; WAN024BGK; Start 59; Stop 83
caaattaagcctagacgatctcctc

SEQ ID NO: 361929 - DNA, 25 bp, Artificial
  probe
  misc_feature (1)..(25): SEQ ID NO: 3711; WAN024BGK; Start 60; Stop 84
aaattaagcctagacgatctcctca

SEQ ID NO: 361930 - DNA, 25 bp, Artificial
  probe
  misc_feature (1)..(25): SEQ ID NO: 3711; WAN024BGK; Start 76; Stop 100
atctcctcatggtaactattcaata

SEQ ID NO: 361931 - DNA, 25 bp, Artificial
  probe
  misc_feature (1)..(25): SEQ ID NO: 3711; WAN024BGK; Start 142; Stop 166
ttggcattcacgaaagcaacttaat

SEQ ID NO: 361932 - DNA, 25 bp, Artificial
  probe
  misc_feature (1)..(25): SEQ ID NO: 3711; WAN024BGK; Start 63; Stop 87
ttaagcctagacgatctcctcatgg

SEQ ID NO: 361933 - DNA, 25 bp, Artificial
  probe
  misc_feature (1)..(25): SEQ ID NO: 3711; WAN024BGK; Start 58; Stop 82
ccaaattaagcctagacgatctcct

SEQ ID NO: 361934 - DNA, 25 bp, Artificial
  probe
  misc_feature (1)..(25): SEQ ID NO: 3711; WAN024BGK; Start 141; Stop 165
tttggcattcacgaaagcaacttaa

SEQ ID NO: 361935 - DNA, 25 bp, Artificial
  probe
  misc_feature (1)..(25): SEQ ID NO: 3711; WAN024BGK; Start 143; Stop 167
tggcattcacgaaagcaacttaatc

SEQ ID NO: 361936 - DNA, 25 bp, Artificial
  probe
  misc_feature (1)..(25): SEQ ID NO: 3711; WAN024BGK; Start 87; Stop 111
gtaactattcaatacatgcgagaat

SEQ ID NO: 361937 - DNA, 25 bp, Artificial
  probe
  misc_feature (1)..(25): SEQ ID NO: 3711; WAN024BGK; Start 57; Stop 81
accaaattaagcctagacgatctcc

SEQ ID NO: 361938 - DNA, 25 bp, Artificial
  probe
  misc_feature (1)..(25): SEQ ID NO: 3711; WAN024BGK; Start 83; Stop 107
catggtaactattcaatacatgcga

SEQ ID NO: 361939 - DNA, 25 bp, Artificial
  probe
  misc_feature (1)..(25): SEQ ID NO: 3711; WAN024BGK; Start 82; Stop 106
tcatggtaactattcaatacatgcg

SEQ ID NO: 361940 - DNA, 25 bp, Artificial
  probe
  misc_feature (1)..(25): SEQ ID NO: 3711; WAN024BGK; Start 144; Stop 168
ggcattcacgaaagcaacttaatcc

SEQ ID NO: 361941 - DNA, 25 bp, Artificial
  probe
  misc_feature (1)..(25): SEQ ID NO: 3711; WAN024BGK; Start 208; Stop 232
gttttacgatttcaaattctgccct

SEQ ID NO: 361942 - DNA, 25 bp, Artificial
  probe
  misc_feature (1)..(25): SEQ ID NO: 3711; WAN024BGK; Start 209; Stop 233
ttttacgatttcaaattctgcccta

SEQ ID NO: 361943 - DNA, 25 bp, Artificial
  probe
  misc_feature (1)..(25): SEQ ID NO: 3711; WAN024BGK; Start 206; Stop 230
tggttttacgatttcaaattctgcc

SEQ ID NO: 361944 - DNA, 25 bp, Artificial
  probe
  misc_feature (1)..(25): SEQ ID NO: 3711; WAN024BGK; Start 205; Stop 229
atggttttacgatttcaaattctgc

SEQ ID NO: 361945 - DNA, 25 bp, Artificial
  probe
  misc_feature (1)..(25): SEQ ID NO: 3711; WAN024BGK; Start 67; Stop 91
gcctagacgatctcctcatggtaac

SEQ ID NO: 361946 - DNA, 25 bp, Artificial
  probe
  misc_feature (1)..(25): SEQ ID NO: 3712; WAN0249TB; Start 230; Stop 254
actgtccttatttcattccgctata

SEQ ID NO: 361947 - DNA, 25 bp, Artificial
  probe
  misc_feature (1)..(25): SEQ ID NO: 3712; WAN0249TB; Start 254; Stop 278
atataagtttgctgtttcttgtcgc

SEQ ID NO: 361948 - DNA, 25 bp, Artificial
  probe
  misc_feature (1)..(25): SEQ ID NO: 3712; WAN0249TB; Start 229; Stop 253
gactgtccttatttcattccgctat

SEQ ID NO: 361949 - DNA, 25 bp, Artificial
  probe
  misc_feature (1)..(25): SEQ ID NO: 3712; WAN0249TB; Start 231; Stop 255
ctgtccttatttcattccgctatat

SEQ ID NO: 361950 - DNA, 25 bp, Artificial
  probe
  misc_feature (1)..(25): SEQ ID NO: 3712; WAN0249TB; Start 255; Stop 279
tataagtttgctgtttcttgtcgct

SEQ ID NO: 361951 - DNA, 25 bp, Artificial
  probe
  misc_feature (1)..(25): SEQ ID NO: 3712; WAN0249TB; Start 225; Stop 249
atttgactgtccttatttcattccg

SEQ ID NO: 361952 - DNA, 25 bp, Artificial
  probe
  misc_feature (1)..(25): SEQ ID NO: 3712; WAN0249TB; Start 138; Stop 162
tacagcgtactattccaaactcaac

SEQ ID NO: 361953 - DNA, 25 bp, Artificial
  probe
  misc_feature (1)..(25): SEQ ID NO: 3712; WAN0249TB; Start 143; Stop 167
cgtactattccaaactcaaccaact

SEQ ID NO: 361954 - DNA, 25 bp, Artificial
  probe
  misc_feature (1)..(25): SEQ ID NO: 3712; WAN0249TB; Start 223; Stop 247
cgatttgactgtccttatttcattc

SEQ ID NO: 361955 - DNA, 25 bp, Artificial
  probe
  misc_feature (1)..(25): SEQ ID NO: 3712; WAN0249TB; Start 144; Stop 168
gtactattccaaactcaaccaacta

SEQ ID NO: 361956 - DNA, 25 bp, Artificial
  probe
  misc_feature (1)..(25): SEQ ID NO: 3712; WAN0249TB; Start 156; Stop 180
actcaaccaactataatagatcgaa

SEQ ID NO: 361957 - DNA, 25 bp, Artificial
  probe
  misc_feature (1)..(25): SEQ ID NO: 3712; WAN0249TB; Start 155; Stop 179
aactcaaccaactataatagatcga

SEQ ID NO: 361958 - DNA, 25 bp, Artificial
  probe
  misc_feature (1)..(25): SEQ ID NO: 3712; WAN0249TB; Start 146; Stop 170
actattccaaactcaaccaactata

SEQ ID NO: 361959 - DNA, 25 bp, Artificial
  probe
  misc_feature (1)..(25): SEQ ID NO: 3712; WAN0249TB; Start 145; Stop 169
tactattccaaactcaaccaactat

SEQ ID NO: 361960 - DNA, 25 bp, Artificial
  probe
  misc_feature (1)..(25): SEQ ID NO: 3712; WAN0249TB; Start 228; Stop 252
tgactgtccttatttcattccgcta

SEQ ID NO: 361961 - DNA, 25 bp, Artificial
  probe
  misc_feature (1)..(25): SEQ ID NO: 3712; WAN0249TB; Start 226; Stop 250
tttgactgtccttatttcattccgc

SEQ ID NO: 361962 - DNA, 25 bp, Artificial
  probe
  misc_feature (1)..(25): SEQ ID NO: 3712; WAN0249TB; Start 224; Stop 248
gatttgactgtccttatttcattcc

SEQ ID NO: 361963 - DNA, 25 bp, Artificial
  probe
  misc_feature (1)..(25): SEQ ID NO: 3712; WAN0249TB; Start 256; Stop 280
ataagtttgctgtttcttgtcgctc

SEQ ID NO: 361964 - DNA, 25 bp, Artificial
  probe
  misc_feature (1)..(25): SEQ ID NO: 3712; WAN0249TB; Start 151; Stop 175
tccaaactcaaccaactataataga

SEQ ID NO: 361965 - DNA, 25 bp, Artificial
  probe
  misc_feature (1)..(25): SEQ ID NO: 3712; WAN0249TB; Start 253; Stop 277
tatataagtttgctgtttcttgtcg

SEQ ID NO: 361966 - DNA, 25 bp, Artificial
  probe
  misc_feature (1)..(25): SEQ ID NO: 3712; WAN0249TB; Start 142; Stop 166
gcgtactattccaaactcaaccaac

SEQ ID NO: 361967 - DNA, 25 bp, Artificial
  probe
  misc_feature (1)..(25): SEQ ID NO: 3712; WAN0249TB; Start 141; Stop 165
agcgtactattccaaactcaaccaa

SEQ ID NO: 361968 - DNA, 25 bp, Artificial
  probe
  misc_feature (1)..(25): SEQ ID NO: 3712; WAN0249TB; Start 227; Stop 251
ttgactgtccttatttcattccgct

SEQ ID NO: 361969 - DNA, 25 bp, Artificial
  probe
  misc_feature (1)..(25): SEQ ID NO: 3712; WAN0249TB; Start 232; Stop 256
tgtccttatttcattccgctatata

SEQ ID NO: 361970 - DNA, 25 bp, Artificial
  probe
  misc_feature (1)..(25): SEQ ID NO: 3712; WAN0249TB; Start 222; Stop 246
tcgatttgactgtccttatttcatt

SEQ ID NO: 361971 - DNA, 25 bp, Artificial
  probe
  misc_feature (1)..(25): SEQ ID NO: 3712; WAN0249TB; Start 147; Stop 171
ctattccaaactcaaccaactataa

SEQ ID NO: 361972 - DNA, 25 bp, Artificial
  probe
  misc_feature (1)..(25): SEQ ID NO: 3712; WAN0249TB; Start 246; Stop 270
tccgctatatataagtttgctgttt

SEQ ID NO: 361973 - DNA, 25 bp, Artificial
  probe
  misc_feature (1)..(25): SEQ ID NO: 3712; WAN0249TB; Start 245; Stop 269
ttccgctatatataagtttgctgtt

SEQ ID NO: 361974 - DNA, 25 bp, Artificial
  probe
  misc_feature (1)..(25): SEQ ID NO: 3712; WAN0249TB; Start 150; Stop 174
ttccaaactcaaccaactataatag

SEQ ID NO: 361975 - DNA, 25 bp, Artificial
  probe
  misc_feature (1)..(25): SEQ ID NO: 3712; WAN0249TB; Start 247; Stop 271
ccgctatatataagtttgctgtttc

SEQ ID NO: 361976 - DNA, 25 bp, Artificial
  probe
  misc_feature (1)..(25): SEQ ID NO: 3712; WAN0249TB; Start 244; Stop 268
attccgctatatataagtttgctgt

SEQ ID NO: 361977 - DNA, 25 bp, Artificial
  probe
  misc_feature (1)..(25): SEQ ID NO: 3712; WAN0249TB; Start 140; Stop 164
cagcgtactattccaaactcaacca

SEQ ID NO: 361978 - DNA, 25 bp, Artificial
  probe
  misc_feature (1)..(25): SEQ ID NO: 3712; WAN0249TB; Start 139; Stop 163
acagcgtactattccaaactcaacc

SEQ ID NO: 361979 - DNA, 25 bp, Artificial
  probe
  misc_feature (1)..(25): SEQ ID NO: 3713; WAN0249VV; Start 23; Stop 47
aatttcgtgacagtttcttacattt

SEQ ID NO: 361980 - DNA, 25 bp, Artificial
  probe
  misc_feature (1)..(25): SEQ ID NO: 3713; WAN0249VV; Start 20; Stop 44
tttaatttcgtgacagtttcttaca

SEQ ID NO: 361981 - DNA, 25 bp, Artificial
  probe
  misc_feature (1)..(25): SEQ ID NO: 3713; WAN0249VV; Start 22; Stop 46
taatttcgtgacagtttcttacatt

SEQ ID NO: 361982 - DNA, 25 bp, Artificial
  probe
  misc_feature (1)..(25): SEQ ID NO: 3713; WAN0249VV; Start 21; Stop 45
ttaatttcgtgacagtttcttacat

SEQ ID NO: 361983 - DNA, 25 bp, Artificial
  probe
  misc_feature (1)..(25): SEQ ID NO: 3713; WAN0249VV; Start 95; Stop 119
gggtatacactcttaggttctttaa

SEQ ID NO: 361984 - DNA, 25 bp, Artificial
  probe
  misc_feature (1)..(25): SEQ ID NO: 3713; WAN0249VV; Start 24; Stop 48
atttcgtgacagtttcttacatttt

SEQ ID NO: 361985 - DNA, 25 bp, Artificial
  probe
  misc_feature (1)..(25): SEQ ID NO: 3713; WAN0249VV; Start 25; Stop 49
tttcgtgacagtttcttacatttta

SEQ ID NO: 361986 - DNA, 25 bp, Artificial
  probe
  misc_feature (1)..(25): SEQ ID NO: 3713; WAN0249VV; Start 13; Stop 37
acttcattttaatttcgtgacagtt

SEQ ID NO: 361987 - DNA, 25 bp, Artificial
  probe
  misc_feature (1)..(25): SEQ ID NO: 3713; WAN0249VV; Start 12; Stop 36
aacttcattttaatttcgtgacagt

SEQ ID NO: 361988 - DNA, 25 bp, Artificial
  probe
  misc_feature (1)..(25): SEQ ID NO: 3713; WAN0249VV; Start 26; Stop 50
ttcgtgacagtttcttacattttaa

SEQ ID NO: 361989 - DNA, 25 bp, Artificial
  probe
  misc_feature (1)..(25): SEQ ID NO: 3713; WAN0249VV; Start 16; Stop 40
tcattttaatttcgtgacagtttct

SEQ ID NO: 361990 - DNA, 25 bp, Artificial
  probe
  misc_feature (1)..(25): SEQ ID NO: 3713; WAN0249VV; Start 10; Stop 34
agaacttcattttaatttcgtgaca

SEQ ID NO: 361991 - DNA, 25 bp, Artificial
  probe
  misc_feature (1)..(25): SEQ ID NO: 3713; WAN0249VV; Start 11; Stop 35
gaacttcattttaatttcgtgacag

SEQ ID NO: 361992 - DNA, 25 bp, Artificial
  probe
  misc_feature (1)..(25): SEQ ID NO: 3713; WAN0249VV; Start 17; Stop 41
cattttaatttcgtgacagtttctt

SEQ ID NO: 361993 - DNA, 25 bp, Artificial
  probe
  misc_feature (1)..(25): SEQ ID NO: 3713; WAN0249VV; Start 71; Stop 95
cactatctgtgtagagggaaaaggg

SEQ ID NO: 361994 - DNA, 25 bp, Artificial
  probe
  misc_feature (1)..(25): SEQ ID NO: 3713; WAN0249VV; Start 94; Stop 118
ggggtatacactcttaggttcttta

SEQ ID NO: 361995 - DNA, 25 bp, Artificial
  probe
  misc_feature (1)..(25): SEQ ID NO: 3713; WAN0249VV; Start 72; Stop 96
actatctgtgtagagggaaaagggg

SEQ ID NO: 361996 - DNA, 25 bp, Artificial
  probe
  misc_feature (1)..(25): SEQ ID NO: 3713; WAN0249VV; Start 15; Stop 39
ttcattttaatttcgtgacagtttc

SEQ ID NO: 361997 - DNA, 25 bp, Artificial
  probe
  misc_feature (1)..(25): SEQ ID NO: 3713; WAN0249VV; Start 14; Stop 38
cttcattttaatttcgtgacagttt

SEQ ID NO: 361998 - DNA, 25 bp, Artificial
  probe
  misc_feature (1)..(25): SEQ ID NO: 3713; WAN0249VV; Start 37; Stop 61
ttcttacattttaaacaaaagcccc

SEQ ID NO: 361999 - DNA, 25 bp, Artificial
  probe
  misc_feature (1)..(25): SEQ ID NO: 3713; WAN0249VV; Start 9; Stop 33
aagaacttcattttaatttcgtgac

SEQ ID NO: 362000 - DNA, 25 bp, Artificial
  probe
  misc_feature (1)..(25): SEQ ID NO: 3713; WAN0249VV; Start 27; Stop 51
tcgtgacagtttcttacattttaaa

SEQ ID NO: 362001 - DNA, 25 bp, Artificial
  probe
  misc_feature (1)..(25): SEQ ID NO: 3713; WAN0249VV; Start 19; Stop 43
ttttaatttcgtgacagtttcttac

SEQ ID NO: 362002 - DNA, 25 bp, Artificial
  probe
  misc_feature (1)..(25): SEQ ID NO: 3713; WAN0249VV; Start 96; Stop 120
ggtatacactcttaggttctttaaa

SEQ ID NO: 362003 - DNA, 25 bp, Artificial
  probe
  misc_feature (1)..(25): SEQ ID NO: 3713; WAN0249VV; Start 36; Stop 60
tttcttacattttaaacaaaagccc

SEQ ID NO: 362004 - DNA, 25 bp, Artificial
  probe
  misc_feature (1)..(25): SEQ ID NO: 3713; WAN0249VV; Start 18; Stop 42
attttaatttcgtgacagtttctta

SEQ ID NO: 362005 - DNA, 25 bp, Artificial
  probe
  misc_feature (1)..(25): SEQ ID NO: 3713; WAN0249VV; Start 6; Stop 30
tgtaagaacttcattttaatttcgt

SEQ ID NO: 362006 - DNA, 25 bp, Artificial
  probe
  misc_feature (1)..(25): SEQ ID NO: 3713; WAN0249VV; Start 28; Stop 52
cgtgacagtttcttacattttaaac

SEQ ID NO: 362007 - DNA, 25 bp, Artificial
  probe
  misc_feature (1)..(25): SEQ ID NO: 3713; WAN0249VV; Start 7; Stop 31
gtaagaacttcattttaatttcgtg

SEQ ID NO: 362008 - DNA, 25 bp, Artificial
  probe
  misc_feature (1)..(25): SEQ ID NO: 3713; WAN0249VV; Start 8; Stop 32
taagaacttcattttaatttcgtga

SEQ ID NO: 362009 - DNA, 25 bp, Artificial
  probe
  misc_feature (1)..(25): SEQ ID NO: 3713; WAN0249VV; Start 70; Stop 94
acactatctgtgtagagggaaaagg

SEQ ID NO: 362010 - DNA, 25 bp, Artificial
  probe
  misc_feature (1)..(25): SEQ ID NO: 3713; WAN0249VV; Start 29; Stop 53
gtgacagtttcttacattttaaaca

SEQ ID NO: 362011 - DNA, 25 bp, Artificial
  probe
  misc_feature (1)..(25): SEQ ID NO: 3713; WAN0249VV; Start 35; Stop 59
gtttcttacattttaaacaaaagcc

SEQ ID NO: 362012 - DNA, 25 bp, Artificial
  probe
  misc_feature (1)..(25): SEQ ID NO: 3714; WAN024DLR-5; Start 1497; Stop 1521
agagccaaactactaccactttatg

SEQ ID NO: 362013 - DNA, 25 bp, Artificial
  probe
  misc_feature (1)..(25): SEQ ID NO: 3714; WAN024DLR-5; Start 1496; Stop 1520
tagagccaaactactaccactttat

SEQ ID NO: 362014 - DNA, 25 bp, Artificial
  probe
  misc_feature (1)..(25): SEQ ID NO: 3714; WAN024DLR-5; Start 1495; Stop 1519
ctagagccaaactactaccacttta

SEQ ID NO: 362015 - DNA, 25 bp, Artificial
  probe
  misc_feature (1)..(25): SEQ ID NO: 3714; WAN024DLR-5; Start 1488; Stop 1512
tgaagacctagagccaaactactac

SEQ ID NO: 362016 - DNA, 25 bp, Artificial
  probe
  misc_feature (1)..(25): SEQ ID NO: 3714; WAN024DLR-5; Start 1487; Stop 1511
ttgaagacctagagccaaactacta

SEQ ID NO: 362017 - DNA, 25 bp, Artificial
  probe
  misc_feature (1)..(25): SEQ ID NO: 3714; WAN024DLR-5; Start 1494; Stop 1518
cctagagccaaactactaccacttt

SEQ ID NO: 362018 - DNA, 25 bp, Artificial
  probe
  misc_feature (1)..(25): SEQ ID NO: 3714; WAN024DLR-5; Start 1489; Stop 1513
gaagacctagagccaaactactacc

SEQ ID NO: 362019 - DNA, 25 bp, Artificial
  probe
  misc_feature (1)..(25): SEQ ID NO: 3714; WAN024DLR-5; Start 1500; Stop 1524
gccaaactactaccactttatggat

SEQ ID NO: 362020 - DNA, 25 bp, Artificial
  probe
  misc_feature (1)..(25): SEQ ID NO: 3714; WAN024DLR-5; Start 1490; Stop 1514
aagacctagagccaaactactacca

SEQ ID NO: 362021 - DNA, 25 bp, Artificial
  probe
  misc_feature (1)..(25): SEQ ID NO: 3714; WAN024DLR-5; Start 1498; Stop 1522
gagccaaactactaccactttatgg

SEQ ID NO: 362022 - DNA, 25 bp, Artificial
  probe
  misc_feature (1)..(25): SEQ ID NO: 3714; WAN024DLR-5; Start 1493; Stop 1517
acctagagccaaactactaccactt

SEQ ID NO: 362023 - DNA, 25 bp, Artificial
  probe
  misc_feature (1)..(25): SEQ ID NO: 3714; WAN024DLR-5; Start 1499; Stop 1523
agccaaactactaccactttatgga

SEQ ID NO: 362024 - DNA, 25 bp, Artificial
  probe
  misc_feature (1)..(25): SEQ ID NO: 3714; WAN024DLR-5; Start 1459; Stop 1483
tataaccacacagccaaagtcgata

SEQ ID NO: 362025 - DNA, 25 bp, Artificial
  probe
  misc_feature (1)..(25): SEQ ID NO: 3714; WAN024DLR-5; Start 1480; Stop 1504
gatatctttgaagacctagagccaa

SEQ ID NO: 362026 - DNA, 25 bp, Artificial
  probe
  misc_feature (1)..(25): SEQ ID NO: 3714; WAN024DLR-5; Start 1492; Stop 1516
gacctagagccaaactactaccact

SEQ ID NO: 362027 - DNA, 25 bp, Artificial
  probe
  misc_feature (1)..(25): SEQ ID NO: 3714; WAN024DLR-5; Start 1491; Stop 1515
agacctagagccaaactactaccac

SEQ ID NO: 362028 - DNA, 25 bp, Artificial
  probe
  misc_feature (1)..(25): SEQ ID NO: 3714; WAN024DLR-5; Start 1111; Stop 1135
gacttcacttcagatcctgccattg

SEQ ID NO: 362029 - DNA, 25 bp, Artificial
  probe
  misc_feature (1)..(25): SEQ ID NO: 3714; WAN024DLR-5; Start 1482; Stop 1506
tatctttgaagacctagagccaaac

SEQ ID NO: 362030 - DNA, 25 bp, Artificial
  probe
  misc_feature (1)..(25): SEQ ID NO: 3714; WAN024DLR-5; Start 1478; Stop 1502
tcgatatctttgaagacctagagcc

SEQ ID NO: 362031 - DNA, 25 bp, Artificial
  probe
  misc_feature (1)..(25): SEQ ID NO: 3714; WAN024DLR-5; Start 1460; Stop 1484
ataaccacacagccaaagtcgatat

SEQ ID NO: 362032 - DNA, 25 bp, Artificial
  probe
  misc_feature (1)..(25): SEQ ID NO: 3714; WAN024DLR-5; Start 1481; Stop 1505
atatctttgaagacctagagccaaa

SEQ ID NO: 362033 - DNA, 25 bp, Artificial
  probe
  misc_feature (1)..(25): SEQ ID NO: 3714; WAN024DLR-5; Start 1477; Stop 1501
gtcgatatctttgaagacctagagc

SEQ ID NO: 362034 - DNA, 25 bp, Artificial
  probe
  misc_feature (1)..(25): SEQ ID NO: 3714; WAN024DLR-5; Start 1485; Stop 1509
ctttgaagacctagagccaaactac

SEQ ID NO: 362035 - DNA, 25 bp, Artificial
  probe
  misc_feature (1)..(25): SEQ ID NO: 3714; WAN024DLR-5; Start 1484; Stop 1508
tctttgaagacctagagccaaacta

SEQ ID NO: 362036 - DNA, 25 bp, Artificial
  probe
  misc_feature (1)..(25): SEQ ID NO: 3714; WAN024DLR-5; Start 1479; Stop 1503
cgatatctttgaagacctagagcca

SEQ ID NO: 362037 - DNA, 25 bp, Artificial
  probe
  misc_feature (1)..(25): SEQ ID NO: 3714; WAN024DLR-5; Start 1476; Stop 1500
agtcgatatctttgaagacctagag

SEQ ID NO: 362038 - DNA, 25 bp, Artificial
  probe
  misc_feature (1)..(25): SEQ ID NO: 3714; WAN024DLR-5; Start 1486; Stop 1510
tttgaagacctagagccaaactact

SEQ ID NO: 362039 - DNA, 25 bp, Artificial
  probe
  misc_feature (1)..(25): SEQ ID NO: 3714; WAN024DLR-5; Start 1110; Stop 1134
tgacttcacttcagatcctgccatt

SEQ ID NO: 362040 - DNA, 25 bp, Artificial
  probe
  misc_feature (1)..(25): SEQ ID NO: 3714; WAN024DLR-5; Start 1475; Stop 1499
aagtcgatatctttgaagacctaga

SEQ ID NO: 362041 - DNA, 25 bp, Artificial
  probe
  misc_feature (1)..(25): SEQ ID NO: 3714; WAN024DLR-5; Start 1483; Stop 1507
atctttgaagacctagagccaaact

SEQ ID NO: 362042 - DNA, 25 bp, Artificial
  probe
  misc_feature (1)..(25): SEQ ID NO: 3714; WAN024DLR-5; Start 1461; Stop 1485
taaccacacagccaaagtcgatatc

SEQ ID NO: 362043 - DNA, 25 bp, Artificial
  probe
  misc_feature (1)..(25): SEQ ID NO: 3714; WAN024DLR-5; Start 777; Stop 801
caaagtagttggaactgtcgctctc

SEQ ID NO: 362044 - DNA, 25 bp, Artificial
  probe
  misc_feature (1)..(25): SEQ ID NO: 3714; WAN024DLR-5; Start 1102; Stop 1126
catgtgcgtgacttcacttcagatc

SEQ ID NO: 362045 - DNA, 25 bp, Artificial
  probe
  misc_feature (1)..(25): SEQ ID NO: 3715; WAN024DLS-5; Start 638; Stop 662
gcctgaaagatgagacatacagcta

SEQ ID NO: 362046 - DNA, 25 bp, Artificial
  probe
  misc_feature (1)..(25): SEQ ID NO: 3715; WAN024DLS-5; Start 637; Stop 661
cgcctgaaagatgagacatacagct

SEQ ID NO: 362047 - DNA, 25 bp, Artificial
  probe
  misc_feature (1)..(25): SEQ ID NO: 3715; WAN024DLS-5; Start 614; Stop 638
aattcactaccaaaacaagctggcg

SEQ ID NO: 362048 - DNA, 25 bp, Artificial
  probe
  misc_feature (1)..(25): SEQ ID NO: 3716; WAN024ABQ; Start 23; Stop 47
ggctattgtgctatactagtaaggt

SEQ ID NO: 362049 - DNA, 25 bp, Artificial
  probe
  misc_feature (1)..(25): SEQ ID NO: 3716; WAN024ABQ; Start 22; Stop 46
aggctattgtgctatactagtaagg

SEQ ID NO: 362050 - DNA, 25 bp, Artificial
  probe
  misc_feature (1)..(25): SEQ ID NO: 3716; WAN024ABQ; Start 21; Stop 45
caggctattgtgctatactagtaag

SEQ ID NO: 362051 - DNA, 25 bp, Artificial
  probe
  misc_feature (1)..(25): SEQ ID NO: 3716; WAN024ABQ; Start 2; Stop 26
ctttaagtatagcataaagcaggct

SEQ ID NO: 362052 - DNA, 25 bp, Artificial
  probe
  misc_feature (1)..(25): SEQ ID NO: 3716; WAN024ABQ; Start 24; Stop 48
gctattgtgctatactagtaaggtt

SEQ ID NO: 362053 - DNA, 25 bp, Artificial
  probe
  misc_feature (1)..(25): SEQ ID NO: 3716; WAN024ABQ; Start 27; Stop 51
attgtgctatactagtaaggttgaa

SEQ ID NO: 362054 - DNA, 25 bp, Artificial
  probe
  misc_feature (1)..(25): SEQ ID NO: 3716; WAN024ABQ; Start 20; Stop 44
gcaggctattgtgctatactagtaa

SEQ ID NO: 362055 - DNA, 25 bp, Artificial
  probe
  misc_feature (1)..(25): SEQ ID NO: 3716; WAN024ABQ; Start 3; Stop 27
tttaagtatagcataaagcaggcta

SEQ ID NO: 362056 - DNA, 25 bp, Artificial
  probe
  misc_feature (1)..(25): SEQ ID NO: 3716; WAN024ABQ; Start 26; Stop 50
tattgtgctatactagtaaggttga

SEQ ID NO: 362057 - DNA, 25 bp, Artificial
  probe
  misc_feature (1)..(25): SEQ ID NO: 3716; WAN024ABQ; Start 25; Stop 49
ctattgtgctatactagtaaggttg

SEQ ID NO: 362058 - DNA, 25 bp, Artificial
  probe
  misc_feature (1)..(25): SEQ ID NO: 3717; WAN024A32; Start 48; Stop 72
agaattgtcaaaacaatccgtctag

SEQ ID NO: 362059 - DNA, 25 bp, Artificial
  probe
  misc_feature (1)..(25): SEQ ID NO: 3717; WAN024A32; Start 46; Stop 70
ttagaattgtcaaaacaatccgtct

SEQ ID NO: 362060 - DNA, 25 bp, Artificial
  probe
  misc_feature (1)..(25): SEQ ID NO: 3717; WAN024A32; Start 47; Stop 71
tagaattgtcaaaacaatccgtcta

SEQ ID NO: 362061 - DNA, 25 bp, Artificial
  probe
  misc_feature (1)..(25): SEQ ID NO: 3717; WAN024A32; Start 117; Stop 141
gtcaaacttttatattgcaaatagg

SEQ ID NO: 362062 - DNA, 25 bp, Artificial
  probe
  misc_feature (1)..(25): SEQ ID NO: 3717; WAN024A32; Start 118; Stop 142
tcaaacttttatattgcaaatagga

SEQ ID NO: 362063 - DNA, 25 bp, Artificial
  probe
  misc_feature (1)..(25): SEQ ID NO: 3717; WAN024A32; Start 119; Stop 143
caaacttttatattgcaaataggag

SEQ ID NO: 362064 - DNA, 25 bp, Artificial
  probe
  misc_feature (1)..(25): SEQ ID NO: 3717; WAN024A32; Start 122; Stop 146
acttttatattgcaaataggagaaa

SEQ ID NO: 362065 - DNA, 25 bp, Artificial
  probe
  misc_feature (1)..(25): SEQ ID NO: 3717; WAN024A32; Start 121; Stop 145
aacttttatattgcaaataggagaa

SEQ ID NO: 362066 - DNA, 25 bp, Artificial
  probe
  misc_feature (1)..(25): SEQ ID NO: 3717; WAN024A32; Start 120; Stop 144
aaacttttatattgcaaataggaga

SEQ ID NO: 362067 - DNA, 25 bp, Artificial
  probe
  misc_feature (1)..(25): SEQ ID NO: 3717; WAN024A32; Start 113; Stop 137
aaatgtcaaacttttatattgcaaa

SEQ ID NO: 362068 - DNA, 25 bp, Artificial
  probe
  misc_feature (1)..(25): SEQ ID NO: 3717; WAN024A32; Start 112; Stop 136
aaaatgtcaaacttttatattgcaa

SEQ ID NO: 362069 - DNA, 25 bp, Artificial
  probe
  misc_feature (1)..(25): SEQ ID NO: 3718; WAN0249EK; Start 55; Stop 79
aaatgtttagaaagaaggtactcat

SEQ ID NO: 362070 - DNA, 25 bp, Artificial
  probe
  misc_feature (1)..(25): SEQ ID NO: 3718; WAN0249EK; Start 54; Stop 78
aaaatgtttagaaagaaggtactca

SEQ ID NO: 362071 - DNA, 25 bp, Artificial
  probe
  misc_feature (1)..(25): SEQ ID NO: 3719; WAN0249N7; Start 26; Stop 50
gggtgaattgaaaactagaacaaga

SEQ ID NO: 362072 - DNA, 25 bp, Artificial
  probe
  misc_feature (1)..(25): SEQ ID NO: 3719; WAN0249N7; Start 25; Stop 49
agggtgaattgaaaactagaacaag

SEQ ID NO: 362073 - DNA, 25 bp, Artificial
  probe
  misc_feature (1)..(25): SEQ ID NO: 3719; WAN0249N7; Start 27; Stop 51
ggtgaattgaaaactagaacaagac

SEQ ID NO: 362074 - DNA, 25 bp, Artificial
  probe
  misc_feature (1)..(25): SEQ ID NO: 3719; WAN0249N7; Start 23; Stop 47
atagggtgaattgaaaactagaaca

SEQ ID NO: 362075 - DNA, 25 bp, Artificial
  probe
  misc_feature (1)..(25): SEQ ID NO: 3719; WAN0249N7; Start 24; Stop 48
tagggtgaattgaaaactagaacaa

SEQ ID NO: 362076 - DNA, 25 bp, Artificial
  probe
  misc_feature (1)..(25): SEQ ID NO: 3719; WAN0249N7; Start 29; Stop 53
tgaattgaaaactagaacaagacac

SEQ ID NO: 362077 - DNA, 25 bp, Artificial
  probe
  misc_feature (1)..(25): SEQ ID NO: 3719; WAN0249N7; Start 28; Stop 52
gtgaattgaaaactagaacaagaca

SEQ ID NO: 362078 - DNA, 25 bp, Artificial
  probe
  misc_feature (1)..(25): SEQ ID NO: 3719; WAN0249N7; Start 30; Stop 54
gaattgaaaactagaacaagacact

SEQ ID NO: 362079 - DNA, 25 bp, Artificial
  probe
  misc_feature (1)..(25): SEQ ID NO: 3719; WAN0249N7; Start 22; Stop 46
aatagggtgaattgaaaactagaac

SEQ ID NO: 362080 - DNA, 25 bp, Artificial
  probe
  misc_feature (1)..(25): SEQ ID NO: 3719; WAN0249N7; Start 33; Stop 57
ttgaaaactagaacaagacactaga

SEQ ID NO: 362081 - DNA, 25 bp, Artificial
  probe
  misc_feature (1)..(25): SEQ ID NO: 3719; WAN0249N7; Start 21; Stop 45
aaatagggtgaattgaaaactagaa

SEQ ID NO: 362082 - DNA, 25 bp, Artificial
  probe
  misc_feature (1)..(25): SEQ ID NO: 3719; WAN0249N7; Start 20; Stop 44
aaaatagggtgaattgaaaactaga

SEQ ID NO: 362083 - DNA, 25 bp, Artificial
  probe
  misc_feature (1)..(25): SEQ ID NO: 3719; WAN0249N7; Start 34; Stop 58
tgaaaactagaacaagacactagat

SEQ ID NO: 362084 - DNA, 25 bp, Artificial
  probe
  misc_feature (1)..(25): SEQ ID NO: 3719; WAN0249N7; Start 31; Stop 55
aattgaaaactagaacaagacacta

SEQ ID NO: 362085 - DNA, 25 bp, Artificial
  probe
  misc_feature (1)..(25): SEQ ID NO: 3719; WAN0249N7; Start 39; Stop 63
actagaacaagacactagattttct

SEQ ID NO: 362086 - DNA, 25 bp, Artificial
  probe
  misc_feature (1)..(25): SEQ ID NO: 3719; WAN0249N7; Start 32; Stop 56
attgaaaactagaacaagacactag

SEQ ID NO: 362087 - DNA, 25 bp, Artificial
  probe
  misc_feature (1)..(25): SEQ ID NO: 3719; WAN0249N7; Start 38; Stop 62
aactagaacaagacactagattttc

SEQ ID NO: 362088 - DNA, 25 bp, Artificial
  probe
  misc_feature (1)..(25): SEQ ID NO: 3719; WAN0249N7; Start 35; Stop 59
gaaaactagaacaagacactagatt

SEQ ID NO: 362089 - DNA, 25 bp, Artificial
  probe
  misc_feature (1)..(25): SEQ ID NO: 3719; WAN0249N7; Start 37; Stop 61
aaactagaacaagacactagatttt

SEQ ID NO: 362090 - DNA, 25 bp, Artificial
  probe
  misc_feature (1)..(25): SEQ ID NO: 3719; WAN0249N7; Start 36; Stop 60
aaaactagaacaagacactagattt

SEQ ID NO: 362091 - DNA, 25 bp, Artificial
  probe
  misc_feature (1)..(25): SEQ ID NO: 3719; WAN0249N7; Start 40; Stop 64
ctagaacaagacactagattttcta

SEQ ID NO: 362092 - DNA, 25 bp, Artificial
  probe
  misc_feature (1)..(25): SEQ ID NO: 3719; WAN0249N7; Start 41; Stop 65
tagaacaagacactagattttctaa

SEQ ID NO: 362093 - DNA, 25 bp, Artificial
  probe
  misc_feature (1)..(25): SEQ ID NO: 3720; WAN024ASN; Start 26; Stop 50
actaagttcataagttaagaagacc

SEQ ID NO: 362094 - DNA, 25 bp, Artificial
  probe
  misc_feature (1)..(25): SEQ ID NO: 3720; WAN024ASN; Start 1; Stop 25
ggaaactttaagctagggagtgtac

SEQ ID NO: 362095 - DNA, 25 bp, Artificial
  probe
  misc_feature (1)..(25): SEQ ID NO: 3720; WAN024ASN; Start 27; Stop 51
ctaagttcataagttaagaagacct

SEQ ID NO: 362096 - DNA, 25 bp, Artificial
  probe
  misc_feature (1)..(25): SEQ ID NO: 3720; WAN024ASN; Start 43; Stop 67
agaagaccttaacttaaactcctaa

SEQ ID NO: 362097 - DNA, 25 bp, Artificial
  probe
  misc_feature (1)..(25): SEQ ID NO: 3720; WAN024ASN; Start 42; Stop 66
aagaagaccttaacttaaactccta

SEQ ID NO: 362098 - DNA, 25 bp, Artificial
  probe
  misc_feature (1)..(25): SEQ ID NO: 3720; WAN024ASN; Start 28; Stop 52
taagttcataagttaagaagacctt

SEQ ID NO: 362099 - DNA, 25 bp, Artificial
  probe
  misc_feature (1)..(25): SEQ ID NO: 3720; WAN024ASN; Start 41; Stop 65
taagaagaccttaacttaaactcct

SEQ ID NO: 362100 - DNA, 25 bp, Artificial
  probe
  misc_feature (1)..(25): SEQ ID NO: 3720; WAN024ASN; Start 24; Stop 48
acactaagttcataagttaagaaga

SEQ ID NO: 362101 - DNA, 25 bp, Artificial
  probe
  misc_feature (1)..(25): SEQ ID NO: 3720; WAN024ASN; Start 44; Stop 68
gaagaccttaacttaaactcctaaa

SEQ ID NO: 362102 - DNA, 25 bp, Artificial
  probe
  misc_feature (1)..(25): SEQ ID NO: 3720; WAN024ASN; Start 25; Stop 49
cactaagttcataagttaagaagac

SEQ ID NO: 362103 - DNA, 25 bp, Artificial
  probe
  misc_feature (1)..(25): SEQ ID NO: 3720; WAN024ASN; Start 29; Stop 53
aagttcataagttaagaagacctta

SEQ ID NO: 362104 - DNA, 25 bp, Artificial
  probe
  misc_feature (1)..(25): SEQ ID NO: 3720; WAN024ASN; Start 2; Stop 26
gaaactttaagctagggagtgtaca

SEQ ID NO: 362105 - DNA, 25 bp, Artificial
  probe
  misc_feature (1)..(25): SEQ ID NO: 3720; WAN024ASN; Start 47; Stop 71
gaccttaacttaaactcctaaaact

SEQ ID NO: 362106 - DNA, 25 bp, Artificial
  probe
  misc_feature (1)..(25): SEQ ID NO: 3720; WAN024ASN; Start 46; Stop 70
agaccttaacttaaactcctaaaac

SEQ ID NO: 362107 - DNA, 25 bp, Artificial
  probe
  misc_feature (1)..(25): SEQ ID NO: 3720; WAN024ASN; Start 48; Stop 72
accttaacttaaactcctaaaactt

SEQ ID NO: 362108 - DNA, 25 bp, Artificial
  probe
  misc_feature (1)..(25): SEQ ID NO: 3720; WAN024ASN; Start 45; Stop 69
aagaccttaacttaaactcctaaaa

SEQ ID NO: 362109 - DNA, 25 bp, Artificial
  probe
  misc_feature (1)..(25): SEQ ID NO: 3720; WAN024ASN; Start 30; Stop 54
agttcataagttaagaagaccttaa

SEQ ID NO: 362110 - DNA, 25 bp, Artificial
  probe
  misc_feature (1)..(25): SEQ ID NO: 3720; WAN024ASN; Start 40; Stop 64
ttaagaagaccttaacttaaactcc

SEQ ID NO: 362111 - DNA, 25 bp, Artificial
  probe
  misc_feature (1)..(25): SEQ ID NO: 3720; WAN024ASN; Start 21; Stop 45
tgtacactaagttcataagttaaga

SEQ ID NO: 362112 - DNA, 25 bp, Artificial
  probe
  misc_feature (1)..(25): SEQ ID NO: 3720; WAN024ASN; Start 49; Stop 73
ccttaacttaaactcctaaaacttt

SEQ ID NO: 362113 - DNA, 25 bp, Artificial
  probe
  misc_feature (1)..(25): SEQ ID NO: 3721; WAN024GAJ; Start 1; Stop 25
ggaagattactcaagaggcttaaga

SEQ ID NO: 362114 - DNA, 25 bp, Artificial
  probe
  misc_feature (1)..(25): SEQ ID NO: 3721; WAN024GAJ; Start 3; Stop 27
aagattactcaagaggcttaagagg

SEQ ID NO: 362115 - DNA, 25 bp, Artificial
  probe
  misc_feature (1)..(25): SEQ ID NO: 3721; WAN024GAJ; Start 2; Stop 26
gaagattactcaagaggcttaagag

SEQ ID NO: 362116 - DNA, 25 bp, Artificial
  probe
  misc_feature (1)..(25): SEQ ID NO: 3721; WAN024GAJ; Start 4; Stop 28
agattactcaagaggcttaagaggc

SEQ ID NO: 362117 - DNA, 25 bp, Artificial
  probe
  misc_feature (1)..(25): SEQ ID NO: 3721; WAN024GAJ; Start 5; Stop 29
gattactcaagaggcttaagaggcc

SEQ ID NO: 362118 - DNA, 25 bp, Artificial
  probe
  misc_feature (1)..(25): SEQ ID NO: 3721; WAN024GAJ; Start 6; Stop 30
attactcaagaggcttaagaggccg

SEQ ID NO: 362119 - DNA, 25 bp, Artificial
  probe
  misc_feature (1)..(25): SEQ ID NO: 3722; WAN024ABZ; Start 61; Stop 85
actctgactttgggagaatttcatt

SEQ ID NO: 362120 - DNA, 25 bp, Artificial
  probe
  misc_feature (1)..(25): SEQ ID NO: 3722; WAN024ABZ; Start 60; Stop 84
aactctgactttgggagaatttcat

SEQ ID NO: 362121 - DNA, 25 bp, Artificial
  probe
  misc_feature (1)..(25): SEQ ID NO: 3722; WAN024ABZ; Start 62; Stop 86
ctctgactttgggagaatttcattt

SEQ ID NO: 362122 - DNA, 25 bp, Artificial
  probe
  misc_feature (1)..(25): SEQ ID NO: 3722; WAN024ABZ; Start 59; Stop 83
aaactctgactttgggagaatttca

SEQ ID NO: 362123 - DNA, 25 bp, Artificial
  probe
  misc_feature (1)..(25): SEQ ID NO: 3722; WAN024ABZ; Start 58; Stop 82
aaaactctgactttgggagaatttc

SEQ ID NO: 362124 - DNA, 25 bp, Artificial
  probe
  misc_feature (1)..(25): SEQ ID NO: 3722; WAN024ABZ; Start 63; Stop 87
tctgactttgggagaatttcatttt

SEQ ID NO: 362125 - DNA, 25 bp, Artificial
  probe
  misc_feature (1)..(25): SEQ ID NO: 3722; WAN024ABZ; Start 53; Stop 77
gaaataaaactctgactttgggaga

SEQ ID NO: 362126 - DNA, 25 bp, Artificial
  probe
  misc_feature (1)..(25): SEQ ID NO: 3722; WAN024ABZ; Start 52; Stop 76
agaaataaaactctgactttgggag

SEQ ID NO: 362127 - DNA, 25 bp, Artificial
  probe
  misc_feature (1)..(25): SEQ ID NO: 3722; WAN024ABZ; Start 54; Stop 78
aaataaaactctgactttgggagaa

SEQ ID NO: 362128 - DNA, 25 bp, Artificial
  probe
  misc_feature (1)..(25): SEQ ID NO: 3722; WAN024ABZ; Start 57; Stop 81
taaaactctgactttgggagaattt

SEQ ID NO: 362129 - DNA, 25 bp, Artificial
  probe
  misc_feature (1)..(25): SEQ ID NO: 3722; WAN024ABZ; Start 55; Stop 79
aataaaactctgactttgggagaat

SEQ ID NO: 362130 - DNA, 25 bp, Artificial
  probe
  misc_feature (1)..(25): SEQ ID NO: 3722; WAN024ABZ; Start 56; Stop 80
ataaaactctgactttgggagaatt

SEQ ID NO: 362131 - DNA, 25 bp, Artificial
  probe
  misc_feature (1)..(25): SEQ ID NO: 3722; WAN024ABZ; Start 51; Stop 75
tagaaataaaactctgactttggga

SEQ ID NO: 362132 - DNA, 25 bp, Artificial
  probe
  misc_feature (1)..(25): SEQ ID NO: 3722; WAN024ABZ; Start 64; Stop 88
ctgactttgggagaatttcatttta

SEQ ID NO: 362133 - DNA, 25 bp, Artificial
  probe
  misc_feature (1)..(25): SEQ ID NO: 3722; WAN024ABZ; Start 50; Stop 74
ttagaaataaaactctgactttggg

SEQ ID NO: 362134 - DNA, 25 bp, Artificial
  probe
  misc_feature (1)..(25): SEQ ID NO: 3722; WAN024ABZ; Start 65; Stop 89
tgactttgggagaatttcattttat

SEQ ID NO: 362135 - DNA, 25 bp, Artificial
  probe
  misc_feature (1)..(25): SEQ ID NO: 3722; WAN024ABZ; Start 30; Stop 54
aaatgaagttctctcaaaagttaga

SEQ ID NO: 362136 - DNA, 25 bp, Artificial
  probe
  misc_feature (1)..(25): SEQ ID NO: 3722; WAN024ABZ; Start 49; Stop 73
gttagaaataaaactctgactttgg

SEQ ID NO: 362137 - DNA, 25 bp, Artificial
  probe
  misc_feature (1)..(25): SEQ ID NO: 3722; WAN024ABZ; Start 66; Stop 90
gactttgggagaatttcattttatt

SEQ ID NO: 362138 - DNA, 25 bp, Artificial
  probe
  misc_feature (1)..(25): SEQ ID NO: 3722; WAN024ABZ; Start 29; Stop 53
aaaatgaagttctctcaaaagttag

SEQ ID NO: 362139 - DNA, 25 bp, Artificial
  probe
  misc_feature (1)..(25): SEQ ID NO: 3722; WAN024ABZ; Start 33; Stop 57
tgaagttctctcaaaagttagaaat

SEQ ID NO: 362140 - DNA, 25 bp, Artificial
  probe
  misc_feature (1)..(25): SEQ ID NO: 3722; WAN024ABZ; Start 32; Stop 56
atgaagttctctcaaaagttagaaa

SEQ ID NO: 362141 - DNA, 25 bp, Artificial
  probe
  misc_feature (1)..(25): SEQ ID NO: 3722; WAN024ABZ; Start 31; Stop 55
aatgaagttctctcaaaagttagaa

SEQ ID NO: 362142 - DNA, 25 bp, Artificial
  probe
  misc_feature (1)..(25): SEQ ID NO: 3722; WAN024ABZ; Start 67; Stop 91
actttgggagaatttcattttatta

SEQ ID NO: 362143 - DNA, 25 bp, Artificial
  probe
  misc_feature (1)..(25): SEQ ID NO: 3722; WAN024ABZ; Start 48; Stop 72
agttagaaataaaactctgactttg

SEQ ID NO: 362144 - DNA, 25 bp, Artificial
  probe
  misc_feature (1)..(25): SEQ ID NO: 3722; WAN024ABZ; Start 34; Stop 58
gaagttctctcaaaagttagaaata

SEQ ID NO: 362145 - DNA, 25 bp, Artificial
  probe
  misc_feature (1)..(25): SEQ ID NO: 3722; WAN024ABZ; Start 44; Stop 68
caaaagttagaaataaaactctgac

SEQ ID NO: 362146 - DNA, 25 bp, Artificial
  probe
  misc_feature (1)..(25): SEQ ID NO: 3723; WAN024AAZ; Start 174; Stop 198
atcttgacggataggttattacgct

SEQ ID NO: 362147 - DNA, 25 bp, Artificial
  probe
  misc_feature (1)..(25): SEQ ID NO: 3723; WAN024AAZ; Start 175; Stop 199
tcttgacggataggttattacgctc

SEQ ID NO: 362148 - DNA, 25 bp, Artificial
  probe
  misc_feature (1)..(25): SEQ ID NO: 3723; WAN024AAZ; Start 173; Stop 197
gatcttgacggataggttattacgc

SEQ ID NO: 362149 - DNA, 25 bp, Artificial
  probe
  misc_feature (1)..(25): SEQ ID NO: 3723; WAN024AAZ; Start 209; Stop 233
ttaacgtcttgtcttggtctattca

SEQ ID NO: 362150 - DNA, 25 bp, Artificial
  probe
  misc_feature (1)..(25): SEQ ID NO: 3723; WAN024AAZ; Start 106; Stop 130
actcttacttatcgctcactttctt

SEQ ID NO: 362151 - DNA, 25 bp, Artificial
  probe
  misc_feature (1)..(25): SEQ ID NO: 3723; WAN024AAZ; Start 105; Stop 129
aactcttacttatcgctcactttct

SEQ ID NO: 362152 - DNA, 25 bp, Artificial
  probe
  misc_feature (1)..(25): SEQ ID NO: 3723; WAN024AAZ; Start 102; Stop 126
tcaaactcttacttatcgctcactt

SEQ ID NO: 362153 - DNA, 25 bp, Artificial
  probe
  misc_feature (1)..(25): SEQ ID NO: 3723; WAN024AAZ; Start 101; Stop 125
ttcaaactcttacttatcgctcact

SEQ ID NO: 362154 - DNA, 25 bp, Artificial
  probe
  misc_feature (1)..(25): SEQ ID NO: 3723; WAN024AAZ; Start 85; Stop 109
ggtatccctccctatattcaaactc

SEQ ID NO: 362155 - DNA, 25 bp, Artificial
  probe
  misc_feature (1)..(25): SEQ ID NO: 3723; WAN024AAZ; Start 528; Stop 552
atctctggcatactttgataccttt

SEQ ID NO: 362156 - DNA, 25 bp, Artificial
  probe
  misc_feature (1)..(25): SEQ ID NO: 3723; WAN024AAZ; Start 103; Stop 127
caaactcttacttatcgctcacttt

SEQ ID NO: 362157 - DNA, 25 bp, Artificial
  probe
  misc_feature (1)..(25): SEQ ID NO: 3723; WAN024AAZ; Start 100; Stop 124
attcaaactcttacttatcgctcac

SEQ ID NO: 362158 - DNA, 25 bp, Artificial
  probe
  misc_feature (1)..(25): SEQ ID NO: 3723; WAN024AAZ; Start 104; Stop 128
aaactcttacttatcgctcactttc

SEQ ID NO: 362159 - DNA, 25 bp, Artificial
  probe
  misc_feature (1)..(25): SEQ ID NO: 3723; WAN024AAZ; Start 208; Stop 232
attaacgtcttgtcttggtctattc

SEQ ID NO: 362160 - DNA, 25 bp, Artificial
  probe
  misc_feature (1)..(25): SEQ ID NO: 3723; WAN024AAZ; Start 210; Stop 234
taacgtcttgtcttggtctattcaa

SEQ ID NO: 362161 - DNA, 25 bp, Artificial
  probe
  misc_feature (1)..(25): SEQ ID NO: 3723; WAN024AAZ; Start 90; Stop 114
ccctccctatattcaaactcttact

SEQ ID NO: 362162 - DNA, 25 bp, Artificial
  probe
  misc_feature (1)..(25): SEQ ID NO: 3723; WAN024AAZ; Start 89; Stop 113
tccctccctatattcaaactcttac

SEQ ID NO: 362163 - DNA, 25 bp, Artificial
  probe
  misc_feature (1)..(25): SEQ ID NO: 3723; WAN024AAZ; Start 107; Stop 131
ctcttacttatcgctcactttcttt

SEQ ID NO: 362164 - DNA, 25 bp, Artificial
  probe
  misc_feature (1)..(25): SEQ ID NO: 3723; WAN024AAZ; Start 212; Stop 236
acgtcttgtcttggtctattcaatt

SEQ ID NO: 362165 - DNA, 25 bp, Artificial
  probe
  misc_feature (1)..(25): SEQ ID NO: 3723; WAN024AAZ; Start 211; Stop 235
aacgtcttgtcttggtctattcaat

SEQ ID NO: 362166 - DNA, 25 bp, Artificial
  probe
  misc_feature (1)..(25): SEQ ID NO: 3723; WAN024AAZ; Start 86; Stop 110
gtatccctccctatattcaaactct

SEQ ID NO: 362167 - DNA, 25 bp, Artificial
  probe
  misc_feature (1)..(25): SEQ ID NO: 3723; WAN024AAZ; Start 207; Stop 231
aattaacgtcttgtcttggtctatt

SEQ ID NO: 362168 - DNA, 25 bp, Artificial
  probe
  misc_feature (1)..(25): SEQ ID NO: 3723; WAN024AAZ; Start 204; Stop 228
aataattaacgtcttgtcttggtct

SEQ ID NO: 362169 - DNA, 25 bp, Artificial
  probe
  misc_feature (1)..(25): SEQ ID NO: 3723; WAN024AAZ; Start 88; Stop 112
atccctccctatattcaaactctta

SEQ ID NO: 362170 - DNA, 25 bp, Artificial
  probe
  misc_feature (1)..(25): SEQ ID NO: 3723; WAN024AAZ; Start 87; Stop 111
tatccctccctatattcaaactctt

SEQ ID NO: 362171 - DNA, 25 bp, Artificial
  probe
  misc_feature (1)..(25): SEQ ID NO: 3723; WAN024AAZ; Start 99; Stop 123
tattcaaactcttacttatcgctca

SEQ ID NO: 362172 - DNA, 25 bp, Artificial
  probe
  misc_feature (1)..(25): SEQ ID NO: 3723; WAN024AAZ; Start 527; Stop 551
tatctctggcatactttgatacctt

SEQ ID NO: 362173 - DNA, 25 bp, Artificial
  probe
  misc_feature (1)..(25): SEQ ID NO: 3723; WAN024AAZ; Start 526; Stop 550
ttatctctggcatactttgatacct

SEQ ID NO: 362174 - DNA, 25 bp, Artificial
  probe
  misc_feature (1)..(25): SEQ ID NO: 3723; WAN024AAZ; Start 206; Stop 230
taattaacgtcttgtcttggtctat

SEQ ID NO: 362175 - DNA, 25 bp, Artificial
  probe
  misc_feature (1)..(25): SEQ ID NO: 3723; WAN024AAZ; Start 205; Stop 229
ataattaacgtcttgtcttggtcta

SEQ ID NO: 362176 - DNA, 25 bp, Artificial
  probe
  misc_feature (1)..(25): SEQ ID NO: 3723; WAN024AAZ; Start 567; Stop 591
tttaatagtgcctttccacctcttt

SEQ ID NO: 362177 - DNA, 25 bp, Artificial
  probe
  misc_feature (1)..(25): SEQ ID NO: 3723; WAN024AAZ; Start 172; Stop 196
agatcttgacggataggttattacg

SEQ ID NO: 362178 - DNA, 25 bp, Artificial
  probe
  misc_feature (1)..(25): SEQ ID NO: 3723; WAN024AAZ; Start 566; Stop 590
ctttaatagtgcctttccacctctt

SEQ ID NO: 362179 - DNA, 25 bp, Artificial
  probe
  misc_feature (1)..(25): SEQ ID NO: 3724; WAN024A7X; Start 65; Stop 89
aaatgatttcaaaatcagaaaggga

SEQ ID NO: 362180 - DNA, 25 bp, Artificial
  probe
  misc_feature (1)..(25): SEQ ID NO: 3724; WAN024A7X; Start 64; Stop 88
taaatgatttcaaaatcagaaaggg

SEQ ID NO: 362181 - DNA, 25 bp, Artificial
  probe
  misc_feature (1)..(25): SEQ ID NO: 3724; WAN024A7X; Start 63; Stop 87
gtaaatgatttcaaaatcagaaagg

SEQ ID NO: 362182 - DNA, 25 bp, Artificial
  probe
  misc_feature (1)..(25): SEQ ID NO: 3725; WAN024AQS; Start 1; Stop 25
ggacaaggagactactatttcttca

SEQ ID NO: 362183 - DNA, 25 bp, Artificial
  probe
  misc_feature (1)..(25): SEQ ID NO: 3725; WAN024AQS; Start 2; Stop 26
gacaaggagactactatttcttcaa

SEQ ID NO: 362184 - DNA, 25 bp, Artificial
  probe
  misc_feature (1)..(25): SEQ ID NO: 3725; WAN024AQS; Start 3; Stop 27
acaaggagactactatttcttcaaa

SEQ ID NO: 362185 - DNA, 25 bp, Artificial
  probe
  misc_feature (1)..(25): SEQ ID NO: 3725; WAN024AQS; Start 4; Stop 28
caaggagactactatttcttcaaaa

SEQ ID NO: 362186 - DNA, 25 bp, Artificial
  probe
  misc_feature (1)..(25): SEQ ID NO: 3725; WAN024AQS; Start 43; Stop 67
acttgacactttatgtttaaaagac

SEQ ID NO: 362187 - DNA, 25 bp, Artificial
  probe
  misc_feature (1)..(25): SEQ ID NO: 3725; WAN024AQS; Start 44; Stop 68
cttgacactttatgtttaaaagact

SEQ ID NO: 362188 - DNA, 25 bp, Artificial
  probe
  misc_feature (1)..(25): SEQ ID NO: 3726; WAN024F9Q; Start 36; Stop 60
ataaccgagtggtcgtaggttcaag

SEQ ID NO: 362189 - DNA, 25 bp, Artificial
  probe
  misc_feature (1)..(25): SEQ ID NO: 3726; WAN024F9Q; Start 35; Stop 59
cataaccgagtggtcgtaggttcaa

SEQ ID NO: 362190 - DNA, 25 bp, Artificial
  probe
  misc_feature (1)..(25): SEQ ID NO: 3726; WAN024F9Q; Start 33; Stop 57
ctcataaccgagtggtcgtaggttc

SEQ ID NO: 362191 - DNA, 25 bp, Artificial
  probe
  misc_feature (1)..(25): SEQ ID NO: 3726; WAN024F9Q; Start 34; Stop 58
tcataaccgagtggtcgtaggttca

SEQ ID NO: 362192 - DNA, 25 bp, Artificial
  probe
  misc_feature (1)..(25): SEQ ID NO: 3727; WAN024APF; Start 85; Stop 109
gaggagtcttatagtaacgagtcaa

SEQ ID NO: 362193 - DNA, 25 bp, Artificial
  probe
  misc_feature (1)..(25): SEQ ID NO: 3727; WAN024APF; Start 84; Stop 108
agaggagtcttatagtaacgagtca

SEQ ID NO: 362194 - DNA, 25 bp, Artificial
  probe
  misc_feature (1)..(25): SEQ ID NO: 3727; WAN024APF; Start 140; Stop 164
acggtgttatctattctgactagga

SEQ ID NO: 362195 - DNA, 25 bp, Artificial
  probe
  misc_feature (1)..(25): SEQ ID NO: 3727; WAN024APF; Start 141; Stop 165
cggtgttatctattctgactaggaa

SEQ ID NO: 362196 - DNA, 25 bp, Artificial
  probe
  misc_feature (1)..(25): SEQ ID NO: 3727; WAN024APF; Start 139; Stop 163
aacggtgttatctattctgactagg

SEQ ID NO: 362197 - DNA, 25 bp, Artificial
  probe
  misc_feature (1)..(25): SEQ ID NO: 3727; WAN024APF; Start 157; Stop 181
gactaggaatagatcataccagagg

SEQ ID NO: 362198 - DNA, 25 bp, Artificial
  probe
  misc_feature (1)..(25): SEQ ID NO: 3727; WAN024APF; Start 138; Stop 162
gaacggtgttatctattctgactag

SEQ ID NO: 362199 - DNA, 25 bp, Artificial
  probe
  misc_feature (1)..(25): SEQ ID NO: 3727; WAN024APF; Start 225; Stop 249
aggatgtcgtaagtgttactatcaa

SEQ ID NO: 362200 - DNA, 25 bp, Artificial
  probe
  misc_feature (1)..(25): SEQ ID NO: 3727; WAN024APF; Start 156; Stop 180
tgactaggaatagatcataccagag

SEQ ID NO: 362201 - DNA, 25 bp, Artificial
  probe
  misc_feature (1)..(25): SEQ ID NO: 3727; WAN024APF; Start 224; Stop 248
taggatgtcgtaagtgttactatca

SEQ ID NO: 362202 - DNA, 25 bp, Artificial
  probe
  misc_feature (1)..(25): SEQ ID NO: 3727; WAN024APF; Start 226; Stop 250
ggatgtcgtaagtgttactatcaat

SEQ ID NO: 362203 - DNA, 25 bp, Artificial
  probe
  misc_feature (1)..(25): SEQ ID NO: 3727; WAN024APF; Start 158; Stop 182
actaggaatagatcataccagaggt

SEQ ID NO: 362204 - DNA, 25 bp, Artificial
  probe
  misc_feature (1)..(25): SEQ ID NO: 3727; WAN024APF; Start 153; Stop 177
ttctgactaggaatagatcatacca

SEQ ID NO: 362205 - DNA, 25 bp, Artificial
  probe
  misc_feature (1)..(25): SEQ ID NO: 3727; WAN024APF; Start 155; Stop 179
ctgactaggaatagatcataccaga

SEQ ID NO: 362206 - DNA, 25 bp, Artificial
  probe
  misc_feature (1)..(25): SEQ ID NO: 3727; WAN024APF; Start 154; Stop 178
tctgactaggaatagatcataccag

SEQ ID NO: 362207 - DNA, 25 bp, Artificial
  probe
  misc_feature (1)..(25): SEQ ID NO: 3727; WAN024APF; Start 86; Stop 110
aggagtcttatagtaacgagtcaaa

SEQ ID NO: 362208 - DNA, 25 bp, Artificial
  probe
  misc_feature (1)..(25): SEQ ID NO: 3727; WAN024APF; Start 228; Stop 252
atgtcgtaagtgttactatcaatga

SEQ ID NO: 362209 - DNA, 25 bp, Artificial
  probe
  misc_feature (1)..(25): SEQ ID NO: 3727; WAN024APF; Start 227; Stop 251
gatgtcgtaagtgttactatcaatg

SEQ ID NO: 362210 - DNA, 25 bp, Artificial
  probe
  misc_feature (1)..(25): SEQ ID NO: 3727; WAN024APF; Start 83; Stop 107
aagaggagtcttatagtaacgagtc

SEQ ID NO: 362211 - DNA, 25 bp, Artificial
  probe
  misc_feature (1)..(25): SEQ ID NO: 3727; WAN024APF; Start 229; Stop 253
tgtcgtaagtgttactatcaatgat

SEQ ID NO: 362212 - DNA, 25 bp, Artificial
  probe
  misc_feature (1)..(25): SEQ ID NO: 3727; WAN024APF; Start 137; Stop 161
agaacggtgttatctattctgacta

SEQ ID NO: 362213 - DNA, 25 bp, Artificial
  probe
  misc_feature (1)..(25): SEQ ID NO: 3727; WAN024APF; Start 136; Stop 160
tagaacggtgttatctattctgact

SEQ ID NO: 362214 - DNA, 25 bp, Artificial
  probe
  misc_feature (1)..(25): SEQ ID NO: 3727; WAN024APF; Start 223; Stop 247
ataggatgtcgtaagtgttactatc

SEQ ID NO: 362215 - DNA, 25 bp, Artificial
  probe
  misc_feature (1)..(25): SEQ ID NO: 3727; WAN024APF; Start 194; Stop 218
agcagagacattagaaattgaagta

SEQ ID NO: 362216 - DNA, 25 bp, Artificial
  probe
  misc_feature (1)..(25): SEQ ID NO: 3727; WAN024APF; Start 193; Stop 217
tagcagagacattagaaattgaagt

SEQ ID NO: 362217 - DNA, 25 bp, Artificial
  probe
  misc_feature (1)..(25): SEQ ID NO: 3727; WAN024APF; Start 135; Stop 159
ttagaacggtgttatctattctgac

SEQ ID NO: 362218 - DNA, 25 bp, Artificial
  probe
  misc_feature (1)..(25): SEQ ID NO: 3727; WAN024APF; Start 142; Stop 166
ggtgttatctattctgactaggaat

SEQ ID NO: 362219 - DNA, 25 bp, Artificial
  probe
  misc_feature (1)..(25): SEQ ID NO: 3727; WAN024APF; Start 222; Stop 246
aataggatgtcgtaagtgttactat

SEQ ID NO: 362220 - DNA, 25 bp, Artificial
  probe
  misc_feature (1)..(25): SEQ ID NO: 3727; WAN024APF; Start 195; Stop 219
gcagagacattagaaattgaagtaa

SEQ ID NO: 362221 - DNA, 25 bp, Artificial
  probe
  misc_feature (1)..(25): SEQ ID NO: 3727; WAN024APF; Start 161; Stop 185
aggaatagatcataccagaggtagc

SEQ ID NO: 362222 - DNA, 25 bp, Artificial
  probe
  misc_feature (1)..(25): SEQ ID NO: 3727; WAN024APF; Start 230; Stop 254
gtcgtaagtgttactatcaatgatt

SEQ ID NO: 362223 - DNA, 25 bp, Artificial
  probe
  misc_feature (1)..(25): SEQ ID NO: 3727; WAN024APF; Start 377; Stop 401
gataggctcatttgggaaggaagtc

SEQ ID NO: 362224 - DNA, 25 bp, Artificial
  probe
  misc_feature (1)..(25): SEQ ID NO: 3727; WAN024APF; Start 375; Stop 399
gagataggctcatttgggaaggaag

SEQ ID NO: 362225 - DNA, 25 bp, Artificial
  probe
  misc_feature (1)..(25): SEQ ID NO: 3728; WAN024FA2; Start 2; Stop 26
gagaattactcaagaggctgaagag

SEQ ID NO: 362226 - DNA, 25 bp, Artificial
  probe
  misc_feature (1)..(25): SEQ ID NO: 3728; WAN024FA2; Start 4; Stop 28
gaattactcaagaggctgaagagga

SEQ ID NO: 362227 - DNA, 25 bp, Artificial
  probe
  misc_feature (1)..(25): SEQ ID NO: 3728; WAN024FA2; Start 3; Stop 27
agaattactcaagaggctgaagagg

SEQ ID NO: 362228 - DNA, 25 bp, Artificial
  probe
  misc_feature (1)..(25): SEQ ID NO: 3728; WAN024FA2; Start 1; Stop 25
ggagaattactcaagaggctgaaga

SEQ ID NO: 362229 - DNA, 25 bp, Artificial
  probe
  misc_feature (1)..(25): SEQ ID NO: 3728; WAN024FA2; Start 5; Stop 29
aattactcaagaggctgaagaggac

SEQ ID NO: 362230 - DNA, 25 bp, Artificial
  probe
  misc_feature (1)..(25): SEQ ID NO: 3728; WAN024FA2; Start 32; Stop 56
tttgctaaatcgttaggtcgggtaa

SEQ ID NO: 362231 - DNA, 25 bp, Artificial
  probe
  misc_feature (1)..(25): SEQ ID NO: 3728; WAN024FA2; Start 6; Stop 30
attactcaagaggctgaagaggacg

SEQ ID NO: 362232 - DNA, 25 bp, Artificial
  probe
  misc_feature (1)..(25): SEQ ID NO: 3728; WAN024FA2; Start 31; Stop 55
gtttgctaaatcgttaggtcgggta

SEQ ID NO: 362233 - DNA, 25 bp, Artificial
  probe
  misc_feature (1)..(25): SEQ ID NO: 3728; WAN024FA2; Start 36; Stop 60
ctaaatcgttaggtcgggtaactgg

SEQ ID NO: 362234 - DNA, 25 bp, Artificial
  probe
  misc_feature (1)..(25): SEQ ID NO: 3728; WAN024FA2; Start 33; Stop 57
ttgctaaatcgttaggtcgggtaac

SEQ ID NO: 362235 - DNA, 25 bp, Artificial
  probe
  misc_feature (1)..(25): SEQ ID NO: 3728; WAN024FA2; Start 19; Stop 43
ctgaagaggacggtttgctaaatcg

SEQ ID NO: 362236 - DNA, 25 bp, Artificial
  probe
  misc_feature (1)..(25): SEQ ID NO: 3728; WAN024FA2; Start 35; Stop 59
gctaaatcgttaggtcgggtaactg

SEQ ID NO: 362237 - DNA, 25 bp, Artificial
  probe
  misc_feature (1)..(25): SEQ ID NO: 3728; WAN024FA2; Start 18; Stop 42
gctgaagaggacggtttgctaaatc

SEQ ID NO: 362238 - DNA, 25 bp, Artificial
  probe
  misc_feature (1)..(25): SEQ ID NO: 3728; WAN024FA2; Start 34; Stop 58
tgctaaatcgttaggtcgggtaact

SEQ ID NO: 362239 - DNA, 25 bp, Artificial
  probe
  misc_feature (1)..(25): SEQ ID NO: 3728; WAN024FA2; Start 22; Stop 46
aagaggacggtttgctaaatcgtta

SEQ ID NO: 362240 - DNA, 25 bp, Artificial
  probe
  misc_feature (1)..(25): SEQ ID NO: 3728; WAN024FA2; Start 23; Stop 47
agaggacggtttgctaaatcgttag

SEQ ID NO: 362241 - DNA, 25 bp, Artificial
  probe
  misc_feature (1)..(25): SEQ ID NO: 3728; WAN024FA2; Start 37; Stop 61
taaatcgttaggtcgggtaactggc

SEQ ID NO: 362242 - DNA, 25 bp, Artificial
  probe
  misc_feature (1)..(25): SEQ ID NO: 3728; WAN024FA2; Start 21; Stop 45
gaagaggacggtttgctaaatcgtt

SEQ ID NO: 362243 - DNA, 25 bp, Artificial
  probe
  misc_feature (1)..(25): SEQ ID NO: 3728; WAN024FA2; Start 24; Stop 48
gaggacggtttgctaaatcgttagg

SEQ ID NO: 362244 - DNA, 25 bp, Artificial
  probe
  misc_feature (1)..(25): SEQ ID NO: 3728; WAN024FA2; Start 26; Stop 50
ggacggtttgctaaatcgttaggtc

SEQ ID NO: 362245 - DNA, 25 bp, Artificial
  probe
  misc_feature (1)..(25): SEQ ID NO: 3728; WAN024FA2; Start 30; Stop 54
ggtttgctaaatcgttaggtcgggt

SEQ ID NO: 362246 - DNA, 25 bp, Artificial
  probe
  misc_feature (1)..(25): SEQ ID NO: 3728; WAN024FA2; Start 27; Stop 51
gacggtttgctaaatcgttaggtcg

SEQ ID NO: 362247 - DNA, 25 bp, Artificial
  probe
  misc_feature (1)..(25): SEQ ID NO: 3728; WAN024FA2; Start 25; Stop 49
aggacggtttgctaaatcgttaggt

SEQ ID NO: 362248 - DNA, 25 bp, Artificial
  probe
  misc_feature (1)..(25): SEQ ID NO: 3728; WAN024FA2; Start 20; Stop 44
tgaagaggacggtttgctaaatcgt

SEQ ID NO: 362249 - DNA, 25 bp, Artificial
  probe
  misc_feature (1)..(25): SEQ ID NO: 3729; WAN024AKV; Start 4; Stop 28
gagaaagggtttacatagatggagt

SEQ ID NO: 362250 - DNA, 25 bp, Artificial
  probe
  misc_feature (1)..(25): SEQ ID NO: 3729; WAN024AKV; Start 1; Stop 25
ggagagaaagggtttacatagatgg

SEQ ID NO: 362251 - DNA, 25 bp, Artificial
  probe
  misc_feature (1)..(25): SEQ ID NO: 3729; WAN024AKV; Start 3; Stop 27
agagaaagggtttacatagatggag

SEQ ID NO: 362252 - DNA, 25 bp, Artificial
  probe
  misc_feature (1)..(25): SEQ ID NO: 3729; WAN024AKV; Start 2; Stop 26
gagagaaagggtttacatagatgga

SEQ ID NO: 362253 - DNA, 25 bp, Artificial
  probe
  misc_feature (1)..(25): SEQ ID NO: 3729; WAN024AKV; Start 88; Stop 112
aatgaacaatgtaaatgggatgacc

SEQ ID NO: 362254 - DNA, 25 bp, Artificial
  probe
  misc_feature (1)..(25): SEQ ID NO: 3729; WAN024AKV; Start 5; Stop 29
agaaagggtttacatagatggagtt

SEQ ID NO: 362255 - DNA, 25 bp, Artificial
  probe
  misc_feature (1)..(25): SEQ ID NO: 3729; WAN024AKV; Start 9; Stop 33
agggtttacatagatggagttagaa

SEQ ID NO: 362256 - DNA, 25 bp, Artificial
  probe
  misc_feature (1)..(25): SEQ ID NO: 3729; WAN024AKV; Start 8; Stop 32
aagggtttacatagatggagttaga

SEQ ID NO: 362257 - DNA, 25 bp, Artificial
  probe
  misc_feature (1)..(25): SEQ ID NO: 3729; WAN024AKV; Start 10; Stop 34
gggtttacatagatggagttagaag

SEQ ID NO: 362258 - DNA, 25 bp, Artificial
  probe
  misc_feature (1)..(25): SEQ ID NO: 3729; WAN024AKV; Start 87; Stop 111
aaatgaacaatgtaaatgggatgac

SEQ ID NO: 362259 - DNA, 25 bp, Artificial
  probe
  misc_feature (1)..(25): SEQ ID NO: 3729; WAN024AKV; Start 7; Stop 31
aaagggtttacatagatggagttag

SEQ ID NO: 362260 - DNA, 25 bp, Artificial
  probe
  misc_feature (1)..(25): SEQ ID NO: 3729; WAN024AKV; Start 6; Stop 30
gaaagggtttacatagatggagtta

SEQ ID NO: 362261 - DNA, 25 bp, Artificial
  probe
  misc_feature (1)..(25): SEQ ID NO: 3729; WAN024AKV; Start 11; Stop 35
ggtttacatagatggagttagaaga

SEQ ID NO: 362262 - DNA, 25 bp, Artificial
  probe
  misc_feature (1)..(25): SEQ ID NO: 3729; WAN024AKV; Start 89; Stop 113
atgaacaatgtaaatgggatgaccc

SEQ ID NO: 362263 - DNA, 25 bp, Artificial
  probe
  misc_feature (1)..(25): SEQ ID NO: 3729; WAN024AKV; Start 21; Stop 45
gatggagttagaagaaaatcaatcg

SEQ ID NO: 362264 - DNA, 25 bp, Artificial
  probe
  misc_feature (1)..(25): SEQ ID NO: 3729; WAN024AKV; Start 12; Stop 36
gtttacatagatggagttagaagaa

SEQ ID NO: 362265 - DNA, 25 bp, Artificial
  probe
  misc_feature (1)..(25): SEQ ID NO: 3729; WAN024AKV; Start 86; Stop 110
aaaatgaacaatgtaaatgggatga

SEQ ID NO: 362266 - DNA, 25 bp, Artificial
  probe
  misc_feature (1)..(25): SEQ ID NO: 3729; WAN024AKV; Start 29; Stop 53
tagaagaaaatcaatcgaaactgcg

SEQ ID NO: 362267 - DNA, 25 bp, Artificial
  probe
  misc_feature (1)..(25): SEQ ID NO: 3729; WAN024AKV; Start 23; Stop 47
tggagttagaagaaaatcaatcgaa

SEQ ID NO: 362268 - DNA, 25 bp, Artificial
  probe
  misc_feature (1)..(25): SEQ ID NO: 3729; WAN024AKV; Start 28; Stop 52
ttagaagaaaatcaatcgaaactgc

SEQ ID NO: 362269 - DNA, 25 bp, Artificial
  probe
  misc_feature (1)..(25): SEQ ID NO: 3729; WAN024AKV; Start 22; Stop 46
atggagttagaagaaaatcaatcga

SEQ ID NO: 362270 - DNA, 25 bp, Artificial
  probe
  misc_feature (1)..(25): SEQ ID NO: 3729; WAN024AKV; Start 13; Stop 37
tttacatagatggagttagaagaaa

SEQ ID NO: 362271 - DNA, 25 bp, Artificial
  probe
  misc_feature (1)..(25): SEQ ID NO: 3729; WAN024AKV; Start 20; Stop 44
agatggagttagaagaaaatcaatc

SEQ ID NO: 362272 - DNA, 25 bp, Artificial
  probe
  misc_feature (1)..(25): SEQ ID NO: 3729; WAN024AKV; Start 35; Stop 59
aaaatcaatcgaaactgcgggaaaa

SEQ ID NO: 362273 - DNA, 25 bp, Artificial
  probe
  misc_feature (1)..(25): SEQ ID NO: 3729; WAN024AKV; Start 30; Stop 54
agaagaaaatcaatcgaaactgcgg

SEQ ID NO: 362274 - DNA, 25 bp, Artificial
  probe
  misc_feature (1)..(25): SEQ ID NO: 3729; WAN024AKV; Start 24; Stop 48
ggagttagaagaaaatcaatcgaaa

SEQ ID NO: 362275 - DNA, 25 bp, Artificial
  probe
  misc_feature (1)..(25): SEQ ID NO: 3729; WAN024AKV; Start 17; Stop 41
catagatggagttagaagaaaatca

SEQ ID NO: 362276 - DNA, 25 bp, Artificial
  probe
  misc_feature (1)..(25): SEQ ID NO: 3729; WAN024AKV; Start 16; Stop 40
acatagatggagttagaagaaaatc

SEQ ID NO: 362277 - DNA, 25 bp, Artificial
  probe
  misc_feature (1)..(25): SEQ ID NO: 3729; WAN024AKV; Start 85; Stop 109
taaaatgaacaatgtaaatgggatg

SEQ ID NO: 362278 - DNA, 25 bp, Artificial
  probe
  misc_feature (1)..(25): SEQ ID NO: 3729; WAN024AKV; Start 82; Stop 106
tgataaaatgaacaatgtaaatggg

SEQ ID NO: 362279 - DNA, 25 bp, Artificial
  probe
  misc_feature (1)..(25): SEQ ID NO: 3729; WAN024AKV; Start 34; Stop 58
gaaaatcaatcgaaactgcgggaaa

SEQ ID NO: 362280 - DNA, 25 bp, Artificial
  probe
  misc_feature (1)..(25): SEQ ID NO: 3729; WAN024AKV; Start 27; Stop 51
gttagaagaaaatcaatcgaaactg

SEQ ID NO: 362281 - DNA, 25 bp, Artificial
  probe
  misc_feature (1)..(25): SEQ ID NO: 3729; WAN024AKV; Start 83; Stop 107
gataaaatgaacaatgtaaatggga

SEQ ID NO: 362282 - DNA, 25 bp, Artificial
  probe
  misc_feature (1)..(25): SEQ ID NO: 3730; WAN024A86; Start 29; Stop 53
gcccgtgctctaatctaagatatta

SEQ ID NO: 362283 - DNA, 25 bp, Artificial
  probe
  misc_feature (1)..(25): SEQ ID NO: 3730; WAN024A86; Start 42; Stop 66
tctaagatattaatgacgaagagct

SEQ ID NO: 362284 - DNA, 25 bp, Artificial
  probe
  misc_feature (1)..(25): SEQ ID NO: 3730; WAN024A86; Start 77; Stop 101
aagatacaaagtttctcgtcagctt

SEQ ID NO: 362285 - DNA, 25 bp, Artificial
  probe
  misc_feature (1)..(25): SEQ ID NO: 3730; WAN024A86; Start 76; Stop 100
aaagatacaaagtttctcgtcagct

SEQ ID NO: 362286 - DNA, 25 bp, Artificial
  probe
  misc_feature (1)..(25): SEQ ID NO: 3730; WAN024A86; Start 30; Stop 54
cccgtgctctaatctaagatattaa

SEQ ID NO: 362287 - DNA, 25 bp, Artificial
  probe
  misc_feature (1)..(25): SEQ ID NO: 3730; WAN024A86; Start 27; Stop 51
tagcccgtgctctaatctaagatat

SEQ ID NO: 362288 - DNA, 25 bp, Artificial
  probe
  misc_feature (1)..(25): SEQ ID NO: 3730; WAN024A86; Start 26; Stop 50
ttagcccgtgctctaatctaagata

SEQ ID NO: 362289 - DNA, 25 bp, Artificial
  probe
  misc_feature (1)..(25): SEQ ID NO: 3730; WAN024A86; Start 41; Stop 65
atctaagatattaatgacgaagagc

SEQ ID NO: 362290 - DNA, 25 bp, Artificial
  probe
  misc_feature (1)..(25): SEQ ID NO: 3730; WAN024A86; Start 28; Stop 52
agcccgtgctctaatctaagatatt

SEQ ID NO: 362291 - DNA, 25 bp, Artificial
  probe
  misc_feature (1)..(25): SEQ ID NO: 3730; WAN024A86; Start 25; Stop 49
tttagcccgtgctctaatctaagat

SEQ ID NO: 362292 - DNA, 25 bp, Artificial
  probe
  misc_feature (1)..(25): SEQ ID NO: 3730; WAN024A86; Start 75; Stop 99
aaaagatacaaagtttctcgtcagc

SEQ ID NO: 362293 - DNA, 25 bp, Artificial
  probe
  misc_feature (1)..(25): SEQ ID NO: 3730; WAN024A86; Start 82; Stop 106
acaaagtttctcgtcagctttattt

SEQ ID NO: 362294 - DNA, 25 bp, Artificial
  probe
  misc_feature (1)..(25): SEQ ID NO: 3730; WAN024A86; Start 31; Stop 55
ccgtgctctaatctaagatattaat

SEQ ID NO: 362295 - DNA, 25 bp, Artificial
  probe
  misc_feature (1)..(25): SEQ ID NO: 3730; WAN024A86; Start 79; Stop 103
gatacaaagtttctcgtcagcttta

SEQ ID NO: 362296 - DNA, 25 bp, Artificial
  probe
  misc_feature (1)..(25): SEQ ID NO: 3730; WAN024A86; Start 78; Stop 102
agatacaaagtttctcgtcagcttt

SEQ ID NO: 362297 - DNA, 25 bp, Artificial
  probe
  misc_feature (1)..(25): SEQ ID NO: 3730; WAN024A86; Start 81; Stop 105
tacaaagtttctcgtcagctttatt

SEQ ID NO: 362298 - DNA, 25 bp, Artificial
  probe
  misc_feature (1)..(25): SEQ ID NO: 3730; WAN024A86; Start 80; Stop 104
atacaaagtttctcgtcagctttat

SEQ ID NO: 362299 - DNA, 25 bp, Artificial
  probe
  misc_feature (1)..(25): SEQ ID NO: 3730; WAN024A86; Start 71; Stop 95
acctaaaagatacaaagtttctcgt

SEQ ID NO: 362300 - DNA, 25 bp, Artificial
  probe
  misc_feature (1)..(25): SEQ ID NO: 3730; WAN024A86; Start 69; Stop 93
gcacctaaaagatacaaagtttctc

SEQ ID NO: 362301 - DNA, 25 bp, Artificial
  probe
  misc_feature (1)..(25): SEQ ID NO: 3730; WAN024A86; Start 70; Stop 94
cacctaaaagatacaaagtttctcg

SEQ ID NO: 362302 - DNA, 25 bp, Artificial
  probe
  misc_feature (1)..(25): SEQ ID NO: 3730; WAN024A86; Start 72; Stop 96
cctaaaagatacaaagtttctcgtc

SEQ ID NO: 362303 - DNA, 25 bp, Artificial
  probe
  misc_feature (1)..(25): SEQ ID NO: 3730; WAN024A86; Start 74; Stop 98
taaaagatacaaagtttctcgtcag

SEQ ID NO: 362304 - DNA, 25 bp, Artificial
  probe
  misc_feature (1)..(25): SEQ ID NO: 3730; WAN024A86; Start 73; Stop 97
ctaaaagatacaaagtttctcgtca

SEQ ID NO: 362305 - DNA, 25 bp, Artificial
  probe
  misc_feature (1)..(25): SEQ ID NO: 3730; WAN024A86; Start 32; Stop 56
cgtgctctaatctaagatattaatg

SEQ ID NO: 362306 - DNA, 25 bp, Artificial
  probe
  misc_feature (1)..(25): SEQ ID NO: 3730; WAN024A86; Start 65; Stop 89
ctctgcacctaaaagatacaaagtt

SEQ ID NO: 362307 - DNA, 25 bp, Artificial
  probe
  misc_feature (1)..(25): SEQ ID NO: 3730; WAN024A86; Start 67; Stop 91
ctgcacctaaaagatacaaagtttc

SEQ ID NO: 362308 - DNA, 25 bp, Artificial
  probe
  misc_feature (1)..(25): SEQ ID NO: 3730; WAN024A86; Start 63; Stop 87
agctctgcacctaaaagatacaaag

SEQ ID NO: 362309 - DNA, 25 bp, Artificial
  probe
  misc_feature (1)..(25): SEQ ID NO: 3730; WAN024A86; Start 68; Stop 92
tgcacctaaaagatacaaagtttct

SEQ ID NO: 362310 - DNA, 25 bp, Artificial
  probe
  misc_feature (1)..(25): SEQ ID NO: 3730; WAN024A86; Start 66; Stop 90
tctgcacctaaaagatacaaagttt

SEQ ID NO: 362311 - DNA, 25 bp, Artificial
  probe
  misc_feature (1)..(25): SEQ ID NO: 3730; WAN024A86; Start 64; Stop 88
gctctgcacctaaaagatacaaagt

SEQ ID NO: 362312 - DNA, 25 bp, Artificial
  probe
  misc_feature (1)..(25): SEQ ID NO: 3730; WAN024A86; Start 35; Stop 59
gctctaatctaagatattaatgacg

SEQ ID NO: 362313 - DNA, 25 bp, Artificial
  probe
  misc_feature (1)..(25): SEQ ID NO: 3730; WAN024A86; Start 23; Stop 47
cttttagcccgtgctctaatctaag

SEQ ID NO: 362314 - DNA, 25 bp, Artificial
  probe
  misc_feature (1)..(25): SEQ ID NO: 3730; WAN024A86; Start 21; Stop 45
atcttttagcccgtgctctaatcta

SEQ ID NO: 362315 - DNA, 25 bp, Artificial
  probe
  misc_feature (1)..(25): SEQ ID NO: 3731; WAN024AQU; Start 5; Stop 29
cttgctcccataatttctcatttca

SEQ ID NO: 362316 - DNA, 25 bp, Artificial
  probe
  misc_feature (1)..(25): SEQ ID NO: 3731; WAN024AQU; Start 4; Stop 28
gcttgctcccataatttctcatttc

SEQ ID NO: 362317 - DNA, 25 bp, Artificial
  probe
  misc_feature (1)..(25): SEQ ID NO: 3731; WAN024AQU; Start 11; Stop 35
cccataatttctcatttcataggca

SEQ ID NO: 362318 - DNA, 25 bp, Artificial
  probe
  misc_feature (1)..(25): SEQ ID NO: 3731; WAN024AQU; Start 6; Stop 30
ttgctcccataatttctcatttcat

SEQ ID NO: 362319 - DNA, 25 bp, Artificial
  probe
  misc_feature (1)..(25): SEQ ID NO: 3731; WAN024AQU; Start 10; Stop 34
tcccataatttctcatttcataggc

SEQ ID NO: 362320 - DNA, 25 bp, Artificial
  probe
  misc_feature (1)..(25): SEQ ID NO: 3731; WAN024AQU; Start 23; Stop 47
catttcataggcaaataatcccacc

SEQ ID NO: 362321 - DNA, 25 bp, Artificial
  probe
  misc_feature (1)..(25): SEQ ID NO: 3731; WAN024AQU; Start 7; Stop 31
tgctcccataatttctcatttcata

SEQ ID NO: 362322 - DNA, 25 bp, Artificial
  probe
  misc_feature (1)..(25): SEQ ID NO: 3731; WAN024AQU; Start 22; Stop 46
tcatttcataggcaaataatcccac

SEQ ID NO: 362323 - DNA, 25 bp, Artificial
  probe
  misc_feature (1)..(25): SEQ ID NO: 3731; WAN024AQU; Start 21; Stop 45
ctcatttcataggcaaataatccca

SEQ ID NO: 362324 - DNA, 25 bp, Artificial
  probe
  misc_feature (1)..(25): SEQ ID NO: 3731; WAN024AQU; Start 20; Stop 44
tctcatttcataggcaaataatccc

SEQ ID NO: 362325 - DNA, 25 bp, Artificial
  probe
  misc_feature (1)..(25): SEQ ID NO: 3731; WAN024AQU; Start 24; Stop 48
atttcataggcaaataatcccacct

SEQ ID NO: 362326 - DNA, 25 bp, Artificial
  probe
  misc_feature (1)..(25): SEQ ID NO: 3731; WAN024AQU; Start 8; Stop 32
gctcccataatttctcatttcatag

SEQ ID NO: 362327 - DNA, 25 bp, Artificial
  probe
  misc_feature (1)..(25): SEQ ID NO: 3731; WAN024AQU; Start 12; Stop 36
ccataatttctcatttcataggcaa

SEQ ID NO: 362328 - DNA, 25 bp, Artificial
  probe
  misc_feature (1)..(25): SEQ ID NO: 3731; WAN024AQU; Start 48; Stop 72
tagcttgttctaggtgggattattt

SEQ ID NO: 362329 - DNA, 25 bp, Artificial
  probe
  misc_feature (1)..(25): SEQ ID NO: 3731; WAN024AQU; Start 35; Stop 59
aaataatcccacctagcttgttcta

SEQ ID NO: 362330 - DNA, 25 bp, Artificial
  probe
  misc_feature (1)..(25): SEQ ID NO: 3731; WAN024AQU; Start 3; Stop 27
agcttgctcccataatttctcattt

SEQ ID NO: 362331 - DNA, 25 bp, Artificial
  probe
  misc_feature (1)..(25): SEQ ID NO: 3731; WAN024AQU; Start 34; Stop 58
caaataatcccacctagcttgttct

SEQ ID NO: 362332 - DNA, 25 bp, Artificial
  probe
  misc_feature (1)..(25): SEQ ID NO: 3731; WAN024AQU; Start 9; Stop 33
ctcccataatttctcatttcatagg

SEQ ID NO: 362333 - DNA, 25 bp, Artificial
  probe
  misc_feature (1)..(25): SEQ ID NO: 3731; WAN024AQU; Start 19; Stop 43
ttctcatttcataggcaaataatcc

SEQ ID NO: 362334 - DNA, 25 bp, Artificial
  probe
  misc_feature (1)..(25): SEQ ID NO: 3731; WAN024AQU; Start 2; Stop 26
gagcttgctcccataatttctcatt

SEQ ID NO: 362335 - DNA, 25 bp, Artificial
  probe
  misc_feature (1)..(25): SEQ ID NO: 3731; WAN024AQU; Start 33; Stop 57
gcaaataatcccacctagcttgttc

SEQ ID NO: 362336 - DNA, 25 bp, Artificial
  probe
  misc_feature (1)..(25): SEQ ID NO: 3731; WAN024AQU; Start 47; Stop 71
ctagcttgttctaggtgggattatt

SEQ ID NO: 362337 - DNA, 25 bp, Artificial
  probe
  misc_feature (1)..(25): SEQ ID NO: 3731; WAN024AQU; Start 36; Stop 60
aataatcccacctagcttgttctag

SEQ ID NO: 362338 - DNA, 25 bp, Artificial
  probe
  misc_feature (1)..(25): SEQ ID NO: 3731; WAN024AQU; Start 26; Stop 50
ttcataggcaaataatcccacctag

SEQ ID NO: 362339 - DNA, 25 bp, Artificial
  probe
  misc_feature (1)..(25): SEQ ID NO: 3731; WAN024AQU; Start 25; Stop 49
tttcataggcaaataatcccaccta

SEQ ID NO: 362340 - DNA, 25 bp, Artificial
  probe
  misc_feature (1)..(25): SEQ ID NO: 3731; WAN024AQU; Start 50; Stop 74
gcttgttctaggtgggattatttta

SEQ ID NO: 362341 - DNA, 25 bp, Artificial
  probe
  misc_feature (1)..(25): SEQ ID NO: 3731; WAN024AQU; Start 13; Stop 37
cataatttctcatttcataggcaaa

SEQ ID NO: 362342 - DNA, 25 bp, Artificial
  probe
  misc_feature (1)..(25): SEQ ID NO: 3731; WAN024AQU; Start 76; Stop 100
ttcttaacagagattgcaagtcatt

SEQ ID NO: 362343 - DNA, 25 bp, Artificial
  probe
  misc_feature (1)..(25): SEQ ID NO: 3731; WAN024AQU; Start 49; Stop 73
agcttgttctaggtgggattatttt

SEQ ID NO: 362344 - DNA, 25 bp, Artificial
  probe
  misc_feature (1)..(25): SEQ ID NO: 3731; WAN024AQU; Start 27; Stop 51
tcataggcaaataatcccacctagc

SEQ ID NO: 362345 - DNA, 25 bp, Artificial
  probe
  misc_feature (1)..(25): SEQ ID NO: 3731; WAN024AQU; Start 32; Stop 56
ggcaaataatcccacctagcttgtt

SEQ ID NO: 362346 - DNA, 25 bp, Artificial
  probe
  misc_feature (1)..(25): SEQ ID NO: 3731; WAN024AQU; Start 29; Stop 53
ataggcaaataatcccacctagctt

SEQ ID NO: 362347 - DNA, 25 bp, Artificial
  probe
  misc_feature (1)..(25): SEQ ID NO: 3731; WAN024AQU; Start 18; Stop 42
tttctcatttcataggcaaataatc

SEQ ID NO: 362348 - DNA, 25 bp, Artificial
  probe
  misc_feature (1)..(25): SEQ ID NO: 3732; WAN024GAL; Start 36; Stop 60
ttgaaaaccgtcaggcgtgtaaaag

SEQ ID NO: 362349 - DNA, 25 bp, Artificial
  probe
  misc_feature (1)..(25): SEQ ID NO: 3732; WAN024GAL; Start 35; Stop 59
cttgaaaaccgtcaggcgtgtaaaa

SEQ ID NO: 362350 - DNA, 25 bp, Artificial
  probe
  misc_feature (1)..(25): SEQ ID NO: 3733; WAN0249GR; Start 278; Stop 302
gttccattattttaacacacgaggt

SEQ ID NO: 362351 - DNA, 25 bp, Artificial
  probe
  misc_feature (1)..(25): SEQ ID NO: 3733; WAN0249GR; Start 63; Stop 87
catataaattcaagctccctaagga

SEQ ID NO: 362352 - DNA, 25 bp, Artificial
  probe
  misc_feature (1)..(25): SEQ ID NO: 3733; WAN0249GR; Start 282; Stop 306
cattattttaacacacgaggtgcta

SEQ ID NO: 362353 - DNA, 25 bp, Artificial
  probe
  misc_feature (1)..(25): SEQ ID NO: 3733; WAN0249GR; Start 279; Stop 303
ttccattattttaacacacgaggtg

SEQ ID NO: 362354 - DNA, 25 bp, Artificial
  probe
  misc_feature (1)..(25): SEQ ID NO: 3733; WAN0249GR; Start 152; Stop 176
ctttgctaaaatgagttagtctcct

SEQ ID NO: 362355 - DNA, 25 bp, Artificial
  probe
  misc_feature (1)..(25): SEQ ID NO: 3733; WAN0249GR; Start 151; Stop 175
tctttgctaaaatgagttagtctcc

SEQ ID NO: 362356 - DNA, 25 bp, Artificial
  probe
  misc_feature (1)..(25): SEQ ID NO: 3733; WAN0249GR; Start 284; Stop 308
ttattttaacacacgaggtgctatt

SEQ ID NO: 362357 - DNA, 25 bp, Artificial
  probe
  misc_feature (1)..(25): SEQ ID NO: 3733; WAN0249GR; Start 283; Stop 307
attattttaacacacgaggtgctat

SEQ ID NO: 362358 - DNA, 25 bp, Artificial
  probe
  misc_feature (1)..(25): SEQ ID NO: 3733; WAN0249GR; Start 79; Stop 103
ccctaaggaggttttgtactttgta

SEQ ID NO: 362359 - DNA, 25 bp, Artificial
  probe
  misc_feature (1)..(25): SEQ ID NO: 3733; WAN0249GR; Start 153; Stop 177
tttgctaaaatgagttagtctcctt

SEQ ID NO: 362360 - DNA, 25 bp, Artificial
  probe
  misc_feature (1)..(25): SEQ ID NO: 3733; WAN0249GR; Start 281; Stop 305
ccattattttaacacacgaggtgct

SEQ ID NO: 362361 - DNA, 25 bp, Artificial
  probe
  misc_feature (1)..(25): SEQ ID NO: 3733; WAN0249GR; Start 280; Stop 304
tccattattttaacacacgaggtgc

SEQ ID NO: 362362 - DNA, 25 bp, Artificial
  probe
  misc_feature (1)..(25): SEQ ID NO: 3733; WAN0249GR; Start 78; Stop 102
tccctaaggaggttttgtactttgt

SEQ ID NO: 362363 - DNA, 25 bp, Artificial
  probe
  misc_feature (1)..(25): SEQ ID NO: 3733; WAN0249GR; Start 155; Stop 179
tgctaaaatgagttagtctccttaa

SEQ ID NO: 362364 - DNA, 25 bp, Artificial
  probe
  misc_feature (1)..(25): SEQ ID NO: 3733; WAN0249GR; Start 154; Stop 178
ttgctaaaatgagttagtctcctta

SEQ ID NO: 362365 - DNA, 25 bp, Artificial
  probe
  misc_feature (1)..(25): SEQ ID NO: 3733; WAN0249GR; Start 150; Stop 174
atctttgctaaaatgagttagtctc

SEQ ID NO: 362366 - DNA, 25 bp, Artificial
  probe
  misc_feature (1)..(25): SEQ ID NO: 3733; WAN0249GR; Start 277; Stop 301
cgttccattattttaacacacgagg

SEQ ID NO: 362367 - DNA, 25 bp, Artificial
  probe
  misc_feature (1)..(25): SEQ ID NO: 3733; WAN0249GR; Start 156; Stop 180
gctaaaatgagttagtctccttaaa

SEQ ID NO: 362368 - DNA, 25 bp, Artificial
  probe
  misc_feature (1)..(25): SEQ ID NO: 3733; WAN0249GR; Start 65; Stop 89
tataaattcaagctccctaaggagg

SEQ ID NO: 362369 - DNA, 25 bp, Artificial
  probe
  misc_feature (1)..(25): SEQ ID NO: 3733; WAN0249GR; Start 276; Stop 300
acgttccattattttaacacacgag

SEQ ID NO: 362370 - DNA, 25 bp, Artificial
  probe
  misc_feature (1)..(25): SEQ ID NO: 3733; WAN0249GR; Start 211; Stop 235
gcaattatgcttgaaaaggagtata

SEQ ID NO: 362371 - DNA, 25 bp, Artificial
  probe
  misc_feature (1)..(25): SEQ ID NO: 3733; WAN0249GR; Start 210; Stop 234
tgcaattatgcttgaaaaggagtat

SEQ ID NO: 362372 - DNA, 25 bp, Artificial
  probe
  misc_feature (1)..(25): SEQ ID NO: 3733; WAN0249GR; Start 66; Stop 90
ataaattcaagctccctaaggaggt

SEQ ID NO: 362373 - DNA, 25 bp, Artificial
  probe
  misc_feature (1)..(25): SEQ ID NO: 3733; WAN0249GR; Start 67; Stop 91
taaattcaagctccctaaggaggtt

SEQ ID NO: 362374 - DNA, 25 bp, Artificial
  probe
  misc_feature (1)..(25): SEQ ID NO: 3733; WAN0249GR; Start 149; Stop 173
tatctttgctaaaatgagttagtct

SEQ ID NO: 362375 - DNA, 25 bp, Artificial
  probe
  misc_feature (1)..(25): SEQ ID NO: 3733; WAN0249GR; Start 68; Stop 92
aaattcaagctccctaaggaggttt

SEQ ID NO: 362376 - DNA, 25 bp, Artificial
  probe
  misc_feature (1)..(25): SEQ ID NO: 3733; WAN0249GR; Start 64; Stop 88
atataaattcaagctccctaaggag

SEQ ID NO: 362377 - DNA, 25 bp, Artificial
  probe
  misc_feature (1)..(25): SEQ ID NO: 3733; WAN0249GR; Start 273; Stop 297
gcaacgttccattattttaacacac

SEQ ID NO: 362378 - DNA, 25 bp, Artificial
  probe
  misc_feature (1)..(25): SEQ ID NO: 3733; WAN0249GR; Start 147; Stop 171
gttatctttgctaaaatgagttagt

SEQ ID NO: 362379 - DNA, 25 bp, Artificial
  probe
  misc_feature (1)..(25): SEQ ID NO: 3733; WAN0249GR; Start 212; Stop 236
caattatgcttgaaaaggagtatac

SEQ ID NO: 362380 - DNA, 25 bp, Artificial
  probe
  misc_feature (1)..(25): SEQ ID NO: 3733; WAN0249GR; Start 272; Stop 296
cgcaacgttccattattttaacaca

SEQ ID NO: 362381 - DNA, 25 bp, Artificial
  probe
  misc_feature (1)..(25): SEQ ID NO: 3733; WAN0249GR; Start 148; Stop 172
ttatctttgctaaaatgagttagtc

SEQ ID NO: 362382 - DNA, 25 bp, Artificial
  probe
  misc_feature (1)..(25): SEQ ID NO: 3733; WAN0249GR; Start 146; Stop 170
agttatctttgctaaaatgagttag

SEQ ID NO: 362383 - DNA, 25 bp, Artificial
  probe
  misc_feature (1)..(25): SEQ ID NO: 3734; WAN0249VA; Start 31; Stop 55
attacaaacacgcatagtatcaggg

SEQ ID NO: 362384 - DNA, 25 bp, Artificial
  probe
  misc_feature (1)..(25): SEQ ID NO: 3734; WAN0249VA; Start 30; Stop 54
aattacaaacacgcatagtatcagg

SEQ ID NO: 362385 - DNA, 25 bp, Artificial
  probe
  misc_feature (1)..(25): SEQ ID NO: 3734; WAN0249VA; Start 29; Stop 53
aaattacaaacacgcatagtatcag

SEQ ID NO: 362386 - DNA, 25 bp, Artificial
  probe
  misc_feature (1)..(25): SEQ ID NO: 3734; WAN0249VA; Start 36; Stop 60
aaacacgcatagtatcaggggatta

SEQ ID NO: 362387 - DNA, 25 bp, Artificial
  probe
  misc_feature (1)..(25): SEQ ID NO: 3734; WAN0249VA; Start 37; Stop 61
aacacgcatagtatcaggggattaa

SEQ ID NO: 362388 - DNA, 25 bp, Artificial
  probe
  misc_feature (1)..(25): SEQ ID NO: 3734; WAN0249VA; Start 38; Stop 62
acacgcatagtatcaggggattaag

SEQ ID NO: 362389 - DNA, 25 bp, Artificial
  probe
  misc_feature (1)..(25): SEQ ID NO: 3734; WAN0249VA; Start 28; Stop 52
aaaattacaaacacgcatagtatca

SEQ ID NO: 362390 - DNA, 25 bp, Artificial
  probe
  misc_feature (1)..(25): SEQ ID NO: 3734; WAN0249VA; Start 32; Stop 56
ttacaaacacgcatagtatcagggg

SEQ ID NO: 362391 - DNA, 25 bp, Artificial
  probe
  misc_feature (1)..(25): SEQ ID NO: 3734; WAN0249VA; Start 6; Stop 30
cgactctaagcacaaaatcttaaaa

SEQ ID NO: 362392 - DNA, 25 bp, Artificial
  probe
  misc_feature (1)..(25): SEQ ID NO: 3734; WAN0249VA; Start 35; Stop 59
caaacacgcatagtatcaggggatt

SEQ ID NO: 362393 - DNA, 25 bp, Artificial
  probe
  misc_feature (1)..(25): SEQ ID NO: 3734; WAN0249VA; Start 33; Stop 57
tacaaacacgcatagtatcagggga

SEQ ID NO: 362394 - DNA, 25 bp, Artificial
  probe
  misc_feature (1)..(25): SEQ ID NO: 3734; WAN0249VA; Start 5; Stop 29
tcgactctaagcacaaaatcttaaa

SEQ ID NO: 362395 - DNA, 25 bp, Artificial
  probe
  misc_feature (1)..(25): SEQ ID NO: 3734; WAN0249VA; Start 34; Stop 58
acaaacacgcatagtatcaggggat

SEQ ID NO: 362396 - DNA, 25 bp, Artificial
  probe
  misc_feature (1)..(25): SEQ ID NO: 3736; WAN024CEL-M; Start 532; Stop 556
atcggataaggatattagtcgcatt

SEQ ID NO: 362397 - DNA, 25 bp, Artificial
  probe
  misc_feature (1)..(25): SEQ ID NO: 3736; WAN024CEL-M; Start 533; Stop 557
tcggataaggatattagtcgcatta

SEQ ID NO: 362398 - DNA, 25 bp, Artificial
  probe
  misc_feature (1)..(25): SEQ ID NO: 3736; WAN024CEL-M; Start 534; Stop 558
cggataaggatattagtcgcattaa

SEQ ID NO: 362399 - DNA, 25 bp, Artificial
  probe
  misc_feature (1)..(25): SEQ ID NO: 3736; WAN024CEL-M; Start 531; Stop 555
tatcggataaggatattagtcgcat

SEQ ID NO: 362400 - DNA, 25 bp, Artificial
  probe
  misc_feature (1)..(25): SEQ ID NO: 3736; WAN024CEL-M; Start 530; Stop 554
ttatcggataaggatattagtcgca

SEQ ID NO: 362401 - DNA, 25 bp, Artificial
  probe
  misc_feature (1)..(25): SEQ ID NO: 3736; WAN024CEL-M; Start 1965; Stop 1989
gtattattacaggagattacgatgc

SEQ ID NO: 362402 - DNA, 25 bp, Artificial
  probe
  misc_feature (1)..(25): SEQ ID NO: 3736; WAN024CEL-M; Start 1067; Stop 1091
ctcaacaagatagaagtagttcaac

SEQ ID NO: 362403 - DNA, 25 bp, Artificial
  probe
  misc_feature (1)..(25): SEQ ID NO: 3736; WAN024CEL-M; Start 1066; Stop 1090
tctcaacaagatagaagtagttcaa

SEQ ID NO: 362404 - DNA, 25 bp, Artificial
  probe
  misc_feature (1)..(25): SEQ ID NO: 3736; WAN024CEL-M; Start 536; Stop 560
gataaggatattagtcgcattaagg

SEQ ID NO: 362405 - DNA, 25 bp, Artificial
  probe
  misc_feature (1)..(25): SEQ ID NO: 3736; WAN024CEL-M; Start 535; Stop 559
ggataaggatattagtcgcattaag

SEQ ID NO: 362406 - DNA, 25 bp, Artificial
  probe
  misc_feature (1)..(25): SEQ ID NO: 3736; WAN024CEL-M; Start 1068; Stop 1092
tcaacaagatagaagtagttcaact

SEQ ID NO: 362407 - DNA, 25 bp, Artificial
  probe
  misc_feature (1)..(25): SEQ ID NO: 3736; WAN024CEL-M; Start 4; Stop 28
taagcgtgtctggatcaatccttat

SEQ ID NO: 362408 - DNA, 25 bp, Artificial
  probe
  misc_feature (1)..(25): SEQ ID NO: 3736; WAN024CEL-M; Start 3; Stop 27
ataagcgtgtctggatcaatcctta

SEQ ID NO: 362409 - DNA, 25 bp, Artificial
  probe
  misc_feature (1)..(25): SEQ ID NO: 3736; WAN024CEL-M; Start 1212; Stop 1236
ttcctcaatccgtttatggtaaatt

SEQ ID NO: 362410 - DNA, 25 bp, Artificial
  probe
  misc_feature (1)..(25): SEQ ID NO: 3736; WAN024CEL-M; Start 1211; Stop 1235
attcctcaatccgtttatggtaaat

SEQ ID NO: 362411 - DNA, 25 bp, Artificial
  probe
  misc_feature (1)..(25): SEQ ID NO: 3736; WAN024CEL-M; Start 537; Stop 561
ataaggatattagtcgcattaaggg

SEQ ID NO: 362412 - DNA, 25 bp, Artificial
  probe
  misc_feature (1)..(25): SEQ ID NO: 3736; WAN024CEL-M; Start 5; Stop 29
aagcgtgtctggatcaatccttatt

SEQ ID NO: 362413 - DNA, 25 bp, Artificial
  probe
  misc_feature (1)..(25): SEQ ID NO: 3736; WAN024CEL-M; Start 563; Stop 587
atggttgatttgagagagacctatc

SEQ ID NO: 362414 - DNA, 25 bp, Artificial
  probe
  misc_feature (1)..(25): SEQ ID NO: 3736; WAN024CEL-M; Start 1167; Stop 1191
ggattcatctggcagatattgagtt

SEQ ID NO: 362415 - DNA, 25 bp, Artificial
  probe
  misc_feature (1)..(25): SEQ ID NO: 3736; WAN024CEL-M; Start 2; Stop 26
gataagcgtgtctggatcaatcctt

SEQ ID NO: 362416 - DNA, 25 bp, Artificial
  probe
  misc_feature (1)..(25): SEQ ID NO: 3736; WAN024CEL-M; Start 1210; Stop 1234
gattcctcaatccgtttatggtaaa

SEQ ID NO: 362417 - DNA, 25 bp, Artificial
  probe
  misc_feature (1)..(25): SEQ ID NO: 3736; WAN024CEL-M; Start 1397; Stop 1421
cgttatgatacaggaagaaagattt

SEQ ID NO: 362418 - DNA, 25 bp, Artificial
  probe
  misc_feature (1)..(25): SEQ ID NO: 3736; WAN024CEL-M; Start 1219; Stop 1243
atccgtttatggtaaatttgccttt

SEQ ID NO: 362419 - DNA, 25 bp, Artificial
  probe
  misc_feature (1)..(25): SEQ ID NO: 3736; WAN024CEL-M; Start 1218; Stop 1242
aatccgtttatggtaaatttgcctt

SEQ ID NO: 362420 - DNA, 25 bp, Artificial
  probe
  misc_feature (1)..(25): SEQ ID NO: 3736; WAN024CEL-M; Start 1217; Stop 1241
caatccgtttatggtaaatttgcct

SEQ ID NO: 362421 - DNA, 25 bp, Artificial
  probe
  misc_feature (1)..(25): SEQ ID NO: 3736; WAN024CEL-M; Start 1216; Stop 1240
tcaatccgtttatggtaaatttgcc

SEQ ID NO: 362422 - DNA, 25 bp, Artificial
  probe
  misc_feature (1)..(25): SEQ ID NO: 3736; WAN024CEL-M; Start 1221; Stop 1245
ccgtttatggtaaatttgcctttga

SEQ ID NO: 362423 - DNA, 25 bp, Artificial
  probe
  misc_feature (1)..(25): SEQ ID NO: 3736; WAN024CEL-M; Start 1220; Stop 1244
tccgtttatggtaaatttgcctttg

SEQ ID NO: 362424 - DNA, 25 bp, Artificial
  probe
  misc_feature (1)..(25): SEQ ID NO: 3736; WAN024CEL-M; Start 1215; Stop 1239
ctcaatccgtttatggtaaatttgc

SEQ ID NO: 362425 - DNA, 25 bp, Artificial
  probe
  misc_feature (1)..(25): SEQ ID NO: 3736; WAN024CEL-M; Start 811; Stop 835
atctttagcctttgagaaagcattg

SEQ ID NO: 362426 - DNA, 25 bp, Artificial
  probe
  misc_feature (1)..(25): SEQ ID NO: 3736; WAN024CEL-M; Start 1065; Stop 1089
ttctcaacaagatagaagtagttca

SEQ ID NO: 362427 - DNA, 25 bp, Artificial
  probe
  misc_feature (1)..(25): SEQ ID NO: 3736; WAN024CEL-M; Start 1227; Stop 1251
atggtaaatttgcctttgaatgttt

SEQ ID NO: 362428 - DNA, 25 bp, Artificial
  probe
  misc_feature (1)..(25): SEQ ID NO: 3736; WAN024CEL-M; Start 1395; Stop 1419
cacgttatgatacaggaagaaagat

SEQ ID NO: 362429 - DNA, 25 bp, Artificial
  probe
  misc_feature (1)..(25): SEQ ID NO: 3737; WAN0249ZC; Start 74; Stop 98
attcaagagtcagatatagcagcaa

SEQ ID NO: 362430 - DNA, 25 bp, Artificial
  probe
  misc_feature (1)..(25): SEQ ID NO: 3737; WAN0249ZC; Start 75; Stop 99
ttcaagagtcagatatagcagcaac

SEQ ID NO: 362431 - DNA, 25 bp, Artificial
  probe
  misc_feature (1)..(25): SEQ ID NO: 3737; WAN0249ZC; Start 73; Stop 97
tattcaagagtcagatatagcagca

SEQ ID NO: 362432 - DNA, 25 bp, Artificial
  probe
  misc_feature (1)..(25): SEQ ID NO: 3737; WAN0249ZC; Start 72; Stop 96
gtattcaagagtcagatatagcagc

SEQ ID NO: 362433 - DNA, 25 bp, Artificial
  probe
  misc_feature (1)..(25): SEQ ID NO: 3737; WAN0249ZC; Start 70; Stop 94
tggtattcaagagtcagatatagca

SEQ ID NO: 362434 - DNA, 25 bp, Artificial
  probe
  misc_feature (1)..(25): SEQ ID NO: 3737; WAN0249ZC; Start 54; Stop 78
atggtagtaaggaagttggtattca

SEQ ID NO: 362435 - DNA, 25 bp, Artificial
  probe
  misc_feature (1)..(25): SEQ ID NO: 3737; WAN0249ZC; Start 64; Stop 88
ggaagttggtattcaagagtcagat

SEQ ID NO: 362436 - DNA, 25 bp, Artificial
  probe
  misc_feature (1)..(25): SEQ ID NO: 3737; WAN0249ZC; Start 62; Stop 86
aaggaagttggtattcaagagtcag

SEQ ID NO: 362437 - DNA, 25 bp, Artificial
  probe
  misc_feature (1)..(25): SEQ ID NO: 3737; WAN0249ZC; Start 61; Stop 85
taaggaagttggtattcaagagtca

SEQ ID NO: 362438 - DNA, 25 bp, Artificial
  probe
  misc_feature (1)..(25): SEQ ID NO: 3737; WAN0249ZC; Start 59; Stop 83
agtaaggaagttggtattcaagagt

SEQ ID NO: 362439 - DNA, 25 bp, Artificial
  probe
  misc_feature (1)..(25): SEQ ID NO: 3737; WAN0249ZC; Start 55; Stop 79
tggtagtaaggaagttggtattcaa

SEQ ID NO: 362440 - DNA, 25 bp, Artificial
  probe
  misc_feature (1)..(25): SEQ ID NO: 3737; WAN0249ZC; Start 60; Stop 84
gtaaggaagttggtattcaagagtc

SEQ ID NO: 362441 - DNA, 25 bp, Artificial
  probe
  misc_feature (1)..(25): SEQ ID NO: 3737; WAN0249ZC; Start 71; Stop 95
ggtattcaagagtcagatatagcag

SEQ ID NO: 362442 - DNA, 25 bp, Artificial
  probe
  misc_feature (1)..(25): SEQ ID NO: 3737; WAN0249ZC; Start 63; Stop 87
aggaagttggtattcaagagtcaga

SEQ ID NO: 362443 - DNA, 25 bp, Artificial
  probe
  misc_feature (1)..(25): SEQ ID NO: 3737; WAN0249ZC; Start 56; Stop 80
ggtagtaaggaagttggtattcaag

SEQ ID NO: 362444 - DNA, 25 bp, Artificial
  probe
  misc_feature (1)..(25): SEQ ID NO: 3737; WAN0249ZC; Start 53; Stop 77
aatggtagtaaggaagttggtattc

SEQ ID NO: 362445 - DNA, 25 bp, Artificial
  probe
  misc_feature (1)..(25): SEQ ID NO: 3737; WAN0249ZC; Start 76; Stop 100
tcaagagtcagatatagcagcaact

SEQ ID NO: 362446 - DNA, 25 bp, Artificial
  probe
  misc_feature (1)..(25): SEQ ID NO: 3737; WAN0249ZC; Start 65; Stop 89
gaagttggtattcaagagtcagata

SEQ ID NO: 362447 - DNA, 25 bp, Artificial
  probe
  misc_feature (1)..(25): SEQ ID NO: 3737; WAN0249ZC; Start 69; Stop 93
ttggtattcaagagtcagatatagc

SEQ ID NO: 362448 - DNA, 25 bp, Artificial
  probe
  misc_feature (1)..(25): SEQ ID NO: 3737; WAN0249ZC; Start 57; Stop 81
gtagtaaggaagttggtattcaaga

SEQ ID NO: 362449 - DNA, 25 bp, Artificial
  probe
  misc_feature (1)..(25): SEQ ID NO: 3737; WAN0249ZC; Start 58; Stop 82
tagtaaggaagttggtattcaagag

SEQ ID NO: 362450 - DNA, 25 bp, Artificial
  probe
  misc_feature (1)..(25): SEQ ID NO: 3737; WAN0249ZC; Start 66; Stop 90
aagttggtattcaagagtcagatat

SEQ ID NO: 362451 - DNA, 25 bp, Artificial
  probe
  misc_feature (1)..(25): SEQ ID NO: 3737; WAN0249ZC; Start 25; Stop 49
agataaatacacatatactgccgct

SEQ ID NO: 362452 - DNA, 25 bp, Artificial
  probe
  misc_feature (1)..(25): SEQ ID NO: 3737; WAN0249ZC; Start 50; Stop 74
agaaatggtagtaaggaagttggta

SEQ ID NO: 362453 - DNA, 25 bp, Artificial
  probe
  misc_feature (1)..(25): SEQ ID NO: 3737; WAN0249ZC; Start 49; Stop 73
tagaaatggtagtaaggaagttggt

SEQ ID NO: 362454 - DNA, 25 bp, Artificial
  probe
  misc_feature (1)..(25): SEQ ID NO: 3737; WAN0249ZC; Start 30; Stop 54
aatacacatatactgccgctagaaa

SEQ ID NO: 362455 - DNA, 25 bp, Artificial
  probe
  misc_feature (1)..(25): SEQ ID NO: 3737; WAN0249ZC; Start 29; Stop 53
aaatacacatatactgccgctagaa

SEQ ID NO: 362456 - DNA, 25 bp, Artificial
  probe
  misc_feature (1)..(25): SEQ ID NO: 3737; WAN0249ZC; Start 31; Stop 55
atacacatatactgccgctagaaat

SEQ ID NO: 362457 - DNA, 25 bp, Artificial
  probe
  misc_feature (1)..(25): SEQ ID NO: 3737; WAN0249ZC; Start 46; Stop 70
cgctagaaatggtagtaaggaagtt

SEQ ID NO: 362458 - DNA, 25 bp, Artificial
  probe
  misc_feature (1)..(25): SEQ ID NO: 3737; WAN0249ZC; Start 47; Stop 71
gctagaaatggtagtaaggaagttg

SEQ ID NO: 362459 - DNA, 25 bp, Artificial
  probe
  misc_feature (1)..(25): SEQ ID NO: 3737; WAN0249ZC; Start 28; Stop 52
taaatacacatatactgccgctaga

SEQ ID NO: 362460 - DNA, 25 bp, Artificial
  probe
  misc_feature (1)..(25): SEQ ID NO: 3737; WAN0249ZC; Start 32; Stop 56
tacacatatactgccgctagaaatg

SEQ ID NO: 362461 - DNA, 25 bp, Artificial
  probe
  misc_feature (1)..(25): SEQ ID NO: 3737; WAN0249ZC; Start 26; Stop 50
gataaatacacatatactgccgcta

SEQ ID NO: 362462 - DNA, 25 bp, Artificial
  probe
  misc_feature (1)..(25): SEQ ID NO: 3738; WAN0249OG; Start 54; Stop 78
aaccctttcctacttttgatagact

SEQ ID NO: 362463 - DNA, 25 bp, Artificial
  probe
  misc_feature (1)..(25): SEQ ID NO: 3738; WAN0249OG; Start 53; Stop 77
aaaccctttcctacttttgatagac

SEQ ID NO: 362464 - DNA, 25 bp, Artificial
  probe
  misc_feature (1)..(25): SEQ ID NO: 3738; WAN0249OG; Start 55; Stop 79
accctttcctacttttgatagacta

SEQ ID NO: 362465 - DNA, 25 bp, Artificial
  probe
  misc_feature (1)..(25): SEQ ID NO: 3738; WAN0249OG; Start 56; Stop 80
ccctttcctacttttgatagactag

SEQ ID NO: 362466 - DNA, 25 bp, Artificial
  probe
  misc_feature (1)..(25): SEQ ID NO: 3738; WAN0249OG; Start 48; Stop 72
tcttgaaaccctttcctacttttga

SEQ ID NO: 362467 - DNA, 25 bp, Artificial
  probe
  misc_feature (1)..(25): SEQ ID NO: 3738; WAN0249OG; Start 47; Stop 71
ttcttgaaaccctttcctacttttg

SEQ ID NO: 362468 - DNA, 25 bp, Artificial
  probe
  misc_feature (1)..(25): SEQ ID NO: 3738; WAN0249OG; Start 49; Stop 73
cttgaaaccctttcctacttttgat

SEQ ID NO: 362469 - DNA, 25 bp, Artificial
  probe
  misc_feature (1)..(25): SEQ ID NO: 3738; WAN0249OG; Start 46; Stop 70
tttcttgaaaccctttcctactttt

SEQ ID NO: 362470 - DNA, 25 bp, Artificial
  probe
  misc_feature (1)..(25): SEQ ID NO: 3738; WAN0249OG; Start 45; Stop 69
ttttcttgaaaccctttcctacttt

SEQ ID NO: 362471 - DNA, 25 bp, Artificial
  probe
  misc_feature (1)..(25): SEQ ID NO: 3738; WAN0249OG; Start 42; Stop 66
caattttcttgaaaccctttcctac

SEQ ID NO: 362472 - DNA, 25 bp, Artificial
  probe
  misc_feature (1)..(25): SEQ ID NO: 3738; WAN0249OG; Start 51; Stop 75
tgaaaccctttcctacttttgatag

SEQ ID NO: 362473 - DNA, 25 bp, Artificial
  probe
  misc_feature (1)..(25): SEQ ID NO: 3738; WAN0249OG; Start 44; Stop 68
attttcttgaaaccctttcctactt

SEQ ID NO: 362474 - DNA, 25 bp, Artificial
  probe
  misc_feature (1)..(25): SEQ ID NO: 3738; WAN0249OG; Start 43; Stop 67
aattttcttgaaaccctttcctact

SEQ ID NO: 362475 - DNA, 25 bp, Artificial
  probe
  misc_feature (1)..(25): SEQ ID NO: 3738; WAN0249OG; Start 52; Stop 76
gaaaccctttcctacttttgataga

SEQ ID NO: 362476 - DNA, 25 bp, Artificial
  probe
  misc_feature (1)..(25): SEQ ID NO: 3738; WAN0249OG; Start 50; Stop 74
ttgaaaccctttcctacttttgata

SEQ ID NO: 362477 - DNA, 25 bp, Artificial
  probe
  misc_feature (1)..(25): SEQ ID NO: 3738; WAN0249OG; Start 36; Stop 60
tccaatcaattttcttgaaaccctt

SEQ ID NO: 362478 - DNA, 25 bp, Artificial
  probe
  misc_feature (1)..(25): SEQ ID NO: 3738; WAN0249OG; Start 35; Stop 59
ttccaatcaattttcttgaaaccct

SEQ ID NO: 362479 - DNA, 25 bp, Artificial
  probe
  misc_feature (1)..(25): SEQ ID NO: 3738; WAN0249OG; Start 40; Stop 64
atcaattttcttgaaaccctttcct

SEQ ID NO: 362480 - DNA, 25 bp, Artificial
  probe
  misc_feature (1)..(25): SEQ ID NO: 3738; WAN0249OG; Start 37; Stop 61
ccaatcaattttcttgaaacccttt

SEQ ID NO: 362481 - DNA, 25 bp, Artificial
  probe
  misc_feature (1)..(25): SEQ ID NO: 3738; WAN0249OG; Start 34; Stop 58
tttccaatcaattttcttgaaaccc

SEQ ID NO: 362482 - DNA, 25 bp, Artificial
  probe
  misc_feature (1)..(25): SEQ ID NO: 3738; WAN0249OG; Start 41; Stop 65
tcaattttcttgaaaccctttccta

SEQ ID NO: 362483 - DNA, 25 bp, Artificial
  probe
  misc_feature (1)..(25): SEQ ID NO: 3738; WAN0249OG; Start 39; Stop 63
aatcaattttcttgaaaccctttcc

SEQ ID NO: 362484 - DNA, 25 bp, Artificial
  probe
  misc_feature (1)..(25): SEQ ID NO: 3738; WAN0249OG; Start 38; Stop 62
caatcaattttcttgaaaccctttc

SEQ ID NO: 362485 - DNA, 25 bp, Artificial
  probe
  misc_feature (1)..(25): SEQ ID NO: 3738; WAN0249OG; Start 33; Stop 57
atttccaatcaattttcttgaaacc

SEQ ID NO: 362486 - DNA, 25 bp, Artificial
  probe
  misc_feature (1)..(25): SEQ ID NO: 3738; WAN0249OG; Start 57; Stop 81
cctttcctacttttgatagactagt

SEQ ID NO: 362487 - DNA, 25 bp, Artificial
  probe
  misc_feature (1)..(25): SEQ ID NO: 3738; WAN0249OG; Start 32; Stop 56
aatttccaatcaattttcttgaaac

SEQ ID NO: 362488 - DNA, 25 bp, Artificial
  probe
  misc_feature (1)..(25): SEQ ID NO: 3738; WAN0249OG; Start 61; Stop 85
tcctacttttgatagactagtatct

SEQ ID NO: 362489 - DNA, 25 bp, Artificial
  probe
  misc_feature (1)..(25): SEQ ID NO: 3738; WAN0249OG; Start 58; Stop 82
ctttcctacttttgatagactagta

SEQ ID NO: 362490 - DNA, 25 bp, Artificial
  probe
  misc_feature (1)..(25): SEQ ID NO: 3738; WAN0249OG; Start 60; Stop 84
ttcctacttttgatagactagtatc

SEQ ID NO: 362491 - DNA, 25 bp, Artificial
  probe
  misc_feature (1)..(25): SEQ ID NO: 3738; WAN0249OG; Start 31; Stop 55
aaatttccaatcaattttcttgaaa

SEQ ID NO: 362492 - DNA, 25 bp, Artificial
  probe
  misc_feature (1)..(25): SEQ ID NO: 3739; WAN0249HB; Start 44; Stop 68
caataaaatagccactttcttccct

SEQ ID NO: 362493 - DNA, 25 bp, Artificial
  probe
  misc_feature (1)..(25): SEQ ID NO: 3739; WAN0249HB; Start 43; Stop 67
tcaataaaatagccactttcttccc

SEQ ID NO: 362494 - DNA, 25 bp, Artificial
  probe
  misc_feature (1)..(25): SEQ ID NO: 3739; WAN0249HB; Start 6; Stop 30
tcctcactttatctattataccaca

SEQ ID NO: 362495 - DNA, 25 bp, Artificial
  probe
  misc_feature (1)..(25): SEQ ID NO: 3739; WAN0249HB; Start 45; Stop 69
aataaaatagccactttcttcccta

SEQ ID NO: 362496 - DNA, 25 bp, Artificial
  probe
  misc_feature (1)..(25): SEQ ID NO: 3739; WAN0249HB; Start 42; Stop 66
ttcaataaaatagccactttcttcc

SEQ ID NO: 362497 - DNA, 25 bp, Artificial
  probe
  misc_feature (1)..(25): SEQ ID NO: 3739; WAN0249HB; Start 7; Stop 31
cctcactttatctattataccacaa

SEQ ID NO: 362498 - DNA, 25 bp, Artificial
  probe
  misc_feature (1)..(25): SEQ ID NO: 3739; WAN0249HB; Start 5; Stop 29
ttcctcactttatctattataccac

SEQ ID NO: 362499 - DNA, 25 bp, Artificial
  probe
  misc_feature (1)..(25): SEQ ID NO: 3739; WAN0249HB; Start 46; Stop 70
ataaaatagccactttcttccctat

SEQ ID NO: 362500 - DNA, 25 bp, Artificial
  probe
  misc_feature (1)..(25): SEQ ID NO: 3739; WAN0249HB; Start 41; Stop 65
tttcaataaaatagccactttcttc

SEQ ID NO: 362501 - DNA, 25 bp, Artificial
  probe
  misc_feature (1)..(25): SEQ ID NO: 3739; WAN0249HB; Start 25; Stop 49
accacaaaagggaaattttcaataa

SEQ ID NO: 362502 - DNA, 25 bp, Artificial
  probe
  misc_feature (1)..(25): SEQ ID NO: 3739; WAN0249HB; Start 23; Stop 47
ataccacaaaagggaaattttcaat

SEQ ID NO: 362503 - DNA, 25 bp, Artificial
  probe
  misc_feature (1)..(25): SEQ ID NO: 3739; WAN0249HB; Start 17; Stop 41
tctattataccacaaaagggaaatt

SEQ ID NO: 362504 - DNA, 25 bp, Artificial
  probe
  misc_feature (1)..(25): SEQ ID NO: 3739; WAN0249HB; Start 16; Stop 40
atctattataccacaaaagggaaat

SEQ ID NO: 362505 - DNA, 25 bp, Artificial
  probe
  misc_feature (1)..(25): SEQ ID NO: 3739; WAN0249HB; Start 24; Stop 48
taccacaaaagggaaattttcaata

SEQ ID NO: 362506 - DNA, 25 bp, Artificial
  probe
  misc_feature (1)..(25): SEQ ID NO: 3739; WAN0249HB; Start 22; Stop 46
tataccacaaaagggaaattttcaa

SEQ ID NO: 362507 - DNA, 25 bp, Artificial
  probe
  misc_feature (1)..(25): SEQ ID NO: 3739; WAN0249HB; Start 21; Stop 45
ttataccacaaaagggaaattttca

SEQ ID NO: 362508 - DNA, 25 bp, Artificial
  probe
  misc_feature (1)..(25): SEQ ID NO: 3739; WAN0249HB; Start 26; Stop 50
ccacaaaagggaaattttcaataaa

SEQ ID NO: 362509 - DNA, 25 bp, Artificial
  probe
  misc_feature (1)..(25): SEQ ID NO: 3739; WAN0249HB; Start 15; Stop 39
tatctattataccacaaaagggaaa

SEQ ID NO: 362510 - DNA, 25 bp, Artificial
  probe
  misc_feature (1)..(25): SEQ ID NO: 3739; WAN0249HB; Start 14; Stop 38
ttatctattataccacaaaagggaa

SEQ ID NO: 362511 - DNA, 25 bp, Artificial
  probe
  misc_feature (1)..(25): SEQ ID NO: 3739; WAN0249HB; Start 13; Stop 37
tttatctattataccacaaaaggga

SEQ ID NO: 362512 - DNA, 25 bp, Artificial
  probe
  misc_feature (1)..(25): SEQ ID NO: 3739; WAN0249HB; Start 40; Stop 64
ttttcaataaaatagccactttctt

SEQ ID NO: 362513 - DNA, 25 bp, Artificial
  probe
  misc_feature (1)..(25): SEQ ID NO: 3739; WAN0249HB; Start 20; Stop 44
attataccacaaaagggaaattttc

SEQ ID NO: 362514 - DNA, 25 bp, Artificial
  probe
  misc_feature (1)..(25): SEQ ID NO: 3739; WAN0249HB; Start 34; Stop 58
gggaaattttcaataaaatagccac

SEQ ID NO: 362515 - DNA, 25 bp, Artificial
  probe
  misc_feature (1)..(25): SEQ ID NO: 3739; WAN0249HB; Start 33; Stop 57
agggaaattttcaataaaatagcca

SEQ ID NO: 362516 - DNA, 25 bp, Artificial
  probe
  misc_feature (1)..(25): SEQ ID NO: 3739; WAN0249HB; Start 18; Stop 42
ctattataccacaaaagggaaattt

SEQ ID NO: 362517 - DNA, 25 bp, Artificial
  probe
  misc_feature (1)..(25): SEQ ID NO: 3739; WAN0249HB; Start 27; Stop 51
cacaaaagggaaattttcaataaaa

SEQ ID NO: 362518 - DNA, 25 bp, Artificial
  probe
  misc_feature (1)..(25): SEQ ID NO: 3739; WAN0249HB; Start 35; Stop 59
ggaaattttcaataaaatagccact

SEQ ID NO: 362519 - DNA, 25 bp, Artificial
  probe
  misc_feature (1)..(25): SEQ ID NO: 3739; WAN0249HB; Start 32; Stop 56
aagggaaattttcaataaaatagcc

SEQ ID NO: 362520 - DNA, 25 bp, Artificial
  probe
  misc_feature (1)..(25): SEQ ID NO: 3739; WAN0249HB; Start 12; Stop 36
ctttatctattataccacaaaaggg

SEQ ID NO: 362521 - DNA, 25 bp, Artificial
  probe
  misc_feature (1)..(25): SEQ ID NO: 3739; WAN0249HB; Start 39; Stop 63
attttcaataaaatagccactttct

SEQ ID NO: 362522 - DNA, 25 bp, Artificial
  probe
  misc_feature (1)..(25): SEQ ID NO: 3739; WAN0249HB; Start 19; Stop 43
tattataccacaaaagggaaatttt

SEQ ID NO: 362523 - DNA, 25 bp, Artificial
  probe
  misc_feature (1)..(25): SEQ ID NO: 3739; WAN0249HB; Start 38; Stop 62
aattttcaataaaatagccactttc

SEQ ID NO: 362524 - DNA, 25 bp, Artificial
  probe
  misc_feature (1)..(25): SEQ ID NO: 3739; WAN0249HB; Start 36; Stop 60
gaaattttcaataaaatagccactt

SEQ ID NO: 362525 - DNA, 25 bp, Artificial
  probe
  misc_feature (1)..(25): SEQ ID NO: 3739; WAN0249HB; Start 31; Stop 55
aaagggaaattttcaataaaatagc

SEQ ID NO: 362526 - DNA, 25 bp, Artificial
  probe
  misc_feature (1)..(25): SEQ ID NO: 3740; WAN0249Y5; Start 159; Stop 183
atggtagaatgctatgtgactagaa

SEQ ID NO: 362527 - DNA, 25 bp, Artificial
  probe
  misc_feature (1)..(25): SEQ ID NO: 3740; WAN0249Y5; Start 158; Stop 182
aatggtagaatgctatgtgactaga

SEQ ID NO: 362528 - DNA, 25 bp, Artificial
  probe
  misc_feature (1)..(25): SEQ ID NO: 3740; WAN0249Y5; Start 157; Stop 181
taatggtagaatgctatgtgactag

SEQ ID NO: 362529 - DNA, 25 bp, Artificial
  probe
  misc_feature (1)..(25): SEQ ID NO: 3740; WAN0249Y5; Start 154; Stop 178
gtataatggtagaatgctatgtgac

SEQ ID NO: 362530 - DNA, 25 bp, Artificial
  probe
  misc_feature (1)..(25): SEQ ID NO: 3740; WAN0249Y5; Start 152; Stop 176
cagtataatggtagaatgctatgtg

SEQ ID NO: 362531 - DNA, 25 bp, Artificial
  probe
  misc_feature (1)..(25): SEQ ID NO: 3740; WAN0249Y5; Start 156; Stop 180
ataatggtagaatgctatgtgacta

SEQ ID NO: 362532 - DNA, 25 bp, Artificial
  probe
  misc_feature (1)..(25): SEQ ID NO: 3740; WAN0249Y5; Start 155; Stop 179
tataatggtagaatgctatgtgact

SEQ ID NO: 362533 - DNA, 25 bp, Artificial
  probe
  misc_feature (1)..(25): SEQ ID NO: 3740; WAN0249Y5; Start 153; Stop 177
agtataatggtagaatgctatgtga

SEQ ID NO: 362534 - DNA, 25 bp, Artificial
  probe
  misc_feature (1)..(25): SEQ ID NO: 3740; WAN0249Y5; Start 164; Stop 188
agaatgctatgtgactagaaaggaa

SEQ ID NO: 362535 - DNA, 25 bp, Artificial
  probe
  misc_feature (1)..(25): SEQ ID NO: 3740; WAN0249Y5; Start 165; Stop 189
gaatgctatgtgactagaaaggaag

SEQ ID NO: 362536 - DNA, 25 bp, Artificial
  probe
  misc_feature (1)..(25): SEQ ID NO: 3740; WAN0249Y5; Start 160; Stop 184
tggtagaatgctatgtgactagaaa

SEQ ID NO: 362537 - DNA, 25 bp, Artificial
  probe
  misc_feature (1)..(25): SEQ ID NO: 3740; WAN0249Y5; Start 69; Stop 93
tcccttgagtagtaccattatacca

SEQ ID NO: 362538 - DNA, 25 bp, Artificial
  probe
  misc_feature (1)..(25): SEQ ID NO: 3740; WAN0249Y5; Start 163; Stop 187
tagaatgctatgtgactagaaagga

SEQ ID NO: 362539 - DNA, 25 bp, Artificial
  probe
  misc_feature (1)..(25): SEQ ID NO: 3740; WAN0249Y5; Start 162; Stop 186
gtagaatgctatgtgactagaaagg

SEQ ID NO: 362540 - DNA, 25 bp, Artificial
  probe
  misc_feature (1)..(25): SEQ ID NO: 3740; WAN0249Y5; Start 161; Stop 185
ggtagaatgctatgtgactagaaag

SEQ ID NO: 362541 - DNA, 25 bp, Artificial
  probe
  misc_feature (1)..(25): SEQ ID NO: 3740; WAN0249Y5; Start 151; Stop 175
ccagtataatggtagaatgctatgt

SEQ ID NO: 362542 - DNA, 25 bp, Artificial
  probe
  misc_feature (1)..(25): SEQ ID NO: 3740; WAN0249Y5; Start 169; Stop 193
gctatgtgactagaaaggaagttga

SEQ ID NO: 362543 - DNA, 25 bp, Artificial
  probe
  misc_feature (1)..(25): SEQ ID NO: 3740; WAN0249Y5; Start 167; Stop 191
atgctatgtgactagaaaggaagtt

SEQ ID NO: 362544 - DNA, 25 bp, Artificial
  probe
  misc_feature (1)..(25): SEQ ID NO: 3740; WAN0249Y5; Start 166; Stop 190
aatgctatgtgactagaaaggaagt

SEQ ID NO: 362545 - DNA, 25 bp, Artificial
  probe
  misc_feature (1)..(25): SEQ ID NO: 3740; WAN0249Y5; Start 168; Stop 192
tgctatgtgactagaaaggaagttg

SEQ ID NO: 362546 - DNA, 25 bp, Artificial
  probe
  misc_feature (1)..(25): SEQ ID NO: 3740; WAN0249Y5; Start 70; Stop 94
cccttgagtagtaccattataccaa

SEQ ID NO: 362547 - DNA, 25 bp, Artificial
  probe
  misc_feature (1)..(25): SEQ ID NO: 3740; WAN0249Y5; Start 34; Stop 58
gaatgacgacactatcacaggtttc

SEQ ID NO: 362548 - DNA, 25 bp, Artificial
  probe
  misc_feature (1)..(25): SEQ ID NO: 3740; WAN0249Y5; Start 68; Stop 92
ctcccttgagtagtaccattatacc

SEQ ID NO: 362549 - DNA, 25 bp, Artificial
  probe
  misc_feature (1)..(25): SEQ ID NO: 3740; WAN0249Y5; Start 35; Stop 59
aatgacgacactatcacaggtttct

SEQ ID NO: 362550 - DNA, 25 bp, Artificial
  probe
  misc_feature (1)..(25): SEQ ID NO: 3740; WAN0249Y5; Start 28; Stop 52
aattcggaatgacgacactatcaca

SEQ ID NO: 362551 - DNA, 25 bp, Artificial
  probe
  misc_feature (1)..(25): SEQ ID NO: 3740; WAN0249Y5; Start 71; Stop 95
ccttgagtagtaccattataccaaa

SEQ ID NO: 362552 - DNA, 25 bp, Artificial
  probe
  misc_feature (1)..(25): SEQ ID NO: 3740; WAN0249Y5; Start 29; Stop 53
attcggaatgacgacactatcacag

SEQ ID NO: 362553 - DNA, 25 bp, Artificial
  probe
  misc_feature (1)..(25): SEQ ID NO: 3740; WAN0249Y5; Start 33; Stop 57
ggaatgacgacactatcacaggttt

SEQ ID NO: 362554 - DNA, 25 bp, Artificial
  probe
  misc_feature (1)..(25): SEQ ID NO: 3740; WAN0249Y5; Start 36; Stop 60
atgacgacactatcacaggtttctg

SEQ ID NO: 362555 - DNA, 25 bp, Artificial
  probe
  misc_feature (1)..(25): SEQ ID NO: 3740; WAN0249Y5; Start 27; Stop 51
aaattcggaatgacgacactatcac

SEQ ID NO: 362556 - DNA, 25 bp, Artificial
  probe
  misc_feature (1)..(25): SEQ ID NO: 3740; WAN0249Y5; Start 32; Stop 56
cggaatgacgacactatcacaggtt

SEQ ID NO: 362557 - DNA, 25 bp, Artificial
  probe
  misc_feature (1)..(25): SEQ ID NO: 3740; WAN0249Y5; Start 17; Stop 41
tttcagcataaaattcggaatgacg

SEQ ID NO: 362558 - DNA, 25 bp, Artificial
  probe
  misc_feature (1)..(25): SEQ ID NO: 3740; WAN0249Y5; Start 10; Stop 34
gcatacttttcagcataaaattcgg

SEQ ID NO: 362559 - DNA, 25 bp, Artificial
  probe
  misc_feature (1)..(25): SEQ ID NO: 3742; WAN024CHU; Start 36; Stop 60
aaagcttgatcgtcggttcaaatcc

SEQ ID NO: 362560 - DNA, 25 bp, Artificial
  probe
  misc_feature (1)..(25): SEQ ID NO: 3742; WAN024CHU; Start 35; Stop 59
aaaagcttgatcgtcggttcaaatc

SEQ ID NO: 362561 - DNA, 25 bp, Artificial
  probe
  misc_feature (1)..(25): SEQ ID NO: 3742; WAN024CHU; Start 34; Stop 58
caaaagcttgatcgtcggttcaaat

SEQ ID NO: 362562 - DNA, 25 bp, Artificial
  probe
  misc_feature (1)..(25): SEQ ID NO: 3742; WAN024CHU; Start 33; Stop 57
gcaaaagcttgatcgtcggttcaaa

SEQ ID NO: 362563 - DNA, 25 bp, Artificial
  probe
  misc_feature (1)..(25): SEQ ID NO: 3744; WAN024A7M; Start 123; Stop 147
tacaagaagtgagatggagaaggat

SEQ ID NO: 362564 - DNA, 25 bp, Artificial
  probe
  misc_feature (1)..(25): SEQ ID NO: 3744; WAN024A7M; Start 124; Stop 148
acaagaagtgagatggagaaggatg

SEQ ID NO: 362565 - DNA, 25 bp, Artificial
  probe
  misc_feature (1)..(25): SEQ ID NO: 3744; WAN024A7M; Start 122; Stop 146
gtacaagaagtgagatggagaagga

SEQ ID NO: 362566 - DNA, 25 bp, Artificial
  probe
  misc_feature (1)..(25): SEQ ID NO: 3744; WAN024A7M; Start 120; Stop 144
tggtacaagaagtgagatggagaag

SEQ ID NO: 362567 - DNA, 25 bp, Artificial
  probe
  misc_feature (1)..(25): SEQ ID NO: 3744; WAN024A7M; Start 119; Stop 143
ttggtacaagaagtgagatggagaa

SEQ ID NO: 362568 - DNA, 25 bp, Artificial
  probe
  misc_feature (1)..(25): SEQ ID NO: 3744; WAN024A7M; Start 125; Stop 149
caagaagtgagatggagaaggatgg

SEQ ID NO: 362569 - DNA, 25 bp, Artificial
  probe
  misc_feature (1)..(25): SEQ ID NO: 3744; WAN024A7M; Start 121; Stop 145
ggtacaagaagtgagatggagaagg

SEQ ID NO: 362570 - DNA, 25 bp, Artificial
  probe
  misc_feature (1)..(25): SEQ ID NO: 3744; WAN024A7M; Start 42; Stop 66
gctatggcgaatttcctattattaa

SEQ ID NO: 362571 - DNA, 25 bp, Artificial
  probe
  misc_feature (1)..(25): SEQ ID NO: 3744; WAN024A7M; Start 126; Stop 150
aagaagtgagatggagaaggatggc

SEQ ID NO: 362572 - DNA, 25 bp, Artificial
  probe
  misc_feature (1)..(25): SEQ ID NO: 3744; WAN024A7M; Start 114; Stop 138
gtgacttggtacaagaagtgagatg

SEQ ID NO: 362573 - DNA, 25 bp, Artificial
  probe
  misc_feature (1)..(25): SEQ ID NO: 3744; WAN024A7M; Start 90; Stop 114
tttacctcctcatgtcacaattcgg

SEQ ID NO: 362574 - DNA, 25 bp, Artificial
  probe
  misc_feature (1)..(25): SEQ ID NO: 3744; WAN024A7M; Start 158; Stop 182
ctcctctcctctcacttttacttta

SEQ ID NO: 362575 - DNA, 25 bp, Artificial
  probe
  misc_feature (1)..(25): SEQ ID NO: 3744; WAN024A7M; Start 157; Stop 181
actcctctcctctcacttttacttt

SEQ ID NO: 362576 - DNA, 25 bp, Artificial
  probe
  misc_feature (1)..(25): SEQ ID NO: 3744; WAN024A7M; Start 118; Stop 142
cttggtacaagaagtgagatggaga

SEQ ID NO: 362577 - DNA, 25 bp, Artificial
  probe
  misc_feature (1)..(25): SEQ ID NO: 3744; WAN024A7M; Start 156; Stop 180
gactcctctcctctcacttttactt

SEQ ID NO: 362578 - DNA, 25 bp, Artificial
  probe
  misc_feature (1)..(25): SEQ ID NO: 3744; WAN024A7M; Start 117; Stop 141
acttggtacaagaagtgagatggag

SEQ ID NO: 362579 - DNA, 25 bp, Artificial
  probe
  misc_feature (1)..(25): SEQ ID NO: 3744; WAN024A7M; Start 116; Stop 140
gacttggtacaagaagtgagatgga

SEQ ID NO: 362580 - DNA, 25 bp, Artificial
  probe
  misc_feature (1)..(25): SEQ ID NO: 3744; WAN024A7M; Start 159; Stop 183
tcctctcctctcacttttactttat

SEQ ID NO: 362581 - DNA, 25 bp, Artificial
  probe
  misc_feature (1)..(25): SEQ ID NO: 3744; WAN024A7M; Start 107; Stop 131
caattcggtgacttggtacaagaag

SEQ ID NO: 362582 - DNA, 25 bp, Artificial
  probe
  misc_feature (1)..(25): SEQ ID NO: 3744; WAN024A7M; Start 150; Stop 174
ctcactgactcctctcctctcactt

SEQ ID NO: 362583 - DNA, 25 bp, Artificial
  probe
  misc_feature (1)..(25): SEQ ID NO: 3744; WAN024A7M; Start 115; Stop 139
tgacttggtacaagaagtgagatgg

SEQ ID NO: 362584 - DNA, 25 bp, Artificial
  probe
  misc_feature (1)..(25): SEQ ID NO: 3744; WAN024A7M; Start 113; Stop 137
ggtgacttggtacaagaagtgagat

SEQ ID NO: 362585 - DNA, 25 bp, Artificial
  probe
  misc_feature (1)..(25): SEQ ID NO: 3744; WAN024A7M; Start 127; Stop 151
agaagtgagatggagaaggatggct

SEQ ID NO: 362586 - DNA, 25 bp, Artificial
  probe
  misc_feature (1)..(25): SEQ ID NO: 3744; WAN024A7M; Start 108; Stop 132
aattcggtgacttggtacaagaagt

SEQ ID NO: 362587 - DNA, 25 bp, Artificial
  probe
  misc_feature (1)..(25): SEQ ID NO: 3744; WAN024A7M; Start 128; Stop 152
gaagtgagatggagaaggatggctc

SEQ ID NO: 362588 - DNA, 25 bp, Artificial
  probe
  misc_feature (1)..(25): SEQ ID NO: 3744; WAN024A7M; Start 91; Stop 115
ttacctcctcatgtcacaattcggt

SEQ ID NO: 362589 - DNA, 25 bp, Artificial
  probe
  misc_feature (1)..(25): SEQ ID NO: 3744; WAN024A7M; Start 160; Stop 184
cctctcctctcacttttactttatt

SEQ ID NO: 362590 - DNA, 25 bp, Artificial
  probe
  misc_feature (1)..(25): SEQ ID NO: 3744; WAN024A7M; Start 106; Stop 130
acaattcggtgacttggtacaagaa

SEQ ID NO: 362591 - DNA, 25 bp, Artificial
  probe
  misc_feature (1)..(25): SEQ ID NO: 3744; WAN024A7M; Start 89; Stop 113
ttttacctcctcatgtcacaattcg

SEQ ID NO: 362592 - DNA, 25 bp, Artificial
  probe
  misc_feature (1)..(25): SEQ ID NO: 3744; WAN024A7M; Start 154; Stop 178
ctgactcctctcctctcacttttac

SEQ ID NO: 362593 - DNA, 25 bp, Artificial
  probe
  misc_feature (1)..(25): SEQ ID NO: 3744; WAN024A7M; Start 109; Stop 133
attcggtgacttggtacaagaagtg

SEQ ID NO: 362594 - DNA, 25 bp, Artificial
  probe
  misc_feature (1)..(25): SEQ ID NO: 3744; WAN024A7M; Start 155; Stop 179
tgactcctctcctctcacttttact

SEQ ID NO: 362595 - DNA, 25 bp, Artificial
  probe
  misc_feature (1)..(25): SEQ ID NO: 3744; WAN024A7M; Start 153; Stop 177
actgactcctctcctctcactttta

SEQ ID NO: 362596 - DNA, 25 bp, Artificial
  probe
  misc_feature (1)..(25): SEQ ID NO: 3745; WAN024F9T; Start 13; Stop 37
cagttggtagagcaatggattgaag

SEQ ID NO: 362597 - DNA, 25 bp, Artificial
  probe
  misc_feature (1)..(25): SEQ ID NO: 3745; WAN024F9T; Start 12; Stop 36
tcagttggtagagcaatggattgaa

SEQ ID NO: 362598 - DNA, 25 bp, Artificial
  probe
  misc_feature (1)..(25): SEQ ID NO: 3745; WAN024F9T; Start 11; Stop 35
ctcagttggtagagcaatggattga

SEQ ID NO: 362599 - DNA, 25 bp, Artificial
  probe
  misc_feature (1)..(25): SEQ ID NO: 3745; WAN024F9T; Start 14; Stop 38
agttggtagagcaatggattgaagc

SEQ ID NO: 362600 - DNA, 25 bp, Artificial
  probe
  misc_feature (1)..(25): SEQ ID NO: 3745; WAN024F9T; Start 15; Stop 39
gttggtagagcaatggattgaagct

SEQ ID NO: 362601 - DNA, 25 bp, Artificial
  probe
  misc_feature (1)..(25): SEQ ID NO: 3746; WAN0249QZ; Start 46; Stop 70
ctgattgggtgactcctaagtttag

SEQ ID NO: 362602 - DNA, 25 bp, Artificial
  probe
  misc_feature (1)..(25): SEQ ID NO: 3746; WAN0249QZ; Start 45; Stop 69
cctgattgggtgactcctaagttta

SEQ ID NO: 362603 - DNA, 25 bp, Artificial
  probe
  misc_feature (1)..(25): SEQ ID NO: 3746; WAN0249QZ; Start 48; Stop 72
gattgggtgactcctaagtttagca

SEQ ID NO: 362604 - DNA, 25 bp, Artificial
  probe
  misc_feature (1)..(25): SEQ ID NO: 3746; WAN0249QZ; Start 47; Stop 71
tgattgggtgactcctaagtttagc

SEQ ID NO: 362605 - DNA, 25 bp, Artificial
  probe
  misc_feature (1)..(25): SEQ ID NO: 3746; WAN0249QZ; Start 49; Stop 73
attgggtgactcctaagtttagcac

SEQ ID NO: 362606 - DNA, 25 bp, Artificial
  probe
  misc_feature (1)..(25): SEQ ID NO: 3746; WAN0249QZ; Start 50; Stop 74
ttgggtgactcctaagtttagcact

SEQ ID NO: 362607 - DNA, 25 bp, Artificial
  probe
  misc_feature (1)..(25): SEQ ID NO: 3746; WAN0249QZ; Start 44; Stop 68
acctgattgggtgactcctaagttt

SEQ ID NO: 362608 - DNA, 25 bp, Artificial
  probe
  misc_feature (1)..(25): SEQ ID NO: 3746; WAN0249QZ; Start 53; Stop 77
ggtgactcctaagtttagcacttat

SEQ ID NO: 362609 - DNA, 25 bp, Artificial
  probe
  misc_feature (1)..(25): SEQ ID NO: 3746; WAN0249QZ; Start 58; Stop 82
ctcctaagtttagcacttatgtggt

SEQ ID NO: 362610 - DNA, 25 bp, Artificial
  probe
  misc_feature (1)..(25): SEQ ID NO: 3746; WAN0249QZ; Start 57; Stop 81
actcctaagtttagcacttatgtgg

SEQ ID NO: 362611 - DNA, 25 bp, Artificial
  probe
  misc_feature (1)..(25): SEQ ID NO: 3746; WAN0249QZ; Start 55; Stop 79
tgactcctaagtttagcacttatgt

SEQ ID NO: 362612 - DNA, 25 bp, Artificial
  probe
  misc_feature (1)..(25): SEQ ID NO: 3746; WAN0249QZ; Start 59; Stop 83
tcctaagtttagcacttatgtggta

SEQ ID NO: 362613 - DNA, 25 bp, Artificial
  probe
  misc_feature (1)..(25): SEQ ID NO: 3746; WAN0249QZ; Start 56; Stop 80
gactcctaagtttagcacttatgtg

SEQ ID NO: 362614 - DNA, 25 bp, Artificial
  probe
  misc_feature (1)..(25): SEQ ID NO: 3746; WAN0249QZ; Start 54; Stop 78
gtgactcctaagtttagcacttatg

SEQ ID NO: 362615 - DNA, 25 bp, Artificial
  probe
  misc_feature (1)..(25): SEQ ID NO: 3746; WAN0249QZ; Start 51; Stop 75
tgggtgactcctaagtttagcactt

SEQ ID NO: 362616 - DNA, 25 bp, Artificial
  probe
  misc_feature (1)..(25): SEQ ID NO: 3746; WAN0249QZ; Start 60; Stop 84
cctaagtttagcacttatgtggtat

SEQ ID NO: 362617 - DNA, 25 bp, Artificial
  probe
  misc_feature (1)..(25): SEQ ID NO: 3746; WAN0249QZ; Start 52; Stop 76
gggtgactcctaagtttagcactta

SEQ ID NO: 362618 - DNA, 25 bp, Artificial
  probe
  misc_feature (1)..(25): SEQ ID NO: 3746; WAN0249QZ; Start 64; Stop 88
agtttagcacttatgtggtataata

SEQ ID NO: 362619 - DNA, 25 bp, Artificial
  probe
  misc_feature (1)..(25): SEQ ID NO: 3746; WAN0249QZ; Start 63; Stop 87
aagtttagcacttatgtggtataat

SEQ ID NO: 362620 - DNA, 25 bp, Artificial
  probe
  misc_feature (1)..(25): SEQ ID NO: 3746; WAN0249QZ; Start 61; Stop 85
ctaagtttagcacttatgtggtata

SEQ ID NO: 362621 - DNA, 25 bp, Artificial
  probe
  misc_feature (1)..(25): SEQ ID NO: 3746; WAN0249QZ; Start 62; Stop 86
taagtttagcacttatgtggtataa

SEQ ID NO: 362622 - DNA, 25 bp, Artificial
  probe
  misc_feature (1)..(25): SEQ ID NO: 3747; WAN0249JO; Start 113; Stop 137
acgaatacaaaatctatgaggaggt

SEQ ID NO: 362623 - DNA, 25 bp, Artificial
  probe
  misc_feature (1)..(25): SEQ ID NO: 3747; WAN0249JO; Start 112; Stop 136
aacgaatacaaaatctatgaggagg

SEQ ID NO: 362624 - DNA, 25 bp, Artificial
  probe
  misc_feature (1)..(25): SEQ ID NO: 3747; WAN0249JO; Start 106; Stop 130
cggctaaacgaatacaaaatctatg

SEQ ID NO: 362625 - DNA, 25 bp, Artificial
  probe
  misc_feature (1)..(25): SEQ ID NO: 3747; WAN0249JO; Start 114; Stop 138
cgaatacaaaatctatgaggaggta

SEQ ID NO: 362626 - DNA, 25 bp, Artificial
  probe
  misc_feature (1)..(25): SEQ ID NO: 3747; WAN0249JO; Start 38; Stop 62
gctattgacaaaagtgaaagaatca

SEQ ID NO: 362627 - DNA, 25 bp, Artificial
  probe
  misc_feature (1)..(25): SEQ ID NO: 3747; WAN0249JO; Start 107; Stop 131
ggctaaacgaatacaaaatctatga

SEQ ID NO: 362628 - DNA, 25 bp, Artificial
  probe
  misc_feature (1)..(25): SEQ ID NO: 3747; WAN0249JO; Start 84; Stop 108
tagtaactgatcactttatagccgg

SEQ ID NO: 362629 - DNA, 25 bp, Artificial
  probe
  misc_feature (1)..(25): SEQ ID NO: 3747; WAN0249JO; Start 111; Stop 135
aaacgaatacaaaatctatgaggag

SEQ ID NO: 362630 - DNA, 25 bp, Artificial
  probe
  misc_feature (1)..(25): SEQ ID NO: 3747; WAN0249JO; Start 41; Stop 65
attgacaaaagtgaaagaatcagat

SEQ ID NO: 362631 - DNA, 25 bp, Artificial
  probe
  misc_feature (1)..(25): SEQ ID NO: 3747; WAN0249JO; Start 83; Stop 107
ttagtaactgatcactttatagccg

SEQ ID NO: 362632 - DNA, 25 bp, Artificial
  probe
  misc_feature (1)..(25): SEQ ID NO: 3747; WAN0249JO; Start 43; Stop 67
tgacaaaagtgaaagaatcagatag

SEQ ID NO: 362633 - DNA, 25 bp, Artificial
  probe
  misc_feature (1)..(25): SEQ ID NO: 3747; WAN0249JO; Start 44; Stop 68
gacaaaagtgaaagaatcagataga

SEQ ID NO: 362634 - DNA, 25 bp, Artificial
  probe
  misc_feature (1)..(25): SEQ ID NO: 3747; WAN0249JO; Start 118; Stop 142
tacaaaatctatgaggaggtattca

SEQ ID NO: 362635 - DNA, 25 bp, Artificial
  probe
  misc_feature (1)..(25): SEQ ID NO: 3747; WAN0249JO; Start 49; Stop 73
aagtgaaagaatcagatagaatagt

SEQ ID NO: 362636 - DNA, 25 bp, Artificial
  probe
  misc_feature (1)..(25): SEQ ID NO: 3747; WAN0249JO; Start 42; Stop 66
ttgacaaaagtgaaagaatcagata

SEQ ID NO: 362637 - DNA, 25 bp, Artificial
  probe
  misc_feature (1)..(25): SEQ ID NO: 3747; WAN0249JO; Start 40; Stop 64
tattgacaaaagtgaaagaatcaga

SEQ ID NO: 362638 - DNA, 25 bp, Artificial
  probe
  misc_feature (1)..(25): SEQ ID NO: 3747; WAN0249JO; Start 108; Stop 132
gctaaacgaatacaaaatctatgag

SEQ ID NO: 362639 - DNA, 25 bp, Artificial
  probe
  misc_feature (1)..(25): SEQ ID NO: 3747; WAN0249JO; Start 105; Stop 129
ccggctaaacgaatacaaaatctat

SEQ ID NO: 362640 - DNA, 25 bp, Artificial
  probe
  misc_feature (1)..(25): SEQ ID NO: 3747; WAN0249JO; Start 39; Stop 63
ctattgacaaaagtgaaagaatcag

SEQ ID NO: 362641 - DNA, 25 bp, Artificial
  probe
  misc_feature (1)..(25): SEQ ID NO: 3747; WAN0249JO; Start 45; Stop 69
acaaaagtgaaagaatcagatagaa

SEQ ID NO: 362642 - DNA, 25 bp, Artificial
  probe
  misc_feature (1)..(25): SEQ ID NO: 3747; WAN0249JO; Start 110; Stop 134
taaacgaatacaaaatctatgagga

SEQ ID NO: 362643 - DNA, 25 bp, Artificial
  probe
  misc_feature (1)..(25): SEQ ID NO: 3747; WAN0249JO; Start 109; Stop 133
ctaaacgaatacaaaatctatgagg

SEQ ID NO: 362644 - DNA, 25 bp, Artificial
  probe
  misc_feature (1)..(25): SEQ ID NO: 3747; WAN0249JO; Start 119; Stop 143
acaaaatctatgaggaggtattcat

SEQ ID NO: 362645 - DNA, 25 bp, Artificial
  probe
  misc_feature (1)..(25): SEQ ID NO: 3747; WAN0249JO; Start 82; Stop 106
tttagtaactgatcactttatagcc

SEQ ID NO: 362646 - DNA, 25 bp, Artificial
  probe
  misc_feature (1)..(25): SEQ ID NO: 3747; WAN0249JO; Start 120; Stop 144
caaaatctatgaggaggtattcatc

SEQ ID NO: 362647 - DNA, 25 bp, Artificial
  probe
  misc_feature (1)..(25): SEQ ID NO: 3747; WAN0249JO; Start 46; Stop 70
caaaagtgaaagaatcagatagaat

SEQ ID NO: 362648 - DNA, 25 bp, Artificial
  probe
  misc_feature (1)..(25): SEQ ID NO: 3747; WAN0249JO; Start 117; Stop 141
atacaaaatctatgaggaggtattc

SEQ ID NO: 362649 - DNA, 25 bp, Artificial
  probe
  misc_feature (1)..(25): SEQ ID NO: 3747; WAN0249JO; Start 115; Stop 139
gaatacaaaatctatgaggaggtat

SEQ ID NO: 362650 - DNA, 25 bp, Artificial
  probe
  misc_feature (1)..(25): SEQ ID NO: 3747; WAN0249JO; Start 76; Stop 100
agtatgtttagtaactgatcacttt

SEQ ID NO: 362651 - DNA, 25 bp, Artificial
  probe
  misc_feature (1)..(25): SEQ ID NO: 3747; WAN0249JO; Start 74; Stop 98
aaagtatgtttagtaactgatcact

SEQ ID NO: 362652 - DNA, 25 bp, Artificial
  probe
  misc_feature (1)..(25): SEQ ID NO: 3747; WAN0249JO; Start 81; Stop 105
gtttagtaactgatcactttatagc

SEQ ID NO: 362653 - DNA, 25 bp, Artificial
  probe
  misc_feature (1)..(25): SEQ ID NO: 3747; WAN0249JO; Start 75; Stop 99
aagtatgtttagtaactgatcactt

SEQ ID NO: 362654 - DNA, 25 bp, Artificial
  probe
  misc_feature (1)..(25): SEQ ID NO: 3747; WAN0249JO; Start 116; Stop 140
aatacaaaatctatgaggaggtatt

SEQ ID NO: 362655 - DNA, 25 bp, Artificial
  probe
  misc_feature (1)..(25): SEQ ID NO: 3748; WAN024AMB; Start 201; Stop 225
tttcaaagactgtttaggattgggt

SEQ ID NO: 362656 - DNA, 25 bp, Artificial
  probe
  misc_feature (1)..(25): SEQ ID NO: 3748; WAN024AMB; Start 202; Stop 226
ttcaaagactgtttaggattgggtg

SEQ ID NO: 362657 - DNA, 25 bp, Artificial
  probe
  misc_feature (1)..(25): SEQ ID NO: 3748; WAN024AMB; Start 105; Stop 129
ttgtcattgaaatgtcttgaattgc

SEQ ID NO: 362658 - DNA, 25 bp, Artificial
  probe
  misc_feature (1)..(25): SEQ ID NO: 3748; WAN024AMB; Start 106; Stop 130
tgtcattgaaatgtcttgaattgcg

SEQ ID NO: 362659 - DNA, 25 bp, Artificial
  probe
  misc_feature (1)..(25): SEQ ID NO: 3748; WAN024AMB; Start 28; Stop 52
agtcttacttctggcaactgtgttt

SEQ ID NO: 362660 - DNA, 25 bp, Artificial
  probe
  misc_feature (1)..(25): SEQ ID NO: 3748; WAN024AMB; Start 104; Stop 128
attgtcattgaaatgtcttgaattg

SEQ ID NO: 362661 - DNA, 25 bp, Artificial
  probe
  misc_feature (1)..(25): SEQ ID NO: 3748; WAN024AMB; Start 200; Stop 224
ttttcaaagactgtttaggattggg

SEQ ID NO: 362662 - DNA, 25 bp, Artificial
  probe
  misc_feature (1)..(25): SEQ ID NO: 3748; WAN024AMB; Start 40; Stop 64
ggcaactgtgttttgatactgttag

SEQ ID NO: 362663 - DNA, 25 bp, Artificial
  probe
  misc_feature (1)..(25): SEQ ID NO: 3748; WAN024AMB; Start 33; Stop 57
tacttctggcaactgtgttttgata

SEQ ID NO: 362664 - DNA, 25 bp, Artificial
  probe
  misc_feature (1)..(25): SEQ ID NO: 3748; WAN024AMB; Start 195; Stop 219
aggagttttcaaagactgtttagga

SEQ ID NO: 362665 - DNA, 25 bp, Artificial
  probe
  misc_feature (1)..(25): SEQ ID NO: 3748; WAN024AMB; Start 41; Stop 65
gcaactgtgttttgatactgttagt

SEQ ID NO: 362666 - DNA, 25 bp, Artificial
  probe
  misc_feature (1)..(25): SEQ ID NO: 3748; WAN024AMB; Start 232; Stop 256
gggctagaccttttctgttattctt

SEQ ID NO: 362667 - DNA, 25 bp, Artificial
  probe
  misc_feature (1)..(25): SEQ ID NO: 3748; WAN024AMB; Start 196; Stop 220
ggagttttcaaagactgtttaggat

SEQ ID NO: 362668 - DNA, 25 bp, Artificial
  probe
  misc_feature (1)..(25): SEQ ID NO: 3748; WAN024AMB; Start 39; Stop 63
tggcaactgtgttttgatactgtta

SEQ ID NO: 362669 - DNA, 25 bp, Artificial
  probe
  misc_feature (1)..(25): SEQ ID NO: 3748; WAN024AMB; Start 230; Stop 254
ttgggctagaccttttctgttattc

SEQ ID NO: 362670 - DNA, 25 bp, Artificial
  probe
  misc_feature (1)..(25): SEQ ID NO: 3748; WAN024AMB; Start 229; Stop 253
cttgggctagaccttttctgttatt

SEQ ID NO: 362671 - DNA, 25 bp, Artificial
  probe
  misc_feature (1)..(25): SEQ ID NO: 3748; WAN024AMB; Start 199; Stop 223
gttttcaaagactgtttaggattgg

SEQ ID NO: 362672 - DNA, 25 bp, Artificial
  probe
  misc_feature (1)..(25): SEQ ID NO: 3748; WAN024AMB; Start 32; Stop 56
ttacttctggcaactgtgttttgat

SEQ ID NO: 362673 - DNA, 25 bp, Artificial
  probe
  misc_feature (1)..(25): SEQ ID NO: 3748; WAN024AMB; Start 233; Stop 257
ggctagaccttttctgttattcttt

SEQ ID NO: 362674 - DNA, 25 bp, Artificial
  probe
  misc_feature (1)..(25): SEQ ID NO: 3748; WAN024AMB; Start 194; Stop 218
taggagttttcaaagactgtttagg

SEQ ID NO: 362675 - DNA, 25 bp, Artificial
  probe
  misc_feature (1)..(25): SEQ ID NO: 3748; WAN024AMB; Start 231; Stop 255
tgggctagaccttttctgttattct

SEQ ID NO: 362676 - DNA, 25 bp, Artificial
  probe
  misc_feature (1)..(25): SEQ ID NO: 3748; WAN024AMB; Start 35; Stop 59
cttctggcaactgtgttttgatact

SEQ ID NO: 362677 - DNA, 25 bp, Artificial
  probe
  misc_feature (1)..(25): SEQ ID NO: 3748; WAN024AMB; Start 29; Stop 53
gtcttacttctggcaactgtgtttt

SEQ ID NO: 362678 - DNA, 25 bp, Artificial
  probe
  misc_feature (1)..(25): SEQ ID NO: 3748; WAN024AMB; Start 245; Stop 269
tctgttattcttttcttaggaggag

SEQ ID NO: 362679 - DNA, 25 bp, Artificial
  probe
  misc_feature (1)..(25): SEQ ID NO: 3748; WAN024AMB; Start 36; Stop 60
ttctggcaactgtgttttgatactg

SEQ ID NO: 362680 - DNA, 25 bp, Artificial
  probe
  misc_feature (1)..(25): SEQ ID NO: 3748; WAN024AMB; Start 34; Stop 58
acttctggcaactgtgttttgatac

SEQ ID NO: 362681 - DNA, 25 bp, Artificial
  probe
  misc_feature (1)..(25): SEQ ID NO: 3748; WAN024AMB; Start 31; Stop 55
cttacttctggcaactgtgttttga

SEQ ID NO: 362682 - DNA, 25 bp, Artificial
  probe
  misc_feature (1)..(25): SEQ ID NO: 3748; WAN024AMB; Start 30; Stop 54
tcttacttctggcaactgtgttttg

SEQ ID NO: 362683 - DNA, 25 bp, Artificial
  probe
  misc_feature (1)..(25): SEQ ID NO: 3748; WAN024AMB; Start 246; Stop 270
ctgttattcttttcttaggaggaga

SEQ ID NO: 362684 - DNA, 25 bp, Artificial
  probe
  misc_feature (1)..(25): SEQ ID NO: 3748; WAN024AMB; Start 103; Stop 127
aattgtcattgaaatgtcttgaatt

SEQ ID NO: 362685 - DNA, 25 bp, Artificial
  probe
  misc_feature (1)..(25): SEQ ID NO: 3748; WAN024AMB; Start 38; Stop 62
ctggcaactgtgttttgatactgtt

SEQ ID NO: 362686 - DNA, 25 bp, Artificial
  probe
  misc_feature (1)..(25): SEQ ID NO: 3748; WAN024AMB; Start 198; Stop 222
agttttcaaagactgtttaggattg

SEQ ID NO: 362687 - DNA, 25 bp, Artificial
  probe
  misc_feature (1)..(25): SEQ ID NO: 3748; WAN024AMB; Start 244; Stop 268
ttctgttattcttttcttaggagga

SEQ ID NO: 362688 - DNA, 25 bp, Artificial
  probe
  misc_feature (1)..(25): SEQ ID NO: 3749; WAN024CHS-3; Start 585; Stop 609
ggattagtgatgaacgaatgatgga

SEQ ID NO: 362689 - DNA, 25 bp, Artificial
  probe
  misc_feature (1)..(25): SEQ ID NO: 3749; WAN024CHS-3; Start 587; Stop 611
attagtgatgaacgaatgatggaag

SEQ ID NO: 362690 - DNA, 25 bp, Artificial
  probe
  misc_feature (1)..(25): SEQ ID NO: 3749; WAN024CHS-3; Start 586; Stop 610
gattagtgatgaacgaatgatggaa

SEQ ID NO: 362691 - DNA, 25 bp, Artificial
  probe
  misc_feature (1)..(25): SEQ ID NO: 3749; WAN024CHS-3; Start 992; Stop 1016
acagaagatgaagcagaagaataac

SEQ ID NO: 362692 - DNA, 25 bp, Artificial
  probe
  misc_feature (1)..(25): SEQ ID NO: 3749; WAN024CHS-3; Start 993; Stop 1017
cagaagatgaagcagaagaataact

SEQ ID NO: 362693 - DNA, 25 bp, Artificial
  probe
  misc_feature (1)..(25): SEQ ID NO: 3749; WAN024CHS-3; Start 588; Stop 612
ttagtgatgaacgaatgatggaagc

SEQ ID NO: 362694 - DNA, 25 bp, Artificial
  probe
  misc_feature (1)..(25): SEQ ID NO: 3749; WAN024CHS-3; Start 324; Stop 348
atgttcaagactatgacttctctgc

SEQ ID NO: 362695 - DNA, 25 bp, Artificial
  probe
  misc_feature (1)..(25): SEQ ID NO: 3749; WAN024CHS-3; Start 323; Stop 347
aatgttcaagactatgacttctctg

SEQ ID NO: 362696 - DNA, 25 bp, Artificial
  probe
  misc_feature (1)..(25): SEQ ID NO: 3749; WAN024CHS-3; Start 322; Stop 346
caatgttcaagactatgacttctct

SEQ ID NO: 362697 - DNA, 25 bp, Artificial
  probe
  misc_feature (1)..(25): SEQ ID NO: 3749; WAN024CHS-3; Start 321; Stop 345
tcaatgttcaagactatgacttctc

SEQ ID NO: 362698 - DNA, 25 bp, Artificial
  probe
  misc_feature (1)..(25): SEQ ID NO: 3749; WAN024CHS-3; Start 991; Stop 1015
tacagaagatgaagcagaagaataa

SEQ ID NO: 362699 - DNA, 25 bp, Artificial
  probe
  misc_feature (1)..(25): SEQ ID NO: 3749; WAN024CHS-3; Start 990; Stop 1014
ttacagaagatgaagcagaagaata

SEQ ID NO: 362700 - DNA, 25 bp, Artificial
  probe
  misc_feature (1)..(25): SEQ ID NO: 3749; WAN024CHS-3; Start 594; Stop 618
atgaacgaatgatggaagctagtaa

SEQ ID NO: 362701 - DNA, 25 bp, Artificial
  probe
  misc_feature (1)..(25): SEQ ID NO: 3749; WAN024CHS-3; Start 30; Stop 54
ctatggtctctgctaagcggattaa

SEQ ID NO: 362702 - DNA, 25 bp, Artificial
  probe
  misc_feature (1)..(25): SEQ ID NO: 3749; WAN024CHS-3; Start 593; Stop 617
gatgaacgaatgatggaagctagta

SEQ ID NO: 362703 - DNA, 25 bp, Artificial
  probe
  misc_feature (1)..(25): SEQ ID NO: 3749; WAN024CHS-3; Start 994; Stop 1018
agaagatgaagcagaagaataacta

SEQ ID NO: 362704 - DNA, 25 bp, Artificial
  probe
  misc_feature (1)..(25): SEQ ID NO: 3749; WAN024CHS-3; Start 595; Stop 619
tgaacgaatgatggaagctagtaag

SEQ ID NO: 362705 - DNA, 25 bp, Artificial
  probe
  misc_feature (1)..(25): SEQ ID NO: 3749; WAN024CHS-3; Start 31; Stop 55
tatggtctctgctaagcggattaat

SEQ ID NO: 362706 - DNA, 25 bp, Artificial
  probe
  misc_feature (1)..(25): SEQ ID NO: 3749; WAN024CHS-3; Start 596; Stop 620
gaacgaatgatggaagctagtaagg

SEQ ID NO: 362707 - DNA, 25 bp, Artificial
  probe
  misc_feature (1)..(25): SEQ ID NO: 3749; WAN024CHS-3; Start 327; Stop 351
ttcaagactatgacttctctgcgac

SEQ ID NO: 362708 - DNA, 25 bp, Artificial
  probe
  misc_feature (1)..(25): SEQ ID NO: 3749; WAN024CHS-3; Start 326; Stop 350
gttcaagactatgacttctctgcga

SEQ ID NO: 362709 - DNA, 25 bp, Artificial
  probe
  misc_feature (1)..(25): SEQ ID NO: 3749; WAN024CHS-3; Start 543; Stop 567
ttgaaggaactattcgagacaatct

SEQ ID NO: 362710 - DNA, 25 bp, Artificial
  probe
  misc_feature (1)..(25): SEQ ID NO: 3749; WAN024CHS-3; Start 635; Stop 659
cactttattatgaccttgccagatg

SEQ ID NO: 362711 - DNA, 25 bp, Artificial
  probe
  misc_feature (1)..(25): SEQ ID NO: 3749; WAN024CHS-3; Start 314; Stop 338
gacggtgtcaatgttcaagactatg

SEQ ID NO: 362712 - DNA, 25 bp, Artificial
  probe
  misc_feature (1)..(25): SEQ ID NO: 3749; WAN024CHS-3; Start 244; Stop 268
ttctggtaaatcaactctggtcaat

SEQ ID NO: 362713 - DNA, 25 bp, Artificial
  probe
  misc_feature (1)..(25): SEQ ID NO: 3749; WAN024CHS-3; Start 167; Stop 191
aattcggaggcagttattgaacatg

SEQ ID NO: 362714 - DNA, 25 bp, Artificial
  probe
  misc_feature (1)..(25): SEQ ID NO: 3749; WAN024CHS-3; Start 246; Stop 270
ctggtaaatcaactctggtcaatct

SEQ ID NO: 362715 - DNA, 25 bp, Artificial
  probe
  misc_feature (1)..(25): SEQ ID NO: 3749; WAN024CHS-3; Start 245; Stop 269
tctggtaaatcaactctggtcaatc

SEQ ID NO: 362716 - DNA, 25 bp, Artificial
  probe
  misc_feature (1)..(25): SEQ ID NO: 3749; WAN024CHS-3; Start 582; Stop 606
tagggattagtgatgaacgaatgat

SEQ ID NO: 362717 - DNA, 25 bp, Artificial
  probe
  misc_feature (1)..(25): SEQ ID NO: 3749; WAN024CHS-3; Start 581; Stop 605
atagggattagtgatgaacgaatga

SEQ ID NO: 362718 - DNA, 25 bp, Artificial
  probe
  misc_feature (1)..(25): SEQ ID NO: 3749; WAN024CHS-3; Start 583; Stop 607
agggattagtgatgaacgaatgatg

SEQ ID NO: 362719 - DNA, 25 bp, Artificial
  probe
  misc_feature (1)..(25): SEQ ID NO: 3749; WAN024CHS-3; Start 247; Stop 271
tggtaaatcaactctggtcaatctg

SEQ ID NO: 362720 - DNA, 25 bp, Artificial
  probe
  misc_feature (1)..(25): SEQ ID NO: 3749; WAN024CHS-3; Start 634; Stop 658
ccactttattatgaccttgccagat

SEQ ID NO: 362721 - DNA, 25 bp, Artificial
  probe
  misc_feature (1)..(25): SEQ ID NO: 3751; WAN024AIN; Start 73; Stop 97
taagcaagaaattcacggataatct

SEQ ID NO: 362722 - DNA, 25 bp, Artificial
  probe
  misc_feature (1)..(25): SEQ ID NO: 3751; WAN024AIN; Start 67; Stop 91
cataaataagcaagaaattcacgga

SEQ ID NO: 362723 - DNA, 25 bp, Artificial
  probe
  misc_feature (1)..(25): SEQ ID NO: 3751; WAN024AIN; Start 66; Stop 90
tcataaataagcaagaaattcacgg

SEQ ID NO: 362724 - DNA, 25 bp, Artificial
  probe
  misc_feature (1)..(25): SEQ ID NO: 3751; WAN024AIN; Start 72; Stop 96
ataagcaagaaattcacggataatc

SEQ ID NO: 362725 - DNA, 25 bp, Artificial
  probe
  misc_feature (1)..(25): SEQ ID NO: 3751; WAN024AIN; Start 70; Stop 94
aaataagcaagaaattcacggataa

SEQ ID NO: 362726 - DNA, 25 bp, Artificial
  probe
  misc_feature (1)..(25): SEQ ID NO: 3751; WAN024AIN; Start 71; Stop 95
aataagcaagaaattcacggataat

SEQ ID NO: 362727 - DNA, 25 bp, Artificial
  probe
  misc_feature (1)..(25): SEQ ID NO: 3751; WAN024AIN; Start 68; Stop 92
ataaataagcaagaaattcacggat

SEQ ID NO: 362728 - DNA, 25 bp, Artificial
  probe
  misc_feature (1)..(25): SEQ ID NO: 3751; WAN024AIN; Start 69; Stop 93
taaataagcaagaaattcacggata

SEQ ID NO: 362729 - DNA, 25 bp, Artificial
  probe
  misc_feature (1)..(25): SEQ ID NO: 3751; WAN024AIN; Start 75; Stop 99
agcaagaaattcacggataatcttt

SEQ ID NO: 362730 - DNA, 25 bp, Artificial
  probe
  misc_feature (1)..(25): SEQ ID NO: 3751; WAN024AIN; Start 74; Stop 98
aagcaagaaattcacggataatctt

SEQ ID NO: 362731 - DNA, 25 bp, Artificial
  probe
  misc_feature (1)..(25): SEQ ID NO: 3751; WAN024AIN; Start 65; Stop 89
atcataaataagcaagaaattcacg

SEQ ID NO: 362732 - DNA, 25 bp, Artificial
  probe
  misc_feature (1)..(25): SEQ ID NO: 3751; WAN024AIN; Start 76; Stop 100
gcaagaaattcacggataatcttta

SEQ ID NO: 362733 - DNA, 25 bp, Artificial
  probe
  misc_feature (1)..(25): SEQ ID NO: 3751; WAN024AIN; Start 20; Stop 44
tcaaaattgaatacgatgagtcatt

SEQ ID NO: 362734 - DNA, 25 bp, Artificial
  probe
  misc_feature (1)..(25): SEQ ID NO: 3751; WAN024AIN; Start 5; Stop 29
tcctcctagttttactcaaaattga

SEQ ID NO: 362735 - DNA, 25 bp, Artificial
  probe
  misc_feature (1)..(25): SEQ ID NO: 3751; WAN024AIN; Start 6; Stop 30
cctcctagttttactcaaaattgaa

SEQ ID NO: 362736 - DNA, 25 bp, Artificial
  probe
  misc_feature (1)..(25): SEQ ID NO: 3751; WAN024AIN; Start 4; Stop 28
atcctcctagttttactcaaaattg

SEQ ID NO: 362737 - DNA, 25 bp, Artificial
  probe
  misc_feature (1)..(25): SEQ ID NO: 3751; WAN024AIN; Start 77; Stop 101
caagaaattcacggataatctttaa

SEQ ID NO: 362738 - DNA, 25 bp, Artificial
  probe
  misc_feature (1)..(25): SEQ ID NO: 3751; WAN024AIN; Start 21; Stop 45
caaaattgaatacgatgagtcattt

SEQ ID NO: 362739 - DNA, 25 bp, Artificial
  probe
  misc_feature (1)..(25): SEQ ID NO: 3751; WAN024AIN; Start 3; Stop 27
gatcctcctagttttactcaaaatt

SEQ ID NO: 362740 - DNA, 25 bp, Artificial
  probe
  misc_feature (1)..(25): SEQ ID NO: 3751; WAN024AIN; Start 54; Stop 78
actcccattttatcataaataagca

SEQ ID NO: 362741 - DNA, 25 bp, Artificial
  probe
  misc_feature (1)..(25): SEQ ID NO: 3751; WAN024AIN; Start 57; Stop 81
cccattttatcataaataagcaaga

SEQ ID NO: 362742 - DNA, 25 bp, Artificial
  probe
  misc_feature (1)..(25): SEQ ID NO: 3751; WAN024AIN; Start 56; Stop 80
tcccattttatcataaataagcaag

SEQ ID NO: 362743 - DNA, 25 bp, Artificial
  probe
  misc_feature (1)..(25): SEQ ID NO: 3751; WAN024AIN; Start 55; Stop 79
ctcccattttatcataaataagcaa

SEQ ID NO: 362744 - DNA, 25 bp, Artificial
  probe
  misc_feature (1)..(25): SEQ ID NO: 3751; WAN024AIN; Start 19; Stop 43
ctcaaaattgaatacgatgagtcat

SEQ ID NO: 362745 - DNA, 25 bp, Artificial
  probe
  misc_feature (1)..(25): SEQ ID NO: 3751; WAN024AIN; Start 13; Stop 37
gttttactcaaaattgaatacgatg

SEQ ID NO: 362746 - DNA, 25 bp, Artificial
  probe
  misc_feature (1)..(25): SEQ ID NO: 3751; WAN024AIN; Start 78; Stop 102
aagaaattcacggataatctttaaa

SEQ ID NO: 362747 - DNA, 25 bp, Artificial
  probe
  misc_feature (1)..(25): SEQ ID NO: 3751; WAN024AIN; Start 14; Stop 38
ttttactcaaaattgaatacgatga

SEQ ID NO: 362748 - DNA, 25 bp, Artificial
  probe
  misc_feature (1)..(25): SEQ ID NO: 3751; WAN024AIN; Start 12; Stop 36
agttttactcaaaattgaatacgat

SEQ ID NO: 362749 - DNA, 25 bp, Artificial
  probe
  misc_feature (1)..(25): SEQ ID NO: 3751; WAN024AIN; Start 7; Stop 31
ctcctagttttactcaaaattgaat

SEQ ID NO: 362750 - DNA, 25 bp, Artificial
  probe
  misc_feature (1)..(25): SEQ ID NO: 3751; WAN024AIN; Start 1; Stop 25
gggatcctcctagttttactcaaaa

SEQ ID NO: 362751 - DNA, 25 bp, Artificial
  probe
  misc_feature (1)..(25): SEQ ID NO: 3751; WAN024AIN; Start 79; Stop 103
agaaattcacggataatctttaaaa

SEQ ID NO: 362752 - DNA, 25 bp, Artificial
  probe
  misc_feature (1)..(25): SEQ ID NO: 3751; WAN024AIN; Start 22; Stop 46
aaaattgaatacgatgagtcatttt

SEQ ID NO: 362753 - DNA, 25 bp, Artificial
  probe
  misc_feature (1)..(25): SEQ ID NO: 3751; WAN024AIN; Start 11; Stop 35
tagttttactcaaaattgaatacga

SEQ ID NO: 362754 - DNA, 25 bp, Artificial
  probe
  misc_feature (1)..(25): SEQ ID NO: 3753; WAN0249SL; Start 65; Stop 89
ctaaacttaggagtcacccaatcag

SEQ ID NO: 362755 - DNA, 25 bp, Artificial
  probe
  misc_feature (1)..(25): SEQ ID NO: 3753; WAN0249SL; Start 66; Stop 90
taaacttaggagtcacccaatcagg

SEQ ID NO: 362756 - DNA, 25 bp, Artificial
  probe
  misc_feature (1)..(25): SEQ ID NO: 3753; WAN0249SL; Start 64; Stop 88
gctaaacttaggagtcacccaatca

SEQ ID NO: 362757 - DNA, 25 bp, Artificial
  probe
  misc_feature (1)..(25): SEQ ID NO: 3753; WAN0249SL; Start 63; Stop 87
tgctaaacttaggagtcacccaatc

SEQ ID NO: 362758 - DNA, 25 bp, Artificial
  probe
  misc_feature (1)..(25): SEQ ID NO: 3753; WAN0249SL; Start 62; Stop 86
gtgctaaacttaggagtcacccaat

SEQ ID NO: 362759 - DNA, 25 bp, Artificial
  probe
  misc_feature (1)..(25): SEQ ID NO: 3753; WAN0249SL; Start 61; Stop 85
agtgctaaacttaggagtcacccaa

SEQ ID NO: 362760 - DNA, 25 bp, Artificial
  probe
  misc_feature (1)..(25): SEQ ID NO: 3753; WAN0249SL; Start 67; Stop 91
aaacttaggagtcacccaatcaggt

SEQ ID NO: 362761 - DNA, 25 bp, Artificial
  probe
  misc_feature (1)..(25): SEQ ID NO: 3753; WAN0249SL; Start 58; Stop 82
ataagtgctaaacttaggagtcacc

SEQ ID NO: 362762 - DNA, 25 bp, Artificial
  probe
  misc_feature (1)..(25): SEQ ID NO: 3753; WAN0249SL; Start 54; Stop 78
ccacataagtgctaaacttaggagt

SEQ ID NO: 362763 - DNA, 25 bp, Artificial
  probe
  misc_feature (1)..(25): SEQ ID NO: 3753; WAN0249SL; Start 53; Stop 77
accacataagtgctaaacttaggag

SEQ ID NO: 362764 - DNA, 25 bp, Artificial
  probe
  misc_feature (1)..(25): SEQ ID NO: 3753; WAN0249SL; Start 56; Stop 80
acataagtgctaaacttaggagtca

SEQ ID NO: 362765 - DNA, 25 bp, Artificial
  probe
  misc_feature (1)..(25): SEQ ID NO: 3753; WAN0249SL; Start 57; Stop 81
cataagtgctaaacttaggagtcac

SEQ ID NO: 362766 - DNA, 25 bp, Artificial
  probe
  misc_feature (1)..(25): SEQ ID NO: 3753; WAN0249SL; Start 55; Stop 79
cacataagtgctaaacttaggagtc

SEQ ID NO: 362767 - DNA, 25 bp, Artificial
  probe
  misc_feature (1)..(25): SEQ ID NO: 3753; WAN0249SL; Start 52; Stop 76
taccacataagtgctaaacttagga

SEQ ID NO: 362768 - DNA, 25 bp, Artificial
  probe
  misc_feature (1)..(25): SEQ ID NO: 3753; WAN0249SL; Start 60; Stop 84
aagtgctaaacttaggagtcaccca

SEQ ID NO: 362769 - DNA, 25 bp, Artificial
  probe
  misc_feature (1)..(25): SEQ ID NO: 3753; WAN0249SL; Start 51; Stop 75
ataccacataagtgctaaacttagg

SEQ ID NO: 362770 - DNA, 25 bp, Artificial
  probe
  misc_feature (1)..(25): SEQ ID NO: 3753; WAN0249SL; Start 59; Stop 83
taagtgctaaacttaggagtcaccc

SEQ ID NO: 362771 - DNA, 25 bp, Artificial
  probe
  misc_feature (1)..(25): SEQ ID NO: 3753; WAN0249SL; Start 47; Stop 71
tattataccacataagtgctaaact

SEQ ID NO: 362772 - DNA, 25 bp, Artificial
  probe
  misc_feature (1)..(25): SEQ ID NO: 3753; WAN0249SL; Start 48; Stop 72
attataccacataagtgctaaactt

SEQ ID NO: 362773 - DNA, 25 bp, Artificial
  probe
  misc_feature (1)..(25): SEQ ID NO: 3753; WAN0249SL; Start 50; Stop 74
tataccacataagtgctaaacttag

SEQ ID NO: 362774 - DNA, 25 bp, Artificial
  probe
  misc_feature (1)..(25): SEQ ID NO: 3753; WAN0249SL; Start 49; Stop 73
ttataccacataagtgctaaactta

SEQ ID NO: 362775 - DNA, 25 bp, Artificial
  probe
  misc_feature (1)..(25): SEQ ID NO: 3755; WAN0249G2; Start 11; Stop 35
ttagctcaaccgattcttatcagaa

SEQ ID NO: 362776 - DNA, 25 bp, Artificial
  probe
  misc_feature (1)..(25): SEQ ID NO: 3755; WAN0249G2; Start 9; Stop 33
ctttagctcaaccgattcttatcag

SEQ ID NO: 362777 - DNA, 25 bp, Artificial
  probe
  misc_feature (1)..(25): SEQ ID NO: 3755; WAN0249G2; Start 10; Stop 34
tttagctcaaccgattcttatcaga

SEQ ID NO: 362778 - DNA, 25 bp, Artificial
  probe
  misc_feature (1)..(25): SEQ ID NO: 3755; WAN0249G2; Start 8; Stop 32
gctttagctcaaccgattcttatca

SEQ ID NO: 362779 - DNA, 25 bp, Artificial
  probe
  misc_feature (1)..(25): SEQ ID NO: 3755; WAN0249G2; Start 7; Stop 31
cgctttagctcaaccgattcttatc

SEQ ID NO: 362780 - DNA, 25 bp, Artificial
  probe
  misc_feature (1)..(25): SEQ ID NO: 3755; WAN0249G2; Start 25; Stop 49
tcttatcagaatcacaagtttacat

SEQ ID NO: 362781 - DNA, 25 bp, Artificial
  probe
  misc_feature (1)..(25): SEQ ID NO: 3755; WAN0249G2; Start 12; Stop 36
tagctcaaccgattcttatcagaat

SEQ ID NO: 362782 - DNA, 25 bp, Artificial
  probe
  misc_feature (1)..(25): SEQ ID NO: 3755; WAN0249G2; Start 6; Stop 30
tcgctttagctcaaccgattcttat

SEQ ID NO: 362783 - DNA, 25 bp, Artificial
  probe
  misc_feature (1)..(25): SEQ ID NO: 3755; WAN0249G2; Start 26; Stop 50
cttatcagaatcacaagtttacatt

SEQ ID NO: 362784 - DNA, 25 bp, Artificial
  probe
  misc_feature (1)..(25): SEQ ID NO: 3755; WAN0249G2; Start 5; Stop 29
ctcgctttagctcaaccgattctta

SEQ ID NO: 362785 - DNA, 25 bp, Artificial
  probe
  misc_feature (1)..(25): SEQ ID NO: 3755; WAN0249G2; Start 24; Stop 48
ttcttatcagaatcacaagtttaca

SEQ ID NO: 362786 - DNA, 25 bp, Artificial
  probe
  misc_feature (1)..(25): SEQ ID NO: 3755; WAN0249G2; Start 27; Stop 51
ttatcagaatcacaagtttacattt

SEQ ID NO: 362787 - DNA, 25 bp, Artificial
  probe
  misc_feature (1)..(25): SEQ ID NO: 3755; WAN0249G2; Start 29; Stop 53
atcagaatcacaagtttacatttaa

SEQ ID NO: 362788 - DNA, 25 bp, Artificial
  probe
  misc_feature (1)..(25): SEQ ID NO: 3755; WAN0249G2; Start 30; Stop 54
tcagaatcacaagtttacatttaaa

SEQ ID NO: 362789 - DNA, 25 bp, Artificial
  probe
  misc_feature (1)..(25): SEQ ID NO: 3755; WAN0249G2; Start 34; Stop 58
aatcacaagtttacatttaaaacgt

SEQ ID NO: 362790 - DNA, 25 bp, Artificial
  probe
  misc_feature (1)..(25): SEQ ID NO: 3755; WAN0249G2; Start 33; Stop 57
gaatcacaagtttacatttaaaacg

SEQ ID NO: 362791 - DNA, 25 bp, Artificial
  probe
  misc_feature (1)..(25): SEQ ID NO: 3755; WAN0249G2; Start 23; Stop 47
attcttatcagaatcacaagtttac

SEQ ID NO: 362792 - DNA, 25 bp, Artificial
  probe
  misc_feature (1)..(25): SEQ ID NO: 3755; WAN0249G2; Start 35; Stop 59
atcacaagtttacatttaaaacgtt

SEQ ID NO: 362793 - DNA, 25 bp, Artificial
  probe
  misc_feature (1)..(25): SEQ ID NO: 3755; WAN0249G2; Start 36; Stop 60
tcacaagtttacatttaaaacgtta

SEQ ID NO: 362794 - DNA, 25 bp, Artificial
  probe
  misc_feature (1)..(25): SEQ ID NO: 3755; WAN0249G2; Start 37; Stop 61
cacaagtttacatttaaaacgttaa

SEQ ID NO: 362795 - DNA, 25 bp, Artificial
  probe
  misc_feature (1)..(25): SEQ ID NO: 3756; WAN024AQ9; Start 34; Stop 58
aagtggacatatagaaaggtcttgc

SEQ ID NO: 362796 - DNA, 25 bp, Artificial
  probe
  misc_feature (1)..(25): SEQ ID NO: 3756; WAN024AQ9; Start 33; Stop 57
aaagtggacatatagaaaggtcttg

SEQ ID NO: 362797 - DNA, 25 bp, Artificial
  probe
  misc_feature (1)..(25): SEQ ID NO: 3756; WAN024AQ9; Start 32; Stop 56
taaagtggacatatagaaaggtctt

SEQ ID NO: 362798 - DNA, 25 bp, Artificial
  probe
  misc_feature (1)..(25): SEQ ID NO: 3756; WAN024AQ9; Start 31; Stop 55
ttaaagtggacatatagaaaggtct

SEQ ID NO: 362799 - DNA, 25 bp, Artificial
  probe
  misc_feature (1)..(25): SEQ ID NO: 3756; WAN024AQ9; Start 35; Stop 59
agtggacatatagaaaggtcttgca

SEQ ID NO: 362800 - DNA, 25 bp, Artificial
  probe
  misc_feature (1)..(25): SEQ ID NO: 3756; WAN024AQ9; Start 30; Stop 54
tttaaagtggacatatagaaaggtc

SEQ ID NO: 362801 - DNA, 25 bp, Artificial
  probe
  misc_feature (1)..(25): SEQ ID NO: 3756; WAN024AQ9; Start 36; Stop 60
gtggacatatagaaaggtcttgcaa

SEQ ID NO: 362802 - DNA, 25 bp, Artificial
  probe
  misc_feature (1)..(25): SEQ ID NO: 3756; WAN024AQ9; Start 29; Stop 53
ttttaaagtggacatatagaaaggt

SEQ ID NO: 362803 - DNA, 25 bp, Artificial
  probe
  misc_feature (1)..(25): SEQ ID NO: 3757; WAN024GAK; Start 173; Stop 197
tattagcgagatacgattaagcctt

SEQ ID NO: 362804 - DNA, 25 bp, Artificial
  probe
  misc_feature (1)..(25): SEQ ID NO: 3757; WAN024GAK; Start 172; Stop 196
ttattagcgagatacgattaagcct

SEQ ID NO: 362805 - DNA, 25 bp, Artificial
  probe
  misc_feature (1)..(25): SEQ ID NO: 3757; WAN024GAK; Start 204; Stop 228
cggcttgataagagattgatagact

SEQ ID NO: 362806 - DNA, 25 bp, Artificial
  probe
  misc_feature (1)..(25): SEQ ID NO: 3757; WAN024GAK; Start 174; Stop 198
attagcgagatacgattaagccttg

SEQ ID NO: 362807 - DNA, 25 bp, Artificial
  probe
  misc_feature (1)..(25): SEQ ID NO: 3757; WAN024GAK; Start 171; Stop 195
attattagcgagatacgattaagcc

SEQ ID NO: 362808 - DNA, 25 bp, Artificial
  probe
  misc_feature (1)..(25): SEQ ID NO: 3757; WAN024GAK; Start 599; Stop 623
agcctcttgagtaatcttccaatac

SEQ ID NO: 362809 - DNA, 25 bp, Artificial
  probe
  misc_feature (1)..(25): SEQ ID NO: 3757; WAN024GAK; Start 596; Stop 620
ttaagcctcttgagtaatcttccaa

SEQ ID NO: 362810 - DNA, 25 bp, Artificial
  probe
  misc_feature (1)..(25): SEQ ID NO: 3757; WAN024GAK; Start 598; Stop 622
aagcctcttgagtaatcttccaata

SEQ ID NO: 362811 - DNA, 25 bp, Artificial
  probe
  misc_feature (1)..(25): SEQ ID NO: 3757; WAN024GAK; Start 597; Stop 621
taagcctcttgagtaatcttccaat

SEQ ID NO: 362812 - DNA, 25 bp, Artificial
  probe
  misc_feature (1)..(25): SEQ ID NO: 3757; WAN024GAK; Start 157; Stop 181
caatgacaggtcttattattagcga

SEQ ID NO: 362813 - DNA, 25 bp, Artificial
  probe
  misc_feature (1)..(25): SEQ ID NO: 3757; WAN024GAK; Start 156; Stop 180
tcaatgacaggtcttattattagcg

SEQ ID NO: 362814 - DNA, 25 bp, Artificial
  probe
  misc_feature (1)..(25): SEQ ID NO: 3757; WAN024GAK; Start 160; Stop 184
tgacaggtcttattattagcgagat

SEQ ID NO: 362815 - DNA, 25 bp, Artificial
  probe
  misc_feature (1)..(25): SEQ ID NO: 3757; WAN024GAK; Start 159; Stop 183
atgacaggtcttattattagcgaga

SEQ ID NO: 362816 - DNA, 25 bp, Artificial
  probe
  misc_feature (1)..(25): SEQ ID NO: 3757; WAN024GAK; Start 201; Stop 225
tagcggcttgataagagattgatag

SEQ ID NO: 362817 - DNA, 25 bp, Artificial
  probe
  misc_feature (1)..(25): SEQ ID NO: 3757; WAN024GAK; Start 200; Stop 224
ctagcggcttgataagagattgata

SEQ ID NO: 362818 - DNA, 25 bp, Artificial
  probe
  misc_feature (1)..(25): SEQ ID NO: 3757; WAN024GAK; Start 164; Stop 188
aggtcttattattagcgagatacga

SEQ ID NO: 362819 - DNA, 25 bp, Artificial
  probe
  misc_feature (1)..(25): SEQ ID NO: 3757; WAN024GAK; Start 163; Stop 187
caggtcttattattagcgagatacg

SEQ ID NO: 362820 - DNA, 25 bp, Artificial
  probe
  misc_feature (1)..(25): SEQ ID NO: 3757; WAN024GAK; Start 210; Stop 234
gataagagattgatagactcgcagt

SEQ ID NO: 362821 - DNA, 25 bp, Artificial
  probe
  misc_feature (1)..(25): SEQ ID NO: 3757; WAN024GAK; Start 209; Stop 233
tgataagagattgatagactcgcag

SEQ ID NO: 362822 - DNA, 25 bp, Artificial
  probe
  misc_feature (1)..(25): SEQ ID NO: 3757; WAN024GAK; Start 203; Stop 227
gcggcttgataagagattgatagac

SEQ ID NO: 362823 - DNA, 25 bp, Artificial
  probe
  misc_feature (1)..(25): SEQ ID NO: 3757; WAN024GAK; Start 179; Stop 203
cgagatacgattaagccttgtctag

SEQ ID NO: 362824 - DNA, 25 bp, Artificial
  probe
  misc_feature (1)..(25): SEQ ID NO: 3757; WAN024GAK; Start 158; Stop 182
aatgacaggtcttattattagcgag

SEQ ID NO: 362825 - DNA, 25 bp, Artificial
  probe
  misc_feature (1)..(25): SEQ ID NO: 3757; WAN024GAK; Start 211; Stop 235
ataagagattgatagactcgcagtt

SEQ ID NO: 362826 - DNA, 25 bp, Artificial
  probe
  misc_feature (1)..(25): SEQ ID NO: 3757; WAN024GAK; Start 208; Stop 232
ttgataagagattgatagactcgca

SEQ ID NO: 362827 - DNA, 25 bp, Artificial
  probe
  misc_feature (1)..(25): SEQ ID NO: 3757; WAN024GAK; Start 180; Stop 204
gagatacgattaagccttgtctagc

SEQ ID NO: 362828 - DNA, 25 bp, Artificial
  probe
  misc_feature (1)..(25): SEQ ID NO: 3757; WAN024GAK; Start 150; Stop 174
tcgtgttcaatgacaggtcttatta

SEQ ID NO: 362829 - DNA, 25 bp, Artificial
  probe
  misc_feature (1)..(25): SEQ ID NO: 3757; WAN024GAK; Start 207; Stop 231
cttgataagagattgatagactcgc

SEQ ID NO: 362830 - DNA, 25 bp, Artificial
  probe
  misc_feature (1)..(25): SEQ ID NO: 3757; WAN024GAK; Start 206; Stop 230
gcttgataagagattgatagactcg

SEQ ID NO: 362831 - DNA, 25 bp, Artificial
  probe
  misc_feature (1)..(25): SEQ ID NO: 3757; WAN024GAK; Start 175; Stop 199
ttagcgagatacgattaagccttgt

SEQ ID NO: 362832 - DNA, 25 bp, Artificial
  probe
  misc_feature (1)..(25): SEQ ID NO: 3757; WAN024GAK; Start 151; Stop 175
cgtgttcaatgacaggtcttattat

SEQ ID NO: 362833 - DNA, 25 bp, Artificial
  probe
  misc_feature (1)..(25): SEQ ID NO: 3757; WAN024GAK; Start 202; Stop 226
agcggcttgataagagattgataga

SEQ ID NO: 362834 - DNA, 25 bp, Artificial
  probe
  misc_feature (1)..(25): SEQ ID NO: 3757; WAN024GAK; Start 205; Stop 229
ggcttgataagagattgatagactc

SEQ ID NO: 362835 - DNA, 25 bp, Artificial
  probe
  misc_feature (1)..(25): SEQ ID NO: 3757; WAN024GAK; Start 149; Stop 173
ctcgtgttcaatgacaggtcttatt

SEQ ID NO: 362836 - DNA, 25 bp, Artificial
  probe
  misc_feature (1)..(25): SEQ ID NO: 3758; WAN024ADI; Start 185; Stop 209
aaccaacgatgtaatagctgatgac

SEQ ID NO: 362837 - DNA, 25 bp, Artificial
  probe
  misc_feature (1)..(25): SEQ ID NO: 3758; WAN024ADI; Start 189; Stop 213
aacgatgtaatagctgatgacacaa

SEQ ID NO: 362838 - DNA, 25 bp, Artificial
  probe
  misc_feature (1)..(25): SEQ ID NO: 3758; WAN024ADI; Start 188; Stop 212
caacgatgtaatagctgatgacaca

SEQ ID NO: 362839 - DNA, 25 bp, Artificial
  probe
  misc_feature (1)..(25): SEQ ID NO: 3758; WAN024ADI; Start 187; Stop 211
ccaacgatgtaatagctgatgacac

SEQ ID NO: 362840 - DNA, 25 bp, Artificial
  probe
  misc_feature (1)..(25): SEQ ID NO: 3758; WAN024ADI; Start 186; Stop 210
accaacgatgtaatagctgatgaca

SEQ ID NO: 362841 - DNA, 25 bp, Artificial
  probe
  misc_feature (1)..(25): SEQ ID NO: 3758; WAN024ADI; Start 91; Stop 115
ggcgaaactctgttgactttattca

SEQ ID NO: 362842 - DNA, 25 bp, Artificial
  probe
  misc_feature (1)..(25): SEQ ID NO: 3758; WAN024ADI; Start 184; Stop 208
aaaccaacgatgtaatagctgatga

SEQ ID NO: 362843 - DNA, 25 bp, Artificial
  probe
  misc_feature (1)..(25): SEQ ID NO: 3758; WAN024ADI; Start 183; Stop 207
taaaccaacgatgtaatagctgatg

SEQ ID NO: 362844 - DNA, 25 bp, Artificial
  probe
  misc_feature (1)..(25): SEQ ID NO: 3758; WAN024ADI; Start 67; Stop 91
tgtcattacaagacgaagtggttgg

SEQ ID NO: 362845 - DNA, 25 bp, Artificial
  probe
  misc_feature (1)..(25): SEQ ID NO: 3758; WAN024ADI; Start 125; Stop 149
ttcttatgcacaattgagtctggaa

SEQ ID NO: 362846 - DNA, 25 bp, Artificial
  probe
  misc_feature (1)..(25): SEQ ID NO: 3758; WAN024ADI; Start 90; Stop 114
gggcgaaactctgttgactttattc

SEQ ID NO: 362847 - DNA, 25 bp, Artificial
  probe
  misc_feature (1)..(25): SEQ ID NO: 3758; WAN024ADI; Start 126; Stop 150
tcttatgcacaattgagtctggaac

SEQ ID NO: 362848 - DNA, 25 bp, Artificial
  probe
  misc_feature (1)..(25): SEQ ID NO: 3758; WAN024ADI; Start 172; Stop 196
atacagtacaataaaccaacgatgt

SEQ ID NO: 362849 - DNA, 25 bp, Artificial
  probe
  misc_feature (1)..(25): SEQ ID NO: 3758; WAN024ADI; Start 181; Stop 205
aataaaccaacgatgtaatagctga

SEQ ID NO: 362850 - DNA, 25 bp, Artificial
  probe
  misc_feature (1)..(25): SEQ ID NO: 3758; WAN024ADI; Start 180; Stop 204
caataaaccaacgatgtaatagctg

SEQ ID NO: 362851 - DNA, 25 bp, Artificial
  probe
  misc_feature (1)..(25): SEQ ID NO: 3758; WAN024ADI; Start 63; Stop 87
taattgtcattacaagacgaagtgg

SEQ ID NO: 362852 - DNA, 25 bp, Artificial
  probe
  misc_feature (1)..(25): SEQ ID NO: 3758; WAN024ADI; Start 182; Stop 206
ataaaccaacgatgtaatagctgat

SEQ ID NO: 362853 - DNA, 25 bp, Artificial
  probe
  misc_feature (1)..(25): SEQ ID NO: 3758; WAN024ADI; Start 65; Stop 89
attgtcattacaagacgaagtggtt

SEQ ID NO: 362854 - DNA, 25 bp, Artificial
  probe
  misc_feature (1)..(25): SEQ ID NO: 3758; WAN024ADI; Start 64; Stop 88
aattgtcattacaagacgaagtggt

SEQ ID NO: 362855 - DNA, 25 bp, Artificial
  probe
  misc_feature (1)..(25): SEQ ID NO: 3758; WAN024ADI; Start 191; Stop 215
cgatgtaatagctgatgacacaaag

SEQ ID NO: 362856 - DNA, 25 bp, Artificial
  probe
  misc_feature (1)..(25): SEQ ID NO: 3758; WAN024ADI; Start 190; Stop 214
acgatgtaatagctgatgacacaaa

SEQ ID NO: 362857 - DNA, 25 bp, Artificial
  probe
  misc_feature (1)..(25): SEQ ID NO: 3758; WAN024ADI; Start 89; Stop 113
tgggcgaaactctgttgactttatt

SEQ ID NO: 362858 - DNA, 25 bp, Artificial
  probe
  misc_feature (1)..(25): SEQ ID NO: 3758; WAN024ADI; Start 88; Stop 112
ttgggcgaaactctgttgactttat

SEQ ID NO: 362859 - DNA, 25 bp, Artificial
  probe
  misc_feature (1)..(25): SEQ ID NO: 3758; WAN024ADI; Start 179; Stop 203
acaataaaccaacgatgtaatagct

SEQ ID NO: 362860 - DNA, 25 bp, Artificial
  probe
  misc_feature (1)..(25): SEQ ID NO: 3758; WAN024ADI; Start 66; Stop 90
ttgtcattacaagacgaagtggttg

SEQ ID NO: 362861 - DNA, 25 bp, Artificial
  probe
  misc_feature (1)..(25): SEQ ID NO: 3758; WAN024ADI; Start 174; Stop 198
acagtacaataaaccaacgatgtaa

SEQ ID NO: 362862 - DNA, 25 bp, Artificial
  probe
  misc_feature (1)..(25): SEQ ID NO: 3758; WAN024ADI; Start 127; Stop 151
cttatgcacaattgagtctggaacg

SEQ ID NO: 362863 - DNA, 25 bp, Artificial
  probe
  misc_feature (1)..(25): SEQ ID NO: 3758; WAN024ADI; Start 171; Stop 195
tatacagtacaataaaccaacgatg

SEQ ID NO: 362864 - DNA, 25 bp, Artificial
  probe
  misc_feature (1)..(25): SEQ ID NO: 3758; WAN024ADI; Start 41; Stop 65
gctcagcttcctttggtttatataa

SEQ ID NO: 362865 - DNA, 25 bp, Artificial
  probe
  misc_feature (1)..(25): SEQ ID NO: 3758; WAN024ADI; Start 92; Stop 116
gcgaaactctgttgactttattcaa

SEQ ID NO: 362866 - DNA, 25 bp, Artificial
  probe
  misc_feature (1)..(25): SEQ ID NO: 3758; WAN024ADI; Start 62; Stop 86
ataattgtcattacaagacgaagtg

SEQ ID NO: 362867 - DNA, 25 bp, Artificial
  probe
  misc_feature (1)..(25): SEQ ID NO: 3758; WAN024ADI; Start 129; Stop 153
tatgcacaattgagtctggaacgaa

SEQ ID NO: 362868 - DNA, 25 bp, Artificial
  probe
  misc_feature (1)..(25): SEQ ID NO: 3758; WAN024ADI; Start 128; Stop 152
ttatgcacaattgagtctggaacga

SEQ ID NO: 362869 - DNA, 25 bp, Artificial
  probe
  misc_feature (1)..(25): SEQ ID NO: 3759; WAN024AQL; Start 31; Stop 55
atatcataaaggttgctcctgagac

SEQ ID NO: 362870 - DNA, 25 bp, Artificial
  probe
  misc_feature (1)..(25): SEQ ID NO: 3759; WAN024AQL; Start 32; Stop 56
tatcataaaggttgctcctgagaca

SEQ ID NO: 362871 - DNA, 25 bp, Artificial
  probe
  misc_feature (1)..(25): SEQ ID NO: 3759; WAN024AQL; Start 30; Stop 54
tatatcataaaggttgctcctgaga

SEQ ID NO: 362872 - DNA, 25 bp, Artificial
  probe
  misc_feature (1)..(25): SEQ ID NO: 3759; WAN024AQL; Start 25; Stop 49
ctcattatatcataaaggttgctcc

SEQ ID NO: 362873 - DNA, 25 bp, Artificial
  probe
  misc_feature (1)..(25): SEQ ID NO: 3759; WAN024AQL; Start 29; Stop 53
ttatatcataaaggttgctcctgag

SEQ ID NO: 362874 - DNA, 25 bp, Artificial
  probe
  misc_feature (1)..(25): SEQ ID NO: 3759; WAN024AQL; Start 33; Stop 57
atcataaaggttgctcctgagacag

SEQ ID NO: 362875 - DNA, 25 bp, Artificial
  probe
  misc_feature (1)..(25): SEQ ID NO: 3759; WAN024AQL; Start 27; Stop 51
cattatatcataaaggttgctcctg

SEQ ID NO: 362876 - DNA, 25 bp, Artificial
  probe
  misc_feature (1)..(25): SEQ ID NO: 3759; WAN024AQL; Start 28; Stop 52
attatatcataaaggttgctcctga

SEQ ID NO: 362877 - DNA, 25 bp, Artificial
  probe
  misc_feature (1)..(25): SEQ ID NO: 3759; WAN024AQL; Start 26; Stop 50
tcattatatcataaaggttgctcct

SEQ ID NO: 362878 - DNA, 25 bp, Artificial
  probe
  misc_feature (1)..(25): SEQ ID NO: 3759; WAN024AQL; Start 35; Stop 59
cataaaggttgctcctgagacagag

SEQ ID NO: 362879 - DNA, 25 bp, Artificial
  probe
  misc_feature (1)..(25): SEQ ID NO: 3759; WAN024AQL; Start 4; Stop 28
aaatcctttcagttttcttctctca

SEQ ID NO: 362880 - DNA, 25 bp, Artificial
  probe
  misc_feature (1)..(25): SEQ ID NO: 3759; WAN024AQL; Start 36; Stop 60
ataaaggttgctcctgagacagaga

SEQ ID NO: 362881 - DNA, 25 bp, Artificial
  probe
  misc_feature (1)..(25): SEQ ID NO: 3759; WAN024AQL; Start 24; Stop 48
tctcattatatcataaaggttgctc

SEQ ID NO: 362882 - DNA, 25 bp, Artificial
  probe
  misc_feature (1)..(25): SEQ ID NO: 3759; WAN024AQL; Start 23; Stop 47
ctctcattatatcataaaggttgct

SEQ ID NO: 362883 - DNA, 25 bp, Artificial
  probe
  misc_feature (1)..(25): SEQ ID NO: 3759; WAN024AQL; Start 22; Stop 46
tctctcattatatcataaaggttgc

SEQ ID NO: 362884 - DNA, 25 bp, Artificial
  probe
  misc_feature (1)..(25): SEQ ID NO: 3759; WAN024AQL; Start 6; Stop 30
atcctttcagttttcttctctcatt

SEQ ID NO: 362885 - DNA, 25 bp, Artificial
  probe
  misc_feature (1)..(25): SEQ ID NO: 3759; WAN024AQL; Start 5; Stop 29
aatcctttcagttttcttctctcat

SEQ ID NO: 362886 - DNA, 25 bp, Artificial
  probe
  misc_feature (1)..(25): SEQ ID NO: 3759; WAN024AQL; Start 34; Stop 58
tcataaaggttgctcctgagacaga

SEQ ID NO: 362887 - DNA, 25 bp, Artificial
  probe
  misc_feature (1)..(25): SEQ ID NO: 3759; WAN024AQL; Start 1; Stop 25
ggtaaatcctttcagttttcttctc

SEQ ID NO: 362888 - DNA, 25 bp, Artificial
  probe
  misc_feature (1)..(25): SEQ ID NO: 3759; WAN024AQL; Start 7; Stop 31
tcctttcagttttcttctctcatta

SEQ ID NO: 362889 - DNA, 25 bp, Artificial
  probe
  misc_feature (1)..(25): SEQ ID NO: 3759; WAN024AQL; Start 37; Stop 61
taaaggttgctcctgagacagagag

SEQ ID NO: 362890 - DNA, 25 bp, Artificial
  probe
  misc_feature (1)..(25): SEQ ID NO: 3759; WAN024AQL; Start 2; Stop 26
gtaaatcctttcagttttcttctct

SEQ ID NO: 362891 - DNA, 25 bp, Artificial
  probe
  misc_feature (1)..(25): SEQ ID NO: 3759; WAN024AQL; Start 8; Stop 32
cctttcagttttcttctctcattat

SEQ ID NO: 362892 - DNA, 25 bp, Artificial
  probe
  misc_feature (1)..(25): SEQ ID NO: 3759; WAN024AQL; Start 3; Stop 27
taaatcctttcagttttcttctctc

SEQ ID NO: 362893 - DNA, 25 bp, Artificial
  probe
  misc_feature (1)..(25): SEQ ID NO: 3759; WAN024AQL; Start 39; Stop 63
aaggttgctcctgagacagagagaa

SEQ ID NO: 362894 - DNA, 25 bp, Artificial
  probe
  misc_feature (1)..(25): SEQ ID NO: 3759; WAN024AQL; Start 42; Stop 66
gttgctcctgagacagagagaaaac

SEQ ID NO: 362895 - DNA, 25 bp, Artificial
  probe
  misc_feature (1)..(25): SEQ ID NO: 3759; WAN024AQL; Start 40; Stop 64
aggttgctcctgagacagagagaaa

SEQ ID NO: 362896 - DNA, 25 bp, Artificial
  probe
  misc_feature (1)..(25): SEQ ID NO: 3759; WAN024AQL; Start 38; Stop 62
aaaggttgctcctgagacagagaga

SEQ ID NO: 362897 - DNA, 25 bp, Artificial
  probe
  misc_feature (1)..(25): SEQ ID NO: 3759; WAN024AQL; Start 12; Stop 36
tcagttttcttctctcattatatca

SEQ ID NO: 362898 - DNA, 25 bp, Artificial
  probe
  misc_feature (1)..(25): SEQ ID NO: 3759; WAN024AQL; Start 43; Stop 67
ttgctcctgagacagagagaaaacc

SEQ ID NO: 362899 - DNA, 25 bp, Artificial
  probe
  misc_feature (1)..(25): SEQ ID NO: 3759; WAN024AQL; Start 41; Stop 65
ggttgctcctgagacagagagaaaa

SEQ ID NO: 362900 - DNA, 25 bp, Artificial
  probe
  misc_feature (1)..(25): SEQ ID NO: 3759; WAN024AQL; Start 45; Stop 69
gctcctgagacagagagaaaacctc

SEQ ID NO: 362901 - DNA, 25 bp, Artificial
  probe
  misc_feature (1)..(25): SEQ ID NO: 3759; WAN024AQL; Start 46; Stop 70
ctcctgagacagagagaaaacctct

SEQ ID NO: 362902 - DNA, 25 bp, Artificial
  probe
  misc_feature (1)..(25): SEQ ID NO: 3759; WAN024AQL; Start 44; Stop 68
tgctcctgagacagagagaaaacct

SEQ ID NO: 362903 - DNA, 25 bp, Artificial
  probe
  misc_feature (1)..(25): SEQ ID NO: 3760; WAN0249ED; Start 19; Stop 43
ccgaactaatttactcttttatgga

SEQ ID NO: 362904 - DNA, 25 bp, Artificial
  probe
  misc_feature (1)..(25): SEQ ID NO: 3760; WAN0249ED; Start 18; Stop 42
tccgaactaatttactcttttatgg

SEQ ID NO: 362905 - DNA, 25 bp, Artificial
  probe
  misc_feature (1)..(25): SEQ ID NO: 3760; WAN0249ED; Start 38; Stop 62
tatggaaagatgatagtaaatagct

SEQ ID NO: 362906 - DNA, 25 bp, Artificial
  probe
  misc_feature (1)..(25): SEQ ID NO: 3760; WAN0249ED; Start 41; Stop 65
ggaaagatgatagtaaatagctagt

SEQ ID NO: 362907 - DNA, 25 bp, Artificial
  probe
  misc_feature (1)..(25): SEQ ID NO: 3760; WAN0249ED; Start 40; Stop 64
tggaaagatgatagtaaatagctag

SEQ ID NO: 362908 - DNA, 25 bp, Artificial
  probe
  misc_feature (1)..(25): SEQ ID NO: 3760; WAN0249ED; Start 20; Stop 44
cgaactaatttactcttttatggaa

SEQ ID NO: 362909 - DNA, 25 bp, Artificial
  probe
  misc_feature (1)..(25): SEQ ID NO: 3760; WAN0249ED; Start 17; Stop 41
ttccgaactaatttactcttttatg

SEQ ID NO: 362910 - DNA, 25 bp, Artificial
  probe
  misc_feature (1)..(25): SEQ ID NO: 3760; WAN0249ED; Start 14; Stop 38
aatttccgaactaatttactctttt

SEQ ID NO: 362911 - DNA, 25 bp, Artificial
  probe
  misc_feature (1)..(25): SEQ ID NO: 3760; WAN0249ED; Start 39; Stop 63
atggaaagatgatagtaaatagcta

SEQ ID NO: 362912 - DNA, 25 bp, Artificial
  probe
  misc_feature (1)..(25): SEQ ID NO: 3760; WAN0249ED; Start 13; Stop 37
aaatttccgaactaatttactcttt

SEQ ID NO: 362913 - DNA, 25 bp, Artificial
  probe
  misc_feature (1)..(25): SEQ ID NO: 3760; WAN0249ED; Start 1; Stop 25
ggtaattttagtaaatttccgaact

SEQ ID NO: 362914 - DNA, 25 bp, Artificial
  probe
  misc_feature (1)..(25): SEQ ID NO: 3760; WAN0249ED; Start 31; Stop 55
actcttttatggaaagatgatagta

SEQ ID NO: 362915 - DNA, 25 bp, Artificial
  probe
  misc_feature (1)..(25): SEQ ID NO: 3760; WAN0249ED; Start 30; Stop 54
tactcttttatggaaagatgatagt

SEQ ID NO: 362916 - DNA, 25 bp, Artificial
  probe
  misc_feature (1)..(25): SEQ ID NO: 3761; WAN0249WM; Start 14; Stop 38
agctgattgaacttctatttactaa

SEQ ID NO: 362917 - DNA, 25 bp, Artificial
  probe
  misc_feature (1)..(25): SEQ ID NO: 3761; WAN0249WM; Start 12; Stop 36
ttagctgattgaacttctatttact

SEQ ID NO: 362918 - DNA, 25 bp, Artificial
  probe
  misc_feature (1)..(25): SEQ ID NO: 3761; WAN0249WM; Start 68; Stop 92
gggaactctttgtgacagaggattt

SEQ ID NO: 362919 - DNA, 25 bp, Artificial
  probe
  misc_feature (1)..(25): SEQ ID NO: 3761; WAN0249WM; Start 15; Stop 39
gctgattgaacttctatttactaat

SEQ ID NO: 362920 - DNA, 25 bp, Artificial
  probe
  misc_feature (1)..(25): SEQ ID NO: 3761; WAN0249WM; Start 67; Stop 91
agggaactctttgtgacagaggatt

SEQ ID NO: 362921 - DNA, 25 bp, Artificial
  probe
  misc_feature (1)..(25): SEQ ID NO: 3761; WAN0249WM; Start 11; Stop 35
tttagctgattgaacttctatttac

SEQ ID NO: 362922 - DNA, 25 bp, Artificial
  probe
  misc_feature (1)..(25): SEQ ID NO: 3761; WAN0249WM; Start 69; Stop 93
ggaactctttgtgacagaggatttt

SEQ ID NO: 362923 - DNA, 25 bp, Artificial
  probe
  misc_feature (1)..(25): SEQ ID NO: 3761; WAN0249WM; Start 13; Stop 37
tagctgattgaacttctatttacta

SEQ ID NO: 362924 - DNA, 25 bp, Artificial
  probe
  misc_feature (1)..(25): SEQ ID NO: 3761; WAN0249WM; Start 45; Stop 69
aaaatcctccgtttcaaagagcagg

SEQ ID NO: 362925 - DNA, 25 bp, Artificial
  probe
  misc_feature (1)..(25): SEQ ID NO: 3761; WAN0249WM; Start 66; Stop 90
cagggaactctttgtgacagaggat

SEQ ID NO: 362926 - DNA, 25 bp, Artificial
  probe
  misc_feature (1)..(25): SEQ ID NO: 3761; WAN0249WM; Start 63; Stop 87
gagcagggaactctttgtgacagag

SEQ ID NO: 362927 - DNA, 25 bp, Artificial
  probe
  misc_feature (1)..(25): SEQ ID NO: 3762; WAN024DYA; Start 460; Stop 484
ccaagtgatttagcaattatcggtc

SEQ ID NO: 362928 - DNA, 25 bp, Artificial
  probe
  misc_feature (1)..(25): SEQ ID NO: 3762; WAN024DYA; Start 464; Stop 488
gtgatttagcaattatcggtcgtta

SEQ ID NO: 362929 - DNA, 25 bp, Artificial
  probe
  misc_feature (1)..(25): SEQ ID NO: 3762; WAN024DYA; Start 461; Stop 485
caagtgatttagcaattatcggtcg

SEQ ID NO: 362930 - DNA, 25 bp, Artificial
  probe
  misc_feature (1)..(25): SEQ ID NO: 3762; WAN024DYA; Start 463; Stop 487
agtgatttagcaattatcggtcgtt

SEQ ID NO: 362931 - DNA, 25 bp, Artificial
  probe
  misc_feature (1)..(25): SEQ ID NO: 3762; WAN024DYA; Start 462; Stop 486
aagtgatttagcaattatcggtcgt

SEQ ID NO: 362932 - DNA, 25 bp, Artificial
  probe
  misc_feature (1)..(25): SEQ ID NO: 3762; WAN024DYA; Start 465; Stop 489
tgatttagcaattatcggtcgttat

SEQ ID NO: 362933 - DNA, 25 bp, Artificial
  probe
  misc_feature (1)..(25): SEQ ID NO: 3762; WAN024DYA; Start 467; Stop 491
atttagcaattatcggtcgttatct

SEQ ID NO: 362934 - DNA, 25 bp, Artificial
  probe
  misc_feature (1)..(25): SEQ ID NO: 3762; WAN024DYA; Start 466; Stop 490
gatttagcaattatcggtcgttatc

SEQ ID NO: 362935 - DNA, 25 bp, Artificial
  probe
  misc_feature (1)..(25): SEQ ID NO: 3762; WAN024DYA; Start 458; Stop 482
caccaagtgatttagcaattatcgg

SEQ ID NO: 362936 - DNA, 25 bp, Artificial
  probe
  misc_feature (1)..(25): SEQ ID NO: 3762; WAN024DYA; Start 457; Stop 481
gcaccaagtgatttagcaattatcg

SEQ ID NO: 362937 - DNA, 25 bp, Artificial
  probe
  misc_feature (1)..(25): SEQ ID NO: 3762; WAN024DYA; Start 459; Stop 483
accaagtgatttagcaattatcggt

SEQ ID NO: 362938 - DNA, 25 bp, Artificial
  probe
  misc_feature (1)..(25): SEQ ID NO: 3762; WAN024DYA; Start 456; Stop 480
tgcaccaagtgatttagcaattatc

SEQ ID NO: 362939 - DNA, 25 bp, Artificial
  probe
  misc_feature (1)..(25): SEQ ID NO: 3762; WAN024DYA; Start 454; Stop 478
gatgcaccaagtgatttagcaatta

SEQ ID NO: 362940 - DNA, 25 bp, Artificial
  probe
  misc_feature (1)..(25): SEQ ID NO: 3762; WAN024DYA; Start 455; Stop 479
atgcaccaagtgatttagcaattat

SEQ ID NO: 362941 - DNA, 25 bp, Artificial
  probe
  misc_feature (1)..(25): SEQ ID NO: 3762; WAN024DYA; Start 453; Stop 477
agatgcaccaagtgatttagcaatt

SEQ ID NO: 362942 - DNA, 25 bp, Artificial
  probe
  misc_feature (1)..(25): SEQ ID NO: 3762; WAN024DYA; Start 452; Stop 476
aagatgcaccaagtgatttagcaat

SEQ ID NO: 362943 - DNA, 25 bp, Artificial
  probe
  misc_feature (1)..(25): SEQ ID NO: 3762; WAN024DYA; Start 451; Stop 475
gaagatgcaccaagtgatttagcaa

SEQ ID NO: 362944 - DNA, 25 bp, Artificial
  probe
  misc_feature (1)..(25): SEQ ID NO: 3762; WAN024DYA; Start 116; Stop 140
taaaattagtagatgaagcaactgg

SEQ ID NO: 362945 - DNA, 25 bp, Artificial
  probe
  misc_feature (1)..(25): SEQ ID NO: 3762; WAN024DYA; Start 448; Stop 472
cccgaagatgcaccaagtgatttag

SEQ ID NO: 362946 - DNA, 25 bp, Artificial
  probe
  misc_feature (1)..(25): SEQ ID NO: 3762; WAN024DYA; Start 111; Stop 135
tctgttaaaattagtagatgaagca

SEQ ID NO: 362947 - DNA, 25 bp, Artificial
  probe
  misc_feature (1)..(25): SEQ ID NO: 3762; WAN024DYA; Start 447; Stop 471
tcccgaagatgcaccaagtgattta

SEQ ID NO: 362948 - DNA, 25 bp, Artificial
  probe
  misc_feature (1)..(25): SEQ ID NO: 3762; WAN024DYA; Start 113; Stop 137
tgttaaaattagtagatgaagcaac

SEQ ID NO: 362949 - DNA, 25 bp, Artificial
  probe
  misc_feature (1)..(25): SEQ ID NO: 3762; WAN024DYA; Start 112; Stop 136
ctgttaaaattagtagatgaagcaa

SEQ ID NO: 362950 - DNA, 25 bp, Artificial
  probe
  misc_feature (1)..(25): SEQ ID NO: 3762; WAN024DYA; Start 449; Stop 473
ccgaagatgcaccaagtgatttagc

SEQ ID NO: 362951 - DNA, 25 bp, Artificial
  probe
  misc_feature (1)..(25): SEQ ID NO: 3762; WAN024DYA; Start 115; Stop 139
ttaaaattagtagatgaagcaactg

SEQ ID NO: 362952 - DNA, 25 bp, Artificial
  probe
  misc_feature (1)..(25): SEQ ID NO: 3762; WAN024DYA; Start 114; Stop 138
gttaaaattagtagatgaagcaact

SEQ ID NO: 362953 - DNA, 25 bp, Artificial
  probe
  misc_feature (1)..(25): SEQ ID NO: 3762; WAN024DYA; Start 450; Stop 474
cgaagatgcaccaagtgatttagca

SEQ ID NO: 362954 - DNA, 25 bp, Artificial
  probe
  misc_feature (1)..(25): SEQ ID NO: 3762; WAN024DYA; Start 110; Stop 134
atctgttaaaattagtagatgaagc

SEQ ID NO: 362955 - DNA, 25 bp, Artificial
  probe
  misc_feature (1)..(25): SEQ ID NO: 3763; WAN024GLB-3; Start 1799; Stop 1823
atctctcttacgcttctattgtgaa

SEQ ID NO: 362956 - DNA, 25 bp, Artificial
  probe
  misc_feature (1)..(25): SEQ ID NO: 3763; WAN024GLB-3; Start 1798; Stop 1822
gatctctcttacgcttctattgtga

SEQ ID NO: 362957 - DNA, 25 bp, Artificial
  probe
  misc_feature (1)..(25): SEQ ID NO: 3763; WAN024GLB-3; Start 1797; Stop 1821
tgatctctcttacgcttctattgtg

SEQ ID NO: 362958 - DNA, 25 bp, Artificial
  probe
  misc_feature (1)..(25): SEQ ID NO: 3763; WAN024GLB-3; Start 1796; Stop 1820
ttgatctctcttacgcttctattgt

SEQ ID NO: 362959 - DNA, 25 bp, Artificial
  probe
  misc_feature (1)..(25): SEQ ID NO: 3763; WAN024GLB-3; Start 1794; Stop 1818
tgttgatctctcttacgcttctatt

SEQ ID NO: 362960 - DNA, 25 bp, Artificial
  probe
  misc_feature (1)..(25): SEQ ID NO: 3763; WAN024GLB-3; Start 1792; Stop 1816
gatgttgatctctcttacgcttcta

SEQ ID NO: 362961 - DNA, 25 bp, Artificial
  probe
  misc_feature (1)..(25): SEQ ID NO: 3763; WAN024GLB-3; Start 1795; Stop 1819
gttgatctctcttacgcttctattg

SEQ ID NO: 362962 - DNA, 25 bp, Artificial
  probe
  misc_feature (1)..(25): SEQ ID NO: 3763; WAN024GLB-3; Start 1793; Stop 1817
atgttgatctctcttacgcttctat

SEQ ID NO: 362963 - DNA, 25 bp, Artificial
  probe
  misc_feature (1)..(25): SEQ ID NO: 3763; WAN024GLB-3; Start 1800; Stop 1824
tctctcttacgcttctattgtgaaa

SEQ ID NO: 362964 - DNA, 25 bp, Artificial
  probe
  misc_feature (1)..(25): SEQ ID NO: 3763; WAN024GLB-3; Start 495; Stop 519
taatccaaattctcaaactccgctc

SEQ ID NO: 362965 - DNA, 25 bp, Artificial
  probe
  misc_feature (1)..(25): SEQ ID NO: 3763; WAN024GLB-3; Start 947; Stop 971
gaattgaagtaagtcagaaaccgaa

SEQ ID NO: 362966 - DNA, 25 bp, Artificial
  probe
  misc_feature (1)..(25): SEQ ID NO: 3763; WAN024GLB-3; Start 943; Stop 967
ttgggaattgaagtaagtcagaaac

SEQ ID NO: 362967 - DNA, 25 bp, Artificial
  probe
  misc_feature (1)..(25): SEQ ID NO: 3763; WAN024GLB-3; Start 1790; Stop 1814
aagatgttgatctctcttacgcttc

SEQ ID NO: 362968 - DNA, 25 bp, Artificial
  probe
  misc_feature (1)..(25): SEQ ID NO: 3763; WAN024GLB-3; Start 948; Stop 972
aattgaagtaagtcagaaaccgaaa

SEQ ID NO: 362969 - DNA, 25 bp, Artificial
  probe
  misc_feature (1)..(25): SEQ ID NO: 3763; WAN024GLB-3; Start 944; Stop 968
tgggaattgaagtaagtcagaaacc

SEQ ID NO: 362970 - DNA, 25 bp, Artificial
  probe
  misc_feature (1)..(25): SEQ ID NO: 3763; WAN024GLB-3; Start 946; Stop 970
ggaattgaagtaagtcagaaaccga

SEQ ID NO: 362971 - DNA, 25 bp, Artificial
  probe
  misc_feature (1)..(25): SEQ ID NO: 3763; WAN024GLB-3; Start 1791; Stop 1815
agatgttgatctctcttacgcttct

SEQ ID NO: 362972 - DNA, 25 bp, Artificial
  probe
  misc_feature (1)..(25): SEQ ID NO: 3763; WAN024GLB-3; Start 1789; Stop 1813
caagatgttgatctctcttacgctt

SEQ ID NO: 362973 - DNA, 25 bp, Artificial
  probe
  misc_feature (1)..(25): SEQ ID NO: 3763; WAN024GLB-3; Start 942; Stop 966
tttgggaattgaagtaagtcagaaa

SEQ ID NO: 362974 - DNA, 25 bp, Artificial
  probe
  misc_feature (1)..(25): SEQ ID NO: 3763; WAN024GLB-3; Start 1785; Stop 1809
aggtcaagatgttgatctctcttac

SEQ ID NO: 362975 - DNA, 25 bp, Artificial
  probe
  misc_feature (1)..(25): SEQ ID NO: 3763; WAN024GLB-3; Start 1786; Stop 1810
ggtcaagatgttgatctctcttacg

SEQ ID NO: 362976 - DNA, 25 bp, Artificial
  probe
  misc_feature (1)..(25): SEQ ID NO: 3763; WAN024GLB-3; Start 945; Stop 969
gggaattgaagtaagtcagaaaccg

SEQ ID NO: 362977 - DNA, 25 bp, Artificial
  probe
  misc_feature (1)..(25): SEQ ID NO: 3763; WAN024GLB-3; Start 1787; Stop 1811
gtcaagatgttgatctctcttacgc

SEQ ID NO: 362978 - DNA, 25 bp, Artificial
  probe
  misc_feature (1)..(25): SEQ ID NO: 3763; WAN024GLB-3; Start 1788; Stop 1812
tcaagatgttgatctctcttacgct

SEQ ID NO: 362979 - DNA, 25 bp, Artificial
  probe
  misc_feature (1)..(25): SEQ ID NO: 3763; WAN024GLB-3; Start 1805; Stop 1829
cttacgcttctattgtgaaaatccc

SEQ ID NO: 362980 - DNA, 25 bp, Artificial
  probe
  misc_feature (1)..(25): SEQ ID NO: 3763; WAN024GLB-3; Start 460; Stop 484
gatgtacaggctggagcaactatta

SEQ ID NO: 362981 - DNA, 25 bp, Artificial
  probe
  misc_feature (1)..(25): SEQ ID NO: 3763; WAN024GLB-3; Start 1804; Stop 1828
tcttacgcttctattgtgaaaatcc

SEQ ID NO: 362982 - DNA, 25 bp, Artificial
  probe
  misc_feature (1)..(25): SEQ ID NO: 3763; WAN024GLB-3; Start 1806; Stop 1830
ttacgcttctattgtgaaaatccca

SEQ ID NO: 362983 - DNA, 25 bp, Artificial
  probe
  misc_feature (1)..(25): SEQ ID NO: 3763; WAN024GLB-3; Start 1801; Stop 1825
ctctcttacgcttctattgtgaaaa

SEQ ID NO: 362984 - DNA, 25 bp, Artificial
  probe
  misc_feature (1)..(25): SEQ ID NO: 3763; WAN024GLB-3; Start 1807; Stop 1831
tacgcttctattgtgaaaatcccaa

SEQ ID NO: 362985 - DNA, 25 bp, Artificial
  probe
  misc_feature (1)..(25): SEQ ID NO: 3763; WAN024GLB-3; Start 461; Stop 485
atgtacaggctggagcaactattac

SEQ ID NO: 362986 - DNA, 25 bp, Artificial
  probe
  misc_feature (1)..(25): SEQ ID NO: 3763; WAN024GLB-3; Start 1802; Stop 1826
tctcttacgcttctattgtgaaaat

SEQ ID NO: 362987 - DNA, 25 bp, Artificial
  probe
  misc_feature (1)..(25): SEQ ID NO: 3763; WAN024GLB-3; Start 949; Stop 973
attgaagtaagtcagaaaccgaaaa

SEQ ID NO: 362988 - DNA, 25 bp, Artificial
  probe
  misc_feature (1)..(25): SEQ ID NO: 3764; WAN0249JF; Start 2; Stop 26
gtattgttccattcactaccgtcaa

SEQ ID NO: 362989 - DNA, 25 bp, Artificial
  probe
  misc_feature (1)..(25): SEQ ID NO: 3764; WAN0249JF; Start 3; Stop 27
tattgttccattcactaccgtcaat

SEQ ID NO: 362990 - DNA, 25 bp, Artificial
  probe
  misc_feature (1)..(25): SEQ ID NO: 3764; WAN0249JF; Start 4; Stop 28
attgttccattcactaccgtcaatt

SEQ ID NO: 362991 - DNA, 25 bp, Artificial
  probe
  misc_feature (1)..(25): SEQ ID NO: 3764; WAN0249JF; Start 5; Stop 29
ttgttccattcactaccgtcaattt

SEQ ID NO: 362992 - DNA, 25 bp, Artificial
  probe
  misc_feature (1)..(25): SEQ ID NO: 3764; WAN0249JF; Start 18; Stop 42
taccgtcaattttagcacatagtct

SEQ ID NO: 362993 - DNA, 25 bp, Artificial
  probe
  misc_feature (1)..(25): SEQ ID NO: 3764; WAN0249JF; Start 15; Stop 39
cactaccgtcaattttagcacatag

SEQ ID NO: 362994 - DNA, 25 bp, Artificial
  probe
  misc_feature (1)..(25): SEQ ID NO: 3764; WAN0249JF; Start 21; Stop 45
cgtcaattttagcacatagtcttca

SEQ ID NO: 362995 - DNA, 25 bp, Artificial
  probe
  misc_feature (1)..(25): SEQ ID NO: 3764; WAN0249JF; Start 20; Stop 44
ccgtcaattttagcacatagtcttc

SEQ ID NO: 362996 - DNA, 25 bp, Artificial
  probe
  misc_feature (1)..(25): SEQ ID NO: 3764; WAN0249JF; Start 17; Stop 41
ctaccgtcaattttagcacatagtc

SEQ ID NO: 362997 - DNA, 25 bp, Artificial
  probe
  misc_feature (1)..(25): SEQ ID NO: 3764; WAN0249JF; Start 14; Stop 38
tcactaccgtcaattttagcacata

SEQ ID NO: 362998 - DNA, 25 bp, Artificial
  probe
  misc_feature (1)..(25): SEQ ID NO: 3764; WAN0249JF; Start 7; Stop 31
gttccattcactaccgtcaatttta

SEQ ID NO: 362999 - DNA, 25 bp, Artificial
  probe
  misc_feature (1)..(25): SEQ ID NO: 3764; WAN0249JF; Start 19; Stop 43
accgtcaattttagcacatagtctt

SEQ ID NO: 363000 - DNA, 25 bp, Artificial
  probe
  misc_feature (1)..(25): SEQ ID NO: 3764; WAN0249JF; Start 11; Stop 35
cattcactaccgtcaattttagcac

SEQ ID NO: 363001 - DNA, 25 bp, Artificial
  probe
  misc_feature (1)..(25): SEQ ID NO: 3764; WAN0249JF; Start 8; Stop 32
ttccattcactaccgtcaattttag

SEQ ID NO: 363002 - DNA, 25 bp, Artificial
  probe
  misc_feature (1)..(25): SEQ ID NO: 3764; WAN0249JF; Start 13; Stop 37
ttcactaccgtcaattttagcacat

SEQ ID NO: 363003 - DNA, 25 bp, Artificial
  probe
  misc_feature (1)..(25): SEQ ID NO: 3764; WAN0249JF; Start 12; Stop 36
attcactaccgtcaattttagcaca

SEQ ID NO: 363004 - DNA, 25 bp, Artificial
  probe
  misc_feature (1)..(25): SEQ ID NO: 3764; WAN0249JF; Start 6; Stop 30
tgttccattcactaccgtcaatttt

SEQ ID NO: 363005 - DNA, 25 bp, Artificial
  probe
  misc_feature (1)..(25): SEQ ID NO: 3764; WAN0249JF; Start 9; Stop 33
tccattcactaccgtcaattttagc

SEQ ID NO: 363006 - DNA, 25 bp, Artificial
  probe
  misc_feature (1)..(25): SEQ ID NO: 3764; WAN0249JF; Start 1; Stop 25
ggtattgttccattcactaccgtca

SEQ ID NO: 363007 - DNA, 25 bp, Artificial
  probe
  misc_feature (1)..(25): SEQ ID NO: 3764; WAN0249JF; Start 10; Stop 34
ccattcactaccgtcaattttagca

SEQ ID NO: 363008 - DNA, 25 bp, Artificial
  probe
  misc_feature (1)..(25): SEQ ID NO: 3764; WAN0249JF; Start 22; Stop 46
gtcaattttagcacatagtcttcat

SEQ ID NO: 363009 - DNA, 25 bp, Artificial
  probe
  misc_feature (1)..(25): SEQ ID NO: 3764; WAN0249JF; Start 16; Stop 40
actaccgtcaattttagcacatagt

SEQ ID NO: 363010 - DNA, 25 bp, Artificial
  probe
  misc_feature (1)..(25): SEQ ID NO: 3764; WAN0249JF; Start 23; Stop 47
tcaattttagcacatagtcttcatg

SEQ ID NO: 363011 - DNA, 25 bp, Artificial
  probe
  misc_feature (1)..(25): SEQ ID NO: 3764; WAN0249JF; Start 24; Stop 48
caattttagcacatagtcttcatga

SEQ ID NO: 363012 - DNA, 25 bp, Artificial
  probe
  misc_feature (1)..(25): SEQ ID NO: 3766; WAN024F9E; Start 16; Stop 40
ctggatagagcattcgccttctaag

SEQ ID NO: 363013 - DNA, 25 bp, Artificial
  probe
  misc_feature (1)..(25): SEQ ID NO: 3766; WAN024F9E; Start 17; Stop 41
tggatagagcattcgccttctaagc

SEQ ID NO: 363014 - DNA, 25 bp, Artificial
  probe
  misc_feature (1)..(25): SEQ ID NO: 3766; WAN024F9E; Start 15; Stop 39
gctggatagagcattcgccttctaa

SEQ ID NO: 363015 - DNA, 25 bp, Artificial
  probe
  misc_feature (1)..(25): SEQ ID NO: 3767; WAN0249R8; Start 99; Stop 123
gatgactatgaattgctctatctcc

SEQ ID NO: 363016 - DNA, 25 bp, Artificial
  probe
  misc_feature (1)..(25): SEQ ID NO: 3767; WAN0249R8; Start 98; Stop 122
tgatgactatgaattgctctatctc

SEQ ID NO: 363017 - DNA, 25 bp, Artificial
  probe
  misc_feature (1)..(25): SEQ ID NO: 3767; WAN0249R8; Start 97; Stop 121
ttgatgactatgaattgctctatct

SEQ ID NO: 363018 - DNA, 25 bp, Artificial
  probe
  misc_feature (1)..(25): SEQ ID NO: 3767; WAN0249R8; Start 239; Stop 263
ttcacaataaatagccgacaaccta

SEQ ID NO: 363019 - DNA, 25 bp, Artificial
  probe
  misc_feature (1)..(25): SEQ ID NO: 3767; WAN0249R8; Start 145; Stop 169
gcagtaaatcaaggagtaagtcaag

SEQ ID NO: 363020 - DNA, 25 bp, Artificial
  probe
  misc_feature (1)..(25): SEQ ID NO: 3767; WAN0249R8; Start 238; Stop 262
attcacaataaatagccgacaacct

SEQ ID NO: 363021 - DNA, 25 bp, Artificial
  probe
  misc_feature (1)..(25): SEQ ID NO: 3767; WAN0249R8; Start 104; Stop 128
ctatgaattgctctatctcccactt

SEQ ID NO: 363022 - DNA, 25 bp, Artificial
  probe
  misc_feature (1)..(25): SEQ ID NO: 3767; WAN0249R8; Start 100; Stop 124
atgactatgaattgctctatctccc

SEQ ID NO: 363023 - DNA, 25 bp, Artificial
  probe
  misc_feature (1)..(25): SEQ ID NO: 3767; WAN0249R8; Start 105; Stop 129
tatgaattgctctatctcccacttt

SEQ ID NO: 363024 - DNA, 25 bp, Artificial
  probe
  misc_feature (1)..(25): SEQ ID NO: 3767; WAN0249R8; Start 102; Stop 126
gactatgaattgctctatctcccac

SEQ ID NO: 363025 - DNA, 25 bp, Artificial
  probe
  misc_feature (1)..(25): SEQ ID NO: 3767; WAN0249R8; Start 103; Stop 127
actatgaattgctctatctcccact

SEQ ID NO: 363026 - DNA, 25 bp, Artificial
  probe
  misc_feature (1)..(25): SEQ ID NO: 3767; WAN0249R8; Start 101; Stop 125
tgactatgaattgctctatctccca

SEQ ID NO: 363027 - DNA, 25 bp, Artificial
  probe
  misc_feature (1)..(25): SEQ ID NO: 3767; WAN0249R8; Start 237; Stop 261
tattcacaataaatagccgacaacc

SEQ ID NO: 363028 - DNA, 25 bp, Artificial
  probe
  misc_feature (1)..(25): SEQ ID NO: 3767; WAN0249R8; Start 146; Stop 170
cagtaaatcaaggagtaagtcaaga

SEQ ID NO: 363029 - DNA, 25 bp, Artificial
  probe
  misc_feature (1)..(25): SEQ ID NO: 3767; WAN0249R8; Start 236; Stop 260
gtattcacaataaatagccgacaac

SEQ ID NO: 363030 - DNA, 25 bp, Artificial
  probe
  misc_feature (1)..(25): SEQ ID NO: 3767; WAN0249R8; Start 241; Stop 265
cacaataaatagccgacaacctatg

SEQ ID NO: 363031 - DNA, 25 bp, Artificial
  probe
  misc_feature (1)..(25): SEQ ID NO: 3767; WAN0249R8; Start 240; Stop 264
tcacaataaatagccgacaacctat

SEQ ID NO: 363032 - DNA, 25 bp, Artificial
  probe
  misc_feature (1)..(25): SEQ ID NO: 3767; WAN0249R8; Start 242; Stop 266
acaataaatagccgacaacctatgt

SEQ ID NO: 363033 - DNA, 25 bp, Artificial
  probe
  misc_feature (1)..(25): SEQ ID NO: 3767; WAN0249R8; Start 235; Stop 259
tgtattcacaataaatagccgacaa

SEQ ID NO: 363034 - DNA, 25 bp, Artificial
  probe
  misc_feature (1)..(25): SEQ ID NO: 3767; WAN0249R8; Start 234; Stop 258
atgtattcacaataaatagccgaca

SEQ ID NO: 363035 - DNA, 25 bp, Artificial
  probe
  misc_feature (1)..(25): SEQ ID NO: 3767; WAN0249R8; Start 369; Stop 393
tgttctcatcctatttcaatcttct

SEQ ID NO: 363036 - DNA, 25 bp, Artificial
  probe
  misc_feature (1)..(25): SEQ ID NO: 3767; WAN0249R8; Start 41; Stop 65
ttgagggaatttgaaatgtgtttaa

SEQ ID NO: 363037 - DNA, 25 bp, Artificial
  probe
  misc_feature (1)..(25): SEQ ID NO: 3767; WAN0249R8; Start 40; Stop 64
tttgagggaatttgaaatgtgttta

SEQ ID NO: 363038 - DNA, 25 bp, Artificial
  probe
  misc_feature (1)..(25): SEQ ID NO: 3767; WAN0249R8; Start 364; Stop 388
cgatttgttctcatcctatttcaat

SEQ ID NO: 363039 - DNA, 25 bp, Artificial
  probe
  misc_feature (1)..(25): SEQ ID NO: 3767; WAN0249R8; Start 144; Stop 168
tgcagtaaatcaaggagtaagtcaa

SEQ ID NO: 363040 - DNA, 25 bp, Artificial
  probe
  misc_feature (1)..(25): SEQ ID NO: 3767; WAN0249R8; Start 143; Stop 167
atgcagtaaatcaaggagtaagtca

SEQ ID NO: 363041 - DNA, 25 bp, Artificial
  probe
  misc_feature (1)..(25): SEQ ID NO: 3767; WAN0249R8; Start 233; Stop 257
aatgtattcacaataaatagccgac

SEQ ID NO: 363042 - DNA, 25 bp, Artificial
  probe
  misc_feature (1)..(25): SEQ ID NO: 3767; WAN0249R8; Start 135; Stop 159
ccattgttatgcagtaaatcaagga

SEQ ID NO: 363043 - DNA, 25 bp, Artificial
  probe
  misc_feature (1)..(25): SEQ ID NO: 3767; WAN0249R8; Start 134; Stop 158
cccattgttatgcagtaaatcaagg

SEQ ID NO: 363044 - DNA, 25 bp, Artificial
  probe
  misc_feature (1)..(25): SEQ ID NO: 3767; WAN0249R8; Start 133; Stop 157
tcccattgttatgcagtaaatcaag

SEQ ID NO: 363045 - DNA, 25 bp, Artificial
  probe
  misc_feature (1)..(25): SEQ ID NO: 3767; WAN0249R8; Start 363; Stop 387
tcgatttgttctcatcctatttcaa

SEQ ID NO: 363046 - DNA, 25 bp, Artificial
  probe
  misc_feature (1)..(25): SEQ ID NO: 3767; WAN0249R8; Start 132; Stop 156
atcccattgttatgcagtaaatcaa

SEQ ID NO: 363047 - DNA, 25 bp, Artificial
  probe
  misc_feature (1)..(25): SEQ ID NO: 3767; WAN0249R8; Start 96; Stop 120
tttgatgactatgaattgctctatc

SEQ ID NO: 363048 - DNA, 25 bp, Artificial
  probe
  misc_feature (1)..(25): SEQ ID NO: 3768; WAN024AU4; Start 307; Stop 331
gacaaggtcttgattatcgacgatt

SEQ ID NO: 363049 - DNA, 25 bp, Artificial
  probe
  misc_feature (1)..(25): SEQ ID NO: 3768; WAN024AU4; Start 306; Stop 330
ggacaaggtcttgattatcgacgat

SEQ ID NO: 363050 - DNA, 25 bp, Artificial
  probe
  misc_feature (1)..(25): SEQ ID NO: 3768; WAN024AU4; Start 315; Stop 339
cttgattatcgacgatttccttgct

SEQ ID NO: 363051 - DNA, 25 bp, Artificial
  probe
  misc_feature (1)..(25): SEQ ID NO: 3768; WAN024AU4; Start 314; Stop 338
tcttgattatcgacgatttccttgc

SEQ ID NO: 363052 - DNA, 25 bp, Artificial
  probe
  misc_feature (1)..(25): SEQ ID NO: 3768; WAN024AU4; Start 313; Stop 337
gtcttgattatcgacgatttccttg

SEQ ID NO: 363053 - DNA, 25 bp, Artificial
  probe
  misc_feature (1)..(25): SEQ ID NO: 3768; WAN024AU4; Start 309; Stop 333
caaggtcttgattatcgacgatttc

SEQ ID NO: 363054 - DNA, 25 bp, Artificial
  probe
  misc_feature (1)..(25): SEQ ID NO: 3768; WAN024AU4; Start 308; Stop 332
acaaggtcttgattatcgacgattt

SEQ ID NO: 363055 - DNA, 25 bp, Artificial
  probe
  misc_feature (1)..(25): SEQ ID NO: 3768; WAN024AU4; Start 364; Stop 388
attcaaatcatcgaacaagctggag

SEQ ID NO: 363056 - DNA, 25 bp, Artificial
  probe
  misc_feature (1)..(25): SEQ ID NO: 3768; WAN024AU4; Start 363; Stop 387
gattcaaatcatcgaacaagctgga

SEQ ID NO: 363057 - DNA, 25 bp, Artificial
  probe
  misc_feature (1)..(25): SEQ ID NO: 3768; WAN024AU4; Start 312; Stop 336
ggtcttgattatcgacgatttcctt

SEQ ID NO: 363058 - DNA, 25 bp, Artificial
  probe
  misc_feature (1)..(25): SEQ ID NO: 3768; WAN024AU4; Start 310; Stop 334
aaggtcttgattatcgacgatttcc

SEQ ID NO: 363059 - DNA, 25 bp, Artificial
  probe
  misc_feature (1)..(25): SEQ ID NO: 3768; WAN024AU4; Start 304; Stop 328
gaggacaaggtcttgattatcgacg

SEQ ID NO: 363060 - DNA, 25 bp, Artificial
  probe
  misc_feature (1)..(25): SEQ ID NO: 3768; WAN024AU4; Start 305; Stop 329
aggacaaggtcttgattatcgacga

SEQ ID NO: 363061 - DNA, 25 bp, Artificial
  probe
  misc_feature (1)..(25): SEQ ID NO: 3768; WAN024AU4; Start 311; Stop 335
aggtcttgattatcgacgatttcct

SEQ ID NO: 363062 - DNA, 25 bp, Artificial
  probe
  misc_feature (1)..(25): SEQ ID NO: 3768; WAN024AU4; Start 361; Stop 385
ttgattcaaatcatcgaacaagctg

SEQ ID NO: 363063 - DNA, 25 bp, Artificial
  probe
  misc_feature (1)..(25): SEQ ID NO: 3768; WAN024AU4; Start 357; Stop 381
aggcttgattcaaatcatcgaacaa

SEQ ID NO: 363064 - DNA, 25 bp, Artificial
  probe
  misc_feature (1)..(25): SEQ ID NO: 3768; WAN024AU4; Start 348; Stop 372
agctgctaaaggcttgattcaaatc

SEQ ID NO: 363065 - DNA, 25 bp, Artificial
  probe
  misc_feature (1)..(25): SEQ ID NO: 3768; WAN024AU4; Start 362; Stop 386
tgattcaaatcatcgaacaagctgg

SEQ ID NO: 363066 - DNA, 25 bp, Artificial
  probe
  misc_feature (1)..(25): SEQ ID NO: 3768; WAN024AU4; Start 360; Stop 384
cttgattcaaatcatcgaacaagct

SEQ ID NO: 363067 - DNA, 25 bp, Artificial
  probe
  misc_feature (1)..(25): SEQ ID NO: 3768; WAN024AU4; Start 349; Stop 373
gctgctaaaggcttgattcaaatca

SEQ ID NO: 363068 - DNA, 25 bp, Artificial
  probe
  misc_feature (1)..(25): SEQ ID NO: 3768; WAN024AU4; Start 358; Stop 382
ggcttgattcaaatcatcgaacaag

SEQ ID NO: 363069 - DNA, 25 bp, Artificial
  probe
  misc_feature (1)..(25): SEQ ID NO: 3768; WAN024AU4; Start 2; Stop 26
gtgacaacatcctcaaggtggattc

SEQ ID NO: 363070 - DNA, 25 bp, Artificial
  probe
  misc_feature (1)..(25): SEQ ID NO: 3768; WAN024AU4; Start 365; Stop 389
ttcaaatcatcgaacaagctggagc

SEQ ID NO: 363071 - DNA, 25 bp, Artificial
  probe
  misc_feature (1)..(25): SEQ ID NO: 3768; WAN024AU4; Start 5; Stop 29
acaacatcctcaaggtggattcctt

SEQ ID NO: 363072 - DNA, 25 bp, Artificial
  probe
  misc_feature (1)..(25): SEQ ID NO: 3768; WAN024AU4; Start 4; Stop 28
gacaacatcctcaaggtggattcct

SEQ ID NO: 363073 - DNA, 25 bp, Artificial
  probe
  misc_feature (1)..(25): SEQ ID NO: 3768; WAN024AU4; Start 6; Stop 30
caacatcctcaaggtggattccttt

SEQ ID NO: 363074 - DNA, 25 bp, Artificial
  probe
  misc_feature (1)..(25): SEQ ID NO: 3768; WAN024AU4; Start 3; Stop 27
tgacaacatcctcaaggtggattcc

SEQ ID NO: 363075 - DNA, 25 bp, Artificial
  probe
  misc_feature (1)..(25): SEQ ID NO: 3768; WAN024AU4; Start 1; Stop 25
ggtgacaacatcctcaaggtggatt

SEQ ID NO: 363076 - DNA, 25 bp, Artificial
  probe
  misc_feature (1)..(25): SEQ ID NO: 3768; WAN024AU4; Start 347; Stop 371
aagctgctaaaggcttgattcaaat

SEQ ID NO: 363077 - DNA, 25 bp, Artificial
  probe
  misc_feature (1)..(25): SEQ ID NO: 3768; WAN024AU4; Start 7; Stop 31
aacatcctcaaggtggattcctttt

SEQ ID NO: 363078 - DNA, 25 bp, Artificial
  probe
  misc_feature (1)..(25): SEQ ID NO: 3769; WAN0249YQ; Start 44; Stop 68
tatggaggtggactgatgtatatga

SEQ ID NO: 363079 - DNA, 25 bp, Artificial
  probe
  misc_feature (1)..(25): SEQ ID NO: 3769; WAN0249YQ; Start 43; Stop 67
gtatggaggtggactgatgtatatg

SEQ ID NO: 363080 - DNA, 25 bp, Artificial
  probe
  misc_feature (1)..(25): SEQ ID NO: 3769; WAN0249YQ; Start 45; Stop 69
atggaggtggactgatgtatatgag

SEQ ID NO: 363081 - DNA, 25 bp, Artificial
  probe
  misc_feature (1)..(25): SEQ ID NO: 3769; WAN0249YQ; Start 42; Stop 66
agtatggaggtggactgatgtatat

SEQ ID NO: 363082 - DNA, 25 bp, Artificial
  probe
  misc_feature (1)..(25): SEQ ID NO: 3769; WAN0249YQ; Start 41; Stop 65
aagtatggaggtggactgatgtata

SEQ ID NO: 363083 - DNA, 25 bp, Artificial
  probe
  misc_feature (1)..(25): SEQ ID NO: 3769; WAN0249YQ; Start 40; Stop 64
taagtatggaggtggactgatgtat

SEQ ID NO: 363084 - DNA, 25 bp, Artificial
  probe
  misc_feature (1)..(25): SEQ ID NO: 3769; WAN0249YQ; Start 39; Stop 63
ataagtatggaggtggactgatgta

SEQ ID NO: 363085 - DNA, 25 bp, Artificial
  probe
  misc_feature (1)..(25): SEQ ID NO: 3769; WAN0249YQ; Start 50; Stop 74
ggtggactgatgtatatgagtaact

SEQ ID NO: 363086 - DNA, 25 bp, Artificial
  probe
  misc_feature (1)..(25): SEQ ID NO: 3769; WAN0249YQ; Start 49; Stop 73
aggtggactgatgtatatgagtaac

SEQ ID NO: 363087 - DNA, 25 bp, Artificial
  probe
  misc_feature (1)..(25): SEQ ID NO: 3769; WAN0249YQ; Start 47; Stop 71
ggaggtggactgatgtatatgagta

SEQ ID NO: 363088 - DNA, 25 bp, Artificial
  probe
  misc_feature (1)..(25): SEQ ID NO: 3769; WAN0249YQ; Start 48; Stop 72
gaggtggactgatgtatatgagtaa

SEQ ID NO: 363089 - DNA, 25 bp, Artificial
  probe
  misc_feature (1)..(25): SEQ ID NO: 3769; WAN0249YQ; Start 38; Stop 62
cataagtatggaggtggactgatgt

SEQ ID NO: 363090 - DNA, 25 bp, Artificial
  probe
  misc_feature (1)..(25): SEQ ID NO: 3769; WAN0249YQ; Start 37; Stop 61
acataagtatggaggtggactgatg

SEQ ID NO: 363091 - DNA, 25 bp, Artificial
  probe
  misc_feature (1)..(25): SEQ ID NO: 3769; WAN0249YQ; Start 152; Stop 176
attaggaatcaagacttatcaggtt

SEQ ID NO: 363092 - DNA, 25 bp, Artificial
  probe
  misc_feature (1)..(25): SEQ ID NO: 3769; WAN0249YQ; Start 46; Stop 70
tggaggtggactgatgtatatgagt

SEQ ID NO: 363093 - DNA, 25 bp, Artificial
  probe
  misc_feature (1)..(25): SEQ ID NO: 3769; WAN0249YQ; Start 151; Stop 175
aattaggaatcaagacttatcaggt

SEQ ID NO: 363094 - DNA, 25 bp, Artificial
  probe
  misc_feature (1)..(25): SEQ ID NO: 3769; WAN0249YQ; Start 36; Stop 60
cacataagtatggaggtggactgat

SEQ ID NO: 363095 - DNA, 25 bp, Artificial
  probe
  misc_feature (1)..(25): SEQ ID NO: 3769; WAN0249YQ; Start 156; Stop 180
ggaatcaagacttatcaggttaaga

SEQ ID NO: 363096 - DNA, 25 bp, Artificial
  probe
  misc_feature (1)..(25): SEQ ID NO: 3769; WAN0249YQ; Start 155; Stop 179
aggaatcaagacttatcaggttaag

SEQ ID NO: 363097 - DNA, 25 bp, Artificial
  probe
  misc_feature (1)..(25): SEQ ID NO: 3769; WAN0249YQ; Start 8; Stop 32
atggaggtataatacaaagagaggc

SEQ ID NO: 363098 - DNA, 25 bp, Artificial
  probe
  misc_feature (1)..(25): SEQ ID NO: 3769; WAN0249YQ; Start 9; Stop 33
tggaggtataatacaaagagaggct

SEQ ID NO: 363099 - DNA, 25 bp, Artificial
  probe
  misc_feature (1)..(25): SEQ ID NO: 3769; WAN0249YQ; Start 153; Stop 177
ttaggaatcaagacttatcaggtta

SEQ ID NO: 363100 - DNA, 25 bp, Artificial
  probe
  misc_feature (1)..(25): SEQ ID NO: 3769; WAN0249YQ; Start 154; Stop 178
taggaatcaagacttatcaggttaa

SEQ ID NO: 363101 - DNA, 25 bp, Artificial
  probe
  misc_feature (1)..(25): SEQ ID NO: 3769; WAN0249YQ; Start 51; Stop 75
gtggactgatgtatatgagtaacta

SEQ ID NO: 363102 - DNA, 25 bp, Artificial
  probe
  misc_feature (1)..(25): SEQ ID NO: 3769; WAN0249YQ; Start 10; Stop 34
ggaggtataatacaaagagaggctc

SEQ ID NO: 363103 - DNA, 25 bp, Artificial
  probe
  misc_feature (1)..(25): SEQ ID NO: 3769; WAN0249YQ; Start 11; Stop 35
gaggtataatacaaagagaggctcg

SEQ ID NO: 363104 - DNA, 25 bp, Artificial
  probe
  misc_feature (1)..(25): SEQ ID NO: 3769; WAN0249YQ; Start 14; Stop 38
gtataatacaaagagaggctcgcac

SEQ ID NO: 363105 - DNA, 25 bp, Artificial
  probe
  misc_feature (1)..(25): SEQ ID NO: 3769; WAN0249YQ; Start 17; Stop 41
taatacaaagagaggctcgcacata

SEQ ID NO: 363106 - DNA, 25 bp, Artificial
  probe
  misc_feature (1)..(25): SEQ ID NO: 3769; WAN0249YQ; Start 15; Stop 39
tataatacaaagagaggctcgcaca

SEQ ID NO: 363107 - DNA, 25 bp, Artificial
  probe
  misc_feature (1)..(25): SEQ ID NO: 3769; WAN0249YQ; Start 16; Stop 40
ataatacaaagagaggctcgcacat

SEQ ID NO: 363108 - DNA, 25 bp, Artificial
  probe
  misc_feature (1)..(25): SEQ ID NO: 3769; WAN0249YQ; Start 12; Stop 36
aggtataatacaaagagaggctcgc

SEQ ID NO: 363109 - DNA, 25 bp, Artificial
  probe
  misc_feature (1)..(25): SEQ ID NO: 3769; WAN0249YQ; Start 157; Stop 181
gaatcaagacttatcaggttaagaa

SEQ ID NO: 363110 - DNA, 25 bp, Artificial
  probe
  misc_feature (1)..(25): SEQ ID NO: 3769; WAN0249YQ; Start 54; Stop 78
gactgatgtatatgagtaactatcg

SEQ ID NO: 363111 - DNA, 25 bp, Artificial
  probe
  misc_feature (1)..(25): SEQ ID NO: 3770; WAN024AU3; Start 212; Stop 236
ctatgaacgaaggaatcttaactgc

SEQ ID NO: 363112 - DNA, 25 bp, Artificial
  probe
  misc_feature (1)..(25): SEQ ID NO: 3770; WAN024AU3; Start 213; Stop 237
tatgaacgaaggaatcttaactgcc

SEQ ID NO: 363113 - DNA, 25 bp, Artificial
  probe
  misc_feature (1)..(25): SEQ ID NO: 3770; WAN024AU3; Start 206; Stop 230
acatcactatgaacgaaggaatctt

SEQ ID NO: 363114 - DNA, 25 bp, Artificial
  probe
  misc_feature (1)..(25): SEQ ID NO: 3770; WAN024AU3; Start 205; Stop 229
aacatcactatgaacgaaggaatct

SEQ ID NO: 363115 - DNA, 25 bp, Artificial
  probe
  misc_feature (1)..(25): SEQ ID NO: 3770; WAN024AU3; Start 204; Stop 228
gaacatcactatgaacgaaggaatc

SEQ ID NO: 363116 - DNA, 25 bp, Artificial
  probe
  misc_feature (1)..(25): SEQ ID NO: 3770; WAN024AU3; Start 203; Stop 227
agaacatcactatgaacgaaggaat

SEQ ID NO: 363117 - DNA, 25 bp, Artificial
  probe
  misc_feature (1)..(25): SEQ ID NO: 3770; WAN024AU3; Start 202; Stop 226
aagaacatcactatgaacgaaggaa

SEQ ID NO: 363118 - DNA, 25 bp, Artificial
  probe
  misc_feature (1)..(25): SEQ ID NO: 3770; WAN024AU3; Start 199; Stop 223
gctaagaacatcactatgaacgaag

SEQ ID NO: 363119 - DNA, 25 bp, Artificial
  probe
  misc_feature (1)..(25): SEQ ID NO: 3770; WAN024AU3; Start 201; Stop 225
taagaacatcactatgaacgaagga

SEQ ID NO: 363120 - DNA, 25 bp, Artificial
  probe
  misc_feature (1)..(25): SEQ ID NO: 3770; WAN024AU3; Start 211; Stop 235
actatgaacgaaggaatcttaactg

SEQ ID NO: 363121 - DNA, 25 bp, Artificial
  probe
  misc_feature (1)..(25): SEQ ID NO: 3770; WAN024AU3; Start 210; Stop 234
cactatgaacgaaggaatcttaact

SEQ ID NO: 363122 - DNA, 25 bp, Artificial
  probe
  misc_feature (1)..(25): SEQ ID NO: 3770; WAN024AU3; Start 200; Stop 224
ctaagaacatcactatgaacgaagg

SEQ ID NO: 363123 - DNA, 25 bp, Artificial
  probe
  misc_feature (1)..(25): SEQ ID NO: 3770; WAN024AU3; Start 209; Stop 233
tcactatgaacgaaggaatcttaac

SEQ ID NO: 363124 - DNA, 25 bp, Artificial
  probe
  misc_feature (1)..(25): SEQ ID NO: 3770; WAN024AU3; Start 207; Stop 231
catcactatgaacgaaggaatctta

SEQ ID NO: 363125 - DNA, 25 bp, Artificial
  probe
  misc_feature (1)..(25): SEQ ID NO: 3770; WAN024AU3; Start 303; Stop 327
agaggacaaggtcttgattattgac

SEQ ID NO: 363126 - DNA, 25 bp, Artificial
  probe
  misc_feature (1)..(25): SEQ ID NO: 3770; WAN024AU3; Start 302; Stop 326
cagaggacaaggtcttgattattga

SEQ ID NO: 363127 - DNA, 25 bp, Artificial
  probe
  misc_feature (1)..(25): SEQ ID NO: 3770; WAN024AU3; Start 208; Stop 232
atcactatgaacgaaggaatcttaa

SEQ ID NO: 363128 - DNA, 25 bp, Artificial
  probe
  misc_feature (1)..(25): SEQ ID NO: 3770; WAN024AU3; Start 307; Stop 331
gacaaggtcttgattattgacgatt

SEQ ID NO: 363129 - DNA, 25 bp, Artificial
  probe
  misc_feature (1)..(25): SEQ ID NO: 3770; WAN024AU3; Start 105; Stop 129
cattactaaggttgtgaccattgaa

SEQ ID NO: 363130 - DNA, 25 bp, Artificial
  probe
  misc_feature (1)..(25): SEQ ID NO: 3770; WAN024AU3; Start 306; Stop 330
ggacaaggtcttgattattgacgat

SEQ ID NO: 363131 - DNA, 25 bp, Artificial
  probe
  misc_feature (1)..(25): SEQ ID NO: 3770; WAN024AU3; Start 198; Stop 222
agctaagaacatcactatgaacgaa

SEQ ID NO: 363132 - DNA, 25 bp, Artificial
  probe
  misc_feature (1)..(25): SEQ ID NO: 3770; WAN024AU3; Start 197; Stop 221
aagctaagaacatcactatgaacga

SEQ ID NO: 363133 - DNA, 25 bp, Artificial
  probe
  misc_feature (1)..(25): SEQ ID NO: 3770; WAN024AU3; Start 106; Stop 130
attactaaggttgtgaccattgaag

SEQ ID NO: 363134 - DNA, 25 bp, Artificial
  probe
  misc_feature (1)..(25): SEQ ID NO: 3770; WAN024AU3; Start 301; Stop 325
ccagaggacaaggtcttgattattg

SEQ ID NO: 363135 - DNA, 25 bp, Artificial
  probe
  misc_feature (1)..(25): SEQ ID NO: 3770; WAN024AU3; Start 51; Stop 75
tagcctaatgagagaaatcggtaag

SEQ ID NO: 363136 - DNA, 25 bp, Artificial
  probe
  misc_feature (1)..(25): SEQ ID NO: 3770; WAN024AU3; Start 107; Stop 131
ttactaaggttgtgaccattgaagc

SEQ ID NO: 363137 - DNA, 25 bp, Artificial
  probe
  misc_feature (1)..(25): SEQ ID NO: 3770; WAN024AU3; Start 104; Stop 128
gcattactaaggttgtgaccattga

SEQ ID NO: 363138 - DNA, 25 bp, Artificial
  probe
  misc_feature (1)..(25): SEQ ID NO: 3770; WAN024AU3; Start 349; Stop 373
gctgctaaaggcttaattcaaatca

SEQ ID NO: 363139 - DNA, 25 bp, Artificial
  probe
  misc_feature (1)..(25): SEQ ID NO: 3770; WAN024AU3; Start 304; Stop 328
gaggacaaggtcttgattattgacg

SEQ ID NO: 363140 - DNA, 25 bp, Artificial
  probe
  misc_feature (1)..(25): SEQ ID NO: 3770; WAN024AU3; Start 48; Stop 72
ctttagcctaatgagagaaatcggt

SEQ ID NO: 363141 - DNA, 25 bp, Artificial
  probe
  misc_feature (1)..(25): SEQ ID NO: 3770; WAN024AU3; Start 47; Stop 71
actttagcctaatgagagaaatcgg

SEQ ID NO: 363142 - DNA, 25 bp, Artificial
  probe
  misc_feature (1)..(25): SEQ ID NO: 3770; WAN024AU3; Start 238; Stop 262
gaagtttactcctttaccaagcaag

SEQ ID NO: 363143 - DNA, 25 bp, Artificial
  probe
  misc_feature (1)..(25): SEQ ID NO: 3770; WAN024AU3; Start 42; Stop 66
agttgactttagcctaatgagagaa

SEQ ID NO: 363144 - DNA, 25 bp, Artificial
  probe
  misc_feature (1)..(25): SEQ ID NO: 3772; WAN024ABV; Start 50; Stop 74
cttgtttagtcttgagaggtcttgt

SEQ ID NO: 363145 - DNA, 25 bp, Artificial
  probe
  misc_feature (1)..(25): SEQ ID NO: 3772; WAN024ABV; Start 49; Stop 73
tcttgtttagtcttgagaggtcttg

SEQ ID NO: 363146 - DNA, 25 bp, Artificial
  probe
  misc_feature (1)..(25): SEQ ID NO: 3772; WAN024ABV; Start 48; Stop 72
gtcttgtttagtcttgagaggtctt

SEQ ID NO: 363147 - DNA, 25 bp, Artificial
  probe
  misc_feature (1)..(25): SEQ ID NO: 3772; WAN024ABV; Start 44; Stop 68
attggtcttgtttagtcttgagagg

SEQ ID NO: 363148 - DNA, 25 bp, Artificial
  probe
  misc_feature (1)..(25): SEQ ID NO: 3772; WAN024ABV; Start 43; Stop 67
cattggtcttgtttagtcttgagag

SEQ ID NO: 363149 - DNA, 25 bp, Artificial
  probe
  misc_feature (1)..(25): SEQ ID NO: 3772; WAN024ABV; Start 42; Stop 66
gcattggtcttgtttagtcttgaga

SEQ ID NO: 363150 - DNA, 25 bp, Artificial
  probe
  misc_feature (1)..(25): SEQ ID NO: 3772; WAN024ABV; Start 45; Stop 69
ttggtcttgtttagtcttgagaggt

SEQ ID NO: 363151 - DNA, 25 bp, Artificial
  probe
  misc_feature (1)..(25): SEQ ID NO: 3772; WAN024ABV; Start 47; Stop 71
ggtcttgtttagtcttgagaggtct

SEQ ID NO: 363152 - DNA, 25 bp, Artificial
  probe
  misc_feature (1)..(25): SEQ ID NO: 3772; WAN024ABV; Start 46; Stop 70
tggtcttgtttagtcttgagaggtc

SEQ ID NO: 363153 - DNA, 25 bp, Artificial
  probe
  misc_feature (1)..(25): SEQ ID NO: 3772; WAN024ABV; Start 41; Stop 65
cgcattggtcttgtttagtcttgag

SEQ ID NO: 363154 - DNA, 25 bp, Artificial
  probe
  misc_feature (1)..(25): SEQ ID NO: 3772; WAN024ABV; Start 40; Stop 64
gcgcattggtcttgtttagtcttga

SEQ ID NO: 363155 - DNA, 25 bp, Artificial
  probe
  misc_feature (1)..(25): SEQ ID NO: 3772; WAN024ABV; Start 19; Stop 43
cctttctaaggataaggaactgcgc

SEQ ID NO: 363156 - DNA, 25 bp, Artificial
  probe
  misc_feature (1)..(25): SEQ ID NO: 3773; WAN0249RU; Start 1; Stop 25
ggtggggtaaatagatttcaaaatg

SEQ ID NO: 363157 - DNA, 25 bp, Artificial
  probe
  misc_feature (1)..(25): SEQ ID NO: 3773; WAN0249RU; Start 2; Stop 26
gtggggtaaatagatttcaaaatga

SEQ ID NO: 363158 - DNA, 25 bp, Artificial
  probe
  misc_feature (1)..(25): SEQ ID NO: 3773; WAN0249RU; Start 3; Stop 27
tggggtaaatagatttcaaaatgat

SEQ ID NO: 363159 - DNA, 25 bp, Artificial
  probe
  misc_feature (1)..(25): SEQ ID NO: 3773; WAN0249RU; Start 4; Stop 28
ggggtaaatagatttcaaaatgata

SEQ ID NO: 363160 - DNA, 25 bp, Artificial
  probe
  misc_feature (1)..(25): SEQ ID NO: 3774; WAN024FAD; Start 2829; Stop 2853
ggtagataggttagaagtggaagtg

SEQ ID NO: 363161 - DNA, 25 bp, Artificial
  probe
  misc_feature (1)..(25): SEQ ID NO: 3774; WAN024FAD; Start 2828; Stop 2852
aggtagataggttagaagtggaagt

SEQ ID NO: 363162 - DNA, 25 bp, Artificial
  probe
  misc_feature (1)..(25): SEQ ID NO: 3774; WAN024FAD; Start 2826; Stop 2850
tcaggtagataggttagaagtggaa

SEQ ID NO: 363163 - DNA, 25 bp, Artificial
  probe
  misc_feature (1)..(25): SEQ ID NO: 3774; WAN024FAD; Start 2827; Stop 2851
caggtagataggttagaagtggaag

SEQ ID NO: 363164 - DNA, 25 bp, Artificial
  probe
  misc_feature (1)..(25): SEQ ID NO: 3774; WAN024FAD; Start 2825; Stop 2849
atcaggtagataggttagaagtgga

SEQ ID NO: 363165 - DNA, 25 bp, Artificial
  probe
  misc_feature (1)..(25): SEQ ID NO: 3774; WAN024FAD; Start 622; Stop 646
ttatgatgcgaggttaagttgaaga

SEQ ID NO: 363166 - DNA, 25 bp, Artificial
  probe
  misc_feature (1)..(25): SEQ ID NO: 3774; WAN024FAD; Start 621; Stop 645
gttatgatgcgaggttaagttgaag

SEQ ID NO: 363167 - DNA, 25 bp, Artificial
  probe
  misc_feature (1)..(25): SEQ ID NO: 3774; WAN024FAD; Start 2831; Stop 2855
tagataggttagaagtggaagtgtg

SEQ ID NO: 363168 - DNA, 25 bp, Artificial
  probe
  misc_feature (1)..(25): SEQ ID NO: 3774; WAN024FAD; Start 2830; Stop 2854
gtagataggttagaagtggaagtgt

SEQ ID NO: 363169 - DNA, 25 bp, Artificial
  probe
  misc_feature (1)..(25): SEQ ID NO: 3774; WAN024FAD; Start 2113; Stop 2137
tacaggataggtaggagtctaagag

SEQ ID NO: 363170 - DNA, 25 bp, Artificial
  probe
  misc_feature (1)..(25): SEQ ID NO: 3774; WAN024FAD; Start 623; Stop 647
tatgatgcgaggttaagttgaagag

SEQ ID NO: 363171 - DNA, 25 bp, Artificial
  probe
  misc_feature (1)..(25): SEQ ID NO: 3774; WAN024FAD; Start 1912; Stop 1936
gtaactataacggtcctaaggtagc

SEQ ID NO: 363172 - DNA, 25 bp, Artificial
  probe
  misc_feature (1)..(25): SEQ ID NO: 3774; WAN024FAD; Start 1205; Stop 1229
ttataggtatggtaggagagcgttc

SEQ ID NO: 363173 - DNA, 25 bp, Artificial
  probe
  misc_feature (1)..(25): SEQ ID NO: 3774; WAN024FAD; Start 1224; Stop 1248
gcgttctatgtgtgatgaaggtata

SEQ ID NO: 363174 - DNA, 25 bp, Artificial
  probe
  misc_feature (1)..(25): SEQ ID NO: 3774; WAN024FAD; Start 875; Stop 899
cattagagattcttggaggtagagc

SEQ ID NO: 363175 - DNA, 25 bp, Artificial
  probe
  misc_feature (1)..(25): SEQ ID NO: 3774; WAN024FAD; Start 872; Stop 896
cgacattagagattcttggaggtag

SEQ ID NO: 363176 - DNA, 25 bp, Artificial
  probe
  misc_feature (1)..(25): SEQ ID NO: 3774; WAN024FAD; Start 2115; Stop 2139
caggataggtaggagtctaagagat

SEQ ID NO: 363177 - DNA, 25 bp, Artificial
  probe
  misc_feature (1)..(25): SEQ ID NO: 3774; WAN024FAD; Start 876; Stop 900
attagagattcttggaggtagagca

SEQ ID NO: 363178 - DNA, 25 bp, Artificial
  probe
  misc_feature (1)..(25): SEQ ID NO: 3774; WAN024FAD; Start 2114; Stop 2138
acaggataggtaggagtctaagaga

SEQ ID NO: 363179 - DNA, 25 bp, Artificial
  probe
  misc_feature (1)..(25): SEQ ID NO: 3774; WAN024FAD; Start 874; Stop 898
acattagagattcttggaggtagag

SEQ ID NO: 363180 - DNA, 25 bp, Artificial
  probe
  misc_feature (1)..(25): SEQ ID NO: 3774; WAN024FAD; Start 873; Stop 897
gacattagagattcttggaggtaga

SEQ ID NO: 363181 - DNA, 25 bp, Artificial
  probe
  misc_feature (1)..(25): SEQ ID NO: 3774; WAN024FAD; Start 2832; Stop 2856
agataggttagaagtggaagtgtgg

SEQ ID NO: 363182 - DNA, 25 bp, Artificial
  probe
  misc_feature (1)..(25): SEQ ID NO: 3774; WAN024FAD; Start 1913; Stop 1937
taactataacggtcctaaggtagcg

SEQ ID NO: 363183 - DNA, 25 bp, Artificial
  probe
  misc_feature (1)..(25): SEQ ID NO: 3774; WAN024FAD; Start 2112; Stop 2136
gtacaggataggtaggagtctaaga

SEQ ID NO: 363184 - DNA, 25 bp, Artificial
  probe
  misc_feature (1)..(25): SEQ ID NO: 3774; WAN024FAD; Start 153; Stop 177
atctgttaaggatgtgaggaggaag

SEQ ID NO: 363185 - DNA, 25 bp, Artificial
  probe
  misc_feature (1)..(25): SEQ ID NO: 3774; WAN024FAD; Start 1866; Stop 1890
ttagcgtaagcgaaggtatgaattg

SEQ ID NO: 363186 - DNA, 25 bp, Artificial
  probe
  misc_feature (1)..(25): SEQ ID NO: 3774; WAN024FAD; Start 877; Stop 901
ttagagattcttggaggtagagcac

SEQ ID NO: 363187 - DNA, 25 bp, Artificial
  probe
  misc_feature (1)..(25): SEQ ID NO: 3774; WAN024FAD; Start 2824; Stop 2848
gatcaggtagataggttagaagtgg

SEQ ID NO: 363188 - DNA, 25 bp, Artificial
  probe
  misc_feature (1)..(25): SEQ ID NO: 3774; WAN024FAD; Start 620; Stop 644
cgttatgatgcgaggttaagttgaa

SEQ ID NO: 363189 - DNA, 25 bp, Artificial
  probe
  misc_feature (1)..(25): SEQ ID NO: 3774; WAN024FAD; Start 1208; Stop 1232
taggtatggtaggagagcgttctat

SEQ ID NO: 363190 - DNA, 25 bp, Artificial
  probe
  misc_feature (1)..(25): SEQ ID NO: 3774; WAN024FAD; Start 1207; Stop 1231
ataggtatggtaggagagcgttcta

SEQ ID NO: 363191 - DNA, 25 bp, Artificial
  probe
  misc_feature (1)..(25): SEQ ID NO: 3774; WAN024FAD; Start 1206; Stop 1230
tataggtatggtaggagagcgttct

SEQ ID NO: 363192 - DNA, 25 bp, Artificial
  probe
  misc_feature (1)..(25): SEQ ID NO: 3774; WAN024FAD; Start 2118; Stop 2142
gataggtaggagtctaagagatcgg

SEQ ID NO: 363193 - DNA, 25 bp, Artificial
  probe
  misc_feature (1)..(25): SEQ ID NO: 3775; WAN024AO3; Start 1; Stop 25
ggttagcgatttgactgatgtttaa

SEQ ID NO: 363194 - DNA, 25 bp, Artificial
  probe
  misc_feature (1)..(25): SEQ ID NO: 3775; WAN024AO3; Start 6; Stop 30
gcgatttgactgatgtttaatatgt

SEQ ID NO: 363195 - DNA, 25 bp, Artificial
  probe
  misc_feature (1)..(25): SEQ ID NO: 3775; WAN024AO3; Start 2; Stop 26
gttagcgatttgactgatgtttaat

SEQ ID NO: 363196 - DNA, 25 bp, Artificial
  probe
  misc_feature (1)..(25): SEQ ID NO: 3775; WAN024AO3; Start 5; Stop 29
agcgatttgactgatgtttaatatg

SEQ ID NO: 363197 - DNA, 25 bp, Artificial
  probe
  misc_feature (1)..(25): SEQ ID NO: 3775; WAN024AO3; Start 3; Stop 27
ttagcgatttgactgatgtttaata

SEQ ID NO: 363198 - DNA, 25 bp, Artificial
  probe
  misc_feature (1)..(25): SEQ ID NO: 3775; WAN024AO3; Start 4; Stop 28
tagcgatttgactgatgtttaatat

SEQ ID NO: 363199 - DNA, 25 bp, Artificial
  probe
  misc_feature (1)..(25): SEQ ID NO: 3775; WAN024AO3; Start 7; Stop 31
cgatttgactgatgtttaatatgtt

SEQ ID NO: 363200 - DNA, 25 bp, Artificial
  probe
  misc_feature (1)..(25): SEQ ID NO: 3776; WAN024G3C; Start 151; Stop 175
ttaggaaatggaaaagagggtagtc

SEQ ID NO: 363201 - DNA, 25 bp, Artificial
  probe
  misc_feature (1)..(25): SEQ ID NO: 3776; WAN024G3C; Start 180; Stop 204
aaaagatacaactggggtagaacat

SEQ ID NO: 363202 - DNA, 25 bp, Artificial
  probe
  misc_feature (1)..(25): SEQ ID NO: 3776; WAN024G3C; Start 193; Stop 217
ggggtagaacatcatcatcaagaaa

SEQ ID NO: 363203 - DNA, 25 bp, Artificial
  probe
  misc_feature (1)..(25): SEQ ID NO: 3776; WAN024G3C; Start 150; Stop 174
tttaggaaatggaaaagagggtagt

SEQ ID NO: 363204 - DNA, 25 bp, Artificial
  probe
  misc_feature (1)..(25): SEQ ID NO: 3776; WAN024G3C; Start 181; Stop 205
aaagatacaactggggtagaacatc

SEQ ID NO: 363205 - DNA, 25 bp, Artificial
  probe
  misc_feature (1)..(25): SEQ ID NO: 3776; WAN024G3C; Start 28; Stop 52
agaattaaatttgctaatcaggctg

SEQ ID NO: 363206 - DNA, 25 bp, Artificial
  probe
  misc_feature (1)..(25): SEQ ID NO: 3776; WAN024G3C; Start 184; Stop 208
gatacaactggggtagaacatcatc

SEQ ID NO: 363207 - DNA, 25 bp, Artificial
  probe
  misc_feature (1)..(25): SEQ ID NO: 3776; WAN024G3C; Start 194; Stop 218
gggtagaacatcatcatcaagaaaa

SEQ ID NO: 363208 - DNA, 25 bp, Artificial
  probe
  misc_feature (1)..(25): SEQ ID NO: 3776; WAN024G3C; Start 183; Stop 207
agatacaactggggtagaacatcat

SEQ ID NO: 363209 - DNA, 25 bp, Artificial
  probe
  misc_feature (1)..(25): SEQ ID NO: 3776; WAN024G3C; Start 29; Stop 53
gaattaaatttgctaatcaggctga

SEQ ID NO: 363210 - DNA, 25 bp, Artificial
  probe
  misc_feature (1)..(25): SEQ ID NO: 3776; WAN024G3C; Start 154; Stop 178
ggaaatggaaaagagggtagtctaa

SEQ ID NO: 363211 - DNA, 25 bp, Artificial
  probe
  misc_feature (1)..(25): SEQ ID NO: 3776; WAN024G3C; Start 182; Stop 206
aagatacaactggggtagaacatca

SEQ ID NO: 363212 - DNA, 25 bp, Artificial
  probe
  misc_feature (1)..(25): SEQ ID NO: 3776; WAN024G3C; Start 186; Stop 210
tacaactggggtagaacatcatcat

SEQ ID NO: 363213 - DNA, 25 bp, Artificial
  probe
  misc_feature (1)..(25): SEQ ID NO: 3776; WAN024G3C; Start 185; Stop 209
atacaactggggtagaacatcatca

SEQ ID NO: 363214 - DNA, 25 bp, Artificial
  probe
  misc_feature (1)..(25): SEQ ID NO: 3776; WAN024G3C; Start 153; Stop 177
aggaaatggaaaagagggtagtcta

SEQ ID NO: 363215 - DNA, 25 bp, Artificial
  probe
  misc_feature (1)..(25): SEQ ID NO: 3776; WAN024G3C; Start 152; Stop 176
taggaaatggaaaagagggtagtct

SEQ ID NO: 363216 - DNA, 25 bp, Artificial
  probe
  misc_feature (1)..(25): SEQ ID NO: 3776; WAN024G3C; Start 192; Stop 216
tggggtagaacatcatcatcaagaa

SEQ ID NO: 363217 - DNA, 25 bp, Artificial
  probe
  misc_feature (1)..(25): SEQ ID NO: 3776; WAN024G3C; Start 78; Stop 102
tctagtagatcctgatcaagattca

SEQ ID NO: 363218 - DNA, 25 bp, Artificial
  probe
  misc_feature (1)..(25): SEQ ID NO: 3776; WAN024G3C; Start 189; Stop 213
aactggggtagaacatcatcatcaa

SEQ ID NO: 363219 - DNA, 25 bp, Artificial
  probe
  misc_feature (1)..(25): SEQ ID NO: 3776; WAN024G3C; Start 333; Stop 357
tgatgattttacaagtgaaactggt

SEQ ID NO: 363220 - DNA, 25 bp, Artificial
  probe
  misc_feature (1)..(25): SEQ ID NO: 3776; WAN024G3C; Start 191; Stop 215
ctggggtagaacatcatcatcaaga

SEQ ID NO: 363221 - DNA, 25 bp, Artificial
  probe
  misc_feature (1)..(25): SEQ ID NO: 3776; WAN024G3C; Start 155; Stop 179
gaaatggaaaagagggtagtctaaa

SEQ ID NO: 363222 - DNA, 25 bp, Artificial
  probe
  misc_feature (1)..(25): SEQ ID NO: 3776; WAN024G3C; Start 190; Stop 214
actggggtagaacatcatcatcaag

SEQ ID NO: 363223 - DNA, 25 bp, Artificial
  probe
  misc_feature (1)..(25): SEQ ID NO: 3776; WAN024G3C; Start 332; Stop 356
ttgatgattttacaagtgaaactgg

SEQ ID NO: 363224 - DNA, 25 bp, Artificial
  probe
  misc_feature (1)..(25): SEQ ID NO: 3776; WAN024G3C; Start 156; Stop 180
aaatggaaaagagggtagtctaaaa

SEQ ID NO: 363225 - DNA, 25 bp, Artificial
  probe
  misc_feature (1)..(25): SEQ ID NO: 3776; WAN024G3C; Start 188; Stop 212
caactggggtagaacatcatcatca

SEQ ID NO: 363226 - DNA, 25 bp, Artificial
  probe
  misc_feature (1)..(25): SEQ ID NO: 3776; WAN024G3C; Start 187; Stop 211
acaactggggtagaacatcatcatc

SEQ ID NO: 363227 - DNA, 25 bp, Artificial
  probe
  misc_feature (1)..(25): SEQ ID NO: 3776; WAN024G3C; Start 34; Stop 58
aaatttgctaatcaggctgatgaaa

SEQ ID NO: 363228 - DNA, 25 bp, Artificial
  probe
  misc_feature (1)..(25): SEQ ID NO: 3776; WAN024G3C; Start 81; Stop 105
agtagatcctgatcaagattcatct

SEQ ID NO: 363229 - DNA, 25 bp, Artificial
  probe
  misc_feature (1)..(25): SEQ ID NO: 3776; WAN024G3C; Start 149; Stop 173
atttaggaaatggaaaagagggtag

SEQ ID NO: 363230 - DNA, 25 bp, Artificial
  probe
  misc_feature (1)..(25): SEQ ID NO: 3776; WAN024G3C; Start 80; Stop 104
tagtagatcctgatcaagattcatc

SEQ ID NO: 363231 - DNA, 25 bp, Artificial
  probe
  misc_feature (1)..(25): SEQ ID NO: 3776; WAN024G3C; Start 79; Stop 103
ctagtagatcctgatcaagattcat

SEQ ID NO: 363232 - DNA, 25 bp, Artificial
  probe
  misc_feature (1)..(25): SEQ ID NO: 3776; WAN024G3C; Start 33; Stop 57
taaatttgctaatcaggctgatgaa

SEQ ID NO: 363233 - DNA, 25 bp, Artificial
  probe
  misc_feature (1)..(25): SEQ ID NO: 3777; WAN024A8U; Start 60; Stop 84
tgaggagggcttgttttatggtaaa

SEQ ID NO: 363234 - DNA, 25 bp, Artificial
  probe
  misc_feature (1)..(25): SEQ ID NO: 3777; WAN024A8U; Start 55; Stop 79
gtttgtgaggagggcttgttttatg

SEQ ID NO: 363235 - DNA, 25 bp, Artificial
  probe
  misc_feature (1)..(25): SEQ ID NO: 3777; WAN024A8U; Start 59; Stop 83
gtgaggagggcttgttttatggtaa

SEQ ID NO: 363236 - DNA, 25 bp, Artificial
  probe
  misc_feature (1)..(25): SEQ ID NO: 3777; WAN024A8U; Start 67; Stop 91
ggcttgttttatggtaaaatggtct

SEQ ID NO: 363237 - DNA, 25 bp, Artificial
  probe
  misc_feature (1)..(25): SEQ ID NO: 3777; WAN024A8U; Start 64; Stop 88
gagggcttgttttatggtaaaatgg

SEQ ID NO: 363238 - DNA, 25 bp, Artificial
  probe
  misc_feature (1)..(25): SEQ ID NO: 3777; WAN024A8U; Start 63; Stop 87
ggagggcttgttttatggtaaaatg

SEQ ID NO: 363239 - DNA, 25 bp, Artificial
  probe
  misc_feature (1)..(25): SEQ ID NO: 3777; WAN024A8U; Start 62; Stop 86
aggagggcttgttttatggtaaaat

SEQ ID NO: 363240 - DNA, 25 bp, Artificial
  probe
  misc_feature (1)..(25): SEQ ID NO: 3777; WAN024A8U; Start 56; Stop 80
tttgtgaggagggcttgttttatgg

SEQ ID NO: 363241 - DNA, 25 bp, Artificial
  probe
  misc_feature (1)..(25): SEQ ID NO: 3777; WAN024A8U; Start 66; Stop 90
gggcttgttttatggtaaaatggtc

SEQ ID NO: 363242 - DNA, 25 bp, Artificial
  probe
  misc_feature (1)..(25): SEQ ID NO: 3777; WAN024A8U; Start 65; Stop 89
agggcttgttttatggtaaaatggt

SEQ ID NO: 363243 - DNA, 25 bp, Artificial
  probe
  misc_feature (1)..(25): SEQ ID NO: 3777; WAN024A8U; Start 61; Stop 85
gaggagggcttgttttatggtaaaa

SEQ ID NO: 363244 - DNA, 25 bp, Artificial
  probe
  misc_feature (1)..(25): SEQ ID NO: 3777; WAN024A8U; Start 58; Stop 82
tgtgaggagggcttgttttatggta

SEQ ID NO: 363245 - DNA, 25 bp, Artificial
  probe
  misc_feature (1)..(25): SEQ ID NO: 3777; WAN024A8U; Start 68; Stop 92
gcttgttttatggtaaaatggtctt

SEQ ID NO: 363246 - DNA, 25 bp, Artificial
  probe
  misc_feature (1)..(25): SEQ ID NO: 3777; WAN024A8U; Start 54; Stop 78
cgtttgtgaggagggcttgttttat

SEQ ID NO: 363247 - DNA, 25 bp, Artificial
  probe
  misc_feature (1)..(25): SEQ ID NO: 3777; WAN024A8U; Start 57; Stop 81
ttgtgaggagggcttgttttatggt

SEQ ID NO: 363248 - DNA, 25 bp, Artificial
  probe
  misc_feature (1)..(25): SEQ ID NO: 3777; WAN024A8U; Start 53; Stop 77
tcgtttgtgaggagggcttgtttta

SEQ ID NO: 363249 - DNA, 25 bp, Artificial
  probe
  misc_feature (1)..(25): SEQ ID NO: 3778; WAN0249UM; Start 34; Stop 58
caagaatgtactgacaaggaggagg

SEQ ID NO: 363250 - DNA, 25 bp, Artificial
  probe
  misc_feature (1)..(25): SEQ ID NO: 3778; WAN0249UM; Start 35; Stop 59
aagaatgtactgacaaggaggaggt

SEQ ID NO: 363251 - DNA, 25 bp, Artificial
  probe
  misc_feature (1)..(25): SEQ ID NO: 3778; WAN0249UM; Start 33; Stop 57
gcaagaatgtactgacaaggaggag

SEQ ID NO: 363252 - DNA, 25 bp, Artificial
  probe
  misc_feature (1)..(25): SEQ ID NO: 3778; WAN0249UM; Start 41; Stop 65
gtactgacaaggaggaggtgagaag

SEQ ID NO: 363253 - DNA, 25 bp, Artificial
  probe
  misc_feature (1)..(25): SEQ ID NO: 3778; WAN0249UM; Start 38; Stop 62
aatgtactgacaaggaggaggtgag

SEQ ID NO: 363254 - DNA, 25 bp, Artificial
  probe
  misc_feature (1)..(25): SEQ ID NO: 3778; WAN0249UM; Start 37; Stop 61
gaatgtactgacaaggaggaggtga

SEQ ID NO: 363255 - DNA, 25 bp, Artificial
  probe
  misc_feature (1)..(25): SEQ ID NO: 3778; WAN0249UM; Start 36; Stop 60
agaatgtactgacaaggaggaggtg

SEQ ID NO: 363256 - DNA, 25 bp, Artificial
  probe
  misc_feature (1)..(25): SEQ ID NO: 3778; WAN0249UM; Start 39; Stop 63
atgtactgacaaggaggaggtgaga

SEQ ID NO: 363257 - DNA, 25 bp, Artificial
  probe
  misc_feature (1)..(25): SEQ ID NO: 3778; WAN0249UM; Start 32; Stop 56
tgcaagaatgtactgacaaggagga

SEQ ID NO: 363258 - DNA, 25 bp, Artificial
  probe
  misc_feature (1)..(25): SEQ ID NO: 3778; WAN0249UM; Start 40; Stop 64
tgtactgacaaggaggaggtgagaa

SEQ ID NO: 363259 - DNA, 25 bp, Artificial
  probe
  misc_feature (1)..(25): SEQ ID NO: 3778; WAN0249UM; Start 28; Stop 52
ctattgcaagaatgtactgacaagg

SEQ ID NO: 363260 - DNA, 25 bp, Artificial
  probe
  misc_feature (1)..(25): SEQ ID NO: 3778; WAN0249UM; Start 29; Stop 53
tattgcaagaatgtactgacaagga

SEQ ID NO: 363261 - DNA, 25 bp, Artificial
  probe
  misc_feature (1)..(25): SEQ ID NO: 3778; WAN0249UM; Start 27; Stop 51
tctattgcaagaatgtactgacaag

SEQ ID NO: 363262 - DNA, 25 bp, Artificial
  probe
  misc_feature (1)..(25): SEQ ID NO: 3778; WAN0249UM; Start 30; Stop 54
attgcaagaatgtactgacaaggag

SEQ ID NO: 363263 - DNA, 25 bp, Artificial
  probe
  misc_feature (1)..(25): SEQ ID NO: 3778; WAN0249UM; Start 26; Stop 50
ttctattgcaagaatgtactgacaa

SEQ ID NO: 363264 - DNA, 25 bp, Artificial
  probe
  misc_feature (1)..(25): SEQ ID NO: 3778; WAN0249UM; Start 31; Stop 55
ttgcaagaatgtactgacaaggagg

SEQ ID NO: 363265 - DNA, 25 bp, Artificial
  probe
  misc_feature (1)..(25): SEQ ID NO: 3778; WAN0249UM; Start 25; Stop 49
tttctattgcaagaatgtactgaca

SEQ ID NO: 363266 - DNA, 25 bp, Artificial
  probe
  misc_feature (1)..(25): SEQ ID NO: 3778; WAN0249UM; Start 24; Stop 48
ttttctattgcaagaatgtactgac

SEQ ID NO: 363267 - DNA, 25 bp, Artificial
  probe
  misc_feature (1)..(25): SEQ ID NO: 3779; WAN0249XF; Start 48; Stop 72
cgaacagcaactattataccctaaa

SEQ ID NO: 363268 - DNA, 25 bp, Artificial
  probe
  misc_feature (1)..(25): SEQ ID NO: 3779; WAN0249XF; Start 5; Stop 29
tctccttatcatcattcactattct

SEQ ID NO: 363269 - DNA, 25 bp, Artificial
  probe
  misc_feature (1)..(25): SEQ ID NO: 3779; WAN0249XF; Start 1; Stop 25
ggtttctccttatcatcattcacta

SEQ ID NO: 363270 - DNA, 25 bp, Artificial
  probe
  misc_feature (1)..(25): SEQ ID NO: 3779; WAN0249XF; Start 46; Stop 70
ctcgaacagcaactattatacccta

SEQ ID NO: 363271 - DNA, 25 bp, Artificial
  probe
  misc_feature (1)..(25): SEQ ID NO: 3779; WAN0249XF; Start 44; Stop 68
ttctcgaacagcaactattataccc

SEQ ID NO: 363272 - DNA, 25 bp, Artificial
  probe
  misc_feature (1)..(25): SEQ ID NO: 3779; WAN0249XF; Start 6; Stop 30
ctccttatcatcattcactattctt

SEQ ID NO: 363273 - DNA, 25 bp, Artificial
  probe
  misc_feature (1)..(25): SEQ ID NO: 3779; WAN0249XF; Start 4; Stop 28
ttctccttatcatcattcactattc

SEQ ID NO: 363274 - DNA, 25 bp, Artificial
  probe
  misc_feature (1)..(25): SEQ ID NO: 3779; WAN0249XF; Start 47; Stop 71
tcgaacagcaactattataccctaa

SEQ ID NO: 363275 - DNA, 25 bp, Artificial
  probe
  misc_feature (1)..(25): SEQ ID NO: 3779; WAN0249XF; Start 43; Stop 67
tttctcgaacagcaactattatacc

SEQ ID NO: 363276 - DNA, 25 bp, Artificial
  probe
  misc_feature (1)..(25): SEQ ID NO: 3779; WAN0249XF; Start 45; Stop 69
tctcgaacagcaactattataccct

SEQ ID NO: 363277 - DNA, 25 bp, Artificial
  probe
  misc_feature (1)..(25): SEQ ID NO: 3779; WAN0249XF; Start 2; Stop 26
gtttctccttatcatcattcactat

SEQ ID NO: 363278 - DNA, 25 bp, Artificial
  probe
  misc_feature (1)..(25): SEQ ID NO: 3779; WAN0249XF; Start 42; Stop 66
atttctcgaacagcaactattatac

SEQ ID NO: 363279 - DNA, 25 bp, Artificial
  probe
  misc_feature (1)..(25): SEQ ID NO: 3779; WAN0249XF; Start 40; Stop 64
aaatttctcgaacagcaactattat

SEQ ID NO: 363280 - DNA, 25 bp, Artificial
  probe
  misc_feature (1)..(25): SEQ ID NO: 3779; WAN0249XF; Start 54; Stop 78
gcaactattataccctaaaatcagc

SEQ ID NO: 363281 - DNA, 25 bp, Artificial
  probe
  misc_feature (1)..(25): SEQ ID NO: 3779; WAN0249XF; Start 106; Stop 130
tatcaatctatcggcttttctacat

SEQ ID NO: 363282 - DNA, 25 bp, Artificial
  probe
  misc_feature (1)..(25): SEQ ID NO: 3779; WAN0249XF; Start 105; Stop 129
atatcaatctatcggcttttctaca

SEQ ID NO: 363283 - DNA, 25 bp, Artificial
  probe
  misc_feature (1)..(25): SEQ ID NO: 3779; WAN0249XF; Start 8; Stop 32
ccttatcatcattcactattctttg

SEQ ID NO: 363284 - DNA, 25 bp, Artificial
  probe
  misc_feature (1)..(25): SEQ ID NO: 3779; WAN0249XF; Start 41; Stop 65
aatttctcgaacagcaactattata

SEQ ID NO: 363285 - DNA, 25 bp, Artificial
  probe
  misc_feature (1)..(25): SEQ ID NO: 3779; WAN0249XF; Start 35; Stop 59
aatcaaaatttctcgaacagcaact

SEQ ID NO: 363286 - DNA, 25 bp, Artificial
  probe
  misc_feature (1)..(25): SEQ ID NO: 3779; WAN0249XF; Start 37; Stop 61
tcaaaatttctcgaacagcaactat

SEQ ID NO: 363287 - DNA, 25 bp, Artificial
  probe
  misc_feature (1)..(25): SEQ ID NO: 3779; WAN0249XF; Start 36; Stop 60
atcaaaatttctcgaacagcaacta

SEQ ID NO: 363288 - DNA, 25 bp, Artificial
  probe
  misc_feature (1)..(25): SEQ ID NO: 3779; WAN0249XF; Start 7; Stop 31
tccttatcatcattcactattcttt

SEQ ID NO: 363289 - DNA, 25 bp, Artificial
  probe
  misc_feature (1)..(25): SEQ ID NO: 3779; WAN0249XF; Start 3; Stop 27
tttctccttatcatcattcactatt

SEQ ID NO: 363290 - DNA, 25 bp, Artificial
  probe
  misc_feature (1)..(25): SEQ ID NO: 3779; WAN0249XF; Start 38; Stop 62
caaaatttctcgaacagcaactatt

SEQ ID NO: 363291 - DNA, 25 bp, Artificial
  probe
  misc_feature (1)..(25): SEQ ID NO: 3779; WAN0249XF; Start 49; Stop 73
gaacagcaactattataccctaaaa

SEQ ID NO: 363292 - DNA, 25 bp, Artificial
  probe
  misc_feature (1)..(25): SEQ ID NO: 3779; WAN0249XF; Start 34; Stop 58
aaatcaaaatttctcgaacagcaac

SEQ ID NO: 363293 - DNA, 25 bp, Artificial
  probe
  misc_feature (1)..(25): SEQ ID NO: 3779; WAN0249XF; Start 33; Stop 57
aaaatcaaaatttctcgaacagcaa

SEQ ID NO: 363294 - DNA, 25 bp, Artificial
  probe
  misc_feature (1)..(25): SEQ ID NO: 3779; WAN0249XF; Start 55; Stop 79
caactattataccctaaaatcagca

SEQ ID NO: 363295 - DNA, 25 bp, Artificial
  probe
  misc_feature (1)..(25): SEQ ID NO: 3779; WAN0249XF; Start 52; Stop 76
cagcaactattataccctaaaatca

SEQ ID NO: 363296 - DNA, 25 bp, Artificial
  probe
  misc_feature (1)..(25): SEQ ID NO: 3779; WAN0249XF; Start 51; Stop 75
acagcaactattataccctaaaatc

SEQ ID NO: 363297 - DNA, 25 bp, Artificial
  probe
  misc_feature (1)..(25): SEQ ID NO: 3779; WAN0249XF; Start 53; Stop 77
agcaactattataccctaaaatcag

SEQ ID NO: 363298 - DNA, 25 bp, Artificial
  probe
  misc_feature (1)..(25): SEQ ID NO: 3779; WAN0249XF; Start 39; Stop 63
aaaatttctcgaacagcaactatta

SEQ ID NO: 363299 - DNA, 25 bp, Artificial
  probe
  misc_feature (1)..(25): SEQ ID NO: 3779; WAN0249XF; Start 50; Stop 74
aacagcaactattataccctaaaat

SEQ ID NO: 363300 - DNA, 25 bp, Artificial
  probe
  misc_feature (1)..(25): SEQ ID NO: 3780; WAN024DTK; Start 82; Stop 106
gttacggctattgctctctatggtt

SEQ ID NO: 363301 - DNA, 25 bp, Artificial
  probe
  misc_feature (1)..(25): SEQ ID NO: 3780; WAN024DTK; Start 79; Stop 103
gtggttacggctattgctctctatg

SEQ ID NO: 363302 - DNA, 25 bp, Artificial
  probe
  misc_feature (1)..(25): SEQ ID NO: 3780; WAN024DTK; Start 128; Stop 152
ttgagaaacacaatgagttgatgac

SEQ ID NO: 363303 - DNA, 25 bp, Artificial
  probe
  misc_feature (1)..(25): SEQ ID NO: 3780; WAN024DTK; Start 127; Stop 151
gttgagaaacacaatgagttgatga

SEQ ID NO: 363304 - DNA, 25 bp, Artificial
  probe
  misc_feature (1)..(25): SEQ ID NO: 3780; WAN024DTK; Start 78; Stop 102
agtggttacggctattgctctctat

SEQ ID NO: 363305 - DNA, 25 bp, Artificial
  probe
  misc_feature (1)..(25): SEQ ID NO: 3780; WAN024DTK; Start 132; Stop 156
gaaacacaatgagttgatgacccta

SEQ ID NO: 363306 - DNA, 25 bp, Artificial
  probe
  misc_feature (1)..(25): SEQ ID NO: 3780; WAN024DTK; Start 129; Stop 153
tgagaaacacaatgagttgatgacc

SEQ ID NO: 363307 - DNA, 25 bp, Artificial
  probe
  misc_feature (1)..(25): SEQ ID NO: 3780; WAN024DTK; Start 112; Stop 136
catgcttattgctttgttgagaaac

SEQ ID NO: 363308 - DNA, 25 bp, Artificial
  probe
  misc_feature (1)..(25): SEQ ID NO: 3780; WAN024DTK; Start 111; Stop 135
tcatgcttattgctttgttgagaaa

SEQ ID NO: 363309 - DNA, 25 bp, Artificial
  probe
  misc_feature (1)..(25): SEQ ID NO: 3780; WAN024DTK; Start 110; Stop 134
atcatgcttattgctttgttgagaa

SEQ ID NO: 363310 - DNA, 25 bp, Artificial
  probe
  misc_feature (1)..(25): SEQ ID NO: 3780; WAN024DTK; Start 46; Stop 70
gagttggaaacagagttgcctttag

SEQ ID NO: 363311 - DNA, 25 bp, Artificial
  probe
  misc_feature (1)..(25): SEQ ID NO: 3780; WAN024DTK; Start 109; Stop 133
tatcatgcttattgctttgttgaga

SEQ ID NO: 363312 - DNA, 25 bp, Artificial
  probe
  misc_feature (1)..(25): SEQ ID NO: 3780; WAN024DTK; Start 130; Stop 154
gagaaacacaatgagttgatgaccc

SEQ ID NO: 363313 - DNA, 25 bp, Artificial
  probe
  misc_feature (1)..(25): SEQ ID NO: 3780; WAN024DTK; Start 131; Stop 155
agaaacacaatgagttgatgaccct

SEQ ID NO: 363314 - DNA, 25 bp, Artificial
  probe
  misc_feature (1)..(25): SEQ ID NO: 3780; WAN024DTK; Start 108; Stop 132
ttatcatgcttattgctttgttgag

SEQ ID NO: 363315 - DNA, 25 bp, Artificial
  probe
  misc_feature (1)..(25): SEQ ID NO: 3780; WAN024DTK; Start 81; Stop 105
ggttacggctattgctctctatggt

SEQ ID NO: 363316 - DNA, 25 bp, Artificial
  probe
  misc_feature (1)..(25): SEQ ID NO: 3780; WAN024DTK; Start 80; Stop 104
tggttacggctattgctctctatgg

SEQ ID NO: 363317 - DNA, 25 bp, Artificial
  probe
  misc_feature (1)..(25): SEQ ID NO: 3780; WAN024DTK; Start 77; Stop 101
cagtggttacggctattgctctcta

SEQ ID NO: 363318 - DNA, 25 bp, Artificial
  probe
  misc_feature (1)..(25): SEQ ID NO: 3780; WAN024DTK; Start 52; Stop 76
gaaacagagttgcctttagcgattc

SEQ ID NO: 363319 - DNA, 25 bp, Artificial
  probe
  misc_feature (1)..(25): SEQ ID NO: 3780; WAN024DTK; Start 45; Stop 69
ggagttggaaacagagttgccttta

SEQ ID NO: 363320 - DNA, 25 bp, Artificial
  probe
  misc_feature (1)..(25): SEQ ID NO: 3780; WAN024DTK; Start 47; Stop 71
agttggaaacagagttgcctttagc

SEQ ID NO: 363321 - DNA, 25 bp, Artificial
  probe
  misc_feature (1)..(25): SEQ ID NO: 3780; WAN024DTK; Start 53; Stop 77
aaacagagttgcctttagcgattcc

SEQ ID NO: 363322 - DNA, 25 bp, Artificial
  probe
  misc_feature (1)..(25): SEQ ID NO: 3780; WAN024DTK; Start 51; Stop 75
ggaaacagagttgcctttagcgatt

SEQ ID NO: 363323 - DNA, 25 bp, Artificial
  probe
  misc_feature (1)..(25): SEQ ID NO: 3780; WAN024DTK; Start 126; Stop 150
tgttgagaaacacaatgagttgatg

SEQ ID NO: 363324 - DNA, 25 bp, Artificial
  probe
  misc_feature (1)..(25): SEQ ID NO: 3780; WAN024DTK; Start 124; Stop 148
tttgttgagaaacacaatgagttga

SEQ ID NO: 363325 - DNA, 25 bp, Artificial
  probe
  misc_feature (1)..(25): SEQ ID NO: 3780; WAN024DTK; Start 113; Stop 137
atgcttattgctttgttgagaaaca

SEQ ID NO: 363326 - DNA, 25 bp, Artificial
  probe
  misc_feature (1)..(25): SEQ ID NO: 3780; WAN024DTK; Start 125; Stop 149
ttgttgagaaacacaatgagttgat

SEQ ID NO: 363327 - DNA, 25 bp, Artificial
  probe
  misc_feature (1)..(25): SEQ ID NO: 3780; WAN024DTK; Start 123; Stop 147
ctttgttgagaaacacaatgagttg

SEQ ID NO: 363328 - DNA, 25 bp, Artificial
  probe
  misc_feature (1)..(25): SEQ ID NO: 3780; WAN024DTK; Start 119; Stop 143
attgctttgttgagaaacacaatga

SEQ ID NO: 363329 - DNA, 25 bp, Artificial
  probe
  misc_feature (1)..(25): SEQ ID NO: 3780; WAN024DTK; Start 122; Stop 146
gctttgttgagaaacacaatgagtt

SEQ ID NO: 363330 - DNA, 25 bp, Artificial
  probe
  misc_feature (1)..(25): SEQ ID NO: 3780; WAN024DTK; Start 120; Stop 144
ttgctttgttgagaaacacaatgag

SEQ ID NO: 363331 - DNA, 25 bp, Artificial
  probe
  misc_feature (1)..(25): SEQ ID NO: 3780; WAN024DTK; Start 118; Stop 142
tattgctttgttgagaaacacaatg

SEQ ID NO: 363332 - DNA, 25 bp, Artificial
  probe
  misc_feature (1)..(25): SEQ ID NO: 3780; WAN024DTK; Start 116; Stop 140
cttattgctttgttgagaaacacaa

SEQ ID NO: 363333 - DNA, 25 bp, Artificial
  probe
  misc_feature (1)..(25): SEQ ID NO: 3782; WAN0249UP; Start 71; Stop 95
atcaagcctcttattggtcatcatt

SEQ ID NO: 363334 - DNA, 25 bp, Artificial
  probe
  misc_feature (1)..(25): SEQ ID NO: 3782; WAN0249UP; Start 70; Stop 94
aatcaagcctcttattggtcatcat

SEQ ID NO: 363335 - DNA, 25 bp, Artificial
  probe
  misc_feature (1)..(25): SEQ ID NO: 3782; WAN0249UP; Start 68; Stop 92
caaatcaagcctcttattggtcatc

SEQ ID NO: 363336 - DNA, 25 bp, Artificial
  probe
  misc_feature (1)..(25): SEQ ID NO: 3782; WAN0249UP; Start 62; Stop 86
attcaccaaatcaagcctcttattg

SEQ ID NO: 363337 - DNA, 25 bp, Artificial
  probe
  misc_feature (1)..(25): SEQ ID NO: 3782; WAN0249UP; Start 72; Stop 96
tcaagcctcttattggtcatcattt

SEQ ID NO: 363338 - DNA, 25 bp, Artificial
  probe
  misc_feature (1)..(25): SEQ ID NO: 3782; WAN0249UP; Start 69; Stop 93
aaatcaagcctcttattggtcatca

SEQ ID NO: 363339 - DNA, 25 bp, Artificial
  probe
  misc_feature (1)..(25): SEQ ID NO: 3782; WAN0249UP; Start 61; Stop 85
gattcaccaaatcaagcctcttatt

SEQ ID NO: 363340 - DNA, 25 bp, Artificial
  probe
  misc_feature (1)..(25): SEQ ID NO: 3782; WAN0249UP; Start 28; Stop 52
cacaaatggcagtaaaagagagaaa

SEQ ID NO: 363341 - DNA, 25 bp, Artificial
  probe
  misc_feature (1)..(25): SEQ ID NO: 3782; WAN0249UP; Start 26; Stop 50
atcacaaatggcagtaaaagagaga

SEQ ID NO: 363342 - DNA, 25 bp, Artificial
  probe
  misc_feature (1)..(25): SEQ ID NO: 3782; WAN0249UP; Start 27; Stop 51
tcacaaatggcagtaaaagagagaa

SEQ ID NO: 363343 - DNA, 25 bp, Artificial
  probe
  misc_feature (1)..(25): SEQ ID NO: 3782; WAN0249UP; Start 29; Stop 53
acaaatggcagtaaaagagagaaaa

SEQ ID NO: 363344 - DNA, 25 bp, Artificial
  probe
  misc_feature (1)..(25): SEQ ID NO: 3782; WAN0249UP; Start 25; Stop 49
tatcacaaatggcagtaaaagagag

SEQ ID NO: 363345 - DNA, 25 bp, Artificial
  probe
  misc_feature (1)..(25): SEQ ID NO: 3782; WAN0249UP; Start 24; Stop 48
ttatcacaaatggcagtaaaagaga

SEQ ID NO: 363346 - DNA, 25 bp, Artificial
  probe
  misc_feature (1)..(25): SEQ ID NO: 3782; WAN0249UP; Start 73; Stop 97
caagcctcttattggtcatcatttt

SEQ ID NO: 363347 - DNA, 25 bp, Artificial
  probe
  misc_feature (1)..(25): SEQ ID NO: 3782; WAN0249UP; Start 75; Stop 99
agcctcttattggtcatcattttaa

SEQ ID NO: 363348 - DNA, 25 bp, Artificial
  probe
  misc_feature (1)..(25): SEQ ID NO: 3782; WAN0249UP; Start 74; Stop 98
aagcctcttattggtcatcatttta

SEQ ID NO: 363349 - DNA, 25 bp, Artificial
  probe
  misc_feature (1)..(25): SEQ ID NO: 3782; WAN0249UP; Start 23; Stop 47
tttatcacaaatggcagtaaaagag

SEQ ID NO: 363350 - DNA, 25 bp, Artificial
  probe
  misc_feature (1)..(25): SEQ ID NO: 3782; WAN0249UP; Start 76; Stop 100
gcctcttattggtcatcattttaaa

SEQ ID NO: 363351 - DNA, 25 bp, Artificial
  probe
  misc_feature (1)..(25): SEQ ID NO: 3782; WAN0249UP; Start 67; Stop 91
ccaaatcaagcctcttattggtcat

SEQ ID NO: 363352 - DNA, 25 bp, Artificial
  probe
  misc_feature (1)..(25): SEQ ID NO: 3782; WAN0249UP; Start 18; Stop 42
actattttatcacaaatggcagtaa

SEQ ID NO: 363353 - DNA, 25 bp, Artificial
  probe
  misc_feature (1)..(25): SEQ ID NO: 3782; WAN0249UP; Start 63; Stop 87
ttcaccaaatcaagcctcttattgg

SEQ ID NO: 363354 - DNA, 25 bp, Artificial
  probe
  misc_feature (1)..(25): SEQ ID NO: 3782; WAN0249UP; Start 16; Stop 40
atactattttatcacaaatggcagt

SEQ ID NO: 363355 - DNA, 25 bp, Artificial
  probe
  misc_feature (1)..(25): SEQ ID NO: 3782; WAN0249UP; Start 22; Stop 46
ttttatcacaaatggcagtaaaaga

SEQ ID NO: 363356 - DNA, 25 bp, Artificial
  probe
  misc_feature (1)..(25): SEQ ID NO: 3782; WAN0249UP; Start 19; Stop 43
ctattttatcacaaatggcagtaaa

SEQ ID NO: 363357 - DNA, 25 bp, Artificial
  probe
  misc_feature (1)..(25): SEQ ID NO: 3782; WAN0249UP; Start 60; Stop 84
tgattcaccaaatcaagcctcttat

SEQ ID NO: 363358 - DNA, 25 bp, Artificial
  probe
  misc_feature (1)..(25): SEQ ID NO: 3782; WAN0249UP; Start 17; Stop 41
tactattttatcacaaatggcagta

SEQ ID NO: 363359 - DNA, 25 bp, Artificial
  probe
  misc_feature (1)..(25): SEQ ID NO: 3782; WAN0249UP; Start 77; Stop 101
cctcttattggtcatcattttaaag

SEQ ID NO: 363360 - DNA, 25 bp, Artificial
  probe
  misc_feature (1)..(25): SEQ ID NO: 3782; WAN0249UP; Start 21; Stop 45
attttatcacaaatggcagtaaaag

SEQ ID NO: 363361 - DNA, 25 bp, Artificial
  probe
  misc_feature (1)..(25): SEQ ID NO: 3782; WAN0249UP; Start 15; Stop 39
tatactattttatcacaaatggcag

SEQ ID NO: 363362 - DNA, 25 bp, Artificial
  probe
  misc_feature (1)..(25): SEQ ID NO: 3782; WAN0249UP; Start 14; Stop 38
ctatactattttatcacaaatggca

SEQ ID NO: 363363 - DNA, 25 bp, Artificial
  probe
  misc_feature (1)..(25): SEQ ID NO: 3782; WAN0249UP; Start 13; Stop 37
tctatactattttatcacaaatggc

SEQ ID NO: 363364 - DNA, 25 bp, Artificial
  probe
  misc_feature (1)..(25): SEQ ID NO: 3782; WAN0249UP; Start 20; Stop 44
tattttatcacaaatggcagtaaaa

SEQ ID NO: 363365 - DNA, 25 bp, Artificial
  probe
  misc_feature (1)..(25): SEQ ID NO: 3782; WAN0249UP; Start 78; Stop 102
ctcttattggtcatcattttaaaga

SEQ ID NO: 363366 - DNA, 25 bp, Artificial
  probe
  misc_feature (1)..(25): SEQ ID NO: 3782; WAN0249UP; Start 82; Stop 106
tattggtcatcattttaaagaatga

SEQ ID NO: 363367 - DNA, 25 bp, Artificial
  probe
  misc_feature (1)..(25): SEQ ID NO: 3784; WAN024AHU; Start 9; Stop 33
gctgcttttatgaggagattgtaaa

SEQ ID NO: 363368 - DNA, 25 bp, Artificial
  probe
  misc_feature (1)..(25): SEQ ID NO: 3784; WAN024AHU; Start 8; Stop 32
agctgcttttatgaggagattgtaa

SEQ ID NO: 363369 - DNA, 25 bp, Artificial
  probe
  misc_feature (1)..(25): SEQ ID NO: 3784; WAN024AHU; Start 6; Stop 30
atagctgcttttatgaggagattgt

SEQ ID NO: 363370 - DNA, 25 bp, Artificial
  probe
  misc_feature (1)..(25): SEQ ID NO: 3784; WAN024AHU; Start 7; Stop 31
tagctgcttttatgaggagattgta

SEQ ID NO: 363371 - DNA, 25 bp, Artificial
  probe
  misc_feature (1)..(25): SEQ ID NO: 3784; WAN024AHU; Start 5; Stop 29
aatagctgcttttatgaggagattg

SEQ ID NO: 363372 - DNA, 25 bp, Artificial
  probe
  misc_feature (1)..(25): SEQ ID NO: 3784; WAN024AHU; Start 4; Stop 28
aaatagctgcttttatgaggagatt

SEQ ID NO: 363373 - DNA, 25 bp, Artificial
  probe
  misc_feature (1)..(25): SEQ ID NO: 3784; WAN024AHU; Start 3; Stop 27
aaaatagctgcttttatgaggagat

SEQ ID NO: 363374 - DNA, 25 bp, Artificial
  probe
  misc_feature (1)..(25): SEQ ID NO: 3784; WAN024AHU; Start 10; Stop 34
ctgcttttatgaggagattgtaaaa

SEQ ID NO: 363375 - DNA, 25 bp, Artificial
  probe
  misc_feature (1)..(25): SEQ ID NO: 3784; WAN024AHU; Start 1; Stop 25
gtaaaatagctgcttttatgaggag

SEQ ID NO: 363376 - DNA, 25 bp, Artificial
  probe
  misc_feature (1)..(25): SEQ ID NO: 3784; WAN024AHU; Start 2; Stop 26
taaaatagctgcttttatgaggaga

SEQ ID NO: 363377 - DNA, 25 bp, Artificial
  probe
  misc_feature (1)..(25): SEQ ID NO: 3784; WAN024AHU; Start 11; Stop 35
tgcttttatgaggagattgtaaaat

SEQ ID NO: 363378 - DNA, 25 bp, Artificial
  probe
  misc_feature (1)..(25): SEQ ID NO: 3784; WAN024AHU; Start 12; Stop 36
gcttttatgaggagattgtaaaatc

SEQ ID NO: 363379 - DNA, 25 bp, Artificial
  probe
  misc_feature (1)..(25): SEQ ID NO: 3784; WAN024AHU; Start 13; Stop 37
cttttatgaggagattgtaaaatct

SEQ ID NO: 363380 - DNA, 25 bp, Artificial
  probe
  misc_feature (1)..(25): SEQ ID NO: 3785; WAN0249IK; Start 26; Stop 50
ttgctagttagaggaggttaaactg

SEQ ID NO: 363381 - DNA, 25 bp, Artificial
  probe
  misc_feature (1)..(25): SEQ ID NO: 3785; WAN0249IK; Start 25; Stop 49
tttgctagttagaggaggttaaact

SEQ ID NO: 363382 - DNA, 25 bp, Artificial
  probe
  misc_feature (1)..(25): SEQ ID NO: 3785; WAN0249IK; Start 24; Stop 48
ttttgctagttagaggaggttaaac

SEQ ID NO: 363383 - DNA, 25 bp, Artificial
  probe
  misc_feature (1)..(25): SEQ ID NO: 3786; WAN0249UW; Start 78; Stop 102
ggaatagaaagtaaatagcccttcg

SEQ ID NO: 363384 - DNA, 25 bp, Artificial
  probe
  misc_feature (1)..(25): SEQ ID NO: 3786; WAN0249UW; Start 115; Stop 139
ggtctgtcaactaaaggttatatgc

SEQ ID NO: 363385 - DNA, 25 bp, Artificial
  probe
  misc_feature (1)..(25): SEQ ID NO: 3786; WAN0249UW; Start 109; Stop 133
agaataggtctgtcaactaaaggtt

SEQ ID NO: 363386 - DNA, 25 bp, Artificial
  probe
  misc_feature (1)..(25): SEQ ID NO: 3786; WAN0249UW; Start 104; Stop 128
gacttagaataggtctgtcaactaa

SEQ ID NO: 363387 - DNA, 25 bp, Artificial
  probe
  misc_feature (1)..(25): SEQ ID NO: 3786; WAN0249UW; Start 331; Stop 355
ggctagtatgaatcctttgaattgt

SEQ ID NO: 363388 - DNA, 25 bp, Artificial
  probe
  misc_feature (1)..(25): SEQ ID NO: 3786; WAN0249UW; Start 330; Stop 354
tggctagtatgaatcctttgaattg

SEQ ID NO: 363389 - DNA, 25 bp, Artificial
  probe
  misc_feature (1)..(25): SEQ ID NO: 3786; WAN0249UW; Start 108; Stop 132
tagaataggtctgtcaactaaaggt

SEQ ID NO: 363390 - DNA, 25 bp, Artificial
  probe
  misc_feature (1)..(25): SEQ ID NO: 3786; WAN0249UW; Start 329; Stop 353
atggctagtatgaatcctttgaatt

SEQ ID NO: 363391 - DNA, 25 bp, Artificial
  probe
  misc_feature (1)..(25): SEQ ID NO: 3786; WAN0249UW; Start 303; Stop 327
gagtctctctctgatggacgtaatt

SEQ ID NO: 363392 - DNA, 25 bp, Artificial
  probe
  misc_feature (1)..(25): SEQ ID NO: 3786; WAN0249UW; Start 114; Stop 138
aggtctgtcaactaaaggttatatg

SEQ ID NO: 363393 - DNA, 25 bp, Artificial
  probe
  misc_feature (1)..(25): SEQ ID NO: 3786; WAN0249UW; Start 110; Stop 134
gaataggtctgtcaactaaaggtta

SEQ ID NO: 363394 - DNA, 25 bp, Artificial
  probe
  misc_feature (1)..(25): SEQ ID NO: 3786; WAN0249UW; Start 327; Stop 351
ttatggctagtatgaatcctttgaa

SEQ ID NO: 363395 - DNA, 25 bp, Artificial
  probe
  misc_feature (1)..(25): SEQ ID NO: 3786; WAN0249UW; Start 326; Stop 350
tttatggctagtatgaatcctttga

SEQ ID NO: 363396 - DNA, 25 bp, Artificial
  probe
  misc_feature (1)..(25): SEQ ID NO: 3786; WAN0249UW; Start 88; Stop 112
gtaaatagcccttcgagacttagaa

SEQ ID NO: 363397 - DNA, 25 bp, Artificial
  probe
  misc_feature (1)..(25): SEQ ID NO: 3786; WAN0249UW; Start 82; Stop 106
tagaaagtaaatagcccttcgagac

SEQ ID NO: 363398 - DNA, 25 bp, Artificial
  probe
  misc_feature (1)..(25): SEQ ID NO: 3786; WAN0249UW; Start 91; Stop 115
aatagcccttcgagacttagaatag

SEQ ID NO: 363399 - DNA, 25 bp, Artificial
  probe
  misc_feature (1)..(25): SEQ ID NO: 3786; WAN0249UW; Start 332; Stop 356
gctagtatgaatcctttgaattgtt

SEQ ID NO: 363400 - DNA, 25 bp, Artificial
  probe
  misc_feature (1)..(25): SEQ ID NO: 3786; WAN0249UW; Start 297; Stop 321
tagtaagagtctctctctgatggac

SEQ ID NO: 363401 - DNA, 25 bp, Artificial
  probe
  misc_feature (1)..(25): SEQ ID NO: 3786; WAN0249UW; Start 296; Stop 320
gtagtaagagtctctctctgatgga

SEQ ID NO: 363402 - DNA, 25 bp, Artificial
  probe
  misc_feature (1)..(25): SEQ ID NO: 3786; WAN0249UW; Start 295; Stop 319
agtagtaagagtctctctctgatgg

SEQ ID NO: 363403 - DNA, 25 bp, Artificial
  probe
  misc_feature (1)..(25): SEQ ID NO: 3786; WAN0249UW; Start 312; Stop 336
tctgatggacgtaatttatggctag

SEQ ID NO: 363404 - DNA, 25 bp, Artificial
  probe
  misc_feature (1)..(25): SEQ ID NO: 3786; WAN0249UW; Start 311; Stop 335
ctctgatggacgtaatttatggcta

SEQ ID NO: 363405 - DNA, 25 bp, Artificial
  probe
  misc_feature (1)..(25): SEQ ID NO: 3786; WAN0249UW; Start 308; Stop 332
tctctctgatggacgtaatttatgg

SEQ ID NO: 363406 - DNA, 25 bp, Artificial
  probe
  misc_feature (1)..(25): SEQ ID NO: 3786; WAN0249UW; Start 328; Stop 352
tatggctagtatgaatcctttgaat

SEQ ID NO: 363407 - DNA, 25 bp, Artificial
  probe
  misc_feature (1)..(25): SEQ ID NO: 3786; WAN0249UW; Start 321; Stop 345
cgtaatttatggctagtatgaatcc

SEQ ID NO: 363408 - DNA, 25 bp, Artificial
  probe
  misc_feature (1)..(25): SEQ ID NO: 3786; WAN0249UW; Start 313; Stop 337
ctgatggacgtaatttatggctagt

SEQ ID NO: 363409 - DNA, 25 bp, Artificial
  probe
  misc_feature (1)..(25): SEQ ID NO: 3786; WAN0249UW; Start 90; Stop 114
aaatagcccttcgagacttagaata

SEQ ID NO: 363410 - DNA, 25 bp, Artificial
  probe
  misc_feature (1)..(25): SEQ ID NO: 3786; WAN0249UW; Start 89; Stop 113
taaatagcccttcgagacttagaat

SEQ ID NO: 363411 - DNA, 25 bp, Artificial
  probe
  misc_feature (1)..(25): SEQ ID NO: 3786; WAN0249UW; Start 81; Stop 105
atagaaagtaaatagcccttcgaga

SEQ ID NO: 363412 - DNA, 25 bp, Artificial
  probe
  misc_feature (1)..(25): SEQ ID NO: 3786; WAN0249UW; Start 317; Stop 341
tggacgtaatttatggctagtatga

SEQ ID NO: 363413 - DNA, 25 bp, Artificial
  probe
  misc_feature (1)..(25): SEQ ID NO: 3786; WAN0249UW; Start 314; Stop 338
tgatggacgtaatttatggctagta

SEQ ID NO: 363414 - DNA, 25 bp, Artificial
  probe
  misc_feature (1)..(25): SEQ ID NO: 3786; WAN0249UW; Start 111; Stop 135
aataggtctgtcaactaaaggttat

SEQ ID NO: 363415 - DNA, 25 bp, Artificial
  probe
  misc_feature (1)..(25): SEQ ID NO: 3786; WAN0249UW; Start 87; Stop 111
agtaaatagcccttcgagacttaga

SEQ ID NO: 363416 - DNA, 25 bp, Artificial
  probe
  misc_feature (1)..(25): SEQ ID NO: 3787; WAN024AHH; Start 28; Stop 52
tttcagaacagtatcccagtatagt

SEQ ID NO: 363417 - DNA, 25 bp, Artificial
  probe
  misc_feature (1)..(25): SEQ ID NO: 3787; WAN024AHH; Start 29; Stop 53
ttcagaacagtatcccagtatagtt

SEQ ID NO: 363418 - DNA, 25 bp, Artificial
  probe
  misc_feature (1)..(25): SEQ ID NO: 3787; WAN024AHH; Start 30; Stop 54
tcagaacagtatcccagtatagtta

SEQ ID NO: 363419 - DNA, 25 bp, Artificial
  probe
  misc_feature (1)..(25): SEQ ID NO: 3787; WAN024AHH; Start 31; Stop 55
cagaacagtatcccagtatagttaa

SEQ ID NO: 363420 - DNA, 25 bp, Artificial
  probe
  misc_feature (1)..(25): SEQ ID NO: 3787; WAN024AHH; Start 3; Stop 27
aaatctctactttcgcaaaatggat

SEQ ID NO: 363421 - DNA, 25 bp, Artificial
  probe
  misc_feature (1)..(25): SEQ ID NO: 3787; WAN024AHH; Start 32; Stop 56
agaacagtatcccagtatagttaaa

SEQ ID NO: 363422 - DNA, 25 bp, Artificial
  probe
  misc_feature (1)..(25): SEQ ID NO: 3787; WAN024AHH; Start 5; Stop 29
atctctactttcgcaaaatggattt

SEQ ID NO: 363423 - DNA, 25 bp, Artificial
  probe
  misc_feature (1)..(25): SEQ ID NO: 3787; WAN024AHH; Start 2; Stop 26
taaatctctactttcgcaaaatgga

SEQ ID NO: 363424 - DNA, 25 bp, Artificial
  probe
  misc_feature (1)..(25): SEQ ID NO: 3787; WAN024AHH; Start 1; Stop 25
gtaaatctctactttcgcaaaatgg

SEQ ID NO: 363425 - DNA, 25 bp, Artificial
  probe
  misc_feature (1)..(25): SEQ ID NO: 3787; WAN024AHH; Start 25; Stop 49
gattttcagaacagtatcccagtat

SEQ ID NO: 363426 - DNA, 25 bp, Artificial
  probe
  misc_feature (1)..(25): SEQ ID NO: 3787; WAN024AHH; Start 27; Stop 51
ttttcagaacagtatcccagtatag

SEQ ID NO: 363427 - DNA, 25 bp, Artificial
  probe
  misc_feature (1)..(25): SEQ ID NO: 3787; WAN024AHH; Start 12; Stop 36
ctttcgcaaaatggattttcagaac

SEQ ID NO: 363428 - DNA, 25 bp, Artificial
  probe
  misc_feature (1)..(25): SEQ ID NO: 3787; WAN024AHH; Start 10; Stop 34
tactttcgcaaaatggattttcaga

SEQ ID NO: 363429 - DNA, 25 bp, Artificial
  probe
  misc_feature (1)..(25): SEQ ID NO: 3787; WAN024AHH; Start 8; Stop 32
tctactttcgcaaaatggattttca

SEQ ID NO: 363430 - DNA, 25 bp, Artificial
  probe
  misc_feature (1)..(25): SEQ ID NO: 3787; WAN024AHH; Start 11; Stop 35
actttcgcaaaatggattttcagaa

SEQ ID NO: 363431 - DNA, 25 bp, Artificial
  probe
  misc_feature (1)..(25): SEQ ID NO: 3787; WAN024AHH; Start 9; Stop 33
ctactttcgcaaaatggattttcag

SEQ ID NO: 363432 - DNA, 25 bp, Artificial
  probe
  misc_feature (1)..(25): SEQ ID NO: 3787; WAN024AHH; Start 6; Stop 30
tctctactttcgcaaaatggatttt

SEQ ID NO: 363433 - DNA, 25 bp, Artificial
  probe
  misc_feature (1)..(25): SEQ ID NO: 3787; WAN024AHH; Start 4; Stop 28
aatctctactttcgcaaaatggatt

SEQ ID NO: 363434 - DNA, 25 bp, Artificial
  probe
  misc_feature (1)..(25): SEQ ID NO: 3787; WAN024AHH; Start 16; Stop 40
cgcaaaatggattttcagaacagta

SEQ ID NO: 363435 - DNA, 25 bp, Artificial
  probe
  misc_feature (1)..(25): SEQ ID NO: 3787; WAN024AHH; Start 13; Stop 37
tttcgcaaaatggattttcagaaca

SEQ ID NO: 363436 - DNA, 25 bp, Artificial
  probe
  misc_feature (1)..(25): SEQ ID NO: 3787; WAN024AHH; Start 7; Stop 31
ctctactttcgcaaaatggattttc

SEQ ID NO: 363437 - DNA, 25 bp, Artificial
  probe
  misc_feature (1)..(25): SEQ ID NO: 3787; WAN024AHH; Start 26; Stop 50
attttcagaacagtatcccagtata

SEQ ID NO: 363438 - DNA, 25 bp, Artificial
  probe
  misc_feature (1)..(25): SEQ ID NO: 3787; WAN024AHH; Start 14; Stop 38
ttcgcaaaatggattttcagaacag

SEQ ID NO: 363439 - DNA, 25 bp, Artificial
  probe
  misc_feature (1)..(25): SEQ ID NO: 3787; WAN024AHH; Start 17; Stop 41
gcaaaatggattttcagaacagtat

SEQ ID NO: 363440 - DNA, 25 bp, Artificial
  probe
  misc_feature (1)..(25): SEQ ID NO: 3787; WAN024AHH; Start 15; Stop 39
tcgcaaaatggattttcagaacagt

SEQ ID NO: 363441 - DNA, 25 bp, Artificial
  probe
  misc_feature (1)..(25): SEQ ID NO: 3787; WAN024AHH; Start 18; Stop 42
caaaatggattttcagaacagtatc

SEQ ID NO: 363442 - DNA, 25 bp, Artificial
  probe
  misc_feature (1)..(25): SEQ ID NO: 3787; WAN024AHH; Start 33; Stop 57
gaacagtatcccagtatagttaaaa

SEQ ID NO: 363443 - DNA, 25 bp, Artificial
  probe
  misc_feature (1)..(25): SEQ ID NO: 3787; WAN024AHH; Start 24; Stop 48
ggattttcagaacagtatcccagta

SEQ ID NO: 363444 - DNA, 25 bp, Artificial
  probe
  misc_feature (1)..(25): SEQ ID NO: 3787; WAN024AHH; Start 21; Stop 45
aatggattttcagaacagtatccca

SEQ ID NO: 363445 - DNA, 25 bp, Artificial
  probe
  misc_feature (1)..(25): SEQ ID NO: 3787; WAN024AHH; Start 22; Stop 46
atggattttcagaacagtatcccag

SEQ ID NO: 363446 - DNA, 25 bp, Artificial
  probe
  misc_feature (1)..(25): SEQ ID NO: 3787; WAN024AHH; Start 20; Stop 44
aaatggattttcagaacagtatccc

SEQ ID NO: 363447 - DNA, 25 bp, Artificial
  probe
  misc_feature (1)..(25): SEQ ID NO: 3787; WAN024AHH; Start 23; Stop 47
tggattttcagaacagtatcccagt

SEQ ID NO: 363448 - DNA, 25 bp, Artificial
  probe
  misc_feature (1)..(25): SEQ ID NO: 3787; WAN024AHH; Start 19; Stop 43
aaaatggattttcagaacagtatcc

SEQ ID NO: 363449 - DNA, 25 bp, Artificial
  probe
  misc_feature (1)..(25): SEQ ID NO: 3788; WAN024ACC; Start 28; Stop 52
gaagttactctaagacgactctgtt

SEQ ID NO: 363450 - DNA, 25 bp, Artificial
  probe
  misc_feature (1)..(25): SEQ ID NO: 3788; WAN024ACC; Start 25; Stop 49
ctggaagttactctaagacgactct

SEQ ID NO: 363451 - DNA, 25 bp, Artificial
  probe
  misc_feature (1)..(25): SEQ ID NO: 3788; WAN024ACC; Start 27; Stop 51
ggaagttactctaagacgactctgt

SEQ ID NO: 363452 - DNA, 25 bp, Artificial
  probe
  misc_feature (1)..(25): SEQ ID NO: 3788; WAN024ACC; Start 26; Stop 50
tggaagttactctaagacgactctg

SEQ ID NO: 363453 - DNA, 25 bp, Artificial
  probe
  misc_feature (1)..(25): SEQ ID NO: 3788; WAN024ACC; Start 24; Stop 48
actggaagttactctaagacgactc

SEQ ID NO: 363454 - DNA, 25 bp, Artificial
  probe
  misc_feature (1)..(25): SEQ ID NO: 3788; WAN024ACC; Start 127; Stop 151
agtggaagttagtctaagacggatt

SEQ ID NO: 363455 - DNA, 25 bp, Artificial
  probe
  misc_feature (1)..(25): SEQ ID NO: 3788; WAN024ACC; Start 126; Stop 150
cagtggaagttagtctaagacggat

SEQ ID NO: 363456 - DNA, 25 bp, Artificial
  probe
  misc_feature (1)..(25): SEQ ID NO: 3788; WAN024ACC; Start 29; Stop 53
aagttactctaagacgactctgttt

SEQ ID NO: 363457 - DNA, 25 bp, Artificial
  probe
  misc_feature (1)..(25): SEQ ID NO: 3788; WAN024ACC; Start 123; Stop 147
aaccagtggaagttagtctaagacg

SEQ ID NO: 363458 - DNA, 25 bp, Artificial
  probe
  misc_feature (1)..(25): SEQ ID NO: 3788; WAN024ACC; Start 23; Stop 47
aactggaagttactctaagacgact

SEQ ID NO: 363459 - DNA, 25 bp, Artificial
  probe
  misc_feature (1)..(25): SEQ ID NO: 3788; WAN024ACC; Start 131; Stop 155
gaagttagtctaagacggatttcca

SEQ ID NO: 363460 - DNA, 25 bp, Artificial
  probe
  misc_feature (1)..(25): SEQ ID NO: 3788; WAN024ACC; Start 129; Stop 153
tggaagttagtctaagacggatttc

SEQ ID NO: 363461 - DNA, 25 bp, Artificial
  probe
  misc_feature (1)..(25): SEQ ID NO: 3788; WAN024ACC; Start 122; Stop 146
aaaccagtggaagttagtctaagac

SEQ ID NO: 363462 - DNA, 25 bp, Artificial
  probe
  misc_feature (1)..(25): SEQ ID NO: 3788; WAN024ACC; Start 132; Stop 156
aagttagtctaagacggatttccac

SEQ ID NO: 363463 - DNA, 25 bp, Artificial
  probe
  misc_feature (1)..(25): SEQ ID NO: 3788; WAN024ACC; Start 128; Stop 152
gtggaagttagtctaagacggattt

SEQ ID NO: 363464 - DNA, 25 bp, Artificial
  probe
  misc_feature (1)..(25): SEQ ID NO: 3788; WAN024ACC; Start 136; Stop 160
tagtctaagacggatttccactgat

SEQ ID NO: 363465 - DNA, 25 bp, Artificial
  probe
  misc_feature (1)..(25): SEQ ID NO: 3788; WAN024ACC; Start 135; Stop 159
ttagtctaagacggatttccactga

SEQ ID NO: 363466 - DNA, 25 bp, Artificial
  probe
  misc_feature (1)..(25): SEQ ID NO: 3788; WAN024ACC; Start 134; Stop 158
gttagtctaagacggatttccactg

SEQ ID NO: 363467 - DNA, 25 bp, Artificial
  probe
  misc_feature (1)..(25): SEQ ID NO: 3788; WAN024ACC; Start 133; Stop 157
agttagtctaagacggatttccact

SEQ ID NO: 363468 - DNA, 25 bp, Artificial
  probe
  misc_feature (1)..(25): SEQ ID NO: 3788; WAN024ACC; Start 139; Stop 163
tctaagacggatttccactgatgtc

SEQ ID NO: 363469 - DNA, 25 bp, Artificial
  probe
  misc_feature (1)..(25): SEQ ID NO: 3788; WAN024ACC; Start 125; Stop 149
ccagtggaagttagtctaagacgga

SEQ ID NO: 363470 - DNA, 25 bp, Artificial
  probe
  misc_feature (1)..(25): SEQ ID NO: 3788; WAN024ACC; Start 140; Stop 164
ctaagacggatttccactgatgtca

SEQ ID NO: 363471 - DNA, 25 bp, Artificial
  probe
  misc_feature (1)..(25): SEQ ID NO: 3788; WAN024ACC; Start 141; Stop 165
taagacggatttccactgatgtcac

SEQ ID NO: 363472 - DNA, 25 bp, Artificial
  probe
  misc_feature (1)..(25): SEQ ID NO: 3788; WAN024ACC; Start 124; Stop 148
accagtggaagttagtctaagacgg

SEQ ID NO: 363473 - DNA, 25 bp, Artificial
  probe
  misc_feature (1)..(25): SEQ ID NO: 3788; WAN024ACC; Start 137; Stop 161
agtctaagacggatttccactgatg

SEQ ID NO: 363474 - DNA, 25 bp, Artificial
  probe
  misc_feature (1)..(25): SEQ ID NO: 3788; WAN024ACC; Start 83; Stop 107
gtcttttcgcttttgaacccttata

SEQ ID NO: 363475 - DNA, 25 bp, Artificial
  probe
  misc_feature (1)..(25): SEQ ID NO: 3788; WAN024ACC; Start 75; Stop 99
ttttctgagtcttttcgcttttgaa

SEQ ID NO: 363476 - DNA, 25 bp, Artificial
  probe
  misc_feature (1)..(25): SEQ ID NO: 3788; WAN024ACC; Start 138; Stop 162
gtctaagacggatttccactgatgt

SEQ ID NO: 363477 - DNA, 25 bp, Artificial
  probe
  misc_feature (1)..(25): SEQ ID NO: 3788; WAN024ACC; Start 76; Stop 100
tttctgagtcttttcgcttttgaac

SEQ ID NO: 363478 - DNA, 25 bp, Artificial
  probe
  misc_feature (1)..(25): SEQ ID NO: 3788; WAN024ACC; Start 22; Stop 46
aaactggaagttactctaagacgac

SEQ ID NO: 363479 - DNA, 25 bp, Artificial
  probe
  misc_feature (1)..(25): SEQ ID NO: 3788; WAN024ACC; Start 84; Stop 108
tcttttcgcttttgaacccttatat

SEQ ID NO: 363480 - DNA, 25 bp, Artificial
  probe
  misc_feature (1)..(25): SEQ ID NO: 3788; WAN024ACC; Start 82; Stop 106
agtcttttcgcttttgaacccttat

SEQ ID NO: 363481 - DNA, 25 bp, Artificial
  probe
  misc_feature (1)..(25): SEQ ID NO: 3788; WAN024ACC; Start 38; Stop 62
taagacgactctgttttagggctat

SEQ ID NO: 363482 - DNA, 25 bp, Artificial
  probe
  misc_feature (1)..(25): SEQ ID NO: 3789; WAN0249SH; Start 34; Stop 58
gcttcttcattgattagcagtagat

SEQ ID NO: 363483 - DNA, 25 bp, Artificial
  probe
  misc_feature (1)..(25): SEQ ID NO: 3789; WAN0249SH; Start 35; Stop 59
cttcttcattgattagcagtagatt

SEQ ID NO: 363484 - DNA, 25 bp, Artificial
  probe
  misc_feature (1)..(25): SEQ ID NO: 3789; WAN0249SH; Start 22; Stop 46
agtttgatctttgcttcttcattga

SEQ ID NO: 363485 - DNA, 25 bp, Artificial
  probe
  misc_feature (1)..(25): SEQ ID NO: 3789; WAN0249SH; Start 17; Stop 41
tgcctagtttgatctttgcttcttc

SEQ ID NO: 363486 - DNA, 25 bp, Artificial
  probe
  misc_feature (1)..(25): SEQ ID NO: 3789; WAN0249SH; Start 16; Stop 40
ctgcctagtttgatctttgcttctt

SEQ ID NO: 363487 - DNA, 25 bp, Artificial
  probe
  misc_feature (1)..(25): SEQ ID NO: 3789; WAN0249SH; Start 19; Stop 43
cctagtttgatctttgcttcttcat

SEQ ID NO: 363488 - DNA, 25 bp, Artificial
  probe
  misc_feature (1)..(25): SEQ ID NO: 3789; WAN0249SH; Start 23; Stop 47
gtttgatctttgcttcttcattgat

SEQ ID NO: 363489 - DNA, 25 bp, Artificial
  probe
  misc_feature (1)..(25): SEQ ID NO: 3789; WAN0249SH; Start 18; Stop 42
gcctagtttgatctttgcttcttca

SEQ ID NO: 363490 - DNA, 25 bp, Artificial
  probe
  misc_feature (1)..(25): SEQ ID NO: 3789; WAN0249SH; Start 21; Stop 45
tagtttgatctttgcttcttcattg

SEQ ID NO: 363491 - DNA, 25 bp, Artificial
  probe
  misc_feature (1)..(25): SEQ ID NO: 3789; WAN0249SH; Start 24; Stop 48
tttgatctttgcttcttcattgatt

SEQ ID NO: 363492 - DNA, 25 bp, Artificial
  probe
  misc_feature (1)..(25): SEQ ID NO: 3789; WAN0249SH; Start 20; Stop 44
ctagtttgatctttgcttcttcatt

SEQ ID NO: 363493 - DNA, 25 bp, Artificial
  probe
  misc_feature (1)..(25): SEQ ID NO: 3789; WAN0249SH; Start 26; Stop 50
tgatctttgcttcttcattgattag

SEQ ID NO: 363494 - DNA, 25 bp, Artificial
  probe
  misc_feature (1)..(25): SEQ ID NO: 3789; WAN0249SH; Start 38; Stop 62
cttcattgattagcagtagatttca

SEQ ID NO: 363495 - DNA, 25 bp, Artificial
  probe
  misc_feature (1)..(25): SEQ ID NO: 3789; WAN0249SH; Start 37; Stop 61
tcttcattgattagcagtagatttc

SEQ ID NO: 363496 - DNA, 25 bp, Artificial
  probe
  misc_feature (1)..(25): SEQ ID NO: 3789; WAN0249SH; Start 27; Stop 51
gatctttgcttcttcattgattagc

SEQ ID NO: 363497 - DNA, 25 bp, Artificial
  probe
  misc_feature (1)..(25): SEQ ID NO: 3789; WAN0249SH; Start 25; Stop 49
ttgatctttgcttcttcattgatta

SEQ ID NO: 363498 - DNA, 25 bp, Artificial
  probe
  misc_feature (1)..(25): SEQ ID NO: 3789; WAN0249SH; Start 36; Stop 60
ttcttcattgattagcagtagattt

SEQ ID NO: 363499 - DNA, 25 bp, Artificial
  probe
  misc_feature (1)..(25): SEQ ID NO: 3789; WAN0249SH; Start 15; Stop 39
gctgcctagtttgatctttgcttct

SEQ ID NO: 363500 - DNA, 25 bp, Artificial
  probe
  misc_feature (1)..(25): SEQ ID NO: 3789; WAN0249SH; Start 13; Stop 37
tagctgcctagtttgatctttgctt

SEQ ID NO: 363501 - DNA, 25 bp, Artificial
  probe
  misc_feature (1)..(25): SEQ ID NO: 3789; WAN0249SH; Start 12; Stop 36
ctagctgcctagtttgatctttgct

SEQ ID NO: 363502 - DNA, 25 bp, Artificial
  probe
  misc_feature (1)..(25): SEQ ID NO: 3789; WAN0249SH; Start 40; Stop 64
tcattgattagcagtagatttcaaa

SEQ ID NO: 363503 - DNA, 25 bp, Artificial
  probe
  misc_feature (1)..(25): SEQ ID NO: 3789; WAN0249SH; Start 39; Stop 63
ttcattgattagcagtagatttcaa

SEQ ID NO: 363504 - DNA, 25 bp, Artificial
  probe
  misc_feature (1)..(25): SEQ ID NO: 3789; WAN0249SH; Start 44; Stop 68
tgattagcagtagatttcaaaatga

SEQ ID NO: 363505 - DNA, 25 bp, Artificial
  probe
  misc_feature (1)..(25): SEQ ID NO: 3789; WAN0249SH; Start 14; Stop 38
agctgcctagtttgatctttgcttc

SEQ ID NO: 363506 - DNA, 25 bp, Artificial
  probe
  misc_feature (1)..(25): SEQ ID NO: 3789; WAN0249SH; Start 45; Stop 69
gattagcagtagatttcaaaatgat

SEQ ID NO: 363507 - DNA, 25 bp, Artificial
  probe
  misc_feature (1)..(25): SEQ ID NO: 3789; WAN0249SH; Start 49; Stop 73
agcagtagatttcaaaatgataaaa

SEQ ID NO: 363508 - DNA, 25 bp, Artificial
  probe
  misc_feature (1)..(25): SEQ ID NO: 3789; WAN0249SH; Start 43; Stop 67
ttgattagcagtagatttcaaaatg

SEQ ID NO: 363509 - DNA, 25 bp, Artificial
  probe
  misc_feature (1)..(25): SEQ ID NO: 3789; WAN0249SH; Start 41; Stop 65
cattgattagcagtagatttcaaaa

SEQ ID NO: 363510 - DNA, 25 bp, Artificial
  probe
  misc_feature (1)..(25): SEQ ID NO: 3789; WAN0249SH; Start 11; Stop 35
actagctgcctagtttgatctttgc

SEQ ID NO: 363511 - DNA, 25 bp, Artificial
  probe
  misc_feature (1)..(25): SEQ ID NO: 3789; WAN0249SH; Start 42; Stop 66
attgattagcagtagatttcaaaat

SEQ ID NO: 363512 - DNA, 25 bp, Artificial
  probe
  misc_feature (1)..(25): SEQ ID NO: 3790; WAN0249ZU; Start 52; Stop 76
ctaggattgtcagatgtggttcttt

SEQ ID NO: 363513 - DNA, 25 bp, Artificial
  probe
  misc_feature (1)..(25): SEQ ID NO: 3790; WAN0249ZU; Start 65; Stop 89
atgtggttcttttgcttattcagtc

SEQ ID NO: 363514 - DNA, 25 bp, Artificial
  probe
  misc_feature (1)..(25): SEQ ID NO: 3790; WAN0249ZU; Start 64; Stop 88
gatgtggttcttttgcttattcagt

SEQ ID NO: 363515 - DNA, 25 bp, Artificial
  probe
  misc_feature (1)..(25): SEQ ID NO: 3790; WAN0249ZU; Start 67; Stop 91
gtggttcttttgcttattcagtcta

SEQ ID NO: 363516 - DNA, 25 bp, Artificial
  probe
  misc_feature (1)..(25): SEQ ID NO: 3790; WAN0249ZU; Start 66; Stop 90
tgtggttcttttgcttattcagtct

SEQ ID NO: 363517 - DNA, 25 bp, Artificial
  probe
  misc_feature (1)..(25): SEQ ID NO: 3790; WAN0249ZU; Start 63; Stop 87
agatgtggttcttttgcttattcag

SEQ ID NO: 363518 - DNA, 25 bp, Artificial
  probe
  misc_feature (1)..(25): SEQ ID NO: 3790; WAN0249ZU; Start 62; Stop 86
cagatgtggttcttttgcttattca

SEQ ID NO: 363519 - DNA, 25 bp, Artificial
  probe
  misc_feature (1)..(25): SEQ ID NO: 3790; WAN0249ZU; Start 61; Stop 85
tcagatgtggttcttttgcttattc

SEQ ID NO: 363520 - DNA, 25 bp, Artificial
  probe
  misc_feature (1)..(25): SEQ ID NO: 3790; WAN0249ZU; Start 60; Stop 84
gtcagatgtggttcttttgcttatt

SEQ ID NO: 363521 - DNA, 25 bp, Artificial
  probe
  misc_feature (1)..(25): SEQ ID NO: 3790; WAN0249ZU; Start 53; Stop 77
taggattgtcagatgtggttctttt

SEQ ID NO: 363522 - DNA, 25 bp, Artificial
  probe
  misc_feature (1)..(25): SEQ ID NO: 3790; WAN0249ZU; Start 59; Stop 83
tgtcagatgtggttcttttgcttat

SEQ ID NO: 363523 - DNA, 25 bp, Artificial
  probe
  misc_feature (1)..(25): SEQ ID NO: 3790; WAN0249ZU; Start 58; Stop 82
ttgtcagatgtggttcttttgctta

SEQ ID NO: 363524 - DNA, 25 bp, Artificial
  probe
  misc_feature (1)..(25): SEQ ID NO: 3790; WAN0249ZU; Start 68; Stop 92
tggttcttttgcttattcagtctat

SEQ ID NO: 363525 - DNA, 25 bp, Artificial
  probe
  misc_feature (1)..(25): SEQ ID NO: 3790; WAN0249ZU; Start 54; Stop 78
aggattgtcagatgtggttcttttg

SEQ ID NO: 363526 - DNA, 25 bp, Artificial
  probe
  misc_feature (1)..(25): SEQ ID NO: 3790; WAN0249ZU; Start 57; Stop 81
attgtcagatgtggttcttttgctt

SEQ ID NO: 363527 - DNA, 25 bp, Artificial
  probe
  misc_feature (1)..(25): SEQ ID NO: 3790; WAN0249ZU; Start 56; Stop 80
gattgtcagatgtggttcttttgct

SEQ ID NO: 363528 - DNA, 25 bp, Artificial
  probe
  misc_feature (1)..(25): SEQ ID NO: 3790; WAN0249ZU; Start 69; Stop 93
ggttcttttgcttattcagtctatt

SEQ ID NO: 363529 - DNA, 25 bp, Artificial
  probe
  misc_feature (1)..(25): SEQ ID NO: 3790; WAN0249ZU; Start 51; Stop 75
cctaggattgtcagatgtggttctt

SEQ ID NO: 363530 - DNA, 25 bp, Artificial
  probe
  misc_feature (1)..(25): SEQ ID NO: 3790; WAN0249ZU; Start 46; Stop 70
atcaacctaggattgtcagatgtgg

SEQ ID NO: 363531 - DNA, 25 bp, Artificial
  probe
  misc_feature (1)..(25): SEQ ID NO: 3790; WAN0249ZU; Start 45; Stop 69
aatcaacctaggattgtcagatgtg

SEQ ID NO: 363532 - DNA, 25 bp, Artificial
  probe
  misc_feature (1)..(25): SEQ ID NO: 3790; WAN0249ZU; Start 71; Stop 95
ttcttttgcttattcagtctattgt

SEQ ID NO: 363533 - DNA, 25 bp, Artificial
  probe
  misc_feature (1)..(25): SEQ ID NO: 3790; WAN0249ZU; Start 55; Stop 79
ggattgtcagatgtggttcttttgc

SEQ ID NO: 363534 - DNA, 25 bp, Artificial
  probe
  misc_feature (1)..(25): SEQ ID NO: 3790; WAN0249ZU; Start 70; Stop 94
gttcttttgcttattcagtctattg

SEQ ID NO: 363535 - DNA, 25 bp, Artificial
  probe
  misc_feature (1)..(25): SEQ ID NO: 3790; WAN0249ZU; Start 44; Stop 68
aaatcaacctaggattgtcagatgt

SEQ ID NO: 363536 - DNA, 25 bp, Artificial
  probe
  misc_feature (1)..(25): SEQ ID NO: 3790; WAN0249ZU; Start 50; Stop 74
acctaggattgtcagatgtggttct

SEQ ID NO: 363537 - DNA, 25 bp, Artificial
  probe
  misc_feature (1)..(25): SEQ ID NO: 3790; WAN0249ZU; Start 47; Stop 71
tcaacctaggattgtcagatgtggt

SEQ ID NO: 363538 - DNA, 25 bp, Artificial
  probe
  misc_feature (1)..(25): SEQ ID NO: 3790; WAN0249ZU; Start 41; Stop 65
gttaaatcaacctaggattgtcaga

SEQ ID NO: 363539 - DNA, 25 bp, Artificial
  probe
  misc_feature (1)..(25): SEQ ID NO: 3790; WAN0249ZU; Start 43; Stop 67
taaatcaacctaggattgtcagatg

SEQ ID NO: 363540 - DNA, 25 bp, Artificial
  probe
  misc_feature (1)..(25): SEQ ID NO: 3790; WAN0249ZU; Start 2; Stop 26
taataaattagggtggaaccgcgtt

SEQ ID NO: 363541 - DNA, 25 bp, Artificial
  probe
  misc_feature (1)..(25): SEQ ID NO: 3790; WAN0249ZU; Start 42; Stop 66
ttaaatcaacctaggattgtcagat

SEQ ID NO: 363542 - DNA, 25 bp, Artificial
  probe
  misc_feature (1)..(25): SEQ ID NO: 3790; WAN0249ZU; Start 1; Stop 25
gtaataaattagggtggaaccgcgt

SEQ ID NO: 363543 - DNA, 25 bp, Artificial
  probe
  misc_feature (1)..(25): SEQ ID NO: 3790; WAN0249ZU; Start 3; Stop 27
aataaattagggtggaaccgcgttt

SEQ ID NO: 363544 - DNA, 25 bp, Artificial
  probe
  misc_feature (1)..(25): SEQ ID NO: 3790; WAN0249ZU; Start 49; Stop 73
aacctaggattgtcagatgtggttc

SEQ ID NO: 363545 - DNA, 25 bp, Artificial
  probe
  misc_feature (1)..(25): SEQ ID NO: 3792; WAN0249MN; Start 59; Stop 83
ctatactgtcggctttggaatttca

SEQ ID NO: 363546 - DNA, 25 bp, Artificial
  probe
  misc_feature (1)..(25): SEQ ID NO: 3792; WAN0249MN; Start 58; Stop 82
actatactgtcggctttggaatttc

SEQ ID NO: 363547 - DNA, 25 bp, Artificial
  probe
  misc_feature (1)..(25): SEQ ID NO: 3792; WAN0249MN; Start 60; Stop 84
tatactgtcggctttggaatttcac

SEQ ID NO: 363548 - DNA, 25 bp, Artificial
  probe
  misc_feature (1)..(25): SEQ ID NO: 3792; WAN0249MN; Start 45; Stop 69
ttctttcatccagactatactgtcg

SEQ ID NO: 363549 - DNA, 25 bp, Artificial
  probe
  misc_feature (1)..(25): SEQ ID NO: 3792; WAN0249MN; Start 57; Stop 81
gactatactgtcggctttggaattt

SEQ ID NO: 363550 - DNA, 25 bp, Artificial
  probe
  misc_feature (1)..(25): SEQ ID NO: 3792; WAN0249MN; Start 49; Stop 73
ttcatccagactatactgtcggctt

SEQ ID NO: 363551 - DNA, 25 bp, Artificial
  probe
  misc_feature (1)..(25): SEQ ID NO: 3792; WAN0249MN; Start 43; Stop 67
tcttctttcatccagactatactgt

SEQ ID NO: 363552 - DNA, 25 bp, Artificial
  probe
  misc_feature (1)..(25): SEQ ID NO: 3792; WAN0249MN; Start 46; Stop 70
tctttcatccagactatactgtcgg

SEQ ID NO: 363553 - DNA, 25 bp, Artificial
  probe
  misc_feature (1)..(25): SEQ ID NO: 3792; WAN0249MN; Start 44; Stop 68
cttctttcatccagactatactgtc

SEQ ID NO: 363554 - DNA, 25 bp, Artificial
  probe
  misc_feature (1)..(25): SEQ ID NO: 3792; WAN0249MN; Start 279; Stop 303
agataaacgaaataagagagaagga

SEQ ID NO: 363555 - DNA, 25 bp, Artificial
  probe
  misc_feature (1)..(25): SEQ ID NO: 3792; WAN0249MN; Start 56; Stop 80
agactatactgtcggctttggaatt

SEQ ID NO: 363556 - DNA, 25 bp, Artificial
  probe
  misc_feature (1)..(25): SEQ ID NO: 3792; WAN0249MN; Start 132; Stop 156
caccctgccctgaagatagttattc

SEQ ID NO: 363557 - DNA, 25 bp, Artificial
  probe
  misc_feature (1)..(25): SEQ ID NO: 3792; WAN0249MN; Start 75; Stop 99
ggaatttcaccaaatcatgcctttc

SEQ ID NO: 363558 - DNA, 25 bp, Artificial
  probe
  misc_feature (1)..(25): SEQ ID NO: 3792; WAN0249MN; Start 76; Stop 100
gaatttcaccaaatcatgcctttcg

SEQ ID NO: 363559 - DNA, 25 bp, Artificial
  probe
  misc_feature (1)..(25): SEQ ID NO: 3792; WAN0249MN; Start 55; Stop 79
cagactatactgtcggctttggaat

SEQ ID NO: 363560 - DNA, 25 bp, Artificial
  probe
  misc_feature (1)..(25): SEQ ID NO: 3792; WAN0249MN; Start 42; Stop 66
atcttctttcatccagactatactg

SEQ ID NO: 363561 - DNA, 25 bp, Artificial
  probe
  misc_feature (1)..(25): SEQ ID NO: 3792; WAN0249MN; Start 280; Stop 304
gataaacgaaataagagagaaggaa

SEQ ID NO: 363562 - DNA, 25 bp, Artificial
  probe
  misc_feature (1)..(25): SEQ ID NO: 3792; WAN0249MN; Start 47; Stop 71
ctttcatccagactatactgtcggc

SEQ ID NO: 363563 - DNA, 25 bp, Artificial
  probe
  misc_feature (1)..(25): SEQ ID NO: 3792; WAN0249MN; Start 74; Stop 98
tggaatttcaccaaatcatgccttt

SEQ ID NO: 363564 - DNA, 25 bp, Artificial
  probe
  misc_feature (1)..(25): SEQ ID NO: 3792; WAN0249MN; Start 246; Stop 270
ctcgctcctcggataaagaaaatat

SEQ ID NO: 363565 - DNA, 25 bp, Artificial
  probe
  misc_feature (1)..(25): SEQ ID NO: 3792; WAN0249MN; Start 135; Stop 159
cctgccctgaagatagttattcaat

SEQ ID NO: 363566 - DNA, 25 bp, Artificial
  probe
  misc_feature (1)..(25): SEQ ID NO: 3792; WAN0249MN; Start 248; Stop 272
cgctcctcggataaagaaaatatga

SEQ ID NO: 363567 - DNA, 25 bp, Artificial
  probe
  misc_feature (1)..(25): SEQ ID NO: 3792; WAN0249MN; Start 247; Stop 271
tcgctcctcggataaagaaaatatg

SEQ ID NO: 363568 - DNA, 25 bp, Artificial
  probe
  misc_feature (1)..(25): SEQ ID NO: 3792; WAN0249MN; Start 61; Stop 85
atactgtcggctttggaatttcacc

SEQ ID NO: 363569 - DNA, 25 bp, Artificial
  probe
  misc_feature (1)..(25): SEQ ID NO: 3792; WAN0249MN; Start 51; Stop 75
catccagactatactgtcggctttg

SEQ ID NO: 363570 - DNA, 25 bp, Artificial
  probe
  misc_feature (1)..(25): SEQ ID NO: 3792; WAN0249MN; Start 50; Stop 74
tcatccagactatactgtcggcttt

SEQ ID NO: 363571 - DNA, 25 bp, Artificial
  probe
  misc_feature (1)..(25): SEQ ID NO: 3792; WAN0249MN; Start 48; Stop 72
tttcatccagactatactgtcggct

SEQ ID NO: 363572 - DNA, 25 bp, Artificial
  probe
  misc_feature (1)..(25): SEQ ID NO: 3792; WAN0249MN; Start 249; Stop 273
gctcctcggataaagaaaatatgat

SEQ ID NO: 363573 - DNA, 25 bp, Artificial
  probe
  misc_feature (1)..(25): SEQ ID NO: 3792; WAN0249MN; Start 136; Stop 160
ctgccctgaagatagttattcaatt

SEQ ID NO: 363574 - DNA, 25 bp, Artificial
  probe
  misc_feature (1)..(25): SEQ ID NO: 3792; WAN0249MN; Start 77; Stop 101
aatttcaccaaatcatgcctttcgg

SEQ ID NO: 363575 - DNA, 25 bp, Artificial
  probe
  misc_feature (1)..(25): SEQ ID NO: 3792; WAN0249MN; Start 245; Stop 269
tctcgctcctcggataaagaaaata

SEQ ID NO: 363576 - DNA, 25 bp, Artificial
  probe
  misc_feature (1)..(25): SEQ ID NO: 3792; WAN0249MN; Start 41; Stop 65
tatcttctttcatccagactatact

SEQ ID NO: 363577 - DNA, 25 bp, Artificial
  probe
  misc_feature (1)..(25): SEQ ID NO: 3792; WAN0249MN; Start 242; Stop 266
gattctcgctcctcggataaagaaa

SEQ ID NO: 363578 - DNA, 25 bp, Artificial
  probe
  misc_feature (1)..(25): SEQ ID NO: 3793; WAN024AAA; Start 220; Stop 244
gtaataatactgcttgctgttgctt

SEQ ID NO: 363579 - DNA, 25 bp, Artificial
  probe
  misc_feature (1)..(25): SEQ ID NO: 3793; WAN024AAA; Start 218; Stop 242
tagtaataatactgcttgctgttgc

SEQ ID NO: 363580 - DNA, 25 bp, Artificial
  probe
  misc_feature (1)..(25): SEQ ID NO: 3793; WAN024AAA; Start 219; Stop 243
agtaataatactgcttgctgttgct

SEQ ID NO: 363581 - DNA, 25 bp, Artificial
  probe
  misc_feature (1)..(25): SEQ ID NO: 3793; WAN024AAA; Start 234; Stop 258
tgctgttgctttattattatctcgg

SEQ ID NO: 363582 - DNA, 25 bp, Artificial
  probe
  misc_feature (1)..(25): SEQ ID NO: 3793; WAN024AAA; Start 228; Stop 252
actgcttgctgttgctttattatta

SEQ ID NO: 363583 - DNA, 25 bp, Artificial
  probe
  misc_feature (1)..(25): SEQ ID NO: 3793; WAN024AAA; Start 227; Stop 251
tactgcttgctgttgctttattatt

SEQ ID NO: 363584 - DNA, 25 bp, Artificial
  probe
  misc_feature (1)..(25): SEQ ID NO: 3793; WAN024AAA; Start 222; Stop 246
aataatactgcttgctgttgcttta

SEQ ID NO: 363585 - DNA, 25 bp, Artificial
  probe
  misc_feature (1)..(25): SEQ ID NO: 3793; WAN024AAA; Start 221; Stop 245
taataatactgcttgctgttgcttt

SEQ ID NO: 363586 - DNA, 25 bp, Artificial
  probe
  misc_feature (1)..(25): SEQ ID NO: 3793; WAN024AAA; Start 235; Stop 259
gctgttgctttattattatctcgga

SEQ ID NO: 363587 - DNA, 25 bp, Artificial
  probe
  misc_feature (1)..(25): SEQ ID NO: 3793; WAN024AAA; Start 226; Stop 250
atactgcttgctgttgctttattat

SEQ ID NO: 363588 - DNA, 25 bp, Artificial
  probe
  misc_feature (1)..(25): SEQ ID NO: 3793; WAN024AAA; Start 225; Stop 249
aatactgcttgctgttgctttatta

SEQ ID NO: 363589 - DNA, 25 bp, Artificial
  probe
  misc_feature (1)..(25): SEQ ID NO: 3793; WAN024AAA; Start 224; Stop 248
taatactgcttgctgttgctttatt

SEQ ID NO: 363590 - DNA, 25 bp, Artificial
  probe
  misc_feature (1)..(25): SEQ ID NO: 3793; WAN024AAA; Start 223; Stop 247
ataatactgcttgctgttgctttat

SEQ ID NO: 363591 - DNA, 25 bp, Artificial
  probe
  misc_feature (1)..(25): SEQ ID NO: 3793; WAN024AAA; Start 230; Stop 254
tgcttgctgttgctttattattatc

SEQ ID NO: 363592 - DNA, 25 bp, Artificial
  probe
  misc_feature (1)..(25): SEQ ID NO: 3793; WAN024AAA; Start 229; Stop 253
ctgcttgctgttgctttattattat

SEQ ID NO: 363593 - DNA, 25 bp, Artificial
  probe
  misc_feature (1)..(25): SEQ ID NO: 3793; WAN024AAA; Start 231; Stop 255
gcttgctgttgctttattattatct

SEQ ID NO: 363594 - DNA, 25 bp, Artificial
  probe
  misc_feature (1)..(25): SEQ ID NO: 3793; WAN024AAA; Start 233; Stop 257
ttgctgttgctttattattatctcg

SEQ ID NO: 363595 - DNA, 25 bp, Artificial
  probe
  misc_feature (1)..(25): SEQ ID NO: 3793; WAN024AAA; Start 263; Stop 287
actttgattcgttaaatgttgttct

SEQ ID NO: 363596 - DNA, 25 bp, Artificial
  probe
  misc_feature (1)..(25): SEQ ID NO: 3793; WAN024AAA; Start 217; Stop 241
ttagtaataatactgcttgctgttg

SEQ ID NO: 363597 - DNA, 25 bp, Artificial
  probe
  misc_feature (1)..(25): SEQ ID NO: 3793; WAN024AAA; Start 426; Stop 450
aggaaggaagtctaatttaggtaac

SEQ ID NO: 363598 - DNA, 25 bp, Artificial
  probe
  misc_feature (1)..(25): SEQ ID NO: 3793; WAN024AAA; Start 278; Stop 302
atgttgttcttataatgatgatcgt

SEQ ID NO: 363599 - DNA, 25 bp, Artificial
  probe
  misc_feature (1)..(25): SEQ ID NO: 3793; WAN024AAA; Start 236; Stop 260
ctgttgctttattattatctcggaa

SEQ ID NO: 363600 - DNA, 25 bp, Artificial
  probe
  misc_feature (1)..(25): SEQ ID NO: 3793; WAN024AAA; Start 427; Stop 451
ggaaggaagtctaatttaggtaact

SEQ ID NO: 363601 - DNA, 25 bp, Artificial
  probe
  misc_feature (1)..(25): SEQ ID NO: 3793; WAN024AAA; Start 262; Stop 286
aactttgattcgttaaatgttgttc

SEQ ID NO: 363602 - DNA, 25 bp, Artificial
  probe
  misc_feature (1)..(25): SEQ ID NO: 3793; WAN024AAA; Start 264; Stop 288
ctttgattcgttaaatgttgttctt

SEQ ID NO: 363603 - DNA, 25 bp, Artificial
  probe
  misc_feature (1)..(25): SEQ ID NO: 3793; WAN024AAA; Start 237; Stop 261
tgttgctttattattatctcggaaa

SEQ ID NO: 363604 - DNA, 25 bp, Artificial
  probe
  misc_feature (1)..(25): SEQ ID NO: 3793; WAN024AAA; Start 447; Stop 471
taactaaacaaagcctgcgatcact

SEQ ID NO: 363605 - DNA, 25 bp, Artificial
  probe
  misc_feature (1)..(25): SEQ ID NO: 3793; WAN024AAA; Start 446; Stop 470
gtaactaaacaaagcctgcgatcac

SEQ ID NO: 363606 - DNA, 25 bp, Artificial
  probe
  misc_feature (1)..(25): SEQ ID NO: 3793; WAN024AAA; Start 443; Stop 467
taggtaactaaacaaagcctgcgat

SEQ ID NO: 363607 - DNA, 25 bp, Artificial
  probe
  misc_feature (1)..(25): SEQ ID NO: 3793; WAN024AAA; Start 425; Stop 449
aaggaaggaagtctaatttaggtaa

SEQ ID NO: 363608 - DNA, 25 bp, Artificial
  probe
  misc_feature (1)..(25): SEQ ID NO: 3793; WAN024AAA; Start 424; Stop 448
aaaggaaggaagtctaatttaggta

SEQ ID NO: 363609 - DNA, 25 bp, Artificial
  probe
  misc_feature (1)..(25): SEQ ID NO: 3793; WAN024AAA; Start 279; Stop 303
tgttgttcttataatgatgatcgta

SEQ ID NO: 363610 - DNA, 25 bp, Artificial
  probe
  misc_feature (1)..(25): SEQ ID NO: 3793; WAN024AAA; Start 442; Stop 466
ttaggtaactaaacaaagcctgcga

SEQ ID NO: 363611 - DNA, 25 bp, Artificial
  probe
  misc_feature (1)..(25): SEQ ID NO: 3794; WAN0249VS; Start 92; Stop 116
agttggatacgcttattacatagga

SEQ ID NO: 363612 - DNA, 25 bp, Artificial
  probe
  misc_feature (1)..(25): SEQ ID NO: 3794; WAN0249VS; Start 95; Stop 119
tggatacgcttattacataggagaa

SEQ ID NO: 363613 - DNA, 25 bp, Artificial
  probe
  misc_feature (1)..(25): SEQ ID NO: 3794; WAN0249VS; Start 94; Stop 118
ttggatacgcttattacataggaga

SEQ ID NO: 363614 - DNA, 25 bp, Artificial
  probe
  misc_feature (1)..(25): SEQ ID NO: 3794; WAN0249VS; Start 93; Stop 117
gttggatacgcttattacataggag

SEQ ID NO: 363615 - DNA, 25 bp, Artificial
  probe
  misc_feature (1)..(25): SEQ ID NO: 3794; WAN0249VS; Start 29; Stop 53
gagagtgatggatgagtaggatgaa

SEQ ID NO: 363616 - DNA, 25 bp, Artificial
  probe
  misc_feature (1)..(25): SEQ ID NO: 3794; WAN0249VS; Start 91; Stop 115
aagttggatacgcttattacatagg

SEQ ID NO: 363617 - DNA, 25 bp, Artificial
  probe
  misc_feature (1)..(25): SEQ ID NO: 3794; WAN0249VS; Start 96; Stop 120
ggatacgcttattacataggagaat

SEQ ID NO: 363618 - DNA, 25 bp, Artificial
  probe
  misc_feature (1)..(25): SEQ ID NO: 3794; WAN0249VS; Start 22; Stop 46
aacagaggagagtgatggatgagta

SEQ ID NO: 363619 - DNA, 25 bp, Artificial
  probe
  misc_feature (1)..(25): SEQ ID NO: 3794; WAN0249VS; Start 26; Stop 50
gaggagagtgatggatgagtaggat

SEQ ID NO: 363620 - DNA, 25 bp, Artificial
  probe
  misc_feature (1)..(25): SEQ ID NO: 3794; WAN0249VS; Start 90; Stop 114
caagttggatacgcttattacatag

SEQ ID NO: 363621 - DNA, 25 bp, Artificial
  probe
  misc_feature (1)..(25): SEQ ID NO: 3794; WAN0249VS; Start 28; Stop 52
ggagagtgatggatgagtaggatga

SEQ ID NO: 363622 - DNA, 25 bp, Artificial
  probe
  misc_feature (1)..(25): SEQ ID NO: 3794; WAN0249VS; Start 27; Stop 51
aggagagtgatggatgagtaggatg

SEQ ID NO: 363623 - DNA, 25 bp, Artificial
  probe
  misc_feature (1)..(25): SEQ ID NO: 3794; WAN0249VS; Start 23; Stop 47
acagaggagagtgatggatgagtag

SEQ ID NO: 363624 - DNA, 25 bp, Artificial
  probe
  misc_feature (1)..(25): SEQ ID NO: 3794; WAN0249VS; Start 100; Stop 124
acgcttattacataggagaatacaa

SEQ ID NO: 363625 - DNA, 25 bp, Artificial
  probe
  misc_feature (1)..(25): SEQ ID NO: 3794; WAN0249VS; Start 33; Stop 57
gtgatggatgagtaggatgaaatga

SEQ ID NO: 363626 - DNA, 25 bp, Artificial
  probe
  misc_feature (1)..(25): SEQ ID NO: 3794; WAN0249VS; Start 32; Stop 56
agtgatggatgagtaggatgaaatg

SEQ ID NO: 363627 - DNA, 25 bp, Artificial
  probe
  misc_feature (1)..(25): SEQ ID NO: 3794; WAN0249VS; Start 31; Stop 55
gagtgatggatgagtaggatgaaat

SEQ ID NO: 363628 - DNA, 25 bp, Artificial
  probe
  misc_feature (1)..(25): SEQ ID NO: 3794; WAN0249VS; Start 34; Stop 58
tgatggatgagtaggatgaaatgaa

SEQ ID NO: 363629 - DNA, 25 bp, Artificial
  probe
  misc_feature (1)..(25): SEQ ID NO: 3794; WAN0249VS; Start 39; Stop 63
gatgagtaggatgaaatgaaatcgc

SEQ ID NO: 363630 - DNA, 25 bp, Artificial
  probe
  misc_feature (1)..(25): SEQ ID NO: 3794; WAN0249VS; Start 38; Stop 62
ggatgagtaggatgaaatgaaatcg

SEQ ID NO: 363631 - DNA, 25 bp, Artificial
  probe
  misc_feature (1)..(25): SEQ ID NO: 3794; WAN0249VS; Start 30; Stop 54
agagtgatggatgagtaggatgaaa

SEQ ID NO: 363632 - DNA, 25 bp, Artificial
  probe
  misc_feature (1)..(25): SEQ ID NO: 3794; WAN0249VS; Start 40; Stop 64
atgagtaggatgaaatgaaatcgca

SEQ ID NO: 363633 - DNA, 25 bp, Artificial
  probe
  misc_feature (1)..(25): SEQ ID NO: 3794; WAN0249VS; Start 47; Stop 71
ggatgaaatgaaatcgcatacaaga

SEQ ID NO: 363634 - DNA, 25 bp, Artificial
  probe
  misc_feature (1)..(25): SEQ ID NO: 3794; WAN0249VS; Start 46; Stop 70
aggatgaaatgaaatcgcatacaag

SEQ ID NO: 363635 - DNA, 25 bp, Artificial
  probe
  misc_feature (1)..(25): SEQ ID NO: 3794; WAN0249VS; Start 44; Stop 68
gtaggatgaaatgaaatcgcataca

SEQ ID NO: 363636 - DNA, 25 bp, Artificial
  probe
  misc_feature (1)..(25): SEQ ID NO: 3794; WAN0249VS; Start 41; Stop 65
tgagtaggatgaaatgaaatcgcat

SEQ ID NO: 363637 - DNA, 25 bp, Artificial
  probe
  misc_feature (1)..(25): SEQ ID NO: 3794; WAN0249VS; Start 43; Stop 67
agtaggatgaaatgaaatcgcatac

SEQ ID NO: 363638 - DNA, 25 bp, Artificial
  probe
  misc_feature (1)..(25): SEQ ID NO: 3794; WAN0249VS; Start 60; Stop 84
tcgcatacaagaaataaagaactca

SEQ ID NO: 363639 - DNA, 25 bp, Artificial
  probe
  misc_feature (1)..(25): SEQ ID NO: 3794; WAN0249VS; Start 42; Stop 66
gagtaggatgaaatgaaatcgcata

SEQ ID NO: 363640 - DNA, 25 bp, Artificial
  probe
  misc_feature (1)..(25): SEQ ID NO: 3794; WAN0249VS; Start 35; Stop 59
gatggatgagtaggatgaaatgaaa

SEQ ID NO: 363641 - DNA, 25 bp, Artificial
  probe
  misc_feature (1)..(25): SEQ ID NO: 3794; WAN0249VS; Start 45; Stop 69
taggatgaaatgaaatcgcatacaa

SEQ ID NO: 363642 - DNA, 25 bp, Artificial
  probe
  misc_feature (1)..(25): SEQ ID NO: 3794; WAN0249VS; Start 37; Stop 61
tggatgagtaggatgaaatgaaatc

SEQ ID NO: 363643 - DNA, 25 bp, Artificial
  probe
  misc_feature (1)..(25): SEQ ID NO: 3794; WAN0249VS; Start 25; Stop 49
agaggagagtgatggatgagtagga

SEQ ID NO: 363644 - DNA, 25 bp, Artificial
  probe
  misc_feature (1)..(25): SEQ ID NO: 3795; WAN024AHX; Start 156; Stop 180
ccagactataatgatgattacttcg

SEQ ID NO: 363645 - DNA, 25 bp, Artificial
  probe
  misc_feature (1)..(25): SEQ ID NO: 3795; WAN024AHX; Start 177; Stop 201
ttcgtaatcttcatctgccgactaa

SEQ ID NO: 363646 - DNA, 25 bp, Artificial
  probe
  misc_feature (1)..(25): SEQ ID NO: 3795; WAN024AHX; Start 173; Stop 197
ttacttcgtaatcttcatctgccga

SEQ ID NO: 363647 - DNA, 25 bp, Artificial
  probe
  misc_feature (1)..(25): SEQ ID NO: 3795; WAN024AHX; Start 157; Stop 181
cagactataatgatgattacttcgt

SEQ ID NO: 363648 - DNA, 25 bp, Artificial
  probe
  misc_feature (1)..(25): SEQ ID NO: 3795; WAN024AHX; Start 176; Stop 200
cttcgtaatcttcatctgccgacta

SEQ ID NO: 363649 - DNA, 25 bp, Artificial
  probe
  misc_feature (1)..(25): SEQ ID NO: 3795; WAN024AHX; Start 174; Stop 198
tacttcgtaatcttcatctgccgac

SEQ ID NO: 363650 - DNA, 25 bp, Artificial
  probe
  misc_feature (1)..(25): SEQ ID NO: 3795; WAN024AHX; Start 153; Stop 177
ctcccagactataatgatgattact

SEQ ID NO: 363651 - DNA, 25 bp, Artificial
  probe
  misc_feature (1)..(25): SEQ ID NO: 3795; WAN024AHX; Start 152; Stop 176
tctcccagactataatgatgattac

SEQ ID NO: 363652 - DNA, 25 bp, Artificial
  probe
  misc_feature (1)..(25): SEQ ID NO: 3795; WAN024AHX; Start 52; Stop 76
ggactatattgatgattacttcgta

SEQ ID NO: 363653 - DNA, 25 bp, Artificial
  probe
  misc_feature (1)..(25): SEQ ID NO: 3795; WAN024AHX; Start 181; Stop 205
taatcttcatctgccgactaaaaca

SEQ ID NO: 363654 - DNA, 25 bp, Artificial
  probe
  misc_feature (1)..(25): SEQ ID NO: 3795; WAN024AHX; Start 180; Stop 204
gtaatcttcatctgccgactaaaac

SEQ ID NO: 363655 - DNA, 25 bp, Artificial
  probe
  misc_feature (1)..(25): SEQ ID NO: 3795; WAN024AHX; Start 183; Stop 207
atcttcatctgccgactaaaacaat

SEQ ID NO: 363656 - DNA, 25 bp, Artificial
  probe
  misc_feature (1)..(25): SEQ ID NO: 3795; WAN024AHX; Start 172; Stop 196
attacttcgtaatcttcatctgccg

SEQ ID NO: 363657 - DNA, 25 bp, Artificial
  probe
  misc_feature (1)..(25): SEQ ID NO: 3795; WAN024AHX; Start 182; Stop 206
aatcttcatctgccgactaaaacaa

SEQ ID NO: 363658 - DNA, 25 bp, Artificial
  probe
  misc_feature (1)..(25): SEQ ID NO: 3795; WAN024AHX; Start 154; Stop 178
tcccagactataatgatgattactt

SEQ ID NO: 363659 - DNA, 25 bp, Artificial
  probe
  misc_feature (1)..(25): SEQ ID NO: 3795; WAN024AHX; Start 179; Stop 203
cgtaatcttcatctgccgactaaaa

SEQ ID NO: 363660 - DNA, 25 bp, Artificial
  probe
  misc_feature (1)..(25): SEQ ID NO: 3795; WAN024AHX; Start 155; Stop 179
cccagactataatgatgattacttc

SEQ ID NO: 363661 - DNA, 25 bp, Artificial
  probe
  misc_feature (1)..(25): SEQ ID NO: 3795; WAN024AHX; Start 184; Stop 208
tcttcatctgccgactaaaacaatc

SEQ ID NO: 363662 - DNA, 25 bp, Artificial
  probe
  misc_feature (1)..(25): SEQ ID NO: 3795; WAN024AHX; Start 132; Stop 156
ttatctgcaacctaaactagtctcc

SEQ ID NO: 363663 - DNA, 25 bp, Artificial
  probe
  misc_feature (1)..(25): SEQ ID NO: 3795; WAN024AHX; Start 178; Stop 202
tcgtaatcttcatctgccgactaaa

SEQ ID NO: 363664 - DNA, 25 bp, Artificial
  probe
  misc_feature (1)..(25): SEQ ID NO: 3795; WAN024AHX; Start 133; Stop 157
tatctgcaacctaaactagtctccc

SEQ ID NO: 363665 - DNA, 25 bp, Artificial
  probe
  misc_feature (1)..(25): SEQ ID NO: 3795; WAN024AHX; Start 185; Stop 209
cttcatctgccgactaaaacaatcc

SEQ ID NO: 363666 - DNA, 25 bp, Artificial
  probe
  misc_feature (1)..(25): SEQ ID NO: 3795; WAN024AHX; Start 175; Stop 199
acttcgtaatcttcatctgccgact

SEQ ID NO: 363667 - DNA, 25 bp, Artificial
  probe
  misc_feature (1)..(25): SEQ ID NO: 3795; WAN024AHX; Start 66; Stop 90
attacttcgtaatctccatctgccg

SEQ ID NO: 363668 - DNA, 25 bp, Artificial
  probe
  misc_feature (1)..(25): SEQ ID NO: 3795; WAN024AHX; Start 131; Stop 155
tttatctgcaacctaaactagtctc

SEQ ID NO: 363669 - DNA, 25 bp, Artificial
  probe
  misc_feature (1)..(25): SEQ ID NO: 3795; WAN024AHX; Start 130; Stop 154
ctttatctgcaacctaaactagtct

SEQ ID NO: 363670 - DNA, 25 bp, Artificial
  probe
  misc_feature (1)..(25): SEQ ID NO: 3795; WAN024AHX; Start 129; Stop 153
tctttatctgcaacctaaactagtc

SEQ ID NO: 363671 - DNA, 25 bp, Artificial
  probe
  misc_feature (1)..(25): SEQ ID NO: 3795; WAN024AHX; Start 126; Stop 150
caatctttatctgcaacctaaacta

SEQ ID NO: 363672 - DNA, 25 bp, Artificial
  probe
  misc_feature (1)..(25): SEQ ID NO: 3795; WAN024AHX; Start 125; Stop 149
gcaatctttatctgcaacctaaact

SEQ ID NO: 363673 - DNA, 25 bp, Artificial
  probe
  misc_feature (1)..(25): SEQ ID NO: 3795; WAN024AHX; Start 186; Stop 210
ttcatctgccgactaaaacaatcca

SEQ ID NO: 363674 - DNA, 25 bp, Artificial
  probe
  misc_feature (1)..(25): SEQ ID NO: 3795; WAN024AHX; Start 158; Stop 182
agactataatgatgattacttcgta

SEQ ID NO: 363675 - DNA, 25 bp, Artificial
  probe
  misc_feature (1)..(25): SEQ ID NO: 3795; WAN024AHX; Start 127; Stop 151
aatctttatctgcaacctaaactag

SEQ ID NO: 363676 - DNA, 25 bp, Artificial
  probe
  misc_feature (1)..(25): SEQ ID NO: 3795; WAN024AHX; Start 124; Stop 148
cgcaatctttatctgcaacctaaac

SEQ ID NO: 363677 - DNA, 25 bp, Artificial
  probe
  misc_feature (1)..(25): SEQ ID NO: 3796; WAN0249MC; Start 86; Stop 110
aatacaacaaggagagagcaacaag

SEQ ID NO: 363678 - DNA, 25 bp, Artificial
  probe
  misc_feature (1)..(25): SEQ ID NO: 3796; WAN0249MC; Start 87; Stop 111
atacaacaaggagagagcaacaaga

SEQ ID NO: 363679 - DNA, 25 bp, Artificial
  probe
  misc_feature (1)..(25): SEQ ID NO: 3796; WAN0249MC; Start 88; Stop 112
tacaacaaggagagagcaacaagac

SEQ ID NO: 363680 - DNA, 25 bp, Artificial
  probe
  misc_feature (1)..(25): SEQ ID NO: 3796; WAN0249MC; Start 84; Stop 108
taaatacaacaaggagagagcaaca

SEQ ID NO: 363681 - DNA, 25 bp, Artificial
  probe
  misc_feature (1)..(25): SEQ ID NO: 3796; WAN0249MC; Start 85; Stop 109
aaatacaacaaggagagagcaacaa

SEQ ID NO: 363682 - DNA, 25 bp, Artificial
  probe
  misc_feature (1)..(25): SEQ ID NO: 3796; WAN0249MC; Start 83; Stop 107
ataaatacaacaaggagagagcaac

SEQ ID NO: 363683 - DNA, 25 bp, Artificial
  probe
  misc_feature (1)..(25): SEQ ID NO: 3796; WAN0249MC; Start 82; Stop 106
aataaatacaacaaggagagagcaa

SEQ ID NO: 363684 - DNA, 25 bp, Artificial
  probe
  misc_feature (1)..(25): SEQ ID NO: 3796; WAN0249MC; Start 90; Stop 114
caacaaggagagagcaacaagactt

SEQ ID NO: 363685 - DNA, 25 bp, Artificial
  probe
  misc_feature (1)..(25): SEQ ID NO: 3796; WAN0249MC; Start 107; Stop 131
caagactttctcctttgttatccta

SEQ ID NO: 363686 - DNA, 25 bp, Artificial
  probe
  misc_feature (1)..(25): SEQ ID NO: 3796; WAN0249MC; Start 81; Stop 105
taataaatacaacaaggagagagca

SEQ ID NO: 363687 - DNA, 25 bp, Artificial
  probe
  misc_feature (1)..(25): SEQ ID NO: 3796; WAN0249MC; Start 111; Stop 135
actttctcctttgttatcctattct

SEQ ID NO: 363688 - DNA, 25 bp, Artificial
  probe
  misc_feature (1)..(25): SEQ ID NO: 3796; WAN0249MC; Start 91; Stop 115
aacaaggagagagcaacaagacttt

SEQ ID NO: 363689 - DNA, 25 bp, Artificial
  probe
  misc_feature (1)..(25): SEQ ID NO: 3796; WAN0249MC; Start 110; Stop 134
gactttctcctttgttatcctattc

SEQ ID NO: 363690 - DNA, 25 bp, Artificial
  probe
  misc_feature (1)..(25): SEQ ID NO: 3796; WAN0249MC; Start 109; Stop 133
agactttctcctttgttatcctatt

SEQ ID NO: 363691 - DNA, 25 bp, Artificial
  probe
  misc_feature (1)..(25): SEQ ID NO: 3796; WAN0249MC; Start 108; Stop 132
aagactttctcctttgttatcctat

SEQ ID NO: 363692 - DNA, 25 bp, Artificial
  probe
  misc_feature (1)..(25): SEQ ID NO: 3796; WAN0249MC; Start 93; Stop 117
caaggagagagcaacaagactttct

SEQ ID NO: 363693 - DNA, 25 bp, Artificial
  probe
  misc_feature (1)..(25): SEQ ID NO: 3796; WAN0249MC; Start 89; Stop 113
acaacaaggagagagcaacaagact

SEQ ID NO: 363694 - DNA, 25 bp, Artificial
  probe
  misc_feature (1)..(25): SEQ ID NO: 3796; WAN0249MC; Start 92; Stop 116
acaaggagagagcaacaagactttc

SEQ ID NO: 363695 - DNA, 25 bp, Artificial
  probe
  misc_feature (1)..(25): SEQ ID NO: 3796; WAN0249MC; Start 80; Stop 104
ttaataaatacaacaaggagagagc

SEQ ID NO: 363696 - DNA, 25 bp, Artificial
  probe
  misc_feature (1)..(25): SEQ ID NO: 3796; WAN0249MC; Start 106; Stop 130
acaagactttctcctttgttatcct

SEQ ID NO: 363697 - DNA, 25 bp, Artificial
  probe
  misc_feature (1)..(25): SEQ ID NO: 3796; WAN0249MC; Start 112; Stop 136
ctttctcctttgttatcctattcta

SEQ ID NO: 363698 - DNA, 25 bp, Artificial
  probe
  misc_feature (1)..(25): SEQ ID NO: 3796; WAN0249MC; Start 99; Stop 123
gagagcaacaagactttctcctttg

SEQ ID NO: 363699 - DNA, 25 bp, Artificial
  probe
  misc_feature (1)..(25): SEQ ID NO: 3796; WAN0249MC; Start 98; Stop 122
agagagcaacaagactttctccttt

SEQ ID NO: 363700 - DNA, 25 bp, Artificial
  probe
  misc_feature (1)..(25): SEQ ID NO: 3796; WAN0249MC; Start 100; Stop 124
agagcaacaagactttctcctttgt

SEQ ID NO: 363701 - DNA, 25 bp, Artificial
  probe
  misc_feature (1)..(25): SEQ ID NO: 3796; WAN0249MC; Start 97; Stop 121
gagagagcaacaagactttctcctt

SEQ ID NO: 363702 - DNA, 25 bp, Artificial
  probe
  misc_feature (1)..(25): SEQ ID NO: 3796; WAN0249MC; Start 94; Stop 118
aaggagagagcaacaagactttctc

SEQ ID NO: 363703 - DNA, 25 bp, Artificial
  probe
  misc_feature (1)..(25): SEQ ID NO: 3796; WAN0249MC; Start 24; Stop 48
ctgcggatataaatgtaacattatt

SEQ ID NO: 363704 - DNA, 25 bp, Artificial
  probe
  misc_feature (1)..(25): SEQ ID NO: 3796; WAN0249MC; Start 25; Stop 49
tgcggatataaatgtaacattattt

SEQ ID NO: 363705 - DNA, 25 bp, Artificial
  probe
  misc_feature (1)..(25): SEQ ID NO: 3797; WAN0249F9; Start 63; Stop 87
aaatagcagaaaacaaaagtgaggt

SEQ ID NO: 363706 - DNA, 25 bp, Artificial
  probe
  misc_feature (1)..(25): SEQ ID NO: 3797; WAN0249F9; Start 64; Stop 88
aatagcagaaaacaaaagtgaggtt

SEQ ID NO: 363707 - DNA, 25 bp, Artificial
  probe
  misc_feature (1)..(25): SEQ ID NO: 3797; WAN0249F9; Start 62; Stop 86
aaaatagcagaaaacaaaagtgagg

SEQ ID NO: 363708 - DNA, 25 bp, Artificial
  probe
  misc_feature (1)..(25): SEQ ID NO: 3797; WAN0249F9; Start 11; Stop 35
ccctttagttacaaactttggaatt

SEQ ID NO: 363709 - DNA, 25 bp, Artificial
  probe
  misc_feature (1)..(25): SEQ ID NO: 3797; WAN0249F9; Start 58; Stop 82
gcataaaatagcagaaaacaaaagt

SEQ ID NO: 363710 - DNA, 25 bp, Artificial
  probe
  misc_feature (1)..(25): SEQ ID NO: 3797; WAN0249F9; Start 57; Stop 81
agcataaaatagcagaaaacaaaag

SEQ ID NO: 363711 - DNA, 25 bp, Artificial
  probe
  misc_feature (1)..(25): SEQ ID NO: 3797; WAN0249F9; Start 65; Stop 89
atagcagaaaacaaaagtgaggttt

SEQ ID NO: 363712 - DNA, 25 bp, Artificial
  probe
  misc_feature (1)..(25): SEQ ID NO: 3797; WAN0249F9; Start 61; Stop 85
taaaatagcagaaaacaaaagtgag

SEQ ID NO: 363713 - DNA, 25 bp, Artificial
  probe
  misc_feature (1)..(25): SEQ ID NO: 3797; WAN0249F9; Start 10; Stop 34
cccctttagttacaaactttggaat

SEQ ID NO: 363714 - DNA, 25 bp, Artificial
  probe
  misc_feature (1)..(25): SEQ ID NO: 3797; WAN0249F9; Start 59; Stop 83
cataaaatagcagaaaacaaaagtg

SEQ ID NO: 363715 - DNA, 25 bp, Artificial
  probe
  misc_feature (1)..(25): SEQ ID NO: 3797; WAN0249F9; Start 56; Stop 80
tagcataaaatagcagaaaacaaaa

SEQ ID NO: 363716 - DNA, 25 bp, Artificial
  probe
  misc_feature (1)..(25): SEQ ID NO: 3797; WAN0249F9; Start 55; Stop 79
ttagcataaaatagcagaaaacaaa

SEQ ID NO: 363717 - DNA, 25 bp, Artificial
  probe
  misc_feature (1)..(25): SEQ ID NO: 3797; WAN0249F9; Start 60; Stop 84
ataaaatagcagaaaacaaaagtga

SEQ ID NO: 363718 - DNA, 25 bp, Artificial
  probe
  misc_feature (1)..(25): SEQ ID NO: 3797; WAN0249F9; Start 54; Stop 78
tttagcataaaatagcagaaaacaa

SEQ ID NO: 363719 - DNA, 25 bp, Artificial
  probe
  misc_feature (1)..(25): SEQ ID NO: 3797; WAN0249F9; Start 132; Stop 156
ttttaggaggaattatgattatcgt

SEQ ID NO: 363720 - DNA, 25 bp, Artificial
  probe
  misc_feature (1)..(25): SEQ ID NO: 3797; WAN0249F9; Start 12; Stop 36
cctttagttacaaactttggaatta

SEQ ID NO: 363721 - DNA, 25 bp, Artificial
  probe
  misc_feature (1)..(25): SEQ ID NO: 3797; WAN0249F9; Start 53; Stop 77
ttttagcataaaatagcagaaaaca

SEQ ID NO: 363722 - DNA, 25 bp, Artificial
  probe
  misc_feature (1)..(25): SEQ ID NO: 3797; WAN0249F9; Start 66; Stop 90
tagcagaaaacaaaagtgaggtttt

SEQ ID NO: 363723 - DNA, 25 bp, Artificial
  probe
  misc_feature (1)..(25): SEQ ID NO: 3797; WAN0249F9; Start 114; Stop 138
tgcctttattattcctaattttagg

SEQ ID NO: 363724 - DNA, 25 bp, Artificial
  probe
  misc_feature (1)..(25): SEQ ID NO: 3797; WAN0249F9; Start 52; Stop 76
attttagcataaaatagcagaaaac

SEQ ID NO: 363725 - DNA, 25 bp, Artificial
  probe
  misc_feature (1)..(25): SEQ ID NO: 3798; WAN0249IE; Start 106; Stop 130
ctggcggaattggttataatatacg

SEQ ID NO: 363726 - DNA, 25 bp, Artificial
  probe
  misc_feature (1)..(25): SEQ ID NO: 3798; WAN0249IE; Start 103; Stop 127
tgtctggcggaattggttataatat

SEQ ID NO: 363727 - DNA, 25 bp, Artificial
  probe
  misc_feature (1)..(25): SEQ ID NO: 3798; WAN0249IE; Start 102; Stop 126
ttgtctggcggaattggttataata

SEQ ID NO: 363728 - DNA, 25 bp, Artificial
  probe
  misc_feature (1)..(25): SEQ ID NO: 3798; WAN0249IE; Start 108; Stop 132
ggcggaattggttataatatacggt

SEQ ID NO: 363729 - DNA, 25 bp, Artificial
  probe
  misc_feature (1)..(25): SEQ ID NO: 3798; WAN0249IE; Start 107; Stop 131
tggcggaattggttataatatacgg

SEQ ID NO: 363730 - DNA, 25 bp, Artificial
  probe
  misc_feature (1)..(25): SEQ ID NO: 3798; WAN0249IE; Start 109; Stop 133
gcggaattggttataatatacggta

SEQ ID NO: 363731 - DNA, 25 bp, Artificial
  probe
  misc_feature (1)..(25): SEQ ID NO: 3798; WAN0249IE; Start 101; Stop 125
cttgtctggcggaattggttataat

SEQ ID NO: 363732 - DNA, 25 bp, Artificial
  probe
  misc_feature (1)..(25): SEQ ID NO: 3798; WAN0249IE; Start 105; Stop 129
tctggcggaattggttataatatac

SEQ ID NO: 363733 - DNA, 25 bp, Artificial
  probe
  misc_feature (1)..(25): SEQ ID NO: 3798; WAN0249IE; Start 104; Stop 128
gtctggcggaattggttataatata

SEQ ID NO: 363734 - DNA, 25 bp, Artificial
  probe
  misc_feature (1)..(25): SEQ ID NO: 3798; WAN0249IE; Start 84; Stop 108
atgagcatatttctttccttgtctg

SEQ ID NO: 363735 - DNA, 25 bp, Artificial
  probe
  misc_feature (1)..(25): SEQ ID NO: 3798; WAN0249IE; Start 85; Stop 109
tgagcatatttctttccttgtctgg

SEQ ID NO: 363736 - DNA, 25 bp, Artificial
  probe
  misc_feature (1)..(25): SEQ ID NO: 3798; WAN0249IE; Start 83; Stop 107
aatgagcatatttctttccttgtct

SEQ ID NO: 363737 - DNA, 25 bp, Artificial
  probe
  misc_feature (1)..(25): SEQ ID NO: 3798; WAN0249IE; Start 110; Stop 134
cggaattggttataatatacggtac

SEQ ID NO: 363738 - DNA, 25 bp, Artificial
  probe
  misc_feature (1)..(25): SEQ ID NO: 3798; WAN0249IE; Start 86; Stop 110
gagcatatttctttccttgtctggc

SEQ ID NO: 363739 - DNA, 25 bp, Artificial
  probe
  misc_feature (1)..(25): SEQ ID NO: 3798; WAN0249IE; Start 100; Stop 124
ccttgtctggcggaattggttataa

SEQ ID NO: 363740 - DNA, 25 bp, Artificial
  probe
  misc_feature (1)..(25): SEQ ID NO: 3798; WAN0249IE; Start 29; Stop 53
aatagaaattcagtcatccatcaga

SEQ ID NO: 363741 - DNA, 25 bp, Artificial
  probe
  misc_feature (1)..(25): SEQ ID NO: 3798; WAN0249IE; Start 82; Stop 106
aaatgagcatatttctttccttgtc

SEQ ID NO: 363742 - DNA, 25 bp, Artificial
  probe
  misc_feature (1)..(25): SEQ ID NO: 3798; WAN0249IE; Start 30; Stop 54
atagaaattcagtcatccatcagat

SEQ ID NO: 363743 - DNA, 25 bp, Artificial
  probe
  misc_feature (1)..(25): SEQ ID NO: 3798; WAN0249IE; Start 28; Stop 52
aaatagaaattcagtcatccatcag

SEQ ID NO: 363744 - DNA, 25 bp, Artificial
  probe
  misc_feature (1)..(25): SEQ ID NO: 3798; WAN0249IE; Start 111; Stop 135
ggaattggttataatatacggtaca

SEQ ID NO: 363745 - DNA, 25 bp, Artificial
  probe
  misc_feature (1)..(25): SEQ ID NO: 3798; WAN0249IE; Start 99; Stop 123
tccttgtctggcggaattggttata

SEQ ID NO: 363746 - DNA, 25 bp, Artificial
  probe
  misc_feature (1)..(25): SEQ ID NO: 3798; WAN0249IE; Start 116; Stop 140
tggttataatatacggtacaaagga

SEQ ID NO: 363747 - DNA, 25 bp, Artificial
  probe
  misc_feature (1)..(25): SEQ ID NO: 3798; WAN0249IE; Start 87; Stop 111
agcatatttctttccttgtctggcg

SEQ ID NO: 363748 - DNA, 25 bp, Artificial
  probe
  misc_feature (1)..(25): SEQ ID NO: 3798; WAN0249IE; Start 24; Stop 48
aagtaaatagaaattcagtcatcca

SEQ ID NO: 363749 - DNA, 25 bp, Artificial
  probe
  misc_feature (1)..(25): SEQ ID NO: 3798; WAN0249IE; Start 89; Stop 113
catatttctttccttgtctggcgga

SEQ ID NO: 363750 - DNA, 25 bp, Artificial
  probe
  misc_feature (1)..(25): SEQ ID NO: 3798; WAN0249IE; Start 31; Stop 55
tagaaattcagtcatccatcagatg

SEQ ID NO: 363751 - DNA, 25 bp, Artificial
  probe
  misc_feature (1)..(25): SEQ ID NO: 3798; WAN0249IE; Start 27; Stop 51
taaatagaaattcagtcatccatca

SEQ ID NO: 363752 - DNA, 25 bp, Artificial
  probe
  misc_feature (1)..(25): SEQ ID NO: 3798; WAN0249IE; Start 25; Stop 49
agtaaatagaaattcagtcatccat

SEQ ID NO: 363753 - DNA, 25 bp, Artificial
  probe
  misc_feature (1)..(25): SEQ ID NO: 3798; WAN0249IE; Start 26; Stop 50
gtaaatagaaattcagtcatccatc

SEQ ID NO: 363754 - DNA, 25 bp, Artificial
  probe
  misc_feature (1)..(25): SEQ ID NO: 3798; WAN0249IE; Start 115; Stop 139
ttggttataatatacggtacaaagg

SEQ ID NO: 363755 - DNA, 25 bp, Artificial
  probe
  misc_feature (1)..(25): SEQ ID NO: 3798; WAN0249IE; Start 117; Stop 141
ggttataatatacggtacaaaggaa

SEQ ID NO: 363756 - DNA, 25 bp, Artificial
  probe
  misc_feature (1)..(25): SEQ ID NO: 3798; WAN0249IE; Start 88; Stop 112
gcatatttctttccttgtctggcgg

SEQ ID NO: 363757 - DNA, 25 bp, Artificial
  probe
  misc_feature (1)..(25): SEQ ID NO: 3798; WAN0249IE; Start 91; Stop 115
tatttctttccttgtctggcggaat

SEQ ID NO: 363758 - DNA, 25 bp, Artificial
  probe
  misc_feature (1)..(25): SEQ ID NO: 3799; WAN0249GV; Start 200; Stop 224
ggcagcattgtcatttatgtactaa

SEQ ID NO: 363759 - DNA, 25 bp, Artificial
  probe
  misc_feature (1)..(25): SEQ ID NO: 3799; WAN0249GV; Start 199; Stop 223
tggcagcattgtcatttatgtacta

SEQ ID NO: 363760 - DNA, 25 bp, Artificial
  probe
  misc_feature (1)..(25): SEQ ID NO: 3799; WAN0249GV; Start 196; Stop 220
cagtggcagcattgtcatttatgta

SEQ ID NO: 363761 - DNA, 25 bp, Artificial
  probe
  misc_feature (1)..(25): SEQ ID NO: 3799; WAN0249GV; Start 201; Stop 225
gcagcattgtcatttatgtactaag

SEQ ID NO: 363762 - DNA, 25 bp, Artificial
  probe
  misc_feature (1)..(25): SEQ ID NO: 3799; WAN0249GV; Start 308; Stop 332
aacatttcttgcttcttcgcttcaa

SEQ ID NO: 363763 - DNA, 25 bp, Artificial
  probe
  misc_feature (1)..(25): SEQ ID NO: 3799; WAN0249GV; Start 305; Stop 329
ttcaacatttcttgcttcttcgctt

SEQ ID NO: 363764 - DNA, 25 bp, Artificial
  probe
  misc_feature (1)..(25): SEQ ID NO: 3799; WAN0249GV; Start 198; Stop 222
gtggcagcattgtcatttatgtact

SEQ ID NO: 363765 - DNA, 25 bp, Artificial
  probe
  misc_feature (1)..(25): SEQ ID NO: 3799; WAN0249GV; Start 197; Stop 221
agtggcagcattgtcatttatgtac

SEQ ID NO: 363766 - DNA, 25 bp, Artificial
  probe
  misc_feature (1)..(25): SEQ ID NO: 3799; WAN0249GV; Start 97; Stop 121
tggtgttgtttattacctttcttgt

SEQ ID NO: 363767 - DNA, 25 bp, Artificial
  probe
  misc_feature (1)..(25): SEQ ID NO: 3799; WAN0249GV; Start 306; Stop 330
tcaacatttcttgcttcttcgcttc

SEQ ID NO: 363768 - DNA, 25 bp, Artificial
  probe
  misc_feature (1)..(25): SEQ ID NO: 3799; WAN0249GV; Start 307; Stop 331
caacatttcttgcttcttcgcttca

SEQ ID NO: 363769 - DNA, 25 bp, Artificial
  probe
  misc_feature (1)..(25): SEQ ID NO: 3799; WAN0249GV; Start 202; Stop 226
cagcattgtcatttatgtactaagt

SEQ ID NO: 363770 - DNA, 25 bp, Artificial
  probe
  misc_feature (1)..(25): SEQ ID NO: 3799; WAN0249GV; Start 96; Stop 120
ttggtgttgtttattacctttcttg

SEQ ID NO: 363771 - DNA, 25 bp, Artificial
  probe
  misc_feature (1)..(25): SEQ ID NO: 3799; WAN0249GV; Start 394; Stop 418
attgctaaattcttttcgccatcag

SEQ ID NO: 363772 - DNA, 25 bp, Artificial
  probe
  misc_feature (1)..(25): SEQ ID NO: 3799; WAN0249GV; Start 393; Stop 417
cattgctaaattcttttcgccatca

SEQ ID NO: 363773 - DNA, 25 bp, Artificial
  probe
  misc_feature (1)..(25): SEQ ID NO: 3799; WAN0249GV; Start 400; Stop 424
aaattcttttcgccatcaggagata

SEQ ID NO: 363774 - DNA, 25 bp, Artificial
  probe
  misc_feature (1)..(25): SEQ ID NO: 3799; WAN0249GV; Start 399; Stop 423
taaattcttttcgccatcaggagat

SEQ ID NO: 363775 - DNA, 25 bp, Artificial
  probe
  misc_feature (1)..(25): SEQ ID NO: 3799; WAN0249GV; Start 98; Stop 122
ggtgttgtttattacctttcttgta

SEQ ID NO: 363776 - DNA, 25 bp, Artificial
  probe
  misc_feature (1)..(25): SEQ ID NO: 3799; WAN0249GV; Start 401; Stop 425
aattcttttcgccatcaggagatag

SEQ ID NO: 363777 - DNA, 25 bp, Artificial
  probe
  misc_feature (1)..(25): SEQ ID NO: 3799; WAN0249GV; Start 203; Stop 227
agcattgtcatttatgtactaagtt

SEQ ID NO: 363778 - DNA, 25 bp, Artificial
  probe
  misc_feature (1)..(25): SEQ ID NO: 3799; WAN0249GV; Start 398; Stop 422
ctaaattcttttcgccatcaggaga

SEQ ID NO: 363779 - DNA, 25 bp, Artificial
  probe
  misc_feature (1)..(25): SEQ ID NO: 3799; WAN0249GV; Start 392; Stop 416
ccattgctaaattcttttcgccatc

SEQ ID NO: 363780 - DNA, 25 bp, Artificial
  probe
  misc_feature (1)..(25): SEQ ID NO: 3799; WAN0249GV; Start 95; Stop 119
attggtgttgtttattacctttctt

SEQ ID NO: 363781 - DNA, 25 bp, Artificial
  probe
  misc_feature (1)..(25): SEQ ID NO: 3799; WAN0249GV; Start 94; Stop 118
aattggtgttgtttattacctttct

SEQ ID NO: 363782 - DNA, 25 bp, Artificial
  probe
  misc_feature (1)..(25): SEQ ID NO: 3799; WAN0249GV; Start 391; Stop 415
accattgctaaattcttttcgccat

SEQ ID NO: 363783 - DNA, 25 bp, Artificial
  probe
  misc_feature (1)..(25): SEQ ID NO: 3799; WAN0249GV; Start 51; Stop 75
tataattgtaggaaagaaggtgttt

SEQ ID NO: 363784 - DNA, 25 bp, Artificial
  probe
  misc_feature (1)..(25): SEQ ID NO: 3799; WAN0249GV; Start 395; Stop 419
ttgctaaattcttttcgccatcagg

SEQ ID NO: 363785 - DNA, 25 bp, Artificial
  probe
  misc_feature (1)..(25): SEQ ID NO: 3799; WAN0249GV; Start 50; Stop 74
atataattgtaggaaagaaggtgtt

SEQ ID NO: 363786 - DNA, 25 bp, Artificial
  probe
  misc_feature (1)..(25): SEQ ID NO: 3799; WAN0249GV; Start 49; Stop 73
aatataattgtaggaaagaaggtgt

SEQ ID NO: 363787 - DNA, 25 bp, Artificial
  probe
  misc_feature (1)..(25): SEQ ID NO: 3799; WAN0249GV; Start 384; Stop 408
aacttgcaccattgctaaattcttt

SEQ ID NO: 363788 - DNA, 25 bp, Artificial
  probe
  misc_feature (1)..(25): SEQ ID NO: 3799; WAN0249GV; Start 93; Stop 117
aaattggtgttgtttattacctttc

SEQ ID NO: 363789 - DNA, 25 bp, Artificial
  probe
  misc_feature (1)..(25): SEQ ID NO: 3799; WAN0249GV; Start 402; Stop 426
attcttttcgccatcaggagatagg

SEQ ID NO: 363790 - DNA, 25 bp, Artificial
  probe
  misc_feature (1)..(25): SEQ ID NO: 3799; WAN0249GV; Start 397; Stop 421
gctaaattcttttcgccatcaggag

SEQ ID NO: 363791 - DNA, 25 bp, Artificial
  probe
  misc_feature (1)..(25): SEQ ID NO: 3800; WAN024AJN; Start 21; Stop 45
gaggaacattactaactctaggtta

SEQ ID NO: 363792 - DNA, 25 bp, Artificial
  probe
  misc_feature (1)..(25): SEQ ID NO: 3800; WAN024AJN; Start 20; Stop 44
agaggaacattactaactctaggtt

SEQ ID NO: 363793 - DNA, 25 bp, Artificial
  probe
  misc_feature (1)..(25): SEQ ID NO: 3800; WAN024AJN; Start 19; Stop 43
aagaggaacattactaactctaggt

SEQ ID NO: 363794 - DNA, 25 bp, Artificial
  probe
  misc_feature (1)..(25): SEQ ID NO: 3800; WAN024AJN; Start 41; Stop 65
ggttagcattttcctctctcattat

SEQ ID NO: 363795 - DNA, 25 bp, Artificial
  probe
  misc_feature (1)..(25): SEQ ID NO: 3800; WAN024AJN; Start 40; Stop 64
aggttagcattttcctctctcatta

SEQ ID NO: 363796 - DNA, 25 bp, Artificial
  probe
  misc_feature (1)..(25): SEQ ID NO: 3800; WAN024AJN; Start 39; Stop 63
taggttagcattttcctctctcatt

SEQ ID NO: 363797 - DNA, 25 bp, Artificial
  probe
  misc_feature (1)..(25): SEQ ID NO: 3800; WAN024AJN; Start 34; Stop 58
aactctaggttagcattttcctctc

SEQ ID NO: 363798 - DNA, 25 bp, Artificial
  probe
  misc_feature (1)..(25): SEQ ID NO: 3800; WAN024AJN; Start 38; Stop 62
ctaggttagcattttcctctctcat

SEQ ID NO: 363799 - DNA, 25 bp, Artificial
  probe
  misc_feature (1)..(25): SEQ ID NO: 3800; WAN024AJN; Start 36; Stop 60
ctctaggttagcattttcctctctc

SEQ ID NO: 363800 - DNA, 25 bp, Artificial
  probe
  misc_feature (1)..(25): SEQ ID NO: 3800; WAN024AJN; Start 42; Stop 66
gttagcattttcctctctcattatc

SEQ ID NO: 363801 - DNA, 25 bp, Artificial
  probe
  misc_feature (1)..(25): SEQ ID NO: 3800; WAN024AJN; Start 37; Stop 61
tctaggttagcattttcctctctca

SEQ ID NO: 363802 - DNA, 25 bp, Artificial
  probe
  misc_feature (1)..(25): SEQ ID NO: 3800; WAN024AJN; Start 35; Stop 59
actctaggttagcattttcctctct

SEQ ID NO: 363803 - DNA, 25 bp, Artificial
  probe
  misc_feature (1)..(25): SEQ ID NO: 3800; WAN024AJN; Start 33; Stop 57
taactctaggttagcattttcctct

SEQ ID NO: 363804 - DNA, 25 bp, Artificial
  probe
  misc_feature (1)..(25): SEQ ID NO: 3800; WAN024AJN; Start 18; Stop 42
aaagaggaacattactaactctagg

SEQ ID NO: 363805 - DNA, 25 bp, Artificial
  probe
  misc_feature (1)..(25): SEQ ID NO: 3800; WAN024AJN; Start 23; Stop 47
ggaacattactaactctaggttagc

SEQ ID NO: 363806 - DNA, 25 bp, Artificial
  probe
  misc_feature (1)..(25): SEQ ID NO: 3800; WAN024AJN; Start 24; Stop 48
gaacattactaactctaggttagca

SEQ ID NO: 363807 - DNA, 25 bp, Artificial
  probe
  misc_feature (1)..(25): SEQ ID NO: 3800; WAN024AJN; Start 26; Stop 50
acattactaactctaggttagcatt

SEQ ID NO: 363808 - DNA, 25 bp, Artificial
  probe
  misc_feature (1)..(25): SEQ ID NO: 3800; WAN024AJN; Start 25; Stop 49
aacattactaactctaggttagcat

SEQ ID NO: 363809 - DNA, 25 bp, Artificial
  probe
  misc_feature (1)..(25): SEQ ID NO: 3800; WAN024AJN; Start 22; Stop 46
aggaacattactaactctaggttag

SEQ ID NO: 363810 - DNA, 25 bp, Artificial
  probe
  misc_feature (1)..(25): SEQ ID NO: 3800; WAN024AJN; Start 31; Stop 55
actaactctaggttagcattttcct

SEQ ID NO: 363811 - DNA, 25 bp, Artificial
  probe
  misc_feature (1)..(25): SEQ ID NO: 3800; WAN024AJN; Start 32; Stop 56
ctaactctaggttagcattttcctc

SEQ ID NO: 363812 - DNA, 25 bp, Artificial
  probe
  misc_feature (1)..(25): SEQ ID NO: 3800; WAN024AJN; Start 27; Stop 51
cattactaactctaggttagcattt

SEQ ID NO: 363813 - DNA, 25 bp, Artificial
  probe
  misc_feature (1)..(25): SEQ ID NO: 3800; WAN024AJN; Start 17; Stop 41
aaaagaggaacattactaactctag

SEQ ID NO: 363814 - DNA, 25 bp, Artificial
  probe
  misc_feature (1)..(25): SEQ ID NO: 3800; WAN024AJN; Start 30; Stop 54
tactaactctaggttagcattttcc

SEQ ID NO: 363815 - DNA, 25 bp, Artificial
  probe
  misc_feature (1)..(25): SEQ ID NO: 3800; WAN024AJN; Start 15; Stop 39
ataaaagaggaacattactaactct

SEQ ID NO: 363816 - DNA, 25 bp, Artificial
  probe
  misc_feature (1)..(25): SEQ ID NO: 3800; WAN024AJN; Start 29; Stop 53
ttactaactctaggttagcattttc

SEQ ID NO: 363817 - DNA, 25 bp, Artificial
  probe
  misc_feature (1)..(25): SEQ ID NO: 3800; WAN024AJN; Start 28; Stop 52
attactaactctaggttagcatttt

SEQ ID NO: 363818 - DNA, 25 bp, Artificial
  probe
  misc_feature (1)..(25): SEQ ID NO: 3801; WAN024G3D; Start 680; Stop 704
tgagagttaatgaatcggttgtaga

SEQ ID NO: 363819 - DNA, 25 bp, Artificial
  probe
  misc_feature (1)..(25): SEQ ID NO: 3801; WAN024G3D; Start 675; Stop 699
ggaattgagagttaatgaatcggtt

SEQ ID NO: 363820 - DNA, 25 bp, Artificial
  probe
  misc_feature (1)..(25): SEQ ID NO: 3801; WAN024G3D; Start 679; Stop 703
ttgagagttaatgaatcggttgtag

SEQ ID NO: 363821 - DNA, 25 bp, Artificial
  probe
  misc_feature (1)..(25): SEQ ID NO: 3801; WAN024G3D; Start 677; Stop 701
aattgagagttaatgaatcggttgt

SEQ ID NO: 363822 - DNA, 25 bp, Artificial
  probe
  misc_feature (1)..(25): SEQ ID NO: 3801; WAN024G3D; Start 676; Stop 700
gaattgagagttaatgaatcggttg

SEQ ID NO: 363823 - DNA, 25 bp, Artificial
  probe
  misc_feature (1)..(25): SEQ ID NO: 3801; WAN024G3D; Start 681; Stop 705
gagagttaatgaatcggttgtagat

SEQ ID NO: 363824 - DNA, 25 bp, Artificial
  probe
  misc_feature (1)..(25): SEQ ID NO: 3801; WAN024G3D; Start 828; Stop 852
agataaggtaacagatatggatgga

SEQ ID NO: 363825 - DNA, 25 bp, Artificial
  probe
  misc_feature (1)..(25): SEQ ID NO: 3801; WAN024G3D; Start 827; Stop 851
cagataaggtaacagatatggatgg

SEQ ID NO: 363826 - DNA, 25 bp, Artificial
  probe
  misc_feature (1)..(25): SEQ ID NO: 3801; WAN024G3D; Start 678; Stop 702
attgagagttaatgaatcggttgta

SEQ ID NO: 363827 - DNA, 25 bp, Artificial
  probe
  misc_feature (1)..(25): SEQ ID NO: 3801; WAN024G3D; Start 1571; Stop 1595
ctgattcaactaaggatgttacagc

SEQ ID NO: 363828 - DNA, 25 bp, Artificial
  probe
  misc_feature (1)..(25): SEQ ID NO: 3801; WAN024G3D; Start 1370; Stop 1394
aagacgctggctatgttattaatct

SEQ ID NO: 363829 - DNA, 25 bp, Artificial
  probe
  misc_feature (1)..(25): SEQ ID NO: 3801; WAN024G3D; Start 829; Stop 853
gataaggtaacagatatggatggaa

SEQ ID NO: 363830 - DNA, 25 bp, Artificial
  probe
  misc_feature (1)..(25): SEQ ID NO: 3801; WAN024G3D; Start 1371; Stop 1395
agacgctggctatgttattaatcta

SEQ ID NO: 363831 - DNA, 25 bp, Artificial
  probe
  misc_feature (1)..(25): SEQ ID NO: 3801; WAN024G3D; Start 1374; Stop 1398
cgctggctatgttattaatctatca

SEQ ID NO: 363832 - DNA, 25 bp, Artificial
  probe
  misc_feature (1)..(25): SEQ ID NO: 3801; WAN024G3D; Start 1373; Stop 1397
acgctggctatgttattaatctatc

SEQ ID NO: 363833 - DNA, 25 bp, Artificial
  probe
  misc_feature (1)..(25): SEQ ID NO: 3801; WAN024G3D; Start 1372; Stop 1396
gacgctggctatgttattaatctat

SEQ ID NO: 363834 - DNA, 25 bp, Artificial
  probe
  misc_feature (1)..(25): SEQ ID NO: 3801; WAN024G3D; Start 1572; Stop 1596
tgattcaactaaggatgttacagct

SEQ ID NO: 363835 - DNA, 25 bp, Artificial
  probe
  misc_feature (1)..(25): SEQ ID NO: 3801; WAN024G3D; Start 1569; Stop 1593
atctgattcaactaaggatgttaca

SEQ ID NO: 363836 - DNA, 25 bp, Artificial
  probe
  misc_feature (1)..(25): SEQ ID NO: 3801; WAN024G3D; Start 1570; Stop 1594
tctgattcaactaaggatgttacag

SEQ ID NO: 363837 - DNA, 25 bp, Artificial
  probe
  misc_feature (1)..(25): SEQ ID NO: 3801; WAN024G3D; Start 1024; Stop 1048
aataatggattcgatggtgagattc

SEQ ID NO: 363838 - DNA, 25 bp, Artificial
  probe
  misc_feature (1)..(25): SEQ ID NO: 3801; WAN024G3D; Start 682; Stop 706
agagttaatgaatcggttgtagata

SEQ ID NO: 363839 - DNA, 25 bp, Artificial
  probe
  misc_feature (1)..(25): SEQ ID NO: 3801; WAN024G3D; Start 191; Stop 215
cggatatgttagaaggaaatggagt

SEQ ID NO: 363840 - DNA, 25 bp, Artificial
  probe
  misc_feature (1)..(25): SEQ ID NO: 3801; WAN024G3D; Start 190; Stop 214
acggatatgttagaaggaaatggag

SEQ ID NO: 363841 - DNA, 25 bp, Artificial
  probe
  misc_feature (1)..(25): SEQ ID NO: 3801; WAN024G3D; Start 1187; Stop 1211
ataaagatacgggagaggtaagtga

SEQ ID NO: 363842 - DNA, 25 bp, Artificial
  probe
  misc_feature (1)..(25): SEQ ID NO: 3801; WAN024G3D; Start 1026; Stop 1050
taatggattcgatggtgagattcaa

SEQ ID NO: 363843 - DNA, 25 bp, Artificial
  probe
  misc_feature (1)..(25): SEQ ID NO: 3801; WAN024G3D; Start 1025; Stop 1049
ataatggattcgatggtgagattca

SEQ ID NO: 363844 - DNA, 25 bp, Artificial
  probe
  misc_feature (1)..(25): SEQ ID NO: 3801; WAN024G3D; Start 643; Stop 667
ggtaagatttctgataagggtggtt

SEQ ID NO: 363845 - DNA, 25 bp, Artificial
  probe
  misc_feature (1)..(25): SEQ ID NO: 3801; WAN024G3D; Start 1188; Stop 1212
taaagatacgggagaggtaagtgaa

SEQ ID NO: 363846 - DNA, 25 bp, Artificial
  probe
  misc_feature (1)..(25): SEQ ID NO: 3801; WAN024G3D; Start 1186; Stop 1210
aataaagatacgggagaggtaagtg

SEQ ID NO: 363847 - DNA, 25 bp, Artificial
  probe
  misc_feature (1)..(25): SEQ ID NO: 3801; WAN024G3D; Start 719; Stop 743
acggagatttacacattgataacac

SEQ ID NO: 363848 - DNA, 25 bp, Artificial
  probe
  misc_feature (1)..(25): SEQ ID NO: 3801; WAN024G3D; Start 549; Stop 573
taccaaaccagtaaacctttcaatg

SEQ ID NO: 363849 - DNA, 25 bp, Artificial
  probe
  misc_feature (1)..(25): SEQ ID NO: 3801; WAN024G3D; Start 641; Stop 665
gaggtaagatttctgataagggtgg

SEQ ID NO: 363850 - DNA, 25 bp, Artificial
  probe
  misc_feature (1)..(25): SEQ ID NO: 3801; WAN024G3D; Start 547; Stop 571
gataccaaaccagtaaacctttcaa

SEQ ID NO: 363851 - DNA, 25 bp, Artificial
  probe
  misc_feature (1)..(25): SEQ ID NO: 3802; WAN024AFV; Start 12; Stop 36
gtgttcaactcctttcaaagaatgt

SEQ ID NO: 363852 - DNA, 25 bp, Artificial
  probe
  misc_feature (1)..(25): SEQ ID NO: 3802; WAN024AFV; Start 11; Stop 35
cgtgttcaactcctttcaaagaatg

SEQ ID NO: 363853 - DNA, 25 bp, Artificial
  probe
  misc_feature (1)..(25): SEQ ID NO: 3802; WAN024AFV; Start 13; Stop 37
tgttcaactcctttcaaagaatgta

SEQ ID NO: 363854 - DNA, 25 bp, Artificial
  probe
  misc_feature (1)..(25): SEQ ID NO: 3802; WAN024AFV; Start 14; Stop 38
gttcaactcctttcaaagaatgtag

SEQ ID NO: 363855 - DNA, 25 bp, Artificial
  probe
  misc_feature (1)..(25): SEQ ID NO: 3802; WAN024AFV; Start 15; Stop 39
ttcaactcctttcaaagaatgtaga

SEQ ID NO: 363856 - DNA, 25 bp, Artificial
  probe
  misc_feature (1)..(25): SEQ ID NO: 3802; WAN024AFV; Start 16; Stop 40
tcaactcctttcaaagaatgtagag

SEQ ID NO: 363857 - DNA, 25 bp, Artificial
  probe
  misc_feature (1)..(25): SEQ ID NO: 3802; WAN024AFV; Start 21; Stop 45
tcctttcaaagaatgtagagtaggt

SEQ ID NO: 363858 - DNA, 25 bp, Artificial
  probe
  misc_feature (1)..(25): SEQ ID NO: 3802; WAN024AFV; Start 20; Stop 44
ctcctttcaaagaatgtagagtagg

SEQ ID NO: 363859 - DNA, 25 bp, Artificial
  probe
  misc_feature (1)..(25): SEQ ID NO: 3802; WAN024AFV; Start 22; Stop 46
cctttcaaagaatgtagagtaggtt

SEQ ID NO: 363860 - DNA, 25 bp, Artificial
  probe
  misc_feature (1)..(25): SEQ ID NO: 3802; WAN024AFV; Start 10; Stop 34
gcgtgttcaactcctttcaaagaat

SEQ ID NO: 363861 - DNA, 25 bp, Artificial
  probe
  misc_feature (1)..(25): SEQ ID NO: 3802; WAN024AFV; Start 23; Stop 47
ctttcaaagaatgtagagtaggttt

SEQ ID NO: 363862 - DNA, 25 bp, Artificial
  probe
  misc_feature (1)..(25): SEQ ID NO: 3802; WAN024AFV; Start 2; Stop 26
tatctagggcgtgttcaactccttt

SEQ ID NO: 363863 - DNA, 25 bp, Artificial
  probe
  misc_feature (1)..(25): SEQ ID NO: 3802; WAN024AFV; Start 9; Stop 33
ggcgtgttcaactcctttcaaagaa

SEQ ID NO: 363864 - DNA, 25 bp, Artificial
  probe
  misc_feature (1)..(25): SEQ ID NO: 3802; WAN024AFV; Start 17; Stop 41
caactcctttcaaagaatgtagagt

SEQ ID NO: 363865 - DNA, 25 bp, Artificial
  probe
  misc_feature (1)..(25): SEQ ID NO: 3802; WAN024AFV; Start 1; Stop 25
gtatctagggcgtgttcaactcctt

SEQ ID NO: 363866 - DNA, 25 bp, Artificial
  probe
  misc_feature (1)..(25): SEQ ID NO: 3802; WAN024AFV; Start 19; Stop 43
actcctttcaaagaatgtagagtag

SEQ ID NO: 363867 - DNA, 25 bp, Artificial
  probe
  misc_feature (1)..(25): SEQ ID NO: 3802; WAN024AFV; Start 24; Stop 48
tttcaaagaatgtagagtaggtttt

SEQ ID NO: 363868 - DNA, 25 bp, Artificial
  probe
  misc_feature (1)..(25): SEQ ID NO: 3802; WAN024AFV; Start 18; Stop 42
aactcctttcaaagaatgtagagta

SEQ ID NO: 363869 - DNA, 25 bp, Artificial
  probe
  misc_feature (1)..(25): SEQ ID NO: 3802; WAN024AFV; Start 6; Stop 30
tagggcgtgttcaactcctttcaaa

SEQ ID NO: 363870 - DNA, 25 bp, Artificial
  probe
  misc_feature (1)..(25): SEQ ID NO: 3802; WAN024AFV; Start 3; Stop 27
atctagggcgtgttcaactcctttc

SEQ ID NO: 363871 - DNA, 25 bp, Artificial
  probe
  misc_feature (1)..(25): SEQ ID NO: 3802; WAN024AFV; Start 5; Stop 29
ctagggcgtgttcaactcctttcaa

SEQ ID NO: 363872 - DNA, 25 bp, Artificial
  probe
  misc_feature (1)..(25): SEQ ID NO: 3803; WAN0249VY; Start 40; Stop 64
aaaggctccaaacgctattctataa

SEQ ID NO: 363873 - DNA, 25 bp, Artificial
  probe
  misc_feature (1)..(25): SEQ ID NO: 3803; WAN0249VY; Start 41; Stop 65
aaggctccaaacgctattctataag

SEQ ID NO: 363874 - DNA, 25 bp, Artificial
  probe
  misc_feature (1)..(25): SEQ ID NO: 3803; WAN0249VY; Start 39; Stop 63
caaaggctccaaacgctattctata

SEQ ID NO: 363875 - DNA, 25 bp, Artificial
  probe
  misc_feature (1)..(25): SEQ ID NO: 3803; WAN0249VY; Start 38; Stop 62
tcaaaggctccaaacgctattctat

SEQ ID NO: 363876 - DNA, 25 bp, Artificial
  probe
  misc_feature (1)..(25): SEQ ID NO: 3803; WAN0249VY; Start 37; Stop 61
ttcaaaggctccaaacgctattcta

SEQ ID NO: 363877 - DNA, 25 bp, Artificial
  probe
  misc_feature (1)..(25): SEQ ID NO: 3803; WAN0249VY; Start 29; Stop 53
aaactactttcaaaggctccaaacg

SEQ ID NO: 363878 - DNA, 25 bp, Artificial
  probe
  misc_feature (1)..(25): SEQ ID NO: 3803; WAN0249VY; Start 83; Stop 107
agtgtctataagatattgaaagcct

SEQ ID NO: 363879 - DNA, 25 bp, Artificial
  probe
  misc_feature (1)..(25): SEQ ID NO: 3803; WAN0249VY; Start 28; Stop 52
gaaactactttcaaaggctccaaac

SEQ ID NO: 363880 - DNA, 25 bp, Artificial
  probe
  misc_feature (1)..(25): SEQ ID NO: 3803; WAN0249VY; Start 33; Stop 57
tactttcaaaggctccaaacgctat

SEQ ID NO: 363881 - DNA, 25 bp, Artificial
  probe
  misc_feature (1)..(25): SEQ ID NO: 3803; WAN0249VY; Start 36; Stop 60
tttcaaaggctccaaacgctattct

SEQ ID NO: 363882 - DNA, 25 bp, Artificial
  probe
  misc_feature (1)..(25): SEQ ID NO: 3803; WAN0249VY; Start 35; Stop 59
ctttcaaaggctccaaacgctattc

SEQ ID NO: 363883 - DNA, 25 bp, Artificial
  probe
  misc_feature (1)..(25): SEQ ID NO: 3803; WAN0249VY; Start 84; Stop 108
gtgtctataagatattgaaagcctt

SEQ ID NO: 363884 - DNA, 25 bp, Artificial
  probe
  misc_feature (1)..(25): SEQ ID NO: 3803; WAN0249VY; Start 82; Stop 106
aagtgtctataagatattgaaagcc

SEQ ID NO: 363885 - DNA, 25 bp, Artificial
  probe
  misc_feature (1)..(25): SEQ ID NO: 3803; WAN0249VY; Start 32; Stop 56
ctactttcaaaggctccaaacgcta

SEQ ID NO: 363886 - DNA, 25 bp, Artificial
  probe
  misc_feature (1)..(25): SEQ ID NO: 3803; WAN0249VY; Start 65; Stop 89
gcgagaaactaaaatctaagtgtct

SEQ ID NO: 363887 - DNA, 25 bp, Artificial
  probe
  misc_feature (1)..(25): SEQ ID NO: 3803; WAN0249VY; Start 64; Stop 88
agcgagaaactaaaatctaagtgtc

SEQ ID NO: 363888 - DNA, 25 bp, Artificial
  probe
  misc_feature (1)..(25): SEQ ID NO: 3803; WAN0249VY; Start 34; Stop 58
actttcaaaggctccaaacgctatt

SEQ ID NO: 363889 - DNA, 25 bp, Artificial
  probe
  misc_feature (1)..(25): SEQ ID NO: 3803; WAN0249VY; Start 63; Stop 87
aagcgagaaactaaaatctaagtgt

SEQ ID NO: 363890 - DNA, 25 bp, Artificial
  probe
  misc_feature (1)..(25): SEQ ID NO: 3803; WAN0249VY; Start 42; Stop 66
aggctccaaacgctattctataagc

SEQ ID NO: 363891 - DNA, 25 bp, Artificial
  probe
  misc_feature (1)..(25): SEQ ID NO: 3803; WAN0249VY; Start 110; Stop 134
tcggtaaagtgtatactaaagaagt

SEQ ID NO: 363892 - DNA, 25 bp, Artificial
  probe
  misc_feature (1)..(25): SEQ ID NO: 3803; WAN0249VY; Start 85; Stop 109
tgtctataagatattgaaagccttt

SEQ ID NO: 363893 - DNA, 25 bp, Artificial
  probe
  misc_feature (1)..(25): SEQ ID NO: 3803; WAN0249VY; Start 30; Stop 54
aactactttcaaaggctccaaacgc

SEQ ID NO: 363894 - DNA, 25 bp, Artificial
  probe
  misc_feature (1)..(25): SEQ ID NO: 3803; WAN0249VY; Start 53; Stop 77
gctattctataagcgagaaactaaa

SEQ ID NO: 363895 - DNA, 25 bp, Artificial
  probe
  misc_feature (1)..(25): SEQ ID NO: 3803; WAN0249VY; Start 96; Stop 120
tattgaaagccttttcggtaaagtg

SEQ ID NO: 363896 - DNA, 25 bp, Artificial
  probe
  misc_feature (1)..(25): SEQ ID NO: 3803; WAN0249VY; Start 100; Stop 124
gaaagccttttcggtaaagtgtata

SEQ ID NO: 363897 - DNA, 25 bp, Artificial
  probe
  misc_feature (1)..(25): SEQ ID NO: 3803; WAN0249VY; Start 95; Stop 119
atattgaaagccttttcggtaaagt

SEQ ID NO: 363898 - DNA, 25 bp, Artificial
  probe
  misc_feature (1)..(25): SEQ ID NO: 3803; WAN0249VY; Start 99; Stop 123
tgaaagccttttcggtaaagtgtat

SEQ ID NO: 363899 - DNA, 25 bp, Artificial
  probe
  misc_feature (1)..(25): SEQ ID NO: 3803; WAN0249VY; Start 93; Stop 117
agatattgaaagccttttcggtaaa

SEQ ID NO: 363900 - DNA, 25 bp, Artificial
  probe
  misc_feature (1)..(25): SEQ ID NO: 3803; WAN0249VY; Start 92; Stop 116
aagatattgaaagccttttcggtaa

SEQ ID NO: 363901 - DNA, 25 bp, Artificial
  probe
  misc_feature (1)..(25): SEQ ID NO: 3803; WAN0249VY; Start 98; Stop 122
ttgaaagccttttcggtaaagtgta

SEQ ID NO: 363902 - DNA, 25 bp, Artificial
  probe
  misc_feature (1)..(25): SEQ ID NO: 3803; WAN0249VY; Start 62; Stop 86
taagcgagaaactaaaatctaagtg

SEQ ID NO: 363903 - DNA, 25 bp, Artificial
  probe
  misc_feature (1)..(25): SEQ ID NO: 3803; WAN0249VY; Start 94; Stop 118
gatattgaaagccttttcggtaaag

SEQ ID NO: 363904 - DNA, 25 bp, Artificial
  probe
  misc_feature (1)..(25): SEQ ID NO: 3803; WAN0249VY; Start 90; Stop 114
ataagatattgaaagccttttcggt

SEQ ID NO: 363905 - DNA, 25 bp, Artificial
  probe
  misc_feature (1)..(25): SEQ ID NO: 3804; WAN024A9C; Start 45; Stop 69
tggtgagagttatttatgtcaagga

SEQ ID NO: 363906 - DNA, 25 bp, Artificial
  probe
  misc_feature (1)..(25): SEQ ID NO: 3804; WAN024A9C; Start 46; Stop 70
ggtgagagttatttatgtcaaggag

SEQ ID NO: 363907 - DNA, 25 bp, Artificial
  probe
  misc_feature (1)..(25): SEQ ID NO: 3804; WAN024A9C; Start 44; Stop 68
ttggtgagagttatttatgtcaagg

SEQ ID NO: 363908 - DNA, 25 bp, Artificial
  probe
  misc_feature (1)..(25): SEQ ID NO: 3804; WAN024A9C; Start 48; Stop 72
tgagagttatttatgtcaaggagtg

SEQ ID NO: 363909 - DNA, 25 bp, Artificial
  probe
  misc_feature (1)..(25): SEQ ID NO: 3804; WAN024A9C; Start 47; Stop 71
gtgagagttatttatgtcaaggagt

SEQ ID NO: 363910 - DNA, 25 bp, Artificial
  probe
  misc_feature (1)..(25): SEQ ID NO: 3804; WAN024A9C; Start 49; Stop 73
gagagttatttatgtcaaggagtga

SEQ ID NO: 363911 - DNA, 25 bp, Artificial
  probe
  misc_feature (1)..(25): SEQ ID NO: 3804; WAN024A9C; Start 50; Stop 74
agagttatttatgtcaaggagtgat

SEQ ID NO: 363912 - DNA, 25 bp, Artificial
  probe
  misc_feature (1)..(25): SEQ ID NO: 3804; WAN024A9C; Start 43; Stop 67
attggtgagagttatttatgtcaag

SEQ ID NO: 363913 - DNA, 25 bp, Artificial
  probe
  misc_feature (1)..(25): SEQ ID NO: 3804; WAN024A9C; Start 51; Stop 75
gagttatttatgtcaaggagtgatt

SEQ ID NO: 363914 - DNA, 25 bp, Artificial
  probe
  misc_feature (1)..(25): SEQ ID NO: 3804; WAN024A9C; Start 31; Stop 55
acatagtcttttattggtgagagtt

SEQ ID NO: 363915 - DNA, 25 bp, Artificial
  probe
  misc_feature (1)..(25): SEQ ID NO: 3804; WAN024A9C; Start 61; Stop 85
tgtcaaggagtgattagaaataaat

SEQ ID NO: 363916 - DNA, 25 bp, Artificial
  probe
  misc_feature (1)..(25): SEQ ID NO: 3804; WAN024A9C; Start 60; Stop 84
atgtcaaggagtgattagaaataaa

SEQ ID NO: 363917 - DNA, 25 bp, Artificial
  probe
  misc_feature (1)..(25): SEQ ID NO: 3804; WAN024A9C; Start 57; Stop 81
tttatgtcaaggagtgattagaaat

SEQ ID NO: 363918 - DNA, 25 bp, Artificial
  probe
  misc_feature (1)..(25): SEQ ID NO: 3804; WAN024A9C; Start 56; Stop 80
atttatgtcaaggagtgattagaaa

SEQ ID NO: 363919 - DNA, 25 bp, Artificial
  probe
  misc_feature (1)..(25): SEQ ID NO: 3804; WAN024A9C; Start 30; Stop 54
gacatagtcttttattggtgagagt

SEQ ID NO: 363920 - DNA, 25 bp, Artificial
  probe
  misc_feature (1)..(25): SEQ ID NO: 3804; WAN024A9C; Start 42; Stop 66
tattggtgagagttatttatgtcaa

SEQ ID NO: 363921 - DNA, 25 bp, Artificial
  probe
  misc_feature (1)..(25): SEQ ID NO: 3804; WAN024A9C; Start 41; Stop 65
ttattggtgagagttatttatgtca

SEQ ID NO: 363922 - DNA, 25 bp, Artificial
  probe
  misc_feature (1)..(25): SEQ ID NO: 3804; WAN024A9C; Start 52; Stop 76
agttatttatgtcaaggagtgatta

SEQ ID NO: 363923 - DNA, 25 bp, Artificial
  probe
  misc_feature (1)..(25): SEQ ID NO: 3804; WAN024A9C; Start 53; Stop 77
gttatttatgtcaaggagtgattag

SEQ ID NO: 363924 - DNA, 25 bp, Artificial
  probe
  misc_feature (1)..(25): SEQ ID NO: 3804; WAN024A9C; Start 59; Stop 83
tatgtcaaggagtgattagaaataa

SEQ ID NO: 363925 - DNA, 25 bp, Artificial
  probe
  misc_feature (1)..(25): SEQ ID NO: 3804; WAN024A9C; Start 58; Stop 82
ttatgtcaaggagtgattagaaata

SEQ ID NO: 363926 - DNA, 25 bp, Artificial
  probe
  misc_feature (1)..(25): SEQ ID NO: 3804; WAN024A9C; Start 55; Stop 79
tatttatgtcaaggagtgattagaa

SEQ ID NO: 363927 - DNA, 25 bp, Artificial
  probe
  misc_feature (1)..(25): SEQ ID NO: 3804; WAN024A9C; Start 54; Stop 78
ttatttatgtcaaggagtgattaga

SEQ ID NO: 363928 - DNA, 25 bp, Artificial
  probe
  misc_feature (1)..(25): SEQ ID NO: 3804; WAN024A9C; Start 62; Stop 86
gtcaaggagtgattagaaataaatt

SEQ ID NO: 363929 - DNA, 25 bp, Artificial
  probe
  misc_feature (1)..(25): SEQ ID NO: 3804; WAN024A9C; Start 40; Stop 64
tttattggtgagagttatttatgtc

SEQ ID NO: 363930 - DNA, 25 bp, Artificial
  probe
  misc_feature (1)..(25): SEQ ID NO: 3804; WAN024A9C; Start 35; Stop 59
agtcttttattggtgagagttattt

SEQ ID NO: 363931 - DNA, 25 bp, Artificial
  probe
  misc_feature (1)..(25): SEQ ID NO: 3804; WAN024A9C; Start 32; Stop 56
catagtcttttattggtgagagtta

SEQ ID NO: 363932 - DNA, 25 bp, Artificial
  probe
  misc_feature (1)..(25): SEQ ID NO: 3804; WAN024A9C; Start 34; Stop 58
tagtcttttattggtgagagttatt

SEQ ID NO: 363933 - DNA, 25 bp, Artificial
  probe
  misc_feature (1)..(25): SEQ ID NO: 3804; WAN024A9C; Start 29; Stop 53
agacatagtcttttattggtgagag

SEQ ID NO: 363934 - DNA, 25 bp, Artificial
  probe
  misc_feature (1)..(25): SEQ ID NO: 3804; WAN024A9C; Start 33; Stop 57
atagtcttttattggtgagagttat

SEQ ID NO: 363935 - DNA, 25 bp, Artificial
  probe
  misc_feature (1)..(25): SEQ ID NO: 3804; WAN024A9C; Start 36; Stop 60
gtcttttattggtgagagttattta

SEQ ID NO: 363936 - DNA, 25 bp, Artificial
  probe
  misc_feature (1)..(25): SEQ ID NO: 3805; WAN0249TN; Start 206; Stop 230
aagtttcttcactactatgggctcg

SEQ ID NO: 363937 - DNA, 25 bp, Artificial
  probe
  misc_feature (1)..(25): SEQ ID NO: 3805; WAN0249TN; Start 183; Stop 207
acttcgctccacttccattacagaa

SEQ ID NO: 363938 - DNA, 25 bp, Artificial
  probe
  misc_feature (1)..(25): SEQ ID NO: 3805; WAN0249TN; Start 182; Stop 206
cacttcgctccacttccattacaga

SEQ ID NO: 363939 - DNA, 25 bp, Artificial
  probe
  misc_feature (1)..(25): SEQ ID NO: 3805; WAN0249TN; Start 181; Stop 205
tcacttcgctccacttccattacag

SEQ ID NO: 363940 - DNA, 25 bp, Artificial
  probe
  misc_feature (1)..(25): SEQ ID NO: 3805; WAN0249TN; Start 180; Stop 204
ctcacttcgctccacttccattaca

SEQ ID NO: 363941 - DNA, 25 bp, Artificial
  probe
  misc_feature (1)..(25): SEQ ID NO: 3805; WAN0249TN; Start 72; Stop 96
tcctcaatcaatttgttcatatctt

SEQ ID NO: 363942 - DNA, 25 bp, Artificial
  probe
  misc_feature (1)..(25): SEQ ID NO: 3805; WAN0249TN; Start 71; Stop 95
ttcctcaatcaatttgttcatatct

SEQ ID NO: 363943 - DNA, 25 bp, Artificial
  probe
  misc_feature (1)..(25): SEQ ID NO: 3805; WAN0249TN; Start 202; Stop 226
acagaagtttcttcactactatggg

SEQ ID NO: 363944 - DNA, 25 bp, Artificial
  probe
  misc_feature (1)..(25): SEQ ID NO: 3805; WAN0249TN; Start 205; Stop 229
gaagtttcttcactactatgggctc

SEQ ID NO: 363945 - DNA, 25 bp, Artificial
  probe
  misc_feature (1)..(25): SEQ ID NO: 3805; WAN0249TN; Start 194; Stop 218
cttccattacagaagtttcttcact

SEQ ID NO: 363946 - DNA, 25 bp, Artificial
  probe
  misc_feature (1)..(25): SEQ ID NO: 3805; WAN0249TN; Start 204; Stop 228
agaagtttcttcactactatgggct

SEQ ID NO: 363947 - DNA, 25 bp, Artificial
  probe
  misc_feature (1)..(25): SEQ ID NO: 3805; WAN0249TN; Start 203; Stop 227
cagaagtttcttcactactatgggc

SEQ ID NO: 363948 - DNA, 25 bp, Artificial
  probe
  misc_feature (1)..(25): SEQ ID NO: 3805; WAN0249TN; Start 197; Stop 221
ccattacagaagtttcttcactact

SEQ ID NO: 363949 - DNA, 25 bp, Artificial
  probe
  misc_feature (1)..(25): SEQ ID NO: 3805; WAN0249TN; Start 196; Stop 220
tccattacagaagtttcttcactac

SEQ ID NO: 363950 - DNA, 25 bp, Artificial
  probe
  misc_feature (1)..(25): SEQ ID NO: 3805; WAN0249TN; Start 207; Stop 231
agtttcttcactactatgggctcgg

SEQ ID NO: 363951 - DNA, 25 bp, Artificial
  probe
  misc_feature (1)..(25): SEQ ID NO: 3805; WAN0249TN; Start 70; Stop 94
tttcctcaatcaatttgttcatatc

SEQ ID NO: 363952 - DNA, 25 bp, Artificial
  probe
  misc_feature (1)..(25): SEQ ID NO: 3805; WAN0249TN; Start 184; Stop 208
cttcgctccacttccattacagaag

SEQ ID NO: 363953 - DNA, 25 bp, Artificial
  probe
  misc_feature (1)..(25): SEQ ID NO: 3805; WAN0249TN; Start 201; Stop 225
tacagaagtttcttcactactatgg

SEQ ID NO: 363954 - DNA, 25 bp, Artificial
  probe
  misc_feature (1)..(25): SEQ ID NO: 3805; WAN0249TN; Start 195; Stop 219
ttccattacagaagtttcttcacta

SEQ ID NO: 363955 - DNA, 25 bp, Artificial
  probe
  misc_feature (1)..(25): SEQ ID NO: 3805; WAN0249TN; Start 108; Stop 132
ctataatttcaccttaccctatctt

SEQ ID NO: 363956 - DNA, 25 bp, Artificial
  probe
  misc_feature (1)..(25): SEQ ID NO: 3805; WAN0249TN; Start 73; Stop 97
cctcaatcaatttgttcatatctta

SEQ ID NO: 363957 - DNA, 25 bp, Artificial
  probe
  misc_feature (1)..(25): SEQ ID NO: 3805; WAN0249TN; Start 163; Stop 187
ctaccgtttgacgattcctcacttc

SEQ ID NO: 363958 - DNA, 25 bp, Artificial
  probe
  misc_feature (1)..(25): SEQ ID NO: 3805; WAN0249TN; Start 109; Stop 133
tataatttcaccttaccctatcttt

SEQ ID NO: 363959 - DNA, 25 bp, Artificial
  probe
  misc_feature (1)..(25): SEQ ID NO: 3805; WAN0249TN; Start 34; Stop 58
ccatgactgctaaaagatttctata

SEQ ID NO: 363960 - DNA, 25 bp, Artificial
  probe
  misc_feature (1)..(25): SEQ ID NO: 3805; WAN0249TN; Start 200; Stop 224
ttacagaagtttcttcactactatg

SEQ ID NO: 363961 - DNA, 25 bp, Artificial
  probe
  misc_feature (1)..(25): SEQ ID NO: 3805; WAN0249TN; Start 198; Stop 222
cattacagaagtttcttcactacta

SEQ ID NO: 363962 - DNA, 25 bp, Artificial
  probe
  misc_feature (1)..(25): SEQ ID NO: 3805; WAN0249TN; Start 110; Stop 134
ataatttcaccttaccctatctttt

SEQ ID NO: 363963 - DNA, 25 bp, Artificial
  probe
  misc_feature (1)..(25): SEQ ID NO: 3805; WAN0249TN; Start 162; Stop 186
cctaccgtttgacgattcctcactt

SEQ ID NO: 363964 - DNA, 25 bp, Artificial
  probe
  misc_feature (1)..(25): SEQ ID NO: 3805; WAN0249TN; Start 199; Stop 223
attacagaagtttcttcactactat

SEQ ID NO: 363965 - DNA, 25 bp, Artificial
  probe
  misc_feature (1)..(25): SEQ ID NO: 3805; WAN0249TN; Start 164; Stop 188
taccgtttgacgattcctcacttcg

SEQ ID NO: 363966 - DNA, 25 bp, Artificial
  probe
  misc_feature (1)..(25): SEQ ID NO: 3805; WAN0249TN; Start 35; Stop 59
catgactgctaaaagatttctataa

SEQ ID NO: 363967 - DNA, 25 bp, Artificial
  probe
  misc_feature (1)..(25): SEQ ID NO: 3805; WAN0249TN; Start 156; Stop 180
ctatcccctaccgtttgacgattcc

SEQ ID NO: 363968 - DNA, 25 bp, Artificial
  probe
  misc_feature (1)..(25): SEQ ID NO: 3805; WAN0249TN; Start 155; Stop 179
cctatcccctaccgtttgacgattc

SEQ ID NO: 363969 - DNA, 25 bp, Artificial
  probe
  misc_feature (1)..(25): SEQ ID NO: 3805; WAN0249TN; Start 157; Stop 181
tatcccctaccgtttgacgattcct

SEQ ID NO: 363970 - DNA, 25 bp, Artificial
  probe
  misc_feature (1)..(25): SEQ ID NO: 3806; WAN0249FU; Start 81; Stop 105
atgtcaatggctataatttctcgga

SEQ ID NO: 363971 - DNA, 25 bp, Artificial
  probe
  misc_feature (1)..(25): SEQ ID NO: 3806; WAN0249FU; Start 80; Stop 104
aatgtcaatggctataatttctcgg

SEQ ID NO: 363972 - DNA, 25 bp, Artificial
  probe
  misc_feature (1)..(25): SEQ ID NO: 3806; WAN0249FU; Start 82; Stop 106
tgtcaatggctataatttctcggaa

SEQ ID NO: 363973 - DNA, 25 bp, Artificial
  probe
  misc_feature (1)..(25): SEQ ID NO: 3806; WAN0249FU; Start 74; Stop 98
ctaggtaatgtcaatggctataatt

SEQ ID NO: 363974 - DNA, 25 bp, Artificial
  probe
  misc_feature (1)..(25): SEQ ID NO: 3806; WAN0249FU; Start 79; Stop 103
taatgtcaatggctataatttctcg

SEQ ID NO: 363975 - DNA, 25 bp, Artificial
  probe
  misc_feature (1)..(25): SEQ ID NO: 3806; WAN0249FU; Start 77; Stop 101
ggtaatgtcaatggctataatttct

SEQ ID NO: 363976 - DNA, 25 bp, Artificial
  probe
  misc_feature (1)..(25): SEQ ID NO: 3806; WAN0249FU; Start 76; Stop 100
aggtaatgtcaatggctataatttc

SEQ ID NO: 363977 - DNA, 25 bp, Artificial
  probe
  misc_feature (1)..(25): SEQ ID NO: 3806; WAN0249FU; Start 83; Stop 107
gtcaatggctataatttctcggaaa

SEQ ID NO: 363978 - DNA, 25 bp, Artificial
  probe
  misc_feature (1)..(25): SEQ ID NO: 3806; WAN0249FU; Start 62; Stop 86
ataacgcaattcctaggtaatgtca

SEQ ID NO: 363979 - DNA, 25 bp, Artificial
  probe
  misc_feature (1)..(25): SEQ ID NO: 3806; WAN0249FU; Start 63; Stop 87
taacgcaattcctaggtaatgtcaa

SEQ ID NO: 363980 - DNA, 25 bp, Artificial
  probe
  misc_feature (1)..(25): SEQ ID NO: 3806; WAN0249FU; Start 69; Stop 93
aattcctaggtaatgtcaatggcta

SEQ ID NO: 363981 - DNA, 25 bp, Artificial
  probe
  misc_feature (1)..(25): SEQ ID NO: 3806; WAN0249FU; Start 70; Stop 94
attcctaggtaatgtcaatggctat

SEQ ID NO: 363982 - DNA, 25 bp, Artificial
  probe
  misc_feature (1)..(25): SEQ ID NO: 3806; WAN0249FU; Start 68; Stop 92
caattcctaggtaatgtcaatggct

SEQ ID NO: 363983 - DNA, 25 bp, Artificial
  probe
  misc_feature (1)..(25): SEQ ID NO: 3806; WAN0249FU; Start 64; Stop 88
aacgcaattcctaggtaatgtcaat

SEQ ID NO: 363984 - DNA, 25 bp, Artificial
  probe
  misc_feature (1)..(25): SEQ ID NO: 3806; WAN0249FU; Start 72; Stop 96
tcctaggtaatgtcaatggctataa

SEQ ID NO: 363985 - DNA, 25 bp, Artificial
  probe
  misc_feature (1)..(25): SEQ ID NO: 3806; WAN0249FU; Start 71; Stop 95
ttcctaggtaatgtcaatggctata

SEQ ID NO: 363986 - DNA, 25 bp, Artificial
  probe
  misc_feature (1)..(25): SEQ ID NO: 3806; WAN0249FU; Start 65; Stop 89
acgcaattcctaggtaatgtcaatg

SEQ ID NO: 363987 - DNA, 25 bp, Artificial
  probe
  misc_feature (1)..(25): SEQ ID NO: 3806; WAN0249FU; Start 61; Stop 85
tataacgcaattcctaggtaatgtc

SEQ ID NO: 363988 - DNA, 25 bp, Artificial
  probe
  misc_feature (1)..(25): SEQ ID NO: 3806; WAN0249FU; Start 78; Stop 102
gtaatgtcaatggctataatttctc

SEQ ID NO: 363989 - DNA, 25 bp, Artificial
  probe
  misc_feature (1)..(25): SEQ ID NO: 3806; WAN0249FU; Start 60; Stop 84
ttataacgcaattcctaggtaatgt

SEQ ID NO: 363990 - DNA, 25 bp, Artificial
  probe
  misc_feature (1)..(25): SEQ ID NO: 3806; WAN0249FU; Start 66; Stop 90
cgcaattcctaggtaatgtcaatgg

SEQ ID NO: 363991 - DNA, 25 bp, Artificial
  probe
  misc_feature (1)..(25): SEQ ID NO: 3806; WAN0249FU; Start 73; Stop 97
cctaggtaatgtcaatggctataat

SEQ ID NO: 363992 - DNA, 25 bp, Artificial
  probe
  misc_feature (1)..(25): SEQ ID NO: 3806; WAN0249FU; Start 67; Stop 91
gcaattcctaggtaatgtcaatggc

SEQ ID NO: 363993 - DNA, 25 bp, Artificial
  probe
  misc_feature (1)..(25): SEQ ID NO: 3806; WAN0249FU; Start 75; Stop 99
taggtaatgtcaatggctataattt

SEQ ID NO: 363994 - DNA, 25 bp, Artificial
  probe
  misc_feature (1)..(25): SEQ ID NO: 3806; WAN0249FU; Start 84; Stop 108
tcaatggctataatttctcggaaaa

SEQ ID NO: 363995 - DNA, 25 bp, Artificial
  probe
  misc_feature (1)..(25): SEQ ID NO: 3806; WAN0249FU; Start 85; Stop 109
caatggctataatttctcggaaaat

SEQ ID NO: 363996 - DNA, 25 bp, Artificial
  probe
  misc_feature (1)..(25): SEQ ID NO: 3806; WAN0249FU; Start 17; Stop 41
aaattttgacttggcaccattttgg

SEQ ID NO: 363997 - DNA, 25 bp, Artificial
  probe
  misc_feature (1)..(25): SEQ ID NO: 3806; WAN0249FU; Start 18; Stop 42
aattttgacttggcaccattttggg

SEQ ID NO: 363998 - DNA, 25 bp, Artificial
  probe
  misc_feature (1)..(25): SEQ ID NO: 3806; WAN0249FU; Start 20; Stop 44
ttttgacttggcaccattttgggta

SEQ ID NO: 363999 - DNA, 25 bp, Artificial
  probe
  misc_feature (1)..(25): SEQ ID NO: 3806; WAN0249FU; Start 88; Stop 112
tggctataatttctcggaaaataat

SEQ ID NO: 364000 - DNA, 25 bp, Artificial
  probe
  misc_feature (1)..(25): SEQ ID NO: 3806; WAN0249FU; Start 87; Stop 111
atggctataatttctcggaaaataa

SEQ ID NO: 364001 - DNA, 25 bp, Artificial
  probe
  misc_feature (1)..(25): SEQ ID NO: 3806; WAN0249FU; Start 86; Stop 110
aatggctataatttctcggaaaata

SEQ ID NO: 364002 - DNA, 25 bp, Artificial
  probe
  misc_feature (1)..(25): SEQ ID NO: 3806; WAN0249FU; Start 19; Stop 43
attttgacttggcaccattttgggt

SEQ ID NO: 364003 - DNA, 25 bp, Artificial
  probe
  misc_feature (1)..(25): SEQ ID NO: 3807; WAN0249U2; Start 543; Stop 567
ccgaaaggtgctctgtataagtata

SEQ ID NO: 364004 - DNA, 25 bp, Artificial
  probe
  misc_feature (1)..(25): SEQ ID NO: 3807; WAN0249U2; Start 154; Stop 178
aaatctcacccactaaacttctgtt

SEQ ID NO: 364005 - DNA, 25 bp, Artificial
  probe
  misc_feature (1)..(25): SEQ ID NO: 3807; WAN0249U2; Start 155; Stop 179
aatctcacccactaaacttctgtta

SEQ ID NO: 364006 - DNA, 25 bp, Artificial
  probe
  misc_feature (1)..(25): SEQ ID NO: 3807; WAN0249U2; Start 157; Stop 181
tctcacccactaaacttctgttaat

SEQ ID NO: 364007 - DNA, 25 bp, Artificial
  probe
  misc_feature (1)..(25): SEQ ID NO: 3807; WAN0249U2; Start 156; Stop 180
atctcacccactaaacttctgttaa

SEQ ID NO: 364008 - DNA, 25 bp, Artificial
  probe
  misc_feature (1)..(25): SEQ ID NO: 3807; WAN0249U2; Start 544; Stop 568
cgaaaggtgctctgtataagtatag

SEQ ID NO: 364009 - DNA, 25 bp, Artificial
  probe
  misc_feature (1)..(25): SEQ ID NO: 3807; WAN0249U2; Start 542; Stop 566
cccgaaaggtgctctgtataagtat

SEQ ID NO: 364010 - DNA, 25 bp, Artificial
  probe
  misc_feature (1)..(25): SEQ ID NO: 3807; WAN0249U2; Start 160; Stop 184
cacccactaaacttctgttaatact

SEQ ID NO: 364011 - DNA, 25 bp, Artificial
  probe
  misc_feature (1)..(25): SEQ ID NO: 3807; WAN0249U2; Start 159; Stop 183
tcacccactaaacttctgttaatac

SEQ ID NO: 364012 - DNA, 25 bp, Artificial
  probe
  misc_feature (1)..(25): SEQ ID NO: 3807; WAN0249U2; Start 547; Stop 571
aaggtgctctgtataagtatagtaa

SEQ ID NO: 364013 - DNA, 25 bp, Artificial
  probe
  misc_feature (1)..(25): SEQ ID NO: 3807; WAN0249U2; Start 158; Stop 182
ctcacccactaaacttctgttaata

SEQ ID NO: 364014 - DNA, 25 bp, Artificial
  probe
  misc_feature (1)..(25): SEQ ID NO: 3807; WAN0249U2; Start 72; Stop 96
tttcggaaagatgttataggagttt

SEQ ID NO: 364015 - DNA, 25 bp, Artificial
  probe
  misc_feature (1)..(25): SEQ ID NO: 3807; WAN0249U2; Start 545; Stop 569
gaaaggtgctctgtataagtatagt

SEQ ID NO: 364016 - DNA, 25 bp, Artificial
  probe
  misc_feature (1)..(25): SEQ ID NO: 3807; WAN0249U2; Start 548; Stop 572
aggtgctctgtataagtatagtaat

SEQ ID NO: 364017 - DNA, 25 bp, Artificial
  probe
  misc_feature (1)..(25): SEQ ID NO: 3807; WAN0249U2; Start 481; Stop 505
taaagtcgcaacaactgtgtcaatt

SEQ ID NO: 364018 - DNA, 25 bp, Artificial
  probe
  misc_feature (1)..(25): SEQ ID NO: 3807; WAN0249U2; Start 296; Stop 320
actatcctcgatttgtcctattctt

SEQ ID NO: 364019 - DNA, 25 bp, Artificial
  probe
  misc_feature (1)..(25): SEQ ID NO: 3807; WAN0249U2; Start 461; Stop 485
cagccacatttgtaagcgactaaag

SEQ ID NO: 364020 - DNA, 25 bp, Artificial
  probe
  misc_feature (1)..(25): SEQ ID NO: 3807; WAN0249U2; Start 480; Stop 504
ctaaagtcgcaacaactgtgtcaat

SEQ ID NO: 364021 - DNA, 25 bp, Artificial
  probe
  misc_feature (1)..(25): SEQ ID NO: 3807; WAN0249U2; Start 462; Stop 486
agccacatttgtaagcgactaaagt

SEQ ID NO: 364022 - DNA, 25 bp, Artificial
  probe
  misc_feature (1)..(25): SEQ ID NO: 3807; WAN0249U2; Start 185; Stop 209
acataactgaagagctatataagga

SEQ ID NO: 364023 - DNA, 25 bp, Artificial
  probe
  misc_feature (1)..(25): SEQ ID NO: 3807; WAN0249U2; Start 294; Stop 318
tgactatcctcgatttgtcctattc

SEQ ID NO: 364024 - DNA, 25 bp, Artificial
  probe
  misc_feature (1)..(25): SEQ ID NO: 3807; WAN0249U2; Start 161; Stop 185
acccactaaacttctgttaatacta

SEQ ID NO: 364025 - DNA, 25 bp, Artificial
  probe
  misc_feature (1)..(25): SEQ ID NO: 3807; WAN0249U2; Start 290; Stop 314
gatttgactatcctcgatttgtcct

SEQ ID NO: 364026 - DNA, 25 bp, Artificial
  probe
  misc_feature (1)..(25): SEQ ID NO: 3807; WAN0249U2; Start 295; Stop 319
gactatcctcgatttgtcctattct

SEQ ID NO: 364027 - DNA, 25 bp, Artificial
  probe
  misc_feature (1)..(25): SEQ ID NO: 3807; WAN0249U2; Start 293; Stop 317
ttgactatcctcgatttgtcctatt

SEQ ID NO: 364028 - DNA, 25 bp, Artificial
  probe
  misc_feature (1)..(25): SEQ ID NO: 3807; WAN0249U2; Start 292; Stop 316
tttgactatcctcgatttgtcctat

SEQ ID NO: 364029 - DNA, 25 bp, Artificial
  probe
  misc_feature (1)..(25): SEQ ID NO: 3807; WAN0249U2; Start 291; Stop 315
atttgactatcctcgatttgtccta

SEQ ID NO: 364030 - DNA, 25 bp, Artificial
  probe
  misc_feature (1)..(25): SEQ ID NO: 3807; WAN0249U2; Start 175; Stop 199
tgttaatactacataactgaagagc

SEQ ID NO: 364031 - DNA, 25 bp, Artificial
  probe
  misc_feature (1)..(25): SEQ ID NO: 3807; WAN0249U2; Start 162; Stop 186
cccactaaacttctgttaatactac

SEQ ID NO: 364032 - DNA, 25 bp, Artificial
  probe
  misc_feature (1)..(25): SEQ ID NO: 3807; WAN0249U2; Start 153; Stop 177
aaaatctcacccactaaacttctgt

SEQ ID NO: 364033 - DNA, 25 bp, Artificial
  probe
  misc_feature (1)..(25): SEQ ID NO: 3807; WAN0249U2; Start 549; Stop 573
ggtgctctgtataagtatagtaatt

SEQ ID NO: 364034 - DNA, 25 bp, Artificial
  probe
  misc_feature (1)..(25): SEQ ID NO: 3807; WAN0249U2; Start 113; Stop 137
gacttagacctacaaacaaaacaga

SEQ ID NO: 364035 - DNA, 25 bp, Artificial
  probe
  misc_feature (1)..(25): SEQ ID NO: 3807; WAN0249U2; Start 112; Stop 136
agacttagacctacaaacaaaacag

SEQ ID NO: 364036 - DNA, 25 bp, Artificial
  probe
  misc_feature (1)..(25): SEQ ID NO: 3808; WAN0249Z3; Start 45; Stop 69
gctatcaaaagagataaactacagt

SEQ ID NO: 364037 - DNA, 25 bp, Artificial
  probe
  misc_feature (1)..(25): SEQ ID NO: 3808; WAN0249Z3; Start 39; Stop 63
accgtagctatcaaaagagataaac

SEQ ID NO: 364038 - DNA, 25 bp, Artificial
  probe
  misc_feature (1)..(25): SEQ ID NO: 3808; WAN0249Z3; Start 40; Stop 64
ccgtagctatcaaaagagataaact

SEQ ID NO: 364039 - DNA, 25 bp, Artificial
  probe
  misc_feature (1)..(25): SEQ ID NO: 3808; WAN0249Z3; Start 38; Stop 62
aaccgtagctatcaaaagagataaa

SEQ ID NO: 364040 - DNA, 25 bp, Artificial
  probe
  misc_feature (1)..(25): SEQ ID NO: 3808; WAN0249Z3; Start 37; Stop 61
aaaccgtagctatcaaaagagataa

SEQ ID NO: 364041 - DNA, 25 bp, Artificial
  probe
  misc_feature (1)..(25): SEQ ID NO: 3808; WAN0249Z3; Start 36; Stop 60
aaaaccgtagctatcaaaagagata

SEQ ID NO: 364042 - DNA, 25 bp, Artificial
  probe
  misc_feature (1)..(25): SEQ ID NO: 3808; WAN0249Z3; Start 48; Stop 72
atcaaaagagataaactacagttct

SEQ ID NO: 364043 - DNA, 25 bp, Artificial
  probe
  misc_feature (1)..(25): SEQ ID NO: 3808; WAN0249Z3; Start 44; Stop 68
agctatcaaaagagataaactacag

SEQ ID NO: 364044 - DNA, 25 bp, Artificial
  probe
  misc_feature (1)..(25): SEQ ID NO: 3808; WAN0249Z3; Start 49; Stop 73
tcaaaagagataaactacagttcta

SEQ ID NO: 364045 - DNA, 25 bp, Artificial
  probe
  misc_feature (1)..(25): SEQ ID NO: 3808; WAN0249Z3; Start 41; Stop 65
cgtagctatcaaaagagataaacta

SEQ ID NO: 364046 - DNA, 25 bp, Artificial
  probe
  misc_feature (1)..(25): SEQ ID NO: 3808; WAN0249Z3; Start 43; Stop 67
tagctatcaaaagagataaactaca

SEQ ID NO: 364047 - DNA, 25 bp, Artificial
  probe
  misc_feature (1)..(25): SEQ ID NO: 3808; WAN0249Z3; Start 42; Stop 66
gtagctatcaaaagagataaactac

SEQ ID NO: 364048 - DNA, 25 bp, Artificial
  probe
  misc_feature (1)..(25): SEQ ID NO: 3809; WAN024CLA; Start 178; Stop 202
ataagcaaggcacagataatcagat

SEQ ID NO: 364049 - DNA, 25 bp, Artificial
  probe
  misc_feature (1)..(25): SEQ ID NO: 3809; WAN024CLA; Start 172; Stop 196
acagtaataagcaaggcacagataa

SEQ ID NO: 364050 - DNA, 25 bp, Artificial
  probe
  misc_feature (1)..(25): SEQ ID NO: 3809; WAN024CLA; Start 171; Stop 195
aacagtaataagcaaggcacagata

SEQ ID NO: 364051 - DNA, 25 bp, Artificial
  probe
  misc_feature (1)..(25): SEQ ID NO: 3809; WAN024CLA; Start 177; Stop 201
aataagcaaggcacagataatcaga

SEQ ID NO: 364052 - DNA, 25 bp, Artificial
  probe
  misc_feature (1)..(25): SEQ ID NO: 3809; WAN024CLA; Start 25; Stop 49
ctgtagatggtaagttcacggatat

SEQ ID NO: 364053 - DNA, 25 bp, Artificial
  probe
  misc_feature (1)..(25): SEQ ID NO: 3809; WAN024CLA; Start 24; Stop 48
tctgtagatggtaagttcacggata

SEQ ID NO: 364054 - DNA, 25 bp, Artificial
  probe
  misc_feature (1)..(25): SEQ ID NO: 3809; WAN024CLA; Start 26; Stop 50
tgtagatggtaagttcacggatatt

SEQ ID NO: 364055 - DNA, 25 bp, Artificial
  probe
  misc_feature (1)..(25): SEQ ID NO: 3809; WAN024CLA; Start 173; Stop 197
cagtaataagcaaggcacagataat

SEQ ID NO: 364056 - DNA, 25 bp, Artificial
  probe
  misc_feature (1)..(25): SEQ ID NO: 3809; WAN024CLA; Start 175; Stop 199
gtaataagcaaggcacagataatca

SEQ ID NO: 364057 - DNA, 25 bp, Artificial
  probe
  misc_feature (1)..(25): SEQ ID NO: 3809; WAN024CLA; Start 176; Stop 200
taataagcaaggcacagataatcag

SEQ ID NO: 364058 - DNA, 25 bp, Artificial
  probe
  misc_feature (1)..(25): SEQ ID NO: 3809; WAN024CLA; Start 174; Stop 198
agtaataagcaaggcacagataatc

SEQ ID NO: 364059 - DNA, 25 bp, Artificial
  probe
  misc_feature (1)..(25): SEQ ID NO: 3809; WAN024CLA; Start 179; Stop 203
taagcaaggcacagataatcagatt

SEQ ID NO: 364060 - DNA, 25 bp, Artificial
  probe
  misc_feature (1)..(25): SEQ ID NO: 3809; WAN024CLA; Start 13; Stop 37
gctatcgtcaatctgtagatggtaa

SEQ ID NO: 364061 - DNA, 25 bp, Artificial
  probe
  misc_feature (1)..(25): SEQ ID NO: 3809; WAN024CLA; Start 17; Stop 41
tcgtcaatctgtagatggtaagttc

SEQ ID NO: 364062 - DNA, 25 bp, Artificial
  probe
  misc_feature (1)..(25): SEQ ID NO: 3809; WAN024CLA; Start 20; Stop 44
tcaatctgtagatggtaagttcacg

SEQ ID NO: 364063 - DNA, 25 bp, Artificial
  probe
  misc_feature (1)..(25): SEQ ID NO: 3809; WAN024CLA; Start 18; Stop 42
cgtcaatctgtagatggtaagttca

SEQ ID NO: 364064 - DNA, 25 bp, Artificial
  probe
  misc_feature (1)..(25): SEQ ID NO: 3809; WAN024CLA; Start 16; Stop 40
atcgtcaatctgtagatggtaagtt

SEQ ID NO: 364065 - DNA, 25 bp, Artificial
  probe
  misc_feature (1)..(25): SEQ ID NO: 3809; WAN024CLA; Start 824; Stop 848
tagatgcgaagatgtctcagtaact

SEQ ID NO: 364066 - DNA, 25 bp, Artificial
  probe
  misc_feature (1)..(25): SEQ ID NO: 3809; WAN024CLA; Start 19; Stop 43
gtcaatctgtagatggtaagttcac

SEQ ID NO: 364067 - DNA, 25 bp, Artificial
  probe
  misc_feature (1)..(25): SEQ ID NO: 3809; WAN024CLA; Start 1364; Stop 1388
ctctattaaggttgagtccgtcatt

SEQ ID NO: 364068 - DNA, 25 bp, Artificial
  probe
  misc_feature (1)..(25): SEQ ID NO: 3809; WAN024CLA; Start 1359; Stop 1383
atcttctctattaaggttgagtccg

SEQ ID NO: 364069 - DNA, 25 bp, Artificial
  probe
  misc_feature (1)..(25): SEQ ID NO: 3809; WAN024CLA; Start 23; Stop 47
atctgtagatggtaagttcacggat

SEQ ID NO: 364070 - DNA, 25 bp, Artificial
  probe
  misc_feature (1)..(25): SEQ ID NO: 3809; WAN024CLA; Start 1361; Stop 1385
cttctctattaaggttgagtccgtc

SEQ ID NO: 364071 - DNA, 25 bp, Artificial
  probe
  misc_feature (1)..(25): SEQ ID NO: 3809; WAN024CLA; Start 823; Stop 847
ctagatgcgaagatgtctcagtaac

SEQ ID NO: 364072 - DNA, 25 bp, Artificial
  probe
  misc_feature (1)..(25): SEQ ID NO: 3809; WAN024CLA; Start 15; Stop 39
tatcgtcaatctgtagatggtaagt

SEQ ID NO: 364073 - DNA, 25 bp, Artificial
  probe
  misc_feature (1)..(25): SEQ ID NO: 3809; WAN024CLA; Start 1360; Stop 1384
tcttctctattaaggttgagtccgt

SEQ ID NO: 364074 - DNA, 25 bp, Artificial
  probe
  misc_feature (1)..(25): SEQ ID NO: 3809; WAN024CLA; Start 1363; Stop 1387
tctctattaaggttgagtccgtcat

SEQ ID NO: 364075 - DNA, 25 bp, Artificial
  probe
  misc_feature (1)..(25): SEQ ID NO: 3809; WAN024CLA; Start 108; Stop 132
aatagacttacaagcagtgagcaag

SEQ ID NO: 364076 - DNA, 25 bp, Artificial
  probe
  misc_feature (1)..(25): SEQ ID NO: 3809; WAN024CLA; Start 22; Stop 46
aatctgtagatggtaagttcacgga

SEQ ID NO: 364077 - DNA, 25 bp, Artificial
  probe
  misc_feature (1)..(25): SEQ ID NO: 3809; WAN024CLA; Start 21; Stop 45
caatctgtagatggtaagttcacgg

SEQ ID NO: 364078 - DNA, 25 bp, Artificial
  probe
  misc_feature (1)..(25): SEQ ID NO: 3809; WAN024CLA; Start 1362; Stop 1386
ttctctattaaggttgagtccgtca

SEQ ID NO: 364079 - DNA, 25 bp, Artificial
  probe
  misc_feature (1)..(25): SEQ ID NO: 3809; WAN024CLA; Start 1242; Stop 1266
acgactacgatattagacgctgaag

SEQ ID NO: 364080 - DNA, 25 bp, Artificial
  probe
  misc_feature (1)..(25): SEQ ID NO: 3809; WAN024CLA; Start 14; Stop 38
ctatcgtcaatctgtagatggtaag

SEQ ID NO: 364081 - DNA, 25 bp, Artificial
  probe
  misc_feature (1)..(25): SEQ ID NO: 3810; WAN024A7K; Start 113; Stop 137
aacactcaccttgtattaacttgtg

SEQ ID NO: 364082 - DNA, 25 bp, Artificial
  probe
  misc_feature (1)..(25): SEQ ID NO: 3810; WAN024A7K; Start 112; Stop 136
taacactcaccttgtattaacttgt

SEQ ID NO: 364083 - DNA, 25 bp, Artificial
  probe
  misc_feature (1)..(25): SEQ ID NO: 3810; WAN024A7K; Start 111; Stop 135
gtaacactcaccttgtattaacttg

SEQ ID NO: 364084 - DNA, 25 bp, Artificial
  probe
  misc_feature (1)..(25): SEQ ID NO: 3810; WAN024A7K; Start 110; Stop 134
agtaacactcaccttgtattaactt

SEQ ID NO: 364085 - DNA, 25 bp, Artificial
  probe
  misc_feature (1)..(25): SEQ ID NO: 3810; WAN024A7K; Start 109; Stop 133
tagtaacactcaccttgtattaact

SEQ ID NO: 364086 - DNA, 25 bp, Artificial
  probe
  misc_feature (1)..(25): SEQ ID NO: 3810; WAN024A7K; Start 106; Stop 130
acttagtaacactcaccttgtatta

SEQ ID NO: 364087 - DNA, 25 bp, Artificial
  probe
  misc_feature (1)..(25): SEQ ID NO: 3810; WAN024A7K; Start 105; Stop 129
tacttagtaacactcaccttgtatt

SEQ ID NO: 364088 - DNA, 25 bp, Artificial
  probe
  misc_feature (1)..(25): SEQ ID NO: 3810; WAN024A7K; Start 69; Stop 93
gctgatttctaattcacctgtgatc

SEQ ID NO: 364089 - DNA, 25 bp, Artificial
  probe
  misc_feature (1)..(25): SEQ ID NO: 3810; WAN024A7K; Start 108; Stop 132
ttagtaacactcaccttgtattaac

SEQ ID NO: 364090 - DNA, 25 bp, Artificial
  probe
  misc_feature (1)..(25): SEQ ID NO: 3810; WAN024A7K; Start 68; Stop 92
agctgatttctaattcacctgtgat

SEQ ID NO: 364091 - DNA, 25 bp, Artificial
  probe
  misc_feature (1)..(25): SEQ ID NO: 3810; WAN024A7K; Start 83; Stop 107
cacctgtgatcatgcctaatattac

SEQ ID NO: 364092 - DNA, 25 bp, Artificial
  probe
  misc_feature (1)..(25): SEQ ID NO: 3810; WAN024A7K; Start 84; Stop 108
acctgtgatcatgcctaatattact

SEQ ID NO: 364093 - DNA, 25 bp, Artificial
  probe
  misc_feature (1)..(25): SEQ ID NO: 3810; WAN024A7K; Start 107; Stop 131
cttagtaacactcaccttgtattaa

SEQ ID NO: 364094 - DNA, 25 bp, Artificial
  probe
  misc_feature (1)..(25): SEQ ID NO: 3810; WAN024A7K; Start 81; Stop 105
ttcacctgtgatcatgcctaatatt

SEQ ID NO: 364095 - DNA, 25 bp, Artificial
  probe
  misc_feature (1)..(25): SEQ ID NO: 3810; WAN024A7K; Start 80; Stop 104
attcacctgtgatcatgcctaatat

SEQ ID NO: 364096 - DNA, 25 bp, Artificial
  probe
  misc_feature (1)..(25): SEQ ID NO: 3810; WAN024A7K; Start 79; Stop 103
aattcacctgtgatcatgcctaata

SEQ ID NO: 364097 - DNA, 25 bp, Artificial
  probe
  misc_feature (1)..(25): SEQ ID NO: 3810; WAN024A7K; Start 78; Stop 102
taattcacctgtgatcatgcctaat

SEQ ID NO: 364098 - DNA, 25 bp, Artificial
  probe
  misc_feature (1)..(25): SEQ ID NO: 3810; WAN024A7K; Start 104; Stop 128
ttacttagtaacactcaccttgtat

SEQ ID NO: 364099 - DNA, 25 bp, Artificial
  probe
  misc_feature (1)..(25): SEQ ID NO: 3810; WAN024A7K; Start 103; Stop 127
attacttagtaacactcaccttgta

SEQ ID NO: 364100 - DNA, 25 bp, Artificial
  probe
  misc_feature (1)..(25): SEQ ID NO: 3810; WAN024A7K; Start 102; Stop 126
tattacttagtaacactcaccttgt

SEQ ID NO: 364101 - DNA, 25 bp, Artificial
  probe
  misc_feature (1)..(25): SEQ ID NO: 3810; WAN024A7K; Start 77; Stop 101
ctaattcacctgtgatcatgcctaa

SEQ ID NO: 364102 - DNA, 25 bp, Artificial
  probe
  misc_feature (1)..(25): SEQ ID NO: 3810; WAN024A7K; Start 85; Stop 109
cctgtgatcatgcctaatattactt

SEQ ID NO: 364103 - DNA, 25 bp, Artificial
  probe
  misc_feature (1)..(25): SEQ ID NO: 3810; WAN024A7K; Start 82; Stop 106
tcacctgtgatcatgcctaatatta

SEQ ID NO: 364104 - DNA, 25 bp, Artificial
  probe
  misc_feature (1)..(25): SEQ ID NO: 3810; WAN024A7K; Start 76; Stop 100
tctaattcacctgtgatcatgccta

SEQ ID NO: 364105 - DNA, 25 bp, Artificial
  probe
  misc_feature (1)..(25): SEQ ID NO: 3810; WAN024A7K; Start 75; Stop 99
ttctaattcacctgtgatcatgcct

SEQ ID NO: 364106 - DNA, 25 bp, Artificial
  probe
  misc_feature (1)..(25): SEQ ID NO: 3810; WAN024A7K; Start 114; Stop 138
acactcaccttgtattaacttgtga

SEQ ID NO: 364107 - DNA, 25 bp, Artificial
  probe
  misc_feature (1)..(25): SEQ ID NO: 3810; WAN024A7K; Start 46; Stop 70
accacaaatgaactagaaaatcagc

SEQ ID NO: 364108 - DNA, 25 bp, Artificial
  probe
  misc_feature (1)..(25): SEQ ID NO: 3810; WAN024A7K; Start 115; Stop 139
cactcaccttgtattaacttgtgat

SEQ ID NO: 364109 - DNA, 25 bp, Artificial
  probe
  misc_feature (1)..(25): SEQ ID NO: 3810; WAN024A7K; Start 44; Stop 68
tgaccacaaatgaactagaaaatca

SEQ ID NO: 364110 - DNA, 25 bp, Artificial
  probe
  misc_feature (1)..(25): SEQ ID NO: 3810; WAN024A7K; Start 116; Stop 140
actcaccttgtattaacttgtgatt

SEQ ID NO: 364111 - DNA, 25 bp, Artificial
  probe
  misc_feature (1)..(25): SEQ ID NO: 3810; WAN024A7K; Start 101; Stop 125
atattacttagtaacactcaccttg

SEQ ID NO: 364112 - DNA, 25 bp, Artificial
  probe
  misc_feature (1)..(25): SEQ ID NO: 3810; WAN024A7K; Start 45; Stop 69
gaccacaaatgaactagaaaatcag

SEQ ID NO: 364113 - DNA, 25 bp, Artificial
  probe
  misc_feature (1)..(25): SEQ ID NO: 3810; WAN024A7K; Start 73; Stop 97
atttctaattcacctgtgatcatgc

SEQ ID NO: 364114 - DNA, 25 bp, Artificial
  probe
  misc_feature (1)..(25): SEQ ID NO: 3811; WAN0249T7; Start 66; Stop 90
ttacgcatatagcttcacttgtaga

SEQ ID NO: 364115 - DNA, 25 bp, Artificial
  probe
  misc_feature (1)..(25): SEQ ID NO: 3811; WAN0249T7; Start 67; Stop 91
tacgcatatagcttcacttgtagat

SEQ ID NO: 364116 - DNA, 25 bp, Artificial
  probe
  misc_feature (1)..(25): SEQ ID NO: 3811; WAN0249T7; Start 70; Stop 94
gcatatagcttcacttgtagatggt

SEQ ID NO: 364117 - DNA, 25 bp, Artificial
  probe
  misc_feature (1)..(25): SEQ ID NO: 3811; WAN0249T7; Start 68; Stop 92
acgcatatagcttcacttgtagatg

SEQ ID NO: 364118 - DNA, 25 bp, Artificial
  probe
  misc_feature (1)..(25): SEQ ID NO: 3811; WAN0249T7; Start 69; Stop 93
cgcatatagcttcacttgtagatgg

SEQ ID NO: 364119 - DNA, 25 bp, Artificial
  probe
  misc_feature (1)..(25): SEQ ID NO: 3811; WAN0249T7; Start 247; Stop 271
cgaagagtattaaagagcatcacaa

SEQ ID NO: 364120 - DNA, 25 bp, Artificial
  probe
  misc_feature (1)..(25): SEQ ID NO: 3811; WAN0249T7; Start 115; Stop 139
ggaaatcaaagagcaaactaggaaa

SEQ ID NO: 364121 - DNA, 25 bp, Artificial
  probe
  misc_feature (1)..(25): SEQ ID NO: 3811; WAN0249T7; Start 116; Stop 140
gaaatcaaagagcaaactaggaaac

SEQ ID NO: 364122 - DNA, 25 bp, Artificial
  probe
  misc_feature (1)..(25): SEQ ID NO: 3811; WAN0249T7; Start 72; Stop 96
atatagcttcacttgtagatggtac

SEQ ID NO: 364123 - DNA, 25 bp, Artificial
  probe
  misc_feature (1)..(25): SEQ ID NO: 3811; WAN0249T7; Start 105; Stop 129
aatactcaatggaaatcaaagagca

SEQ ID NO: 364124 - DNA, 25 bp, Artificial
  probe
  misc_feature (1)..(25): SEQ ID NO: 3811; WAN0249T7; Start 71; Stop 95
catatagcttcacttgtagatggta

SEQ ID NO: 364125 - DNA, 25 bp, Artificial
  probe
  misc_feature (1)..(25): SEQ ID NO: 3811; WAN0249T7; Start 246; Stop 270
tcgaagagtattaaagagcatcaca

SEQ ID NO: 364126 - DNA, 25 bp, Artificial
  probe
  misc_feature (1)..(25): SEQ ID NO: 3811; WAN0249T7; Start 64; Stop 88
gtttacgcatatagcttcacttgta

SEQ ID NO: 364127 - DNA, 25 bp, Artificial
  probe
  misc_feature (1)..(25): SEQ ID NO: 3811; WAN0249T7; Start 65; Stop 89
tttacgcatatagcttcacttgtag

SEQ ID NO: 364128 - DNA, 25 bp, Artificial
  probe
  misc_feature (1)..(25): SEQ ID NO: 3811; WAN0249T7; Start 338; Stop 362
actgatatctctccactacaattga

SEQ ID NO: 364129 - DNA, 25 bp, Artificial
  probe
  misc_feature (1)..(25): SEQ ID NO: 3811; WAN0249T7; Start 63; Stop 87
agtttacgcatatagcttcacttgt

SEQ ID NO: 364130 - DNA, 25 bp, Artificial
  probe
  misc_feature (1)..(25): SEQ ID NO: 3811; WAN0249T7; Start 248; Stop 272
gaagagtattaaagagcatcacaat

SEQ ID NO: 364131 - DNA, 25 bp, Artificial
  probe
  misc_feature (1)..(25): SEQ ID NO: 3811; WAN0249T7; Start 62; Stop 86
tagtttacgcatatagcttcacttg

SEQ ID NO: 364132 - DNA, 25 bp, Artificial
  probe
  misc_feature (1)..(25): SEQ ID NO: 3811; WAN0249T7; Start 61; Stop 85
gtagtttacgcatatagcttcactt

SEQ ID NO: 364133 - DNA, 25 bp, Artificial
  probe
  misc_feature (1)..(25): SEQ ID NO: 3811; WAN0249T7; Start 95; Stop 119
acccacaaataatactcaatggaaa

SEQ ID NO: 364134 - DNA, 25 bp, Artificial
  probe
  misc_feature (1)..(25): SEQ ID NO: 3811; WAN0249T7; Start 337; Stop 361
aactgatatctctccactacaattg

SEQ ID NO: 364135 - DNA, 25 bp, Artificial
  probe
  misc_feature (1)..(25): SEQ ID NO: 3811; WAN0249T7; Start 104; Stop 128
taatactcaatggaaatcaaagagc

SEQ ID NO: 364136 - DNA, 25 bp, Artificial
  probe
  misc_feature (1)..(25): SEQ ID NO: 3811; WAN0249T7; Start 93; Stop 117
gtacccacaaataatactcaatgga

SEQ ID NO: 364137 - DNA, 25 bp, Artificial
  probe
  misc_feature (1)..(25): SEQ ID NO: 3811; WAN0249T7; Start 34; Stop 58
ctctctagttcgaattcaattgctc

SEQ ID NO: 364138 - DNA, 25 bp, Artificial
  probe
  misc_feature (1)..(25): SEQ ID NO: 3811; WAN0249T7; Start 36; Stop 60
ctctagttcgaattcaattgctcac

SEQ ID NO: 364139 - DNA, 25 bp, Artificial
  probe
  misc_feature (1)..(25): SEQ ID NO: 3811; WAN0249T7; Start 35; Stop 59
tctctagttcgaattcaattgctca

SEQ ID NO: 364140 - DNA, 25 bp, Artificial
  probe
  misc_feature (1)..(25): SEQ ID NO: 3811; WAN0249T7; Start 339; Stop 363
ctgatatctctccactacaattgat

SEQ ID NO: 364141 - DNA, 25 bp, Artificial
  probe
  misc_feature (1)..(25): SEQ ID NO: 3811; WAN0249T7; Start 94; Stop 118
tacccacaaataatactcaatggaa

SEQ ID NO: 364142 - DNA, 25 bp, Artificial
  probe
  misc_feature (1)..(25): SEQ ID NO: 3811; WAN0249T7; Start 39; Stop 63
tagttcgaattcaattgctcacgta

SEQ ID NO: 364143 - DNA, 25 bp, Artificial
  probe
  misc_feature (1)..(25): SEQ ID NO: 3811; WAN0249T7; Start 33; Stop 57
cctctctagttcgaattcaattgct

SEQ ID NO: 364144 - DNA, 25 bp, Artificial
  probe
  misc_feature (1)..(25): SEQ ID NO: 3811; WAN0249T7; Start 32; Stop 56
acctctctagttcgaattcaattgc

SEQ ID NO: 364145 - DNA, 25 bp, Artificial
  probe
  misc_feature (1)..(25): SEQ ID NO: 3811; WAN0249T7; Start 96; Stop 120
cccacaaataatactcaatggaaat

SEQ ID NO: 364146 - DNA, 25 bp, Artificial
  probe
  misc_feature (1)..(25): SEQ ID NO: 3811; WAN0249T7; Start 42; Stop 66
ttcgaattcaattgctcacgtagtt

SEQ ID NO: 364147 - DNA, 25 bp, Artificial
  probe
  misc_feature (1)..(25): SEQ ID NO: 3812; WAN024AAV; Start 17; Stop 41
aggctctctgtatcatctcatcata

SEQ ID NO: 364148 - DNA, 25 bp, Artificial
  probe
  misc_feature (1)..(25): SEQ ID NO: 3812; WAN024AAV; Start 18; Stop 42
ggctctctgtatcatctcatcatat

SEQ ID NO: 364149 - DNA, 25 bp, Artificial
  probe
  misc_feature (1)..(25): SEQ ID NO: 3812; WAN024AAV; Start 13; Stop 37
attcaggctctctgtatcatctcat

SEQ ID NO: 364150 - DNA, 25 bp, Artificial
  probe
  misc_feature (1)..(25): SEQ ID NO: 3812; WAN024AAV; Start 11; Stop 35
caattcaggctctctgtatcatctc

SEQ ID NO: 364151 - DNA, 25 bp, Artificial
  probe
  misc_feature (1)..(25): SEQ ID NO: 3812; WAN024AAV; Start 19; Stop 43
gctctctgtatcatctcatcatatt

SEQ ID NO: 364152 - DNA, 25 bp, Artificial
  probe
  misc_feature (1)..(25): SEQ ID NO: 3812; WAN024AAV; Start 12; Stop 36
aattcaggctctctgtatcatctca

SEQ ID NO: 364153 - DNA, 25 bp, Artificial
  probe
  misc_feature (1)..(25): SEQ ID NO: 3812; WAN024AAV; Start 14; Stop 38
ttcaggctctctgtatcatctcatc

SEQ ID NO: 364154 - DNA, 25 bp, Artificial
  probe
  misc_feature (1)..(25): SEQ ID NO: 3812; WAN024AAV; Start 16; Stop 40
caggctctctgtatcatctcatcat

SEQ ID NO: 364155 - DNA, 25 bp, Artificial
  probe
  misc_feature (1)..(25): SEQ ID NO: 3812; WAN024AAV; Start 143; Stop 167
cttcaactcgtacaagcagtgatac

SEQ ID NO: 364156 - DNA, 25 bp, Artificial
  probe
  misc_feature (1)..(25): SEQ ID NO: 3812; WAN024AAV; Start 10; Stop 34
ccaattcaggctctctgtatcatct

SEQ ID NO: 364157 - DNA, 25 bp, Artificial
  probe
  misc_feature (1)..(25): SEQ ID NO: 3812; WAN024AAV; Start 9; Stop 33
accaattcaggctctctgtatcatc

SEQ ID NO: 364158 - DNA, 25 bp, Artificial
  probe
  misc_feature (1)..(25): SEQ ID NO: 3812; WAN024AAV; Start 8; Stop 32
gaccaattcaggctctctgtatcat

SEQ ID NO: 364159 - DNA, 25 bp, Artificial
  probe
  misc_feature (1)..(25): SEQ ID NO: 3812; WAN024AAV; Start 15; Stop 39
tcaggctctctgtatcatctcatca

SEQ ID NO: 364160 - DNA, 25 bp, Artificial
  probe
  misc_feature (1)..(25): SEQ ID NO: 3812; WAN024AAV; Start 144; Stop 168
ttcaactcgtacaagcagtgatacc

SEQ ID NO: 364161 - DNA, 25 bp, Artificial
  probe
  misc_feature (1)..(25): SEQ ID NO: 3812; WAN024AAV; Start 7; Stop 31
tgaccaattcaggctctctgtatca

SEQ ID NO: 364162 - DNA, 25 bp, Artificial
  probe
  misc_feature (1)..(25): SEQ ID NO: 3812; WAN024AAV; Start 65; Stop 89
tatacccagaacacaccttatcgac

SEQ ID NO: 364163 - DNA, 25 bp, Artificial
  probe
  misc_feature (1)..(25): SEQ ID NO: 3812; WAN024AAV; Start 23; Stop 47
tctgtatcatctcatcatatttcct

SEQ ID NO: 364164 - DNA, 25 bp, Artificial
  probe
  misc_feature (1)..(25): SEQ ID NO: 3812; WAN024AAV; Start 22; Stop 46
ctctgtatcatctcatcatatttcc

SEQ ID NO: 364165 - DNA, 25 bp, Artificial
  probe
  misc_feature (1)..(25): SEQ ID NO: 3812; WAN024AAV; Start 109; Stop 133
cattggctgaacatctacttttact

SEQ ID NO: 364166 - DNA, 25 bp, Artificial
  probe
  misc_feature (1)..(25): SEQ ID NO: 3812; WAN024AAV; Start 108; Stop 132
gcattggctgaacatctacttttac

SEQ ID NO: 364167 - DNA, 25 bp, Artificial
  probe
  misc_feature (1)..(25): SEQ ID NO: 3812; WAN024AAV; Start 110; Stop 134
attggctgaacatctacttttactt

SEQ ID NO: 364168 - DNA, 25 bp, Artificial
  probe
  misc_feature (1)..(25): SEQ ID NO: 3812; WAN024AAV; Start 105; Stop 129
gtcgcattggctgaacatctacttt

SEQ ID NO: 364169 - DNA, 25 bp, Artificial
  probe
  misc_feature (1)..(25): SEQ ID NO: 3812; WAN024AAV; Start 107; Stop 131
cgcattggctgaacatctactttta

SEQ ID NO: 364170 - DNA, 25 bp, Artificial
  probe
  misc_feature (1)..(25): SEQ ID NO: 3812; WAN024AAV; Start 37; Stop 61
tcatatttcctacttactttacgag

SEQ ID NO: 364171 - DNA, 25 bp, Artificial
  probe
  misc_feature (1)..(25): SEQ ID NO: 3812; WAN024AAV; Start 145; Stop 169
tcaactcgtacaagcagtgataccg

SEQ ID NO: 364172 - DNA, 25 bp, Artificial
  probe
  misc_feature (1)..(25): SEQ ID NO: 3812; WAN024AAV; Start 38; Stop 62
catatttcctacttactttacgagt

SEQ ID NO: 364173 - DNA, 25 bp, Artificial
  probe
  misc_feature (1)..(25): SEQ ID NO: 3812; WAN024AAV; Start 21; Stop 45
tctctgtatcatctcatcatatttc

SEQ ID NO: 364174 - DNA, 25 bp, Artificial
  probe
  misc_feature (1)..(25): SEQ ID NO: 3812; WAN024AAV; Start 20; Stop 44
ctctctgtatcatctcatcatattt

SEQ ID NO: 364175 - DNA, 25 bp, Artificial
  probe
  misc_feature (1)..(25): SEQ ID NO: 3812; WAN024AAV; Start 25; Stop 49
tgtatcatctcatcatatttcctac

SEQ ID NO: 364176 - DNA, 25 bp, Artificial
  probe
  misc_feature (1)..(25): SEQ ID NO: 3812; WAN024AAV; Start 6; Stop 30
ctgaccaattcaggctctctgtatc

SEQ ID NO: 364177 - DNA, 25 bp, Artificial
  probe
  misc_feature (1)..(25): SEQ ID NO: 3812; WAN024AAV; Start 39; Stop 63
atatttcctacttactttacgagtc

SEQ ID NO: 364178 - DNA, 25 bp, Artificial
  probe
  misc_feature (1)..(25): SEQ ID NO: 3812; WAN024AAV; Start 30; Stop 54
catctcatcatatttcctacttact

SEQ ID NO: 364179 - DNA, 25 bp, Artificial
  probe
  misc_feature (1)..(25): SEQ ID NO: 3812; WAN024AAV; Start 29; Stop 53
tcatctcatcatatttcctacttac

SEQ ID NO: 364180 - DNA, 25 bp, Artificial
  probe
  misc_feature (1)..(25): SEQ ID NO: 3813; WAN024A49; Start 41; Stop 65
tttagagacatttgacgaccataaa

SEQ ID NO: 364181 - DNA, 25 bp, Artificial
  probe
  misc_feature (1)..(25): SEQ ID NO: 3813; WAN024A49; Start 40; Stop 64
ttttagagacatttgacgaccataa

SEQ ID NO: 364182 - DNA, 25 bp, Artificial
  probe
  misc_feature (1)..(25): SEQ ID NO: 3813; WAN024A49; Start 42; Stop 66
ttagagacatttgacgaccataaaa

SEQ ID NO: 364183 - DNA, 25 bp, Artificial
  probe
  misc_feature (1)..(25): SEQ ID NO: 3813; WAN024A49; Start 1; Stop 25
gtcactcttccttttacaaaattca

SEQ ID NO: 364184 - DNA, 25 bp, Artificial
  probe
  misc_feature (1)..(25): SEQ ID NO: 3813; WAN024A49; Start 6; Stop 30
tcttccttttacaaaattcattcca

SEQ ID NO: 364185 - DNA, 25 bp, Artificial
  probe
  misc_feature (1)..(25): SEQ ID NO: 3813; WAN024A49; Start 2; Stop 26
tcactcttccttttacaaaattcat

SEQ ID NO: 364186 - DNA, 25 bp, Artificial
  probe
  misc_feature (1)..(25): SEQ ID NO: 3813; WAN024A49; Start 5; Stop 29
ctcttccttttacaaaattcattcc

SEQ ID NO: 364187 - DNA, 25 bp, Artificial
  probe
  misc_feature (1)..(25): SEQ ID NO: 3813; WAN024A49; Start 7; Stop 31
cttccttttacaaaattcattccat

SEQ ID NO: 364188 - DNA, 25 bp, Artificial
  probe
  misc_feature (1)..(25): SEQ ID NO: 3813; WAN024A49; Start 3; Stop 27
cactcttccttttacaaaattcatt

SEQ ID NO: 364189 - DNA, 25 bp, Artificial
  probe
  misc_feature (1)..(25): SEQ ID NO: 3813; WAN024A49; Start 4; Stop 28
actcttccttttacaaaattcattc

SEQ ID NO: 364190 - DNA, 25 bp, Artificial
  probe
  misc_feature (1)..(25): SEQ ID NO: 3813; WAN024A49; Start 8; Stop 32
ttccttttacaaaattcattccatt

SEQ ID NO: 364191 - DNA, 25 bp, Artificial
  probe
  misc_feature (1)..(25): SEQ ID NO: 3813; WAN024A49; Start 16; Stop 40
acaaaattcattccattataccatt

SEQ ID NO: 364192 - DNA, 25 bp, Artificial
  probe
  misc_feature (1)..(25): SEQ ID NO: 3813; WAN024A49; Start 9; Stop 33
tccttttacaaaattcattccatta

SEQ ID NO: 364193 - DNA, 25 bp, Artificial
  probe
  misc_feature (1)..(25): SEQ ID NO: 3814; WAN024FS4; Start 55; Stop 79
gcctatattaatggttggacaatct

SEQ ID NO: 364194 - DNA, 25 bp, Artificial
  probe
  misc_feature (1)..(25): SEQ ID NO: 3814; WAN024FS4; Start 59; Stop 83
atattaatggttggacaatctggaa

SEQ ID NO: 364195 - DNA, 25 bp, Artificial
  probe
  misc_feature (1)..(25): SEQ ID NO: 3814; WAN024FS4; Start 62; Stop 86
ttaatggttggacaatctggaaaga

SEQ ID NO: 364196 - DNA, 25 bp, Artificial
  probe
  misc_feature (1)..(25): SEQ ID NO: 3814; WAN024FS4; Start 58; Stop 82
tatattaatggttggacaatctgga

SEQ ID NO: 364197 - DNA, 25 bp, Artificial
  probe
  misc_feature (1)..(25): SEQ ID NO: 3814; WAN024FS4; Start 57; Stop 81
ctatattaatggttggacaatctgg

SEQ ID NO: 364198 - DNA, 25 bp, Artificial
  probe
  misc_feature (1)..(25): SEQ ID NO: 3814; WAN024FS4; Start 56; Stop 80
cctatattaatggttggacaatctg

SEQ ID NO: 364199 - DNA, 25 bp, Artificial
  probe
  misc_feature (1)..(25): SEQ ID NO: 3814; WAN024FS4; Start 61; Stop 85
attaatggttggacaatctggaaag

SEQ ID NO: 364200 - DNA, 25 bp, Artificial
  probe
  misc_feature (1)..(25): SEQ ID NO: 3814; WAN024FS4; Start 54; Stop 78
ggcctatattaatggttggacaatc

SEQ ID NO: 364201 - DNA, 25 bp, Artificial
  probe
  misc_feature (1)..(25): SEQ ID NO: 3814; WAN024FS4; Start 60; Stop 84
tattaatggttggacaatctggaaa

SEQ ID NO: 364202 - DNA, 25 bp, Artificial
  probe
  misc_feature (1)..(25): SEQ ID NO: 3814; WAN024FS4; Start 20; Stop 44
tcaagaatttcgatgaagttgtcaa

SEQ ID NO: 364203 - DNA, 25 bp, Artificial
  probe
  misc_feature (1)..(25): SEQ ID NO: 3814; WAN024FS4; Start 19; Stop 43
atcaagaatttcgatgaagttgtca

SEQ ID NO: 364204 - DNA, 25 bp, Artificial
  probe
  misc_feature (1)..(25): SEQ ID NO: 3814; WAN024FS4; Start 67; Stop 91
ggttggacaatctggaaagatattg

SEQ ID NO: 364205 - DNA, 25 bp, Artificial
  probe
  misc_feature (1)..(25): SEQ ID NO: 3814; WAN024FS4; Start 66; Stop 90
tggttggacaatctggaaagatatt

SEQ ID NO: 364206 - DNA, 25 bp, Artificial
  probe
  misc_feature (1)..(25): SEQ ID NO: 3814; WAN024FS4; Start 65; Stop 89
atggttggacaatctggaaagatat

SEQ ID NO: 364207 - DNA, 25 bp, Artificial
  probe
  misc_feature (1)..(25): SEQ ID NO: 3814; WAN024FS4; Start 64; Stop 88
aatggttggacaatctggaaagata

SEQ ID NO: 364208 - DNA, 25 bp, Artificial
  probe
  misc_feature (1)..(25): SEQ ID NO: 3814; WAN024FS4; Start 63; Stop 87
taatggttggacaatctggaaagat

SEQ ID NO: 364209 - DNA, 25 bp, Artificial
  probe
  misc_feature (1)..(25): SEQ ID NO: 3814; WAN024FS4; Start 17; Stop 41
agatcaagaatttcgatgaagttgt

SEQ ID NO: 364210 - DNA, 25 bp, Artificial
  probe
  misc_feature (1)..(25): SEQ ID NO: 3814; WAN024FS4; Start 106; Stop 130
acggttaaagttgtatttatgagag

SEQ ID NO: 364211 - DNA, 25 bp, Artificial
  probe
  misc_feature (1)..(25): SEQ ID NO: 3814; WAN024FS4; Start 21; Stop 45
caagaatttcgatgaagttgtcaaa

SEQ ID NO: 364212 - DNA, 25 bp, Artificial
  probe
  misc_feature (1)..(25): SEQ ID NO: 3814; WAN024FS4; Start 18; Stop 42
gatcaagaatttcgatgaagttgtc

SEQ ID NO: 364213 - DNA, 25 bp, Artificial
  probe
  misc_feature (1)..(25): SEQ ID NO: 3814; WAN024FS4; Start 68; Stop 92
gttggacaatctggaaagatattga

SEQ ID NO: 364214 - DNA, 25 bp, Artificial
  probe
  misc_feature (1)..(25): SEQ ID NO: 3814; WAN024FS4; Start 16; Stop 40
gagatcaagaatttcgatgaagttg

SEQ ID NO: 364215 - DNA, 25 bp, Artificial
  probe
  misc_feature (1)..(25): SEQ ID NO: 3814; WAN024FS4; Start 107; Stop 131
cggttaaagttgtatttatgagaga

SEQ ID NO: 364216 - DNA, 25 bp, Artificial
  probe
  misc_feature (1)..(25): SEQ ID NO: 3814; WAN024FS4; Start 105; Stop 129
aacggttaaagttgtatttatgaga

SEQ ID NO: 364217 - DNA, 25 bp, Artificial
  probe
  misc_feature (1)..(25): SEQ ID NO: 3814; WAN024FS4; Start 28; Stop 52
ttcgatgaagttgtcaaattagatg

SEQ ID NO: 364218 - DNA, 25 bp, Artificial
  probe
  misc_feature (1)..(25): SEQ ID NO: 3814; WAN024FS4; Start 22; Stop 46
aagaatttcgatgaagttgtcaaat

SEQ ID NO: 364219 - DNA, 25 bp, Artificial
  probe
  misc_feature (1)..(25): SEQ ID NO: 3814; WAN024FS4; Start 15; Stop 39
cgagatcaagaatttcgatgaagtt

SEQ ID NO: 364220 - DNA, 25 bp, Artificial
  probe
  misc_feature (1)..(25): SEQ ID NO: 3814; WAN024FS4; Start 27; Stop 51
tttcgatgaagttgtcaaattagat

SEQ ID NO: 364221 - DNA, 25 bp, Artificial
  probe
  misc_feature (1)..(25): SEQ ID NO: 3814; WAN024FS4; Start 12; Stop 36
aagcgagatcaagaatttcgatgaa

SEQ ID NO: 364222 - DNA, 25 bp, Artificial
  probe
  misc_feature (1)..(25): SEQ ID NO: 3814; WAN024FS4; Start 104; Stop 128
aaacggttaaagttgtatttatgag

SEQ ID NO: 364223 - DNA, 25 bp, Artificial
  probe
  misc_feature (1)..(25): SEQ ID NO: 3814; WAN024FS4; Start 26; Stop 50
atttcgatgaagttgtcaaattaga

SEQ ID NO: 364224 - DNA, 25 bp, Artificial
  probe
  misc_feature (1)..(25): SEQ ID NO: 3814; WAN024FS4; Start 13; Stop 37
agcgagatcaagaatttcgatgaag

SEQ ID NO: 364225 - DNA, 25 bp, Artificial
  probe
  misc_feature (1)..(25): SEQ ID NO: 3814; WAN024FS4; Start 11; Stop 35
gaagcgagatcaagaatttcgatga

SEQ ID NO: 364226 - DNA, 25 bp, Artificial
  probe
  misc_feature (1)..(25): SEQ ID NO: 3815; WAN0249II; Start 35; Stop 59
agaagggaaatttggtaagatagga

SEQ ID NO: 364227 - DNA, 25 bp, Artificial
  probe
  misc_feature (1)..(25): SEQ ID NO: 3815; WAN0249II; Start 36; Stop 60
gaagggaaatttggtaagataggaa

SEQ ID NO: 364228 - DNA, 25 bp, Artificial
  probe
  misc_feature (1)..(25): SEQ ID NO: 3815; WAN0249II; Start 34; Stop 58
aagaagggaaatttggtaagatagg

SEQ ID NO: 364229 - DNA, 25 bp, Artificial
  probe
  misc_feature (1)..(25): SEQ ID NO: 3815; WAN0249II; Start 37; Stop 61
aagggaaatttggtaagataggaat

SEQ ID NO: 364230 - DNA, 25 bp, Artificial
  probe
  misc_feature (1)..(25): SEQ ID NO: 3815; WAN0249II; Start 33; Stop 57
aaagaagggaaatttggtaagatag

SEQ ID NO: 364231 - DNA, 25 bp, Artificial
  probe
  misc_feature (1)..(25): SEQ ID NO: 3815; WAN0249II; Start 32; Stop 56
aaaagaagggaaatttggtaagata

SEQ ID NO: 364232 - DNA, 25 bp, Artificial
  probe
  misc_feature (1)..(25): SEQ ID NO: 3816; WAN024AIV; Start 4; Stop 28
agtaagataaagagagacgaggcta

SEQ ID NO: 364233 - DNA, 25 bp, Artificial
  probe
  misc_feature (1)..(25): SEQ ID NO: 3816; WAN024AIV; Start 5; Stop 29
gtaagataaagagagacgaggctac

SEQ ID NO: 364234 - DNA, 25 bp, Artificial
  probe
  misc_feature (1)..(25): SEQ ID NO: 3816; WAN024AIV; Start 6; Stop 30
taagataaagagagacgaggctacc

SEQ ID NO: 364235 - DNA, 25 bp, Artificial
  probe
  misc_feature (1)..(25): SEQ ID NO: 3816; WAN024AIV; Start 3; Stop 27
cagtaagataaagagagacgaggct

SEQ ID NO: 364236 - DNA, 25 bp, Artificial
  probe
  misc_feature (1)..(25): SEQ ID NO: 3816; WAN024AIV; Start 2; Stop 26
tcagtaagataaagagagacgaggc

SEQ ID NO: 364237 - DNA, 25 bp, Artificial
  probe
  misc_feature (1)..(25): SEQ ID NO: 3816; WAN024AIV; Start 1; Stop 25
gtcagtaagataaagagagacgagg

SEQ ID NO: 364238 - DNA, 25 bp, Artificial
  probe
  misc_feature (1)..(25): SEQ ID NO: 3816; WAN024AIV; Start 7; Stop 31
aagataaagagagacgaggctaccg

SEQ ID NO: 364239 - DNA, 25 bp, Artificial
  probe
  misc_feature (1)..(25): SEQ ID NO: 3816; WAN024AIV; Start 9; Stop 33
gataaagagagacgaggctaccgag

SEQ ID NO: 364240 - DNA, 25 bp, Artificial
  probe
  misc_feature (1)..(25): SEQ ID NO: 3816; WAN024AIV; Start 89; Stop 113
acgctttcttttgttgatataatga

SEQ ID NO: 364241 - DNA, 25 bp, Artificial
  probe
  misc_feature (1)..(25): SEQ ID NO: 3816; WAN024AIV; Start 8; Stop 32
agataaagagagacgaggctaccga

SEQ ID NO: 364242 - DNA, 25 bp, Artificial
  probe
  misc_feature (1)..(25): SEQ ID NO: 3816; WAN024AIV; Start 77; Stop 101
aaataattgacaacgctttcttttg

SEQ ID NO: 364243 - DNA, 25 bp, Artificial
  probe
  misc_feature (1)..(25): SEQ ID NO: 3816; WAN024AIV; Start 88; Stop 112
aacgctttcttttgttgatataatg

SEQ ID NO: 364244 - DNA, 25 bp, Artificial
  probe
  misc_feature (1)..(25): SEQ ID NO: 3816; WAN024AIV; Start 90; Stop 114
cgctttcttttgttgatataatgaa

SEQ ID NO: 364245 - DNA, 25 bp, Artificial
  probe
  misc_feature (1)..(25): SEQ ID NO: 3816; WAN024AIV; Start 76; Stop 100
aaaataattgacaacgctttctttt

SEQ ID NO: 364246 - DNA, 25 bp, Artificial
  probe
  misc_feature (1)..(25): SEQ ID NO: 3816; WAN024AIV; Start 79; Stop 103
ataattgacaacgctttcttttgtt

SEQ ID NO: 364247 - DNA, 25 bp, Artificial
  probe
  misc_feature (1)..(25): SEQ ID NO: 3816; WAN024AIV; Start 78; Stop 102
aataattgacaacgctttcttttgt

SEQ ID NO: 364248 - DNA, 25 bp, Artificial
  probe
  misc_feature (1)..(25): SEQ ID NO: 3816; WAN024AIV; Start 84; Stop 108
tgacaacgctttcttttgttgatat

SEQ ID NO: 364249 - DNA, 25 bp, Artificial
  probe
  misc_feature (1)..(25): SEQ ID NO: 3816; WAN024AIV; Start 83; Stop 107
ttgacaacgctttcttttgttgata

SEQ ID NO: 364250 - DNA, 25 bp, Artificial
  probe
  misc_feature (1)..(25): SEQ ID NO: 3816; WAN024AIV; Start 80; Stop 104
taattgacaacgctttcttttgttg

SEQ ID NO: 364251 - DNA, 25 bp, Artificial
  probe
  misc_feature (1)..(25): SEQ ID NO: 3816; WAN024AIV; Start 82; Stop 106
attgacaacgctttcttttgttgat

SEQ ID NO: 364252 - DNA, 25 bp, Artificial
  probe
  misc_feature (1)..(25): SEQ ID NO: 3816; WAN024AIV; Start 81; Stop 105
aattgacaacgctttcttttgttga

SEQ ID NO: 364253 - DNA, 25 bp, Artificial
  probe
  misc_feature (1)..(25): SEQ ID NO: 3816; WAN024AIV; Start 85; Stop 109
gacaacgctttcttttgttgatata

SEQ ID NO: 364254 - DNA, 25 bp, Artificial
  probe
  misc_feature (1)..(25): SEQ ID NO: 3816; WAN024AIV; Start 86; Stop 110
acaacgctttcttttgttgatataa

SEQ ID NO: 364255 - DNA, 25 bp, Artificial
  probe
  misc_feature (1)..(25): SEQ ID NO: 3816; WAN024AIV; Start 87; Stop 111
caacgctttcttttgttgatataat

SEQ ID NO: 364256 - DNA, 25 bp, Artificial
  probe
  misc_feature (1)..(25): SEQ ID NO: 3817; WAN024EX2; Start 142; Stop 166
gacataggcgttcttggtattacta

SEQ ID NO: 364257 - DNA, 25 bp, Artificial
  probe
  misc_feature (1)..(25): SEQ ID NO: 3817; WAN024EX2; Start 143; Stop 167
acataggcgttcttggtattactaa

SEQ ID NO: 364258 - DNA, 25 bp, Artificial
  probe
  misc_feature (1)..(25): SEQ ID NO: 3817; WAN024EX2; Start 139; Stop 163
aatgacataggcgttcttggtatta

SEQ ID NO: 364259 - DNA, 25 bp, Artificial
  probe
  misc_feature (1)..(25): SEQ ID NO: 3817; WAN024EX2; Start 146; Stop 170
taggcgttcttggtattactaatgg

SEQ ID NO: 364260 - DNA, 25 bp, Artificial
  probe
  misc_feature (1)..(25): SEQ ID NO: 3817; WAN024EX2; Start 148; Stop 172
ggcgttcttggtattactaatggta

SEQ ID NO: 364261 - DNA, 25 bp, Artificial
  probe
  misc_feature (1)..(25): SEQ ID NO: 3817; WAN024EX2; Start 140; Stop 164
atgacataggcgttcttggtattac

SEQ ID NO: 364262 - DNA, 25 bp, Artificial
  probe
  misc_feature (1)..(25): SEQ ID NO: 3817; WAN024EX2; Start 141; Stop 165
tgacataggcgttcttggtattact

SEQ ID NO: 364263 - DNA, 25 bp, Artificial
  probe
  misc_feature (1)..(25): SEQ ID NO: 3817; WAN024EX2; Start 145; Stop 169
ataggcgttcttggtattactaatg

SEQ ID NO: 364264 - DNA, 25 bp, Artificial
  probe
  misc_feature (1)..(25): SEQ ID NO: 3817; WAN024EX2; Start 144; Stop 168
cataggcgttcttggtattactaat

SEQ ID NO: 364265 - DNA, 25 bp, Artificial
  probe
  misc_feature (1)..(25): SEQ ID NO: 3817; WAN024EX2; Start 147; Stop 171
aggcgttcttggtattactaatggt

SEQ ID NO: 364266 - DNA, 25 bp, Artificial
  probe
  misc_feature (1)..(25): SEQ ID NO: 3817; WAN024EX2; Start 138; Stop 162
caatgacataggcgttcttggtatt

SEQ ID NO: 364267 - DNA, 25 bp, Artificial
  probe
  misc_feature (1)..(25): SEQ ID NO: 3817; WAN024EX2; Start 28; Stop 52
catctgctcaatgacaggatagtag

SEQ ID NO: 364268 - DNA, 25 bp, Artificial
  probe
  misc_feature (1)..(25): SEQ ID NO: 3817; WAN024EX2; Start 162; Stop 186
tactaatggtaatcaggcgacgatg

SEQ ID NO: 364269 - DNA, 25 bp, Artificial
  probe
  misc_feature (1)..(25): SEQ ID NO: 3817; WAN024EX2; Start 43; Stop 67
aggatagtaggcattgctgatgatt

SEQ ID NO: 364270 - DNA, 25 bp, Artificial
  probe
  misc_feature (1)..(25): SEQ ID NO: 3817; WAN024EX2; Start 29; Stop 53
atctgctcaatgacaggatagtagg

SEQ ID NO: 364271 - DNA, 25 bp, Artificial
  probe
  misc_feature (1)..(25): SEQ ID NO: 3817; WAN024EX2; Start 137; Stop 161
tcaatgacataggcgttcttggtat

SEQ ID NO: 364272 - DNA, 25 bp, Artificial
  probe
  misc_feature (1)..(25): SEQ ID NO: 3817; WAN024EX2; Start 17; Stop 41
ctactcttgtccatctgctcaatga

SEQ ID NO: 364273 - DNA, 25 bp, Artificial
  probe
  misc_feature (1)..(25): SEQ ID NO: 3817; WAN024EX2; Start 136; Stop 160
ttcaatgacataggcgttcttggta

SEQ ID NO: 364274 - DNA, 25 bp, Artificial
  probe
  misc_feature (1)..(25): SEQ ID NO: 3817; WAN024EX2; Start 27; Stop 51
ccatctgctcaatgacaggatagta

SEQ ID NO: 364275 - DNA, 25 bp, Artificial
  probe
  misc_feature (1)..(25): SEQ ID NO: 3817; WAN024EX2; Start 149; Stop 173
gcgttcttggtattactaatggtaa

SEQ ID NO: 364276 - DNA, 25 bp, Artificial
  probe
  misc_feature (1)..(25): SEQ ID NO: 3817; WAN024EX2; Start 161; Stop 185
ttactaatggtaatcaggcgacgat

SEQ ID NO: 364277 - DNA, 25 bp, Artificial
  probe
  misc_feature (1)..(25): SEQ ID NO: 3817; WAN024EX2; Start 131; Stop 155
atctgttcaatgacataggcgttct

SEQ ID NO: 364278 - DNA, 25 bp, Artificial
  probe
  misc_feature (1)..(25): SEQ ID NO: 3817; WAN024EX2; Start 130; Stop 154
catctgttcaatgacataggcgttc

SEQ ID NO: 364279 - DNA, 25 bp, Artificial
  probe
  misc_feature (1)..(25): SEQ ID NO: 3817; WAN024EX2; Start 133; Stop 157
ctgttcaatgacataggcgttcttg

SEQ ID NO: 364280 - DNA, 25 bp, Artificial
  probe
  misc_feature (1)..(25): SEQ ID NO: 3817; WAN024EX2; Start 18; Stop 42
tactcttgtccatctgctcaatgac

SEQ ID NO: 364281 - DNA, 25 bp, Artificial
  probe
  misc_feature (1)..(25): SEQ ID NO: 3817; WAN024EX2; Start 132; Stop 156
tctgttcaatgacataggcgttctt

SEQ ID NO: 364282 - DNA, 25 bp, Artificial
  probe
  misc_feature (1)..(25): SEQ ID NO: 3817; WAN024EX2; Start 16; Stop 40
cctactcttgtccatctgctcaatg

SEQ ID NO: 364283 - DNA, 25 bp, Artificial
  probe
  misc_feature (1)..(25): SEQ ID NO: 3817; WAN024EX2; Start 109; Stop 133
atggttctccagataacgagtcatc

SEQ ID NO: 364284 - DNA, 25 bp, Artificial
  probe
  misc_feature (1)..(25): SEQ ID NO: 3817; WAN024EX2; Start 42; Stop 66
caggatagtaggcattgctgatgat

SEQ ID NO: 364285 - DNA, 25 bp, Artificial
  probe
  misc_feature (1)..(25): SEQ ID NO: 3817; WAN024EX2; Start 45; Stop 69
gatagtaggcattgctgatgatttc

SEQ ID NO: 364286 - DNA, 25 bp, Artificial
  probe
  misc_feature (1)..(25): SEQ ID NO: 3817; WAN024EX2; Start 119; Stop 143
agataacgagtcatctgttcaatga

SEQ ID NO: 364287 - DNA, 25 bp, Artificial
  probe
  misc_feature (1)..(25): SEQ ID NO: 3817; WAN024EX2; Start 46; Stop 70
atagtaggcattgctgatgatttcc

SEQ ID NO: 364288 - DNA, 25 bp, Artificial
  probe
  misc_feature (1)..(25): SEQ ID NO: 3817; WAN024EX2; Start 44; Stop 68
ggatagtaggcattgctgatgattt

SEQ ID NO: 364289 - DNA, 25 bp, Artificial
  probe
  misc_feature (1)..(25): SEQ ID NO: 3818; WAN0249WO; Start 43; Stop 67
aaagagcatttacgccattatatga

SEQ ID NO: 364290 - DNA, 25 bp, Artificial
  probe
  misc_feature (1)..(25): SEQ ID NO: 3818; WAN0249WO; Start 44; Stop 68
aagagcatttacgccattatatgat

SEQ ID NO: 364291 - DNA, 25 bp, Artificial
  probe
  misc_feature (1)..(25): SEQ ID NO: 3818; WAN0249WO; Start 45; Stop 69
agagcatttacgccattatatgata

SEQ ID NO: 364292 - DNA, 25 bp, Artificial
  probe
  misc_feature (1)..(25): SEQ ID NO: 3818; WAN0249WO; Start 46; Stop 70
gagcatttacgccattatatgatat

SEQ ID NO: 364293 - DNA, 25 bp, Artificial
  probe
  misc_feature (1)..(25): SEQ ID NO: 3818; WAN0249WO; Start 54; Stop 78
acgccattatatgatatctatctct

SEQ ID NO: 364294 - DNA, 25 bp, Artificial
  probe
  misc_feature (1)..(25): SEQ ID NO: 3818; WAN0249WO; Start 55; Stop 79
cgccattatatgatatctatctctg

SEQ ID NO: 364295 - DNA, 25 bp, Artificial
  probe
  misc_feature (1)..(25): SEQ ID NO: 3818; WAN0249WO; Start 42; Stop 66
aaaagagcatttacgccattatatg

SEQ ID NO: 364296 - DNA, 25 bp, Artificial
  probe
  misc_feature (1)..(25): SEQ ID NO: 3818; WAN0249WO; Start 48; Stop 72
gcatttacgccattatatgatatct

SEQ ID NO: 364297 - DNA, 25 bp, Artificial
  probe
  misc_feature (1)..(25): SEQ ID NO: 3818; WAN0249WO; Start 47; Stop 71
agcatttacgccattatatgatatc

SEQ ID NO: 364298 - DNA, 25 bp, Artificial
  probe
  misc_feature (1)..(25): SEQ ID NO: 3818; WAN0249WO; Start 1; Stop 25
gtcatttcctccaaaatagaatacc

SEQ ID NO: 364299 - DNA, 25 bp, Artificial
  probe
  misc_feature (1)..(25): SEQ ID NO: 3818; WAN0249WO; Start 2; Stop 26
tcatttcctccaaaatagaatacct

SEQ ID NO: 364300 - DNA, 25 bp, Artificial
  probe
  misc_feature (1)..(25): SEQ ID NO: 3818; WAN0249WO; Start 56; Stop 80
gccattatatgatatctatctctgt

SEQ ID NO: 364301 - DNA, 25 bp, Artificial
  probe
  misc_feature (1)..(25): SEQ ID NO: 3818; WAN0249WO; Start 53; Stop 77
tacgccattatatgatatctatctc

SEQ ID NO: 364302 - DNA, 25 bp, Artificial
  probe
  misc_feature (1)..(25): SEQ ID NO: 3818; WAN0249WO; Start 3; Stop 27
catttcctccaaaatagaatacctt

SEQ ID NO: 364303 - DNA, 25 bp, Artificial
  probe
  misc_feature (1)..(25): SEQ ID NO: 3818; WAN0249WO; Start 5; Stop 29
tttcctccaaaatagaataccttat

SEQ ID NO: 364304 - DNA, 25 bp, Artificial
  probe
  misc_feature (1)..(25): SEQ ID NO: 3818; WAN0249WO; Start 4; Stop 28
atttcctccaaaatagaatacctta

SEQ ID NO: 364305 - DNA, 25 bp, Artificial
  probe
  misc_feature (1)..(25): SEQ ID NO: 3819; WAN024C5J; Start 1881; Stop 1905
gctaagtggttggatattgaattgg

SEQ ID NO: 364306 - DNA, 25 bp, Artificial
  probe
  misc_feature (1)..(25): SEQ ID NO: 3819; WAN024C5J; Start 1880; Stop 1904
tgctaagtggttggatattgaattg

SEQ ID NO: 364307 - DNA, 25 bp, Artificial
  probe
  misc_feature (1)..(25): SEQ ID NO: 3819; WAN024C5J; Start 1885; Stop 1909
agtggttggatattgaattggaatt

SEQ ID NO: 364308 - DNA, 25 bp, Artificial
  probe
  misc_feature (1)..(25): SEQ ID NO: 3819; WAN024C5J; Start 1884; Stop 1908
aagtggttggatattgaattggaat

SEQ ID NO: 364309 - DNA, 25 bp, Artificial
  probe
  misc_feature (1)..(25): SEQ ID NO: 3819; WAN024C5J; Start 1879; Stop 1903
ttgctaagtggttggatattgaatt

SEQ ID NO: 364310 - DNA, 25 bp, Artificial
  probe
  misc_feature (1)..(25): SEQ ID NO: 3819; WAN024C5J; Start 1882; Stop 1906
ctaagtggttggatattgaattgga

SEQ ID NO: 364311 - DNA, 25 bp, Artificial
  probe
  misc_feature (1)..(25): SEQ ID NO: 3819; WAN024C5J; Start 1513; Stop 1537
ctattcaacagcctgagcattattc

SEQ ID NO: 364312 - DNA, 25 bp, Artificial
  probe
  misc_feature (1)..(25): SEQ ID NO: 3819; WAN024C5J; Start 1514; Stop 1538
tattcaacagcctgagcattattca

SEQ ID NO: 364313 - DNA, 25 bp, Artificial
  probe
  misc_feature (1)..(25): SEQ ID NO: 3819; WAN024C5J; Start 1512; Stop 1536
actattcaacagcctgagcattatt

SEQ ID NO: 364314 - DNA, 25 bp, Artificial
  probe
  misc_feature (1)..(25): SEQ ID NO: 3819; WAN024C5J; Start 1883; Stop 1907
taagtggttggatattgaattggaa

SEQ ID NO: 364315 - DNA, 25 bp, Artificial
  probe
  misc_feature (1)..(25): SEQ ID NO: 3819; WAN024C5J; Start 1511; Stop 1535
gactattcaacagcctgagcattat

SEQ ID NO: 364316 - DNA, 25 bp, Artificial
  probe
  misc_feature (1)..(25): SEQ ID NO: 3819; WAN024C5J; Start 1505; Stop 1529
atatgtgactattcaacagcctgag

SEQ ID NO: 364317 - DNA, 25 bp, Artificial
  probe
  misc_feature (1)..(25): SEQ ID NO: 3819; WAN024C5J; Start 1504; Stop 1528
tatatgtgactattcaacagcctga

SEQ ID NO: 364318 - DNA, 25 bp, Artificial
  probe
  misc_feature (1)..(25): SEQ ID NO: 3819; WAN024C5J; Start 1601; Stop 1625
tctgaatcttcaatctcctgctaag

SEQ ID NO: 364319 - DNA, 25 bp, Artificial
  probe
  misc_feature (1)..(25): SEQ ID NO: 3819; WAN024C5J; Start 1600; Stop 1624
ctctgaatcttcaatctcctgctaa

SEQ ID NO: 364320 - DNA, 25 bp, Artificial
  probe
  misc_feature (1)..(25): SEQ ID NO: 3819; WAN024C5J; Start 1599; Stop 1623
tctctgaatcttcaatctcctgcta

SEQ ID NO: 364321 - DNA, 25 bp, Artificial
  probe
  misc_feature (1)..(25): SEQ ID NO: 3819; WAN024C5J; Start 1596; Stop 1620
gagtctctgaatcttcaatctcctg

SEQ ID NO: 364322 - DNA, 25 bp, Artificial
  probe
  misc_feature (1)..(25): SEQ ID NO: 3819; WAN024C5J; Start 745; Stop 769
attatgaaccaggatcaaccatgaa

SEQ ID NO: 364323 - DNA, 25 bp, Artificial
  probe
  misc_feature (1)..(25): SEQ ID NO: 3819; WAN024C5J; Start 744; Stop 768
aattatgaaccaggatcaaccatga

SEQ ID NO: 364324 - DNA, 25 bp, Artificial
  probe
  misc_feature (1)..(25): SEQ ID NO: 3819; WAN024C5J; Start 1503; Stop 1527
ttatatgtgactattcaacagcctg

SEQ ID NO: 364325 - DNA, 25 bp, Artificial
  probe
  misc_feature (1)..(25): SEQ ID NO: 3819; WAN024C5J; Start 1595; Stop 1619
agagtctctgaatcttcaatctcct

SEQ ID NO: 364326 - DNA, 25 bp, Artificial
  probe
  misc_feature (1)..(25): SEQ ID NO: 3819; WAN024C5J; Start 746; Stop 770
ttatgaaccaggatcaaccatgaag

SEQ ID NO: 364327 - DNA, 25 bp, Artificial
  probe
  misc_feature (1)..(25): SEQ ID NO: 3819; WAN024C5J; Start 741; Stop 765
agtaattatgaaccaggatcaacca

SEQ ID NO: 364328 - DNA, 25 bp, Artificial
  probe
  misc_feature (1)..(25): SEQ ID NO: 3819; WAN024C5J; Start 1921; Stop 1945
gttctatcgttcagcaacaagatgt

SEQ ID NO: 364329 - DNA, 25 bp, Artificial
  probe
  misc_feature (1)..(25): SEQ ID NO: 3819; WAN024C5J; Start 1920; Stop 1944
ggttctatcgttcagcaacaagatg

SEQ ID NO: 364330 - DNA, 25 bp, Artificial
  probe
  misc_feature (1)..(25): SEQ ID NO: 3819; WAN024C5J; Start 1919; Stop 1943
aggttctatcgttcagcaacaagat

SEQ ID NO: 364331 - DNA, 25 bp, Artificial
  probe
  misc_feature (1)..(25): SEQ ID NO: 3819; WAN024C5J; Start 1629; Stop 1653
ttagagcaagtaacggcagaatctt

SEQ ID NO: 364332 - DNA, 25 bp, Artificial
  probe
  misc_feature (1)..(25): SEQ ID NO: 3819; WAN024C5J; Start 1510; Stop 1534
tgactattcaacagcctgagcatta

SEQ ID NO: 364333 - DNA, 25 bp, Artificial
  probe
  misc_feature (1)..(25): SEQ ID NO: 3819; WAN024C5J; Start 1790; Stop 1814
tgtacctaaccagcaagttcttctt

SEQ ID NO: 364334 - DNA, 25 bp, Artificial
  probe
  misc_feature (1)..(25): SEQ ID NO: 3819; WAN024C5J; Start 1789; Stop 1813
ttgtacctaaccagcaagttcttct

SEQ ID NO: 364335 - DNA, 25 bp, Artificial
  probe
  misc_feature (1)..(25): SEQ ID NO: 3819; WAN024C5J; Start 743; Stop 767
taattatgaaccaggatcaaccatg

SEQ ID NO: 364336 - DNA, 25 bp, Artificial
  probe
  misc_feature (1)..(25): SEQ ID NO: 3819; WAN024C5J; Start 742; Stop 766
gtaattatgaaccaggatcaaccat

SEQ ID NO: 364337 - DNA, 25 bp, Artificial
  probe
  misc_feature (1)..(25): SEQ ID NO: 3819; WAN024C5J; Start 740; Stop 764
aagtaattatgaaccaggatcaacc

SEQ ID NO: 364338 - DNA, 25 bp, Artificial
  probe
  misc_feature (1)..(25): SEQ ID NO: 3820; WAN024ATN; Start 1633; Stop 1657
caagtgacgacagaatcttcttatg

SEQ ID NO: 364339 - DNA, 25 bp, Artificial
  probe
  misc_feature (1)..(25): SEQ ID NO: 3820; WAN024ATN; Start 1632; Stop 1656
tcaagtgacgacagaatcttcttat

SEQ ID NO: 364340 - DNA, 25 bp, Artificial
  probe
  misc_feature (1)..(25): SEQ ID NO: 3820; WAN024ATN; Start 1631; Stop 1655
atcaagtgacgacagaatcttctta

SEQ ID NO: 364341 - DNA, 25 bp, Artificial
  probe
  misc_feature (1)..(25): SEQ ID NO: 3820; WAN024ATN; Start 1630; Stop 1654
gatcaagtgacgacagaatcttctt

SEQ ID NO: 364342 - DNA, 25 bp, Artificial
  probe
  misc_feature (1)..(25): SEQ ID NO: 3820; WAN024ATN; Start 1634; Stop 1658
aagtgacgacagaatcttcttatgc

SEQ ID NO: 364343 - DNA, 25 bp, Artificial
  probe
  misc_feature (1)..(25): SEQ ID NO: 3820; WAN024ATN; Start 1638; Stop 1662
gacgacagaatcttcttatgcaatg

SEQ ID NO: 364344 - DNA, 25 bp, Artificial
  probe
  misc_feature (1)..(25): SEQ ID NO: 3820; WAN024ATN; Start 1637; Stop 1661
tgacgacagaatcttcttatgcaat

SEQ ID NO: 364345 - DNA, 25 bp, Artificial
  probe
  misc_feature (1)..(25): SEQ ID NO: 3820; WAN024ATN; Start 1628; Stop 1652
tagatcaagtgacgacagaatcttc

SEQ ID NO: 364346 - DNA, 25 bp, Artificial
  probe
  misc_feature (1)..(25): SEQ ID NO: 3820; WAN024ATN; Start 1627; Stop 1651
ttagatcaagtgacgacagaatctt

SEQ ID NO: 364347 - DNA, 25 bp, Artificial
  probe
  misc_feature (1)..(25): SEQ ID NO: 3820; WAN024ATN; Start 1636; Stop 1660
gtgacgacagaatcttcttatgcaa

SEQ ID NO: 364348 - DNA, 25 bp, Artificial
  probe
  misc_feature (1)..(25): SEQ ID NO: 3820; WAN024ATN; Start 1623; Stop 1647
gaatttagatcaagtgacgacagaa

SEQ ID NO: 364349 - DNA, 25 bp, Artificial
  probe
  misc_feature (1)..(25): SEQ ID NO: 3820; WAN024ATN; Start 1625; Stop 1649
atttagatcaagtgacgacagaatc

SEQ ID NO: 364350 - DNA, 25 bp, Artificial
  probe
  misc_feature (1)..(25): SEQ ID NO: 3820; WAN024ATN; Start 1629; Stop 1653
agatcaagtgacgacagaatcttct

SEQ ID NO: 364351 - DNA, 25 bp, Artificial
  probe
  misc_feature (1)..(25): SEQ ID NO: 3820; WAN024ATN; Start 1624; Stop 1648
aatttagatcaagtgacgacagaat

SEQ ID NO: 364352 - DNA, 25 bp, Artificial
  probe
  misc_feature (1)..(25): SEQ ID NO: 3820; WAN024ATN; Start 1635; Stop 1659
agtgacgacagaatcttcttatgca

SEQ ID NO: 364353 - DNA, 25 bp, Artificial
  probe
  misc_feature (1)..(25): SEQ ID NO: 3820; WAN024ATN; Start 1861; Stop 1885
gagactgctgagacctttgctaaat

SEQ ID NO: 364354 - DNA, 25 bp, Artificial
  probe
  misc_feature (1)..(25): SEQ ID NO: 3820; WAN024ATN; Start 1862; Stop 1886
agactgctgagacctttgctaaatg

SEQ ID NO: 364355 - DNA, 25 bp, Artificial
  probe
  misc_feature (1)..(25): SEQ ID NO: 3820; WAN024ATN; Start 1903; Stop 1927
gaatttgaaggttcaggttccatcg

SEQ ID NO: 364356 - DNA, 25 bp, Artificial
  probe
  misc_feature (1)..(25): SEQ ID NO: 3820; WAN024ATN; Start 1626; Stop 1650
tttagatcaagtgacgacagaatct

SEQ ID NO: 364357 - DNA, 25 bp, Artificial
  probe
  misc_feature (1)..(25): SEQ ID NO: 3820; WAN024ATN; Start 1910; Stop 1934
aaggttcaggttccatcgttcagaa

SEQ ID NO: 364358 - DNA, 25 bp, Artificial
  probe
  misc_feature (1)..(25): SEQ ID NO: 3820; WAN024ATN; Start 1917; Stop 1941
aggttccatcgttcagaagcaagat

SEQ ID NO: 364359 - DNA, 25 bp, Artificial
  probe
  misc_feature (1)..(25): SEQ ID NO: 3820; WAN024ATN; Start 1911; Stop 1935
aggttcaggttccatcgttcagaag

SEQ ID NO: 364360 - DNA, 25 bp, Artificial
  probe
  misc_feature (1)..(25): SEQ ID NO: 3820; WAN024ATN; Start 1909; Stop 1933
gaaggttcaggttccatcgttcaga

SEQ ID NO: 364361 - DNA, 25 bp, Artificial
  probe
  misc_feature (1)..(25): SEQ ID NO: 3820; WAN024ATN; Start 1869; Stop 1893
tgagacctttgctaaatggttggat

SEQ ID NO: 364362 - DNA, 25 bp, Artificial
  probe
  misc_feature (1)..(25): SEQ ID NO: 3820; WAN024ATN; Start 1905; Stop 1929
atttgaaggttcaggttccatcgtt

SEQ ID NO: 364363 - DNA, 25 bp, Artificial
  probe
  misc_feature (1)..(25): SEQ ID NO: 3820; WAN024ATN; Start 1904; Stop 1928
aatttgaaggttcaggttccatcgt

SEQ ID NO: 364364 - DNA, 25 bp, Artificial
  probe
  misc_feature (1)..(25): SEQ ID NO: 3820; WAN024ATN; Start 1860; Stop 1884
agagactgctgagacctttgctaaa

SEQ ID NO: 364365 - DNA, 25 bp, Artificial
  probe
  misc_feature (1)..(25): SEQ ID NO: 3820; WAN024ATN; Start 1924; Stop 1948
atcgttcagaagcaagatgttcgga

SEQ ID NO: 364366 - DNA, 25 bp, Artificial
  probe
  misc_feature (1)..(25): SEQ ID NO: 3820; WAN024ATN; Start 1914; Stop 1938
ttcaggttccatcgttcagaagcaa

SEQ ID NO: 364367 - DNA, 25 bp, Artificial
  probe
  misc_feature (1)..(25): SEQ ID NO: 3820; WAN024ATN; Start 1920; Stop 1944
ttccatcgttcagaagcaagatgtt

SEQ ID NO: 364368 - DNA, 25 bp, Artificial
  probe
  misc_feature (1)..(25): SEQ ID NO: 3820; WAN024ATN; Start 1863; Stop 1887
gactgctgagacctttgctaaatgg

SEQ ID NO: 364369 - DNA, 25 bp, Artificial
  probe
  misc_feature (1)..(25): SEQ ID NO: 3820; WAN024ATN; Start 1470; Stop 1494
tatgaaccctgctgaaaatcctgat

SEQ ID NO: 364370 - DNA, 25 bp, Artificial
  probe
  misc_feature (1)..(25): SEQ ID NO: 3820; WAN024ATN; Start 1868; Stop 1892
ctgagacctttgctaaatggttgga

SEQ ID NO: 364371 - DNA, 25 bp, Artificial
  probe
  misc_feature (1)..(25): SEQ ID NO: 3821; WAN024C5M; Start 1357; Stop 1381
gtcaatgttccaggtcaaaatgtag

SEQ ID NO: 364372 - DNA, 25 bp, Artificial
  probe
  misc_feature (1)..(25): SEQ ID NO: 3821; WAN024C5M; Start 1356; Stop 1380
tgtcaatgttccaggtcaaaatgta

SEQ ID NO: 364373 - DNA, 25 bp, Artificial
  probe
  misc_feature (1)..(25): SEQ ID NO: 3821; WAN024C5M; Start 1358; Stop 1382
tcaatgttccaggtcaaaatgtagc

SEQ ID NO: 364374 - DNA, 25 bp, Artificial
  probe
  misc_feature (1)..(25): SEQ ID NO: 3821; WAN024C5M; Start 1353; Stop 1377
aactgtcaatgttccaggtcaaaat

SEQ ID NO: 364375 - DNA, 25 bp, Artificial
  probe
  misc_feature (1)..(25): SEQ ID NO: 3821; WAN024C5M; Start 1333; Stop 1357
aatcatagtacaggaaaagcaactg

SEQ ID NO: 364376 - DNA, 25 bp, Artificial
  probe
  misc_feature (1)..(25): SEQ ID NO: 3821; WAN024C5M; Start 1359; Stop 1383
caatgttccaggtcaaaatgtagcc

SEQ ID NO: 364377 - DNA, 25 bp, Artificial
  probe
  misc_feature (1)..(25): SEQ ID NO: 3821; WAN024C5M; Start 1355; Stop 1379
ctgtcaatgttccaggtcaaaatgt

SEQ ID NO: 364378 - DNA, 25 bp, Artificial
  probe
  misc_feature (1)..(25): SEQ ID NO: 3821; WAN024C5M; Start 1354; Stop 1378
actgtcaatgttccaggtcaaaatg

SEQ ID NO: 364379 - DNA, 25 bp, Artificial
  probe
  misc_feature (1)..(25): SEQ ID NO: 3821; WAN024C5M; Start 1332; Stop 1356
taatcatagtacaggaaaagcaact

SEQ ID NO: 364380 - DNA, 25 bp, Artificial
  probe
  misc_feature (1)..(25): SEQ ID NO: 3821; WAN024C5M; Start 1350; Stop 1374
agcaactgtcaatgttccaggtcaa

SEQ ID NO: 364381 - DNA, 25 bp, Artificial
  probe
  misc_feature (1)..(25): SEQ ID NO: 3821; WAN024C5M; Start 1349; Stop 1373
aagcaactgtcaatgttccaggtca

SEQ ID NO: 364382 - DNA, 25 bp, Artificial
  probe
  misc_feature (1)..(25): SEQ ID NO: 3821; WAN024C5M; Start 1348; Stop 1372
aaagcaactgtcaatgttccaggtc

SEQ ID NO: 364383 - DNA, 25 bp, Artificial
  probe
  misc_feature (1)..(25): SEQ ID NO: 3821; WAN024C5M; Start 1352; Stop 1376
caactgtcaatgttccaggtcaaaa

SEQ ID NO: 364384 - DNA, 25 bp, Artificial
  probe
  misc_feature (1)..(25): SEQ ID NO: 3821; WAN024C5M; Start 1351; Stop 1375
gcaactgtcaatgttccaggtcaaa

SEQ ID NO: 364385 - DNA, 25 bp, Artificial
  probe
  misc_feature (1)..(25): SEQ ID NO: 3821; WAN024C5M; Start 1331; Stop 1355
ataatcatagtacaggaaaagcaac

SEQ ID NO: 364386 - DNA, 25 bp, Artificial
  probe
  misc_feature (1)..(25): SEQ ID NO: 3821; WAN024C5M; Start 1360; Stop 1384
aatgttccaggtcaaaatgtagccc

SEQ ID NO: 364387 - DNA, 25 bp, Artificial
  probe
  misc_feature (1)..(25): SEQ ID NO: 3821; WAN024C5M; Start 1346; Stop 1370
gaaaagcaactgtcaatgttccagg

SEQ ID NO: 364388 - DNA, 25 bp, Artificial
  probe
  misc_feature (1)..(25): SEQ ID NO: 3821; WAN024C5M; Start 1329; Stop 1353
gtataatcatagtacaggaaaagca

SEQ ID NO: 364389 - DNA, 25 bp, Artificial
  probe
  misc_feature (1)..(25): SEQ ID NO: 3821; WAN024C5M; Start 1347; Stop 1371
aaaagcaactgtcaatgttccaggt

SEQ ID NO: 364390 - DNA, 25 bp, Artificial
  probe
  misc_feature (1)..(25): SEQ ID NO: 3821; WAN024C5M; Start 1330; Stop 1354
tataatcatagtacaggaaaagcaa

SEQ ID NO: 364391 - DNA, 25 bp, Artificial
  probe
  misc_feature (1)..(25): SEQ ID NO: 3821; WAN024C5M; Start 1361; Stop 1385
atgttccaggtcaaaatgtagccct

SEQ ID NO: 364392 - DNA, 25 bp, Artificial
  probe
  misc_feature (1)..(25): SEQ ID NO: 3821; WAN024C5M; Start 1334; Stop 1358
atcatagtacaggaaaagcaactgt

SEQ ID NO: 364393 - DNA, 25 bp, Artificial
  probe
  misc_feature (1)..(25): SEQ ID NO: 3821; WAN024C5M; Start 1338; Stop 1362
tagtacaggaaaagcaactgtcaat

SEQ ID NO: 364394 - DNA, 25 bp, Artificial
  probe
  misc_feature (1)..(25): SEQ ID NO: 3821; WAN024C5M; Start 1337; Stop 1361
atagtacaggaaaagcaactgtcaa

SEQ ID NO: 364395 - DNA, 25 bp, Artificial
  probe
  misc_feature (1)..(25): SEQ ID NO: 3821; WAN024C5M; Start 1328; Stop 1352
tgtataatcatagtacaggaaaagc

SEQ ID NO: 364396 - DNA, 25 bp, Artificial
  probe
  misc_feature (1)..(25): SEQ ID NO: 3821; WAN024C5M; Start 1335; Stop 1359
tcatagtacaggaaaagcaactgtc

SEQ ID NO: 364397 - DNA, 25 bp, Artificial
  probe
  misc_feature (1)..(25): SEQ ID NO: 3821; WAN024C5M; Start 1336; Stop 1360
catagtacaggaaaagcaactgtca

SEQ ID NO: 364398 - DNA, 25 bp, Artificial
  probe
  misc_feature (1)..(25): SEQ ID NO: 3821; WAN024C5M; Start 1341; Stop 1365
tacaggaaaagcaactgtcaatgtt

SEQ ID NO: 364399 - DNA, 25 bp, Artificial
  probe
  misc_feature (1)..(25): SEQ ID NO: 3821; WAN024C5M; Start 1339; Stop 1363
agtacaggaaaagcaactgtcaatg

SEQ ID NO: 364400 - DNA, 25 bp, Artificial
  probe
  misc_feature (1)..(25): SEQ ID NO: 3821; WAN024C5M; Start 1340; Stop 1364
gtacaggaaaagcaactgtcaatgt

SEQ ID NO: 364401 - DNA, 25 bp, Artificial
  probe
  misc_feature (1)..(25): SEQ ID NO: 3821; WAN024C5M; Start 1362; Stop 1386
tgttccaggtcaaaatgtagccctc

SEQ ID NO: 364402 - DNA, 25 bp, Artificial
  probe
  misc_feature (1)..(25): SEQ ID NO: 3821; WAN024C5M; Start 1342; Stop 1366
acaggaaaagcaactgtcaatgttc

SEQ ID NO: 364403 - DNA, 25 bp, Artificial
  probe
  misc_feature (1)..(25): SEQ ID NO: 3821; WAN024C5M; Start 1345; Stop 1369
ggaaaagcaactgtcaatgttccag

SEQ ID NO: 364404 - DNA, 25 bp, Artificial
  probe
  misc_feature (1)..(25): SEQ ID NO: 3822; WAN0249GU; Start 213; Stop 237
ttagtacataaatgacaatgctgcc

SEQ ID NO: 364405 - DNA, 25 bp, Artificial
  probe
  misc_feature (1)..(25): SEQ ID NO: 3822; WAN0249GU; Start 214; Stop 238
tagtacataaatgacaatgctgcca

SEQ ID NO: 364406 - DNA, 25 bp, Artificial
  probe
  misc_feature (1)..(25): SEQ ID NO: 3822; WAN0249GU; Start 217; Stop 241
tacataaatgacaatgctgccactg

SEQ ID NO: 364407 - DNA, 25 bp, Artificial
  probe
  misc_feature (1)..(25): SEQ ID NO: 3822; WAN0249GU; Start 212; Stop 236
cttagtacataaatgacaatgctgc

SEQ ID NO: 364408 - DNA, 25 bp, Artificial
  probe
  misc_feature (1)..(25): SEQ ID NO: 3822; WAN0249GU; Start 108; Stop 132
aagcgaagaagcaagaaatgttgaa

SEQ ID NO: 364409 - DNA, 25 bp, Artificial
  probe
  misc_feature (1)..(25): SEQ ID NO: 3822; WAN0249GU; Start 105; Stop 129
ttgaagcgaagaagcaagaaatgtt

SEQ ID NO: 364410 - DNA, 25 bp, Artificial
  probe
  misc_feature (1)..(25): SEQ ID NO: 3822; WAN0249GU; Start 216; Stop 240
gtacataaatgacaatgctgccact

SEQ ID NO: 364411 - DNA, 25 bp, Artificial
  probe
  misc_feature (1)..(25): SEQ ID NO: 3822; WAN0249GU; Start 215; Stop 239
agtacataaatgacaatgctgccac

SEQ ID NO: 364412 - DNA, 25 bp, Artificial
  probe
  misc_feature (1)..(25): SEQ ID NO: 3822; WAN0249GU; Start 316; Stop 340
acaagaaaggtaataaacaacacca

SEQ ID NO: 364413 - DNA, 25 bp, Artificial
  probe
  misc_feature (1)..(25): SEQ ID NO: 3822; WAN0249GU; Start 107; Stop 131
gaagcgaagaagcaagaaatgttga

SEQ ID NO: 364414 - DNA, 25 bp, Artificial
  probe
  misc_feature (1)..(25): SEQ ID NO: 3822; WAN0249GU; Start 106; Stop 130
tgaagcgaagaagcaagaaatgttg

SEQ ID NO: 364415 - DNA, 25 bp, Artificial
  probe
  misc_feature (1)..(25): SEQ ID NO: 3822; WAN0249GU; Start 211; Stop 235
acttagtacataaatgacaatgctg

SEQ ID NO: 364416 - DNA, 25 bp, Artificial
  probe
  misc_feature (1)..(25): SEQ ID NO: 3822; WAN0249GU; Start 317; Stop 341
caagaaaggtaataaacaacaccaa

SEQ ID NO: 364417 - DNA, 25 bp, Artificial
  probe
  misc_feature (1)..(25): SEQ ID NO: 3822; WAN0249GU; Start 19; Stop 43
ctgatggcgaaaagaatttagcaat

SEQ ID NO: 364418 - DNA, 25 bp, Artificial
  probe
  misc_feature (1)..(25): SEQ ID NO: 3822; WAN0249GU; Start 20; Stop 44
tgatggcgaaaagaatttagcaatg

SEQ ID NO: 364419 - DNA, 25 bp, Artificial
  probe
  misc_feature (1)..(25): SEQ ID NO: 3822; WAN0249GU; Start 14; Stop 38
atctcctgatggcgaaaagaattta

SEQ ID NO: 364420 - DNA, 25 bp, Artificial
  probe
  misc_feature (1)..(25): SEQ ID NO: 3822; WAN0249GU; Start 13; Stop 37
tatctcctgatggcgaaaagaattt

SEQ ID NO: 364421 - DNA, 25 bp, Artificial
  probe
  misc_feature (1)..(25): SEQ ID NO: 3822; WAN0249GU; Start 315; Stop 339
tacaagaaaggtaataaacaacacc

SEQ ID NO: 364422 - DNA, 25 bp, Artificial
  probe
  misc_feature (1)..(25): SEQ ID NO: 3822; WAN0249GU; Start 210; Stop 234
aacttagtacataaatgacaatgct

SEQ ID NO: 364423 - DNA, 25 bp, Artificial
  probe
  misc_feature (1)..(25): SEQ ID NO: 3822; WAN0249GU; Start 12; Stop 36
ctatctcctgatggcgaaaagaatt

SEQ ID NO: 364424 - DNA, 25 bp, Artificial
  probe
  misc_feature (1)..(25): SEQ ID NO: 3822; WAN0249GU; Start 21; Stop 45
gatggcgaaaagaatttagcaatgg

SEQ ID NO: 364425 - DNA, 25 bp, Artificial
  probe
  misc_feature (1)..(25): SEQ ID NO: 3822; WAN0249GU; Start 15; Stop 39
tctcctgatggcgaaaagaatttag

SEQ ID NO: 364426 - DNA, 25 bp, Artificial
  probe
  misc_feature (1)..(25): SEQ ID NO: 3822; WAN0249GU; Start 319; Stop 343
agaaaggtaataaacaacaccaatt

SEQ ID NO: 364427 - DNA, 25 bp, Artificial
  probe
  misc_feature (1)..(25): SEQ ID NO: 3822; WAN0249GU; Start 318; Stop 342
aagaaaggtaataaacaacaccaat

SEQ ID NO: 364428 - DNA, 25 bp, Artificial
  probe
  misc_feature (1)..(25): SEQ ID NO: 3822; WAN0249GU; Start 22; Stop 46
atggcgaaaagaatttagcaatggt

SEQ ID NO: 364429 - DNA, 25 bp, Artificial
  probe
  misc_feature (1)..(25): SEQ ID NO: 3822; WAN0249GU; Start 362; Stop 386
aaacaccttctttcctacaattata

SEQ ID NO: 364430 - DNA, 25 bp, Artificial
  probe
  misc_feature (1)..(25): SEQ ID NO: 3822; WAN0249GU; Start 18; Stop 42
cctgatggcgaaaagaatttagcaa

SEQ ID NO: 364431 - DNA, 25 bp, Artificial
  probe
  misc_feature (1)..(25): SEQ ID NO: 3822; WAN0249GU; Start 364; Stop 388
acaccttctttcctacaattatatt

SEQ ID NO: 364432 - DNA, 25 bp, Artificial
  probe
  misc_feature (1)..(25): SEQ ID NO: 3822; WAN0249GU; Start 363; Stop 387
aacaccttctttcctacaattatat

SEQ ID NO: 364433 - DNA, 25 bp, Artificial
  probe
  misc_feature (1)..(25): SEQ ID NO: 3822; WAN0249GU; Start 320; Stop 344
gaaaggtaataaacaacaccaattt

SEQ ID NO: 364434 - DNA, 25 bp, Artificial
  probe
  misc_feature (1)..(25): SEQ ID NO: 3822; WAN0249GU; Start 29; Stop 53
aaagaatttagcaatggtgcaagtt

SEQ ID NO: 364435 - DNA, 25 bp, Artificial
  probe
  misc_feature (1)..(25): SEQ ID NO: 3822; WAN0249GU; Start 16; Stop 40
ctcctgatggcgaaaagaatttagc

SEQ ID NO: 364436 - DNA, 25 bp, Artificial
  probe
  misc_feature (1)..(25): SEQ ID NO: 3822; WAN0249GU; Start 11; Stop 35
cctatctcctgatggcgaaaagaat

SEQ ID NO: 364437 - DNA, 25 bp, Artificial
  probe
  misc_feature (1)..(25): SEQ ID NO: 3823; WAN0249XR; Start 17; Stop 41
gtatatcaacttttgggatgcttgt

SEQ ID NO: 364438 - DNA, 25 bp, Artificial
  probe
  misc_feature (1)..(25): SEQ ID NO: 3823; WAN0249XR; Start 18; Stop 42
tatatcaacttttgggatgcttgtc

SEQ ID NO: 364439 - DNA, 25 bp, Artificial
  probe
  misc_feature (1)..(25): SEQ ID NO: 3823; WAN0249XR; Start 19; Stop 43
atatcaacttttgggatgcttgtca

SEQ ID NO: 364440 - DNA, 25 bp, Artificial
  probe
  misc_feature (1)..(25): SEQ ID NO: 3823; WAN0249XR; Start 16; Stop 40
agtatatcaacttttgggatgcttg

SEQ ID NO: 364441 - DNA, 25 bp, Artificial
  probe
  misc_feature (1)..(25): SEQ ID NO: 3823; WAN0249XR; Start 20; Stop 44
tatcaacttttgggatgcttgtcaa

SEQ ID NO: 364442 - DNA, 25 bp, Artificial
  probe
  misc_feature (1)..(25): SEQ ID NO: 3823; WAN0249XR; Start 14; Stop 38
ctagtatatcaacttttgggatgct

SEQ ID NO: 364443 - DNA, 25 bp, Artificial
  probe
  misc_feature (1)..(25): SEQ ID NO: 3823; WAN0249XR; Start 15; Stop 39
tagtatatcaacttttgggatgctt

SEQ ID NO: 364444 - DNA, 25 bp, Artificial
  probe
  misc_feature (1)..(25): SEQ ID NO: 3823; WAN0249XR; Start 27; Stop 51
ttttgggatgcttgtcaacactttt

SEQ ID NO: 364445 - DNA, 25 bp, Artificial
  probe
  misc_feature (1)..(25): SEQ ID NO: 3823; WAN0249XR; Start 21; Stop 45
atcaacttttgggatgcttgtcaac

SEQ ID NO: 364446 - DNA, 25 bp, Artificial
  probe
  misc_feature (1)..(25): SEQ ID NO: 3823; WAN0249XR; Start 26; Stop 50
cttttgggatgcttgtcaacacttt

SEQ ID NO: 364447 - DNA, 25 bp, Artificial
  probe
  misc_feature (1)..(25): SEQ ID NO: 3823; WAN0249XR; Start 23; Stop 47
caacttttgggatgcttgtcaacac

SEQ ID NO: 364448 - DNA, 25 bp, Artificial
  probe
  misc_feature (1)..(25): SEQ ID NO: 3823; WAN0249XR; Start 25; Stop 49
acttttgggatgcttgtcaacactt

SEQ ID NO: 364449 - DNA, 25 bp, Artificial
  probe
  misc_feature (1)..(25): SEQ ID NO: 3823; WAN0249XR; Start 24; Stop 48
aacttttgggatgcttgtcaacact

SEQ ID NO: 364450 - DNA, 25 bp, Artificial
  probe
  misc_feature (1)..(25): SEQ ID NO: 3823; WAN0249XR; Start 22; Stop 46
tcaacttttgggatgcttgtcaaca

SEQ ID NO: 364451 - DNA, 25 bp, Artificial
  probe
  misc_feature (1)..(25): SEQ ID NO: 3823; WAN0249XR; Start 13; Stop 37
actagtatatcaacttttgggatgc

SEQ ID NO: 364452 - DNA, 25 bp, Artificial
  probe
  misc_feature (1)..(25): SEQ ID NO: 3823; WAN0249XR; Start 12; Stop 36
tactagtatatcaacttttgggatg

SEQ ID NO: 364453 - DNA, 25 bp, Artificial
  probe
  misc_feature (1)..(25): SEQ ID NO: 3823; WAN0249XR; Start 10; Stop 34
tttactagtatatcaacttttggga

SEQ ID NO: 364454 - DNA, 25 bp, Artificial
  probe
  misc_feature (1)..(25): SEQ ID NO: 3823; WAN0249XR; Start 11; Stop 35
ttactagtatatcaacttttgggat

SEQ ID NO: 364455 - DNA, 25 bp, Artificial
  probe
  misc_feature (1)..(25): SEQ ID NO: 3823; WAN0249XR; Start 9; Stop 33
ctttactagtatatcaacttttggg

SEQ ID NO: 364456 - DNA, 25 bp, Artificial
  probe
  misc_feature (1)..(25): SEQ ID NO: 3824; WAN024AIB; Start 55; Stop 79
tatgaactattgaaagatcggagca

SEQ ID NO: 364457 - DNA, 25 bp, Artificial
  probe
  misc_feature (1)..(25): SEQ ID NO: 3824; WAN024AIB; Start 54; Stop 78
atatgaactattgaaagatcggagc

SEQ ID NO: 364458 - DNA, 25 bp, Artificial
  probe
  misc_feature (1)..(25): SEQ ID NO: 3824; WAN024AIB; Start 56; Stop 80
atgaactattgaaagatcggagcaa

SEQ ID NO: 364459 - DNA, 25 bp, Artificial
  probe
  misc_feature (1)..(25): SEQ ID NO: 3824; WAN024AIB; Start 58; Stop 82
gaactattgaaagatcggagcaatc

SEQ ID NO: 364460 - DNA, 25 bp, Artificial
  probe
  misc_feature (1)..(25): SEQ ID NO: 3824; WAN024AIB; Start 57; Stop 81
tgaactattgaaagatcggagcaat

SEQ ID NO: 364461 - DNA, 25 bp, Artificial
  probe
  misc_feature (1)..(25): SEQ ID NO: 3824; WAN024AIB; Start 59; Stop 83
aactattgaaagatcggagcaatcc

SEQ ID NO: 364462 - DNA, 25 bp, Artificial
  probe
  misc_feature (1)..(25): SEQ ID NO: 3824; WAN024AIB; Start 53; Stop 77
aatatgaactattgaaagatcggag

SEQ ID NO: 364463 - DNA, 25 bp, Artificial
  probe
  misc_feature (1)..(25): SEQ ID NO: 3824; WAN024AIB; Start 52; Stop 76
gaatatgaactattgaaagatcgga

SEQ ID NO: 364464 - DNA, 25 bp, Artificial
  probe
  misc_feature (1)..(25): SEQ ID NO: 3824; WAN024AIB; Start 51; Stop 75
agaatatgaactattgaaagatcgg

SEQ ID NO: 364465 - DNA, 25 bp, Artificial
  probe
  misc_feature (1)..(25): SEQ ID NO: 3824; WAN024AIB; Start 10; Stop 34
tcatttgacgttaaccttagctatt

SEQ ID NO: 364466 - DNA, 25 bp, Artificial
  probe
  misc_feature (1)..(25): SEQ ID NO: 3824; WAN024AIB; Start 7; Stop 31
tagtcatttgacgttaaccttagct

SEQ ID NO: 364467 - DNA, 25 bp, Artificial
  probe
  misc_feature (1)..(25): SEQ ID NO: 3824; WAN024AIB; Start 6; Stop 30
gtagtcatttgacgttaaccttagc

SEQ ID NO: 364468 - DNA, 25 bp, Artificial
  probe
  misc_feature (1)..(25): SEQ ID NO: 3824; WAN024AIB; Start 8; Stop 32
agtcatttgacgttaaccttagcta

SEQ ID NO: 364469 - DNA, 25 bp, Artificial
  probe
  misc_feature (1)..(25): SEQ ID NO: 3824; WAN024AIB; Start 9; Stop 33
gtcatttgacgttaaccttagctat

SEQ ID NO: 364470 - DNA, 25 bp, Artificial
  probe
  misc_feature (1)..(25): SEQ ID NO: 3824; WAN024AIB; Start 11; Stop 35
catttgacgttaaccttagctattt

SEQ ID NO: 364471 - DNA, 25 bp, Artificial
  probe
  misc_feature (1)..(25): SEQ ID NO: 3824; WAN024AIB; Start 50; Stop 74
gagaatatgaactattgaaagatcg

SEQ ID NO: 364472 - DNA, 25 bp, Artificial
  probe
  misc_feature (1)..(25): SEQ ID NO: 3824; WAN024AIB; Start 5; Stop 29
cgtagtcatttgacgttaaccttag

SEQ ID NO: 364473 - DNA, 25 bp, Artificial
  probe
  misc_feature (1)..(25): SEQ ID NO: 3824; WAN024AIB; Start 4; Stop 28
gcgtagtcatttgacgttaacctta

SEQ ID NO: 364474 - DNA, 25 bp, Artificial
  probe
  misc_feature (1)..(25): SEQ ID NO: 3824; WAN024AIB; Start 12; Stop 36
atttgacgttaaccttagctatttt

SEQ ID NO: 364475 - DNA, 25 bp, Artificial
  probe
  misc_feature (1)..(25): SEQ ID NO: 3824; WAN024AIB; Start 3; Stop 27
cgcgtagtcatttgacgttaacctt

SEQ ID NO: 364476 - DNA, 25 bp, Artificial
  probe
  misc_feature (1)..(25): SEQ ID NO: 3824; WAN024AIB; Start 1; Stop 25
gtcgcgtagtcatttgacgttaacc

SEQ ID NO: 364477 - DNA, 25 bp, Artificial
  probe
  misc_feature (1)..(25): SEQ ID NO: 3824; WAN024AIB; Start 2; Stop 26
tcgcgtagtcatttgacgttaacct

SEQ ID NO: 364478 - DNA, 25 bp, Artificial
  probe
  misc_feature (1)..(25): SEQ ID NO: 3825; WAN0249OQ; Start 21; Stop 45
tttctcaagtctctactaaactact

SEQ ID NO: 364479 - DNA, 25 bp, Artificial
  probe
  misc_feature (1)..(25): SEQ ID NO: 3825; WAN0249OQ; Start 22; Stop 46
ttctcaagtctctactaaactacta

SEQ ID NO: 364480 - DNA, 25 bp, Artificial
  probe
  misc_feature (1)..(25): SEQ ID NO: 3825; WAN0249OQ; Start 23; Stop 47
tctcaagtctctactaaactactat

SEQ ID NO: 364481 - DNA, 25 bp, Artificial
  probe
  misc_feature (1)..(25): SEQ ID NO: 3825; WAN0249OQ; Start 24; Stop 48
ctcaagtctctactaaactactatt

SEQ ID NO: 364482 - DNA, 25 bp, Artificial
  probe
  misc_feature (1)..(25): SEQ ID NO: 3825; WAN0249OQ; Start 20; Stop 44
ttttctcaagtctctactaaactac

SEQ ID NO: 364483 - DNA, 25 bp, Artificial
  probe
  misc_feature (1)..(25): SEQ ID NO: 3826; WAN0249JZ; Start 2; Stop 26
tctccagaactattgtatattttgt

SEQ ID NO: 364484 - DNA, 25 bp, Artificial
  probe
  misc_feature (1)..(25): SEQ ID NO: 3826; WAN0249JZ; Start 1; Stop 25
gtctccagaactattgtatattttg

SEQ ID NO: 364485 - DNA, 25 bp, Artificial
  probe
  misc_feature (1)..(25): SEQ ID NO: 3827; WAN024AJD; Start 64; Stop 88
gtgtgtttgtgactctttcttctaa

SEQ ID NO: 364486 - DNA, 25 bp, Artificial
  probe
  misc_feature (1)..(25): SEQ ID NO: 3827; WAN024AJD; Start 5; Stop 29
cgaactccatttctactcctactat

SEQ ID NO: 364487 - DNA, 25 bp, Artificial
  probe
  misc_feature (1)..(25): SEQ ID NO: 3827; WAN024AJD; Start 65; Stop 89
tgtgtttgtgactctttcttctaac

SEQ ID NO: 364488 - DNA, 25 bp, Artificial
  probe
  misc_feature (1)..(25): SEQ ID NO: 3827; WAN024AJD; Start 67; Stop 91
tgtttgtgactctttcttctaactg

SEQ ID NO: 364489 - DNA, 25 bp, Artificial
  probe
  misc_feature (1)..(25): SEQ ID NO: 3827; WAN024AJD; Start 66; Stop 90
gtgtttgtgactctttcttctaact

SEQ ID NO: 364490 - DNA, 25 bp, Artificial
  probe
  misc_feature (1)..(25): SEQ ID NO: 3827; WAN024AJD; Start 68; Stop 92
gtttgtgactctttcttctaactga

SEQ ID NO: 364491 - DNA, 25 bp, Artificial
  probe
  misc_feature (1)..(25): SEQ ID NO: 3827; WAN024AJD; Start 63; Stop 87
agtgtgtttgtgactctttcttcta

SEQ ID NO: 364492 - DNA, 25 bp, Artificial
  probe
  misc_feature (1)..(25): SEQ ID NO: 3827; WAN024AJD; Start 62; Stop 86
aagtgtgtttgtgactctttcttct

SEQ ID NO: 364493 - DNA, 25 bp, Artificial
  probe
  misc_feature (1)..(25): SEQ ID NO: 3827; WAN024AJD; Start 71; Stop 95
tgtgactctttcttctaactgaatc

SEQ ID NO: 364494 - DNA, 25 bp, Artificial
  probe
  misc_feature (1)..(25): SEQ ID NO: 3827; WAN024AJD; Start 72; Stop 96
gtgactctttcttctaactgaatct

SEQ ID NO: 364495 - DNA, 25 bp, Artificial
  probe
  misc_feature (1)..(25): SEQ ID NO: 3827; WAN024AJD; Start 69; Stop 93
tttgtgactctttcttctaactgaa

SEQ ID NO: 364496 - DNA, 25 bp, Artificial
  probe
  misc_feature (1)..(25): SEQ ID NO: 3827; WAN024AJD; Start 70; Stop 94
ttgtgactctttcttctaactgaat

SEQ ID NO: 364497 - DNA, 25 bp, Artificial
  probe
  misc_feature (1)..(25): SEQ ID NO: 3827; WAN024AJD; Start 73; Stop 97
tgactctttcttctaactgaatctt

SEQ ID NO: 364498 - DNA, 25 bp, Artificial
  probe
  misc_feature (1)..(25): SEQ ID NO: 3827; WAN024AJD; Start 4; Stop 28
tcgaactccatttctactcctacta

SEQ ID NO: 364499 - DNA, 25 bp, Artificial
  probe
  misc_feature (1)..(25): SEQ ID NO: 3827; WAN024AJD; Start 77; Stop 101
tctttcttctaactgaatcttacca

SEQ ID NO: 364500 - DNA, 25 bp, Artificial
  probe
  misc_feature (1)..(25): SEQ ID NO: 3827; WAN024AJD; Start 6; Stop 30
gaactccatttctactcctactatt

SEQ ID NO: 364501 - DNA, 25 bp, Artificial
  probe
  misc_feature (1)..(25): SEQ ID NO: 3827; WAN024AJD; Start 3; Stop 27
ctcgaactccatttctactcctact

SEQ ID NO: 364502 - DNA, 25 bp, Artificial
  probe
  misc_feature (1)..(25): SEQ ID NO: 3827; WAN024AJD; Start 2; Stop 26
tctcgaactccatttctactcctac

SEQ ID NO: 364503 - DNA, 25 bp, Artificial
  probe
  misc_feature (1)..(25): SEQ ID NO: 3827; WAN024AJD; Start 1; Stop 25
gtctcgaactccatttctactccta

SEQ ID NO: 364504 - DNA, 25 bp, Artificial
  probe
  misc_feature (1)..(25): SEQ ID NO: 3827; WAN024AJD; Start 61; Stop 85
aaagtgtgtttgtgactctttcttc

SEQ ID NO: 364505 - DNA, 25 bp, Artificial
  probe
  misc_feature (1)..(25): SEQ ID NO: 3827; WAN024AJD; Start 7; Stop 31
aactccatttctactcctactattt

SEQ ID NO: 364506 - DNA, 25 bp, Artificial
  probe
  misc_feature (1)..(25): SEQ ID NO: 3827; WAN024AJD; Start 76; Stop 100
ctctttcttctaactgaatcttacc

SEQ ID NO: 364507 - DNA, 25 bp, Artificial
  probe
  misc_feature (1)..(25): SEQ ID NO: 3827; WAN024AJD; Start 60; Stop 84
caaagtgtgtttgtgactctttctt

SEQ ID NO: 364508 - DNA, 25 bp, Artificial
  probe
  misc_feature (1)..(25): SEQ ID NO: 3827; WAN024AJD; Start 78; Stop 102
ctttcttctaactgaatcttaccat

SEQ ID NO: 364509 - DNA, 25 bp, Artificial
  probe
  misc_feature (1)..(25): SEQ ID NO: 3827; WAN024AJD; Start 75; Stop 99
actctttcttctaactgaatcttac

SEQ ID NO: 364510 - DNA, 25 bp, Artificial
  probe
  misc_feature (1)..(25): SEQ ID NO: 3827; WAN024AJD; Start 74; Stop 98
gactctttcttctaactgaatctta

SEQ ID NO: 364511 - DNA, 25 bp, Artificial
  probe
  misc_feature (1)..(25): SEQ ID NO: 3827; WAN024AJD; Start 8; Stop 32
actccatttctactcctactatttt

SEQ ID NO: 364512 - DNA, 25 bp, Artificial
  probe
  misc_feature (1)..(25): SEQ ID NO: 3827; WAN024AJD; Start 79; Stop 103
tttcttctaactgaatcttaccata

SEQ ID NO: 364513 - DNA, 25 bp, Artificial
  probe
  misc_feature (1)..(25): SEQ ID NO: 3827; WAN024AJD; Start 11; Stop 35
ccatttctactcctactattttacc

SEQ ID NO: 364514 - DNA, 25 bp, Artificial
  probe
  misc_feature (1)..(25): SEQ ID NO: 3827; WAN024AJD; Start 12; Stop 36
catttctactcctactattttacca

SEQ ID NO: 364515 - DNA, 25 bp, Artificial
  probe
  misc_feature (1)..(25): SEQ ID NO: 3827; WAN024AJD; Start 10; Stop 34
tccatttctactcctactattttac

SEQ ID NO: 364516 - DNA, 25 bp, Artificial
  probe
  misc_feature (1)..(25): SEQ ID NO: 3827; WAN024AJD; Start 9; Stop 33
ctccatttctactcctactatttta

SEQ ID NO: 364517 - DNA, 25 bp, Artificial
  probe
  misc_feature (1)..(25): SEQ ID NO: 3827; WAN024AJD; Start 16; Stop 40
tctactcctactattttaccatttt

SEQ ID NO: 364518 - DNA, 25 bp, Artificial
  probe
  misc_feature (1)..(25): SEQ ID NO: 3828; WAN024AQA; Start 8; Stop 32
tccattctcgcttgctagtattatt

SEQ ID NO: 364519 - DNA, 25 bp, Artificial
  probe
  misc_feature (1)..(25): SEQ ID NO: 3828; WAN024AQA; Start 7; Stop 31
ctccattctcgcttgctagtattat

SEQ ID NO: 364520 - DNA, 25 bp, Artificial
  probe
  misc_feature (1)..(25): SEQ ID NO: 3828; WAN024AQA; Start 6; Stop 30
tctccattctcgcttgctagtatta

SEQ ID NO: 364521 - DNA, 25 bp, Artificial
  probe
  misc_feature (1)..(25): SEQ ID NO: 3828; WAN024AQA; Start 9; Stop 33
ccattctcgcttgctagtattatta

SEQ ID NO: 364522 - DNA, 25 bp, Artificial
  probe
  misc_feature (1)..(25): SEQ ID NO: 3828; WAN024AQA; Start 5; Stop 29
ctctccattctcgcttgctagtatt

SEQ ID NO: 364523 - DNA, 25 bp, Artificial
  probe
  misc_feature (1)..(25): SEQ ID NO: 3828; WAN024AQA; Start 4; Stop 28
tctctccattctcgcttgctagtat

SEQ ID NO: 364524 - DNA, 25 bp, Artificial
  probe
  misc_feature (1)..(25): SEQ ID NO: 3828; WAN024AQA; Start 10; Stop 34
cattctcgcttgctagtattattat

SEQ ID NO: 364525 - DNA, 25 bp, Artificial
  probe
  misc_feature (1)..(25): SEQ ID NO: 3828; WAN024AQA; Start 3; Stop 27
ctctctccattctcgcttgctagta

SEQ ID NO: 364526 - DNA, 25 bp, Artificial
  probe
  misc_feature (1)..(25): SEQ ID NO: 3828; WAN024AQA; Start 12; Stop 36
ttctcgcttgctagtattattatat

SEQ ID NO: 364527 - DNA, 25 bp, Artificial
  probe
  misc_feature (1)..(25): SEQ ID NO: 3828; WAN024AQA; Start 11; Stop 35
attctcgcttgctagtattattata

SEQ ID NO: 364528 - DNA, 25 bp, Artificial
  probe
  misc_feature (1)..(25): SEQ ID NO: 3828; WAN024AQA; Start 1; Stop 25
gtctctctccattctcgcttgctag

SEQ ID NO: 364529 - DNA, 25 bp, Artificial
  probe
  misc_feature (1)..(25): SEQ ID NO: 3828; WAN024AQA; Start 2; Stop 26
tctctctccattctcgcttgctagt

SEQ ID NO: 364530 - DNA, 25 bp, Artificial
  probe
  misc_feature (1)..(25): SEQ ID NO: 3829; WAN0249ZB; Start 26; Stop 50
acacggtgaatggtttgattgtata

SEQ ID NO: 364531 - DNA, 25 bp, Artificial
  probe
  misc_feature (1)..(25): SEQ ID NO: 3829; WAN0249ZB; Start 40; Stop 64
ttgattgtataccgtcttctcttaa

SEQ ID NO: 364532 - DNA, 25 bp, Artificial
  probe
  misc_feature (1)..(25): SEQ ID NO: 3829; WAN0249ZB; Start 27; Stop 51
cacggtgaatggtttgattgtatac

SEQ ID NO: 364533 - DNA, 25 bp, Artificial
  probe
  misc_feature (1)..(25): SEQ ID NO: 3829; WAN0249ZB; Start 25; Stop 49
tacacggtgaatggtttgattgtat

SEQ ID NO: 364534 - DNA, 25 bp, Artificial
  probe
  misc_feature (1)..(25): SEQ ID NO: 3829; WAN0249ZB; Start 38; Stop 62
gtttgattgtataccgtcttctctt

SEQ ID NO: 364535 - DNA, 25 bp, Artificial
  probe
  misc_feature (1)..(25): SEQ ID NO: 3829; WAN0249ZB; Start 24; Stop 48
ctacacggtgaatggtttgattgta

SEQ ID NO: 364536 - DNA, 25 bp, Artificial
  probe
  misc_feature (1)..(25): SEQ ID NO: 3829; WAN0249ZB; Start 35; Stop 59
atggtttgattgtataccgtcttct

SEQ ID NO: 364537 - DNA, 25 bp, Artificial
  probe
  misc_feature (1)..(25): SEQ ID NO: 3829; WAN0249ZB; Start 37; Stop 61
ggtttgattgtataccgtcttctct

SEQ ID NO: 364538 - DNA, 25 bp, Artificial
  probe
  misc_feature (1)..(25): SEQ ID NO: 3829; WAN0249ZB; Start 32; Stop 56
tgaatggtttgattgtataccgtct

SEQ ID NO: 364539 - DNA, 25 bp, Artificial
  probe
  misc_feature (1)..(25): SEQ ID NO: 3829; WAN0249ZB; Start 31; Stop 55
gtgaatggtttgattgtataccgtc

SEQ ID NO: 364540 - DNA, 25 bp, Artificial
  probe
  misc_feature (1)..(25): SEQ ID NO: 3829; WAN0249ZB; Start 36; Stop 60
tggtttgattgtataccgtcttctc

SEQ ID NO: 364541 - DNA, 25 bp, Artificial
  probe
  misc_feature (1)..(25): SEQ ID NO: 3829; WAN0249ZB; Start 34; Stop 58
aatggtttgattgtataccgtcttc

SEQ ID NO: 364542 - DNA, 25 bp, Artificial
  probe
  misc_feature (1)..(25): SEQ ID NO: 3829; WAN0249ZB; Start 33; Stop 57
gaatggtttgattgtataccgtctt

SEQ ID NO: 364543 - DNA, 25 bp, Artificial
  probe
  misc_feature (1)..(25): SEQ ID NO: 3829; WAN0249ZB; Start 39; Stop 63
tttgattgtataccgtcttctctta

SEQ ID NO: 364544 - DNA, 25 bp, Artificial
  probe
  misc_feature (1)..(25): SEQ ID NO: 3829; WAN0249ZB; Start 5; Stop 29
tcattctgaacgatttcggctacac

SEQ ID NO: 364545 - DNA, 25 bp, Artificial
  probe
  misc_feature (1)..(25): SEQ ID NO: 3829; WAN0249ZB; Start 30; Stop 54
ggtgaatggtttgattgtataccgt

SEQ ID NO: 364546 - DNA, 25 bp, Artificial
  probe
  misc_feature (1)..(25): SEQ ID NO: 3829; WAN0249ZB; Start 28; Stop 52
acggtgaatggtttgattgtatacc

SEQ ID NO: 364547 - DNA, 25 bp, Artificial
  probe
  misc_feature (1)..(25): SEQ ID NO: 3829; WAN0249ZB; Start 3; Stop 27
cttcattctgaacgatttcggctac

SEQ ID NO: 364548 - DNA, 25 bp, Artificial
  probe
  misc_feature (1)..(25): SEQ ID NO: 3829; WAN0249ZB; Start 2; Stop 26
tcttcattctgaacgatttcggcta

SEQ ID NO: 364549 - DNA, 25 bp, Artificial
  probe
  misc_feature (1)..(25): SEQ ID NO: 3829; WAN0249ZB; Start 23; Stop 47
gctacacggtgaatggtttgattgt

SEQ ID NO: 364550 - DNA, 25 bp, Artificial
  probe
  misc_feature (1)..(25): SEQ ID NO: 3829; WAN0249ZB; Start 4; Stop 28
ttcattctgaacgatttcggctaca

SEQ ID NO: 364551 - DNA, 25 bp, Artificial
  probe
  misc_feature (1)..(25): SEQ ID NO: 3829; WAN0249ZB; Start 22; Stop 46
ggctacacggtgaatggtttgattg

SEQ ID NO: 364552 - DNA, 25 bp, Artificial
  probe
  misc_feature (1)..(25): SEQ ID NO: 3829; WAN0249ZB; Start 6; Stop 30
cattctgaacgatttcggctacacg

SEQ ID NO: 364553 - DNA, 25 bp, Artificial
  probe
  misc_feature (1)..(25): SEQ ID NO: 3829; WAN0249ZB; Start 1; Stop 25
gtcttcattctgaacgatttcggct

SEQ ID NO: 364554 - DNA, 25 bp, Artificial
  probe
  misc_feature (1)..(25): SEQ ID NO: 3830; WAN024AFO; Start 24; Stop 48
tgatataatagtccatgttgattgt

SEQ ID NO: 364555 - DNA, 25 bp, Artificial
  probe
  misc_feature (1)..(25): SEQ ID NO: 3830; WAN024AFO; Start 20; Stop 44
ttcatgatataatagtccatgttga

SEQ ID NO: 364556 - DNA, 25 bp, Artificial
  probe
  misc_feature (1)..(25): SEQ ID NO: 3830; WAN024AFO; Start 21; Stop 45
tcatgatataatagtccatgttgat

SEQ ID NO: 364557 - DNA, 25 bp, Artificial
  probe
  misc_feature (1)..(25): SEQ ID NO: 3830; WAN024AFO; Start 19; Stop 43
tttcatgatataatagtccatgttg

SEQ ID NO: 364558 - DNA, 25 bp, Artificial
  probe
  misc_feature (1)..(25): SEQ ID NO: 3831; WAN024FSJ; Start 491; Stop 515
ttgatactgtcattatggaaggtca

SEQ ID NO: 364559 - DNA, 25 bp, Artificial
  probe
  misc_feature (1)..(25): SEQ ID NO: 3831; WAN024FSJ; Start 353; Stop 377
ttgatgttgataacctaacgacaga

SEQ ID NO: 364560 - DNA, 25 bp, Artificial
  probe
  misc_feature (1)..(25): SEQ ID NO: 3831; WAN024FSJ; Start 352; Stop 376
gttgatgttgataacctaacgacag

SEQ ID NO: 364561 - DNA, 25 bp, Artificial
  probe
  misc_feature (1)..(25): SEQ ID NO: 3831; WAN024FSJ; Start 354; Stop 378
tgatgttgataacctaacgacagag

SEQ ID NO: 364562 - DNA, 25 bp, Artificial
  probe
  misc_feature (1)..(25): SEQ ID NO: 3831; WAN024FSJ; Start 492; Stop 516
tgatactgtcattatggaaggtcag

SEQ ID NO: 364563 - DNA, 25 bp, Artificial
  probe
  misc_feature (1)..(25): SEQ ID NO: 3831; WAN024FSJ; Start 281; Stop 305
gaattgatgcttctgctcttgttga

SEQ ID NO: 364564 - DNA, 25 bp, Artificial
  probe
  misc_feature (1)..(25): SEQ ID NO: 3831; WAN024FSJ; Start 342; Stop 366
caataaggaggttgatgttgataac

SEQ ID NO: 364565 - DNA, 25 bp, Artificial
  probe
  misc_feature (1)..(25): SEQ ID NO: 3831; WAN024FSJ; Start 355; Stop 379
gatgttgataacctaacgacagagc

SEQ ID NO: 364566 - DNA, 25 bp, Artificial
  probe
  misc_feature (1)..(25): SEQ ID NO: 3831; WAN024FSJ; Start 327; Stop 351
cttggctctgattgtcaataaggag

SEQ ID NO: 364567 - DNA, 25 bp, Artificial
  probe
  misc_feature (1)..(25): SEQ ID NO: 3831; WAN024FSJ; Start 282; Stop 306
aattgatgcttctgctcttgttgac

SEQ ID NO: 364568 - DNA, 25 bp, Artificial
  probe
  misc_feature (1)..(25): SEQ ID NO: 3831; WAN024FSJ; Start 331; Stop 355
gctctgattgtcaataaggaggttg

SEQ ID NO: 364569 - DNA, 25 bp, Artificial
  probe
  misc_feature (1)..(25): SEQ ID NO: 3831; WAN024FSJ; Start 391; Stop 415
atcttcataggtgaggtaaccaatt

SEQ ID NO: 364570 - DNA, 25 bp, Artificial
  probe
  misc_feature (1)..(25): SEQ ID NO: 3831; WAN024FSJ; Start 390; Stop 414
aatcttcataggtgaggtaaccaat

SEQ ID NO: 364571 - DNA, 25 bp, Artificial
  probe
  misc_feature (1)..(25): SEQ ID NO: 3831; WAN024FSJ; Start 356; Stop 380
atgttgataacctaacgacagagca

SEQ ID NO: 364572 - DNA, 25 bp, Artificial
  probe
  misc_feature (1)..(25): SEQ ID NO: 3831; WAN024FSJ; Start 437; Stop 461
acttacccatctctgttatcaatcg

SEQ ID NO: 364573 - DNA, 25 bp, Artificial
  probe
  misc_feature (1)..(25): SEQ ID NO: 3831; WAN024FSJ; Start 435; Stop 459
ggacttacccatctctgttatcaat

SEQ ID NO: 364574 - DNA, 25 bp, Artificial
  probe
  misc_feature (1)..(25): SEQ ID NO: 3831; WAN024FSJ; Start 434; Stop 458
aggacttacccatctctgttatcaa

SEQ ID NO: 364575 - DNA, 25 bp, Artificial
  probe
  misc_feature (1)..(25): SEQ ID NO: 3831; WAN024FSJ; Start 811; Stop 835
ccgattaaggaaatgaaggttgaaa

SEQ ID NO: 364576 - DNA, 25 bp, Artificial
  probe
  misc_feature (1)..(25): SEQ ID NO: 3831; WAN024FSJ; Start 433; Stop 457
aaggacttacccatctctgttatca

SEQ ID NO: 364577 - DNA, 25 bp, Artificial
  probe
  misc_feature (1)..(25): SEQ ID NO: 3831; WAN024FSJ; Start 438; Stop 462
cttacccatctctgttatcaatcgg

SEQ ID NO: 364578 - DNA, 25 bp, Artificial
  probe
  misc_feature (1)..(25): SEQ ID NO: 3831; WAN024FSJ; Start 436; Stop 460
gacttacccatctctgttatcaatc

SEQ ID NO: 364579 - DNA, 25 bp, Artificial
  probe
  misc_feature (1)..(25): SEQ ID NO: 3831; WAN024FSJ; Start 432; Stop 456
taaggacttacccatctctgttatc

SEQ ID NO: 364580 - DNA, 25 bp, Artificial
  probe
  misc_feature (1)..(25): SEQ ID NO: 3831; WAN024FSJ; Start 280; Stop 304
ggaattgatgcttctgctcttgttg

SEQ ID NO: 364581 - DNA, 25 bp, Artificial
  probe
  misc_feature (1)..(25): SEQ ID NO: 3831; WAN024FSJ; Start 689; Stop 713
ccttgtggtcttatgagcatatgta

SEQ ID NO: 364582 - DNA, 25 bp, Artificial
  probe
  misc_feature (1)..(25): SEQ ID NO: 3831; WAN024FSJ; Start 385; Stop 409
cgtcaaatcttcataggtgaggtaa

SEQ ID NO: 364583 - DNA, 25 bp, Artificial
  probe
  misc_feature (1)..(25): SEQ ID NO: 3831; WAN024FSJ; Start 330; Stop 354
ggctctgattgtcaataaggaggtt

SEQ ID NO: 364584 - DNA, 25 bp, Artificial
  probe
  misc_feature (1)..(25): SEQ ID NO: 3831; WAN024FSJ; Start 328; Stop 352
ttggctctgattgtcaataaggagg

SEQ ID NO: 364585 - DNA, 25 bp, Artificial
  probe
  misc_feature (1)..(25): SEQ ID NO: 3831; WAN024FSJ; Start 484; Stop 508
gctacctttgatactgtcattatgg

SEQ ID NO: 364586 - DNA, 25 bp, Artificial
  probe
  misc_feature (1)..(25): SEQ ID NO: 3831; WAN024FSJ; Start 481; Stop 505
cgtgctacctttgatactgtcatta

SEQ ID NO: 364587 - DNA, 25 bp, Artificial
  probe
  misc_feature (1)..(25): SEQ ID NO: 3831; WAN024FSJ; Start 386; Stop 410
gtcaaatcttcataggtgaggtaac

SEQ ID NO: 364588 - DNA, 25 bp, Artificial
  probe
  misc_feature (1)..(25): SEQ ID NO: 3831; WAN024FSJ; Start 384; Stop 408
tcgtcaaatcttcataggtgaggta

SEQ ID NO: 364589 - DNA, 25 bp, Artificial
  probe
  misc_feature (1)..(25): SEQ ID NO: 3831; WAN024FSJ; Start 860; Stop 884
tgttggaagggagacaataactaat

SEQ ID NO: 364590 - DNA, 25 bp, Artificial
  probe
  misc_feature (1)..(25): SEQ ID NO: 3831; WAN024FSJ; Start 859; Stop 883
gtgttggaagggagacaataactaa

SEQ ID NO: 364591 - DNA, 25 bp, Artificial
  probe
  misc_feature (1)..(25): SEQ ID NO: 3832; WAN024EYG; Start 214; Stop 238
gaatcttattacagcgttcttggtc

SEQ ID NO: 364592 - DNA, 25 bp, Artificial
  probe
  misc_feature (1)..(25): SEQ ID NO: 3832; WAN024EYG; Start 211; Stop 235
ttggaatcttattacagcgttcttg

SEQ ID NO: 364593 - DNA, 25 bp, Artificial
  probe
  misc_feature (1)..(25): SEQ ID NO: 3832; WAN024EYG; Start 210; Stop 234
cttggaatcttattacagcgttctt

SEQ ID NO: 364594 - DNA, 25 bp, Artificial
  probe
  misc_feature (1)..(25): SEQ ID NO: 3832; WAN024EYG; Start 215; Stop 239
aatcttattacagcgttcttggtcg

SEQ ID NO: 364595 - DNA, 25 bp, Artificial
  probe
  misc_feature (1)..(25): SEQ ID NO: 3832; WAN024EYG; Start 213; Stop 237
ggaatcttattacagcgttcttggt

SEQ ID NO: 364596 - DNA, 25 bp, Artificial
  probe
  misc_feature (1)..(25): SEQ ID NO: 3832; WAN024EYG; Start 212; Stop 236
tggaatcttattacagcgttcttgg

SEQ ID NO: 364597 - DNA, 25 bp, Artificial
  probe
  misc_feature (1)..(25): SEQ ID NO: 3832; WAN024EYG; Start 203; Stop 227
acaatggcttggaatcttattacag

SEQ ID NO: 364598 - DNA, 25 bp, Artificial
  probe
  misc_feature (1)..(25): SEQ ID NO: 3832; WAN024EYG; Start 217; Stop 241
tcttattacagcgttcttggtcgta

SEQ ID NO: 364599 - DNA, 25 bp, Artificial
  probe
  misc_feature (1)..(25): SEQ ID NO: 3832; WAN024EYG; Start 202; Stop 226
tacaatggcttggaatcttattaca

SEQ ID NO: 364600 - DNA, 25 bp, Artificial
  probe
  misc_feature (1)..(25): SEQ ID NO: 3832; WAN024EYG; Start 216; Stop 240
atcttattacagcgttcttggtcgt

SEQ ID NO: 364601 - DNA, 25 bp, Artificial
  probe
  misc_feature (1)..(25): SEQ ID NO: 3832; WAN024EYG; Start 218; Stop 242
cttattacagcgttcttggtcgtaa

SEQ ID NO: 364602 - DNA, 25 bp, Artificial
  probe
  misc_feature (1)..(25): SEQ ID NO: 3832; WAN024EYG; Start 201; Stop 225
atacaatggcttggaatcttattac

SEQ ID NO: 364603 - DNA, 25 bp, Artificial
  probe
  misc_feature (1)..(25): SEQ ID NO: 3832; WAN024EYG; Start 192; Stop 216
ggttgatttatacaatggcttggaa

SEQ ID NO: 364604 - DNA, 25 bp, Artificial
  probe
  misc_feature (1)..(25): SEQ ID NO: 3832; WAN024EYG; Start 191; Stop 215
aggttgatttatacaatggcttgga

SEQ ID NO: 364605 - DNA, 25 bp, Artificial
  probe
  misc_feature (1)..(25): SEQ ID NO: 3832; WAN024EYG; Start 190; Stop 214
caggttgatttatacaatggcttgg

SEQ ID NO: 364606 - DNA, 25 bp, Artificial
  probe
  misc_feature (1)..(25): SEQ ID NO: 3832; WAN024EYG; Start 189; Stop 213
tcaggttgatttatacaatggcttg

SEQ ID NO: 364607 - DNA, 25 bp, Artificial
  probe
  misc_feature (1)..(25): SEQ ID NO: 3832; WAN024EYG; Start 204; Stop 228
caatggcttggaatcttattacagc

SEQ ID NO: 364608 - DNA, 25 bp, Artificial
  probe
  misc_feature (1)..(25): SEQ ID NO: 3832; WAN024EYG; Start 209; Stop 233
gcttggaatcttattacagcgttct

SEQ ID NO: 364609 - DNA, 25 bp, Artificial
  probe
  misc_feature (1)..(25): SEQ ID NO: 3832; WAN024EYG; Start 205; Stop 229
aatggcttggaatcttattacagcg

SEQ ID NO: 364610 - DNA, 25 bp, Artificial
  probe
  misc_feature (1)..(25): SEQ ID NO: 3832; WAN024EYG; Start 109; Stop 133
cttagcatgaaaccctatcaaacag

SEQ ID NO: 364611 - DNA, 25 bp, Artificial
  probe
  misc_feature (1)..(25): SEQ ID NO: 3832; WAN024EYG; Start 108; Stop 132
tcttagcatgaaaccctatcaaaca

SEQ ID NO: 364612 - DNA, 25 bp, Artificial
  probe
  misc_feature (1)..(25): SEQ ID NO: 3832; WAN024EYG; Start 107; Stop 131
ctcttagcatgaaaccctatcaaac

SEQ ID NO: 364613 - DNA, 25 bp, Artificial
  probe
  misc_feature (1)..(25): SEQ ID NO: 3832; WAN024EYG; Start 106; Stop 130
tctcttagcatgaaaccctatcaaa

SEQ ID NO: 364614 - DNA, 25 bp, Artificial
  probe
  misc_feature (1)..(25): SEQ ID NO: 3832; WAN024EYG; Start 105; Stop 129
ttctcttagcatgaaaccctatcaa

SEQ ID NO: 364615 - DNA, 25 bp, Artificial
  probe
  misc_feature (1)..(25): SEQ ID NO: 3832; WAN024EYG; Start 193; Stop 217
gttgatttatacaatggcttggaat

SEQ ID NO: 364616 - DNA, 25 bp, Artificial
  probe
  misc_feature (1)..(25): SEQ ID NO: 3832; WAN024EYG; Start 91; Stop 115
tttctgtatatggtttctcttagca

SEQ ID NO: 364617 - DNA, 25 bp, Artificial
  probe
  misc_feature (1)..(25): SEQ ID NO: 3832; WAN024EYG; Start 87; Stop 111
ttcctttctgtatatggtttctctt

SEQ ID NO: 364618 - DNA, 25 bp, Artificial
  probe
  misc_feature (1)..(25): SEQ ID NO: 3832; WAN024EYG; Start 199; Stop 223
ttatacaatggcttggaatcttatt

SEQ ID NO: 364619 - DNA, 25 bp, Artificial
  probe
  misc_feature (1)..(25): SEQ ID NO: 3832; WAN024EYG; Start 208; Stop 232
ggcttggaatcttattacagcgttc

SEQ ID NO: 364620 - DNA, 25 bp, Artificial
  probe
  misc_feature (1)..(25): SEQ ID NO: 3832; WAN024EYG; Start 92; Stop 116
ttctgtatatggtttctcttagcat

SEQ ID NO: 364621 - DNA, 25 bp, Artificial
  probe
  misc_feature (1)..(25): SEQ ID NO: 3832; WAN024EYG; Start 94; Stop 118
ctgtatatggtttctcttagcatga

SEQ ID NO: 364622 - DNA, 25 bp, Artificial
  probe
  misc_feature (1)..(25): SEQ ID NO: 3832; WAN024EYG; Start 93; Stop 117
tctgtatatggtttctcttagcatg

SEQ ID NO: 364623 - DNA, 25 bp, Artificial
  probe
  misc_feature (1)..(25): SEQ ID NO: 3832; WAN024EYG; Start 90; Stop 114
ctttctgtatatggtttctcttagc

SEQ ID NO: 364624 - DNA, 25 bp, Artificial
  probe
  misc_feature (1)..(25): SEQ ID NO: 3833; WAN024FW3; Start 812; Stop 836
caggtagaggaagtgattcattgac

SEQ ID NO: 364625 - DNA, 25 bp, Artificial
  probe
  misc_feature (1)..(25): SEQ ID NO: 3833; WAN024FW3; Start 1212; Stop 1236
tggagaacaattattacatcagagg

SEQ ID NO: 364626 - DNA, 25 bp, Artificial
  probe
  misc_feature (1)..(25): SEQ ID NO: 3833; WAN024FW3; Start 1213; Stop 1237
ggagaacaattattacatcagagga

SEQ ID NO: 364627 - DNA, 25 bp, Artificial
  probe
  misc_feature (1)..(25): SEQ ID NO: 3833; WAN024FW3; Start 1221; Stop 1245
attattacatcagaggaatggagtg

SEQ ID NO: 364628 - DNA, 25 bp, Artificial
  probe
  misc_feature (1)..(25): SEQ ID NO: 3833; WAN024FW3; Start 809; Stop 833
gagcaggtagaggaagtgattcatt

SEQ ID NO: 364629 - DNA, 25 bp, Artificial
  probe
  misc_feature (1)..(25): SEQ ID NO: 3833; WAN024FW3; Start 811; Stop 835
gcaggtagaggaagtgattcattga

SEQ ID NO: 364630 - DNA, 25 bp, Artificial
  probe
  misc_feature (1)..(25): SEQ ID NO: 3833; WAN024FW3; Start 810; Stop 834
agcaggtagaggaagtgattcattg

SEQ ID NO: 364631 - DNA, 25 bp, Artificial
  probe
  misc_feature (1)..(25): SEQ ID NO: 3833; WAN024FW3; Start 1218; Stop 1242
acaattattacatcagaggaatgga

SEQ ID NO: 364632 - DNA, 25 bp, Artificial
  probe
  misc_feature (1)..(25): SEQ ID NO: 3833; WAN024FW3; Start 1220; Stop 1244
aattattacatcagaggaatggagt

SEQ ID NO: 364633 - DNA, 25 bp, Artificial
  probe
  misc_feature (1)..(25): SEQ ID NO: 3833; WAN024FW3; Start 800; Stop 824
aagtagatggagcaggtagaggaag

SEQ ID NO: 364634 - DNA, 25 bp, Artificial
  probe
  misc_feature (1)..(25): SEQ ID NO: 3833; WAN024FW3; Start 497; Stop 521
gcgggtatagattgtatgtaggtag

SEQ ID NO: 364635 - DNA, 25 bp, Artificial
  probe
  misc_feature (1)..(25): SEQ ID NO: 3833; WAN024FW3; Start 496; Stop 520
agcgggtatagattgtatgtaggta

SEQ ID NO: 364636 - DNA, 25 bp, Artificial
  probe
  misc_feature (1)..(25): SEQ ID NO: 3833; WAN024FW3; Start 495; Stop 519
tagcgggtatagattgtatgtaggt

SEQ ID NO: 364637 - DNA, 25 bp, Artificial
  probe
  misc_feature (1)..(25): SEQ ID NO: 3833; WAN024FW3; Start 627; Stop 651
gataacgcaaggtcgaatagagatg

SEQ ID NO: 364638 - DNA, 25 bp, Artificial
  probe
  misc_feature (1)..(25): SEQ ID NO: 3833; WAN024FW3; Start 494; Stop 518
ttagcgggtatagattgtatgtagg

SEQ ID NO: 364639 - DNA, 25 bp, Artificial
  probe
  misc_feature (1)..(25): SEQ ID NO: 3833; WAN024FW3; Start 172; Stop 196
aatcgctcaaccaaatatcagtatc

SEQ ID NO: 364640 - DNA, 25 bp, Artificial
  probe
  misc_feature (1)..(25): SEQ ID NO: 3833; WAN024FW3; Start 1219; Stop 1243
caattattacatcagaggaatggag

SEQ ID NO: 364641 - DNA, 25 bp, Artificial
  probe
  misc_feature (1)..(25): SEQ ID NO: 3833; WAN024FW3; Start 633; Stop 657
gcaaggtcgaatagagatgattgtt

SEQ ID NO: 364642 - DNA, 25 bp, Artificial
  probe
  misc_feature (1)..(25): SEQ ID NO: 3833; WAN024FW3; Start 629; Stop 653
taacgcaaggtcgaatagagatgat

SEQ ID NO: 364643 - DNA, 25 bp, Artificial
  probe
  misc_feature (1)..(25): SEQ ID NO: 3833; WAN024FW3; Start 628; Stop 652
ataacgcaaggtcgaatagagatga

SEQ ID NO: 364644 - DNA, 25 bp, Artificial
  probe
  misc_feature (1)..(25): SEQ ID NO: 3833; WAN024FW3; Start 173; Stop 197
atcgctcaaccaaatatcagtatcg

SEQ ID NO: 364645 - DNA, 25 bp, Artificial
  probe
  misc_feature (1)..(25): SEQ ID NO: 3833; WAN024FW3; Start 498; Stop 522
cgggtatagattgtatgtaggtagt

SEQ ID NO: 364646 - DNA, 25 bp, Artificial
  probe
  misc_feature (1)..(25): SEQ ID NO: 3833; WAN024FW3; Start 1217; Stop 1241
aacaattattacatcagaggaatgg

SEQ ID NO: 364647 - DNA, 25 bp, Artificial
  probe
  misc_feature (1)..(25): SEQ ID NO: 3833; WAN024FW3; Start 657; Stop 681
tttgctaatttcaacgatagtttgc

SEQ ID NO: 364648 - DNA, 25 bp, Artificial
  probe
  misc_feature (1)..(25): SEQ ID NO: 3833; WAN024FW3; Start 171; Stop 195
taatcgctcaaccaaatatcagtat

SEQ ID NO: 364649 - DNA, 25 bp, Artificial
  probe
  misc_feature (1)..(25): SEQ ID NO: 3833; WAN024FW3; Start 170; Stop 194
ataatcgctcaaccaaatatcagta

SEQ ID NO: 364650 - DNA, 25 bp, Artificial
  probe
  misc_feature (1)..(25): SEQ ID NO: 3833; WAN024FW3; Start 169; Stop 193
tataatcgctcaaccaaatatcagt

SEQ ID NO: 364651 - DNA, 25 bp, Artificial
  probe
  misc_feature (1)..(25): SEQ ID NO: 3833; WAN024FW3; Start 167; Stop 191
actataatcgctcaaccaaatatca

SEQ ID NO: 364652 - DNA, 25 bp, Artificial
  probe
  misc_feature (1)..(25): SEQ ID NO: 3833; WAN024FW3; Start 175; Stop 199
cgctcaaccaaatatcagtatcgtt

SEQ ID NO: 364653 - DNA, 25 bp, Artificial
  probe
  misc_feature (1)..(25): SEQ ID NO: 3833; WAN024FW3; Start 626; Stop 650
ggataacgcaaggtcgaatagagat

SEQ ID NO: 364654 - DNA, 25 bp, Artificial
  probe
  misc_feature (1)..(25): SEQ ID NO: 3833; WAN024FW3; Start 630; Stop 654
aacgcaaggtcgaatagagatgatt

SEQ ID NO: 364655 - DNA, 25 bp, Artificial
  probe
  misc_feature (1)..(25): SEQ ID NO: 3833; WAN024FW3; Start 1214; Stop 1238
gagaacaattattacatcagaggaa

SEQ ID NO: 364656 - DNA, 25 bp, Artificial
  probe
  misc_feature (1)..(25): SEQ ID NO: 3833; WAN024FW3; Start 1211; Stop 1235
atggagaacaattattacatcagag

SEQ ID NO: 364657 - DNA, 25 bp, Artificial
  probe
  misc_feature (1)..(25): SEQ ID NO: 3834; WAN024G3R; Start 899; Stop 923
actactatatgagtgactggatgga

SEQ ID NO: 364658 - DNA, 25 bp, Artificial
  probe
  misc_feature (1)..(25): SEQ ID NO: 3834; WAN024G3R; Start 193; Stop 217
ctagcagaagagtatggtgtcaatg

SEQ ID NO: 364659 - DNA, 25 bp, Artificial
  probe
  misc_feature (1)..(25): SEQ ID NO: 3834; WAN024G3R; Start 898; Stop 922
aactactatatgagtgactggatgg

SEQ ID NO: 364660 - DNA, 25 bp, Artificial
  probe
  misc_feature (1)..(25): SEQ ID NO: 3834; WAN024G3R; Start 901; Stop 925
tactatatgagtgactggatggaag

SEQ ID NO: 364661 - DNA, 25 bp, Artificial
  probe
  misc_feature (1)..(25): SEQ ID NO: 3834; WAN024G3R; Start 900; Stop 924
ctactatatgagtgactggatggaa

SEQ ID NO: 364662 - DNA, 25 bp, Artificial
  probe
  misc_feature (1)..(25): SEQ ID NO: 3834; WAN024G3R; Start 1276; Stop 1300
ttaatggatgtcttctcatggtcaa

SEQ ID NO: 364663 - DNA, 25 bp, Artificial
  probe
  misc_feature (1)..(25): SEQ ID NO: 3834; WAN024G3R; Start 194; Stop 218
tagcagaagagtatggtgtcaatgg

SEQ ID NO: 364664 - DNA, 25 bp, Artificial
  probe
  misc_feature (1)..(25): SEQ ID NO: 3834; WAN024G3R; Start 902; Stop 926
actatatgagtgactggatggaagc

SEQ ID NO: 364665 - DNA, 25 bp, Artificial
  probe
  misc_feature (1)..(25): SEQ ID NO: 3834; WAN024G3R; Start 897; Stop 921
caactactatatgagtgactggatg

SEQ ID NO: 364666 - DNA, 25 bp, Artificial
  probe
  misc_feature (1)..(25): SEQ ID NO: 3834; WAN024G3R; Start 896; Stop 920
tcaactactatatgagtgactggat

SEQ ID NO: 364667 - DNA, 25 bp, Artificial
  probe
  misc_feature (1)..(25): SEQ ID NO: 3834; WAN024G3R; Start 895; Stop 919
atcaactactatatgagtgactgga

SEQ ID NO: 364668 - DNA, 25 bp, Artificial
  probe
  misc_feature (1)..(25): SEQ ID NO: 3834; WAN024G3R; Start 903; Stop 927
ctatatgagtgactggatggaagcc

SEQ ID NO: 364669 - DNA, 25 bp, Artificial
  probe
  misc_feature (1)..(25): SEQ ID NO: 3834; WAN024G3R; Start 1275; Stop 1299
attaatggatgtcttctcatggtca

SEQ ID NO: 364670 - DNA, 25 bp, Artificial
  probe
  misc_feature (1)..(25): SEQ ID NO: 3834; WAN024G3R; Start 904; Stop 928
tatatgagtgactggatggaagcct

SEQ ID NO: 364671 - DNA, 25 bp, Artificial
  probe
  misc_feature (1)..(25): SEQ ID NO: 3834; WAN024G3R; Start 894; Stop 918
aatcaactactatatgagtgactgg

SEQ ID NO: 364672 - DNA, 25 bp, Artificial
  probe
  misc_feature (1)..(25): SEQ ID NO: 3834; WAN024G3R; Start 1390; Stop 1414
gtagcggaaactcagattatagact

SEQ ID NO: 364673 - DNA, 25 bp, Artificial
  probe
  misc_feature (1)..(25): SEQ ID NO: 3834; WAN024G3R; Start 925; Stop 949
gcctttgatggagaaactgaaatta

SEQ ID NO: 364674 - DNA, 25 bp, Artificial
  probe
  misc_feature (1)..(25): SEQ ID NO: 3834; WAN024G3R; Start 892; Stop 916
ggaatcaactactatatgagtgact

SEQ ID NO: 364675 - DNA, 25 bp, Artificial
  probe
  misc_feature (1)..(25): SEQ ID NO: 3834; WAN024G3R; Start 891; Stop 915
aggaatcaactactatatgagtgac

SEQ ID NO: 364676 - DNA, 25 bp, Artificial
  probe
  misc_feature (1)..(25): SEQ ID NO: 3834; WAN024G3R; Start 923; Stop 947
aagcctttgatggagaaactgaaat

SEQ ID NO: 364677 - DNA, 25 bp, Artificial
  probe
  misc_feature (1)..(25): SEQ ID NO: 3834; WAN024G3R; Start 385; Stop 409
aatggagacttcttaaaccgtgaaa

SEQ ID NO: 364678 - DNA, 25 bp, Artificial
  probe
  misc_feature (1)..(25): SEQ ID NO: 3834; WAN024G3R; Start 384; Stop 408
aaatggagacttcttaaaccgtgaa

SEQ ID NO: 364679 - DNA, 25 bp, Artificial
  probe
  misc_feature (1)..(25): SEQ ID NO: 3834; WAN024G3R; Start 1035; Stop 1059
cacggattgggattggattatctac

SEQ ID NO: 364680 - DNA, 25 bp, Artificial
  probe
  misc_feature (1)..(25): SEQ ID NO: 3834; WAN024G3R; Start 383; Stop 407
caaatggagacttcttaaaccgtga

SEQ ID NO: 364681 - DNA, 25 bp, Artificial
  probe
  misc_feature (1)..(25): SEQ ID NO: 3834; WAN024G3R; Start 382; Stop 406
tcaaatggagacttcttaaaccgtg

SEQ ID NO: 364682 - DNA, 25 bp, Artificial
  probe
  misc_feature (1)..(25): SEQ ID NO: 3834; WAN024G3R; Start 924; Stop 948
agcctttgatggagaaactgaaatt

SEQ ID NO: 364683 - DNA, 25 bp, Artificial
  probe
  misc_feature (1)..(25): SEQ ID NO: 3834; WAN024G3R; Start 1384; Stop 1408
aagaaagtagcggaaactcagatta

SEQ ID NO: 364684 - DNA, 25 bp, Artificial
  probe
  misc_feature (1)..(25): SEQ ID NO: 3834; WAN024G3R; Start 1389; Stop 1413
agtagcggaaactcagattatagac

SEQ ID NO: 364685 - DNA, 25 bp, Artificial
  probe
  misc_feature (1)..(25): SEQ ID NO: 3834; WAN024G3R; Start 1385; Stop 1409
agaaagtagcggaaactcagattat

SEQ ID NO: 364686 - DNA, 25 bp, Artificial
  probe
  misc_feature (1)..(25): SEQ ID NO: 3834; WAN024G3R; Start 458; Stop 482
cagaagtaaactattggacaacctt

SEQ ID NO: 364687 - DNA, 25 bp, Artificial
  probe
  misc_feature (1)..(25): SEQ ID NO: 3834; WAN024G3R; Start 1391; Stop 1415
tagcggaaactcagattatagacta

SEQ ID NO: 364688 - DNA, 25 bp, Artificial
  probe
  misc_feature (1)..(25): SEQ ID NO: 3834; WAN024G3R; Start 905; Stop 929
atatgagtgactggatggaagcctt

SEQ ID NO: 364689 - DNA, 25 bp, Artificial
  probe
  misc_feature (1)..(25): SEQ ID NO: 3834; WAN024G3R; Start 379; Stop 403
cactcaaatggagacttcttaaacc

SEQ ID NO: 364690 - DNA, 25 bp, Artificial
  probe
  misc_feature (1)..(25): SEQ ID NO: 3835; WAN024DVC; Start 141; Stop 165
agatacggctaatgtagaactccta

SEQ ID NO: 364691 - DNA, 25 bp, Artificial
  probe
  misc_feature (1)..(25): SEQ ID NO: 3835; WAN024DVC; Start 620; Stop 644
ttaactatcttgccttggactatgg

SEQ ID NO: 364692 - DNA, 25 bp, Artificial
  probe
  misc_feature (1)..(25): SEQ ID NO: 3835; WAN024DVC; Start 144; Stop 168
tacggctaatgtagaactcctaatc

SEQ ID NO: 364693 - DNA, 25 bp, Artificial
  probe
  misc_feature (1)..(25): SEQ ID NO: 3835; WAN024DVC; Start 142; Stop 166
gatacggctaatgtagaactcctaa

SEQ ID NO: 364694 - DNA, 25 bp, Artificial
  probe
  misc_feature (1)..(25): SEQ ID NO: 3835; WAN024DVC; Start 621; Stop 645
taactatcttgccttggactatgga

SEQ ID NO: 364695 - DNA, 25 bp, Artificial
  probe
  misc_feature (1)..(25): SEQ ID NO: 3835; WAN024DVC; Start 149; Stop 173
ctaatgtagaactcctaatcggtgc

SEQ ID NO: 364696 - DNA, 25 bp, Artificial
  probe
  misc_feature (1)..(25): SEQ ID NO: 3835; WAN024DVC; Start 148; Stop 172
gctaatgtagaactcctaatcggtg

SEQ ID NO: 364697 - DNA, 25 bp, Artificial
  probe
  misc_feature (1)..(25): SEQ ID NO: 3835; WAN024DVC; Start 150; Stop 174
taatgtagaactcctaatcggtgct

SEQ ID NO: 364698 - DNA, 25 bp, Artificial
  probe
  misc_feature (1)..(25): SEQ ID NO: 3835; WAN024DVC; Start 143; Stop 167
atacggctaatgtagaactcctaat

SEQ ID NO: 364699 - DNA, 25 bp, Artificial
  probe
  misc_feature (1)..(25): SEQ ID NO: 3835; WAN024DVC; Start 137; Stop 161
caggagatacggctaatgtagaact

SEQ ID NO: 364700 - DNA, 25 bp, Artificial
  probe
  misc_feature (1)..(25): SEQ ID NO: 3835; WAN024DVC; Start 1096; Stop 1120
aaggctaagttgactggtaagatga

SEQ ID NO: 364701 - DNA, 25 bp, Artificial
  probe
  misc_feature (1)..(25): SEQ ID NO: 3835; WAN024DVC; Start 1092; Stop 1116
ctacaaggctaagttgactggtaag

SEQ ID NO: 364702 - DNA, 25 bp, Artificial
  probe
  misc_feature (1)..(25): SEQ ID NO: 3835; WAN024DVC; Start 147; Stop 171
ggctaatgtagaactcctaatcggt

SEQ ID NO: 364703 - DNA, 25 bp, Artificial
  probe
  misc_feature (1)..(25): SEQ ID NO: 3835; WAN024DVC; Start 1093; Stop 1117
tacaaggctaagttgactggtaaga

SEQ ID NO: 364704 - DNA, 25 bp, Artificial
  probe
  misc_feature (1)..(25): SEQ ID NO: 3835; WAN024DVC; Start 15; Stop 39
cttattactagccagtctatgtgcc

SEQ ID NO: 364705 - DNA, 25 bp, Artificial
  probe
  misc_feature (1)..(25): SEQ ID NO: 3835; WAN024DVC; Start 1095; Stop 1119
caaggctaagttgactggtaagatg

SEQ ID NO: 364706 - DNA, 25 bp, Artificial
  probe
  misc_feature (1)..(25): SEQ ID NO: 3835; WAN024DVC; Start 1091; Stop 1115
actacaaggctaagttgactggtaa

SEQ ID NO: 364707 - DNA, 25 bp, Artificial
  probe
  misc_feature (1)..(25): SEQ ID NO: 3835; WAN024DVC; Start 622; Stop 646
aactatcttgccttggactatggac

SEQ ID NO: 364708 - DNA, 25 bp, Artificial
  probe
  misc_feature (1)..(25): SEQ ID NO: 3835; WAN024DVC; Start 145; Stop 169
acggctaatgtagaactcctaatcg

SEQ ID NO: 364709 - DNA, 25 bp, Artificial
  probe
  misc_feature (1)..(25): SEQ ID NO: 3835; WAN024DVC; Start 17; Stop 41
tattactagccagtctatgtgcctt

SEQ ID NO: 364710 - DNA, 25 bp, Artificial
  probe
  misc_feature (1)..(25): SEQ ID NO: 3835; WAN024DVC; Start 16; Stop 40
ttattactagccagtctatgtgcct

SEQ ID NO: 364711 - DNA, 25 bp, Artificial
  probe
  misc_feature (1)..(25): SEQ ID NO: 3835; WAN024DVC; Start 140; Stop 164
gagatacggctaatgtagaactcct

SEQ ID NO: 364712 - DNA, 25 bp, Artificial
  probe
  misc_feature (1)..(25): SEQ ID NO: 3835; WAN024DVC; Start 138; Stop 162
aggagatacggctaatgtagaactc

SEQ ID NO: 364713 - DNA, 25 bp, Artificial
  probe
  misc_feature (1)..(25): SEQ ID NO: 3835; WAN024DVC; Start 1094; Stop 1118
acaaggctaagttgactggtaagat

SEQ ID NO: 364714 - DNA, 25 bp, Artificial
  probe
  misc_feature (1)..(25): SEQ ID NO: 3835; WAN024DVC; Start 1097; Stop 1121
aggctaagttgactggtaagatgac

SEQ ID NO: 364715 - DNA, 25 bp, Artificial
  probe
  misc_feature (1)..(25): SEQ ID NO: 3835; WAN024DVC; Start 624; Stop 648
ctatcttgccttggactatggactc

SEQ ID NO: 364716 - DNA, 25 bp, Artificial
  probe
  misc_feature (1)..(25): SEQ ID NO: 3835; WAN024DVC; Start 1090; Stop 1114
gactacaaggctaagttgactggta

SEQ ID NO: 364717 - DNA, 25 bp, Artificial
  probe
  misc_feature (1)..(25): SEQ ID NO: 3835; WAN024DVC; Start 151; Stop 175
aatgtagaactcctaatcggtgctg

SEQ ID NO: 364718 - DNA, 25 bp, Artificial
  probe
  misc_feature (1)..(25): SEQ ID NO: 3835; WAN024DVC; Start 146; Stop 170
cggctaatgtagaactcctaatcgg

SEQ ID NO: 364719 - DNA, 25 bp, Artificial
  probe
  misc_feature (1)..(25): SEQ ID NO: 3835; WAN024DVC; Start 623; Stop 647
actatcttgccttggactatggact

SEQ ID NO: 364720 - DNA, 25 bp, Artificial
  probe
  misc_feature (1)..(25): SEQ ID NO: 3835; WAN024DVC; Start 18; Stop 42
attactagccagtctatgtgccttg

SEQ ID NO: 364721 - DNA, 25 bp, Artificial
  probe
  misc_feature (1)..(25): SEQ ID NO: 3835; WAN024DVC; Start 1126; Stop 1150
gctgagtacaaggcttactatacaa

SEQ ID NO: 364722 - DNA, 25 bp, Artificial
  probe
  misc_feature (1)..(25): SEQ ID NO: 3835; WAN024DVC; Start 1088; Stop 1112
ttgactacaaggctaagttgactgg

SEQ ID NO: 364723 - DNA, 25 bp, Artificial
  probe
  misc_feature (1)..(25): SEQ ID NO: 3836; WAN024FLZ; Start 50; Stop 74
tagttgtgttaagtcatagtgcgta

SEQ ID NO: 364724 - DNA, 25 bp, Artificial
  probe
  misc_feature (1)..(25): SEQ ID NO: 3836; WAN024FLZ; Start 52; Stop 76
gttgtgttaagtcatagtgcgtatt

SEQ ID NO: 364725 - DNA, 25 bp, Artificial
  probe
  misc_feature (1)..(25): SEQ ID NO: 3836; WAN024FLZ; Start 51; Stop 75
agttgtgttaagtcatagtgcgtat

SEQ ID NO: 364726 - DNA, 25 bp, Artificial
  probe
  misc_feature (1)..(25): SEQ ID NO: 3836; WAN024FLZ; Start 49; Stop 73
ttagttgtgttaagtcatagtgcgt

SEQ ID NO: 364727 - DNA, 25 bp, Artificial
  probe
  misc_feature (1)..(25): SEQ ID NO: 3836; WAN024FLZ; Start 89; Stop 113
gcaattatggtggaatggattatca

SEQ ID NO: 364728 - DNA, 25 bp, Artificial
  probe
  misc_feature (1)..(25): SEQ ID NO: 3836; WAN024FLZ; Start 88; Stop 112
agcaattatggtggaatggattatc

SEQ ID NO: 364729 - DNA, 25 bp, Artificial
  probe
  misc_feature (1)..(25): SEQ ID NO: 3836; WAN024FLZ; Start 87; Stop 111
gagcaattatggtggaatggattat

SEQ ID NO: 364730 - DNA, 25 bp, Artificial
  probe
  misc_feature (1)..(25): SEQ ID NO: 3836; WAN024FLZ; Start 86; Stop 110
cgagcaattatggtggaatggatta

SEQ ID NO: 364731 - DNA, 25 bp, Artificial
  probe
  misc_feature (1)..(25): SEQ ID NO: 3836; WAN024FLZ; Start 93; Stop 117
ttatggtggaatggattatcaacaa

SEQ ID NO: 364732 - DNA, 25 bp, Artificial
  probe
  misc_feature (1)..(25): SEQ ID NO: 3836; WAN024FLZ; Start 53; Stop 77
ttgtgttaagtcatagtgcgtatta

SEQ ID NO: 364733 - DNA, 25 bp, Artificial
  probe
  misc_feature (1)..(25): SEQ ID NO: 3836; WAN024FLZ; Start 95; Stop 119
atggtggaatggattatcaacaata

SEQ ID NO: 364734 - DNA, 25 bp, Artificial
  probe
  misc_feature (1)..(25): SEQ ID NO: 3836; WAN024FLZ; Start 94; Stop 118
tatggtggaatggattatcaacaat

SEQ ID NO: 364735 - DNA, 25 bp, Artificial
  probe
  misc_feature (1)..(25): SEQ ID NO: 3836; WAN024FLZ; Start 92; Stop 116
attatggtggaatggattatcaaca

SEQ ID NO: 364736 - DNA, 25 bp, Artificial
  probe
  misc_feature (1)..(25): SEQ ID NO: 3836; WAN024FLZ; Start 96; Stop 120
tggtggaatggattatcaacaatat

SEQ ID NO: 364737 - DNA, 25 bp, Artificial
  probe
  misc_feature (1)..(25): SEQ ID NO: 3836; WAN024FLZ; Start 54; Stop 78
tgtgttaagtcatagtgcgtattat

SEQ ID NO: 364738 - DNA, 25 bp, Artificial
  probe
  misc_feature (1)..(25): SEQ ID NO: 3836; WAN024FLZ; Start 391; Stop 415
actggtcaattcttgttattaggaa

SEQ ID NO: 364739 - DNA, 25 bp, Artificial
  probe
  misc_feature (1)..(25): SEQ ID NO: 3836; WAN024FLZ; Start 390; Stop 414
aactggtcaattcttgttattagga

SEQ ID NO: 364740 - DNA, 25 bp, Artificial
  probe
  misc_feature (1)..(25): SEQ ID NO: 3836; WAN024FLZ; Start 81; Stop 105
aatatcgagcaattatggtggaatg

SEQ ID NO: 364741 - DNA, 25 bp, Artificial
  probe
  misc_feature (1)..(25): SEQ ID NO: 3836; WAN024FLZ; Start 380; Stop 404
ggagagctataactggtcaattctt

SEQ ID NO: 364742 - DNA, 25 bp, Artificial
  probe
  misc_feature (1)..(25): SEQ ID NO: 3836; WAN024FLZ; Start 82; Stop 106
atatcgagcaattatggtggaatgg

SEQ ID NO: 364743 - DNA, 25 bp, Artificial
  probe
  misc_feature (1)..(25): SEQ ID NO: 3836; WAN024FLZ; Start 382; Stop 406
agagctataactggtcaattcttgt

SEQ ID NO: 364744 - DNA, 25 bp, Artificial
  probe
  misc_feature (1)..(25): SEQ ID NO: 3836; WAN024FLZ; Start 378; Stop 402
ttggagagctataactggtcaattc

SEQ ID NO: 364745 - DNA, 25 bp, Artificial
  probe
  misc_feature (1)..(25): SEQ ID NO: 3836; WAN024FLZ; Start 91; Stop 115
aattatggtggaatggattatcaac

SEQ ID NO: 364746 - DNA, 25 bp, Artificial
  probe
  misc_feature (1)..(25): SEQ ID NO: 3836; WAN024FLZ; Start 90; Stop 114
caattatggtggaatggattatcaa

SEQ ID NO: 364747 - DNA, 25 bp, Artificial
  probe
  misc_feature (1)..(25): SEQ ID NO: 3836; WAN024FLZ; Start 381; Stop 405
gagagctataactggtcaattcttg

SEQ ID NO: 364748 - DNA, 25 bp, Artificial
  probe
  misc_feature (1)..(25): SEQ ID NO: 3836; WAN024FLZ; Start 379; Stop 403
tggagagctataactggtcaattct

SEQ ID NO: 364749 - DNA, 25 bp, Artificial
  probe
  misc_feature (1)..(25): SEQ ID NO: 3836; WAN024FLZ; Start 383; Stop 407
gagctataactggtcaattcttgtt

SEQ ID NO: 364750 - DNA, 25 bp, Artificial
  probe
  misc_feature (1)..(25): SEQ ID NO: 3836; WAN024FLZ; Start 48; Stop 72
tttagttgtgttaagtcatagtgcg

SEQ ID NO: 364751 - DNA, 25 bp, Artificial
  probe
  misc_feature (1)..(25): SEQ ID NO: 3836; WAN024FLZ; Start 83; Stop 107
tatcgagcaattatggtggaatgga

SEQ ID NO: 364752 - DNA, 25 bp, Artificial
  probe
  misc_feature (1)..(25): SEQ ID NO: 3836; WAN024FLZ; Start 197; Stop 221
cattatttatggctatatcgggtgt

SEQ ID NO: 364753 - DNA, 25 bp, Artificial
  probe
  misc_feature (1)..(25): SEQ ID NO: 3836; WAN024FLZ; Start 993; Stop 1017
tttgggattagtctttacattgcta

SEQ ID NO: 364754 - DNA, 25 bp, Artificial
  probe
  misc_feature (1)..(25): SEQ ID NO: 3836; WAN024FLZ; Start 97; Stop 121
ggtggaatggattatcaacaatatt

SEQ ID NO: 364755 - DNA, 25 bp, Artificial
  probe
  misc_feature (1)..(25): SEQ ID NO: 3836; WAN024FLZ; Start 995; Stop 1019
tgggattagtctttacattgctatt

SEQ ID NO: 364756 - DNA, 25 bp, Artificial
  probe
  misc_feature (1)..(25): SEQ ID NO: 3837; WAN024DRH; Start 27; Stop 51
ctttagtttcttcgtcaagtttcct

SEQ ID NO: 364757 - DNA, 25 bp, Artificial
  probe
  misc_feature (1)..(25): SEQ ID NO: 3837; WAN024DRH; Start 31; Stop 55
agtttcttcgtcaagtttcctattt

SEQ ID NO: 364758 - DNA, 25 bp, Artificial
  probe
  misc_feature (1)..(25): SEQ ID NO: 3837; WAN024DRH; Start 28; Stop 52
tttagtttcttcgtcaagtttccta

SEQ ID NO: 364759 - DNA, 25 bp, Artificial
  probe
  misc_feature (1)..(25): SEQ ID NO: 3837; WAN024DRH; Start 30; Stop 54
tagtttcttcgtcaagtttcctatt

SEQ ID NO: 364760 - DNA, 25 bp, Artificial
  probe
  misc_feature (1)..(25): SEQ ID NO: 3837; WAN024DRH; Start 29; Stop 53
ttagtttcttcgtcaagtttcctat

SEQ ID NO: 364761 - DNA, 25 bp, Artificial
  probe
  misc_feature (1)..(25): SEQ ID NO: 3837; WAN024DRH; Start 26; Stop 50
actttagtttcttcgtcaagtttcc

SEQ ID NO: 364762 - DNA, 25 bp, Artificial
  probe
  misc_feature (1)..(25): SEQ ID NO: 3837; WAN024DRH; Start 96; Stop 120
agatgcttttgttacaccaggaatt

SEQ ID NO: 364763 - DNA, 25 bp, Artificial
  probe
  misc_feature (1)..(25): SEQ ID NO: 3837; WAN024DRH; Start 89; Stop 113
attaccaagatgcttttgttacacc

SEQ ID NO: 364764 - DNA, 25 bp, Artificial
  probe
  misc_feature (1)..(25): SEQ ID NO: 3837; WAN024DRH; Start 95; Stop 119
aagatgcttttgttacaccaggaat

SEQ ID NO: 364765 - DNA, 25 bp, Artificial
  probe
  misc_feature (1)..(25): SEQ ID NO: 3837; WAN024DRH; Start 90; Stop 114
ttaccaagatgcttttgttacacca

SEQ ID NO: 364766 - DNA, 25 bp, Artificial
  probe
  misc_feature (1)..(25): SEQ ID NO: 3837; WAN024DRH; Start 32; Stop 56
gtttcttcgtcaagtttcctatttt

SEQ ID NO: 364767 - DNA, 25 bp, Artificial
  probe
  misc_feature (1)..(25): SEQ ID NO: 3837; WAN024DRH; Start 91; Stop 115
taccaagatgcttttgttacaccag

SEQ ID NO: 364768 - DNA, 25 bp, Artificial
  probe
  misc_feature (1)..(25): SEQ ID NO: 3837; WAN024DRH; Start 88; Stop 112
aattaccaagatgcttttgttacac

SEQ ID NO: 364769 - DNA, 25 bp, Artificial
  probe
  misc_feature (1)..(25): SEQ ID NO: 3837; WAN024DRH; Start 94; Stop 118
caagatgcttttgttacaccaggaa

SEQ ID NO: 364770 - DNA, 25 bp, Artificial
  probe
  misc_feature (1)..(25): SEQ ID NO: 3837; WAN024DRH; Start 87; Stop 111
aaattaccaagatgcttttgttaca

SEQ ID NO: 364771 - DNA, 25 bp, Artificial
  probe
  misc_feature (1)..(25): SEQ ID NO: 3837; WAN024DRH; Start 84; Stop 108
cttaaattaccaagatgcttttgtt

SEQ ID NO: 364772 - DNA, 25 bp, Artificial
  probe
  misc_feature (1)..(25): SEQ ID NO: 3837; WAN024DRH; Start 93; Stop 117
ccaagatgcttttgttacaccagga

SEQ ID NO: 364773 - DNA, 25 bp, Artificial
  probe
  misc_feature (1)..(25): SEQ ID NO: 3837; WAN024DRH; Start 92; Stop 116
accaagatgcttttgttacaccagg

SEQ ID NO: 364774 - DNA, 25 bp, Artificial
  probe
  misc_feature (1)..(25): SEQ ID NO: 3837; WAN024DRH; Start 86; Stop 110
taaattaccaagatgcttttgttac

SEQ ID NO: 364775 - DNA, 25 bp, Artificial
  probe
  misc_feature (1)..(25): SEQ ID NO: 3837; WAN024DRH; Start 83; Stop 107
tcttaaattaccaagatgcttttgt

SEQ ID NO: 364776 - DNA, 25 bp, Artificial
  probe
  misc_feature (1)..(25): SEQ ID NO: 3837; WAN024DRH; Start 85; Stop 109
ttaaattaccaagatgcttttgtta

SEQ ID NO: 364777 - DNA, 25 bp, Artificial
  probe
  misc_feature (1)..(25): SEQ ID NO: 3837; WAN024DRH; Start 25; Stop 49
aactttagtttcttcgtcaagtttc

SEQ ID NO: 364778 - DNA, 25 bp, Artificial
  probe
  misc_feature (1)..(25): SEQ ID NO: 3837; WAN024DRH; Start 78; Stop 102
tgatatcttaaattaccaagatgct

SEQ ID NO: 364779 - DNA, 25 bp, Artificial
  probe
  misc_feature (1)..(25): SEQ ID NO: 3837; WAN024DRH; Start 77; Stop 101
ttgatatcttaaattaccaagatgc

SEQ ID NO: 364780 - DNA, 25 bp, Artificial
  probe
  misc_feature (1)..(25): SEQ ID NO: 3837; WAN024DRH; Start 82; Stop 106
atcttaaattaccaagatgcttttg

SEQ ID NO: 364781 - DNA, 25 bp, Artificial
  probe
  misc_feature (1)..(25): SEQ ID NO: 3837; WAN024DRH; Start 79; Stop 103
gatatcttaaattaccaagatgctt

SEQ ID NO: 364782 - DNA, 25 bp, Artificial
  probe
  misc_feature (1)..(25): SEQ ID NO: 3837; WAN024DRH; Start 81; Stop 105
tatcttaaattaccaagatgctttt

SEQ ID NO: 364783 - DNA, 25 bp, Artificial
  probe
  misc_feature (1)..(25): SEQ ID NO: 3838; WAN0249Y2; Start 62; Stop 86
tgtgttcttacggactttgtatctt

SEQ ID NO: 364784 - DNA, 25 bp, Artificial
  probe
  misc_feature (1)..(25): SEQ ID NO: 3838; WAN0249Y2; Start 61; Stop 85
ttgtgttcttacggactttgtatct

SEQ ID NO: 364785 - DNA, 25 bp, Artificial
  probe
  misc_feature (1)..(25): SEQ ID NO: 3838; WAN0249Y2; Start 60; Stop 84
tttgtgttcttacggactttgtatc

SEQ ID NO: 364786 - DNA, 25 bp, Artificial
  probe
  misc_feature (1)..(25): SEQ ID NO: 3838; WAN0249Y2; Start 59; Stop 83
ctttgtgttcttacggactttgtat

SEQ ID NO: 364787 - DNA, 25 bp, Artificial
  probe
  misc_feature (1)..(25): SEQ ID NO: 3838; WAN0249Y2; Start 58; Stop 82
actttgtgttcttacggactttgta

SEQ ID NO: 364788 - DNA, 25 bp, Artificial
  probe
  misc_feature (1)..(25): SEQ ID NO: 3838; WAN0249Y2; Start 63; Stop 87
gtgttcttacggactttgtatctta

SEQ ID NO: 364789 - DNA, 25 bp, Artificial
  probe
  misc_feature (1)..(25): SEQ ID NO: 3838; WAN0249Y2; Start 64; Stop 88
tgttcttacggactttgtatcttag

SEQ ID NO: 364790 - DNA, 25 bp, Artificial
  probe
  misc_feature (1)..(25): SEQ ID NO: 3838; WAN0249Y2; Start 69; Stop 93
ttacggactttgtatcttagacagg

SEQ ID NO: 364791 - DNA, 25 bp, Artificial
  probe
  misc_feature (1)..(25): SEQ ID NO: 3838; WAN0249Y2; Start 70; Stop 94
tacggactttgtatcttagacagga

SEQ ID NO: 364792 - DNA, 25 bp, Artificial
  probe
  misc_feature (1)..(25): SEQ ID NO: 3838; WAN0249Y2; Start 73; Stop 97
ggactttgtatcttagacaggagta

SEQ ID NO: 364793 - DNA, 25 bp, Artificial
  probe
  misc_feature (1)..(25): SEQ ID NO: 3838; WAN0249Y2; Start 67; Stop 91
tcttacggactttgtatcttagaca

SEQ ID NO: 364794 - DNA, 25 bp, Artificial
  probe
  misc_feature (1)..(25): SEQ ID NO: 3838; WAN0249Y2; Start 68; Stop 92
cttacggactttgtatcttagacag

SEQ ID NO: 364795 - DNA, 25 bp, Artificial
  probe
  misc_feature (1)..(25): SEQ ID NO: 3838; WAN0249Y2; Start 66; Stop 90
ttcttacggactttgtatcttagac

SEQ ID NO: 364796 - DNA, 25 bp, Artificial
  probe
  misc_feature (1)..(25): SEQ ID NO: 3838; WAN0249Y2; Start 65; Stop 89
gttcttacggactttgtatcttaga

SEQ ID NO: 364797 - DNA, 25 bp, Artificial
  probe
  misc_feature (1)..(25): SEQ ID NO: 3838; WAN0249Y2; Start 72; Stop 96
cggactttgtatcttagacaggagt

SEQ ID NO: 364798 - DNA, 25 bp, Artificial
  probe
  misc_feature (1)..(25): SEQ ID NO: 3838; WAN0249Y2; Start 71; Stop 95
acggactttgtatcttagacaggag

SEQ ID NO: 364799 - DNA, 25 bp, Artificial
  probe
  misc_feature (1)..(25): SEQ ID NO: 3838; WAN0249Y2; Start 55; Stop 79
ttcactttgtgttcttacggacttt

SEQ ID NO: 364800 - DNA, 25 bp, Artificial
  probe
  misc_feature (1)..(25): SEQ ID NO: 3838; WAN0249Y2; Start 54; Stop 78
tttcactttgtgttcttacggactt

SEQ ID NO: 364801 - DNA, 25 bp, Artificial
  probe
  misc_feature (1)..(25): SEQ ID NO: 3838; WAN0249Y2; Start 75; Stop 99
actttgtatcttagacaggagtaga

SEQ ID NO: 364802 - DNA, 25 bp, Artificial
  probe
  misc_feature (1)..(25): SEQ ID NO: 3838; WAN0249Y2; Start 25; Stop 49
agtagacacttcttgattggaattc

SEQ ID NO: 364803 - DNA, 25 bp, Artificial
  probe
  misc_feature (1)..(25): SEQ ID NO: 3838; WAN0249Y2; Start 24; Stop 48
aagtagacacttcttgattggaatt

SEQ ID NO: 364804 - DNA, 25 bp, Artificial
  probe
  misc_feature (1)..(25): SEQ ID NO: 3838; WAN0249Y2; Start 74; Stop 98
gactttgtatcttagacaggagtag

SEQ ID NO: 364805 - DNA, 25 bp, Artificial
  probe
  misc_feature (1)..(25): SEQ ID NO: 3838; WAN0249Y2; Start 56; Stop 80
tcactttgtgttcttacggactttg

SEQ ID NO: 364806 - DNA, 25 bp, Artificial
  probe
  misc_feature (1)..(25): SEQ ID NO: 3838; WAN0249Y2; Start 57; Stop 81
cactttgtgttcttacggactttgt

SEQ ID NO: 364807 - DNA, 25 bp, Artificial
  probe
  misc_feature (1)..(25): SEQ ID NO: 3838; WAN0249Y2; Start 76; Stop 100
ctttgtatcttagacaggagtagag

SEQ ID NO: 364808 - DNA, 25 bp, Artificial
  probe
  misc_feature (1)..(25): SEQ ID NO: 3838; WAN0249Y2; Start 11; Stop 35
tagttcttccaagaagtagacactt

SEQ ID NO: 364809 - DNA, 25 bp, Artificial
  probe
  misc_feature (1)..(25): SEQ ID NO: 3838; WAN0249Y2; Start 10; Stop 34
atagttcttccaagaagtagacact

SEQ ID NO: 364810 - DNA, 25 bp, Artificial
  probe
  misc_feature (1)..(25): SEQ ID NO: 3838; WAN0249Y2; Start 9; Stop 33
gatagttcttccaagaagtagacac

SEQ ID NO: 364811 - DNA, 25 bp, Artificial
  probe
  misc_feature (1)..(25): SEQ ID NO: 3838; WAN0249Y2; Start 8; Stop 32
agatagttcttccaagaagtagaca

SEQ ID NO: 364812 - DNA, 25 bp, Artificial
  probe
  misc_feature (1)..(25): SEQ ID NO: 3838; WAN0249Y2; Start 7; Stop 31
aagatagttcttccaagaagtagac

SEQ ID NO: 364813 - DNA, 25 bp, Artificial
  probe
  misc_feature (1)..(25): SEQ ID NO: 3838; WAN0249Y2; Start 52; Stop 76
attttcactttgtgttcttacggac

SEQ ID NO: 364814 - DNA, 25 bp, Artificial
  probe
  misc_feature (1)..(25): SEQ ID NO: 3838; WAN0249Y2; Start 53; Stop 77
ttttcactttgtgttcttacggact

SEQ ID NO: 364815 - DNA, 25 bp, Artificial
  probe
  misc_feature (1)..(25): SEQ ID NO: 3838; WAN0249Y2; Start 51; Stop 75
tattttcactttgtgttcttacgga

SEQ ID NO: 364816 - DNA, 25 bp, Artificial
  probe
  misc_feature (1)..(25): SEQ ID NO: 3839; WAN024FQ7; Start 590; Stop 614
aaggacatgctattcttggattgac

SEQ ID NO: 364817 - DNA, 25 bp, Artificial
  probe
  misc_feature (1)..(25): SEQ ID NO: 3839; WAN024FQ7; Start 145; Stop 169
caagccgtatctctattagtcgaag

SEQ ID NO: 364818 - DNA, 25 bp, Artificial
  probe
  misc_feature (1)..(25): SEQ ID NO: 3839; WAN024FQ7; Start 149; Stop 173
ccgtatctctattagtcgaagaagg

SEQ ID NO: 364819 - DNA, 25 bp, Artificial
  probe
  misc_feature (1)..(25): SEQ ID NO: 3839; WAN024FQ7; Start 151; Stop 175
gtatctctattagtcgaagaaggcg

SEQ ID NO: 364820 - DNA, 25 bp, Artificial
  probe
  misc_feature (1)..(25): SEQ ID NO: 3839; WAN024FQ7; Start 150; Stop 174
cgtatctctattagtcgaagaaggc

SEQ ID NO: 364821 - DNA, 25 bp, Artificial
  probe
  misc_feature (1)..(25): SEQ ID NO: 3839; WAN024FQ7; Start 148; Stop 172
gccgtatctctattagtcgaagaag

SEQ ID NO: 364822 - DNA, 25 bp, Artificial
  probe
  misc_feature (1)..(25): SEQ ID NO: 3839; WAN024FQ7; Start 152; Stop 176
tatctctattagtcgaagaaggcgt

SEQ ID NO: 364823 - DNA, 25 bp, Artificial
  probe
  misc_feature (1)..(25): SEQ ID NO: 3839; WAN024FQ7; Start 147; Stop 171
agccgtatctctattagtcgaagaa

SEQ ID NO: 364824 - DNA, 25 bp, Artificial
  probe
  misc_feature (1)..(25): SEQ ID NO: 3839; WAN024FQ7; Start 146; Stop 170
aagccgtatctctattagtcgaaga

SEQ ID NO: 364825 - DNA, 25 bp, Artificial
  probe
  misc_feature (1)..(25): SEQ ID NO: 3839; WAN024FQ7; Start 144; Stop 168
ccaagccgtatctctattagtcgaa

SEQ ID NO: 364826 - DNA, 25 bp, Artificial
  probe
  misc_feature (1)..(25): SEQ ID NO: 3839; WAN024FQ7; Start 257; Stop 281
ctgaaattgtcaaatcccaaggtaa

SEQ ID NO: 364827 - DNA, 25 bp, Artificial
  probe
  misc_feature (1)..(25): SEQ ID NO: 3839; WAN024FQ7; Start 254; Stop 278
ttactgaaattgtcaaatcccaagg

SEQ ID NO: 364828 - DNA, 25 bp, Artificial
  probe
  misc_feature (1)..(25): SEQ ID NO: 3839; WAN024FQ7; Start 153; Stop 177
atctctattagtcgaagaaggcgtc

SEQ ID NO: 364829 - DNA, 25 bp, Artificial
  probe
  misc_feature (1)..(25): SEQ ID NO: 3839; WAN024FQ7; Start 256; Stop 280
actgaaattgtcaaatcccaaggta

SEQ ID NO: 364830 - DNA, 25 bp, Artificial
  probe
  misc_feature (1)..(25): SEQ ID NO: 3839; WAN024FQ7; Start 255; Stop 279
tactgaaattgtcaaatcccaaggt

SEQ ID NO: 364831 - DNA, 25 bp, Artificial
  probe
  misc_feature (1)..(25): SEQ ID NO: 3839; WAN024FQ7; Start 471; Stop 495
aatcaccagtcatttcttccaaacc

SEQ ID NO: 364832 - DNA, 25 bp, Artificial
  probe
  misc_feature (1)..(25): SEQ ID NO: 3839; WAN024FQ7; Start 258; Stop 282
tgaaattgtcaaatcccaaggtaaa

SEQ ID NO: 364833 - DNA, 25 bp, Artificial
  probe
  misc_feature (1)..(25): SEQ ID NO: 3839; WAN024FQ7; Start 470; Stop 494
aaatcaccagtcatttcttccaaac

SEQ ID NO: 364834 - DNA, 25 bp, Artificial
  probe
  misc_feature (1)..(25): SEQ ID NO: 3839; WAN024FQ7; Start 259; Stop 283
gaaattgtcaaatcccaaggtaaag

SEQ ID NO: 364835 - DNA, 25 bp, Artificial
  probe
  misc_feature (1)..(25): SEQ ID NO: 3839; WAN024FQ7; Start 589; Stop 613
aaaggacatgctattcttggattga

SEQ ID NO: 364836 - DNA, 25 bp, Artificial
  probe
  misc_feature (1)..(25): SEQ ID NO: 3839; WAN024FQ7; Start 472; Stop 496
atcaccagtcatttcttccaaacct

SEQ ID NO: 364837 - DNA, 25 bp, Artificial
  probe
  misc_feature (1)..(25): SEQ ID NO: 3839; WAN024FQ7; Start 253; Stop 277
tttactgaaattgtcaaatcccaag

SEQ ID NO: 364838 - DNA, 25 bp, Artificial
  probe
  misc_feature (1)..(25): SEQ ID NO: 3839; WAN024FQ7; Start 85; Stop 109
aggcttcccagtgaaagagatttag

SEQ ID NO: 364839 - DNA, 25 bp, Artificial
  probe
  misc_feature (1)..(25): SEQ ID NO: 3839; WAN024FQ7; Start 84; Stop 108
gaggcttcccagtgaaagagattta

SEQ ID NO: 364840 - DNA, 25 bp, Artificial
  probe
  misc_feature (1)..(25): SEQ ID NO: 3839; WAN024FQ7; Start 97; Stop 121
gaaagagatttagctgagcagtttg

SEQ ID NO: 364841 - DNA, 25 bp, Artificial
  probe
  misc_feature (1)..(25): SEQ ID NO: 3839; WAN024FQ7; Start 154; Stop 178
tctctattagtcgaagaaggcgtct

SEQ ID NO: 364842 - DNA, 25 bp, Artificial
  probe
  misc_feature (1)..(25): SEQ ID NO: 3839; WAN024FQ7; Start 473; Stop 497
tcaccagtcatttcttccaaacctt

SEQ ID NO: 364843 - DNA, 25 bp, Artificial
  probe
  misc_feature (1)..(25): SEQ ID NO: 3839; WAN024FQ7; Start 96; Stop 120
tgaaagagatttagctgagcagttt

SEQ ID NO: 364844 - DNA, 25 bp, Artificial
  probe
  misc_feature (1)..(25): SEQ ID NO: 3839; WAN024FQ7; Start 157; Stop 181
ctattagtcgaagaaggcgtcttag

SEQ ID NO: 364845 - DNA, 25 bp, Artificial
  probe
  misc_feature (1)..(25): SEQ ID NO: 3839; WAN024FQ7; Start 158; Stop 182
tattagtcgaagaaggcgtcttaga

SEQ ID NO: 364846 - DNA, 25 bp, Artificial
  probe
  misc_feature (1)..(25): SEQ ID NO: 3839; WAN024FQ7; Start 156; Stop 180
tctattagtcgaagaaggcgtctta

SEQ ID NO: 364847 - DNA, 25 bp, Artificial
  probe
  misc_feature (1)..(25): SEQ ID NO: 3839; WAN024FQ7; Start 474; Stop 498
caccagtcatttcttccaaaccttg

SEQ ID NO: 364848 - DNA, 25 bp, Artificial
  probe
  misc_feature (1)..(25): SEQ ID NO: 3839; WAN024FQ7; Start 95; Stop 119
gtgaaagagatttagctgagcagtt

SEQ ID NO: 364849 - DNA, 25 bp, Artificial
  probe
  misc_feature (1)..(25): SEQ ID NO: 3840; WAN024C9G; Start 44; Stop 68
acggatattctttagagtatgctgc

SEQ ID NO: 364850 - DNA, 25 bp, Artificial
  probe
  misc_feature (1)..(25): SEQ ID NO: 3840; WAN024C9G; Start 43; Stop 67
aacggatattctttagagtatgctg

SEQ ID NO: 364851 - DNA, 25 bp, Artificial
  probe
  misc_feature (1)..(25): SEQ ID NO: 3840; WAN024C9G; Start 42; Stop 66
aaacggatattctttagagtatgct

SEQ ID NO: 364852 - DNA, 25 bp, Artificial
  probe
  misc_feature (1)..(25): SEQ ID NO: 3840; WAN024C9G; Start 45; Stop 69
cggatattctttagagtatgctgca

SEQ ID NO: 364853 - DNA, 25 bp, Artificial
  probe
  misc_feature (1)..(25): SEQ ID NO: 3840; WAN024C9G; Start 257; Stop 281
gtttgaatattaaaggattggaggt

SEQ ID NO: 364854 - DNA, 25 bp, Artificial
  probe
  misc_feature (1)..(25): SEQ ID NO: 3840; WAN024C9G; Start 41; Stop 65
taaacggatattctttagagtatgc

SEQ ID NO: 364855 - DNA, 25 bp, Artificial
  probe
  misc_feature (1)..(25): SEQ ID NO: 3840; WAN024C9G; Start 256; Stop 280
agtttgaatattaaaggattggagg

SEQ ID NO: 364856 - DNA, 25 bp, Artificial
  probe
  misc_feature (1)..(25): SEQ ID NO: 3840; WAN024C9G; Start 202; Stop 226
tataaaagatcggagcgtgatgatt

SEQ ID NO: 364857 - DNA, 25 bp, Artificial
  probe
  misc_feature (1)..(25): SEQ ID NO: 3840; WAN024C9G; Start 203; Stop 227
ataaaagatcggagcgtgatgattt

SEQ ID NO: 364858 - DNA, 25 bp, Artificial
  probe
  misc_feature (1)..(25): SEQ ID NO: 3840; WAN024C9G; Start 201; Stop 225
ttataaaagatcggagcgtgatgat

SEQ ID NO: 364859 - DNA, 25 bp, Artificial
  probe
  misc_feature (1)..(25): SEQ ID NO: 3840; WAN024C9G; Start 200; Stop 224
attataaaagatcggagcgtgatga

SEQ ID NO: 364860 - DNA, 25 bp, Artificial
  probe
  misc_feature (1)..(25): SEQ ID NO: 3840; WAN024C9G; Start 100; Stop 124
agatttgaaaggggagaaaatgaaa

SEQ ID NO: 364861 - DNA, 25 bp, Artificial
  probe
  misc_feature (1)..(25): SEQ ID NO: 3840; WAN024C9G; Start 199; Stop 223
tattataaaagatcggagcgtgatg

SEQ ID NO: 364862 - DNA, 25 bp, Artificial
  probe
  misc_feature (1)..(25): SEQ ID NO: 3840; WAN024C9G; Start 98; Stop 122
ctagatttgaaaggggagaaaatga

SEQ ID NO: 364863 - DNA, 25 bp, Artificial
  probe
  misc_feature (1)..(25): SEQ ID NO: 3840; WAN024C9G; Start 99; Stop 123
tagatttgaaaggggagaaaatgaa

SEQ ID NO: 364864 - DNA, 25 bp, Artificial
  probe
  misc_feature (1)..(25): SEQ ID NO: 3840; WAN024C9G; Start 101; Stop 125
gatttgaaaggggagaaaatgaaat

SEQ ID NO: 364865 - DNA, 25 bp, Artificial
  probe
  misc_feature (1)..(25): SEQ ID NO: 3840; WAN024C9G; Start 197; Stop 221
aatattataaaagatcggagcgtga

SEQ ID NO: 364866 - DNA, 25 bp, Artificial
  probe
  misc_feature (1)..(25): SEQ ID NO: 3840; WAN024C9G; Start 204; Stop 228
taaaagatcggagcgtgatgatttt

SEQ ID NO: 364867 - DNA, 25 bp, Artificial
  probe
  misc_feature (1)..(25): SEQ ID NO: 3840; WAN024C9G; Start 198; Stop 222
atattataaaagatcggagcgtgat

SEQ ID NO: 364868 - DNA, 25 bp, Artificial
  probe
  misc_feature (1)..(25): SEQ ID NO: 3840; WAN024C9G; Start 196; Stop 220
gaatattataaaagatcggagcgtg

SEQ ID NO: 364869 - DNA, 25 bp, Artificial
  probe
  misc_feature (1)..(25): SEQ ID NO: 3840; WAN024C9G; Start 102; Stop 126
atttgaaaggggagaaaatgaaatt

SEQ ID NO: 364870 - DNA, 25 bp, Artificial
  probe
  misc_feature (1)..(25): SEQ ID NO: 3840; WAN024C9G; Start 195; Stop 219
agaatattataaaagatcggagcgt

SEQ ID NO: 364871 - DNA, 25 bp, Artificial
  probe
  misc_feature (1)..(25): SEQ ID NO: 3840; WAN024C9G; Start 259; Stop 283
ttgaatattaaaggattggaggtaa

SEQ ID NO: 364872 - DNA, 25 bp, Artificial
  probe
  misc_feature (1)..(25): SEQ ID NO: 3840; WAN024C9G; Start 258; Stop 282
tttgaatattaaaggattggaggta

SEQ ID NO: 364873 - DNA, 25 bp, Artificial
  probe
  misc_feature (1)..(25): SEQ ID NO: 3840; WAN024C9G; Start 154; Stop 178
tcaaatatcaatgtttcgatagaga

SEQ ID NO: 364874 - DNA, 25 bp, Artificial
  probe
  misc_feature (1)..(25): SEQ ID NO: 3840; WAN024C9G; Start 260; Stop 284
tgaatattaaaggattggaggtaat

SEQ ID NO: 364875 - DNA, 25 bp, Artificial
  probe
  misc_feature (1)..(25): SEQ ID NO: 3840; WAN024C9G; Start 103; Stop 127
tttgaaaggggagaaaatgaaattt

SEQ ID NO: 364876 - DNA, 25 bp, Artificial
  probe
  misc_feature (1)..(25): SEQ ID NO: 3840; WAN024C9G; Start 97; Stop 121
tctagatttgaaaggggagaaaatg

SEQ ID NO: 364877 - DNA, 25 bp, Artificial
  probe
  misc_feature (1)..(25): SEQ ID NO: 3840; WAN024C9G; Start 194; Stop 218
tagaatattataaaagatcggagcg

SEQ ID NO: 364878 - DNA, 25 bp, Artificial
  probe
  misc_feature (1)..(25): SEQ ID NO: 3840; WAN024C9G; Start 155; Stop 179
caaatatcaatgtttcgatagagaa

SEQ ID NO: 364879 - DNA, 25 bp, Artificial
  probe
  misc_feature (1)..(25): SEQ ID NO: 3840; WAN024C9G; Start 11; Stop 35
acggagaagcttttcgatattttag

SEQ ID NO: 364880 - DNA, 25 bp, Artificial
  probe
  misc_feature (1)..(25): SEQ ID NO: 3840; WAN024C9G; Start 153; Stop 177
atcaaatatcaatgtttcgatagag

SEQ ID NO: 364881 - DNA, 25 bp, Artificial
  probe
  misc_feature (1)..(25): SEQ ID NO: 3840; WAN024C9G; Start 12; Stop 36
cggagaagcttttcgatattttaga

SEQ ID NO: 364882 - DNA, 25 bp, Artificial
  probe
  misc_feature (1)..(25): SEQ ID NO: 3841; WAN024BHX; Start 498; Stop 522
ttctggtaggagcgaggtatattat

SEQ ID NO: 364883 - DNA, 25 bp, Artificial
  probe
  misc_feature (1)..(25): SEQ ID NO: 3841; WAN024BHX; Start 40; Stop 64
gttatggatgttcttattggcttgt

SEQ ID NO: 364884 - DNA, 25 bp, Artificial
  probe
  misc_feature (1)..(25): SEQ ID NO: 3841; WAN024BHX; Start 499; Stop 523
tctggtaggagcgaggtatattatc

SEQ ID NO: 364885 - DNA, 25 bp, Artificial
  probe
  misc_feature (1)..(25): SEQ ID NO: 3841; WAN024BHX; Start 39; Stop 63
agttatggatgttcttattggcttg

SEQ ID NO: 364886 - DNA, 25 bp, Artificial
  probe
  misc_feature (1)..(25): SEQ ID NO: 3841; WAN024BHX; Start 38; Stop 62
gagttatggatgttcttattggctt

SEQ ID NO: 364887 - DNA, 25 bp, Artificial
  probe
  misc_feature (1)..(25): SEQ ID NO: 3841; WAN024BHX; Start 37; Stop 61
cgagttatggatgttcttattggct

SEQ ID NO: 364888 - DNA, 25 bp, Artificial
  probe
  misc_feature (1)..(25): SEQ ID NO: 3841; WAN024BHX; Start 41; Stop 65
ttatggatgttcttattggcttgtt

SEQ ID NO: 364889 - DNA, 25 bp, Artificial
  probe
  misc_feature (1)..(25): SEQ ID NO: 3841; WAN024BHX; Start 36; Stop 60
acgagttatggatgttcttattggc

SEQ ID NO: 364890 - DNA, 25 bp, Artificial
  probe
  misc_feature (1)..(25): SEQ ID NO: 3841; WAN024BHX; Start 35; Stop 59
aacgagttatggatgttcttattgg

SEQ ID NO: 364891 - DNA, 25 bp, Artificial
  probe
  misc_feature (1)..(25): SEQ ID NO: 3841; WAN024BHX; Start 378; Stop 402
tggagatatgagtcttattggacct

SEQ ID NO: 364892 - DNA, 25 bp, Artificial
  probe
  misc_feature (1)..(25): SEQ ID NO: 3841; WAN024BHX; Start 377; Stop 401
ttggagatatgagtcttattggacc

SEQ ID NO: 364893 - DNA, 25 bp, Artificial
  probe
  misc_feature (1)..(25): SEQ ID NO: 3841; WAN024BHX; Start 379; Stop 403
ggagatatgagtcttattggaccta

SEQ ID NO: 364894 - DNA, 25 bp, Artificial
  probe
  misc_feature (1)..(25): SEQ ID NO: 3841; WAN024BHX; Start 458; Stop 482
tactatctgtacgaccaggtattac

SEQ ID NO: 364895 - DNA, 25 bp, Artificial
  probe
  misc_feature (1)..(25): SEQ ID NO: 3841; WAN024BHX; Start 500; Stop 524
ctggtaggagcgaggtatattatcc

SEQ ID NO: 364896 - DNA, 25 bp, Artificial
  probe
  misc_feature (1)..(25): SEQ ID NO: 3841; WAN024BHX; Start 432; Stop 456
gtactctaaggaagaacagccagtt

SEQ ID NO: 364897 - DNA, 25 bp, Artificial
  probe
  misc_feature (1)..(25): SEQ ID NO: 3841; WAN024BHX; Start 43; Stop 67
atggatgttcttattggcttgtttg

SEQ ID NO: 364898 - DNA, 25 bp, Artificial
  probe
  misc_feature (1)..(25): SEQ ID NO: 3841; WAN024BHX; Start 497; Stop 521
tttctggtaggagcgaggtatatta

SEQ ID NO: 364899 - DNA, 25 bp, Artificial
  probe
  misc_feature (1)..(25): SEQ ID NO: 3841; WAN024BHX; Start 81; Stop 105
agtcttgccctgttctctaataatt

SEQ ID NO: 364900 - DNA, 25 bp, Artificial
  probe
  misc_feature (1)..(25): SEQ ID NO: 3841; WAN024BHX; Start 46; Stop 70
gatgttcttattggcttgtttggaa

SEQ ID NO: 364901 - DNA, 25 bp, Artificial
  probe
  misc_feature (1)..(25): SEQ ID NO: 3841; WAN024BHX; Start 65; Stop 89
ttggaacaatattcacagtcttgcc

SEQ ID NO: 364902 - DNA, 25 bp, Artificial
  probe
  misc_feature (1)..(25): SEQ ID NO: 3841; WAN024BHX; Start 510; Stop 534
cgaggtatattatcctgaacgctgt

SEQ ID NO: 364903 - DNA, 25 bp, Artificial
  probe
  misc_feature (1)..(25): SEQ ID NO: 3841; WAN024BHX; Start 42; Stop 66
tatggatgttcttattggcttgttt

SEQ ID NO: 364904 - DNA, 25 bp, Artificial
  probe
  misc_feature (1)..(25): SEQ ID NO: 3841; WAN024BHX; Start 82; Stop 106
gtcttgccctgttctctaataattt

SEQ ID NO: 364905 - DNA, 25 bp, Artificial
  probe
  misc_feature (1)..(25): SEQ ID NO: 3841; WAN024BHX; Start 457; Stop 481
ttactatctgtacgaccaggtatta

SEQ ID NO: 364906 - DNA, 25 bp, Artificial
  probe
  misc_feature (1)..(25): SEQ ID NO: 3841; WAN024BHX; Start 235; Stop 259
accgcaaataaagcactctatgaaa

SEQ ID NO: 364907 - DNA, 25 bp, Artificial
  probe
  misc_feature (1)..(25): SEQ ID NO: 3841; WAN024BHX; Start 459; Stop 483
actatctgtacgaccaggtattaca

SEQ ID NO: 364908 - DNA, 25 bp, Artificial
  probe
  misc_feature (1)..(25): SEQ ID NO: 3841; WAN024BHX; Start 369; Stop 393
cttgttgtttggagatatgagtctt

SEQ ID NO: 364909 - DNA, 25 bp, Artificial
  probe
  misc_feature (1)..(25): SEQ ID NO: 3841; WAN024BHX; Start 368; Stop 392
acttgttgtttggagatatgagtct

SEQ ID NO: 364910 - DNA, 25 bp, Artificial
  probe
  misc_feature (1)..(25): SEQ ID NO: 3841; WAN024BHX; Start 381; Stop 405
agatatgagtcttattggacctaga

SEQ ID NO: 364911 - DNA, 25 bp, Artificial
  probe
  misc_feature (1)..(25): SEQ ID NO: 3841; WAN024BHX; Start 367; Stop 391
aacttgttgtttggagatatgagtc

SEQ ID NO: 364912 - DNA, 25 bp, Artificial
  probe
  misc_feature (1)..(25): SEQ ID NO: 3841; WAN024BHX; Start 380; Stop 404
gagatatgagtcttattggacctag

SEQ ID NO: 364913 - DNA, 25 bp, Artificial
  probe
  misc_feature (1)..(25): SEQ ID NO: 3841; WAN024BHX; Start 234; Stop 258
gaccgcaaataaagcactctatgaa

SEQ ID NO: 364914 - DNA, 25 bp, Artificial
  probe
  misc_feature (1)..(25): SEQ ID NO: 3841; WAN024BHX; Start 45; Stop 69
ggatgttcttattggcttgtttgga

SEQ ID NO: 364915 - DNA, 25 bp, Artificial
  probe
  misc_feature (1)..(25): SEQ ID NO: 3842; WAN024DWD; Start 66; Stop 90
ggaagagataaggaatgtggaaact

SEQ ID NO: 364916 - DNA, 25 bp, Artificial
  probe
  misc_feature (1)..(25): SEQ ID NO: 3842; WAN024DWD; Start 143; Stop 167
atttcgtgaatttcgtaaccatagc

SEQ ID NO: 364917 - DNA, 25 bp, Artificial
  probe
  misc_feature (1)..(25): SEQ ID NO: 3842; WAN024DWD; Start 69; Stop 93
agagataaggaatgtggaaactagg

SEQ ID NO: 364918 - DNA, 25 bp, Artificial
  probe
  misc_feature (1)..(25): SEQ ID NO: 3842; WAN024DWD; Start 142; Stop 166
catttcgtgaatttcgtaaccatag

SEQ ID NO: 364919 - DNA, 25 bp, Artificial
  probe
  misc_feature (1)..(25): SEQ ID NO: 3842; WAN024DWD; Start 65; Stop 89
cggaagagataaggaatgtggaaac

SEQ ID NO: 364920 - DNA, 25 bp, Artificial
  probe
  misc_feature (1)..(25): SEQ ID NO: 3842; WAN024DWD; Start 158; Stop 182
taaccatagcctgttgtttcaaaga

SEQ ID NO: 364921 - DNA, 25 bp, Artificial
  probe
  misc_feature (1)..(25): SEQ ID NO: 3842; WAN024DWD; Start 157; Stop 181
gtaaccatagcctgttgtttcaaag

SEQ ID NO: 364922 - DNA, 25 bp, Artificial
  probe
  misc_feature (1)..(25): SEQ ID NO: 3842; WAN024DWD; Start 70; Stop 94
gagataaggaatgtggaaactaggc

SEQ ID NO: 364923 - DNA, 25 bp, Artificial
  probe
  misc_feature (1)..(25): SEQ ID NO: 3842; WAN024DWD; Start 140; Stop 164
ctcatttcgtgaatttcgtaaccat

SEQ ID NO: 364924 - DNA, 25 bp, Artificial
  probe
  misc_feature (1)..(25): SEQ ID NO: 3842; WAN024DWD; Start 152; Stop 176
atttcgtaaccatagcctgttgttt

SEQ ID NO: 364925 - DNA, 25 bp, Artificial
  probe
  misc_feature (1)..(25): SEQ ID NO: 3842; WAN024DWD; Start 72; Stop 96
gataaggaatgtggaaactaggctg

SEQ ID NO: 364926 - DNA, 25 bp, Artificial
  probe
  misc_feature (1)..(25): SEQ ID NO: 3842; WAN024DWD; Start 71; Stop 95
agataaggaatgtggaaactaggct

SEQ ID NO: 364927 - DNA, 25 bp, Artificial
  probe
  misc_feature (1)..(25): SEQ ID NO: 3842; WAN024DWD; Start 151; Stop 175
aatttcgtaaccatagcctgttgtt

SEQ ID NO: 364928 - DNA, 25 bp, Artificial
  probe
  misc_feature (1)..(25): SEQ ID NO: 3842; WAN024DWD; Start 141; Stop 165
tcatttcgtgaatttcgtaaccata

SEQ ID NO: 364929 - DNA, 25 bp, Artificial
  probe
  misc_feature (1)..(25): SEQ ID NO: 3842; WAN024DWD; Start 67; Stop 91
gaagagataaggaatgtggaaacta

SEQ ID NO: 364930 - DNA, 25 bp, Artificial
  probe
  misc_feature (1)..(25): SEQ ID NO: 3842; WAN024DWD; Start 150; Stop 174
gaatttcgtaaccatagcctgttgt

SEQ ID NO: 364931 - DNA, 25 bp, Artificial
  probe
  misc_feature (1)..(25): SEQ ID NO: 3842; WAN024DWD; Start 149; Stop 173
tgaatttcgtaaccatagcctgttg

SEQ ID NO: 364932 - DNA, 25 bp, Artificial
  probe
  misc_feature (1)..(25): SEQ ID NO: 3842; WAN024DWD; Start 148; Stop 172
gtgaatttcgtaaccatagcctgtt

SEQ ID NO: 364933 - DNA, 25 bp, Artificial
  probe
  misc_feature (1)..(25): SEQ ID NO: 3842; WAN024DWD; Start 144; Stop 168
tttcgtgaatttcgtaaccatagcc

SEQ ID NO: 364934 - DNA, 25 bp, Artificial
  probe
  misc_feature (1)..(25): SEQ ID NO: 3842; WAN024DWD; Start 153; Stop 177
tttcgtaaccatagcctgttgtttc

SEQ ID NO: 364935 - DNA, 25 bp, Artificial
  probe
  misc_feature (1)..(25): SEQ ID NO: 3842; WAN024DWD; Start 159; Stop 183
aaccatagcctgttgtttcaaagag

SEQ ID NO: 364936 - DNA, 25 bp, Artificial
  probe
  misc_feature (1)..(25): SEQ ID NO: 3842; WAN024DWD; Start 68; Stop 92
aagagataaggaatgtggaaactag

SEQ ID NO: 364937 - DNA, 25 bp, Artificial
  probe
  misc_feature (1)..(25): SEQ ID NO: 3842; WAN024DWD; Start 156; Stop 180
cgtaaccatagcctgttgtttcaaa

SEQ ID NO: 364938 - DNA, 25 bp, Artificial
  probe
  misc_feature (1)..(25): SEQ ID NO: 3842; WAN024DWD; Start 26; Stop 50
ttgataagaagggcagtgtagtcag

SEQ ID NO: 364939 - DNA, 25 bp, Artificial
  probe
  misc_feature (1)..(25): SEQ ID NO: 3842; WAN024DWD; Start 25; Stop 49
cttgataagaagggcagtgtagtca

SEQ ID NO: 364940 - DNA, 25 bp, Artificial
  probe
  misc_feature (1)..(25): SEQ ID NO: 3842; WAN024DWD; Start 73; Stop 97
ataaggaatgtggaaactaggctgg

SEQ ID NO: 364941 - DNA, 25 bp, Artificial
  probe
  misc_feature (1)..(25): SEQ ID NO: 3842; WAN024DWD; Start 145; Stop 169
ttcgtgaatttcgtaaccatagcct

SEQ ID NO: 364942 - DNA, 25 bp, Artificial
  probe
  misc_feature (1)..(25): SEQ ID NO: 3842; WAN024DWD; Start 136; Stop 160
ctcgctcatttcgtgaatttcgtaa

SEQ ID NO: 364943 - DNA, 25 bp, Artificial
  probe
  misc_feature (1)..(25): SEQ ID NO: 3842; WAN024DWD; Start 154; Stop 178
ttcgtaaccatagcctgttgtttca

SEQ ID NO: 364944 - DNA, 25 bp, Artificial
  probe
  misc_feature (1)..(25): SEQ ID NO: 3842; WAN024DWD; Start 139; Stop 163
gctcatttcgtgaatttcgtaacca

SEQ ID NO: 364945 - DNA, 25 bp, Artificial
  probe
  misc_feature (1)..(25): SEQ ID NO: 3842; WAN024DWD; Start 155; Stop 179
tcgtaaccatagcctgttgtttcaa

SEQ ID NO: 364946 - DNA, 25 bp, Artificial
  probe
  misc_feature (1)..(25): SEQ ID NO: 3842; WAN024DWD; Start 137; Stop 161
tcgctcatttcgtgaatttcgtaac

SEQ ID NO: 364947 - DNA, 25 bp, Artificial
  probe
  misc_feature (1)..(25): SEQ ID NO: 3842; WAN024DWD; Start 146; Stop 170
tcgtgaatttcgtaaccatagcctg

SEQ ID NO: 364948 - DNA, 25 bp, Artificial
  probe
  misc_feature (1)..(25): SEQ ID NO: 3843; WAN024FLP; Start 176; Stop 200
ttggaattaatgtctacgctgttag

SEQ ID NO: 364949 - DNA, 25 bp, Artificial
  probe
  misc_feature (1)..(25): SEQ ID NO: 3843; WAN024FLP; Start 182; Stop 206
ttaatgtctacgctgttagagaagg

SEQ ID NO: 364950 - DNA, 25 bp, Artificial
  probe
  misc_feature (1)..(25): SEQ ID NO: 3843; WAN024FLP; Start 183; Stop 207
taatgtctacgctgttagagaaggt

SEQ ID NO: 364951 - DNA, 25 bp, Artificial
  probe
  misc_feature (1)..(25): SEQ ID NO: 3843; WAN024FLP; Start 12; Stop 36
atccattgcccgaaattatttactt

SEQ ID NO: 364952 - DNA, 25 bp, Artificial
  probe
  misc_feature (1)..(25): SEQ ID NO: 3843; WAN024FLP; Start 11; Stop 35
aatccattgcccgaaattatttact

SEQ ID NO: 364953 - DNA, 25 bp, Artificial
  probe
  misc_feature (1)..(25): SEQ ID NO: 3843; WAN024FLP; Start 177; Stop 201
tggaattaatgtctacgctgttaga

SEQ ID NO: 364954 - DNA, 25 bp, Artificial
  probe
  misc_feature (1)..(25): SEQ ID NO: 3843; WAN024FLP; Start 178; Stop 202
ggaattaatgtctacgctgttagag

SEQ ID NO: 364955 - DNA, 25 bp, Artificial
  probe
  misc_feature (1)..(25): SEQ ID NO: 3843; WAN024FLP; Start 13; Stop 37
tccattgcccgaaattatttactta

SEQ ID NO: 364956 - DNA, 25 bp, Artificial
  probe
  misc_feature (1)..(25): SEQ ID NO: 3843; WAN024FLP; Start 7; Stop 31
aggaaatccattgcccgaaattatt

SEQ ID NO: 364957 - DNA, 25 bp, Artificial
  probe
  misc_feature (1)..(25): SEQ ID NO: 3843; WAN024FLP; Start 6; Stop 30
aaggaaatccattgcccgaaattat

SEQ ID NO: 364958 - DNA, 25 bp, Artificial
  probe
  misc_feature (1)..(25): SEQ ID NO: 3843; WAN024FLP; Start 5; Stop 29
aaaggaaatccattgcccgaaatta

SEQ ID NO: 364959 - DNA, 25 bp, Artificial
  probe
  misc_feature (1)..(25): SEQ ID NO: 3843; WAN024FLP; Start 184; Stop 208
aatgtctacgctgttagagaaggtg

SEQ ID NO: 364960 - DNA, 25 bp, Artificial
  probe
  misc_feature (1)..(25): SEQ ID NO: 3843; WAN024FLP; Start 181; Stop 205
attaatgtctacgctgttagagaag

SEQ ID NO: 364961 - DNA, 25 bp, Artificial
  probe
  misc_feature (1)..(25): SEQ ID NO: 3843; WAN024FLP; Start 179; Stop 203
gaattaatgtctacgctgttagaga

SEQ ID NO: 364962 - DNA, 25 bp, Artificial
  probe
  misc_feature (1)..(25): SEQ ID NO: 3843; WAN024FLP; Start 14; Stop 38
ccattgcccgaaattatttacttaa

SEQ ID NO: 364963 - DNA, 25 bp, Artificial
  probe
  misc_feature (1)..(25): SEQ ID NO: 3843; WAN024FLP; Start 48; Stop 72
aacgaccttgtctattctatttccc

SEQ ID NO: 364964 - DNA, 25 bp, Artificial
  probe
  misc_feature (1)..(25): SEQ ID NO: 3843; WAN024FLP; Start 8; Stop 32
ggaaatccattgcccgaaattattt

SEQ ID NO: 364965 - DNA, 25 bp, Artificial
  probe
  misc_feature (1)..(25): SEQ ID NO: 3843; WAN024FLP; Start 508; Stop 532
tatgtgtacgctctaattacagttg

SEQ ID NO: 364966 - DNA, 25 bp, Artificial
  probe
  misc_feature (1)..(25): SEQ ID NO: 3843; WAN024FLP; Start 174; Stop 198
ctttggaattaatgtctacgctgtt

SEQ ID NO: 364967 - DNA, 25 bp, Artificial
  probe
  misc_feature (1)..(25): SEQ ID NO: 3843; WAN024FLP; Start 173; Stop 197
tctttggaattaatgtctacgctgt

SEQ ID NO: 364968 - DNA, 25 bp, Artificial
  probe
  misc_feature (1)..(25): SEQ ID NO: 3843; WAN024FLP; Start 172; Stop 196
atctttggaattaatgtctacgctg

SEQ ID NO: 364969 - DNA, 25 bp, Artificial
  probe
  misc_feature (1)..(25): SEQ ID NO: 3843; WAN024FLP; Start 180; Stop 204
aattaatgtctacgctgttagagaa

SEQ ID NO: 364970 - DNA, 25 bp, Artificial
  probe
  misc_feature (1)..(25): SEQ ID NO: 3843; WAN024FLP; Start 10; Stop 34
aaatccattgcccgaaattatttac

SEQ ID NO: 364971 - DNA, 25 bp, Artificial
  probe
  misc_feature (1)..(25): SEQ ID NO: 3843; WAN024FLP; Start 509; Stop 533
atgtgtacgctctaattacagttgc

SEQ ID NO: 364972 - DNA, 25 bp, Artificial
  probe
  misc_feature (1)..(25): SEQ ID NO: 3843; WAN024FLP; Start 47; Stop 71
aaacgaccttgtctattctatttcc

SEQ ID NO: 364973 - DNA, 25 bp, Artificial
  probe
  misc_feature (1)..(25): SEQ ID NO: 3843; WAN024FLP; Start 9; Stop 33
gaaatccattgcccgaaattattta

SEQ ID NO: 364974 - DNA, 25 bp, Artificial
  probe
  misc_feature (1)..(25): SEQ ID NO: 3843; WAN024FLP; Start 1141; Stop 1165
tttaatggttcagctttggttacag

SEQ ID NO: 364975 - DNA, 25 bp, Artificial
  probe
  misc_feature (1)..(25): SEQ ID NO: 3843; WAN024FLP; Start 175; Stop 199
tttggaattaatgtctacgctgtta

SEQ ID NO: 364976 - DNA, 25 bp, Artificial
  probe
  misc_feature (1)..(25): SEQ ID NO: 3843; WAN024FLP; Start 171; Stop 195
aatctttggaattaatgtctacgct

SEQ ID NO: 364977 - DNA, 25 bp, Artificial
  probe
  misc_feature (1)..(25): SEQ ID NO: 3843; WAN024FLP; Start 1143; Stop 1167
taatggttcagctttggttacagtt

SEQ ID NO: 364978 - DNA, 25 bp, Artificial
  probe
  misc_feature (1)..(25): SEQ ID NO: 3843; WAN024FLP; Start 1142; Stop 1166
ttaatggttcagctttggttacagt

SEQ ID NO: 364979 - DNA, 25 bp, Artificial
  probe
  misc_feature (1)..(25): SEQ ID NO: 3843; WAN024FLP; Start 884; Stop 908
tacttgctataccagttgttatagg

SEQ ID NO: 364980 - DNA, 25 bp, Artificial
  probe
  misc_feature (1)..(25): SEQ ID NO: 3843; WAN024FLP; Start 170; Stop 194
caatctttggaattaatgtctacgc

SEQ ID NO: 364981 - DNA, 25 bp, Artificial
  probe
  misc_feature (1)..(25): SEQ ID NO: 3844; WAN024ETS; Start 488; Stop 512
caatagtagtaacaggtgaagtgga

SEQ ID NO: 364982 - DNA, 25 bp, Artificial
  probe
  misc_feature (1)..(25): SEQ ID NO: 3844; WAN024ETS; Start 486; Stop 510
tccaatagtagtaacaggtgaagtg

SEQ ID NO: 364983 - DNA, 25 bp, Artificial
  probe
  misc_feature (1)..(25): SEQ ID NO: 3844; WAN024ETS; Start 490; Stop 514
atagtagtaacaggtgaagtggatg

SEQ ID NO: 364984 - DNA, 25 bp, Artificial
  probe
  misc_feature (1)..(25): SEQ ID NO: 3844; WAN024ETS; Start 750; Stop 774
tgccttatacgagattacagatgaa

SEQ ID NO: 364985 - DNA, 25 bp, Artificial
  probe
  misc_feature (1)..(25): SEQ ID NO: 3844; WAN024ETS; Start 749; Stop 773
atgccttatacgagattacagatga

SEQ ID NO: 364986 - DNA, 25 bp, Artificial
  probe
  misc_feature (1)..(25): SEQ ID NO: 3844; WAN024ETS; Start 489; Stop 513
aatagtagtaacaggtgaagtggat

SEQ ID NO: 364987 - DNA, 25 bp, Artificial
  probe
  misc_feature (1)..(25): SEQ ID NO: 3844; WAN024ETS; Start 485; Stop 509
ttccaatagtagtaacaggtgaagt

SEQ ID NO: 364988 - DNA, 25 bp, Artificial
  probe
  misc_feature (1)..(25): SEQ ID NO: 3844; WAN024ETS; Start 748; Stop 772
aatgccttatacgagattacagatg

SEQ ID NO: 364989 - DNA, 25 bp, Artificial
  probe
  misc_feature (1)..(25): SEQ ID NO: 3844; WAN024ETS; Start 751; Stop 775
gccttatacgagattacagatgaag

SEQ ID NO: 364990 - DNA, 25 bp, Artificial
  probe
  misc_feature (1)..(25): SEQ ID NO: 3844; WAN024ETS; Start 491; Stop 515
tagtagtaacaggtgaagtggatgc

SEQ ID NO: 364991 - DNA, 25 bp, Artificial
  probe
  misc_feature (1)..(25): SEQ ID NO: 3844; WAN024ETS; Start 484; Stop 508
attccaatagtagtaacaggtgaag

SEQ ID NO: 364992 - DNA, 25 bp, Artificial
  probe
  misc_feature (1)..(25): SEQ ID NO: 3844; WAN024ETS; Start 752; Stop 776
ccttatacgagattacagatgaaga

SEQ ID NO: 364993 - DNA, 25 bp, Artificial
  probe
  misc_feature (1)..(25): SEQ ID NO: 3844; WAN024ETS; Start 487; Stop 511
ccaatagtagtaacaggtgaagtgg

SEQ ID NO: 364994 - DNA, 25 bp, Artificial
  probe
  misc_feature (1)..(25): SEQ ID NO: 3844; WAN024ETS; Start 163; Stop 187
gatttgttaaagtatgctggtggtt

SEQ ID NO: 364995 - DNA, 25 bp, Artificial
  probe
  misc_feature (1)..(25): SEQ ID NO: 3844; WAN024ETS; Start 160; Stop 184
gaggatttgttaaagtatgctggtg

SEQ ID NO: 364996 - DNA, 25 bp, Artificial
  probe
  misc_feature (1)..(25): SEQ ID NO: 3844; WAN024ETS; Start 159; Stop 183
agaggatttgttaaagtatgctggt

SEQ ID NO: 364997 - DNA, 25 bp, Artificial
  probe
  misc_feature (1)..(25): SEQ ID NO: 3844; WAN024ETS; Start 164; Stop 188
atttgttaaagtatgctggtggttt

SEQ ID NO: 364998 - DNA, 25 bp, Artificial
  probe
  misc_feature (1)..(25): SEQ ID NO: 3844; WAN024ETS; Start 136; Stop 160
atgagtgagtttccagcagatttag

SEQ ID NO: 364999 - DNA, 25 bp, Artificial
  probe
  misc_feature (1)..(25): SEQ ID NO: 3844; WAN024ETS; Start 93; Stop 117
tttcacagcaaatggattagtagca

SEQ ID NO: 365000 - DNA, 25 bp, Artificial
  probe
  misc_feature (1)..(25): SEQ ID NO: 3844; WAN024ETS; Start 148; Stop 172
ccagcagatttagaggatttgttaa

SEQ ID NO: 365001 - DNA, 25 bp, Artificial
  probe
  misc_feature (1)..(25): SEQ ID NO: 3844; WAN024ETS; Start 138; Stop 162
gagtgagtttccagcagatttagag

SEQ ID NO: 365002 - DNA, 25 bp, Artificial
  probe
  misc_feature (1)..(25): SEQ ID NO: 3844; WAN024ETS; Start 387; Stop 411
ctctttagtaggaatagatgtggca

SEQ ID NO: 365003 - DNA, 25 bp, Artificial
  probe
  misc_feature (1)..(25): SEQ ID NO: 3844; WAN024ETS; Start 161; Stop 185
aggatttgttaaagtatgctggtgg

SEQ ID NO: 365004 - DNA, 25 bp, Artificial
  probe
  misc_feature (1)..(25): SEQ ID NO: 3844; WAN024ETS; Start 388; Stop 412
tctttagtaggaatagatgtggcat

SEQ ID NO: 365005 - DNA, 25 bp, Artificial
  probe
  misc_feature (1)..(25): SEQ ID NO: 3844; WAN024ETS; Start 158; Stop 182
tagaggatttgttaaagtatgctgg

SEQ ID NO: 365006 - DNA, 25 bp, Artificial
  probe
  misc_feature (1)..(25): SEQ ID NO: 3844; WAN024ETS; Start 196; Stop 220
aacataggaacattgacagatgaaa

SEQ ID NO: 365007 - DNA, 25 bp, Artificial
  probe
  misc_feature (1)..(25): SEQ ID NO: 3844; WAN024ETS; Start 195; Stop 219
aaacataggaacattgacagatgaa

SEQ ID NO: 365008 - DNA, 25 bp, Artificial
  probe
  misc_feature (1)..(25): SEQ ID NO: 3844; WAN024ETS; Start 165; Stop 189
tttgttaaagtatgctggtggttta

SEQ ID NO: 365009 - DNA, 25 bp, Artificial
  probe
  misc_feature (1)..(25): SEQ ID NO: 3844; WAN024ETS; Start 137; Stop 161
tgagtgagtttccagcagatttaga

SEQ ID NO: 365010 - DNA, 25 bp, Artificial
  probe
  misc_feature (1)..(25): SEQ ID NO: 3844; WAN024ETS; Start 94; Stop 118
ttcacagcaaatggattagtagcac

SEQ ID NO: 365011 - DNA, 25 bp, Artificial
  probe
  misc_feature (1)..(25): SEQ ID NO: 3844; WAN024ETS; Start 162; Stop 186
ggatttgttaaagtatgctggtggt

SEQ ID NO: 365012 - DNA, 25 bp, Artificial
  probe
  misc_feature (1)..(25): SEQ ID NO: 3844; WAN024ETS; Start 483; Stop 507
tattccaatagtagtaacaggtgaa

SEQ ID NO: 365013 - DNA, 25 bp, Artificial
  probe
  misc_feature (1)..(25): SEQ ID NO: 3844; WAN024ETS; Start 167; Stop 191
tgttaaagtatgctggtggtttatt

SEQ ID NO: 365014 - DNA, 25 bp, Artificial
  probe
  misc_feature (1)..(25): SEQ ID NO: 3845; WAN024DNS; Start 16; Stop 40
ttactgggtatccgtttgctttata

SEQ ID NO: 365015 - DNA, 25 bp, Artificial
  probe
  misc_feature (1)..(25): SEQ ID NO: 3845; WAN024DNS; Start 15; Stop 39
tttactgggtatccgtttgctttat

SEQ ID NO: 365016 - DNA, 25 bp, Artificial
  probe
  misc_feature (1)..(25): SEQ ID NO: 3845; WAN024DNS; Start 42; Stop 66
ggagatgagttatggtatttacagc

SEQ ID NO: 365017 - DNA, 25 bp, Artificial
  probe
  misc_feature (1)..(25): SEQ ID NO: 3845; WAN024DNS; Start 43; Stop 67
gagatgagttatggtatttacagca

SEQ ID NO: 365018 - DNA, 25 bp, Artificial
  probe
  misc_feature (1)..(25): SEQ ID NO: 3845; WAN024DNS; Start 44; Stop 68
agatgagttatggtatttacagcaa

SEQ ID NO: 365019 - DNA, 25 bp, Artificial
  probe
  misc_feature (1)..(25): SEQ ID NO: 3845; WAN024DNS; Start 17; Stop 41
tactgggtatccgtttgctttataa

SEQ ID NO: 365020 - DNA, 25 bp, Artificial
  probe
  misc_feature (1)..(25): SEQ ID NO: 3845; WAN024DNS; Start 28; Stop 52
cgtttgctttataaggagatgagtt

SEQ ID NO: 365021 - DNA, 25 bp, Artificial
  probe
  misc_feature (1)..(25): SEQ ID NO: 3845; WAN024DNS; Start 27; Stop 51
ccgtttgctttataaggagatgagt

SEQ ID NO: 365022 - DNA, 25 bp, Artificial
  probe
  misc_feature (1)..(25): SEQ ID NO: 3845; WAN024DNS; Start 18; Stop 42
actgggtatccgtttgctttataag

SEQ ID NO: 365023 - DNA, 25 bp, Artificial
  probe
  misc_feature (1)..(25): SEQ ID NO: 3845; WAN024DNS; Start 41; Stop 65
aggagatgagttatggtatttacag

SEQ ID NO: 365024 - DNA, 25 bp, Artificial
  probe
  misc_feature (1)..(25): SEQ ID NO: 3845; WAN024DNS; Start 45; Stop 69
gatgagttatggtatttacagcaaa

SEQ ID NO: 365025 - DNA, 25 bp, Artificial
  probe
  misc_feature (1)..(25): SEQ ID NO: 3845; WAN024DNS; Start 19; Stop 43
ctgggtatccgtttgctttataagg

SEQ ID NO: 365026 - DNA, 25 bp, Artificial
  probe
  misc_feature (1)..(25): SEQ ID NO: 3845; WAN024DNS; Start 40; Stop 64
aaggagatgagttatggtatttaca

SEQ ID NO: 365027 - DNA, 25 bp, Artificial
  probe
  misc_feature (1)..(25): SEQ ID NO: 3845; WAN024DNS; Start 33; Stop 57
gctttataaggagatgagttatggt

SEQ ID NO: 365028 - DNA, 25 bp, Artificial
  probe
  misc_feature (1)..(25): SEQ ID NO: 3845; WAN024DNS; Start 32; Stop 56
tgctttataaggagatgagttatgg

SEQ ID NO: 365029 - DNA, 25 bp, Artificial
  probe
  misc_feature (1)..(25): SEQ ID NO: 3845; WAN024DNS; Start 25; Stop 49
atccgtttgctttataaggagatga

SEQ ID NO: 365030 - DNA, 25 bp, Artificial
  probe
  misc_feature (1)..(25): SEQ ID NO: 3845; WAN024DNS; Start 22; Stop 46
ggtatccgtttgctttataaggaga

SEQ ID NO: 365031 - DNA, 25 bp, Artificial
  probe
  misc_feature (1)..(25): SEQ ID NO: 3845; WAN024DNS; Start 26; Stop 50
tccgtttgctttataaggagatgag

SEQ ID NO: 365032 - DNA, 25 bp, Artificial
  probe
  misc_feature (1)..(25): SEQ ID NO: 3845; WAN024DNS; Start 21; Stop 45
gggtatccgtttgctttataaggag

SEQ ID NO: 365033 - DNA, 25 bp, Artificial
  probe
  misc_feature (1)..(25): SEQ ID NO: 3845; WAN024DNS; Start 24; Stop 48
tatccgtttgctttataaggagatg

SEQ ID NO: 365034 - DNA, 25 bp, Artificial
  probe
  misc_feature (1)..(25): SEQ ID NO: 3845; WAN024DNS; Start 23; Stop 47
gtatccgtttgctttataaggagat

SEQ ID NO: 365035 - DNA, 25 bp, Artificial
  probe
  misc_feature (1)..(25): SEQ ID NO: 3845; WAN024DNS; Start 20; Stop 44
tgggtatccgtttgctttataagga

SEQ ID NO: 365036 - DNA, 25 bp, Artificial
  probe
  misc_feature (1)..(25): SEQ ID NO: 3845; WAN024DNS; Start 14; Stop 38
ttttactgggtatccgtttgcttta

SEQ ID NO: 365037 - DNA, 25 bp, Artificial
  probe
  misc_feature (1)..(25): SEQ ID NO: 3845; WAN024DNS; Start 29; Stop 53
gtttgctttataaggagatgagtta

SEQ ID NO: 365038 - DNA, 25 bp, Artificial
  probe
  misc_feature (1)..(25): SEQ ID NO: 3845; WAN024DNS; Start 31; Stop 55
ttgctttataaggagatgagttatg

SEQ ID NO: 365039 - DNA, 25 bp, Artificial
  probe
  misc_feature (1)..(25): SEQ ID NO: 3845; WAN024DNS; Start 39; Stop 63
taaggagatgagttatggtatttac

SEQ ID NO: 365040 - DNA, 25 bp, Artificial
  probe
  misc_feature (1)..(25): SEQ ID NO: 3845; WAN024DNS; Start 46; Stop 70
atgagttatggtatttacagcaaaa

SEQ ID NO: 365041 - DNA, 25 bp, Artificial
  probe
  misc_feature (1)..(25): SEQ ID NO: 3845; WAN024DNS; Start 30; Stop 54
tttgctttataaggagatgagttat

SEQ ID NO: 365042 - DNA, 25 bp, Artificial
  probe
  misc_feature (1)..(25): SEQ ID NO: 3845; WAN024DNS; Start 34; Stop 58
ctttataaggagatgagttatggta

SEQ ID NO: 365043 - DNA, 25 bp, Artificial
  probe
  misc_feature (1)..(25): SEQ ID NO: 3846; WAN024FN5; Start 658; Stop 682
atcttaggttggagtataatggctg

SEQ ID NO: 365044 - DNA, 25 bp, Artificial
  probe
  misc_feature (1)..(25): SEQ ID NO: 3846; WAN024FN5; Start 1358; Stop 1382
cactcatacttgtctctcgttctat

SEQ ID NO: 365045 - DNA, 25 bp, Artificial
  probe
  misc_feature (1)..(25): SEQ ID NO: 3846; WAN024FN5; Start 1359; Stop 1383
actcatacttgtctctcgttctatt

SEQ ID NO: 365046 - DNA, 25 bp, Artificial
  probe
  misc_feature (1)..(25): SEQ ID NO: 3846; WAN024FN5; Start 1236; Stop 1260
ggacaacttattctcacaatatgct

SEQ ID NO: 365047 - DNA, 25 bp, Artificial
  probe
  misc_feature (1)..(25): SEQ ID NO: 3846; WAN024FN5; Start 1235; Stop 1259
aggacaacttattctcacaatatgc

SEQ ID NO: 365048 - DNA, 25 bp, Artificial
  probe
  misc_feature (1)..(25): SEQ ID NO: 3846; WAN024FN5; Start 657; Stop 681
tatcttaggttggagtataatggct

SEQ ID NO: 365049 - DNA, 25 bp, Artificial
  probe
  misc_feature (1)..(25): SEQ ID NO: 3846; WAN024FN5; Start 1155; Stop 1179
tggttcttatggatggatagcgatt

SEQ ID NO: 365050 - DNA, 25 bp, Artificial
  probe
  misc_feature (1)..(25): SEQ ID NO: 3846; WAN024FN5; Start 1154; Stop 1178
ttggttcttatggatggatagcgat

SEQ ID NO: 365051 - DNA, 25 bp, Artificial
  probe
  misc_feature (1)..(25): SEQ ID NO: 3846; WAN024FN5; Start 661; Stop 685
ttaggttggagtataatggctgctt

SEQ ID NO: 365052 - DNA, 25 bp, Artificial
  probe
  misc_feature (1)..(25): SEQ ID NO: 3846; WAN024FN5; Start 541; Stop 565
gttggaagcctacctacaataacag

SEQ ID NO: 365053 - DNA, 25 bp, Artificial
  probe
  misc_feature (1)..(25): SEQ ID NO: 3846; WAN024FN5; Start 1357; Stop 1381
gcactcatacttgtctctcgttcta

SEQ ID NO: 365054 - DNA, 25 bp, Artificial
  probe
  misc_feature (1)..(25): SEQ ID NO: 3846; WAN024FN5; Start 1355; Stop 1379
tagcactcatacttgtctctcgttc

SEQ ID NO: 365055 - DNA, 25 bp, Artificial
  probe
  misc_feature (1)..(25): SEQ ID NO: 3846; WAN024FN5; Start 542; Stop 566
ttggaagcctacctacaataacagt

SEQ ID NO: 365056 - DNA, 25 bp, Artificial
  probe
  misc_feature (1)..(25): SEQ ID NO: 3846; WAN024FN5; Start 543; Stop 567
tggaagcctacctacaataacagtg

SEQ ID NO: 365057 - DNA, 25 bp, Artificial
  probe
  misc_feature (1)..(25): SEQ ID NO: 3846; WAN024FN5; Start 660; Stop 684
cttaggttggagtataatggctgct

SEQ ID NO: 365058 - DNA, 25 bp, Artificial
  probe
  misc_feature (1)..(25): SEQ ID NO: 3846; WAN024FN5; Start 659; Stop 683
tcttaggttggagtataatggctgc

SEQ ID NO: 365059 - DNA, 25 bp, Artificial
  probe
  misc_feature (1)..(25): SEQ ID NO: 3846; WAN024FN5; Start 538; Stop 562
ttcgttggaagcctacctacaataa

SEQ ID NO: 365060 - DNA, 25 bp, Artificial
  probe
  misc_feature (1)..(25): SEQ ID NO: 3846; WAN024FN5; Start 994; Stop 1018
gcagccatcattacaggactaattc

SEQ ID NO: 365061 - DNA, 25 bp, Artificial
  probe
  misc_feature (1)..(25): SEQ ID NO: 3846; WAN024FN5; Start 1354; Stop 1378
ctagcactcatacttgtctctcgtt

SEQ ID NO: 365062 - DNA, 25 bp, Artificial
  probe
  misc_feature (1)..(25): SEQ ID NO: 3846; WAN024FN5; Start 656; Stop 680
ttatcttaggttggagtataatggc

SEQ ID NO: 365063 - DNA, 25 bp, Artificial
  probe
  misc_feature (1)..(25): SEQ ID NO: 3846; WAN024FN5; Start 545; Stop 569
gaagcctacctacaataacagtgtt

SEQ ID NO: 365064 - DNA, 25 bp, Artificial
  probe
  misc_feature (1)..(25): SEQ ID NO: 3846; WAN024FN5; Start 1360; Stop 1384
ctcatacttgtctctcgttctatta

SEQ ID NO: 365065 - DNA, 25 bp, Artificial
  probe
  misc_feature (1)..(25): SEQ ID NO: 3846; WAN024FN5; Start 997; Stop 1021
gccatcattacaggactaattccat

SEQ ID NO: 365066 - DNA, 25 bp, Artificial
  probe
  misc_feature (1)..(25): SEQ ID NO: 3846; WAN024FN5; Start 998; Stop 1022
ccatcattacaggactaattccatc

SEQ ID NO: 365067 - DNA, 25 bp, Artificial
  probe
  misc_feature (1)..(25): SEQ ID NO: 3846; WAN024FN5; Start 539; Stop 563
tcgttggaagcctacctacaataac

SEQ ID NO: 365068 - DNA, 25 bp, Artificial
  probe
  misc_feature (1)..(25): SEQ ID NO: 3846; WAN024FN5; Start 995; Stop 1019
cagccatcattacaggactaattcc

SEQ ID NO: 365069 - DNA, 25 bp, Artificial
  probe
  misc_feature (1)..(25): SEQ ID NO: 3846; WAN024FN5; Start 938; Stop 962
taacgattagaattgttccaacttc

SEQ ID NO: 365070 - DNA, 25 bp, Artificial
  probe
  misc_feature (1)..(25): SEQ ID NO: 3846; WAN024FN5; Start 232; Stop 256
caggtattgttatattcacttggag

SEQ ID NO: 365071 - DNA, 25 bp, Artificial
  probe
  misc_feature (1)..(25): SEQ ID NO: 3846; WAN024FN5; Start 544; Stop 568
ggaagcctacctacaataacagtgt

SEQ ID NO: 365072 - DNA, 25 bp, Artificial
  probe
  misc_feature (1)..(25): SEQ ID NO: 3846; WAN024FN5; Start 987; Stop 1011
atatattgcagccatcattacagga

SEQ ID NO: 365073 - DNA, 25 bp, Artificial
  probe
  misc_feature (1)..(25): SEQ ID NO: 3846; WAN024FN5; Start 986; Stop 1010
catatattgcagccatcattacagg

SEQ ID NO: 365074 - DNA, 25 bp, Artificial
  probe
  misc_feature (1)..(25): SEQ ID NO: 3846; WAN024FN5; Start 650; Stop 674
aagttgttatcttaggttggagtat

SEQ ID NO: 365075 - DNA, 25 bp, Artificial
  probe
  misc_feature (1)..(25): SEQ ID NO: 3846; WAN024FN5; Start 540; Stop 564
cgttggaagcctacctacaataaca

SEQ ID NO: 365076 - DNA, 25 bp, Artificial
  probe
  misc_feature (1)..(25): SEQ ID NO: 3847; WAN024G8Z; Start 246; Stop 270
gactgttatgaatgctcttgtgatg

SEQ ID NO: 365077 - DNA, 25 bp, Artificial
  probe
  misc_feature (1)..(25): SEQ ID NO: 3847; WAN024G8Z; Start 245; Stop 269
ggactgttatgaatgctcttgtgat

SEQ ID NO: 365078 - DNA, 25 bp, Artificial
  probe
  misc_feature (1)..(25): SEQ ID NO: 3847; WAN024G8Z; Start 247; Stop 271
actgttatgaatgctcttgtgatgg

SEQ ID NO: 365079 - DNA, 25 bp, Artificial
  probe
  misc_feature (1)..(25): SEQ ID NO: 3847; WAN024G8Z; Start 248; Stop 272
ctgttatgaatgctcttgtgatggc

SEQ ID NO: 365080 - DNA, 25 bp, Artificial
  probe
  misc_feature (1)..(25): SEQ ID NO: 3847; WAN024G8Z; Start 121; Stop 145
caagaagttcatagcttaggtatcg

SEQ ID NO: 365081 - DNA, 25 bp, Artificial
  probe
  misc_feature (1)..(25): SEQ ID NO: 3847; WAN024G8Z; Start 123; Stop 147
agaagttcatagcttaggtatcgaa

SEQ ID NO: 365082 - DNA, 25 bp, Artificial
  probe
  misc_feature (1)..(25): SEQ ID NO: 3847; WAN024G8Z; Start 122; Stop 146
aagaagttcatagcttaggtatcga

SEQ ID NO: 365083 - DNA, 25 bp, Artificial
  probe
  misc_feature (1)..(25): SEQ ID NO: 3847; WAN024G8Z; Start 86; Stop 110
atatccaaacagttcaaacaatcgc

SEQ ID NO: 365084 - DNA, 25 bp, Artificial
  probe
  misc_feature (1)..(25): SEQ ID NO: 3847; WAN024G8Z; Start 117; Stop 141
gattcaagaagttcatagcttaggt

SEQ ID NO: 365085 - DNA, 25 bp, Artificial
  probe
  misc_feature (1)..(25): SEQ ID NO: 3847; WAN024G8Z; Start 544; Stop 568
gttaagtttgaagaattgacccacc

SEQ ID NO: 365086 - DNA, 25 bp, Artificial
  probe
  misc_feature (1)..(25): SEQ ID NO: 3847; WAN024G8Z; Start 387; Stop 411
tatcgttatctttggtgctggaatt

SEQ ID NO: 365087 - DNA, 25 bp, Artificial
  probe
  misc_feature (1)..(25): SEQ ID NO: 3847; WAN024G8Z; Start 116; Stop 140
agattcaagaagttcatagcttagg

SEQ ID NO: 365088 - DNA, 25 bp, Artificial
  probe
  misc_feature (1)..(25): SEQ ID NO: 3847; WAN024G8Z; Start 386; Stop 410
gtatcgttatctttggtgctggaat

SEQ ID NO: 365089 - DNA, 25 bp, Artificial
  probe
  misc_feature (1)..(25): SEQ ID NO: 3847; WAN024G8Z; Start 113; Stop 137
aagagattcaagaagttcatagctt

SEQ ID NO: 365090 - DNA, 25 bp, Artificial
  probe
  misc_feature (1)..(25): SEQ ID NO: 3847; WAN024G8Z; Start 33; Stop 57
tttaatcaagttatcaggtgaagcc

SEQ ID NO: 365091 - DNA, 25 bp, Artificial
  probe
  misc_feature (1)..(25): SEQ ID NO: 3847; WAN024G8Z; Start 34; Stop 58
ttaatcaagttatcaggtgaagccc

SEQ ID NO: 365092 - DNA, 25 bp, Artificial
  probe
  misc_feature (1)..(25): SEQ ID NO: 3847; WAN024G8Z; Start 120; Stop 144
tcaagaagttcatagcttaggtatc

SEQ ID NO: 365093 - DNA, 25 bp, Artificial
  probe
  misc_feature (1)..(25): SEQ ID NO: 3847; WAN024G8Z; Start 87; Stop 111
tatccaaacagttcaaacaatcgca

SEQ ID NO: 365094 - DNA, 25 bp, Artificial
  probe
  misc_feature (1)..(25): SEQ ID NO: 3847; WAN024G8Z; Start 545; Stop 569
ttaagtttgaagaattgacccaccg

SEQ ID NO: 365095 - DNA, 25 bp, Artificial
  probe
  misc_feature (1)..(25): SEQ ID NO: 3847; WAN024G8Z; Start 241; Stop 265
cttgggactgttatgaatgctcttg

SEQ ID NO: 365096 - DNA, 25 bp, Artificial
  probe
  misc_feature (1)..(25): SEQ ID NO: 3847; WAN024G8Z; Start 584; Stop 608
aaggtcttcgtatcatggactcaac

SEQ ID NO: 365097 - DNA, 25 bp, Artificial
  probe
  misc_feature (1)..(25): SEQ ID NO: 3847; WAN024G8Z; Start 392; Stop 416
ttatctttggtgctggaattggttc

SEQ ID NO: 365098 - DNA, 25 bp, Artificial
  probe
  misc_feature (1)..(25): SEQ ID NO: 3847; WAN024G8Z; Start 391; Stop 415
gttatctttggtgctggaattggtt

SEQ ID NO: 365099 - DNA, 25 bp, Artificial
  probe
  misc_feature (1)..(25): SEQ ID NO: 3847; WAN024G8Z; Start 388; Stop 412
atcgttatctttggtgctggaattg

SEQ ID NO: 365100 - DNA, 25 bp, Artificial
  probe
  misc_feature (1)..(25): SEQ ID NO: 3847; WAN024G8Z; Start 235; Stop 259
ggaatgcttgggactgttatgaatg

SEQ ID NO: 365101 - DNA, 25 bp, Artificial
  probe
  misc_feature (1)..(25): SEQ ID NO: 3847; WAN024G8Z; Start 119; Stop 143
ttcaagaagttcatagcttaggtat

SEQ ID NO: 365102 - DNA, 25 bp, Artificial
  probe
  misc_feature (1)..(25): SEQ ID NO: 3847; WAN024G8Z; Start 118; Stop 142
attcaagaagttcatagcttaggta

SEQ ID NO: 365103 - DNA, 25 bp, Artificial
  probe
  misc_feature (1)..(25): SEQ ID NO: 3847; WAN024G8Z; Start 114; Stop 138
agagattcaagaagttcatagctta

SEQ ID NO: 365104 - DNA, 25 bp, Artificial
  probe
  misc_feature (1)..(25): SEQ ID NO: 3847; WAN024G8Z; Start 699; Stop 723
aaatatcggaacaacagtttcaaat

SEQ ID NO: 365105 - DNA, 25 bp, Artificial
  probe
  misc_feature (1)..(25): SEQ ID NO: 3847; WAN024G8Z; Start 242; Stop 266
ttgggactgttatgaatgctcttgt

SEQ ID NO: 365106 - DNA, 25 bp, Artificial
  probe
  misc_feature (1)..(25): SEQ ID NO: 3847; WAN024G8Z; Start 115; Stop 139
gagattcaagaagttcatagcttag

SEQ ID NO: 365107 - DNA, 25 bp, Artificial
  probe
  misc_feature (1)..(25): SEQ ID NO: 3847; WAN024G8Z; Start 88; Stop 112
atccaaacagttcaaacaatcgcaa

SEQ ID NO: 365108 - DNA, 25 bp, Artificial
  probe
  misc_feature (1)..(25): SEQ ID NO: 3847; WAN024G8Z; Start 35; Stop 59
taatcaagttatcaggtgaagccct

SEQ ID NO: 365109 - DNA, 25 bp, Artificial
  probe
  misc_feature (1)..(25): SEQ ID NO: 3848; WAN024D2N; Start 1507; Stop 1531
ggagaatcaggttcaggtaagagta

SEQ ID NO: 365110 - DNA, 25 bp, Artificial
  probe
  misc_feature (1)..(25): SEQ ID NO: 3848; WAN024D2N; Start 1499; Stop 1523
ctattgttggagaatcaggttcagg

SEQ ID NO: 365111 - DNA, 25 bp, Artificial
  probe
  misc_feature (1)..(25): SEQ ID NO: 3848; WAN024D2N; Start 1491; Stop 1515
aactgttgctattgttggagaatca

SEQ ID NO: 365112 - DNA, 25 bp, Artificial
  probe
  misc_feature (1)..(25): SEQ ID NO: 3848; WAN024D2N; Start 1793; Stop 1817
tcatcgctgaagaaggtaataactt

SEQ ID NO: 365113 - DNA, 25 bp, Artificial
  probe
  misc_feature (1)..(25): SEQ ID NO: 3848; WAN024D2N; Start 1792; Stop 1816
atcatcgctgaagaaggtaataact

SEQ ID NO: 365114 - DNA, 25 bp, Artificial
  probe
  misc_feature (1)..(25): SEQ ID NO: 3848; WAN024D2N; Start 1789; Stop 1813
acaatcatcgctgaagaaggtaata

SEQ ID NO: 365115 - DNA, 25 bp, Artificial
  probe
  misc_feature (1)..(25): SEQ ID NO: 3848; WAN024D2N; Start 1782; Stop 1806
attagagacaatcatcgctgaagaa

SEQ ID NO: 365116 - DNA, 25 bp, Artificial
  probe
  misc_feature (1)..(25): SEQ ID NO: 3848; WAN024D2N; Start 1495; Stop 1519
gttgctattgttggagaatcaggtt

SEQ ID NO: 365117 - DNA, 25 bp, Artificial
  probe
  misc_feature (1)..(25): SEQ ID NO: 3848; WAN024D2N; Start 322; Stop 346
aggcagagaatgtcaataagtgaat

SEQ ID NO: 365118 - DNA, 25 bp, Artificial
  probe
  misc_feature (1)..(25): SEQ ID NO: 3848; WAN024D2N; Start 1496; Stop 1520
ttgctattgttggagaatcaggttc

SEQ ID NO: 365119 - DNA, 25 bp, Artificial
  probe
  misc_feature (1)..(25): SEQ ID NO: 3848; WAN024D2N; Start 1233; Stop 1257
agcaataagtacagtctcaccatac

SEQ ID NO: 365120 - DNA, 25 bp, Artificial
  probe
  misc_feature (1)..(25): SEQ ID NO: 3848; WAN024D2N; Start 1231; Stop 1255
gtagcaataagtacagtctcaccat

SEQ ID NO: 365121 - DNA, 25 bp, Artificial
  probe
  misc_feature (1)..(25): SEQ ID NO: 3848; WAN024D2N; Start 323; Stop 347
ggcagagaatgtcaataagtgaatt

SEQ ID NO: 365122 - DNA, 25 bp, Artificial
  probe
  misc_feature (1)..(25): SEQ ID NO: 3848; WAN024D2N; Start 1783; Stop 1807
ttagagacaatcatcgctgaagaag

SEQ ID NO: 365123 - DNA, 25 bp, Artificial
  probe
  misc_feature (1)..(25): SEQ ID NO: 3848; WAN024D2N; Start 1791; Stop 1815
aatcatcgctgaagaaggtaataac

SEQ ID NO: 365124 - DNA, 25 bp, Artificial
  probe
  misc_feature (1)..(25): SEQ ID NO: 3848; WAN024D2N; Start 1790; Stop 1814
caatcatcgctgaagaaggtaataa

SEQ ID NO: 365125 - DNA, 25 bp, Artificial
  probe
  misc_feature (1)..(25): SEQ ID NO: 3848; WAN024D2N; Start 1511; Stop 1535
aatcaggttcaggtaagagtacatt

SEQ ID NO: 365126 - DNA, 25 bp, Artificial
  probe
  misc_feature (1)..(25): SEQ ID NO: 3848; WAN024D2N; Start 1514; Stop 1538
caggttcaggtaagagtacattagc

SEQ ID NO: 365127 - DNA, 25 bp, Artificial
  probe
  misc_feature (1)..(25): SEQ ID NO: 3848; WAN024D2N; Start 1513; Stop 1537
tcaggttcaggtaagagtacattag

SEQ ID NO: 365128 - DNA, 25 bp, Artificial
  probe
  misc_feature (1)..(25): SEQ ID NO: 3848; WAN024D2N; Start 1508; Stop 1532
gagaatcaggttcaggtaagagtac

SEQ ID NO: 365129 - DNA, 25 bp, Artificial
  probe
  misc_feature (1)..(25): SEQ ID NO: 3848; WAN024D2N; Start 321; Stop 345
caggcagagaatgtcaataagtgaa

SEQ ID NO: 365130 - DNA, 25 bp, Artificial
  probe
  misc_feature (1)..(25): SEQ ID NO: 3848; WAN024D2N; Start 1510; Stop 1534
gaatcaggttcaggtaagagtacat

SEQ ID NO: 365131 - DNA, 25 bp, Artificial
  probe
  misc_feature (1)..(25): SEQ ID NO: 3848; WAN024D2N; Start 1501; Stop 1525
attgttggagaatcaggttcaggta

SEQ ID NO: 365132 - DNA, 25 bp, Artificial
  probe
  misc_feature (1)..(25): SEQ ID NO: 3848; WAN024D2N; Start 1500; Stop 1524
tattgttggagaatcaggttcaggt

SEQ ID NO: 365133 - DNA, 25 bp, Artificial
  probe
  misc_feature (1)..(25): SEQ ID NO: 3848; WAN024D2N; Start 1498; Stop 1522
gctattgttggagaatcaggttcag

SEQ ID NO: 365134 - DNA, 25 bp, Artificial
  probe
  misc_feature (1)..(25): SEQ ID NO: 3848; WAN024D2N; Start 2052; Stop 2076
ccatagagaacttcttgaactagga

SEQ ID NO: 365135 - DNA, 25 bp, Artificial
  probe
  misc_feature (1)..(25): SEQ ID NO: 3848; WAN024D2N; Start 1509; Stop 1533
agaatcaggttcaggtaagagtaca

SEQ ID NO: 365136 - DNA, 25 bp, Artificial
  probe
  misc_feature (1)..(25): SEQ ID NO: 3848; WAN024D2N; Start 1788; Stop 1812
gacaatcatcgctgaagaaggtaat

SEQ ID NO: 365137 - DNA, 25 bp, Artificial
  probe
  misc_feature (1)..(25): SEQ ID NO: 3848; WAN024D2N; Start 1505; Stop 1529
ttggagaatcaggttcaggtaagag

SEQ ID NO: 365138 - DNA, 25 bp, Artificial
  probe
  misc_feature (1)..(25): SEQ ID NO: 3848; WAN024D2N; Start 1232; Stop 1256
tagcaataagtacagtctcaccata

SEQ ID NO: 365139 - DNA, 25 bp, Artificial
  probe
  misc_feature (1)..(25): SEQ ID NO: 3848; WAN024D2N; Start 2054; Stop 2078
atagagaacttcttgaactaggagg

SEQ ID NO: 365140 - DNA, 25 bp, Artificial
  probe
  misc_feature (1)..(25): SEQ ID NO: 3848; WAN024D2N; Start 52; Stop 76
tgctgtgccatgatattgaactatt

SEQ ID NO: 365141 - DNA, 25 bp, Artificial
  probe
  misc_feature (1)..(25): SEQ ID NO: 3848; WAN024D2N; Start 1502; Stop 1526
ttgttggagaatcaggttcaggtaa

SEQ ID NO: 365142 - DNA, 25 bp, Artificial
  probe
  misc_feature (1)..(25): SEQ ID NO: 3849; WAN024C6C; Start 63; Stop 87
actagcaatcatacgatattcaagc

SEQ ID NO: 365143 - DNA, 25 bp, Artificial
  probe
  misc_feature (1)..(25): SEQ ID NO: 3849; WAN024C6C; Start 56; Stop 80
aactcttactagcaatcatacgata

SEQ ID NO: 365144 - DNA, 25 bp, Artificial
  probe
  misc_feature (1)..(25): SEQ ID NO: 3849; WAN024C6C; Start 102; Stop 126
ccttcctgcttatttcttagaactg

SEQ ID NO: 365145 - DNA, 25 bp, Artificial
  probe
  misc_feature (1)..(25): SEQ ID NO: 3849; WAN024C6C; Start 101; Stop 125
tccttcctgcttatttcttagaact

SEQ ID NO: 365146 - DNA, 25 bp, Artificial
  probe
  misc_feature (1)..(25): SEQ ID NO: 3849; WAN024C6C; Start 57; Stop 81
actcttactagcaatcatacgatat

SEQ ID NO: 365147 - DNA, 25 bp, Artificial
  probe
  misc_feature (1)..(25): SEQ ID NO: 3849; WAN024C6C; Start 54; Stop 78
caaactcttactagcaatcatacga

SEQ ID NO: 365148 - DNA, 25 bp, Artificial
  probe
  misc_feature (1)..(25): SEQ ID NO: 3849; WAN024C6C; Start 53; Stop 77
tcaaactcttactagcaatcatacg

SEQ ID NO: 365149 - DNA, 25 bp, Artificial
  probe
  misc_feature (1)..(25): SEQ ID NO: 3849; WAN024C6C; Start 100; Stop 124
ttccttcctgcttatttcttagaac

SEQ ID NO: 365150 - DNA, 25 bp, Artificial
  probe
  misc_feature (1)..(25): SEQ ID NO: 3849; WAN024C6C; Start 105; Stop 129
tcctgcttatttcttagaactgaag

SEQ ID NO: 365151 - DNA, 25 bp, Artificial
  probe
  misc_feature (1)..(25): SEQ ID NO: 3849; WAN024C6C; Start 103; Stop 127
cttcctgcttatttcttagaactga

SEQ ID NO: 365152 - DNA, 25 bp, Artificial
  probe
  misc_feature (1)..(25): SEQ ID NO: 3849; WAN024C6C; Start 55; Stop 79
aaactcttactagcaatcatacgat

SEQ ID NO: 365153 - DNA, 25 bp, Artificial
  probe
  misc_feature (1)..(25): SEQ ID NO: 3849; WAN024C6C; Start 104; Stop 128
ttcctgcttatttcttagaactgaa

SEQ ID NO: 365154 - DNA, 25 bp, Artificial
  probe
  misc_feature (1)..(25): SEQ ID NO: 3849; WAN024C6C; Start 99; Stop 123
tttccttcctgcttatttcttagaa

SEQ ID NO: 365155 - DNA, 25 bp, Artificial
  probe
  misc_feature (1)..(25): SEQ ID NO: 3849; WAN024C6C; Start 62; Stop 86
tactagcaatcatacgatattcaag

SEQ ID NO: 365156 - DNA, 25 bp, Artificial
  probe
  misc_feature (1)..(25): SEQ ID NO: 3849; WAN024C6C; Start 60; Stop 84
cttactagcaatcatacgatattca

SEQ ID NO: 365157 - DNA, 25 bp, Artificial
  probe
  misc_feature (1)..(25): SEQ ID NO: 3849; WAN024C6C; Start 65; Stop 89
tagcaatcatacgatattcaagctc

SEQ ID NO: 365158 - DNA, 25 bp, Artificial
  probe
  misc_feature (1)..(25): SEQ ID NO: 3849; WAN024C6C; Start 64; Stop 88
ctagcaatcatacgatattcaagct

SEQ ID NO: 365159 - DNA, 25 bp, Artificial
  probe
  misc_feature (1)..(25): SEQ ID NO: 3849; WAN024C6C; Start 59; Stop 83
tcttactagcaatcatacgatattc

SEQ ID NO: 365160 - DNA, 25 bp, Artificial
  probe
  misc_feature (1)..(25): SEQ ID NO: 3849; WAN024C6C; Start 58; Stop 82
ctcttactagcaatcatacgatatt

SEQ ID NO: 365161 - DNA, 25 bp, Artificial
  probe
  misc_feature (1)..(25): SEQ ID NO: 3849; WAN024C6C; Start 61; Stop 85
ttactagcaatcatacgatattcaa

SEQ ID NO: 365162 - DNA, 25 bp, Artificial
  probe
  misc_feature (1)..(25): SEQ ID NO: 3849; WAN024C6C; Start 49; Stop 73
aatttcaaactcttactagcaatca

SEQ ID NO: 365163 - DNA, 25 bp, Artificial
  probe
  misc_feature (1)..(25): SEQ ID NO: 3849; WAN024C6C; Start 52; Stop 76
ttcaaactcttactagcaatcatac

SEQ ID NO: 365164 - DNA, 25 bp, Artificial
  probe
  misc_feature (1)..(25): SEQ ID NO: 3849; WAN024C6C; Start 50; Stop 74
atttcaaactcttactagcaatcat

SEQ ID NO: 365165 - DNA, 25 bp, Artificial
  probe
  misc_feature (1)..(25): SEQ ID NO: 3849; WAN024C6C; Start 106; Stop 130
cctgcttatttcttagaactgaaga

SEQ ID NO: 365166 - DNA, 25 bp, Artificial
  probe
  misc_feature (1)..(25): SEQ ID NO: 3849; WAN024C6C; Start 178; Stop 202
cataacagttgcgcttcattaagtc

SEQ ID NO: 365167 - DNA, 25 bp, Artificial
  probe
  misc_feature (1)..(25): SEQ ID NO: 3849; WAN024C6C; Start 180; Stop 204
taacagttgcgcttcattaagtcat

SEQ ID NO: 365168 - DNA, 25 bp, Artificial
  probe
  misc_feature (1)..(25): SEQ ID NO: 3849; WAN024C6C; Start 179; Stop 203
ataacagttgcgcttcattaagtca

SEQ ID NO: 365169 - DNA, 25 bp, Artificial
  probe
  misc_feature (1)..(25): SEQ ID NO: 3849; WAN024C6C; Start 177; Stop 201
tcataacagttgcgcttcattaagt

SEQ ID NO: 365170 - DNA, 25 bp, Artificial
  probe
  misc_feature (1)..(25): SEQ ID NO: 3849; WAN024C6C; Start 98; Stop 122
ttttccttcctgcttatttcttaga

SEQ ID NO: 365171 - DNA, 25 bp, Artificial
  probe
  misc_feature (1)..(25): SEQ ID NO: 3849; WAN024C6C; Start 51; Stop 75
tttcaaactcttactagcaatcata

SEQ ID NO: 365172 - DNA, 25 bp, Artificial
  probe
  misc_feature (1)..(25): SEQ ID NO: 3849; WAN024C6C; Start 181; Stop 205
aacagttgcgcttcattaagtcatc

SEQ ID NO: 365173 - DNA, 25 bp, Artificial
  probe
  misc_feature (1)..(25): SEQ ID NO: 3849; WAN024C6C; Start 192; Stop 216
ttcattaagtcatccccagagcaag

SEQ ID NO: 365174 - DNA, 25 bp, Artificial
  probe
  misc_feature (1)..(25): SEQ ID NO: 3849; WAN024C6C; Start 191; Stop 215
cttcattaagtcatccccagagcaa

SEQ ID NO: 365175 - DNA, 25 bp, Artificial
  probe
  misc_feature (1)..(25): SEQ ID NO: 3850; WAN024B59; Start 68; Stop 92
ccatagtaagggctaaacatatcca

SEQ ID NO: 365176 - DNA, 25 bp, Artificial
  probe
  misc_feature (1)..(25): SEQ ID NO: 3850; WAN024B59; Start 55; Stop 79
ctgtttagccaagccatagtaaggg

SEQ ID NO: 365177 - DNA, 25 bp, Artificial
  probe
  misc_feature (1)..(25): SEQ ID NO: 3850; WAN024B59; Start 52; Stop 76
aagctgtttagccaagccatagtaa

SEQ ID NO: 365178 - DNA, 25 bp, Artificial
  probe
  misc_feature (1)..(25): SEQ ID NO: 3850; WAN024B59; Start 67; Stop 91
gccatagtaagggctaaacatatcc

SEQ ID NO: 365179 - DNA, 25 bp, Artificial
  probe
  misc_feature (1)..(25): SEQ ID NO: 3850; WAN024B59; Start 53; Stop 77
agctgtttagccaagccatagtaag

SEQ ID NO: 365180 - DNA, 25 bp, Artificial
  probe
  misc_feature (1)..(25): SEQ ID NO: 3850; WAN024B59; Start 51; Stop 75
gaagctgtttagccaagccatagta

SEQ ID NO: 365181 - DNA, 25 bp, Artificial
  probe
  misc_feature (1)..(25): SEQ ID NO: 3850; WAN024B59; Start 54; Stop 78
gctgtttagccaagccatagtaagg

SEQ ID NO: 365182 - DNA, 25 bp, Artificial
  probe
  misc_feature (1)..(25): SEQ ID NO: 3850; WAN024B59; Start 118; Stop 142
gacggctctatcgtagcgaagaaag

SEQ ID NO: 365183 - DNA, 25 bp, Artificial
  probe
  misc_feature (1)..(25): SEQ ID NO: 3850; WAN024B59; Start 56; Stop 80
tgtttagccaagccatagtaagggc

SEQ ID NO: 365184 - DNA, 25 bp, Artificial
  probe
  misc_feature (1)..(25): SEQ ID NO: 3851; WAN024CF9; Start 1848; Stop 1872
accgactacaagacaagaacaatat

SEQ ID NO: 365185 - DNA, 25 bp, Artificial
  probe
  misc_feature (1)..(25): SEQ ID NO: 3851; WAN024CF9; Start 1912; Stop 1936
tcatataaggaatctcaacaagcca

SEQ ID NO: 365186 - DNA, 25 bp, Artificial
  probe
  misc_feature (1)..(25): SEQ ID NO: 3851; WAN024CF9; Start 780; Stop 804
gcttcaatacaacagttcagacatt

SEQ ID NO: 365187 - DNA, 25 bp, Artificial
  probe
  misc_feature (1)..(25): SEQ ID NO: 3851; WAN024CF9; Start 2117; Stop 2141
atacaagaagtagaccaccaatcaa

SEQ ID NO: 365188 - DNA, 25 bp, Artificial
  probe
  misc_feature (1)..(25): SEQ ID NO: 3851; WAN024CF9; Start 2116; Stop 2140
aatacaagaagtagaccaccaatca

SEQ ID NO: 365189 - DNA, 25 bp, Artificial
  probe
  misc_feature (1)..(25): SEQ ID NO: 3851; WAN024CF9; Start 1849; Stop 1873
ccgactacaagacaagaacaatatc

SEQ ID NO: 365190 - DNA, 25 bp, Artificial
  probe
  misc_feature (1)..(25): SEQ ID NO: 3851; WAN024CF9; Start 1847; Stop 1871
gaccgactacaagacaagaacaata

SEQ ID NO: 365191 - DNA, 25 bp, Artificial
  probe
  misc_feature (1)..(25): SEQ ID NO: 3851; WAN024CF9; Start 2041; Stop 2065
actacagcagatagaacttcacaac

SEQ ID NO: 365192 - DNA, 25 bp, Artificial
  probe
  misc_feature (1)..(25): SEQ ID NO: 3851; WAN024CF9; Start 2040; Stop 2064
cactacagcagatagaacttcacaa

SEQ ID NO: 365193 - DNA, 25 bp, Artificial
  probe
  misc_feature (1)..(25): SEQ ID NO: 3851; WAN024CF9; Start 1913; Stop 1937
catataaggaatctcaacaagccaa

SEQ ID NO: 365194 - DNA, 25 bp, Artificial
  probe
  misc_feature (1)..(25): SEQ ID NO: 3851; WAN024CF9; Start 779; Stop 803
tgcttcaatacaacagttcagacat

SEQ ID NO: 365195 - DNA, 25 bp, Artificial
  probe
  misc_feature (1)..(25): SEQ ID NO: 3851; WAN024CF9; Start 905; Stop 929
acagaagcaataccaatctaaccat

SEQ ID NO: 365196 - DNA, 25 bp, Artificial
  probe
  misc_feature (1)..(25): SEQ ID NO: 3851; WAN024CF9; Start 1850; Stop 1874
cgactacaagacaagaacaatatca

SEQ ID NO: 365197 - DNA, 25 bp, Artificial
  probe
  misc_feature (1)..(25): SEQ ID NO: 3851; WAN024CF9; Start 900; Stop 924
tgaagacagaagcaataccaatcta

SEQ ID NO: 365198 - DNA, 25 bp, Artificial
  probe
  misc_feature (1)..(25): SEQ ID NO: 3851; WAN024CF9; Start 465; Stop 489
tgttggattcctcttactcttgatt

SEQ ID NO: 365199 - DNA, 25 bp, Artificial
  probe
  misc_feature (1)..(25): SEQ ID NO: 3851; WAN024CF9; Start 464; Stop 488
atgttggattcctcttactcttgat

SEQ ID NO: 365200 - DNA, 25 bp, Artificial
  probe
  misc_feature (1)..(25): SEQ ID NO: 3851; WAN024CF9; Start 2036; Stop 2060
caaccactacagcagatagaacttc

SEQ ID NO: 365201 - DNA, 25 bp, Artificial
  probe
  misc_feature (1)..(25): SEQ ID NO: 3851; WAN024CF9; Start 903; Stop 927
agacagaagcaataccaatctaacc

SEQ ID NO: 365202 - DNA, 25 bp, Artificial
  probe
  misc_feature (1)..(25): SEQ ID NO: 3851; WAN024CF9; Start 906; Stop 930
cagaagcaataccaatctaaccatt

SEQ ID NO: 365203 - DNA, 25 bp, Artificial
  probe
  misc_feature (1)..(25): SEQ ID NO: 3851; WAN024CF9; Start 904; Stop 928
gacagaagcaataccaatctaacca

SEQ ID NO: 365204 - DNA, 25 bp, Artificial
  probe
  misc_feature (1)..(25): SEQ ID NO: 3851; WAN024CF9; Start 899; Stop 923
ttgaagacagaagcaataccaatct

SEQ ID NO: 365205 - DNA, 25 bp, Artificial
  probe
  misc_feature (1)..(25): SEQ ID NO: 3851; WAN024CF9; Start 2035; Stop 2059
tcaaccactacagcagatagaactt

SEQ ID NO: 365206 - DNA, 25 bp, Artificial
  probe
  misc_feature (1)..(25): SEQ ID NO: 3851; WAN024CF9; Start 2031; Stop 2055
aacttcaaccactacagcagataga

SEQ ID NO: 365207 - DNA, 25 bp, Artificial
  probe
  misc_feature (1)..(25): SEQ ID NO: 3851; WAN024CF9; Start 2030; Stop 2054
caacttcaaccactacagcagatag

SEQ ID NO: 365208 - DNA, 25 bp, Artificial
  probe
  misc_feature (1)..(25): SEQ ID NO: 3851; WAN024CF9; Start 1911; Stop 1935
ttcatataaggaatctcaacaagcc

SEQ ID NO: 365209 - DNA, 25 bp, Artificial
  probe
  misc_feature (1)..(25): SEQ ID NO: 3851; WAN024CF9; Start 902; Stop 926
aagacagaagcaataccaatctaac

SEQ ID NO: 365210 - DNA, 25 bp, Artificial
  probe
  misc_feature (1)..(25): SEQ ID NO: 3851; WAN024CF9; Start 2037; Stop 2061
aaccactacagcagatagaacttca

SEQ ID NO: 365211 - DNA, 25 bp, Artificial
  probe
  misc_feature (1)..(25): SEQ ID NO: 3851; WAN024CF9; Start 910; Stop 934
agcaataccaatctaaccattacaa

SEQ ID NO: 365212 - DNA, 25 bp, Artificial
  probe
  misc_feature (1)..(25): SEQ ID NO: 3851; WAN024CF9; Start 909; Stop 933
aagcaataccaatctaaccattaca

SEQ ID NO: 365213 - DNA, 25 bp, Artificial
  probe
  misc_feature (1)..(25): SEQ ID NO: 3851; WAN024CF9; Start 2033; Stop 2057
cttcaaccactacagcagatagaac

SEQ ID NO: 365214 - DNA, 25 bp, Artificial
  probe
  misc_feature (1)..(25): SEQ ID NO: 3851; WAN024CF9; Start 2042; Stop 2066
ctacagcagatagaacttcacaacg

SEQ ID NO: 365215 - DNA, 25 bp, Artificial
  probe
  misc_feature (1)..(25): SEQ ID NO: 3851; WAN024CF9; Start 463; Stop 487
tatgttggattcctcttactcttga

SEQ ID NO: 365216 - DNA, 25 bp, Artificial
  probe
  misc_feature (1)..(25): SEQ ID NO: 3851; WAN024CF9; Start 386; Stop 410
ctacagcagattccattggtaagaa

SEQ ID NO: 365217 - DNA, 25 bp, Artificial
  probe
  misc_feature (1)..(25): SEQ ID NO: 3852; WAN024CVQ; Start 20; Stop 44
atagattactgctggtcatattgcc

SEQ ID NO: 365218 - DNA, 25 bp, Artificial
  probe
  misc_feature (1)..(25): SEQ ID NO: 3852; WAN024CVQ; Start 19; Stop 43
aatagattactgctggtcatattgc

SEQ ID NO: 365219 - DNA, 25 bp, Artificial
  probe
  misc_feature (1)..(25): SEQ ID NO: 3852; WAN024CVQ; Start 48; Stop 72
gatagctccacaagacatgatgatg

SEQ ID NO: 365220 - DNA, 25 bp, Artificial
  probe
  misc_feature (1)..(25): SEQ ID NO: 3852; WAN024CVQ; Start 183; Stop 207
cagaaacagtagtatgacggtatct

SEQ ID NO: 365221 - DNA, 25 bp, Artificial
  probe
  misc_feature (1)..(25): SEQ ID NO: 3852; WAN024CVQ; Start 21; Stop 45
tagattactgctggtcatattgcca

SEQ ID NO: 365222 - DNA, 25 bp, Artificial
  probe
  misc_feature (1)..(25): SEQ ID NO: 3852; WAN024CVQ; Start 105; Stop 129
ttgtgctagtgtctgttggatgaag

SEQ ID NO: 365223 - DNA, 25 bp, Artificial
  probe
  misc_feature (1)..(25): SEQ ID NO: 3852; WAN024CVQ; Start 184; Stop 208
agaaacagtagtatgacggtatctt

SEQ ID NO: 365224 - DNA, 25 bp, Artificial
  probe
  misc_feature (1)..(25): SEQ ID NO: 3852; WAN024CVQ; Start 182; Stop 206
tcagaaacagtagtatgacggtatc

SEQ ID NO: 365225 - DNA, 25 bp, Artificial
  probe
  misc_feature (1)..(25): SEQ ID NO: 3852; WAN024CVQ; Start 185; Stop 209
gaaacagtagtatgacggtatcttt

SEQ ID NO: 365226 - DNA, 25 bp, Artificial
  probe
  misc_feature (1)..(25): SEQ ID NO: 3852; WAN024CVQ; Start 23; Stop 47
gattactgctggtcatattgccaag

SEQ ID NO: 365227 - DNA, 25 bp, Artificial
  probe
  misc_feature (1)..(25): SEQ ID NO: 3852; WAN024CVQ; Start 104; Stop 128
gttgtgctagtgtctgttggatgaa

SEQ ID NO: 365228 - DNA, 25 bp, Artificial
  probe
  misc_feature (1)..(25): SEQ ID NO: 3852; WAN024CVQ; Start 22; Stop 46
agattactgctggtcatattgccaa

SEQ ID NO: 365229 - DNA, 25 bp, Artificial
  probe
  misc_feature (1)..(25): SEQ ID NO: 3852; WAN024CVQ; Start 156; Stop 180
atccaagatggcaatcatactggtc

SEQ ID NO: 365230 - DNA, 25 bp, Artificial
  probe
  misc_feature (1)..(25): SEQ ID NO: 3852; WAN024CVQ; Start 159; Stop 183
caagatggcaatcatactggtcgtc

SEQ ID NO: 365231 - DNA, 25 bp, Artificial
  probe
  misc_feature (1)..(25): SEQ ID NO: 3852; WAN024CVQ; Start 167; Stop 191
caatcatactggtcgtcagaaacag

SEQ ID NO: 365232 - DNA, 25 bp, Artificial
  probe
  misc_feature (1)..(25): SEQ ID NO: 3852; WAN024CVQ; Start 175; Stop 199
ctggtcgtcagaaacagtagtatga

SEQ ID NO: 365233 - DNA, 25 bp, Artificial
  probe
  misc_feature (1)..(25): SEQ ID NO: 3852; WAN024CVQ; Start 47; Stop 71
ggatagctccacaagacatgatgat

SEQ ID NO: 365234 - DNA, 25 bp, Artificial
  probe
  misc_feature (1)..(25): SEQ ID NO: 3852; WAN024CVQ; Start 56; Stop 80
cacaagacatgatgatggagagcag

SEQ ID NO: 365235 - DNA, 25 bp, Artificial
  probe
  misc_feature (1)..(25): SEQ ID NO: 3852; WAN024CVQ; Start 45; Stop 69
aaggatagctccacaagacatgatg

SEQ ID NO: 365236 - DNA, 25 bp, Artificial
  probe
  misc_feature (1)..(25): SEQ ID NO: 3852; WAN024CVQ; Start 44; Stop 68
caaggatagctccacaagacatgat

SEQ ID NO: 365237 - DNA, 25 bp, Artificial
  probe
  misc_feature (1)..(25): SEQ ID NO: 3852; WAN024CVQ; Start 103; Stop 127
agttgtgctagtgtctgttggatga

SEQ ID NO: 365238 - DNA, 25 bp, Artificial
  probe
  misc_feature (1)..(25): SEQ ID NO: 3852; WAN024CVQ; Start 24; Stop 48
attactgctggtcatattgccaagg

SEQ ID NO: 365239 - DNA, 25 bp, Artificial
  probe
  misc_feature (1)..(25): SEQ ID NO: 3852; WAN024CVQ; Start 160; Stop 184
aagatggcaatcatactggtcgtca

SEQ ID NO: 365240 - DNA, 25 bp, Artificial
  probe
  misc_feature (1)..(25): SEQ ID NO: 3852; WAN024CVQ; Start 49; Stop 73
atagctccacaagacatgatgatgg

SEQ ID NO: 365241 - DNA, 25 bp, Artificial
  probe
  misc_feature (1)..(25): SEQ ID NO: 3852; WAN024CVQ; Start 28; Stop 52
ctgctggtcatattgccaaggatag

SEQ ID NO: 365242 - DNA, 25 bp, Artificial
  probe
  misc_feature (1)..(25): SEQ ID NO: 3852; WAN024CVQ; Start 37; Stop 61
atattgccaaggatagctccacaag

SEQ ID NO: 365243 - DNA, 25 bp, Artificial
  probe
  misc_feature (1)..(25): SEQ ID NO: 3852; WAN024CVQ; Start 153; Stop 177
cacatccaagatggcaatcatactg

SEQ ID NO: 365244 - DNA, 25 bp, Artificial
  probe
  misc_feature (1)..(25): SEQ ID NO: 3852; WAN024CVQ; Start 151; Stop 175
gacacatccaagatggcaatcatac

SEQ ID NO: 365245 - DNA, 25 bp, Artificial
  probe
  misc_feature (1)..(25): SEQ ID NO: 3852; WAN024CVQ; Start 18; Stop 42
aaatagattactgctggtcatattg

SEQ ID NO: 365246 - DNA, 25 bp, Artificial
  probe
  misc_feature (1)..(25): SEQ ID NO: 3852; WAN024CVQ; Start 36; Stop 60
catattgccaaggatagctccacaa

SEQ ID NO: 365247 - DNA, 25 bp, Artificial
  probe
  misc_feature (1)..(25): SEQ ID NO: 3852; WAN024CVQ; Start 152; Stop 176
acacatccaagatggcaatcatact

SEQ ID NO: 365248 - DNA, 25 bp, Artificial
  probe
  misc_feature (1)..(25): SEQ ID NO: 3852; WAN024CVQ; Start 102; Stop 126
cagttgtgctagtgtctgttggatg

SEQ ID NO: 365249 - DNA, 25 bp, Artificial
  probe
  misc_feature (1)..(25): SEQ ID NO: 3852; WAN024CVQ; Start 101; Stop 125
tcagttgtgctagtgtctgttggat

SEQ ID NO: 365250 - DNA, 25 bp, Artificial
  probe
  misc_feature (1)..(25): SEQ ID NO: 3853; WAN024D2C; Start 50; Stop 74
gattccgtaaccgtatgtcaactaa

SEQ ID NO: 365251 - DNA, 25 bp, Artificial
  probe
  misc_feature (1)..(25): SEQ ID NO: 3853; WAN024D2C; Start 49; Stop 73
ggattccgtaaccgtatgtcaacta

SEQ ID NO: 365252 - DNA, 25 bp, Artificial
  probe
  misc_feature (1)..(25): SEQ ID NO: 3853; WAN024D2C; Start 51; Stop 75
attccgtaaccgtatgtcaactaaa

SEQ ID NO: 365253 - DNA, 25 bp, Artificial
  probe
  misc_feature (1)..(25): SEQ ID NO: 3853; WAN024D2C; Start 11; Stop 35
cttatcaaccaagtaaacttcgtcg

SEQ ID NO: 365254 - DNA, 25 bp, Artificial
  probe
  misc_feature (1)..(25): SEQ ID NO: 3853; WAN024D2C; Start 12; Stop 36
ttatcaaccaagtaaacttcgtcgt

SEQ ID NO: 365255 - DNA, 25 bp, Artificial
  probe
  misc_feature (1)..(25): SEQ ID NO: 3853; WAN024D2C; Start 13; Stop 37
tatcaaccaagtaaacttcgtcgtg

SEQ ID NO: 365256 - DNA, 25 bp, Artificial
  probe
  misc_feature (1)..(25): SEQ ID NO: 3853; WAN024D2C; Start 52; Stop 76
ttccgtaaccgtatgtcaactaaaa

SEQ ID NO: 365257 - DNA, 25 bp, Artificial
  probe
  misc_feature (1)..(25): SEQ ID NO: 3853; WAN024D2C; Start 10; Stop 34
acttatcaaccaagtaaacttcgtc

SEQ ID NO: 365258 - DNA, 25 bp, Artificial
  probe
  misc_feature (1)..(25): SEQ ID NO: 3853; WAN024D2C; Start 14; Stop 38
atcaaccaagtaaacttcgtcgtgc

SEQ ID NO: 365259 - DNA, 25 bp, Artificial
  probe
  misc_feature (1)..(25): SEQ ID NO: 3853; WAN024D2C; Start 9; Stop 33
tacttatcaaccaagtaaacttcgt

SEQ ID NO: 365260 - DNA, 25 bp, Artificial
  probe
  misc_feature (1)..(25): SEQ ID NO: 3853; WAN024D2C; Start 8; Stop 32
gtacttatcaaccaagtaaacttcg

SEQ ID NO: 365261 - DNA, 25 bp, Artificial
  probe
  misc_feature (1)..(25): SEQ ID NO: 3853; WAN024D2C; Start 7; Stop 31
cgtacttatcaaccaagtaaacttc

SEQ ID NO: 365262 - DNA, 25 bp, Artificial
  probe
  misc_feature (1)..(25): SEQ ID NO: 3853; WAN024D2C; Start 1; Stop 25
gtgaaacgtacttatcaaccaagta

SEQ ID NO: 365263 - DNA, 25 bp, Artificial
  probe
  misc_feature (1)..(25): SEQ ID NO: 3853; WAN024D2C; Start 2; Stop 26
tgaaacgtacttatcaaccaagtaa

SEQ ID NO: 365264 - DNA, 25 bp, Artificial
  probe
  misc_feature (1)..(25): SEQ ID NO: 3853; WAN024D2C; Start 6; Stop 30
acgtacttatcaaccaagtaaactt

SEQ ID NO: 365265 - DNA, 25 bp, Artificial
  probe
  misc_feature (1)..(25): SEQ ID NO: 3853; WAN024D2C; Start 5; Stop 29
aacgtacttatcaaccaagtaaact

SEQ ID NO: 365266 - DNA, 25 bp, Artificial
  probe
  misc_feature (1)..(25): SEQ ID NO: 3853; WAN024D2C; Start 116; Stop 140
gcaaagttttggctgcataactaat

SEQ ID NO: 365267 - DNA, 25 bp, Artificial
  probe
  misc_feature (1)..(25): SEQ ID NO: 3853; WAN024D2C; Start 4; Stop 28
aaacgtacttatcaaccaagtaaac

SEQ ID NO: 365268 - DNA, 25 bp, Artificial
  probe
  misc_feature (1)..(25): SEQ ID NO: 3853; WAN024D2C; Start 3; Stop 27
gaaacgtacttatcaaccaagtaaa

SEQ ID NO: 365269 - DNA, 25 bp, Artificial
  probe
  misc_feature (1)..(25): SEQ ID NO: 3853; WAN024D2C; Start 48; Stop 72
cggattccgtaaccgtatgtcaact

SEQ ID NO: 365270 - DNA, 25 bp, Artificial
  probe
  misc_feature (1)..(25): SEQ ID NO: 3853; WAN024D2C; Start 115; Stop 139
cgcaaagttttggctgcataactaa

SEQ ID NO: 365271 - DNA, 25 bp, Artificial
  probe
  misc_feature (1)..(25): SEQ ID NO: 3853; WAN024D2C; Start 114; Stop 138
acgcaaagttttggctgcataacta

SEQ ID NO: 365272 - DNA, 25 bp, Artificial
  probe
  misc_feature (1)..(25): SEQ ID NO: 3853; WAN024D2C; Start 113; Stop 137
gacgcaaagttttggctgcataact

SEQ ID NO: 365273 - DNA, 25 bp, Artificial
  probe
  misc_feature (1)..(25): SEQ ID NO: 3854; WAN024DNA; Start 19; Stop 43
tcaatacaaggagttgggaaagtta

SEQ ID NO: 365274 - DNA, 25 bp, Artificial
  probe
  misc_feature (1)..(25): SEQ ID NO: 3854; WAN024DNA; Start 17; Stop 41
attcaatacaaggagttgggaaagt

SEQ ID NO: 365275 - DNA, 25 bp, Artificial
  probe
  misc_feature (1)..(25): SEQ ID NO: 3854; WAN024DNA; Start 18; Stop 42
ttcaatacaaggagttgggaaagtt

SEQ ID NO: 365276 - DNA, 25 bp, Artificial
  probe
  misc_feature (1)..(25): SEQ ID NO: 3854; WAN024DNA; Start 20; Stop 44
caatacaaggagttgggaaagttat

SEQ ID NO: 365277 - DNA, 25 bp, Artificial
  probe
  misc_feature (1)..(25): SEQ ID NO: 3854; WAN024DNA; Start 16; Stop 40
tattcaatacaaggagttgggaaag

SEQ ID NO: 365278 - DNA, 25 bp, Artificial
  probe
  misc_feature (1)..(25): SEQ ID NO: 3854; WAN024DNA; Start 22; Stop 46
atacaaggagttgggaaagttattt

SEQ ID NO: 365279 - DNA, 25 bp, Artificial
  probe
  misc_feature (1)..(25): SEQ ID NO: 3854; WAN024DNA; Start 21; Stop 45
aatacaaggagttgggaaagttatt

SEQ ID NO: 365280 - DNA, 25 bp, Artificial
  probe
  misc_feature (1)..(25): SEQ ID NO: 3854; WAN024DNA; Start 15; Stop 39
atattcaatacaaggagttgggaaa

SEQ ID NO: 365281 - DNA, 25 bp, Artificial
  probe
  misc_feature (1)..(25): SEQ ID NO: 3854; WAN024DNA; Start 14; Stop 38
aatattcaatacaaggagttgggaa

SEQ ID NO: 365282 - DNA, 25 bp, Artificial
  probe
  misc_feature (1)..(25): SEQ ID NO: 3854; WAN024DNA; Start 13; Stop 37
aaatattcaatacaaggagttggga

SEQ ID NO: 365283 - DNA, 25 bp, Artificial
  probe
  misc_feature (1)..(25): SEQ ID NO: 3854; WAN024DNA; Start 60; Stop 84
ttctgatgaaattgtccaaaacctt

SEQ ID NO: 365284 - DNA, 25 bp, Artificial
  probe
  misc_feature (1)..(25): SEQ ID NO: 3854; WAN024DNA; Start 70; Stop 94
attgtccaaaaccttgctatgattg

SEQ ID NO: 365285 - DNA, 25 bp, Artificial
  probe
  misc_feature (1)..(25): SEQ ID NO: 3854; WAN024DNA; Start 67; Stop 91
gaaattgtccaaaaccttgctatga

SEQ ID NO: 365286 - DNA, 25 bp, Artificial
  probe
  misc_feature (1)..(25): SEQ ID NO: 3854; WAN024DNA; Start 64; Stop 88
gatgaaattgtccaaaaccttgcta

SEQ ID NO: 365287 - DNA, 25 bp, Artificial
  probe
  misc_feature (1)..(25): SEQ ID NO: 3854; WAN024DNA; Start 61; Stop 85
tctgatgaaattgtccaaaaccttg

SEQ ID NO: 365288 - DNA, 25 bp, Artificial
  probe
  misc_feature (1)..(25): SEQ ID NO: 3854; WAN024DNA; Start 69; Stop 93
aattgtccaaaaccttgctatgatt

SEQ ID NO: 365289 - DNA, 25 bp, Artificial
  probe
  misc_feature (1)..(25): SEQ ID NO: 3854; WAN024DNA; Start 68; Stop 92
aaattgtccaaaaccttgctatgat

SEQ ID NO: 365290 - DNA, 25 bp, Artificial
  probe
  misc_feature (1)..(25): SEQ ID NO: 3854; WAN024DNA; Start 65; Stop 89
atgaaattgtccaaaaccttgctat

SEQ ID NO: 365291 - DNA, 25 bp, Artificial
  probe
  misc_feature (1)..(25): SEQ ID NO: 3854; WAN024DNA; Start 66; Stop 90
tgaaattgtccaaaaccttgctatg

SEQ ID NO: 365292 - DNA, 25 bp, Artificial
  probe
  misc_feature (1)..(25): SEQ ID NO: 3854; WAN024DNA; Start 23; Stop 47
tacaaggagttgggaaagttatttt

SEQ ID NO: 365293 - DNA, 25 bp, Artificial
  probe
  misc_feature (1)..(25): SEQ ID NO: 3854; WAN024DNA; Start 62; Stop 86
ctgatgaaattgtccaaaaccttgc

SEQ ID NO: 365294 - DNA, 25 bp, Artificial
  probe
  misc_feature (1)..(25): SEQ ID NO: 3854; WAN024DNA; Start 63; Stop 87
tgatgaaattgtccaaaaccttgct

SEQ ID NO: 365295 - DNA, 25 bp, Artificial
  probe
  misc_feature (1)..(25): SEQ ID NO: 3854; WAN024DNA; Start 76; Stop 100
caaaaccttgctatgattggctttt

SEQ ID NO: 365296 - DNA, 25 bp, Artificial
  probe
  misc_feature (1)..(25): SEQ ID NO: 3854; WAN024DNA; Start 59; Stop 83
tttctgatgaaattgtccaaaacct

SEQ ID NO: 365297 - DNA, 25 bp, Artificial
  probe
  misc_feature (1)..(25): SEQ ID NO: 3854; WAN024DNA; Start 58; Stop 82
ttttctgatgaaattgtccaaaacc

SEQ ID NO: 365298 - DNA, 25 bp, Artificial
  probe
  misc_feature (1)..(25): SEQ ID NO: 3854; WAN024DNA; Start 12; Stop 36
aaaatattcaatacaaggagttggg

SEQ ID NO: 365299 - DNA, 25 bp, Artificial
  probe
  misc_feature (1)..(25): SEQ ID NO: 3854; WAN024DNA; Start 71; Stop 95
ttgtccaaaaccttgctatgattgg

SEQ ID NO: 365300 - DNA, 25 bp, Artificial
  probe
  misc_feature (1)..(25): SEQ ID NO: 3854; WAN024DNA; Start 75; Stop 99
ccaaaaccttgctatgattggcttt

SEQ ID NO: 365301 - DNA, 25 bp, Artificial
  probe
  misc_feature (1)..(25): SEQ ID NO: 3854; WAN024DNA; Start 74; Stop 98
tccaaaaccttgctatgattggctt

SEQ ID NO: 365302 - DNA, 25 bp, Artificial
  probe
  misc_feature (1)..(25): SEQ ID NO: 3854; WAN024DNA; Start 73; Stop 97
gtccaaaaccttgctatgattggct

SEQ ID NO: 365303 - DNA, 25 bp, Artificial
  probe
  misc_feature (1)..(25): SEQ ID NO: 3854; WAN024DNA; Start 72; Stop 96
tgtccaaaaccttgctatgattggc

SEQ ID NO: 365304 - DNA, 25 bp, Artificial
  probe
  misc_feature (1)..(25): SEQ ID NO: 3855; WAN024FBP; Start 251; Stop 275
attaccaagccaaattgactgttga

SEQ ID NO: 365305 - DNA, 25 bp, Artificial
  probe
  misc_feature (1)..(25): SEQ ID NO: 3855; WAN024FBP; Start 250; Stop 274
aattaccaagccaaattgactgttg

SEQ ID NO: 365306 - DNA, 25 bp, Artificial
  probe
  misc_feature (1)..(25): SEQ ID NO: 3855; WAN024FBP; Start 257; Stop 281
aagccaaattgactgttgaagaact

SEQ ID NO: 365307 - DNA, 25 bp, Artificial
  probe
  misc_feature (1)..(25): SEQ ID NO: 3855; WAN024FBP; Start 256; Stop 280
caagccaaattgactgttgaagaac

SEQ ID NO: 365308 - DNA, 25 bp, Artificial
  probe
  misc_feature (1)..(25): SEQ ID NO: 3855; WAN024FBP; Start 252; Stop 276
ttaccaagccaaattgactgttgaa

SEQ ID NO: 365309 - DNA, 25 bp, Artificial
  probe
  misc_feature (1)..(25): SEQ ID NO: 3855; WAN024FBP; Start 546; Stop 570
ggaactcggcaagaccattatcatc

SEQ ID NO: 365310 - DNA, 25 bp, Artificial
  probe
  misc_feature (1)..(25): SEQ ID NO: 3855; WAN024FBP; Start 691; Stop 715
ctttatgagattcccatcacgctag

SEQ ID NO: 365311 - DNA, 25 bp, Artificial
  probe
  misc_feature (1)..(25): SEQ ID NO: 3855; WAN024FBP; Start 690; Stop 714
actttatgagattcccatcacgcta

SEQ ID NO: 365312 - DNA, 25 bp, Artificial
  probe
  misc_feature (1)..(25): SEQ ID NO: 3855; WAN024FBP; Start 261; Stop 285
caaattgactgttgaagaactggtc

SEQ ID NO: 365313 - DNA, 25 bp, Artificial
  probe
  misc_feature (1)..(25): SEQ ID NO: 3855; WAN024FBP; Start 555; Stop 579
caagaccattatcatcgtcctccac

SEQ ID NO: 365314 - DNA, 25 bp, Artificial
  probe
  misc_feature (1)..(25): SEQ ID NO: 3855; WAN024FBP; Start 253; Stop 277
taccaagccaaattgactgttgaag

SEQ ID NO: 365315 - DNA, 25 bp, Artificial
  probe
  misc_feature (1)..(25): SEQ ID NO: 3855; WAN024FBP; Start 258; Stop 282
agccaaattgactgttgaagaactg

SEQ ID NO: 365316 - DNA, 25 bp, Artificial
  probe
  misc_feature (1)..(25): SEQ ID NO: 3855; WAN024FBP; Start 547; Stop 571
gaactcggcaagaccattatcatcg

SEQ ID NO: 365317 - DNA, 25 bp, Artificial
  probe
  misc_feature (1)..(25): SEQ ID NO: 3855; WAN024FBP; Start 545; Stop 569
aggaactcggcaagaccattatcat

SEQ ID NO: 365318 - DNA, 25 bp, Artificial
  probe
  misc_feature (1)..(25): SEQ ID NO: 3855; WAN024FBP; Start 688; Stop 712
caactttatgagattcccatcacgc

SEQ ID NO: 365319 - DNA, 25 bp, Artificial
  probe
  misc_feature (1)..(25): SEQ ID NO: 3855; WAN024FBP; Start 689; Stop 713
aactttatgagattcccatcacgct

SEQ ID NO: 365320 - DNA, 25 bp, Artificial
  probe
  misc_feature (1)..(25): SEQ ID NO: 3855; WAN024FBP; Start 255; Stop 279
ccaagccaaattgactgttgaagaa

SEQ ID NO: 365321 - DNA, 25 bp, Artificial
  probe
  misc_feature (1)..(25): SEQ ID NO: 3855; WAN024FBP; Start 316; Stop 340
cgacttagatcagaagactgggaaa

SEQ ID NO: 365322 - DNA, 25 bp, Artificial
  probe
  misc_feature (1)..(25): SEQ ID NO: 3855; WAN024FBP; Start 167; Stop 191
ttctcagtatcaaaggacgtgaaat

SEQ ID NO: 365323 - DNA, 25 bp, Artificial
  probe
  misc_feature (1)..(25): SEQ ID NO: 3855; WAN024FBP; Start 168; Stop 192
tctcagtatcaaaggacgtgaaatc

SEQ ID NO: 365324 - DNA, 25 bp, Artificial
  probe
  misc_feature (1)..(25): SEQ ID NO: 3855; WAN024FBP; Start 260; Stop 284
ccaaattgactgttgaagaactggt

SEQ ID NO: 365325 - DNA, 25 bp, Artificial
  probe
  misc_feature (1)..(25): SEQ ID NO: 3855; WAN024FBP; Start 166; Stop 190
gttctcagtatcaaaggacgtgaaa

SEQ ID NO: 365326 - DNA, 25 bp, Artificial
  probe
  misc_feature (1)..(25): SEQ ID NO: 3855; WAN024FBP; Start 548; Stop 572
aactcggcaagaccattatcatcgt

SEQ ID NO: 365327 - DNA, 25 bp, Artificial
  probe
  misc_feature (1)..(25): SEQ ID NO: 3855; WAN024FBP; Start 219; Stop 243
ccaagaactaaccatcctaaaacag

SEQ ID NO: 365328 - DNA, 25 bp, Artificial
  probe
  misc_feature (1)..(25): SEQ ID NO: 3855; WAN024FBP; Start 375; Stop 399
caacttaaaagaccgctacatcaat

SEQ ID NO: 365329 - DNA, 25 bp, Artificial
  probe
  misc_feature (1)..(25): SEQ ID NO: 3855; WAN024FBP; Start 218; Stop 242
cccaagaactaaccatcctaaaaca

SEQ ID NO: 365330 - DNA, 25 bp, Artificial
  probe
  misc_feature (1)..(25): SEQ ID NO: 3855; WAN024FBP; Start 173; Stop 197
gtatcaaaggacgtgaaatcgagag

SEQ ID NO: 365331 - DNA, 25 bp, Artificial
  probe
  misc_feature (1)..(25): SEQ ID NO: 3855; WAN024FBP; Start 240; Stop 264
acagaaaatcaattaccaagccaaa

SEQ ID NO: 365332 - DNA, 25 bp, Artificial
  probe
  misc_feature (1)..(25): SEQ ID NO: 3855; WAN024FBP; Start 239; Stop 263
aacagaaaatcaattaccaagccaa

SEQ ID NO: 365333 - DNA, 25 bp, Artificial
  probe
  misc_feature (1)..(25): SEQ ID NO: 3855; WAN024FBP; Start 238; Stop 262
aaacagaaaatcaattaccaagcca

SEQ ID NO: 365334 - DNA, 25 bp, Artificial
  probe
  misc_feature (1)..(25): SEQ ID NO: 3855; WAN024FBP; Start 1; Stop 25
gtgaaactggaaaacattgacaaat

SEQ ID NO: 365335 - DNA, 25 bp, Artificial
  probe
  misc_feature (1)..(25): SEQ ID NO: 3855; WAN024FBP; Start 165; Stop 189
agttctcagtatcaaaggacgtgaa

SEQ ID NO: 365336 - DNA, 25 bp, Artificial
  probe
  misc_feature (1)..(25): SEQ ID NO: 3855; WAN024FBP; Start 377; Stop 401
acttaaaagaccgctacatcaatag

SEQ ID NO: 365337 - DNA, 25 bp, Artificial
  probe
  misc_feature (1)..(25): SEQ ID NO: 3856; WAN024D8C; Start 174; Stop 198
taatgctgctacacagattattagg

SEQ ID NO: 365338 - DNA, 25 bp, Artificial
  probe
  misc_feature (1)..(25): SEQ ID NO: 3856; WAN024D8C; Start 121; Stop 145
aagaatgaacttgcagtctgtgatt

SEQ ID NO: 365339 - DNA, 25 bp, Artificial
  probe
  misc_feature (1)..(25): SEQ ID NO: 3856; WAN024D8C; Start 178; Stop 202
gctgctacacagattattagggaaa

SEQ ID NO: 365340 - DNA, 25 bp, Artificial
  probe
  misc_feature (1)..(25): SEQ ID NO: 3856; WAN024D8C; Start 175; Stop 199
aatgctgctacacagattattaggg

SEQ ID NO: 365341 - DNA, 25 bp, Artificial
  probe
  misc_feature (1)..(25): SEQ ID NO: 3856; WAN024D8C; Start 179; Stop 203
ctgctacacagattattagggaaag

SEQ ID NO: 365342 - DNA, 25 bp, Artificial
  probe
  misc_feature (1)..(25): SEQ ID NO: 3856; WAN024D8C; Start 173; Stop 197
ttaatgctgctacacagattattag

SEQ ID NO: 365343 - DNA, 25 bp, Artificial
  probe
  misc_feature (1)..(25): SEQ ID NO: 3856; WAN024D8C; Start 176; Stop 200
atgctgctacacagattattaggga

SEQ ID NO: 365344 - DNA, 25 bp, Artificial
  probe
  misc_feature (1)..(25): SEQ ID NO: 3856; WAN024D8C; Start 177; Stop 201
tgctgctacacagattattagggaa

SEQ ID NO: 365345 - DNA, 25 bp, Artificial
  probe
  misc_feature (1)..(25): SEQ ID NO: 3856; WAN024D8C; Start 124; Stop 148
aatgaacttgcagtctgtgatttac

SEQ ID NO: 365346 - DNA, 25 bp, Artificial
  probe
  misc_feature (1)..(25): SEQ ID NO: 3856; WAN024D8C; Start 118; Stop 142
ttaaagaatgaacttgcagtctgtg

SEQ ID NO: 365347 - DNA, 25 bp, Artificial
  probe
  misc_feature (1)..(25): SEQ ID NO: 3856; WAN024D8C; Start 123; Stop 147
gaatgaacttgcagtctgtgattta

SEQ ID NO: 365348 - DNA, 25 bp, Artificial
  probe
  misc_feature (1)..(25): SEQ ID NO: 3856; WAN024D8C; Start 119; Stop 143
taaagaatgaacttgcagtctgtga

SEQ ID NO: 365349 - DNA, 25 bp, Artificial
  probe
  misc_feature (1)..(25): SEQ ID NO: 3856; WAN024D8C; Start 117; Stop 141
tttaaagaatgaacttgcagtctgt

SEQ ID NO: 365350 - DNA, 25 bp, Artificial
  probe
  misc_feature (1)..(25): SEQ ID NO: 3856; WAN024D8C; Start 122; Stop 146
agaatgaacttgcagtctgtgattt

SEQ ID NO: 365351 - DNA, 25 bp, Artificial
  probe
  misc_feature (1)..(25): SEQ ID NO: 3856; WAN024D8C; Start 120; Stop 144
aaagaatgaacttgcagtctgtgat

SEQ ID NO: 365352 - DNA, 25 bp, Artificial
  probe
  misc_feature (1)..(25): SEQ ID NO: 3856; WAN024D8C; Start 125; Stop 149
atgaacttgcagtctgtgatttacc

SEQ ID NO: 365353 - DNA, 25 bp, Artificial
  probe
  misc_feature (1)..(25): SEQ ID NO: 3856; WAN024D8C; Start 172; Stop 196
tttaatgctgctacacagattatta

SEQ ID NO: 365354 - DNA, 25 bp, Artificial
  probe
  misc_feature (1)..(25): SEQ ID NO: 3856; WAN024D8C; Start 17; Stop 41
ccgtggacaacctttatcttgtaaa

SEQ ID NO: 365355 - DNA, 25 bp, Artificial
  probe
  misc_feature (1)..(25): SEQ ID NO: 3856; WAN024D8C; Start 35; Stop 59
ttgtaaaagacgatagtcaactagc

SEQ ID NO: 365356 - DNA, 25 bp, Artificial
  probe
  misc_feature (1)..(25): SEQ ID NO: 3856; WAN024D8C; Start 36; Stop 60
tgtaaaagacgatagtcaactagct

SEQ ID NO: 365357 - DNA, 25 bp, Artificial
  probe
  misc_feature (1)..(25): SEQ ID NO: 3856; WAN024D8C; Start 12; Stop 36
gagagccgtggacaacctttatctt

SEQ ID NO: 365358 - DNA, 25 bp, Artificial
  probe
  misc_feature (1)..(25): SEQ ID NO: 3856; WAN024D8C; Start 126; Stop 150
tgaacttgcagtctgtgatttaccg

SEQ ID NO: 365359 - DNA, 25 bp, Artificial
  probe
  misc_feature (1)..(25): SEQ ID NO: 3856; WAN024D8C; Start 171; Stop 195
ttttaatgctgctacacagattatt

SEQ ID NO: 365360 - DNA, 25 bp, Artificial
  probe
  misc_feature (1)..(25): SEQ ID NO: 3856; WAN024D8C; Start 116; Stop 140
ttttaaagaatgaacttgcagtctg

SEQ ID NO: 365361 - DNA, 25 bp, Artificial
  probe
  misc_feature (1)..(25): SEQ ID NO: 3856; WAN024D8C; Start 34; Stop 58
cttgtaaaagacgatagtcaactag

SEQ ID NO: 365362 - DNA, 25 bp, Artificial
  probe
  misc_feature (1)..(25): SEQ ID NO: 3856; WAN024D8C; Start 13; Stop 37
agagccgtggacaacctttatcttg

SEQ ID NO: 365363 - DNA, 25 bp, Artificial
  probe
  misc_feature (1)..(25): SEQ ID NO: 3856; WAN024D8C; Start 32; Stop 56
atcttgtaaaagacgatagtcaact

SEQ ID NO: 365364 - DNA, 25 bp, Artificial
  probe
  misc_feature (1)..(25): SEQ ID NO: 3856; WAN024D8C; Start 16; Stop 40
gccgtggacaacctttatcttgtaa

SEQ ID NO: 365365 - DNA, 25 bp, Artificial
  probe
  misc_feature (1)..(25): SEQ ID NO: 3856; WAN024D8C; Start 18; Stop 42
cgtggacaacctttatcttgtaaaa

SEQ ID NO: 365366 - DNA, 25 bp, Artificial
  probe
  misc_feature (1)..(25): SEQ ID NO: 3856; WAN024D8C; Start 24; Stop 48
caacctttatcttgtaaaagacgat

SEQ ID NO: 365367 - DNA, 25 bp, Artificial
  probe
  misc_feature (1)..(25): SEQ ID NO: 3856; WAN024D8C; Start 33; Stop 57
tcttgtaaaagacgatagtcaacta

SEQ ID NO: 365368 - DNA, 25 bp, Artificial
  probe
  misc_feature (1)..(25): SEQ ID NO: 3856; WAN024D8C; Start 23; Stop 47
acaacctttatcttgtaaaagacga

SEQ ID NO: 365369 - DNA, 25 bp, Artificial
  probe
  misc_feature (1)..(25): SEQ ID NO: 3856; WAN024D8C; Start 22; Stop 46
gacaacctttatcttgtaaaagacg

SEQ ID NO: 365370 - DNA, 25 bp, Artificial
  probe
  misc_feature (1)..(25): SEQ ID NO: 3857; WAN024DOG; Start 143; Stop 167
gagttatcgcaagtggagcaataag

SEQ ID NO: 365371 - DNA, 25 bp, Artificial
  probe
  misc_feature (1)..(25): SEQ ID NO: 3857; WAN024DOG; Start 56; Stop 80
tagggagaacgaagatacaaagaag

SEQ ID NO: 365372 - DNA, 25 bp, Artificial
  probe
  misc_feature (1)..(25): SEQ ID NO: 3857; WAN024DOG; Start 46; Stop 70
cataagaaagtagggagaacgaaga

SEQ ID NO: 365373 - DNA, 25 bp, Artificial
  probe
  misc_feature (1)..(25): SEQ ID NO: 3857; WAN024DOG; Start 55; Stop 79
gtagggagaacgaagatacaaagaa

SEQ ID NO: 365374 - DNA, 25 bp, Artificial
  probe
  misc_feature (1)..(25): SEQ ID NO: 3857; WAN024DOG; Start 53; Stop 77
aagtagggagaacgaagatacaaag

SEQ ID NO: 365375 - DNA, 25 bp, Artificial
  probe
  misc_feature (1)..(25): SEQ ID NO: 3857; WAN024DOG; Start 51; Stop 75
gaaagtagggagaacgaagatacaa

SEQ ID NO: 365376 - DNA, 25 bp, Artificial
  probe
  misc_feature (1)..(25): SEQ ID NO: 3857; WAN024DOG; Start 49; Stop 73
aagaaagtagggagaacgaagatac

SEQ ID NO: 365377 - DNA, 25 bp, Artificial
  probe
  misc_feature (1)..(25): SEQ ID NO: 3857; WAN024DOG; Start 52; Stop 76
aaagtagggagaacgaagatacaaa

SEQ ID NO: 365378 - DNA, 25 bp, Artificial
  probe
  misc_feature (1)..(25): SEQ ID NO: 3857; WAN024DOG; Start 59; Stop 83
ggagaacgaagatacaaagaagaca

SEQ ID NO: 365379 - DNA, 25 bp, Artificial
  probe
  misc_feature (1)..(25): SEQ ID NO: 3857; WAN024DOG; Start 54; Stop 78
agtagggagaacgaagatacaaaga

SEQ ID NO: 365380 - DNA, 25 bp, Artificial
  probe
  misc_feature (1)..(25): SEQ ID NO: 3857; WAN024DOG; Start 50; Stop 74
agaaagtagggagaacgaagataca

SEQ ID NO: 365381 - DNA, 25 bp, Artificial
  probe
  misc_feature (1)..(25): SEQ ID NO: 3857; WAN024DOG; Start 60; Stop 84
gagaacgaagatacaaagaagacaa

SEQ ID NO: 365382 - DNA, 25 bp, Artificial
  probe
  misc_feature (1)..(25): SEQ ID NO: 3857; WAN024DOG; Start 47; Stop 71
ataagaaagtagggagaacgaagat

SEQ ID NO: 365383 - DNA, 25 bp, Artificial
  probe
  misc_feature (1)..(25): SEQ ID NO: 3857; WAN024DOG; Start 58; Stop 82
gggagaacgaagatacaaagaagac

SEQ ID NO: 365384 - DNA, 25 bp, Artificial
  probe
  misc_feature (1)..(25): SEQ ID NO: 3857; WAN024DOG; Start 57; Stop 81
agggagaacgaagatacaaagaaga

SEQ ID NO: 365385 - DNA, 25 bp, Artificial
  probe
  misc_feature (1)..(25): SEQ ID NO: 3857; WAN024DOG; Start 45; Stop 69
gcataagaaagtagggagaacgaag

SEQ ID NO: 365386 - DNA, 25 bp, Artificial
  probe
  misc_feature (1)..(25): SEQ ID NO: 3857; WAN024DOG; Start 61; Stop 85
agaacgaagatacaaagaagacaaa

SEQ ID NO: 365387 - DNA, 25 bp, Artificial
  probe
  misc_feature (1)..(25): SEQ ID NO: 3857; WAN024DOG; Start 48; Stop 72
taagaaagtagggagaacgaagata

SEQ ID NO: 365388 - DNA, 25 bp, Artificial
  probe
  misc_feature (1)..(25): SEQ ID NO: 3857; WAN024DOG; Start 144; Stop 168
agttatcgcaagtggagcaataagg

SEQ ID NO: 365389 - DNA, 25 bp, Artificial
  probe
  misc_feature (1)..(25): SEQ ID NO: 3857; WAN024DOG; Start 142; Stop 166
ggagttatcgcaagtggagcaataa

SEQ ID NO: 365390 - DNA, 25 bp, Artificial
  probe
  misc_feature (1)..(25): SEQ ID NO: 3857; WAN024DOG; Start 162; Stop 186
aataagggatttgtggcgatactct

SEQ ID NO: 365391 - DNA, 25 bp, Artificial
  probe
  misc_feature (1)..(25): SEQ ID NO: 3857; WAN024DOG; Start 163; Stop 187
ataagggatttgtggcgatactctt

SEQ ID NO: 365392 - DNA, 25 bp, Artificial
  probe
  misc_feature (1)..(25): SEQ ID NO: 3857; WAN024DOG; Start 161; Stop 185
caataagggatttgtggcgatactc

SEQ ID NO: 365393 - DNA, 25 bp, Artificial
  probe
  misc_feature (1)..(25): SEQ ID NO: 3857; WAN024DOG; Start 141; Stop 165
aggagttatcgcaagtggagcaata

SEQ ID NO: 365394 - DNA, 25 bp, Artificial
  probe
  misc_feature (1)..(25): SEQ ID NO: 3857; WAN024DOG; Start 140; Stop 164
taggagttatcgcaagtggagcaat

SEQ ID NO: 365395 - DNA, 25 bp, Artificial
  probe
  misc_feature (1)..(25): SEQ ID NO: 3857; WAN024DOG; Start 152; Stop 176
caagtggagcaataagggatttgtg

SEQ ID NO: 365396 - DNA, 25 bp, Artificial
  probe
  misc_feature (1)..(25): SEQ ID NO: 3857; WAN024DOG; Start 164; Stop 188
taagggatttgtggcgatactcttg

SEQ ID NO: 365397 - DNA, 25 bp, Artificial
  probe
  misc_feature (1)..(25): SEQ ID NO: 3857; WAN024DOG; Start 139; Stop 163
ttaggagttatcgcaagtggagcaa

SEQ ID NO: 365398 - DNA, 25 bp, Artificial
  probe
  misc_feature (1)..(25): SEQ ID NO: 3857; WAN024DOG; Start 42; Stop 66
cttgcataagaaagtagggagaacg

SEQ ID NO: 365399 - DNA, 25 bp, Artificial
  probe
  misc_feature (1)..(25): SEQ ID NO: 3857; WAN024DOG; Start 44; Stop 68
tgcataagaaagtagggagaacgaa

SEQ ID NO: 365400 - DNA, 25 bp, Artificial
  probe
  misc_feature (1)..(25): SEQ ID NO: 3857; WAN024DOG; Start 43; Stop 67
ttgcataagaaagtagggagaacga

SEQ ID NO: 365401 - DNA, 25 bp, Artificial
  probe
  misc_feature (1)..(25): SEQ ID NO: 3857; WAN024DOG; Start 41; Stop 65
gcttgcataagaaagtagggagaac

SEQ ID NO: 365402 - DNA, 25 bp, Artificial
  probe
  misc_feature (1)..(25): SEQ ID NO: 3857; WAN024DOG; Start 158; Stop 182
gagcaataagggatttgtggcgata

SEQ ID NO: 365403 - DNA, 25 bp, Artificial
  probe
  misc_feature (1)..(25): SEQ ID NO: 3858; WAN024CGD; Start 18; Stop 42
tgataatccaatcgttcagggaaat

SEQ ID NO: 365404 - DNA, 25 bp, Artificial
  probe
  misc_feature (1)..(25): SEQ ID NO: 3858; WAN024CGD; Start 17; Stop 41
atgataatccaatcgttcagggaaa

SEQ ID NO: 365405 - DNA, 25 bp, Artificial
  probe
  misc_feature (1)..(25): SEQ ID NO: 3858; WAN024CGD; Start 19; Stop 43
gataatccaatcgttcagggaaatt

SEQ ID NO: 365406 - DNA, 25 bp, Artificial
  probe
  misc_feature (1)..(25): SEQ ID NO: 3858; WAN024CGD; Start 16; Stop 40
gatgataatccaatcgttcagggaa

SEQ ID NO: 365407 - DNA, 25 bp, Artificial
  probe
  misc_feature (1)..(25): SEQ ID NO: 3858; WAN024CGD; Start 56; Stop 80
gtttccaatttaggcatgagacacc

SEQ ID NO: 365408 - DNA, 25 bp, Artificial
  probe
  misc_feature (1)..(25): SEQ ID NO: 3858; WAN024CGD; Start 55; Stop 79
ggtttccaatttaggcatgagacac

SEQ ID NO: 365409 - DNA, 25 bp, Artificial
  probe
  misc_feature (1)..(25): SEQ ID NO: 3858; WAN024CGD; Start 20; Stop 44
ataatccaatcgttcagggaaattg

SEQ ID NO: 365410 - DNA, 25 bp, Artificial
  probe
  misc_feature (1)..(25): SEQ ID NO: 3858; WAN024CGD; Start 1; Stop 25
gtgaaagaacgattggatgataatc

SEQ ID NO: 365411 - DNA, 25 bp, Artificial
  probe
  misc_feature (1)..(25): SEQ ID NO: 3858; WAN024CGD; Start 27; Stop 51
aatcgttcagggaaattggaagacc

SEQ ID NO: 365412 - DNA, 25 bp, Artificial
  probe
  misc_feature (1)..(25): SEQ ID NO: 3858; WAN024CGD; Start 61; Stop 85
caatttaggcatgagacacctttgg

SEQ ID NO: 365413 - DNA, 25 bp, Artificial
  probe
  misc_feature (1)..(25): SEQ ID NO: 3858; WAN024CGD; Start 60; Stop 84
ccaatttaggcatgagacacctttg

SEQ ID NO: 365414 - DNA, 25 bp, Artificial
  probe
  misc_feature (1)..(25): SEQ ID NO: 3858; WAN024CGD; Start 59; Stop 83
tccaatttaggcatgagacaccttt

SEQ ID NO: 365415 - DNA, 25 bp, Artificial
  probe
  misc_feature (1)..(25): SEQ ID NO: 3858; WAN024CGD; Start 58; Stop 82
ttccaatttaggcatgagacacctt

SEQ ID NO: 365416 - DNA, 25 bp, Artificial
  probe
  misc_feature (1)..(25): SEQ ID NO: 3858; WAN024CGD; Start 57; Stop 81
tttccaatttaggcatgagacacct

SEQ ID NO: 365417 - DNA, 25 bp, Artificial
  probe
  misc_feature (1)..(25): SEQ ID NO: 3858; WAN024CGD; Start 54; Stop 78
gggtttccaatttaggcatgagaca

SEQ ID NO: 365418 - DNA, 25 bp, Artificial
  probe
  misc_feature (1)..(25): SEQ ID NO: 3858; WAN024CGD; Start 26; Stop 50
caatcgttcagggaaattggaagac

SEQ ID NO: 365419 - DNA, 25 bp, Artificial
  probe
  misc_feature (1)..(25): SEQ ID NO: 3858; WAN024CGD; Start 62; Stop 86
aatttaggcatgagacacctttggt

SEQ ID NO: 365420 - DNA, 25 bp, Artificial
  probe
  misc_feature (1)..(25): SEQ ID NO: 3858; WAN024CGD; Start 2; Stop 26
tgaaagaacgattggatgataatcc

SEQ ID NO: 365421 - DNA, 25 bp, Artificial
  probe
  misc_feature (1)..(25): SEQ ID NO: 3858; WAN024CGD; Start 31; Stop 55
gttcagggaaattggaagaccttgg

SEQ ID NO: 365422 - DNA, 25 bp, Artificial
  probe
  misc_feature (1)..(25): SEQ ID NO: 3858; WAN024CGD; Start 53; Stop 77
tgggtttccaatttaggcatgagac

SEQ ID NO: 365423 - DNA, 25 bp, Artificial
  probe
  misc_feature (1)..(25): SEQ ID NO: 3858; WAN024CGD; Start 28; Stop 52
atcgttcagggaaattggaagacct

SEQ ID NO: 365424 - DNA, 25 bp, Artificial
  probe
  misc_feature (1)..(25): SEQ ID NO: 3858; WAN024CGD; Start 30; Stop 54
cgttcagggaaattggaagaccttg

SEQ ID NO: 365425 - DNA, 25 bp, Artificial
  probe
  misc_feature (1)..(25): SEQ ID NO: 3858; WAN024CGD; Start 15; Stop 39
ggatgataatccaatcgttcaggga

SEQ ID NO: 365426 - DNA, 25 bp, Artificial
  probe
  misc_feature (1)..(25): SEQ ID NO: 3858; WAN024CGD; Start 29; Stop 53
tcgttcagggaaattggaagacctt

SEQ ID NO: 365427 - DNA, 25 bp, Artificial
  probe
  misc_feature (1)..(25): SEQ ID NO: 3858; WAN024CGD; Start 36; Stop 60
gggaaattggaagaccttgggtttc

SEQ ID NO: 365428 - DNA, 25 bp, Artificial
  probe
  misc_feature (1)..(25): SEQ ID NO: 3858; WAN024CGD; Start 35; Stop 59
agggaaattggaagaccttgggttt

SEQ ID NO: 365429 - DNA, 25 bp, Artificial
  probe
  misc_feature (1)..(25): SEQ ID NO: 3858; WAN024CGD; Start 45; Stop 69
gaagaccttgggtttccaatttagg

SEQ ID NO: 365430 - DNA, 25 bp, Artificial
  probe
  misc_feature (1)..(25): SEQ ID NO: 3858; WAN024CGD; Start 44; Stop 68
ggaagaccttgggtttccaatttag

SEQ ID NO: 365431 - DNA, 25 bp, Artificial
  probe
  misc_feature (1)..(25): SEQ ID NO: 3858; WAN024CGD; Start 32; Stop 56
ttcagggaaattggaagaccttggg

SEQ ID NO: 365432 - DNA, 25 bp, Artificial
  probe
  misc_feature (1)..(25): SEQ ID NO: 3858; WAN024CGD; Start 51; Stop 75
cttgggtttccaatttaggcatgag

SEQ ID NO: 365433 - DNA, 25 bp, Artificial
  probe
  misc_feature (1)..(25): SEQ ID NO: 3858; WAN024CGD; Start 52; Stop 76
ttgggtttccaatttaggcatgaga

SEQ ID NO: 365434 - DNA, 25 bp, Artificial
  probe
  misc_feature (1)..(25): SEQ ID NO: 3858; WAN024CGD; Start 34; Stop 58
cagggaaattggaagaccttgggtt

SEQ ID NO: 365435 - DNA, 25 bp, Artificial
  probe
  misc_feature (1)..(25): SEQ ID NO: 3858; WAN024CGD; Start 50; Stop 74
ccttgggtttccaatttaggcatga

SEQ ID NO: 365436 - DNA, 25 bp, Artificial
  probe
  misc_feature (1)..(25): SEQ ID NO: 3859; WAN024EXY; Start 215; Stop 239
ttgttgatcttctcgattgtctgac

SEQ ID NO: 365437 - DNA, 25 bp, Artificial
  probe
  misc_feature (1)..(25): SEQ ID NO: 3859; WAN024EXY; Start 112; Stop 136
ctctgcgatatagacaggaggattg

SEQ ID NO: 365438 - DNA, 25 bp, Artificial
  probe
  misc_feature (1)..(25): SEQ ID NO: 3859; WAN024EXY; Start 111; Stop 135
tctctgcgatatagacaggaggatt

SEQ ID NO: 365439 - DNA, 25 bp, Artificial
  probe
  misc_feature (1)..(25): SEQ ID NO: 3859; WAN024EXY; Start 118; Stop 142
gatatagacaggaggattgccaaac

SEQ ID NO: 365440 - DNA, 25 bp, Artificial
  probe
  misc_feature (1)..(25): SEQ ID NO: 3859; WAN024EXY; Start 191; Stop 215
gtcaagagaatagcacagatcggtt

SEQ ID NO: 365441 - DNA, 25 bp, Artificial
  probe
  misc_feature (1)..(25): SEQ ID NO: 3859; WAN024EXY; Start 72; Stop 96
agagattatcgacaggagtgtagag

SEQ ID NO: 365442 - DNA, 25 bp, Artificial
  probe
  misc_feature (1)..(25): SEQ ID NO: 3859; WAN024EXY; Start 71; Stop 95
gagagattatcgacaggagtgtaga

SEQ ID NO: 365443 - DNA, 25 bp, Artificial
  probe
  misc_feature (1)..(25): SEQ ID NO: 3859; WAN024EXY; Start 110; Stop 134
ctctctgcgatatagacaggaggat

SEQ ID NO: 365444 - DNA, 25 bp, Artificial
  probe
  misc_feature (1)..(25): SEQ ID NO: 3859; WAN024EXY; Start 70; Stop 94
ggagagattatcgacaggagtgtag

SEQ ID NO: 365445 - DNA, 25 bp, Artificial
  probe
  misc_feature (1)..(25): SEQ ID NO: 3859; WAN024EXY; Start 117; Stop 141
cgatatagacaggaggattgccaaa

SEQ ID NO: 365446 - DNA, 25 bp, Artificial
  probe
  misc_feature (1)..(25): SEQ ID NO: 3859; WAN024EXY; Start 73; Stop 97
gagattatcgacaggagtgtagagc

SEQ ID NO: 365447 - DNA, 25 bp, Artificial
  probe
  misc_feature (1)..(25): SEQ ID NO: 3859; WAN024EXY; Start 119; Stop 143
atatagacaggaggattgccaaacg

SEQ ID NO: 365448 - DNA, 25 bp, Artificial
  probe
  misc_feature (1)..(25): SEQ ID NO: 3859; WAN024EXY; Start 192; Stop 216
tcaagagaatagcacagatcggttt

SEQ ID NO: 365449 - DNA, 25 bp, Artificial
  probe
  misc_feature (1)..(25): SEQ ID NO: 3859; WAN024EXY; Start 214; Stop 238
tttgttgatcttctcgattgtctga

SEQ ID NO: 365450 - DNA, 25 bp, Artificial
  probe
  misc_feature (1)..(25): SEQ ID NO: 3859; WAN024EXY; Start 213; Stop 237
gtttgttgatcttctcgattgtctg

SEQ ID NO: 365451 - DNA, 25 bp, Artificial
  probe
  misc_feature (1)..(25): SEQ ID NO: 3859; WAN024EXY; Start 216; Stop 240
tgttgatcttctcgattgtctgacg

SEQ ID NO: 365452 - DNA, 25 bp, Artificial
  probe
  misc_feature (1)..(25): SEQ ID NO: 3859; WAN024EXY; Start 193; Stop 217
caagagaatagcacagatcggtttg

SEQ ID NO: 365453 - DNA, 25 bp, Artificial
  probe
  misc_feature (1)..(25): SEQ ID NO: 3859; WAN024EXY; Start 212; Stop 236
ggtttgttgatcttctcgattgtct

SEQ ID NO: 365454 - DNA, 25 bp, Artificial
  probe
  misc_feature (1)..(25): SEQ ID NO: 3859; WAN024EXY; Start 198; Stop 222
gaatagcacagatcggtttgttgat

SEQ ID NO: 365455 - DNA, 25 bp, Artificial
  probe
  misc_feature (1)..(25): SEQ ID NO: 3859; WAN024EXY; Start 30; Stop 54
ttgtgaccacatctgccatatcatc

SEQ ID NO: 365456 - DNA, 25 bp, Artificial
  probe
  misc_feature (1)..(25): SEQ ID NO: 3859; WAN024EXY; Start 220; Stop 244
gatcttctcgattgtctgacgaatg

SEQ ID NO: 365457 - DNA, 25 bp, Artificial
  probe
  misc_feature (1)..(25): SEQ ID NO: 3859; WAN024EXY; Start 69; Stop 93
cggagagattatcgacaggagtgta

SEQ ID NO: 365458 - DNA, 25 bp, Artificial
  probe
  misc_feature (1)..(25): SEQ ID NO: 3859; WAN024EXY; Start 219; Stop 243
tgatcttctcgattgtctgacgaat

SEQ ID NO: 365459 - DNA, 25 bp, Artificial
  probe
  misc_feature (1)..(25): SEQ ID NO: 3859; WAN024EXY; Start 196; Stop 220
gagaatagcacagatcggtttgttg

SEQ ID NO: 365460 - DNA, 25 bp, Artificial
  probe
  misc_feature (1)..(25): SEQ ID NO: 3859; WAN024EXY; Start 195; Stop 219
agagaatagcacagatcggtttgtt

SEQ ID NO: 365461 - DNA, 25 bp, Artificial
  probe
  misc_feature (1)..(25): SEQ ID NO: 3859; WAN024EXY; Start 194; Stop 218
aagagaatagcacagatcggtttgt

SEQ ID NO: 365462 - DNA, 25 bp, Artificial
  probe
  misc_feature (1)..(25): SEQ ID NO: 3859; WAN024EXY; Start 113; Stop 137
tctgcgatatagacaggaggattgc

SEQ ID NO: 365463 - DNA, 25 bp, Artificial
  probe
  misc_feature (1)..(25): SEQ ID NO: 3859; WAN024EXY; Start 116; Stop 140
gcgatatagacaggaggattgccaa

SEQ ID NO: 365464 - DNA, 25 bp, Artificial
  probe
  misc_feature (1)..(25): SEQ ID NO: 3859; WAN024EXY; Start 218; Stop 242
ttgatcttctcgattgtctgacgaa

SEQ ID NO: 365465 - DNA, 25 bp, Artificial
  probe
  misc_feature (1)..(25): SEQ ID NO: 3859; WAN024EXY; Start 197; Stop 221
agaatagcacagatcggtttgttga

SEQ ID NO: 365466 - DNA, 25 bp, Artificial
  probe
  misc_feature (1)..(25): SEQ ID NO: 3859; WAN024EXY; Start 190; Stop 214
ggtcaagagaatagcacagatcggt

SEQ ID NO: 365467 - DNA, 25 bp, Artificial
  probe
  misc_feature (1)..(25): SEQ ID NO: 3859; WAN024EXY; Start 74; Stop 98
agattatcgacaggagtgtagagcc

SEQ ID NO: 365468 - DNA, 25 bp, Artificial
  probe
  misc_feature (1)..(25): SEQ ID NO: 3859; WAN024EXY; Start 178; Stop 202
ataatgggcgtgggtcaagagaata

SEQ ID NO: 365469 - DNA, 25 bp, Artificial
  probe
  misc_feature (1)..(25): SEQ ID NO: 3860; WAN024C7E; Start 54; Stop 78
gatagtggcatactgttggaacaaa

SEQ ID NO: 365470 - DNA, 25 bp, Artificial
  probe
  misc_feature (1)..(25): SEQ ID NO: 3860; WAN024C7E; Start 53; Stop 77
cgatagtggcatactgttggaacaa

SEQ ID NO: 365471 - DNA, 25 bp, Artificial
  probe
  misc_feature (1)..(25): SEQ ID NO: 3860; WAN024C7E; Start 55; Stop 79
atagtggcatactgttggaacaaac

SEQ ID NO: 365472 - DNA, 25 bp, Artificial
  probe
  misc_feature (1)..(25): SEQ ID NO: 3860; WAN024C7E; Start 121; Stop 145
aaacggattttcttggtattgactg

SEQ ID NO: 365473 - DNA, 25 bp, Artificial
  probe
  misc_feature (1)..(25): SEQ ID NO: 3860; WAN024C7E; Start 120; Stop 144
caaacggattttcttggtattgact

SEQ ID NO: 365474 - DNA, 25 bp, Artificial
  probe
  misc_feature (1)..(25): SEQ ID NO: 3860; WAN024C7E; Start 62; Stop 86
catactgttggaacaaacgaatcgg

SEQ ID NO: 365475 - DNA, 25 bp, Artificial
  probe
  misc_feature (1)..(25): SEQ ID NO: 3860; WAN024C7E; Start 117; Stop 141
ggtcaaacggattttcttggtattg

SEQ ID NO: 365476 - DNA, 25 bp, Artificial
  probe
  misc_feature (1)..(25): SEQ ID NO: 3860; WAN024C7E; Start 116; Stop 140
tggtcaaacggattttcttggtatt

SEQ ID NO: 365477 - DNA, 25 bp, Artificial
  probe
  misc_feature (1)..(25): SEQ ID NO: 3860; WAN024C7E; Start 60; Stop 84
ggcatactgttggaacaaacgaatc

SEQ ID NO: 365478 - DNA, 25 bp, Artificial
  probe
  misc_feature (1)..(25): SEQ ID NO: 3860; WAN024C7E; Start 122; Stop 146
aacggattttcttggtattgactgc

SEQ ID NO: 365479 - DNA, 25 bp, Artificial
  probe
  misc_feature (1)..(25): SEQ ID NO: 3860; WAN024C7E; Start 115; Stop 139
ctggtcaaacggattttcttggtat

SEQ ID NO: 365480 - DNA, 25 bp, Artificial
  probe
  misc_feature (1)..(25): SEQ ID NO: 3860; WAN024C7E; Start 52; Stop 76
tcgatagtggcatactgttggaaca

SEQ ID NO: 365481 - DNA, 25 bp, Artificial
  probe
  misc_feature (1)..(25): SEQ ID NO: 3860; WAN024C7E; Start 61; Stop 85
gcatactgttggaacaaacgaatcg

SEQ ID NO: 365482 - DNA, 25 bp, Artificial
  probe
  misc_feature (1)..(25): SEQ ID NO: 3860; WAN024C7E; Start 59; Stop 83
tggcatactgttggaacaaacgaat

SEQ ID NO: 365483 - DNA, 25 bp, Artificial
  probe
  misc_feature (1)..(25): SEQ ID NO: 3860; WAN024C7E; Start 51; Stop 75
atcgatagtggcatactgttggaac

SEQ ID NO: 365484 - DNA, 25 bp, Artificial
  probe
  misc_feature (1)..(25): SEQ ID NO: 3860; WAN024C7E; Start 50; Stop 74
catcgatagtggcatactgttggaa

SEQ ID NO: 365485 - DNA, 25 bp, Artificial
  probe
  misc_feature (1)..(25): SEQ ID NO: 3860; WAN024C7E; Start 56; Stop 80
tagtggcatactgttggaacaaacg

SEQ ID NO: 365486 - DNA, 25 bp, Artificial
  probe
  misc_feature (1)..(25): SEQ ID NO: 3860; WAN024C7E; Start 114; Stop 138
actggtcaaacggattttcttggta

SEQ ID NO: 365487 - DNA, 25 bp, Artificial
  probe
  misc_feature (1)..(25): SEQ ID NO: 3860; WAN024C7E; Start 36; Stop 60
tccatttgacaaagcatcgatagtg

SEQ ID NO: 365488 - DNA, 25 bp, Artificial
  probe
  misc_feature (1)..(25): SEQ ID NO: 3860; WAN024C7E; Start 47; Stop 71
aagcatcgatagtggcatactgttg

SEQ ID NO: 365489 - DNA, 25 bp, Artificial
  probe
  misc_feature (1)..(25): SEQ ID NO: 3860; WAN024C7E; Start 35; Stop 59
gtccatttgacaaagcatcgatagt

SEQ ID NO: 365490 - DNA, 25 bp, Artificial
  probe
  misc_feature (1)..(25): SEQ ID NO: 3860; WAN024C7E; Start 123; Stop 147
acggattttcttggtattgactgcc

SEQ ID NO: 365491 - DNA, 25 bp, Artificial
  probe
  misc_feature (1)..(25): SEQ ID NO: 3860; WAN024C7E; Start 119; Stop 143
tcaaacggattttcttggtattgac

SEQ ID NO: 365492 - DNA, 25 bp, Artificial
  probe
  misc_feature (1)..(25): SEQ ID NO: 3860; WAN024C7E; Start 118; Stop 142
gtcaaacggattttcttggtattga

SEQ ID NO: 365493 - DNA, 25 bp, Artificial
  probe
  misc_feature (1)..(25): SEQ ID NO: 3860; WAN024C7E; Start 58; Stop 82
gtggcatactgttggaacaaacgaa

SEQ ID NO: 365494 - DNA, 25 bp, Artificial
  probe
  misc_feature (1)..(25): SEQ ID NO: 3860; WAN024C7E; Start 41; Stop 65
ttgacaaagcatcgatagtggcata

SEQ ID NO: 365495 - DNA, 25 bp, Artificial
  probe
  misc_feature (1)..(25): SEQ ID NO: 3860; WAN024C7E; Start 46; Stop 70
aaagcatcgatagtggcatactgtt

SEQ ID NO: 365496 - DNA, 25 bp, Artificial
  probe
  misc_feature (1)..(25): SEQ ID NO: 3860; WAN024C7E; Start 125; Stop 149
ggattttcttggtattgactgcccc

SEQ ID NO: 365497 - DNA, 25 bp, Artificial
  probe
  misc_feature (1)..(25): SEQ ID NO: 3860; WAN024C7E; Start 38; Stop 62
catttgacaaagcatcgatagtggc

SEQ ID NO: 365498 - DNA, 25 bp, Artificial
  probe
  misc_feature (1)..(25): SEQ ID NO: 3860; WAN024C7E; Start 42; Stop 66
tgacaaagcatcgatagtggcatac

SEQ ID NO: 365499 - DNA, 25 bp, Artificial
  probe
  misc_feature (1)..(25): SEQ ID NO: 3860; WAN024C7E; Start 34; Stop 58
cgtccatttgacaaagcatcgatag

SEQ ID NO: 365500 - DNA, 25 bp, Artificial
  probe
  misc_feature (1)..(25): SEQ ID NO: 3860; WAN024C7E; Start 43; Stop 67
gacaaagcatcgatagtggcatact

SEQ ID NO: 365501 - DNA, 25 bp, Artificial
  probe
  misc_feature (1)..(25): SEQ ID NO: 3860; WAN024C7E; Start 40; Stop 64
tttgacaaagcatcgatagtggcat

SEQ ID NO: 365502 - DNA, 25 bp, Artificial
  probe
  misc_feature (1)..(25): SEQ ID NO: 3861; WAN024G66; Start 236; Stop 260
tgctcaatgacaactctattaccaa

SEQ ID NO: 365503 - DNA, 25 bp, Artificial
  probe
  misc_feature (1)..(25): SEQ ID NO: 3861; WAN024G66; Start 445; Stop 469
gatgtgaagactgctatcctaactg

SEQ ID NO: 365504 - DNA, 25 bp, Artificial
  probe
  misc_feature (1)..(25): SEQ ID NO: 3861; WAN024G66; Start 443; Stop 467
ctgatgtgaagactgctatcctaac

SEQ ID NO: 365505 - DNA, 25 bp, Artificial
  probe
  misc_feature (1)..(25): SEQ ID NO: 3861; WAN024G66; Start 237; Stop 261
gctcaatgacaactctattaccaat

SEQ ID NO: 365506 - DNA, 25 bp, Artificial
  probe
  misc_feature (1)..(25): SEQ ID NO: 3861; WAN024G66; Start 444; Stop 468
tgatgtgaagactgctatcctaact

SEQ ID NO: 365507 - DNA, 25 bp, Artificial
  probe
  misc_feature (1)..(25): SEQ ID NO: 3861; WAN024G66; Start 446; Stop 470
atgtgaagactgctatcctaactgt

SEQ ID NO: 365508 - DNA, 25 bp, Artificial
  probe
  misc_feature (1)..(25): SEQ ID NO: 3861; WAN024G66; Start 448; Stop 472
gtgaagactgctatcctaactgttc

SEQ ID NO: 365509 - DNA, 25 bp, Artificial
  probe
  misc_feature (1)..(25): SEQ ID NO: 3861; WAN024G66; Start 235; Stop 259
ttgctcaatgacaactctattacca

SEQ ID NO: 365510 - DNA, 25 bp, Artificial
  probe
  misc_feature (1)..(25): SEQ ID NO: 3861; WAN024G66; Start 447; Stop 471
tgtgaagactgctatcctaactgtt

SEQ ID NO: 365511 - DNA, 25 bp, Artificial
  probe
  misc_feature (1)..(25): SEQ ID NO: 3861; WAN024G66; Start 246; Stop 270
caactctattaccaatgtcatgctg

SEQ ID NO: 365512 - DNA, 25 bp, Artificial
  probe
  misc_feature (1)..(25): SEQ ID NO: 3861; WAN024G66; Start 449; Stop 473
tgaagactgctatcctaactgttcc

SEQ ID NO: 365513 - DNA, 25 bp, Artificial
  probe
  misc_feature (1)..(25): SEQ ID NO: 3861; WAN024G66; Start 478; Stop 502
gtcaagtcacaagaggttgctaatc

SEQ ID NO: 365514 - DNA, 25 bp, Artificial
  probe
  misc_feature (1)..(25): SEQ ID NO: 3861; WAN024G66; Start 238; Stop 262
ctcaatgacaactctattaccaatg

SEQ ID NO: 365515 - DNA, 25 bp, Artificial
  probe
  misc_feature (1)..(25): SEQ ID NO: 3861; WAN024G66; Start 479; Stop 503
tcaagtcacaagaggttgctaatct

SEQ ID NO: 365516 - DNA, 25 bp, Artificial
  probe
  misc_feature (1)..(25): SEQ ID NO: 3861; WAN024G66; Start 490; Stop 514
gaggttgctaatctcttggttgatg

SEQ ID NO: 365517 - DNA, 25 bp, Artificial
  probe
  misc_feature (1)..(25): SEQ ID NO: 3861; WAN024G66; Start 480; Stop 504
caagtcacaagaggttgctaatctc

SEQ ID NO: 365518 - DNA, 25 bp, Artificial
  probe
  misc_feature (1)..(25): SEQ ID NO: 3861; WAN024G66; Start 493; Stop 517
gttgctaatctcttggttgatgctg

SEQ ID NO: 365519 - DNA, 25 bp, Artificial
  probe
  misc_feature (1)..(25): SEQ ID NO: 3861; WAN024G66; Start 245; Stop 269
acaactctattaccaatgtcatgct

SEQ ID NO: 365520 - DNA, 25 bp, Artificial
  probe
  misc_feature (1)..(25): SEQ ID NO: 3861; WAN024G66; Start 239; Stop 263
tcaatgacaactctattaccaatgt

SEQ ID NO: 365521 - DNA, 25 bp, Artificial
  probe
  misc_feature (1)..(25): SEQ ID NO: 3861; WAN024G66; Start 316; Stop 340
cacgaacgtaacaagatgaagatta

SEQ ID NO: 365522 - DNA, 25 bp, Artificial
  probe
  misc_feature (1)..(25): SEQ ID NO: 3861; WAN024G66; Start 497; Stop 521
ctaatctcttggttgatgctggtgt

SEQ ID NO: 365523 - DNA, 25 bp, Artificial
  probe
  misc_feature (1)..(25): SEQ ID NO: 3861; WAN024G66; Start 317; Stop 341
acgaacgtaacaagatgaagattat

SEQ ID NO: 365524 - DNA, 25 bp, Artificial
  probe
  misc_feature (1)..(25): SEQ ID NO: 3861; WAN024G66; Start 498; Stop 522
taatctcttggttgatgctggtgtg

SEQ ID NO: 365525 - DNA, 25 bp, Artificial
  probe
  misc_feature (1)..(25): SEQ ID NO: 3861; WAN024G66; Start 247; Stop 271
aactctattaccaatgtcatgctgg

SEQ ID NO: 365526 - DNA, 25 bp, Artificial
  probe
  misc_feature (1)..(25): SEQ ID NO: 3861; WAN024G66; Start 231; Stop 255
cgatttgctcaatgacaactctatt

SEQ ID NO: 365527 - DNA, 25 bp, Artificial
  probe
  misc_feature (1)..(25): SEQ ID NO: 3861; WAN024G66; Start 315; Stop 339
ccacgaacgtaacaagatgaagatt

SEQ ID NO: 365528 - DNA, 25 bp, Artificial
  probe
  misc_feature (1)..(25): SEQ ID NO: 3861; WAN024G66; Start 234; Stop 258
tttgctcaatgacaactctattacc

SEQ ID NO: 365529 - DNA, 25 bp, Artificial
  probe
  misc_feature (1)..(25): SEQ ID NO: 3861; WAN024G66; Start 318; Stop 342
cgaacgtaacaagatgaagattatc

SEQ ID NO: 365530 - DNA, 25 bp, Artificial
  probe
  misc_feature (1)..(25): SEQ ID NO: 3861; WAN024G66; Start 265; Stop 289
atgctggttggtattggaaatatgg

SEQ ID NO: 365531 - DNA, 25 bp, Artificial
  probe
  misc_feature (1)..(25): SEQ ID NO: 3861; WAN024G66; Start 42; Stop 66
aagactctctctctactatcgaatt

SEQ ID NO: 365532 - DNA, 25 bp, Artificial
  probe
  misc_feature (1)..(25): SEQ ID NO: 3861; WAN024G66; Start 494; Stop 518
ttgctaatctcttggttgatgctgg

SEQ ID NO: 365533 - DNA, 25 bp, Artificial
  probe
  misc_feature (1)..(25): SEQ ID NO: 3861; WAN024G66; Start 492; Stop 516
ggttgctaatctcttggttgatgct

SEQ ID NO: 365534 - DNA, 25 bp, Artificial
  probe
  misc_feature (1)..(25): SEQ ID NO: 3861; WAN024G66; Start 491; Stop 515
aggttgctaatctcttggttgatgc

SEQ ID NO: 365535 - DNA, 25 bp, Artificial
  probe
  misc_feature (1)..(25): SEQ ID NO: 3862; WAN024DG9; Start 322; Stop 346
atgttaggtatagtgtgtcttagtt

SEQ ID NO: 365536 - DNA, 25 bp, Artificial
  probe
  misc_feature (1)..(25): SEQ ID NO: 3862; WAN024DG9; Start 251; Stop 275
gaacatttattcagttaccagtgga

SEQ ID NO: 365537 - DNA, 25 bp, Artificial
  probe
  misc_feature (1)..(25): SEQ ID NO: 3862; WAN024DG9; Start 250; Stop 274
agaacatttattcagttaccagtgg

SEQ ID NO: 365538 - DNA, 25 bp, Artificial
  probe
  misc_feature (1)..(25): SEQ ID NO: 3862; WAN024DG9; Start 252; Stop 276
aacatttattcagttaccagtggat

SEQ ID NO: 365539 - DNA, 25 bp, Artificial
  probe
  misc_feature (1)..(25): SEQ ID NO: 3862; WAN024DG9; Start 323; Stop 347
tgttaggtatagtgtgtcttagtta

SEQ ID NO: 365540 - DNA, 25 bp, Artificial
  probe
  misc_feature (1)..(25): SEQ ID NO: 3862; WAN024DG9; Start 321; Stop 345
tatgttaggtatagtgtgtcttagt

SEQ ID NO: 365541 - DNA, 25 bp, Artificial
  probe
  misc_feature (1)..(25): SEQ ID NO: 3862; WAN024DG9; Start 253; Stop 277
acatttattcagttaccagtggata

SEQ ID NO: 365542 - DNA, 25 bp, Artificial
  probe
  misc_feature (1)..(25): SEQ ID NO: 3862; WAN024DG9; Start 52; Stop 76
tgcttattatcaggaggagtagctt

SEQ ID NO: 365543 - DNA, 25 bp, Artificial
  probe
  misc_feature (1)..(25): SEQ ID NO: 3862; WAN024DG9; Start 51; Stop 75
ttgcttattatcaggaggagtagct

SEQ ID NO: 365544 - DNA, 25 bp, Artificial
  probe
  misc_feature (1)..(25): SEQ ID NO: 3862; WAN024DG9; Start 85; Stop 109
gctattgggcagttcactgttatag

SEQ ID NO: 365545 - DNA, 25 bp, Artificial
  probe
  misc_feature (1)..(25): SEQ ID NO: 3862; WAN024DG9; Start 50; Stop 74
tttgcttattatcaggaggagtagc

SEQ ID NO: 365546 - DNA, 25 bp, Artificial
  probe
  misc_feature (1)..(25): SEQ ID NO: 3862; WAN024DG9; Start 306; Stop 330
gctgtggatatttattatgttaggt

SEQ ID NO: 365547 - DNA, 25 bp, Artificial
  probe
  misc_feature (1)..(25): SEQ ID NO: 3862; WAN024DG9; Start 305; Stop 329
tgctgtggatatttattatgttagg

SEQ ID NO: 365548 - DNA, 25 bp, Artificial
  probe
  misc_feature (1)..(25): SEQ ID NO: 3862; WAN024DG9; Start 249; Stop 273
tagaacatttattcagttaccagtg

SEQ ID NO: 365549 - DNA, 25 bp, Artificial
  probe
  misc_feature (1)..(25): SEQ ID NO: 3862; WAN024DG9; Start 254; Stop 278
catttattcagttaccagtggatat

SEQ ID NO: 365550 - DNA, 25 bp, Artificial
  probe
  misc_feature (1)..(25): SEQ ID NO: 3862; WAN024DG9; Start 1; Stop 25
gtgaaagataacaatattagagcga

SEQ ID NO: 365551 - DNA, 25 bp, Artificial
  probe
  misc_feature (1)..(25): SEQ ID NO: 3862; WAN024DG9; Start 324; Stop 348
gttaggtatagtgtgtcttagttat

SEQ ID NO: 365552 - DNA, 25 bp, Artificial
  probe
  misc_feature (1)..(25): SEQ ID NO: 3862; WAN024DG9; Start 320; Stop 344
ttatgttaggtatagtgtgtcttag

SEQ ID NO: 365553 - DNA, 25 bp, Artificial
  probe
  misc_feature (1)..(25): SEQ ID NO: 3862; WAN024DG9; Start 53; Stop 77
gcttattatcaggaggagtagcttt

SEQ ID NO: 365554 - DNA, 25 bp, Artificial
  probe
  misc_feature (1)..(25): SEQ ID NO: 3862; WAN024DG9; Start 49; Stop 73
ttttgcttattatcaggaggagtag

SEQ ID NO: 365555 - DNA, 25 bp, Artificial
  probe
  misc_feature (1)..(25): SEQ ID NO: 3862; WAN024DG9; Start 256; Stop 280
tttattcagttaccagtggatattt

SEQ ID NO: 365556 - DNA, 25 bp, Artificial
  probe
  misc_feature (1)..(25): SEQ ID NO: 3862; WAN024DG9; Start 248; Stop 272
ttagaacatttattcagttaccagt

SEQ ID NO: 365557 - DNA, 25 bp, Artificial
  probe
  misc_feature (1)..(25): SEQ ID NO: 3862; WAN024DG9; Start 2; Stop 26
tgaaagataacaatattagagcgaa

SEQ ID NO: 365558 - DNA, 25 bp, Artificial
  probe
  misc_feature (1)..(25): SEQ ID NO: 3862; WAN024DG9; Start 255; Stop 279
atttattcagttaccagtggatatt

SEQ ID NO: 365559 - DNA, 25 bp, Artificial
  probe
  misc_feature (1)..(25): SEQ ID NO: 3862; WAN024DG9; Start 84; Stop 108
tgctattgggcagttcactgttata

SEQ ID NO: 365560 - DNA, 25 bp, Artificial
  probe
  misc_feature (1)..(25): SEQ ID NO: 3862; WAN024DG9; Start 184; Stop 208
acatcattggaaaatatagtatggc

SEQ ID NO: 365561 - DNA, 25 bp, Artificial
  probe
  misc_feature (1)..(25): SEQ ID NO: 3862; WAN024DG9; Start 185; Stop 209
catcattggaaaatatagtatggct

SEQ ID NO: 365562 - DNA, 25 bp, Artificial
  probe
  misc_feature (1)..(25): SEQ ID NO: 3862; WAN024DG9; Start 54; Stop 78
cttattatcaggaggagtagctttt

SEQ ID NO: 365563 - DNA, 25 bp, Artificial
  probe
  misc_feature (1)..(25): SEQ ID NO: 3862; WAN024DG9; Start 247; Stop 271
tttagaacatttattcagttaccag

SEQ ID NO: 365564 - DNA, 25 bp, Artificial
  probe
  misc_feature (1)..(25): SEQ ID NO: 3862; WAN024DG9; Start 304; Stop 328
atgctgtggatatttattatgttag

SEQ ID NO: 365565 - DNA, 25 bp, Artificial
  probe
  misc_feature (1)..(25): SEQ ID NO: 3862; WAN024DG9; Start 187; Stop 211
tcattggaaaatatagtatggcttt

SEQ ID NO: 365566 - DNA, 25 bp, Artificial
  probe
  misc_feature (1)..(25): SEQ ID NO: 3862; WAN024DG9; Start 3; Stop 27
gaaagataacaatattagagcgaaa

SEQ ID NO: 365567 - DNA, 25 bp, Artificial
  probe
  misc_feature (1)..(25): SEQ ID NO: 3862; WAN024DG9; Start 186; Stop 210
atcattggaaaatatagtatggctt

SEQ ID NO: 365568 - DNA, 25 bp, Artificial
  probe
  misc_feature (1)..(25): SEQ ID NO: 3863; WAN024CPY; Start 603; Stop 627
tgaagaattagaaggcaatagcatt

SEQ ID NO: 365569 - DNA, 25 bp, Artificial
  probe
  misc_feature (1)..(25): SEQ ID NO: 3863; WAN024CPY; Start 601; Stop 625
gttgaagaattagaaggcaatagca

SEQ ID NO: 365570 - DNA, 25 bp, Artificial
  probe
  misc_feature (1)..(25): SEQ ID NO: 3863; WAN024CPY; Start 600; Stop 624
tgttgaagaattagaaggcaatagc

SEQ ID NO: 365571 - DNA, 25 bp, Artificial
  probe
  misc_feature (1)..(25): SEQ ID NO: 3863; WAN024CPY; Start 408; Stop 432
agatgactacaaggttcaagacatt

SEQ ID NO: 365572 - DNA, 25 bp, Artificial
  probe
  misc_feature (1)..(25): SEQ ID NO: 3863; WAN024CPY; Start 403; Stop 427
tatggagatgactacaaggttcaag

SEQ ID NO: 365573 - DNA, 25 bp, Artificial
  probe
  misc_feature (1)..(25): SEQ ID NO: 3863; WAN024CPY; Start 407; Stop 431
gagatgactacaaggttcaagacat

SEQ ID NO: 365574 - DNA, 25 bp, Artificial
  probe
  misc_feature (1)..(25): SEQ ID NO: 3863; WAN024CPY; Start 404; Stop 428
atggagatgactacaaggttcaaga

SEQ ID NO: 365575 - DNA, 25 bp, Artificial
  probe
  misc_feature (1)..(25): SEQ ID NO: 3863; WAN024CPY; Start 602; Stop 626
ttgaagaattagaaggcaatagcat

SEQ ID NO: 365576 - DNA, 25 bp, Artificial
  probe
  misc_feature (1)..(25): SEQ ID NO: 3863; WAN024CPY; Start 425; Stop 449
aagacattattgttgatagcaaggc

SEQ ID NO: 365577 - DNA, 25 bp, Artificial
  probe
  misc_feature (1)..(25): SEQ ID NO: 3863; WAN024CPY; Start 430; Stop 454
attattgttgatagcaaggcaggtc

SEQ ID NO: 365578 - DNA, 25 bp, Artificial
  probe
  misc_feature (1)..(25): SEQ ID NO: 3863; WAN024CPY; Start 427; Stop 451
gacattattgttgatagcaaggcag

SEQ ID NO: 365579 - DNA, 25 bp, Artificial
  probe
  misc_feature (1)..(25): SEQ ID NO: 3863; WAN024CPY; Start 426; Stop 450
agacattattgttgatagcaaggca

SEQ ID NO: 365580 - DNA, 25 bp, Artificial
  probe
  misc_feature (1)..(25): SEQ ID NO: 3863; WAN024CPY; Start 409; Stop 433
gatgactacaaggttcaagacatta

SEQ ID NO: 365581 - DNA, 25 bp, Artificial
  probe
  misc_feature (1)..(25): SEQ ID NO: 3863; WAN024CPY; Start 429; Stop 453
cattattgttgatagcaaggcaggt

SEQ ID NO: 365582 - DNA, 25 bp, Artificial
  probe
  misc_feature (1)..(25): SEQ ID NO: 3863; WAN024CPY; Start 456; Stop 480
catccttagtggtgtatccttctgg

SEQ ID NO: 365583 - DNA, 25 bp, Artificial
  probe
  misc_feature (1)..(25): SEQ ID NO: 3863; WAN024CPY; Start 412; Stop 436
gactacaaggttcaagacattattg

SEQ ID NO: 365584 - DNA, 25 bp, Artificial
  probe
  misc_feature (1)..(25): SEQ ID NO: 3863; WAN024CPY; Start 424; Stop 448
caagacattattgttgatagcaagg

SEQ ID NO: 365585 - DNA, 25 bp, Artificial
  probe
  misc_feature (1)..(25): SEQ ID NO: 3863; WAN024CPY; Start 411; Stop 435
tgactacaaggttcaagacattatt

SEQ ID NO: 365586 - DNA, 25 bp, Artificial
  probe
  misc_feature (1)..(25): SEQ ID NO: 3863; WAN024CPY; Start 406; Stop 430
ggagatgactacaaggttcaagaca

SEQ ID NO: 365587 - DNA, 25 bp, Artificial
  probe
  misc_feature (1)..(25): SEQ ID NO: 3863; WAN024CPY; Start 405; Stop 429
tggagatgactacaaggttcaagac

SEQ ID NO: 365588 - DNA, 25 bp, Artificial
  probe
  misc_feature (1)..(25): SEQ ID NO: 3863; WAN024CPY; Start 428; Stop 452
acattattgttgatagcaaggcagg

SEQ ID NO: 365589 - DNA, 25 bp, Artificial
  probe
  misc_feature (1)..(25): SEQ ID NO: 3863; WAN024CPY; Start 410; Stop 434
atgactacaaggttcaagacattat

SEQ ID NO: 365590 - DNA, 25 bp, Artificial
  probe
  misc_feature (1)..(25): SEQ ID NO: 3863; WAN024CPY; Start 595; Stop 619
gtctatgttgaagaattagaaggca

SEQ ID NO: 365591 - DNA, 25 bp, Artificial
  probe
  misc_feature (1)..(25): SEQ ID NO: 3863; WAN024CPY; Start 594; Stop 618
tgtctatgttgaagaattagaaggc

SEQ ID NO: 365592 - DNA, 25 bp, Artificial
  probe
  misc_feature (1)..(25): SEQ ID NO: 3863; WAN024CPY; Start 455; Stop 479
gcatccttagtggtgtatccttctg

SEQ ID NO: 365593 - DNA, 25 bp, Artificial
  probe
  misc_feature (1)..(25): SEQ ID NO: 3863; WAN024CPY; Start 585; Stop 609
agagctagatgtctatgttgaagaa

SEQ ID NO: 365594 - DNA, 25 bp, Artificial
  probe
  misc_feature (1)..(25): SEQ ID NO: 3863; WAN024CPY; Start 584; Stop 608
aagagctagatgtctatgttgaaga

SEQ ID NO: 365595 - DNA, 25 bp, Artificial
  probe
  misc_feature (1)..(25): SEQ ID NO: 3863; WAN024CPY; Start 599; Stop 623
atgttgaagaattagaaggcaatag

SEQ ID NO: 365596 - DNA, 25 bp, Artificial
  probe
  misc_feature (1)..(25): SEQ ID NO: 3863; WAN024CPY; Start 597; Stop 621
ctatgttgaagaattagaaggcaat

SEQ ID NO: 365597 - DNA, 25 bp, Artificial
  probe
  misc_feature (1)..(25): SEQ ID NO: 3863; WAN024CPY; Start 596; Stop 620
tctatgttgaagaattagaaggcaa

SEQ ID NO: 365598 - DNA, 25 bp, Artificial
  probe
  misc_feature (1)..(25): SEQ ID NO: 3863; WAN024CPY; Start 586; Stop 610
gagctagatgtctatgttgaagaat

SEQ ID NO: 365599 - DNA, 25 bp, Artificial
  probe
  misc_feature (1)..(25): SEQ ID NO: 3863; WAN024CPY; Start 613; Stop 637
gaaggcaatagcatttatgagatcg

SEQ ID NO: 365600 - DNA, 25 bp, Artificial
  probe
  misc_feature (1)..(25): SEQ ID NO: 3863; WAN024CPY; Start 361; Stop 385
agtgtttatcgtgaagattgtacca

SEQ ID NO: 365601 - DNA, 25 bp, Artificial
  probe
  misc_feature (1)..(25): SEQ ID NO: 3864; WAN024AZZ; Start 326; Stop 350
ctgagaaacaagggattacgcttta

SEQ ID NO: 365602 - DNA, 25 bp, Artificial
  probe
  misc_feature (1)..(25): SEQ ID NO: 3864; WAN024AZZ; Start 327; Stop 351
tgagaaacaagggattacgctttac

SEQ ID NO: 365603 - DNA, 25 bp, Artificial
  probe
  misc_feature (1)..(25): SEQ ID NO: 3864; WAN024AZZ; Start 331; Stop 355
aaacaagggattacgctttaccatc

SEQ ID NO: 365604 - DNA, 25 bp, Artificial
  probe
  misc_feature (1)..(25): SEQ ID NO: 3864; WAN024AZZ; Start 330; Stop 354
gaaacaagggattacgctttaccat

SEQ ID NO: 365605 - DNA, 25 bp, Artificial
  probe
  misc_feature (1)..(25): SEQ ID NO: 3864; WAN024AZZ; Start 333; Stop 357
acaagggattacgctttaccatcat

SEQ ID NO: 365606 - DNA, 25 bp, Artificial
  probe
  misc_feature (1)..(25): SEQ ID NO: 3864; WAN024AZZ; Start 332; Stop 356
aacaagggattacgctttaccatca

SEQ ID NO: 365607 - DNA, 25 bp, Artificial
  probe
  misc_feature (1)..(25): SEQ ID NO: 3864; WAN024AZZ; Start 334; Stop 358
caagggattacgctttaccatcatg

SEQ ID NO: 365608 - DNA, 25 bp, Artificial
  probe
  misc_feature (1)..(25): SEQ ID NO: 3864; WAN024AZZ; Start 320; Stop 344
ggaaagctgagaaacaagggattac

SEQ ID NO: 365609 - DNA, 25 bp, Artificial
  probe
  misc_feature (1)..(25): SEQ ID NO: 3864; WAN024AZZ; Start 335; Stop 359
aagggattacgctttaccatcatgt

SEQ ID NO: 365610 - DNA, 25 bp, Artificial
  probe
  misc_feature (1)..(25): SEQ ID NO: 3864; WAN024AZZ; Start 321; Stop 345
gaaagctgagaaacaagggattacg

SEQ ID NO: 365611 - DNA, 25 bp, Artificial
  probe
  misc_feature (1)..(25): SEQ ID NO: 3864; WAN024AZZ; Start 319; Stop 343
gggaaagctgagaaacaagggatta

SEQ ID NO: 365612 - DNA, 25 bp, Artificial
  probe
  misc_feature (1)..(25): SEQ ID NO: 3864; WAN024AZZ; Start 325; Stop 349
gctgagaaacaagggattacgcttt

SEQ ID NO: 365613 - DNA, 25 bp, Artificial
  probe
  misc_feature (1)..(25): SEQ ID NO: 3864; WAN024AZZ; Start 322; Stop 346
aaagctgagaaacaagggattacgc

SEQ ID NO: 365614 - DNA, 25 bp, Artificial
  probe
  misc_feature (1)..(25): SEQ ID NO: 3864; WAN024AZZ; Start 1; Stop 25
gtgaaagctcctattcctaaagccc

SEQ ID NO: 365615 - DNA, 25 bp, Artificial
  probe
  misc_feature (1)..(25): SEQ ID NO: 3864; WAN024AZZ; Start 318; Stop 342
tgggaaagctgagaaacaagggatt

SEQ ID NO: 365616 - DNA, 25 bp, Artificial
  probe
  misc_feature (1)..(25): SEQ ID NO: 3864; WAN024AZZ; Start 369; Stop 393
tttgttcatatcttatttcaatcca

SEQ ID NO: 365617 - DNA, 25 bp, Artificial
  probe
  misc_feature (1)..(25): SEQ ID NO: 3864; WAN024AZZ; Start 317; Stop 341
ctgggaaagctgagaaacaagggat

SEQ ID NO: 365618 - DNA, 25 bp, Artificial
  probe
  misc_feature (1)..(25): SEQ ID NO: 3864; WAN024AZZ; Start 312; Stop 336
tttgtctgggaaagctgagaaacaa

SEQ ID NO: 365619 - DNA, 25 bp, Artificial
  probe
  misc_feature (1)..(25): SEQ ID NO: 3864; WAN024AZZ; Start 311; Stop 335
ttttgtctgggaaagctgagaaaca

SEQ ID NO: 365620 - DNA, 25 bp, Artificial
  probe
  misc_feature (1)..(25): SEQ ID NO: 3864; WAN024AZZ; Start 313; Stop 337
ttgtctgggaaagctgagaaacaag

SEQ ID NO: 365621 - DNA, 25 bp, Artificial
  probe
  misc_feature (1)..(25): SEQ ID NO: 3864; WAN024AZZ; Start 365; Stop 389
tcgatttgttcatatcttatttcaa

SEQ ID NO: 365622 - DNA, 25 bp, Artificial
  probe
  misc_feature (1)..(25): SEQ ID NO: 3864; WAN024AZZ; Start 314; Stop 338
tgtctgggaaagctgagaaacaagg

SEQ ID NO: 365623 - DNA, 25 bp, Artificial
  probe
  misc_feature (1)..(25): SEQ ID NO: 3864; WAN024AZZ; Start 324; Stop 348
agctgagaaacaagggattacgctt

SEQ ID NO: 365624 - DNA, 25 bp, Artificial
  probe
  misc_feature (1)..(25): SEQ ID NO: 3864; WAN024AZZ; Start 323; Stop 347
aagctgagaaacaagggattacgct

SEQ ID NO: 365625 - DNA, 25 bp, Artificial
  probe
  misc_feature (1)..(25): SEQ ID NO: 3864; WAN024AZZ; Start 3; Stop 27
gaaagctcctattcctaaagcccct

SEQ ID NO: 365626 - DNA, 25 bp, Artificial
  probe
  misc_feature (1)..(25): SEQ ID NO: 3864; WAN024AZZ; Start 2; Stop 26
tgaaagctcctattcctaaagcccc

SEQ ID NO: 365627 - DNA, 25 bp, Artificial
  probe
  misc_feature (1)..(25): SEQ ID NO: 3865; WAN024FST; Start 101; Stop 125
tacttgctttgtttcttcattccag

SEQ ID NO: 365628 - DNA, 25 bp, Artificial
  probe
  misc_feature (1)..(25): SEQ ID NO: 3865; WAN024FST; Start 103; Stop 127
cttgctttgtttcttcattccagac

SEQ ID NO: 365629 - DNA, 25 bp, Artificial
  probe
  misc_feature (1)..(25): SEQ ID NO: 3865; WAN024FST; Start 100; Stop 124
gtacttgctttgtttcttcattcca

SEQ ID NO: 365630 - DNA, 25 bp, Artificial
  probe
  misc_feature (1)..(25): SEQ ID NO: 3865; WAN024FST; Start 99; Stop 123
tgtacttgctttgtttcttcattcc

SEQ ID NO: 365631 - DNA, 25 bp, Artificial
  probe
  misc_feature (1)..(25): SEQ ID NO: 3865; WAN024FST; Start 93; Stop 117
cctctttgtacttgctttgtttctt

SEQ ID NO: 365632 - DNA, 25 bp, Artificial
  probe
  misc_feature (1)..(25): SEQ ID NO: 3865; WAN024FST; Start 95; Stop 119
tctttgtacttgctttgtttcttca

SEQ ID NO: 365633 - DNA, 25 bp, Artificial
  probe
  misc_feature (1)..(25): SEQ ID NO: 3865; WAN024FST; Start 102; Stop 126
acttgctttgtttcttcattccaga

SEQ ID NO: 365634 - DNA, 25 bp, Artificial
  probe
  misc_feature (1)..(25): SEQ ID NO: 3865; WAN024FST; Start 91; Stop 115
gacctctttgtacttgctttgtttc

SEQ ID NO: 365635 - DNA, 25 bp, Artificial
  probe
  misc_feature (1)..(25): SEQ ID NO: 3865; WAN024FST; Start 94; Stop 118
ctctttgtacttgctttgtttcttc

SEQ ID NO: 365636 - DNA, 25 bp, Artificial
  probe
  misc_feature (1)..(25): SEQ ID NO: 3865; WAN024FST; Start 92; Stop 116
acctctttgtacttgctttgtttct

SEQ ID NO: 365637 - DNA, 25 bp, Artificial
  probe
  misc_feature (1)..(25): SEQ ID NO: 3865; WAN024FST; Start 98; Stop 122
ttgtacttgctttgtttcttcattc

SEQ ID NO: 365638 - DNA, 25 bp, Artificial
  probe
  misc_feature (1)..(25): SEQ ID NO: 3865; WAN024FST; Start 107; Stop 131
ctttgtttcttcattccagacctcc

SEQ ID NO: 365639 - DNA, 25 bp, Artificial
  probe
  misc_feature (1)..(25): SEQ ID NO: 3865; WAN024FST; Start 96; Stop 120
ctttgtacttgctttgtttcttcat

SEQ ID NO: 365640 - DNA, 25 bp, Artificial
  probe
  misc_feature (1)..(25): SEQ ID NO: 3865; WAN024FST; Start 97; Stop 121
tttgtacttgctttgtttcttcatt

SEQ ID NO: 365641 - DNA, 25 bp, Artificial
  probe
  misc_feature (1)..(25): SEQ ID NO: 3865; WAN024FST; Start 104; Stop 128
ttgctttgtttcttcattccagacc

SEQ ID NO: 365642 - DNA, 25 bp, Artificial
  probe
  misc_feature (1)..(25): SEQ ID NO: 3865; WAN024FST; Start 78; Stop 102
tcagataggaaacgacctctttgta

SEQ ID NO: 365643 - DNA, 25 bp, Artificial
  probe
  misc_feature (1)..(25): SEQ ID NO: 3865; WAN024FST; Start 86; Stop 110
gaaacgacctctttgtacttgcttt

SEQ ID NO: 365644 - DNA, 25 bp, Artificial
  probe
  misc_feature (1)..(25): SEQ ID NO: 3865; WAN024FST; Start 106; Stop 130
gctttgtttcttcattccagacctc

SEQ ID NO: 365645 - DNA, 25 bp, Artificial
  probe
  misc_feature (1)..(25): SEQ ID NO: 3865; WAN024FST; Start 81; Stop 105
gataggaaacgacctctttgtactt

SEQ ID NO: 365646 - DNA, 25 bp, Artificial
  probe
  misc_feature (1)..(25): SEQ ID NO: 3865; WAN024FST; Start 82; Stop 106
ataggaaacgacctctttgtacttg

SEQ ID NO: 365647 - DNA, 25 bp, Artificial
  probe
  misc_feature (1)..(25): SEQ ID NO: 3865; WAN024FST; Start 90; Stop 114
cgacctctttgtacttgctttgttt

SEQ ID NO: 365648 - DNA, 25 bp, Artificial
  probe
  misc_feature (1)..(25): SEQ ID NO: 3865; WAN024FST; Start 80; Stop 104
agataggaaacgacctctttgtact

SEQ ID NO: 365649 - DNA, 25 bp, Artificial
  probe
  misc_feature (1)..(25): SEQ ID NO: 3865; WAN024FST; Start 79; Stop 103
cagataggaaacgacctctttgtac

SEQ ID NO: 365650 - DNA, 25 bp, Artificial
  probe
  misc_feature (1)..(25): SEQ ID NO: 3865; WAN024FST; Start 87; Stop 111
aaacgacctctttgtacttgctttg

SEQ ID NO: 365651 - DNA, 25 bp, Artificial
  probe
  misc_feature (1)..(25): SEQ ID NO: 3865; WAN024FST; Start 77; Stop 101
ttcagataggaaacgacctctttgt

SEQ ID NO: 365652 - DNA, 25 bp, Artificial
  probe
  misc_feature (1)..(25): SEQ ID NO: 3865; WAN024FST; Start 115; Stop 139
cttcattccagacctcccttgattt

SEQ ID NO: 365653 - DNA, 25 bp, Artificial
  probe
  misc_feature (1)..(25): SEQ ID NO: 3865; WAN024FST; Start 105; Stop 129
tgctttgtttcttcattccagacct

SEQ ID NO: 365654 - DNA, 25 bp, Artificial
  probe
  misc_feature (1)..(25): SEQ ID NO: 3865; WAN024FST; Start 76; Stop 100
tttcagataggaaacgacctctttg

SEQ ID NO: 365655 - DNA, 25 bp, Artificial
  probe
  misc_feature (1)..(25): SEQ ID NO: 3865; WAN024FST; Start 108; Stop 132
tttgtttcttcattccagacctccc

SEQ ID NO: 365656 - DNA, 25 bp, Artificial
  probe
  misc_feature (1)..(25): SEQ ID NO: 3865; WAN024FST; Start 111; Stop 135
gtttcttcattccagacctcccttg

SEQ ID NO: 365657 - DNA, 25 bp, Artificial
  probe
  misc_feature (1)..(25): SEQ ID NO: 3865; WAN024FST; Start 125; Stop 149
gacctcccttgattttgttacattg

SEQ ID NO: 365658 - DNA, 25 bp, Artificial
  probe
  misc_feature (1)..(25): SEQ ID NO: 3865; WAN024FST; Start 124; Stop 148
agacctcccttgattttgttacatt

SEQ ID NO: 365659 - DNA, 25 bp, Artificial
  probe
  misc_feature (1)..(25): SEQ ID NO: 3865; WAN024FST; Start 114; Stop 138
tcttcattccagacctcccttgatt

SEQ ID NO: 365660 - DNA, 25 bp, Artificial
  probe
  misc_feature (1)..(25): SEQ ID NO: 3866; WAN024CKE; Start 1176; Stop 1200
ggtgttatggattagccgttatcta

SEQ ID NO: 365661 - DNA, 25 bp, Artificial
  probe
  misc_feature (1)..(25): SEQ ID NO: 3866; WAN024CKE; Start 239; Stop 263
agattggaaggatagttggagatac

SEQ ID NO: 365662 - DNA, 25 bp, Artificial
  probe
  misc_feature (1)..(25): SEQ ID NO: 3866; WAN024CKE; Start 1160; Stop 1184
caagtatgtctgaggtggtgttatg

SEQ ID NO: 365663 - DNA, 25 bp, Artificial
  probe
  misc_feature (1)..(25): SEQ ID NO: 3866; WAN024CKE; Start 1165; Stop 1189
atgtctgaggtggtgttatggatta

SEQ ID NO: 365664 - DNA, 25 bp, Artificial
  probe
  misc_feature (1)..(25): SEQ ID NO: 3866; WAN024CKE; Start 1164; Stop 1188
tatgtctgaggtggtgttatggatt

SEQ ID NO: 365665 - DNA, 25 bp, Artificial
  probe
  misc_feature (1)..(25): SEQ ID NO: 3866; WAN024CKE; Start 238; Stop 262
aagattggaaggatagttggagata

SEQ ID NO: 365666 - DNA, 25 bp, Artificial
  probe
  misc_feature (1)..(25): SEQ ID NO: 3866; WAN024CKE; Start 1174; Stop 1198
gtggtgttatggattagccgttatc

SEQ ID NO: 365667 - DNA, 25 bp, Artificial
  probe
  misc_feature (1)..(25): SEQ ID NO: 3866; WAN024CKE; Start 240; Stop 264
gattggaaggatagttggagatact

SEQ ID NO: 365668 - DNA, 25 bp, Artificial
  probe
  misc_feature (1)..(25): SEQ ID NO: 3866; WAN024CKE; Start 242; Stop 266
ttggaaggatagttggagatactct

SEQ ID NO: 365669 - DNA, 25 bp, Artificial
  probe
  misc_feature (1)..(25): SEQ ID NO: 3866; WAN024CKE; Start 1175; Stop 1199
tggtgttatggattagccgttatct

SEQ ID NO: 365670 - DNA, 25 bp, Artificial
  probe
  misc_feature (1)..(25): SEQ ID NO: 3866; WAN024CKE; Start 243; Stop 267
tggaaggatagttggagatactcta

SEQ ID NO: 365671 - DNA, 25 bp, Artificial
  probe
  misc_feature (1)..(25): SEQ ID NO: 3866; WAN024CKE; Start 1166; Stop 1190
tgtctgaggtggtgttatggattag

SEQ ID NO: 365672 - DNA, 25 bp, Artificial
  probe
  misc_feature (1)..(25): SEQ ID NO: 3866; WAN024CKE; Start 1163; Stop 1187
gtatgtctgaggtggtgttatggat

SEQ ID NO: 365673 - DNA, 25 bp, Artificial
  probe
  misc_feature (1)..(25): SEQ ID NO: 3866; WAN024CKE; Start 241; Stop 265
attggaaggatagttggagatactc

SEQ ID NO: 365674 - DNA, 25 bp, Artificial
  probe
  misc_feature (1)..(25): SEQ ID NO: 3866; WAN024CKE; Start 1159; Stop 1183
tcaagtatgtctgaggtggtgttat

SEQ ID NO: 365675 - DNA, 25 bp, Artificial
  probe
  misc_feature (1)..(25): SEQ ID NO: 3866; WAN024CKE; Start 1158; Stop 1182
ttcaagtatgtctgaggtggtgtta

SEQ ID NO: 365676 - DNA, 25 bp, Artificial
  probe
  misc_feature (1)..(25): SEQ ID NO: 3866; WAN024CKE; Start 1161; Stop 1185
aagtatgtctgaggtggtgttatgg

SEQ ID NO: 365677 - DNA, 25 bp, Artificial
  probe
  misc_feature (1)..(25): SEQ ID NO: 3866; WAN024CKE; Start 244; Stop 268
ggaaggatagttggagatactctag

SEQ ID NO: 365678 - DNA, 25 bp, Artificial
  probe
  misc_feature (1)..(25): SEQ ID NO: 3866; WAN024CKE; Start 248; Stop 272
ggatagttggagatactctagttga

SEQ ID NO: 365679 - DNA, 25 bp, Artificial
  probe
  misc_feature (1)..(25): SEQ ID NO: 3866; WAN024CKE; Start 247; Stop 271
aggatagttggagatactctagttg

SEQ ID NO: 365680 - DNA, 25 bp, Artificial
  probe
  misc_feature (1)..(25): SEQ ID NO: 3866; WAN024CKE; Start 245; Stop 269
gaaggatagttggagatactctagt

SEQ ID NO: 365681 - DNA, 25 bp, Artificial
  probe
  misc_feature (1)..(25): SEQ ID NO: 3866; WAN024CKE; Start 1177; Stop 1201
gtgttatggattagccgttatctaa

SEQ ID NO: 365682 - DNA, 25 bp, Artificial
  probe
  misc_feature (1)..(25): SEQ ID NO: 3866; WAN024CKE; Start 1173; Stop 1197
ggtggtgttatggattagccgttat

SEQ ID NO: 365683 - DNA, 25 bp, Artificial
  probe
  misc_feature (1)..(25): SEQ ID NO: 3866; WAN024CKE; Start 149; Stop 173
cgttaatagcttatgttcaactggt

SEQ ID NO: 365684 - DNA, 25 bp, Artificial
  probe
  misc_feature (1)..(25): SEQ ID NO: 3866; WAN024CKE; Start 148; Stop 172
gcgttaatagcttatgttcaactgg

SEQ ID NO: 365685 - DNA, 25 bp, Artificial
  probe
  misc_feature (1)..(25): SEQ ID NO: 3866; WAN024CKE; Start 1162; Stop 1186
agtatgtctgaggtggtgttatgga

SEQ ID NO: 365686 - DNA, 25 bp, Artificial
  probe
  misc_feature (1)..(25): SEQ ID NO: 3866; WAN024CKE; Start 840; Stop 864
acaatcggttaagagtattaatcgg

SEQ ID NO: 365687 - DNA, 25 bp, Artificial
  probe
  misc_feature (1)..(25): SEQ ID NO: 3866; WAN024CKE; Start 841; Stop 865
caatcggttaagagtattaatcgga

SEQ ID NO: 365688 - DNA, 25 bp, Artificial
  probe
  misc_feature (1)..(25): SEQ ID NO: 3866; WAN024CKE; Start 154; Stop 178
atagcttatgttcaactggtgattg

SEQ ID NO: 365689 - DNA, 25 bp, Artificial
  probe
  misc_feature (1)..(25): SEQ ID NO: 3866; WAN024CKE; Start 237; Stop 261
aaagattggaaggatagttggagat

SEQ ID NO: 365690 - DNA, 25 bp, Artificial
  probe
  misc_feature (1)..(25): SEQ ID NO: 3866; WAN024CKE; Start 246; Stop 270
aaggatagttggagatactctagtt

SEQ ID NO: 365691 - DNA, 25 bp, Artificial
  probe
  misc_feature (1)..(25): SEQ ID NO: 3866; WAN024CKE; Start 1167; Stop 1191
gtctgaggtggtgttatggattagc

SEQ ID NO: 365692 - DNA, 25 bp, Artificial
  probe
  misc_feature (1)..(25): SEQ ID NO: 3866; WAN024CKE; Start 324; Stop 348
gcaaatcccaataatgagagagaat

SEQ ID NO: 365693 - DNA, 25 bp, Artificial
  probe
  misc_feature (1)..(25): SEQ ID NO: 3867; WAN024GCD; Start 142; Stop 166
ctcacatccataatggtagcttctg

SEQ ID NO: 365694 - DNA, 25 bp, Artificial
  probe
  misc_feature (1)..(25): SEQ ID NO: 3867; WAN024GCD; Start 132; Stop 156
aatgctttcgctcacatccataatg

SEQ ID NO: 365695 - DNA, 25 bp, Artificial
  probe
  misc_feature (1)..(25): SEQ ID NO: 3867; WAN024GCD; Start 131; Stop 155
caatgctttcgctcacatccataat

SEQ ID NO: 365696 - DNA, 25 bp, Artificial
  probe
  misc_feature (1)..(25): SEQ ID NO: 3867; WAN024GCD; Start 102; Stop 126
catatttcggacttcttccaaactc

SEQ ID NO: 365697 - DNA, 25 bp, Artificial
  probe
  misc_feature (1)..(25): SEQ ID NO: 3867; WAN024GCD; Start 56; Stop 80
catcatctctccgagctaagttcag

SEQ ID NO: 365698 - DNA, 25 bp, Artificial
  probe
  misc_feature (1)..(25): SEQ ID NO: 3867; WAN024GCD; Start 103; Stop 127
atatttcggacttcttccaaactcg

SEQ ID NO: 365699 - DNA, 25 bp, Artificial
  probe
  misc_feature (1)..(25): SEQ ID NO: 3867; WAN024GCD; Start 147; Stop 171
atccataatggtagcttctggctta

SEQ ID NO: 365700 - DNA, 25 bp, Artificial
  probe
  misc_feature (1)..(25): SEQ ID NO: 3867; WAN024GCD; Start 143; Stop 167
tcacatccataatggtagcttctgg

SEQ ID NO: 365701 - DNA, 25 bp, Artificial
  probe
  misc_feature (1)..(25): SEQ ID NO: 3867; WAN024GCD; Start 101; Stop 125
gcatatttcggacttcttccaaact

SEQ ID NO: 365702 - DNA, 25 bp, Artificial
  probe
  misc_feature (1)..(25): SEQ ID NO: 3867; WAN024GCD; Start 151; Stop 175
ataatggtagcttctggcttacgaa

SEQ ID NO: 365703 - DNA, 25 bp, Artificial
  probe
  misc_feature (1)..(25): SEQ ID NO: 3867; WAN024GCD; Start 148; Stop 172
tccataatggtagcttctggcttac

SEQ ID NO: 365704 - DNA, 25 bp, Artificial
  probe
  misc_feature (1)..(25): SEQ ID NO: 3867; WAN024GCD; Start 150; Stop 174
cataatggtagcttctggcttacga

SEQ ID NO: 365705 - DNA, 25 bp, Artificial
  probe
  misc_feature (1)..(25): SEQ ID NO: 3867; WAN024GCD; Start 141; Stop 165
gctcacatccataatggtagcttct

SEQ ID NO: 365706 - DNA, 25 bp, Artificial
  probe
  misc_feature (1)..(25): SEQ ID NO: 3867; WAN024GCD; Start 136; Stop 160
ctttcgctcacatccataatggtag

SEQ ID NO: 365707 - DNA, 25 bp, Artificial
  probe
  misc_feature (1)..(25): SEQ ID NO: 3867; WAN024GCD; Start 146; Stop 170
catccataatggtagcttctggctt

SEQ ID NO: 365708 - DNA, 25 bp, Artificial
  probe
  misc_feature (1)..(25): SEQ ID NO: 3867; WAN024GCD; Start 100; Stop 124
cgcatatttcggacttcttccaaac

SEQ ID NO: 365709 - DNA, 25 bp, Artificial
  probe
  misc_feature (1)..(25): SEQ ID NO: 3867; WAN024GCD; Start 55; Stop 79
ccatcatctctccgagctaagttca

SEQ ID NO: 365710 - DNA, 25 bp, Artificial
  probe
  misc_feature (1)..(25): SEQ ID NO: 3867; WAN024GCD; Start 50; Stop 74
taatcccatcatctctccgagctaa

SEQ ID NO: 365711 - DNA, 25 bp, Artificial
  probe
  misc_feature (1)..(25): SEQ ID NO: 3867; WAN024GCD; Start 49; Stop 73
ttaatcccatcatctctccgagcta

SEQ ID NO: 365712 - DNA, 25 bp, Artificial
  probe
  misc_feature (1)..(25): SEQ ID NO: 3867; WAN024GCD; Start 111; Stop 135
gacttcttccaaactcgatgcaatg

SEQ ID NO: 365713 - DNA, 25 bp, Artificial
  probe
  misc_feature (1)..(25): SEQ ID NO: 3867; WAN024GCD; Start 99; Stop 123
acgcatatttcggacttcttccaaa

SEQ ID NO: 365714 - DNA, 25 bp, Artificial
  probe
  misc_feature (1)..(25): SEQ ID NO: 3867; WAN024GCD; Start 98; Stop 122
aacgcatatttcggacttcttccaa

SEQ ID NO: 365715 - DNA, 25 bp, Artificial
  probe
  misc_feature (1)..(25): SEQ ID NO: 3867; WAN024GCD; Start 97; Stop 121
aaacgcatatttcggacttcttcca

SEQ ID NO: 365716 - DNA, 25 bp, Artificial
  probe
  misc_feature (1)..(25): SEQ ID NO: 3867; WAN024GCD; Start 144; Stop 168
cacatccataatggtagcttctggc

SEQ ID NO: 365717 - DNA, 25 bp, Artificial
  probe
  misc_feature (1)..(25): SEQ ID NO: 3867; WAN024GCD; Start 149; Stop 173
ccataatggtagcttctggcttacg

SEQ ID NO: 365718 - DNA, 25 bp, Artificial
  probe
  misc_feature (1)..(25): SEQ ID NO: 3867; WAN024GCD; Start 152; Stop 176
taatggtagcttctggcttacgaaa

SEQ ID NO: 365719 - DNA, 25 bp, Artificial
  probe
  misc_feature (1)..(25): SEQ ID NO: 3867; WAN024GCD; Start 145; Stop 169
acatccataatggtagcttctggct

SEQ ID NO: 365720 - DNA, 25 bp, Artificial
  probe
  misc_feature (1)..(25): SEQ ID NO: 3867; WAN024GCD; Start 140; Stop 164
cgctcacatccataatggtagcttc

SEQ ID NO: 365721 - DNA, 25 bp, Artificial
  probe
  misc_feature (1)..(25): SEQ ID NO: 3867; WAN024GCD; Start 104; Stop 128
tatttcggacttcttccaaactcga

SEQ ID NO: 365722 - DNA, 25 bp, Artificial
  probe
  misc_feature (1)..(25): SEQ ID NO: 3867; WAN024GCD; Start 116; Stop 140
cttccaaactcgatgcaatgctttc

SEQ ID NO: 365723 - DNA, 25 bp, Artificial
  probe
  misc_feature (1)..(25): SEQ ID NO: 3867; WAN024GCD; Start 135; Stop 159
gctttcgctcacatccataatggta

SEQ ID NO: 365724 - DNA, 25 bp, Artificial
  probe
  misc_feature (1)..(25): SEQ ID NO: 3867; WAN024GCD; Start 51; Stop 75
aatcccatcatctctccgagctaag

SEQ ID NO: 365725 - DNA, 25 bp, Artificial
  probe
  misc_feature (1)..(25): SEQ ID NO: 3867; WAN024GCD; Start 48; Stop 72
cttaatcccatcatctctccgagct

SEQ ID NO: 365726 - DNA, 25 bp, Artificial
  probe
  misc_feature (1)..(25): SEQ ID NO: 3868; WAN024FYX; Start 74; Stop 98
ataggcaacatctgtatcctgtaac

SEQ ID NO: 365727 - DNA, 25 bp, Artificial
  probe
  misc_feature (1)..(25): SEQ ID NO: 3868; WAN024FYX; Start 73; Stop 97
gataggcaacatctgtatcctgtaa

SEQ ID NO: 365728 - DNA, 25 bp, Artificial
  probe
  misc_feature (1)..(25): SEQ ID NO: 3868; WAN024FYX; Start 946; Stop 970
tggatggataataattggatgactt

SEQ ID NO: 365729 - DNA, 25 bp, Artificial
  probe
  misc_feature (1)..(25): SEQ ID NO: 3868; WAN024FYX; Start 945; Stop 969
atggatggataataattggatgact

SEQ ID NO: 365730 - DNA, 25 bp, Artificial
  probe
  misc_feature (1)..(25): SEQ ID NO: 3868; WAN024FYX; Start 72; Stop 96
agataggcaacatctgtatcctgta

SEQ ID NO: 365731 - DNA, 25 bp, Artificial
  probe
  misc_feature (1)..(25): SEQ ID NO: 3868; WAN024FYX; Start 75; Stop 99
taggcaacatctgtatcctgtaacg

SEQ ID NO: 365732 - DNA, 25 bp, Artificial
  probe
  misc_feature (1)..(25): SEQ ID NO: 3868; WAN024FYX; Start 856; Stop 880
atggctagaacagatttatggaagg

SEQ ID NO: 365733 - DNA, 25 bp, Artificial
  probe
  misc_feature (1)..(25): SEQ ID NO: 3868; WAN024FYX; Start 847; Stop 871
attaattcgatggctagaacagatt

SEQ ID NO: 365734 - DNA, 25 bp, Artificial
  probe
  misc_feature (1)..(25): SEQ ID NO: 3868; WAN024FYX; Start 944; Stop 968
aatggatggataataattggatgac

SEQ ID NO: 365735 - DNA, 25 bp, Artificial
  probe
  misc_feature (1)..(25): SEQ ID NO: 3868; WAN024FYX; Start 855; Stop 879
gatggctagaacagatttatggaag

SEQ ID NO: 365736 - DNA, 25 bp, Artificial
  probe
  misc_feature (1)..(25): SEQ ID NO: 3868; WAN024FYX; Start 854; Stop 878
cgatggctagaacagatttatggaa

SEQ ID NO: 365737 - DNA, 25 bp, Artificial
  probe
  misc_feature (1)..(25): SEQ ID NO: 3868; WAN024FYX; Start 477; Stop 501
agatgatagtttcaatggttcggta

SEQ ID NO: 365738 - DNA, 25 bp, Artificial
  probe
  misc_feature (1)..(25): SEQ ID NO: 3868; WAN024FYX; Start 474; Stop 498
aacagatgatagtttcaatggttcg

SEQ ID NO: 365739 - DNA, 25 bp, Artificial
  probe
  misc_feature (1)..(25): SEQ ID NO: 3868; WAN024FYX; Start 476; Stop 500
cagatgatagtttcaatggttcggt

SEQ ID NO: 365740 - DNA, 25 bp, Artificial
  probe
  misc_feature (1)..(25): SEQ ID NO: 3868; WAN024FYX; Start 475; Stop 499
acagatgatagtttcaatggttcgg

SEQ ID NO: 365741 - DNA, 25 bp, Artificial
  probe
  misc_feature (1)..(25): SEQ ID NO: 3868; WAN024FYX; Start 479; Stop 503
atgatagtttcaatggttcggtact

SEQ ID NO: 365742 - DNA, 25 bp, Artificial
  probe
  misc_feature (1)..(25): SEQ ID NO: 3868; WAN024FYX; Start 478; Stop 502
gatgatagtttcaatggttcggtac

SEQ ID NO: 365743 - DNA, 25 bp, Artificial
  probe
  misc_feature (1)..(25): SEQ ID NO: 3868; WAN024FYX; Start 846; Stop 870
tattaattcgatggctagaacagat

SEQ ID NO: 365744 - DNA, 25 bp, Artificial
  probe
  misc_feature (1)..(25): SEQ ID NO: 3868; WAN024FYX; Start 845; Stop 869
atattaattcgatggctagaacaga

SEQ ID NO: 365745 - DNA, 25 bp, Artificial
  probe
  misc_feature (1)..(25): SEQ ID NO: 3868; WAN024FYX; Start 858; Stop 882
ggctagaacagatttatggaaggga

SEQ ID NO: 365746 - DNA, 25 bp, Artificial
  probe
  misc_feature (1)..(25): SEQ ID NO: 3868; WAN024FYX; Start 78; Stop 102
gcaacatctgtatcctgtaacgtac

SEQ ID NO: 365747 - DNA, 25 bp, Artificial
  probe
  misc_feature (1)..(25): SEQ ID NO: 3868; WAN024FYX; Start 487; Stop 511
ttcaatggttcggtactagaaatgc

SEQ ID NO: 365748 - DNA, 25 bp, Artificial
  probe
  misc_feature (1)..(25): SEQ ID NO: 3868; WAN024FYX; Start 857; Stop 881
tggctagaacagatttatggaaggg

SEQ ID NO: 365749 - DNA, 25 bp, Artificial
  probe
  misc_feature (1)..(25): SEQ ID NO: 3868; WAN024FYX; Start 83; Stop 107
atctgtatcctgtaacgtacatgac

SEQ ID NO: 365750 - DNA, 25 bp, Artificial
  probe
  misc_feature (1)..(25): SEQ ID NO: 3868; WAN024FYX; Start 82; Stop 106
catctgtatcctgtaacgtacatga

SEQ ID NO: 365751 - DNA, 25 bp, Artificial
  probe
  misc_feature (1)..(25): SEQ ID NO: 3868; WAN024FYX; Start 81; Stop 105
acatctgtatcctgtaacgtacatg

SEQ ID NO: 365752 - DNA, 25 bp, Artificial
  probe
  misc_feature (1)..(25): SEQ ID NO: 3868; WAN024FYX; Start 1153; Stop 1177
cagatgctgatatggtttacagata

SEQ ID NO: 365753 - DNA, 25 bp, Artificial
  probe
  misc_feature (1)..(25): SEQ ID NO: 3868; WAN024FYX; Start 85; Stop 109
ctgtatcctgtaacgtacatgacaa

SEQ ID NO: 365754 - DNA, 25 bp, Artificial
  probe
  misc_feature (1)..(25): SEQ ID NO: 3868; WAN024FYX; Start 80; Stop 104
aacatctgtatcctgtaacgtacat

SEQ ID NO: 365755 - DNA, 25 bp, Artificial
  probe
  misc_feature (1)..(25): SEQ ID NO: 3868; WAN024FYX; Start 79; Stop 103
caacatctgtatcctgtaacgtaca

SEQ ID NO: 365756 - DNA, 25 bp, Artificial
  probe
  misc_feature (1)..(25): SEQ ID NO: 3868; WAN024FYX; Start 442; Stop 466
cagggaggacttagtcaatttatct

SEQ ID NO: 365757 - DNA, 25 bp, Artificial
  probe
  misc_feature (1)..(25): SEQ ID NO: 3868; WAN024FYX; Start 852; Stop 876
ttcgatggctagaacagatttatgg

SEQ ID NO: 365758 - DNA, 25 bp, Artificial
  probe
  misc_feature (1)..(25): SEQ ID NO: 3868; WAN024FYX; Start 844; Stop 868
aatattaattcgatggctagaacag

SEQ ID NO: 365759 - DNA, 25 bp, Artificial
  probe
  misc_feature (1)..(25): SEQ ID NO: 3869; WAN024FPZ; Start 458; Stop 482
caatccaaggcataccatcagataa

SEQ ID NO: 365760 - DNA, 25 bp, Artificial
  probe
  misc_feature (1)..(25): SEQ ID NO: 3869; WAN024FPZ; Start 798; Stop 822
tattaacaattcgcacaaggcttct

SEQ ID NO: 365761 - DNA, 25 bp, Artificial
  probe
  misc_feature (1)..(25): SEQ ID NO: 3869; WAN024FPZ; Start 797; Stop 821
gtattaacaattcgcacaaggcttc

SEQ ID NO: 365762 - DNA, 25 bp, Artificial
  probe
  misc_feature (1)..(25): SEQ ID NO: 3869; WAN024FPZ; Start 457; Stop 481
acaatccaaggcataccatcagata

SEQ ID NO: 365763 - DNA, 25 bp, Artificial
  probe
  misc_feature (1)..(25): SEQ ID NO: 3869; WAN024FPZ; Start 410; Stop 434
cagtggatggcattatcgttcataa

SEQ ID NO: 365764 - DNA, 25 bp, Artificial
  probe
  misc_feature (1)..(25): SEQ ID NO: 3869; WAN024FPZ; Start 302; Stop 326
tctatctgttgatccatgatgttga

SEQ ID NO: 365765 - DNA, 25 bp, Artificial
  probe
  misc_feature (1)..(25): SEQ ID NO: 3869; WAN024FPZ; Start 409; Stop 433
tcagtggatggcattatcgttcata

SEQ ID NO: 365766 - DNA, 25 bp, Artificial
  probe
  misc_feature (1)..(25): SEQ ID NO: 3869; WAN024FPZ; Start 303; Stop 327
ctatctgttgatccatgatgttgaa

SEQ ID NO: 365767 - DNA, 25 bp, Artificial
  probe
  misc_feature (1)..(25): SEQ ID NO: 3869; WAN024FPZ; Start 301; Stop 325
ttctatctgttgatccatgatgttg

SEQ ID NO: 365768 - DNA, 25 bp, Artificial
  probe
  misc_feature (1)..(25): SEQ ID NO: 3869; WAN024FPZ; Start 950; Stop 974
tgacagatcaagattacatggaact

SEQ ID NO: 365769 - DNA, 25 bp, Artificial
  probe
  misc_feature (1)..(25): SEQ ID NO: 3869; WAN024FPZ; Start 980; Stop 1004
ctaatgccagacaagtaggagtagc

SEQ ID NO: 365770 - DNA, 25 bp, Artificial
  probe
  misc_feature (1)..(25): SEQ ID NO: 3869; WAN024FPZ; Start 979; Stop 1003
gctaatgccagacaagtaggagtag

SEQ ID NO: 365771 - DNA, 25 bp, Artificial
  probe
  misc_feature (1)..(25): SEQ ID NO: 3869; WAN024FPZ; Start 799; Stop 823
attaacaattcgcacaaggcttctc

SEQ ID NO: 365772 - DNA, 25 bp, Artificial
  probe
  misc_feature (1)..(25): SEQ ID NO: 3869; WAN024FPZ; Start 122; Stop 146
aggttgagaattggtataagatgaa

SEQ ID NO: 365773 - DNA, 25 bp, Artificial
  probe
  misc_feature (1)..(25): SEQ ID NO: 3869; WAN024FPZ; Start 121; Stop 145
aaggttgagaattggtataagatga

SEQ ID NO: 365774 - DNA, 25 bp, Artificial
  probe
  misc_feature (1)..(25): SEQ ID NO: 3869; WAN024FPZ; Start 954; Stop 978
agatcaagattacatggaactgtcg

SEQ ID NO: 365775 - DNA, 25 bp, Artificial
  probe
  misc_feature (1)..(25): SEQ ID NO: 3869; WAN024FPZ; Start 408; Stop 432
atcagtggatggcattatcgttcat

SEQ ID NO: 365776 - DNA, 25 bp, Artificial
  probe
  misc_feature (1)..(25): SEQ ID NO: 3869; WAN024FPZ; Start 886; Stop 910
ctagataagcagtgtggtatagcgg

SEQ ID NO: 365777 - DNA, 25 bp, Artificial
  probe
  misc_feature (1)..(25): SEQ ID NO: 3869; WAN024FPZ; Start 76; Stop 100
gtggaagctattctaatctcagagg

SEQ ID NO: 365778 - DNA, 25 bp, Artificial
  probe
  misc_feature (1)..(25): SEQ ID NO: 3869; WAN024FPZ; Start 953; Stop 977
cagatcaagattacatggaactgtc

SEQ ID NO: 365779 - DNA, 25 bp, Artificial
  probe
  misc_feature (1)..(25): SEQ ID NO: 3869; WAN024FPZ; Start 951; Stop 975
gacagatcaagattacatggaactg

SEQ ID NO: 365780 - DNA, 25 bp, Artificial
  probe
  misc_feature (1)..(25): SEQ ID NO: 3869; WAN024FPZ; Start 456; Stop 480
gacaatccaaggcataccatcagat

SEQ ID NO: 365781 - DNA, 25 bp, Artificial
  probe
  misc_feature (1)..(25): SEQ ID NO: 3869; WAN024FPZ; Start 75; Stop 99
cgtggaagctattctaatctcagag

SEQ ID NO: 365782 - DNA, 25 bp, Artificial
  probe
  misc_feature (1)..(25): SEQ ID NO: 3869; WAN024FPZ; Start 120; Stop 144
caaggttgagaattggtataagatg

SEQ ID NO: 365783 - DNA, 25 bp, Artificial
  probe
  misc_feature (1)..(25): SEQ ID NO: 3869; WAN024FPZ; Start 796; Stop 820
cgtattaacaattcgcacaaggctt

SEQ ID NO: 365784 - DNA, 25 bp, Artificial
  probe
  misc_feature (1)..(25): SEQ ID NO: 3869; WAN024FPZ; Start 300; Stop 324
attctatctgttgatccatgatgtt

SEQ ID NO: 365785 - DNA, 25 bp, Artificial
  probe
  misc_feature (1)..(25): SEQ ID NO: 3869; WAN024FPZ; Start 299; Stop 323
aattctatctgttgatccatgatgt

SEQ ID NO: 365786 - DNA, 25 bp, Artificial
  probe
  misc_feature (1)..(25): SEQ ID NO: 3869; WAN024FPZ; Start 411; Stop 435
agtggatggcattatcgttcataat

SEQ ID NO: 365787 - DNA, 25 bp, Artificial
  probe
  misc_feature (1)..(25): SEQ ID NO: 3869; WAN024FPZ; Start 459; Stop 483
aatccaaggcataccatcagataaa

SEQ ID NO: 365788 - DNA, 25 bp, Artificial
  probe
  misc_feature (1)..(25): SEQ ID NO: 3869; WAN024FPZ; Start 70; Stop 94
aatgacgtggaagctattctaatct

SEQ ID NO: 365789 - DNA, 25 bp, Artificial
  probe
  misc_feature (1)..(25): SEQ ID NO: 3869; WAN024FPZ; Start 955; Stop 979
gatcaagattacatggaactgtcgg

SEQ ID NO: 365790 - DNA, 25 bp, Artificial
  probe
  misc_feature (1)..(25): SEQ ID NO: 3869; WAN024FPZ; Start 71; Stop 95
atgacgtggaagctattctaatctc

SEQ ID NO: 365791 - DNA, 25 bp, Artificial
  probe
  misc_feature (1)..(25): SEQ ID NO: 3869; WAN024FPZ; Start 887; Stop 911
tagataagcagtgtggtatagcggt

SEQ ID NO: 365792 - DNA, 25 bp, Artificial
  probe
  misc_feature (1)..(25): SEQ ID NO: 3870; WAN024G6N; Start 674; Stop 698
ctataatccagtccttcaatgctca

SEQ ID NO: 365793 - DNA, 25 bp, Artificial
  probe
  misc_feature (1)..(25): SEQ ID NO: 3870; WAN024G6N; Start 1189; Stop 1213
actcttatcaatctccttatgcgtt

SEQ ID NO: 365794 - DNA, 25 bp, Artificial
  probe
  misc_feature (1)..(25): SEQ ID NO: 3870; WAN024G6N; Start 1188; Stop 1212
aactcttatcaatctccttatgcgt

SEQ ID NO: 365795 - DNA, 25 bp, Artificial
  probe
  misc_feature (1)..(25): SEQ ID NO: 3870; WAN024G6N; Start 675; Stop 699
tataatccagtccttcaatgctcaa

SEQ ID NO: 365796 - DNA, 25 bp, Artificial
  probe
  misc_feature (1)..(25): SEQ ID NO: 3870; WAN024G6N; Start 1187; Stop 1211
caactcttatcaatctccttatgcg

SEQ ID NO: 365797 - DNA, 25 bp, Artificial
  probe
  misc_feature (1)..(25): SEQ ID NO: 3870; WAN024G6N; Start 281; Stop 305
ccaatcctctcctctataatcgtct

SEQ ID NO: 365798 - DNA, 25 bp, Artificial
  probe
  misc_feature (1)..(25): SEQ ID NO: 3870; WAN024G6N; Start 1537; Stop 1561
attcttatcttagacgaggcaactt

SEQ ID NO: 365799 - DNA, 25 bp, Artificial
  probe
  misc_feature (1)..(25): SEQ ID NO: 3870; WAN024G6N; Start 1536; Stop 1560
gattcttatcttagacgaggcaact

SEQ ID NO: 365800 - DNA, 25 bp, Artificial
  probe
  misc_feature (1)..(25): SEQ ID NO: 3870; WAN024G6N; Start 1541; Stop 1565
ttatcttagacgaggcaacttcttc

SEQ ID NO: 365801 - DNA, 25 bp, Artificial
  probe
  misc_feature (1)..(25): SEQ ID NO: 3870; WAN024G6N; Start 1540; Stop 1564
cttatcttagacgaggcaacttctt

SEQ ID NO: 365802 - DNA, 25 bp, Artificial
  probe
  misc_feature (1)..(25): SEQ ID NO: 3870; WAN024G6N; Start 1538; Stop 1562
ttcttatcttagacgaggcaacttc

SEQ ID NO: 365803 - DNA, 25 bp, Artificial
  probe
  misc_feature (1)..(25): SEQ ID NO: 3870; WAN024G6N; Start 768; Stop 792
ttattcttcaacggtcaatccttcg

SEQ ID NO: 365804 - DNA, 25 bp, Artificial
  probe
  misc_feature (1)..(25): SEQ ID NO: 3870; WAN024G6N; Start 1539; Stop 1563
tcttatcttagacgaggcaacttct

SEQ ID NO: 365805 - DNA, 25 bp, Artificial
  probe
  misc_feature (1)..(25): SEQ ID NO: 3870; WAN024G6N; Start 673; Stop 697
actataatccagtccttcaatgctc

SEQ ID NO: 365806 - DNA, 25 bp, Artificial
  probe
  misc_feature (1)..(25): SEQ ID NO: 3870; WAN024G6N; Start 377; Stop 401
tagataggcaaggtagtggagagat

SEQ ID NO: 365807 - DNA, 25 bp, Artificial
  probe
  misc_feature (1)..(25): SEQ ID NO: 3870; WAN024G6N; Start 282; Stop 306
caatcctctcctctataatcgtcta

SEQ ID NO: 365808 - DNA, 25 bp, Artificial
  probe
  misc_feature (1)..(25): SEQ ID NO: 3870; WAN024G6N; Start 1186; Stop 1210
tcaactcttatcaatctccttatgc

SEQ ID NO: 365809 - DNA, 25 bp, Artificial
  probe
  misc_feature (1)..(25): SEQ ID NO: 3870; WAN024G6N; Start 286; Stop 310
cctctcctctataatcgtctaatct

SEQ ID NO: 365810 - DNA, 25 bp, Artificial
  probe
  misc_feature (1)..(25): SEQ ID NO: 3870; WAN024G6N; Start 285; Stop 309
tcctctcctctataatcgtctaatc

SEQ ID NO: 365811 - DNA, 25 bp, Artificial
  probe
  misc_feature (1)..(25): SEQ ID NO: 3870; WAN024G6N; Start 731; Stop 755
atgacaactactcaggctattctca

SEQ ID NO: 365812 - DNA, 25 bp, Artificial
  probe
  misc_feature (1)..(25): SEQ ID NO: 3870; WAN024G6N; Start 385; Stop 409
caaggtagtggagagatggttagtc

SEQ ID NO: 365813 - DNA, 25 bp, Artificial
  probe
  misc_feature (1)..(25): SEQ ID NO: 3870; WAN024G6N; Start 736; Stop 760
aactactcaggctattctcagtcag

SEQ ID NO: 365814 - DNA, 25 bp, Artificial
  probe
  misc_feature (1)..(25): SEQ ID NO: 3870; WAN024G6N; Start 390; Stop 414
tagtggagagatggttagtcgtgta

SEQ ID NO: 365815 - DNA, 25 bp, Artificial
  probe
  misc_feature (1)..(25): SEQ ID NO: 3870; WAN024G6N; Start 280; Stop 304
gccaatcctctcctctataatcgtc

SEQ ID NO: 365816 - DNA, 25 bp, Artificial
  probe
  misc_feature (1)..(25): SEQ ID NO: 3870; WAN024G6N; Start 734; Stop 758
acaactactcaggctattctcagtc

SEQ ID NO: 365817 - DNA, 25 bp, Artificial
  probe
  misc_feature (1)..(25): SEQ ID NO: 3870; WAN024G6N; Start 733; Stop 757
gacaactactcaggctattctcagt

SEQ ID NO: 365818 - DNA, 25 bp, Artificial
  probe
  misc_feature (1)..(25): SEQ ID NO: 3870; WAN024G6N; Start 735; Stop 759
caactactcaggctattctcagtca

SEQ ID NO: 365819 - DNA, 25 bp, Artificial
  probe
  misc_feature (1)..(25): SEQ ID NO: 3870; WAN024G6N; Start 732; Stop 756
tgacaactactcaggctattctcag

SEQ ID NO: 365820 - DNA, 25 bp, Artificial
  probe
  misc_feature (1)..(25): SEQ ID NO: 3870; WAN024G6N; Start 594; Stop 618
atcctatcatctcttccagaagcaa

SEQ ID NO: 365821 - DNA, 25 bp, Artificial
  probe
  misc_feature (1)..(25): SEQ ID NO: 3870; WAN024G6N; Start 1542; Stop 1566
tatcttagacgaggcaacttcttcc

SEQ ID NO: 365822 - DNA, 25 bp, Artificial
  probe
  misc_feature (1)..(25): SEQ ID NO: 3870; WAN024G6N; Start 300; Stop 324
tcgtctaatcttctcttataccaga

SEQ ID NO: 365823 - DNA, 25 bp, Artificial
  probe
  misc_feature (1)..(25): SEQ ID NO: 3870; WAN024G6N; Start 283; Stop 307
aatcctctcctctataatcgtctaa

SEQ ID NO: 365824 - DNA, 25 bp, Artificial
  probe
  misc_feature (1)..(25): SEQ ID NO: 3870; WAN024G6N; Start 376; Stop 400
gtagataggcaaggtagtggagaga

SEQ ID NO: 365825 - DNA, 25 bp, Artificial
  probe
  misc_feature (1)..(25): SEQ ID NO: 3871; WAN024ETP; Start 737; Stop 761
ttatcgtcaactatatcgttcgtcc

SEQ ID NO: 365826 - DNA, 25 bp, Artificial
  probe
  misc_feature (1)..(25): SEQ ID NO: 3871; WAN024ETP; Start 513; Stop 537
tcctctaggttctccaagtatgatt

SEQ ID NO: 365827 - DNA, 25 bp, Artificial
  probe
  misc_feature (1)..(25): SEQ ID NO: 3871; WAN024ETP; Start 512; Stop 536
ttcctctaggttctccaagtatgat

SEQ ID NO: 365828 - DNA, 25 bp, Artificial
  probe
  misc_feature (1)..(25): SEQ ID NO: 3871; WAN024ETP; Start 511; Stop 535
attcctctaggttctccaagtatga

SEQ ID NO: 365829 - DNA, 25 bp, Artificial
  probe
  misc_feature (1)..(25): SEQ ID NO: 3871; WAN024ETP; Start 510; Stop 534
cattcctctaggttctccaagtatg

SEQ ID NO: 365830 - DNA, 25 bp, Artificial
  probe
  misc_feature (1)..(25): SEQ ID NO: 3871; WAN024ETP; Start 738; Stop 762
tatcgtcaactatatcgttcgtcca

SEQ ID NO: 365831 - DNA, 25 bp, Artificial
  probe
  misc_feature (1)..(25): SEQ ID NO: 3871; WAN024ETP; Start 509; Stop 533
gcattcctctaggttctccaagtat

SEQ ID NO: 365832 - DNA, 25 bp, Artificial
  probe
  misc_feature (1)..(25): SEQ ID NO: 3871; WAN024ETP; Start 739; Stop 763
atcgtcaactatatcgttcgtccaa

SEQ ID NO: 365833 - DNA, 25 bp, Artificial
  probe
  misc_feature (1)..(25): SEQ ID NO: 3871; WAN024ETP; Start 561; Stop 585
ttactatcttcaatcgctcctttca

SEQ ID NO: 365834 - DNA, 25 bp, Artificial
  probe
  misc_feature (1)..(25): SEQ ID NO: 3871; WAN024ETP; Start 444; Stop 468
tttcttctctgctatctactttgct

SEQ ID NO: 365835 - DNA, 25 bp, Artificial
  probe
  misc_feature (1)..(25): SEQ ID NO: 3871; WAN024ETP; Start 441; Stop 465
gcctttcttctctgctatctacttt

SEQ ID NO: 365836 - DNA, 25 bp, Artificial
  probe
  misc_feature (1)..(25): SEQ ID NO: 3871; WAN024ETP; Start 437; Stop 461
aaatgcctttcttctctgctatcta

SEQ ID NO: 365837 - DNA, 25 bp, Artificial
  probe
  misc_feature (1)..(25): SEQ ID NO: 3871; WAN024ETP; Start 562; Stop 586
tactatcttcaatcgctcctttcac

SEQ ID NO: 365838 - DNA, 25 bp, Artificial
  probe
  misc_feature (1)..(25): SEQ ID NO: 3871; WAN024ETP; Start 558; Stop 582
cctttactatcttcaatcgctcctt

SEQ ID NO: 365839 - DNA, 25 bp, Artificial
  probe
  misc_feature (1)..(25): SEQ ID NO: 3871; WAN024ETP; Start 555; Stop 579
tgtcctttactatcttcaatcgctc

SEQ ID NO: 365840 - DNA, 25 bp, Artificial
  probe
  misc_feature (1)..(25): SEQ ID NO: 3871; WAN024ETP; Start 552; Stop 576
tggtgtcctttactatcttcaatcg

SEQ ID NO: 365841 - DNA, 25 bp, Artificial
  probe
  misc_feature (1)..(25): SEQ ID NO: 3871; WAN024ETP; Start 445; Stop 469
ttcttctctgctatctactttgctg

SEQ ID NO: 365842 - DNA, 25 bp, Artificial
  probe
  misc_feature (1)..(25): SEQ ID NO: 3871; WAN024ETP; Start 438; Stop 462
aatgcctttcttctctgctatctac

SEQ ID NO: 365843 - DNA, 25 bp, Artificial
  probe
  misc_feature (1)..(25): SEQ ID NO: 3871; WAN024ETP; Start 443; Stop 467
ctttcttctctgctatctactttgc

SEQ ID NO: 365844 - DNA, 25 bp, Artificial
  probe
  misc_feature (1)..(25): SEQ ID NO: 3871; WAN024ETP; Start 550; Stop 574
gctggtgtcctttactatcttcaat

SEQ ID NO: 365845 - DNA, 25 bp, Artificial
  probe
  misc_feature (1)..(25): SEQ ID NO: 3871; WAN024ETP; Start 554; Stop 578
gtgtcctttactatcttcaatcgct

SEQ ID NO: 365846 - DNA, 25 bp, Artificial
  probe
  misc_feature (1)..(25): SEQ ID NO: 3871; WAN024ETP; Start 434; Stop 458
ttcaaatgcctttcttctctgctat

SEQ ID NO: 365847 - DNA, 25 bp, Artificial
  probe
  misc_feature (1)..(25): SEQ ID NO: 3871; WAN024ETP; Start 565; Stop 589
tatcttcaatcgctcctttcacttc

SEQ ID NO: 365848 - DNA, 25 bp, Artificial
  probe
  misc_feature (1)..(25): SEQ ID NO: 3871; WAN024ETP; Start 564; Stop 588
ctatcttcaatcgctcctttcactt

SEQ ID NO: 365849 - DNA, 25 bp, Artificial
  probe
  misc_feature (1)..(25): SEQ ID NO: 3871; WAN024ETP; Start 560; Stop 584
tttactatcttcaatcgctcctttc

SEQ ID NO: 365850 - DNA, 25 bp, Artificial
  probe
  misc_feature (1)..(25): SEQ ID NO: 3871; WAN024ETP; Start 557; Stop 581
tcctttactatcttcaatcgctcct

SEQ ID NO: 365851 - DNA, 25 bp, Artificial
  probe
  misc_feature (1)..(25): SEQ ID NO: 3871; WAN024ETP; Start 556; Stop 580
gtcctttactatcttcaatcgctcc

SEQ ID NO: 365852 - DNA, 25 bp, Artificial
  probe
  misc_feature (1)..(25): SEQ ID NO: 3871; WAN024ETP; Start 442; Stop 466
cctttcttctctgctatctactttg

SEQ ID NO: 365853 - DNA, 25 bp, Artificial
  probe
  misc_feature (1)..(25): SEQ ID NO: 3871; WAN024ETP; Start 439; Stop 463
atgcctttcttctctgctatctact

SEQ ID NO: 365854 - DNA, 25 bp, Artificial
  probe
  misc_feature (1)..(25): SEQ ID NO: 3871; WAN024ETP; Start 559; Stop 583
ctttactatcttcaatcgctccttt

SEQ ID NO: 365855 - DNA, 25 bp, Artificial
  probe
  misc_feature (1)..(25): SEQ ID NO: 3871; WAN024ETP; Start 551; Stop 575
ctggtgtcctttactatcttcaatc

SEQ ID NO: 365856 - DNA, 25 bp, Artificial
  probe
  misc_feature (1)..(25): SEQ ID NO: 3871; WAN024ETP; Start 436; Stop 460
caaatgcctttcttctctgctatct

SEQ ID NO: 365857 - DNA, 25 bp, Artificial
  probe
  misc_feature (1)..(25): SEQ ID NO: 3871; WAN024ETP; Start 435; Stop 459
tcaaatgcctttcttctctgctatc

SEQ ID NO: 365858 - DNA, 25 bp, Artificial
  probe
  misc_feature (1)..(25): SEQ ID NO: 3872; WAN024AFU; Start 7; Stop 31
tgaagaatcagttctaagagttggt

SEQ ID NO: 365859 - DNA, 25 bp, Artificial
  probe
  misc_feature (1)..(25): SEQ ID NO: 3872; WAN024AFU; Start 8; Stop 32
gaagaatcagttctaagagttggtt

SEQ ID NO: 365860 - DNA, 25 bp, Artificial
  probe
  misc_feature (1)..(25): SEQ ID NO: 3872; WAN024AFU; Start 6; Stop 30
atgaagaatcagttctaagagttgg

SEQ ID NO: 365861 - DNA, 25 bp, Artificial
  probe
  misc_feature (1)..(25): SEQ ID NO: 3872; WAN024AFU; Start 5; Stop 29
aatgaagaatcagttctaagagttg

SEQ ID NO: 365862 - DNA, 25 bp, Artificial
  probe
  misc_feature (1)..(25): SEQ ID NO: 3872; WAN024AFU; Start 9; Stop 33
aagaatcagttctaagagttggttt

SEQ ID NO: 365863 - DNA, 25 bp, Artificial
  probe
  misc_feature (1)..(25): SEQ ID NO: 3872; WAN024AFU; Start 1; Stop 25
gtgaaatgaagaatcagttctaaga

SEQ ID NO: 365864 - DNA, 25 bp, Artificial
  probe
  misc_feature (1)..(25): SEQ ID NO: 3872; WAN024AFU; Start 3; Stop 27
gaaatgaagaatcagttctaagagt

SEQ ID NO: 365865 - DNA, 25 bp, Artificial
  probe
  misc_feature (1)..(25): SEQ ID NO: 3872; WAN024AFU; Start 2; Stop 26
tgaaatgaagaatcagttctaagag

SEQ ID NO: 365866 - DNA, 25 bp, Artificial
  probe
  misc_feature (1)..(25): SEQ ID NO: 3872; WAN024AFU; Start 4; Stop 28
aaatgaagaatcagttctaagagtt

SEQ ID NO: 365867 - DNA, 25 bp, Artificial
  probe
  misc_feature (1)..(25): SEQ ID NO: 3872; WAN024AFU; Start 10; Stop 34
agaatcagttctaagagttggtttt

SEQ ID NO: 365868 - DNA, 25 bp, Artificial
  probe
  misc_feature (1)..(25): SEQ ID NO: 3873; WAN024DVU; Start 627; Stop 651
tacggatggtgaagtaagtgtattg

SEQ ID NO: 365869 - DNA, 25 bp, Artificial
  probe
  misc_feature (1)..(25): SEQ ID NO: 3873; WAN024DVU; Start 2114; Stop 2138
tcagagtaagaggaggatataaggt

SEQ ID NO: 365870 - DNA, 25 bp, Artificial
  probe
  misc_feature (1)..(25): SEQ ID NO: 3873; WAN024DVU; Start 661; Stop 685
atagttattcggaatgctacagagg

SEQ ID NO: 365871 - DNA, 25 bp, Artificial
  probe
  misc_feature (1)..(25): SEQ ID NO: 3873; WAN024DVU; Start 654; Stop 678
agagacaatagttattcggaatgct

SEQ ID NO: 365872 - DNA, 25 bp, Artificial
  probe
  misc_feature (1)..(25): SEQ ID NO: 3873; WAN024DVU; Start 451; Stop 475
ttatgttgccgtatagtgtcatcag

SEQ ID NO: 365873 - DNA, 25 bp, Artificial
  probe
  misc_feature (1)..(25): SEQ ID NO: 3873; WAN024DVU; Start 664; Stop 688
gttattcggaatgctacagaggtat

SEQ ID NO: 365874 - DNA, 25 bp, Artificial
  probe
  misc_feature (1)..(25): SEQ ID NO: 3873; WAN024DVU; Start 653; Stop 677
gagagacaatagttattcggaatgc

SEQ ID NO: 365875 - DNA, 25 bp, Artificial
  probe
  misc_feature (1)..(25): SEQ ID NO: 3873; WAN024DVU; Start 665; Stop 689
ttattcggaatgctacagaggtatt

SEQ ID NO: 365876 - DNA, 25 bp, Artificial
  probe
  misc_feature (1)..(25): SEQ ID NO: 3873; WAN024DVU; Start 652; Stop 676
ggagagacaatagttattcggaatg

SEQ ID NO: 365877 - DNA, 25 bp, Artificial
  probe
  misc_feature (1)..(25): SEQ ID NO: 3873; WAN024DVU; Start 983; Stop 1007
atcttcaaggaatatggtgtgatga

SEQ ID NO: 365878 - DNA, 25 bp, Artificial
  probe
  misc_feature (1)..(25): SEQ ID NO: 3873; WAN024DVU; Start 658; Stop 682
acaatagttattcggaatgctacag

SEQ ID NO: 365879 - DNA, 25 bp, Artificial
  probe
  misc_feature (1)..(25): SEQ ID NO: 3873; WAN024DVU; Start 657; Stop 681
gacaatagttattcggaatgctaca

SEQ ID NO: 365880 - DNA, 25 bp, Artificial
  probe
  misc_feature (1)..(25): SEQ ID NO: 3873; WAN024DVU; Start 942; Stop 966
tctgttaatatcgtctagtcaaccg

SEQ ID NO: 365881 - DNA, 25 bp, Artificial
  probe
  misc_feature (1)..(25): SEQ ID NO: 3873; WAN024DVU; Start 662; Stop 686
tagttattcggaatgctacagaggt

SEQ ID NO: 365882 - DNA, 25 bp, Artificial
  probe
  misc_feature (1)..(25): SEQ ID NO: 3873; WAN024DVU; Start 663; Stop 687
agttattcggaatgctacagaggta

SEQ ID NO: 365883 - DNA, 25 bp, Artificial
  probe
  misc_feature (1)..(25): SEQ ID NO: 3873; WAN024DVU; Start 659; Stop 683
caatagttattcggaatgctacaga

SEQ ID NO: 365884 - DNA, 25 bp, Artificial
  probe
  misc_feature (1)..(25): SEQ ID NO: 3873; WAN024DVU; Start 656; Stop 680
agacaatagttattcggaatgctac

SEQ ID NO: 365885 - DNA, 25 bp, Artificial
  probe
  misc_feature (1)..(25): SEQ ID NO: 3873; WAN024DVU; Start 2113; Stop 2137
ttcagagtaagaggaggatataagg

SEQ ID NO: 365886 - DNA, 25 bp, Artificial
  probe
  misc_feature (1)..(25): SEQ ID NO: 3873; WAN024DVU; Start 982; Stop 1006
aatcttcaaggaatatggtgtgatg

SEQ ID NO: 365887 - DNA, 25 bp, Artificial
  probe
  misc_feature (1)..(25): SEQ ID NO: 3873; WAN024DVU; Start 981; Stop 1005
caatcttcaaggaatatggtgtgat

SEQ ID NO: 365888 - DNA, 25 bp, Artificial
  probe
  misc_feature (1)..(25): SEQ ID NO: 3873; WAN024DVU; Start 452; Stop 476
tatgttgccgtatagtgtcatcagt

SEQ ID NO: 365889 - DNA, 25 bp, Artificial
  probe
  misc_feature (1)..(25): SEQ ID NO: 3873; WAN024DVU; Start 660; Stop 684
aatagttattcggaatgctacagag

SEQ ID NO: 365890 - DNA, 25 bp, Artificial
  probe
  misc_feature (1)..(25): SEQ ID NO: 3873; WAN024DVU; Start 655; Stop 679
gagacaatagttattcggaatgcta

SEQ ID NO: 365891 - DNA, 25 bp, Artificial
  probe
  misc_feature (1)..(25): SEQ ID NO: 3873; WAN024DVU; Start 2115; Stop 2139
cagagtaagaggaggatataaggta

SEQ ID NO: 365892 - DNA, 25 bp, Artificial
  probe
  misc_feature (1)..(25): SEQ ID NO: 3873; WAN024DVU; Start 973; Stop 997
ttacctgccaatcttcaaggaatat

SEQ ID NO: 365893 - DNA, 25 bp, Artificial
  probe
  misc_feature (1)..(25): SEQ ID NO: 3873; WAN024DVU; Start 974; Stop 998
tacctgccaatcttcaaggaatatg

SEQ ID NO: 365894 - DNA, 25 bp, Artificial
  probe
  misc_feature (1)..(25): SEQ ID NO: 3873; WAN024DVU; Start 2119; Stop 2143
gtaagaggaggatataaggtatcgt

SEQ ID NO: 365895 - DNA, 25 bp, Artificial
  probe
  misc_feature (1)..(25): SEQ ID NO: 3873; WAN024DVU; Start 626; Stop 650
ttacggatggtgaagtaagtgtatt

SEQ ID NO: 365896 - DNA, 25 bp, Artificial
  probe
  misc_feature (1)..(25): SEQ ID NO: 3873; WAN024DVU; Start 625; Stop 649
gttacggatggtgaagtaagtgtat

SEQ ID NO: 365897 - DNA, 25 bp, Artificial
  probe
  misc_feature (1)..(25): SEQ ID NO: 3873; WAN024DVU; Start 1806; Stop 1830
ggagcaagcgattaataattggtta

SEQ ID NO: 365898 - DNA, 25 bp, Artificial
  probe
  misc_feature (1)..(25): SEQ ID NO: 3873; WAN024DVU; Start 453; Stop 477
atgttgccgtatagtgtcatcagtt

SEQ ID NO: 365899 - DNA, 25 bp, Artificial
  probe
  misc_feature (1)..(25): SEQ ID NO: 3873; WAN024DVU; Start 628; Stop 652
acggatggtgaagtaagtgtattgg

SEQ ID NO: 365900 - DNA, 25 bp, Artificial
  probe
  misc_feature (1)..(25): SEQ ID NO: 3873; WAN024DVU; Start 987; Stop 1011
tcaaggaatatggtgtgatgaatta

SEQ ID NO: 365901 - DNA, 25 bp, Artificial
  probe
  misc_feature (1)..(25): SEQ ID NO: 3874; WAN024FIN; Start 931; Stop 955
gtctacaactacgatattccacaag

SEQ ID NO: 365902 - DNA, 25 bp, Artificial
  probe
  misc_feature (1)..(25): SEQ ID NO: 3874; WAN024FIN; Start 1249; Stop 1273
ttggcaatgtatatcttgagtctga

SEQ ID NO: 365903 - DNA, 25 bp, Artificial
  probe
  misc_feature (1)..(25): SEQ ID NO: 3874; WAN024FIN; Start 932; Stop 956
tctacaactacgatattccacaaga

SEQ ID NO: 365904 - DNA, 25 bp, Artificial
  probe
  misc_feature (1)..(25): SEQ ID NO: 3874; WAN024FIN; Start 1257; Stop 1281
gtatatcttgagtctgacagtccaa

SEQ ID NO: 365905 - DNA, 25 bp, Artificial
  probe
  misc_feature (1)..(25): SEQ ID NO: 3874; WAN024FIN; Start 1250; Stop 1274
tggcaatgtatatcttgagtctgac

SEQ ID NO: 365906 - DNA, 25 bp, Artificial
  probe
  misc_feature (1)..(25): SEQ ID NO: 3874; WAN024FIN; Start 946; Stop 970
attccacaagatcctgagagttatg

SEQ ID NO: 365907 - DNA, 25 bp, Artificial
  probe
  misc_feature (1)..(25): SEQ ID NO: 3874; WAN024FIN; Start 943; Stop 967
gatattccacaagatcctgagagtt

SEQ ID NO: 365908 - DNA, 25 bp, Artificial
  probe
  misc_feature (1)..(25): SEQ ID NO: 3874; WAN024FIN; Start 937; Stop 961
aactacgatattccacaagatcctg

SEQ ID NO: 365909 - DNA, 25 bp, Artificial
  probe
  misc_feature (1)..(25): SEQ ID NO: 3874; WAN024FIN; Start 936; Stop 960
caactacgatattccacaagatcct

SEQ ID NO: 365910 - DNA, 25 bp, Artificial
  probe
  misc_feature (1)..(25): SEQ ID NO: 3874; WAN024FIN; Start 939; Stop 963
ctacgatattccacaagatcctgag

SEQ ID NO: 365911 - DNA, 25 bp, Artificial
  probe
  misc_feature (1)..(25): SEQ ID NO: 3874; WAN024FIN; Start 935; Stop 959
acaactacgatattccacaagatcc

SEQ ID NO: 365912 - DNA, 25 bp, Artificial
  probe
  misc_feature (1)..(25): SEQ ID NO: 3874; WAN024FIN; Start 940; Stop 964
tacgatattccacaagatcctgaga

SEQ ID NO: 365913 - DNA, 25 bp, Artificial
  probe
  misc_feature (1)..(25): SEQ ID NO: 3874; WAN024FIN; Start 956; Stop 980
atcctgagagttatgttcaccgtat

SEQ ID NO: 365914 - DNA, 25 bp, Artificial
  probe
  misc_feature (1)..(25): SEQ ID NO: 3874; WAN024FIN; Start 938; Stop 962
actacgatattccacaagatcctga

SEQ ID NO: 365915 - DNA, 25 bp, Artificial
  probe
  misc_feature (1)..(25): SEQ ID NO: 3874; WAN024FIN; Start 933; Stop 957
ctacaactacgatattccacaagat

SEQ ID NO: 365916 - DNA, 25 bp, Artificial
  probe
  misc_feature (1)..(25): SEQ ID NO: 3874; WAN024FIN; Start 927; Stop 951
ccatgtctacaactacgatattcca

SEQ ID NO: 365917 - DNA, 25 bp, Artificial
  probe
  misc_feature (1)..(25): SEQ ID NO: 3874; WAN024FIN; Start 930; Stop 954
tgtctacaactacgatattccacaa

SEQ ID NO: 365918 - DNA, 25 bp, Artificial
  probe
  misc_feature (1)..(25): SEQ ID NO: 3874; WAN024FIN; Start 617; Stop 641
ctaaggaattgacaacagaattggt

SEQ ID NO: 365919 - DNA, 25 bp, Artificial
  probe
  misc_feature (1)..(25): SEQ ID NO: 3874; WAN024FIN; Start 1251; Stop 1275
ggcaatgtatatcttgagtctgaca

SEQ ID NO: 365920 - DNA, 25 bp, Artificial
  probe
  misc_feature (1)..(25): SEQ ID NO: 3874; WAN024FIN; Start 616; Stop 640
gctaaggaattgacaacagaattgg

SEQ ID NO: 365921 - DNA, 25 bp, Artificial
  probe
  misc_feature (1)..(25): SEQ ID NO: 3874; WAN024FIN; Start 615; Stop 639
ggctaaggaattgacaacagaattg

SEQ ID NO: 365922 - DNA, 25 bp, Artificial
  probe
  misc_feature (1)..(25): SEQ ID NO: 3874; WAN024FIN; Start 1256; Stop 1280
tgtatatcttgagtctgacagtcca

SEQ ID NO: 365923 - DNA, 25 bp, Artificial
  probe
  misc_feature (1)..(25): SEQ ID NO: 3874; WAN024FIN; Start 1255; Stop 1279
atgtatatcttgagtctgacagtcc

SEQ ID NO: 365924 - DNA, 25 bp, Artificial
  probe
  misc_feature (1)..(25): SEQ ID NO: 3874; WAN024FIN; Start 929; Stop 953
atgtctacaactacgatattccaca

SEQ ID NO: 365925 - DNA, 25 bp, Artificial
  probe
  misc_feature (1)..(25): SEQ ID NO: 3874; WAN024FIN; Start 1252; Stop 1276
gcaatgtatatcttgagtctgacag

SEQ ID NO: 365926 - DNA, 25 bp, Artificial
  probe
  misc_feature (1)..(25): SEQ ID NO: 3874; WAN024FIN; Start 1248; Stop 1272
attggcaatgtatatcttgagtctg

SEQ ID NO: 365927 - DNA, 25 bp, Artificial
  probe
  misc_feature (1)..(25): SEQ ID NO: 3874; WAN024FIN; Start 928; Stop 952
catgtctacaactacgatattccac

SEQ ID NO: 365928 - DNA, 25 bp, Artificial
  probe
  misc_feature (1)..(25): SEQ ID NO: 3874; WAN024FIN; Start 997; Stop 1021
gctggtaagtcaggtcaatctatta

SEQ ID NO: 365929 - DNA, 25 bp, Artificial
  probe
  misc_feature (1)..(25): SEQ ID NO: 3874; WAN024FIN; Start 945; Stop 969
tattccacaagatcctgagagttat

SEQ ID NO: 365930 - DNA, 25 bp, Artificial
  probe
  misc_feature (1)..(25): SEQ ID NO: 3874; WAN024FIN; Start 944; Stop 968
atattccacaagatcctgagagtta

SEQ ID NO: 365931 - DNA, 25 bp, Artificial
  probe
  misc_feature (1)..(25): SEQ ID NO: 3874; WAN024FIN; Start 618; Stop 642
taaggaattgacaacagaattggtt

SEQ ID NO: 365932 - DNA, 25 bp, Artificial
  probe
  misc_feature (1)..(25): SEQ ID NO: 3874; WAN024FIN; Start 957; Stop 981
tcctgagagttatgttcaccgtatc

SEQ ID NO: 365933 - DNA, 25 bp, Artificial
  probe
  misc_feature (1)..(25): SEQ ID NO: 3874; WAN024FIN; Start 952; Stop 976
caagatcctgagagttatgttcacc

SEQ ID NO: 365934 - DNA, 25 bp, Artificial
  probe
  misc_feature (1)..(25): SEQ ID NO: 3875; WAN024B5R; Start 54; Stop 78
ggttgagattgtagaagatagtcgt

SEQ ID NO: 365935 - DNA, 25 bp, Artificial
  probe
  misc_feature (1)..(25): SEQ ID NO: 3875; WAN024B5R; Start 53; Stop 77
aggttgagattgtagaagatagtcg

SEQ ID NO: 365936 - DNA, 25 bp, Artificial
  probe
  misc_feature (1)..(25): SEQ ID NO: 3875; WAN024B5R; Start 47; Stop 71
aagttgaggttgagattgtagaaga

SEQ ID NO: 365937 - DNA, 25 bp, Artificial
  probe
  misc_feature (1)..(25): SEQ ID NO: 3875; WAN024B5R; Start 48; Stop 72
agttgaggttgagattgtagaagat

SEQ ID NO: 365938 - DNA, 25 bp, Artificial
  probe
  misc_feature (1)..(25): SEQ ID NO: 3875; WAN024B5R; Start 57; Stop 81
tgagattgtagaagatagtcgttcc

SEQ ID NO: 365939 - DNA, 25 bp, Artificial
  probe
  misc_feature (1)..(25): SEQ ID NO: 3875; WAN024B5R; Start 450; Stop 474
cacgatgatacttaacttccttctc

SEQ ID NO: 365940 - DNA, 25 bp, Artificial
  probe
  misc_feature (1)..(25): SEQ ID NO: 3875; WAN024B5R; Start 58; Stop 82
gagattgtagaagatagtcgttcct

SEQ ID NO: 365941 - DNA, 25 bp, Artificial
  probe
  misc_feature (1)..(25): SEQ ID NO: 3875; WAN024B5R; Start 13; Stop 37
aatatctactgtatcaccaagagcc

SEQ ID NO: 365942 - DNA, 25 bp, Artificial
  probe
  misc_feature (1)..(25): SEQ ID NO: 3875; WAN024B5R; Start 51; Stop 75
tgaggttgagattgtagaagatagt

SEQ ID NO: 365943 - DNA, 25 bp, Artificial
  probe
  misc_feature (1)..(25): SEQ ID NO: 3875; WAN024B5R; Start 59; Stop 83
agattgtagaagatagtcgttcctt

SEQ ID NO: 365944 - DNA, 25 bp, Artificial
  probe
  misc_feature (1)..(25): SEQ ID NO: 3875; WAN024B5R; Start 55; Stop 79
gttgagattgtagaagatagtcgtt

SEQ ID NO: 365945 - DNA, 25 bp, Artificial
  probe
  misc_feature (1)..(25): SEQ ID NO: 3875; WAN024B5R; Start 451; Stop 475
acgatgatacttaacttccttctca

SEQ ID NO: 365946 - DNA, 25 bp, Artificial
  probe
  misc_feature (1)..(25): SEQ ID NO: 3875; WAN024B5R; Start 449; Stop 473
tcacgatgatacttaacttccttct

SEQ ID NO: 365947 - DNA, 25 bp, Artificial
  probe
  misc_feature (1)..(25): SEQ ID NO: 3875; WAN024B5R; Start 446; Stop 470
gcttcacgatgatacttaacttcct

SEQ ID NO: 365948 - DNA, 25 bp, Artificial
  probe
  misc_feature (1)..(25): SEQ ID NO: 3875; WAN024B5R; Start 52; Stop 76
gaggttgagattgtagaagatagtc

SEQ ID NO: 365949 - DNA, 25 bp, Artificial
  probe
  misc_feature (1)..(25): SEQ ID NO: 3875; WAN024B5R; Start 12; Stop 36
gaatatctactgtatcaccaagagc

SEQ ID NO: 365950 - DNA, 25 bp, Artificial
  probe
  misc_feature (1)..(25): SEQ ID NO: 3875; WAN024B5R; Start 14; Stop 38
atatctactgtatcaccaagagccg

SEQ ID NO: 365951 - DNA, 25 bp, Artificial
  probe
  misc_feature (1)..(25): SEQ ID NO: 3875; WAN024B5R; Start 49; Stop 73
gttgaggttgagattgtagaagata

SEQ ID NO: 365952 - DNA, 25 bp, Artificial
  probe
  misc_feature (1)..(25): SEQ ID NO: 3875; WAN024B5R; Start 452; Stop 476
cgatgatacttaacttccttctcag

SEQ ID NO: 365953 - DNA, 25 bp, Artificial
  probe
  misc_feature (1)..(25): SEQ ID NO: 3875; WAN024B5R; Start 448; Stop 472
ttcacgatgatacttaacttccttc

SEQ ID NO: 365954 - DNA, 25 bp, Artificial
  probe
  misc_feature (1)..(25): SEQ ID NO: 3875; WAN024B5R; Start 447; Stop 471
cttcacgatgatacttaacttcctt

SEQ ID NO: 365955 - DNA, 25 bp, Artificial
  probe
  misc_feature (1)..(25): SEQ ID NO: 3875; WAN024B5R; Start 56; Stop 80
ttgagattgtagaagatagtcgttc

SEQ ID NO: 365956 - DNA, 25 bp, Artificial
  probe
  misc_feature (1)..(25): SEQ ID NO: 3875; WAN024B5R; Start 504; Stop 528
aattgacacgatactggagatcatc

SEQ ID NO: 365957 - DNA, 25 bp, Artificial
  probe
  misc_feature (1)..(25): SEQ ID NO: 3875; WAN024B5R; Start 50; Stop 74
ttgaggttgagattgtagaagatag

SEQ ID NO: 365958 - DNA, 25 bp, Artificial
  probe
  misc_feature (1)..(25): SEQ ID NO: 3875; WAN024B5R; Start 11; Stop 35
ggaatatctactgtatcaccaagag

SEQ ID NO: 365959 - DNA, 25 bp, Artificial
  probe
  misc_feature (1)..(25): SEQ ID NO: 3875; WAN024B5R; Start 505; Stop 529
attgacacgatactggagatcatct

SEQ ID NO: 365960 - DNA, 25 bp, Artificial
  probe
  misc_feature (1)..(25): SEQ ID NO: 3875; WAN024B5R; Start 117; Stop 141
ctactacatacaagtcaccataagg

SEQ ID NO: 365961 - DNA, 25 bp, Artificial
  probe
  misc_feature (1)..(25): SEQ ID NO: 3875; WAN024B5R; Start 119; Stop 143
actacatacaagtcaccataaggtc

SEQ ID NO: 365962 - DNA, 25 bp, Artificial
  probe
  misc_feature (1)..(25): SEQ ID NO: 3875; WAN024B5R; Start 120; Stop 144
ctacatacaagtcaccataaggtcc

SEQ ID NO: 365963 - DNA, 25 bp, Artificial
  probe
  misc_feature (1)..(25): SEQ ID NO: 3875; WAN024B5R; Start 453; Stop 477
gatgatacttaacttccttctcagt

SEQ ID NO: 365964 - DNA, 25 bp, Artificial
  probe
  misc_feature (1)..(25): SEQ ID NO: 3875; WAN024B5R; Start 121; Stop 145
tacatacaagtcaccataaggtcca

SEQ ID NO: 365965 - DNA, 25 bp, Artificial
  probe
  misc_feature (1)..(25): SEQ ID NO: 3875; WAN024B5R; Start 444; Stop 468
cagcttcacgatgatacttaacttc

SEQ ID NO: 365966 - DNA, 25 bp, Artificial
  probe
  misc_feature (1)..(25): SEQ ID NO: 3875; WAN024B5R; Start 116; Stop 140
actactacatacaagtcaccataag

SEQ ID NO: 365967 - DNA, 25 bp, Artificial
  probe
  misc_feature (1)..(25): SEQ ID NO: 3876; WAN024DVX; Start 320; Stop 344
gcgttcttcatcagtaatcacatag

SEQ ID NO: 365968 - DNA, 25 bp, Artificial
  probe
  misc_feature (1)..(25): SEQ ID NO: 3876; WAN024DVX; Start 319; Stop 343
tgcgttcttcatcagtaatcacata

SEQ ID NO: 365969 - DNA, 25 bp, Artificial
  probe
  misc_feature (1)..(25): SEQ ID NO: 3876; WAN024DVX; Start 287; Stop 311
gctattcttgtcaaccattaccatc

SEQ ID NO: 365970 - DNA, 25 bp, Artificial
  probe
  misc_feature (1)..(25): SEQ ID NO: 3876; WAN024DVX; Start 295; Stop 319
tgtcaaccattaccatcttaacctt

SEQ ID NO: 365971 - DNA, 25 bp, Artificial
  probe
  misc_feature (1)..(25): SEQ ID NO: 3876; WAN024DVX; Start 294; Stop 318
ttgtcaaccattaccatcttaacct

SEQ ID NO: 365972 - DNA, 25 bp, Artificial
  probe
  misc_feature (1)..(25): SEQ ID NO: 3876; WAN024DVX; Start 293; Stop 317
cttgtcaaccattaccatcttaacc

SEQ ID NO: 365973 - DNA, 25 bp, Artificial
  probe
  misc_feature (1)..(25): SEQ ID NO: 3876; WAN024DVX; Start 318; Stop 342
ttgcgttcttcatcagtaatcacat

SEQ ID NO: 365974 - DNA, 25 bp, Artificial
  probe
  misc_feature (1)..(25): SEQ ID NO: 3876; WAN024DVX; Start 292; Stop 316
tcttgtcaaccattaccatcttaac

SEQ ID NO: 365975 - DNA, 25 bp, Artificial
  probe
  misc_feature (1)..(25): SEQ ID NO: 3876; WAN024DVX; Start 3; Stop 27
gaacataaccaagaccagcattatt

SEQ ID NO: 365976 - DNA, 25 bp, Artificial
  probe
  misc_feature (1)..(25): SEQ ID NO: 3876; WAN024DVX; Start 313; Stop 337
taaccttgcgttcttcatcagtaat

SEQ ID NO: 365977 - DNA, 25 bp, Artificial
  probe
  misc_feature (1)..(25): SEQ ID NO: 3876; WAN024DVX; Start 2; Stop 26
tgaacataaccaagaccagcattat

SEQ ID NO: 365978 - DNA, 25 bp, Artificial
  probe
  misc_feature (1)..(25): SEQ ID NO: 3876; WAN024DVX; Start 286; Stop 310
ggctattcttgtcaaccattaccat

SEQ ID NO: 365979 - DNA, 25 bp, Artificial
  probe
  misc_feature (1)..(25): SEQ ID NO: 3876; WAN024DVX; Start 321; Stop 345
cgttcttcatcagtaatcacatagt

SEQ ID NO: 365980 - DNA, 25 bp, Artificial
  probe
  misc_feature (1)..(25): SEQ ID NO: 3876; WAN024DVX; Start 1; Stop 25
gtgaacataaccaagaccagcatta

SEQ ID NO: 365981 - DNA, 25 bp, Artificial
  probe
  misc_feature (1)..(25): SEQ ID NO: 3876; WAN024DVX; Start 296; Stop 320
gtcaaccattaccatcttaaccttg

SEQ ID NO: 365982 - DNA, 25 bp, Artificial
  probe
  misc_feature (1)..(25): SEQ ID NO: 3876; WAN024DVX; Start 312; Stop 336
ttaaccttgcgttcttcatcagtaa

SEQ ID NO: 365983 - DNA, 25 bp, Artificial
  probe
  misc_feature (1)..(25): SEQ ID NO: 3876; WAN024DVX; Start 303; Stop 327
attaccatcttaaccttgcgttctt

SEQ ID NO: 365984 - DNA, 25 bp, Artificial
  probe
  misc_feature (1)..(25): SEQ ID NO: 3876; WAN024DVX; Start 284; Stop 308
aaggctattcttgtcaaccattacc

SEQ ID NO: 365985 - DNA, 25 bp, Artificial
  probe
  misc_feature (1)..(25): SEQ ID NO: 3876; WAN024DVX; Start 288; Stop 312
ctattcttgtcaaccattaccatct

SEQ ID NO: 365986 - DNA, 25 bp, Artificial
  probe
  misc_feature (1)..(25): SEQ ID NO: 3876; WAN024DVX; Start 311; Stop 335
cttaaccttgcgttcttcatcagta

SEQ ID NO: 365987 - DNA, 25 bp, Artificial
  probe
  misc_feature (1)..(25): SEQ ID NO: 3876; WAN024DVX; Start 317; Stop 341
cttgcgttcttcatcagtaatcaca

SEQ ID NO: 365988 - DNA, 25 bp, Artificial
  probe
  misc_feature (1)..(25): SEQ ID NO: 3876; WAN024DVX; Start 291; Stop 315
ttcttgtcaaccattaccatcttaa

SEQ ID NO: 365989 - DNA, 25 bp, Artificial
  probe
  misc_feature (1)..(25): SEQ ID NO: 3876; WAN024DVX; Start 304; Stop 328
ttaccatcttaaccttgcgttcttc

SEQ ID NO: 365990 - DNA, 25 bp, Artificial
  probe
  misc_feature (1)..(25): SEQ ID NO: 3876; WAN024DVX; Start 302; Stop 326
cattaccatcttaaccttgcgttct

SEQ ID NO: 365991 - DNA, 25 bp, Artificial
  probe
  misc_feature (1)..(25): SEQ ID NO: 3876; WAN024DVX; Start 363; Stop 387
gaagttcctgccgttgtattgatag

SEQ ID NO: 365992 - DNA, 25 bp, Artificial
  probe
  misc_feature (1)..(25): SEQ ID NO: 3876; WAN024DVX; Start 309; Stop 333
atcttaaccttgcgttcttcatcag

SEQ ID NO: 365993 - DNA, 25 bp, Artificial
  probe
  misc_feature (1)..(25): SEQ ID NO: 3876; WAN024DVX; Start 297; Stop 321
tcaaccattaccatcttaaccttgc

SEQ ID NO: 365994 - DNA, 25 bp, Artificial
  probe
  misc_feature (1)..(25): SEQ ID NO: 3876; WAN024DVX; Start 4; Stop 28
aacataaccaagaccagcattatta

SEQ ID NO: 365995 - DNA, 25 bp, Artificial
  probe
  misc_feature (1)..(25): SEQ ID NO: 3876; WAN024DVX; Start 290; Stop 314
attcttgtcaaccattaccatctta

SEQ ID NO: 365996 - DNA, 25 bp, Artificial
  probe
  misc_feature (1)..(25): SEQ ID NO: 3876; WAN024DVX; Start 289; Stop 313
tattcttgtcaaccattaccatctt

SEQ ID NO: 365997 - DNA, 25 bp, Artificial
  probe
  misc_feature (1)..(25): SEQ ID NO: 3876; WAN024DVX; Start 5; Stop 29
acataaccaagaccagcattattaa

SEQ ID NO: 365998 - DNA, 25 bp, Artificial
  probe
  misc_feature (1)..(25): SEQ ID NO: 3876; WAN024DVX; Start 314; Stop 338
aaccttgcgttcttcatcagtaatc

SEQ ID NO: 365999 - DNA, 25 bp, Artificial
  probe
  misc_feature (1)..(25): SEQ ID NO: 3876; WAN024DVX; Start 308; Stop 332
catcttaaccttgcgttcttcatca

SEQ ID NO: 366000 - DNA, 25 bp, Artificial
  probe
  misc_feature (1)..(25): SEQ ID NO: 3877; WAN024CG8; Start 123; Stop 147
gaatcaaagccacatcttccttagg

SEQ ID NO: 366001 - DNA, 25 bp, Artificial
  probe
  misc_feature (1)..(25): SEQ ID NO: 3877; WAN024CG8; Start 193; Stop 217
ctcaagccaagcacggtatttattt

SEQ ID NO: 366002 - DNA, 25 bp, Artificial
  probe
  misc_feature (1)..(25): SEQ ID NO: 3877; WAN024CG8; Start 122; Stop 146
cgaatcaaagccacatcttccttag

SEQ ID NO: 366003 - DNA, 25 bp, Artificial
  probe
  misc_feature (1)..(25): SEQ ID NO: 3877; WAN024CG8; Start 216; Stop 240
tttcttcactccaaatattcgccat

SEQ ID NO: 366004 - DNA, 25 bp, Artificial
  probe
  misc_feature (1)..(25): SEQ ID NO: 3877; WAN024CG8; Start 217; Stop 241
ttcttcactccaaatattcgccatc

SEQ ID NO: 366005 - DNA, 25 bp, Artificial
  probe
  misc_feature (1)..(25): SEQ ID NO: 3877; WAN024CG8; Start 219; Stop 243
cttcactccaaatattcgccatctc

SEQ ID NO: 366006 - DNA, 25 bp, Artificial
  probe
  misc_feature (1)..(25): SEQ ID NO: 3877; WAN024CG8; Start 218; Stop 242
tcttcactccaaatattcgccatct

SEQ ID NO: 366007 - DNA, 25 bp, Artificial
  probe
  misc_feature (1)..(25): SEQ ID NO: 3877; WAN024CG8; Start 124; Stop 148
aatcaaagccacatcttccttaggg

SEQ ID NO: 366008 - DNA, 25 bp, Artificial
  probe
  misc_feature (1)..(25): SEQ ID NO: 3877; WAN024CG8; Start 220; Stop 244
ttcactccaaatattcgccatctca

SEQ ID NO: 366009 - DNA, 25 bp, Artificial
  probe
  misc_feature (1)..(25): SEQ ID NO: 3877; WAN024CG8; Start 128; Stop 152
aaagccacatcttccttagggattt

SEQ ID NO: 366010 - DNA, 25 bp, Artificial
  probe
  misc_feature (1)..(25): SEQ ID NO: 3877; WAN024CG8; Start 202; Stop 226
agcacggtatttattttcttcactc

SEQ ID NO: 366011 - DNA, 25 bp, Artificial
  probe
  misc_feature (1)..(25): SEQ ID NO: 3877; WAN024CG8; Start 203; Stop 227
gcacggtatttattttcttcactcc

SEQ ID NO: 366012 - DNA, 25 bp, Artificial
  probe
  misc_feature (1)..(25): SEQ ID NO: 3877; WAN024CG8; Start 204; Stop 228
cacggtatttattttcttcactcca

SEQ ID NO: 366013 - DNA, 25 bp, Artificial
  probe
  misc_feature (1)..(25): SEQ ID NO: 3877; WAN024CG8; Start 281; Stop 305
ctttcttcttaagctgttgggaata

SEQ ID NO: 366014 - DNA, 25 bp, Artificial
  probe
  misc_feature (1)..(25): SEQ ID NO: 3877; WAN024CG8; Start 199; Stop 223
ccaagcacggtatttattttcttca

SEQ ID NO: 366015 - DNA, 25 bp, Artificial
  probe
  misc_feature (1)..(25): SEQ ID NO: 3877; WAN024CG8; Start 221; Stop 245
tcactccaaatattcgccatctcag

SEQ ID NO: 366016 - DNA, 25 bp, Artificial
  probe
  misc_feature (1)..(25): SEQ ID NO: 3877; WAN024CG8; Start 129; Stop 153
aagccacatcttccttagggatttc

SEQ ID NO: 366017 - DNA, 25 bp, Artificial
  probe
  misc_feature (1)..(25): SEQ ID NO: 3877; WAN024CG8; Start 280; Stop 304
cctttcttcttaagctgttgggaat

SEQ ID NO: 366018 - DNA, 25 bp, Artificial
  probe
  misc_feature (1)..(25): SEQ ID NO: 3877; WAN024CG8; Start 250; Stop 274
agagtaacggttgatcatgtgttaa

SEQ ID NO: 366019 - DNA, 25 bp, Artificial
  probe
  misc_feature (1)..(25): SEQ ID NO: 3877; WAN024CG8; Start 200; Stop 224
caagcacggtatttattttcttcac

SEQ ID NO: 366020 - DNA, 25 bp, Artificial
  probe
  misc_feature (1)..(25): SEQ ID NO: 3877; WAN024CG8; Start 201; Stop 225
aagcacggtatttattttcttcact

SEQ ID NO: 366021 - DNA, 25 bp, Artificial
  probe
  misc_feature (1)..(25): SEQ ID NO: 3877; WAN024CG8; Start 251; Stop 275
gagtaacggttgatcatgtgttaat

SEQ ID NO: 366022 - DNA, 25 bp, Artificial
  probe
  misc_feature (1)..(25): SEQ ID NO: 3877; WAN024CG8; Start 249; Stop 273
gagagtaacggttgatcatgtgtta

SEQ ID NO: 366023 - DNA, 25 bp, Artificial
  probe
  misc_feature (1)..(25): SEQ ID NO: 3877; WAN024CG8; Start 205; Stop 229
acggtatttattttcttcactccaa

SEQ ID NO: 366024 - DNA, 25 bp, Artificial
  probe
  misc_feature (1)..(25): SEQ ID NO: 3877; WAN024CG8; Start 282; Stop 306
tttcttcttaagctgttgggaataa

SEQ ID NO: 366025 - DNA, 25 bp, Artificial
  probe
  misc_feature (1)..(25): SEQ ID NO: 3877; WAN024CG8; Start 277; Stop 301
tttcctttcttcttaagctgttggg

SEQ ID NO: 366026 - DNA, 25 bp, Artificial
  probe
  misc_feature (1)..(25): SEQ ID NO: 3877; WAN024CG8; Start 192; Stop 216
cctcaagccaagcacggtatttatt

SEQ ID NO: 366027 - DNA, 25 bp, Artificial
  probe
  misc_feature (1)..(25): SEQ ID NO: 3877; WAN024CG8; Start 196; Stop 220
aagccaagcacggtatttattttct

SEQ ID NO: 366028 - DNA, 25 bp, Artificial
  probe
  misc_feature (1)..(25): SEQ ID NO: 3877; WAN024CG8; Start 195; Stop 219
caagccaagcacggtatttattttc

SEQ ID NO: 366029 - DNA, 25 bp, Artificial
  probe
  misc_feature (1)..(25): SEQ ID NO: 3877; WAN024CG8; Start 127; Stop 151
caaagccacatcttccttagggatt

SEQ ID NO: 366030 - DNA, 25 bp, Artificial
  probe
  misc_feature (1)..(25): SEQ ID NO: 3877; WAN024CG8; Start 252; Stop 276
agtaacggttgatcatgtgttaatt

SEQ ID NO: 366031 - DNA, 25 bp, Artificial
  probe
  misc_feature (1)..(25): SEQ ID NO: 3877; WAN024CG8; Start 198; Stop 222
gccaagcacggtatttattttcttc

SEQ ID NO: 366032 - DNA, 25 bp, Artificial
  probe
  misc_feature (1)..(25): SEQ ID NO: 3877; WAN024CG8; Start 194; Stop 218
tcaagccaagcacggtatttatttt

SEQ ID NO: 366033 - DNA, 25 bp, Artificial
  probe
  misc_feature (1)..(25): SEQ ID NO: 3879; WAN024AY6; Start 326; Stop 350
agtttatttctgatgatagcgttgc

SEQ ID NO: 366034 - DNA, 25 bp, Artificial
  probe
  misc_feature (1)..(25): SEQ ID NO: 3879; WAN024AY6; Start 327; Stop 351
gtttatttctgatgatagcgttgcg

SEQ ID NO: 366035 - DNA, 25 bp, Artificial
  probe
  misc_feature (1)..(25): SEQ ID NO: 3879; WAN024AY6; Start 325; Stop 349
gagtttatttctgatgatagcgttg

SEQ ID NO: 366036 - DNA, 25 bp, Artificial
  probe
  misc_feature (1)..(25): SEQ ID NO: 3879; WAN024AY6; Start 324; Stop 348
agagtttatttctgatgatagcgtt

SEQ ID NO: 366037 - DNA, 25 bp, Artificial
  probe
  misc_feature (1)..(25): SEQ ID NO: 3879; WAN024AY6; Start 323; Stop 347
aagagtttatttctgatgatagcgt

SEQ ID NO: 366038 - DNA, 25 bp, Artificial
  probe
  misc_feature (1)..(25): SEQ ID NO: 3879; WAN024AY6; Start 322; Stop 346
gaagagtttatttctgatgatagcg

SEQ ID NO: 366039 - DNA, 25 bp, Artificial
  probe
  misc_feature (1)..(25): SEQ ID NO: 3879; WAN024AY6; Start 321; Stop 345
ggaagagtttatttctgatgatagc

SEQ ID NO: 366040 - DNA, 25 bp, Artificial
  probe
  misc_feature (1)..(25): SEQ ID NO: 3879; WAN024AY6; Start 320; Stop 344
gggaagagtttatttctgatgatag

SEQ ID NO: 366041 - DNA, 25 bp, Artificial
  probe
  misc_feature (1)..(25): SEQ ID NO: 3879; WAN024AY6; Start 319; Stop 343
ggggaagagtttatttctgatgata

SEQ ID NO: 366042 - DNA, 25 bp, Artificial
  probe
  misc_feature (1)..(25): SEQ ID NO: 3879; WAN024AY6; Start 401; Stop 425
tacaaaaggcagcgagtaaggagtc

SEQ ID NO: 366043 - DNA, 25 bp, Artificial
  probe
  misc_feature (1)..(25): SEQ ID NO: 3879; WAN024AY6; Start 400; Stop 424
ctacaaaaggcagcgagtaaggagt

SEQ ID NO: 366044 - DNA, 25 bp, Artificial
  probe
  misc_feature (1)..(25): SEQ ID NO: 3879; WAN024AY6; Start 328; Stop 352
tttatttctgatgatagcgttgcgc

SEQ ID NO: 366045 - DNA, 25 bp, Artificial
  probe
  misc_feature (1)..(25): SEQ ID NO: 3880; WAN024AY5; Start 631; Stop 655
attacagatgtcaacaaggcttact

SEQ ID NO: 366046 - DNA, 25 bp, Artificial
  probe
  misc_feature (1)..(25): SEQ ID NO: 3880; WAN024AY5; Start 630; Stop 654
aattacagatgtcaacaaggcttac

SEQ ID NO: 366047 - DNA, 25 bp, Artificial
  probe
  misc_feature (1)..(25): SEQ ID NO: 3880; WAN024AY5; Start 632; Stop 656
ttacagatgtcaacaaggcttactt

SEQ ID NO: 366048 - DNA, 25 bp, Artificial
  probe
  misc_feature (1)..(25): SEQ ID NO: 3880; WAN024AY5; Start 628; Stop 652
gaaattacagatgtcaacaaggctt

SEQ ID NO: 366049 - DNA, 25 bp, Artificial
  probe
  misc_feature (1)..(25): SEQ ID NO: 3880; WAN024AY5; Start 629; Stop 653
aaattacagatgtcaacaaggctta

SEQ ID NO: 366050 - DNA, 25 bp, Artificial
  probe
  misc_feature (1)..(25): SEQ ID NO: 3880; WAN024AY5; Start 625; Stop 649
ttggaaattacagatgtcaacaagg

SEQ ID NO: 366051 - DNA, 25 bp, Artificial
  probe
  misc_feature (1)..(25): SEQ ID NO: 3880; WAN024AY5; Start 627; Stop 651
ggaaattacagatgtcaacaaggct

SEQ ID NO: 366052 - DNA, 25 bp, Artificial
  probe
  misc_feature (1)..(25): SEQ ID NO: 3880; WAN024AY5; Start 626; Stop 650
tggaaattacagatgtcaacaaggc

SEQ ID NO: 366053 - DNA, 25 bp, Artificial
  probe
  misc_feature (1)..(25): SEQ ID NO: 3880; WAN024AY5; Start 619; Stop 643
ggtgaattggaaattacagatgtca

SEQ ID NO: 366054 - DNA, 25 bp, Artificial
  probe
  misc_feature (1)..(25): SEQ ID NO: 3880; WAN024AY5; Start 618; Stop 642
tggtgaattggaaattacagatgtc

SEQ ID NO: 366055 - DNA, 25 bp, Artificial
  probe
  misc_feature (1)..(25): SEQ ID NO: 3880; WAN024AY5; Start 624; Stop 648
attggaaattacagatgtcaacaag

SEQ ID NO: 366056 - DNA, 25 bp, Artificial
  probe
  misc_feature (1)..(25): SEQ ID NO: 3880; WAN024AY5; Start 650; Stop 674
cttacttggatcgtggtgatttgtc

SEQ ID NO: 366057 - DNA, 25 bp, Artificial
  probe
  misc_feature (1)..(25): SEQ ID NO: 3880; WAN024AY5; Start 622; Stop 646
gaattggaaattacagatgtcaaca

SEQ ID NO: 366058 - DNA, 25 bp, Artificial
  probe
  misc_feature (1)..(25): SEQ ID NO: 3880; WAN024AY5; Start 621; Stop 645
tgaattggaaattacagatgtcaac

SEQ ID NO: 366059 - DNA, 25 bp, Artificial
  probe
  misc_feature (1)..(25): SEQ ID NO: 3880; WAN024AY5; Start 620; Stop 644
gtgaattggaaattacagatgtcaa

SEQ ID NO: 366060 - DNA, 25 bp, Artificial
  probe
  misc_feature (1)..(25): SEQ ID NO: 3880; WAN024AY5; Start 722; Stop 746
atgaaagtttactagaggcttcgca

SEQ ID NO: 366061 - DNA, 25 bp, Artificial
  probe
  misc_feature (1)..(25): SEQ ID NO: 3880; WAN024AY5; Start 651; Stop 675
ttacttggatcgtggtgatttgtct

SEQ ID NO: 366062 - DNA, 25 bp, Artificial
  probe
  misc_feature (1)..(25): SEQ ID NO: 3880; WAN024AY5; Start 721; Stop 745
catgaaagtttactagaggcttcgc

SEQ ID NO: 366063 - DNA, 25 bp, Artificial
  probe
  misc_feature (1)..(25): SEQ ID NO: 3880; WAN024AY5; Start 623; Stop 647
aattggaaattacagatgtcaacaa

SEQ ID NO: 366064 - DNA, 25 bp, Artificial
  probe
  misc_feature (1)..(25): SEQ ID NO: 3880; WAN024AY5; Start 725; Stop 749
aaagtttactagaggcttcgcagta

SEQ ID NO: 366065 - DNA, 25 bp, Artificial
  probe
  misc_feature (1)..(25): SEQ ID NO: 3880; WAN024AY5; Start 633; Stop 657
tacagatgtcaacaaggcttacttg

SEQ ID NO: 366066 - DNA, 25 bp, Artificial
  probe
  misc_feature (1)..(25): SEQ ID NO: 3880; WAN024AY5; Start 723; Stop 747
tgaaagtttactagaggcttcgcag

SEQ ID NO: 366067 - DNA, 25 bp, Artificial
  probe
  misc_feature (1)..(25): SEQ ID NO: 3880; WAN024AY5; Start 652; Stop 676
tacttggatcgtggtgatttgtctg

SEQ ID NO: 366068 - DNA, 25 bp, Artificial
  probe
  misc_feature (1)..(25): SEQ ID NO: 3880; WAN024AY5; Start 724; Stop 748
gaaagtttactagaggcttcgcagt

SEQ ID NO: 366069 - DNA, 25 bp, Artificial
  probe
  misc_feature (1)..(25): SEQ ID NO: 3880; WAN024AY5; Start 585; Stop 609
agagattgccaaaagtattaaacca

SEQ ID NO: 366070 - DNA, 25 bp, Artificial
  probe
  misc_feature (1)..(25): SEQ ID NO: 3880; WAN024AY5; Start 729; Stop 753
tttactagaggcttcgcagtacatc

SEQ ID NO: 366071 - DNA, 25 bp, Artificial
  probe
  misc_feature (1)..(25): SEQ ID NO: 3880; WAN024AY5; Start 646; Stop 670
aaggcttacttggatcgtggtgatt

SEQ ID NO: 366072 - DNA, 25 bp, Artificial
  probe
  misc_feature (1)..(25): SEQ ID NO: 3880; WAN024AY5; Start 726; Stop 750
aagtttactagaggcttcgcagtac

SEQ ID NO: 366073 - DNA, 25 bp, Artificial
  probe
  misc_feature (1)..(25): SEQ ID NO: 3880; WAN024AY5; Start 728; Stop 752
gtttactagaggcttcgcagtacat

SEQ ID NO: 366074 - DNA, 25 bp, Artificial
  probe
  misc_feature (1)..(25): SEQ ID NO: 3880; WAN024AY5; Start 654; Stop 678
cttggatcgtggtgatttgtctgtt

SEQ ID NO: 366075 - DNA, 25 bp, Artificial
  probe
  misc_feature (1)..(25): SEQ ID NO: 3880; WAN024AY5; Start 649; Stop 673
gcttacttggatcgtggtgatttgt

SEQ ID NO: 366076 - DNA, 25 bp, Artificial
  probe
  misc_feature (1)..(25): SEQ ID NO: 3880; WAN024AY5; Start 579; Stop 603
tgtagtagagattgccaaaagtatt

SEQ ID NO: 366077 - DNA, 25 bp, Artificial
  probe
  misc_feature (1)..(25): SEQ ID NO: 3880; WAN024AY5; Start 730; Stop 754
ttactagaggcttcgcagtacatcg

SEQ ID NO: 366078 - DNA, 25 bp, Artificial
  probe
  misc_feature (1)..(25): SEQ ID NO: 3881; WAN024CNS; Start 35; Stop 59
gatggcattcttccgtgagtctatg

SEQ ID NO: 366079 - DNA, 25 bp, Artificial
  probe
  misc_feature (1)..(25): SEQ ID NO: 3881; WAN024CNS; Start 34; Stop 58
agatggcattcttccgtgagtctat

SEQ ID NO: 366080 - DNA, 25 bp, Artificial
  probe
  misc_feature (1)..(25): SEQ ID NO: 3881; WAN024CNS; Start 22; Stop 46
aacaagctactgagatggcattctt

SEQ ID NO: 366081 - DNA, 25 bp, Artificial
  probe
  misc_feature (1)..(25): SEQ ID NO: 3881; WAN024CNS; Start 23; Stop 47
acaagctactgagatggcattcttc

SEQ ID NO: 366082 - DNA, 25 bp, Artificial
  probe
  misc_feature (1)..(25): SEQ ID NO: 3881; WAN024CNS; Start 33; Stop 57
gagatggcattcttccgtgagtcta

SEQ ID NO: 366083 - DNA, 25 bp, Artificial
  probe
  misc_feature (1)..(25): SEQ ID NO: 3881; WAN024CNS; Start 29; Stop 53
tactgagatggcattcttccgtgag

SEQ ID NO: 366084 - DNA, 25 bp, Artificial
  probe
  misc_feature (1)..(25): SEQ ID NO: 3881; WAN024CNS; Start 28; Stop 52
ctactgagatggcattcttccgtga

SEQ ID NO: 366085 - DNA, 25 bp, Artificial
  probe
  misc_feature (1)..(25): SEQ ID NO: 3881; WAN024CNS; Start 24; Stop 48
caagctactgagatggcattcttcc

SEQ ID NO: 366086 - DNA, 25 bp, Artificial
  probe
  misc_feature (1)..(25): SEQ ID NO: 3881; WAN024CNS; Start 20; Stop 44
caaacaagctactgagatggcattc

SEQ ID NO: 366087 - DNA, 25 bp, Artificial
  probe
  misc_feature (1)..(25): SEQ ID NO: 3881; WAN024CNS; Start 21; Stop 45
aaacaagctactgagatggcattct

SEQ ID NO: 366088 - DNA, 25 bp, Artificial
  probe
  misc_feature (1)..(25): SEQ ID NO: 3881; WAN024CNS; Start 25; Stop 49
aagctactgagatggcattcttccg

SEQ ID NO: 366089 - DNA, 25 bp, Artificial
  probe
  misc_feature (1)..(25): SEQ ID NO: 3881; WAN024CNS; Start 19; Stop 43
gcaaacaagctactgagatggcatt

SEQ ID NO: 366090 - DNA, 25 bp, Artificial
  probe
  misc_feature (1)..(25): SEQ ID NO: 3881; WAN024CNS; Start 14; Stop 38
atttagcaaacaagctactgagatg

SEQ ID NO: 366091 - DNA, 25 bp, Artificial
  probe
  misc_feature (1)..(25): SEQ ID NO: 3881; WAN024CNS; Start 13; Stop 37
gatttagcaaacaagctactgagat

SEQ ID NO: 366092 - DNA, 25 bp, Artificial
  probe
  misc_feature (1)..(25): SEQ ID NO: 3881; WAN024CNS; Start 12; Stop 36
ggatttagcaaacaagctactgaga

SEQ ID NO: 366093 - DNA, 25 bp, Artificial
  probe
  misc_feature (1)..(25): SEQ ID NO: 3881; WAN024CNS; Start 15; Stop 39
tttagcaaacaagctactgagatgg

SEQ ID NO: 366094 - DNA, 25 bp, Artificial
  probe
  misc_feature (1)..(25): SEQ ID NO: 3881; WAN024CNS; Start 11; Stop 35
tggatttagcaaacaagctactgag

SEQ ID NO: 366095 - DNA, 25 bp, Artificial
  probe
  misc_feature (1)..(25): SEQ ID NO: 3881; WAN024CNS; Start 10; Stop 34
ctggatttagcaaacaagctactga

SEQ ID NO: 366096 - DNA, 25 bp, Artificial
  probe
  misc_feature (1)..(25): SEQ ID NO: 3881; WAN024CNS; Start 41; Stop 65
attcttccgtgagtctatgcgactt

SEQ ID NO: 366097 - DNA, 25 bp, Artificial
  probe
  misc_feature (1)..(25): SEQ ID NO: 3881; WAN024CNS; Start 9; Stop 33
gctggatttagcaaacaagctactg

SEQ ID NO: 366098 - DNA, 25 bp, Artificial
  probe
  misc_feature (1)..(25): SEQ ID NO: 3881; WAN024CNS; Start 40; Stop 64
cattcttccgtgagtctatgcgact

SEQ ID NO: 366099 - DNA, 25 bp, Artificial
  probe
  misc_feature (1)..(25): SEQ ID NO: 3881; WAN024CNS; Start 42; Stop 66
ttcttccgtgagtctatgcgacttg

SEQ ID NO: 366100 - DNA, 25 bp, Artificial
  probe
  misc_feature (1)..(25): SEQ ID NO: 3881; WAN024CNS; Start 16; Stop 40
ttagcaaacaagctactgagatggc

SEQ ID NO: 366101 - DNA, 25 bp, Artificial
  probe
  misc_feature (1)..(25): SEQ ID NO: 3881; WAN024CNS; Start 18; Stop 42
agcaaacaagctactgagatggcat

SEQ ID NO: 366102 - DNA, 25 bp, Artificial
  probe
  misc_feature (1)..(25): SEQ ID NO: 3881; WAN024CNS; Start 71; Stop 95
aaaagaccgtcaaaacttgcaaatg

SEQ ID NO: 366103 - DNA, 25 bp, Artificial
  probe
  misc_feature (1)..(25): SEQ ID NO: 3881; WAN024CNS; Start 77; Stop 101
ccgtcaaaacttgcaaatgctattg

SEQ ID NO: 366104 - DNA, 25 bp, Artificial
  probe
  misc_feature (1)..(25): SEQ ID NO: 3881; WAN024CNS; Start 76; Stop 100
accgtcaaaacttgcaaatgctatt

SEQ ID NO: 366105 - DNA, 25 bp, Artificial
  probe
  misc_feature (1)..(25): SEQ ID NO: 3881; WAN024CNS; Start 49; Stop 73
gtgagtctatgcgacttggtgaaaa

SEQ ID NO: 366106 - DNA, 25 bp, Artificial
  probe
  misc_feature (1)..(25): SEQ ID NO: 3881; WAN024CNS; Start 17; Stop 41
tagcaaacaagctactgagatggca

SEQ ID NO: 366107 - DNA, 25 bp, Artificial
  probe
  misc_feature (1)..(25): SEQ ID NO: 3881; WAN024CNS; Start 75; Stop 99
gaccgtcaaaacttgcaaatgctat

SEQ ID NO: 366108 - DNA, 25 bp, Artificial
  probe
  misc_feature (1)..(25): SEQ ID NO: 3881; WAN024CNS; Start 48; Stop 72
cgtgagtctatgcgacttggtgaaa

SEQ ID NO: 366109 - DNA, 25 bp, Artificial
  probe
  misc_feature (1)..(25): SEQ ID NO: 3881; WAN024CNS; Start 36; Stop 60
atggcattcttccgtgagtctatgc

SEQ ID NO: 366110 - DNA, 25 bp, Artificial
  probe
  misc_feature (1)..(25): SEQ ID NO: 3881; WAN024CNS; Start 78; Stop 102
cgtcaaaacttgcaaatgctattga

SEQ ID NO: 366111 - DNA, 25 bp, Artificial
  probe
  misc_feature (1)..(25): SEQ ID NO: 3882; WAN024CBA; Start 1; Stop 25
gtgaactctgtaaattccaaggtaa

SEQ ID NO: 366112 - DNA, 25 bp, Artificial
  probe
  misc_feature (1)..(25): SEQ ID NO: 3882; WAN024CBA; Start 8; Stop 32
ctgtaaattccaaggtaattccgtc

SEQ ID NO: 366113 - DNA, 25 bp, Artificial
  probe
  misc_feature (1)..(25): SEQ ID NO: 3882; WAN024CBA; Start 9; Stop 33
tgtaaattccaaggtaattccgtct

SEQ ID NO: 366114 - DNA, 25 bp, Artificial
  probe
  misc_feature (1)..(25): SEQ ID NO: 3882; WAN024CBA; Start 7; Stop 31
tctgtaaattccaaggtaattccgt

SEQ ID NO: 366115 - DNA, 25 bp, Artificial
  probe
  misc_feature (1)..(25): SEQ ID NO: 3882; WAN024CBA; Start 6; Stop 30
ctctgtaaattccaaggtaattccg

SEQ ID NO: 366116 - DNA, 25 bp, Artificial
  probe
  misc_feature (1)..(25): SEQ ID NO: 3882; WAN024CBA; Start 10; Stop 34
gtaaattccaaggtaattccgtctt

SEQ ID NO: 366117 - DNA, 25 bp, Artificial
  probe
  misc_feature (1)..(25): SEQ ID NO: 3882; WAN024CBA; Start 2; Stop 26
tgaactctgtaaattccaaggtaat

SEQ ID NO: 366118 - DNA, 25 bp, Artificial
  probe
  misc_feature (1)..(25): SEQ ID NO: 3882; WAN024CBA; Start 11; Stop 35
taaattccaaggtaattccgtcttt

SEQ ID NO: 366119 - DNA, 25 bp, Artificial
  probe
  misc_feature (1)..(25): SEQ ID NO: 3882; WAN024CBA; Start 5; Stop 29
actctgtaaattccaaggtaattcc

SEQ ID NO: 366120 - DNA, 25 bp, Artificial
  probe
  misc_feature (1)..(25): SEQ ID NO: 3882; WAN024CBA; Start 4; Stop 28
aactctgtaaattccaaggtaattc

SEQ ID NO: 366121 - DNA, 25 bp, Artificial
  probe
  misc_feature (1)..(25): SEQ ID NO: 3882; WAN024CBA; Start 3; Stop 27
gaactctgtaaattccaaggtaatt

SEQ ID NO: 366122 - DNA, 25 bp, Artificial
  probe
  misc_feature (1)..(25): SEQ ID NO: 3882; WAN024CBA; Start 118; Stop 142
ttgtctgctttcttttctgagtttc

SEQ ID NO: 366123 - DNA, 25 bp, Artificial
  probe
  misc_feature (1)..(25): SEQ ID NO: 3882; WAN024CBA; Start 116; Stop 140
cattgtctgctttcttttctgagtt

SEQ ID NO: 366124 - DNA, 25 bp, Artificial
  probe
  misc_feature (1)..(25): SEQ ID NO: 3882; WAN024CBA; Start 117; Stop 141
attgtctgctttcttttctgagttt

SEQ ID NO: 366125 - DNA, 25 bp, Artificial
  probe
  misc_feature (1)..(25): SEQ ID NO: 3882; WAN024CBA; Start 103; Stop 127
ttgatagttgttgcattgtctgctt

SEQ ID NO: 366126 - DNA, 25 bp, Artificial
  probe
  misc_feature (1)..(25): SEQ ID NO: 3882; WAN024CBA; Start 119; Stop 143
tgtctgctttcttttctgagtttcc

SEQ ID NO: 366127 - DNA, 25 bp, Artificial
  probe
  misc_feature (1)..(25): SEQ ID NO: 3882; WAN024CBA; Start 88; Stop 112
ttaacagttgcgattttgatagttg

SEQ ID NO: 366128 - DNA, 25 bp, Artificial
  probe
  misc_feature (1)..(25): SEQ ID NO: 3882; WAN024CBA; Start 89; Stop 113
taacagttgcgattttgatagttgt

SEQ ID NO: 366129 - DNA, 25 bp, Artificial
  probe
  misc_feature (1)..(25): SEQ ID NO: 3882; WAN024CBA; Start 12; Stop 36
aaattccaaggtaattccgtctttt

SEQ ID NO: 366130 - DNA, 25 bp, Artificial
  probe
  misc_feature (1)..(25): SEQ ID NO: 3882; WAN024CBA; Start 92; Stop 116
cagttgcgattttgatagttgttgc

SEQ ID NO: 366131 - DNA, 25 bp, Artificial
  probe
  misc_feature (1)..(25): SEQ ID NO: 3882; WAN024CBA; Start 91; Stop 115
acagttgcgattttgatagttgttg

SEQ ID NO: 366132 - DNA, 25 bp, Artificial
  probe
  misc_feature (1)..(25): SEQ ID NO: 3882; WAN024CBA; Start 120; Stop 144
gtctgctttcttttctgagtttccg

SEQ ID NO: 366133 - DNA, 25 bp, Artificial
  probe
  misc_feature (1)..(25): SEQ ID NO: 3882; WAN024CBA; Start 98; Stop 122
cgattttgatagttgttgcattgtc

SEQ ID NO: 366134 - DNA, 25 bp, Artificial
  probe
  misc_feature (1)..(25): SEQ ID NO: 3882; WAN024CBA; Start 105; Stop 129
gatagttgttgcattgtctgctttc

SEQ ID NO: 366135 - DNA, 25 bp, Artificial
  probe
  misc_feature (1)..(25): SEQ ID NO: 3882; WAN024CBA; Start 106; Stop 130
atagttgttgcattgtctgctttct

SEQ ID NO: 366136 - DNA, 25 bp, Artificial
  probe
  misc_feature (1)..(25): SEQ ID NO: 3882; WAN024CBA; Start 100; Stop 124
attttgatagttgttgcattgtctg

SEQ ID NO: 366137 - DNA, 25 bp, Artificial
  probe
  misc_feature (1)..(25): SEQ ID NO: 3882; WAN024CBA; Start 107; Stop 131
tagttgttgcattgtctgctttctt

SEQ ID NO: 366138 - DNA, 25 bp, Artificial
  probe
  misc_feature (1)..(25): SEQ ID NO: 3882; WAN024CBA; Start 104; Stop 128
tgatagttgttgcattgtctgcttt

SEQ ID NO: 366139 - DNA, 25 bp, Artificial
  probe
  misc_feature (1)..(25): SEQ ID NO: 3882; WAN024CBA; Start 102; Stop 126
tttgatagttgttgcattgtctgct

SEQ ID NO: 366140 - DNA, 25 bp, Artificial
  probe
  misc_feature (1)..(25): SEQ ID NO: 3882; WAN024CBA; Start 99; Stop 123
gattttgatagttgttgcattgtct

SEQ ID NO: 366141 - DNA, 25 bp, Artificial
  probe
  misc_feature (1)..(25): SEQ ID NO: 3882; WAN024CBA; Start 97; Stop 121
gcgattttgatagttgttgcattgt

SEQ ID NO: 366142 - DNA, 25 bp, Artificial
  probe
  misc_feature (1)..(25): SEQ ID NO: 3882; WAN024CBA; Start 86; Stop 110
ggttaacagttgcgattttgatagt

SEQ ID NO: 366143 - DNA, 25 bp, Artificial
  probe
  misc_feature (1)..(25): SEQ ID NO: 3882; WAN024CBA; Start 125; Stop 149
ctttcttttctgagtttccgcaagc

SEQ ID NO: 366144 - DNA, 25 bp, Artificial
  probe
  misc_feature (1)..(25): SEQ ID NO: 3883; WAN024FTP; Start 977; Stop 1001
agatgttacagagaggcaggatata

SEQ ID NO: 366145 - DNA, 25 bp, Artificial
  probe
  misc_feature (1)..(25): SEQ ID NO: 3883; WAN024FTP; Start 971; Stop 995
aagataagatgttacagagaggcag

SEQ ID NO: 366146 - DNA, 25 bp, Artificial
  probe
  misc_feature (1)..(25): SEQ ID NO: 3883; WAN024FTP; Start 978; Stop 1002
gatgttacagagaggcaggatatag

SEQ ID NO: 366147 - DNA, 25 bp, Artificial
  probe
  misc_feature (1)..(25): SEQ ID NO: 3883; WAN024FTP; Start 975; Stop 999
taagatgttacagagaggcaggata

SEQ ID NO: 366148 - DNA, 25 bp, Artificial
  probe
  misc_feature (1)..(25): SEQ ID NO: 3883; WAN024FTP; Start 976; Stop 1000
aagatgttacagagaggcaggatat

SEQ ID NO: 366149 - DNA, 25 bp, Artificial
  probe
  misc_feature (1)..(25): SEQ ID NO: 3883; WAN024FTP; Start 974; Stop 998
ataagatgttacagagaggcaggat

SEQ ID NO: 366150 - DNA, 25 bp, Artificial
  probe
  misc_feature (1)..(25): SEQ ID NO: 3883; WAN024FTP; Start 972; Stop 996
agataagatgttacagagaggcagg

SEQ ID NO: 366151 - DNA, 25 bp, Artificial
  probe
  misc_feature (1)..(25): SEQ ID NO: 3883; WAN024FTP; Start 973; Stop 997
gataagatgttacagagaggcagga

SEQ ID NO: 366152 - DNA, 25 bp, Artificial
  probe
  misc_feature (1)..(25): SEQ ID NO: 3883; WAN024FTP; Start 3; Stop 27
gaactgtagcataaagagagggaat

SEQ ID NO: 366153 - DNA, 25 bp, Artificial
  probe
  misc_feature (1)..(25): SEQ ID NO: 3883; WAN024FTP; Start 970; Stop 994
aaagataagatgttacagagaggca

SEQ ID NO: 366154 - DNA, 25 bp, Artificial
  probe
  misc_feature (1)..(25): SEQ ID NO: 3883; WAN024FTP; Start 562; Stop 586
atctacgaggatttgtatgttgttg

SEQ ID NO: 366155 - DNA, 25 bp, Artificial
  probe
  misc_feature (1)..(25): SEQ ID NO: 3883; WAN024FTP; Start 4; Stop 28
aactgtagcataaagagagggaatg

SEQ ID NO: 366156 - DNA, 25 bp, Artificial
  probe
  misc_feature (1)..(25): SEQ ID NO: 3883; WAN024FTP; Start 8; Stop 32
gtagcataaagagagggaatggtat

SEQ ID NO: 366157 - DNA, 25 bp, Artificial
  probe
  misc_feature (1)..(25): SEQ ID NO: 3883; WAN024FTP; Start 16; Stop 40
aagagagggaatggtatgatttcag

SEQ ID NO: 366158 - DNA, 25 bp, Artificial
  probe
  misc_feature (1)..(25): SEQ ID NO: 3883; WAN024FTP; Start 2; Stop 26
tgaactgtagcataaagagagggaa

SEQ ID NO: 366159 - DNA, 25 bp, Artificial
  probe
  misc_feature (1)..(25): SEQ ID NO: 3883; WAN024FTP; Start 18; Stop 42
gagagggaatggtatgatttcagtt

SEQ ID NO: 366160 - DNA, 25 bp, Artificial
  probe
  misc_feature (1)..(25): SEQ ID NO: 3883; WAN024FTP; Start 613; Stop 637
gttgctcataccgatttgcctatat

SEQ ID NO: 366161 - DNA, 25 bp, Artificial
  probe
  misc_feature (1)..(25): SEQ ID NO: 3883; WAN024FTP; Start 169; Stop 193
tgtgatgaatatgggaaactgtatg

SEQ ID NO: 366162 - DNA, 25 bp, Artificial
  probe
  misc_feature (1)..(25): SEQ ID NO: 3883; WAN024FTP; Start 15; Stop 39
aaagagagggaatggtatgatttca

SEQ ID NO: 366163 - DNA, 25 bp, Artificial
  probe
  misc_feature (1)..(25): SEQ ID NO: 3883; WAN024FTP; Start 7; Stop 31
tgtagcataaagagagggaatggta

SEQ ID NO: 366164 - DNA, 25 bp, Artificial
  probe
  misc_feature (1)..(25): SEQ ID NO: 3883; WAN024FTP; Start 639; Stop 663
tcattattatcagagacagggaagt

SEQ ID NO: 366165 - DNA, 25 bp, Artificial
  probe
  misc_feature (1)..(25): SEQ ID NO: 3883; WAN024FTP; Start 19; Stop 43
agagggaatggtatgatttcagtta

SEQ ID NO: 366166 - DNA, 25 bp, Artificial
  probe
  misc_feature (1)..(25): SEQ ID NO: 3883; WAN024FTP; Start 482; Stop 506
ataacgatgaaatgacggtatctgc

SEQ ID NO: 366167 - DNA, 25 bp, Artificial
  probe
  misc_feature (1)..(25): SEQ ID NO: 3883; WAN024FTP; Start 17; Stop 41
agagagggaatggtatgatttcagt

SEQ ID NO: 366168 - DNA, 25 bp, Artificial
  probe
  misc_feature (1)..(25): SEQ ID NO: 3883; WAN024FTP; Start 170; Stop 194
gtgatgaatatgggaaactgtatga

SEQ ID NO: 366169 - DNA, 25 bp, Artificial
  probe
  misc_feature (1)..(25): SEQ ID NO: 3883; WAN024FTP; Start 563; Stop 587
tctacgaggatttgtatgttgttgc

SEQ ID NO: 366170 - DNA, 25 bp, Artificial
  probe
  misc_feature (1)..(25): SEQ ID NO: 3883; WAN024FTP; Start 481; Stop 505
tataacgatgaaatgacggtatctg

SEQ ID NO: 366171 - DNA, 25 bp, Artificial
  probe
  misc_feature (1)..(25): SEQ ID NO: 3883; WAN024FTP; Start 614; Stop 638
ttgctcataccgatttgcctatata

SEQ ID NO: 366172 - DNA, 25 bp, Artificial
  probe
  misc_feature (1)..(25): SEQ ID NO: 3883; WAN024FTP; Start 161; Stop 185
gggaaatatgtgatgaatatgggaa

SEQ ID NO: 366173 - DNA, 25 bp, Artificial
  probe
  misc_feature (1)..(25): SEQ ID NO: 3883; WAN024FTP; Start 418; Stop 442
atggctgaggactacctaactgtaa

SEQ ID NO: 366174 - DNA, 25 bp, Artificial
  probe
  misc_feature (1)..(25): SEQ ID NO: 3883; WAN024FTP; Start 615; Stop 639
tgctcataccgatttgcctatatat

SEQ ID NO: 366175 - DNA, 25 bp, Artificial
  probe
  misc_feature (1)..(25): SEQ ID NO: 3883; WAN024FTP; Start 1; Stop 25
gtgaactgtagcataaagagaggga

SEQ ID NO: 366176 - DNA, 25 bp, Artificial
  probe
  misc_feature (1)..(25): SEQ ID NO: 3883; WAN024FTP; Start 612; Stop 636
agttgctcataccgatttgcctata

SEQ ID NO: 366177 - DNA, 25 bp, Artificial
  probe
  misc_feature (1)..(25): SEQ ID NO: 3884; WAN024GMT; Start 299; Stop 323
ttaggagcacacatgaagacatcta

SEQ ID NO: 366178 - DNA, 25 bp, Artificial
  probe
  misc_feature (1)..(25): SEQ ID NO: 3884; WAN024GMT; Start 303; Stop 327
gagcacacatgaagacatctacatc

SEQ ID NO: 366179 - DNA, 25 bp, Artificial
  probe
  misc_feature (1)..(25): SEQ ID NO: 3884; WAN024GMT; Start 482; Stop 506
gcttctgctactgtgtaagtatcaa

SEQ ID NO: 366180 - DNA, 25 bp, Artificial
  probe
  misc_feature (1)..(25): SEQ ID NO: 3884; WAN024GMT; Start 300; Stop 324
taggagcacacatgaagacatctac

SEQ ID NO: 366181 - DNA, 25 bp, Artificial
  probe
  misc_feature (1)..(25): SEQ ID NO: 3884; WAN024GMT; Start 250; Stop 274
aacaccaaatccttcttcgtaagta

SEQ ID NO: 366182 - DNA, 25 bp, Artificial
  probe
  misc_feature (1)..(25): SEQ ID NO: 3884; WAN024GMT; Start 536; Stop 560
ttacctggacgtacaccgataataa

SEQ ID NO: 366183 - DNA, 25 bp, Artificial
  probe
  misc_feature (1)..(25): SEQ ID NO: 3884; WAN024GMT; Start 105; Stop 129
gttcaccaaacaaatcttcttcagt

SEQ ID NO: 366184 - DNA, 25 bp, Artificial
  probe
  misc_feature (1)..(25): SEQ ID NO: 3884; WAN024GMT; Start 106; Stop 130
ttcaccaaacaaatcttcttcagtt

SEQ ID NO: 366185 - DNA, 25 bp, Artificial
  probe
  misc_feature (1)..(25): SEQ ID NO: 3884; WAN024GMT; Start 249; Stop 273
gaacaccaaatccttcttcgtaagt

SEQ ID NO: 366186 - DNA, 25 bp, Artificial
  probe
  misc_feature (1)..(25): SEQ ID NO: 3884; WAN024GMT; Start 136; Stop 160
tttgtaagttgtttcaagaagacct

SEQ ID NO: 366187 - DNA, 25 bp, Artificial
  probe
  misc_feature (1)..(25): SEQ ID NO: 3884; WAN024GMT; Start 537; Stop 561
tacctggacgtacaccgataataac

SEQ ID NO: 366188 - DNA, 25 bp, Artificial
  probe
  misc_feature (1)..(25): SEQ ID NO: 3884; WAN024GMT; Start 138; Stop 162
tgtaagttgtttcaagaagacctac

SEQ ID NO: 366189 - DNA, 25 bp, Artificial
  probe
  misc_feature (1)..(25): SEQ ID NO: 3884; WAN024GMT; Start 304; Stop 328
agcacacatgaagacatctacatcc

SEQ ID NO: 366190 - DNA, 25 bp, Artificial
  probe
  misc_feature (1)..(25): SEQ ID NO: 3884; WAN024GMT; Start 302; Stop 326
ggagcacacatgaagacatctacat

SEQ ID NO: 366191 - DNA, 25 bp, Artificial
  probe
  misc_feature (1)..(25): SEQ ID NO: 3884; WAN024GMT; Start 135; Stop 159
ctttgtaagttgtttcaagaagacc

SEQ ID NO: 366192 - DNA, 25 bp, Artificial
  probe
  misc_feature (1)..(25): SEQ ID NO: 3884; WAN024GMT; Start 459; Stop 483
tgataacatcagccaacttagtagc

SEQ ID NO: 366193 - DNA, 25 bp, Artificial
  probe
  misc_feature (1)..(25): SEQ ID NO: 3884; WAN024GMT; Start 251; Stop 275
acaccaaatccttcttcgtaagtac

SEQ ID NO: 366194 - DNA, 25 bp, Artificial
  probe
  misc_feature (1)..(25): SEQ ID NO: 3884; WAN024GMT; Start 181; Stop 205
tttacaccagtccatagcaatgttt

SEQ ID NO: 366195 - DNA, 25 bp, Artificial
  probe
  misc_feature (1)..(25): SEQ ID NO: 3884; WAN024GMT; Start 137; Stop 161
ttgtaagttgtttcaagaagaccta

SEQ ID NO: 366196 - DNA, 25 bp, Artificial
  probe
  misc_feature (1)..(25): SEQ ID NO: 3884; WAN024GMT; Start 140; Stop 164
taagttgtttcaagaagacctacac

SEQ ID NO: 366197 - DNA, 25 bp, Artificial
  probe
  misc_feature (1)..(25): SEQ ID NO: 3884; WAN024GMT; Start 139; Stop 163
gtaagttgtttcaagaagacctaca

SEQ ID NO: 366198 - DNA, 25 bp, Artificial
  probe
  misc_feature (1)..(25): SEQ ID NO: 3884; WAN024GMT; Start 180; Stop 204
ctttacaccagtccatagcaatgtt

SEQ ID NO: 366199 - DNA, 25 bp, Artificial
  probe
  misc_feature (1)..(25): SEQ ID NO: 3884; WAN024GMT; Start 123; Stop 147
cttcagtttcttctttgtaagttgt

SEQ ID NO: 366200 - DNA, 25 bp, Artificial
  probe
  misc_feature (1)..(25): SEQ ID NO: 3884; WAN024GMT; Start 141; Stop 165
aagttgtttcaagaagacctacacg

SEQ ID NO: 366201 - DNA, 25 bp, Artificial
  probe
  misc_feature (1)..(25): SEQ ID NO: 3884; WAN024GMT; Start 3; Stop 27
gaagaacttcaaagtaagccaattc

SEQ ID NO: 366202 - DNA, 25 bp, Artificial
  probe
  misc_feature (1)..(25): SEQ ID NO: 3884; WAN024GMT; Start 458; Stop 482
atgataacatcagccaacttagtag

SEQ ID NO: 366203 - DNA, 25 bp, Artificial
  probe
  misc_feature (1)..(25): SEQ ID NO: 3884; WAN024GMT; Start 461; Stop 485
ataacatcagccaacttagtagctt

SEQ ID NO: 366204 - DNA, 25 bp, Artificial
  probe
  misc_feature (1)..(25): SEQ ID NO: 3884; WAN024GMT; Start 493; Stop 517
tgtgtaagtatcaaatccatcttct

SEQ ID NO: 366205 - DNA, 25 bp, Artificial
  probe
  misc_feature (1)..(25): SEQ ID NO: 3884; WAN024GMT; Start 322; Stop 346
tacatccgcaggaactttgataaat

SEQ ID NO: 366206 - DNA, 25 bp, Artificial
  probe
  misc_feature (1)..(25): SEQ ID NO: 3884; WAN024GMT; Start 122; Stop 146
tcttcagtttcttctttgtaagttg

SEQ ID NO: 366207 - DNA, 25 bp, Artificial
  probe
  misc_feature (1)..(25): SEQ ID NO: 3884; WAN024GMT; Start 460; Stop 484
gataacatcagccaacttagtagct

SEQ ID NO: 366208 - DNA, 25 bp, Artificial
  probe
  misc_feature (1)..(25): SEQ ID NO: 3884; WAN024GMT; Start 457; Stop 481
catgataacatcagccaacttagta

SEQ ID NO: 366209 - DNA, 25 bp, Artificial
  probe
  misc_feature (1)..(25): SEQ ID NO: 3884; WAN024GMT; Start 34; Stop 58
gtaacctgcttctgtcaagacttcg

SEQ ID NO: 366210 - DNA, 25 bp, Artificial
  probe
  misc_feature (1)..(25): SEQ ID NO: 3885; WAN024FHX; Start 628; Stop 652
ttaggttatgaagtggatgtccgtc

SEQ ID NO: 366211 - DNA, 25 bp, Artificial
  probe
  misc_feature (1)..(25): SEQ ID NO: 3885; WAN024FHX; Start 792; Stop 816
gggatttgatttgacggtagatgaa

SEQ ID NO: 366212 - DNA, 25 bp, Artificial
  probe
  misc_feature (1)..(25): SEQ ID NO: 3885; WAN024FHX; Start 790; Stop 814
atgggatttgatttgacggtagatg

SEQ ID NO: 366213 - DNA, 25 bp, Artificial
  probe
  misc_feature (1)..(25): SEQ ID NO: 3885; WAN024FHX; Start 625; Stop 649
cctttaggttatgaagtggatgtcc

SEQ ID NO: 366214 - DNA, 25 bp, Artificial
  probe
  misc_feature (1)..(25): SEQ ID NO: 3885; WAN024FHX; Start 626; Stop 650
ctttaggttatgaagtggatgtccg

SEQ ID NO: 366215 - DNA, 25 bp, Artificial
  probe
  misc_feature (1)..(25): SEQ ID NO: 3885; WAN024FHX; Start 791; Stop 815
tgggatttgatttgacggtagatga

SEQ ID NO: 366216 - DNA, 25 bp, Artificial
  probe
  misc_feature (1)..(25): SEQ ID NO: 3885; WAN024FHX; Start 627; Stop 651
tttaggttatgaagtggatgtccgt

SEQ ID NO: 366217 - DNA, 25 bp, Artificial
  probe
  misc_feature (1)..(25): SEQ ID NO: 3885; WAN024FHX; Start 789; Stop 813
catgggatttgatttgacggtagat

SEQ ID NO: 366218 - DNA, 25 bp, Artificial
  probe
  misc_feature (1)..(25): SEQ ID NO: 3885; WAN024FHX; Start 169; Stop 193
cgtaataaagcctggtacaagatgg

SEQ ID NO: 366219 - DNA, 25 bp, Artificial
  probe
  misc_feature (1)..(25): SEQ ID NO: 3885; WAN024FHX; Start 168; Stop 192
ccgtaataaagcctggtacaagatg

SEQ ID NO: 366220 - DNA, 25 bp, Artificial
  probe
  misc_feature (1)..(25): SEQ ID NO: 3885; WAN024FHX; Start 783; Stop 807
aaatgacatgggatttgatttgacg

SEQ ID NO: 366221 - DNA, 25 bp, Artificial
  probe
  misc_feature (1)..(25): SEQ ID NO: 3885; WAN024FHX; Start 787; Stop 811
gacatgggatttgatttgacggtag

SEQ ID NO: 366222 - DNA, 25 bp, Artificial
  probe
  misc_feature (1)..(25): SEQ ID NO: 3885; WAN024FHX; Start 784; Stop 808
aatgacatgggatttgatttgacgg

SEQ ID NO: 366223 - DNA, 25 bp, Artificial
  probe
  misc_feature (1)..(25): SEQ ID NO: 3885; WAN024FHX; Start 788; Stop 812
acatgggatttgatttgacggtaga

SEQ ID NO: 366224 - DNA, 25 bp, Artificial
  probe
  misc_feature (1)..(25): SEQ ID NO: 3885; WAN024FHX; Start 25; Stop 49
attattggagcaggaattgtgggag

SEQ ID NO: 366225 - DNA, 25 bp, Artificial
  probe
  misc_feature (1)..(25): SEQ ID NO: 3885; WAN024FHX; Start 688; Stop 712
caagacatggaagattaccctgttg

SEQ ID NO: 366226 - DNA, 25 bp, Artificial
  probe
  misc_feature (1)..(25): SEQ ID NO: 3885; WAN024FHX; Start 689; Stop 713
aagacatggaagattaccctgttgt

SEQ ID NO: 366227 - DNA, 25 bp, Artificial
  probe
  misc_feature (1)..(25): SEQ ID NO: 3885; WAN024FHX; Start 786; Stop 810
tgacatgggatttgatttgacggta

SEQ ID NO: 366228 - DNA, 25 bp, Artificial
  probe
  misc_feature (1)..(25): SEQ ID NO: 3885; WAN024FHX; Start 633; Stop 657
ttatgaagtggatgtccgtcctcaa

SEQ ID NO: 366229 - DNA, 25 bp, Artificial
  probe
  misc_feature (1)..(25): SEQ ID NO: 3885; WAN024FHX; Start 692; Stop 716
acatggaagattaccctgttgtcat

SEQ ID NO: 366230 - DNA, 25 bp, Artificial
  probe
  misc_feature (1)..(25): SEQ ID NO: 3885; WAN024FHX; Start 24; Stop 48
cattattggagcaggaattgtggga

SEQ ID NO: 366231 - DNA, 25 bp, Artificial
  probe
  misc_feature (1)..(25): SEQ ID NO: 3885; WAN024FHX; Start 629; Stop 653
taggttatgaagtggatgtccgtcc

SEQ ID NO: 366232 - DNA, 25 bp, Artificial
  probe
  misc_feature (1)..(25): SEQ ID NO: 3885; WAN024FHX; Start 167; Stop 191
gccgtaataaagcctggtacaagat

SEQ ID NO: 366233 - DNA, 25 bp, Artificial
  probe
  misc_feature (1)..(25): SEQ ID NO: 3885; WAN024FHX; Start 785; Stop 809
atgacatgggatttgatttgacggt

SEQ ID NO: 366234 - DNA, 25 bp, Artificial
  probe
  misc_feature (1)..(25): SEQ ID NO: 3885; WAN024FHX; Start 694; Stop 718
atggaagattaccctgttgtcatgc

SEQ ID NO: 366235 - DNA, 25 bp, Artificial
  probe
  misc_feature (1)..(25): SEQ ID NO: 3885; WAN024FHX; Start 632; Stop 656
gttatgaagtggatgtccgtcctca

SEQ ID NO: 366236 - DNA, 25 bp, Artificial
  probe
  misc_feature (1)..(25): SEQ ID NO: 3885; WAN024FHX; Start 687; Stop 711
ccaagacatggaagattaccctgtt

SEQ ID NO: 366237 - DNA, 25 bp, Artificial
  probe
  misc_feature (1)..(25): SEQ ID NO: 3885; WAN024FHX; Start 216; Stop 240
tgtggatttattagctgatttagag

SEQ ID NO: 366238 - DNA, 25 bp, Artificial
  probe
  misc_feature (1)..(25): SEQ ID NO: 3885; WAN024FHX; Start 634; Stop 658
tatgaagtggatgtccgtcctcaaa

SEQ ID NO: 366239 - DNA, 25 bp, Artificial
  probe
  misc_feature (1)..(25): SEQ ID NO: 3885; WAN024FHX; Start 217; Stop 241
gtggatttattagctgatttagaga

SEQ ID NO: 366240 - DNA, 25 bp, Artificial
  probe
  misc_feature (1)..(25): SEQ ID NO: 3885; WAN024FHX; Start 782; Stop 806
aaaatgacatgggatttgatttgac

SEQ ID NO: 366241 - DNA, 25 bp, Artificial
  probe
  misc_feature (1)..(25): SEQ ID NO: 3885; WAN024FHX; Start 781; Stop 805
gaaaatgacatgggatttgatttga

SEQ ID NO: 366242 - DNA, 25 bp, Artificial
  probe
  misc_feature (1)..(25): SEQ ID NO: 3885; WAN024FHX; Start 631; Stop 655
ggttatgaagtggatgtccgtcctc

SEQ ID NO: 366243 - DNA, 25 bp, Artificial
  probe
  misc_feature (1)..(25): SEQ ID NO: 3886; WAN024BDW; Start 202; Stop 226
aagagtttcgtaagaagtaacacct

SEQ ID NO: 366244 - DNA, 25 bp, Artificial
  probe
  misc_feature (1)..(25): SEQ ID NO: 3886; WAN024BDW; Start 201; Stop 225
caagagtttcgtaagaagtaacacc

SEQ ID NO: 366245 - DNA, 25 bp, Artificial
  probe
  misc_feature (1)..(25): SEQ ID NO: 3886; WAN024BDW; Start 204; Stop 228
gagtttcgtaagaagtaacacctga

SEQ ID NO: 366246 - DNA, 25 bp, Artificial
  probe
  misc_feature (1)..(25): SEQ ID NO: 3886; WAN024BDW; Start 203; Stop 227
agagtttcgtaagaagtaacacctg

SEQ ID NO: 366247 - DNA, 25 bp, Artificial
  probe
  misc_feature (1)..(25): SEQ ID NO: 3886; WAN024BDW; Start 198; Stop 222
gctcaagagtttcgtaagaagtaac

SEQ ID NO: 366248 - DNA, 25 bp, Artificial
  probe
  misc_feature (1)..(25): SEQ ID NO: 3886; WAN024BDW; Start 197; Stop 221
ggctcaagagtttcgtaagaagtaa

SEQ ID NO: 366249 - DNA, 25 bp, Artificial
  probe
  misc_feature (1)..(25): SEQ ID NO: 3886; WAN024BDW; Start 200; Stop 224
tcaagagtttcgtaagaagtaacac

SEQ ID NO: 366250 - DNA, 25 bp, Artificial
  probe
  misc_feature (1)..(25): SEQ ID NO: 3886; WAN024BDW; Start 50; Stop 74
acaactttagtagtatcgccttcaa

SEQ ID NO: 366251 - DNA, 25 bp, Artificial
  probe
  misc_feature (1)..(25): SEQ ID NO: 3886; WAN024BDW; Start 44; Stop 68
cggtttacaactttagtagtatcgc

SEQ ID NO: 366252 - DNA, 25 bp, Artificial
  probe
  misc_feature (1)..(25): SEQ ID NO: 3886; WAN024BDW; Start 51; Stop 75
caactttagtagtatcgccttcaag

SEQ ID NO: 366253 - DNA, 25 bp, Artificial
  probe
  misc_feature (1)..(25): SEQ ID NO: 3886; WAN024BDW; Start 45; Stop 69
ggtttacaactttagtagtatcgcc

SEQ ID NO: 366254 - DNA, 25 bp, Artificial
  probe
  misc_feature (1)..(25): SEQ ID NO: 3886; WAN024BDW; Start 49; Stop 73
tacaactttagtagtatcgccttca

SEQ ID NO: 366255 - DNA, 25 bp, Artificial
  probe
  misc_feature (1)..(25): SEQ ID NO: 3886; WAN024BDW; Start 199; Stop 223
ctcaagagtttcgtaagaagtaaca

SEQ ID NO: 366256 - DNA, 25 bp, Artificial
  probe
  misc_feature (1)..(25): SEQ ID NO: 3886; WAN024BDW; Start 46; Stop 70
gtttacaactttagtagtatcgcct

SEQ ID NO: 366257 - DNA, 25 bp, Artificial
  probe
  misc_feature (1)..(25): SEQ ID NO: 3886; WAN024BDW; Start 43; Stop 67
acggtttacaactttagtagtatcg

SEQ ID NO: 366258 - DNA, 25 bp, Artificial
  probe
  misc_feature (1)..(25): SEQ ID NO: 3886; WAN024BDW; Start 196; Stop 220
tggctcaagagtttcgtaagaagta

SEQ ID NO: 366259 - DNA, 25 bp, Artificial
  probe
  misc_feature (1)..(25): SEQ ID NO: 3886; WAN024BDW; Start 181; Stop 205
gatttgtttcaagactggctcaaga

SEQ ID NO: 366260 - DNA, 25 bp, Artificial
  probe
  misc_feature (1)..(25): SEQ ID NO: 3886; WAN024BDW; Start 182; Stop 206
atttgtttcaagactggctcaagag

SEQ ID NO: 366261 - DNA, 25 bp, Artificial
  probe
  misc_feature (1)..(25): SEQ ID NO: 3886; WAN024BDW; Start 48; Stop 72
ttacaactttagtagtatcgccttc

SEQ ID NO: 366262 - DNA, 25 bp, Artificial
  probe
  misc_feature (1)..(25): SEQ ID NO: 3886; WAN024BDW; Start 180; Stop 204
tgatttgtttcaagactggctcaag

SEQ ID NO: 366263 - DNA, 25 bp, Artificial
  probe
  misc_feature (1)..(25): SEQ ID NO: 3886; WAN024BDW; Start 47; Stop 71
tttacaactttagtagtatcgcctt

SEQ ID NO: 366264 - DNA, 25 bp, Artificial
  probe
  misc_feature (1)..(25): SEQ ID NO: 3886; WAN024BDW; Start 186; Stop 210
gtttcaagactggctcaagagtttc

SEQ ID NO: 366265 - DNA, 25 bp, Artificial
  probe
  misc_feature (1)..(25): SEQ ID NO: 3886; WAN024BDW; Start 34; Stop 58
cacttcgtaacggtttacaacttta

SEQ ID NO: 366266 - DNA, 25 bp, Artificial
  probe
  misc_feature (1)..(25): SEQ ID NO: 3886; WAN024BDW; Start 36; Stop 60
cttcgtaacggtttacaactttagt

SEQ ID NO: 366267 - DNA, 25 bp, Artificial
  probe
  misc_feature (1)..(25): SEQ ID NO: 3886; WAN024BDW; Start 35; Stop 59
acttcgtaacggtttacaactttag

SEQ ID NO: 366268 - DNA, 25 bp, Artificial
  probe
  misc_feature (1)..(25): SEQ ID NO: 3886; WAN024BDW; Start 39; Stop 63
cgtaacggtttacaactttagtagt

SEQ ID NO: 366269 - DNA, 25 bp, Artificial
  probe
  misc_feature (1)..(25): SEQ ID NO: 3886; WAN024BDW; Start 52; Stop 76
aactttagtagtatcgccttcaagg

SEQ ID NO: 366270 - DNA, 25 bp, Artificial
  probe
  misc_feature (1)..(25): SEQ ID NO: 3886; WAN024BDW; Start 38; Stop 62
tcgtaacggtttacaactttagtag

SEQ ID NO: 366271 - DNA, 25 bp, Artificial
  probe
  misc_feature (1)..(25): SEQ ID NO: 3886; WAN024BDW; Start 195; Stop 219
ctggctcaagagtttcgtaagaagt

SEQ ID NO: 366272 - DNA, 25 bp, Artificial
  probe
  misc_feature (1)..(25): SEQ ID NO: 3886; WAN024BDW; Start 54; Stop 78
ctttagtagtatcgccttcaaggtc

SEQ ID NO: 366273 - DNA, 25 bp, Artificial
  probe
  misc_feature (1)..(25): SEQ ID NO: 3886; WAN024BDW; Start 53; Stop 77
actttagtagtatcgccttcaaggt

SEQ ID NO: 366274 - DNA, 25 bp, Artificial
  probe
  misc_feature (1)..(25): SEQ ID NO: 3886; WAN024BDW; Start 37; Stop 61
ttcgtaacggtttacaactttagta

SEQ ID NO: 366275 - DNA, 25 bp, Artificial
  probe
  misc_feature (1)..(25): SEQ ID NO: 3886; WAN024BDW; Start 194; Stop 218
actggctcaagagtttcgtaagaag

SEQ ID NO: 366276 - DNA, 25 bp, Artificial
  probe
  misc_feature (1)..(25): SEQ ID NO: 3887; WAN024DWE; Start 141; Stop 165
ctatatcataagaagactggcggtg

SEQ ID NO: 366277 - DNA, 25 bp, Artificial
  probe
  misc_feature (1)..(25): SEQ ID NO: 3887; WAN024DWE; Start 139; Stop 163
atctatatcataagaagactggcgg

SEQ ID NO: 366278 - DNA, 25 bp, Artificial
  probe
  misc_feature (1)..(25): SEQ ID NO: 3887; WAN024DWE; Start 140; Stop 164
tctatatcataagaagactggcggt

SEQ ID NO: 366279 - DNA, 25 bp, Artificial
  probe
  misc_feature (1)..(25): SEQ ID NO: 3887; WAN024DWE; Start 142; Stop 166
tatatcataagaagactggcggtga

SEQ ID NO: 366280 - DNA, 25 bp, Artificial
  probe
  misc_feature (1)..(25): SEQ ID NO: 3887; WAN024DWE; Start 143; Stop 167
atatcataagaagactggcggtgaa

SEQ ID NO: 366281 - DNA, 25 bp, Artificial
  probe
  misc_feature (1)..(25): SEQ ID NO: 3887; WAN024DWE; Start 42; Stop 66
aacgaatagaagcaccatagcaagt

SEQ ID NO: 366282 - DNA, 25 bp, Artificial
  probe
  misc_feature (1)..(25): SEQ ID NO: 3887; WAN024DWE; Start 138; Stop 162
tatctatatcataagaagactggcg

SEQ ID NO: 366283 - DNA, 25 bp, Artificial
  probe
  misc_feature (1)..(25): SEQ ID NO: 3887; WAN024DWE; Start 43; Stop 67
acgaatagaagcaccatagcaagtc

SEQ ID NO: 366284 - DNA, 25 bp, Artificial
  probe
  misc_feature (1)..(25): SEQ ID NO: 3887; WAN024DWE; Start 41; Stop 65
aaacgaatagaagcaccatagcaag

SEQ ID NO: 366285 - DNA, 25 bp, Artificial
  probe
  misc_feature (1)..(25): SEQ ID NO: 3887; WAN024DWE; Start 40; Stop 64
caaacgaatagaagcaccatagcaa

SEQ ID NO: 366286 - DNA, 25 bp, Artificial
  probe
  misc_feature (1)..(25): SEQ ID NO: 3887; WAN024DWE; Start 38; Stop 62
ttcaaacgaatagaagcaccatagc

SEQ ID NO: 366287 - DNA, 25 bp, Artificial
  probe
  misc_feature (1)..(25): SEQ ID NO: 3887; WAN024DWE; Start 45; Stop 69
gaatagaagcaccatagcaagtcgg

SEQ ID NO: 366288 - DNA, 25 bp, Artificial
  probe
  misc_feature (1)..(25): SEQ ID NO: 3887; WAN024DWE; Start 144; Stop 168
tatcataagaagactggcggtgaaa

SEQ ID NO: 366289 - DNA, 25 bp, Artificial
  probe
  misc_feature (1)..(25): SEQ ID NO: 3887; WAN024DWE; Start 39; Stop 63
tcaaacgaatagaagcaccatagca

SEQ ID NO: 366290 - DNA, 25 bp, Artificial
  probe
  misc_feature (1)..(25): SEQ ID NO: 3887; WAN024DWE; Start 145; Stop 169
atcataagaagactggcggtgaaag

SEQ ID NO: 366291 - DNA, 25 bp, Artificial
  probe
  misc_feature (1)..(25): SEQ ID NO: 3887; WAN024DWE; Start 201; Stop 225
gtgtcagaaggagccaagagtagtc

SEQ ID NO: 366292 - DNA, 25 bp, Artificial
  probe
  misc_feature (1)..(25): SEQ ID NO: 3887; WAN024DWE; Start 71; Stop 95
gtgagctgggtttcaatctgataac

SEQ ID NO: 366293 - DNA, 25 bp, Artificial
  probe
  misc_feature (1)..(25): SEQ ID NO: 3887; WAN024DWE; Start 147; Stop 171
cataagaagactggcggtgaaagag

SEQ ID NO: 366294 - DNA, 25 bp, Artificial
  probe
  misc_feature (1)..(25): SEQ ID NO: 3887; WAN024DWE; Start 70; Stop 94
tgtgagctgggtttcaatctgataa

SEQ ID NO: 366295 - DNA, 25 bp, Artificial
  probe
  misc_feature (1)..(25): SEQ ID NO: 3887; WAN024DWE; Start 137; Stop 161
ttatctatatcataagaagactggc

SEQ ID NO: 366296 - DNA, 25 bp, Artificial
  probe
  misc_feature (1)..(25): SEQ ID NO: 3887; WAN024DWE; Start 46; Stop 70
aatagaagcaccatagcaagtcggt

SEQ ID NO: 366297 - DNA, 25 bp, Artificial
  probe
  misc_feature (1)..(25): SEQ ID NO: 3887; WAN024DWE; Start 69; Stop 93
gtgtgagctgggtttcaatctgata

SEQ ID NO: 366298 - DNA, 25 bp, Artificial
  probe
  misc_feature (1)..(25): SEQ ID NO: 3887; WAN024DWE; Start 146; Stop 170
tcataagaagactggcggtgaaaga

SEQ ID NO: 366299 - DNA, 25 bp, Artificial
  probe
  misc_feature (1)..(25): SEQ ID NO: 3887; WAN024DWE; Start 44; Stop 68
cgaatagaagcaccatagcaagtcg

SEQ ID NO: 366300 - DNA, 25 bp, Artificial
  probe
  misc_feature (1)..(25): SEQ ID NO: 3887; WAN024DWE; Start 72; Stop 96
tgagctgggtttcaatctgataacg

SEQ ID NO: 366301 - DNA, 25 bp, Artificial
  probe
  misc_feature (1)..(25): SEQ ID NO: 3887; WAN024DWE; Start 148; Stop 172
ataagaagactggcggtgaaagagg

SEQ ID NO: 366302 - DNA, 25 bp, Artificial
  probe
  misc_feature (1)..(25): SEQ ID NO: 3887; WAN024DWE; Start 96; Stop 120
gcagagaaaagagcttcaaatagtg

SEQ ID NO: 366303 - DNA, 25 bp, Artificial
  probe
  misc_feature (1)..(25): SEQ ID NO: 3887; WAN024DWE; Start 1; Stop 25
gtgaagatagagggagagggctttg

SEQ ID NO: 366304 - DNA, 25 bp, Artificial
  probe
  misc_feature (1)..(25): SEQ ID NO: 3887; WAN024DWE; Start 80; Stop 104
gtttcaatctgataacgcagagaaa

SEQ ID NO: 366305 - DNA, 25 bp, Artificial
  probe
  misc_feature (1)..(25): SEQ ID NO: 3887; WAN024DWE; Start 99; Stop 123
gagaaaagagcttcaaatagtgagg

SEQ ID NO: 366306 - DNA, 25 bp, Artificial
  probe
  misc_feature (1)..(25): SEQ ID NO: 3887; WAN024DWE; Start 93; Stop 117
aacgcagagaaaagagcttcaaata

SEQ ID NO: 366307 - DNA, 25 bp, Artificial
  probe
  misc_feature (1)..(25): SEQ ID NO: 3887; WAN024DWE; Start 92; Stop 116
taacgcagagaaaagagcttcaaat

SEQ ID NO: 366308 - DNA, 25 bp, Artificial
  probe
  misc_feature (1)..(25): SEQ ID NO: 3887; WAN024DWE; Start 91; Stop 115
ataacgcagagaaaagagcttcaaa

SEQ ID NO: 366309 - DNA, 25 bp, Artificial
  probe
  misc_feature (1)..(25): SEQ ID NO: 3888; WAN024CUK; Start 344; Stop 368
atcttcctattattgccaatgtagc

SEQ ID NO: 366310 - DNA, 25 bp, Artificial
  probe
  misc_feature (1)..(25): SEQ ID NO: 3888; WAN024CUK; Start 936; Stop 960
atacggtattagcagtctggaagaa

SEQ ID NO: 366311 - DNA, 25 bp, Artificial
  probe
  misc_feature (1)..(25): SEQ ID NO: 3888; WAN024CUK; Start 937; Stop 961
tacggtattagcagtctggaagaac

SEQ ID NO: 366312 - DNA, 25 bp, Artificial
  probe
  misc_feature (1)..(25): SEQ ID NO: 3888; WAN024CUK; Start 935; Stop 959
aatacggtattagcagtctggaaga

SEQ ID NO: 366313 - DNA, 25 bp, Artificial
  probe
  misc_feature (1)..(25): SEQ ID NO: 3888; WAN024CUK; Start 346; Stop 370
cttcctattattgccaatgtagctg

SEQ ID NO: 366314 - DNA, 25 bp, Artificial
  probe
  misc_feature (1)..(25): SEQ ID NO: 3888; WAN024CUK; Start 345; Stop 369
tcttcctattattgccaatgtagct

SEQ ID NO: 366315 - DNA, 25 bp, Artificial
  probe
  misc_feature (1)..(25): SEQ ID NO: 3888; WAN024CUK; Start 21; Stop 45
cgcacaggaacagttgtattataag

SEQ ID NO: 366316 - DNA, 25 bp, Artificial
  probe
  misc_feature (1)..(25): SEQ ID NO: 3888; WAN024CUK; Start 22; Stop 46
gcacaggaacagttgtattataagg

SEQ ID NO: 366317 - DNA, 25 bp, Artificial
  probe
  misc_feature (1)..(25): SEQ ID NO: 3888; WAN024CUK; Start 872; Stop 896
ctaactttaccaatccttatgcctg

SEQ ID NO: 366318 - DNA, 25 bp, Artificial
  probe
  misc_feature (1)..(25): SEQ ID NO: 3888; WAN024CUK; Start 871; Stop 895
gctaactttaccaatccttatgcct

SEQ ID NO: 366319 - DNA, 25 bp, Artificial
  probe
  misc_feature (1)..(25): SEQ ID NO: 3888; WAN024CUK; Start 545; Stop 569
cagaagtgccagtttatgtcaaatt

SEQ ID NO: 366320 - DNA, 25 bp, Artificial
  probe
  misc_feature (1)..(25): SEQ ID NO: 3888; WAN024CUK; Start 544; Stop 568
tcagaagtgccagtttatgtcaaat

SEQ ID NO: 366321 - DNA, 25 bp, Artificial
  probe
  misc_feature (1)..(25): SEQ ID NO: 3888; WAN024CUK; Start 504; Stop 528
agatttggcttatgatgtggtgaaa

SEQ ID NO: 366322 - DNA, 25 bp, Artificial
  probe
  misc_feature (1)..(25): SEQ ID NO: 3888; WAN024CUK; Start 25; Stop 49
caggaacagttgtattataaggaga

SEQ ID NO: 366323 - DNA, 25 bp, Artificial
  probe
  misc_feature (1)..(25): SEQ ID NO: 3888; WAN024CUK; Start 407; Stop 431
ggatttccaaggcaactaatgtaaa

SEQ ID NO: 366324 - DNA, 25 bp, Artificial
  probe
  misc_feature (1)..(25): SEQ ID NO: 3888; WAN024CUK; Start 505; Stop 529
gatttggcttatgatgtggtgaaag

SEQ ID NO: 366325 - DNA, 25 bp, Artificial
  probe
  misc_feature (1)..(25): SEQ ID NO: 3888; WAN024CUK; Start 316; Stop 340
ctaccttggctggaaagagaatatc

SEQ ID NO: 366326 - DNA, 25 bp, Artificial
  probe
  misc_feature (1)..(25): SEQ ID NO: 3888; WAN024CUK; Start 549; Stop 573
agtgccagtttatgtcaaattaacc

SEQ ID NO: 366327 - DNA, 25 bp, Artificial
  probe
  misc_feature (1)..(25): SEQ ID NO: 3888; WAN024CUK; Start 23; Stop 47
cacaggaacagttgtattataagga

SEQ ID NO: 366328 - DNA, 25 bp, Artificial
  probe
  misc_feature (1)..(25): SEQ ID NO: 3888; WAN024CUK; Start 546; Stop 570
agaagtgccagtttatgtcaaatta

SEQ ID NO: 366329 - DNA, 25 bp, Artificial
  probe
  misc_feature (1)..(25): SEQ ID NO: 3888; WAN024CUK; Start 939; Stop 963
cggtattagcagtctggaagaactc

SEQ ID NO: 366330 - DNA, 25 bp, Artificial
  probe
  misc_feature (1)..(25): SEQ ID NO: 3888; WAN024CUK; Start 773; Stop 797
caacagacctgcctatcattggaat

SEQ ID NO: 366331 - DNA, 25 bp, Artificial
  probe
  misc_feature (1)..(25): SEQ ID NO: 3888; WAN024CUK; Start 543; Stop 567
ctcagaagtgccagtttatgtcaaa

SEQ ID NO: 366332 - DNA, 25 bp, Artificial
  probe
  misc_feature (1)..(25): SEQ ID NO: 3888; WAN024CUK; Start 774; Stop 798
aacagacctgcctatcattggaatg

SEQ ID NO: 366333 - DNA, 25 bp, Artificial
  probe
  misc_feature (1)..(25): SEQ ID NO: 3888; WAN024CUK; Start 550; Stop 574
gtgccagtttatgtcaaattaaccc

SEQ ID NO: 366334 - DNA, 25 bp, Artificial
  probe
  misc_feature (1)..(25): SEQ ID NO: 3888; WAN024CUK; Start 503; Stop 527
cagatttggcttatgatgtggtgaa

SEQ ID NO: 366335 - DNA, 25 bp, Artificial
  probe
  misc_feature (1)..(25): SEQ ID NO: 3888; WAN024CUK; Start 406; Stop 430
gggatttccaaggcaactaatgtaa

SEQ ID NO: 366336 - DNA, 25 bp, Artificial
  probe
  misc_feature (1)..(25): SEQ ID NO: 3888; WAN024CUK; Start 460; Stop 484
aatgttgaccactgtaatcatggac

SEQ ID NO: 366337 - DNA, 25 bp, Artificial
  probe
  misc_feature (1)..(25): SEQ ID NO: 3888; WAN024CUK; Start 459; Stop 483
caatgttgaccactgtaatcatgga

SEQ ID NO: 366338 - DNA, 25 bp, Artificial
  probe
  misc_feature (1)..(25): SEQ ID NO: 3888; WAN024CUK; Start 24; Stop 48
acaggaacagttgtattataaggag

SEQ ID NO: 366339 - DNA, 25 bp, Artificial
  probe
  misc_feature (1)..(25): SEQ ID NO: 3888; WAN024CUK; Start 547; Stop 571
gaagtgccagtttatgtcaaattaa

SEQ ID NO: 366340 - DNA, 25 bp, Artificial
  probe
  misc_feature (1)..(25): SEQ ID NO: 3888; WAN024CUK; Start 343; Stop 367
aatcttcctattattgccaatgtag

SEQ ID NO: 366341 - DNA, 25 bp, Artificial
  probe
  misc_feature (1)..(25): SEQ ID NO: 3888; WAN024CUK; Start 940; Stop 964
ggtattagcagtctggaagaactcc

SEQ ID NO: 366342 - DNA, 25 bp, Artificial
  probe
  misc_feature (1)..(25): SEQ ID NO: 3889; WAN024BIZ; Start 32; Stop 56
ttgatgagcagttggaagtgattga

SEQ ID NO: 366343 - DNA, 25 bp, Artificial
  probe
  misc_feature (1)..(25): SEQ ID NO: 3889; WAN024BIZ; Start 33; Stop 57
tgatgagcagttggaagtgattgac

SEQ ID NO: 366344 - DNA, 25 bp, Artificial
  probe
  misc_feature (1)..(25): SEQ ID NO: 3889; WAN024BIZ; Start 31; Stop 55
tttgatgagcagttggaagtgattg

SEQ ID NO: 366345 - DNA, 25 bp, Artificial
  probe
  misc_feature (1)..(25): SEQ ID NO: 3889; WAN024BIZ; Start 30; Stop 54
gtttgatgagcagttggaagtgatt

SEQ ID NO: 366346 - DNA, 25 bp, Artificial
  probe
  misc_feature (1)..(25): SEQ ID NO: 3889; WAN024BIZ; Start 25; Stop 49
attcagtttgatgagcagttggaag

SEQ ID NO: 366347 - DNA, 25 bp, Artificial
  probe
  misc_feature (1)..(25): SEQ ID NO: 3889; WAN024BIZ; Start 46; Stop 70
gaagtgattgaccagctttatgatg

SEQ ID NO: 366348 - DNA, 25 bp, Artificial
  probe
  misc_feature (1)..(25): SEQ ID NO: 3889; WAN024BIZ; Start 34; Stop 58
gatgagcagttggaagtgattgacc

SEQ ID NO: 366349 - DNA, 25 bp, Artificial
  probe
  misc_feature (1)..(25): SEQ ID NO: 3889; WAN024BIZ; Start 29; Stop 53
agtttgatgagcagttggaagtgat

SEQ ID NO: 366350 - DNA, 25 bp, Artificial
  probe
  misc_feature (1)..(25): SEQ ID NO: 3889; WAN024BIZ; Start 47; Stop 71
aagtgattgaccagctttatgatgt

SEQ ID NO: 366351 - DNA, 25 bp, Artificial
  probe
  misc_feature (1)..(25): SEQ ID NO: 3889; WAN024BIZ; Start 48; Stop 72
agtgattgaccagctttatgatgtg

SEQ ID NO: 366352 - DNA, 25 bp, Artificial
  probe
  misc_feature (1)..(25): SEQ ID NO: 3889; WAN024BIZ; Start 45; Stop 69
ggaagtgattgaccagctttatgat

SEQ ID NO: 366353 - DNA, 25 bp, Artificial
  probe
  misc_feature (1)..(25): SEQ ID NO: 3889; WAN024BIZ; Start 61; Stop 85
ctttatgatgtggaagtgcatgaaa

SEQ ID NO: 366354 - DNA, 25 bp, Artificial
  probe
  misc_feature (1)..(25): SEQ ID NO: 3889; WAN024BIZ; Start 26; Stop 50
ttcagtttgatgagcagttggaagt

SEQ ID NO: 366355 - DNA, 25 bp, Artificial
  probe
  misc_feature (1)..(25): SEQ ID NO: 3889; WAN024BIZ; Start 316; Stop 340
caactacaaaatcaagagggacatc

SEQ ID NO: 366356 - DNA, 25 bp, Artificial
  probe
  misc_feature (1)..(25): SEQ ID NO: 3889; WAN024BIZ; Start 315; Stop 339
tcaactacaaaatcaagagggacat

SEQ ID NO: 366357 - DNA, 25 bp, Artificial
  probe
  misc_feature (1)..(25): SEQ ID NO: 3889; WAN024BIZ; Start 314; Stop 338
atcaactacaaaatcaagagggaca

SEQ ID NO: 366358 - DNA, 25 bp, Artificial
  probe
  misc_feature (1)..(25): SEQ ID NO: 3889; WAN024BIZ; Start 28; Stop 52
cagtttgatgagcagttggaagtga

SEQ ID NO: 366359 - DNA, 25 bp, Artificial
  probe
  misc_feature (1)..(25): SEQ ID NO: 3889; WAN024BIZ; Start 317; Stop 341
aactacaaaatcaagagggacatcc

SEQ ID NO: 366360 - DNA, 25 bp, Artificial
  probe
  misc_feature (1)..(25): SEQ ID NO: 3889; WAN024BIZ; Start 60; Stop 84
gctttatgatgtggaagtgcatgaa

SEQ ID NO: 366361 - DNA, 25 bp, Artificial
  probe
  misc_feature (1)..(25): SEQ ID NO: 3889; WAN024BIZ; Start 52; Stop 76
attgaccagctttatgatgtggaag

SEQ ID NO: 366362 - DNA, 25 bp, Artificial
  probe
  misc_feature (1)..(25): SEQ ID NO: 3889; WAN024BIZ; Start 51; Stop 75
gattgaccagctttatgatgtggaa

SEQ ID NO: 366363 - DNA, 25 bp, Artificial
  probe
  misc_feature (1)..(25): SEQ ID NO: 3889; WAN024BIZ; Start 313; Stop 337
tatcaactacaaaatcaagagggac

SEQ ID NO: 366364 - DNA, 25 bp, Artificial
  probe
  misc_feature (1)..(25): SEQ ID NO: 3889; WAN024BIZ; Start 43; Stop 67
ttggaagtgattgaccagctttatg

SEQ ID NO: 366365 - DNA, 25 bp, Artificial
  probe
  misc_feature (1)..(25): SEQ ID NO: 3889; WAN024BIZ; Start 42; Stop 66
gttggaagtgattgaccagctttat

SEQ ID NO: 366366 - DNA, 25 bp, Artificial
  probe
  misc_feature (1)..(25): SEQ ID NO: 3889; WAN024BIZ; Start 27; Stop 51
tcagtttgatgagcagttggaagtg

SEQ ID NO: 366367 - DNA, 25 bp, Artificial
  probe
  misc_feature (1)..(25): SEQ ID NO: 3889; WAN024BIZ; Start 312; Stop 336
ttatcaactacaaaatcaagaggga

SEQ ID NO: 366368 - DNA, 25 bp, Artificial
  probe
  misc_feature (1)..(25): SEQ ID NO: 3889; WAN024BIZ; Start 59; Stop 83
agctttatgatgtggaagtgcatga

SEQ ID NO: 366369 - DNA, 25 bp, Artificial
  probe
  misc_feature (1)..(25): SEQ ID NO: 3889; WAN024BIZ; Start 58; Stop 82
cagctttatgatgtggaagtgcatg

SEQ ID NO: 366370 - DNA, 25 bp, Artificial
  probe
  misc_feature (1)..(25): SEQ ID NO: 3889; WAN024BIZ; Start 98; Stop 122
gctacctgcttttctataatgagga

SEQ ID NO: 366371 - DNA, 25 bp, Artificial
  probe
  misc_feature (1)..(25): SEQ ID NO: 3889; WAN024BIZ; Start 50; Stop 74
tgattgaccagctttatgatgtgga

SEQ ID NO: 366372 - DNA, 25 bp, Artificial
  probe
  misc_feature (1)..(25): SEQ ID NO: 3889; WAN024BIZ; Start 49; Stop 73
gtgattgaccagctttatgatgtgg

SEQ ID NO: 366373 - DNA, 25 bp, Artificial
  probe
  misc_feature (1)..(25): SEQ ID NO: 3889; WAN024BIZ; Start 44; Stop 68
tggaagtgattgaccagctttatga

SEQ ID NO: 366374 - DNA, 25 bp, Artificial
  probe
  misc_feature (1)..(25): SEQ ID NO: 3889; WAN024BIZ; Start 41; Stop 65
agttggaagtgattgaccagcttta

SEQ ID NO: 366375 - DNA, 25 bp, Artificial
  probe
  misc_feature (1)..(25): SEQ ID NO: 3890; WAN024ET3; Start 170; Stop 194
gctactctctccagatgttcaatat

SEQ ID NO: 366376 - DNA, 25 bp, Artificial
  probe
  misc_feature (1)..(25): SEQ ID NO: 3890; WAN024ET3; Start 169; Stop 193
tgctactctctccagatgttcaata

SEQ ID NO: 366377 - DNA, 25 bp, Artificial
  probe
  misc_feature (1)..(25): SEQ ID NO: 3890; WAN024ET3; Start 131; Stop 155
ccaggattataacgacaagagatga

SEQ ID NO: 366378 - DNA, 25 bp, Artificial
  probe
  misc_feature (1)..(25): SEQ ID NO: 3890; WAN024ET3; Start 130; Stop 154
tccaggattataacgacaagagatg

SEQ ID NO: 366379 - DNA, 25 bp, Artificial
  probe
  misc_feature (1)..(25): SEQ ID NO: 3890; WAN024ET3; Start 171; Stop 195
ctactctctccagatgttcaatatc

SEQ ID NO: 366380 - DNA, 25 bp, Artificial
  probe
  misc_feature (1)..(25): SEQ ID NO: 3890; WAN024ET3; Start 129; Stop 153
ctccaggattataacgacaagagat

SEQ ID NO: 366381 - DNA, 25 bp, Artificial
  probe
  misc_feature (1)..(25): SEQ ID NO: 3890; WAN024ET3; Start 132; Stop 156
caggattataacgacaagagatgat

SEQ ID NO: 366382 - DNA, 25 bp, Artificial
  probe
  misc_feature (1)..(25): SEQ ID NO: 3890; WAN024ET3; Start 168; Stop 192
ctgctactctctccagatgttcaat

SEQ ID NO: 366383 - DNA, 25 bp, Artificial
  probe
  misc_feature (1)..(25): SEQ ID NO: 3890; WAN024ET3; Start 323; Stop 347
tctacataactagagcagtccacac

SEQ ID NO: 366384 - DNA, 25 bp, Artificial
  probe
  misc_feature (1)..(25): SEQ ID NO: 3890; WAN024ET3; Start 186; Stop 210
gttcaatatcttcaaaggcatccaa

SEQ ID NO: 366385 - DNA, 25 bp, Artificial
  probe
  misc_feature (1)..(25): SEQ ID NO: 3890; WAN024ET3; Start 324; Stop 348
ctacataactagagcagtccacacc

SEQ ID NO: 366386 - DNA, 25 bp, Artificial
  probe
  misc_feature (1)..(25): SEQ ID NO: 3890; WAN024ET3; Start 128; Stop 152
cctccaggattataacgacaagaga

SEQ ID NO: 366387 - DNA, 25 bp, Artificial
  probe
  misc_feature (1)..(25): SEQ ID NO: 3890; WAN024ET3; Start 185; Stop 209
tgttcaatatcttcaaaggcatcca

SEQ ID NO: 366388 - DNA, 25 bp, Artificial
  probe
  misc_feature (1)..(25): SEQ ID NO: 3890; WAN024ET3; Start 189; Stop 213
caatatcttcaaaggcatccaagtt

SEQ ID NO: 366389 - DNA, 25 bp, Artificial
  probe
  misc_feature (1)..(25): SEQ ID NO: 3890; WAN024ET3; Start 188; Stop 212
tcaatatcttcaaaggcatccaagt

SEQ ID NO: 366390 - DNA, 25 bp, Artificial
  probe
  misc_feature (1)..(25): SEQ ID NO: 3890; WAN024ET3; Start 187; Stop 211
ttcaatatcttcaaaggcatccaag

SEQ ID NO: 366391 - DNA, 25 bp, Artificial
  probe
  misc_feature (1)..(25): SEQ ID NO: 3890; WAN024ET3; Start 184; Stop 208
atgttcaatatcttcaaaggcatcc

SEQ ID NO: 366392 - DNA, 25 bp, Artificial
  probe
  misc_feature (1)..(25): SEQ ID NO: 3890; WAN024ET3; Start 193; Stop 217
atcttcaaaggcatccaagttaatg

SEQ ID NO: 366393 - DNA, 25 bp, Artificial
  probe
  misc_feature (1)..(25): SEQ ID NO: 3890; WAN024ET3; Start 275; Stop 299
aacataatctcagaacccagaaagt

SEQ ID NO: 366394 - DNA, 25 bp, Artificial
  probe
  misc_feature (1)..(25): SEQ ID NO: 3890; WAN024ET3; Start 140; Stop 164
taacgacaagagatgatttctggaa

SEQ ID NO: 366395 - DNA, 25 bp, Artificial
  probe
  misc_feature (1)..(25): SEQ ID NO: 3890; WAN024ET3; Start 139; Stop 163
ataacgacaagagatgatttctgga

SEQ ID NO: 366396 - DNA, 25 bp, Artificial
  probe
  misc_feature (1)..(25): SEQ ID NO: 3890; WAN024ET3; Start 409; Stop 433
atattccttaaagcccttgttccac

SEQ ID NO: 366397 - DNA, 25 bp, Artificial
  probe
  misc_feature (1)..(25): SEQ ID NO: 3890; WAN024ET3; Start 276; Stop 300
acataatctcagaacccagaaagtc

SEQ ID NO: 366398 - DNA, 25 bp, Artificial
  probe
  misc_feature (1)..(25): SEQ ID NO: 3890; WAN024ET3; Start 273; Stop 297
agaacataatctcagaacccagaaa

SEQ ID NO: 366399 - DNA, 25 bp, Artificial
  probe
  misc_feature (1)..(25): SEQ ID NO: 3890; WAN024ET3; Start 141; Stop 165
aacgacaagagatgatttctggaat

SEQ ID NO: 366400 - DNA, 25 bp, Artificial
  probe
  misc_feature (1)..(25): SEQ ID NO: 3890; WAN024ET3; Start 274; Stop 298
gaacataatctcagaacccagaaag

SEQ ID NO: 366401 - DNA, 25 bp, Artificial
  probe
  misc_feature (1)..(25): SEQ ID NO: 3890; WAN024ET3; Start 133; Stop 157
aggattataacgacaagagatgatt

SEQ ID NO: 366402 - DNA, 25 bp, Artificial
  probe
  misc_feature (1)..(25): SEQ ID NO: 3890; WAN024ET3; Start 277; Stop 301
cataatctcagaacccagaaagtcc

SEQ ID NO: 366403 - DNA, 25 bp, Artificial
  probe
  misc_feature (1)..(25): SEQ ID NO: 3890; WAN024ET3; Start 175; Stop 199
tctctccagatgttcaatatcttca

SEQ ID NO: 366404 - DNA, 25 bp, Artificial
  probe
  misc_feature (1)..(25): SEQ ID NO: 3890; WAN024ET3; Start 173; Stop 197
actctctccagatgttcaatatctt

SEQ ID NO: 366405 - DNA, 25 bp, Artificial
  probe
  misc_feature (1)..(25): SEQ ID NO: 3890; WAN024ET3; Start 475; Stop 499
cttctcatcatacaagtgaaaggga

SEQ ID NO: 366406 - DNA, 25 bp, Artificial
  probe
  misc_feature (1)..(25): SEQ ID NO: 3890; WAN024ET3; Start 278; Stop 302
ataatctcagaacccagaaagtcca

SEQ ID NO: 366407 - DNA, 25 bp, Artificial
  probe
  misc_feature (1)..(25): SEQ ID NO: 3890; WAN024ET3; Start 142; Stop 166
acgacaagagatgatttctggaatg

SEQ ID NO: 366408 - DNA, 25 bp, Artificial
  probe
  misc_feature (1)..(25): SEQ ID NO: 3891; WAN024ESB; Start 400; Stop 424
gtaaacttgtcgcattctctttcta

SEQ ID NO: 366409 - DNA, 25 bp, Artificial
  probe
  misc_feature (1)..(25): SEQ ID NO: 3891; WAN024ESB; Start 394; Stop 418
atttcagtaaacttgtcgcattctc

SEQ ID NO: 366410 - DNA, 25 bp, Artificial
  probe
  misc_feature (1)..(25): SEQ ID NO: 3891; WAN024ESB; Start 393; Stop 417
catttcagtaaacttgtcgcattct

SEQ ID NO: 366411 - DNA, 25 bp, Artificial
  probe
  misc_feature (1)..(25): SEQ ID NO: 3891; WAN024ESB; Start 328; Stop 352
ctgctatctctacgttcttaacctc

SEQ ID NO: 366412 - DNA, 25 bp, Artificial
  probe
  misc_feature (1)..(25): SEQ ID NO: 3891; WAN024ESB; Start 399; Stop 423
agtaaacttgtcgcattctctttct

SEQ ID NO: 366413 - DNA, 25 bp, Artificial
  probe
  misc_feature (1)..(25): SEQ ID NO: 3891; WAN024ESB; Start 398; Stop 422
cagtaaacttgtcgcattctctttc

SEQ ID NO: 366414 - DNA, 25 bp, Artificial
  probe
  misc_feature (1)..(25): SEQ ID NO: 3891; WAN024ESB; Start 325; Stop 349
tacctgctatctctacgttcttaac

SEQ ID NO: 366415 - DNA, 25 bp, Artificial
  probe
  misc_feature (1)..(25): SEQ ID NO: 3891; WAN024ESB; Start 397; Stop 421
tcagtaaacttgtcgcattctcttt

SEQ ID NO: 366416 - DNA, 25 bp, Artificial
  probe
  misc_feature (1)..(25): SEQ ID NO: 3891; WAN024ESB; Start 396; Stop 420
ttcagtaaacttgtcgcattctctt

SEQ ID NO: 366417 - DNA, 25 bp, Artificial
  probe
  misc_feature (1)..(25): SEQ ID NO: 3891; WAN024ESB; Start 395; Stop 419
tttcagtaaacttgtcgcattctct

SEQ ID NO: 366418 - DNA, 25 bp, Artificial
  probe
  misc_feature (1)..(25): SEQ ID NO: 3891; WAN024ESB; Start 324; Stop 348
atacctgctatctctacgttcttaa

SEQ ID NO: 366419 - DNA, 25 bp, Artificial
  probe
  misc_feature (1)..(25): SEQ ID NO: 3891; WAN024ESB; Start 323; Stop 347
aatacctgctatctctacgttctta

SEQ ID NO: 366420 - DNA, 25 bp, Artificial
  probe
  misc_feature (1)..(25): SEQ ID NO: 3891; WAN024ESB; Start 208; Stop 232
cgttgggattacttgatgatatggg

SEQ ID NO: 366421 - DNA, 25 bp, Artificial
  probe
  misc_feature (1)..(25): SEQ ID NO: 3891; WAN024ESB; Start 401; Stop 425
taaacttgtcgcattctctttctag

SEQ ID NO: 366422 - DNA, 25 bp, Artificial
  probe
  misc_feature (1)..(25): SEQ ID NO: 3891; WAN024ESB; Start 327; Stop 351
cctgctatctctacgttcttaacct

SEQ ID NO: 366423 - DNA, 25 bp, Artificial
  probe
  misc_feature (1)..(25): SEQ ID NO: 3891; WAN024ESB; Start 64; Stop 88
atcctagtttcagtcttggtagaag

SEQ ID NO: 366424 - DNA, 25 bp, Artificial
  probe
  misc_feature (1)..(25): SEQ ID NO: 3891; WAN024ESB; Start 66; Stop 90
cctagtttcagtcttggtagaagtg

SEQ ID NO: 366425 - DNA, 25 bp, Artificial
  probe
  misc_feature (1)..(25): SEQ ID NO: 3891; WAN024ESB; Start 65; Stop 89
tcctagtttcagtcttggtagaagt

SEQ ID NO: 366426 - DNA, 25 bp, Artificial
  probe
  misc_feature (1)..(25): SEQ ID NO: 3891; WAN024ESB; Start 68; Stop 92
tagtttcagtcttggtagaagtgat

SEQ ID NO: 366427 - DNA, 25 bp, Artificial
  probe
  misc_feature (1)..(25): SEQ ID NO: 3891; WAN024ESB; Start 326; Stop 350
acctgctatctctacgttcttaacc

SEQ ID NO: 366428 - DNA, 25 bp, Artificial
  probe
  misc_feature (1)..(25): SEQ ID NO: 3891; WAN024ESB; Start 207; Stop 231
gcgttgggattacttgatgatatgg

SEQ ID NO: 366429 - DNA, 25 bp, Artificial
  probe
  misc_feature (1)..(25): SEQ ID NO: 3891; WAN024ESB; Start 206; Stop 230
ggcgttgggattacttgatgatatg

SEQ ID NO: 366430 - DNA, 25 bp, Artificial
  probe
  misc_feature (1)..(25): SEQ ID NO: 3891; WAN024ESB; Start 67; Stop 91
ctagtttcagtcttggtagaagtga

SEQ ID NO: 366431 - DNA, 25 bp, Artificial
  probe
  misc_feature (1)..(25): SEQ ID NO: 3891; WAN024ESB; Start 388; Stop 412
taacacatttcagtaaacttgtcgc

SEQ ID NO: 366432 - DNA, 25 bp, Artificial
  probe
  misc_feature (1)..(25): SEQ ID NO: 3891; WAN024ESB; Start 329; Stop 353
tgctatctctacgttcttaacctcg

SEQ ID NO: 366433 - DNA, 25 bp, Artificial
  probe
  misc_feature (1)..(25): SEQ ID NO: 3891; WAN024ESB; Start 392; Stop 416
acatttcagtaaacttgtcgcattc

SEQ ID NO: 366434 - DNA, 25 bp, Artificial
  probe
  misc_feature (1)..(25): SEQ ID NO: 3891; WAN024ESB; Start 391; Stop 415
cacatttcagtaaacttgtcgcatt

SEQ ID NO: 366435 - DNA, 25 bp, Artificial
  probe
  misc_feature (1)..(25): SEQ ID NO: 3891; WAN024ESB; Start 69; Stop 93
agtttcagtcttggtagaagtgatc

SEQ ID NO: 366436 - DNA, 25 bp, Artificial
  probe
  misc_feature (1)..(25): SEQ ID NO: 3891; WAN024ESB; Start 387; Stop 411
gtaacacatttcagtaaacttgtcg

SEQ ID NO: 366437 - DNA, 25 bp, Artificial
  probe
  misc_feature (1)..(25): SEQ ID NO: 3891; WAN024ESB; Start 63; Stop 87
tatcctagtttcagtcttggtagaa

SEQ ID NO: 366438 - DNA, 25 bp, Artificial
  probe
  misc_feature (1)..(25): SEQ ID NO: 3891; WAN024ESB; Start 62; Stop 86
ttatcctagtttcagtcttggtaga

SEQ ID NO: 366439 - DNA, 25 bp, Artificial
  probe
  misc_feature (1)..(25): SEQ ID NO: 3891; WAN024ESB; Start 59; Stop 83
gaattatcctagtttcagtcttggt

SEQ ID NO: 366440 - DNA, 25 bp, Artificial
  probe
  misc_feature (1)..(25): SEQ ID NO: 3891; WAN024ESB; Start 255; Stop 279
tctttatgactcctttctaggcttg

SEQ ID NO: 366441 - DNA, 25 bp, Artificial
  probe
  misc_feature (1)..(25): SEQ ID NO: 3892; WAN024EWY; Start 69; Stop 93
cagtaatcggtccatttgtcagaac

SEQ ID NO: 366442 - DNA, 25 bp, Artificial
  probe
  misc_feature (1)..(25): SEQ ID NO: 3892; WAN024EWY; Start 66; Stop 90
atacagtaatcggtccatttgtcag

SEQ ID NO: 366443 - DNA, 25 bp, Artificial
  probe
  misc_feature (1)..(25): SEQ ID NO: 3892; WAN024EWY; Start 65; Stop 89
gatacagtaatcggtccatttgtca

SEQ ID NO: 366444 - DNA, 25 bp, Artificial
  probe
  misc_feature (1)..(25): SEQ ID NO: 3892; WAN024EWY; Start 213; Stop 237
gcaaactagaaactggcaaacctaa

SEQ ID NO: 366445 - DNA, 25 bp, Artificial
  probe
  misc_feature (1)..(25): SEQ ID NO: 3892; WAN024EWY; Start 67; Stop 91
tacagtaatcggtccatttgtcaga

SEQ ID NO: 366446 - DNA, 25 bp, Artificial
  probe
  misc_feature (1)..(25): SEQ ID NO: 3892; WAN024EWY; Start 52; Stop 76
gacaaccttacccgatacagtaatc

SEQ ID NO: 366447 - DNA, 25 bp, Artificial
  probe
  misc_feature (1)..(25): SEQ ID NO: 3892; WAN024EWY; Start 51; Stop 75
tgacaaccttacccgatacagtaat

SEQ ID NO: 366448 - DNA, 25 bp, Artificial
  probe
  misc_feature (1)..(25): SEQ ID NO: 3892; WAN024EWY; Start 212; Stop 236
agcaaactagaaactggcaaaccta

SEQ ID NO: 366449 - DNA, 25 bp, Artificial
  probe
  misc_feature (1)..(25): SEQ ID NO: 3892; WAN024EWY; Start 68; Stop 92
acagtaatcggtccatttgtcagaa

SEQ ID NO: 366450 - DNA, 25 bp, Artificial
  probe
  misc_feature (1)..(25): SEQ ID NO: 3892; WAN024EWY; Start 50; Stop 74
ctgacaaccttacccgatacagtaa

SEQ ID NO: 366451 - DNA, 25 bp, Artificial
  probe
  misc_feature (1)..(25): SEQ ID NO: 3892; WAN024EWY; Start 70; Stop 94
agtaatcggtccatttgtcagaacg

SEQ ID NO: 366452 - DNA, 25 bp, Artificial
  probe
  misc_feature (1)..(25): SEQ ID NO: 3892; WAN024EWY; Start 137; Stop 161
aagccattgatgacatcagacagaa

SEQ ID NO: 366453 - DNA, 25 bp, Artificial
  probe
  misc_feature (1)..(25): SEQ ID NO: 3892; WAN024EWY; Start 81; Stop 105
catttgtcagaacgacctcatctcc

SEQ ID NO: 366454 - DNA, 25 bp, Artificial
  probe
  misc_feature (1)..(25): SEQ ID NO: 3892; WAN024EWY; Start 80; Stop 104
ccatttgtcagaacgacctcatctc

SEQ ID NO: 366455 - DNA, 25 bp, Artificial
  probe
  misc_feature (1)..(25): SEQ ID NO: 3892; WAN024EWY; Start 145; Stop 169
gatgacatcagacagaaagccttgg

SEQ ID NO: 366456 - DNA, 25 bp, Artificial
  probe
  misc_feature (1)..(25): SEQ ID NO: 3892; WAN024EWY; Start 78; Stop 102
gtccatttgtcagaacgacctcatc

SEQ ID NO: 366457 - DNA, 25 bp, Artificial
  probe
  misc_feature (1)..(25): SEQ ID NO: 3892; WAN024EWY; Start 46; Stop 70
cacactgacaaccttacccgataca

SEQ ID NO: 366458 - DNA, 25 bp, Artificial
  probe
  misc_feature (1)..(25): SEQ ID NO: 3892; WAN024EWY; Start 79; Stop 103
tccatttgtcagaacgacctcatct

SEQ ID NO: 366459 - DNA, 25 bp, Artificial
  probe
  misc_feature (1)..(25): SEQ ID NO: 3892; WAN024EWY; Start 72; Stop 96
taatcggtccatttgtcagaacgac

SEQ ID NO: 366460 - DNA, 25 bp, Artificial
  probe
  misc_feature (1)..(25): SEQ ID NO: 3892; WAN024EWY; Start 71; Stop 95
gtaatcggtccatttgtcagaacga

SEQ ID NO: 366461 - DNA, 25 bp, Artificial
  probe
  misc_feature (1)..(25): SEQ ID NO: 3892; WAN024EWY; Start 211; Stop 235
cagcaaactagaaactggcaaacct

SEQ ID NO: 366462 - DNA, 25 bp, Artificial
  probe
  misc_feature (1)..(25): SEQ ID NO: 3892; WAN024EWY; Start 47; Stop 71
acactgacaaccttacccgatacag

SEQ ID NO: 366463 - DNA, 25 bp, Artificial
  probe
  misc_feature (1)..(25): SEQ ID NO: 3892; WAN024EWY; Start 112; Stop 136
cagttgacgttcaaagaggatgaaa

SEQ ID NO: 366464 - DNA, 25 bp, Artificial
  probe
  misc_feature (1)..(25): SEQ ID NO: 3892; WAN024EWY; Start 82; Stop 106
atttgtcagaacgacctcatctccc

SEQ ID NO: 366465 - DNA, 25 bp, Artificial
  probe
  misc_feature (1)..(25): SEQ ID NO: 3892; WAN024EWY; Start 40; Stop 64
aattcccacactgacaaccttaccc

SEQ ID NO: 366466 - DNA, 25 bp, Artificial
  probe
  misc_feature (1)..(25): SEQ ID NO: 3892; WAN024EWY; Start 142; Stop 166
attgatgacatcagacagaaagcct

SEQ ID NO: 366467 - DNA, 25 bp, Artificial
  probe
  misc_feature (1)..(25): SEQ ID NO: 3892; WAN024EWY; Start 141; Stop 165
cattgatgacatcagacagaaagcc

SEQ ID NO: 366468 - DNA, 25 bp, Artificial
  probe
  misc_feature (1)..(25): SEQ ID NO: 3892; WAN024EWY; Start 140; Stop 164
ccattgatgacatcagacagaaagc

SEQ ID NO: 366469 - DNA, 25 bp, Artificial
  probe
  misc_feature (1)..(25): SEQ ID NO: 3892; WAN024EWY; Start 139; Stop 163
gccattgatgacatcagacagaaag

SEQ ID NO: 366470 - DNA, 25 bp, Artificial
  probe
  misc_feature (1)..(25): SEQ ID NO: 3892; WAN024EWY; Start 146; Stop 170
atgacatcagacagaaagccttggg

SEQ ID NO: 366471 - DNA, 25 bp, Artificial
  probe
  misc_feature (1)..(25): SEQ ID NO: 3892; WAN024EWY; Start 45; Stop 69
ccacactgacaaccttacccgatac

SEQ ID NO: 366472 - DNA, 25 bp, Artificial
  probe
  misc_feature (1)..(25): SEQ ID NO: 3892; WAN024EWY; Start 143; Stop 167
ttgatgacatcagacagaaagcctt

SEQ ID NO: 366473 - DNA, 25 bp, Artificial
  probe
  misc_feature (1)..(25): SEQ ID NO: 3892; WAN024EWY; Start 138; Stop 162
agccattgatgacatcagacagaaa

SEQ ID NO: 366474 - DNA, 25 bp, Artificial
  probe
  misc_feature (1)..(25): SEQ ID NO: 3893; WAN024FTN; Start 228; Stop 252
actatcagagactcgtaatacaggt

SEQ ID NO: 366475 - DNA, 25 bp, Artificial
  probe
  misc_feature (1)..(25): SEQ ID NO: 3893; WAN024FTN; Start 225; Stop 249
tggactatcagagactcgtaataca

SEQ ID NO: 366476 - DNA, 25 bp, Artificial
  probe
  misc_feature (1)..(25): SEQ ID NO: 3893; WAN024FTN; Start 224; Stop 248
gtggactatcagagactcgtaatac

SEQ ID NO: 366477 - DNA, 25 bp, Artificial
  probe
  misc_feature (1)..(25): SEQ ID NO: 3893; WAN024FTN; Start 227; Stop 251
gactatcagagactcgtaatacagg

SEQ ID NO: 366478 - DNA, 25 bp, Artificial
  probe
  misc_feature (1)..(25): SEQ ID NO: 3893; WAN024FTN; Start 226; Stop 250
ggactatcagagactcgtaatacag

SEQ ID NO: 366479 - DNA, 25 bp, Artificial
  probe
  misc_feature (1)..(25): SEQ ID NO: 3893; WAN024FTN; Start 223; Stop 247
ggtggactatcagagactcgtaata

SEQ ID NO: 366480 - DNA, 25 bp, Artificial
  probe
  misc_feature (1)..(25): SEQ ID NO: 3893; WAN024FTN; Start 285; Stop 309
tcttgattctgatgattggattaca

SEQ ID NO: 366481 - DNA, 25 bp, Artificial
  probe
  misc_feature (1)..(25): SEQ ID NO: 3893; WAN024FTN; Start 229; Stop 253
ctatcagagactcgtaatacaggtc

SEQ ID NO: 366482 - DNA, 25 bp, Artificial
  probe
  misc_feature (1)..(25): SEQ ID NO: 3893; WAN024FTN; Start 222; Stop 246
tggtggactatcagagactcgtaat

SEQ ID NO: 366483 - DNA, 25 bp, Artificial
  probe
  misc_feature (1)..(25): SEQ ID NO: 3893; WAN024FTN; Start 221; Stop 245
atggtggactatcagagactcgtaa

SEQ ID NO: 366484 - DNA, 25 bp, Artificial
  probe
  misc_feature (1)..(25): SEQ ID NO: 3893; WAN024FTN; Start 220; Stop 244
aatggtggactatcagagactcgta

SEQ ID NO: 366485 - DNA, 25 bp, Artificial
  probe
  misc_feature (1)..(25): SEQ ID NO: 3893; WAN024FTN; Start 284; Stop 308
ttcttgattctgatgattggattac

SEQ ID NO: 366486 - DNA, 25 bp, Artificial
  probe
  misc_feature (1)..(25): SEQ ID NO: 3893; WAN024FTN; Start 164; Stop 188
atatttgtgaagagtatgcccagaa

SEQ ID NO: 366487 - DNA, 25 bp, Artificial
  probe
  misc_feature (1)..(25): SEQ ID NO: 3893; WAN024FTN; Start 643; Stop 667
tttattgggaatgatgcggctatta

SEQ ID NO: 366488 - DNA, 25 bp, Artificial
  probe
  misc_feature (1)..(25): SEQ ID NO: 3893; WAN024FTN; Start 165; Stop 189
tatttgtgaagagtatgcccagaag

SEQ ID NO: 366489 - DNA, 25 bp, Artificial
  probe
  misc_feature (1)..(25): SEQ ID NO: 3893; WAN024FTN; Start 286; Stop 310
cttgattctgatgattggattacaa

SEQ ID NO: 366490 - DNA, 25 bp, Artificial
  probe
  misc_feature (1)..(25): SEQ ID NO: 3893; WAN024FTN; Start 172; Stop 196
gaagagtatgcccagaagtatcatt

SEQ ID NO: 366491 - DNA, 25 bp, Artificial
  probe
  misc_feature (1)..(25): SEQ ID NO: 3893; WAN024FTN; Start 173; Stop 197
aagagtatgcccagaagtatcattt

SEQ ID NO: 366492 - DNA, 25 bp, Artificial
  probe
  misc_feature (1)..(25): SEQ ID NO: 3893; WAN024FTN; Start 521; Stop 545
tgtttgagaagaacggaatagagtt

SEQ ID NO: 366493 - DNA, 25 bp, Artificial
  probe
  misc_feature (1)..(25): SEQ ID NO: 3893; WAN024FTN; Start 520; Stop 544
ttgtttgagaagaacggaatagagt

SEQ ID NO: 366494 - DNA, 25 bp, Artificial
  probe
  misc_feature (1)..(25): SEQ ID NO: 3893; WAN024FTN; Start 644; Stop 668
ttattgggaatgatgcggctattac

SEQ ID NO: 366495 - DNA, 25 bp, Artificial
  probe
  misc_feature (1)..(25): SEQ ID NO: 3893; WAN024FTN; Start 522; Stop 546
gtttgagaagaacggaatagagttt

SEQ ID NO: 366496 - DNA, 25 bp, Artificial
  probe
  misc_feature (1)..(25): SEQ ID NO: 3893; WAN024FTN; Start 515; Stop 539
gagaattgtttgagaagaacggaat

SEQ ID NO: 366497 - DNA, 25 bp, Artificial
  probe
  misc_feature (1)..(25): SEQ ID NO: 3893; WAN024FTN; Start 512; Stop 536
aaagagaattgtttgagaagaacgg

SEQ ID NO: 366498 - DNA, 25 bp, Artificial
  probe
  misc_feature (1)..(25): SEQ ID NO: 3893; WAN024FTN; Start 168; Stop 192
ttgtgaagagtatgcccagaagtat

SEQ ID NO: 366499 - DNA, 25 bp, Artificial
  probe
  misc_feature (1)..(25): SEQ ID NO: 3893; WAN024FTN; Start 523; Stop 547
tttgagaagaacggaatagagtttc

SEQ ID NO: 366500 - DNA, 25 bp, Artificial
  probe
  misc_feature (1)..(25): SEQ ID NO: 3893; WAN024FTN; Start 519; Stop 543
attgtttgagaagaacggaatagag

SEQ ID NO: 366501 - DNA, 25 bp, Artificial
  probe
  misc_feature (1)..(25): SEQ ID NO: 3893; WAN024FTN; Start 514; Stop 538
agagaattgtttgagaagaacggaa

SEQ ID NO: 366502 - DNA, 25 bp, Artificial
  probe
  misc_feature (1)..(25): SEQ ID NO: 3893; WAN024FTN; Start 513; Stop 537
aagagaattgtttgagaagaacgga

SEQ ID NO: 366503 - DNA, 25 bp, Artificial
  probe
  misc_feature (1)..(25): SEQ ID NO: 3893; WAN024FTN; Start 84; Stop 108
tattgatagcgtcatttctcaggaa

SEQ ID NO: 366504 - DNA, 25 bp, Artificial
  probe
  misc_feature (1)..(25): SEQ ID NO: 3893; WAN024FTN; Start 85; Stop 109
attgatagcgtcatttctcaggaat

SEQ ID NO: 366505 - DNA, 25 bp, Artificial
  probe
  misc_feature (1)..(25): SEQ ID NO: 3893; WAN024FTN; Start 83; Stop 107
gtattgatagcgtcatttctcagga

SEQ ID NO: 366506 - DNA, 25 bp, Artificial
  probe
  misc_feature (1)..(25): SEQ ID NO: 3893; WAN024FTN; Start 80; Stop 104
gttgtattgatagcgtcatttctca

SEQ ID NO: 366507 - DNA, 25 bp, Artificial
  probe
  misc_feature (1)..(25): SEQ ID NO: 3894; WAN024FQL; Start 948; Stop 972
ttgagtgttatgatgtagaagcgat

SEQ ID NO: 366508 - DNA, 25 bp, Artificial
  probe
  misc_feature (1)..(25): SEQ ID NO: 3894; WAN024FQL; Start 934; Stop 958
taatggctatctggttgagtgttat

SEQ ID NO: 366509 - DNA, 25 bp, Artificial
  probe
  misc_feature (1)..(25): SEQ ID NO: 3894; WAN024FQL; Start 919; Stop 943
tgttgaagatggagttaatggctat

SEQ ID NO: 366510 - DNA, 25 bp, Artificial
  probe
  misc_feature (1)..(25): SEQ ID NO: 3894; WAN024FQL; Start 918; Stop 942
ttgttgaagatggagttaatggcta

SEQ ID NO: 366511 - DNA, 25 bp, Artificial
  probe
  misc_feature (1)..(25): SEQ ID NO: 3894; WAN024FQL; Start 933; Stop 957
ttaatggctatctggttgagtgtta

SEQ ID NO: 366512 - DNA, 25 bp, Artificial
  probe
  misc_feature (1)..(25): SEQ ID NO: 3894; WAN024FQL; Start 951; Stop 975
agtgttatgatgtagaagcgatgtc

SEQ ID NO: 366513 - DNA, 25 bp, Artificial
  probe
  misc_feature (1)..(25): SEQ ID NO: 3894; WAN024FQL; Start 950; Stop 974
gagtgttatgatgtagaagcgatgt

SEQ ID NO: 366514 - DNA, 25 bp, Artificial
  probe
  misc_feature (1)..(25): SEQ ID NO: 3894; WAN024FQL; Start 949; Stop 973
tgagtgttatgatgtagaagcgatg

SEQ ID NO: 366515 - DNA, 25 bp, Artificial
  probe
  misc_feature (1)..(25): SEQ ID NO: 3894; WAN024FQL; Start 945; Stop 969
tggttgagtgttatgatgtagaagc

SEQ ID NO: 366516 - DNA, 25 bp, Artificial
  probe
  misc_feature (1)..(25): SEQ ID NO: 3894; WAN024FQL; Start 944; Stop 968
ctggttgagtgttatgatgtagaag

SEQ ID NO: 366517 - DNA, 25 bp, Artificial
  probe
  misc_feature (1)..(25): SEQ ID NO: 3894; WAN024FQL; Start 935; Stop 959
aatggctatctggttgagtgttatg

SEQ ID NO: 366518 - DNA, 25 bp, Artificial
  probe
  misc_feature (1)..(25): SEQ ID NO: 3894; WAN024FQL; Start 939; Stop 963
gctatctggttgagtgttatgatgt

SEQ ID NO: 366519 - DNA, 25 bp, Artificial
  probe
  misc_feature (1)..(25): SEQ ID NO: 3894; WAN024FQL; Start 916; Stop 940
aattgttgaagatggagttaatggc

SEQ ID NO: 366520 - DNA, 25 bp, Artificial
  probe
  misc_feature (1)..(25): SEQ ID NO: 3894; WAN024FQL; Start 947; Stop 971
gttgagtgttatgatgtagaagcga

SEQ ID NO: 366521 - DNA, 25 bp, Artificial
  probe
  misc_feature (1)..(25): SEQ ID NO: 3894; WAN024FQL; Start 920; Stop 944
gttgaagatggagttaatggctatc

SEQ ID NO: 366522 - DNA, 25 bp, Artificial
  probe
  misc_feature (1)..(25): SEQ ID NO: 3894; WAN024FQL; Start 917; Stop 941
attgttgaagatggagttaatggct

SEQ ID NO: 366523 - DNA, 25 bp, Artificial
  probe
  misc_feature (1)..(25): SEQ ID NO: 3894; WAN024FQL; Start 1062; Stop 1086
aagaccgaattatacatcagtggat

SEQ ID NO: 366524 - DNA, 25 bp, Artificial
  probe
  misc_feature (1)..(25): SEQ ID NO: 3894; WAN024FQL; Start 446; Stop 470
attatcactctcactcaagaagacc

SEQ ID NO: 366525 - DNA, 25 bp, Artificial
  probe
  misc_feature (1)..(25): SEQ ID NO: 3894; WAN024FQL; Start 438; Stop 462
cagacaagattatcactctcactca

SEQ ID NO: 366526 - DNA, 25 bp, Artificial
  probe
  misc_feature (1)..(25): SEQ ID NO: 3894; WAN024FQL; Start 932; Stop 956
gttaatggctatctggttgagtgtt

SEQ ID NO: 366527 - DNA, 25 bp, Artificial
  probe
  misc_feature (1)..(25): SEQ ID NO: 3894; WAN024FQL; Start 943; Stop 967
tctggttgagtgttatgatgtagaa

SEQ ID NO: 366528 - DNA, 25 bp, Artificial
  probe
  misc_feature (1)..(25): SEQ ID NO: 3894; WAN024FQL; Start 952; Stop 976
gtgttatgatgtagaagcgatgtct

SEQ ID NO: 366529 - DNA, 25 bp, Artificial
  probe
  misc_feature (1)..(25): SEQ ID NO: 3894; WAN024FQL; Start 938; Stop 962
ggctatctggttgagtgttatgatg

SEQ ID NO: 366530 - DNA, 25 bp, Artificial
  probe
  misc_feature (1)..(25): SEQ ID NO: 3894; WAN024FQL; Start 930; Stop 954
gagttaatggctatctggttgagtg

SEQ ID NO: 366531 - DNA, 25 bp, Artificial
  probe
  misc_feature (1)..(25): SEQ ID NO: 3894; WAN024FQL; Start 942; Stop 966
atctggttgagtgttatgatgtaga

SEQ ID NO: 366532 - DNA, 25 bp, Artificial
  probe
  misc_feature (1)..(25): SEQ ID NO: 3894; WAN024FQL; Start 441; Stop 465
acaagattatcactctcactcaaga

SEQ ID NO: 366533 - DNA, 25 bp, Artificial
  probe
  misc_feature (1)..(25): SEQ ID NO: 3894; WAN024FQL; Start 439; Stop 463
agacaagattatcactctcactcaa

SEQ ID NO: 366534 - DNA, 25 bp, Artificial
  probe
  misc_feature (1)..(25): SEQ ID NO: 3894; WAN024FQL; Start 926; Stop 950
gatggagttaatggctatctggttg

SEQ ID NO: 366535 - DNA, 25 bp, Artificial
  probe
  misc_feature (1)..(25): SEQ ID NO: 3894; WAN024FQL; Start 1065; Stop 1089
accgaattatacatcagtggataga

SEQ ID NO: 366536 - DNA, 25 bp, Artificial
  probe
  misc_feature (1)..(25): SEQ ID NO: 3894; WAN024FQL; Start 1063; Stop 1087
agaccgaattatacatcagtggata

SEQ ID NO: 366537 - DNA, 25 bp, Artificial
  probe
  misc_feature (1)..(25): SEQ ID NO: 3894; WAN024FQL; Start 936; Stop 960
atggctatctggttgagtgttatga

SEQ ID NO: 366538 - DNA, 25 bp, Artificial
  probe
  misc_feature (1)..(25): SEQ ID NO: 3894; WAN024FQL; Start 440; Stop 464
gacaagattatcactctcactcaag

SEQ ID NO: 366539 - DNA, 25 bp, Artificial
  probe
  misc_feature (1)..(25): SEQ ID NO: 3894; WAN024FQL; Start 437; Stop 461
gcagacaagattatcactctcactc

SEQ ID NO: 366540 - DNA, 25 bp, Artificial
  probe
  misc_feature (1)..(25): SEQ ID NO: 3895; WAN024CG7; Start 341; Stop 365
tagaggtaaccataagcagtatcca

SEQ ID NO: 366541 - DNA, 25 bp, Artificial
  probe
  misc_feature (1)..(25): SEQ ID NO: 3895; WAN024CG7; Start 340; Stop 364
gtagaggtaaccataagcagtatcc

SEQ ID NO: 366542 - DNA, 25 bp, Artificial
  probe
  misc_feature (1)..(25): SEQ ID NO: 3895; WAN024CG7; Start 339; Stop 363
tgtagaggtaaccataagcagtatc

SEQ ID NO: 366543 - DNA, 25 bp, Artificial
  probe
  misc_feature (1)..(25): SEQ ID NO: 3895; WAN024CG7; Start 337; Stop 361
cttgtagaggtaaccataagcagta

SEQ ID NO: 366544 - DNA, 25 bp, Artificial
  probe
  misc_feature (1)..(25): SEQ ID NO: 3895; WAN024CG7; Start 279; Stop 303
tgtcagcgatgatattagtgaagtt

SEQ ID NO: 366545 - DNA, 25 bp, Artificial
  probe
  misc_feature (1)..(25): SEQ ID NO: 3895; WAN024CG7; Start 278; Stop 302
ttgtcagcgatgatattagtgaagt

SEQ ID NO: 366546 - DNA, 25 bp, Artificial
  probe
  misc_feature (1)..(25): SEQ ID NO: 3895; WAN024CG7; Start 277; Stop 301
cttgtcagcgatgatattagtgaag

SEQ ID NO: 366547 - DNA, 25 bp, Artificial
  probe
  misc_feature (1)..(25): SEQ ID NO: 3895; WAN024CG7; Start 338; Stop 362
ttgtagaggtaaccataagcagtat

SEQ ID NO: 366548 - DNA, 25 bp, Artificial
  probe
  misc_feature (1)..(25): SEQ ID NO: 3895; WAN024CG7; Start 276; Stop 300
ccttgtcagcgatgatattagtgaa

SEQ ID NO: 366549 - DNA, 25 bp, Artificial
  probe
  misc_feature (1)..(25): SEQ ID NO: 3895; WAN024CG7; Start 342; Stop 366
agaggtaaccataagcagtatccac

SEQ ID NO: 366550 - DNA, 25 bp, Artificial
  probe
  misc_feature (1)..(25): SEQ ID NO: 3895; WAN024CG7; Start 10; Stop 34
acgaggaaggacttgtgtagagatt

SEQ ID NO: 366551 - DNA, 25 bp, Artificial
  probe
  misc_feature (1)..(25): SEQ ID NO: 3895; WAN024CG7; Start 181; Stop 205
gctataccaagttgccaatttaaga

SEQ ID NO: 366552 - DNA, 25 bp, Artificial
  probe
  misc_feature (1)..(25): SEQ ID NO: 3895; WAN024CG7; Start 183; Stop 207
tataccaagttgccaatttaagacc

SEQ ID NO: 366553 - DNA, 25 bp, Artificial
  probe
  misc_feature (1)..(25): SEQ ID NO: 3895; WAN024CG7; Start 17; Stop 41
aggacttgtgtagagatttcttgag

SEQ ID NO: 366554 - DNA, 25 bp, Artificial
  probe
  misc_feature (1)..(25): SEQ ID NO: 3895; WAN024CG7; Start 14; Stop 38
ggaaggacttgtgtagagatttctt

SEQ ID NO: 366555 - DNA, 25 bp, Artificial
  probe
  misc_feature (1)..(25): SEQ ID NO: 3895; WAN024CG7; Start 12; Stop 36
gaggaaggacttgtgtagagatttc

SEQ ID NO: 366556 - DNA, 25 bp, Artificial
  probe
  misc_feature (1)..(25): SEQ ID NO: 3895; WAN024CG7; Start 180; Stop 204
cgctataccaagttgccaatttaag

SEQ ID NO: 366557 - DNA, 25 bp, Artificial
  probe
  misc_feature (1)..(25): SEQ ID NO: 3895; WAN024CG7; Start 16; Stop 40
aaggacttgtgtagagatttcttga

SEQ ID NO: 366558 - DNA, 25 bp, Artificial
  probe
  misc_feature (1)..(25): SEQ ID NO: 3895; WAN024CG7; Start 184; Stop 208
ataccaagttgccaatttaagacca

SEQ ID NO: 366559 - DNA, 25 bp, Artificial
  probe
  misc_feature (1)..(25): SEQ ID NO: 3895; WAN024CG7; Start 170; Stop 194
cgtttcatttcgctataccaagttg

SEQ ID NO: 366560 - DNA, 25 bp, Artificial
  probe
  misc_feature (1)..(25): SEQ ID NO: 3895; WAN024CG7; Start 15; Stop 39
gaaggacttgtgtagagatttcttg

SEQ ID NO: 366561 - DNA, 25 bp, Artificial
  probe
  misc_feature (1)..(25): SEQ ID NO: 3895; WAN024CG7; Start 275; Stop 299
gccttgtcagcgatgatattagtga

SEQ ID NO: 366562 - DNA, 25 bp, Artificial
  probe
  misc_feature (1)..(25): SEQ ID NO: 3895; WAN024CG7; Start 179; Stop 203
tcgctataccaagttgccaatttaa

SEQ ID NO: 366563 - DNA, 25 bp, Artificial
  probe
  misc_feature (1)..(25): SEQ ID NO: 3895; WAN024CG7; Start 178; Stop 202
ttcgctataccaagttgccaattta

SEQ ID NO: 366564 - DNA, 25 bp, Artificial
  probe
  misc_feature (1)..(25): SEQ ID NO: 3895; WAN024CG7; Start 62; Stop 86
cagacatactcctctacaaatggtg

SEQ ID NO: 366565 - DNA, 25 bp, Artificial
  probe
  misc_feature (1)..(25): SEQ ID NO: 3895; WAN024CG7; Start 19; Stop 43
gacttgtgtagagatttcttgagca

SEQ ID NO: 366566 - DNA, 25 bp, Artificial
  probe
  misc_feature (1)..(25): SEQ ID NO: 3895; WAN024CG7; Start 13; Stop 37
aggaaggacttgtgtagagatttct

SEQ ID NO: 366567 - DNA, 25 bp, Artificial
  probe
  misc_feature (1)..(25): SEQ ID NO: 3895; WAN024CG7; Start 171; Stop 195
gtttcatttcgctataccaagttgc

SEQ ID NO: 366568 - DNA, 25 bp, Artificial
  probe
  misc_feature (1)..(25): SEQ ID NO: 3895; WAN024CG7; Start 346; Stop 370
gtaaccataagcagtatccaccacg

SEQ ID NO: 366569 - DNA, 25 bp, Artificial
  probe
  misc_feature (1)..(25): SEQ ID NO: 3895; WAN024CG7; Start 26; Stop 50
gtagagatttcttgagcacggatac

SEQ ID NO: 366570 - DNA, 25 bp, Artificial
  probe
  misc_feature (1)..(25): SEQ ID NO: 3895; WAN024CG7; Start 280; Stop 304
gtcagcgatgatattagtgaagttt

SEQ ID NO: 366571 - DNA, 25 bp, Artificial
  probe
  misc_feature (1)..(25): SEQ ID NO: 3895; WAN024CG7; Start 176; Stop 200
atttcgctataccaagttgccaatt

SEQ ID NO: 366572 - DNA, 25 bp, Artificial
  probe
  misc_feature (1)..(25): SEQ ID NO: 3895; WAN024CG7; Start 25; Stop 49
tgtagagatttcttgagcacggata

SEQ ID NO: 366573 - DNA, 25 bp, Artificial
  probe
  misc_feature (1)..(25): SEQ ID NO: 3896; WAN0249YK; Start 31; Stop 55
atagtctattaaagggagcaggaaa

SEQ ID NO: 366574 - DNA, 25 bp, Artificial
  probe
  misc_feature (1)..(25): SEQ ID NO: 3896; WAN0249YK; Start 30; Stop 54
tatagtctattaaagggagcaggaa

SEQ ID NO: 366575 - DNA, 25 bp, Artificial
  probe
  misc_feature (1)..(25): SEQ ID NO: 3896; WAN0249YK; Start 29; Stop 53
ttatagtctattaaagggagcagga

SEQ ID NO: 366576 - DNA, 25 bp, Artificial
  probe
  misc_feature (1)..(25): SEQ ID NO: 3896; WAN0249YK; Start 28; Stop 52
tttatagtctattaaagggagcagg

SEQ ID NO: 366577 - DNA, 25 bp, Artificial
  probe
  misc_feature (1)..(25): SEQ ID NO: 3896; WAN0249YK; Start 32; Stop 56
tagtctattaaagggagcaggaaaa

SEQ ID NO: 366578 - DNA, 25 bp, Artificial
  probe
  misc_feature (1)..(25): SEQ ID NO: 3896; WAN0249YK; Start 73; Stop 97
gtttgaaactataactagctcttga

SEQ ID NO: 366579 - DNA, 25 bp, Artificial
  probe
  misc_feature (1)..(25): SEQ ID NO: 3896; WAN0249YK; Start 7; Stop 31
gtgtcttttgagattcaccatttta

SEQ ID NO: 366580 - DNA, 25 bp, Artificial
  probe
  misc_feature (1)..(25): SEQ ID NO: 3896; WAN0249YK; Start 75; Stop 99
ttgaaactataactagctcttgaaa

SEQ ID NO: 366581 - DNA, 25 bp, Artificial
  probe
  misc_feature (1)..(25): SEQ ID NO: 3896; WAN0249YK; Start 74; Stop 98
tttgaaactataactagctcttgaa

SEQ ID NO: 366582 - DNA, 25 bp, Artificial
  probe
  misc_feature (1)..(25): SEQ ID NO: 3896; WAN0249YK; Start 8; Stop 32
tgtcttttgagattcaccattttat

SEQ ID NO: 366583 - DNA, 25 bp, Artificial
  probe
  misc_feature (1)..(25): SEQ ID NO: 3896; WAN0249YK; Start 72; Stop 96
agtttgaaactataactagctcttg

SEQ ID NO: 366584 - DNA, 25 bp, Artificial
  probe
  misc_feature (1)..(25): SEQ ID NO: 3896; WAN0249YK; Start 13; Stop 37
tttgagattcaccattttatagtct

SEQ ID NO: 366585 - DNA, 25 bp, Artificial
  probe
  misc_feature (1)..(25): SEQ ID NO: 3896; WAN0249YK; Start 27; Stop 51
ttttatagtctattaaagggagcag

SEQ ID NO: 366586 - DNA, 25 bp, Artificial
  probe
  misc_feature (1)..(25): SEQ ID NO: 3896; WAN0249YK; Start 132; Stop 156
acaatagttactatagatttggagg

SEQ ID NO: 366587 - DNA, 25 bp, Artificial
  probe
  misc_feature (1)..(25): SEQ ID NO: 3896; WAN0249YK; Start 76; Stop 100
tgaaactataactagctcttgaaaa

SEQ ID NO: 366588 - DNA, 25 bp, Artificial
  probe
  misc_feature (1)..(25): SEQ ID NO: 3896; WAN0249YK; Start 12; Stop 36
ttttgagattcaccattttatagtc

SEQ ID NO: 366589 - DNA, 25 bp, Artificial
  probe
  misc_feature (1)..(25): SEQ ID NO: 3896; WAN0249YK; Start 11; Stop 35
cttttgagattcaccattttatagt

SEQ ID NO: 366590 - DNA, 25 bp, Artificial
  probe
  misc_feature (1)..(25): SEQ ID NO: 3896; WAN0249YK; Start 9; Stop 33
gtcttttgagattcaccattttata

SEQ ID NO: 366591 - DNA, 25 bp, Artificial
  probe
  misc_feature (1)..(25): SEQ ID NO: 3896; WAN0249YK; Start 26; Stop 50
attttatagtctattaaagggagca

SEQ ID NO: 366592 - DNA, 25 bp, Artificial
  probe
  misc_feature (1)..(25): SEQ ID NO: 3896; WAN0249YK; Start 14; Stop 38
ttgagattcaccattttatagtcta

SEQ ID NO: 366593 - DNA, 25 bp, Artificial
  probe
  misc_feature (1)..(25): SEQ ID NO: 3896; WAN0249YK; Start 25; Stop 49
cattttatagtctattaaagggagc

SEQ ID NO: 366594 - DNA, 25 bp, Artificial
  probe
  misc_feature (1)..(25): SEQ ID NO: 3896; WAN0249YK; Start 10; Stop 34
tcttttgagattcaccattttatag

SEQ ID NO: 366595 - DNA, 25 bp, Artificial
  probe
  misc_feature (1)..(25): SEQ ID NO: 3896; WAN0249YK; Start 15; Stop 39
tgagattcaccattttatagtctat

SEQ ID NO: 366596 - DNA, 25 bp, Artificial
  probe
  misc_feature (1)..(25): SEQ ID NO: 3896; WAN0249YK; Start 22; Stop 46
caccattttatagtctattaaaggg

SEQ ID NO: 366597 - DNA, 25 bp, Artificial
  probe
  misc_feature (1)..(25): SEQ ID NO: 3896; WAN0249YK; Start 23; Stop 47
accattttatagtctattaaaggga

SEQ ID NO: 366598 - DNA, 25 bp, Artificial
  probe
  misc_feature (1)..(25): SEQ ID NO: 3896; WAN0249YK; Start 119; Stop 143
caaaataagtggtacaatagttact

SEQ ID NO: 366599 - DNA, 25 bp, Artificial
  probe
  misc_feature (1)..(25): SEQ ID NO: 3896; WAN0249YK; Start 71; Stop 95
tagtttgaaactataactagctctt

SEQ ID NO: 366600 - DNA, 25 bp, Artificial
  probe
  misc_feature (1)..(25): SEQ ID NO: 3897; WAN024GKR; Start 196; Stop 220
atcttcataataacgaatctgacgc

SEQ ID NO: 366601 - DNA, 25 bp, Artificial
  probe
  misc_feature (1)..(25): SEQ ID NO: 3897; WAN024GKR; Start 80; Stop 104
gcagcgatattataaccttcagaga

SEQ ID NO: 366602 - DNA, 25 bp, Artificial
  probe
  misc_feature (1)..(25): SEQ ID NO: 3897; WAN024GKR; Start 76; Stop 100
aatggcagcgatattataaccttca

SEQ ID NO: 366603 - DNA, 25 bp, Artificial
  probe
  misc_feature (1)..(25): SEQ ID NO: 3897; WAN024GKR; Start 77; Stop 101
atggcagcgatattataaccttcag

SEQ ID NO: 366604 - DNA, 25 bp, Artificial
  probe
  misc_feature (1)..(25): SEQ ID NO: 3897; WAN024GKR; Start 79; Stop 103
ggcagcgatattataaccttcagag

SEQ ID NO: 366605 - DNA, 25 bp, Artificial
  probe
  misc_feature (1)..(25): SEQ ID NO: 3897; WAN024GKR; Start 75; Stop 99
taatggcagcgatattataaccttc

SEQ ID NO: 366606 - DNA, 25 bp, Artificial
  probe
  misc_feature (1)..(25): SEQ ID NO: 3897; WAN024GKR; Start 73; Stop 97
cttaatggcagcgatattataacct

SEQ ID NO: 366607 - DNA, 25 bp, Artificial
  probe
  misc_feature (1)..(25): SEQ ID NO: 3897; WAN024GKR; Start 72; Stop 96
tcttaatggcagcgatattataacc

SEQ ID NO: 366608 - DNA, 25 bp, Artificial
  probe
  misc_feature (1)..(25): SEQ ID NO: 3897; WAN024GKR; Start 78; Stop 102
tggcagcgatattataaccttcaga

SEQ ID NO: 366609 - DNA, 25 bp, Artificial
  probe
  misc_feature (1)..(25): SEQ ID NO: 3897; WAN024GKR; Start 74; Stop 98
ttaatggcagcgatattataacctt

SEQ ID NO: 366610 - DNA, 25 bp, Artificial
  probe
  misc_feature (1)..(25): SEQ ID NO: 3897; WAN024GKR; Start 81; Stop 105
cagcgatattataaccttcagagat

SEQ ID NO: 366611 - DNA, 25 bp, Artificial
  probe
  misc_feature (1)..(25): SEQ ID NO: 3897; WAN024GKR; Start 195; Stop 219
gatcttcataataacgaatctgacg

SEQ ID NO: 366612 - DNA, 25 bp, Artificial
  probe
  misc_feature (1)..(25): SEQ ID NO: 3897; WAN024GKR; Start 126; Stop 150
gacgatccatgtcattcaaggaata

SEQ ID NO: 366613 - DNA, 25 bp, Artificial
  probe
  misc_feature (1)..(25): SEQ ID NO: 3897; WAN024GKR; Start 128; Stop 152
cgatccatgtcattcaaggaataca

SEQ ID NO: 366614 - DNA, 25 bp, Artificial
  probe
  misc_feature (1)..(25): SEQ ID NO: 3897; WAN024GKR; Start 127; Stop 151
acgatccatgtcattcaaggaatac

SEQ ID NO: 366615 - DNA, 25 bp, Artificial
  probe
  misc_feature (1)..(25): SEQ ID NO: 3897; WAN024GKR; Start 71; Stop 95
ttcttaatggcagcgatattataac

SEQ ID NO: 366616 - DNA, 25 bp, Artificial
  probe
  misc_feature (1)..(25): SEQ ID NO: 3897; WAN024GKR; Start 25; Stop 49
ctgactaaccgctttcttggatttc

SEQ ID NO: 366617 - DNA, 25 bp, Artificial
  probe
  misc_feature (1)..(25): SEQ ID NO: 3897; WAN024GKR; Start 138; Stop 162
cattcaaggaatacatgcgacgatt

SEQ ID NO: 366618 - DNA, 25 bp, Artificial
  probe
  misc_feature (1)..(25): SEQ ID NO: 3897; WAN024GKR; Start 125; Stop 149
agacgatccatgtcattcaaggaat

SEQ ID NO: 366619 - DNA, 25 bp, Artificial
  probe
  misc_feature (1)..(25): SEQ ID NO: 3897; WAN024GKR; Start 187; Stop 211
caactcttgatcttcataataacga

SEQ ID NO: 366620 - DNA, 25 bp, Artificial
  probe
  misc_feature (1)..(25): SEQ ID NO: 3897; WAN024GKR; Start 24; Stop 48
tctgactaaccgctttcttggattt

SEQ ID NO: 366621 - DNA, 25 bp, Artificial
  probe
  misc_feature (1)..(25): SEQ ID NO: 3897; WAN024GKR; Start 109; Stop 133
atctttgatttcaagcagacgatcc

SEQ ID NO: 366622 - DNA, 25 bp, Artificial
  probe
  misc_feature (1)..(25): SEQ ID NO: 3897; WAN024GKR; Start 194; Stop 218
tgatcttcataataacgaatctgac

SEQ ID NO: 366623 - DNA, 25 bp, Artificial
  probe
  misc_feature (1)..(25): SEQ ID NO: 3897; WAN024GKR; Start 129; Stop 153
gatccatgtcattcaaggaatacat

SEQ ID NO: 366624 - DNA, 25 bp, Artificial
  probe
  misc_feature (1)..(25): SEQ ID NO: 3897; WAN024GKR; Start 82; Stop 106
agcgatattataaccttcagagata

SEQ ID NO: 366625 - DNA, 25 bp, Artificial
  probe
  misc_feature (1)..(25): SEQ ID NO: 3897; WAN024GKR; Start 111; Stop 135
ctttgatttcaagcagacgatccat

SEQ ID NO: 366626 - DNA, 25 bp, Artificial
  probe
  misc_feature (1)..(25): SEQ ID NO: 3897; WAN024GKR; Start 108; Stop 132
aatctttgatttcaagcagacgatc

SEQ ID NO: 366627 - DNA, 25 bp, Artificial
  probe
  misc_feature (1)..(25): SEQ ID NO: 3897; WAN024GKR; Start 140; Stop 164
ttcaaggaatacatgcgacgatttc

SEQ ID NO: 366628 - DNA, 25 bp, Artificial
  probe
  misc_feature (1)..(25): SEQ ID NO: 3897; WAN024GKR; Start 124; Stop 148
cagacgatccatgtcattcaaggaa

SEQ ID NO: 366629 - DNA, 25 bp, Artificial
  probe
  misc_feature (1)..(25): SEQ ID NO: 3897; WAN024GKR; Start 137; Stop 161
tcattcaaggaatacatgcgacgat

SEQ ID NO: 366630 - DNA, 25 bp, Artificial
  probe
  misc_feature (1)..(25): SEQ ID NO: 3897; WAN024GKR; Start 134; Stop 158
atgtcattcaaggaatacatgcgac

SEQ ID NO: 366631 - DNA, 25 bp, Artificial
  probe
  misc_feature (1)..(25): SEQ ID NO: 3897; WAN024GKR; Start 107; Stop 131
taatctttgatttcaagcagacgat

SEQ ID NO: 366632 - DNA, 25 bp, Artificial
  probe
  misc_feature (1)..(25): SEQ ID NO: 3897; WAN024GKR; Start 106; Stop 130
ataatctttgatttcaagcagacga

SEQ ID NO: 366633 - DNA, 25 bp, Artificial
  probe
  misc_feature (1)..(25): SEQ ID NO: 3898; WAN024GDR; Start 236; Stop 260
tatttgttcttgatgaagccgtact

SEQ ID NO: 366634 - DNA, 25 bp, Artificial
  probe
  misc_feature (1)..(25): SEQ ID NO: 3898; WAN024GDR; Start 235; Stop 259
gtatttgttcttgatgaagccgtac

SEQ ID NO: 366635 - DNA, 25 bp, Artificial
  probe
  misc_feature (1)..(25): SEQ ID NO: 3898; WAN024GDR; Start 234; Stop 258
cgtatttgttcttgatgaagccgta

SEQ ID NO: 366636 - DNA, 25 bp, Artificial
  probe
  misc_feature (1)..(25): SEQ ID NO: 3898; WAN024GDR; Start 133; Stop 157
gatacggtcaactgtgaatccaaca

SEQ ID NO: 366637 - DNA, 25 bp, Artificial
  probe
  misc_feature (1)..(25): SEQ ID NO: 3898; WAN024GDR; Start 214; Stop 238
caagtgtttgtttgtatcttcgtat

SEQ ID NO: 366638 - DNA, 25 bp, Artificial
  probe
  misc_feature (1)..(25): SEQ ID NO: 3898; WAN024GDR; Start 232; Stop 256
ttcgtatttgttcttgatgaagccg

SEQ ID NO: 366639 - DNA, 25 bp, Artificial
  probe
  misc_feature (1)..(25): SEQ ID NO: 3898; WAN024GDR; Start 218; Stop 242
tgtttgtttgtatcttcgtatttgt

SEQ ID NO: 366640 - DNA, 25 bp, Artificial
  probe
  misc_feature (1)..(25): SEQ ID NO: 3898; WAN024GDR; Start 239; Stop 263
ttgttcttgatgaagccgtactcag

SEQ ID NO: 366641 - DNA, 25 bp, Artificial
  probe
  misc_feature (1)..(25): SEQ ID NO: 3898; WAN024GDR; Start 237; Stop 261
atttgttcttgatgaagccgtactc

SEQ ID NO: 366642 - DNA, 25 bp, Artificial
  probe
  misc_feature (1)..(25): SEQ ID NO: 3898; WAN024GDR; Start 217; Stop 241
gtgtttgtttgtatcttcgtatttg

SEQ ID NO: 366643 - DNA, 25 bp, Artificial
  probe
  misc_feature (1)..(25): SEQ ID NO: 3898; WAN024GDR; Start 216; Stop 240
agtgtttgtttgtatcttcgtattt

SEQ ID NO: 366644 - DNA, 25 bp, Artificial
  probe
  misc_feature (1)..(25): SEQ ID NO: 3898; WAN024GDR; Start 226; Stop 250
tgtatcttcgtatttgttcttgatg

SEQ ID NO: 366645 - DNA, 25 bp, Artificial
  probe
  misc_feature (1)..(25): SEQ ID NO: 3898; WAN024GDR; Start 128; Stop 152
tcttcgatacggtcaactgtgaatc

SEQ ID NO: 366646 - DNA, 25 bp, Artificial
  probe
  misc_feature (1)..(25): SEQ ID NO: 3898; WAN024GDR; Start 215; Stop 239
aagtgtttgtttgtatcttcgtatt

SEQ ID NO: 366647 - DNA, 25 bp, Artificial
  probe
  misc_feature (1)..(25): SEQ ID NO: 3898; WAN024GDR; Start 222; Stop 246
tgtttgtatcttcgtatttgttctt

SEQ ID NO: 366648 - DNA, 25 bp, Artificial
  probe
  misc_feature (1)..(25): SEQ ID NO: 3898; WAN024GDR; Start 221; Stop 245
ttgtttgtatcttcgtatttgttct

SEQ ID NO: 366649 - DNA, 25 bp, Artificial
  probe
  misc_feature (1)..(25): SEQ ID NO: 3898; WAN024GDR; Start 227; Stop 251
gtatcttcgtatttgttcttgatga

SEQ ID NO: 366650 - DNA, 25 bp, Artificial
  probe
  misc_feature (1)..(25): SEQ ID NO: 3898; WAN024GDR; Start 223; Stop 247
gtttgtatcttcgtatttgttcttg

SEQ ID NO: 366651 - DNA, 25 bp, Artificial
  probe
  misc_feature (1)..(25): SEQ ID NO: 3898; WAN024GDR; Start 127; Stop 151
gtcttcgatacggtcaactgtgaat

SEQ ID NO: 366652 - DNA, 25 bp, Artificial
  probe
  misc_feature (1)..(25): SEQ ID NO: 3898; WAN024GDR; Start 224; Stop 248
tttgtatcttcgtatttgttcttga

SEQ ID NO: 366653 - DNA, 25 bp, Artificial
  probe
  misc_feature (1)..(25): SEQ ID NO: 3898; WAN024GDR; Start 219; Stop 243
gtttgtttgtatcttcgtatttgtt

SEQ ID NO: 366654 - DNA, 25 bp, Artificial
  probe
  misc_feature (1)..(25): SEQ ID NO: 3898; WAN024GDR; Start 132; Stop 156
cgatacggtcaactgtgaatccaac

SEQ ID NO: 366655 - DNA, 25 bp, Artificial
  probe
  misc_feature (1)..(25): SEQ ID NO: 3898; WAN024GDR; Start 233; Stop 257
tcgtatttgttcttgatgaagccgt

SEQ ID NO: 366656 - DNA, 25 bp, Artificial
  probe
  misc_feature (1)..(25): SEQ ID NO: 3898; WAN024GDR; Start 124; Stop 148
gatgtcttcgatacggtcaactgtg

SEQ ID NO: 366657 - DNA, 25 bp, Artificial
  probe
  misc_feature (1)..(25): SEQ ID NO: 3898; WAN024GDR; Start 225; Stop 249
ttgtatcttcgtatttgttcttgat

SEQ ID NO: 366658 - DNA, 25 bp, Artificial
  probe
  misc_feature (1)..(25): SEQ ID NO: 3898; WAN024GDR; Start 220; Stop 244
tttgtttgtatcttcgtatttgttc

SEQ ID NO: 366659 - DNA, 25 bp, Artificial
  probe
  misc_feature (1)..(25): SEQ ID NO: 3898; WAN024GDR; Start 92; Stop 116
ttcaatttaacagcttctgcaacaa

SEQ ID NO: 366660 - DNA, 25 bp, Artificial
  probe
  misc_feature (1)..(25): SEQ ID NO: 3898; WAN024GDR; Start 66; Stop 90
cgatgacaacagttttaccttcttt

SEQ ID NO: 366661 - DNA, 25 bp, Artificial
  probe
  misc_feature (1)..(25): SEQ ID NO: 3898; WAN024GDR; Start 238; Stop 262
tttgttcttgatgaagccgtactca

SEQ ID NO: 366662 - DNA, 25 bp, Artificial
  probe
  misc_feature (1)..(25): SEQ ID NO: 3898; WAN024GDR; Start 129; Stop 153
cttcgatacggtcaactgtgaatcc

SEQ ID NO: 366663 - DNA, 25 bp, Artificial
  probe
  misc_feature (1)..(25): SEQ ID NO: 3898; WAN024GDR; Start 95; Stop 119
aatttaacagcttctgcaacaactg

SEQ ID NO: 366664 - DNA, 25 bp, Artificial
  probe
  misc_feature (1)..(25): SEQ ID NO: 3898; WAN024GDR; Start 94; Stop 118
caatttaacagcttctgcaacaact

SEQ ID NO: 366665 - DNA, 25 bp, Artificial
  probe
  misc_feature (1)..(25): SEQ ID NO: 3898; WAN024GDR; Start 93; Stop 117
tcaatttaacagcttctgcaacaac

SEQ ID NO: 366666 - DNA, 25 bp, Artificial
  probe
  misc_feature (1)..(25): SEQ ID NO: 3899; WAN024CNM; Start 59; Stop 83
gcgaaaagctcttatctaaaatagt

SEQ ID NO: 366667 - DNA, 25 bp, Artificial
  probe
  misc_feature (1)..(25): SEQ ID NO: 3899; WAN024CNM; Start 58; Stop 82
agcgaaaagctcttatctaaaatag

SEQ ID NO: 366668 - DNA, 25 bp, Artificial
  probe
  misc_feature (1)..(25): SEQ ID NO: 3899; WAN024CNM; Start 62; Stop 86
aaaagctcttatctaaaatagtcga

SEQ ID NO: 366669 - DNA, 25 bp, Artificial
  probe
  misc_feature (1)..(25): SEQ ID NO: 3899; WAN024CNM; Start 61; Stop 85
gaaaagctcttatctaaaatagtcg

SEQ ID NO: 366670 - DNA, 25 bp, Artificial
  probe
  misc_feature (1)..(25): SEQ ID NO: 3899; WAN024CNM; Start 60; Stop 84
cgaaaagctcttatctaaaatagtc

SEQ ID NO: 366671 - DNA, 25 bp, Artificial
  probe
  misc_feature (1)..(25): SEQ ID NO: 3900; WAN024DXQ; Start 38; Stop 62
accaacatatccgactatcatcttc

SEQ ID NO: 366672 - DNA, 25 bp, Artificial
  probe
  misc_feature (1)..(25): SEQ ID NO: 3900; WAN024DXQ; Start 39; Stop 63
ccaacatatccgactatcatcttct

SEQ ID NO: 366673 - DNA, 25 bp, Artificial
  probe
  misc_feature (1)..(25): SEQ ID NO: 3900; WAN024DXQ; Start 1098; Stop 1122
aatggtgattaaggatggagatgtt

SEQ ID NO: 366674 - DNA, 25 bp, Artificial
  probe
  misc_feature (1)..(25): SEQ ID NO: 3900; WAN024DXQ; Start 22; Stop 46
gtgctacatagaggataccaacata

SEQ ID NO: 366675 - DNA, 25 bp, Artificial
  probe
  misc_feature (1)..(25): SEQ ID NO: 3900; WAN024DXQ; Start 1099; Stop 1123
atggtgattaaggatggagatgttc

SEQ ID NO: 366676 - DNA, 25 bp, Artificial
  probe
  misc_feature (1)..(25): SEQ ID NO: 3900; WAN024DXQ; Start 621; Stop 645
tgttagtatcaagagttccgatgtt

SEQ ID NO: 366677 - DNA, 25 bp, Artificial
  probe
  misc_feature (1)..(25): SEQ ID NO: 3900; WAN024DXQ; Start 834; Stop 858
agataatcagatgaacagccgtatt

SEQ ID NO: 366678 - DNA, 25 bp, Artificial
  probe
  misc_feature (1)..(25): SEQ ID NO: 3900; WAN024DXQ; Start 624; Stop 648
tagtatcaagagttccgatgttcaa

SEQ ID NO: 366679 - DNA, 25 bp, Artificial
  probe
  misc_feature (1)..(25): SEQ ID NO: 3900; WAN024DXQ; Start 623; Stop 647
ttagtatcaagagttccgatgttca

SEQ ID NO: 366680 - DNA, 25 bp, Artificial
  probe
  misc_feature (1)..(25): SEQ ID NO: 3900; WAN024DXQ; Start 829; Stop 853
gtaacagataatcagatgaacagcc

SEQ ID NO: 366681 - DNA, 25 bp, Artificial
  probe
  misc_feature (1)..(25): SEQ ID NO: 3900; WAN024DXQ; Start 21; Stop 45
agtgctacatagaggataccaacat

SEQ ID NO: 366682 - DNA, 25 bp, Artificial
  probe
  misc_feature (1)..(25): SEQ ID NO: 3900; WAN024DXQ; Start 833; Stop 857
cagataatcagatgaacagccgtat

SEQ ID NO: 366683 - DNA, 25 bp, Artificial
  probe
  misc_feature (1)..(25): SEQ ID NO: 3900; WAN024DXQ; Start 622; Stop 646
gttagtatcaagagttccgatgttc

SEQ ID NO: 366684 - DNA, 25 bp, Artificial
  probe
  misc_feature (1)..(25): SEQ ID NO: 3900; WAN024DXQ; Start 263; Stop 287
ttcgtagagaagagagtgcttattc

SEQ ID NO: 366685 - DNA, 25 bp, Artificial
  probe
  misc_feature (1)..(25): SEQ ID NO: 3900; WAN024DXQ; Start 261; Stop 285
cattcgtagagaagagagtgcttat

SEQ ID NO: 366686 - DNA, 25 bp, Artificial
  probe
  misc_feature (1)..(25): SEQ ID NO: 3900; WAN024DXQ; Start 830; Stop 854
taacagataatcagatgaacagccg

SEQ ID NO: 366687 - DNA, 25 bp, Artificial
  probe
  misc_feature (1)..(25): SEQ ID NO: 3900; WAN024DXQ; Start 2012; Stop 2036
tcttacataatctaacaaccttgcg

SEQ ID NO: 366688 - DNA, 25 bp, Artificial
  probe
  misc_feature (1)..(25): SEQ ID NO: 3900; WAN024DXQ; Start 20; Stop 44
aagtgctacatagaggataccaaca

SEQ ID NO: 366689 - DNA, 25 bp, Artificial
  probe
  misc_feature (1)..(25): SEQ ID NO: 3900; WAN024DXQ; Start 821; Stop 845
gcattcgtgtaacagataatcagat

SEQ ID NO: 366690 - DNA, 25 bp, Artificial
  probe
  misc_feature (1)..(25): SEQ ID NO: 3900; WAN024DXQ; Start 1273; Stop 1297
tatcatcctattgctaatgccatcg

SEQ ID NO: 366691 - DNA, 25 bp, Artificial
  probe
  misc_feature (1)..(25): SEQ ID NO: 3900; WAN024DXQ; Start 1885; Stop 1909
gagttggattcgttatcatcatctt

SEQ ID NO: 366692 - DNA, 25 bp, Artificial
  probe
  misc_feature (1)..(25): SEQ ID NO: 3900; WAN024DXQ; Start 1883; Stop 1907
aagagttggattcgttatcatcatc

SEQ ID NO: 366693 - DNA, 25 bp, Artificial
  probe
  misc_feature (1)..(25): SEQ ID NO: 3900; WAN024DXQ; Start 37; Stop 61
taccaacatatccgactatcatctt

SEQ ID NO: 366694 - DNA, 25 bp, Artificial
  probe
  misc_feature (1)..(25): SEQ ID NO: 3900; WAN024DXQ; Start 1884; Stop 1908
agagttggattcgttatcatcatct

SEQ ID NO: 366695 - DNA, 25 bp, Artificial
  probe
  misc_feature (1)..(25): SEQ ID NO: 3900; WAN024DXQ; Start 262; Stop 286
attcgtagagaagagagtgcttatt

SEQ ID NO: 366696 - DNA, 25 bp, Artificial
  probe
  misc_feature (1)..(25): SEQ ID NO: 3900; WAN024DXQ; Start 1104; Stop 1128
gattaaggatggagatgttctggag

SEQ ID NO: 366697 - DNA, 25 bp, Artificial
  probe
  misc_feature (1)..(25): SEQ ID NO: 3900; WAN024DXQ; Start 1747; Stop 1771
ttgatggttggagatggattgaatg

SEQ ID NO: 366698 - DNA, 25 bp, Artificial
  probe
  misc_feature (1)..(25): SEQ ID NO: 3900; WAN024DXQ; Start 615; Stop 639
tacggttgttagtatcaagagttcc

SEQ ID NO: 366699 - DNA, 25 bp, Artificial
  probe
  misc_feature (1)..(25): SEQ ID NO: 3900; WAN024DXQ; Start 620; Stop 644
ttgttagtatcaagagttccgatgt

SEQ ID NO: 366700 - DNA, 25 bp, Artificial
  probe
  misc_feature (1)..(25): SEQ ID NO: 3900; WAN024DXQ; Start 36; Stop 60
ataccaacatatccgactatcatct

SEQ ID NO: 366701 - DNA, 25 bp, Artificial
  probe
  misc_feature (1)..(25): SEQ ID NO: 3900; WAN024DXQ; Start 1105; Stop 1129
attaaggatggagatgttctggaga

SEQ ID NO: 366702 - DNA, 25 bp, Artificial
  probe
  misc_feature (1)..(25): SEQ ID NO: 3900; WAN024DXQ; Start 618; Stop 642
ggttgttagtatcaagagttccgat

SEQ ID NO: 366703 - DNA, 25 bp, Artificial
  probe
  misc_feature (1)..(25): SEQ ID NO: 3900; WAN024DXQ; Start 1485; Stop 1509
tcactacaatctcttattcttggct

SEQ ID NO: 366704 - DNA, 25 bp, Artificial
  probe
  misc_feature (1)..(25): SEQ ID NO: 3901; WAN024GC6; Start 5; Stop 29
atacagactatattgctcgctatgg

SEQ ID NO: 366705 - DNA, 25 bp, Artificial
  probe
  misc_feature (1)..(25): SEQ ID NO: 3901; WAN024GC6; Start 249; Stop 273
ctactacaatcctgcctacctctat

SEQ ID NO: 366706 - DNA, 25 bp, Artificial
  probe
  misc_feature (1)..(25): SEQ ID NO: 3901; WAN024GC6; Start 250; Stop 274
tactacaatcctgcctacctctatg

SEQ ID NO: 366707 - DNA, 25 bp, Artificial
  probe
  misc_feature (1)..(25): SEQ ID NO: 3901; WAN024GC6; Start 253; Stop 277
tacaatcctgcctacctctatgaag

SEQ ID NO: 366708 - DNA, 25 bp, Artificial
  probe
  misc_feature (1)..(25): SEQ ID NO: 3901; WAN024GC6; Start 252; Stop 276
ctacaatcctgcctacctctatgaa

SEQ ID NO: 366709 - DNA, 25 bp, Artificial
  probe
  misc_feature (1)..(25): SEQ ID NO: 3901; WAN024GC6; Start 246; Stop 270
ctactactacaatcctgcctacctc

SEQ ID NO: 366710 - DNA, 25 bp, Artificial
  probe
  misc_feature (1)..(25): SEQ ID NO: 3901; WAN024GC6; Start 1; Stop 25
gtgaatacagactatattgctcgct

SEQ ID NO: 366711 - DNA, 25 bp, Artificial
  probe
  misc_feature (1)..(25): SEQ ID NO: 3901; WAN024GC6; Start 2; Stop 26
tgaatacagactatattgctcgcta

SEQ ID NO: 366712 - DNA, 25 bp, Artificial
  probe
  misc_feature (1)..(25): SEQ ID NO: 3901; WAN024GC6; Start 248; Stop 272
actactacaatcctgcctacctcta

SEQ ID NO: 366713 - DNA, 25 bp, Artificial
  probe
  misc_feature (1)..(25): SEQ ID NO: 3901; WAN024GC6; Start 247; Stop 271
tactactacaatcctgcctacctct

SEQ ID NO: 366714 - DNA, 25 bp, Artificial
  probe
  misc_feature (1)..(25): SEQ ID NO: 3901; WAN024GC6; Start 4; Stop 28
aatacagactatattgctcgctatg

SEQ ID NO: 366715 - DNA, 25 bp, Artificial
  probe
  misc_feature (1)..(25): SEQ ID NO: 3901; WAN024GC6; Start 251; Stop 275
actacaatcctgcctacctctatga

SEQ ID NO: 366716 - DNA, 25 bp, Artificial
  probe
  misc_feature (1)..(25): SEQ ID NO: 3901; WAN024GC6; Start 3; Stop 27
gaatacagactatattgctcgctat

SEQ ID NO: 366717 - DNA, 25 bp, Artificial
  probe
  misc_feature (1)..(25): SEQ ID NO: 3901; WAN024GC6; Start 6; Stop 30
tacagactatattgctcgctatggc

SEQ ID NO: 366718 - DNA, 25 bp, Artificial
  probe
  misc_feature (1)..(25): SEQ ID NO: 3901; WAN024GC6; Start 245; Stop 269
cctactactacaatcctgcctacct

SEQ ID NO: 366719 - DNA, 25 bp, Artificial
  probe
  misc_feature (1)..(25): SEQ ID NO: 3901; WAN024GC6; Start 199; Stop 223
tattacggacaagctgacgaatatt

SEQ ID NO: 366720 - DNA, 25 bp, Artificial
  probe
  misc_feature (1)..(25): SEQ ID NO: 3901; WAN024GC6; Start 198; Stop 222
ctattacggacaagctgacgaatat

SEQ ID NO: 366721 - DNA, 25 bp, Artificial
  probe
  misc_feature (1)..(25): SEQ ID NO: 3901; WAN024GC6; Start 318; Stop 342
taatcatattgcctggttccctatt

SEQ ID NO: 366722 - DNA, 25 bp, Artificial
  probe
  misc_feature (1)..(25): SEQ ID NO: 3901; WAN024GC6; Start 316; Stop 340
tttaatcatattgcctggttcccta

SEQ ID NO: 366723 - DNA, 25 bp, Artificial
  probe
  misc_feature (1)..(25): SEQ ID NO: 3901; WAN024GC6; Start 317; Stop 341
ttaatcatattgcctggttccctat

SEQ ID NO: 366724 - DNA, 25 bp, Artificial
  probe
  misc_feature (1)..(25): SEQ ID NO: 3901; WAN024GC6; Start 319; Stop 343
aatcatattgcctggttccctattg

SEQ ID NO: 366725 - DNA, 25 bp, Artificial
  probe
  misc_feature (1)..(25): SEQ ID NO: 3901; WAN024GC6; Start 315; Stop 339
ctttaatcatattgcctggttccct

SEQ ID NO: 366726 - DNA, 25 bp, Artificial
  probe
  misc_feature (1)..(25): SEQ ID NO: 3901; WAN024GC6; Start 314; Stop 338
actttaatcatattgcctggttccc

SEQ ID NO: 366727 - DNA, 25 bp, Artificial
  probe
  misc_feature (1)..(25): SEQ ID NO: 3901; WAN024GC6; Start 313; Stop 337
aactttaatcatattgcctggttcc

SEQ ID NO: 366728 - DNA, 25 bp, Artificial
  probe
  misc_feature (1)..(25): SEQ ID NO: 3901; WAN024GC6; Start 197; Stop 221
cctattacggacaagctgacgaata

SEQ ID NO: 366729 - DNA, 25 bp, Artificial
  probe
  misc_feature (1)..(25): SEQ ID NO: 3901; WAN024GC6; Start 320; Stop 344
atcatattgcctggttccctattga

SEQ ID NO: 366730 - DNA, 25 bp, Artificial
  probe
  misc_feature (1)..(25): SEQ ID NO: 3901; WAN024GC6; Start 37; Stop 61
gcagttatccctaatcctgaacaaa

SEQ ID NO: 366731 - DNA, 25 bp, Artificial
  probe
  misc_feature (1)..(25): SEQ ID NO: 3901; WAN024GC6; Start 312; Stop 336
aaactttaatcatattgcctggttc

SEQ ID NO: 366732 - DNA, 25 bp, Artificial
  probe
  misc_feature (1)..(25): SEQ ID NO: 3901; WAN024GC6; Start 254; Stop 278
acaatcctgcctacctctatgaagc

SEQ ID NO: 366733 - DNA, 25 bp, Artificial
  probe
  misc_feature (1)..(25): SEQ ID NO: 3901; WAN024GC6; Start 200; Stop 224
attacggacaagctgacgaatattt

SEQ ID NO: 366734 - DNA, 25 bp, Artificial
  probe
  misc_feature (1)..(25): SEQ ID NO: 3901; WAN024GC6; Start 219; Stop 243
atatttctattctcgtcatcgtgat

SEQ ID NO: 366735 - DNA, 25 bp, Artificial
  probe
  misc_feature (1)..(25): SEQ ID NO: 3901; WAN024GC6; Start 321; Stop 345
tcatattgcctggttccctattgac

SEQ ID NO: 366736 - DNA, 25 bp, Artificial
  probe
  misc_feature (1)..(25): SEQ ID NO: 3901; WAN024GC6; Start 205; Stop 229
ggacaagctgacgaatatttctatt

SEQ ID NO: 366737 - DNA, 25 bp, Artificial
  probe
  misc_feature (1)..(25): SEQ ID NO: 3902; WAN024CNN; Start 1; Stop 25
gtgaatagtacaaggcggtctaata

SEQ ID NO: 366738 - DNA, 25 bp, Artificial
  probe
  misc_feature (1)..(25): SEQ ID NO: 3902; WAN024CNN; Start 2; Stop 26
tgaatagtacaaggcggtctaatac

SEQ ID NO: 366739 - DNA, 25 bp, Artificial
  probe
  misc_feature (1)..(25): SEQ ID NO: 3902; WAN024CNN; Start 3; Stop 27
gaatagtacaaggcggtctaatacg

SEQ ID NO: 366740 - DNA, 25 bp, Artificial
  probe
  misc_feature (1)..(25): SEQ ID NO: 3902; WAN024CNN; Start 21; Stop 45
taatacgctcaggatttctgctgta

SEQ ID NO: 366741 - DNA, 25 bp, Artificial
  probe
  misc_feature (1)..(25): SEQ ID NO: 3902; WAN024CNN; Start 50; Stop 74
tagccgcatcatcttcaaactcaat

SEQ ID NO: 366742 - DNA, 25 bp, Artificial
  probe
  misc_feature (1)..(25): SEQ ID NO: 3902; WAN024CNN; Start 49; Stop 73
atagccgcatcatcttcaaactcaa

SEQ ID NO: 366743 - DNA, 25 bp, Artificial
  probe
  misc_feature (1)..(25): SEQ ID NO: 3902; WAN024CNN; Start 28; Stop 52
ctcaggatttctgctgtagggatag

SEQ ID NO: 366744 - DNA, 25 bp, Artificial
  probe
  misc_feature (1)..(25): SEQ ID NO: 3902; WAN024CNN; Start 19; Stop 43
tctaatacgctcaggatttctgctg

SEQ ID NO: 366745 - DNA, 25 bp, Artificial
  probe
  misc_feature (1)..(25): SEQ ID NO: 3902; WAN024CNN; Start 18; Stop 42
gtctaatacgctcaggatttctgct

SEQ ID NO: 366746 - DNA, 25 bp, Artificial
  probe
  misc_feature (1)..(25): SEQ ID NO: 3902; WAN024CNN; Start 48; Stop 72
gatagccgcatcatcttcaaactca

SEQ ID NO: 366747 - DNA, 25 bp, Artificial
  probe
  misc_feature (1)..(25): SEQ ID NO: 3902; WAN024CNN; Start 22; Stop 46
aatacgctcaggatttctgctgtag

SEQ ID NO: 366748 - DNA, 25 bp, Artificial
  probe
  misc_feature (1)..(25): SEQ ID NO: 3902; WAN024CNN; Start 20; Stop 44
ctaatacgctcaggatttctgctgt

SEQ ID NO: 366749 - DNA, 25 bp, Artificial
  probe
  misc_feature (1)..(25): SEQ ID NO: 3902; WAN024CNN; Start 51; Stop 75
agccgcatcatcttcaaactcaatt

SEQ ID NO: 366750 - DNA, 25 bp, Artificial
  probe
  misc_feature (1)..(25): SEQ ID NO: 3902; WAN024CNN; Start 44; Stop 68
tagggatagccgcatcatcttcaaa

SEQ ID NO: 366751 - DNA, 25 bp, Artificial
  probe
  misc_feature (1)..(25): SEQ ID NO: 3902; WAN024CNN; Start 16; Stop 40
cggtctaatacgctcaggatttctg

SEQ ID NO: 366752 - DNA, 25 bp, Artificial
  probe
  misc_feature (1)..(25): SEQ ID NO: 3902; WAN024CNN; Start 47; Stop 71
ggatagccgcatcatcttcaaactc

SEQ ID NO: 366753 - DNA, 25 bp, Artificial
  probe
  misc_feature (1)..(25): SEQ ID NO: 3902; WAN024CNN; Start 17; Stop 41
ggtctaatacgctcaggatttctgc

SEQ ID NO: 366754 - DNA, 25 bp, Artificial
  probe
  misc_feature (1)..(25): SEQ ID NO: 3902; WAN024CNN; Start 27; Stop 51
gctcaggatttctgctgtagggata

SEQ ID NO: 366755 - DNA, 25 bp, Artificial
  probe
  misc_feature (1)..(25): SEQ ID NO: 3902; WAN024CNN; Start 43; Stop 67
gtagggatagccgcatcatcttcaa

SEQ ID NO: 366756 - DNA, 25 bp, Artificial
  probe
  misc_feature (1)..(25): SEQ ID NO: 3902; WAN024CNN; Start 73; Stop 97
attgagtcaagctgtgaaacgtctt

SEQ ID NO: 366757 - DNA, 25 bp, Artificial
  probe
  misc_feature (1)..(25): SEQ ID NO: 3902; WAN024CNN; Start 72; Stop 96
aattgagtcaagctgtgaaacgtct

SEQ ID NO: 366758 - DNA, 25 bp, Artificial
  probe
  misc_feature (1)..(25): SEQ ID NO: 3902; WAN024CNN; Start 41; Stop 65
ctgtagggatagccgcatcatcttc

SEQ ID NO: 366759 - DNA, 25 bp, Artificial
  probe
  misc_feature (1)..(25): SEQ ID NO: 3902; WAN024CNN; Start 78; Stop 102
gtcaagctgtgaaacgtcttcataa

SEQ ID NO: 366760 - DNA, 25 bp, Artificial
  probe
  misc_feature (1)..(25): SEQ ID NO: 3902; WAN024CNN; Start 23; Stop 47
atacgctcaggatttctgctgtagg

SEQ ID NO: 366761 - DNA, 25 bp, Artificial
  probe
  misc_feature (1)..(25): SEQ ID NO: 3902; WAN024CNN; Start 74; Stop 98
ttgagtcaagctgtgaaacgtcttc

SEQ ID NO: 366762 - DNA, 25 bp, Artificial
  probe
  misc_feature (1)..(25): SEQ ID NO: 3902; WAN024CNN; Start 29; Stop 53
tcaggatttctgctgtagggatagc

SEQ ID NO: 366763 - DNA, 25 bp, Artificial
  probe
  misc_feature (1)..(25): SEQ ID NO: 3902; WAN024CNN; Start 77; Stop 101
agtcaagctgtgaaacgtcttcata

SEQ ID NO: 366764 - DNA, 25 bp, Artificial
  probe
  misc_feature (1)..(25): SEQ ID NO: 3902; WAN024CNN; Start 46; Stop 70
gggatagccgcatcatcttcaaact

SEQ ID NO: 366765 - DNA, 25 bp, Artificial
  probe
  misc_feature (1)..(25): SEQ ID NO: 3902; WAN024CNN; Start 45; Stop 69
agggatagccgcatcatcttcaaac

SEQ ID NO: 366766 - DNA, 25 bp, Artificial
  probe
  misc_feature (1)..(25): SEQ ID NO: 3902; WAN024CNN; Start 71; Stop 95
caattgagtcaagctgtgaaacgtc

SEQ ID NO: 366767 - DNA, 25 bp, Artificial
  probe
  misc_feature (1)..(25): SEQ ID NO: 3902; WAN024CNN; Start 4; Stop 28
aatagtacaaggcggtctaatacgc

SEQ ID NO: 366768 - DNA, 25 bp, Artificial
  probe
  misc_feature (1)..(25): SEQ ID NO: 3902; WAN024CNN; Start 52; Stop 76
gccgcatcatcttcaaactcaattg

SEQ ID NO: 366769 - DNA, 25 bp, Artificial
  probe
  misc_feature (1)..(25): SEQ ID NO: 3902; WAN024CNN; Start 30; Stop 54
caggatttctgctgtagggatagcc

SEQ ID NO: 366770 - DNA, 25 bp, Artificial
  probe
  misc_feature (1)..(25): SEQ ID NO: 3903; WAN024CNI; Start 37; Stop 61
agaacctattccgtcttcaatcatt

SEQ ID NO: 366771 - DNA, 25 bp, Artificial
  probe
  misc_feature (1)..(25): SEQ ID NO: 3903; WAN024CNI; Start 36; Stop 60
tagaacctattccgtcttcaatcat

SEQ ID NO: 366772 - DNA, 25 bp, Artificial
  probe
  misc_feature (1)..(25): SEQ ID NO: 3903; WAN024CNI; Start 35; Stop 59
atagaacctattccgtcttcaatca

SEQ ID NO: 366773 - DNA, 25 bp, Artificial
  probe
  misc_feature (1)..(25): SEQ ID NO: 3903; WAN024CNI; Start 1; Stop 25
gtgaatagtatcgagtccatcagtt

SEQ ID NO: 366774 - DNA, 25 bp, Artificial
  probe
  misc_feature (1)..(25): SEQ ID NO: 3903; WAN024CNI; Start 38; Stop 62
gaacctattccgtcttcaatcattt

SEQ ID NO: 366775 - DNA, 25 bp, Artificial
  probe
  misc_feature (1)..(25): SEQ ID NO: 3903; WAN024CNI; Start 6; Stop 30
tagtatcgagtccatcagtttctac

SEQ ID NO: 366776 - DNA, 25 bp, Artificial
  probe
  misc_feature (1)..(25): SEQ ID NO: 3903; WAN024CNI; Start 4; Stop 28
aatagtatcgagtccatcagtttct

SEQ ID NO: 366777 - DNA, 25 bp, Artificial
  probe
  misc_feature (1)..(25): SEQ ID NO: 3903; WAN024CNI; Start 31; Stop 55
gtcaatagaacctattccgtcttca

SEQ ID NO: 366778 - DNA, 25 bp, Artificial
  probe
  misc_feature (1)..(25): SEQ ID NO: 3903; WAN024CNI; Start 14; Stop 38
agtccatcagtttctacgtcaatag

SEQ ID NO: 366779 - DNA, 25 bp, Artificial
  probe
  misc_feature (1)..(25): SEQ ID NO: 3903; WAN024CNI; Start 13; Stop 37
gagtccatcagtttctacgtcaata

SEQ ID NO: 366780 - DNA, 25 bp, Artificial
  probe
  misc_feature (1)..(25): SEQ ID NO: 3903; WAN024CNI; Start 32; Stop 56
tcaatagaacctattccgtcttcaa

SEQ ID NO: 366781 - DNA, 25 bp, Artificial
  probe
  misc_feature (1)..(25): SEQ ID NO: 3903; WAN024CNI; Start 3; Stop 27
gaatagtatcgagtccatcagtttc

SEQ ID NO: 366782 - DNA, 25 bp, Artificial
  probe
  misc_feature (1)..(25): SEQ ID NO: 3903; WAN024CNI; Start 2; Stop 26
tgaatagtatcgagtccatcagttt

SEQ ID NO: 366783 - DNA, 25 bp, Artificial
  probe
  misc_feature (1)..(25): SEQ ID NO: 3903; WAN024CNI; Start 30; Stop 54
cgtcaatagaacctattccgtcttc

SEQ ID NO: 366784 - DNA, 25 bp, Artificial
  probe
  misc_feature (1)..(25): SEQ ID NO: 3903; WAN024CNI; Start 5; Stop 29
atagtatcgagtccatcagtttcta

SEQ ID NO: 366785 - DNA, 25 bp, Artificial
  probe
  misc_feature (1)..(25): SEQ ID NO: 3903; WAN024CNI; Start 33; Stop 57
caatagaacctattccgtcttcaat

SEQ ID NO: 366786 - DNA, 25 bp, Artificial
  probe
  misc_feature (1)..(25): SEQ ID NO: 3903; WAN024CNI; Start 7; Stop 31
agtatcgagtccatcagtttctacg

SEQ ID NO: 366787 - DNA, 25 bp, Artificial
  probe
  misc_feature (1)..(25): SEQ ID NO: 3903; WAN024CNI; Start 34; Stop 58
aatagaacctattccgtcttcaatc

SEQ ID NO: 366788 - DNA, 25 bp, Artificial
  probe
  misc_feature (1)..(25): SEQ ID NO: 3903; WAN024CNI; Start 9; Stop 33
tatcgagtccatcagtttctacgtc

SEQ ID NO: 366789 - DNA, 25 bp, Artificial
  probe
  misc_feature (1)..(25): SEQ ID NO: 3903; WAN024CNI; Start 8; Stop 32
gtatcgagtccatcagtttctacgt

SEQ ID NO: 366790 - DNA, 25 bp, Artificial
  probe
  misc_feature (1)..(25): SEQ ID NO: 3903; WAN024CNI; Start 55; Stop 79
aatcattttgtctacatactgctcg

SEQ ID NO: 366791 - DNA, 25 bp, Artificial
  probe
  misc_feature (1)..(25): SEQ ID NO: 3903; WAN024CNI; Start 39; Stop 63
aacctattccgtcttcaatcatttt

SEQ ID NO: 366792 - DNA, 25 bp, Artificial
  probe
  misc_feature (1)..(25): SEQ ID NO: 3903; WAN024CNI; Start 15; Stop 39
gtccatcagtttctacgtcaataga

SEQ ID NO: 366793 - DNA, 25 bp, Artificial
  probe
  misc_feature (1)..(25): SEQ ID NO: 3903; WAN024CNI; Start 27; Stop 51
ctacgtcaatagaacctattccgtc

SEQ ID NO: 366794 - DNA, 25 bp, Artificial
  probe
  misc_feature (1)..(25): SEQ ID NO: 3903; WAN024CNI; Start 28; Stop 52
tacgtcaatagaacctattccgtct

SEQ ID NO: 366795 - DNA, 25 bp, Artificial
  probe
  misc_feature (1)..(25): SEQ ID NO: 3903; WAN024CNI; Start 26; Stop 50
tctacgtcaatagaacctattccgt

SEQ ID NO: 366796 - DNA, 25 bp, Artificial
  probe
  misc_feature (1)..(25): SEQ ID NO: 3903; WAN024CNI; Start 45; Stop 69
ttccgtcttcaatcattttgtctac

SEQ ID NO: 366797 - DNA, 25 bp, Artificial
  probe
  misc_feature (1)..(25): SEQ ID NO: 3903; WAN024CNI; Start 41; Stop 65
cctattccgtcttcaatcattttgt

SEQ ID NO: 366798 - DNA, 25 bp, Artificial
  probe
  misc_feature (1)..(25): SEQ ID NO: 3903; WAN024CNI; Start 40; Stop 64
acctattccgtcttcaatcattttg

SEQ ID NO: 366799 - DNA, 25 bp, Artificial
  probe
  misc_feature (1)..(25): SEQ ID NO: 3903; WAN024CNI; Start 47; Stop 71
ccgtcttcaatcattttgtctacat

SEQ ID NO: 366800 - DNA, 25 bp, Artificial
  probe
  misc_feature (1)..(25): SEQ ID NO: 3903; WAN024CNI; Start 46; Stop 70
tccgtcttcaatcattttgtctaca

SEQ ID NO: 366801 - DNA, 25 bp, Artificial
  probe
  misc_feature (1)..(25): SEQ ID NO: 3903; WAN024CNI; Start 44; Stop 68
attccgtcttcaatcattttgtcta

SEQ ID NO: 366802 - DNA, 25 bp, Artificial
  probe
  misc_feature (1)..(25): SEQ ID NO: 3903; WAN024CNI; Start 43; Stop 67
tattccgtcttcaatcattttgtct

SEQ ID NO: 366803 - DNA, 25 bp, Artificial
  probe
  misc_feature (1)..(25): SEQ ID NO: 3904; WAN024EWK; Start 4; Stop 28
aatatccgtcagtgtttcctcattt

SEQ ID NO: 366804 - DNA, 25 bp, Artificial
  probe
  misc_feature (1)..(25): SEQ ID NO: 3904; WAN024EWK; Start 3; Stop 27
gaatatccgtcagtgtttcctcatt

SEQ ID NO: 366805 - DNA, 25 bp, Artificial
  probe
  misc_feature (1)..(25): SEQ ID NO: 3904; WAN024EWK; Start 156; Stop 180
ctcgctgagtagtattaaagaggaa

SEQ ID NO: 366806 - DNA, 25 bp, Artificial
  probe
  misc_feature (1)..(25): SEQ ID NO: 3904; WAN024EWK; Start 151; Stop 175
cttccctcgctgagtagtattaaag

SEQ ID NO: 366807 - DNA, 25 bp, Artificial
  probe
  misc_feature (1)..(25): SEQ ID NO: 3904; WAN024EWK; Start 152; Stop 176
ttccctcgctgagtagtattaaaga

SEQ ID NO: 366808 - DNA, 25 bp, Artificial
  probe
  misc_feature (1)..(25): SEQ ID NO: 3904; WAN024EWK; Start 153; Stop 177
tccctcgctgagtagtattaaagag

SEQ ID NO: 366809 - DNA, 25 bp, Artificial
  probe
  misc_feature (1)..(25): SEQ ID NO: 3904; WAN024EWK; Start 150; Stop 174
ccttccctcgctgagtagtattaaa

SEQ ID NO: 366810 - DNA, 25 bp, Artificial
  probe
  misc_feature (1)..(25): SEQ ID NO: 3904; WAN024EWK; Start 2; Stop 26
tgaatatccgtcagtgtttcctcat

SEQ ID NO: 366811 - DNA, 25 bp, Artificial
  probe
  misc_feature (1)..(25): SEQ ID NO: 3904; WAN024EWK; Start 211; Stop 235
atccaaatagctgataaaggtgact

SEQ ID NO: 366812 - DNA, 25 bp, Artificial
  probe
  misc_feature (1)..(25): SEQ ID NO: 3904; WAN024EWK; Start 212; Stop 236
tccaaatagctgataaaggtgacta

SEQ ID NO: 366813 - DNA, 25 bp, Artificial
  probe
  misc_feature (1)..(25): SEQ ID NO: 3904; WAN024EWK; Start 213; Stop 237
ccaaatagctgataaaggtgactag

SEQ ID NO: 366814 - DNA, 25 bp, Artificial
  probe
  misc_feature (1)..(25): SEQ ID NO: 3904; WAN024EWK; Start 1; Stop 25
gtgaatatccgtcagtgtttcctca

SEQ ID NO: 366815 - DNA, 25 bp, Artificial
  probe
  misc_feature (1)..(25): SEQ ID NO: 3904; WAN024EWK; Start 149; Stop 173
accttccctcgctgagtagtattaa

SEQ ID NO: 366816 - DNA, 25 bp, Artificial
  probe
  misc_feature (1)..(25): SEQ ID NO: 3904; WAN024EWK; Start 148; Stop 172
aaccttccctcgctgagtagtatta

SEQ ID NO: 366817 - DNA, 25 bp, Artificial
  probe
  misc_feature (1)..(25): SEQ ID NO: 3904; WAN024EWK; Start 69; Stop 93
tttcaataccatccagaggaaactc

SEQ ID NO: 366818 - DNA, 25 bp, Artificial
  probe
  misc_feature (1)..(25): SEQ ID NO: 3904; WAN024EWK; Start 207; Stop 231
gcatatccaaatagctgataaaggt

SEQ ID NO: 366819 - DNA, 25 bp, Artificial
  probe
  misc_feature (1)..(25): SEQ ID NO: 3904; WAN024EWK; Start 210; Stop 234
tatccaaatagctgataaaggtgac

SEQ ID NO: 366820 - DNA, 25 bp, Artificial
  probe
  misc_feature (1)..(25): SEQ ID NO: 3904; WAN024EWK; Start 5; Stop 29
atatccgtcagtgtttcctcatttt

SEQ ID NO: 366821 - DNA, 25 bp, Artificial
  probe
  misc_feature (1)..(25): SEQ ID NO: 3904; WAN024EWK; Start 52; Stop 76
atactccaaacgcccattttcaata

SEQ ID NO: 366822 - DNA, 25 bp, Artificial
  probe
  misc_feature (1)..(25): SEQ ID NO: 3904; WAN024EWK; Start 15; Stop 39
gtgtttcctcattttcaaaagcaaa

SEQ ID NO: 366823 - DNA, 25 bp, Artificial
  probe
  misc_feature (1)..(25): SEQ ID NO: 3904; WAN024EWK; Start 14; Stop 38
agtgtttcctcattttcaaaagcaa

SEQ ID NO: 366824 - DNA, 25 bp, Artificial
  probe
  misc_feature (1)..(25): SEQ ID NO: 3904; WAN024EWK; Start 6; Stop 30
tatccgtcagtgtttcctcattttc

SEQ ID NO: 366825 - DNA, 25 bp, Artificial
  probe
  misc_feature (1)..(25): SEQ ID NO: 3904; WAN024EWK; Start 17; Stop 41
gtttcctcattttcaaaagcaaagc

SEQ ID NO: 366826 - DNA, 25 bp, Artificial
  probe
  misc_feature (1)..(25): SEQ ID NO: 3904; WAN024EWK; Start 16; Stop 40
tgtttcctcattttcaaaagcaaag

SEQ ID NO: 366827 - DNA, 25 bp, Artificial
  probe
  misc_feature (1)..(25): SEQ ID NO: 3904; WAN024EWK; Start 12; Stop 36
tcagtgtttcctcattttcaaaagc

SEQ ID NO: 366828 - DNA, 25 bp, Artificial
  probe
  misc_feature (1)..(25): SEQ ID NO: 3904; WAN024EWK; Start 11; Stop 35
gtcagtgtttcctcattttcaaaag

SEQ ID NO: 366829 - DNA, 25 bp, Artificial
  probe
  misc_feature (1)..(25): SEQ ID NO: 3904; WAN024EWK; Start 10; Stop 34
cgtcagtgtttcctcattttcaaaa

SEQ ID NO: 366830 - DNA, 25 bp, Artificial
  probe
  misc_feature (1)..(25): SEQ ID NO: 3904; WAN024EWK; Start 13; Stop 37
cagtgtttcctcattttcaaaagca

SEQ ID NO: 366831 - DNA, 25 bp, Artificial
  probe
  misc_feature (1)..(25): SEQ ID NO: 3904; WAN024EWK; Start 147; Stop 171
aaaccttccctcgctgagtagtatt

SEQ ID NO: 366832 - DNA, 25 bp, Artificial
  probe
  misc_feature (1)..(25): SEQ ID NO: 3904; WAN024EWK; Start 53; Stop 77
tactccaaacgcccattttcaatac

SEQ ID NO: 366833 - DNA, 25 bp, Artificial
  probe
  misc_feature (1)..(25): SEQ ID NO: 3904; WAN024EWK; Start 208; Stop 232
catatccaaatagctgataaaggtg

SEQ ID NO: 366834 - DNA, 25 bp, Artificial
  probe
  misc_feature (1)..(25): SEQ ID NO: 3904; WAN024EWK; Start 209; Stop 233
atatccaaatagctgataaaggtga

SEQ ID NO: 366835 - DNA, 25 bp, Artificial
  probe
  misc_feature (1)..(25): SEQ ID NO: 3904; WAN024EWK; Start 143; Stop 167
taagaaaccttccctcgctgagtag

SEQ ID NO: 366836 - DNA, 25 bp, Artificial
  probe
  misc_feature (1)..(25): SEQ ID NO: 3905; WAN024FC5; Start 188; Stop 212
tagttgactatatgtcgctctacca

SEQ ID NO: 366837 - DNA, 25 bp, Artificial
  probe
  misc_feature (1)..(25): SEQ ID NO: 3905; WAN024FC5; Start 187; Stop 211
ttagttgactatatgtcgctctacc

SEQ ID NO: 366838 - DNA, 25 bp, Artificial
  probe
  misc_feature (1)..(25): SEQ ID NO: 3905; WAN024FC5; Start 189; Stop 213
agttgactatatgtcgctctaccaa

SEQ ID NO: 366839 - DNA, 25 bp, Artificial
  probe
  misc_feature (1)..(25): SEQ ID NO: 3905; WAN024FC5; Start 42; Stop 66
ggatacgattcggtattatgaacgg

SEQ ID NO: 366840 - DNA, 25 bp, Artificial
  probe
  misc_feature (1)..(25): SEQ ID NO: 3905; WAN024FC5; Start 41; Stop 65
cggatacgattcggtattatgaacg

SEQ ID NO: 366841 - DNA, 25 bp, Artificial
  probe
  misc_feature (1)..(25): SEQ ID NO: 3905; WAN024FC5; Start 40; Stop 64
gcggatacgattcggtattatgaac

SEQ ID NO: 366842 - DNA, 25 bp, Artificial
  probe
  misc_feature (1)..(25): SEQ ID NO: 3905; WAN024FC5; Start 39; Stop 63
agcggatacgattcggtattatgaa

SEQ ID NO: 366843 - DNA, 25 bp, Artificial
  probe
  misc_feature (1)..(25): SEQ ID NO: 3905; WAN024FC5; Start 36; Stop 60
ttcagcggatacgattcggtattat

SEQ ID NO: 366844 - DNA, 25 bp, Artificial
  probe
  misc_feature (1)..(25): SEQ ID NO: 3905; WAN024FC5; Start 168; Stop 192
gggtgtctctgtagatagtttagtt

SEQ ID NO: 366845 - DNA, 25 bp, Artificial
  probe
  misc_feature (1)..(25): SEQ ID NO: 3905; WAN024FC5; Start 167; Stop 191
cgggtgtctctgtagatagtttagt

SEQ ID NO: 366846 - DNA, 25 bp, Artificial
  probe
  misc_feature (1)..(25): SEQ ID NO: 3905; WAN024FC5; Start 169; Stop 193
ggtgtctctgtagatagtttagttg

SEQ ID NO: 366847 - DNA, 25 bp, Artificial
  probe
  misc_feature (1)..(25): SEQ ID NO: 3905; WAN024FC5; Start 54; Stop 78
gtattatgaacgggttggtcttgtg

SEQ ID NO: 366848 - DNA, 25 bp, Artificial
  probe
  misc_feature (1)..(25): SEQ ID NO: 3905; WAN024FC5; Start 38; Stop 62
cagcggatacgattcggtattatga

SEQ ID NO: 366849 - DNA, 25 bp, Artificial
  probe
  misc_feature (1)..(25): SEQ ID NO: 3905; WAN024FC5; Start 37; Stop 61
tcagcggatacgattcggtattatg

SEQ ID NO: 366850 - DNA, 25 bp, Artificial
  probe
  misc_feature (1)..(25): SEQ ID NO: 3905; WAN024FC5; Start 22; Stop 46
gatttgttgggaatttcagcggata

SEQ ID NO: 366851 - DNA, 25 bp, Artificial
  probe
  misc_feature (1)..(25): SEQ ID NO: 3905; WAN024FC5; Start 190; Stop 214
gttgactatatgtcgctctaccaaa

SEQ ID NO: 366852 - DNA, 25 bp, Artificial
  probe
  misc_feature (1)..(25): SEQ ID NO: 3905; WAN024FC5; Start 184; Stop 208
agtttagttgactatatgtcgctct

SEQ ID NO: 366853 - DNA, 25 bp, Artificial
  probe
  misc_feature (1)..(25): SEQ ID NO: 3905; WAN024FC5; Start 23; Stop 47
atttgttgggaatttcagcggatac

SEQ ID NO: 366854 - DNA, 25 bp, Artificial
  probe
  misc_feature (1)..(25): SEQ ID NO: 3905; WAN024FC5; Start 85; Stop 109
attactcgtactgctactgggattc

SEQ ID NO: 366855 - DNA, 25 bp, Artificial
  probe
  misc_feature (1)..(25): SEQ ID NO: 3905; WAN024FC5; Start 84; Stop 108
gattactcgtactgctactgggatt

SEQ ID NO: 366856 - DNA, 25 bp, Artificial
  probe
  misc_feature (1)..(25): SEQ ID NO: 3905; WAN024FC5; Start 166; Stop 190
gcgggtgtctctgtagatagtttag

SEQ ID NO: 366857 - DNA, 25 bp, Artificial
  probe
  misc_feature (1)..(25): SEQ ID NO: 3905; WAN024FC5; Start 45; Stop 69
tacgattcggtattatgaacgggtt

SEQ ID NO: 366858 - DNA, 25 bp, Artificial
  probe
  misc_feature (1)..(25): SEQ ID NO: 3905; WAN024FC5; Start 170; Stop 194
gtgtctctgtagatagtttagttga

SEQ ID NO: 366859 - DNA, 25 bp, Artificial
  probe
  misc_feature (1)..(25): SEQ ID NO: 3905; WAN024FC5; Start 43; Stop 67
gatacgattcggtattatgaacggg

SEQ ID NO: 366860 - DNA, 25 bp, Artificial
  probe
  misc_feature (1)..(25): SEQ ID NO: 3905; WAN024FC5; Start 53; Stop 77
ggtattatgaacgggttggtcttgt

SEQ ID NO: 366861 - DNA, 25 bp, Artificial
  probe
  misc_feature (1)..(25): SEQ ID NO: 3905; WAN024FC5; Start 186; Stop 210
tttagttgactatatgtcgctctac

SEQ ID NO: 366862 - DNA, 25 bp, Artificial
  probe
  misc_feature (1)..(25): SEQ ID NO: 3905; WAN024FC5; Start 185; Stop 209
gtttagttgactatatgtcgctcta

SEQ ID NO: 366863 - DNA, 25 bp, Artificial
  probe
  misc_feature (1)..(25): SEQ ID NO: 3905; WAN024FC5; Start 44; Stop 68
atacgattcggtattatgaacgggt

SEQ ID NO: 366864 - DNA, 25 bp, Artificial
  probe
  misc_feature (1)..(25): SEQ ID NO: 3905; WAN024FC5; Start 49; Stop 73
attcggtattatgaacgggttggtc

SEQ ID NO: 366865 - DNA, 25 bp, Artificial
  probe
  misc_feature (1)..(25): SEQ ID NO: 3905; WAN024FC5; Start 48; Stop 72
gattcggtattatgaacgggttggt

SEQ ID NO: 366866 - DNA, 25 bp, Artificial
  probe
  misc_feature (1)..(25): SEQ ID NO: 3905; WAN024FC5; Start 92; Stop 116
gtactgctactgggattcgtgattt

SEQ ID NO: 366867 - DNA, 25 bp, Artificial
  probe
  misc_feature (1)..(25): SEQ ID NO: 3905; WAN024FC5; Start 171; Stop 195
tgtctctgtagatagtttagttgac

SEQ ID NO: 366868 - DNA, 25 bp, Artificial
  probe
  misc_feature (1)..(25): SEQ ID NO: 3905; WAN024FC5; Start 35; Stop 59
tttcagcggatacgattcggtatta

SEQ ID NO: 366869 - DNA, 25 bp, Artificial
  probe
  misc_feature (1)..(25): SEQ ID NO: 3906; WAN024CPA; Start 2151; Stop 2175
ccaagacagtaaacctgatgaagat

SEQ ID NO: 366870 - DNA, 25 bp, Artificial
  probe
  misc_feature (1)..(25): SEQ ID NO: 3906; WAN024CPA; Start 2224; Stop 2248
aaagagaatcacgctggtttaaatc

SEQ ID NO: 366871 - DNA, 25 bp, Artificial
  probe
  misc_feature (1)..(25): SEQ ID NO: 3906; WAN024CPA; Start 2149; Stop 2173
gaccaagacagtaaacctgatgaag

SEQ ID NO: 366872 - DNA, 25 bp, Artificial
  probe
  misc_feature (1)..(25): SEQ ID NO: 3906; WAN024CPA; Start 2155; Stop 2179
gacagtaaacctgatgaagataagg

SEQ ID NO: 366873 - DNA, 25 bp, Artificial
  probe
  misc_feature (1)..(25): SEQ ID NO: 3906; WAN024CPA; Start 2150; Stop 2174
accaagacagtaaacctgatgaaga

SEQ ID NO: 366874 - DNA, 25 bp, Artificial
  probe
  misc_feature (1)..(25): SEQ ID NO: 3906; WAN024CPA; Start 2148; Stop 2172
agaccaagacagtaaacctgatgaa

SEQ ID NO: 366875 - DNA, 25 bp, Artificial
  probe
  misc_feature (1)..(25): SEQ ID NO: 3906; WAN024CPA; Start 2152; Stop 2176
caagacagtaaacctgatgaagata

SEQ ID NO: 366876 - DNA, 25 bp, Artificial
  probe
  misc_feature (1)..(25): SEQ ID NO: 3906; WAN024CPA; Start 2422; Stop 2446
aatgctatggagacattgactggtc

SEQ ID NO: 366877 - DNA, 25 bp, Artificial
  probe
  misc_feature (1)..(25): SEQ ID NO: 3906; WAN024CPA; Start 2154; Stop 2178
agacagtaaacctgatgaagataag

SEQ ID NO: 366878 - DNA, 25 bp, Artificial
  probe
  misc_feature (1)..(25): SEQ ID NO: 3906; WAN024CPA; Start 2227; Stop 2251
gagaatcacgctggtttaaatcctt

SEQ ID NO: 366879 - DNA, 25 bp, Artificial
  probe
  misc_feature (1)..(25): SEQ ID NO: 3906; WAN024CPA; Start 2225; Stop 2249
aagagaatcacgctggtttaaatcc

SEQ ID NO: 366880 - DNA, 25 bp, Artificial
  probe
  misc_feature (1)..(25): SEQ ID NO: 3906; WAN024CPA; Start 2228; Stop 2252
agaatcacgctggtttaaatccttc

SEQ ID NO: 366881 - DNA, 25 bp, Artificial
  probe
  misc_feature (1)..(25): SEQ ID NO: 3906; WAN024CPA; Start 2229; Stop 2253
gaatcacgctggtttaaatccttca

SEQ ID NO: 366882 - DNA, 25 bp, Artificial
  probe
  misc_feature (1)..(25): SEQ ID NO: 3906; WAN024CPA; Start 2237; Stop 2261
ctggtttaaatccttcagcagataa

SEQ ID NO: 366883 - DNA, 25 bp, Artificial
  probe
  misc_feature (1)..(25): SEQ ID NO: 3906; WAN024CPA; Start 2153; Stop 2177
aagacagtaaacctgatgaagataa

SEQ ID NO: 366884 - DNA, 25 bp, Artificial
  probe
  misc_feature (1)..(25): SEQ ID NO: 3906; WAN024CPA; Start 2226; Stop 2250
agagaatcacgctggtttaaatcct

SEQ ID NO: 366885 - DNA, 25 bp, Artificial
  probe
  misc_feature (1)..(25): SEQ ID NO: 3906; WAN024CPA; Start 2230; Stop 2254
aatcacgctggtttaaatccttcag

SEQ ID NO: 366886 - DNA, 25 bp, Artificial
  probe
  misc_feature (1)..(25): SEQ ID NO: 3906; WAN024CPA; Start 2425; Stop 2449
gctatggagacattgactggtctaa

SEQ ID NO: 366887 - DNA, 25 bp, Artificial
  probe
  misc_feature (1)..(25): SEQ ID NO: 3906; WAN024CPA; Start 2421; Stop 2445
aaatgctatggagacattgactggt

SEQ ID NO: 366888 - DNA, 25 bp, Artificial
  probe
  misc_feature (1)..(25): SEQ ID NO: 3906; WAN024CPA; Start 2413; Stop 2437
attagacaaaatgctatggagacat

SEQ ID NO: 366889 - DNA, 25 bp, Artificial
  probe
  misc_feature (1)..(25): SEQ ID NO: 3906; WAN024CPA; Start 1345; Stop 1369
gctaagaaaactgacctcccatcta

SEQ ID NO: 366890 - DNA, 25 bp, Artificial
  probe
  misc_feature (1)..(25): SEQ ID NO: 3906; WAN024CPA; Start 2412; Stop 2436
tattagacaaaatgctatggagaca

SEQ ID NO: 366891 - DNA, 25 bp, Artificial
  probe
  misc_feature (1)..(25): SEQ ID NO: 3906; WAN024CPA; Start 2411; Stop 2435
gtattagacaaaatgctatggagac

SEQ ID NO: 366892 - DNA, 25 bp, Artificial
  probe
  misc_feature (1)..(25): SEQ ID NO: 3906; WAN024CPA; Start 2223; Stop 2247
aaaagagaatcacgctggtttaaat

SEQ ID NO: 366893 - DNA, 25 bp, Artificial
  probe
  misc_feature (1)..(25): SEQ ID NO: 3906; WAN024CPA; Start 2410; Stop 2434
agtattagacaaaatgctatggaga

SEQ ID NO: 366894 - DNA, 25 bp, Artificial
  probe
  misc_feature (1)..(25): SEQ ID NO: 3906; WAN024CPA; Start 2424; Stop 2448
tgctatggagacattgactggtcta

SEQ ID NO: 366895 - DNA, 25 bp, Artificial
  probe
  misc_feature (1)..(25): SEQ ID NO: 3906; WAN024CPA; Start 2426; Stop 2450
ctatggagacattgactggtctaaa

SEQ ID NO: 366896 - DNA, 25 bp, Artificial
  probe
  misc_feature (1)..(25): SEQ ID NO: 3906; WAN024CPA; Start 2419; Stop 2443
caaaatgctatggagacattgactg

SEQ ID NO: 366897 - DNA, 25 bp, Artificial
  probe
  misc_feature (1)..(25): SEQ ID NO: 3906; WAN024CPA; Start 2417; Stop 2441
gacaaaatgctatggagacattgac

SEQ ID NO: 366898 - DNA, 25 bp, Artificial
  probe
  misc_feature (1)..(25): SEQ ID NO: 3906; WAN024CPA; Start 2416; Stop 2440
agacaaaatgctatggagacattga

SEQ ID NO: 366899 - DNA, 25 bp, Artificial
  probe
  misc_feature (1)..(25): SEQ ID NO: 3906; WAN024CPA; Start 2418; Stop 2442
acaaaatgctatggagacattgact

SEQ ID NO: 366900 - DNA, 25 bp, Artificial
  probe
  misc_feature (1)..(25): SEQ ID NO: 3906; WAN024CPA; Start 2415; Stop 2439
tagacaaaatgctatggagacattg

SEQ ID NO: 366901 - DNA, 25 bp, Artificial
  probe
  misc_feature (1)..(25): SEQ ID NO: 3906; WAN024CPA; Start 2423; Stop 2447
atgctatggagacattgactggtct

SEQ ID NO: 366902 - DNA, 25 bp, Artificial
  probe
  misc_feature (1)..(25): SEQ ID NO: 3907; WAN024CPE; Start 2276; Stop 2300
aaccagaagaatcaccagaggaatc

SEQ ID NO: 366903 - DNA, 25 bp, Artificial
  probe
  misc_feature (1)..(25): SEQ ID NO: 3907; WAN024CPE; Start 2275; Stop 2299
gaaccagaagaatcaccagaggaat

SEQ ID NO: 366904 - DNA, 25 bp, Artificial
  probe
  misc_feature (1)..(25): SEQ ID NO: 3907; WAN024CPE; Start 1222; Stop 1246
tatgtctttgaggagaatggagttt

SEQ ID NO: 366905 - DNA, 25 bp, Artificial
  probe
  misc_feature (1)..(25): SEQ ID NO: 3907; WAN024CPE; Start 980; Stop 1004
accattaccactttatcccttatga

SEQ ID NO: 366906 - DNA, 25 bp, Artificial
  probe
  misc_feature (1)..(25): SEQ ID NO: 3907; WAN024CPE; Start 195; Stop 219
gacaccagatgaagtcagtaagagg

SEQ ID NO: 366907 - DNA, 25 bp, Artificial
  probe
  misc_feature (1)..(25): SEQ ID NO: 3907; WAN024CPE; Start 1223; Stop 1247
atgtctttgaggagaatggagtttc

SEQ ID NO: 366908 - DNA, 25 bp, Artificial
  probe
  misc_feature (1)..(25): SEQ ID NO: 3907; WAN024CPE; Start 995; Stop 1019
tcccttatgaacaaatgtctgaatt

SEQ ID NO: 366909 - DNA, 25 bp, Artificial
  probe
  misc_feature (1)..(25): SEQ ID NO: 3907; WAN024CPE; Start 986; Stop 1010
accactttatcccttatgaacaaat

SEQ ID NO: 366910 - DNA, 25 bp, Artificial
  probe
  misc_feature (1)..(25): SEQ ID NO: 3907; WAN024CPE; Start 979; Stop 1003
aaccattaccactttatcccttatg

SEQ ID NO: 366911 - DNA, 25 bp, Artificial
  probe
  misc_feature (1)..(25): SEQ ID NO: 3907; WAN024CPE; Start 994; Stop 1018
atcccttatgaacaaatgtctgaat

SEQ ID NO: 366912 - DNA, 25 bp, Artificial
  probe
  misc_feature (1)..(25): SEQ ID NO: 3907; WAN024CPE; Start 987; Stop 1011
ccactttatcccttatgaacaaatg

SEQ ID NO: 366913 - DNA, 25 bp, Artificial
  probe
  misc_feature (1)..(25): SEQ ID NO: 3907; WAN024CPE; Start 997; Stop 1021
ccttatgaacaaatgtctgaattgg

SEQ ID NO: 366914 - DNA, 25 bp, Artificial
  probe
  misc_feature (1)..(25): SEQ ID NO: 3907; WAN024CPE; Start 996; Stop 1020
cccttatgaacaaatgtctgaattg

SEQ ID NO: 366915 - DNA, 25 bp, Artificial
  probe
  misc_feature (1)..(25): SEQ ID NO: 3907; WAN024CPE; Start 981; Stop 1005
ccattaccactttatcccttatgaa

SEQ ID NO: 366916 - DNA, 25 bp, Artificial
  probe
  misc_feature (1)..(25): SEQ ID NO: 3907; WAN024CPE; Start 984; Stop 1008
ttaccactttatcccttatgaacaa

SEQ ID NO: 366917 - DNA, 25 bp, Artificial
  probe
  misc_feature (1)..(25): SEQ ID NO: 3907; WAN024CPE; Start 985; Stop 1009
taccactttatcccttatgaacaaa

SEQ ID NO: 366918 - DNA, 25 bp, Artificial
  probe
  misc_feature (1)..(25): SEQ ID NO: 3907; WAN024CPE; Start 993; Stop 1017
tatcccttatgaacaaatgtctgaa

SEQ ID NO: 366919 - DNA, 25 bp, Artificial
  probe
  misc_feature (1)..(25): SEQ ID NO: 3907; WAN024CPE; Start 992; Stop 1016
ttatcccttatgaacaaatgtctga

SEQ ID NO: 366920 - DNA, 25 bp, Artificial
  probe
  misc_feature (1)..(25): SEQ ID NO: 3907; WAN024CPE; Start 983; Stop 1007
attaccactttatcccttatgaaca

SEQ ID NO: 366921 - DNA, 25 bp, Artificial
  probe
  misc_feature (1)..(25): SEQ ID NO: 3907; WAN024CPE; Start 1242; Stop 1266
agtttctcgttatatcccagccaag

SEQ ID NO: 366922 - DNA, 25 bp, Artificial
  probe
  misc_feature (1)..(25): SEQ ID NO: 3907; WAN024CPE; Start 988; Stop 1012
cactttatcccttatgaacaaatgt

SEQ ID NO: 366923 - DNA, 25 bp, Artificial
  probe
  misc_feature (1)..(25): SEQ ID NO: 3907; WAN024CPE; Start 1237; Stop 1261
aatggagtttctcgttatatcccag

SEQ ID NO: 366924 - DNA, 25 bp, Artificial
  probe
  misc_feature (1)..(25): SEQ ID NO: 3907; WAN024CPE; Start 1236; Stop 1260
gaatggagtttctcgttatatccca

SEQ ID NO: 366925 - DNA, 25 bp, Artificial
  probe
  misc_feature (1)..(25): SEQ ID NO: 3907; WAN024CPE; Start 998; Stop 1022
cttatgaacaaatgtctgaattgga

SEQ ID NO: 366926 - DNA, 25 bp, Artificial
  probe
  misc_feature (1)..(25): SEQ ID NO: 3907; WAN024CPE; Start 982; Stop 1006
cattaccactttatcccttatgaac

SEQ ID NO: 366927 - DNA, 25 bp, Artificial
  probe
  misc_feature (1)..(25): SEQ ID NO: 3907; WAN024CPE; Start 991; Stop 1015
tttatcccttatgaacaaatgtctg

SEQ ID NO: 366928 - DNA, 25 bp, Artificial
  probe
  misc_feature (1)..(25): SEQ ID NO: 3907; WAN024CPE; Start 989; Stop 1013
actttatcccttatgaacaaatgtc

SEQ ID NO: 366929 - DNA, 25 bp, Artificial
  probe
  misc_feature (1)..(25): SEQ ID NO: 3907; WAN024CPE; Start 978; Stop 1002
taaccattaccactttatcccttat

SEQ ID NO: 366930 - DNA, 25 bp, Artificial
  probe
  misc_feature (1)..(25): SEQ ID NO: 3907; WAN024CPE; Start 1241; Stop 1265
gagtttctcgttatatcccagccaa

SEQ ID NO: 366931 - DNA, 25 bp, Artificial
  probe
  misc_feature (1)..(25): SEQ ID NO: 3907; WAN024CPE; Start 999; Stop 1023
ttatgaacaaatgtctgaattggaa

SEQ ID NO: 366932 - DNA, 25 bp, Artificial
  probe
  misc_feature (1)..(25): SEQ ID NO: 3907; WAN024CPE; Start 990; Stop 1014
ctttatcccttatgaacaaatgtct

SEQ ID NO: 366933 - DNA, 25 bp, Artificial
  probe
  misc_feature (1)..(25): SEQ ID NO: 3907; WAN024CPE; Start 198; Stop 222
accagatgaagtcagtaagagggag

SEQ ID NO: 366934 - DNA, 25 bp, Artificial
  probe
  misc_feature (1)..(25): SEQ ID NO: 3907; WAN024CPE; Start 977; Stop 1001
gtaaccattaccactttatccctta

SEQ ID NO: 366935 - DNA, 25 bp, Artificial
  probe
  misc_feature (1)..(25): SEQ ID NO: 3908; WAN024FW8; Start 201; Stop 225
gattcctaaggttagttcttccagt

SEQ ID NO: 366936 - DNA, 25 bp, Artificial
  probe
  misc_feature (1)..(25): SEQ ID NO: 3908; WAN024FW8; Start 202; Stop 226
attcctaaggttagttcttccagtt

SEQ ID NO: 366937 - DNA, 25 bp, Artificial
  probe
  misc_feature (1)..(25): SEQ ID NO: 3908; WAN024FW8; Start 847; Stop 871
gctagaagagttcactgtataggac

SEQ ID NO: 366938 - DNA, 25 bp, Artificial
  probe
  misc_feature (1)..(25): SEQ ID NO: 3908; WAN024FW8; Start 1774; Stop 1798
aataacgaagtgatagagtggtcaa

SEQ ID NO: 366939 - DNA, 25 bp, Artificial
  probe
  misc_feature (1)..(25): SEQ ID NO: 3908; WAN024FW8; Start 848; Stop 872
ctagaagagttcactgtataggacg

SEQ ID NO: 366940 - DNA, 25 bp, Artificial
  probe
  misc_feature (1)..(25): SEQ ID NO: 3908; WAN024FW8; Start 1462; Stop 1486
gtaattgacagtaagcgattaggtt

SEQ ID NO: 366941 - DNA, 25 bp, Artificial
  probe
  misc_feature (1)..(25): SEQ ID NO: 3908; WAN024FW8; Start 189; Stop 213
agataatgactggattcctaaggtt

SEQ ID NO: 366942 - DNA, 25 bp, Artificial
  probe
  misc_feature (1)..(25): SEQ ID NO: 3908; WAN024FW8; Start 188; Stop 212
aagataatgactggattcctaaggt

SEQ ID NO: 366943 - DNA, 25 bp, Artificial
  probe
  misc_feature (1)..(25): SEQ ID NO: 3908; WAN024FW8; Start 846; Stop 870
ggctagaagagttcactgtatagga

SEQ ID NO: 366944 - DNA, 25 bp, Artificial
  probe
  misc_feature (1)..(25): SEQ ID NO: 3908; WAN024FW8; Start 194; Stop 218
atgactggattcctaaggttagttc

SEQ ID NO: 366945 - DNA, 25 bp, Artificial
  probe
  misc_feature (1)..(25): SEQ ID NO: 3908; WAN024FW8; Start 197; Stop 221
actggattcctaaggttagttcttc

SEQ ID NO: 366946 - DNA, 25 bp, Artificial
  probe
  misc_feature (1)..(25): SEQ ID NO: 3908; WAN024FW8; Start 196; Stop 220
gactggattcctaaggttagttctt

SEQ ID NO: 366947 - DNA, 25 bp, Artificial
  probe
  misc_feature (1)..(25): SEQ ID NO: 3908; WAN024FW8; Start 186; Stop 210
cgaagataatgactggattcctaag

SEQ ID NO: 366948 - DNA, 25 bp, Artificial
  probe
  misc_feature (1)..(25): SEQ ID NO: 3908; WAN024FW8; Start 1773; Stop 1797
taataacgaagtgatagagtggtca

SEQ ID NO: 366949 - DNA, 25 bp, Artificial
  probe
  misc_feature (1)..(25): SEQ ID NO: 3908; WAN024FW8; Start 1584; Stop 1608
tccttatgatacacttcagaatcca

SEQ ID NO: 366950 - DNA, 25 bp, Artificial
  probe
  misc_feature (1)..(25): SEQ ID NO: 3908; WAN024FW8; Start 195; Stop 219
tgactggattcctaaggttagttct

SEQ ID NO: 366951 - DNA, 25 bp, Artificial
  probe
  misc_feature (1)..(25): SEQ ID NO: 3908; WAN024FW8; Start 1461; Stop 1485
tgtaattgacagtaagcgattaggt

SEQ ID NO: 366952 - DNA, 25 bp, Artificial
  probe
  misc_feature (1)..(25): SEQ ID NO: 3908; WAN024FW8; Start 193; Stop 217
aatgactggattcctaaggttagtt

SEQ ID NO: 366953 - DNA, 25 bp, Artificial
  probe
  misc_feature (1)..(25): SEQ ID NO: 3908; WAN024FW8; Start 1772; Stop 1796
ataataacgaagtgatagagtggtc

SEQ ID NO: 366954 - DNA, 25 bp, Artificial
  probe
  misc_feature (1)..(25): SEQ ID NO: 3908; WAN024FW8; Start 187; Stop 211
gaagataatgactggattcctaagg

SEQ ID NO: 366955 - DNA, 25 bp, Artificial
  probe
  misc_feature (1)..(25): SEQ ID NO: 3908; WAN024FW8; Start 1460; Stop 1484
atgtaattgacagtaagcgattagg

SEQ ID NO: 366956 - DNA, 25 bp, Artificial
  probe
  misc_feature (1)..(25): SEQ ID NO: 3908; WAN024FW8; Start 1457; Stop 1481
atgatgtaattgacagtaagcgatt

SEQ ID NO: 366957 - DNA, 25 bp, Artificial
  probe
  misc_feature (1)..(25): SEQ ID NO: 3908; WAN024FW8; Start 1456; Stop 1480
aatgatgtaattgacagtaagcgat

SEQ ID NO: 366958 - DNA, 25 bp, Artificial
  probe
  misc_feature (1)..(25): SEQ ID NO: 3908; WAN024FW8; Start 192; Stop 216
taatgactggattcctaaggttagt

SEQ ID NO: 366959 - DNA, 25 bp, Artificial
  probe
  misc_feature (1)..(25): SEQ ID NO: 3908; WAN024FW8; Start 1338; Stop 1362
tatagttcatgtaagaggtggaggc

SEQ ID NO: 366960 - DNA, 25 bp, Artificial
  probe
  misc_feature (1)..(25): SEQ ID NO: 3908; WAN024FW8; Start 1585; Stop 1609
ccttatgatacacttcagaatccaa

SEQ ID NO: 366961 - DNA, 25 bp, Artificial
  probe
  misc_feature (1)..(25): SEQ ID NO: 3908; WAN024FW8; Start 1867; Stop 1891
actccatcagatgttctcttaatga

SEQ ID NO: 366962 - DNA, 25 bp, Artificial
  probe
  misc_feature (1)..(25): SEQ ID NO: 3908; WAN024FW8; Start 1771; Stop 1795
aataataacgaagtgatagagtggt

SEQ ID NO: 366963 - DNA, 25 bp, Artificial
  probe
  misc_feature (1)..(25): SEQ ID NO: 3908; WAN024FW8; Start 200; Stop 224
ggattcctaaggttagttcttccag

SEQ ID NO: 366964 - DNA, 25 bp, Artificial
  probe
  misc_feature (1)..(25): SEQ ID NO: 3908; WAN024FW8; Start 198; Stop 222
ctggattcctaaggttagttcttcc

SEQ ID NO: 366965 - DNA, 25 bp, Artificial
  probe
  misc_feature (1)..(25): SEQ ID NO: 3908; WAN024FW8; Start 1458; Stop 1482
tgatgtaattgacagtaagcgatta

SEQ ID NO: 366966 - DNA, 25 bp, Artificial
  probe
  misc_feature (1)..(25): SEQ ID NO: 3908; WAN024FW8; Start 173; Stop 197
aggaatggtatgtcgaagataatga

SEQ ID NO: 366967 - DNA, 25 bp, Artificial
  probe
  misc_feature (1)..(25): SEQ ID NO: 3908; WAN024FW8; Start 1583; Stop 1607
atccttatgatacacttcagaatcc

SEQ ID NO: 366968 - DNA, 25 bp, Artificial
  probe
  misc_feature (1)..(25): SEQ ID NO: 3909; WAN024FGF; Start 567; Stop 591
ggcgattatgattattctcttgacc

SEQ ID NO: 366969 - DNA, 25 bp, Artificial
  probe
  misc_feature (1)..(25): SEQ ID NO: 3909; WAN024FGF; Start 568; Stop 592
gcgattatgattattctcttgacca

SEQ ID NO: 366970 - DNA, 25 bp, Artificial
  probe
  misc_feature (1)..(25): SEQ ID NO: 3909; WAN024FGF; Start 566; Stop 590
tggcgattatgattattctcttgac

SEQ ID NO: 366971 - DNA, 25 bp, Artificial
  probe
  misc_feature (1)..(25): SEQ ID NO: 3909; WAN024FGF; Start 558; Stop 582
ggcattgatggcgattatgattatt

SEQ ID NO: 366972 - DNA, 25 bp, Artificial
  probe
  misc_feature (1)..(25): SEQ ID NO: 3909; WAN024FGF; Start 559; Stop 583
gcattgatggcgattatgattattc

SEQ ID NO: 366973 - DNA, 25 bp, Artificial
  probe
  misc_feature (1)..(25): SEQ ID NO: 3909; WAN024FGF; Start 749; Stop 773
tcatcacaacaattaactcattcca

SEQ ID NO: 366974 - DNA, 25 bp, Artificial
  probe
  misc_feature (1)..(25): SEQ ID NO: 3909; WAN024FGF; Start 750; Stop 774
catcacaacaattaactcattccag

SEQ ID NO: 366975 - DNA, 25 bp, Artificial
  probe
  misc_feature (1)..(25): SEQ ID NO: 3909; WAN024FGF; Start 745; Stop 769
gcaatcatcacaacaattaactcat

SEQ ID NO: 366976 - DNA, 25 bp, Artificial
  probe
  misc_feature (1)..(25): SEQ ID NO: 3909; WAN024FGF; Start 575; Stop 599
tgattattctcttgaccacttcagt

SEQ ID NO: 366977 - DNA, 25 bp, Artificial
  probe
  misc_feature (1)..(25): SEQ ID NO: 3909; WAN024FGF; Start 577; Stop 601
attattctcttgaccacttcagttg

SEQ ID NO: 366978 - DNA, 25 bp, Artificial
  probe
  misc_feature (1)..(25): SEQ ID NO: 3909; WAN024FGF; Start 565; Stop 589
atggcgattatgattattctcttga

SEQ ID NO: 366979 - DNA, 25 bp, Artificial
  probe
  misc_feature (1)..(25): SEQ ID NO: 3909; WAN024FGF; Start 563; Stop 587
tgatggcgattatgattattctctt

SEQ ID NO: 366980 - DNA, 25 bp, Artificial
  probe
  misc_feature (1)..(25): SEQ ID NO: 3909; WAN024FGF; Start 562; Stop 586
ttgatggcgattatgattattctct

SEQ ID NO: 366981 - DNA, 25 bp, Artificial
  probe
  misc_feature (1)..(25): SEQ ID NO: 3909; WAN024FGF; Start 751; Stop 775
atcacaacaattaactcattccagt

SEQ ID NO: 366982 - DNA, 25 bp, Artificial
  probe
  misc_feature (1)..(25): SEQ ID NO: 3909; WAN024FGF; Start 576; Stop 600
gattattctcttgaccacttcagtt

SEQ ID NO: 366983 - DNA, 25 bp, Artificial
  probe
  misc_feature (1)..(25): SEQ ID NO: 3909; WAN024FGF; Start 564; Stop 588
gatggcgattatgattattctcttg

SEQ ID NO: 366984 - DNA, 25 bp, Artificial
  probe
  misc_feature (1)..(25): SEQ ID NO: 3909; WAN024FGF; Start 574; Stop 598
atgattattctcttgaccacttcag

SEQ ID NO: 366985 - DNA, 25 bp, Artificial
  probe
  misc_feature (1)..(25): SEQ ID NO: 3909; WAN024FGF; Start 753; Stop 777
cacaacaattaactcattccagtgt

SEQ ID NO: 366986 - DNA, 25 bp, Artificial
  probe
  misc_feature (1)..(25): SEQ ID NO: 3909; WAN024FGF; Start 752; Stop 776
tcacaacaattaactcattccagtg

SEQ ID NO: 366987 - DNA, 25 bp, Artificial
  probe
  misc_feature (1)..(25): SEQ ID NO: 3909; WAN024FGF; Start 748; Stop 772
atcatcacaacaattaactcattcc

SEQ ID NO: 366988 - DNA, 25 bp, Artificial
  probe
  misc_feature (1)..(25): SEQ ID NO: 3909; WAN024FGF; Start 569; Stop 593
cgattatgattattctcttgaccac

SEQ ID NO: 366989 - DNA, 25 bp, Artificial
  probe
  misc_feature (1)..(25): SEQ ID NO: 3909; WAN024FGF; Start 560; Stop 584
cattgatggcgattatgattattct

SEQ ID NO: 366990 - DNA, 25 bp, Artificial
  probe
  misc_feature (1)..(25): SEQ ID NO: 3909; WAN024FGF; Start 561; Stop 585
attgatggcgattatgattattctc

SEQ ID NO: 366991 - DNA, 25 bp, Artificial
  probe
  misc_feature (1)..(25): SEQ ID NO: 3909; WAN024FGF; Start 578; Stop 602
ttattctcttgaccacttcagttgg

SEQ ID NO: 366992 - DNA, 25 bp, Artificial
  probe
  misc_feature (1)..(25): SEQ ID NO: 3909; WAN024FGF; Start 744; Stop 768
tgcaatcatcacaacaattaactca

SEQ ID NO: 366993 - DNA, 25 bp, Artificial
  probe
  misc_feature (1)..(25): SEQ ID NO: 3909; WAN024FGF; Start 718; Stop 742
agccttcttccaacaactctttata

SEQ ID NO: 366994 - DNA, 25 bp, Artificial
  probe
  misc_feature (1)..(25): SEQ ID NO: 3909; WAN024FGF; Start 573; Stop 597
tatgattattctcttgaccacttca

SEQ ID NO: 366995 - DNA, 25 bp, Artificial
  probe
  misc_feature (1)..(25): SEQ ID NO: 3909; WAN024FGF; Start 719; Stop 743
gccttcttccaacaactctttatat

SEQ ID NO: 366996 - DNA, 25 bp, Artificial
  probe
  misc_feature (1)..(25): SEQ ID NO: 3909; WAN024FGF; Start 717; Stop 741
aagccttcttccaacaactctttat

SEQ ID NO: 366997 - DNA, 25 bp, Artificial
  probe
  misc_feature (1)..(25): SEQ ID NO: 3909; WAN024FGF; Start 57; Stop 81
tattctatttgaaagagaggtgccg

SEQ ID NO: 366998 - DNA, 25 bp, Artificial
  probe
  misc_feature (1)..(25): SEQ ID NO: 3909; WAN024FGF; Start 528; Stop 552
aaacatttcttggttgggagataaa

SEQ ID NO: 366999 - DNA, 25 bp, Artificial
  probe
  misc_feature (1)..(25): SEQ ID NO: 3909; WAN024FGF; Start 635; Stop 659
ggaatattgacaattcactggttga

SEQ ID NO: 367000 - DNA, 25 bp, Artificial
  probe
  misc_feature (1)..(25): SEQ ID NO: 3909; WAN024FGF; Start 829; Stop 853
accttgatgtactacctttacgaaa

SEQ ID NO: 367001 - DNA, 25 bp, Artificial
  probe
  misc_feature (1)..(25): SEQ ID NO: 3910; WAN024GGQ; Start 31; Stop 55
ctcatcatcaaatccagtcaacaaa

SEQ ID NO: 367002 - DNA, 25 bp, Artificial
  probe
  misc_feature (1)..(25): SEQ ID NO: 3910; WAN024GGQ; Start 35; Stop 59
tcatcaaatccagtcaacaaatcaa

SEQ ID NO: 367003 - DNA, 25 bp, Artificial
  probe
  misc_feature (1)..(25): SEQ ID NO: 3910; WAN024GGQ; Start 34; Stop 58
atcatcaaatccagtcaacaaatca

SEQ ID NO: 367004 - DNA, 25 bp, Artificial
  probe
  misc_feature (1)..(25): SEQ ID NO: 3910; WAN024GGQ; Start 32; Stop 56
tcatcatcaaatccagtcaacaaat

SEQ ID NO: 367005 - DNA, 25 bp, Artificial
  probe
  misc_feature (1)..(25): SEQ ID NO: 3910; WAN024GGQ; Start 27; Stop 51
cttcctcatcatcaaatccagtcaa

SEQ ID NO: 367006 - DNA, 25 bp, Artificial
  probe
  misc_feature (1)..(25): SEQ ID NO: 3910; WAN024GGQ; Start 33; Stop 57
catcatcaaatccagtcaacaaatc

SEQ ID NO: 367007 - DNA, 25 bp, Artificial
  probe
  misc_feature (1)..(25): SEQ ID NO: 3910; WAN024GGQ; Start 28; Stop 52
ttcctcatcatcaaatccagtcaac

SEQ ID NO: 367008 - DNA, 25 bp, Artificial
  probe
  misc_feature (1)..(25): SEQ ID NO: 3910; WAN024GGQ; Start 30; Stop 54
cctcatcatcaaatccagtcaacaa

SEQ ID NO: 367009 - DNA, 25 bp, Artificial
  probe
  misc_feature (1)..(25): SEQ ID NO: 3910; WAN024GGQ; Start 201; Stop 225
ccaacatttccagaccatattgaac

SEQ ID NO: 367010 - DNA, 25 bp, Artificial
  probe
  misc_feature (1)..(25): SEQ ID NO: 3910; WAN024GGQ; Start 202; Stop 226
caacatttccagaccatattgaact

SEQ ID NO: 367011 - DNA, 25 bp, Artificial
  probe
  misc_feature (1)..(25): SEQ ID NO: 3910; WAN024GGQ; Start 37; Stop 61
atcaaatccagtcaacaaatcaatg

SEQ ID NO: 367012 - DNA, 25 bp, Artificial
  probe
  misc_feature (1)..(25): SEQ ID NO: 3910; WAN024GGQ; Start 36; Stop 60
catcaaatccagtcaacaaatcaat

SEQ ID NO: 367013 - DNA, 25 bp, Artificial
  probe
  misc_feature (1)..(25): SEQ ID NO: 3910; WAN024GGQ; Start 200; Stop 224
cccaacatttccagaccatattgaa

SEQ ID NO: 367014 - DNA, 25 bp, Artificial
  probe
  misc_feature (1)..(25): SEQ ID NO: 3910; WAN024GGQ; Start 29; Stop 53
tcctcatcatcaaatccagtcaaca

SEQ ID NO: 367015 - DNA, 25 bp, Artificial
  probe
  misc_feature (1)..(25): SEQ ID NO: 3910; WAN024GGQ; Start 117; Stop 141
aaccaaccgtttcttctgttacttc

SEQ ID NO: 367016 - DNA, 25 bp, Artificial
  probe
  misc_feature (1)..(25): SEQ ID NO: 3910; WAN024GGQ; Start 204; Stop 228
acatttccagaccatattgaactaa

SEQ ID NO: 367017 - DNA, 25 bp, Artificial
  probe
  misc_feature (1)..(25): SEQ ID NO: 3910; WAN024GGQ; Start 203; Stop 227
aacatttccagaccatattgaacta

SEQ ID NO: 367018 - DNA, 25 bp, Artificial
  probe
  misc_feature (1)..(25): SEQ ID NO: 3910; WAN024GGQ; Start 196; Stop 220
atgacccaacatttccagaccatat

SEQ ID NO: 367019 - DNA, 25 bp, Artificial
  probe
  misc_feature (1)..(25): SEQ ID NO: 3910; WAN024GGQ; Start 197; Stop 221
tgacccaacatttccagaccatatt

SEQ ID NO: 367020 - DNA, 25 bp, Artificial
  probe
  misc_feature (1)..(25): SEQ ID NO: 3910; WAN024GGQ; Start 198; Stop 222
gacccaacatttccagaccatattg

SEQ ID NO: 367021 - DNA, 25 bp, Artificial
  probe
  misc_feature (1)..(25): SEQ ID NO: 3910; WAN024GGQ; Start 121; Stop 145
aaccgtttcttctgttacttcgttg

SEQ ID NO: 367022 - DNA, 25 bp, Artificial
  probe
  misc_feature (1)..(25): SEQ ID NO: 3910; WAN024GGQ; Start 120; Stop 144
caaccgtttcttctgttacttcgtt

SEQ ID NO: 367023 - DNA, 25 bp, Artificial
  probe
  misc_feature (1)..(25): SEQ ID NO: 3910; WAN024GGQ; Start 199; Stop 223
acccaacatttccagaccatattga

SEQ ID NO: 367024 - DNA, 25 bp, Artificial
  probe
  misc_feature (1)..(25): SEQ ID NO: 3910; WAN024GGQ; Start 38; Stop 62
tcaaatccagtcaacaaatcaatgg

SEQ ID NO: 367025 - DNA, 25 bp, Artificial
  probe
  misc_feature (1)..(25): SEQ ID NO: 3910; WAN024GGQ; Start 195; Stop 219
tatgacccaacatttccagaccata

SEQ ID NO: 367026 - DNA, 25 bp, Artificial
  probe
  misc_feature (1)..(25): SEQ ID NO: 3910; WAN024GGQ; Start 26; Stop 50
gcttcctcatcatcaaatccagtca

SEQ ID NO: 367027 - DNA, 25 bp, Artificial
  probe
  misc_feature (1)..(25): SEQ ID NO: 3910; WAN024GGQ; Start 194; Stop 218
gtatgacccaacatttccagaccat

SEQ ID NO: 367028 - DNA, 25 bp, Artificial
  probe
  misc_feature (1)..(25): SEQ ID NO: 3910; WAN024GGQ; Start 94; Stop 118
attcaaacgaggagcaatctggaaa

SEQ ID NO: 367029 - DNA, 25 bp, Artificial
  probe
  misc_feature (1)..(25): SEQ ID NO: 3910; WAN024GGQ; Start 39; Stop 63
caaatccagtcaacaaatcaatggc

SEQ ID NO: 367030 - DNA, 25 bp, Artificial
  probe
  misc_feature (1)..(25): SEQ ID NO: 3910; WAN024GGQ; Start 40; Stop 64
aaatccagtcaacaaatcaatggca

SEQ ID NO: 367031 - DNA, 25 bp, Artificial
  probe
  misc_feature (1)..(25): SEQ ID NO: 3910; WAN024GGQ; Start 125; Stop 149
gtttcttctgttacttcgttggcag

SEQ ID NO: 367032 - DNA, 25 bp, Artificial
  probe
  misc_feature (1)..(25): SEQ ID NO: 3910; WAN024GGQ; Start 122; Stop 146
accgtttcttctgttacttcgttgg

SEQ ID NO: 367033 - DNA, 25 bp, Artificial
  probe
  misc_feature (1)..(25): SEQ ID NO: 3910; WAN024GGQ; Start 116; Stop 140
aaaccaaccgtttcttctgttactt

SEQ ID NO: 367034 - DNA, 25 bp, Artificial
  probe
  misc_feature (1)..(25): SEQ ID NO: 3911; WAN024GG6; Start 64; Stop 88
ttcaaatctggcatcttagtttctg

SEQ ID NO: 367035 - DNA, 25 bp, Artificial
  probe
  misc_feature (1)..(25): SEQ ID NO: 3911; WAN024GG6; Start 63; Stop 87
gttcaaatctggcatcttagtttct

SEQ ID NO: 367036 - DNA, 25 bp, Artificial
  probe
  misc_feature (1)..(25): SEQ ID NO: 3911; WAN024GG6; Start 62; Stop 86
cgttcaaatctggcatcttagtttc

SEQ ID NO: 367037 - DNA, 25 bp, Artificial
  probe
  misc_feature (1)..(25): SEQ ID NO: 3911; WAN024GG6; Start 107; Stop 131
cacgagtaactgtagcaactttagt

SEQ ID NO: 367038 - DNA, 25 bp, Artificial
  probe
  misc_feature (1)..(25): SEQ ID NO: 3911; WAN024GG6; Start 61; Stop 85
gcgttcaaatctggcatcttagttt

SEQ ID NO: 367039 - DNA, 25 bp, Artificial
  probe
  misc_feature (1)..(25): SEQ ID NO: 3911; WAN024GG6; Start 106; Stop 130
gcacgagtaactgtagcaactttag

SEQ ID NO: 367040 - DNA, 25 bp, Artificial
  probe
  misc_feature (1)..(25): SEQ ID NO: 3911; WAN024GG6; Start 82; Stop 106
gtttctgcaatttcttgtacttgtg

SEQ ID NO: 367041 - DNA, 25 bp, Artificial
  probe
  misc_feature (1)..(25): SEQ ID NO: 3911; WAN024GG6; Start 81; Stop 105
agtttctgcaatttcttgtacttgt

SEQ ID NO: 367042 - DNA, 25 bp, Artificial
  probe
  misc_feature (1)..(25): SEQ ID NO: 3911; WAN024GG6; Start 1; Stop 25
gtgaatcccatagaacgagcagtac

SEQ ID NO: 367043 - DNA, 25 bp, Artificial
  probe
  misc_feature (1)..(25): SEQ ID NO: 3911; WAN024GG6; Start 75; Stop 99
catcttagtttctgcaatttcttgt

SEQ ID NO: 367044 - DNA, 25 bp, Artificial
  probe
  misc_feature (1)..(25): SEQ ID NO: 3911; WAN024GG6; Start 108; Stop 132
acgagtaactgtagcaactttagtt

SEQ ID NO: 367045 - DNA, 25 bp, Artificial
  probe
  misc_feature (1)..(25): SEQ ID NO: 3911; WAN024GG6; Start 30; Stop 54
gatcatacgcattgcagactctacg

SEQ ID NO: 367046 - DNA, 25 bp, Artificial
  probe
  misc_feature (1)..(25): SEQ ID NO: 3911; WAN024GG6; Start 29; Stop 53
cgatcatacgcattgcagactctac

SEQ ID NO: 367047 - DNA, 25 bp, Artificial
  probe
  misc_feature (1)..(25): SEQ ID NO: 3911; WAN024GG6; Start 4; Stop 28
aatcccatagaacgagcagtacctt

SEQ ID NO: 367048 - DNA, 25 bp, Artificial
  probe
  misc_feature (1)..(25): SEQ ID NO: 3911; WAN024GG6; Start 80; Stop 104
tagtttctgcaatttcttgtacttg

SEQ ID NO: 367049 - DNA, 25 bp, Artificial
  probe
  misc_feature (1)..(25): SEQ ID NO: 3911; WAN024GG6; Start 109; Stop 133
cgagtaactgtagcaactttagttt

SEQ ID NO: 367050 - DNA, 25 bp, Artificial
  probe
  misc_feature (1)..(25): SEQ ID NO: 3911; WAN024GG6; Start 28; Stop 52
tcgatcatacgcattgcagactcta

SEQ ID NO: 367051 - DNA, 25 bp, Artificial
  probe
  misc_feature (1)..(25): SEQ ID NO: 3911; WAN024GG6; Start 77; Stop 101
tcttagtttctgcaatttcttgtac

SEQ ID NO: 367052 - DNA, 25 bp, Artificial
  probe
  misc_feature (1)..(25): SEQ ID NO: 3911; WAN024GG6; Start 78; Stop 102
cttagtttctgcaatttcttgtact

SEQ ID NO: 367053 - DNA, 25 bp, Artificial
  probe
  misc_feature (1)..(25): SEQ ID NO: 3911; WAN024GG6; Start 9; Stop 33
catagaacgagcagtaccttcgatc

SEQ ID NO: 367054 - DNA, 25 bp, Artificial
  probe
  misc_feature (1)..(25): SEQ ID NO: 3911; WAN024GG6; Start 65; Stop 89
tcaaatctggcatcttagtttctgc

SEQ ID NO: 367055 - DNA, 25 bp, Artificial
  probe
  misc_feature (1)..(25): SEQ ID NO: 3911; WAN024GG6; Start 20; Stop 44
cagtaccttcgatcatacgcattgc

SEQ ID NO: 367056 - DNA, 25 bp, Artificial
  probe
  misc_feature (1)..(25): SEQ ID NO: 3911; WAN024GG6; Start 19; Stop 43
gcagtaccttcgatcatacgcattg

SEQ ID NO: 367057 - DNA, 25 bp, Artificial
  probe
  misc_feature (1)..(25): SEQ ID NO: 3911; WAN024GG6; Start 18; Stop 42
agcagtaccttcgatcatacgcatt

SEQ ID NO: 367058 - DNA, 25 bp, Artificial
  probe
  misc_feature (1)..(25): SEQ ID NO: 3911; WAN024GG6; Start 3; Stop 27
gaatcccatagaacgagcagtacct

SEQ ID NO: 367059 - DNA, 25 bp, Artificial
  probe
  misc_feature (1)..(25): SEQ ID NO: 3911; WAN024GG6; Start 13; Stop 37
gaacgagcagtaccttcgatcatac

SEQ ID NO: 367060 - DNA, 25 bp, Artificial
  probe
  misc_feature (1)..(25): SEQ ID NO: 3911; WAN024GG6; Start 12; Stop 36
agaacgagcagtaccttcgatcata

SEQ ID NO: 367061 - DNA, 25 bp, Artificial
  probe
  misc_feature (1)..(25): SEQ ID NO: 3911; WAN024GG6; Start 11; Stop 35
tagaacgagcagtaccttcgatcat

SEQ ID NO: 367062 - DNA, 25 bp, Artificial
  probe
  misc_feature (1)..(25): SEQ ID NO: 3911; WAN024GG6; Start 10; Stop 34
atagaacgagcagtaccttcgatca

SEQ ID NO: 367063 - DNA, 25 bp, Artificial
  probe
  misc_feature (1)..(25): SEQ ID NO: 3911; WAN024GG6; Start 79; Stop 103
ttagtttctgcaatttcttgtactt

SEQ ID NO: 367064 - DNA, 25 bp, Artificial
  probe
  misc_feature (1)..(25): SEQ ID NO: 3911; WAN024GG6; Start 5; Stop 29
atcccatagaacgagcagtaccttc

SEQ ID NO: 367065 - DNA, 25 bp, Artificial
  probe
  misc_feature (1)..(25): SEQ ID NO: 3911; WAN024GG6; Start 26; Stop 50
cttcgatcatacgcattgcagactc

SEQ ID NO: 367066 - DNA, 25 bp, Artificial
  probe
  misc_feature (1)..(25): SEQ ID NO: 3911; WAN024GG6; Start 23; Stop 47
taccttcgatcatacgcattgcaga

SEQ ID NO: 367067 - DNA, 25 bp, Artificial
  probe
  misc_feature (1)..(25): SEQ ID NO: 3912; WAN024DFJ; Start 315; Stop 339
attggagtatggaatggtctatctg

SEQ ID NO: 367068 - DNA, 25 bp, Artificial
  probe
  misc_feature (1)..(25): SEQ ID NO: 3912; WAN024DFJ; Start 319; Stop 343
gagtatggaatggtctatctggttg

SEQ ID NO: 367069 - DNA, 25 bp, Artificial
  probe
  misc_feature (1)..(25): SEQ ID NO: 3912; WAN024DFJ; Start 4; Stop 28
aatcttatgctccaacaactcgtaa

SEQ ID NO: 367070 - DNA, 25 bp, Artificial
  probe
  misc_feature (1)..(25): SEQ ID NO: 3912; WAN024DFJ; Start 312; Stop 336
cctattggagtatggaatggtctat

SEQ ID NO: 367071 - DNA, 25 bp, Artificial
  probe
  misc_feature (1)..(25): SEQ ID NO: 3912; WAN024DFJ; Start 3; Stop 27
gaatcttatgctccaacaactcgta

SEQ ID NO: 367072 - DNA, 25 bp, Artificial
  probe
  misc_feature (1)..(25): SEQ ID NO: 3912; WAN024DFJ; Start 218; Stop 242
ctattcttggtgtcgtgattgagtt

SEQ ID NO: 367073 - DNA, 25 bp, Artificial
  probe
  misc_feature (1)..(25): SEQ ID NO: 3912; WAN024DFJ; Start 318; Stop 342
ggagtatggaatggtctatctggtt

SEQ ID NO: 367074 - DNA, 25 bp, Artificial
  probe
  misc_feature (1)..(25): SEQ ID NO: 3912; WAN024DFJ; Start 316; Stop 340
ttggagtatggaatggtctatctgg

SEQ ID NO: 367075 - DNA, 25 bp, Artificial
  probe
  misc_feature (1)..(25): SEQ ID NO: 3912; WAN024DFJ; Start 320; Stop 344
agtatggaatggtctatctggttgg

SEQ ID NO: 367076 - DNA, 25 bp, Artificial
  probe
  misc_feature (1)..(25): SEQ ID NO: 3912; WAN024DFJ; Start 811; Stop 835
atcttgttgttgatcttgattgtcc

SEQ ID NO: 367077 - DNA, 25 bp, Artificial
  probe
  misc_feature (1)..(25): SEQ ID NO: 3912; WAN024DFJ; Start 314; Stop 338
tattggagtatggaatggtctatct

SEQ ID NO: 367078 - DNA, 25 bp, Artificial
  probe
  misc_feature (1)..(25): SEQ ID NO: 3912; WAN024DFJ; Start 322; Stop 346
tatggaatggtctatctggttggtg

SEQ ID NO: 367079 - DNA, 25 bp, Artificial
  probe
  misc_feature (1)..(25): SEQ ID NO: 3912; WAN024DFJ; Start 321; Stop 345
gtatggaatggtctatctggttggt

SEQ ID NO: 367080 - DNA, 25 bp, Artificial
  probe
  misc_feature (1)..(25): SEQ ID NO: 3912; WAN024DFJ; Start 313; Stop 337
ctattggagtatggaatggtctatc

SEQ ID NO: 367081 - DNA, 25 bp, Artificial
  probe
  misc_feature (1)..(25): SEQ ID NO: 3912; WAN024DFJ; Start 691; Stop 715
gtacttggtggtatcggaattattc

SEQ ID NO: 367082 - DNA, 25 bp, Artificial
  probe
  misc_feature (1)..(25): SEQ ID NO: 3912; WAN024DFJ; Start 806; Stop 830
atggaatcttgttgttgatcttgat

SEQ ID NO: 367083 - DNA, 25 bp, Artificial
  probe
  misc_feature (1)..(25): SEQ ID NO: 3912; WAN024DFJ; Start 317; Stop 341
tggagtatggaatggtctatctggt

SEQ ID NO: 367084 - DNA, 25 bp, Artificial
  probe
  misc_feature (1)..(25): SEQ ID NO: 3912; WAN024DFJ; Start 1; Stop 25
gtgaatcttatgctccaacaactcg

SEQ ID NO: 367085 - DNA, 25 bp, Artificial
  probe
  misc_feature (1)..(25): SEQ ID NO: 3912; WAN024DFJ; Start 805; Stop 829
tatggaatcttgttgttgatcttga

SEQ ID NO: 367086 - DNA, 25 bp, Artificial
  probe
  misc_feature (1)..(25): SEQ ID NO: 3912; WAN024DFJ; Start 812; Stop 836
tcttgttgttgatcttgattgtccg

SEQ ID NO: 367087 - DNA, 25 bp, Artificial
  probe
  misc_feature (1)..(25): SEQ ID NO: 3912; WAN024DFJ; Start 311; Stop 335
tcctattggagtatggaatggtcta

SEQ ID NO: 367088 - DNA, 25 bp, Artificial
  probe
  misc_feature (1)..(25): SEQ ID NO: 3912; WAN024DFJ; Start 85; Stop 109
tacggaattatcaagctcatcaact

SEQ ID NO: 367089 - DNA, 25 bp, Artificial
  probe
  misc_feature (1)..(25): SEQ ID NO: 3912; WAN024DFJ; Start 84; Stop 108
ttacggaattatcaagctcatcaac

SEQ ID NO: 367090 - DNA, 25 bp, Artificial
  probe
  misc_feature (1)..(25): SEQ ID NO: 3912; WAN024DFJ; Start 2; Stop 26
tgaatcttatgctccaacaactcgt

SEQ ID NO: 367091 - DNA, 25 bp, Artificial
  probe
  misc_feature (1)..(25): SEQ ID NO: 3912; WAN024DFJ; Start 88; Stop 112
ggaattatcaagctcatcaacttcg

SEQ ID NO: 367092 - DNA, 25 bp, Artificial
  probe
  misc_feature (1)..(25): SEQ ID NO: 3912; WAN024DFJ; Start 87; Stop 111
cggaattatcaagctcatcaacttc

SEQ ID NO: 367093 - DNA, 25 bp, Artificial
  probe
  misc_feature (1)..(25): SEQ ID NO: 3912; WAN024DFJ; Start 86; Stop 110
acggaattatcaagctcatcaactt

SEQ ID NO: 367094 - DNA, 25 bp, Artificial
  probe
  misc_feature (1)..(25): SEQ ID NO: 3912; WAN024DFJ; Start 89; Stop 113
gaattatcaagctcatcaacttcgc

SEQ ID NO: 367095 - DNA, 25 bp, Artificial
  probe
  misc_feature (1)..(25): SEQ ID NO: 3912; WAN024DFJ; Start 804; Stop 828
ttatggaatcttgttgttgatcttg

SEQ ID NO: 367096 - DNA, 25 bp, Artificial
  probe
  misc_feature (1)..(25): SEQ ID NO: 3912; WAN024DFJ; Start 117; Stop 141
tggtgatatttatatgatgggagcc

SEQ ID NO: 367097 - DNA, 25 bp, Artificial
  probe
  misc_feature (1)..(25): SEQ ID NO: 3912; WAN024DFJ; Start 118; Stop 142
ggtgatatttatatgatgggagcct

SEQ ID NO: 367098 - DNA, 25 bp, Artificial
  probe
  misc_feature (1)..(25): SEQ ID NO: 3912; WAN024DFJ; Start 7; Stop 31
cttatgctccaacaactcgtaaatg

SEQ ID NO: 367099 - DNA, 25 bp, Artificial
  probe
  misc_feature (1)..(25): SEQ ID NO: 3912; WAN024DFJ; Start 6; Stop 30
tcttatgctccaacaactcgtaaat

SEQ ID NO: 367100 - DNA, 25 bp, Artificial
  probe
  misc_feature (1)..(25): SEQ ID NO: 3913; WAN024DHK; Start 520; Stop 544
tcgcaacatactgacttaccaataa

SEQ ID NO: 367101 - DNA, 25 bp, Artificial
  probe
  misc_feature (1)..(25): SEQ ID NO: 3913; WAN024DHK; Start 519; Stop 543
ttcgcaacatactgacttaccaata

SEQ ID NO: 367102 - DNA, 25 bp, Artificial
  probe
  misc_feature (1)..(25): SEQ ID NO: 3913; WAN024DHK; Start 517; Stop 541
tattcgcaacatactgacttaccaa

SEQ ID NO: 367103 - DNA, 25 bp, Artificial
  probe
  misc_feature (1)..(25): SEQ ID NO: 3913; WAN024DHK; Start 516; Stop 540
ttattcgcaacatactgacttacca

SEQ ID NO: 367104 - DNA, 25 bp, Artificial
  probe
  misc_feature (1)..(25): SEQ ID NO: 3913; WAN024DHK; Start 515; Stop 539
attattcgcaacatactgacttacc

SEQ ID NO: 367105 - DNA, 25 bp, Artificial
  probe
  misc_feature (1)..(25): SEQ ID NO: 3913; WAN024DHK; Start 518; Stop 542
attcgcaacatactgacttaccaat

SEQ ID NO: 367106 - DNA, 25 bp, Artificial
  probe
  misc_feature (1)..(25): SEQ ID NO: 3913; WAN024DHK; Start 162; Stop 186
catctctgatattgaaccaaccaag

SEQ ID NO: 367107 - DNA, 25 bp, Artificial
  probe
  misc_feature (1)..(25): SEQ ID NO: 3913; WAN024DHK; Start 163; Stop 187
atctctgatattgaaccaaccaagg

SEQ ID NO: 367108 - DNA, 25 bp, Artificial
  probe
  misc_feature (1)..(25): SEQ ID NO: 3913; WAN024DHK; Start 165; Stop 189
ctctgatattgaaccaaccaaggaa

SEQ ID NO: 367109 - DNA, 25 bp, Artificial
  probe
  misc_feature (1)..(25): SEQ ID NO: 3913; WAN024DHK; Start 161; Stop 185
tcatctctgatattgaaccaaccaa

SEQ ID NO: 367110 - DNA, 25 bp, Artificial
  probe
  misc_feature (1)..(25): SEQ ID NO: 3913; WAN024DHK; Start 160; Stop 184
gtcatctctgatattgaaccaacca

SEQ ID NO: 367111 - DNA, 25 bp, Artificial
  probe
  misc_feature (1)..(25): SEQ ID NO: 3913; WAN024DHK; Start 159; Stop 183
tgtcatctctgatattgaaccaacc

SEQ ID NO: 367112 - DNA, 25 bp, Artificial
  probe
  misc_feature (1)..(25): SEQ ID NO: 3913; WAN024DHK; Start 158; Stop 182
ttgtcatctctgatattgaaccaac

SEQ ID NO: 367113 - DNA, 25 bp, Artificial
  probe
  misc_feature (1)..(25): SEQ ID NO: 3913; WAN024DHK; Start 164; Stop 188
tctctgatattgaaccaaccaagga

SEQ ID NO: 367114 - DNA, 25 bp, Artificial
  probe
  misc_feature (1)..(25): SEQ ID NO: 3913; WAN024DHK; Start 157; Stop 181
attgtcatctctgatattgaaccaa

SEQ ID NO: 367115 - DNA, 25 bp, Artificial
  probe
  misc_feature (1)..(25): SEQ ID NO: 3913; WAN024DHK; Start 514; Stop 538
aattattcgcaacatactgacttac

SEQ ID NO: 367116 - DNA, 25 bp, Artificial
  probe
  misc_feature (1)..(25): SEQ ID NO: 3913; WAN024DHK; Start 154; Stop 178
cgtattgtcatctctgatattgaac

SEQ ID NO: 367117 - DNA, 25 bp, Artificial
  probe
  misc_feature (1)..(25): SEQ ID NO: 3913; WAN024DHK; Start 179; Stop 203
caaccaaggaaataatgtcagtctc

SEQ ID NO: 367118 - DNA, 25 bp, Artificial
  probe
  misc_feature (1)..(25): SEQ ID NO: 3913; WAN024DHK; Start 521; Stop 545
cgcaacatactgacttaccaataaa

SEQ ID NO: 367119 - DNA, 25 bp, Artificial
  probe
  misc_feature (1)..(25): SEQ ID NO: 3913; WAN024DHK; Start 175; Stop 199
gaaccaaccaaggaaataatgtcag

SEQ ID NO: 367120 - DNA, 25 bp, Artificial
  probe
  misc_feature (1)..(25): SEQ ID NO: 3913; WAN024DHK; Start 8; Stop 32
ggaggaataagatgagcgatgtaaa

SEQ ID NO: 367121 - DNA, 25 bp, Artificial
  probe
  misc_feature (1)..(25): SEQ ID NO: 3913; WAN024DHK; Start 881; Stop 905
attatactatgtcaccacttgcagc

SEQ ID NO: 367122 - DNA, 25 bp, Artificial
  probe
  misc_feature (1)..(25): SEQ ID NO: 3913; WAN024DHK; Start 176; Stop 200
aaccaaccaaggaaataatgtcagt

SEQ ID NO: 367123 - DNA, 25 bp, Artificial
  probe
  misc_feature (1)..(25): SEQ ID NO: 3913; WAN024DHK; Start 156; Stop 180
tattgtcatctctgatattgaacca

SEQ ID NO: 367124 - DNA, 25 bp, Artificial
  probe
  misc_feature (1)..(25): SEQ ID NO: 3913; WAN024DHK; Start 178; Stop 202
ccaaccaaggaaataatgtcagtct

SEQ ID NO: 367125 - DNA, 25 bp, Artificial
  probe
  misc_feature (1)..(25): SEQ ID NO: 3913; WAN024DHK; Start 880; Stop 904
aattatactatgtcaccacttgcag

SEQ ID NO: 367126 - DNA, 25 bp, Artificial
  probe
  misc_feature (1)..(25): SEQ ID NO: 3913; WAN024DHK; Start 325; Stop 349
attgaagaggcagatgtaaatcgtt

SEQ ID NO: 367127 - DNA, 25 bp, Artificial
  probe
  misc_feature (1)..(25): SEQ ID NO: 3913; WAN024DHK; Start 323; Stop 347
aaattgaagaggcagatgtaaatcg

SEQ ID NO: 367128 - DNA, 25 bp, Artificial
  probe
  misc_feature (1)..(25): SEQ ID NO: 3913; WAN024DHK; Start 180; Stop 204
aaccaaggaaataatgtcagtctcg

SEQ ID NO: 367129 - DNA, 25 bp, Artificial
  probe
  misc_feature (1)..(25): SEQ ID NO: 3913; WAN024DHK; Start 155; Stop 179
gtattgtcatctctgatattgaacc

SEQ ID NO: 367130 - DNA, 25 bp, Artificial
  probe
  misc_feature (1)..(25): SEQ ID NO: 3913; WAN024DHK; Start 101; Stop 125
atagtgatattatcgagcgattagc

SEQ ID NO: 367131 - DNA, 25 bp, Artificial
  probe
  misc_feature (1)..(25): SEQ ID NO: 3913; WAN024DHK; Start 73; Stop 97
attgatgttgagtatgctgaattaa

SEQ ID NO: 367132 - DNA, 25 bp, Artificial
  probe
  misc_feature (1)..(25): SEQ ID NO: 3913; WAN024DHK; Start 326; Stop 350
ttgaagaggcagatgtaaatcgttt

SEQ ID NO: 367133 - DNA, 25 bp, Artificial
  probe
  misc_feature (1)..(25): SEQ ID NO: 3914; WAN024ALL; Start 136; Stop 160
gacctatcttacttctgcttgttag

SEQ ID NO: 367134 - DNA, 25 bp, Artificial
  probe
  misc_feature (1)..(25): SEQ ID NO: 3914; WAN024ALL; Start 135; Stop 159
agacctatcttacttctgcttgtta

SEQ ID NO: 367135 - DNA, 25 bp, Artificial
  probe
  misc_feature (1)..(25): SEQ ID NO: 3914; WAN024ALL; Start 310; Stop 334
aatgccaccttaaccgtgataatag

SEQ ID NO: 367136 - DNA, 25 bp, Artificial
  probe
  misc_feature (1)..(25): SEQ ID NO: 3914; WAN024ALL; Start 276; Stop 300
tgtcttccaaacttctttattccat

SEQ ID NO: 367137 - DNA, 25 bp, Artificial
  probe
  misc_feature (1)..(25): SEQ ID NO: 3914; WAN024ALL; Start 275; Stop 299
atgtcttccaaacttctttattcca

SEQ ID NO: 367138 - DNA, 25 bp, Artificial
  probe
  misc_feature (1)..(25): SEQ ID NO: 3914; WAN024ALL; Start 137; Stop 161
acctatcttacttctgcttgttagc

SEQ ID NO: 367139 - DNA, 25 bp, Artificial
  probe
  misc_feature (1)..(25): SEQ ID NO: 3914; WAN024ALL; Start 134; Stop 158
aagacctatcttacttctgcttgtt

SEQ ID NO: 367140 - DNA, 25 bp, Artificial
  probe
  misc_feature (1)..(25): SEQ ID NO: 3914; WAN024ALL; Start 53; Stop 77
tgatatacttcccttgggctactag

SEQ ID NO: 367141 - DNA, 25 bp, Artificial
  probe
  misc_feature (1)..(25): SEQ ID NO: 3914; WAN024ALL; Start 52; Stop 76
ctgatatacttcccttgggctacta

SEQ ID NO: 367142 - DNA, 25 bp, Artificial
  probe
  misc_feature (1)..(25): SEQ ID NO: 3914; WAN024ALL; Start 301; Stop 325
atttaatgaaatgccaccttaaccg

SEQ ID NO: 367143 - DNA, 25 bp, Artificial
  probe
  misc_feature (1)..(25): SEQ ID NO: 3914; WAN024ALL; Start 302; Stop 326
tttaatgaaatgccaccttaaccgt

SEQ ID NO: 367144 - DNA, 25 bp, Artificial
  probe
  misc_feature (1)..(25): SEQ ID NO: 3914; WAN024ALL; Start 43; Stop 67
ctctcctccctgatatacttccctt

SEQ ID NO: 367145 - DNA, 25 bp, Artificial
  probe
  misc_feature (1)..(25): SEQ ID NO: 3914; WAN024ALL; Start 296; Stop 320
tccatatttaatgaaatgccacctt

SEQ ID NO: 367146 - DNA, 25 bp, Artificial
  probe
  misc_feature (1)..(25): SEQ ID NO: 3914; WAN024ALL; Start 295; Stop 319
ttccatatttaatgaaatgccacct

SEQ ID NO: 367147 - DNA, 25 bp, Artificial
  probe
  misc_feature (1)..(25): SEQ ID NO: 3914; WAN024ALL; Start 316; Stop 340
accttaaccgtgataatagctagtc

SEQ ID NO: 367148 - DNA, 25 bp, Artificial
  probe
  misc_feature (1)..(25): SEQ ID NO: 3914; WAN024ALL; Start 309; Stop 333
aaatgccaccttaaccgtgataata

SEQ ID NO: 367149 - DNA, 25 bp, Artificial
  probe
  misc_feature (1)..(25): SEQ ID NO: 3914; WAN024ALL; Start 274; Stop 298
aatgtcttccaaacttctttattcc

SEQ ID NO: 367150 - DNA, 25 bp, Artificial
  probe
  misc_feature (1)..(25): SEQ ID NO: 3914; WAN024ALL; Start 44; Stop 68
tctcctccctgatatacttcccttg

SEQ ID NO: 367151 - DNA, 25 bp, Artificial
  probe
  misc_feature (1)..(25): SEQ ID NO: 3914; WAN024ALL; Start 311; Stop 335
atgccaccttaaccgtgataatagc

SEQ ID NO: 367152 - DNA, 25 bp, Artificial
  probe
  misc_feature (1)..(25): SEQ ID NO: 3914; WAN024ALL; Start 5; Stop 29
attcacccagctttcatatagagag

SEQ ID NO: 367153 - DNA, 25 bp, Artificial
  probe
  misc_feature (1)..(25): SEQ ID NO: 3914; WAN024ALL; Start 17; Stop 41
ttcatatagagagcttgcagtcacg

SEQ ID NO: 367154 - DNA, 25 bp, Artificial
  probe
  misc_feature (1)..(25): SEQ ID NO: 3914; WAN024ALL; Start 138; Stop 162
cctatcttacttctgcttgttagct

SEQ ID NO: 367155 - DNA, 25 bp, Artificial
  probe
  misc_feature (1)..(25): SEQ ID NO: 3914; WAN024ALL; Start 4; Stop 28
aattcacccagctttcatatagaga

SEQ ID NO: 367156 - DNA, 25 bp, Artificial
  probe
  misc_feature (1)..(25): SEQ ID NO: 3914; WAN024ALL; Start 294; Stop 318
attccatatttaatgaaatgccacc

SEQ ID NO: 367157 - DNA, 25 bp, Artificial
  probe
  misc_feature (1)..(25): SEQ ID NO: 3914; WAN024ALL; Start 317; Stop 341
ccttaaccgtgataatagctagtca

SEQ ID NO: 367158 - DNA, 25 bp, Artificial
  probe
  misc_feature (1)..(25): SEQ ID NO: 3914; WAN024ALL; Start 308; Stop 332
gaaatgccaccttaaccgtgataat

SEQ ID NO: 367159 - DNA, 25 bp, Artificial
  probe
  misc_feature (1)..(25): SEQ ID NO: 3914; WAN024ALL; Start 15; Stop 39
ctttcatatagagagcttgcagtca

SEQ ID NO: 367160 - DNA, 25 bp, Artificial
  probe
  misc_feature (1)..(25): SEQ ID NO: 3914; WAN024ALL; Start 139; Stop 163
ctatcttacttctgcttgttagctt

SEQ ID NO: 367161 - DNA, 25 bp, Artificial
  probe
  misc_feature (1)..(25): SEQ ID NO: 3914; WAN024ALL; Start 16; Stop 40
tttcatatagagagcttgcagtcac

SEQ ID NO: 367162 - DNA, 25 bp, Artificial
  probe
  misc_feature (1)..(25): SEQ ID NO: 3914; WAN024ALL; Start 300; Stop 324
tatttaatgaaatgccaccttaacc

SEQ ID NO: 367163 - DNA, 25 bp, Artificial
  probe
  misc_feature (1)..(25): SEQ ID NO: 3914; WAN024ALL; Start 315; Stop 339
caccttaaccgtgataatagctagt

SEQ ID NO: 367164 - DNA, 25 bp, Artificial
  probe
  misc_feature (1)..(25): SEQ ID NO: 3914; WAN024ALL; Start 303; Stop 327
ttaatgaaatgccaccttaaccgtg

SEQ ID NO: 367165 - DNA, 25 bp, Artificial
  probe
  misc_feature (1)..(25): SEQ ID NO: 3914; WAN024ALL; Start 277; Stop 301
gtcttccaaacttctttattccata

SEQ ID NO: 367166 - DNA, 25 bp, Artificial
  probe
  misc_feature (1)..(25): SEQ ID NO: 3915; WAN024FR7; Start 85; Stop 109
ttattgatgtgcgtagtacagttga

SEQ ID NO: 367167 - DNA, 25 bp, Artificial
  probe
  misc_feature (1)..(25): SEQ ID NO: 3915; WAN024FR7; Start 86; Stop 110
tattgatgtgcgtagtacagttgac

SEQ ID NO: 367168 - DNA, 25 bp, Artificial
  probe
  misc_feature (1)..(25): SEQ ID NO: 3915; WAN024FR7; Start 1067; Stop 1091
ggcagactttatttggtattggttt

SEQ ID NO: 367169 - DNA, 25 bp, Artificial
  probe
  misc_feature (1)..(25): SEQ ID NO: 3915; WAN024FR7; Start 1064; Stop 1088
tttggcagactttatttggtattgg

SEQ ID NO: 367170 - DNA, 25 bp, Artificial
  probe
  misc_feature (1)..(25): SEQ ID NO: 3915; WAN024FR7; Start 1060; Stop 1084
gatgtttggcagactttatttggta

SEQ ID NO: 367171 - DNA, 25 bp, Artificial
  probe
  misc_feature (1)..(25): SEQ ID NO: 3915; WAN024FR7; Start 1054; Stop 1078
tatggagatgtttggcagactttat

SEQ ID NO: 367172 - DNA, 25 bp, Artificial
  probe
  misc_feature (1)..(25): SEQ ID NO: 3915; WAN024FR7; Start 1053; Stop 1077
ttatggagatgtttggcagacttta

SEQ ID NO: 367173 - DNA, 25 bp, Artificial
  probe
  misc_feature (1)..(25): SEQ ID NO: 3915; WAN024FR7; Start 112; Stop 136
gcaagtgtttcaatgggagtaataa

SEQ ID NO: 367174 - DNA, 25 bp, Artificial
  probe
  misc_feature (1)..(25): SEQ ID NO: 3915; WAN024FR7; Start 1076; Stop 1100
tatttggtattggtttaggagaggc

SEQ ID NO: 367175 - DNA, 25 bp, Artificial
  probe
  misc_feature (1)..(25): SEQ ID NO: 3915; WAN024FR7; Start 1062; Stop 1086
tgtttggcagactttatttggtatt

SEQ ID NO: 367176 - DNA, 25 bp, Artificial
  probe
  misc_feature (1)..(25): SEQ ID NO: 3915; WAN024FR7; Start 1058; Stop 1082
gagatgtttggcagactttatttgg

SEQ ID NO: 367177 - DNA, 25 bp, Artificial
  probe
  misc_feature (1)..(25): SEQ ID NO: 3915; WAN024FR7; Start 1057; Stop 1081
ggagatgtttggcagactttatttg

SEQ ID NO: 367178 - DNA, 25 bp, Artificial
  probe
  misc_feature (1)..(25): SEQ ID NO: 3915; WAN024FR7; Start 1055; Stop 1079
atggagatgtttggcagactttatt

SEQ ID NO: 367179 - DNA, 25 bp, Artificial
  probe
  misc_feature (1)..(25): SEQ ID NO: 3915; WAN024FR7; Start 1063; Stop 1087
gtttggcagactttatttggtattg

SEQ ID NO: 367180 - DNA, 25 bp, Artificial
  probe
  misc_feature (1)..(25): SEQ ID NO: 3915; WAN024FR7; Start 1061; Stop 1085
atgtttggcagactttatttggtat

SEQ ID NO: 367181 - DNA, 25 bp, Artificial
  probe
  misc_feature (1)..(25): SEQ ID NO: 3915; WAN024FR7; Start 436; Stop 460
cttattgtatggtccctccgtaatt

SEQ ID NO: 367182 - DNA, 25 bp, Artificial
  probe
  misc_feature (1)..(25): SEQ ID NO: 3915; WAN024FR7; Start 1066; Stop 1090
tggcagactttatttggtattggtt

SEQ ID NO: 367183 - DNA, 25 bp, Artificial
  probe
  misc_feature (1)..(25): SEQ ID NO: 3915; WAN024FR7; Start 1065; Stop 1089
ttggcagactttatttggtattggt

SEQ ID NO: 367184 - DNA, 25 bp, Artificial
  probe
  misc_feature (1)..(25): SEQ ID NO: 3915; WAN024FR7; Start 1056; Stop 1080
tggagatgtttggcagactttattt

SEQ ID NO: 367185 - DNA, 25 bp, Artificial
  probe
  misc_feature (1)..(25): SEQ ID NO: 3915; WAN024FR7; Start 1052; Stop 1076
tttatggagatgtttggcagacttt

SEQ ID NO: 367186 - DNA, 25 bp, Artificial
  probe
  misc_feature (1)..(25): SEQ ID NO: 3915; WAN024FR7; Start 972; Stop 996
tggctattcaacaggaaactattca

SEQ ID NO: 367187 - DNA, 25 bp, Artificial
  probe
  misc_feature (1)..(25): SEQ ID NO: 3915; WAN024FR7; Start 1059; Stop 1083
agatgtttggcagactttatttggt

SEQ ID NO: 367188 - DNA, 25 bp, Artificial
  probe
  misc_feature (1)..(25): SEQ ID NO: 3915; WAN024FR7; Start 1261; Stop 1285
tttgagcgagggacatctaaatatg

SEQ ID NO: 367189 - DNA, 25 bp, Artificial
  probe
  misc_feature (1)..(25): SEQ ID NO: 3915; WAN024FR7; Start 973; Stop 997
ggctattcaacaggaaactattcaa

SEQ ID NO: 367190 - DNA, 25 bp, Artificial
  probe
  misc_feature (1)..(25): SEQ ID NO: 3915; WAN024FR7; Start 1226; Stop 1250
tgtttatgccaatttaccttgcttt

SEQ ID NO: 367191 - DNA, 25 bp, Artificial
  probe
  misc_feature (1)..(25): SEQ ID NO: 3915; WAN024FR7; Start 1225; Stop 1249
atgtttatgccaatttaccttgctt

SEQ ID NO: 367192 - DNA, 25 bp, Artificial
  probe
  misc_feature (1)..(25): SEQ ID NO: 3915; WAN024FR7; Start 895; Stop 919
gctttggcaatctcaattcctattt

SEQ ID NO: 367193 - DNA, 25 bp, Artificial
  probe
  misc_feature (1)..(25): SEQ ID NO: 3915; WAN024FR7; Start 637; Stop 661
ttgggaatttctaatacctacttgc

SEQ ID NO: 367194 - DNA, 25 bp, Artificial
  probe
  misc_feature (1)..(25): SEQ ID NO: 3915; WAN024FR7; Start 971; Stop 995
ttggctattcaacaggaaactattc

SEQ ID NO: 367195 - DNA, 25 bp, Artificial
  probe
  misc_feature (1)..(25): SEQ ID NO: 3915; WAN024FR7; Start 1263; Stop 1287
tgagcgagggacatctaaatatgat

SEQ ID NO: 367196 - DNA, 25 bp, Artificial
  probe
  misc_feature (1)..(25): SEQ ID NO: 3915; WAN024FR7; Start 1262; Stop 1286
ttgagcgagggacatctaaatatga

SEQ ID NO: 367197 - DNA, 25 bp, Artificial
  probe
  misc_feature (1)..(25): SEQ ID NO: 3915; WAN024FR7; Start 323; Stop 347
aactattacagtgggaattacggaa

SEQ ID NO: 367198 - DNA, 25 bp, Artificial
  probe
  misc_feature (1)..(25): SEQ ID NO: 3915; WAN024FR7; Start 322; Stop 346
aaactattacagtgggaattacgga

SEQ ID NO: 367199 - DNA, 25 bp, Artificial
  probe
  misc_feature (1)..(25): SEQ ID NO: 3916; WAN024DIX; Start 281; Stop 305
aagaacagagcaagattgaggattc

SEQ ID NO: 367200 - DNA, 25 bp, Artificial
  probe
  misc_feature (1)..(25): SEQ ID NO: 3916; WAN024DIX; Start 280; Stop 304
caagaacagagcaagattgaggatt

SEQ ID NO: 367201 - DNA, 25 bp, Artificial
  probe
  misc_feature (1)..(25): SEQ ID NO: 3916; WAN024DIX; Start 276; Stop 300
taagcaagaacagagcaagattgag

SEQ ID NO: 367202 - DNA, 25 bp, Artificial
  probe
  misc_feature (1)..(25): SEQ ID NO: 3916; WAN024DIX; Start 275; Stop 299
gtaagcaagaacagagcaagattga

SEQ ID NO: 367203 - DNA, 25 bp, Artificial
  probe
  misc_feature (1)..(25): SEQ ID NO: 3916; WAN024DIX; Start 273; Stop 297
ttgtaagcaagaacagagcaagatt

SEQ ID NO: 367204 - DNA, 25 bp, Artificial
  probe
  misc_feature (1)..(25): SEQ ID NO: 3916; WAN024DIX; Start 274; Stop 298
tgtaagcaagaacagagcaagattg

SEQ ID NO: 367205 - DNA, 25 bp, Artificial
  probe
  misc_feature (1)..(25): SEQ ID NO: 3916; WAN024DIX; Start 282; Stop 306
agaacagagcaagattgaggattcc

SEQ ID NO: 367206 - DNA, 25 bp, Artificial
  probe
  misc_feature (1)..(25): SEQ ID NO: 3916; WAN024DIX; Start 214; Stop 238
gagattgaatttgacgataaggagc

SEQ ID NO: 367207 - DNA, 25 bp, Artificial
  probe
  misc_feature (1)..(25): SEQ ID NO: 3916; WAN024DIX; Start 215; Stop 239
agattgaatttgacgataaggagca

SEQ ID NO: 367208 - DNA, 25 bp, Artificial
  probe
  misc_feature (1)..(25): SEQ ID NO: 3916; WAN024DIX; Start 85; Stop 109
tttatggaggaaatcgctaaggttg

SEQ ID NO: 367209 - DNA, 25 bp, Artificial
  probe
  misc_feature (1)..(25): SEQ ID NO: 3916; WAN024DIX; Start 212; Stop 236
gtgagattgaatttgacgataagga

SEQ ID NO: 367210 - DNA, 25 bp, Artificial
  probe
  misc_feature (1)..(25): SEQ ID NO: 3916; WAN024DIX; Start 213; Stop 237
tgagattgaatttgacgataaggag

SEQ ID NO: 367211 - DNA, 25 bp, Artificial
  probe
  misc_feature (1)..(25): SEQ ID NO: 3916; WAN024DIX; Start 217; Stop 241
attgaatttgacgataaggagcaag

SEQ ID NO: 367212 - DNA, 25 bp, Artificial
  probe
  misc_feature (1)..(25): SEQ ID NO: 3916; WAN024DIX; Start 216; Stop 240
gattgaatttgacgataaggagcaa

SEQ ID NO: 367213 - DNA, 25 bp, Artificial
  probe
  misc_feature (1)..(25): SEQ ID NO: 3916; WAN024DIX; Start 285; Stop 309
acagagcaagattgaggattcctta

SEQ ID NO: 367214 - DNA, 25 bp, Artificial
  probe
  misc_feature (1)..(25): SEQ ID NO: 3916; WAN024DIX; Start 218; Stop 242
ttgaatttgacgataaggagcaaga

SEQ ID NO: 367215 - DNA, 25 bp, Artificial
  probe
  misc_feature (1)..(25): SEQ ID NO: 3916; WAN024DIX; Start 219; Stop 243
tgaatttgacgataaggagcaagag

SEQ ID NO: 367216 - DNA, 25 bp, Artificial
  probe
  misc_feature (1)..(25): SEQ ID NO: 3916; WAN024DIX; Start 279; Stop 303
gcaagaacagagcaagattgaggat

SEQ ID NO: 367217 - DNA, 25 bp, Artificial
  probe
  misc_feature (1)..(25): SEQ ID NO: 3916; WAN024DIX; Start 284; Stop 308
aacagagcaagattgaggattcctt

SEQ ID NO: 367218 - DNA, 25 bp, Artificial
  probe
  misc_feature (1)..(25): SEQ ID NO: 3916; WAN024DIX; Start 277; Stop 301
aagcaagaacagagcaagattgagg

SEQ ID NO: 367219 - DNA, 25 bp, Artificial
  probe
  misc_feature (1)..(25): SEQ ID NO: 3916; WAN024DIX; Start 283; Stop 307
gaacagagcaagattgaggattcct

SEQ ID NO: 367220 - DNA, 25 bp, Artificial
  probe
  misc_feature (1)..(25): SEQ ID NO: 3916; WAN024DIX; Start 151; Stop 175
gcagatgatgaaacaatcgctcttt

SEQ ID NO: 367221 - DNA, 25 bp, Artificial
  probe
  misc_feature (1)..(25): SEQ ID NO: 3916; WAN024DIX; Start 220; Stop 244
gaatttgacgataaggagcaagagc

SEQ ID NO: 367222 - DNA, 25 bp, Artificial
  probe
  misc_feature (1)..(25): SEQ ID NO: 3916; WAN024DIX; Start 86; Stop 110
ttatggaggaaatcgctaaggttgc

SEQ ID NO: 367223 - DNA, 25 bp, Artificial
  probe
  misc_feature (1)..(25): SEQ ID NO: 3916; WAN024DIX; Start 185; Stop 209
tcaactgtttatcaactcagctcag

SEQ ID NO: 367224 - DNA, 25 bp, Artificial
  probe
  misc_feature (1)..(25): SEQ ID NO: 3916; WAN024DIX; Start 183; Stop 207
agtcaactgtttatcaactcagctc

SEQ ID NO: 367225 - DNA, 25 bp, Artificial
  probe
  misc_feature (1)..(25): SEQ ID NO: 3916; WAN024DIX; Start 120; Stop 144
ataccaagcaattaaagaacaaatg

SEQ ID NO: 367226 - DNA, 25 bp, Artificial
  probe
  misc_feature (1)..(25): SEQ ID NO: 3916; WAN024DIX; Start 178; Stop 202
ttggcagtcaactgtttatcaactc

SEQ ID NO: 367227 - DNA, 25 bp, Artificial
  probe
  misc_feature (1)..(25): SEQ ID NO: 3916; WAN024DIX; Start 278; Stop 302
agcaagaacagagcaagattgagga

SEQ ID NO: 367228 - DNA, 25 bp, Artificial
  probe
  misc_feature (1)..(25): SEQ ID NO: 3916; WAN024DIX; Start 182; Stop 206
cagtcaactgtttatcaactcagct

SEQ ID NO: 367229 - DNA, 25 bp, Artificial
  probe
  misc_feature (1)..(25): SEQ ID NO: 3916; WAN024DIX; Start 184; Stop 208
gtcaactgtttatcaactcagctca

SEQ ID NO: 367230 - DNA, 25 bp, Artificial
  probe
  misc_feature (1)..(25): SEQ ID NO: 3916; WAN024DIX; Start 266; Stop 290
ttgtgacttgtaagcaagaacagag

SEQ ID NO: 367231 - DNA, 25 bp, Artificial
  probe
  misc_feature (1)..(25): SEQ ID NO: 3916; WAN024DIX; Start 265; Stop 289
cttgtgacttgtaagcaagaacaga

SEQ ID NO: 367232 - DNA, 25 bp, Artificial
  probe
  misc_feature (1)..(25): SEQ ID NO: 3917; WAN024CF8; Start 1872; Stop 1896
taatggttatgtggagcagtctatc

SEQ ID NO: 367233 - DNA, 25 bp, Artificial
  probe
  misc_feature (1)..(25): SEQ ID NO: 3917; WAN024CF8; Start 1871; Stop 1895
gtaatggttatgtggagcagtctat

SEQ ID NO: 367234 - DNA, 25 bp, Artificial
  probe
  misc_feature (1)..(25): SEQ ID NO: 3917; WAN024CF8; Start 1865; Stop 1889
tattcagtaatggttatgtggagca

SEQ ID NO: 367235 - DNA, 25 bp, Artificial
  probe
  misc_feature (1)..(25): SEQ ID NO: 3917; WAN024CF8; Start 1208; Stop 1232
ccagcaagcgttatatgaatgatta

SEQ ID NO: 367236 - DNA, 25 bp, Artificial
  probe
  misc_feature (1)..(25): SEQ ID NO: 3917; WAN024CF8; Start 1652; Stop 1676
tggctattgatattctgacattcct

SEQ ID NO: 367237 - DNA, 25 bp, Artificial
  probe
  misc_feature (1)..(25): SEQ ID NO: 3917; WAN024CF8; Start 1651; Stop 1675
ctggctattgatattctgacattcc

SEQ ID NO: 367238 - DNA, 25 bp, Artificial
  probe
  misc_feature (1)..(25): SEQ ID NO: 3917; WAN024CF8; Start 1866; Stop 1890
attcagtaatggttatgtggagcag

SEQ ID NO: 367239 - DNA, 25 bp, Artificial
  probe
  misc_feature (1)..(25): SEQ ID NO: 3917; WAN024CF8; Start 1870; Stop 1894
agtaatggttatgtggagcagtcta

SEQ ID NO: 367240 - DNA, 25 bp, Artificial
  probe
  misc_feature (1)..(25): SEQ ID NO: 3917; WAN024CF8; Start 680; Stop 704
actatgacttgattaagcctactcg

SEQ ID NO: 367241 - DNA, 25 bp, Artificial
  probe
  misc_feature (1)..(25): SEQ ID NO: 3917; WAN024CF8; Start 1649; Stop 1673
cactggctattgatattctgacatt

SEQ ID NO: 367242 - DNA, 25 bp, Artificial
  probe
  misc_feature (1)..(25): SEQ ID NO: 3917; WAN024CF8; Start 1864; Stop 1888
ttattcagtaatggttatgtggagc

SEQ ID NO: 367243 - DNA, 25 bp, Artificial
  probe
  misc_feature (1)..(25): SEQ ID NO: 3917; WAN024CF8; Start 1657; Stop 1681
attgatattctgacattccttacgg

SEQ ID NO: 367244 - DNA, 25 bp, Artificial
  probe
  misc_feature (1)..(25): SEQ ID NO: 3917; WAN024CF8; Start 1653; Stop 1677
ggctattgatattctgacattcctt

SEQ ID NO: 367245 - DNA, 25 bp, Artificial
  probe
  misc_feature (1)..(25): SEQ ID NO: 3917; WAN024CF8; Start 1650; Stop 1674
actggctattgatattctgacattc

SEQ ID NO: 367246 - DNA, 25 bp, Artificial
  probe
  misc_feature (1)..(25): SEQ ID NO: 3917; WAN024CF8; Start 2243; Stop 2267
gttccactgaccttaacgagattaa

SEQ ID NO: 367247 - DNA, 25 bp, Artificial
  probe
  misc_feature (1)..(25): SEQ ID NO: 3917; WAN024CF8; Start 1873; Stop 1897
aatggttatgtggagcagtctatca

SEQ ID NO: 367248 - DNA, 25 bp, Artificial
  probe
  misc_feature (1)..(25): SEQ ID NO: 3917; WAN024CF8; Start 681; Stop 705
ctatgacttgattaagcctactcgc

SEQ ID NO: 367249 - DNA, 25 bp, Artificial
  probe
  misc_feature (1)..(25): SEQ ID NO: 3917; WAN024CF8; Start 1648; Stop 1672
tcactggctattgatattctgacat

SEQ ID NO: 367250 - DNA, 25 bp, Artificial
  probe
  misc_feature (1)..(25): SEQ ID NO: 3917; WAN024CF8; Start 1805; Stop 1829
taagtaccagtatagccgaccatat

SEQ ID NO: 367251 - DNA, 25 bp, Artificial
  probe
  misc_feature (1)..(25): SEQ ID NO: 3917; WAN024CF8; Start 1996; Stop 2020
gttgctatgctgattgtcattagta

SEQ ID NO: 367252 - DNA, 25 bp, Artificial
  probe
  misc_feature (1)..(25): SEQ ID NO: 3917; WAN024CF8; Start 1450; Stop 1474
aataaccttatcgtctattatgcgg

SEQ ID NO: 367253 - DNA, 25 bp, Artificial
  probe
  misc_feature (1)..(25): SEQ ID NO: 3917; WAN024CF8; Start 1804; Stop 1828
ctaagtaccagtatagccgaccata

SEQ ID NO: 367254 - DNA, 25 bp, Artificial
  probe
  misc_feature (1)..(25): SEQ ID NO: 3917; WAN024CF8; Start 1736; Stop 1760
cagtaaccaatagtgaagtacgagg

SEQ ID NO: 367255 - DNA, 25 bp, Artificial
  probe
  misc_feature (1)..(25): SEQ ID NO: 3917; WAN024CF8; Start 616; Stop 640
gcctatgaagagtatgagtaccatc

SEQ ID NO: 367256 - DNA, 25 bp, Artificial
  probe
  misc_feature (1)..(25): SEQ ID NO: 3917; WAN024CF8; Start 615; Stop 639
tgcctatgaagagtatgagtaccat

SEQ ID NO: 367257 - DNA, 25 bp, Artificial
  probe
  misc_feature (1)..(25): SEQ ID NO: 3917; WAN024CF8; Start 1874; Stop 1898
atggttatgtggagcagtctatcag

SEQ ID NO: 367258 - DNA, 25 bp, Artificial
  probe
  misc_feature (1)..(25): SEQ ID NO: 3917; WAN024CF8; Start 1867; Stop 1891
ttcagtaatggttatgtggagcagt

SEQ ID NO: 367259 - DNA, 25 bp, Artificial
  probe
  misc_feature (1)..(25): SEQ ID NO: 3917; WAN024CF8; Start 614; Stop 638
ctgcctatgaagagtatgagtacca

SEQ ID NO: 367260 - DNA, 25 bp, Artificial
  probe
  misc_feature (1)..(25): SEQ ID NO: 3917; WAN024CF8; Start 1806; Stop 1830
aagtaccagtatagccgaccatatc

SEQ ID NO: 367261 - DNA, 25 bp, Artificial
  probe
  misc_feature (1)..(25): SEQ ID NO: 3917; WAN024CF8; Start 823; Stop 847
atcttctactaccagcaacagcaat

SEQ ID NO: 367262 - DNA, 25 bp, Artificial
  probe
  misc_feature (1)..(25): SEQ ID NO: 3917; WAN024CF8; Start 1735; Stop 1759
gcagtaaccaatagtgaagtacgag

SEQ ID NO: 367263 - DNA, 25 bp, Artificial
  probe
  misc_feature (1)..(25): SEQ ID NO: 3917; WAN024CF8; Start 1209; Stop 1233
cagcaagcgttatatgaatgattat

SEQ ID NO: 367264 - DNA, 25 bp, Artificial
  probe
  misc_feature (1)..(25): SEQ ID NO: 3917; WAN024CF8; Start 612; Stop 636
cactgcctatgaagagtatgagtac

SEQ ID NO: 367265 - DNA, 25 bp, Artificial
  probe
  misc_feature (1)..(25): SEQ ID NO: 3918; WAN024CST; Start 224; Stop 248
atcgtctggatagtaggtcatgtaa

SEQ ID NO: 367266 - DNA, 25 bp, Artificial
  probe
  misc_feature (1)..(25): SEQ ID NO: 3918; WAN024CST; Start 222; Stop 246
ttatcgtctggatagtaggtcatgt

SEQ ID NO: 367267 - DNA, 25 bp, Artificial
  probe
  misc_feature (1)..(25): SEQ ID NO: 3918; WAN024CST; Start 223; Stop 247
tatcgtctggatagtaggtcatgta

SEQ ID NO: 367268 - DNA, 25 bp, Artificial
  probe
  misc_feature (1)..(25): SEQ ID NO: 3918; WAN024CST; Start 196; Stop 220
cttcaatccagcggttgtaagaatc

SEQ ID NO: 367269 - DNA, 25 bp, Artificial
  probe
  misc_feature (1)..(25): SEQ ID NO: 3918; WAN024CST; Start 453; Stop 477
ataatggtcccgtcaaagtatttct

SEQ ID NO: 367270 - DNA, 25 bp, Artificial
  probe
  misc_feature (1)..(25): SEQ ID NO: 3918; WAN024CST; Start 452; Stop 476
gataatggtcccgtcaaagtatttc

SEQ ID NO: 367271 - DNA, 25 bp, Artificial
  probe
  misc_feature (1)..(25): SEQ ID NO: 3918; WAN024CST; Start 197; Stop 221
ttcaatccagcggttgtaagaatct

SEQ ID NO: 367272 - DNA, 25 bp, Artificial
  probe
  misc_feature (1)..(25): SEQ ID NO: 3918; WAN024CST; Start 518; Stop 542
gtcatttacaggaaccaaacttact

SEQ ID NO: 367273 - DNA, 25 bp, Artificial
  probe
  misc_feature (1)..(25): SEQ ID NO: 3918; WAN024CST; Start 455; Stop 479
aatggtcccgtcaaagtatttctta

SEQ ID NO: 367274 - DNA, 25 bp, Artificial
  probe
  misc_feature (1)..(25): SEQ ID NO: 3918; WAN024CST; Start 454; Stop 478
taatggtcccgtcaaagtatttctt

SEQ ID NO: 367275 - DNA, 25 bp, Artificial
  probe
  misc_feature (1)..(25): SEQ ID NO: 3918; WAN024CST; Start 456; Stop 480
atggtcccgtcaaagtatttcttaa

SEQ ID NO: 367276 - DNA, 25 bp, Artificial
  probe
  misc_feature (1)..(25): SEQ ID NO: 3918; WAN024CST; Start 195; Stop 219
acttcaatccagcggttgtaagaat

SEQ ID NO: 367277 - DNA, 25 bp, Artificial
  probe
  misc_feature (1)..(25): SEQ ID NO: 3918; WAN024CST; Start 14; Stop 38
gttccagatttcaatataacggtcg

SEQ ID NO: 367278 - DNA, 25 bp, Artificial
  probe
  misc_feature (1)..(25): SEQ ID NO: 3918; WAN024CST; Start 198; Stop 222
tcaatccagcggttgtaagaatctt

SEQ ID NO: 367279 - DNA, 25 bp, Artificial
  probe
  misc_feature (1)..(25): SEQ ID NO: 3918; WAN024CST; Start 13; Stop 37
tgttccagatttcaatataacggtc

SEQ ID NO: 367280 - DNA, 25 bp, Artificial
  probe
  misc_feature (1)..(25): SEQ ID NO: 3918; WAN024CST; Start 508; Stop 532
aaagagttgggtcatttacaggaac

SEQ ID NO: 367281 - DNA, 25 bp, Artificial
  probe
  misc_feature (1)..(25): SEQ ID NO: 3918; WAN024CST; Start 15; Stop 39
ttccagatttcaatataacggtcgt

SEQ ID NO: 367282 - DNA, 25 bp, Artificial
  probe
  misc_feature (1)..(25): SEQ ID NO: 3918; WAN024CST; Start 201; Stop 225
atccagcggttgtaagaatctttat

SEQ ID NO: 367283 - DNA, 25 bp, Artificial
  probe
  misc_feature (1)..(25): SEQ ID NO: 3918; WAN024CST; Start 200; Stop 224
aatccagcggttgtaagaatcttta

SEQ ID NO: 367284 - DNA, 25 bp, Artificial
  probe
  misc_feature (1)..(25): SEQ ID NO: 3918; WAN024CST; Start 207; Stop 231
cggttgtaagaatctttatcgtctg

SEQ ID NO: 367285 - DNA, 25 bp, Artificial
  probe
  misc_feature (1)..(25): SEQ ID NO: 3918; WAN024CST; Start 12; Stop 36
atgttccagatttcaatataacggt

SEQ ID NO: 367286 - DNA, 25 bp, Artificial
  probe
  misc_feature (1)..(25): SEQ ID NO: 3918; WAN024CST; Start 208; Stop 232
ggttgtaagaatctttatcgtctgg

SEQ ID NO: 367287 - DNA, 25 bp, Artificial
  probe
  misc_feature (1)..(25): SEQ ID NO: 3918; WAN024CST; Start 226; Stop 250
cgtctggatagtaggtcatgtaaag

SEQ ID NO: 367288 - DNA, 25 bp, Artificial
  probe
  misc_feature (1)..(25): SEQ ID NO: 3918; WAN024CST; Start 219; Stop 243
tctttatcgtctggatagtaggtca

SEQ ID NO: 367289 - DNA, 25 bp, Artificial
  probe
  misc_feature (1)..(25): SEQ ID NO: 3918; WAN024CST; Start 202; Stop 226
tccagcggttgtaagaatctttatc

SEQ ID NO: 367290 - DNA, 25 bp, Artificial
  probe
  misc_feature (1)..(25): SEQ ID NO: 3918; WAN024CST; Start 143; Stop 167
gatttcccagaagttgtcctcaatt

SEQ ID NO: 367291 - DNA, 25 bp, Artificial
  probe
  misc_feature (1)..(25): SEQ ID NO: 3918; WAN024CST; Start 10; Stop 34
cgatgttccagatttcaatataacg

SEQ ID NO: 367292 - DNA, 25 bp, Artificial
  probe
  misc_feature (1)..(25): SEQ ID NO: 3918; WAN024CST; Start 225; Stop 249
tcgtctggatagtaggtcatgtaaa

SEQ ID NO: 367293 - DNA, 25 bp, Artificial
  probe
  misc_feature (1)..(25): SEQ ID NO: 3918; WAN024CST; Start 227; Stop 251
gtctggatagtaggtcatgtaaagt

SEQ ID NO: 367294 - DNA, 25 bp, Artificial
  probe
  misc_feature (1)..(25): SEQ ID NO: 3918; WAN024CST; Start 220; Stop 244
ctttatcgtctggatagtaggtcat

SEQ ID NO: 367295 - DNA, 25 bp, Artificial
  probe
  misc_feature (1)..(25): SEQ ID NO: 3918; WAN024CST; Start 205; Stop 229
agcggttgtaagaatctttatcgtc

SEQ ID NO: 367296 - DNA, 25 bp, Artificial
  probe
  misc_feature (1)..(25): SEQ ID NO: 3918; WAN024CST; Start 218; Stop 242
atctttatcgtctggatagtaggtc

SEQ ID NO: 367297 - DNA, 25 bp, Artificial
  probe
  misc_feature (1)..(25): SEQ ID NO: 3918; WAN024CST; Start 206; Stop 230
gcggttgtaagaatctttatcgtct

SEQ ID NO: 367298 - DNA, 25 bp, Artificial
  probe
  misc_feature (1)..(25): SEQ ID NO: 3919; WAN024FZB; Start 484; Stop 508
ggttatgctattgcttctgctaatc

SEQ ID NO: 367299 - DNA, 25 bp, Artificial
  probe
  misc_feature (1)..(25): SEQ ID NO: 3919; WAN024FZB; Start 482; Stop 506
taggttatgctattgcttctgctaa

SEQ ID NO: 367300 - DNA, 25 bp, Artificial
  probe
  misc_feature (1)..(25): SEQ ID NO: 3919; WAN024FZB; Start 483; Stop 507
aggttatgctattgcttctgctaat

SEQ ID NO: 367301 - DNA, 25 bp, Artificial
  probe
  misc_feature (1)..(25): SEQ ID NO: 3919; WAN024FZB; Start 481; Stop 505
gtaggttatgctattgcttctgcta

SEQ ID NO: 367302 - DNA, 25 bp, Artificial
  probe
  misc_feature (1)..(25): SEQ ID NO: 3919; WAN024FZB; Start 485; Stop 509
gttatgctattgcttctgctaatct

SEQ ID NO: 367303 - DNA, 25 bp, Artificial
  probe
  misc_feature (1)..(25): SEQ ID NO: 3919; WAN024FZB; Start 477; Stop 501
tacagtaggttatgctattgcttct

SEQ ID NO: 367304 - DNA, 25 bp, Artificial
  probe
  misc_feature (1)..(25): SEQ ID NO: 3919; WAN024FZB; Start 580; Stop 604
ggtgttaggttgatgatggttaaga

SEQ ID NO: 367305 - DNA, 25 bp, Artificial
  probe
  misc_feature (1)..(25): SEQ ID NO: 3919; WAN024FZB; Start 579; Stop 603
aggtgttaggttgatgatggttaag

SEQ ID NO: 367306 - DNA, 25 bp, Artificial
  probe
  misc_feature (1)..(25): SEQ ID NO: 3919; WAN024FZB; Start 577; Stop 601
ataggtgttaggttgatgatggtta

SEQ ID NO: 367307 - DNA, 25 bp, Artificial
  probe
  misc_feature (1)..(25): SEQ ID NO: 3919; WAN024FZB; Start 576; Stop 600
tataggtgttaggttgatgatggtt

SEQ ID NO: 367308 - DNA, 25 bp, Artificial
  probe
  misc_feature (1)..(25): SEQ ID NO: 3919; WAN024FZB; Start 578; Stop 602
taggtgttaggttgatgatggttaa

SEQ ID NO: 367309 - DNA, 25 bp, Artificial
  probe
  misc_feature (1)..(25): SEQ ID NO: 3919; WAN024FZB; Start 575; Stop 599
atataggtgttaggttgatgatggt

SEQ ID NO: 367310 - DNA, 25 bp, Artificial
  probe
  misc_feature (1)..(25): SEQ ID NO: 3919; WAN024FZB; Start 581; Stop 605
gtgttaggttgatgatggttaagaa

SEQ ID NO: 367311 - DNA, 25 bp, Artificial
  probe
  misc_feature (1)..(25): SEQ ID NO: 3919; WAN024FZB; Start 568; Stop 592
gcgacttatataggtgttaggttga

SEQ ID NO: 367312 - DNA, 25 bp, Artificial
  probe
  misc_feature (1)..(25): SEQ ID NO: 3919; WAN024FZB; Start 567; Stop 591
tgcgacttatataggtgttaggttg

SEQ ID NO: 367313 - DNA, 25 bp, Artificial
  probe
  misc_feature (1)..(25): SEQ ID NO: 3919; WAN024FZB; Start 566; Stop 590
ttgcgacttatataggtgttaggtt

SEQ ID NO: 367314 - DNA, 25 bp, Artificial
  probe
  misc_feature (1)..(25): SEQ ID NO: 3919; WAN024FZB; Start 565; Stop 589
attgcgacttatataggtgttaggt

SEQ ID NO: 367315 - DNA, 25 bp, Artificial
  probe
  misc_feature (1)..(25): SEQ ID NO: 3919; WAN024FZB; Start 100; Stop 124
atgcttatcgcctctatcggattaa

SEQ ID NO: 367316 - DNA, 25 bp, Artificial
  probe
  misc_feature (1)..(25): SEQ ID NO: 3919; WAN024FZB; Start 564; Stop 588
cattgcgacttatataggtgttagg

SEQ ID NO: 367317 - DNA, 25 bp, Artificial
  probe
  misc_feature (1)..(25): SEQ ID NO: 3919; WAN024FZB; Start 476; Stop 500
gtacagtaggttatgctattgcttc

SEQ ID NO: 367318 - DNA, 25 bp, Artificial
  probe
  misc_feature (1)..(25): SEQ ID NO: 3919; WAN024FZB; Start 480; Stop 504
agtaggttatgctattgcttctgct

SEQ ID NO: 367319 - DNA, 25 bp, Artificial
  probe
  misc_feature (1)..(25): SEQ ID NO: 3919; WAN024FZB; Start 428; Stop 452
atattgttcctggtgttgctattgc

SEQ ID NO: 367320 - DNA, 25 bp, Artificial
  probe
  misc_feature (1)..(25): SEQ ID NO: 3919; WAN024FZB; Start 969; Stop 993
ccagtatatcaaggataaggaagca

SEQ ID NO: 367321 - DNA, 25 bp, Artificial
  probe
  misc_feature (1)..(25): SEQ ID NO: 3919; WAN024FZB; Start 487; Stop 511
tatgctattgcttctgctaatctaa

SEQ ID NO: 367322 - DNA, 25 bp, Artificial
  probe
  misc_feature (1)..(25): SEQ ID NO: 3919; WAN024FZB; Start 486; Stop 510
ttatgctattgcttctgctaatcta

SEQ ID NO: 367323 - DNA, 25 bp, Artificial
  probe
  misc_feature (1)..(25): SEQ ID NO: 3919; WAN024FZB; Start 478; Stop 502
acagtaggttatgctattgcttctg

SEQ ID NO: 367324 - DNA, 25 bp, Artificial
  probe
  misc_feature (1)..(25): SEQ ID NO: 3919; WAN024FZB; Start 563; Stop 587
tcattgcgacttatataggtgttag

SEQ ID NO: 367325 - DNA, 25 bp, Artificial
  probe
  misc_feature (1)..(25): SEQ ID NO: 3919; WAN024FZB; Start 561; Stop 585
tgtcattgcgacttatataggtgtt

SEQ ID NO: 367326 - DNA, 25 bp, Artificial
  probe
  misc_feature (1)..(25): SEQ ID NO: 3919; WAN024FZB; Start 560; Stop 584
ttgtcattgcgacttatataggtgt

SEQ ID NO: 367327 - DNA, 25 bp, Artificial
  probe
  misc_feature (1)..(25): SEQ ID NO: 3919; WAN024FZB; Start 427; Stop 451
aatattgttcctggtgttgctattg

SEQ ID NO: 367328 - DNA, 25 bp, Artificial
  probe
  misc_feature (1)..(25): SEQ ID NO: 3919; WAN024FZB; Start 968; Stop 992
tccagtatatcaaggataaggaagc

SEQ ID NO: 367329 - DNA, 25 bp, Artificial
  probe
  misc_feature (1)..(25): SEQ ID NO: 3919; WAN024FZB; Start 140; Stop 164
ccgtgattattggagccatgttaat

SEQ ID NO: 367330 - DNA, 25 bp, Artificial
  probe
  misc_feature (1)..(25): SEQ ID NO: 3919; WAN024FZB; Start 924; Stop 948
tgattcagaacaacttagtaaggaa

SEQ ID NO: 367331 - DNA, 25 bp, Artificial
  probe
  misc_feature (1)..(25): SEQ ID NO: 3920; WAN024CUS; Start 539; Stop 563
caggaagtatgacagtcgtagaatt

SEQ ID NO: 367332 - DNA, 25 bp, Artificial
  probe
  misc_feature (1)..(25): SEQ ID NO: 3920; WAN024CUS; Start 537; Stop 561
tacaggaagtatgacagtcgtagaa

SEQ ID NO: 367333 - DNA, 25 bp, Artificial
  probe
  misc_feature (1)..(25): SEQ ID NO: 3920; WAN024CUS; Start 538; Stop 562
acaggaagtatgacagtcgtagaat

SEQ ID NO: 367334 - DNA, 25 bp, Artificial
  probe
  misc_feature (1)..(25): SEQ ID NO: 3920; WAN024CUS; Start 540; Stop 564
aggaagtatgacagtcgtagaatta

SEQ ID NO: 367335 - DNA, 25 bp, Artificial
  probe
  misc_feature (1)..(25): SEQ ID NO: 3920; WAN024CUS; Start 435; Stop 459
ccaagatatagaagagagtgtacgc

SEQ ID NO: 367336 - DNA, 25 bp, Artificial
  probe
  misc_feature (1)..(25): SEQ ID NO: 3920; WAN024CUS; Start 434; Stop 458
tccaagatatagaagagagtgtacg

SEQ ID NO: 367337 - DNA, 25 bp, Artificial
  probe
  misc_feature (1)..(25): SEQ ID NO: 3920; WAN024CUS; Start 541; Stop 565
ggaagtatgacagtcgtagaattat

SEQ ID NO: 367338 - DNA, 25 bp, Artificial
  probe
  misc_feature (1)..(25): SEQ ID NO: 3920; WAN024CUS; Start 535; Stop 559
gatacaggaagtatgacagtcgtag

SEQ ID NO: 367339 - DNA, 25 bp, Artificial
  probe
  misc_feature (1)..(25): SEQ ID NO: 3920; WAN024CUS; Start 531; Stop 555
tgttgatacaggaagtatgacagtc

SEQ ID NO: 367340 - DNA, 25 bp, Artificial
  probe
  misc_feature (1)..(25): SEQ ID NO: 3920; WAN024CUS; Start 492; Stop 516
aataccagacgatgtcattatctct

SEQ ID NO: 367341 - DNA, 25 bp, Artificial
  probe
  misc_feature (1)..(25): SEQ ID NO: 3920; WAN024CUS; Start 536; Stop 560
atacaggaagtatgacagtcgtaga

SEQ ID NO: 367342 - DNA, 25 bp, Artificial
  probe
  misc_feature (1)..(25): SEQ ID NO: 3920; WAN024CUS; Start 530; Stop 554
atgttgatacaggaagtatgacagt

SEQ ID NO: 367343 - DNA, 25 bp, Artificial
  probe
  misc_feature (1)..(25): SEQ ID NO: 3920; WAN024CUS; Start 534; Stop 558
tgatacaggaagtatgacagtcgta

SEQ ID NO: 367344 - DNA, 25 bp, Artificial
  probe
  misc_feature (1)..(25): SEQ ID NO: 3920; WAN024CUS; Start 489; Stop 513
cctaataccagacgatgtcattatc

SEQ ID NO: 367345 - DNA, 25 bp, Artificial
  probe
  misc_feature (1)..(25): SEQ ID NO: 3920; WAN024CUS; Start 532; Stop 556
gttgatacaggaagtatgacagtcg

SEQ ID NO: 367346 - DNA, 25 bp, Artificial
  probe
  misc_feature (1)..(25): SEQ ID NO: 3920; WAN024CUS; Start 528; Stop 552
caatgttgatacaggaagtatgaca

SEQ ID NO: 367347 - DNA, 25 bp, Artificial
  probe
  misc_feature (1)..(25): SEQ ID NO: 3920; WAN024CUS; Start 527; Stop 551
acaatgttgatacaggaagtatgac

SEQ ID NO: 367348 - DNA, 25 bp, Artificial
  probe
  misc_feature (1)..(25): SEQ ID NO: 3920; WAN024CUS; Start 533; Stop 557
ttgatacaggaagtatgacagtcgt

SEQ ID NO: 367349 - DNA, 25 bp, Artificial
  probe
  misc_feature (1)..(25): SEQ ID NO: 3920; WAN024CUS; Start 529; Stop 553
aatgttgatacaggaagtatgacag

SEQ ID NO: 367350 - DNA, 25 bp, Artificial
  probe
  misc_feature (1)..(25): SEQ ID NO: 3920; WAN024CUS; Start 491; Stop 515
taataccagacgatgtcattatctc

SEQ ID NO: 367351 - DNA, 25 bp, Artificial
  probe
  misc_feature (1)..(25): SEQ ID NO: 3920; WAN024CUS; Start 490; Stop 514
ctaataccagacgatgtcattatct

SEQ ID NO: 367352 - DNA, 25 bp, Artificial
  probe
  misc_feature (1)..(25): SEQ ID NO: 3920; WAN024CUS; Start 526; Stop 550
tacaatgttgatacaggaagtatga

SEQ ID NO: 367353 - DNA, 25 bp, Artificial
  probe
  misc_feature (1)..(25): SEQ ID NO: 3920; WAN024CUS; Start 433; Stop 457
ttccaagatatagaagagagtgtac

SEQ ID NO: 367354 - DNA, 25 bp, Artificial
  probe
  misc_feature (1)..(25): SEQ ID NO: 3920; WAN024CUS; Start 488; Stop 512
ccctaataccagacgatgtcattat

SEQ ID NO: 367355 - DNA, 25 bp, Artificial
  probe
  misc_feature (1)..(25): SEQ ID NO: 3920; WAN024CUS; Start 463; Stop 487
gatatgcaactgcttatcgagtctc

SEQ ID NO: 367356 - DNA, 25 bp, Artificial
  probe
  misc_feature (1)..(25): SEQ ID NO: 3920; WAN024CUS; Start 525; Stop 549
ttacaatgttgatacaggaagtatg

SEQ ID NO: 367357 - DNA, 25 bp, Artificial
  probe
  misc_feature (1)..(25): SEQ ID NO: 3920; WAN024CUS; Start 431; Stop 455
ccttccaagatatagaagagagtgt

SEQ ID NO: 367358 - DNA, 25 bp, Artificial
  probe
  misc_feature (1)..(25): SEQ ID NO: 3920; WAN024CUS; Start 283; Stop 307
ctagttatttcccagcaacaaatgg

SEQ ID NO: 367359 - DNA, 25 bp, Artificial
  probe
  misc_feature (1)..(25): SEQ ID NO: 3920; WAN024CUS; Start 464; Stop 488
atatgcaactgcttatcgagtctcc

SEQ ID NO: 367360 - DNA, 25 bp, Artificial
  probe
  misc_feature (1)..(25): SEQ ID NO: 3920; WAN024CUS; Start 462; Stop 486
ggatatgcaactgcttatcgagtct

SEQ ID NO: 367361 - DNA, 25 bp, Artificial
  probe
  misc_feature (1)..(25): SEQ ID NO: 3920; WAN024CUS; Start 461; Stop 485
aggatatgcaactgcttatcgagtc

SEQ ID NO: 367362 - DNA, 25 bp, Artificial
  probe
  misc_feature (1)..(25): SEQ ID NO: 3920; WAN024CUS; Start 460; Stop 484
gaggatatgcaactgcttatcgagt

SEQ ID NO: 367363 - DNA, 25 bp, Artificial
  probe
  misc_feature (1)..(25): SEQ ID NO: 3920; WAN024CUS; Start 542; Stop 566
gaagtatgacagtcgtagaattata

SEQ ID NO: 367364 - DNA, 25 bp, Artificial
  probe
  misc_feature (1)..(25): SEQ ID NO: 3921; WAN024G5M; Start 36; Stop 60
ctgcgaattgattgtaacgatctcc

SEQ ID NO: 367365 - DNA, 25 bp, Artificial
  probe
  misc_feature (1)..(25): SEQ ID NO: 3921; WAN024G5M; Start 35; Stop 59
cctgcgaattgattgtaacgatctc

SEQ ID NO: 367366 - DNA, 25 bp, Artificial
  probe
  misc_feature (1)..(25): SEQ ID NO: 3921; WAN024G5M; Start 77; Stop 101
atactcttcttgccatgaaccactt

SEQ ID NO: 367367 - DNA, 25 bp, Artificial
  probe
  misc_feature (1)..(25): SEQ ID NO: 3921; WAN024G5M; Start 154; Stop 178
gaaagtcaccaggttaaagtcatat

SEQ ID NO: 367368 - DNA, 25 bp, Artificial
  probe
  misc_feature (1)..(25): SEQ ID NO: 3921; WAN024G5M; Start 153; Stop 177
tgaaagtcaccaggttaaagtcata

SEQ ID NO: 367369 - DNA, 25 bp, Artificial
  probe
  misc_feature (1)..(25): SEQ ID NO: 3921; WAN024G5M; Start 78; Stop 102
tactcttcttgccatgaaccacttc

SEQ ID NO: 367370 - DNA, 25 bp, Artificial
  probe
  misc_feature (1)..(25): SEQ ID NO: 3921; WAN024G5M; Start 160; Stop 184
caccaggttaaagtcatatttacga

SEQ ID NO: 367371 - DNA, 25 bp, Artificial
  probe
  misc_feature (1)..(25): SEQ ID NO: 3921; WAN024G5M; Start 159; Stop 183
tcaccaggttaaagtcatatttacg

SEQ ID NO: 367372 - DNA, 25 bp, Artificial
  probe
  misc_feature (1)..(25): SEQ ID NO: 3921; WAN024G5M; Start 76; Stop 100
catactcttcttgccatgaaccact

SEQ ID NO: 367373 - DNA, 25 bp, Artificial
  probe
  misc_feature (1)..(25): SEQ ID NO: 3921; WAN024G5M; Start 156; Stop 180
aagtcaccaggttaaagtcatattt

SEQ ID NO: 367374 - DNA, 25 bp, Artificial
  probe
  misc_feature (1)..(25): SEQ ID NO: 3921; WAN024G5M; Start 155; Stop 179
aaagtcaccaggttaaagtcatatt

SEQ ID NO: 367375 - DNA, 25 bp, Artificial
  probe
  misc_feature (1)..(25): SEQ ID NO: 3921; WAN024G5M; Start 152; Stop 176
ctgaaagtcaccaggttaaagtcat

SEQ ID NO: 367376 - DNA, 25 bp, Artificial
  probe
  misc_feature (1)..(25): SEQ ID NO: 3921; WAN024G5M; Start 32; Stop 56
aagcctgcgaattgattgtaacgat

SEQ ID NO: 367377 - DNA, 25 bp, Artificial
  probe
  misc_feature (1)..(25): SEQ ID NO: 3921; WAN024G5M; Start 161; Stop 185
accaggttaaagtcatatttacgat

SEQ ID NO: 367378 - DNA, 25 bp, Artificial
  probe
  misc_feature (1)..(25): SEQ ID NO: 3921; WAN024G5M; Start 73; Stop 97
catcatactcttcttgccatgaacc

SEQ ID NO: 367379 - DNA, 25 bp, Artificial
  probe
  misc_feature (1)..(25): SEQ ID NO: 3921; WAN024G5M; Start 140; Stop 164
acatacataaagctgaaagtcacca

SEQ ID NO: 367380 - DNA, 25 bp, Artificial
  probe
  misc_feature (1)..(25): SEQ ID NO: 3921; WAN024G5M; Start 139; Stop 163
aacatacataaagctgaaagtcacc

SEQ ID NO: 367381 - DNA, 25 bp, Artificial
  probe
  misc_feature (1)..(25): SEQ ID NO: 3921; WAN024G5M; Start 158; Stop 182
gtcaccaggttaaagtcatatttac

SEQ ID NO: 367382 - DNA, 25 bp, Artificial
  probe
  misc_feature (1)..(25): SEQ ID NO: 3921; WAN024G5M; Start 157; Stop 181
agtcaccaggttaaagtcatattta

SEQ ID NO: 367383 - DNA, 25 bp, Artificial
  probe
  misc_feature (1)..(25): SEQ ID NO: 3921; WAN024G5M; Start 74; Stop 98
atcatactcttcttgccatgaacca

SEQ ID NO: 367384 - DNA, 25 bp, Artificial
  probe
  misc_feature (1)..(25): SEQ ID NO: 3921; WAN024G5M; Start 114; Stop 138
atggcaagagataattctccttgaa

SEQ ID NO: 367385 - DNA, 25 bp, Artificial
  probe
  misc_feature (1)..(25): SEQ ID NO: 3921; WAN024G5M; Start 113; Stop 137
aatggcaagagataattctccttga

SEQ ID NO: 367386 - DNA, 25 bp, Artificial
  probe
  misc_feature (1)..(25): SEQ ID NO: 3921; WAN024G5M; Start 112; Stop 136
gaatggcaagagataattctccttg

SEQ ID NO: 367387 - DNA, 25 bp, Artificial
  probe
  misc_feature (1)..(25): SEQ ID NO: 3921; WAN024G5M; Start 141; Stop 165
catacataaagctgaaagtcaccag

SEQ ID NO: 367388 - DNA, 25 bp, Artificial
  probe
  misc_feature (1)..(25): SEQ ID NO: 3921; WAN024G5M; Start 146; Stop 170
ataaagctgaaagtcaccaggttaa

SEQ ID NO: 367389 - DNA, 25 bp, Artificial
  probe
  misc_feature (1)..(25): SEQ ID NO: 3921; WAN024G5M; Start 147; Stop 171
taaagctgaaagtcaccaggttaaa

SEQ ID NO: 367390 - DNA, 25 bp, Artificial
  probe
  misc_feature (1)..(25): SEQ ID NO: 3921; WAN024G5M; Start 142; Stop 166
atacataaagctgaaagtcaccagg

SEQ ID NO: 367391 - DNA, 25 bp, Artificial
  probe
  misc_feature (1)..(25): SEQ ID NO: 3921; WAN024G5M; Start 106; Stop 130
gtgcgagaatggcaagagataattc

SEQ ID NO: 367392 - DNA, 25 bp, Artificial
  probe
  misc_feature (1)..(25): SEQ ID NO: 3921; WAN024G5M; Start 145; Stop 169
cataaagctgaaagtcaccaggtta

SEQ ID NO: 367393 - DNA, 25 bp, Artificial
  probe
  misc_feature (1)..(25): SEQ ID NO: 3921; WAN024G5M; Start 34; Stop 58
gcctgcgaattgattgtaacgatct

SEQ ID NO: 367394 - DNA, 25 bp, Artificial
  probe
  misc_feature (1)..(25): SEQ ID NO: 3921; WAN024G5M; Start 33; Stop 57
agcctgcgaattgattgtaacgatc

SEQ ID NO: 367395 - DNA, 25 bp, Artificial
  probe
  misc_feature (1)..(25): SEQ ID NO: 3921; WAN024G5M; Start 202; Stop 226
gtagaaacggaggatatcattcatc

SEQ ID NO: 367396 - DNA, 25 bp, Artificial
  probe
  misc_feature (1)..(25): SEQ ID NO: 3921; WAN024G5M; Start 72; Stop 96
gcatcatactcttcttgccatgaac

SEQ ID NO: 367397 - DNA, 25 bp, Artificial
  probe
  misc_feature (1)..(25): SEQ ID NO: 3922; WAN024GFD; Start 3; Stop 27
gacaacagaggtaacagagatgaac

SEQ ID NO: 367398 - DNA, 25 bp, Artificial
  probe
  misc_feature (1)..(25): SEQ ID NO: 3922; WAN024GFD; Start 14; Stop 38
taacagagatgaacgagacacagat

SEQ ID NO: 367399 - DNA, 25 bp, Artificial
  probe
  misc_feature (1)..(25): SEQ ID NO: 3922; WAN024GFD; Start 2; Stop 26
tgacaacagaggtaacagagatgaa

SEQ ID NO: 367400 - DNA, 25 bp, Artificial
  probe
  misc_feature (1)..(25): SEQ ID NO: 3922; WAN024GFD; Start 112; Stop 136
ttaggtctatcttctagtgaggtgc

SEQ ID NO: 367401 - DNA, 25 bp, Artificial
  probe
  misc_feature (1)..(25): SEQ ID NO: 3922; WAN024GFD; Start 114; Stop 138
aggtctatcttctagtgaggtgcta

SEQ ID NO: 367402 - DNA, 25 bp, Artificial
  probe
  misc_feature (1)..(25): SEQ ID NO: 3922; WAN024GFD; Start 113; Stop 137
taggtctatcttctagtgaggtgct

SEQ ID NO: 367403 - DNA, 25 bp, Artificial
  probe
  misc_feature (1)..(25): SEQ ID NO: 3922; WAN024GFD; Start 15; Stop 39
aacagagatgaacgagacacagatt

SEQ ID NO: 367404 - DNA, 25 bp, Artificial
  probe
  misc_feature (1)..(25): SEQ ID NO: 3922; WAN024GFD; Start 6; Stop 30
aacagaggtaacagagatgaacgag

SEQ ID NO: 367405 - DNA, 25 bp, Artificial
  probe
  misc_feature (1)..(25): SEQ ID NO: 3922; WAN024GFD; Start 1; Stop 25
gtgacaacagaggtaacagagatga

SEQ ID NO: 367406 - DNA, 25 bp, Artificial
  probe
  misc_feature (1)..(25): SEQ ID NO: 3922; WAN024GFD; Start 13; Stop 37
gtaacagagatgaacgagacacaga

SEQ ID NO: 367407 - DNA, 25 bp, Artificial
  probe
  misc_feature (1)..(25): SEQ ID NO: 3922; WAN024GFD; Start 306; Stop 330
aattgtcagtgtccatcctactctt

SEQ ID NO: 367408 - DNA, 25 bp, Artificial
  probe
  misc_feature (1)..(25): SEQ ID NO: 3922; WAN024GFD; Start 5; Stop 29
caacagaggtaacagagatgaacga

SEQ ID NO: 367409 - DNA, 25 bp, Artificial
  probe
  misc_feature (1)..(25): SEQ ID NO: 3922; WAN024GFD; Start 307; Stop 331
attgtcagtgtccatcctactcttc

SEQ ID NO: 367410 - DNA, 25 bp, Artificial
  probe
  misc_feature (1)..(25): SEQ ID NO: 3922; WAN024GFD; Start 8; Stop 32
cagaggtaacagagatgaacgagac

SEQ ID NO: 367411 - DNA, 25 bp, Artificial
  probe
  misc_feature (1)..(25): SEQ ID NO: 3922; WAN024GFD; Start 16; Stop 40
acagagatgaacgagacacagattc

SEQ ID NO: 367412 - DNA, 25 bp, Artificial
  probe
  misc_feature (1)..(25): SEQ ID NO: 3922; WAN024GFD; Start 4; Stop 28
acaacagaggtaacagagatgaacg

SEQ ID NO: 367413 - DNA, 25 bp, Artificial
  probe
  misc_feature (1)..(25): SEQ ID NO: 3922; WAN024GFD; Start 10; Stop 34
gaggtaacagagatgaacgagacac

SEQ ID NO: 367414 - DNA, 25 bp, Artificial
  probe
  misc_feature (1)..(25): SEQ ID NO: 3922; WAN024GFD; Start 9; Stop 33
agaggtaacagagatgaacgagaca

SEQ ID NO: 367415 - DNA, 25 bp, Artificial
  probe
  misc_feature (1)..(25): SEQ ID NO: 3922; WAN024GFD; Start 7; Stop 31
acagaggtaacagagatgaacgaga

SEQ ID NO: 367416 - DNA, 25 bp, Artificial
  probe
  misc_feature (1)..(25): SEQ ID NO: 3922; WAN024GFD; Start 215; Stop 239
gtagaggtatccatttagcagttca

SEQ ID NO: 367417 - DNA, 25 bp, Artificial
  probe
  misc_feature (1)..(25): SEQ ID NO: 3922; WAN024GFD; Start 217; Stop 241
agaggtatccatttagcagttcaag

SEQ ID NO: 367418 - DNA, 25 bp, Artificial
  probe
  misc_feature (1)..(25): SEQ ID NO: 3922; WAN024GFD; Start 214; Stop 238
agtagaggtatccatttagcagttc

SEQ ID NO: 367419 - DNA, 25 bp, Artificial
  probe
  misc_feature (1)..(25): SEQ ID NO: 3922; WAN024GFD; Start 221; Stop 245
gtatccatttagcagttcaaggttg

SEQ ID NO: 367420 - DNA, 25 bp, Artificial
  probe
  misc_feature (1)..(25): SEQ ID NO: 3922; WAN024GFD; Start 222; Stop 246
tatccatttagcagttcaaggttgt

SEQ ID NO: 367421 - DNA, 25 bp, Artificial
  probe
  misc_feature (1)..(25): SEQ ID NO: 3922; WAN024GFD; Start 216; Stop 240
tagaggtatccatttagcagttcaa

SEQ ID NO: 367422 - DNA, 25 bp, Artificial
  probe
  misc_feature (1)..(25): SEQ ID NO: 3922; WAN024GFD; Start 12; Stop 36
ggtaacagagatgaacgagacacag

SEQ ID NO: 367423 - DNA, 25 bp, Artificial
  probe
  misc_feature (1)..(25): SEQ ID NO: 3922; WAN024GFD; Start 212; Stop 236
gtagtagaggtatccatttagcagt

SEQ ID NO: 367424 - DNA, 25 bp, Artificial
  probe
  misc_feature (1)..(25): SEQ ID NO: 3922; WAN024GFD; Start 28; Stop 52
gagacacagattcaaagagaaacac

SEQ ID NO: 367425 - DNA, 25 bp, Artificial
  probe
  misc_feature (1)..(25): SEQ ID NO: 3922; WAN024GFD; Start 220; Stop 244
ggtatccatttagcagttcaaggtt

SEQ ID NO: 367426 - DNA, 25 bp, Artificial
  probe
  misc_feature (1)..(25): SEQ ID NO: 3922; WAN024GFD; Start 25; Stop 49
aacgagacacagattcaaagagaaa

SEQ ID NO: 367427 - DNA, 25 bp, Artificial
  probe
  misc_feature (1)..(25): SEQ ID NO: 3922; WAN024GFD; Start 218; Stop 242
gaggtatccatttagcagttcaagg

SEQ ID NO: 367428 - DNA, 25 bp, Artificial
  probe
  misc_feature (1)..(25): SEQ ID NO: 3922; WAN024GFD; Start 116; Stop 140
gtctatcttctagtgaggtgctagg

SEQ ID NO: 367429 - DNA, 25 bp, Artificial
  probe
  misc_feature (1)..(25): SEQ ID NO: 3922; WAN024GFD; Start 115; Stop 139
ggtctatcttctagtgaggtgctag

SEQ ID NO: 367430 - DNA, 25 bp, Artificial
  probe
  misc_feature (1)..(25): SEQ ID NO: 3923; WAN024G8S; Start 99; Stop 123
cctaaccaatgtcactcttccttat

SEQ ID NO: 367431 - DNA, 25 bp, Artificial
  probe
  misc_feature (1)..(25): SEQ ID NO: 3923; WAN024G8S; Start 103; Stop 127
accaatgtcactcttccttatatcg

SEQ ID NO: 367432 - DNA, 25 bp, Artificial
  probe
  misc_feature (1)..(25): SEQ ID NO: 3923; WAN024G8S; Start 102; Stop 126
aaccaatgtcactcttccttatatc

SEQ ID NO: 367433 - DNA, 25 bp, Artificial
  probe
  misc_feature (1)..(25): SEQ ID NO: 3923; WAN024G8S; Start 220; Stop 244
ctaccagttgctcaaggacttaatc

SEQ ID NO: 367434 - DNA, 25 bp, Artificial
  probe
  misc_feature (1)..(25): SEQ ID NO: 3923; WAN024G8S; Start 100; Stop 124
ctaaccaatgtcactcttccttata

SEQ ID NO: 367435 - DNA, 25 bp, Artificial
  probe
  misc_feature (1)..(25): SEQ ID NO: 3923; WAN024G8S; Start 235; Stop 259
ggacttaatcgtgactacactgata

SEQ ID NO: 367436 - DNA, 25 bp, Artificial
  probe
  misc_feature (1)..(25): SEQ ID NO: 3923; WAN024G8S; Start 227; Stop 251
ttgctcaaggacttaatcgtgacta

SEQ ID NO: 367437 - DNA, 25 bp, Artificial
  probe
  misc_feature (1)..(25): SEQ ID NO: 3923; WAN024G8S; Start 234; Stop 258
aggacttaatcgtgactacactgat

SEQ ID NO: 367438 - DNA, 25 bp, Artificial
  probe
  misc_feature (1)..(25): SEQ ID NO: 3923; WAN024G8S; Start 230; Stop 254
ctcaaggacttaatcgtgactacac

SEQ ID NO: 367439 - DNA, 25 bp, Artificial
  probe
  misc_feature (1)..(25): SEQ ID NO: 3923; WAN024G8S; Start 104; Stop 128
ccaatgtcactcttccttatatcga

SEQ ID NO: 367440 - DNA, 25 bp, Artificial
  probe
  misc_feature (1)..(25): SEQ ID NO: 3923; WAN024G8S; Start 233; Stop 257
aaggacttaatcgtgactacactga

SEQ ID NO: 367441 - DNA, 25 bp, Artificial
  probe
  misc_feature (1)..(25): SEQ ID NO: 3923; WAN024G8S; Start 232; Stop 256
caaggacttaatcgtgactacactg

SEQ ID NO: 367442 - DNA, 25 bp, Artificial
  probe
  misc_feature (1)..(25): SEQ ID NO: 3923; WAN024G8S; Start 231; Stop 255
tcaaggacttaatcgtgactacact

SEQ ID NO: 367443 - DNA, 25 bp, Artificial
  probe
  misc_feature (1)..(25): SEQ ID NO: 3923; WAN024G8S; Start 229; Stop 253
gctcaaggacttaatcgtgactaca

SEQ ID NO: 367444 - DNA, 25 bp, Artificial
  probe
  misc_feature (1)..(25): SEQ ID NO: 3923; WAN024G8S; Start 228; Stop 252
tgctcaaggacttaatcgtgactac

SEQ ID NO: 367445 - DNA, 25 bp, Artificial
  probe
  misc_feature (1)..(25): SEQ ID NO: 3923; WAN024G8S; Start 101; Stop 125
taaccaatgtcactcttccttatat

SEQ ID NO: 367446 - DNA, 25 bp, Artificial
  probe
  misc_feature (1)..(25): SEQ ID NO: 3923; WAN024G8S; Start 221; Stop 245
taccagttgctcaaggacttaatcg

SEQ ID NO: 367447 - DNA, 25 bp, Artificial
  probe
  misc_feature (1)..(25): SEQ ID NO: 3923; WAN024G8S; Start 236; Stop 260
gacttaatcgtgactacactgatat

SEQ ID NO: 367448 - DNA, 25 bp, Artificial
  probe
  misc_feature (1)..(25): SEQ ID NO: 3923; WAN024G8S; Start 105; Stop 129
caatgtcactcttccttatatcgaa

SEQ ID NO: 367449 - DNA, 25 bp, Artificial
  probe
  misc_feature (1)..(25): SEQ ID NO: 3923; WAN024G8S; Start 219; Stop 243
cctaccagttgctcaaggacttaat

SEQ ID NO: 367450 - DNA, 25 bp, Artificial
  probe
  misc_feature (1)..(25): SEQ ID NO: 3923; WAN024G8S; Start 98; Stop 122
ccctaaccaatgtcactcttcctta

SEQ ID NO: 367451 - DNA, 25 bp, Artificial
  probe
  misc_feature (1)..(25): SEQ ID NO: 3923; WAN024G8S; Start 226; Stop 250
gttgctcaaggacttaatcgtgact

SEQ ID NO: 367452 - DNA, 25 bp, Artificial
  probe
  misc_feature (1)..(25): SEQ ID NO: 3923; WAN024G8S; Start 225; Stop 249
agttgctcaaggacttaatcgtgac

SEQ ID NO: 367453 - DNA, 25 bp, Artificial
  probe
  misc_feature (1)..(25): SEQ ID NO: 3923; WAN024G8S; Start 224; Stop 248
cagttgctcaaggacttaatcgtga

SEQ ID NO: 367454 - DNA, 25 bp, Artificial
  probe
  misc_feature (1)..(25): SEQ ID NO: 3923; WAN024G8S; Start 152; Stop 176
cacaagcaatctctgaagatgaagg

SEQ ID NO: 367455 - DNA, 25 bp, Artificial
  probe
  misc_feature (1)..(25): SEQ ID NO: 3923; WAN024G8S; Start 151; Stop 175
gcacaagcaatctctgaagatgaag

SEQ ID NO: 367456 - DNA, 25 bp, Artificial
  probe
  misc_feature (1)..(25): SEQ ID NO: 3923; WAN024G8S; Start 237; Stop 261
acttaatcgtgactacactgatatc

SEQ ID NO: 367457 - DNA, 25 bp, Artificial
  probe
  misc_feature (1)..(25): SEQ ID NO: 3923; WAN024G8S; Start 223; Stop 247
ccagttgctcaaggacttaatcgtg

SEQ ID NO: 367458 - DNA, 25 bp, Artificial
  probe
  misc_feature (1)..(25): SEQ ID NO: 3923; WAN024G8S; Start 107; Stop 131
atgtcactcttccttatatcgaagc

SEQ ID NO: 367459 - DNA, 25 bp, Artificial
  probe
  misc_feature (1)..(25): SEQ ID NO: 3923; WAN024G8S; Start 147; Stop 171
attcgcacaagcaatctctgaagat

SEQ ID NO: 367460 - DNA, 25 bp, Artificial
  probe
  misc_feature (1)..(25): SEQ ID NO: 3923; WAN024G8S; Start 108; Stop 132
tgtcactcttccttatatcgaagct

SEQ ID NO: 367461 - DNA, 25 bp, Artificial
  probe
  misc_feature (1)..(25): SEQ ID NO: 3923; WAN024G8S; Start 222; Stop 246
accagttgctcaaggacttaatcgt

SEQ ID NO: 367462 - DNA, 25 bp, Artificial
  probe
  misc_feature (1)..(25): SEQ ID NO: 3923; WAN024G8S; Start 156; Stop 180
agcaatctctgaagatgaaggcttg

SEQ ID NO: 367463 - DNA, 25 bp, Artificial
  probe
  misc_feature (1)..(25): SEQ ID NO: 3924; WAN024GE9; Start 39; Stop 63
tgtaatgagaccagtcttaggtgat

SEQ ID NO: 367464 - DNA, 25 bp, Artificial
  probe
  misc_feature (1)..(25): SEQ ID NO: 3924; WAN024GE9; Start 41; Stop 65
taatgagaccagtcttaggtgatac

SEQ ID NO: 367465 - DNA, 25 bp, Artificial
  probe
  misc_feature (1)..(25): SEQ ID NO: 3924; WAN024GE9; Start 40; Stop 64
gtaatgagaccagtcttaggtgata

SEQ ID NO: 367466 - DNA, 25 bp, Artificial
  probe
  misc_feature (1)..(25): SEQ ID NO: 3924; WAN024GE9; Start 65; Stop 89
cgacacccagagaaactttcatata

SEQ ID NO: 367467 - DNA, 25 bp, Artificial
  probe
  misc_feature (1)..(25): SEQ ID NO: 3924; WAN024GE9; Start 38; Stop 62
ctgtaatgagaccagtcttaggtga

SEQ ID NO: 367468 - DNA, 25 bp, Artificial
  probe
  misc_feature (1)..(25): SEQ ID NO: 3924; WAN024GE9; Start 37; Stop 61
tctgtaatgagaccagtcttaggtg

SEQ ID NO: 367469 - DNA, 25 bp, Artificial
  probe
  misc_feature (1)..(25): SEQ ID NO: 3924; WAN024GE9; Start 197; Stop 221
cgactgaaatgtatttaaccttgac

SEQ ID NO: 367470 - DNA, 25 bp, Artificial
  probe
  misc_feature (1)..(25): SEQ ID NO: 3924; WAN024GE9; Start 42; Stop 66
aatgagaccagtcttaggtgatacg

SEQ ID NO: 367471 - DNA, 25 bp, Artificial
  probe
  misc_feature (1)..(25): SEQ ID NO: 3924; WAN024GE9; Start 137; Stop 161
agttagcaagagtaatatctacctt

SEQ ID NO: 367472 - DNA, 25 bp, Artificial
  probe
  misc_feature (1)..(25): SEQ ID NO: 3924; WAN024GE9; Start 136; Stop 160
aagttagcaagagtaatatctacct

SEQ ID NO: 367473 - DNA, 25 bp, Artificial
  probe
  misc_feature (1)..(25): SEQ ID NO: 3924; WAN024GE9; Start 112; Stop 136
ttcttacgttcgtcagttactgtaa

SEQ ID NO: 367474 - DNA, 25 bp, Artificial
  probe
  misc_feature (1)..(25): SEQ ID NO: 3924; WAN024GE9; Start 63; Stop 87
tacgacacccagagaaactttcata

SEQ ID NO: 367475 - DNA, 25 bp, Artificial
  probe
  misc_feature (1)..(25): SEQ ID NO: 3924; WAN024GE9; Start 160; Stop 184
ttgtttgaaatcaagtattccgcac

SEQ ID NO: 367476 - DNA, 25 bp, Artificial
  probe
  misc_feature (1)..(25): SEQ ID NO: 3924; WAN024GE9; Start 201; Stop 225
tgaaatgtatttaaccttgacacca

SEQ ID NO: 367477 - DNA, 25 bp, Artificial
  probe
  misc_feature (1)..(25): SEQ ID NO: 3924; WAN024GE9; Start 200; Stop 224
ctgaaatgtatttaaccttgacacc

SEQ ID NO: 367478 - DNA, 25 bp, Artificial
  probe
  misc_feature (1)..(25): SEQ ID NO: 3924; WAN024GE9; Start 64; Stop 88
acgacacccagagaaactttcatat

SEQ ID NO: 367479 - DNA, 25 bp, Artificial
  probe
  misc_feature (1)..(25): SEQ ID NO: 3924; WAN024GE9; Start 62; Stop 86
atacgacacccagagaaactttcat

SEQ ID NO: 367480 - DNA, 25 bp, Artificial
  probe
  misc_feature (1)..(25): SEQ ID NO: 3924; WAN024GE9; Start 66; Stop 90
gacacccagagaaactttcatatat

SEQ ID NO: 367481 - DNA, 25 bp, Artificial
  probe
  misc_feature (1)..(25): SEQ ID NO: 3924; WAN024GE9; Start 43; Stop 67
atgagaccagtcttaggtgatacga

SEQ ID NO: 367482 - DNA, 25 bp, Artificial
  probe
  misc_feature (1)..(25): SEQ ID NO: 3924; WAN024GE9; Start 193; Stop 217
gcatcgactgaaatgtatttaacct

SEQ ID NO: 367483 - DNA, 25 bp, Artificial
  probe
  misc_feature (1)..(25): SEQ ID NO: 3924; WAN024GE9; Start 192; Stop 216
agcatcgactgaaatgtatttaacc

SEQ ID NO: 367484 - DNA, 25 bp, Artificial
  probe
  misc_feature (1)..(25): SEQ ID NO: 3924; WAN024GE9; Start 202; Stop 226
gaaatgtatttaaccttgacaccaa

SEQ ID NO: 367485 - DNA, 25 bp, Artificial
  probe
  misc_feature (1)..(25): SEQ ID NO: 3924; WAN024GE9; Start 122; Stop 146
cgtcagttactgtaaagttagcaag

SEQ ID NO: 367486 - DNA, 25 bp, Artificial
  probe
  misc_feature (1)..(25): SEQ ID NO: 3924; WAN024GE9; Start 121; Stop 145
tcgtcagttactgtaaagttagcaa

SEQ ID NO: 367487 - DNA, 25 bp, Artificial
  probe
  misc_feature (1)..(25): SEQ ID NO: 3924; WAN024GE9; Start 120; Stop 144
ttcgtcagttactgtaaagttagca

SEQ ID NO: 367488 - DNA, 25 bp, Artificial
  probe
  misc_feature (1)..(25): SEQ ID NO: 3924; WAN024GE9; Start 119; Stop 143
gttcgtcagttactgtaaagttagc

SEQ ID NO: 367489 - DNA, 25 bp, Artificial
  probe
  misc_feature (1)..(25): SEQ ID NO: 3924; WAN024GE9; Start 118; Stop 142
cgttcgtcagttactgtaaagttag

SEQ ID NO: 367490 - DNA, 25 bp, Artificial
  probe
  misc_feature (1)..(25): SEQ ID NO: 3924; WAN024GE9; Start 107; Stop 131
cttgtttcttacgttcgtcagttac

SEQ ID NO: 367491 - DNA, 25 bp, Artificial
  probe
  misc_feature (1)..(25): SEQ ID NO: 3924; WAN024GE9; Start 108; Stop 132
ttgtttcttacgttcgtcagttact

SEQ ID NO: 367492 - DNA, 25 bp, Artificial
  probe
  misc_feature (1)..(25): SEQ ID NO: 3924; WAN024GE9; Start 199; Stop 223
actgaaatgtatttaaccttgacac

SEQ ID NO: 367493 - DNA, 25 bp, Artificial
  probe
  misc_feature (1)..(25): SEQ ID NO: 3924; WAN024GE9; Start 196; Stop 220
tcgactgaaatgtatttaaccttga

SEQ ID NO: 367494 - DNA, 25 bp, Artificial
  probe
  misc_feature (1)..(25): SEQ ID NO: 3924; WAN024GE9; Start 100; Stop 124
aaatcaacttgtttcttacgttcgt

SEQ ID NO: 367495 - DNA, 25 bp, Artificial
  probe
  misc_feature (1)..(25): SEQ ID NO: 3924; WAN024GE9; Start 101; Stop 125
aatcaacttgtttcttacgttcgtc

SEQ ID NO: 367496 - DNA, 25 bp, Artificial
  probe
  misc_feature (1)..(25): SEQ ID NO: 3925; WAN024DTO; Start 43; Stop 67
gcaatagcagtttctcctacagtta

SEQ ID NO: 367497 - DNA, 25 bp, Artificial
  probe
  misc_feature (1)..(25): SEQ ID NO: 3925; WAN024DTO; Start 181; Stop 205
ccatctgacaatcgaatatctactt

SEQ ID NO: 367498 - DNA, 25 bp, Artificial
  probe
  misc_feature (1)..(25): SEQ ID NO: 3925; WAN024DTO; Start 68; Stop 92
acttactagaatcaccaaactcagc

SEQ ID NO: 367499 - DNA, 25 bp, Artificial
  probe
  misc_feature (1)..(25): SEQ ID NO: 3925; WAN024DTO; Start 44; Stop 68
caatagcagtttctcctacagttaa

SEQ ID NO: 367500 - DNA, 25 bp, Artificial
  probe
  misc_feature (1)..(25): SEQ ID NO: 3925; WAN024DTO; Start 157; Stop 181
acaatttctccaggtactttagtcc

SEQ ID NO: 367501 - DNA, 25 bp, Artificial
  probe
  misc_feature (1)..(25): SEQ ID NO: 3925; WAN024DTO; Start 155; Stop 179
cgacaatttctccaggtactttagt

SEQ ID NO: 367502 - DNA, 25 bp, Artificial
  probe
  misc_feature (1)..(25): SEQ ID NO: 3925; WAN024DTO; Start 120; Stop 144
tttgacgacagcaatatcagagaaa

SEQ ID NO: 367503 - DNA, 25 bp, Artificial
  probe
  misc_feature (1)..(25): SEQ ID NO: 3925; WAN024DTO; Start 158; Stop 182
caatttctccaggtactttagtccc

SEQ ID NO: 367504 - DNA, 25 bp, Artificial
  probe
  misc_feature (1)..(25): SEQ ID NO: 3925; WAN024DTO; Start 160; Stop 184
atttctccaggtactttagtcccat

SEQ ID NO: 367505 - DNA, 25 bp, Artificial
  probe
  misc_feature (1)..(25): SEQ ID NO: 3925; WAN024DTO; Start 123; Stop 147
gacgacagcaatatcagagaaagtg

SEQ ID NO: 367506 - DNA, 25 bp, Artificial
  probe
  misc_feature (1)..(25): SEQ ID NO: 3925; WAN024DTO; Start 159; Stop 183
aatttctccaggtactttagtccca

SEQ ID NO: 367507 - DNA, 25 bp, Artificial
  probe
  misc_feature (1)..(25): SEQ ID NO: 3925; WAN024DTO; Start 154; Stop 178
ccgacaatttctccaggtactttag

SEQ ID NO: 367508 - DNA, 25 bp, Artificial
  probe
  misc_feature (1)..(25): SEQ ID NO: 3925; WAN024DTO; Start 121; Stop 145
ttgacgacagcaatatcagagaaag

SEQ ID NO: 367509 - DNA, 25 bp, Artificial
  probe
  misc_feature (1)..(25): SEQ ID NO: 3925; WAN024DTO; Start 67; Stop 91
aacttactagaatcaccaaactcag

SEQ ID NO: 367510 - DNA, 25 bp, Artificial
  probe
  misc_feature (1)..(25): SEQ ID NO: 3925; WAN024DTO; Start 128; Stop 152
cagcaatatcagagaaagtgtcagc

SEQ ID NO: 367511 - DNA, 25 bp, Artificial
  probe
  misc_feature (1)..(25): SEQ ID NO: 3925; WAN024DTO; Start 127; Stop 151
acagcaatatcagagaaagtgtcag

SEQ ID NO: 367512 - DNA, 25 bp, Artificial
  probe
  misc_feature (1)..(25): SEQ ID NO: 3925; WAN024DTO; Start 161; Stop 185
tttctccaggtactttagtcccatc

SEQ ID NO: 367513 - DNA, 25 bp, Artificial
  probe
  misc_feature (1)..(25): SEQ ID NO: 3925; WAN024DTO; Start 153; Stop 177
tccgacaatttctccaggtacttta

SEQ ID NO: 367514 - DNA, 25 bp, Artificial
  probe
  misc_feature (1)..(25): SEQ ID NO: 3925; WAN024DTO; Start 71; Stop 95
tactagaatcaccaaactcagctac

SEQ ID NO: 367515 - DNA, 25 bp, Artificial
  probe
  misc_feature (1)..(25): SEQ ID NO: 3925; WAN024DTO; Start 69; Stop 93
cttactagaatcaccaaactcagct

SEQ ID NO: 367516 - DNA, 25 bp, Artificial
  probe
  misc_feature (1)..(25): SEQ ID NO: 3925; WAN024DTO; Start 169; Stop 193
ggtactttagtcccatctgacaatc

SEQ ID NO: 367517 - DNA, 25 bp, Artificial
  probe
  misc_feature (1)..(25): SEQ ID NO: 3925; WAN024DTO; Start 122; Stop 146
tgacgacagcaatatcagagaaagt

SEQ ID NO: 367518 - DNA, 25 bp, Artificial
  probe
  misc_feature (1)..(25): SEQ ID NO: 3925; WAN024DTO; Start 180; Stop 204
cccatctgacaatcgaatatctact

SEQ ID NO: 367519 - DNA, 25 bp, Artificial
  probe
  misc_feature (1)..(25): SEQ ID NO: 3925; WAN024DTO; Start 179; Stop 203
tcccatctgacaatcgaatatctac

SEQ ID NO: 367520 - DNA, 25 bp, Artificial
  probe
  misc_feature (1)..(25): SEQ ID NO: 3925; WAN024DTO; Start 70; Stop 94
ttactagaatcaccaaactcagcta

SEQ ID NO: 367521 - DNA, 25 bp, Artificial
  probe
  misc_feature (1)..(25): SEQ ID NO: 3925; WAN024DTO; Start 168; Stop 192
aggtactttagtcccatctgacaat

SEQ ID NO: 367522 - DNA, 25 bp, Artificial
  probe
  misc_feature (1)..(25): SEQ ID NO: 3925; WAN024DTO; Start 156; Stop 180
gacaatttctccaggtactttagtc

SEQ ID NO: 367523 - DNA, 25 bp, Artificial
  probe
  misc_feature (1)..(25): SEQ ID NO: 3925; WAN024DTO; Start 40; Stop 64
atggcaatagcagtttctcctacag

SEQ ID NO: 367524 - DNA, 25 bp, Artificial
  probe
  misc_feature (1)..(25): SEQ ID NO: 3925; WAN024DTO; Start 39; Stop 63
gatggcaatagcagtttctcctaca

SEQ ID NO: 367525 - DNA, 25 bp, Artificial
  probe
  misc_feature (1)..(25): SEQ ID NO: 3925; WAN024DTO; Start 170; Stop 194
gtactttagtcccatctgacaatcg

SEQ ID NO: 367526 - DNA, 25 bp, Artificial
  probe
  misc_feature (1)..(25): SEQ ID NO: 3925; WAN024DTO; Start 162; Stop 186
ttctccaggtactttagtcccatct

SEQ ID NO: 367527 - DNA, 25 bp, Artificial
  probe
  misc_feature (1)..(25): SEQ ID NO: 3925; WAN024DTO; Start 72; Stop 96
actagaatcaccaaactcagctact

SEQ ID NO: 367528 - DNA, 25 bp, Artificial
  probe
  misc_feature (1)..(25): SEQ ID NO: 3925; WAN024DTO; Start 14; Stop 38
catattcagaacctaacgggctacc

SEQ ID NO: 367529 - DNA, 25 bp, Artificial
  probe
  misc_feature (1)..(25): SEQ ID NO: 3926; WAN024DCX; Start 58; Stop 82
aactatcacgaccatcagtatgctt

SEQ ID NO: 367530 - DNA, 25 bp, Artificial
  probe
  misc_feature (1)..(25): SEQ ID NO: 3926; WAN024DCX; Start 17; Stop 41
gttacaagtatgattggaatacggt

SEQ ID NO: 367531 - DNA, 25 bp, Artificial
  probe
  misc_feature (1)..(25): SEQ ID NO: 3926; WAN024DCX; Start 16; Stop 40
agttacaagtatgattggaatacgg

SEQ ID NO: 367532 - DNA, 25 bp, Artificial
  probe
  misc_feature (1)..(25): SEQ ID NO: 3926; WAN024DCX; Start 112; Stop 136
tattctgagtataaagttggcggag

SEQ ID NO: 367533 - DNA, 25 bp, Artificial
  probe
  misc_feature (1)..(25): SEQ ID NO: 3926; WAN024DCX; Start 111; Stop 135
ctattctgagtataaagttggcgga

SEQ ID NO: 367534 - DNA, 25 bp, Artificial
  probe
  misc_feature (1)..(25): SEQ ID NO: 3926; WAN024DCX; Start 18; Stop 42
ttacaagtatgattggaatacggtt

SEQ ID NO: 367535 - DNA, 25 bp, Artificial
  probe
  misc_feature (1)..(25): SEQ ID NO: 3926; WAN024DCX; Start 59; Stop 83
actatcacgaccatcagtatgcttg

SEQ ID NO: 367536 - DNA, 25 bp, Artificial
  probe
  misc_feature (1)..(25): SEQ ID NO: 3926; WAN024DCX; Start 57; Stop 81
caactatcacgaccatcagtatgct

SEQ ID NO: 367537 - DNA, 25 bp, Artificial
  probe
  misc_feature (1)..(25): SEQ ID NO: 3926; WAN024DCX; Start 110; Stop 134
gctattctgagtataaagttggcgg

SEQ ID NO: 367538 - DNA, 25 bp, Artificial
  probe
  misc_feature (1)..(25): SEQ ID NO: 3926; WAN024DCX; Start 141; Stop 165
gaactacgctcgttatgaggtcata

SEQ ID NO: 367539 - DNA, 25 bp, Artificial
  probe
  misc_feature (1)..(25): SEQ ID NO: 3926; WAN024DCX; Start 15; Stop 39
aagttacaagtatgattggaatacg

SEQ ID NO: 367540 - DNA, 25 bp, Artificial
  probe
  misc_feature (1)..(25): SEQ ID NO: 3926; WAN024DCX; Start 113; Stop 137
attctgagtataaagttggcggagg

SEQ ID NO: 367541 - DNA, 25 bp, Artificial
  probe
  misc_feature (1)..(25): SEQ ID NO: 3926; WAN024DCX; Start 109; Stop 133
agctattctgagtataaagttggcg

SEQ ID NO: 367542 - DNA, 25 bp, Artificial
  probe
  misc_feature (1)..(25): SEQ ID NO: 3926; WAN024DCX; Start 19; Stop 43
tacaagtatgattggaatacggttt

SEQ ID NO: 367543 - DNA, 25 bp, Artificial
  probe
  misc_feature (1)..(25): SEQ ID NO: 3926; WAN024DCX; Start 60; Stop 84
ctatcacgaccatcagtatgcttgg

SEQ ID NO: 367544 - DNA, 25 bp, Artificial
  probe
  misc_feature (1)..(25): SEQ ID NO: 3926; WAN024DCX; Start 108; Stop 132
cagctattctgagtataaagttggc

SEQ ID NO: 367545 - DNA, 25 bp, Artificial
  probe
  misc_feature (1)..(25): SEQ ID NO: 3926; WAN024DCX; Start 61; Stop 85
tatcacgaccatcagtatgcttgga

SEQ ID NO: 367546 - DNA, 25 bp, Artificial
  probe
  misc_feature (1)..(25): SEQ ID NO: 3926; WAN024DCX; Start 107; Stop 131
acagctattctgagtataaagttgg

SEQ ID NO: 367547 - DNA, 25 bp, Artificial
  probe
  misc_feature (1)..(25): SEQ ID NO: 3926; WAN024DCX; Start 64; Stop 88
cacgaccatcagtatgcttggattc

SEQ ID NO: 367548 - DNA, 25 bp, Artificial
  probe
  misc_feature (1)..(25): SEQ ID NO: 3926; WAN024DCX; Start 62; Stop 86
atcacgaccatcagtatgcttggat

SEQ ID NO: 367549 - DNA, 25 bp, Artificial
  probe
  misc_feature (1)..(25): SEQ ID NO: 3926; WAN024DCX; Start 140; Stop 164
ggaactacgctcgttatgaggtcat

SEQ ID NO: 367550 - DNA, 25 bp, Artificial
  probe
  misc_feature (1)..(25): SEQ ID NO: 3926; WAN024DCX; Start 63; Stop 87
tcacgaccatcagtatgcttggatt

SEQ ID NO: 367551 - DNA, 25 bp, Artificial
  probe
  misc_feature (1)..(25): SEQ ID NO: 3926; WAN024DCX; Start 142; Stop 166
aactacgctcgttatgaggtcataa

SEQ ID NO: 367552 - DNA, 25 bp, Artificial
  probe
  misc_feature (1)..(25): SEQ ID NO: 3926; WAN024DCX; Start 138; Stop 162
ctggaactacgctcgttatgaggtc

SEQ ID NO: 367553 - DNA, 25 bp, Artificial
  probe
  misc_feature (1)..(25): SEQ ID NO: 3926; WAN024DCX; Start 65; Stop 89
acgaccatcagtatgcttggattcc

SEQ ID NO: 367554 - DNA, 25 bp, Artificial
  probe
  misc_feature (1)..(25): SEQ ID NO: 3926; WAN024DCX; Start 114; Stop 138
ttctgagtataaagttggcggaggc

SEQ ID NO: 367555 - DNA, 25 bp, Artificial
  probe
  misc_feature (1)..(25): SEQ ID NO: 3926; WAN024DCX; Start 144; Stop 168
ctacgctcgttatgaggtcataaac

SEQ ID NO: 367556 - DNA, 25 bp, Artificial
  probe
  misc_feature (1)..(25): SEQ ID NO: 3926; WAN024DCX; Start 146; Stop 170
acgctcgttatgaggtcataaacta

SEQ ID NO: 367557 - DNA, 25 bp, Artificial
  probe
  misc_feature (1)..(25): SEQ ID NO: 3926; WAN024DCX; Start 145; Stop 169
tacgctcgttatgaggtcataaact

SEQ ID NO: 367558 - DNA, 25 bp, Artificial
  probe
  misc_feature (1)..(25): SEQ ID NO: 3926; WAN024DCX; Start 143; Stop 167
actacgctcgttatgaggtcataaa

SEQ ID NO: 367559 - DNA, 25 bp, Artificial
  probe
  misc_feature (1)..(25): SEQ ID NO: 3926; WAN024DCX; Start 14; Stop 38
aaagttacaagtatgattggaatac

SEQ ID NO: 367560 - DNA, 25 bp, Artificial
  probe
  misc_feature (1)..(25): SEQ ID NO: 3926; WAN024DCX; Start 9; Stop 33
cactaaaagttacaagtatgattgg

SEQ ID NO: 367561 - DNA, 25 bp, Artificial
  probe
  misc_feature (1)..(25): SEQ ID NO: 3926; WAN024DCX; Start 10; Stop 34
actaaaagttacaagtatgattgga

SEQ ID NO: 367562 - DNA, 25 bp, Artificial
  probe
  misc_feature (1)..(25): SEQ ID NO: 3926; WAN024DCX; Start 11; Stop 35
ctaaaagttacaagtatgattggaa

SEQ ID NO: 367563 - DNA, 25 bp, Artificial
  probe
  misc_feature (1)..(25): SEQ ID NO: 3927; WAN024FOZ; Start 110; Stop 134
cgatacctgacttattattgttggc

SEQ ID NO: 367564 - DNA, 25 bp, Artificial
  probe
  misc_feature (1)..(25): SEQ ID NO: 3927; WAN024FOZ; Start 111; Stop 135
gatacctgacttattattgttggca

SEQ ID NO: 367565 - DNA, 25 bp, Artificial
  probe
  misc_feature (1)..(25): SEQ ID NO: 3927; WAN024FOZ; Start 121; Stop 145
ttattattgttggcagcagcagtaa

SEQ ID NO: 367566 - DNA, 25 bp, Artificial
  probe
  misc_feature (1)..(25): SEQ ID NO: 3927; WAN024FOZ; Start 109; Stop 133
acgatacctgacttattattgttgg

SEQ ID NO: 367567 - DNA, 25 bp, Artificial
  probe
  misc_feature (1)..(25): SEQ ID NO: 3927; WAN024FOZ; Start 1089; Stop 1113
tgtggtgatgattagcattattgtt

SEQ ID NO: 367568 - DNA, 25 bp, Artificial
  probe
  misc_feature (1)..(25): SEQ ID NO: 3927; WAN024FOZ; Start 1088; Stop 1112
ttgtggtgatgattagcattattgt

SEQ ID NO: 367569 - DNA, 25 bp, Artificial
  probe
  misc_feature (1)..(25): SEQ ID NO: 3927; WAN024FOZ; Start 122; Stop 146
tattattgttggcagcagcagtaat

SEQ ID NO: 367570 - DNA, 25 bp, Artificial
  probe
  misc_feature (1)..(25): SEQ ID NO: 3927; WAN024FOZ; Start 120; Stop 144
cttattattgttggcagcagcagta

SEQ ID NO: 367571 - DNA, 25 bp, Artificial
  probe
  misc_feature (1)..(25): SEQ ID NO: 3927; WAN024FOZ; Start 911; Stop 935
aaggactaggttcatactctgttaa

SEQ ID NO: 367572 - DNA, 25 bp, Artificial
  probe
  misc_feature (1)..(25): SEQ ID NO: 3927; WAN024FOZ; Start 912; Stop 936
aggactaggttcatactctgttaat

SEQ ID NO: 367573 - DNA, 25 bp, Artificial
  probe
  misc_feature (1)..(25): SEQ ID NO: 3927; WAN024FOZ; Start 123; Stop 147
attattgttggcagcagcagtaatt

SEQ ID NO: 367574 - DNA, 25 bp, Artificial
  probe
  misc_feature (1)..(25): SEQ ID NO: 3927; WAN024FOZ; Start 113; Stop 137
tacctgacttattattgttggcagc

SEQ ID NO: 367575 - DNA, 25 bp, Artificial
  probe
  misc_feature (1)..(25): SEQ ID NO: 3927; WAN024FOZ; Start 112; Stop 136
atacctgacttattattgttggcag

SEQ ID NO: 367576 - DNA, 25 bp, Artificial
  probe
  misc_feature (1)..(25): SEQ ID NO: 3927; WAN024FOZ; Start 913; Stop 937
ggactaggttcatactctgttaatt

SEQ ID NO: 367577 - DNA, 25 bp, Artificial
  probe
  misc_feature (1)..(25): SEQ ID NO: 3927; WAN024FOZ; Start 118; Stop 142
gacttattattgttggcagcagcag

SEQ ID NO: 367578 - DNA, 25 bp, Artificial
  probe
  misc_feature (1)..(25): SEQ ID NO: 3927; WAN024FOZ; Start 124; Stop 148
ttattgttggcagcagcagtaattg

SEQ ID NO: 367579 - DNA, 25 bp, Artificial
  probe
  misc_feature (1)..(25): SEQ ID NO: 3927; WAN024FOZ; Start 1164; Stop 1188
aataggtaatgcagcgtataagtct

SEQ ID NO: 367580 - DNA, 25 bp, Artificial
  probe
  misc_feature (1)..(25): SEQ ID NO: 3927; WAN024FOZ; Start 1163; Stop 1187
caataggtaatgcagcgtataagtc

SEQ ID NO: 367581 - DNA, 25 bp, Artificial
  probe
  misc_feature (1)..(25): SEQ ID NO: 3927; WAN024FOZ; Start 1168; Stop 1192
ggtaatgcagcgtataagtctacta

SEQ ID NO: 367582 - DNA, 25 bp, Artificial
  probe
  misc_feature (1)..(25): SEQ ID NO: 3927; WAN024FOZ; Start 1166; Stop 1190
taggtaatgcagcgtataagtctac

SEQ ID NO: 367583 - DNA, 25 bp, Artificial
  probe
  misc_feature (1)..(25): SEQ ID NO: 3927; WAN024FOZ; Start 1; Stop 25
gtgacatcaagtatgactaagtaca

SEQ ID NO: 367584 - DNA, 25 bp, Artificial
  probe
  misc_feature (1)..(25): SEQ ID NO: 3927; WAN024FOZ; Start 813; Stop 837
atatgagaataggacagagtttgcg

SEQ ID NO: 367585 - DNA, 25 bp, Artificial
  probe
  misc_feature (1)..(25): SEQ ID NO: 3927; WAN024FOZ; Start 1165; Stop 1189
ataggtaatgcagcgtataagtcta

SEQ ID NO: 367586 - DNA, 25 bp, Artificial
  probe
  misc_feature (1)..(25): SEQ ID NO: 3927; WAN024FOZ; Start 1167; Stop 1191
aggtaatgcagcgtataagtctact

SEQ ID NO: 367587 - DNA, 25 bp, Artificial
  probe
  misc_feature (1)..(25): SEQ ID NO: 3927; WAN024FOZ; Start 115; Stop 139
cctgacttattattgttggcagcag

SEQ ID NO: 367588 - DNA, 25 bp, Artificial
  probe
  misc_feature (1)..(25): SEQ ID NO: 3927; WAN024FOZ; Start 898; Stop 922
gctatatttgggaaaggactaggtt

SEQ ID NO: 367589 - DNA, 25 bp, Artificial
  probe
  misc_feature (1)..(25): SEQ ID NO: 3927; WAN024FOZ; Start 896; Stop 920
gtgctatatttgggaaaggactagg

SEQ ID NO: 367590 - DNA, 25 bp, Artificial
  probe
  misc_feature (1)..(25): SEQ ID NO: 3927; WAN024FOZ; Start 892; Stop 916
attagtgctatatttgggaaaggac

SEQ ID NO: 367591 - DNA, 25 bp, Artificial
  probe
  misc_feature (1)..(25): SEQ ID NO: 3927; WAN024FOZ; Start 581; Stop 605
ttgctatttcgtgtataatttgtgc

SEQ ID NO: 367592 - DNA, 25 bp, Artificial
  probe
  misc_feature (1)..(25): SEQ ID NO: 3927; WAN024FOZ; Start 1092; Stop 1116
ggtgatgattagcattattgtttgg

SEQ ID NO: 367593 - DNA, 25 bp, Artificial
  probe
  misc_feature (1)..(25): SEQ ID NO: 3927; WAN024FOZ; Start 903; Stop 927
atttgggaaaggactaggttcatac

SEQ ID NO: 367594 - DNA, 25 bp, Artificial
  probe
  misc_feature (1)..(25): SEQ ID NO: 3927; WAN024FOZ; Start 909; Stop 933
gaaaggactaggttcatactctgtt

SEQ ID NO: 367595 - DNA, 25 bp, Artificial
  probe
  misc_feature (1)..(25): SEQ ID NO: 3927; WAN024FOZ; Start 897; Stop 921
tgctatatttgggaaaggactaggt

SEQ ID NO: 367596 - DNA, 25 bp, Artificial
  probe
  misc_feature (1)..(25): SEQ ID NO: 3928; WAN024G4I; Start 196; Stop 220
agagataccgtaaccgttgttaatg

SEQ ID NO: 367597 - DNA, 25 bp, Artificial
  probe
  misc_feature (1)..(25): SEQ ID NO: 3928; WAN024G4I; Start 195; Stop 219
cagagataccgtaaccgttgttaat

SEQ ID NO: 367598 - DNA, 25 bp, Artificial
  probe
  misc_feature (1)..(25): SEQ ID NO: 3928; WAN024G4I; Start 152; Stop 176
cgttgatggatatgttctatattgg

SEQ ID NO: 367599 - DNA, 25 bp, Artificial
  probe
  misc_feature (1)..(25): SEQ ID NO: 3928; WAN024G4I; Start 147; Stop 171
cgctacgttgatggatatgttctat

SEQ ID NO: 367600 - DNA, 25 bp, Artificial
  probe
  misc_feature (1)..(25): SEQ ID NO: 3928; WAN024G4I; Start 20; Stop 44
gttacactttcaatcaagactggac

SEQ ID NO: 367601 - DNA, 25 bp, Artificial
  probe
  misc_feature (1)..(25): SEQ ID NO: 3928; WAN024G4I; Start 21; Stop 45
ttacactttcaatcaagactggacc

SEQ ID NO: 367602 - DNA, 25 bp, Artificial
  probe
  misc_feature (1)..(25): SEQ ID NO: 3928; WAN024G4I; Start 197; Stop 221
gagataccgtaaccgttgttaatgc

SEQ ID NO: 367603 - DNA, 25 bp, Artificial
  probe
  misc_feature (1)..(25): SEQ ID NO: 3928; WAN024G4I; Start 19; Stop 43
agttacactttcaatcaagactgga

SEQ ID NO: 367604 - DNA, 25 bp, Artificial
  probe
  misc_feature (1)..(25): SEQ ID NO: 3928; WAN024G4I; Start 241; Stop 265
gttccagatagaagccatgttcact

SEQ ID NO: 367605 - DNA, 25 bp, Artificial
  probe
  misc_feature (1)..(25): SEQ ID NO: 3928; WAN024G4I; Start 155; Stop 179
tgatggatatgttctatattggtca

SEQ ID NO: 367606 - DNA, 25 bp, Artificial
  probe
  misc_feature (1)..(25): SEQ ID NO: 3928; WAN024G4I; Start 148; Stop 172
gctacgttgatggatatgttctata

SEQ ID NO: 367607 - DNA, 25 bp, Artificial
  probe
  misc_feature (1)..(25): SEQ ID NO: 3928; WAN024G4I; Start 24; Stop 48
cactttcaatcaagactggaccatt

SEQ ID NO: 367608 - DNA, 25 bp, Artificial
  probe
  misc_feature (1)..(25): SEQ ID NO: 3928; WAN024G4I; Start 204; Stop 228
cgtaaccgttgttaatgcaatagaa

SEQ ID NO: 367609 - DNA, 25 bp, Artificial
  probe
  misc_feature (1)..(25): SEQ ID NO: 3928; WAN024G4I; Start 153; Stop 177
gttgatggatatgttctatattggt

SEQ ID NO: 367610 - DNA, 25 bp, Artificial
  probe
  misc_feature (1)..(25): SEQ ID NO: 3928; WAN024G4I; Start 201; Stop 225
taccgtaaccgttgttaatgcaata

SEQ ID NO: 367611 - DNA, 25 bp, Artificial
  probe
  misc_feature (1)..(25): SEQ ID NO: 3928; WAN024G4I; Start 242; Stop 266
ttccagatagaagccatgttcactg

SEQ ID NO: 367612 - DNA, 25 bp, Artificial
  probe
  misc_feature (1)..(25): SEQ ID NO: 3928; WAN024G4I; Start 22; Stop 46
tacactttcaatcaagactggacca

SEQ ID NO: 367613 - DNA, 25 bp, Artificial
  probe
  misc_feature (1)..(25): SEQ ID NO: 3928; WAN024G4I; Start 238; Stop 262
caggttccagatagaagccatgttc

SEQ ID NO: 367614 - DNA, 25 bp, Artificial
  probe
  misc_feature (1)..(25): SEQ ID NO: 3928; WAN024G4I; Start 200; Stop 224
ataccgtaaccgttgttaatgcaat

SEQ ID NO: 367615 - DNA, 25 bp, Artificial
  probe
  misc_feature (1)..(25): SEQ ID NO: 3928; WAN024G4I; Start 97; Stop 121
gatgacattgttaccgtcttcgatg

SEQ ID NO: 367616 - DNA, 25 bp, Artificial
  probe
  misc_feature (1)..(25): SEQ ID NO: 3928; WAN024G4I; Start 194; Stop 218
gcagagataccgtaaccgttgttaa

SEQ ID NO: 367617 - DNA, 25 bp, Artificial
  probe
  misc_feature (1)..(25): SEQ ID NO: 3928; WAN024G4I; Start 184; Stop 208
cttgatatccgcagagataccgtaa

SEQ ID NO: 367618 - DNA, 25 bp, Artificial
  probe
  misc_feature (1)..(25): SEQ ID NO: 3928; WAN024G4I; Start 100; Stop 124
gacattgttaccgtcttcgatgaac

SEQ ID NO: 367619 - DNA, 25 bp, Artificial
  probe
  misc_feature (1)..(25): SEQ ID NO: 3928; WAN024G4I; Start 112; Stop 136
gtcttcgatgaacattccaggaatt

SEQ ID NO: 367620 - DNA, 25 bp, Artificial
  probe
  misc_feature (1)..(25): SEQ ID NO: 3928; WAN024G4I; Start 107; Stop 131
ttaccgtcttcgatgaacattccag

SEQ ID NO: 367621 - DNA, 25 bp, Artificial
  probe
  misc_feature (1)..(25): SEQ ID NO: 3928; WAN024G4I; Start 98; Stop 122
atgacattgttaccgtcttcgatga

SEQ ID NO: 367622 - DNA, 25 bp, Artificial
  probe
  misc_feature (1)..(25): SEQ ID NO: 3928; WAN024G4I; Start 240; Stop 264
ggttccagatagaagccatgttcac

SEQ ID NO: 367623 - DNA, 25 bp, Artificial
  probe
  misc_feature (1)..(25): SEQ ID NO: 3928; WAN024G4I; Start 154; Stop 178
ttgatggatatgttctatattggtc

SEQ ID NO: 367624 - DNA, 25 bp, Artificial
  probe
  misc_feature (1)..(25): SEQ ID NO: 3928; WAN024G4I; Start 203; Stop 227
ccgtaaccgttgttaatgcaataga

SEQ ID NO: 367625 - DNA, 25 bp, Artificial
  probe
  misc_feature (1)..(25): SEQ ID NO: 3928; WAN024G4I; Start 23; Stop 47
acactttcaatcaagactggaccat

SEQ ID NO: 367626 - DNA, 25 bp, Artificial
  probe
  misc_feature (1)..(25): SEQ ID NO: 3928; WAN024G4I; Start 185; Stop 209
ttgatatccgcagagataccgtaac

SEQ ID NO: 367627 - DNA, 25 bp, Artificial
  probe
  misc_feature (1)..(25): SEQ ID NO: 3928; WAN024G4I; Start 239; Stop 263
aggttccagatagaagccatgttca

SEQ ID NO: 367628 - DNA, 25 bp, Artificial
  probe
  misc_feature (1)..(25): SEQ ID NO: 3928; WAN024G4I; Start 202; Stop 226
accgtaaccgttgttaatgcaatag

SEQ ID NO: 367629 - DNA, 25 bp, Artificial
  probe
  misc_feature (1)..(25): SEQ ID NO: 3929; WAN024GFH; Start 151; Stop 175
ttgattgagataggcttccagagtt

SEQ ID NO: 367630 - DNA, 25 bp, Artificial
  probe
  misc_feature (1)..(25): SEQ ID NO: 3929; WAN024GFH; Start 149; Stop 173
agttgattgagataggcttccagag

SEQ ID NO: 367631 - DNA, 25 bp, Artificial
  probe
  misc_feature (1)..(25): SEQ ID NO: 3929; WAN024GFH; Start 148; Stop 172
gagttgattgagataggcttccaga

SEQ ID NO: 367632 - DNA, 25 bp, Artificial
  probe
  misc_feature (1)..(25): SEQ ID NO: 3929; WAN024GFH; Start 150; Stop 174
gttgattgagataggcttccagagt

SEQ ID NO: 367633 - DNA, 25 bp, Artificial
  probe
  misc_feature (1)..(25): SEQ ID NO: 3929; WAN024GFH; Start 144; Stop 168
actggagttgattgagataggcttc

SEQ ID NO: 367634 - DNA, 25 bp, Artificial
  probe
  misc_feature (1)..(25): SEQ ID NO: 3929; WAN024GFH; Start 143; Stop 167
aactggagttgattgagataggctt

SEQ ID NO: 367635 - DNA, 25 bp, Artificial
  probe
  misc_feature (1)..(25): SEQ ID NO: 3929; WAN024GFH; Start 157; Stop 181
gagataggcttccagagtttcataa

SEQ ID NO: 367636 - DNA, 25 bp, Artificial
  probe
  misc_feature (1)..(25): SEQ ID NO: 3929; WAN024GFH; Start 179; Stop 203
taagaaatatccaaacgaagcacac

SEQ ID NO: 367637 - DNA, 25 bp, Artificial
  probe
  misc_feature (1)..(25): SEQ ID NO: 3929; WAN024GFH; Start 153; Stop 177
gattgagataggcttccagagtttc

SEQ ID NO: 367638 - DNA, 25 bp, Artificial
  probe
  misc_feature (1)..(25): SEQ ID NO: 3929; WAN024GFH; Start 178; Stop 202
ataagaaatatccaaacgaagcaca

SEQ ID NO: 367639 - DNA, 25 bp, Artificial
  probe
  misc_feature (1)..(25): SEQ ID NO: 3929; WAN024GFH; Start 159; Stop 183
gataggcttccagagtttcataaga

SEQ ID NO: 367640 - DNA, 25 bp, Artificial
  probe
  misc_feature (1)..(25): SEQ ID NO: 3929; WAN024GFH; Start 158; Stop 182
agataggcttccagagtttcataag

SEQ ID NO: 367641 - DNA, 25 bp, Artificial
  probe
  misc_feature (1)..(25): SEQ ID NO: 3929; WAN024GFH; Start 160; Stop 184
ataggcttccagagtttcataagaa

SEQ ID NO: 367642 - DNA, 25 bp, Artificial
  probe
  misc_feature (1)..(25): SEQ ID NO: 3929; WAN024GFH; Start 62; Stop 86
gacgaactataaactgtgtgttgag

SEQ ID NO: 367643 - DNA, 25 bp, Artificial
  probe
  misc_feature (1)..(25): SEQ ID NO: 3929; WAN024GFH; Start 61; Stop 85
agacgaactataaactgtgtgttga

SEQ ID NO: 367644 - DNA, 25 bp, Artificial
  probe
  misc_feature (1)..(25): SEQ ID NO: 3929; WAN024GFH; Start 177; Stop 201
cataagaaatatccaaacgaagcac

SEQ ID NO: 367645 - DNA, 25 bp, Artificial
  probe
  misc_feature (1)..(25): SEQ ID NO: 3929; WAN024GFH; Start 70; Stop 94
ataaactgtgtgttgaggatggtag

SEQ ID NO: 367646 - DNA, 25 bp, Artificial
  probe
  misc_feature (1)..(25): SEQ ID NO: 3929; WAN024GFH; Start 68; Stop 92
ctataaactgtgtgttgaggatggt

SEQ ID NO: 367647 - DNA, 25 bp, Artificial
  probe
  misc_feature (1)..(25): SEQ ID NO: 3929; WAN024GFH; Start 67; Stop 91
actataaactgtgtgttgaggatgg

SEQ ID NO: 367648 - DNA, 25 bp, Artificial
  probe
  misc_feature (1)..(25): SEQ ID NO: 3929; WAN024GFH; Start 176; Stop 200
tcataagaaatatccaaacgaagca

SEQ ID NO: 367649 - DNA, 25 bp, Artificial
  probe
  misc_feature (1)..(25): SEQ ID NO: 3929; WAN024GFH; Start 69; Stop 93
tataaactgtgtgttgaggatggta

SEQ ID NO: 367650 - DNA, 25 bp, Artificial
  probe
  misc_feature (1)..(25): SEQ ID NO: 3929; WAN024GFH; Start 56; Stop 80
ttgctagacgaactataaactgtgt

SEQ ID NO: 367651 - DNA, 25 bp, Artificial
  probe
  misc_feature (1)..(25): SEQ ID NO: 3929; WAN024GFH; Start 64; Stop 88
cgaactataaactgtgtgttgagga

SEQ ID NO: 367652 - DNA, 25 bp, Artificial
  probe
  misc_feature (1)..(25): SEQ ID NO: 3929; WAN024GFH; Start 58; Stop 82
gctagacgaactataaactgtgtgt

SEQ ID NO: 367653 - DNA, 25 bp, Artificial
  probe
  misc_feature (1)..(25): SEQ ID NO: 3929; WAN024GFH; Start 57; Stop 81
tgctagacgaactataaactgtgtg

SEQ ID NO: 367654 - DNA, 25 bp, Artificial
  probe
  misc_feature (1)..(25): SEQ ID NO: 3929; WAN024GFH; Start 152; Stop 176
tgattgagataggcttccagagttt

SEQ ID NO: 367655 - DNA, 25 bp, Artificial
  probe
  misc_feature (1)..(25): SEQ ID NO: 3929; WAN024GFH; Start 66; Stop 90
aactataaactgtgtgttgaggatg

SEQ ID NO: 367656 - DNA, 25 bp, Artificial
  probe
  misc_feature (1)..(25): SEQ ID NO: 3929; WAN024GFH; Start 63; Stop 87
acgaactataaactgtgtgttgagg

SEQ ID NO: 367657 - DNA, 25 bp, Artificial
  probe
  misc_feature (1)..(25): SEQ ID NO: 3929; WAN024GFH; Start 55; Stop 79
tttgctagacgaactataaactgtg

SEQ ID NO: 367658 - DNA, 25 bp, Artificial
  probe
  misc_feature (1)..(25): SEQ ID NO: 3929; WAN024GFH; Start 60; Stop 84
tagacgaactataaactgtgtgttg

SEQ ID NO: 367659 - DNA, 25 bp, Artificial
  probe
  misc_feature (1)..(25): SEQ ID NO: 3929; WAN024GFH; Start 156; Stop 180
tgagataggcttccagagtttcata

SEQ ID NO: 367660 - DNA, 25 bp, Artificial
  probe
  misc_feature (1)..(25): SEQ ID NO: 3929; WAN024GFH; Start 65; Stop 89
gaactataaactgtgtgttgaggat

SEQ ID NO: 367661 - DNA, 25 bp, Artificial
  probe
  misc_feature (1)..(25): SEQ ID NO: 3929; WAN024GFH; Start 71; Stop 95
taaactgtgtgttgaggatggtaga

SEQ ID NO: 367662 - DNA, 25 bp, Artificial
  probe
  misc_feature (1)..(25): SEQ ID NO: 3930; WAN024DXR; Start 229; Stop 253
aatatcacggaggaagtcaatgaag

SEQ ID NO: 367663 - DNA, 25 bp, Artificial
  probe
  misc_feature (1)..(25): SEQ ID NO: 3930; WAN024DXR; Start 228; Stop 252
caatatcacggaggaagtcaatgaa

SEQ ID NO: 367664 - DNA, 25 bp, Artificial
  probe
  misc_feature (1)..(25): SEQ ID NO: 3930; WAN024DXR; Start 99; Stop 123
cttggttaaggacgaagaagtcata

SEQ ID NO: 367665 - DNA, 25 bp, Artificial
  probe
  misc_feature (1)..(25): SEQ ID NO: 3930; WAN024DXR; Start 83; Stop 107
agagtgacattatggtcttggttaa

SEQ ID NO: 367666 - DNA, 25 bp, Artificial
  probe
  misc_feature (1)..(25): SEQ ID NO: 3930; WAN024DXR; Start 100; Stop 124
ttggttaaggacgaagaagtcatac

SEQ ID NO: 367667 - DNA, 25 bp, Artificial
  probe
  misc_feature (1)..(25): SEQ ID NO: 3930; WAN024DXR; Start 87; Stop 111
tgacattatggtcttggttaaggac

SEQ ID NO: 367668 - DNA, 25 bp, Artificial
  probe
  misc_feature (1)..(25): SEQ ID NO: 3930; WAN024DXR; Start 86; Stop 110
gtgacattatggtcttggttaagga

SEQ ID NO: 367669 - DNA, 25 bp, Artificial
  probe
  misc_feature (1)..(25): SEQ ID NO: 3930; WAN024DXR; Start 85; Stop 109
agtgacattatggtcttggttaagg

SEQ ID NO: 367670 - DNA, 25 bp, Artificial
  probe
  misc_feature (1)..(25): SEQ ID NO: 3930; WAN024DXR; Start 91; Stop 115
attatggtcttggttaaggacgaag

SEQ ID NO: 367671 - DNA, 25 bp, Artificial
  probe
  misc_feature (1)..(25): SEQ ID NO: 3930; WAN024DXR; Start 84; Stop 108
gagtgacattatggtcttggttaag

SEQ ID NO: 367672 - DNA, 25 bp, Artificial
  probe
  misc_feature (1)..(25): SEQ ID NO: 3930; WAN024DXR; Start 136; Stop 160
ttggtaagcgaactcagtgtaagaa

SEQ ID NO: 367673 - DNA, 25 bp, Artificial
  probe
  misc_feature (1)..(25): SEQ ID NO: 3930; WAN024DXR; Start 90; Stop 114
cattatggtcttggttaaggacgaa

SEQ ID NO: 367674 - DNA, 25 bp, Artificial
  probe
  misc_feature (1)..(25): SEQ ID NO: 3930; WAN024DXR; Start 200; Stop 224
atcatgtagttgaccgtgaagtatt

SEQ ID NO: 367675 - DNA, 25 bp, Artificial
  probe
  misc_feature (1)..(25): SEQ ID NO: 3930; WAN024DXR; Start 190; Stop 214
ttccttactcatcatgtagttgacc

SEQ ID NO: 367676 - DNA, 25 bp, Artificial
  probe
  misc_feature (1)..(25): SEQ ID NO: 3930; WAN024DXR; Start 199; Stop 223
catcatgtagttgaccgtgaagtat

SEQ ID NO: 367677 - DNA, 25 bp, Artificial
  probe
  misc_feature (1)..(25): SEQ ID NO: 3930; WAN024DXR; Start 88; Stop 112
gacattatggtcttggttaaggacg

SEQ ID NO: 367678 - DNA, 25 bp, Artificial
  probe
  misc_feature (1)..(25): SEQ ID NO: 3930; WAN024DXR; Start 193; Stop 217
cttactcatcatgtagttgaccgtg

SEQ ID NO: 367679 - DNA, 25 bp, Artificial
  probe
  misc_feature (1)..(25): SEQ ID NO: 3930; WAN024DXR; Start 89; Stop 113
acattatggtcttggttaaggacga

SEQ ID NO: 367680 - DNA, 25 bp, Artificial
  probe
  misc_feature (1)..(25): SEQ ID NO: 3930; WAN024DXR; Start 185; Stop 209
acagattccttactcatcatgtagt

SEQ ID NO: 367681 - DNA, 25 bp, Artificial
  probe
  misc_feature (1)..(25): SEQ ID NO: 3930; WAN024DXR; Start 198; Stop 222
tcatcatgtagttgaccgtgaagta

SEQ ID NO: 367682 - DNA, 25 bp, Artificial
  probe
  misc_feature (1)..(25): SEQ ID NO: 3930; WAN024DXR; Start 195; Stop 219
tactcatcatgtagttgaccgtgaa

SEQ ID NO: 367683 - DNA, 25 bp, Artificial
  probe
  misc_feature (1)..(25): SEQ ID NO: 3930; WAN024DXR; Start 194; Stop 218
ttactcatcatgtagttgaccgtga

SEQ ID NO: 367684 - DNA, 25 bp, Artificial
  probe
  misc_feature (1)..(25): SEQ ID NO: 3930; WAN024DXR; Start 189; Stop 213
attccttactcatcatgtagttgac

SEQ ID NO: 367685 - DNA, 25 bp, Artificial
  probe
  misc_feature (1)..(25): SEQ ID NO: 3930; WAN024DXR; Start 227; Stop 251
ccaatatcacggaggaagtcaatga

SEQ ID NO: 367686 - DNA, 25 bp, Artificial
  probe
  misc_feature (1)..(25): SEQ ID NO: 3930; WAN024DXR; Start 139; Stop 163
gtaagcgaactcagtgtaagaaatt

SEQ ID NO: 367687 - DNA, 25 bp, Artificial
  probe
  misc_feature (1)..(25): SEQ ID NO: 3930; WAN024DXR; Start 191; Stop 215
tccttactcatcatgtagttgaccg

SEQ ID NO: 367688 - DNA, 25 bp, Artificial
  probe
  misc_feature (1)..(25): SEQ ID NO: 3930; WAN024DXR; Start 188; Stop 212
gattccttactcatcatgtagttga

SEQ ID NO: 367689 - DNA, 25 bp, Artificial
  probe
  misc_feature (1)..(25): SEQ ID NO: 3930; WAN024DXR; Start 187; Stop 211
agattccttactcatcatgtagttg

SEQ ID NO: 367690 - DNA, 25 bp, Artificial
  probe
  misc_feature (1)..(25): SEQ ID NO: 3930; WAN024DXR; Start 186; Stop 210
cagattccttactcatcatgtagtt

SEQ ID NO: 367691 - DNA, 25 bp, Artificial
  probe
  misc_feature (1)..(25): SEQ ID NO: 3930; WAN024DXR; Start 74; Stop 98
ccgatttgaagagtgacattatggt

SEQ ID NO: 367692 - DNA, 25 bp, Artificial
  probe
  misc_feature (1)..(25): SEQ ID NO: 3930; WAN024DXR; Start 73; Stop 97
accgatttgaagagtgacattatgg

SEQ ID NO: 367693 - DNA, 25 bp, Artificial
  probe
  misc_feature (1)..(25): SEQ ID NO: 3930; WAN024DXR; Start 138; Stop 162
ggtaagcgaactcagtgtaagaaat

SEQ ID NO: 367694 - DNA, 25 bp, Artificial
  probe
  misc_feature (1)..(25): SEQ ID NO: 3930; WAN024DXR; Start 230; Stop 254
atatcacggaggaagtcaatgaagc

SEQ ID NO: 367695 - DNA, 25 bp, Artificial
  probe
  misc_feature (1)..(25): SEQ ID NO: 3931; WAN024CQ5; Start 75; Stop 99
ttccttccagcggctgaatattatt

SEQ ID NO: 367696 - DNA, 25 bp, Artificial
  probe
  misc_feature (1)..(25): SEQ ID NO: 3931; WAN024CQ5; Start 74; Stop 98
cttccttccagcggctgaatattat

SEQ ID NO: 367697 - DNA, 25 bp, Artificial
  probe
  misc_feature (1)..(25): SEQ ID NO: 3931; WAN024CQ5; Start 78; Stop 102
cttccagcggctgaatattatttag

SEQ ID NO: 367698 - DNA, 25 bp, Artificial
  probe
  misc_feature (1)..(25): SEQ ID NO: 3931; WAN024CQ5; Start 39; Stop 63
caagctcaagtcacttccatttcag

SEQ ID NO: 367699 - DNA, 25 bp, Artificial
  probe
  misc_feature (1)..(25): SEQ ID NO: 3931; WAN024CQ5; Start 77; Stop 101
ccttccagcggctgaatattattta

SEQ ID NO: 367700 - DNA, 25 bp, Artificial
  probe
  misc_feature (1)..(25): SEQ ID NO: 3931; WAN024CQ5; Start 35; Stop 59
caagcaagctcaagtcacttccatt

SEQ ID NO: 367701 - DNA, 25 bp, Artificial
  probe
  misc_feature (1)..(25): SEQ ID NO: 3931; WAN024CQ5; Start 76; Stop 100
tccttccagcggctgaatattattt

SEQ ID NO: 367702 - DNA, 25 bp, Artificial
  probe
  misc_feature (1)..(25): SEQ ID NO: 3931; WAN024CQ5; Start 40; Stop 64
aagctcaagtcacttccatttcagg

SEQ ID NO: 367703 - DNA, 25 bp, Artificial
  probe
  misc_feature (1)..(25): SEQ ID NO: 3931; WAN024CQ5; Start 36; Stop 60
aagcaagctcaagtcacttccattt

SEQ ID NO: 367704 - DNA, 25 bp, Artificial
  probe
  misc_feature (1)..(25): SEQ ID NO: 3931; WAN024CQ5; Start 73; Stop 97
acttccttccagcggctgaatatta

SEQ ID NO: 367705 - DNA, 25 bp, Artificial
  probe
  misc_feature (1)..(25): SEQ ID NO: 3931; WAN024CQ5; Start 53; Stop 77
ttccatttcaggaaacttcaacttc

SEQ ID NO: 367706 - DNA, 25 bp, Artificial
  probe
  misc_feature (1)..(25): SEQ ID NO: 3931; WAN024CQ5; Start 52; Stop 76
cttccatttcaggaaacttcaactt

SEQ ID NO: 367707 - DNA, 25 bp, Artificial
  probe
  misc_feature (1)..(25): SEQ ID NO: 3931; WAN024CQ5; Start 37; Stop 61
agcaagctcaagtcacttccatttc

SEQ ID NO: 367708 - DNA, 25 bp, Artificial
  probe
  misc_feature (1)..(25): SEQ ID NO: 3931; WAN024CQ5; Start 51; Stop 75
acttccatttcaggaaacttcaact

SEQ ID NO: 367709 - DNA, 25 bp, Artificial
  probe
  misc_feature (1)..(25): SEQ ID NO: 3931; WAN024CQ5; Start 46; Stop 70
aagtcacttccatttcaggaaactt

SEQ ID NO: 367710 - DNA, 25 bp, Artificial
  probe
  misc_feature (1)..(25): SEQ ID NO: 3931; WAN024CQ5; Start 50; Stop 74
cacttccatttcaggaaacttcaac

SEQ ID NO: 367711 - DNA, 25 bp, Artificial
  probe
  misc_feature (1)..(25): SEQ ID NO: 3931; WAN024CQ5; Start 49; Stop 73
tcacttccatttcaggaaacttcaa

SEQ ID NO: 367712 - DNA, 25 bp, Artificial
  probe
  misc_feature (1)..(25): SEQ ID NO: 3931; WAN024CQ5; Start 47; Stop 71
agtcacttccatttcaggaaacttc

SEQ ID NO: 367713 - DNA, 25 bp, Artificial
  probe
  misc_feature (1)..(25): SEQ ID NO: 3931; WAN024CQ5; Start 43; Stop 67
ctcaagtcacttccatttcaggaaa

SEQ ID NO: 367714 - DNA, 25 bp, Artificial
  probe
  misc_feature (1)..(25): SEQ ID NO: 3931; WAN024CQ5; Start 38; Stop 62
gcaagctcaagtcacttccatttca

SEQ ID NO: 367715 - DNA, 25 bp, Artificial
  probe
  misc_feature (1)..(25): SEQ ID NO: 3931; WAN024CQ5; Start 54; Stop 78
tccatttcaggaaacttcaacttcc

SEQ ID NO: 367716 - DNA, 25 bp, Artificial
  probe
  misc_feature (1)..(25): SEQ ID NO: 3931; WAN024CQ5; Start 48; Stop 72
gtcacttccatttcaggaaacttca

SEQ ID NO: 367717 - DNA, 25 bp, Artificial
  probe
  misc_feature (1)..(25): SEQ ID NO: 3931; WAN024CQ5; Start 45; Stop 69
caagtcacttccatttcaggaaact

SEQ ID NO: 367718 - DNA, 25 bp, Artificial
  probe
  misc_feature (1)..(25): SEQ ID NO: 3931; WAN024CQ5; Start 44; Stop 68
tcaagtcacttccatttcaggaaac

SEQ ID NO: 367719 - DNA, 25 bp, Artificial
  probe
  misc_feature (1)..(25): SEQ ID NO: 3931; WAN024CQ5; Start 72; Stop 96
aacttccttccagcggctgaatatt

SEQ ID NO: 367720 - DNA, 25 bp, Artificial
  probe
  misc_feature (1)..(25): SEQ ID NO: 3931; WAN024CQ5; Start 41; Stop 65
agctcaagtcacttccatttcagga

SEQ ID NO: 367721 - DNA, 25 bp, Artificial
  probe
  misc_feature (1)..(25): SEQ ID NO: 3931; WAN024CQ5; Start 42; Stop 66
gctcaagtcacttccatttcaggaa

SEQ ID NO: 367722 - DNA, 25 bp, Artificial
  probe
  misc_feature (1)..(25): SEQ ID NO: 3932; WAN024DZZ; Start 53; Stop 77
ttacagtagtagcatttaccacagg

SEQ ID NO: 367723 - DNA, 25 bp, Artificial
  probe
  misc_feature (1)..(25): SEQ ID NO: 3932; WAN024DZZ; Start 307; Stop 331
agcaagtcctggtttaacataagta

SEQ ID NO: 367724 - DNA, 25 bp, Artificial
  probe
  misc_feature (1)..(25): SEQ ID NO: 3932; WAN024DZZ; Start 305; Stop 329
gaagcaagtcctggtttaacataag

SEQ ID NO: 367725 - DNA, 25 bp, Artificial
  probe
  misc_feature (1)..(25): SEQ ID NO: 3932; WAN024DZZ; Start 304; Stop 328
agaagcaagtcctggtttaacataa

SEQ ID NO: 367726 - DNA, 25 bp, Artificial
  probe
  misc_feature (1)..(25): SEQ ID NO: 3932; WAN024DZZ; Start 303; Stop 327
aagaagcaagtcctggtttaacata

SEQ ID NO: 367727 - DNA, 25 bp, Artificial
  probe
  misc_feature (1)..(25): SEQ ID NO: 3932; WAN024DZZ; Start 306; Stop 330
aagcaagtcctggtttaacataagt

SEQ ID NO: 367728 - DNA, 25 bp, Artificial
  probe
  misc_feature (1)..(25): SEQ ID NO: 3932; WAN024DZZ; Start 308; Stop 332
gcaagtcctggtttaacataagtat

SEQ ID NO: 367729 - DNA, 25 bp, Artificial
  probe
  misc_feature (1)..(25): SEQ ID NO: 3932; WAN024DZZ; Start 302; Stop 326
aaagaagcaagtcctggtttaacat

SEQ ID NO: 367730 - DNA, 25 bp, Artificial
  probe
  misc_feature (1)..(25): SEQ ID NO: 3932; WAN024DZZ; Start 272; Stop 296
ttgcgaataactggtttgtctacat

SEQ ID NO: 367731 - DNA, 25 bp, Artificial
  probe
  misc_feature (1)..(25): SEQ ID NO: 3932; WAN024DZZ; Start 52; Stop 76
tttacagtagtagcatttaccacag

SEQ ID NO: 367732 - DNA, 25 bp, Artificial
  probe
  misc_feature (1)..(25): SEQ ID NO: 3932; WAN024DZZ; Start 275; Stop 299
cgaataactggtttgtctacatcaa

SEQ ID NO: 367733 - DNA, 25 bp, Artificial
  probe
  misc_feature (1)..(25): SEQ ID NO: 3932; WAN024DZZ; Start 274; Stop 298
gcgaataactggtttgtctacatca

SEQ ID NO: 367734 - DNA, 25 bp, Artificial
  probe
  misc_feature (1)..(25): SEQ ID NO: 3932; WAN024DZZ; Start 273; Stop 297
tgcgaataactggtttgtctacatc

SEQ ID NO: 367735 - DNA, 25 bp, Artificial
  probe
  misc_feature (1)..(25): SEQ ID NO: 3932; WAN024DZZ; Start 271; Stop 295
cttgcgaataactggtttgtctaca

SEQ ID NO: 367736 - DNA, 25 bp, Artificial
  probe
  misc_feature (1)..(25): SEQ ID NO: 3932; WAN024DZZ; Start 138; Stop 162
cttcttcaacaatcccaatcccttc

SEQ ID NO: 367737 - DNA, 25 bp, Artificial
  probe
  misc_feature (1)..(25): SEQ ID NO: 3932; WAN024DZZ; Start 54; Stop 78
tacagtagtagcatttaccacaggc

SEQ ID NO: 367738 - DNA, 25 bp, Artificial
  probe
  misc_feature (1)..(25): SEQ ID NO: 3932; WAN024DZZ; Start 202; Stop 226
ccctttgataatatggaggtctgtt

SEQ ID NO: 367739 - DNA, 25 bp, Artificial
  probe
  misc_feature (1)..(25): SEQ ID NO: 3932; WAN024DZZ; Start 137; Stop 161
acttcttcaacaatcccaatccctt

SEQ ID NO: 367740 - DNA, 25 bp, Artificial
  probe
  misc_feature (1)..(25): SEQ ID NO: 3932; WAN024DZZ; Start 136; Stop 160
aacttcttcaacaatcccaatccct

SEQ ID NO: 367741 - DNA, 25 bp, Artificial
  probe
  misc_feature (1)..(25): SEQ ID NO: 3932; WAN024DZZ; Start 135; Stop 159
caacttcttcaacaatcccaatccc

SEQ ID NO: 367742 - DNA, 25 bp, Artificial
  probe
  misc_feature (1)..(25): SEQ ID NO: 3932; WAN024DZZ; Start 134; Stop 158
ccaacttcttcaacaatcccaatcc

SEQ ID NO: 367743 - DNA, 25 bp, Artificial
  probe
  misc_feature (1)..(25): SEQ ID NO: 3932; WAN024DZZ; Start 133; Stop 157
cccaacttcttcaacaatcccaatc

SEQ ID NO: 367744 - DNA, 25 bp, Artificial
  probe
  misc_feature (1)..(25): SEQ ID NO: 3932; WAN024DZZ; Start 276; Stop 300
gaataactggtttgtctacatcaac

SEQ ID NO: 367745 - DNA, 25 bp, Artificial
  probe
  misc_feature (1)..(25): SEQ ID NO: 3932; WAN024DZZ; Start 277; Stop 301
aataactggtttgtctacatcaaca

SEQ ID NO: 367746 - DNA, 25 bp, Artificial
  probe
  misc_feature (1)..(25): SEQ ID NO: 3932; WAN024DZZ; Start 312; Stop 336
gtcctggtttaacataagtataggc

SEQ ID NO: 367747 - DNA, 25 bp, Artificial
  probe
  misc_feature (1)..(25): SEQ ID NO: 3932; WAN024DZZ; Start 203; Stop 227
cctttgataatatggaggtctgttc

SEQ ID NO: 367748 - DNA, 25 bp, Artificial
  probe
  misc_feature (1)..(25): SEQ ID NO: 3932; WAN024DZZ; Start 27; Stop 51
cttcacagtgagcataaattccttt

SEQ ID NO: 367749 - DNA, 25 bp, Artificial
  probe
  misc_feature (1)..(25): SEQ ID NO: 3932; WAN024DZZ; Start 313; Stop 337
tcctggtttaacataagtataggct

SEQ ID NO: 367750 - DNA, 25 bp, Artificial
  probe
  misc_feature (1)..(25): SEQ ID NO: 3932; WAN024DZZ; Start 26; Stop 50
tcttcacagtgagcataaattcctt

SEQ ID NO: 367751 - DNA, 25 bp, Artificial
  probe
  misc_feature (1)..(25): SEQ ID NO: 3932; WAN024DZZ; Start 204; Stop 228
ctttgataatatggaggtctgttcc

SEQ ID NO: 367752 - DNA, 25 bp, Artificial
  probe
  misc_feature (1)..(25): SEQ ID NO: 3932; WAN024DZZ; Start 25; Stop 49
gtcttcacagtgagcataaattcct

SEQ ID NO: 367753 - DNA, 25 bp, Artificial
  probe
  misc_feature (1)..(25): SEQ ID NO: 3932; WAN024DZZ; Start 22; Stop 46
ttcgtcttcacagtgagcataaatt

SEQ ID NO: 367754 - DNA, 25 bp, Artificial
  probe
  misc_feature (1)..(25): SEQ ID NO: 3932; WAN024DZZ; Start 87; Stop 111
aagaaatcaagaccttgtcaccttt

SEQ ID NO: 367755 - DNA, 25 bp, Artificial
  probe
  misc_feature (1)..(25): SEQ ID NO: 3933; WAN024D5T; Start 218; Stop 242
atatcatgccacttgtagatacctg

SEQ ID NO: 367756 - DNA, 25 bp, Artificial
  probe
  misc_feature (1)..(25): SEQ ID NO: 3933; WAN024D5T; Start 217; Stop 241
catatcatgccacttgtagatacct

SEQ ID NO: 367757 - DNA, 25 bp, Artificial
  probe
  misc_feature (1)..(25): SEQ ID NO: 3933; WAN024D5T; Start 215; Stop 239
accatatcatgccacttgtagatac

SEQ ID NO: 367758 - DNA, 25 bp, Artificial
  probe
  misc_feature (1)..(25): SEQ ID NO: 3933; WAN024D5T; Start 214; Stop 238
gaccatatcatgccacttgtagata

SEQ ID NO: 367759 - DNA, 25 bp, Artificial
  probe
  misc_feature (1)..(25): SEQ ID NO: 3933; WAN024D5T; Start 219; Stop 243
tatcatgccacttgtagatacctga

SEQ ID NO: 367760 - DNA, 25 bp, Artificial
  probe
  misc_feature (1)..(25): SEQ ID NO: 3933; WAN024D5T; Start 216; Stop 240
ccatatcatgccacttgtagatacc

SEQ ID NO: 367761 - DNA, 25 bp, Artificial
  probe
  misc_feature (1)..(25): SEQ ID NO: 3933; WAN024D5T; Start 213; Stop 237
tgaccatatcatgccacttgtagat

SEQ ID NO: 367762 - DNA, 25 bp, Artificial
  probe
  misc_feature (1)..(25): SEQ ID NO: 3933; WAN024D5T; Start 212; Stop 236
ttgaccatatcatgccacttgtaga

SEQ ID NO: 367763 - DNA, 25 bp, Artificial
  probe
  misc_feature (1)..(25): SEQ ID NO: 3933; WAN024D5T; Start 136; Stop 160
gtaagttgggtaaccgtctttcttt

SEQ ID NO: 367764 - DNA, 25 bp, Artificial
  probe
  misc_feature (1)..(25): SEQ ID NO: 3933; WAN024D5T; Start 211; Stop 235
tttgaccatatcatgccacttgtag

SEQ ID NO: 367765 - DNA, 25 bp, Artificial
  probe
  misc_feature (1)..(25): SEQ ID NO: 3933; WAN024D5T; Start 210; Stop 234
ctttgaccatatcatgccacttgta

SEQ ID NO: 367766 - DNA, 25 bp, Artificial
  probe
  misc_feature (1)..(25): SEQ ID NO: 3933; WAN024D5T; Start 135; Stop 159
tgtaagttgggtaaccgtctttctt

SEQ ID NO: 367767 - DNA, 25 bp, Artificial
  probe
  misc_feature (1)..(25): SEQ ID NO: 3933; WAN024D5T; Start 134; Stop 158
ttgtaagttgggtaaccgtctttct

SEQ ID NO: 367768 - DNA, 25 bp, Artificial
  probe
  misc_feature (1)..(25): SEQ ID NO: 3933; WAN024D5T; Start 133; Stop 157
gttgtaagttgggtaaccgtctttc

SEQ ID NO: 367769 - DNA, 25 bp, Artificial
  probe
  misc_feature (1)..(25): SEQ ID NO: 3933; WAN024D5T; Start 78; Stop 102
ctccacggataacatgagagatttg

SEQ ID NO: 367770 - DNA, 25 bp, Artificial
  probe
  misc_feature (1)..(25): SEQ ID NO: 3933; WAN024D5T; Start 129; Stop 153
caaagttgtaagttgggtaaccgtc

SEQ ID NO: 367771 - DNA, 25 bp, Artificial
  probe
  misc_feature (1)..(25): SEQ ID NO: 3933; WAN024D5T; Start 132; Stop 156
agttgtaagttgggtaaccgtcttt

SEQ ID NO: 367772 - DNA, 25 bp, Artificial
  probe
  misc_feature (1)..(25): SEQ ID NO: 3933; WAN024D5T; Start 131; Stop 155
aagttgtaagttgggtaaccgtctt

SEQ ID NO: 367773 - DNA, 25 bp, Artificial
  probe
  misc_feature (1)..(25): SEQ ID NO: 3933; WAN024D5T; Start 130; Stop 154
aaagttgtaagttgggtaaccgtct

SEQ ID NO: 367774 - DNA, 25 bp, Artificial
  probe
  misc_feature (1)..(25): SEQ ID NO: 3933; WAN024D5T; Start 181; Stop 205
gatattgccaccttcaaattcgata

SEQ ID NO: 367775 - DNA, 25 bp, Artificial
  probe
  misc_feature (1)..(25): SEQ ID NO: 3933; WAN024D5T; Start 82; Stop 106
acggataacatgagagatttgcata

SEQ ID NO: 367776 - DNA, 25 bp, Artificial
  probe
  misc_feature (1)..(25): SEQ ID NO: 3933; WAN024D5T; Start 182; Stop 206
atattgccaccttcaaattcgatat

SEQ ID NO: 367777 - DNA, 25 bp, Artificial
  probe
  misc_feature (1)..(25): SEQ ID NO: 3933; WAN024D5T; Start 83; Stop 107
cggataacatgagagatttgcatat

SEQ ID NO: 367778 - DNA, 25 bp, Artificial
  probe
  misc_feature (1)..(25): SEQ ID NO: 3933; WAN024D5T; Start 177; Stop 201
caccgatattgccaccttcaaattc

SEQ ID NO: 367779 - DNA, 25 bp, Artificial
  probe
  misc_feature (1)..(25): SEQ ID NO: 3933; WAN024D5T; Start 183; Stop 207
tattgccaccttcaaattcgatatc

SEQ ID NO: 367780 - DNA, 25 bp, Artificial
  probe
  misc_feature (1)..(25): SEQ ID NO: 3933; WAN024D5T; Start 81; Stop 105
cacggataacatgagagatttgcat

SEQ ID NO: 367781 - DNA, 25 bp, Artificial
  probe
  misc_feature (1)..(25): SEQ ID NO: 3933; WAN024D5T; Start 79; Stop 103
tccacggataacatgagagatttgc

SEQ ID NO: 367782 - DNA, 25 bp, Artificial
  probe
  misc_feature (1)..(25): SEQ ID NO: 3933; WAN024D5T; Start 124; Stop 148
aacggcaaagttgtaagttgggtaa

SEQ ID NO: 367783 - DNA, 25 bp, Artificial
  probe
  misc_feature (1)..(25): SEQ ID NO: 3933; WAN024D5T; Start 143; Stop 167
gggtaaccgtctttcttttggataa

SEQ ID NO: 367784 - DNA, 25 bp, Artificial
  probe
  misc_feature (1)..(25): SEQ ID NO: 3933; WAN024D5T; Start 137; Stop 161
taagttgggtaaccgtctttctttt

SEQ ID NO: 367785 - DNA, 25 bp, Artificial
  probe
  misc_feature (1)..(25): SEQ ID NO: 3933; WAN024D5T; Start 203; Stop 227
atatcgcctttgaccatatcatgcc

SEQ ID NO: 367786 - DNA, 25 bp, Artificial
  probe
  misc_feature (1)..(25): SEQ ID NO: 3933; WAN024D5T; Start 84; Stop 108
ggataacatgagagatttgcatatc

SEQ ID NO: 367787 - DNA, 25 bp, Artificial
  probe
  misc_feature (1)..(25): SEQ ID NO: 3933; WAN024D5T; Start 142; Stop 166
tgggtaaccgtctttcttttggata

SEQ ID NO: 367788 - DNA, 25 bp, Artificial
  probe
  misc_feature (1)..(25): SEQ ID NO: 3934; WAN024D4M; Start 45; Stop 69
atggttcaccttctgttgtatagac

SEQ ID NO: 367789 - DNA, 25 bp, Artificial
  probe
  misc_feature (1)..(25): SEQ ID NO: 3934; WAN024D4M; Start 44; Stop 68
aatggttcaccttctgttgtataga

SEQ ID NO: 367790 - DNA, 25 bp, Artificial
  probe
  misc_feature (1)..(25): SEQ ID NO: 3934; WAN024D4M; Start 50; Stop 74
tcaccttctgttgtatagacatcac

SEQ ID NO: 367791 - DNA, 25 bp, Artificial
  probe
  misc_feature (1)..(25): SEQ ID NO: 3934; WAN024D4M; Start 51; Stop 75
caccttctgttgtatagacatcaca

SEQ ID NO: 367792 - DNA, 25 bp, Artificial
  probe
  misc_feature (1)..(25): SEQ ID NO: 3934; WAN024D4M; Start 49; Stop 73
ttcaccttctgttgtatagacatca

SEQ ID NO: 367793 - DNA, 25 bp, Artificial
  probe
  misc_feature (1)..(25): SEQ ID NO: 3934; WAN024D4M; Start 48; Stop 72
gttcaccttctgttgtatagacatc

SEQ ID NO: 367794 - DNA, 25 bp, Artificial
  probe
  misc_feature (1)..(25): SEQ ID NO: 3934; WAN024D4M; Start 47; Stop 71
ggttcaccttctgttgtatagacat

SEQ ID NO: 367795 - DNA, 25 bp, Artificial
  probe
  misc_feature (1)..(25): SEQ ID NO: 3934; WAN024D4M; Start 141; Stop 165
ggtacaagtacatatccgactcatt

SEQ ID NO: 367796 - DNA, 25 bp, Artificial
  probe
  misc_feature (1)..(25): SEQ ID NO: 3934; WAN024D4M; Start 144; Stop 168
acaagtacatatccgactcattgat

SEQ ID NO: 367797 - DNA, 25 bp, Artificial
  probe
  misc_feature (1)..(25): SEQ ID NO: 3934; WAN024D4M; Start 143; Stop 167
tacaagtacatatccgactcattga

SEQ ID NO: 367798 - DNA, 25 bp, Artificial
  probe
  misc_feature (1)..(25): SEQ ID NO: 3934; WAN024D4M; Start 142; Stop 166
gtacaagtacatatccgactcattg

SEQ ID NO: 367799 - DNA, 25 bp, Artificial
  probe
  misc_feature (1)..(25): SEQ ID NO: 3934; WAN024D4M; Start 147; Stop 171
agtacatatccgactcattgatacg

SEQ ID NO: 367800 - DNA, 25 bp, Artificial
  probe
  misc_feature (1)..(25): SEQ ID NO: 3934; WAN024D4M; Start 61; Stop 85
tgtatagacatcacagatcagacct

SEQ ID NO: 367801 - DNA, 25 bp, Artificial
  probe
  misc_feature (1)..(25): SEQ ID NO: 3934; WAN024D4M; Start 60; Stop 84
ttgtatagacatcacagatcagacc

SEQ ID NO: 367802 - DNA, 25 bp, Artificial
  probe
  misc_feature (1)..(25): SEQ ID NO: 3934; WAN024D4M; Start 46; Stop 70
tggttcaccttctgttgtatagaca

SEQ ID NO: 367803 - DNA, 25 bp, Artificial
  probe
  misc_feature (1)..(25): SEQ ID NO: 3934; WAN024D4M; Start 62; Stop 86
gtatagacatcacagatcagacctg

SEQ ID NO: 367804 - DNA, 25 bp, Artificial
  probe
  misc_feature (1)..(25): SEQ ID NO: 3934; WAN024D4M; Start 58; Stop 82
tgttgtatagacatcacagatcaga

SEQ ID NO: 367805 - DNA, 25 bp, Artificial
  probe
  misc_feature (1)..(25): SEQ ID NO: 3934; WAN024D4M; Start 59; Stop 83
gttgtatagacatcacagatcagac

SEQ ID NO: 367806 - DNA, 25 bp, Artificial
  probe
  misc_feature (1)..(25): SEQ ID NO: 3934; WAN024D4M; Start 63; Stop 87
tatagacatcacagatcagacctgc

SEQ ID NO: 367807 - DNA, 25 bp, Artificial
  probe
  misc_feature (1)..(25): SEQ ID NO: 3934; WAN024D4M; Start 146; Stop 170
aagtacatatccgactcattgatac

SEQ ID NO: 367808 - DNA, 25 bp, Artificial
  probe
  misc_feature (1)..(25): SEQ ID NO: 3934; WAN024D4M; Start 145; Stop 169
caagtacatatccgactcattgata

SEQ ID NO: 367809 - DNA, 25 bp, Artificial
  probe
  misc_feature (1)..(25): SEQ ID NO: 3934; WAN024D4M; Start 43; Stop 67
aaatggttcaccttctgttgtatag

SEQ ID NO: 367810 - DNA, 25 bp, Artificial
  probe
  misc_feature (1)..(25): SEQ ID NO: 3934; WAN024D4M; Start 148; Stop 172
gtacatatccgactcattgatacgt

SEQ ID NO: 367811 - DNA, 25 bp, Artificial
  probe
  misc_feature (1)..(25): SEQ ID NO: 3934; WAN024D4M; Start 42; Stop 66
caaatggttcaccttctgttgtata

SEQ ID NO: 367812 - DNA, 25 bp, Artificial
  probe
  misc_feature (1)..(25): SEQ ID NO: 3934; WAN024D4M; Start 187; Stop 211
agaagatccatcaaacataaccttg

SEQ ID NO: 367813 - DNA, 25 bp, Artificial
  probe
  misc_feature (1)..(25): SEQ ID NO: 3934; WAN024D4M; Start 188; Stop 212
gaagatccatcaaacataaccttgt

SEQ ID NO: 367814 - DNA, 25 bp, Artificial
  probe
  misc_feature (1)..(25): SEQ ID NO: 3934; WAN024D4M; Start 140; Stop 164
gggtacaagtacatatccgactcat

SEQ ID NO: 367815 - DNA, 25 bp, Artificial
  probe
  misc_feature (1)..(25): SEQ ID NO: 3934; WAN024D4M; Start 41; Stop 65
gcaaatggttcaccttctgttgtat

SEQ ID NO: 367816 - DNA, 25 bp, Artificial
  probe
  misc_feature (1)..(25): SEQ ID NO: 3934; WAN024D4M; Start 186; Stop 210
tagaagatccatcaaacataacctt

SEQ ID NO: 367817 - DNA, 25 bp, Artificial
  probe
  misc_feature (1)..(25): SEQ ID NO: 3934; WAN024D4M; Start 185; Stop 209
atagaagatccatcaaacataacct

SEQ ID NO: 367818 - DNA, 25 bp, Artificial
  probe
  misc_feature (1)..(25): SEQ ID NO: 3934; WAN024D4M; Start 151; Stop 175
catatccgactcattgatacgtaca

SEQ ID NO: 367819 - DNA, 25 bp, Artificial
  probe
  misc_feature (1)..(25): SEQ ID NO: 3934; WAN024D4M; Start 150; Stop 174
acatatccgactcattgatacgtac

SEQ ID NO: 367820 - DNA, 25 bp, Artificial
  probe
  misc_feature (1)..(25): SEQ ID NO: 3934; WAN024D4M; Start 152; Stop 176
atatccgactcattgatacgtacaa

SEQ ID NO: 367821 - DNA, 25 bp, Artificial
  probe
  misc_feature (1)..(25): SEQ ID NO: 3935; WAN024GLF; Start 165; Stop 189
ctacattctctgctgtcacatcatt

SEQ ID NO: 367822 - DNA, 25 bp, Artificial
  probe
  misc_feature (1)..(25): SEQ ID NO: 3935; WAN024GLF; Start 166; Stop 190
tacattctctgctgtcacatcattg

SEQ ID NO: 367823 - DNA, 25 bp, Artificial
  probe
  misc_feature (1)..(25): SEQ ID NO: 3935; WAN024GLF; Start 164; Stop 188
gctacattctctgctgtcacatcat

SEQ ID NO: 367824 - DNA, 25 bp, Artificial
  probe
  misc_feature (1)..(25): SEQ ID NO: 3935; WAN024GLF; Start 220; Stop 244
atcattgacatagccagagtgtttc

SEQ ID NO: 367825 - DNA, 25 bp, Artificial
  probe
  misc_feature (1)..(25): SEQ ID NO: 3935; WAN024GLF; Start 219; Stop 243
catcattgacatagccagagtgttt

SEQ ID NO: 367826 - DNA, 25 bp, Artificial
  probe
  misc_feature (1)..(25): SEQ ID NO: 3935; WAN024GLF; Start 157; Stop 181
gagttctgctacattctctgctgtc

SEQ ID NO: 367827 - DNA, 25 bp, Artificial
  probe
  misc_feature (1)..(25): SEQ ID NO: 3935; WAN024GLF; Start 167; Stop 191
acattctctgctgtcacatcattgg

SEQ ID NO: 367828 - DNA, 25 bp, Artificial
  probe
  misc_feature (1)..(25): SEQ ID NO: 3935; WAN024GLF; Start 162; Stop 186
ctgctacattctctgctgtcacatc

SEQ ID NO: 367829 - DNA, 25 bp, Artificial
  probe
  misc_feature (1)..(25): SEQ ID NO: 3935; WAN024GLF; Start 221; Stop 245
tcattgacatagccagagtgtttca

SEQ ID NO: 367830 - DNA, 25 bp, Artificial
  probe
  misc_feature (1)..(25): SEQ ID NO: 3935; WAN024GLF; Start 159; Stop 183
gttctgctacattctctgctgtcac

SEQ ID NO: 367831 - DNA, 25 bp, Artificial
  probe
  misc_feature (1)..(25): SEQ ID NO: 3935; WAN024GLF; Start 152; Stop 176
gacaagagttctgctacattctctg

SEQ ID NO: 367832 - DNA, 25 bp, Artificial
  probe
  misc_feature (1)..(25): SEQ ID NO: 3935; WAN024GLF; Start 151; Stop 175
agacaagagttctgctacattctct

SEQ ID NO: 367833 - DNA, 25 bp, Artificial
  probe
  misc_feature (1)..(25): SEQ ID NO: 3935; WAN024GLF; Start 161; Stop 185
tctgctacattctctgctgtcacat

SEQ ID NO: 367834 - DNA, 25 bp, Artificial
  probe
  misc_feature (1)..(25): SEQ ID NO: 3935; WAN024GLF; Start 158; Stop 182
agttctgctacattctctgctgtca

SEQ ID NO: 367835 - DNA, 25 bp, Artificial
  probe
  misc_feature (1)..(25): SEQ ID NO: 3935; WAN024GLF; Start 160; Stop 184
ttctgctacattctctgctgtcaca

SEQ ID NO: 367836 - DNA, 25 bp, Artificial
  probe
  misc_feature (1)..(25): SEQ ID NO: 3935; WAN024GLF; Start 148; Stop 172
atcagacaagagttctgctacattc

SEQ ID NO: 367837 - DNA, 25 bp, Artificial
  probe
  misc_feature (1)..(25): SEQ ID NO: 3935; WAN024GLF; Start 147; Stop 171
catcagacaagagttctgctacatt

SEQ ID NO: 367838 - DNA, 25 bp, Artificial
  probe
  misc_feature (1)..(25): SEQ ID NO: 3935; WAN024GLF; Start 163; Stop 187
tgctacattctctgctgtcacatca

SEQ ID NO: 367839 - DNA, 25 bp, Artificial
  probe
  misc_feature (1)..(25): SEQ ID NO: 3935; WAN024GLF; Start 150; Stop 174
cagacaagagttctgctacattctc

SEQ ID NO: 367840 - DNA, 25 bp, Artificial
  probe
  misc_feature (1)..(25): SEQ ID NO: 3935; WAN024GLF; Start 168; Stop 192
cattctctgctgtcacatcattggc

SEQ ID NO: 367841 - DNA, 25 bp, Artificial
  probe
  misc_feature (1)..(25): SEQ ID NO: 3935; WAN024GLF; Start 149; Stop 173
tcagacaagagttctgctacattct

SEQ ID NO: 367842 - DNA, 25 bp, Artificial
  probe
  misc_feature (1)..(25): SEQ ID NO: 3935; WAN024GLF; Start 43; Stop 67
gactcccaacattggaacatcattt

SEQ ID NO: 367843 - DNA, 25 bp, Artificial
  probe
  misc_feature (1)..(25): SEQ ID NO: 3935; WAN024GLF; Start 11; Stop 35
aactcgatacatgtcaactgcattc

SEQ ID NO: 367844 - DNA, 25 bp, Artificial
  probe
  misc_feature (1)..(25): SEQ ID NO: 3935; WAN024GLF; Start 155; Stop 179
aagagttctgctacattctctgctg

SEQ ID NO: 367845 - DNA, 25 bp, Artificial
  probe
  misc_feature (1)..(25): SEQ ID NO: 3935; WAN024GLF; Start 154; Stop 178
caagagttctgctacattctctgct

SEQ ID NO: 367846 - DNA, 25 bp, Artificial
  probe
  misc_feature (1)..(25): SEQ ID NO: 3935; WAN024GLF; Start 223; Stop 247
attgacatagccagagtgtttcaag

SEQ ID NO: 367847 - DNA, 25 bp, Artificial
  probe
  misc_feature (1)..(25): SEQ ID NO: 3935; WAN024GLF; Start 222; Stop 246
cattgacatagccagagtgtttcaa

SEQ ID NO: 367848 - DNA, 25 bp, Artificial
  probe
  misc_feature (1)..(25): SEQ ID NO: 3935; WAN024GLF; Start 153; Stop 177
acaagagttctgctacattctctgc

SEQ ID NO: 367849 - DNA, 25 bp, Artificial
  probe
  misc_feature (1)..(25): SEQ ID NO: 3935; WAN024GLF; Start 42; Stop 66
agactcccaacattggaacatcatt

SEQ ID NO: 367850 - DNA, 25 bp, Artificial
  probe
  misc_feature (1)..(25): SEQ ID NO: 3935; WAN024GLF; Start 49; Stop 73
caacattggaacatcattttcacgc

SEQ ID NO: 367851 - DNA, 25 bp, Artificial
  probe
  misc_feature (1)..(25): SEQ ID NO: 3935; WAN024GLF; Start 146; Stop 170
gcatcagacaagagttctgctacat

SEQ ID NO: 367852 - DNA, 25 bp, Artificial
  probe
  misc_feature (1)..(25): SEQ ID NO: 3935; WAN024GLF; Start 41; Stop 65
cagactcccaacattggaacatcat

SEQ ID NO: 367853 - DNA, 25 bp, Artificial
  probe
  misc_feature (1)..(25): SEQ ID NO: 3935; WAN024GLF; Start 156; Stop 180
agagttctgctacattctctgctgt

SEQ ID NO: 367854 - DNA, 25 bp, Artificial
  probe
  misc_feature (1)..(25): SEQ ID NO: 3936; WAN024GCO; Start 183; Stop 207
tattgaggtcacgttgcttcttaat

SEQ ID NO: 367855 - DNA, 25 bp, Artificial
  probe
  misc_feature (1)..(25): SEQ ID NO: 3936; WAN024GCO; Start 220; Stop 244
acagaaggtacaaccgatattacag

SEQ ID NO: 367856 - DNA, 25 bp, Artificial
  probe
  misc_feature (1)..(25): SEQ ID NO: 3936; WAN024GCO; Start 182; Stop 206
ttattgaggtcacgttgcttcttaa

SEQ ID NO: 367857 - DNA, 25 bp, Artificial
  probe
  misc_feature (1)..(25): SEQ ID NO: 3936; WAN024GCO; Start 219; Stop 243
cacagaaggtacaaccgatattaca

SEQ ID NO: 367858 - DNA, 25 bp, Artificial
  probe
  misc_feature (1)..(25): SEQ ID NO: 3936; WAN024GCO; Start 181; Stop 205
gttattgaggtcacgttgcttctta

SEQ ID NO: 367859 - DNA, 25 bp, Artificial
  probe
  misc_feature (1)..(25): SEQ ID NO: 3936; WAN024GCO; Start 184; Stop 208
attgaggtcacgttgcttcttaatc

SEQ ID NO: 367860 - DNA, 25 bp, Artificial
  probe
  misc_feature (1)..(25): SEQ ID NO: 3936; WAN024GCO; Start 218; Stop 242
gcacagaaggtacaaccgatattac

SEQ ID NO: 367861 - DNA, 25 bp, Artificial
  probe
  misc_feature (1)..(25): SEQ ID NO: 3936; WAN024GCO; Start 11; Stop 35
ccgatagccattcctttatcatcat

SEQ ID NO: 367862 - DNA, 25 bp, Artificial
  probe
  misc_feature (1)..(25): SEQ ID NO: 3936; WAN024GCO; Start 12; Stop 36
cgatagccattcctttatcatcatt

SEQ ID NO: 367863 - DNA, 25 bp, Artificial
  probe
  misc_feature (1)..(25): SEQ ID NO: 3936; WAN024GCO; Start 68; Stop 92
taattatcaaagggctcaccgattc

SEQ ID NO: 367864 - DNA, 25 bp, Artificial
  probe
  misc_feature (1)..(25): SEQ ID NO: 3936; WAN024GCO; Start 62; Stop 86
ttgttgtaattatcaaagggctcac

SEQ ID NO: 367865 - DNA, 25 bp, Artificial
  probe
  misc_feature (1)..(25): SEQ ID NO: 3936; WAN024GCO; Start 9; Stop 33
caccgatagccattcctttatcatc

SEQ ID NO: 367866 - DNA, 25 bp, Artificial
  probe
  misc_feature (1)..(25): SEQ ID NO: 3936; WAN024GCO; Start 67; Stop 91
gtaattatcaaagggctcaccgatt

SEQ ID NO: 367867 - DNA, 25 bp, Artificial
  probe
  misc_feature (1)..(25): SEQ ID NO: 3936; WAN024GCO; Start 217; Stop 241
ggcacagaaggtacaaccgatatta

SEQ ID NO: 367868 - DNA, 25 bp, Artificial
  probe
  misc_feature (1)..(25): SEQ ID NO: 3936; WAN024GCO; Start 14; Stop 38
atagccattcctttatcatcattga

SEQ ID NO: 367869 - DNA, 25 bp, Artificial
  probe
  misc_feature (1)..(25): SEQ ID NO: 3936; WAN024GCO; Start 10; Stop 34
accgatagccattcctttatcatca

SEQ ID NO: 367870 - DNA, 25 bp, Artificial
  probe
  misc_feature (1)..(25): SEQ ID NO: 3936; WAN024GCO; Start 61; Stop 85
attgttgtaattatcaaagggctca

SEQ ID NO: 367871 - DNA, 25 bp, Artificial
  probe
  misc_feature (1)..(25): SEQ ID NO: 3936; WAN024GCO; Start 141; Stop 165
agtatttctgaaccagcatgatttg

SEQ ID NO: 367872 - DNA, 25 bp, Artificial
  probe
  misc_feature (1)..(25): SEQ ID NO: 3936; WAN024GCO; Start 138; Stop 162
caaagtatttctgaaccagcatgat

SEQ ID NO: 367873 - DNA, 25 bp, Artificial
  probe
  misc_feature (1)..(25): SEQ ID NO: 3936; WAN024GCO; Start 63; Stop 87
tgttgtaattatcaaagggctcacc

SEQ ID NO: 367874 - DNA, 25 bp, Artificial
  probe
  misc_feature (1)..(25): SEQ ID NO: 3936; WAN024GCO; Start 60; Stop 84
cattgttgtaattatcaaagggctc

SEQ ID NO: 367875 - DNA, 25 bp, Artificial
  probe
  misc_feature (1)..(25): SEQ ID NO: 3936; WAN024GCO; Start 140; Stop 164
aagtatttctgaaccagcatgattt

SEQ ID NO: 367876 - DNA, 25 bp, Artificial
  probe
  misc_feature (1)..(25): SEQ ID NO: 3936; WAN024GCO; Start 139; Stop 163
aaagtatttctgaaccagcatgatt

SEQ ID NO: 367877 - DNA, 25 bp, Artificial
  probe
  misc_feature (1)..(25): SEQ ID NO: 3936; WAN024GCO; Start 59; Stop 83
acattgttgtaattatcaaagggct

SEQ ID NO: 367878 - DNA, 25 bp, Artificial
  probe
  misc_feature (1)..(25): SEQ ID NO: 3936; WAN024GCO; Start 58; Stop 82
gacattgttgtaattatcaaagggc

SEQ ID NO: 367879 - DNA, 25 bp, Artificial
  probe
  misc_feature (1)..(25): SEQ ID NO: 3936; WAN024GCO; Start 13; Stop 37
gatagccattcctttatcatcattg

SEQ ID NO: 367880 - DNA, 25 bp, Artificial
  probe
  misc_feature (1)..(25): SEQ ID NO: 3936; WAN024GCO; Start 66; Stop 90
tgtaattatcaaagggctcaccgat

SEQ ID NO: 367881 - DNA, 25 bp, Artificial
  probe
  misc_feature (1)..(25): SEQ ID NO: 3936; WAN024GCO; Start 186; Stop 210
tgaggtcacgttgcttcttaatcaa

SEQ ID NO: 367882 - DNA, 25 bp, Artificial
  probe
  misc_feature (1)..(25): SEQ ID NO: 3936; WAN024GCO; Start 185; Stop 209
ttgaggtcacgttgcttcttaatca

SEQ ID NO: 367883 - DNA, 25 bp, Artificial
  probe
  misc_feature (1)..(25): SEQ ID NO: 3936; WAN024GCO; Start 65; Stop 89
ttgtaattatcaaagggctcaccga

SEQ ID NO: 367884 - DNA, 25 bp, Artificial
  probe
  misc_feature (1)..(25): SEQ ID NO: 3936; WAN024GCO; Start 64; Stop 88
gttgtaattatcaaagggctcaccg

SEQ ID NO: 367885 - DNA, 25 bp, Artificial
  probe
  misc_feature (1)..(25): SEQ ID NO: 3936; WAN024GCO; Start 69; Stop 93
aattatcaaagggctcaccgattcc

SEQ ID NO: 367886 - DNA, 25 bp, Artificial
  probe
  misc_feature (1)..(25): SEQ ID NO: 3936; WAN024GCO; Start 249; Stop 273
cctgagtggtcacacagacagataa

SEQ ID NO: 367887 - DNA, 25 bp, Artificial
  probe
  misc_feature (1)..(25): SEQ ID NO: 3937; WAN024ESK; Start 390; Stop 414
tatggaagatgtgaaggaagcagaa

SEQ ID NO: 367888 - DNA, 25 bp, Artificial
  probe
  misc_feature (1)..(25): SEQ ID NO: 3937; WAN024ESK; Start 41; Stop 65
aaggtgaatctgtaactcaagaagc

SEQ ID NO: 367889 - DNA, 25 bp, Artificial
  probe
  misc_feature (1)..(25): SEQ ID NO: 3937; WAN024ESK; Start 387; Stop 411
aactatggaagatgtgaaggaagca

SEQ ID NO: 367890 - DNA, 25 bp, Artificial
  probe
  misc_feature (1)..(25): SEQ ID NO: 3937; WAN024ESK; Start 389; Stop 413
ctatggaagatgtgaaggaagcaga

SEQ ID NO: 367891 - DNA, 25 bp, Artificial
  probe
  misc_feature (1)..(25): SEQ ID NO: 3937; WAN024ESK; Start 388; Stop 412
actatggaagatgtgaaggaagcag

SEQ ID NO: 367892 - DNA, 25 bp, Artificial
  probe
  misc_feature (1)..(25): SEQ ID NO: 3937; WAN024ESK; Start 57; Stop 81
tcaagaagctacaccagagtataag

SEQ ID NO: 367893 - DNA, 25 bp, Artificial
  probe
  misc_feature (1)..(25): SEQ ID NO: 3937; WAN024ESK; Start 43; Stop 67
ggtgaatctgtaactcaagaagcta

SEQ ID NO: 367894 - DNA, 25 bp, Artificial
  probe
  misc_feature (1)..(25): SEQ ID NO: 3937; WAN024ESK; Start 44; Stop 68
gtgaatctgtaactcaagaagctac

SEQ ID NO: 367895 - DNA, 25 bp, Artificial
  probe
  misc_feature (1)..(25): SEQ ID NO: 3937; WAN024ESK; Start 56; Stop 80
ctcaagaagctacaccagagtataa

SEQ ID NO: 367896 - DNA, 25 bp, Artificial
  probe
  misc_feature (1)..(25): SEQ ID NO: 3937; WAN024ESK; Start 386; Stop 410
aaactatggaagatgtgaaggaagc

SEQ ID NO: 367897 - DNA, 25 bp, Artificial
  probe
  misc_feature (1)..(25): SEQ ID NO: 3937; WAN024ESK; Start 17; Stop 41
aagatacagttcaacaatctgcgaa

SEQ ID NO: 367898 - DNA, 25 bp, Artificial
  probe
  misc_feature (1)..(25): SEQ ID NO: 3937; WAN024ESK; Start 42; Stop 66
aggtgaatctgtaactcaagaagct

SEQ ID NO: 367899 - DNA, 25 bp, Artificial
  probe
  misc_feature (1)..(25): SEQ ID NO: 3937; WAN024ESK; Start 32; Stop 56
aatctgcgaaaggtgaatctgtaac

SEQ ID NO: 367900 - DNA, 25 bp, Artificial
  probe
  misc_feature (1)..(25): SEQ ID NO: 3937; WAN024ESK; Start 31; Stop 55
caatctgcgaaaggtgaatctgtaa

SEQ ID NO: 367901 - DNA, 25 bp, Artificial
  probe
  misc_feature (1)..(25): SEQ ID NO: 3937; WAN024ESK; Start 523; Stop 547
caagatgttacctaccagtcacctg

SEQ ID NO: 367902 - DNA, 25 bp, Artificial
  probe
  misc_feature (1)..(25): SEQ ID NO: 3937; WAN024ESK; Start 518; Stop 542
caatgcaagatgttacctaccagtc

SEQ ID NO: 367903 - DNA, 25 bp, Artificial
  probe
  misc_feature (1)..(25): SEQ ID NO: 3937; WAN024ESK; Start 38; Stop 62
cgaaaggtgaatctgtaactcaaga

SEQ ID NO: 367904 - DNA, 25 bp, Artificial
  probe
  misc_feature (1)..(25): SEQ ID NO: 3937; WAN024ESK; Start 40; Stop 64
aaaggtgaatctgtaactcaagaag

SEQ ID NO: 367905 - DNA, 25 bp, Artificial
  probe
  misc_feature (1)..(25): SEQ ID NO: 3937; WAN024ESK; Start 39; Stop 63
gaaaggtgaatctgtaactcaagaa

SEQ ID NO: 367906 - DNA, 25 bp, Artificial
  probe
  misc_feature (1)..(25): SEQ ID NO: 3937; WAN024ESK; Start 519; Stop 543
aatgcaagatgttacctaccagtca

SEQ ID NO: 367907 - DNA, 25 bp, Artificial
  probe
  misc_feature (1)..(25): SEQ ID NO: 3937; WAN024ESK; Start 33; Stop 57
atctgcgaaaggtgaatctgtaact

SEQ ID NO: 367908 - DNA, 25 bp, Artificial
  probe
  misc_feature (1)..(25): SEQ ID NO: 3937; WAN024ESK; Start 19; Stop 43
gatacagttcaacaatctgcgaaag

SEQ ID NO: 367909 - DNA, 25 bp, Artificial
  probe
  misc_feature (1)..(25): SEQ ID NO: 3937; WAN024ESK; Start 45; Stop 69
tgaatctgtaactcaagaagctaca

SEQ ID NO: 367910 - DNA, 25 bp, Artificial
  probe
  misc_feature (1)..(25): SEQ ID NO: 3937; WAN024ESK; Start 47; Stop 71
aatctgtaactcaagaagctacacc

SEQ ID NO: 367911 - DNA, 25 bp, Artificial
  probe
  misc_feature (1)..(25): SEQ ID NO: 3937; WAN024ESK; Start 46; Stop 70
gaatctgtaactcaagaagctacac

SEQ ID NO: 367912 - DNA, 25 bp, Artificial
  probe
  misc_feature (1)..(25): SEQ ID NO: 3937; WAN024ESK; Start 391; Stop 415
atggaagatgtgaaggaagcagaaa

SEQ ID NO: 367913 - DNA, 25 bp, Artificial
  probe
  misc_feature (1)..(25): SEQ ID NO: 3937; WAN024ESK; Start 520; Stop 544
atgcaagatgttacctaccagtcac

SEQ ID NO: 367914 - DNA, 25 bp, Artificial
  probe
  misc_feature (1)..(25): SEQ ID NO: 3937; WAN024ESK; Start 37; Stop 61
gcgaaaggtgaatctgtaactcaag

SEQ ID NO: 367915 - DNA, 25 bp, Artificial
  probe
  misc_feature (1)..(25): SEQ ID NO: 3937; WAN024ESK; Start 517; Stop 541
acaatgcaagatgttacctaccagt

SEQ ID NO: 367916 - DNA, 25 bp, Artificial
  probe
  misc_feature (1)..(25): SEQ ID NO: 3937; WAN024ESK; Start 58; Stop 82
caagaagctacaccagagtataagc

SEQ ID NO: 367917 - DNA, 25 bp, Artificial
  probe
  misc_feature (1)..(25): SEQ ID NO: 3937; WAN024ESK; Start 48; Stop 72
atctgtaactcaagaagctacacca

SEQ ID NO: 367918 - DNA, 25 bp, Artificial
  probe
  misc_feature (1)..(25): SEQ ID NO: 3937; WAN024ESK; Start 397; Stop 421
gatgtgaaggaagcagaaacgattg

SEQ ID NO: 367919 - DNA, 25 bp, Artificial
  probe
  misc_feature (1)..(25): SEQ ID NO: 3937; WAN024ESK; Start 396; Stop 420
agatgtgaaggaagcagaaacgatt

SEQ ID NO: 367920 - DNA, 25 bp, Artificial
  probe
  misc_feature (1)..(25): SEQ ID NO: 3938; WAN024CO5; Start 39; Stop 63
tatgaccaatataagcaagaacagc

SEQ ID NO: 367921 - DNA, 25 bp, Artificial
  probe
  misc_feature (1)..(25): SEQ ID NO: 3938; WAN024CO5; Start 38; Stop 62
ttatgaccaatataagcaagaacag

SEQ ID NO: 367922 - DNA, 25 bp, Artificial
  probe
  misc_feature (1)..(25): SEQ ID NO: 3938; WAN024CO5; Start 37; Stop 61
attatgaccaatataagcaagaaca

SEQ ID NO: 367923 - DNA, 25 bp, Artificial
  probe
  misc_feature (1)..(25): SEQ ID NO: 3938; WAN024CO5; Start 40; Stop 64
atgaccaatataagcaagaacagct

SEQ ID NO: 367924 - DNA, 25 bp, Artificial
  probe
  misc_feature (1)..(25): SEQ ID NO: 3938; WAN024CO5; Start 26; Stop 50
ggcgcaattctattatgaccaatat

SEQ ID NO: 367925 - DNA, 25 bp, Artificial
  probe
  misc_feature (1)..(25): SEQ ID NO: 3938; WAN024CO5; Start 28; Stop 52
cgcaattctattatgaccaatataa

SEQ ID NO: 367926 - DNA, 25 bp, Artificial
  probe
  misc_feature (1)..(25): SEQ ID NO: 3938; WAN024CO5; Start 34; Stop 58
tctattatgaccaatataagcaaga

SEQ ID NO: 367927 - DNA, 25 bp, Artificial
  probe
  misc_feature (1)..(25): SEQ ID NO: 3938; WAN024CO5; Start 25; Stop 49
tggcgcaattctattatgaccaata

SEQ ID NO: 367928 - DNA, 25 bp, Artificial
  probe
  misc_feature (1)..(25): SEQ ID NO: 3938; WAN024CO5; Start 2; Stop 26
tgacgcagactactggaaacaaatg

SEQ ID NO: 367929 - DNA, 25 bp, Artificial
  probe
  misc_feature (1)..(25): SEQ ID NO: 3938; WAN024CO5; Start 1; Stop 25
gtgacgcagactactggaaacaaat

SEQ ID NO: 367930 - DNA, 25 bp, Artificial
  probe
  misc_feature (1)..(25): SEQ ID NO: 3938; WAN024CO5; Start 24; Stop 48
atggcgcaattctattatgaccaat

SEQ ID NO: 367931 - DNA, 25 bp, Artificial
  probe
  misc_feature (1)..(25): SEQ ID NO: 3938; WAN024CO5; Start 27; Stop 51
gcgcaattctattatgaccaatata

SEQ ID NO: 367932 - DNA, 25 bp, Artificial
  probe
  misc_feature (1)..(25): SEQ ID NO: 3938; WAN024CO5; Start 23; Stop 47
aatggcgcaattctattatgaccaa

SEQ ID NO: 367933 - DNA, 25 bp, Artificial
  probe
  misc_feature (1)..(25): SEQ ID NO: 3938; WAN024CO5; Start 19; Stop 43
aacaaatggcgcaattctattatga

SEQ ID NO: 367934 - DNA, 25 bp, Artificial
  probe
  misc_feature (1)..(25): SEQ ID NO: 3938; WAN024CO5; Start 20; Stop 44
acaaatggcgcaattctattatgac

SEQ ID NO: 367935 - DNA, 25 bp, Artificial
  probe
  misc_feature (1)..(25): SEQ ID NO: 3938; WAN024CO5; Start 36; Stop 60
tattatgaccaatataagcaagaac

SEQ ID NO: 367936 - DNA, 25 bp, Artificial
  probe
  misc_feature (1)..(25): SEQ ID NO: 3938; WAN024CO5; Start 18; Stop 42
aaacaaatggcgcaattctattatg

SEQ ID NO: 367937 - DNA, 25 bp, Artificial
  probe
  misc_feature (1)..(25): SEQ ID NO: 3938; WAN024CO5; Start 21; Stop 45
caaatggcgcaattctattatgacc

SEQ ID NO: 367938 - DNA, 25 bp, Artificial
  probe
  misc_feature (1)..(25): SEQ ID NO: 3938; WAN024CO5; Start 16; Stop 40
ggaaacaaatggcgcaattctatta

SEQ ID NO: 367939 - DNA, 25 bp, Artificial
  probe
  misc_feature (1)..(25): SEQ ID NO: 3938; WAN024CO5; Start 54; Stop 78
caagaacagcttgaaactgatgaaa

SEQ ID NO: 367940 - DNA, 25 bp, Artificial
  probe
  misc_feature (1)..(25): SEQ ID NO: 3938; WAN024CO5; Start 44; Stop 68
ccaatataagcaagaacagcttgaa

SEQ ID NO: 367941 - DNA, 25 bp, Artificial
  probe
  misc_feature (1)..(25): SEQ ID NO: 3938; WAN024CO5; Start 17; Stop 41
gaaacaaatggcgcaattctattat

SEQ ID NO: 367942 - DNA, 25 bp, Artificial
  probe
  misc_feature (1)..(25): SEQ ID NO: 3938; WAN024CO5; Start 42; Stop 66
gaccaatataagcaagaacagcttg

SEQ ID NO: 367943 - DNA, 25 bp, Artificial
  probe
  misc_feature (1)..(25): SEQ ID NO: 3938; WAN024CO5; Start 56; Stop 80
agaacagcttgaaactgatgaaaag

SEQ ID NO: 367944 - DNA, 25 bp, Artificial
  probe
  misc_feature (1)..(25): SEQ ID NO: 3938; WAN024CO5; Start 55; Stop 79
aagaacagcttgaaactgatgaaaa

SEQ ID NO: 367945 - DNA, 25 bp, Artificial
  probe
  misc_feature (1)..(25): SEQ ID NO: 3938; WAN024CO5; Start 3; Stop 27
gacgcagactactggaaacaaatgg

SEQ ID NO: 367946 - DNA, 25 bp, Artificial
  probe
  misc_feature (1)..(25): SEQ ID NO: 3938; WAN024CO5; Start 58; Stop 82
aacagcttgaaactgatgaaaagtc

SEQ ID NO: 367947 - DNA, 25 bp, Artificial
  probe
  misc_feature (1)..(25): SEQ ID NO: 3938; WAN024CO5; Start 57; Stop 81
gaacagcttgaaactgatgaaaagt

SEQ ID NO: 367948 - DNA, 25 bp, Artificial
  probe
  misc_feature (1)..(25): SEQ ID NO: 3938; WAN024CO5; Start 43; Stop 67
accaatataagcaagaacagcttga

SEQ ID NO: 367949 - DNA, 25 bp, Artificial
  probe
  misc_feature (1)..(25): SEQ ID NO: 3938; WAN024CO5; Start 41; Stop 65
tgaccaatataagcaagaacagctt

SEQ ID NO: 367950 - DNA, 25 bp, Artificial
  probe
  misc_feature (1)..(25): SEQ ID NO: 3938; WAN024CO5; Start 63; Stop 87
cttgaaactgatgaaaagtcgaacg

SEQ ID NO: 367951 - DNA, 25 bp, Artificial
  probe
  misc_feature (1)..(25): SEQ ID NO: 3938; WAN024CO5; Start 62; Stop 86
gcttgaaactgatgaaaagtcgaac

SEQ ID NO: 367952 - DNA, 25 bp, Artificial
  probe
  misc_feature (1)..(25): SEQ ID NO: 3938; WAN024CO5; Start 61; Stop 85
agcttgaaactgatgaaaagtcgaa

SEQ ID NO: 367953 - DNA, 25 bp, Artificial
  probe
  misc_feature (1)..(25): SEQ ID NO: 3939; WAN024FA8; Start 78; Stop 102
tatacttcagtgcttcttcatccag

SEQ ID NO: 367954 - DNA, 25 bp, Artificial
  probe
  misc_feature (1)..(25): SEQ ID NO: 3939; WAN024FA8; Start 77; Stop 101
atatacttcagtgcttcttcatcca

SEQ ID NO: 367955 - DNA, 25 bp, Artificial
  probe
  misc_feature (1)..(25): SEQ ID NO: 3939; WAN024FA8; Start 85; Stop 109
cagtgcttcttcatccagatagtag

SEQ ID NO: 367956 - DNA, 25 bp, Artificial
  probe
  misc_feature (1)..(25): SEQ ID NO: 3939; WAN024FA8; Start 84; Stop 108
tcagtgcttcttcatccagatagta

SEQ ID NO: 367957 - DNA, 25 bp, Artificial
  probe
  misc_feature (1)..(25): SEQ ID NO: 3939; WAN024FA8; Start 76; Stop 100
aatatacttcagtgcttcttcatcc

SEQ ID NO: 367958 - DNA, 25 bp, Artificial
  probe
  misc_feature (1)..(25): SEQ ID NO: 3939; WAN024FA8; Start 82; Stop 106
cttcagtgcttcttcatccagatag

SEQ ID NO: 367959 - DNA, 25 bp, Artificial
  probe
  misc_feature (1)..(25): SEQ ID NO: 3939; WAN024FA8; Start 132; Stop 156
aagaagttccattatcacgaatcat

SEQ ID NO: 367960 - DNA, 25 bp, Artificial
  probe
  misc_feature (1)..(25): SEQ ID NO: 3939; WAN024FA8; Start 86; Stop 110
agtgcttcttcatccagatagtagg

SEQ ID NO: 367961 - DNA, 25 bp, Artificial
  probe
  misc_feature (1)..(25): SEQ ID NO: 3939; WAN024FA8; Start 83; Stop 107
ttcagtgcttcttcatccagatagt

SEQ ID NO: 367962 - DNA, 25 bp, Artificial
  probe
  misc_feature (1)..(25): SEQ ID NO: 3939; WAN024FA8; Start 81; Stop 105
acttcagtgcttcttcatccagata

SEQ ID NO: 367963 - DNA, 25 bp, Artificial
  probe
  misc_feature (1)..(25): SEQ ID NO: 3939; WAN024FA8; Start 80; Stop 104
tacttcagtgcttcttcatccagat

SEQ ID NO: 367964 - DNA, 25 bp, Artificial
  probe
  misc_feature (1)..(25): SEQ ID NO: 3939; WAN024FA8; Start 79; Stop 103
atacttcagtgcttcttcatccaga

SEQ ID NO: 367965 - DNA, 25 bp, Artificial
  probe
  misc_feature (1)..(25): SEQ ID NO: 3939; WAN024FA8; Start 68; Stop 92
tcgtaatcaatatacttcagtgctt

SEQ ID NO: 367966 - DNA, 25 bp, Artificial
  probe
  misc_feature (1)..(25): SEQ ID NO: 3939; WAN024FA8; Start 131; Stop 155
taagaagttccattatcacgaatca

SEQ ID NO: 367967 - DNA, 25 bp, Artificial
  probe
  misc_feature (1)..(25): SEQ ID NO: 3939; WAN024FA8; Start 74; Stop 98
tcaatatacttcagtgcttcttcat

SEQ ID NO: 367968 - DNA, 25 bp, Artificial
  probe
  misc_feature (1)..(25): SEQ ID NO: 3939; WAN024FA8; Start 73; Stop 97
atcaatatacttcagtgcttcttca

SEQ ID NO: 367969 - DNA, 25 bp, Artificial
  probe
  misc_feature (1)..(25): SEQ ID NO: 3939; WAN024FA8; Start 69; Stop 93
cgtaatcaatatacttcagtgcttc

SEQ ID NO: 367970 - DNA, 25 bp, Artificial
  probe
  misc_feature (1)..(25): SEQ ID NO: 3939; WAN024FA8; Start 67; Stop 91
atcgtaatcaatatacttcagtgct

SEQ ID NO: 367971 - DNA, 25 bp, Artificial
  probe
  misc_feature (1)..(25): SEQ ID NO: 3939; WAN024FA8; Start 133; Stop 157
agaagttccattatcacgaatcatg

SEQ ID NO: 367972 - DNA, 25 bp, Artificial
  probe
  misc_feature (1)..(25): SEQ ID NO: 3939; WAN024FA8; Start 129; Stop 153
agtaagaagttccattatcacgaat

SEQ ID NO: 367973 - DNA, 25 bp, Artificial
  probe
  misc_feature (1)..(25): SEQ ID NO: 3939; WAN024FA8; Start 75; Stop 99
caatatacttcagtgcttcttcatc

SEQ ID NO: 367974 - DNA, 25 bp, Artificial
  probe
  misc_feature (1)..(25): SEQ ID NO: 3939; WAN024FA8; Start 130; Stop 154
gtaagaagttccattatcacgaatc

SEQ ID NO: 367975 - DNA, 25 bp, Artificial
  probe
  misc_feature (1)..(25): SEQ ID NO: 3939; WAN024FA8; Start 247; Stop 271
tgtatgatcgttgacaccaataatg

SEQ ID NO: 367976 - DNA, 25 bp, Artificial
  probe
  misc_feature (1)..(25): SEQ ID NO: 3939; WAN024FA8; Start 235; Stop 259
ttcggtaacaagtgtatgatcgttg

SEQ ID NO: 367977 - DNA, 25 bp, Artificial
  probe
  misc_feature (1)..(25): SEQ ID NO: 3939; WAN024FA8; Start 238; Stop 262
ggtaacaagtgtatgatcgttgaca

SEQ ID NO: 367978 - DNA, 25 bp, Artificial
  probe
  misc_feature (1)..(25): SEQ ID NO: 3939; WAN024FA8; Start 128; Stop 152
tagtaagaagttccattatcacgaa

SEQ ID NO: 367979 - DNA, 25 bp, Artificial
  probe
  misc_feature (1)..(25): SEQ ID NO: 3939; WAN024FA8; Start 66; Stop 90
aatcgtaatcaatatacttcagtgc

SEQ ID NO: 367980 - DNA, 25 bp, Artificial
  probe
  misc_feature (1)..(25): SEQ ID NO: 3939; WAN024FA8; Start 127; Stop 151
atagtaagaagttccattatcacga

SEQ ID NO: 367981 - DNA, 25 bp, Artificial
  probe
  misc_feature (1)..(25): SEQ ID NO: 3939; WAN024FA8; Start 237; Stop 261
cggtaacaagtgtatgatcgttgac

SEQ ID NO: 367982 - DNA, 25 bp, Artificial
  probe
  misc_feature (1)..(25): SEQ ID NO: 3939; WAN024FA8; Start 236; Stop 260
tcggtaacaagtgtatgatcgttga

SEQ ID NO: 367983 - DNA, 25 bp, Artificial
  probe
  misc_feature (1)..(25): SEQ ID NO: 3939; WAN024FA8; Start 248; Stop 272
gtatgatcgttgacaccaataatgg

SEQ ID NO: 367984 - DNA, 25 bp, Artificial
  probe
  misc_feature (1)..(25): SEQ ID NO: 3939; WAN024FA8; Start 72; Stop 96
aatcaatatacttcagtgcttcttc

SEQ ID NO: 367985 - DNA, 25 bp, Artificial
  probe
  misc_feature (1)..(25): SEQ ID NO: 3939; WAN024FA8; Start 124; Stop 148
gcaatagtaagaagttccattatca

SEQ ID NO: 367986 - DNA, 25 bp, Artificial
  probe
  misc_feature (1)..(25): SEQ ID NO: 3940; WAN024FPX; Start 387; Stop 411
agcaagtctagtagaagtaggagaa

SEQ ID NO: 367987 - DNA, 25 bp, Artificial
  probe
  misc_feature (1)..(25): SEQ ID NO: 3940; WAN024FPX; Start 594; Stop 618
atctatgctcaagttcttggtcaat

SEQ ID NO: 367988 - DNA, 25 bp, Artificial
  probe
  misc_feature (1)..(25): SEQ ID NO: 3940; WAN024FPX; Start 593; Stop 617
tatctatgctcaagttcttggtcaa

SEQ ID NO: 367989 - DNA, 25 bp, Artificial
  probe
  misc_feature (1)..(25): SEQ ID NO: 3940; WAN024FPX; Start 592; Stop 616
ttatctatgctcaagttcttggtca

SEQ ID NO: 367990 - DNA, 25 bp, Artificial
  probe
  misc_feature (1)..(25): SEQ ID NO: 3940; WAN024FPX; Start 612; Stop 636
ggtcaatgaattagacatagcaagt

SEQ ID NO: 367991 - DNA, 25 bp, Artificial
  probe
  misc_feature (1)..(25): SEQ ID NO: 3940; WAN024FPX; Start 611; Stop 635
tggtcaatgaattagacatagcaag

SEQ ID NO: 367992 - DNA, 25 bp, Artificial
  probe
  misc_feature (1)..(25): SEQ ID NO: 3940; WAN024FPX; Start 609; Stop 633
cttggtcaatgaattagacatagca

SEQ ID NO: 367993 - DNA, 25 bp, Artificial
  probe
  misc_feature (1)..(25): SEQ ID NO: 3940; WAN024FPX; Start 600; Stop 624
gctcaagttcttggtcaatgaatta

SEQ ID NO: 367994 - DNA, 25 bp, Artificial
  probe
  misc_feature (1)..(25): SEQ ID NO: 3940; WAN024FPX; Start 591; Stop 615
cttatctatgctcaagttcttggtc

SEQ ID NO: 367995 - DNA, 25 bp, Artificial
  probe
  misc_feature (1)..(25): SEQ ID NO: 3940; WAN024FPX; Start 608; Stop 632
tcttggtcaatgaattagacatagc

SEQ ID NO: 367996 - DNA, 25 bp, Artificial
  probe
  misc_feature (1)..(25): SEQ ID NO: 3940; WAN024FPX; Start 597; Stop 621
tatgctcaagttcttggtcaatgaa

SEQ ID NO: 367997 - DNA, 25 bp, Artificial
  probe
  misc_feature (1)..(25): SEQ ID NO: 3940; WAN024FPX; Start 595; Stop 619
tctatgctcaagttcttggtcaatg

SEQ ID NO: 367998 - DNA, 25 bp, Artificial
  probe
  misc_feature (1)..(25): SEQ ID NO: 3940; WAN024FPX; Start 610; Stop 634
ttggtcaatgaattagacatagcaa

SEQ ID NO: 367999 - DNA, 25 bp, Artificial
  probe
  misc_feature (1)..(25): SEQ ID NO: 3940; WAN024FPX; Start 604; Stop 628
aagttcttggtcaatgaattagaca

SEQ ID NO: 368000 - DNA, 25 bp, Artificial
  probe
  misc_feature (1)..(25): SEQ ID NO: 3940; WAN024FPX; Start 596; Stop 620
ctatgctcaagttcttggtcaatga

SEQ ID NO: 368001 - DNA, 25 bp, Artificial
  probe
  misc_feature (1)..(25): SEQ ID NO: 3940; WAN024FPX; Start 598; Stop 622
atgctcaagttcttggtcaatgaat

SEQ ID NO: 368002 - DNA, 25 bp, Artificial
  probe
  misc_feature (1)..(25): SEQ ID NO: 3940; WAN024FPX; Start 605; Stop 629
agttcttggtcaatgaattagacat

SEQ ID NO: 368003 - DNA, 25 bp, Artificial
  probe
  misc_feature (1)..(25): SEQ ID NO: 3940; WAN024FPX; Start 599; Stop 623
tgctcaagttcttggtcaatgaatt

SEQ ID NO: 368004 - DNA, 25 bp, Artificial
  probe
  misc_feature (1)..(25): SEQ ID NO: 3940; WAN024FPX; Start 602; Stop 626
tcaagttcttggtcaatgaattaga

SEQ ID NO: 368005 - DNA, 25 bp, Artificial
  probe
  misc_feature (1)..(25): SEQ ID NO: 3940; WAN024FPX; Start 613; Stop 637
gtcaatgaattagacatagcaagtc

SEQ ID NO: 368006 - DNA, 25 bp, Artificial
  probe
  misc_feature (1)..(25): SEQ ID NO: 3940; WAN024FPX; Start 581; Stop 605
ttacctgggacttatctatgctcaa

SEQ ID NO: 368007 - DNA, 25 bp, Artificial
  probe
  misc_feature (1)..(25): SEQ ID NO: 3940; WAN024FPX; Start 601; Stop 625
ctcaagttcttggtcaatgaattag

SEQ ID NO: 368008 - DNA, 25 bp, Artificial
  probe
  misc_feature (1)..(25): SEQ ID NO: 3940; WAN024FPX; Start 713; Stop 737
atgttgaattgtggtttgaagaagt

SEQ ID NO: 368009 - DNA, 25 bp, Artificial
  probe
  misc_feature (1)..(25): SEQ ID NO: 3940; WAN024FPX; Start 27; Stop 51
tcagattgtacggattattcctact

SEQ ID NO: 368010 - DNA, 25 bp, Artificial
  probe
  misc_feature (1)..(25): SEQ ID NO: 3940; WAN024FPX; Start 714; Stop 738
tgttgaattgtggtttgaagaagta

SEQ ID NO: 368011 - DNA, 25 bp, Artificial
  probe
  misc_feature (1)..(25): SEQ ID NO: 3940; WAN024FPX; Start 575; Stop 599
atacggttacctgggacttatctat

SEQ ID NO: 368012 - DNA, 25 bp, Artificial
  probe
  misc_feature (1)..(25): SEQ ID NO: 3940; WAN024FPX; Start 1; Stop 25
gtgacggaggaatttatgaatgtaa

SEQ ID NO: 368013 - DNA, 25 bp, Artificial
  probe
  misc_feature (1)..(25): SEQ ID NO: 3940; WAN024FPX; Start 574; Stop 598
aatacggttacctgggacttatcta

SEQ ID NO: 368014 - DNA, 25 bp, Artificial
  probe
  misc_feature (1)..(25): SEQ ID NO: 3940; WAN024FPX; Start 603; Stop 627
caagttcttggtcaatgaattagac

SEQ ID NO: 368015 - DNA, 25 bp, Artificial
  probe
  misc_feature (1)..(25): SEQ ID NO: 3940; WAN024FPX; Start 580; Stop 604
gttacctgggacttatctatgctca

SEQ ID NO: 368016 - DNA, 25 bp, Artificial
  probe
  misc_feature (1)..(25): SEQ ID NO: 3940; WAN024FPX; Start 712; Stop 736
aatgttgaattgtggtttgaagaag

SEQ ID NO: 368017 - DNA, 25 bp, Artificial
  probe
  misc_feature (1)..(25): SEQ ID NO: 3940; WAN024FPX; Start 582; Stop 606
tacctgggacttatctatgctcaag

SEQ ID NO: 368018 - DNA, 25 bp, Artificial
  probe
  misc_feature (1)..(25): SEQ ID NO: 3940; WAN024FPX; Start 576; Stop 600
tacggttacctgggacttatctatg

SEQ ID NO: 368019 - DNA, 25 bp, Artificial
  probe
  misc_feature (1)..(25): SEQ ID NO: 3941; WAN024EYJ; Start 79; Stop 103
gatgtctgtgatgtccaactcatag

SEQ ID NO: 368020 - DNA, 25 bp, Artificial
  probe
  misc_feature (1)..(25): SEQ ID NO: 3941; WAN024EYJ; Start 53; Stop 77
tagtcttgagattcaccgatcactt

SEQ ID NO: 368021 - DNA, 25 bp, Artificial
  probe
  misc_feature (1)..(25): SEQ ID NO: 3941; WAN024EYJ; Start 52; Stop 76
gtagtcttgagattcaccgatcact

SEQ ID NO: 368022 - DNA, 25 bp, Artificial
  probe
  misc_feature (1)..(25): SEQ ID NO: 3941; WAN024EYJ; Start 78; Stop 102
cgatgtctgtgatgtccaactcata

SEQ ID NO: 368023 - DNA, 25 bp, Artificial
  probe
  misc_feature (1)..(25): SEQ ID NO: 3941; WAN024EYJ; Start 80; Stop 104
atgtctgtgatgtccaactcatagc

SEQ ID NO: 368024 - DNA, 25 bp, Artificial
  probe
  misc_feature (1)..(25): SEQ ID NO: 3941; WAN024EYJ; Start 42; Stop 66
gtgtgattgggtagtcttgagattc

SEQ ID NO: 368025 - DNA, 25 bp, Artificial
  probe
  misc_feature (1)..(25): SEQ ID NO: 3941; WAN024EYJ; Start 54; Stop 78
agtcttgagattcaccgatcacttc

SEQ ID NO: 368026 - DNA, 25 bp, Artificial
  probe
  misc_feature (1)..(25): SEQ ID NO: 3941; WAN024EYJ; Start 43; Stop 67
tgtgattgggtagtcttgagattca

SEQ ID NO: 368027 - DNA, 25 bp, Artificial
  probe
  misc_feature (1)..(25): SEQ ID NO: 3941; WAN024EYJ; Start 86; Stop 110
gtgatgtccaactcatagccaaatt

SEQ ID NO: 368028 - DNA, 25 bp, Artificial
  probe
  misc_feature (1)..(25): SEQ ID NO: 3941; WAN024EYJ; Start 41; Stop 65
ggtgtgattgggtagtcttgagatt

SEQ ID NO: 368029 - DNA, 25 bp, Artificial
  probe
  misc_feature (1)..(25): SEQ ID NO: 3941; WAN024EYJ; Start 38; Stop 62
tttggtgtgattgggtagtcttgag

SEQ ID NO: 368030 - DNA, 25 bp, Artificial
  probe
  misc_feature (1)..(25): SEQ ID NO: 3941; WAN024EYJ; Start 90; Stop 114
tgtccaactcatagccaaatttaga

SEQ ID NO: 368031 - DNA, 25 bp, Artificial
  probe
  misc_feature (1)..(25): SEQ ID NO: 3941; WAN024EYJ; Start 93; Stop 117
ccaactcatagccaaatttagaacg

SEQ ID NO: 368032 - DNA, 25 bp, Artificial
  probe
  misc_feature (1)..(25): SEQ ID NO: 3941; WAN024EYJ; Start 51; Stop 75
ggtagtcttgagattcaccgatcac

SEQ ID NO: 368033 - DNA, 25 bp, Artificial
  probe
  misc_feature (1)..(25): SEQ ID NO: 3941; WAN024EYJ; Start 94; Stop 118
caactcatagccaaatttagaacgt

SEQ ID NO: 368034 - DNA, 25 bp, Artificial
  probe
  misc_feature (1)..(25): SEQ ID NO: 3941; WAN024EYJ; Start 92; Stop 116
tccaactcatagccaaatttagaac

SEQ ID NO: 368035 - DNA, 25 bp, Artificial
  probe
  misc_feature (1)..(25): SEQ ID NO: 3941; WAN024EYJ; Start 91; Stop 115
gtccaactcatagccaaatttagaa

SEQ ID NO: 368036 - DNA, 25 bp, Artificial
  probe
  misc_feature (1)..(25): SEQ ID NO: 3941; WAN024EYJ; Start 85; Stop 109
tgtgatgtccaactcatagccaaat

SEQ ID NO: 368037 - DNA, 25 bp, Artificial
  probe
  misc_feature (1)..(25): SEQ ID NO: 3941; WAN024EYJ; Start 83; Stop 107
tctgtgatgtccaactcatagccaa

SEQ ID NO: 368038 - DNA, 25 bp, Artificial
  probe
  misc_feature (1)..(25): SEQ ID NO: 3941; WAN024EYJ; Start 88; Stop 112
gatgtccaactcatagccaaattta

SEQ ID NO: 368039 - DNA, 25 bp, Artificial
  probe
  misc_feature (1)..(25): SEQ ID NO: 3941; WAN024EYJ; Start 89; Stop 113
atgtccaactcatagccaaatttag

SEQ ID NO: 368040 - DNA, 25 bp, Artificial
  probe
  misc_feature (1)..(25): SEQ ID NO: 3941; WAN024EYJ; Start 87; Stop 111
tgatgtccaactcatagccaaattt

SEQ ID NO: 368041 - DNA, 25 bp, Artificial
  probe
  misc_feature (1)..(25): SEQ ID NO: 3941; WAN024EYJ; Start 40; Stop 64
tggtgtgattgggtagtcttgagat

SEQ ID NO: 368042 - DNA, 25 bp, Artificial
  probe
  misc_feature (1)..(25): SEQ ID NO: 3941; WAN024EYJ; Start 75; Stop 99
cttcgatgtctgtgatgtccaactc

SEQ ID NO: 368043 - DNA, 25 bp, Artificial
  probe
  misc_feature (1)..(25): SEQ ID NO: 3941; WAN024EYJ; Start 45; Stop 69
tgattgggtagtcttgagattcacc

SEQ ID NO: 368044 - DNA, 25 bp, Artificial
  probe
  misc_feature (1)..(25): SEQ ID NO: 3941; WAN024EYJ; Start 84; Stop 108
ctgtgatgtccaactcatagccaaa

SEQ ID NO: 368045 - DNA, 25 bp, Artificial
  probe
  misc_feature (1)..(25): SEQ ID NO: 3941; WAN024EYJ; Start 39; Stop 63
ttggtgtgattgggtagtcttgaga

SEQ ID NO: 368046 - DNA, 25 bp, Artificial
  probe
  misc_feature (1)..(25): SEQ ID NO: 3941; WAN024EYJ; Start 117; Stop 141
gttcgtcctctttgacaatacctgt

SEQ ID NO: 368047 - DNA, 25 bp, Artificial
  probe
  misc_feature (1)..(25): SEQ ID NO: 3941; WAN024EYJ; Start 176; Stop 200
ataacatcaaacttctcaagtccca

SEQ ID NO: 368048 - DNA, 25 bp, Artificial
  probe
  misc_feature (1)..(25): SEQ ID NO: 3941; WAN024EYJ; Start 175; Stop 199
gataacatcaaacttctcaagtccc

SEQ ID NO: 368049 - DNA, 25 bp, Artificial
  probe
  misc_feature (1)..(25): SEQ ID NO: 3941; WAN024EYJ; Start 82; Stop 106
gtctgtgatgtccaactcatagcca

SEQ ID NO: 368050 - DNA, 25 bp, Artificial
  probe
  misc_feature (1)..(25): SEQ ID NO: 3941; WAN024EYJ; Start 81; Stop 105
tgtctgtgatgtccaactcatagcc

SEQ ID NO: 368051 - DNA, 25 bp, Artificial
  probe
  misc_feature (1)..(25): SEQ ID NO: 3941; WAN024EYJ; Start 177; Stop 201
taacatcaaacttctcaagtcccac

SEQ ID NO: 368052 - DNA, 25 bp, Artificial
  probe
  misc_feature (1)..(25): SEQ ID NO: 3942; WAN024FY2; Start 72; Stop 96
cctactcttagctcttgttggttat

SEQ ID NO: 368053 - DNA, 25 bp, Artificial
  probe
  misc_feature (1)..(25): SEQ ID NO: 3942; WAN024FY2; Start 74; Stop 98
tactcttagctcttgttggttatgc

SEQ ID NO: 368054 - DNA, 25 bp, Artificial
  probe
  misc_feature (1)..(25): SEQ ID NO: 3942; WAN024FY2; Start 71; Stop 95
tcctactcttagctcttgttggtta

SEQ ID NO: 368055 - DNA, 25 bp, Artificial
  probe
  misc_feature (1)..(25): SEQ ID NO: 3942; WAN024FY2; Start 89; Stop 113
ttggttatgcggttggttatctctt

SEQ ID NO: 368056 - DNA, 25 bp, Artificial
  probe
  misc_feature (1)..(25): SEQ ID NO: 3942; WAN024FY2; Start 403; Stop 427
atgaatcgtgaagaactagaagctg

SEQ ID NO: 368057 - DNA, 25 bp, Artificial
  probe
  misc_feature (1)..(25): SEQ ID NO: 3942; WAN024FY2; Start 402; Stop 426
catgaatcgtgaagaactagaagct

SEQ ID NO: 368058 - DNA, 25 bp, Artificial
  probe
  misc_feature (1)..(25): SEQ ID NO: 3942; WAN024FY2; Start 85; Stop 109
cttgttggttatgcggttggttatc

SEQ ID NO: 368059 - DNA, 25 bp, Artificial
  probe
  misc_feature (1)..(25): SEQ ID NO: 3942; WAN024FY2; Start 406; Stop 430
aatcgtgaagaactagaagctgtta

SEQ ID NO: 368060 - DNA, 25 bp, Artificial
  probe
  misc_feature (1)..(25): SEQ ID NO: 3942; WAN024FY2; Start 73; Stop 97
ctactcttagctcttgttggttatg

SEQ ID NO: 368061 - DNA, 25 bp, Artificial
  probe
  misc_feature (1)..(25): SEQ ID NO: 3942; WAN024FY2; Start 407; Stop 431
atcgtgaagaactagaagctgttat

SEQ ID NO: 368062 - DNA, 25 bp, Artificial
  probe
  misc_feature (1)..(25): SEQ ID NO: 3942; WAN024FY2; Start 408; Stop 432
tcgtgaagaactagaagctgttatg

SEQ ID NO: 368063 - DNA, 25 bp, Artificial
  probe
  misc_feature (1)..(25): SEQ ID NO: 3942; WAN024FY2; Start 70; Stop 94
ttcctactcttagctcttgttggtt

SEQ ID NO: 368064 - DNA, 25 bp, Artificial
  probe
  misc_feature (1)..(25): SEQ ID NO: 3942; WAN024FY2; Start 405; Stop 429
gaatcgtgaagaactagaagctgtt

SEQ ID NO: 368065 - DNA, 25 bp, Artificial
  probe
  misc_feature (1)..(25): SEQ ID NO: 3942; WAN024FY2; Start 150; Stop 174
gattatcggctttatctacgctttg

SEQ ID NO: 368066 - DNA, 25 bp, Artificial
  probe
  misc_feature (1)..(25): SEQ ID NO: 3942; WAN024FY2; Start 157; Stop 181
ggctttatctacgctttgtctatga

SEQ ID NO: 368067 - DNA, 25 bp, Artificial
  probe
  misc_feature (1)..(25): SEQ ID NO: 3942; WAN024FY2; Start 151; Stop 175
attatcggctttatctacgctttgt

SEQ ID NO: 368068 - DNA, 25 bp, Artificial
  probe
  misc_feature (1)..(25): SEQ ID NO: 3942; WAN024FY2; Start 149; Stop 173
tgattatcggctttatctacgcttt

SEQ ID NO: 368069 - DNA, 25 bp, Artificial
  probe
  misc_feature (1)..(25): SEQ ID NO: 3942; WAN024FY2; Start 92; Stop 116
gttatgcggttggttatctctttat

SEQ ID NO: 368070 - DNA, 25 bp, Artificial
  probe
  misc_feature (1)..(25): SEQ ID NO: 3942; WAN024FY2; Start 86; Stop 110
ttgttggttatgcggttggttatct

SEQ ID NO: 368071 - DNA, 25 bp, Artificial
  probe
  misc_feature (1)..(25): SEQ ID NO: 3942; WAN024FY2; Start 84; Stop 108
tcttgttggttatgcggttggttat

SEQ ID NO: 368072 - DNA, 25 bp, Artificial
  probe
  misc_feature (1)..(25): SEQ ID NO: 3942; WAN024FY2; Start 91; Stop 115
ggttatgcggttggttatctcttta

SEQ ID NO: 368073 - DNA, 25 bp, Artificial
  probe
  misc_feature (1)..(25): SEQ ID NO: 3942; WAN024FY2; Start 158; Stop 182
gctttatctacgctttgtctatgat

SEQ ID NO: 368074 - DNA, 25 bp, Artificial
  probe
  misc_feature (1)..(25): SEQ ID NO: 3942; WAN024FY2; Start 148; Stop 172
ctgattatcggctttatctacgctt

SEQ ID NO: 368075 - DNA, 25 bp, Artificial
  probe
  misc_feature (1)..(25): SEQ ID NO: 3942; WAN024FY2; Start 409; Stop 433
cgtgaagaactagaagctgttatgg

SEQ ID NO: 368076 - DNA, 25 bp, Artificial
  probe
  misc_feature (1)..(25): SEQ ID NO: 3942; WAN024FY2; Start 260; Stop 284
atgtagtggaagatatggctctggt

SEQ ID NO: 368077 - DNA, 25 bp, Artificial
  probe
  misc_feature (1)..(25): SEQ ID NO: 3942; WAN024FY2; Start 746; Stop 770
atgccctagataagttggacaatag

SEQ ID NO: 368078 - DNA, 25 bp, Artificial
  probe
  misc_feature (1)..(25): SEQ ID NO: 3942; WAN024FY2; Start 601; Stop 625
atcattatgctagtggtttccctac

SEQ ID NO: 368079 - DNA, 25 bp, Artificial
  probe
  misc_feature (1)..(25): SEQ ID NO: 3942; WAN024FY2; Start 592; Stop 616
ggtcttgaaatcattatgctagtgg

SEQ ID NO: 368080 - DNA, 25 bp, Artificial
  probe
  misc_feature (1)..(25): SEQ ID NO: 3942; WAN024FY2; Start 743; Stop 767
ttaatgccctagataagttggacaa

SEQ ID NO: 368081 - DNA, 25 bp, Artificial
  probe
  misc_feature (1)..(25): SEQ ID NO: 3942; WAN024FY2; Start 599; Stop 623
aaatcattatgctagtggtttccct

SEQ ID NO: 368082 - DNA, 25 bp, Artificial
  probe
  misc_feature (1)..(25): SEQ ID NO: 3942; WAN024FY2; Start 152; Stop 176
ttatcggctttatctacgctttgtc

SEQ ID NO: 368083 - DNA, 25 bp, Artificial
  probe
  misc_feature (1)..(25): SEQ ID NO: 3942; WAN024FY2; Start 745; Stop 769
aatgccctagataagttggacaata

SEQ ID NO: 368084 - DNA, 25 bp, Artificial
  probe
  misc_feature (1)..(25): SEQ ID NO: 3942; WAN024FY2; Start 744; Stop 768
taatgccctagataagttggacaat

SEQ ID NO: 368085 - DNA, 25 bp, Artificial
  probe
  misc_feature (1)..(25): SEQ ID NO: 3943; WAN024FT3; Start 974; Stop 998
ggttagttggttacattatagtgct

SEQ ID NO: 368086 - DNA, 25 bp, Artificial
  probe
  misc_feature (1)..(25): SEQ ID NO: 3943; WAN024FT3; Start 975; Stop 999
gttagttggttacattatagtgctg

SEQ ID NO: 368087 - DNA, 25 bp, Artificial
  probe
  misc_feature (1)..(25): SEQ ID NO: 3943; WAN024FT3; Start 770; Stop 794
aatcatatagccatcgagtgttagg

SEQ ID NO: 368088 - DNA, 25 bp, Artificial
  probe
  misc_feature (1)..(25): SEQ ID NO: 3943; WAN024FT3; Start 765; Stop 789
tagtgaatcatatagccatcgagtg

SEQ ID NO: 368089 - DNA, 25 bp, Artificial
  probe
  misc_feature (1)..(25): SEQ ID NO: 3943; WAN024FT3; Start 768; Stop 792
tgaatcatatagccatcgagtgtta

SEQ ID NO: 368090 - DNA, 25 bp, Artificial
  probe
  misc_feature (1)..(25): SEQ ID NO: 3943; WAN024FT3; Start 767; Stop 791
gtgaatcatatagccatcgagtgtt

SEQ ID NO: 368091 - DNA, 25 bp, Artificial
  probe
  misc_feature (1)..(25): SEQ ID NO: 3943; WAN024FT3; Start 771; Stop 795
atcatatagccatcgagtgttaggt

SEQ ID NO: 368092 - DNA, 25 bp, Artificial
  probe
  misc_feature (1)..(25): SEQ ID NO: 3943; WAN024FT3; Start 769; Stop 793
gaatcatatagccatcgagtgttag

SEQ ID NO: 368093 - DNA, 25 bp, Artificial
  probe
  misc_feature (1)..(25): SEQ ID NO: 3943; WAN024FT3; Start 764; Stop 788
atagtgaatcatatagccatcgagt

SEQ ID NO: 368094 - DNA, 25 bp, Artificial
  probe
  misc_feature (1)..(25): SEQ ID NO: 3943; WAN024FT3; Start 977; Stop 1001
tagttggttacattatagtgctgtt

SEQ ID NO: 368095 - DNA, 25 bp, Artificial
  probe
  misc_feature (1)..(25): SEQ ID NO: 3943; WAN024FT3; Start 976; Stop 1000
ttagttggttacattatagtgctgt

SEQ ID NO: 368096 - DNA, 25 bp, Artificial
  probe
  misc_feature (1)..(25): SEQ ID NO: 3943; WAN024FT3; Start 962; Stop 986
atggttatgttgggttagttggtta

SEQ ID NO: 368097 - DNA, 25 bp, Artificial
  probe
  misc_feature (1)..(25): SEQ ID NO: 3943; WAN024FT3; Start 774; Stop 798
atatagccatcgagtgttaggtgtt

SEQ ID NO: 368098 - DNA, 25 bp, Artificial
  probe
  misc_feature (1)..(25): SEQ ID NO: 3943; WAN024FT3; Start 973; Stop 997
gggttagttggttacattatagtgc

SEQ ID NO: 368099 - DNA, 25 bp, Artificial
  probe
  misc_feature (1)..(25): SEQ ID NO: 3943; WAN024FT3; Start 898; Stop 922
attagaagtgtgttaggttgggatg

SEQ ID NO: 368100 - DNA, 25 bp, Artificial
  probe
  misc_feature (1)..(25): SEQ ID NO: 3943; WAN024FT3; Start 766; Stop 790
agtgaatcatatagccatcgagtgt

SEQ ID NO: 368101 - DNA, 25 bp, Artificial
  probe
  misc_feature (1)..(25): SEQ ID NO: 3943; WAN024FT3; Start 73; Stop 97
gtgatagtgaacttgggattgtcta

SEQ ID NO: 368102 - DNA, 25 bp, Artificial
  probe
  misc_feature (1)..(25): SEQ ID NO: 3943; WAN024FT3; Start 961; Stop 985
aatggttatgttgggttagttggtt

SEQ ID NO: 368103 - DNA, 25 bp, Artificial
  probe
  misc_feature (1)..(25): SEQ ID NO: 3943; WAN024FT3; Start 960; Stop 984
aaatggttatgttgggttagttggt

SEQ ID NO: 368104 - DNA, 25 bp, Artificial
  probe
  misc_feature (1)..(25): SEQ ID NO: 3943; WAN024FT3; Start 781; Stop 805
catcgagtgttaggtgttgtgaatt

SEQ ID NO: 368105 - DNA, 25 bp, Artificial
  probe
  misc_feature (1)..(25): SEQ ID NO: 3943; WAN024FT3; Start 1068; Stop 1092
tattccgttacttctatctgcaaca

SEQ ID NO: 368106 - DNA, 25 bp, Artificial
  probe
  misc_feature (1)..(25): SEQ ID NO: 3943; WAN024FT3; Start 963; Stop 987
tggttatgttgggttagttggttac

SEQ ID NO: 368107 - DNA, 25 bp, Artificial
  probe
  misc_feature (1)..(25): SEQ ID NO: 3943; WAN024FT3; Start 897; Stop 921
tattagaagtgtgttaggttgggat

SEQ ID NO: 368108 - DNA, 25 bp, Artificial
  probe
  misc_feature (1)..(25): SEQ ID NO: 3943; WAN024FT3; Start 854; Stop 878
ctgaattagcctttggaaatacgac

SEQ ID NO: 368109 - DNA, 25 bp, Artificial
  probe
  misc_feature (1)..(25): SEQ ID NO: 3943; WAN024FT3; Start 291; Stop 315
ttctagcttatccaccttaccgata

SEQ ID NO: 368110 - DNA, 25 bp, Artificial
  probe
  misc_feature (1)..(25): SEQ ID NO: 3943; WAN024FT3; Start 896; Stop 920
atattagaagtgtgttaggttggga

SEQ ID NO: 368111 - DNA, 25 bp, Artificial
  probe
  misc_feature (1)..(25): SEQ ID NO: 3943; WAN024FT3; Start 772; Stop 796
tcatatagccatcgagtgttaggtg

SEQ ID NO: 368112 - DNA, 25 bp, Artificial
  probe
  misc_feature (1)..(25): SEQ ID NO: 3943; WAN024FT3; Start 74; Stop 98
tgatagtgaacttgggattgtctag

SEQ ID NO: 368113 - DNA, 25 bp, Artificial
  probe
  misc_feature (1)..(25): SEQ ID NO: 3943; WAN024FT3; Start 763; Stop 787
aatagtgaatcatatagccatcgag

SEQ ID NO: 368114 - DNA, 25 bp, Artificial
  probe
  misc_feature (1)..(25): SEQ ID NO: 3943; WAN024FT3; Start 700; Stop 724
acagcaacgacaatagtcatctctt

SEQ ID NO: 368115 - DNA, 25 bp, Artificial
  probe
  misc_feature (1)..(25): SEQ ID NO: 3943; WAN024FT3; Start 1067; Stop 1091
ttattccgttacttctatctgcaac

SEQ ID NO: 368116 - DNA, 25 bp, Artificial
  probe
  misc_feature (1)..(25): SEQ ID NO: 3943; WAN024FT3; Start 857; Stop 881
aattagcctttggaaatacgacgaa

SEQ ID NO: 368117 - DNA, 25 bp, Artificial
  probe
  misc_feature (1)..(25): SEQ ID NO: 3943; WAN024FT3; Start 865; Stop 889
tttggaaatacgacgaagggttatg

SEQ ID NO: 368118 - DNA, 25 bp, Artificial
  probe
  misc_feature (1)..(25): SEQ ID NO: 3944; WAN024B5O; Start 237; Stop 261
tatcaatgctccgactattcagatt

SEQ ID NO: 368119 - DNA, 25 bp, Artificial
  probe
  misc_feature (1)..(25): SEQ ID NO: 3944; WAN024B5O; Start 236; Stop 260
atatcaatgctccgactattcagat

SEQ ID NO: 368120 - DNA, 25 bp, Artificial
  probe
  misc_feature (1)..(25): SEQ ID NO: 3944; WAN024B5O; Start 235; Stop 259
catatcaatgctccgactattcaga

SEQ ID NO: 368121 - DNA, 25 bp, Artificial
  probe
  misc_feature (1)..(25): SEQ ID NO: 3944; WAN024B5O; Start 620; Stop 644
ttatgacctctattctgacagtagc

SEQ ID NO: 368122 - DNA, 25 bp, Artificial
  probe
  misc_feature (1)..(25): SEQ ID NO: 3944; WAN024B5O; Start 621; Stop 645
tatgacctctattctgacagtagcc

SEQ ID NO: 368123 - DNA, 25 bp, Artificial
  probe
  misc_feature (1)..(25): SEQ ID NO: 3944; WAN024B5O; Start 311; Stop 335
tctctatgaatagtggtgcttatgt

SEQ ID NO: 368124 - DNA, 25 bp, Artificial
  probe
  misc_feature (1)..(25): SEQ ID NO: 3944; WAN024B5O; Start 617; Stop 641
tgattatgacctctattctgacagt

SEQ ID NO: 368125 - DNA, 25 bp, Artificial
  probe
  misc_feature (1)..(25): SEQ ID NO: 3944; WAN024B5O; Start 312; Stop 336
ctctatgaatagtggtgcttatgtt

SEQ ID NO: 368126 - DNA, 25 bp, Artificial
  probe
  misc_feature (1)..(25): SEQ ID NO: 3944; WAN024B5O; Start 626; Stop 650
cctctattctgacagtagccttgaa

SEQ ID NO: 368127 - DNA, 25 bp, Artificial
  probe
  misc_feature (1)..(25): SEQ ID NO: 3944; WAN024B5O; Start 615; Stop 639
cttgattatgacctctattctgaca

SEQ ID NO: 368128 - DNA, 25 bp, Artificial
  probe
  misc_feature (1)..(25): SEQ ID NO: 3944; WAN024B5O; Start 614; Stop 638
acttgattatgacctctattctgac

SEQ ID NO: 368129 - DNA, 25 bp, Artificial
  probe
  misc_feature (1)..(25): SEQ ID NO: 3944; WAN024B5O; Start 310; Stop 334
atctctatgaatagtggtgcttatg

SEQ ID NO: 368130 - DNA, 25 bp, Artificial
  probe
  misc_feature (1)..(25): SEQ ID NO: 3944; WAN024B5O; Start 305; Stop 329
tgattatctctatgaatagtggtgc

SEQ ID NO: 368131 - DNA, 25 bp, Artificial
  probe
  misc_feature (1)..(25): SEQ ID NO: 3944; WAN024B5O; Start 624; Stop 648
gacctctattctgacagtagccttg

SEQ ID NO: 368132 - DNA, 25 bp, Artificial
  probe
  misc_feature (1)..(25): SEQ ID NO: 3944; WAN024B5O; Start 616; Stop 640
ttgattatgacctctattctgacag

SEQ ID NO: 368133 - DNA, 25 bp, Artificial
  probe
  misc_feature (1)..(25): SEQ ID NO: 3944; WAN024B5O; Start 306; Stop 330
gattatctctatgaatagtggtgct

SEQ ID NO: 368134 - DNA, 25 bp, Artificial
  probe
  misc_feature (1)..(25): SEQ ID NO: 3944; WAN024B5O; Start 622; Stop 646
atgacctctattctgacagtagcct

SEQ ID NO: 368135 - DNA, 25 bp, Artificial
  probe
  misc_feature (1)..(25): SEQ ID NO: 3944; WAN024B5O; Start 485; Stop 509
ttatcaccattatcaaggacagctc

SEQ ID NO: 368136 - DNA, 25 bp, Artificial
  probe
  misc_feature (1)..(25): SEQ ID NO: 3944; WAN024B5O; Start 625; Stop 649
acctctattctgacagtagccttga

SEQ ID NO: 368137 - DNA, 25 bp, Artificial
  probe
  misc_feature (1)..(25): SEQ ID NO: 3944; WAN024B5O; Start 623; Stop 647
tgacctctattctgacagtagcctt

SEQ ID NO: 368138 - DNA, 25 bp, Artificial
  probe
  misc_feature (1)..(25): SEQ ID NO: 3944; WAN024B5O; Start 211; Stop 235
attatgattgcctttgctcttatgc

SEQ ID NO: 368139 - DNA, 25 bp, Artificial
  probe
  misc_feature (1)..(25): SEQ ID NO: 3944; WAN024B5O; Start 307; Stop 331
attatctctatgaatagtggtgctt

SEQ ID NO: 368140 - DNA, 25 bp, Artificial
  probe
  misc_feature (1)..(25): SEQ ID NO: 3944; WAN024B5O; Start 55; Stop 79
gctgttgtgacgattcttatttcta

SEQ ID NO: 368141 - DNA, 25 bp, Artificial
  probe
  misc_feature (1)..(25): SEQ ID NO: 3944; WAN024B5O; Start 569; Stop 593
caacctatctacctttaacaccact

SEQ ID NO: 368142 - DNA, 25 bp, Artificial
  probe
  misc_feature (1)..(25): SEQ ID NO: 3944; WAN024B5O; Start 568; Stop 592
acaacctatctacctttaacaccac

SEQ ID NO: 368143 - DNA, 25 bp, Artificial
  probe
  misc_feature (1)..(25): SEQ ID NO: 3944; WAN024B5O; Start 567; Stop 591
aacaacctatctacctttaacacca

SEQ ID NO: 368144 - DNA, 25 bp, Artificial
  probe
  misc_feature (1)..(25): SEQ ID NO: 3944; WAN024B5O; Start 483; Stop 507
atttatcaccattatcaaggacagc

SEQ ID NO: 368145 - DNA, 25 bp, Artificial
  probe
  misc_feature (1)..(25): SEQ ID NO: 3944; WAN024B5O; Start 668; Stop 692
tgggacaaggagataagaaataact

SEQ ID NO: 368146 - DNA, 25 bp, Artificial
  probe
  misc_feature (1)..(25): SEQ ID NO: 3944; WAN024B5O; Start 619; Stop 643
attatgacctctattctgacagtag

SEQ ID NO: 368147 - DNA, 25 bp, Artificial
  probe
  misc_feature (1)..(25): SEQ ID NO: 3944; WAN024B5O; Start 618; Stop 642
gattatgacctctattctgacagta

SEQ ID NO: 368148 - DNA, 25 bp, Artificial
  probe
  misc_feature (1)..(25): SEQ ID NO: 3944; WAN024B5O; Start 571; Stop 595
acctatctacctttaacaccacttt

SEQ ID NO: 368149 - DNA, 25 bp, Artificial
  probe
  misc_feature (1)..(25): SEQ ID NO: 3944; WAN024B5O; Start 570; Stop 594
aacctatctacctttaacaccactt

SEQ ID NO: 368150 - DNA, 25 bp, Artificial
  probe
  misc_feature (1)..(25): SEQ ID NO: 3944; WAN024B5O; Start 566; Stop 590
caacaacctatctacctttaacacc

SEQ ID NO: 368151 - DNA, 25 bp, Artificial
  probe
  misc_feature (1)..(25): SEQ ID NO: 3945; WAN024B4Q; Start 135; Stop 159
cactatgttgaaccgtaagaatctc

SEQ ID NO: 368152 - DNA, 25 bp, Artificial
  probe
  misc_feature (1)..(25): SEQ ID NO: 3945; WAN024B4Q; Start 136; Stop 160
actatgttgaaccgtaagaatctcg

SEQ ID NO: 368153 - DNA, 25 bp, Artificial
  probe
  misc_feature (1)..(25): SEQ ID NO: 3945; WAN024B4Q; Start 134; Stop 158
acactatgttgaaccgtaagaatct

SEQ ID NO: 368154 - DNA, 25 bp, Artificial
  probe
  misc_feature (1)..(25): SEQ ID NO: 3945; WAN024B4Q; Start 137; Stop 161
ctatgttgaaccgtaagaatctcgc

SEQ ID NO: 368155 - DNA, 25 bp, Artificial
  probe
  misc_feature (1)..(25): SEQ ID NO: 3945; WAN024B4Q; Start 464; Stop 488
aatggaacaagcatgaatcagcaat

SEQ ID NO: 368156 - DNA, 25 bp, Artificial
  probe
  misc_feature (1)..(25): SEQ ID NO: 3945; WAN024B4Q; Start 465; Stop 489
atggaacaagcatgaatcagcaatc

SEQ ID NO: 368157 - DNA, 25 bp, Artificial
  probe
  misc_feature (1)..(25): SEQ ID NO: 3945; WAN024B4Q; Start 374; Stop 398
cagatgatgtgcagatgtacgaatt

SEQ ID NO: 368158 - DNA, 25 bp, Artificial
  probe
  misc_feature (1)..(25): SEQ ID NO: 3945; WAN024B4Q; Start 409; Stop 433
tatgagattccagtcatcattgtgg

SEQ ID NO: 368159 - DNA, 25 bp, Artificial
  probe
  misc_feature (1)..(25): SEQ ID NO: 3945; WAN024B4Q; Start 384; Stop 408
gcagatgtacgaatttctcaagtat

SEQ ID NO: 368160 - DNA, 25 bp, Artificial
  probe
  misc_feature (1)..(25): SEQ ID NO: 3945; WAN024B4Q; Start 467; Stop 491
ggaacaagcatgaatcagcaatcaa

SEQ ID NO: 368161 - DNA, 25 bp, Artificial
  probe
  misc_feature (1)..(25): SEQ ID NO: 3945; WAN024B4Q; Start 460; Stop 484
ggtaaatggaacaagcatgaatcag

SEQ ID NO: 368162 - DNA, 25 bp, Artificial
  probe
  misc_feature (1)..(25): SEQ ID NO: 3945; WAN024B4Q; Start 408; Stop 432
ttatgagattccagtcatcattgtg

SEQ ID NO: 368163 - DNA, 25 bp, Artificial
  probe
  misc_feature (1)..(25): SEQ ID NO: 3945; WAN024B4Q; Start 458; Stop 482
gtggtaaatggaacaagcatgaatc

SEQ ID NO: 368164 - DNA, 25 bp, Artificial
  probe
  misc_feature (1)..(25): SEQ ID NO: 3945; WAN024B4Q; Start 461; Stop 485
gtaaatggaacaagcatgaatcagc

SEQ ID NO: 368165 - DNA, 25 bp, Artificial
  probe
  misc_feature (1)..(25): SEQ ID NO: 3945; WAN024B4Q; Start 459; Stop 483
tggtaaatggaacaagcatgaatca

SEQ ID NO: 368166 - DNA, 25 bp, Artificial
  probe
  misc_feature (1)..(25): SEQ ID NO: 3945; WAN024B4Q; Start 468; Stop 492
gaacaagcatgaatcagcaatcaaa

SEQ ID NO: 368167 - DNA, 25 bp, Artificial
  probe
  misc_feature (1)..(25): SEQ ID NO: 3945; WAN024B4Q; Start 462; Stop 486
taaatggaacaagcatgaatcagca

SEQ ID NO: 368168 - DNA, 25 bp, Artificial
  probe
  misc_feature (1)..(25): SEQ ID NO: 3945; WAN024B4Q; Start 294; Stop 318
catgattgaggagtacttaacgact

SEQ ID NO: 368169 - DNA, 25 bp, Artificial
  probe
  misc_feature (1)..(25): SEQ ID NO: 3945; WAN024B4Q; Start 290; Stop 314
ggtgcatgattgaggagtacttaac

SEQ ID NO: 368170 - DNA, 25 bp, Artificial
  probe
  misc_feature (1)..(25): SEQ ID NO: 3945; WAN024B4Q; Start 293; Stop 317
gcatgattgaggagtacttaacgac

SEQ ID NO: 368171 - DNA, 25 bp, Artificial
  probe
  misc_feature (1)..(25): SEQ ID NO: 3945; WAN024B4Q; Start 407; Stop 431
attatgagattccagtcatcattgt

SEQ ID NO: 368172 - DNA, 25 bp, Artificial
  probe
  misc_feature (1)..(25): SEQ ID NO: 3945; WAN024B4Q; Start 376; Stop 400
gatgatgtgcagatgtacgaatttc

SEQ ID NO: 368173 - DNA, 25 bp, Artificial
  probe
  misc_feature (1)..(25): SEQ ID NO: 3945; WAN024B4Q; Start 291; Stop 315
gtgcatgattgaggagtacttaacg

SEQ ID NO: 368174 - DNA, 25 bp, Artificial
  probe
  misc_feature (1)..(25): SEQ ID NO: 3945; WAN024B4Q; Start 133; Stop 157
aacactatgttgaaccgtaagaatc

SEQ ID NO: 368175 - DNA, 25 bp, Artificial
  probe
  misc_feature (1)..(25): SEQ ID NO: 3945; WAN024B4Q; Start 292; Stop 316
tgcatgattgaggagtacttaacga

SEQ ID NO: 368176 - DNA, 25 bp, Artificial
  probe
  misc_feature (1)..(25): SEQ ID NO: 3945; WAN024B4Q; Start 375; Stop 399
agatgatgtgcagatgtacgaattt

SEQ ID NO: 368177 - DNA, 25 bp, Artificial
  probe
  misc_feature (1)..(25): SEQ ID NO: 3945; WAN024B4Q; Start 383; Stop 407
tgcagatgtacgaatttctcaagta

SEQ ID NO: 368178 - DNA, 25 bp, Artificial
  probe
  misc_feature (1)..(25): SEQ ID NO: 3945; WAN024B4Q; Start 115; Stop 139
ggtaaatccagctttatcaacacta

SEQ ID NO: 368179 - DNA, 25 bp, Artificial
  probe
  misc_feature (1)..(25): SEQ ID NO: 3945; WAN024B4Q; Start 466; Stop 490
tggaacaagcatgaatcagcaatca

SEQ ID NO: 368180 - DNA, 25 bp, Artificial
  probe
  misc_feature (1)..(25): SEQ ID NO: 3945; WAN024B4Q; Start 463; Stop 487
aaatggaacaagcatgaatcagcaa

SEQ ID NO: 368181 - DNA, 25 bp, Artificial
  probe
  misc_feature (1)..(25): SEQ ID NO: 3945; WAN024B4Q; Start 457; Stop 481
cgtggtaaatggaacaagcatgaat

SEQ ID NO: 368182 - DNA, 25 bp, Artificial
  probe
  misc_feature (1)..(25): SEQ ID NO: 3945; WAN024B4Q; Start 377; Stop 401
atgatgtgcagatgtacgaatttct

SEQ ID NO: 368183 - DNA, 25 bp, Artificial
  probe
  misc_feature (1)..(25): SEQ ID NO: 3945; WAN024B4Q; Start 380; Stop 404
atgtgcagatgtacgaatttctcaa

SEQ ID NO: 368184 - DNA, 25 bp, Artificial
  probe
  misc_feature (1)..(25): SEQ ID NO: 3946; WAN024CRH; Start 15; Stop 39
tccaatacttgtgacaccagatgtt

SEQ ID NO: 368185 - DNA, 25 bp, Artificial
  probe
  misc_feature (1)..(25): SEQ ID NO: 3946; WAN024CRH; Start 175; Stop 199
aaaggtcaaccaagatcactgtatc

SEQ ID NO: 368186 - DNA, 25 bp, Artificial
  probe
  misc_feature (1)..(25): SEQ ID NO: 3946; WAN024CRH; Start 174; Stop 198
caaaggtcaaccaagatcactgtat

SEQ ID NO: 368187 - DNA, 25 bp, Artificial
  probe
  misc_feature (1)..(25): SEQ ID NO: 3946; WAN024CRH; Start 176; Stop 200
aaggtcaaccaagatcactgtatct

SEQ ID NO: 368188 - DNA, 25 bp, Artificial
  probe
  misc_feature (1)..(25): SEQ ID NO: 3946; WAN024CRH; Start 14; Stop 38
gtccaatacttgtgacaccagatgt

SEQ ID NO: 368189 - DNA, 25 bp, Artificial
  probe
  misc_feature (1)..(25): SEQ ID NO: 3946; WAN024CRH; Start 19; Stop 43
atacttgtgacaccagatgtttctt

SEQ ID NO: 368190 - DNA, 25 bp, Artificial
  probe
  misc_feature (1)..(25): SEQ ID NO: 3946; WAN024CRH; Start 18; Stop 42
aatacttgtgacaccagatgtttct

SEQ ID NO: 368191 - DNA, 25 bp, Artificial
  probe
  misc_feature (1)..(25): SEQ ID NO: 3946; WAN024CRH; Start 17; Stop 41
caatacttgtgacaccagatgtttc

SEQ ID NO: 368192 - DNA, 25 bp, Artificial
  probe
  misc_feature (1)..(25): SEQ ID NO: 3946; WAN024CRH; Start 20; Stop 44
tacttgtgacaccagatgtttcttt

SEQ ID NO: 368193 - DNA, 25 bp, Artificial
  probe
  misc_feature (1)..(25): SEQ ID NO: 3946; WAN024CRH; Start 177; Stop 201
aggtcaaccaagatcactgtatctg

SEQ ID NO: 368194 - DNA, 25 bp, Artificial
  probe
  misc_feature (1)..(25): SEQ ID NO: 3946; WAN024CRH; Start 16; Stop 40
ccaatacttgtgacaccagatgttt

SEQ ID NO: 368195 - DNA, 25 bp, Artificial
  probe
  misc_feature (1)..(25): SEQ ID NO: 3946; WAN024CRH; Start 278; Stop 302
cttggtcatgtcttgtctttccttg

SEQ ID NO: 368196 - DNA, 25 bp, Artificial
  probe
  misc_feature (1)..(25): SEQ ID NO: 3946; WAN024CRH; Start 236; Stop 260
gagggaaatcagaaaggcatctctt

SEQ ID NO: 368197 - DNA, 25 bp, Artificial
  probe
  misc_feature (1)..(25): SEQ ID NO: 3946; WAN024CRH; Start 97; Stop 121
gatagacctcaaccgtttcttcctg

SEQ ID NO: 368198 - DNA, 25 bp, Artificial
  probe
  misc_feature (1)..(25): SEQ ID NO: 3946; WAN024CRH; Start 173; Stop 197
ccaaaggtcaaccaagatcactgta

SEQ ID NO: 368199 - DNA, 25 bp, Artificial
  probe
  misc_feature (1)..(25): SEQ ID NO: 3946; WAN024CRH; Start 233; Stop 257
cttgagggaaatcagaaaggcatct

SEQ ID NO: 368200 - DNA, 25 bp, Artificial
  probe
  misc_feature (1)..(25): SEQ ID NO: 3946; WAN024CRH; Start 13; Stop 37
cgtccaatacttgtgacaccagatg

SEQ ID NO: 368201 - DNA, 25 bp, Artificial
  probe
  misc_feature (1)..(25): SEQ ID NO: 3946; WAN024CRH; Start 234; Stop 258
ttgagggaaatcagaaaggcatctc

SEQ ID NO: 368202 - DNA, 25 bp, Artificial
  probe
  misc_feature (1)..(25): SEQ ID NO: 3946; WAN024CRH; Start 277; Stop 301
ccttggtcatgtcttgtctttcctt

SEQ ID NO: 368203 - DNA, 25 bp, Artificial
  probe
  misc_feature (1)..(25): SEQ ID NO: 3946; WAN024CRH; Start 98; Stop 122
atagacctcaaccgtttcttcctga

SEQ ID NO: 368204 - DNA, 25 bp, Artificial
  probe
  misc_feature (1)..(25): SEQ ID NO: 3946; WAN024CRH; Start 34; Stop 58
gatgtttcttttgttcttggagttc

SEQ ID NO: 368205 - DNA, 25 bp, Artificial
  probe
  misc_feature (1)..(25): SEQ ID NO: 3946; WAN024CRH; Start 35; Stop 59
atgtttcttttgttcttggagttcc

SEQ ID NO: 368206 - DNA, 25 bp, Artificial
  probe
  misc_feature (1)..(25): SEQ ID NO: 3946; WAN024CRH; Start 32; Stop 56
cagatgtttcttttgttcttggagt

SEQ ID NO: 368207 - DNA, 25 bp, Artificial
  probe
  misc_feature (1)..(25): SEQ ID NO: 3946; WAN024CRH; Start 67; Stop 91
tttcttcaatggttcccttggtcac

SEQ ID NO: 368208 - DNA, 25 bp, Artificial
  probe
  misc_feature (1)..(25): SEQ ID NO: 3946; WAN024CRH; Start 38; Stop 62
tttcttttgttcttggagttcctga

SEQ ID NO: 368209 - DNA, 25 bp, Artificial
  probe
  misc_feature (1)..(25): SEQ ID NO: 3946; WAN024CRH; Start 37; Stop 61
gtttcttttgttcttggagttcctg

SEQ ID NO: 368210 - DNA, 25 bp, Artificial
  probe
  misc_feature (1)..(25): SEQ ID NO: 3946; WAN024CRH; Start 33; Stop 57
agatgtttcttttgttcttggagtt

SEQ ID NO: 368211 - DNA, 25 bp, Artificial
  probe
  misc_feature (1)..(25): SEQ ID NO: 3946; WAN024CRH; Start 41; Stop 65
cttttgttcttggagttcctgaatt

SEQ ID NO: 368212 - DNA, 25 bp, Artificial
  probe
  misc_feature (1)..(25): SEQ ID NO: 3946; WAN024CRH; Start 279; Stop 303
ttggtcatgtcttgtctttccttgg

SEQ ID NO: 368213 - DNA, 25 bp, Artificial
  probe
  misc_feature (1)..(25): SEQ ID NO: 3946; WAN024CRH; Start 36; Stop 60
tgtttcttttgttcttggagttcct

SEQ ID NO: 368214 - DNA, 25 bp, Artificial
  probe
  misc_feature (1)..(25): SEQ ID NO: 3946; WAN024CRH; Start 43; Stop 67
tttgttcttggagttcctgaatttt

SEQ ID NO: 368215 - DNA, 25 bp, Artificial
  probe
  misc_feature (1)..(25): SEQ ID NO: 3946; WAN024CRH; Start 42; Stop 66
ttttgttcttggagttcctgaattt

SEQ ID NO: 368216 - DNA, 25 bp, Artificial
  probe
  misc_feature (1)..(25): SEQ ID NO: 3946; WAN024CRH; Start 40; Stop 64
tcttttgttcttggagttcctgaat

SEQ ID NO: 368217 - DNA, 25 bp, Artificial
  probe
  misc_feature (1)..(25): SEQ ID NO: 3947; WAN024F7F; Start 47; Stop 71
ttgaagggagaaatagaattggttg

SEQ ID NO: 368218 - DNA, 25 bp, Artificial
  probe
  misc_feature (1)..(25): SEQ ID NO: 3947; WAN024F7F; Start 45; Stop 69
gtttgaagggagaaatagaattggt

SEQ ID NO: 368219 - DNA, 25 bp, Artificial
  probe
  misc_feature (1)..(25): SEQ ID NO: 3947; WAN024F7F; Start 44; Stop 68
tgtttgaagggagaaatagaattgg

SEQ ID NO: 368220 - DNA, 25 bp, Artificial
  probe
  misc_feature (1)..(25): SEQ ID NO: 3947; WAN024F7F; Start 49; Stop 73
gaagggagaaatagaattggttgct

SEQ ID NO: 368221 - DNA, 25 bp, Artificial
  probe
  misc_feature (1)..(25): SEQ ID NO: 3947; WAN024F7F; Start 48; Stop 72
tgaagggagaaatagaattggttgc

SEQ ID NO: 368222 - DNA, 25 bp, Artificial
  probe
  misc_feature (1)..(25): SEQ ID NO: 3947; WAN024F7F; Start 53; Stop 77
ggagaaatagaattggttgctcaaa

SEQ ID NO: 368223 - DNA, 25 bp, Artificial
  probe
  misc_feature (1)..(25): SEQ ID NO: 3947; WAN024F7F; Start 46; Stop 70
tttgaagggagaaatagaattggtt

SEQ ID NO: 368224 - DNA, 25 bp, Artificial
  probe
  misc_feature (1)..(25): SEQ ID NO: 3947; WAN024F7F; Start 50; Stop 74
aagggagaaatagaattggttgctc

SEQ ID NO: 368225 - DNA, 25 bp, Artificial
  probe
  misc_feature (1)..(25): SEQ ID NO: 3947; WAN024F7F; Start 52; Stop 76
gggagaaatagaattggttgctcaa

SEQ ID NO: 368226 - DNA, 25 bp, Artificial
  probe
  misc_feature (1)..(25): SEQ ID NO: 3947; WAN024F7F; Start 54; Stop 78
gagaaatagaattggttgctcaaag

SEQ ID NO: 368227 - DNA, 25 bp, Artificial
  probe
  misc_feature (1)..(25): SEQ ID NO: 3947; WAN024F7F; Start 43; Stop 67
ttgtttgaagggagaaatagaattg

SEQ ID NO: 368228 - DNA, 25 bp, Artificial
  probe
  misc_feature (1)..(25): SEQ ID NO: 3947; WAN024F7F; Start 51; Stop 75
agggagaaatagaattggttgctca

SEQ ID NO: 368229 - DNA, 25 bp, Artificial
  probe
  misc_feature (1)..(25): SEQ ID NO: 3947; WAN024F7F; Start 42; Stop 66
tttgtttgaagggagaaatagaatt

SEQ ID NO: 368230 - DNA, 25 bp, Artificial
  probe
  misc_feature (1)..(25): SEQ ID NO: 3947; WAN024F7F; Start 55; Stop 79
agaaatagaattggttgctcaaagc

SEQ ID NO: 368231 - DNA, 25 bp, Artificial
  probe
  misc_feature (1)..(25): SEQ ID NO: 3947; WAN024F7F; Start 19; Stop 43
actgtttcactttcaaaatcggttt

SEQ ID NO: 368232 - DNA, 25 bp, Artificial
  probe
  misc_feature (1)..(25): SEQ ID NO: 3947; WAN024F7F; Start 39; Stop 63
ggttttgtttgaagggagaaataga

SEQ ID NO: 368233 - DNA, 25 bp, Artificial
  probe
  misc_feature (1)..(25): SEQ ID NO: 3947; WAN024F7F; Start 38; Stop 62
cggttttgtttgaagggagaaatag

SEQ ID NO: 368234 - DNA, 25 bp, Artificial
  probe
  misc_feature (1)..(25): SEQ ID NO: 3947; WAN024F7F; Start 37; Stop 61
tcggttttgtttgaagggagaaata

SEQ ID NO: 368235 - DNA, 25 bp, Artificial
  probe
  misc_feature (1)..(25): SEQ ID NO: 3947; WAN024F7F; Start 16; Stop 40
agaactgtttcactttcaaaatcgg

SEQ ID NO: 368236 - DNA, 25 bp, Artificial
  probe
  misc_feature (1)..(25): SEQ ID NO: 3947; WAN024F7F; Start 18; Stop 42
aactgtttcactttcaaaatcggtt

SEQ ID NO: 368237 - DNA, 25 bp, Artificial
  probe
  misc_feature (1)..(25): SEQ ID NO: 3947; WAN024F7F; Start 17; Stop 41
gaactgtttcactttcaaaatcggt

SEQ ID NO: 368238 - DNA, 25 bp, Artificial
  probe
  misc_feature (1)..(25): SEQ ID NO: 3947; WAN024F7F; Start 36; Stop 60
atcggttttgtttgaagggagaaat

SEQ ID NO: 368239 - DNA, 25 bp, Artificial
  probe
  misc_feature (1)..(25): SEQ ID NO: 3947; WAN024F7F; Start 15; Stop 39
aagaactgtttcactttcaaaatcg

SEQ ID NO: 368240 - DNA, 25 bp, Artificial
  probe
  misc_feature (1)..(25): SEQ ID NO: 3947; WAN024F7F; Start 35; Stop 59
aatcggttttgtttgaagggagaaa

SEQ ID NO: 368241 - DNA, 25 bp, Artificial
  probe
  misc_feature (1)..(25): SEQ ID NO: 3947; WAN024F7F; Start 34; Stop 58
aaatcggttttgtttgaagggagaa

SEQ ID NO: 368242 - DNA, 25 bp, Artificial
  probe
  misc_feature (1)..(25): SEQ ID NO: 3947; WAN024F7F; Start 40; Stop 64
gttttgtttgaagggagaaatagaa

SEQ ID NO: 368243 - DNA, 25 bp, Artificial
  probe
  misc_feature (1)..(25): SEQ ID NO: 3947; WAN024F7F; Start 20; Stop 44
ctgtttcactttcaaaatcggtttt

SEQ ID NO: 368244 - DNA, 25 bp, Artificial
  probe
  misc_feature (1)..(25): SEQ ID NO: 3947; WAN024F7F; Start 33; Stop 57
aaaatcggttttgtttgaagggaga

SEQ ID NO: 368245 - DNA, 25 bp, Artificial
  probe
  misc_feature (1)..(25): SEQ ID NO: 3947; WAN024F7F; Start 11; Stop 35
aagtaagaactgtttcactttcaaa

SEQ ID NO: 368246 - DNA, 25 bp, Artificial
  probe
  misc_feature (1)..(25): SEQ ID NO: 3947; WAN024F7F; Start 41; Stop 65
ttttgtttgaagggagaaatagaat

SEQ ID NO: 368247 - DNA, 25 bp, Artificial
  probe
  misc_feature (1)..(25): SEQ ID NO: 3947; WAN024F7F; Start 12; Stop 36
agtaagaactgtttcactttcaaaa

SEQ ID NO: 368248 - DNA, 25 bp, Artificial
  probe
  misc_feature (1)..(25): SEQ ID NO: 3947; WAN024F7F; Start 13; Stop 37
gtaagaactgtttcactttcaaaat

SEQ ID NO: 368249 - DNA, 25 bp, Artificial
  probe
  misc_feature (1)..(25): SEQ ID NO: 3947; WAN024F7F; Start 14; Stop 38
taagaactgtttcactttcaaaatc

SEQ ID NO: 368250 - DNA, 25 bp, Artificial
  probe
  misc_feature (1)..(25): SEQ ID NO: 3948; WAN024GHF; Start 137; Stop 161
ctaggtacatctgctacgacaactg

SEQ ID NO: 368251 - DNA, 25 bp, Artificial
  probe
  misc_feature (1)..(25): SEQ ID NO: 3948; WAN024GHF; Start 136; Stop 160
actaggtacatctgctacgacaact

SEQ ID NO: 368252 - DNA, 25 bp, Artificial
  probe
  misc_feature (1)..(25): SEQ ID NO: 3948; WAN024GHF; Start 135; Stop 159
cactaggtacatctgctacgacaac

SEQ ID NO: 368253 - DNA, 25 bp, Artificial
  probe
  misc_feature (1)..(25): SEQ ID NO: 3948; WAN024GHF; Start 134; Stop 158
tcactaggtacatctgctacgacaa

SEQ ID NO: 368254 - DNA, 25 bp, Artificial
  probe
  misc_feature (1)..(25): SEQ ID NO: 3948; WAN024GHF; Start 85; Stop 109
cttaccatgaagacggacaatcttg

SEQ ID NO: 368255 - DNA, 25 bp, Artificial
  probe
  misc_feature (1)..(25): SEQ ID NO: 3948; WAN024GHF; Start 84; Stop 108
tcttaccatgaagacggacaatctt

SEQ ID NO: 368256 - DNA, 25 bp, Artificial
  probe
  misc_feature (1)..(25): SEQ ID NO: 3948; WAN024GHF; Start 83; Stop 107
ttcttaccatgaagacggacaatct

SEQ ID NO: 368257 - DNA, 25 bp, Artificial
  probe
  misc_feature (1)..(25): SEQ ID NO: 3948; WAN024GHF; Start 133; Stop 157
gtcactaggtacatctgctacgaca

SEQ ID NO: 368258 - DNA, 25 bp, Artificial
  probe
  misc_feature (1)..(25): SEQ ID NO: 3948; WAN024GHF; Start 128; Stop 152
gtcacgtcactaggtacatctgcta

SEQ ID NO: 368259 - DNA, 25 bp, Artificial
  probe
  misc_feature (1)..(25): SEQ ID NO: 3948; WAN024GHF; Start 129; Stop 153
tcacgtcactaggtacatctgctac

SEQ ID NO: 368260 - DNA, 25 bp, Artificial
  probe
  misc_feature (1)..(25): SEQ ID NO: 3948; WAN024GHF; Start 86; Stop 110
ttaccatgaagacggacaatcttgg

SEQ ID NO: 368261 - DNA, 25 bp, Artificial
  probe
  misc_feature (1)..(25): SEQ ID NO: 3948; WAN024GHF; Start 69; Stop 93
tgacaggctcatctttcttaccatg

SEQ ID NO: 368262 - DNA, 25 bp, Artificial
  probe
  misc_feature (1)..(25): SEQ ID NO: 3948; WAN024GHF; Start 138; Stop 162
taggtacatctgctacgacaactgc

SEQ ID NO: 368263 - DNA, 25 bp, Artificial
  probe
  misc_feature (1)..(25): SEQ ID NO: 3948; WAN024GHF; Start 65; Stop 89
tgaatgacaggctcatctttcttac

SEQ ID NO: 368264 - DNA, 25 bp, Artificial
  probe
  misc_feature (1)..(25): SEQ ID NO: 3948; WAN024GHF; Start 64; Stop 88
gtgaatgacaggctcatctttctta

SEQ ID NO: 368265 - DNA, 25 bp, Artificial
  probe
  misc_feature (1)..(25): SEQ ID NO: 3948; WAN024GHF; Start 82; Stop 106
tttcttaccatgaagacggacaatc

SEQ ID NO: 368266 - DNA, 25 bp, Artificial
  probe
  misc_feature (1)..(25): SEQ ID NO: 3948; WAN024GHF; Start 81; Stop 105
ctttcttaccatgaagacggacaat

SEQ ID NO: 368267 - DNA, 25 bp, Artificial
  probe
  misc_feature (1)..(25): SEQ ID NO: 3948; WAN024GHF; Start 66; Stop 90
gaatgacaggctcatctttcttacc

SEQ ID NO: 368268 - DNA, 25 bp, Artificial
  probe
  misc_feature (1)..(25): SEQ ID NO: 3948; WAN024GHF; Start 78; Stop 102
catctttcttaccatgaagacggac

SEQ ID NO: 368269 - DNA, 25 bp, Artificial
  probe
  misc_feature (1)..(25): SEQ ID NO: 3948; WAN024GHF; Start 76; Stop 100
ctcatctttcttaccatgaagacgg

SEQ ID NO: 368270 - DNA, 25 bp, Artificial
  probe
  misc_feature (1)..(25): SEQ ID NO: 3948; WAN024GHF; Start 68; Stop 92
atgacaggctcatctttcttaccat

SEQ ID NO: 368271 - DNA, 25 bp, Artificial
  probe
  misc_feature (1)..(25): SEQ ID NO: 3948; WAN024GHF; Start 79; Stop 103
atctttcttaccatgaagacggaca

SEQ ID NO: 368272 - DNA, 25 bp, Artificial
  probe
  misc_feature (1)..(25): SEQ ID NO: 3948; WAN024GHF; Start 74; Stop 98
ggctcatctttcttaccatgaagac

SEQ ID NO: 368273 - DNA, 25 bp, Artificial
  probe
  misc_feature (1)..(25): SEQ ID NO: 3948; WAN024GHF; Start 73; Stop 97
aggctcatctttcttaccatgaaga

SEQ ID NO: 368274 - DNA, 25 bp, Artificial
  probe
  misc_feature (1)..(25): SEQ ID NO: 3948; WAN024GHF; Start 72; Stop 96
caggctcatctttcttaccatgaag

SEQ ID NO: 368275 - DNA, 25 bp, Artificial
  probe
  misc_feature (1)..(25): SEQ ID NO: 3948; WAN024GHF; Start 77; Stop 101
tcatctttcttaccatgaagacgga

SEQ ID NO: 368276 - DNA, 25 bp, Artificial
  probe
  misc_feature (1)..(25): SEQ ID NO: 3948; WAN024GHF; Start 67; Stop 91
aatgacaggctcatctttcttacca

SEQ ID NO: 368277 - DNA, 25 bp, Artificial
  probe
  misc_feature (1)..(25): SEQ ID NO: 3948; WAN024GHF; Start 80; Stop 104
tctttcttaccatgaagacggacaa

SEQ ID NO: 368278 - DNA, 25 bp, Artificial
  probe
  misc_feature (1)..(25): SEQ ID NO: 3948; WAN024GHF; Start 75; Stop 99
gctcatctttcttaccatgaagacg

SEQ ID NO: 368279 - DNA, 25 bp, Artificial
  probe
  misc_feature (1)..(25): SEQ ID NO: 3948; WAN024GHF; Start 71; Stop 95
acaggctcatctttcttaccatgaa

SEQ ID NO: 368280 - DNA, 25 bp, Artificial
  probe
  misc_feature (1)..(25): SEQ ID NO: 3948; WAN024GHF; Start 26; Stop 50
agtttattgacataatactctcgtt

SEQ ID NO: 368281 - DNA, 25 bp, Artificial
  probe
  misc_feature (1)..(25): SEQ ID NO: 3948; WAN024GHF; Start 70; Stop 94
gacaggctcatctttcttaccatga

SEQ ID NO: 368282 - DNA, 25 bp, Artificial
  probe
  misc_feature (1)..(25): SEQ ID NO: 3948; WAN024GHF; Start 51; Stop 75
tttcttcgacttcgtgaatgacagg

SEQ ID NO: 368283 - DNA, 25 bp, Artificial
  probe
  misc_feature (1)..(25): SEQ ID NO: 3949; WAN024ERP; Start 193; Stop 217
aatcataaccgctgctaccacaata

SEQ ID NO: 368284 - DNA, 25 bp, Artificial
  probe
  misc_feature (1)..(25): SEQ ID NO: 3949; WAN024ERP; Start 194; Stop 218
atcataaccgctgctaccacaatag

SEQ ID NO: 368285 - DNA, 25 bp, Artificial
  probe
  misc_feature (1)..(25): SEQ ID NO: 3949; WAN024ERP; Start 72; Stop 96
ctacaatccagatagcctcgtaaat

SEQ ID NO: 368286 - DNA, 25 bp, Artificial
  probe
  misc_feature (1)..(25): SEQ ID NO: 3949; WAN024ERP; Start 74; Stop 98
acaatccagatagcctcgtaaataa

SEQ ID NO: 368287 - DNA, 25 bp, Artificial
  probe
  misc_feature (1)..(25): SEQ ID NO: 3949; WAN024ERP; Start 73; Stop 97
tacaatccagatagcctcgtaaata

SEQ ID NO: 368288 - DNA, 25 bp, Artificial
  probe
  misc_feature (1)..(25): SEQ ID NO: 3949; WAN024ERP; Start 75; Stop 99
caatccagatagcctcgtaaataaa

SEQ ID NO: 368289 - DNA, 25 bp, Artificial
  probe
  misc_feature (1)..(25): SEQ ID NO: 3949; WAN024ERP; Start 117; Stop 141
gattctgataaccaactgctttcat

SEQ ID NO: 368290 - DNA, 25 bp, Artificial
  probe
  misc_feature (1)..(25): SEQ ID NO: 3949; WAN024ERP; Start 115; Stop 139
acgattctgataaccaactgctttc

SEQ ID NO: 368291 - DNA, 25 bp, Artificial
  probe
  misc_feature (1)..(25): SEQ ID NO: 3949; WAN024ERP; Start 71; Stop 95
cctacaatccagatagcctcgtaaa

SEQ ID NO: 368292 - DNA, 25 bp, Artificial
  probe
  misc_feature (1)..(25): SEQ ID NO: 3949; WAN024ERP; Start 114; Stop 138
cacgattctgataaccaactgcttt

SEQ ID NO: 368293 - DNA, 25 bp, Artificial
  probe
  misc_feature (1)..(25): SEQ ID NO: 3949; WAN024ERP; Start 187; Stop 211
gataccaatcataaccgctgctacc

SEQ ID NO: 368294 - DNA, 25 bp, Artificial
  probe
  misc_feature (1)..(25): SEQ ID NO: 3949; WAN024ERP; Start 116; Stop 140
cgattctgataaccaactgctttca

SEQ ID NO: 368295 - DNA, 25 bp, Artificial
  probe
  misc_feature (1)..(25): SEQ ID NO: 3949; WAN024ERP; Start 192; Stop 216
caatcataaccgctgctaccacaat

SEQ ID NO: 368296 - DNA, 25 bp, Artificial
  probe
  misc_feature (1)..(25): SEQ ID NO: 3949; WAN024ERP; Start 118; Stop 142
attctgataaccaactgctttcatg

SEQ ID NO: 368297 - DNA, 25 bp, Artificial
  probe
  misc_feature (1)..(25): SEQ ID NO: 3949; WAN024ERP; Start 70; Stop 94
gcctacaatccagatagcctcgtaa

SEQ ID NO: 368298 - DNA, 25 bp, Artificial
  probe
  misc_feature (1)..(25): SEQ ID NO: 3949; WAN024ERP; Start 188; Stop 212
ataccaatcataaccgctgctacca

SEQ ID NO: 368299 - DNA, 25 bp, Artificial
  probe
  misc_feature (1)..(25): SEQ ID NO: 3949; WAN024ERP; Start 186; Stop 210
tgataccaatcataaccgctgctac

SEQ ID NO: 368300 - DNA, 25 bp, Artificial
  probe
  misc_feature (1)..(25): SEQ ID NO: 3949; WAN024ERP; Start 5; Stop 29
cttacaatcgcattcgccaaacttc

SEQ ID NO: 368301 - DNA, 25 bp, Artificial
  probe
  misc_feature (1)..(25): SEQ ID NO: 3949; WAN024ERP; Start 67; Stop 91
gatgcctacaatccagatagcctcg

SEQ ID NO: 368302 - DNA, 25 bp, Artificial
  probe
  misc_feature (1)..(25): SEQ ID NO: 3949; WAN024ERP; Start 66; Stop 90
cgatgcctacaatccagatagcctc

SEQ ID NO: 368303 - DNA, 25 bp, Artificial
  probe
  misc_feature (1)..(25): SEQ ID NO: 3949; WAN024ERP; Start 189; Stop 213
taccaatcataaccgctgctaccac

SEQ ID NO: 368304 - DNA, 25 bp, Artificial
  probe
  misc_feature (1)..(25): SEQ ID NO: 3949; WAN024ERP; Start 69; Stop 93
tgcctacaatccagatagcctcgta

SEQ ID NO: 368305 - DNA, 25 bp, Artificial
  probe
  misc_feature (1)..(25): SEQ ID NO: 3949; WAN024ERP; Start 157; Stop 181
ggaacgttgcatgatattgatgtaa

SEQ ID NO: 368306 - DNA, 25 bp, Artificial
  probe
  misc_feature (1)..(25): SEQ ID NO: 3949; WAN024ERP; Start 76; Stop 100
aatccagatagcctcgtaaataaaa

SEQ ID NO: 368307 - DNA, 25 bp, Artificial
  probe
  misc_feature (1)..(25): SEQ ID NO: 3949; WAN024ERP; Start 156; Stop 180
tggaacgttgcatgatattgatgta

SEQ ID NO: 368308 - DNA, 25 bp, Artificial
  probe
  misc_feature (1)..(25): SEQ ID NO: 3949; WAN024ERP; Start 154; Stop 178
cttggaacgttgcatgatattgatg

SEQ ID NO: 368309 - DNA, 25 bp, Artificial
  probe
  misc_feature (1)..(25): SEQ ID NO: 3949; WAN024ERP; Start 135; Stop 159
ctttcatgacacctatttccttgga

SEQ ID NO: 368310 - DNA, 25 bp, Artificial
  probe
  misc_feature (1)..(25): SEQ ID NO: 3949; WAN024ERP; Start 129; Stop 153
caactgctttcatgacacctatttc

SEQ ID NO: 368311 - DNA, 25 bp, Artificial
  probe
  misc_feature (1)..(25): SEQ ID NO: 3949; WAN024ERP; Start 4; Stop 28
acttacaatcgcattcgccaaactt

SEQ ID NO: 368312 - DNA, 25 bp, Artificial
  probe
  misc_feature (1)..(25): SEQ ID NO: 3949; WAN024ERP; Start 136; Stop 160
tttcatgacacctatttccttggaa

SEQ ID NO: 368313 - DNA, 25 bp, Artificial
  probe
  misc_feature (1)..(25): SEQ ID NO: 3949; WAN024ERP; Start 160; Stop 184
acgttgcatgatattgatgtaaata

SEQ ID NO: 368314 - DNA, 25 bp, Artificial
  probe
  misc_feature (1)..(25): SEQ ID NO: 3949; WAN024ERP; Start 155; Stop 179
ttggaacgttgcatgatattgatgt

SEQ ID NO: 368315 - DNA, 25 bp, Artificial
  probe
  misc_feature (1)..(25): SEQ ID NO: 3949; WAN024ERP; Start 153; Stop 177
ccttggaacgttgcatgatattgat

SEQ ID NO: 368316 - DNA, 25 bp, Artificial
  probe
  misc_feature (1)..(25): SEQ ID NO: 3950; WAN024DPO; Start 561; Stop 585
ctgcgatagagtagtaaccattcat

SEQ ID NO: 368317 - DNA, 25 bp, Artificial
  probe
  misc_feature (1)..(25): SEQ ID NO: 3950; WAN024DPO; Start 563; Stop 587
gcgatagagtagtaaccattcatca

SEQ ID NO: 368318 - DNA, 25 bp, Artificial
  probe
  misc_feature (1)..(25): SEQ ID NO: 3950; WAN024DPO; Start 562; Stop 586
tgcgatagagtagtaaccattcatc

SEQ ID NO: 368319 - DNA, 25 bp, Artificial
  probe
  misc_feature (1)..(25): SEQ ID NO: 3950; WAN024DPO; Start 560; Stop 584
tctgcgatagagtagtaaccattca

SEQ ID NO: 368320 - DNA, 25 bp, Artificial
  probe
  misc_feature (1)..(25): SEQ ID NO: 3950; WAN024DPO; Start 564; Stop 588
cgatagagtagtaaccattcatcag

SEQ ID NO: 368321 - DNA, 25 bp, Artificial
  probe
  misc_feature (1)..(25): SEQ ID NO: 3950; WAN024DPO; Start 565; Stop 589
gatagagtagtaaccattcatcagg

SEQ ID NO: 368322 - DNA, 25 bp, Artificial
  probe
  misc_feature (1)..(25): SEQ ID NO: 3950; WAN024DPO; Start 534; Stop 558
ccactataaggaagagttggttgat

SEQ ID NO: 368323 - DNA, 25 bp, Artificial
  probe
  misc_feature (1)..(25): SEQ ID NO: 3950; WAN024DPO; Start 434; Stop 458
tggatgagattacaaatggcttaga

SEQ ID NO: 368324 - DNA, 25 bp, Artificial
  probe
  misc_feature (1)..(25): SEQ ID NO: 3950; WAN024DPO; Start 566; Stop 590
atagagtagtaaccattcatcaggg

SEQ ID NO: 368325 - DNA, 25 bp, Artificial
  probe
  misc_feature (1)..(25): SEQ ID NO: 3950; WAN024DPO; Start 433; Stop 457
atggatgagattacaaatggcttag

SEQ ID NO: 368326 - DNA, 25 bp, Artificial
  probe
  misc_feature (1)..(25): SEQ ID NO: 3950; WAN024DPO; Start 432; Stop 456
catggatgagattacaaatggctta

SEQ ID NO: 368327 - DNA, 25 bp, Artificial
  probe
  misc_feature (1)..(25): SEQ ID NO: 3950; WAN024DPO; Start 431; Stop 455
tcatggatgagattacaaatggctt

SEQ ID NO: 368328 - DNA, 25 bp, Artificial
  probe
  misc_feature (1)..(25): SEQ ID NO: 3950; WAN024DPO; Start 533; Stop 557
cccactataaggaagagttggttga

SEQ ID NO: 368329 - DNA, 25 bp, Artificial
  probe
  misc_feature (1)..(25): SEQ ID NO: 3950; WAN024DPO; Start 532; Stop 556
tcccactataaggaagagttggttg

SEQ ID NO: 368330 - DNA, 25 bp, Artificial
  probe
  misc_feature (1)..(25): SEQ ID NO: 3950; WAN024DPO; Start 567; Stop 591
tagagtagtaaccattcatcagggg

SEQ ID NO: 368331 - DNA, 25 bp, Artificial
  probe
  misc_feature (1)..(25): SEQ ID NO: 3950; WAN024DPO; Start 227; Stop 251
ttgaatggctggatggaaacttaag

SEQ ID NO: 368332 - DNA, 25 bp, Artificial
  probe
  misc_feature (1)..(25): SEQ ID NO: 3950; WAN024DPO; Start 247; Stop 271
ttaagtgggatggactaccttcgtc

SEQ ID NO: 368333 - DNA, 25 bp, Artificial
  probe
  misc_feature (1)..(25): SEQ ID NO: 3950; WAN024DPO; Start 579; Stop 603
cattcatcaggggcagatagaagag

SEQ ID NO: 368334 - DNA, 25 bp, Artificial
  probe
  misc_feature (1)..(25): SEQ ID NO: 3950; WAN024DPO; Start 574; Stop 598
gtaaccattcatcaggggcagatag

SEQ ID NO: 368335 - DNA, 25 bp, Artificial
  probe
  misc_feature (1)..(25): SEQ ID NO: 3950; WAN024DPO; Start 516; Stop 540
gctggttcttttaagttcccactat

SEQ ID NO: 368336 - DNA, 25 bp, Artificial
  probe
  misc_feature (1)..(25): SEQ ID NO: 3950; WAN024DPO; Start 575; Stop 599
taaccattcatcaggggcagataga

SEQ ID NO: 368337 - DNA, 25 bp, Artificial
  probe
  misc_feature (1)..(25): SEQ ID NO: 3950; WAN024DPO; Start 520; Stop 544
gttcttttaagttcccactataagg

SEQ ID NO: 368338 - DNA, 25 bp, Artificial
  probe
  misc_feature (1)..(25): SEQ ID NO: 3950; WAN024DPO; Start 519; Stop 543
ggttcttttaagttcccactataag

SEQ ID NO: 368339 - DNA, 25 bp, Artificial
  probe
  misc_feature (1)..(25): SEQ ID NO: 3950; WAN024DPO; Start 528; Stop 552
aagttcccactataaggaagagttg

SEQ ID NO: 368340 - DNA, 25 bp, Artificial
  probe
  misc_feature (1)..(25): SEQ ID NO: 3950; WAN024DPO; Start 573; Stop 597
agtaaccattcatcaggggcagata

SEQ ID NO: 368341 - DNA, 25 bp, Artificial
  probe
  misc_feature (1)..(25): SEQ ID NO: 3950; WAN024DPO; Start 572; Stop 596
tagtaaccattcatcaggggcagat

SEQ ID NO: 368342 - DNA, 25 bp, Artificial
  probe
  misc_feature (1)..(25): SEQ ID NO: 3950; WAN024DPO; Start 517; Stop 541
ctggttcttttaagttcccactata

SEQ ID NO: 368343 - DNA, 25 bp, Artificial
  probe
  misc_feature (1)..(25): SEQ ID NO: 3950; WAN024DPO; Start 531; Stop 555
ttcccactataaggaagagttggtt

SEQ ID NO: 368344 - DNA, 25 bp, Artificial
  probe
  misc_feature (1)..(25): SEQ ID NO: 3950; WAN024DPO; Start 248; Stop 272
taagtgggatggactaccttcgtct

SEQ ID NO: 368345 - DNA, 25 bp, Artificial
  probe
  misc_feature (1)..(25): SEQ ID NO: 3950; WAN024DPO; Start 529; Stop 553
agttcccactataaggaagagttgg

SEQ ID NO: 368346 - DNA, 25 bp, Artificial
  probe
  misc_feature (1)..(25): SEQ ID NO: 3950; WAN024DPO; Start 527; Stop 551
taagttcccactataaggaagagtt

SEQ ID NO: 368347 - DNA, 25 bp, Artificial
  probe
  misc_feature (1)..(25): SEQ ID NO: 3950; WAN024DPO; Start 526; Stop 550
ttaagttcccactataaggaagagt

SEQ ID NO: 368348 - DNA, 25 bp, Artificial
  probe
  misc_feature (1)..(25): SEQ ID NO: 3950; WAN024DPO; Start 518; Stop 542
tggttcttttaagttcccactataa

SEQ ID NO: 368349 - DNA, 25 bp, Artificial
  probe
  misc_feature (1)..(25): SEQ ID NO: 3951; WAN024B4R; Start 28; Stop 52
ctcctagtcctaactgttccaagag

SEQ ID NO: 368350 - DNA, 25 bp, Artificial
  probe
  misc_feature (1)..(25): SEQ ID NO: 3951; WAN024B4R; Start 31; Stop 55
ctagtcctaactgttccaagagtcc

SEQ ID NO: 368351 - DNA, 25 bp, Artificial
  probe
  misc_feature (1)..(25): SEQ ID NO: 3951; WAN024B4R; Start 30; Stop 54
cctagtcctaactgttccaagagtc

SEQ ID NO: 368352 - DNA, 25 bp, Artificial
  probe
  misc_feature (1)..(25): SEQ ID NO: 3951; WAN024B4R; Start 32; Stop 56
tagtcctaactgttccaagagtcca

SEQ ID NO: 368353 - DNA, 25 bp, Artificial
  probe
  misc_feature (1)..(25): SEQ ID NO: 3951; WAN024B4R; Start 29; Stop 53
tcctagtcctaactgttccaagagt

SEQ ID NO: 368354 - DNA, 25 bp, Artificial
  probe
  misc_feature (1)..(25): SEQ ID NO: 3951; WAN024B4R; Start 97; Stop 121
tcttcacaggcgataaagtcaaatt

SEQ ID NO: 368355 - DNA, 25 bp, Artificial
  probe
  misc_feature (1)..(25): SEQ ID NO: 3951; WAN024B4R; Start 27; Stop 51
cctcctagtcctaactgttccaaga

SEQ ID NO: 368356 - DNA, 25 bp, Artificial
  probe
  misc_feature (1)..(25): SEQ ID NO: 3951; WAN024B4R; Start 26; Stop 50
tcctcctagtcctaactgttccaag

SEQ ID NO: 368357 - DNA, 25 bp, Artificial
  probe
  misc_feature (1)..(25): SEQ ID NO: 3951; WAN024B4R; Start 96; Stop 120
gtcttcacaggcgataaagtcaaat

SEQ ID NO: 368358 - DNA, 25 bp, Artificial
  probe
  misc_feature (1)..(25): SEQ ID NO: 3951; WAN024B4R; Start 124; Stop 148
ccagaactgatagatgaggaaatag

SEQ ID NO: 368359 - DNA, 25 bp, Artificial
  probe
  misc_feature (1)..(25): SEQ ID NO: 3951; WAN024B4R; Start 25; Stop 49
gtcctcctagtcctaactgttccaa

SEQ ID NO: 368360 - DNA, 25 bp, Artificial
  probe
  misc_feature (1)..(25): SEQ ID NO: 3951; WAN024B4R; Start 199; Stop 223
ccagctctaaaggttgtccattata

SEQ ID NO: 368361 - DNA, 25 bp, Artificial
  probe
  misc_feature (1)..(25): SEQ ID NO: 3951; WAN024B4R; Start 273; Stop 297
agagttgtcttacctccaccagaag

SEQ ID NO: 368362 - DNA, 25 bp, Artificial
  probe
  misc_feature (1)..(25): SEQ ID NO: 3951; WAN024B4R; Start 192; Stop 216
aattcatccagctctaaaggttgtc

SEQ ID NO: 368363 - DNA, 25 bp, Artificial
  probe
  misc_feature (1)..(25): SEQ ID NO: 3951; WAN024B4R; Start 157; Stop 181
cttggaagacaaatcccagtagatt

SEQ ID NO: 368364 - DNA, 25 bp, Artificial
  probe
  misc_feature (1)..(25): SEQ ID NO: 3951; WAN024B4R; Start 158; Stop 182
ttggaagacaaatcccagtagattg

SEQ ID NO: 368365 - DNA, 25 bp, Artificial
  probe
  misc_feature (1)..(25): SEQ ID NO: 3951; WAN024B4R; Start 34; Stop 58
gtcctaactgttccaagagtccact

SEQ ID NO: 368366 - DNA, 25 bp, Artificial
  probe
  misc_feature (1)..(25): SEQ ID NO: 3951; WAN024B4R; Start 33; Stop 57
agtcctaactgttccaagagtccac

SEQ ID NO: 368367 - DNA, 25 bp, Artificial
  probe
  misc_feature (1)..(25): SEQ ID NO: 3951; WAN024B4R; Start 153; Stop 177
aaatcttggaagacaaatcccagta

SEQ ID NO: 368368 - DNA, 25 bp, Artificial
  probe
  misc_feature (1)..(25): SEQ ID NO: 3951; WAN024B4R; Start 154; Stop 178
aatcttggaagacaaatcccagtag

SEQ ID NO: 368369 - DNA, 25 bp, Artificial
  probe
  misc_feature (1)..(25): SEQ ID NO: 3951; WAN024B4R; Start 200; Stop 224
cagctctaaaggttgtccattataa

SEQ ID NO: 368370 - DNA, 25 bp, Artificial
  probe
  misc_feature (1)..(25): SEQ ID NO: 3951; WAN024B4R; Start 198; Stop 222
tccagctctaaaggttgtccattat

SEQ ID NO: 368371 - DNA, 25 bp, Artificial
  probe
  misc_feature (1)..(25): SEQ ID NO: 3951; WAN024B4R; Start 197; Stop 221
atccagctctaaaggttgtccatta

SEQ ID NO: 368372 - DNA, 25 bp, Artificial
  probe
  misc_feature (1)..(25): SEQ ID NO: 3951; WAN024B4R; Start 23; Stop 47
gtgtcctcctagtcctaactgttcc

SEQ ID NO: 368373 - DNA, 25 bp, Artificial
  probe
  misc_feature (1)..(25): SEQ ID NO: 3951; WAN024B4R; Start 98; Stop 122
cttcacaggcgataaagtcaaattt

SEQ ID NO: 368374 - DNA, 25 bp, Artificial
  probe
  misc_feature (1)..(25): SEQ ID NO: 3951; WAN024B4R; Start 123; Stop 147
tccagaactgatagatgaggaaata

SEQ ID NO: 368375 - DNA, 25 bp, Artificial
  probe
  misc_feature (1)..(25): SEQ ID NO: 3951; WAN024B4R; Start 125; Stop 149
cagaactgatagatgaggaaatagt

SEQ ID NO: 368376 - DNA, 25 bp, Artificial
  probe
  misc_feature (1)..(25): SEQ ID NO: 3951; WAN024B4R; Start 156; Stop 180
tcttggaagacaaatcccagtagat

SEQ ID NO: 368377 - DNA, 25 bp, Artificial
  probe
  misc_feature (1)..(25): SEQ ID NO: 3951; WAN024B4R; Start 155; Stop 179
atcttggaagacaaatcccagtaga

SEQ ID NO: 368378 - DNA, 25 bp, Artificial
  probe
  misc_feature (1)..(25): SEQ ID NO: 3951; WAN024B4R; Start 191; Stop 215
caattcatccagctctaaaggttgt

SEQ ID NO: 368379 - DNA, 25 bp, Artificial
  probe
  misc_feature (1)..(25): SEQ ID NO: 3951; WAN024B4R; Start 225; Stop 249
aagatttgccctgaatcaatggttt

SEQ ID NO: 368380 - DNA, 25 bp, Artificial
  probe
  misc_feature (1)..(25): SEQ ID NO: 3951; WAN024B4R; Start 224; Stop 248
aaagatttgccctgaatcaatggtt

SEQ ID NO: 368381 - DNA, 25 bp, Artificial
  probe
  misc_feature (1)..(25): SEQ ID NO: 3951; WAN024B4R; Start 35; Stop 59
tcctaactgttccaagagtccactc

SEQ ID NO: 368382 - DNA, 25 bp, Artificial
  probe
  misc_feature (1)..(25): SEQ ID NO: 3952; WAN024DYJ; Start 144; Stop 168
ttgtggtgatgagtctgaattaagt

SEQ ID NO: 368383 - DNA, 25 bp, Artificial
  probe
  misc_feature (1)..(25): SEQ ID NO: 3952; WAN024DYJ; Start 145; Stop 169
tgtggtgatgagtctgaattaagta

SEQ ID NO: 368384 - DNA, 25 bp, Artificial
  probe
  misc_feature (1)..(25): SEQ ID NO: 3952; WAN024DYJ; Start 150; Stop 174
tgatgagtctgaattaagtatccgt

SEQ ID NO: 368385 - DNA, 25 bp, Artificial
  probe
  misc_feature (1)..(25): SEQ ID NO: 3952; WAN024DYJ; Start 149; Stop 173
gtgatgagtctgaattaagtatccg

SEQ ID NO: 368386 - DNA, 25 bp, Artificial
  probe
  misc_feature (1)..(25): SEQ ID NO: 3952; WAN024DYJ; Start 151; Stop 175
gatgagtctgaattaagtatccgtc

SEQ ID NO: 368387 - DNA, 25 bp, Artificial
  probe
  misc_feature (1)..(25): SEQ ID NO: 3952; WAN024DYJ; Start 148; Stop 172
ggtgatgagtctgaattaagtatcc

SEQ ID NO: 368388 - DNA, 25 bp, Artificial
  probe
  misc_feature (1)..(25): SEQ ID NO: 3952; WAN024DYJ; Start 153; Stop 177
tgagtctgaattaagtatccgtcaa

SEQ ID NO: 368389 - DNA, 25 bp, Artificial
  probe
  misc_feature (1)..(25): SEQ ID NO: 3952; WAN024DYJ; Start 152; Stop 176
atgagtctgaattaagtatccgtca

SEQ ID NO: 368390 - DNA, 25 bp, Artificial
  probe
  misc_feature (1)..(25): SEQ ID NO: 3952; WAN024DYJ; Start 146; Stop 170
gtggtgatgagtctgaattaagtat

SEQ ID NO: 368391 - DNA, 25 bp, Artificial
  probe
  misc_feature (1)..(25): SEQ ID NO: 3952; WAN024DYJ; Start 147; Stop 171
tggtgatgagtctgaattaagtatc

SEQ ID NO: 368392 - DNA, 25 bp, Artificial
  probe
  misc_feature (1)..(25): SEQ ID NO: 3952; WAN024DYJ; Start 154; Stop 178
gagtctgaattaagtatccgtcaat

SEQ ID NO: 368393 - DNA, 25 bp, Artificial
  probe
  misc_feature (1)..(25): SEQ ID NO: 3952; WAN024DYJ; Start 155; Stop 179
agtctgaattaagtatccgtcaatt

SEQ ID NO: 368394 - DNA, 25 bp, Artificial
  probe
  misc_feature (1)..(25): SEQ ID NO: 3952; WAN024DYJ; Start 260; Stop 284
acaagttgatgccaagttatataga

SEQ ID NO: 368395 - DNA, 25 bp, Artificial
  probe
  misc_feature (1)..(25): SEQ ID NO: 3952; WAN024DYJ; Start 264; Stop 288
gttgatgccaagttatatagagttg

SEQ ID NO: 368396 - DNA, 25 bp, Artificial
  probe
  misc_feature (1)..(25): SEQ ID NO: 3952; WAN024DYJ; Start 263; Stop 287
agttgatgccaagttatatagagtt

SEQ ID NO: 368397 - DNA, 25 bp, Artificial
  probe
  misc_feature (1)..(25): SEQ ID NO: 3952; WAN024DYJ; Start 262; Stop 286
aagttgatgccaagttatatagagt

SEQ ID NO: 368398 - DNA, 25 bp, Artificial
  probe
  misc_feature (1)..(25): SEQ ID NO: 3952; WAN024DYJ; Start 256; Stop 280
gattacaagttgatgccaagttata

SEQ ID NO: 368399 - DNA, 25 bp, Artificial
  probe
  misc_feature (1)..(25): SEQ ID NO: 3952; WAN024DYJ; Start 143; Stop 167
tttgtggtgatgagtctgaattaag

SEQ ID NO: 368400 - DNA, 25 bp, Artificial
  probe
  misc_feature (1)..(25): SEQ ID NO: 3952; WAN024DYJ; Start 282; Stop 306
agagttggataaggaatacctagaa

SEQ ID NO: 368401 - DNA, 25 bp, Artificial
  probe
  misc_feature (1)..(25): SEQ ID NO: 3952; WAN024DYJ; Start 261; Stop 285
caagttgatgccaagttatatagag

SEQ ID NO: 368402 - DNA, 25 bp, Artificial
  probe
  misc_feature (1)..(25): SEQ ID NO: 3952; WAN024DYJ; Start 65; Stop 89
gaagttcttgtaggttgcgagagtt

SEQ ID NO: 368403 - DNA, 25 bp, Artificial
  probe
  misc_feature (1)..(25): SEQ ID NO: 3952; WAN024DYJ; Start 45; Stop 69
aatagaggtaaacaactcaggaagt

SEQ ID NO: 368404 - DNA, 25 bp, Artificial
  probe
  misc_feature (1)..(25): SEQ ID NO: 3952; WAN024DYJ; Start 257; Stop 281
attacaagttgatgccaagttatat

SEQ ID NO: 368405 - DNA, 25 bp, Artificial
  probe
  misc_feature (1)..(25): SEQ ID NO: 3952; WAN024DYJ; Start 492; Stop 516
gctagttgaaatactgtccttctgg

SEQ ID NO: 368406 - DNA, 25 bp, Artificial
  probe
  misc_feature (1)..(25): SEQ ID NO: 3952; WAN024DYJ; Start 281; Stop 305
tagagttggataaggaatacctaga

SEQ ID NO: 368407 - DNA, 25 bp, Artificial
  probe
  misc_feature (1)..(25): SEQ ID NO: 3952; WAN024DYJ; Start 283; Stop 307
gagttggataaggaatacctagaat

SEQ ID NO: 368408 - DNA, 25 bp, Artificial
  probe
  misc_feature (1)..(25): SEQ ID NO: 3952; WAN024DYJ; Start 411; Stop 435
acctgaggaagaaagatttatcatc

SEQ ID NO: 368409 - DNA, 25 bp, Artificial
  probe
  misc_feature (1)..(25): SEQ ID NO: 3952; WAN024DYJ; Start 330; Stop 354
tcctacatacgaagatgaaactatc

SEQ ID NO: 368410 - DNA, 25 bp, Artificial
  probe
  misc_feature (1)..(25): SEQ ID NO: 3952; WAN024DYJ; Start 156; Stop 180
gtctgaattaagtatccgtcaatta

SEQ ID NO: 368411 - DNA, 25 bp, Artificial
  probe
  misc_feature (1)..(25): SEQ ID NO: 3952; WAN024DYJ; Start 414; Stop 438
tgaggaagaaagatttatcatccca

SEQ ID NO: 368412 - DNA, 25 bp, Artificial
  probe
  misc_feature (1)..(25): SEQ ID NO: 3952; WAN024DYJ; Start 259; Stop 283
tacaagttgatgccaagttatatag

SEQ ID NO: 368413 - DNA, 25 bp, Artificial
  probe
  misc_feature (1)..(25): SEQ ID NO: 3952; WAN024DYJ; Start 285; Stop 309
gttggataaggaatacctagaattg

SEQ ID NO: 368414 - DNA, 25 bp, Artificial
  probe
  misc_feature (1)..(25): SEQ ID NO: 3952; WAN024DYJ; Start 413; Stop 437
ctgaggaagaaagatttatcatccc

SEQ ID NO: 368415 - DNA, 25 bp, Artificial
  probe
  misc_feature (1)..(25): SEQ ID NO: 3953; WAN024CS8-5; Start 2; Stop 26
tgagaaggatagaggagaagtgtaa

SEQ ID NO: 368416 - DNA, 25 bp, Artificial
  probe
  misc_feature (1)..(25): SEQ ID NO: 3953; WAN024CS8-5; Start 1; Stop 25
gtgagaaggatagaggagaagtgta

SEQ ID NO: 368417 - DNA, 25 bp, Artificial
  probe
  misc_feature (1)..(25): SEQ ID NO: 3953; WAN024CS8-5; Start 404; Stop 428
cgttagaactaggctgtgattacta

SEQ ID NO: 368418 - DNA, 25 bp, Artificial
  probe
  misc_feature (1)..(25): SEQ ID NO: 3953; WAN024CS8-5; Start 131; Stop 155
tggctatgatggatattgacaatct

SEQ ID NO: 368419 - DNA, 25 bp, Artificial
  probe
  misc_feature (1)..(25): SEQ ID NO: 3953; WAN024CS8-5; Start 403; Stop 427
tcgttagaactaggctgtgattact

SEQ ID NO: 368420 - DNA, 25 bp, Artificial
  probe
  misc_feature (1)..(25): SEQ ID NO: 3953; WAN024CS8-5; Start 402; Stop 426
gtcgttagaactaggctgtgattac

SEQ ID NO: 368421 - DNA, 25 bp, Artificial
  probe
  misc_feature (1)..(25): SEQ ID NO: 3953; WAN024CS8-5; Start 1016; Stop 1040
ttcttaatcgtgaacgctataccat

SEQ ID NO: 368422 - DNA, 25 bp, Artificial
  probe
  misc_feature (1)..(25): SEQ ID NO: 3953; WAN024CS8-5; Start 132; Stop 156
ggctatgatggatattgacaatctt

SEQ ID NO: 368423 - DNA, 25 bp, Artificial
  probe
  misc_feature (1)..(25): SEQ ID NO: 3953; WAN024CS8-5; Start 1017; Stop 1041
tcttaatcgtgaacgctataccatg

SEQ ID NO: 368424 - DNA, 25 bp, Artificial
  probe
  misc_feature (1)..(25): SEQ ID NO: 3953; WAN024CS8-5; Start 130; Stop 154
ttggctatgatggatattgacaatc

SEQ ID NO: 368425 - DNA, 25 bp, Artificial
  probe
  misc_feature (1)..(25): SEQ ID NO: 3953; WAN024CS8-5; Start 401; Stop 425
agtcgttagaactaggctgtgatta

SEQ ID NO: 368426 - DNA, 25 bp, Artificial
  probe
  misc_feature (1)..(25): SEQ ID NO: 3953; WAN024CS8-5; Start 808; Stop 832
caagatagactagaccaagaattgt

SEQ ID NO: 368427 - DNA, 25 bp, Artificial
  probe
  misc_feature (1)..(25): SEQ ID NO: 3953; WAN024CS8-5; Start 405; Stop 429
gttagaactaggctgtgattactat

SEQ ID NO: 368428 - DNA, 25 bp, Artificial
  probe
  misc_feature (1)..(25): SEQ ID NO: 3953; WAN024CS8-5; Start 807; Stop 831
tcaagatagactagaccaagaattg

SEQ ID NO: 368429 - DNA, 25 bp, Artificial
  probe
  misc_feature (1)..(25): SEQ ID NO: 3953; WAN024CS8-5; Start 400; Stop 424
gagtcgttagaactaggctgtgatt

SEQ ID NO: 368430 - DNA, 25 bp, Artificial
  probe
  misc_feature (1)..(25): SEQ ID NO: 3953; WAN024CS8-5; Start 863; Stop 887
atttcttggttgtttgggatttgtt

SEQ ID NO: 368431 - DNA, 25 bp, Artificial
  probe
  misc_feature (1)..(25): SEQ ID NO: 3953; WAN024CS8-5; Start 849; Stop 873
gggctttgatgattatttcttggtt

SEQ ID NO: 368432 - DNA, 25 bp, Artificial
  probe
  misc_feature (1)..(25): SEQ ID NO: 3953; WAN024CS8-5; Start 847; Stop 871
atgggctttgatgattatttcttgg

SEQ ID NO: 368433 - DNA, 25 bp, Artificial
  probe
  misc_feature (1)..(25): SEQ ID NO: 3953; WAN024CS8-5; Start 469; Stop 493
catcctatcttacctctttatcggg

SEQ ID NO: 368434 - DNA, 25 bp, Artificial
  probe
  misc_feature (1)..(25): SEQ ID NO: 3953; WAN024CS8-5; Start 1276; Stop 1300
cagtttcgtcagcaaatcaatagta

SEQ ID NO: 368435 - DNA, 25 bp, Artificial
  probe
  misc_feature (1)..(25): SEQ ID NO: 3953; WAN024CS8-5; Start 905; Stop 929
atggctattatatgggaatgggaag

SEQ ID NO: 368436 - DNA, 25 bp, Artificial
  probe
  misc_feature (1)..(25): SEQ ID NO: 3953; WAN024CS8-5; Start 903; Stop 927
gaatggctattatatgggaatggga

SEQ ID NO: 368437 - DNA, 25 bp, Artificial
  probe
  misc_feature (1)..(25): SEQ ID NO: 3953; WAN024CS8-5; Start 672; Stop 696
tatttcaggcatttcttacgacttg

SEQ ID NO: 368438 - DNA, 25 bp, Artificial
  probe
  misc_feature (1)..(25): SEQ ID NO: 3953; WAN024CS8-5; Start 862; Stop 886
tatttcttggttgtttgggatttgt

SEQ ID NO: 368439 - DNA, 25 bp, Artificial
  probe
  misc_feature (1)..(25): SEQ ID NO: 3953; WAN024CS8-5; Start 904; Stop 928
aatggctattatatgggaatgggaa

SEQ ID NO: 368440 - DNA, 25 bp, Artificial
  probe
  misc_feature (1)..(25): SEQ ID NO: 3953; WAN024CS8-5; Start 670; Stop 694
cttatttcaggcatttcttacgact

SEQ ID NO: 368441 - DNA, 25 bp, Artificial
  probe
  misc_feature (1)..(25): SEQ ID NO: 3953; WAN024CS8-5; Start 1018; Stop 1042
cttaatcgtgaacgctataccatgc

SEQ ID NO: 368442 - DNA, 25 bp, Artificial
  probe
  misc_feature (1)..(25): SEQ ID NO: 3953; WAN024CS8-5; Start 850; Stop 874
ggctttgatgattatttcttggttg

SEQ ID NO: 368443 - DNA, 25 bp, Artificial
  probe
  misc_feature (1)..(25): SEQ ID NO: 3953; WAN024CS8-5; Start 669; Stop 693
gcttatttcaggcatttcttacgac

SEQ ID NO: 368444 - DNA, 25 bp, Artificial
  probe
  misc_feature (1)..(25): SEQ ID NO: 3953; WAN024CS8-5; Start 108; Stop 132
taaagaatacggctacactcatttg

SEQ ID NO: 368445 - DNA, 25 bp, Artificial
  probe
  misc_feature (1)..(25): SEQ ID NO: 3953; WAN024CS8-5; Start 858; Stop 882
tgattatttcttggttgtttgggat

SEQ ID NO: 368446 - DNA, 25 bp, Artificial
  probe
  misc_feature (1)..(25): SEQ ID NO: 3953; WAN024CS8-5; Start 857; Stop 881
atgattatttcttggttgtttggga

SEQ ID NO: 368447 - DNA, 25 bp, Artificial
  probe
  misc_feature (1)..(25): SEQ ID NO: 3953; WAN024CS8-5; Start 848; Stop 872
tgggctttgatgattatttcttggt

SEQ ID NO: 368448 - DNA, 25 bp, Artificial
  probe
  misc_feature (1)..(25): SEQ ID NO: 3954; WAN024FB9; Start 85; Stop 109
gatgatttggtggtaaacttgttgt

SEQ ID NO: 368449 - DNA, 25 bp, Artificial
  probe
  misc_feature (1)..(25): SEQ ID NO: 3954; WAN024FB9; Start 84; Stop 108
ggatgatttggtggtaaacttgttg

SEQ ID NO: 368450 - DNA, 25 bp, Artificial
  probe
  misc_feature (1)..(25): SEQ ID NO: 3954; WAN024FB9; Start 86; Stop 110
atgatttggtggtaaacttgttgta

SEQ ID NO: 368451 - DNA, 25 bp, Artificial
  probe
  misc_feature (1)..(25): SEQ ID NO: 3954; WAN024FB9; Start 87; Stop 111
tgatttggtggtaaacttgttgtac

SEQ ID NO: 368452 - DNA, 25 bp, Artificial
  probe
  misc_feature (1)..(25): SEQ ID NO: 3954; WAN024FB9; Start 83; Stop 107
cggatgatttggtggtaaacttgtt

SEQ ID NO: 368453 - DNA, 25 bp, Artificial
  probe
  misc_feature (1)..(25): SEQ ID NO: 3954; WAN024FB9; Start 97; Stop 121
gtaaacttgttgtaccttagcttcg

SEQ ID NO: 368454 - DNA, 25 bp, Artificial
  probe
  misc_feature (1)..(25): SEQ ID NO: 3954; WAN024FB9; Start 98; Stop 122
taaacttgttgtaccttagcttcgc

SEQ ID NO: 368455 - DNA, 25 bp, Artificial
  probe
  misc_feature (1)..(25): SEQ ID NO: 3954; WAN024FB9; Start 15; Stop 39
actttcatcccagacttttccttat

SEQ ID NO: 368456 - DNA, 25 bp, Artificial
  probe
  misc_feature (1)..(25): SEQ ID NO: 3954; WAN024FB9; Start 14; Stop 38
aactttcatcccagacttttcctta

SEQ ID NO: 368457 - DNA, 25 bp, Artificial
  probe
  misc_feature (1)..(25): SEQ ID NO: 3954; WAN024FB9; Start 16; Stop 40
ctttcatcccagacttttccttatt

SEQ ID NO: 368458 - DNA, 25 bp, Artificial
  probe
  misc_feature (1)..(25): SEQ ID NO: 3954; WAN024FB9; Start 13; Stop 37
gaactttcatcccagacttttcctt

SEQ ID NO: 368459 - DNA, 25 bp, Artificial
  probe
  misc_feature (1)..(25): SEQ ID NO: 3954; WAN024FB9; Start 17; Stop 41
tttcatcccagacttttccttattt

SEQ ID NO: 368460 - DNA, 25 bp, Artificial
  probe
  misc_feature (1)..(25): SEQ ID NO: 3954; WAN024FB9; Start 100; Stop 124
aacttgttgtaccttagcttcgctt

SEQ ID NO: 368461 - DNA, 25 bp, Artificial
  probe
  misc_feature (1)..(25): SEQ ID NO: 3954; WAN024FB9; Start 91; Stop 115
ttggtggtaaacttgttgtacctta

SEQ ID NO: 368462 - DNA, 25 bp, Artificial
  probe
  misc_feature (1)..(25): SEQ ID NO: 3954; WAN024FB9; Start 88; Stop 112
gatttggtggtaaacttgttgtacc

SEQ ID NO: 368463 - DNA, 25 bp, Artificial
  probe
  misc_feature (1)..(25): SEQ ID NO: 3954; WAN024FB9; Start 92; Stop 116
tggtggtaaacttgttgtaccttag

SEQ ID NO: 368464 - DNA, 25 bp, Artificial
  probe
  misc_feature (1)..(25): SEQ ID NO: 3954; WAN024FB9; Start 89; Stop 113
atttggtggtaaacttgttgtacct

SEQ ID NO: 368465 - DNA, 25 bp, Artificial
  probe
  misc_feature (1)..(25): SEQ ID NO: 3954; WAN024FB9; Start 18; Stop 42
ttcatcccagacttttccttattta

SEQ ID NO: 368466 - DNA, 25 bp, Artificial
  probe
  misc_feature (1)..(25): SEQ ID NO: 3954; WAN024FB9; Start 82; Stop 106
gcggatgatttggtggtaaacttgt

SEQ ID NO: 368467 - DNA, 25 bp, Artificial
  probe
  misc_feature (1)..(25): SEQ ID NO: 3954; WAN024FB9; Start 90; Stop 114
tttggtggtaaacttgttgtacctt

SEQ ID NO: 368468 - DNA, 25 bp, Artificial
  probe
  misc_feature (1)..(25): SEQ ID NO: 3954; WAN024FB9; Start 19; Stop 43
tcatcccagacttttccttatttat

SEQ ID NO: 368469 - DNA, 25 bp, Artificial
  probe
  misc_feature (1)..(25): SEQ ID NO: 3954; WAN024FB9; Start 96; Stop 120
ggtaaacttgttgtaccttagcttc

SEQ ID NO: 368470 - DNA, 25 bp, Artificial
  probe
  misc_feature (1)..(25): SEQ ID NO: 3954; WAN024FB9; Start 95; Stop 119
tggtaaacttgttgtaccttagctt

SEQ ID NO: 368471 - DNA, 25 bp, Artificial
  probe
  misc_feature (1)..(25): SEQ ID NO: 3954; WAN024FB9; Start 101; Stop 125
acttgttgtaccttagcttcgcttg

SEQ ID NO: 368472 - DNA, 25 bp, Artificial
  probe
  misc_feature (1)..(25): SEQ ID NO: 3954; WAN024FB9; Start 93; Stop 117
ggtggtaaacttgttgtaccttagc

SEQ ID NO: 368473 - DNA, 25 bp, Artificial
  probe
  misc_feature (1)..(25): SEQ ID NO: 3954; WAN024FB9; Start 94; Stop 118
gtggtaaacttgttgtaccttagct

SEQ ID NO: 368474 - DNA, 25 bp, Artificial
  probe
  misc_feature (1)..(25): SEQ ID NO: 3954; WAN024FB9; Start 148; Stop 172
aagagtacgaactgcttcagcattc

SEQ ID NO: 368475 - DNA, 25 bp, Artificial
  probe
  misc_feature (1)..(25): SEQ ID NO: 3954; WAN024FB9; Start 20; Stop 44
catcccagacttttccttatttatt

SEQ ID NO: 368476 - DNA, 25 bp, Artificial
  probe
  misc_feature (1)..(25): SEQ ID NO: 3954; WAN024FB9; Start 81; Stop 105
ggcggatgatttggtggtaaacttg

SEQ ID NO: 368477 - DNA, 25 bp, Artificial
  probe
  misc_feature (1)..(25): SEQ ID NO: 3954; WAN024FB9; Start 143; Stop 167
ctcaaaagagtacgaactgcttcag

SEQ ID NO: 368478 - DNA, 25 bp, Artificial
  probe
  misc_feature (1)..(25): SEQ ID NO: 3954; WAN024FB9; Start 150; Stop 174
gagtacgaactgcttcagcattcaa

SEQ ID NO: 368479 - DNA, 25 bp, Artificial
  probe
  misc_feature (1)..(25): SEQ ID NO: 3954; WAN024FB9; Start 1; Stop 25
gtgagaagtctggaactttcatccc

SEQ ID NO: 368480 - DNA, 25 bp, Artificial
  probe
  misc_feature (1)..(25): SEQ ID NO: 3954; WAN024FB9; Start 102; Stop 126
cttgttgtaccttagcttcgcttgg

SEQ ID NO: 368481 - DNA, 25 bp, Artificial
  probe
  misc_feature (1)..(25): SEQ ID NO: 3955; WAN024FJY; Start 216; Stop 240
taaggaagaagttcaggcttgttat

SEQ ID NO: 368482 - DNA, 25 bp, Artificial
  probe
  misc_feature (1)..(25): SEQ ID NO: 3955; WAN024FJY; Start 215; Stop 239
ataaggaagaagttcaggcttgtta

SEQ ID NO: 368483 - DNA, 25 bp, Artificial
  probe
  misc_feature (1)..(25): SEQ ID NO: 3955; WAN024FJY; Start 214; Stop 238
aataaggaagaagttcaggcttgtt

SEQ ID NO: 368484 - DNA, 25 bp, Artificial
  probe
  misc_feature (1)..(25): SEQ ID NO: 3955; WAN024FJY; Start 217; Stop 241
aaggaagaagttcaggcttgttatg

SEQ ID NO: 368485 - DNA, 25 bp, Artificial
  probe
  misc_feature (1)..(25): SEQ ID NO: 3955; WAN024FJY; Start 220; Stop 244
gaagaagttcaggcttgttatgagg

SEQ ID NO: 368486 - DNA, 25 bp, Artificial
  probe
  misc_feature (1)..(25): SEQ ID NO: 3955; WAN024FJY; Start 219; Stop 243
ggaagaagttcaggcttgttatgag

SEQ ID NO: 368487 - DNA, 25 bp, Artificial
  probe
  misc_feature (1)..(25): SEQ ID NO: 3955; WAN024FJY; Start 218; Stop 242
aggaagaagttcaggcttgttatga

SEQ ID NO: 368488 - DNA, 25 bp, Artificial
  probe
  misc_feature (1)..(25): SEQ ID NO: 3955; WAN024FJY; Start 213; Stop 237
aaataaggaagaagttcaggcttgt

SEQ ID NO: 368489 - DNA, 25 bp, Artificial
  probe
  misc_feature (1)..(25): SEQ ID NO: 3955; WAN024FJY; Start 334; Stop 358
gatgggaacaatatagaggtggttt

SEQ ID NO: 368490 - DNA, 25 bp, Artificial
  probe
  misc_feature (1)..(25): SEQ ID NO: 3955; WAN024FJY; Start 327; Stop 351
tgacctggatgggaacaatatagag

SEQ ID NO: 368491 - DNA, 25 bp, Artificial
  probe
  misc_feature (1)..(25): SEQ ID NO: 3955; WAN024FJY; Start 335; Stop 359
atgggaacaatatagaggtggtttg

SEQ ID NO: 368492 - DNA, 25 bp, Artificial
  probe
  misc_feature (1)..(25): SEQ ID NO: 3955; WAN024FJY; Start 326; Stop 350
ttgacctggatgggaacaatataga

SEQ ID NO: 368493 - DNA, 25 bp, Artificial
  probe
  misc_feature (1)..(25): SEQ ID NO: 3955; WAN024FJY; Start 319; Stop 343
tttatgattgacctggatgggaaca

SEQ ID NO: 368494 - DNA, 25 bp, Artificial
  probe
  misc_feature (1)..(25): SEQ ID NO: 3955; WAN024FJY; Start 333; Stop 357
ggatgggaacaatatagaggtggtt

SEQ ID NO: 368495 - DNA, 25 bp, Artificial
  probe
  misc_feature (1)..(25): SEQ ID NO: 3955; WAN024FJY; Start 221; Stop 245
aagaagttcaggcttgttatgaggc

SEQ ID NO: 368496 - DNA, 25 bp, Artificial
  probe
  misc_feature (1)..(25): SEQ ID NO: 3955; WAN024FJY; Start 331; Stop 355
ctggatgggaacaatatagaggtgg

SEQ ID NO: 368497 - DNA, 25 bp, Artificial
  probe
  misc_feature (1)..(25): SEQ ID NO: 3955; WAN024FJY; Start 320; Stop 344
ttatgattgacctggatgggaacaa

SEQ ID NO: 368498 - DNA, 25 bp, Artificial
  probe
  misc_feature (1)..(25): SEQ ID NO: 3955; WAN024FJY; Start 341; Stop 365
acaatatagaggtggtttgccataa

SEQ ID NO: 368499 - DNA, 25 bp, Artificial
  probe
  misc_feature (1)..(25): SEQ ID NO: 3955; WAN024FJY; Start 340; Stop 364
aacaatatagaggtggtttgccata

SEQ ID NO: 368500 - DNA, 25 bp, Artificial
  probe
  misc_feature (1)..(25): SEQ ID NO: 3955; WAN024FJY; Start 347; Stop 371
tagaggtggtttgccataaagaata

SEQ ID NO: 368501 - DNA, 25 bp, Artificial
  probe
  misc_feature (1)..(25): SEQ ID NO: 3955; WAN024FJY; Start 346; Stop 370
atagaggtggtttgccataaagaat

SEQ ID NO: 368502 - DNA, 25 bp, Artificial
  probe
  misc_feature (1)..(25): SEQ ID NO: 3955; WAN024FJY; Start 345; Stop 369
tatagaggtggtttgccataaagaa

SEQ ID NO: 368503 - DNA, 25 bp, Artificial
  probe
  misc_feature (1)..(25): SEQ ID NO: 3955; WAN024FJY; Start 349; Stop 373
gaggtggtttgccataaagaataac

SEQ ID NO: 368504 - DNA, 25 bp, Artificial
  probe
  misc_feature (1)..(25): SEQ ID NO: 3955; WAN024FJY; Start 348; Stop 372
agaggtggtttgccataaagaataa

SEQ ID NO: 368505 - DNA, 25 bp, Artificial
  probe
  misc_feature (1)..(25): SEQ ID NO: 3955; WAN024FJY; Start 344; Stop 368
atatagaggtggtttgccataaaga

SEQ ID NO: 368506 - DNA, 25 bp, Artificial
  probe
  misc_feature (1)..(25): SEQ ID NO: 3955; WAN024FJY; Start 350; Stop 374
aggtggtttgccataaagaataact

SEQ ID NO: 368507 - DNA, 25 bp, Artificial
  probe
  misc_feature (1)..(25): SEQ ID NO: 3955; WAN024FJY; Start 351; Stop 375
ggtggtttgccataaagaataacta

SEQ ID NO: 368508 - DNA, 25 bp, Artificial
  probe
  misc_feature (1)..(25): SEQ ID NO: 3955; WAN024FJY; Start 332; Stop 356
tggatgggaacaatatagaggtggt

SEQ ID NO: 368509 - DNA, 25 bp, Artificial
  probe
  misc_feature (1)..(25): SEQ ID NO: 3955; WAN024FJY; Start 342; Stop 366
caatatagaggtggtttgccataaa

SEQ ID NO: 368510 - DNA, 25 bp, Artificial
  probe
  misc_feature (1)..(25): SEQ ID NO: 3955; WAN024FJY; Start 339; Stop 363
gaacaatatagaggtggtttgccat

SEQ ID NO: 368511 - DNA, 25 bp, Artificial
  probe
  misc_feature (1)..(25): SEQ ID NO: 3955; WAN024FJY; Start 343; Stop 367
aatatagaggtggtttgccataaag

SEQ ID NO: 368512 - DNA, 25 bp, Artificial
  probe
  misc_feature (1)..(25): SEQ ID NO: 3955; WAN024FJY; Start 328; Stop 352
gacctggatgggaacaatatagagg

SEQ ID NO: 368513 - DNA, 25 bp, Artificial
  probe
  misc_feature (1)..(25): SEQ ID NO: 3955; WAN024FJY; Start 325; Stop 349
attgacctggatgggaacaatatag

SEQ ID NO: 368514 - DNA, 25 bp, Artificial
  probe
  misc_feature (1)..(25): SEQ ID NO: 3956; WAN024CH5; Start 53; Stop 77
ttaatggagaatctgtcgcctactt

SEQ ID NO: 368515 - DNA, 25 bp, Artificial
  probe
  misc_feature (1)..(25): SEQ ID NO: 3956; WAN024CH5; Start 54; Stop 78
taatggagaatctgtcgcctacttg

SEQ ID NO: 368516 - DNA, 25 bp, Artificial
  probe
  misc_feature (1)..(25): SEQ ID NO: 3956; WAN024CH5; Start 204; Stop 228
aatcgactcaatcaagccatcaatt

SEQ ID NO: 368517 - DNA, 25 bp, Artificial
  probe
  misc_feature (1)..(25): SEQ ID NO: 3956; WAN024CH5; Start 56; Stop 80
atggagaatctgtcgcctacttgta

SEQ ID NO: 368518 - DNA, 25 bp, Artificial
  probe
  misc_feature (1)..(25): SEQ ID NO: 3956; WAN024CH5; Start 203; Stop 227
caatcgactcaatcaagccatcaat

SEQ ID NO: 368519 - DNA, 25 bp, Artificial
  probe
  misc_feature (1)..(25): SEQ ID NO: 3956; WAN024CH5; Start 51; Stop 75
ctttaatggagaatctgtcgcctac

SEQ ID NO: 368520 - DNA, 25 bp, Artificial
  probe
  misc_feature (1)..(25): SEQ ID NO: 3956; WAN024CH5; Start 52; Stop 76
tttaatggagaatctgtcgcctact

SEQ ID NO: 368521 - DNA, 25 bp, Artificial
  probe
  misc_feature (1)..(25): SEQ ID NO: 3956; WAN024CH5; Start 57; Stop 81
tggagaatctgtcgcctacttgtaa

SEQ ID NO: 368522 - DNA, 25 bp, Artificial
  probe
  misc_feature (1)..(25): SEQ ID NO: 3956; WAN024CH5; Start 97; Stop 121
tccaaacttctacgatagtcttctt

SEQ ID NO: 368523 - DNA, 25 bp, Artificial
  probe
  misc_feature (1)..(25): SEQ ID NO: 3956; WAN024CH5; Start 96; Stop 120
ttccaaacttctacgatagtcttct

SEQ ID NO: 368524 - DNA, 25 bp, Artificial
  probe
  misc_feature (1)..(25): SEQ ID NO: 3956; WAN024CH5; Start 94; Stop 118
tcttccaaacttctacgatagtctt

SEQ ID NO: 368525 - DNA, 25 bp, Artificial
  probe
  misc_feature (1)..(25): SEQ ID NO: 3956; WAN024CH5; Start 93; Stop 117
ttcttccaaacttctacgatagtct

SEQ ID NO: 368526 - DNA, 25 bp, Artificial
  probe
  misc_feature (1)..(25): SEQ ID NO: 3956; WAN024CH5; Start 50; Stop 74
tctttaatggagaatctgtcgccta

SEQ ID NO: 368527 - DNA, 25 bp, Artificial
  probe
  misc_feature (1)..(25): SEQ ID NO: 3956; WAN024CH5; Start 98; Stop 122
ccaaacttctacgatagtcttcttc

SEQ ID NO: 368528 - DNA, 25 bp, Artificial
  probe
  misc_feature (1)..(25): SEQ ID NO: 3956; WAN024CH5; Start 95; Stop 119
cttccaaacttctacgatagtcttc

SEQ ID NO: 368529 - DNA, 25 bp, Artificial
  probe
  misc_feature (1)..(25): SEQ ID NO: 3956; WAN024CH5; Start 199; Stop 223
ataccaatcgactcaatcaagccat

SEQ ID NO: 368530 - DNA, 25 bp, Artificial
  probe
  misc_feature (1)..(25): SEQ ID NO: 3956; WAN024CH5; Start 92; Stop 116
tttcttccaaacttctacgatagtc

SEQ ID NO: 368531 - DNA, 25 bp, Artificial
  probe
  misc_feature (1)..(25): SEQ ID NO: 3956; WAN024CH5; Start 58; Stop 82
ggagaatctgtcgcctacttgtaaa

SEQ ID NO: 368532 - DNA, 25 bp, Artificial
  probe
  misc_feature (1)..(25): SEQ ID NO: 3956; WAN024CH5; Start 55; Stop 79
aatggagaatctgtcgcctacttgt

SEQ ID NO: 368533 - DNA, 25 bp, Artificial
  probe
  misc_feature (1)..(25): SEQ ID NO: 3956; WAN024CH5; Start 200; Stop 224
taccaatcgactcaatcaagccatc

SEQ ID NO: 368534 - DNA, 25 bp, Artificial
  probe
  misc_feature (1)..(25): SEQ ID NO: 3956; WAN024CH5; Start 198; Stop 222
gataccaatcgactcaatcaagcca

SEQ ID NO: 368535 - DNA, 25 bp, Artificial
  probe
  misc_feature (1)..(25): SEQ ID NO: 3956; WAN024CH5; Start 99; Stop 123
caaacttctacgatagtcttcttcg

SEQ ID NO: 368536 - DNA, 25 bp, Artificial
  probe
  misc_feature (1)..(25): SEQ ID NO: 3956; WAN024CH5; Start 202; Stop 226
ccaatcgactcaatcaagccatcaa

SEQ ID NO: 368537 - DNA, 25 bp, Artificial
  probe
  misc_feature (1)..(25): SEQ ID NO: 3956; WAN024CH5; Start 88; Stop 112
gtcttttcttccaaacttctacgat

SEQ ID NO: 368538 - DNA, 25 bp, Artificial
  probe
  misc_feature (1)..(25): SEQ ID NO: 3956; WAN024CH5; Start 48; Stop 72
tttctttaatggagaatctgtcgcc

SEQ ID NO: 368539 - DNA, 25 bp, Artificial
  probe
  misc_feature (1)..(25): SEQ ID NO: 3956; WAN024CH5; Start 87; Stop 111
ggtcttttcttccaaacttctacga

SEQ ID NO: 368540 - DNA, 25 bp, Artificial
  probe
  misc_feature (1)..(25): SEQ ID NO: 3956; WAN024CH5; Start 59; Stop 83
gagaatctgtcgcctacttgtaaaa

SEQ ID NO: 368541 - DNA, 25 bp, Artificial
  probe
  misc_feature (1)..(25): SEQ ID NO: 3956; WAN024CH5; Start 49; Stop 73
ttctttaatggagaatctgtcgcct

SEQ ID NO: 368542 - DNA, 25 bp, Artificial
  probe
  misc_feature (1)..(25): SEQ ID NO: 3956; WAN024CH5; Start 89; Stop 113
tcttttcttccaaacttctacgata

SEQ ID NO: 368543 - DNA, 25 bp, Artificial
  probe
  misc_feature (1)..(25): SEQ ID NO: 3956; WAN024CH5; Start 90; Stop 114
cttttcttccaaacttctacgatag

SEQ ID NO: 368544 - DNA, 25 bp, Artificial
  probe
  misc_feature (1)..(25): SEQ ID NO: 3956; WAN024CH5; Start 205; Stop 229
atcgactcaatcaagccatcaattg

SEQ ID NO: 368545 - DNA, 25 bp, Artificial
  probe
  misc_feature (1)..(25): SEQ ID NO: 3956; WAN024CH5; Start 91; Stop 115
ttttcttccaaacttctacgatagt

SEQ ID NO: 368546 - DNA, 25 bp, Artificial
  probe
  misc_feature (1)..(25): SEQ ID NO: 3956; WAN024CH5; Start 139; Stop 163
gttgggtagtcaccgtcaaagtaag

SEQ ID NO: 368547 - DNA, 25 bp, Artificial
  probe
  misc_feature (1)..(25): SEQ ID NO: 3957; WAN024F5I; Start 157; Stop 181
aataccaacattgtaatcgtcctca

SEQ ID NO: 368548 - DNA, 25 bp, Artificial
  probe
  misc_feature (1)..(25): SEQ ID NO: 3957; WAN024F5I; Start 158; Stop 182
ataccaacattgtaatcgtcctcac

SEQ ID NO: 368549 - DNA, 25 bp, Artificial
  probe
  misc_feature (1)..(25): SEQ ID NO: 3957; WAN024F5I; Start 132; Stop 156
tcactgcgacttcaagattattagc

SEQ ID NO: 368550 - DNA, 25 bp, Artificial
  probe
  misc_feature (1)..(25): SEQ ID NO: 3957; WAN024F5I; Start 137; Stop 161
gcgacttcaagattattagcaatac

SEQ ID NO: 368551 - DNA, 25 bp, Artificial
  probe
  misc_feature (1)..(25): SEQ ID NO: 3957; WAN024F5I; Start 131; Stop 155
gtcactgcgacttcaagattattag

SEQ ID NO: 368552 - DNA, 25 bp, Artificial
  probe
  misc_feature (1)..(25): SEQ ID NO: 3957; WAN024F5I; Start 282; Stop 306
ctgttacgatgtggttgagttcttg

SEQ ID NO: 368553 - DNA, 25 bp, Artificial
  probe
  misc_feature (1)..(25): SEQ ID NO: 3957; WAN024F5I; Start 281; Stop 305
tctgttacgatgtggttgagttctt

SEQ ID NO: 368554 - DNA, 25 bp, Artificial
  probe
  misc_feature (1)..(25): SEQ ID NO: 3957; WAN024F5I; Start 280; Stop 304
ttctgttacgatgtggttgagttct

SEQ ID NO: 368555 - DNA, 25 bp, Artificial
  probe
  misc_feature (1)..(25): SEQ ID NO: 3957; WAN024F5I; Start 279; Stop 303
gttctgttacgatgtggttgagttc

SEQ ID NO: 368556 - DNA, 25 bp, Artificial
  probe
  misc_feature (1)..(25): SEQ ID NO: 3957; WAN024F5I; Start 87; Stop 111
attcaggaccagcattcttcatcat

SEQ ID NO: 368557 - DNA, 25 bp, Artificial
  probe
  misc_feature (1)..(25): SEQ ID NO: 3957; WAN024F5I; Start 138; Stop 162
cgacttcaagattattagcaatacc

SEQ ID NO: 368558 - DNA, 25 bp, Artificial
  probe
  misc_feature (1)..(25): SEQ ID NO: 3957; WAN024F5I; Start 86; Stop 110
aattcaggaccagcattcttcatca

SEQ ID NO: 368559 - DNA, 25 bp, Artificial
  probe
  misc_feature (1)..(25): SEQ ID NO: 3957; WAN024F5I; Start 278; Stop 302
tgttctgttacgatgtggttgagtt

SEQ ID NO: 368560 - DNA, 25 bp, Artificial
  probe
  misc_feature (1)..(25): SEQ ID NO: 3957; WAN024F5I; Start 159; Stop 183
taccaacattgtaatcgtcctcacc

SEQ ID NO: 368561 - DNA, 25 bp, Artificial
  probe
  misc_feature (1)..(25): SEQ ID NO: 3957; WAN024F5I; Start 156; Stop 180
caataccaacattgtaatcgtcctc

SEQ ID NO: 368562 - DNA, 25 bp, Artificial
  probe
  misc_feature (1)..(25): SEQ ID NO: 3957; WAN024F5I; Start 198; Stop 222
tatggacaatacctgtaccagagtc

SEQ ID NO: 368563 - DNA, 25 bp, Artificial
  probe
  misc_feature (1)..(25): SEQ ID NO: 3957; WAN024F5I; Start 153; Stop 177
tagcaataccaacattgtaatcgtc

SEQ ID NO: 368564 - DNA, 25 bp, Artificial
  probe
  misc_feature (1)..(25): SEQ ID NO: 3957; WAN024F5I; Start 197; Stop 221
gtatggacaatacctgtaccagagt

SEQ ID NO: 368565 - DNA, 25 bp, Artificial
  probe
  misc_feature (1)..(25): SEQ ID NO: 3957; WAN024F5I; Start 196; Stop 220
tgtatggacaatacctgtaccagag

SEQ ID NO: 368566 - DNA, 25 bp, Artificial
  probe
  misc_feature (1)..(25): SEQ ID NO: 3957; WAN024F5I; Start 195; Stop 219
ctgtatggacaatacctgtaccaga

SEQ ID NO: 368567 - DNA, 25 bp, Artificial
  probe
  misc_feature (1)..(25): SEQ ID NO: 3957; WAN024F5I; Start 152; Stop 176
ttagcaataccaacattgtaatcgt

SEQ ID NO: 368568 - DNA, 25 bp, Artificial
  probe
  misc_feature (1)..(25): SEQ ID NO: 3957; WAN024F5I; Start 240; Stop 264
caagaattaccaactcttctacagc

SEQ ID NO: 368569 - DNA, 25 bp, Artificial
  probe
  misc_feature (1)..(25): SEQ ID NO: 3957; WAN024F5I; Start 238; Stop 262
accaagaattaccaactcttctaca

SEQ ID NO: 368570 - DNA, 25 bp, Artificial
  probe
  misc_feature (1)..(25): SEQ ID NO: 3957; WAN024F5I; Start 283; Stop 307
tgttacgatgtggttgagttcttgg

SEQ ID NO: 368571 - DNA, 25 bp, Artificial
  probe
  misc_feature (1)..(25): SEQ ID NO: 3957; WAN024F5I; Start 277; Stop 301
gtgttctgttacgatgtggttgagt

SEQ ID NO: 368572 - DNA, 25 bp, Artificial
  probe
  misc_feature (1)..(25): SEQ ID NO: 3957; WAN024F5I; Start 202; Stop 226
gacaatacctgtaccagagtcagtc

SEQ ID NO: 368573 - DNA, 25 bp, Artificial
  probe
  misc_feature (1)..(25): SEQ ID NO: 3957; WAN024F5I; Start 237; Stop 261
caccaagaattaccaactcttctac

SEQ ID NO: 368574 - DNA, 25 bp, Artificial
  probe
  misc_feature (1)..(25): SEQ ID NO: 3957; WAN024F5I; Start 236; Stop 260
tcaccaagaattaccaactcttcta

SEQ ID NO: 368575 - DNA, 25 bp, Artificial
  probe
  misc_feature (1)..(25): SEQ ID NO: 3957; WAN024F5I; Start 235; Stop 259
gtcaccaagaattaccaactcttct

SEQ ID NO: 368576 - DNA, 25 bp, Artificial
  probe
  misc_feature (1)..(25): SEQ ID NO: 3957; WAN024F5I; Start 206; Stop 230
atacctgtaccagagtcagtcgtaa

SEQ ID NO: 368577 - DNA, 25 bp, Artificial
  probe
  misc_feature (1)..(25): SEQ ID NO: 3957; WAN024F5I; Start 205; Stop 229
aatacctgtaccagagtcagtcgta

SEQ ID NO: 368578 - DNA, 25 bp, Artificial
  probe
  misc_feature (1)..(25): SEQ ID NO: 3957; WAN024F5I; Start 85; Stop 109
aaattcaggaccagcattcttcatc

SEQ ID NO: 368579 - DNA, 25 bp, Artificial
  probe
  misc_feature (1)..(25): SEQ ID NO: 3957; WAN024F5I; Start 239; Stop 263
ccaagaattaccaactcttctacag

SEQ ID NO: 368580 - DNA, 25 bp, Artificial
  probe
  misc_feature (1)..(25): SEQ ID NO: 3958; WAN024COT; Start 25; Stop 49
gacatattctcagccgtagttctaa

SEQ ID NO: 368581 - DNA, 25 bp, Artificial
  probe
  misc_feature (1)..(25): SEQ ID NO: 3958; WAN024COT; Start 19; Stop 43
aatcttgacatattctcagccgtag

SEQ ID NO: 368582 - DNA, 25 bp, Artificial
  probe
  misc_feature (1)..(25): SEQ ID NO: 3958; WAN024COT; Start 24; Stop 48
tgacatattctcagccgtagttcta

SEQ ID NO: 368583 - DNA, 25 bp, Artificial
  probe
  misc_feature (1)..(25): SEQ ID NO: 3958; WAN024COT; Start 22; Stop 46
cttgacatattctcagccgtagttc

SEQ ID NO: 368584 - DNA, 25 bp, Artificial
  probe
  misc_feature (1)..(25): SEQ ID NO: 3958; WAN024COT; Start 20; Stop 44
atcttgacatattctcagccgtagt

SEQ ID NO: 368585 - DNA, 25 bp, Artificial
  probe
  misc_feature (1)..(25): SEQ ID NO: 3958; WAN024COT; Start 23; Stop 47
ttgacatattctcagccgtagttct

SEQ ID NO: 368586 - DNA, 25 bp, Artificial
  probe
  misc_feature (1)..(25): SEQ ID NO: 3958; WAN024COT; Start 21; Stop 45
tcttgacatattctcagccgtagtt

SEQ ID NO: 368587 - DNA, 25 bp, Artificial
  probe
  misc_feature (1)..(25): SEQ ID NO: 3958; WAN024COT; Start 7; Stop 31
gtccaggtaaggaatcttgacatat

SEQ ID NO: 368588 - DNA, 25 bp, Artificial
  probe
  misc_feature (1)..(25): SEQ ID NO: 3958; WAN024COT; Start 6; Stop 30
agtccaggtaaggaatcttgacata

SEQ ID NO: 368589 - DNA, 25 bp, Artificial
  probe
  misc_feature (1)..(25): SEQ ID NO: 3958; WAN024COT; Start 8; Stop 32
tccaggtaaggaatcttgacatatt

SEQ ID NO: 368590 - DNA, 25 bp, Artificial
  probe
  misc_feature (1)..(25): SEQ ID NO: 3958; WAN024COT; Start 18; Stop 42
gaatcttgacatattctcagccgta

SEQ ID NO: 368591 - DNA, 25 bp, Artificial
  probe
  misc_feature (1)..(25): SEQ ID NO: 3958; WAN024COT; Start 15; Stop 39
aaggaatcttgacatattctcagcc

SEQ ID NO: 368592 - DNA, 25 bp, Artificial
  probe
  misc_feature (1)..(25): SEQ ID NO: 3958; WAN024COT; Start 34; Stop 58
tcagccgtagttctaaatccaaata

SEQ ID NO: 368593 - DNA, 25 bp, Artificial
  probe
  misc_feature (1)..(25): SEQ ID NO: 3958; WAN024COT; Start 29; Stop 53
tattctcagccgtagttctaaatcc

SEQ ID NO: 368594 - DNA, 25 bp, Artificial
  probe
  misc_feature (1)..(25): SEQ ID NO: 3958; WAN024COT; Start 9; Stop 33
ccaggtaaggaatcttgacatattc

SEQ ID NO: 368595 - DNA, 25 bp, Artificial
  probe
  misc_feature (1)..(25): SEQ ID NO: 3958; WAN024COT; Start 35; Stop 59
cagccgtagttctaaatccaaatag

SEQ ID NO: 368596 - DNA, 25 bp, Artificial
  probe
  misc_feature (1)..(25): SEQ ID NO: 3958; WAN024COT; Start 26; Stop 50
acatattctcagccgtagttctaaa

SEQ ID NO: 368597 - DNA, 25 bp, Artificial
  probe
  misc_feature (1)..(25): SEQ ID NO: 3958; WAN024COT; Start 33; Stop 57
ctcagccgtagttctaaatccaaat

SEQ ID NO: 368598 - DNA, 25 bp, Artificial
  probe
  misc_feature (1)..(25): SEQ ID NO: 3958; WAN024COT; Start 5; Stop 29
gagtccaggtaaggaatcttgacat

SEQ ID NO: 368599 - DNA, 25 bp, Artificial
  probe
  misc_feature (1)..(25): SEQ ID NO: 3958; WAN024COT; Start 14; Stop 38
taaggaatcttgacatattctcagc

SEQ ID NO: 368600 - DNA, 25 bp, Artificial
  probe
  misc_feature (1)..(25): SEQ ID NO: 3958; WAN024COT; Start 30; Stop 54
attctcagccgtagttctaaatcca

SEQ ID NO: 368601 - DNA, 25 bp, Artificial
  probe
  misc_feature (1)..(25): SEQ ID NO: 3958; WAN024COT; Start 27; Stop 51
catattctcagccgtagttctaaat

SEQ ID NO: 368602 - DNA, 25 bp, Artificial
  probe
  misc_feature (1)..(25): SEQ ID NO: 3958; WAN024COT; Start 3; Stop 27
gagagtccaggtaaggaatcttgac

SEQ ID NO: 368603 - DNA, 25 bp, Artificial
  probe
  misc_feature (1)..(25): SEQ ID NO: 3958; WAN024COT; Start 12; Stop 36
ggtaaggaatcttgacatattctca

SEQ ID NO: 368604 - DNA, 25 bp, Artificial
  probe
  misc_feature (1)..(25): SEQ ID NO: 3958; WAN024COT; Start 10; Stop 34
caggtaaggaatcttgacatattct

SEQ ID NO: 368605 - DNA, 25 bp, Artificial
  probe
  misc_feature (1)..(25): SEQ ID NO: 3958; WAN024COT; Start 81; Stop 105
atttgctaaagcgattggttcattc

SEQ ID NO: 368606 - DNA, 25 bp, Artificial
  probe
  misc_feature (1)..(25): SEQ ID NO: 3958; WAN024COT; Start 32; Stop 56
tctcagccgtagttctaaatccaaa

SEQ ID NO: 368607 - DNA, 25 bp, Artificial
  probe
  misc_feature (1)..(25): SEQ ID NO: 3958; WAN024COT; Start 31; Stop 55
ttctcagccgtagttctaaatccaa

SEQ ID NO: 368608 - DNA, 25 bp, Artificial
  probe
  misc_feature (1)..(25): SEQ ID NO: 3958; WAN024COT; Start 28; Stop 52
atattctcagccgtagttctaaatc

SEQ ID NO: 368609 - DNA, 25 bp, Artificial
  probe
  misc_feature (1)..(25): SEQ ID NO: 3958; WAN024COT; Start 1; Stop 25
gtgagagtccaggtaaggaatcttg

SEQ ID NO: 368610 - DNA, 25 bp, Artificial
  probe
  misc_feature (1)..(25): SEQ ID NO: 3958; WAN024COT; Start 80; Stop 104
catttgctaaagcgattggttcatt

SEQ ID NO: 368611 - DNA, 25 bp, Artificial
  probe
  misc_feature (1)..(25): SEQ ID NO: 3958; WAN024COT; Start 11; Stop 35
aggtaaggaatcttgacatattctc

SEQ ID NO: 368612 - DNA, 25 bp, Artificial
  probe
  misc_feature (1)..(25): SEQ ID NO: 3958; WAN024COT; Start 2; Stop 26
tgagagtccaggtaaggaatcttga

SEQ ID NO: 368613 - DNA, 25 bp, Artificial
  probe
  misc_feature (1)..(25): SEQ ID NO: 3959; WAN024A62; Start 1; Stop 25
gtgagattggcatatcagactacta

SEQ ID NO: 368614 - DNA, 25 bp, Artificial
  probe
  misc_feature (1)..(25): SEQ ID NO: 3959; WAN024A62; Start 2; Stop 26
tgagattggcatatcagactactaa

SEQ ID NO: 368615 - DNA, 25 bp, Artificial
  probe
  misc_feature (1)..(25): SEQ ID NO: 3959; WAN024A62; Start 3; Stop 27
gagattggcatatcagactactaaa

SEQ ID NO: 368616 - DNA, 25 bp, Artificial
  probe
  misc_feature (1)..(25): SEQ ID NO: 3959; WAN024A62; Start 4; Stop 28
agattggcatatcagactactaaag

SEQ ID NO: 368617 - DNA, 25 bp, Artificial
  probe
  misc_feature (1)..(25): SEQ ID NO: 3959; WAN024A62; Start 5; Stop 29
gattggcatatcagactactaaagt

SEQ ID NO: 368618 - DNA, 25 bp, Artificial
  probe
  misc_feature (1)..(25): SEQ ID NO: 3959; WAN024A62; Start 57; Stop 81
agttagctgggaaaggaagatattt

SEQ ID NO: 368619 - DNA, 25 bp, Artificial
  probe
  misc_feature (1)..(25): SEQ ID NO: 3959; WAN024A62; Start 55; Stop 79
ctagttagctgggaaaggaagatat

SEQ ID NO: 368620 - DNA, 25 bp, Artificial
  probe
  misc_feature (1)..(25): SEQ ID NO: 3959; WAN024A62; Start 56; Stop 80
tagttagctgggaaaggaagatatt

SEQ ID NO: 368621 - DNA, 25 bp, Artificial
  probe
  misc_feature (1)..(25): SEQ ID NO: 3959; WAN024A62; Start 31; Stop 55
ttgagtttgttaggattttagcgac

SEQ ID NO: 368622 - DNA, 25 bp, Artificial
  probe
  misc_feature (1)..(25): SEQ ID NO: 3959; WAN024A62; Start 30; Stop 54
attgagtttgttaggattttagcga

SEQ ID NO: 368623 - DNA, 25 bp, Artificial
  probe
  misc_feature (1)..(25): SEQ ID NO: 3959; WAN024A62; Start 8; Stop 32
tggcatatcagactactaaagtatt

SEQ ID NO: 368624 - DNA, 25 bp, Artificial
  probe
  misc_feature (1)..(25): SEQ ID NO: 3959; WAN024A62; Start 7; Stop 31
ttggcatatcagactactaaagtat

SEQ ID NO: 368625 - DNA, 25 bp, Artificial
  probe
  misc_feature (1)..(25): SEQ ID NO: 3959; WAN024A62; Start 6; Stop 30
attggcatatcagactactaaagta

SEQ ID NO: 368626 - DNA, 25 bp, Artificial
  probe
  misc_feature (1)..(25): SEQ ID NO: 3959; WAN024A62; Start 9; Stop 33
ggcatatcagactactaaagtattg

SEQ ID NO: 368627 - DNA, 25 bp, Artificial
  probe
  misc_feature (1)..(25): SEQ ID NO: 3959; WAN024A62; Start 54; Stop 78
actagttagctgggaaaggaagata

SEQ ID NO: 368628 - DNA, 25 bp, Artificial
  probe
  misc_feature (1)..(25): SEQ ID NO: 3959; WAN024A62; Start 32; Stop 56
tgagtttgttaggattttagcgact

SEQ ID NO: 368629 - DNA, 25 bp, Artificial
  probe
  misc_feature (1)..(25): SEQ ID NO: 3959; WAN024A62; Start 33; Stop 57
gagtttgttaggattttagcgacta

SEQ ID NO: 368630 - DNA, 25 bp, Artificial
  probe
  misc_feature (1)..(25): SEQ ID NO: 3959; WAN024A62; Start 16; Stop 40
cagactactaaagtattgagtttgt

SEQ ID NO: 368631 - DNA, 25 bp, Artificial
  probe
  misc_feature (1)..(25): SEQ ID NO: 3959; WAN024A62; Start 53; Stop 77
gactagttagctgggaaaggaagat

SEQ ID NO: 368632 - DNA, 25 bp, Artificial
  probe
  misc_feature (1)..(25): SEQ ID NO: 3959; WAN024A62; Start 34; Stop 58
agtttgttaggattttagcgactag

SEQ ID NO: 368633 - DNA, 25 bp, Artificial
  probe
  misc_feature (1)..(25): SEQ ID NO: 3959; WAN024A62; Start 29; Stop 53
tattgagtttgttaggattttagcg

SEQ ID NO: 368634 - DNA, 25 bp, Artificial
  probe
  misc_feature (1)..(25): SEQ ID NO: 3959; WAN024A62; Start 15; Stop 39
tcagactactaaagtattgagtttg

SEQ ID NO: 368635 - DNA, 25 bp, Artificial
  probe
  misc_feature (1)..(25): SEQ ID NO: 3959; WAN024A62; Start 10; Stop 34
gcatatcagactactaaagtattga

SEQ ID NO: 368636 - DNA, 25 bp, Artificial
  probe
  misc_feature (1)..(25): SEQ ID NO: 3959; WAN024A62; Start 17; Stop 41
agactactaaagtattgagtttgtt

SEQ ID NO: 368637 - DNA, 25 bp, Artificial
  probe
  misc_feature (1)..(25): SEQ ID NO: 3959; WAN024A62; Start 22; Stop 46
actaaagtattgagtttgttaggat

SEQ ID NO: 368638 - DNA, 25 bp, Artificial
  probe
  misc_feature (1)..(25): SEQ ID NO: 3959; WAN024A62; Start 28; Stop 52
gtattgagtttgttaggattttagc

SEQ ID NO: 368639 - DNA, 25 bp, Artificial
  probe
  misc_feature (1)..(25): SEQ ID NO: 3959; WAN024A62; Start 39; Stop 63
gttaggattttagcgactagttagc

SEQ ID NO: 368640 - DNA, 25 bp, Artificial
  probe
  misc_feature (1)..(25): SEQ ID NO: 3959; WAN024A62; Start 14; Stop 38
atcagactactaaagtattgagttt

SEQ ID NO: 368641 - DNA, 25 bp, Artificial
  probe
  misc_feature (1)..(25): SEQ ID NO: 3959; WAN024A62; Start 35; Stop 59
gtttgttaggattttagcgactagt

SEQ ID NO: 368642 - DNA, 25 bp, Artificial
  probe
  misc_feature (1)..(25): SEQ ID NO: 3959; WAN024A62; Start 52; Stop 76
cgactagttagctgggaaaggaaga

SEQ ID NO: 368643 - DNA, 25 bp, Artificial
  probe
  misc_feature (1)..(25): SEQ ID NO: 3959; WAN024A62; Start 21; Stop 45
tactaaagtattgagtttgttagga

SEQ ID NO: 368644 - DNA, 25 bp, Artificial
  probe
  misc_feature (1)..(25): SEQ ID NO: 3959; WAN024A62; Start 36; Stop 60
tttgttaggattttagcgactagtt

SEQ ID NO: 368645 - DNA, 25 bp, Artificial
  probe
  misc_feature (1)..(25): SEQ ID NO: 3959; WAN024A62; Start 47; Stop 71
tttagcgactagttagctgggaaag

SEQ ID NO: 368646 - DNA, 25 bp, Artificial
  probe
  misc_feature (1)..(25): SEQ ID NO: 3960; WAN024G3N; Start 40; Stop 64
attgtattctgctgctgccttattc

SEQ ID NO: 368647 - DNA, 25 bp, Artificial
  probe
  misc_feature (1)..(25): SEQ ID NO: 3960; WAN024G3N; Start 39; Stop 63
cattgtattctgctgctgccttatt

SEQ ID NO: 368648 - DNA, 25 bp, Artificial
  probe
  misc_feature (1)..(25): SEQ ID NO: 3960; WAN024G3N; Start 42; Stop 66
tgtattctgctgctgccttattcaa

SEQ ID NO: 368649 - DNA, 25 bp, Artificial
  probe
  misc_feature (1)..(25): SEQ ID NO: 3960; WAN024G3N; Start 41; Stop 65
ttgtattctgctgctgccttattca

SEQ ID NO: 368650 - DNA, 25 bp, Artificial
  probe
  misc_feature (1)..(25): SEQ ID NO: 3960; WAN024G3N; Start 38; Stop 62
acattgtattctgctgctgccttat

SEQ ID NO: 368651 - DNA, 25 bp, Artificial
  probe
  misc_feature (1)..(25): SEQ ID NO: 3960; WAN024G3N; Start 219; Stop 243
tcaattcatcattagacttacctga

SEQ ID NO: 368652 - DNA, 25 bp, Artificial
  probe
  misc_feature (1)..(25): SEQ ID NO: 3960; WAN024G3N; Start 112; Stop 136
gaggacatttgtttcttcagtgatg

SEQ ID NO: 368653 - DNA, 25 bp, Artificial
  probe
  misc_feature (1)..(25): SEQ ID NO: 3960; WAN024G3N; Start 115; Stop 139
gacatttgtttcttcagtgatggta

SEQ ID NO: 368654 - DNA, 25 bp, Artificial
  probe
  misc_feature (1)..(25): SEQ ID NO: 3960; WAN024G3N; Start 218; Stop 242
ttcaattcatcattagacttacctg

SEQ ID NO: 368655 - DNA, 25 bp, Artificial
  probe
  misc_feature (1)..(25): SEQ ID NO: 3960; WAN024G3N; Start 116; Stop 140
acatttgtttcttcagtgatggtat

SEQ ID NO: 368656 - DNA, 25 bp, Artificial
  probe
  misc_feature (1)..(25): SEQ ID NO: 3960; WAN024G3N; Start 111; Stop 135
cgaggacatttgtttcttcagtgat

SEQ ID NO: 368657 - DNA, 25 bp, Artificial
  probe
  misc_feature (1)..(25): SEQ ID NO: 3960; WAN024G3N; Start 113; Stop 137
aggacatttgtttcttcagtgatgg

SEQ ID NO: 368658 - DNA, 25 bp, Artificial
  probe
  misc_feature (1)..(25): SEQ ID NO: 3960; WAN024G3N; Start 44; Stop 68
tattctgctgctgccttattcaaag

SEQ ID NO: 368659 - DNA, 25 bp, Artificial
  probe
  misc_feature (1)..(25): SEQ ID NO: 3960; WAN024G3N; Start 43; Stop 67
gtattctgctgctgccttattcaaa

SEQ ID NO: 368660 - DNA, 25 bp, Artificial
  probe
  misc_feature (1)..(25): SEQ ID NO: 3960; WAN024G3N; Start 37; Stop 61
gacattgtattctgctgctgcctta

SEQ ID NO: 368661 - DNA, 25 bp, Artificial
  probe
  misc_feature (1)..(25): SEQ ID NO: 3960; WAN024G3N; Start 114; Stop 138
ggacatttgtttcttcagtgatggt

SEQ ID NO: 368662 - DNA, 25 bp, Artificial
  probe
  misc_feature (1)..(25): SEQ ID NO: 3960; WAN024G3N; Start 108; Stop 132
gaacgaggacatttgtttcttcagt

SEQ ID NO: 368663 - DNA, 25 bp, Artificial
  probe
  misc_feature (1)..(25): SEQ ID NO: 3960; WAN024G3N; Start 117; Stop 141
catttgtttcttcagtgatggtatt

SEQ ID NO: 368664 - DNA, 25 bp, Artificial
  probe
  misc_feature (1)..(25): SEQ ID NO: 3960; WAN024G3N; Start 109; Stop 133
aacgaggacatttgtttcttcagtg

SEQ ID NO: 368665 - DNA, 25 bp, Artificial
  probe
  misc_feature (1)..(25): SEQ ID NO: 3960; WAN024G3N; Start 222; Stop 246
attcatcattagacttacctgaacg

SEQ ID NO: 368666 - DNA, 25 bp, Artificial
  probe
  misc_feature (1)..(25): SEQ ID NO: 3960; WAN024G3N; Start 118; Stop 142
atttgtttcttcagtgatggtattt

SEQ ID NO: 368667 - DNA, 25 bp, Artificial
  probe
  misc_feature (1)..(25): SEQ ID NO: 3960; WAN024G3N; Start 110; Stop 134
acgaggacatttgtttcttcagtga

SEQ ID NO: 368668 - DNA, 25 bp, Artificial
  probe
  misc_feature (1)..(25): SEQ ID NO: 3960; WAN024G3N; Start 27; Stop 51
ctttcacagggacattgtattctgc

SEQ ID NO: 368669 - DNA, 25 bp, Artificial
  probe
  misc_feature (1)..(25): SEQ ID NO: 3960; WAN024G3N; Start 26; Stop 50
gctttcacagggacattgtattctg

SEQ ID NO: 368670 - DNA, 25 bp, Artificial
  probe
  misc_feature (1)..(25): SEQ ID NO: 3960; WAN024G3N; Start 24; Stop 48
ctgctttcacagggacattgtattc

SEQ ID NO: 368671 - DNA, 25 bp, Artificial
  probe
  misc_feature (1)..(25): SEQ ID NO: 3960; WAN024G3N; Start 102; Stop 126
cacagagaacgaggacatttgtttc

SEQ ID NO: 368672 - DNA, 25 bp, Artificial
  probe
  misc_feature (1)..(25): SEQ ID NO: 3960; WAN024G3N; Start 25; Stop 49
tgctttcacagggacattgtattct

SEQ ID NO: 368673 - DNA, 25 bp, Artificial
  probe
  misc_feature (1)..(25): SEQ ID NO: 3960; WAN024G3N; Start 223; Stop 247
ttcatcattagacttacctgaacgt

SEQ ID NO: 368674 - DNA, 25 bp, Artificial
  probe
  misc_feature (1)..(25): SEQ ID NO: 3960; WAN024G3N; Start 28; Stop 52
tttcacagggacattgtattctgct

SEQ ID NO: 368675 - DNA, 25 bp, Artificial
  probe
  misc_feature (1)..(25): SEQ ID NO: 3960; WAN024G3N; Start 123; Stop 147
tttcttcagtgatggtattttgtgc

SEQ ID NO: 368676 - DNA, 25 bp, Artificial
  probe
  misc_feature (1)..(25): SEQ ID NO: 3960; WAN024G3N; Start 105; Stop 129
agagaacgaggacatttgtttcttc

SEQ ID NO: 368677 - DNA, 25 bp, Artificial
  probe
  misc_feature (1)..(25): SEQ ID NO: 3960; WAN024G3N; Start 124; Stop 148
ttcttcagtgatggtattttgtgct

SEQ ID NO: 368678 - DNA, 25 bp, Artificial
  probe
  misc_feature (1)..(25): SEQ ID NO: 3960; WAN024G3N; Start 121; Stop 145
tgtttcttcagtgatggtattttgt

SEQ ID NO: 368679 - DNA, 25 bp, Artificial
  probe
  misc_feature (1)..(25): SEQ ID NO: 3961; WAN024EZB; Start 204; Stop 228
cgatataagttgcttctggattgac

SEQ ID NO: 368680 - DNA, 25 bp, Artificial
  probe
  misc_feature (1)..(25): SEQ ID NO: 3961; WAN024EZB; Start 205; Stop 229
gatataagttgcttctggattgaca

SEQ ID NO: 368681 - DNA, 25 bp, Artificial
  probe
  misc_feature (1)..(25): SEQ ID NO: 3961; WAN024EZB; Start 206; Stop 230
atataagttgcttctggattgacaa

SEQ ID NO: 368682 - DNA, 25 bp, Artificial
  probe
  misc_feature (1)..(25): SEQ ID NO: 3961; WAN024EZB; Start 203; Stop 227
tcgatataagttgcttctggattga

SEQ ID NO: 368683 - DNA, 25 bp, Artificial
  probe
  misc_feature (1)..(25): SEQ ID NO: 3961; WAN024EZB; Start 32; Stop 56
gcaacactactttcctcaatcatag

SEQ ID NO: 368684 - DNA, 25 bp, Artificial
  probe
  misc_feature (1)..(25): SEQ ID NO: 3961; WAN024EZB; Start 208; Stop 232
ataagttgcttctggattgacaaag

SEQ ID NO: 368685 - DNA, 25 bp, Artificial
  probe
  misc_feature (1)..(25): SEQ ID NO: 3961; WAN024EZB; Start 33; Stop 57
caacactactttcctcaatcataga

SEQ ID NO: 368686 - DNA, 25 bp, Artificial
  probe
  misc_feature (1)..(25): SEQ ID NO: 3961; WAN024EZB; Start 207; Stop 231
tataagttgcttctggattgacaaa

SEQ ID NO: 368687 - DNA, 25 bp, Artificial
  probe
  misc_feature (1)..(25): SEQ ID NO: 3961; WAN024EZB; Start 49; Stop 73
aatcatagaattggtaatgaccgct

SEQ ID NO: 368688 - DNA, 25 bp, Artificial
  probe
  misc_feature (1)..(25): SEQ ID NO: 3961; WAN024EZB; Start 48; Stop 72
caatcatagaattggtaatgaccgc

SEQ ID NO: 368689 - DNA, 25 bp, Artificial
  probe
  misc_feature (1)..(25): SEQ ID NO: 3961; WAN024EZB; Start 50; Stop 74
atcatagaattggtaatgaccgctc

SEQ ID NO: 368690 - DNA, 25 bp, Artificial
  probe
  misc_feature (1)..(25): SEQ ID NO: 3961; WAN024EZB; Start 240; Stop 264
cgttgaccatgtgtttatgattgat

SEQ ID NO: 368691 - DNA, 25 bp, Artificial
  probe
  misc_feature (1)..(25): SEQ ID NO: 3961; WAN024EZB; Start 242; Stop 266
ttgaccatgtgtttatgattgatgc

SEQ ID NO: 368692 - DNA, 25 bp, Artificial
  probe
  misc_feature (1)..(25): SEQ ID NO: 3961; WAN024EZB; Start 47; Stop 71
tcaatcatagaattggtaatgaccg

SEQ ID NO: 368693 - DNA, 25 bp, Artificial
  probe
  misc_feature (1)..(25): SEQ ID NO: 3961; WAN024EZB; Start 53; Stop 77
atagaattggtaatgaccgctcctg

SEQ ID NO: 368694 - DNA, 25 bp, Artificial
  probe
  misc_feature (1)..(25): SEQ ID NO: 3961; WAN024EZB; Start 52; Stop 76
catagaattggtaatgaccgctcct

SEQ ID NO: 368695 - DNA, 25 bp, Artificial
  probe
  misc_feature (1)..(25): SEQ ID NO: 3961; WAN024EZB; Start 241; Stop 265
gttgaccatgtgtttatgattgatg

SEQ ID NO: 368696 - DNA, 25 bp, Artificial
  probe
  misc_feature (1)..(25): SEQ ID NO: 3961; WAN024EZB; Start 248; Stop 272
atgtgtttatgattgatgcgacgac

SEQ ID NO: 368697 - DNA, 25 bp, Artificial
  probe
  misc_feature (1)..(25): SEQ ID NO: 3961; WAN024EZB; Start 94; Stop 118
cactacataagtaccgtttgtcaaa

SEQ ID NO: 368698 - DNA, 25 bp, Artificial
  probe
  misc_feature (1)..(25): SEQ ID NO: 3961; WAN024EZB; Start 93; Stop 117
ccactacataagtaccgtttgtcaa

SEQ ID NO: 368699 - DNA, 25 bp, Artificial
  probe
  misc_feature (1)..(25): SEQ ID NO: 3961; WAN024EZB; Start 34; Stop 58
aacactactttcctcaatcatagaa

SEQ ID NO: 368700 - DNA, 25 bp, Artificial
  probe
  misc_feature (1)..(25): SEQ ID NO: 3961; WAN024EZB; Start 91; Stop 115
gtccactacataagtaccgtttgtc

SEQ ID NO: 368701 - DNA, 25 bp, Artificial
  probe
  misc_feature (1)..(25): SEQ ID NO: 3961; WAN024EZB; Start 89; Stop 113
ctgtccactacataagtaccgtttg

SEQ ID NO: 368702 - DNA, 25 bp, Artificial
  probe
  misc_feature (1)..(25): SEQ ID NO: 3961; WAN024EZB; Start 156; Stop 180
taacattggcttcgatttgaacttc

SEQ ID NO: 368703 - DNA, 25 bp, Artificial
  probe
  misc_feature (1)..(25): SEQ ID NO: 3961; WAN024EZB; Start 35; Stop 59
acactactttcctcaatcatagaat

SEQ ID NO: 368704 - DNA, 25 bp, Artificial
  probe
  misc_feature (1)..(25): SEQ ID NO: 3961; WAN024EZB; Start 92; Stop 116
tccactacataagtaccgtttgtca

SEQ ID NO: 368705 - DNA, 25 bp, Artificial
  probe
  misc_feature (1)..(25): SEQ ID NO: 3961; WAN024EZB; Start 239; Stop 263
ccgttgaccatgtgtttatgattga

SEQ ID NO: 368706 - DNA, 25 bp, Artificial
  probe
  misc_feature (1)..(25): SEQ ID NO: 3961; WAN024EZB; Start 31; Stop 55
tgcaacactactttcctcaatcata

SEQ ID NO: 368707 - DNA, 25 bp, Artificial
  probe
  misc_feature (1)..(25): SEQ ID NO: 3961; WAN024EZB; Start 244; Stop 268
gaccatgtgtttatgattgatgcga

SEQ ID NO: 368708 - DNA, 25 bp, Artificial
  probe
  misc_feature (1)..(25): SEQ ID NO: 3961; WAN024EZB; Start 238; Stop 262
accgttgaccatgtgtttatgattg

SEQ ID NO: 368709 - DNA, 25 bp, Artificial
  probe
  misc_feature (1)..(25): SEQ ID NO: 3961; WAN024EZB; Start 90; Stop 114
tgtccactacataagtaccgtttgt

SEQ ID NO: 368710 - DNA, 25 bp, Artificial
  probe
  misc_feature (1)..(25): SEQ ID NO: 3961; WAN024EZB; Start 245; Stop 269
accatgtgtttatgattgatgcgac

SEQ ID NO: 368711 - DNA, 25 bp, Artificial
  probe
  misc_feature (1)..(25): SEQ ID NO: 3961; WAN024EZB; Start 243; Stop 267
tgaccatgtgtttatgattgatgcg

SEQ ID NO: 368712 - DNA, 25 bp, Artificial
  probe
  misc_feature (1)..(25): SEQ ID NO: 3962; WAN024CWM; Start 211; Stop 235
gtcataagtcaccttgctatcatca

SEQ ID NO: 368713 - DNA, 25 bp, Artificial
  probe
  misc_feature (1)..(25): SEQ ID NO: 3962; WAN024CWM; Start 210; Stop 234
tgtcataagtcaccttgctatcatc

SEQ ID NO: 368714 - DNA, 25 bp, Artificial
  probe
  misc_feature (1)..(25): SEQ ID NO: 3962; WAN024CWM; Start 213; Stop 237
cataagtcaccttgctatcatcaac

SEQ ID NO: 368715 - DNA, 25 bp, Artificial
  probe
  misc_feature (1)..(25): SEQ ID NO: 3962; WAN024CWM; Start 212; Stop 236
tcataagtcaccttgctatcatcaa

SEQ ID NO: 368716 - DNA, 25 bp, Artificial
  probe
  misc_feature (1)..(25): SEQ ID NO: 3962; WAN024CWM; Start 214; Stop 238
ataagtcaccttgctatcatcaact

SEQ ID NO: 368717 - DNA, 25 bp, Artificial
  probe
  misc_feature (1)..(25): SEQ ID NO: 3962; WAN024CWM; Start 28; Stop 52
gtactctgctgttgtctcattgatt

SEQ ID NO: 368718 - DNA, 25 bp, Artificial
  probe
  misc_feature (1)..(25): SEQ ID NO: 3962; WAN024CWM; Start 195; Stop 219
ccttagactgaatcgtgtcataagt

SEQ ID NO: 368719 - DNA, 25 bp, Artificial
  probe
  misc_feature (1)..(25): SEQ ID NO: 3962; WAN024CWM; Start 194; Stop 218
accttagactgaatcgtgtcataag

SEQ ID NO: 368720 - DNA, 25 bp, Artificial
  probe
  misc_feature (1)..(25): SEQ ID NO: 3962; WAN024CWM; Start 218; Stop 242
gtcaccttgctatcatcaacttcag

SEQ ID NO: 368721 - DNA, 25 bp, Artificial
  probe
  misc_feature (1)..(25): SEQ ID NO: 3962; WAN024CWM; Start 209; Stop 233
gtgtcataagtcaccttgctatcat

SEQ ID NO: 368722 - DNA, 25 bp, Artificial
  probe
  misc_feature (1)..(25): SEQ ID NO: 3962; WAN024CWM; Start 217; Stop 241
agtcaccttgctatcatcaacttca

SEQ ID NO: 368723 - DNA, 25 bp, Artificial
  probe
  misc_feature (1)..(25): SEQ ID NO: 3962; WAN024CWM; Start 223; Stop 247
cttgctatcatcaacttcaggacct

SEQ ID NO: 368724 - DNA, 25 bp, Artificial
  probe
  misc_feature (1)..(25): SEQ ID NO: 3962; WAN024CWM; Start 202; Stop 226
ctgaatcgtgtcataagtcaccttg

SEQ ID NO: 368725 - DNA, 25 bp, Artificial
  probe
  misc_feature (1)..(25): SEQ ID NO: 3962; WAN024CWM; Start 73; Stop 97
ggtgattcggtggttattgataaag

SEQ ID NO: 368726 - DNA, 25 bp, Artificial
  probe
  misc_feature (1)..(25): SEQ ID NO: 3962; WAN024CWM; Start 90; Stop 114
tgataaagacttggttgaactgttg

SEQ ID NO: 368727 - DNA, 25 bp, Artificial
  probe
  misc_feature (1)..(25): SEQ ID NO: 3962; WAN024CWM; Start 206; Stop 230
atcgtgtcataagtcaccttgctat

SEQ ID NO: 368728 - DNA, 25 bp, Artificial
  probe
  misc_feature (1)..(25): SEQ ID NO: 3962; WAN024CWM; Start 29; Stop 53
tactctgctgttgtctcattgattt

SEQ ID NO: 368729 - DNA, 25 bp, Artificial
  probe
  misc_feature (1)..(25): SEQ ID NO: 3962; WAN024CWM; Start 78; Stop 102
ttcggtggttattgataaagacttg

SEQ ID NO: 368730 - DNA, 25 bp, Artificial
  probe
  misc_feature (1)..(25): SEQ ID NO: 3962; WAN024CWM; Start 201; Stop 225
actgaatcgtgtcataagtcacctt

SEQ ID NO: 368731 - DNA, 25 bp, Artificial
  probe
  misc_feature (1)..(25): SEQ ID NO: 3962; WAN024CWM; Start 81; Stop 105
ggtggttattgataaagacttggtt

SEQ ID NO: 368732 - DNA, 25 bp, Artificial
  probe
  misc_feature (1)..(25): SEQ ID NO: 3962; WAN024CWM; Start 79; Stop 103
tcggtggttattgataaagacttgg

SEQ ID NO: 368733 - DNA, 25 bp, Artificial
  probe
  misc_feature (1)..(25): SEQ ID NO: 3962; WAN024CWM; Start 75; Stop 99
tgattcggtggttattgataaagac

SEQ ID NO: 368734 - DNA, 25 bp, Artificial
  probe
  misc_feature (1)..(25): SEQ ID NO: 3962; WAN024CWM; Start 74; Stop 98
gtgattcggtggttattgataaaga

SEQ ID NO: 368735 - DNA, 25 bp, Artificial
  probe
  misc_feature (1)..(25): SEQ ID NO: 3962; WAN024CWM; Start 205; Stop 229
aatcgtgtcataagtcaccttgcta

SEQ ID NO: 368736 - DNA, 25 bp, Artificial
  probe
  misc_feature (1)..(25): SEQ ID NO: 3962; WAN024CWM; Start 89; Stop 113
ttgataaagacttggttgaactgtt

SEQ ID NO: 368737 - DNA, 25 bp, Artificial
  probe
  misc_feature (1)..(25): SEQ ID NO: 3962; WAN024CWM; Start 80; Stop 104
cggtggttattgataaagacttggt

SEQ ID NO: 368738 - DNA, 25 bp, Artificial
  probe
  misc_feature (1)..(25): SEQ ID NO: 3962; WAN024CWM; Start 76; Stop 100
gattcggtggttattgataaagact

SEQ ID NO: 368739 - DNA, 25 bp, Artificial
  probe
  misc_feature (1)..(25): SEQ ID NO: 3962; WAN024CWM; Start 72; Stop 96
gggtgattcggtggttattgataaa

SEQ ID NO: 368740 - DNA, 25 bp, Artificial
  probe
  misc_feature (1)..(25): SEQ ID NO: 3962; WAN024CWM; Start 309; Stop 333
taacaactgttcgctcatcgtcata

SEQ ID NO: 368741 - DNA, 25 bp, Artificial
  probe
  misc_feature (1)..(25): SEQ ID NO: 3962; WAN024CWM; Start 88; Stop 112
attgataaagacttggttgaactgt

SEQ ID NO: 368742 - DNA, 25 bp, Artificial
  probe
  misc_feature (1)..(25): SEQ ID NO: 3962; WAN024CWM; Start 77; Stop 101
attcggtggttattgataaagactt

SEQ ID NO: 368743 - DNA, 25 bp, Artificial
  probe
  misc_feature (1)..(25): SEQ ID NO: 3962; WAN024CWM; Start 312; Stop 336
caactgttcgctcatcgtcataaga

SEQ ID NO: 368744 - DNA, 25 bp, Artificial
  probe
  misc_feature (1)..(25): SEQ ID NO: 3962; WAN024CWM; Start 83; Stop 107
tggttattgataaagacttggttga

SEQ ID NO: 368745 - DNA, 25 bp, Artificial
  probe
  misc_feature (1)..(25): SEQ ID NO: 3963; WAN024FEI; Start 254; Stop 278
ctagcaatcgtattcaccacaactg

SEQ ID NO: 368746 - DNA, 25 bp, Artificial
  probe
  misc_feature (1)..(25): SEQ ID NO: 3963; WAN024FEI; Start 252; Stop 276
gactagcaatcgtattcaccacaac

SEQ ID NO: 368747 - DNA, 25 bp, Artificial
  probe
  misc_feature (1)..(25): SEQ ID NO: 3963; WAN024FEI; Start 253; Stop 277
actagcaatcgtattcaccacaact

SEQ ID NO: 368748 - DNA, 25 bp, Artificial
  probe
  misc_feature (1)..(25): SEQ ID NO: 3963; WAN024FEI; Start 251; Stop 275
tgactagcaatcgtattcaccacaa

SEQ ID NO: 368749 - DNA, 25 bp, Artificial
  probe
  misc_feature (1)..(25): SEQ ID NO: 3963; WAN024FEI; Start 99; Stop 123
cttcaaagccgttagcaatttcttc

SEQ ID NO: 368750 - DNA, 25 bp, Artificial
  probe
  misc_feature (1)..(25): SEQ ID NO: 3963; WAN024FEI; Start 107; Stop 131
ccgttagcaatttcttccaaatcat

SEQ ID NO: 368751 - DNA, 25 bp, Artificial
  probe
  misc_feature (1)..(25): SEQ ID NO: 3963; WAN024FEI; Start 430; Stop 454
caacttagcaacctcaatcgaatgg

SEQ ID NO: 368752 - DNA, 25 bp, Artificial
  probe
  misc_feature (1)..(25): SEQ ID NO: 3963; WAN024FEI; Start 429; Stop 453
ccaacttagcaacctcaatcgaatg

SEQ ID NO: 368753 - DNA, 25 bp, Artificial
  probe
  misc_feature (1)..(25): SEQ ID NO: 3963; WAN024FEI; Start 37; Stop 61
tcctggattgaccatgatacgaatt

SEQ ID NO: 368754 - DNA, 25 bp, Artificial
  probe
  misc_feature (1)..(25): SEQ ID NO: 3963; WAN024FEI; Start 36; Stop 60
ttcctggattgaccatgatacgaat

SEQ ID NO: 368755 - DNA, 25 bp, Artificial
  probe
  misc_feature (1)..(25): SEQ ID NO: 3963; WAN024FEI; Start 41; Stop 65
ggattgaccatgatacgaatttcac

SEQ ID NO: 368756 - DNA, 25 bp, Artificial
  probe
  misc_feature (1)..(25): SEQ ID NO: 3963; WAN024FEI; Start 42; Stop 66
gattgaccatgatacgaatttcacg

SEQ ID NO: 368757 - DNA, 25 bp, Artificial
  probe
  misc_feature (1)..(25): SEQ ID NO: 3963; WAN024FEI; Start 103; Stop 127
aaagccgttagcaatttcttccaaa

SEQ ID NO: 368758 - DNA, 25 bp, Artificial
  probe
  misc_feature (1)..(25): SEQ ID NO: 3963; WAN024FEI; Start 142; Stop 166
gatgtagctttcaagagactcacta

SEQ ID NO: 368759 - DNA, 25 bp, Artificial
  probe
  misc_feature (1)..(25): SEQ ID NO: 3963; WAN024FEI; Start 11; Stop 35
attgtgactttgtcgtccttgattt

SEQ ID NO: 368760 - DNA, 25 bp, Artificial
  probe
  misc_feature (1)..(25): SEQ ID NO: 3963; WAN024FEI; Start 108; Stop 132
cgttagcaatttcttccaaatcatg

SEQ ID NO: 368761 - DNA, 25 bp, Artificial
  probe
  misc_feature (1)..(25): SEQ ID NO: 3963; WAN024FEI; Start 104; Stop 128
aagccgttagcaatttcttccaaat

SEQ ID NO: 368762 - DNA, 25 bp, Artificial
  probe
  misc_feature (1)..(25): SEQ ID NO: 3963; WAN024FEI; Start 419; Stop 443
atgataccagccaacttagcaacct

SEQ ID NO: 368763 - DNA, 25 bp, Artificial
  probe
  misc_feature (1)..(25): SEQ ID NO: 3963; WAN024FEI; Start 10; Stop 34
gattgtgactttgtcgtccttgatt

SEQ ID NO: 368764 - DNA, 25 bp, Artificial
  probe
  misc_feature (1)..(25): SEQ ID NO: 3963; WAN024FEI; Start 100; Stop 124
ttcaaagccgttagcaatttcttcc

SEQ ID NO: 368765 - DNA, 25 bp, Artificial
  probe
  misc_feature (1)..(25): SEQ ID NO: 3963; WAN024FEI; Start 98; Stop 122
ccttcaaagccgttagcaatttctt

SEQ ID NO: 368766 - DNA, 25 bp, Artificial
  probe
  misc_feature (1)..(25): SEQ ID NO: 3963; WAN024FEI; Start 255; Stop 279
tagcaatcgtattcaccacaactgg

SEQ ID NO: 368767 - DNA, 25 bp, Artificial
  probe
  misc_feature (1)..(25): SEQ ID NO: 3963; WAN024FEI; Start 102; Stop 126
caaagccgttagcaatttcttccaa

SEQ ID NO: 368768 - DNA, 25 bp, Artificial
  probe
  misc_feature (1)..(25): SEQ ID NO: 3963; WAN024FEI; Start 105; Stop 129
agccgttagcaatttcttccaaatc

SEQ ID NO: 368769 - DNA, 25 bp, Artificial
  probe
  misc_feature (1)..(25): SEQ ID NO: 3963; WAN024FEI; Start 39; Stop 63
ctggattgaccatgatacgaatttc

SEQ ID NO: 368770 - DNA, 25 bp, Artificial
  probe
  misc_feature (1)..(25): SEQ ID NO: 3963; WAN024FEI; Start 423; Stop 447
taccagccaacttagcaacctcaat

SEQ ID NO: 368771 - DNA, 25 bp, Artificial
  probe
  misc_feature (1)..(25): SEQ ID NO: 3963; WAN024FEI; Start 422; Stop 446
ataccagccaacttagcaacctcaa

SEQ ID NO: 368772 - DNA, 25 bp, Artificial
  probe
  misc_feature (1)..(25): SEQ ID NO: 3963; WAN024FEI; Start 40; Stop 64
tggattgaccatgatacgaatttca

SEQ ID NO: 368773 - DNA, 25 bp, Artificial
  probe
  misc_feature (1)..(25): SEQ ID NO: 3963; WAN024FEI; Start 96; Stop 120
ctccttcaaagccgttagcaatttc

SEQ ID NO: 368774 - DNA, 25 bp, Artificial
  probe
  misc_feature (1)..(25): SEQ ID NO: 3963; WAN024FEI; Start 109; Stop 133
gttagcaatttcttccaaatcatgg

SEQ ID NO: 368775 - DNA, 25 bp, Artificial
  probe
  misc_feature (1)..(25): SEQ ID NO: 3963; WAN024FEI; Start 141; Stop 165
tgatgtagctttcaagagactcact

SEQ ID NO: 368776 - DNA, 25 bp, Artificial
  probe
  misc_feature (1)..(25): SEQ ID NO: 3963; WAN024FEI; Start 326; Stop 350
ctaccttcaacctcatggtcaatgg

SEQ ID NO: 368777 - DNA, 25 bp, Artificial
  probe
  misc_feature (1)..(25): SEQ ID NO: 3963; WAN024FEI; Start 38; Stop 62
cctggattgaccatgatacgaattt

SEQ ID NO: 368778 - DNA, 25 bp, Artificial
  probe
  misc_feature (1)..(25): SEQ ID NO: 3964; WAN024CTU; Start 363; Stop 387
ttgcatgaattggttgaccttctaa

SEQ ID NO: 368779 - DNA, 25 bp, Artificial
  probe
  misc_feature (1)..(25): SEQ ID NO: 3964; WAN024CTU; Start 362; Stop 386
gttgcatgaattggttgaccttcta

SEQ ID NO: 368780 - DNA, 25 bp, Artificial
  probe
  misc_feature (1)..(25): SEQ ID NO: 3964; WAN024CTU; Start 18; Stop 42
atttgacagtttggtcttctttgag

SEQ ID NO: 368781 - DNA, 25 bp, Artificial
  probe
  misc_feature (1)..(25): SEQ ID NO: 3964; WAN024CTU; Start 14; Stop 38
gacaatttgacagtttggtcttctt

SEQ ID NO: 368782 - DNA, 25 bp, Artificial
  probe
  misc_feature (1)..(25): SEQ ID NO: 3964; WAN024CTU; Start 15; Stop 39
acaatttgacagtttggtcttcttt

SEQ ID NO: 368783 - DNA, 25 bp, Artificial
  probe
  misc_feature (1)..(25): SEQ ID NO: 3964; WAN024CTU; Start 17; Stop 41
aatttgacagtttggtcttctttga

SEQ ID NO: 368784 - DNA, 25 bp, Artificial
  probe
  misc_feature (1)..(25): SEQ ID NO: 3964; WAN024CTU; Start 16; Stop 40
caatttgacagtttggtcttctttg

SEQ ID NO: 368785 - DNA, 25 bp, Artificial
  probe
  misc_feature (1)..(25): SEQ ID NO: 3964; WAN024CTU; Start 19; Stop 43
tttgacagtttggtcttctttgaga

SEQ ID NO: 368786 - DNA, 25 bp, Artificial
  probe
  misc_feature (1)..(25): SEQ ID NO: 3964; WAN024CTU; Start 102; Stop 126
attgaattgcataggtttgaagagg

SEQ ID NO: 368787 - DNA, 25 bp, Artificial
  probe
  misc_feature (1)..(25): SEQ ID NO: 3964; WAN024CTU; Start 13; Stop 37
cgacaatttgacagtttggtcttct

SEQ ID NO: 368788 - DNA, 25 bp, Artificial
  probe
  misc_feature (1)..(25): SEQ ID NO: 3964; WAN024CTU; Start 98; Stop 122
aggaattgaattgcataggtttgaa

SEQ ID NO: 368789 - DNA, 25 bp, Artificial
  probe
  misc_feature (1)..(25): SEQ ID NO: 3964; WAN024CTU; Start 97; Stop 121
aaggaattgaattgcataggtttga

SEQ ID NO: 368790 - DNA, 25 bp, Artificial
  probe
  misc_feature (1)..(25): SEQ ID NO: 3964; WAN024CTU; Start 336; Stop 360
caggattgccttcttctaccacaag

SEQ ID NO: 368791 - DNA, 25 bp, Artificial
  probe
  misc_feature (1)..(25): SEQ ID NO: 3964; WAN024CTU; Start 99; Stop 123
ggaattgaattgcataggtttgaag

SEQ ID NO: 368792 - DNA, 25 bp, Artificial
  probe
  misc_feature (1)..(25): SEQ ID NO: 3964; WAN024CTU; Start 96; Stop 120
caaggaattgaattgcataggtttg

SEQ ID NO: 368793 - DNA, 25 bp, Artificial
  probe
  misc_feature (1)..(25): SEQ ID NO: 3964; WAN024CTU; Start 103; Stop 127
ttgaattgcataggtttgaagaggg

SEQ ID NO: 368794 - DNA, 25 bp, Artificial
  probe
  misc_feature (1)..(25): SEQ ID NO: 3964; WAN024CTU; Start 100; Stop 124
gaattgaattgcataggtttgaaga

SEQ ID NO: 368795 - DNA, 25 bp, Artificial
  probe
  misc_feature (1)..(25): SEQ ID NO: 3964; WAN024CTU; Start 101; Stop 125
aattgaattgcataggtttgaagag

SEQ ID NO: 368796 - DNA, 25 bp, Artificial
  probe
  misc_feature (1)..(25): SEQ ID NO: 3964; WAN024CTU; Start 136; Stop 160
tttaggctgaataaagatgctcgca

SEQ ID NO: 368797 - DNA, 25 bp, Artificial
  probe
  misc_feature (1)..(25): SEQ ID NO: 3964; WAN024CTU; Start 12; Stop 36
ccgacaatttgacagtttggtcttc

SEQ ID NO: 368798 - DNA, 25 bp, Artificial
  probe
  misc_feature (1)..(25): SEQ ID NO: 3964; WAN024CTU; Start 137; Stop 161
ttaggctgaataaagatgctcgcac

SEQ ID NO: 368799 - DNA, 25 bp, Artificial
  probe
  misc_feature (1)..(25): SEQ ID NO: 3964; WAN024CTU; Start 9; Stop 33
gaaccgacaatttgacagtttggtc

SEQ ID NO: 368800 - DNA, 25 bp, Artificial
  probe
  misc_feature (1)..(25): SEQ ID NO: 3964; WAN024CTU; Start 11; Stop 35
accgacaatttgacagtttggtctt

SEQ ID NO: 368801 - DNA, 25 bp, Artificial
  probe
  misc_feature (1)..(25): SEQ ID NO: 3964; WAN024CTU; Start 10; Stop 34
aaccgacaatttgacagtttggtct

SEQ ID NO: 368802 - DNA, 25 bp, Artificial
  probe
  misc_feature (1)..(25): SEQ ID NO: 3964; WAN024CTU; Start 95; Stop 119
tcaaggaattgaattgcataggttt

SEQ ID NO: 368803 - DNA, 25 bp, Artificial
  probe
  misc_feature (1)..(25): SEQ ID NO: 3964; WAN024CTU; Start 278; Stop 302
ctagtaagacctgttactgcctcac

SEQ ID NO: 368804 - DNA, 25 bp, Artificial
  probe
  misc_feature (1)..(25): SEQ ID NO: 3964; WAN024CTU; Start 104; Stop 128
tgaattgcataggtttgaagagggc

SEQ ID NO: 368805 - DNA, 25 bp, Artificial
  probe
  misc_feature (1)..(25): SEQ ID NO: 3964; WAN024CTU; Start 281; Stop 305
gtaagacctgttactgcctcaccac

SEQ ID NO: 368806 - DNA, 25 bp, Artificial
  probe
  misc_feature (1)..(25): SEQ ID NO: 3964; WAN024CTU; Start 20; Stop 44
ttgacagtttggtcttctttgagac

SEQ ID NO: 368807 - DNA, 25 bp, Artificial
  probe
  misc_feature (1)..(25): SEQ ID NO: 3964; WAN024CTU; Start 361; Stop 385
ggttgcatgaattggttgaccttct

SEQ ID NO: 368808 - DNA, 25 bp, Artificial
  probe
  misc_feature (1)..(25): SEQ ID NO: 3964; WAN024CTU; Start 349; Stop 373
ttctaccacaagggttgcatgaatt

SEQ ID NO: 368809 - DNA, 25 bp, Artificial
  probe
  misc_feature (1)..(25): SEQ ID NO: 3964; WAN024CTU; Start 26; Stop 50
gtttggtcttctttgagactgtcag

SEQ ID NO: 368810 - DNA, 25 bp, Artificial
  probe
  misc_feature (1)..(25): SEQ ID NO: 3964; WAN024CTU; Start 135; Stop 159
ctttaggctgaataaagatgctcgc

SEQ ID NO: 368811 - DNA, 25 bp, Artificial
  probe
  misc_feature (1)..(25): SEQ ID NO: 3965; WAN024FIG; Start 164; Stop 188
ttgatacaagttccaccgtacatag

SEQ ID NO: 368812 - DNA, 25 bp, Artificial
  probe
  misc_feature (1)..(25): SEQ ID NO: 3965; WAN024FIG; Start 163; Stop 187
gttgatacaagttccaccgtacata

SEQ ID NO: 368813 - DNA, 25 bp, Artificial
  probe
  misc_feature (1)..(25): SEQ ID NO: 3965; WAN024FIG; Start 165; Stop 189
tgatacaagttccaccgtacatagc

SEQ ID NO: 368814 - DNA, 25 bp, Artificial
  probe
  misc_feature (1)..(25): SEQ ID NO: 3965; WAN024FIG; Start 30; Stop 54
cagtaccagcaacagtcgtatagtt

SEQ ID NO: 368815 - DNA, 25 bp, Artificial
  probe
  misc_feature (1)..(25): SEQ ID NO: 3965; WAN024FIG; Start 162; Stop 186
tgttgatacaagttccaccgtacat

SEQ ID NO: 368816 - DNA, 25 bp, Artificial
  probe
  misc_feature (1)..(25): SEQ ID NO: 3965; WAN024FIG; Start 161; Stop 185
atgttgatacaagttccaccgtaca

SEQ ID NO: 368817 - DNA, 25 bp, Artificial
  probe
  misc_feature (1)..(25): SEQ ID NO: 3965; WAN024FIG; Start 254; Stop 278
ccagctttaccaaatccaataacaa

SEQ ID NO: 368818 - DNA, 25 bp, Artificial
  probe
  misc_feature (1)..(25): SEQ ID NO: 3965; WAN024FIG; Start 252; Stop 276
taccagctttaccaaatccaataac

SEQ ID NO: 368819 - DNA, 25 bp, Artificial
  probe
  misc_feature (1)..(25): SEQ ID NO: 3965; WAN024FIG; Start 31; Stop 55
agtaccagcaacagtcgtatagttt

SEQ ID NO: 368820 - DNA, 25 bp, Artificial
  probe
  misc_feature (1)..(25): SEQ ID NO: 3965; WAN024FIG; Start 253; Stop 277
accagctttaccaaatccaataaca

SEQ ID NO: 368821 - DNA, 25 bp, Artificial
  probe
  misc_feature (1)..(25): SEQ ID NO: 3965; WAN024FIG; Start 251; Stop 275
ttaccagctttaccaaatccaataa

SEQ ID NO: 368822 - DNA, 25 bp, Artificial
  probe
  misc_feature (1)..(25): SEQ ID NO: 3965; WAN024FIG; Start 250; Stop 274
tttaccagctttaccaaatccaata

SEQ ID NO: 368823 - DNA, 25 bp, Artificial
  probe
  misc_feature (1)..(25): SEQ ID NO: 3965; WAN024FIG; Start 255; Stop 279
cagctttaccaaatccaataacaat

SEQ ID NO: 368824 - DNA, 25 bp, Artificial
  probe
  misc_feature (1)..(25): SEQ ID NO: 3965; WAN024FIG; Start 29; Stop 53
ccagtaccagcaacagtcgtatagt

SEQ ID NO: 368825 - DNA, 25 bp, Artificial
  probe
  misc_feature (1)..(25): SEQ ID NO: 3965; WAN024FIG; Start 256; Stop 280
agctttaccaaatccaataacaatt

SEQ ID NO: 368826 - DNA, 25 bp, Artificial
  probe
  misc_feature (1)..(25): SEQ ID NO: 3965; WAN024FIG; Start 263; Stop 287
ccaaatccaataacaattaaatcgt

SEQ ID NO: 368827 - DNA, 25 bp, Artificial
  probe
  misc_feature (1)..(25): SEQ ID NO: 3965; WAN024FIG; Start 262; Stop 286
accaaatccaataacaattaaatcg

SEQ ID NO: 368828 - DNA, 25 bp, Artificial
  probe
  misc_feature (1)..(25): SEQ ID NO: 3965; WAN024FIG; Start 3; Stop 27
gagcttcagcatcaaagatatcgac

SEQ ID NO: 368829 - DNA, 25 bp, Artificial
  probe
  misc_feature (1)..(25): SEQ ID NO: 3965; WAN024FIG; Start 257; Stop 281
gctttaccaaatccaataacaatta

SEQ ID NO: 368830 - DNA, 25 bp, Artificial
  probe
  misc_feature (1)..(25): SEQ ID NO: 3965; WAN024FIG; Start 2; Stop 26
tgagcttcagcatcaaagatatcga

SEQ ID NO: 368831 - DNA, 25 bp, Artificial
  probe
  misc_feature (1)..(25): SEQ ID NO: 3965; WAN024FIG; Start 1; Stop 25
gtgagcttcagcatcaaagatatcg

SEQ ID NO: 368832 - DNA, 25 bp, Artificial
  probe
  misc_feature (1)..(25): SEQ ID NO: 3965; WAN024FIG; Start 32; Stop 56
gtaccagcaacagtcgtatagtttt

SEQ ID NO: 368833 - DNA, 25 bp, Artificial
  probe
  misc_feature (1)..(25): SEQ ID NO: 3965; WAN024FIG; Start 248; Stop 272
gttttaccagctttaccaaatccaa

SEQ ID NO: 368834 - DNA, 25 bp, Artificial
  probe
  misc_feature (1)..(25): SEQ ID NO: 3965; WAN024FIG; Start 245; Stop 269
agtgttttaccagctttaccaaatc

SEQ ID NO: 368835 - DNA, 25 bp, Artificial
  probe
  misc_feature (1)..(25): SEQ ID NO: 3965; WAN024FIG; Start 243; Stop 267
ctagtgttttaccagctttaccaaa

SEQ ID NO: 368836 - DNA, 25 bp, Artificial
  probe
  misc_feature (1)..(25): SEQ ID NO: 3965; WAN024FIG; Start 249; Stop 273
ttttaccagctttaccaaatccaat

SEQ ID NO: 368837 - DNA, 25 bp, Artificial
  probe
  misc_feature (1)..(25): SEQ ID NO: 3965; WAN024FIG; Start 246; Stop 270
gtgttttaccagctttaccaaatcc

SEQ ID NO: 368838 - DNA, 25 bp, Artificial
  probe
  misc_feature (1)..(25): SEQ ID NO: 3965; WAN024FIG; Start 247; Stop 271
tgttttaccagctttaccaaatcca

SEQ ID NO: 368839 - DNA, 25 bp, Artificial
  probe
  misc_feature (1)..(25): SEQ ID NO: 3965; WAN024FIG; Start 244; Stop 268
tagtgttttaccagctttaccaaat

SEQ ID NO: 368840 - DNA, 25 bp, Artificial
  probe
  misc_feature (1)..(25): SEQ ID NO: 3965; WAN024FIG; Start 28; Stop 52
gccagtaccagcaacagtcgtatag

SEQ ID NO: 368841 - DNA, 25 bp, Artificial
  probe
  misc_feature (1)..(25): SEQ ID NO: 3965; WAN024FIG; Start 12; Stop 36
catcaaagatatcgacgccagtacc

SEQ ID NO: 368842 - DNA, 25 bp, Artificial
  probe
  misc_feature (1)..(25): SEQ ID NO: 3965; WAN024FIG; Start 4; Stop 28
agcttcagcatcaaagatatcgacg

SEQ ID NO: 368843 - DNA, 25 bp, Artificial
  probe
  misc_feature (1)..(25): SEQ ID NO: 3965; WAN024FIG; Start 91; Stop 115
agcaatgacttcttcaaaagacaag

SEQ ID NO: 368844 - DNA, 25 bp, Artificial
  probe
  misc_feature (1)..(25): SEQ ID NO: 3966; WAN024CE3; Start 215; Stop 239
ttgcgttcgtcatagacttccttaa

SEQ ID NO: 368845 - DNA, 25 bp, Artificial
  probe
  misc_feature (1)..(25): SEQ ID NO: 3966; WAN024CE3; Start 182; Stop 206
atatctgttgtcgcaatagcattga

SEQ ID NO: 368846 - DNA, 25 bp, Artificial
  probe
  misc_feature (1)..(25): SEQ ID NO: 3966; WAN024CE3; Start 183; Stop 207
tatctgttgtcgcaatagcattgaa

SEQ ID NO: 368847 - DNA, 25 bp, Artificial
  probe
  misc_feature (1)..(25): SEQ ID NO: 3966; WAN024CE3; Start 205; Stop 229
gaaattccatttgcgttcgtcatag

SEQ ID NO: 368848 - DNA, 25 bp, Artificial
  probe
  misc_feature (1)..(25): SEQ ID NO: 3966; WAN024CE3; Start 206; Stop 230
aaattccatttgcgttcgtcataga

SEQ ID NO: 368849 - DNA, 25 bp, Artificial
  probe
  misc_feature (1)..(25): SEQ ID NO: 3966; WAN024CE3; Start 204; Stop 228
tgaaattccatttgcgttcgtcata

SEQ ID NO: 368850 - DNA, 25 bp, Artificial
  probe
  misc_feature (1)..(25): SEQ ID NO: 3966; WAN024CE3; Start 37; Stop 61
agtaatcgtcacttgataaagctca

SEQ ID NO: 368851 - DNA, 25 bp, Artificial
  probe
  misc_feature (1)..(25): SEQ ID NO: 3966; WAN024CE3; Start 38; Stop 62
gtaatcgtcacttgataaagctcat

SEQ ID NO: 368852 - DNA, 25 bp, Artificial
  probe
  misc_feature (1)..(25): SEQ ID NO: 3966; WAN024CE3; Start 181; Stop 205
gatatctgttgtcgcaatagcattg

SEQ ID NO: 368853 - DNA, 25 bp, Artificial
  probe
  misc_feature (1)..(25): SEQ ID NO: 3966; WAN024CE3; Start 201; Stop 225
cattgaaattccatttgcgttcgtc

SEQ ID NO: 368854 - DNA, 25 bp, Artificial
  probe
  misc_feature (1)..(25): SEQ ID NO: 3966; WAN024CE3; Start 39; Stop 63
taatcgtcacttgataaagctcatc

SEQ ID NO: 368855 - DNA, 25 bp, Artificial
  probe
  misc_feature (1)..(25): SEQ ID NO: 3966; WAN024CE3; Start 207; Stop 231
aattccatttgcgttcgtcatagac

SEQ ID NO: 368856 - DNA, 25 bp, Artificial
  probe
  misc_feature (1)..(25): SEQ ID NO: 3966; WAN024CE3; Start 193; Stop 217
cgcaatagcattgaaattccatttg

SEQ ID NO: 368857 - DNA, 25 bp, Artificial
  probe
  misc_feature (1)..(25): SEQ ID NO: 3966; WAN024CE3; Start 192; Stop 216
tcgcaatagcattgaaattccattt

SEQ ID NO: 368858 - DNA, 25 bp, Artificial
  probe
  misc_feature (1)..(25): SEQ ID NO: 3966; WAN024CE3; Start 40; Stop 64
aatcgtcacttgataaagctcatcc

SEQ ID NO: 368859 - DNA, 25 bp, Artificial
  probe
  misc_feature (1)..(25): SEQ ID NO: 3966; WAN024CE3; Start 216; Stop 240
tgcgttcgtcatagacttccttaaa

SEQ ID NO: 368860 - DNA, 25 bp, Artificial
  probe
  misc_feature (1)..(25): SEQ ID NO: 3966; WAN024CE3; Start 214; Stop 238
tttgcgttcgtcatagacttcctta

SEQ ID NO: 368861 - DNA, 25 bp, Artificial
  probe
  misc_feature (1)..(25): SEQ ID NO: 3966; WAN024CE3; Start 203; Stop 227
ttgaaattccatttgcgttcgtcat

SEQ ID NO: 368862 - DNA, 25 bp, Artificial
  probe
  misc_feature (1)..(25): SEQ ID NO: 3966; WAN024CE3; Start 202; Stop 226
attgaaattccatttgcgttcgtca

SEQ ID NO: 368863 - DNA, 25 bp, Artificial
  probe
  misc_feature (1)..(25): SEQ ID NO: 3966; WAN024CE3; Start 191; Stop 215
gtcgcaatagcattgaaattccatt

SEQ ID NO: 368864 - DNA, 25 bp, Artificial
  probe
  misc_feature (1)..(25): SEQ ID NO: 3966; WAN024CE3; Start 187; Stop 211
tgttgtcgcaatagcattgaaattc

SEQ ID NO: 368865 - DNA, 25 bp, Artificial
  probe
  misc_feature (1)..(25): SEQ ID NO: 3966; WAN024CE3; Start 186; Stop 210
ctgttgtcgcaatagcattgaaatt

SEQ ID NO: 368866 - DNA, 25 bp, Artificial
  probe
  misc_feature (1)..(25): SEQ ID NO: 3966; WAN024CE3; Start 213; Stop 237
atttgcgttcgtcatagacttcctt

SEQ ID NO: 368867 - DNA, 25 bp, Artificial
  probe
  misc_feature (1)..(25): SEQ ID NO: 3966; WAN024CE3; Start 208; Stop 232
attccatttgcgttcgtcatagact

SEQ ID NO: 368868 - DNA, 25 bp, Artificial
  probe
  misc_feature (1)..(25): SEQ ID NO: 3966; WAN024CE3; Start 41; Stop 65
atcgtcacttgataaagctcatcca

SEQ ID NO: 368869 - DNA, 25 bp, Artificial
  probe
  misc_feature (1)..(25): SEQ ID NO: 3966; WAN024CE3; Start 190; Stop 214
tgtcgcaatagcattgaaattccat

SEQ ID NO: 368870 - DNA, 25 bp, Artificial
  probe
  misc_feature (1)..(25): SEQ ID NO: 3966; WAN024CE3; Start 188; Stop 212
gttgtcgcaatagcattgaaattcc

SEQ ID NO: 368871 - DNA, 25 bp, Artificial
  probe
  misc_feature (1)..(25): SEQ ID NO: 3966; WAN024CE3; Start 185; Stop 209
tctgttgtcgcaatagcattgaaat

SEQ ID NO: 368872 - DNA, 25 bp, Artificial
  probe
  misc_feature (1)..(25): SEQ ID NO: 3966; WAN024CE3; Start 184; Stop 208
atctgttgtcgcaatagcattgaaa

SEQ ID NO: 368873 - DNA, 25 bp, Artificial
  probe
  misc_feature (1)..(25): SEQ ID NO: 3966; WAN024CE3; Start 180; Stop 204
cgatatctgttgtcgcaatagcatt

SEQ ID NO: 368874 - DNA, 25 bp, Artificial
  probe
  misc_feature (1)..(25): SEQ ID NO: 3966; WAN024CE3; Start 45; Stop 69
tcacttgataaagctcatccaccaa

SEQ ID NO: 368875 - DNA, 25 bp, Artificial
  probe
  misc_feature (1)..(25): SEQ ID NO: 3966; WAN024CE3; Start 195; Stop 219
caatagcattgaaattccatttgcg

SEQ ID NO: 368876 - DNA, 25 bp, Artificial
  probe
  misc_feature (1)..(25): SEQ ID NO: 3966; WAN024CE3; Start 197; Stop 221
atagcattgaaattccatttgcgtt

SEQ ID NO: 368877 - DNA, 25 bp, Artificial
  probe
  misc_feature (1)..(25): SEQ ID NO: 3967; WAN024FDW; Start 181; Stop 205
gttatggaagtaggtgtctgtcaag

SEQ ID NO: 368878 - DNA, 25 bp, Artificial
  probe
  misc_feature (1)..(25): SEQ ID NO: 3967; WAN024FDW; Start 180; Stop 204
agttatggaagtaggtgtctgtcaa

SEQ ID NO: 368879 - DNA, 25 bp, Artificial
  probe
  misc_feature (1)..(25): SEQ ID NO: 3967; WAN024FDW; Start 179; Stop 203
aagttatggaagtaggtgtctgtca

SEQ ID NO: 368880 - DNA, 25 bp, Artificial
  probe
  misc_feature (1)..(25): SEQ ID NO: 3967; WAN024FDW; Start 249; Stop 273
ggttctccaagtaatcactgagtag

SEQ ID NO: 368881 - DNA, 25 bp, Artificial
  probe
  misc_feature (1)..(25): SEQ ID NO: 3967; WAN024FDW; Start 182; Stop 206
ttatggaagtaggtgtctgtcaagc

SEQ ID NO: 368882 - DNA, 25 bp, Artificial
  probe
  misc_feature (1)..(25): SEQ ID NO: 3967; WAN024FDW; Start 242; Stop 266
ttagactggttctccaagtaatcac

SEQ ID NO: 368883 - DNA, 25 bp, Artificial
  probe
  misc_feature (1)..(25): SEQ ID NO: 3967; WAN024FDW; Start 238; Stop 262
gtcattagactggttctccaagtaa

SEQ ID NO: 368884 - DNA, 25 bp, Artificial
  probe
  misc_feature (1)..(25): SEQ ID NO: 3967; WAN024FDW; Start 243; Stop 267
tagactggttctccaagtaatcact

SEQ ID NO: 368885 - DNA, 25 bp, Artificial
  probe
  misc_feature (1)..(25): SEQ ID NO: 3967; WAN024FDW; Start 248; Stop 272
tggttctccaagtaatcactgagta

SEQ ID NO: 368886 - DNA, 25 bp, Artificial
  probe
  misc_feature (1)..(25): SEQ ID NO: 3967; WAN024FDW; Start 241; Stop 265
attagactggttctccaagtaatca

SEQ ID NO: 368887 - DNA, 25 bp, Artificial
  probe
  misc_feature (1)..(25): SEQ ID NO: 3967; WAN024FDW; Start 239; Stop 263
tcattagactggttctccaagtaat

SEQ ID NO: 368888 - DNA, 25 bp, Artificial
  probe
  misc_feature (1)..(25): SEQ ID NO: 3967; WAN024FDW; Start 178; Stop 202
aaagttatggaagtaggtgtctgtc

SEQ ID NO: 368889 - DNA, 25 bp, Artificial
  probe
  misc_feature (1)..(25): SEQ ID NO: 3967; WAN024FDW; Start 240; Stop 264
cattagactggttctccaagtaatc

SEQ ID NO: 368890 - DNA, 25 bp, Artificial
  probe
  misc_feature (1)..(25): SEQ ID NO: 3967; WAN024FDW; Start 168; Stop 192
ggtgggtgataaagttatggaagta

SEQ ID NO: 368891 - DNA, 25 bp, Artificial
  probe
  misc_feature (1)..(25): SEQ ID NO: 3967; WAN024FDW; Start 171; Stop 195
gggtgataaagttatggaagtaggt

SEQ ID NO: 368892 - DNA, 25 bp, Artificial
  probe
  misc_feature (1)..(25): SEQ ID NO: 3967; WAN024FDW; Start 170; Stop 194
tgggtgataaagttatggaagtagg

SEQ ID NO: 368893 - DNA, 25 bp, Artificial
  probe
  misc_feature (1)..(25): SEQ ID NO: 3967; WAN024FDW; Start 177; Stop 201
taaagttatggaagtaggtgtctgt

SEQ ID NO: 368894 - DNA, 25 bp, Artificial
  probe
  misc_feature (1)..(25): SEQ ID NO: 3967; WAN024FDW; Start 33; Stop 57
catcgtcaatttcaatagcatctcc

SEQ ID NO: 368895 - DNA, 25 bp, Artificial
  probe
  misc_feature (1)..(25): SEQ ID NO: 3967; WAN024FDW; Start 32; Stop 56
tcatcgtcaatttcaatagcatctc

SEQ ID NO: 368896 - DNA, 25 bp, Artificial
  probe
  misc_feature (1)..(25): SEQ ID NO: 3967; WAN024FDW; Start 166; Stop 190
gaggtgggtgataaagttatggaag

SEQ ID NO: 368897 - DNA, 25 bp, Artificial
  probe
  misc_feature (1)..(25): SEQ ID NO: 3967; WAN024FDW; Start 29; Stop 53
gcatcatcgtcaatttcaatagcat

SEQ ID NO: 368898 - DNA, 25 bp, Artificial
  probe
  misc_feature (1)..(25): SEQ ID NO: 3967; WAN024FDW; Start 237; Stop 261
ggtcattagactggttctccaagta

SEQ ID NO: 368899 - DNA, 25 bp, Artificial
  probe
  misc_feature (1)..(25): SEQ ID NO: 3967; WAN024FDW; Start 172; Stop 196
ggtgataaagttatggaagtaggtg

SEQ ID NO: 368900 - DNA, 25 bp, Artificial
  probe
  misc_feature (1)..(25): SEQ ID NO: 3967; WAN024FDW; Start 169; Stop 193
gtgggtgataaagttatggaagtag

SEQ ID NO: 368901 - DNA, 25 bp, Artificial
  probe
  misc_feature (1)..(25): SEQ ID NO: 3967; WAN024FDW; Start 165; Stop 189
agaggtgggtgataaagttatggaa

SEQ ID NO: 368902 - DNA, 25 bp, Artificial
  probe
  misc_feature (1)..(25): SEQ ID NO: 3967; WAN024FDW; Start 164; Stop 188
aagaggtgggtgataaagttatgga

SEQ ID NO: 368903 - DNA, 25 bp, Artificial
  probe
  misc_feature (1)..(25): SEQ ID NO: 3967; WAN024FDW; Start 163; Stop 187
caagaggtgggtgataaagttatgg

SEQ ID NO: 368904 - DNA, 25 bp, Artificial
  probe
  misc_feature (1)..(25): SEQ ID NO: 3967; WAN024FDW; Start 31; Stop 55
atcatcgtcaatttcaatagcatct

SEQ ID NO: 368905 - DNA, 25 bp, Artificial
  probe
  misc_feature (1)..(25): SEQ ID NO: 3967; WAN024FDW; Start 30; Stop 54
catcatcgtcaatttcaatagcatc

SEQ ID NO: 368906 - DNA, 25 bp, Artificial
  probe
  misc_feature (1)..(25): SEQ ID NO: 3967; WAN024FDW; Start 167; Stop 191
aggtgggtgataaagttatggaagt

SEQ ID NO: 368907 - DNA, 25 bp, Artificial
  probe
  misc_feature (1)..(25): SEQ ID NO: 3967; WAN024FDW; Start 34; Stop 58
atcgtcaatttcaatagcatctccc

SEQ ID NO: 368908 - DNA, 25 bp, Artificial
  probe
  misc_feature (1)..(25): SEQ ID NO: 3967; WAN024FDW; Start 72; Stop 96
aaacttccttcataatgctgttgag

SEQ ID NO: 368909 - DNA, 25 bp, Artificial
  probe
  misc_feature (1)..(25): SEQ ID NO: 3967; WAN024FDW; Start 247; Stop 271
ctggttctccaagtaatcactgagt

SEQ ID NO: 368910 - DNA, 25 bp, Artificial
  probe
  misc_feature (1)..(25): SEQ ID NO: 3968; WAN024FEE-5; Start 355; Stop 379
gtgattgcttccatagagagtgatt

SEQ ID NO: 368911 - DNA, 25 bp, Artificial
  probe
  misc_feature (1)..(25): SEQ ID NO: 3968; WAN024FEE-5; Start 282; Stop 306
tcagacagaagaattggtgaatcag

SEQ ID NO: 368912 - DNA, 25 bp, Artificial
  probe
  misc_feature (1)..(25): SEQ ID NO: 3968; WAN024FEE-5; Start 281; Stop 305
ctcagacagaagaattggtgaatca

SEQ ID NO: 368913 - DNA, 25 bp, Artificial
  probe
  misc_feature (1)..(25): SEQ ID NO: 3968; WAN024FEE-5; Start 283; Stop 307
cagacagaagaattggtgaatcagg

SEQ ID NO: 368914 - DNA, 25 bp, Artificial
  probe
  misc_feature (1)..(25): SEQ ID NO: 3968; WAN024FEE-5; Start 288; Stop 312
agaagaattggtgaatcaggtcaag

SEQ ID NO: 368915 - DNA, 25 bp, Artificial
  probe
  misc_feature (1)..(25): SEQ ID NO: 3968; WAN024FEE-5; Start 287; Stop 311
cagaagaattggtgaatcaggtcaa

SEQ ID NO: 368916 - DNA, 25 bp, Artificial
  probe
  misc_feature (1)..(25): SEQ ID NO: 3968; WAN024FEE-5; Start 284; Stop 308
agacagaagaattggtgaatcaggt

SEQ ID NO: 368917 - DNA, 25 bp, Artificial
  probe
  misc_feature (1)..(25): SEQ ID NO: 3968; WAN024FEE-5; Start 354; Stop 378
ggtgattgcttccatagagagtgat

SEQ ID NO: 368918 - DNA, 25 bp, Artificial
  probe
  misc_feature (1)..(25): SEQ ID NO: 3968; WAN024FEE-5; Start 302; Stop 326
atcaggtcaaggacatctcttctat

SEQ ID NO: 368919 - DNA, 25 bp, Artificial
  probe
  misc_feature (1)..(25): SEQ ID NO: 3968; WAN024FEE-5; Start 303; Stop 327
tcaggtcaaggacatctcttctatt

SEQ ID NO: 368920 - DNA, 25 bp, Artificial
  probe
  misc_feature (1)..(25): SEQ ID NO: 3968; WAN024FEE-5; Start 301; Stop 325
aatcaggtcaaggacatctcttcta

SEQ ID NO: 368921 - DNA, 25 bp, Artificial
  probe
  misc_feature (1)..(25): SEQ ID NO: 3968; WAN024FEE-5; Start 289; Stop 313
gaagaattggtgaatcaggtcaagg

SEQ ID NO: 368922 - DNA, 25 bp, Artificial
  probe
  misc_feature (1)..(25): SEQ ID NO: 3968; WAN024FEE-5; Start 285; Stop 309
gacagaagaattggtgaatcaggtc

SEQ ID NO: 368923 - DNA, 25 bp, Artificial
  probe
  misc_feature (1)..(25): SEQ ID NO: 3968; WAN024FEE-5; Start 290; Stop 314
aagaattggtgaatcaggtcaagga

SEQ ID NO: 368924 - DNA, 25 bp, Artificial
  probe
  misc_feature (1)..(25): SEQ ID NO: 3968; WAN024FEE-5; Start 286; Stop 310
acagaagaattggtgaatcaggtca

SEQ ID NO: 368925 - DNA, 25 bp, Artificial
  probe
  misc_feature (1)..(25): SEQ ID NO: 3968; WAN024FEE-5; Start 300; Stop 324
gaatcaggtcaaggacatctcttct

SEQ ID NO: 368926 - DNA, 25 bp, Artificial
  probe
  misc_feature (1)..(25): SEQ ID NO: 3968; WAN024FEE-5; Start 418; Stop 442
aatctgaagaaggctatcattgcga

SEQ ID NO: 368927 - DNA, 25 bp, Artificial
  probe
  misc_feature (1)..(25): SEQ ID NO: 3968; WAN024FEE-5; Start 358; Stop 382
attgcttccatagagagtgatttgt

SEQ ID NO: 368928 - DNA, 25 bp, Artificial
  probe
  misc_feature (1)..(25): SEQ ID NO: 3968; WAN024FEE-5; Start 357; Stop 381
gattgcttccatagagagtgatttg

SEQ ID NO: 368929 - DNA, 25 bp, Artificial
  probe
  misc_feature (1)..(25): SEQ ID NO: 3968; WAN024FEE-5; Start 356; Stop 380
tgattgcttccatagagagtgattt

SEQ ID NO: 368930 - DNA, 25 bp, Artificial
  probe
  misc_feature (1)..(25): SEQ ID NO: 3968; WAN024FEE-5; Start 325; Stop 349
atttcagagattacctattcggacg

SEQ ID NO: 368931 - DNA, 25 bp, Artificial
  probe
  misc_feature (1)..(25): SEQ ID NO: 3968; WAN024FEE-5; Start 359; Stop 383
ttgcttccatagagagtgatttgtt

SEQ ID NO: 368932 - DNA, 25 bp, Artificial
  probe
  misc_feature (1)..(25): SEQ ID NO: 3968; WAN024FEE-5; Start 299; Stop 323
tgaatcaggtcaaggacatctcttc

SEQ ID NO: 368933 - DNA, 25 bp, Artificial
  probe
  misc_feature (1)..(25): SEQ ID NO: 3968; WAN024FEE-5; Start 360; Stop 384
tgcttccatagagagtgatttgttg

SEQ ID NO: 368934 - DNA, 25 bp, Artificial
  probe
  misc_feature (1)..(25): SEQ ID NO: 3968; WAN024FEE-5; Start 298; Stop 322
gtgaatcaggtcaaggacatctctt

SEQ ID NO: 368935 - DNA, 25 bp, Artificial
  probe
  misc_feature (1)..(25): SEQ ID NO: 3968; WAN024FEE-5; Start 426; Stop 450
gaaggctatcattgcgacagaagat

SEQ ID NO: 368936 - DNA, 25 bp, Artificial
  probe
  misc_feature (1)..(25): SEQ ID NO: 3968; WAN024FEE-5; Start 698; Stop 722
gccgaaataataagggacagaatat

SEQ ID NO: 368937 - DNA, 25 bp, Artificial
  probe
  misc_feature (1)..(25): SEQ ID NO: 3968; WAN024FEE-5; Start 424; Stop 448
aagaaggctatcattgcgacagaag

SEQ ID NO: 368938 - DNA, 25 bp, Artificial
  probe
  misc_feature (1)..(25): SEQ ID NO: 3968; WAN024FEE-5; Start 423; Stop 447
gaagaaggctatcattgcgacagaa

SEQ ID NO: 368939 - DNA, 25 bp, Artificial
  probe
  misc_feature (1)..(25): SEQ ID NO: 3968; WAN024FEE-5; Start 436; Stop 460
attgcgacagaagatgaacacttta

SEQ ID NO: 368940 - DNA, 25 bp, Artificial
  probe
  misc_feature (1)..(25): SEQ ID NO: 3968; WAN024FEE-5; Start 293; Stop 317
aattggtgaatcaggtcaaggacat

SEQ ID NO: 368941 - DNA, 25 bp, Artificial
  probe
  misc_feature (1)..(25): SEQ ID NO: 3968; WAN024FEE-5; Start 437; Stop 461
ttgcgacagaagatgaacactttaa

SEQ ID NO: 368942 - DNA, 25 bp, Artificial
  probe
  misc_feature (1)..(25): SEQ ID NO: 3968; WAN024FEE-5; Start 308; Stop 332
tcaaggacatctcttctatttcaga

SEQ ID NO: 368943 - DNA, 25 bp, Artificial
  probe
  misc_feature (1)..(25): SEQ ID NO: 3969; WAN024DBB; Start 1049; Stop 1073
gagagtattctgaagagcatctgtt

SEQ ID NO: 368944 - DNA, 25 bp, Artificial
  probe
  misc_feature (1)..(25): SEQ ID NO: 3969; WAN024DBB; Start 706; Stop 730
ggtatgacagatggttatgaacact

SEQ ID NO: 368945 - DNA, 25 bp, Artificial
  probe
  misc_feature (1)..(25): SEQ ID NO: 3969; WAN024DBB; Start 156; Stop 180
ttaccgtgaattagttcgtcttctt

SEQ ID NO: 368946 - DNA, 25 bp, Artificial
  probe
  misc_feature (1)..(25): SEQ ID NO: 3969; WAN024DBB; Start 705; Stop 729
tggtatgacagatggttatgaacac

SEQ ID NO: 368947 - DNA, 25 bp, Artificial
  probe
  misc_feature (1)..(25): SEQ ID NO: 3969; WAN024DBB; Start 704; Stop 728
gtggtatgacagatggttatgaaca

SEQ ID NO: 368948 - DNA, 25 bp, Artificial
  probe
  misc_feature (1)..(25): SEQ ID NO: 3969; WAN024DBB; Start 1048; Stop 1072
agagagtattctgaagagcatctgt

SEQ ID NO: 368949 - DNA, 25 bp, Artificial
  probe
  misc_feature (1)..(25): SEQ ID NO: 3969; WAN024DBB; Start 155; Stop 179
cttaccgtgaattagttcgtcttct

SEQ ID NO: 368950 - DNA, 25 bp, Artificial
  probe
  misc_feature (1)..(25): SEQ ID NO: 3969; WAN024DBB; Start 157; Stop 181
taccgtgaattagttcgtcttcttc

SEQ ID NO: 368951 - DNA, 25 bp, Artificial
  probe
  misc_feature (1)..(25): SEQ ID NO: 3969; WAN024DBB; Start 1052; Stop 1076
agtattctgaagagcatctgttaca

SEQ ID NO: 368952 - DNA, 25 bp, Artificial
  probe
  misc_feature (1)..(25): SEQ ID NO: 3969; WAN024DBB; Start 702; Stop 726
tggtggtatgacagatggttatgaa

SEQ ID NO: 368953 - DNA, 25 bp, Artificial
  probe
  misc_feature (1)..(25): SEQ ID NO: 3969; WAN024DBB; Start 701; Stop 725
ttggtggtatgacagatggttatga

SEQ ID NO: 368954 - DNA, 25 bp, Artificial
  probe
  misc_feature (1)..(25): SEQ ID NO: 3969; WAN024DBB; Start 1051; Stop 1075
gagtattctgaagagcatctgttac

SEQ ID NO: 368955 - DNA, 25 bp, Artificial
  probe
  misc_feature (1)..(25): SEQ ID NO: 3969; WAN024DBB; Start 1050; Stop 1074
agagtattctgaagagcatctgtta

SEQ ID NO: 368956 - DNA, 25 bp, Artificial
  probe
  misc_feature (1)..(25): SEQ ID NO: 3969; WAN024DBB; Start 703; Stop 727
ggtggtatgacagatggttatgaac

SEQ ID NO: 368957 - DNA, 25 bp, Artificial
  probe
  misc_feature (1)..(25): SEQ ID NO: 3969; WAN024DBB; Start 1053; Stop 1077
gtattctgaagagcatctgttacaa

SEQ ID NO: 368958 - DNA, 25 bp, Artificial
  probe
  misc_feature (1)..(25): SEQ ID NO: 3969; WAN024DBB; Start 566; Stop 590
atcttggtcttagtgacaatcagtt

SEQ ID NO: 368959 - DNA, 25 bp, Artificial
  probe
  misc_feature (1)..(25): SEQ ID NO: 3969; WAN024DBB; Start 707; Stop 731
gtatgacagatggttatgaacacta

SEQ ID NO: 368960 - DNA, 25 bp, Artificial
  probe
  misc_feature (1)..(25): SEQ ID NO: 3969; WAN024DBB; Start 879; Stop 903
gagttgtgaggctcctattatgttg

SEQ ID NO: 368961 - DNA, 25 bp, Artificial
  probe
  misc_feature (1)..(25): SEQ ID NO: 3969; WAN024DBB; Start 163; Stop 187
gaattagttcgtcttcttcaccgtg

SEQ ID NO: 368962 - DNA, 25 bp, Artificial
  probe
  misc_feature (1)..(25): SEQ ID NO: 3969; WAN024DBB; Start 154; Stop 178
gcttaccgtgaattagttcgtcttc

SEQ ID NO: 368963 - DNA, 25 bp, Artificial
  probe
  misc_feature (1)..(25): SEQ ID NO: 3969; WAN024DBB; Start 565; Stop 589
gatcttggtcttagtgacaatcagt

SEQ ID NO: 368964 - DNA, 25 bp, Artificial
  probe
  misc_feature (1)..(25): SEQ ID NO: 3969; WAN024DBB; Start 422; Stop 446
acttggttgtggtcaatcctatgtt

SEQ ID NO: 368965 - DNA, 25 bp, Artificial
  probe
  misc_feature (1)..(25): SEQ ID NO: 3969; WAN024DBB; Start 710; Stop 734
tgacagatggttatgaacactataa

SEQ ID NO: 368966 - DNA, 25 bp, Artificial
  probe
  misc_feature (1)..(25): SEQ ID NO: 3969; WAN024DBB; Start 153; Stop 177
tgcttaccgtgaattagttcgtctt

SEQ ID NO: 368967 - DNA, 25 bp, Artificial
  probe
  misc_feature (1)..(25): SEQ ID NO: 3969; WAN024DBB; Start 889; Stop 913
gctcctattatgttgcgtgatttag

SEQ ID NO: 368968 - DNA, 25 bp, Artificial
  probe
  misc_feature (1)..(25): SEQ ID NO: 3969; WAN024DBB; Start 582; Stop 606
caatcagtttatcgtagtaggtgct

SEQ ID NO: 368969 - DNA, 25 bp, Artificial
  probe
  misc_feature (1)..(25): SEQ ID NO: 3969; WAN024DBB; Start 581; Stop 605
acaatcagtttatcgtagtaggtgc

SEQ ID NO: 368970 - DNA, 25 bp, Artificial
  probe
  misc_feature (1)..(25): SEQ ID NO: 3969; WAN024DBB; Start 442; Stop 466
atgtttattgaggatttggtagcag

SEQ ID NO: 368971 - DNA, 25 bp, Artificial
  probe
  misc_feature (1)..(25): SEQ ID NO: 3969; WAN024DBB; Start 958; Stop 982
ggtagagaagagatgaaagaggcta

SEQ ID NO: 368972 - DNA, 25 bp, Artificial
  probe
  misc_feature (1)..(25): SEQ ID NO: 3969; WAN024DBB; Start 700; Stop 724
tttggtggtatgacagatggttatg

SEQ ID NO: 368973 - DNA, 25 bp, Artificial
  probe
  misc_feature (1)..(25): SEQ ID NO: 3969; WAN024DBB; Start 961; Stop 985
agagaagagatgaaagaggctattt

SEQ ID NO: 368974 - DNA, 25 bp, Artificial
  probe
  misc_feature (1)..(25): SEQ ID NO: 3969; WAN024DBB; Start 709; Stop 733
atgacagatggttatgaacactata

SEQ ID NO: 368975 - DNA, 25 bp, Artificial
  probe
  misc_feature (1)..(25): SEQ ID NO: 3969; WAN024DBB; Start 708; Stop 732
tatgacagatggttatgaacactat

SEQ ID NO: 368976 - DNA, 25 bp, Artificial
  probe
  misc_feature (1)..(25): SEQ ID NO: 3970; WAN024CTT; Start 148; Stop 172
tgtaggttcaccaatatagtccgta

SEQ ID NO: 368977 - DNA, 25 bp, Artificial
  probe
  misc_feature (1)..(25): SEQ ID NO: 3970; WAN024CTT; Start 161; Stop 185
atatagtccgtacctgtccagataa

SEQ ID NO: 368978 - DNA, 25 bp, Artificial
  probe
  misc_feature (1)..(25): SEQ ID NO: 3970; WAN024CTT; Start 160; Stop 184
aatatagtccgtacctgtccagata

SEQ ID NO: 368979 - DNA, 25 bp, Artificial
  probe
  misc_feature (1)..(25): SEQ ID NO: 3970; WAN024CTT; Start 149; Stop 173
gtaggttcaccaatatagtccgtac

SEQ ID NO: 368980 - DNA, 25 bp, Artificial
  probe
  misc_feature (1)..(25): SEQ ID NO: 3970; WAN024CTT; Start 159; Stop 183
caatatagtccgtacctgtccagat

SEQ ID NO: 368981 - DNA, 25 bp, Artificial
  probe
  misc_feature (1)..(25): SEQ ID NO: 3970; WAN024CTT; Start 154; Stop 178
ttcaccaatatagtccgtacctgtc

SEQ ID NO: 368982 - DNA, 25 bp, Artificial
  probe
  misc_feature (1)..(25): SEQ ID NO: 3970; WAN024CTT; Start 153; Stop 177
gttcaccaatatagtccgtacctgt

SEQ ID NO: 368983 - DNA, 25 bp, Artificial
  probe
  misc_feature (1)..(25): SEQ ID NO: 3970; WAN024CTT; Start 147; Stop 171
gtgtaggttcaccaatatagtccgt

SEQ ID NO: 368984 - DNA, 25 bp, Artificial
  probe
  misc_feature (1)..(25): SEQ ID NO: 3970; WAN024CTT; Start 45; Stop 69
attggctttggtagagatagaagtc

SEQ ID NO: 368985 - DNA, 25 bp, Artificial
  probe
  misc_feature (1)..(25): SEQ ID NO: 3970; WAN024CTT; Start 44; Stop 68
cattggctttggtagagatagaagt

SEQ ID NO: 368986 - DNA, 25 bp, Artificial
  probe
  misc_feature (1)..(25): SEQ ID NO: 3970; WAN024CTT; Start 150; Stop 174
taggttcaccaatatagtccgtacc

SEQ ID NO: 368987 - DNA, 25 bp, Artificial
  probe
  misc_feature (1)..(25): SEQ ID NO: 3970; WAN024CTT; Start 47; Stop 71
tggctttggtagagatagaagtcat

SEQ ID NO: 368988 - DNA, 25 bp, Artificial
  probe
  misc_feature (1)..(25): SEQ ID NO: 3970; WAN024CTT; Start 46; Stop 70
ttggctttggtagagatagaagtca

SEQ ID NO: 368989 - DNA, 25 bp, Artificial
  probe
  misc_feature (1)..(25): SEQ ID NO: 3970; WAN024CTT; Start 162; Stop 186
tatagtccgtacctgtccagataaa

SEQ ID NO: 368990 - DNA, 25 bp, Artificial
  probe
  misc_feature (1)..(25): SEQ ID NO: 3970; WAN024CTT; Start 158; Stop 182
ccaatatagtccgtacctgtccaga

SEQ ID NO: 368991 - DNA, 25 bp, Artificial
  probe
  misc_feature (1)..(25): SEQ ID NO: 3970; WAN024CTT; Start 49; Stop 73
gctttggtagagatagaagtcatgt

SEQ ID NO: 368992 - DNA, 25 bp, Artificial
  probe
  misc_feature (1)..(25): SEQ ID NO: 3970; WAN024CTT; Start 157; Stop 181
accaatatagtccgtacctgtccag

SEQ ID NO: 368993 - DNA, 25 bp, Artificial
  probe
  misc_feature (1)..(25): SEQ ID NO: 3970; WAN024CTT; Start 155; Stop 179
tcaccaatatagtccgtacctgtcc

SEQ ID NO: 368994 - DNA, 25 bp, Artificial
  probe
  misc_feature (1)..(25): SEQ ID NO: 3970; WAN024CTT; Start 163; Stop 187
atagtccgtacctgtccagataaac

SEQ ID NO: 368995 - DNA, 25 bp, Artificial
  probe
  misc_feature (1)..(25): SEQ ID NO: 3970; WAN024CTT; Start 48; Stop 72
ggctttggtagagatagaagtcatg

SEQ ID NO: 368996 - DNA, 25 bp, Artificial
  probe
  misc_feature (1)..(25): SEQ ID NO: 3970; WAN024CTT; Start 156; Stop 180
caccaatatagtccgtacctgtcca

SEQ ID NO: 368997 - DNA, 25 bp, Artificial
  probe
  misc_feature (1)..(25): SEQ ID NO: 3970; WAN024CTT; Start 152; Stop 176
ggttcaccaatatagtccgtacctg

SEQ ID NO: 368998 - DNA, 25 bp, Artificial
  probe
  misc_feature (1)..(25): SEQ ID NO: 3970; WAN024CTT; Start 30; Stop 54
tcttaacagaaacccattggctttg

SEQ ID NO: 368999 - DNA, 25 bp, Artificial
  probe
  misc_feature (1)..(25): SEQ ID NO: 3970; WAN024CTT; Start 43; Stop 67
ccattggctttggtagagatagaag

SEQ ID NO: 369000 - DNA, 25 bp, Artificial
  probe
  misc_feature (1)..(25): SEQ ID NO: 3970; WAN024CTT; Start 50; Stop 74
ctttggtagagatagaagtcatgtt

SEQ ID NO: 369001 - DNA, 25 bp, Artificial
  probe
  misc_feature (1)..(25): SEQ ID NO: 3970; WAN024CTT; Start 15; Stop 39
gtaccatcggtttcttcttaacaga

SEQ ID NO: 369002 - DNA, 25 bp, Artificial
  probe
  misc_feature (1)..(25): SEQ ID NO: 3970; WAN024CTT; Start 14; Stop 38
tgtaccatcggtttcttcttaacag

SEQ ID NO: 369003 - DNA, 25 bp, Artificial
  probe
  misc_feature (1)..(25): SEQ ID NO: 3970; WAN024CTT; Start 175; Stop 199
tgtccagataaactgtccagcatag

SEQ ID NO: 369004 - DNA, 25 bp, Artificial
  probe
  misc_feature (1)..(25): SEQ ID NO: 3970; WAN024CTT; Start 174; Stop 198
ctgtccagataaactgtccagcata

SEQ ID NO: 369005 - DNA, 25 bp, Artificial
  probe
  misc_feature (1)..(25): SEQ ID NO: 3970; WAN024CTT; Start 13; Stop 37
gtgtaccatcggtttcttcttaaca

SEQ ID NO: 369006 - DNA, 25 bp, Artificial
  probe
  misc_feature (1)..(25): SEQ ID NO: 3970; WAN024CTT; Start 164; Stop 188
tagtccgtacctgtccagataaact

SEQ ID NO: 369007 - DNA, 25 bp, Artificial
  probe
  misc_feature (1)..(25): SEQ ID NO: 3970; WAN024CTT; Start 51; Stop 75
tttggtagagatagaagtcatgttt

SEQ ID NO: 369008 - DNA, 25 bp, Artificial
  probe
  misc_feature (1)..(25): SEQ ID NO: 3970; WAN024CTT; Start 16; Stop 40
taccatcggtttcttcttaacagaa

SEQ ID NO: 369009 - DNA, 25 bp, Artificial
  probe
  misc_feature (1)..(25): SEQ ID NO: 3971; WAN024FLT; Start 1122; Stop 1146
ggaacactatatctatctcttgcgt

SEQ ID NO: 369010 - DNA, 25 bp, Artificial
  probe
  misc_feature (1)..(25): SEQ ID NO: 3971; WAN024FLT; Start 1121; Stop 1145
tggaacactatatctatctcttgcg

SEQ ID NO: 369011 - DNA, 25 bp, Artificial
  probe
  misc_feature (1)..(25): SEQ ID NO: 3971; WAN024FLT; Start 958; Stop 982
caggagcgttatgaggatattctag

SEQ ID NO: 369012 - DNA, 25 bp, Artificial
  probe
  misc_feature (1)..(25): SEQ ID NO: 3971; WAN024FLT; Start 10; Stop 34
tcaagagtgaacaatagtcaacaga

SEQ ID NO: 369013 - DNA, 25 bp, Artificial
  probe
  misc_feature (1)..(25): SEQ ID NO: 3971; WAN024FLT; Start 9; Stop 33
gtcaagagtgaacaatagtcaacag

SEQ ID NO: 369014 - DNA, 25 bp, Artificial
  probe
  misc_feature (1)..(25): SEQ ID NO: 3971; WAN024FLT; Start 8; Stop 32
agtcaagagtgaacaatagtcaaca

SEQ ID NO: 369015 - DNA, 25 bp, Artificial
  probe
  misc_feature (1)..(25): SEQ ID NO: 3971; WAN024FLT; Start 4; Stop 28
aggaagtcaagagtgaacaatagtc

SEQ ID NO: 369016 - DNA, 25 bp, Artificial
  probe
  misc_feature (1)..(25): SEQ ID NO: 3971; WAN024FLT; Start 3; Stop 27
gaggaagtcaagagtgaacaatagt

SEQ ID NO: 369017 - DNA, 25 bp, Artificial
  probe
  misc_feature (1)..(25): SEQ ID NO: 3971; WAN024FLT; Start 2; Stop 26
tgaggaagtcaagagtgaacaatag

SEQ ID NO: 369018 - DNA, 25 bp, Artificial
  probe
  misc_feature (1)..(25): SEQ ID NO: 3971; WAN024FLT; Start 1018; Stop 1042
aagtggatgattgctcgttcttatc

SEQ ID NO: 369019 - DNA, 25 bp, Artificial
  probe
  misc_feature (1)..(25): SEQ ID NO: 3971; WAN024FLT; Start 5; Stop 29
ggaagtcaagagtgaacaatagtca

SEQ ID NO: 369020 - DNA, 25 bp, Artificial
  probe
  misc_feature (1)..(25): SEQ ID NO: 3971; WAN024FLT; Start 594; Stop 618
cctggagttagaatacgatgactta

SEQ ID NO: 369021 - DNA, 25 bp, Artificial
  probe
  misc_feature (1)..(25): SEQ ID NO: 3971; WAN024FLT; Start 200; Stop 224
ttccagaggttcatcttaatctagc

SEQ ID NO: 369022 - DNA, 25 bp, Artificial
  probe
  misc_feature (1)..(25): SEQ ID NO: 3971; WAN024FLT; Start 1120; Stop 1144
ctggaacactatatctatctcttgc

SEQ ID NO: 369023 - DNA, 25 bp, Artificial
  probe
  misc_feature (1)..(25): SEQ ID NO: 3971; WAN024FLT; Start 7; Stop 31
aagtcaagagtgaacaatagtcaac

SEQ ID NO: 369024 - DNA, 25 bp, Artificial
  probe
  misc_feature (1)..(25): SEQ ID NO: 3971; WAN024FLT; Start 12; Stop 36
aagagtgaacaatagtcaacagatg

SEQ ID NO: 369025 - DNA, 25 bp, Artificial
  probe
  misc_feature (1)..(25): SEQ ID NO: 3971; WAN024FLT; Start 11; Stop 35
caagagtgaacaatagtcaacagat

SEQ ID NO: 369026 - DNA, 25 bp, Artificial
  probe
  misc_feature (1)..(25): SEQ ID NO: 3971; WAN024FLT; Start 6; Stop 30
gaagtcaagagtgaacaatagtcaa

SEQ ID NO: 369027 - DNA, 25 bp, Artificial
  probe
  misc_feature (1)..(25): SEQ ID NO: 3971; WAN024FLT; Start 1129; Stop 1153
tatatctatctcttgcgtgaattgg

SEQ ID NO: 369028 - DNA, 25 bp, Artificial
  probe
  misc_feature (1)..(25): SEQ ID NO: 3971; WAN024FLT; Start 957; Stop 981
gcaggagcgttatgaggatattcta

SEQ ID NO: 369029 - DNA, 25 bp, Artificial
  probe
  misc_feature (1)..(25): SEQ ID NO: 3971; WAN024FLT; Start 13; Stop 37
agagtgaacaatagtcaacagatgt

SEQ ID NO: 369030 - DNA, 25 bp, Artificial
  probe
  misc_feature (1)..(25): SEQ ID NO: 3971; WAN024FLT; Start 1017; Stop 1041
caagtggatgattgctcgttcttat

SEQ ID NO: 369031 - DNA, 25 bp, Artificial
  probe
  misc_feature (1)..(25): SEQ ID NO: 3971; WAN024FLT; Start 22; Stop 46
aatagtcaacagatgttacaggctt

SEQ ID NO: 369032 - DNA, 25 bp, Artificial
  probe
  misc_feature (1)..(25): SEQ ID NO: 3971; WAN024FLT; Start 21; Stop 45
caatagtcaacagatgttacaggct

SEQ ID NO: 369033 - DNA, 25 bp, Artificial
  probe
  misc_feature (1)..(25): SEQ ID NO: 3971; WAN024FLT; Start 779; Stop 803
gtatcgctaagcaaggattagagaa

SEQ ID NO: 369034 - DNA, 25 bp, Artificial
  probe
  misc_feature (1)..(25): SEQ ID NO: 3971; WAN024FLT; Start 1125; Stop 1149
acactatatctatctcttgcgtgaa

SEQ ID NO: 369035 - DNA, 25 bp, Artificial
  probe
  misc_feature (1)..(25): SEQ ID NO: 3971; WAN024FLT; Start 1124; Stop 1148
aacactatatctatctcttgcgtga

SEQ ID NO: 369036 - DNA, 25 bp, Artificial
  probe
  misc_feature (1)..(25): SEQ ID NO: 3971; WAN024FLT; Start 1123; Stop 1147
gaacactatatctatctcttgcgtg

SEQ ID NO: 369037 - DNA, 25 bp, Artificial
  probe
  misc_feature (1)..(25): SEQ ID NO: 3971; WAN024FLT; Start 595; Stop 619
ctggagttagaatacgatgacttaa

SEQ ID NO: 369038 - DNA, 25 bp, Artificial
  probe
  misc_feature (1)..(25): SEQ ID NO: 3971; WAN024FLT; Start 1127; Stop 1151
actatatctatctcttgcgtgaatt

SEQ ID NO: 369039 - DNA, 25 bp, Artificial
  probe
  misc_feature (1)..(25): SEQ ID NO: 3971; WAN024FLT; Start 20; Stop 44
acaatagtcaacagatgttacaggc

SEQ ID NO: 369040 - DNA, 25 bp, Artificial
  probe
  misc_feature (1)..(25): SEQ ID NO: 3971; WAN024FLT; Start 201; Stop 225
tccagaggttcatcttaatctagct

SEQ ID NO: 369041 - DNA, 25 bp, Artificial
  probe
  misc_feature (1)..(25): SEQ ID NO: 3971; WAN024FLT; Start 599; Stop 623
agttagaatacgatgacttaacagc

SEQ ID NO: 369042 - DNA, 25 bp, Artificial
  probe
  misc_feature (1)..(25): SEQ ID NO: 3972; WAN024EXS; Start 282; Stop 306
caatatcattcatcaagcagagcaa

SEQ ID NO: 369043 - DNA, 25 bp, Artificial
  probe
  misc_feature (1)..(25): SEQ ID NO: 3972; WAN024EXS; Start 280; Stop 304
aacaatatcattcatcaagcagagc

SEQ ID NO: 369044 - DNA, 25 bp, Artificial
  probe
  misc_feature (1)..(25): SEQ ID NO: 3972; WAN024EXS; Start 283; Stop 307
aatatcattcatcaagcagagcaag

SEQ ID NO: 369045 - DNA, 25 bp, Artificial
  probe
  misc_feature (1)..(25): SEQ ID NO: 3972; WAN024EXS; Start 284; Stop 308
atatcattcatcaagcagagcaaga

SEQ ID NO: 369046 - DNA, 25 bp, Artificial
  probe
  misc_feature (1)..(25): SEQ ID NO: 3972; WAN024EXS; Start 285; Stop 309
tatcattcatcaagcagagcaagat

SEQ ID NO: 369047 - DNA, 25 bp, Artificial
  probe
  misc_feature (1)..(25): SEQ ID NO: 3972; WAN024EXS; Start 281; Stop 305
acaatatcattcatcaagcagagca

SEQ ID NO: 369048 - DNA, 25 bp, Artificial
  probe
  misc_feature (1)..(25): SEQ ID NO: 3972; WAN024EXS; Start 203; Stop 227
aagattcattgagccagtctgtatt

SEQ ID NO: 369049 - DNA, 25 bp, Artificial
  probe
  misc_feature (1)..(25): SEQ ID NO: 3972; WAN024EXS; Start 1; Stop 25
gtgaggaatagaatgccaattacat

SEQ ID NO: 369050 - DNA, 25 bp, Artificial
  probe
  misc_feature (1)..(25): SEQ ID NO: 3972; WAN024EXS; Start 396; Stop 420
aacagaagaattgaagaacaagagc

SEQ ID NO: 369051 - DNA, 25 bp, Artificial
  probe
  misc_feature (1)..(25): SEQ ID NO: 3972; WAN024EXS; Start 352; Stop 376
attcttcgtcaagcaactgataatg

SEQ ID NO: 369052 - DNA, 25 bp, Artificial
  probe
  misc_feature (1)..(25): SEQ ID NO: 3972; WAN024EXS; Start 351; Stop 375
gattcttcgtcaagcaactgataat

SEQ ID NO: 369053 - DNA, 25 bp, Artificial
  probe
  misc_feature (1)..(25): SEQ ID NO: 3972; WAN024EXS; Start 458; Stop 482
gtcagttggctattgttgaatcttc

SEQ ID NO: 369054 - DNA, 25 bp, Artificial
  probe
  misc_feature (1)..(25): SEQ ID NO: 3972; WAN024EXS; Start 350; Stop 374
agattcttcgtcaagcaactgataa

SEQ ID NO: 369055 - DNA, 25 bp, Artificial
  probe
  misc_feature (1)..(25): SEQ ID NO: 3972; WAN024EXS; Start 457; Stop 481
agtcagttggctattgttgaatctt

SEQ ID NO: 369056 - DNA, 25 bp, Artificial
  probe
  misc_feature (1)..(25): SEQ ID NO: 3972; WAN024EXS; Start 3; Stop 27
gaggaatagaatgccaattacatca

SEQ ID NO: 369057 - DNA, 25 bp, Artificial
  probe
  misc_feature (1)..(25): SEQ ID NO: 3972; WAN024EXS; Start 2; Stop 26
tgaggaatagaatgccaattacatc

SEQ ID NO: 369058 - DNA, 25 bp, Artificial
  probe
  misc_feature (1)..(25): SEQ ID NO: 3972; WAN024EXS; Start 204; Stop 228
agattcattgagccagtctgtattg

SEQ ID NO: 369059 - DNA, 25 bp, Artificial
  probe
  misc_feature (1)..(25): SEQ ID NO: 3972; WAN024EXS; Start 206; Stop 230
attcattgagccagtctgtattgat

SEQ ID NO: 369060 - DNA, 25 bp, Artificial
  probe
  misc_feature (1)..(25): SEQ ID NO: 3972; WAN024EXS; Start 450; Stop 474
aattgagagtcagttggctattgtt

SEQ ID NO: 369061 - DNA, 25 bp, Artificial
  probe
  misc_feature (1)..(25): SEQ ID NO: 3972; WAN024EXS; Start 207; Stop 231
ttcattgagccagtctgtattgatt

SEQ ID NO: 369062 - DNA, 25 bp, Artificial
  probe
  misc_feature (1)..(25): SEQ ID NO: 3972; WAN024EXS; Start 349; Stop 373
gagattcttcgtcaagcaactgata

SEQ ID NO: 369063 - DNA, 25 bp, Artificial
  probe
  misc_feature (1)..(25): SEQ ID NO: 3972; WAN024EXS; Start 456; Stop 480
gagtcagttggctattgttgaatct

SEQ ID NO: 369064 - DNA, 25 bp, Artificial
  probe
  misc_feature (1)..(25): SEQ ID NO: 3972; WAN024EXS; Start 455; Stop 479
agagtcagttggctattgttgaatc

SEQ ID NO: 369065 - DNA, 25 bp, Artificial
  probe
  misc_feature (1)..(25): SEQ ID NO: 3972; WAN024EXS; Start 454; Stop 478
gagagtcagttggctattgttgaat

SEQ ID NO: 369066 - DNA, 25 bp, Artificial
  probe
  misc_feature (1)..(25): SEQ ID NO: 3972; WAN024EXS; Start 205; Stop 229
gattcattgagccagtctgtattga

SEQ ID NO: 369067 - DNA, 25 bp, Artificial
  probe
  misc_feature (1)..(25): SEQ ID NO: 3972; WAN024EXS; Start 208; Stop 232
tcattgagccagtctgtattgattg

SEQ ID NO: 369068 - DNA, 25 bp, Artificial
  probe
  misc_feature (1)..(25): SEQ ID NO: 3972; WAN024EXS; Start 451; Stop 475
attgagagtcagttggctattgttg

SEQ ID NO: 369069 - DNA, 25 bp, Artificial
  probe
  misc_feature (1)..(25): SEQ ID NO: 3972; WAN024EXS; Start 217; Stop 241
cagtctgtattgattgctcaggata

SEQ ID NO: 369070 - DNA, 25 bp, Artificial
  probe
  misc_feature (1)..(25): SEQ ID NO: 3972; WAN024EXS; Start 4; Stop 28
aggaatagaatgccaattacatcat

SEQ ID NO: 369071 - DNA, 25 bp, Artificial
  probe
  misc_feature (1)..(25): SEQ ID NO: 3972; WAN024EXS; Start 397; Stop 421
acagaagaattgaagaacaagagcc

SEQ ID NO: 369072 - DNA, 25 bp, Artificial
  probe
  misc_feature (1)..(25): SEQ ID NO: 3972; WAN024EXS; Start 462; Stop 486
gttggctattgttgaatcttcagat

SEQ ID NO: 369073 - DNA, 25 bp, Artificial
  probe
  misc_feature (1)..(25): SEQ ID NO: 3972; WAN024EXS; Start 461; Stop 485
agttggctattgttgaatcttcaga

SEQ ID NO: 369074 - DNA, 25 bp, Artificial
  probe
  misc_feature (1)..(25): SEQ ID NO: 3972; WAN024EXS; Start 460; Stop 484
cagttggctattgttgaatcttcag

SEQ ID NO: 369075 - DNA, 25 bp, Artificial
  probe
  misc_feature (1)..(25): SEQ ID NO: 3973; WAN024DB5; Start 33; Stop 57
ccaagaagattcactattaccaaga

SEQ ID NO: 369076 - DNA, 25 bp, Artificial
  probe
  misc_feature (1)..(25): SEQ ID NO: 3973; WAN024DB5; Start 32; Stop 56
tccaagaagattcactattaccaag

SEQ ID NO: 369077 - DNA, 25 bp, Artificial
  probe
  misc_feature (1)..(25): SEQ ID NO: 3973; WAN024DB5; Start 393; Stop 417
ggtggcactctatctcaatactcaa

SEQ ID NO: 369078 - DNA, 25 bp, Artificial
  probe
  misc_feature (1)..(25): SEQ ID NO: 3973; WAN024DB5; Start 31; Stop 55
ttccaagaagattcactattaccaa

SEQ ID NO: 369079 - DNA, 25 bp, Artificial
  probe
  misc_feature (1)..(25): SEQ ID NO: 3973; WAN024DB5; Start 391; Stop 415
ctggtggcactctatctcaatactc

SEQ ID NO: 369080 - DNA, 25 bp, Artificial
  probe
  misc_feature (1)..(25): SEQ ID NO: 3973; WAN024DB5; Start 30; Stop 54
attccaagaagattcactattacca

SEQ ID NO: 369081 - DNA, 25 bp, Artificial
  probe
  misc_feature (1)..(25): SEQ ID NO: 3973; WAN024DB5; Start 454; Stop 478
tctgtaactcgtagtatcgctgaac

SEQ ID NO: 369082 - DNA, 25 bp, Artificial
  probe
  misc_feature (1)..(25): SEQ ID NO: 3973; WAN024DB5; Start 29; Stop 53
cattccaagaagattcactattacc

SEQ ID NO: 369083 - DNA, 25 bp, Artificial
  probe
  misc_feature (1)..(25): SEQ ID NO: 3973; WAN024DB5; Start 35; Stop 59
aagaagattcactattaccaagaga

SEQ ID NO: 369084 - DNA, 25 bp, Artificial
  probe
  misc_feature (1)..(25): SEQ ID NO: 3973; WAN024DB5; Start 34; Stop 58
caagaagattcactattaccaagag

SEQ ID NO: 369085 - DNA, 25 bp, Artificial
  probe
  misc_feature (1)..(25): SEQ ID NO: 3973; WAN024DB5; Start 392; Stop 416
tggtggcactctatctcaatactca

SEQ ID NO: 369086 - DNA, 25 bp, Artificial
  probe
  misc_feature (1)..(25): SEQ ID NO: 3973; WAN024DB5; Start 313; Stop 337
gaaatggaaagtattctcagcagtc

SEQ ID NO: 369087 - DNA, 25 bp, Artificial
  probe
  misc_feature (1)..(25): SEQ ID NO: 3973; WAN024DB5; Start 36; Stop 60
agaagattcactattaccaagagaa

SEQ ID NO: 369088 - DNA, 25 bp, Artificial
  probe
  misc_feature (1)..(25): SEQ ID NO: 3973; WAN024DB5; Start 41; Stop 65
attcactattaccaagagaaaggct

SEQ ID NO: 369089 - DNA, 25 bp, Artificial
  probe
  misc_feature (1)..(25): SEQ ID NO: 3973; WAN024DB5; Start 316; Stop 340
atggaaagtattctcagcagtcaaa

SEQ ID NO: 369090 - DNA, 25 bp, Artificial
  probe
  misc_feature (1)..(25): SEQ ID NO: 3973; WAN024DB5; Start 315; Stop 339
aatggaaagtattctcagcagtcaa

SEQ ID NO: 369091 - DNA, 25 bp, Artificial
  probe
  misc_feature (1)..(25): SEQ ID NO: 3973; WAN024DB5; Start 314; Stop 338
aaatggaaagtattctcagcagtca

SEQ ID NO: 369092 - DNA, 25 bp, Artificial
  probe
  misc_feature (1)..(25): SEQ ID NO: 3973; WAN024DB5; Start 582; Stop 606
tgtcactaaacttgttaaagaagcc

SEQ ID NO: 369093 - DNA, 25 bp, Artificial
  probe
  misc_feature (1)..(25): SEQ ID NO: 3973; WAN024DB5; Start 42; Stop 66
ttcactattaccaagagaaaggctg

SEQ ID NO: 369094 - DNA, 25 bp, Artificial
  probe
  misc_feature (1)..(25): SEQ ID NO: 3973; WAN024DB5; Start 40; Stop 64
gattcactattaccaagagaaaggc

SEQ ID NO: 369095 - DNA, 25 bp, Artificial
  probe
  misc_feature (1)..(25): SEQ ID NO: 3973; WAN024DB5; Start 394; Stop 418
gtggcactctatctcaatactcaaa

SEQ ID NO: 369096 - DNA, 25 bp, Artificial
  probe
  misc_feature (1)..(25): SEQ ID NO: 3973; WAN024DB5; Start 584; Stop 608
tcactaaacttgttaaagaagcctg

SEQ ID NO: 369097 - DNA, 25 bp, Artificial
  probe
  misc_feature (1)..(25): SEQ ID NO: 3973; WAN024DB5; Start 583; Stop 607
gtcactaaacttgttaaagaagcct

SEQ ID NO: 369098 - DNA, 25 bp, Artificial
  probe
  misc_feature (1)..(25): SEQ ID NO: 3973; WAN024DB5; Start 622; Stop 646
attgttctcttggaccatttgattg

SEQ ID NO: 369099 - DNA, 25 bp, Artificial
  probe
  misc_feature (1)..(25): SEQ ID NO: 3973; WAN024DB5; Start 585; Stop 609
cactaaacttgttaaagaagcctgc

SEQ ID NO: 369100 - DNA, 25 bp, Artificial
  probe
  misc_feature (1)..(25): SEQ ID NO: 3973; WAN024DB5; Start 298; Stop 322
aaacacgagactcttgaaatggaaa

SEQ ID NO: 369101 - DNA, 25 bp, Artificial
  probe
  misc_feature (1)..(25): SEQ ID NO: 3973; WAN024DB5; Start 455; Stop 479
ctgtaactcgtagtatcgctgaacc

SEQ ID NO: 369102 - DNA, 25 bp, Artificial
  probe
  misc_feature (1)..(25): SEQ ID NO: 3973; WAN024DB5; Start 259; Stop 283
gaattacaagctatgattgaactgg

SEQ ID NO: 369103 - DNA, 25 bp, Artificial
  probe
  misc_feature (1)..(25): SEQ ID NO: 3973; WAN024DB5; Start 623; Stop 647
ttgttctcttggaccatttgattgt

SEQ ID NO: 369104 - DNA, 25 bp, Artificial
  probe
  misc_feature (1)..(25): SEQ ID NO: 3973; WAN024DB5; Start 312; Stop 336
tgaaatggaaagtattctcagcagt

SEQ ID NO: 369105 - DNA, 25 bp, Artificial
  probe
  misc_feature (1)..(25): SEQ ID NO: 3973; WAN024DB5; Start 311; Stop 335
ttgaaatggaaagtattctcagcag

SEQ ID NO: 369106 - DNA, 25 bp, Artificial
  probe
  misc_feature (1)..(25): SEQ ID NO: 3973; WAN024DB5; Start 310; Stop 334
cttgaaatggaaagtattctcagca

SEQ ID NO: 369107 - DNA, 25 bp, Artificial
  probe
  misc_feature (1)..(25): SEQ ID NO: 3973; WAN024DB5; Start 302; Stop 326
acgagactcttgaaatggaaagtat

SEQ ID NO: 369108 - DNA, 25 bp, Artificial
  probe
  misc_feature (1)..(25): SEQ ID NO: 3974; WAN024GKL; Start 716; Stop 740
attatgggaacaaagacgaaacaac

SEQ ID NO: 369109 - DNA, 25 bp, Artificial
  probe
  misc_feature (1)..(25): SEQ ID NO: 3974; WAN024GKL; Start 893; Stop 917
ctggttatgtaactaatacgagaga

SEQ ID NO: 369110 - DNA, 25 bp, Artificial
  probe
  misc_feature (1)..(25): SEQ ID NO: 3974; WAN024GKL; Start 892; Stop 916
tctggttatgtaactaatacgagag

SEQ ID NO: 369111 - DNA, 25 bp, Artificial
  probe
  misc_feature (1)..(25): SEQ ID NO: 3974; WAN024GKL; Start 715; Stop 739
tattatgggaacaaagacgaaacaa

SEQ ID NO: 369112 - DNA, 25 bp, Artificial
  probe
  misc_feature (1)..(25): SEQ ID NO: 3974; WAN024GKL; Start 714; Stop 738
ttattatgggaacaaagacgaaaca

SEQ ID NO: 369113 - DNA, 25 bp, Artificial
  probe
  misc_feature (1)..(25): SEQ ID NO: 3974; WAN024GKL; Start 894; Stop 918
tggttatgtaactaatacgagagaa

SEQ ID NO: 369114 - DNA, 25 bp, Artificial
  probe
  misc_feature (1)..(25): SEQ ID NO: 3974; WAN024GKL; Start 713; Stop 737
cttattatgggaacaaagacgaaac

SEQ ID NO: 369115 - DNA, 25 bp, Artificial
  probe
  misc_feature (1)..(25): SEQ ID NO: 3974; WAN024GKL; Start 717; Stop 741
ttatgggaacaaagacgaaacaacc

SEQ ID NO: 369116 - DNA, 25 bp, Artificial
  probe
  misc_feature (1)..(25): SEQ ID NO: 3974; WAN024GKL; Start 891; Stop 915
atctggttatgtaactaatacgaga

SEQ ID NO: 369117 - DNA, 25 bp, Artificial
  probe
  misc_feature (1)..(25): SEQ ID NO: 3974; WAN024GKL; Start 718; Stop 742
tatgggaacaaagacgaaacaacct

SEQ ID NO: 369118 - DNA, 25 bp, Artificial
  probe
  misc_feature (1)..(25): SEQ ID NO: 3974; WAN024GKL; Start 724; Stop 748
aacaaagacgaaacaacctcttatc

SEQ ID NO: 369119 - DNA, 25 bp, Artificial
  probe
  misc_feature (1)..(25): SEQ ID NO: 3974; WAN024GKL; Start 723; Stop 747
gaacaaagacgaaacaacctcttat

SEQ ID NO: 369120 - DNA, 25 bp, Artificial
  probe
  misc_feature (1)..(25): SEQ ID NO: 3974; WAN024GKL; Start 710; Stop 734
actcttattatgggaacaaagacga

SEQ ID NO: 369121 - DNA, 25 bp, Artificial
  probe
  misc_feature (1)..(25): SEQ ID NO: 3974; WAN024GKL; Start 895; Stop 919
ggttatgtaactaatacgagagaat

SEQ ID NO: 369122 - DNA, 25 bp, Artificial
  probe
  misc_feature (1)..(25): SEQ ID NO: 3974; WAN024GKL; Start 700; Stop 724
ggagatgataactcttattatggga

SEQ ID NO: 369123 - DNA, 25 bp, Artificial
  probe
  misc_feature (1)..(25): SEQ ID NO: 3974; WAN024GKL; Start 709; Stop 733
aactcttattatgggaacaaagacg

SEQ ID NO: 369124 - DNA, 25 bp, Artificial
  probe
  misc_feature (1)..(25): SEQ ID NO: 3974; WAN024GKL; Start 726; Stop 750
caaagacgaaacaacctcttatcct

SEQ ID NO: 369125 - DNA, 25 bp, Artificial
  probe
  misc_feature (1)..(25): SEQ ID NO: 3974; WAN024GKL; Start 699; Stop 723
aggagatgataactcttattatggg

SEQ ID NO: 369126 - DNA, 25 bp, Artificial
  probe
  misc_feature (1)..(25): SEQ ID NO: 3974; WAN024GKL; Start 711; Stop 735
ctcttattatgggaacaaagacgaa

SEQ ID NO: 369127 - DNA, 25 bp, Artificial
  probe
  misc_feature (1)..(25): SEQ ID NO: 3974; WAN024GKL; Start 725; Stop 749
acaaagacgaaacaacctcttatcc

SEQ ID NO: 369128 - DNA, 25 bp, Artificial
  probe
  misc_feature (1)..(25): SEQ ID NO: 3974; WAN024GKL; Start 1140; Stop 1164
aaaagatgctatcaaagggaaaaca

SEQ ID NO: 369129 - DNA, 25 bp, Artificial
  probe
  misc_feature (1)..(25): SEQ ID NO: 3974; WAN024GKL; Start 1135; Stop 1159
gattcaaaagatgctatcaaaggga

SEQ ID NO: 369130 - DNA, 25 bp, Artificial
  probe
  misc_feature (1)..(25): SEQ ID NO: 3974; WAN024GKL; Start 1139; Stop 1163
caaaagatgctatcaaagggaaaac

SEQ ID NO: 369131 - DNA, 25 bp, Artificial
  probe
  misc_feature (1)..(25): SEQ ID NO: 3974; WAN024GKL; Start 722; Stop 746
ggaacaaagacgaaacaacctctta

SEQ ID NO: 369132 - DNA, 25 bp, Artificial
  probe
  misc_feature (1)..(25): SEQ ID NO: 3974; WAN024GKL; Start 1138; Stop 1162
tcaaaagatgctatcaaagggaaaa

SEQ ID NO: 369133 - DNA, 25 bp, Artificial
  probe
  misc_feature (1)..(25): SEQ ID NO: 3974; WAN024GKL; Start 712; Stop 736
tcttattatgggaacaaagacgaaa

SEQ ID NO: 369134 - DNA, 25 bp, Artificial
  probe
  misc_feature (1)..(25): SEQ ID NO: 3974; WAN024GKL; Start 1142; Stop 1166
aagatgctatcaaagggaaaacatt

SEQ ID NO: 369135 - DNA, 25 bp, Artificial
  probe
  misc_feature (1)..(25): SEQ ID NO: 3974; WAN024GKL; Start 1141; Stop 1165
aaagatgctatcaaagggaaaacat

SEQ ID NO: 369136 - DNA, 25 bp, Artificial
  probe
  misc_feature (1)..(25): SEQ ID NO: 3974; WAN024GKL; Start 1137; Stop 1161
ttcaaaagatgctatcaaagggaaa

SEQ ID NO: 369137 - DNA, 25 bp, Artificial
  probe
  misc_feature (1)..(25): SEQ ID NO: 3974; WAN024GKL; Start 719; Stop 743
atgggaacaaagacgaaacaacctc

SEQ ID NO: 369138 - DNA, 25 bp, Artificial
  probe
  misc_feature (1)..(25): SEQ ID NO: 3974; WAN024GKL; Start 1136; Stop 1160
attcaaaagatgctatcaaagggaa

SEQ ID NO: 369139 - DNA, 25 bp, Artificial
  probe
  misc_feature (1)..(25): SEQ ID NO: 3974; WAN024GKL; Start 698; Stop 722
aaggagatgataactcttattatgg

SEQ ID NO: 369140 - DNA, 25 bp, Artificial
  probe
  misc_feature (1)..(25): SEQ ID NO: 3974; WAN024GKL; Start 890; Stop 914
tatctggttatgtaactaatacgag

SEQ ID NO: 369141 - DNA, 25 bp, Artificial
  probe
  misc_feature (1)..(25): SEQ ID NO: 3975; WAN024FR4; Start 209; Stop 233
agaatagaggatatggagcaggtaa

SEQ ID NO: 369142 - DNA, 25 bp, Artificial
  probe
  misc_feature (1)..(25): SEQ ID NO: 3975; WAN024FR4; Start 205; Stop 229
gatgagaatagaggatatggagcag

SEQ ID NO: 369143 - DNA, 25 bp, Artificial
  probe
  misc_feature (1)..(25): SEQ ID NO: 3975; WAN024FR4; Start 203; Stop 227
ctgatgagaatagaggatatggagc

SEQ ID NO: 369144 - DNA, 25 bp, Artificial
  probe
  misc_feature (1)..(25): SEQ ID NO: 3975; WAN024FR4; Start 208; Stop 232
gagaatagaggatatggagcaggta

SEQ ID NO: 369145 - DNA, 25 bp, Artificial
  probe
  misc_feature (1)..(25): SEQ ID NO: 3975; WAN024FR4; Start 204; Stop 228
tgatgagaatagaggatatggagca

SEQ ID NO: 369146 - DNA, 25 bp, Artificial
  probe
  misc_feature (1)..(25): SEQ ID NO: 3975; WAN024FR4; Start 210; Stop 234
gaatagaggatatggagcaggtaat

SEQ ID NO: 369147 - DNA, 25 bp, Artificial
  probe
  misc_feature (1)..(25): SEQ ID NO: 3975; WAN024FR4; Start 206; Stop 230
atgagaatagaggatatggagcagg

SEQ ID NO: 369148 - DNA, 25 bp, Artificial
  probe
  misc_feature (1)..(25): SEQ ID NO: 3975; WAN024FR4; Start 142; Stop 166
acggacaattcaatagaactactca

SEQ ID NO: 369149 - DNA, 25 bp, Artificial
  probe
  misc_feature (1)..(25): SEQ ID NO: 3975; WAN024FR4; Start 143; Stop 167
cggacaattcaatagaactactcaa

SEQ ID NO: 369150 - DNA, 25 bp, Artificial
  probe
  misc_feature (1)..(25): SEQ ID NO: 3975; WAN024FR4; Start 202; Stop 226
tctgatgagaatagaggatatggag

SEQ ID NO: 369151 - DNA, 25 bp, Artificial
  probe
  misc_feature (1)..(25): SEQ ID NO: 3975; WAN024FR4; Start 214; Stop 238
agaggatatggagcaggtaataata

SEQ ID NO: 369152 - DNA, 25 bp, Artificial
  probe
  misc_feature (1)..(25): SEQ ID NO: 3975; WAN024FR4; Start 213; Stop 237
tagaggatatggagcaggtaataat

SEQ ID NO: 369153 - DNA, 25 bp, Artificial
  probe
  misc_feature (1)..(25): SEQ ID NO: 3975; WAN024FR4; Start 212; Stop 236
atagaggatatggagcaggtaataa

SEQ ID NO: 369154 - DNA, 25 bp, Artificial
  probe
  misc_feature (1)..(25): SEQ ID NO: 3975; WAN024FR4; Start 211; Stop 235
aatagaggatatggagcaggtaata

SEQ ID NO: 369155 - DNA, 25 bp, Artificial
  probe
  misc_feature (1)..(25): SEQ ID NO: 3975; WAN024FR4; Start 524; Stop 548
cgattgtagattgtgtagcaggttg

SEQ ID NO: 369156 - DNA, 25 bp, Artificial
  probe
  misc_feature (1)..(25): SEQ ID NO: 3975; WAN024FR4; Start 207; Stop 231
tgagaatagaggatatggagcaggt

SEQ ID NO: 369157 - DNA, 25 bp, Artificial
  probe
  misc_feature (1)..(25): SEQ ID NO: 3975; WAN024FR4; Start 141; Stop 165
tacggacaattcaatagaactactc

SEQ ID NO: 369158 - DNA, 25 bp, Artificial
  probe
  misc_feature (1)..(25): SEQ ID NO: 3975; WAN024FR4; Start 140; Stop 164
ctacggacaattcaatagaactact

SEQ ID NO: 369159 - DNA, 25 bp, Artificial
  probe
  misc_feature (1)..(25): SEQ ID NO: 3975; WAN024FR4; Start 126; Stop 150
agtggataataattctacggacaat

SEQ ID NO: 369160 - DNA, 25 bp, Artificial
  probe
  misc_feature (1)..(25): SEQ ID NO: 3975; WAN024FR4; Start 144; Stop 168
ggacaattcaatagaactactcaag

SEQ ID NO: 369161 - DNA, 25 bp, Artificial
  probe
  misc_feature (1)..(25): SEQ ID NO: 3975; WAN024FR4; Start 215; Stop 239
gaggatatggagcaggtaataatat

SEQ ID NO: 369162 - DNA, 25 bp, Artificial
  probe
  misc_feature (1)..(25): SEQ ID NO: 3975; WAN024FR4; Start 742; Stop 766
aaatgtaaacgagattgggtgaaat

SEQ ID NO: 369163 - DNA, 25 bp, Artificial
  probe
  misc_feature (1)..(25): SEQ ID NO: 3975; WAN024FR4; Start 295; Stop 319
ccagatatagtcattcccaatcagg

SEQ ID NO: 369164 - DNA, 25 bp, Artificial
  probe
  misc_feature (1)..(25): SEQ ID NO: 3975; WAN024FR4; Start 294; Stop 318
tccagatatagtcattcccaatcag

SEQ ID NO: 369165 - DNA, 25 bp, Artificial
  probe
  misc_feature (1)..(25): SEQ ID NO: 3975; WAN024FR4; Start 743; Stop 767
aatgtaaacgagattgggtgaaatt

SEQ ID NO: 369166 - DNA, 25 bp, Artificial
  probe
  misc_feature (1)..(25): SEQ ID NO: 3975; WAN024FR4; Start 125; Stop 149
tagtggataataattctacggacaa

SEQ ID NO: 369167 - DNA, 25 bp, Artificial
  probe
  misc_feature (1)..(25): SEQ ID NO: 3975; WAN024FR4; Start 139; Stop 163
tctacggacaattcaatagaactac

SEQ ID NO: 369168 - DNA, 25 bp, Artificial
  probe
  misc_feature (1)..(25): SEQ ID NO: 3975; WAN024FR4; Start 566; Stop 590
ctgatgtaatgaaggaaatcggtta

SEQ ID NO: 369169 - DNA, 25 bp, Artificial
  probe
  misc_feature (1)..(25): SEQ ID NO: 3975; WAN024FR4; Start 293; Stop 317
atccagatatagtcattcccaatca

SEQ ID NO: 369170 - DNA, 25 bp, Artificial
  probe
  misc_feature (1)..(25): SEQ ID NO: 3975; WAN024FR4; Start 565; Stop 589
gctgatgtaatgaaggaaatcggtt

SEQ ID NO: 369171 - DNA, 25 bp, Artificial
  probe
  misc_feature (1)..(25): SEQ ID NO: 3975; WAN024FR4; Start 567; Stop 591
tgatgtaatgaaggaaatcggttat

SEQ ID NO: 369172 - DNA, 25 bp, Artificial
  probe
  misc_feature (1)..(25): SEQ ID NO: 3975; WAN024FR4; Start 893; Stop 917
agaatctgaaaggaaactctagtga

SEQ ID NO: 369173 - DNA, 25 bp, Artificial
  probe
  misc_feature (1)..(25): SEQ ID NO: 3975; WAN024FR4; Start 512; Stop 536
atgatgaaacagcgattgtagattg

SEQ ID NO: 369174 - DNA, 25 bp, Artificial
  probe
  misc_feature (1)..(25): SEQ ID NO: 3976; WAN024C3W; Start 149; Stop 173
aattatcttactatgtgcctgaccg

SEQ ID NO: 369175 - DNA, 25 bp, Artificial
  probe
  misc_feature (1)..(25): SEQ ID NO: 3976; WAN024C3W; Start 150; Stop 174
attatcttactatgtgcctgaccga

SEQ ID NO: 369176 - DNA, 25 bp, Artificial
  probe
  misc_feature (1)..(25): SEQ ID NO: 3976; WAN024C3W; Start 151; Stop 175
ttatcttactatgtgcctgaccgac

SEQ ID NO: 369177 - DNA, 25 bp, Artificial
  probe
  misc_feature (1)..(25): SEQ ID NO: 3976; WAN024C3W; Start 17; Stop 41
catggacaaggtatcctcctcataa

SEQ ID NO: 369178 - DNA, 25 bp, Artificial
  probe
  misc_feature (1)..(25): SEQ ID NO: 3976; WAN024C3W; Start 148; Stop 172
aaattatcttactatgtgcctgacc

SEQ ID NO: 369179 - DNA, 25 bp, Artificial
  probe
  misc_feature (1)..(25): SEQ ID NO: 3976; WAN024C3W; Start 152; Stop 176
tatcttactatgtgcctgaccgaca

SEQ ID NO: 369180 - DNA, 25 bp, Artificial
  probe
  misc_feature (1)..(25): SEQ ID NO: 3976; WAN024C3W; Start 18; Stop 42
atggacaaggtatcctcctcataaa

SEQ ID NO: 369181 - DNA, 25 bp, Artificial
  probe
  misc_feature (1)..(25): SEQ ID NO: 3976; WAN024C3W; Start 19; Stop 43
tggacaaggtatcctcctcataaag

SEQ ID NO: 369182 - DNA, 25 bp, Artificial
  probe
  misc_feature (1)..(25): SEQ ID NO: 3976; WAN024C3W; Start 20; Stop 44
ggacaaggtatcctcctcataaagg

SEQ ID NO: 369183 - DNA, 25 bp, Artificial
  probe
  misc_feature (1)..(25): SEQ ID NO: 3976; WAN024C3W; Start 21; Stop 45
gacaaggtatcctcctcataaaggc

SEQ ID NO: 369184 - DNA, 25 bp, Artificial
  probe
  misc_feature (1)..(25): SEQ ID NO: 3976; WAN024C3W; Start 153; Stop 177
atcttactatgtgcctgaccgacac

SEQ ID NO: 369185 - DNA, 25 bp, Artificial
  probe
  misc_feature (1)..(25): SEQ ID NO: 3976; WAN024C3W; Start 105; Stop 129
gaaatggcaggataaccgtaaacga

SEQ ID NO: 369186 - DNA, 25 bp, Artificial
  probe
  misc_feature (1)..(25): SEQ ID NO: 3976; WAN024C3W; Start 130; Stop 154
ccgcatgttcccctattaaaattat

SEQ ID NO: 369187 - DNA, 25 bp, Artificial
  probe
  misc_feature (1)..(25): SEQ ID NO: 3976; WAN024C3W; Start 129; Stop 153
accgcatgttcccctattaaaatta

SEQ ID NO: 369188 - DNA, 25 bp, Artificial
  probe
  misc_feature (1)..(25): SEQ ID NO: 3976; WAN024C3W; Start 103; Stop 127
gggaaatggcaggataaccgtaaac

SEQ ID NO: 369189 - DNA, 25 bp, Artificial
  probe
  misc_feature (1)..(25): SEQ ID NO: 3976; WAN024C3W; Start 102; Stop 126
agggaaatggcaggataaccgtaaa

SEQ ID NO: 369190 - DNA, 25 bp, Artificial
  probe
  misc_feature (1)..(25): SEQ ID NO: 3976; WAN024C3W; Start 106; Stop 130
aaatggcaggataaccgtaaacgac

SEQ ID NO: 369191 - DNA, 25 bp, Artificial
  probe
  misc_feature (1)..(25): SEQ ID NO: 3976; WAN024C3W; Start 131; Stop 155
cgcatgttcccctattaaaattatc

SEQ ID NO: 369192 - DNA, 25 bp, Artificial
  probe
  misc_feature (1)..(25): SEQ ID NO: 3976; WAN024C3W; Start 128; Stop 152
gaccgcatgttcccctattaaaatt

SEQ ID NO: 369193 - DNA, 25 bp, Artificial
  probe
  misc_feature (1)..(25): SEQ ID NO: 3976; WAN024C3W; Start 22; Stop 46
acaaggtatcctcctcataaaggcg

SEQ ID NO: 369194 - DNA, 25 bp, Artificial
  probe
  misc_feature (1)..(25): SEQ ID NO: 3976; WAN024C3W; Start 147; Stop 171
aaaattatcttactatgtgcctgac

SEQ ID NO: 369195 - DNA, 25 bp, Artificial
  probe
  misc_feature (1)..(25): SEQ ID NO: 3976; WAN024C3W; Start 104; Stop 128
ggaaatggcaggataaccgtaaacg

SEQ ID NO: 369196 - DNA, 25 bp, Artificial
  probe
  misc_feature (1)..(25): SEQ ID NO: 3976; WAN024C3W; Start 101; Stop 125
cagggaaatggcaggataaccgtaa

SEQ ID NO: 369197 - DNA, 25 bp, Artificial
  probe
  misc_feature (1)..(25): SEQ ID NO: 3976; WAN024C3W; Start 132; Stop 156
gcatgttcccctattaaaattatct

SEQ ID NO: 369198 - DNA, 25 bp, Artificial
  probe
  misc_feature (1)..(25): SEQ ID NO: 3976; WAN024C3W; Start 115; Stop 139
gataaccgtaaacgaccgcatgttc

SEQ ID NO: 369199 - DNA, 25 bp, Artificial
  probe
  misc_feature (1)..(25): SEQ ID NO: 3976; WAN024C3W; Start 127; Stop 151
cgaccgcatgttcccctattaaaat

SEQ ID NO: 369200 - DNA, 25 bp, Artificial
  probe
  misc_feature (1)..(25): SEQ ID NO: 3976; WAN024C3W; Start 146; Stop 170
taaaattatcttactatgtgcctga

SEQ ID NO: 369201 - DNA, 25 bp, Artificial
  probe
  misc_feature (1)..(25): SEQ ID NO: 3976; WAN024C3W; Start 123; Stop 147
taaacgaccgcatgttcccctatta

SEQ ID NO: 369202 - DNA, 25 bp, Artificial
  probe
  misc_feature (1)..(25): SEQ ID NO: 3976; WAN024C3W; Start 16; Stop 40
ccatggacaaggtatcctcctcata

SEQ ID NO: 369203 - DNA, 25 bp, Artificial
  probe
  misc_feature (1)..(25): SEQ ID NO: 3976; WAN024C3W; Start 61; Stop 85
caggaactaccttacaggtcacctc

SEQ ID NO: 369204 - DNA, 25 bp, Artificial
  probe
  misc_feature (1)..(25): SEQ ID NO: 3976; WAN024C3W; Start 64; Stop 88
gaactaccttacaggtcacctccac

SEQ ID NO: 369205 - DNA, 25 bp, Artificial
  probe
  misc_feature (1)..(25): SEQ ID NO: 3976; WAN024C3W; Start 145; Stop 169
ttaaaattatcttactatgtgcctg

SEQ ID NO: 369206 - DNA, 25 bp, Artificial
  probe
  misc_feature (1)..(25): SEQ ID NO: 3976; WAN024C3W; Start 126; Stop 150
acgaccgcatgttcccctattaaaa

SEQ ID NO: 369207 - DNA, 25 bp, Artificial
  probe
  misc_feature (1)..(25): SEQ ID NO: 3977; WAN024GJF; Start 47; Stop 71
caatcgcaacaatcgtagaattagt

SEQ ID NO: 369208 - DNA, 25 bp, Artificial
  probe
  misc_feature (1)..(25): SEQ ID NO: 3977; WAN024GJF; Start 52; Stop 76
gcaacaatcgtagaattagtcagag

SEQ ID NO: 369209 - DNA, 25 bp, Artificial
  probe
  misc_feature (1)..(25): SEQ ID NO: 3977; WAN024GJF; Start 48; Stop 72
aatcgcaacaatcgtagaattagtc

SEQ ID NO: 369210 - DNA, 25 bp, Artificial
  probe
  misc_feature (1)..(25): SEQ ID NO: 3977; WAN024GJF; Start 417; Stop 441
agaggacgagttgactatggaatat

SEQ ID NO: 369211 - DNA, 25 bp, Artificial
  probe
  misc_feature (1)..(25): SEQ ID NO: 3977; WAN024GJF; Start 418; Stop 442
gaggacgagttgactatggaatata

SEQ ID NO: 369212 - DNA, 25 bp, Artificial
  probe
  misc_feature (1)..(25): SEQ ID NO: 3977; WAN024GJF; Start 416; Stop 440
aagaggacgagttgactatggaata

SEQ ID NO: 369213 - DNA, 25 bp, Artificial
  probe
  misc_feature (1)..(25): SEQ ID NO: 3977; WAN024GJF; Start 49; Stop 73
atcgcaacaatcgtagaattagtca

SEQ ID NO: 369214 - DNA, 25 bp, Artificial
  probe
  misc_feature (1)..(25): SEQ ID NO: 3977; WAN024GJF; Start 59; Stop 83
tcgtagaattagtcagagaagttgt

SEQ ID NO: 369215 - DNA, 25 bp, Artificial
  probe
  misc_feature (1)..(25): SEQ ID NO: 3977; WAN024GJF; Start 77; Stop 101
aagttgtagaacctgtcatagaagc

SEQ ID NO: 369216 - DNA, 25 bp, Artificial
  probe
  misc_feature (1)..(25): SEQ ID NO: 3977; WAN024GJF; Start 74; Stop 98
gagaagttgtagaacctgtcataga

SEQ ID NO: 369217 - DNA, 25 bp, Artificial
  probe
  misc_feature (1)..(25): SEQ ID NO: 3977; WAN024GJF; Start 73; Stop 97
agagaagttgtagaacctgtcatag

SEQ ID NO: 369218 - DNA, 25 bp, Artificial
  probe
  misc_feature (1)..(25): SEQ ID NO: 3977; WAN024GJF; Start 11; Stop 35
gaatatcttcgcctcttgcttatga

SEQ ID NO: 369219 - DNA, 25 bp, Artificial
  probe
  misc_feature (1)..(25): SEQ ID NO: 3977; WAN024GJF; Start 75; Stop 99
agaagttgtagaacctgtcatagaa

SEQ ID NO: 369220 - DNA, 25 bp, Artificial
  probe
  misc_feature (1)..(25): SEQ ID NO: 3977; WAN024GJF; Start 51; Stop 75
cgcaacaatcgtagaattagtcaga

SEQ ID NO: 369221 - DNA, 25 bp, Artificial
  probe
  misc_feature (1)..(25): SEQ ID NO: 3977; WAN024GJF; Start 50; Stop 74
tcgcaacaatcgtagaattagtcag

SEQ ID NO: 369222 - DNA, 25 bp, Artificial
  probe
  misc_feature (1)..(25): SEQ ID NO: 3977; WAN024GJF; Start 46; Stop 70
gcaatcgcaacaatcgtagaattag

SEQ ID NO: 369223 - DNA, 25 bp, Artificial
  probe
  misc_feature (1)..(25): SEQ ID NO: 3977; WAN024GJF; Start 76; Stop 100
gaagttgtagaacctgtcatagaag

SEQ ID NO: 369224 - DNA, 25 bp, Artificial
  probe
  misc_feature (1)..(25): SEQ ID NO: 3977; WAN024GJF; Start 66; Stop 90
attagtcagagaagttgtagaacct

SEQ ID NO: 369225 - DNA, 25 bp, Artificial
  probe
  misc_feature (1)..(25): SEQ ID NO: 3977; WAN024GJF; Start 430; Stop 454
actatggaatatatggacaagacgc

SEQ ID NO: 369226 - DNA, 25 bp, Artificial
  probe
  misc_feature (1)..(25): SEQ ID NO: 3977; WAN024GJF; Start 53; Stop 77
caacaatcgtagaattagtcagaga

SEQ ID NO: 369227 - DNA, 25 bp, Artificial
  probe
  misc_feature (1)..(25): SEQ ID NO: 3977; WAN024GJF; Start 12; Stop 36
aatatcttcgcctcttgcttatgag

SEQ ID NO: 369228 - DNA, 25 bp, Artificial
  probe
  misc_feature (1)..(25): SEQ ID NO: 3977; WAN024GJF; Start 10; Stop 34
ggaatatcttcgcctcttgcttatg

SEQ ID NO: 369229 - DNA, 25 bp, Artificial
  probe
  misc_feature (1)..(25): SEQ ID NO: 3977; WAN024GJF; Start 415; Stop 439
gaagaggacgagttgactatggaat

SEQ ID NO: 369230 - DNA, 25 bp, Artificial
  probe
  misc_feature (1)..(25): SEQ ID NO: 3977; WAN024GJF; Start 58; Stop 82
atcgtagaattagtcagagaagttg

SEQ ID NO: 369231 - DNA, 25 bp, Artificial
  probe
  misc_feature (1)..(25): SEQ ID NO: 3977; WAN024GJF; Start 56; Stop 80
caatcgtagaattagtcagagaagt

SEQ ID NO: 369232 - DNA, 25 bp, Artificial
  probe
  misc_feature (1)..(25): SEQ ID NO: 3977; WAN024GJF; Start 55; Stop 79
acaatcgtagaattagtcagagaag

SEQ ID NO: 369233 - DNA, 25 bp, Artificial
  probe
  misc_feature (1)..(25): SEQ ID NO: 3977; WAN024GJF; Start 422; Stop 446
acgagttgactatggaatatatgga

SEQ ID NO: 369234 - DNA, 25 bp, Artificial
  probe
  misc_feature (1)..(25): SEQ ID NO: 3977; WAN024GJF; Start 72; Stop 96
cagagaagttgtagaacctgtcata

SEQ ID NO: 369235 - DNA, 25 bp, Artificial
  probe
  misc_feature (1)..(25): SEQ ID NO: 3977; WAN024GJF; Start 67; Stop 91
ttagtcagagaagttgtagaacctg

SEQ ID NO: 369236 - DNA, 25 bp, Artificial
  probe
  misc_feature (1)..(25): SEQ ID NO: 3977; WAN024GJF; Start 429; Stop 453
gactatggaatatatggacaagacg

SEQ ID NO: 369237 - DNA, 25 bp, Artificial
  probe
  misc_feature (1)..(25): SEQ ID NO: 3977; WAN024GJF; Start 423; Stop 447
cgagttgactatggaatatatggac

SEQ ID NO: 369238 - DNA, 25 bp, Artificial
  probe
  misc_feature (1)..(25): SEQ ID NO: 3977; WAN024GJF; Start 421; Stop 445
gacgagttgactatggaatatatgg

SEQ ID NO: 369239 - DNA, 25 bp, Artificial
  probe
  misc_feature (1)..(25): SEQ ID NO: 3977; WAN024GJF; Start 420; Stop 444
ggacgagttgactatggaatatatg

SEQ ID NO: 369240 - DNA, 25 bp, Artificial
  probe
  misc_feature (1)..(25): SEQ ID NO: 3978; WAN024FWM; Start 362; Stop 386
ttgatactggagttattggagcatt

SEQ ID NO: 369241 - DNA, 25 bp, Artificial
  probe
  misc_feature (1)..(25): SEQ ID NO: 3978; WAN024FWM; Start 361; Stop 385
attgatactggagttattggagcat

SEQ ID NO: 369242 - DNA, 25 bp, Artificial
  probe
  misc_feature (1)..(25): SEQ ID NO: 3978; WAN024FWM; Start 474; Stop 498
cttcgttcctattgttacatcgttc

SEQ ID NO: 369243 - DNA, 25 bp, Artificial
  probe
  misc_feature (1)..(25): SEQ ID NO: 3978; WAN024FWM; Start 360; Stop 384
aattgatactggagttattggagca

SEQ ID NO: 369244 - DNA, 25 bp, Artificial
  probe
  misc_feature (1)..(25): SEQ ID NO: 3978; WAN024FWM; Start 492; Stop 516
atcgttctcttctatcttgattggc

SEQ ID NO: 369245 - DNA, 25 bp, Artificial
  probe
  misc_feature (1)..(25): SEQ ID NO: 3978; WAN024FWM; Start 491; Stop 515
catcgttctcttctatcttgattgg

SEQ ID NO: 369246 - DNA, 25 bp, Artificial
  probe
  misc_feature (1)..(25): SEQ ID NO: 3978; WAN024FWM; Start 475; Stop 499
ttcgttcctattgttacatcgttct

SEQ ID NO: 369247 - DNA, 25 bp, Artificial
  probe
  misc_feature (1)..(25): SEQ ID NO: 3978; WAN024FWM; Start 494; Stop 518
cgttctcttctatcttgattggctt

SEQ ID NO: 369248 - DNA, 25 bp, Artificial
  probe
  misc_feature (1)..(25): SEQ ID NO: 3978; WAN024FWM; Start 363; Stop 387
tgatactggagttattggagcatta

SEQ ID NO: 369249 - DNA, 25 bp, Artificial
  probe
  misc_feature (1)..(25): SEQ ID NO: 3978; WAN024FWM; Start 1340; Stop 1364
tagaagatgtagatgcttgtgtgac

SEQ ID NO: 369250 - DNA, 25 bp, Artificial
  probe
  misc_feature (1)..(25): SEQ ID NO: 3978; WAN024FWM; Start 190; Stop 214
gcaggagaggttgtattcagtaatt

SEQ ID NO: 369251 - DNA, 25 bp, Artificial
  probe
  misc_feature (1)..(25): SEQ ID NO: 3978; WAN024FWM; Start 1339; Stop 1363
atagaagatgtagatgcttgtgtga

SEQ ID NO: 369252 - DNA, 25 bp, Artificial
  probe
  misc_feature (1)..(25): SEQ ID NO: 3978; WAN024FWM; Start 480; Stop 504
tcctattgttacatcgttctcttct

SEQ ID NO: 369253 - DNA, 25 bp, Artificial
  probe
  misc_feature (1)..(25): SEQ ID NO: 3978; WAN024FWM; Start 477; Stop 501
cgttcctattgttacatcgttctct

SEQ ID NO: 369254 - DNA, 25 bp, Artificial
  probe
  misc_feature (1)..(25): SEQ ID NO: 3978; WAN024FWM; Start 476; Stop 500
tcgttcctattgttacatcgttctc

SEQ ID NO: 369255 - DNA, 25 bp, Artificial
  probe
  misc_feature (1)..(25): SEQ ID NO: 3978; WAN024FWM; Start 982; Stop 1006
ctatatgttgttcacgcattccttg

SEQ ID NO: 369256 - DNA, 25 bp, Artificial
  probe
  misc_feature (1)..(25): SEQ ID NO: 3978; WAN024FWM; Start 981; Stop 1005
tctatatgttgttcacgcattcctt

SEQ ID NO: 369257 - DNA, 25 bp, Artificial
  probe
  misc_feature (1)..(25): SEQ ID NO: 3978; WAN024FWM; Start 980; Stop 1004
ttctatatgttgttcacgcattcct

SEQ ID NO: 369258 - DNA, 25 bp, Artificial
  probe
  misc_feature (1)..(25): SEQ ID NO: 3978; WAN024FWM; Start 979; Stop 1003
gttctatatgttgttcacgcattcc

SEQ ID NO: 369259 - DNA, 25 bp, Artificial
  probe
  misc_feature (1)..(25): SEQ ID NO: 3978; WAN024FWM; Start 978; Stop 1002
ggttctatatgttgttcacgcattc

SEQ ID NO: 369260 - DNA, 25 bp, Artificial
  probe
  misc_feature (1)..(25): SEQ ID NO: 3978; WAN024FWM; Start 478; Stop 502
gttcctattgttacatcgttctctt

SEQ ID NO: 369261 - DNA, 25 bp, Artificial
  probe
  misc_feature (1)..(25): SEQ ID NO: 3978; WAN024FWM; Start 364; Stop 388
gatactggagttattggagcattag

SEQ ID NO: 369262 - DNA, 25 bp, Artificial
  probe
  misc_feature (1)..(25): SEQ ID NO: 3978; WAN024FWM; Start 490; Stop 514
acatcgttctcttctatcttgattg

SEQ ID NO: 369263 - DNA, 25 bp, Artificial
  probe
  misc_feature (1)..(25): SEQ ID NO: 3978; WAN024FWM; Start 493; Stop 517
tcgttctcttctatcttgattggct

SEQ ID NO: 369264 - DNA, 25 bp, Artificial
  probe
  misc_feature (1)..(25): SEQ ID NO: 3978; WAN024FWM; Start 479; Stop 503
ttcctattgttacatcgttctcttc

SEQ ID NO: 369265 - DNA, 25 bp, Artificial
  probe
  misc_feature (1)..(25): SEQ ID NO: 3978; WAN024FWM; Start 983; Stop 1007
tatatgttgttcacgcattccttga

SEQ ID NO: 369266 - DNA, 25 bp, Artificial
  probe
  misc_feature (1)..(25): SEQ ID NO: 3978; WAN024FWM; Start 486; Stop 510
tgttacatcgttctcttctatcttg

SEQ ID NO: 369267 - DNA, 25 bp, Artificial
  probe
  misc_feature (1)..(25): SEQ ID NO: 3978; WAN024FWM; Start 487; Stop 511
gttacatcgttctcttctatcttga

SEQ ID NO: 369268 - DNA, 25 bp, Artificial
  probe
  misc_feature (1)..(25): SEQ ID NO: 3978; WAN024FWM; Start 1429; Stop 1453
gcagttgatgtcttagaagtgaagg

SEQ ID NO: 369269 - DNA, 25 bp, Artificial
  probe
  misc_feature (1)..(25): SEQ ID NO: 3978; WAN024FWM; Start 120; Stop 144
aaccacgatagcaacttatccaata

SEQ ID NO: 369270 - DNA, 25 bp, Artificial
  probe
  misc_feature (1)..(25): SEQ ID NO: 3978; WAN024FWM; Start 473; Stop 497
gcttcgttcctattgttacatcgtt

SEQ ID NO: 369271 - DNA, 25 bp, Artificial
  probe
  misc_feature (1)..(25): SEQ ID NO: 3978; WAN024FWM; Start 122; Stop 146
ccacgatagcaacttatccaatact

SEQ ID NO: 369272 - DNA, 25 bp, Artificial
  probe
  misc_feature (1)..(25): SEQ ID NO: 3978; WAN024FWM; Start 848; Stop 872
tagcgatgtaccatagtgttcctaa

SEQ ID NO: 369273 - DNA, 25 bp, Artificial
  probe
  misc_feature (1)..(25): SEQ ID NO: 3979; WAN024COF; Start 74; Stop 98
atttccttcacctgtttgatagttg

SEQ ID NO: 369274 - DNA, 25 bp, Artificial
  probe
  misc_feature (1)..(25): SEQ ID NO: 3979; WAN024COF; Start 75; Stop 99
tttccttcacctgtttgatagttgg

SEQ ID NO: 369275 - DNA, 25 bp, Artificial
  probe
  misc_feature (1)..(25): SEQ ID NO: 3979; WAN024COF; Start 84; Stop 108
cctgtttgatagttggttcatctag

SEQ ID NO: 369276 - DNA, 25 bp, Artificial
  probe
  misc_feature (1)..(25): SEQ ID NO: 3979; WAN024COF; Start 73; Stop 97
aatttccttcacctgtttgatagtt

SEQ ID NO: 369277 - DNA, 25 bp, Artificial
  probe
  misc_feature (1)..(25): SEQ ID NO: 3979; WAN024COF; Start 72; Stop 96
taatttccttcacctgtttgatagt

SEQ ID NO: 369278 - DNA, 25 bp, Artificial
  probe
  misc_feature (1)..(25): SEQ ID NO: 3979; WAN024COF; Start 83; Stop 107
acctgtttgatagttggttcatcta

SEQ ID NO: 369279 - DNA, 25 bp, Artificial
  probe
  misc_feature (1)..(25): SEQ ID NO: 3979; WAN024COF; Start 80; Stop 104
ttcacctgtttgatagttggttcat

SEQ ID NO: 369280 - DNA, 25 bp, Artificial
  probe
  misc_feature (1)..(25): SEQ ID NO: 3979; WAN024COF; Start 82; Stop 106
cacctgtttgatagttggttcatct

SEQ ID NO: 369281 - DNA, 25 bp, Artificial
  probe
  misc_feature (1)..(25): SEQ ID NO: 3979; WAN024COF; Start 81; Stop 105
tcacctgtttgatagttggttcatc

SEQ ID NO: 369282 - DNA, 25 bp, Artificial
  probe
  misc_feature (1)..(25): SEQ ID NO: 3979; WAN024COF; Start 79; Stop 103
cttcacctgtttgatagttggttca

SEQ ID NO: 369283 - DNA, 25 bp, Artificial
  probe
  misc_feature (1)..(25): SEQ ID NO: 3979; WAN024COF; Start 69; Stop 93
aaataatttccttcacctgtttgat

SEQ ID NO: 369284 - DNA, 25 bp, Artificial
  probe
  misc_feature (1)..(25): SEQ ID NO: 3979; WAN024COF; Start 89; Stop 113
ttgatagttggttcatctagacctt

SEQ ID NO: 369285 - DNA, 25 bp, Artificial
  probe
  misc_feature (1)..(25): SEQ ID NO: 3979; WAN024COF; Start 78; Stop 102
ccttcacctgtttgatagttggttc

SEQ ID NO: 369286 - DNA, 25 bp, Artificial
  probe
  misc_feature (1)..(25): SEQ ID NO: 3979; WAN024COF; Start 77; Stop 101
tccttcacctgtttgatagttggtt

SEQ ID NO: 369287 - DNA, 25 bp, Artificial
  probe
  misc_feature (1)..(25): SEQ ID NO: 3979; WAN024COF; Start 76; Stop 100
ttccttcacctgtttgatagttggt

SEQ ID NO: 369288 - DNA, 25 bp, Artificial
  probe
  misc_feature (1)..(25): SEQ ID NO: 3979; WAN024COF; Start 71; Stop 95
ataatttccttcacctgtttgatag

SEQ ID NO: 369289 - DNA, 25 bp, Artificial
  probe
  misc_feature (1)..(25): SEQ ID NO: 3979; WAN024COF; Start 67; Stop 91
cgaaataatttccttcacctgtttg

SEQ ID NO: 369290 - DNA, 25 bp, Artificial
  probe
  misc_feature (1)..(25): SEQ ID NO: 3979; WAN024COF; Start 66; Stop 90
tcgaaataatttccttcacctgttt

SEQ ID NO: 369291 - DNA, 25 bp, Artificial
  probe
  misc_feature (1)..(25): SEQ ID NO: 3979; WAN024COF; Start 70; Stop 94
aataatttccttcacctgtttgata

SEQ ID NO: 369292 - DNA, 25 bp, Artificial
  probe
  misc_feature (1)..(25): SEQ ID NO: 3979; WAN024COF; Start 86; Stop 110
tgtttgatagttggttcatctagac

SEQ ID NO: 369293 - DNA, 25 bp, Artificial
  probe
  misc_feature (1)..(25): SEQ ID NO: 3979; WAN024COF; Start 68; Stop 92
gaaataatttccttcacctgtttga

SEQ ID NO: 369294 - DNA, 25 bp, Artificial
  probe
  misc_feature (1)..(25): SEQ ID NO: 3979; WAN024COF; Start 85; Stop 109
ctgtttgatagttggttcatctaga

SEQ ID NO: 369295 - DNA, 25 bp, Artificial
  probe
  misc_feature (1)..(25): SEQ ID NO: 3979; WAN024COF; Start 87; Stop 111
gtttgatagttggttcatctagacc

SEQ ID NO: 369296 - DNA, 25 bp, Artificial
  probe
  misc_feature (1)..(25): SEQ ID NO: 3979; WAN024COF; Start 90; Stop 114
tgatagttggttcatctagaccttt

SEQ ID NO: 369297 - DNA, 25 bp, Artificial
  probe
  misc_feature (1)..(25): SEQ ID NO: 3979; WAN024COF; Start 88; Stop 112
tttgatagttggttcatctagacct

SEQ ID NO: 369298 - DNA, 25 bp, Artificial
  probe
  misc_feature (1)..(25): SEQ ID NO: 3979; WAN024COF; Start 109; Stop 133
accttttaacaagtcttctaattga

SEQ ID NO: 369299 - DNA, 25 bp, Artificial
  probe
  misc_feature (1)..(25): SEQ ID NO: 3979; WAN024COF; Start 65; Stop 89
ttcgaaataatttccttcacctgtt

SEQ ID NO: 369300 - DNA, 25 bp, Artificial
  probe
  misc_feature (1)..(25): SEQ ID NO: 3979; WAN024COF; Start 108; Stop 132
gaccttttaacaagtcttctaattg

SEQ ID NO: 369301 - DNA, 25 bp, Artificial
  probe
  misc_feature (1)..(25): SEQ ID NO: 3979; WAN024COF; Start 95; Stop 119
gttggttcatctagaccttttaaca

SEQ ID NO: 369302 - DNA, 25 bp, Artificial
  probe
  misc_feature (1)..(25): SEQ ID NO: 3979; WAN024COF; Start 98; Stop 122
ggttcatctagaccttttaacaagt

SEQ ID NO: 369303 - DNA, 25 bp, Artificial
  probe
  misc_feature (1)..(25): SEQ ID NO: 3979; WAN024COF; Start 97; Stop 121
tggttcatctagaccttttaacaag

SEQ ID NO: 369304 - DNA, 25 bp, Artificial
  probe
  misc_feature (1)..(25): SEQ ID NO: 3979; WAN024COF; Start 94; Stop 118
agttggttcatctagaccttttaac

SEQ ID NO: 369305 - DNA, 25 bp, Artificial
  probe
  misc_feature (1)..(25): SEQ ID NO: 3979; WAN024COF; Start 96; Stop 120
ttggttcatctagaccttttaacaa

SEQ ID NO: 369306 - DNA, 25 bp, Artificial
  probe
  misc_feature (1)..(25): SEQ ID NO: 3980; WAN024C7Q; Start 58; Stop 82
cttatcttccttgttagcagcattg

SEQ ID NO: 369307 - DNA, 25 bp, Artificial
  probe
  misc_feature (1)..(25): SEQ ID NO: 3980; WAN024C7Q; Start 59; Stop 83
ttatcttccttgttagcagcattga

SEQ ID NO: 369308 - DNA, 25 bp, Artificial
  probe
  misc_feature (1)..(25): SEQ ID NO: 3980; WAN024C7Q; Start 60; Stop 84
tatcttccttgttagcagcattgac

SEQ ID NO: 369309 - DNA, 25 bp, Artificial
  probe
  misc_feature (1)..(25): SEQ ID NO: 3980; WAN024C7Q; Start 71; Stop 95
ttagcagcattgacaaagaccataa

SEQ ID NO: 369310 - DNA, 25 bp, Artificial
  probe
  misc_feature (1)..(25): SEQ ID NO: 3980; WAN024C7Q; Start 213; Stop 237
taatcaaacggtaaactcggtcaag

SEQ ID NO: 369311 - DNA, 25 bp, Artificial
  probe
  misc_feature (1)..(25): SEQ ID NO: 3980; WAN024C7Q; Start 207; Stop 231
tacttgtaatcaaacggtaaactcg

SEQ ID NO: 369312 - DNA, 25 bp, Artificial
  probe
  misc_feature (1)..(25): SEQ ID NO: 3980; WAN024C7Q; Start 72; Stop 96
tagcagcattgacaaagaccataag

SEQ ID NO: 369313 - DNA, 25 bp, Artificial
  probe
  misc_feature (1)..(25): SEQ ID NO: 3980; WAN024C7Q; Start 212; Stop 236
gtaatcaaacggtaaactcggtcaa

SEQ ID NO: 369314 - DNA, 25 bp, Artificial
  probe
  misc_feature (1)..(25): SEQ ID NO: 3980; WAN024C7Q; Start 75; Stop 99
cagcattgacaaagaccataagttg

SEQ ID NO: 369315 - DNA, 25 bp, Artificial
  probe
  misc_feature (1)..(25): SEQ ID NO: 3980; WAN024C7Q; Start 70; Stop 94
gttagcagcattgacaaagaccata

SEQ ID NO: 369316 - DNA, 25 bp, Artificial
  probe
  misc_feature (1)..(25): SEQ ID NO: 3980; WAN024C7Q; Start 61; Stop 85
atcttccttgttagcagcattgaca

SEQ ID NO: 369317 - DNA, 25 bp, Artificial
  probe
  misc_feature (1)..(25): SEQ ID NO: 3980; WAN024C7Q; Start 210; Stop 234
ttgtaatcaaacggtaaactcggtc

SEQ ID NO: 369318 - DNA, 25 bp, Artificial
  probe
  misc_feature (1)..(25): SEQ ID NO: 3980; WAN024C7Q; Start 209; Stop 233
cttgtaatcaaacggtaaactcggt

SEQ ID NO: 369319 - DNA, 25 bp, Artificial
  probe
  misc_feature (1)..(25): SEQ ID NO: 3980; WAN024C7Q; Start 208; Stop 232
acttgtaatcaaacggtaaactcgg

SEQ ID NO: 369320 - DNA, 25 bp, Artificial
  probe
  misc_feature (1)..(25): SEQ ID NO: 3980; WAN024C7Q; Start 57; Stop 81
gcttatcttccttgttagcagcatt

SEQ ID NO: 369321 - DNA, 25 bp, Artificial
  probe
  misc_feature (1)..(25): SEQ ID NO: 3980; WAN024C7Q; Start 74; Stop 98
gcagcattgacaaagaccataagtt

SEQ ID NO: 369322 - DNA, 25 bp, Artificial
  probe
  misc_feature (1)..(25): SEQ ID NO: 3980; WAN024C7Q; Start 211; Stop 235
tgtaatcaaacggtaaactcggtca

SEQ ID NO: 369323 - DNA, 25 bp, Artificial
  probe
  misc_feature (1)..(25): SEQ ID NO: 3980; WAN024C7Q; Start 104; Stop 128
atagctgtgttgaatttgagagact

SEQ ID NO: 369324 - DNA, 25 bp, Artificial
  probe
  misc_feature (1)..(25): SEQ ID NO: 3980; WAN024C7Q; Start 103; Stop 127
aatagctgtgttgaatttgagagac

SEQ ID NO: 369325 - DNA, 25 bp, Artificial
  probe
  misc_feature (1)..(25): SEQ ID NO: 3980; WAN024C7Q; Start 102; Stop 126
caatagctgtgttgaatttgagaga

SEQ ID NO: 369326 - DNA, 25 bp, Artificial
  probe
  misc_feature (1)..(25): SEQ ID NO: 3980; WAN024C7Q; Start 101; Stop 125
gcaatagctgtgttgaatttgagag

SEQ ID NO: 369327 - DNA, 25 bp, Artificial
  probe
  misc_feature (1)..(25): SEQ ID NO: 3980; WAN024C7Q; Start 83; Stop 107
acaaagaccataagttgggcaatag

SEQ ID NO: 369328 - DNA, 25 bp, Artificial
  probe
  misc_feature (1)..(25): SEQ ID NO: 3980; WAN024C7Q; Start 82; Stop 106
gacaaagaccataagttgggcaata

SEQ ID NO: 369329 - DNA, 25 bp, Artificial
  probe
  misc_feature (1)..(25): SEQ ID NO: 3980; WAN024C7Q; Start 105; Stop 129
tagctgtgttgaatttgagagactc

SEQ ID NO: 369330 - DNA, 25 bp, Artificial
  probe
  misc_feature (1)..(25): SEQ ID NO: 3980; WAN024C7Q; Start 73; Stop 97
agcagcattgacaaagaccataagt

SEQ ID NO: 369331 - DNA, 25 bp, Artificial
  probe
  misc_feature (1)..(25): SEQ ID NO: 3980; WAN024C7Q; Start 200; Stop 224
atttctttacttgtaatcaaacggt

SEQ ID NO: 369332 - DNA, 25 bp, Artificial
  probe
  misc_feature (1)..(25): SEQ ID NO: 3980; WAN024C7Q; Start 76; Stop 100
agcattgacaaagaccataagttgg

SEQ ID NO: 369333 - DNA, 25 bp, Artificial
  probe
  misc_feature (1)..(25): SEQ ID NO: 3980; WAN024C7Q; Start 100; Stop 124
ggcaatagctgtgttgaatttgaga

SEQ ID NO: 369334 - DNA, 25 bp, Artificial
  probe
  misc_feature (1)..(25): SEQ ID NO: 3980; WAN024C7Q; Start 56; Stop 80
agcttatcttccttgttagcagcat

SEQ ID NO: 369335 - DNA, 25 bp, Artificial
  probe
  misc_feature (1)..(25): SEQ ID NO: 3980; WAN024C7Q; Start 206; Stop 230
ttacttgtaatcaaacggtaaactc

SEQ ID NO: 369336 - DNA, 25 bp, Artificial
  probe
  misc_feature (1)..(25): SEQ ID NO: 3980; WAN024C7Q; Start 201; Stop 225
tttctttacttgtaatcaaacggta

SEQ ID NO: 369337 - DNA, 25 bp, Artificial
  probe
  misc_feature (1)..(25): SEQ ID NO: 3980; WAN024C7Q; Start 214; Stop 238
aatcaaacggtaaactcggtcaagg

SEQ ID NO: 369338 - DNA, 25 bp, Artificial
  probe
  misc_feature (1)..(25): SEQ ID NO: 3980; WAN024C7Q; Start 84; Stop 108
caaagaccataagttgggcaatagc

SEQ ID NO: 369339 - DNA, 25 bp, Artificial
  probe
  misc_feature (1)..(25): SEQ ID NO: 3981; WAN024FTB; Start 444; Stop 468
atatcgtgccttagatgtagatgtg

SEQ ID NO: 369340 - DNA, 25 bp, Artificial
  probe
  misc_feature (1)..(25): SEQ ID NO: 3981; WAN024FTB; Start 443; Stop 467
aatatcgtgccttagatgtagatgt

SEQ ID NO: 369341 - DNA, 25 bp, Artificial
  probe
  misc_feature (1)..(25): SEQ ID NO: 3981; WAN024FTB; Start 810; Stop 834
tgaggagacagatattattcgtgaa

SEQ ID NO: 369342 - DNA, 25 bp, Artificial
  probe
  misc_feature (1)..(25): SEQ ID NO: 3981; WAN024FTB; Start 445; Stop 469
tatcgtgccttagatgtagatgtga

SEQ ID NO: 369343 - DNA, 25 bp, Artificial
  probe
  misc_feature (1)..(25): SEQ ID NO: 3981; WAN024FTB; Start 809; Stop 833
atgaggagacagatattattcgtga

SEQ ID NO: 369344 - DNA, 25 bp, Artificial
  probe
  misc_feature (1)..(25): SEQ ID NO: 3981; WAN024FTB; Start 861; Stop 885
attggcgagaataagcactgttata

SEQ ID NO: 369345 - DNA, 25 bp, Artificial
  probe
  misc_feature (1)..(25): SEQ ID NO: 3981; WAN024FTB; Start 442; Stop 466
gaatatcgtgccttagatgtagatg

SEQ ID NO: 369346 - DNA, 25 bp, Artificial
  probe
  misc_feature (1)..(25): SEQ ID NO: 3981; WAN024FTB; Start 460; Stop 484
gtagatgtgacagaattgaatcgta

SEQ ID NO: 369347 - DNA, 25 bp, Artificial
  probe
  misc_feature (1)..(25): SEQ ID NO: 3981; WAN024FTB; Start 860; Stop 884
aattggcgagaataagcactgttat

SEQ ID NO: 369348 - DNA, 25 bp, Artificial
  probe
  misc_feature (1)..(25): SEQ ID NO: 3981; WAN024FTB; Start 808; Stop 832
aatgaggagacagatattattcgtg

SEQ ID NO: 369349 - DNA, 25 bp, Artificial
  probe
  misc_feature (1)..(25): SEQ ID NO: 3981; WAN024FTB; Start 836; Stop 860
ttatcagcattccacataagcataa

SEQ ID NO: 369350 - DNA, 25 bp, Artificial
  probe
  misc_feature (1)..(25): SEQ ID NO: 3981; WAN024FTB; Start 451; Stop 475
gccttagatgtagatgtgacagaat

SEQ ID NO: 369351 - DNA, 25 bp, Artificial
  probe
  misc_feature (1)..(25): SEQ ID NO: 3981; WAN024FTB; Start 459; Stop 483
tgtagatgtgacagaattgaatcgt

SEQ ID NO: 369352 - DNA, 25 bp, Artificial
  probe
  misc_feature (1)..(25): SEQ ID NO: 3981; WAN024FTB; Start 458; Stop 482
atgtagatgtgacagaattgaatcg

SEQ ID NO: 369353 - DNA, 25 bp, Artificial
  probe
  misc_feature (1)..(25): SEQ ID NO: 3981; WAN024FTB; Start 450; Stop 474
tgccttagatgtagatgtgacagaa

SEQ ID NO: 369354 - DNA, 25 bp, Artificial
  probe
  misc_feature (1)..(25): SEQ ID NO: 3981; WAN024FTB; Start 811; Stop 835
gaggagacagatattattcgtgaat

SEQ ID NO: 369355 - DNA, 25 bp, Artificial
  probe
  misc_feature (1)..(25): SEQ ID NO: 3981; WAN024FTB; Start 51; Stop 75
atacattggagaacagatagactct

SEQ ID NO: 369356 - DNA, 25 bp, Artificial
  probe
  misc_feature (1)..(25): SEQ ID NO: 3981; WAN024FTB; Start 446; Stop 470
atcgtgccttagatgtagatgtgac

SEQ ID NO: 369357 - DNA, 25 bp, Artificial
  probe
  misc_feature (1)..(25): SEQ ID NO: 3981; WAN024FTB; Start 862; Stop 886
ttggcgagaataagcactgttataa

SEQ ID NO: 369358 - DNA, 25 bp, Artificial
  probe
  misc_feature (1)..(25): SEQ ID NO: 3981; WAN024FTB; Start 462; Stop 486
agatgtgacagaattgaatcgtata

SEQ ID NO: 369359 - DNA, 25 bp, Artificial
  probe
  misc_feature (1)..(25): SEQ ID NO: 3981; WAN024FTB; Start 461; Stop 485
tagatgtgacagaattgaatcgtat

SEQ ID NO: 369360 - DNA, 25 bp, Artificial
  probe
  misc_feature (1)..(25): SEQ ID NO: 3981; WAN024FTB; Start 23; Stop 47
ttatgatggcaacttataatggagc

SEQ ID NO: 369361 - DNA, 25 bp, Artificial
  probe
  misc_feature (1)..(25): SEQ ID NO: 3981; WAN024FTB; Start 26; Stop 50
tgatggcaacttataatggagctaa

SEQ ID NO: 369362 - DNA, 25 bp, Artificial
  probe
  misc_feature (1)..(25): SEQ ID NO: 3981; WAN024FTB; Start 25; Stop 49
atgatggcaacttataatggagcta

SEQ ID NO: 369363 - DNA, 25 bp, Artificial
  probe
  misc_feature (1)..(25): SEQ ID NO: 3981; WAN024FTB; Start 24; Stop 48
tatgatggcaacttataatggagct

SEQ ID NO: 369364 - DNA, 25 bp, Artificial
  probe
  misc_feature (1)..(25): SEQ ID NO: 3981; WAN024FTB; Start 449; Stop 473
gtgccttagatgtagatgtgacaga

SEQ ID NO: 369365 - DNA, 25 bp, Artificial
  probe
  misc_feature (1)..(25): SEQ ID NO: 3981; WAN024FTB; Start 812; Stop 836
aggagacagatattattcgtgaatt

SEQ ID NO: 369366 - DNA, 25 bp, Artificial
  probe
  misc_feature (1)..(25): SEQ ID NO: 3981; WAN024FTB; Start 452; Stop 476
ccttagatgtagatgtgacagaatt

SEQ ID NO: 369367 - DNA, 25 bp, Artificial
  probe
  misc_feature (1)..(25): SEQ ID NO: 3981; WAN024FTB; Start 50; Stop 74
aatacattggagaacagatagactc

SEQ ID NO: 369368 - DNA, 25 bp, Artificial
  probe
  misc_feature (1)..(25): SEQ ID NO: 3981; WAN024FTB; Start 52; Stop 76
tacattggagaacagatagactcta

SEQ ID NO: 369369 - DNA, 25 bp, Artificial
  probe
  misc_feature (1)..(25): SEQ ID NO: 3981; WAN024FTB; Start 456; Stop 480
agatgtagatgtgacagaattgaat

SEQ ID NO: 369370 - DNA, 25 bp, Artificial
  probe
  misc_feature (1)..(25): SEQ ID NO: 3981; WAN024FTB; Start 580; Stop 604
gattggtggataagtttagttgctg

SEQ ID NO: 369371 - DNA, 25 bp, Artificial
  probe
  misc_feature (1)..(25): SEQ ID NO: 3981; WAN024FTB; Start 457; Stop 481
gatgtagatgtgacagaattgaatc

SEQ ID NO: 369372 - DNA, 25 bp, Artificial
  probe
  misc_feature (1)..(25): SEQ ID NO: 3982; WAN024FV7; Start 693; Stop 717
ttggaagaatcataatggagtggtt

SEQ ID NO: 369373 - DNA, 25 bp, Artificial
  probe
  misc_feature (1)..(25): SEQ ID NO: 3982; WAN024FV7; Start 692; Stop 716
attggaagaatcataatggagtggt

SEQ ID NO: 369374 - DNA, 25 bp, Artificial
  probe
  misc_feature (1)..(25): SEQ ID NO: 3982; WAN024FV7; Start 694; Stop 718
tggaagaatcataatggagtggttg

SEQ ID NO: 369375 - DNA, 25 bp, Artificial
  probe
  misc_feature (1)..(25): SEQ ID NO: 3982; WAN024FV7; Start 539; Stop 563
ttcctgcctatatgttagattctga

SEQ ID NO: 369376 - DNA, 25 bp, Artificial
  probe
  misc_feature (1)..(25): SEQ ID NO: 3982; WAN024FV7; Start 540; Stop 564
tcctgcctatatgttagattctgat

SEQ ID NO: 369377 - DNA, 25 bp, Artificial
  probe
  misc_feature (1)..(25): SEQ ID NO: 3982; WAN024FV7; Start 695; Stop 719
ggaagaatcataatggagtggttga

SEQ ID NO: 369378 - DNA, 25 bp, Artificial
  probe
  misc_feature (1)..(25): SEQ ID NO: 3982; WAN024FV7; Start 167; Stop 191
aattgagaaggaagtataagcagac

SEQ ID NO: 369379 - DNA, 25 bp, Artificial
  probe
  misc_feature (1)..(25): SEQ ID NO: 3982; WAN024FV7; Start 691; Stop 715
tattggaagaatcataatggagtgg

SEQ ID NO: 369380 - DNA, 25 bp, Artificial
  probe
  misc_feature (1)..(25): SEQ ID NO: 3982; WAN024FV7; Start 168; Stop 192
attgagaaggaagtataagcagact

SEQ ID NO: 369381 - DNA, 25 bp, Artificial
  probe
  misc_feature (1)..(25): SEQ ID NO: 3982; WAN024FV7; Start 169; Stop 193
ttgagaaggaagtataagcagacta

SEQ ID NO: 369382 - DNA, 25 bp, Artificial
  probe
  misc_feature (1)..(25): SEQ ID NO: 3982; WAN024FV7; Start 541; Stop 565
cctgcctatatgttagattctgatt

SEQ ID NO: 369383 - DNA, 25 bp, Artificial
  probe
  misc_feature (1)..(25): SEQ ID NO: 3982; WAN024FV7; Start 538; Stop 562
attcctgcctatatgttagattctg

SEQ ID NO: 369384 - DNA, 25 bp, Artificial
  probe
  misc_feature (1)..(25): SEQ ID NO: 3982; WAN024FV7; Start 527; Stop 551
cgagttcagatattcctgcctatat

SEQ ID NO: 369385 - DNA, 25 bp, Artificial
  probe
  misc_feature (1)..(25): SEQ ID NO: 3982; WAN024FV7; Start 170; Stop 194
tgagaaggaagtataagcagactat

SEQ ID NO: 369386 - DNA, 25 bp, Artificial
  probe
  misc_feature (1)..(25): SEQ ID NO: 3982; WAN024FV7; Start 843; Stop 867
tgacgaagtgatgtatggttatatt

SEQ ID NO: 369387 - DNA, 25 bp, Artificial
  probe
  misc_feature (1)..(25): SEQ ID NO: 3982; WAN024FV7; Start 842; Stop 866
ttgacgaagtgatgtatggttatat

SEQ ID NO: 369388 - DNA, 25 bp, Artificial
  probe
  misc_feature (1)..(25): SEQ ID NO: 3982; WAN024FV7; Start 766; Stop 790
cctgaatactggagtaaggtagttc

SEQ ID NO: 369389 - DNA, 25 bp, Artificial
  probe
  misc_feature (1)..(25): SEQ ID NO: 3982; WAN024FV7; Start 529; Stop 553
agttcagatattcctgcctatatgt

SEQ ID NO: 369390 - DNA, 25 bp, Artificial
  probe
  misc_feature (1)..(25): SEQ ID NO: 3982; WAN024FV7; Start 875; Stop 899
agacaccattccataagctaacata

SEQ ID NO: 369391 - DNA, 25 bp, Artificial
  probe
  misc_feature (1)..(25): SEQ ID NO: 3982; WAN024FV7; Start 768; Stop 792
tgaatactggagtaaggtagttcct

SEQ ID NO: 369392 - DNA, 25 bp, Artificial
  probe
  misc_feature (1)..(25): SEQ ID NO: 3982; WAN024FV7; Start 767; Stop 791
ctgaatactggagtaaggtagttcc

SEQ ID NO: 369393 - DNA, 25 bp, Artificial
  probe
  misc_feature (1)..(25): SEQ ID NO: 3982; WAN024FV7; Start 765; Stop 789
tcctgaatactggagtaaggtagtt

SEQ ID NO: 369394 - DNA, 25 bp, Artificial
  probe
  misc_feature (1)..(25): SEQ ID NO: 3982; WAN024FV7; Start 764; Stop 788
ttcctgaatactggagtaaggtagt

SEQ ID NO: 369395 - DNA, 25 bp, Artificial
  probe
  misc_feature (1)..(25): SEQ ID NO: 3982; WAN024FV7; Start 874; Stop 898
cagacaccattccataagctaacat

SEQ ID NO: 369396 - DNA, 25 bp, Artificial
  probe
  misc_feature (1)..(25): SEQ ID NO: 3982; WAN024FV7; Start 845; Stop 869
acgaagtgatgtatggttatattct

SEQ ID NO: 369397 - DNA, 25 bp, Artificial
  probe
  misc_feature (1)..(25): SEQ ID NO: 3982; WAN024FV7; Start 528; Stop 552
gagttcagatattcctgcctatatg

SEQ ID NO: 369398 - DNA, 25 bp, Artificial
  probe
  misc_feature (1)..(25): SEQ ID NO: 3982; WAN024FV7; Start 872; Stop 896
aacagacaccattccataagctaac

SEQ ID NO: 369399 - DNA, 25 bp, Artificial
  probe
  misc_feature (1)..(25): SEQ ID NO: 3982; WAN024FV7; Start 844; Stop 868
gacgaagtgatgtatggttatattc

SEQ ID NO: 369400 - DNA, 25 bp, Artificial
  probe
  misc_feature (1)..(25): SEQ ID NO: 3982; WAN024FV7; Start 871; Stop 895
gaacagacaccattccataagctaa

SEQ ID NO: 369401 - DNA, 25 bp, Artificial
  probe
  misc_feature (1)..(25): SEQ ID NO: 3982; WAN024FV7; Start 862; Stop 886
tatattctcgaacagacaccattcc

SEQ ID NO: 369402 - DNA, 25 bp, Artificial
  probe
  misc_feature (1)..(25): SEQ ID NO: 3982; WAN024FV7; Start 530; Stop 554
gttcagatattcctgcctatatgtt

SEQ ID NO: 369403 - DNA, 25 bp, Artificial
  probe
  misc_feature (1)..(25): SEQ ID NO: 3982; WAN024FV7; Start 876; Stop 900
gacaccattccataagctaacatat

SEQ ID NO: 369404 - DNA, 25 bp, Artificial
  probe
  misc_feature (1)..(25): SEQ ID NO: 3982; WAN024FV7; Start 171; Stop 195
gagaaggaagtataagcagactatt

SEQ ID NO: 369405 - DNA, 25 bp, Artificial
  probe
  misc_feature (1)..(25): SEQ ID NO: 3983; WAN024FOF; Start 725; Stop 749
ttatggcgtatatgacttattggct

SEQ ID NO: 369406 - DNA, 25 bp, Artificial
  probe
  misc_feature (1)..(25): SEQ ID NO: 3983; WAN024FOF; Start 726; Stop 750
tatggcgtatatgacttattggctg

SEQ ID NO: 369407 - DNA, 25 bp, Artificial
  probe
  misc_feature (1)..(25): SEQ ID NO: 3983; WAN024FOF; Start 724; Stop 748
attatggcgtatatgacttattggc

SEQ ID NO: 369408 - DNA, 25 bp, Artificial
  probe
  misc_feature (1)..(25): SEQ ID NO: 3983; WAN024FOF; Start 391; Stop 415
ttacttggtattattcctaacgagc

SEQ ID NO: 369409 - DNA, 25 bp, Artificial
  probe
  misc_feature (1)..(25): SEQ ID NO: 3983; WAN024FOF; Start 730; Stop 754
gcgtatatgacttattggctgacag

SEQ ID NO: 369410 - DNA, 25 bp, Artificial
  probe
  misc_feature (1)..(25): SEQ ID NO: 3983; WAN024FOF; Start 727; Stop 751
atggcgtatatgacttattggctga

SEQ ID NO: 369411 - DNA, 25 bp, Artificial
  probe
  misc_feature (1)..(25): SEQ ID NO: 3983; WAN024FOF; Start 331; Stop 355
ttggtaaggaatacaatgttctgcc

SEQ ID NO: 369412 - DNA, 25 bp, Artificial
  probe
  misc_feature (1)..(25): SEQ ID NO: 3983; WAN024FOF; Start 333; Stop 357
ggtaaggaatacaatgttctgccag

SEQ ID NO: 369413 - DNA, 25 bp, Artificial
  probe
  misc_feature (1)..(25): SEQ ID NO: 3983; WAN024FOF; Start 335; Stop 359
taaggaatacaatgttctgccagat

SEQ ID NO: 369414 - DNA, 25 bp, Artificial
  probe
  misc_feature (1)..(25): SEQ ID NO: 3983; WAN024FOF; Start 336; Stop 360
aaggaatacaatgttctgccagatt

SEQ ID NO: 369415 - DNA, 25 bp, Artificial
  probe
  misc_feature (1)..(25): SEQ ID NO: 3983; WAN024FOF; Start 334; Stop 358
gtaaggaatacaatgttctgccaga

SEQ ID NO: 369416 - DNA, 25 bp, Artificial
  probe
  misc_feature (1)..(25): SEQ ID NO: 3983; WAN024FOF; Start 251; Stop 275
gttatgataatggtaacgcctcctt

SEQ ID NO: 369417 - DNA, 25 bp, Artificial
  probe
  misc_feature (1)..(25): SEQ ID NO: 3983; WAN024FOF; Start 249; Stop 273
aagttatgataatggtaacgcctcc

SEQ ID NO: 369418 - DNA, 25 bp, Artificial
  probe
  misc_feature (1)..(25): SEQ ID NO: 3983; WAN024FOF; Start 393; Stop 417
acttggtattattcctaacgagcta

SEQ ID NO: 369419 - DNA, 25 bp, Artificial
  probe
  misc_feature (1)..(25): SEQ ID NO: 3983; WAN024FOF; Start 392; Stop 416
tacttggtattattcctaacgagct

SEQ ID NO: 369420 - DNA, 25 bp, Artificial
  probe
  misc_feature (1)..(25): SEQ ID NO: 3983; WAN024FOF; Start 246; Stop 270
tgtaagttatgataatggtaacgcc

SEQ ID NO: 369421 - DNA, 25 bp, Artificial
  probe
  misc_feature (1)..(25): SEQ ID NO: 3983; WAN024FOF; Start 247; Stop 271
gtaagttatgataatggtaacgcct

SEQ ID NO: 369422 - DNA, 25 bp, Artificial
  probe
  misc_feature (1)..(25): SEQ ID NO: 3983; WAN024FOF; Start 729; Stop 753
ggcgtatatgacttattggctgaca

SEQ ID NO: 369423 - DNA, 25 bp, Artificial
  probe
  misc_feature (1)..(25): SEQ ID NO: 3983; WAN024FOF; Start 728; Stop 752
tggcgtatatgacttattggctgac

SEQ ID NO: 369424 - DNA, 25 bp, Artificial
  probe
  misc_feature (1)..(25): SEQ ID NO: 3983; WAN024FOF; Start 250; Stop 274
agttatgataatggtaacgcctcct

SEQ ID NO: 369425 - DNA, 25 bp, Artificial
  probe
  misc_feature (1)..(25): SEQ ID NO: 3983; WAN024FOF; Start 394; Stop 418
cttggtattattcctaacgagctag

SEQ ID NO: 369426 - DNA, 25 bp, Artificial
  probe
  misc_feature (1)..(25): SEQ ID NO: 3983; WAN024FOF; Start 468; Stop 492
tcactacacatcatttactccgaat

SEQ ID NO: 369427 - DNA, 25 bp, Artificial
  probe
  misc_feature (1)..(25): SEQ ID NO: 3983; WAN024FOF; Start 466; Stop 490
tttcactacacatcatttactccga

SEQ ID NO: 369428 - DNA, 25 bp, Artificial
  probe
  misc_feature (1)..(25): SEQ ID NO: 3983; WAN024FOF; Start 252; Stop 276
ttatgataatggtaacgcctccttt

SEQ ID NO: 369429 - DNA, 25 bp, Artificial
  probe
  misc_feature (1)..(25): SEQ ID NO: 3983; WAN024FOF; Start 248; Stop 272
taagttatgataatggtaacgcctc

SEQ ID NO: 369430 - DNA, 25 bp, Artificial
  probe
  misc_feature (1)..(25): SEQ ID NO: 3983; WAN024FOF; Start 253; Stop 277
tatgataatggtaacgcctcctttg

SEQ ID NO: 369431 - DNA, 25 bp, Artificial
  probe
  misc_feature (1)..(25): SEQ ID NO: 3983; WAN024FOF; Start 268; Stop 292
gcctcctttgtagcatatactttga

SEQ ID NO: 369432 - DNA, 25 bp, Artificial
  probe
  misc_feature (1)..(25): SEQ ID NO: 3983; WAN024FOF; Start 498; Stop 522
cctgagtatattgctggaatatgtg

SEQ ID NO: 369433 - DNA, 25 bp, Artificial
  probe
  misc_feature (1)..(25): SEQ ID NO: 3983; WAN024FOF; Start 497; Stop 521
tcctgagtatattgctggaatatgt

SEQ ID NO: 369434 - DNA, 25 bp, Artificial
  probe
  misc_feature (1)..(25): SEQ ID NO: 3983; WAN024FOF; Start 863; Stop 887
gaactcatattcaatgggatgcttc

SEQ ID NO: 369435 - DNA, 25 bp, Artificial
  probe
  misc_feature (1)..(25): SEQ ID NO: 3983; WAN024FOF; Start 467; Stop 491
ttcactacacatcatttactccgaa

SEQ ID NO: 369436 - DNA, 25 bp, Artificial
  probe
  misc_feature (1)..(25): SEQ ID NO: 3983; WAN024FOF; Start 269; Stop 293
cctcctttgtagcatatactttgac

SEQ ID NO: 369437 - DNA, 25 bp, Artificial
  probe
  misc_feature (1)..(25): SEQ ID NO: 3983; WAN024FOF; Start 1126; Stop 1150
gatgaaagagaggaaattggagatg

SEQ ID NO: 369438 - DNA, 25 bp, Artificial
  probe
  misc_feature (1)..(25): SEQ ID NO: 3984; WAN024GEU; Start 219; Stop 243
agagcacaaggtagaattggattat

SEQ ID NO: 369439 - DNA, 25 bp, Artificial
  probe
  misc_feature (1)..(25): SEQ ID NO: 3984; WAN024GEU; Start 218; Stop 242
gagagcacaaggtagaattggatta

SEQ ID NO: 369440 - DNA, 25 bp, Artificial
  probe
  misc_feature (1)..(25): SEQ ID NO: 3984; WAN024GEU; Start 135; Stop 159
gatgaagttggaactatctcggatt

SEQ ID NO: 369441 - DNA, 25 bp, Artificial
  probe
  misc_feature (1)..(25): SEQ ID NO: 3984; WAN024GEU; Start 220; Stop 244
gagcacaaggtagaattggattata

SEQ ID NO: 369442 - DNA, 25 bp, Artificial
  probe
  misc_feature (1)..(25): SEQ ID NO: 3984; WAN024GEU; Start 217; Stop 241
agagagcacaaggtagaattggatt

SEQ ID NO: 369443 - DNA, 25 bp, Artificial
  probe
  misc_feature (1)..(25): SEQ ID NO: 3984; WAN024GEU; Start 134; Stop 158
tgatgaagttggaactatctcggat

SEQ ID NO: 369444 - DNA, 25 bp, Artificial
  probe
  misc_feature (1)..(25): SEQ ID NO: 3984; WAN024GEU; Start 221; Stop 245
agcacaaggtagaattggattatat

SEQ ID NO: 369445 - DNA, 25 bp, Artificial
  probe
  misc_feature (1)..(25): SEQ ID NO: 3984; WAN024GEU; Start 216; Stop 240
cagagagcacaaggtagaattggat

SEQ ID NO: 369446 - DNA, 25 bp, Artificial
  probe
  misc_feature (1)..(25): SEQ ID NO: 3984; WAN024GEU; Start 133; Stop 157
ctgatgaagttggaactatctcgga

SEQ ID NO: 369447 - DNA, 25 bp, Artificial
  probe
  misc_feature (1)..(25): SEQ ID NO: 3984; WAN024GEU; Start 114; Stop 138
acgcttatatgatattgaactgatg

SEQ ID NO: 369448 - DNA, 25 bp, Artificial
  probe
  misc_feature (1)..(25): SEQ ID NO: 3984; WAN024GEU; Start 132; Stop 156
actgatgaagttggaactatctcgg

SEQ ID NO: 369449 - DNA, 25 bp, Artificial
  probe
  misc_feature (1)..(25): SEQ ID NO: 3984; WAN024GEU; Start 166; Stop 190
gcagggttgatggataaattagact

SEQ ID NO: 369450 - DNA, 25 bp, Artificial
  probe
  misc_feature (1)..(25): SEQ ID NO: 3984; WAN024GEU; Start 115; Stop 139
cgcttatatgatattgaactgatga

SEQ ID NO: 369451 - DNA, 25 bp, Artificial
  probe
  misc_feature (1)..(25): SEQ ID NO: 3984; WAN024GEU; Start 57; Stop 81
attctatgatgtgcagcaattcctc

SEQ ID NO: 369452 - DNA, 25 bp, Artificial
  probe
  misc_feature (1)..(25): SEQ ID NO: 3984; WAN024GEU; Start 222; Stop 246
gcacaaggtagaattggattatatt

SEQ ID NO: 369453 - DNA, 25 bp, Artificial
  probe
  misc_feature (1)..(25): SEQ ID NO: 3984; WAN024GEU; Start 56; Stop 80
cattctatgatgtgcagcaattcct

SEQ ID NO: 369454 - DNA, 25 bp, Artificial
  probe
  misc_feature (1)..(25): SEQ ID NO: 3984; WAN024GEU; Start 136; Stop 160
atgaagttggaactatctcggattt

SEQ ID NO: 369455 - DNA, 25 bp, Artificial
  probe
  misc_feature (1)..(25): SEQ ID NO: 3984; WAN024GEU; Start 137; Stop 161
tgaagttggaactatctcggattta

SEQ ID NO: 369456 - DNA, 25 bp, Artificial
  probe
  misc_feature (1)..(25): SEQ ID NO: 3984; WAN024GEU; Start 113; Stop 137
aacgcttatatgatattgaactgat

SEQ ID NO: 369457 - DNA, 25 bp, Artificial
  probe
  misc_feature (1)..(25): SEQ ID NO: 3984; WAN024GEU; Start 139; Stop 163
aagttggaactatctcggatttacg

SEQ ID NO: 369458 - DNA, 25 bp, Artificial
  probe
  misc_feature (1)..(25): SEQ ID NO: 3984; WAN024GEU; Start 138; Stop 162
gaagttggaactatctcggatttac

SEQ ID NO: 369459 - DNA, 25 bp, Artificial
  probe
  misc_feature (1)..(25): SEQ ID NO: 3984; WAN024GEU; Start 129; Stop 153
tgaactgatgaagttggaactatct

SEQ ID NO: 369460 - DNA, 25 bp, Artificial
  probe
  misc_feature (1)..(25): SEQ ID NO: 3984; WAN024GEU; Start 131; Stop 155
aactgatgaagttggaactatctcg

SEQ ID NO: 369461 - DNA, 25 bp, Artificial
  probe
  misc_feature (1)..(25): SEQ ID NO: 3984; WAN024GEU; Start 130; Stop 154
gaactgatgaagttggaactatctc

SEQ ID NO: 369462 - DNA, 25 bp, Artificial
  probe
  misc_feature (1)..(25): SEQ ID NO: 3984; WAN024GEU; Start 167; Stop 191
cagggttgatggataaattagacta

SEQ ID NO: 369463 - DNA, 25 bp, Artificial
  probe
  misc_feature (1)..(25): SEQ ID NO: 3984; WAN024GEU; Start 128; Stop 152
ttgaactgatgaagttggaactatc

SEQ ID NO: 369464 - DNA, 25 bp, Artificial
  probe
  misc_feature (1)..(25): SEQ ID NO: 3984; WAN024GEU; Start 127; Stop 151
attgaactgatgaagttggaactat

SEQ ID NO: 369465 - DNA, 25 bp, Artificial
  probe
  misc_feature (1)..(25): SEQ ID NO: 3984; WAN024GEU; Start 125; Stop 149
atattgaactgatgaagttggaact

SEQ ID NO: 369466 - DNA, 25 bp, Artificial
  probe
  misc_feature (1)..(25): SEQ ID NO: 3984; WAN024GEU; Start 123; Stop 147
tgatattgaactgatgaagttggaa

SEQ ID NO: 369467 - DNA, 25 bp, Artificial
  probe
  misc_feature (1)..(25): SEQ ID NO: 3984; WAN024GEU; Start 164; Stop 188
atgcagggttgatggataaattaga

SEQ ID NO: 369468 - DNA, 25 bp, Artificial
  probe
  misc_feature (1)..(25): SEQ ID NO: 3984; WAN024GEU; Start 163; Stop 187
gatgcagggttgatggataaattag

SEQ ID NO: 369469 - DNA, 25 bp, Artificial
  probe
  misc_feature (1)..(25): SEQ ID NO: 3984; WAN024GEU; Start 59; Stop 83
tctatgatgtgcagcaattcctcaa

SEQ ID NO: 369470 - DNA, 25 bp, Artificial
  probe
  misc_feature (1)..(25): SEQ ID NO: 3984; WAN024GEU; Start 58; Stop 82
ttctatgatgtgcagcaattcctca

SEQ ID NO: 369471 - DNA, 25 bp, Artificial
  probe
  misc_feature (1)..(25): SEQ ID NO: 3985; WAN024DZA; Start 100; Stop 124
agtattgaagtgatggctcatagtt

SEQ ID NO: 369472 - DNA, 25 bp, Artificial
  probe
  misc_feature (1)..(25): SEQ ID NO: 3985; WAN024DZA; Start 99; Stop 123
aagtattgaagtgatggctcatagt

SEQ ID NO: 369473 - DNA, 25 bp, Artificial
  probe
  misc_feature (1)..(25): SEQ ID NO: 3985; WAN024DZA; Start 97; Stop 121
agaagtattgaagtgatggctcata

SEQ ID NO: 369474 - DNA, 25 bp, Artificial
  probe
  misc_feature (1)..(25): SEQ ID NO: 3985; WAN024DZA; Start 93; Stop 117
tctgagaagtattgaagtgatggct

SEQ ID NO: 369475 - DNA, 25 bp, Artificial
  probe
  misc_feature (1)..(25): SEQ ID NO: 3985; WAN024DZA; Start 98; Stop 122
gaagtattgaagtgatggctcatag
